United States Patent Application Publication US 2006/0003322 A1 - sequence listing, part 9

SEQ ID NO: 330660 - RNA, 19 nt, Human
agaguucccacaugcaccc

SEQ ID NO: 330661 - RNA, 18 nt, Human
agcugagagaacagcaca

SEQ ID NO: 330662 - RNA, 22 nt, Human
cacaugcacccacugaugugca

SEQ ID NO: 330663 - RNA, 21 nt, Human
caccccaggcauaaacagaaa

SEQ ID NO: 330664 - RNA, 21 nt, Human
cacgcaagggaaggucugcga

SEQ ID NO: 330665 - RNA, 21 nt, Human
cagaucuccccagcaucucau

SEQ ID NO: 330666 - RNA, 22 nt, Human
cagaugauuaccaccgaagccc

SEQ ID NO: 330667 - RNA, 22 nt, Human
caggagucagaaggucagagag

SEQ ID NO: 330668 - RNA, 22 nt, Human
caguacauuuccccccggacuc

SEQ ID NO: 330669 - RNA, 18 nt, Human
ccccagaugauuaccacc

SEQ ID NO: 330670 - RNA, 23 nt, Human
ccccagaugauuaccaccgaagc

SEQ ID NO: 330671 - RNA, 24 nt, Human
ccccagaugauuaccaccgaagcc

SEQ ID NO: 330672 - RNA, 20 nt, Human
cccuuggccugccaugcuuu

SEQ ID NO: 330673 - RNA, 18 nt, Human
ccuaaagaagaguuccca

SEQ ID NO: 330674 - RNA, 23 nt, Human
ccuacaguacauuuccccccgga

SEQ ID NO: 330675 - RNA, 23 nt, Human
ccuugcuccaacuccagacugga

SEQ ID NO: 330676 - RNA, 18 nt, Human
cuaaagaagaguucccac

SEQ ID NO: 330677 - RNA, 19 nt, Human
cucauggcccaucagggca

SEQ ID NO: 330678 - RNA, 24 nt, Human
cuccaacuccagacuggaaaaggg

SEQ ID NO: 330679 - RNA, 21 nt, Human
cuccccagcaucucauggccg

SEQ ID NO: 330680 - RNA, 27 nt, Human
cuccuugcuccaacuccagacuggaaa

SEQ ID NO: 330681 - RNA, 23 nt, Human
cugccaugcuuuguaagcucagg

SEQ ID NO: 330682 - RNA, 18 nt, Human
cuguuggucauggguaaa

SEQ ID NO: 330683 - RNA, 22 nt, Human
cuuguauauauuauuaaaacaa

SEQ ID NO: 330684 - RNA, 23 nt, Human
gaacagcacaaccggcuccagug

SEQ ID NO: 330685 - RNA, 20 nt, Human
gccaugcuuuguaagcucag

SEQ ID NO: 330686 - RNA, 20 nt, Human
gcccuaaagaagaguuccca

SEQ ID NO: 330687 - RNA, 23 nt, Human
ggagugccuagugcaauuuucuc

SEQ ID NO: 330688 - RNA, 20 nt, Human
gggcuggagucagucccugc

SEQ ID NO: 330689 - RNA, 20 nt, Human
guucccacaugcacccacug

SEQ ID NO: 330690 - RNA, 22 nt, Human
guuggucauggguaaagguuuc

SEQ ID NO: 330691 - RNA, 25 nt, Human
uaagcucaggagcccacaggaguca

SEQ ID NO: 330692 - RNA, 22 nt, Human
uacaucccaaaguucuugaaag

SEQ ID NO: 330693 - RNA, 22 nt, Human
uagugcaauuuucuccuugcuc

SEQ ID NO: 330694 - RNA, 20 nt, Human
ucaauuuucucucguccuca

SEQ ID NO: 330695 - RNA, 22 nt, Human
ucaggggcacugugauuugaug

SEQ ID NO: 330696 - RNA, 23 nt, Human
ucaggggcacugugauuugaugg

SEQ ID NO: 330697 - RNA, 21 nt, Human
ucauggacuucccccauuuuu

SEQ ID NO: 330698 - RNA, 18 nt, Human
uccaagggcuggagucag

SEQ ID NO: 330699 - RNA, 19 nt, Human
uccaagggcuggagucagu

SEQ ID NO: 330700 - RNA, 21 nt, Human
uccagacuggaaaagggugaa

SEQ ID NO: 330701 - RNA, 23 nt, Human
uccagacuggaaaagggugaaac

SEQ ID NO: 330702 - RNA, 22 nt, Human
uccccagcaucucauggcccau

SEQ ID NO: 330703 - RNA, 24 nt, Human
uccccccggacucuguuuaggaau

SEQ ID NO: 330704 - RNA, 24 nt, Human
ucuccccaccccaggcauaaacag

SEQ ID NO: 330705 - RNA, 21 nt, Human
ugaaagugccuguggacaaga

SEQ ID NO: 330706 - RNA, 18 nt, Human
ugagagaacagcacaacc

SEQ ID NO: 330707 - RNA, 20 nt, Human
ugauucauggacuuccccca

SEQ ID NO: 330708 - RNA, 23 nt, Human
ugauuugauggguguguacagcu

SEQ ID NO: 330709 - RNA, 21 nt, Human
uggagucagucccugcccugg

SEQ ID NO: 330710 - RNA, 18 nt, Human
ugguagacaagaaaacca

SEQ ID NO: 330711 - RNA, 28 nt, Human
ugugcgaaugagucacgcacgcagugug

SEQ ID NO: 330712 - RNA, 24 nt, Human
uguggucgaggcccuuggccugcc

SEQ ID NO: 330713 - RNA, 21 nt, Human
uguuggucauggguaaagguu

SEQ ID NO: 330714 - RNA, 21 nt, Human
uuacuguuggucauggguaaa

SEQ ID NO: 330715 - RNA, 23 nt, Human
uucaaaaucuccauggggucguc

SEQ ID NO: 330716 - RNA, 18 nt, Human
uuccuuuucuucuccgug

SEQ ID NO: 330717 - RNA, 21 nt, Human
uucuccuugcuccaacuccag

SEQ ID NO: 330718 - RNA, 22 nt, Human
uuuacuugcuuuuuaaaaaaac

SEQ ID NO: 330719 - RNA, 20 nt, Human
uuuccccccggacucuguuu

SEQ ID NO: 330720 - RNA, 18 nt, Human
uuugauggguguguacag

SEQ ID NO: 330721 - RNA, 21 nt, Human
uuuugcugauucauggacuuc

SEQ ID NO: 330722 - RNA, 22 nt, Human
uuuuuuuuuuuuuuuugcugau

SEQ ID NO: 330723 - RNA, 20 nt, Human
uuuuuuuuuuuuuuuuugcu

SEQ ID NO: 330724 - RNA, 23 nt, Human
uuuuuuuuuuuuuuuuuugcuga

SEQ ID NO: 330725 - RNA, 20 nt, Human
uuuuuuuuuuuuuuuuuugg

SEQ ID NO: 330726 - RNA, 23 nt, Human
aaagugaggugccaggccaccga

SEQ ID NO: 330727 - RNA, 23 nt, Human
aaauccuuuucagguacauuucc

SEQ ID NO: 330728 - RNA, 20 nt, Human
caaagccagugugcucacuc

SEQ ID NO: 330729 - RNA, 22 nt, Human
caaagugaggugccaggccacc

SEQ ID NO: 330730 - RNA, 22 nt, Human
cgcagccaggcagugccggggc

SEQ ID NO: 330731 - RNA, 19 nt, Human
cuccggggccguccgaggg

SEQ ID NO: 330732 - RNA, 18 nt, Human
cugcaggccuuccaggau

SEQ ID NO: 330733 - RNA, 21 nt, Human
gccaggccaccgagcguaggg

SEQ ID NO: 330734 - RNA, 20 nt, Human
ggccauuuugugguggugug

SEQ ID NO: 330735 - RNA, 22 nt, Human
ucccaggguuuucuaaaauccu

SEQ ID NO: 330736 - RNA, 19 nt, Human
uccugccccgcccccugca

SEQ ID NO: 330737 - RNA, 21 nt, Human
ugaggugccaggccaccgagc

SEQ ID NO: 330738 - RNA, 25 nt, Human
ugccccgcccccugcaggccuucca

SEQ ID NO: 330739 - RNA, 25 nt, Human
ugccggggcucagcagcauccuccg

SEQ ID NO: 330740 - RNA, 31 nt, Human
ugguggguuucccaggguuuucuaaaauccu

SEQ ID NO: 330741 - RNA, 22 nt, Human
ugguggugugguggguuuccca

SEQ ID NO: 330742 - RNA, 21 nt, Human
uuccugccccgcccccugcag

SEQ ID NO: 330743 - RNA, 22 nt, Human
uuuccugccccgcccccugcag

SEQ ID NO: 330744 - RNA, 18 nt, Human
acaaagagaacguccacg

SEQ ID NO: 330745 - RNA, 20 nt, Human
acacccuccuccugaggcuu

SEQ ID NO: 330746 - RNA, 19 nt, Human
accgaaccggggccccaac

SEQ ID NO: 330747 - RNA, 20 nt, Human
accgcgcugcuccagccgcc

SEQ ID NO: 330748 - RNA, 21 nt, Human
aggaggagagagggaggagag

SEQ ID NO: 330749 - RNA, 22 nt, Human
augcaggcacagaaaaaaggga

SEQ ID NO: 330750 - RNA, 19 nt, Human
cacacaaagagaacgucca

SEQ ID NO: 330751 - RNA, 20 nt, Human
caccaacacaaagccaggga

SEQ ID NO: 330752 - RNA, 19 nt, Human
cagccgccgccgcgccucg

SEQ ID NO: 330753 - RNA, 21 nt, Human
cagcucggaggcaccaacaca

SEQ ID NO: 330754 - RNA, 22 nt, Human
ccccaaccccccuugagggcuc

SEQ ID NO: 330755 - RNA, 26 nt, Human
ccccaaccccccuugagggcuccucu

SEQ ID NO: 330756 - RNA, 19 nt, Human
cccccggaccgaaccgggg

SEQ ID NO: 330757 - RNA, 22 nt, Human
ccccggaccgaaccggggcccc

SEQ ID NO: 330758 - RNA, 22 nt, Human
ccgaaccggggccccaaccccc

SEQ ID NO: 330759 - RNA, 21 nt, Human
ccgccgccgcgccucggccca

SEQ ID NO: 330760 - RNA, 24 nt, Human
ccgccgcgccucggcccacacccu

SEQ ID NO: 330761 - RNA, 23 nt, Human
ccuccuccagcgcacccuccuug

SEQ ID NO: 330762 - RNA, 21 nt, Human
cgagccccgagccuucugccu

SEQ ID NO: 330763 - RNA, 19 nt, Human
cgcacccuccuugcagcuc

SEQ ID NO: 330764 - RNA, 21 nt, Human
cgcucgaggcgagcgagcucu

SEQ ID NO: 330765 - RNA, 20 nt, Human
cgcugcuccagccgccgccg

SEQ ID NO: 330766 - RNA, 19 nt, Human
cggaggcaccaacacaaag

SEQ ID NO: 330767 - RNA, 22 nt, Human
cggaggcaccaacacaaagcca

SEQ ID NO: 330768 - RNA, 19 nt, Human
gaaccggggccccaacccc

SEQ ID NO: 330769 - RNA, 25 nt, Human
gcacagaaaaaagggaaagaaaaaa

SEQ ID NO: 330770 - RNA, 20 nt, Human
gccccccuccuccuccucca

SEQ ID NO: 330771 - RNA, 18 nt, Human
gccccgagccuucugccu

SEQ ID NO: 330772 - RNA, 21 nt, Human
gcgugugugugugcgcgcgug

SEQ ID NO: 330773 - RNA, 23 nt, Human
gcgugugugugugcgcgcgugug

SEQ ID NO: 330774 - RNA, 18 nt, Human
ggaccgaaccggggcccc

SEQ ID NO: 330775 - RNA, 23 nt, Human
ggaccggaugcucuggcgaagga

SEQ ID NO: 330776 - RNA, 19 nt, Human
ggagaggaggagagaggga

SEQ ID NO: 330777 - RNA, 27 nt, Human
ggcacagaaaaaagggaaagaaaaaac

SEQ ID NO: 330778 - RNA, 24 nt, Human
ggggugccucucacuccgggcccc

SEQ ID NO: 330779 - RNA, 24 nt, Human
gugugugugcgcgcguguguguga

SEQ ID NO: 330780 - RNA, 21 nt, Human
uaccgcgcugcuccagccgcc

SEQ ID NO: 330781 - RNA, 23 nt, Human
uaugcaggcacagaaaaaaggga

SEQ ID NO: 330782 - RNA, 24 nt, Human
uaugcaggcacagaaaaaagggaa

SEQ ID NO: 330783 - RNA, 18 nt, Human
ucacuccgggccccccuc

SEQ ID NO: 330784 - RNA, 21 nt, Human
uccgggccccccuccuccucc

SEQ ID NO: 330785 - RNA, 19 nt, Human
uccuccagcgcacccuccu

SEQ ID NO: 330786 - RNA, 18 nt, Human
ugcaggcacagaaaaaag

SEQ ID NO: 330787 - RNA, 18 nt, Human
ugccugugugcgcccucg

SEQ ID NO: 330788 - RNA, 25 nt, Human
ugcgugcgccggcaccgugugcgcg

SEQ ID NO: 330789 - RNA, 18 nt, Human
ugugcgcgcgcgcgcgug

SEQ ID NO: 330790 - RNA, 18 nt, Human
ugugcgcgcgugugugug

SEQ ID NO: 330791 - RNA, 21 nt, Human
ugugugcgcgcgugugugugu

SEQ ID NO: 330792 - RNA, 22 nt, Human
ugugugcgcgcgugugugugug

SEQ ID NO: 330793 - RNA, 21 nt, Human
uguguguccgcccgugugugc

SEQ ID NO: 330794 - RNA, 20 nt, Human
ugugugugcgcgcgugugug

SEQ ID NO: 330795 - RNA, 21 nt, Human
ugugugugcgcgcgugugugu

SEQ ID NO: 330796 - RNA, 21 nt, Human
uguguguguccgcccgugugu

SEQ ID NO: 330797 - RNA, 25 nt, Human
ugugugugugcgcgcgugugugugu

SEQ ID NO: 330798 - RNA, 28 nt, Human
uguguguguguccgcccgugugugcgug

SEQ ID NO: 330799 - RNA, 22 nt, Human
uuaucuuguauuuauaucguuu

SEQ ID NO: 330800 - RNA, 22 nt, Human
aaaacaacaaacaagccaucaa

SEQ ID NO: 330801 - RNA, 22 nt, Human
aaacaacaaacaagccaucaac

SEQ ID NO: 330802 - RNA, 18 nt, Human
aaaggccugagugguugu

SEQ ID NO: 330803 - RNA, 19 nt, Human
aacauggagaaaccccauc

SEQ ID NO: 330804 - RNA, 20 nt, Human
aacauggagaaaccccaucu

SEQ ID NO: 330805 - RNA, 21 nt, Human
aacauggagaaaccccaucuc

SEQ ID NO: 330806 - RNA, 19 nt, Human
aacauggugaaaccucucu

SEQ ID NO: 330807 - RNA, 20 nt, Human
aacauggugaaaccucucuc

SEQ ID NO: 330808 - RNA, 19 nt, Human
aaccuggucuuccuaaugg

SEQ ID NO: 330809 - RNA, 20 nt, Human
aacuacaagaauggccacug

SEQ ID NO: 330810 - RNA, 25 nt, Human
aagagcuaaaagcuggacacaagcc

SEQ ID NO: 330811 - RNA, 19 nt, Human
aagcuuaugcccagcaaac

SEQ ID NO: 330812 - RNA, 18 nt, Human
aagcuugcagugagccaa

SEQ ID NO: 330813 - RNA, 18 nt, Human
aauuagccaggcauggug

SEQ ID NO: 330814 - RNA, 19 nt, Human
acaacagaaaacucccagg

SEQ ID NO: 330815 - RNA, 19 nt, Human
acaagccaucaacacuggc

SEQ ID NO: 330816 - RNA, 19 nt, Human
acaagggugaaacuccauc

SEQ ID NO: 330817 - RNA, 20 nt, Human
acaagggugaaacuccaucu

SEQ ID NO: 330818 - RNA, 23 nt, Human
acaccacacccacccccgcaaac

SEQ ID NO: 330819 - RNA, 26 nt, Human
acagagguggggguguacgugaggca

SEQ ID NO: 330820 - RNA, 21 nt, Human
accacacccacccccgcaaac

SEQ ID NO: 330821 - RNA, 23 nt, Human
accacagugccugcacuggcccg

SEQ ID NO: 330822 - RNA, 24 nt, Human
accccaucucuacuaaaaauacaa

SEQ ID NO: 330823 - RNA, 25 nt, Human
acuccagccugggcaacaaggguga

SEQ ID NO: 330824 - RNA, 20 nt, Human
acugugcccuggagcugagc

SEQ ID NO: 330825 - RNA, 24 nt, Human
acuuugggaggccgaggugggcag

SEQ ID NO: 330826 - RNA, 21 nt, Human
agaaccauaaguccugcugac

SEQ ID NO: 330827 - RNA, 21 nt, Human
agagguggggguguacgugag

SEQ ID NO: 330828 - RNA, 18 nt, Human
agagguugcacugagccg

SEQ ID NO: 330829 - RNA, 23 nt, Human
agagguugcacugagccgagauu

SEQ ID NO: 330830 - RNA, 24 nt, Human
agcacuuugggaggccgaggcggg

SEQ ID NO: 330831 - RNA, 24 nt, Human
agcacuuugggaggccgagguggg

SEQ ID NO: 330832 - RNA, 23 nt, Human
agccaggcaugguggugcaugcc

SEQ ID NO: 330833 - RNA, 22 nt, Human
agccaggugacaggagccuggg

SEQ ID NO: 330834 - RNA, 22 nt, Human
agccggauggcccgcggcuggg

SEQ ID NO: 330835 - RNA, 25 nt, Human
agccugggcaacaagggugaaacuc

SEQ ID NO: 330836 - RNA, 19 nt, Human
agccugggugacagagacu

SEQ ID NO: 330837 - RNA, 21 nt, Human
aggagcucacucuggugaaaa

SEQ ID NO: 330838 - RNA, 22 nt, Human
aggaggcgguguuggagacagg

SEQ ID NO: 330839 - RNA, 19 nt, Human
aggcaaaggcgcagagucc

SEQ ID NO: 330840 - RNA, 21 nt, Human
aggcagagguugcacugagcc

SEQ ID NO: 330841 - RNA, 24 nt, Human
aggcagagguugcacugagccgag

SEQ ID NO: 330842 - RNA, 22 nt, Human
aggcaggagaaucgcuucaacc

SEQ ID NO: 330843 - RNA, 24 nt, Human
aggcaggagaaucgcuucaaccug

SEQ ID NO: 330844 - RNA, 25 nt, Human
aggcaggagaaucgcuucaaccugg

SEQ ID NO: 330845 - RNA, 24 nt, Human
aggcaggagaauggcaugaacccg

SEQ ID NO: 330846 - RNA, 22 nt, Human
aggcaguauguccagaaggagc

SEQ ID NO: 330847 - RNA, 24 nt, Human
aggcaugguggugcaugccuguaa

SEQ ID NO: 330848 - RNA, 23 nt, Human
aggccgaggcgggcagaucacga

SEQ ID NO: 330849 - RNA, 21 nt, Human
aggccgaggugggcaggucac

SEQ ID NO: 330850 - RNA, 23 nt, Human
aggcgggcagaucacgaggucag

SEQ ID NO: 330851 - RNA, 24 nt, Human
aggcgggcagaucacgaggucaga

SEQ ID NO: 330852 - RNA, 20 nt, Human
aggcugaggcaggagaaucg

SEQ ID NO: 330853 - RNA, 20 nt, Human
aggcugaggcaggagaaucg

SEQ ID NO: 330854 - RNA, 19 nt, Human
aggcugaggcaggagaaug

SEQ ID NO: 330855 - RNA, 24 nt, Human
aggcugcauuuaguggaccaggcu

SEQ ID NO: 330856 - RNA, 28 nt, Human
aggcuggggaauguguggggggagcacc

SEQ ID NO: 330857 - RNA, 21 nt, Human
agggagaggccuuggcgccag

SEQ ID NO: 330858 - RNA, 18 nt, Human
agggauggagaggcagca

SEQ ID NO: 330859 - RNA, 24 nt, Human
aggggaagcuugcagugagccaag

SEQ ID NO: 330860 - RNA, 25 nt, Human
aggggcgcagcuaaugugguggggg

SEQ ID NO: 330861 - RNA, 25 nt, Human
aggugccagagauagcccuucagcc

SEQ ID NO: 330862 - RNA, 24 nt, Human
aucgugccauugcacuccagccug

SEQ ID NO: 330863 - RNA, 21 nt, Human
aucucaaaaaaaaaaaaaaag

SEQ ID NO: 330864 - RNA, 20 nt, Human
augacccugcaaauggacug

SEQ ID NO: 330865 - RNA, 24 nt, Human
auuacgccauugcacuccagccug

SEQ ID NO: 330866 - RNA, 24 nt, Human
auugcacuccagccugggcaacaa

SEQ ID NO: 330867 - RNA, 25 nt, Human
auugcacuccagccugggcaacaag

SEQ ID NO: 330868 - RNA, 21 nt, Human
auugcacuccagccuggguga

SEQ ID NO: 330869 - RNA, 24 nt, Human
auugcacuccagccugggugacag

SEQ ID NO: 330870 - RNA, 19 nt, Human
auuuuguccauuguccucc

SEQ ID NO: 330871 - RNA, 24 nt, Human
caagaauggccacugcagcaccau

SEQ ID NO: 330872 - RNA, 24 nt, Human
caagaucgugccauugcacuccag

SEQ ID NO: 330873 - RNA, 19 nt, Human
caccacagugccugcacug

SEQ ID NO: 330874 - RNA, 24 nt, Human
caccacagugccugcacuggcccg

SEQ ID NO: 330875 - RNA, 24 nt, Human
cacccuuguaaucccagcacuuug

SEQ ID NO: 330876 - RNA, 21 nt, Human
cacggaccaggagggcaggac

SEQ ID NO: 330877 - RNA, 18 nt, Human
cacuaaacauacaacccc

SEQ ID NO: 330878 - RNA, 21 nt, Human
cacuaaacauacaaccccuuu

SEQ ID NO: 330879 - RNA, 20 nt, Human
cacuccagccugggcaacaa

SEQ ID NO: 330880 - RNA, 23 nt, Human
cacuccagccugggcaacaaggg

SEQ ID NO: 330881 - RNA, 25 nt, Human
cacuccagccugggcaacaagggug

SEQ ID NO: 330882 - RNA, 18 nt, Human
cacuccagccugggugac

SEQ ID NO: 330883 - RNA, 22 nt, Human
cacuccagccugggugacagag

SEQ ID NO: 330884 - RNA, 22 nt, Human
cacugugacggauccuggggac

SEQ ID NO: 330885 - RNA, 18 nt, Human
cagaaggagcucacucug

SEQ ID NO: 330886 - RNA, 22 nt, Human
cagagcuugggcuccagucucc

SEQ ID NO: 330887 - RNA, 24 nt, Human
cagcacuuugggaggccgaggcgg

SEQ ID NO: 330888 - RNA, 22 nt, Human
cagcacuuugggaggccgaggu

SEQ ID NO: 330889 - RNA, 24 nt, Human
cagcacuuugggaggccgaggugg

SEQ ID NO: 330890 - RNA, 19 nt, Human
cagcaugagugccagagga

SEQ ID NO: 330891 - RNA, 24 nt, Human
cagccugaccaacauggagaaacc

SEQ ID NO: 330892 - RNA, 24 nt, Human
cagcuacucgggaggcugaggcag

SEQ ID NO: 330893 - RNA, 24 nt, Human
cagcuacuugggaggcugaggcag

SEQ ID NO: 330894 - RNA, 20 nt, Human
caggagucugagagcagccu

SEQ ID NO: 330895 - RNA, 24 nt, Human
caggccuguaaucccagcacuuug

SEQ ID NO: 330896 - RNA, 22 nt, Human
cagggcagcugcagugugccag

SEQ ID NO: 330897 - RNA, 24 nt, Human
caggucaccugagaucaggagucu

SEQ ID NO: 330898 - RNA, 20 nt, Human
caggucuaagagacauuuug

SEQ ID NO: 330899 - RNA, 20 nt, Human
caggugcugacuuugacaag

SEQ ID NO: 330900 - RNA, 20 nt, Human
caucagggagaggccuuggc

SEQ ID NO: 330901 - RNA, 19 nt, Human
caugaaaacugggcgcugc

SEQ ID NO: 330902 - RNA, 24 nt, Human
caugccuguaaucccagcuacuug

SEQ ID NO: 330903 - RNA, 21 nt, Human
cauggacaccauuacaaaggu

SEQ ID NO: 330904 - RNA, 18 nt, Human
cauugcacuccagccugg

SEQ ID NO: 330905 - RNA, 19 nt, Human
cauugcacuccagccuggg

SEQ ID NO: 330906 - RNA, 19 nt, Human
cauugcacuccagccuggg

SEQ ID NO: 330907 - RNA, 21 nt, Human
cauugcacuccagccugggca

SEQ ID NO: 330908 - RNA, 24 nt, Human
cauugcacuccagccugggcaaca

SEQ ID NO: 330909 - RNA, 21 nt, Human
cauugcacuccagccugggug

SEQ ID NO: 330910 - RNA, 22 nt, Human
cauugcacuccagccuggguga

SEQ ID NO: 330911 - RNA, 24 nt, Human
cauugcacuccagccugggugaca

SEQ ID NO: 330912 - RNA, 24 nt, Human
cauugcacuccagccugggugaca

SEQ ID NO: 330913 - RNA, 24 nt, Human
ccacagucacggaaauuccugucc

SEQ ID NO: 330914 - RNA, 20 nt, Human
ccauccacaugaaaacuggg

SEQ ID NO: 330915 - RNA, 20 nt, Human
ccauugcacuccagccuggg

SEQ ID NO: 330916 - RNA, 20 nt, Human
ccauugcacuccagccuggg

SEQ ID NO: 330917 - RNA, 21 nt, Human
ccauugcacuccagccugggc

SEQ ID NO: 330918 - RNA, 23 nt, Human
ccauugcacuccagccugggcaa

SEQ ID NO: 330919 - RNA, 24 nt, Human
ccauugcacuccagccugggcaac

SEQ ID NO: 330920 - RNA, 21 nt, Human
ccauugcacuccagccugggu

SEQ ID NO: 330921 - RNA, 21 nt, Human
ccauugcacuccagccugggu

SEQ ID NO: 330922 - RNA, 22 nt, Human
ccauugcacuccagccugggug

SEQ ID NO: 330923 - RNA, 24 nt, Human
ccauugcacuccagccugggugac

SEQ ID NO: 330924 - RNA, 20 nt, Human
cccgccgcccaaaagaaaac

SEQ ID NO: 330925 - RNA, 21 nt, Human
cccuggagcugagcccggugg

SEQ ID NO: 330926 - RNA, 24 nt, Human
cccuuguaaucccagcacuuuggg

SEQ ID NO: 330927 - RNA, 23 nt, Human
ccuaggacagcugugcagucugc

SEQ ID NO: 330928 - RNA, 24 nt, Human
ccugaccaacauggagaaacccca

SEQ ID NO: 330929 - RNA, 23 nt, Human
ccugagaucaggagucugagagc

SEQ ID NO: 330930 - RNA, 19 nt, Human
ccugcacuggcccgguggu

SEQ ID NO: 330931 - RNA, 18 nt, Human
ccuggcuaacauggugaa

SEQ ID NO: 330932 - RNA, 21 nt, Human
ccuggcuaacauggugaaacc

SEQ ID NO: 330933 - RNA, 21 nt, Human
ccuggcuaacauggugaaacc

SEQ ID NO: 330934 - RNA, 23 nt, Human
ccuggcuaacauggugaaaccuc

SEQ ID NO: 330935 - RNA, 25 nt, Human
ccugggaggcagagguugcacugag

SEQ ID NO: 330936 - RNA, 24 nt, Human
ccuggucuuccuaauggaccccaa

SEQ ID NO: 330937 - RNA, 22 nt, Human
ccuguaaucccagcacuuuggg

SEQ ID NO: 330938 - RNA, 21 nt, Human
ccuguaaucccagcuacuugg

SEQ ID NO: 330939 - RNA, 19 nt, Human
ccuguagucccagcuacuc

SEQ ID NO: 330940 - RNA, 21 nt, Human
ccuguagucccagcuacucgg

SEQ ID NO: 330941 - RNA, 22 nt, Human
ccuguagucccagcuacucggg

SEQ ID NO: 330942 - RNA, 27 nt, Human
ccuucagccagaacaggucuaagagac

SEQ ID NO: 330943 - RNA, 18 nt, Human
ccuuccacgcaggcucca

SEQ ID NO: 330944 - RNA, 18 nt, Human
ccuuguaaucccagcacu

SEQ ID NO: 330945 - RNA, 24 nt, Human
cgagaccauccuggcuaacauggu

SEQ ID NO: 330946 - RNA, 24 nt, Human
cgagauuacgccauugcacuccag

SEQ ID NO: 330947 - RNA, 27 nt, Human
cgaggcgggcagaucacgaggucagau

SEQ ID NO: 330948 - RNA, 19 nt, Human
cgaggugggcaggucaccu

SEQ ID NO: 330949 - RNA, 24 nt, Human
cgccauugcacuccagccugggca

SEQ ID NO: 330950 - RNA, 23 nt, Human
cggaggccuuccacgcaggcucc

SEQ ID NO: 330951 - RNA, 23 nt, Human
cuagugcccaaccugcaacggac

SEQ ID NO: 330952 - RNA, 23 nt, Human
cuauaacuacaagaauggccacu

SEQ ID NO: 330953 - RNA, 24 nt, Human
cucacccuuguaaucccagcacuu

SEQ ID NO: 330954 - RNA, 24 nt, Human
cucaggccuguaaucccagcacuu

SEQ ID NO: 330955 - RNA, 21 nt, Human
cuccaucccgccgcccaaaag

SEQ ID NO: 330956 - RNA, 19 nt, Human
cuccaucucaaaaaaaaaa

SEQ ID NO: 330957 - RNA, 19 nt, Human
cucccagggggaauggcag

SEQ ID NO: 330958 - RNA, 25 nt, Human
cucuguccaucuguguguccuucca

SEQ ID NO: 330959 - RNA, 19 nt, Human
cugaagcucugagacccag

SEQ ID NO: 330960 - RNA, 20 nt, Human
gaacccggaaggggaagcuu

SEQ ID NO: 330961 - RNA, 18 nt, Human
gacgcaggaguuugcagu

SEQ ID NO: 330962 - RNA, 23 nt, Human
gacgcgguggcucaggccuguaa

SEQ ID NO: 330963 - RNA, 18 nt, Human
gagaggcagcagugggca

SEQ ID NO: 330964 - RNA, 21 nt, Human
gagaggcagcagugggcacag

SEQ ID NO: 330965 - RNA, 21 nt, Human
gagcugagcccgguggguggg

SEQ ID NO: 330966 - RNA, 25 nt, Human
gaggugggcaggucaccugagauca

SEQ ID NO: 330967 - RNA, 24 nt, Human
gaucgcugggaaagagugcagggu

SEQ ID NO: 330968 - RNA, 20 nt, Human
gauggcccgcggcuggggag

SEQ ID NO: 330969 - RNA, 20 nt, Human
gcagagcuugggcuccaguc

SEQ ID NO: 330970 - RNA, 22 nt, Human
gcagcugcagugugccaggccc

SEQ ID NO: 330971 - RNA, 19 nt, Human
gccauugcacuccagccug

SEQ ID NO: 330972 - RNA, 22 nt, Human
gccauugcacuccagccugggc

SEQ ID NO: 330973 - RNA, 24 nt, Human
gccauugcacuccagccugggcaa

SEQ ID NO: 330974 - RNA, 24 nt, Human
gccauugcacuccagccuggguga

SEQ ID NO: 330975 - RNA, 19 nt, Human
gcccgaaggggcaagggaa

SEQ ID NO: 330976 - RNA, 18 nt, Human
gcccgaccacaggcugca

SEQ ID NO: 330977 - RNA, 23 nt, Human
gcccgguggguggguggagggac

SEQ ID NO: 330978 - RNA, 21 nt, Human
gccucuccuucaggugcugac

SEQ ID NO: 330979 - RNA, 18 nt, Human
gccuggggcuguggggcu

SEQ ID NO: 330980 - RNA, 20 nt, Human
gccuguaaucccagcuacuu

SEQ ID NO: 330981 - RNA, 23 nt, Human
gcuaacauggugaaaccucucuc

SEQ ID NO: 330982 - RNA, 21 nt, Human
ggagccuggggcuguggggcc

SEQ ID NO: 330983 - RNA, 18 nt, Human
ggaggccggacgcggugg

SEQ ID NO: 330984 - RNA, 21 nt, Human
ggaggccuuccacgcaggcuc

SEQ ID NO: 330985 - RNA, 24 nt, Human
ggcagaaggacagugaggccugaa

SEQ ID NO: 330986 - RNA, 23 nt, Human
ggcaugguggcucacccuuguaa

SEQ ID NO: 330987 - RNA, 23 nt, Human
ggccuguaaucccagcacuuugg

SEQ ID NO: 330988 - RNA, 19 nt, Human
gggaagcuugcagugagcc

SEQ ID NO: 330989 - RNA, 21 nt, Human
gggaaugaauagaaaaagaug

SEQ ID NO: 330990 - RNA, 19 nt, Human
gggcagaucacgaggucag

SEQ ID NO: 330991 - RNA, 24 nt, Human
ggggaauggcagguggccucuccu

SEQ ID NO: 330992 - RNA, 21 nt, Human
ggggcaagggaagggagcugu

SEQ ID NO: 330993 - RNA, 23 nt, Human
ggggcgcagcuaauguggugggg

SEQ ID NO: 330994 - RNA, 24 nt, Human
gguggcucacccuuguaaucccag

SEQ ID NO: 330995 - RNA, 23 nt, Human
gguggcucaggccuguaauccca

SEQ ID NO: 330996 - RNA, 24 nt, Human
gguggcucaggccuguaaucccag

SEQ ID NO: 330997 - RNA, 24 nt, Human
gguggugcaugccuguaaucccag

SEQ ID NO: 330998 - RNA, 22 nt, Human
gguugacugcugaugugggcca

SEQ ID NO: 330999 - RNA, 20 nt, Human
guccauuguccuccagaggu

SEQ ID NO: 331000 - RNA, 18 nt, Human
gugacagagacuccaucc

SEQ ID NO: 331001 - RNA, 23 nt, Human
guggcucaggccuguaaucccag

SEQ ID NO: 331002 - RNA, 19 nt, Human
gugguuguucugcacaucc

SEQ ID NO: 331003 - RNA, 23 nt, Human
guucacacuaaacauacaacccc

SEQ ID NO: 331004 - RNA, 21 nt, Human
guugcacugagccgagauuac

SEQ ID NO: 331005 - RNA, 20 nt, Human
uaaaaauacaaaauuagcca

SEQ ID NO: 331006 - RNA, 22 nt, Human
uaaaaauacaaaauuagccagg

SEQ ID NO: 331007 - RNA, 23 nt, Human
uaaaaauacaaaauuagccaggc

SEQ ID NO: 331008 - RNA, 23 nt, Human
uaaaaauauaaaaaauuagccug

SEQ ID NO: 331009 - RNA, 23 nt, Human
uaacagcuggacaccacacccac

SEQ ID NO: 331010 - RNA, 21 nt, Human
uaacauggugaaaccucucuc

SEQ ID NO: 331011 - RNA, 23 nt, Human
uaacauggugaaaccucucucua

SEQ ID NO: 331012 - RNA, 21 nt, Human
uaagagguguauaggccaaug

SEQ ID NO: 331013 - RNA, 21 nt, Human
uagccaggugacaggagccug

SEQ ID NO: 331014 - RNA, 22 nt, Human
uaggccaaugagagagggaugg

SEQ ID NO: 331015 - RNA, 18 nt, Human
uaugcccagcaaaccugg

SEQ ID NO: 331016 - RNA, 21 nt, Human
uauuuuauaugcuuuguacug

SEQ ID NO: 331017 - RNA, 19 nt, Human
ucaaaaaaaaaaaaaaagu

SEQ ID NO: 331018 - RNA, 22 nt, Human
ucaccugagaucaggagucuga

SEQ ID NO: 331019 - RNA, 24 nt, Human
ucacgaggucagaucaucgagacc

SEQ ID NO: 331020 - RNA, 18 nt, Human
ucagccagaacaggucua

SEQ ID NO: 331021 - RNA, 19 nt, Human
uccagccugggugacagag

SEQ ID NO: 331022 - RNA, 20 nt, Human
uccagccugggugacagaga

SEQ ID NO: 331023 - RNA, 19 nt, Human
uccaucccgccgcccaaaa

SEQ ID NO: 331024 - RNA, 23 nt, Human
uccaucucaaaaaaaaaaaaaaa

SEQ ID NO: 331025 - RNA, 22 nt, Human
ucccaggcagccaguggggccu

SEQ ID NO: 331026 - RNA, 23 nt, Human
ucccaggcagccaguggggccuu

SEQ ID NO: 331027 - RNA, 18 nt, Human
ucccagggggaauggcag

SEQ ID NO: 331028 - RNA, 18 nt, Human
ucccgccgcccaaaagaa

SEQ ID NO: 331029 - RNA, 19 nt, Human
ucccuaggaaggcaggcug

SEQ ID NO: 331030 - RNA, 23 nt, Human
ucccuaggaaggcaggcugccag

SEQ ID NO: 331031 - RNA, 23 nt, Human
ucgugccauugcacuccagccug

SEQ ID NO: 331032 - RNA, 20 nt, Human
ucucuacuaaaaauacaaaa

SEQ ID NO: 331033 - RNA, 22 nt, Human
ucucuacuaaaaauauaaaaaa

SEQ ID NO: 331034 - RNA, 18 nt, Human
ucugaaguccucuaaagg

SEQ ID NO: 331035 - RNA, 21 nt, Human
ugacaggagccuggggcugug

SEQ ID NO: 331036 - RNA, 18 nt, Human
ugagacccagaaccauaa

SEQ ID NO: 331037 - RNA, 18 nt, Human
ugagagagggauggagag

SEQ ID NO: 331038 - RNA, 24 nt, Human
ugagagcagccugaccaacaugga

SEQ ID NO: 331039 - RNA, 22 nt, Human
ugagccaagaucgugccauugc

SEQ ID NO: 331040 - RNA, 22 nt, Human
ugagccgagauuacgccauugc

SEQ ID NO: 331041 - RNA, 20 nt, Human
ugaggacgauuuaaucaagg

SEQ ID NO: 331042 - RNA, 24 nt, Human
ugaggcaggagaaucgcuucaacc

SEQ ID NO: 331043 - RNA, 23 nt, Human
ugaggcaggagaauggcaugaac

SEQ ID NO: 331044 - RNA, 24 nt, Human
ugaggcaggagaauggcaugaacc

SEQ ID NO: 331045 - RNA, 25 nt, Human
ugaggcaggagaauggcaugaaccc

SEQ ID NO: 331046 - RNA, 19 nt, Human
ugaguacgcaaagcuauaa

SEQ ID NO: 331047 - RNA, 19 nt, Human
ugcacuccagccugggcaa

SEQ ID NO: 331048 - RNA, 24 nt, Human
ugcacuccagccugggugacagag

SEQ ID NO: 331049 - RNA, 22 nt, Human
ugccaggcaguauguccagaag

SEQ ID NO: 331050 - RNA, 20 nt, Human
ugccuggaacacugugacgg

SEQ ID NO: 331051 - RNA, 19 nt, Human
ugccuggagucugggcggg

SEQ ID NO: 331052 - RNA, 20 nt, Human
ugccuggagucugggcgggg

SEQ ID NO: 331053 - RNA, 23 nt, Human
ugccuguaaucccagcuacuugg

SEQ ID NO: 331054 - RNA, 24 nt, Human
ugccuguaaucccagcuacuuggg

SEQ ID NO: 331055 - RNA, 24 nt, Human
ugccuguagucccagcuacucggg

SEQ ID NO: 331056 - RNA, 20 nt, Human
ugcuacaggaaggaggcucc

SEQ ID NO: 331057 - RNA, 21 nt, Human
ugcuggagacacuucaggggc

SEQ ID NO: 331058 - RNA, 18 nt, Human
uggacaccacacccaccc

SEQ ID NO: 331059 - RNA, 25 nt, Human
uggacaccacacccacccccgcaaa

SEQ ID NO: 331060 - RNA, 19 nt, Human
uggcaagagcuaaaagcug

SEQ ID NO: 331061 - RNA, 21 nt, Human
uggcucacccuuguaauccca

SEQ ID NO: 331062 - RNA, 22 nt, Human
uggcucacccuuguaaucccag

SEQ ID NO: 331063 - RNA, 24 nt, Human
uggcucacccuuguaaucccagca

SEQ ID NO: 331064 - RNA, 24 nt, Human
uggcucaggccuguaaucccagca

SEQ ID NO: 331065 - RNA, 20 nt, Human
ugggaggcagagguugcacu

SEQ ID NO: 331066 - RNA, 19 nt, Human
ugggaggccgaggcgggca

SEQ ID NO: 331067 - RNA, 20 nt, Human
ugggaggccgaggcgggcag

SEQ ID NO: 331068 - RNA, 24 nt, Human
ugggaggccgaggcgggcagauca

SEQ ID NO: 331069 - RNA, 20 nt, Human
ugggaggccgaggugggcag

SEQ ID NO: 331070 - RNA, 20 nt, Human
ugggaggccgaggugggcag

SEQ ID NO: 331071 - RNA, 24 nt, Human
ugggaggccgaggugggcagguca

SEQ ID NO: 331072 - RNA, 26 nt, Human
ugggaggccgaggugggcaggucacc

SEQ ID NO: 331073 - RNA, 19 nt, Human
ugggaggcugaggcaggag

SEQ ID NO: 331074 - RNA, 23 nt, Human
ugggaggcugaggcaggagaauc

SEQ ID NO: 331075 - RNA, 24 nt, Human
ugggcaggucaccugagaucagga

SEQ ID NO: 331076 - RNA, 24 nt, Human
uggucacacgugccuguaguccca

SEQ ID NO: 331077 - RNA, 21 nt, Human
uggugcaugccuguaauccca

SEQ ID NO: 331078 - RNA, 24 nt, Human
ugguggcucacccuuguaauccca

SEQ ID NO: 331079 - RNA, 24 nt, Human
ugguggugcaugccuguaauccca

SEQ ID NO: 331080 - RNA, 21 nt, Human
uguacgugaggcaguacagcu

SEQ ID NO: 331081 - RNA, 20 nt, Human
uguccauuguccuccagagg

SEQ ID NO: 331082 - RNA, 23 nt, Human
uguccauuguccuccagaggugc

SEQ ID NO: 331083 - RNA, 23 nt, Human
uguggaugagcauacugggcaga

SEQ ID NO: 331084 - RNA, 20 nt, Human
uguucugcacauccuggccc

SEQ ID NO: 331085 - RNA, 19 nt, Human
uuacaaagguccuaagagg

SEQ ID NO: 331086 - RNA, 23 nt, Human
uuacgccauugcacuccagccug

SEQ ID NO: 331087 - RNA, 25 nt, Human
uucaagggcugcagagugaguuacc

SEQ ID NO: 331088 - RNA, 26 nt, Human
uucaccuuguauuuuauaugcuuugu

SEQ ID NO: 331089 - RNA, 20 nt, Human
uugcacugagccgagauuac

SEQ ID NO: 331090 - RNA, 22 nt, Human
uugcagugagccaagaucgugc

SEQ ID NO: 331091 - RNA, 25 nt, Human
uugggaggccgaggcgggcagauca

SEQ ID NO: 331092 - RNA, 24 nt, Human
uugggaggcugaggcaggagaauc

SEQ ID NO: 331093 - RNA, 24 nt, Human
uuuguucacacuaaacauacaacc

SEQ ID NO: 331094 - RNA, 20 nt, Human
aaagagcuaacucagaggca

SEQ ID NO: 331095 - RNA, 21 nt, Human
aaagagcuaacucagaggcaa

SEQ ID NO: 331096 - RNA, 23 nt, Human
aaauauauauaauauauauuaca

SEQ ID NO: 331097 - RNA, 18 nt, Human
aagacaccagggcaaggu

SEQ ID NO: 331098 - RNA, 26 nt, Human
aagccaguccuuaacuugacagcuag

SEQ ID NO: 331099 - RNA, 20 nt, Human
aaugguaaaaauagaggcac

SEQ ID NO: 331100 - RNA, 19 nt, Human
agaggcauagaucuuuggc

SEQ ID NO: 331101 - RNA, 21 nt, Human
aggcacauauggaggcauguc

SEQ ID NO: 331102 - RNA, 18 nt, Human
augauggugaggaaagca

SEQ ID NO: 331103 - RNA, 24 nt, Human
cagugccgacuguggcccugcagg

SEQ ID NO: 331104 - RNA, 19 nt, Human
ccaaaaugguaaaaauaga

SEQ ID NO: 331105 - RNA, 24 nt, Human
ccaaaaugguaaaaauagaggcac

SEQ ID NO: 331106 - RNA, 21 nt, Human
ccagacaccagcaaaggugcc

SEQ ID NO: 331107 - RNA, 19 nt, Human
ccccacagcuugagucaga

SEQ ID NO: 331108 - RNA, 23 nt, Human
cccuuuuauuuuaagacuugagg

SEQ ID NO: 331109 - RNA, 18 nt, Human
cgacuguggcccugcagg

SEQ ID NO: 331110 - RNA, 23 nt, Human
cugauuaaaagaagcaaauaaca

SEQ ID NO: 331111 - RNA, 24 nt, Human
cugcaggauuuuggucagcuacau

SEQ ID NO: 331112 - RNA, 21 nt, Human
gaaaaaacagaggcauagagg

SEQ ID NO: 331113 - RNA, 24 nt, Human
gaaagcauagaaagaacauuugcu

SEQ ID NO: 331114 - RNA, 21 nt, Human
gaaagcuaacagaaaggcaca

SEQ ID NO: 331115 - RNA, 21 nt, Human
gagaauggaggucaucuuggg

SEQ ID NO: 331116 - RNA, 18 nt, Human
gccgagaauggaggucau

SEQ ID NO: 331117 - RNA, 23 nt, Human
gcuaacagaaaggcacauaugga

SEQ ID NO: 331118 - RNA, 18 nt, Human
gggcaaggugaaagccag

SEQ ID NO: 331119 - RNA, 22 nt, Human
ggugaggaaagcauagaaagaa

SEQ ID NO: 331120 - RNA, 19 nt, Human
uaauaggccugucaggcca

SEQ ID NO: 331121 - RNA, 20 nt, Human
uagaucuuuggcuugccaca

SEQ ID NO: 331122 - RNA, 21 nt, Human
uaggacaaggacaauauagcu

SEQ ID NO: 331123 - RNA, 24 nt, Human
uauauuacauguauagcauguaua

SEQ ID NO: 331124 - RNA, 18 nt, Human
ucagaggcaacucuuagg

SEQ ID NO: 331125 - RNA, 23 nt, Human
ucucucauugaaaaaacagaggc

SEQ ID NO: 331126 - RNA, 22 nt, Human
ugacagaaguuuguaacagacu

SEQ ID NO: 331127 - RNA, 24 nt, Human
ugauggugaggaaagcauagaaag

SEQ ID NO: 331128 - RNA, 23 nt, Human
ugccugaccagggaagcgcagcc

SEQ ID NO: 331129 - RNA, 23 nt, Human
uggaaaaagacaccagggcaagg

SEQ ID NO: 331130 - RNA, 19 nt, Human
ugguaaaaauagaggcaca

SEQ ID NO: 331131 - RNA, 19 nt, Human
uguauagcauguauagagg

SEQ ID NO: 331132 - RNA, 18 nt, Human
uuuggucagcuacaugac

SEQ ID NO: 331133 - RNA, 18 nt, Human
aaacccccaacagcggcc

SEQ ID NO: 331134 - RNA, 19 nt, Human
acagcacacccccccacca

SEQ ID NO: 331135 - RNA, 20 nt, Human
acaggaggggcagggcuugg

SEQ ID NO: 331136 - RNA, 23 nt, Human
acccacagcacacccccccacca

SEQ ID NO: 331137 - RNA, 21 nt, Human
acccccaacagcggccucggc

SEQ ID NO: 331138 - RNA, 20 nt, Human
aggaggggcagggcuugggg

SEQ ID NO: 331139 - RNA, 20 nt, Human
aggcgggggggggguucagg

SEQ ID NO: 331140 - RNA, 18 nt, Human
agggaagaggggaaaggg

SEQ ID NO: 331141 - RNA, 24 nt, Human
aggggucuugugcccguggcuggu

SEQ ID NO: 331142 - RNA, 26 nt, Human
auuuuaaaaaaaggcggggggggggg

SEQ ID NO: 331143 - RNA, 24 nt, Human
caauaaauaaauaaauagcuacaa

SEQ ID NO: 331144 - RNA, 20 nt, Human
caccaaaagagaaaacgggg

SEQ ID NO: 331145 - RNA, 22 nt, Human
cagcagcggcucaggccccugc

SEQ ID NO: 331146 - RNA, 18 nt, Human
caugaggucagaacaggu

SEQ ID NO: 331147 - RNA, 23 nt, Human
ccauugcccgaucagccugcuuu

SEQ ID NO: 331148 - RNA, 19 nt, Human
cccacagcacaccccccca

SEQ ID NO: 331149 - RNA, 21 nt, Human
cccacagcacacccccccacc

SEQ ID NO: 331150 - RNA, 23 nt, Human
cccacagcacacccccccaccaa

SEQ ID NO: 331151 - RNA, 27 nt, Human
cccaugguccacacagggaaaccccca

SEQ ID NO: 331152 - RNA, 19 nt, Human
ccccaccaaaagagaaaac

SEQ ID NO: 331153 - RNA, 22 nt, Human
ccccggugcguugauguggggc

SEQ ID NO: 331154 - RNA, 21 nt, Human
cccggguaguugggggaaggu

SEQ ID NO: 331155 - RNA, 21 nt, Human
ccuagcggcggugacuuuuuu

SEQ ID NO: 331156 - RNA, 21 nt, Human
ccucccauugcccgaucagcc

SEQ ID NO: 331157 - RNA, 20 nt, Human
cggcggcagcagcggcucag

SEQ ID NO: 331158 - RNA, 23 nt, Human
cggcggugacuuuuuugggggcc

SEQ ID NO: 331159 - RNA, 18 nt, Human
cgggggggggguucagga

SEQ ID NO: 331160 - RNA, 21 nt, Human
cugcgcggcggcggcggcagc

SEQ ID NO: 331161 - RNA, 20 nt, Human
gagacaccacagcugagugg

SEQ ID NO: 331162 - RNA, 20 nt, Human
gagcggugaguucacggggc

SEQ ID NO: 331163 - RNA, 18 nt, Human
gcacacccccccaccaaa

SEQ ID NO: 331164 - RNA, 21 nt, Human
gcaggccuggccaccucccau

SEQ ID NO: 331165 - RNA, 18 nt, Human
gccuggcaggccagacuc

SEQ ID NO: 331166 - RNA, 20 nt, Human
gcggcagcagcggcucaggc

SEQ ID NO: 331167 - RNA, 19 nt, Human
gcguugauguggggcugcg

SEQ ID NO: 331168 - RNA, 20 nt, Human
ggaaagggagugggauggcu

SEQ ID NO: 331169 - RNA, 19 nt, Human
ggaagguggggaagacagg

SEQ ID NO: 331170 - RNA, 22 nt, Human
ggcuuggggcgggcaggggagc

SEQ ID NO: 331171 - RNA, 18 nt, Human
gggagaggagccuggcag

SEQ ID NO: 331172 - RNA, 21 nt, Human
gggcggggggggggggggucc

SEQ ID NO: 331173 - RNA, 21 nt, Human
ggggcugcgcggcggcggcgg

SEQ ID NO: 331174 - RNA, 24 nt, Human
gggggggggggggucccagggugg

SEQ ID NO: 331175 - RNA, 24 nt, Human
gggggggggggucccaggguggug

SEQ ID NO: 331176 - RNA, 24 nt, Human
gugacuuuuuuggcgguggcggug

SEQ ID NO: 331177 - RNA, 29 nt, Human
guggggcugcgcggcggcggcggcagcaa

SEQ ID NO: 331178 - RNA, 23 nt, Human
uaaauaaauagcuacaauaauaa

SEQ ID NO: 331179 - RNA, 22 nt, Human
uacaauaauaaauaagggugac

SEQ ID NO: 331180 - RNA, 23 nt, Human
uagggugucaucuggccccucuu

SEQ ID NO: 331181 - RNA, 19 nt, Human
ucaggccccugcaguccuc

SEQ ID NO: 331182 - RNA, 19 nt, Human
ucuggugggcggggggggg

SEQ ID NO: 331183 - RNA, 22 nt, Human
ugaauacccacagcacaccccc

SEQ ID NO: 331184 - RNA, 23 nt, Human
ugacaggaccccggugcguugau

SEQ ID NO: 331185 - RNA, 21 nt, Human
ugacuuuuuuggcgguggcgg

SEQ ID NO: 331186 - RNA, 19 nt, Human
uggcaggccuggccaccuc

SEQ ID NO: 331187 - RNA, 19 nt, Human
ugggcgggggggggggggg

SEQ ID NO: 331188 - RNA, 19 nt, Human
uggggcugcgcggcggcgg

SEQ ID NO: 331189 - RNA, 20 nt, Human
uggggcugcgcggcggcggc

SEQ ID NO: 331190 - RNA, 24 nt, Human
uggugaauacccacagcacacccc

SEQ ID NO: 331191 - RNA, 20 nt, Human
ugucaugacaucuccuaagg

SEQ ID NO: 331192 - RNA, 24 nt, Human
uuuagggugucaucuggccccucu

SEQ ID NO: 331193 - RNA, 20 nt, Human
uuuuuuuuuuuugauggucc

SEQ ID NO: 331194 - RNA, 22 nt, Human
uuuuuuuuuuuuuuuuugaugg

SEQ ID NO: 331195 - RNA, 27 nt, Human
uuuuuuuuuuuuuuuuuuuuuuugggg

SEQ ID NO: 331196 - RNA, 20 nt, Human
aaacagagucuucuuuugua

SEQ ID NO: 331197 - RNA, 24 nt, Human
aaagugcugggauuacaggcguga

SEQ ID NO: 331198 - RNA, 19 nt, Human
aagugcugggauuacaggc

SEQ ID NO: 331199 - RNA, 19 nt, Human
aagugcugggauuacaggc

SEQ ID NO: 331200 - RNA, 26 nt, Human
aagugcugggauuacaggcgugagcc

SEQ ID NO: 331201 - RNA, 22 nt, Human
aauggaggaacucucauuuuaa

SEQ ID NO: 331202 - RNA, 25 nt, Human
acccgccucggccucccaaagugcu

SEQ ID NO: 331203 - RNA, 18 nt, Human
acgggguuucaccuuguu

SEQ ID NO: 331204 - RNA, 20 nt, Human
acgggguuucaccuuguuag

SEQ ID NO: 331205 - RNA, 19 nt, Human
acuccgagugcgggacgac

SEQ ID NO: 331206 - RNA, 20 nt, Human
acugcccaggcccugugggc

SEQ ID NO: 331207 - RNA, 18 nt, Human
agcuaugcaggcgagccu

SEQ ID NO: 331208 - RNA, 22 nt, Human
agcucuuccugucgccacagca

SEQ ID NO: 331209 - RNA, 23 nt, Human
aggcagaaaagagacuguucucu

SEQ ID NO: 331210 - RNA, 24 nt, Human
agggagagugggcugagagcggac

SEQ ID NO: 331211 - RNA, 23 nt, Human
agggagcccgauaggaaacaagc

SEQ ID NO: 331212 - RNA, 21 nt, Human
agggggccggggcggggcgcu

SEQ ID NO: 331213 - RNA, 18 nt, Human
agugcugggauuacaggc

SEQ ID NO: 331214 - RNA, 24 nt, Human
augauccacccgccucggccuccc

SEQ ID NO: 331215 - RNA, 24 nt, Human
caaagugcugggauuacaggcgug

SEQ ID NO: 331216 - RNA, 19 nt, Human
caauccuuuucucuuaagu

SEQ ID NO: 331217 - RNA, 23 nt, Human
cacccgccucggccucccaaagu

SEQ ID NO: 331218 - RNA, 24 nt, Human
caccuuguuagccaggauggucuc

SEQ ID NO: 331219 - RNA, 24 nt, Human
cagcaacucaucuugcucugagug

SEQ ID NO: 331220 - RNA, 20 nt, Human
caguguguaacagggagagu

SEQ ID NO: 331221 - RNA, 20 nt, Human
ccaaagugcugggauuacag

SEQ ID NO: 331222 - RNA, 22 nt, Human
ccaaagugcugggauuacaggc

SEQ ID NO: 331223 - RNA, 22 nt, Human
ccaaagugcugggauuacaggc

SEQ ID NO: 331224 - RNA, 24 nt, Human
ccaaagugcugggauuacaggcgu

SEQ ID NO: 331225 - RNA, 18 nt, Human
cccggacggucggcggga

SEQ ID NO: 331226 - RNA, 20 nt, Human
ccugaccucaugauccaccc

SEQ ID NO: 331227 - RNA, 20 nt, Human
cgcaauuggcaugccccuga

SEQ ID NO: 331228 - RNA, 22 nt, Human
cgccacagcaacugcccaggcc

SEQ ID NO: 331229 - RNA, 24 nt, Human
cgccucggccucccaaagugcugg

SEQ ID NO: 331230 - RNA, 18 nt, Human
cgggagggcgcggagggg

SEQ ID NO: 331231 - RNA, 24 nt, Human
cuccugaccucaugauccacccgc

SEQ ID NO: 331232 - RNA, 20 nt, Human
cugaagaaugugugcguguc

SEQ ID NO: 331233 - RNA, 18 nt, Human
cugggaccaucugcagag

SEQ ID NO: 331234 - RNA, 18 nt, Human
gaaugugugcgugucaaa

SEQ ID NO: 331235 - RNA, 18 nt, Human
gaccaucugcagagaacc

SEQ ID NO: 331236 - RNA, 22 nt, Human
gaccucaugauccacccgccuc

SEQ ID NO: 331237 - RNA, 20 nt, Human
gagaagcagacugggugugg

SEQ ID NO: 331238 - RNA, 20 nt, Human
gagacgggguuucaccuugu

SEQ ID NO: 331239 - RNA, 18 nt, Human
gauuacaggcgugagcca

SEQ ID NO: 331240 - RNA, 22 nt, Human
gauuacaggcgugagccaccgc

SEQ ID NO: 331241 - RNA, 22 nt, Human
gauuacaggcgugagccaccgc

SEQ ID NO: 331242 - RNA, 20 nt, Human
gcggagggggccggggcggg

SEQ ID NO: 331243 - RNA, 19 nt, Human
gcgucgggagggcgcggag

SEQ ID NO: 331244 - RNA, 19 nt, Human
ggagggggccggggcgggg

SEQ ID NO: 331245 - RNA, 25 nt, Human
ggaggucaggaaggugggccuugcc

SEQ ID NO: 331246 - RNA, 20 nt, Human
ggcgcggagggggccggggc

SEQ ID NO: 331247 - RNA, 18 nt, Human
gggcaggcaaagaauagc

SEQ ID NO: 331248 - RNA, 24 nt, Human
gggccggggcggggcgcugcggga

SEQ ID NO: 331249 - RNA, 22 nt, Human
ggguuucaccuuguuagccagg

SEQ ID NO: 331250 - RNA, 24 nt, Human
gguaacaggcgcagggcuuugaga

SEQ ID NO: 331251 - RNA, 20 nt, Human
ggucucgaucuccugaccuc

SEQ ID NO: 331252 - RNA, 24 nt, Human
gugaauccccuucguaaaacagag

SEQ ID NO: 331253 - RNA, 23 nt, Human
uacaggcgugagccaccgcgccc

SEQ ID NO: 331254 - RNA, 18 nt, Human
uagcagcaacucaucuug

SEQ ID NO: 331255 - RNA, 24 nt, Human
uaguagagacgggguuucaccuug

SEQ ID NO: 331256 - RNA, 26 nt, Human
uaguagagacgggguuucaccuuguu

SEQ ID NO: 331257 - RNA, 27 nt, Human
uagugaauccccuucguaaaacagagu

SEQ ID NO: 331258 - RNA, 24 nt, Human
ucaccuuguuagccaggauggucu

SEQ ID NO: 331259 - RNA, 24 nt, Human
ucccaaagugcugggauuacaggc

SEQ ID NO: 331260 - RNA, 18 nt, Human
ucgcucccggacggucgg

SEQ ID NO: 331261 - RNA, 18 nt, Human
ucggccucccaaagugcu

SEQ ID NO: 331262 - RNA, 20 nt, Human
ucugacucagccuuugcucc

SEQ ID NO: 331263 - RNA, 23 nt, Human
ugaccucaugauccacccgccuc

SEQ ID NO: 331264 - RNA, 23 nt, Human
ugacuuguagugagagaaagccc

SEQ ID NO: 331265 - RNA, 23 nt, Human
ugagagaaagccccgcagggagc

SEQ ID NO: 331266 - RNA, 21 nt, Human
ugaggggaggucaggaaggug

SEQ ID NO: 331267 - RNA, 18 nt, Human
ugcgggauggucuggucc

SEQ ID NO: 331268 - RNA, 24 nt, Human
ugcugggauuacaggcgugagcca

SEQ ID NO: 331269 - RNA, 23 nt, Human
ugcuuugagaaguugucuuuaac

SEQ ID NO: 331270 - RNA, 18 nt, Human
ugggauuacaggcgugag

SEQ ID NO: 331271 - RNA, 19 nt, Human
ugggauuacaggcgugagc

SEQ ID NO: 331272 - RNA, 21 nt, Human
ugggauuacaggcgugagcca

SEQ ID NO: 331273 - RNA, 22 nt, Human
ugggauuacaggcgugagccac

SEQ ID NO: 331274 - RNA, 23 nt, Human
ugggauuacaggcgugagccacc

SEQ ID NO: 331275 - RNA, 24 nt, Human
ugggauuacaggcgugagccaccg

SEQ ID NO: 331276 - RNA, 21 nt, Human
ugugcuuugagaaguugucuu

SEQ ID NO: 331277 - RNA, 22 nt, Human
ugugcuuugagaaguugucuuu

SEQ ID NO: 331278 - RNA, 22 nt, Human
uguguaacagggagaagcagac

SEQ ID NO: 331279 - RNA, 25 nt, Human
uguguaacagggagagugggcugag

SEQ ID NO: 331280 - RNA, 22 nt, Human
uuagagagucugagcucucuga

SEQ ID NO: 331281 - RNA, 24 nt, Human
uuagcucuuccugucgccacagca

SEQ ID NO: 331282 - RNA, 24 nt, Human
uuaguagagacgggguuucaccuu

SEQ ID NO: 331283 - RNA, 25 nt, Human
uuaguagagacgggguuucaccuug

SEQ ID NO: 331284 - RNA, 18 nt, Human
uuuaaaggcagaaaagag

SEQ ID NO: 331285 - RNA, 24 nt, Human
uuuucucuuaaguguguuucugac

SEQ ID NO: 331286 - RNA, 24 nt, Human
uuuuuaguagagacgggguuucac

SEQ ID NO: 331287 - RNA, 23 nt, Human
uuuuuuaguagagacgggguuuc

SEQ ID NO: 331288 - RNA, 24 nt, Human
uuuuuuuuuuuuuuaguagagacg

SEQ ID NO: 331289 - RNA, 30 nt, Human
uuuuuuuuuuuuuuuuaguagagacggggg

SEQ ID NO: 331290 - RNA, 22 nt, Human
aaacaaaagaugugaaaaacag

SEQ ID NO: 331291 - RNA, 23 nt, Human
aaacaaaagaugugaaaaacagg

SEQ ID NO: 331292 - RNA, 28 nt, Human
aaaccgaaagugaaaggaaaagggaccc

SEQ ID NO: 331293 - RNA, 19 nt, Human
aaaguucacggaaaaacuc

SEQ ID NO: 331294 - RNA, 18 nt, Human
aaauaagaaaacacacug

SEQ ID NO: 331295 - RNA, 23 nt, Human
aacaugaugagaaaagcacaccu

SEQ ID NO: 331296 - RNA, 24 nt, Human
aaccaacaugaugagaaaagcaca

SEQ ID NO: 331297 - RNA, 22 nt, Human
acacuggcuaucaaugccagag

SEQ ID NO: 331298 - RNA, 18 nt, Human
acaguauaaaguucacgg

SEQ ID NO: 331299 - RNA, 20 nt, Human
acuggauuuaguagguuucc

SEQ ID NO: 331300 - RNA, 24 nt, Human
agaaaaagauggugguaaaaaaaa

SEQ ID NO: 331301 - RNA, 20 nt, Human
caccggcugcacucgcccgc

SEQ ID NO: 331302 - RNA, 22 nt, Human
cagaacaccccaaauucucuuu

SEQ ID NO: 331303 - RNA, 22 nt, Human
cagccaaaaacagagcagguac

SEQ ID NO: 331304 - RNA, 23 nt, Human
ccaaaugccacuguaugaacacc

SEQ ID NO: 331305 - RNA, 22 nt, Human
ccagcaaacuggaaguggauga

SEQ ID NO: 331306 - RNA, 24 nt, Human
ccaugcuguggagccgcacugggc

SEQ ID NO: 331307 - RNA, 21 nt, Human
ccccauaaagaucuacuucca

SEQ ID NO: 331308 - RNA, 19 nt, Human
cgccgggucaccggcugca

SEQ ID NO: 331309 - RNA, 21 nt, Human
cggccccagcuuacauggucu

SEQ ID NO: 331310 - RNA, 19 nt, Human
cggcgcgucucggugggga

SEQ ID NO: 331311 - RNA, 23 nt, Human
cgguggggaagggccuggggcgg

SEQ ID NO: 331312 - RNA, 19 nt, Human
cuccgcgcaggcgcagggc

SEQ ID NO: 331313 - RNA, 24 nt, Human
cuccgcgcaggcgcagggcccucc

SEQ ID NO: 331314 - RNA, 21 nt, Human
cugaauuccagaaaaagcaca

SEQ ID NO: 331315 - RNA, 22 nt, Human
gcaaccgccggucucccagcgg

SEQ ID NO: 331316 - RNA, 19 nt, Human
gcacaccucacaauugaca

SEQ ID NO: 331317 - RNA, 22 nt, Human
gcagaacaccccaaauucucuu

SEQ ID NO: 331318 - RNA, 24 nt, Human
gcccaguagguuuggguaaaggua

SEQ ID NO: 331319 - RNA, 22 nt, Human
gccggacuccagcuccgcgcag

SEQ ID NO: 331320 - RNA, 22 nt, Human
gcgcaggcgcagggcccuccac

SEQ ID NO: 331321 - RNA, 23 nt, Human
gcgcagggcccuccacccuccgu

SEQ ID NO: 331322 - RNA, 18 nt, Human
ggaccggaggagggaggg

SEQ ID NO: 331323 - RNA, 18 nt, Human
ggaugagcggccccagcu

SEQ ID NO: 331324 - RNA, 21 nt, Human
ggccccagcuuacauggucua

SEQ ID NO: 331325 - RNA, 19 nt, Human
ggccuggggcgggggaccg

SEQ ID NO: 331326 - RNA, 18 nt, Human
ggcuacaggacauacagu

SEQ ID NO: 331327 - RNA, 21 nt, Human
gggaagggccuggggcggggg

SEQ ID NO: 331328 - RNA, 19 nt, Human
gugaaaggaaaaauaugaa

SEQ ID NO: 331329 - RNA, 20 nt, Human
guggaugagcggccccagcu

SEQ ID NO: 331330 - RNA, 25 nt, Human
uaaaaugaacaggaaacaaaagaug

SEQ ID NO: 331331 - RNA, 22 nt, Human
uaaagaucuacuuccauacaga

SEQ ID NO: 331332 - RNA, 22 nt, Human
uacuccagauauacuuccugaa

SEQ ID NO: 331333 - RNA, 18 nt, Human
uagaaaaagaugguggua

SEQ ID NO: 331334 - RNA, 25 nt, Human
uagaaaaagauggugguaaaaaaaa

SEQ ID NO: 331335 - RNA, 19 nt, Human
uaugauuugcugugccacu

SEQ ID NO: 331336 - RNA, 21 nt, Human
ucauacaucagauuccaugcu

SEQ ID NO: 331337 - RNA, 27 nt, Human
uccaacgauugugucccaaaugccacu

SEQ ID NO: 331338 - RNA, 22 nt, Human
uccagaaaaagcacaguacaau

SEQ ID NO: 331339 - RNA, 22 nt, Human
ucccaaaugccacuguaugaac

SEQ ID NO: 331340 - RNA, 23 nt, Human
uccccacggcaaccgccggucuc

SEQ ID NO: 331341 - RNA, 21 nt, Human
ucgccgggucaccggcugcac

SEQ ID NO: 331342 - RNA, 23 nt, Human
ucucacagccaaaaacagagcag

SEQ ID NO: 331343 - RNA, 20 nt, Human
ucucuuuuccccauaaagau

SEQ ID NO: 331344 - RNA, 21 nt, Human
ugaaaaacaggcagugaugcc

SEQ ID NO: 331345 - RNA, 19 nt, Human
ugagaaaagcacaccucac

SEQ ID NO: 331346 - RNA, 24 nt, Human
ugccacauucuaucauaucauaca

SEQ ID NO: 331347 - RNA, 21 nt, Human
uggaaguggaugagcggcccc

SEQ ID NO: 331348 - RNA, 25 nt, Human
uggaucacguaaacaccaguuaaaa

SEQ ID NO: 331349 - RNA, 25 nt, Human
uguagaauguaguaaacggaguuaa

SEQ ID NO: 331350 - RNA, 21 nt, Human
ugugcaauauaaccaacauga

SEQ ID NO: 331351 - RNA, 24 nt, Human
uguuuuaaaccgaaagugaaagga

SEQ ID NO: 331352 - RNA, 25 nt, Human
uugcugugccacuuugacuggcuug

SEQ ID NO: 331353 - RNA, 22 nt, Human
uuuuuuuuuuuuuuuugagugg

SEQ ID NO: 331354 - RNA, 21 nt, Human
uuuuuuuuuuuuuuuuuuugg

SEQ ID NO: 331355 - RNA, 20 nt, Human
aaaaaaaaaaaccagacugg

SEQ ID NO: 331356 - RNA, 27 nt, Human
aaaaaaccagacuggguagugggcacc

SEQ ID NO: 331357 - RNA, 22 nt, Human
aaaaccuguguaauggccagcg

SEQ ID NO: 331358 - RNA, 23 nt, Human
aaaagcccccuccccaccccaaa

SEQ ID NO: 331359 - RNA, 23 nt, Human
aaacaaguguccacauaguucuc

SEQ ID NO: 331360 - RNA, 19 nt, Human
aaaggaacacugaccauua

SEQ ID NO: 331361 - RNA, 25 nt, Human
aaagggaacaaaagcccccucccca

SEQ ID NO: 331362 - RNA, 23 nt, Human
aaauuauucccccuaaccuucca

SEQ ID NO: 331363 - RNA, 18 nt, Human
aauacagguaccaggaga

SEQ ID NO: 331364 - RNA, 23 nt, Human
agaaaugaacauuugccugaaua

SEQ ID NO: 331365 - RNA, 23 nt, Human
caaagaauguuuuugaaaagccc

SEQ ID NO: 331366 - RNA, 22 nt, Human
caagccgagcugcggggccgaa

SEQ ID NO: 331367 - RNA, 24 nt, Human
caccccaaacaacaaaaccugugu

SEQ ID NO: 331368 - RNA, 18 nt, Human
cagcaaggcccaggcgug

SEQ ID NO: 331369 - RNA, 23 nt, Human
cauggaggaacaacugaagcccc

SEQ ID NO: 331370 - RNA, 23 nt, Human
cauuuaaaaaaaaaaaccagacu

SEQ ID NO: 331371 - RNA, 21 nt, Human
ccaaugaaacaaguguccaca

SEQ ID NO: 331372 - RNA, 23 nt, Human
ccagacuggguauaauuaagaua

SEQ ID NO: 331373 - RNA, 24 nt, Human
cccccuaaccuuccaaugaaacaa

SEQ ID NO: 331374 - RNA, 18 nt, Human
cccccuccccaccccaaa

SEQ ID NO: 331375 - RNA, 19 nt, Human
cccccuccccaccccaaac

SEQ ID NO: 331376 - RNA, 24 nt, Human
cccuccccaccccaaacaacaaaa

SEQ ID NO: 331377 - RNA, 19 nt, Human
ccgcagcaagccgagcugc

SEQ ID NO: 331378 - RNA, 26 nt, Human
ccuccccaccccaaacaacaaaaccu

SEQ ID NO: 331379 - RNA, 18 nt, Human
ccugagaccgcagcaagc

SEQ ID NO: 331380 - RNA, 22 nt, Human
ccugagaccgcagcaagccgag

SEQ ID NO: 331381 - RNA, 20 nt, Human
ccugucaaagggggagagag

SEQ ID NO: 331382 - RNA, 20 nt, Human
cucaauauaaaacuaaacac

SEQ ID NO: 331383 - RNA, 19 nt, Human
cuuaaaauaauucuguauu

SEQ ID NO: 331384 - RNA, 21 nt, Human
cuuccuggcagcaaggcccag

SEQ ID NO: 331385 - RNA, 20 nt, Human
gaaucuccuucuaaacaaag

SEQ ID NO: 331386 - RNA, 24 nt, Human
gagaaauuauucccccuaaccuuc

SEQ ID NO: 331387 - RNA, 20 nt, Human
gccauggaggaacaacugaa

SEQ ID NO: 331388 - RNA, 22 nt, Human
gggggagagagaaauaauuagc

SEQ ID NO: 331389 - RNA, 18 nt, Human
uaaaaaaaaaaaccagac

SEQ ID NO: 331390 - RNA, 23 nt, Human
uaaaauaauucuguauuagaaac

SEQ ID NO: 331391 - RNA, 26 nt, Human
uaaaauaauucuguauuagaaacuug

SEQ ID NO: 331392 - RNA, 23 nt, Human
uaauacucuuccccaccccugac

SEQ ID NO: 331393 - RNA, 26 nt, Human
uaccccauuuaaaaaaaaaaaccagu

SEQ ID NO: 331394 - RNA, 22 nt, Human
uagaaucuccuucuaaacaaag

SEQ ID NO: 331395 - RNA, 21 nt, Human
uauggagacuacaaugcagua

SEQ ID NO: 331396 - RNA, 20 nt, Human
uaugguucuagccauggagg

SEQ ID NO: 331397 - RNA, 28 nt, Human
uauuaugucaaaagggaacaaaagcccc

SEQ ID NO: 331398 - RNA, 26 nt, Human
ucagacucuucaaugaacuuccagaa

SEQ ID NO: 331399 - RNA, 21 nt, Human
uccuggcagcaaggcccaggc

SEQ ID NO: 331400 - RNA, 19 nt, Human
ucuuccccaccccugaccu

SEQ ID NO: 331401 - RNA, 19 nt, Human
ucuucuuuccggagguaaa

SEQ ID NO: 331402 - RNA, 21 nt, Human
ugaaaagcccaaauuaguaag

SEQ ID NO: 331403 - RNA, 19 nt, Human
ugaaaggaacacugaccau

SEQ ID NO: 331404 - RNA, 23 nt, Human
ugacacaugguagcuuucauaua

SEQ ID NO: 331405 - RNA, 23 nt, Human
ugagcaccucaauauaaaacuaa

SEQ ID NO: 331406 - RNA, 18 nt, Human
uggcuaagcaucauaaau

SEQ ID NO: 331407 - RNA, 19 nt, Human
ugggauuauuuucuugugg

SEQ ID NO: 331408 - RNA, 20 nt, Human
uggguauaauuaagauacca

SEQ ID NO: 331409 - RNA, 18 nt, Human
ugguuuauuucauuuuug

SEQ ID NO: 331410 - RNA, 23 nt, Human
ugucaaaagggaacaaaagcccc

SEQ ID NO: 331411 - RNA, 22 nt, Human
uguguaauggccagcggugauu

SEQ ID NO: 331412 - RNA, 23 nt, Human
uuagaaucuccuucuaaacaaag

SEQ ID NO: 331413 - RNA, 21 nt, Human
uucacaggugacuacuguacc

SEQ ID NO: 331414 - RNA, 23 nt, Human
uucauauaaugaaaauaccuaaa

SEQ ID NO: 331415 - RNA, 18 nt, Human
uucucaaaauuccuaaaa

SEQ ID NO: 331416 - RNA, 20 nt, Human
uuuaaaaaaaaaaaccagac

SEQ ID NO: 331417 - RNA, 23 nt, Human
uuugauuuuuaccccauuuaaaa

SEQ ID NO: 331418 - RNA, 24 nt, Human
uuuuuuugcuuuuuauaccacuuu

SEQ ID NO: 331419 - RNA, 24 nt, Human
uuuuuuuuuuuuuuuugcuuuuua

SEQ ID NO: 331420 - RNA, 18 nt, Human
uuuuuuuuuuuuuuuuug

SEQ ID NO: 331421 - RNA, 24 nt, Human
uuuuuuuuuuuuuuuuuugcuuuu

SEQ ID NO: 331422 - RNA, 20 nt, Human
aaaccuccuucucaguuccu

SEQ ID NO: 331423 - RNA, 22 nt, Human
aaccaaauaaaaacaaaaagga

SEQ ID NO: 331424 - RNA, 23 nt, Human
aagcagaaggggaagggacagga

SEQ ID NO: 331425 - RNA, 24 nt, Human
aagcagaaggggaagggacaggag

SEQ ID NO: 331426 - RNA, 27 nt, Human
acccggcaccuccugcuuggugucccu

SEQ ID NO: 331427 - RNA, 20 nt, Human
accuaggaacacccuccaca

SEQ ID NO: 331428 - RNA, 25 nt, Human
accuccaccuccgcccaguuagcuu

SEQ ID NO: 331429 - RNA, 19 nt, Human
agaaggggaagggacagga

SEQ ID NO: 331430 - RNA, 19 nt, Human
agccccagaguagggggua

SEQ ID NO: 331431 - RNA, 26 nt, Human
agcugccugguguuuguugcugaagc

SEQ ID NO: 331432 - RNA, 19 nt, Human
agcugucaggaggcagccc

SEQ ID NO: 331433 - RNA, 19 nt, Human
aggaacacuagggaggagg

SEQ ID NO: 331434 - RNA, 18 nt, Human
aggagaaaagaggcucaa

SEQ ID NO: 331435 - RNA, 21 nt, Human
aggcaaccagugaaaauucuu

SEQ ID NO: 331436 - RNA, 21 nt, Human
aucucccccaggcccuuaaug

SEQ ID NO: 331437 - RNA, 25 nt, Human
aucuugccuccccauucucaccucu

SEQ ID NO: 331438 - RNA, 20 nt, Human
caagccccagaguagggggu

SEQ ID NO: 331439 - RNA, 19 nt, Human
cacccuccacaaggccaaa

SEQ ID NO: 331440 - RNA, 22 nt, Human
cagacuacagcagagccaaaga

SEQ ID NO: 331441 - RNA, 27 nt, Human
cagcugccugguguuuguugcugaagc

SEQ ID NO: 331442 - RNA, 22 nt, Human
ccacaguugacccugcaccucc

SEQ ID NO: 331443 - RNA, 25 nt, Human
cccacgauuaggggaaaccgggguc

SEQ ID NO: 331444 - RNA, 28 nt, Human
cccccaagccccagaguaggggguaggg

SEQ ID NO: 331445 - RNA, 18 nt, Human
cccccaggcccuuaaugu

SEQ ID NO: 331446 - RNA, 19 nt, Human
cccuccugcucgagcuuua

SEQ ID NO: 331447 - RNA, 19 nt, Human
ccuccuucucaguuccugg

SEQ ID NO: 331448 - RNA, 24 nt, Human
cuaccuaggaacacccuccacaag

SEQ ID NO: 331449 - RNA, 20 nt, Human
cucaccucuaccuaggaaca

SEQ ID NO: 331450 - RNA, 20 nt, Human
cuccuccaaucagacuacag

SEQ ID NO: 331451 - RNA, 19 nt, Human
cugaaaaaaucggggagga

SEQ ID NO: 331452 - RNA, 22 nt, Human
cugagaucuugccuccccauuc

SEQ ID NO: 331453 - RNA, 18 nt, Human
cugcaccuccaccuccgc

SEQ ID NO: 331454 - RNA, 26 nt, Human
cuggaaaccuccuucucaguuccugg

SEQ ID NO: 331455 - RNA, 18 nt, Human
gaacacccuccacaaggg

SEQ ID NO: 331456 - RNA, 20 nt, Human
gaagaaaguuuguuuuggaa

SEQ ID NO: 331457 - RNA, 22 nt, Human
gagaaacuccaaccaaauaaaa

SEQ ID NO: 331458 - RNA, 20 nt, Human
gaggaacacuagggaggagg

SEQ ID NO: 331459 - RNA, 18 nt, Human
gaggcagcccuuggagcc

SEQ ID NO: 331460 - RNA, 22 nt, Human
gaucuugccuccccauucucac

SEQ ID NO: 331461 - RNA, 20 nt, Human
ggaagacucugggguccaac

SEQ ID NO: 331462 - RNA, 22 nt, Human
ggcccuuaauguaaaugaacug

SEQ ID NO: 331463 - RNA, 19 nt, Human
gggagaggagaaaagaggc

SEQ ID NO: 331464 - RNA, 22 nt, Human
guaaaugaacuggaaaccuccu

SEQ ID NO: 331465 - RNA, 23 nt, Human
uaaaugaacuggaaaccuccuuc

SEQ ID NO: 331466 - RNA, 18 nt, Human
uaagaggcugcgugaggg

SEQ ID NO: 331467 - RNA, 20 nt, Human
uaaguccuggggggaguuga

SEQ ID NO: 331468 - RNA, 21 nt, Human
uaccuaggaacacccuccaca

SEQ ID NO: 331469 - RNA, 22 nt, Human
uaccuaggaacacccuccacaa

SEQ ID NO: 331470 - RNA, 23 nt, Human
uaggaacacccuccacaaggcca

SEQ ID NO: 331471 - RNA, 24 nt, Human
uaggaacacccuccacaaggccaa

SEQ ID NO: 331472 - RNA, 25 nt, Human
ucagacuacagcagagccaaagacg

SEQ ID NO: 331473 - RNA, 24 nt, Human
uccaaccaaauaaaaacaaaaagg

SEQ ID NO: 331474 - RNA, 21 nt, Human
uccacaaggccaaaucaugga

SEQ ID NO: 331475 - RNA, 22 nt, Human
ucccugagaucuugccucccca

SEQ ID NO: 331476 - RNA, 19 nt, Human
ucgagggguagggauggcg

SEQ ID NO: 331477 - RNA, 21 nt, Human
ugcaccuccaccuccgcccag

SEQ ID NO: 331478 - RNA, 18 nt, Human
uggaagguaaguccuggg

SEQ ID NO: 331479 - RNA, 20 nt, Human
uggagccagggcuagugugc

SEQ ID NO: 331480 - RNA, 19 nt, Human
uggggagaggagaaaagag

SEQ ID NO: 331481 - RNA, 21 nt, Human
uggggcugaggccaucuaaag

SEQ ID NO: 331482 - RNA, 23 nt, Human
uguauaaaucagaggauggguac

SEQ ID NO: 331483 - RNA, 21 nt, Human
uuccuggguucaccacaaaca

SEQ ID NO: 331484 - RNA, 22 nt, Human
uucuuagcucuugugcuagcuc

SEQ ID NO: 331485 - RNA, 21 nt, Human
aaaccaaagaccacuccgaac

SEQ ID NO: 331486 - RNA, 21 nt, Human
aaccaaagaccacuccgaaca

SEQ ID NO: 331487 - RNA, 21 nt, Human
aagaggcacuuaguggggagg

SEQ ID NO: 331488 - RNA, 23 nt, Human
aagccccuucccaaggucugccc

SEQ ID NO: 331489 - RNA, 25 nt, Human
aauacaaaauacagaaaaaguuggu

SEQ ID NO: 331490 - RNA, 22 nt, Human
accccacuguccccauauacaa

SEQ ID NO: 331491 - RNA, 22 nt, Human
accccucccccugcccccccag

SEQ ID NO: 331492 - RNA, 26 nt, Human
accuccaaggcggcuccggggcggcg

SEQ ID NO: 331493 - RNA, 24 nt, Human
acugaccccacuguccccauauac

SEQ ID NO: 331494 - RNA, 20 nt, Human
agagguuggggugaccgagg

SEQ ID NO: 331495 - RNA, 21 nt, Human
agccagagguuggggugaccg

SEQ ID NO: 331496 - RNA, 24 nt, Human
agccagagguuggggugaccgagg

SEQ ID NO: 331497 - RNA, 24 nt, Human
agcggggagggggcugcagccuga

SEQ ID NO: 331498 - RNA, 24 nt, Human
agcugcacugaccccacugucccc

SEQ ID NO: 331499 - RNA, 19 nt, Human
aggauguggaugcucuugc

SEQ ID NO: 331500 - RNA, 20 nt, Human
agguuggggugaccgagggu

SEQ ID NO: 331501 - RNA, 18 nt, Human
aguagaaaggggaggaag

SEQ ID NO: 331502 - RNA, 23 nt, Human
caauaaugcugugauaaugcugu

SEQ ID NO: 331503 - RNA, 19 nt, Human
cacucccccccuuacccac

SEQ ID NO: 331504 - RNA, 21 nt, Human
cacucccccccuuacccaccc

SEQ ID NO: 331505 - RNA, 20 nt, Human
caggcggaggaggcgggggc

SEQ ID NO: 331506 - RNA, 24 nt, Human
cagggcucagagccagagguuggg

SEQ ID NO: 331507 - RNA, 25 nt, Human
cagggcucagagccagagguugggg

SEQ ID NO: 331508 - RNA, 18 nt, Human
cagucgggucauucaggc

SEQ ID NO: 331509 - RNA, 20 nt, Human
caugguggaccccucccccu

SEQ ID NO: 331510 - RNA, 19 nt, Human
cccacccccaaauacucau

SEQ ID NO: 331511 - RNA, 21 nt, Human
cccaccgcccaaaccaaagac

SEQ ID NO: 331512 - RNA, 25 nt, Human
cccaccgcccaaaccaaagaccacu

SEQ ID NO: 331513 - RNA, 26 nt, Human
ccccacuguccccauauacaaggguu

SEQ ID NO: 331514 - RNA, 20 nt, Human
ccccagugguggcccgaguc

SEQ ID NO: 331515 - RNA, 19 nt, Human
cccccccuuacccacccac

SEQ ID NO: 331516 - RNA, 20 nt, Human
cccccccuuacccacccacc

SEQ ID NO: 331517 - RNA, 24 nt, Human
cccccccuuacccacccaccccca

SEQ ID NO: 331518 - RNA, 20 nt, Human
ccccccuuacccacccaccc

SEQ ID NO: 331519 - RNA, 23 nt, Human
ccccuuacccacccacccccaaa

SEQ ID NO: 331520 - RNA, 19 nt, Human
cccucccacucccccccuu

SEQ ID NO: 331521 - RNA, 18 nt, Human
ccguccagcuguaguggu

SEQ ID NO: 331522 - RNA, 21 nt, Human
ccuaagccccuucccaagguc

SEQ ID NO: 331523 - RNA, 21 nt, Human
ccucccacucccccccuuacc

SEQ ID NO: 331524 - RNA, 22 nt, Human
ccuuccuaagccccuucccaag

SEQ ID NO: 331525 - RNA, 19 nt, Human
cgcccaaaccaaagaccac

SEQ ID NO: 331526 - RNA, 21 nt, Human
cgcccaaaccaaagaccacuc

SEQ ID NO: 331527 - RNA, 19 nt, Human
cggggagggggcugcagcc

SEQ ID NO: 331528 - RNA, 20 nt, Human
cggggagggggcugcagccu

SEQ ID NO: 331529 - RNA, 18 nt, Human
cgugcggguggggacugg

SEQ ID NO: 331530 - RNA, 21 nt, Human
cuaagccccuucccaaggucu

SEQ ID NO: 331531 - RNA, 22 nt, Human
cugaccccacuguccccauaua

SEQ ID NO: 331532 - RNA, 18 nt, Human
cugugguuucccagcagg

SEQ ID NO: 331533 - RNA, 22 nt, Human
cuuacccacccacccccaaaua

SEQ ID NO: 331534 - RNA, 19 nt, Human
gcccaaaccaaagaccacu

SEQ ID NO: 331535 - RNA, 25 nt, Human
gcccaaaccaaagaccacuccgaac

SEQ ID NO: 331536 - RNA, 21 nt, Human
gccccaccgcccaaaccaaag

SEQ ID NO: 331537 - RNA, 22 nt, Human
gccccaccgcccaaaccaaaga

SEQ ID NO: 331538 - RNA, 20 nt, Human
gcccccccagugguggcccg

SEQ ID NO: 331539 - RNA, 20 nt, Human
ggcggaggaggcgggggcag

SEQ ID NO: 331540 - RNA, 18 nt, Human
gggagcggggagggggcu

SEQ ID NO: 331541 - RNA, 18 nt, Human
ggggagggggaccuccaa

SEQ ID NO: 331542 - RNA, 21 nt, Human
ggucagaacagggcucagagc

SEQ ID NO: 331543 - RNA, 24 nt, Human
gguggaccccucccccugcccccc

SEQ ID NO: 331544 - RNA, 21 nt, Human
guccccucccacucccccccu

SEQ ID NO: 331545 - RNA, 25 nt, Human
guuccguccccucccacuccccccc

SEQ ID NO: 331546 - RNA, 22 nt, Human
uaaaaaagugacuuaagacuua

SEQ ID NO: 331547 - RNA, 22 nt, Human
uacaaggguuggggggcaagag

SEQ ID NO: 331548 - RNA, 20 nt, Human
uacaauacaaaauacagaaa

SEQ ID NO: 331549 - RNA, 27 nt, Human
uacugauugguuacauguugaagaaaa

SEQ ID NO: 331550 - RNA, 24 nt, Human
uaugaucaaaauuauauggagaaa

SEQ ID NO: 331551 - RNA, 19 nt, Human
ucccacucccccccuuacc

SEQ ID NO: 331552 - RNA, 18 nt, Human
uccguccccucccacucc

SEQ ID NO: 331553 - RNA, 19 nt, Human
uccuaagccccuucccaag

SEQ ID NO: 331554 - RNA, 23 nt, Human
ucugccccaccgcccaaaccaaa

SEQ ID NO: 331555 - RNA, 20 nt, Human
ugacucacuccggccuauga

SEQ ID NO: 331556 - RNA, 18 nt, Human
ugcagccugaugagagcc

SEQ ID NO: 331557 - RNA, 22 nt, Human
ugccccaccgcccaaaccaaag

SEQ ID NO: 331558 - RNA, 24 nt, Human
ugccccaccgcccaaaccaaagac

SEQ ID NO: 331559 - RNA, 29 nt, Human
ugccccaccgcccaaaccaaagaccacuc

SEQ ID NO: 331560 - RNA, 22 nt, Human
uggaccccucccccugcccccc

SEQ ID NO: 331561 - RNA, 22 nt, Human
uggcccgagucguuaagugcga

SEQ ID NO: 331562 - RNA, 21 nt, Human
ugggaagagcagaagaucaua

SEQ ID NO: 331563 - RNA, 22 nt, Human
ugggagagcaguagaaagggga

SEQ ID NO: 331564 - RNA, 22 nt, Human
ugggagcggggagggggcugca

SEQ ID NO: 331565 - RNA, 22 nt, Human
uggggggcaagagcauguggcu

SEQ ID NO: 331566 - RNA, 20 nt, Human
uuacccacccacccccaaau

SEQ ID NO: 331567 - RNA, 21 nt, Human
uugguuccguccccucccacu

SEQ ID NO: 331568 - RNA, 23 nt, Human
aaaaaagaaaaaaauguuaagaa

SEQ ID NO: 331569 - RNA, 21 nt, Human
aaaaagaaaacccaagcaaaa

SEQ ID NO: 331570 - RNA, 24 nt, Human
aaaaaugcuaaaaaauaaggcaua

SEQ ID NO: 331571 - RNA, 22 nt, Human
aaaacuuuuacagugccuugcc

SEQ ID NO: 331572 - RNA, 22 nt, Human
aaagaaaacccaagcaaaaucu

SEQ ID NO: 331573 - RNA, 20 nt, Human
aacauuaaaaaagaaaaaaa

SEQ ID NO: 331574 - RNA, 22 nt, Human
aagugggaaguggaggaggaag

SEQ ID NO: 331575 - RNA, 24 nt, Human
aauaagugggaaguggaggaggaa

SEQ ID NO: 331576 - RNA, 19 nt, Human
acagugccuugccugcaca

SEQ ID NO: 331577 - RNA, 22 nt, Human
acaucugaagauugaaaguugu

SEQ ID NO: 331578 - RNA, 22 nt, Human
accuuaaaaaaugcuaaaaaau

SEQ ID NO: 331579 - RNA, 20 nt, Human
acuuuuguugugcuugugaa

SEQ ID NO: 331580 - RNA, 22 nt, Human
agaauuaaauacuaaaaaccug

SEQ ID NO: 331581 - RNA, 23 nt, Human
agaggaaagagaggggacuaagg

SEQ ID NO: 331582 - RNA, 24 nt, Human
agccauuuguuuuagucagaaaua

SEQ ID NO: 331583 - RNA, 22 nt, Human
agccuagagaccucccggaccg

SEQ ID NO: 331584 - RNA, 21 nt, Human
agcucuaaauagauucaacga

SEQ ID NO: 331585 - RNA, 22 nt, Human
aggaagaggaaagagaggggac

SEQ ID NO: 331586 - RNA, 22 nt, Human
aggaagucgggggaggcuaggu

SEQ ID NO: 331587 - RNA, 26 nt, Human
aggcaaagaaauaaauaucaccaaag

SEQ ID NO: 331588 - RNA, 22 nt, Human
auuccaaugggcuugguagaac

SEQ ID NO: 331589 - RNA, 18 nt, Human
caaaaccagccugaaaga

SEQ ID NO: 331590 - RNA, 22 nt, Human
caaaaccagccugaaagaccca

SEQ ID NO: 331591 - RNA, 23 nt, Human
caaaccaaaaccagccugaaaga

SEQ ID NO: 331592 - RNA, 22 nt, Human
caaauguccugagcaaaguuuu

SEQ ID NO: 331593 - RNA, 21 nt, Human
caaccuuaaaaaaugcuaaaa

SEQ ID NO: 331594 - RNA, 20 nt, Human
cacagcugccgccgccccuc

SEQ ID NO: 331595 - RNA, 18 nt, Human
cacuuuacaacuccaucc

SEQ ID NO: 331596 - RNA, 20 nt, Human
cacuuuacaacuccauccca

SEQ ID NO: 331597 - RNA, 19 nt, Human
cagccgccgccgccucccg

SEQ ID NO: 331598 - RNA, 20 nt, Human
cagccgccgccgccucccgg

SEQ ID NO: 331599 - RNA, 22 nt, Human
cagccuagagaccucccggacc

SEQ ID NO: 331600 - RNA, 18 nt, Human
cagccugaaagacccaac

SEQ ID NO: 331601 - RNA, 23 nt, Human
caggagccagggguguccucugg

SEQ ID NO: 331602 - RNA, 22 nt, Human
ccaaccuuaaaaaaugcuaaaa

SEQ ID NO: 331603 - RNA, 22 nt, Human
ccaauauucacacugcagucaa

SEQ ID NO: 331604 - RNA, 21 nt, Human
ccacagacuggcagccgccgc

SEQ ID NO: 331605 - RNA, 18 nt, Human
ccacagcugccgccgccc

SEQ ID NO: 331606 - RNA, 21 nt, Human
cccaaccuuaaaaaaugcuaa

SEQ ID NO: 331607 - RNA, 25 nt, Human
cccaagcaaaaucuauugcuuaaag

SEQ ID NO: 331608 - RNA, 26 nt, Human
cccgcggcugggaagggaaggagggc

SEQ ID NO: 331609 - RNA, 18 nt, Human
ccgccgccgccucccggc

SEQ ID NO: 331610 - RNA, 26 nt, Human
ccucccggaccgaugcugcuccagcc

SEQ ID NO: 331611 - RNA, 24 nt, Human
cgagcggaagggcgggcaccgagc

SEQ ID NO: 331612 - RNA, 20 nt, Human
cgcacucggcucccagaccu

SEQ ID NO: 331613 - RNA, 19 nt, Human
cggcagaguagccuagcac

SEQ ID NO: 331614 - RNA, 23 nt, Human
cgugaagaauuaaauacuaaaaa

SEQ ID NO: 331615 - RNA, 20 nt, Human
cuaauagaucaucuccacga

SEQ ID NO: 331616 - RNA, 19 nt, Human
cuagagaccucccggaccg

SEQ ID NO: 331617 - RNA, 22 nt, Human
cucaaauguccugagcaaaguu

SEQ ID NO: 331618 - RNA, 24 nt, Human
cuccacagacuggcagccgccgcc

SEQ ID NO: 331619 - RNA, 21 nt, Human
cucccagagucuaauaaagca

SEQ ID NO: 331620 - RNA, 20 nt, Human
cucucucggccccugcaagg

SEQ ID NO: 331621 - RNA, 19 nt, Human
cugccgccgccccucgugc

SEQ ID NO: 331622 - RNA, 21 nt, Human
cuuccacagcugccgccgccc

SEQ ID NO: 331623 - RNA, 24 nt, Human
cuucccaaagcuagggccguuccc

SEQ ID NO: 331624 - RNA, 24 nt, Human
cuugguccguagccuacagcaagu

SEQ ID NO: 331625 - RNA, 21 nt, Human
cuugguuaauuuucucuccca

SEQ ID NO: 331626 - RNA, 23 nt, Human
gaaauacauauugccauggugaa

SEQ ID NO: 331627 - RNA, 21 nt, Human
gaagagaagcugaggguggcg

SEQ ID NO: 331628 - RNA, 20 nt, Human
gagggcggugucggcaggag

SEQ ID NO: 331629 - RNA, 19 nt, Human
gcaaaaucuauugcuuaaa

SEQ ID NO: 331630 - RNA, 18 nt, Human
gccagcugacgaaaaagg

SEQ ID NO: 331631 - RNA, 22 nt, Human
gccggaaccgcagacguaucug

SEQ ID NO: 331632 - RNA, 19 nt, Human
gcuuacacagcaaucucac

SEQ ID NO: 331633 - RNA, 20 nt, Human
ggaagggaaggagggcggug

SEQ ID NO: 331634 - RNA, 21 nt, Human
ggaaguggaggaggaagagga

SEQ ID NO: 331635 - RNA, 20 nt, Human
ggaauggggguaagugagag

SEQ ID NO: 331636 - RNA, 21 nt, Human
ggaauggggguaagugagagg

SEQ ID NO: 331637 - RNA, 22 nt, Human
ggagagauaaaguaggcuguga

SEQ ID NO: 331638 - RNA, 24 nt, Human
ggaggaggaagaggaaagagaggg

SEQ ID NO: 331639 - RNA, 20 nt, Human
ggcagccgccgccgccuccc

SEQ ID NO: 331640 - RNA, 23 nt, Human
gggaaggagggcggugucggcag

SEQ ID NO: 331641 - RNA, 19 nt, Human
gggaagggaaggagggcgg

SEQ ID NO: 331642 - RNA, 22 nt, Human
gggaaguggaggaggaagagga

SEQ ID NO: 331643 - RNA, 19 nt, Human
gggaauggggguaagugag

SEQ ID NO: 331644 - RNA, 22 nt, Human
gguucuuuuguugguaagcuuu

SEQ ID NO: 331645 - RNA, 25 nt, Human
gugaagcucuaaauagauucaacga

SEQ ID NO: 331646 - RNA, 18 nt, Human
gugacaauaagugggaag

SEQ ID NO: 331647 - RNA, 19 nt, Human
uaaaagcacuuuacaacuc

SEQ ID NO: 331648 - RNA, 25 nt, Human
uacacagcaaucucacaauaacuag

SEQ ID NO: 331649 - RNA, 22 nt, Human
uaccugaucugccucuaggggc

SEQ ID NO: 331650 - RNA, 18 nt, Human
uacuauguaugcuuuacc

SEQ ID NO: 331651 - RNA, 20 nt, Human
uagacaucauuauuucuacu

SEQ ID NO: 331652 - RNA, 26 nt, Human
uagagaccucccggaccgaugcuggu

SEQ ID NO: 331653 - RNA, 27 nt, Human
uagagaccucccggaccgaugcugguu

SEQ ID NO: 331654 - RNA, 26 nt, Human
uagcuuaaauauaaaacuaaaucacc

SEQ ID NO: 331655 - RNA, 19 nt, Human
uaguaaagauuaaaagggc

SEQ ID NO: 331656 - RNA, 20 nt, Human
ucaaugaaagaguaaggggg

SEQ ID NO: 331657 - RNA, 25 nt, Human
ucacacugcagucaaugaaagagua

SEQ ID NO: 331658 - RNA, 21 nt, Human
ucaccaaagaaaaaagauuaa

SEQ ID NO: 331659 - RNA, 26 nt, Human
ucauuuugaagaugcaccaggagccu

SEQ ID NO: 331660 - RNA, 19 nt, Human
uccaaugaggggaugagga

SEQ ID NO: 331661 - RNA, 18 nt, Human
uccacagacuggcagccg

SEQ ID NO: 331662 - RNA, 21 nt, Human
uccagccagcugacgaaaaag

SEQ ID NO: 331663 - RNA, 19 nt, Human
ucccagagucuaauaaagc

SEQ ID NO: 331664 - RNA, 18 nt, Human
ucuccuuucccucuacua

SEQ ID NO: 331665 - RNA, 18 nt, Human
ucucuuguuuguuuugag

SEQ ID NO: 331666 - RNA, 19 nt, Human
ucugaagauugaaaguugu

SEQ ID NO: 331667 - RNA, 23 nt, Human
ugaaagagccauuuguuuuaguc

SEQ ID NO: 331668 - RNA, 21 nt, Human
ugaacauagcgcucguuaacc

SEQ ID NO: 331669 - RNA, 21 nt, Human
ugaagacacugacuuuuguug

SEQ ID NO: 331670 - RNA, 24 nt, Human
ugaauauuacaaggugacaauaag

SEQ ID NO: 331671 - RNA, 19 nt, Human
ugagaaaagcaaggagaga

SEQ ID NO: 331672 - RNA, 23 nt, Human
ugagaaaagcaaggagagauaaa

SEQ ID NO: 331673 - RNA, 23 nt, Human
ugcaaacaauguauuuacaaaug

SEQ ID NO: 331674 - RNA, 20 nt, Human
ugcugcuuugccaucucuug

SEQ ID NO: 331675 - RNA, 19 nt, Human
ugggaagggaaggagggcg

SEQ ID NO: 331676 - RNA, 20 nt, Human
ugggaaguggaggaggaaga

SEQ ID NO: 331677 - RNA, 20 nt, Human
uggggaagagaagcugaggg

SEQ ID NO: 331678 - RNA, 19 nt, Human
ugguuaauuuucucuccca

SEQ ID NO: 331679 - RNA, 18 nt, Human
ugugaaagagccauuugu

SEQ ID NO: 331680 - RNA, 27 nt, Human
ugugaagcuaauagaucaucuccacga

SEQ ID NO: 331681 - RNA, 24 nt, Human
uguguuaaguaaugcuuacaacaa

SEQ ID NO: 331682 - RNA, 22 nt, Human
uuaaauacuaaaaaccuguucu

SEQ ID NO: 331683 - RNA, 20 nt, Human
uuauacuguguuaaguaaug

SEQ ID NO: 331684 - RNA, 23 nt, Human
uuccacagcugccgccgccccuc

SEQ ID NO: 331685 - RNA, 26 nt, Human
uugaccucaaagaagaccguaauuua

SEQ ID NO: 331686 - RNA, 27 nt, Human
uugaccucaaagaagaccguaauuuau

SEQ ID NO: 331687 - RNA, 20 nt, Human
uuuguugugcuugugaagcu

SEQ ID NO: 331688 - RNA, 23 nt, Human
uuuuaagggaaauacauauugcc

SEQ ID NO: 331689 - RNA, 20 nt, Human
uuuuuuuuuuuuuuuugcca

SEQ ID NO: 331690 - RNA, 24 nt, Human
uuuuuuuuuuuuuuuuuuuuuggg

SEQ ID NO: 331691 - RNA, 22 nt, Human
aaaaaaaaacaacaacaugaga

SEQ ID NO: 331692 - RNA, 24 nt, Human
aaaaagcuagugucugaguauugc

SEQ ID NO: 331693 - RNA, 24 nt, Human
aauacaaaagugagaaaaaagcua

SEQ ID NO: 331694 - RNA, 19 nt, Human
acaaaagugagaaaaaagc

SEQ ID NO: 331695 - RNA, 22 nt, Human
acaaaagugagaaaaaagcuag

SEQ ID NO: 331696 - RNA, 23 nt, Human
agagaccuauuucuucaggagag

SEQ ID NO: 331697 - RNA, 27 nt, Human
caugacugcucuucucuuuccccacag

SEQ ID NO: 331698 - RNA, 20 nt, Human
ccucagggccaugacugcuc

SEQ ID NO: 331699 - RNA, 19 nt, Human
cucagggccaugacugcuc

SEQ ID NO: 331700 - RNA, 22 nt, Human
gacugcucuucucuuuccccac

SEQ ID NO: 331701 - RNA, 19 nt, Human
ugguaaagcauaaaagaga

SEQ ID NO: 331702 - RNA, 18 nt, Human
ugugaacaauaauaucuu

SEQ ID NO: 331703 - RNA, 21 nt, Human
ugugugcauagaaaucauaua

SEQ ID NO: 331704 - RNA, 19 nt, Human
aaacggaggacagaagcga

SEQ ID NO: 331705 - RNA, 21 nt, Human
aagaccaauaaaaaaaaucag

SEQ ID NO: 331706 - RNA, 25 nt, Human
aagaccaauaaaaaaaaucagauaa

SEQ ID NO: 331707 - RNA, 21 nt, Human
aagccgccaacuccgccgcug

SEQ ID NO: 331708 - RNA, 19 nt, Human
aaggagggaggggaaaggg

SEQ ID NO: 331709 - RNA, 18 nt, Human
aauguguugggggcaguc

SEQ ID NO: 331710 - RNA, 19 nt, Human
acaagaccaauaaaaaaaa

SEQ ID NO: 331711 - RNA, 21 nt, Human
acaagaccaauaaaaaaaauc

SEQ ID NO: 331712 - RNA, 18 nt, Human
acgcggccgcugcgcugg

SEQ ID NO: 331713 - RNA, 22 nt, Human
agaaagucagcuccuauugugg

SEQ ID NO: 331714 - RNA, 25 nt, Human
agaagguccaaguucugguuccagg

SEQ ID NO: 331715 - RNA, 21 nt, Human
agaccaauaaaaaaaaucaga

SEQ ID NO: 331716 - RNA, 26 nt, Human
aggaggagacuaaacggaggacagaa

SEQ ID NO: 331717 - RNA, 24 nt, Human
agggaggggaaaggggggguaaaa

SEQ ID NO: 331718 - RNA, 19 nt, Human
aggggggguaaaaagacca

SEQ ID NO: 331719 - RNA, 26 nt, Human
auuacauaauaaauggauacuguaaa

SEQ ID NO: 331720 - RNA, 23 nt, Human
auuaguuaaaaguaacaagcauu

SEQ ID NO: 331721 - RNA, 18 nt, Human
cagaacgcagcagucugc

SEQ ID NO: 331722 - RNA, 29 nt, Human
cagcaacacuuucuuccuagaggucaucc

SEQ ID NO: 331723 - RNA, 20 nt, Human
cccgccgaggaggagacuaa

SEQ ID NO: 331724 - RNA, 20 nt, Human
ccgcugccgccgccucaggc

SEQ ID NO: 331725 - RNA, 18 nt, Human
cgacuccagaaucuccca

SEQ ID NO: 331726 - RNA, 18 nt, Human
cgcugcgcugggggcucc

SEQ ID NO: 331727 - RNA, 25 nt, Human
cucccgagcucuccaagccgccaac

SEQ ID NO: 331728 - RNA, 24 nt, Human
cuucaaggagggaggggaaagggg

SEQ ID NO: 331729 - RNA, 20 nt, Human
gacagaagcgagaaggucca

SEQ ID NO: 331730 - RNA, 23 nt, Human
gcagcagucugcaccucuguaga

SEQ ID NO: 331731 - RNA, 21 nt, Human
gcgcugggggcuccgggccgg

SEQ ID NO: 331732 - RNA, 22 nt, Human
ggaaaggggggguaaaaagacc

SEQ ID NO: 331733 - RNA, 24 nt, Human
ggaacucucccgagcucuccaagc

SEQ ID NO: 331734 - RNA, 25 nt, Human
ggagggaggggaaaggggggguaaa

SEQ ID NO: 331735 - RNA, 18 nt, Human
ggccgcugcgcugggggc

SEQ ID NO: 331736 - RNA, 20 nt, Human
gggaaaggggggguaaaaag

SEQ ID NO: 331737 - RNA, 18 nt, Human
gggaacucucccgagcuc

SEQ ID NO: 331738 - RNA, 21 nt, Human
gggcauggggcaccagccuuc

SEQ ID NO: 331739 - RNA, 19 nt, Human
guaaaaagaccacaagacc

SEQ ID NO: 331740 - RNA, 18 nt, Human
guuccagggaacucuccc

SEQ ID NO: 331741 - RNA, 23 nt, Human
uaaauggauacuguaaaaagauc

SEQ ID NO: 331742 - RNA, 25 nt, Human
uaagauucuuuucuaagaagcauua

SEQ ID NO: 331743 - RNA, 22 nt, Human
uacaaaacucagccugaucaga

SEQ ID NO: 331744 - RNA, 24 nt, Human
uaccagaacgcagcagucugcacc

SEQ ID NO: 331745 - RNA, 18 nt, Human
ucagaaagucagcuccua

SEQ ID NO: 331746 - RNA, 19 nt, Human
ucccaggaugauaaccuuc

SEQ ID NO: 331747 - RNA, 18 nt, Human
ucuccaagccgccaacuc

SEQ ID NO: 331748 - RNA, 19 nt, Human
ucucccaggaugauaaccu

SEQ ID NO: 331749 - RNA, 23 nt, Human
ucucccgagcucuccaagccgcc

SEQ ID NO: 331750 - RNA, 19 nt, Human
ucuucccgacuccagaauc

SEQ ID NO: 331751 - RNA, 23 nt, Human
uggggcaccagccuucccaaggg

SEQ ID NO: 331752 - RNA, 19 nt, Human
uggucagaaagucagcucc

SEQ ID NO: 331753 - RNA, 23 nt, Human
uggucagaaagucagcuccuauu

SEQ ID NO: 331754 - RNA, 20 nt, Human
uguagaaggccacaccgaga

SEQ ID NO: 331755 - RNA, 23 nt, Human
uucagcaacacuuucuuccuaga

SEQ ID NO: 331756 - RNA, 25 nt, Human
aaaaagcccugcccaauuuaguacc

SEQ ID NO: 331757 - RNA, 24 nt, Human
aaagugcugggauuacagguguga

SEQ ID NO: 331758 - RNA, 20 nt, Human
aaccucugccucccagucuc

SEQ ID NO: 331759 - RNA, 22 nt, Human
aagacaucaacccagaaaccug

SEQ ID NO: 331760 - RNA, 18 nt, Human
aagacaucaacccagaac

SEQ ID NO: 331761 - RNA, 25 nt, Human
aagcgauucucccaccucagucucc

SEQ ID NO: 331762 - RNA, 19 nt, Human
aaguagcugggauuacagg

SEQ ID NO: 331763 - RNA, 21 nt, Human
aaguaggugagaauuaugauc

SEQ ID NO: 331764 - RNA, 18 nt, Human
aagugcugggauuacagg

SEQ ID NO: 331765 - RNA, 18 nt, Human
aagugcugggauuacagg

SEQ ID NO: 331766 - RNA, 19 nt, Human
aagugcugggauuacaggc

SEQ ID NO: 331767 - RNA, 21 nt, Human
aagugcugggauuacaggcau

SEQ ID NO: 331768 - RNA, 22 nt, Human
aagugcugggauuacaggcaug

SEQ ID NO: 331769 - RNA, 23 nt, Human
aagugcugggauuacaggcauga

SEQ ID NO: 331770 - RNA, 26 nt, Human
aagugcugggauuacaggcaugagcc

SEQ ID NO: 331771 - RNA, 19 nt, Human
aagugcugggauuacaggu

SEQ ID NO: 331772 - RNA, 26 nt, Human
aagugcugggauuacaggugugagcc

SEQ ID NO: 331773 - RNA, 19 nt, Human
aaucagauguuuacauucc

SEQ ID NO: 331774 - RNA, 24 nt, Human
aauggugugaucucagcucacugc

SEQ ID NO: 331775 - RNA, 18 nt, Human
acaguagucaggagacaa

SEQ ID NO: 331776 - RNA, 24 nt, Human
acccaggcugaagugcgguggcau

SEQ ID NO: 331777 - RNA, 18 nt, Human
acgggguuucaguauguu

SEQ ID NO: 331778 - RNA, 20 nt, Human
acgggguuucaguauguugg

SEQ ID NO: 331779 - RNA, 23 nt, Human
acgggguuucaguauguuggcca

SEQ ID NO: 331780 - RNA, 24 nt, Human
acgggguuucaguauguuggccag

SEQ ID NO: 331781 - RNA, 19 nt, Human
acgggguuuugccaugcug

SEQ ID NO: 331782 - RNA, 24 nt, Human
acgggguuuugccaugcugaccag

SEQ ID NO: 331783 - RNA, 24 nt, Human
acucccagguucaagugauucucc

SEQ ID NO: 331784 - RNA, 20 nt, Human
agacagaaagaaucugaaac

SEQ ID NO: 331785 - RNA, 19 nt, Human
agacggaguccuucucugu

SEQ ID NO: 331786 - RNA, 24 nt, Human
agaguuuaguaagaauaucgauaa

SEQ ID NO: 331787 - RNA, 22 nt, Human
agcucuuuguggaagaaaaugc

SEQ ID NO: 331788 - RNA, 23 nt, Human
aggagcagaccuauuucgaagca

SEQ ID NO: 331789 - RNA, 21 nt, Human
aggcaugagccaccaugcccg

SEQ ID NO: 331790 - RNA, 24 nt, Human
aggcgauccaccugccucagccuc

SEQ ID NO: 331791 - RNA, 24 nt, Human
aggcugaagcgcaauggugugauc

SEQ ID NO: 331792 - RNA, 19 nt, Human
agggcugaugagaagaucu

SEQ ID NO: 331793 - RNA, 21 nt, Human
agguucaagugauucuccugc

SEQ ID NO: 331794 - RNA, 22 nt, Human
agguucaagugauucuccugcc

SEQ ID NO: 331795 - RNA, 19 nt, Human
aguagagacgggguuucag

SEQ ID NO: 331796 - RNA, 23 nt, Human
aguagcugggauuacagacacgu

SEQ ID NO: 331797 - RNA, 24 nt, Human
agugcgguggcaugaucucgguuc

SEQ ID NO: 331798 - RNA, 18 nt, Human
agugcugggauuacaggc

SEQ ID NO: 331799 - RNA, 21 nt, Human
aucagauguuuacauuccaag

SEQ ID NO: 331800 - RNA, 19 nt, Human
auccgccugccuuggccuc

SEQ ID NO: 331801 - RNA, 18 nt, Human
aucuacuuuccuacccca

SEQ ID NO: 331802 - RNA, 18 nt, Human
aucucauuuuccucucaa

SEQ ID NO: 331803 - RNA, 18 nt, Human
aucuugaacuccugaccu

SEQ ID NO: 331804 - RNA, 21 nt, Human
augcacauggguuccaggugu

SEQ ID NO: 331805 - RNA, 19 nt, Human
auguuggccagguugaucu

SEQ ID NO: 331806 - RNA, 19 nt, Human
auuugaucucauuuuccuc

SEQ ID NO: 331807 - RNA, 19 nt, Human
caaaaauccacagaugccc

SEQ ID NO: 331808 - RNA, 24 nt, Human
caaagugcugggauuacaggugug

SEQ ID NO: 331809 - RNA, 21 nt, Human
caaccucuaacucccagguuc

SEQ ID NO: 331810 - RNA, 27 nt, Human
caagcgauucucccaccucagucucca

SEQ ID NO: 331811 - RNA, 22 nt, Human
caagugauucuccugccucagc

SEQ ID NO: 331812 - RNA, 27 nt, Human
caagugauucuccugccucagccuccc

SEQ ID NO: 331813 - RNA, 22 nt, Human
caauuuaguacuuaaauuaccu

SEQ ID NO: 331814 - RNA, 23 nt, Human
cacccaggcugaagugcgguggc

SEQ ID NO: 331815 - RNA, 24 nt, Human
caccucagucuccagaguagcugg

SEQ ID NO: 331816 - RNA, 23 nt, Human
caccugccucagccucccaaagu

SEQ ID NO: 331817 - RNA, 21 nt, Human
cacgccuggcuaauuuuugua

SEQ ID NO: 331818 - RNA, 23 nt, Human
cacgccuggcucaggacccaaaa

SEQ ID NO: 331819 - RNA, 21 nt, Human
cacugcaaccucuaacuccca

SEQ ID NO: 331820 - RNA, 18 nt, Human
cacugcaaccucugccuc

SEQ ID NO: 331821 - RNA, 21 nt, Human
cacugcaaccucugccuccca

SEQ ID NO: 331822 - RNA, 22 nt, Human
cagaaucagauguuuacauucc

SEQ ID NO: 331823 - RNA, 24 nt, Human
cagaguagcugggauuacagacac

SEQ ID NO: 331824 - RNA, 21 nt, Human
caggcgauccaccugccucag

SEQ ID NO: 331825 - RNA, 19 nt, Human
caggugcccgccaccacgc

SEQ ID NO: 331826 - RNA, 21 nt, Human
caggugcccgccaccacgccc

SEQ ID NO: 331827 - RNA, 24 nt, Human
caguauguuggccagguugaucuu

SEQ ID NO: 331828 - RNA, 23 nt, Human
caucacagccagcugaugucacu

SEQ ID NO: 331829 - RNA, 21 nt, Human
cauuuuccucucaauuggaag

SEQ ID NO: 331830 - RNA, 22 nt, Human
ccaaaaauccacagaugcccag

SEQ ID NO: 331831 - RNA, 23 nt, Human
ccaaaaauccacagaugcccaga

SEQ ID NO: 331832 - RNA, 21 nt, Human
ccaaagugcugggauuacagg

SEQ ID NO: 331833 - RNA, 21 nt, Human
ccaaagugcugggauuacagg

SEQ ID NO: 331834 - RNA, 24 nt, Human
ccaaagugcugggauuacaggugu

SEQ ID NO: 331835 - RNA, 19 nt, Human
ccaagacaagagaaacuua

SEQ ID NO: 331836 - RNA, 26 nt, Human
ccaagacagaaagaaucugaaacaac

SEQ ID NO: 331837 - RNA, 21 nt, Human
ccaaguagcugggauuacagg

SEQ ID NO: 331838 - RNA, 18 nt, Human
ccaagugcugggauuaca

SEQ ID NO: 331839 - RNA, 22 nt, Human
ccaagugcugggauuacaggca

SEQ ID NO: 331840 - RNA, 23 nt, Human
ccaagugcugggauuacaggcau

SEQ ID NO: 331841 - RNA, 26 nt, Human
ccaccugccucagccucccaaagugc

SEQ ID NO: 331842 - RNA, 19 nt, Human
ccagaguagcugggauuac

SEQ ID NO: 331843 - RNA, 20 nt, Human
ccagaguagcugggauuaca

SEQ ID NO: 331844 - RNA, 19 nt, Human
ccaugcugaccagguuggu

SEQ ID NO: 331845 - RNA, 23 nt, Human
ccaugcugaccagguuggucucg

SEQ ID NO: 331846 - RNA, 23 nt, Human
cccaaguagcugggauuacaggu

SEQ ID NO: 331847 - RNA, 24 nt, Human
cccaaguagcugggauuacaggug

SEQ ID NO: 331848 - RNA, 22 nt, Human
cccaagugcugggauuacaggc

SEQ ID NO: 331849 - RNA, 23 nt, Human
cccaagugcugggauuacaggca

SEQ ID NO: 331850 - RNA, 24 nt, Human
cccaagugcugggauuacaggcau

SEQ ID NO: 331851 - RNA, 20 nt, Human
cccaggcugaagcgcaaugg

SEQ ID NO: 331852 - RNA, 23 nt, Human
cccagguucaagugauucuccuc

SEQ ID NO: 331853 - RNA, 23 nt, Human
cccagguucaagugauucuccug

SEQ ID NO: 331854 - RNA, 23 nt, Human
ccccaagugcugggauuacaggc

SEQ ID NO: 331855 - RNA, 21 nt, Human
cccgccaccacgcccagcuaa

SEQ ID NO: 331856 - RNA, 24 nt, Human
ccucccagucucaagcgauucucc

SEQ ID NO: 331857 - RNA, 21 nt, Human
ccugaccucaggcgauccacc

SEQ ID NO: 331858 - RNA, 23 nt, Human
ccugaccucaggcgauccaccug

SEQ ID NO: 331859 - RNA, 23 nt, Human
ccugaccucaggcgauccaccug

SEQ ID NO: 331860 - RNA, 23 nt, Human
ccugccucagccucccaaguagc

SEQ ID NO: 331861 - RNA, 19 nt, Human
ccuucucacaaaauuccgg

SEQ ID NO: 331862 - RNA, 23 nt, Human
ccuucucugucacccaggcugaa

SEQ ID NO: 331863 - RNA, 21 nt, Human
cgaagcaucacagccagcuga

SEQ ID NO: 331864 - RNA, 24 nt, Human
cgggguuucaguauguuggccagg

SEQ ID NO: 331865 - RNA, 24 nt, Human
cgggguuuugccaugcugaccagg

SEQ ID NO: 331866 - RNA, 25 nt, Human
cucaagcgauucucccaccucaguc

SEQ ID NO: 331867 - RNA, 20 nt, Human
cucacaaaauuccggaucac

SEQ ID NO: 331868 - RNA, 24 nt, Human
cucacugcaaccucuaacucccag

SEQ ID NO: 331869 - RNA, 24 nt, Human
cucagccucccaaguagcugggau

SEQ ID NO: 331870 - RNA, 24 nt, Human
cucagucuccagaguagcugggau

SEQ ID NO: 331871 - RNA, 23 nt, Human
cucaugugauccgccugccuugg

SEQ ID NO: 331872 - RNA, 24 nt, Human
cucaugugauccgccugccuuggc

SEQ ID NO: 331873 - RNA, 22 nt, Human
cucccagaacugggauggaaaa

SEQ ID NO: 331874 - RNA, 19 nt, Human
cucccagguucaagugauu

SEQ ID NO: 331875 - RNA, 21 nt, Human
cuccuuacuggacaguaguca

SEQ ID NO: 331876 - RNA, 23 nt, Human
cucugucacccaggcugaagugc

SEQ ID NO: 331877 - RNA, 23 nt, Human
cugcaaccucuaacucccagguu

SEQ ID NO: 331878 - RNA, 24 nt, Human
cugcaaccucuaacucccagguuc

SEQ ID NO: 331879 - RNA, 20 nt, Human
cugcaaccucugccucccag

SEQ ID NO: 331880 - RNA, 22 nt, Human
cugcaaccucugccucccaguc

SEQ ID NO: 331881 - RNA, 23 nt, Human
cugccucagccucccaaagugcu

SEQ ID NO: 331882 - RNA, 24 nt, Human
cugccucagccucccaaagugcug

SEQ ID NO: 331883 - RNA, 23 nt, Human
cugccucagccucccaaguagcu

SEQ ID NO: 331884 - RNA, 23 nt, Human
cugccuuggccuccccaagugcu

SEQ ID NO: 331885 - RNA, 21 nt, Human
cuuuuaguagagacgggguuu

SEQ ID NO: 331886 - RNA, 19 nt, Human
gaauaucaaauggaaaaau

SEQ ID NO: 331887 - RNA, 22 nt, Human
gacaucaacccagaaaccugca

SEQ ID NO: 331888 - RNA, 18 nt, Human
gacaucaacccagaaacu

SEQ ID NO: 331889 - RNA, 24 nt, Human
gaccucaggcgauccaccugccuc

SEQ ID NO: 331890 - RNA, 20 nt, Human
gagacgggguuuugccaugc

SEQ ID NO: 331891 - RNA, 25 nt, Human
gaguagcugggauuacagacacgug

SEQ ID NO: 331892 - RNA, 21 nt, Human
gauccaccugccucagccucc

SEQ ID NO: 331893 - RNA, 20 nt, Human
gaucuugaacuccugaccuc

SEQ ID NO: 331894 - RNA, 18 nt, Human
gauuacagacacgugcca

SEQ ID NO: 331895 - RNA, 18 nt, Human
gauuacaggcaugagcca

SEQ ID NO: 331896 - RNA, 21 nt, Human
gauuacaggcaugagccacca

SEQ ID NO: 331897 - RNA, 24 nt, Human
gauuacaggcaugagccaccaugc

SEQ ID NO: 331898 - RNA, 18 nt, Human
gauuacaggugcccgcca

SEQ ID NO: 331899 - RNA, 18 nt, Human
gauuacaggugugagcca

SEQ ID NO: 331900 - RNA, 21 nt, Human
gauuacaggugugagccacca

SEQ ID NO: 331901 - RNA, 22 nt, Human
gauuacaggugugagccaccac

SEQ ID NO: 331902 - RNA, 21 nt, Human
gauucucccaccucagucucc

SEQ ID NO: 331903 - RNA, 21 nt, Human
gauucuccugccucagccucc

SEQ ID NO: 331904 - RNA, 18 nt, Human
gcgauccaccugccucag

SEQ ID NO: 331905 - RNA, 24 nt, Human
gcgauccaccugccucagccuccc

SEQ ID NO: 331906 - RNA, 24 nt, Human
ggauuacaggcaugagccaccaug

SEQ ID NO: 331907 - RNA, 23 nt, Human
gggguuucaguauguuggccagg

SEQ ID NO: 331908 - RNA, 23 nt, Human
gggguuuugccaugcugaccagg

SEQ ID NO: 331909 - RNA, 23 nt, Human
guagagacgggguuucaguaugu

SEQ ID NO: 331910 - RNA, 21 nt, Human
guagagacgggguuuugccau

SEQ ID NO: 331911 - RNA, 22 nt, Human
guagcugggauuacagacacgu

SEQ ID NO: 331912 - RNA, 18 nt, Human
guagcugggauuacaggu

SEQ ID NO: 331913 - RNA, 23 nt, Human
guagguuauaaaucaccauccua

SEQ ID NO: 331914 - RNA, 24 nt, Human
gugauucuccugccucagccuccc

SEQ ID NO: 331915 - RNA, 23 nt, Human
guggcaugaucucgguucacugc

SEQ ID NO: 331916 - RNA, 24 nt, Human
uaaaauggucaggugggcaaccaa

SEQ ID NO: 331917 - RNA, 28 nt, Human
uaacucccagguucaagugauucuccuu

SEQ ID NO: 331918 - RNA, 20 nt, Human
uaagugccuacauguucaca

SEQ ID NO: 331919 - RNA, 24 nt, Human
uaauuuuucuuauuuuuaguagag

SEQ ID NO: 331920 - RNA, 25 nt, Human
uaauuuuucuuauuuuuaguagaga

SEQ ID NO: 331921 - RNA, 24 nt, Human
uaauuuuuguacuuuuaguagaga

SEQ ID NO: 331922 - RNA, 22 nt, Human
uacagacacgugccaucacgcc

SEQ ID NO: 331923 - RNA, 23 nt, Human
uacaggcaugagccaccaugccc

SEQ ID NO: 331924 - RNA, 24 nt, Human
uacaggugcccgccaccacgccca

SEQ ID NO: 331925 - RNA, 22 nt, Human
uacaggugugagccaccacgcc

SEQ ID NO: 331926 - RNA, 22 nt, Human
uacaggugugagccaccacgcc

SEQ ID NO: 331927 - RNA, 23 nt, Human
uacaggugugagccaccacgccu

SEQ ID NO: 331928 - RNA, 20 nt, Human
uagagacgggguuuugccau

SEQ ID NO: 331929 - RNA, 22 nt, Human
uagccaaaaauccacagaugcc

SEQ ID NO: 331930 - RNA, 19 nt, Human
uaguagagacgggguuuca

SEQ ID NO: 331931 - RNA, 23 nt, Human
uaguagagacgggguuucaguau

SEQ ID NO: 331932 - RNA, 24 nt, Human
uaguagagacgggguuucaguaug

SEQ ID NO: 331933 - RNA, 24 nt, Human
uaguagagacgggguuuugccaug

SEQ ID NO: 331934 - RNA, 20 nt, Human
uaugacuaagugccuacaug

SEQ ID NO: 331935 - RNA, 23 nt, Human
uaugacuaagugccuacauguuc

SEQ ID NO: 331936 - RNA, 19 nt, Human
ucaagugauucuccugccu

SEQ ID NO: 331937 - RNA, 22 nt, Human
ucacaaaauuccggaucacaaa

SEQ ID NO: 331938 - RNA, 23 nt, Human
ucacucuuguugcccaggcugaa

SEQ ID NO: 331939 - RNA, 19 nt, Human
ucacugcaaccucuaacuc

SEQ ID NO: 331940 - RNA, 24 nt, Human
ucacugcaaccucuaacucccagg

SEQ ID NO: 331941 - RNA, 19 nt, Human
ucacugcaaccucugccuc

SEQ ID NO: 331942 - RNA, 23 nt, Human
ucacugcaaccucugccucccag

SEQ ID NO: 331943 - RNA, 24 nt, Human
ucacugcaaccucugccucccagu

SEQ ID NO: 331944 - RNA, 27 nt, Human
ucacugcaaccucugccucccagucuc

SEQ ID NO: 331945 - RNA, 20 nt, Human
ucagaaguaggugagaauua

SEQ ID NO: 331946 - RNA, 20 nt, Human
ucagccucccaaguagcugg

SEQ ID NO: 331947 - RNA, 26 nt, Human
uccaagacagaaagaaucugaaacaa

SEQ ID NO: 331948 - RNA, 20 nt, Human
uccacagaugcccagacccc

SEQ ID NO: 331949 - RNA, 23 nt, Human
ucccaaagugcugggauuacagg

SEQ ID NO: 331950 - RNA, 23 nt, Human
ucccaaguagcugggauuacagg

SEQ ID NO: 331951 - RNA, 24 nt, Human
ucccaaguagcugggauuacaggu

SEQ ID NO: 331952 - RNA, 21 nt, Human
ucccagguucaagugauucuc

SEQ ID NO: 331953 - RNA, 24 nt, Human
ucccagguucaagugauucuccug

SEQ ID NO: 331954 - RNA, 21 nt, Human
ucccagucucaagcgauucuc

SEQ ID NO: 331955 - RNA, 24 nt, Human
uccccaagugcugggauuacaggc

SEQ ID NO: 331956 - RNA, 24 nt, Human
uccuucucugucacccaggcugaa

SEQ ID NO: 331957 - RNA, 26 nt, Human
ucuccugccucagccucccaaguagc

SEQ ID NO: 331958 - RNA, 18 nt, Human
ucucucuuuucuucuucc

SEQ ID NO: 331959 - RNA, 23 nt, Human
ucuugaacuccugaccucaggcg

SEQ ID NO: 331960 - RNA, 19 nt, Human
ugaagcgcaauggugugau

SEQ ID NO: 331961 - RNA, 23 nt, Human
ugaagcgcaauggugugaucuca

SEQ ID NO: 331962 - RNA, 19 nt, Human
ugaagugcgguggcaugau

SEQ ID NO: 331963 - RNA, 23 nt, Human
ugaagugcgguggcaugaucucg

SEQ ID NO: 331964 - RNA, 24 nt, Human
ugaagugcgguggcaugaucucgg

SEQ ID NO: 331965 - RNA, 24 nt, Human
ugaccagguuggucucgaauuccu

SEQ ID NO: 331966 - RNA, 21 nt, Human
ugaccucaggcgauccaccug

SEQ ID NO: 331967 - RNA, 24 nt, Human
ugaccucaggcgauccaccugccu

SEQ ID NO: 331968 - RNA, 22 nt, Human
ugagaagaucuuacaccgaagg

SEQ ID NO: 331969 - RNA, 22 nt, Human
ugagacggaguccuucucuguc

SEQ ID NO: 331970 - RNA, 20 nt, Human
ugauucuccugccucagccu

SEQ ID NO: 331971 - RNA, 18 nt, Human
ugauuucuaauccuucuc

SEQ ID NO: 331972 - RNA, 22 nt, Human
ugccaugcugaccagguugguc

SEQ ID NO: 331973 - RNA, 24 nt, Human
ugccaugcugaccagguuggucuc

SEQ ID NO: 331974 - RNA, 21 nt, Human
ugcccaggcugaagcgcaaug

SEQ ID NO: 331975 - RNA, 24 nt, Human
ugccucagccucccaaagugcugg

SEQ ID NO: 331976 - RNA, 24 nt, Human
ugccucagccucccaaguagcugg

SEQ ID NO: 331977 - RNA, 24 nt, Human
ugcugauuucuaauccuucucaca

SEQ ID NO: 331978 - RNA, 24 nt, Human
ugcugggauuacaggugugagcca

SEQ ID NO: 331979 - RNA, 24 nt, Human
uggccagguugaucuugaacuccu

SEQ ID NO: 331980 - RNA, 18 nt, Human
uggccucaugugauccgc

SEQ ID NO: 331981 - RNA, 21 nt, Human
ugggauggaaaauaagccaaa

SEQ ID NO: 331982 - RNA, 19 nt, Human
ugggauuacagacacgugc

SEQ ID NO: 331983 - RNA, 21 nt, Human
ugggauuacagacacgugcca

SEQ ID NO: 331984 - RNA, 22 nt, Human
ugggauuacagacacgugccau

SEQ ID NO: 331985 - RNA, 24 nt, Human
ugggauuacagacacgugccauca

SEQ ID NO: 331986 - RNA, 24 nt, Human
ugggauuacagacacgugccauca

SEQ ID NO: 331987 - RNA, 18 nt, Human
ugggauuacaggcaugag

SEQ ID NO: 331988 - RNA, 22 nt, Human
ugggauuacaggcaugagccac

SEQ ID NO: 331989 - RNA, 23 nt, Human
ugggauuacaggcaugagccacc

SEQ ID NO: 331990 - RNA, 24 nt, Human
ugggauuacaggcaugagccacca

SEQ ID NO: 331991 - RNA, 25 nt, Human
ugggauuacaggcaugagccaccau

SEQ ID NO: 331992 - RNA, 21 nt, Human
ugggauuacaggugcccgcca

SEQ ID NO: 331993 - RNA, 22 nt, Human
ugggauuacaggugcccgccac

SEQ ID NO: 331994 - RNA, 24 nt, Human
ugggauuacaggugcccgccacca

SEQ ID NO: 331995 - RNA, 18 nt, Human
ugggauuacaggugugag

SEQ ID NO: 331996 - RNA, 19 nt, Human
ugggauuacaggugugagc

SEQ ID NO: 331997 - RNA, 22 nt, Human
ugggauuacaggugugagccac

SEQ ID NO: 331998 - RNA, 23 nt, Human
ugggauuacaggugugagccacc

SEQ ID NO: 331999 - RNA, 24 nt, Human
ugggauuacaggugugagccacca

SEQ ID NO: 332000 - RNA, 24 nt, Human
uggugugaucucagcucacugcaa

SEQ ID NO: 332001 - RNA, 20 nt, Human
ugucacccaggcugaagugc

SEQ ID NO: 332002 - RNA, 20 nt, Human
ugugaaaggcuaauccagga

SEQ ID NO: 332003 - RNA, 22 nt, Human
uuaaaagaccucccagaacugg

SEQ ID NO: 332004 - RNA, 18 nt, Human
uuaguagagacgggguuu

SEQ ID NO: 332005 - RNA, 18 nt, Human
uuaguagagacgggguuu

SEQ ID NO: 332006 - RNA, 20 nt, Human
uuaguagagacgggguuuca

SEQ ID NO: 332007 - RNA, 24 nt, Human
uuaguagagacgggguuucaguau

SEQ ID NO: 332008 - RNA, 22 nt, Human
uuaguagagacgggguuuugcc

SEQ ID NO: 332009 - RNA, 24 nt, Human
uuaguagagacgggguuuugccau

SEQ ID NO: 332010 - RNA, 21 nt, Human
uucaagugauucuccugccuc

SEQ ID NO: 332011 - RNA, 23 nt, Human
uucaagugauucuccugccucag

SEQ ID NO: 332012 - RNA, 24 nt, Human
uucaagugauucuccugccucagc

SEQ ID NO: 332013 - RNA, 24 nt, Human
uucacucuuguugcccaggcugaa

SEQ ID NO: 332014 - RNA, 18 nt, Human
uuccuaccccaggcuagg

SEQ ID NO: 332015 - RNA, 21 nt, Human
uucgaagcaucacagccagcu

SEQ ID NO: 332016 - RNA, 23 nt, Human
uucgaagcaucacagccagcuga

SEQ ID NO: 332017 - RNA, 23 nt, Human
uuguugcccaggcugaagcgcaa

SEQ ID NO: 332018 - RNA, 27 nt, Human
uuuaacaaacuucccagguauucccuu

SEQ ID NO: 332019 - RNA, 24 nt, Human
uuucacucuuguugcccaggcuga

SEQ ID NO: 332020 - RNA, 19 nt, Human
uuucaguauguuggccagg

SEQ ID NO: 332021 - RNA, 20 nt, Human
uuucaguauguuggccaggu

SEQ ID NO: 332022 - RNA, 20 nt, Human
uuuuaguagagacgggguuu

SEQ ID NO: 332023 - RNA, 21 nt, Human
uuuuguacuuuuaguagagac

SEQ ID NO: 332024 - RNA, 22 nt, Human
uuuuuaguagagacgggguuuc

SEQ ID NO: 332025 - RNA, 24 nt, Human
uuuuucuuauuuuuaguagagacg

SEQ ID NO: 332026 - RNA, 20 nt, Human
uuuuuguacuuuuaguagag

SEQ ID NO: 332027 - RNA, 18 nt, Human
uuuuuucuuuuuuuuuug

SEQ ID NO: 332028 - RNA, 18 nt, Human
aaggguagggggcagggc

SEQ ID NO: 332029 - RNA, 22 nt, Human
cuccauucuuuauucaguccca

SEQ ID NO: 332030 - RNA, 20 nt, Human
ggcaaggguagggggcaggg

SEQ ID NO: 332031 - RNA, 23 nt, Human
ugagaggggccucuccauucuuu

SEQ ID NO: 332032 - RNA, 21 nt, Human
aaauguuaaaauggcaaaacu

SEQ ID NO: 332033 - RNA, 19 nt, Human
aagcacuucaaauacagaa

SEQ ID NO: 332034 - RNA, 21 nt, Human
aagcagaaaauaaaauaccgg

SEQ ID NO: 332035 - RNA, 19 nt, Human
acagggaaaggagagagca

SEQ ID NO: 332036 - RNA, 20 nt, Human
agaauaacaggacuucagaa

SEQ ID NO: 332037 - RNA, 22 nt, Human
auacacaaagaacuguagucag

SEQ ID NO: 332038 - RNA, 21 nt, Human
caaguagaaaccuagaguuau

SEQ ID NO: 332039 - RNA, 26 nt, Human
cagaauaaaaagcagaaaauaaaaua

SEQ ID NO: 332040 - RNA, 24 nt, Human
caggacuucagaauaaaaagcaga

SEQ ID NO: 332041 - RNA, 21 nt, Human
cuguagucagaauaacaggac

SEQ ID NO: 332042 - RNA, 22 nt, Human
gauaagcacuucaaauacagaa

SEQ ID NO: 332043 - RNA, 24 nt, Human
ggaaaaaucaaguagaaaccuaga

SEQ ID NO: 332044 - RNA, 28 nt, Human
uaacagacacagaaguauacacaaagaa

SEQ ID NO: 332045 - RNA, 18 nt, Human
uaacagggaaaggagaga

SEQ ID NO: 332046 - RNA, 23 nt, Human
uaagcacuucaaauacagaaaug

SEQ ID NO: 332047 - RNA, 21 nt, Human
uagaacagaugaaagguagug

SEQ ID NO: 332048 - RNA, 22 nt, Human
uagucagaauaacaggacuuca

SEQ ID NO: 332049 - RNA, 22 nt, Human
uaugcaacuuucaauucaauga

SEQ ID NO: 332050 - RNA, 19 nt, Human
ucagaauaacaggacuuca

SEQ ID NO: 332051 - RNA, 22 nt, Human
ugaaagguauacaugggggaaa

SEQ ID NO: 332052 - RNA, 22 nt, Human
ugugcaucauuuaauucaugua

SEQ ID NO: 332053 - RNA, 21 nt, Human
uuaaaauggcaaaacuauacu

SEQ ID NO: 332054 - RNA, 19 nt, Human
uucagaauaaaaagcagaa

SEQ ID NO: 332055 - RNA, 20 nt, Human
uuuaacacaauauacaaaau

SEQ ID NO: 332056 - RNA, 20 nt, Human
uuucaucaguuaacauucuu

SEQ ID NO: 332057 - RNA, 26 nt, Human
aaaaaggaaauagaaaugagggaccc

SEQ ID NO: 332058 - RNA, 24 nt, Human
aaaaggcagaauagcaaccugaua

SEQ ID NO: 332059 - RNA, 20 nt, Human
aaacuccaugaggaccaugc

SEQ ID NO: 332060 - RNA, 22 nt, Human
aagcacagugucccaaaacugg

SEQ ID NO: 332061 - RNA, 25 nt, Human
aagugauccucccaccugagccucc

SEQ ID NO: 332062 - RNA, 25 nt, Human
aagugauccucccaccugagccucc

SEQ ID NO: 332063 - RNA, 22 nt, Human
aaucugcuucucaccuucuagg

SEQ ID NO: 332064 - RNA, 20 nt, Human
aaugaggaagcaacuagaaa

SEQ ID NO: 332065 - RNA, 20 nt, Human
acaauggaagggacuucaga

SEQ ID NO: 332066 - RNA, 18 nt, Human
acagacaagaaggcagcg

SEQ ID NO: 332067 - RNA, 21 nt, Human
acagagccuagggagaaugcc

SEQ ID NO: 332068 - RNA, 24 nt, Human
acccucauauccuacacccuccac

SEQ ID NO: 332069 - RNA, 25 nt, Human
acuauguugcccaggcuagucucaa

SEQ ID NO: 332070 - RNA, 26 nt, Human
acucuguugcccaggcuggagugcca

SEQ ID NO: 332071 - RNA, 22 nt, Human
acucuguuuuucugcacaugcc

SEQ ID NO: 332072 - RNA, 22 nt, Human
agaaaaaggcagauuucaacua

SEQ ID NO: 332073 - RNA, 22 nt, Human
agaaggcagcggaacaguuaua

SEQ ID NO: 332074 - RNA, 21 nt, Human
agagagccugaguaaacagcc

SEQ ID NO: 332075 - RNA, 21 nt, Human
agagcagccccggagcuaugg

SEQ ID NO: 332076 - RNA, 20 nt, Human
agaugggguuaaaaucugcu

SEQ ID NO: 332077 - RNA, 25 nt, Human
agcaacuagaaaacaauggaaggga

SEQ ID NO: 332078 - RNA, 20 nt, Human
agccagggcuggguuuuccu

SEQ ID NO: 332079 - RNA, 18 nt, Human
aggcagaauagcaaccug

SEQ ID NO: 332080 - RNA, 25 nt, Human
agugauccucccaccugagccuccc

SEQ ID NO: 332081 - RNA, 18 nt, Human
agugguuuaaauacugag

SEQ ID NO: 332082 - RNA, 20 nt, Human
auauauuuuuuuguuguuaa

SEQ ID NO: 332083 - RNA, 24 nt, Human
aucacaaggguagccauacaacaa

SEQ ID NO: 332084 - RNA, 18 nt, Human
auccucccaccugagccu

SEQ ID NO: 332085 - RNA, 21 nt, Human
auccuggguuggcacagagau

SEQ ID NO: 332086 - RNA, 22 nt, Human
augcuuagcuuagguucuggcu

SEQ ID NO: 332087 - RNA, 18 nt, Human
auggggucucacuauguu

SEQ ID NO: 332088 - RNA, 19 nt, Human
auggggucucacuauguug

SEQ ID NO: 332089 - RNA, 24 nt, Human
auggggucucacuauguugcccag

SEQ ID NO: 332090 - RNA, 23 nt, Human
caaaggccuaacccucauauccu

SEQ ID NO: 332091 - RNA, 27 nt, Human
caauugcuuacuaaagcucauucaggc

SEQ ID NO: 332092 - RNA, 23 nt, Human
cacagacaagaaggcagcggaac

SEQ ID NO: 332093 - RNA, 24 nt, Human
cacagagauuccaguugaaccaaa

SEQ ID NO: 332094 - RNA, 20 nt, Human
caccugagccucccaaguag

SEQ ID NO: 332095 - RNA, 20 nt, Human
cacuauguugcccaggcuag

SEQ ID NO: 332096 - RNA, 24 nt, Human
cacuauguugcccaggcuagucuc

SEQ ID NO: 332097 - RNA, 27 nt, Human
cacuauguugcccaggcuagucucaaa

SEQ ID NO: 332098 - RNA, 20 nt, Human
cacucucauucuaagagagg

SEQ ID NO: 332099 - RNA, 24 nt, Human
cacucuguugcccaggcuggagug

SEQ ID NO: 332100 - RNA, 18 nt, Human
cagcggaacaguuauacc

SEQ ID NO: 332101 - RNA, 24 nt, Human
cagggucucacucuguugcccagg

SEQ ID NO: 332102 - RNA, 23 nt, Human
ccaaaacuccaugaggaccaugc

SEQ ID NO: 332103 - RNA, 21 nt, Human
ccaaaacugggggaaaaggga

SEQ ID NO: 332104 - RNA, 18 nt, Human
ccagguaauuuuguucau

SEQ ID NO: 332105 - RNA, 22 nt, Human
cccaaguagcagggacuacagg

SEQ ID NO: 332106 - RNA, 20 nt, Human
cccaggcuggagugccagug

SEQ ID NO: 332107 - RNA, 22 nt, Human
ccccugggcaaaacagagccua

SEQ ID NO: 332108 - RNA, 24 nt, Human
ccuacacccuccacucucauucua

SEQ ID NO: 332109 - RNA, 26 nt, Human
ccucccaccugagccucccaaguagc

SEQ ID NO: 332110 - RNA, 23 nt, Human
cuagucucaaacucaauuuaaaa

SEQ ID NO: 332111 - RNA, 24 nt, Human
cucaagugauccucccaccugagc

SEQ ID NO: 332112 - RNA, 24 nt, Human
cucacucuguugcccaggcuggag

SEQ ID NO: 332113 - RNA, 19 nt, Human
cucauauccuacacccucc

SEQ ID NO: 332114 - RNA, 19 nt, Human
cucauauccuacacccucc

SEQ ID NO: 332115 - RNA, 23 nt, Human
cucccaccugagccucccaagua

SEQ ID NO: 332116 - RNA, 24 nt, Human
cuggguuggcacagagauuccagu

SEQ ID NO: 332117 - RNA, 18 nt, Human
cuucuaggcuguagcagu

SEQ ID NO: 332118 - RNA, 20 nt, Human
cuugccuaugaacaaaagaa

SEQ ID NO: 332119 - RNA, 21 nt, Human
cuugugaugugaggggccaug

SEQ ID NO: 332120 - RNA, 21 nt, Human
gacuacagguauacaccacua

SEQ ID NO: 332121 - RNA, 20 nt, Human
gagaaaaaggcagauuucaa

SEQ ID NO: 332122 - RNA, 22 nt, Human
gaggcauguacuugaggcuuua

SEQ ID NO: 332123 - RNA, 25 nt, Human
gcccaggcuggagugccaguggugu

SEQ ID NO: 332124 - RNA, 20 nt, Human
gcuuacugcagccaccaucu

SEQ ID NO: 332125 - RNA, 20 nt, Human
ggaaaaacacaguucucuca

SEQ ID NO: 332126 - RNA, 24 nt, Human
ggacuacagguauacaccacuaug

SEQ ID NO: 332127 - RNA, 20 nt, Human
ggagaaugccagggaagaga

SEQ ID NO: 332128 - RNA, 23 nt, Human
ggcuggagugccaguggugugau

SEQ ID NO: 332129 - RNA, 21 nt, Human
gggcucaagugauccucccac

SEQ ID NO: 332130 - RNA, 22 nt, Human
gggucucacuauguugcccagg

SEQ ID NO: 332131 - RNA, 23 nt, Human
gguaagcacagugucccaaaacu

SEQ ID NO: 332132 - RNA, 24 nt, Human
gugccaguggugugaucuuggcuu

SEQ ID NO: 332133 - RNA, 23 nt, Human
uaaaaagaaacuacaagauuuca

SEQ ID NO: 332134 - RNA, 25 nt, Human
uaaauagagauggggucucacuaug

SEQ ID NO: 332135 - RNA, 22 nt, Human
uaagcacagugucccaaaacug

SEQ ID NO: 332136 - RNA, 22 nt, Human
uacaacaaagucacucucagau

SEQ ID NO: 332137 - RNA, 24 nt, Human
uacagguauacaccacuaugccca

SEQ ID NO: 332138 - RNA, 20 nt, Human
uacuaaagcucauucaggcu

SEQ ID NO: 332139 - RNA, 19 nt, Human
uacuagggcaacauuuggc

SEQ ID NO: 332140 - RNA, 22 nt, Human
uagagauggggucucacuaugu

SEQ ID NO: 332141 - RNA, 20 nt, Human
uagaggcaucuacuuggguu

SEQ ID NO: 332142 - RNA, 21 nt, Human
uaguagagguggugacaggag

SEQ ID NO: 332143 - RNA, 24 nt, Human
uauaaaaagaaacuacaagauuuc

SEQ ID NO: 332144 - RNA, 23 nt, Human
uauccuacacccuccacucucau

SEQ ID NO: 332145 - RNA, 23 nt, Human
uauguugcccaggcuagucucaa

SEQ ID NO: 332146 - RNA, 24 nt, Human
uauguugcccaggcuagucucaaa

SEQ ID NO: 332147 - RNA, 23 nt, Human
ucaaaaaaggaaauagaaaugac

SEQ ID NO: 332148 - RNA, 25 nt, Human
ucaauugcuuacuaaagcucauuca

SEQ ID NO: 332149 - RNA, 23 nt, Human
ucaccuucuaggcuguagcagug

SEQ ID NO: 332150 - RNA, 24 nt, Human
ucacucuguugcccaggcuggagu

SEQ ID NO: 332151 - RNA, 24 nt, Human
uccaaaguaauguuucugguuagu

SEQ ID NO: 332152 - RNA, 20 nt, Human
uccacucucauucuaagaga

SEQ ID NO: 332153 - RNA, 23 nt, Human
ucccaaguagcagggacuacagg

SEQ ID NO: 332154 - RNA, 24 nt, Human
uccuacacccuccacucucauucu

SEQ ID NO: 332155 - RNA, 19 nt, Human
ucucacuauguugcccagg

SEQ ID NO: 332156 - RNA, 26 nt, Human
ucucacuauguugcccaggcuagucu

SEQ ID NO: 332157 - RNA, 27 nt, Human
ucucacuauguugcccaggcuagucuc

SEQ ID NO: 332158 - RNA, 23 nt, Human
ucucacucuguugcccaggcugg

SEQ ID NO: 332159 - RNA, 24 nt, Human
ucucacucuguugcccaggcugga

SEQ ID NO: 332160 - RNA, 18 nt, Human
ugaaaaggcagaauagca

SEQ ID NO: 332161 - RNA, 22 nt, Human
ugaaccaaaacuccaugaggac

SEQ ID NO: 332162 - RNA, 23 nt, Human
ugaaccaaaacuccaugaggacc

SEQ ID NO: 332163 - RNA, 21 nt, Human
ugaccguuugucggaaaaaca

SEQ ID NO: 332164 - RNA, 20 nt, Human
ugagacagggucucacucug

SEQ ID NO: 332165 - RNA, 22 nt, Human
ugagacagggucucacucuguu

SEQ ID NO: 332166 - RNA, 21 nt, Human
ugaugugaggggccaugugcc

SEQ ID NO: 332167 - RNA, 22 nt, Human
ugcaaaacugugcccaaggcca

SEQ ID NO: 332168 - RNA, 22 nt, Human
ugcccaggcuggagugccagug

SEQ ID NO: 332169 - RNA, 25 nt, Human
ugcccaggcuggagugccaguggug

SEQ ID NO: 332170 - RNA, 21 nt, Human
ugcucaaacaugguauuagag

SEQ ID NO: 332171 - RNA, 20 nt, Human
uggaagggacuucagauggu

SEQ ID NO: 332172 - RNA, 20 nt, Human
uggagauggagcugaguacc

SEQ ID NO: 332173 - RNA, 19 nt, Human
uggagugccagugguguga

SEQ ID NO: 332174 - RNA, 25 nt, Human
uggagugccaguggugugaucuugg

SEQ ID NO: 332175 - RNA, 19 nt, Human
uggcaaaggccuaacccuc

SEQ ID NO: 332176 - RNA, 18 nt, Human
uggcacagacaagaaggc

SEQ ID NO: 332177 - RNA, 23 nt, Human
uggcacagacaagaaggcagcgg

SEQ ID NO: 332178 - RNA, 22 nt, Human
uggcuuacugcagccaccaucu

SEQ ID NO: 332179 - RNA, 24 nt, Human
uggggcucaagugauccucccacc

SEQ ID NO: 332180 - RNA, 24 nt, Human
uggggucucacuauguugcccagg

SEQ ID NO: 332181 - RNA, 24 nt, Human
ugguauuagagaugcauccaaagu

SEQ ID NO: 332182 - RNA, 24 nt, Human
ugucccaaaacugggggaaaaggg

SEQ ID NO: 332183 - RNA, 22 nt, Human
uuaaagaagucuugccuaugaa

SEQ ID NO: 332184 - RNA, 23 nt, Human
uuacugcagccaccaucuuuggg

SEQ ID NO: 332185 - RNA, 18 nt, Human
uuacuguagaucacaagg

SEQ ID NO: 332186 - RNA, 18 nt, Human
uucaagggaagagggacc

SEQ ID NO: 332187 - RNA, 22 nt, Human
uugagacagggucucacucugu

SEQ ID NO: 332188 - RNA, 18 nt, Human
uugcccaggcuggagugc

SEQ ID NO: 332189 - RNA, 20 nt, Human
uuggggcucaagugauccuc

SEQ ID NO: 332190 - RNA, 22 nt, Human
uuguucauuuuuuaaauagaga

SEQ ID NO: 332191 - RNA, 23 nt, Human
uuugcuccugacuuguguggaua

SEQ ID NO: 332192 - RNA, 21 nt, Human
uuuuguauaauguggcaaagg

SEQ ID NO: 332193 - RNA, 22 nt, Human
uuuuguuaugugucaucauagc

SEQ ID NO: 332194 - RNA, 25 nt, Human
aaaaaaaaggacagccucuuuaugc

SEQ ID NO: 332195 - RNA, 26 nt, Human
aaaaacaaaaacaaaaacaccaaaag

SEQ ID NO: 332196 - RNA, 18 nt, Human
aaaaacaaaaacaccaaa

SEQ ID NO: 332197 - RNA, 23 nt, Human
aaaaacaaaacccuauuaauaaa

SEQ ID NO: 332198 - RNA, 20 nt, Human
aaaaacaccaaaaaacaccu

SEQ ID NO: 332199 - RNA, 22 nt, Human
aaaaacauacuagcaagccaca

SEQ ID NO: 332200 - RNA, 22 nt, Human
aaaaacauacuagcaagccaca

SEQ ID NO: 332201 - RNA, 24 nt, Human
aaaaaggaaacaauaaaaacaaaa

SEQ ID NO: 332202 - RNA, 24 nt, Human
aaaaaggaaacaauaaaaacaaaa

SEQ ID NO: 332203 - RNA, 19 nt, Human
aaaacaaaaacaaaaacaa

SEQ ID NO: 332204 - RNA, 22 nt, Human
aaaacaaaaacaaaaacaaaaa

SEQ ID NO: 332205 - RNA, 27 nt, Human
aaaacaaaaacaaaaacaaaaacacca

SEQ ID NO: 332206 - RNA, 21 nt, Human
aaaagggcuccacccaccccu

SEQ ID NO: 332207 - RNA, 18 nt, Human
aaaauuagcugggcgugg

SEQ ID NO: 332208 - RNA, 22 nt, Human
aaacaaaaacaaaaacaccaaa

SEQ ID NO: 332209 - RNA, 23 nt, Human
aaacaaaaacaaaaacaccaaaa

SEQ ID NO: 332210 - RNA, 19 nt, Human
aaacaaacaaaccagauga

SEQ ID NO: 332211 - RNA, 23 nt, Human
aaacaauaaaaacaaaacccuau

SEQ ID NO: 332212 - RNA, 23 nt, Human
aaacaauaaaaacaaaacccuau

SEQ ID NO: 332213 - RNA, 25 nt, Human
aaagaaaacaaaaacaaaaacaaaa

SEQ ID NO: 332214 - RNA, 21 nt, Human
aacaaaacccuauuaauaaac

SEQ ID NO: 332215 - RNA, 21 nt, Human
aacaaaacccuauuaauaaac

SEQ ID NO: 332216 - RNA, 19 nt, Human
aacauggugaaaccccguc

SEQ ID NO: 332217 - RNA, 20 nt, Human
aacauggugaaaccccgucu

SEQ ID NO: 332218 - RNA, 21 nt, Human
aacauggugaaaccccgucuc

SEQ ID NO: 332219 - RNA, 18 nt, Human
aacguagggaaaggaugg

SEQ ID NO: 332220 - RNA, 22 nt, Human
aagaaaacaaaaacaaaaacaa

SEQ ID NO: 332221 - RNA, 21 nt, Human
aagaggaaaaaagaugggaga

SEQ ID NO: 332222 - RNA, 26 nt, Human
acaaaaacaaaaacaccaaaaaacac

SEQ ID NO: 332223 - RNA, 22 nt, Human
acaaaaacaccaaaaaacaccu

SEQ ID NO: 332224 - RNA, 20 nt, Human
acagagcgagacuccgucuc

SEQ ID NO: 332225 - RNA, 21 nt, Human
acagagcgagacuccgucuca

SEQ ID NO: 332226 - RNA, 24 nt, Human
accccgucucuacuaaaaauacaa

SEQ ID NO: 332227 - RNA, 22 nt, Human
acucagcugugggugggggggu

SEQ ID NO: 332228 - RNA, 23 nt, Human
acugcacuccagccuggcgacag

SEQ ID NO: 332229 - RNA, 25 nt, Human
acugcacuccagccuggcgacagag

SEQ ID NO: 332230 - RNA, 24 nt, Human
acugcgccacugcacuccagccug

SEQ ID NO: 332231 - RNA, 18 nt, Human
agaagcccaaggaauugu

SEQ ID NO: 332232 - RNA, 21 nt, Human
agaaucguuugaaccagggag

SEQ ID NO: 332233 - RNA, 23 nt, Human
agaguuugcuggugcugaccuca

SEQ ID NO: 332234 - RNA, 20 nt, Human
agaugauuggggccgggcgc

SEQ ID NO: 332235 - RNA, 24 nt, Human
agcacuuugggaggccgaggcggg

SEQ ID NO: 332236 - RNA, 22 nt, Human
agccacaaguaccagagagggg

SEQ ID NO: 332237 - RNA, 23 nt, Human
agccacaaguaccagagaggggu

SEQ ID NO: 332238 - RNA, 21 nt, Human
agccuggcgacagagcgagac

SEQ ID NO: 332239 - RNA, 23 nt, Human
agccuggcgacagagcgagacuc

SEQ ID NO: 332240 - RNA, 21 nt, Human
agcuaggccugucaccugcug

SEQ ID NO: 332241 - RNA, 24 nt, Human
aggaaaaaagaugggagaaaacgu

SEQ ID NO: 332242 - RNA, 22 nt, Human
aggaaacaauaaaaacaaaacc

SEQ ID NO: 332243 - RNA, 22 nt, Human
aggaaacaauaaaaacaaaacc

SEQ ID NO: 332244 - RNA, 22 nt, Human
aggcaggagaaucguuugaacc

SEQ ID NO: 332245 - RNA, 24 nt, Human
aggcaggagaaucguuugaaccag

SEQ ID NO: 332246 - RNA, 21 nt, Human
aggccgaggcgggcggaucac

SEQ ID NO: 332247 - RNA, 23 nt, Human
aggccgaggcgggcggaucacga

SEQ ID NO: 332248 - RNA, 24 nt, Human
aggcgggcggaucacgaggugagg

SEQ ID NO: 332249 - RNA, 20 nt, Human
aggcugaggcaggagaaucg

SEQ ID NO: 332250 - RNA, 24 nt, Human
aggcugaggcaggagaaucguuug

SEQ ID NO: 332251 - RNA, 19 nt, Human
agguagaagaggggauggc

SEQ ID NO: 332252 - RNA, 24 nt, Human
agucagagguugcagcgagccgag

SEQ ID NO: 332253 - RNA, 18 nt, Human
aguuguugaagggaaggg

SEQ ID NO: 332254 - RNA, 19 nt, Human
augccuguaaucccagcac

SEQ ID NO: 332255 - RNA, 25 nt, Human
caaaaacaaaaacaaaaacaccaaa

SEQ ID NO: 332256 - RNA, 27 nt, Human
caaaaacaaaaacaaaaacaccaaaaa

SEQ ID NO: 332257 - RNA, 24 nt, Human
caaaaacaaaaacaccaaaaaaca

SEQ ID NO: 332258 - RNA, 20 nt, Human
caaaaacaccaaaaaacacc

SEQ ID NO: 332259 - RNA, 21 nt, Human
caaaaacaccaaaaaacaccu

SEQ ID NO: 332260 - RNA, 20 nt, Human
caaagaaacaaacaaaccag

SEQ ID NO: 332261 - RNA, 22 nt, Human
caacauggugaaaccccgucuc

SEQ ID NO: 332262 - RNA, 24 nt, Human
caacauggugaaaccccgucucua

SEQ ID NO: 332263 - RNA, 19 nt, Human
caagccacaaguaccagag

SEQ ID NO: 332264 - RNA, 19 nt, Human
caagccacaaguaccagag

SEQ ID NO: 332265 - RNA, 22 nt, Human
cacuccagccuggcgacagagc

SEQ ID NO: 332266 - RNA, 23 nt, Human
cacuccagccuggcgacagagcg

SEQ ID NO: 332267 - RNA, 18 nt, Human
cacugcacuccagccugg

SEQ ID NO: 332268 - RNA, 18 nt, Human
cacugcacuccagccugg

SEQ ID NO: 332269 - RNA, 22 nt, Human
cacugcacuccagccuggcgac

SEQ ID NO: 332270 - RNA, 23 nt, Human
cacugcacuccagccuggcgaca

SEQ ID NO: 332271 - RNA, 23 nt, Human
cacugcacuccagccuggcgaca

SEQ ID NO: 332272 - RNA, 20 nt, Human
cagaguuugcuggugcugac

SEQ ID NO: 332273 - RNA, 24 nt, Human
cagcacuuugggaggccgaggcgg

SEQ ID NO: 332274 - RNA, 24 nt, Human
cagccacucgggaggcugaggcag

SEQ ID NO: 332275 - RNA, 18 nt, Human
cagcccaagggaggggag

SEQ ID NO: 332276 - RNA, 19 nt, Human
cagcuuuaccuagaagagc

SEQ ID NO: 332277 - RNA, 23 nt, Human
caggagaagcccaaggaauuguc

SEQ ID NO: 332278 - RNA, 18 nt, Human
caguccucagccucccac

SEQ ID NO: 332279 - RNA, 18 nt, Human
caguccucagccucccac

SEQ ID NO: 332280 - RNA, 21 nt, Human
cauaucugcuagcucuccucu

SEQ ID NO: 332281 - RNA, 21 nt, Human
cauaucugcuagcucuccucu

SEQ ID NO: 332282 - RNA, 20 nt, Human
caugccuguaaucccagcac

SEQ ID NO: 332283 - RNA, 24 nt, Human
caugccuguaaucccagcacuuug

SEQ ID NO: 332284 - RNA, 19 nt, Human
cauucagagcuggagaguu

SEQ ID NO: 332285 - RNA, 19 nt, Human
ccacugcacuccagccugg

SEQ ID NO: 332286 - RNA, 19 nt, Human
ccacugcacuccagccugg

SEQ ID NO: 332287 - RNA, 23 nt, Human
ccacugcacuccagccuggcgac

SEQ ID NO: 332288 - RNA, 21 nt, Human
cccacaggaggcacaaggucc

SEQ ID NO: 332289 - RNA, 21 nt, Human
cccacaggaggcacaaggucc

SEQ ID NO: 332290 - RNA, 20 nt, Human
cccaccccuagccccagccc

SEQ ID NO: 332291 - RNA, 21 nt, Human
cccaccccuagccccagcccc

SEQ ID NO: 332292 - RNA, 21 nt, Human
ccuagaagagcuccugaaaca

SEQ ID NO: 332293 - RNA, 24 nt, Human
ccucacagacucagcugugggugg

SEQ ID NO: 332294 - RNA, 22 nt, Human
ccucccacaggaggcacaaggu

SEQ ID NO: 332295 - RNA, 22 nt, Human
ccucccacaggaggcacaaggu

SEQ ID NO: 332296 - RNA, 23 nt, Human
ccucuuuaugcugaaauaggaac

SEQ ID NO: 332297 - RNA, 21 nt, Human
ccuggcgacagagcgagacuc

SEQ ID NO: 332298 - RNA, 20 nt, Human
ccugggcaacauggugaaac

SEQ ID NO: 332299 - RNA, 22 nt, Human
ccugggcaacauggugaaaccc

SEQ ID NO: 332300 - RNA, 23 nt, Human
ccugggcaacauggugaaacccc

SEQ ID NO: 332301 - RNA, 24 nt, Human
ccugggcaacauggugaaaccccg

SEQ ID NO: 332302 - RNA, 23 nt, Human
ccuggggggaggggguggggaag

SEQ ID NO: 332303 - RNA, 22 nt, Human
ccuguaaucccagcacuuuggg

SEQ ID NO: 332304 - RNA, 24 nt, Human
cgagaccauccugggcaacauggu

SEQ ID NO: 332305 - RNA, 24 nt, Human
cgagacugcgccacugcacuccag

SEQ ID NO: 332306 - RNA, 22 nt, Human
cgaggugaggagaucgagacca

SEQ ID NO: 332307 - RNA, 25 nt, Human
cgccacugcacuccagccuggcgac

SEQ ID NO: 332308 - RNA, 22 nt, Human
cgccagucuggacucugcgcgc

SEQ ID NO: 332309 - RNA, 27 nt, Human
cucacagacucagcugugggugggggg

SEQ ID NO: 332310 - RNA, 19 nt, Human
cucagccucccacaggagg

SEQ ID NO: 332311 - RNA, 19 nt, Human
cucagccucccacaggagg

SEQ ID NO: 332312 - RNA, 18 nt, Human
cucaggacgaacaaagaa

SEQ ID NO: 332313 - RNA, 24 nt, Human
cucaugccuguaaucccagcacuu

SEQ ID NO: 332314 - RNA, 23 nt, Human
cuccacccaccccuagccccagc

SEQ ID NO: 332315 - RNA, 24 nt, Human
cuccagccuggcgacagagcgaga

SEQ ID NO: 332316 - RNA, 23 nt, Human
cucuccucuugcaguccucagcc

SEQ ID NO: 332317 - RNA, 23 nt, Human
cucuccucuugcaguccucagcc

SEQ ID NO: 332318 - RNA, 25 nt, Human
cuggggggagggggugggaggcucc

SEQ ID NO: 332319 - RNA, 20 nt, Human
cuguuccugugaucucagcu

SEQ ID NO: 332320 - RNA, 18 nt, Human
cuucaaggagaucuggug

SEQ ID NO: 332321 - RNA, 24 nt, Human
gaaaacaaaaacaaaaacaaaaac

SEQ ID NO: 332322 - RNA, 21 nt, Human
gaaauaggaacuuuaaaggaa

SEQ ID NO: 332323 - RNA, 22 nt, Human
gacacauaaucauguuuucuga

SEQ ID NO: 332324 - RNA, 24 nt, Human
gacagagcgagacuccgucucagg

SEQ ID NO: 332325 - RNA, 23 nt, Human
gagaguuucuccauucagggcac

SEQ ID NO: 332326 - RNA, 22 nt, Human
gaggcgggcggaucacgaggug

SEQ ID NO: 332327 - RNA, 18 nt, Human
gaucugguggggaauucu

SEQ ID NO: 332328 - RNA, 24 nt, Human
gaugacugggagacugaagaggaa

SEQ ID NO: 332329 - RNA, 20 nt, Human
gauuggggccgggcgcggug

SEQ ID NO: 332330 - RNA, 23 nt, Human
gcacuccagccuggcgacagagc

SEQ ID NO: 332331 - RNA, 19 nt, Human
gccacaaguaccagagagg

SEQ ID NO: 332332 - RNA, 19 nt, Human
gccacaaguaccagagagg

SEQ ID NO: 332333 - RNA, 21 nt, Human
gccagucuggacucugcgcgc

SEQ ID NO: 332334 - RNA, 19 nt, Human
gcuccacccaccccuagcc

SEQ ID NO: 332335 - RNA, 22 nt, Human
gcuccacccaccccuagcccca

SEQ ID NO: 332336 - RNA, 20 nt, Human
ggccccucgggcccugccgc

SEQ ID NO: 332337 - RNA, 21 nt, Human
ggccgggcgcgguggcucaug

SEQ ID NO: 332338 - RNA, 23 nt, Human
ggccgggcgcgguggcucaugcc

SEQ ID NO: 332339 - RNA, 23 nt, Human
ggcgcgguggcucaugccuguaa

SEQ ID NO: 332340 - RNA, 18 nt, Human
gggaggggguggggaagg

SEQ ID NO: 332341 - RNA, 20 nt, Human
gggcguggugaugccagccc

SEQ ID NO: 332342 - RNA, 26 nt, Human
ggggggaggggguggggaagguguuc

SEQ ID NO: 332343 - RNA, 23 nt, Human
gguggcucaugccuguaauccca

SEQ ID NO: 332344 - RNA, 24 nt, Human
gguggcucaugccuguaaucccag

SEQ ID NO: 332345 - RNA, 21 nt, Human
gguggguugcaggagguagaa

SEQ ID NO: 332346 - RNA, 26 nt, Human
guaguccaaauggacguaccuugugg

SEQ ID NO: 332347 - RNA, 21 nt, Human
guugcagcgagccgagacugc

SEQ ID NO: 332348 - RNA, 18 nt, Human
uaaaaacaaaacccuauu

SEQ ID NO: 332349 - RNA, 21 nt, Human
uaaaaacaaaacccuauuaau

SEQ ID NO: 332350 - RNA, 21 nt, Human
uaaaaacaaaacccuauuaau

SEQ ID NO: 332351 - RNA, 19 nt, Human
uaccucaggagaagcccaa

SEQ ID NO: 332352 - RNA, 21 nt, Human
uagaagagcuccugaaacaga

SEQ ID NO: 332353 - RNA, 26 nt, Human
ucacagacucagcugugggugggggg

SEQ ID NO: 332354 - RNA, 24 nt, Human
ucacgaggugaggagaucgagacc

SEQ ID NO: 332355 - RNA, 24 nt, Human
ucaggacgaacaaagaaacaaaca

SEQ ID NO: 332356 - RNA, 19 nt, Human
ucagugcgguuccgaguga

SEQ ID NO: 332357 - RNA, 22 nt, Human
ucaugccuguaaucccagcacu

SEQ ID NO: 332358 - RNA, 26 nt, Human
uccaaacuauuccuaaaaaaaaaagg

SEQ ID NO: 332359 - RNA, 22 nt, Human
uccagccuggcgacagagcgag

SEQ ID NO: 332360 - RNA, 25 nt, Human
uccugggcaacauggugaaaccccg

SEQ ID NO: 332361 - RNA, 24 nt, Human
ucgggaggcugaggcaggagaauc

SEQ ID NO: 332362 - RNA, 23 nt, Human
ucucuacuaaaaauacaaaaauu

SEQ ID NO: 332363 - RNA, 18 nt, Human
ugaccucaucccuguauc

SEQ ID NO: 332364 - RNA, 20 nt, Human
ugaggcaggagaaucguuug

SEQ ID NO: 332365 - RNA, 24 nt, Human
ugaggcaggagaaucguuugaacc

SEQ ID NO: 332366 - RNA, 23 nt, Human
ugccuguaaucccagcacuuugg

SEQ ID NO: 332367 - RNA, 23 nt, Human
ugccuguaaucccagcacuuugg

SEQ ID NO: 332368 - RNA, 23 nt, Human
ugcugaccucaucccuguaucac

SEQ ID NO: 332369 - RNA, 24 nt, Human
uggaaagaaaacaaaaacaaaaac

SEQ ID NO: 332370 - RNA, 21 nt, Human
uggaaugaauagcuaucugcu

SEQ ID NO: 332371 - RNA, 24 nt, Human
uggcucaugccuguaaucccagca

SEQ ID NO: 332372 - RNA, 19 nt, Human
ugggaggccgaggcgggcg

SEQ ID NO: 332373 - RNA, 24 nt, Human
ugggaggccgaggcgggcggauca

SEQ ID NO: 332374 - RNA, 27 nt, Human
ugggaggcuaauaggauggguggguug

SEQ ID NO: 332375 - RNA, 19 nt, Human
ugggcguggugaugccagc

SEQ ID NO: 332376 - RNA, 21 nt, Human
ugggcguggugaugccagcca

SEQ ID NO: 332377 - RNA, 20 nt, Human
uggggaagguguuaaugaug

SEQ ID NO: 332378 - RNA, 24 nt, Human
uggggccucacagacucagcugug

SEQ ID NO: 332379 - RNA, 20 nt, Human
ugguauggcuguaaggacuc

SEQ ID NO: 332380 - RNA, 18 nt, Human
uguaucacgggccuugaa

SEQ ID NO: 332381 - RNA, 24 nt, Human
ugugggaggcuaauaggaugggug

SEQ ID NO: 332382 - RNA, 20 nt, Human
uuagcugggcguggugaugc

SEQ ID NO: 332383 - RNA, 19 nt, Human
uuccccuagccccagcccc

SEQ ID NO: 332384 - RNA, 22 nt, Human
uugcagcgagccgagacugcgc

SEQ ID NO: 332385 - RNA, 25 nt, Human
uugggaggccgaggcgggcggauca

SEQ ID NO: 332386 - RNA, 20 nt, Human
uuguugaagggaaggguauu

SEQ ID NO: 332387 - RNA, 18 nt, Human
uuugcuggugcugaccuc

SEQ ID NO: 332388 - RNA, 25 nt, Human
aaaaaaaaggacagccucuuuaugc

SEQ ID NO: 332389 - RNA, 18 nt, Human
aaaaacaaaaacaccaaa

SEQ ID NO: 332390 - RNA, 23 nt, Human
aaaaacaaaacccuauuaauaaa

SEQ ID NO: 332391 - RNA, 20 nt, Human
aaaaacaccaaaaaacaccu

SEQ ID NO: 332392 - RNA, 22 nt, Human
aaaaacauacuagcaagccaca

SEQ ID NO: 332393 - RNA, 22 nt, Human
aaaacaaaaacaaaaacaaaaa

SEQ ID NO: 332394 - RNA, 27 nt, Human
aaaacaaaaacaaaaacaaaaacacca

SEQ ID NO: 332395 - RNA, 23 nt, Human
aaaaggaaacaauaaaaacaaaa

SEQ ID NO: 332396 - RNA, 21 nt, Human
aaaagggcuccacccaccccu

SEQ ID NO: 332397 - RNA, 18 nt, Human
aaaauuagcugggcgugg

SEQ ID NO: 332398 - RNA, 25 nt, Human
aaacaaaaacaaaaacaaaaacaaa

SEQ ID NO: 332399 - RNA, 30 nt, Human
aaacaaaaacaaaaacaaaaacaccaaaag

SEQ ID NO: 332400 - RNA, 22 nt, Human
aaacaaaaacaaaaacaccaaa

SEQ ID NO: 332401 - RNA, 23 nt, Human
aaacaaaaacaaaaacaccaaaa

SEQ ID NO: 332402 - RNA, 19 nt, Human
aaacaaacaaaccagauga

SEQ ID NO: 332403 - RNA, 23 nt, Human
aaacaauaaaaacaaaacccuau

SEQ ID NO: 332404 - RNA, 25 nt, Human
aaagaaaacaaaaacaaaaacaaaa

SEQ ID NO: 332405 - RNA, 21 nt, Human
aacaaaacccuauuaauaaac

SEQ ID NO: 332406 - RNA, 19 nt, Human
aacauggugaaaccccguc

SEQ ID NO: 332407 - RNA, 20 nt, Human
aacauggugaaaccccgucu

SEQ ID NO: 332408 - RNA, 21 nt, Human
aacauggugaaaccccgucuc

SEQ ID NO: 332409 - RNA, 18 nt, Human
aacguagggaaaggaugg

SEQ ID NO: 332410 - RNA, 22 nt, Human
aagaaaacaaaaacaaaaacaa

SEQ ID NO: 332411 - RNA, 21 nt, Human
aagagcuccugaaacagaaug

SEQ ID NO: 332412 - RNA, 21 nt, Human
aagaggaaaaaagaugggaga

SEQ ID NO: 332413 - RNA, 25 nt, Human
acaaaaacaaaaacaaaaacaaaaa

SEQ ID NO: 332414 - RNA, 26 nt, Human
acaaaaacaaaaacaccaaaaaacac

SEQ ID NO: 332415 - RNA, 22 nt, Human
acaaaaacaccaaaaaacaccu

SEQ ID NO: 332416 - RNA, 20 nt, Human
acagagcgagacuccgucuc

SEQ ID NO: 332417 - RNA, 21 nt, Human
acagagcgagacuccgucuca

SEQ ID NO: 332418 - RNA, 24 nt, Human
acagagcgagacuccgucucagaa

SEQ ID NO: 332419 - RNA, 24 nt, Human
accccgucucuacuaaaaauacaa

SEQ ID NO: 332420 - RNA, 22 nt, Human
acucagcugugggugggggggu

SEQ ID NO: 332421 - RNA, 23 nt, Human
acugcacuccagccuggcgacag

SEQ ID NO: 332422 - RNA, 25 nt, Human
acugcacuccagccuggcgacagag

SEQ ID NO: 332423 - RNA, 24 nt, Human
acugcgccacugcacuccagccug

SEQ ID NO: 332424 - RNA, 18 nt, Human
agaagcccaaggaauugu

SEQ ID NO: 332425 - RNA, 23 nt, Human
agaguuugcuggugcugaccuca

SEQ ID NO: 332426 - RNA, 20 nt, Human
agaugauuggggccgggcgc

SEQ ID NO: 332427 - RNA, 24 nt, Human
agcacuuugggaggccgaggcggg

SEQ ID NO: 332428 - RNA, 23 nt, Human
agccacaaguaccagagaggggu

SEQ ID NO: 332429 - RNA, 21 nt, Human
agccuggcgacagagcgagac

SEQ ID NO: 332430 - RNA, 23 nt, Human
agccuggcgacagagcgagacuc

SEQ ID NO: 332431 - RNA, 21 nt, Human
agcuaggccugucaccugcug

SEQ ID NO: 332432 - RNA, 24 nt, Human
aggaaaaaagaugggagaaaacgu

SEQ ID NO: 332433 - RNA, 22 nt, Human
aggaaacaauaaaaacaaaacc

SEQ ID NO: 332434 - RNA, 22 nt, Human
aggagaagcccaaggaauuguc

SEQ ID NO: 332435 - RNA, 22 nt, Human
aggcaggagaaucguuugaacc

SEQ ID NO: 332436 - RNA, 24 nt, Human
aggcaggagaaucguuugaaccag

SEQ ID NO: 332437 - RNA, 21 nt, Human
aggccgaggcgggcggaucac

SEQ ID NO: 332438 - RNA, 23 nt, Human
aggccgaggcgggcggaucacga

SEQ ID NO: 332439 - RNA, 24 nt, Human
aggcgggcggaucacgaggugagg

SEQ ID NO: 332440 - RNA, 20 nt, Human
aggcugaggcaggagaaucg

SEQ ID NO: 332441 - RNA, 24 nt, Human
aggcugaggcaggagaaucguuug

SEQ ID NO: 332442 - RNA, 19 nt, Human
agguagaagaggggauggc

SEQ ID NO: 332443 - RNA, 24 nt, Human
agucagagguugcagcgagccgag

SEQ ID NO: 332444 - RNA, 24 nt, Human
aguccaaauggacguaccuugugg

SEQ ID NO: 332445 - RNA, 18 nt, Human
aguuguugaagggaaggg

SEQ ID NO: 332446 - RNA, 19 nt, Human
augccuguaaucccagcac

SEQ ID NO: 332447 - RNA, 25 nt, Human
caaaaacaaaaacaaaaacaaaaac

SEQ ID NO: 332448 - RNA, 25 nt, Human
caaaaacaaaaacaaaaacaccaaa

SEQ ID NO: 332449 - RNA, 21 nt, Human
caaaaacaaaaacaccaaaaa

SEQ ID NO: 332450 - RNA, 24 nt, Human
caaaaacaaaaacaccaaaaaaca

SEQ ID NO: 332451 - RNA, 20 nt, Human
caaaaacaccaaaaaacacc

SEQ ID NO: 332452 - RNA, 21 nt, Human
caaaaacaccaaaaaacaccu

SEQ ID NO: 332453 - RNA, 20 nt, Human
caaagaaacaaacaaaccag

SEQ ID NO: 332454 - RNA, 22 nt, Human
caacauggugaaaccccgucuc

SEQ ID NO: 332455 - RNA, 24 nt, Human
caacauggugaaaccccgucucua

SEQ ID NO: 332456 - RNA, 19 nt, Human
caagccacaaguaccagag

SEQ ID NO: 332457 - RNA, 22 nt, Human
cacuccagccuggcgacagagc

SEQ ID NO: 332458 - RNA, 23 nt, Human
cacuccagccuggcgacagagcg

SEQ ID NO: 332459 - RNA, 18 nt, Human
cacugcacuccagccugg

SEQ ID NO: 332460 - RNA, 20 nt, Human
cacugcacuccagccuggcg

SEQ ID NO: 332461 - RNA, 22 nt, Human
cacugcacuccagccuggcgac

SEQ ID NO: 332462 - RNA, 23 nt, Human
cacugcacuccagccuggcgaca

SEQ ID NO: 332463 - RNA, 24 nt, Human
cacugcacuccagccuggcgacag

SEQ ID NO: 332464 - RNA, 24 nt, Human
cagcacuuugggaggccgaggcgg

SEQ ID NO: 332465 - RNA, 24 nt, Human
cagccacucgggaggcugaggcag

SEQ ID NO: 332466 - RNA, 18 nt, Human
cagcccaagggaggggag

SEQ ID NO: 332467 - RNA, 18 nt, Human
cagcuuuaccuagaagag

SEQ ID NO: 332468 - RNA, 18 nt, Human
caguccucagccucccac

SEQ ID NO: 332469 - RNA, 21 nt, Human
cauaucugcuagcucuccucu

SEQ ID NO: 332470 - RNA, 20 nt, Human
caugccuguaaucccagcac

SEQ ID NO: 332471 - RNA, 24 nt, Human
caugccuguaaucccagcacuuug

SEQ ID NO: 332472 - RNA, 19 nt, Human
cauucagagcuggagaguu

SEQ ID NO: 332473 - RNA, 19 nt, Human
ccacugcacuccagccugg

SEQ ID NO: 332474 - RNA, 19 nt, Human
ccacugcacuccagccugg

SEQ ID NO: 332475 - RNA, 19 nt, Human
ccacugcacuccagccugg

SEQ ID NO: 332476 - RNA, 20 nt, Human
ccacugcacuccagccuggc

SEQ ID NO: 332477 - RNA, 22 nt, Human
ccacugcacuccagccuggcga

SEQ ID NO: 332478 - RNA, 23 nt, Human
ccacugcacuccagccuggcgac

SEQ ID NO: 332479 - RNA, 21 nt, Human
ccagaguuugcuggugcugac

SEQ ID NO: 332480 - RNA, 21 nt, Human
cccacaggaggcacaaggucc

SEQ ID NO: 332481 - RNA, 20 nt, Human
cccaccccuagccccagccc

SEQ ID NO: 332482 - RNA, 21 nt, Human
cccaccccuagccccagcccc

SEQ ID NO: 332483 - RNA, 21 nt, Human
ccuagaagagcuccugaaaca

SEQ ID NO: 332484 - RNA, 24 nt, Human
ccucacagacucagcugugggugg

SEQ ID NO: 332485 - RNA, 22 nt, Human
ccucccacaggaggcacaaggu

SEQ ID NO: 332486 - RNA, 23 nt, Human
ccucuuuaugcugaaauaggaac

SEQ ID NO: 332487 - RNA, 21 nt, Human
ccuggcgacagagcgagacuc

SEQ ID NO: 332488 - RNA, 20 nt, Human
ccugggcaacauggugaaac

SEQ ID NO: 332489 - RNA, 22 nt, Human
ccugggcaacauggugaaaccc

SEQ ID NO: 332490 - RNA, 23 nt, Human
ccugggcaacauggugaaacccc

SEQ ID NO: 332491 - RNA, 24 nt, Human
ccugggcaacauggugaaaccccg

SEQ ID NO: 332492 - RNA, 22 nt, Human
ccuguaaucccagcacuuuggg

SEQ ID NO: 332493 - RNA, 24 nt, Human
cgagaccauccugggcaacauggu

SEQ ID NO: 332494 - RNA, 24 nt, Human
cgaggcgggcggaucacgagguga

SEQ ID NO: 332495 - RNA, 22 nt, Human
cgaggugaggagaucgagacca

SEQ ID NO: 332496 - RNA, 22 nt, Human
cgccagucuggacucugcgcgc

SEQ ID NO: 332497 - RNA, 24 nt, Human
cgggccuagaaugugggaggcuaa

SEQ ID NO: 332498 - RNA, 27 nt, Human
cucacagacucagcugugggugggggg

SEQ ID NO: 332499 - RNA, 19 nt, Human
cucagccucccacaggagg

SEQ ID NO: 332500 - RNA, 24 nt, Human
cucaugccuguaaucccagcacuu

SEQ ID NO: 332501 - RNA, 18 nt, Human
cuccacccaccccuagcc

SEQ ID NO: 332502 - RNA, 23 nt, Human
cuccacccaccccuagccccagc

SEQ ID NO: 332503 - RNA, 24 nt, Human
cuccagccuggcgacagagcgaga

SEQ ID NO: 332504 - RNA, 23 nt, Human
cucuccucuugcaguccucagcc

SEQ ID NO: 332505 - RNA, 20 nt, Human
cuguuccugugaucucagcu

SEQ ID NO: 332506 - RNA, 18 nt, Human
cuucaaggagaucuggug

SEQ ID NO: 332507 - RNA, 24 nt, Human
gaaaacaaaaacaaaaacaaaaac

SEQ ID NO: 332508 - RNA, 21 nt, Human
gaaauaggaacuuuaaaggaa

SEQ ID NO: 332509 - RNA, 22 nt, Human
gagaaucguuugaaccagggag

SEQ ID NO: 332510 - RNA, 23 nt, Human
gagacugcgccacugcacuccag

SEQ ID NO: 332511 - RNA, 23 nt, Human
gagaguuucuccauucagggcac

SEQ ID NO: 332512 - RNA, 18 nt, Human
gaucugguggggaauucu

SEQ ID NO: 332513 - RNA, 24 nt, Human
gaugacugggagacugaagaggaa

SEQ ID NO: 332514 - RNA, 20 nt, Human
gauuggggccgggcgcggug

SEQ ID NO: 332515 - RNA, 23 nt, Human
gcacuccagccuggcgacagagc

SEQ ID NO: 332516 - RNA, 19 nt, Human
gccacaaguaccagagagg

SEQ ID NO: 332517 - RNA, 22 nt, Human
gcuccacccaccccuagcccca

SEQ ID NO: 332518 - RNA, 21 nt, Human
gcugaucccuacuucugcuuc

SEQ ID NO: 332519 - RNA, 23 nt, Human
ggccgggcgcgguggcucaugcc

SEQ ID NO: 332520 - RNA, 23 nt, Human
ggcgcgguggcucaugccuguaa

SEQ ID NO: 332521 - RNA, 21 nt, Human
ggcucaugccuguaaucccag

SEQ ID NO: 332522 - RNA, 18 nt, Human
gggaggggguggggaagg

SEQ ID NO: 332523 - RNA, 20 nt, Human
gggcguggugaugccagccc

SEQ ID NO: 332524 - RNA, 23 nt, Human
gguggcucaugccuguaauccca

SEQ ID NO: 332525 - RNA, 21 nt, Human
gguggguugcaggagguagaa

SEQ ID NO: 332526 - RNA, 24 nt, Human
gugacacauaaucauguuuucuga

SEQ ID NO: 332527 - RNA, 23 nt, Human
guggcucaugccuguaaucccag

SEQ ID NO: 332528 - RNA, 21 nt, Human
guugcagcgagccgagacugc

SEQ ID NO: 332529 - RNA, 18 nt, Human
uaaaaacaaaacccuauu

SEQ ID NO: 332530 - RNA, 19 nt, Human
uaccucaggagaagcccaa

SEQ ID NO: 332531 - RNA, 21 nt, Human
uagaagagcuccugaaacaga

SEQ ID NO: 332532 - RNA, 22 nt, Human
uagcuaggccugucaccugcug

SEQ ID NO: 332533 - RNA, 26 nt, Human
ucacagacucagcugugggugggggg

SEQ ID NO: 332534 - RNA, 24 nt, Human
ucacgaggugaggagaucgagacc

SEQ ID NO: 332535 - RNA, 20 nt, Human
ucagaacgaacaaagaaaca

SEQ ID NO: 332536 - RNA, 24 nt, Human
ucagaacgaacaaagaaacaaaca

SEQ ID NO: 332537 - RNA, 19 nt, Human
ucagugcgguuccgaguga

SEQ ID NO: 332538 - RNA, 22 nt, Human
ucaugccuguaaucccagcacu

SEQ ID NO: 332539 - RNA, 22 nt, Human
uccagccuggcgacagagcgag

SEQ ID NO: 332540 - RNA, 25 nt, Human
uccugggcaacauggugaaaccccg

SEQ ID NO: 332541 - RNA, 22 nt, Human
ucggccccucgggcccugccgc

SEQ ID NO: 332542 - RNA, 24 nt, Human
ucgggaggcugaggcaggagaauc

SEQ ID NO: 332543 - RNA, 22 nt, Human
ucucagaacgaacaaagaaaca

SEQ ID NO: 332544 - RNA, 23 nt, Human
ucucuacuaaaaauacaaaaauu

SEQ ID NO: 332545 - RNA, 18 nt, Human
ucugccugcggggagggg

SEQ ID NO: 332546 - RNA, 18 nt, Human
ugaccucaucccuguauc

SEQ ID NO: 332547 - RNA, 20 nt, Human
ugaggcaggagaaucguuug

SEQ ID NO: 332548 - RNA, 24 nt, Human
ugaggcaggagaaucguuugaacc

SEQ ID NO: 332549 - RNA, 23 nt, Human
ugccuguaaucccagcacuuugg

SEQ ID NO: 332550 - RNA, 23 nt, Human
ugccuguaaucccagcacuuugg

SEQ ID NO: 332551 - RNA, 23 nt, Human
ugcugaccucaucccuguaucac

SEQ ID NO: 332552 - RNA, 23 nt, Human
uggaaagaaaacaaaaacaaaaa

SEQ ID NO: 332553 - RNA, 21 nt, Human
uggaaugaauagcuaucugcu

SEQ ID NO: 332554 - RNA, 22 nt, Human
uggcucaugccuguaaucccag

SEQ ID NO: 332555 - RNA, 24 nt, Human
uggcucaugccuguaaucccagca

SEQ ID NO: 332556 - RNA, 19 nt, Human
ugggaggccgaggcgggcg

SEQ ID NO: 332557 - RNA, 24 nt, Human
ugggaggccgaggcgggcggauca

SEQ ID NO: 332558 - RNA, 27 nt, Human
ugggaggcuaauaggauggguggguug

SEQ ID NO: 332559 - RNA, 19 nt, Human
ugggcguggugaugccagc

SEQ ID NO: 332560 - RNA, 21 nt, Human
ugggcguggugaugccagcca

SEQ ID NO: 332561 - RNA, 20 nt, Human
uggggaagguguuaaugaug

SEQ ID NO: 332562 - RNA, 24 nt, Human
uggggccgggcgcgguggcucaug

SEQ ID NO: 332563 - RNA, 24 nt, Human
uggggccucacagacucagcugug

SEQ ID NO: 332564 - RNA, 20 nt, Human
ugguauggcuguaaggacuc

SEQ ID NO: 332565 - RNA, 24 nt, Human
ugugggaggcuaauaggaugggug

SEQ ID NO: 332566 - RNA, 20 nt, Human
uuagcugggcguggugaugc

SEQ ID NO: 332567 - RNA, 22 nt, Human
uugcagcgagccgagacugcgc

SEQ ID NO: 332568 - RNA, 25 nt, Human
uugggaggccgaggcgggcggauca

SEQ ID NO: 332569 - RNA, 20 nt, Human
uuguugaagggaaggguauu

SEQ ID NO: 332570 - RNA, 18 nt, Human
uuugcuggugcugaccuc

SEQ ID NO: 332571 - RNA, 23 nt, Human
cagcaaauucuuucccagaaucu

SEQ ID NO: 332572 - RNA, 26 nt, Human
cagcaaauucuuucccagaaucuauc

SEQ ID NO: 332573 - RNA, 20 nt, Human
cagcccgcgggccuggggcg

SEQ ID NO: 332574 - RNA, 20 nt, Human
ccagcucccggcccggcaca

SEQ ID NO: 332575 - RNA, 22 nt, Human
cucccggcccggcacaggcugu

SEQ ID NO: 332576 - RNA, 18 nt, Human
cuggggcggcggcggauc

SEQ ID NO: 332577 - RNA, 23 nt, Human
ucaccacugcuaauuucccccug

SEQ ID NO: 332578 - RNA, 20 nt, Human
uccgugcgcaccacggcgcg

SEQ ID NO: 332579 - RNA, 22 nt, Human
uccgugcgcaccacggcgcgua

SEQ ID NO: 332580 - RNA, 23 nt, Human
ugucagcagcccgcgggccuggg

SEQ ID NO: 332581 - RNA, 18 nt, Human
uucccccugcccagcucc

SEQ ID NO: 332582 - RNA, 24 nt, Human
uuucucaccacugcuaauuucccc

SEQ ID NO: 332583 - RNA, 20 nt, Human
cgagcugcggagaaaugccc

SEQ ID NO: 332584 - RNA, 18 nt, Human
gcgcggccgcgagccgag

SEQ ID NO: 332585 - RNA, 19 nt, Human
ggccgcgagccgagcugcg

SEQ ID NO: 332586 - RNA, 18 nt, Human
aaacacguggcauguucu

SEQ ID NO: 332587 - RNA, 23 nt, Human
aaagucccugaagaggagcgagg

SEQ ID NO: 332588 - RNA, 23 nt, Human
aaagucccugaagaggagcgagg

SEQ ID NO: 332589 - RNA, 18 nt, Human
aaagugcugggauuaaaa

SEQ ID NO: 332590 - RNA, 21 nt, Human
aagccaccacacccggccacc

SEQ ID NO: 332591 - RNA, 24 nt, Human
aaggggcaucguccacugcgcauu

SEQ ID NO: 332592 - RNA, 18 nt, Human
aagugcugggauuaaagc

SEQ ID NO: 332593 - RNA, 25 nt, Human
acaaaacauaguaacuauuagggua

SEQ ID NO: 332594 - RNA, 23 nt, Human
accucggguucccaaagugcugg

SEQ ID NO: 332595 - RNA, 23 nt, Human
accuggaggacgaccgcggagcu

SEQ ID NO: 332596 - RNA, 22 nt, Human
acucccaucuuugagcccagga

SEQ ID NO: 332597 - RNA, 22 nt, Human
agccugggcaacauagggagac

SEQ ID NO: 332598 - RNA, 24 nt, Human
agccugggcaacauagggagacuc

SEQ ID NO: 332599 - RNA, 21 nt, Human
aggcggcacagaccuggagga

SEQ ID NO: 332600 - RNA, 19 nt, Human
agggaggcggcacagaccu

SEQ ID NO: 332601 - RNA, 23 nt, Human
agguguuggagaccagccugggc

SEQ ID NO: 332602 - RNA, 23 nt, Human
aguagcuggcauuacaggcaugu

SEQ ID NO: 332603 - RNA, 22 nt, Human
aucccagcgcuuugggaggcca

SEQ ID NO: 332604 - RNA, 20 nt, Human
augggguuucuccacguugg

SEQ ID NO: 332605 - RNA, 21 nt, Human
augggguuucuccacguuggu

SEQ ID NO: 332606 - RNA, 24 nt, Human
augggguuucuccacguuggucag

SEQ ID NO: 332607 - RNA, 21 nt, Human
auuuuccugccucagccuccc

SEQ ID NO: 332608 - RNA, 23 nt, Human
caaaagacagaacuaaaggacag

SEQ ID NO: 332609 - RNA, 24 nt, Human
caaagucccugaagaggagcgagg

SEQ ID NO: 332610 - RNA, 27 nt, Human
caaagugcugggauuaaagccaccaca

SEQ ID NO: 332611 - RNA, 22 nt, Human
caagcaauuuuccugccucagc

SEQ ID NO: 332612 - RNA, 21 nt, Human
caccacaaccuccgccucccg

SEQ ID NO: 332613 - RNA, 25 nt, Human
caccacguccggcuaauuuuuugua

SEQ ID NO: 332614 - RNA, 23 nt, Human
caccgucaccacagagcugaagg

SEQ ID NO: 332615 - RNA, 23 nt, Human
caccgucaccacagagcugaagg

SEQ ID NO: 332616 - RNA, 23 nt, Human
caccgucaccacagagcugaagg

SEQ ID NO: 332617 - RNA, 18 nt, Human
cacucuucagaccggccc

SEQ ID NO: 332618 - RNA, 18 nt, Human
cacucuucagaccggccc

SEQ ID NO: 332619 - RNA, 18 nt, Human
cacucuucagaccggccc

SEQ ID NO: 332620 - RNA, 19 nt, Human
cagaacuaaaggacagucc

SEQ ID NO: 332621 - RNA, 24 nt, Human
cagaccuauaaucccagcgcuuug

SEQ ID NO: 332622 - RNA, 24 nt, Human
cagaccuggaggacgaccgcggag

SEQ ID NO: 332623 - RNA, 20 nt, Human
cagcgcuuugggaggccaag

SEQ ID NO: 332624 - RNA, 24 nt, Human
cauaaauguacacauaaauaucag

SEQ ID NO: 332625 - RNA, 19 nt, Human
cauuacaggcaugugccac

SEQ ID NO: 332626 - RNA, 18 nt, Human
ccacaaccuccgccuccc

SEQ ID NO: 332627 - RNA, 23 nt, Human
ccacaaccuccgccucccggguu

SEQ ID NO: 332628 - RNA, 24 nt, Human
ccacaaccuccgccucccggguuc

SEQ ID NO: 332629 - RNA, 20 nt, Human
ccaccacguccggcuaauuu

SEQ ID NO: 332630 - RNA, 19 nt, Human
ccacguuggucaggcuggu

SEQ ID NO: 332631 - RNA, 19 nt, Human
ccacguuggucaggcuggu

SEQ ID NO: 332632 - RNA, 23 nt, Human
ccacguuggucaggcugguuucg

SEQ ID NO: 332633 - RNA, 19 nt, Human
ccacuguuacuuugauacc

SEQ ID NO: 332634 - RNA, 22 nt, Human
cccaggaacuugaaacugcagu

SEQ ID NO: 332635 - RNA, 21 nt, Human
cccaugaguucaaaagacaga

SEQ ID NO: 332636 - RNA, 21 nt, Human
ccccgagggaugcuccugggg

SEQ ID NO: 332637 - RNA, 21 nt, Human
ccccgagggaugcuccugggg

SEQ ID NO: 332638 - RNA, 21 nt, Human
ccccgagggaugcuccugggg

SEQ ID NO: 332639 - RNA, 23 nt, Human
cccgaguagcuggcauuacaggc

SEQ ID NO: 332640 - RNA, 23 nt, Human
cccggguucaagcaauuuuccug

SEQ ID NO: 332641 - RNA, 27 nt, Human
ccgccucccggguucaagcaauuuuuu

SEQ ID NO: 332642 - RNA, 19 nt, Human
ccggcccuccaccucggcc

SEQ ID NO: 332643 - RNA, 19 nt, Human
ccggcccuccaccucggcc

SEQ ID NO: 332644 - RNA, 19 nt, Human
ccggcccuccaccucggcc

SEQ ID NO: 332645 - RNA, 22 nt, Human
ccuaggcuggagugcaauggcg

SEQ ID NO: 332646 - RNA, 24 nt, Human
ccugaccucaggugauccgcccac

SEQ ID NO: 332647 - RNA, 23 nt, Human
ccugccucagccucccgaguagc

SEQ ID NO: 332648 - RNA, 24 nt, Human
ccugccucagccucccgaguagcu

SEQ ID NO: 332649 - RNA, 25 nt, Human
cgagagcccuucucagcaaaguccc

SEQ ID NO: 332650 - RNA, 25 nt, Human
cgagagcccuucucagcaaaguccc

SEQ ID NO: 332651 - RNA, 25 nt, Human
cgagagcccuucucagcaaaguccc

SEQ ID NO: 332652 - RNA, 24 nt, Human
cgcauucggccccgagggaugcuc

SEQ ID NO: 332653 - RNA, 24 nt, Human
cgcauucggccccgagggaugcuc

SEQ ID NO: 332654 - RNA, 24 nt, Human
cgcauucggccccgagggaugcuc

SEQ ID NO: 332655 - RNA, 26 nt, Human
cgccaaacaccuuugcgguggggucu

SEQ ID NO: 332656 - RNA, 18 nt, Human
cggaaaugaauagcuuuc

SEQ ID NO: 332657 - RNA, 24 nt, Human
cucaccacaaccuccgccucccgg

SEQ ID NO: 332658 - RNA, 24 nt, Human
cuccacguuggucaggcugguuuc

SEQ ID NO: 332659 - RNA, 21 nt, Human
cuccgaggaaccgcggaggaa

SEQ ID NO: 332660 - RNA, 21 nt, Human
cuccgaggaaccgcggaggaa

SEQ ID NO: 332661 - RNA, 21 nt, Human
cuccgaggaaccgcggaggaa

SEQ ID NO: 332662 - RNA, 19 nt, Human
cuccuaucuuccccauugu

SEQ ID NO: 332663 - RNA, 21 nt, Human
cucggcggaucgccaaacacc

SEQ ID NO: 332664 - RNA, 21 nt, Human
cucggcggaucgccaaacacc

SEQ ID NO: 332665 - RNA, 21 nt, Human
cucggcggaucgccaaacacc

SEQ ID NO: 332666 - RNA, 20 nt, Human
cucuuauugccuaggcugga

SEQ ID NO: 332667 - RNA, 22 nt, Human
cucuuauugccuaggcuggagu

SEQ ID NO: 332668 - RNA, 23 nt, Human
cugccucagccucccgaguagcu

SEQ ID NO: 332669 - RNA, 24 nt, Human
cuguacucagaauaagaacuucau

SEQ ID NO: 332670 - RNA, 22 nt, Human
cuuauugccuaggcuggagugc

SEQ ID NO: 332671 - RNA, 24 nt, Human
cuuauugccuaggcuggagugcaa

SEQ ID NO: 332672 - RNA, 20 nt, Human
cuucucagcaaagucccuga

SEQ ID NO: 332673 - RNA, 20 nt, Human
cuucucagcaaagucccuga

SEQ ID NO: 332674 - RNA, 20 nt, Human
cuucucagcaaagucccuga

SEQ ID NO: 332675 - RNA, 26 nt, Human
cuucucggcggaucgccaaacaccuu

SEQ ID NO: 332676 - RNA, 26 nt, Human
cuucucggcggaucgccaaacaccuu

SEQ ID NO: 332677 - RNA, 26 nt, Human
cuucucggcggaucgccaaacaccuu

SEQ ID NO: 332678 - RNA, 24 nt, Human
gaaaacauuuauuuacaugcccuc

SEQ ID NO: 332679 - RNA, 18 nt, Human
gaacuugaaacugcagug

SEQ ID NO: 332680 - RNA, 24 nt, Human
gaccucaggugauccgcccaccuc

SEQ ID NO: 332681 - RNA, 20 nt, Human
gagaugggguuucuccacgu

SEQ ID NO: 332682 - RNA, 24 nt, Human
gagaugggguuucuccacguuggu

SEQ ID NO: 332683 - RNA, 18 nt, Human
gagcccaggaacuugaaa

SEQ ID NO: 332684 - RNA, 25 nt, Human
gccaaacaccuuugcgguggggucu

SEQ ID NO: 332685 - RNA, 25 nt, Human
gccaaacaccuuugcgguggggucu

SEQ ID NO: 332686 - RNA, 28 nt, Human
gcccgagagcccuucucagcaaaguccc

SEQ ID NO: 332687 - RNA, 28 nt, Human
gcccgagagcccuucucagcaaaguccc

SEQ ID NO: 332688 - RNA, 28 nt, Human
gcccgagagcccuucucagcaaaguccc

SEQ ID NO: 332689 - RNA, 24 nt, Human
gccuaggcuggagugcaauggcgu

SEQ ID NO: 332690 - RNA, 23 nt, Human
gcggcacagaccuauaaucccag

SEQ ID NO: 332691 - RNA, 21 nt, Human
gcucuuauugccuaggcugga

SEQ ID NO: 332692 - RNA, 20 nt, Human
gcuggagugcaauggcguca

SEQ ID NO: 332693 - RNA, 23 nt, Human
gcugguuucgaacuccugaccuc

SEQ ID NO: 332694 - RNA, 21 nt, Human
ggaagugaagccagucccgcc

SEQ ID NO: 332695 - RNA, 21 nt, Human
ggaagugaagccagucccgcc

SEQ ID NO: 332696 - RNA, 21 nt, Human
ggaagugaagccagucccgcc

SEQ ID NO: 332697 - RNA, 24 nt, Human
ggaggccaagccacuugagcccag

SEQ ID NO: 332698 - RNA, 20 nt, Human
ggauuaaagccaccacaccc

SEQ ID NO: 332699 - RNA, 24 nt, Human
ggcugguuucgaacuccugaccuc

SEQ ID NO: 332700 - RNA, 18 nt, Human
gggguuucuccacguugg

SEQ ID NO: 332701 - RNA, 22 nt, Human
gggguuucuccacguuggucag

SEQ ID NO: 332702 - RNA, 22 nt, Human
ggguuucuccacguuggucagg

SEQ ID NO: 332703 - RNA, 19 nt, Human
gguuucgaacuccugaccu

SEQ ID NO: 332704 - RNA, 24 nt, Human
gugauccgcccaccucggguuccc

SEQ ID NO: 332705 - RNA, 24 nt, Human
uaauuuuuuguauuuuuaguagag

SEQ ID NO: 332706 - RNA, 25 nt, Human
uaauuuuuuguauuuuuaguagaga

SEQ ID NO: 332707 - RNA, 23 nt, Human
uacaggcaugugccaccacgucc

SEQ ID NO: 332708 - RNA, 21 nt, Human
uagaaaauccaauaugaaaug

SEQ ID NO: 332709 - RNA, 22 nt, Human
uagacucuugaaauguuacgcu

SEQ ID NO: 332710 - RNA, 18 nt, Human
uagcuggcauuacaggca

SEQ ID NO: 332711 - RNA, 18 nt, Human
uaguagagaugggguuuc

SEQ ID NO: 332712 - RNA, 19 nt, Human
uaguagagaugggguuucu

SEQ ID NO: 332713 - RNA, 24 nt, Human
uaguagagaugggguuucuccacg

SEQ ID NO: 332714 - RNA, 19 nt, Human
uauugccuaggcuggagug

SEQ ID NO: 332715 - RNA, 20 nt, Human
uauugccuaggcuggagugc

SEQ ID NO: 332716 - RNA, 23 nt, Human
ucaccacaaccuccgccucccgg

SEQ ID NO: 332717 - RNA, 24 nt, Human
ucaccacaaccuccgccucccggg

SEQ ID NO: 332718 - RNA, 25 nt, Human
ucaccacaaccuccgccucccgggu

SEQ ID NO: 332719 - RNA, 27 nt, Human
ucaccacaaccuccgccucccggguuc

SEQ ID NO: 332720 - RNA, 20 nt, Human
ucagccucccgaguagcugg

SEQ ID NO: 332721 - RNA, 18 nt, Human
ucccaaagugcugggauu

SEQ ID NO: 332722 - RNA, 23 nt, Human
ucccaaagugcugggauuaaagc

SEQ ID NO: 332723 - RNA, 24 nt, Human
ucccgaguagcuggcauuacaggc

SEQ ID NO: 332724 - RNA, 18 nt, Human
ucccggguucaagcaauu

SEQ ID NO: 332725 - RNA, 24 nt, Human
ucccggguucaagcaauuuuccug

SEQ ID NO: 332726 - RNA, 20 nt, Human
ucccugaagaggagcgaggc

SEQ ID NO: 332727 - RNA, 20 nt, Human
ucccugaagaggagcgaggc

SEQ ID NO: 332728 - RNA, 20 nt, Human
ucccugaagaggagcgaggc

SEQ ID NO: 332729 - RNA, 24 nt, Human
uccgccucccggguucaagcaauu

SEQ ID NO: 332730 - RNA, 19 nt, Human
ucuggacgcccgagagccc

SEQ ID NO: 332731 - RNA, 19 nt, Human
ucuggacgcccgagagccc

SEQ ID NO: 332732 - RNA, 19 nt, Human
ucuggacgcccgagagccc

SEQ ID NO: 332733 - RNA, 21 nt, Human
ugaaacugcagugagccguga

SEQ ID NO: 332734 - RNA, 23 nt, Human
ugaaaugacaaagaguacuguac

SEQ ID NO: 332735 - RNA, 21 nt, Human
ugaagaggagcgaggcggcuc

SEQ ID NO: 332736 - RNA, 21 nt, Human
ugaagaggagcgaggcggcuc

SEQ ID NO: 332737 - RNA, 21 nt, Human
ugaagaggagcgaggcggcuc

SEQ ID NO: 332738 - RNA, 23 nt, Human
ugaagccagucccgccacucuuc

SEQ ID NO: 332739 - RNA, 23 nt, Human
ugaagccagucccgccacucuuc

SEQ ID NO: 332740 - RNA, 23 nt, Human
ugaagccagucccgccacucuuc

SEQ ID NO: 332741 - RNA, 18 nt, Human
ugaccucaggugauccgc

SEQ ID NO: 332742 - RNA, 21 nt, Human
ugaccucaggugauccgccca

SEQ ID NO: 332743 - RNA, 24 nt, Human
ugaccucaggugauccgcccaccu

SEQ ID NO: 332744 - RNA, 24 nt, Human
ugacuacaggaaaacauuuauuua

SEQ ID NO: 332745 - RNA, 25 nt, Human
ugagcccaggaacuugaaacugcag

SEQ ID NO: 332746 - RNA, 19 nt, Human
ugagcccagguguuggaga

SEQ ID NO: 332747 - RNA, 23 nt, Human
ugagcccagguguuggagaccag

SEQ ID NO: 332748 - RNA, 25 nt, Human
ugauccgcccaccucggguucccaa

SEQ ID NO: 332749 - RNA, 20 nt, Human
ugccuaggcuggagugcaau

SEQ ID NO: 332750 - RNA, 21 nt, Human
ugccuaggcuggagugcaaug

SEQ ID NO: 332751 - RNA, 24 nt, Human
ugccuaggcuggagugcaauggcg

SEQ ID NO: 332752 - RNA, 24 nt, Human
ugccucagccucccgaguagcugg

SEQ ID NO: 332753 - RNA, 24 nt, Human
ugcucuuauugccuaggcuggagu

SEQ ID NO: 332754 - RNA, 22 nt, Human
ugcugggauuaaagccaccaca

SEQ ID NO: 332755 - RNA, 23 nt, Human
uggacgcccgagagcccuucuca

SEQ ID NO: 332756 - RNA, 23 nt, Human
uggacgcccgagagcccuucuca

SEQ ID NO: 332757 - RNA, 23 nt, Human
uggacgcccgagagcccuucuca

SEQ ID NO: 332758 - RNA, 24 nt, Human
uggauuuacaaaacauaguaacua

SEQ ID NO: 332759 - RNA, 18 nt, Human
uggcauuacaggcaugug

SEQ ID NO: 332760 - RNA, 22 nt, Human
uggcauuacaggcaugugccac

SEQ ID NO: 332761 - RNA, 24 nt, Human
uggcauuacaggcaugugccacca

SEQ ID NO: 332762 - RNA, 24 nt, Human
uggcgucauuucagcucaccacaa

SEQ ID NO: 332763 - RNA, 20 nt, Human
uggggccaacaacuucucgg

SEQ ID NO: 332764 - RNA, 20 nt, Human
uggggccaacaacuucucgg

SEQ ID NO: 332765 - RNA, 20 nt, Human
uggggccaacaacuucucgg

SEQ ID NO: 332766 - RNA, 24 nt, Human
ugggguuucuccacguuggucagg

SEQ ID NO: 332767 - RNA, 24 nt, Human
uggucaggcugguuucgaacuccu

SEQ ID NO: 332768 - RNA, 21 nt, Human
uguauuuuuaguagagauggg

SEQ ID NO: 332769 - RNA, 18 nt, Human
uuagacucuugaaauguu

SEQ ID NO: 332770 - RNA, 18 nt, Human
uuaguagagaugggguuu

SEQ ID NO: 332771 - RNA, 22 nt, Human
uuaguagagaugggguuucucc

SEQ ID NO: 332772 - RNA, 21 nt, Human
uucaagcaauuuuccugccuc

SEQ ID NO: 332773 - RNA, 24 nt, Human
uucaagcaauuuuccugccucagc

SEQ ID NO: 332774 - RNA, 21 nt, Human
uucagaccggcccuccaccuc

SEQ ID NO: 332775 - RNA, 23 nt, Human
uucagaccggcccuccaccuccu

SEQ ID NO: 332776 - RNA, 23 nt, Human
uucagaccggcccuccaccuccu

SEQ ID NO: 332777 - RNA, 18 nt, Human
uucccaugaguucaaaaa

SEQ ID NO: 332778 - RNA, 20 nt, Human
uugaggcagaguuuugcucu

SEQ ID NO: 332779 - RNA, 18 nt, Human
uugccuaggcuggagugc

SEQ ID NO: 332780 - RNA, 22 nt, Human
uugcucuuauugccuaggcugg

SEQ ID NO: 332781 - RNA, 23 nt, Human
uugcucuuauugccuaggcugga

SEQ ID NO: 332782 - RNA, 23 nt, Human
uuguauuuuuaguagagaugggg

SEQ ID NO: 332783 - RNA, 23 nt, Human
uuucgaacuccugaccucaggug

SEQ ID NO: 332784 - RNA, 24 nt, Human
uuugcucuuauugccuaggcugga

SEQ ID NO: 332785 - RNA, 24 nt, Human
uuuugcucuuauugccuaggcugg

SEQ ID NO: 332786 - RNA, 20 nt, Human
uuuuguauuuuuaguagaga

SEQ ID NO: 332787 - RNA, 22 nt, Human
uuuuuaguagagaugggguuuc

SEQ ID NO: 332788 - RNA, 21 nt, Human
uuuuuguauuuuuaguagaga

SEQ ID NO: 332789 - RNA, 24 nt, Human
uuuuuuguauuuuuaguagagaug

SEQ ID NO: 332790 - RNA, 20 nt, Human
uuuuuuuuuuugaggcagag

SEQ ID NO: 332791 - RNA, 18 nt, Human
uuuuuuuuuuuuuuuuug

SEQ ID NO: 332792 - RNA, 21 nt, Human
uuuuuuuuuuuuuuuuugagg

SEQ ID NO: 332793 - RNA, 27 nt, Human
uuuuuuuuuuuuuuuuuuuuuuugggg

SEQ ID NO: 332794 - RNA, 25 nt, Human
aaaauaucuuucauuauaguaaaac

SEQ ID NO: 332795 - RNA, 25 nt, Human
aaaauaucuuucauuauaguaaaac

SEQ ID NO: 332796 - RNA, 25 nt, Human
aaaauaucuuucauuauaguaaaac

SEQ ID NO: 332797 - RNA, 25 nt, Human
aaaauaucuuucauuauaguaaaac

SEQ ID NO: 332798 - RNA, 25 nt, Human
aaaauaucuuucauuauaguaaaac

SEQ ID NO: 332799 - RNA, 18 nt, Human
aaacaaaaaugaagcugu

SEQ ID NO: 332800 - RNA, 24 nt, Human
aaacaccucgacacacuagaaaac

SEQ ID NO: 332801 - RNA, 24 nt, Human
aaacaccucgacacacuagaaaac

SEQ ID NO: 332802 - RNA, 23 nt, Human
aaauaucuuucauuauaguaaaa

SEQ ID NO: 332803 - RNA, 19 nt, Human
aacacauuguucagcccuc

SEQ ID NO: 332804 - RNA, 19 nt, Human
aacacuguuuuucaaccgu

SEQ ID NO: 332805 - RNA, 19 nt, Human
aaguaccacugaaugaaac

SEQ ID NO: 332806 - RNA, 21 nt, Human
acacauagccuauaaacaccu

SEQ ID NO: 332807 - RNA, 20 nt, Human
acagauuuaauaaauaccga

SEQ ID NO: 332808 - RNA, 23 nt, Human
acagauuuaauaaauaccgaaaa

SEQ ID NO: 332809 - RNA, 28 nt, Human
acauagccuauaaacaccucgacacacu

SEQ ID NO: 332810 - RNA, 26 nt, Human
accucgacacacuagaaaacacauug

SEQ ID NO: 332811 - RNA, 24 nt, Human
accuuuggucuaagaaaaguuuuu

SEQ ID NO: 332812 - RNA, 24 nt, Human
acucuagaaaaucaucaaaugaug

SEQ ID NO: 332813 - RNA, 20 nt, Human
acuuucgacagcaauucuga

SEQ ID NO: 332814 - RNA, 20 nt, Human
acuuucgacagcaauucuga

SEQ ID NO: 332815 - RNA, 23 nt, Human
agaaaacacauuguucagcccuc

SEQ ID NO: 332816 - RNA, 21 nt, Human
agcugugaaguagcaaucuga

SEQ ID NO: 332817 - RNA, 27 nt, Human
agggacugggcuggggcaggcuggggg

SEQ ID NO: 332818 - RNA, 23 nt, Human
aguauuuuuaaggucguugucuu

SEQ ID NO: 332819 - RNA, 19 nt, Human
aucaaaugaugggucaacc

SEQ ID NO: 332820 - RNA, 23 nt, Human
aucaaaugaugggucaacccagu

SEQ ID NO: 332821 - RNA, 22 nt, Human
auuaaaguuuuccuuauuucaa

SEQ ID NO: 332822 - RNA, 23 nt, Human
caaccguguuuucaaauucuuaa

SEQ ID NO: 332823 - RNA, 20 nt, Human
cacacauagccuauaaacac

SEQ ID NO: 332824 - RNA, 24 nt, Human
cacagauuuaauaaauaccgaaaa

SEQ ID NO: 332825 - RNA, 19 nt, Human
cacauagccuauaaacacc

SEQ ID NO: 332826 - RNA, 21 nt, Human
cacuguacaacacaucaaaac

SEQ ID NO: 332827 - RNA, 21 nt, Human
caggaggaccuguuauuaaua

SEQ ID NO: 332828 - RNA, 22 nt, Human
cauccccuuuugggcgaagagc

SEQ ID NO: 332829 - RNA, 18 nt, Human
caugaauucacuugcugu

SEQ ID NO: 332830 - RNA, 22 nt, Human
ccaaaaaaguaaaauaccauga

SEQ ID NO: 332831 - RNA, 22 nt, Human
ccaaaaaaguaaaauaccauga

SEQ ID NO: 332832 - RNA, 22 nt, Human
ccaaaaaaguaaaauaccauga

SEQ ID NO: 332833 - RNA, 22 nt, Human
ccaaaaaaguaaaauaccauga

SEQ ID NO: 332834 - RNA, 19 nt, Human
ccaccuggcccuacccggg

SEQ ID NO: 332835 - RNA, 21 nt, Human
cccaaaaaaguaaaauaccau

SEQ ID NO: 332836 - RNA, 21 nt, Human
cccaaaaaaguaaaauaccau

SEQ ID NO: 332837 - RNA, 21 nt, Human
cccaaaaaaguaaaauaccau

SEQ ID NO: 332838 - RNA, 21 nt, Human
cccaaaaaaguaaaauaccau

SEQ ID NO: 332839 - RNA, 25 nt, Human
ccccuuuugggcgaagagcggaggc

SEQ ID NO: 332840 - RNA, 20 nt, Human
cccgggcucaacgccgagcc

SEQ ID NO: 332841 - RNA, 23 nt, Human
cccgggcucaacgccgagccucu

SEQ ID NO: 332842 - RNA, 24 nt, Human
ccuauaaacaccucgacacacuag

SEQ ID NO: 332843 - RNA, 25 nt, Human
ccuauaaacaccucgacacacuaga

SEQ ID NO: 332844 - RNA, 22 nt, Human
ccucgacacacuagaaaacaca

SEQ ID NO: 332845 - RNA, 22 nt, Human
ccuggcccuacccgggcucaac

SEQ ID NO: 332846 - RNA, 23 nt, Human
cgaaaaaauuaagagauuugaag

SEQ ID NO: 332847 - RNA, 22 nt, Human
cgggagggacugggcuggggca

SEQ ID NO: 332848 - RNA, 21 nt, Human
cucaacgccgagccucucgga

SEQ ID NO: 332849 - RNA, 23 nt, Human
cucacagauuuaauaaauaccga

SEQ ID NO: 332850 - RNA, 26 nt, Human
cugguacuauaaucuuggccccuuuc

SEQ ID NO: 332851 - RNA, 26 nt, Human
cugguacuauaaucuuggccccuuuc

SEQ ID NO: 332852 - RNA, 26 nt, Human
cugguacuauaaucuuggccccuuuc

SEQ ID NO: 332853 - RNA, 26 nt, Human
cugguacuauaaucuuggccccuuuc

SEQ ID NO: 332854 - RNA, 26 nt, Human
cugguacuauaaucuuggccccuuuc

SEQ ID NO: 332855 - RNA, 18 nt, Human
cuuaaaccacucacagau

SEQ ID NO: 332856 - RNA, 19 nt, Human
cuuucgacagcaauucuga

SEQ ID NO: 332857 - RNA, 19 nt, Human
cuuucgacagcaauucuga

SEQ ID NO: 332858 - RNA, 19 nt, Human
cuuucgacagcaauucuga

SEQ ID NO: 332859 - RNA, 19 nt, Human
cuuucgacagcaauucuga

SEQ ID NO: 332860 - RNA, 22 nt, Human
gaaaaaauuaagagauuugaag

SEQ ID NO: 332861 - RNA, 20 nt, Human
gacacacuagaaaacacauu

SEQ ID NO: 332862 - RNA, 19 nt, Human
ggacugggcuggggcaggc

SEQ ID NO: 332863 - RNA, 19 nt, Human
ggaggcgaccagggacuac

SEQ ID NO: 332864 - RNA, 20 nt, Human
ggcuggggcaggcugggggc

SEQ ID NO: 332865 - RNA, 19 nt, Human
gggcgcgcggccgggaggg

SEQ ID NO: 332866 - RNA, 18 nt, Human
gguugccuuucuaaaacu

SEQ ID NO: 332867 - RNA, 20 nt, Human
guuuauauuuauccacccau

SEQ ID NO: 332868 - RNA, 26 nt, Human
uaaaauaccaugaauucacuugcggg

SEQ ID NO: 332869 - RNA, 19 nt, Human
uaaaauagauccacccugu

SEQ ID NO: 332870 - RNA, 21 nt, Human
uaaaguuuuccuuauuucaaa

SEQ ID NO: 332871 - RNA, 21 nt, Human
uaaaguuuuccuuauuucaaa

SEQ ID NO: 332872 - RNA, 21 nt, Human
uaaaguuuuccuuauuucaaa

SEQ ID NO: 332873 - RNA, 21 nt, Human
uaaauguggacucccauauac

SEQ ID NO: 332874 - RNA, 21 nt, Human
uaaauguggacucccauauac

SEQ ID NO: 332875 - RNA, 21 nt, Human
uaaauguggacucccauauac

SEQ ID NO: 332876 - RNA, 21 nt, Human
uaaauguggacucccauauac

SEQ ID NO: 332877 - RNA, 21 nt, Human
uaaauguggacucccauauac

SEQ ID NO: 332878 - RNA, 22 nt, Human
uaaauguggacucccauauauu

SEQ ID NO: 332879 - RNA, 19 nt, Human
uaacuuauguaaauacuuu

SEQ ID NO: 332880 - RNA, 22 nt, Human
uaagucuuaaacuguaaaauuu

SEQ ID NO: 332881 - RNA, 20 nt, Human
uaaucuuggccccuuuccuc

SEQ ID NO: 332882 - RNA, 20 nt, Human
uaaucuuggccccuuuccuc

SEQ ID NO: 332883 - RNA, 20 nt, Human
uaaucuuggccccuuuccuc

SEQ ID NO: 332884 - RNA, 20 nt, Human
uaaucuuggccccuuuccuc

SEQ ID NO: 332885 - RNA, 20 nt, Human
uaaucuuggccccuuuccuc

SEQ ID NO: 332886 - RNA, 20 nt, Human
uaaucuuggccccuuuccuc

SEQ ID NO: 332887 - RNA, 26 nt, Human
uaccaugcuccuuugauaguauuuuu

SEQ ID NO: 332888 - RNA, 23 nt, Human
uaccuuuggucuaagaaaaguuu

SEQ ID NO: 332889 - RNA, 21 nt, Human
uacuuuguggaagauaccuuu

SEQ ID NO: 332890 - RNA, 19 nt, Human
uauacuggacuacuuuaca

SEQ ID NO: 332891 - RNA, 20 nt, Human
ucacugcccucuucagaggc

SEQ ID NO: 332892 - RNA, 20 nt, Human
ucaggcaauucuauuugagc

SEQ ID NO: 332893 - RNA, 20 nt, Human
ucaggcaauucuauuugagc

SEQ ID NO: 332894 - RNA, 20 nt, Human
ucaggcaauucuauuugagc

SEQ ID NO: 332895 - RNA, 20 nt, Human
ucaggcaauucuauuugagc

SEQ ID NO: 332896 - RNA, 18 nt, Human
uccacauccaggaggacc

SEQ ID NO: 332897 - RNA, 21 nt, Human
uccaguauuucccaaaaaagu

SEQ ID NO: 332898 - RNA, 21 nt, Human
uccaguauuucccaaaaaagu

SEQ ID NO: 332899 - RNA, 21 nt, Human
uccaguauuucccaaaaaagu

SEQ ID NO: 332900 - RNA, 21 nt, Human
uccaguauuucccaaaaaagu

SEQ ID NO: 332901 - RNA, 23 nt, Human
ucccaaaaaaguaaaauaccaug

SEQ ID NO: 332902 - RNA, 23 nt, Human
ucccaaaaaaguaaaauaccaug

SEQ ID NO: 332903 - RNA, 23 nt, Human
ucccaaaaaaguaaaauaccaug

SEQ ID NO: 332904 - RNA, 23 nt, Human
ucccaaaaaaguaaaauaccaug

SEQ ID NO: 332905 - RNA, 19 nt, Human
ugaaauacuacaagaauga

SEQ ID NO: 332906 - RNA, 21 nt, Human
ugaaguaccacugaaugaaac

SEQ ID NO: 332907 - RNA, 27 nt, Human
ugacauuauaaacuguaauaguuccca

SEQ ID NO: 332908 - RNA, 22 nt, Human
ugacuugaguuauucacaccua

SEQ ID NO: 332909 - RNA, 22 nt, Human
ugcaaacuagugaauucaacga

SEQ ID NO: 332910 - RNA, 24 nt, Human
ugcucugggcaucgggcgcccagg

SEQ ID NO: 332911 - RNA, 20 nt, Human
uggaaaucugcugcuuucua

SEQ ID NO: 332912 - RNA, 19 nt, Human
uggaagucugguaaaacug

SEQ ID NO: 332913 - RNA, 24 nt, Human
uggcauaauguucaaacacacuuu

SEQ ID NO: 332914 - RNA, 22 nt, Human
ugggcuggggcaggcugggggc

SEQ ID NO: 332915 - RNA, 22 nt, Human
uggggcaggcugggggcgcaga

SEQ ID NO: 332916 - RNA, 23 nt, Human
ugugauauaacuuauguaaauac

SEQ ID NO: 332917 - RNA, 21 nt, Human
uguuucccggagcugcauccc

SEQ ID NO: 332918 - RNA, 18 nt, Human
uguuuugguugccuuucu

SEQ ID NO: 332919 - RNA, 22 nt, Human
uuaaaguuuuccuuauuucaaa

SEQ ID NO: 332920 - RNA, 22 nt, Human
uuaaaguuuuccuuauuucaaa

SEQ ID NO: 332921 - RNA, 24 nt, Human
uucaacauuuuaauugugauauaa

SEQ ID NO: 332922 - RNA, 21 nt, Human
uucagcccuccgccccaaauc

SEQ ID NO: 332923 - RNA, 23 nt, Human
uuccacuguacaacacaucaaaa

SEQ ID NO: 332924 - RNA, 19 nt, Human
uucccaaaaaaguaaaaua

SEQ ID NO: 332925 - RNA, 19 nt, Human
uucccaaaaaaguaaaaua

SEQ ID NO: 332926 - RNA, 19 nt, Human
uucccaaaaaaguaaaaua

SEQ ID NO: 332927 - RNA, 19 nt, Human
uucccaaaaaaguaaaaua

SEQ ID NO: 332928 - RNA, 18 nt, Human
uucccggagcugcauccc

SEQ ID NO: 332929 - RNA, 19 nt, Human
uugcauccugaauuagucc

SEQ ID NO: 332930 - RNA, 20 nt, Human
uuucuugguaacacuguuuu

SEQ ID NO: 332931 - RNA, 24 nt, Human
aaaaagacaaggucaacggagaca

SEQ ID NO: 332932 - RNA, 23 nt, Human
aaaccaaaccaaaccaaaccaaa

SEQ ID NO: 332933 - RNA, 24 nt, Human
aaacugauacucucuauucauuua

SEQ ID NO: 332934 - RNA, 21 nt, Human
aagacacaggucuaacaaaca

SEQ ID NO: 332935 - RNA, 18 nt, Human
aagugcuauuucagaaga

SEQ ID NO: 332936 - RNA, 23 nt, Human
acacauuaucagaaaccccaagg

SEQ ID NO: 332937 - RNA, 18 nt, Human
agaggcaggaggcaacug

SEQ ID NO: 332938 - RNA, 23 nt, Human
augauuucuaacccauacucaac

SEQ ID NO: 332939 - RNA, 23 nt, Human
caaaaacaaacauuuaacucaac

SEQ ID NO: 332940 - RNA, 22 nt, Human
caaaccaaaccaaaccaaaucc

SEQ ID NO: 332941 - RNA, 26 nt, Human
caaagagucuaccuccucugcaaagc

SEQ ID NO: 332942 - RNA, 19 nt, Human
cacacauuaucagaaaccc

SEQ ID NO: 332943 - RNA, 23 nt, Human
caccaaggaugugaacugacauc

SEQ ID NO: 332944 - RNA, 22 nt, Human
caccccucaggauuucaugcaa

SEQ ID NO: 332945 - RNA, 18 nt, Human
cacuucacugugaaaaca

SEQ ID NO: 332946 - RNA, 21 nt, Human
cacuucacugugaaaacacua

SEQ ID NO: 332947 - RNA, 26 nt, Human
cagccacccacuagccuccggcgcuc

SEQ ID NO: 332948 - RNA, 23 nt, Human
caucccgccuuuccaaaaacaaa

SEQ ID NO: 332949 - RNA, 20 nt, Human
caugcucacuuaccucacaa

SEQ ID NO: 332950 - RNA, 21 nt, Human
cauugccgcauuuacuaucau

SEQ ID NO: 332951 - RNA, 26 nt, Human
ccaaaaagacaaggucaacggagaca

SEQ ID NO: 332952 - RNA, 19 nt, Human
ccauaaugagacuccacac

SEQ ID NO: 332953 - RNA, 22 nt, Human
cccauacucaacuauccagagg

SEQ ID NO: 332954 - RNA, 21 nt, Human
ccccaaggcauaccaaaaaga

SEQ ID NO: 332955 - RNA, 21 nt, Human
ccuccggcgcuccaacaccac

SEQ ID NO: 332956 - RNA, 20 nt, Human
ccucugcaaagcugguaccu

SEQ ID NO: 332957 - RNA, 21 nt, Human
ccugugccaaagugccaaaga

SEQ ID NO: 332958 - RNA, 22 nt, Human
cuacugguagacauuuuacaca

SEQ ID NO: 332959 - RNA, 24 nt, Human
cucaacuauccagaggauacuguu

SEQ ID NO: 332960 - RNA, 18 nt, Human
cuccggcgcuccaacacc

SEQ ID NO: 332961 - RNA, 18 nt, Human
cucgggcaacaaccauca

SEQ ID NO: 332962 - RNA, 21 nt, Human
cucugagaaauguguaagaca

SEQ ID NO: 332963 - RNA, 24 nt, Human
cuuuuaguuuccuuaaugcacccc

SEQ ID NO: 332964 - RNA, 23 nt, Human
gaaaccccaaggcauaccaaaaa

SEQ ID NO: 332965 - RNA, 25 nt, Human
gaacucauaaagaaaucaaaugucu

SEQ ID NO: 332966 - RNA, 21 nt, Human
gcaauaaagaaguugaaagaa

SEQ ID NO: 332967 - RNA, 24 nt, Human
gcugggugauggcagagggguggg

SEQ ID NO: 332968 - RNA, 24 nt, Human
ggagcugcuguaacacaggcaugg

SEQ ID NO: 332969 - RNA, 21 nt, Human
ggcucugaaaugccagagagg

SEQ ID NO: 332970 - RNA, 19 nt, Human
ggggucagccacccacuag

SEQ ID NO: 332971 - RNA, 18 nt, Human
ggggugggaguuggggga

SEQ ID NO: 332972 - RNA, 24 nt, Human
ggucaacggagacagucuuuggaa

SEQ ID NO: 332973 - RNA, 18 nt, Human
guaacauuuuuccccucu

SEQ ID NO: 332974 - RNA, 23 nt, Human
uaacaaacaacuacauuaaccuc

SEQ ID NO: 332975 - RNA, 22 nt, Human
uaagacacaggucuaacaaaca

SEQ ID NO: 332976 - RNA, 23 nt, Human
uaauuucugacaacucagugaca

SEQ ID NO: 332977 - RNA, 22 nt, Human
uagccuccggcgcuccaacacc

SEQ ID NO: 332978 - RNA, 25 nt, Human
uaucagaaaccccaaggcauaccaa

SEQ ID NO: 332979 - RNA, 22 nt, Human
uauucauuuacaaaauucauuc

SEQ ID NO: 332980 - RNA, 19 nt, Human
ucauucauugcauacuuuu

SEQ ID NO: 332981 - RNA, 21 nt, Human
uccaacaccacucgaaauucc

SEQ ID NO: 332982 - RNA, 23 nt, Human
ugaaaacacuaaacucucagcca

SEQ ID NO: 332983 - RNA, 25 nt, Human
ugaaaacacuaaacucucagccaua

SEQ ID NO: 332984 - RNA, 21 nt, Human
ugaaaagucagcaaaagccca

SEQ ID NO: 332985 - RNA, 21 nt, Human
ugagaaauguguaagacacag

SEQ ID NO: 332986 - RNA, 20 nt, Human
ugaggcuggauucuccaugg

SEQ ID NO: 332987 - RNA, 21 nt, Human
ugauggcagaggggugggagu

SEQ ID NO: 332988 - RNA, 19 nt, Human
ugauuucuaacccauacuc

SEQ ID NO: 332989 - RNA, 18 nt, Human
uggaaaagcagaaaagaa

SEQ ID NO: 332990 - RNA, 18 nt, Human
uggcagaggggugggagu

SEQ ID NO: 332991 - RNA, 22 nt, Human
uggcagaggggugggaguuggg

SEQ ID NO: 332992 - RNA, 20 nt, Human
uguuugggcugggugauggc

SEQ ID NO: 332993 - RNA, 18 nt, Human
uucaugcaaaugaaauua

SEQ ID NO: 332994 - RNA, 20 nt, Human
uuccuuaaugcaccccucag

SEQ ID NO: 332995 - RNA, 21 nt, Human
uuccuugggcauuuauaaaua

SEQ ID NO: 332996 - RNA, 19 nt, Human
uuuagaggcaggaggcaac

SEQ ID NO: 332997 - RNA, 21 nt, Human
uuuccuuaaugcaccccucag

SEQ ID NO: 332998 - RNA, 18 nt, Human
uuuguaacauuuuucccc

SEQ ID NO: 332999 - RNA, 21 nt, Human
uuugugaggcuggauucucca

SEQ ID NO: 333000 - RNA, 21 nt, Human
uuugugaggcuggauucucca

SEQ ID NO: 333001 - RNA, 18 nt, Human
uuuugacauaauuucuga

SEQ ID NO: 333002 - RNA, 24 nt, Human
uuuuguaacauuuuuccccucugg

SEQ ID NO: 333003 - RNA, 21 nt, Human
uuuuuagagagagauguuuua

SEQ ID NO: 333004 - RNA, 23 nt, Human
aaacugaaucauuaaaacaguaa

SEQ ID NO: 333005 - RNA, 20 nt, Human
aacccgauaagcaacaaaaa

SEQ ID NO: 333006 - RNA, 28 nt, Human
aacccgauaagcaacaaaaaccagacua

SEQ ID NO: 333007 - RNA, 21 nt, Human
aacgaaucucaagagggugac

SEQ ID NO: 333008 - RNA, 18 nt, Human
aagaaggaaaaaggcaaa

SEQ ID NO: 333009 - RNA, 24 nt, Human
aagcaacaaaaaccagacuaacaa

SEQ ID NO: 333010 - RNA, 26 nt, Human
aagcaacaaaaaccagacuaacaaaa

SEQ ID NO: 333011 - RNA, 23 nt, Human
aaggagagugguuaacaggaaga

SEQ ID NO: 333012 - RNA, 19 nt, Human
aauaauaaagucuuuauuu

SEQ ID NO: 333013 - RNA, 23 nt, Human
acaaaaaccagacuaacaaaaug

SEQ ID NO: 333014 - RNA, 18 nt, Human
acaagaaacuaaugaccu

SEQ ID NO: 333015 - RNA, 19 nt, Human
agaacacaaacacaaccca

SEQ ID NO: 333016 - RNA, 23 nt, Human
agacaaaaaucuaaguuuucuca

SEQ ID NO: 333017 - RNA, 19 nt, Human
agcccuugcgagguguagc

SEQ ID NO: 333018 - RNA, 25 nt, Human
aggcaaagacuuuguacagacaaaa

SEQ ID NO: 333019 - RNA, 26 nt, Human
aggggguggggaaaggggggagcccu

SEQ ID NO: 333020 - RNA, 19 nt, Human
auagcuccuagaaaguuau

SEQ ID NO: 333021 - RNA, 22 nt, Human
aucagaacacaaacacaaccca

SEQ ID NO: 333022 - RNA, 24 nt, Human
auuuauagcuccuagaaaguuaug

SEQ ID NO: 333023 - RNA, 18 nt, Human
caaagacuuacaccauag

SEQ ID NO: 333024 - RNA, 22 nt, Human
caacaaaaaccagacuaacaaa

SEQ ID NO: 333025 - RNA, 28 nt, Human
caagaaacuaaugaccuuucuaaaauca

SEQ ID NO: 333026 - RNA, 18 nt, Human
caagaacaauauuaaacc

SEQ ID NO: 333027 - RNA, 20 nt, Human
cagcacuggaaaaggagauc

SEQ ID NO: 333028 - RNA, 23 nt, Human
caguaaugaagaacuaagauaaa

SEQ ID NO: 333029 - RNA, 26 nt, Human
caguccuaucuuuuuguagcugaagg

SEQ ID NO: 333030 - RNA, 18 nt, Human
cauaacacaauuucgcgu

SEQ ID NO: 333031 - RNA, 19 nt, Human
cauaacacaauuucgcgua

SEQ ID NO: 333032 - RNA, 20 nt, Human
caucagaacacaaacacaac

SEQ ID NO: 333033 - RNA, 19 nt, Human
cauuauggaauuacacuua

SEQ ID NO: 333034 - RNA, 19 nt, Human
ccacucugaagaaacugaa

SEQ ID NO: 333035 - RNA, 22 nt, Human
cccgauaagcaacaaaaaccaa

SEQ ID NO: 333036 - RNA, 19 nt, Human
cccgccgccgccacagccg

SEQ ID NO: 333037 - RNA, 22 nt, Human
cgagcagcucccgccgccgcca

SEQ ID NO: 333038 - RNA, 19 nt, Human
cggaauacucaaauauauc

SEQ ID NO: 333039 - RNA, 22 nt, Human
cggggaggggaaaagggucggg

SEQ ID NO: 333040 - RNA, 24 nt, Human
cuaaugaccuuucuaaaaucaaac

SEQ ID NO: 333041 - RNA, 20 nt, Human
cuaugaaaacagaagaaaac

SEQ ID NO: 333042 - RNA, 20 nt, Human
cucccgccgccgccacagcc

SEQ ID NO: 333043 - RNA, 22 nt, Human
cugaagaaacugaauccugugg

SEQ ID NO: 333044 - RNA, 23 nt, Human
cuggcuaugaaaacagaagaaaa

SEQ ID NO: 333045 - RNA, 20 nt, Human
cuguuuucuccaucagaaca

SEQ ID NO: 333046 - RNA, 21 nt, Human
gaaaacagaagaaaaccuugc

SEQ ID NO: 333047 - RNA, 22 nt, Human
ggcccggggaggggaaaagggu

SEQ ID NO: 333048 - RNA, 23 nt, Human
ggcccggggaggggaaaaggguc

SEQ ID NO: 333049 - RNA, 20 nt, Human
ggcuaugaaaacagaagaaa

SEQ ID NO: 333050 - RNA, 18 nt, Human
gggaggggguggggaaag

SEQ ID NO: 333051 - RNA, 23 nt, Human
ggggaaaggggggagcccuugcg

SEQ ID NO: 333052 - RNA, 21 nt, Human
ggggaggggguggggaaaggg

SEQ ID NO: 333053 - RNA, 23 nt, Human
gggggaggggguggggaaagggg

SEQ ID NO: 333054 - RNA, 18 nt, Human
ggguggcccggggagggg

SEQ ID NO: 333055 - RNA, 22 nt, Human
guccuuggggugcuguuuucuc

SEQ ID NO: 333056 - RNA, 24 nt, Human
guguaacaagaaacuaaugaccuu

SEQ ID NO: 333057 - RNA, 20 nt, Human
guguuuguuuguuuuuuuuu

SEQ ID NO: 333058 - RNA, 23 nt, Human
guguuuguuuguuuuuuuuucuu

SEQ ID NO: 333059 - RNA, 19 nt, Human
uaaacccgauaagcaacaa

SEQ ID NO: 333060 - RNA, 22 nt, Human
uaaacccgauaagcaacaaaaa

SEQ ID NO: 333061 - RNA, 26 nt, Human
uaaacccgauaagcaacaaaaaccag

SEQ ID NO: 333062 - RNA, 23 nt, Human
uaacacaauuucgcguacaccuc

SEQ ID NO: 333063 - RNA, 23 nt, Human
uaagauaaaaaucaugacuuuug

SEQ ID NO: 333064 - RNA, 22 nt, Human
uaagcaacaaaaaccagacuaa

SEQ ID NO: 333065 - RNA, 22 nt, Human
uaaguugaccaggugcauaauu

SEQ ID NO: 333066 - RNA, 23 nt, Human
uaauaauaaagucuuuauuugga

SEQ ID NO: 333067 - RNA, 18 nt, Human
uacaaaauagaacacuuu

SEQ ID NO: 333068 - RNA, 21 nt, Human
uacagcaucgucugcuuaaaa

SEQ ID NO: 333069 - RNA, 21 nt, Human
uaccacucugaagaaacugaa

SEQ ID NO: 333070 - RNA, 19 nt, Human
uagcuuccgagcagcuccc

SEQ ID NO: 333071 - RNA, 22 nt, Human
uaugaaaacagaagaaaaccuu

SEQ ID NO: 333072 - RNA, 25 nt, Human
uauuacaugcaccaauauugcacac

SEQ ID NO: 333073 - RNA, 21 nt, Human
ucaaacacuagcuauaaugcu

SEQ ID NO: 333074 - RNA, 20 nt, Human
ucagaacacaaacacaaccc

SEQ ID NO: 333075 - RNA, 23 nt, Human
ucagauaccaucccuaaggagag

SEQ ID NO: 333076 - RNA, 23 nt, Human
ucaguacuaaaacuuacaauaaa

SEQ ID NO: 333077 - RNA, 22 nt, Human
uccaaaccaggagugugcagca

SEQ ID NO: 333078 - RNA, 20 nt, Human
ucccgccgccgccacagccg

SEQ ID NO: 333079 - RNA, 19 nt, Human
ucuaaaaucaaacauucaa

SEQ ID NO: 333080 - RNA, 19 nt, Human
ucuacaaugucuuuuuaca

SEQ ID NO: 333081 - RNA, 22 nt, Human
ugaagaacuaagauaaaaauca

SEQ ID NO: 333082 - RNA, 18 nt, Human
ugaagaaggaaaaaggca

SEQ ID NO: 333083 - RNA, 22 nt, Human
ugcagcacuggaaaaggagauc

SEQ ID NO: 333084 - RNA, 22 nt, Human
ugcaguaaugaagaacuaagau

SEQ ID NO: 333085 - RNA, 22 nt, Human
uggaaaaaaaugaagaaggaaa

SEQ ID NO: 333086 - RNA, 25 nt, Human
uggaaagaaguguuuguuuguuuuu

SEQ ID NO: 333087 - RNA, 20 nt, Human
ugggaguugggcgggcuggg

SEQ ID NO: 333088 - RNA, 22 nt, Human
ugguuaacaggaagauugccag

SEQ ID NO: 333089 - RNA, 19 nt, Human
uuauuggguauacacugaa

SEQ ID NO: 333090 - RNA, 19 nt, Human
uucaguguuaacuuugccc

SEQ ID NO: 333091 - RNA, 23 nt, Human
uugcccuaaaaaguuaagacaua

SEQ ID NO: 333092 - RNA, 20 nt, Human
uugcucauuuuggagccuca

SEQ ID NO: 333093 - RNA, 19 nt, Human
uuuuccuuuucaaugcagu

SEQ ID NO: 333094 - RNA, 23 nt, Human
aacuuuauucacuucaaaaccuu

SEQ ID NO: 333095 - RNA, 21 nt, Human
aagcagccgccuuuccgucug

SEQ ID NO: 333096 - RNA, 19 nt, Human
agacuggggagggggccuu

SEQ ID NO: 333097 - RNA, 23 nt, Human
agacuggggagggggccuugggc

SEQ ID NO: 333098 - RNA, 18 nt, Human
agagcugggacagaggcc

SEQ ID NO: 333099 - RNA, 27 nt, Human
agaggauggggggggguccucaggggu

SEQ ID NO: 333100 - RNA, 18 nt, Human
aggaggacggggggacag

SEQ ID NO: 333101 - RNA, 20 nt, Human
aggcaagcagccgccuuucc

SEQ ID NO: 333102 - RNA, 21 nt, Human
aggccaaggccagacugggga

SEQ ID NO: 333103 - RNA, 30 nt, Human
cacgguucuguucugggguggggguggccc

SEQ ID NO: 333104 - RNA, 19 nt, Human
cagccgccuuuccgucugg

SEQ ID NO: 333105 - RNA, 18 nt, Human
cagcuuccccucauccua

SEQ ID NO: 333106 - RNA, 18 nt, Human
ccaguccugccagcuucu

SEQ ID NO: 333107 - RNA, 18 nt, Human
ccgcgcgccgaccacuuc

SEQ ID NO: 333108 - RNA, 19 nt, Human
ccucccaguccugccagcu

SEQ ID NO: 333109 - RNA, 21 nt, Human
cgccgcgccgcgcgccgacca

SEQ ID NO: 333110 - RNA, 21 nt, Human
cgguucuguucuggggugggg

SEQ ID NO: 333111 - RNA, 27 nt, Human
cugggacagaggccaagaggggcccau

SEQ ID NO: 333112 - RNA, 21 nt, Human
cuggggagggggccuugggcc

SEQ ID NO: 333113 - RNA, 25 nt, Human
cuucucugagcaggcugggcugggg

SEQ ID NO: 333114 - RNA, 18 nt, Human
cuuucaggacuugcccua

SEQ ID NO: 333115 - RNA, 23 nt, Human
gaacaggggccacuuuaggagga

SEQ ID NO: 333116 - RNA, 23 nt, Human
gagcugggacagaggccaagagg

SEQ ID NO: 333117 - RNA, 21 nt, Human
gaggauggggggggguccuca

SEQ ID NO: 333118 - RNA, 20 nt, Human
gauggggggggguccucaac

SEQ ID NO: 333119 - RNA, 22 nt, Human
gauggggggggguccucagggg

SEQ ID NO: 333120 - RNA, 22 nt, Human
ggauggggggggguccucaggg

SEQ ID NO: 333121 - RNA, 23 nt, Human
ggcuggggaggaggacgggggga

SEQ ID NO: 333122 - RNA, 25 nt, Human
gggauccucacacaacaugcaacuc

SEQ ID NO: 333123 - RNA, 20 nt, Human
gggcccgagcgacgcggcgg

SEQ ID NO: 333124 - RNA, 18 nt, Human
gggcuggggaggaggacg

SEQ ID NO: 333125 - RNA, 25 nt, Human
ggggguccucagggguuuuucggag

SEQ ID NO: 333126 - RNA, 22 nt, Human
ggggguggccuugacaaugagc

SEQ ID NO: 333127 - RNA, 21 nt, Human
guucuguucuggggugggggu

SEQ ID NO: 333128 - RNA, 20 nt, Human
uagggugggggcuucggugg

SEQ ID NO: 333129 - RNA, 19 nt, Human
ucugagcaggcugggcugg

SEQ ID NO: 333130 - RNA, 22 nt, Human
uggcccgggagaugggaacagg

SEQ ID NO: 333131 - RNA, 18 nt, Human
uggcugcagagagcuggg

SEQ ID NO: 333132 - RNA, 27 nt, Human
ugggacagaggccaagaggggcccauc

SEQ ID NO: 333133 - RNA, 24 nt, Human
ugggcuggggaggaggacgggggg

SEQ ID NO: 333134 - RNA, 20 nt, Human
uggggagggggccuugggcc

SEQ ID NO: 333135 - RNA, 20 nt, Human
uggggggggguccucagggg

SEQ ID NO: 333136 - RNA, 18 nt, Human
uucgguggccuggcuucc

SEQ ID NO: 333137 - RNA, 30 nt, Human
uugacaaugagcugauguuagcccuucucu

SEQ ID NO: 333138 - RNA, 19 nt, Human
uuggggcuccagcuucccc

SEQ ID NO: 333139 - RNA, 21 nt, Human
aaaaaaaaaauguaaacagga

SEQ ID NO: 333140 - RNA, 19 nt, Human
aaaaauccaaauaaaagcc

SEQ ID NO: 333141 - RNA, 20 nt, Human
aaaguacuuuccagccacau

SEQ ID NO: 333142 - RNA, 21 nt, Human
aaggcggugggggugggggcc

SEQ ID NO: 333143 - RNA, 20 nt, Human
aagucaucccagacaauccg

SEQ ID NO: 333144 - RNA, 21 nt, Human
aauaucagaaacccaguuuug

SEQ ID NO: 333145 - RNA, 25 nt, Human
aaugaaggagauuccacagaaaaaa

SEQ ID NO: 333146 - RNA, 23 nt, Human
aauuuuaaaauagcaguaauuau

SEQ ID NO: 333147 - RNA, 28 nt, Human
acagaaaaaacugagaugaaaaaauccc

SEQ ID NO: 333148 - RNA, 21 nt, Human
accaucaauuuggcauuucug

SEQ ID NO: 333149 - RNA, 20 nt, Human
acuugcugauaaacacguuu

SEQ ID NO: 333150 - RNA, 24 nt, Human
agaaaagguucccuuucuccccuc

SEQ ID NO: 333151 - RNA, 22 nt, Human
agaagaaauaaagaccugcaaa

SEQ ID NO: 333152 - RNA, 19 nt, Human
agauuugaaaaacugaaca

SEQ ID NO: 333153 - RNA, 18 nt, Human
aggcagcaguuugacuca

SEQ ID NO: 333154 - RNA, 18 nt, Human
aggcgguggggguggggg

SEQ ID NO: 333155 - RNA, 19 nt, Human
aggcggugggggugggggc

SEQ ID NO: 333156 - RNA, 19 nt, Human
agggggucggcgagacaag

SEQ ID NO: 333157 - RNA, 24 nt, Human
agguucccuuucuccccucccacc

SEQ ID NO: 333158 - RNA, 22 nt, Human
auaaacacguuucugcugaggg

SEQ ID NO: 333159 - RNA, 22 nt, Human
aucccucccuccccacccccaa

SEQ ID NO: 333160 - RNA, 20 nt, Human
auuuucauuuuaagaaaagg

SEQ ID NO: 333161 - RNA, 24 nt, Human
caaaacaaaaaaaaaauguaaaca

SEQ ID NO: 333162 - RNA, 19 nt, Human
caaugaucaagaaauuuua

SEQ ID NO: 333163 - RNA, 25 nt, Human
cacagaaaaaacugagaugaaaaaa

SEQ ID NO: 333164 - RNA, 19 nt, Human
caccccaaguauuuaacau

SEQ ID NO: 333165 - RNA, 22 nt, Human
cagaaaaaacugagaugaaaaa

SEQ ID NO: 333166 - RNA, 21 nt, Human
cagcggagcggccucuccccc

SEQ ID NO: 333167 - RNA, 20 nt, Human
caucaaaagcaaacaugcaa

SEQ ID NO: 333168 - RNA, 24 nt, Human
cauguuagaagggucucacauuca

SEQ ID NO: 333169 - RNA, 23 nt, Human
ccaaaacaaaaaaaaaauguaaa

SEQ ID NO: 333170 - RNA, 22 nt, Human
ccacagaaaaaacugagaugaa

SEQ ID NO: 333171 - RNA, 21 nt, Human
ccacaggaugguggccgccau

SEQ ID NO: 333172 - RNA, 18 nt, Human
ccacccccaacaaucuac

SEQ ID NO: 333173 - RNA, 24 nt, Human
ccagccacaucucccaacccaucc

SEQ ID NO: 333174 - RNA, 27 nt, Human
cccaaaacaaaaaaaaaauguaaacag

SEQ ID NO: 333175 - RNA, 23 nt, Human
cccaaaagugcuaauuucacaaa

SEQ ID NO: 333176 - RNA, 21 nt, Human
cccagcggagcggccucuccc

SEQ ID NO: 333177 - RNA, 25 nt, Human
ccccaacaaucuacuaccuuauacc

SEQ ID NO: 333178 - RNA, 19 nt, Human
ccccacccccaacaaucua

SEQ ID NO: 333179 - RNA, 25 nt, Human
ccccagcccgugccccggaccgcgc

SEQ ID NO: 333180 - RNA, 18 nt, Human
cccccagcccgugccccg

SEQ ID NO: 333181 - RNA, 22 nt, Human
cccccagcccgugccccggacc

SEQ ID NO: 333182 - RNA, 23 nt, Human
ccccggggucgcccgcgcuccuc

SEQ ID NO: 333183 - RNA, 22 nt, Human
ccccucccaccccaaguauuua

SEQ ID NO: 333184 - RNA, 21 nt, Human
cccggaccgcgccgcugccuc

SEQ ID NO: 333185 - RNA, 19 nt, Human
cccucccuccccaccccca

SEQ ID NO: 333186 - RNA, 19 nt, Human
ccgcugccuccgcgacugc

SEQ ID NO: 333187 - RNA, 24 nt, Human
ccuagaucccucccuccccacccc

SEQ ID NO: 333188 - RNA, 21 nt, Human
ccuccccacccccaacaaucu

SEQ ID NO: 333189 - RNA, 18 nt, Human
ccuccgcgacugcggccu

SEQ ID NO: 333190 - RNA, 20 nt, Human
cgccgcugccuccgcgacug

SEQ ID NO: 333191 - RNA, 20 nt, Human
cggggucuguggccuggcgg

SEQ ID NO: 333192 - RNA, 21 nt, Human
cuacuaccuuauaccaaguau

SEQ ID NO: 333193 - RNA, 19 nt, Human
cucccccagcccgugcccc

SEQ ID NO: 333194 - RNA, 24 nt, Human
cuuuccagccacaucucccaaccc

SEQ ID NO: 333195 - RNA, 25 nt, Human
gaaaaaauccaaauaaaagccaaca

SEQ ID NO: 333196 - RNA, 21 nt, Human
gagaugaaaaaauccaaauaa

SEQ ID NO: 333197 - RNA, 23 nt, Human
gaucccucccuccccacccccaa

SEQ ID NO: 333198 - RNA, 21 nt, Human
gccauuauccaguguugccau

SEQ ID NO: 333199 - RNA, 18 nt, Human
gccccggaccgcgccgcu

SEQ ID NO: 333200 - RNA, 23 nt, Human
gcgagacaagcagggaauccgcu

SEQ ID NO: 333201 - RNA, 24 nt, Human
gcggccucucccccagcccgugcc

SEQ ID NO: 333202 - RNA, 21 nt, Human
gcuugucacauucgcccagcg

SEQ ID NO: 333203 - RNA, 20 nt, Human
ggcggggucuguggccuggc

SEQ ID NO: 333204 - RNA, 22 nt, Human
ggcggugggggugggggcuugu

SEQ ID NO: 333205 - RNA, 18 nt, Human
ggucgcccgcgcuccucg

SEQ ID NO: 333206 - RNA, 18 nt, Human
ggucggcgagacaagcag

SEQ ID NO: 333207 - RNA, 21 nt, Human
ggucuguggccuggcggggcc

SEQ ID NO: 333208 - RNA, 19 nt, Human
gucugcagaaggcgcgagg

SEQ ID NO: 333209 - RNA, 22 nt, Human
gugcuggccgcugggcgggguc

SEQ ID NO: 333210 - RNA, 19 nt, Human
uaaaaagagugaaaccuag

SEQ ID NO: 333211 - RNA, 20 nt, Human
uaaacaguaauuagacaccu

SEQ ID NO: 333212 - RNA, 18 nt, Human
uaaagaaacacauuuaca

SEQ ID NO: 333213 - RNA, 21 nt, Human
uaaguuucuggaucuaguaca

SEQ ID NO: 333214 - RNA, 21 nt, Human
uacacacuguguggaguugcg

SEQ ID NO: 333215 - RNA, 19 nt, Human
uacacuaaaaagagugaaa

SEQ ID NO: 333216 - RNA, 22 nt, Human
uacugcaauauaacaaugaagu

SEQ ID NO: 333217 - RNA, 23 nt, Human
uagaucccucccuccccaccccc

SEQ ID NO: 333218 - RNA, 21 nt, Human
uaucagaaacccaguuuugaa

SEQ ID NO: 333219 - RNA, 20 nt, Human
uaucccugcccuguauccua

SEQ ID NO: 333220 - RNA, 21 nt, Human
uauuuuacacacuguguggag

SEQ ID NO: 333221 - RNA, 22 nt, Human
uauuuuacacacuguguggagu

SEQ ID NO: 333222 - RNA, 20 nt, Human
ucacauucgcccagcggagc

SEQ ID NO: 333223 - RNA, 19 nt, Human
ucaucccagacaauccagu

SEQ ID NO: 333224 - RNA, 20 nt, Human
uccccaaaacaaaaaaaaaa

SEQ ID NO: 333225 - RNA, 18 nt, Human
ucccccagcccgugcccc

SEQ ID NO: 333226 - RNA, 18 nt, Human
ucccucccuccccacccc

SEQ ID NO: 333227 - RNA, 21 nt, Human
ucccucccuccccacccccaa

SEQ ID NO: 333228 - RNA, 22 nt, Human
ucccugcccuguauccuagauc

SEQ ID NO: 333229 - RNA, 21 nt, Human
uccgcgacugcggccuucccc

SEQ ID NO: 333230 - RNA, 24 nt, Human
uccucacgcgccgagcgccagcca

SEQ ID NO: 333231 - RNA, 26 nt, Human
uccucacgcgccgagcgccagccacg

SEQ ID NO: 333232 - RNA, 28 nt, Human
ucuggggaggaaggcggugggggugggg

SEQ ID NO: 333233 - RNA, 24 nt, Human
ugaaaaaauccaaauaaaagccaa

SEQ ID NO: 333234 - RNA, 19 nt, Human
ugaacaaguagacaucugc

SEQ ID NO: 333235 - RNA, 28 nt, Human
ugagaugaaaaaauccaaauaaaagcca

SEQ ID NO: 333236 - RNA, 22 nt, Human
ugcacuggugugaagugugaga

SEQ ID NO: 333237 - RNA, 20 nt, Human
ugcggccuuccccgcgaacu

SEQ ID NO: 333238 - RNA, 19 nt, Human
uggggaggaaggcgguggg

SEQ ID NO: 333239 - RNA, 21 nt, Human
ugggggugggggcuugucaca

SEQ ID NO: 333240 - RNA, 25 nt, Human
uggguuuuuuaaaaggcagcaguuu

SEQ ID NO: 333241 - RNA, 19 nt, Human
uguaaacaggaaaauaacu

SEQ ID NO: 333242 - RNA, 18 nt, Human
uguauauauuuuacacac

SEQ ID NO: 333243 - RNA, 19 nt, Human
uguauauauuuuacacacu

SEQ ID NO: 333244 - RNA, 26 nt, Human
uguugccaugaaacagagacuguaaa

SEQ ID NO: 333245 - RNA, 23 nt, Human
uuacugcaauauaacaaugaagu

SEQ ID NO: 333246 - RNA, 23 nt, Human
uucacaaagggauacaucaaaag

SEQ ID NO: 333247 - RNA, 24 nt, Human
uuggccccaaaagugcuaauuuca

SEQ ID NO: 333248 - RNA, 23 nt, Human
uuguggguuuuuuaaaaggcagc

SEQ ID NO: 333249 - RNA, 21 nt, Human
uuuacagaagaaauaaagacc

SEQ ID NO: 333250 - RNA, 25 nt, Human
uuuuugguuguauauauuuuacaca

SEQ ID NO: 333251 - RNA, 21 nt, Human
aaacauacaucucaccauuuc

SEQ ID NO: 333252 - RNA, 18 nt, Human
aacaugcucauuauagcu

SEQ ID NO: 333253 - RNA, 23 nt, Human
aacaugcucauuauagcuacaga

SEQ ID NO: 333254 - RNA, 20 nt, Human
aagggggcugaagaaaguga

SEQ ID NO: 333255 - RNA, 21 nt, Human
aaguggcaucugaagagcaaa

SEQ ID NO: 333256 - RNA, 19 nt, Human
aaguuaaaagcagagccaa

SEQ ID NO: 333257 - RNA, 21 nt, Human
acacuuucugaggaccuacau

SEQ ID NO: 333258 - RNA, 23 nt, Human
acacuuucugaggaccuacauuu

SEQ ID NO: 333259 - RNA, 19 nt, Human
acagauggcacaaaaccau

SEQ ID NO: 333260 - RNA, 21 nt, Human
accaugccauagaucuuugca

SEQ ID NO: 333261 - RNA, 18 nt, Human
accccaccaccaccccca

SEQ ID NO: 333262 - RNA, 21 nt, Human
acccccccccaccccaccacc

SEQ ID NO: 333263 - RNA, 20 nt, Human
acccugaaggccugacagag

SEQ ID NO: 333264 - RNA, 20 nt, Human
accuggaguccacaaaggcu

SEQ ID NO: 333265 - RNA, 18 nt, Human
acgaugggcagaucaggc

SEQ ID NO: 333266 - RNA, 24 nt, Human
acuagaauugauuugcucuuaauc

SEQ ID NO: 333267 - RNA, 21 nt, Human
agaaggugguggguacugacu

SEQ ID NO: 333268 - RNA, 21 nt, Human
agagggggcgggggauggagc

SEQ ID NO: 333269 - RNA, 23 nt, Human
agccacaaugcgaccccgcaacc

SEQ ID NO: 333270 - RNA, 20 nt, Human
aggcccgcacgcguccacgc

SEQ ID NO: 333271 - RNA, 25 nt, Human
aggccgaagcaaggcgugcacggga

SEQ ID NO: 333272 - RNA, 25 nt, Human
aggccucaaguggucaggacccguc

SEQ ID NO: 333273 - RNA, 21 nt, Human
aucuggaagggauauguagga

SEQ ID NO: 333274 - RNA, 21 nt, Human
aucuguuucuugagcaaccuu

SEQ ID NO: 333275 - RNA, 18 nt, Human
augcuacacaggauagac

SEQ ID NO: 333276 - RNA, 20 nt, Human
auugauuugcucuuaaucuu

SEQ ID NO: 333277 - RNA, 22 nt, Human
caaaucagaaacaggcaaucug

SEQ ID NO: 333278 - RNA, 19 nt, Human
caaauggagaggccuguuc

SEQ ID NO: 333279 - RNA, 20 nt, Human
caacagugcuuugagaagaa

SEQ ID NO: 333280 - RNA, 25 nt, Human
caaccaaaauuguaagggggcugaa

SEQ ID NO: 333281 - RNA, 19 nt, Human
caaugcgaccccgcaaccg

SEQ ID NO: 333282 - RNA, 19 nt, Human
cacaaugcgaccccgcaac

SEQ ID NO: 333283 - RNA, 21 nt, Human
cacgaugggcagaucaggccu

SEQ ID NO: 333284 - RNA, 24 nt, Human
cagccuggggcugcccgccgggga

SEQ ID NO: 333285 - RNA, 18 nt, Human
cagcuuccugccucggcc

SEQ ID NO: 333286 - RNA, 18 nt, Human
cauccaaaauccuagaca

SEQ ID NO: 333287 - RNA, 22 nt, Human
cauuuaggacccccccccaccc

SEQ ID NO: 333288 - RNA, 18 nt, Human
ccacauggcaaugcccac

SEQ ID NO: 333289 - RNA, 22 nt, Human
cccacaccagcugcuuuccccg

SEQ ID NO: 333290 - RNA, 21 nt, Human
cccaccccaccaccaccccca

SEQ ID NO: 333291 - RNA, 26 nt, Human
ccccaccccaccaccacccccaggaa

SEQ ID NO: 333292 - RNA, 27 nt, Human
ccccaccccaccaccacccccaggaag

SEQ ID NO: 333293 - RNA, 20 nt, Human
cccccaccccaccaccaccc

SEQ ID NO: 333294 - RNA, 22 nt, Human
ccccccaccccaccaccacccc

SEQ ID NO: 333295 - RNA, 22 nt, Human
cccccccaccccaccaccaccc

SEQ ID NO: 333296 - RNA, 18 nt, Human
ccccccccaccccaccac

SEQ ID NO: 333297 - RNA, 20 nt, Human
ccccccccaccccaccacca

SEQ ID NO: 333298 - RNA, 22 nt, Human
ccccccccaccccaccaccacc

SEQ ID NO: 333299 - RNA, 18 nt, Human
cccccccccaccccacca

SEQ ID NO: 333300 - RNA, 19 nt, Human
cccgcacgcguccacgccg

SEQ ID NO: 333301 - RNA, 23 nt, Human
cccugcggaucacgugggccucu

SEQ ID NO: 333302 - RNA, 22 nt, Human
ccgcgcacucacagcuuccugc

SEQ ID NO: 333303 - RNA, 23 nt, Human
ccucagauauuaauacucaguuu

SEQ ID NO: 333304 - RNA, 19 nt, Human
ccucuaggcccgcacgcgu

SEQ ID NO: 333305 - RNA, 22 nt, Human
ccucuaggcccgcacgcgucca

SEQ ID NO: 333306 - RNA, 23 nt, Human
ccucucaacauccaaaauccuag

SEQ ID NO: 333307 - RNA, 26 nt, Human
cgugagacccgcgaaucucagggucu

SEQ ID NO: 333308 - RNA, 27 nt, Human
cgugagacccgcgaaucucagggucuu

SEQ ID NO: 333309 - RNA, 23 nt, Human
cuagaauugauuugcucuuaauc

SEQ ID NO: 333310 - RNA, 18 nt, Human
cucaacauccaaaauccu

SEQ ID NO: 333311 - RNA, 22 nt, Human
cucaccagggaccuggagucca

SEQ ID NO: 333312 - RNA, 22 nt, Human
cucuaggcccgcacgcguccac

SEQ ID NO: 333313 - RNA, 21 nt, Human
cucuaggcccgcacgcguccc

SEQ ID NO: 333314 - RNA, 22 nt, Human
cucucaacauccaaaauccuag

SEQ ID NO: 333315 - RNA, 20 nt, Human
cugccuggaaugggaugaag

SEQ ID NO: 333316 - RNA, 21 nt, Human
cuugacucugugagugagccu

SEQ ID NO: 333317 - RNA, 24 nt, Human
cuuugcacagcuauaaguucucca

SEQ ID NO: 333318 - RNA, 18 nt, Human
gaagagcagcaaaucaga

SEQ ID NO: 333319 - RNA, 20 nt, Human
gaccccgcaaccgcgcacuc

SEQ ID NO: 333320 - RNA, 20 nt, Human
gaccuggaguccacaaaggc

SEQ ID NO: 333321 - RNA, 23 nt, Human
gauuuaucaacagauuuuucauu

SEQ ID NO: 333322 - RNA, 25 nt, Human
gcaaaguuuccuuugcuguauaaag

SEQ ID NO: 333323 - RNA, 22 nt, Human
gcacacuuagagcucagacuga

SEQ ID NO: 333324 - RNA, 25 nt, Human
gccccauuggguccaaccaaaauug

SEQ ID NO: 333325 - RNA, 18 nt, Human
gccucaaguggucagagc

SEQ ID NO: 333326 - RNA, 20 nt, Human
gggagagagggggcggggga

SEQ ID NO: 333327 - RNA, 21 nt, Human
ggggagagcggaggcggggac

SEQ ID NO: 333328 - RNA, 19 nt, Human
ggggagcgaggccacagga

SEQ ID NO: 333329 - RNA, 20 nt, Human
uaaaaaaauaccaaaaccau

SEQ ID NO: 333330 - RNA, 22 nt, Human
uaaaagcagagccaaacauaca

SEQ ID NO: 333331 - RNA, 23 nt, Human
uaaaagcagagccaaacauacau

SEQ ID NO: 333332 - RNA, 22 nt, Human
uaaaguuaaaagcagagccaaa

SEQ ID NO: 333333 - RNA, 23 nt, Human
uaagggggcugaagaaagugaua

SEQ ID NO: 333334 - RNA, 23 nt, Human
uacaucucaccauuucuggucau

SEQ ID NO: 333335 - RNA, 26 nt, Human
uagaaccucucaacauccaaaauccu

SEQ ID NO: 333336 - RNA, 22 nt, Human
uagacacaauguuccuuugaaa

SEQ ID NO: 333337 - RNA, 22 nt, Human
uagacgcagaggaguguuacag

SEQ ID NO: 333338 - RNA, 25 nt, Human
uagaucuuugcacagcuauaaguuc

SEQ ID NO: 333339 - RNA, 21 nt, Human
uagaugauuacuuaagguucc

SEQ ID NO: 333340 - RNA, 19 nt, Human
uagcacagauagaugccuu

SEQ ID NO: 333341 - RNA, 18 nt, Human
uagccacaaugcgacccc

SEQ ID NO: 333342 - RNA, 20 nt, Human
uaggagaagaaggugguggg

SEQ ID NO: 333343 - RNA, 21 nt, Human
uaggagaagaagguggugggu

SEQ ID NO: 333344 - RNA, 21 nt, Human
uaucaacagauuuuucauuuu

SEQ ID NO: 333345 - RNA, 23 nt, Human
uaucuuuguccucuauuccaaaa

SEQ ID NO: 333346 - RNA, 22 nt, Human
ucaacauccaaaauccuagaca

SEQ ID NO: 333347 - RNA, 19 nt, Human
ucagcuggcaauuccagga

SEQ ID NO: 333348 - RNA, 22 nt, Human
uccaaccaaaauuguaaggggg

SEQ ID NO: 333349 - RNA, 23 nt, Human
uccacaaaggcuuaacugaggcc

SEQ ID NO: 333350 - RNA, 21 nt, Human
uccacauggcaaugcccacuu

SEQ ID NO: 333351 - RNA, 23 nt, Human
uccaggaaaaacugugauuaggc

SEQ ID NO: 333352 - RNA, 25 nt, Human
ucccgccccauuggguccaaccaaa

SEQ ID NO: 333353 - RNA, 22 nt, Human
uccuuagcuuuaaucacaucuu

SEQ ID NO: 333354 - RNA, 21 nt, Human
ucggucaauuucugcacacuu

SEQ ID NO: 333355 - RNA, 22 nt, Human
ucgucuuucccgccccauuggg

SEQ ID NO: 333356 - RNA, 18 nt, Human
ucgugauuacauuuagga

SEQ ID NO: 333357 - RNA, 20 nt, Human
ucucagggucaggaggaucc

SEQ ID NO: 333358 - RNA, 21 nt, Human
ucuguccaauuuucagugaaa

SEQ ID NO: 333359 - RNA, 21 nt, Human
ucuguguggaauggaaggauu

SEQ ID NO: 333360 - RNA, 22 nt, Human
ucuguguggaauggaaggauuc

SEQ ID NO: 333361 - RNA, 21 nt, Human
ugaagagcagcaaaucagaaa

SEQ ID NO: 333362 - RNA, 23 nt, Human
ugaagagcagcaaaucagaaaca

SEQ ID NO: 333363 - RNA, 19 nt, Human
ugacaaaacucuacaaagc

SEQ ID NO: 333364 - RNA, 21 nt, Human
ugacagaggcugccuggaaug

SEQ ID NO: 333365 - RNA, 19 nt, Human
ugacuaaguugauaugaga

SEQ ID NO: 333366 - RNA, 20 nt, Human
ugacucugugagugagccug

SEQ ID NO: 333367 - RNA, 23 nt, Human
ugacuugguugcauucugugugg

SEQ ID NO: 333368 - RNA, 20 nt, Human
ugagaaaagcugucuaggca

SEQ ID NO: 333369 - RNA, 25 nt, Human
ugagaaaagcugucuaggcaaacau

SEQ ID NO: 333370 - RNA, 25 nt, Human
ugauuaggcuuuucuuagaaguggc

SEQ ID NO: 333371 - RNA, 21 nt, Human
ugcaaacguuucuaaucucac

SEQ ID NO: 333372 - RNA, 20 nt, Human
ugccuggaaugggaugaaga

SEQ ID NO: 333373 - RNA, 23 nt, Human
uggcugacucugaaugacaaaac

SEQ ID NO: 333374 - RNA, 21 nt, Human
uggggaaaccaagucccagag

SEQ ID NO: 333375 - RNA, 19 nt, Human
uggggagggaggcacagag

SEQ ID NO: 333376 - RNA, 20 nt, Human
ugguugcauucuguguggaa

SEQ ID NO: 333377 - RNA, 23 nt, Human
ugucuuaagguccuuagcuuuaa

SEQ ID NO: 333378 - RNA, 21 nt, Human
ugugagugagccuggcuugcc

SEQ ID NO: 333379 - RNA, 23 nt, Human
ugugcacaguggagaauuuccuc

SEQ ID NO: 333380 - RNA, 18 nt, Human
uguguggaauggaaggau

SEQ ID NO: 333381 - RNA, 18 nt, Human
uguguggaauggaaggau

SEQ ID NO: 333382 - RNA, 19 nt, Human
uguguggaauggaaggauu

SEQ ID NO: 333383 - RNA, 20 nt, Human
uguguggaauggaaggauuc

SEQ ID NO: 333384 - RNA, 24 nt, Human
uuaauacucaguuuuucaaaccac

SEQ ID NO: 333385 - RNA, 23 nt, Human
uucaugauuuuagaaccucucaa

SEQ ID NO: 333386 - RNA, 19 nt, Human
uucuguguggaauggaagg

SEQ ID NO: 333387 - RNA, 21 nt, Human
uuuaggacccccccccacccc

SEQ ID NO: 333388 - RNA, 26 nt, Human
uuucaccaugccauagaucuuugcac

SEQ ID NO: 333389 - RNA, 18 nt, Human
uuucagugaaacaaguuu

SEQ ID NO: 333390 - RNA, 21 nt, Human
uuugcacuggggagggaggca

SEQ ID NO: 333391 - RNA, 25 nt, Human
uuuuagaaccucucaacauccaaaa

SEQ ID NO: 333392 - RNA, 22 nt, Human
uuuuuuuuuuuuuuuuuuucag

SEQ ID NO: 333393 - RNA, 21 nt, Human
aagcaauaccauccacuauca

SEQ ID NO: 333394 - RNA, 21 nt, Human
aaucccugagguuugauuuga

SEQ ID NO: 333395 - RNA, 24 nt, Human
aaucugugauuauuugcaaggcug

SEQ ID NO: 333396 - RNA, 24 nt, Human
auacacacuuaaaauuaagagcac

SEQ ID NO: 333397 - RNA, 18 nt, Human
aucuuuguugucaucuga

SEQ ID NO: 333398 - RNA, 23 nt, Human
caacaguaucucuaaaucccuga

SEQ ID NO: 333399 - RNA, 28 nt, Human
caacaguaucucuaaaucccugagguuu

SEQ ID NO: 333400 - RNA, 24 nt, Human
caagagugaaauccuccaaagcuu

SEQ ID NO: 333401 - RNA, 21 nt, Human
cacacuuaaaauuaagagcac

SEQ ID NO: 333402 - RNA, 22 nt, Human
ccaaccuuugcuuucgguccca

SEQ ID NO: 333403 - RNA, 26 nt, Human
ccaacuuuccccuaaugcaggaacaa

SEQ ID NO: 333404 - RNA, 19 nt, Human
ccacuuguacacauugauu

SEQ ID NO: 333405 - RNA, 21 nt, Human
ccacuuguacacauugauuuc

SEQ ID NO: 333406 - RNA, 19 nt, Human
ccccggagcagccaaacuc

SEQ ID NO: 333407 - RNA, 21 nt, Human
cgacagcgaaaauaauaaaua

SEQ ID NO: 333408 - RNA, 18 nt, Human
cucuaaaucccugagguu

SEQ ID NO: 333409 - RNA, 21 nt, Human
gaaaggaaaucuggaagaaga

SEQ ID NO: 333410 - RNA, 20 nt, Human
gacagcgaaaauaauaaaua

SEQ ID NO: 333411 - RNA, 20 nt, Human
gcaggaacaagcaaggccug

SEQ ID NO: 333412 - RNA, 21 nt, Human
uaaaucccugagguuugauuu

SEQ ID NO: 333413 - RNA, 18 nt, Human
uccccaacuuuccccuaa

SEQ ID NO: 333414 - RNA, 19 nt, Human
uccgggugcucaaggaacc

SEQ ID NO: 333415 - RNA, 22 nt, Human
uccgggugcucaaggaaccuuc

SEQ ID NO: 333416 - RNA, 21 nt, Human
uccuucuggcugggugacuug

SEQ ID NO: 333417 - RNA, 22 nt, Human
ugaaaggaaaucuggaagaaga

SEQ ID NO: 333418 - RNA, 18 nt, Human
ugacgaaauggaaaagca

SEQ ID NO: 333419 - RNA, 22 nt, Human
uggaagaagauaaacuugugcc

SEQ ID NO: 333420 - RNA, 23 nt, Human
uuccccuaaugcaggaacaagca

SEQ ID NO: 333421 - RNA, 25 nt, Human
aaaaaaccuauguguuccacgaaca

SEQ ID NO: 333422 - RNA, 19 nt, Human
aaagcgcugggauuacagg

SEQ ID NO: 333423 - RNA, 24 nt, Human
aaagcgcugggauuacaggcguga

SEQ ID NO: 333424 - RNA, 20 nt, Human
aaauuucaccuccaucaaaa

SEQ ID NO: 333425 - RNA, 21 nt, Human
aaccaaauguuuuagcagaga

SEQ ID NO: 333426 - RNA, 19 nt, Human
aagcgcugggauuacaggc

SEQ ID NO: 333427 - RNA, 18 nt, Human
accauggaggagacuuga

SEQ ID NO: 333428 - RNA, 24 nt, Human
acccaacccuugcucucauucccc

SEQ ID NO: 333429 - RNA, 22 nt, Human
agaaagagaaaguuaaaaaaaa

SEQ ID NO: 333430 - RNA, 21 nt, Human
agacaucuagagaccugaaca

SEQ ID NO: 333431 - RNA, 22 nt, Human
agacaucuagagaccugaacaa

SEQ ID NO: 333432 - RNA, 21 nt, Human
agacuugaaaacauacuagug

SEQ ID NO: 333433 - RNA, 21 nt, Human
agcccucagcccuagacaucu

SEQ ID NO: 333434 - RNA, 18 nt, Human
agcgcugggauuacaggc

SEQ ID NO: 333435 - RNA, 24 nt, Human
auacuagugaaagaagacagacac

SEQ ID NO: 333436 - RNA, 18 nt, Human
aucuucaccuucccugcu

SEQ ID NO: 333437 - RNA, 24 nt, Human
caaagcgcugggauuacaggcgug

SEQ ID NO: 333438 - RNA, 27 nt, Human
caacagcaaucaacuaauuaaucccca

SEQ ID NO: 333439 - RNA, 22 nt, Human
caaccaaauguuuuagcagaga

SEQ ID NO: 333440 - RNA, 25 nt, Human
caaugcaauauuauucagccauaaa

SEQ ID NO: 333441 - RNA, 20 nt, Human
cacaacccaacccuugcucu

SEQ ID NO: 333442 - RNA, 19 nt, Human
cacgcuacaccauggagga

SEQ ID NO: 333443 - RNA, 26 nt, Human
caucaugauaucuaguugccacggaa

SEQ ID NO: 333444 - RNA, 23 nt, Human
cauuaugucagcuuccguuuccu

SEQ ID NO: 333445 - RNA, 20 nt, Human
ccaaagcgcugggauuacag

SEQ ID NO: 333446 - RNA, 22 nt, Human
ccaaagcgcugggauuacaggc

SEQ ID NO: 333447 - RNA, 23 nt, Human
ccaaagcgcugggauuacaggcg

SEQ ID NO: 333448 - RNA, 24 nt, Human
ccaaagcgcugggauuacaggcgu

SEQ ID NO: 333449 - RNA, 20 nt, Human
cccauggcggcaaagcccuc

SEQ ID NO: 333450 - RNA, 22 nt, Human
ccucuagaauuccaugacuuaa

SEQ ID NO: 333451 - RNA, 23 nt, Human
ccucuagaauuccaugacuuaag

SEQ ID NO: 333452 - RNA, 20 nt, Human
ccugcuaggucugaaaucgc

SEQ ID NO: 333453 - RNA, 21 nt, Human
ccuguaauuacaaaucuuguu

SEQ ID NO: 333454 - RNA, 24 nt, Human
cgcugggauuacaggcgugaucca

SEQ ID NO: 333455 - RNA, 19 nt, Human
cuagacaucuagagaccug

SEQ ID NO: 333456 - RNA, 24 nt, Human
cugaugcacgcuacaccauggagg

SEQ ID NO: 333457 - RNA, 23 nt, Human
cugggaggagggggaaauaggaa

SEQ ID NO: 333458 - RNA, 21 nt, Human
cuucuucaucuucaccuuccc

SEQ ID NO: 333459 - RNA, 30 nt, Human
cuuguuagucauccuccuccucuccccagg

SEQ ID NO: 333460 - RNA, 23 nt, Human
gaacacaacccaacccuugcucu

SEQ ID NO: 333461 - RNA, 22 nt, Human
gaccucgugauccgcccgcuuc

SEQ ID NO: 333462 - RNA, 22 nt, Human
gaccucgugauccgcccgcuuc

SEQ ID NO: 333463 - RNA, 24 nt, Human
gaccucgugauccgcccgcuucgg

SEQ ID NO: 333464 - RNA, 19 nt, Human
gauuacaggcgugauccac

SEQ ID NO: 333465 - RNA, 21 nt, Human
gauuacaggcgugauccaccg

SEQ ID NO: 333466 - RNA, 22 nt, Human
gccguguuagccaggauggucu

SEQ ID NO: 333467 - RNA, 23 nt, Human
gccguguuagccaggauggucuc

SEQ ID NO: 333468 - RNA, 20 nt, Human
ggaaauaggaacacuugcau

SEQ ID NO: 333469 - RNA, 26 nt, Human
ggagcaaaucuguuaccaucucaacc

SEQ ID NO: 333470 - RNA, 24 nt, Human
ggauggucucgauuuccugaccuc

SEQ ID NO: 333471 - RNA, 19 nt, Human
gggaggagggggaaauagg

SEQ ID NO: 333472 - RNA, 21 nt, Human
gggggaaauaggaacacuugc

SEQ ID NO: 333473 - RNA, 23 nt, Human
uagaaagagaaaguuaaaaaaaa

SEQ ID NO: 333474 - RNA, 26 nt, Human
uagacaucuagagaccugaacaaagg

SEQ ID NO: 333475 - RNA, 30 nt, Human
uagcagagaacgauggguguuucaccacag

SEQ ID NO: 333476 - RNA, 18 nt, Human
uagucauccuccuccucu

SEQ ID NO: 333477 - RNA, 19 nt, Human
uauccagaauagguaaagc

SEQ ID NO: 333478 - RNA, 19 nt, Human
uauuauucagccauaaaaa

SEQ ID NO: 333479 - RNA, 21 nt, Human
ucagccauaaaaagaaugaaa

SEQ ID NO: 333480 - RNA, 22 nt, Human
ucagcuuccguuuccuucuucc

SEQ ID NO: 333481 - RNA, 19 nt, Human
ucaucuucaccuucccugc

SEQ ID NO: 333482 - RNA, 21 nt, Human
ucaugauaucuaguugccacg

SEQ ID NO: 333483 - RNA, 23 nt, Human
uccaacuuucaaguuuccccacc

SEQ ID NO: 333484 - RNA, 22 nt, Human
uccacgaacacaacccaacccu

SEQ ID NO: 333485 - RNA, 24 nt, Human
ucccaaagcgcugggauuacaggc

SEQ ID NO: 333486 - RNA, 18 nt, Human
ucccauggcggcaaagcc

SEQ ID NO: 333487 - RNA, 23 nt, Human
uccugaccucgugauccgcccgc

SEQ ID NO: 333488 - RNA, 22 nt, Human
ugauaucuaguugccacggaau

SEQ ID NO: 333489 - RNA, 18 nt, Human
ugggauuacaggcgugau

SEQ ID NO: 333490 - RNA, 21 nt, Human
ugggauuacaggcgugaucca

SEQ ID NO: 333491 - RNA, 22 nt, Human
ugggauuacaggcgugauccac

SEQ ID NO: 333492 - RNA, 23 nt, Human
ugggauuacaggcgugauccacc

SEQ ID NO: 333493 - RNA, 24 nt, Human
ugggauuacaggcgugauccaccg

SEQ ID NO: 333494 - RNA, 21 nt, Human
uuagucauccuccuccucucc

SEQ ID NO: 333495 - RNA, 22 nt, Human
uuagucauccuccuccucuccc

SEQ ID NO: 333496 - RNA, 20 nt, Human
uucacaaaucacacccccau

SEQ ID NO: 333497 - RNA, 28 nt, Human
uucaccuccaucaaaaugaaccccuagg

SEQ ID NO: 333498 - RNA, 20 nt, Human
uugcucucauucccauuucc

SEQ ID NO: 333499 - RNA, 18 nt, Human
uuucuuggcaagaugaac

SEQ ID NO: 333500 - RNA, 18 nt, Human
uuuuuuuuuuuuuuccug

SEQ ID NO: 333501 - RNA, 18 nt, Human
uuuuuuuuuuuuuuucug

SEQ ID NO: 333502 - RNA, 18 nt, Human
uuuuuuuuuuuuuuucug

SEQ ID NO: 333503 - RNA, 20 nt, Human
aaacagagaugaagaagagg

SEQ ID NO: 333504 - RNA, 20 nt, Human
aaacagagaugaagaagagg

SEQ ID NO: 333505 - RNA, 23 nt, Human
aaacagagaugaagaagagggac

SEQ ID NO: 333506 - RNA, 20 nt, Human
aaagaaaaaaaaggcagcag

SEQ ID NO: 333507 - RNA, 20 nt, Human
aaagaaaaaaaaggcagcag

SEQ ID NO: 333508 - RNA, 20 nt, Human
aaagaaaaaaaaggcagcag

SEQ ID NO: 333509 - RNA, 18 nt, Human
aagaaaaaaaaggcagca

SEQ ID NO: 333510 - RNA, 18 nt, Human
aagaaaaaaaaggcagca

SEQ ID NO: 333511 - RNA, 18 nt, Human
aagaaaaaaaaggcagca

SEQ ID NO: 333512 - RNA, 20 nt, Human
aagaaaaaaaaggcagcagc

SEQ ID NO: 333513 - RNA, 20 nt, Human
aagaaaaaaaaggcagcagc

SEQ ID NO: 333514 - RNA, 20 nt, Human
aagaaaaaaaaggcagcagc

SEQ ID NO: 333515 - RNA, 21 nt, Human
aagcagcuggaggaggcggga

SEQ ID NO: 333516 - RNA, 25 nt, Human
acaaagcuccaggagcguccgaggg

SEQ ID NO: 333517 - RNA, 25 nt, Human
acaaagcuccaggagcguccgaggg

SEQ ID NO: 333518 - RNA, 21 nt, Human
acacaauggugaugcacagga

SEQ ID NO: 333519 - RNA, 21 nt, Human
acacaauggugaugcacagga

SEQ ID NO: 333520 - RNA, 21 nt, Human
acacaauggugaugcacagga

SEQ ID NO: 333521 - RNA, 25 nt, Human
acccaguaacucagagacagagcua

SEQ ID NO: 333522 - RNA, 25 nt, Human
acccaguaacucagagacagagcua

SEQ ID NO: 333523 - RNA, 25 nt, Human
acccaguaacucagagacagagcua

SEQ ID NO: 333524 - RNA, 24 nt, Human
accgcagugaccgaguccacaacc

SEQ ID NO: 333525 - RNA, 24 nt, Human
agaaauaagggaaggaaacguggc

SEQ ID NO: 333526 - RNA, 24 nt, Human
agaaauaagggaaggaaacguggc

SEQ ID NO: 333527 - RNA, 24 nt, Human
agaaauaagggaaggaaacguggc

SEQ ID NO: 333528 - RNA, 19 nt, Human
agacaaaagaaaaaaaagg

SEQ ID NO: 333529 - RNA, 19 nt, Human
agacaaaagaaaaaaaagg

SEQ ID NO: 333530 - RNA, 19 nt, Human
agacaaaagaaaaaaaagg

SEQ ID NO: 333531 - RNA, 22 nt, Human
agagacauaccugaguuuugcc

SEQ ID NO: 333532 - RNA, 18 nt, Human
agagaggaggaggcggca

SEQ ID NO: 333533 - RNA, 20 nt, Human
agaggcuuucccggcuuggc

SEQ ID NO: 333534 - RNA, 20 nt, Human
agaggcuuucccggcuuggc

SEQ ID NO: 333535 - RNA, 20 nt, Human
agaggcuuucccggcuuggc

SEQ ID NO: 333536 - RNA, 22 nt, Human
agcaaaacagagaugaagaaga

SEQ ID NO: 333537 - RNA, 22 nt, Human
agcaaaacagagaugaagaaga

SEQ ID NO: 333538 - RNA, 22 nt, Human
agcaaaacagagaugaagaaga

SEQ ID NO: 333539 - RNA, 20 nt, Human
aggagaaaggagagaggagg

SEQ ID NO: 333540 - RNA, 19 nt, Human
aggaggaggcggcaccaag

SEQ ID NO: 333541 - RNA, 22 nt, Human
aggcagcagcagcaaaggcaag

SEQ ID NO: 333542 - RNA, 22 nt, Human
aggcagcagcagcaaaggcaag

SEQ ID NO: 333543 - RNA, 22 nt, Human
aggcagcagcagcaaaggcaag

SEQ ID NO: 333544 - RNA, 19 nt, Human
aggccggaacagccccagg

SEQ ID NO: 333545 - RNA, 22 nt, Human
aggccggaacagccccaggggg

SEQ ID NO: 333546 - RNA, 20 nt, Human
aggguagggcugggggucau

SEQ ID NO: 333547 - RNA, 19 nt, Human
agugaccgaguccacaacc

SEQ ID NO: 333548 - RNA, 19 nt, Human
agugaccgaguccacaacc

SEQ ID NO: 333549 - RNA, 18 nt, Human
caaggucccgggccaggg

SEQ ID NO: 333550 - RNA, 18 nt, Human
caaggucccgggccaggg

SEQ ID NO: 333551 - RNA, 22 nt, Human
caaggucccgggccagggucuu

SEQ ID NO: 333552 - RNA, 22 nt, Human
caaggucccgggccagggucuu

SEQ ID NO: 333553 - RNA, 22 nt, Human
caccaaggguagggcugggggu

SEQ ID NO: 333554 - RNA, 21 nt, Human
caccgcagugaccgaguccaa

SEQ ID NO: 333555 - RNA, 21 nt, Human
caccgcagugaccgaguccaa

SEQ ID NO: 333556 - RNA, 25 nt, Human
caccgcagugaccgaguccacaacc

SEQ ID NO: 333557 - RNA, 22 nt, Human
cagagcccgcccgccgggucgc

SEQ ID NO: 333558 - RNA, 18 nt, Human
cagagcuaaggaagagug

SEQ ID NO: 333559 - RNA, 18 nt, Human
cagagcuaaggaagagug

SEQ ID NO: 333560 - RNA, 18 nt, Human
cagagcuaaggaagagug

SEQ ID NO: 333561 - RNA, 20 nt, Human
cagcagcaaaggcaaguuag

SEQ ID NO: 333562 - RNA, 20 nt, Human
cagcagcaaaggcaaguuag

SEQ ID NO: 333563 - RNA, 20 nt, Human
cagcagcaaaggcaaguuag

SEQ ID NO: 333564 - RNA, 22 nt, Human
cagcagcaaaggcaaguuagag

SEQ ID NO: 333565 - RNA, 22 nt, Human
cagcagcaaaggcaaguuagag

SEQ ID NO: 333566 - RNA, 22 nt, Human
cagcagcaaaggcaaguuagag

SEQ ID NO: 333567 - RNA, 19 nt, Human
cagcagcagcaaaggcaag

SEQ ID NO: 333568 - RNA, 18 nt, Human
caggacacaauggugaug

SEQ ID NO: 333569 - RNA, 18 nt, Human
caggacacaauggugaug

SEQ ID NO: 333570 - RNA, 25 nt, Human
caggacacaauggugaugcacagga

SEQ ID NO: 333571 - RNA, 25 nt, Human
caggacacaauggugaugcacagga

SEQ ID NO: 333572 - RNA, 20 nt, Human
caggacacaauggugauggu

SEQ ID NO: 333573 - RNA, 20 nt, Human
caggacacaauggugauggu

SEQ ID NO: 333574 - RNA, 23 nt, Human
caggagaauccgagugcugggca

SEQ ID NO: 333575 - RNA, 23 nt, Human
caggagaauccgagugcugggca

SEQ ID NO: 333576 - RNA, 19 nt, Human
caggagcguccgagggcag

SEQ ID NO: 333577 - RNA, 19 nt, Human
caggagcguccgagggcag

SEQ ID NO: 333578 - RNA, 19 nt, Human
caggccggaacagccccag

SEQ ID NO: 333579 - RNA, 27 nt, Human
caguaugaauuucuggggugcuguagc

SEQ ID NO: 333580 - RNA, 27 nt, Human
caguaugaauuucuggggugcuguagc

SEQ ID NO: 333581 - RNA, 27 nt, Human
caguaugaauuucuggggugcuguagc

SEQ ID NO: 333582 - RNA, 18 nt, Human
caugggccacauuugcug

SEQ ID NO: 333583 - RNA, 22 nt, Human
caugggccacauuugcugccau

SEQ ID NO: 333584 - RNA, 20 nt, Human
ccaaggguagggcugggggu

SEQ ID NO: 333585 - RNA, 23 nt, Human
cccaaacaacagcacaggucaug

SEQ ID NO: 333586 - RNA, 23 nt, Human
cccaaacaacagcacaggucaug

SEQ ID NO: 333587 - RNA, 19 nt, Human
cccccaggucccaaugucu

SEQ ID NO: 333588 - RNA, 20 nt, Human
cccccaggucccaaugucua

SEQ ID NO: 333589 - RNA, 25 nt, Human
cccccaggucccaaugucuaccauc

SEQ ID NO: 333590 - RNA, 25 nt, Human
cccccaggucccaaugucuaccauc

SEQ ID NO: 333591 - RNA, 18 nt, Human
ccccuaccccuuccuaga

SEQ ID NO: 333592 - RNA, 19 nt, Human
ccccuccccuaccccuucc

SEQ ID NO: 333593 - RNA, 18 nt, Human
cccgcaggccggaacagc

SEQ ID NO: 333594 - RNA, 20 nt, Human
cccucugcugaccucccaga

SEQ ID NO: 333595 - RNA, 18 nt, Human
ccgccgggucgcgccgcg

SEQ ID NO: 333596 - RNA, 19 nt, Human
ccgcgcccagagcccgccc

SEQ ID NO: 333597 - RNA, 19 nt, Human
ccuggguuuuagccugaag

SEQ ID NO: 333598 - RNA, 22 nt, Human
cgagugcugggcacaaagcucc

SEQ ID NO: 333599 - RNA, 22 nt, Human
cgagugcugggcacaaagcucc

SEQ ID NO: 333600 - RNA, 22 nt, Human
cgcccgggauccgccgggauuc

SEQ ID NO: 333601 - RNA, 19 nt, Human
cggagcuccugcagcacau

SEQ ID NO: 333602 - RNA, 19 nt, Human
cggagcuccugcagcacau

SEQ ID NO: 333603 - RNA, 22 nt, Human
cggccgccugaugcuccugcuc

SEQ ID NO: 333604 - RNA, 22 nt, Human
cggccgccugaugcuccugcuc

SEQ ID NO: 333605 - RNA, 23 nt, Human
cuccugcucccucgauggugucc

SEQ ID NO: 333606 - RNA, 23 nt, Human
cuccugcucccucgauggugucc

SEQ ID NO: 333607 - RNA, 19 nt, Human
cugaccucccagaaguggg

SEQ ID NO: 333608 - RNA, 20 nt, Human
cugggcacaaagcuccagga

SEQ ID NO: 333609 - RNA, 20 nt, Human
gaaaggcagagacaaaagaa

SEQ ID NO: 333610 - RNA, 20 nt, Human
gaaaggcagagacaaaagaa

SEQ ID NO: 333611 - RNA, 20 nt, Human
gaaaggcagagacaaaagaa

SEQ ID NO: 333612 - RNA, 22 nt, Human
gaagaaccagucaccugcuggg

SEQ ID NO: 333613 - RNA, 22 nt, Human
gaagaaccagucaccugcuggg

SEQ ID NO: 333614 - RNA, 18 nt, Human
gaagcagcuggaggaggc

SEQ ID NO: 333615 - RNA, 22 nt, Human
gacacaauggugaugcacagga

SEQ ID NO: 333616 - RNA, 23 nt, Human
gagcaaaacagagaugaagaaga

SEQ ID NO: 333617 - RNA, 19 nt, Human
gaggucccccaggucccaa

SEQ ID NO: 333618 - RNA, 19 nt, Human
gaggucccccaggucccaa

SEQ ID NO: 333619 - RNA, 21 nt, Human
gcagcagcagcaaaggcaagu

SEQ ID NO: 333620 - RNA, 21 nt, Human
gcagcagcagcaaaggcaagu

SEQ ID NO: 333621 - RNA, 21 nt, Human
gcagcagcagcaaaggcaagu

SEQ ID NO: 333622 - RNA, 22 nt, Human
gcaugcaccaccuggauccucc

SEQ ID NO: 333623 - RNA, 22 nt, Human
gcaugcaccaccuggauccucc

SEQ ID NO: 333624 - RNA, 22 nt, Human
gcuaaggaagagugggcccccc

SEQ ID NO: 333625 - RNA, 22 nt, Human
gcuaaggaagagugggcccccc

SEQ ID NO: 333626 - RNA, 22 nt, Human
gcuaaggaagagugggcccccc

SEQ ID NO: 333627 - RNA, 20 nt, Human
gcugaccucccagaaguggg

SEQ ID NO: 333628 - RNA, 20 nt, Human
gcugggggucauccgcccgc

SEQ ID NO: 333629 - RNA, 18 nt, Human
ggaagaaaaguugggagg

SEQ ID NO: 333630 - RNA, 18 nt, Human
ggaagaaaaguugggagg

SEQ ID NO: 333631 - RNA, 20 nt, Human
ggagaaaggagagaggagga

SEQ ID NO: 333632 - RNA, 23 nt, Human
ggagcuccugcagcacauccagc

SEQ ID NO: 333633 - RNA, 23 nt, Human
ggagcuccugcagcacauccagc

SEQ ID NO: 333634 - RNA, 20 nt, Human
ggaggagaaaggagagagga

SEQ ID NO: 333635 - RNA, 19 nt, Human
gggaagaaaaguugggagg

SEQ ID NO: 333636 - RNA, 21 nt, Human
uacacguuagaaauaagggaa

SEQ ID NO: 333637 - RNA, 21 nt, Human
uacacguuagaaauaagggaa

SEQ ID NO: 333638 - RNA, 21 nt, Human
uacacguuagaaauaagggaa

SEQ ID NO: 333639 - RNA, 18 nt, Human
uacagagagugaggccaa

SEQ ID NO: 333640 - RNA, 18 nt, Human
uacagagagugaggccaa

SEQ ID NO: 333641 - RNA, 18 nt, Human
uagccugaagcagcugga

SEQ ID NO: 333642 - RNA, 24 nt, Human
uaggagggagcacaggacacaaug

SEQ ID NO: 333643 - RNA, 24 nt, Human
uaggagggagcacaggacacaaug

SEQ ID NO: 333644 - RNA, 24 nt, Human
uaggagggagcacaggacacaaug

SEQ ID NO: 333645 - RNA, 19 nt, Human
uauauuuuuaagagcaaaa

SEQ ID NO: 333646 - RNA, 19 nt, Human
uauauuuuuaagagcaaaa

SEQ ID NO: 333647 - RNA, 19 nt, Human
uauauuuuuaagagcaaaa

SEQ ID NO: 333648 - RNA, 21 nt, Human
ucaccaccacugccaugccaa

SEQ ID NO: 333649 - RNA, 21 nt, Human
ucaccaccacugccaugccaa

SEQ ID NO: 333650 - RNA, 21 nt, Human
ucauuuauaagcuuauuucca

SEQ ID NO: 333651 - RNA, 21 nt, Human
ucauuuauaagcuuauuucca

SEQ ID NO: 333652 - RNA, 19 nt, Human
uccacaaccaccaccuuca

SEQ ID NO: 333653 - RNA, 19 nt, Human
uccacaaccaccaccuuca

SEQ ID NO: 333654 - RNA, 23 nt, Human
uccagacgccccuccccuacccc

SEQ ID NO: 333655 - RNA, 18 nt, Human
uccccgcaggccggaaca

SEQ ID NO: 333656 - RNA, 22 nt, Human
uccgccgggauucccgcgccca

SEQ ID NO: 333657 - RNA, 20 nt, Human
uccggagagcuucugccuga

SEQ ID NO: 333658 - RNA, 18 nt, Human
uccuccucauccuggguu

SEQ ID NO: 333659 - RNA, 23 nt, Human
ucuccuggaaaccuguuggcugu

SEQ ID NO: 333660 - RNA, 23 nt, Human
ucuccuggaaaccuguuggcugu

SEQ ID NO: 333661 - RNA, 19 nt, Human
ucugaggucccccaggucc

SEQ ID NO: 333662 - RNA, 19 nt, Human
ucugaggucccccaggucc

SEQ ID NO: 333663 - RNA, 21 nt, Human
ucuguagucaccagugccagg

SEQ ID NO: 333664 - RNA, 21 nt, Human
ucuguagucaccagugccagg

SEQ ID NO: 333665 - RNA, 21 nt, Human
ucuguagucaccagugccagg

SEQ ID NO: 333666 - RNA, 18 nt, Human
ugaagaagaguauuucau

SEQ ID NO: 333667 - RNA, 18 nt, Human
ugaagaagaguauuucau

SEQ ID NO: 333668 - RNA, 18 nt, Human
ugaagaagaguauuucau

SEQ ID NO: 333669 - RNA, 20 nt, Human
ugaagcagcuggaggaggcg

SEQ ID NO: 333670 - RNA, 19 nt, Human
ugccucggagcuccugcag

SEQ ID NO: 333671 - RNA, 19 nt, Human
ugccucggagcuccugcag

SEQ ID NO: 333672 - RNA, 20 nt, Human
ugccucggagcuccugcagc

SEQ ID NO: 333673 - RNA, 20 nt, Human
ugccucggagcuccugcagc

SEQ ID NO: 333674 - RNA, 22 nt, Human
ugccucggagcuccugcagcac

SEQ ID NO: 333675 - RNA, 22 nt, Human
ugccucggagcuccugcagcac

SEQ ID NO: 333676 - RNA, 22 nt, Human
ugccugaguuuugccgcuaccu

SEQ ID NO: 333677 - RNA, 22 nt, Human
ugccuguuccuccucauccugg

SEQ ID NO: 333678 - RNA, 19 nt, Human
ugcugcaggccaugggcca

SEQ ID NO: 333679 - RNA, 23 nt, Human
ugcugggcacaaagcuccaggag

SEQ ID NO: 333680 - RNA, 26 nt, Human
uggaaaggcagagacaaaagaaaaaa

SEQ ID NO: 333681 - RNA, 26 nt, Human
uggaaaggcagagacaaaagaaaaaa

SEQ ID NO: 333682 - RNA, 26 nt, Human
uggaaaggcagagacaaaagaaaaaa

SEQ ID NO: 333683 - RNA, 22 nt, Human
ugggaagaaaaguugggagggg

SEQ ID NO: 333684 - RNA, 22 nt, Human
ugggaagaaaaguugggagggg

SEQ ID NO: 333685 - RNA, 22 nt, Human
ugggaagaaaaguugggagggg

SEQ ID NO: 333686 - RNA, 18 nt, Human
ugggagggguccccaaug

SEQ ID NO: 333687 - RNA, 18 nt, Human
ugggagggguccccaaug

SEQ ID NO: 333688 - RNA, 19 nt, Human
ugggagggguccccaaugg

SEQ ID NO: 333689 - RNA, 22 nt, Human
uucccgcgcccagagcccgccc

SEQ ID NO: 333690 - RNA, 20 nt, Human
uucgcgggggguccucucca

SEQ ID NO: 333691 - RNA, 23 nt, Human
uuuaagagcaaaacagagaugaa

SEQ ID NO: 333692 - RNA, 23 nt, Human
uuuaagagcaaaacagagaugaa

SEQ ID NO: 333693 - RNA, 23 nt, Human
uuuaagagcaaaacagagaugaa

SEQ ID NO: 333694 - RNA, 28 nt, Human
uuuuuuuuuuuuuuuuuucggggaauug

SEQ ID NO: 333695 - RNA, 24 nt, Human
uuuuuuuuuuuuuuuuuuuucggg

SEQ ID NO: 333696 - RNA, 30 nt, Human
aaaaaaaaaaaaaaaaaaaaaaacaaaaaa

SEQ ID NO: 333697 - RNA, 31 nt, Human
aaaaaaaaaaaaaaaaaaaaaaacaaaaaag

SEQ ID NO: 333698 - RNA, 25 nt, Human
aaaaaaaaaaaaaaaaacaaaaaag

SEQ ID NO: 333699 - RNA, 25 nt, Human
aaaaaaaaaaaaaaaaacaaaaaag

SEQ ID NO: 333700 - RNA, 25 nt, Human
aaaaaaaaaaaaaaaaacaaaaaag

SEQ ID NO: 333701 - RNA, 23 nt, Human
aaaaaaaaaaaaaaaacaaaaaa

SEQ ID NO: 333702 - RNA, 23 nt, Human
aaaaaaaaaaaaaaaacaaaaaa

SEQ ID NO: 333703 - RNA, 23 nt, Human
aaaaaaaaaaaaaaaacaaaaaa

SEQ ID NO: 333704 - RNA, 23 nt, Human
aaaaaaaaaaaaaaaacaaaaaa

SEQ ID NO: 333705 - RNA, 24 nt, Human
aaaaaaaaaaaaaacaaaaaacag

SEQ ID NO: 333706 - RNA, 24 nt, Human
aaaaaaaaaaaaaacaaaaaacag

SEQ ID NO: 333707 - RNA, 24 nt, Human
aaaaaaaaaaaaaacaaaaaacag

SEQ ID NO: 333708 - RNA, 24 nt, Human
aaaaaaaaaaaaaacaaaaaacag

SEQ ID NO: 333709 - RNA, 20 nt, Human
aaaaaaaacaaaaaacagcc

SEQ ID NO: 333710 - RNA, 20 nt, Human
aaaaaaaacaaaaaacagcc

SEQ ID NO: 333711 - RNA, 18 nt, Human
aaaaaaacaaaaaacagc

SEQ ID NO: 333712 - RNA, 18 nt, Human
aaaaaaacaaaaaacagc

SEQ ID NO: 333713 - RNA, 22 nt, Human
aaaaacccagcccucuucagcu

SEQ ID NO: 333714 - RNA, 22 nt, Human
aaaaacccagcccucuucagcu

SEQ ID NO: 333715 - RNA, 22 nt, Human
aaaaacccagcccucuucagcu

SEQ ID NO: 333716 - RNA, 22 nt, Human
aaaaacccagcccucuucagcu

SEQ ID NO: 333717 - RNA, 19 nt, Human
aaaacaaaaaacagccuuu

SEQ ID NO: 333718 - RNA, 19 nt, Human
aaaacaaaaaacagccuuu

SEQ ID NO: 333719 - RNA, 19 nt, Human
aaaacaaaaaacagccuuu

SEQ ID NO: 333720 - RNA, 19 nt, Human
aaaacaaaaaacagccuuu

SEQ ID NO: 333721 - RNA, 18 nt, Human
aaaaugucagucuugaaa

SEQ ID NO: 333722 - RNA, 18 nt, Human
aaaaugucagucuugaaa

SEQ ID NO: 333723 - RNA, 18 nt, Human
aaaaugucagucuugaaa

SEQ ID NO: 333724 - RNA, 18 nt, Human
aaaaugucagucuugaaa

SEQ ID NO: 333725 - RNA, 18 nt, Human
aaacuccugagggcucgc

SEQ ID NO: 333726 - RNA, 22 nt, Human
aaagguauucaucuguccagag

SEQ ID NO: 333727 - RNA, 22 nt, Human
aaagguauucaucuguccagag

SEQ ID NO: 333728 - RNA, 22 nt, Human
aaagguauucaucuguccagag

SEQ ID NO: 333729 - RNA, 22 nt, Human
aaagguauucaucuguccagag

SEQ ID NO: 333730 - RNA, 21 nt, Human
aaaugccuuuucuggccagac

SEQ ID NO: 333731 - RNA, 21 nt, Human
aaaugccuuuucuggccagac

SEQ ID NO: 333732 - RNA, 21 nt, Human
aaaugccuuuucuggccagac

SEQ ID NO: 333733 - RNA, 21 nt, Human
aaaugccuuuucuggccagac

SEQ ID NO: 333734 - RNA, 20 nt, Human
aacacagccagaccccgucu

SEQ ID NO: 333735 - RNA, 20 nt, Human
aacacagccagaccccgucu

SEQ ID NO: 333736 - RNA, 20 nt, Human
aacacagccagaccccgucu

SEQ ID NO: 333737 - RNA, 20 nt, Human
aacacagccagaccccgucu

SEQ ID NO: 333738 - RNA, 21 nt, Human
aacacagccagaccccgucuc

SEQ ID NO: 333739 - RNA, 21 nt, Human
aacacagccagaccccgucuc

SEQ ID NO: 333740 - RNA, 21 nt, Human
aacacagccagaccccgucuc

SEQ ID NO: 333741 - RNA, 21 nt, Human
aacacagccagaccccgucuc

SEQ ID NO: 333742 - RNA, 22 nt, Human
aacaucuucaugauaugaacca

SEQ ID NO: 333743 - RNA, 24 nt, Human
aaccauccuucuccuaccacccac

SEQ ID NO: 333744 - RNA, 25 nt, Human
aaccugcugcuucuccauccgcucc

SEQ ID NO: 333745 - RNA, 25 nt, Human
aaccugcugcuucuccauccgcucc

SEQ ID NO: 333746 - RNA, 24 nt, Human
aacuccagucagggcaacacagcc

SEQ ID NO: 333747 - RNA, 24 nt, Human
aacuccagucagggcaacacagcc

SEQ ID NO: 333748 - RNA, 24 nt, Human
aacuccagucagggcaacacagcc

SEQ ID NO: 333749 - RNA, 24 nt, Human
aacuccagucagggcaacacagcc

SEQ ID NO: 333750 - RNA, 19 nt, Human
aagcaagauaaaucgcaau

SEQ ID NO: 333751 - RNA, 23 nt, Human
aagcaccaggcauacaacaguuu

SEQ ID NO: 333752 - RNA, 18 nt, Human
aagcauuucagauaagca

SEQ ID NO: 333753 - RNA, 18 nt, Human
aagcauuucagauaagca

SEQ ID NO: 333754 - RNA, 18 nt, Human
aagcauuucagauaagca

SEQ ID NO: 333755 - RNA, 18 nt, Human
aagcauuucagauaagca

SEQ ID NO: 333756 - RNA, 26 nt, Human
aaggagccauuggugauuccuaaaaa

SEQ ID NO: 333757 - RNA, 26 nt, Human
aaggagccauuggugauuccuaaaaa

SEQ ID NO: 333758 - RNA, 26 nt, Human
aaggagccauuggugauuccuaaaaa

SEQ ID NO: 333759 - RNA, 26 nt, Human
aaggagccauuggugauuccuaaaaa

SEQ ID NO: 333760 - RNA, 19 nt, Human
aagggaagccugaaacaga

SEQ ID NO: 333761 - RNA, 24 nt, Human
aauaaauagugggaagccucacaa

SEQ ID NO: 333762 - RNA, 24 nt, Human
aauaaauagugggaagccucacaa

SEQ ID NO: 333763 - RNA, 24 nt, Human
aauaaauagugggaagccucacaa

SEQ ID NO: 333764 - RNA, 24 nt, Human
aauaaauagugggaagccucacaa

SEQ ID NO: 333765 - RNA, 18 nt, Human
aaugcaaaacaauucugg

SEQ ID NO: 333766 - RNA, 18 nt, Human
aaugcaaaacaauucugg

SEQ ID NO: 333767 - RNA, 18 nt, Human
aaugcaaaacaauucugg

SEQ ID NO: 333768 - RNA, 18 nt, Human
aaugcaaaacaauucugg

SEQ ID NO: 333769 - RNA, 19 nt, Human
aauuauguggccugagccu

SEQ ID NO: 333770 - RNA, 19 nt, Human
aauuauguggccugagccu

SEQ ID NO: 333771 - RNA, 19 nt, Human
aauuauguggccugagccu

SEQ ID NO: 333772 - RNA, 18 nt, Human
accccgucucaaaaaaaa

SEQ ID NO: 333773 - RNA, 18 nt, Human
accccgucucaaaaaaaa

SEQ ID NO: 333774 - RNA, 18 nt, Human
accccgucucaaaaaaaa

SEQ ID NO: 333775 - RNA, 18 nt, Human
accccgucucaaaaaaaa

SEQ ID NO: 333776 - RNA, 28 nt, Human
accccgucucaaaaaaaaaaaaaaaaaa

SEQ ID NO: 333777 - RNA, 28 nt, Human
accccgucucaaaaaaaaaaaaaaaaaa

SEQ ID NO: 333778 - RNA, 28 nt, Human
accccgucucaaaaaaaaaaaaaaaaaa

SEQ ID NO: 333779 - RNA, 21 nt, Human
acccuaagagaaaaaaaaacc

SEQ ID NO: 333780 - RNA, 21 nt, Human
acccuaagagaaaaaaaaacc

SEQ ID NO: 333781 - RNA, 21 nt, Human
acccuaagagaaaaaaaaacc

SEQ ID NO: 333782 - RNA, 19 nt, Human
agacacaguggcucacacc

SEQ ID NO: 333783 - RNA, 21 nt, Human
agacacaguggcucacaccag

SEQ ID NO: 333784 - RNA, 21 nt, Human
agacacaguggcucacaccag

SEQ ID NO: 333785 - RNA, 21 nt, Human
agacacaguggcucacaccag

SEQ ID NO: 333786 - RNA, 19 nt, Human
agagagcuguguuugcacc

SEQ ID NO: 333787 - RNA, 19 nt, Human
agagagcuguguuugcacc

SEQ ID NO: 333788 - RNA, 19 nt, Human
agagagcuguguuugcacc

SEQ ID NO: 333789 - RNA, 19 nt, Human
agagagcuguguuugcacc

SEQ ID NO: 333790 - RNA, 21 nt, Human
agauaaagccuuggacuugag

SEQ ID NO: 333791 - RNA, 21 nt, Human
agauaaagccuuggacuugag

SEQ ID NO: 333792 - RNA, 19 nt, Human
aggagcacggagaggaggg

SEQ ID NO: 333793 - RNA, 24 nt, Human
aggcagaggugggaguaucacuug

SEQ ID NO: 333794 - RNA, 24 nt, Human
aggcagaggugggaguaucacuug

SEQ ID NO: 333795 - RNA, 24 nt, Human
aggcagaggugggaguaucacuug

SEQ ID NO: 333796 - RNA, 24 nt, Human
aggcagaggugggaguaucacuug

SEQ ID NO: 333797 - RNA, 21 nt, Human
aggcauauacacgaaacacag

SEQ ID NO: 333798 - RNA, 21 nt, Human
aggcauauacacgaaacacag

SEQ ID NO: 333799 - RNA, 21 nt, Human
aggcauauacacgaaacacag

SEQ ID NO: 333800 - RNA, 21 nt, Human
aggcauauacacgaaacacag

SEQ ID NO: 333801 - RNA, 21 nt, Human
agguauucaucuguccagagc

SEQ ID NO: 333802 - RNA, 21 nt, Human
agguauucaucuguccagagc

SEQ ID NO: 333803 - RNA, 21 nt, Human
agguauucaucuguccagagc

SEQ ID NO: 333804 - RNA, 21 nt, Human
agguauucaucuguccagagc

SEQ ID NO: 333805 - RNA, 18 nt, Human
aggugggaguaucacuug

SEQ ID NO: 333806 - RNA, 18 nt, Human
aggugggaguaucacuug

SEQ ID NO: 333807 - RNA, 18 nt, Human
aggugggaguaucacuug

SEQ ID NO: 333808 - RNA, 18 nt, Human
aggugggaguaucacuug

SEQ ID NO: 333809 - RNA, 23 nt, Human
aguaauaaauagugggaagccuc

SEQ ID NO: 333810 - RNA, 23 nt, Human
aguaauaaauagugggaagccuc

SEQ ID NO: 333811 - RNA, 20 nt, Human
agucacuccugcaaggaagu

SEQ ID NO: 333812 - RNA, 20 nt, Human
agucacuccugcaaggaagu

SEQ ID NO: 333813 - RNA, 20 nt, Human
agucacuccugcaaggaagu

SEQ ID NO: 333814 - RNA, 18 nt, Human
agugaucucagguagucu

SEQ ID NO: 333815 - RNA, 18 nt, Human
agugaucucagguagucu

SEQ ID NO: 333816 - RNA, 24 nt, Human
aguggcucacaccaguaaucccug

SEQ ID NO: 333817 - RNA, 24 nt, Human
aguggcucacaccaguaaucccug

SEQ ID NO: 333818 - RNA, 21 nt, Human
aguuuccuguugugcguuggu

SEQ ID NO: 333819 - RNA, 21 nt, Human
aguuuccuguugugcguuggu

SEQ ID NO: 333820 - RNA, 21 nt, Human
aguuuccuguugugcguuggu

SEQ ID NO: 333821 - RNA, 21 nt, Human
augagcucaggcuucugcaug

SEQ ID NO: 333822 - RNA, 19 nt, Human
augcacagacucccacgua

SEQ ID NO: 333823 - RNA, 23 nt, Human
auuuccuuuucuucauguccugg

SEQ ID NO: 333824 - RNA, 23 nt, Human
auuuccuuuucuucauguccugg

SEQ ID NO: 333825 - RNA, 19 nt, Human
caaagauaaagccuuggac

SEQ ID NO: 333826 - RNA, 19 nt, Human
caaagauaaagccuuggac

SEQ ID NO: 333827 - RNA, 18 nt, Human
caacagccgcggcgggag

SEQ ID NO: 333828 - RNA, 23 nt, Human
cacaagccgaagaaaagguauuc

SEQ ID NO: 333829 - RNA, 23 nt, Human
cacaagccgaagaaaagguauuc

SEQ ID NO: 333830 - RNA, 23 nt, Human
cacaagccgaagaaaagguauuc

SEQ ID NO: 333831 - RNA, 23 nt, Human
cacaagccgaagaaaagguauuc

SEQ ID NO: 333832 - RNA, 25 nt, Human
cacagcccacuuuucagaguugucu

SEQ ID NO: 333833 - RNA, 25 nt, Human
cacagcccacuuuucagaguugucu

SEQ ID NO: 333834 - RNA, 18 nt, Human
caccaggcauacaacagu

SEQ ID NO: 333835 - RNA, 18 nt, Human
caccaggcauacaacagu

SEQ ID NO: 333836 - RNA, 18 nt, Human
caccaggcauacaacagu

SEQ ID NO: 333837 - RNA, 18 nt, Human
caccaggcauacaacagu

SEQ ID NO: 333838 - RNA, 18 nt, Human
caccaggcauacaacagu

SEQ ID NO: 333839 - RNA, 18 nt, Human
caccaggcauacaacagu

SEQ ID NO: 333840 - RNA, 18 nt, Human
caccaggcauacaacagu

SEQ ID NO: 333841 - RNA, 18 nt, Human
caccaggcauacaacagu

SEQ ID NO: 333842 - RNA, 20 nt, Human
cacccacugauccuuccggg

SEQ ID NO: 333843 - RNA, 26 nt, Human
caccgccuccuuccuugccuucucca

SEQ ID NO: 333844 - RNA, 26 nt, Human
caccgccuccuuccuugccuucucca

SEQ ID NO: 333845 - RNA, 21 nt, Human
caccugaaauggggaaguaga

SEQ ID NO: 333846 - RNA, 25 nt, Human
cacuaacaccauaaccaacaucuuc

SEQ ID NO: 333847 - RNA, 24 nt, Human
cacugaacuccagucagggcaaca

SEQ ID NO: 333848 - RNA, 24 nt, Human
cacugaacuccagucagggcaaca

SEQ ID NO: 333849 - RNA, 24 nt, Human
cacugaacuccagucagggcaaca

SEQ ID NO: 333850 - RNA, 24 nt, Human
cacugaacuccagucagggcaaca

SEQ ID NO: 333851 - RNA, 19 nt, Human
cagacaggaaccagggcag

SEQ ID NO: 333852 - RNA, 23 nt, Human
cagaggugggaguaucacuuggg

SEQ ID NO: 333853 - RNA, 23 nt, Human
cagaggugggaguaucacuuggg

SEQ ID NO: 333854 - RNA, 23 nt, Human
cagaggugggaguaucacuuggg

SEQ ID NO: 333855 - RNA, 23 nt, Human
cagaggugggaguaucacuuggg

SEQ ID NO: 333856 - RNA, 18 nt, Human
cagccagaccccgucuca

SEQ ID NO: 333857 - RNA, 18 nt, Human
cagccagaccccgucuca

SEQ ID NO: 333858 - RNA, 18 nt, Human
cagccagaccccgucuca

SEQ ID NO: 333859 - RNA, 18 nt, Human
cagccagaccccgucuca

SEQ ID NO: 333860 - RNA, 22 nt, Human
cagcgacccuaagagaaaaaaa

SEQ ID NO: 333861 - RNA, 22 nt, Human
cagcgacccuaagagaaaaaaa

SEQ ID NO: 333862 - RNA, 22 nt, Human
cagcgacccuaagagaaaaaaa

SEQ ID NO: 333863 - RNA, 22 nt, Human
cagcgacccuaagagaaaaaaa

SEQ ID NO: 333864 - RNA, 19 nt, Human
caggcuucugcaugagagg

SEQ ID NO: 333865 - RNA, 24 nt, Human
caguaauaaauagugggaagccuc

SEQ ID NO: 333866 - RNA, 24 nt, Human
caguaauaaauagugggaagccuc

SEQ ID NO: 333867 - RNA, 19 nt, Human
cauccccaaggucucauua

SEQ ID NO: 333868 - RNA, 19 nt, Human
cauccccaaggucucauua

SEQ ID NO: 333869 - RNA, 22 nt, Human
caugcacaaaauuauguguaug

SEQ ID NO: 333870 - RNA, 22 nt, Human
cauucccaaaacuccugugcgu

SEQ ID NO: 333871 - RNA, 22 nt, Human
ccaaaaaguaguuuuccaaagu

SEQ ID NO: 333872 - RNA, 22 nt, Human
ccaaaaaguaguuuuccaaagu

SEQ ID NO: 333873 - RNA, 22 nt, Human
ccaaaaaguaguuuuccaaagu

SEQ ID NO: 333874 - RNA, 22 nt, Human
ccaaaaaguaguuuuccaaagu

SEQ ID NO: 333875 - RNA, 20 nt, Human
ccacaccauccccugcaucg

SEQ ID NO: 333876 - RNA, 23 nt, Human
ccacagugcuuaaugugggcaac

SEQ ID NO: 333877 - RNA, 23 nt, Human
ccacagugcuuaaugugggcaac

SEQ ID NO: 333878 - RNA, 23 nt, Human
ccacagugcuuaaugugggcaac

SEQ ID NO: 333879 - RNA, 23 nt, Human
ccacagugcuuaaugugggcaac

SEQ ID NO: 333880 - RNA, 21 nt, Human
ccagaaguggaaaauuccaca

SEQ ID NO: 333881 - RNA, 21 nt, Human
ccagaaguggaaaauuccaca

SEQ ID NO: 333882 - RNA, 21 nt, Human
ccagaaguggaaaauuccaca

SEQ ID NO: 333883 - RNA, 21 nt, Human
ccagagccucucccuacuaga

SEQ ID NO: 333884 - RNA, 21 nt, Human
ccagagccucucccuacuaga

SEQ ID NO: 333885 - RNA, 21 nt, Human
ccagagccucucccuacuaga

SEQ ID NO: 333886 - RNA, 21 nt, Human
ccagagccucucccuacuaga

SEQ ID NO: 333887 - RNA, 26 nt, Human
ccauccccucaccuucagcuggaccc

SEQ ID NO: 333888 - RNA, 19 nt, Human
ccccgucucaaaaaaaaaa

SEQ ID NO: 333889 - RNA, 19 nt, Human
ccccgucucaaaaaaaaaa

SEQ ID NO: 333890 - RNA, 19 nt, Human
ccccgucucaaaaaaaaaa

SEQ ID NO: 333891 - RNA, 19 nt, Human
ccccgucucaaaaaaaaaa

SEQ ID NO: 333892 - RNA, 24 nt, Human
cccgucucaaaaaaaaaaaaaaag

SEQ ID NO: 333893 - RNA, 24 nt, Human
cccgucucaaaaaaaaaaaaaaag

SEQ ID NO: 333894 - RNA, 21 nt, Human
cccuaagagaaaaaaaaaccc

SEQ ID NO: 333895 - RNA, 21 nt, Human
cccuaagagaaaaaaaaaccc

SEQ ID NO: 333896 - RNA, 21 nt, Human
cccuaagagaaaaaaaaaccc

SEQ ID NO: 333897 - RNA, 21 nt, Human
cccuaagagaaaaaaaaaccc

SEQ ID NO: 333898 - RNA, 19 nt, Human
ccuaagagaaaaaaaaacc

SEQ ID NO: 333899 - RNA, 19 nt, Human
ccuaagagaaaaaaaaacc

SEQ ID NO: 333900 - RNA, 21 nt, Human
ccuccugcuggcagcugaguc

SEQ ID NO: 333901 - RNA, 23 nt, Human
ccuucuccuaccacccacugauc

SEQ ID NO: 333902 - RNA, 22 nt, Human
ccuugcuccaaccuuuuuccug

SEQ ID NO: 333903 - RNA, 22 nt, Human
ccuugcuccaaccuuuuuccug

SEQ ID NO: 333904 - RNA, 21 nt, Human
cgcaaagcaccaggcauacaa

SEQ ID NO: 333905 - RNA, 21 nt, Human
cgcaaagcaccaggcauacaa

SEQ ID NO: 333906 - RNA, 21 nt, Human
cgcaaagcaccaggcauacaa

SEQ ID NO: 333907 - RNA, 23 nt, Human
cggcguggagacucgaaccugcu

SEQ ID NO: 333908 - RNA, 23 nt, Human
cggcguggagacucgaaccugcu

SEQ ID NO: 333909 - RNA, 23 nt, Human
cggcguggagacucgaaccugcu

SEQ ID NO: 333910 - RNA, 18 nt, Human
cgggagcugcaguccugg

SEQ ID NO: 333911 - RNA, 18 nt, Human
cgggagcugcaguccugg

SEQ ID NO: 333912 - RNA, 24 nt, Human
cuaaaauguccaucuucauuaaca

SEQ ID NO: 333913 - RNA, 24 nt, Human
cuaaaauguccaucuucauuaaca

SEQ ID NO: 333914 - RNA, 24 nt, Human
cuaaaauguccaucuucauuaaca

SEQ ID NO: 333915 - RNA, 24 nt, Human
cuaaaauguccaucuucauuaaca

SEQ ID NO: 333916 - RNA, 20 nt, Human
cuaacaccauaaccaacauc

SEQ ID NO: 333917 - RNA, 23 nt, Human
cuaacaccauaaccaacaucuuc

SEQ ID NO: 333918 - RNA, 18 nt, Human
cucaaaaaaaaaaaaaaa

SEQ ID NO: 333919 - RNA, 18 nt, Human
cucaaaaaaaaaaaaaaa

SEQ ID NO: 333920 - RNA, 23 nt, Human
cucaaaaaaaaaaaaaaaaaaaa

SEQ ID NO: 333921 - RNA, 23 nt, Human
cucacaaaugcacagacucccac

SEQ ID NO: 333922 - RNA, 19 nt, Human
cucacaagccgaagaaaag

SEQ ID NO: 333923 - RNA, 19 nt, Human
cucacaagccgaagaaaag

SEQ ID NO: 333924 - RNA, 19 nt, Human
cucacaagccgaagaaaag

SEQ ID NO: 333925 - RNA, 20 nt, Human
cucacuaacaccauaaccaa

SEQ ID NO: 333926 - RNA, 20 nt, Human
cucacuaacaccauaaccaa

SEQ ID NO: 333927 - RNA, 21 nt, Human
cucccggaacugcugcugcag

SEQ ID NO: 333928 - RNA, 21 nt, Human
cucccggaacugcugcugcag

SEQ ID NO: 333929 - RNA, 21 nt, Human
cucccggaacugcugcugcag

SEQ ID NO: 333930 - RNA, 20 nt, Human
cucgcucuccacggcggaug

SEQ ID NO: 333931 - RNA, 20 nt, Human
cucgcucuccacggcggaug

SEQ ID NO: 333932 - RNA, 20 nt, Human
cucgcucuccacggcggaug

SEQ ID NO: 333933 - RNA, 19 nt, Human
cugauccuuccgggcagca

SEQ ID NO: 333934 - RNA, 25 nt, Human
cugcagugggcucucagucagaucc

SEQ ID NO: 333935 - RNA, 25 nt, Human
cugcagugggcucucagucagaucc

SEQ ID NO: 333936 - RNA, 25 nt, Human
cugcagugggcucucagucagaucc

SEQ ID NO: 333937 - RNA, 25 nt, Human
cugcagugggcucucagucagaucc

SEQ ID NO: 333938 - RNA, 20 nt, Human
cugccucacucuucucagcu

SEQ ID NO: 333939 - RNA, 20 nt, Human
cugccucacucuucucagcu

SEQ ID NO: 333940 - RNA, 20 nt, Human
cugccucacucuucucagcu

SEQ ID NO: 333941 - RNA, 24 nt, Human
cugccucacucuucucagcugacg

SEQ ID NO: 333942 - RNA, 23 nt, Human
cugcuuggauuuuugaaccaugu

SEQ ID NO: 333943 - RNA, 25 nt, Human
cugguuguucaaggcuaauguguca

SEQ ID NO: 333944 - RNA, 25 nt, Human
cugguuguucaaggcuaauguguca

SEQ ID NO: 333945 - RNA, 25 nt, Human
cugguuguucaaggcuaauguguca

SEQ ID NO: 333946 - RNA, 19 nt, Human
cugguuucaagcauuucag

SEQ ID NO: 333947 - RNA, 19 nt, Human
cugguuucaagcauuucag

SEQ ID NO: 333948 - RNA, 19 nt, Human
cugguuucaagcauuucag

SEQ ID NO: 333949 - RNA, 19 nt, Human
cugguuucaagcauuucag

SEQ ID NO: 333950 - RNA, 20 nt, Human
gaaacagaaacauugaaaaa

SEQ ID NO: 333951 - RNA, 21 nt, Human
gaaccagggcaggggugagaa

SEQ ID NO: 333952 - RNA, 19 nt, Human
gacagaguccaauuaugug

SEQ ID NO: 333953 - RNA, 19 nt, Human
gacagaguccaauuaugug

SEQ ID NO: 333954 - RNA, 19 nt, Human
gagaaaaaaaaacccagcc

SEQ ID NO: 333955 - RNA, 19 nt, Human
gagaaaaaaaaacccagcc

SEQ ID NO: 333956 - RNA, 19 nt, Human
gagaaaaaaaaacccagcc

SEQ ID NO: 333957 - RNA, 19 nt, Human
gagaaaaaaaaacccagcc

SEQ ID NO: 333958 - RNA, 21 nt, Human
gagagcaaguugaagaggaca

SEQ ID NO: 333959 - RNA, 20 nt, Human
gagcaacagccgcggcggga

SEQ ID NO: 333960 - RNA, 23 nt, Human
gagugguucugagacaguuacag

SEQ ID NO: 333961 - RNA, 23 nt, Human
gagugguucugagacaguuacag

SEQ ID NO: 333962 - RNA, 23 nt, Human
gagugguucugagacaguuacag

SEQ ID NO: 333963 - RNA, 23 nt, Human
gcaaaacaacugaauguagacaa

SEQ ID NO: 333964 - RNA, 23 nt, Human
gcaaaacaacugaauguagacaa

SEQ ID NO: 333965 - RNA, 20 nt, Human
gcaaagcaccaggcauacaa

SEQ ID NO: 333966 - RNA, 20 nt, Human
gcacaaaauuauguguauga

SEQ ID NO: 333967 - RNA, 20 nt, Human
gcacaaaauuauguguauga

SEQ ID NO: 333968 - RNA, 20 nt, Human
gcacaaaauuauguguauga

SEQ ID NO: 333969 - RNA, 20 nt, Human
gcacaaaauuauguguauga

SEQ ID NO: 333970 - RNA, 23 nt, Human
gcacugcuccaaccuuuuuccug

SEQ ID NO: 333971 - RNA, 23 nt, Human
gcacugcuccaaccuuuuuccug

SEQ ID NO: 333972 - RNA, 23 nt, Human
gcgacccuaagagaaaaaaaaac

SEQ ID NO: 333973 - RNA, 23 nt, Human
gcgacccuaagagaaaaaaaaac

SEQ ID NO: 333974 - RNA, 19 nt, Human
gcgcggugcacacagggag

SEQ ID NO: 333975 - RNA, 18 nt, Human
gcggcggcgaggacgggc

SEQ ID NO: 333976 - RNA, 21 nt, Human
gcugcaguccugguccgccgg

SEQ ID NO: 333977 - RNA, 21 nt, Human
gcugcaguccugguccgccgg

SEQ ID NO: 333978 - RNA, 21 nt, Human
gcugcaguccugguccgccgg

SEQ ID NO: 333979 - RNA, 24 nt, Human
ggaaagagagcaaguugaagagga

SEQ ID NO: 333980 - RNA, 21 nt, Human
ggaccaagucuggccuauauu

SEQ ID NO: 333981 - RNA, 21 nt, Human
ggaccaagucuggccuauauu

SEQ ID NO: 333982 - RNA, 21 nt, Human
ggaccaagucuggccuauauu

SEQ ID NO: 333983 - RNA, 21 nt, Human
ggaccaagucuggccuauauu

SEQ ID NO: 333984 - RNA, 18 nt, Human
ggaguccuguucuggguc

SEQ ID NO: 333985 - RNA, 18 nt, Human
ggagugguucugagacag

SEQ ID NO: 333986 - RNA, 22 nt, Human
ggcacacaugacugagugcacg

SEQ ID NO: 333987 - RNA, 21 nt, Human
ggccagacacaguggcucaca

SEQ ID NO: 333988 - RNA, 21 nt, Human
ggccagacacaguggcucaca

SEQ ID NO: 333989 - RNA, 21 nt, Human
ggcuaaugugucagaggucug

SEQ ID NO: 333990 - RNA, 21 nt, Human
ggcuaaugugucagaggucug

SEQ ID NO: 333991 - RNA, 21 nt, Human
ggcuaaugugucagaggucug

SEQ ID NO: 333992 - RNA, 22 nt, Human
ggcugggucuggaaggggaggu

SEQ ID NO: 333993 - RNA, 22 nt, Human
ggcugggucuggaaggggaggu

SEQ ID NO: 333994 - RNA, 22 nt, Human
ggcugggucuggaaggggaggu

SEQ ID NO: 333995 - RNA, 26 nt, Human
gggaaagagagcaaguugaagaggac

SEQ ID NO: 333996 - RNA, 19 nt, Human
gggaagagaucuuagaugg

SEQ ID NO: 333997 - RNA, 18 nt, Human
gggaagccucacaagccg

SEQ ID NO: 333998 - RNA, 18 nt, Human
gggaagccucacaagccg

SEQ ID NO: 333999 - RNA, 18 nt, Human
gggaagccucacaagccg

SEQ ID NO: 334000 - RNA, 18 nt, Human
gggaagccucacaagccg

SEQ ID NO: 334001 - RNA, 19 nt, Human
gggaaguagaaacaguugc

SEQ ID NO: 334002 - RNA, 19 nt, Human
gggaaguagaaacaguugc

SEQ ID NO: 334003 - RNA, 19 nt, Human
gggaaguagaaacaguugc

SEQ ID NO: 334004 - RNA, 19 nt, Human
gggaaguagaaacaguugc

SEQ ID NO: 334005 - RNA, 19 nt, Human
gggcaggggugagaauuac

SEQ ID NO: 334006 - RNA, 24 nt, Human
gggugagaauuaccuuccacgcug

SEQ ID NO: 334007 - RNA, 24 nt, Human
ggugcugucugugcacucgcagua

SEQ ID NO: 334008 - RNA, 22 nt, Human
uaaauagugggaagccucacaa

SEQ ID NO: 334009 - RNA, 22 nt, Human
uaaauagugggaagccucacaa

SEQ ID NO: 334010 - RNA, 22 nt, Human
uaaauagugggaagccucacaa

SEQ ID NO: 334011 - RNA, 22 nt, Human
uaaauagugggaagccucacaa

SEQ ID NO: 334012 - RNA, 19 nt, Human
uaaaugaagauuguagccu

SEQ ID NO: 334013 - RNA, 19 nt, Human
uaaaugaagauuguagccu

SEQ ID NO: 334014 - RNA, 19 nt, Human
uaaaugaagauuguagccu

SEQ ID NO: 334015 - RNA, 19 nt, Human
uaaaugaagauuguagccu

SEQ ID NO: 334016 - RNA, 21 nt, Human
uacuagagugauggacaagcu

SEQ ID NO: 334017 - RNA, 21 nt, Human
uacuagagugauggacaagcu

SEQ ID NO: 334018 - RNA, 21 nt, Human
uacuagagugauggacaagcu

SEQ ID NO: 334019 - RNA, 21 nt, Human
uacuagagugauggacaagcu

SEQ ID NO: 334020 - RNA, 21 nt, Human
uaggaaaaaaugucagucuug

SEQ ID NO: 334021 - RNA, 21 nt, Human
uauguguaugaggcauauaca

SEQ ID NO: 334022 - RNA, 21 nt, Human
uauguguaugaggcauauaca

SEQ ID NO: 334023 - RNA, 21 nt, Human
uauguguaugaggcauauaca

SEQ ID NO: 334024 - RNA, 21 nt, Human
uauguguaugaggcauauaca

SEQ ID NO: 334025 - RNA, 23 nt, Human
uauguguaugaggcauauacacg

SEQ ID NO: 334026 - RNA, 23 nt, Human
uauguguaugaggcauauacacg

SEQ ID NO: 334027 - RNA, 23 nt, Human
uauguguaugaggcauauacacg

SEQ ID NO: 334028 - RNA, 23 nt, Human
uauguguaugaggcauauacacg

SEQ ID NO: 334029 - RNA, 20 nt, Human
ucaaaaaaaaaaaaaaaaaa

SEQ ID NO: 334030 - RNA, 22 nt, Human
ucaaaaaaaaaaaaaaaaaaaa

SEQ ID NO: 334031 - RNA, 22 nt, Human
ucaaaaaaaaaaaaaaaaaaaa

SEQ ID NO: 334032 - RNA, 22 nt, Human
ucaaaaaaaaaaaaaaaaaaaa

SEQ ID NO: 334033 - RNA, 23 nt, Human
ucaaaaaaaaaaaaaaaaaaaaa

SEQ ID NO: 334034 - RNA, 23 nt, Human
ucaaaaaaaaaaaaaaaaaaaaa

SEQ ID NO: 334035 - RNA, 23 nt, Human
ucaaaaaaaaaaaaaaaaaaaaa

SEQ ID NO: 334036 - RNA, 23 nt, Human
ucaaaaaaaaaaaaaaaaaaaaa

SEQ ID NO: 334037 - RNA, 18 nt, Human
ucaagagucuaagcauuu

SEQ ID NO: 334038 - RNA, 18 nt, Human
ucaagagucuaagcauuu

SEQ ID NO: 334039 - RNA, 20 nt, Human
ucagcccgucugucaccgcc

SEQ ID NO: 334040 - RNA, 20 nt, Human
ucagcccgucugucaccgcc

SEQ ID NO: 334041 - RNA, 18 nt, Human
ucagucuugaaacaaugc

SEQ ID NO: 334042 - RNA, 18 nt, Human
ucagucuugaaacaaugc

SEQ ID NO: 334043 - RNA, 18 nt, Human
ucagucuugaaacaaugc

SEQ ID NO: 334044 - RNA, 18 nt, Human
ucagucuugaaacaaugc

SEQ ID NO: 334045 - RNA, 19 nt, Human
ucagucuugaaacaaugca

SEQ ID NO: 334046 - RNA, 19 nt, Human
ucagucuugaaacaaugca

SEQ ID NO: 334047 - RNA, 19 nt, Human
ucagucuugaaacaaugca

SEQ ID NO: 334048 - RNA, 19 nt, Human
ucagucuugaaacaaugca

SEQ ID NO: 334049 - RNA, 20 nt, Human
uccacagugcuuaauguggg

SEQ ID NO: 334050 - RNA, 20 nt, Human
uccacagugcuuaauguggg

SEQ ID NO: 334051 - RNA, 20 nt, Human
uccacagugcuuaauguggg

SEQ ID NO: 334052 - RNA, 20 nt, Human
uccacagugcuuaauguggg

SEQ ID NO: 334053 - RNA, 22 nt, Human
uccacguucagacuuggguccc

SEQ ID NO: 334054 - RNA, 22 nt, Human
uccacguucagacuuggguccc

SEQ ID NO: 334055 - RNA, 22 nt, Human
uccacguucagacuuggguccc

SEQ ID NO: 334056 - RNA, 22 nt, Human
uccacguucagacuuggguccc

SEQ ID NO: 334057 - RNA, 21 nt, Human
ucccaaaacuccugagggcuc

SEQ ID NO: 334058 - RNA, 18 nt, Human
ucccggaacugcugcugc

SEQ ID NO: 334059 - RNA, 18 nt, Human
ucccggaacugcugcugc

SEQ ID NO: 334060 - RNA, 18 nt, Human
ucccggaacugcugcugc

SEQ ID NO: 334061 - RNA, 19 nt, Human
uccuuccgggcagcagguc

SEQ ID NO: 334062 - RNA, 22 nt, Human
ucuagacgagggcuugaccaca

SEQ ID NO: 334063 - RNA, 22 nt, Human
ucuagacgagggcuugaccaca

SEQ ID NO: 334064 - RNA, 22 nt, Human
ucuagacgagggcuugaccaca

SEQ ID NO: 334065 - RNA, 18 nt, Human
ucucaaaaaaaaaaaaaa

SEQ ID NO: 334066 - RNA, 18 nt, Human
ucucaaaaaaaaaaaaaa

SEQ ID NO: 334067 - RNA, 18 nt, Human
ucucaaaaaaaaaaaaaa

SEQ ID NO: 334068 - RNA, 18 nt, Human
ucucaaaaaaaaaaaaaa

SEQ ID NO: 334069 - RNA, 19 nt, Human
ucucaaaaaugccuuuucu

SEQ ID NO: 334070 - RNA, 19 nt, Human
ucucaaaaaugccuuuucu

SEQ ID NO: 334071 - RNA, 19 nt, Human
ucucaaaaaugccuuuucu

SEQ ID NO: 334072 - RNA, 19 nt, Human
ucucaaaaaugccuuuucu

SEQ ID NO: 334073 - RNA, 24 nt, Human
ucuggccagacacaguggcucaca

SEQ ID NO: 334074 - RNA, 24 nt, Human
ucuggccagacacaguggcucaca

SEQ ID NO: 334075 - RNA, 23 nt, Human
ugaaacagaaacauugaaaaaau

SEQ ID NO: 334076 - RNA, 21 nt, Human
ugaaaugcucugagaucagaa

SEQ ID NO: 334077 - RNA, 21 nt, Human
ugaaaugcucugagaucagaa

SEQ ID NO: 334078 - RNA, 21 nt, Human
ugaaaugcucugagaucagaa

SEQ ID NO: 334079 - RNA, 21 nt, Human
ugaaaugcucugagaucagaa

SEQ ID NO: 334080 - RNA, 22 nt, Human
ugacaagucgcaaagcaccagg

SEQ ID NO: 334081 - RNA, 22 nt, Human
ugacaagucgcaaagcaccagg

SEQ ID NO: 334082 - RNA, 22 nt, Human
ugacaagucgcaaagcaccagg

SEQ ID NO: 334083 - RNA, 22 nt, Human
ugacaagucgcaaagcaccagg

SEQ ID NO: 334084 - RNA, 20 nt, Human
ugacagaguccaauuaugug

SEQ ID NO: 334085 - RNA, 20 nt, Human
ugacagaguccaauuaugug

SEQ ID NO: 334086 - RNA, 23 nt, Human
ugaccaaaaaguaguuuuccaaa

SEQ ID NO: 334087 - RNA, 23 nt, Human
ugaccaaaaaguaguuuuccaaa

SEQ ID NO: 334088 - RNA, 23 nt, Human
ugaccaaaaaguaguuuuccaaa

SEQ ID NO: 334089 - RNA, 23 nt, Human
ugaccaaaaaguaguuuuccaaa

SEQ ID NO: 334090 - RNA, 19 nt, Human
ugacgugaugccagaagug

SEQ ID NO: 334091 - RNA, 19 nt, Human
ugacgugaugccagaagug

SEQ ID NO: 334092 - RNA, 19 nt, Human
ugacgugaugccagaagug

SEQ ID NO: 334093 - RNA, 19 nt, Human
ugacgugaugccagaagug

SEQ ID NO: 334094 - RNA, 23 nt, Human
ugagcacuaugaaaagccaauuu

SEQ ID NO: 334095 - RNA, 23 nt, Human
ugagcacuaugaaaagccaauuu

SEQ ID NO: 334096 - RNA, 23 nt, Human
ugagcacuaugaaaagccaauuu

SEQ ID NO: 334097 - RNA, 23 nt, Human
ugagcacuaugaaaagccaauuu

SEQ ID NO: 334098 - RNA, 24 nt, Human
ugauacaaaguagugaaaagccuu

SEQ ID NO: 334099 - RNA, 24 nt, Human
ugauacaaaguagugaaaagccuu

SEQ ID NO: 334100 - RNA, 24 nt, Human
ugcaaaacaacugaauguagacaa

SEQ ID NO: 334101 - RNA, 24 nt, Human
ugcaaaacaacugaauguagacaa

SEQ ID NO: 334102 - RNA, 25 nt, Human
ugcaaaacaauucugguuucaagca

SEQ ID NO: 334103 - RNA, 25 nt, Human
ugcaaaacaauucugguuucaagca

SEQ ID NO: 334104 - RNA, 25 nt, Human
ugcaaaacaauucugguuucaagca

SEQ ID NO: 334105 - RNA, 25 nt, Human
ugcaaaacaauucugguuucaagca

SEQ ID NO: 334106 - RNA, 19 nt, Human
ugcacagacucccacguag

SEQ ID NO: 334107 - RNA, 23 nt, Human
ugcuuggauuuuugaaccaugug

SEQ ID NO: 334108 - RNA, 20 nt, Human
uggaggccgccggacgcgug

SEQ ID NO: 334109 - RNA, 24 nt, Human
uggccagacacaguggcucacacc

SEQ ID NO: 334110 - RNA, 24 nt, Human
uggccagacacaguggcucacacc

SEQ ID NO: 334111 - RNA, 24 nt, Human
uggccagacacaguggcucacacc

SEQ ID NO: 334112 - RNA, 24 nt, Human
uggccagacacaguggcucacacc

SEQ ID NO: 334113 - RNA, 20 nt, Human
uggcucacaccaguaauccc

SEQ ID NO: 334114 - RNA, 20 nt, Human
uggcucacaccaguaauccc

SEQ ID NO: 334115 - RNA, 22 nt, Human
ugggcccaagagguuguggaga

SEQ ID NO: 334116 - RNA, 22 nt, Human
ugggcccaagagguuguggaga

SEQ ID NO: 334117 - RNA, 26 nt, Human
ugguugaccugcgccucgggcagcgc

SEQ ID NO: 334118 - RNA, 18 nt, Human
uguagccuggauugauac

SEQ ID NO: 334119 - RNA, 18 nt, Human
uguagccuggauugauac

SEQ ID NO: 334120 - RNA, 25 nt, Human
ugucagaggucugggcugggucugc

SEQ ID NO: 334121 - RNA, 25 nt, Human
ugucagaggucugggcugggucugc

SEQ ID NO: 334122 - RNA, 25 nt, Human
ugucagaggucugggcugggucugc

SEQ ID NO: 334123 - RNA, 18 nt, Human
uguccagaauacaguuuc

SEQ ID NO: 334124 - RNA, 18 nt, Human
uguccagaauacaguuuc

SEQ ID NO: 334125 - RNA, 21 nt, Human
uguuguaucuugccuccucca

SEQ ID NO: 334126 - RNA, 21 nt, Human
uguuguaucuugccuccucca

SEQ ID NO: 334127 - RNA, 21 nt, Human
uguuguaucuugccuccucca

SEQ ID NO: 334128 - RNA, 23 nt, Human
uuacugauuaauucuugagucac

SEQ ID NO: 334129 - RNA, 23 nt, Human
uuacugauuaauucuugagucac

SEQ ID NO: 334130 - RNA, 21 nt, Human
uuagacucccagccccgcgcu

SEQ ID NO: 334131 - RNA, 20 nt, Human
uucaaaaaaugcaaaacaau

SEQ ID NO: 334132 - RNA, 20 nt, Human
uucaaaaaaugcaaaacaau

SEQ ID NO: 334133 - RNA, 20 nt, Human
uucaaaaaaugcaaaacaau

SEQ ID NO: 334134 - RNA, 20 nt, Human
uucaaaaaaugcaaaacaau

SEQ ID NO: 334135 - RNA, 21 nt, Human
uucaaaaaaugcaaaacaauu

SEQ ID NO: 334136 - RNA, 21 nt, Human
uucaaaaaaugcaaaacaauu

SEQ ID NO: 334137 - RNA, 21 nt, Human
uucaaaaaaugcaaaacaauu

SEQ ID NO: 334138 - RNA, 21 nt, Human
uucaaaaaaugcaaaacaauu

SEQ ID NO: 334139 - RNA, 24 nt, Human
uucagcccgucugucaccgccucc

SEQ ID NO: 334140 - RNA, 24 nt, Human
uucagcccgucugucaccgccucc

SEQ ID NO: 334141 - RNA, 24 nt, Human
uucaugcacaaaauuauguguaug

SEQ ID NO: 334142 - RNA, 24 nt, Human
uucaugcacaaaauuauguguaug

SEQ ID NO: 334143 - RNA, 24 nt, Human
uucaugcacaaaauuauguguaug

SEQ ID NO: 334144 - RNA, 18 nt, Human
uucccaguuuccuguugu

SEQ ID NO: 334145 - RNA, 18 nt, Human
uucccaguuuccuguugu

SEQ ID NO: 334146 - RNA, 18 nt, Human
uucccaguuuccuguugu

SEQ ID NO: 334147 - RNA, 18 nt, Human
uucuccuaccacccacug

SEQ ID NO: 334148 - RNA, 23 nt, Human
uugggcccaagagguuguggaga

SEQ ID NO: 334149 - RNA, 23 nt, Human
uugggcccaagagguuguggaga

SEQ ID NO: 334150 - RNA, 21 nt, Human
uuguaaggcagaggugggagu

SEQ ID NO: 334151 - RNA, 21 nt, Human
uuguaaggcagaggugggagu

SEQ ID NO: 334152 - RNA, 21 nt, Human
uuguaaggcagaggugggagu

SEQ ID NO: 334153 - RNA, 21 nt, Human
uuguaaggcagaggugggagu

SEQ ID NO: 334154 - RNA, 23 nt, Human
uuucucaaaaaugccuuuucugg

SEQ ID NO: 334155 - RNA, 23 nt, Human
uuucucaaaaaugccuuuucugg

SEQ ID NO: 334156 - RNA, 23 nt, Human
uuucucaaaaaugccuuuucugg

SEQ ID NO: 334157 - RNA, 23 nt, Human
uuucucaaaaaugccuuuucugg

SEQ ID NO: 334158 - RNA, 23 nt, Human
uuuuguaaggcagaggugggagu

SEQ ID NO: 334159 - RNA, 20 nt, Human
aaaacaccugccacugcuga

SEQ ID NO: 334160 - RNA, 23 nt, Human
aaacaccugccacugcugaaguc

SEQ ID NO: 334161 - RNA, 18 nt, Human
aagcagaagguucucucg

SEQ ID NO: 334162 - RNA, 18 nt, Human
aagcagaucaugaguaac

SEQ ID NO: 334163 - RNA, 19 nt, Human
aagcagaucaugaguaacc

SEQ ID NO: 334164 - RNA, 25 nt, Human
aagcauauccaugacgcuuacauac

SEQ ID NO: 334165 - RNA, 19 nt, Human
aagcuuccaggugugacaa

SEQ ID NO: 334166 - RNA, 21 nt, Human
aauacauugcaaugucuuccc

SEQ ID NO: 334167 - RNA, 18 nt, Human
aaugacacauuuucuguu

SEQ ID NO: 334168 - RNA, 22 nt, Human
aauucuauuaauuuucaaaaag

SEQ ID NO: 334169 - RNA, 22 nt, Human
aauucuauuaauuuucaaaaag

SEQ ID NO: 334170 - RNA, 18 nt, Human
acuguuaaagccaucaac

SEQ ID NO: 334171 - RNA, 24 nt, Human
agcaagaauagcuccacaucugcc

SEQ ID NO: 334172 - RNA, 21 nt, Human
aggaaacacacuuagcaagcc

SEQ ID NO: 334173 - RNA, 19 nt, Human
aggagaggguuguagucag

SEQ ID NO: 334174 - RNA, 21 nt, Human
aggcagaaccugacaaccuga

SEQ ID NO: 334175 - RNA, 21 nt, Human
aggcaggggugauugcacagu

SEQ ID NO: 334176 - RNA, 19 nt, Human
aggcuaaugagggcuguag

SEQ ID NO: 334177 - RNA, 18 nt, Human
augauauaagcacaucuu

SEQ ID NO: 334178 - RNA, 18 nt, Human
augauauaagcacaucuu

SEQ ID NO: 334179 - RNA, 19 nt, Human
augggucauggcgugguuu

SEQ ID NO: 334180 - RNA, 19 nt, Human
auucugucuauuuuccuuu

SEQ ID NO: 334181 - RNA, 23 nt, Human
caauaagaacagcaucaccuucc

SEQ ID NO: 334182 - RNA, 21 nt, Human
cacaaguugagcuacauuccu

SEQ ID NO: 334183 - RNA, 18 nt, Human
cacugcugaagucaucug

SEQ ID NO: 334184 - RNA, 20 nt, Human
cacugcugaagucaucugga

SEQ ID NO: 334185 - RNA, 24 nt, Human
cagaaccugacaaccugagaauuu

SEQ ID NO: 334186 - RNA, 18 nt, Human
cagauuucucuucuuguu

SEQ ID NO: 334187 - RNA, 22 nt, Human
caggguccagaugagcgaaaua

SEQ ID NO: 334188 - RNA, 22 nt, Human
caguaaauaucuugauccuuuc

SEQ ID NO: 334189 - RNA, 21 nt, Human
cauauccaugacgcuuacaua

SEQ ID NO: 334190 - RNA, 18 nt, Human
caucaacaaucugcugcc

SEQ ID NO: 334191 - RNA, 21 nt, Human
cauuucauaacugaucaacag

SEQ ID NO: 334192 - RNA, 23 nt, Human
cccacaaagaccuugcuuacuga

SEQ ID NO: 334193 - RNA, 22 nt, Human
ccugacacugcaggguccagau

SEQ ID NO: 334194 - RNA, 21 nt, Human
ccugacuccuuuucaguaaac

SEQ ID NO: 334195 - RNA, 24 nt, Human
cgacaacugccccacaaagaccuu

SEQ ID NO: 334196 - RNA, 22 nt, Human
cugccacugcugaagucaucug

SEQ ID NO: 334197 - RNA, 21 nt, Human
cuggcccugcaaagaaguccu

SEQ ID NO: 334198 - RNA, 19 nt, Human
cuguagugcuccuggucgg

SEQ ID NO: 334199 - RNA, 25 nt, Human
cuucuacugaaaacugaauauguuc

SEQ ID NO: 334200 - RNA, 24 nt, Human
gaaacaguucuuauugaauaccca

SEQ ID NO: 334201 - RNA, 19 nt, Human
gaccuugcuuacugaucug

SEQ ID NO: 334202 - RNA, 23 nt, Human
gagauagcaguacuuccuccucc

SEQ ID NO: 334203 - RNA, 21 nt, Human
gauuacacccaugacuucuau

SEQ ID NO: 334204 - RNA, 20 nt, Human
gcaaaagacaacauucucua

SEQ ID NO: 334205 - RNA, 25 nt, Human
gcaaugucuucccuaaacccauuuc

SEQ ID NO: 334206 - RNA, 25 nt, Human
gccuuuguauagacucuuuucuuca

SEQ ID NO: 334207 - RNA, 24 nt, Human
ggauaaccgcuaagagcuuggaca

SEQ ID NO: 334208 - RNA, 19 nt, Human
gguuauauucugaaaaaug

SEQ ID NO: 334209 - RNA, 21 nt, Human
uaaacccauuucaucagcaag

SEQ ID NO: 334210 - RNA, 20 nt, Human
uaaagcucaaucuguagugc

SEQ ID NO: 334211 - RNA, 20 nt, Human
uaacaaaaaaauaaaaaaag

SEQ ID NO: 334212 - RNA, 20 nt, Human
uaagaacagcaucaccuucc

SEQ ID NO: 334213 - RNA, 19 nt, Human
uaaguucuucuacugaaaa

SEQ ID NO: 334214 - RNA, 21 nt, Human
uauaaccaaugccucuuccaa

SEQ ID NO: 334215 - RNA, 23 nt, Human
uauagaguugaacaaaaggcagg

SEQ ID NO: 334216 - RNA, 21 nt, Human
uaucagauuucucuucuuguu

SEQ ID NO: 334217 - RNA, 19 nt, Human
ucagaagcagaagguucuc

SEQ ID NO: 334218 - RNA, 22 nt, Human
ucaguggcuggauuccaaucaa

SEQ ID NO: 334219 - RNA, 21 nt, Human
ucauagagaauuaagugagau

SEQ ID NO: 334220 - RNA, 23 nt, Human
ucccuaaacccauuucaucagca

SEQ ID NO: 334221 - RNA, 21 nt, Human
uccuggauuuacaaaaucaau

SEQ ID NO: 334222 - RNA, 23 nt, Human
ucgacaacugccccacaaagacc

SEQ ID NO: 334223 - RNA, 24 nt, Human
ucucucgauaaaaugauggguucu

SEQ ID NO: 334224 - RNA, 24 nt, Human
ucugaccaucucuccauacucuag

SEQ ID NO: 334225 - RNA, 19 nt, Human
ucuucuacugaaaacugaa

SEQ ID NO: 334226 - RNA, 28 nt, Human
ucuucuuucuccuaacuccuuuucuucc

SEQ ID NO: 334227 - RNA, 22 nt, Human
ucuuggguucuucuaaggauaa

SEQ ID NO: 334228 - RNA, 20 nt, Human
ucuuuucuucauuuuuauca

SEQ ID NO: 334229 - RNA, 21 nt, Human
ugaaaggguuagagaaacauu

SEQ ID NO: 334230 - RNA, 23 nt, Human
ugagguuaaguccuacaccacca

SEQ ID NO: 334231 - RNA, 20 nt, Human
ugcaaagaaguccuucuggu

SEQ ID NO: 334232 - RNA, 25 nt, Human
ugcuucagcugggacauagaaagag

SEQ ID NO: 334233 - RNA, 18 nt, Human
uggcacuguucuucaaac

SEQ ID NO: 334234 - RNA, 26 nt, Human
uguuauucuuucaagaaaaggaucug

SEQ ID NO: 334235 - RNA, 22 nt, Human
uguuuuuucuuugaaggcuuac

SEQ ID NO: 334236 - RNA, 19 nt, Human
uuaaacacuuaauauuuac

SEQ ID NO: 334237 - RNA, 19 nt, Human
uuaaacacuuaauauuuac

SEQ ID NO: 334238 - RNA, 19 nt, Human
uuauguuuuuucuuugaag

SEQ ID NO: 334239 - RNA, 21 nt, Human
uucauuuuuaucacaaguuga

SEQ ID NO: 334240 - RNA, 22 nt, Human
uuccuuugaacuugguuuacaa

SEQ ID NO: 334241 - RNA, 19 nt, Human
uucuaaggauaaagagucc

SEQ ID NO: 334242 - RNA, 23 nt, Human
uugaacuuaacaaaaaaauaaaa

SEQ ID NO: 334243 - RNA, 23 nt, Human
uuggacaacaccuguaguuuucc

SEQ ID NO: 334244 - RNA, 22 nt, Human
uuguagucagcaggaaacacac

SEQ ID NO: 334245 - RNA, 22 nt, Human
uuuacaauaagaacagcaucac

SEQ ID NO: 334246 - RNA, 18 nt, Human
uuuccugacuccuuuuca

SEQ ID NO: 334247 - RNA, 21 nt, Human
uuuuuuuuuuuuuuuuuacaa

SEQ ID NO: 334248 - RNA, 23 nt, Human
uuuuuuuuuuuuuuuuuacaaug

SEQ ID NO: 334249 - RNA, 22 nt, Human
aaaccaggaucagacucaggga

SEQ ID NO: 334250 - RNA, 27 nt, Human
aacugguguuuggaaccaaacugugag

SEQ ID NO: 334251 - RNA, 23 nt, Human
aacugugagaguggccgucccca

SEQ ID NO: 334252 - RNA, 18 nt, Human
aagagaccaagcagagau

SEQ ID NO: 334253 - RNA, 23 nt, Human
aagagaccaagcagagauuagug

SEQ ID NO: 334254 - RNA, 18 nt, Human
aauuaaagagggggcaug

SEQ ID NO: 334255 - RNA, 23 nt, Human
acagggcccuguggagcaaggag

SEQ ID NO: 334256 - RNA, 25 nt, Human
accccagcaccucucucucaaccuu

SEQ ID NO: 334257 - RNA, 19 nt, Human
agaggaagagaccaagcag

SEQ ID NO: 334258 - RNA, 22 nt, Human
aggccaaagaggaagagaccaa

SEQ ID NO: 334259 - RNA, 18 nt, Human
agggcuggagguggaaac

SEQ ID NO: 334260 - RNA, 23 nt, Human
caaggagccccuuuucccuaucu

SEQ ID NO: 334261 - RNA, 21 nt, Human
caaguacccaugagccaaagg

SEQ ID NO: 334262 - RNA, 19 nt, Human
cacccagaccagcugguua

SEQ ID NO: 334263 - RNA, 20 nt, Human
caccucucucucaaccuucc

SEQ ID NO: 334264 - RNA, 23 nt, Human
caggaggggcugaaaagagcgac

SEQ ID NO: 334265 - RNA, 23 nt, Human
caggaggggcugaaaagagcugg

SEQ ID NO: 334266 - RNA, 19 nt, Human
caggaucagacucagggag

SEQ ID NO: 334267 - RNA, 25 nt, Human
cagguuaggaggggaauaccaggag

SEQ ID NO: 334268 - RNA, 22 nt, Human
ccaggaggggcugaaaagagcg

SEQ ID NO: 334269 - RNA, 18 nt, Human
ccccaauaagccgagacg

SEQ ID NO: 334270 - RNA, 22 nt, Human
ccccagcaccucucucucaacc

SEQ ID NO: 334271 - RNA, 19 nt, Human
cccuguggagcaaggagcc

SEQ ID NO: 334272 - RNA, 24 nt, Human
cccuuuucccuaucuccuuccucu

SEQ ID NO: 334273 - RNA, 19 nt, Human
cgagacgagagauuaggcc

SEQ ID NO: 334274 - RNA, 19 nt, Human
cgcagaccccagcaccucu

SEQ ID NO: 334275 - RNA, 20 nt, Human
cgcggcggggcgggguggga

SEQ ID NO: 334276 - RNA, 23 nt, Human
cggggcggggugggauugggggu

SEQ ID NO: 334277 - RNA, 21 nt, Human
cugguguuuggaaccaaacug

SEQ ID NO: 334278 - RNA, 25 nt, Human
gcccggguggggagggcgagucugg

SEQ ID NO: 334279 - RNA, 24 nt, Human
ggaggggaauaccaggaggggcug

SEQ ID NO: 334280 - RNA, 23 nt, Human
ggcccggguggggagggcgaguc

SEQ ID NO: 334281 - RNA, 20 nt, Human
ggcuggagguggaaaccagg

SEQ ID NO: 334282 - RNA, 19 nt, Human
gggaauaccaggaggggcc

SEQ ID NO: 334283 - RNA, 24 nt, Human
gggaggaggcagguggagucccag

SEQ ID NO: 334284 - RNA, 20 nt, Human
gggcggggugggauuggggg

SEQ ID NO: 334285 - RNA, 19 nt, Human
gggcugaaaagagcgacag

SEQ ID NO: 334286 - RNA, 20 nt, Human
ggggagggcgagucuggaga

SEQ ID NO: 334287 - RNA, 22 nt, Human
gggugggauuggggguggguaa

SEQ ID NO: 334288 - RNA, 22 nt, Human
gguaaucacuggccaggagaga

SEQ ID NO: 334289 - RNA, 21 nt, Human
ggugaaaguccgaggcccggg

SEQ ID NO: 334290 - RNA, 19 nt, Human
guggagcaaggagccccuu

SEQ ID NO: 334291 - RNA, 22 nt, Human
uaaaaaacccagguuaggaggg

SEQ ID NO: 334292 - RNA, 18 nt, Human
uaaagagggggcauggau

SEQ ID NO: 334293 - RNA, 21 nt, Human
uaagagcuacacccagaccag

SEQ ID NO: 334294 - RNA, 22 nt, Human
uaagccgagacgagagauuagg

SEQ ID NO: 334295 - RNA, 24 nt, Human
uaagccgagacgagagauuaggcc

SEQ ID NO: 334296 - RNA, 26 nt, Human
uaagccgagacgagagauuaggccaa

SEQ ID NO: 334297 - RNA, 23 nt, Human
uaguugcgcggcggggcggggug

SEQ ID NO: 334298 - RNA, 22 nt, Human
uaucuccuuccucuaagagcua

SEQ ID NO: 334299 - RNA, 30 nt, Human
ucaugcagcccuucuugaugauuuucuccu

SEQ ID NO: 334300 - RNA, 21 nt, Human
uccccaauaagccgagacgag

SEQ ID NO: 334301 - RNA, 21 nt, Human
ucucaaccuuccuguucccaa

SEQ ID NO: 334302 - RNA, 21 nt, Human
ucuggagaaaggaaauuuccc

SEQ ID NO: 334303 - RNA, 19 nt, Human
ugaaaagagcgacagagau

SEQ ID NO: 334304 - RNA, 19 nt, Human
ugaaaguccgaggcccggg

SEQ ID NO: 334305 - RNA, 19 nt, Human
ugauuuucucccagagaac

SEQ ID NO: 334306 - RNA, 18 nt, Human
uggagguggaaaccagga

SEQ ID NO: 334307 - RNA, 21 nt, Human
uggccaggagagagaagcugg

SEQ ID NO: 334308 - RNA, 22 nt, Human
ugggauuggggaggaggcaggu

SEQ ID NO: 334309 - RNA, 24 nt, Human
uggggaggaggcagguggaguccc

SEQ ID NO: 334310 - RNA, 24 nt, Human
uguggagcaaggagccccuuuucc

SEQ ID NO: 334311 - RNA, 18 nt, Human
uugcgcggcggggcgggg

SEQ ID NO: 334312 - RNA, 22 nt, Human
aaacagcucagcuccagcaagc

SEQ ID NO: 334313 - RNA, 23 nt, Human
aaacagcucagcuccagcaagcc

SEQ ID NO: 334314 - RNA, 18 nt, Human
agcagcaccuacuaugac

SEQ ID NO: 334315 - RNA, 22 nt, Human
agcccaccuuucugauccccag

SEQ ID NO: 334316 - RNA, 23 nt, Human
cagcaagcccaccuuucugaucc

SEQ ID NO: 334317 - RNA, 22 nt, Human
cagcagcaccuacuaugacauu

SEQ ID NO: 334318 - RNA, 21 nt, Human
cagccagggcaacccuagcca

SEQ ID NO: 334319 - RNA, 23 nt, Human
cagcgccaaagaguaucaggaaa

SEQ ID NO: 334320 - RNA, 18 nt, Human
cagcgcuccgccagcggc

SEQ ID NO: 334321 - RNA, 19 nt, Human
cagugaaacagcucagcuc

SEQ ID NO: 334322 - RNA, 20 nt, Human
ccagccuuggccagcuggag

SEQ ID NO: 334323 - RNA, 21 nt, Human
ccagcggccaacacugcccag

SEQ ID NO: 334324 - RNA, 18 nt, Human
cccaccuuucugaucccc

SEQ ID NO: 334325 - RNA, 22 nt, Human
ccccagccagggcaacccuagc

SEQ ID NO: 334326 - RNA, 27 nt, Human
ccccagccagggcaacccuagccacac

SEQ ID NO: 334327 - RNA, 18 nt, Human
ccccagggcugagagacc

SEQ ID NO: 334328 - RNA, 23 nt, Human
ccgcgcaccgccccugccggccc

SEQ ID NO: 334329 - RNA, 27 nt, Human
ccgggccccagccagggcaacccuagc

SEQ ID NO: 334330 - RNA, 20 nt, Human
cgaggcugcagcucagggca

SEQ ID NO: 334331 - RNA, 18 nt, Human
cggcaccgggccccagcc

SEQ ID NO: 334332 - RNA, 25 nt, Human
cggccaacacugcccagcucuccgc

SEQ ID NO: 334333 - RNA, 20 nt, Human
cucggcaccgggccccagcc

SEQ ID NO: 334334 - RNA, 20 nt, Human
cucggcaccgggccccagcc

SEQ ID NO: 334335 - RNA, 21 nt, Human
cugcaccugcggugacugucg

SEQ ID NO: 334336 - RNA, 25 nt, Human
cuuggccucagggcuggcagccgga

SEQ ID NO: 334337 - RNA, 21 nt, Human
gaccuccggguccgggguccc

SEQ ID NO: 334338 - RNA, 19 nt, Human
gagacccaguucugccacu

SEQ ID NO: 334339 - RNA, 20 nt, Human
gagggagacagguuuccagc

SEQ ID NO: 334340 - RNA, 20 nt, Human
ggggccugcgagaggcagug

SEQ ID NO: 334341 - RNA, 19 nt, Human
gucuccagccgugcuuggc

SEQ ID NO: 334342 - RNA, 20 nt, Human
uacuaugacauuuuccuuag

SEQ ID NO: 334343 - RNA, 21 nt, Human
uagaauuccaagucagcgcca

SEQ ID NO: 334344 - RNA, 21 nt, Human
ucaaagcuggauucucgccau

SEQ ID NO: 334345 - RNA, 21 nt, Human
ucccgcgcaccgccccugccg

SEQ ID NO: 334346 - RNA, 22 nt, Human
ucccgcgcaccgccccugccgg

SEQ ID NO: 334347 - RNA, 23 nt, Human
ucuaagacacugccuggcagcuc

SEQ ID NO: 334348 - RNA, 19 nt, Human
ucuccagccgugcuuggcc

SEQ ID NO: 334349 - RNA, 24 nt, Human
ucugccacuggcuggggccggggc

SEQ ID NO: 334350 - RNA, 19 nt, Human
ugaaacagcucagcuccag

SEQ ID NO: 334351 - RNA, 23 nt, Human
ugagggagacagguuuccagccu

SEQ ID NO: 334352 - RNA, 20 nt, Human
ugccccagcgcuccgccagc

SEQ ID NO: 334353 - RNA, 22 nt, Human
uggcagagaagcuggaucacca

SEQ ID NO: 334354 - RNA, 21 nt, Human
uggcagccggauccuggggca

SEQ ID NO: 334355 - RNA, 23 nt, Human
uggccucagggcuggcagccgga

SEQ ID NO: 334356 - RNA, 25 nt, Human
uggcuggggguuguggggggagcac

SEQ ID NO: 334357 - RNA, 23 nt, Human
ugggagucucggcaccgggcccc

SEQ ID NO: 334358 - RNA, 22 nt, Human
uggggcaacccaucuggucucc

SEQ ID NO: 334359 - RNA, 21 nt, Human
uggguacaggcuucagguucu

SEQ ID NO: 334360 - RNA, 24 nt, Human
uuccaagucagcgccaaagaguau

SEQ ID NO: 334361 - RNA, 19 nt, Human
uugggagucucggcaccgg

SEQ ID NO: 334362 - RNA, 27 nt, Human
uuuguauuuuucuuuucuuuuuuuaau

SEQ ID NO: 334363 - RNA, 24 nt, Human
aaaccaucccaaugcacuggacac

SEQ ID NO: 334364 - RNA, 18 nt, Human
acaugaaguuaaggcccu

SEQ ID NO: 334365 - RNA, 22 nt, Human
accuuagaagcugugaaaggag

SEQ ID NO: 334366 - RNA, 23 nt, Human
agcauggggaauguggggaggga

SEQ ID NO: 334367 - RNA, 20 nt, Human
agcuggggcugggccccugc

SEQ ID NO: 334368 - RNA, 20 nt, Human
caacagcuggggcugggccc

SEQ ID NO: 334369 - RNA, 23 nt, Human
caacagcuggggcugggccccug

SEQ ID NO: 334370 - RNA, 22 nt, Human
caccagcacugcaaauggcuuc

SEQ ID NO: 334371 - RNA, 21 nt, Human
cacucucugaagaaagucccg

SEQ ID NO: 334372 - RNA, 18 nt, Human
ccaacagcuggggcuggg

SEQ ID NO: 334373 - RNA, 23 nt, Human
cccaaagggauagaaaagaaggc

SEQ ID NO: 334374 - RNA, 20 nt, Human
ccccuaagaaaaguuccaua

SEQ ID NO: 334375 - RNA, 22 nt, Human
ccccuggcagccugaagacagg

SEQ ID NO: 334376 - RNA, 21 nt, Human
ccucuggagaaagggagcaga

SEQ ID NO: 334377 - RNA, 18 nt, Human
ccuggaagacaaaauuca

SEQ ID NO: 334378 - RNA, 20 nt, Human
cgcccgcuccuccuccccgc

SEQ ID NO: 334379 - RNA, 19 nt, Human
cuccuccccgcggcgggug

SEQ ID NO: 334380 - RNA, 20 nt, Human
cucgcccgcuccuccucccc

SEQ ID NO: 334381 - RNA, 18 nt, Human
cugcaaauggcuuccuuc

SEQ ID NO: 334382 - RNA, 18 nt, Human
cuggggcugggccccugc

SEQ ID NO: 334383 - RNA, 20 nt, Human
gaaaacauguguucugccuc

SEQ ID NO: 334384 - RNA, 24 nt, Human
gagcauggggaauguggggaggga

SEQ ID NO: 334385 - RNA, 20 nt, Human
gcagcuucucgcccgcuccu

SEQ ID NO: 334386 - RNA, 19 nt, Human
gcccugcggccccgcccca

SEQ ID NO: 334387 - RNA, 19 nt, Human
gcuggggcugggccccugc

SEQ ID NO: 334388 - RNA, 21 nt, Human
ggaauguggggagggagcagg

SEQ ID NO: 334389 - RNA, 20 nt, Human
gggagcagaaaaguggugcc

SEQ ID NO: 334390 - RNA, 21 nt, Human
uaaaacccaaaucaucaagaa

SEQ ID NO: 334391 - RNA, 24 nt, Human
uaaaacccaaaucaucaagaaaac

SEQ ID NO: 334392 - RNA, 22 nt, Human
uaaaauaacauaauugagggac

SEQ ID NO: 334393 - RNA, 20 nt, Human
uaaacaauucuuaaaccuga

SEQ ID NO: 334394 - RNA, 24 nt, Human
uagaagguccuuagcagcagcuuc

SEQ ID NO: 334395 - RNA, 24 nt, Human
uagagaaacaaggcuggcccugcg

SEQ ID NO: 334396 - RNA, 21 nt, Human
ucccugagagggcugagaugc

SEQ ID NO: 334397 - RNA, 20 nt, Human
uccugggcuguuuggugccu

SEQ ID NO: 334398 - RNA, 22 nt, Human
ucgcccgcuccuccuccccgcg

SEQ ID NO: 334399 - RNA, 25 nt, Human
ucuccacaucagggcuggacugccu

SEQ ID NO: 334400 - RNA, 20 nt, Human
ugaaaggaggacgugucccc

SEQ ID NO: 334401 - RNA, 20 nt, Human
ugacaugcauuccuccagaa

SEQ ID NO: 334402 - RNA, 21 nt, Human
ugacuagagaaacaaggcugu

SEQ ID NO: 334403 - RNA, 23 nt, Human
ugagggagccaggccgccccaac

SEQ ID NO: 334404 - RNA, 20 nt, Human
ugagggagcgggaggcgguc

SEQ ID NO: 334405 - RNA, 23 nt, Human
ugagggagcgggaggcggucaca

SEQ ID NO: 334406 - RNA, 21 nt, Human
ugcacuggacaccuuagaagc

SEQ ID NO: 334407 - RNA, 18 nt, Human
uggaagacaaaauucagc

SEQ ID NO: 334408 - RNA, 19 nt, Human
uguuuguuuguuuguuaga

SEQ ID NO: 334409 - RNA, 21 nt, Human
uuaaggcccugugagcagucu

SEQ ID NO: 334410 - RNA, 24 nt, Human
uuccuccagaagcugauuuccaaa

SEQ ID NO: 334411 - RNA, 19 nt, Human
uugagcauggggaaugugg

SEQ ID NO: 334412 - RNA, 18 nt, Human
uuggccgagugccuugcc

SEQ ID NO: 334413 - RNA, 25 nt, Human
uuuguuagagaaacaaggcuggccc

SEQ ID NO: 334414 - RNA, 23 nt, Human
aaaaaaugaaaaccacaagacca

SEQ ID NO: 334415 - RNA, 24 nt, Human
aaaaauccaugacagcagaugacc

SEQ ID NO: 334416 - RNA, 23 nt, Human
aaaagagccagagcacacaaaug

SEQ ID NO: 334417 - RNA, 21 nt, Human
aaaauggcggacaauaaccau

SEQ ID NO: 334418 - RNA, 19 nt, Human
aaagccgcuuaccccugcc

SEQ ID NO: 334419 - RNA, 24 nt, Human
aaccacaagaccaauuucuggccu

SEQ ID NO: 334420 - RNA, 23 nt, Human
aagaggguuagggggcccuuugg

SEQ ID NO: 334421 - RNA, 22 nt, Human
aaucaaaaaccaccugcaucca

SEQ ID NO: 334422 - RNA, 21 nt, Human
aauccuaaaaaaauucugaua

SEQ ID NO: 334423 - RNA, 20 nt, Human
aaucugaggcaaaacuaaau

SEQ ID NO: 334424 - RNA, 22 nt, Human
acaaucacugaagacacacaca

SEQ ID NO: 334425 - RNA, 19 nt, Human
acucaauaccaaagagaag

SEQ ID NO: 334426 - RNA, 19 nt, Human
acuggucccugcaaugcac

SEQ ID NO: 334427 - RNA, 22 nt, Human
acuucacacauacacacacaaa

SEQ ID NO: 334428 - RNA, 23 nt, Human
agaaauggguaaaaaaucuauaa

SEQ ID NO: 334429 - RNA, 19 nt, Human
agacccacacucucaacca

SEQ ID NO: 334430 - RNA, 19 nt, Human
agauaacugauuuuuccug

SEQ ID NO: 334431 - RNA, 22 nt, Human
aggaagaaaaacuaauuaacac

SEQ ID NO: 334432 - RNA, 18 nt, Human
agggugcuaggagaagcc

SEQ ID NO: 334433 - RNA, 21 nt, Human
aguaaaaauaaagaaucauac

SEQ ID NO: 334434 - RNA, 21 nt, Human
aguaaagggugcuaggagaag

SEQ ID NO: 334435 - RNA, 23 nt, Human
aguaagggcaaaaaaccauaggc

SEQ ID NO: 334436 - RNA, 23 nt, Human
aguauuuauuaccccuaaaugac

SEQ ID NO: 334437 - RNA, 19 nt, Human
agugcaauucuacaaaaca

SEQ ID NO: 334438 - RNA, 19 nt, Human
agugugaaaacauuccaca

SEQ ID NO: 334439 - RNA, 21 nt, Human
auaguuccuacaguguuagaa

SEQ ID NO: 334440 - RNA, 19 nt, Human
aucaaaaugugaucugauu

SEQ ID NO: 334441 - RNA, 19 nt, Human
aucagcucaucaguuucua

SEQ ID NO: 334442 - RNA, 19 nt, Human
augcaacccagagggaaac

SEQ ID NO: 334443 - RNA, 20 nt, Human
augcagaagcucuaaauuug

SEQ ID NO: 334444 - RNA, 20 nt, Human
auuaagcaggaugaagggaa

SEQ ID NO: 334445 - RNA, 23 nt, Human
auugagagcacuuuguaaagguc

SEQ ID NO: 334446 - RNA, 19 nt, Human
auuggaaagguugugcuau

SEQ ID NO: 334447 - RNA, 25 nt, Human
auuuacaugacagcuccccaacaca

SEQ ID NO: 334448 - RNA, 19 nt, Human
caaaacaaaaaauaaucac

SEQ ID NO: 334449 - RNA, 23 nt, Human
caaaacaaaaaauaaucaccaaa

SEQ ID NO: 334450 - RNA, 19 nt, Human
caaaagagccagagcacac

SEQ ID NO: 334451 - RNA, 21 nt, Human
caaaucccagauuccuaagga

SEQ ID NO: 334452 - RNA, 23 nt, Human
caacaaaauggcggacaauaacc

SEQ ID NO: 334453 - RNA, 20 nt, Human
caacccagagggaaacucaa

SEQ ID NO: 334454 - RNA, 19 nt, Human
caagccaaguauuuauuac

SEQ ID NO: 334455 - RNA, 18 nt, Human
caaggaaaacugcugugu

SEQ ID NO: 334456 - RNA, 19 nt, Human
caaggaaaacugcuguguu

SEQ ID NO: 334457 - RNA, 19 nt, Human
caauugcaaaaaccaacuc

SEQ ID NO: 334458 - RNA, 25 nt, Human
cacauauuugcaaucaaaaaccacc

SEQ ID NO: 334459 - RNA, 19 nt, Human
cacuggucccugcaaugca

SEQ ID NO: 334460 - RNA, 21 nt, Human
cagcaacuggcaaaucccaga

SEQ ID NO: 334461 - RNA, 24 nt, Human
caguaaauaggaugauuaugugaa

SEQ ID NO: 334462 - RNA, 21 nt, Human
caucucugguccccugcaguu

SEQ ID NO: 334463 - RNA, 20 nt, Human
cauugcacuucugaaguccc

SEQ ID NO: 334464 - RNA, 18 nt, Human
ccaaauaacuggagccac

SEQ ID NO: 334465 - RNA, 18 nt, Human
ccagauguucccaggguu

SEQ ID NO: 334466 - RNA, 24 nt, Human
ccuaaacucugaagguuacaauag

SEQ ID NO: 334467 - RNA, 19 nt, Human
ccugcaaugcaccugagug

SEQ ID NO: 334468 - RNA, 20 nt, Human
cucuacauugccagcaacug

SEQ ID NO: 334469 - RNA, 21 nt, Human
cugauacuaccuuauaaacau

SEQ ID NO: 334470 - RNA, 18 nt, Human
cugcauauaaaaagcaag

SEQ ID NO: 334471 - RNA, 22 nt, Human
cuguagcaucuuacuccaaccu

SEQ ID NO: 334472 - RNA, 21 nt, Human
gagaagcccucaaugcaaccc

SEQ ID NO: 334473 - RNA, 22 nt, Human
gagcaaaucauuaaacccccau

SEQ ID NO: 334474 - RNA, 22 nt, Human
gcacuucugaagucccagauau

SEQ ID NO: 334475 - RNA, 20 nt, Human
gggauuauuggaaagguugu

SEQ ID NO: 334476 - RNA, 22 nt, Human
guaaaugcauugagagcacuuu

SEQ ID NO: 334477 - RNA, 18 nt, Human
uaaaaagcaaggaaaacu

SEQ ID NO: 334478 - RNA, 21 nt, Human
uaaaaagcaaggaaaacugcu

SEQ ID NO: 334479 - RNA, 26 nt, Human
uaaaauaagaaaauguaaaaugggua

SEQ ID NO: 334480 - RNA, 22 nt, Human
uaaauccauugcauccugguac

SEQ ID NO: 334481 - RNA, 19 nt, Human
uaagcaggaugaagggaaa

SEQ ID NO: 334482 - RNA, 23 nt, Human
uaaguaaacauauauuaucagaa

SEQ ID NO: 334483 - RNA, 19 nt, Human
uaaugcaagacccacacuc

SEQ ID NO: 334484 - RNA, 18 nt, Human
uacaagccucuguggcuu

SEQ ID NO: 334485 - RNA, 19 nt, Human
uacacaauucugaauccac

SEQ ID NO: 334486 - RNA, 22 nt, Human
uacagugccaccaauagagaaa

SEQ ID NO: 334487 - RNA, 19 nt, Human
uaccaaagagaaggcaaag

SEQ ID NO: 334488 - RNA, 22 nt, Human
ucaaaagagccagagcacacaa

SEQ ID NO: 334489 - RNA, 23 nt, Human
ucaaaagagccagagcacacaaa

SEQ ID NO: 334490 - RNA, 24 nt, Human
ucaaaagagccagagcacacaaau

SEQ ID NO: 334491 - RNA, 20 nt, Human
ucaaaggaagaaaaacuaau

SEQ ID NO: 334492 - RNA, 19 nt, Human
ucacugaagacacacacau

SEQ ID NO: 334493 - RNA, 23 nt, Human
ucacuggucccugcaaugcaccu

SEQ ID NO: 334494 - RNA, 18 nt, Human
uccacagugguaaaaagc

SEQ ID NO: 334495 - RNA, 26 nt, Human
uccaugacagcagaugaccuccuaaa

SEQ ID NO: 334496 - RNA, 20 nt, Human
ucccaggguuuaucaaaaug

SEQ ID NO: 334497 - RNA, 22 nt, Human
ucuaaacuuagcggauggaaaa

SEQ ID NO: 334498 - RNA, 23 nt, Human
ucucugaaauacaaaaaaaaaaa

SEQ ID NO: 334499 - RNA, 22 nt, Human
ucuguaucuugugggaaaaaaa

SEQ ID NO: 334500 - RNA, 24 nt, Human
ucuuuaucuucuucuguaucuugu

SEQ ID NO: 334501 - RNA, 18 nt, Human
ucuuugauauacugugua

SEQ ID NO: 334502 - RNA, 23 nt, Human
ugaaaacauuugacauggaaaua

SEQ ID NO: 334503 - RNA, 27 nt, Human
ugaaaaccacaagaccaauuucuggcc

SEQ ID NO: 334504 - RNA, 18 nt, Human
ugaaagauacugaguuca

SEQ ID NO: 334505 - RNA, 21 nt, Human
ugaaaugaaaaaguaaaaaua

SEQ ID NO: 334506 - RNA, 23 nt, Human
ugaagaauuauucaaaaaugaaa

SEQ ID NO: 334507 - RNA, 24 nt, Human
ugaagugcaauucuacaaaacaaa

SEQ ID NO: 334508 - RNA, 23 nt, Human
ugaauccuaaaaaaauucugaua

SEQ ID NO: 334509 - RNA, 22 nt, Human
ugagcaaaucauuaaaccccca

SEQ ID NO: 334510 - RNA, 18 nt, Human
ugagugugaaaacauucc

SEQ ID NO: 334511 - RNA, 24 nt, Human
ugaucauuauagaaagaauaacac

SEQ ID NO: 334512 - RNA, 21 nt, Human
ugauuuacaugacagcucccc

SEQ ID NO: 334513 - RNA, 19 nt, Human
ugcaauaggcauugcuaaa

SEQ ID NO: 334514 - RNA, 20 nt, Human
ugcagccagauguucccagg

SEQ ID NO: 334515 - RNA, 19 nt, Human
ugcagucucaacaguaagg

SEQ ID NO: 334516 - RNA, 21 nt, Human
ugccagcaacuggcaaauccc

SEQ ID NO: 334517 - RNA, 20 nt, Human
ugcuguacaaauguaagaua

SEQ ID NO: 334518 - RNA, 22 nt, Human
uggaaagaagaagggcuuugga

SEQ ID NO: 334519 - RNA, 21 nt, Human
uggaagaaaaagacaucuuuu

SEQ ID NO: 334520 - RNA, 22 nt, Human
uggagcuuuuguguugcuuucu

SEQ ID NO: 334521 - RNA, 25 nt, Human
uggcaaaauguuucaguaagacaug

SEQ ID NO: 334522 - RNA, 23 nt, Human
uggcugagguaccuugcucagca

SEQ ID NO: 334523 - RNA, 20 nt, Human
ugguugauauuacucaauac

SEQ ID NO: 334524 - RNA, 20 nt, Human
uguaaaggucaucaugcugu

SEQ ID NO: 334525 - RNA, 22 nt, Human
ugucauacaaucacugaagaca

SEQ ID NO: 334526 - RNA, 21 nt, Human
uguggaauuugaacucuguuu

SEQ ID NO: 334527 - RNA, 18 nt, Human
ugugguggaaagaagaag

SEQ ID NO: 334528 - RNA, 19 nt, Human
ugugguggaaagaagaagg

SEQ ID NO: 334529 - RNA, 22 nt, Human
ugugguggaaagaagaagggcu

SEQ ID NO: 334530 - RNA, 23 nt, Human
uuaagcaggaugaagggaaagug

SEQ ID NO: 334531 - RNA, 20 nt, Human
uuaguggcccacucauuucc

SEQ ID NO: 334532 - RNA, 18 nt, Human
uuaucuucuucuguaucu

SEQ ID NO: 334533 - RNA, 19 nt, Human
uucaccuggaagaaaaaga

SEQ ID NO: 334534 - RNA, 20 nt, Human
uuccaaauaacuggagccac

SEQ ID NO: 334535 - RNA, 23 nt, Human
uugauguaaugcaagacccacac

SEQ ID NO: 334536 - RNA, 22 nt, Human
uugcaaucaaaaaccaccugca

SEQ ID NO: 334537 - RNA, 21 nt, Human
uugcuucucagugcauguuua

SEQ ID NO: 334538 - RNA, 26 nt, Human
uuuucaucagccauuaucacuggucc

SEQ ID NO: 334539 - RNA, 27 nt, Human
aaacaaaaauguauuuuuaaaaucaau

SEQ ID NO: 334540 - RNA, 23 nt, Human
aaaucagaucagaaauccucagu

SEQ ID NO: 334541 - RNA, 23 nt, Human
acugccgaauuguuauguugcac

SEQ ID NO: 334542 - RNA, 18 nt, Human
agaaggcugacuguaaag

SEQ ID NO: 334543 - RNA, 22 nt, Human
agaaggcugacuguaaagagag

SEQ ID NO: 334544 - RNA, 18 nt, Human
ccauacaccugaaucuga

SEQ ID NO: 334545 - RNA, 20 nt, Human
cugaugguacguagauuuuu

SEQ ID NO: 334546 - RNA, 22 nt, Human
cuguggcaagcagaaggcugac

SEQ ID NO: 334547 - RNA, 21 nt, Human
cuuuauagguuauuuguuacc

SEQ ID NO: 334548 - RNA, 19 nt, Human
gaaucugaaaggcuuuugc

SEQ ID NO: 334549 - RNA, 23 nt, Human
uaggcauuuuaaauaaacaaaaa

SEQ ID NO: 334550 - RNA, 23 nt, Human
uaguagaucuugcuuuuaaguuu

SEQ ID NO: 334551 - RNA, 23 nt, Human
uauaauaaauauaaacauaccuc

SEQ ID NO: 334552 - RNA, 20 nt, Human
uauagguuauuuguuaccaa

SEQ ID NO: 334553 - RNA, 25 nt, Human
ucaaaaauuccauacaccugaaucu

SEQ ID NO: 334554 - RNA, 26 nt, Human
ugaauaaaaaaucagaucagaaaucc

SEQ ID NO: 334555 - RNA, 24 nt, Human
uggccaacugccgaauuguuaugu

SEQ ID NO: 334556 - RNA, 19 nt, Human
uguauacauauauuuauau

SEQ ID NO: 334557 - RNA, 24 nt, Human
uucuuuauuggcuaaauuugucau

SEQ ID NO: 334558 - RNA, 22 nt, Human
aaagaaggaagcaggaagguug

SEQ ID NO: 334559 - RNA, 19 nt, Human
aaugaaagaaaacccuaga

SEQ ID NO: 334560 - RNA, 21 nt, Human
acaaguauauuagcccagaac

SEQ ID NO: 334561 - RNA, 19 nt, Human
acgcagaacccaccuucca

SEQ ID NO: 334562 - RNA, 18 nt, Human
agcagaucacccaggccu

SEQ ID NO: 334563 - RNA, 24 nt, Human
aggcagcugcgcgggccgcgggug

SEQ ID NO: 334564 - RNA, 20 nt, Human
caacacaucacagaaaugcc

SEQ ID NO: 334565 - RNA, 19 nt, Human
caccuuccaaccacgccca

SEQ ID NO: 334566 - RNA, 20 nt, Human
cacgacugaccagcagcgcu

SEQ ID NO: 334567 - RNA, 21 nt, Human
cacgcccaacacaucacagaa

SEQ ID NO: 334568 - RNA, 21 nt, Human
cagaucacccaggccuggccc

SEQ ID NO: 334569 - RNA, 18 nt, Human
cagcagcagaucacccag

SEQ ID NO: 334570 - RNA, 24 nt, Human
ccacgcccaacacaucacagaaau

SEQ ID NO: 334571 - RNA, 19 nt, Human
ccacgcccaacacaucacg

SEQ ID NO: 334572 - RNA, 20 nt, Human
ccaugagcugucgccugcgc

SEQ ID NO: 334573 - RNA, 23 nt, Human
ccauguugugucccugucacccu

SEQ ID NO: 334574 - RNA, 21 nt, Human
cccagaacauccuaggcagcu

SEQ ID NO: 334575 - RNA, 19 nt, Human
cccagagccccggccagcg

SEQ ID NO: 334576 - RNA, 23 nt, Human
cccccugcuuuccacuucccuga

SEQ ID NO: 334577 - RNA, 21 nt, Human
cccugaggcggggucccgcac

SEQ ID NO: 334578 - RNA, 19 nt, Human
cccugcuuuccacuucccu

SEQ ID NO: 334579 - RNA, 26 nt, Human
ccugccccaaauucuuaacgaaaaug

SEQ ID NO: 334580 - RNA, 18 nt, Human
cgagacgacggugcugcu

SEQ ID NO: 334581 - RNA, 20 nt, Human
cggcagggcgcagggcagca

SEQ ID NO: 334582 - RNA, 21 nt, Human
cguuagagaucccgccgccau

SEQ ID NO: 334583 - RNA, 19 nt, Human
cuggacggaaaagaaggaa

SEQ ID NO: 334584 - RNA, 22 nt, Human
gacacgcagaacccaccuucca

SEQ ID NO: 334585 - RNA, 22 nt, Human
gcagcgcugggaagggacacgc

SEQ ID NO: 334586 - RNA, 20 nt, Human
gcaggaagguugucccccug

SEQ ID NO: 334587 - RNA, 25 nt, Human
gcccaacacaucacagaaaugccug

SEQ ID NO: 334588 - RNA, 21 nt, Human
gccuccgaagucgagacgacg

SEQ ID NO: 334589 - RNA, 23 nt, Human
ggaaaagaaggaagcaggaaggu

SEQ ID NO: 334590 - RNA, 21 nt, Human
ggcagcacccagagccccggc

SEQ ID NO: 334591 - RNA, 19 nt, Human
gggcagcacccagagcccc

SEQ ID NO: 334592 - RNA, 21 nt, Human
uagaaugcggugguuuuacaa

SEQ ID NO: 334593 - RNA, 23 nt, Human
uauucuuuaauaaaagucagggg

SEQ ID NO: 334594 - RNA, 20 nt, Human
uccccagcccuccguggcgu

SEQ ID NO: 334595 - RNA, 25 nt, Human
ugaaagaaaacccuagaaugcggug

SEQ ID NO: 334596 - RNA, 22 nt, Human
ugacaaccccuugccgacacug

SEQ ID NO: 334597 - RNA, 19 nt, Human
ugacaaccccuugccgacu

SEQ ID NO: 334598 - RNA, 18 nt, Human
ugagcugucgccugcgca

SEQ ID NO: 334599 - RNA, 22 nt, Human
ugccccaaauucuuaacgaaaa

SEQ ID NO: 334600 - RNA, 22 nt, Human
uggaugcggaagccggugacaa

SEQ ID NO: 334601 - RNA, 24 nt, Human
uuuuuuuuuuuuuuuuuuuuaacg

SEQ ID NO: 334602 - RNA, 24 nt, Human
aaaaaaagaacuuuuaaggacaac

SEQ ID NO: 334603 - RNA, 20 nt, Human
aaacaucuuuaugagccaau

SEQ ID NO: 334604 - RNA, 21 nt, Human
aaaggcuacaccucgucaggc

SEQ ID NO: 334605 - RNA, 24 nt, Human
aaaguugagguuaagaacuaugag

SEQ ID NO: 334606 - RNA, 19 nt, Human
aacaauggcagcggcugcc

SEQ ID NO: 334607 - RNA, 22 nt, Human
aacauaucauccagcacagcca

SEQ ID NO: 334608 - RNA, 26 nt, Human
aagccaaaggcaaaaagaggggaccc

SEQ ID NO: 334609 - RNA, 22 nt, Human
aaggagcauucacugcaggagg

SEQ ID NO: 334610 - RNA, 22 nt, Human
aaggguuuuaagcagauacuuc

SEQ ID NO: 334611 - RNA, 23 nt, Human
acagagaaaaaaauacuucuaca

SEQ ID NO: 334612 - RNA, 23 nt, Human
acagccaagcacccacugaggcc

SEQ ID NO: 334613 - RNA, 22 nt, Human
accuuuugcuauagcugaaaac

SEQ ID NO: 334614 - RNA, 20 nt, Human
agacagaugacaaggggcag

SEQ ID NO: 334615 - RNA, 24 nt, Human
agcaggaggcaaguuugcauagaa

SEQ ID NO: 334616 - RNA, 21 nt, Human
agcauuucugugcgggggcag

SEQ ID NO: 334617 - RNA, 25 nt, Human
agccaaaggcaaaaagagcucuccu

SEQ ID NO: 334618 - RNA, 23 nt, Human
agccagucagggauggaggaggg

SEQ ID NO: 334619 - RNA, 18 nt, Human
agguccuuucacauuucu

SEQ ID NO: 334620 - RNA, 22 nt, Human
augggcccugucagagcaggcc

SEQ ID NO: 334621 - RNA, 19 nt, Human
augggcgcugguagaguca

SEQ ID NO: 334622 - RNA, 24 nt, Human
caaaauacuaaaaacuacagcaua

SEQ ID NO: 334623 - RNA, 24 nt, Human
cacagccaagcacccacugaggcc

SEQ ID NO: 334624 - RNA, 19 nt, Human
cacagugcauaccacgaau

SEQ ID NO: 334625 - RNA, 26 nt, Human
cagccaagcacccacugaggccaagc

SEQ ID NO: 334626 - RNA, 21 nt, Human
caugggcccugucagagcagg

SEQ ID NO: 334627 - RNA, 19 nt, Human
ccaagcagccuugugggac

SEQ ID NO: 334628 - RNA, 24 nt, Human
ccacucagccagucagggauggag

SEQ ID NO: 334629 - RNA, 21 nt, Human
cccccugccagcaucaggacc

SEQ ID NO: 334630 - RNA, 20 nt, Human
ccccggacccagcuggcugc

SEQ ID NO: 334631 - RNA, 26 nt, Human
ccucugggcauggcugaucccagcuc

SEQ ID NO: 334632 - RNA, 22 nt, Human
cgcuaggccacagugcauacca

SEQ ID NO: 334633 - RNA, 20 nt, Human
cuccaccccgcccgccgcuu

SEQ ID NO: 334634 - RNA, 25 nt, Human
cuccccggacccagcuggcugcucc

SEQ ID NO: 334635 - RNA, 23 nt, Human
gagaaaaaaauacuucuacaaaa

SEQ ID NO: 334636 - RNA, 19 nt, Human
gagaacaauggcagcggcc

SEQ ID NO: 334637 - RNA, 18 nt, Human
gaggagggggccccccug

SEQ ID NO: 334638 - RNA, 18 nt, Human
gaggcgggcagucuucuc

SEQ ID NO: 334639 - RNA, 24 nt, Human
gauauauaaggcagaugggaagaa

SEQ ID NO: 334640 - RNA, 19 nt, Human
ggaaacaagauaaaaggcu

SEQ ID NO: 334641 - RNA, 21 nt, Human
ggaagaaaacauggaauuaga

SEQ ID NO: 334642 - RNA, 20 nt, Human
ggacaugggcccugucagag

SEQ ID NO: 334643 - RNA, 21 nt, Human
ggagcauucacugcaggaggc

SEQ ID NO: 334644 - RNA, 18 nt, Human
ggcggcggcgcuccccgg

SEQ ID NO: 334645 - RNA, 20 nt, Human
gggcagaaggggcuguugug

SEQ ID NO: 334646 - RNA, 19 nt, Human
gguuaagaacuaugaggca

SEQ ID NO: 334647 - RNA, 24 nt, Human
guuuggauuuccugagcuucacag

SEQ ID NO: 334648 - RNA, 24 nt, Human
uaaauuacaaagacaaaauacuaa

SEQ ID NO: 334649 - RNA, 19 nt, Human
uaacacaaagacagaugac

SEQ ID NO: 334650 - RNA, 21 nt, Human
uaaggacaacuugcuuuuguu

SEQ ID NO: 334651 - RNA, 22 nt, Human
uaauagugcucaucaaacugaa

SEQ ID NO: 334652 - RNA, 21 nt, Human
uacaaagacaaaauacuaaaa

SEQ ID NO: 334653 - RNA, 22 nt, Human
uacaaagacaaaauacuaaaaa

SEQ ID NO: 334654 - RNA, 19 nt, Human
ucacuuauuuaggaguuca

SEQ ID NO: 334655 - RNA, 18 nt, Human
ucagccuuccaaagcucu

SEQ ID NO: 334656 - RNA, 19 nt, Human
ucaggaccagaccucuggg

SEQ ID NO: 334657 - RNA, 21 nt, Human
ucauccagcacagccaagcac

SEQ ID NO: 334658 - RNA, 23 nt, Human
ucgaggcggcggcggcgcucccc

SEQ ID NO: 334659 - RNA, 22 nt, Human
ucugaagugcugugacaaaagg

SEQ ID NO: 334660 - RNA, 22 nt, Human
ucugaagugcugugacaaaagg

SEQ ID NO: 334661 - RNA, 21 nt, Human
ugaaaaacagauugguacuaa

SEQ ID NO: 334662 - RNA, 24 nt, Human
ugaaacaaguuuauuuucuccaau

SEQ ID NO: 334663 - RNA, 18 nt, Human
ugaagacaccauggcuga

SEQ ID NO: 334664 - RNA, 18 nt, Human
ugacaaggggcagugucc

SEQ ID NO: 334665 - RNA, 19 nt, Human
ugaggcgggcagucuucuc

SEQ ID NO: 334666 - RNA, 21 nt, Human
ugaggcgggcagucuucuccc

SEQ ID NO: 334667 - RNA, 21 nt, Human
ugcauagaaaauuugcaguau

SEQ ID NO: 334668 - RNA, 18 nt, Human
uggcauacauaacuaccu

SEQ ID NO: 334669 - RNA, 26 nt, Human
ugggaagaaaacauggaauuagaguu

SEQ ID NO: 334670 - RNA, 20 nt, Human
ugggagaaguccucagaaac

SEQ ID NO: 334671 - RNA, 24 nt, Human
ugggagaaguccucagaaaccuuu

SEQ ID NO: 334672 - RNA, 24 nt, Human
uguuguguauuuucugaagugcug

SEQ ID NO: 334673 - RNA, 21 nt, Human
uuagaaauuaaaucauguuuu

SEQ ID NO: 334674 - RNA, 21 nt, Human
uucacauuucuuuggagcauu

SEQ ID NO: 334675 - RNA, 19 nt, Human
uucugugcgggggcagaag

SEQ ID NO: 334676 - RNA, 18 nt, Human
uucuuuggagcauuuuug

SEQ ID NO: 334677 - RNA, 21 nt, Human
uugaaauugcuuaacuauaau

SEQ ID NO: 334678 - RNA, 21 nt, Human
uuggaauugaaagccaaaggc

SEQ ID NO: 334679 - RNA, 20 nt, Human
uuuacugucccuuguugaaa

SEQ ID NO: 334680 - RNA, 19 nt, Human
uuuccgagaccucugcuau

SEQ ID NO: 334681 - RNA, 18 nt, Human
uuuggcuguaaacacaca

SEQ ID NO: 334682 - RNA, 22 nt, Human
uuuuuuuuuuuuuugcaaaaug

SEQ ID NO: 334683 - RNA, 18 nt, Human
uuuuuuuuuuuuuuuuug

SEQ ID NO: 334684 - RNA, 21 nt, Human
uuuuuuuuuuuuuuuuugcaa

SEQ ID NO: 334685 - RNA, 26 nt, Human
aaacacaaccacaugauccugugugc

SEQ ID NO: 334686 - RNA, 22 nt, Human
aaauagccaagugagguuaaac

SEQ ID NO: 334687 - RNA, 20 nt, Human
acuagcauacagggccucua

SEQ ID NO: 334688 - RNA, 21 nt, Human
acucauuugugaaaagucaaa

SEQ ID NO: 334689 - RNA, 22 nt, Human
agccaagugagguuaaaccagg

SEQ ID NO: 334690 - RNA, 19 nt, Human
auaacccaucucucuaugu

SEQ ID NO: 334691 - RNA, 24 nt, Human
caacaaaaacgaaguuucagucca

SEQ ID NO: 334692 - RNA, 23 nt, Human
cacuuggccugcaacaacagaac

SEQ ID NO: 334693 - RNA, 24 nt, Human
cauuuuuuaagccuaauucucagc

SEQ ID NO: 334694 - RNA, 22 nt, Human
ccaauucaccuuuccauuuccc

SEQ ID NO: 334695 - RNA, 24 nt, Human
ccauuucccaacuacuccccaaaa

SEQ ID NO: 334696 - RNA, 23 nt, Human
cuagagccaauucaccuuuccau

SEQ ID NO: 334697 - RNA, 20 nt, Human
cugugugcguggagaacccc

SEQ ID NO: 334698 - RNA, 19 nt, Human
gauccugugugcguggaga

SEQ ID NO: 334699 - RNA, 23 nt, Human
uaacagaugauuaagcuauaaau

SEQ ID NO: 334700 - RNA, 20 nt, Human
uaagagcucucucacaucuu

SEQ ID NO: 334701 - RNA, 20 nt, Human
uaagagcucucucacaucuu

SEQ ID NO: 334702 - RNA, 26 nt, Human
uagccaagugagguuaaaccaggcau

SEQ ID NO: 334703 - RNA, 22 nt, Human
uauacaaacacaaccacaugau

SEQ ID NO: 334704 - RNA, 22 nt, Human
uauauacaaacacaaccacaug

SEQ ID NO: 334705 - RNA, 20 nt, Human
uccccaaaauaauuaacaaa

SEQ ID NO: 334706 - RNA, 21 nt, Human
uccugugugcguggagaaccc

SEQ ID NO: 334707 - RNA, 19 nt, Human
ugaaauauucauccuaccc

SEQ ID NO: 334708 - RNA, 22 nt, Human
uggagaaccccaauuuaacaga

SEQ ID NO: 334709 - RNA, 21 nt, Human
uuaaagcugcaaaaaaugugc

SEQ ID NO: 334710 - RNA, 27 nt, Human
uucaacaaaaacgaaguuucaguccaa

SEQ ID NO: 334711 - RNA, 18 nt, Human
uucaccuuuccauuuccc

SEQ ID NO: 334712 - RNA, 27 nt, Human
uuuguggcaaugaaaauagcuuuuuuu

SEQ ID NO: 334713 - RNA, 20 nt, Human
aaaaaacaaacaaaaagagu

SEQ ID NO: 334714 - RNA, 25 nt, Human
aaacaaaaagaguaagggucuaagg

SEQ ID NO: 334715 - RNA, 18 nt, Human
aaacaaacaaaaagagua

SEQ ID NO: 334716 - RNA, 21 nt, Human
aaauucuccugacaaggagca

SEQ ID NO: 334717 - RNA, 24 nt, Human
aacaaacaaaaagaguaagggucu

SEQ ID NO: 334718 - RNA, 24 nt, Human
aagaguggccaccacaucuuuauu

SEQ ID NO: 334719 - RNA, 24 nt, Human
acagagcaagauccuguuucaaaa

SEQ ID NO: 334720 - RNA, 22 nt, Human
acagagccucacaaaacccacu

SEQ ID NO: 334721 - RNA, 21 nt, Human
acaucuuuauugcauacucag

SEQ ID NO: 334722 - RNA, 21 nt, Human
accugugaauuggugcugggg

SEQ ID NO: 334723 - RNA, 22 nt, Human
acuagcccacaucagccccagc

SEQ ID NO: 334724 - RNA, 18 nt, Human
acugcacucaagccuggg

SEQ ID NO: 334725 - RNA, 24 nt, Human
acugcacucaagccugggugacag

SEQ ID NO: 334726 - RNA, 22 nt, Human
agagaggggugaccugugaauu

SEQ ID NO: 334727 - RNA, 21 nt, Human
agagcugugugagccagcgac

SEQ ID NO: 334728 - RNA, 23 nt, Human
agagggacaaggagggggagggu

SEQ ID NO: 334729 - RNA, 19 nt, Human
agcagagggacaaggaggg

SEQ ID NO: 334730 - RNA, 19 nt, Human
agccguaaaugcgguaaau

SEQ ID NO: 334731 - RNA, 19 nt, Human
aggcugggagggaggcaaa

SEQ ID NO: 334732 - RNA, 24 nt, Human
aggggugagcagagggacaaggag

SEQ ID NO: 334733 - RNA, 24 nt, Human
aucgcaccacugcacucaagccug

SEQ ID NO: 334734 - RNA, 27 nt, Human
augagacaaaaaaaaaaaaauacuaca

SEQ ID NO: 334735 - RNA, 22 nt, Human
augcccacuuacagaaugcagc

SEQ ID NO: 334736 - RNA, 21 nt, Human
caccaugaaagaguggccaac

SEQ ID NO: 334737 - RNA, 24 nt, Human
cacgccugucaucccagcacuuug

SEQ ID NO: 334738 - RNA, 23 nt, Human
cacucaagccugggugacagagc

SEQ ID NO: 334739 - RNA, 23 nt, Human
cacugcacucaagccugggugac

SEQ ID NO: 334740 - RNA, 24 nt, Human
cacugcacucaagccugggugaca

SEQ ID NO: 334741 - RNA, 24 nt, Human
cagaaugcagccguaaaugcggua

SEQ ID NO: 334742 - RNA, 24 nt, Human
cagugcugggggagaccuuggaca

SEQ ID NO: 334743 - RNA, 20 nt, Human
ccacugcacucaagccuggg

SEQ ID NO: 334744 - RNA, 20 nt, Human
ccacugcacucaagccuggg

SEQ ID NO: 334745 - RNA, 21 nt, Human
ccacugcacucaagccugggu

SEQ ID NO: 334746 - RNA, 24 nt, Human
ccacugcacucaagccugggugac

SEQ ID NO: 334747 - RNA, 19 nt, Human
cccacaucagccccagcau

SEQ ID NO: 334748 - RNA, 21 nt, Human
cccguagugucuuguacaguu

SEQ ID NO: 334749 - RNA, 21 nt, Human
ccgcuagaucugccgcccggc

SEQ ID NO: 334750 - RNA, 19 nt, Human
ccugggugacagagcaaga

SEQ ID NO: 334751 - RNA, 22 nt, Human
ccuuggacagcuaucccgcccu

SEQ ID NO: 334752 - RNA, 21 nt, Human
cgccggagggagggaacgagc

SEQ ID NO: 334753 - RNA, 23 nt, Human
cgccugucaucccagcacuuugg

SEQ ID NO: 334754 - RNA, 24 nt, Human
cgccugucaucccagcacuuuggg

SEQ ID NO: 334755 - RNA, 20 nt, Human
cuaucccgcccucgcacucu

SEQ ID NO: 334756 - RNA, 22 nt, Human
cuauuuacagagguuggggugc

SEQ ID NO: 334757 - RNA, 24 nt, Human
cucacgccugucaucccagcacuu

SEQ ID NO: 334758 - RNA, 21 nt, Human
cuccuacccaggcaagaaggg

SEQ ID NO: 334759 - RNA, 19 nt, Human
cugccgcccggcugcauuu

SEQ ID NO: 334760 - RNA, 20 nt, Human
gagcagagggacaaggaggg

SEQ ID NO: 334761 - RNA, 19 nt, Human
gaggauugcuugagcacag

SEQ ID NO: 334762 - RNA, 19 nt, Human
gagggaacgagcgaggggu

SEQ ID NO: 334763 - RNA, 24 nt, Human
gagggaacgagcgaggggugagca

SEQ ID NO: 334764 - RNA, 23 nt, Human
gaggucugaaagaauuccuggca

SEQ ID NO: 334765 - RNA, 19 nt, Human
gccgugaacuuggugcugc

SEQ ID NO: 334766 - RNA, 22 nt, Human
gccuaggcugggagcuguggcu

SEQ ID NO: 334767 - RNA, 23 nt, Human
gccuaggcugggagcuguggcuc

SEQ ID NO: 334768 - RNA, 18 nt, Human
gcugcacugggcugugau

SEQ ID NO: 334769 - RNA, 20 nt, Human
gcugugaucgcaccacugca

SEQ ID NO: 334770 - RNA, 20 nt, Human
ggagggggagggucgaggga

SEQ ID NO: 334771 - RNA, 20 nt, Human
ggccacagagccucacaaaa

SEQ ID NO: 334772 - RNA, 18 nt, Human
ggccagugggcugagaga

SEQ ID NO: 334773 - RNA, 21 nt, Human
ggcguuggccgugaacuuggu

SEQ ID NO: 334774 - RNA, 22 nt, Human
ggcugggagcuguggcucacgg

SEQ ID NO: 334775 - RNA, 23 nt, Human
gggagcgggggugccagcaaguu

SEQ ID NO: 334776 - RNA, 24 nt, Human
gggaggauugcuugagcacaggug

SEQ ID NO: 334777 - RNA, 20 nt, Human
ggggagggucgagggagagg

SEQ ID NO: 334778 - RNA, 18 nt, Human
gggggagggucgagggag

SEQ ID NO: 334779 - RNA, 20 nt, Human
ggguuggggagcgggggugc

SEQ ID NO: 334780 - RNA, 20 nt, Human
gguggucgaggcugcacugg

SEQ ID NO: 334781 - RNA, 20 nt, Human
gucgagggagaggacacgcc

SEQ ID NO: 334782 - RNA, 18 nt, Human
gugcaagaugagagaagu

SEQ ID NO: 334783 - RNA, 19 nt, Human
guggucgaggcugcacugg

SEQ ID NO: 334784 - RNA, 22 nt, Human
uacaaugaacacuccuccauua

SEQ ID NO: 334785 - RNA, 22 nt, Human
ucacgccugucaucccagcacu

SEQ ID NO: 334786 - RNA, 20 nt, Human
ucagccccagcauggaagaa

SEQ ID NO: 334787 - RNA, 22 nt, Human
uccuguuucaaaaaacaaacaa

SEQ ID NO: 334788 - RNA, 24 nt, Human
ucucagaagacucaagauuucgcc

SEQ ID NO: 334789 - RNA, 22 nt, Human
ucuccugacaaggagcaaccgg

SEQ ID NO: 334790 - RNA, 19 nt, Human
ugagacaaaaaaaaaaaaa

SEQ ID NO: 334791 - RNA, 22 nt, Human
ugagacaaaaaaaaaaaaauac

SEQ ID NO: 334792 - RNA, 19 nt, Human
ugagcacagguggucgagg

SEQ ID NO: 334793 - RNA, 18 nt, Human
ugaggcugggagggaggc

SEQ ID NO: 334794 - RNA, 18 nt, Human
ugcaagaagagaggggug

SEQ ID NO: 334795 - RNA, 18 nt, Human
ugcugaggcccaauguga

SEQ ID NO: 334796 - RNA, 21 nt, Human
uggcucacgccugucauccca

SEQ ID NO: 334797 - RNA, 22 nt, Human
uggcucacgccugucaucccag

SEQ ID NO: 334798 - RNA, 24 nt, Human
uggcucacgccugucaucccagca

SEQ ID NO: 334799 - RNA, 22 nt, Human
uggggagcugcugaggcccaau

SEQ ID NO: 334800 - RNA, 19 nt, Human
uguacaguuuucucagaag

SEQ ID NO: 334801 - RNA, 21 nt, Human
ugugguugaggcugggaggga

SEQ ID NO: 334802 - RNA, 21 nt, Human
uucaaaaaacaaacaaaaaga

SEQ ID NO: 334803 - RNA, 20 nt, Human
uuccaguuccacggcacuuc

SEQ ID NO: 334804 - RNA, 18 nt, Human
uuuagggugaucuuuagc

SEQ ID NO: 334805 - RNA, 21 nt, Human
uuucaaaaaacaaacaaaaag

SEQ ID NO: 334806 - RNA, 18 nt, Human
uuuuugcugccaccacca

SEQ ID NO: 334807 - RNA, 20 nt, Human
aaagaaauuccacaaccucc

SEQ ID NO: 334808 - RNA, 21 nt, Human
aaccuccugacaaagcagccc

SEQ ID NO: 334809 - RNA, 22 nt, Human
aaccuccugacaaagcagcccu

SEQ ID NO: 334810 - RNA, 21 nt, Human
aacgcgccccgggcccucccg

SEQ ID NO: 334811 - RNA, 21 nt, Human
aagaagcuuacccaaaaaauc

SEQ ID NO: 334812 - RNA, 19 nt, Human
aagcagcccuuccacuugc

SEQ ID NO: 334813 - RNA, 22 nt, Human
acgcgccccgggcccucccggg

SEQ ID NO: 334814 - RNA, 23 nt, Human
acugaagagcagggaccaguccc

SEQ ID NO: 334815 - RNA, 19 nt, Human
agaaggggagaagaaagaa

SEQ ID NO: 334816 - RNA, 23 nt, Human
aucuuacuccacucccuccucca

SEQ ID NO: 334817 - RNA, 24 nt, Human
aucuuacuccacucccuccuccaa

SEQ ID NO: 334818 - RNA, 26 nt, Human
caaaacccacuacaacaucuguaguu

SEQ ID NO: 334819 - RNA, 20 nt, Human
caacccagcccuguguccuu

SEQ ID NO: 334820 - RNA, 26 nt, Human
caagaagcuuacccaaaaaaucggug

SEQ ID NO: 334821 - RNA, 20 nt, Human
cacaaauauuuuuccccauu

SEQ ID NO: 334822 - RNA, 25 nt, Human
cacaagcaagaagucaaccauagcc

SEQ ID NO: 334823 - RNA, 21 nt, Human
cacucccuccuccaaaaccca

SEQ ID NO: 334824 - RNA, 19 nt, Human
cacuuuauacauagcuaag

SEQ ID NO: 334825 - RNA, 19 nt, Human
cagcucuuaaacgcgcccc

SEQ ID NO: 334826 - RNA, 24 nt, Human
caucuuacuccacucccuccucca

SEQ ID NO: 334827 - RNA, 19 nt, Human
ccacucccuccuccaaaac

SEQ ID NO: 334828 - RNA, 21 nt, Human
ccacuugcaugggcuuauuuc

SEQ ID NO: 334829 - RNA, 19 nt, Human
ccagucccgccgccuccgg

SEQ ID NO: 334830 - RNA, 20 nt, Human
cccuccuccaaaacccacua

SEQ ID NO: 334831 - RNA, 18 nt, Human
ccgccgccuccgccgucc

SEQ ID NO: 334832 - RNA, 18 nt, Human
ccgccgccuccgccgucc

SEQ ID NO: 334833 - RNA, 26 nt, Human
ccgccgccuccgccguccgcacccgg

SEQ ID NO: 334834 - RNA, 23 nt, Human
ccuccaaaacccacuacaacauc

SEQ ID NO: 334835 - RNA, 23 nt, Human
ccucccggggccggaccccagcc

SEQ ID NO: 334836 - RNA, 21 nt, Human
cgccccgggcccucccggggc

SEQ ID NO: 334837 - RNA, 19 nt, Human
cgcuggucuucugaggcug

SEQ ID NO: 334838 - RNA, 23 nt, Human
cuccaaaacccacuacaacaucu

SEQ ID NO: 334839 - RNA, 19 nt, Human
cuccacucccuccuccaaa

SEQ ID NO: 334840 - RNA, 19 nt, Human
cucccuccuccaaaaccca

SEQ ID NO: 334841 - RNA, 19 nt, Human
cucuuuaccaacccagccc

SEQ ID NO: 334842 - RNA, 18 nt, Human
gacaaagcagcccuucca

SEQ ID NO: 334843 - RNA, 21 nt, Human
gaugacccacugaagagcagg

SEQ ID NO: 334844 - RNA, 21 nt, Human
gccccgggcccucccggggcc

SEQ ID NO: 334845 - RNA, 18 nt, Human
ggagcagcuggcuucauc

SEQ ID NO: 334846 - RNA, 22 nt, Human
gggaagaaggggagaagaaaga

SEQ ID NO: 334847 - RNA, 24 nt, Human
ggggagaagaaagaaauuccacaa

SEQ ID NO: 334848 - RNA, 24 nt, Human
uaagaugcuaugacaauucuuucu

SEQ ID NO: 334849 - RNA, 18 nt, Human
uaauuaacagcuguuucc

SEQ ID NO: 334850 - RNA, 20 nt, Human
uaccaacccagcccuguguc

SEQ ID NO: 334851 - RNA, 27 nt, Human
ucccgccgccuccgccguccgcacccg

SEQ ID NO: 334852 - RNA, 22 nt, Human
ucccggggccggaccccagccg

SEQ ID NO: 334853 - RNA, 18 nt, Human
uccgcacccggcccgcag

SEQ ID NO: 334854 - RNA, 23 nt, Human
ucggggagagugggaagcacaaa

SEQ ID NO: 334855 - RNA, 22 nt, Human
ucuuaaacgcgccccgggcccu

SEQ ID NO: 334856 - RNA, 21 nt, Human
uguucuuagagcugaagggau

SEQ ID NO: 334857 - RNA, 24 nt, Human
uuucaguguucuuagagcugaagg

SEQ ID NO: 334858 - RNA, 21 nt, Human
aaacaaaaaaggaaccuucga

SEQ ID NO: 334859 - RNA, 22 nt, Human
aaacaaaacacuguguuccccc

SEQ ID NO: 334860 - RNA, 23 nt, Human
aacaaaacacuguguucccccuu

SEQ ID NO: 334861 - RNA, 23 nt, Human
aaccaacuccucgccagcugcag

SEQ ID NO: 334862 - RNA, 26 nt, Human
aacccagugagaaggccuuugcuggu

SEQ ID NO: 334863 - RNA, 22 nt, Human
aagcaaacaaagcaauggaaac

SEQ ID NO: 334864 - RNA, 26 nt, Human
aagcaaacaaagcaauggaaacuuca

SEQ ID NO: 334865 - RNA, 23 nt, Human
aagcaagagugacgguaccagag

SEQ ID NO: 334866 - RNA, 19 nt, Human
aagcccacaaugcguccac

SEQ ID NO: 334867 - RNA, 18 nt, Human
aagcuuuucuuuuuccca

SEQ ID NO: 334868 - RNA, 22 nt, Human
acaaacaaaaaaggaaccuucg

SEQ ID NO: 334869 - RNA, 24 nt, Human
acacccgaccauacuuucagucac

SEQ ID NO: 334870 - RNA, 20 nt, Human
accggagccaggagcugcuc

SEQ ID NO: 334871 - RNA, 24 nt, Human
acuaggaagggacgaggucuucuc

SEQ ID NO: 334872 - RNA, 22 nt, Human
acugcacugccgggggccggug

SEQ ID NO: 334873 - RNA, 22 nt, Human
acugcacugccgggggccggug

SEQ ID NO: 334874 - RNA, 25 nt, Human
acugcuucguccucccauggaaccu

SEQ ID NO: 334875 - RNA, 18 nt, Human
agaaagacgauuuuuggu

SEQ ID NO: 334876 - RNA, 23 nt, Human
agaaggagagaggagagugggcc

SEQ ID NO: 334877 - RNA, 19 nt, Human
agagagccggccuggcccc

SEQ ID NO: 334878 - RNA, 23 nt, Human
agagagccggccuggcccccggg

SEQ ID NO: 334879 - RNA, 20 nt, Human
agcacguugccuccagggcc

SEQ ID NO: 334880 - RNA, 23 nt, Human
aggagagaggagagugggccagg

SEQ ID NO: 334881 - RNA, 21 nt, Human
aggcacaagcaagagugacgg

SEQ ID NO: 334882 - RNA, 21 nt, Human
agggacgaggucuucucuguu

SEQ ID NO: 334883 - RNA, 24 nt, Human
agggcccagccucccagaagccuc

SEQ ID NO: 334884 - RNA, 20 nt, Human
aggugcugaaaauaaauacu

SEQ ID NO: 334885 - RNA, 19 nt, Human
augcaccaggccaagguga

SEQ ID NO: 334886 - RNA, 18 nt, Human
augcaugccagggguccg

SEQ ID NO: 334887 - RNA, 21 nt, Human
augggguggggugaaucacag

SEQ ID NO: 334888 - RNA, 23 nt, Human
caaauaagcugacacuaucugga

SEQ ID NO: 334889 - RNA, 18 nt, Human
caacgagucacaacagug

SEQ ID NO: 334890 - RNA, 18 nt, Human
cacaaacaaaaaaggaac

SEQ ID NO: 334891 - RNA, 19 nt, Human
caccugugccugccgccgc

SEQ ID NO: 334892 - RNA, 21 nt, Human
cagacgugugacagaggaaga

SEQ ID NO: 334893 - RNA, 18 nt, Human
cagcacguugccuccagg

SEQ ID NO: 334894 - RNA, 19 nt, Human
cagcagcuauaaagugaac

SEQ ID NO: 334895 - RNA, 19 nt, Human
caggcgcagcgcugaccug

SEQ ID NO: 334896 - RNA, 22 nt, Human
caguucccaccggagccaggag

SEQ ID NO: 334897 - RNA, 18 nt, Human
cauuacaccugugccugc

SEQ ID NO: 334898 - RNA, 18 nt, Human
ccaagcaagcaaucggag

SEQ ID NO: 334899 - RNA, 22 nt, Human
ccaagccaggccaguggacuug

SEQ ID NO: 334900 - RNA, 19 nt, Human
ccagccucccagaagccuc

SEQ ID NO: 334901 - RNA, 22 nt, Human
cccgaccauacuuucagucacc

SEQ ID NO: 334902 - RNA, 23 nt, Human
ccgacaggacagcaagaaggcau

SEQ ID NO: 334903 - RNA, 19 nt, Human
ccggagccaggagcugcuc

SEQ ID NO: 334904 - RNA, 19 nt, Human
ccucugcagcagcaugggc

SEQ ID NO: 334905 - RNA, 21 nt, Human
ccucugcagcagcaugggcuu

SEQ ID NO: 334906 - RNA, 21 nt, Human
cgcugaccuggugugguuccc

SEQ ID NO: 334907 - RNA, 19 nt, Human
cgcuggacugcacugccgg

SEQ ID NO: 334908 - RNA, 23 nt, Human
cgcuggacugcacugccgggggc

SEQ ID NO: 334909 - RNA, 26 nt, Human
cggcggccacagcaggcgcagcgcug

SEQ ID NO: 334910 - RNA, 23 nt, Human
cuaggagaaggaggugagagccc

SEQ ID NO: 334911 - RNA, 24 nt, Human
cucaaccaacuccucgccagcugc

SEQ ID NO: 334912 - RNA, 22 nt, Human
cucacagaaagaauguguacaa

SEQ ID NO: 334913 - RNA, 21 nt, Human
cuccagacggccacgcaggcu

SEQ ID NO: 334914 - RNA, 27 nt, Human
cugaccagucagagaacgugaggcagc

SEQ ID NO: 334915 - RNA, 19 nt, Human
cugcagcacguugccuccc

SEQ ID NO: 334916 - RNA, 19 nt, Human
cugcagcagcaugggcuug

SEQ ID NO: 334917 - RNA, 22 nt, Human
cuuccgagccacgagccuggcc

SEQ ID NO: 334918 - RNA, 21 nt, Human
cuucgauauugccagcagcua

SEQ ID NO: 334919 - RNA, 25 nt, Human
cuuggccuugaagaagugccucaac

SEQ ID NO: 334920 - RNA, 24 nt, Human
cuuucagucucacggacucccuuu

SEQ ID NO: 334921 - RNA, 22 nt, Human
gaaacaaaacacuguguucccc

SEQ ID NO: 334922 - RNA, 20 nt, Human
gaacuggcaggaacgggcag

SEQ ID NO: 334923 - RNA, 20 nt, Human
gacagcaagaaggcauuugc

SEQ ID NO: 334924 - RNA, 23 nt, Human
gacagcagacccagcccagucca

SEQ ID NO: 334925 - RNA, 22 nt, Human
gauuaaaaacugcaucaaacag

SEQ ID NO: 334926 - RNA, 24 nt, Human
gcagaggugagggguacaaaguga

SEQ ID NO: 334927 - RNA, 24 nt, Human
gcuccacaggcagccccugucugu

SEQ ID NO: 334928 - RNA, 22 nt, Human
ggaauuuuuaaagcaaacaaag

SEQ ID NO: 334929 - RNA, 18 nt, Human
ggagccaggagcugcuca

SEQ ID NO: 334930 - RNA, 21 nt, Human
ggcaggcuccacaggcagccc

SEQ ID NO: 334931 - RNA, 19 nt, Human
ggccaguggacuugugugc

SEQ ID NO: 334932 - RNA, 19 nt, Human
ggcccagccucccagaagc

SEQ ID NO: 334933 - RNA, 21 nt, Human
ggguuuguuuucgaccccuug

SEQ ID NO: 334934 - RNA, 18 nt, Human
gguggggugaaucacagc

SEQ ID NO: 334935 - RNA, 25 nt, Human
uaaaaaagcaaagaaagagggaggc

SEQ ID NO: 334936 - RNA, 23 nt, Human
uaaguuaacaaagaaaauuaauc

SEQ ID NO: 334937 - RNA, 21 nt, Human
uaaucuucaaauaagcugaca

SEQ ID NO: 334938 - RNA, 20 nt, Human
uaauggccaacgagucacaa

SEQ ID NO: 334939 - RNA, 18 nt, Human
uacaaagugagcuggaaa

SEQ ID NO: 334940 - RNA, 20 nt, Human
uacacaaacaaaaaaggaac

SEQ ID NO: 334941 - RNA, 18 nt, Human
uacaccugugccugccgc

SEQ ID NO: 334942 - RNA, 20 nt, Human
uaccuaggagaaggagguga

SEQ ID NO: 334943 - RNA, 18 nt, Human
uaggaagggacgaggucu

SEQ ID NO: 334944 - RNA, 19 nt, Human
ucaauugcaaugccugggg

SEQ ID NO: 334945 - RNA, 22 nt, Human
ucaccagaauaucuucucucca

SEQ ID NO: 334946 - RNA, 24 nt, Human
ucauucuguuuuuaaggaagguca

SEQ ID NO: 334947 - RNA, 19 nt, Human
uccacaggcagccccuguc

SEQ ID NO: 334948 - RNA, 23 nt, Human
ucccaaauggcuguugaauuuau

SEQ ID NO: 334949 - RNA, 18 nt, Human
ucccauggaaccugagcc

SEQ ID NO: 334950 - RNA, 24 nt, Human
ucugucaauugcaaugccuggggc

SEQ ID NO: 334951 - RNA, 23 nt, Human
ucuguggccagacaggccggggc

SEQ ID NO: 334952 - RNA, 19 nt, Human
ugaacguacugagaccgac

SEQ ID NO: 334953 - RNA, 19 nt, Human
ugacagaggaagagucuga

SEQ ID NO: 334954 - RNA, 21 nt, Human
ugaccuggugugguucccccc

SEQ ID NO: 334955 - RNA, 21 nt, Human
ugacgugaaggagucagacgu

SEQ ID NO: 334956 - RNA, 22 nt, Human
ugagaagagaagacaccuuuac

SEQ ID NO: 334957 - RNA, 24 nt, Human
ugagagcccucgugugggguuugu

SEQ ID NO: 334958 - RNA, 21 nt, Human
ugccagggguccgggguucuc

SEQ ID NO: 334959 - RNA, 23 nt, Human
ugccagggguccgggguucuccc

SEQ ID NO: 334960 - RNA, 26 nt, Human
ugccucaaccaacuccucgccagcug

SEQ ID NO: 334961 - RNA, 18 nt, Human
ugccuggggccaagccag

SEQ ID NO: 334962 - RNA, 20 nt, Human
ugccuggggccaagccaggc

SEQ ID NO: 334963 - RNA, 19 nt, Human
uggaaggcacaagcaagag

SEQ ID NO: 334964 - RNA, 19 nt, Human
uggaauuuuuaaagcaaac

SEQ ID NO: 334965 - RNA, 18 nt, Human
uggcccccggguuacagu

SEQ ID NO: 334966 - RNA, 24 nt, Human
uguacaaaaaaacuagaagcuuuu

SEQ ID NO: 334967 - RNA, 19 nt, Human
ugucugcagaggugagggg

SEQ ID NO: 334968 - RNA, 21 nt, Human
ugucuuccgagccacgagccu

SEQ ID NO: 334969 - RNA, 23 nt, Human
ugugauaaaaaagcaaagaaaga

SEQ ID NO: 334970 - RNA, 20 nt, Human
uuaacaaagaaaauuaaucu

SEQ ID NO: 334971 - RNA, 23 nt, Human
uucuagaccagucuaucccagac

SEQ ID NO: 334972 - RNA, 20 nt, Human
uugaagaagugccucaacca

SEQ ID NO: 334973 - RNA, 24 nt, Human
uugcucaaucuugucaauugggag

SEQ ID NO: 334974 - RNA, 18 nt, Human
uugugugcaguucccacc

SEQ ID NO: 334975 - RNA, 20 nt, Human
uuucugguuugaacaacauc

SEQ ID NO: 334976 - RNA, 24 nt, Human
aagaacaucccuuuuaaucacaaa

SEQ ID NO: 334977 - RNA, 19 nt, Human
aagcugccccuacccaggc

SEQ ID NO: 334978 - RNA, 24 nt, Human
aagcugccccuacccaggccugcc

SEQ ID NO: 334979 - RNA, 23 nt, Human
aggcuccagaagcugccccuacc

SEQ ID NO: 334980 - RNA, 24 nt, Human
cacaaaccacucauccacaaaugu

SEQ ID NO: 334981 - RNA, 20 nt, Human
cccccuuccuaggguggcgg

SEQ ID NO: 334982 - RNA, 26 nt, Human
ccuggccucacccugcagccgguucc

SEQ ID NO: 334983 - RNA, 23 nt, Human
cuaggguggcgguggccuccagc

SEQ ID NO: 334984 - RNA, 21 nt, Human
cuccagaagcugccccuaccc

SEQ ID NO: 334985 - RNA, 23 nt, Human
cugcagccugggugcacccgcgg

SEQ ID NO: 334986 - RNA, 23 nt, Human
cuuuuaaucacaaaccacucauc

SEQ ID NO: 334987 - RNA, 20 nt, Human
gaagaaggggggcauugugg

SEQ ID NO: 334988 - RNA, 21 nt, Human
ggcuggaagaaggggggcauu

SEQ ID NO: 334989 - RNA, 18 nt, Human
ucacccugcagccugggu

SEQ ID NO: 334990 - RNA, 19 nt, Human
ucacgucccugcccccuuc

SEQ ID NO: 334991 - RNA, 18 nt, Human
uccagguuaauaccagag

SEQ ID NO: 334992 - RNA, 23 nt, Human
uccuaggguggcgguggccuccc

SEQ ID NO: 334993 - RNA, 20 nt, Human
ucugucccaaggcuccagaa

SEQ ID NO: 334994 - RNA, 20 nt, Human
ugccuggccucacccugcag

SEQ ID NO: 334995 - RNA, 20 nt, Human
ugucccaaggcuccagaagc

SEQ ID NO: 334996 - RNA, 22 nt, Human
uguggcuaugggguaagcaguc

SEQ ID NO: 334997 - RNA, 20 nt, Human
uuccuaggguggcgguggcc

SEQ ID NO: 334998 - RNA, 21 nt, Human
uucuuggcuggaagaaggggg

SEQ ID NO: 334999 - RNA, 24 nt, Human
uucuuggcuggaagaaggggggca

SEQ ID NO: 335000 - RNA, 25 nt, Human
uucuuggcuggaagaaggggggcau

SEQ ID NO: 335001 - RNA, 19 nt, Human
uuggcuggaagaagggggg

SEQ ID NO: 335002 - RNA, 20 nt, Human
aacagcauagaaaccugcag

SEQ ID NO: 335003 - RNA, 18 nt, Human
aaccugcaggcagaggcu

SEQ ID NO: 335004 - RNA, 19 nt, Human
aagcagggccuagacugcg

SEQ ID NO: 335005 - RNA, 24 nt, Human
acaguagcuggagauuggcagcac

SEQ ID NO: 335006 - RNA, 22 nt, Human
acccacccgaucucccaucccc

SEQ ID NO: 335007 - RNA, 24 nt, Human
acccacuccaucucaccgggaccc

SEQ ID NO: 335008 - RNA, 23 nt, Human
acccccacuccagccucugguca

SEQ ID NO: 335009 - RNA, 25 nt, Human
agaaacagcauagaaaccugcaggc

SEQ ID NO: 335010 - RNA, 25 nt, Human
agagccccugccuauauuucugccu

SEQ ID NO: 335011 - RNA, 19 nt, Human
agagggccccucacccaca

SEQ ID NO: 335012 - RNA, 24 nt, Human
agauuggcagcacccacccgaucu

SEQ ID NO: 335013 - RNA, 21 nt, Human
agcagauagaggccacaagcu

SEQ ID NO: 335014 - RNA, 18 nt, Human
agccccucccuucuccuc

SEQ ID NO: 335015 - RNA, 26 nt, Human
agccccucccuucuccucccagccuu

SEQ ID NO: 335016 - RNA, 19 nt, Human
aggaggcccaggccccauc

SEQ ID NO: 335017 - RNA, 20 nt, Human
caagcucuggccuuaucaca

SEQ ID NO: 335018 - RNA, 22 nt, Human
cacagcaucaugauggaaugga

SEQ ID NO: 335019 - RNA, 18 nt, Human
cagcaggugauuucuugc

SEQ ID NO: 335020 - RNA, 21 nt, Human
cagcauagaaaccugcaggca

SEQ ID NO: 335021 - RNA, 22 nt, Human
cagccccucccuucuccuccca

SEQ ID NO: 335022 - RNA, 24 nt, Human
caggagccagggcaggaaccagag

SEQ ID NO: 335023 - RNA, 19 nt, Human
caggccacgcauggcuccu

SEQ ID NO: 335024 - RNA, 20 nt, Human
caggugggguguggccacag

SEQ ID NO: 335025 - RNA, 21 nt, Human
cauggcuccugggaaccccca

SEQ ID NO: 335026 - RNA, 24 nt, Human
ccacgcauggcuccugggaacccc

SEQ ID NO: 335027 - RNA, 21 nt, Human
ccccauccgcacagcaagucc

SEQ ID NO: 335028 - RNA, 19 nt, Human
ccccucccuucuccuccca

SEQ ID NO: 335029 - RNA, 21 nt, Human
ccuccacuggcccuagaauga

SEQ ID NO: 335030 - RNA, 21 nt, Human
ccugagccucagccagggagc

SEQ ID NO: 335031 - RNA, 22 nt, Human
ccugggaacccccagccccucc

SEQ ID NO: 335032 - RNA, 27 nt, Human
ccugggaacccccagccccucccuucu

SEQ ID NO: 335033 - RNA, 26 nt, Human
ccuucuccucccagccuuuccagcug

SEQ ID NO: 335034 - RNA, 21 nt, Human
gagcaggucagcccaggaagg

SEQ ID NO: 335035 - RNA, 22 nt, Human
gagccagggcaggaaccagaga

SEQ ID NO: 335036 - RNA, 23 nt, Human
gagcuggggcuggugcaggagcc

SEQ ID NO: 335037 - RNA, 21 nt, Human
gagcuugggcggauagccuga

SEQ ID NO: 335038 - RNA, 21 nt, Human
gcagcaggugauuucuugccc

SEQ ID NO: 335039 - RNA, 18 nt, Human
gccacgcauggcuccugg

SEQ ID NO: 335040 - RNA, 21 nt, Human
gcccaugaccagguggggugu

SEQ ID NO: 335041 - RNA, 20 nt, Human
gcggcuaaggcuaggcugga

SEQ ID NO: 335042 - RNA, 19 nt, Human
ggaacccccagccccuccc

SEQ ID NO: 335043 - RNA, 21 nt, Human
ggaacgucuuccaagagcccc

SEQ ID NO: 335044 - RNA, 19 nt, Human
ggcaggaaccagagauggg

SEQ ID NO: 335045 - RNA, 23 nt, Human
ggcuccugggaacccccagcccc

SEQ ID NO: 335046 - RNA, 21 nt, Human
ggcuggugcaggagccagggc

SEQ ID NO: 335047 - RNA, 20 nt, Human
uaacacacccccacuccagc

SEQ ID NO: 335048 - RNA, 22 nt, Human
uaagaaacagcauagaaaccug

SEQ ID NO: 335049 - RNA, 24 nt, Human
uagaaugagcaaagagcuugggcg

SEQ ID NO: 335050 - RNA, 20 nt, Human
uaggaaggaggcccaggccc

SEQ ID NO: 335051 - RNA, 21 nt, Human
uccccagggaacuuucuucca

SEQ ID NO: 335052 - RNA, 22 nt, Human
ucuuccaagagccccugccuau

SEQ ID NO: 335053 - RNA, 26 nt, Human
ugcccagcacacaagcucuggccuua

SEQ ID NO: 335054 - RNA, 20 nt, Human
ugccuggauguaggcaggag

SEQ ID NO: 335055 - RNA, 19 nt, Human
ugcggagcacaggaugcag

SEQ ID NO: 335056 - RNA, 22 nt, Human
uggacucugcaggccacgcaug

SEQ ID NO: 335057 - RNA, 21 nt, Human
uggccuuaucacauuuuccuc

SEQ ID NO: 335058 - RNA, 18 nt, Human
uggcuccugggaaccccc

SEQ ID NO: 335059 - RNA, 23 nt, Human
uguaggaaggaggcccaggcccc

SEQ ID NO: 335060 - RNA, 22 nt, Human
ugugcuaagaaacagcauagaa

SEQ ID NO: 335061 - RNA, 23 nt, Human
uugccaggugugacccacuccau

SEQ ID NO: 335062 - RNA, 21 nt, Human
aaaaauacauuccccugggcu

SEQ ID NO: 335063 - RNA, 23 nt, Human
aaaaauacauuccccugggcuag

SEQ ID NO: 335064 - RNA, 20 nt, Human
agacugaauuuacacuggua

SEQ ID NO: 335065 - RNA, 21 nt, Human
ccugagacccagaccuucagg

SEQ ID NO: 335066 - RNA, 27 nt, Human
gagaaaagacugaauuuacacugguag

SEQ ID NO: 335067 - RNA, 21 nt, Human
ugauagaaagacugaaaacac

SEQ ID NO: 335068 - RNA, 24 nt, Human
aaacacaaguacaccugaaaucac

SEQ ID NO: 335069 - RNA, 21 nt, Human
aaauauauuucaaaccuaaaa

SEQ ID NO: 335070 - RNA, 24 nt, Human
aaccagugacgcagcgccguagcc

SEQ ID NO: 335071 - RNA, 18 nt, Human
aaguacaccugaaaucac

SEQ ID NO: 335072 - RNA, 22 nt, Human
acaaguacaccugaaaucacca

SEQ ID NO: 335073 - RNA, 19 nt, Human
accagaaaaagguacugca

SEQ ID NO: 335074 - RNA, 21 nt, Human
acgagucucuaugcauaaaug

SEQ ID NO: 335075 - RNA, 26 nt, Human
aggaaauagucaacuuguuuaaaaug

SEQ ID NO: 335076 - RNA, 18 nt, Human
aggaauugucauuuuauu

SEQ ID NO: 335077 - RNA, 23 nt, Human
caacagcuauaagcugcaauuuu

SEQ ID NO: 335078 - RNA, 23 nt, Human
caagaggaaagcgccugcaaacc

SEQ ID NO: 335079 - RNA, 21 nt, Human
caauaguuaagauuaccaaau

SEQ ID NO: 335080 - RNA, 24 nt, Human
cagaaaaguuugaaacaaaacccc

SEQ ID NO: 335081 - RNA, 20 nt, Human
ccgcagcagucgccacuucc

SEQ ID NO: 335082 - RNA, 19 nt, Human
ccugcaaaccagugacgca

SEQ ID NO: 335083 - RNA, 21 nt, Human
ccugcaaaccagugacgcagc

SEQ ID NO: 335084 - RNA, 23 nt, Human
cgccaaccuggcucccgaggcgc

SEQ ID NO: 335085 - RNA, 21 nt, Human
cgccguagccggcggaggacc

SEQ ID NO: 335086 - RNA, 22 nt, Human
gaaaaguuugaaacaaaacccc

SEQ ID NO: 335087 - RNA, 21 nt, Human
gacgcagcgccguagccggcg

SEQ ID NO: 335088 - RNA, 24 nt, Human
gucaauuauaacacauuaaaaagu

SEQ ID NO: 335089 - RNA, 24 nt, Human
guccauuuucaaaagcugaacaua

SEQ ID NO: 335090 - RNA, 18 nt, Human
gucccuuuauucaaaugg

SEQ ID NO: 335091 - RNA, 21 nt, Human
guggucccuuuauucaaaugg

SEQ ID NO: 335092 - RNA, 23 nt, Human
guuugaggucuauugcuuuuaac

SEQ ID NO: 335093 - RNA, 20 nt, Human
uaaaucggaaacguccauuu

SEQ ID NO: 335094 - RNA, 25 nt, Human
uacaccaauaguuaagauuaccaaa

SEQ ID NO: 335095 - RNA, 20 nt, Human
uacauuuguaaaucggaaac

SEQ ID NO: 335096 - RNA, 20 nt, Human
uaccagaaaaagguacugca

SEQ ID NO: 335097 - RNA, 24 nt, Human
uaguuugaggucuauugcuuuuaa

SEQ ID NO: 335098 - RNA, 27 nt, Human
uaucauauuccuucaauaguuugaggu

SEQ ID NO: 335099 - RNA, 23 nt, Human
ucaauuucuaucaucagaaccaa

SEQ ID NO: 335100 - RNA, 19 nt, Human
ucaggaguacauaaacaca

SEQ ID NO: 335101 - RNA, 23 nt, Human
ucaggcccgcagcagucgccacu

SEQ ID NO: 335102 - RNA, 23 nt, Human
ucccgaggcgcgugagaccagcg

SEQ ID NO: 335103 - RNA, 19 nt, Human
ugcaaaccagugacgcagc

SEQ ID NO: 335104 - RNA, 19 nt, Human
uuucugcuacaaaauuuac

SEQ ID NO: 335105 - RNA, 21 nt, Human
uuucugcuacaaaauuuacca

SEQ ID NO: 335106 - RNA, 23 nt, Human
aaaaauuucucaacaauuuauaa

SEQ ID NO: 335107 - RNA, 18 nt, Human
aaacacugaaagcaccac

SEQ ID NO: 335108 - RNA, 19 nt, Human
aaacacugaaagcaccacu

SEQ ID NO: 335109 - RNA, 20 nt, Human
aaccugauuagguucaagcc

SEQ ID NO: 335110 - RNA, 19 nt, Human
aagagccuggaaagacacc

SEQ ID NO: 335111 - RNA, 24 nt, Human
aagcagcggcguagccggcggaaa

SEQ ID NO: 335112 - RNA, 24 nt, Human
aagcagcggcguagccggcggagg

SEQ ID NO: 335113 - RNA, 25 nt, Human
aagcgauucuccagccucagccucc

SEQ ID NO: 335114 - RNA, 24 nt, Human
accaaagugcaaagucaguucccc

SEQ ID NO: 335115 - RNA, 22 nt, Human
accuggcucccgagacgcgugc

SEQ ID NO: 335116 - RNA, 24 nt, Human
acugugacgaaccugcguucugcc

SEQ ID NO: 335117 - RNA, 21 nt, Human
acuuccucucauugcagaaac

SEQ ID NO: 335118 - RNA, 24 nt, Human
agacaccaugaaaucaccucaacu

SEQ ID NO: 335119 - RNA, 22 nt, Human
agagacaaggucucgcucuguu

SEQ ID NO: 335120 - RNA, 24 nt, Human
agcggcguagccggcggaggccca

SEQ ID NO: 335121 - RNA, 24 nt, Human
aggaaagugccugcaagccacuga

SEQ ID NO: 335122 - RNA, 22 nt, Human
aggaacugugaagauguagccg

SEQ ID NO: 335123 - RNA, 25 nt, Human
aggugucaaaggcaaguaacacuuc

SEQ ID NO: 335124 - RNA, 18 nt, Human
augcacaggugucaaagg

SEQ ID NO: 335125 - RNA, 21 nt, Human
auucugcagucugguuccaaa

SEQ ID NO: 335126 - RNA, 21 nt, Human
caaaaacacugaaagcaccac

SEQ ID NO: 335127 - RNA, 21 nt, Human
caaaaacacugaaagcaccac

SEQ ID NO: 335128 - RNA, 23 nt, Human
caaacucaacauaucagcagcaa

SEQ ID NO: 335129 - RNA, 23 nt, Human
caaccuaucgaaguccaaaccaa

SEQ ID NO: 335130 - RNA, 18 nt, Human
caagagccuggaaagaca

SEQ ID NO: 335131 - RNA, 23 nt, Human
caagaggaaagugccugcaagcc

SEQ ID NO: 335132 - RNA, 25 nt, Human
cacaccuggccuugaaacauuauuu

SEQ ID NO: 335133 - RNA, 22 nt, Human
caccccuccauucugcagucug

SEQ ID NO: 335134 - RNA, 18 nt, Human
cacuuuuaccaacaaagc

SEQ ID NO: 335135 - RNA, 20 nt, Human
cagcaugcaugggagaucac

SEQ ID NO: 335136 - RNA, 22 nt, Human
cagccucagccucccaaaguag

SEQ ID NO: 335137 - RNA, 23 nt, Human
cagcggcguagccggcggaggcc

SEQ ID NO: 335138 - RNA, 23 nt, Human
ccaaaaacacugaaagcaccagu

SEQ ID NO: 335139 - RNA, 21 nt, Human
ccacccaguggccaguugugu

SEQ ID NO: 335140 - RNA, 20 nt, Human
ccccgcagcagucgccacuu

SEQ ID NO: 335141 - RNA, 20 nt, Human
ccccgcagcagucgccacuu

SEQ ID NO: 335142 - RNA, 19 nt, Human
cccgagcuggagugcagug

SEQ ID NO: 335143 - RNA, 20 nt, Human
ccgcagcagucgccacuucc

SEQ ID NO: 335144 - RNA, 20 nt, Human
ccgcagcagucgccacuucc

SEQ ID NO: 335145 - RNA, 19 nt, Human
ccugagguuccagagaagu

SEQ ID NO: 335146 - RNA, 23 nt, Human
cgacgucggcgcuccagcugcac

SEQ ID NO: 335147 - RNA, 23 nt, Human
cgccaaccuggcucccgagacgc

SEQ ID NO: 335148 - RNA, 23 nt, Human
cuccagccucagccucccaaagu

SEQ ID NO: 335149 - RNA, 19 nt, Human
cuccagcugcacucggccg

SEQ ID NO: 335150 - RNA, 26 nt, Human
cucccgagacgcgugcgagcaccgcu

SEQ ID NO: 335151 - RNA, 26 nt, Human
cucccgagacgcgugcgagcaccgcu

SEQ ID NO: 335152 - RNA, 20 nt, Human
cuggcucccgagacgcgugc

SEQ ID NO: 335153 - RNA, 25 nt, Human
cuucauagccccuuaacaugucacu

SEQ ID NO: 335154 - RNA, 18 nt, Human
gaaagaaaauuaagagua

SEQ ID NO: 335155 - RNA, 21 nt, Human
gaacacuaucugccaaaaaca

SEQ ID NO: 335156 - RNA, 24 nt, Human
gagugcagugguacaaucacagcu

SEQ ID NO: 335157 - RNA, 22 nt, Human
gccaaccuggcucccgagacgc

SEQ ID NO: 335158 - RNA, 23 nt, Human
gccucaagcgauucuccagccuc

SEQ ID NO: 335159 - RNA, 24 nt, Human
gcgauucuccagccucagccuccc

SEQ ID NO: 335160 - RNA, 27 nt, Human
gcuccagcugcacucggccgggcucgu

SEQ ID NO: 335161 - RNA, 19 nt, Human
ggaaaauggagaggauucu

SEQ ID NO: 335162 - RNA, 21 nt, Human
ggaaagacgagauauaugaga

SEQ ID NO: 335163 - RNA, 22 nt, Human
ggaacacuaucugccaaaaaca

SEQ ID NO: 335164 - RNA, 21 nt, Human
ggagaggauucucaaaacaga

SEQ ID NO: 335165 - RNA, 21 nt, Human
ggaucuagucauuaaaacaua

SEQ ID NO: 335166 - RNA, 19 nt, Human
ggugauggucucucaguuc

SEQ ID NO: 335167 - RNA, 22 nt, Human
uaaaacauaugcacagguguca

SEQ ID NO: 335168 - RNA, 25 nt, Human
uaaacuguauuuuaacuuagcacaa

SEQ ID NO: 335169 - RNA, 20 nt, Human
uaaaugcaaacauauauaca

SEQ ID NO: 335170 - RNA, 24 nt, Human
uacucauagucaguguuacacuag

SEQ ID NO: 335171 - RNA, 21 nt, Human
uacugccgagaaaugggcggg

SEQ ID NO: 335172 - RNA, 24 nt, Human
uagaaguauuccuuccaucaaccu

SEQ ID NO: 335173 - RNA, 22 nt, Human
uagagacaaggucucgcucugu

SEQ ID NO: 335174 - RNA, 24 nt, Human
uauguaaaugcaaacauauauaca

SEQ ID NO: 335175 - RNA, 26 nt, Human
uauguaaaugcaaacauauauacaca

SEQ ID NO: 335176 - RNA, 18 nt, Human
ucaugucggcucugaaau

SEQ ID NO: 335177 - RNA, 25 nt, Human
ucggaggaacugugaagauguagca

SEQ ID NO: 335178 - RNA, 19 nt, Human
ucggcgacgucggcgcucc

SEQ ID NO: 335179 - RNA, 24 nt, Human
ucucgcucuguuccccgagcugga

SEQ ID NO: 335180 - RNA, 19 nt, Human
ucuguaaaucugaccuugc

SEQ ID NO: 335181 - RNA, 20 nt, Human
ucuguguaaccaaagugcaa

SEQ ID NO: 335182 - RNA, 22 nt, Human
ugaaaucaccucaacucaagug

SEQ ID NO: 335183 - RNA, 25 nt, Human
ugaagcagcggcguagccggcggag

SEQ ID NO: 335184 - RNA, 24 nt, Human
ugagggugucuugacaugaucuua

SEQ ID NO: 335185 - RNA, 21 nt, Human
ugagugauauagucacuguug

SEQ ID NO: 335186 - RNA, 23 nt, Human
uggaacacuaucugccaaaaaca

SEQ ID NO: 335187 - RNA, 24 nt, Human
uggaacacuaucugccaaaaacac

SEQ ID NO: 335188 - RNA, 18 nt, Human
uggagugcagugguacaa

SEQ ID NO: 335189 - RNA, 19 nt, Human
uggagugcagugguacaau

SEQ ID NO: 335190 - RNA, 21 nt, Human
uggagugcagugguacaauca

SEQ ID NO: 335191 - RNA, 23 nt, Human
uggcagcaugcaugggagaucac

SEQ ID NO: 335192 - RNA, 24 nt, Human
ugggauuucaggcaugaaucacca

SEQ ID NO: 335193 - RNA, 20 nt, Human
ugggcggguccugagguucc

SEQ ID NO: 335194 - RNA, 22 nt, Human
ugguacaaucacagcucacuag

SEQ ID NO: 335195 - RNA, 22 nt, Human
uguaaccaaagugcaaagucag

SEQ ID NO: 335196 - RNA, 23 nt, Human
ugucaaaggcaaguaacacuacc

SEQ ID NO: 335197 - RNA, 21 nt, Human
uguuaugacauucguaagugg

SEQ ID NO: 335198 - RNA, 23 nt, Human
uuaaaauaaucauuacacuuccu

SEQ ID NO: 335199 - RNA, 20 nt, Human
uuagauccaaugcugaguga

SEQ ID NO: 335200 - RNA, 23 nt, Human
uucaagccacaaguucccacccc

SEQ ID NO: 335201 - RNA, 18 nt, Human
uucaguguccagagucuu

SEQ ID NO: 335202 - RNA, 18 nt, Human
uucaguguccagagucuu

SEQ ID NO: 335203 - RNA, 18 nt, Human
uucccaccccuccauucu

SEQ ID NO: 335204 - RNA, 18 nt, Human
uuccccgagcuggagugc

SEQ ID NO: 335205 - RNA, 24 nt, Human
uucgcuaguuaggucuguucuucu

SEQ ID NO: 335206 - RNA, 22 nt, Human
uuggaucuagucauuaaaacau

SEQ ID NO: 335207 - RNA, 27 nt, Human
uuuuuuuuuuuuuuuuuuuuuuugggg

SEQ ID NO: 335208 - RNA, 21 nt, Human
aaaauauacacccccaaucag

SEQ ID NO: 335209 - RNA, 24 nt, Human
aaaccaaaacaaagccuucgaaaa

SEQ ID NO: 335210 - RNA, 21 nt, Human
aaaggaggggagggaggaaau

SEQ ID NO: 335211 - RNA, 20 nt, Human
aaauauacacccccaaucag

SEQ ID NO: 335212 - RNA, 21 nt, Human
aacaaguagucccccaaccuc

SEQ ID NO: 335213 - RNA, 19 nt, Human
aagcagcagccuggugugc

SEQ ID NO: 335214 - RNA, 22 nt, Human
aagcagcagccuggugugcagc

SEQ ID NO: 335215 - RNA, 18 nt, Human
aauguaguucccaaauac

SEQ ID NO: 335216 - RNA, 21 nt, Human
acaaguagucccccaaccuca

SEQ ID NO: 335217 - RNA, 19 nt, Human
acacugugguauguggggg

SEQ ID NO: 335218 - RNA, 20 nt, Human
acagggccccaacuccucau

SEQ ID NO: 335219 - RNA, 18 nt, Human
acaguggaggggccuccg

SEQ ID NO: 335220 - RNA, 20 nt, Human
acaugaaggacagacaggcu

SEQ ID NO: 335221 - RNA, 22 nt, Human
accccaugacuuggccuggagg

SEQ ID NO: 335222 - RNA, 18 nt, Human
acccccaaucagagaggg

SEQ ID NO: 335223 - RNA, 22 nt, Human
acguggcggggcgccggcagac

SEQ ID NO: 335224 - RNA, 21 nt, Human
acugccuguucugggaccagc

SEQ ID NO: 335225 - RNA, 25 nt, Human
agacgggagucaggggacccugggg

SEQ ID NO: 335226 - RNA, 22 nt, Human
agccaggggcucuggcuggacc

SEQ ID NO: 335227 - RNA, 24 nt, Human
agcccccggccucucuccacccag

SEQ ID NO: 335228 - RNA, 22 nt, Human
agccccuggcccuggacugucc

SEQ ID NO: 335229 - RNA, 18 nt, Human
aggcacauuuugcaccug

SEQ ID NO: 335230 - RNA, 18 nt, Human
aggcaguucccgagucug

SEQ ID NO: 335231 - RNA, 21 nt, Human
aggcaguucccgagucugcuu

SEQ ID NO: 335232 - RNA, 24 nt, Human
aggcauugcuggacucauuuuucu

SEQ ID NO: 335233 - RNA, 20 nt, Human
aggccagaaccacagguggg

SEQ ID NO: 335234 - RNA, 23 nt, Human
aggccagaaccacagguggggga

SEQ ID NO: 335235 - RNA, 18 nt, Human
aggcggccuucccagugc

SEQ ID NO: 335236 - RNA, 22 nt, Human
aggcggcugccgacucagccag

SEQ ID NO: 335237 - RNA, 21 nt, Human
agggagggggguuuggggggc

SEQ ID NO: 335238 - RNA, 24 nt, Human
aggggacccuggggacccuuccag

SEQ ID NO: 335239 - RNA, 23 nt, Human
aggggcucuggcuggacccagag

SEQ ID NO: 335240 - RNA, 23 nt, Human
agugcauucacaggcagcuaccu

SEQ ID NO: 335241 - RNA, 24 nt, Human
agugucuacacucguacgagcagc

SEQ ID NO: 335242 - RNA, 22 nt, Human
auacaaauuuguugcuggaggc

SEQ ID NO: 335243 - RNA, 23 nt, Human
aucucguuguacucgucacuagc

SEQ ID NO: 335244 - RNA, 19 nt, Human
augcagcagugucagggga

SEQ ID NO: 335245 - RNA, 23 nt, Human
caaaacagccaugcugaggaagu

SEQ ID NO: 335246 - RNA, 18 nt, Human
caacagcgggaagcaguu

SEQ ID NO: 335247 - RNA, 20 nt, Human
caccuggacgcugccggugg

SEQ ID NO: 335248 - RNA, 22 nt, Human
caccuggacgcugccggugggg

SEQ ID NO: 335249 - RNA, 23 nt, Human
cagaaggcggccuucccagugcc

SEQ ID NO: 335250 - RNA, 19 nt, Human
cagagggcuggcugcuccc

SEQ ID NO: 335251 - RNA, 19 nt, Human
cagaugggacaaggacccu

SEQ ID NO: 335252 - RNA, 22 nt, Human
cagcccccgccgucggcagcuc

SEQ ID NO: 335253 - RNA, 21 nt, Human
cagcccccggccucucuccac

SEQ ID NO: 335254 - RNA, 18 nt, Human
cagccccugggcucuucc

SEQ ID NO: 335255 - RNA, 18 nt, Human
cagcuuaacucugucccu

SEQ ID NO: 335256 - RNA, 22 nt, Human
caggcacucuccaggccuagga

SEQ ID NO: 335257 - RNA, 20 nt, Human
cagggguggccuccugggac

SEQ ID NO: 335258 - RNA, 18 nt, Human
cagugugugaggguggug

SEQ ID NO: 335259 - RNA, 20 nt, Human
caugaaggacagacaggcug

SEQ ID NO: 335260 - RNA, 18 nt, Human
ccacaaaggcagggcccc

SEQ ID NO: 335261 - RNA, 19 nt, Human
ccacaaaggcagggcccca

SEQ ID NO: 335262 - RNA, 21 nt, Human
ccaccacugcccacuuuucug

SEQ ID NO: 335263 - RNA, 21 nt, Human
ccacugcuggggacagucugg

SEQ ID NO: 335264 - RNA, 25 nt, Human
ccaggcaaauguauggguacccaug

SEQ ID NO: 335265 - RNA, 25 nt, Human
ccagugugugagggugguguugagg

SEQ ID NO: 335266 - RNA, 20 nt, Human
cccccaagcugggcgggggu

SEQ ID NO: 335267 - RNA, 22 nt, Human
cccccaagcugggcgggggucc

SEQ ID NO: 335268 - RNA, 21 nt, Human
ccccccaagcugggcgggggu

SEQ ID NO: 335269 - RNA, 22 nt, Human
cccccgcuucauucccuuugga

SEQ ID NO: 335270 - RNA, 18 nt, Human
ccccugccugcccccagg

SEQ ID NO: 335271 - RNA, 20 nt, Human
cccgcccgaugcaccccgcc

SEQ ID NO: 335272 - RNA, 19 nt, Human
cccgugccaccacugccca

SEQ ID NO: 335273 - RNA, 26 nt, Human
cccguggaccccugccugcccccagg

SEQ ID NO: 335274 - RNA, 23 nt, Human
cccugugcccaggggaccuccuc

SEQ ID NO: 335275 - RNA, 23 nt, Human
cccuugcaggcuagacuuugcag

SEQ ID NO: 335276 - RNA, 23 nt, Human
ccggugaugacuuccacuuuuuc

SEQ ID NO: 335277 - RNA, 25 nt, Human
ccuauaguuggggagcccugggcag

SEQ ID NO: 335278 - RNA, 23 nt, Human
ccucagaggccagaaccacaggu

SEQ ID NO: 335279 - RNA, 21 nt, Human
ccucguuuaauuuuggggggc

SEQ ID NO: 335280 - RNA, 23 nt, Human
ccucugaagucccaaagaggccc

SEQ ID NO: 335281 - RNA, 19 nt, Human
ccugcuaacuggggcgaac

SEQ ID NO: 335282 - RNA, 23 nt, Human
ccugcucagacagccucucuuua

SEQ ID NO: 335283 - RNA, 23 nt, Human
ccuggcccuggacuguccugggg

SEQ ID NO: 335284 - RNA, 23 nt, Human
ccuguggcuggggaagggauggc

SEQ ID NO: 335285 - RNA, 22 nt, Human
cgaggacucagacccugacucg

SEQ ID NO: 335286 - RNA, 20 nt, Human
cgccuuuggcugcggagcuu

SEQ ID NO: 335287 - RNA, 19 nt, Human
cgcugcugcuccuugggcu

SEQ ID NO: 335288 - RNA, 22 nt, Human
cgggcacugcccccgugcaguc

SEQ ID NO: 335289 - RNA, 24 nt, Human
cguacaggcacauuuugcaccugu

SEQ ID NO: 335290 - RNA, 19 nt, Human
cucaacgcucgagagcauc

SEQ ID NO: 335291 - RNA, 20 nt, Human
cucacagaagccccuggccc

SEQ ID NO: 335292 - RNA, 21 nt, Human
cuccucaagugcacacaccuc

SEQ ID NO: 335293 - RNA, 18 nt, Human
cuccugggacgaggacuc

SEQ ID NO: 335294 - RNA, 23 nt, Human
cuccuugggcuucuggcuuggca

SEQ ID NO: 335295 - RNA, 21 nt, Human
cucuggcuggacccagaggcc

SEQ ID NO: 335296 - RNA, 22 nt, Human
cugcccaaauacaaaggcuugc

SEQ ID NO: 335297 - RNA, 18 nt, Human
cuggaggaaccuggggug

SEQ ID NO: 335298 - RNA, 20 nt, Human
cuguccugggggcagggaca

SEQ ID NO: 335299 - RNA, 22 nt, Human
cugugaauuaauccaguuagca

SEQ ID NO: 335300 - RNA, 23 nt, Human
cugugcagcauccccggcagccu

SEQ ID NO: 335301 - RNA, 24 nt, Human
cuugcacugcaucuguaacacauu

SEQ ID NO: 335302 - RNA, 24 nt, Human
cuuucucagggguggccuccuggg

SEQ ID NO: 335303 - RNA, 18 nt, Human
gacagauggagacgggag

SEQ ID NO: 335304 - RNA, 18 nt, Human
gaccuaggaacagaaggc

SEQ ID NO: 335305 - RNA, 23 nt, Human
gacgugugacugggucucucggg

SEQ ID NO: 335306 - RNA, 25 nt, Human
gagcacacacugacacagagggcac

SEQ ID NO: 335307 - RNA, 20 nt, Human
gcacgcuccgcugcugcucc

SEQ ID NO: 335308 - RNA, 20 nt, Human
gcagcuucggaaggacuucu

SEQ ID NO: 335309 - RNA, 19 nt, Human
gcaguucccgagucugcuu

SEQ ID NO: 335310 - RNA, 23 nt, Human
gcauaguccccagcccuccccau

SEQ ID NO: 335311 - RNA, 22 nt, Human
gcccaaauacaaaggcuugcug

SEQ ID NO: 335312 - RNA, 18 nt, Human
gccccccaagcugggcgg

SEQ ID NO: 335313 - RNA, 18 nt, Human
gcccugggcaggggcaga

SEQ ID NO: 335314 - RNA, 18 nt, Human
gccuggaggaaccugggg

SEQ ID NO: 335315 - RNA, 23 nt, Human
gcgccgcuggaaugcagccaccc

SEQ ID NO: 335316 - RNA, 19 nt, Human
gcuccaggcucgggugggc

SEQ ID NO: 335317 - RNA, 22 nt, Human
gcucgagagcaucuuaaccuaa

SEQ ID NO: 335318 - RNA, 21 nt, Human
gcugcuccccacaaaggcagg

SEQ ID NO: 335319 - RNA, 23 nt, Human
gcugcuccuugggcuucuggcuu

SEQ ID NO: 335320 - RNA, 19 nt, Human
ggaacguggccaggcaaau

SEQ ID NO: 335321 - RNA, 24 nt, Human
ggaauugcauaguccccagcccuc

SEQ ID NO: 335322 - RNA, 18 nt, Human
ggacccagaggcuggcga

SEQ ID NO: 335323 - RNA, 21 nt, Human
ggagccagugugugagggugg

SEQ ID NO: 335324 - RNA, 18 nt, Human
ggaggaaccugggguggg

SEQ ID NO: 335325 - RNA, 21 nt, Human
gggaccuccuccucggccucc

SEQ ID NO: 335326 - RNA, 23 nt, Human
gggcacaguggaggggccuccgc

SEQ ID NO: 335327 - RNA, 21 nt, Human
gggcaggggcagagggcuggc

SEQ ID NO: 335328 - RNA, 22 nt, Human
gggcuucuggcuuggcagaccu

SEQ ID NO: 335329 - RNA, 18 nt, Human
gggugggaaggguguggg

SEQ ID NO: 335330 - RNA, 18 nt, Human
gugcagccgggcucccgg

SEQ ID NO: 335331 - RNA, 19 nt, Human
guggcggagaagccagggg

SEQ ID NO: 335332 - RNA, 18 nt, Human
gugggaagggugugggug

SEQ ID NO: 335333 - RNA, 23 nt, Human
guggggugggggcgggugggcgg

SEQ ID NO: 335334 - RNA, 22 nt, Human
guggggugggggcggguugacg

SEQ ID NO: 335335 - RNA, 24 nt, Human
guggugcaagcuggcucuuggcca

SEQ ID NO: 335336 - RNA, 18 nt, Human
guuguacucgucacuagc

SEQ ID NO: 335337 - RNA, 22 nt, Human
uaaacugaagagaagaugugca

SEQ ID NO: 335338 - RNA, 22 nt, Human
uaacagcacguccaaugggccc

SEQ ID NO: 335339 - RNA, 21 nt, Human
uaaccuaagaaaccaaaacaa

SEQ ID NO: 335340 - RNA, 19 nt, Human
uaagaaaccaaaacaaagc

SEQ ID NO: 335341 - RNA, 22 nt, Human
uagggucaggaucucccccgcu

SEQ ID NO: 335342 - RNA, 19 nt, Human
uaguccccagcccucccca

SEQ ID NO: 335343 - RNA, 19 nt, Human
uaucauaaaccugccacuu

SEQ ID NO: 335344 - RNA, 22 nt, Human
ucaacagucaaguggagacugu

SEQ ID NO: 335345 - RNA, 21 nt, Human
ucacaaggguagggucaggau

SEQ ID NO: 335346 - RNA, 20 nt, Human
ucacagaagccccuggcccc

SEQ ID NO: 335347 - RNA, 26 nt, Human
ucagaaaaucagcuuaaaaacuucca

SEQ ID NO: 335348 - RNA, 22 nt, Human
ucagccagggacucuuucucag

SEQ ID NO: 335349 - RNA, 26 nt, Human
ucaggaucucccccgcuucauucccu

SEQ ID NO: 335350 - RNA, 18 nt, Human
ucccaaagaggcccugug

SEQ ID NO: 335351 - RNA, 19 nt, Human
ucccccucugccucucaca

SEQ ID NO: 335352 - RNA, 19 nt, Human
ucccgugccaccacugccc

SEQ ID NO: 335353 - RNA, 24 nt, Human
ucggaaggacuucuccaugcagca

SEQ ID NO: 335354 - RNA, 22 nt, Human
ucucacagaagccccuggcccu

SEQ ID NO: 335355 - RNA, 20 nt, Human
ucucagggguggccuccugg

SEQ ID NO: 335356 - RNA, 24 nt, Human
ucucucgggagggccucugguucu

SEQ ID NO: 335357 - RNA, 22 nt, Human
ugaacacacgacgcucacaguc

SEQ ID NO: 335358 - RNA, 21 nt, Human
ugacacagagggcacagugga

SEQ ID NO: 335359 - RNA, 18 nt, Human
ugaccccuggcaucccau

SEQ ID NO: 335360 - RNA, 22 nt, Human
ugacugggucucucgggagggc

SEQ ID NO: 335361 - RNA, 19 nt, Human
ugacuuggccuggaggaac

SEQ ID NO: 335362 - RNA, 28 nt, Human
ugagcagcccccggccucucuccaccca

SEQ ID NO: 335363 - RNA, 21 nt, Human
ugagggucccccucugccucu

SEQ ID NO: 335364 - RNA, 20 nt, Human
ugagggugguguugagggcu

SEQ ID NO: 335365 - RNA, 24 nt, Human
ugaggucuuuuuuuaacagcuggc

SEQ ID NO: 335366 - RNA, 19 nt, Human
ugcagccgggcucccggcc

SEQ ID NO: 335367 - RNA, 20 nt, Human
ugcagggagggggguuuggg

SEQ ID NO: 335368 - RNA, 24 nt, Human
ugcagggagggggguuuggggggc

SEQ ID NO: 335369 - RNA, 23 nt, Human
ugccaccacugcccacuuuucug

SEQ ID NO: 335370 - RNA, 23 nt, Human
ugccccuugcaggcuagacuuug

SEQ ID NO: 335371 - RNA, 19 nt, Human
ugcccguggaccccugccu

SEQ ID NO: 335372 - RNA, 21 nt, Human
ugcccguggaccccugccugc

SEQ ID NO: 335373 - RNA, 19 nt, Human
ugccgacucagccagggac

SEQ ID NO: 335374 - RNA, 18 nt, Human
ugccgguggggugggggc

SEQ ID NO: 335375 - RNA, 20 nt, Human
ugccgguggggugggggcga

SEQ ID NO: 335376 - RNA, 21 nt, Human
ugccugcccccaggcgcuuca

SEQ ID NO: 335377 - RNA, 24 nt, Human
ugcuaacuggggcgaacacugugg

SEQ ID NO: 335378 - RNA, 23 nt, Human
ugcugcuccuugggcuucuggcu

SEQ ID NO: 335379 - RNA, 18 nt, Human
ugcugggaggcugacccc

SEQ ID NO: 335380 - RNA, 18 nt, Human
ugcugggaggcugacccc

SEQ ID NO: 335381 - RNA, 23 nt, Human
ugcuggggacagucugggacagc

SEQ ID NO: 335382 - RNA, 19 nt, Human
ugcugggggcugggggcag

SEQ ID NO: 335383 - RNA, 23 nt, Human
ugcugggggcugggggcagggcu

SEQ ID NO: 335384 - RNA, 20 nt, Human
ugcuguguggcggggucuuu

SEQ ID NO: 335385 - RNA, 18 nt, Human
uggaccccugccugcccc

SEQ ID NO: 335386 - RNA, 18 nt, Human
uggacggcacagcugcag

SEQ ID NO: 335387 - RNA, 21 nt, Human
uggccggcccaguggggugug

SEQ ID NO: 335388 - RNA, 21 nt, Human
uggcggagaagccaggggcuc

SEQ ID NO: 335389 - RNA, 23 nt, Human
uggcuaaggcuuaaagcagagac

SEQ ID NO: 335390 - RNA, 24 nt, Human
uggcugcggagcuuguaacacugg

SEQ ID NO: 335391 - RNA, 23 nt, Human
uggcugcuccccacaaaggcagg

SEQ ID NO: 335392 - RNA, 25 nt, Human
uggcuggggaagggauggccaacag

SEQ ID NO: 335393 - RNA, 19 nt, Human
ugggaaacaaguagucccc

SEQ ID NO: 335394 - RNA, 18 nt, Human
ugggaaaugaagauagua

SEQ ID NO: 335395 - RNA, 20 nt, Human
ugggaaggguguggguggcg

SEQ ID NO: 335396 - RNA, 23 nt, Human
ugggaggcugaccccguuggugc

SEQ ID NO: 335397 - RNA, 20 nt, Human
ugggcacaggcguccacucc

SEQ ID NO: 335398 - RNA, 20 nt, Human
ugggcaggggcagagggcug

SEQ ID NO: 335399 - RNA, 21 nt, Human
ugggcaggggcagagggcugg

SEQ ID NO: 335400 - RNA, 21 nt, Human
ugggcuucuggcuuggcagac

SEQ ID NO: 335401 - RNA, 21 nt, Human
ugggggcagggacaccugugg

SEQ ID NO: 335402 - RNA, 18 nt, Human
ugggggcgggugggcggg

SEQ ID NO: 335403 - RNA, 20 nt, Human
uggggugggggcgggugggc

SEQ ID NO: 335404 - RNA, 20 nt, Human
uggggugugugguucccggc

SEQ ID NO: 335405 - RNA, 18 nt, Human
ugggugcagggagggggg

SEQ ID NO: 335406 - RNA, 18 nt, Human
uguccugggggcagggac

SEQ ID NO: 335407 - RNA, 22 nt, Human
ugugggggccagaacaugaagg

SEQ ID NO: 335408 - RNA, 21 nt, Human
uguggguggcggagaagccag

SEQ ID NO: 335409 - RNA, 21 nt, Human
uucaaaggaggggagggagga

SEQ ID NO: 335410 - RNA, 23 nt, Human
uucccagugcccguggaccccug

SEQ ID NO: 335411 - RNA, 23 nt, Human
uucccggccccgcaccuggacgc

SEQ ID NO: 335412 - RNA, 24 nt, Human
uucccuguuggcaucugaacugac

SEQ ID NO: 335413 - RNA, 22 nt, Human
uucugggaccagccccugggcu

SEQ ID NO: 335414 - RNA, 19 nt, Human
uugaacaggacgugcgggu

SEQ ID NO: 335415 - RNA, 28 nt, Human
uugaacaggacgugcgggucggacuucc

SEQ ID NO: 335416 - RNA, 24 nt, Human
uugcaccuguuuuucaaaacagcc

SEQ ID NO: 335417 - RNA, 23 nt, Human
uugcuggacucauuuuucugggg

SEQ ID NO: 335418 - RNA, 19 nt, Human
uugcuggaggcgucggcac

SEQ ID NO: 335419 - RNA, 21 nt, Human
uugcuguguggcggggucuuu

SEQ ID NO: 335420 - RNA, 21 nt, Human
uuuaacagcuggccaggagau

SEQ ID NO: 335421 - RNA, 20 nt, Human
uuucaaaacagccaugcuga

SEQ ID NO: 335422 - RNA, 21 nt, Human
uuuugcaccuguuuuucaaaa

SEQ ID NO: 335423 - RNA, 27 nt, Human
uuuuuuuuuuuuuuuuuuuuuucgggg

SEQ ID NO: 335424 - RNA, 19 nt, Human
aaaaagaaaagcugccuuc

SEQ ID NO: 335425 - RNA, 21 nt, Human
aaaaagaaaagcugccuucau

SEQ ID NO: 335426 - RNA, 23 nt, Human
aaagaaaagcugccuucaugaca

SEQ ID NO: 335427 - RNA, 26 nt, Human
aagguaccucccaucccccccacccc

SEQ ID NO: 335428 - RNA, 20 nt, Human
acagugucacuuugaagcuu

SEQ ID NO: 335429 - RNA, 23 nt, Human
agguaccucccaucccccccacc

SEQ ID NO: 335430 - RNA, 19 nt, Human
auggacccgccgcgcuccg

SEQ ID NO: 335431 - RNA, 22 nt, Human
cacacagcaggaaagaaagaga

SEQ ID NO: 335432 - RNA, 23 nt, Human
cagaaaaagaaaagcugccuuca

SEQ ID NO: 335433 - RNA, 22 nt, Human
cagcaggaaagaaagagauaac

SEQ ID NO: 335434 - RNA, 24 nt, Human
ccacccccaaaaucccgcugauuu

SEQ ID NO: 335435 - RNA, 20 nt, Human
cccacccccaaaaucccgcu

SEQ ID NO: 335436 - RNA, 20 nt, Human
cccaucccccccacccccaa

SEQ ID NO: 335437 - RNA, 20 nt, Human
cccccacccccaaaaucccc

SEQ ID NO: 335438 - RNA, 20 nt, Human
cccccccacccccaaaaucc

SEQ ID NO: 335439 - RNA, 24 nt, Human
cccccccacccccaaaaucccgcu

SEQ ID NO: 335440 - RNA, 20 nt, Human
ccccucguuucagauuucca

SEQ ID NO: 335441 - RNA, 25 nt, Human
cccgccgcgcuccgcagcggcaacc

SEQ ID NO: 335442 - RNA, 18 nt, Human
cccgcugauuucuuuucc

SEQ ID NO: 335443 - RNA, 23 nt, Human
ccucccaucccccccacccccaa

SEQ ID NO: 335444 - RNA, 24 nt, Human
ccucccaucccccccacccccaaa

SEQ ID NO: 335445 - RNA, 28 nt, Human
cuacaagcacacagcaggaaggguuucc

SEQ ID NO: 335446 - RNA, 19 nt, Human
cucccaucccccccacccc

SEQ ID NO: 335447 - RNA, 22 nt, Human
cucccaucccccccacccccaa

SEQ ID NO: 335448 - RNA, 19 nt, Human
cuggaaccacuacuaggag

SEQ ID NO: 335449 - RNA, 19 nt, Human
gguuguuguuucuuuuguc

SEQ ID NO: 335450 - RNA, 18 nt, Human
uaacaugaaccaguucug

SEQ ID NO: 335451 - RNA, 23 nt, Human
uaccucccaucccccccaccccc

SEQ ID NO: 335452 - RNA, 19 nt, Human
ucccaucccccccaccccc

SEQ ID NO: 335453 - RNA, 23 nt, Human
ucccaucccccccacccccaaaa

SEQ ID NO: 335454 - RNA, 21 nt, Human
ucccccccacccccaaaaucc

SEQ ID NO: 335455 - RNA, 18 nt, Human
ugccuucaugacaucccc

SEQ ID NO: 335456 - RNA, 20 nt, Human
aacuuguccuucgggcucca

SEQ ID NO: 335457 - RNA, 18 nt, Human
aacuuguuccauuuccuu

SEQ ID NO: 335458 - RNA, 18 nt, Human
aacuuguuccauuuccuu

SEQ ID NO: 335459 - RNA, 21 nt, Human
aagcgacaaaaaccugucccc

SEQ ID NO: 335460 - RNA, 20 nt, Human
acaaacacaacuuguuccau

SEQ ID NO: 335461 - RNA, 23 nt, Human
acaauauaagugugagcucuuga

SEQ ID NO: 335462 - RNA, 22 nt, Human
acuuguuccauuuccuuccccu

SEQ ID NO: 335463 - RNA, 21 nt, Human
aggcagcggcgucucuuguuc

SEQ ID NO: 335464 - RNA, 18 nt, Human
aggcagggggaggcgggg

SEQ ID NO: 335465 - RNA, 18 nt, Human
aggcagggggaggcgggg

SEQ ID NO: 335466 - RNA, 20 nt, Human
aggcagggggaggcgggggc

SEQ ID NO: 335467 - RNA, 20 nt, Human
aggcagggggaggcgggggc

SEQ ID NO: 335468 - RNA, 21 nt, Human
agggggccgcggcgcugcugc

SEQ ID NO: 335469 - RNA, 18 nt, Human
caacuccuucuccugcuc

SEQ ID NO: 335470 - RNA, 19 nt, Human
cccgccaccagagcugggg

SEQ ID NO: 335471 - RNA, 19 nt, Human
cccgcugcaaggcccgggg

SEQ ID NO: 335472 - RNA, 20 nt, Human
cccuccagccgggccggggc

SEQ ID NO: 335473 - RNA, 21 nt, Human
cccucucuccccccuccccca

SEQ ID NO: 335474 - RNA, 20 nt, Human
ccgaggcagcggcgucucuu

SEQ ID NO: 335475 - RNA, 24 nt, Human
ccgccgcugcaacuccuucuccug

SEQ ID NO: 335476 - RNA, 23 nt, Human
ccgcugaggcagggggaggcggg

SEQ ID NO: 335477 - RNA, 19 nt, Human
cgcuggcgggggcagccgc

SEQ ID NO: 335478 - RNA, 20 nt, Human
cuccagccgggccggggccc

SEQ ID NO: 335479 - RNA, 22 nt, Human
cuccaggaccgaggcagcggcg

SEQ ID NO: 335480 - RNA, 18 nt, Human
cugcugcccgccaccaga

SEQ ID NO: 335481 - RNA, 20 nt, Human
cugcugcccgccaccagagc

SEQ ID NO: 335482 - RNA, 20 nt, Human
gaagggggccgcggcgcugc

SEQ ID NO: 335483 - RNA, 22 nt, Human
gagcuggggucggggccccucc

SEQ ID NO: 335484 - RNA, 19 nt, Human
gcagggggaggcgggggcg

SEQ ID NO: 335485 - RNA, 18 nt, Human
gccgggccggggcccgcu

SEQ ID NO: 335486 - RNA, 19 nt, Human
ggaggcgggggcgacggcg

SEQ ID NO: 335487 - RNA, 21 nt, Human
ggcugcugguauuggaugcgu

SEQ ID NO: 335488 - RNA, 19 nt, Human
guaaagcgacaaaaaccug

SEQ ID NO: 335489 - RNA, 21 nt, Human
guaaagcgacaaaaaccuguc

SEQ ID NO: 335490 - RNA, 22 nt, Human
uaugccacaauauaagugugag

SEQ ID NO: 335491 - RNA, 19 nt, Human
uauuuaacucuuagacaac

SEQ ID NO: 335492 - RNA, 24 nt, Human
ucagccgccgcugcaacuccuucu

SEQ ID NO: 335493 - RNA, 22 nt, Human
ucagggccgaguccccgugagg

SEQ ID NO: 335494 - RNA, 24 nt, Human
uccccccucccccacaaagaaggc

SEQ ID NO: 335495 - RNA, 18 nt, Human
ucggggccccuccagccg

SEQ ID NO: 335496 - RNA, 24 nt, Human
ucuaaauuucaaaucagcagagcu

SEQ ID NO: 335497 - RNA, 20 nt, Human
ucuuagacaacuaagagguu

SEQ ID NO: 335498 - RNA, 20 nt, Human
ugagagaggccgauguagcu

SEQ ID NO: 335499 - RNA, 22 nt, Human
ugcaaggcccgggggagcgggc

SEQ ID NO: 335500 - RNA, 18 nt, Human
ugcguggcucgaacugac

SEQ ID NO: 335501 - RNA, 18 nt, Human
uggcucgaacugacgcgg

SEQ ID NO: 335502 - RNA, 18 nt, Human
ugggguuuugccaugacc

SEQ ID NO: 335503 - RNA, 22 nt, Human
uguuccauuuccuuccccucuc

SEQ ID NO: 335504 - RNA, 21 nt, Human
aaaaaaagaacagccaaagag

SEQ ID NO: 335505 - RNA, 20 nt, Human
aaaaaagaacagccaaagag

SEQ ID NO: 335506 - RNA, 18 nt, Human
aaaaagaacagccaaaga

SEQ ID NO: 335507 - RNA, 22 nt, Human
aaaagaacagccaaagagcagg

SEQ ID NO: 335508 - RNA, 24 nt, Human
aaagaacagccaaagagcagggua

SEQ ID NO: 335509 - RNA, 23 nt, Human
aacaaugaaaacaacacaacaaa

SEQ ID NO: 335510 - RNA, 23 nt, Human
aacacaaugcuuagcacaaacaa

SEQ ID NO: 335511 - RNA, 22 nt, Human
aagaacagccaaagagcagggu

SEQ ID NO: 335512 - RNA, 24 nt, Human
aaggagcuucugccaaaggacagg

SEQ ID NO: 335513 - RNA, 21 nt, Human
aagggcuccaaaaaaagaaca

SEQ ID NO: 335514 - RNA, 21 nt, Human
acaaacaauacucaauaaaua

SEQ ID NO: 335515 - RNA, 27 nt, Human
acagagcaacagcagcgauggucagaa

SEQ ID NO: 335516 - RNA, 22 nt, Human
acagccaaagagcaggguaccc

SEQ ID NO: 335517 - RNA, 25 nt, Human
acagccaaagagcaggguacccaaa

SEQ ID NO: 335518 - RNA, 23 nt, Human
acgccgagcacuacuagaagagc

SEQ ID NO: 335519 - RNA, 25 nt, Human
agcacaaacaauacucaauaaauaa

SEQ ID NO: 335520 - RNA, 23 nt, Human
agccaaagagcaggguacccaaa

SEQ ID NO: 335521 - RNA, 23 nt, Human
aucuucuccuauuucuagauucu

SEQ ID NO: 335522 - RNA, 19 nt, Human
aucuugucgggaccaaaug

SEQ ID NO: 335523 - RNA, 24 nt, Human
caaaaaaagaacagccaaagagca

SEQ ID NO: 335524 - RNA, 21 nt, Human
caacaaaguggagucaaucca

SEQ ID NO: 335525 - RNA, 19 nt, Human
caacaaugaaaacaacaca

SEQ ID NO: 335526 - RNA, 24 nt, Human
caaugcaagaacucucuaaaguuc

SEQ ID NO: 335527 - RNA, 28 nt, Human
caaugcuuagcacaaacaauacucaaua

SEQ ID NO: 335528 - RNA, 18 nt, Human
caccgcagacgccucugc

SEQ ID NO: 335529 - RNA, 21 nt, Human
caccgcagacgccucugccgc

SEQ ID NO: 335530 - RNA, 21 nt, Human
cacugggccugcgcagcagca

SEQ ID NO: 335531 - RNA, 23 nt, Human
cagccaaagagcaggguacccaa

SEQ ID NO: 335532 - RNA, 21 nt, Human
ccaacaauggaucacuacuau

SEQ ID NO: 335533 - RNA, 19 nt, Human
cuccaaaaaaagaacagcc

SEQ ID NO: 335534 - RNA, 21 nt, Human
cuccaaaaaaagaacagccaa

SEQ ID NO: 335535 - RNA, 23 nt, Human
cuggcacacagagcucaacugac

SEQ ID NO: 335536 - RNA, 24 nt, Human
gagcaacagcagcgauggucagaa

SEQ ID NO: 335537 - RNA, 22 nt, Human
gagcgccuggcacacagagcuc

SEQ ID NO: 335538 - RNA, 19 nt, Human
gcagcagcagccgcggcgc

SEQ ID NO: 335539 - RNA, 19 nt, Human
gggaaaugacaaggguuug

SEQ ID NO: 335540 - RNA, 23 nt, Human
gucacaauuuuuuuuaaccaccu

SEQ ID NO: 335541 - RNA, 23 nt, Human
uaaccaaguaacauuauucuuaa

SEQ ID NO: 335542 - RNA, 18 nt, Human
uaacugccgaaugaucuu

SEQ ID NO: 335543 - RNA, 23 nt, Human
uaagaaggcggaaguagccucca

SEQ ID NO: 335544 - RNA, 18 nt, Human
uaaggaaaacugaggggu

SEQ ID NO: 335545 - RNA, 19 nt, Human
uaaggaaaacugaggggua

SEQ ID NO: 335546 - RNA, 18 nt, Human
uacccccucccgagcgcc

SEQ ID NO: 335547 - RNA, 22 nt, Human
uagcacaaacaauacucaauaa

SEQ ID NO: 335548 - RNA, 22 nt, Human
uauagcaaggguuccauuccaa

SEQ ID NO: 335549 - RNA, 19 nt, Human
ucaaagcagucuagaaauc

SEQ ID NO: 335550 - RNA, 25 nt, Human
ucaacaaugaaaacaacacaacaaa

SEQ ID NO: 335551 - RNA, 22 nt, Human
ucauuaucuugccaauuauuuc

SEQ ID NO: 335552 - RNA, 23 nt, Human
ucuaaaguucauuggucacaauu

SEQ ID NO: 335553 - RNA, 18 nt, Human
ugaaaacaacacaacaaa

SEQ ID NO: 335554 - RNA, 19 nt, Human
ugaaauggccuaugccucc

SEQ ID NO: 335555 - RNA, 18 nt, Human
ugacugagaagggcucca

SEQ ID NO: 335556 - RNA, 23 nt, Human
ugagaagggcuccaaaaaaagaa

SEQ ID NO: 335557 - RNA, 22 nt, Human
ugggauauccaucagcucucug

SEQ ID NO: 335558 - RNA, 25 nt, Human
ugggggaaaugacaaggguuugggg

SEQ ID NO: 335559 - RNA, 26 nt, Human
ugguauccucaucaucuuuccacagg

SEQ ID NO: 335560 - RNA, 24 nt, Human
uuagcacaaacaauacucaauaaa

SEQ ID NO: 335561 - RNA, 18 nt, Human
uucuuuauuuggaaucua

SEQ ID NO: 335562 - RNA, 22 nt, Human
uuuuaaggaaaacugaggggua

SEQ ID NO: 335563 - RNA, 18 nt, Human
uuuuucuucuucuucuuc

SEQ ID NO: 335564 - RNA, 23 nt, Human
uuuuuugaccaaugccucucugg

SEQ ID NO: 335565 - RNA, 19 nt, Human
aaacacaagaagcaauauu

SEQ ID NO: 335566 - RNA, 25 nt, Human
aagaagcaauauuagaguugguuua

SEQ ID NO: 335567 - RNA, 18 nt, Human
acacagagcaauuuuuuu

SEQ ID NO: 335568 - RNA, 23 nt, Human
agaaaucaguuaucccaguuuuu

SEQ ID NO: 335569 - RNA, 23 nt, Human
agcugauccugaaauacggccuc

SEQ ID NO: 335570 - RNA, 20 nt, Human
aggggacauuucauaaucag

SEQ ID NO: 335571 - RNA, 22 nt, Human
aguuaucccaguuuuuuuccua

SEQ ID NO: 335572 - RNA, 18 nt, Human
auaaaacaggagaagccu

SEQ ID NO: 335573 - RNA, 22 nt, Human
aucuucugcugacucuuccaaa

SEQ ID NO: 335574 - RNA, 18 nt, Human
caagagauauacacagag

SEQ ID NO: 335575 - RNA, 22 nt, Human
cacguggaaggagccacacaga

SEQ ID NO: 335576 - RNA, 18 nt, Human
cauuacagauauaaagua

SEQ ID NO: 335577 - RNA, 21 nt, Human
ccucucagcuggcacaguccu

SEQ ID NO: 335578 - RNA, 22 nt, Human
ccucucagcuggcacaguccuc

SEQ ID NO: 335579 - RNA, 19 nt, Human
ccuguaaucuggcucagag

SEQ ID NO: 335580 - RNA, 24 nt, Human
ccuguaaucuggcucagagcugcu

SEQ ID NO: 335581 - RNA, 21 nt, Human
cggcagcugauccugaaauac

SEQ ID NO: 335582 - RNA, 20 nt, Human
cguggaaggagccacacaga

SEQ ID NO: 335583 - RNA, 23 nt, Human
cuccuccaacuccuacacggccc

SEQ ID NO: 335584 - RNA, 20 nt, Human
cuggaaugcuggcacuuucc

SEQ ID NO: 335585 - RNA, 20 nt, Human
cuucugcugacucuuccaaa

SEQ ID NO: 335586 - RNA, 18 nt, Human
gaaccggcagcugauccu

SEQ ID NO: 335587 - RNA, 20 nt, Human
gaaccggcagcugauccuga

SEQ ID NO: 335588 - RNA, 23 nt, Human
gaagucaaugacucaaaaaaguu

SEQ ID NO: 335589 - RNA, 18 nt, Human
gagaagccucuucagauu

SEQ ID NO: 335590 - RNA, 18 nt, Human
gcugcugcugacuauggg

SEQ ID NO: 335591 - RNA, 18 nt, Human
uaaaacacaagaagcaau

SEQ ID NO: 335592 - RNA, 20 nt, Human
uaaaaugaagucaaugacuc

SEQ ID NO: 335593 - RNA, 21 nt, Human
uagcaauaucuaacauuugaa

SEQ ID NO: 335594 - RNA, 24 nt, Human
uauaaaaugaagucaaugacucaa

SEQ ID NO: 335595 - RNA, 19 nt, Human
uaucauuacagauauaaag

SEQ ID NO: 335596 - RNA, 20 nt, Human
uccuccaacuccuacacggc

SEQ ID NO: 335597 - RNA, 18 nt, Human
ucugacaguaaaacacaa

SEQ ID NO: 335598 - RNA, 21 nt, Human
ucuggaaugcuggcacuuucc

SEQ ID NO: 335599 - RNA, 19 nt, Human
ugacucuuccaaaauuuca

SEQ ID NO: 335600 - RNA, 18 nt, Human
uggaaggagccacacaga

SEQ ID NO: 335601 - RNA, 21 nt, Human
uggaggucucaggcagcuucc

SEQ ID NO: 335602 - RNA, 18 nt, Human
uggcucagagcugcugcu

SEQ ID NO: 335603 - RNA, 19 nt, Human
uuaagggcggcgguuuuuc

SEQ ID NO: 335604 - RNA, 20 nt, Human
uugaaagccauagaaaucag

SEQ ID NO: 335605 - RNA, 21 nt, Human
uuucauuucucuccuccaacu

SEQ ID NO: 335606 - RNA, 21 nt, Human
uuuccaagagauauacacaga

SEQ ID NO: 335607 - RNA, 19 nt, Human
aaaaaaggaaacauauaau

SEQ ID NO: 335608 - RNA, 22 nt, Human
aaaaaggaaacauauaauaaga

SEQ ID NO: 335609 - RNA, 18 nt, Human
aaaaauacuaaaccugua

SEQ ID NO: 335610 - RNA, 21 nt, Human
aaaccuguauauuugguauug

SEQ ID NO: 335611 - RNA, 21 nt, Human
aacaaucacuaacaggcaaaa

SEQ ID NO: 335612 - RNA, 22 nt, Human
aacaguucuucagaccuggcuc

SEQ ID NO: 335613 - RNA, 18 nt, Human
aagagauuugaaaagucu

SEQ ID NO: 335614 - RNA, 19 nt, Human
aagagauuugaaaagucug

SEQ ID NO: 335615 - RNA, 22 nt, Human
aaggcuuuuaguuuacauuugg

SEQ ID NO: 335616 - RNA, 23 nt, Human
acaacauugguggaugaagaaug

SEQ ID NO: 335617 - RNA, 21 nt, Human
acauccacaguacucguccac

SEQ ID NO: 335618 - RNA, 22 nt, Human
acaugugaaacaaucacuaaca

SEQ ID NO: 335619 - RNA, 20 nt, Human
agauauuaaaggcaacgucu

SEQ ID NO: 335620 - RNA, 20 nt, Human
agauuugaaaagucuggaca

SEQ ID NO: 335621 - RNA, 23 nt, Human
agccugaaaaugauuuacaaaaa

SEQ ID NO: 335622 - RNA, 21 nt, Human
agcugcagaagccugaaaaug

SEQ ID NO: 335623 - RNA, 19 nt, Human
aggagcucuuuggacuuuc

SEQ ID NO: 335624 - RNA, 23 nt, Human
aggagcucuuuggacuuucuuuu

SEQ ID NO: 335625 - RNA, 20 nt, Human
aggcaaaaauacuaaaccug

SEQ ID NO: 335626 - RNA, 19 nt, Human
aggguaccaccacaggaaa

SEQ ID NO: 335627 - RNA, 24 nt, Human
agugagaaucuacagcugcagaag

SEQ ID NO: 335628 - RNA, 22 nt, Human
cacacgacuauaaacauuguuc

SEQ ID NO: 335629 - RNA, 22 nt, Human
cacauccacaguacucguccac

SEQ ID NO: 335630 - RNA, 18 nt, Human
caggcaaaaauacuaaac

SEQ ID NO: 335631 - RNA, 18 nt, Human
cccacauucacauccaca

SEQ ID NO: 335632 - RNA, 19 nt, Human
cccccacuguacacacgac

SEQ ID NO: 335633 - RNA, 19 nt, Human
ccccgcgcuccccccgggu

SEQ ID NO: 335634 - RNA, 23 nt, Human
cuaaaccuguauauuugguauug

SEQ ID NO: 335635 - RNA, 24 nt, Human
cuaguacucugcgaaccucucacg

SEQ ID NO: 335636 - RNA, 31 nt, Human
gaaaauauacacuucuuguuguagacccccc

SEQ ID NO: 335637 - RNA, 24 nt, Human
gaaucuacagcugcagaagccuga

SEQ ID NO: 335638 - RNA, 20 nt, Human
gacuauaaacauuguucccu

SEQ ID NO: 335639 - RNA, 19 nt, Human
gccgcugccgcgccgcucc

SEQ ID NO: 335640 - RNA, 23 nt, Human
gucgcuacucuaggcgccacggc

SEQ ID NO: 335641 - RNA, 21 nt, Human
gugagaaucuacagcugcaga

SEQ ID NO: 335642 - RNA, 18 nt, Human
uaaagacaagaucaccgu

SEQ ID NO: 335643 - RNA, 24 nt, Human
uaaaguauacaguacaccauuuuc

SEQ ID NO: 335644 - RNA, 21 nt, Human
uacaaguaucaaagaagcgaa

SEQ ID NO: 335645 - RNA, 21 nt, Human
uacaguacaccauuuucauac

SEQ ID NO: 335646 - RNA, 24 nt, Human
uacauuauuguacucuccaauaca

SEQ ID NO: 335647 - RNA, 22 nt, Human
uagaaugugcaaacugauauag

SEQ ID NO: 335648 - RNA, 20 nt, Human
uaguacucugcgaaccucuc

SEQ ID NO: 335649 - RNA, 23 nt, Human
uaucuggaguagucuauauagga

SEQ ID NO: 335650 - RNA, 19 nt, Human
uauguaaacaaaaaaagga

SEQ ID NO: 335651 - RNA, 19 nt, Human
uccaauacaaaguaugggg

SEQ ID NO: 335652 - RNA, 18 nt, Human
uccccccgggucgcuacu

SEQ ID NO: 335653 - RNA, 25 nt, Human
ucccuauguaaacaaaaaaaggaaa

SEQ ID NO: 335654 - RNA, 27 nt, Human
ucccuauguaaacaaaaaaaggaaacu

SEQ ID NO: 335655 - RNA, 21 nt, Human
ucccugcagccagcgucgccc

SEQ ID NO: 335656 - RNA, 23 nt, Human
uccugccgcugccgcgccgcucc

SEQ ID NO: 335657 - RNA, 22 nt, Human
ucuccaauacaaaguauggggc

SEQ ID NO: 335658 - RNA, 20 nt, Human
ucucuuagcaguaauacugg

SEQ ID NO: 335659 - RNA, 20 nt, Human
ucucuugugauacuggaaag

SEQ ID NO: 335660 - RNA, 21 nt, Human
ugaaacaaucacuaacaggca

SEQ ID NO: 335661 - RNA, 21 nt, Human
uggacauuuccuucccaacag

SEQ ID NO: 335662 - RNA, 26 nt, Human
uggccaccucaaaguaguuguaacau

SEQ ID NO: 335663 - RNA, 21 nt, Human
uguaaacaaaaaaaggaaaca

SEQ ID NO: 335664 - RNA, 20 nt, Human
uguacacacgacuauaaaca

SEQ ID NO: 335665 - RNA, 26 nt, Human
uguucccuauguaaacaaaaaaagga

SEQ ID NO: 335666 - RNA, 20 nt, Human
uuaaaguauacaguacacca

SEQ ID NO: 335667 - RNA, 20 nt, Human
uucccuauguaaacaaaaaa

SEQ ID NO: 335668 - RNA, 23 nt, Human
uuuaacaaaguuggaaugcuggc

SEQ ID NO: 335669 - RNA, 23 nt, Human
aacccagugcucacucccccaca

SEQ ID NO: 335670 - RNA, 24 nt, Human
aacuaaguucacucgugacagguc

SEQ ID NO: 335671 - RNA, 22 nt, Human
aaucacagucuucagugaccuc

SEQ ID NO: 335672 - RNA, 24 nt, Human
aaucccugccccagcgcagacccc

SEQ ID NO: 335673 - RNA, 26 nt, Human
acacggcaccuuccccuugugcuucu

SEQ ID NO: 335674 - RNA, 21 nt, Human
acagcccagaugggugggcca

SEQ ID NO: 335675 - RNA, 27 nt, Human
accagacacacaagggcucccagcagc

SEQ ID NO: 335676 - RNA, 20 nt, Human
acccccaggcuggggguggg

SEQ ID NO: 335677 - RNA, 19 nt, Human
acccccaguccugcuucca

SEQ ID NO: 335678 - RNA, 18 nt, Human
agaagugaaggacuuguc

SEQ ID NO: 335679 - RNA, 21 nt, Human
agacccccaguccugcuucca

SEQ ID NO: 335680 - RNA, 18 nt, Human
agccggcucccugccccu

SEQ ID NO: 335681 - RNA, 19 nt, Human
aggcuggggguggggacga

SEQ ID NO: 335682 - RNA, 18 nt, Human
agggaccucaagaagcag

SEQ ID NO: 335683 - RNA, 21 nt, Human
agggagagugacuugcccaga

SEQ ID NO: 335684 - RNA, 21 nt, Human
agggcagaggucucgucugcc

SEQ ID NO: 335685 - RNA, 18 nt, Human
aggguggggaggcagggg

SEQ ID NO: 335686 - RNA, 22 nt, Human
aggguggggaggcagggggcag

SEQ ID NO: 335687 - RNA, 21 nt, Human
agugaaggaguauaggaggga

SEQ ID NO: 335688 - RNA, 30 nt, Human
auggggaggguggggaggcagggggcagcc

SEQ ID NO: 335689 - RNA, 23 nt, Human
cacagcagaacccaaauuggaaa

SEQ ID NO: 335690 - RNA, 22 nt, Human
cacagccggcucccugccccuc

SEQ ID NO: 335691 - RNA, 22 nt, Human
caccuuguucccucugagucca

SEQ ID NO: 335692 - RNA, 19 nt, Human
cagacacacaagggcuccc

SEQ ID NO: 335693 - RNA, 23 nt, Human
cagcagaacccaaauuggaaacc

SEQ ID NO: 335694 - RNA, 19 nt, Human
cagcaugggauggcagggg

SEQ ID NO: 335695 - RNA, 19 nt, Human
cagguagguccccaucccc

SEQ ID NO: 335696 - RNA, 23 nt, Human
ccaccuuguucccucugagucca

SEQ ID NO: 335697 - RNA, 18 nt, Human
cccaggcugggggugggg

SEQ ID NO: 335698 - RNA, 23 nt, Human
ccccacauaucacauccuccuug

SEQ ID NO: 335699 - RNA, 18 nt, Human
cccccaggcugggggugg

SEQ ID NO: 335700 - RNA, 20 nt, Human
cccccaggcugggggugggg

SEQ ID NO: 335701 - RNA, 22 nt, Human
cccccaggcuggggguggggac

SEQ ID NO: 335702 - RNA, 22 nt, Human
ccccucagcccaccuggggcuc

SEQ ID NO: 335703 - RNA, 20 nt, Human
ccgacauccacacggccaca

SEQ ID NO: 335704 - RNA, 20 nt, Human
ccggcucccaacccagugcu

SEQ ID NO: 335705 - RNA, 19 nt, Human
ccucaagaagcaggguagg

SEQ ID NO: 335706 - RNA, 24 nt, Human
ccucugaaauaaucuuguccauuu

SEQ ID NO: 335707 - RNA, 20 nt, Human
ccuggggcuccagggaccuc

SEQ ID NO: 335708 - RNA, 19 nt, Human
ccuugugcugccuccaggg

SEQ ID NO: 335709 - RNA, 25 nt, Human
cggcucugcccugcagagacagccc

SEQ ID NO: 335710 - RNA, 20 nt, Human
cucaaacucucucucccacc

SEQ ID NO: 335711 - RNA, 21 nt, Human
cucaaacucucucucccaccu

SEQ ID NO: 335712 - RNA, 19 nt, Human
cucacucccccacauauca

SEQ ID NO: 335713 - RNA, 20 nt, Human
cuccacacacuccggcgaga

SEQ ID NO: 335714 - RNA, 19 nt, Human
cuccacacggagcugucuc

SEQ ID NO: 335715 - RNA, 20 nt, Human
cuccaggggcuaagcucucc

SEQ ID NO: 335716 - RNA, 24 nt, Human
cuccuugugcugccuccaggggcu

SEQ ID NO: 335717 - RNA, 19 nt, Human
cugccccucagcccaccug

SEQ ID NO: 335718 - RNA, 21 nt, Human
cugcuuccacugagcaauccc

SEQ ID NO: 335719 - RNA, 18 nt, Human
cuggagggcccagcaugg

SEQ ID NO: 335720 - RNA, 22 nt, Human
gaccagacacacaagggcuccc

SEQ ID NO: 335721 - RNA, 19 nt, Human
gcagggggcagcccacggg

SEQ ID NO: 335722 - RNA, 19 nt, Human
gcaguggacagggcaucgg

SEQ ID NO: 335723 - RNA, 19 nt, Human
gccaggaggcuggccuuug

SEQ ID NO: 335724 - RNA, 23 nt, Human
gcccaccuggggcuccagggacc

SEQ ID NO: 335725 - RNA, 24 nt, Human
gcccaucgcuccuccacacacucc

SEQ ID NO: 335726 - RNA, 21 nt, Human
gccgggggcguccugggcucg

SEQ ID NO: 335727 - RNA, 19 nt, Human
gccucaucugcucaguuuc

SEQ ID NO: 335728 - RNA, 21 nt, Human
ggccgggggcguccugggcuc

SEQ ID NO: 335729 - RNA, 21 nt, Human
ggccgggggcguccugggcuc

SEQ ID NO: 335730 - RNA, 20 nt, Human
gggccauggggagggugggg

SEQ ID NO: 335731 - RNA, 18 nt, Human
ggucuucagggcagaggu

SEQ ID NO: 335732 - RNA, 25 nt, Human
ggugauaggaggucccugggaagaa

SEQ ID NO: 335733 - RNA, 22 nt, Human
ggugauggaggcccagggaggg

SEQ ID NO: 335734 - RNA, 23 nt, Human
ggugauggaggcccagggagggg

SEQ ID NO: 335735 - RNA, 19 nt, Human
gguuaagcugggugcuggc

SEQ ID NO: 335736 - RNA, 24 nt, Human
gucuagugccugagggaagugcug

SEQ ID NO: 335737 - RNA, 20 nt, Human
gugaccagacacacaagggc

SEQ ID NO: 335738 - RNA, 21 nt, Human
guucugcccaucgcuccucca

SEQ ID NO: 335739 - RNA, 24 nt, Human
uaaaaagugugaccagacacacaa

SEQ ID NO: 335740 - RNA, 24 nt, Human
uaagcucuccacacggagcugucu

SEQ ID NO: 335741 - RNA, 23 nt, Human
uaggagggaacuaaguucacucg

SEQ ID NO: 335742 - RNA, 20 nt, Human
uagugccugagggaagugcu

SEQ ID NO: 335743 - RNA, 20 nt, Human
ucaccuucagaggggguggc

SEQ ID NO: 335744 - RNA, 23 nt, Human
ucagcccaccuggggcuccaggg

SEQ ID NO: 335745 - RNA, 21 nt, Human
ucaguuucaccuucagagggg

SEQ ID NO: 335746 - RNA, 22 nt, Human
uccauggcggucgggggaggca

SEQ ID NO: 335747 - RNA, 19 nt, Human
ucccaacccagugcucacc

SEQ ID NO: 335748 - RNA, 21 nt, Human
ucccaacccagugcucacucc

SEQ ID NO: 335749 - RNA, 18 nt, Human
ucccaccuuguucccucu

SEQ ID NO: 335750 - RNA, 22 nt, Human
ucccccaugaggggguuacuug

SEQ ID NO: 335751 - RNA, 28 nt, Human
ucccugccccagcgcagacccccaggcu

SEQ ID NO: 335752 - RNA, 22 nt, Human
ucccugggaagaaaauccuacc

SEQ ID NO: 335753 - RNA, 19 nt, Human
uccuugugcugccuccagg

SEQ ID NO: 335754 - RNA, 23 nt, Human
ucucaaacucucucucccaccuu

SEQ ID NO: 335755 - RNA, 18 nt, Human
ugacacggcaccuucccc

SEQ ID NO: 335756 - RNA, 25 nt, Human
ugaccagacacacaagggcucccag

SEQ ID NO: 335757 - RNA, 26 nt, Human
ugaccucugaaauaaucuuguccuuu

SEQ ID NO: 335758 - RNA, 23 nt, Human
ugagcaaucccugccccagcgca

SEQ ID NO: 335759 - RNA, 21 nt, Human
ugaggagccagguaggucccc

SEQ ID NO: 335760 - RNA, 21 nt, Human
ugagggaagugcugguucugc

SEQ ID NO: 335761 - RNA, 20 nt, Human
ugcccagagagggagaguga

SEQ ID NO: 335762 - RNA, 19 nt, Human
ugccugagggaagugcugg

SEQ ID NO: 335763 - RNA, 19 nt, Human
ugcuggcugaggagccagg

SEQ ID NO: 335764 - RNA, 18 nt, Human
uggccucaucugcucagu

SEQ ID NO: 335765 - RNA, 24 nt, Human
ugggauggcagggguuaagcuggg

SEQ ID NO: 335766 - RNA, 20 nt, Human
ugggccauggggaggguggg

SEQ ID NO: 335767 - RNA, 23 nt, Human
ugggccauggggaggguggggag

SEQ ID NO: 335768 - RNA, 21 nt, Human
ugggccgggggcguccugggc

SEQ ID NO: 335769 - RNA, 21 nt, Human
ugggcucggcacucuggugcc

SEQ ID NO: 335770 - RNA, 21 nt, Human
uggggaggguggggaggcagg

SEQ ID NO: 335771 - RNA, 22 nt, Human
uggggaggguggggaggcaggg

SEQ ID NO: 335772 - RNA, 29 nt, Human
uggggaggguggggaggcagggggcagcc

SEQ ID NO: 335773 - RNA, 18 nt, Human
uggggccaggaggcuggc

SEQ ID NO: 335774 - RNA, 20 nt, Human
ugggugggccauggggaggg

SEQ ID NO: 335775 - RNA, 21 nt, Human
ugguguuggucuucagggcag

SEQ ID NO: 335776 - RNA, 23 nt, Human
ugguucugcccaucgcuccucca

SEQ ID NO: 335777 - RNA, 21 nt, Human
ugucucaaacucucucuccca

SEQ ID NO: 335778 - RNA, 21 nt, Human
ugugccgggcugcccccucca

SEQ ID NO: 335779 - RNA, 22 nt, Human
uguuggucuucagggcagaggu

SEQ ID NO: 335780 - RNA, 20 nt, Human
uuggccuggagggcccagca

SEQ ID NO: 335781 - RNA, 23 nt, Human
uuuguagcagacaugcccagaga

SEQ ID NO: 335782 - RNA, 22 nt, Human
uuuuauacaacuguuaccgaca

SEQ ID NO: 335783 - RNA, 20 nt, Human
agcaacaggaauacaagaga

SEQ ID NO: 335784 - RNA, 19 nt, Human
agcggaagaagccgcugga

SEQ ID NO: 335785 - RNA, 24 nt, Human
caaaaaauggagcuauuuuuccaa

SEQ ID NO: 335786 - RNA, 26 nt, Human
caucacaugcaugcacaagugguaug

SEQ ID NO: 335787 - RNA, 22 nt, Human
ccuacagcgguucuucaauugg

SEQ ID NO: 335788 - RNA, 19 nt, Human
cggaagaagccgcuggaug

SEQ ID NO: 335789 - RNA, 24 nt, Human
gaggacagaggggaaauuagagau

SEQ ID NO: 335790 - RNA, 23 nt, Human
guggugcgggcggcgcggcucug

SEQ ID NO: 335791 - RNA, 21 nt, Human
uagcucaagcaacaggaauac

SEQ ID NO: 335792 - RNA, 23 nt, Human
uccaauucaguuucaucuuuaau

SEQ ID NO: 335793 - RNA, 23 nt, Human
ucccaagcaccaaaaaauggagc

SEQ ID NO: 335794 - RNA, 24 nt, Human
ucuaccuccgucucucccgcccuc

SEQ ID NO: 335795 - RNA, 21 nt, Human
ugaauaagcagccauacaacu

SEQ ID NO: 335796 - RNA, 22 nt, Human
ugaggaaccggcggggcgaggc

SEQ ID NO: 335797 - RNA, 22 nt, Human
uggagacuugccuuugacaaag

SEQ ID NO: 335798 - RNA, 21 nt, Human
uggagcuauuuuuccaauuca

SEQ ID NO: 335799 - RNA, 21 nt, Human
uggauggaggacagaggggaa

SEQ ID NO: 335800 - RNA, 24 nt, Human
ugguaugguagagaaugaagcgga

SEQ ID NO: 335801 - RNA, 22 nt, Human
uuacaucaucauaggacuacaa

SEQ ID NO: 335802 - RNA, 18 nt, Human
uuuuuuuaaagaguaaga

SEQ ID NO: 335803 - RNA, 21 nt, Human
uuuuuuuuuuuuuaaagagua

SEQ ID NO: 335804 - RNA, 19 nt, Human
uuuuuuuuuuuuuuuuuaa

SEQ ID NO: 335805 - RNA, 22 nt, Human
aaaagcagcgucgggugggagc

SEQ ID NO: 335806 - RNA, 20 nt, Human
aaagcugguucagcccgucu

SEQ ID NO: 335807 - RNA, 18 nt, Human
acccugggaacaaagcug

SEQ ID NO: 335808 - RNA, 23 nt, Human
agagcaaaguacaaagaggcagg

SEQ ID NO: 335809 - RNA, 18 nt, Human
aggcagggaggggagcug

SEQ ID NO: 335810 - RNA, 21 nt, Human
aggcagggaggggagcugggc

SEQ ID NO: 335811 - RNA, 22 nt, Human
agggaggggagcugggcccagg

SEQ ID NO: 335812 - RNA, 21 nt, Human
aggggagcagcccugggcagg

SEQ ID NO: 335813 - RNA, 23 nt, Human
augggccucuggcaugcagugga

SEQ ID NO: 335814 - RNA, 26 nt, Human
caaagaggcagggaggggagcugggg

SEQ ID NO: 335815 - RNA, 20 nt, Human
cacagugccagcugcccccc

SEQ ID NO: 335816 - RNA, 24 nt, Human
caggcgccacccugggaacaaagc

SEQ ID NO: 335817 - RNA, 21 nt, Human
ccccaggaguaaaugggccuc

SEQ ID NO: 335818 - RNA, 23 nt, Human
ccccaggaguaaaugggccucug

SEQ ID NO: 335819 - RNA, 25 nt, Human
ccccccgaaacgugggaacaaaagc

SEQ ID NO: 335820 - RNA, 21 nt, Human
cccccgaaacgugggaacaaa

SEQ ID NO: 335821 - RNA, 18 nt, Human
gaccuggcagcugcccca

SEQ ID NO: 335822 - RNA, 20 nt, Human
gagaaagagcaggaguggcg

SEQ ID NO: 335823 - RNA, 25 nt, Human
gagaaagagcaggaguggcgaggag

SEQ ID NO: 335824 - RNA, 20 nt, Human
gagcaaaguacaaagaggca

SEQ ID NO: 335825 - RNA, 22 nt, Human
gcccaggggagcagcccugggc

SEQ ID NO: 335826 - RNA, 21 nt, Human
gcgccacccugggaacaaagc

SEQ ID NO: 335827 - RNA, 20 nt, Human
ggcagggaggggagcugggc

SEQ ID NO: 335828 - RNA, 22 nt, Human
uacaaagaggcagggaggggag

SEQ ID NO: 335829 - RNA, 21 nt, Human
ucugcagcugucgcugccagu

SEQ ID NO: 335830 - RNA, 20 nt, Human
uggcagcugccccaggagua

SEQ ID NO: 335831 - RNA, 24 nt, Human
uggcaugcaguggagaaagagcag

SEQ ID NO: 335832 - RNA, 22 nt, Human
ugggagccggaauggggccugg

SEQ ID NO: 335833 - RNA, 18 nt, Human
ugggccucuggcaugcag

SEQ ID NO: 335834 - RNA, 19 nt, Human
ugguggcuccgugccucua

SEQ ID NO: 335835 - RNA, 18 nt, Human
uuuccagguacaaacagu

SEQ ID NO: 335836 - RNA, 20 nt, Human
uuuuuuuuuuuuuuuuccag

SEQ ID NO: 335837 - RNA, 23 nt, Human
uuuuuuuuuuuuuuuuuuccagg

SEQ ID NO: 335838 - RNA, 21 nt, Human
aaauaaaaacaaaaccagcga

SEQ ID NO: 335839 - RNA, 19 nt, Human
aacaguaacaggugcaccc

SEQ ID NO: 335840 - RNA, 22 nt, Human
aaccccccgccccugucccacc

SEQ ID NO: 335841 - RNA, 23 nt, Human
aaccccccgccccugucccaccc

SEQ ID NO: 335842 - RNA, 24 nt, Human
aaccccccgccccugucccacccc

SEQ ID NO: 335843 - RNA, 19 nt, Human
aagugccaaggccaggagc

SEQ ID NO: 335844 - RNA, 18 nt, Human
agagaaaacugaggagga

SEQ ID NO: 335845 - RNA, 22 nt, Human
agagaaaagccggggcggaggg

SEQ ID NO: 335846 - RNA, 20 nt, Human
aggcaagugccaaggccagg

SEQ ID NO: 335847 - RNA, 21 nt, Human
aggcaggggggagguugaggu

SEQ ID NO: 335848 - RNA, 21 nt, Human
aggcaggggggagguugaggu

SEQ ID NO: 335849 - RNA, 19 nt, Human
aggcaguccacugagggcc

SEQ ID NO: 335850 - RNA, 25 nt, Human
aggcugaggaggagaacuggggggc

SEQ ID NO: 335851 - RNA, 19 nt, Human
aggcugugggagcaggcag

SEQ ID NO: 335852 - RNA, 21 nt, Human
aggggaaggcaggccuuggaa

SEQ ID NO: 335853 - RNA, 20 nt, Human
agguuggggguggggggcag

SEQ ID NO: 335854 - RNA, 19 nt, Human
augggggagccaaguccug

SEQ ID NO: 335855 - RNA, 27 nt, Human
caaaaaaauuaaaauaaaaacaaaacc

SEQ ID NO: 335856 - RNA, 23 nt, Human
caaaaccagcgagaauuaauacc

SEQ ID NO: 335857 - RNA, 21 nt, Human
caacaguaacaggugcaccca

SEQ ID NO: 335858 - RNA, 33 nt, Human
caauacacagcacaaauuccuucaguauaaaaa

SEQ ID NO: 335859 - RNA, 21 nt, Human
cacccccuccagcucuggauc

SEQ ID NO: 335860 - RNA, 18 nt, Human
cacccccucugucaccaa

SEQ ID NO: 335861 - RNA, 18 nt, Human
cagagaaaagccggggcg

SEQ ID NO: 335862 - RNA, 23 nt, Human
cagaggggugucuugaugaacac

SEQ ID NO: 335863 - RNA, 21 nt, Human
cagcucgggccccuggccagc

SEQ ID NO: 335864 - RNA, 20 nt, Human
cagcucuggauccagcuccc

SEQ ID NO: 335865 - RNA, 24 nt, Human
cagcucuggauccagcucccccca

SEQ ID NO: 335866 - RNA, 25 nt, Human
cagcugggggugcaggggugagggg

SEQ ID NO: 335867 - RNA, 23 nt, Human
caggagccuguccuuucagggcu

SEQ ID NO: 335868 - RNA, 18 nt, Human
caggcagagggagaaagg

SEQ ID NO: 335869 - RNA, 20 nt, Human
cagugggagggaggggaagg

SEQ ID NO: 335870 - RNA, 22 nt, Human
ccaacaguaacaggugcaccca

SEQ ID NO: 335871 - RNA, 19 nt, Human
ccacacccaguggucaggc

SEQ ID NO: 335872 - RNA, 22 nt, Human
ccacccccuccagcucuggauc

SEQ ID NO: 335873 - RNA, 23 nt, Human
ccacccccuccagcucuggaucc

SEQ ID NO: 335874 - RNA, 18 nt, Human
ccagcucuggauccagcu

SEQ ID NO: 335875 - RNA, 19 nt, Human
ccagggaaauggaggaacu

SEQ ID NO: 335876 - RNA, 22 nt, Human
cccaaccccuggugaaggaggu

SEQ ID NO: 335877 - RNA, 19 nt, Human
cccaggccucuguccaagg

SEQ ID NO: 335878 - RNA, 18 nt, Human
ccccacaccguccacacc

SEQ ID NO: 335879 - RNA, 23 nt, Human
cccccaggacccauccugagacc

SEQ ID NO: 335880 - RNA, 24 nt, Human
cccccaggacccauccugagaccc

SEQ ID NO: 335881 - RNA, 26 nt, Human
cccccaggacccauccugagacccag

SEQ ID NO: 335882 - RNA, 21 nt, Human
cccccgccccugucccacccc

SEQ ID NO: 335883 - RNA, 23 nt, Human
cccccggacccacccccuccagc

SEQ ID NO: 335884 - RNA, 19 nt, Human
ccccuccagcucuggaucc

SEQ ID NO: 335885 - RNA, 24 nt, Human
ccccuccagcucuggauccagcuc

SEQ ID NO: 335886 - RNA, 19 nt, Human
cccgggagggcaggugggg

SEQ ID NO: 335887 - RNA, 20 nt, Human
cccggggcccuugcucugcc

SEQ ID NO: 335888 - RNA, 18 nt, Human
cccuggugaaggaggucg

SEQ ID NO: 335889 - RNA, 19 nt, Human
ccgccccugucccaccccc

SEQ ID NO: 335890 - RNA, 20 nt, Human
ccucccccggacccaccccc

SEQ ID NO: 335891 - RNA, 22 nt, Human
ccuccucccuccccguccccca

SEQ ID NO: 335892 - RNA, 19 nt, Human
ccugagacccaggaccagg

SEQ ID NO: 335893 - RNA, 23 nt, Human
ccugagacccaggaccaggggcc

SEQ ID NO: 335894 - RNA, 25 nt, Human
ccuggccucggccucugacgucagc

SEQ ID NO: 335895 - RNA, 19 nt, Human
ccuuucagggcugccccac

SEQ ID NO: 335896 - RNA, 20 nt, Human
cggagggcgagggcuguguu

SEQ ID NO: 335897 - RNA, 20 nt, Human
cgggagggcaggugggggca

SEQ ID NO: 335898 - RNA, 27 nt, Human
cgggagggcaggugggggcagggcugg

SEQ ID NO: 335899 - RNA, 21 nt, Human
cgguagaaaggcagagaaaag

SEQ ID NO: 335900 - RNA, 25 nt, Human
cucccccagcugggggugcaggggu

SEQ ID NO: 335901 - RNA, 24 nt, Human
cucccuccccgucccccagggaag

SEQ ID NO: 335902 - RNA, 21 nt, Human
cugcccgggagggcagguggg

SEQ ID NO: 335903 - RNA, 22 nt, Human
cuucagaccaccccuccucggg

SEQ ID NO: 335904 - RNA, 22 nt, Human
gaacacgaggcccccaggaccc

SEQ ID NO: 335905 - RNA, 20 nt, Human
gaaggaggucggggcagagc

SEQ ID NO: 335906 - RNA, 18 nt, Human
gacagguugggggugggg

SEQ ID NO: 335907 - RNA, 18 nt, Human
gaggaaaaggcugaggag

SEQ ID NO: 335908 - RNA, 24 nt, Human
gaggaugggggagccaaguccugg

SEQ ID NO: 335909 - RNA, 19 nt, Human
gaggcagacagucuggcag

SEQ ID NO: 335910 - RNA, 24 nt, Human
gaggcagcucugccgaggagccag

SEQ ID NO: 335911 - RNA, 19 nt, Human
gaggccgggggugggggca

SEQ ID NO: 335912 - RNA, 18 nt, Human
gaggggaaggcaggccuu

SEQ ID NO: 335913 - RNA, 20 nt, Human
gagucgcugccuccucccuc

SEQ ID NO: 335914 - RNA, 22 nt, Human
gauccagcuccccccaauacac

SEQ ID NO: 335915 - RNA, 21 nt, Human
gaugugggcccugacgggagg

SEQ ID NO: 335916 - RNA, 22 nt, Human
gcacgggggugggacagguugg

SEQ ID NO: 335917 - RNA, 21 nt, Human
gcagagaaaagccggggcgga

SEQ ID NO: 335918 - RNA, 20 nt, Human
gcaggugggggcagggcugg

SEQ ID NO: 335919 - RNA, 18 nt, Human
gccagccccuucacagug

SEQ ID NO: 335920 - RNA, 19 nt, Human
gccccuucacagugggggc

SEQ ID NO: 335921 - RNA, 19 nt, Human
gcucgggccccuggccagc

SEQ ID NO: 335922 - RNA, 19 nt, Human
gcugaggaggagaacuggg

SEQ ID NO: 335923 - RNA, 23 nt, Human
gcugaggccgggggugggggcag

SEQ ID NO: 335924 - RNA, 21 nt, Human
gcuggggagccuagaugaugu

SEQ ID NO: 335925 - RNA, 22 nt, Human
gcuugugaguucugaggauggg

SEQ ID NO: 335926 - RNA, 22 nt, Human
ggaaaacucugucccggggccc

SEQ ID NO: 335927 - RNA, 21 nt, Human
ggacagguugggggugggggg

SEQ ID NO: 335928 - RNA, 24 nt, Human
ggaggagaacuggggggcacaggg

SEQ ID NO: 335929 - RNA, 22 nt, Human
ggagggcaggugggggcagggc

SEQ ID NO: 335930 - RNA, 20 nt, Human
ggcacagggacaugaaagga

SEQ ID NO: 335931 - RNA, 18 nt, Human
ggcagagggagaaagggg

SEQ ID NO: 335932 - RNA, 24 nt, Human
ggcccaggccucuguccaaggagu

SEQ ID NO: 335933 - RNA, 18 nt, Human
ggccccuggccagccccu

SEQ ID NO: 335934 - RNA, 18 nt, Human
ggccucugacgucagccc

SEQ ID NO: 335935 - RNA, 20 nt, Human
ggccucugacgucagcccag

SEQ ID NO: 335936 - RNA, 18 nt, Human
ggccuuggaaaguuagua

SEQ ID NO: 335937 - RNA, 24 nt, Human
ggcggagggcgagggcugugucca

SEQ ID NO: 335938 - RNA, 19 nt, Human
gggaaccccccgccccugu

SEQ ID NO: 335939 - RNA, 25 nt, Human
gggacagguuggggguggggggcag

SEQ ID NO: 335940 - RNA, 24 nt, Human
gggaggcagacagucuggcagggg

SEQ ID NO: 335941 - RNA, 25 nt, Human
gggcacgggggugggacagguuggg

SEQ ID NO: 335942 - RNA, 24 nt, Human
gggcccugacgggaggcagcucug

SEQ ID NO: 335943 - RNA, 24 nt, Human
ggggcccuaugggggugcuggugg

SEQ ID NO: 335944 - RNA, 23 nt, Human
gggggcaggccagggaaauggag

SEQ ID NO: 335945 - RNA, 19 nt, Human
gggggcccuaugggggugc

SEQ ID NO: 335946 - RNA, 20 nt, Human
gggggugggggcagcucggg

SEQ ID NO: 335947 - RNA, 19 nt, Human
ggggugggggcagcucggg

SEQ ID NO: 335948 - RNA, 23 nt, Human
ggguaaggagggggcacgggggu

SEQ ID NO: 335949 - RNA, 24 nt, Human
ggguaaggagggggcacgggggug

SEQ ID NO: 335950 - RNA, 27 nt, Human
gggugggacagguuggggguggggggc

SEQ ID NO: 335951 - RNA, 25 nt, Human
gggugucuugaugaacacgaggccc

SEQ ID NO: 335952 - RNA, 22 nt, Human
gugggggcagggcuggugcggg

SEQ ID NO: 335953 - RNA, 21 nt, Human
guguguguguuugugugugug

SEQ ID NO: 335954 - RNA, 22 nt, Human
uaccugggguugguauggcagg

SEQ ID NO: 335955 - RNA, 25 nt, Human
uagaugaugugggcccugacgggag

SEQ ID NO: 335956 - RNA, 25 nt, Human
uccacacccaguggucaggcagagg

SEQ ID NO: 335957 - RNA, 23 nt, Human
uccacugagggcccaggccucug

SEQ ID NO: 335958 - RNA, 20 nt, Human
ucccccagggaaggucccca

SEQ ID NO: 335959 - RNA, 19 nt, Human
ucccccggacccacccccu

SEQ ID NO: 335960 - RNA, 22 nt, Human
ucccccggacccacccccucca

SEQ ID NO: 335961 - RNA, 21 nt, Human
ucccucccccggacccacccc

SEQ ID NO: 335962 - RNA, 21 nt, Human
ucuggcagggggcucuggugg

SEQ ID NO: 335963 - RNA, 25 nt, Human
ucuggcagggggcucuggugggcuu

SEQ ID NO: 335964 - RNA, 19 nt, Human
ugagacccaggaccagggg

SEQ ID NO: 335965 - RNA, 22 nt, Human
ugaggaugggggagccaagucc

SEQ ID NO: 335966 - RNA, 23 nt, Human
ugaggaugggggagccaaguccu

SEQ ID NO: 335967 - RNA, 21 nt, Human
ugcaggcaagugccaaggcca

SEQ ID NO: 335968 - RNA, 23 nt, Human
ugccuccucccuccccguccccc

SEQ ID NO: 335969 - RNA, 24 nt, Human
ugcucugcccugcuccaugccuca

SEQ ID NO: 335970 - RNA, 20 nt, Human
ugcugguggcugaggccggg

SEQ ID NO: 335971 - RNA, 21 nt, Human
uggaaagcccaacaguaacag

SEQ ID NO: 335972 - RNA, 22 nt, Human
uggcugaggccggggguggggg

SEQ ID NO: 335973 - RNA, 21 nt, Human
ugggcagaggggugucuugau

SEQ ID NO: 335974 - RNA, 23 nt, Human
ugggcccugacgggaggcagcuc

SEQ ID NO: 335975 - RNA, 21 nt, Human
ugggggagccaaguccuggcg

SEQ ID NO: 335976 - RNA, 23 nt, Human
ugggggcagggcuggugcggggu

SEQ ID NO: 335977 - RNA, 21 nt, Human
uggggguggggggcaggccag

SEQ ID NO: 335978 - RNA, 23 nt, Human
uggggguggggggcaggccaggg

SEQ ID NO: 335979 - RNA, 19 nt, Human
uggugcggggucacauggu

SEQ ID NO: 335980 - RNA, 19 nt, Human
ugguggcugaggccggggg

SEQ ID NO: 335981 - RNA, 26 nt, Human
ugucaccaaccgaggcaggggggagg

SEQ ID NO: 335982 - RNA, 24 nt, Human
ugucccacccccucugucaccaac

SEQ ID NO: 335983 - RNA, 19 nt, Human
ugucccggggcccuugcuc

SEQ ID NO: 335984 - RNA, 21 nt, Human
ugucugggggcccuauggggg

SEQ ID NO: 335985 - RNA, 19 nt, Human
uguggugagcugggcagag

SEQ ID NO: 335986 - RNA, 19 nt, Human
uguguguguguuugugugu

SEQ ID NO: 335987 - RNA, 21 nt, Human
uguguguguguuugugugugu

SEQ ID NO: 335988 - RNA, 21 nt, Human
uguguguguguuugugugugu

SEQ ID NO: 335989 - RNA, 18 nt, Human
uguguguguuugugugug

SEQ ID NO: 335990 - RNA, 21 nt, Human
uugcucugcccugcuccaugc

SEQ ID NO: 335991 - RNA, 23 nt, Human
uugcuggugaugaagauguggug

SEQ ID NO: 335992 - RNA, 25 nt, Human
uuuaaagagaaaacugaggaggaaa

SEQ ID NO: 335993 - RNA, 20 nt, Human
aaaagaugcaguuugagagc

SEQ ID NO: 335994 - RNA, 23 nt, Human
aaaagcccuuacaucccucacag

SEQ ID NO: 335995 - RNA, 18 nt, Human
aaacaaguaauaaaccac

SEQ ID NO: 335996 - RNA, 22 nt, Human
aaacauacaguauagaaagaac

SEQ ID NO: 335997 - RNA, 23 nt, Human
aaacauacaguauagaaagaaca

SEQ ID NO: 335998 - RNA, 22 nt, Human
aaagcaccaaacauacaguaua

SEQ ID NO: 335999 - RNA, 23 nt, Human
aaaugaucauuuaccauuuucca

SEQ ID NO: 336000 - RNA, 22 nt, Human
aacaaaaacuuaacacugaaaa

SEQ ID NO: 336001 - RNA, 24 nt, Human
aagaagggcuggaaaaaaauccca

SEQ ID NO: 336002 - RNA, 22 nt, Human
aaguaaaugcuugcaaaaagcc

SEQ ID NO: 336003 - RNA, 21 nt, Human
aaguguuucugccuuggaggc

SEQ ID NO: 336004 - RNA, 19 nt, Human
acaaaaggaaagcaccaaa

SEQ ID NO: 336005 - RNA, 20 nt, Human
acagaauucucuucugcuag

SEQ ID NO: 336006 - RNA, 21 nt, Human
acagacaagccagcuaaaagc

SEQ ID NO: 336007 - RNA, 23 nt, Human
acagacaagccagcuaaaagccu

SEQ ID NO: 336008 - RNA, 18 nt, Human
acuaaaguagaauaucuu

SEQ ID NO: 336009 - RNA, 24 nt, Human
acuccaucaaacucugccccuuuu

SEQ ID NO: 336010 - RNA, 19 nt, Human
acugaagguacuggggaau

SEQ ID NO: 336011 - RNA, 20 nt, Human
agaguuacaugguccagugg

SEQ ID NO: 336012 - RNA, 22 nt, Human
agcaucagaaagagcaaagaca

SEQ ID NO: 336013 - RNA, 24 nt, Human
aguaaacaaaaacuuaacacugaa

SEQ ID NO: 336014 - RNA, 20 nt, Human
aguggagauggggggcuugg

SEQ ID NO: 336015 - RNA, 25 nt, Human
auaaccuuggugucaugguuauuuu

SEQ ID NO: 336016 - RNA, 21 nt, Human
auccagccggggcgggggguu

SEQ ID NO: 336017 - RNA, 25 nt, Human
auuccaguagugcuuaaaugagaac

SEQ ID NO: 336018 - RNA, 19 nt, Human
caaaaagccuuccgaaugc

SEQ ID NO: 336019 - RNA, 22 nt, Human
caaacauacaguauagaaagaa

SEQ ID NO: 336020 - RNA, 19 nt, Human
caaauggcauagaaaaguc

SEQ ID NO: 336021 - RNA, 25 nt, Human
caagaagggcuggaaaaaaauccca

SEQ ID NO: 336022 - RNA, 20 nt, Human
caagacaaaaggaaagcacc

SEQ ID NO: 336023 - RNA, 21 nt, Human
cagacaagccagcuaaaagcc

SEQ ID NO: 336024 - RNA, 23 nt, Human
caggguuuguacacucgaggggg

SEQ ID NO: 336025 - RNA, 22 nt, Human
caguccaaaaacuaagcagcag

SEQ ID NO: 336026 - RNA, 19 nt, Human
caucagaaagagcaaagac

SEQ ID NO: 336027 - RNA, 20 nt, Human
caucagaaagagcaaagaca

SEQ ID NO: 336028 - RNA, 21 nt, Human
ccacccaacuccaucaaacuc

SEQ ID NO: 336029 - RNA, 18 nt, Human
ccaugaaagcaagacagu

SEQ ID NO: 336030 - RNA, 20 nt, Human
ccaugaaagcaagacaguua

SEQ ID NO: 336031 - RNA, 23 nt, Human
ccuaccccgacggugcccagaca

SEQ ID NO: 336032 - RNA, 20 nt, Human
ccucuagguguggaggcaaa

SEQ ID NO: 336033 - RNA, 22 nt, Human
ccuuuggcaaagaauagacccu

SEQ ID NO: 336034 - RNA, 24 nt, Human
ccuuuuuuggcacguaggcuguug

SEQ ID NO: 336035 - RNA, 23 nt, Human
cgagggggaggaaguggagaugg

SEQ ID NO: 336036 - RNA, 22 nt, Human
cgcguucucggcaucccagucc

SEQ ID NO: 336037 - RNA, 22 nt, Human
cgcucgcguucucggcauccca

SEQ ID NO: 336038 - RNA, 21 nt, Human
cuaauauaucaaaaaaaaaaa

SEQ ID NO: 336039 - RNA, 22 nt, Human
cuaccccgacggugcccagaca

SEQ ID NO: 336040 - RNA, 21 nt, Human
cuauuccaugaaagcaagaca

SEQ ID NO: 336041 - RNA, 20 nt, Human
cucacaggcgcugaccccau

SEQ ID NO: 336042 - RNA, 20 nt, Human
cucacuuccuacuacuucug

SEQ ID NO: 336043 - RNA, 22 nt, Human
cucacuuccuacuacuucuguc

SEQ ID NO: 336044 - RNA, 24 nt, Human
cugguccccccuuugguccccugg

SEQ ID NO: 336045 - RNA, 22 nt, Human
cuucuugguccuucuugaguuu

SEQ ID NO: 336046 - RNA, 19 nt, Human
cuugguccuucuugaguuu

SEQ ID NO: 336047 - RNA, 23 nt, Human
gaaagcaccaaacauacaguaua

SEQ ID NO: 336048 - RNA, 21 nt, Human
gagcaaagacaagcuuccaua

SEQ ID NO: 336049 - RNA, 23 nt, Human
gagcaucagaaagagcaaagaca

SEQ ID NO: 336050 - RNA, 22 nt, Human
gcaagacaaaaggaaagcacca

SEQ ID NO: 336051 - RNA, 19 nt, Human
gcauagaaaaguccaccca

SEQ ID NO: 336052 - RNA, 27 nt, Human
gcaucagaaagagcaaagacaagcuuc

SEQ ID NO: 336053 - RNA, 24 nt, Human
gcuggugcucuguguuucaauugc

SEQ ID NO: 336054 - RNA, 21 nt, Human
ggaaaaaaaucccaauaucag

SEQ ID NO: 336055 - RNA, 23 nt, Human
ggaaaaagcccuuacaucccuca

SEQ ID NO: 336056 - RNA, 20 nt, Human
ggaggaaguggagauggggg

SEQ ID NO: 336057 - RNA, 20 nt, Human
ggaggaaguggagauggggg

SEQ ID NO: 336058 - RNA, 19 nt, Human
ggcacguaggcuguugguc

SEQ ID NO: 336059 - RNA, 24 nt, Human
ggcuugggacgaguuccucagagc

SEQ ID NO: 336060 - RNA, 20 nt, Human
gggucuuugccaugcaucuu

SEQ ID NO: 336061 - RNA, 20 nt, Human
guacaaagucuucagaaacu

SEQ ID NO: 336062 - RNA, 21 nt, Human
gucuuuuucccagccccgaau

SEQ ID NO: 336063 - RNA, 18 nt, Human
gugucaugguuauuuuga

SEQ ID NO: 336064 - RNA, 22 nt, Human
uaaaagaugcaguuugagagca

SEQ ID NO: 336065 - RNA, 18 nt, Human
uaaacaaaaacuuaacac

SEQ ID NO: 336066 - RNA, 20 nt, Human
uaaacaaaaacuuaacacug

SEQ ID NO: 336067 - RNA, 22 nt, Human
uaaacaaaaacuuaacacugaa

SEQ ID NO: 336068 - RNA, 24 nt, Human
uaaacaaaaacuuaacacugaaaa

SEQ ID NO: 336069 - RNA, 22 nt, Human
uaaccacucuaccacagcuuuc

SEQ ID NO: 336070 - RNA, 26 nt, Human
uaauaucuuuucaguccaaaaacuaa

SEQ ID NO: 336071 - RNA, 23 nt, Human
uacaaacagagccagugaaagua

SEQ ID NO: 336072 - RNA, 19 nt, Human
uacaucccucacaggcgcu

SEQ ID NO: 336073 - RNA, 18 nt, Human
uauccucuagguguggag

SEQ ID NO: 336074 - RNA, 18 nt, Human
ucaguccaaaaacuaagc

SEQ ID NO: 336075 - RNA, 22 nt, Human
uccaaguaaaugcuugcaaaaa

SEQ ID NO: 336076 - RNA, 25 nt, Human
uccaaguaaaugcuugcaaaaagcc

SEQ ID NO: 336077 - RNA, 21 nt, Human
uccaguagugcuuaaaugaga

SEQ ID NO: 336078 - RNA, 22 nt, Human
ucccagccccgaaucaugaauu

SEQ ID NO: 336079 - RNA, 22 nt, Human
ucccaguccucaaacagcucgc

SEQ ID NO: 336080 - RNA, 26 nt, Human
ucccucacaggcgcugaccccauagu

SEQ ID NO: 336081 - RNA, 20 nt, Human
ucuugguccuucuugaguuu

SEQ ID NO: 336082 - RNA, 23 nt, Human
ugaacaaguaaacaaaaacuuaa

SEQ ID NO: 336083 - RNA, 19 nt, Human
ugacauuaacaauugaaca

SEQ ID NO: 336084 - RNA, 25 nt, Human
ugacugggucuuugccaugcaucuu

SEQ ID NO: 336085 - RNA, 18 nt, Human
ugagagcaucagaaagag

SEQ ID NO: 336086 - RNA, 26 nt, Human
ugagagcaucagaaagagcaaagaca

SEQ ID NO: 336087 - RNA, 20 nt, Human
ugcaagacaaaaggaaagca

SEQ ID NO: 336088 - RNA, 23 nt, Human
ugcccagacaaacccugcucgga

SEQ ID NO: 336089 - RNA, 18 nt, Human
uggugcucuguguuucaa

SEQ ID NO: 336090 - RNA, 20 nt, Human
uguacaaagucuucagaaac

SEQ ID NO: 336091 - RNA, 24 nt, Human
uguaucuguuaaccacucuaccac

SEQ ID NO: 336092 - RNA, 19 nt, Human
ugucaauaguccuguuucc

SEQ ID NO: 336093 - RNA, 23 nt, Human
uucccagccccgaaucaugaauu

SEQ ID NO: 336094 - RNA, 21 nt, Human
uucuugcauuuuaaauccugg

SEQ ID NO: 336095 - RNA, 22 nt, Human
uuuaaaauuggaaaaguuugua

SEQ ID NO: 336096 - RNA, 24 nt, Human
uuuaauaucuuuucaguccaaaaa

SEQ ID NO: 336097 - RNA, 20 nt, Human
uuuccaggcuugcucggcca

SEQ ID NO: 336098 - RNA, 24 nt, Human
uuuggcacguaggcuguuggucuu

SEQ ID NO: 336099 - RNA, 26 nt, Human
uuuguacacucgagggggaggaagug

SEQ ID NO: 336100 - RNA, 19 nt, Human
aagaccccuggaggaaggg

SEQ ID NO: 336101 - RNA, 18 nt, Human
aagccccaacccccacag

SEQ ID NO: 336102 - RNA, 19 nt, Human
aaggggaugaacacagagg

SEQ ID NO: 336103 - RNA, 25 nt, Human
acacacccugcaggugcaucacaca

SEQ ID NO: 336104 - RNA, 23 nt, Human
acagggugaacucugcacccgag

SEQ ID NO: 336105 - RNA, 23 nt, Human
acaugacagggcugggggaggga

SEQ ID NO: 336106 - RNA, 22 nt, Human
acccugaccccccaagagaaca

SEQ ID NO: 336107 - RNA, 19 nt, Human
agaaacuuuggcaaaaaca

SEQ ID NO: 336108 - RNA, 21 nt, Human
agaaaugcagggcccagccug

SEQ ID NO: 336109 - RNA, 21 nt, Human
agagaacacagggagccaaug

SEQ ID NO: 336110 - RNA, 19 nt, Human
agaggggaggggacagcac

SEQ ID NO: 336111 - RNA, 25 nt, Human
agauggucagucugcugccugaagc

SEQ ID NO: 336112 - RNA, 18 nt, Human
agcaagaaggugggcuca

SEQ ID NO: 336113 - RNA, 25 nt, Human
agcaagaaggugggcucagcccuuc

SEQ ID NO: 336114 - RNA, 19 nt, Human
agcacacacccugcaggug

SEQ ID NO: 336115 - RNA, 19 nt, Human
agcagguccucccccaguc

SEQ ID NO: 336116 - RNA, 19 nt, Human
agcccaaggcacaugacag

SEQ ID NO: 336117 - RNA, 22 nt, Human
agcggggaggucaggggcccug

SEQ ID NO: 336118 - RNA, 24 nt, Human
aggcaccccuagaaacuuuggcaa

SEQ ID NO: 336119 - RNA, 20 nt, Human
agggagccaaugggaaucuu

SEQ ID NO: 336120 - RNA, 23 nt, Human
agggcccagccugcccccaccuu

SEQ ID NO: 336121 - RNA, 22 nt, Human
aguaaaggguggaaggcacuag

SEQ ID NO: 336122 - RNA, 21 nt, Human
aucagcuaagcagcauccccc

SEQ ID NO: 336123 - RNA, 18 nt, Human
aucuaucugucccuuuca

SEQ ID NO: 336124 - RNA, 24 nt, Human
auuccacgguguaaacaaaagcua

SEQ ID NO: 336125 - RNA, 20 nt, Human
caaacccaggcucaucccuu

SEQ ID NO: 336126 - RNA, 23 nt, Human
caagagaacacagggagccaaug

SEQ ID NO: 336127 - RNA, 22 nt, Human
cacccugaccccccaagagaac

SEQ ID NO: 336128 - RNA, 21 nt, Human
cagaauggaccugcaucuauc

SEQ ID NO: 336129 - RNA, 21 nt, Human
cagccccugcccaugcccacu

SEQ ID NO: 336130 - RNA, 18 nt, Human
cagccugcccccaccuug

SEQ ID NO: 336131 - RNA, 21 nt, Human
cagcuaagcagcauccccccu

SEQ ID NO: 336132 - RNA, 18 nt, Human
caugcccacugccccagc

SEQ ID NO: 336133 - RNA, 21 nt, Human
ccaauggcugagauggagggc

SEQ ID NO: 336134 - RNA, 20 nt, Human
ccacagccccugcccaugcc

SEQ ID NO: 336135 - RNA, 21 nt, Human
ccacagcggggaggucagggg

SEQ ID NO: 336136 - RNA, 20 nt, Human
ccacugccccagccugggag

SEQ ID NO: 336137 - RNA, 19 nt, Human
cccaacccccacagcgggg

SEQ ID NO: 336138 - RNA, 23 nt, Human
cccacugccccagccugggaggc

SEQ ID NO: 336139 - RNA, 21 nt, Human
cccaggcucaucccuuugccc

SEQ ID NO: 336140 - RNA, 22 nt, Human
cccccaagagaacacagggagc

SEQ ID NO: 336141 - RNA, 25 nt, Human
ccccccaagagaacacagggagccu

SEQ ID NO: 336142 - RNA, 21 nt, Human
cccccgggacuggcgagggag

SEQ ID NO: 336143 - RNA, 18 nt, Human
ccccgggacuggcgaggg

SEQ ID NO: 336144 - RNA, 22 nt, Human
ccccugcccaugcccacugccc

SEQ ID NO: 336145 - RNA, 24 nt, Human
cccgcccugccuggccugcccacu

SEQ ID NO: 336146 - RNA, 21 nt, Human
cccuagaaacuuuggcaaaaa

SEQ ID NO: 336147 - RNA, 24 nt, Human
cccugccuggccugcccacugccu

SEQ ID NO: 336148 - RNA, 19 nt, Human
cccugggaagucuaggacc

SEQ ID NO: 336149 - RNA, 20 nt, Human
cccugggaagucuaggaccc

SEQ ID NO: 336150 - RNA, 25 nt, Human
cccugggcucccccacccaagaccc

SEQ ID NO: 336151 - RNA, 18 nt, Human
ccgcccugccuggccugc

SEQ ID NO: 336152 - RNA, 20 nt, Human
ccuuuguccccuuuuugguc

SEQ ID NO: 336153 - RNA, 24 nt, Human
cuaggacccauggggcagugcuga

SEQ ID NO: 336154 - RNA, 23 nt, Human
cuaucugucccuuucacccucug

SEQ ID NO: 336155 - RNA, 19 nt, Human
cucccccacccaagacccc

SEQ ID NO: 336156 - RNA, 20 nt, Human
cucucagagagccaagcacc

SEQ ID NO: 336157 - RNA, 24 nt, Human
cugaagccccaacccccacagcgg

SEQ ID NO: 336158 - RNA, 18 nt, Human
cugcccccaccuugaccu

SEQ ID NO: 336159 - RNA, 21 nt, Human
cuggcagaggaaggggcugug

SEQ ID NO: 336160 - RNA, 20 nt, Human
cugggucagggcgggaucag

SEQ ID NO: 336161 - RNA, 21 nt, Human
cuguuccugccccagaaaugc

SEQ ID NO: 336162 - RNA, 18 nt, Human
cuuccucuugcccuggga

SEQ ID NO: 336163 - RNA, 22 nt, Human
cuuuguccccuuuuuggucucu

SEQ ID NO: 336164 - RNA, 23 nt, Human
cuuuuuggucucuaguguuccug

SEQ ID NO: 336165 - RNA, 25 nt, Human
gaaacuuuggcaaaaacaaggagcu

SEQ ID NO: 336166 - RNA, 24 nt, Human
gaagaaaggaggggucacaggggc

SEQ ID NO: 336167 - RNA, 22 nt, Human
gagccaagcaccuggcagagga

SEQ ID NO: 336168 - RNA, 19 nt, Human
gcaccccuagaaacuuugg

SEQ ID NO: 336169 - RNA, 19 nt, Human
gcccucucuccugguggga

SEQ ID NO: 336170 - RNA, 21 nt, Human
ggaaggggcuguggaauggca

SEQ ID NO: 336171 - RNA, 21 nt, Human
ggacagcacccugacccccca

SEQ ID NO: 336172 - RNA, 23 nt, Human
ggagcucauuggaaggggugggg

SEQ ID NO: 336173 - RNA, 18 nt, Human
gggaggcuccguacccgc

SEQ ID NO: 336174 - RNA, 20 nt, Human
gggcaggaggagcccaaggc

SEQ ID NO: 336175 - RNA, 21 nt, Human
gggcccugggcucccccaccc

SEQ ID NO: 336176 - RNA, 28 nt, Human
ggggcacagaggcuagcacacacccugc

SEQ ID NO: 336177 - RNA, 20 nt, Human
ggguggggagagggcagagc

SEQ ID NO: 336178 - RNA, 22 nt, Human
uaaauaaauagaggcuuccucu

SEQ ID NO: 336179 - RNA, 20 nt, Human
uaggacccauggggcagugc

SEQ ID NO: 336180 - RNA, 20 nt, Human
uaggagggucccugccccaa

SEQ ID NO: 336181 - RNA, 18 nt, Human
ucagcuaagcagcauccc

SEQ ID NO: 336182 - RNA, 19 nt, Human
ucauuggaaggggugggga

SEQ ID NO: 336183 - RNA, 25 nt, Human
ucuccuuuguccccuuuuuggucuc

SEQ ID NO: 336184 - RNA, 24 nt, Human
ucugucccuuucacccucuguucc

SEQ ID NO: 336185 - RNA, 19 nt, Human
ugaccccccaagagaacac

SEQ ID NO: 336186 - RNA, 22 nt, Human
ugcccaugcccacugccccagc

SEQ ID NO: 336187 - RNA, 23 nt, Human
ugcccucucuccuggugggagca

SEQ ID NO: 336188 - RNA, 22 nt, Human
ugccugaagccccaacccccac

SEQ ID NO: 336189 - RNA, 19 nt, Human
uggaaggcacuagggagag

SEQ ID NO: 336190 - RNA, 20 nt, Human
uggaauggcagggucuuccu

SEQ ID NO: 336191 - RNA, 22 nt, Human
uggaggaagaaaggagggguca

SEQ ID NO: 336192 - RNA, 23 nt, Human
ugggcucccccacccaagacccc

SEQ ID NO: 336193 - RNA, 24 nt, Human
uggggagagggcagagcagguccu

SEQ ID NO: 336194 - RNA, 21 nt, Human
uuagaguccaaacccaggcuc

SEQ ID NO: 336195 - RNA, 22 nt, Human
uugcaaaaauagaaaacucagc

SEQ ID NO: 336196 - RNA, 22 nt, Human
uuugcccucucuccugguggga

SEQ ID NO: 336197 - RNA, 24 nt, Human
uuuuuuuuuuuuuuuuuugaguuu

SEQ ID NO: 336198 - RNA, 27 nt, Human
uuuuuuuuuuuuuuuuuuuuuuugggg

SEQ ID NO: 336199 - RNA, 21 nt, Human
gauaugaaauuagaaguucac

SEQ ID NO: 336200 - RNA, 21 nt, Human
acccccacagcugcuucuaac

SEQ ID NO: 336201 - RNA, 18 nt, Human
agagagggaaacagagga

SEQ ID NO: 336202 - RNA, 26 nt, Human
cagcgagagagggaaacagaggaaag

SEQ ID NO: 336203 - RNA, 19 nt, Human
ccacagcugcuucuaacac

SEQ ID NO: 336204 - RNA, 22 nt, Human
cucaucuccacugggaccccca

SEQ ID NO: 336205 - RNA, 20 nt, Human
cuccacugggacccccacag

SEQ ID NO: 336206 - RNA, 20 nt, Human
gaggcaugggggaggcucau

SEQ ID NO: 336207 - RNA, 23 nt, Human
gagggucaggcugcuggaggcau

SEQ ID NO: 336208 - RNA, 21 nt, Human
uacuuuugccagcgagagagg

SEQ ID NO: 336209 - RNA, 18 nt, Human
aaacacacaguguucaaa

SEQ ID NO: 336210 - RNA, 26 nt, Human
ucuuuacuuaugcuuguguccacaug

SEQ ID NO: 336211 - RNA, 19 nt, Human
uggccacuuugguaaaaac

SEQ ID NO: 336212 - RNA, 19 nt, Human
ugguugacaaauuuucuuu

SEQ ID NO: 336213 - RNA, 18 nt, Human
uuuuuuuuuuuuuuuuug

SEQ ID NO: 336214 - RNA, 18 nt, Human
uuuuuuuuuuuuuuuuug

SEQ ID NO: 336215 - RNA, 21 nt, Human
aaaaauacacauacagaagua

SEQ ID NO: 336216 - RNA, 19 nt, Human
aaggagacauuaaacugaa

SEQ ID NO: 336217 - RNA, 18 nt, Human
aaucauugaacagucaaa

SEQ ID NO: 336218 - RNA, 20 nt, Human
acaaacucuggaaacuguaa

SEQ ID NO: 336219 - RNA, 23 nt, Human
acaugcugaauccaugcagaaca

SEQ ID NO: 336220 - RNA, 22 nt, Human
acuuuuaacaaaagcauucuag

SEQ ID NO: 336221 - RNA, 19 nt, Human
agaauguguuucuugucag

SEQ ID NO: 336222 - RNA, 23 nt, Human
agcuucccaaauuccugaacagc

SEQ ID NO: 336223 - RNA, 18 nt, Human
aggagacauuaaacugaa

SEQ ID NO: 336224 - RNA, 19 nt, Human
aggcagcugaugagguugu

SEQ ID NO: 336225 - RNA, 21 nt, Human
aggcagcugaugagguugucu

SEQ ID NO: 336226 - RNA, 18 nt, Human
auacagaaguaaauaaaa

SEQ ID NO: 336227 - RNA, 19 nt, Human
caaauaacuuuuaacaaaa

SEQ ID NO: 336228 - RNA, 25 nt, Human
caaauaacuuuuaacaaaagcauuc

SEQ ID NO: 336229 - RNA, 21 nt, Human
caaauggucauauuccuaauc

SEQ ID NO: 336230 - RNA, 21 nt, Human
caaauuccugaacagcagucu

SEQ ID NO: 336231 - RNA, 18 nt, Human
caccaaggcucagagguu

SEQ ID NO: 336232 - RNA, 23 nt, Human
caccagcagaaucuuggauuuug

SEQ ID NO: 336233 - RNA, 19 nt, Human
cagcaagagaaauagcaga

SEQ ID NO: 336234 - RNA, 19 nt, Human
caugcugaauccaugcaga

SEQ ID NO: 336235 - RNA, 31 nt, Human
cauucuauauauuuucuuucaacaguuccaa

SEQ ID NO: 336236 - RNA, 21 nt, Human
cauugaacagucaaaugguca

SEQ ID NO: 336237 - RNA, 25 nt, Human
ccagcagauacaacaaguagucaac

SEQ ID NO: 336238 - RNA, 22 nt, Human
cugaauccaugcagaacacugg

SEQ ID NO: 336239 - RNA, 18 nt, Human
gagguuguuaaagauuga

SEQ ID NO: 336240 - RNA, 18 nt, Human
gauuccauguggaaauag

SEQ ID NO: 336241 - RNA, 21 nt, Human
ggcauaguuauucaccagcag

SEQ ID NO: 336242 - RNA, 22 nt, Human
guuugcauagcucacacaucac

SEQ ID NO: 336243 - RNA, 21 nt, Human
uaaauacaaauaaucauugaa

SEQ ID NO: 336244 - RNA, 19 nt, Human
uaaauacagucuuugacaa

SEQ ID NO: 336245 - RNA, 23 nt, Human
uaacuuuuaacaaaagcauucua

SEQ ID NO: 336246 - RNA, 21 nt, Human
uaagagacagcaaaacuuugg

SEQ ID NO: 336247 - RNA, 24 nt, Human
uaauauuuacugaauucaaacuau

SEQ ID NO: 336248 - RNA, 22 nt, Human
uaaucauugaacagucaaauga

SEQ ID NO: 336249 - RNA, 24 nt, Human
uagucuauaaaaugguugaauggg

SEQ ID NO: 336250 - RNA, 23 nt, Human
ucaacgguauggccaccucuucc

SEQ ID NO: 336251 - RNA, 22 nt, Human
ucagaaguucaaagauggauaa

SEQ ID NO: 336252 - RNA, 22 nt, Human
uccugaacagcagucuuaacuu

SEQ ID NO: 336253 - RNA, 19 nt, Human
ugaacagcagucuuaacuu

SEQ ID NO: 336254 - RNA, 24 nt, Human
ugguugaauggguaacaugcauug

SEQ ID NO: 336255 - RNA, 26 nt, Human
ugugaaagguggucuguacaccaagg

SEQ ID NO: 336256 - RNA, 23 nt, Human
ugugaauacuucacaaaaauaca

SEQ ID NO: 336257 - RNA, 18 nt, Human
uuaaaaguauacagcaaa

SEQ ID NO: 336258 - RNA, 25 nt, Human
uucacaaaaauacacauacagaagg

SEQ ID NO: 336259 - RNA, 20 nt, Human
uucaccagcagaaucuugga

SEQ ID NO: 336260 - RNA, 19 nt, Human
uucauaguucuuucucuaa

SEQ ID NO: 336261 - RNA, 18 nt, Human
uugcauagcucacacauc

SEQ ID NO: 336262 - RNA, 24 nt, Human
uugcauagcucacacaucacugga

SEQ ID NO: 336263 - RNA, 18 nt, Human
uuggcaagagcaaaggag

SEQ ID NO: 336264 - RNA, 24 nt, Human
uugguagucuauaaaaugguugaa

SEQ ID NO: 336265 - RNA, 22 nt, Human
aaccacagaaucaaagaggucc

SEQ ID NO: 336266 - RNA, 20 nt, Human
aaggagacaggagacucccg

SEQ ID NO: 336267 - RNA, 21 nt, Human
acaccugccuccucucuccaa

SEQ ID NO: 336268 - RNA, 25 nt, Human
acaccugccuccucucuccaaccuc

SEQ ID NO: 336269 - RNA, 19 nt, Human
agacaggagacucccgggg

SEQ ID NO: 336270 - RNA, 23 nt, Human
aggcacacaggacuaggcacguc

SEQ ID NO: 336271 - RNA, 19 nt, Human
agggaggggcuuugaacag

SEQ ID NO: 336272 - RNA, 18 nt, Human
agguccaaggagacagga

SEQ ID NO: 336273 - RNA, 19 nt, Human
agguccaaggagacaggag

SEQ ID NO: 336274 - RNA, 18 nt, Human
aguuucacucagugcaag

SEQ ID NO: 336275 - RNA, 22 nt, Human
caaggcacacaggacuaggcac

SEQ ID NO: 336276 - RNA, 19 nt, Human
caccugccuccucucucca

SEQ ID NO: 336277 - RNA, 19 nt, Human
caccugcuucaagccuggc

SEQ ID NO: 336278 - RNA, 26 nt, Human
cacuccagucugaaucaagccagagg

SEQ ID NO: 336279 - RNA, 24 nt, Human
cagagggcaaguuucacucagugc

SEQ ID NO: 336280 - RNA, 21 nt, Human
cagcagcucagggccaggcug

SEQ ID NO: 336281 - RNA, 19 nt, Human
cagcucagggccaggcugg

SEQ ID NO: 336282 - RNA, 22 nt, Human
cagggccaggcuggccuccuug

SEQ ID NO: 336283 - RNA, 24 nt, Human
cagguuccgaggcuggaccagggg

SEQ ID NO: 336284 - RNA, 18 nt, Human
cagucugaaucaagccag

SEQ ID NO: 336285 - RNA, 19 nt, Human
ccaaaccacagaaucaaag

SEQ ID NO: 336286 - RNA, 22 nt, Human
ccaaagggcuuccaugcccuga

SEQ ID NO: 336287 - RNA, 22 nt, Human
cccagucucagucaaauaaguc

SEQ ID NO: 336288 - RNA, 22 nt, Human
ccccccgguccaggagcaagua

SEQ ID NO: 336289 - RNA, 23 nt, Human
ccccuggcucuugcuccuccuuc

SEQ ID NO: 336290 - RNA, 19 nt, Human
cccuggcucuugcuccucc

SEQ ID NO: 336291 - RNA, 19 nt, Human
ccgcgccccccgguccagg

SEQ ID NO: 336292 - RNA, 22 nt, Human
ccggggcaggaugcgcugaaga

SEQ ID NO: 336293 - RNA, 23 nt, Human
ccuauccacuccagucugaauca

SEQ ID NO: 336294 - RNA, 19 nt, Human
ccuccucucuccaaccucc

SEQ ID NO: 336295 - RNA, 22 nt, Human
ccuccuuccgggcuagcucugg

SEQ ID NO: 336296 - RNA, 23 nt, Human
ccuccuuccgggcuagcucuggg

SEQ ID NO: 336297 - RNA, 22 nt, Human
ccuccuugguauggauagaggc

SEQ ID NO: 336298 - RNA, 18 nt, Human
ccucguggucccagugcc

SEQ ID NO: 336299 - RNA, 21 nt, Human
ccucguggucccagugccgcc

SEQ ID NO: 336300 - RNA, 23 nt, Human
ccucucuccaaccuccgcgcccc

SEQ ID NO: 336301 - RNA, 24 nt, Human
cuccuugguauggauagaggccag

SEQ ID NO: 336302 - RNA, 25 nt, Human
gcaggaugcgcugaagagggccccc

SEQ ID NO: 336303 - RNA, 19 nt, Human
gccuccucucuccaaccuc

SEQ ID NO: 336304 - RNA, 19 nt, Human
gcucagggccaggcuggcc

SEQ ID NO: 336305 - RNA, 23 nt, Human
ggcaggaugcgcugaagagggcc

SEQ ID NO: 336306 - RNA, 23 nt, Human
gggcaggaugcgcugaagagggc

SEQ ID NO: 336307 - RNA, 18 nt, Human
gggcuagcucuggcauuu

SEQ ID NO: 336308 - RNA, 22 nt, Human
uagagaccccagucucagucaa

SEQ ID NO: 336309 - RNA, 23 nt, Human
uagcaugcagacaccugccuccu

SEQ ID NO: 336310 - RNA, 24 nt, Human
uauccuauccacuccagucugaau

SEQ ID NO: 336311 - RNA, 19 nt, Human
ucaggaauucagguccagc

SEQ ID NO: 336312 - RNA, 21 nt, Human
uccgaggcuggaccaggggac

SEQ ID NO: 336313 - RNA, 22 nt, Human
uccgcgccccccgguccaggag

SEQ ID NO: 336314 - RNA, 23 nt, Human
ucgcauguucccuggggguccgu

SEQ ID NO: 336315 - RNA, 19 nt, Human
ugaagagggcccccuggcu

SEQ ID NO: 336316 - RNA, 22 nt, Human
ugcuucaagccuggcucccugc

SEQ ID NO: 336317 - RNA, 20 nt, Human
ugggagccuccaaaccacag

SEQ ID NO: 336318 - RNA, 22 nt, Human
uggggcaacaacaucacauggg

SEQ ID NO: 336319 - RNA, 20 nt, Human
ugguauggauagaggccagu

SEQ ID NO: 336320 - RNA, 21 nt, Human
ugguauggauagaggccaguu

SEQ ID NO: 336321 - RNA, 25 nt, Human
uggugggugggaggcgucgccagag

SEQ ID NO: 336322 - RNA, 23 nt, Human
uucacucagugcaaggcuggccc

SEQ ID NO: 336323 - RNA, 22 nt, Human
uuccaggcagaagggcgcucag

SEQ ID NO: 336324 - RNA, 21 nt, Human
uuugaacauccccuuccaucu

SEQ ID NO: 336325 - RNA, 24 nt, Human
uuuuuaggagugaggccauuuagu

SEQ ID NO: 336326 - RNA, 18 nt, Human
uuuuuuuuuuuaggagug

SEQ ID NO: 336327 - RNA, 18 nt, Human
uuuuuuuuuuuuaggagu

SEQ ID NO: 336328 - RNA, 23 nt, Human
uuuuuuuuuuuuuuuuuuuuagg

SEQ ID NO: 336329 - RNA, 23 nt, Human
aaaaaaccaaauaaagcaguggg

SEQ ID NO: 336330 - RNA, 25 nt, Human
aaaccaaauaaagcaauaacuuuaa

SEQ ID NO: 336331 - RNA, 20 nt, Human
accaaauaaagcaauaacuu

SEQ ID NO: 336332 - RNA, 21 nt, Human
agcggcugagggucgcugggg

SEQ ID NO: 336333 - RNA, 21 nt, Human
aggcugggcucggcugggguu

SEQ ID NO: 336334 - RNA, 20 nt, Human
caacccggaaucacagacaa

SEQ ID NO: 336335 - RNA, 22 nt, Human
cacacacacacaguauaaacac

SEQ ID NO: 336336 - RNA, 24 nt, Human
cacacacacacaguauaaacaccu

SEQ ID NO: 336337 - RNA, 23 nt, Human
cacaucccucccccaccccgcgc

SEQ ID NO: 336338 - RNA, 18 nt, Human
cacauguaaacaagucac

SEQ ID NO: 336339 - RNA, 29 nt, Human
cagcaacccggaaucacagacaagauaau

SEQ ID NO: 336340 - RNA, 22 nt, Human
cccccccgcuuaguuucgggag

SEQ ID NO: 336341 - RNA, 20 nt, Human
cccccgcuuaguuucgggag

SEQ ID NO: 336342 - RNA, 22 nt, Human
cccucccccaccccgcgcucac

SEQ ID NO: 336343 - RNA, 20 nt, Human
ccgcgagggcgggcgcgggg

SEQ ID NO: 336344 - RNA, 19 nt, Human
ccgggaggggagacgccag

SEQ ID NO: 336345 - RNA, 27 nt, Human
ccucacacacacacaguauaaacaccc

SEQ ID NO: 336346 - RNA, 21 nt, Human
ccucggcugggcccucgcucc

SEQ ID NO: 336347 - RNA, 18 nt, Human
cgcugggguggcacgcgg

SEQ ID NO: 336348 - RNA, 21 nt, Human
cggccuggggcgcaccgggcc

SEQ ID NO: 336349 - RNA, 25 nt, Human
cggcugggcccucgcucccaaaguu

SEQ ID NO: 336350 - RNA, 21 nt, Human
cgggcugggcucgggcuaggc

SEQ ID NO: 336351 - RNA, 18 nt, Human
cuccccagugcugggggc

SEQ ID NO: 336352 - RNA, 21 nt, Human
cuccccagugcugggggcgga

SEQ ID NO: 336353 - RNA, 19 nt, Human
cugacccucaagcgggcau

SEQ ID NO: 336354 - RNA, 20 nt, Human
gagcagaugaccgucccuuc

SEQ ID NO: 336355 - RNA, 19 nt, Human
gccucaaugggggaccggg

SEQ ID NO: 336356 - RNA, 25 nt, Human
ggagcagaugaccgucccuucucgg

SEQ ID NO: 336357 - RNA, 19 nt, Human
ggcagagagcggcugaggg

SEQ ID NO: 336358 - RNA, 22 nt, Human
ggcuaggcugggcucggcuggg

SEQ ID NO: 336359 - RNA, 24 nt, Human
ggcugggcccucgcucccaaaguu

SEQ ID NO: 336360 - RNA, 19 nt, Human
gggcagaggggccgcgagg

SEQ ID NO: 336361 - RNA, 18 nt, Human
gggcuaggcugggcucgg

SEQ ID NO: 336362 - RNA, 21 nt, Human
gucgcugggguggcacgcggg

SEQ ID NO: 336363 - RNA, 18 nt, Human
uaggcugggcucggcugg

SEQ ID NO: 336364 - RNA, 22 nt, Human
ucaagcgggcaugacgguuucu

SEQ ID NO: 336365 - RNA, 22 nt, Human
ucacaucccucccccaccccgc

SEQ ID NO: 336366 - RNA, 23 nt, Human
ucacaucccucccccaccccgcg

SEQ ID NO: 336367 - RNA, 23 nt, Human
ucaguggcgccuccccagugcug

SEQ ID NO: 336368 - RNA, 19 nt, Human
uccgcgcgcgcucccggcc

SEQ ID NO: 336369 - RNA, 20 nt, Human
uccgcgcgcgcucccggccu

SEQ ID NO: 336370 - RNA, 21 nt, Human
uccgcgcgcgcucccggccug

SEQ ID NO: 336371 - RNA, 20 nt, Human
uccggagcagaugaccgucc

SEQ ID NO: 336372 - RNA, 21 nt, Human
ucgcucccaaaguuauggggg

SEQ ID NO: 336373 - RNA, 18 nt, Human
uggcacgcggggugagcg

SEQ ID NO: 336374 - RNA, 22 nt, Human
uggcuaugauuugacccacgcc

SEQ ID NO: 336375 - RNA, 21 nt, Human
ugucacagcaacccggaauca

SEQ ID NO: 336376 - RNA, 23 nt, Human
ugucacagcaacccggaaucaca

SEQ ID NO: 336377 - RNA, 19 nt, Human
uguuccuuugugcaguuuc

SEQ ID NO: 336378 - RNA, 23 nt, Human
uuuuuuuuuuuuuuuuccauuuu

SEQ ID NO: 336379 - RNA, 18 nt, Human
aaaaaggaaaaugaucau

SEQ ID NO: 336380 - RNA, 21 nt, Human
aaagaaaaugagaagugaccc

SEQ ID NO: 336381 - RNA, 23 nt, Human
aaauaguauuaauagugaagaca

SEQ ID NO: 336382 - RNA, 23 nt, Human
aacacaaauacuauuaacuugua

SEQ ID NO: 336383 - RNA, 20 nt, Human
aagaagcaaauccauuuucc

SEQ ID NO: 336384 - RNA, 23 nt, Human
aagaagcaaauccauuuuccaga

SEQ ID NO: 336385 - RNA, 19 nt, Human
aaguacuguuuuaaagcug

SEQ ID NO: 336386 - RNA, 21 nt, Human
aagucgugugagaugcagaaa

SEQ ID NO: 336387 - RNA, 23 nt, Human
acaggguaagaagcaaauccauu

SEQ ID NO: 336388 - RNA, 24 nt, Human
acaugcaugccugauauuguauau

SEQ ID NO: 336389 - RNA, 19 nt, Human
accaucuuuggucuauauc

SEQ ID NO: 336390 - RNA, 20 nt, Human
acuaggcuugauaagccaaa

SEQ ID NO: 336391 - RNA, 22 nt, Human
acuugugauuuugccaaacaau

SEQ ID NO: 336392 - RNA, 21 nt, Human
agaagcaaauccauuuuccag

SEQ ID NO: 336393 - RNA, 27 nt, Human
aguaaaaagguaagucagcaaagaaaa

SEQ ID NO: 336394 - RNA, 20 nt, Human
agucgugugagaugcagaaa

SEQ ID NO: 336395 - RNA, 22 nt, Human
augaacaucagugguaugaaua

SEQ ID NO: 336396 - RNA, 22 nt, Human
caacacaaauacuauuaacuug

SEQ ID NO: 336397 - RNA, 27 nt, Human
cacaaauacuauuaacuuguauacuau

SEQ ID NO: 336398 - RNA, 21 nt, Human
caccaccgccgccgccugccg

SEQ ID NO: 336399 - RNA, 20 nt, Human
cacuaacuacaagcuaguuc

SEQ ID NO: 336400 - RNA, 23 nt, Human
cagaaaacacaggguaagaagca

SEQ ID NO: 336401 - RNA, 18 nt, Human
cagacucuucauagacuu

SEQ ID NO: 336402 - RNA, 24 nt, Human
cagugguaugaauagcaaaaguuu

SEQ ID NO: 336403 - RNA, 26 nt, Human
cauaugauuuuuuuuuuuuuaagaga

SEQ ID NO: 336404 - RNA, 22 nt, Human
cauggaagcuaaguacccccaa

SEQ ID NO: 336405 - RNA, 22 nt, Human
ccaggcaacuaaaugagcccau

SEQ ID NO: 336406 - RNA, 24 nt, Human
cccccgccaccaccgccgccgccu

SEQ ID NO: 336407 - RNA, 24 nt, Human
ccccgccaccaccgccgccgccug

SEQ ID NO: 336408 - RNA, 26 nt, Human
ccgccaccaccgccgccgccugccgg

SEQ ID NO: 336409 - RNA, 24 nt, Human
ccgccgccugccggcucucucccc

SEQ ID NO: 336410 - RNA, 18 nt, Human
cuuaugaagacuuggugc

SEQ ID NO: 336411 - RNA, 20 nt, Human
gaaaugauagucauguuuua

SEQ ID NO: 336412 - RNA, 23 nt, Human
gagaaaacagugcugcacauuag

SEQ ID NO: 336413 - RNA, 24 nt, Human
gcaaagaaaaugagaagugacccu

SEQ ID NO: 336414 - RNA, 18 nt, Human
gccggcucucuccccccc

SEQ ID NO: 336415 - RNA, 20 nt, Human
gcggcccgcgcucccggugc

SEQ ID NO: 336416 - RNA, 22 nt, Human
gcuacaacuauaaguugaccug

SEQ ID NO: 336417 - RNA, 18 nt, Human
gcuggacuguaaaaaccu

SEQ ID NO: 336418 - RNA, 22 nt, Human
gcugggauacagaggaaaucua

SEQ ID NO: 336419 - RNA, 21 nt, Human
ggaggaacucaaaugggaacu

SEQ ID NO: 336420 - RNA, 20 nt, Human
ggccgcggcccgcgcucccg

SEQ ID NO: 336421 - RNA, 19 nt, Human
ggggaucuuuacuucgaau

SEQ ID NO: 336422 - RNA, 21 nt, Human
ggucaguguaaaguuccucag

SEQ ID NO: 336423 - RNA, 19 nt, Human
uaaaaagaggcugacaaau

SEQ ID NO: 336424 - RNA, 19 nt, Human
uaagcaauacuguauguau

SEQ ID NO: 336425 - RNA, 23 nt, Human
uaagccaaagccuuuuuuuuuuu

SEQ ID NO: 336426 - RNA, 20 nt, Human
uaagucagcaaagaaaauga

SEQ ID NO: 336427 - RNA, 24 nt, Human
uaaguuguaaggcuacaacuauaa

SEQ ID NO: 336428 - RNA, 25 nt, Human
uacaagcuaguucuauaucacuaac

SEQ ID NO: 336429 - RNA, 20 nt, Human
uacaguuuaggaaaugagau

SEQ ID NO: 336430 - RNA, 19 nt, Human
uacuauaccucuuuggccc

SEQ ID NO: 336431 - RNA, 22 nt, Human
uagaguacaccaucuuuggucu

SEQ ID NO: 336432 - RNA, 21 nt, Human
uaggcauggaagcuaaguacc

SEQ ID NO: 336433 - RNA, 19 nt, Human
uauaaaugacuaaaacuug

SEQ ID NO: 336434 - RNA, 25 nt, Human
uauacauauuauauacauauguaca

SEQ ID NO: 336435 - RNA, 19 nt, Human
uauauacauauuauauaca

SEQ ID NO: 336436 - RNA, 19 nt, Human
uauauacauauuauauaca

SEQ ID NO: 336437 - RNA, 22 nt, Human
ucagaagagaaagauggaacaa

SEQ ID NO: 336438 - RNA, 20 nt, Human
ucaucuacagauugugcuac

SEQ ID NO: 336439 - RNA, 22 nt, Human
ucgcauacuuuugaugaacauc

SEQ ID NO: 336440 - RNA, 24 nt, Human
ucgcccccgccaccaccgccgccg

SEQ ID NO: 336441 - RNA, 24 nt, Human
ucuacagauugugcuacuuaguuu

SEQ ID NO: 336442 - RNA, 23 nt, Human
ucuuuggcccuugcuggacugua

SEQ ID NO: 336443 - RNA, 18 nt, Human
ugaagaguuaaacagacu

SEQ ID NO: 336444 - RNA, 25 nt, Human
ugagaagugacccugcuguuaauac

SEQ ID NO: 336445 - RNA, 20 nt, Human
ugagaugcagaaauuuacac

SEQ ID NO: 336446 - RNA, 22 nt, Human
ugagguagugaagaaggagcca

SEQ ID NO: 336447 - RNA, 23 nt, Human
ugauauuguauauacauauuaua

SEQ ID NO: 336448 - RNA, 20 nt, Human
ugcagaaaacacaggguaag

SEQ ID NO: 336449 - RNA, 18 nt, Human
uggaagcuaaguaccccc

SEQ ID NO: 336450 - RNA, 20 nt, Human
uggagaggaggaagaaugaa

SEQ ID NO: 336451 - RNA, 18 nt, Human
uggaggaaacaaaauucc

SEQ ID NO: 336452 - RNA, 26 nt, Human
uggaggaaacaaaauuccaagccaca

SEQ ID NO: 336453 - RNA, 23 nt, Human
uggcagauaaauaccuggccaaa

SEQ ID NO: 336454 - RNA, 21 nt, Human
ugggauacagaggaaaucuac

SEQ ID NO: 336455 - RNA, 21 nt, Human
uguauauacauauuauauaca

SEQ ID NO: 336456 - RNA, 29 nt, Human
uguauauacauauuauauacauauguaca

SEQ ID NO: 336457 - RNA, 23 nt, Human
ugugacaccuuuugaaucccuau

SEQ ID NO: 336458 - RNA, 20 nt, Human
ugugacuaaacuauuuccuu

SEQ ID NO: 336459 - RNA, 23 nt, Human
uguuuagccauugcuaauuugac

SEQ ID NO: 336460 - RNA, 22 nt, Human
uuaaaguacuguuuuaaagcug

SEQ ID NO: 336461 - RNA, 19 nt, Human
uucacaaaguaugcuggga

SEQ ID NO: 336462 - RNA, 25 nt, Human
uucacaaaguaugcugggauacaga

SEQ ID NO: 336463 - RNA, 21 nt, Human
uucuagguagauaugcucaug

SEQ ID NO: 336464 - RNA, 20 nt, Human
uucuugcauuucuauauuau

SEQ ID NO: 336465 - RNA, 25 nt, Human
uuguauacuauaccucuuuggcccu

SEQ ID NO: 336466 - RNA, 27 nt, Human
uuucaagucagucugguaccagacuuu

SEQ ID NO: 336467 - RNA, 24 nt, Human
uuuuuuuuuaagccaucaauuccu

SEQ ID NO: 336468 - RNA, 24 nt, Human
uuuuuuuuuuuuuuuuuguagggg

SEQ ID NO: 336469 - RNA, 27 nt, Human
acccccauccccagccuccugccccga

SEQ ID NO: 336470 - RNA, 28 nt, Human
acccccauccccagccuccugccccgac

SEQ ID NO: 336471 - RNA, 21 nt, Human
acccucauaucccacccccau

SEQ ID NO: 336472 - RNA, 18 nt, Human
aggcagcggguggcacag

SEQ ID NO: 336473 - RNA, 23 nt, Human
aggcagcggguggcacaggccua

SEQ ID NO: 336474 - RNA, 25 nt, Human
aggcaggaaugaguccuugauccaa

SEQ ID NO: 336475 - RNA, 18 nt, Human
agggacaccagcccuggc

SEQ ID NO: 336476 - RNA, 18 nt, Human
aucccacccccaucccca

SEQ ID NO: 336477 - RNA, 18 nt, Human
caaauauucacaagaguc

SEQ ID NO: 336478 - RNA, 25 nt, Human
caccagcccuggcccugcccucagc

SEQ ID NO: 336479 - RNA, 21 nt, Human
cacccucauaucccaccccca

SEQ ID NO: 336480 - RNA, 23 nt, Human
caggcagcggguggcacaggccu

SEQ ID NO: 336481 - RNA, 18 nt, Human
cauccccagccuccugcc

SEQ ID NO: 336482 - RNA, 27 nt, Human
caucuggaaaauacaaauauucacaag

SEQ ID NO: 336483 - RNA, 21 nt, Human
ccaaggcaggaaugaguccuu

SEQ ID NO: 336484 - RNA, 21 nt, Human
ccacccucauaucccaccccc

SEQ ID NO: 336485 - RNA, 22 nt, Human
ccacccucauaucccaccccca

SEQ ID NO: 336486 - RNA, 24 nt, Human
ccauccccagccuccugccccgac

SEQ ID NO: 336487 - RNA, 18 nt, Human
ccccagccuccugccccg

SEQ ID NO: 336488 - RNA, 23 nt, Human
ccccagccuccugccccgacacc

SEQ ID NO: 336489 - RNA, 26 nt, Human
ccccauccccagccuccugccccgac

SEQ ID NO: 336490 - RNA, 23 nt, Human
cccccaggcucccugcucugguu

SEQ ID NO: 336491 - RNA, 21 nt, Human
ccuggcccugcccucagcugc

SEQ ID NO: 336492 - RNA, 23 nt, Human
cggcccgggaccgggcgucuucc

SEQ ID NO: 336493 - RNA, 23 nt, Human
cgggaccgggcgucuuccugcag

SEQ ID NO: 336494 - RNA, 24 nt, Human
cgggcgucuuccugcaggcagcgg

SEQ ID NO: 336495 - RNA, 23 nt, Human
cucauaucccacccccaucccca

SEQ ID NO: 336496 - RNA, 24 nt, Human
cuccugccccgacacccccaggcu

SEQ ID NO: 336497 - RNA, 22 nt, Human
cugcaugccacccucauauccc

SEQ ID NO: 336498 - RNA, 24 nt, Human
cuggcccugcccucagcugcaugc

SEQ ID NO: 336499 - RNA, 20 nt, Human
gcaugccacccucauauccc

SEQ ID NO: 336500 - RNA, 20 nt, Human
gccccgacacccccaggcuc

SEQ ID NO: 336501 - RNA, 25 nt, Human
gccuccugccccgacacccccaggc

SEQ ID NO: 336502 - RNA, 22 nt, Human
gggagagggaccuguggggagc

SEQ ID NO: 336503 - RNA, 23 nt, Human
ggggaugggcuaggacaagaugg

SEQ ID NO: 336504 - RNA, 19 nt, Human
uaacccggcccgggaccgg

SEQ ID NO: 336505 - RNA, 18 nt, Human
ucacaagagucuguacaa

SEQ ID NO: 336506 - RNA, 25 nt, Human
uccccagccuccugccccgacaccc

SEQ ID NO: 336507 - RNA, 19 nt, Human
ucuccaaggcaggaaugag

SEQ ID NO: 336508 - RNA, 21 nt, Human
ugccacccucauaucccaccc

SEQ ID NO: 336509 - RNA, 18 nt, Human
ugccccgacacccccagg

SEQ ID NO: 336510 - RNA, 25 nt, Human
uggaaaauacaaauauucacaagag

SEQ ID NO: 336511 - RNA, 18 nt, Human
uggcacaggccuagugga

SEQ ID NO: 336512 - RNA, 23 nt, Human
uggggagagggaccuguggggag

SEQ ID NO: 336513 - RNA, 24 nt, Human
uuccugcaggcagcggguggcaca

SEQ ID NO: 336514 - RNA, 21 nt, Human
uuuuggggagagggaccugug

SEQ ID NO: 336515 - RNA, 19 nt, Human
aaaccaagacucuuccuca

SEQ ID NO: 336516 - RNA, 22 nt, Human
acccacagguggacacagggag

SEQ ID NO: 336517 - RNA, 19 nt, Human
accccaaccccuuucccca

SEQ ID NO: 336518 - RNA, 22 nt, Human
acccuuagcucugauaaggaua

SEQ ID NO: 336519 - RNA, 23 nt, Human
agacuucugucugcaccacuccu

SEQ ID NO: 336520 - RNA, 23 nt, Human
agagaaaccaagacucuuccuca

SEQ ID NO: 336521 - RNA, 18 nt, Human
agcagcuucucagggcag

SEQ ID NO: 336522 - RNA, 19 nt, Human
agccagcacucccugaccu

SEQ ID NO: 336523 - RNA, 19 nt, Human
auaccuggcuacacccaca

SEQ ID NO: 336524 - RNA, 23 nt, Human
cacacagacccuggcccagggac

SEQ ID NO: 336525 - RNA, 23 nt, Human
caccccaaccccuuuccccacag

SEQ ID NO: 336526 - RNA, 23 nt, Human
cacuggcccugucacacucacac

SEQ ID NO: 336527 - RNA, 25 nt, Human
cacuucugagacaaaaauugaggag

SEQ ID NO: 336528 - RNA, 22 nt, Human
cauaaaaaacaccugagggaga

SEQ ID NO: 336529 - RNA, 19 nt, Human
ccacaggccccacuggccc

SEQ ID NO: 336530 - RNA, 19 nt, Human
ccagggacauccuccucau

SEQ ID NO: 336531 - RNA, 20 nt, Human
ccagugcccacauucacaca

SEQ ID NO: 336532 - RNA, 23 nt, Human
cccccagcacaggagggccucca

SEQ ID NO: 336533 - RNA, 18 nt, Human
cccgugcuucgcuggcuu

SEQ ID NO: 336534 - RNA, 19 nt, Human
cccuggcccacuaaggccc

SEQ ID NO: 336535 - RNA, 20 nt, Human
ccuggcccacuaaggcccag

SEQ ID NO: 336536 - RNA, 18 nt, Human
ccuuauucugagcaccca

SEQ ID NO: 336537 - RNA, 24 nt, Human
cgucaccccugcaaacaugacccu

SEQ ID NO: 336538 - RNA, 23 nt, Human
cuccugcugcaggccuggagcag

SEQ ID NO: 336539 - RNA, 22 nt, Human
cugagacaaaaauugaggagac

SEQ ID NO: 336540 - RNA, 24 nt, Human
cugcaccacuccugcugcaggccu

SEQ ID NO: 336541 - RNA, 22 nt, Human
gaccacauucaagauccaaaac

SEQ ID NO: 336542 - RNA, 22 nt, Human
gagccagcacucccugaccuca

SEQ ID NO: 336543 - RNA, 21 nt, Human
gaugacugucaccccaacccc

SEQ ID NO: 336544 - RNA, 22 nt, Human
gcaagcuacuucgcuguucucu

SEQ ID NO: 336545 - RNA, 20 nt, Human
gcgcugccugcugucugccu

SEQ ID NO: 336546 - RNA, 20 nt, Human
ggcccugucacacucacacg

SEQ ID NO: 336547 - RNA, 19 nt, Human
gggcagcccuggcccacua

SEQ ID NO: 336548 - RNA, 23 nt, Human
guaaugagggcagaggggugcag

SEQ ID NO: 336549 - RNA, 26 nt, Human
gucacacucacacggcacgcacuugg

SEQ ID NO: 336550 - RNA, 19 nt, Human
uccaugcacacucauucca

SEQ ID NO: 336551 - RNA, 19 nt, Human
ucucagggcagcccuggcc

SEQ ID NO: 336552 - RNA, 19 nt, Human
ucucagggcagcccuggcc

SEQ ID NO: 336553 - RNA, 18 nt, Human
ugacugucaccccaaccc

SEQ ID NO: 336554 - RNA, 18 nt, Human
ugagacaaaaauugagga

SEQ ID NO: 336555 - RNA, 18 nt, Human
ugagggagagacccuggc

SEQ ID NO: 336556 - RNA, 22 nt, Human
ugauuagcaaauaagguaugaa

SEQ ID NO: 336557 - RNA, 21 nt, Human
ugcuguacugugagccagcac

SEQ ID NO: 336558 - RNA, 21 nt, Human
uggcacuguagagagaaacca

SEQ ID NO: 336559 - RNA, 21 nt, Human
uggcccagggacauccuccuc

SEQ ID NO: 336560 - RNA, 18 nt, Human
uucucagggcagcccugg

SEQ ID NO: 336561 - RNA, 18 nt, Human
uuuuuuuuuuuuggaucu

SEQ ID NO: 336562 - RNA, 21 nt, Human
uuuuuuuuuuuuuuuuuggau

SEQ ID NO: 336563 - RNA, 22 nt, Human
uuuuuuuuuuuuuuuuuuuggg

SEQ ID NO: 336564 - RNA, 19 nt, Human
aaaguuucucaaacucuau

SEQ ID NO: 336565 - RNA, 23 nt, Human
aauucuccucucaaauaguuuga

SEQ ID NO: 336566 - RNA, 24 nt, Human
acucuauuuuuccgccuccccugc

SEQ ID NO: 336567 - RNA, 25 nt, Human
acucuauuuuuccgccuccccugcu

SEQ ID NO: 336568 - RNA, 20 nt, Human
agcgcucagcccgcugccgc

SEQ ID NO: 336569 - RNA, 24 nt, Human
aggcgacagggaaagaggggccga

SEQ ID NO: 336570 - RNA, 18 nt, Human
aggcggccagagggccuc

SEQ ID NO: 336571 - RNA, 22 nt, Human
caacccgacgggucccgacccu

SEQ ID NO: 336572 - RNA, 18 nt, Human
cagcccgcugccgccuua

SEQ ID NO: 336573 - RNA, 20 nt, Human
cagccuguuugggccuggag

SEQ ID NO: 336574 - RNA, 24 nt, Human
ccaagccuccugggaauggccaag

SEQ ID NO: 336575 - RNA, 20 nt, Human
ccccgugcaucgggagcagg

SEQ ID NO: 336576 - RNA, 18 nt, Human
cccggcagccuguugccc

SEQ ID NO: 336577 - RNA, 21 nt, Human
cccggggucggaucccaagac

SEQ ID NO: 336578 - RNA, 20 nt, Human
cccugggagagaggaugcgg

SEQ ID NO: 336579 - RNA, 21 nt, Human
ccuccagcugcagggcugagg

SEQ ID NO: 336580 - RNA, 22 nt, Human
ccuccccugcuucccuguuaug

SEQ ID NO: 336581 - RNA, 21 nt, Human
cgagcuggggagggggguugu

SEQ ID NO: 336582 - RNA, 19 nt, Human
cggcccggggucggauccc

SEQ ID NO: 336583 - RNA, 20 nt, Human
cguggcccugaacuaugcuu

SEQ ID NO: 336584 - RNA, 21 nt, Human
gcgaagugcguugaggcggcc

SEQ ID NO: 336585 - RNA, 18 nt, Human
gcggggcccggcagccug

SEQ ID NO: 336586 - RNA, 21 nt, Human
ggagggggguugucccuggga

SEQ ID NO: 336587 - RNA, 19 nt, Human
ggccgagcuggggaggggg

SEQ ID NO: 336588 - RNA, 18 nt, Human
ggugcggucggcccgggg

SEQ ID NO: 336589 - RNA, 20 nt, Human
gguggccgagcgcucagccc

SEQ ID NO: 336590 - RNA, 18 nt, Human
guggccgagcgcucagcc

SEQ ID NO: 336591 - RNA, 21 nt, Human
guggccgagcgcucagcccgc

SEQ ID NO: 336592 - RNA, 21 nt, Human
guggcugcaggcgacagggaa

SEQ ID NO: 336593 - RNA, 22 nt, Human
ucccugggagagaggaugcggg

SEQ ID NO: 336594 - RNA, 24 nt, Human
ucuccaagccuccugggaauggcc

SEQ ID NO: 336595 - RNA, 21 nt, Human
ugaaagucgcccuucuccccg

SEQ ID NO: 336596 - RNA, 19 nt, Human
ugcccuccagcugcagggc

SEQ ID NO: 336597 - RNA, 23 nt, Human
ugcgcacgcuggggguggccgag

SEQ ID NO: 336598 - RNA, 20 nt, Human
ugcuuggcggguggcugcag

SEQ ID NO: 336599 - RNA, 22 nt, Human
ugggagcggcguggccagcggg

SEQ ID NO: 336600 - RNA, 23 nt, Human
ugggagcggcguggccagcgggg

SEQ ID NO: 336601 - RNA, 23 nt, Human
uuaggagcuucagccuguuuggg

SEQ ID NO: 336602 - RNA, 24 nt, Human
uucccuguuaugguuaucuggggg

SEQ ID NO: 336603 - RNA, 23 nt, Human
uuuaggagcuucagccuguuugg

SEQ ID NO: 336604 - RNA, 27 nt, Human
uuuuuuuuuuuuuuuuuuuuuucgggg

SEQ ID NO: 336605 - RNA, 21 nt, Human
aaaaacaagagcaaacaucac

SEQ ID NO: 336606 - RNA, 21 nt, Human
aaaagacccagaaauaguaag

SEQ ID NO: 336607 - RNA, 22 nt, Human
aaacaagagcaaacaucaccua

SEQ ID NO: 336608 - RNA, 19 nt, Human
aaacacaaaccuucccaaa

SEQ ID NO: 336609 - RNA, 20 nt, Human
aaacauuagaaagugcacuu

SEQ ID NO: 336610 - RNA, 22 nt, Human
aaagauaaauagacaauugcca

SEQ ID NO: 336611 - RNA, 22 nt, Human
aagaaggcaaaguagucagaca

SEQ ID NO: 336612 - RNA, 22 nt, Human
aagaggaaacaaucugcuacaa

SEQ ID NO: 336613 - RNA, 18 nt, Human
aaggagggcagaauaauu

SEQ ID NO: 336614 - RNA, 19 nt, Human
aaugccuaacccauaauga

SEQ ID NO: 336615 - RNA, 21 nt, Human
acagaaccugggaaaguuaua

SEQ ID NO: 336616 - RNA, 20 nt, Human
acccauaaugacccuugauu

SEQ ID NO: 336617 - RNA, 22 nt, Human
acugacuuaaaaaaauaaaaga

SEQ ID NO: 336618 - RNA, 19 nt, Human
agaaaacacaaaccuuccc

SEQ ID NO: 336619 - RNA, 21 nt, Human
agacaaacuauuaauuguaga

SEQ ID NO: 336620 - RNA, 22 nt, Human
agagaaaacacaaaccuuccca

SEQ ID NO: 336621 - RNA, 19 nt, Human
agagcugaagauauuaaau

SEQ ID NO: 336622 - RNA, 22 nt, Human
agcauuauuuaagaaaucucaa

SEQ ID NO: 336623 - RNA, 18 nt, Human
aggaaucacccaaacaau

SEQ ID NO: 336624 - RNA, 24 nt, Human
aggcaaaguagucagacaggccug

SEQ ID NO: 336625 - RNA, 18 nt, Human
aggggagaagcgccucuu

SEQ ID NO: 336626 - RNA, 24 nt, Human
auaaaacaagcacacaguauaucu

SEQ ID NO: 336627 - RNA, 18 nt, Human
auguaccauuccagagaa

SEQ ID NO: 336628 - RNA, 22 nt, Human
caaaagacccagaaauaguaag

SEQ ID NO: 336629 - RNA, 27 nt, Human
caaaauaguaaguuugaaacuuaaaug

SEQ ID NO: 336630 - RNA, 20 nt, Human
caauaguaaaauaaaaucua

SEQ ID NO: 336631 - RNA, 20 nt, Human
cacacaguauaucagauucc

SEQ ID NO: 336632 - RNA, 21 nt, Human
cagaauaauuuugagaugcaa

SEQ ID NO: 336633 - RNA, 20 nt, Human
caguguccaccaagguccug

SEQ ID NO: 336634 - RNA, 24 nt, Human
caguuuuaaccaauacaaaaaagc

SEQ ID NO: 336635 - RNA, 19 nt, Human
cauguaccauuccagagaa

SEQ ID NO: 336636 - RNA, 18 nt, Human
ccccugagaaaaaccgga

SEQ ID NO: 336637 - RNA, 19 nt, Human
cccguccucucccgacucc

SEQ ID NO: 336638 - RNA, 20 nt, Human
ccuaagaucuggcagaacac

SEQ ID NO: 336639 - RNA, 24 nt, Human
ccucauuuaaaaacauaaguugga

SEQ ID NO: 336640 - RNA, 23 nt, Human
cgggagccagcgagcuguggagg

SEQ ID NO: 336641 - RNA, 24 nt, Human
cggggcacgccccguccucucccg

SEQ ID NO: 336642 - RNA, 18 nt, Human
cuaacccauaaugacccu

SEQ ID NO: 336643 - RNA, 25 nt, Human
cuaauucuaaugugaacuuaguagc

SEQ ID NO: 336644 - RNA, 23 nt, Human
cuagcugaagcuaccuuaaauau

SEQ ID NO: 336645 - RNA, 25 nt, Human
cugacuuaaaaaaauaaaagauaaa

SEQ ID NO: 336646 - RNA, 20 nt, Human
gaaaaaaaaauuaaggcucc

SEQ ID NO: 336647 - RNA, 18 nt, Human
gaagacauguaccauucc

SEQ ID NO: 336648 - RNA, 23 nt, Human
gcaauaaagcaauaauaucugaa

SEQ ID NO: 336649 - RNA, 23 nt, Human
gccucuuuuucuaaugcagcugu

SEQ ID NO: 336650 - RNA, 24 nt, Human
ggacccagaaacauuagaaagugg

SEQ ID NO: 336651 - RNA, 22 nt, Human
ggagucaaguuuucuaguguca

SEQ ID NO: 336652 - RNA, 21 nt, Human
gggagccagcgagcuguggag

SEQ ID NO: 336653 - RNA, 18 nt, Human
gggaggggagaagcgccu

SEQ ID NO: 336654 - RNA, 26 nt, Human
uaaaacaagcacacaguauaucagau

SEQ ID NO: 336655 - RNA, 22 nt, Human
uaaauaacaaugacuaacauuu

SEQ ID NO: 336656 - RNA, 23 nt, Human
uaaauguggccauaaacagaacc

SEQ ID NO: 336657 - RNA, 24 nt, Human
uaaauuaaaaaaauauacauauaa

SEQ ID NO: 336658 - RNA, 20 nt, Human
uaacauagcaauuuuaaaug

SEQ ID NO: 336659 - RNA, 23 nt, Human
uaacccauaaugacccuugauua

SEQ ID NO: 336660 - RNA, 23 nt, Human
uaagaaaucucaauacacgaucu

SEQ ID NO: 336661 - RNA, 19 nt, Human
uaaguuacagcaucucuaa

SEQ ID NO: 336662 - RNA, 22 nt, Human
uaaguucuuuuacauucugagg

SEQ ID NO: 336663 - RNA, 25 nt, Human
uacacaguguccaccaagguccuga

SEQ ID NO: 336664 - RNA, 19 nt, Human
uacagcaucucuaaauaag

SEQ ID NO: 336665 - RNA, 22 nt, Human
uacuuguaauuuuggacuagaa

SEQ ID NO: 336666 - RNA, 23 nt, Human
uacuuuggaagaggaaacaaucu

SEQ ID NO: 336667 - RNA, 23 nt, Human
uagaaacauuaaugccuaaccca

SEQ ID NO: 336668 - RNA, 20 nt, Human
uagaccauacugacuuaaaa

SEQ ID NO: 336669 - RNA, 20 nt, Human
uaggacacauuuucuaaggg

SEQ ID NO: 336670 - RNA, 20 nt, Human
uaggggaggggagaagcgcc

SEQ ID NO: 336671 - RNA, 21 nt, Human
uaguaagcccuugaccuaaaa

SEQ ID NO: 336672 - RNA, 24 nt, Human
uaguaagcccuugaccuaaaaacu

SEQ ID NO: 336673 - RNA, 20 nt, Human
ucaaguacuagauggguacu

SEQ ID NO: 336674 - RNA, 21 nt, Human
ucaaucuuguauaaauaacaa

SEQ ID NO: 336675 - RNA, 24 nt, Human
ucagauagaaacauuaaugccuaa

SEQ ID NO: 336676 - RNA, 22 nt, Human
uccgcggcgggagccagcgagc

SEQ ID NO: 336677 - RNA, 20 nt, Human
ucuauaccuaagaucuggca

SEQ ID NO: 336678 - RNA, 18 nt, Human
ucucaauacacgaucucu

SEQ ID NO: 336679 - RNA, 22 nt, Human
ucucccgacucccguuacaaaa

SEQ ID NO: 336680 - RNA, 22 nt, Human
ucuucaggacccagaaacauua

SEQ ID NO: 336681 - RNA, 24 nt, Human
ugaagauauuaaauguggccaguc

SEQ ID NO: 336682 - RNA, 23 nt, Human
ugaaguuccuaaaauucuggcac

SEQ ID NO: 336683 - RNA, 21 nt, Human
ugaaugguauaaaaaccaaga

SEQ ID NO: 336684 - RNA, 21 nt, Human
uggaagaggaaacaaucugcu

SEQ ID NO: 336685 - RNA, 20 nt, Human
uggaggagcgccggggagga

SEQ ID NO: 336686 - RNA, 19 nt, Human
uuacacaagauuuucaauc

SEQ ID NO: 336687 - RNA, 23 nt, Human
uucaacguccccugagaaaaacc

SEQ ID NO: 336688 - RNA, 26 nt, Human
aaaaaaaaaaccaaaaaacaaaaacc

SEQ ID NO: 336689 - RNA, 24 nt, Human
aaaaaaaccaaaaaacaaaaacca

SEQ ID NO: 336690 - RNA, 24 nt, Human
aaaaaaccaaaaaacaaaaaccau

SEQ ID NO: 336691 - RNA, 24 nt, Human
aaaaaguagauuaaaacuggcuua

SEQ ID NO: 336692 - RNA, 21 nt, Human
aaaaccggcaacgccuccucc

SEQ ID NO: 336693 - RNA, 20 nt, Human
aaacgauguacaccagugaa

SEQ ID NO: 336694 - RNA, 19 nt, Human
aaacucagaaaaccggcaa

SEQ ID NO: 336695 - RNA, 21 nt, Human
aacaaaccucaaacaauucuc

SEQ ID NO: 336696 - RNA, 18 nt, Human
aacaucuaaguucaagcu

SEQ ID NO: 336697 - RNA, 25 nt, Human
aaccaaaaaacaaaaaccauuuuaa

SEQ ID NO: 336698 - RNA, 19 nt, Human
acaguuccuuuuuuuuuuu

SEQ ID NO: 336699 - RNA, 20 nt, Human
agaaaaaaaugucauagaau

SEQ ID NO: 336700 - RNA, 26 nt, Human
agauugcugauuacuuauggcugauc

SEQ ID NO: 336701 - RNA, 24 nt, Human
agccaguuaaaaaguaaacgaugu

SEQ ID NO: 336702 - RNA, 20 nt, Human
aggcagggagggguccgggc

SEQ ID NO: 336703 - RNA, 21 nt, Human
aggcagggagggguccgggcg

SEQ ID NO: 336704 - RNA, 21 nt, Human
auacacuaugauguuuauucc

SEQ ID NO: 336705 - RNA, 20 nt, Human
caaaaaacaaaaaccauuuu

SEQ ID NO: 336706 - RNA, 22 nt, Human
caaacaauucucauccaacuca

SEQ ID NO: 336707 - RNA, 23 nt, Human
cagagccagcgacccccggcacc

SEQ ID NO: 336708 - RNA, 20 nt, Human
cagcagagccagcgaccccc

SEQ ID NO: 336709 - RNA, 21 nt, Human
cagcagagccagcgacccccg

SEQ ID NO: 336710 - RNA, 21 nt, Human
caggcaauuaauauggcucau

SEQ ID NO: 336711 - RNA, 19 nt, Human
caggccccucggcucuggg

SEQ ID NO: 336712 - RNA, 19 nt, Human
cauaacacuguuuacccug

SEQ ID NO: 336713 - RNA, 19 nt, Human
cauuuuaauucagccaagg

SEQ ID NO: 336714 - RNA, 18 nt, Human
ccaauccacugaaagugc

SEQ ID NO: 336715 - RNA, 25 nt, Human
ccagcgacccccggcaccaucuucc

SEQ ID NO: 336716 - RNA, 22 nt, Human
ccgacacaaccgccggcguccc

SEQ ID NO: 336717 - RNA, 21 nt, Human
ccgcuaagccgacacaaccgc

SEQ ID NO: 336718 - RNA, 25 nt, Human
ccggcaccaucuuccgccgccgccu

SEQ ID NO: 336719 - RNA, 22 nt, Human
cgcccgcccgccgcggccccga

SEQ ID NO: 336720 - RNA, 22 nt, Human
cgcccgccgcggccccgaacuc

SEQ ID NO: 336721 - RNA, 20 nt, Human
cgccuaguccucggcagcgg

SEQ ID NO: 336722 - RNA, 19 nt, Human
cggccugucagagccgagg

SEQ ID NO: 336723 - RNA, 21 nt, Human
cggcggcagcagcagagccag

SEQ ID NO: 336724 - RNA, 23 nt, Human
cugcaggacaaaucagaaaaaaa

SEQ ID NO: 336725 - RNA, 18 nt, Human
gagcaggccccucggcuc

SEQ ID NO: 336726 - RNA, 22 nt, Human
gagcuuauaccucacccucuga

SEQ ID NO: 336727 - RNA, 20 nt, Human
gcccuuugagaaaaugaagu

SEQ ID NO: 336728 - RNA, 22 nt, Human
ggcauuacugguuaaacucaga

SEQ ID NO: 336729 - RNA, 21 nt, Human
ggcgucccgggcgcccgcccg

SEQ ID NO: 336730 - RNA, 19 nt, Human
gggaagguuugagucugca

SEQ ID NO: 336731 - RNA, 20 nt, Human
gugcaaugaauaucuuuugu

SEQ ID NO: 336732 - RNA, 19 nt, Human
uaaaaagauggccugcugu

SEQ ID NO: 336733 - RNA, 23 nt, Human
uaaaaagauggccugcuguuuuu

SEQ ID NO: 336734 - RNA, 21 nt, Human
uaaaaaguaaacgauguacac

SEQ ID NO: 336735 - RNA, 24 nt, Human
uaaaaaguaaacgauguacaccag

SEQ ID NO: 336736 - RNA, 25 nt, Human
uaaaaaguagauuaaaacuggcuua

SEQ ID NO: 336737 - RNA, 21 nt, Human
uaaacgauguacaccagugaa

SEQ ID NO: 336738 - RNA, 19 nt, Human
uacaguuacgucaggcacu

SEQ ID NO: 336739 - RNA, 22 nt, Human
uaucagcaugcaauaacacucc

SEQ ID NO: 336740 - RNA, 19 nt, Human
ucaggcacugugaaaagga

SEQ ID NO: 336741 - RNA, 24 nt, Human
ucccgggcgcccgccccucgggag

SEQ ID NO: 336742 - RNA, 21 nt, Human
uccgccgccgccuaguccucg

SEQ ID NO: 336743 - RNA, 22 nt, Human
ucuacauaacacuguuuacccu

SEQ ID NO: 336744 - RNA, 21 nt, Human
ucuacugaggcaaacucaaaa

SEQ ID NO: 336745 - RNA, 22 nt, Human
ucuggggccgggggacagaagg

SEQ ID NO: 336746 - RNA, 19 nt, Human
ucuuccgccgccgccuagu

SEQ ID NO: 336747 - RNA, 24 nt, Human
ugaaaaggacuaccacuuuucuua

SEQ ID NO: 336748 - RNA, 20 nt, Human
ugagaaaaugaaguaguuug

SEQ ID NO: 336749 - RNA, 21 nt, Human
ugagaaaaugaaguaguuugg

SEQ ID NO: 336750 - RNA, 20 nt, Human
ugucauagaauguauuaauu

SEQ ID NO: 336751 - RNA, 26 nt, Human
ugugaaaaggacuaccacuuuucuua

SEQ ID NO: 336752 - RNA, 19 nt, Human
uuaaaaggcacacacauuu

SEQ ID NO: 336753 - RNA, 19 nt, Human
uucacaaaaggacaaaugc

SEQ ID NO: 336754 - RNA, 22 nt, Human
uucacaaaaggacaaaugcugg

SEQ ID NO: 336755 - RNA, 23 nt, Human
uuccuaaaaugaagccaguuaaa

SEQ ID NO: 336756 - RNA, 23 nt, Human
uucucuagcaacaaaccucaaac

SEQ ID NO: 336757 - RNA, 21 nt, Human
uugaaacaucaaagggcauuu

SEQ ID NO: 336758 - RNA, 21 nt, Human
uugaaacaucaaagggcauuu

SEQ ID NO: 336759 - RNA, 25 nt, Human
uuuaugaagaaauuaaauauuuucu

SEQ ID NO: 336760 - RNA, 19 nt, Human
uuugaaaugguuaguagca

SEQ ID NO: 336761 - RNA, 19 nt, Human
uuugcuuugcuugagauug

SEQ ID NO: 336762 - RNA, 21 nt, Human
uuuuauuauuguucucuagca

SEQ ID NO: 336763 - RNA, 22 nt, Human
uuuucacacuucccagcaauca

SEQ ID NO: 336764 - RNA, 26 nt, Human
uuuuuuuuuuugaaacaucaaagggg

SEQ ID NO: 336765 - RNA, 20 nt, Human
aaacaagcacaaaucgcuga

SEQ ID NO: 336766 - RNA, 23 nt, Human
aaacaagcacaaaucgcugaggu

SEQ ID NO: 336767 - RNA, 23 nt, Human
aacuucaucacccagagguacua

SEQ ID NO: 336768 - RNA, 18 nt, Human
aagcaucuggccuuaaug

SEQ ID NO: 336769 - RNA, 20 nt, Human
accacacucaaaggagacag

SEQ ID NO: 336770 - RNA, 21 nt, Human
accagccacccuagagcucaa

SEQ ID NO: 336771 - RNA, 22 nt, Human
acuacaaccccacauccucuga

SEQ ID NO: 336772 - RNA, 26 nt, Human
acuucaucacccagagguacuacaag

SEQ ID NO: 336773 - RNA, 22 nt, Human
acuugugaaugaaguuuucccc

SEQ ID NO: 336774 - RNA, 23 nt, Human
agaaaucaccaguguuggaaaca

SEQ ID NO: 336775 - RNA, 19 nt, Human
agagcaauguaacccacag

SEQ ID NO: 336776 - RNA, 24 nt, Human
agauaaggugaccugccccagcuu

SEQ ID NO: 336777 - RNA, 18 nt, Human
aguguuggaaacagcaga

SEQ ID NO: 336778 - RNA, 19 nt, Human
auccauguaccugcucuuc

SEQ ID NO: 336779 - RNA, 22 nt, Human
augaaguuuuccccgaaaagca

SEQ ID NO: 336780 - RNA, 18 nt, Human
caaacaagcacaaaucgc

SEQ ID NO: 336781 - RNA, 19 nt, Human
caaacaagcacaaaucgcu

SEQ ID NO: 336782 - RNA, 22 nt, Human
caacacagaaaccccagaaucg

SEQ ID NO: 336783 - RNA, 19 nt, Human
caagacuuuucaaagccaa

SEQ ID NO: 336784 - RNA, 22 nt, Human
caaguccccugacagaggccga

SEQ ID NO: 336785 - RNA, 25 nt, Human
caauguaacccacagaguccaugca

SEQ ID NO: 336786 - RNA, 18 nt, Human
caaugugguccauguccc

SEQ ID NO: 336787 - RNA, 22 nt, Human
caaugugguccaugucccccca

SEQ ID NO: 336788 - RNA, 20 nt, Human
cacagaaaccccagaaucgc

SEQ ID NO: 336789 - RNA, 24 nt, Human
cacagaaaccccagaaucgcuucc

SEQ ID NO: 336790 - RNA, 21 nt, Human
cauguccccccaugucccaaa

SEQ ID NO: 336791 - RNA, 24 nt, Human
ccaagacagcaagacuuuucaaag

SEQ ID NO: 336792 - RNA, 18 nt, Human
cccacagaguccaugcaa

SEQ ID NO: 336793 - RNA, 24 nt, Human
cccaugucccaaacuaaccaagca

SEQ ID NO: 336794 - RNA, 18 nt, Human
ccccaugucccaaacuaa

SEQ ID NO: 336795 - RNA, 20 nt, Human
ccccaugucccaaacuaacc

SEQ ID NO: 336796 - RNA, 22 nt, Human
ccccaugucccaaacuaaccaa

SEQ ID NO: 336797 - RNA, 25 nt, Human
cccccaugucccaaacuaaccaagc

SEQ ID NO: 336798 - RNA, 21 nt, Human
ccccccaugucccaaacuaac

SEQ ID NO: 336799 - RNA, 21 nt, Human
cccuguuacuccuaguuguau

SEQ ID NO: 336800 - RNA, 24 nt, Human
ccuuguaguagguucuucuccuca

SEQ ID NO: 336801 - RNA, 22 nt, Human
cggcuccuugccuuguaguagg

SEQ ID NO: 336802 - RNA, 20 nt, Human
cuaacagaaauaacuuuggc

SEQ ID NO: 336803 - RNA, 19 nt, Human
cuacaaccccacauccucu

SEQ ID NO: 336804 - RNA, 18 nt, Human
cuagagcucaauuaagca

SEQ ID NO: 336805 - RNA, 20 nt, Human
cucauggccaugccugaagc

SEQ ID NO: 336806 - RNA, 21 nt, Human
cuccuaaguuguaagccucua

SEQ ID NO: 336807 - RNA, 21 nt, Human
cugaagccuggugucuggaau

SEQ ID NO: 336808 - RNA, 19 nt, Human
cuggccuuaaugcaguaaa

SEQ ID NO: 336809 - RNA, 18 nt, Human
cugguaacaguggaagaa

SEQ ID NO: 336810 - RNA, 25 nt, Human
gaaaagcaugcaucacuguggcuca

SEQ ID NO: 336811 - RNA, 19 nt, Human
gaaguuuuccccgaaaagc

SEQ ID NO: 336812 - RNA, 19 nt, Human
gacaugagauauuggcugu

SEQ ID NO: 336813 - RNA, 20 nt, Human
gcucaguaagauaguacgac

SEQ ID NO: 336814 - RNA, 20 nt, Human
ggcccuguuacuccuaguug

SEQ ID NO: 336815 - RNA, 20 nt, Human
gggaaaaagcuguuauuugc

SEQ ID NO: 336816 - RNA, 20 nt, Human
gguucuucuccucagaaucc

SEQ ID NO: 336817 - RNA, 26 nt, Human
guaguagguucuucuccucagaaucc

SEQ ID NO: 336818 - RNA, 19 nt, Human
uaacagaaauaacuuuggc

SEQ ID NO: 336819 - RNA, 21 nt, Human
uaagccucuaacuacuaucag

SEQ ID NO: 336820 - RNA, 22 nt, Human
uaaggucucaaugugguccaug

SEQ ID NO: 336821 - RNA, 21 nt, Human
uaauacuaaccagccacccua

SEQ ID NO: 336822 - RNA, 26 nt, Human
uaaugcaguaaaccacacucaaagga

SEQ ID NO: 336823 - RNA, 22 nt, Human
uacaaagauaaggugaccugcc

SEQ ID NO: 336824 - RNA, 24 nt, Human
uacuacaaccccacauccucugau

SEQ ID NO: 336825 - RNA, 21 nt, Human
uacuugaugacuaaggucuca

SEQ ID NO: 336826 - RNA, 19 nt, Human
uagacccaagacagcaaga

SEQ ID NO: 336827 - RNA, 21 nt, Human
uagcaccuucaguuggugcug

SEQ ID NO: 336828 - RNA, 23 nt, Human
uagcaccuucaguuggugcugcu

SEQ ID NO: 336829 - RNA, 27 nt, Human
uaguagguucuucuccucagaauccaa

SEQ ID NO: 336830 - RNA, 22 nt, Human
ucagauuucugaucuagaugau

SEQ ID NO: 336831 - RNA, 24 nt, Human
ucaucuucuucucuuuuuuuuuuu

SEQ ID NO: 336832 - RNA, 28 nt, Human
uccaacuauccuaaugaaggagauccaa

SEQ ID NO: 336833 - RNA, 25 nt, Human
ucccuaaaauguagacccaagacag

SEQ ID NO: 336834 - RNA, 25 nt, Human
uccucagaauccaaucuagucagau

SEQ ID NO: 336835 - RNA, 19 nt, Human
ucucuuuuuuuuuuuggca

SEQ ID NO: 336836 - RNA, 24 nt, Human
ucuucgcggacaagaaccguucaa

SEQ ID NO: 336837 - RNA, 24 nt, Human
ugaagcccacuaagcccguucaag

SEQ ID NO: 336838 - RNA, 20 nt, Human
ugaaggagauccaagcaauu

SEQ ID NO: 336839 - RNA, 20 nt, Human
ugcaagggaaaaagcuguua

SEQ ID NO: 336840 - RNA, 19 nt, Human
ugccugaagccuggugucu

SEQ ID NO: 336841 - RNA, 18 nt, Human
ugcuaaaacaacuucauc

SEQ ID NO: 336842 - RNA, 20 nt, Human
uggaauacuugugaaugaaa

SEQ ID NO: 336843 - RNA, 19 nt, Human
uggacaaaagccacauccu

SEQ ID NO: 336844 - RNA, 24 nt, Human
uggagaaaagcuggcugaagccca

SEQ ID NO: 336845 - RNA, 22 nt, Human
uggcccuguuacuccuaguugu

SEQ ID NO: 336846 - RNA, 19 nt, Human
uucaucacccagagguacu

SEQ ID NO: 336847 - RNA, 23 nt, Human
uuccccgaaaagcaugcaucacu

SEQ ID NO: 336848 - RNA, 19 nt, Human
uuuuuuggcagaagccugg

SEQ ID NO: 336849 - RNA, 23 nt, Human
uuuuuuuuuuuuuuaaaaaugga

SEQ ID NO: 336850 - RNA, 21 nt, Human
aaaaaaaaaaaaaaagacgau

SEQ ID NO: 336851 - RNA, 22 nt, Human
aaaaaaaaaaagacgauccaga

SEQ ID NO: 336852 - RNA, 20 nt, Human
aaaaaaaaagacgauccagg

SEQ ID NO: 336853 - RNA, 22 nt, Human
aaaaaaagacgauccagauuaa

SEQ ID NO: 336854 - RNA, 21 nt, Human
aaaaguagcuuguugagagac

SEQ ID NO: 336855 - RNA, 24 nt, Human
aaagugcugggauuacaggcguga

SEQ ID NO: 336856 - RNA, 20 nt, Human
aacaacaccuucuccccggc

SEQ ID NO: 336857 - RNA, 24 nt, Human
aaccaugauugaugacaaugaacc

SEQ ID NO: 336858 - RNA, 22 nt, Human
aagucaauuuucaaaugacuga

SEQ ID NO: 336859 - RNA, 19 nt, Human
aagugcugggauuacaggc

SEQ ID NO: 336860 - RNA, 19 nt, Human
aagugcugggauuacaggc

SEQ ID NO: 336861 - RNA, 26 nt, Human
acaacaaaugucaaaaaaaaagcuaa

SEQ ID NO: 336862 - RNA, 24 nt, Human
accacguuggccaggcuggucuug

SEQ ID NO: 336863 - RNA, 25 nt, Human
acccgccuuggccucccaaagugcu

SEQ ID NO: 336864 - RNA, 19 nt, Human
agccagcacagguaaagca

SEQ ID NO: 336865 - RNA, 18 nt, Human
agccuccaguguagcugg

SEQ ID NO: 336866 - RNA, 22 nt, Human
agcuaagcaaccuuucacagaa

SEQ ID NO: 336867 - RNA, 25 nt, Human
aggaaaacaagggaaaaccgguacc

SEQ ID NO: 336868 - RNA, 18 nt, Human
aggagaaguuuaaaauga

SEQ ID NO: 336869 - RNA, 23 nt, Human
aggagguaucuggggagaggaga

SEQ ID NO: 336870 - RNA, 20 nt, Human
aggcauguaccaccacgccc

SEQ ID NO: 336871 - RNA, 19 nt, Human
aggcuuucaccacguuggc

SEQ ID NO: 336872 - RNA, 20 nt, Human
aguaagaaaaaggagcacag

SEQ ID NO: 336873 - RNA, 18 nt, Human
agugcugggauuacaggc

SEQ ID NO: 336874 - RNA, 18 nt, Human
auguaccaccacgcccag

SEQ ID NO: 336875 - RNA, 18 nt, Human
auucuccugacucagccu

SEQ ID NO: 336876 - RNA, 24 nt, Human
caaagugcugggauuacaggcgug

SEQ ID NO: 336877 - RNA, 24 nt, Human
caaaugucaaaaaaaaagcuaagc

SEQ ID NO: 336878 - RNA, 25 nt, Human
caaccuuucacagaaaggaagugac

SEQ ID NO: 336879 - RNA, 21 nt, Human
caacuugcgucuaaguggugg

SEQ ID NO: 336880 - RNA, 22 nt, Human
caagugauucuccugacucagc

SEQ ID NO: 336881 - RNA, 24 nt, Human
caccaaauguacacaucuauccaa

SEQ ID NO: 336882 - RNA, 20 nt, Human
caccacguuggccaggcugg

SEQ ID NO: 336883 - RNA, 21 nt, Human
caccacguuggccaggcuggu

SEQ ID NO: 336884 - RNA, 24 nt, Human
caccacguuggccaggcuggucuu

SEQ ID NO: 336885 - RNA, 27 nt, Human
caccacguuggccaggcuggucuugaa

SEQ ID NO: 336886 - RNA, 23 nt, Human
cacccgccuuggccucccaaagu

SEQ ID NO: 336887 - RNA, 24 nt, Human
cacccgccuuggccucccaaagug

SEQ ID NO: 336888 - RNA, 18 nt, Human
caccuggguuuguuucca

SEQ ID NO: 336889 - RNA, 24 nt, Human
cacguuggccaggcuggucuugaa

SEQ ID NO: 336890 - RNA, 21 nt, Human
cacugcaaccucugccuccca

SEQ ID NO: 336891 - RNA, 21 nt, Human
cacugcaaccucugccuccca

SEQ ID NO: 336892 - RNA, 23 nt, Human
cagaaaggaagugacugaaaaca

SEQ ID NO: 336893 - RNA, 24 nt, Human
caggcuuucaccacguuggccagg

SEQ ID NO: 336894 - RNA, 21 nt, Human
caguaagcacaguauuuaaau

SEQ ID NO: 336895 - RNA, 24 nt, Human
caguguagcugggauuacaggcau

SEQ ID NO: 336896 - RNA, 21 nt, Human
caguguccagaggccacauga

SEQ ID NO: 336897 - RNA, 21 nt, Human
cauguaccaccacgcccagcu

SEQ ID NO: 336898 - RNA, 22 nt, Human
cauucugucaccuaggcuggag

SEQ ID NO: 336899 - RNA, 22 nt, Human
ccaaagugcugggauuacaggc

SEQ ID NO: 336900 - RNA, 22 nt, Human
ccaaagugcugggauuacaggc

SEQ ID NO: 336901 - RNA, 24 nt, Human
ccaaagugcugggauuacaggcgu

SEQ ID NO: 336902 - RNA, 24 nt, Human
ccaguagcaaaauuucagauaaga

SEQ ID NO: 336903 - RNA, 23 nt, Human
ccaguguagcugggauuacaggc

SEQ ID NO: 336904 - RNA, 24 nt, Human
ccaguguagcugggauuacaggca

SEQ ID NO: 336905 - RNA, 19 nt, Human
ccggcaacaacaccuucuc

SEQ ID NO: 336906 - RNA, 24 nt, Human
ccucccacguucaagugauucucc

SEQ ID NO: 336907 - RNA, 22 nt, Human
ccugaccucgggugauccaccc

SEQ ID NO: 336908 - RNA, 23 nt, Human
ccugacucagccuccaguguagc

SEQ ID NO: 336909 - RNA, 19 nt, Human
ccuuucacagaaaggaagu

SEQ ID NO: 336910 - RNA, 21 nt, Human
cgugacccaccacgcccggcu

SEQ ID NO: 336911 - RNA, 22 nt, Human
cguuggccaggcuggucuugaa

SEQ ID NO: 336912 - RNA, 23 nt, Human
cucacugcaaccucugccuccca

SEQ ID NO: 336913 - RNA, 23 nt, Human
cucagccuccaguguagcuggga

SEQ ID NO: 336914 - RNA, 24 nt, Human
cucauucugucaccuaggcuggag

SEQ ID NO: 336915 - RNA, 25 nt, Human
cuccagcaacauaacuaagguaccc

SEQ ID NO: 336916 - RNA, 22 nt, Human
cuccccggccggcuucagcaac

SEQ ID NO: 336917 - RNA, 26 nt, Human
cuccugaccucgggugauccacccgc

SEQ ID NO: 336918 - RNA, 24 nt, Human
cucgggugauccacccgccuuggc

SEQ ID NO: 336919 - RNA, 24 nt, Human
cugcaaccucugccucccacguuc

SEQ ID NO: 336920 - RNA, 24 nt, Human
gaccucgggugauccacccgccuu

SEQ ID NO: 336921 - RNA, 23 nt, Human
gacugaugaggauagauuuccac

SEQ ID NO: 336922 - RNA, 22 nt, Human
gaucuccacucacugcaaccuc

SEQ ID NO: 336923 - RNA, 18 nt, Human
gauggcaaagugagaaag

SEQ ID NO: 336924 - RNA, 21 nt, Human
gauuacaggcgugacccacca

SEQ ID NO: 336925 - RNA, 21 nt, Human
gauucuccugacucagccucc

SEQ ID NO: 336926 - RNA, 22 nt, Human
gcaaccucugccucccacguuc

SEQ ID NO: 336927 - RNA, 22 nt, Human
gccuuggccucccaaagugcug

SEQ ID NO: 336928 - RNA, 23 nt, Human
gcuggucuugaacuccugaccuc

SEQ ID NO: 336929 - RNA, 25 nt, Human
ggaaaacccugaauuguuacagccc

SEQ ID NO: 336930 - RNA, 21 nt, Human
ggaccgaaggcaaaugggaga

SEQ ID NO: 336931 - RNA, 19 nt, Human
ggagaaguuuaaaaugaga

SEQ ID NO: 336932 - RNA, 19 nt, Human
ggcagggaaaaaugcaaug

SEQ ID NO: 336933 - RNA, 24 nt, Human
ggcuggucuugaacuccugaccuc

SEQ ID NO: 336934 - RNA, 19 nt, Human
ggucuugaacuccugaccu

SEQ ID NO: 336935 - RNA, 23 nt, Human
ggugauccacccgccuuggccuc

SEQ ID NO: 336936 - RNA, 18 nt, Human
guagcugggauuacaggc

SEQ ID NO: 336937 - RNA, 20 nt, Human
guagcugggauuacaggcau

SEQ ID NO: 336938 - RNA, 22 nt, Human
guagcugggauuacaggcaugu

SEQ ID NO: 336939 - RNA, 24 nt, Human
gucuugaacuccugaccucgggug

SEQ ID NO: 336940 - RNA, 24 nt, Human
gugauccacccgccuuggccuccc

SEQ ID NO: 336941 - RNA, 21 nt, Human
guggccgcccggucucagcuc

SEQ ID NO: 336942 - RNA, 25 nt, Human
uaaaaacgccacucagagaagcuac

SEQ ID NO: 336943 - RNA, 22 nt, Human
uaaagaacaacaaaugucaaaa

SEQ ID NO: 336944 - RNA, 18 nt, Human
uaaauucuccuuuuaaaa

SEQ ID NO: 336945 - RNA, 19 nt, Human
uaagaagucacucaaagac

SEQ ID NO: 336946 - RNA, 25 nt, Human
uaagcaaccuuucacagaaaggaag

SEQ ID NO: 336947 - RNA, 24 nt, Human
uaauagauacaggcuuucaccacg

SEQ ID NO: 336948 - RNA, 21 nt, Human
uaauuuuugucuuuuaauaga

SEQ ID NO: 336949 - RNA, 23 nt, Human
uacaaugaaguuagaugagcaaa

SEQ ID NO: 336950 - RNA, 24 nt, Human
uacaggcauguaccaccacgccca

SEQ ID NO: 336951 - RNA, 22 nt, Human
uaccaccacgcccagcuaauuu

SEQ ID NO: 336952 - RNA, 18 nt, Human
uaggcuggagggcagugg

SEQ ID NO: 336953 - RNA, 21 nt, Human
uauccaacaaaagcuuuccua

SEQ ID NO: 336954 - RNA, 18 nt, Human
ucacaguaagcacaguau

SEQ ID NO: 336955 - RNA, 18 nt, Human
ucacugcaaccucugccu

SEQ ID NO: 336956 - RNA, 19 nt, Human
ucacugcaaccucugccuc

SEQ ID NO: 336957 - RNA, 22 nt, Human
ucacugcaaccucugccuccca

SEQ ID NO: 336958 - RNA, 24 nt, Human
ucacugcaaccucugccucccacg

SEQ ID NO: 336959 - RNA, 26 nt, Human
ucacugcaaccucugccucccacguu

SEQ ID NO: 336960 - RNA, 21 nt, Human
ucagcaacuugcgucuaagug

SEQ ID NO: 336961 - RNA, 19 nt, Human
ucagcuaaaaacgccacuc

SEQ ID NO: 336962 - RNA, 22 nt, Human
ucauucugucaccuaggcugga

SEQ ID NO: 336963 - RNA, 24 nt, Human
ucccaaagugcugggauuacaggc

SEQ ID NO: 336964 - RNA, 24 nt, Human
ucccacguucaagugauucuccug

SEQ ID NO: 336965 - RNA, 22 nt, Human
uccuggguggagcacaggccuu

SEQ ID NO: 336966 - RNA, 22 nt, Human
ucucauucugucaccuaggcug

SEQ ID NO: 336967 - RNA, 24 nt, Human
ucucauucugucaccuaggcugga

SEQ ID NO: 336968 - RNA, 18 nt, Human
ucugucaccuaggcugga

SEQ ID NO: 336969 - RNA, 23 nt, Human
ucuugaacuccugaccucgggug

SEQ ID NO: 336970 - RNA, 18 nt, Human
ugaacuaugugguugcug

SEQ ID NO: 336971 - RNA, 24 nt, Human
ugaccucgggugauccacccgccu

SEQ ID NO: 336972 - RNA, 24 nt, Human
ugacucagccuccaguguagcugg

SEQ ID NO: 336973 - RNA, 23 nt, Human
ugagaggaaaacaagggaaaacc

SEQ ID NO: 336974 - RNA, 18 nt, Human
ugagauagagucucauuc

SEQ ID NO: 336975 - RNA, 22 nt, Human
ugagauagagucucauucuguc

SEQ ID NO: 336976 - RNA, 18 nt, Human
ugagcaaaacauaaguau

SEQ ID NO: 336977 - RNA, 19 nt, Human
ugauuugaacuaugugguu

SEQ ID NO: 336978 - RNA, 21 nt, Human
ugcccauccuuugcacacaau

SEQ ID NO: 336979 - RNA, 22 nt, Human
ugcugggauuacaggcgugacc

SEQ ID NO: 336980 - RNA, 24 nt, Human
uggccaggcuggucuugaacuccu

SEQ ID NO: 336981 - RNA, 21 nt, Human
ugggauuacaggcauguacca

SEQ ID NO: 336982 - RNA, 24 nt, Human
ugggauuacaggcauguaccacca

SEQ ID NO: 336983 - RNA, 18 nt, Human
ugggauuacaggcgugac

SEQ ID NO: 336984 - RNA, 22 nt, Human
ugggauuacaggcgugacccac

SEQ ID NO: 336985 - RNA, 23 nt, Human
ugggauuacaggcgugacccacc

SEQ ID NO: 336986 - RNA, 24 nt, Human
ugggauuacaggcgugacccacca

SEQ ID NO: 336987 - RNA, 21 nt, Human
uggguggagcacaggccuuug

SEQ ID NO: 336988 - RNA, 19 nt, Human
uggguuuguuuccaucucu

SEQ ID NO: 336989 - RNA, 24 nt, Human
uguagcugggauuacaggcaugua

SEQ ID NO: 336990 - RNA, 22 nt, Human
ugucaaaaugacgcuggguaca

SEQ ID NO: 336991 - RNA, 22 nt, Human
uguccagaggccacaugauggc

SEQ ID NO: 336992 - RNA, 20 nt, Human
uuaaauucuccuuuuaaaau

SEQ ID NO: 336993 - RNA, 21 nt, Human
uucaagcacuuucuuuucugc

SEQ ID NO: 336994 - RNA, 23 nt, Human
uucaagugauucuccugacucag

SEQ ID NO: 336995 - RNA, 24 nt, Human
uucaagugauucuccugacucagc

SEQ ID NO: 336996 - RNA, 18 nt, Human
uugcugcuuugauucugg

SEQ ID NO: 336997 - RNA, 18 nt, Human
uuggccucccaaagugcu

SEQ ID NO: 336998 - RNA, 21 nt, Human
uuucaccacguuggccaggcu

SEQ ID NO: 336999 - RNA, 24 nt, Human
accccaacuaauuaauggugguua

SEQ ID NO: 337000 - RNA, 21 nt, Human
caaauaaucaagcagcaauau

SEQ ID NO: 337001 - RNA, 20 nt, Human
cagaugacuuaguaauuaag

SEQ ID NO: 337002 - RNA, 23 nt, Human
gaaaauuucacauuacaguaaac

SEQ ID NO: 337003 - RNA, 20 nt, Human
uaaugaauucagcaaaucau

SEQ ID NO: 337004 - RNA, 24 nt, Human
ugauguaaaaaucaaauaaucaag

SEQ ID NO: 337005 - RNA, 25 nt, Human
uuacaguaaacuccaccccaacuaa

SEQ ID NO: 337006 - RNA, 21 nt, Human
aaaauacucgcugccacacca

SEQ ID NO: 337007 - RNA, 18 nt, Human
aacuaagaaggaaaaaac

SEQ ID NO: 337008 - RNA, 18 nt, Human
aagcaaaauaucacaaac

SEQ ID NO: 337009 - RNA, 26 nt, Human
aagcgccuuauuguuuuaaagguggc

SEQ ID NO: 337010 - RNA, 24 nt, Human
aauaucacaaacauuuucaauaga

SEQ ID NO: 337011 - RNA, 21 nt, Human
auaccaaaauacucgcugcca

SEQ ID NO: 337012 - RNA, 22 nt, Human
caaaagcaaaauaucacaaaca

SEQ ID NO: 337013 - RNA, 22 nt, Human
cacaccacagguauucucacac

SEQ ID NO: 337014 - RNA, 22 nt, Human
cacuacauaaaguaaaaacucu

SEQ ID NO: 337015 - RNA, 26 nt, Human
cagccaggucccuucuccauccauuu

SEQ ID NO: 337016 - RNA, 24 nt, Human
ccaaaauacucgcugccacaccac

SEQ ID NO: 337017 - RNA, 24 nt, Human
ccucuuaugggcggagcagagcag

SEQ ID NO: 337018 - RNA, 18 nt, Human
cuccacacuucuacuugc

SEQ ID NO: 337019 - RNA, 19 nt, Human
cuccccaggugcccgcgcc

SEQ ID NO: 337020 - RNA, 18 nt, Human
cuuaauauuuucugaccu

SEQ ID NO: 337021 - RNA, 20 nt, Human
gggcggagcagagcagcggg

SEQ ID NO: 337022 - RNA, 25 nt, Human
uaaguuagagugcaaaaugaaagcg

SEQ ID NO: 337023 - RNA, 21 nt, Human
uaccaaaauacucgcugccac

SEQ ID NO: 337024 - RNA, 22 nt, Human
uaccaaaauacucgcugccaca

SEQ ID NO: 337025 - RNA, 18 nt, Human
ucacuacauaaaguaaaa

SEQ ID NO: 337026 - RNA, 19 nt, Human
uccccaggugcccgcgccg

SEQ ID NO: 337027 - RNA, 26 nt, Human
uccuucauccuucuguuucuguuuca

SEQ ID NO: 337028 - RNA, 24 nt, Human
ugcaaaagcaaaauaucacaaaca

SEQ ID NO: 337029 - RNA, 18 nt, Human
uguauuuucaaaauugua

SEQ ID NO: 337030 - RNA, 19 nt, Human
uuagagugcaaaaugaaag

SEQ ID NO: 337031 - RNA, 25 nt, Human
uuucaaaauuguauuagguaucacu

SEQ ID NO: 337032 - RNA, 21 nt, Human
aaaauagcagaaaucauacag

SEQ ID NO: 337033 - RNA, 25 nt, Human
aaacagaaaucagaaaugagggacc

SEQ ID NO: 337034 - RNA, 19 nt, Human
aaacagauuguggggcucu

SEQ ID NO: 337035 - RNA, 23 nt, Human
aaacagccucuuuaacaacauuu

SEQ ID NO: 337036 - RNA, 18 nt, Human
aaaggacuucacagagaa

SEQ ID NO: 337037 - RNA, 24 nt, Human
aacacuuugggcggcugagguggg

SEQ ID NO: 337038 - RNA, 20 nt, Human
aacauggugaaacccugucu

SEQ ID NO: 337039 - RNA, 21 nt, Human
aacauggugaaacccugucuc

SEQ ID NO: 337040 - RNA, 23 nt, Human
aacuccugggcucaagcaauccu

SEQ ID NO: 337041 - RNA, 24 nt, Human
aagcaauccugccucagccuccca

SEQ ID NO: 337042 - RNA, 19 nt, Human
aagcuaacacucuggacuu

SEQ ID NO: 337043 - RNA, 24 nt, Human
aaucacuugaacccgggaggugca

SEQ ID NO: 337044 - RNA, 20 nt, Human
acaaauucaaauaaucagga

SEQ ID NO: 337045 - RNA, 18 nt, Human
acaaggcaaagaauaagu

SEQ ID NO: 337046 - RNA, 24 nt, Human
acagagcaagacacugucucaaaa

SEQ ID NO: 337047 - RNA, 24 nt, Human
acagugcugggauuacaggcauga

SEQ ID NO: 337048 - RNA, 24 nt, Human
acccugucucuacuaaaaauacaa

SEQ ID NO: 337049 - RNA, 20 nt, Human
acuauauuuggcagcaaagu

SEQ ID NO: 337050 - RNA, 28 nt, Human
agaagaaaauggaaugugcuugaaagag

SEQ ID NO: 337051 - RNA, 25 nt, Human
agagaacaaggcaaagaauaaguaa

SEQ ID NO: 337052 - RNA, 23 nt, Human
agagaucuaaagggccauggaag

SEQ ID NO: 337053 - RNA, 23 nt, Human
agcaauacaaccaccucagccuc

SEQ ID NO: 337054 - RNA, 21 nt, Human
agccaccacacccagccaaaa

SEQ ID NO: 337055 - RNA, 23 nt, Human
agccaggcgugguggcacaugcc

SEQ ID NO: 337056 - RNA, 22 nt, Human
agccccuggcuaagugaaugcu

SEQ ID NO: 337057 - RNA, 22 nt, Human
agccuggccaacauggugaaac

SEQ ID NO: 337058 - RNA, 24 nt, Human
agccuggccaacauggugaaaccc

SEQ ID NO: 337059 - RNA, 24 nt, Human
aggggaaaauacaaaauauauguc

SEQ ID NO: 337060 - RNA, 24 nt, Human
aggggccgggcaugguggcucaug

SEQ ID NO: 337061 - RNA, 23 nt, Human
agguggguggaucacuugaggcc

SEQ ID NO: 337062 - RNA, 21 nt, Human
aguacaguggcgcgaucauag

SEQ ID NO: 337063 - RNA, 23 nt, Human
aguacaguggcgcgaucauagcu

SEQ ID NO: 337064 - RNA, 22 nt, Human
agucugaguuuaaugucugggg

SEQ ID NO: 337065 - RNA, 18 nt, Human
agugcugggauuacaggc

SEQ ID NO: 337066 - RNA, 22 nt, Human
agugcugggauuacaggcauga

SEQ ID NO: 337067 - RNA, 22 nt, Human
auacaacagcaaauuuccaaaa

SEQ ID NO: 337068 - RNA, 23 nt, Human
auaccugcaacauacauaaaacc

SEQ ID NO: 337069 - RNA, 25 nt, Human
augaauguauauugcugugcuucuc

SEQ ID NO: 337070 - RNA, 19 nt, Human
augccuguaaucccaacac

SEQ ID NO: 337071 - RNA, 20 nt, Human
auggauuguauguguaugug

SEQ ID NO: 337072 - RNA, 23 nt, Human
auggauuguauguguaugugugu

SEQ ID NO: 337073 - RNA, 24 nt, Human
auguguaugugugugugugugugu

SEQ ID NO: 337074 - RNA, 20 nt, Human
augugugugugugugugugu

SEQ ID NO: 337075 - RNA, 24 nt, Human
caaagaaucaaacagaaaucagaa

SEQ ID NO: 337076 - RNA, 22 nt, Human
caacaaaguuuugugaacuaaa

SEQ ID NO: 337077 - RNA, 24 nt, Human
caacacuuugggcggcugaggugg

SEQ ID NO: 337078 - RNA, 24 nt, Human
caacauggugaaacccugucucua

SEQ ID NO: 337079 - RNA, 23 nt, Human
caagagacaauuuaaaauuacag

SEQ ID NO: 337080 - RNA, 22 nt, Human
caagcaauacaaccaccucagc

SEQ ID NO: 337081 - RNA, 18 nt, Human
caagcaauccugccucag

SEQ ID NO: 337082 - RNA, 21 nt, Human
cacacccagccaaaaaaaggu

SEQ ID NO: 337083 - RNA, 24 nt, Human
cacagugcugggauuacaggcaug

SEQ ID NO: 337084 - RNA, 24 nt, Human
caccucagccucccacagugcugg

SEQ ID NO: 337085 - RNA, 24 nt, Human
cacuacuugggaggcugagaugag

SEQ ID NO: 337086 - RNA, 19 nt, Human
cagacaauuaucuaaaagc

SEQ ID NO: 337087 - RNA, 21 nt, Human
cagacaauuaucuaaaagccc

SEQ ID NO: 337088 - RNA, 21 nt, Human
cagcgaggccagaguucccca

SEQ ID NO: 337089 - RNA, 19 nt, Human
cagcuaagcaaacuagcca

SEQ ID NO: 337090 - RNA, 25 nt, Human
cagugcugggauuacaggcaugagc

SEQ ID NO: 337091 - RNA, 23 nt, Human
ccacagugcugggauuacaggca

SEQ ID NO: 337092 - RNA, 24 nt, Human
ccacagugcugggauuacaggcau

SEQ ID NO: 337093 - RNA, 24 nt, Human
ccacugaccuccagccugggagac

SEQ ID NO: 337094 - RNA, 20 nt, Human
ccaggaguucgagaccagcc

SEQ ID NO: 337095 - RNA, 24 nt, Human
cccaccacucuugucucaaacaaa

SEQ ID NO: 337096 - RNA, 23 nt, Human
ccuaccaaaaugcccauucccca

SEQ ID NO: 337097 - RNA, 22 nt, Human
ccuccagccugggagacagagc

SEQ ID NO: 337098 - RNA, 24 nt, Human
ccugccucagccucccaagaagcu

SEQ ID NO: 337099 - RNA, 22 nt, Human
ccuggccaacauggugaaaccc

SEQ ID NO: 337100 - RNA, 24 nt, Human
ccuggccaacauggugaaacccug

SEQ ID NO: 337101 - RNA, 24 nt, Human
ccuggccucaagcaauacaaccac

SEQ ID NO: 337102 - RNA, 20 nt, Human
ccuguaaucccaacacuuug

SEQ ID NO: 337103 - RNA, 22 nt, Human
ccuguaaucccaacacuuuggg

SEQ ID NO: 337104 - RNA, 25 nt, Human
ccuguaaucccaacacuuugggcgg

SEQ ID NO: 337105 - RNA, 22 nt, Human
ccuuccugccugacuccggaag

SEQ ID NO: 337106 - RNA, 24 nt, Human
cgagaccagccuggccaacauggu

SEQ ID NO: 337107 - RNA, 22 nt, Human
cgaggccagaguuccccagcgc

SEQ ID NO: 337108 - RNA, 19 nt, Human
cguccaccacacuuuaccu

SEQ ID NO: 337109 - RNA, 21 nt, Human
cucaagcaauccugccucagc

SEQ ID NO: 337110 - RNA, 24 nt, Human
cucaugccuguaaucccaacacuu

SEQ ID NO: 337111 - RNA, 21 nt, Human
cugcaacauacauaaaaccua

SEQ ID NO: 337112 - RNA, 24 nt, Human
cuggccaacauggugaaacccugu

SEQ ID NO: 337113 - RNA, 22 nt, Human
cuggccucaagcaauacaacca

SEQ ID NO: 337114 - RNA, 25 nt, Human
cuguaaccaaaacagauuguggggc

SEQ ID NO: 337115 - RNA, 19 nt, Human
cugugcuucuccuuccugc

SEQ ID NO: 337116 - RNA, 24 nt, Human
cuucgcuccaucacccaggaugga

SEQ ID NO: 337117 - RNA, 24 nt, Human
gaaaagugugcaauaccugcaaca

SEQ ID NO: 337118 - RNA, 24 nt, Human
gaaugcuuaugacuguggucacaa

SEQ ID NO: 337119 - RNA, 24 nt, Human
gacuacaggugugcaccaccaugc

SEQ ID NO: 337120 - RNA, 18 nt, Human
gacuccugucucagucuc

SEQ ID NO: 337121 - RNA, 23 nt, Human
gagaaucacuugaacccgggagg

SEQ ID NO: 337122 - RNA, 23 nt, Human
gagaugagaaucacuugaacccg

SEQ ID NO: 337123 - RNA, 19 nt, Human
gagcccagccugcucccgc

SEQ ID NO: 337124 - RNA, 25 nt, Human
gagcccagccugcucccgcagggag

SEQ ID NO: 337125 - RNA, 18 nt, Human
gaucacuugaggccagga

SEQ ID NO: 337126 - RNA, 24 nt, Human
gaucacuugaggccaggaguucga

SEQ ID NO: 337127 - RNA, 18 nt, Human
gauuacaggcaugagcca

SEQ ID NO: 337128 - RNA, 21 nt, Human
gauuacaggcaugagccacca

SEQ ID NO: 337129 - RNA, 22 nt, Human
gauuacaggcaugagccaccac

SEQ ID NO: 337130 - RNA, 20 nt, Human
gauuguauguguaugugugu

SEQ ID NO: 337131 - RNA, 24 nt, Human
gccaacauggugaaacccugucuc

SEQ ID NO: 337132 - RNA, 19 nt, Human
gcccauuccccaaagauga

SEQ ID NO: 337133 - RNA, 22 nt, Human
gccgggcaugguggcucaugcc

SEQ ID NO: 337134 - RNA, 19 nt, Human
gcuccaucacccaggaugg

SEQ ID NO: 337135 - RNA, 22 nt, Human
ggacuacaggugugcaccacca

SEQ ID NO: 337136 - RNA, 24 nt, Human
ggacuacaggugugcaccaccaug

SEQ ID NO: 337137 - RNA, 19 nt, Human
ggaguacaguggcgcgauc

SEQ ID NO: 337138 - RNA, 19 nt, Human
ggauuacaggcaugagcca

SEQ ID NO: 337139 - RNA, 21 nt, Human
ggcaaagaauaaguaauacaa

SEQ ID NO: 337140 - RNA, 23 nt, Human
ggcaugguggcucaugccuguaa

SEQ ID NO: 337141 - RNA, 23 nt, Human
ggccgggcaugguggcucaugcc

SEQ ID NO: 337142 - RNA, 20 nt, Human
ggcucaugccuguaauccca

SEQ ID NO: 337143 - RNA, 19 nt, Human
gggcucaagcaauccugcc

SEQ ID NO: 337144 - RNA, 22 nt, Human
gggucuugcuguguugcccugg

SEQ ID NO: 337145 - RNA, 18 nt, Human
gguccagcggagcugagc

SEQ ID NO: 337146 - RNA, 23 nt, Human
gguggcucaugccuguaauccca

SEQ ID NO: 337147 - RNA, 24 nt, Human
guauguguaugugugugugugugu

SEQ ID NO: 337148 - RNA, 27 nt, Human
guauguguaugugugugugugugugug

SEQ ID NO: 337149 - RNA, 21 nt, Human
gugaaacccugucucuacuaa

SEQ ID NO: 337150 - RNA, 24 nt, Human
gugagcugagauuugugccacuga

SEQ ID NO: 337151 - RNA, 22 nt, Human
guggaucacuugaggccaggag

SEQ ID NO: 337152 - RNA, 25 nt, Human
guguguauauauauauauauuugaa

SEQ ID NO: 337153 - RNA, 24 nt, Human
guuuuuaauucugaaaauuaacug

SEQ ID NO: 337154 - RNA, 21 nt, Human
uaaaaauacaaaaauuagcca

SEQ ID NO: 337155 - RNA, 18 nt, Human
uaaaauuacagcaccucu

SEQ ID NO: 337156 - RNA, 20 nt, Human
uaaccaauagccaccagugg

SEQ ID NO: 337157 - RNA, 23 nt, Human
uacaacagcaaauuuccaaaaaa

SEQ ID NO: 337158 - RNA, 24 nt, Human
uacaaccaccucagccucccacag

SEQ ID NO: 337159 - RNA, 24 nt, Human
uacaggcaugagccaccacaccca

SEQ ID NO: 337160 - RNA, 19 nt, Human
uacaguggcgcgaucauag

SEQ ID NO: 337161 - RNA, 23 nt, Human
uaccugcaacauacauaaaaccu

SEQ ID NO: 337162 - RNA, 24 nt, Human
uaccugcaacauacauaaaaccua

SEQ ID NO: 337163 - RNA, 22 nt, Human
uagacaggccaugagcucucca

SEQ ID NO: 337164 - RNA, 18 nt, Human
uagagaaggguaguuaag

SEQ ID NO: 337165 - RNA, 23 nt, Human
uagccaaacagaaguaauuucaa

SEQ ID NO: 337166 - RNA, 21 nt, Human
uaggacuacaggugugcacca

SEQ ID NO: 337167 - RNA, 24 nt, Human
uaggacuacaggugugcaccacca

SEQ ID NO: 337168 - RNA, 21 nt, Human
uaguucauagcaauuugggga

SEQ ID NO: 337169 - RNA, 18 nt, Human
uauagaacagaacacgaa

SEQ ID NO: 337170 - RNA, 21 nt, Human
uauagaccuaugauguuggug

SEQ ID NO: 337171 - RNA, 21 nt, Human
uauauuugcauuccccaaauu

SEQ ID NO: 337172 - RNA, 20 nt, Human
uauggaaaauggaagugcua

SEQ ID NO: 337173 - RNA, 20 nt, Human
uauguauauggauuguaugu

SEQ ID NO: 337174 - RNA, 19 nt, Human
uauguguaugugugugugu

SEQ ID NO: 337175 - RNA, 23 nt, Human
uauguguaugugugugugugugu

SEQ ID NO: 337176 - RNA, 23 nt, Human
uauguguaugugugugugugugu

SEQ ID NO: 337177 - RNA, 18 nt, Human
uaugugugugugugugug

SEQ ID NO: 337178 - RNA, 25 nt, Human
ucaaacaccuggccucaagcaauac

SEQ ID NO: 337179 - RNA, 24 nt, Human
ucacugaaggcucaaacuccuggg

SEQ ID NO: 337180 - RNA, 20 nt, Human
ucacuugaggccaggaguuc

SEQ ID NO: 337181 - RNA, 23 nt, Human
uccaauagagcuuucuauaauga

SEQ ID NO: 337182 - RNA, 20 nt, Human
uccacacaaaaaaucagaaa

SEQ ID NO: 337183 - RNA, 24 nt, Human
uccaucacccaggauggaguacag

SEQ ID NO: 337184 - RNA, 23 nt, Human
ucccaagaagcuaggacuacagg

SEQ ID NO: 337185 - RNA, 24 nt, Human
ucccacagugcugggauuacaggc

SEQ ID NO: 337186 - RNA, 19 nt, Human
uccccaaauuuaaaaacca

SEQ ID NO: 337187 - RNA, 18 nt, Human
uccccagugaaauagaaa

SEQ ID NO: 337188 - RNA, 24 nt, Human
uccuaauacuuacaguugauuucc

SEQ ID NO: 337189 - RNA, 21 nt, Human
uccugccucagccucccaaga

SEQ ID NO: 337190 - RNA, 18 nt, Human
uccugggcucaagcaauc

SEQ ID NO: 337191 - RNA, 20 nt, Human
uccugggcucaagcaauccu

SEQ ID NO: 337192 - RNA, 21 nt, Human
uccugggcucaagcaauccug

SEQ ID NO: 337193 - RNA, 20 nt, Human
uccugucucagucucucuca

SEQ ID NO: 337194 - RNA, 26 nt, Human
uccuuugacauuauguucaucuuggu

SEQ ID NO: 337195 - RNA, 22 nt, Human
ucgcuccaucacccaggaugga

SEQ ID NO: 337196 - RNA, 21 nt, Human
ucucuacuaaaaauacaaaaa

SEQ ID NO: 337197 - RNA, 19 nt, Human
ucuugcuguguugcccugg

SEQ ID NO: 337198 - RNA, 20 nt, Human
ucuuuuggaacaaaauccaa

SEQ ID NO: 337199 - RNA, 22 nt, Human
ugagaugagaaucacuugaacc

SEQ ID NO: 337200 - RNA, 25 nt, Human
ugagaugagaaucacuugaaccccc

SEQ ID NO: 337201 - RNA, 26 nt, Human
ugagcccagccugcucccgcagggag

SEQ ID NO: 337202 - RNA, 19 nt, Human
ugagcucuaagcuaacacu

SEQ ID NO: 337203 - RNA, 23 nt, Human
ugaggaaguaugaucagaagaaa

SEQ ID NO: 337204 - RNA, 23 nt, Human
ugagguggguggaucacuugagg

SEQ ID NO: 337205 - RNA, 24 nt, Human
ugagguggguggaucacuugaggc

SEQ ID NO: 337206 - RNA, 26 nt, Human
ugagguggguggaucacuugaggcca

SEQ ID NO: 337207 - RNA, 19 nt, Human
ugaugaccacaaagaauca

SEQ ID NO: 337208 - RNA, 20 nt, Human
ugauguugguggugaucagc

SEQ ID NO: 337209 - RNA, 24 nt, Human
ugccucagccucccaagaagcuag

SEQ ID NO: 337210 - RNA, 23 nt, Human
ugccuguaaucccaacacuuugg

SEQ ID NO: 337211 - RNA, 20 nt, Human
ugcugugcuucuccuuccug

SEQ ID NO: 337212 - RNA, 21 nt, Human
uggaaagguucuuuuuaaaaa

SEQ ID NO: 337213 - RNA, 24 nt, Human
uggaaagguucuuuuuaaaaacac

SEQ ID NO: 337214 - RNA, 23 nt, Human
uggaaugugcuugaaagagaucu

SEQ ID NO: 337215 - RNA, 19 nt, Human
uggaguacaguggcgcgau

SEQ ID NO: 337216 - RNA, 24 nt, Human
uggaucacuugaggccaggaguuc

SEQ ID NO: 337217 - RNA, 26 nt, Human
uggaucacuugaggccaggaguucga

SEQ ID NO: 337218 - RNA, 24 nt, Human
uggauuguauguguaugugugugu

SEQ ID NO: 337219 - RNA, 24 nt, Human
uggccaacauggugaaacccuguc

SEQ ID NO: 337220 - RNA, 23 nt, Human
uggccucaagcaauacaaccacc

SEQ ID NO: 337221 - RNA, 22 nt, Human
uggcgcgaucauagcucacuga

SEQ ID NO: 337222 - RNA, 21 nt, Human
uggcucaugccuguaauccca

SEQ ID NO: 337223 - RNA, 24 nt, Human
uggcucaugccuguaaucccaaca

SEQ ID NO: 337224 - RNA, 22 nt, Human
uggcuggccucaaacaccuggc

SEQ ID NO: 337225 - RNA, 22 nt, Human
ugggaggcugagaugagaauca

SEQ ID NO: 337226 - RNA, 18 nt, Human
ugggauuacaggcaugag

SEQ ID NO: 337227 - RNA, 19 nt, Human
ugggauuacaggcaugagc

SEQ ID NO: 337228 - RNA, 22 nt, Human
ugggauuacaggcaugagccac

SEQ ID NO: 337229 - RNA, 23 nt, Human
ugggauuacaggcaugagccacc

SEQ ID NO: 337230 - RNA, 24 nt, Human
ugggauuacaggcaugagccacca

SEQ ID NO: 337231 - RNA, 24 nt, Human
ugggauuacaggcaugagccacca

SEQ ID NO: 337232 - RNA, 19 nt, Human
ugggcggcugaggugggug

SEQ ID NO: 337233 - RNA, 24 nt, Human
ugggcggcugagguggguggauca

SEQ ID NO: 337234 - RNA, 19 nt, Human
uggggcucuagacuccgga

SEQ ID NO: 337235 - RNA, 24 nt, Human
uggggucuugcuguguugcccugg

SEQ ID NO: 337236 - RNA, 24 nt, Human
uggguggaucacuugaggccagga

SEQ ID NO: 337237 - RNA, 24 nt, Human
ugguggcucaugccuguaauccca

SEQ ID NO: 337238 - RNA, 23 nt, Human
uguacguauauuaugaauguaua

SEQ ID NO: 337239 - RNA, 24 nt, Human
uguagagauggggucuugcugugu

SEQ ID NO: 337240 - RNA, 23 nt, Human
uguauauugcugugcuucuccuu

SEQ ID NO: 337241 - RNA, 21 nt, Human
uguauguguaugugugugugu

SEQ ID NO: 337242 - RNA, 21 nt, Human
uguccuagaccaauguugucc

SEQ ID NO: 337243 - RNA, 21 nt, Human
ugucucagucucucucaacau

SEQ ID NO: 337244 - RNA, 22 nt, Human
uguggggcucuagacuccggac

SEQ ID NO: 337245 - RNA, 18 nt, Human
uguguagauuuucccaug

SEQ ID NO: 337246 - RNA, 18 nt, Human
uguguauauauauauaua

SEQ ID NO: 337247 - RNA, 19 nt, Human
uguguauauauauauauau

SEQ ID NO: 337248 - RNA, 20 nt, Human
uguguaugugugugugugug

SEQ ID NO: 337249 - RNA, 24 nt, Human
uguguguauauauauauauauuug

SEQ ID NO: 337250 - RNA, 18 nt, Human
uguguguguauauauaua

SEQ ID NO: 337251 - RNA, 18 nt, Human
uguguguguauauauaua

SEQ ID NO: 337252 - RNA, 24 nt, Human
uguguguguauauauauauauaau

SEQ ID NO: 337253 - RNA, 23 nt, Human
uguguguguguauauauauauau

SEQ ID NO: 337254 - RNA, 23 nt, Human
uguguguguguguauauauauau

SEQ ID NO: 337255 - RNA, 18 nt, Human
uguguguguguguguaua

SEQ ID NO: 337256 - RNA, 20 nt, Human
uguguguguguguguauaua

SEQ ID NO: 337257 - RNA, 18 nt, Human
ugugugugugugugugug

SEQ ID NO: 337258 - RNA, 24 nt, Human
uguguguguguguguguguauaua

SEQ ID NO: 337259 - RNA, 24 nt, Human
uguguugcccuggcuggccucaaa

SEQ ID NO: 337260 - RNA, 18 nt, Human
uguugcccuggcuggccu

SEQ ID NO: 337261 - RNA, 21 nt, Human
uguuuguuuuucaggcacuua

SEQ ID NO: 337262 - RNA, 22 nt, Human
uuaaaagguuuaacucuauaga

SEQ ID NO: 337263 - RNA, 19 nt, Human
uucacagacaauuaucuaa

SEQ ID NO: 337264 - RNA, 21 nt, Human
uucauuucuacagagaaagag

SEQ ID NO: 337265 - RNA, 24 nt, Human
uucgcuccaucacccaggauggag

SEQ ID NO: 337266 - RNA, 22 nt, Human
uucguccuuugacauuauguuc

SEQ ID NO: 337267 - RNA, 18 nt, Human
uucugaggaaguaugauc

SEQ ID NO: 337268 - RNA, 18 nt, Human
uugaaggaacacauagcg

SEQ ID NO: 337269 - RNA, 22 nt, Human
uugaggccaggaguucgagacc

SEQ ID NO: 337270 - RNA, 19 nt, Human
uugcaacaucaagugugga

SEQ ID NO: 337271 - RNA, 23 nt, Human
uugggaggcugagaugagaauca

SEQ ID NO: 337272 - RNA, 25 nt, Human
uugggcggcugagguggguggauca

SEQ ID NO: 337273 - RNA, 24 nt, Human
uuguagagauggggucuugcugug

SEQ ID NO: 337274 - RNA, 23 nt, Human
uugugccacugaccuccagccug

SEQ ID NO: 337275 - RNA, 23 nt, Human
uuuaggaaaggacuucacagaga

SEQ ID NO: 337276 - RNA, 20 nt, Human
uuuguagagauggggucuug

SEQ ID NO: 337277 - RNA, 24 nt, Human
uuuguagagauggggucuugcugu

SEQ ID NO: 337278 - RNA, 24 nt, Human
uuugugccacugaccuccagccug

SEQ ID NO: 337279 - RNA, 24 nt, Human
aaaguccugggauuagaggcguga

SEQ ID NO: 337280 - RNA, 24 nt, Human
aagcaauucugccucagccuccca

SEQ ID NO: 337281 - RNA, 22 nt, Human
aaguagcugggauuauaggcau

SEQ ID NO: 337282 - RNA, 24 nt, Human
aaguagcugggauuauaggcaugc

SEQ ID NO: 337283 - RNA, 24 nt, Human
aauuuuguauuuuuaguagagaug

SEQ ID NO: 337284 - RNA, 20 nt, Human
acucuuguugcccaggcugg

SEQ ID NO: 337285 - RNA, 21 nt, Human
acucuuguugcccaggcugga

SEQ ID NO: 337286 - RNA, 24 nt, Human
acucuuguugcccaggcuggagug

SEQ ID NO: 337287 - RNA, 18 nt, Human
aggcuggagugcaguggc

SEQ ID NO: 337288 - RNA, 18 nt, Human
agggcuaaaagguuugaa

SEQ ID NO: 337289 - RNA, 20 nt, Human
agugcaguggcgcaaccuug

SEQ ID NO: 337290 - RNA, 24 nt, Human
agugcaguggcgcaaccuuggcuc

SEQ ID NO: 337291 - RNA, 20 nt, Human
augggguuucuccauguugg

SEQ ID NO: 337292 - RNA, 24 nt, Human
augggguuucuccauguuggucag

SEQ ID NO: 337293 - RNA, 24 nt, Human
auuaguauuuuuaaaaggcacuua

SEQ ID NO: 337294 - RNA, 24 nt, Human
caaaguccugggauuagaggcgug

SEQ ID NO: 337295 - RNA, 19 nt, Human
caagcaauucugccucagc

SEQ ID NO: 337296 - RNA, 23 nt, Human
cacaccacccggcuaauuuugua

SEQ ID NO: 337297 - RNA, 21 nt, Human
caccacaaccuccgcuuccug

SEQ ID NO: 337298 - RNA, 27 nt, Human
cacggcccccgacuucuuucucccucc

SEQ ID NO: 337299 - RNA, 18 nt, Human
cagaacacagaaggagac

SEQ ID NO: 337300 - RNA, 24 nt, Human
ccaaaguccugggauuagaggcgu

SEQ ID NO: 337301 - RNA, 24 nt, Human
ccaaguagcugggauuauaggcau

SEQ ID NO: 337302 - RNA, 23 nt, Human
ccacaaccuccgcuuccuggguu

SEQ ID NO: 337303 - RNA, 25 nt, Human
ccacaaccuccgcuuccuggguucc

SEQ ID NO: 337304 - RNA, 19 nt, Human
ccauguuggucaggcuggu

SEQ ID NO: 337305 - RNA, 23 nt, Human
ccauguuggucaggcuggucucg

SEQ ID NO: 337306 - RNA, 23 nt, Human
cccaaguagcugggauuauaggc

SEQ ID NO: 337307 - RNA, 24 nt, Human
cccaaguagcugggauuauaggca

SEQ ID NO: 337308 - RNA, 19 nt, Human
ccuggguucaagcaauucu

SEQ ID NO: 337309 - RNA, 22 nt, Human
cggcccccgacuucuuucuccc

SEQ ID NO: 337310 - RNA, 24 nt, Human
cuaauuuuguauuuuuaguagaga

SEQ ID NO: 337311 - RNA, 22 nt, Human
cuauagggcuaaaagguuugaa

SEQ ID NO: 337312 - RNA, 25 nt, Human
cucaaggagcaaacauuaaaaaaaa

SEQ ID NO: 337313 - RNA, 23 nt, Human
cucagccucccaaguagcuggga

SEQ ID NO: 337314 - RNA, 24 nt, Human
cuccauguuggucaggcuggucuc

SEQ ID NO: 337315 - RNA, 25 nt, Human
cuccugacuccggugaucugcccgc

SEQ ID NO: 337316 - RNA, 23 nt, Human
cugccucagccucccaaguagcu

SEQ ID NO: 337317 - RNA, 22 nt, Human
cuuccuggguucaagcaauucu

SEQ ID NO: 337318 - RNA, 24 nt, Human
cuuguugcccaggcuggagugcag

SEQ ID NO: 337319 - RNA, 23 nt, Human
cuuucugcagaacaaucugaaag

SEQ ID NO: 337320 - RNA, 24 nt, Human
gagaugggguuucuccauguuggu

SEQ ID NO: 337321 - RNA, 18 nt, Human
gauuagaggcgugagcca

SEQ ID NO: 337322 - RNA, 18 nt, Human
gauuauaggcaugcgcca

SEQ ID NO: 337323 - RNA, 19 nt, Human
gcccaggcuggagugcagu

SEQ ID NO: 337324 - RNA, 19 nt, Human
gcuggagugcaguggcgca

SEQ ID NO: 337325 - RNA, 22 nt, Human
gggguuucuccauguuggucag

SEQ ID NO: 337326 - RNA, 23 nt, Human
ggugaucugcccgccuuggccuc

SEQ ID NO: 337327 - RNA, 18 nt, Human
guagcugggauuauaggc

SEQ ID NO: 337328 - RNA, 25 nt, Human
uaaaaagcacauaauuuuugugcaa

SEQ ID NO: 337329 - RNA, 23 nt, Human
uaaaagagagcuaaaaaguuaug

SEQ ID NO: 337330 - RNA, 20 nt, Human
uacagaacacagaaggagac

SEQ ID NO: 337331 - RNA, 24 nt, Human
uacucuuguugcccaggcuggagu

SEQ ID NO: 337332 - RNA, 24 nt, Human
uaguagagaugggguuucuccaug

SEQ ID NO: 337333 - RNA, 18 nt, Human
uauuuuuugagauggagu

SEQ ID NO: 337334 - RNA, 24 nt, Human
ucaccacaaccuccgcuuccuggg

SEQ ID NO: 337335 - RNA, 25 nt, Human
ucaccacaaccuccgcuuccugggg

SEQ ID NO: 337336 - RNA, 25 nt, Human
ucaccacaaccuccgcuuccugggu

SEQ ID NO: 337337 - RNA, 27 nt, Human
ucaccacaaccuccgcuuccuggguuc

SEQ ID NO: 337338 - RNA, 20 nt, Human
ucagccucccaaguagcugg

SEQ ID NO: 337339 - RNA, 24 nt, Human
ucccaaaguccugggauuagaggc

SEQ ID NO: 337340 - RNA, 24 nt, Human
ucccaaguagcugggauuauaggc

SEQ ID NO: 337341 - RNA, 25 nt, Human
ucccuauuuauauauauauauauau

SEQ ID NO: 337342 - RNA, 18 nt, Human
uccucauauuacagaaca

SEQ ID NO: 337343 - RNA, 19 nt, Human
uccuggguucaagcaauuc

SEQ ID NO: 337344 - RNA, 20 nt, Human
uccuggguucaagcaauucu

SEQ ID NO: 337345 - RNA, 21 nt, Human
uccuggguucaagcaauucug

SEQ ID NO: 337346 - RNA, 22 nt, Human
ucuuguugcccaggcuggagug

SEQ ID NO: 337347 - RNA, 20 nt, Human
ugcaguggcgcaaccuuggc

SEQ ID NO: 337348 - RNA, 23 nt, Human
ugcaguggcgcaaccuuggcuca

SEQ ID NO: 337349 - RNA, 18 nt, Human
ugcccaggcuggagugca

SEQ ID NO: 337350 - RNA, 21 nt, Human
ugcccaggcuggagugcagug

SEQ ID NO: 337351 - RNA, 22 nt, Human
ugcccaggcuggagugcagugg

SEQ ID NO: 337352 - RNA, 24 nt, Human
ugcccaggcuggagugcaguggcg

SEQ ID NO: 337353 - RNA, 24 nt, Human
ugccucagccucccaaguagcugg

SEQ ID NO: 337354 - RNA, 23 nt, Human
uggagugcaguggcgcaaccuug

SEQ ID NO: 337355 - RNA, 24 nt, Human
uggagugcaguggcgcaaccuugg

SEQ ID NO: 337356 - RNA, 24 nt, Human
uggcgcaaccuuggcucaccacaa

SEQ ID NO: 337357 - RNA, 18 nt, Human
ugggauuagaggcgugag

SEQ ID NO: 337358 - RNA, 19 nt, Human
ugggauuagaggcgugagc

SEQ ID NO: 337359 - RNA, 22 nt, Human
ugggauuagaggcgugagccac

SEQ ID NO: 337360 - RNA, 24 nt, Human
ugggauuagaggcgugagccacag

SEQ ID NO: 337361 - RNA, 18 nt, Human
ugggauuauaggcaugcg

SEQ ID NO: 337362 - RNA, 21 nt, Human
ugggauuauaggcaugcgcca

SEQ ID NO: 337363 - RNA, 22 nt, Human
ugggauuauaggcaugcgccac

SEQ ID NO: 337364 - RNA, 24 nt, Human
ugggauuauaggcaugcgccacac

SEQ ID NO: 337365 - RNA, 24 nt, Human
ugggguuucuccauguuggucagg

SEQ ID NO: 337366 - RNA, 24 nt, Human
uggucaggcuggucucgaacuccu

SEQ ID NO: 337367 - RNA, 22 nt, Human
uuacucuuguugcccaggcugg

SEQ ID NO: 337368 - RNA, 23 nt, Human
uuacucuuguugcccaggcugga

SEQ ID NO: 337369 - RNA, 18 nt, Human
uuaguagagaugggguuu

SEQ ID NO: 337370 - RNA, 24 nt, Human
uuaguagagaugggguuucuccau

SEQ ID NO: 337371 - RNA, 21 nt, Human
uucaagcaauucugccucagc

SEQ ID NO: 337372 - RNA, 19 nt, Human
uugaaggacagagcuccaa

SEQ ID NO: 337373 - RNA, 24 nt, Human
uugcccaggcuggagugcaguggc

SEQ ID NO: 337374 - RNA, 30 nt, Human
uuggcucaccacaaccuccgcuuccugggg

SEQ ID NO: 337375 - RNA, 23 nt, Human
uuguauuuuuaguagagaugggg

SEQ ID NO: 337376 - RNA, 24 nt, Human
uuuacucuuguugcccaggcugga

SEQ ID NO: 337377 - RNA, 19 nt, Human
uuuauauauauauauauau

SEQ ID NO: 337378 - RNA, 21 nt, Human
uuucuccauguuggucaggcu

SEQ ID NO: 337379 - RNA, 24 nt, Human
uuuuacucuuguugcccaggcugg

SEQ ID NO: 337380 - RNA, 19 nt, Human
uuuuguauuuuuaguagag

SEQ ID NO: 337381 - RNA, 20 nt, Human
uuuuguauuuuuaguagaga

SEQ ID NO: 337382 - RNA, 19 nt, Human
uuuugugcaauuuuuucuu

SEQ ID NO: 337383 - RNA, 22 nt, Human
uuuuuaguagagaugggguuuc

SEQ ID NO: 337384 - RNA, 22 nt, Human
aaaacagguaggauugaacuug

SEQ ID NO: 337385 - RNA, 20 nt, Human
aaacacaguucuucuguugg

SEQ ID NO: 337386 - RNA, 21 nt, Human
aacaauagugauuaauaaaga

SEQ ID NO: 337387 - RNA, 22 nt, Human
aaccuaaauucuccaaccaauu

SEQ ID NO: 337388 - RNA, 18 nt, Human
aaccugggugugcucucc

SEQ ID NO: 337389 - RNA, 20 nt, Human
aaccugggugugcucuccuu

SEQ ID NO: 337390 - RNA, 24 nt, Human
aagcuuugccagagccaaaaaccc

SEQ ID NO: 337391 - RNA, 27 nt, Human
acacccaaaaauauuuuuaaauauauc

SEQ ID NO: 337392 - RNA, 21 nt, Human
acugccaggaacacccaaaaa

SEQ ID NO: 337393 - RNA, 24 nt, Human
acugccaggaacacccaaaaauau

SEQ ID NO: 337394 - RNA, 23 nt, Human
agauaacucccuccuaaaggaag

SEQ ID NO: 337395 - RNA, 23 nt, Human
aggaaaaaagcuccauaaucuag

SEQ ID NO: 337396 - RNA, 27 nt, Human
caggaacacccaaaaauauuuuuaaau

SEQ ID NO: 337397 - RNA, 22 nt, Human
cauauuaauccccucaauucaa

SEQ ID NO: 337398 - RNA, 27 nt, Human
cauuaaagaaaauauuggauguuuagc

SEQ ID NO: 337399 - RNA, 26 nt, Human
ccauuucucaccaaaauguccccuca

SEQ ID NO: 337400 - RNA, 18 nt, Human
ccccugggcggccggacc

SEQ ID NO: 337401 - RNA, 19 nt, Human
ccccugggcggccggaccu

SEQ ID NO: 337402 - RNA, 21 nt, Human
cccgcagcaauucaaacggcg

SEQ ID NO: 337403 - RNA, 18 nt, Human
cccuauauaacaaaaaac

SEQ ID NO: 337404 - RNA, 18 nt, Human
cccugggcggccggaccu

SEQ ID NO: 337405 - RNA, 24 nt, Human
ccuaaagugccuccacuuauacag

SEQ ID NO: 337406 - RNA, 21 nt, Human
ccucaggugaggugagggccc

SEQ ID NO: 337407 - RNA, 18 nt, Human
ccucauguuacuaacagg

SEQ ID NO: 337408 - RNA, 25 nt, Human
gauuaauaaagauauguauagauaa

SEQ ID NO: 337409 - RNA, 19 nt, Human
gcagcaauucaaacggcga

SEQ ID NO: 337410 - RNA, 23 nt, Human
gccagagccaaaaacccaaguuu

SEQ ID NO: 337411 - RNA, 21 nt, Human
ggaacgggagacgagggcuaa

SEQ ID NO: 337412 - RNA, 19 nt, Human
gggcccgggcccgcagcaa

SEQ ID NO: 337413 - RNA, 19 nt, Human
gugagggcccgggcccgca

SEQ ID NO: 337414 - RNA, 20 nt, Human
uaaaaaccuaaauucuccaa

SEQ ID NO: 337415 - RNA, 24 nt, Human
uaaaaaccuaaauucuccaaccaa

SEQ ID NO: 337416 - RNA, 21 nt, Human
uaaaagcuuugccagagccaa

SEQ ID NO: 337417 - RNA, 26 nt, Human
uagacauuucuuuuagauaacucccu

SEQ ID NO: 337418 - RNA, 18 nt, Human
uagauaacucccuccuaa

SEQ ID NO: 337419 - RNA, 19 nt, Human
uagcaguaucuugagaagu

SEQ ID NO: 337420 - RNA, 19 nt, Human
uagcaguaucuugagaagu

SEQ ID NO: 337421 - RNA, 23 nt, Human
uagcaguaucuugagaaguuuua

SEQ ID NO: 337422 - RNA, 22 nt, Human
ucaauucaacuugacuuaaaau

SEQ ID NO: 337423 - RNA, 22 nt, Human
ucacacugcaccacaccgaaug

SEQ ID NO: 337424 - RNA, 18 nt, Human
ucauaaguuuucauauua

SEQ ID NO: 337425 - RNA, 24 nt, Human
ucucucagcaauaugaaguuaccu

SEQ ID NO: 337426 - RNA, 21 nt, Human
ucuguuggagacgucaacaga

SEQ ID NO: 337427 - RNA, 20 nt, Human
ugccaggaacacccaaaaau

SEQ ID NO: 337428 - RNA, 19 nt, Human
ugcuaaacagauuuuguga

SEQ ID NO: 337429 - RNA, 21 nt, Human
ugcuaaacagauuuugugaag

SEQ ID NO: 337430 - RNA, 20 nt, Human
uggaaggaguuaagucccau

SEQ ID NO: 337431 - RNA, 18 nt, Human
uggauuaaggaaaaaagc

SEQ ID NO: 337432 - RNA, 19 nt, Human
uggggagagggaagaugug

SEQ ID NO: 337433 - RNA, 24 nt, Human
uggguuacaaaaucaugcauuuua

SEQ ID NO: 337434 - RNA, 22 nt, Human
ugugcucuccuuugucaggaau

SEQ ID NO: 337435 - RNA, 20 nt, Human
uuaauuugacuugaaaacug

SEQ ID NO: 337436 - RNA, 18 nt, Human
uucuaaggacacuggaag

SEQ ID NO: 337437 - RNA, 19 nt, Human
uuucacacugcaccacacc

SEQ ID NO: 337438 - RNA, 23 nt, Human
uuucacacugcaccacaccgaau

SEQ ID NO: 337439 - RNA, 23 nt, Human
uuuguuuugcuuuuuaugaggac

SEQ ID NO: 337440 - RNA, 21 nt, Human
uuuucacacugcaccacaccg

SEQ ID NO: 337441 - RNA, 23 nt, Human
aaacaggacgugaucccagccca

SEQ ID NO: 337442 - RNA, 19 nt, Human
aacucacugccgccuacuc

SEQ ID NO: 337443 - RNA, 24 nt, Human
aagcccucucuggcuggggagugg

SEQ ID NO: 337444 - RNA, 20 nt, Human
acaaaacaggacgugauccc

SEQ ID NO: 337445 - RNA, 21 nt, Human
accucugcccgccgccaccuc

SEQ ID NO: 337446 - RNA, 18 nt, Human
acucuguccuucccugcc

SEQ ID NO: 337447 - RNA, 20 nt, Human
acucuguccuucccugcccc

SEQ ID NO: 337448 - RNA, 19 nt, Human
caacaaccaaguccgagac

SEQ ID NO: 337449 - RNA, 23 nt, Human
caacaaccaaguccgagacugga

SEQ ID NO: 337450 - RNA, 20 nt, Human
caauuuuccaacaaaaguca

SEQ ID NO: 337451 - RNA, 19 nt, Human
cacagucaccagcucaaaa

SEQ ID NO: 337452 - RNA, 24 nt, Human
cacccccgcugcugcuaccaugau

SEQ ID NO: 337453 - RNA, 22 nt, Human
cacucuguccuucccugcccca

SEQ ID NO: 337454 - RNA, 19 nt, Human
cagcucaaaauggcgacga

SEQ ID NO: 337455 - RNA, 22 nt, Human
ccagccggccacagucaccagc

SEQ ID NO: 337456 - RNA, 24 nt, Human
ccaugaucugccagccugggugau

SEQ ID NO: 337457 - RNA, 20 nt, Human
cccagccacccccgcugcug

SEQ ID NO: 337458 - RNA, 21 nt, Human
cccaggauggacacccaacau

SEQ ID NO: 337459 - RNA, 21 nt, Human
cccgccgccaccuccuccaac

SEQ ID NO: 337460 - RNA, 19 nt, Human
cccgcugcugcuaccauga

SEQ ID NO: 337461 - RNA, 18 nt, Human
ccgccgccaccuccucca

SEQ ID NO: 337462 - RNA, 18 nt, Human
ccuacucccagccggcca

SEQ ID NO: 337463 - RNA, 19 nt, Human
ccucagccgcuggcuccgu

SEQ ID NO: 337464 - RNA, 19 nt, Human
ccuccaacucucccagcuc

SEQ ID NO: 337465 - RNA, 19 nt, Human
ccucucuggcuggggagug

SEQ ID NO: 337466 - RNA, 21 nt, Human
ccucucuggcuggggaguggg

SEQ ID NO: 337467 - RNA, 24 nt, Human
ccucugcccgccgccaccuccucc

SEQ ID NO: 337468 - RNA, 22 nt, Human
cucaaaauggcgacgacgagaa

SEQ ID NO: 337469 - RNA, 18 nt, Human
cucccagacaucaccucu

SEQ ID NO: 337470 - RNA, 19 nt, Human
cucuguccuucccugcccc

SEQ ID NO: 337471 - RNA, 18 nt, Human
cugcccgccgccaccucc

SEQ ID NO: 337472 - RNA, 25 nt, Human
cuucgggggcugcuggggccccucc

SEQ ID NO: 337473 - RNA, 20 nt, Human
gccaagcgcgcugcccuccc

SEQ ID NO: 337474 - RNA, 24 nt, Human
gccugggugaugcuuccugcaggg

SEQ ID NO: 337475 - RNA, 20 nt, Human
gccuucgggggcugcugggg

SEQ ID NO: 337476 - RNA, 19 nt, Human
gcucagccggagccggagc

SEQ ID NO: 337477 - RNA, 19 nt, Human
gcuggggccccuccucagc

SEQ ID NO: 337478 - RNA, 20 nt, Human
gggagugggcuggccgacaa

SEQ ID NO: 337479 - RNA, 19 nt, Human
ucaaggaagggcucccaga

SEQ ID NO: 337480 - RNA, 22 nt, Human
ucaaggaagggcucccagacag

SEQ ID NO: 337481 - RNA, 19 nt, Human
ucacuucccagccaccccc

SEQ ID NO: 337482 - RNA, 18 nt, Human
ucugccagccugggugau

SEQ ID NO: 337483 - RNA, 20 nt, Human
ugaucugccagccuggguga

SEQ ID NO: 337484 - RNA, 18 nt, Human
ugcagggacucuucucgg

SEQ ID NO: 337485 - RNA, 22 nt, Human
ugccccaggauggacacccaac

SEQ ID NO: 337486 - RNA, 21 nt, Human
uggaggcagaucggggggagg

SEQ ID NO: 337487 - RNA, 21 nt, Human
uggcgacgacgagaagggagu

SEQ ID NO: 337488 - RNA, 19 nt, Human
uggcuggggagugggcugg

SEQ ID NO: 337489 - RNA, 18 nt, Human
ugucaaggaagggcuccc

SEQ ID NO: 337490 - RNA, 22 nt, Human
uuuuuuuuuuuuuuuuuuucag

SEQ ID NO: 337491 - RNA, 22 nt, Human
aaaaaaaaaagacauuugcaaa

SEQ ID NO: 337492 - RNA, 24 nt, Human
aaaaaaaaagacauuugcaaacau

SEQ ID NO: 337493 - RNA, 21 nt, Human
aaaaaacccggacgaacagcg

SEQ ID NO: 337494 - RNA, 25 nt, Human
aaaaagaaugaaggaagccgguacc

SEQ ID NO: 337495 - RNA, 20 nt, Human
aaaacccggacgaacagcga

SEQ ID NO: 337496 - RNA, 18 nt, Human
aaacccggacgaacagcg

SEQ ID NO: 337497 - RNA, 18 nt, Human
aaccuaagagcucaaacu

SEQ ID NO: 337498 - RNA, 25 nt, Human
aaccuaagagcucaaacuaaaaaac

SEQ ID NO: 337499 - RNA, 21 nt, Human
aacucaggcugaguucuccuc

SEQ ID NO: 337500 - RNA, 20 nt, Human
aagaauuuggaggcgugggu

SEQ ID NO: 337501 - RNA, 18 nt, Human
aagcccaaggcaggucaa

SEQ ID NO: 337502 - RNA, 21 nt, Human
aaucccaaagacgcuuccccu

SEQ ID NO: 337503 - RNA, 22 nt, Human
acaaaaugaccugaaugcacca

SEQ ID NO: 337504 - RNA, 21 nt, Human
acaguggcgcgaucuuagcuc

SEQ ID NO: 337505 - RNA, 20 nt, Human
accauguuggucaggcuggc

SEQ ID NO: 337506 - RNA, 20 nt, Human
acucuacuaccuaagcccaa

SEQ ID NO: 337507 - RNA, 21 nt, Human
acugaacucaggcugaguucu

SEQ ID NO: 337508 - RNA, 22 nt, Human
agaagacucacgagguccucuc

SEQ ID NO: 337509 - RNA, 22 nt, Human
agacauccuaagcacuguauga

SEQ ID NO: 337510 - RNA, 19 nt, Human
agagggagagaagauggag

SEQ ID NO: 337511 - RNA, 18 nt, Human
agauaggaggccccaccu

SEQ ID NO: 337512 - RNA, 18 nt, Human
agcacaaaaaacagggac

SEQ ID NO: 337513 - RNA, 19 nt, Human
agcagaaaugcagagcagu

SEQ ID NO: 337514 - RNA, 24 nt, Human
agcgauucuccugccucagccucc

SEQ ID NO: 337515 - RNA, 23 nt, Human
agcuccaaaaaccuuuauaaaua

SEQ ID NO: 337516 - RNA, 19 nt, Human
aggaagaaaaagaauuugg

SEQ ID NO: 337517 - RNA, 22 nt, Human
aggcaggucaaccauccacagg

SEQ ID NO: 337518 - RNA, 21 nt, Human
aguacaguggcgcgaucuuag

SEQ ID NO: 337519 - RNA, 21 nt, Human
agucgucgccucccaggcggc

SEQ ID NO: 337520 - RNA, 26 nt, Human
agucuggccaaacuugccagaaccaa

SEQ ID NO: 337521 - RNA, 18 nt, Human
agugcagcuccaaaaacc

SEQ ID NO: 337522 - RNA, 21 nt, Human
augcaccauguuccccuugcu

SEQ ID NO: 337523 - RNA, 23 nt, Human
augccaggcuaauuuuuuuaugu

SEQ ID NO: 337524 - RNA, 23 nt, Human
auggggacaaggucccucugcag

SEQ ID NO: 337525 - RNA, 21 nt, Human
augggguuucaccauguuggu

SEQ ID NO: 337526 - RNA, 24 nt, Human
augggguuucaccauguuggucag

SEQ ID NO: 337527 - RNA, 20 nt, Human
caaccuccgccucccggguu

SEQ ID NO: 337528 - RNA, 22 nt, Human
caagcgauucuccugccucagc

SEQ ID NO: 337529 - RNA, 27 nt, Human
caagcgauucuccugccucagccuccc

SEQ ID NO: 337530 - RNA, 23 nt, Human
caccauguuggucaggcuggcuu

SEQ ID NO: 337531 - RNA, 21 nt, Human
cacgcugccccgagcagacac

SEQ ID NO: 337532 - RNA, 23 nt, Human
cacuaaucccaaagacgcuuccc

SEQ ID NO: 337533 - RNA, 21 nt, Human
cacugcaaccuccgccucccg

SEQ ID NO: 337534 - RNA, 23 nt, Human
cacugcaaccuccgccucccggg

SEQ ID NO: 337535 - RNA, 21 nt, Human
cacugggauuacaggcguaca

SEQ ID NO: 337536 - RNA, 23 nt, Human
cacuguaugagacacaacagaau

SEQ ID NO: 337537 - RNA, 23 nt, Human
cagacacagagggaaaaacaaaa

SEQ ID NO: 337538 - RNA, 21 nt, Human
cagaguccaugucagaagacu

SEQ ID NO: 337539 - RNA, 18 nt, Human
cagauaggaggccccacc

SEQ ID NO: 337540 - RNA, 22 nt, Human
cagauaggaggccccaccucuc

SEQ ID NO: 337541 - RNA, 24 nt, Human
cagaugggguuucaccauguuggu

SEQ ID NO: 337542 - RNA, 24 nt, Human
cagcugacaacaugcucaccuccu

SEQ ID NO: 337543 - RNA, 21 nt, Human
caggagcuauagaaucccaca

SEQ ID NO: 337544 - RNA, 18 nt, Human
caggcugaguucuccucc

SEQ ID NO: 337545 - RNA, 21 nt, Human
ccaaaaccccuggaccgcuga

SEQ ID NO: 337546 - RNA, 22 nt, Human
ccaagucacugggauuacaggc

SEQ ID NO: 337547 - RNA, 24 nt, Human
ccaagucacugggauuacaggcgu

SEQ ID NO: 337548 - RNA, 20 nt, Human
ccaggcucugucugccgcug

SEQ ID NO: 337549 - RNA, 20 nt, Human
ccauugugaguauggcccgu

SEQ ID NO: 337550 - RNA, 21 nt, Human
cccaaagacgcuuccccucau

SEQ ID NO: 337551 - RNA, 18 nt, Human
cccacacaagaguagaag

SEQ ID NO: 337552 - RNA, 19 nt, Human
cccacaggucugcagacuc

SEQ ID NO: 337553 - RNA, 18 nt, Human
cccccuagaacaaaaggc

SEQ ID NO: 337554 - RNA, 21 nt, Human
cccccuagaacaaaaggcagu

SEQ ID NO: 337555 - RNA, 22 nt, Human
cccccuagcaaacuugcucuga

SEQ ID NO: 337556 - RNA, 20 nt, Human
cccggguucaagcgauucuc

SEQ ID NO: 337557 - RNA, 23 nt, Human
cccggguucaagcgauucuccug

SEQ ID NO: 337558 - RNA, 18 nt, Human
cccuggaccgcugagucu

SEQ ID NO: 337559 - RNA, 24 nt, Human
ccgccucccggguucaagcgauuc

SEQ ID NO: 337560 - RNA, 18 nt, Human
ccgcugcccuccaccccc

SEQ ID NO: 337561 - RNA, 24 nt, Human
ccgcugcccuccacccccuagaac

SEQ ID NO: 337562 - RNA, 24 nt, Human
ccucccggguucaagcgauucucc

SEQ ID NO: 337563 - RNA, 21 nt, Human
ccuccuagagcugaugaagau

SEQ ID NO: 337564 - RNA, 24 nt, Human
ccugaaugcaccauguuccccuug

SEQ ID NO: 337565 - RNA, 20 nt, Human
ccuucauuuccuccauccca

SEQ ID NO: 337566 - RNA, 22 nt, Human
ccuuuuuuuuugagauggaguc

SEQ ID NO: 337567 - RNA, 23 nt, Human
cgagcagacacagagggaaaaac

SEQ ID NO: 337568 - RNA, 22 nt, Human
cuaaaaaacugguaaaaagaaa

SEQ ID NO: 337569 - RNA, 24 nt, Human
cucacugcaaccuccgccucccgg

SEQ ID NO: 337570 - RNA, 20 nt, Human
cucaggcugaguucuccucc

SEQ ID NO: 337571 - RNA, 26 nt, Human
cucaggcugaguucuccuccccacuc

SEQ ID NO: 337572 - RNA, 19 nt, Human
cucccacuaaucccaaaga

SEQ ID NO: 337573 - RNA, 25 nt, Human
cucccgguccuugacaacgaccacu

SEQ ID NO: 337574 - RNA, 23 nt, Human
cuccugccucagccucccaaguc

SEQ ID NO: 337575 - RNA, 21 nt, Human
cucugucugccgcugcccucc

SEQ ID NO: 337576 - RNA, 24 nt, Human
cugaagcaugcucuggguugguga

SEQ ID NO: 337577 - RNA, 24 nt, Human
cugacaacaugcucaccuccuaga

SEQ ID NO: 337578 - RNA, 18 nt, Human
cugaguucuccuccccac

SEQ ID NO: 337579 - RNA, 24 nt, Human
cugcaaccuccgccucccggguuc

SEQ ID NO: 337580 - RNA, 23 nt, Human
cugucuaaaaggucuucagcuac

SEQ ID NO: 337581 - RNA, 20 nt, Human
cuugacugaacucaggcuga

SEQ ID NO: 337582 - RNA, 25 nt, Human
gaaaccaaaaccccuggaccgcuga

SEQ ID NO: 337583 - RNA, 23 nt, Human
gaacaaaaggcagucaugcuccu

SEQ ID NO: 337584 - RNA, 18 nt, Human
gaaggugaugaaaccaaa

SEQ ID NO: 337585 - RNA, 19 nt, Human
gacucuacuaccuaagccc

SEQ ID NO: 337586 - RNA, 18 nt, Human
gagcaaggaaggccuagc

SEQ ID NO: 337587 - RNA, 21 nt, Human
gagggcagcagaaaugcagag

SEQ ID NO: 337588 - RNA, 21 nt, Human
gaguucuccuccccacuccuc

SEQ ID NO: 337589 - RNA, 24 nt, Human
gauuacaggcguacaccaccaugc

SEQ ID NO: 337590 - RNA, 21 nt, Human
gcaggaccagucgucgccucc

SEQ ID NO: 337591 - RNA, 19 nt, Human
gccccgagcagacacagag

SEQ ID NO: 337592 - RNA, 24 nt, Human
gcgauucuccugccucagccuccc

SEQ ID NO: 337593 - RNA, 21 nt, Human
gcuauagaaucccacacaaaa

SEQ ID NO: 337594 - RNA, 18 nt, Human
gcugaguucuccucccca

SEQ ID NO: 337595 - RNA, 19 nt, Human
gcuggaguacaguggcgcg

SEQ ID NO: 337596 - RNA, 20 nt, Human
ggaagaaaaagaauuuggag

SEQ ID NO: 337597 - RNA, 22 nt, Human
ggagauggguuuucagauccca

SEQ ID NO: 337598 - RNA, 24 nt, Human
ggagcacaaaaaacagggacgggg

SEQ ID NO: 337599 - RNA, 18 nt, Human
ggaggagcacaaaaaaca

SEQ ID NO: 337600 - RNA, 20 nt, Human
ggagucucgcuguugcccag

SEQ ID NO: 337601 - RNA, 21 nt, Human
ggagucucgcuguugcccagg

SEQ ID NO: 337602 - RNA, 24 nt, Human
ggauuacaggcguacaccaccaug

SEQ ID NO: 337603 - RNA, 19 nt, Human
gggaacagcaagaggggga

SEQ ID NO: 337604 - RNA, 22 nt, Human
gggguuucaccauguuggucag

SEQ ID NO: 337605 - RNA, 23 nt, Human
gggguuucaccauguuggucagg

SEQ ID NO: 337606 - RNA, 22 nt, Human
ggguuucaccauguuggucagg

SEQ ID NO: 337607 - RNA, 21 nt, Human
ggguuuucagaucccaccccc

SEQ ID NO: 337608 - RNA, 23 nt, Human
gucucgcuguugcccaggcugga

SEQ ID NO: 337609 - RNA, 19 nt, Human
guggaccagucaguacccc

SEQ ID NO: 337610 - RNA, 24 nt, Human
uaaaaugucccuggauacacauua

SEQ ID NO: 337611 - RNA, 23 nt, Human
uaaccacaauaaacacuguguac

SEQ ID NO: 337612 - RNA, 22 nt, Human
uaccuaagcccaaggcagguca

SEQ ID NO: 337613 - RNA, 23 nt, Human
uacucagguucuacaaacguccc

SEQ ID NO: 337614 - RNA, 24 nt, Human
uaggaagaaaaagaauuuggaggc

SEQ ID NO: 337615 - RNA, 22 nt, Human
uaggcuuaggaagaaaaagaau

SEQ ID NO: 337616 - RNA, 24 nt, Human
uaguacagaugggguuucaccaug

SEQ ID NO: 337617 - RNA, 21 nt, Human
uaucugggaacagcaagaggg

SEQ ID NO: 337618 - RNA, 20 nt, Human
uauuuuuucuuccaguauua

SEQ ID NO: 337619 - RNA, 23 nt, Human
ucacugcaaccuccgccucccgg

SEQ ID NO: 337620 - RNA, 24 nt, Human
ucacugcaaccuccgccucccggg

SEQ ID NO: 337621 - RNA, 25 nt, Human
ucacugcaaccuccgccucccgggu

SEQ ID NO: 337622 - RNA, 27 nt, Human
ucacugcaaccuccgccucccggguuc

SEQ ID NO: 337623 - RNA, 18 nt, Human
ucaggcugaguucuccuc

SEQ ID NO: 337624 - RNA, 18 nt, Human
ucagggcuagacagacac

SEQ ID NO: 337625 - RNA, 21 nt, Human
ucagugcagcuccaaaaaccu

SEQ ID NO: 337626 - RNA, 21 nt, Human
ucauccuuagucuacaccaua

SEQ ID NO: 337627 - RNA, 22 nt, Human
uccacagguggcuucucggccu

SEQ ID NO: 337628 - RNA, 23 nt, Human
uccaguauuaaaaaaaaaaagac

SEQ ID NO: 337629 - RNA, 18 nt, Human
uccagugccugcucgucg

SEQ ID NO: 337630 - RNA, 23 nt, Human
ucccaaagacgcuuccccucauc

SEQ ID NO: 337631 - RNA, 24 nt, Human
ucccaagucacugggauuacaggc

SEQ ID NO: 337632 - RNA, 24 nt, Human
ucccacgaagagcuuuccuucuuc

SEQ ID NO: 337633 - RNA, 18 nt, Human
ucccaggcggccaggcuc

SEQ ID NO: 337634 - RNA, 21 nt, Human
ucccggguucaagcgauucuc

SEQ ID NO: 337635 - RNA, 24 nt, Human
ucccggguucaagcgauucuccug

SEQ ID NO: 337636 - RNA, 18 nt, Human
uccgggccaggcccacag

SEQ ID NO: 337637 - RNA, 21 nt, Human
ucuacuaccuaagcccaaggc

SEQ ID NO: 337638 - RNA, 21 nt, Human
ucuccuccccacuccucuaag

SEQ ID NO: 337639 - RNA, 25 nt, Human
ucuccugccucagccucccaaguca

SEQ ID NO: 337640 - RNA, 20 nt, Human
ucucgcuguugcccaggcug

SEQ ID NO: 337641 - RNA, 21 nt, Human
ucucgcuguugcccaggcugg

SEQ ID NO: 337642 - RNA, 21 nt, Human
ucucgcuguugcccaggcugg

SEQ ID NO: 337643 - RNA, 22 nt, Human
ucucgcuguugcccaggcugga

SEQ ID NO: 337644 - RNA, 24 nt, Human
ucucgcuguugcccaggcuggagu

SEQ ID NO: 337645 - RNA, 22 nt, Human
ucucucaccaacccccauugug

SEQ ID NO: 337646 - RNA, 19 nt, Human
ucugccgcugcccuccacc

SEQ ID NO: 337647 - RNA, 21 nt, Human
ucuuauagguacauugggaaa

SEQ ID NO: 337648 - RNA, 21 nt, Human
ucuugacugaacucaggcuga

SEQ ID NO: 337649 - RNA, 20 nt, Human
ugagagcaaggaaggccuag

SEQ ID NO: 337650 - RNA, 22 nt, Human
ugagcccucccacgaagagcuu

SEQ ID NO: 337651 - RNA, 23 nt, Human
ugagcccucccacgaagagcuuu

SEQ ID NO: 337652 - RNA, 24 nt, Human
ugagcccucccacgaagagcuuuc

SEQ ID NO: 337653 - RNA, 19 nt, Human
ugagugggcacugcggggc

SEQ ID NO: 337654 - RNA, 21 nt, Human
ugaguucuccuccccacuccu

SEQ ID NO: 337655 - RNA, 18 nt, Human
ugauaugcaccugagagc

SEQ ID NO: 337656 - RNA, 21 nt, Human
ugcccaggcuggaguacagug

SEQ ID NO: 337657 - RNA, 21 nt, Human
ugcccaggcuggaguacagug

SEQ ID NO: 337658 - RNA, 24 nt, Human
ugcccaggcuggaguacaguggcg

SEQ ID NO: 337659 - RNA, 19 nt, Human
ugccucagccucccaaguc

SEQ ID NO: 337660 - RNA, 24 nt, Human
ugccucagccucccaagucacugg

SEQ ID NO: 337661 - RNA, 21 nt, Human
uggacaacagggacacaccuu

SEQ ID NO: 337662 - RNA, 19 nt, Human
uggaguacaguggcgcgau

SEQ ID NO: 337663 - RNA, 20 nt, Human
uggccggaaaaggagauggc

SEQ ID NO: 337664 - RNA, 24 nt, Human
uggcgcgaucuuagcucacugcaa

SEQ ID NO: 337665 - RNA, 20 nt, Human
uggcugggugagguaugagg

SEQ ID NO: 337666 - RNA, 21 nt, Human
uggcugggugagguaugaggg

SEQ ID NO: 337667 - RNA, 22 nt, Human
uggcugggugagguaugagggc

SEQ ID NO: 337668 - RNA, 21 nt, Human
ugggauuacaggcguacacca

SEQ ID NO: 337669 - RNA, 22 nt, Human
ugggauuacaggcguacaccac

SEQ ID NO: 337670 - RNA, 24 nt, Human
ugggauuacaggcguacaccacca

SEQ ID NO: 337671 - RNA, 25 nt, Human
ugggauuacaggcguacaccaccau

SEQ ID NO: 337672 - RNA, 24 nt, Human
ugggguuucaccauguuggucagg

SEQ ID NO: 337673 - RNA, 18 nt, Human
uggucaggcuggcuugau

SEQ ID NO: 337674 - RNA, 24 nt, Human
uguuuaguacagaugggguuucac

SEQ ID NO: 337675 - RNA, 19 nt, Human
uuaaaaaaaaagauggaac

SEQ ID NO: 337676 - RNA, 18 nt, Human
uuaguacagaugggguuu

SEQ ID NO: 337677 - RNA, 22 nt, Human
uuaguacagaugggguuucacc

SEQ ID NO: 337678 - RNA, 24 nt, Human
uuaguacagaugggguuucaccau

SEQ ID NO: 337679 - RNA, 21 nt, Human
uucaagcgauucuccugccuc

SEQ ID NO: 337680 - RNA, 23 nt, Human
uucaagcgauucuccugccucag

SEQ ID NO: 337681 - RNA, 24 nt, Human
uucaagcgauucuccugccucagc

SEQ ID NO: 337682 - RNA, 25 nt, Human
uugagcccucccacgaagagcuuuc

SEQ ID NO: 337683 - RNA, 28 nt, Human
uugagcccucccacgaagagcuuuccuu

SEQ ID NO: 337684 - RNA, 24 nt, Human
uugcccaggcuggaguacaguggc

SEQ ID NO: 337685 - RNA, 21 nt, Human
uuucaccauguuggucaggcu

SEQ ID NO: 337686 - RNA, 22 nt, Human
uuugaagucagucuggccaaac

SEQ ID NO: 337687 - RNA, 22 nt, Human
uuuuuugaagucagucuggcca

SEQ ID NO: 337688 - RNA, 25 nt, Human
aaaagaaaaggagagacaaacaaaa

SEQ ID NO: 337689 - RNA, 24 nt, Human
aaaaggagagacaaacaaaacaag

SEQ ID NO: 337690 - RNA, 24 nt, Human
aacaaguaaauccuuuuucuacca

SEQ ID NO: 337691 - RNA, 20 nt, Human
aagaacaguaacaaaagaaa

SEQ ID NO: 337692 - RNA, 18 nt, Human
acaguaacaaaagaaaag

SEQ ID NO: 337693 - RNA, 25 nt, Human
agacaaacaaaacaagagggagguu

SEQ ID NO: 337694 - RNA, 28 nt, Human
agcaagaacaguaacaaaagaaaaggaa

SEQ ID NO: 337695 - RNA, 26 nt, Human
agcagcaagaacaguaacaaaagaaa

SEQ ID NO: 337696 - RNA, 25 nt, Human
aguaaauccuuuuucuaccaaauuc

SEQ ID NO: 337697 - RNA, 19 nt, Human
cagcaagaacaguaacaaa

SEQ ID NO: 337698 - RNA, 23 nt, Human
caguaacaaaagaaaaggagaga

SEQ ID NO: 337699 - RNA, 23 nt, Human
cccaacaaguaaauccuuuuucu

SEQ ID NO: 337700 - RNA, 24 nt, Human
ccccaacaaguaaauccuuuuucu

SEQ ID NO: 337701 - RNA, 22 nt, Human
ccuccgccaccgacccagcgcc

SEQ ID NO: 337702 - RNA, 18 nt, Human
cuccacggcccgcuccuc

SEQ ID NO: 337703 - RNA, 21 nt, Human
cuccucagccuccgccaccga

SEQ ID NO: 337704 - RNA, 19 nt, Human
ggagagacaaacaaaacaa

SEQ ID NO: 337705 - RNA, 22 nt, Human
uaccuaggcggcgaagccucca

SEQ ID NO: 337706 - RNA, 23 nt, Human
uagcagcaagaacaguaacaaaa

SEQ ID NO: 337707 - RNA, 21 nt, Human
ucccauggaacuugucuccuu

SEQ ID NO: 337708 - RNA, 23 nt, Human
uuuuuuuuuuuuuuuuucacauu

SEQ ID NO: 337709 - RNA, 24 nt, Human
uuuuuuuuuuuuuuuuucacauug

SEQ ID NO: 337710 - RNA, 19 nt, Human
aaaaaagaaauacauagag

SEQ ID NO: 337711 - RNA, 21 nt, Human
aaaacgguuugcaacauucuc

SEQ ID NO: 337712 - RNA, 19 nt, Human
aaaauaacagacauaccag

SEQ ID NO: 337713 - RNA, 19 nt, Human
aaaauaacagacauaccag

SEQ ID NO: 337714 - RNA, 24 nt, Human
aaaauaacagacauaccaggaaaa

SEQ ID NO: 337715 - RNA, 19 nt, Human
aacacagcaagaccccauc

SEQ ID NO: 337716 - RNA, 20 nt, Human
aacacagcaagaccccaucu

SEQ ID NO: 337717 - RNA, 21 nt, Human
aacacagcaagaccccaucuc

SEQ ID NO: 337718 - RNA, 20 nt, Human
aacacagcaagacucuaucu

SEQ ID NO: 337719 - RNA, 21 nt, Human
aacacagcaagacucuaucuc

SEQ ID NO: 337720 - RNA, 19 nt, Human
aacacagcaaguuccaccc

SEQ ID NO: 337721 - RNA, 20 nt, Human
aacaucuaucugauccuaac

SEQ ID NO: 337722 - RNA, 21 nt, Human
aacauuaaauguagaaaacaa

SEQ ID NO: 337723 - RNA, 21 nt, Human
aaccauggugagauucuaacc

SEQ ID NO: 337724 - RNA, 21 nt, Human
aagaaaaaaaagaaauacaua

SEQ ID NO: 337725 - RNA, 22 nt, Human
aagaagggcaggagaaacaaaa

SEQ ID NO: 337726 - RNA, 24 nt, Human
aaguaucuucacaaugauccauac

SEQ ID NO: 337727 - RNA, 19 nt, Human
aauccacccuggguaacac

SEQ ID NO: 337728 - RNA, 26 nt, Human
acaaaauaacagacauaccaggaaaa

SEQ ID NO: 337729 - RNA, 24 nt, Human
acacagcaagacucuaucucaaaa

SEQ ID NO: 337730 - RNA, 21 nt, Human
acaucaagaagggcaggagaa

SEQ ID NO: 337731 - RNA, 20 nt, Human
accaugcuaacugaaguccc

SEQ ID NO: 337732 - RNA, 19 nt, Human
acccuauacucagaucaga

SEQ ID NO: 337733 - RNA, 24 nt, Human
acccuauacucagaucagaagcug

SEQ ID NO: 337734 - RNA, 23 nt, Human
acugaagucccucccaaccggag

SEQ ID NO: 337735 - RNA, 23 nt, Human
agaaaaaaaagaaauacauagag

SEQ ID NO: 337736 - RNA, 24 nt, Human
agaaauaucaucccuuauaaagcc

SEQ ID NO: 337737 - RNA, 23 nt, Human
agaagggucugggagaaugcucc

SEQ ID NO: 337738 - RNA, 24 nt, Human
agacaaggaaggggagccauggug

SEQ ID NO: 337739 - RNA, 20 nt, Human
agacagcuggaaguacaaaa

SEQ ID NO: 337740 - RNA, 24 nt, Human
agagaacaccuggacaacagagga

SEQ ID NO: 337741 - RNA, 19 nt, Human
agcaccugaugcuagagau

SEQ ID NO: 337742 - RNA, 23 nt, Human
agcugggcaugguggcaugugcc

SEQ ID NO: 337743 - RNA, 20 nt, Human
aggaugaauugggaggagac

SEQ ID NO: 337744 - RNA, 18 nt, Human
aggcagaaggauggcuug

SEQ ID NO: 337745 - RNA, 24 nt, Human
aggcagaaggauggcuugagccca

SEQ ID NO: 337746 - RNA, 27 nt, Human
aggcagaaggauggcuugagcccaaga

SEQ ID NO: 337747 - RNA, 21 nt, Human
agguugggaaggggaaaacgg

SEQ ID NO: 337748 - RNA, 21 nt, Human
aguauuauuuauucuugaaca

SEQ ID NO: 337749 - RNA, 20 nt, Human
agugagcuaugaucagcugc

SEQ ID NO: 337750 - RNA, 20 nt, Human
agugaggugguagaaauauc

SEQ ID NO: 337751 - RNA, 26 nt, Human
aucucacuucuacuccugcucuccua

SEQ ID NO: 337752 - RNA, 21 nt, Human
auucuccuccuuguaggaggc

SEQ ID NO: 337753 - RNA, 25 nt, Human
caaaaaaaagaaaaaaaagaaauac

SEQ ID NO: 337754 - RNA, 18 nt, Human
caaaggcagcuucaaggc

SEQ ID NO: 337755 - RNA, 18 nt, Human
caacuccacuccagcugu

SEQ ID NO: 337756 - RNA, 27 nt, Human
caagaccccaucucuacaaaaauauua

SEQ ID NO: 337757 - RNA, 23 nt, Human
caagacucuaucucaaaaaaaag

SEQ ID NO: 337758 - RNA, 26 nt, Human
caagagaccaccuauaaccucuucac

SEQ ID NO: 337759 - RNA, 20 nt, Human
caaguuccaccccaguccua

SEQ ID NO: 337760 - RNA, 23 nt, Human
cacagcaaguuccaccccagucc

SEQ ID NO: 337761 - RNA, 21 nt, Human
cagaauaguaagucuuuagug

SEQ ID NO: 337762 - RNA, 24 nt, Human
cagcugcaauccacccuggguaac

SEQ ID NO: 337763 - RNA, 24 nt, Human
caggaaaaucauuucagcuaaaaa

SEQ ID NO: 337764 - RNA, 26 nt, Human
caggagaaacaaaaggcauuucuaua

SEQ ID NO: 337765 - RNA, 18 nt, Human
caggccccagacaaggaa

SEQ ID NO: 337766 - RNA, 19 nt, Human
caggccccagacaaggaag

SEQ ID NO: 337767 - RNA, 22 nt, Human
caggccccagacaaggaagggg

SEQ ID NO: 337768 - RNA, 23 nt, Human
caucaagaagggcaggagaaaca

SEQ ID NO: 337769 - RNA, 20 nt, Human
cauccuuuuccucuugggcc

SEQ ID NO: 337770 - RNA, 18 nt, Human
ccaaaggcagcuucaagg

SEQ ID NO: 337771 - RNA, 18 nt, Human
ccacuccagcuguuccug

SEQ ID NO: 337772 - RNA, 23 nt, Human
ccacugacugccauggccaucug

SEQ ID NO: 337773 - RNA, 19 nt, Human
ccaggccuuaauccuuaac

SEQ ID NO: 337774 - RNA, 23 nt, Human
ccauggugagauucuaaccaugu

SEQ ID NO: 337775 - RNA, 20 nt, Human
cccaaaaaagaaauacugac

SEQ ID NO: 337776 - RNA, 20 nt, Human
cccaagaguuugaagcugca

SEQ ID NO: 337777 - RNA, 19 nt, Human
cccaggccuuaauccuuaa

SEQ ID NO: 337778 - RNA, 20 nt, Human
cccaggccuuaauccuuaac

SEQ ID NO: 337779 - RNA, 18 nt, Human
cccagguugggaagggga

SEQ ID NO: 337780 - RNA, 24 nt, Human
ccccaaaaaagaaauacugaccag

SEQ ID NO: 337781 - RNA, 28 nt, Human
ccccaccaugcuaacugaagucccuccc

SEQ ID NO: 337782 - RNA, 21 nt, Human
ccccaguccuauuuguccaag

SEQ ID NO: 337783 - RNA, 18 nt, Human
ccuauacucagaucagaa

SEQ ID NO: 337784 - RNA, 24 nt, Human
ccucugcuggacaccuuauuaccu

SEQ ID NO: 337785 - RNA, 18 nt, Human
ccucuugggccuccucaa

SEQ ID NO: 337786 - RNA, 20 nt, Human
ccuggguaacacagcaagac

SEQ ID NO: 337787 - RNA, 22 nt, Human
ccuggguaacacagcaagacuc

SEQ ID NO: 337788 - RNA, 18 nt, Human
ccuguaaucccaacuacu

SEQ ID NO: 337789 - RNA, 22 nt, Human
ccuguaaucccaacuacuaggg

SEQ ID NO: 337790 - RNA, 25 nt, Human
ccuucugcugccucuuucugcugcc

SEQ ID NO: 337791 - RNA, 20 nt, Human
ccuuuuccucuugggccucc

SEQ ID NO: 337792 - RNA, 23 nt, Human
cgcaauguuagaauaguacuuga

SEQ ID NO: 337793 - RNA, 23 nt, Human
cuagcaucauuuauuuaucuacc

SEQ ID NO: 337794 - RNA, 27 nt, Human
cuagcccagguaacacagcaagacccc

SEQ ID NO: 337795 - RNA, 18 nt, Human
cucaaugcuccuuuggau

SEQ ID NO: 337796 - RNA, 22 nt, Human
cucccagccugagccacauccu

SEQ ID NO: 337797 - RNA, 18 nt, Human
cucuccucuauggggccu

SEQ ID NO: 337798 - RNA, 18 nt, Human
cugaauuacaguauauuu

SEQ ID NO: 337799 - RNA, 22 nt, Human
cugcaauccacccuggguaaca

SEQ ID NO: 337800 - RNA, 24 nt, Human
cuggaaguacaaaaaacugugaca

SEQ ID NO: 337801 - RNA, 27 nt, Human
cuuaacccuagaccuguugccucuagc

SEQ ID NO: 337802 - RNA, 18 nt, Human
cuuaauccuuaacccuag

SEQ ID NO: 337803 - RNA, 18 nt, Human
cuuguaggaggcgagcuc

SEQ ID NO: 337804 - RNA, 22 nt, Human
cuuucugcugccacugacugcc

SEQ ID NO: 337805 - RNA, 21 nt, Human
gaacaccuggacaacagagga

SEQ ID NO: 337806 - RNA, 26 nt, Human
gaagucccucccagccugagccacau

SEQ ID NO: 337807 - RNA, 19 nt, Human
gaauugggaggagacagua

SEQ ID NO: 337808 - RNA, 24 nt, Human
gagaacaccuggacaacagaggac

SEQ ID NO: 337809 - RNA, 24 nt, Human
gauggcuugagcccaagaguuuga

SEQ ID NO: 337810 - RNA, 22 nt, Human
gccauggccaucugcuauagcc

SEQ ID NO: 337811 - RNA, 25 nt, Human
gcccugcuuaucuugcugaccuuca

SEQ ID NO: 337812 - RNA, 23 nt, Human
gcuaugaucagcugcaauccacc

SEQ ID NO: 337813 - RNA, 24 nt, Human
ggcagcuucaaggcucaauggcaa

SEQ ID NO: 337814 - RNA, 23 nt, Human
ggcaugguggcaugugccuguaa

SEQ ID NO: 337815 - RNA, 20 nt, Human
gggacagugaggcagaagga

SEQ ID NO: 337816 - RNA, 23 nt, Human
guaggaacagaauaguaagucuu

SEQ ID NO: 337817 - RNA, 24 nt, Human
guccucaguguguccaggccccag

SEQ ID NO: 337818 - RNA, 22 nt, Human
uaaacccuaccugaaacuugag

SEQ ID NO: 337819 - RNA, 18 nt, Human
uaacugaagucccuccca

SEQ ID NO: 337820 - RNA, 21 nt, Human
uaccaggaaaaucauuucagc

SEQ ID NO: 337821 - RNA, 22 nt, Human
uagaauaguacuugagaaagca

SEQ ID NO: 337822 - RNA, 20 nt, Human
uagcccagguaacacagcaa

SEQ ID NO: 337823 - RNA, 24 nt, Human
uagcuaugccccuccaucaauuca

SEQ ID NO: 337824 - RNA, 22 nt, Human
uagcugggcaugguggcaugug

SEQ ID NO: 337825 - RNA, 19 nt, Human
uaggaggcgagcucugucu

SEQ ID NO: 337826 - RNA, 21 nt, Human
uagggaggcaaucaguauuau

SEQ ID NO: 337827 - RNA, 19 nt, Human
uauaacaucuaucugaucc

SEQ ID NO: 337828 - RNA, 22 nt, Human
ucaaugcuccuuuggauccucu

SEQ ID NO: 337829 - RNA, 19 nt, Human
ucaauucacccuauacucg

SEQ ID NO: 337830 - RNA, 21 nt, Human
ucaccuucugcugccucuuuc

SEQ ID NO: 337831 - RNA, 20 nt, Human
ucagaagcugagugucugaa

SEQ ID NO: 337832 - RNA, 18 nt, Human
ucaguauuauuuauucuu

SEQ ID NO: 337833 - RNA, 21 nt, Human
uccaacuucuuuaacauggca

SEQ ID NO: 337834 - RNA, 19 nt, Human
uccacaaaauaacagacau

SEQ ID NO: 337835 - RNA, 22 nt, Human
uccacaaaauaacagacauacc

SEQ ID NO: 337836 - RNA, 25 nt, Human
uccacacgguccacugagcuggccc

SEQ ID NO: 337837 - RNA, 24 nt, Human
ucccuagaaguaucuucacaauga

SEQ ID NO: 337838 - RNA, 25 nt, Human
uccucaacuccacuccagcuguucc

SEQ ID NO: 337839 - RNA, 20 nt, Human
uccuguuccacacgguccac

SEQ ID NO: 337840 - RNA, 26 nt, Human
ucuauaacaucuaucugauccuaaca

SEQ ID NO: 337841 - RNA, 23 nt, Human
ucuaucucaaaaaaaagaaaaaa

SEQ ID NO: 337842 - RNA, 23 nt, Human
ucucccccaccaugcuaacugaa

SEQ ID NO: 337843 - RNA, 23 nt, Human
ugaagcugcagugagcuaugauc

SEQ ID NO: 337844 - RNA, 18 nt, Human
ugagaaagcaggauuguu

SEQ ID NO: 337845 - RNA, 20 nt, Human
ugagaaagcaggauuguuuu

SEQ ID NO: 337846 - RNA, 19 nt, Human
ugagcccaagaguuugaag

SEQ ID NO: 337847 - RNA, 25 nt, Human
ugaggcagaaggauggcuugagccc

SEQ ID NO: 337848 - RNA, 22 nt, Human
ugcaauccacccuggguaacac

SEQ ID NO: 337849 - RNA, 21 nt, Human
ugccauaagaucuuaacaucu

SEQ ID NO: 337850 - RNA, 23 nt, Human
ugccauaagaucuuaacaucuca

SEQ ID NO: 337851 - RNA, 23 nt, Human
ugccuguaaucccaacuacuagg

SEQ ID NO: 337852 - RNA, 20 nt, Human
ugcugaccuucauccucugc

SEQ ID NO: 337853 - RNA, 25 nt, Human
ugcuuuagaacuuucaauuuuagga

SEQ ID NO: 337854 - RNA, 20 nt, Human
uggaaucuugaagagaacac

SEQ ID NO: 337855 - RNA, 22 nt, Human
uggaugaacuguuucucagcaa

SEQ ID NO: 337856 - RNA, 19 nt, Human
uggcaccauggaugaacug

SEQ ID NO: 337857 - RNA, 21 nt, Human
uggcaugugccuguaauccca

SEQ ID NO: 337858 - RNA, 23 nt, Human
ugggagaaugcuccaagaggaga

SEQ ID NO: 337859 - RNA, 24 nt, Human
ugguggcaugugccuguaauccca

SEQ ID NO: 337860 - RNA, 23 nt, Human
ugguucucccccaccaugcuaac

SEQ ID NO: 337861 - RNA, 18 nt, Human
uuagcuggacaaggacua

SEQ ID NO: 337862 - RNA, 19 nt, Human
uuagcugggcaugguggca

SEQ ID NO: 337863 - RNA, 24 nt, Human
uuagcugggcaugguggcaugugc

SEQ ID NO: 337864 - RNA, 20 nt, Human
uuccacacgguccacugagc

SEQ ID NO: 337865 - RNA, 19 nt, Human
uucccaggccuuaauccuu

SEQ ID NO: 337866 - RNA, 22 nt, Human
uucugcugccucuuucugcugc

SEQ ID NO: 337867 - RNA, 19 nt, Human
uuggaaaauguuaaauuuu

SEQ ID NO: 337868 - RNA, 21 nt, Human
uuggcugccgaagagggcacc

SEQ ID NO: 337869 - RNA, 24 nt, Human
uuguugaaucccuucaauuauaaa

SEQ ID NO: 337870 - RNA, 24 nt, Human
uuuuccucuugggccuccucaaug

SEQ ID NO: 337871 - RNA, 18 nt, Human
aaaagagcuuagcacagc

SEQ ID NO: 337872 - RNA, 23 nt, Human
aaagagcuuagcacagcccagac

SEQ ID NO: 337873 - RNA, 19 nt, Human
aggcagggaacuggaugac

SEQ ID NO: 337874 - RNA, 19 nt, Human
cuucagagacuccaccacu

SEQ ID NO: 337875 - RNA, 23 nt, Human
ucagagacuccaccacucgcuag

SEQ ID NO: 337876 - RNA, 21 nt, Human
ugaugucaagauggcugaucu

SEQ ID NO: 337877 - RNA, 24 nt, Human
aaaaauuauggaggggaacuuaac

SEQ ID NO: 337878 - RNA, 24 nt, Human
agauaggaaguggccuuuagggga

SEQ ID NO: 337879 - RNA, 26 nt, Human
agccuuuaggaaguuggagauaacuu

SEQ ID NO: 337880 - RNA, 25 nt, Human
agcucagcaccaguggcggcugccg

SEQ ID NO: 337881 - RNA, 24 nt, Human
aggaaaugucagaaaggcaaaaug

SEQ ID NO: 337882 - RNA, 21 nt, Human
agguuuuucguacugagaaca

SEQ ID NO: 337883 - RNA, 22 nt, Human
aucaagcuguuccuuuaaaagu

SEQ ID NO: 337884 - RNA, 19 nt, Human
auggaggggaacuuaacag

SEQ ID NO: 337885 - RNA, 20 nt, Human
auugccugccucauuugcug

SEQ ID NO: 337886 - RNA, 23 nt, Human
auuuucuccuuugcaaucaagcu

SEQ ID NO: 337887 - RNA, 19 nt, Human
caaaauggccagcauuauc

SEQ ID NO: 337888 - RNA, 23 nt, Human
cacccugaaaucuuaugaguagc

SEQ ID NO: 337889 - RNA, 20 nt, Human
cagcucagcaccaguggcgg

SEQ ID NO: 337890 - RNA, 24 nt, Human
ccccaaccacccucuaauagcuag

SEQ ID NO: 337891 - RNA, 21 nt, Human
cgagcucggcgauaggggcuu

SEQ ID NO: 337892 - RNA, 18 nt, Human
cggcugccgggugcgagg

SEQ ID NO: 337893 - RNA, 23 nt, Human
cugggauuuugguccaaaguuuu

SEQ ID NO: 337894 - RNA, 23 nt, Human
gcuuaucuauuuucuccuuugca

SEQ ID NO: 337895 - RNA, 19 nt, Human
ggugagucggaggggugac

SEQ ID NO: 337896 - RNA, 22 nt, Human
uaaaagugagacacuacagagu

SEQ ID NO: 337897 - RNA, 20 nt, Human
uaacagggaauuuaaaaaaa

SEQ ID NO: 337898 - RNA, 26 nt, Human
uaccccaaccacccucuaauagcuag

SEQ ID NO: 337899 - RNA, 22 nt, Human
uacugggugaauagcacuuucc

SEQ ID NO: 337900 - RNA, 24 nt, Human
uacugggugaauagcacuuuccuu

SEQ ID NO: 337901 - RNA, 22 nt, Human
uaggaaguggccuuuaggggau

SEQ ID NO: 337902 - RNA, 19 nt, Human
uaggggcuuccuagcagcu

SEQ ID NO: 337903 - RNA, 22 nt, Human
uagguagaaugauucaucucuc

SEQ ID NO: 337904 - RNA, 20 nt, Human
uauuuaguauucuguaguug

SEQ ID NO: 337905 - RNA, 21 nt, Human
ucagcaccaguggcggcugcc

SEQ ID NO: 337906 - RNA, 21 nt, Human
ucaguuggaagacacccugaa

SEQ ID NO: 337907 - RNA, 23 nt, Human
ucaguuggaagacacccugaaau

SEQ ID NO: 337908 - RNA, 24 nt, Human
ucaguuggaagacacccugaaauc

SEQ ID NO: 337909 - RNA, 27 nt, Human
uccuuugcaaucaagcuguuccuuuuc

SEQ ID NO: 337910 - RNA, 20 nt, Human
ucggaggggugacaaugggu

SEQ ID NO: 337911 - RNA, 19 nt, Human
ucggcgauaggggcuuccu

SEQ ID NO: 337912 - RNA, 22 nt, Human
ugaaaagcaaugcgaaagucaa

SEQ ID NO: 337913 - RNA, 21 nt, Human
ugaaacaguaagagcaagcac

SEQ ID NO: 337914 - RNA, 18 nt, Human
ugaguagcauaccccaac

SEQ ID NO: 337915 - RNA, 20 nt, Human
uggaaaguuacaacacuagu

SEQ ID NO: 337916 - RNA, 24 nt, Human
uggaagaucuuagaauugccugcc

SEQ ID NO: 337917 - RNA, 18 nt, Human
uggaaugcugauagauuc

SEQ ID NO: 337918 - RNA, 23 nt, Human
uggaaugcugauagauucacuuu

SEQ ID NO: 337919 - RNA, 25 nt, Human
uggaaugcugauagauucacuuuuu

SEQ ID NO: 337920 - RNA, 24 nt, Human
uggcuagauguuuuguggaagauc

SEQ ID NO: 337921 - RNA, 20 nt, Human
uggguaguuaugauagaaua

SEQ ID NO: 337922 - RNA, 20 nt, Human
uggguuuacugggugaauag

SEQ ID NO: 337923 - RNA, 19 nt, Human
ugucagaaaggcaaaaugg

SEQ ID NO: 337924 - RNA, 22 nt, Human
ugucagaaaggcaaaauggcca

SEQ ID NO: 337925 - RNA, 26 nt, Human
uguggaaugcugauagauucacuuuu

SEQ ID NO: 337926 - RNA, 24 nt, Human
uuaaacauguuuuacuuuuuuccu

SEQ ID NO: 337927 - RNA, 24 nt, Human
uuccuagcagcucagcaccagugg

SEQ ID NO: 337928 - RNA, 24 nt, Human
uucuguaguuguuuaacacacacu

SEQ ID NO: 337929 - RNA, 22 nt, Human
uugggggaagggaaaggggagg

SEQ ID NO: 337930 - RNA, 19 nt, Human
uuucacaggcauuugaugc

SEQ ID NO: 337931 - RNA, 22 nt, Human
uuugcaaucaagcuguuccuuu

SEQ ID NO: 337932 - RNA, 24 nt, Human
uuuuguggaagaucuuagaauugc

SEQ ID NO: 337933 - RNA, 25 nt, Human
uuuuuuggguuuacugggugaauag

SEQ ID NO: 337934 - RNA, 21 nt, Human
uuuuuuuuuuugggccgguga

SEQ ID NO: 337935 - RNA, 23 nt, Human
accucaaaaaauucauggaggaa

SEQ ID NO: 337936 - RNA, 26 nt, Human
caacaaguaugaaauuacuuugaaaa

SEQ ID NO: 337937 - RNA, 19 nt, Human
cagggccaacugcgggagg

SEQ ID NO: 337938 - RNA, 19 nt, Human
cccucaggccguacguaac

SEQ ID NO: 337939 - RNA, 26 nt, Human
cggaacaccacagggccaacugcggg

SEQ ID NO: 337940 - RNA, 18 nt, Human
cucuccacaaaaccaaca

SEQ ID NO: 337941 - RNA, 19 nt, Human
gacagcuggagcuucccug

SEQ ID NO: 337942 - RNA, 18 nt, Human
uagcaucaacaaguauga

SEQ ID NO: 337943 - RNA, 20 nt, Human
uagcaucaacaaguaugaaa

SEQ ID NO: 337944 - RNA, 21 nt, Human
uaugaaauuacuuugaaaaca

SEQ ID NO: 337945 - RNA, 18 nt, Human
ucaggccguacguaaccg

SEQ ID NO: 337946 - RNA, 21 nt, Human
ucucuccacaaaaccaacaug

SEQ ID NO: 337947 - RNA, 19 nt, Human
uuugauuugcaaacaagga

SEQ ID NO: 337948 - RNA, 18 nt, Human
aaaagugacaaagccaag

SEQ ID NO: 337949 - RNA, 21 nt, Human
aaggaaaagugacaaagccaa

SEQ ID NO: 337950 - RNA, 20 nt, Human
acgcggguggugggcggccc

SEQ ID NO: 337951 - RNA, 22 nt, Human
agggguggcuggacauuuuugc

SEQ ID NO: 337952 - RNA, 18 nt, Human
agugacaaagccaagaga

SEQ ID NO: 337953 - RNA, 19 nt, Human
augagcgcccuccgccccc

SEQ ID NO: 337954 - RNA, 23 nt, Human
cauuuuugccucaugcugugcaa

SEQ ID NO: 337955 - RNA, 25 nt, Human
cggaaaugagcgcccuccgcccccc

SEQ ID NO: 337956 - RNA, 22 nt, Human
cgggacagcggcugccggugcu

SEQ ID NO: 337957 - RNA, 18 nt, Human
cuagggguggcuggacau

SEQ ID NO: 337958 - RNA, 22 nt, Human
cugccgggacagcggcugccgg

SEQ ID NO: 337959 - RNA, 19 nt, Human
gagacugccgggacagcgg

SEQ ID NO: 337960 - RNA, 20 nt, Human
gccgggacagcggcugccgg

SEQ ID NO: 337961 - RNA, 23 nt, Human
gcuaacagaugccuagggguggc

SEQ ID NO: 337962 - RNA, 24 nt, Human
gugacaaagccaagagacagacuu

SEQ ID NO: 337963 - RNA, 19 nt, Human
gugcaaagagggauccugg

SEQ ID NO: 337964 - RNA, 22 nt, Human
uaagaaaaggaaaagugacaaa

SEQ ID NO: 337965 - RNA, 18 nt, Human
ucaugcugugcaaagagg

SEQ ID NO: 337966 - RNA, 20 nt, Human
ucaugcugugcaaagaggga

SEQ ID NO: 337967 - RNA, 19 nt, Human
uccuggcucacacauccug

SEQ ID NO: 337968 - RNA, 24 nt, Human
ugacuggagccaguuuggccacaa

SEQ ID NO: 337969 - RNA, 18 nt, Human
ugcaaagagggauccugg

SEQ ID NO: 337970 - RNA, 19 nt, Human
ugccuagggguggcuggac

SEQ ID NO: 337971 - RNA, 21 nt, Human
uggcuuuguuuuaagaaaagg

SEQ ID NO: 337972 - RNA, 21 nt, Human
aaccagagcucagcaggcccc

SEQ ID NO: 337973 - RNA, 25 nt, Human
auaccaccccaaguucuaccacuua

SEQ ID NO: 337974 - RNA, 19 nt, Human
auauauauauacauauaua

SEQ ID NO: 337975 - RNA, 18 nt, Human
caccccaaguucuaccac

SEQ ID NO: 337976 - RNA, 20 nt, Human
cacuuagaaggaaccuuugu

SEQ ID NO: 337977 - RNA, 21 nt, Human
cagcaggccccuuugcugcuc

SEQ ID NO: 337978 - RNA, 18 nt, Human
cauacacauauauaugug

SEQ ID NO: 337979 - RNA, 24 nt, Human
ccuucucagcugguggacagaagg

SEQ ID NO: 337980 - RNA, 20 nt, Human
cuuggugugugucccagagg

SEQ ID NO: 337981 - RNA, 20 nt, Human
cuuggugugugucccagagg

SEQ ID NO: 337982 - RNA, 21 nt, Human
cuuggugugugucccagaggu

SEQ ID NO: 337983 - RNA, 19 nt, Human
gcagcugccuuccgcccuu

SEQ ID NO: 337984 - RNA, 22 nt, Human
ggccuggcuccugcacaaaagc

SEQ ID NO: 337985 - RNA, 22 nt, Human
guauauacacgugugugugugu

SEQ ID NO: 337986 - RNA, 24 nt, Human
gugcagcugccuuccgcccuuguc

SEQ ID NO: 337987 - RNA, 27 nt, Human
uaaaaauaccaccccaaguucuaccac

SEQ ID NO: 337988 - RNA, 18 nt, Human
uacauacacauauauaug

SEQ ID NO: 337989 - RNA, 20 nt, Human
uacauacacauauauaugug

SEQ ID NO: 337990 - RNA, 25 nt, Human
uauacacguguguguguguauauaa

SEQ ID NO: 337991 - RNA, 22 nt, Human
uauacauacacauauauaugug

SEQ ID NO: 337992 - RNA, 24 nt, Human
uauacauacacauauauaugugua

SEQ ID NO: 337993 - RNA, 19 nt, Human
uauauacacgugugugugu

SEQ ID NO: 337994 - RNA, 24 nt, Human
uauauacauacacauauauaugug

SEQ ID NO: 337995 - RNA, 20 nt, Human
uauauacauauauauacaua

SEQ ID NO: 337996 - RNA, 32 nt, Human
uauauacauauauauacauacacauauauagu

SEQ ID NO: 337997 - RNA, 21 nt, Human
uauauauacacaccuccagcu

SEQ ID NO: 337998 - RNA, 22 nt, Human
uauauauacauacacauauaua

SEQ ID NO: 337999 - RNA, 19 nt, Human
uauauauauacauauauau

SEQ ID NO: 338000 - RNA, 23 nt, Human
uauauauauacauauauauacau

SEQ ID NO: 338001 - RNA, 31 nt, Human
uauauauauacauauauauacauacacauag

SEQ ID NO: 338002 - RNA, 18 nt, Human
uauauauguguauauaca

SEQ ID NO: 338003 - RNA, 28 nt, Human
uauguguauauacacgugugugugugua

SEQ ID NO: 338004 - RNA, 19 nt, Human
ucccagagguucugucugc

SEQ ID NO: 338005 - RNA, 24 nt, Human
ucccagagguucugucugcccugg

SEQ ID NO: 338006 - RNA, 21 nt, Human
ucucagcugguggacagaagg

SEQ ID NO: 338007 - RNA, 18 nt, Human
ucugugcagcugccuucc

SEQ ID NO: 338008 - RNA, 25 nt, Human
ugcccuggggcucugccuauggggc

SEQ ID NO: 338009 - RNA, 25 nt, Human
uggcuccugcacaaaagcucccucc

SEQ ID NO: 338010 - RNA, 19 nt, Human
uguguauauacacgugugu

SEQ ID NO: 338011 - RNA, 19 nt, Human
uguguauauacacgugugu

SEQ ID NO: 338012 - RNA, 22 nt, Human
uguguauauacacgugugugug

SEQ ID NO: 338013 - RNA, 24 nt, Human
uguguauauacacgugugugugug

SEQ ID NO: 338014 - RNA, 19 nt, Human
uuggaauaaugauagcugc

SEQ ID NO: 338015 - RNA, 23 nt, Human
uuggaauaaugauagcugcaucu

SEQ ID NO: 338016 - RNA, 22 nt, Human
uuggugugugucccagagguuc

SEQ ID NO: 338017 - RNA, 21 nt, Human
uuuguuaaaauuuaggugguu

SEQ ID NO: 338018 - RNA, 25 nt, Human
aacuuucaggaaaggcaagcagauu

SEQ ID NO: 338019 - RNA, 22 nt, Human
aagcagauucacugacccccac

SEQ ID NO: 338020 - RNA, 19 nt, Human
agagcugaagacugagagc

SEQ ID NO: 338021 - RNA, 21 nt, Human
agggaagauggggagagaagg

SEQ ID NO: 338022 - RNA, 20 nt, Human
auguguaaugaagguuuuau

SEQ ID NO: 338023 - RNA, 23 nt, Human
cagaaacuuucaggaaaggcaag

SEQ ID NO: 338024 - RNA, 26 nt, Human
ccccagaaacuuucaggaaaggcaag

SEQ ID NO: 338025 - RNA, 19 nt, Human
gaagacugagagcuaauca

SEQ ID NO: 338026 - RNA, 22 nt, Human
gagggaagauggggagagaagg

SEQ ID NO: 338027 - RNA, 19 nt, Human
gcagauucacugaccccca

SEQ ID NO: 338028 - RNA, 22 nt, Human
gcguggagcgagggaggcgagc

SEQ ID NO: 338029 - RNA, 23 nt, Human
uaagccccagaaacuuucaggaa

SEQ ID NO: 338030 - RNA, 24 nt, Human
ucagaaguucucagaugaaacuag

SEQ ID NO: 338031 - RNA, 19 nt, Human
ucuuaagccccagaaacuu

SEQ ID NO: 338032 - RNA, 24 nt, Human
ugagggaagauggggagagaaggg

SEQ ID NO: 338033 - RNA, 19 nt, Human
uucaggaaaggcaagcaga

SEQ ID NO: 338034 - RNA, 19 nt, Human
aacaagagcgucugugagc

SEQ ID NO: 338035 - RNA, 22 nt, Human
aaggaaaagaagaggucaaaug

SEQ ID NO: 338036 - RNA, 21 nt, Human
agaagaggucaaauggacagg

SEQ ID NO: 338037 - RNA, 22 nt, Human
agacagggugaggaaggagggg

SEQ ID NO: 338038 - RNA, 19 nt, Human
agaggucaaauggacagga

SEQ ID NO: 338039 - RNA, 27 nt, Human
agaggucaaauggacaggagagagcgg

SEQ ID NO: 338040 - RNA, 20 nt, Human
agucacaguuuuccagaagu

SEQ ID NO: 338041 - RNA, 19 nt, Human
aguuacagauuaacacggg

SEQ ID NO: 338042 - RNA, 22 nt, Human
caggagaaugcaggagacaggg

SEQ ID NO: 338043 - RNA, 22 nt, Human
caggggcuccuucccuuugccu

SEQ ID NO: 338044 - RNA, 23 nt, Human
cagucacaguuuuccagaagucc

SEQ ID NO: 338045 - RNA, 22 nt, Human
caguuuuccagaaguccaucag

SEQ ID NO: 338046 - RNA, 23 nt, Human
ccaguagccccuguuuaaacucu

SEQ ID NO: 338047 - RNA, 20 nt, Human
ccuugaccuggaagugaggu

SEQ ID NO: 338048 - RNA, 21 nt, Human
cugggcuugaagggggcacaa

SEQ ID NO: 338049 - RNA, 22 nt, Human
cuggugcugucuggagggaucu

SEQ ID NO: 338050 - RNA, 24 nt, Human
cuguuuaaacucuugaaccccagu

SEQ ID NO: 338051 - RNA, 19 nt, Human
gagcgucugugagcuggug

SEQ ID NO: 338052 - RNA, 21 nt, Human
gcaguggagugugagaaagga

SEQ ID NO: 338053 - RNA, 24 nt, Human
gccaaaugcccaaagcuuaguucu

SEQ ID NO: 338054 - RNA, 19 nt, Human
ggagacagggugaggaagg

SEQ ID NO: 338055 - RNA, 21 nt, Human
ggagacagggugaggaaggag

SEQ ID NO: 338056 - RNA, 20 nt, Human
ggcacaacaagagcgucugu

SEQ ID NO: 338057 - RNA, 22 nt, Human
ggcaguggagugugagaaagga

SEQ ID NO: 338058 - RNA, 19 nt, Human
gggaggaaagguggccaga

SEQ ID NO: 338059 - RNA, 22 nt, Human
gggugaggaaggaggggguguu

SEQ ID NO: 338060 - RNA, 23 nt, Human
gggugaggagggacccagaggga

SEQ ID NO: 338061 - RNA, 22 nt, Human
ggugaggagggacccagaggga

SEQ ID NO: 338062 - RNA, 25 nt, Human
gguuucaggagaaugcaggagacag

SEQ ID NO: 338063 - RNA, 19 nt, Human
gucacaguuuuccagaagu

SEQ ID NO: 338064 - RNA, 23 nt, Human
uaaacucuugaaccccagucaca

SEQ ID NO: 338065 - RNA, 26 nt, Human
uaaucgccaaaugcccaaagcuuagu

SEQ ID NO: 338066 - RNA, 19 nt, Human
uacagauuaacacggggag

SEQ ID NO: 338067 - RNA, 24 nt, Human
uauugggcaguggagugugagaaa

SEQ ID NO: 338068 - RNA, 21 nt, Human
ucaaauggacaggagagagcg

SEQ ID NO: 338069 - RNA, 19 nt, Human
ucacuauugggcaguggag

SEQ ID NO: 338070 - RNA, 19 nt, Human
ucucaggggcuccuucccu

SEQ ID NO: 338071 - RNA, 21 nt, Human
ugaagguuucaggagaaugca

SEQ ID NO: 338072 - RNA, 19 nt, Human
ugagcuggugcugucugga

SEQ ID NO: 338073 - RNA, 22 nt, Human
ugaggucacuauugggcagugg

SEQ ID NO: 338074 - RNA, 22 nt, Human
uggccagaggaagggacagcug

SEQ ID NO: 338075 - RNA, 23 nt, Human
ugggacgccagaccuugaccugg

SEQ ID NO: 338076 - RNA, 18 nt, Human
uguggaugaagguuucag

SEQ ID NO: 338077 - RNA, 21 nt, Human
uuucuuagaaggaaaagaaga

SEQ ID NO: 338078 - RNA, 24 nt, Human
uuuuuuuuuucugccaguagcccc

SEQ ID NO: 338079 - RNA, 21 nt, Human
uuuuuuuuuuuuucugccagu

SEQ ID NO: 338080 - RNA, 23 nt, Human
uuuuuuuuuuuuuuucugccagu

SEQ ID NO: 338081 - RNA, 27 nt, Human
uuuuuuuuuuuuuuuuuuuuucugggg

SEQ ID NO: 338082 - RNA, 22 nt, Human
aaaaaaccccgagcagcuuuuc

SEQ ID NO: 338083 - RNA, 21 nt, Human
aaaaaccccgagcagcuuuuc

SEQ ID NO: 338084 - RNA, 24 nt, Human
aacuagcucuggcuucaaucccua

SEQ ID NO: 338085 - RNA, 19 nt, Human
aagacaaugagaaaaccca

SEQ ID NO: 338086 - RNA, 22 nt, Human
agaggagcuaagagaagcagca

SEQ ID NO: 338087 - RNA, 21 nt, Human
aggaaguuggggggugggggg

SEQ ID NO: 338088 - RNA, 23 nt, Human
caaaggcccaagccauguuaccc

SEQ ID NO: 338089 - RNA, 22 nt, Human
cacagcugcucguaaacacccc

SEQ ID NO: 338090 - RNA, 20 nt, Human
cacccuuuggauaucugcuu

SEQ ID NO: 338091 - RNA, 22 nt, Human
cagcaguccaaagugaggaagg

SEQ ID NO: 338092 - RNA, 25 nt, Human
cagccagcccuuccccugcaguacc

SEQ ID NO: 338093 - RNA, 22 nt, Human
ccccagccagcccuuccccugc

SEQ ID NO: 338094 - RNA, 23 nt, Human
ccccuuguccccucacucacagc

SEQ ID NO: 338095 - RNA, 23 nt, Human
ccuuucaaaaggggcugcacccu

SEQ ID NO: 338096 - RNA, 18 nt, Human
cgcccugacccgcggcgc

SEQ ID NO: 338097 - RNA, 18 nt, Human
cuccugggaccugccccu

SEQ ID NO: 338098 - RNA, 22 nt, Human
cuccugggaccugccccuuguc

SEQ ID NO: 338099 - RNA, 21 nt, Human
gacaaugagaaaacccaggaa

SEQ ID NO: 338100 - RNA, 21 nt, Human
gaggagcuaagagaagcagca

SEQ ID NO: 338101 - RNA, 19 nt, Human
gccccuuguccccucacuc

SEQ ID NO: 338102 - RNA, 22 nt, Human
gccccuuguccccucacucaca

SEQ ID NO: 338103 - RNA, 20 nt, Human
gggagggcuuggggagccgg

SEQ ID NO: 338104 - RNA, 22 nt, Human
ggggaccccagccagcccuucc

SEQ ID NO: 338105 - RNA, 18 nt, Human
gggggguggggggugggg

SEQ ID NO: 338106 - RNA, 25 nt, Human
gucccugggacgcaacuagcucugg

SEQ ID NO: 338107 - RNA, 20 nt, Human
guggcuccugggaccugccc

SEQ ID NO: 338108 - RNA, 23 nt, Human
uaaacaccccuuucaaaaggggc

SEQ ID NO: 338109 - RNA, 22 nt, Human
ucacagcugcucguaaacaccc

SEQ ID NO: 338110 - RNA, 21 nt, Human
ucccuacaaaaauuccugaga

SEQ ID NO: 338111 - RNA, 22 nt, Human
ucugcuucuuucucuugguccc

SEQ ID NO: 338112 - RNA, 18 nt, Human
ugacccgcggcgcgcacc

SEQ ID NO: 338113 - RNA, 23 nt, Human
ugacccgcggcgcgcaccaguga

SEQ ID NO: 338114 - RNA, 23 nt, Human
ugaggaagggaguguguggcucc

SEQ ID NO: 338115 - RNA, 21 nt, Human
uggcuccugggaccugccccu

SEQ ID NO: 338116 - RNA, 18 nt, Human
uggggagggcuuggggag

SEQ ID NO: 338117 - RNA, 21 nt, Human
uggggggugggggguggggag

SEQ ID NO: 338118 - RNA, 23 nt, Human
uuaaaucucuuuaauaucccaua

SEQ ID NO: 338119 - RNA, 19 nt, Human
uuccugagaucuucgggga

SEQ ID NO: 338120 - RNA, 24 nt, Human
uuccugagaucuucggggacccca

SEQ ID NO: 338121 - RNA, 19 nt, Human
aacccgcggcgccagcacc

SEQ ID NO: 338122 - RNA, 20 nt, Human
aacuccacuccguuuggcuu

SEQ ID NO: 338123 - RNA, 19 nt, Human
aaucaugaaacucugcggg

SEQ ID NO: 338124 - RNA, 26 nt, Human
acaaacaaagacauggauuuacugug

SEQ ID NO: 338125 - RNA, 26 nt, Human
acaaacaaagacauggauuuacugug

SEQ ID NO: 338126 - RNA, 22 nt, Human
accagcgccagcagcagcccca

SEQ ID NO: 338127 - RNA, 23 nt, Human
acccgcggcgccagcaccagcgc

SEQ ID NO: 338128 - RNA, 18 nt, Human
acuccacuccguuuggcu

SEQ ID NO: 338129 - RNA, 19 nt, Human
agaaaaacaaacaaagaca

SEQ ID NO: 338130 - RNA, 19 nt, Human
agaaaaacaaacaaagaca

SEQ ID NO: 338131 - RNA, 23 nt, Human
agaaaaacaaacaaagacaugga

SEQ ID NO: 338132 - RNA, 23 nt, Human
agaaaaacaaacaaagacaugga

SEQ ID NO: 338133 - RNA, 18 nt, Human
agaaaaacaaacaaagag

SEQ ID NO: 338134 - RNA, 18 nt, Human
agaaaaacaaacaaagag

SEQ ID NO: 338135 - RNA, 20 nt, Human
agacauggauuuacugugca

SEQ ID NO: 338136 - RNA, 20 nt, Human
agacauggauuuacugugca

SEQ ID NO: 338137 - RNA, 20 nt, Human
agacgcugagcgagcgacaa

SEQ ID NO: 338138 - RNA, 19 nt, Human
agaguaucaccuuguccuc

SEQ ID NO: 338139 - RNA, 23 nt, Human
agcuccgagucgggccgcaccac

SEQ ID NO: 338140 - RNA, 22 nt, Human
aggagagggcggccgggaggga

SEQ ID NO: 338141 - RNA, 21 nt, Human
aguggcaaauauaaaaaaucu

SEQ ID NO: 338142 - RNA, 24 nt, Human
aguuuuguuccccuuuaaguuuua

SEQ ID NO: 338143 - RNA, 24 nt, Human
aguuuuguuccccuuuaaguuuua

SEQ ID NO: 338144 - RNA, 20 nt, Human
auaaagucgaaaagaaagaa

SEQ ID NO: 338145 - RNA, 18 nt, Human
cacagcagucacuucaua

SEQ ID NO: 338146 - RNA, 18 nt, Human
cacagcagucacuucaua

SEQ ID NO: 338147 - RNA, 20 nt, Human
cacagcucagaguaucaccu

SEQ ID NO: 338148 - RNA, 18 nt, Human
caccagcgccagcagcag

SEQ ID NO: 338149 - RNA, 20 nt, Human
cagaguaucaccuuguccuc

SEQ ID NO: 338150 - RNA, 21 nt, Human
cagcaccagcgccagcagcag

SEQ ID NO: 338151 - RNA, 21 nt, Human
cagcagcagccccagggcuaa

SEQ ID NO: 338152 - RNA, 22 nt, Human
caggcggccaccgcgcgccauc

SEQ ID NO: 338153 - RNA, 21 nt, Human
ccacagcucagaguaucaccu

SEQ ID NO: 338154 - RNA, 19 nt, Human
ccagcgccagcagcagccc

SEQ ID NO: 338155 - RNA, 22 nt, Human
ccagcgccagcagcagccccag

SEQ ID NO: 338156 - RNA, 23 nt, Human
cccagaaagaauugcaauuuacc

SEQ ID NO: 338157 - RNA, 19 nt, Human
ccccaggcggccaccgcgc

SEQ ID NO: 338158 - RNA, 22 nt, Human
ccccaggcggccaccgcgcgcc

SEQ ID NO: 338159 - RNA, 20 nt, Human
cccgcagaacccgcggcgcc

SEQ ID NO: 338160 - RNA, 29 nt, Human
cccgcagaacccgcggcgccagcaccagc

SEQ ID NO: 338161 - RNA, 21 nt, Human
cccgcagaacccgcggcgccg

SEQ ID NO: 338162 - RNA, 20 nt, Human
ccucccucaacccacucacc

SEQ ID NO: 338163 - RNA, 22 nt, Human
cgcaccacgcgcucuuugcgca

SEQ ID NO: 338164 - RNA, 21 nt, Human
cgcggcgccagcaccagcgcc

SEQ ID NO: 338165 - RNA, 22 nt, Human
cgcucuuugcgcaccgugggcu

SEQ ID NO: 338166 - RNA, 18 nt, Human
cuaaccccaggcggccac

SEQ ID NO: 338167 - RNA, 21 nt, Human
cucagaguauaaagucgaaaa

SEQ ID NO: 338168 - RNA, 21 nt, Human
cucagaguauaaagucgaaaa

SEQ ID NO: 338169 - RNA, 20 nt, Human
cuccucaguagugacaaagc

SEQ ID NO: 338170 - RNA, 26 nt, Human
cucuaaauuccuuucuuuuucacauu

SEQ ID NO: 338171 - RNA, 18 nt, Human
cugcacccguuugaucca

SEQ ID NO: 338172 - RNA, 25 nt, Human
gaagaaucaugaaacucugcggggu

SEQ ID NO: 338173 - RNA, 19 nt, Human
gaagcucugguuguccuca

SEQ ID NO: 338174 - RNA, 23 nt, Human
gaggagagggcggccgggaggga

SEQ ID NO: 338175 - RNA, 22 nt, Human
gauugcuucuuaauagaaaaac

SEQ ID NO: 338176 - RNA, 22 nt, Human
gauugcuuuuuaauagaaaaac

SEQ ID NO: 338177 - RNA, 24 nt, Human
gcagaacccgcggcgccagcacca

SEQ ID NO: 338178 - RNA, 22 nt, Human
gccaccgcgcgccaucgucccg

SEQ ID NO: 338179 - RNA, 19 nt, Human
gccaucgucccgaggagag

SEQ ID NO: 338180 - RNA, 18 nt, Human
gcccgcagaacccgcggc

SEQ ID NO: 338181 - RNA, 20 nt, Human
gcggcgccagcaccagcgcc

SEQ ID NO: 338182 - RNA, 19 nt, Human
gcggggggggcaggucugc

SEQ ID NO: 338183 - RNA, 19 nt, Human
gcucuuugcgcaccguggg

SEQ ID NO: 338184 - RNA, 19 nt, Human
ggaaauguuaucauccuug

SEQ ID NO: 338185 - RNA, 19 nt, Human
ggacaugauccagaacccc

SEQ ID NO: 338186 - RNA, 20 nt, Human
ggcggccgggagggagacgc

SEQ ID NO: 338187 - RNA, 20 nt, Human
ggggggcaggucugcggguc

SEQ ID NO: 338188 - RNA, 19 nt, Human
gucgaaaagaaagaaucug

SEQ ID NO: 338189 - RNA, 19 nt, Human
gucgaaaagaaagaaucug

SEQ ID NO: 338190 - RNA, 21 nt, Human
guggcaaauauaaaaaucugg

SEQ ID NO: 338191 - RNA, 24 nt, Human
uaacucagaguauaaagucgaaaa

SEQ ID NO: 338192 - RNA, 24 nt, Human
uaacucagaguauaaagucgaaaa

SEQ ID NO: 338193 - RNA, 21 nt, Human
uacauuccuuucuuuuucaca

SEQ ID NO: 338194 - RNA, 22 nt, Human
uacauuccuuucuuuuucacau

SEQ ID NO: 338195 - RNA, 19 nt, Human
uauaguaaccauagguggc

SEQ ID NO: 338196 - RNA, 23 nt, Human
uauauuagacuuguucugaaaua

SEQ ID NO: 338197 - RNA, 18 nt, Human
uaucauaauccuuccaga

SEQ ID NO: 338198 - RNA, 24 nt, Human
uauuucauucacuuccuccuuaca

SEQ ID NO: 338199 - RNA, 22 nt, Human
ucaaagauguaucuuuucugca

SEQ ID NO: 338200 - RNA, 24 nt, Human
ucaacaaucuucccuagccucucc

SEQ ID NO: 338201 - RNA, 24 nt, Human
ucagaguauaaagucgaaaagaaa

SEQ ID NO: 338202 - RNA, 24 nt, Human
ucagaguauaaagucgaaaagaaa

SEQ ID NO: 338203 - RNA, 21 nt, Human
ucagcuccucaguagugacaa

SEQ ID NO: 338204 - RNA, 18 nt, Human
ucaguccacagcucagag

SEQ ID NO: 338205 - RNA, 21 nt, Human
ucaugaaacucugcgggguuu

SEQ ID NO: 338206 - RNA, 18 nt, Human
ucccaaggaucccaccaa

SEQ ID NO: 338207 - RNA, 18 nt, Human
ucccucaacccacucaac

SEQ ID NO: 338208 - RNA, 20 nt, Human
uccucagggggccgcucgcc

SEQ ID NO: 338209 - RNA, 22 nt, Human
ucguacuggaagcucugguugu

SEQ ID NO: 338210 - RNA, 21 nt, Human
ucugacauucaucuuuucccu

SEQ ID NO: 338211 - RNA, 24 nt, Human
ucugguaguuaaaauacacagcag

SEQ ID NO: 338212 - RNA, 24 nt, Human
ugaaacucugcgggguuuccuagg

SEQ ID NO: 338213 - RNA, 21 nt, Human
ugagagaaaucuuacugaaag

SEQ ID NO: 338214 - RNA, 21 nt, Human
ugagagaaaucuuacugaaag

SEQ ID NO: 338215 - RNA, 26 nt, Human
ugagcgaaaaacaauuuuuauacccc

SEQ ID NO: 338216 - RNA, 26 nt, Human
ugagcgaaaaacaauuuuuauacccc

SEQ ID NO: 338217 - RNA, 19 nt, Human
ugaugaucugaagaaucau

SEQ ID NO: 338218 - RNA, 20 nt, Human
ugcccaggaaggccucgugg

SEQ ID NO: 338219 - RNA, 20 nt, Human
uggaaaaugcauggagguuu

SEQ ID NO: 338220 - RNA, 20 nt, Human
uggaaaaugcauggagguuu

SEQ ID NO: 338221 - RNA, 20 nt, Human
uggcuucccaaggaucccuc

SEQ ID NO: 338222 - RNA, 20 nt, Human
uggcuucccaaggaucccuc

SEQ ID NO: 338223 - RNA, 19 nt, Human
uggcuuguuuguauucuuc

SEQ ID NO: 338224 - RNA, 27 nt, Human
ugggacaugauccagaaccccgcuccg

SEQ ID NO: 338225 - RNA, 27 nt, Human
ugggacaugauccagaacuccacuccg

SEQ ID NO: 338226 - RNA, 20 nt, Human
ugggaucacaacugcuguaa

SEQ ID NO: 338227 - RNA, 20 nt, Human
ugggaucacaacugcuguaa

SEQ ID NO: 338228 - RNA, 24 nt, Human
uguuguggggggacaggucugagg

SEQ ID NO: 338229 - RNA, 24 nt, Human
uuacugccucccucaacccacuca

SEQ ID NO: 338230 - RNA, 24 nt, Human
uuacugccucccucaacccacuca

SEQ ID NO: 338231 - RNA, 22 nt, Human
uucauccuuucccuaccucuac

SEQ ID NO: 338232 - RNA, 19 nt, Human
uucaucuuuucccuaccuc

SEQ ID NO: 338233 - RNA, 19 nt, Human
uugauugcuucuuaauaga

SEQ ID NO: 338234 - RNA, 19 nt, Human
uugauugcuuuuuaauaga

SEQ ID NO: 338235 - RNA, 18 nt, Human
uuggcauuuuaagguagg

SEQ ID NO: 338236 - RNA, 21 nt, Human
uuguggggggacaggucugag

SEQ ID NO: 338237 - RNA, 24 nt, Human
aacagauggaguauuuaggaaaga

SEQ ID NO: 338238 - RNA, 19 nt, Human
acaccgagggacgcgagga

SEQ ID NO: 338239 - RNA, 18 nt, Human
aggagggaggcuggcggg

SEQ ID NO: 338240 - RNA, 24 nt, Human
agggaggcuggcgggggcccgggc

SEQ ID NO: 338241 - RNA, 25 nt, Human
auuuauagcucggucacauacuacu

SEQ ID NO: 338242 - RNA, 21 nt, Human
caaauuaaaucuacuuagaac

SEQ ID NO: 338243 - RNA, 20 nt, Human
caguacucuacugagacagg

SEQ ID NO: 338244 - RNA, 23 nt, Human
cugguaacaaauuauaaaaggag

SEQ ID NO: 338245 - RNA, 20 nt, Human
gaggagggaggcuggcgggg

SEQ ID NO: 338246 - RNA, 21 nt, Human
uaaaacccuuuauagaaacca

SEQ ID NO: 338247 - RNA, 21 nt, Human
uaaagguuucuuuaaagguuu

SEQ ID NO: 338248 - RNA, 22 nt, Human
uaagauaauucugacugugguu

SEQ ID NO: 338249 - RNA, 21 nt, Human
uaaucacucaaaaaugaaaaa

SEQ ID NO: 338250 - RNA, 21 nt, Human
uacauuaagauaauucugacu

SEQ ID NO: 338251 - RNA, 26 nt, Human
uacauuaagauaauucugacuguggu

SEQ ID NO: 338252 - RNA, 19 nt, Human
uauagcucggucacauacu

SEQ ID NO: 338253 - RNA, 19 nt, Human
ucaguucccaaauuaaauc

SEQ ID NO: 338254 - RNA, 20 nt, Human
ucccaaauuaaaucuacuua

SEQ ID NO: 338255 - RNA, 22 nt, Human
uccuucuaaagguuucuuuaaa

SEQ ID NO: 338256 - RNA, 18 nt, Human
uggaaauagaacucaaau

SEQ ID NO: 338257 - RNA, 22 nt, Human
uguugucauauggcacaauauu

SEQ ID NO: 338258 - RNA, 21 nt, Human
uucauacaauaaaacccuuua

SEQ ID NO: 338259 - RNA, 18 nt, Human
uuccacaauacaguacua

SEQ ID NO: 338260 - RNA, 18 nt, Human
uuccuaaaagagccaaaa

SEQ ID NO: 338261 - RNA, 21 nt, Human
uuguccugucaguucccaaau

SEQ ID NO: 338262 - RNA, 19 nt, Human
agggagauggugauucgga

SEQ ID NO: 338263 - RNA, 23 nt, Human
ccccuggagcaggugaaagugaa

SEQ ID NO: 338264 - RNA, 18 nt, Human
cucgguguuuuuuuucug

SEQ ID NO: 338265 - RNA, 20 nt, Human
uaucaggcaaggcaaguccu

SEQ ID NO: 338266 - RNA, 19 nt, Human
ugccggauaacaugugagg

SEQ ID NO: 338267 - RNA, 23 nt, Human
uggagcaggugaaagugaaguca

SEQ ID NO: 338268 - RNA, 23 nt, Human
uggugauucggagccugcuggcu

SEQ ID NO: 338269 - RNA, 20 nt, Human
aaacugcuuacccagcacuc

SEQ ID NO: 338270 - RNA, 23 nt, Human
aagacccaggaagaaggaaccag

SEQ ID NO: 338271 - RNA, 24 nt, Human
aagacccaggaagaaggaaccagg

SEQ ID NO: 338272 - RNA, 20 nt, Human
acugcuuacccagcacucca

SEQ ID NO: 338273 - RNA, 23 nt, Human
agagggaggggugggaccgggcc

SEQ ID NO: 338274 - RNA, 20 nt, Human
agcacagggacaugggcugg

SEQ ID NO: 338275 - RNA, 20 nt, Human
agggagcugugcugugggcu

SEQ ID NO: 338276 - RNA, 18 nt, Human
augugugugugugugugu

SEQ ID NO: 338277 - RNA, 19 nt, Human
augugugugugugugugug

SEQ ID NO: 338278 - RNA, 21 nt, Human
cagcggcuggggagucgcugg

SEQ ID NO: 338279 - RNA, 23 nt, Human
ccuuucucuuggcccuggggugg

SEQ ID NO: 338280 - RNA, 24 nt, Human
cggcuggggagucgcugggugggu

SEQ ID NO: 338281 - RNA, 21 nt, Human
cugggugggugggacgugcgu

SEQ ID NO: 338282 - RNA, 23 nt, Human
gaagggaggaggggcccaggagc

SEQ ID NO: 338283 - RNA, 23 nt, Human
gcaauccuugaagggaggagggg

SEQ ID NO: 338284 - RNA, 25 nt, Human
gcgcgcgugugugugcaugugugug

SEQ ID NO: 338285 - RNA, 22 nt, Human
gcggcuggggagucgcugggug

SEQ ID NO: 338286 - RNA, 22 nt, Human
ggaaacugcuuacccagcacuc

SEQ ID NO: 338287 - RNA, 27 nt, Human
ggacaugggcugguggacagagggagg

SEQ ID NO: 338288 - RNA, 20 nt, Human
gggaggaggggcccaggagc

SEQ ID NO: 338289 - RNA, 20 nt, Human
gggcugguggacagagggag

SEQ ID NO: 338290 - RNA, 21 nt, Human
gugcugugggcuugugugcag

SEQ ID NO: 338291 - RNA, 18 nt, Human
guggacagagggaggggu

SEQ ID NO: 338292 - RNA, 21 nt, Human
gugucaugugagugguaggug

SEQ ID NO: 338293 - RNA, 21 nt, Human
gugugugcaugugugugugug

SEQ ID NO: 338294 - RNA, 24 nt, Human
uacccagcacuccacaaaggagcu

SEQ ID NO: 338295 - RNA, 18 nt, Human
uccccuggccgcaggcug

SEQ ID NO: 338296 - RNA, 19 nt, Human
uccuauggccuaauccugg

SEQ ID NO: 338297 - RNA, 25 nt, Human
ugaagacccaggaagaaggaaccag

SEQ ID NO: 338298 - RNA, 19 nt, Human
ugaagggaggaggggccca

SEQ ID NO: 338299 - RNA, 19 nt, Human
ugaggaagagugggcagcg

SEQ ID NO: 338300 - RNA, 21 nt, Human
ugcaggccuuucucuuggccc

SEQ ID NO: 338301 - RNA, 19 nt, Human
ugcgcgcgcgugugugugc

SEQ ID NO: 338302 - RNA, 20 nt, Human
ugcuucaguuuggcagggag

SEQ ID NO: 338303 - RNA, 20 nt, Human
uggaugugugugugugugug

SEQ ID NO: 338304 - RNA, 21 nt, Human
ugggauuagcacagggacaug

SEQ ID NO: 338305 - RNA, 22 nt, Human
ugggguggaugugugugugugu

SEQ ID NO: 338306 - RNA, 21 nt, Human
ugugagcugaagaccgagaug

SEQ ID NO: 338307 - RNA, 20 nt, Human
ugugcaggccuuucucuugg

SEQ ID NO: 338308 - RNA, 18 nt, Human
ugugcgcgcgcgugugug

SEQ ID NO: 338309 - RNA, 24 nt, Human
ugugcgcgcgcgugugugugcaug

SEQ ID NO: 338310 - RNA, 29 nt, Human
ugugugcaggccuuucucuuggccccggc

SEQ ID NO: 338311 - RNA, 19 nt, Human
ugugugcaugugugugugu

SEQ ID NO: 338312 - RNA, 21 nt, Human
ugugugcaugugugugugugu

SEQ ID NO: 338313 - RNA, 21 nt, Human
ugugugcgcgcgcgugugugu

SEQ ID NO: 338314 - RNA, 22 nt, Human
ugugugcgcgcgcgugugugug

SEQ ID NO: 338315 - RNA, 21 nt, Human
ugugugugcaugugugugugu

SEQ ID NO: 338316 - RNA, 22 nt, Human
ugugugugcaugugugugugug

SEQ ID NO: 338317 - RNA, 21 nt, Human
ugugugugcgcgcgcgugugu

SEQ ID NO: 338318 - RNA, 21 nt, Human
ugugugugugcgcgcgcgugu

SEQ ID NO: 338319 - RNA, 22 nt, Human
ugugugugugugcgcgcgcgug

SEQ ID NO: 338320 - RNA, 26 nt, Human
ugugugugugugcgcgcgcgugauuu

SEQ ID NO: 338321 - RNA, 18 nt, Human
ugugugugugugugcaca

SEQ ID NO: 338322 - RNA, 21 nt, Human
ugugugugugugugcgcgcgc

SEQ ID NO: 338323 - RNA, 23 nt, Human
ugugugugugugugugcgcgcgc

SEQ ID NO: 338324 - RNA, 18 nt, Human
uuacccagcacuccacaa

SEQ ID NO: 338325 - RNA, 24 nt, Human
uugaagggaggaggggcccaggag

SEQ ID NO: 338326 - RNA, 20 nt, Human
uuuuuuuuuuuuuuuuccag

SEQ ID NO: 338327 - RNA, 23 nt, Human
aaccccaaucccaagugcugaaa

SEQ ID NO: 338328 - RNA, 22 nt, Human
aagugcugaaaaaccagaggcu

SEQ ID NO: 338329 - RNA, 26 nt, Human
aaucccaagugcugaaaaaccagagg

SEQ ID NO: 338330 - RNA, 21 nt, Human
agggagauguguaagcuucca

SEQ ID NO: 338331 - RNA, 25 nt, Human
caagugcugaaaaaccagaggcuga

SEQ ID NO: 338332 - RNA, 19 nt, Human
cccaagugcugaaaaacca

SEQ ID NO: 338333 - RNA, 24 nt, Human
ccccacggucuccggccgcgcccg

SEQ ID NO: 338334 - RNA, 20 nt, Human
ccgcgcuggccgcugauagc

SEQ ID NO: 338335 - RNA, 20 nt, Human
ccuuuuggggcaagggagug

SEQ ID NO: 338336 - RNA, 25 nt, Human
cucccgagggggcggcaaccggggg

SEQ ID NO: 338337 - RNA, 20 nt, Human
cugagaucaaaccugacagc

SEQ ID NO: 338338 - RNA, 22 nt, Human
cuuaaccccaaucccaagugcc

SEQ ID NO: 338339 - RNA, 20 nt, Human
ucuccggccgcgcccgcgcu

SEQ ID NO: 338340 - RNA, 18 nt, Human
uguuuuacugagaccagc

SEQ ID NO: 338341 - RNA, 23 nt, Human
uuaaccccaaucccaagugcuga

SEQ ID NO: 338342 - RNA, 20 nt, Human
aaaaaaaaaaaaaaagacaa

SEQ ID NO: 338343 - RNA, 22 nt, Human
aaaaaaaaaaaaaaagacaaca

SEQ ID NO: 338344 - RNA, 21 nt, Human
aaaaaaaaaaaaagacaacau

SEQ ID NO: 338345 - RNA, 27 nt, Human
aaaaagacaacauggccauuuuucaga

SEQ ID NO: 338346 - RNA, 21 nt, Human
aaagaacccaaacucagucca

SEQ ID NO: 338347 - RNA, 24 nt, Human
aaagcaggccuuucacuguguuuu

SEQ ID NO: 338348 - RNA, 23 nt, Human
aaaguaaccuauucccaaacacc

SEQ ID NO: 338349 - RNA, 30 nt, Human
aacugugugucaaaugcuuuuagggacccc

SEQ ID NO: 338350 - RNA, 19 nt, Human
aagaaacggaagaagcucc

SEQ ID NO: 338351 - RNA, 19 nt, Human
aagaaagugaaaacuccug

SEQ ID NO: 338352 - RNA, 27 nt, Human
aagcaaacggccaaccugucaaucuug

SEQ ID NO: 338353 - RNA, 21 nt, Human
aagcagagguaaguuauggac

SEQ ID NO: 338354 - RNA, 19 nt, Human
aaucauucucuccuucccc

SEQ ID NO: 338355 - RNA, 20 nt, Human
acacuaaaguucuuaggaca

SEQ ID NO: 338356 - RNA, 20 nt, Human
accaagugacacuuuggaua

SEQ ID NO: 338357 - RNA, 20 nt, Human
acccaaacucaguccaaagu

SEQ ID NO: 338358 - RNA, 23 nt, Human
acccgugguucacuccagacuca

SEQ ID NO: 338359 - RNA, 18 nt, Human
acgagcucucuugaaugu

SEQ ID NO: 338360 - RNA, 23 nt, Human
agaacauaccccagcagcaccag

SEQ ID NO: 338361 - RNA, 18 nt, Human
agagauagcaagagcucg

SEQ ID NO: 338362 - RNA, 18 nt, Human
agauggcccaagcuguag

SEQ ID NO: 338363 - RNA, 23 nt, Human
agcaaagaacccaaacucagucc

SEQ ID NO: 338364 - RNA, 22 nt, Human
agcccagaacauaccccagcag

SEQ ID NO: 338365 - RNA, 19 nt, Human
agggagcugcccugggggc

SEQ ID NO: 338366 - RNA, 24 nt, Human
auagagugaagcaacauggagcuc

SEQ ID NO: 338367 - RNA, 30 nt, Human
aucuuggcauuaaaaaaaaaaaaaaaaaaa

SEQ ID NO: 338368 - RNA, 19 nt, Human
caaaaucauucucuccuuc

SEQ ID NO: 338369 - RNA, 22 nt, Human
caccccaaaccuuaacgagccc

SEQ ID NO: 338370 - RNA, 28 nt, Human
cacgccaacagccugacuuccucaaccc

SEQ ID NO: 338371 - RNA, 19 nt, Human
cagcaaagaacccaaacuc

SEQ ID NO: 338372 - RNA, 21 nt, Human
cagcaaagaacccaaacucag

SEQ ID NO: 338373 - RNA, 20 nt, Human
cagcacagcucccaccccaa

SEQ ID NO: 338374 - RNA, 21 nt, Human
cagcccccgagucaccaggag

SEQ ID NO: 338375 - RNA, 24 nt, Human
cagcccccgagucaccaggagggc

SEQ ID NO: 338376 - RNA, 24 nt, Human
caguccaaaguaaccuauucccaa

SEQ ID NO: 338377 - RNA, 23 nt, Human
ccaaaguaaccuauucccaaaca

SEQ ID NO: 338378 - RNA, 18 nt, Human
ccagccagguaggaacga

SEQ ID NO: 338379 - RNA, 25 nt, Human
cccaaaccuuaacgagcccagaggc

SEQ ID NO: 338380 - RNA, 18 nt, Human
ccccaaaccuuaacgagc

SEQ ID NO: 338381 - RNA, 24 nt, Human
ccccgagucaccaggagggcauau

SEQ ID NO: 338382 - RNA, 19 nt, Human
cccucaaugccuuaagagu

SEQ ID NO: 338383 - RNA, 19 nt, Human
cggaguuggaugaggggga

SEQ ID NO: 338384 - RNA, 19 nt, Human
cgggaggggaggggcccca

SEQ ID NO: 338385 - RNA, 21 nt, Human
cgggaggggaggggccccagg

SEQ ID NO: 338386 - RNA, 21 nt, Human
cgugguucacuccagacucag

SEQ ID NO: 338387 - RNA, 23 nt, Human
cuaaagaaagugaaaacuccugu

SEQ ID NO: 338388 - RNA, 26 nt, Human
cuauucccaaacaccaucggucagaa

SEQ ID NO: 338389 - RNA, 21 nt, Human
cucagauacggccaguggcca

SEQ ID NO: 338390 - RNA, 20 nt, Human
cuggcacuuuagggauggug

SEQ ID NO: 338391 - RNA, 22 nt, Human
cuggcauuaagcaaacggccaa

SEQ ID NO: 338392 - RNA, 19 nt, Human
cugggcccaccaagagcug

SEQ ID NO: 338393 - RNA, 22 nt, Human
cugugugggugucccugggccc

SEQ ID NO: 338394 - RNA, 20 nt, Human
cuuccaccgaugagccacag

SEQ ID NO: 338395 - RNA, 20 nt, Human
cuucccacagcacagcuccc

SEQ ID NO: 338396 - RNA, 18 nt, Human
gaacauaccccagcagca

SEQ ID NO: 338397 - RNA, 19 nt, Human
gaagaugggcuaucucaaa

SEQ ID NO: 338398 - RNA, 18 nt, Human
gacuuccucaacccgugg

SEQ ID NO: 338399 - RNA, 21 nt, Human
gaugcagaagcauuccagaaa

SEQ ID NO: 338400 - RNA, 21 nt, Human
gcucccaccccaaaccuuaac

SEQ ID NO: 338401 - RNA, 20 nt, Human
ggagaucaccuggcacuuua

SEQ ID NO: 338402 - RNA, 20 nt, Human
ggaggggaggggccccaggg

SEQ ID NO: 338403 - RNA, 18 nt, Human
gggaagucagcaaaauca

SEQ ID NO: 338404 - RNA, 19 nt, Human
gggaggggaggggccccag

SEQ ID NO: 338405 - RNA, 21 nt, Human
gggaggggaggggccccaggg

SEQ ID NO: 338406 - RNA, 21 nt, Human
gggggaagaaacggaagaagc

SEQ ID NO: 338407 - RNA, 18 nt, Human
ggugcccuccuugggaga

SEQ ID NO: 338408 - RNA, 26 nt, Human
gugaagcaacauggagcucauaagag

SEQ ID NO: 338409 - RNA, 18 nt, Human
gugguucacuccagacuc

SEQ ID NO: 338410 - RNA, 18 nt, Human
guguuuuucaagaugggu

SEQ ID NO: 338411 - RNA, 20 nt, Human
uaaaaggggagcagcccuca

SEQ ID NO: 338412 - RNA, 21 nt, Human
uaaagaaagugaaaacuccug

SEQ ID NO: 338413 - RNA, 21 nt, Human
uaaguuauggacuguucccuu

SEQ ID NO: 338414 - RNA, 21 nt, Human
uacacuaaaguucuuaggaca

SEQ ID NO: 338415 - RNA, 18 nt, Human
uagcuucauucacauuuu

SEQ ID NO: 338416 - RNA, 21 nt, Human
uaggacagcaaagaacccaaa

SEQ ID NO: 338417 - RNA, 19 nt, Human
uagggcagcgggccugaag

SEQ ID NO: 338418 - RNA, 19 nt, Human
uagugguggcaggggucuc

SEQ ID NO: 338419 - RNA, 20 nt, Human
uagugguggcaggggucucg

SEQ ID NO: 338420 - RNA, 21 nt, Human
uauugacagcuguuaacagca

SEQ ID NO: 338421 - RNA, 21 nt, Human
ucagauuucugugcuuaugca

SEQ ID NO: 338422 - RNA, 19 nt, Human
ucaguauggaucauuccuu

SEQ ID NO: 338423 - RNA, 21 nt, Human
ucccaaacaccaucggucaga

SEQ ID NO: 338424 - RNA, 21 nt, Human
uccccgugaaugcaguagugg

SEQ ID NO: 338425 - RNA, 22 nt, Human
uccccugaaagcuucucuuucc

SEQ ID NO: 338426 - RNA, 21 nt, Human
uccuaaagaaagugaaaacuc

SEQ ID NO: 338427 - RNA, 20 nt, Human
ucuuaggacagcaaagaacc

SEQ ID NO: 338428 - RNA, 18 nt, Human
ucuuuccuaaagaaagug

SEQ ID NO: 338429 - RNA, 21 nt, Human
ugauuaaagaauccuguuuag

SEQ ID NO: 338430 - RNA, 21 nt, Human
ugccaaagauggcuggcucag

SEQ ID NO: 338431 - RNA, 18 nt, Human
ugccuucuggccucgguc

SEQ ID NO: 338432 - RNA, 18 nt, Human
ugcuucccacagcacagc

SEQ ID NO: 338433 - RNA, 18 nt, Human
ugggaaaagugcagaugg

SEQ ID NO: 338434 - RNA, 22 nt, Human
ugggaccaacgucugacagggu

SEQ ID NO: 338435 - RNA, 18 nt, Human
ugggcccaccaagagcug

SEQ ID NO: 338436 - RNA, 21 nt, Human
ugggcccugccuuggucuggu

SEQ ID NO: 338437 - RNA, 22 nt, Human
ugggggaagaaacggaagaagc

SEQ ID NO: 338438 - RNA, 20 nt, Human
ugguguggugcugggacacg

SEQ ID NO: 338439 - RNA, 22 nt, Human
ugguguggugcugggacacgcc

SEQ ID NO: 338440 - RNA, 22 nt, Human
uguaagauggugcccuccuugg

SEQ ID NO: 338441 - RNA, 24 nt, Human
ugucugauuguugcuccucuucca

SEQ ID NO: 338442 - RNA, 24 nt, Human
uguuuagagcccucaaugccuuaa

SEQ ID NO: 338443 - RNA, 18 nt, Human
uucacauuuugggucagu

SEQ ID NO: 338444 - RNA, 25 nt, Human
uuccaccgaugagccacaggguacc

SEQ ID NO: 338445 - RNA, 19 nt, Human
uuggcauuaaaaaaaaaaa

SEQ ID NO: 338446 - RNA, 21 nt, Human
uuggcauuaaaaaaaaaaaaa

SEQ ID NO: 338447 - RNA, 22 nt, Human
uuggccucaacgagauucagaa

SEQ ID NO: 338448 - RNA, 18 nt, Human
uuuuucagauuucugugc

SEQ ID NO: 338449 - RNA, 21 nt, Human
aaaaauccaaugaaaguucag

SEQ ID NO: 338450 - RNA, 29 nt, Human
aaaagaaaaagaaaaaaaaugugaaaagg

SEQ ID NO: 338451 - RNA, 25 nt, Human
aaacaaaauaagcacagugaucuag

SEQ ID NO: 338452 - RNA, 22 nt, Human
aaacaaaguauuagaacaugug

SEQ ID NO: 338453 - RNA, 22 nt, Human
aaacuuuuaaaaucuugcagag

SEQ ID NO: 338454 - RNA, 19 nt, Human
aaaugguaggcaaaaaaag

SEQ ID NO: 338455 - RNA, 20 nt, Human
aacuaaucauuuguuuuucu

SEQ ID NO: 338456 - RNA, 21 nt, Human
aagaaaaaaaaugugaaaaga

SEQ ID NO: 338457 - RNA, 24 nt, Human
aagcacagugaucuagaaaccaaa

SEQ ID NO: 338458 - RNA, 25 nt, Human
aagguccagguuuuaaaaaauaaca

SEQ ID NO: 338459 - RNA, 31 nt, Human
acacacagaguacacacacacacacacacag

SEQ ID NO: 338460 - RNA, 31 nt, Human
acacagaguacacacacacacacacacacag

SEQ ID NO: 338461 - RNA, 28 nt, Human
acacagccuuaaaaauggagggaacgcc

SEQ ID NO: 338462 - RNA, 30 nt, Human
acagaguacacacacacacacacacacaca

SEQ ID NO: 338463 - RNA, 20 nt, Human
agaaaaaaaaaagaaaaaga

SEQ ID NO: 338464 - RNA, 21 nt, Human
agaaaaaaaaaagaaaaagaa

SEQ ID NO: 338465 - RNA, 27 nt, Human
agaaaaagaaaaaaaaugugaaaagag

SEQ ID NO: 338466 - RNA, 18 nt, Human
agaaaaccaagcaugaua

SEQ ID NO: 338467 - RNA, 19 nt, Human
agaauuaacaaaccaaauu

SEQ ID NO: 338468 - RNA, 23 nt, Human
agauaagagaagggcacacugag

SEQ ID NO: 338469 - RNA, 23 nt, Human
agcaaaaucaaaaaagcacaaga

SEQ ID NO: 338470 - RNA, 20 nt, Human
aggaaaauuaacaaaaaucc

SEQ ID NO: 338471 - RNA, 23 nt, Human
agguuuuuaucuauuaugcaauu

SEQ ID NO: 338472 - RNA, 23 nt, Human
aguaggguccaccauccauuccu

SEQ ID NO: 338473 - RNA, 24 nt, Human
agugagguaguauuguuguccccu

SEQ ID NO: 338474 - RNA, 22 nt, Human
aucaaauauccaauaagguaau

SEQ ID NO: 338475 - RNA, 21 nt, Human
auggaaaguagcugaaccaca

SEQ ID NO: 338476 - RNA, 19 nt, Human
auuaugcuaaugguaaaag

SEQ ID NO: 338477 - RNA, 21 nt, Human
caaaagaaaaaagaaaaccaa

SEQ ID NO: 338478 - RNA, 21 nt, Human
caaaauaagcacagugaucua

SEQ ID NO: 338479 - RNA, 27 nt, Human
caaaauaagcacagugaucuagaaacc

SEQ ID NO: 338480 - RNA, 26 nt, Human
caaaaucaaaaaagcacaagagauau

SEQ ID NO: 338481 - RNA, 23 nt, Human
caaagacuguccacugugcuacc

SEQ ID NO: 338482 - RNA, 24 nt, Human
caaauagaucauaaacagcaaaau

SEQ ID NO: 338483 - RNA, 18 nt, Human
caacagaaaaaaaaaaga

SEQ ID NO: 338484 - RNA, 21 nt, Human
caaggugggaugcauuccauc

SEQ ID NO: 338485 - RNA, 20 nt, Human
cacacacacacacacacaca

SEQ ID NO: 338486 - RNA, 20 nt, Human
cacacacacacacacacaca

SEQ ID NO: 338487 - RNA, 20 nt, Human
cacacacacacacacacaca

SEQ ID NO: 338488 - RNA, 22 nt, Human
cacacacacacacacacacaca

SEQ ID NO: 338489 - RNA, 22 nt, Human
cacacacacacacacacacaca

SEQ ID NO: 338490 - RNA, 23 nt, Human
cacacacacacacacacacacag

SEQ ID NO: 338491 - RNA, 23 nt, Human
cacacacacacacacacacaguc

SEQ ID NO: 338492 - RNA, 21 nt, Human
cacacacagaguacacacaca

SEQ ID NO: 338493 - RNA, 24 nt, Human
cacacagccuuaaaaauggauuaa

SEQ ID NO: 338494 - RNA, 19 nt, Human
cacuucaagguuaaccagc

SEQ ID NO: 338495 - RNA, 21 nt, Human
cagaacugaaaccacacauac

SEQ ID NO: 338496 - RNA, 21 nt, Human
cagaaucccacaguuugacuc

SEQ ID NO: 338497 - RNA, 24 nt, Human
cagagauugaaacaaaauaagcac

SEQ ID NO: 338498 - RNA, 18 nt, Human
cagcaaaauauaacugau

SEQ ID NO: 338499 - RNA, 21 nt, Human
caggagauaaaacaccaauca

SEQ ID NO: 338500 - RNA, 24 nt, Human
caugugaauauuagaaccuccuuc

SEQ ID NO: 338501 - RNA, 20 nt, Human
ccacacagagaaaacaaggc

SEQ ID NO: 338502 - RNA, 21 nt, Human
ccauacaacaccccuccagga

SEQ ID NO: 338503 - RNA, 27 nt, Human
cccuuccagaaagguccagguuuuaaa

SEQ ID NO: 338504 - RNA, 18 nt, Human
ccuaaucuacaaauagau

SEQ ID NO: 338505 - RNA, 19 nt, Human
cugaaaccacacauacacc

SEQ ID NO: 338506 - RNA, 19 nt, Human
gaacauuuaugucucaaaa

SEQ ID NO: 338507 - RNA, 18 nt, Human
gagagaauguggaaauag

SEQ ID NO: 338508 - RNA, 20 nt, Human
guacacagaacugaaaccac

SEQ ID NO: 338509 - RNA, 19 nt, Human
guuguccccuccucgggac

SEQ ID NO: 338510 - RNA, 18 nt, Human
uaaaaaaaaacuaagcac

SEQ ID NO: 338511 - RNA, 23 nt, Human
uaaaaaaaaacuaagcaccagcu

SEQ ID NO: 338512 - RNA, 20 nt, Human
uaaaacaccaaucaguguaa

SEQ ID NO: 338513 - RNA, 19 nt, Human
uaaaauguucaccauuauc

SEQ ID NO: 338514 - RNA, 20 nt, Human
uaaccaaauaucaaauaucc

SEQ ID NO: 338515 - RNA, 24 nt, Human
uaaccgaaauuaauauaaacuaaa

SEQ ID NO: 338516 - RNA, 21 nt, Human
uaauguugaagagcuccccuu

SEQ ID NO: 338517 - RNA, 20 nt, Human
uacacacacacacacacaca

SEQ ID NO: 338518 - RNA, 25 nt, Human
uacacacacacacacacacacacac

SEQ ID NO: 338519 - RNA, 25 nt, Human
uacacacacagaguacacacacaca

SEQ ID NO: 338520 - RNA, 22 nt, Human
uagaucauaaacagcaaaauau

SEQ ID NO: 338521 - RNA, 18 nt, Human
uagauuaaaaaaaaacua

SEQ ID NO: 338522 - RNA, 21 nt, Human
uagauuaaaaaaaaacuaagc

SEQ ID NO: 338523 - RNA, 25 nt, Human
uagugagguaguauuguuguccccu

SEQ ID NO: 338524 - RNA, 18 nt, Human
uaguguauuuuuacauug

SEQ ID NO: 338525 - RNA, 22 nt, Human
ucaaaaugaggaaaauuaacaa

SEQ ID NO: 338526 - RNA, 20 nt, Human
ucagaaucccacaguuugac

SEQ ID NO: 338527 - RNA, 19 nt, Human
ucagcaaaaucaaaaaagc

SEQ ID NO: 338528 - RNA, 19 nt, Human
uccaggaugauaguauacc

SEQ ID NO: 338529 - RNA, 21 nt, Human
ucccuggaccaaaagaaaaaa

SEQ ID NO: 338530 - RNA, 21 nt, Human
uccuagggagcuacuacugcu

SEQ ID NO: 338531 - RNA, 23 nt, Human
ucguaucaagguacagacauucu

SEQ ID NO: 338532 - RNA, 27 nt, Human
ucucucucucucucauacacacacaga

SEQ ID NO: 338533 - RNA, 25 nt, Human
ugaaggaaaaugaaauuucgaaagu

SEQ ID NO: 338534 - RNA, 19 nt, Human
ugacucgacaaaaaggcag

SEQ ID NO: 338535 - RNA, 20 nt, Human
ugcacaaccaugguacaaca

SEQ ID NO: 338536 - RNA, 22 nt, Human
ugugcacaaccaugguacaaca

SEQ ID NO: 338537 - RNA, 22 nt, Human
uguggaaauagguuaaauaugg

SEQ ID NO: 338538 - RNA, 19 nt, Human
uguugaagagcuccccuua

SEQ ID NO: 338539 - RNA, 24 nt, Human
uuaaaaaauaacauuaguuaccaa

SEQ ID NO: 338540 - RNA, 22 nt, Human
uuaaagucagcaaaaucaaaaa

SEQ ID NO: 338541 - RNA, 21 nt, Human
uuaaauaaccaaauaucaaau

SEQ ID NO: 338542 - RNA, 22 nt, Human
uuagaaaaauucacacagccuu

SEQ ID NO: 338543 - RNA, 20 nt, Human
uuagaacaugugaauauuag

SEQ ID NO: 338544 - RNA, 27 nt, Human
uucaacagaaaaaaaaaagaaaaagaa

SEQ ID NO: 338545 - RNA, 20 nt, Human
uucaauacuguaucaaacuu

SEQ ID NO: 338546 - RNA, 20 nt, Human
uucuaaucucuuuccugauu

SEQ ID NO: 338547 - RNA, 23 nt, Human
uuuaaagugaacauuuaugucuc

SEQ ID NO: 338548 - RNA, 21 nt, Human
uuugaacaaccagucaucaca

SEQ ID NO: 338549 - RNA, 20 nt, Human
uuuuauaugcugcccuucca

SEQ ID NO: 338550 - RNA, 19 nt, Human
uuuugucucgugccgaauu

SEQ ID NO: 338551 - RNA, 18 nt, Human
uuuuuuuuuuuuuuuuug

SEQ ID NO: 338552 - RNA, 18 nt, Human
aaaaaagaaagucagaca

SEQ ID NO: 338553 - RNA, 18 nt, Human
aaaaaagaaagucagaca

SEQ ID NO: 338554 - RNA, 22 nt, Human
aaacucuacauuuaacuuggau

SEQ ID NO: 338555 - RNA, 20 nt, Human
aacuuggaugaauaccgaug

SEQ ID NO: 338556 - RNA, 19 nt, Human
aagugcccauuuuucagca

SEQ ID NO: 338557 - RNA, 25 nt, Human
acaaaacaaaugcaacgggaaccuu

SEQ ID NO: 338558 - RNA, 20 nt, Human
acacaagaaguauuacauca

SEQ ID NO: 338559 - RNA, 22 nt, Human
aguauucaauuucuuagacaac

SEQ ID NO: 338560 - RNA, 18 nt, Human
agugcccauuuuucagca

SEQ ID NO: 338561 - RNA, 19 nt, Human
augugcauacacacaagaa

SEQ ID NO: 338562 - RNA, 24 nt, Human
auuaguauuuggaacaacacauuu

SEQ ID NO: 338563 - RNA, 23 nt, Human
auuugcuuuagagugggggaccc

SEQ ID NO: 338564 - RNA, 22 nt, Human
caaaaaagaaagucagacagaa

SEQ ID NO: 338565 - RNA, 23 nt, Human
caaggcaggagagugagguggag

SEQ ID NO: 338566 - RNA, 19 nt, Human
cacacaagaaguauuacau

SEQ ID NO: 338567 - RNA, 27 nt, Human
caugugcauacacacaagaaguauuac

SEQ ID NO: 338568 - RNA, 22 nt, Human
cauuucccagcgauaaauuugc

SEQ ID NO: 338569 - RNA, 19 nt, Human
ccaggaagagacauucugu

SEQ ID NO: 338570 - RNA, 21 nt, Human
cccagcgauaaauuugcuuua

SEQ ID NO: 338571 - RNA, 19 nt, Human
cccagcuuggccgcagccg

SEQ ID NO: 338572 - RNA, 19 nt, Human
ccgccgccgccggacgcgu

SEQ ID NO: 338573 - RNA, 21 nt, Human
ccgccgcuaccgccgccgccg

SEQ ID NO: 338574 - RNA, 21 nt, Human
ccgccgcuaccgccgccgccg

SEQ ID NO: 338575 - RNA, 22 nt, Human
ccgccgcuaccgccgccgccgg

SEQ ID NO: 338576 - RNA, 23 nt, Human
ccgccgcuaccgccgccgccgga

SEQ ID NO: 338577 - RNA, 19 nt, Human
ccgcugccgccgcuaccgc

SEQ ID NO: 338578 - RNA, 24 nt, Human
cuccagagccgcgggaugcucgga

SEQ ID NO: 338579 - RNA, 24 nt, Human
cuucauguaaaaucuaaguuucau

SEQ ID NO: 338580 - RNA, 24 nt, Human
cuucauguaaaaucuaaguuucau

SEQ ID NO: 338581 - RNA, 18 nt, Human
gacaugugccuuuccuug

SEQ ID NO: 338582 - RNA, 19 nt, Human
gacccagcuuggccgcagc

SEQ ID NO: 338583 - RNA, 20 nt, Human
gacccuuauggugaggaaau

SEQ ID NO: 338584 - RNA, 22 nt, Human
gauuaaaaaaaaaaauacugug

SEQ ID NO: 338585 - RNA, 19 nt, Human
gccgcagccgcugccgccg

SEQ ID NO: 338586 - RNA, 18 nt, Human
ggaggagcauucugcacu

SEQ ID NO: 338587 - RNA, 22 nt, Human
ggccgggcggcuccagagccgc

SEQ ID NO: 338588 - RNA, 24 nt, Human
ggcgaauagaggugacaugugccu

SEQ ID NO: 338589 - RNA, 18 nt, Human
guggaggagcauucugca

SEQ ID NO: 338590 - RNA, 22 nt, Human
guuucaugugcauacacacaag

SEQ ID NO: 338591 - RNA, 22 nt, Human
uaaaauagaaauauaauguauu

SEQ ID NO: 338592 - RNA, 23 nt, Human
uaaagacauuuauacagaaaaaa

SEQ ID NO: 338593 - RNA, 18 nt, Human
uaccaggaagagacauuc

SEQ ID NO: 338594 - RNA, 25 nt, Human
uaccaggaagagacauucuguuuuc

SEQ ID NO: 338595 - RNA, 21 nt, Human
uacuguguggcgaauagaggu

SEQ ID NO: 338596 - RNA, 21 nt, Human
uacuucaaaaagaacucugaa

SEQ ID NO: 338597 - RNA, 20 nt, Human
uagcagcaauugguuuaaag

SEQ ID NO: 338598 - RNA, 21 nt, Human
uagcagcaauugguuuaaaga

SEQ ID NO: 338599 - RNA, 20 nt, Human
uauacagaaaaaaggcaauu

SEQ ID NO: 338600 - RNA, 20 nt, Human
uauacagaaaaaaggcaauu

SEQ ID NO: 338601 - RNA, 23 nt, Human
uaucaaaaaagaaagucagacag

SEQ ID NO: 338602 - RNA, 22 nt, Human
uaucaaaaaagaaagucagacu

SEQ ID NO: 338603 - RNA, 18 nt, Human
uaucugguuaauauaaaa

SEQ ID NO: 338604 - RNA, 19 nt, Human
uauguauuucagaggguac

SEQ ID NO: 338605 - RNA, 23 nt, Human
uauuucacuuuuuggcaauuaua

SEQ ID NO: 338606 - RNA, 23 nt, Human
uauuuggaacaacacauuuuaac

SEQ ID NO: 338607 - RNA, 24 nt, Human
ucaugugcauacacacaagaagua

SEQ ID NO: 338608 - RNA, 21 nt, Human
ucuaaaaaguggucaucucau

SEQ ID NO: 338609 - RNA, 22 nt, Human
ucuaccaggaagagacauucug

SEQ ID NO: 338610 - RNA, 23 nt, Human
ucuguaaacaaaacaaaugcaac

SEQ ID NO: 338611 - RNA, 18 nt, Human
ugacaugugccuuuccuu

SEQ ID NO: 338612 - RNA, 21 nt, Human
ugagguggaggagcauucugc

SEQ ID NO: 338613 - RNA, 19 nt, Human
ugauugucauuuuacaaau

SEQ ID NO: 338614 - RNA, 19 nt, Human
ugcuacaucagcacugaca

SEQ ID NO: 338615 - RNA, 21 nt, Human
uggaacaacacauuuuaacau

SEQ ID NO: 338616 - RNA, 20 nt, Human
uggcaguggcucuucacugg

SEQ ID NO: 338617 - RNA, 18 nt, Human
uggccaauauucaacuac

SEQ ID NO: 338618 - RNA, 20 nt, Human
uggcggauuaaaaaaaaaaa

SEQ ID NO: 338619 - RNA, 18 nt, Human
uguaaacaaaacaaaugc

SEQ ID NO: 338620 - RNA, 19 nt, Human
uucaaggcaggagagugag

SEQ ID NO: 338621 - RNA, 18 nt, Human
uucacgaauggaaagcac

SEQ ID NO: 338622 - RNA, 20 nt, Human
uucaugugcauacacacagu

SEQ ID NO: 338623 - RNA, 19 nt, Human
uugcauaacacaguaguug

SEQ ID NO: 338624 - RNA, 19 nt, Human
uuggccaauauucaacuac

SEQ ID NO: 338625 - RNA, 19 nt, Human
aaaaagcgcacacccuuga

SEQ ID NO: 338626 - RNA, 25 nt, Human
aaaaagcgcacacccuugacccuuc

SEQ ID NO: 338627 - RNA, 21 nt, Human
aaagcacccaggccucgagca

SEQ ID NO: 338628 - RNA, 18 nt, Human
aggccucgagcagaucuu

SEQ ID NO: 338629 - RNA, 19 nt, Human
aggccucgagcagaucuuu

SEQ ID NO: 338630 - RNA, 24 nt, Human
aguuaugucaaaagaaaaaauaua

SEQ ID NO: 338631 - RNA, 21 nt, Human
aucccagagccucuccccacc

SEQ ID NO: 338632 - RNA, 25 nt, Human
auccucccuugacccuucaaagcug

SEQ ID NO: 338633 - RNA, 21 nt, Human
caaaaagcgcacacccuugaa

SEQ ID NO: 338634 - RNA, 25 nt, Human
cacaauucgcuggcucagggaagcc

SEQ ID NO: 338635 - RNA, 18 nt, Human
cagaccggccucgcccug

SEQ ID NO: 338636 - RNA, 23 nt, Human
cagcaggcgaacgugccccuucu

SEQ ID NO: 338637 - RNA, 23 nt, Human
ccagagccucuccccaccgagaa

SEQ ID NO: 338638 - RNA, 18 nt, Human
cccagagccucuccccac

SEQ ID NO: 338639 - RNA, 18 nt, Human
ccccuaaaggcccgaguu

SEQ ID NO: 338640 - RNA, 19 nt, Human
cgacaccaaagcacccagg

SEQ ID NO: 338641 - RNA, 24 nt, Human
cgauuguaugaacuuauucucaaa

SEQ ID NO: 338642 - RNA, 18 nt, Human
cuccgacaccaaagcacc

SEQ ID NO: 338643 - RNA, 21 nt, Human
cugcagcaggaaagggaagga

SEQ ID NO: 338644 - RNA, 20 nt, Human
cugcuaauaaacaggcuuug

SEQ ID NO: 338645 - RNA, 20 nt, Human
cugcuaauaaacaggcuuug

SEQ ID NO: 338646 - RNA, 19 nt, Human
cuguccuguguccgacucu

SEQ ID NO: 338647 - RNA, 21 nt, Human
cuguccuguguccgacucucc

SEQ ID NO: 338648 - RNA, 23 nt, Human
cuucaaagcuguaacaguaguua

SEQ ID NO: 338649 - RNA, 23 nt, Human
gaaaggaagugauccgcuacaga

SEQ ID NO: 338650 - RNA, 20 nt, Human
gacaccaaagcacccaggcc

SEQ ID NO: 338651 - RNA, 27 nt, Human
gaugaaacaaaaagcgcacacccuuga

SEQ ID NO: 338652 - RNA, 23 nt, Human
ggaucuccgacaccaaagcaccc

SEQ ID NO: 338653 - RNA, 21 nt, Human
uaagacgauuguaugaacuua

SEQ ID NO: 338654 - RNA, 22 nt, Human
uaguuaugucaaaagaaaaaau

SEQ ID NO: 338655 - RNA, 19 nt, Human
uccgacucucggaucuccg

SEQ ID NO: 338656 - RNA, 23 nt, Human
ucuaacuacaaaaauaauggcau

SEQ ID NO: 338657 - RNA, 21 nt, Human
ucuccgacucucggaucuccg

SEQ ID NO: 338658 - RNA, 28 nt, Human
ugaaacaaaaagcgcacacccuugaccc

SEQ ID NO: 338659 - RNA, 21 nt, Human
ugcagcaggaaagggaagggg

SEQ ID NO: 338660 - RNA, 18 nt, Human
ugcauggaaaagaauggg

SEQ ID NO: 338661 - RNA, 21 nt, Human
ugccccuaaaggcccgaguuc

SEQ ID NO: 338662 - RNA, 19 nt, Human
uggggagaucagaagaccg

SEQ ID NO: 338663 - RNA, 23 nt, Human
uucaaaaagauaguuaugucaaa

SEQ ID NO: 338664 - RNA, 25 nt, Human
uucccuuguuuuauacuggaaaauu

SEQ ID NO: 338665 - RNA, 24 nt, Human
uugacuguccgguguccgacuguc

SEQ ID NO: 338666 - RNA, 21 nt, Human
uugcauaaaccaucuuuaauu

SEQ ID NO: 338667 - RNA, 18 nt, Human
uuuuuuuuuuuuuuuuug

SEQ ID NO: 338668 - RNA, 21 nt, Human
uuuuuuuuuuuuuuuuugcau

SEQ ID NO: 338669 - RNA, 24 nt, Human
uuuuuuuuuuuuuuuuuugcauaa

SEQ ID NO: 338670 - RNA, 21 nt, Human
aaacaggacucacaaugaaca

SEQ ID NO: 338671 - RNA, 24 nt, Human
aaagugcugguauaacagguauga

SEQ ID NO: 338672 - RNA, 18 nt, Human
aaauaaaaacacacagcc

SEQ ID NO: 338673 - RNA, 21 nt, Human
aacaaacugacaagaaaccua

SEQ ID NO: 338674 - RNA, 22 nt, Human
aaccaggccacugaugcacuaa

SEQ ID NO: 338675 - RNA, 19 nt, Human
aaccgcuggcugccacagc

SEQ ID NO: 338676 - RNA, 24 nt, Human
aaccugacuacaccaagcagcccu

SEQ ID NO: 338677 - RNA, 24 nt, Human
aacuccuccugggugucucuccug

SEQ ID NO: 338678 - RNA, 26 nt, Human
aagaaaccuacagcuuccuuugcaga

SEQ ID NO: 338679 - RNA, 20 nt, Human
aagaucccaggaaacaacag

SEQ ID NO: 338680 - RNA, 23 nt, Human
aagcagcccucagacucuucccg

SEQ ID NO: 338681 - RNA, 25 nt, Human
aagcgauccucccacuucagccucc

SEQ ID NO: 338682 - RNA, 19 nt, Human
aaggacaccacucagaaua

SEQ ID NO: 338683 - RNA, 26 nt, Human
aaggagacaggcacgaggcugcucaa

SEQ ID NO: 338684 - RNA, 20 nt, Human
acaaccugacuacaccaagc

SEQ ID NO: 338685 - RNA, 24 nt, Human
acacaaccccaacucagagaagcc

SEQ ID NO: 338686 - RNA, 22 nt, Human
acagguaugagccaccauggcc

SEQ ID NO: 338687 - RNA, 24 nt, Human
accaaaauguaaaaacuccuccug

SEQ ID NO: 338688 - RNA, 20 nt, Human
accccagccccuggcaaccg

SEQ ID NO: 338689 - RNA, 23 nt, Human
acuccuccugggugucucuccug

SEQ ID NO: 338690 - RNA, 23 nt, Human
acuucagccucccaaagugcugg

SEQ ID NO: 338691 - RNA, 18 nt, Human
agacagggucuugccaug

SEQ ID NO: 338692 - RNA, 23 nt, Human
agacagggucuugccauguugcc

SEQ ID NO: 338693 - RNA, 24 nt, Human
agacucuucccguggccccugccc

SEQ ID NO: 338694 - RNA, 23 nt, Human
agagacagcaguuuggagaagaa

SEQ ID NO: 338695 - RNA, 18 nt, Human
agaggcccuugggaggac

SEQ ID NO: 338696 - RNA, 19 nt, Human
agaugccgaggccucaagc

SEQ ID NO: 338697 - RNA, 23 nt, Human
agcauuccagagccucagacagc

SEQ ID NO: 338698 - RNA, 21 nt, Human
agccaagaacacagaaccggc

SEQ ID NO: 338699 - RNA, 22 nt, Human
agcccaccccacuagcucuguc

SEQ ID NO: 338700 - RNA, 19 nt, Human
aggaccuguucccuugccu

SEQ ID NO: 338701 - RNA, 24 nt, Human
aggccaaauuagagacagcaguuu

SEQ ID NO: 338702 - RNA, 19 nt, Human
agguaaguuggggccacag

SEQ ID NO: 338703 - RNA, 22 nt, Human
augaacaggaacacuuggcccu

SEQ ID NO: 338704 - RNA, 23 nt, Human
auggccuuugcaggcaggugucc

SEQ ID NO: 338705 - RNA, 24 nt, Human
auuccagccugcugccuggauuuc

SEQ ID NO: 338706 - RNA, 24 nt, Human
caaagugcugguauaacagguaug

SEQ ID NO: 338707 - RNA, 25 nt, Human
caaccccaacucagagaagccaaag

SEQ ID NO: 338708 - RNA, 27 nt, Human
caagcgauccucccacuucagccuccc

SEQ ID NO: 338709 - RNA, 18 nt, Human
cacagaaccggccguggu

SEQ ID NO: 338710 - RNA, 18 nt, Human
cacauguagcaaaggaga

SEQ ID NO: 338711 - RNA, 25 nt, Human
caccccacuagcucugucccucacu

SEQ ID NO: 338712 - RNA, 19 nt, Human
cacccccagccccaagauc

SEQ ID NO: 338713 - RNA, 22 nt, Human
cacugcagccgaccacuuuugc

SEQ ID NO: 338714 - RNA, 26 nt, Human
cagaccccacaacaaacugacaagaa

SEQ ID NO: 338715 - RNA, 19 nt, Human
cagcagcguuuauuccagc

SEQ ID NO: 338716 - RNA, 20 nt, Human
cagcagcguuuauuccagcc

SEQ ID NO: 338717 - RNA, 24 nt, Human
cagccccuggcaaccaggccacug

SEQ ID NO: 338718 - RNA, 24 nt, Human
cagggucuugccauguugcccagg

SEQ ID NO: 338719 - RNA, 21 nt, Human
caguagccaauacagacauac

SEQ ID NO: 338720 - RNA, 19 nt, Human
cauguugcccaggcugguc

SEQ ID NO: 338721 - RNA, 20 nt, Human
cauguugcccaggcuggucu

SEQ ID NO: 338722 - RNA, 24 nt, Human
cauguugcccaggcuggucuugaa

SEQ ID NO: 338723 - RNA, 20 nt, Human
ccaaagugcugguauaacag

SEQ ID NO: 338724 - RNA, 21 nt, Human
ccaaagugcugguauaacagg

SEQ ID NO: 338725 - RNA, 24 nt, Human
ccaaagugcugguauaacagguau

SEQ ID NO: 338726 - RNA, 22 nt, Human
ccaagaacacagaaccggccgu

SEQ ID NO: 338727 - RNA, 21 nt, Human
ccacaaagccgauggcucaga

SEQ ID NO: 338728 - RNA, 26 nt, Human
ccacaacaaacugacaagaaaccuac

SEQ ID NO: 338729 - RNA, 22 nt, Human
ccacagaggccaaauuagagac

SEQ ID NO: 338730 - RNA, 20 nt, Human
ccacucagaauacugagcaa

SEQ ID NO: 338731 - RNA, 21 nt, Human
ccagccccaagaucccaggaa

SEQ ID NO: 338732 - RNA, 18 nt, Human
ccagccccuggcaaccag

SEQ ID NO: 338733 - RNA, 18 nt, Human
ccauggccggcucuggga

SEQ ID NO: 338734 - RNA, 19 nt, Human
ccauguugcccaggcuggu

SEQ ID NO: 338735 - RNA, 21 nt, Human
ccauguugcccaggcuggucu

SEQ ID NO: 338736 - RNA, 21 nt, Human
ccauguugcccaggcuggucu

SEQ ID NO: 338737 - RNA, 22 nt, Human
cccacaacaaacugacaagaaa

SEQ ID NO: 338738 - RNA, 21 nt, Human
cccagagaaaguagcuacaga

SEQ ID NO: 338739 - RNA, 24 nt, Human
cccagccccuggcaaccaggccac

SEQ ID NO: 338740 - RNA, 20 nt, Human
cccaggcucaagcgauccuc

SEQ ID NO: 338741 - RNA, 23 nt, Human
cccaggcucaagcgauccuccca

SEQ ID NO: 338742 - RNA, 19 nt, Human
cccaugugccucagacccc

SEQ ID NO: 338743 - RNA, 19 nt, Human
ccccaagaucccaggaaac

SEQ ID NO: 338744 - RNA, 22 nt, Human
ccccacuagcucugucccucac

SEQ ID NO: 338745 - RNA, 23 nt, Human
ccccagccccuggcaaccaggcc

SEQ ID NO: 338746 - RNA, 19 nt, Human
ccccauguccaaugugucu

SEQ ID NO: 338747 - RNA, 24 nt, Human
cccuauacacaaccccaacucaga

SEQ ID NO: 338748 - RNA, 21 nt, Human
cccucagacucuucccguggc

SEQ ID NO: 338749 - RNA, 22 nt, Human
cccugccccaucgccugcagaa

SEQ ID NO: 338750 - RNA, 19 nt, Human
cccuuggaacugaguggcu

SEQ ID NO: 338751 - RNA, 22 nt, Human
ccgcccaagaauuaaaggcugc

SEQ ID NO: 338752 - RNA, 21 nt, Human
ccucagaccccacaacaaacu

SEQ ID NO: 338753 - RNA, 23 nt, Human
ccucagacucuucccguggcccc

SEQ ID NO: 338754 - RNA, 26 nt, Human
ccucccacuucagccucccaaagugc

SEQ ID NO: 338755 - RNA, 18 nt, Human
ccugcaggcacucacagc

SEQ ID NO: 338756 - RNA, 21 nt, Human
ccuggaccccagccccuggcc

SEQ ID NO: 338757 - RNA, 23 nt, Human
ccuggcacugcagccgaccacuu

SEQ ID NO: 338758 - RNA, 23 nt, Human
cgaagaccccuauacacaacccc

SEQ ID NO: 338759 - RNA, 23 nt, Human
cgaagaccccuauacacaacccc

SEQ ID NO: 338760 - RNA, 21 nt, Human
cgcaacaccgucaccuggacu

SEQ ID NO: 338761 - RNA, 25 nt, Human
cuaagucugaagcaaucacgucagc

SEQ ID NO: 338762 - RNA, 24 nt, Human
cucaagcgauccucccacuucagc

SEQ ID NO: 338763 - RNA, 20 nt, Human
cucacugacacuuugcucca

SEQ ID NO: 338764 - RNA, 22 nt, Human
cucauuaguuaacugaccugag

SEQ ID NO: 338765 - RNA, 23 nt, Human
cucccaugugccucagaccccac

SEQ ID NO: 338766 - RNA, 18 nt, Human
cugcugagcccaccccac

SEQ ID NO: 338767 - RNA, 24 nt, Human
cugcugagcccaccccacuagcuc

SEQ ID NO: 338768 - RNA, 18 nt, Human
cugucccucacugccagg

SEQ ID NO: 338769 - RNA, 18 nt, Human
cuucccguggccccugcc

SEQ ID NO: 338770 - RNA, 24 nt, Human
cuucugcugagcccaccccacuag

SEQ ID NO: 338771 - RNA, 20 nt, Human
cuuuugcugggcguggucuu

SEQ ID NO: 338772 - RNA, 23 nt, Human
gaaaauagcuucaguccagaagc

SEQ ID NO: 338773 - RNA, 21 nt, Human
gaagaccccuauacacaaccc

SEQ ID NO: 338774 - RNA, 21 nt, Human
gaaggcagaggcccuugggag

SEQ ID NO: 338775 - RNA, 20 nt, Human
gagaugaauccaagagcuuu

SEQ ID NO: 338776 - RNA, 18 nt, Human
gaugccagaagucccagc

SEQ ID NO: 338777 - RNA, 22 nt, Human
gcaaaaaccaagauggcccagg

SEQ ID NO: 338778 - RNA, 21 nt, Human
gcagaguuaacccuccagaga

SEQ ID NO: 338779 - RNA, 24 nt, Human
gccccaagaucccaggaaacaaca

SEQ ID NO: 338780 - RNA, 23 nt, Human
gccucaagcuggagguugcuuca

SEQ ID NO: 338781 - RNA, 19 nt, Human
gccuggacacaaccugacu

SEQ ID NO: 338782 - RNA, 25 nt, Human
ggaaaaccgcuggcugccacagccc

SEQ ID NO: 338783 - RNA, 23 nt, Human
ggacaggcagaguuaacccucca

SEQ ID NO: 338784 - RNA, 24 nt, Human
ggccucaagcuggagguugcuuca

SEQ ID NO: 338785 - RNA, 24 nt, Human
ggcuggucuugaacucccaggcuc

SEQ ID NO: 338786 - RNA, 22 nt, Human
gguggaacaugaugaccacaaa

SEQ ID NO: 338787 - RNA, 23 nt, Human
guagagacagggucuugccaugu

SEQ ID NO: 338788 - RNA, 21 nt, Human
uaaaaacacacagcccaaaga

SEQ ID NO: 338789 - RNA, 24 nt, Human
uaaacacacagagaaacaagaaga

SEQ ID NO: 338790 - RNA, 23 nt, Human
uaaaugaucucacugacacuuug

SEQ ID NO: 338791 - RNA, 20 nt, Human
uaacagguaugagccaccau

SEQ ID NO: 338792 - RNA, 22 nt, Human
uaagucugaagcaaucacguca

SEQ ID NO: 338793 - RNA, 23 nt, Human
uaaguuggggccacaggcuucug

SEQ ID NO: 338794 - RNA, 21 nt, Human
uacagacauaccagcagcguu

SEQ ID NO: 338795 - RNA, 22 nt, Human
uagagacagggucuugccaugu

SEQ ID NO: 338796 - RNA, 20 nt, Human
uagccaagaacacagaaccg

SEQ ID NO: 338797 - RNA, 24 nt, Human
uaguagagacagggucuugccaug

SEQ ID NO: 338798 - RNA, 21 nt, Human
ucaaagcacaugacuccccga

SEQ ID NO: 338799 - RNA, 18 nt, Human
ucacugacacuuugcucc

SEQ ID NO: 338800 - RNA, 20 nt, Human
ucacuggucaacaggaggag

SEQ ID NO: 338801 - RNA, 19 nt, Human
ucauccgacaggaucauuc

SEQ ID NO: 338802 - RNA, 20 nt, Human
uccacagaugccuggacccc

SEQ ID NO: 338803 - RNA, 21 nt, Human
uccacagaugccuggacccca

SEQ ID NO: 338804 - RNA, 18 nt, Human
uccacauauaaaauaagu

SEQ ID NO: 338805 - RNA, 20 nt, Human
uccacauauaaaauaaguca

SEQ ID NO: 338806 - RNA, 23 nt, Human
ucccaaagugcugguauaacagg

SEQ ID NO: 338807 - RNA, 21 nt, Human
ucccaggcucaagcgauccuc

SEQ ID NO: 338808 - RNA, 25 nt, Human
ucccguggccccugccccaucgccu

SEQ ID NO: 338809 - RNA, 24 nt, Human
ucccugugacacuaaaagacacuc

SEQ ID NO: 338810 - RNA, 18 nt, Human
ucgcuggugggaggcugc

SEQ ID NO: 338811 - RNA, 19 nt, Human
ucucaagaugccgaggccu

SEQ ID NO: 338812 - RNA, 22 nt, Human
ucucuccugcaggcacucacag

SEQ ID NO: 338813 - RNA, 18 nt, Human
ucugcugagcccacccca

SEQ ID NO: 338814 - RNA, 21 nt, Human
ucugcuggucccacucccaug

SEQ ID NO: 338815 - RNA, 18 nt, Human
ucuggucgcaaaggcugc

SEQ ID NO: 338816 - RNA, 23 nt, Human
ucuugccauguugcccaggcugg

SEQ ID NO: 338817 - RNA, 24 nt, Human
ucuugccauguugcccaggcuggu

SEQ ID NO: 338818 - RNA, 25 nt, Human
ugaacucccaggcucaagcgauccu

SEQ ID NO: 338819 - RNA, 18 nt, Human
ugaaggcagaggcccuug

SEQ ID NO: 338820 - RNA, 24 nt, Human
ugaaugaaugaguaaacacacaga

SEQ ID NO: 338821 - RNA, 23 nt, Human
ugacaagaaaccuacagcuuccu

SEQ ID NO: 338822 - RNA, 21 nt, Human
ugacuacaccaagcagcccuc

SEQ ID NO: 338823 - RNA, 20 nt, Human
ugagaacuauucuuaggaag

SEQ ID NO: 338824 - RNA, 19 nt, Human
ugagaugaauccaagagcu

SEQ ID NO: 338825 - RNA, 22 nt, Human
ugaggacgccacugaaaaucag

SEQ ID NO: 338826 - RNA, 19 nt, Human
ugcacccacuucugcugag

SEQ ID NO: 338827 - RNA, 19 nt, Human
ugcaggcaggugucccuug

SEQ ID NO: 338828 - RNA, 22 nt, Human
ugccacagaggccaaauuagag

SEQ ID NO: 338829 - RNA, 27 nt, Human
ugccauguugcccaggcuggucuugaa

SEQ ID NO: 338830 - RNA, 21 nt, Human
ugcccaggcuggucuugaacu

SEQ ID NO: 338831 - RNA, 22 nt, Human
ugcugccuggauuucagaauca

SEQ ID NO: 338832 - RNA, 22 nt, Human
uggaaauaaaaacacacagccc

SEQ ID NO: 338833 - RNA, 23 nt, Human
uggaaauaaaaacacacagccca

SEQ ID NO: 338834 - RNA, 24 nt, Human
uggaccccagccccuggcaaccag

SEQ ID NO: 338835 - RNA, 20 nt, Human
uggcacagagcuggcaucag

SEQ ID NO: 338836 - RNA, 24 nt, Human
uggcaggcggagcagacccugggg

SEQ ID NO: 338837 - RNA, 22 nt, Human
uggcuuguggggccagccaucc

SEQ ID NO: 338838 - RNA, 21 nt, Human
ugggcguggucuugccacaga

SEQ ID NO: 338839 - RNA, 24 nt, Human
ugguauaacagguaugagccacca

SEQ ID NO: 338840 - RNA, 21 nt, Human
uguaaaaacuccuccugggug

SEQ ID NO: 338841 - RNA, 23 nt, Human
uguaaaaacuccuccuggguguc

SEQ ID NO: 338842 - RNA, 24 nt, Human
uuaguagagacagggucuugccau

SEQ ID NO: 338843 - RNA, 19 nt, Human
uucagccucccaaagugcu

SEQ ID NO: 338844 - RNA, 25 nt, Human
uuccagagccucagacagccccaga

SEQ ID NO: 338845 - RNA, 21 nt, Human
uuccagccugcugccuggauu

SEQ ID NO: 338846 - RNA, 21 nt, Human
uuccucaccagaaauaagagc

SEQ ID NO: 338847 - RNA, 19 nt, Human
uucuuaggaagcaaauauc

SEQ ID NO: 338848 - RNA, 25 nt, Human
aacuauugaagauuaacaaggcaaa

SEQ ID NO: 338849 - RNA, 22 nt, Human
aaucucuugcuuaagaggcaaa

SEQ ID NO: 338850 - RNA, 21 nt, Human
acaaggcaaacucagcagaga

SEQ ID NO: 338851 - RNA, 23 nt, Human
accuuccuuaaaaccuccucuca

SEQ ID NO: 338852 - RNA, 19 nt, Human
auuaccuuccuuaaaaccu

SEQ ID NO: 338853 - RNA, 21 nt, Human
caacuuuggaucccacugagg

SEQ ID NO: 338854 - RNA, 19 nt, Human
ccagguugaguugaguugg

SEQ ID NO: 338855 - RNA, 19 nt, Human
ccuuaaaaccuccucucag

SEQ ID NO: 338856 - RNA, 24 nt, Human
ccuuccuuaaaaccuccucucaga

SEQ ID NO: 338857 - RNA, 26 nt, Human
uaacugaaaaacaacuuuggauccca

SEQ ID NO: 338858 - RNA, 22 nt, Human
ucugagacacccacaccuucaa

SEQ ID NO: 338859 - RNA, 22 nt, Human
ugaaaaacaacuuuggauccca

SEQ ID NO: 338860 - RNA, 20 nt, Human
ugagaguggggauuauacag

SEQ ID NO: 338861 - RNA, 24 nt, Human
uugagaguggggauuauacagacu

SEQ ID NO: 338862 - RNA, 24 nt, Human
uugcuggaucaguucuagacaugu

SEQ ID NO: 338863 - RNA, 23 nt, Human
uuuaggguuccaaagacuggggu

SEQ ID NO: 338864 - RNA, 22 nt, Human
aagacaaugagaagauucagac

SEQ ID NO: 338865 - RNA, 19 nt, Human
aagggccagaacaggggca

SEQ ID NO: 338866 - RNA, 18 nt, Human
aaguaguagcagugggag

SEQ ID NO: 338867 - RNA, 19 nt, Human
aaucugagguggcuuuuca

SEQ ID NO: 338868 - RNA, 23 nt, Human
acaaaggagaacuucuccuuaca

SEQ ID NO: 338869 - RNA, 19 nt, Human
acccuagaaguacagagaa

SEQ ID NO: 338870 - RNA, 21 nt, Human
accuugauauccuuuacauua

SEQ ID NO: 338871 - RNA, 21 nt, Human
agaaagagacagaaacaccug

SEQ ID NO: 338872 - RNA, 22 nt, Human
agaaagagacagaaacaccugg

SEQ ID NO: 338873 - RNA, 21 nt, Human
agacaucagacccucuggaac

SEQ ID NO: 338874 - RNA, 20 nt, Human
agacgugacucagaaagaga

SEQ ID NO: 338875 - RNA, 22 nt, Human
agccacaaaggcacccucagcc

SEQ ID NO: 338876 - RNA, 21 nt, Human
aggagaccagggacccacuac

SEQ ID NO: 338877 - RNA, 19 nt, Human
aggugccagacaucagacc

SEQ ID NO: 338878 - RNA, 21 nt, Human
agucaggcuagcacaguaggc

SEQ ID NO: 338879 - RNA, 25 nt, Human
auaagacaagaauaaaccuuccuuu

SEQ ID NO: 338880 - RNA, 21 nt, Human
aucagcaaucuuuguuggcug

SEQ ID NO: 338881 - RNA, 24 nt, Human
aucauccuuccauuucuugaaucc

SEQ ID NO: 338882 - RNA, 25 nt, Human
augcagcagacugauccgguggggg

SEQ ID NO: 338883 - RNA, 24 nt, Human
caagacauaagacaagaauaaacc

SEQ ID NO: 338884 - RNA, 20 nt, Human
caauccagacauugcuaucc

SEQ ID NO: 338885 - RNA, 21 nt, Human
caccagguuaccugaauucau

SEQ ID NO: 338886 - RNA, 19 nt, Human
cacccuuccucuaucccag

SEQ ID NO: 338887 - RNA, 19 nt, Human
cagaaagagacagaaacac

SEQ ID NO: 338888 - RNA, 18 nt, Human
cagagauaaauaggagag

SEQ ID NO: 338889 - RNA, 22 nt, Human
cagagauaaauaggagaggaug

SEQ ID NO: 338890 - RNA, 19 nt, Human
cagcaguagauucuccucc

SEQ ID NO: 338891 - RNA, 18 nt, Human
cagcauagcauuagaugg

SEQ ID NO: 338892 - RNA, 18 nt, Human
cagcuuuaagcuuaucuc

SEQ ID NO: 338893 - RNA, 21 nt, Human
caggagguagaagaugcagca

SEQ ID NO: 338894 - RNA, 20 nt, Human
caggucaagacauaagacaa

SEQ ID NO: 338895 - RNA, 23 nt, Human
ccacagggaaccaugacaccuca

SEQ ID NO: 338896 - RNA, 25 nt, Human
ccuccuggcugcaggacucagcaaa

SEQ ID NO: 338897 - RNA, 22 nt, Human
ccugguuuuucuuuccugaggc

SEQ ID NO: 338898 - RNA, 26 nt, Human
cuacuccacugauaauggcaguucua

SEQ ID NO: 338899 - RNA, 22 nt, Human
cugguagaccaauucuagacgu

SEQ ID NO: 338900 - RNA, 24 nt, Human
cuuacaagaaucauccuuccauuu

SEQ ID NO: 338901 - RNA, 21 nt, Human
cuuccauuucuugaauccuau

SEQ ID NO: 338902 - RNA, 20 nt, Human
cuucugggcagcugaucugg

SEQ ID NO: 338903 - RNA, 19 nt, Human
gaaacuaguuccugguuuu

SEQ ID NO: 338904 - RNA, 22 nt, Human
gacucagaaagagacagaaaca

SEQ ID NO: 338905 - RNA, 25 nt, Human
gauggggaagggccagaacaggggc

SEQ ID NO: 338906 - RNA, 20 nt, Human
gcacuggugccuucugggca

SEQ ID NO: 338907 - RNA, 21 nt, Human
gcagaggagagaugguccaga

SEQ ID NO: 338908 - RNA, 23 nt, Human
ggacucagcaaaaauaaagagga

SEQ ID NO: 338909 - RNA, 21 nt, Human
gguagaagaugcagcagacug

SEQ ID NO: 338910 - RNA, 19 nt, Human
uaacagagaugauaacaca

SEQ ID NO: 338911 - RNA, 18 nt, Human
uaggagaggauggcaaua

SEQ ID NO: 338912 - RNA, 18 nt, Human
uaucccaguccccggucg

SEQ ID NO: 338913 - RNA, 22 nt, Human
uauggucuacagaaggcucuuc

SEQ ID NO: 338914 - RNA, 19 nt, Human
ucagaaagagacagaaaca

SEQ ID NO: 338915 - RNA, 21 nt, Human
ucagcaaaaauaaagaggaaa

SEQ ID NO: 338916 - RNA, 21 nt, Human
ucccaggauuuguaggagacc

SEQ ID NO: 338917 - RNA, 18 nt, Human
uccugaggccccaaaagu

SEQ ID NO: 338918 - RNA, 22 nt, Human
ucuggaaccugauaaucaggag

SEQ ID NO: 338919 - RNA, 29 nt, Human
ugaaacacacaggaaauucaggggagucc

SEQ ID NO: 338920 - RNA, 25 nt, Human
ugaagucaggcuagcacaguaggca

SEQ ID NO: 338921 - RNA, 18 nt, Human
ugacucagaaagagacag

SEQ ID NO: 338922 - RNA, 26 nt, Human
ugacucagaaagagacagaaacaccu

SEQ ID NO: 338923 - RNA, 21 nt, Human
ugccaaacgauaaguguucua

SEQ ID NO: 338924 - RNA, 18 nt, Human
ugccacagggaaccauga

SEQ ID NO: 338925 - RNA, 18 nt, Human
ugccagacaucagacccu

SEQ ID NO: 338926 - RNA, 22 nt, Human
ugccuucugggcagcugaucug

SEQ ID NO: 338927 - RNA, 20 nt, Human
ugcuuaaggagcaaaucagc

SEQ ID NO: 338928 - RNA, 19 nt, Human
uggaauguucaccuaccuc

SEQ ID NO: 338929 - RNA, 20 nt, Human
uggagagagaugguccaguu

SEQ ID NO: 338930 - RNA, 24 nt, Human
uggcugcaggacucagcaaaaaua

SEQ ID NO: 338931 - RNA, 23 nt, Human
uggggaagggccagaacaggggc

SEQ ID NO: 338932 - RNA, 21 nt, Human
uguauuacccuccuggcugca

SEQ ID NO: 338933 - RNA, 23 nt, Human
uuacccuccuggcugcaggacuc

SEQ ID NO: 338934 - RNA, 19 nt, Human
uuaguauaccuugcgguuc

SEQ ID NO: 338935 - RNA, 18 nt, Human
uuccuggaauguucaccu

SEQ ID NO: 338936 - RNA, 20 nt, Human
aacacaccccaccagaaucc

SEQ ID NO: 338937 - RNA, 22 nt, Human
aaccccuucuggauccuggaga

SEQ ID NO: 338938 - RNA, 26 nt, Human
aagaauaaaauauggcuccccccucc

SEQ ID NO: 338939 - RNA, 20 nt, Human
acaaugccagugccauacag

SEQ ID NO: 338940 - RNA, 22 nt, Human
aggaagacauccacaaaguugg

SEQ ID NO: 338941 - RNA, 21 nt, Human
agugccauacaggggcuggua

SEQ ID NO: 338942 - RNA, 22 nt, Human
auaaggcuuugugggcucaaag

SEQ ID NO: 338943 - RNA, 19 nt, Human
auuguucacuaaaaacuau

SEQ ID NO: 338944 - RNA, 22 nt, Human
caaggaaguccagaccaaaccc

SEQ ID NO: 338945 - RNA, 22 nt, Human
caaugccagugccauacagggg

SEQ ID NO: 338946 - RNA, 30 nt, Human
caucaggacaggggaaaaguuugaguuucc

SEQ ID NO: 338947 - RNA, 22 nt, Human
ccaaaaagagagagagauacaa

SEQ ID NO: 338948 - RNA, 18 nt, Human
ccacaaaguugggggcag

SEQ ID NO: 338949 - RNA, 20 nt, Human
cccagcugcgacccggcccc

SEQ ID NO: 338950 - RNA, 18 nt, Human
ccccagcuccccccuuuc

SEQ ID NO: 338951 - RNA, 18 nt, Human
ccccugcaaccagugcuc

SEQ ID NO: 338952 - RNA, 20 nt, Human
cccggccccgccucgugccg

SEQ ID NO: 338953 - RNA, 18 nt, Human
cugacaauaaaagaauaa

SEQ ID NO: 338954 - RNA, 21 nt, Human
cuggauccuggagagagccag

SEQ ID NO: 338955 - RNA, 18 nt, Human
gaacacaccccaccagaa

SEQ ID NO: 338956 - RNA, 18 nt, Human
gaguagaaagagcaagag

SEQ ID NO: 338957 - RNA, 18 nt, Human
gauccuggagagagccag

SEQ ID NO: 338958 - RNA, 18 nt, Human
gcacuguuuccuucagcc

SEQ ID NO: 338959 - RNA, 19 nt, Human
ggaggauggggauggggga

SEQ ID NO: 338960 - RNA, 22 nt, Human
ggauccuggagagagccagugc

SEQ ID NO: 338961 - RNA, 24 nt, Human
ggcacagggacaaugccagugcca

SEQ ID NO: 338962 - RNA, 21 nt, Human
ggcuuugugggcucaaaggcc

SEQ ID NO: 338963 - RNA, 19 nt, Human
gugcucuggggagggcagg

SEQ ID NO: 338964 - RNA, 25 nt, Human
gugcuuugauuguucacuaaaaacu

SEQ ID NO: 338965 - RNA, 19 nt, Human
guugggggcaguuggaaca

SEQ ID NO: 338966 - RNA, 23 nt, Human
uaagcaccuccaaaaagagagag

SEQ ID NO: 338967 - RNA, 18 nt, Human
uacagagaagggagcuga

SEQ ID NO: 338968 - RNA, 21 nt, Human
uaccagaagcuggaggauggg

SEQ ID NO: 338969 - RNA, 18 nt, Human
uaggagaguaccagaagc

SEQ ID NO: 338970 - RNA, 26 nt, Human
uaggcacagggacaaugccagugcca

SEQ ID NO: 338971 - RNA, 21 nt, Human
uauggcuccccccuccaagga

SEQ ID NO: 338972 - RNA, 22 nt, Human
ucaggacaggggaaaaguuuga

SEQ ID NO: 338973 - RNA, 24 nt, Human
uccaaaaagagagagagauacaga

SEQ ID NO: 338974 - RNA, 27 nt, Human
uccaaggaagacauccacaaaguuggg

SEQ ID NO: 338975 - RNA, 20 nt, Human
uccccagcuccccccuuucc

SEQ ID NO: 338976 - RNA, 20 nt, Human
uccccugcaaccagugcucu

SEQ ID NO: 338977 - RNA, 23 nt, Human
ucuggauccuggagagagccagu

SEQ ID NO: 338978 - RNA, 20 nt, Human
ugacuggagagcugccagcc

SEQ ID NO: 338979 - RNA, 21 nt, Human
ugccagccugcucucccccac

SEQ ID NO: 338980 - RNA, 24 nt, Human
ugccguccagcuuggcaacagcuu

SEQ ID NO: 338981 - RNA, 20 nt, Human
ugcuucugucucuaggagag

SEQ ID NO: 338982 - RNA, 23 nt, Human
uggaggauggggaugggggaccc

SEQ ID NO: 338983 - RNA, 24 nt, Human
ugugggcucaaaggccuuaccucc

SEQ ID NO: 338984 - RNA, 21 nt, Human
uucagaguagaaagagcaaga

SEQ ID NO: 338985 - RNA, 20 nt, Human
uuccccagcuccccccuuuc

SEQ ID NO: 338986 - RNA, 23 nt, Human
uugcacuguuuccuucagccaug

SEQ ID NO: 338987 - RNA, 23 nt, Human
aaaaaacaauccacgaagaaaac

SEQ ID NO: 338988 - RNA, 18 nt, Human
aaaaauggcaguuacugu

SEQ ID NO: 338989 - RNA, 20 nt, Human
aaaacacaaugaaaaaacaa

SEQ ID NO: 338990 - RNA, 21 nt, Human
aaauagcuuugugaccaagaa

SEQ ID NO: 338991 - RNA, 25 nt, Human
aagaauguuaaauacugugcuaaau

SEQ ID NO: 338992 - RNA, 19 nt, Human
acaaugaaaaaacaaccac

SEQ ID NO: 338993 - RNA, 22 nt, Human
acagugugggaaagugguguac

SEQ ID NO: 338994 - RNA, 23 nt, Human
accaaguccuucacagauauuuc

SEQ ID NO: 338995 - RNA, 21 nt, Human
accacuguuuuacaaaucacu

SEQ ID NO: 338996 - RNA, 23 nt, Human
acccuagagugcaaccuuucagu

SEQ ID NO: 338997 - RNA, 25 nt, Human
acgaagaaaacacaaugaaaaaaca

SEQ ID NO: 338998 - RNA, 18 nt, Human
agaaaaaacaauccacga

SEQ ID NO: 338999 - RNA, 21 nt, Human
agaaaaaacaauccacgaaga

SEQ ID NO: 339000 - RNA, 22 nt, Human
agagcuacagggccauuauaau

SEQ ID NO: 339001 - RNA, 21 nt, Human
aggcgagaagaaggcggacgg

SEQ ID NO: 339002 - RNA, 21 nt, Human
aucacagacaaaaaauggcag

SEQ ID NO: 339003 - RNA, 20 nt, Human
auggagagcaacacaucaca

SEQ ID NO: 339004 - RNA, 22 nt, Human
caacuucaucagaagguaugaa

SEQ ID NO: 339005 - RNA, 18 nt, Human
cacagacaaaaaauggca

SEQ ID NO: 339006 - RNA, 19 nt, Human
cacagacaaaaaauggcag

SEQ ID NO: 339007 - RNA, 23 nt, Human
cacaucaacaugaagacauuuac

SEQ ID NO: 339008 - RNA, 24 nt, Human
cagaaaaaacaauccacgaagaaa

SEQ ID NO: 339009 - RNA, 19 nt, Human
cagugugggaaaguggugu

SEQ ID NO: 339010 - RNA, 22 nt, Human
ccacagaacacuuaaaaaaaga

SEQ ID NO: 339011 - RNA, 22 nt, Human
ccacagaacacuuaaaaaaaga

SEQ ID NO: 339012 - RNA, 22 nt, Human
ccacuuaaauagcuuugugacc

SEQ ID NO: 339013 - RNA, 18 nt, Human
cccgcagaaaaaacaauc

SEQ ID NO: 339014 - RNA, 21 nt, Human
cccgcagaaaaaacaauccac

SEQ ID NO: 339015 - RNA, 18 nt, Human
ccgccgccgccgccgccg

SEQ ID NO: 339016 - RNA, 18 nt, Human
ccgccgccgccgccgccg

SEQ ID NO: 339017 - RNA, 18 nt, Human
ccgccgccgccgccgccg

SEQ ID NO: 339018 - RNA, 24 nt, Human
ccgccgccgccgccgccgccgccg

SEQ ID NO: 339019 - RNA, 18 nt, Human
ccgccgccgccgccgcgc

SEQ ID NO: 339020 - RNA, 18 nt, Human
ccgccgccgccgccgcgc

SEQ ID NO: 339021 - RNA, 19 nt, Human
ccgccgccgccgccgcgcg

SEQ ID NO: 339022 - RNA, 23 nt, Human
ccgccgcgcgcccuacgcgccgc

SEQ ID NO: 339023 - RNA, 25 nt, Human
ccgccgcgcgcccuacgcgccgcuc

SEQ ID NO: 339024 - RNA, 25 nt, Human
gaaaaaacaaccacuguuuuacaaa

SEQ ID NO: 339025 - RNA, 21 nt, Human
gaacgggcucgggagcgggcc

SEQ ID NO: 339026 - RNA, 22 nt, Human
gaagaaaacacaaugaaaaaac

SEQ ID NO: 339027 - RNA, 21 nt, Human
gaauacauaaaggacaaacaa

SEQ ID NO: 339028 - RNA, 18 nt, Human
gacccgcagaaaaaacaa

SEQ ID NO: 339029 - RNA, 19 nt, Human
gcagaauauaaguagcccc

SEQ ID NO: 339030 - RNA, 22 nt, Human
gccgccgccgccgccgccgccg

SEQ ID NO: 339031 - RNA, 18 nt, Human
ggccugggagcgggcccc

SEQ ID NO: 339032 - RNA, 19 nt, Human
uacagggccauuauaaugu

SEQ ID NO: 339033 - RNA, 23 nt, Human
uagaaaauauuucagggucaagc

SEQ ID NO: 339034 - RNA, 22 nt, Human
uaucacagacaaaaaauggcag

SEQ ID NO: 339035 - RNA, 19 nt, Human
uaucagauguagugcgaga

SEQ ID NO: 339036 - RNA, 22 nt, Human
uauccacaaaacaacgcuaaac

SEQ ID NO: 339037 - RNA, 22 nt, Human
ucacuugucauuaguucacagu

SEQ ID NO: 339038 - RNA, 23 nt, Human
uccacaaaacaacgcuaaaccaa

SEQ ID NO: 339039 - RNA, 23 nt, Human
uccugauaucagauguagugcga

SEQ ID NO: 339040 - RNA, 19 nt, Human
ucucuuaaauuuuuugugc

SEQ ID NO: 339041 - RNA, 20 nt, Human
ugaccaagaauguuaaauac

SEQ ID NO: 339042 - RNA, 22 nt, Human
ugacccgcagaaaaaacaaucc

SEQ ID NO: 339043 - RNA, 19 nt, Human
ugagaagggcuuucaggua

SEQ ID NO: 339044 - RNA, 20 nt, Human
uggaagaaaaaaaauaaacu

SEQ ID NO: 339045 - RNA, 22 nt, Human
ugggagauagggucuucaucca

SEQ ID NO: 339046 - RNA, 22 nt, Human
ugggcuuuuauagcuugguuca

SEQ ID NO: 339047 - RNA, 24 nt, Human
ugguguuguacaacuucaucagaa

SEQ ID NO: 339048 - RNA, 22 nt, Human
uguugcugguguuguacaacuu

SEQ ID NO: 339049 - RNA, 19 nt, Human
uucacagugugggaaagug

SEQ ID NO: 339050 - RNA, 20 nt, Human
uucacagugugggaaagugg

SEQ ID NO: 339051 - RNA, 19 nt, Human
uucacggacacaucaacau

SEQ ID NO: 339052 - RNA, 24 nt, Human
uugaauagguauuucaauuaauuu

SEQ ID NO: 339053 - RNA, 18 nt, Human
uuuaaaagaauggagagc

SEQ ID NO: 339054 - RNA, 24 nt, Human
uuucacggacacaucaacaugaag

SEQ ID NO: 339055 - RNA, 22 nt, Human
uuuuaaacauaaaaucucuuaa

SEQ ID NO: 339056 - RNA, 26 nt, Human
uuuuaaggaguauauuaaaggagaua

SEQ ID NO: 339057 - RNA, 18 nt, Human
cagagaguguuccagcuc

SEQ ID NO: 339058 - RNA, 23 nt, Human
ccagggcugaaggcagggccugc

SEQ ID NO: 339059 - RNA, 19 nt, Human
cucucugagauccacugag

SEQ ID NO: 339060 - RNA, 21 nt, Human
cuggggcucucucugagaucc

SEQ ID NO: 339061 - RNA, 21 nt, Human
gggcuggugcaggggucaggg

SEQ ID NO: 339062 - RNA, 22 nt, Human
gggcuggugcaggggucagggc

SEQ ID NO: 339063 - RNA, 21 nt, Human
ucaaagcagggaagggcuggu

SEQ ID NO: 339064 - RNA, 24 nt, Human
ucagagaguguuccagcucugggc

SEQ ID NO: 339065 - RNA, 19 nt, Human
ucugggccagggcugaagg

SEQ ID NO: 339066 - RNA, 24 nt, Human
uguuccagcucugggccagggcug

SEQ ID NO: 339067 - RNA, 20 nt, Human
caggguuccgcugggccugg

SEQ ID NO: 339068 - RNA, 23 nt, Human
caggguuccgcugggccuggggg

SEQ ID NO: 339069 - RNA, 23 nt, Human
cccccgcacuuguuccugccgcg

SEQ ID NO: 339070 - RNA, 21 nt, Human
cccccuccucuucaggguucc

SEQ ID NO: 339071 - RNA, 24 nt, Human
ccccgcacuuguuccugccgcgac

SEQ ID NO: 339072 - RNA, 24 nt, Human
cccgcccuccugcuccucuaggaa

SEQ ID NO: 339073 - RNA, 20 nt, Human
ccgcugggccugggggcggg

SEQ ID NO: 339074 - RNA, 23 nt, Human
ccuccugcuccucuaggaagcca

SEQ ID NO: 339075 - RNA, 23 nt, Human
ccuugccccgcccuccugcuccu

SEQ ID NO: 339076 - RNA, 24 nt, Human
ccuugccccgcccuccugcuccuc

SEQ ID NO: 339077 - RNA, 18 nt, Human
cgcacuuguuccugccgc

SEQ ID NO: 339078 - RNA, 20 nt, Human
cgcgcccggcucacccuccc

SEQ ID NO: 339079 - RNA, 19 nt, Human
cggcucacccucccccucc

SEQ ID NO: 339080 - RNA, 24 nt, Human
cgugacugucacucagcugacaca

SEQ ID NO: 339081 - RNA, 25 nt, Human
gcccggcucacccucccccuccucu

SEQ ID NO: 339082 - RNA, 20 nt, Human
gccugggggcggggcuuuga

SEQ ID NO: 339083 - RNA, 18 nt, Human
gggagacccuugccccgc

SEQ ID NO: 339084 - RNA, 22 nt, Human
gggcggggcuuugaggccccgc

SEQ ID NO: 339085 - RNA, 23 nt, Human
ucacucagcugacacagccgcgc

SEQ ID NO: 339086 - RNA, 20 nt, Human
uccucuucaggguuccgcug

SEQ ID NO: 339087 - RNA, 21 nt, Human
ucgcggucccgugacugucac

SEQ ID NO: 339088 - RNA, 24 nt, Human
ugggagacccuugccccgcccucc

SEQ ID NO: 339089 - RNA, 24 nt, Human
uugccccgcccuccugcuccucua

SEQ ID NO: 339090 - RNA, 22 nt, Human
aaaaaaacaaagagaaaaaccc

SEQ ID NO: 339091 - RNA, 19 nt, Human
aaaaagaaauaaaagaaca

SEQ ID NO: 339092 - RNA, 22 nt, Human
aaaacuccuccggccgcggcac

SEQ ID NO: 339093 - RNA, 24 nt, Human
aaaagcaccuuccucaccggugcg

SEQ ID NO: 339094 - RNA, 22 nt, Human
aaagagaaaaagaaauaaaaga

SEQ ID NO: 339095 - RNA, 21 nt, Human
aacaaagagaaaaacccaaaa

SEQ ID NO: 339096 - RNA, 24 nt, Human
aacaaagagaaaaacccaaaacac

SEQ ID NO: 339097 - RNA, 21 nt, Human
aacuuguuuccuuacccccca

SEQ ID NO: 339098 - RNA, 21 nt, Human
aagaagccacuggaagcuaaa

SEQ ID NO: 339099 - RNA, 18 nt, Human
aagcggcccagcccaaca

SEQ ID NO: 339100 - RNA, 21 nt, Human
aaggaccaaaccgcccgcccc

SEQ ID NO: 339101 - RNA, 24 nt, Human
aauaagagucccugccagaaggaa

SEQ ID NO: 339102 - RNA, 19 nt, Human
acaccacacccucaguccc

SEQ ID NO: 339103 - RNA, 20 nt, Human
acagaggaaagggcuacucu

SEQ ID NO: 339104 - RNA, 21 nt, Human
agaggaaagggcuacucugag

SEQ ID NO: 339105 - RNA, 19 nt, Human
agaugcugauggacuaagc

SEQ ID NO: 339106 - RNA, 18 nt, Human
agauuuuagagacaaacu

SEQ ID NO: 339107 - RNA, 21 nt, Human
agcaaucaccccaucagcaaa

SEQ ID NO: 339108 - RNA, 20 nt, Human
agccugaugccccgcagaaa

SEQ ID NO: 339109 - RNA, 21 nt, Human
agcuuggcuucugaguccagc

SEQ ID NO: 339110 - RNA, 21 nt, Human
aggcagcgcgaccucggcgcg

SEQ ID NO: 339111 - RNA, 22 nt, Human
agggucuuccucccuccgcccu

SEQ ID NO: 339112 - RNA, 21 nt, Human
auggggccaaaagcaccuucc

SEQ ID NO: 339113 - RNA, 19 nt, Human
caaagagaaaaacccaaaa

SEQ ID NO: 339114 - RNA, 18 nt, Human
caacaaaacuccuccggc

SEQ ID NO: 339115 - RNA, 18 nt, Human
caacagccgggauggggc

SEQ ID NO: 339116 - RNA, 24 nt, Human
caagccaggcguucgaggggcugg

SEQ ID NO: 339117 - RNA, 21 nt, Human
cacagcacagggcgaagcaga

SEQ ID NO: 339118 - RNA, 21 nt, Human
cacagggcgaagcagaggcaa

SEQ ID NO: 339119 - RNA, 24 nt, Human
cagaaagaagccacuggaagcuaa

SEQ ID NO: 339120 - RNA, 25 nt, Human
cagaacgcgguaauuucuguaacuu

SEQ ID NO: 339121 - RNA, 28 nt, Human
cagaaugacaccccaagccaggcguucg

SEQ ID NO: 339122 - RNA, 26 nt, Human
cagcacagggacugucgguaccuccu

SEQ ID NO: 339123 - RNA, 23 nt, Human
cagcacagggcgaagcagaggca

SEQ ID NO: 339124 - RNA, 21 nt, Human
cagccugaugccccgcagaaa

SEQ ID NO: 339125 - RNA, 24 nt, Human
caggcguucgaggggcuggggcag

SEQ ID NO: 339126 - RNA, 19 nt, Human
cagugacagccccaggccc

SEQ ID NO: 339127 - RNA, 20 nt, Human
ccaucagcaaaguugccggc

SEQ ID NO: 339128 - RNA, 23 nt, Human
cccagaagcagcaaucaccccau

SEQ ID NO: 339129 - RNA, 19 nt, Human
ccccagaagcagcaaucac

SEQ ID NO: 339130 - RNA, 30 nt, Human
ccccagaagcagcaaucaccccaucagcaa

SEQ ID NO: 339131 - RNA, 25 nt, Human
ccccccagaagcagcaaucaccccc

SEQ ID NO: 339132 - RNA, 19 nt, Human
cccccgggaaaaagccguc

SEQ ID NO: 339133 - RNA, 20 nt, Human
cccccgggaaaaagccguca

SEQ ID NO: 339134 - RNA, 23 nt, Human
ccccgcacgcugcugucuuugca

SEQ ID NO: 339135 - RNA, 24 nt, Human
ccccgcgcgcccggaaaggaccaa

SEQ ID NO: 339136 - RNA, 20 nt, Human
cccgccgccgcgcugaggcc

SEQ ID NO: 339137 - RNA, 22 nt, Human
cccgcgcgcccggaaaggacca

SEQ ID NO: 339138 - RNA, 22 nt, Human
cccggggcucugccccgcacgc

SEQ ID NO: 339139 - RNA, 24 nt, Human
cccuccgcgccucagcuccccucg

SEQ ID NO: 339140 - RNA, 19 nt, Human
cccugcgccgagucuaggc

SEQ ID NO: 339141 - RNA, 18 nt, Human
ccgagccgccgccgcugc

SEQ ID NO: 339142 - RNA, 18 nt, Human
ccgcccuggccgcagccc

SEQ ID NO: 339143 - RNA, 22 nt, Human
ccgccgccgcgcugaggccuag

SEQ ID NO: 339144 - RNA, 19 nt, Human
ccgccgccgcugccgccga

SEQ ID NO: 339145 - RNA, 20 nt, Human
ccgcgggccggccccuccuc

SEQ ID NO: 339146 - RNA, 20 nt, Human
ccggaagaaggggaaaccga

SEQ ID NO: 339147 - RNA, 24 nt, Human
ccuccgcccuggccgcagccccga

SEQ ID NO: 339148 - RNA, 20 nt, Human
ccuccgcgccucagcucccc

SEQ ID NO: 339149 - RNA, 27 nt, Human
ccucuuguccuuccaccaaaucuucca

SEQ ID NO: 339150 - RNA, 21 nt, Human
ccuuaccccccagaagcagca

SEQ ID NO: 339151 - RNA, 21 nt, Human
ccuuccaccaaaucuuccaaa

SEQ ID NO: 339152 - RNA, 20 nt, Human
ccuugguacagugcgccugg

SEQ ID NO: 339153 - RNA, 27 nt, Human
cgcagaaagaagccacuggaagcuaaa

SEQ ID NO: 339154 - RNA, 21 nt, Human
cgccucagcuccccucgaagc

SEQ ID NO: 339155 - RNA, 21 nt, Human
cgcgcgcccggaaaggaccaa

SEQ ID NO: 339156 - RNA, 21 nt, Human
cgcgggccggccccuccuccg

SEQ ID NO: 339157 - RNA, 21 nt, Human
cggaaaggaccaaaccgcccg

SEQ ID NO: 339158 - RNA, 24 nt, Human
cggaaaggaccaaaccgcccgguu

SEQ ID NO: 339159 - RNA, 18 nt, Human
cggccccuccuccgcucc

SEQ ID NO: 339160 - RNA, 23 nt, Human
cggugcaugccucuacgcggccu

SEQ ID NO: 339161 - RNA, 22 nt, Human
cguucgaggggcuggggcagcu

SEQ ID NO: 339162 - RNA, 23 nt, Human
cuaaaaccaacaacaaaacuccc

SEQ ID NO: 339163 - RNA, 18 nt, Human
cucccgcgggccggcccc

SEQ ID NO: 339164 - RNA, 20 nt, Human
cuccgcucccucugcuccuc

SEQ ID NO: 339165 - RNA, 23 nt, Human
cugccaaugacaccacacccuca

SEQ ID NO: 339166 - RNA, 18 nt, Human
cugcuccucgccgccgcg

SEQ ID NO: 339167 - RNA, 19 nt, Human
cugcugcuacaaagcugga

SEQ ID NO: 339168 - RNA, 27 nt, Human
gaaaaaaacaaagagaaaaacccaaaa

SEQ ID NO: 339169 - RNA, 22 nt, Human
gaagcuucucaaaucucccagg

SEQ ID NO: 339170 - RNA, 23 nt, Human
gacaccccaagccaggcguucga

SEQ ID NO: 339171 - RNA, 18 nt, Human
gcaauggggccaaaagca

SEQ ID NO: 339172 - RNA, 21 nt, Human
gcagaaagaagccacuggaag

SEQ ID NO: 339173 - RNA, 20 nt, Human
gccaaggccccucgcaaugg

SEQ ID NO: 339174 - RNA, 24 nt, Human
gccaggcguucgaggggcuggggc

SEQ ID NO: 339175 - RNA, 24 nt, Human
gccgagccgccgccgcugccgccg

SEQ ID NO: 339176 - RNA, 19 nt, Human
gccgcugucgcccccgcgc

SEQ ID NO: 339177 - RNA, 24 nt, Human
gccggccccuccuccgcucccucu

SEQ ID NO: 339178 - RNA, 20 nt, Human
gcggcuaccccagcagccug

SEQ ID NO: 339179 - RNA, 23 nt, Human
gcucccaauuugggcuuucggug

SEQ ID NO: 339180 - RNA, 20 nt, Human
ggaaaggaccaaaccgcccg

SEQ ID NO: 339181 - RNA, 20 nt, Human
ggccagugacagccccaggc

SEQ ID NO: 339182 - RNA, 21 nt, Human
ggccagugacagccccaggcc

SEQ ID NO: 339183 - RNA, 18 nt, Human
ggcccggggcaggggaag

SEQ ID NO: 339184 - RNA, 23 nt, Human
ggcgggaagcagcuuggcuucug

SEQ ID NO: 339185 - RNA, 19 nt, Human
gggacggggacagggacag

SEQ ID NO: 339186 - RNA, 21 nt, Human
gggccagugacagccccaggc

SEQ ID NO: 339187 - RNA, 19 nt, Human
gggcggcuaccccagcagc

SEQ ID NO: 339188 - RNA, 23 nt, Human
ggggcaggggaagcuggaggccu

SEQ ID NO: 339189 - RNA, 18 nt, Human
gguagggcccucgggccg

SEQ ID NO: 339190 - RNA, 18 nt, Human
uaacuuguuuccuuaccc

SEQ ID NO: 339191 - RNA, 19 nt, Human
uacaaagcuggagaacaca

SEQ ID NO: 339192 - RNA, 22 nt, Human
uacccagaauaagaugcugauu

SEQ ID NO: 339193 - RNA, 23 nt, Human
uagagcaaugggaauaaauaaga

SEQ ID NO: 339194 - RNA, 20 nt, Human
ucaaucaaagagaaaaagaa

SEQ ID NO: 339195 - RNA, 21 nt, Human
ucagcaaaguugccggcaggc

SEQ ID NO: 339196 - RNA, 20 nt, Human
uccgcccuggccgcagcccc

SEQ ID NO: 339197 - RNA, 27 nt, Human
uccuccggccgcggcacagguguugcu

SEQ ID NO: 339198 - RNA, 21 nt, Human
ucgaggggcuggggcagcucu

SEQ ID NO: 339199 - RNA, 23 nt, Human
ucgcaauggggccaaaagcaccu

SEQ ID NO: 339200 - RNA, 20 nt, Human
ucgccgccgcgggccagcag

SEQ ID NO: 339201 - RNA, 21 nt, Human
ucucaaaucucccagguccac

SEQ ID NO: 339202 - RNA, 22 nt, Human
ucugccaaugacaccacacccu

SEQ ID NO: 339203 - RNA, 20 nt, Human
ugaccgaaaaucaaaaguua

SEQ ID NO: 339204 - RNA, 24 nt, Human
ugagaugagggucuuccucccucc

SEQ ID NO: 339205 - RNA, 23 nt, Human
ugcgccuggguuugucaaggcug

SEQ ID NO: 339206 - RNA, 23 nt, Human
ugcucgggcacagaaaugcgaag

SEQ ID NO: 339207 - RNA, 18 nt, Human
uggaaaacagguauccgu

SEQ ID NO: 339208 - RNA, 22 nt, Human
uggaaaacagguauccguuuau

SEQ ID NO: 339209 - RNA, 20 nt, Human
uggagaacacagcacagggc

SEQ ID NO: 339210 - RNA, 22 nt, Human
uggccgccaggcagaaugacac

SEQ ID NO: 339211 - RNA, 20 nt, Human
uggccugugcguccccgucu

SEQ ID NO: 339212 - RNA, 19 nt, Human
uggggacggggacagggac

SEQ ID NO: 339213 - RNA, 20 nt, Human
uggggacggggacagggaca

SEQ ID NO: 339214 - RNA, 18 nt, Human
ugucuaaccagcacaggg

SEQ ID NO: 339215 - RNA, 18 nt, Human
uguucggaucagggccag

SEQ ID NO: 339216 - RNA, 19 nt, Human
uucuucaguacuccuuuaa

SEQ ID NO: 339217 - RNA, 28 nt, Human
uugaaaaaaacaaagagaaaaacccaaa

SEQ ID NO: 339218 - RNA, 21 nt, Human
uuuagagacaaacuuaggaaa

SEQ ID NO: 339219 - RNA, 23 nt, Human
uuucuguaacuuguuuccuuacc

SEQ ID NO: 339220 - RNA, 19 nt, Human
acuguguuggaccaaaaua

SEQ ID NO: 339221 - RNA, 18 nt, Human
agcagcagcggcggcggc

SEQ ID NO: 339222 - RNA, 30 nt, Human
agcagcggcggcggcccggagccacagccc

SEQ ID NO: 339223 - RNA, 24 nt, Human
caaaacauucaaaagaaagaucuu

SEQ ID NO: 339224 - RNA, 24 nt, Human
caaaagaaagaucuuggcagacaa

SEQ ID NO: 339225 - RNA, 19 nt, Human
caccaccgccgccgccacc

SEQ ID NO: 339226 - RNA, 26 nt, Human
caccaccgccgccgccaccaccaccc

SEQ ID NO: 339227 - RNA, 18 nt, Human
cagcagcggcggcggccc

SEQ ID NO: 339228 - RNA, 25 nt, Human
cagcggcggcggcccggagccacag

SEQ ID NO: 339229 - RNA, 21 nt, Human
ccaacccgcuuugcaccacac

SEQ ID NO: 339230 - RNA, 21 nt, Human
ccaccaccacccccacgcccc

SEQ ID NO: 339231 - RNA, 22 nt, Human
ccaccaccacccccacgccccg

SEQ ID NO: 339232 - RNA, 21 nt, Human
cccgcagcugccgcgcggccg

SEQ ID NO: 339233 - RNA, 21 nt, Human
cccgcccgccgcugccgcugc

SEQ ID NO: 339234 - RNA, 21 nt, Human
ccgccaccaccgccgccgcca

SEQ ID NO: 339235 - RNA, 18 nt, Human
ccgccgccaccaccaccc

SEQ ID NO: 339236 - RNA, 24 nt, Human
ccgccgccaccaccacccccacgc

SEQ ID NO: 339237 - RNA, 20 nt, Human
ccgccgccaccaccgccgcc

SEQ ID NO: 339238 - RNA, 23 nt, Human
ccgccgccaccaccgccgccgcc

SEQ ID NO: 339239 - RNA, 23 nt, Human
ccgccgccgccaccaccgccgcc

SEQ ID NO: 339240 - RNA, 24 nt, Human
ccgccgccgccgccaccaccgccg

SEQ ID NO: 339241 - RNA, 18 nt, Human
ccgccgccgccgccgccg

SEQ ID NO: 339242 - RNA, 24 nt, Human
ccgccgccgccgccgccgcugccg

SEQ ID NO: 339243 - RNA, 26 nt, Human
ccgccgccgccgccgccgcugccgcc

SEQ ID NO: 339244 - RNA, 27 nt, Human
ccgccgccgccgccgccgcugccgccu

SEQ ID NO: 339245 - RNA, 18 nt, Human
ccgccgccgccgcugccg

SEQ ID NO: 339246 - RNA, 21 nt, Human
ccgccgccgcugccgccucca

SEQ ID NO: 339247 - RNA, 18 nt, Human
ccgccgcugccgcugccg

SEQ ID NO: 339248 - RNA, 18 nt, Human
ccgcugccgccgccgccg

SEQ ID NO: 339249 - RNA, 24 nt, Human
ccgcugccgccgccgccgccgccg

SEQ ID NO: 339250 - RNA, 18 nt, Human
ccgcugccgcugccgccg

SEQ ID NO: 339251 - RNA, 21 nt, Human
ccgcugccgcugccgccgccg

SEQ ID NO: 339252 - RNA, 24 nt, Human
ccgcugccgcugccgccgccgccg

SEQ ID NO: 339253 - RNA, 20 nt, Human
ccgcugccgcugccgcugcc

SEQ ID NO: 339254 - RNA, 24 nt, Human
cgaggcagaggcaauucacauuua

SEQ ID NO: 339255 - RNA, 20 nt, Human
cgccacagccaccgccuccu

SEQ ID NO: 339256 - RNA, 21 nt, Human
cgcgaagagcucggaguagca

SEQ ID NO: 339257 - RNA, 25 nt, Human
cucagcagcagcggcggcggcccuu

SEQ ID NO: 339258 - RNA, 21 nt, Human
cugccgccgccgccgccgccg

SEQ ID NO: 339259 - RNA, 19 nt, Human
cugccgcugccgccgccgc

SEQ ID NO: 339260 - RNA, 21 nt, Human
gcagcaauuaauuucagggca

SEQ ID NO: 339261 - RNA, 22 nt, Human
gcagcagcggcggcggcccgga

SEQ ID NO: 339262 - RNA, 25 nt, Human
gcagcagcggcggcggcccggagcc

SEQ ID NO: 339263 - RNA, 20 nt, Human
gccgccgccgccgccgccgc

SEQ ID NO: 339264 - RNA, 22 nt, Human
gccgcugccgccgccgccgccg

SEQ ID NO: 339265 - RNA, 22 nt, Human
gccgcugccgcugccgccgccg

SEQ ID NO: 339266 - RNA, 22 nt, Human
gcugccgccgccgccgccgccg

SEQ ID NO: 339267 - RNA, 18 nt, Human
ggcccagacccggggccc

SEQ ID NO: 339268 - RNA, 21 nt, Human
ggccggcggccgcaguggccg

SEQ ID NO: 339269 - RNA, 23 nt, Human
ggccggcggccgcaguggccgug

SEQ ID NO: 339270 - RNA, 24 nt, Human
ggccggcggccgcaguggccgugc

SEQ ID NO: 339271 - RNA, 22 nt, Human
gugcagcgucucggcgggcagc

SEQ ID NO: 339272 - RNA, 23 nt, Human
gugcagcgucucggcgggcagcu

SEQ ID NO: 339273 - RNA, 19 nt, Human
ucaaaagaaagaucuuggc

SEQ ID NO: 339274 - RNA, 23 nt, Human
ucaaaagaaagaucuuggcagac

SEQ ID NO: 339275 - RNA, 26 nt, Human
ucagcagcagcggcggcggcccggag

SEQ ID NO: 339276 - RNA, 19 nt, Human
ucccuagcuggggugcugc

SEQ ID NO: 339277 - RNA, 18 nt, Human
uccgccacagccaccgcc

SEQ ID NO: 339278 - RNA, 25 nt, Human
ucggccucagcugccgccgccgccg

SEQ ID NO: 339279 - RNA, 29 nt, Human
ucggccucagcugccgccgccgccgccgg

SEQ ID NO: 339280 - RNA, 20 nt, Human
ucuggugcagcgucucggcg

SEQ ID NO: 339281 - RNA, 20 nt, Human
ucuuggcagacaaggucacc

SEQ ID NO: 339282 - RNA, 26 nt, Human
ugcccgaaacaggucagccacggggg

SEQ ID NO: 339283 - RNA, 21 nt, Human
ugcucacagcuuuugacacag

SEQ ID NO: 339284 - RNA, 23 nt, Human
uggaccaaaauaaccaacccgcu

SEQ ID NO: 339285 - RNA, 22 nt, Human
uuuaauacucucuauccguacc

SEQ ID NO: 339286 - RNA, 23 nt, Human
uuuugcugcucacagcuuuugac

SEQ ID NO: 339287 - RNA, 21 nt, Human
aaaaaacaggcacauuaucca

SEQ ID NO: 339288 - RNA, 21 nt, Human
aaagacaccucaacuccaaag

SEQ ID NO: 339289 - RNA, 21 nt, Human
aauacaggaacuaaagaaaga

SEQ ID NO: 339290 - RNA, 24 nt, Human
accguaagagugagccaggagagc

SEQ ID NO: 339291 - RNA, 20 nt, Human
acuccaggguguccuggcau

SEQ ID NO: 339292 - RNA, 20 nt, Human
agaaaaagaaaagacaccuc

SEQ ID NO: 339293 - RNA, 21 nt, Human
agaaaacuugaggaaucaggg

SEQ ID NO: 339294 - RNA, 22 nt, Human
agaacauccugacuccagaaaa

SEQ ID NO: 339295 - RNA, 19 nt, Human
agagguggucagagcugcc

SEQ ID NO: 339296 - RNA, 23 nt, Human
agaugagaaauuccaaggguggg

SEQ ID NO: 339297 - RNA, 22 nt, Human
agcaggaacacagggccgcaga

SEQ ID NO: 339298 - RNA, 19 nt, Human
aggaagaacaaaaagggga

SEQ ID NO: 339299 - RNA, 23 nt, Human
aggaagaacaaaaaggggauuuu

SEQ ID NO: 339300 - RNA, 23 nt, Human
aggaagggaggcagaagaugaga

SEQ ID NO: 339301 - RNA, 24 nt, Human
aggaggaagaagggaaagaugggu

SEQ ID NO: 339302 - RNA, 18 nt, Human
aggcagaacacagagaaa

SEQ ID NO: 339303 - RNA, 25 nt, Human
aggcagaagaugagaaauuccaagg

SEQ ID NO: 339304 - RNA, 18 nt, Human
aggcaggcuggcacaacc

SEQ ID NO: 339305 - RNA, 20 nt, Human
aggcaggcuggcacaaccac

SEQ ID NO: 339306 - RNA, 26 nt, Human
aucuccuuguggcccccgagcugcug

SEQ ID NO: 339307 - RNA, 23 nt, Human
cacagggccgcagagagccacuc

SEQ ID NO: 339308 - RNA, 25 nt, Human
caccucagcuugcagcugccaaagg

SEQ ID NO: 339309 - RNA, 19 nt, Human
cacucuguagcaggaacac

SEQ ID NO: 339310 - RNA, 22 nt, Human
cagaaaagaacacucuguagca

SEQ ID NO: 339311 - RNA, 20 nt, Human
cagaacacagagaagugagc

SEQ ID NO: 339312 - RNA, 18 nt, Human
cagcucccuggccuggcu

SEQ ID NO: 339313 - RNA, 27 nt, Human
caggaacacagggccgcagagagccac

SEQ ID NO: 339314 - RNA, 19 nt, Human
caggaagaacaaaaagggg

SEQ ID NO: 339315 - RNA, 23 nt, Human
caggcacauuauccaucuccuug

SEQ ID NO: 339316 - RNA, 31 nt, Human
ccagaaaagaacacucuguagcaggaacaac

SEQ ID NO: 339317 - RNA, 30 nt, Human
cccacaaaaccaaaaggaguaggaagggag

SEQ ID NO: 339318 - RNA, 23 nt, Human
cccccgagcugcuggccuggccc

SEQ ID NO: 339319 - RNA, 25 nt, Human
cccccugauccuuccccucucccca

SEQ ID NO: 339320 - RNA, 23 nt, Human
ccccgagcugcuggccuggcccc

SEQ ID NO: 339321 - RNA, 22 nt, Human
ccccucuccccacaaaaccaaa

SEQ ID NO: 339322 - RNA, 21 nt, Human
ccugauccuuccccucucccc

SEQ ID NO: 339323 - RNA, 19 nt, Human
ccugcccacggccaagggg

SEQ ID NO: 339324 - RNA, 23 nt, Human
cgccuaggggcaguguguugcuc

SEQ ID NO: 339325 - RNA, 22 nt, Human
cgcucccagcucccuggccugg

SEQ ID NO: 339326 - RNA, 20 nt, Human
cuaaagaaagaaaaagaaaa

SEQ ID NO: 339327 - RNA, 22 nt, Human
cuccuuucucccugagggccug

SEQ ID NO: 339328 - RNA, 21 nt, Human
cucuagaggacaggaaaacuc

SEQ ID NO: 339329 - RNA, 19 nt, Human
cucuccccacaaaaccaaa

SEQ ID NO: 339330 - RNA, 18 nt, Human
cugccaaaggcaggcugg

SEQ ID NO: 339331 - RNA, 20 nt, Human
cuggcccccugauccuuccc

SEQ ID NO: 339332 - RNA, 24 nt, Human
gaaacagccuuagauaugucgggg

SEQ ID NO: 339333 - RNA, 21 nt, Human
gaacauccugacuccagaaaa

SEQ ID NO: 339334 - RNA, 20 nt, Human
gaaguggaggagagaaacag

SEQ ID NO: 339335 - RNA, 18 nt, Human
gacacuguuugaacccug

SEQ ID NO: 339336 - RNA, 24 nt, Human
gaggagagaaacagccuuagauau

SEQ ID NO: 339337 - RNA, 18 nt, Human
gaguaggaagggaggcag

SEQ ID NO: 339338 - RNA, 20 nt, Human
gauccuuccccucuccccac

SEQ ID NO: 339339 - RNA, 21 nt, Human
gcagaacacagagaagugagc

SEQ ID NO: 339340 - RNA, 21 nt, Human
gcagagagaaacugggccaca

SEQ ID NO: 339341 - RNA, 22 nt, Human
gcucccuggccuggcuugccuc

SEQ ID NO: 339342 - RNA, 22 nt, Human
ggccagagguggucagagcugc

SEQ ID NO: 339343 - RNA, 27 nt, Human
gggaauaacaaggugaagccgguaccc

SEQ ID NO: 339344 - RNA, 19 nt, Human
gggcccaaggcaagcagag

SEQ ID NO: 339345 - RNA, 21 nt, Human
guggccucagcuugcucgcuc

SEQ ID NO: 339346 - RNA, 18 nt, Human
uaaaaaacaggcacauua

SEQ ID NO: 339347 - RNA, 24 nt, Human
uaauggagagcagagagaaacugg

SEQ ID NO: 339348 - RNA, 25 nt, Human
uacaggaacuaaagaaagaaaaaga

SEQ ID NO: 339349 - RNA, 21 nt, Human
uagcaggaacacagggccgca

SEQ ID NO: 339350 - RNA, 22 nt, Human
uaggaagggaggcagaagauga

SEQ ID NO: 339351 - RNA, 21 nt, Human
ucaccaggggcugggcccaag

SEQ ID NO: 339352 - RNA, 18 nt, Human
ucagagcugccaccucag

SEQ ID NO: 339353 - RNA, 22 nt, Human
ucagagcugccaccucagcuug

SEQ ID NO: 339354 - RNA, 18 nt, Human
ucaguuaagagcaggagg

SEQ ID NO: 339355 - RNA, 21 nt, Human
ucccugagggccuggggccag

SEQ ID NO: 339356 - RNA, 21 nt, Human
ucccuggccuggcuugccucu

SEQ ID NO: 339357 - RNA, 20 nt, Human
ucgcucccagcucccuggcc

SEQ ID NO: 339358 - RNA, 22 nt, Human
ucucccugagggccuggggcca

SEQ ID NO: 339359 - RNA, 24 nt, Human
ugaaggagaggaggaagaagggaa

SEQ ID NO: 339360 - RNA, 19 nt, Human
ugacuccagaaaagaacac

SEQ ID NO: 339361 - RNA, 19 nt, Human
ugaggaaucagggugugaa

SEQ ID NO: 339362 - RNA, 23 nt, Human
ugaggcuaugcggcacaggggca

SEQ ID NO: 339363 - RNA, 24 nt, Human
ugagggccuggggccagagguggu

SEQ ID NO: 339364 - RNA, 19 nt, Human
ugcuagcgagcgugcaagg

SEQ ID NO: 339365 - RNA, 20 nt, Human
uggaggaaagaggugaggcu

SEQ ID NO: 339366 - RNA, 18 nt, Human
uggagguaggcuuuuuug

SEQ ID NO: 339367 - RNA, 21 nt, Human
uggagguaggcuuuuuuguug

SEQ ID NO: 339368 - RNA, 21 nt, Human
uggcacaaccaccccaagguu

SEQ ID NO: 339369 - RNA, 21 nt, Human
uggcccccgagcugcuggccu

SEQ ID NO: 339370 - RNA, 21 nt, Human
uggcccccugauccuuccccu

SEQ ID NO: 339371 - RNA, 19 nt, Human
ugggguggaaugggacagg

SEQ ID NO: 339372 - RNA, 19 nt, Human
ugucggggagcaggugggu

SEQ ID NO: 339373 - RNA, 18 nt, Human
ugucuauguggcuucccc

SEQ ID NO: 339374 - RNA, 21 nt, Human
uuacuaauguuuagaauacag

SEQ ID NO: 339375 - RNA, 20 nt, Human
uucuaggaggacacuguuug

SEQ ID NO: 339376 - RNA, 20 nt, Human
uugcagcugccaaaggcagg

SEQ ID NO: 339377 - RNA, 22 nt, Human
aaaaaaauuacaaaauacucaa

SEQ ID NO: 339378 - RNA, 21 nt, Human
aaaacuaaagccaaaccccaa

SEQ ID NO: 339379 - RNA, 21 nt, Human
aaaacuagaaacauuuucaac

SEQ ID NO: 339380 - RNA, 20 nt, Human
aaaauacaggcugcccccaa

SEQ ID NO: 339381 - RNA, 24 nt, Human
aaacagaacagugacacuggagaa

SEQ ID NO: 339382 - RNA, 21 nt, Human
aaacaggcugaagcucuccac

SEQ ID NO: 339383 - RNA, 20 nt, Human
aaaccaaaccccgaacaaag

SEQ ID NO: 339384 - RNA, 22 nt, Human
aaacuaaagccaaaccccaaga

SEQ ID NO: 339385 - RNA, 23 nt, Human
aaagguucaugucagcuuugccu

SEQ ID NO: 339386 - RNA, 21 nt, Human
aaccaaaccccgaacaaaggg

SEQ ID NO: 339387 - RNA, 24 nt, Human
aagaaaaaaaggcuguucuaaaaa

SEQ ID NO: 339388 - RNA, 21 nt, Human
aagcaaagcuaacaagaaugc

SEQ ID NO: 339389 - RNA, 21 nt, Human
aagcuaacaagaaugccuucg

SEQ ID NO: 339390 - RNA, 21 nt, Human
aagcucuccacaaaucuucuc

SEQ ID NO: 339391 - RNA, 25 nt, Human
aauccaaccacuccaacaaccccaa

SEQ ID NO: 339392 - RNA, 21 nt, Human
acaaagggaggaaaauccgaa

SEQ ID NO: 339393 - RNA, 18 nt, Human
acaagccugccaugaggg

SEQ ID NO: 339394 - RNA, 21 nt, Human
acacagaggagccaaaccaaa

SEQ ID NO: 339395 - RNA, 21 nt, Human
acaccaugaaggucagggccu

SEQ ID NO: 339396 - RNA, 22 nt, Human
acagugaagggugugaacugga

SEQ ID NO: 339397 - RNA, 24 nt, Human
accaaaaagaaagaaaaaccagaa

SEQ ID NO: 339398 - RNA, 19 nt, Human
accacaagauccaagugac

SEQ ID NO: 339399 - RNA, 28 nt, Human
accauaaacaggcugaagcucuccacaa

SEQ ID NO: 339400 - RNA, 21 nt, Human
accccaagauugcagggaagc

SEQ ID NO: 339401 - RNA, 24 nt, Human
accccagaacacccgcccucagcc

SEQ ID NO: 339402 - RNA, 23 nt, Human
accgagugguugggcuucaaaga

SEQ ID NO: 339403 - RNA, 21 nt, Human
acgcggaggggcugagggggc

SEQ ID NO: 339404 - RNA, 22 nt, Human
acuuccaggaugaagaguggga

SEQ ID NO: 339405 - RNA, 19 nt, Human
agaaaagcaaagcuaacaa

SEQ ID NO: 339406 - RNA, 26 nt, Human
agaaagauggggccguccucaccaca

SEQ ID NO: 339407 - RNA, 22 nt, Human
agaaagugaacauucaccuccu

SEQ ID NO: 339408 - RNA, 25 nt, Human
agaacaaucaaguguguguacacag

SEQ ID NO: 339409 - RNA, 20 nt, Human
agaaggaaaucuacaaugga

SEQ ID NO: 339410 - RNA, 22 nt, Human
agacaaaacaagccuaucccaa

SEQ ID NO: 339411 - RNA, 21 nt, Human
agacguaaaaagccaugcugc

SEQ ID NO: 339412 - RNA, 18 nt, Human
agaggacucgacucuucu

SEQ ID NO: 339413 - RNA, 19 nt, Human
agaggggcggcccgcgggg

SEQ ID NO: 339414 - RNA, 18 nt, Human
agcacagaccucagagga

SEQ ID NO: 339415 - RNA, 22 nt, Human
agccaaaccaaaccccgaacaa

SEQ ID NO: 339416 - RNA, 21 nt, Human
agccugggcuucagucuucug

SEQ ID NO: 339417 - RNA, 23 nt, Human
agcucuccacaaaucuucucugu

SEQ ID NO: 339418 - RNA, 19 nt, Human
aggaaaauccgaaggaaac

SEQ ID NO: 339419 - RNA, 19 nt, Human
aggacaccgaacaagauac

SEQ ID NO: 339420 - RNA, 19 nt, Human
aggcagaaaacagagucug

SEQ ID NO: 339421 - RNA, 25 nt, Human
aggcagaaaacagagucuguaacau

SEQ ID NO: 339422 - RNA, 21 nt, Human
aggcugcccccaacaccuguc

SEQ ID NO: 339423 - RNA, 23 nt, Human
agggcgagggggcucccugagga

SEQ ID NO: 339424 - RNA, 21 nt, Human
agggggcucccugaggaugau

SEQ ID NO: 339425 - RNA, 23 nt, Human
aguggcggggauggggcgggagg

SEQ ID NO: 339426 - RNA, 21 nt, Human
auaaacaggcugaagcucucc

SEQ ID NO: 339427 - RNA, 19 nt, Human
auacaguuacuccuagaca

SEQ ID NO: 339428 - RNA, 22 nt, Human
aucccaacugaaaccaaacacg

SEQ ID NO: 339429 - RNA, 21 nt, Human
aucuucucuguaaguggaucc

SEQ ID NO: 339430 - RNA, 23 nt, Human
caaaacaagccuaucccaacuga

SEQ ID NO: 339431 - RNA, 19 nt, Human
caaaauacucaaauggaga

SEQ ID NO: 339432 - RNA, 22 nt, Human
caaaauacucaaauggagagaa

SEQ ID NO: 339433 - RNA, 21 nt, Human
caaaauggaagaggucugaug

SEQ ID NO: 339434 - RNA, 19 nt, Human
caaaccaaaccccgaacaa

SEQ ID NO: 339435 - RNA, 19 nt, Human
caaaccccgaacaaaggga

SEQ ID NO: 339436 - RNA, 21 nt, Human
caaaccccgaacaaagggagg

SEQ ID NO: 339437 - RNA, 27 nt, Human
caaauggagagaacacagaagucacga

SEQ ID NO: 339438 - RNA, 18 nt, Human
caagaaagauggggccgu

SEQ ID NO: 339439 - RNA, 25 nt, Human
caagugacaaugcgcaugagaaggc

SEQ ID NO: 339440 - RNA, 19 nt, Human
cacagcaugcuuucugaau

SEQ ID NO: 339441 - RNA, 19 nt, Human
cacaggcuaggagcagaca

SEQ ID NO: 339442 - RNA, 20 nt, Human
cacaggcuaggagcagacac

SEQ ID NO: 339443 - RNA, 22 nt, Human
cacaggcuaggagcagacacaa

SEQ ID NO: 339444 - RNA, 20 nt, Human
cacuccaacaaccccaacgu

SEQ ID NO: 339445 - RNA, 19 nt, Human
cacugugggugggacucca

SEQ ID NO: 339446 - RNA, 27 nt, Human
cagaacagugacacuggagaacagaag

SEQ ID NO: 339447 - RNA, 24 nt, Human
cagcacaauggcagaagagaccuc

SEQ ID NO: 339448 - RNA, 19 nt, Human
cagggaaaauccaaccacu

SEQ ID NO: 339449 - RNA, 25 nt, Human
caucaauagugagguguucgcggcc

SEQ ID NO: 339450 - RNA, 25 nt, Human
cauggcaaacuacucauauauacau

SEQ ID NO: 339451 - RNA, 20 nt, Human
ccaaaaagaaagaaaaacca

SEQ ID NO: 339452 - RNA, 21 nt, Human
ccaaaccaaaccccgaacaaa

SEQ ID NO: 339453 - RNA, 22 nt, Human
ccaaaccccaagauugcaggga

SEQ ID NO: 339454 - RNA, 18 nt, Human
ccacaauuccuuucucag

SEQ ID NO: 339455 - RNA, 27 nt, Human
ccauccagaauuauaucaaauggccac

SEQ ID NO: 339456 - RNA, 23 nt, Human
cccacggugguugugacccgugc

SEQ ID NO: 339457 - RNA, 19 nt, Human
cccagaaggaaacgaaugc

SEQ ID NO: 339458 - RNA, 22 nt, Human
cccccaagaacugggguuucca

SEQ ID NO: 339459 - RNA, 21 nt, Human
ccccuaaagcgcuacaccauc

SEQ ID NO: 339460 - RNA, 25 nt, Human
cccgcggggaggcgacgcggagggg

SEQ ID NO: 339461 - RNA, 22 nt, Human
cccgugcugagcgcacauacag

SEQ ID NO: 339462 - RNA, 20 nt, Human
cccugccgugaccuuuccug

SEQ ID NO: 339463 - RNA, 19 nt, Human
ccuccuccucggucgggca

SEQ ID NO: 339464 - RNA, 22 nt, Human
ccuccugcacucccugugcaaa

SEQ ID NO: 339465 - RNA, 22 nt, Human
ccucugccgcaguggagugaag

SEQ ID NO: 339466 - RNA, 19 nt, Human
ccugcgacuugaaccuagg

SEQ ID NO: 339467 - RNA, 18 nt, Human
cgacagagggcagacacc

SEQ ID NO: 339468 - RNA, 28 nt, Human
cgaggacaccgaacaagauuggagaccc

SEQ ID NO: 339469 - RNA, 19 nt, Human
cgcggaggcugcggggccg

SEQ ID NO: 339470 - RNA, 20 nt, Human
cgcggggcgcagggccgaga

SEQ ID NO: 339471 - RNA, 21 nt, Human
cgggaggccgcgcggaggcug

SEQ ID NO: 339472 - RNA, 22 nt, Human
cuaaagcgcuacaccaucaaua

SEQ ID NO: 339473 - RNA, 24 nt, Human
cuaucccaacugaaaccaaacacg

SEQ ID NO: 339474 - RNA, 19 nt, Human
cucgugggcucuggagcac

SEQ ID NO: 339475 - RNA, 18 nt, Human
cucuccacaaaucuucuc

SEQ ID NO: 339476 - RNA, 24 nt, Human
cucuccacaaaucuucucuguaag

SEQ ID NO: 339477 - RNA, 23 nt, Human
cugcccccaacaccugucuuaac

SEQ ID NO: 339478 - RNA, 26 nt, Human
cugcggggccgcggggcgcagggccg

SEQ ID NO: 339479 - RNA, 21 nt, Human
cuuucagaagcaggagcccag

SEQ ID NO: 339480 - RNA, 25 nt, Human
cuuuguguccgccgacccagugugg

SEQ ID NO: 339481 - RNA, 25 nt, Human
gaaaacuaaagccaaaccccaagau

SEQ ID NO: 339482 - RNA, 21 nt, Human
gaaacgccaggcagaaaacag

SEQ ID NO: 339483 - RNA, 21 nt, Human
gaaccugaauuugagccagua

SEQ ID NO: 339484 - RNA, 18 nt, Human
gaaugcacuguggguggg

SEQ ID NO: 339485 - RNA, 20 nt, Human
gagccaaaccaaaccccgaa

SEQ ID NO: 339486 - RNA, 21 nt, Human
gauugcagggaagcuuucugg

SEQ ID NO: 339487 - RNA, 22 nt, Human
gcagaaaacagagucuguaaca

SEQ ID NO: 339488 - RNA, 19 nt, Human
gcagacaccccagaacacc

SEQ ID NO: 339489 - RNA, 22 nt, Human
gcaggaagaggccucgcucaga

SEQ ID NO: 339490 - RNA, 18 nt, Human
gcagggaagcuuucugga

SEQ ID NO: 339491 - RNA, 20 nt, Human
gccgugaccuuuccugcgac

SEQ ID NO: 339492 - RNA, 26 nt, Human
gccugaagucccacgacaaaagguuc

SEQ ID NO: 339493 - RNA, 18 nt, Human
gccuggaaacgagggcag

SEQ ID NO: 339494 - RNA, 19 nt, Human
gcugcuggcagagcacagg

SEQ ID NO: 339495 - RNA, 18 nt, Human
gcuuugccucccugugaa

SEQ ID NO: 339496 - RNA, 22 nt, Human
ggaaaagaaaacuaaagccaaa

SEQ ID NO: 339497 - RNA, 22 nt, Human
ggaccagcacaauggcagaaga

SEQ ID NO: 339498 - RNA, 18 nt, Human
ggagugugucaguguguc

SEQ ID NO: 339499 - RNA, 21 nt, Human
ggaugaagagugggacucaaa

SEQ ID NO: 339500 - RNA, 22 nt, Human
ggaugcucgcugcugugaccag

SEQ ID NO: 339501 - RNA, 22 nt, Human
ggcggggauggggcgggaggcc

SEQ ID NO: 339502 - RNA, 27 nt, Human
gggaaaauccaaccacuccaacaaccc

SEQ ID NO: 339503 - RNA, 24 nt, Human
gggaccagcacaauggcagaagag

SEQ ID NO: 339504 - RNA, 21 nt, Human
gggaggcgacgcggaggggcu

SEQ ID NO: 339505 - RNA, 19 nt, Human
guaaaauacaggcugcccc

SEQ ID NO: 339506 - RNA, 19 nt, Human
gucacuugugugcugaguu

SEQ ID NO: 339507 - RNA, 23 nt, Human
gugaaacgccaggcagaaaacag

SEQ ID NO: 339508 - RNA, 21 nt, Human
gugaaacgccccuuugcuccc

SEQ ID NO: 339509 - RNA, 22 nt, Human
uaaaaaagacauucauccagaa

SEQ ID NO: 339510 - RNA, 21 nt, Human
uaaaaagccaugcugcagaac

SEQ ID NO: 339511 - RNA, 22 nt, Human
uaacaccauaaacaggcugaaa

SEQ ID NO: 339512 - RNA, 24 nt, Human
uaacaucgucccugcaaacccugg

SEQ ID NO: 339513 - RNA, 19 nt, Human
uaacuccaggaucucccuu

SEQ ID NO: 339514 - RNA, 24 nt, Human
uagaaggaaaucuacaauggacac

SEQ ID NO: 339515 - RNA, 23 nt, Human
uagcucuuggauuccaaauuccu

SEQ ID NO: 339516 - RNA, 21 nt, Human
uaggguaaaauacaggcugcc

SEQ ID NO: 339517 - RNA, 20 nt, Human
uauggaagaaaaaaaggcug

SEQ ID NO: 339518 - RNA, 20 nt, Human
uauggaagaaaaaaaggcuu

SEQ ID NO: 339519 - RNA, 24 nt, Human
ucaaagacaccaugaaggucaggg

SEQ ID NO: 339520 - RNA, 18 nt, Human
ucaacagacaaaacaagc

SEQ ID NO: 339521 - RNA, 19 nt, Human
ucaacagacaaaacaagcc

SEQ ID NO: 339522 - RNA, 18 nt, Human
ucaagccaauguggccug

SEQ ID NO: 339523 - RNA, 21 nt, Human
ucacgauuucugggugucuac

SEQ ID NO: 339524 - RNA, 22 nt, Human
ucagcaacucuuccugcucccu

SEQ ID NO: 339525 - RNA, 22 nt, Human
uccaaauuccuaugcccccgau

SEQ ID NO: 339526 - RNA, 23 nt, Human
uccaaccacuccaacaaccccaa

SEQ ID NO: 339527 - RNA, 19 nt, Human
uccaggaucucccuugcuc

SEQ ID NO: 339528 - RNA, 18 nt, Human
uccuggauggacuuugug

SEQ ID NO: 339529 - RNA, 19 nt, Human
uccugggucacuugugugc

SEQ ID NO: 339530 - RNA, 20 nt, Human
ucgccacgugccuucuucug

SEQ ID NO: 339531 - RNA, 19 nt, Human
ucuacaauggacacaggcc

SEQ ID NO: 339532 - RNA, 23 nt, Human
ucuagaaggaaaucuacaaugga

SEQ ID NO: 339533 - RNA, 19 nt, Human
ucucauggcaaacuacucu

SEQ ID NO: 339534 - RNA, 22 nt, Human
ucugauggagcagaugucugug

SEQ ID NO: 339535 - RNA, 18 nt, Human
ucugcaagccucgugggc

SEQ ID NO: 339536 - RNA, 24 nt, Human
ucugcaagccucgugggcucugga

SEQ ID NO: 339537 - RNA, 20 nt, Human
ucugcacgcacagugaaggg

SEQ ID NO: 339538 - RNA, 24 nt, Human
ucuggauguucaguccaguccagg

SEQ ID NO: 339539 - RNA, 18 nt, Human
ucugguuuuguuuuccga

SEQ ID NO: 339540 - RNA, 22 nt, Human
ucuguggcaagaaagauggggc

SEQ ID NO: 339541 - RNA, 24 nt, Human
ucuucugaauuucucacucaauuc

SEQ ID NO: 339542 - RNA, 22 nt, Human
ucuucuguccucucacggcuaa

SEQ ID NO: 339543 - RNA, 26 nt, Human
ugaaagaaaaaaaacuagaaacauuu

SEQ ID NO: 339544 - RNA, 21 nt, Human
ugacacuggagaacagaaagu

SEQ ID NO: 339545 - RNA, 21 nt, Human
ugagaaaucaaggaaaagaaa

SEQ ID NO: 339546 - RNA, 23 nt, Human
ugagaagcagcccccacacagca

SEQ ID NO: 339547 - RNA, 19 nt, Human
ugagagaaaaggaucggaa

SEQ ID NO: 339548 - RNA, 23 nt, Human
ugagagaaaaggaucggaagagg

SEQ ID NO: 339549 - RNA, 19 nt, Human
ugaggguuucgggucgagg

SEQ ID NO: 339550 - RNA, 23 nt, Human
ugccaugagggccuguccccacc

SEQ ID NO: 339551 - RNA, 25 nt, Human
ugccaugagggccuguccccacccc

SEQ ID NO: 339552 - RNA, 21 nt, Human
ugcggggccgcggggcgcagg

SEQ ID NO: 339553 - RNA, 21 nt, Human
uggaaaaauggaugccaaagg

SEQ ID NO: 339554 - RNA, 20 nt, Human
uggaaacagaacagugacac

SEQ ID NO: 339555 - RNA, 22 nt, Human
uggaaucauuuucuuagaugau

SEQ ID NO: 339556 - RNA, 20 nt, Human
uggacacaggcccaugcgcu

SEQ ID NO: 339557 - RNA, 24 nt, Human
uggauuccaaauuccuaugccccc

SEQ ID NO: 339558 - RNA, 22 nt, Human
uggcaggaagcagggccgacag

SEQ ID NO: 339559 - RNA, 21 nt, Human
uggccacaauuccuuucucag

SEQ ID NO: 339560 - RNA, 23 nt, Human
uggccuccugagaagcagccccc

SEQ ID NO: 339561 - RNA, 23 nt, Human
uggcuggaaaaaauagaucacaa

SEQ ID NO: 339562 - RNA, 18 nt, Human
ugggaccagcacaauggc

SEQ ID NO: 339563 - RNA, 21 nt, Human
ugggagaaagugcguuacggc

SEQ ID NO: 339564 - RNA, 23 nt, Human
uggguccuggauggacuuugugu

SEQ ID NO: 339565 - RNA, 20 nt, Human
ugguagauguuguguucuac

SEQ ID NO: 339566 - RNA, 18 nt, Human
ugguuucuagaucaaacu

SEQ ID NO: 339567 - RNA, 23 nt, Human
ugucugguuuuguuuuccgaggg

SEQ ID NO: 339568 - RNA, 21 nt, Human
ugugacccgugcugagcgcac

SEQ ID NO: 339569 - RNA, 23 nt, Human
uuacuccuagacaaucaccuccu

SEQ ID NO: 339570 - RNA, 22 nt, Human
uucaaaaaugcucuaauucaau

SEQ ID NO: 339571 - RNA, 20 nt, Human
uucaacagacaaaacaagcc

SEQ ID NO: 339572 - RNA, 18 nt, Human
uuccugcucccucugcgg

SEQ ID NO: 339573 - RNA, 21 nt, Human
uucucuguaaguggaucccac

SEQ ID NO: 339574 - RNA, 19 nt, Human
uugcagggaagcuuucugg

SEQ ID NO: 339575 - RNA, 20 nt, Human
uuucaagcacagaccucaga

SEQ ID NO: 339576 - RNA, 22 nt, Human
uuucuuagaugaugaaauuuuc

SEQ ID NO: 339577 - RNA, 21 nt, Human
uuuuaagagaaacuggaaaug

SEQ ID NO: 339578 - RNA, 24 nt, Human
aggaguggggcugcagagggugcu

SEQ ID NO: 339579 - RNA, 20 nt, Human
aggccuccgggccucgcccu

SEQ ID NO: 339580 - RNA, 20 nt, Human
cagagggugcucaggccucc

SEQ ID NO: 339581 - RNA, 18 nt, Human
cagccgcacauuccaaca

SEQ ID NO: 339582 - RNA, 19 nt, Human
cagccgccgccagggucug

SEQ ID NO: 339583 - RNA, 19 nt, Human
caggaguggggcugcagag

SEQ ID NO: 339584 - RNA, 21 nt, Human
ccaagaaggcccaggaguggg

SEQ ID NO: 339585 - RNA, 23 nt, Human
ccaggaguggggcugcagagggu

SEQ ID NO: 339586 - RNA, 21 nt, Human
ccccgggccucggcggcgcuc

SEQ ID NO: 339587 - RNA, 24 nt, Human
cccugagucgccgcuccucgggag

SEQ ID NO: 339588 - RNA, 23 nt, Human
ccgccagggucuggggccccggg

SEQ ID NO: 339589 - RNA, 21 nt, Human
ccgucucggcugccgcagccg

SEQ ID NO: 339590 - RNA, 23 nt, Human
ccuccgggccucgcccugccguc

SEQ ID NO: 339591 - RNA, 21 nt, Human
cgacccugagucgccgcuccu

SEQ ID NO: 339592 - RNA, 23 nt, Human
cgcacauuccaacacaggacgcu

SEQ ID NO: 339593 - RNA, 19 nt, Human
cgggggagaggugggggag

SEQ ID NO: 339594 - RNA, 20 nt, Human
cugccgcagccgccgccagg

SEQ ID NO: 339595 - RNA, 24 nt, Human
cuggggccgucguggaccaagaag

SEQ ID NO: 339596 - RNA, 20 nt, Human
gaggggcgggcgacccugag

SEQ ID NO: 339597 - RNA, 19 nt, Human
gagucgccgcuccuucucc

SEQ ID NO: 339598 - RNA, 18 nt, Human
gccagggucuggggcccc

SEQ ID NO: 339599 - RNA, 20 nt, Human
gcgagcucgcggcagccgca

SEQ ID NO: 339600 - RNA, 20 nt, Human
gcggcgcucgcuccgcugcu

SEQ ID NO: 339601 - RNA, 20 nt, Human
gcucaggccuccgggccucg

SEQ ID NO: 339602 - RNA, 18 nt, Human
gcugcagagggugcucag

SEQ ID NO: 339603 - RNA, 22 nt, Human
ggaccaagaaggcccaggagug

SEQ ID NO: 339604 - RNA, 18 nt, Human
ggaguuucgggggagagg

SEQ ID NO: 339605 - RNA, 20 nt, Human
gggagggugguaaaguuggg

SEQ ID NO: 339606 - RNA, 21 nt, Human
gggccucggcggcgcucgcuc

SEQ ID NO: 339607 - RNA, 20 nt, Human
ggggagaggugggggagggu

SEQ ID NO: 339608 - RNA, 21 nt, Human
ggggagggugguaaaguuggg

SEQ ID NO: 339609 - RNA, 22 nt, Human
ggggagggugguaaaguugggu

SEQ ID NO: 339610 - RNA, 20 nt, Human
ggggcgggcgacccugaguc

SEQ ID NO: 339611 - RNA, 18 nt, Human
uccgggccucgcccugcc

SEQ ID NO: 339612 - RNA, 21 nt, Human
ucgcccugccgucucggcugc

SEQ ID NO: 339613 - RNA, 19 nt, Human
ucguggaccaagaaggccc

SEQ ID NO: 339614 - RNA, 24 nt, Human
ugcgccgcgcacccaguccgcgcc

SEQ ID NO: 339615 - RNA, 22 nt, Human
uuccaacacaggacgcugcgcc

SEQ ID NO: 339616 - RNA, 24 nt, Human
aaaaaaaggaacaugaucugguuu

SEQ ID NO: 339617 - RNA, 25 nt, Human
aaaaaaaggaacaugaucugguuua

SEQ ID NO: 339618 - RNA, 25 nt, Human
aaaaaaaggaacaugaucugguuua

SEQ ID NO: 339619 - RNA, 25 nt, Human
aaaaaaaggaacaugaucugguuua

SEQ ID NO: 339620 - RNA, 25 nt, Human
aaaaagcaucacagagaggaaggau

SEQ ID NO: 339621 - RNA, 18 nt, Human
aaaacuucaagugcagac

SEQ ID NO: 339622 - RNA, 18 nt, Human
aaaagaacuuaucacagu

SEQ ID NO: 339623 - RNA, 18 nt, Human
aaaagaacuuaucacagu

SEQ ID NO: 339624 - RNA, 18 nt, Human
aaaagaacuuaucacagu

SEQ ID NO: 339625 - RNA, 18 nt, Human
aaaagaacuuaucacagu

SEQ ID NO: 339626 - RNA, 19 nt, Human
aaacauaguugcaauaaug

SEQ ID NO: 339627 - RNA, 23 nt, Human
aaaccuguugcagcaauucacac

SEQ ID NO: 339628 - RNA, 23 nt, Human
aaaccuguugcagcaauucacac

SEQ ID NO: 339629 - RNA, 23 nt, Human
aaaccuguugcagcaauucacac

SEQ ID NO: 339630 - RNA, 23 nt, Human
aaaccuguugcagcaauucacac

SEQ ID NO: 339631 - RNA, 20 nt, Human
aaagaaagggccgguagacu

SEQ ID NO: 339632 - RNA, 20 nt, Human
aaagaaagggccgguagacu

SEQ ID NO: 339633 - RNA, 21 nt, Human
aaccaaaaguuuaccaugucu

SEQ ID NO: 339634 - RNA, 21 nt, Human
aaccaaaaguuuaccaugucu

SEQ ID NO: 339635 - RNA, 21 nt, Human
aaccuguucuuggucuccccu

SEQ ID NO: 339636 - RNA, 24 nt, Human
aacuagaaaaauccaacaguucag

SEQ ID NO: 339637 - RNA, 23 nt, Human
aagaaacagaaacaucuuguagc

SEQ ID NO: 339638 - RNA, 23 nt, Human
aagaaacagaaacaucuuguagc

SEQ ID NO: 339639 - RNA, 24 nt, Human
aagaaacagaaacaucuuguagcc

SEQ ID NO: 339640 - RNA, 24 nt, Human
aagaaacagaaacaucuuguagcc

SEQ ID NO: 339641 - RNA, 18 nt, Human
aagaaccaaaacuucaag

SEQ ID NO: 339642 - RNA, 19 nt, Human
aauuuuuuugccuuguuug

SEQ ID NO: 339643 - RNA, 19 nt, Human
aauuuuuuugccuuguuug

SEQ ID NO: 339644 - RNA, 19 nt, Human
acacugcugcacucaaugg

SEQ ID NO: 339645 - RNA, 23 nt, Human
acagaaacaucuuguagcagcau

SEQ ID NO: 339646 - RNA, 23 nt, Human
acagaaacaucuuguagcagcau

SEQ ID NO: 339647 - RNA, 24 nt, Human
acagaauguugguggucacugaug

SEQ ID NO: 339648 - RNA, 24 nt, Human
acagaauguugguggucacugaug

SEQ ID NO: 339649 - RNA, 23 nt, Human
acagauuacuacuuaauacucag

SEQ ID NO: 339650 - RNA, 23 nt, Human
acagauuacuacuuaauacucag

SEQ ID NO: 339651 - RNA, 23 nt, Human
acagauuacuacuuaauacucag

SEQ ID NO: 339652 - RNA, 23 nt, Human
acagauuacuacuuaauacucag

SEQ ID NO: 339653 - RNA, 18 nt, Human
acagccagaagagcugcu

SEQ ID NO: 339654 - RNA, 18 nt, Human
acagccagaagagcugcu

SEQ ID NO: 339655 - RNA, 18 nt, Human
acagccagaagagcugcu

SEQ ID NO: 339656 - RNA, 22 nt, Human
acagcuagcuagccugucccuu

SEQ ID NO: 339657 - RNA, 22 nt, Human
acagcuagcuagccugucccuu

SEQ ID NO: 339658 - RNA, 21 nt, Human
acaggacucucuccaggccag

SEQ ID NO: 339659 - RNA, 20 nt, Human
acagugcugacaacacagcc

SEQ ID NO: 339660 - RNA, 20 nt, Human
acagugcugacaacacagcc

SEQ ID NO: 339661 - RNA, 20 nt, Human
acagugcugacaacacagcc

SEQ ID NO: 339662 - RNA, 20 nt, Human
accaaaaguuuaccaugucu

SEQ ID NO: 339663 - RNA, 20 nt, Human
accaaaaguuuaccaugucu

SEQ ID NO: 339664 - RNA, 22 nt, Human
accacaaggcucuauuacacac

SEQ ID NO: 339665 - RNA, 22 nt, Human
accacaaggcucuauuacacac

SEQ ID NO: 339666 - RNA, 22 nt, Human
accacaaggcucuauuacacac

SEQ ID NO: 339667 - RNA, 22 nt, Human
accacaaggcucuauuacacac

SEQ ID NO: 339668 - RNA, 24 nt, Human
accccagaagcgccuuauucaacc

SEQ ID NO: 339669 - RNA, 24 nt, Human
acccuccugagaacaaaccuguug

SEQ ID NO: 339670 - RNA, 24 nt, Human
acccuccugagaacaaaccuguug

SEQ ID NO: 339671 - RNA, 20 nt, Human
accuugauuacaaaaaaagg

SEQ ID NO: 339672 - RNA, 20 nt, Human
accuugauuacaaaaaaagg

SEQ ID NO: 339673 - RNA, 21 nt, Human
acuacccccaggccccccccg

SEQ ID NO: 339674 - RNA, 24 nt, Human
agaaacauuuuuaaaaagcaucac

SEQ ID NO: 339675 - RNA, 19 nt, Human
agagcuaauaaggaugggg

SEQ ID NO: 339676 - RNA, 19 nt, Human
agagcuaauaaggaugggg

SEQ ID NO: 339677 - RNA, 19 nt, Human
agagcuaauaaggaugggg

SEQ ID NO: 339678 - RNA, 19 nt, Human
agagcuaauaaggaugggg

SEQ ID NO: 339679 - RNA, 21 nt, Human
agcaaugaagaaugacaagaa

SEQ ID NO: 339680 - RNA, 19 nt, Human
agcaauucugggacuccac

SEQ ID NO: 339681 - RNA, 21 nt, Human
agccaaacaccaucuuuuuca

SEQ ID NO: 339682 - RNA, 21 nt, Human
agccaaacaccaucuuuuuca

SEQ ID NO: 339683 - RNA, 23 nt, Human
agcugcugagacuucccaaaagc

SEQ ID NO: 339684 - RNA, 23 nt, Human
agcugcugagacuucccaaaagc

SEQ ID NO: 339685 - RNA, 23 nt, Human
agcugcugagacuucccaaaagc

SEQ ID NO: 339686 - RNA, 23 nt, Human
aggaaggauagugcaaaggggac

SEQ ID NO: 339687 - RNA, 19 nt, Human
aggaaugcuuaaccacuaa

SEQ ID NO: 339688 - RNA, 19 nt, Human
aggaaugcuuaaccacuaa

SEQ ID NO: 339689 - RNA, 27 nt, Human
aggaggggucugggggaaccuggcugu

SEQ ID NO: 339690 - RNA, 19 nt, Human
aggcaguguuuugguaauc

SEQ ID NO: 339691 - RNA, 19 nt, Human
aggcaguguuuugguaauc

SEQ ID NO: 339692 - RNA, 19 nt, Human
aggcaguguuuugguaauc

SEQ ID NO: 339693 - RNA, 19 nt, Human
agucugccaccugggaacu

SEQ ID NO: 339694 - RNA, 19 nt, Human
agucugccaccugggaacu

SEQ ID NO: 339695 - RNA, 27 nt, Human
caaaaagcaacugcuccagcuuuagca

SEQ ID NO: 339696 - RNA, 18 nt, Human
caaacacaggaagagcug

SEQ ID NO: 339697 - RNA, 18 nt, Human
caaacacaggaagagcug

SEQ ID NO: 339698 - RNA, 19 nt, Human
caaacaccaucuuuuucac

SEQ ID NO: 339699 - RNA, 19 nt, Human
caaacaccaucuuuuucac

SEQ ID NO: 339700 - RNA, 18 nt, Human
caaagacaaaagaaggag

SEQ ID NO: 339701 - RNA, 24 nt, Human
caacagcacacugcugcacucaau

SEQ ID NO: 339702 - RNA, 22 nt, Human
caacuagaaaaauccaacaguu

SEQ ID NO: 339703 - RNA, 22 nt, Human
caacuagaaaaauccaacaguu

SEQ ID NO: 339704 - RNA, 25 nt, Human
caacuagaaaaauccaacaguucag

SEQ ID NO: 339705 - RNA, 21 nt, Human
caagcaaugaagaaugacaac

SEQ ID NO: 339706 - RNA, 21 nt, Human
caagcaaugaagaaugacaac

SEQ ID NO: 339707 - RNA, 19 nt, Human
caaggauaaauuggucaag

SEQ ID NO: 339708 - RNA, 19 nt, Human
caaggauaaauuggucaag

SEQ ID NO: 339709 - RNA, 19 nt, Human
caaggauaaauuggucaag

SEQ ID NO: 339710 - RNA, 19 nt, Human
caaggauaaauuggucaag

SEQ ID NO: 339711 - RNA, 24 nt, Human
cacacaugugaacacagaauguug

SEQ ID NO: 339712 - RNA, 24 nt, Human
cacacaugugaacacagaauguug

SEQ ID NO: 339713 - RNA, 26 nt, Human
cacagcaccacagaccauguucuuuc

SEQ ID NO: 339714 - RNA, 30 nt, Human
cacaggcucuauaagagccaaacaccaucc

SEQ ID NO: 339715 - RNA, 30 nt, Human; identical to SEQ ID NO: 339714

SEQ ID NO: 339716 - RNA, 19 nt, Human
cacaguguaucugaaaaac

SEQ ID NO: 339717 - RNA, 19 nt, Human
cacaguguaucugaaaaac

SEQ ID NO: 339718 - RNA, 19 nt, Human
cacaguguaucugaaaaac

SEQ ID NO: 339719 - RNA, 19 nt, Human
cacaguguaucugaaaaac

SEQ ID NO: 339720 - RNA, 20 nt, Human
cacaucagaauuguaaucag

SEQ ID NO: 339721 - RNA, 22 nt, Human
caccaucuuuuucacaucagaa

SEQ ID NO: 339722 - RNA, 22 nt, Human
caccaucuuuuucacaucagaa

SEQ ID NO: 339723 - RNA, 23 nt, Human
cacggcucggccaaugugacguu

SEQ ID NO: 339724 - RNA, 23 nt, Human
cacggcucggccaaugugacguu

SEQ ID NO: 339725 - RNA, 22 nt, Human
cacuacccccaggccccccccg

SEQ ID NO: 339726 - RNA, 25 nt, Human
cacuacccccaggccccccccgcag

SEQ ID NO: 339727 - RNA, 25 nt, Human
cacuacccccaggccccccccgcag

SEQ ID NO: 339728 - RNA, 18 nt, Human
cacugcuuucgccucuac

SEQ ID NO: 339729 - RNA, 18 nt, Human
cacugcuuucgccucuac

SEQ ID NO: 339730 - RNA, 18 nt, Human
cagcaauucugggacucc

SEQ ID NO: 339731 - RNA, 21 nt, Human
cagcaauucugggacuccaac

SEQ ID NO: 339732 - RNA, 19 nt, Human
cagcccaaauuagagccag

SEQ ID NO: 339733 - RNA, 19 nt, Human
cagcccaaauuagagccag

SEQ ID NO: 339734 - RNA, 19 nt, Human
cagcccaaauuagagccag

SEQ ID NO: 339735 - RNA, 21 nt, Human
cagcccccuuucuucauacug

SEQ ID NO: 339736 - RNA, 21 nt, Human
cagcccccuuucuucauacug

SEQ ID NO: 339737 - RNA, 24 nt, Human
cagcccccuuucuucauacuguuc

SEQ ID NO: 339738 - RNA, 24 nt, Human
cagcccccuuucuucauacuguuc

SEQ ID NO: 339739 - RNA, 21 nt, Human
cagcuagcuagccugucccuu

SEQ ID NO: 339740 - RNA, 21 nt, Human
cagcuagcuagccugucccuu

SEQ ID NO: 339741 - RNA, 25 nt, Human
cagcuccugcaaccucgcuaccccu

SEQ ID NO: 339742 - RNA, 18 nt, Human
caggacucucuccaggcc

SEQ ID NO: 339743 - RNA, 23 nt, Human
cagggguaguggcugcucaguac

SEQ ID NO: 339744 - RNA, 23 nt, Human
cagggguaguggcugcucaguac

SEQ ID NO: 339745 - RNA, 22 nt, Human
cagugcugacaacacagccaga

SEQ ID NO: 339746 - RNA, 22 nt, Human
cagugcugacaacacagccaga

SEQ ID NO: 339747 - RNA, 20 nt, Human
cauagcaucgucagcacaaa

SEQ ID NO: 339748 - RNA, 22 nt, Human
cauagcaucgucagcacaaaug

SEQ ID NO: 339749 - RNA, 19 nt, Human
caucugugaccacaaacaa

SEQ ID NO: 339750 - RNA, 19 nt, Human
caucugugaccacaaacaa

SEQ ID NO: 339751 - RNA, 18 nt, Human
cauucugaauaaggacag

SEQ ID NO: 339752 - RNA, 23 nt, Human
cauuguaagaccacagcaccaca

SEQ ID NO: 339753 - RNA, 25 nt, Human
ccaaaacuucaagugcagacaguaa

SEQ ID NO: 339754 - RNA, 22 nt, Human
ccaaaagcugcccccacaagac

SEQ ID NO: 339755 - RNA, 22 nt, Human
ccaaaagcugcccccacaagac

SEQ ID NO: 339756 - RNA, 22 nt, Human
ccaaaagcugcccccacaagac

SEQ ID NO: 339757 - RNA, 23 nt, Human
ccaaaaguuuaccaugucuauag

SEQ ID NO: 339758 - RNA, 23 nt, Human
ccaaaaguuuaccaugucuauag

SEQ ID NO: 339759 - RNA, 23 nt, Human
ccaaaaguuuaccaugucuauag

SEQ ID NO: 339760 - RNA, 21 nt, Human
ccacacaugugaacacagaau

SEQ ID NO: 339761 - RNA, 21 nt, Human
ccacacaugugaacacagaau

SEQ ID NO: 339762 - RNA, 19 nt, Human
ccagugcaggcugaguggu

SEQ ID NO: 339763 - RNA, 22 nt, Human
ccaguggcugcucgccagugcc

SEQ ID NO: 339764 - RNA, 21 nt, Human
ccaguucgggucugacaugcc

SEQ ID NO: 339765 - RNA, 21 nt, Human
cccaaaagcugcccccacaag

SEQ ID NO: 339766 - RNA, 21 nt, Human
cccaaaagcugcccccacaag

SEQ ID NO: 339767 - RNA, 21 nt, Human
cccaaaagcugcccccacaag

SEQ ID NO: 339768 - RNA, 18 nt, Human
cccacaagacuggaggag

SEQ ID NO: 339769 - RNA, 19 nt, Human
ccccucuuccccuccagcc

SEQ ID NO: 339770 - RNA, 19 nt, Human
ccccucuuccccuccagcc

SEQ ID NO: 339771 - RNA, 20 nt, Human
ccccucuuccccuccagccc

SEQ ID NO: 339772 - RNA, 24 nt, Human
ccccugagaguuccgcccugaucu

SEQ ID NO: 339773 - RNA, 19 nt, Human
cccgugcgcgcuggggcca

SEQ ID NO: 339774 - RNA, 21 nt, Human
cccgugcgcgcuggggccacg

SEQ ID NO: 339775 - RNA, 19 nt, Human
ccugaagguggguaaggga

SEQ ID NO: 339776 - RNA, 19 nt, Human
cgccccauccccgcccggg

SEQ ID NO: 339777 - RNA, 20 nt, Human
cgcgacggacacugggggcg

SEQ ID NO: 339778 - RNA, 19 nt, Human
cggggcacucagcgcugcu

SEQ ID NO: 339779 - RNA, 19 nt, Human
cuacccccaggcccccccc

SEQ ID NO: 339780 - RNA, 19 nt, Human
cuacccccaggcccccccc

SEQ ID NO: 339781 - RNA, 20 nt, Human
cucaacugaauaccucccca

SEQ ID NO: 339782 - RNA, 18 nt, Human
cucccagugcaggcugag

SEQ ID NO: 339783 - RNA, 20 nt, Human
cucgugagugguacaggacu

SEQ ID NO: 339784 - RNA, 21 nt, Human
cucuaaucugauguauauuug

SEQ ID NO: 339785 - RNA, 20 nt, Human
cugaguggugcugguggcuc

SEQ ID NO: 339786 - RNA, 18 nt, Human
cugauaccaccauccaca

SEQ ID NO: 339787 - RNA, 18 nt, Human
cugauaccaccauccaca

SEQ ID NO: 339788 - RNA, 20 nt, Human
cugcgcgcccugcuucgguc

SEQ ID NO: 339789 - RNA, 18 nt, Human
cugcugcgcgcccugcuu

SEQ ID NO: 339790 - RNA, 18 nt, Human
gacacuaccaauuuugac

SEQ ID NO: 339791 - RNA, 19 nt, Human
gacucucuccaggccaguu

SEQ ID NO: 339792 - RNA, 20 nt, Human
gaggacauguggcugggacu

SEQ ID NO: 339793 - RNA, 19 nt, Human
gaguacaagcccuaccugc

SEQ ID NO: 339794 - RNA, 19 nt, Human
gaguacaagcccuaccugc

SEQ ID NO: 339795 - RNA, 27 nt, Human
gauuacaaaaaaaggaacaugaucugg

SEQ ID NO: 339796 - RNA, 27 nt, Human
gauuacaaaaaaaggaacaugaucugg

SEQ ID NO: 339797 - RNA, 27 nt, Human
gauuacaaaaaaaggaacaugaucugg

SEQ ID NO: 339798 - RNA, 23 nt, Human
gcaaagucagacauuuacaaaua

SEQ ID NO: 339799 - RNA, 24 nt, Human
gcagcggaaacguucuauaaaaca

SEQ ID NO: 339800 - RNA, 22 nt, Human
gcauuuuuaauaauuugagaaa

SEQ ID NO: 339801 - RNA, 22 nt, Human
gcauuuuuaauaauuugagaaa

SEQ ID NO: 339802 - RNA, 22 nt, Human
gcauuuuuaauaauuugagaaa

SEQ ID NO: 339803 - RNA, 22 nt, Human
gcauuuuuaauaauuugagaaa

SEQ ID NO: 339804 - RNA, 20 nt, Human
gcccccacaagacuggagga

SEQ ID NO: 339805 - RNA, 23 nt, Human
gccccccccgcagucucucauuc

SEQ ID NO: 339806 - RNA, 23 nt, Human
gccccccccgcagucucucauuc

SEQ ID NO: 339807 - RNA, 21 nt, Human
gccugcccaggaggggucugg

SEQ ID NO: 339808 - RNA, 23 nt, Human
gcugcccccacaagacuggagga

SEQ ID NO: 339809 - RNA, 23 nt, Human
gcugcccccacaagacuggagga

SEQ ID NO: 339810 - RNA, 22 nt, Human
gcugcgcgcccugcuucggucg

SEQ ID NO: 339811 - RNA, 20 nt, Human
ggaaccgucucagcuugaaa

SEQ ID NO: 339812 - RNA, 22 nt, Human
ggaggggucugggggaaccugg

SEQ ID NO: 339813 - RNA, 24 nt, Human
ggcauggaaucucuccauugugcu

SEQ ID NO: 339814 - RNA, 24 nt, Human
ggcauggaaucucuccauugugcu

SEQ ID NO: 339815 - RNA, 23 nt, Human
ggccccucuuccccuccagcccu

SEQ ID NO: 339816 - RNA, 20 nt, Human
ggcggcaacuagaaaaaucc

SEQ ID NO: 339817 - RNA, 20 nt, Human
ggcggcaacuagaaaaaucc

SEQ ID NO: 339818 - RNA, 19 nt, Human
ggcugggacuggggcugag

SEQ ID NO: 339819 - RNA, 18 nt, Human
gggcacucagcgcugcug

SEQ ID NO: 339820 - RNA, 21 nt, Human
gggggugcguccucccagggc

SEQ ID NO: 339821 - RNA, 18 nt, Human
gggucugggggaaccugg

SEQ ID NO: 339822 - RNA, 21 nt, Human
uaaaacaaacuaccaaaaacc

SEQ ID NO: 339823 - RNA, 21 nt, Human
uaaaacaaacuaccaaaaacc

SEQ ID NO: 339824 - RNA, 26 nt, Human
uaaaacaaacuaccaaaaacgagucu

SEQ ID NO: 339825 - RNA, 26 nt, Human
uaaaacaaacuaccaaaaacgagucu

SEQ ID NO: 339826 - RNA, 27 nt, Human
uaaacuggaugcaaagucagacauuua

SEQ ID NO: 339827 - RNA, 21 nt, Human
uaaauguaacuuaacagacac

SEQ ID NO: 339828 - RNA, 26 nt, Human
uaaauuacaaacacaggaagagcuga

SEQ ID NO: 339829 - RNA, 26 nt, Human
uaaauuacaaacacaggaagagcuga

SEQ ID NO: 339830 - RNA, 24 nt, Human
uaacacagcuagcuagccuguccc

SEQ ID NO: 339831 - RNA, 24 nt, Human
uaacacagcuagcuagccuguccc

SEQ ID NO: 339832 - RNA, 18 nt, Human
uaaccacuaagacucaga

SEQ ID NO: 339833 - RNA, 18 nt, Human
uaacucaggaauagacaa

SEQ ID NO: 339834 - RNA, 18 nt, Human
uaacucaggaauagacaa

SEQ ID NO: 339835 - RNA, 18 nt, Human
uaacucaggaauagacaa

SEQ ID NO: 339836 - RNA, 18 nt, Human
uaacucaggaauagacaa

SEQ ID NO: 339837 - RNA, 23 nt, Human
uaagaccacagcaccacagacca

SEQ ID NO: 339838 - RNA, 20 nt, Human
uaaggaaagguugcaugauu

SEQ ID NO: 339839 - RNA, 20 nt, Human
uaaggaaagguugcaugauu

SEQ ID NO: 339840 - RNA, 24 nt, Human
uaaggauggggacuuuuauaacuc

SEQ ID NO: 339841 - RNA, 24 nt, Human
uaaggauggggacuuuuauaacuc

SEQ ID NO: 339842 - RNA, 24 nt, Human
uaaggauggggacuuuuauaacuc

SEQ ID NO: 339843 - RNA, 24 nt, Human
uaaggauggggacuuuuauaacuc

SEQ ID NO: 339844 - RNA, 21 nt, Human
uacaaauaaaaagguucagag

SEQ ID NO: 339845 - RNA, 27 nt, Human
uacacuuauuuucacauccuuuuagaa

SEQ ID NO: 339846 - RNA, 25 nt, Human
uaccaaaaacgagucugccaccugg

SEQ ID NO: 339847 - RNA, 23 nt, Human
uacuaugacuugauucccacccc

SEQ ID NO: 339848 - RNA, 25 nt, Human
uagcauauacacuaucauuuggaua

SEQ ID NO: 339849 - RNA, 18 nt, Human
uagcaucgucagcacaaa

SEQ ID NO: 339850 - RNA, 18 nt, Human
uaggaaacagaaaaaauu

SEQ ID NO: 339851 - RNA, 21 nt, Human
uagugccaucagcucucguga

SEQ ID NO: 339852 - RNA, 22 nt, Human
uaucugaaaaacagcccaaauu

SEQ ID NO: 339853 - RNA, 22 nt, Human
uaucugaaaaacagcccaaauu

SEQ ID NO: 339854 - RNA, 22 nt, Human
uaucugaaaaacagcccaaauu

SEQ ID NO: 339855 - RNA, 22 nt, Human
uaucugaaaaacagcccaaauu

SEQ ID NO: 339856 - RNA, 18 nt, Human
uaucugaaaaccaaaagu

SEQ ID NO: 339857 - RNA, 18 nt, Human
uaucugaaaaccaaaagu

SEQ ID NO: 339858 - RNA, 18 nt, Human
uaucugaaaaccaaaagu

SEQ ID NO: 339859 - RNA, 18 nt, Human
uaucugaaaaccaaaagu

SEQ ID NO: 339860 - RNA, 19 nt, Human
ucacaaagaaagggccggu

SEQ ID NO: 339861 - RNA, 19 nt, Human
ucacaaagaaagggccggu

SEQ ID NO: 339862 - RNA, 18 nt, Human
ucagaaguaaaaccaccu

SEQ ID NO: 339863 - RNA, 18 nt, Human
ucagaaguaaaaccaccu

SEQ ID NO: 339864 - RNA, 18 nt, Human
ucagaaucuaagaaacag

SEQ ID NO: 339865 - RNA, 18 nt, Human
ucagaaucuaagaaacag

SEQ ID NO: 339866 - RNA, 25 nt, Human
ucagcaauucugggacuccaacagc

SEQ ID NO: 339867 - RNA, 25 nt, Human
ucagcaauucugggacuccaacagc

SEQ ID NO: 339868 - RNA, 19 nt, Human
ucauacuguucucaucagg

SEQ ID NO: 339869 - RNA, 19 nt, Human
ucauucugaauaaggacag

SEQ ID NO: 339870 - RNA, 24 nt, Human
uccacauaguaaagauggcaugga

SEQ ID NO: 339871 - RNA, 24 nt, Human
uccacauaguaaagauggcaugga

SEQ ID NO: 339872 - RNA, 19 nt, Human
ucccaaaagcugcccccac

SEQ ID NO: 339873 - RNA, 19 nt, Human
ucccaaaagcugcccccac

SEQ ID NO: 339874 - RNA, 19 nt, Human
ucccaaaagcugcccccac

SEQ ID NO: 339875 - RNA, 20 nt, Human
ucccaaaagcugcccccaca

SEQ ID NO: 339876 - RNA, 20 nt, Human
ucccaaaagcugcccccaca

SEQ ID NO: 339877 - RNA, 20 nt, Human
ucccaaaagcugcccccaca

SEQ ID NO: 339878 - RNA, 20 nt, Human
ucucagcauguuucuucccc

SEQ ID NO: 339879 - RNA, 20 nt, Human
ucucagcauguuucuucccc

SEQ ID NO: 339880 - RNA, 22 nt, Human
ucucuaaucugauguauauuug

SEQ ID NO: 339881 - RNA, 21 nt, Human
ucugccaccugggaacugaac

SEQ ID NO: 339882 - RNA, 21 nt, Human
ucugccaccugggaacugaac

SEQ ID NO: 339883 - RNA, 27 nt, Human
ucugugaccacaaacaagccggggucc

SEQ ID NO: 339884 - RNA, 27 nt, Human
ucugugaccacaaacaagccggggucc

SEQ ID NO: 339885 - RNA, 23 nt, Human
ugaaaaacagcccaaauuagagc

SEQ ID NO: 339886 - RNA, 23 nt, Human
ugaaaaacagcccaaauuagagc

SEQ ID NO: 339887 - RNA, 23 nt, Human
ugaaaaacagcccaaauuagagc

SEQ ID NO: 339888 - RNA, 23 nt, Human
ugaaaaacagcccaaauuagagc

SEQ ID NO: 339889 - RNA, 24 nt, Human
ugaguccauuaccuuucacaaaga

SEQ ID NO: 339890 - RNA, 24 nt, Human
ugaguccauuaccuuucacaaaga

SEQ ID NO: 339891 - RNA, 22 nt, Human
ugcaggcugaguggugcuggug

SEQ ID NO: 339892 - RNA, 18 nt, Human
ugcaggcugguggcaggu

SEQ ID NO: 339893 - RNA, 19 nt, Human
ugcugcacucaauggcuua

SEQ ID NO: 339894 - RNA, 24 nt, Human
ugcugcaggcugguggcagguggg

SEQ ID NO: 339895 - RNA, 24 nt, Human
ugcugcaggcugguggcagguggg

SEQ ID NO: 339896 - RNA, 23 nt, Human
ugcugggcacugaagagaaagga

SEQ ID NO: 339897 - RNA, 23 nt, Human
ugcugggcacugaagagaaagga

SEQ ID NO: 339898 - RNA, 22 nt, Human
uggaaacccaguguuagugcca

SEQ ID NO: 339899 - RNA, 22 nt, Human
uggaggacauguggcugggacu

SEQ ID NO: 339900 - RNA, 21 nt, Human
uggcuguggggugugcugcag

SEQ ID NO: 339901 - RNA, 21 nt, Human
uggcuguggggugugcugcag

SEQ ID NO: 339902 - RNA, 20 nt, Human
ugggacuccaacagcccccc

SEQ ID NO: 339903 - RNA, 20 nt, Human
ugggacuccaacagcccccc

SEQ ID NO: 339904 - RNA, 18 nt, Human
ugggacuggggcugaggc

SEQ ID NO: 339905 - RNA, 22 nt, Human
ugggauucacagcagcaaagcc

SEQ ID NO: 339906 - RNA, 22 nt, Human
ugggauucacagcagcaaagcc

SEQ ID NO: 339907 - RNA, 18 nt, Human
uguagcaguccuugguca

SEQ ID NO: 339908 - RNA, 18 nt, Human
uguagcaguccuugguca

SEQ ID NO: 339909 - RNA, 19 nt, Human
ugugcuaaaucuaggaauc

SEQ ID NO: 339910 - RNA, 19 nt, Human
ugugcuaaaucuaggaauc

SEQ ID NO: 339911 - RNA, 18 nt, Human
uguggcugggacuggggc

SEQ ID NO: 339912 - RNA, 23 nt, Human
ugugugcuucauguuuaaauuuu

SEQ ID NO: 339913 - RNA, 23 nt, Human
ugugugcuucauguuuaaauuuu

SEQ ID NO: 339914 - RNA, 22 nt, Human
uguucugcacugaagaaccaaa

SEQ ID NO: 339915 - RNA, 23 nt, Human
uuaaagugaguacaagcccuacc

SEQ ID NO: 339916 - RNA, 23 nt, Human
uuaaagugaguacaagcccuacc

SEQ ID NO: 339917 - RNA, 19 nt, Human
uuaaauuacaaacacagga

SEQ ID NO: 339918 - RNA, 22 nt, Human
uuaauacucaguaauacuuaau

SEQ ID NO: 339919 - RNA, 22 nt, Human
uuaauacucaguaauacuuaau

SEQ ID NO: 339920 - RNA, 22 nt, Human
uuaauacucaguaauacuuaau

SEQ ID NO: 339921 - RNA, 22 nt, Human
uuaauacucaguaauacuuaau

SEQ ID NO: 339922 - RNA, 22 nt, Human
uuacaaaaaaaggaacaugauc

SEQ ID NO: 339923 - RNA, 22 nt, Human
uuacaaaaaaaggaacaugauc

SEQ ID NO: 339924 - RNA, 22 nt, Human
uuacaaaaaaaggaacaugauc

SEQ ID NO: 339925 - RNA, 22 nt, Human
uuacaaaaaaaggaacaugauc

SEQ ID NO: 339926 - RNA, 24 nt, Human
uuaccuuucacaaagaaauguuaa

SEQ ID NO: 339927 - RNA, 18 nt, Human
uuagugccaucagcucuc

SEQ ID NO: 339928 - RNA, 22 nt, Human
uucacauccuuuuagaaaaaca

SEQ ID NO: 339929 - RNA, 19 nt, Human
uucccaaaagcugccccca

SEQ ID NO: 339930 - RNA, 19 nt, Human
uucccaaaagcugccccca

SEQ ID NO: 339931 - RNA, 19 nt, Human
uucccaaaagcugccccca

SEQ ID NO: 339932 - RNA, 25 nt, Human
uugcugggcaaugugguaauuacac

SEQ ID NO: 339933 - RNA, 30 nt, Human
uuggcaagaaccauauuuacuguccauugg

SEQ ID NO: 339934 - RNA, 23 nt, Human
uugugcaucugugaccacaaaca

SEQ ID NO: 339935 - RNA, 23 nt, Human
uugugcaucugugaccacaaaca

SEQ ID NO: 339936 - RNA, 20 nt, Human
uuuaaguccuaucagugcuu

SEQ ID NO: 339937 - RNA, 20 nt, Human
uuuaaguccuaucagugcuu

SEQ ID NO: 339938 - RNA, 20 nt, Human
uuuaaguccuaucagugcuu

SEQ ID NO: 339939 - RNA, 20 nt, Human
uuuuccucuaccauccuaag

SEQ ID NO: 339940 - RNA, 23 nt, Human
aaaaaacaaugcacugaccacau

SEQ ID NO: 339941 - RNA, 18 nt, Human
aaaaagcaccaugcacaa

SEQ ID NO: 339942 - RNA, 19 nt, Human
aacaaaaaugucuuugcac

SEQ ID NO: 339943 - RNA, 19 nt, Human
aacggcgggcggggcggug

SEQ ID NO: 339944 - RNA, 21 nt, Human
acacauacuggagcaaaucca

SEQ ID NO: 339945 - RNA, 19 nt, Human
acagacaguucaaggaaaa

SEQ ID NO: 339946 - RNA, 23 nt, Human
accucgaggaacggcgggcgggg

SEQ ID NO: 339947 - RNA, 24 nt, Human
acuuugagucaagcaaaaccuaga

SEQ ID NO: 339948 - RNA, 25 nt, Human
agaagcaauagaaaugucuauacaa

SEQ ID NO: 339949 - RNA, 19 nt, Human
agacagugaacauccuuga

SEQ ID NO: 339950 - RNA, 18 nt, Human
agcagcagcggcggcggc

SEQ ID NO: 339951 - RNA, 21 nt, Human
agucacuauccuuacugaaaa

SEQ ID NO: 339952 - RNA, 20 nt, Human
auagagguaaggaaagaugc

SEQ ID NO: 339953 - RNA, 19 nt, Human
aucuacucaaaugaauuua

SEQ ID NO: 339954 - RNA, 20 nt, Human
augaaaguuaaaaagcacca

SEQ ID NO: 339955 - RNA, 21 nt, Human
augaaaguuaaaaagcaccau

SEQ ID NO: 339956 - RNA, 18 nt, Human
augaucuacucaaaugaa

SEQ ID NO: 339957 - RNA, 18 nt, Human
augucuucugacuugaaa

SEQ ID NO: 339958 - RNA, 18 nt, Human
auuggcagguauccagcc

SEQ ID NO: 339959 - RNA, 19 nt, Human
caaaaugcuacacguggua

SEQ ID NO: 339960 - RNA, 24 nt, Human
caaauauucuaaauacacauuuug

SEQ ID NO: 339961 - RNA, 23 nt, Human
caacaggcccacagguuuguaac

SEQ ID NO: 339962 - RNA, 20 nt, Human
caaggcaagaaaaucccgcc

SEQ ID NO: 339963 - RNA, 22 nt, Human
cacaguuccucacaaugcccca

SEQ ID NO: 339964 - RNA, 22 nt, Human
caccuguaauacugugauauug

SEQ ID NO: 339965 - RNA, 24 nt, Human
cacggcccccuccccucacacaga

SEQ ID NO: 339966 - RNA, 18 nt, Human
cagcagcggcggcggcuc

SEQ ID NO: 339967 - RNA, 23 nt, Human
cagcggcagcagcagcggcggcg

SEQ ID NO: 339968 - RNA, 24 nt, Human
cagcggcggcggcucccuccgcag

SEQ ID NO: 339969 - RNA, 22 nt, Human
caguuugaucaaaauaacgauc

SEQ ID NO: 339970 - RNA, 18 nt, Human
cauagagguaaggaaaga

SEQ ID NO: 339971 - RNA, 21 nt, Human
caucguauggcacauagaggu

SEQ ID NO: 339972 - RNA, 18 nt, Human
cauugcacauuauuuuac

SEQ ID NO: 339973 - RNA, 22 nt, Human
ccccuccccucacacagaggca

SEQ ID NO: 339974 - RNA, 23 nt, Human
ccccuccccuucucggcacggcc

SEQ ID NO: 339975 - RNA, 21 nt, Human
cccggcagcggcagcagcagc

SEQ ID NO: 339976 - RNA, 23 nt, Human
ccuccgcagcggcggcggcgccc

SEQ ID NO: 339977 - RNA, 22 nt, Human
cgacccggcagcggcagcagca

SEQ ID NO: 339978 - RNA, 23 nt, Human
cggcagcagcagcggcggcggcu

SEQ ID NO: 339979 - RNA, 25 nt, Human
cucacaaugccccauuaauagcuaa

SEQ ID NO: 339980 - RNA, 20 nt, Human
cuccgaagacucgcaccacc

SEQ ID NO: 339981 - RNA, 20 nt, Human
cugaccacauaauuccuuuu

SEQ ID NO: 339982 - RNA, 21 nt, Human
cugcagcucuuguugccauga

SEQ ID NO: 339983 - RNA, 20 nt, Human
cuuuaagagguuuucagugc

SEQ ID NO: 339984 - RNA, 22 nt, Human
cuuucuggcugcuguccauaac

SEQ ID NO: 339985 - RNA, 18 nt, Human
gacaugucuucugacuug

SEQ ID NO: 339986 - RNA, 19 nt, Human
gauuggcagguauccagcc

SEQ ID NO: 339987 - RNA, 23 nt, Human
gcaaggagagaagcccucgaagc

SEQ ID NO: 339988 - RNA, 23 nt, Human
gcacccggcaaggggccgcaagg

SEQ ID NO: 339989 - RNA, 20 nt, Human
gcacugaaaaaaauagcacc

SEQ ID NO: 339990 - RNA, 19 nt, Human
gcagcagcagcggcggcgg

SEQ ID NO: 339991 - RNA, 21 nt, Human
gccgccacugcgccaccgccg

SEQ ID NO: 339992 - RNA, 21 nt, Human
gccucccuucacuggcgaccc

SEQ ID NO: 339993 - RNA, 21 nt, Human
gcuccuuccacugggaaguaa

SEQ ID NO: 339994 - RNA, 21 nt, Human
ggagcaaauccaacaccugac

SEQ ID NO: 339995 - RNA, 22 nt, Human
ggcacauagagguaaggaaaga

SEQ ID NO: 339996 - RNA, 21 nt, Human
gucuuugcacaguuccucaca

SEQ ID NO: 339997 - RNA, 22 nt, Human
uaaaaaacaaugcacugaccac

SEQ ID NO: 339998 - RNA, 21 nt, Human
uaaaaagcaccaugcacaaca

SEQ ID NO: 339999 - RNA, 21 nt, Human
uacaaaauauuuugcagucaa

SEQ ID NO: 340000 - RNA, 21 nt, Human
uacacaguuauacaaauauuc

SEQ ID NO: 340001 - RNA, 22 nt, Human
uacacaguuauacaaauauucu

SEQ ID NO: 340002 - RNA, 25 nt, Human
uauacaaaacaagcaaauggaauaa

SEQ ID NO: 340003 - RNA, 20 nt, Human
uauucagagaucaacaagua

SEQ ID NO: 340004 - RNA, 18 nt, Human
ucaggagcacccggcaag

SEQ ID NO: 340005 - RNA, 21 nt, Human
uccagccccugcagcgggcug

SEQ ID NO: 340006 - RNA, 22 nt, Human
ucccuccgcagcggcggcggcg

SEQ ID NO: 340007 - RNA, 26 nt, Human
uccucacaaugccccauuaauagcua

SEQ ID NO: 340008 - RNA, 23 nt, Human
uccucggucccaggcugcagcuc

SEQ ID NO: 340009 - RNA, 22 nt, Human
ucucgaaguaacacgucuugau

SEQ ID NO: 340010 - RNA, 18 nt, Human
ucugcagucacuauccuu

SEQ ID NO: 340011 - RNA, 26 nt, Human
ugaaaaguaaaaaaguguauuuacaa

SEQ ID NO: 340012 - RNA, 21 nt, Human
ugacagaaugaggaauuugua

SEQ ID NO: 340013 - RNA, 22 nt, Human
ugagaaaaacaauuuugagaga

SEQ ID NO: 340014 - RNA, 22 nt, Human
ugagaaagauagcuuucuggcu

SEQ ID NO: 340015 - RNA, 18 nt, Human
ugagagaaaucuuccuca

SEQ ID NO: 340016 - RNA, 19 nt, Human
ugagagaaaucuuccucag

SEQ ID NO: 340017 - RNA, 25 nt, Human
ugaggagggaggcgagcgcagucuc

SEQ ID NO: 340018 - RNA, 18 nt, Human
uggagcaaauccaacacc

SEQ ID NO: 340019 - RNA, 18 nt, Human
uggcugcuguccauaacc

SEQ ID NO: 340020 - RNA, 22 nt, Human
ugggugaggggggauuggcagg

SEQ ID NO: 340021 - RNA, 18 nt, Human
uggugcugccgccacugc

SEQ ID NO: 340022 - RNA, 21 nt, Human
uguaacaaaaaugucuuugca

SEQ ID NO: 340023 - RNA, 21 nt, Human
uuaagagguuuucagugcucc

SEQ ID NO: 340024 - RNA, 19 nt, Human
uucacaaggcaagaaaauc

SEQ ID NO: 340025 - RNA, 19 nt, Human
uucgccgccgccgccacug

SEQ ID NO: 340026 - RNA, 19 nt, Human
uugacaggggccuggguga

SEQ ID NO: 340027 - RNA, 23 nt, Human
uugauacagacaguucaaggaaa

SEQ ID NO: 340028 - RNA, 18 nt, Human
uuucgucggugcuggugc

SEQ ID NO: 340029 - RNA, 21 nt, Human
uuucgucggugcuggugcugc

SEQ ID NO: 340030 - RNA, 20 nt, Human
uuugagagaaaucuuccuca

SEQ ID NO: 340031 - RNA, 23 nt, Human
uuugaucaaaauaacgaucuacu

SEQ ID NO: 340032 - RNA, 22 nt, Human
uuuugagagaaaucuuccucag

SEQ ID NO: 340033 - RNA, 24 nt, Human
aaacaugguugcucugggaaaaaa

SEQ ID NO: 340034 - RNA, 20 nt, Human
aaagugaacaaaagccagug

SEQ ID NO: 340035 - RNA, 23 nt, Human
aaauagcuagacaucuaaauucc

SEQ ID NO: 340036 - RNA, 19 nt, Human
aagcaguccuaucaaccuc

SEQ ID NO: 340037 - RNA, 21 nt, Human
aagcauuuucaguuagaaaca

SEQ ID NO: 340038 - RNA, 19 nt, Human
aagccaucacaggacagga

SEQ ID NO: 340039 - RNA, 23 nt, Human
aaggcgcuggcuggcuggcgggu

SEQ ID NO: 340040 - RNA, 24 nt, Human
acgcugcaaagccccauaacagac

SEQ ID NO: 340041 - RNA, 20 nt, Human
acugguaaauacaguuuaaa

SEQ ID NO: 340042 - RNA, 21 nt, Human
agaccucugagcauuuaccaa

SEQ ID NO: 340043 - RNA, 24 nt, Human
agaggacaguggaggacccaagca

SEQ ID NO: 340044 - RNA, 21 nt, Human
auacaguuauaggaauaaccc

SEQ ID NO: 340045 - RNA, 19 nt, Human
auucagaagcacgucuaac

SEQ ID NO: 340046 - RNA, 21 nt, Human
auucgcgccaacaacuucucc

SEQ ID NO: 340047 - RNA, 22 nt, Human
auuuauuuacaaaauuucacca

SEQ ID NO: 340048 - RNA, 21 nt, Human
caaaagacgccuuaguacuac

SEQ ID NO: 340049 - RNA, 18 nt, Human
caaggcuuucucuagacc

SEQ ID NO: 340050 - RNA, 23 nt, Human
cacauaauaggaacugccuuuaa

SEQ ID NO: 340051 - RNA, 20 nt, Human
cacccaaacaagacuaccag

SEQ ID NO: 340052 - RNA, 22 nt, Human
cagaccacugcaugaaauccuu

SEQ ID NO: 340053 - RNA, 21 nt, Human
cagcagagacguggucaacac

SEQ ID NO: 340054 - RNA, 21 nt, Human
cauacccuucuagccauacca

SEQ ID NO: 340055 - RNA, 26 nt, Human
caucacaggacaggacuagaucucuc

SEQ ID NO: 340056 - RNA, 20 nt, Human
cauucagaagcacgucuaac

SEQ ID NO: 340057 - RNA, 23 nt, Human
cccaaacaagacuaccaguuccu

SEQ ID NO: 340058 - RNA, 19 nt, Human
cucaggauccauucgcgcc

SEQ ID NO: 340059 - RNA, 23 nt, Human
cucaucacccaaacaagacuacc

SEQ ID NO: 340060 - RNA, 22 nt, Human
cugcagccccccacgcugcaaa

SEQ ID NO: 340061 - RNA, 24 nt, Human
cuucuagccauaccacccuuuauu

SEQ ID NO: 340062 - RNA, 19 nt, Human
gacaucuaaauuccaggcu

SEQ ID NO: 340063 - RNA, 22 nt, Human
gcccuuuuuuaaaaaaugaaaa

SEQ ID NO: 340064 - RNA, 19 nt, Human
gcuccgauaagagaaugaa

SEQ ID NO: 340065 - RNA, 18 nt, Human
gcucugggaaaaaacaag

SEQ ID NO: 340066 - RNA, 18 nt, Human
ggacaccaggucauccca

SEQ ID NO: 340067 - RNA, 18 nt, Human
ggacuggucaggagggag

SEQ ID NO: 340068 - RNA, 20 nt, Human
gggagaguaaaaaguggcug

SEQ ID NO: 340069 - RNA, 22 nt, Human
uaaaaaguggcugucgcuagug

SEQ ID NO: 340070 - RNA, 19 nt, Human
uaaagcagggaauacgauc

SEQ ID NO: 340071 - RNA, 19 nt, Human
uaaaggccauuaggauaaa

SEQ ID NO: 340072 - RNA, 22 nt, Human
uaaauuccaggcuagguccaua

SEQ ID NO: 340073 - RNA, 21 nt, Human
uaacagaccacugcaugaaau

SEQ ID NO: 340074 - RNA, 20 nt, Human
uaagaaugucugagaaucuu

SEQ ID NO: 340075 - RNA, 18 nt, Human
uaagagccugacccagcc

SEQ ID NO: 340076 - RNA, 24 nt, Human
uaaguuaaaaaaauuuacaucaau

SEQ ID NO: 340077 - RNA, 26 nt, Human
uaaguuaaaaaaauuuacaucaauga

SEQ ID NO: 340078 - RNA, 19 nt, Human
uacacauaucauguggaac

SEQ ID NO: 340079 - RNA, 21 nt, Human
uacacauaucauguggaacau

SEQ ID NO: 340080 - RNA, 21 nt, Human
uaggaauaacccaaacuucca

SEQ ID NO: 340081 - RNA, 19 nt, Human
uaucugacaauguacaaag

SEQ ID NO: 340082 - RNA, 21 nt, Human
uaugcuaaaacaugguugcuc

SEQ ID NO: 340083 - RNA, 19 nt, Human
ucaaugaaaaaagaagcaa

SEQ ID NO: 340084 - RNA, 23 nt, Human
ucacagagguagcacagaccucu

SEQ ID NO: 340085 - RNA, 20 nt, Human
ucagaagcacgucuaacuag

SEQ ID NO: 340086 - RNA, 19 nt, Human
ucaguuagaaacagcuuua

SEQ ID NO: 340087 - RNA, 21 nt, Human
uccauaaaugacauuuuucac

SEQ ID NO: 340088 - RNA, 29 nt, Human
ucucccgcgaagugcaagaaggcgaagac

SEQ ID NO: 340089 - RNA, 22 nt, Human
ucucucaggggcaaagugaaca

SEQ ID NO: 340090 - RNA, 27 nt, Human
ucucucaggggcaaagugaacaaaagc

SEQ ID NO: 340091 - RNA, 22 nt, Human
ucuuaagccuacaaaagacgcc

SEQ ID NO: 340092 - RNA, 25 nt, Human
ucuucugcagccccccacgcugcaa

SEQ ID NO: 340093 - RNA, 18 nt, Human
ugacagaggacaguggag

SEQ ID NO: 340094 - RNA, 20 nt, Human
ugacuccaaagcccaggugu

SEQ ID NO: 340095 - RNA, 23 nt, Human
ugacuccaaagcccagguguagu

SEQ ID NO: 340096 - RNA, 20 nt, Human
ugcaagaaggcgaagacagu

SEQ ID NO: 340097 - RNA, 26 nt, Human
ugcaagaaggcgaagacagucuggga

SEQ ID NO: 340098 - RNA, 21 nt, Human
uggcgggugggccgguugagg

SEQ ID NO: 340099 - RNA, 18 nt, Human
uggcuggcuggcgggugg

SEQ ID NO: 340100 - RNA, 18 nt, Human
uggcuggcuggcgggugg

SEQ ID NO: 340101 - RNA, 20 nt, Human
ugggaauuccgcccuuuuuu

SEQ ID NO: 340102 - RNA, 22 nt, Human
ugggccgguugaggaaucuguu

SEQ ID NO: 340103 - RNA, 20 nt, Human
ugucugagaaucuucugcag

SEQ ID NO: 340104 - RNA, 21 nt, Human
ugucugagaaucuucugcagc

SEQ ID NO: 340105 - RNA, 19 nt, Human
uguuauguuucacacaaca

SEQ ID NO: 340106 - RNA, 20 nt, Human
uuaacuaaaaucugacucca

SEQ ID NO: 340107 - RNA, 22 nt, Human
uuauuuacaaaauuucaccaca

SEQ ID NO: 340108 - RNA, 20 nt, Human
uucacagcagagacgugguc

SEQ ID NO: 340109 - RNA, 22 nt, Human
uucacagcagagacguggucaa

SEQ ID NO: 340110 - RNA, 24 nt, Human
uucucuagaccagcuggacugguc

SEQ ID NO: 340111 - RNA, 20 nt, Human
uugucucaucacccaaacaa

SEQ ID NO: 340112 - RNA, 18 nt, Human
uuuaaaugucucaagaac

SEQ ID NO: 340113 - RNA, 24 nt, Human
aaagccgcggcuccuguaccucag

SEQ ID NO: 340114 - RNA, 24 nt, Human
aaaguguugggauuacaggcguga

SEQ ID NO: 340115 - RNA, 21 nt, Human
aaguguugggauuacaggcgu

SEQ ID NO: 340116 - RNA, 21 nt, Human
aaguguugggauuacaggcgu

SEQ ID NO: 340117 - RNA, 24 nt, Human
acaggguuuccccauguuggccag

SEQ ID NO: 340118 - RNA, 19 nt, Human
accgcgccuggccagccac

SEQ ID NO: 340119 - RNA, 24 nt, Human
aggugauccaccugccucggccuc

SEQ ID NO: 340120 - RNA, 18 nt, Human
aguagcugggauuacagg

SEQ ID NO: 340121 - RNA, 24 nt, Human
agucucugucgcccaggcuggagu

SEQ ID NO: 340122 - RNA, 23 nt, Human
agugcaauggugugaucuuggcu

SEQ ID NO: 340123 - RNA, 24 nt, Human
agugcaauggugugaucuuggcuc

SEQ ID NO: 340124 - RNA, 24 nt, Human
caaaguguugggauuacaggcgug

SEQ ID NO: 340125 - RNA, 20 nt, Human
caccuccuccuccuggguuc

SEQ ID NO: 340126 - RNA, 21 nt, Human
caccuccuccuccuggguuca

SEQ ID NO: 340127 - RNA, 23 nt, Human
caccugccucggccucccaaagu

SEQ ID NO: 340128 - RNA, 24 nt, Human
caggguuuccccauguuggccagg

SEQ ID NO: 340129 - RNA, 22 nt, Human
caggugauccaccugccucggc

SEQ ID NO: 340130 - RNA, 21 nt, Human
caggugcccgccaccacaccc

SEQ ID NO: 340131 - RNA, 24 nt, Human
cauguuggccaggcuggucuugaa

SEQ ID NO: 340132 - RNA, 22 nt, Human
ccaaaguguugggauuacaggc

SEQ ID NO: 340133 - RNA, 22 nt, Human
ccaaaguguugggauuacaggc

SEQ ID NO: 340134 - RNA, 24 nt, Human
ccaaaguguugggauuacaggcgu

SEQ ID NO: 340135 - RNA, 18 nt, Human
ccagcagugagggucucu

SEQ ID NO: 340136 - RNA, 19 nt, Human
ccauguuggccaggcuggu

SEQ ID NO: 340137 - RNA, 21 nt, Human
ccauguuggccaggcuggucu

SEQ ID NO: 340138 - RNA, 21 nt, Human
ccauguuggccaggcuggucu

SEQ ID NO: 340139 - RNA, 22 nt, Human
cccagcagugagggucucucuc

SEQ ID NO: 340140 - RNA, 24 nt, Human
ccccauguuggccaggcuggucuu

SEQ ID NO: 340141 - RNA, 23 nt, Human
cccgaguagcugggauuacaggu

SEQ ID NO: 340142 - RNA, 24 nt, Human
cccgaguagcugggauuacaggug

SEQ ID NO: 340143 - RNA, 21 nt, Human
cccgccaccacacccagcuaa

SEQ ID NO: 340144 - RNA, 21 nt, Human
ccgaguagcugggauuacagg

SEQ ID NO: 340145 - RNA, 24 nt, Human
ccuccucuucccucucggaauucc

SEQ ID NO: 340146 - RNA, 18 nt, Human
ccuggccagccacuggag

SEQ ID NO: 340147 - RNA, 22 nt, Human
ccuggguucaagcgauuucgcc

SEQ ID NO: 340148 - RNA, 24 nt, Human
ccuggguucaagcgauuucgccug

SEQ ID NO: 340149 - RNA, 18 nt, Human
cucaaguaugaggagaug

SEQ ID NO: 340150 - RNA, 22 nt, Human
cucacugcaaccuccaccuccu

SEQ ID NO: 340151 - RNA, 23 nt, Human
cucacugcaaccuccaccuccuc

SEQ ID NO: 340152 - RNA, 22 nt, Human
cuccaccuccuccuccuggguu

SEQ ID NO: 340153 - RNA, 18 nt, Human
cucugucgcccaggcugg

SEQ ID NO: 340154 - RNA, 19 nt, Human
cucugucgcccaggcugga

SEQ ID NO: 340155 - RNA, 25 nt, Human
cucugucgcccaggcuggagugcaa

SEQ ID NO: 340156 - RNA, 20 nt, Human
cugaccucaggugauccacc

SEQ ID NO: 340157 - RNA, 23 nt, Human
cugccacagccucccgaguagcu

SEQ ID NO: 340158 - RNA, 18 nt, Human
cugccucggccucccaaa

SEQ ID NO: 340159 - RNA, 20 nt, Human
cuugaacuucugaccucagg

SEQ ID NO: 340160 - RNA, 24 nt, Human
gaccucaggugauccaccugccuc

SEQ ID NO: 340161 - RNA, 27 nt, Human
gaguuuauuuauuuaauuuuuuucccc

SEQ ID NO: 340162 - RNA, 21 nt, Human
gauuacaggcgugacuaccgc

SEQ ID NO: 340163 - RNA, 18 nt, Human
gauuacaggugcccgcca

SEQ ID NO: 340164 - RNA, 29 nt, Human
gcaaccuccaccuccuccuccuggguucc

SEQ ID NO: 340165 - RNA, 20 nt, Human
gcccaggcuggagugcaaug

SEQ ID NO: 340166 - RNA, 24 nt, Human
gcccaggcuggagugcaauggugu

SEQ ID NO: 340167 - RNA, 30 nt, Human
gcuggagugcaauggugugaucuuggcucc

SEQ ID NO: 340168 - RNA, 22 nt, Human
ggagauguuuucuccaaauauu

SEQ ID NO: 340169 - RNA, 24 nt, Human
ggagucucugucgcccaggcugga

SEQ ID NO: 340170 - RNA, 22 nt, Human
ggcuggagugcaauggugugau

SEQ ID NO: 340171 - RNA, 24 nt, Human
ggcuggucuugaacuucugaccuc

SEQ ID NO: 340172 - RNA, 19 nt, Human
ggucuugaacuucugaccu

SEQ ID NO: 340173 - RNA, 21 nt, Human
gucucugucgcccaggcugga

SEQ ID NO: 340174 - RNA, 24 nt, Human
gucucugucgcccaggcuggagug

SEQ ID NO: 340175 - RNA, 24 nt, Human
gugauccaccugccucggccuccc

SEQ ID NO: 340176 - RNA, 22 nt, Human
uaaagacaggguuuccccaugu

SEQ ID NO: 340177 - RNA, 19 nt, Human
uaagucagucagugaaguc

SEQ ID NO: 340178 - RNA, 24 nt, Human
uaauuuuuauauuuuuaguaaaga

SEQ ID NO: 340179 - RNA, 24 nt, Human
uacaggugcccgccaccacaccca

SEQ ID NO: 340180 - RNA, 24 nt, Human
uaguaaagacaggguuuccccaug

SEQ ID NO: 340181 - RNA, 20 nt, Human
ucacugcaaccuccaccucc

SEQ ID NO: 340182 - RNA, 21 nt, Human
ucacugcaaccuccaccuccu

SEQ ID NO: 340183 - RNA, 22 nt, Human
ucacugcaaccuccaccuccuc

SEQ ID NO: 340184 - RNA, 31 nt, Human
ucacugcaaccuccaccuccuccuccugggg

SEQ ID NO: 340185 - RNA, 21 nt, Human
ucagccuaaggcgcauuuucc

SEQ ID NO: 340186 - RNA, 21 nt, Human
ucaggugauccaccugccucg

SEQ ID NO: 340187 - RNA, 24 nt, Human
ucccaaaguguugggauuacaggc

SEQ ID NO: 340188 - RNA, 25 nt, Human
ucccaaauccgagaaauggaaacuc

SEQ ID NO: 340189 - RNA, 23 nt, Human
ucccgaguagcugggauuacagg

SEQ ID NO: 340190 - RNA, 24 nt, Human
ucccgaguagcugggauuacaggu

SEQ ID NO: 340191 - RNA, 18 nt, Human
uccuggguucaagcgauu

SEQ ID NO: 340192 - RNA, 20 nt, Human
uccuggguucaagcgauuuc

SEQ ID NO: 340193 - RNA, 25 nt, Human
uccuggguucaagcgauuucgccug

SEQ ID NO: 340194 - RNA, 18 nt, Human
ucgcccaggcuggagugc

SEQ ID NO: 340195 - RNA, 19 nt, Human
ucucaaguaugaggagaug

SEQ ID NO: 340196 - RNA, 19 nt, Human
ucucugucgcccaggcugg

SEQ ID NO: 340197 - RNA, 23 nt, Human
ucugaccucaggugauccaccug

SEQ ID NO: 340198 - RNA, 24 nt, Human
ugaccucaggugauccaccugccu

SEQ ID NO: 340199 - RNA, 24 nt, Human
ugccacagccucccgaguagcugg

SEQ ID NO: 340200 - RNA, 18 nt, Human
ugcccgccaccacaccca

SEQ ID NO: 340201 - RNA, 24 nt, Human
ugccucggccucccaaaguguugg

SEQ ID NO: 340202 - RNA, 19 nt, Human
uggagugcaauggugugau

SEQ ID NO: 340203 - RNA, 23 nt, Human
uggagugcaauggugugaucuug

SEQ ID NO: 340204 - RNA, 24 nt, Human
uggagugcaauggugugaucuugg

SEQ ID NO: 340205 - RNA, 18 nt, Human
uggccagccacuggaguu

SEQ ID NO: 340206 - RNA, 24 nt, Human
uggccaggcuggucuugaacuucu

SEQ ID NO: 340207 - RNA, 20 nt, Human
ugggauuacaggcgugacua

SEQ ID NO: 340208 - RNA, 21 nt, Human
ugggauuacaggcgugacuac

SEQ ID NO: 340209 - RNA, 22 nt, Human
ugggauuacaggcgugacuacc

SEQ ID NO: 340210 - RNA, 23 nt, Human
ugggauuacaggcgugacuaccg

SEQ ID NO: 340211 - RNA, 21 nt, Human
ugggauuacaggugcccgcca

SEQ ID NO: 340212 - RNA, 22 nt, Human
ugggauuacaggugcccgccac

SEQ ID NO: 340213 - RNA, 24 nt, Human
ugggauuacaggugcccgccacca

SEQ ID NO: 340214 - RNA, 24 nt, Human
uggucuugaacuucugaccucagg

SEQ ID NO: 340215 - RNA, 20 nt, Human
ugucgcccaggcuggagugc

SEQ ID NO: 340216 - RNA, 22 nt, Human
ugucgcccaggcuggagugcaa

SEQ ID NO: 340217 - RNA, 19 nt, Human
ugugcucucaaguaugagg

SEQ ID NO: 340218 - RNA, 22 nt, Human
uuaguaaagacaggguuucccc

SEQ ID NO: 340219 - RNA, 24 nt, Human
uuaguaaagacaggguuuccccau

SEQ ID NO: 340220 - RNA, 22 nt, Human
uucaagcgauuucgccugccac

SEQ ID NO: 340221 - RNA, 20 nt, Human
uuccccagauggagucucug

SEQ ID NO: 340222 - RNA, 23 nt, Human
uuuauauuuuuaguaaagacagg

SEQ ID NO: 340223 - RNA, 24 nt, Human
uuuauauuuuuaguaaagacaggg

SEQ ID NO: 340224 - RNA, 21 nt, Human
uuuccccauguuggccaggcu

SEQ ID NO: 340225 - RNA, 18 nt, Human
aaaaaaacccaaauacga

SEQ ID NO: 340226 - RNA, 23 nt, Human
acucagaggaugauuaauaguuc

SEQ ID NO: 340227 - RNA, 21 nt, Human
agaaaauggucaucuggauaa

SEQ ID NO: 340228 - RNA, 26 nt, Human
aggaucaacaaugaauacuugaauaa

SEQ ID NO: 340229 - RNA, 18 nt, Human
augauuaauaguucacag

SEQ ID NO: 340230 - RNA, 23 nt, Human
caucuggauaaaugaaaauaauc

SEQ ID NO: 340231 - RNA, 22 nt, Human
cuguggcagaaaauggucaucu

SEQ ID NO: 340232 - RNA, 18 nt, Human
gcaagaauaacugacaga

SEQ ID NO: 340233 - RNA, 20 nt, Human
gcagaaaauggucaucugga

SEQ ID NO: 340234 - RNA, 23 nt, Human
ggucaucuggauaaaugaaaaua

SEQ ID NO: 340235 - RNA, 23 nt, Human
ggugagagauuagacggaagaga

SEQ ID NO: 340236 - RNA, 21 nt, Human
uguggcagaaaauggucaucu

SEQ ID NO: 340237 - RNA, 22 nt, Human
uguggcagaaaauggucaucug

SEQ ID NO: 340238 - RNA, 18 nt, Human
uuaaaguaaauuaagauc

SEQ ID NO: 340239 - RNA, 23 nt, Human
uuaauuuacccacagcucuuuua

SEQ ID NO: 340240 - RNA, 26 nt, Human
uuaccaaaaaaacccaaauacgacau

SEQ ID NO: 340241 - RNA, 23 nt, Human
aaaaccccccauccagauauauc

SEQ ID NO: 340242 - RNA, 23 nt, Human
aaaaggacgagauggucucgaag

SEQ ID NO: 340243 - RNA, 20 nt, Human
aagauugugauucuggauga

SEQ ID NO: 340244 - RNA, 22 nt, Human
aucaucuccuauacacgaaccc

SEQ ID NO: 340245 - RNA, 19 nt, Human
caaaccaucaucauccagc

SEQ ID NO: 340246 - RNA, 22 nt, Human
gcgauacaaaaaggacgagaug

SEQ ID NO: 340247 - RNA, 21 nt, Human
ucacccaguuagccuggcuuc

SEQ ID NO: 340248 - RNA, 22 nt, Human
ucacccaguuagccuggcuucu

SEQ ID NO: 340249 - RNA, 22 nt, Human
uccagcuuguccuaaauggcag

SEQ ID NO: 340250 - RNA, 18 nt, Human
uccgcgauacaaaaagga

SEQ ID NO: 340251 - RNA, 21 nt, Human
ucuccuauacacgaaccccug

SEQ ID NO: 340252 - RNA, 20 nt, Human
uggcuucucgugcaggucac

SEQ ID NO: 340253 - RNA, 20 nt, Human
uuccucagguuuccgcgaua

SEQ ID NO: 340254 - RNA, 19 nt, Human
uuuacaaaaccccccaucc

SEQ ID NO: 340255 - RNA, 20 nt, Human
uuuacaaaaccccccaucca

SEQ ID NO: 340256 - RNA, 24 nt, Human
uuuuaagauugugauucuggauga

SEQ ID NO: 340257 - RNA, 18 nt, Human
aagccuguucccguggga

SEQ ID NO: 340258 - RNA, 18 nt, Human
aagugcugggguggaagc

SEQ ID NO: 340259 - RNA, 24 nt, Human
acaaagccugccaggcugagcccu

SEQ ID NO: 340260 - RNA, 20 nt, Human
accuuggccuggagccugcu

SEQ ID NO: 340261 - RNA, 18 nt, Human
agaacaaaagcuuuacuc

SEQ ID NO: 340262 - RNA, 23 nt, Human
agcaaagcaggaggcagagggga

SEQ ID NO: 340263 - RNA, 19 nt, Human
agccagccuagcacccgcc

SEQ ID NO: 340264 - RNA, 22 nt, Human
aggcagcccugggucggggugg

SEQ ID NO: 340265 - RNA, 19 nt, Human
augggcccaggcacagugg

SEQ ID NO: 340266 - RNA, 19 nt, Human
caagaggccuccgaaugag

SEQ ID NO: 340267 - RNA, 23 nt, Human
caauggccguggcugggccagga

SEQ ID NO: 340268 - RNA, 19 nt, Human
cacccgccuucagcaacag

SEQ ID NO: 340269 - RNA, 21 nt, Human
caccgcagcccaccaggggcu

SEQ ID NO: 340270 - RNA, 20 nt, Human
cagcaaagcaggaggcagag

SEQ ID NO: 340271 - RNA, 24 nt, Human
caucucuguggucccagucaagag

SEQ ID NO: 340272 - RNA, 18 nt, Human
ccaaaacacccaucaccg

SEQ ID NO: 340273 - RNA, 19 nt, Human
ccagaaaguaguccugagc

SEQ ID NO: 340274 - RNA, 23 nt, Human
cccacugagcccauagggggcuc

SEQ ID NO: 340275 - RNA, 18 nt, Human
cccacuguggugcccggc

SEQ ID NO: 340276 - RNA, 22 nt, Human
cccaggugcgcaagugcugggg

SEQ ID NO: 340277 - RNA, 22 nt, Human
ccccacaaagccugccaggcug

SEQ ID NO: 340278 - RNA, 24 nt, Human
cccgcgccugggacagagccaggc

SEQ ID NO: 340279 - RNA, 18 nt, Human
ccgcgccugggacagagc

SEQ ID NO: 340280 - RNA, 23 nt, Human
ccugcggcagagagggccggggc

SEQ ID NO: 340281 - RNA, 22 nt, Human
ccugcuccuugacacccagcca

SEQ ID NO: 340282 - RNA, 22 nt, Human
cgacccagaaaguaguccugag

SEQ ID NO: 340283 - RNA, 19 nt, Human
cgccuggacugggagcaaa

SEQ ID NO: 340284 - RNA, 26 nt, Human
cggcaacagcaaagcaggaggcagag

SEQ ID NO: 340285 - RNA, 23 nt, Human
cggccccugucccauuucccucc

SEQ ID NO: 340286 - RNA, 23 nt, Human
cggggaggugggucugcugggau

SEQ ID NO: 340287 - RNA, 18 nt, Human
cugcaucucacuggugug

SEQ ID NO: 340288 - RNA, 19 nt, Human
cugccaggcugagcccuug

SEQ ID NO: 340289 - RNA, 20 nt, Human
cugccaggcugagcccuugc

SEQ ID NO: 340290 - RNA, 25 nt, Human
cugcggcccuggccaucagccuggc

SEQ ID NO: 340291 - RNA, 24 nt, Human
cuggagccugcuccuugacaccca

SEQ ID NO: 340292 - RNA, 22 nt, Human
cugggacagagccaggcagccc

SEQ ID NO: 340293 - RNA, 22 nt, Human
cugggagagggggggcugcagg

SEQ ID NO: 340294 - RNA, 21 nt, Human
gaaggcaccaggcggggaggu

SEQ ID NO: 340295 - RNA, 23 nt, Human
gcaaagcaggaggcagaggggag

SEQ ID NO: 340296 - RNA, 19 nt, Human
gccuggacugggagcaaag

SEQ ID NO: 340297 - RNA, 19 nt, Human
gccugggacagagccaggc

SEQ ID NO: 340298 - RNA, 21 nt, Human
ggacugggagcaaagcucugg

SEQ ID NO: 340299 - RNA, 20 nt, Human
ggagcccacugagcccauag

SEQ ID NO: 340300 - RNA, 22 nt, Human
ggaucaaccuuggggcuggguc

SEQ ID NO: 340301 - RNA, 18 nt, Human
ggcacaguggggcaggag

SEQ ID NO: 340302 - RNA, 20 nt, Human
ggccaggaccuuggccugga

SEQ ID NO: 340303 - RNA, 20 nt, Human
ggccguggcaccugagggag

SEQ ID NO: 340304 - RNA, 20 nt, Human
ggcugcaggcuagccagagg

SEQ ID NO: 340305 - RNA, 22 nt, Human
ggcugggccaggaccuuggccu

SEQ ID NO: 340306 - RNA, 19 nt, Human
gggacagagccaggcagcc

SEQ ID NO: 340307 - RNA, 21 nt, Human
gggacagagccaggcagcccu

SEQ ID NO: 340308 - RNA, 20 nt, Human
ggggcugggagagggggggc

SEQ ID NO: 340309 - RNA, 20 nt, Human
gggggcugcaggcuagccag

SEQ ID NO: 340310 - RNA, 20 nt, Human
uaagaacaaaagcuuuacuc

SEQ ID NO: 340311 - RNA, 20 nt, Human
uaugggcccaggcacagugg

SEQ ID NO: 340312 - RNA, 18 nt, Human
ucagcaacagguaaugga

SEQ ID NO: 340313 - RNA, 24 nt, Human
ucccgggccugagucccacugugg

SEQ ID NO: 340314 - RNA, 20 nt, Human
uccuguuguuuaugggccca

SEQ ID NO: 340315 - RNA, 22 nt, Human
ucgagaacaugaccuucccggg

SEQ ID NO: 340316 - RNA, 22 nt, Human
ugacacccagccagccuagcac

SEQ ID NO: 340317 - RNA, 21 nt, Human
ugcaauggccguggcugggcc

SEQ ID NO: 340318 - RNA, 18 nt, Human
ugccaggcugagcccuug

SEQ ID NO: 340319 - RNA, 21 nt, Human
uggcagcucccucccaggugc

SEQ ID NO: 340320 - RNA, 18 nt, Human
uggccguggcaccugagg

SEQ ID NO: 340321 - RNA, 20 nt, Human
ugggacagagccaggcagcc

SEQ ID NO: 340322 - RNA, 23 nt, Human
ugggacagagccaggcagcccug

SEQ ID NO: 340323 - RNA, 22 nt, Human
ugggaucaaccuuggggcuggg

SEQ ID NO: 340324 - RNA, 24 nt, Human
uggggcugggucggggggaggggc

SEQ ID NO: 340325 - RNA, 27 nt, Human
uuacucgugcucggcaaccagggaccc

SEQ ID NO: 340326 - RNA, 24 nt, Human
aacagacaaagcccucagaaaaga

SEQ ID NO: 340327 - RNA, 24 nt, Human
aaggagcccuagcccagaaaugac

SEQ ID NO: 340328 - RNA, 23 nt, Human
aaugaagagaacagacaaagccc

SEQ ID NO: 340329 - RNA, 23 nt, Human
acacuggagguggacaucugguu

SEQ ID NO: 340330 - RNA, 22 nt, Human
acaggacguggcaaggcaacaa

SEQ ID NO: 340331 - RNA, 22 nt, Human
agagguggggccauuacccacc

SEQ ID NO: 340332 - RNA, 20 nt, Human
agccauaaucauuauguggg

SEQ ID NO: 340333 - RNA, 19 nt, Human
agcccagaaaugacagcaa

SEQ ID NO: 340334 - RNA, 27 nt, Human
agguggacaucugguuuuccuuaauag

SEQ ID NO: 340335 - RNA, 20 nt, Human
agugaucugccccagccuuc

SEQ ID NO: 340336 - RNA, 20 nt, Human
augaaucccuggaauauugu

SEQ ID NO: 340337 - RNA, 22 nt, Human
auggagaaaaggagccaagaag

SEQ ID NO: 340338 - RNA, 21 nt, Human
auggcacauugggaaucaggg

SEQ ID NO: 340339 - RNA, 21 nt, Human
caaagcgcgcaagacaacgug

SEQ ID NO: 340340 - RNA, 18 nt, Human
caacaagaugccuugugc

SEQ ID NO: 340341 - RNA, 20 nt, Human
caagggcguggaacauggua

SEQ ID NO: 340342 - RNA, 22 nt, Human
cacguacccacagagaagcagg

SEQ ID NO: 340343 - RNA, 18 nt, Human
cagacaaagcccucagaa

SEQ ID NO: 340344 - RNA, 19 nt, Human
cagacggaaaacugggaua

SEQ ID NO: 340345 - RNA, 19 nt, Human
cagaggaagccaggcugag

SEQ ID NO: 340346 - RNA, 19 nt, Human
cagcgauguguaaaaccag

SEQ ID NO: 340347 - RNA, 23 nt, Human
cagggccaggcgggcaaagcgcg

SEQ ID NO: 340348 - RNA, 18 nt, Human
cauggacauccugucucc

SEQ ID NO: 340349 - RNA, 25 nt, Human
cauggucaauucccccuucccccaa

SEQ ID NO: 340350 - RNA, 23 nt, Human
cauuacauuucacaaucugcaug

SEQ ID NO: 340351 - RNA, 24 nt, Human
ccagaaaguaugaaacacuggagg

SEQ ID NO: 340352 - RNA, 21 nt, Human
ccagggccaggcgggcaaagc

SEQ ID NO: 340353 - RNA, 19 nt, Human
ccagucuagguuguuagaa

SEQ ID NO: 340354 - RNA, 18 nt, Human
cccaaaggaaauggagaa

SEQ ID NO: 340355 - RNA, 22 nt, Human
cccccaaaggaaauggagaaaa

SEQ ID NO: 340356 - RNA, 21 nt, Human
ccccuaagcgagagcgggaau

SEQ ID NO: 340357 - RNA, 20 nt, Human
ccucagaaaagauacaaagg

SEQ ID NO: 340358 - RNA, 21 nt, Human
cgacuggccaccaguccacaa

SEQ ID NO: 340359 - RNA, 23 nt, Human
cgagcggaugccggcggcagcgu

SEQ ID NO: 340360 - RNA, 21 nt, Human
cgccucccgggcccguauccc

SEQ ID NO: 340361 - RNA, 18 nt, Human
cuaaccaaaacacauaca

SEQ ID NO: 340362 - RNA, 23 nt, Human
cuccgcacugagcccaacucucc

SEQ ID NO: 340363 - RNA, 20 nt, Human
cucuccggcgcucucuccgg

SEQ ID NO: 340364 - RNA, 21 nt, Human
gaaauggagaaaaggagccaa

SEQ ID NO: 340365 - RNA, 22 nt, Human
gaacauggacauccugucuccc

SEQ ID NO: 340366 - RNA, 19 nt, Human
gaauauugucccagaaucc

SEQ ID NO: 340367 - RNA, 19 nt, Human
gacugagaaccaucauggg

SEQ ID NO: 340368 - RNA, 23 nt, Human
gagaaaaggagccaagaagucaa

SEQ ID NO: 340369 - RNA, 21 nt, Human
gagccaagaagcuggaaguau

SEQ ID NO: 340370 - RNA, 18 nt, Human
gagcccuagcccagaaau

SEQ ID NO: 340371 - RNA, 21 nt, Human
gcaaggcaacaagaugccuug

SEQ ID NO: 340372 - RNA, 26 nt, Human
ggccauuacccaccauuauuguaaaa

SEQ ID NO: 340373 - RNA, 23 nt, Human
ggcgccgagcuccgcacugagcc

SEQ ID NO: 340374 - RNA, 20 nt, Human
gggccaggcgggcaaagcgc

SEQ ID NO: 340375 - RNA, 21 nt, Human
gggcugaaccagaggaagcca

SEQ ID NO: 340376 - RNA, 20 nt, Human
gggucagagucccagggcca

SEQ ID NO: 340377 - RNA, 19 nt, Human
guagagaacauggacaucc

SEQ ID NO: 340378 - RNA, 20 nt, Human
guagagaacauggacauccu

SEQ ID NO: 340379 - RNA, 22 nt, Human
guuagaaaggagcccuagccca

SEQ ID NO: 340380 - RNA, 21 nt, Human
uaaaaccagaaaguaugaaac

SEQ ID NO: 340381 - RNA, 23 nt, Human
uaaaaccagaaaguaugaaacac

SEQ ID NO: 340382 - RNA, 24 nt, Human
uaaaauaacuguaacuaaccaaaa

SEQ ID NO: 340383 - RNA, 19 nt, Human
uaaagggagccaugcugac

SEQ ID NO: 340384 - RNA, 22 nt, Human
uaacagaggauggaguugggca

SEQ ID NO: 340385 - RNA, 19 nt, Human
uagaaaggagcccuagccc

SEQ ID NO: 340386 - RNA, 18 nt, Human
uagaauacaccuuucauu

SEQ ID NO: 340387 - RNA, 23 nt, Human
uaucccuccagcgauguguaaaa

SEQ ID NO: 340388 - RNA, 23 nt, Human
uauggcacauugggaaucagggg

SEQ ID NO: 340389 - RNA, 20 nt, Human
ucagaaaagauacaaaggca

SEQ ID NO: 340390 - RNA, 26 nt, Human
ucagaaaagauacaaaggcagagaca

SEQ ID NO: 340391 - RNA, 18 nt, Human
uccaaagauuauccauac

SEQ ID NO: 340392 - RNA, 21 nt, Human
ucccagacgcgcccgcgcacc

SEQ ID NO: 340393 - RNA, 22 nt, Human
ucccccuucccccaaaggaaau

SEQ ID NO: 340394 - RNA, 22 nt, Human
ugaaccagaggaagccaggcug

SEQ ID NO: 340395 - RNA, 19 nt, Human
ugaacggcucuccaaaucc

SEQ ID NO: 340396 - RNA, 21 nt, Human
ugacagcaaauagccauaauc

SEQ ID NO: 340397 - RNA, 23 nt, Human
ugagaaccaucaugggggcuugc

SEQ ID NO: 340398 - RNA, 22 nt, Human
ugccccagccuucugacuucga

SEQ ID NO: 340399 - RNA, 19 nt, Human
ugccggcggcagcguaaaa

SEQ ID NO: 340400 - RNA, 22 nt, Human
ugccugcgccugugcccccuaa

SEQ ID NO: 340401 - RNA, 23 nt, Human
ugcgggggcgcacgggcaugggc

SEQ ID NO: 340402 - RNA, 21 nt, Human
uggaauauugucccagaaucc

SEQ ID NO: 340403 - RNA, 21 nt, Human
uggccgggccgaugccugcgc

SEQ ID NO: 340404 - RNA, 20 nt, Human
ugggaaggaaaaggauggua

SEQ ID NO: 340405 - RNA, 22 nt, Human
ugggauaaagggagccaugcug

SEQ ID NO: 340406 - RNA, 21 nt, Human
uggggcaggaaaggguagccg

SEQ ID NO: 340407 - RNA, 23 nt, Human
uguaaaaccagaaaguaugaaac

SEQ ID NO: 340408 - RNA, 21 nt, Human
ugucccagaauccuuccaggg

SEQ ID NO: 340409 - RNA, 21 nt, Human
uuccugagaggcaccgggcgg

SEQ ID NO: 340410 - RNA, 20 nt, Human
uugaacggcucuccaaaucc

SEQ ID NO: 340411 - RNA, 21 nt, Human
uugaacggcucuccaaaucca

SEQ ID NO: 340412 - RNA, 19 nt, Human
uugauuagaacauuaucuc

SEQ ID NO: 340413 - RNA, 24 nt, Human
aagcaggucuuuuuuuucacguuu

SEQ ID NO: 340414 - RNA, 24 nt, Human
aagcaggucuuuuuuuucacguuu

SEQ ID NO: 340415 - RNA, 21 nt, Human
accaccccgcuuucccgagag

SEQ ID NO: 340416 - RNA, 22 nt, Human
accccgcuuucccgagaggagc

SEQ ID NO: 340417 - RNA, 25 nt, Human
acgguacgcgccaagcacagccccc

SEQ ID NO: 340418 - RNA, 24 nt, Human
agcaggucuuuuuuuucacguuuu

SEQ ID NO: 340419 - RNA, 24 nt, Human
agcaggucuuuuuuuucacguuuu

SEQ ID NO: 340420 - RNA, 23 nt, Human
ccagggcaaagcaggucuuuuuu

SEQ ID NO: 340421 - RNA, 23 nt, Human
ccagggcaaagcaggucuuuuuu

SEQ ID NO: 340422 - RNA, 18 nt, Human
cccucgcugaagguucga

SEQ ID NO: 340423 - RNA, 23 nt, Human
ccgcacgguacgcgccaagcaca

SEQ ID NO: 340424 - RNA, 19 nt, Human
cgagaggagccgggcggcg

SEQ ID NO: 340425 - RNA, 21 nt, Human
cgcgccaagcacagccccaaa

SEQ ID NO: 340426 - RNA, 19 nt, Human
cuacugggcaacuccccac

SEQ ID NO: 340427 - RNA, 18 nt, Human
cuagaggcuacuccggcu

SEQ ID NO: 340428 - RNA, 19 nt, Human
cugauguauuuggcagggu

SEQ ID NO: 340429 - RNA, 19 nt, Human
cugauguauuuggcagggu

SEQ ID NO: 340430 - RNA, 19 nt, Human
gcuacugggcaacucccca

SEQ ID NO: 340431 - RNA, 22 nt, Human
ggcuacugggcaacuccccacc

SEQ ID NO: 340432 - RNA, 21 nt, Human
ucccgagaggagccgggcggc

SEQ ID NO: 340433 - RNA, 23 nt, Human
uucgaggaccaccccgcuuuccc

SEQ ID NO: 340434 - RNA, 18 nt, Human
uuuuuuuuuuuuuuuuug

SEQ ID NO: 340435 - RNA, 22 nt, Human
aaacaagaugugaaccauaaga

SEQ ID NO: 340436 - RNA, 23 nt, Human
aaacacucaagcacaucccccca

SEQ ID NO: 340437 - RNA, 20 nt, Human
aacugagccugagccaguga

SEQ ID NO: 340438 - RNA, 20 nt, Human
aagcacauccccccaccccc

SEQ ID NO: 340439 - RNA, 26 nt, Human
accuguuuuuuguuuuuuugcagugg

SEQ ID NO: 340440 - RNA, 18 nt, Human
acucaagcacaucccccc

SEQ ID NO: 340441 - RNA, 19 nt, Human
aggggaaaagugcacaagg

SEQ ID NO: 340442 - RNA, 19 nt, Human
caagcacauccccccaccc

SEQ ID NO: 340443 - RNA, 22 nt, Human
caagcacauccccccacccccc

SEQ ID NO: 340444 - RNA, 24 nt, Human
cacugugcucugaacugaggugga

SEQ ID NO: 340445 - RNA, 21 nt, Human
caugaguacaaacacucaagc

SEQ ID NO: 340446 - RNA, 21 nt, Human
ccagaauacagaauauuucua

SEQ ID NO: 340447 - RNA, 20 nt, Human
ccccaccccccgucuucaga

SEQ ID NO: 340448 - RNA, 27 nt, Human
cucaagcacauccccccaccccccguc

SEQ ID NO: 340449 - RNA, 22 nt, Human
cugagguggaggaaggguccau

SEQ ID NO: 340450 - RNA, 18 nt, Human
cugccaggggaaaagugc

SEQ ID NO: 340451 - RNA, 22 nt, Human
gcccacccaaguaauuuucuua

SEQ ID NO: 340452 - RNA, 26 nt, Human
uacaaacacucaagcacaucccccca

SEQ ID NO: 340453 - RNA, 21 nt, Human
uagaacaagaccaugaguaca

SEQ ID NO: 340454 - RNA, 25 nt, Human
uagaacaagaccaugaguacaaaca

SEQ ID NO: 340455 - RNA, 21 nt, Human
uaggaaacaagaugugaacca

SEQ ID NO: 340456 - RNA, 23 nt, Human
uccacugccaggggaaaagugca

SEQ ID NO: 340457 - RNA, 21 nt, Human
uccccccaccccccgucuuca

SEQ ID NO: 340458 - RNA, 28 nt, Human
uccuaugacuuuguauaacgcuuuuacc

SEQ ID NO: 340459 - RNA, 22 nt, Human
ucuagaacaagaccaugaguac

SEQ ID NO: 340460 - RNA, 20 nt, Human
ugagguggaggaagggucca

SEQ ID NO: 340461 - RNA, 22 nt, Human
ugugaaccauaagacucaauga

SEQ ID NO: 340462 - RNA, 22 nt, Human
uucuauugggaaagaaagucac

SEQ ID NO: 340463 - RNA, 26 nt, Human
uuggaugguggcaauaauuaauacuu

SEQ ID NO: 340464 - RNA, 23 nt, Human
uuugucacuucuagaacaagacc

SEQ ID NO: 340465 - RNA, 19 nt, Human
uuuguuuuuuugcaguggg

SEQ ID NO: 340466 - RNA, 22 nt, Human
aaacaagaugugaaccauagga

SEQ ID NO: 340467 - RNA, 23 nt, Human
aaacacucaagcacaucccccca

SEQ ID NO: 340468 - RNA, 21 nt, Human
aagcguccauucuccugguga

SEQ ID NO: 340469 - RNA, 20 nt, Human
agguaaaaaaauuuccauga

SEQ ID NO: 340470 - RNA, 20 nt, Human
auacaggacauuucuauagg

SEQ ID NO: 340471 - RNA, 23 nt, Human
auaggacucaaugaguuugaugg

SEQ ID NO: 340472 - RNA, 19 nt, Human
caagcacauccccccaccc

SEQ ID NO: 340473 - RNA, 21 nt, Human
caagcacauccccccaccccc

SEQ ID NO: 340474 - RNA, 22 nt, Human
caagcacauccccccacccccc

SEQ ID NO: 340475 - RNA, 19 nt, Human
cacucaagcacaucccccc

SEQ ID NO: 340476 - RNA, 24 nt, Human
cacugugcucugagcugaggugga

SEQ ID NO: 340477 - RNA, 21 nt, Human
caugaguacaaacacucaagc

SEQ ID NO: 340478 - RNA, 19 nt, Human
ccaaguaauuuucuuaccc

SEQ ID NO: 340479 - RNA, 22 nt, Human
cccagaauacaggacauuucua

SEQ ID NO: 340480 - RNA, 20 nt, Human
ccccaccccccgucuucaga

SEQ ID NO: 340481 - RNA, 22 nt, Human
cguccauucuccuggugaccca

SEQ ID NO: 340482 - RNA, 27 nt, Human
cucaagcacauccccccaccccccguc

SEQ ID NO: 340483 - RNA, 21 nt, Human
cuuugucacuccgagaauaag

SEQ ID NO: 340484 - RNA, 24 nt, Human
uaauuaauacuuaggacucuauaa

SEQ ID NO: 340485 - RNA, 26 nt, Human
uacaaacacucaagcacaucccccca

SEQ ID NO: 340486 - RNA, 18 nt, Human
uagagguauuguguucca

SEQ ID NO: 340487 - RNA, 21 nt, Human
uaggaaacaagaugugaacca

SEQ ID NO: 340488 - RNA, 21 nt, Human
ucacugugcucugagcugagg

SEQ ID NO: 340489 - RNA, 23 nt, Human
uccacugccaggggaaaaguaca

SEQ ID NO: 340490 - RNA, 21 nt, Human
uccccccaccccccgucuuca

SEQ ID NO: 340491 - RNA, 21 nt, Human
uccuaagucuacccacccaag

SEQ ID NO: 340492 - RNA, 19 nt, Human
ugagcugagguggaggaag

SEQ ID NO: 340493 - RNA, 20 nt, Human
ugagguggaggaagcgucca

SEQ ID NO: 340494 - RNA, 22 nt, Human
ugugaaccauaggacucaauga

SEQ ID NO: 340495 - RNA, 19 nt, Human
uguuuuuuguuuuuuugga

SEQ ID NO: 340496 - RNA, 24 nt, Human
uucaugcauagagguauuguguuc

SEQ ID NO: 340497 - RNA, 23 nt, Human
uucuccuggugacccagcagcug

SEQ ID NO: 340498 - RNA, 24 nt, Human
uuugaaguucuauugggaaaguca

SEQ ID NO: 340499 - RNA, 26 nt, Human
uuugaugguggcaauaauuaauacuu

SEQ ID NO: 340500 - RNA, 23 nt, Human
uuugucacuccgagaauaagacc

SEQ ID NO: 340501 - RNA, 22 nt, Human
aaacaagaugugaaccauaaga

SEQ ID NO: 340502 - RNA, 23 nt, Human
aaacacucaagcacaucccccca

SEQ ID NO: 340503 - RNA, 20 nt, Human
aagcacauccccccaccccc

SEQ ID NO: 340504 - RNA, 21 nt, Human
aauacagaacauuucuauagg

SEQ ID NO: 340505 - RNA, 23 nt, Human
aaugaaaaaguaaagcauuugga

SEQ ID NO: 340506 - RNA, 18 nt, Human
acucaagcacaucccccc

SEQ ID NO: 340507 - RNA, 19 nt, Human
aggggaaaaguacacaagg

SEQ ID NO: 340508 - RNA, 25 nt, Human
caaauuagaauauagauuauagaaa

SEQ ID NO: 340509 - RNA, 19 nt, Human
caagcacauccccccaccc

SEQ ID NO: 340510 - RNA, 22 nt, Human
caagcacauccccccacccccc

SEQ ID NO: 340511 - RNA, 24 nt, Human
cacugugcucugagcugaggugga

SEQ ID NO: 340512 - RNA, 21 nt, Human
caugaguacaaacacucaagc

SEQ ID NO: 340513 - RNA, 18 nt, Human
cccaaguaauuuucugac

SEQ ID NO: 340514 - RNA, 20 nt, Human
ccccaccccccguccucaga

SEQ ID NO: 340515 - RNA, 22 nt, Human
ccgagaacaagaccaugaguac

SEQ ID NO: 340516 - RNA, 27 nt, Human
cucaagcacauccccccaccccccguc

SEQ ID NO: 340517 - RNA, 22 nt, Human
cugagguggaggaaggguccau

SEQ ID NO: 340518 - RNA, 22 nt, Human
gcuuugucacuccgagaacaag

SEQ ID NO: 340519 - RNA, 26 nt, Human
uacaaacacucaagcacaucccccca

SEQ ID NO: 340520 - RNA, 18 nt, Human
uagagguauuguguucca

SEQ ID NO: 340521 - RNA, 21 nt, Human
uaggaaacaagaugugaacca

SEQ ID NO: 340522 - RNA, 21 nt, Human
ucacugugcucugagcugagg

SEQ ID NO: 340523 - RNA, 23 nt, Human
uccacugccaggggaaaaguaca

SEQ ID NO: 340524 - RNA, 21 nt, Human
uccccccaccccccguccuca

SEQ ID NO: 340525 - RNA, 21 nt, Human
uccuaagucuacccacccaag

SEQ ID NO: 340526 - RNA, 26 nt, Human
uccuaugacuguauaaugcuuuuacc

SEQ ID NO: 340527 - RNA, 19 nt, Human
ucuccuggugacccagcag

SEQ ID NO: 340528 - RNA, 20 nt, Human
ugagguggaggaagggucca

SEQ ID NO: 340529 - RNA, 22 nt, Human
ugugaaccauaagacucaauga

SEQ ID NO: 340530 - RNA, 24 nt, Human
uucaugcauagagguauuguguuc

SEQ ID NO: 340531 - RNA, 26 nt, Human
uuggaugguggcaauaauuaauacuu

SEQ ID NO: 340532 - RNA, 24 nt, Human
uuugaaguucuauugggaaaguca

SEQ ID NO: 340533 - RNA, 23 nt, Human
uuugucacuccgagaacaagacc

SEQ ID NO: 340534 - RNA, 27 nt, Human
aaacaucuaucucacaggcugaaaaca

SEQ ID NO: 340535 - RNA, 19 nt, Human
aaacccaacaaguuaccaa

SEQ ID NO: 340536 - RNA, 21 nt, Human
aacaucuaucucacaggcuga

SEQ ID NO: 340537 - RNA, 24 nt, Human
aagaaggggaagcagugggguugc

SEQ ID NO: 340538 - RNA, 18 nt, Human
aagaugcgacacccacgg

SEQ ID NO: 340539 - RNA, 21 nt, Human
acacugagaaaacuggaacag

SEQ ID NO: 340540 - RNA, 19 nt, Human
accaagaaggggaagcagu

SEQ ID NO: 340541 - RNA, 21 nt, Human
accaagaaggggaagcagugg

SEQ ID NO: 340542 - RNA, 20 nt, Human
accagcgggcagugcccccu

SEQ ID NO: 340543 - RNA, 19 nt, Human
acccuggcguggaggggug

SEQ ID NO: 340544 - RNA, 19 nt, Human
acccuggcguggaggggug

SEQ ID NO: 340545 - RNA, 22 nt, Human
acgaagccacagaagcuuugag

SEQ ID NO: 340546 - RNA, 22 nt, Human
acuggaacagauaaggccauga

SEQ ID NO: 340547 - RNA, 22 nt, Human
agaaaacagcucggcacacuag

SEQ ID NO: 340548 - RNA, 19 nt, Human
agaaaagguuccauuacaa

SEQ ID NO: 340549 - RNA, 21 nt, Human
agccacagaagcuuugaggga

SEQ ID NO: 340550 - RNA, 21 nt, Human
aggacaggcugugcaaagcca

SEQ ID NO: 340551 - RNA, 21 nt, Human
aggcugaaaacacugagaaaa

SEQ ID NO: 340552 - RNA, 24 nt, Human
agggagggcccagcgcuggagaag

SEQ ID NO: 340553 - RNA, 24 nt, Human
augauaauaaauaaggcuuuuuuu

SEQ ID NO: 340554 - RNA, 18 nt, Human
caacgguggggaaaauga

SEQ ID NO: 340555 - RNA, 18 nt, Human
caagaaggggaagcagug

SEQ ID NO: 340556 - RNA, 25 nt, Human
cagaaaagguuccauuacaaaccag

SEQ ID NO: 340557 - RNA, 19 nt, Human
cagaguuugcagcugcggc

SEQ ID NO: 340558 - RNA, 23 nt, Human
caggacaggcugugcaaagccag

SEQ ID NO: 340559 - RNA, 23 nt, Human
cagggcugggcccaggacaggcu

SEQ ID NO: 340560 - RNA, 20 nt, Human
caguggggaguccccaggug

SEQ ID NO: 340561 - RNA, 19 nt, Human
ccagcccacugauugugcc

SEQ ID NO: 340562 - RNA, 22 nt, Human
ccaggugacgcccaccugcgcc

SEQ ID NO: 340563 - RNA, 21 nt, Human
ccaugaugguuggaaaaaaac

SEQ ID NO: 340564 - RNA, 18 nt, Human
cccccuggggugguggga

SEQ ID NO: 340565 - RNA, 26 nt, Human
cccccugggguggugggaggacgggg

SEQ ID NO: 340566 - RNA, 23 nt, Human
ccccugggguggugggaggacgg

SEQ ID NO: 340567 - RNA, 21 nt, Human
cccugcccuggcugaggcugg

SEQ ID NO: 340568 - RNA, 20 nt, Human
cccuggcguggagggguggc

SEQ ID NO: 340569 - RNA, 20 nt, Human
cccuggcguggagggguggc

SEQ ID NO: 340570 - RNA, 22 nt, Human
ccugcccccuggggugguggga

SEQ ID NO: 340571 - RNA, 19 nt, Human
ccugccugccugcccccug

SEQ ID NO: 340572 - RNA, 20 nt, Human
ccuuaaggcacgucuuuugu

SEQ ID NO: 340573 - RNA, 23 nt, Human
cggcccggggcucagggcugggc

SEQ ID NO: 340574 - RNA, 24 nt, Human
cggcccggggcucagggcugggcc

SEQ ID NO: 340575 - RNA, 22 nt, Human
cgggaagauaggggcacagaaa

SEQ ID NO: 340576 - RNA, 20 nt, Human
cgggggcggguggggcgggg

SEQ ID NO: 340577 - RNA, 20 nt, Human
cgggggcggguggggcgggg

SEQ ID NO: 340578 - RNA, 18 nt, Human
cugccugcccccuggggu

SEQ ID NO: 340579 - RNA, 23 nt, Human
cuggggguagggugucccggggc

SEQ ID NO: 340580 - RNA, 21 nt, Human
gaaaacacugagaaaacugga

SEQ ID NO: 340581 - RNA, 21 nt, Human
gaagauaggggcacagaaaag

SEQ ID NO: 340582 - RNA, 19 nt, Human
gacgcuggggccugggagg

SEQ ID NO: 340583 - RNA, 20 nt, Human
gaggagggccccggucuucc

SEQ ID NO: 340584 - RNA, 19 nt, Human
gcacggaggagaagcgugg

SEQ ID NO: 340585 - RNA, 20 nt, Human
gcuggggagaagacgcuggg

SEQ ID NO: 340586 - RNA, 21 nt, Human
gcuggggagaagacgcugggg

SEQ ID NO: 340587 - RNA, 23 nt, Human
ggaggggggcggccaaggggccg

SEQ ID NO: 340588 - RNA, 21 nt, Human
ggcagugcccccuucuugagc

SEQ ID NO: 340589 - RNA, 20 nt, Human
ggccugccugccugcccccu

SEQ ID NO: 340590 - RNA, 21 nt, Human
ggccugggaggggggcggcca

SEQ ID NO: 340591 - RNA, 23 nt, Human
gggagaagacgcuggggccuggg

SEQ ID NO: 340592 - RNA, 20 nt, Human
gggcaccugggcacgcggcg

SEQ ID NO: 340593 - RNA, 26 nt, Human
gggccugccugccugcccccuggggu

SEQ ID NO: 340594 - RNA, 19 nt, Human
gggcugggcccaggacagg

SEQ ID NO: 340595 - RNA, 18 nt, Human
ggggaaaaugauaauaaa

SEQ ID NO: 340596 - RNA, 18 nt, Human
ggggcggguggggcgggg

SEQ ID NO: 340597 - RNA, 19 nt, Human
ggggcggguggggcggggg

SEQ ID NO: 340598 - RNA, 21 nt, Human
ggggguagggugucccggggc

SEQ ID NO: 340599 - RNA, 22 nt, Human
ggguggcgggggcggguggggc

SEQ ID NO: 340600 - RNA, 21 nt, Human
gguggcgggggcggguggggc

SEQ ID NO: 340601 - RNA, 21 nt, Human
guggcgggggcggguggggcg

SEQ ID NO: 340602 - RNA, 25 nt, Human
guggcgggggcggguggggcgggga

SEQ ID NO: 340603 - RNA, 19 nt, Human
uaagaaagacuacaaaaag

SEQ ID NO: 340604 - RNA, 22 nt, Human
uaagaaagacuacaaaaaggua

SEQ ID NO: 340605 - RNA, 23 nt, Human
uaagaaagacuacaaaaagguag

SEQ ID NO: 340606 - RNA, 22 nt, Human
uaaggcuuuuuuuuuuuuuuaa

SEQ ID NO: 340607 - RNA, 19 nt, Human
uaccaagaaggggaagcag

SEQ ID NO: 340608 - RNA, 28 nt, Human
uaccaagaaggggaagcagugggguugc

SEQ ID NO: 340609 - RNA, 22 nt, Human
uagaaaacagcucggcacacua

SEQ ID NO: 340610 - RNA, 21 nt, Human
uccccaggugacgcccaccug

SEQ ID NO: 340611 - RNA, 23 nt, Human
ucccugcccuggcugaggcugga

SEQ ID NO: 340612 - RNA, 22 nt, Human
ucucacaggcugaaaacacuga

SEQ ID NO: 340613 - RNA, 21 nt, Human
ugcccuggcugaggcuggagc

SEQ ID NO: 340614 - RNA, 25 nt, Human
ugcuggggguagggugucccggggc

SEQ ID NO: 340615 - RNA, 22 nt, Human
uggaaaaaaacccaacaaguua

SEQ ID NO: 340616 - RNA, 25 nt, Human
uggaaaaaaacccaacaaguuacca

SEQ ID NO: 340617 - RNA, 20 nt, Human
uggaacagauaaggccauga

SEQ ID NO: 340618 - RNA, 22 nt, Human
uggaacagauaaggccaugaug

SEQ ID NO: 340619 - RNA, 19 nt, Human
uggagcagugaccacgaag

SEQ ID NO: 340620 - RNA, 22 nt, Human
ugggaggacggggcuggggaga

SEQ ID NO: 340621 - RNA, 19 nt, Human
ugggaggggggcggccaag

SEQ ID NO: 340622 - RNA, 20 nt, Human
ugggaggggggcggccaagg

SEQ ID NO: 340623 - RNA, 23 nt, Human
ugggaggggggcggccaaggggc

SEQ ID NO: 340624 - RNA, 25 nt, Human
ugggaggggggcggccaaggggccg

SEQ ID NO: 340625 - RNA, 23 nt, Human
ugggcccaggacaggcugugcaa

SEQ ID NO: 340626 - RNA, 21 nt, Human
uggggagaagacgcuggggcc

SEQ ID NO: 340627 - RNA, 21 nt, Human
uggggagaagacgcuggggcc

SEQ ID NO: 340628 - RNA, 19 nt, Human
uggggccugggaggggggc

SEQ ID NO: 340629 - RNA, 18 nt, Human
uggggcggggaggccaag

SEQ ID NO: 340630 - RNA, 19 nt, Human
uggggcggggaggccaagg

SEQ ID NO: 340631 - RNA, 22 nt, Human
uggggguagggugucccggggc

SEQ ID NO: 340632 - RNA, 22 nt, Human
ugggggucgcacggcacggagg

SEQ ID NO: 340633 - RNA, 22 nt, Human
ugggguggugggaggacggggc

SEQ ID NO: 340634 - RNA, 24 nt, Human
ugggguggugggaggacggggcug

SEQ ID NO: 340635 - RNA, 21 nt, Human
ugggguugcuggggguagggu

SEQ ID NO: 340636 - RNA, 20 nt, Human
uggugggaggacggggcugg

SEQ ID NO: 340637 - RNA, 18 nt, Human
ugucucggagucccccuc

SEQ ID NO: 340638 - RNA, 21 nt, Human
uguuuuaagaaagacuacaaa

SEQ ID NO: 340639 - RNA, 20 nt, Human
uuaauuccuccgcuucuccc

SEQ ID NO: 340640 - RNA, 18 nt, Human
uuccuccgcuucucccca

SEQ ID NO: 340641 - RNA, 20 nt, Human
uuccuccgcuucuccccacu

SEQ ID NO: 340642 - RNA, 24 nt, Human
uuccuccgcuucuccccacuucug

SEQ ID NO: 340643 - RNA, 23 nt, Human
uucuugccauaaacaucuaucuc

SEQ ID NO: 340644 - RNA, 18 nt, Human
uugcacuuaauaccaaga

SEQ ID NO: 340645 - RNA, 22 nt, Human
uuugugucagaguuugcagcug

SEQ ID NO: 340646 - RNA, 23 nt, Human
aacacugaccccgggagcccccc

SEQ ID NO: 340647 - RNA, 26 nt, Human
aacauuuuuccaaaaagagaaaacua

SEQ ID NO: 340648 - RNA, 24 nt, Human
aaggaacccauggucugguggggc

SEQ ID NO: 340649 - RNA, 24 nt, Human
acacugcuguguccuggcacgagc

SEQ ID NO: 340650 - RNA, 20 nt, Human
acauggugcuaccagacaag

SEQ ID NO: 340651 - RNA, 23 nt, Human
agaacuccagcacgcagcugucc

SEQ ID NO: 340652 - RNA, 22 nt, Human
agacaaacagugugauuauucc

SEQ ID NO: 340653 - RNA, 18 nt, Human
agagguccaggugggacu

SEQ ID NO: 340654 - RNA, 22 nt, Human
agcacgcgucuuugucuuccug

SEQ ID NO: 340655 - RNA, 23 nt, Human
aggaaaagccgggcauuacaauc

SEQ ID NO: 340656 - RNA, 18 nt, Human
aggaggcgccggccgggg

SEQ ID NO: 340657 - RNA, 18 nt, Human
aggcucgucuuucuucuc

SEQ ID NO: 340658 - RNA, 21 nt, Human
agggaccuggggacccagagc

SEQ ID NO: 340659 - RNA, 21 nt, Human
agggcgcugcgcccagcuggg

SEQ ID NO: 340660 - RNA, 19 nt, Human
aggucuggaucuaaaaggc

SEQ ID NO: 340661 - RNA, 23 nt, Human
agugggagcccuggccugggcuu

SEQ ID NO: 340662 - RNA, 18 nt, Human
aucacaucaucuaagagg

SEQ ID NO: 340663 - RNA, 25 nt, Human
auggcggcggcgguggcggcggcgc

SEQ ID NO: 340664 - RNA, 21 nt, Human
auuacaauccguuaacuguga

SEQ ID NO: 340665 - RNA, 19 nt, Human
cagagucccacauccuucc

SEQ ID NO: 340666 - RNA, 20 nt, Human
cagcugccccucaaguccuu

SEQ ID NO: 340667 - RNA, 26 nt, Human
ccacauccuuccugcugcugauaaaa

SEQ ID NO: 340668 - RNA, 22 nt, Human
ccagguucccagagugaccagg

SEQ ID NO: 340669 - RNA, 21 nt, Human
cccagagcacagcuacagcca

SEQ ID NO: 340670 - RNA, 18 nt, Human
ccccucaaguccuuuggc

SEQ ID NO: 340671 - RNA, 20 nt, Human
cccgccucggggcauccggc

SEQ ID NO: 340672 - RNA, 23 nt, Human
ccugcaccccucacucuggcgca

SEQ ID NO: 340673 - RNA, 21 nt, Human
ccugcagcacagccggccucc

SEQ ID NO: 340674 - RNA, 20 nt, Human
ccuucuugaacacugacccc

SEQ ID NO: 340675 - RNA, 23 nt, Human
cgcccagcugggucccucccaca

SEQ ID NO: 340676 - RNA, 20 nt, Human
cgccucggggcauccggcag

SEQ ID NO: 340677 - RNA, 24 nt, Human
cgucuuugucuuccugcaccccuc

SEQ ID NO: 340678 - RNA, 23 nt, Human
cuccagggacgcuggcgagcucu

SEQ ID NO: 340679 - RNA, 22 nt, Human
cucgcuggggguggggugcucc

SEQ ID NO: 340680 - RNA, 20 nt, Human
cugcagcacagccggccucc

SEQ ID NO: 340681 - RNA, 19 nt, Human
cugcugauaaaacuucugg

SEQ ID NO: 340682 - RNA, 21 nt, Human
cuggccugggcuucuguagcu

SEQ ID NO: 340683 - RNA, 20 nt, Human
cuguagcuucaacaacugcu

SEQ ID NO: 340684 - RNA, 21 nt, Human
cuucuugaacacugaccccgg

SEQ ID NO: 340685 - RNA, 18 nt, Human
cuuugaagagguccaggu

SEQ ID NO: 340686 - RNA, 19 nt, Human
cuuugucuuccugcacccc

SEQ ID NO: 340687 - RNA, 19 nt, Human
gaccccgggagcccccgcu

SEQ ID NO: 340688 - RNA, 19 nt, Human
gacgacacgcgggauggcu

SEQ ID NO: 340689 - RNA, 18 nt, Human
gagcacagcuacagccag

SEQ ID NO: 340690 - RNA, 18 nt, Human
gcccuggccugggcuucu

SEQ ID NO: 340691 - RNA, 24 nt, Human
gcggcggcgguggcggcggcggcc

SEQ ID NO: 340692 - RNA, 30 nt, Human
gcggcgguggcggcggcggccgcuccuccu

SEQ ID NO: 340693 - RNA, 24 nt, Human
gcggcucccgcggcggcggcagcg

SEQ ID NO: 340694 - RNA, 19 nt, Human
gcucugugccuccccagcg

SEQ ID NO: 340695 - RNA, 19 nt, Human
ggacacagcgauugucagc

SEQ ID NO: 340696 - RNA, 19 nt, Human
ggacagagucccacauccu

SEQ ID NO: 340697 - RNA, 21 nt, Human
ggacccagagcacagcuacag

SEQ ID NO: 340698 - RNA, 22 nt, Human
ggacugaauauacugcaaugua

SEQ ID NO: 340699 - RNA, 22 nt, Human
ggaucuaaaaggccacagggcg

SEQ ID NO: 340700 - RNA, 20 nt, Human
ggcggcggcgguggcggcgg

SEQ ID NO: 340701 - RNA, 23 nt, Human
ggcggcggcgguggcggcggcgg

SEQ ID NO: 340702 - RNA, 22 nt, Human
gggcauccggcagggaggucug

SEQ ID NO: 340703 - RNA, 30 nt, Human
gggccaaaguccaggguuccagcagaggaa

SEQ ID NO: 340704 - RNA, 20 nt, Human
gguuccaguugagugcagag

SEQ ID NO: 340705 - RNA, 22 nt, Human
gugaaauccagguucccagagu

SEQ ID NO: 340706 - RNA, 23 nt, Human
guggcugcgcagggaccuggggg

SEQ ID NO: 340707 - RNA, 21 nt, Human
gugucucaaguucagggcuuc

SEQ ID NO: 340708 - RNA, 22 nt, Human
guuucuguggcuuguucuuuuu

SEQ ID NO: 340709 - RNA, 21 nt, Human
guuuguccagaauaaggaacc

SEQ ID NO: 340710 - RNA, 22 nt, Human
uacacauucauaagaaacguuc

SEQ ID NO: 340711 - RNA, 26 nt, Human
uaccagacaagggcacuccacuuucc

SEQ ID NO: 340712 - RNA, 24 nt, Human
uaguucagagggagguguucugga

SEQ ID NO: 340713 - RNA, 21 nt, Human
uauggcggcggcgguggcggc

SEQ ID NO: 340714 - RNA, 19 nt, Human
ucagcugccccucaagucc

SEQ ID NO: 340715 - RNA, 23 nt, Human
ucccacauggugcuaccagacaa

SEQ ID NO: 340716 - RNA, 20 nt, Human
ucuagucgggcucugccagg

SEQ ID NO: 340717 - RNA, 22 nt, Human
ucuauggcggcggcgguggcuu

SEQ ID NO: 340718 - RNA, 23 nt, Human
ucuggaagacuccguggagcggg

SEQ ID NO: 340719 - RNA, 18 nt, Human
ugaaagacacugcugugu

SEQ ID NO: 340720 - RNA, 18 nt, Human
ugaacacugaccccggga

SEQ ID NO: 340721 - RNA, 21 nt, Human
ugaagagguccaggugggacu

SEQ ID NO: 340722 - RNA, 22 nt, Human
ugaaugagaacaaaacauuugg

SEQ ID NO: 340723 - RNA, 23 nt, Human
ugcugcguguugguccccguugg

SEQ ID NO: 340724 - RNA, 23 nt, Human
uggagcgggacgcaggcacugcu

SEQ ID NO: 340725 - RNA, 18 nt, Human
uggcagguaggaggggag

SEQ ID NO: 340726 - RNA, 19 nt, Human
uggcaucuggagauggguu

SEQ ID NO: 340727 - RNA, 21 nt, Human
uggcgcaggcccagcgaugcu

SEQ ID NO: 340728 - RNA, 18 nt, Human
uggcggcggcgguggcgg

SEQ ID NO: 340729 - RNA, 20 nt, Human
uggggguggggugcuccggg

SEQ ID NO: 340730 - RNA, 18 nt, Human
ugggucccucccacaugg

SEQ ID NO: 340731 - RNA, 21 nt, Human
uggugcuaccagacaagggca

SEQ ID NO: 340732 - RNA, 22 nt, Human
ugguggcugcgcagggaccugg

SEQ ID NO: 340733 - RNA, 21 nt, Human
ugguuccaguugagugcagag

SEQ ID NO: 340734 - RNA, 18 nt, Human
uguugguccccguuggua

SEQ ID NO: 340735 - RNA, 19 nt, Human
uucagugucuccaaggaga

SEQ ID NO: 340736 - RNA, 28 nt, Human
uuccaaaaagagaaaacuauugcauuuc

SEQ ID NO: 340737 - RNA, 24 nt, Human
uucugugugaaugagaacaaaaca

SEQ ID NO: 340738 - RNA, 22 nt, Human
uucuugaacacugaccccggga

SEQ ID NO: 340739 - RNA, 19 nt, Human
uugguaaguaacagucucc

SEQ ID NO: 340740 - RNA, 24 nt, Human
aaaaaagucaguccgguauuuaga

SEQ ID NO: 340741 - RNA, 24 nt, Human
aaaaauuaagaaacaggaaaagga

SEQ ID NO: 340742 - RNA, 20 nt, Human
aaacaggaaaaggaaggagg

SEQ ID NO: 340743 - RNA, 19 nt, Human
aacaggaaaaggaaggagc

SEQ ID NO: 340744 - RNA, 23 nt, Human
aacuacugggucaagucuucacc

SEQ ID NO: 340745 - RNA, 21 nt, Human
aagcaagugcaaagaagggcc

SEQ ID NO: 340746 - RNA, 20 nt, Human
aagcuacccuauguagagga

SEQ ID NO: 340747 - RNA, 24 nt, Human
aaugagaagacaaaaauuaagaaa

SEQ ID NO: 340748 - RNA, 24 nt, Human
aaugagacugaagagucccuagag

SEQ ID NO: 340749 - RNA, 25 nt, Human
acauucaucauacuuagcccauucc

SEQ ID NO: 340750 - RNA, 20 nt, Human
acccccacccuuuuccccaa

SEQ ID NO: 340751 - RNA, 21 nt, Human
acccccacccuuuuccccaaa

SEQ ID NO: 340752 - RNA, 21 nt, Human
acugaggagaaaagaaagcag

SEQ ID NO: 340753 - RNA, 24 nt, Human
agaaaaaaagggacuaucaucuaa

SEQ ID NO: 340754 - RNA, 20 nt, Human
agaaagcaggucuagcugau

SEQ ID NO: 340755 - RNA, 20 nt, Human
agaagaugcaacagugagaa

SEQ ID NO: 340756 - RNA, 24 nt, Human
agaagcaagugcaaagaagggccu

SEQ ID NO: 340757 - RNA, 22 nt, Human
agagacauacugaacuacuggg

SEQ ID NO: 340758 - RNA, 18 nt, Human
agcaggaaugagaagaca

SEQ ID NO: 340759 - RNA, 19 nt, Human
agccagcacuaccuaugac

SEQ ID NO: 340760 - RNA, 23 nt, Human
aggagaaaagaaagcaggucuag

SEQ ID NO: 340761 - RNA, 23 nt, Human
agguacuaguagacugggugacu

SEQ ID NO: 340762 - RNA, 22 nt, Human
aguuugaauuagguuuucugug

SEQ ID NO: 340763 - RNA, 20 nt, Human
caagucuucaccuggagcca

SEQ ID NO: 340764 - RNA, 24 nt, Human
cacccaagcaacucccugcuccua

SEQ ID NO: 340765 - RNA, 18 nt, Human
cagaagaugcaacaguga

SEQ ID NO: 340766 - RNA, 19 nt, Human
cagaagaugcaacagugag

SEQ ID NO: 340767 - RNA, 20 nt, Human
caugaaccaauaaauccuuu

SEQ ID NO: 340768 - RNA, 18 nt, Human
cauucuaucugccccacc

SEQ ID NO: 340769 - RNA, 23 nt, Human
ccacccaagcaacucccugcucc

SEQ ID NO: 340770 - RNA, 18 nt, Human
ccacccuuuuccccaaag

SEQ ID NO: 340771 - RNA, 23 nt, Human
ccaguuugaauuagguuuucugu

SEQ ID NO: 340772 - RNA, 20 nt, Human
cccaccuuucugaagucucc

SEQ ID NO: 340773 - RNA, 23 nt, Human
cccgcaguccuaaguccugacac

SEQ ID NO: 340774 - RNA, 18 nt, Human
cuauguagaggacaaagu

SEQ ID NO: 340775 - RNA, 20 nt, Human
cuccuaaaucuggaaaacuc

SEQ ID NO: 340776 - RNA, 22 nt, Human
cugacccccacccuuuucccca

SEQ ID NO: 340777 - RNA, 22 nt, Human
cugccccaccuuucugaagucu

SEQ ID NO: 340778 - RNA, 21 nt, Human
cugguacaaagaugccuucuu

SEQ ID NO: 340779 - RNA, 22 nt, Human
cuuagcccauuccuaccuuccc

SEQ ID NO: 340780 - RNA, 23 nt, Human
gaaaagaaagcaggucuagcuga

SEQ ID NO: 340781 - RNA, 18 nt, Human
gaaacaggaaaaggaagg

SEQ ID NO: 340782 - RNA, 18 nt, Human
gaagucuccuaaaucugg

SEQ ID NO: 340783 - RNA, 19 nt, Human
gagacuagaaacgaggaaa

SEQ ID NO: 340784 - RNA, 23 nt, Human
gaggagaauggcuucccucuccu

SEQ ID NO: 340785 - RNA, 20 nt, Human
gcaauagggugagagggaag

SEQ ID NO: 340786 - RNA, 20 nt, Human
gcagcuuguauugagggaaa

SEQ ID NO: 340787 - RNA, 18 nt, Human
gcccauauaugcccaaag

SEQ ID NO: 340788 - RNA, 20 nt, Human
gcuaaaauaagaguagccug

SEQ ID NO: 340789 - RNA, 24 nt, Human
ggagaauggcuucccucuccuucc

SEQ ID NO: 340790 - RNA, 21 nt, Human
ggaggcugacccccacccuuu

SEQ ID NO: 340791 - RNA, 23 nt, Human
ggaggcugacccccacccuuuuc

SEQ ID NO: 340792 - RNA, 18 nt, Human
ggcaauagggugagaggg

SEQ ID NO: 340793 - RNA, 21 nt, Human
gugacccaggccuaaucagug

SEQ ID NO: 340794 - RNA, 24 nt, Human
uaaccuaaaccccgcaguccuaag

SEQ ID NO: 340795 - RNA, 18 nt, Human
uaagaaacaggaaaagga

SEQ ID NO: 340796 - RNA, 18 nt, Human
uacugcuuuucccaagga

SEQ ID NO: 340797 - RNA, 24 nt, Human
uagcaagcuaaaauaagaguagcc

SEQ ID NO: 340798 - RNA, 20 nt, Human
uaggaaaagaauagccaaau

SEQ ID NO: 340799 - RNA, 21 nt, Human
uauaauuucuuaaaaucugcu

SEQ ID NO: 340800 - RNA, 18 nt, Human
uauagaauaagcaaauua

SEQ ID NO: 340801 - RNA, 18 nt, Human
ucccuagaggagaauggc

SEQ ID NO: 340802 - RNA, 21 nt, Human
uccugacacguaugacaagau

SEQ ID NO: 340803 - RNA, 25 nt, Human
uccuuuuuauuuuaagccaguuuga

SEQ ID NO: 340804 - RNA, 21 nt, Human
ucugaagucuccuaaaucugg

SEQ ID NO: 340805 - RNA, 24 nt, Human
ucugguacaaagaugccuucuuuu

SEQ ID NO: 340806 - RNA, 21 nt, Human
ugaaaaggucagaggcagcaa

SEQ ID NO: 340807 - RNA, 18 nt, Human
ugaacuacugggucaagu

SEQ ID NO: 340808 - RNA, 23 nt, Human
ugacacguaugacaagaugcugc

SEQ ID NO: 340809 - RNA, 19 nt, Human
ugacagaagcuacccuaug

SEQ ID NO: 340810 - RNA, 19 nt, Human
ugacccaggccuaaucagu

SEQ ID NO: 340811 - RNA, 19 nt, Human
ugacccccacccuuuuccc

SEQ ID NO: 340812 - RNA, 20 nt, Human
ugagaagcaagugcaaagaa

SEQ ID NO: 340813 - RNA, 21 nt, Human
ugagaagcaagugcaaagaag

SEQ ID NO: 340814 - RNA, 22 nt, Human
ugcaacagugagaaaaaaguca

SEQ ID NO: 340815 - RNA, 24 nt, Human
ugccccaccuuucugaagucuccu

SEQ ID NO: 340816 - RNA, 19 nt, Human
uggagguagaaaaaaaggg

SEQ ID NO: 340817 - RNA, 22 nt, Human
ugggaagaaccaagauucccug

SEQ ID NO: 340818 - RNA, 18 nt, Human
ugugguggaaauaaauga

SEQ ID NO: 340819 - RNA, 21 nt, Human
uuagcccauuccuaccuuccc

SEQ ID NO: 340820 - RNA, 22 nt, Human
uuagcccauuccuaccuuccca

SEQ ID NO: 340821 - RNA, 24 nt, Human
uuagcggccacccaagcaacuccc

SEQ ID NO: 340822 - RNA, 22 nt, Human
uucaucauacuuagcccauucc

SEQ ID NO: 340823 - RNA, 23 nt, Human
uucugguacaaagaugccuucuu

SEQ ID NO: 340824 - RNA, 20 nt, Human
uuugcugagauuucugguac

SEQ ID NO: 340825 - RNA, 22 nt, Human
uuuuugguauuuaaaauguuuu

SEQ ID NO: 340826 - RNA, 19 nt, Human
uuuuuuuuuuuuuuuuugg

SEQ ID NO: 340827 - RNA, 23 nt, Human
uuuuuuuuuuuuuuuuugguauu

SEQ ID NO: 340828 - RNA, 23 nt, Human
aaacuggagaccggacccucagc

SEQ ID NO: 340829 - RNA, 18 nt, Human
aaagcuccccacgagccu

SEQ ID NO: 340830 - RNA, 21 nt, Human
aaagcuccccacgagccuccu

SEQ ID NO: 340831 - RNA, 24 nt, Human
agaagguuuauugguuccucuugg

SEQ ID NO: 340832 - RNA, 23 nt, Human
agaguucuucccccucuccugcc

SEQ ID NO: 340833 - RNA, 24 nt, Human
agaguucuucccccucuccugccu

SEQ ID NO: 340834 - RNA, 18 nt, Human
aggaaaaggggguucaga

SEQ ID NO: 340835 - RNA, 20 nt, Human
aggaaaaggggguucagaaa

SEQ ID NO: 340836 - RNA, 21 nt, Human
aggcuuauaagcaagggcggg

SEQ ID NO: 340837 - RNA, 18 nt, Human
aguucuggguuuccccag

SEQ ID NO: 340838 - RNA, 19 nt, Human
aguucuggguuuccccagc

SEQ ID NO: 340839 - RNA, 23 nt, Human
caacaaggucccuucugcggucu

SEQ ID NO: 340840 - RNA, 18 nt, Human
caaggaaaaggggguuca

SEQ ID NO: 340841 - RNA, 21 nt, Human
cacagccccuuucuuguccgc

SEQ ID NO: 340842 - RNA, 22 nt, Human
caccggaacaggagccgugcgg

SEQ ID NO: 340843 - RNA, 21 nt, Human
cacgagccuccucuguccccc

SEQ ID NO: 340844 - RNA, 18 nt, Human
cacugcgccacccccggg

SEQ ID NO: 340845 - RNA, 19 nt, Human
cacugcgccacccccgggu

SEQ ID NO: 340846 - RNA, 24 nt, Human
cagccuccuggccgucgcgccccc

SEQ ID NO: 340847 - RNA, 20 nt, Human
caguucuggguuuccccagc

SEQ ID NO: 340848 - RNA, 21 nt, Human
ccacccccgggugugccuccu

SEQ ID NO: 340849 - RNA, 25 nt, Human
ccccacgagccuccucugucccccc

SEQ ID NO: 340850 - RNA, 18 nt, Human
ccccagcucuggcugacc

SEQ ID NO: 340851 - RNA, 24 nt, Human
ccccucccaccaccuguccagaag

SEQ ID NO: 340852 - RNA, 21 nt, Human
ccgucgcgcccccuccucacu

SEQ ID NO: 340853 - RNA, 19 nt, Human
ccucugacaccggaacagg

SEQ ID NO: 340854 - RNA, 22 nt, Human
ccucugacaccggaacaggagc

SEQ ID NO: 340855 - RNA, 19 nt, Human
cgagccuccucuguccccc

SEQ ID NO: 340856 - RNA, 23 nt, Human
cgaucuggcuuccucuuggccgu

SEQ ID NO: 340857 - RNA, 23 nt, Human
cgccgaaagcccaguucucucaa

SEQ ID NO: 340858 - RNA, 23 nt, Human
cggacccucagcgaucuggcuuc

SEQ ID NO: 340859 - RNA, 21 nt, Human
cucagcgaucuggcuuccucu

SEQ ID NO: 340860 - RNA, 19 nt, Human
cuccaccagccuccuggcc

SEQ ID NO: 340861 - RNA, 23 nt, Human
cuccucacugcgccacccccggg

SEQ ID NO: 340862 - RNA, 25 nt, Human
cuccucuguccccccgcgccgaaag

SEQ ID NO: 340863 - RNA, 22 nt, Human
cucucaaaacuugggggcccaa

SEQ ID NO: 340864 - RNA, 24 nt, Human
cugacaccggaacaggagccgugc

SEQ ID NO: 340865 - RNA, 19 nt, Human
cugcggucucaaaggcuua

SEQ ID NO: 340866 - RNA, 22 nt, Human
gccgaaagcccaguucucucaa

SEQ ID NO: 340867 - RNA, 21 nt, Human
gcugaccauuuuguucccuga

SEQ ID NO: 340868 - RNA, 22 nt, Human
ggagagaguucuucccccucuc

SEQ ID NO: 340869 - RNA, 28 nt, Human
ggauauagcaggaggcaaaccgguaccc

SEQ ID NO: 340870 - RNA, 19 nt, Human
gggcagagggcuaaagaag

SEQ ID NO: 340871 - RNA, 22 nt, Human
guuuauugguuccucuugggaa

SEQ ID NO: 340872 - RNA, 22 nt, Human
uauagcaggaggcaaacuggag

SEQ ID NO: 340873 - RNA, 25 nt, Human
ucacacagccccuuucuuguccgca

SEQ ID NO: 340874 - RNA, 19 nt, Human
uccagaagcugccuuugaa

SEQ ID NO: 340875 - RNA, 19 nt, Human
ucccccucuccugccuggg

SEQ ID NO: 340876 - RNA, 19 nt, Human
uccgcaaagacugaggagc

SEQ ID NO: 340877 - RNA, 31 nt, Human
ucucaaaggcuuauaagcaagggcgggggcu

SEQ ID NO: 340878 - RNA, 19 nt, Human
ugaguccccggcaggcggc

SEQ ID NO: 340879 - RNA, 22 nt, Human
ugccugggugucgcuccaccag

SEQ ID NO: 340880 - RNA, 19 nt, Human
uggaggacucccccaacuc

SEQ ID NO: 340881 - RNA, 23 nt, Human
uggcugaccauuuuguucccuga

SEQ ID NO: 340882 - RNA, 23 nt, Human
uguccagaagcugccuuugaagu

SEQ ID NO: 340883 - RNA, 23 nt, Human
uucccugagugucugaguccccg

SEQ ID NO: 340884 - RNA, 24 nt, Human
uucuuguccgcaaagacugaggag

SEQ ID NO: 340885 - RNA, 20 nt, Human
aaaagccagugguuuucaag

SEQ ID NO: 340886 - RNA, 21 nt, Human
aaaauagccaucaacauuucu

SEQ ID NO: 340887 - RNA, 23 nt, Human
aaacucucaacaucguaaguaug

SEQ ID NO: 340888 - RNA, 21 nt, Human
aaagaaaucagcuaacucaaa

SEQ ID NO: 340889 - RNA, 20 nt, Human
aaagaacagaauaaagaaau

SEQ ID NO: 340890 - RNA, 18 nt, Human
aacaguuaauaacagaca

SEQ ID NO: 340891 - RNA, 26 nt, Human
aagaagcauaagcuaauguuuuccac

SEQ ID NO: 340892 - RNA, 22 nt, Human
aagaauaaacuaaagaacagaa

SEQ ID NO: 340893 - RNA, 25 nt, Human
aauacuuacuuauccccaaaugcac

SEQ ID NO: 340894 - RNA, 21 nt, Human
aauaucuauuaacuuuaugac

SEQ ID NO: 340895 - RNA, 20 nt, Human
acaaugacaaaauacuggag

SEQ ID NO: 340896 - RNA, 19 nt, Human
acucaaaggucaacaacug

SEQ ID NO: 340897 - RNA, 18 nt, Human
agagaagccaacuguagg

SEQ ID NO: 340898 - RNA, 23 nt, Human
agauuaauaucuauuaacuuuau

SEQ ID NO: 340899 - RNA, 19 nt, Human
agguuuuacuaacacaccu

SEQ ID NO: 340900 - RNA, 22 nt, Human
aguaacaaugacugaagaggaa

SEQ ID NO: 340901 - RNA, 18 nt, Human
auaaaaugugcuuaccuc

SEQ ID NO: 340902 - RNA, 26 nt, Human
auaccgggaaggcgccccgacugcgc

SEQ ID NO: 340903 - RNA, 19 nt, Human
auguuauuuggaaagauaa

SEQ ID NO: 340904 - RNA, 24 nt, Human
cacacacauuaagaaaugaacaaa

SEQ ID NO: 340905 - RNA, 21 nt, Human
cacauuaagaaaugaacaaaa

SEQ ID NO: 340906 - RNA, 18 nt, Human
cagaauaaagaaaucagc

SEQ ID NO: 340907 - RNA, 19 nt, Human
caguaacaaugacugaaga

SEQ ID NO: 340908 - RNA, 18 nt, Human
caucaucacaaaguucuu

SEQ ID NO: 340909 - RNA, 21 nt, Human
ccccgggcuuuuagcaccugc

SEQ ID NO: 340910 - RNA, 20 nt, Human
cccuccuuucccauuauucc

SEQ ID NO: 340911 - RNA, 18 nt, Human
cccuccuuucccauuucc

SEQ ID NO: 340912 - RNA, 22 nt, Human
cccuccuuucccauuuccaucc

SEQ ID NO: 340913 - RNA, 20 nt, Human
ccuaaaaaauauccuuggua

SEQ ID NO: 340914 - RNA, 23 nt, Human
ccugacacugcagaacauuuagc

SEQ ID NO: 340915 - RNA, 24 nt, Human
ccuuacgucuauauaaaaugugcu

SEQ ID NO: 340916 - RNA, 19 nt, Human
cucaaaggucaacaacugg

SEQ ID NO: 340917 - RNA, 21 nt, Human
cucacaguaaucugaaagauu

SEQ ID NO: 340918 - RNA, 23 nt, Human
cucuccauaaguacuucuuagaa

SEQ ID NO: 340919 - RNA, 19 nt, Human
cugggguaaaaggcgccua

SEQ ID NO: 340920 - RNA, 25 nt, Human
cuguucacaaauucaacaaacaaga

SEQ ID NO: 340921 - RNA, 19 nt, Human
gaacauuuagcauuuccug

SEQ ID NO: 340922 - RNA, 18 nt, Human
gagagaagccaacuguag

SEQ ID NO: 340923 - RNA, 23 nt, Human
uaaaaaaauaugcucaucuauua

SEQ ID NO: 340924 - RNA, 24 nt, Human
uaaaaaacaaguaacaaauuuuug

SEQ ID NO: 340925 - RNA, 20 nt, Human
uaaaaguguuuugaacagau

SEQ ID NO: 340926 - RNA, 18 nt, Human
uaacaguuaauaacagac

SEQ ID NO: 340927 - RNA, 18 nt, Human
uaacucaaaggucaacaa

SEQ ID NO: 340928 - RNA, 25 nt, Human
uaacuuuaugacuuccacagaaagu

SEQ ID NO: 340929 - RNA, 22 nt, Human
uaccccugacacugcagaacau

SEQ ID NO: 340930 - RNA, 25 nt, Human
uagcucaauugcgaaaaacaaugac

SEQ ID NO: 340931 - RNA, 24 nt, Human
uaugcaaguaaaaacacacacauu

SEQ ID NO: 340932 - RNA, 21 nt, Human
ucacaaauucaacaaacaaga

SEQ ID NO: 340933 - RNA, 23 nt, Human
ucaguaacaaugacugaagagga

SEQ ID NO: 340934 - RNA, 24 nt, Human
ucagucccuuuucauucagcucuc

SEQ ID NO: 340935 - RNA, 21 nt, Human
ucucuugacauuuaauuuguu

SEQ ID NO: 340936 - RNA, 20 nt, Human
ugaacaggcagcuaccuuau

SEQ ID NO: 340937 - RNA, 18 nt, Human
ugacuucuucaaacucac

SEQ ID NO: 340938 - RNA, 20 nt, Human
ugccccaacuacauguuagc

SEQ ID NO: 340939 - RNA, 21 nt, Human
ugcuucauuaccuucaguaac

SEQ ID NO: 340940 - RNA, 20 nt, Human
uggccacucacuaaaagcca

SEQ ID NO: 340941 - RNA, 18 nt, Human
uggccgggguccacgacc

SEQ ID NO: 340942 - RNA, 22 nt, Human
uggccgggguccacgaccccgg

SEQ ID NO: 340943 - RNA, 21 nt, Human
uuaauaacagacaguagauga

SEQ ID NO: 340944 - RNA, 20 nt, Human
uucauucagcucucacuggg

SEQ ID NO: 340945 - RNA, 27 nt, Human
uucccauuuccauccauuucccauuuc

SEQ ID NO: 340946 - RNA, 24 nt, Human
uucccauuucccuccuuucccauu

SEQ ID NO: 340947 - RNA, 22 nt, Human
uuccuggccacucacuaaaagc

SEQ ID NO: 340948 - RNA, 21 nt, Human
uuggugggcugagaucuauac

SEQ ID NO: 340949 - RNA, 19 nt, Human
uuucaggaucaccuuuuug

SEQ ID NO: 340950 - RNA, 18 nt, Human
uuuccuggccacucacua

SEQ ID NO: 340951 - RNA, 19 nt, Human
aaacagaagaaagugcuuu

SEQ ID NO: 340952 - RNA, 23 nt, Human
aaacagaugauggagaugcagaa

SEQ ID NO: 340953 - RNA, 23 nt, Human
aaacggaaauacacgggguugcc

SEQ ID NO: 340954 - RNA, 20 nt, Human
aaauugcacauaauaaagag

SEQ ID NO: 340955 - RNA, 23 nt, Human
aaccugcaugagggcugccaccc

SEQ ID NO: 340956 - RNA, 22 nt, Human
aagacuccagacacauaguuuu

SEQ ID NO: 340957 - RNA, 18 nt, Human
acaauguguaguccaauc

SEQ ID NO: 340958 - RNA, 28 nt, Human
acacaugcauaccaaauacaugugcaua

SEQ ID NO: 340959 - RNA, 21 nt, Human
acaccugaggaauaaauugca

SEQ ID NO: 340960 - RNA, 19 nt, Human
acagucugaggcaaugucu

SEQ ID NO: 340961 - RNA, 19 nt, Human
acaugcaaaaggcaaucag

SEQ ID NO: 340962 - RNA, 19 nt, Human
accaagaauaucaggcuga

SEQ ID NO: 340963 - RNA, 21 nt, Human
accacaggaacucaauaaaua

SEQ ID NO: 340964 - RNA, 20 nt, Human
accugcaugagggcugccac

SEQ ID NO: 340965 - RNA, 27 nt, Human
acucaauaaauaucugcugacuucacc

SEQ ID NO: 340966 - RNA, 18 nt, Human
agaaagacaagcaugcga

SEQ ID NO: 340967 - RNA, 20 nt, Human
agaaagacaagcaugcgagc

SEQ ID NO: 340968 - RNA, 22 nt, Human
agcaaaagccaaggccaccugc

SEQ ID NO: 340969 - RNA, 21 nt, Human
agcacgggaaccuggaaaaaa

SEQ ID NO: 340970 - RNA, 20 nt, Human
agccccaucucuuuccccag

SEQ ID NO: 340971 - RNA, 22 nt, Human
agccucuagcagcgcacagucu

SEQ ID NO: 340972 - RNA, 22 nt, Human
agccuguggcaguuccagccuc

SEQ ID NO: 340973 - RNA, 19 nt, Human
agcuaaaagcauuacccgg

SEQ ID NO: 340974 - RNA, 25 nt, Human
aggcaaucagagaaggcaaugaagc

SEQ ID NO: 340975 - RNA, 22 nt, Human
aggcaggcaggaggcauuacgg

SEQ ID NO: 340976 - RNA, 18 nt, Human
agugaccucaacuuccca

SEQ ID NO: 340977 - RNA, 25 nt, Human
augucaaauucauuuccaguuuccc

SEQ ID NO: 340978 - RNA, 26 nt, Human
caaaggacacucucuauucccaggac

SEQ ID NO: 340979 - RNA, 20 nt, Human
caagcacagaagcacaaauc

SEQ ID NO: 340980 - RNA, 19 nt, Human
caaucacuguucagaaauc

SEQ ID NO: 340981 - RNA, 19 nt, Human
cacagcacugacagauaag

SEQ ID NO: 340982 - RNA, 19 nt, Human
caccaaugauccucgaaca

SEQ ID NO: 340983 - RNA, 20 nt, Human
cacgggaaccuggaaaaaaa

SEQ ID NO: 340984 - RNA, 22 nt, Human
cagaaagacaagcaugcgagca

SEQ ID NO: 340985 - RNA, 22 nt, Human
cagccggaccuuacgcaggacc

SEQ ID NO: 340986 - RNA, 22 nt, Human
cagcucauccaaacccuuucca

SEQ ID NO: 340987 - RNA, 18 nt, Human
caggaccccgaugauagg

SEQ ID NO: 340988 - RNA, 21 nt, Human
caguccaucccacccacagcc

SEQ ID NO: 340989 - RNA, 21 nt, Human
cauacagccuguggcaguucc

SEQ ID NO: 340990 - RNA, 21 nt, Human
cauccaaacccuuuccaaagu

SEQ ID NO: 340991 - RNA, 25 nt, Human
caugucaaauucauuuccaguuucc

SEQ ID NO: 340992 - RNA, 22 nt, Human
cauugccgcaaaucucuaaacu

SEQ ID NO: 340993 - RNA, 22 nt, Human
ccaaucccaggaaacgggcuuc

SEQ ID NO: 340994 - RNA, 21 nt, Human
ccaccugccgcugcugcccau

SEQ ID NO: 340995 - RNA, 24 nt, Human
cccaggccauugugcaaauuuguu

SEQ ID NO: 340996 - RNA, 24 nt, Human
cccgccaaucugagacccccuaga

SEQ ID NO: 340997 - RNA, 19 nt, Human
ccgcagccuguuucucagc

SEQ ID NO: 340998 - RNA, 20 nt, Human
ccugccgcugcugcccaucc

SEQ ID NO: 340999 - RNA, 25 nt, Human
cgaagcuccuccuggccucccuagg

SEQ ID NO: 341000 - RNA, 19 nt, Human
cgcaggaccccgaugauag

SEQ ID NO: 341001 - RNA, 22 nt, Human
cgggaaccuggaaaaaaaaaag

SEQ ID NO: 341002 - RNA, 19 nt, Human
cuacauauacuucaaccug

SEQ ID NO: 341003 - RNA, 19 nt, Human
cuccuccuggccucccuag

SEQ ID NO: 341004 - RNA, 24 nt, Human
cuccuggaaagaccaaaggaaauu

SEQ ID NO: 341005 - RNA, 22 nt, Human
cugcagcaaaagccaaggccac

SEQ ID NO: 341006 - RNA, 20 nt, Human
cugcaugagggcugccaccc

SEQ ID NO: 341007 - RNA, 18 nt, Human
cugggcgcccgggugugc

SEQ ID NO: 341008 - RNA, 20 nt, Human
gagcagcuaaaagcauuacc

SEQ ID NO: 341009 - RNA, 27 nt, Human
gauacacaugcauaccaaauacaugug

SEQ ID NO: 341010 - RNA, 21 nt, Human
gaugauggagaugcagaaaga

SEQ ID NO: 341011 - RNA, 18 nt, Human
gccccaucucuuucccca

SEQ ID NO: 341012 - RNA, 19 nt, Human
gccccaucucuuuccccac

SEQ ID NO: 341013 - RNA, 19 nt, Human
ggauugaaaacagaagaaa

SEQ ID NO: 341014 - RNA, 18 nt, Human
ggccaaugguuuuauuua

SEQ ID NO: 341015 - RNA, 18 nt, Human
ggccaccagcucauccaa

SEQ ID NO: 341016 - RNA, 21 nt, Human
gggauugaaaacagaagaaag

SEQ ID NO: 341017 - RNA, 20 nt, Human
gguugccagaaacugaaauu

SEQ ID NO: 341018 - RNA, 19 nt, Human
uaaaagcauuacccggcug

SEQ ID NO: 341019 - RNA, 25 nt, Human
uacagccccaucucuuuccccacga

SEQ ID NO: 341020 - RNA, 23 nt, Human
uacuccuaccaacugcagggcac

SEQ ID NO: 341021 - RNA, 27 nt, Human
uaucauaaugcuuugcacaccacagga

SEQ ID NO: 341022 - RNA, 19 nt, Human
uaugagagacaaaaguguc

SEQ ID NO: 341023 - RNA, 24 nt, Human
uaugagagacaaaagugucacuua

SEQ ID NO: 341024 - RNA, 26 nt, Human
uaugagagacaaaagugucacuuaac

SEQ ID NO: 341025 - RNA, 23 nt, Human
uccaccaggaaacaaauuuaaga

SEQ ID NO: 341026 - RNA, 19 nt, Human
uccagaggugucaugaugg

SEQ ID NO: 341027 - RNA, 19 nt, Human
uccaucccacccacagcca

SEQ ID NO: 341028 - RNA, 21 nt, Human
ucccagccagccggaccuuac

SEQ ID NO: 341029 - RNA, 25 nt, Human
ucccagccagccggaccuuacgcag

SEQ ID NO: 341030 - RNA, 23 nt, Human
uccccgccaaucugagacccccu

SEQ ID NO: 341031 - RNA, 22 nt, Human
ucccuggugcuucuuguggaau

SEQ ID NO: 341032 - RNA, 20 nt, Human
ucccuuuauaaaaauaaagu

SEQ ID NO: 341033 - RNA, 23 nt, Human
ucuacauauacaguauaaauaca

SEQ ID NO: 341034 - RNA, 25 nt, Human
ucuccuggaaagaccaaaggaaauu

SEQ ID NO: 341035 - RNA, 21 nt, Human
ucugcaguuguuuuuaucugg

SEQ ID NO: 341036 - RNA, 18 nt, Human
ugaaagaggcaggcagga

SEQ ID NO: 341037 - RNA, 21 nt, Human
ugaaagaggcaggcaggaggc

SEQ ID NO: 341038 - RNA, 20 nt, Human
ugaaggccaccagcucaucc

SEQ ID NO: 341039 - RNA, 23 nt, Human
ugacggcugcagcaaaagccaag

SEQ ID NO: 341040 - RNA, 18 nt, Human
ugagaaagucauccucuc

SEQ ID NO: 341041 - RNA, 19 nt, Human
ugaggaauaaauugcacau

SEQ ID NO: 341042 - RNA, 19 nt, Human
ugaggggcuauuaacggga

SEQ ID NO: 341043 - RNA, 18 nt, Human
ugagucaccauucuuuug

SEQ ID NO: 341044 - RNA, 19 nt, Human
ugccagaaacugaaaugag

SEQ ID NO: 341045 - RNA, 18 nt, Human
ugccagccaagucccaaa

SEQ ID NO: 341046 - RNA, 23 nt, Human
ugcgagcagcuaaaagcauuacc

SEQ ID NO: 341047 - RNA, 18 nt, Human
uggaggacuuccuggccc

SEQ ID NO: 341048 - RNA, 19 nt, Human
uggcaaaagacuccagaca

SEQ ID NO: 341049 - RNA, 24 nt, Human
uggcaguuccagccucugcaguug

SEQ ID NO: 341050 - RNA, 19 nt, Human
ugggauuaggaaaaaaaaa

SEQ ID NO: 341051 - RNA, 23 nt, Human
uggucacgcccucaaccaggccc

SEQ ID NO: 341052 - RNA, 24 nt, Human
ugucaugauggcuagaccaguggg

SEQ ID NO: 341053 - RNA, 19 nt, Human
ugugauagcaagcacggga

SEQ ID NO: 341054 - RNA, 22 nt, Human
uuccaaucccaggaaacgggcu

SEQ ID NO: 341055 - RNA, 19 nt, Human
uuccaucuggaagaaugua

SEQ ID NO: 341056 - RNA, 23 nt, Human
uuccauugucuuuaaaaaaggua

SEQ ID NO: 341057 - RNA, 24 nt, Human
uuccggguuuguucucuaaauuuu

SEQ ID NO: 341058 - RNA, 22 nt, Human
uuccuggcccguucuucggucc

SEQ ID NO: 341059 - RNA, 19 nt, Human
uucucaguuucuucuauuu

SEQ ID NO: 341060 - RNA, 18 nt, Human
uugaaacccagucagucu

SEQ ID NO: 341061 - RNA, 23 nt, Human
uugggucuggcagcacaugccag

SEQ ID NO: 341062 - RNA, 22 nt, Human
uuuccaguuuccccacggugcc

SEQ ID NO: 341063 - RNA, 22 nt, Human
agagauauguacccacccaccc

SEQ ID NO: 341064 - RNA, 18 nt, Human
auaaaaucauugccucau

SEQ ID NO: 341065 - RNA, 18 nt, Human
cacccacccuggcaauuu

SEQ ID NO: 341066 - RNA, 21 nt, Human
cagaauucucuaguugucuuc

SEQ ID NO: 341067 - RNA, 21 nt, Human
cgcugggaccucgggcgacgg

SEQ ID NO: 341068 - RNA, 23 nt, Human
cggcgacggcgacagcgacagag

SEQ ID NO: 341069 - RNA, 22 nt, Human
gaagguuaagccugccuccucc

SEQ ID NO: 341070 - RNA, 27 nt, Human
gcgacagagaggcccugggaaucugaa

SEQ ID NO: 341071 - RNA, 31 nt, Human
ggcccagaauucucuaguugucuucagagcc

SEQ ID NO: 341072 - RNA, 23 nt, Human
ggcgacggcgacagcgacagaga

SEQ ID NO: 341073 - RNA, 20 nt, Human
uacaaagaaucaagaggcug

SEQ ID NO: 341074 - RNA, 26 nt, Human
uacccacccacccuggcaauuuacaa

SEQ ID NO: 341075 - RNA, 25 nt, Human
uauaguaccuuuuacagaaagccuu

SEQ ID NO: 341076 - RNA, 19 nt, Human
ucccucuggcaggaaagaa

SEQ ID NO: 341077 - RNA, 22 nt, Human
ugaacgauucuucgcccuucua

SEQ ID NO: 341078 - RNA, 23 nt, Human
ugaagguuaagccugccuccucc

SEQ ID NO: 341079 - RNA, 18 nt, Human
ugccucauuuuucuuucu

SEQ ID NO: 341080 - RNA, 19 nt, Human
uggcaauuuacaaagaauc

SEQ ID NO: 341081 - RNA, 18 nt, Human
uuuuuuuuuuuuuuuuug

SEQ ID NO: 341082 - RNA, 18 nt, Human
uuuuuuuuuuuuuuuuug

SEQ ID NO: 341083 - RNA, 22 nt, Human
uuuuuuuuuuuuuuuuuuuggc

SEQ ID NO: 341084 - RNA, 19 nt, Human
aaaauaaaccaucaacaga

SEQ ID NO: 341085 - RNA, 22 nt, Human
aaacagaaagucaaauaccaca

SEQ ID NO: 341086 - RNA, 23 nt, Human
aacauggaugaaacuggagguca

SEQ ID NO: 341087 - RNA, 21 nt, Human
aaccaucaacagaaugaacaa

SEQ ID NO: 341088 - RNA, 23 nt, Human
aacucaaauaacucaacaaaaaa

SEQ ID NO: 341089 - RNA, 20 nt, Human
aagaagcauaugaaaaaaug

SEQ ID NO: 341090 - RNA, 23 nt, Human
acagaaugaacaacgugcagaac

SEQ ID NO: 341091 - RNA, 24 nt, Human
acagcaaaauaaaccaucaacaga

SEQ ID NO: 341092 - RNA, 20 nt, Human
agacaugaauaaacauuuuu

SEQ ID NO: 341093 - RNA, 23 nt, Human
agcaaaauaaaccaucaacagaa

SEQ ID NO: 341094 - RNA, 21 nt, Human
agucaaauaccacauguucuc

SEQ ID NO: 341095 - RNA, 24 nt, Human
auccaaauaaugccauuaaaaagu

SEQ ID NO: 341096 - RNA, 25 nt, Human
aucucacacaaaugagaauggcuau

SEQ ID NO: 341097 - RNA, 18 nt, Human
augcuuaucacagcucug

SEQ ID NO: 341098 - RNA, 19 nt, Human
caaaacugcacuguacccc

SEQ ID NO: 341099 - RNA, 24 nt, Human
caaauaacucaacaaaaaaaaucc

SEQ ID NO: 341100 - RNA, 18 nt, Human
caaauaccacauguucuc

SEQ ID NO: 341101 - RNA, 19 nt, Human
cacaaugagaccuuaucuc

SEQ ID NO: 341102 - RNA, 24 nt, Human
cacagcaaaauaaaccaucaacag

SEQ ID NO: 341103 - RNA, 23 nt, Human
cacugccauaaaaaagaacgaga

SEQ ID NO: 341104 - RNA, 24 nt, Human
cagaauauauaagaaacucaaaua

SEQ ID NO: 341105 - RNA, 23 nt, Human
cagaaugaacaacgugcagaacc

SEQ ID NO: 341106 - RNA, 25 nt, Human
cagagaaauggaaauuaaaaccaca

SEQ ID NO: 341107 - RNA, 24 nt, Human
cagcaaaauaaaccaucaacagaa

SEQ ID NO: 341108 - RNA, 23 nt, Human
cagcaacauggaugaaacuggag

SEQ ID NO: 341109 - RNA, 22 nt, Human
caggacuccuggaacagccucc

SEQ ID NO: 341110 - RNA, 24 nt, Human
caguagcaaagauauggaauccua

SEQ ID NO: 341111 - RNA, 22 nt, Human
ccacuaggcaaucuauccaugu

SEQ ID NO: 341112 - RNA, 23 nt, Human
ccuaggaccaggauccacggggc

SEQ ID NO: 341113 - RNA, 21 nt, Human
ccucucagccuugaguguagg

SEQ ID NO: 341114 - RNA, 18 nt, Human
ccuguguccagccuagga

SEQ ID NO: 341115 - RNA, 19 nt, Human
ccuugaguguagggggcug

SEQ ID NO: 341116 - RNA, 22 nt, Human
cgaggcugcugggcaggacucc

SEQ ID NO: 341117 - RNA, 21 nt, Human
cucaaaaacagaaagucaaau

SEQ ID NO: 341118 - RNA, 22 nt, Human
cucaaaaacagaaagucaaaua

SEQ ID NO: 341119 - RNA, 19 nt, Human
cucaacaaaaaaaauccaa

SEQ ID NO: 341120 - RNA, 18 nt, Human
cucuuucugugcagccug

SEQ ID NO: 341121 - RNA, 20 nt, Human
cucuuucugugcagccuggu

SEQ ID NO: 341122 - RNA, 23 nt, Human
cugcacuguacccccuuacauuu

SEQ ID NO: 341123 - RNA, 24 nt, Human
cugcacuguacccccuuacauuua

SEQ ID NO: 341124 - RNA, 20 nt, Human
cugugaccgacacucagguc

SEQ ID NO: 341125 - RNA, 22 nt, Human
gaaaaaaugcuuaacaucaaaa

SEQ ID NO: 341126 - RNA, 20 nt, Human
gaacaccuauacacuguugg

SEQ ID NO: 341127 - RNA, 20 nt, Human
gacaaggugggaggggguga

SEQ ID NO: 341128 - RNA, 23 nt, Human
gagaaaagggaacaccuauacac

SEQ ID NO: 341129 - RNA, 18 nt, Human
gagcuaccauuugaucca

SEQ ID NO: 341130 - RNA, 21 nt, Human
ggacuccuggaacagccuccu

SEQ ID NO: 341131 - RNA, 20 nt, Human
ggcugugaccgacacucagg

SEQ ID NO: 341132 - RNA, 21 nt, Human
uaaaaaggaaugacuuuccug

SEQ ID NO: 341133 - RNA, 24 nt, Human
uaaaaagugggcaaaagacaugaa

SEQ ID NO: 341134 - RNA, 22 nt, Human
uaaaaauagagcuaccauuuga

SEQ ID NO: 341135 - RNA, 18 nt, Human
uaaauuaguacaaccccu

SEQ ID NO: 341136 - RNA, 23 nt, Human
uaacaucaaaagucaucagagaa

SEQ ID NO: 341137 - RNA, 26 nt, Human
uaacucaaaaacagaaagucaaauac

SEQ ID NO: 341138 - RNA, 20 nt, Human
uaacucaacaaaaaaaaucc

SEQ ID NO: 341139 - RNA, 19 nt, Human
uaagaagcauaugaaaaaa

SEQ ID NO: 341140 - RNA, 23 nt, Human
uaccacauguucucacuuguaag

SEQ ID NO: 341141 - RNA, 21 nt, Human
uauccagaauauauccagaau

SEQ ID NO: 341142 - RNA, 19 nt, Human
uaucucacacaaaugagaa

SEQ ID NO: 341143 - RNA, 20 nt, Human
uaucucacacaaaugagaau

SEQ ID NO: 341144 - RNA, 24 nt, Human
uccagaauauauaagaaacucaaa

SEQ ID NO: 341145 - RNA, 23 nt, Human
uccaucaacagaugauuggauaa

SEQ ID NO: 341146 - RNA, 20 nt, Human
ugaaaaaaugcuuaacauca

SEQ ID NO: 341147 - RNA, 20 nt, Human
ugaaaaaaugcuuaacauca

SEQ ID NO: 341148 - RNA, 23 nt, Human
ugacaaggugggagggggugagg

SEQ ID NO: 341149 - RNA, 20 nt, Human
ugaggccucucagccuugag

SEQ ID NO: 341150 - RNA, 18 nt, Human
uggaauacuacacugcca

SEQ ID NO: 341151 - RNA, 18 nt, Human
uggaauacuacacugcca

SEQ ID NO: 341152 - RNA, 18 nt, Human
uggacauggaguguggaa

SEQ ID NO: 341153 - RNA, 20 nt, Human
ugggacuuaauuaaacuaaa

SEQ ID NO: 341154 - RNA, 19 nt, Human
ugggagggggugagggaug

SEQ ID NO: 341155 - RNA, 20 nt, Human
ugggagggggugagggauga

SEQ ID NO: 341156 - RNA, 21 nt, Human
ugggagggggugagggaugag

SEQ ID NO: 341157 - RNA, 18 nt, Human
uggugggacuguaaauua

SEQ ID NO: 341158 - RNA, 21 nt, Human
uguggaauaauagacauugga

SEQ ID NO: 341159 - RNA, 21 nt, Human
uuucugugcagccuggugucu

SEQ ID NO: 341160 - RNA, 19 nt, Human
acaaaaggccaagcuguuc

SEQ ID NO: 341161 - RNA, 28 nt, Human
caaagucaaaaacaauaaaauaaaauaa

SEQ ID NO: 341162 - RNA, 21 nt, Human
caaauauauucugacucccug

SEQ ID NO: 341163 - RNA, 22 nt, Human
caagacacccacaaaaggccaa

SEQ ID NO: 341164 - RNA, 23 nt, Human
caagacacccacaaaaggccaag

SEQ ID NO: 341165 - RNA, 24 nt, Human
ccacaaaaggccaagcuguucacc

SEQ ID NO: 341166 - RNA, 21 nt, Human
cucuuccaaagucaaaaacaa

SEQ ID NO: 341167 - RNA, 18 nt, Human
gacacccacaaaaggcca

SEQ ID NO: 341168 - RNA, 18 nt, Human
gacuucaauagcucagua

SEQ ID NO: 341169 - RNA, 23 nt, Human
ucacccagggagccauacuggca

SEQ ID NO: 341170 - RNA, 21 nt, Human
uccuucugcggucucucuguu

SEQ ID NO: 341171 - RNA, 26 nt, Human
ucugagucauuuguucuucuugggcu

SEQ ID NO: 341172 - RNA, 23 nt, Human
ucuuccuccuucugcggucucuc

SEQ ID NO: 341173 - RNA, 21 nt, Human
ucuugggcugucaagacaccc

SEQ ID NO: 341174 - RNA, 20 nt, Human
ugucuugcuuaugcuucuuc

SEQ ID NO: 341175 - RNA, 19 nt, Human
uuaagagcaauagcuuaag

SEQ ID NO: 341176 - RNA, 26 nt, Human
uuaauacaaaauccacauuuauuauu

SEQ ID NO: 341177 - RNA, 19 nt, Human
uugcuuaugcuucuucaac

SEQ ID NO: 341178 - RNA, 23 nt, Human
uuuuuuuuuuuuuuuuuuaaaug

SEQ ID NO: 341179 - RNA, 21 nt, Human
acagacagggcaugcagagcg

SEQ ID NO: 341180 - RNA, 19 nt, Human
agacagggcaugcagagcg

SEQ ID NO: 341181 - RNA, 18 nt, Human
agggauugggggugagcu

SEQ ID NO: 341182 - RNA, 27 nt, Human
agggcugccugccugcacccucaaggc

SEQ ID NO: 341183 - RNA, 20 nt, Human
aguccccuuuccaccccuac

SEQ ID NO: 341184 - RNA, 22 nt, Human
aguccccuuuccaccccuaccg

SEQ ID NO: 341185 - RNA, 24 nt, Human
caagccuacugcaaaaucuguaug

SEQ ID NO: 341186 - RNA, 22 nt, Human
caagccuguuccaaggggcugg

SEQ ID NO: 341187 - RNA, 21 nt, Human
cacagacagggcaugcagagc

SEQ ID NO: 341188 - RNA, 23 nt, Human
cagcgccggccagagcuugcacg

SEQ ID NO: 341189 - RNA, 18 nt, Human
cagcuuccugaggagggg

SEQ ID NO: 341190 - RNA, 22 nt, Human
caucugaguccccuuuccaccc

SEQ ID NO: 341191 - RNA, 19 nt, Human
caugcagcuguccuggacu

SEQ ID NO: 341192 - RNA, 21 nt, Human
ccagagcuugcacgguggcgg

SEQ ID NO: 341193 - RNA, 23 nt, Human
ccagcugccccaagccuacugca

SEQ ID NO: 341194 - RNA, 18 nt, Human
ccccaagccuacugcaaa

SEQ ID NO: 341195 - RNA, 23 nt, Human
cccccauuguggccuggcugcaa

SEQ ID NO: 341196 - RNA, 20 nt, Human
cccuccucuugccccuguug

SEQ ID NO: 341197 - RNA, 19 nt, Human
ccucacauccugaaacacc

SEQ ID NO: 341198 - RNA, 19 nt, Human
ccucccccauuguggccug

SEQ ID NO: 341199 - RNA, 23 nt, Human
ccugcgggcccucacauccugaa

SEQ ID NO: 341200 - RNA, 18 nt, Human
cucauaccagcuuccuga

SEQ ID NO: 341201 - RNA, 22 nt, Human
gaggaggggccggccccuccuc

SEQ ID NO: 341202 - RNA, 20 nt, Human
gcacgguggcgggcaggcag

SEQ ID NO: 341203 - RNA, 20 nt, Human
gcccauggcaggaaggggcc

SEQ ID NO: 341204 - RNA, 19 nt, Human
gccggccccuccucuugcc

SEQ ID NO: 341205 - RNA, 22 nt, Human
ggcacaggcuggggaggcuggc

SEQ ID NO: 341206 - RNA, 22 nt, Human
ggcaggaaggggccagggacac

SEQ ID NO: 341207 - RNA, 21 nt, Human
gggcagcgccggccagagcuu

SEQ ID NO: 341208 - RNA, 22 nt, Human
gggcagcgccggccagagcuuc

SEQ ID NO: 341209 - RNA, 21 nt, Human
gggcuggacucaccuccccca

SEQ ID NO: 341210 - RNA, 19 nt, Human
ggguccccgccgcgggggc

SEQ ID NO: 341211 - RNA, 23 nt, Human
guauguacaguauagucuaugug

SEQ ID NO: 341212 - RNA, 19 nt, Human
gugggugggguacagggcu

SEQ ID NO: 341213 - RNA, 20 nt, Human
uccaaggggcuggacucacc

SEQ ID NO: 341214 - RNA, 21 nt, Human
uccuggacuguuggguagcug

SEQ ID NO: 341215 - RNA, 22 nt, Human
ugaaacaccgcucacuacccuc

SEQ ID NO: 341216 - RNA, 20 nt, Human
ugaguccccuuuccaccccu

SEQ ID NO: 341217 - RNA, 22 nt, Human
ugccugccugcacccucaaggc

SEQ ID NO: 341218 - RNA, 18 nt, Human
uggcaggaaggggccaga

SEQ ID NO: 341219 - RNA, 21 nt, Human
uuccaaggggcuggacucacc

SEQ ID NO: 341220 - RNA, 19 nt, Human
uuccugaggaggggccggc

SEQ ID NO: 341221 - RNA, 21 nt, Human
uuccugcgggccugcccaugg

SEQ ID NO: 341222 - RNA, 23 nt, Human
uuuuuuuuuuuuuuuuugcagaa

SEQ ID NO: 341223 - RNA, 21 nt, Human
uuuuuuuuuuuuuuuuuuugg

SEQ ID NO: 341224 - RNA, 21 nt, Human
aaacaauguuaugacaaucac

SEQ ID NO: 341225 - RNA, 20 nt, Human
aacagcaccaacaauaacaa

SEQ ID NO: 341226 - RNA, 18 nt, Human
acagcacagaacucagag

SEQ ID NO: 341227 - RNA, 20 nt, Human
acagcaccaacaauaacaaa

SEQ ID NO: 341228 - RNA, 25 nt, Human
acagucaggcugaaaccccugcuga

SEQ ID NO: 341229 - RNA, 23 nt, Human
acuuuguucuccugggcccugcc

SEQ ID NO: 341230 - RNA, 18 nt, Human
agacagcacagaacucag

SEQ ID NO: 341231 - RNA, 21 nt, Human
agagacagcacagaacucaga

SEQ ID NO: 341232 - RNA, 23 nt, Human
agcgcauuuuuuuuuuuuuuuuu

SEQ ID NO: 341233 - RNA, 19 nt, Human
aggcaaaacagcugaucug

SEQ ID NO: 341234 - RNA, 18 nt, Human
aggccaguguuugaggua

SEQ ID NO: 341235 - RNA, 22 nt, Human
augcaaucagagucaacugagc

SEQ ID NO: 341236 - RNA, 20 nt, Human
caaaggggcugcccugggua

SEQ ID NO: 341237 - RNA, 19 nt, Human
caacagcaccaacaauaac

SEQ ID NO: 341238 - RNA, 25 nt, Human
caacagcaccaacaauaacaaaaac

SEQ ID NO: 341239 - RNA, 20 nt, Human
caacugagcaacaggcaaaa

SEQ ID NO: 341240 - RNA, 22 nt, Human
caaucacagaaaaccaaugaua

SEQ ID NO: 341241 - RNA, 23 nt, Human
caggccaguguuugagguauaaa

SEQ ID NO: 341242 - RNA, 19 nt, Human
cagggggccacccagagca

SEQ ID NO: 341243 - RNA, 23 nt, Human
cauccagggucccuuccgugccc

SEQ ID NO: 341244 - RNA, 21 nt, Human
cauucagagguagagucuggu

SEQ ID NO: 341245 - RNA, 18 nt, Human
ccacccagagcacugagc

SEQ ID NO: 341246 - RNA, 23 nt, Human
cccacagagagccccaccaaccc

SEQ ID NO: 341247 - RNA, 24 nt, Human
cccacagagagccccaccaacccu

SEQ ID NO: 341248 - RNA, 21 nt, Human
cccacuccaguguucaucuca

SEQ ID NO: 341249 - RNA, 25 nt, Human
cccugcugcaacgcagggucagggg

SEQ ID NO: 341250 - RNA, 21 nt, Human
ccugccucccacacaggggca

SEQ ID NO: 341251 - RNA, 19 nt, Human
ccugggcccugccuccaag

SEQ ID NO: 341252 - RNA, 18 nt, Human
ccuuucagggcucuccac

SEQ ID NO: 341253 - RNA, 21 nt, Human
cgccaggaagcaaaggcgcgg

SEQ ID NO: 341254 - RNA, 20 nt, Human
cuccagcaugagucccacag

SEQ ID NO: 341255 - RNA, 19 nt, Human
cuccucuccagcaugaguc

SEQ ID NO: 341256 - RNA, 18 nt, Human
cuccuggaggagcucaug

SEQ ID NO: 341257 - RNA, 20 nt, Human
cuccuuucagggcucuccac

SEQ ID NO: 341258 - RNA, 20 nt, Human
cuggcuuccucacugccgug

SEQ ID NO: 341259 - RNA, 22 nt, Human
gaagcaaaggcgcgguagcccc

SEQ ID NO: 341260 - RNA, 18 nt, Human
gacucugggcuagcccag

SEQ ID NO: 341261 - RNA, 19 nt, Human
gaggugacaggcagguauc

SEQ ID NO: 341262 - RNA, 20 nt, Human
gagucugguagagaaaggga

SEQ ID NO: 341263 - RNA, 23 nt, Human
gcaggaaagaaacacaaggcucc

SEQ ID NO: 341264 - RNA, 19 nt, Human
gccccagggcgggccugcu

SEQ ID NO: 341265 - RNA, 24 nt, Human
gcccugccuccaagagacagcaca

SEQ ID NO: 341266 - RNA, 21 nt, Human
ggaaaagccacuccccgaggg

SEQ ID NO: 341267 - RNA, 20 nt, Human
ggcaggcuccaggaggcucc

SEQ ID NO: 341268 - RNA, 22 nt, Human
ggcaucucuuuuugccuguucu

SEQ ID NO: 341269 - RNA, 19 nt, Human
gggcaagagucacaucagc

SEQ ID NO: 341270 - RNA, 20 nt, Human
gggccacaaaggggcugccc

SEQ ID NO: 341271 - RNA, 19 nt, Human
gguagagaaagggagacag

SEQ ID NO: 341272 - RNA, 20 nt, Human
gucacaucagcuugcuggcc

SEQ ID NO: 341273 - RNA, 26 nt, Human
uaacaacagcaccaacaauaacaaaa

SEQ ID NO: 341274 - RNA, 22 nt, Human
uaagggacucugggcuagccca

SEQ ID NO: 341275 - RNA, 22 nt, Human
uacacuuaaauaaucuccugga

SEQ ID NO: 341276 - RNA, 20 nt, Human
uacagagagaacaguguuga

SEQ ID NO: 341277 - RNA, 20 nt, Human
uaccacaaaaaacacuggcu

SEQ ID NO: 341278 - RNA, 19 nt, Human
uaguucacuuccccagccu

SEQ ID NO: 341279 - RNA, 21 nt, Human
uaucuaggaaaccagcuccau

SEQ ID NO: 341280 - RNA, 22 nt, Human
uaucugaaggagagacugcugc

SEQ ID NO: 341281 - RNA, 23 nt, Human
ucacaggccaguguuugagguau

SEQ ID NO: 341282 - RNA, 18 nt, Human
ucaggggccaccugcagg

SEQ ID NO: 341283 - RNA, 18 nt, Human
ucaggggccaccugcagg

SEQ ID NO: 341284 - RNA, 20 nt, Human
ucauucauaucuaggaaacc

SEQ ID NO: 341285 - RNA, 21 nt, Human
uccacacugcggggcaugaga

SEQ ID NO: 341286 - RNA, 19 nt, Human
ucccaaacaggcugcugga

SEQ ID NO: 341287 - RNA, 21 nt, Human
ucccacacaggggcagccacc

SEQ ID NO: 341288 - RNA, 23 nt, Human
uccugggccacaaaggggcugcc

SEQ ID NO: 341289 - RNA, 23 nt, Human
uccugggccacaaaggggcugcc

SEQ ID NO: 341290 - RNA, 19 nt, Human
ucggggcaucucuuuuugc

SEQ ID NO: 341291 - RNA, 19 nt, Human
ucucauaccacaaaaaaca

SEQ ID NO: 341292 - RNA, 20 nt, Human
ucugcccacuccaguguuca

SEQ ID NO: 341293 - RNA, 21 nt, Human
ugacaggcagguauccccagu

SEQ ID NO: 341294 - RNA, 18 nt, Human
ugacaugacugcaaggcu

SEQ ID NO: 341295 - RNA, 22 nt, Human
ugacugcaaggcuggacagaca

SEQ ID NO: 341296 - RNA, 20 nt, Human
ugaggagggccaaaggggaa

SEQ ID NO: 341297 - RNA, 18 nt, Human
ugaggaguuccugacagg

SEQ ID NO: 341298 - RNA, 20 nt, Human
ugaucuggaugucuuuccuc

SEQ ID NO: 341299 - RNA, 24 nt, Human
ugcagaaccugccucccacacagg

SEQ ID NO: 341300 - RNA, 24 nt, Human
ugcaggaaagaaacacaaggcucc

SEQ ID NO: 341301 - RNA, 20 nt, Human
uggaaagggcucacaggcca

SEQ ID NO: 341302 - RNA, 26 nt, Human
uggagcgcauuuuuuuuuuuuuuuuu

SEQ ID NO: 341303 - RNA, 25 nt, Human
uggaugucuuuccuccucucauuuu

SEQ ID NO: 341304 - RNA, 21 nt, Human
uggcuggauuucagcaggacu

SEQ ID NO: 341305 - RNA, 22 nt, Human
uggcuuccucacugccguggag

SEQ ID NO: 341306 - RNA, 22 nt, Human
uuauccacauguuuccuaaacc

SEQ ID NO: 341307 - RNA, 18 nt, Human
uucagcaggacucucagg

SEQ ID NO: 341308 - RNA, 27 nt, Human
uucucauaccacaaaaaacacuggcug

SEQ ID NO: 341309 - RNA, 19 nt, Human
uugcacuugcuuugcagaa

SEQ ID NO: 341310 - RNA, 20 nt, Human
uuugcagaaccugccuccca

SEQ ID NO: 341311 - RNA, 22 nt, Human
uuuguucagugaugcccugagg

SEQ ID NO: 341312 - RNA, 27 nt, Human
uuuuuuuuuuuuuuuuuuuuuuugggg

SEQ ID NO: 341313 - RNA, 21 nt, Human
aacccaccgccaucgucccuc

SEQ ID NO: 341314 - RNA, 24 nt, Human
aagacagcaaauucagauacaaaa

SEQ ID NO: 341315 - RNA, 18 nt, Human
aaggccccagggagacag

SEQ ID NO: 341316 - RNA, 20 nt, Human
agacagcaaauucagauaca

SEQ ID NO: 341317 - RNA, 18 nt, Human
agcugagguaggugggga

SEQ ID NO: 341318 - RNA, 23 nt, Human
aggaaacuaggaaggucaugacc

SEQ ID NO: 341319 - RNA, 25 nt, Human
caaaaacccaccgccaucgucccuc

SEQ ID NO: 341320 - RNA, 21 nt, Human
caaacagaacccaaggcccca

SEQ ID NO: 341321 - RNA, 21 nt, Human
cagaacccaaggccccaggga

SEQ ID NO: 341322 - RNA, 19 nt, Human
cagagggaccaguuuggca

SEQ ID NO: 341323 - RNA, 25 nt, Human
cagggggccuggccccaccuccccu

SEQ ID NO: 341324 - RNA, 22 nt, Human
caugacccccaaacagaaccca

SEQ ID NO: 341325 - RNA, 23 nt, Human
ccacagggagggggcuccucuca

SEQ ID NO: 341326 - RNA, 23 nt, Human
cccaauuuggcugaucccucccc

SEQ ID NO: 341327 - RNA, 23 nt, Human
cccccaaacagaacccaaggccc

SEQ ID NO: 341328 - RNA, 18 nt, Human
cccgugcgcacccggccg

SEQ ID NO: 341329 - RNA, 19 nt, Human
cccgugcgcacccggcucg

SEQ ID NO: 341330 - RNA, 22 nt, Human
cccuccugcucugggccaggga

SEQ ID NO: 341331 - RNA, 25 nt, Human
cccuccugcucugggccagggaugg

SEQ ID NO: 341332 - RNA, 18 nt, Human
cccugugccugacccagc

SEQ ID NO: 341333 - RNA, 18 nt, Human
ccgccaucgucccucccu

SEQ ID NO: 341334 - RNA, 18 nt, Human
ccgccgccgccgccgccg

SEQ ID NO: 341335 - RNA, 18 nt, Human
ccgccgccgccgccgccg

SEQ ID NO: 341336 - RNA, 18 nt, Human
ccgccgccgccgccgccg

SEQ ID NO: 341337 - RNA, 18 nt, Human
ccgccgccgccgccgccg

SEQ ID NO: 341338 - RNA, 21 nt, Human
ccgccgccgccgccgccgccg

SEQ ID NO: 341339 - RNA, 22 nt, Human
ccgccgccgccgccgccgccgc

SEQ ID NO: 341340 - RNA, 22 nt, Human
ccgccgccgccgccgccgccgc

SEQ ID NO: 341341 - RNA, 24 nt, Human
ccgccgccgccgccgccgccgccg

SEQ ID NO: 341342 - RNA, 24 nt, Human
ccgccgccgccgccgccgccgccg

SEQ ID NO: 341343 - RNA, 24 nt, Human
ccgccgccgccgccgccgccgccg

SEQ ID NO: 341344 - RNA, 24 nt, Human
ccgccgccgccgccgccgccgccg

SEQ ID NO: 341345 - RNA, 23 nt, Human
ccgccgccgccgccgccgccgcu

SEQ ID NO: 341346 - RNA, 26 nt, Human
ccgccgccgccgccgccgccgcugcc

SEQ ID NO: 341347 - RNA, 18 nt, Human
ccgccgccgcugccuccg

SEQ ID NO: 341348 - RNA, 19 nt, Human
ccgccgcugccuccgccuc

SEQ ID NO: 341349 - RNA, 23 nt, Human
ccgccgcugccuccgccuccccg

SEQ ID NO: 341350 - RNA, 25 nt, Human
ccuccccucaccaucguccuugggc

SEQ ID NO: 341351 - RNA, 20 nt, Human
ccugugccugacccagcuga

SEQ ID NO: 341352 - RNA, 23 nt, Human
cgccgccgccgccgcugccuccg

SEQ ID NO: 341353 - RNA, 21 nt, Human
cuccgccgccgccgccgccgc

SEQ ID NO: 341354 - RNA, 21 nt, Human
cugcuccgccgccgccgccgc

SEQ ID NO: 341355 - RNA, 24 nt, Human
cuggggggaaggacaacccucucc

SEQ ID NO: 341356 - RNA, 27 nt, Human
gacagcaaauucagauacaaaaaccca

SEQ ID NO: 341357 - RNA, 23 nt, Human
gccccagggagacagagggaccc

SEQ ID NO: 341358 - RNA, 19 nt, Human
gcgcccgggucaucaucgc

SEQ ID NO: 341359 - RNA, 22 nt, Human
ggagguggggaggagguugcgg

SEQ ID NO: 341360 - RNA, 24 nt, Human
ggagguggggaggagguugcgggg

SEQ ID NO: 341361 - RNA, 19 nt, Human
ggggaacagggcacagggg

SEQ ID NO: 341362 - RNA, 22 nt, Human
gguggggaggagguugcggggu

SEQ ID NO: 341363 - RNA, 22 nt, Human
guggaaagugguggaggcgggg

SEQ ID NO: 341364 - RNA, 18 nt, Human
uagguggggaacagggca

SEQ ID NO: 341365 - RNA, 21 nt, Human
uagguggggaacagggcacag

SEQ ID NO: 341366 - RNA, 19 nt, Human
uccccgugcgcacccggcu

SEQ ID NO: 341367 - RNA, 19 nt, Human
ucccucccuccugcucugg

SEQ ID NO: 341368 - RNA, 21 nt, Human
ucccugcugggggcccccacc

SEQ ID NO: 341369 - RNA, 23 nt, Human
ugagcuaggcucaggcuggaggc

SEQ ID NO: 341370 - RNA, 23 nt, Human
ugcugggggcccccaccagguug

SEQ ID NO: 341371 - RNA, 23 nt, Human
ugcuggggggaaggacaacccuc

SEQ ID NO: 341372 - RNA, 19 nt, Human
uggaaagugguggaggcgg

SEQ ID NO: 341373 - RNA, 23 nt, Human
ugggagguggggaggagguugcg

SEQ ID NO: 341374 - RNA, 18 nt, Human
ugggcugcugagcuaggc

SEQ ID NO: 341375 - RNA, 18 nt, Human
ugucccugcugggggccc

SEQ ID NO: 341376 - RNA, 21 nt, Human
uucaagacagcaaauucagau

SEQ ID NO: 341377 - RNA, 22 nt, Human
uuggagcggggcagggggccug

SEQ ID NO: 341378 - RNA, 23 nt, Human
aaacuaaaacuacuaugugguaa

SEQ ID NO: 341379 - RNA, 19 nt, Human
aaaugcuuuuggaccaaca

SEQ ID NO: 341380 - RNA, 22 nt, Human
aagaacuucaauacccuugcac

SEQ ID NO: 341381 - RNA, 20 nt, Human
accagcuaccuaaggccaca

SEQ ID NO: 341382 - RNA, 18 nt, Human
aggaaaaagaaugaaaug

SEQ ID NO: 341383 - RNA, 23 nt, Human
ccagcuaccuaaggccacauaau

SEQ ID NO: 341384 - RNA, 21 nt, Human
ccccucaggaaaaagaaugaa

SEQ ID NO: 341385 - RNA, 19 nt, Human
ccuccauuucugggcuccc

SEQ ID NO: 341386 - RNA, 18 nt, Human
ccugaacacccaggcuga

SEQ ID NO: 341387 - RNA, 18 nt, Human
cucaggaaaaagaaugaa

SEQ ID NO: 341388 - RNA, 25 nt, Human
gaaauguccuccauuucugggcucc

SEQ ID NO: 341389 - RNA, 23 nt, Human
ggucacaguccuuccccucagga

SEQ ID NO: 341390 - RNA, 24 nt, Human
uaaaaguauucaaagaccacuuca

SEQ ID NO: 341391 - RNA, 21 nt, Human
uaacaaugcaaacacggacca

SEQ ID NO: 341392 - RNA, 25 nt, Human
uaacggacacugcaguuuucaacac

SEQ ID NO: 341393 - RNA, 19 nt, Human
uaccuaaggccacauaauc

SEQ ID NO: 341394 - RNA, 20 nt, Human
uaguaaacacuucacuguua

SEQ ID NO: 341395 - RNA, 21 nt, Human
uaguucugagugauguuuccu

SEQ ID NO: 341396 - RNA, 25 nt, Human
ucaauaguucugagugauguuuccu

SEQ ID NO: 341397 - RNA, 19 nt, Human
uccugaacacccaggcuga

SEQ ID NO: 341398 - RNA, 20 nt, Human
uccugaacacccaggcugaa

SEQ ID NO: 341399 - RNA, 19 nt, Human
uccugcuuuucagagugag

SEQ ID NO: 341400 - RNA, 22 nt, Human
ugaaauguccuccauuucuggg

SEQ ID NO: 341401 - RNA, 19 nt, Human
uggcaggucacaguccuuc

SEQ ID NO: 341402 - RNA, 21 nt, Human
uggcuuccugauucacuaccc

SEQ ID NO: 341403 - RNA, 22 nt, Human
uguacaaccagcuaccuaaggc

SEQ ID NO: 341404 - RNA, 23 nt, Human
uucaagacagauuuuuggcacuc

SEQ ID NO: 341405 - RNA, 18 nt, Human
uucugagugauguuuccu

SEQ ID NO: 341406 - RNA, 24 nt, Human
aaaaccagaaaugcaagucagccu

SEQ ID NO: 341407 - RNA, 19 nt, Human
aacagaaaacucugugguu

SEQ ID NO: 341408 - RNA, 20 nt, Human
aacccagcucucccccagca

SEQ ID NO: 341409 - RNA, 20 nt, Human
aacuuggucaacgcgaagcc

SEQ ID NO: 341410 - RNA, 21 nt, Human
aagaauggcaggaaaucaccu

SEQ ID NO: 341411 - RNA, 24 nt, Human
aagcauccaacuacuauuuaaaua

SEQ ID NO: 341412 - RNA, 18 nt, Human
aagccaugcucgaagcug

SEQ ID NO: 341413 - RNA, 22 nt, Human
aagcccccgagggacacuccac

SEQ ID NO: 341414 - RNA, 19 nt, Human
aagcuccaauggcccucua

SEQ ID NO: 341415 - RNA, 24 nt, Human
aaggaacuuggucaacgcgaagcc

SEQ ID NO: 341416 - RNA, 25 nt, Human
aaggaacuuggucaacgcgaagccg

SEQ ID NO: 341417 - RNA, 20 nt, Human
acaaagccaggaggggaagu

SEQ ID NO: 341418 - RNA, 19 nt, Human
acccagcucucccccagca

SEQ ID NO: 341419 - RNA, 21 nt, Human
acggaaggaagcagcaaccgg

SEQ ID NO: 341420 - RNA, 18 nt, Human
acgugucaggggucacgc

SEQ ID NO: 341421 - RNA, 18 nt, Human
agaaaugcaagucagccu

SEQ ID NO: 341422 - RNA, 19 nt, Human
agacggaaggaagcagcaa

SEQ ID NO: 341423 - RNA, 23 nt, Human
agacggaaggaagcagcaaccgg

SEQ ID NO: 341424 - RNA, 21 nt, Human
agccugccucugccaacccug

SEQ ID NO: 341425 - RNA, 18 nt, Human
aggaaaacugaugaggca

SEQ ID NO: 341426 - RNA, 21 nt, Human
aggaggggaagugccacucag

SEQ ID NO: 341427 - RNA, 23 nt, Human
aggcagggguacugcccccagag

SEQ ID NO: 341428 - RNA, 23 nt, Human
aggccaaaccaaacaaagccagg

SEQ ID NO: 341429 - RNA, 24 nt, Human
aggccaaaccaaacaaagccagga

SEQ ID NO: 341430 - RNA, 20 nt, Human
agggaggcaggugggcaggg

SEQ ID NO: 341431 - RNA, 22 nt, Human
aggggcccagcuggcucccggg

SEQ ID NO: 341432 - RNA, 20 nt, Human
agucuguaauggugaagccc

SEQ ID NO: 341433 - RNA, 22 nt, Human
agugcagcaacaaacccaaaac

SEQ ID NO: 341434 - RNA, 19 nt, Human
caaaccaaacaaagccagg

SEQ ID NO: 341435 - RNA, 24 nt, Human
caacaaacccaaaaccagaaaugc

SEQ ID NO: 341436 - RNA, 22 nt, Human
caagucagccugccucugccaa

SEQ ID NO: 341437 - RNA, 19 nt, Human
cacucuggagagaggcugg

SEQ ID NO: 341438 - RNA, 19 nt, Human
cacuggacccgucagccug

SEQ ID NO: 341439 - RNA, 21 nt, Human
cacuggacccgucagccuggc

SEQ ID NO: 341440 - RNA, 19 nt, Human
cagagcccgcccaccccuu

SEQ ID NO: 341441 - RNA, 22 nt, Human
cagcaacaaacccaaaaccaga

SEQ ID NO: 341442 - RNA, 19 nt, Human
cagccaguucuuuaaggaa

SEQ ID NO: 341443 - RNA, 19 nt, Human
cagccucuggggccgcccc

SEQ ID NO: 341444 - RNA, 24 nt, Human
cagcugccugccaccggugcccgg

SEQ ID NO: 341445 - RNA, 19 nt, Human
caggaaaacugaugaggca

SEQ ID NO: 341446 - RNA, 19 nt, Human
caggaggggaagugccacu

SEQ ID NO: 341447 - RNA, 24 nt, Human
caggaggggaagugccacucaggc

SEQ ID NO: 341448 - RNA, 21 nt, Human
cagggccccugaccugccagg

SEQ ID NO: 341449 - RNA, 23 nt, Human
caugaaaacccagccgucagaga

SEQ ID NO: 341450 - RNA, 21 nt, Human
caugagcacccugggaagccc

SEQ ID NO: 341451 - RNA, 23 nt, Human
ccaaaagccaugcucgaagcuga

SEQ ID NO: 341452 - RNA, 24 nt, Human
ccaaagcccccgagggacacuccc

SEQ ID NO: 341453 - RNA, 21 nt, Human
ccacucuggagagaggcugga

SEQ ID NO: 341454 - RNA, 21 nt, Human
ccaguagccugggccucucuu

SEQ ID NO: 341455 - RNA, 18 nt, Human
ccaguggugacugucagu

SEQ ID NO: 341456 - RNA, 22 nt, Human
ccaugcucgaagcugagaaguc

SEQ ID NO: 341457 - RNA, 26 nt, Human
cccaaagcccccgagggacacucccu

SEQ ID NO: 341458 - RNA, 22 nt, Human
cccaccccuuggggaaagugca

SEQ ID NO: 341459 - RNA, 23 nt, Human
cccaggcugccuuaguccagaag

SEQ ID NO: 341460 - RNA, 24 nt, Human
cccaugaaaacccagcucuccccc

SEQ ID NO: 341461 - RNA, 18 nt, Human
ccccagagggcaccuacc

SEQ ID NO: 341462 - RNA, 18 nt, Human
ccccagggcccaagcugg

SEQ ID NO: 341463 - RNA, 21 nt, Human
cccccagcagcgggagcccgc

SEQ ID NO: 341464 - RNA, 19 nt, Human
cccccaggcugccuuaguc

SEQ ID NO: 341465 - RNA, 18 nt, Human
ccccccaggcugccuuag

SEQ ID NO: 341466 - RNA, 25 nt, Human
ccccgagggacacuccacccagggg

SEQ ID NO: 341467 - RNA, 19 nt, Human
ccccugaagcuggagaaug

SEQ ID NO: 341468 - RNA, 24 nt, Human
ccgccacucuggagagaggcugga

SEQ ID NO: 341469 - RNA, 19 nt, Human
ccggccaccgccacucugg

SEQ ID NO: 341470 - RNA, 21 nt, Human
ccugccaccggugcccgggac

SEQ ID NO: 341471 - RNA, 21 nt, Human
ccuguggcucauccccagggc

SEQ ID NO: 341472 - RNA, 20 nt, Human
ccuucuacuccuccaguagc

SEQ ID NO: 341473 - RNA, 24 nt, Human
ccuucuacuccuccaguagccugg

SEQ ID NO: 341474 - RNA, 21 nt, Human
cgagauggaguccgggauguc

SEQ ID NO: 341475 - RNA, 19 nt, Human
cgaggccaaaccaaacaaa

SEQ ID NO: 341476 - RNA, 23 nt, Human
cgaggccaaaccaaacaaagcca

SEQ ID NO: 341477 - RNA, 27 nt, Human
cgaggccaaaccaaacaaagccaggag

SEQ ID NO: 341478 - RNA, 19 nt, Human
cgucacagggggcagggag

SEQ ID NO: 341479 - RNA, 21 nt, Human
cuaaaucgaggccaaaccaaa

SEQ ID NO: 341480 - RNA, 22 nt, Human
cuccaguagccugggccucucu

SEQ ID NO: 341481 - RNA, 21 nt, Human
cucccggguuacaugcucaca

SEQ ID NO: 341482 - RNA, 20 nt, Human
cuccgggggagaggcgucca

SEQ ID NO: 341483 - RNA, 19 nt, Human
cucguaccggggcaguggg

SEQ ID NO: 341484 - RNA, 22 nt, Human
cugcccugacagccaaaagcca

SEQ ID NO: 341485 - RNA, 23 nt, Human
cuggagaaugguguccaccuuug

SEQ ID NO: 341486 - RNA, 25 nt, Human
cuggccccaaagugcugcuccgggg

SEQ ID NO: 341487 - RNA, 26 nt, Human
cuggccccaaagugcugcuccggggg

SEQ ID NO: 341488 - RNA, 19 nt, Human
cugggccagcccguccuuc

SEQ ID NO: 341489 - RNA, 21 nt, Human
cuuugaagcccuggggagucu

SEQ ID NO: 341490 - RNA, 22 nt, Human
gaagaauggcaggaaaucaccu

SEQ ID NO: 341491 - RNA, 18 nt, Human
gacagccaaaagccaugc

SEQ ID NO: 341492 - RNA, 18 nt, Human
gagcccgcccaccccuug

SEQ ID NO: 341493 - RNA, 22 nt, Human
gaggcaggugggcaggggaccc

SEQ ID NO: 341494 - RNA, 20 nt, Human
gcaacaaacccaaaaccaga

SEQ ID NO: 341495 - RNA, 23 nt, Human
gcaagcuccaauggcccucuagg

SEQ ID NO: 341496 - RNA, 22 nt, Human
gcaagggacagccucuggggcc

SEQ ID NO: 341497 - RNA, 20 nt, Human
gcagcaacaaacccaaaacc

SEQ ID NO: 341498 - RNA, 23 nt, Human
gcagggaggcaggugggcagggg

SEQ ID NO: 341499 - RNA, 18 nt, Human
gcccaagcuggccccaaa

SEQ ID NO: 341500 - RNA, 21 nt, Human
gcccgccccacagaagaaugg

SEQ ID NO: 341501 - RNA, 19 nt, Human
gcucccggguuacaugcuc

SEQ ID NO: 341502 - RNA, 23 nt, Human
ggaggcaggugggcaggggaccc

SEQ ID NO: 341503 - RNA, 23 nt, Human
ggccaaaccaaacaaagccagga

SEQ ID NO: 341504 - RNA, 23 nt, Human
gggcagggaggcaggugggcagg

SEQ ID NO: 341505 - RNA, 25 nt, Human
gggcagggaggcaggugggcagggg

SEQ ID NO: 341506 - RNA, 21 nt, Human
gggcaguggggaccccacggg

SEQ ID NO: 341507 - RNA, 24 nt, Human
ggggcagggaggcaggugggcagg

SEQ ID NO: 341508 - RNA, 24 nt, Human
ggguccugggccagcccguccuuc

SEQ ID NO: 341509 - RNA, 20 nt, Human
gugcagcaacaaacccaaaa

SEQ ID NO: 341510 - RNA, 22 nt, Human
gugcagcaacaaacccaaaacc

SEQ ID NO: 341511 - RNA, 18 nt, Human
uaaaacucaaaguggggg

SEQ ID NO: 341512 - RNA, 18 nt, Human
uaaaucaggaaaacugau

SEQ ID NO: 341513 - RNA, 25 nt, Human
uacaugcucacacgcauaggcugug

SEQ ID NO: 341514 - RNA, 19 nt, Human
uacuguguggucugagggu

SEQ ID NO: 341515 - RNA, 21 nt, Human
uauuguacagcugcccugaca

SEQ ID NO: 341516 - RNA, 20 nt, Human
ucaaagugggggucugagcu

SEQ ID NO: 341517 - RNA, 19 nt, Human
uccccagggcccaagcugg

SEQ ID NO: 341518 - RNA, 19 nt, Human
ucccccagcagcgggagcc

SEQ ID NO: 341519 - RNA, 21 nt, Human
uccugggccagcccguccuuc

SEQ ID NO: 341520 - RNA, 24 nt, Human
uccugggccagcccguccuucugc

SEQ ID NO: 341521 - RNA, 23 nt, Human
uccuggguggugaggguggggcc

SEQ ID NO: 341522 - RNA, 21 nt, Human
uccuucuacuccuccaguagc

SEQ ID NO: 341523 - RNA, 20 nt, Human
uccuuggggaaagacggaag

SEQ ID NO: 341524 - RNA, 25 nt, Human
ucuaaaucgaggccaaaccgggguc

SEQ ID NO: 341525 - RNA, 19 nt, Human
ucuauccgucuguccagag

SEQ ID NO: 341526 - RNA, 19 nt, Human
ucucccccagcagcgggag

SEQ ID NO: 341527 - RNA, 18 nt, Human
ugaaaacccagcucuccc

SEQ ID NO: 341528 - RNA, 24 nt, Human
ugcaagcuccaauggcccucuagg

SEQ ID NO: 341529 - RNA, 22 nt, Human
ugcagcaacaaacccaaaacca

SEQ ID NO: 341530 - RNA, 22 nt, Human
ugcaggcugcugcacacacgug

SEQ ID NO: 341531 - RNA, 22 nt, Human
ugccagaucucuguguguagcc

SEQ ID NO: 341532 - RNA, 20 nt, Human
ugccagggucuugggccccc

SEQ ID NO: 341533 - RNA, 19 nt, Human
ugccaugcuuucccaaagc

SEQ ID NO: 341534 - RNA, 19 nt, Human
ugcccugacagccaaaagc

SEQ ID NO: 341535 - RNA, 21 nt, Human
ugcuccgggggagaggcgucc

SEQ ID NO: 341536 - RNA, 24 nt, Human
uggaccuccugccccaucagccag

SEQ ID NO: 341537 - RNA, 20 nt, Human
uggcacagaguggcacugag

SEQ ID NO: 341538 - RNA, 19 nt, Human
uggcacggaguggcacaga

SEQ ID NO: 341539 - RNA, 20 nt, Human
uggcacggaguggcacagag

SEQ ID NO: 341540 - RNA, 21 nt, Human
uggcaggaaaucaccucucac

SEQ ID NO: 341541 - RNA, 20 nt, Human
uggcucccggguuacaugcu

SEQ ID NO: 341542 - RNA, 18 nt, Human
uggcuuggccagggcccc

SEQ ID NO: 341543 - RNA, 19 nt, Human
ugggcccccucguaccggg

SEQ ID NO: 341544 - RNA, 22 nt, Human
uggguccccuguggcucauccc

SEQ ID NO: 341545 - RNA, 18 nt, Human
uggugaagcccacagcug

SEQ ID NO: 341546 - RNA, 19 nt, Human
uggugaggguggggcccag

SEQ ID NO: 341547 - RNA, 18 nt, Human
ugguguccaccuuugcau

SEQ ID NO: 341548 - RNA, 25 nt, Human
ugucugcaagggacagccucugggg

SEQ ID NO: 341549 - RNA, 21 nt, Human
uucuacuccuccaguagccug

SEQ ID NO: 341550 - RNA, 18 nt, Human
uugcauggcagcuucucc

SEQ ID NO: 341551 - RNA, 18 nt, Human
uugcuugcccccuccguc

SEQ ID NO: 341552 - RNA, 20 nt, Human
uugcuugcccccuccgucac

SEQ ID NO: 341553 - RNA, 20 nt, Human
uugggcccccucguaccggg

SEQ ID NO: 341554 - RNA, 23 nt, Human
aaagauuagaaaaaauucuagca

SEQ ID NO: 341555 - RNA, 26 nt, Human
aauaauuugaaaauggaaacauuuga

SEQ ID NO: 341556 - RNA, 24 nt, Human
aaucuauuacuuaacccacauuca

SEQ ID NO: 341557 - RNA, 20 nt, Human
acaguagauaaguauccaaa

SEQ ID NO: 341558 - RNA, 19 nt, Human
acaugauuggauuuagaaa

SEQ ID NO: 341559 - RNA, 20 nt, Human
acuaugggcagguggagggg

SEQ ID NO: 341560 - RNA, 22 nt, Human
agugaggaagguauaaaagaga

SEQ ID NO: 341561 - RNA, 24 nt, Human
augcaggaagcgaaauagugaagg

SEQ ID NO: 341562 - RNA, 19 nt, Human
caggauuuuucugugauuc

SEQ ID NO: 341563 - RNA, 23 nt, Human
caggauuuuucugugauucugau

SEQ ID NO: 341564 - RNA, 24 nt, Human
ccaaagcagugugggcaaaaagag

SEQ ID NO: 341565 - RNA, 19 nt, Human
cccacauucauugauauca

SEQ ID NO: 341566 - RNA, 26 nt, Human
ccuccgcuuuaaguacaagacaucgg

SEQ ID NO: 341567 - RNA, 27 nt, Human
cuaaaacaagugagaucaauuaagcuc

SEQ ID NO: 341568 - RNA, 25 nt, Human
cugacuacaagcugaagauaucuua

SEQ ID NO: 341569 - RNA, 18 nt, Human
gaaauaggucuguccaca

SEQ ID NO: 341570 - RNA, 18 nt, Human
gauuacccucauacaugg

SEQ ID NO: 341571 - RNA, 22 nt, Human
gauuacuuuuuuuuuuuuuuuu

SEQ ID NO: 341572 - RNA, 20 nt, Human
gauucuguuacuaaauucug

SEQ ID NO: 341573 - RNA, 28 nt, Human
gcgaaauagugaaggaauaccgguaccc

SEQ ID NO: 341574 - RNA, 19 nt, Human
gggauuuuucccauguggg

SEQ ID NO: 341575 - RNA, 18 nt, Human
gggggccagugaggaagg

SEQ ID NO: 341576 - RNA, 23 nt, Human
gugacuaugggcagguggagggg

SEQ ID NO: 341577 - RNA, 24 nt, Human
uagcagcauaaauacauuuauaaa

SEQ ID NO: 341578 - RNA, 23 nt, Human
uagcaucauaggacaauuagcca

SEQ ID NO: 341579 - RNA, 23 nt, Human
uagcugugaaugagacacgucag

SEQ ID NO: 341580 - RNA, 25 nt, Human
ucaaaucuacuaaagauuagaaaaa

SEQ ID NO: 341581 - RNA, 19 nt, Human
ucaccuagaaggccucuac

SEQ ID NO: 341582 - RNA, 19 nt, Human
uccccugggauuuuuccca

SEQ ID NO: 341583 - RNA, 25 nt, Human
uccccugggauuuuucccauguggg

SEQ ID NO: 341584 - RNA, 19 nt, Human
ucuaugauaauagcaucau

SEQ ID NO: 341585 - RNA, 23 nt, Human
ugaaauaggucuguccacacuua

SEQ ID NO: 341586 - RNA, 21 nt, Human
ugacccacagucuagcagcau

SEQ ID NO: 341587 - RNA, 19 nt, Human
ugaggaagguauaaaagag

SEQ ID NO: 341588 - RNA, 24 nt, Human
ugaguggggaaagaaggccuucgg

SEQ ID NO: 341589 - RNA, 22 nt, Human
ugcaaaaugcaguguaccuuaa

SEQ ID NO: 341590 - RNA, 22 nt, Human
ugccuuaggcaggauuuuucug

SEQ ID NO: 341591 - RNA, 19 nt, Human
uggcagguggcuuagcucc

SEQ ID NO: 341592 - RNA, 22 nt, Human
ugggaagauauguagauuaaug

SEQ ID NO: 341593 - RNA, 24 nt, Human
ugggaagauauguagauuaauggg

SEQ ID NO: 341594 - RNA, 23 nt, Human
uguaaguaaaauuugcuaaugca

SEQ ID NO: 341595 - RNA, 23 nt, Human
uuggcagguggcuuagcuccucc

SEQ ID NO: 341596 - RNA, 23 nt, Human
uuuaaaacagaauuuggugacua

SEQ ID NO: 341597 - RNA, 22 nt, Human
uuugacccacagucuagcagca

SEQ ID NO: 341598 - RNA, 23 nt, Human
uuugacccacagucuagcagcau

SEQ ID NO: 341599 - RNA, 19 nt, Human
uuuuagaccaauuuagcug

SEQ ID NO: 341600 - RNA, 18 nt, Human
uuuuuuuuuuuuuuucug

SEQ ID NO: 341601 - RNA, 19 nt, Human
uuuuuuuuuuuuuuucugc

SEQ ID NO: 341602 - RNA, 24 nt, Human
aaacaggagccuccaccgggccca

SEQ ID NO: 341603 - RNA, 19 nt, Human
acacaaguccacacgccag

SEQ ID NO: 341604 - RNA, 22 nt, Human
acccaccgagucuccccaccau

SEQ ID NO: 341605 - RNA, 24 nt, Human
acccaucccacacaaguccacacg

SEQ ID NO: 341606 - RNA, 18 nt, Human
accugcacccaucccaca

SEQ ID NO: 341607 - RNA, 20 nt, Human
cacacaaguccacacgccag

SEQ ID NO: 341608 - RNA, 18 nt, Human
caccgggcccagcccagg

SEQ ID NO: 341609 - RNA, 21 nt, Human
caggagccuccaccgggccca

SEQ ID NO: 341610 - RNA, 23 nt, Human
caggagccuccaccgggcccagc

SEQ ID NO: 341611 - RNA, 23 nt, Human
caucgcccuucauugcccucacc

SEQ ID NO: 341612 - RNA, 21 nt, Human
ccagaaacccaggaacaugau

SEQ ID NO: 341613 - RNA, 21 nt, Human
cccacacaaguccacacgcca

SEQ ID NO: 341614 - RNA, 20 nt, Human
cccaccgagucuccccacca

SEQ ID NO: 341615 - RNA, 19 nt, Human
cccuggacugcggugagga

SEQ ID NO: 341616 - RNA, 23 nt, Human
cccuucauugcccucacucuuuc

SEQ ID NO: 341617 - RNA, 19 nt, Human
ccgggcccagcccaggcuc

SEQ ID NO: 341618 - RNA, 19 nt, Human
cucacacugcgaucacaac

SEQ ID NO: 341619 - RNA, 18 nt, Human
cuccaccgggcccagccc

SEQ ID NO: 341620 - RNA, 19 nt, Human
gagccuccaccgggcccag

SEQ ID NO: 341621 - RNA, 24 nt, Human
gcagaccugcacccaucccacaca

SEQ ID NO: 341622 - RNA, 24 nt, Human
gcgggcccaggcccuggacugcgg

SEQ ID NO: 341623 - RNA, 20 nt, Human
ggaagacuggaaguaucuaa

SEQ ID NO: 341624 - RNA, 20 nt, Human
ggcccagcccaggcucugug

SEQ ID NO: 341625 - RNA, 22 nt, Human
gggcccagcccaggcucugugg

SEQ ID NO: 341626 - RNA, 26 nt, Human
guccacacgccagcuugccuaaccac

SEQ ID NO: 341627 - RNA, 24 nt, Human
ucacacccagaaacccaggaacau

SEQ ID NO: 341628 - RNA, 21 nt, Human
ucccacacaaguccacacgcc

SEQ ID NO: 341629 - RNA, 21 nt, Human
uccgcgggcccaggcccugga

SEQ ID NO: 341630 - RNA, 23 nt, Human
uccgcgggcccaggcccuggacu

SEQ ID NO: 341631 - RNA, 20 nt, Human
ucggugugcgcuucacaccc

SEQ ID NO: 341632 - RNA, 26 nt, Human
ugaccaagucuccucguaaggaaacu

SEQ ID NO: 341633 - RNA, 20 nt, Human
ugagugucuucacucacacu

SEQ ID NO: 341634 - RNA, 22 nt, Human
ugcccucacucuuucuccuuca

SEQ ID NO: 341635 - RNA, 21 nt, Human
ugcgcuucacacccagaaacc

SEQ ID NO: 341636 - RNA, 21 nt, Human
uggaauacaacuguacaaaga

SEQ ID NO: 341637 - RNA, 22 nt, Human
uggaauacaacuguacaaagaa

SEQ ID NO: 341638 - RNA, 21 nt, Human
ugugcgcuucacacccagaaa

SEQ ID NO: 341639 - RNA, 21 nt, Human
uuucuggucugcccauucacc

SEQ ID NO: 341640 - RNA, 21 nt, Human
aaaaauccuuccccaugagaa

SEQ ID NO: 341641 - RNA, 18 nt, Human
aaagaaacaaaaccguua

SEQ ID NO: 341642 - RNA, 20 nt, Human
aacaugacaaaaccccgucu

SEQ ID NO: 341643 - RNA, 21 nt, Human
aacaugacaaaaccccgucuu

SEQ ID NO: 341644 - RNA, 21 nt, Human
aaccagccagagcauucuuug

SEQ ID NO: 341645 - RNA, 23 nt, Human
aauaaaaauccuuccccaugaga

SEQ ID NO: 341646 - RNA, 18 nt, Human
aauuagccaggcauggua

SEQ ID NO: 341647 - RNA, 22 nt, Human
acccaaaugcacuuugguucuc

SEQ ID NO: 341648 - RNA, 20 nt, Human
accccaucuugucuccccaa

SEQ ID NO: 341649 - RNA, 24 nt, Human
accccaucuugucuccccaaucuu

SEQ ID NO: 341650 - RNA, 24 nt, Human
accccgucuuuacuaaaaguacaa

SEQ ID NO: 341651 - RNA, 21 nt, Human
agaaaaauggggaaggccagg

SEQ ID NO: 341652 - RNA, 18 nt, Human
agaaggaguuggccccug

SEQ ID NO: 341653 - RNA, 24 nt, Human
agcacuuugggaggccgaggaggg

SEQ ID NO: 341654 - RNA, 18 nt, Human
aggagggaggaucgcuug

SEQ ID NO: 341655 - RNA, 24 nt, Human
aggaucgcuugagcccaggaguuu

SEQ ID NO: 341656 - RNA, 24 nt, Human
aggcaugguagcgugcaccuguag

SEQ ID NO: 341657 - RNA, 19 nt, Human
aggccaagaucaauuaagg

SEQ ID NO: 341658 - RNA, 20 nt, Human
aggccgaggagggaggaucg

SEQ ID NO: 341659 - RNA, 24 nt, Human
aggccgaggagggaggaucgcuug

SEQ ID NO: 341660 - RNA, 20 nt, Human
agggucaggaagaggagaag

SEQ ID NO: 341661 - RNA, 24 nt, Human
aggugcgguggcucaagccuguaa

SEQ ID NO: 341662 - RNA, 24 nt, Human
aucgcuugagcccaggaguuugag

SEQ ID NO: 341663 - RNA, 20 nt, Human
aucuugucuccccaaucuuc

SEQ ID NO: 341664 - RNA, 24 nt, Human
caacaugacaaaaccccgucuuua

SEQ ID NO: 341665 - RNA, 24 nt, Human
caagccuguaaucccagcacuuug

SEQ ID NO: 341666 - RNA, 23 nt, Human
caccuguagucccagcuacuugg

SEQ ID NO: 341667 - RNA, 24 nt, Human
caccuguagucccagcuacuuggg

SEQ ID NO: 341668 - RNA, 19 nt, Human
cagagcccccaacucagcc

SEQ ID NO: 341669 - RNA, 23 nt, Human
cagcacuuugggaggccgaggag

SEQ ID NO: 341670 - RNA, 24 nt, Human
cagcacuuugggaggccgaggagg

SEQ ID NO: 341671 - RNA, 22 nt, Human
cauuuuuuucuuucuuaaaaga

SEQ ID NO: 341672 - RNA, 20 nt, Human
ccacaaucuaccccaucuug

SEQ ID NO: 341673 - RNA, 20 nt, Human
ccagagcccccaacucagcc

SEQ ID NO: 341674 - RNA, 21 nt, Human
ccaggggagggagggucagga

SEQ ID NO: 341675 - RNA, 19 nt, Human
ccauggcaucugucagaac

SEQ ID NO: 341676 - RNA, 24 nt, Human
cccauaccauggcaucugucagaa

SEQ ID NO: 341677 - RNA, 21 nt, Human
cccaucuugucuccccaaucu

SEQ ID NO: 341678 - RNA, 26 nt, Human
cccgagcaacaugacaaaaggaguuc

SEQ ID NO: 341679 - RNA, 22 nt, Human
ccuguaaucccagcacuuuggg

SEQ ID NO: 341680 - RNA, 21 nt, Human
ccuguagucccagcuacuugg

SEQ ID NO: 341681 - RNA, 24 nt, Human
cucaagccuguaaucccagcacuu

SEQ ID NO: 341682 - RNA, 22 nt, Human
cugccuccacucuauucuaugu

SEQ ID NO: 341683 - RNA, 21 nt, Human
cuugucuccccaaucuucaaa

SEQ ID NO: 341684 - RNA, 19 nt, Human
gagaaaaauggggaaggcc

SEQ ID NO: 341685 - RNA, 20 nt, Human
gagcaacaugacaaaacccc

SEQ ID NO: 341686 - RNA, 18 nt, Human
gagcccaggaguuugagg

SEQ ID NO: 341687 - RNA, 24 nt, Human
gaucgcuugagcccaggaguuuga

SEQ ID NO: 341688 - RNA, 20 nt, Human
gcagcagggaaagucuucug

SEQ ID NO: 341689 - RNA, 23 nt, Human
ggaaggccaggugcgguggcuca

SEQ ID NO: 341690 - RNA, 20 nt, Human
ggaggcugaggugagagggu

SEQ ID NO: 341691 - RNA, 23 nt, Human
ggaggcugaggugagaggguugc

SEQ ID NO: 341692 - RNA, 22 nt, Human
ggagggagggucaggaagagga

SEQ ID NO: 341693 - RNA, 22 nt, Human
ggaucgcuugagcccaggaguu

SEQ ID NO: 341694 - RNA, 18 nt, Human
gggagggucaggaagagg

SEQ ID NO: 341695 - RNA, 24 nt, Human
ggggagggagggucaggaagagga

SEQ ID NO: 341696 - RNA, 24 nt, Human
gguagcgugcaccuguagucccag

SEQ ID NO: 341697 - RNA, 23 nt, Human
gguggcucaagccuguaauccca

SEQ ID NO: 341698 - RNA, 24 nt, Human
gguggcucaagccuguaaucccag

SEQ ID NO: 341699 - RNA, 19 nt, Human
guaagacaaagaaacaaaa

SEQ ID NO: 341700 - RNA, 21 nt, Human
guaagacaaagaaacaaaacc

SEQ ID NO: 341701 - RNA, 24 nt, Human
uaaaagauaggauuucuccauguc

SEQ ID NO: 341702 - RNA, 19 nt, Human
uaagacaaagaaacaaaac

SEQ ID NO: 341703 - RNA, 19 nt, Human
uaagagaaaaauggggaag

SEQ ID NO: 341704 - RNA, 22 nt, Human
uaccacuguaacuuugcucacc

SEQ ID NO: 341705 - RNA, 20 nt, Human
uagcccgagcaacaugacaa

SEQ ID NO: 341706 - RNA, 25 nt, Human
uccagagcccccaacucagccugcc

SEQ ID NO: 341707 - RNA, 24 nt, Human
ucgcuugagcccaggaguuugagg

SEQ ID NO: 341708 - RNA, 19 nt, Human
ucuccaugucuacugccuc

SEQ ID NO: 341709 - RNA, 25 nt, Human
ucuuuacuaaaaguacaaaaaaauu

SEQ ID NO: 341710 - RNA, 21 nt, Human
ugaaaaauaaaaauccuuccc

SEQ ID NO: 341711 - RNA, 23 nt, Human
ugagcccaggaguuugaggcuag

SEQ ID NO: 341712 - RNA, 18 nt, Human
ugaggugagaggguugcc

SEQ ID NO: 341713 - RNA, 24 nt, Human
ugcaccuguagucccagcuacuug

SEQ ID NO: 341714 - RNA, 22 nt, Human
uggcucaagccuguaaucccag

SEQ ID NO: 341715 - RNA, 24 nt, Human
uggcucaagccuguaaucccagca

SEQ ID NO: 341716 - RNA, 18 nt, Human
ugggaggccgaggaggga

SEQ ID NO: 341717 - RNA, 23 nt, Human
ugggaggccgaggagggaggauc

SEQ ID NO: 341718 - RNA, 19 nt, Human
ugggaggcugaggugagag

SEQ ID NO: 341719 - RNA, 20 nt, Human
ugggaggcugaggugagagg

SEQ ID NO: 341720 - RNA, 24 nt, Human
ugggaggcugaggugagaggguug

SEQ ID NO: 341721 - RNA, 21 nt, Human
uggggaaggccaggugcggug

SEQ ID NO: 341722 - RNA, 24 nt, Human
ugguagcgugcaccuguaguccca

SEQ ID NO: 341723 - RNA, 24 nt, Human
uugggaggccgaggagggaggauc

SEQ ID NO: 341724 - RNA, 18 nt, Human
uugggaggcugaggugag

SEQ ID NO: 341725 - RNA, 19 nt, Human
uugggaggcugaggugaga

SEQ ID NO: 341726 - RNA, 19 nt, Human
uugguuuuaaggcagcagg

SEQ ID NO: 341727 - RNA, 23 nt, Human
uuucuucugcccaggggagggag

SEQ ID NO: 341728 - RNA, 20 nt, Human
uuuuauugguuuuaaggcag

SEQ ID NO: 341729 - RNA, 22 nt, Human
uuuuucuuucuuaaaagauagg

SEQ ID NO: 341730 - RNA, 24 nt, Human
aaaagcacuaccuaaaaucauccc

SEQ ID NO: 341731 - RNA, 24 nt, Human
aaagcuuuuugggaauccuggaga

SEQ ID NO: 341732 - RNA, 20 nt, Human
aagcacuaccuaaaaucauc

SEQ ID NO: 341733 - RNA, 21 nt, Human
aauuaagaauaauauucaugc

SEQ ID NO: 341734 - RNA, 19 nt, Human
acuacuuuacacacaugca

SEQ ID NO: 341735 - RNA, 18 nt, Human
auuaagaauaauauucau

SEQ ID NO: 341736 - RNA, 19 nt, Human
cacaucuauucuugcuuca

SEQ ID NO: 341737 - RNA, 21 nt, Human
cagcaucagacauaaggacau

SEQ ID NO: 341738 - RNA, 24 nt, Human
ccaaaagcuuuuugggaauccugg

SEQ ID NO: 341739 - RNA, 23 nt, Human
cuuuuuguuuauuuggacuugau

SEQ ID NO: 341740 - RNA, 18 nt, Human
gaagacauagugucuaca

SEQ ID NO: 341741 - RNA, 20 nt, Human
gacuugauucuggauaaugg

SEQ ID NO: 341742 - RNA, 22 nt, Human
uaacauccccucaauuaaucau

SEQ ID NO: 341743 - RNA, 19 nt, Human
uacacuggccauuugggac

SEQ ID NO: 341744 - RNA, 22 nt, Human
ucacaucuauucuugcuucaug

SEQ ID NO: 341745 - RNA, 20 nt, Human
ugauucuggauaaugggaaa

SEQ ID NO: 341746 - RNA, 22 nt, Human
ugauucuggauaaugggaaagg

SEQ ID NO: 341747 - RNA, 19 nt, Human
ugggaauccuggagaagau

SEQ ID NO: 341748 - RNA, 21 nt, Human
uguggcaaaggacagaggcac

SEQ ID NO: 341749 - RNA, 18 nt, Human
uucaugcaaggauacaac

SEQ ID NO: 341750 - RNA, 21 nt, Human
uuugaucagauagcauuugag

SEQ ID NO: 341751 - RNA, 19 nt, Human
uuugggaauccuggagaag

SEQ ID NO: 341752 - RNA, 24 nt, Human
uuuuuuuuuuuuuuuuuuuauuuu

SEQ ID NO: 341753 - RNA, 21 nt, Human
agugggggguggguggcuggg

SEQ ID NO: 341754 - RNA, 21 nt, Human
cacagcagcccugagacgucc

SEQ ID NO: 341755 - RNA, 21 nt, Human
caccacaugcccgagcccugg

SEQ ID NO: 341756 - RNA, 22 nt, Human
caccacaugcccgagcccuggc

SEQ ID NO: 341757 - RNA, 19 nt, Human
cccgagcccuggccugugc

SEQ ID NO: 341758 - RNA, 18 nt, Human
cccuggugggcggccacc

SEQ ID NO: 341759 - RNA, 20 nt, Human
ccgcaaguccugggaguggg

SEQ ID NO: 341760 - RNA, 20 nt, Human
cuggccugugcagccucagg

SEQ ID NO: 341761 - RNA, 18 nt, Human
cugggacagggccuccuu

SEQ ID NO: 341762 - RNA, 18 nt, Human
gagcccuggccugugcag

SEQ ID NO: 341763 - RNA, 21 nt, Human
gagcccuggccugugcagccu

SEQ ID NO: 341764 - RNA, 22 nt, Human
uccaaaaaggcucagaccgcaa

SEQ ID NO: 341765 - RNA, 22 nt, Human
ugaggccacccacacccaaggg

SEQ ID NO: 341766 - RNA, 24 nt, Human
aaaagaacuuccuaguagcagcca

SEQ ID NO: 341767 - RNA, 18 nt, Human
accauuucccagccuccu

SEQ ID NO: 341768 - RNA, 18 nt, Human
acccucaaccaggccugg

SEQ ID NO: 341769 - RNA, 22 nt, Human
caaaaagaacuuccuaguagca

SEQ ID NO: 341770 - RNA, 25 nt, Human
ccacuccccaccauuucccagccuc

SEQ ID NO: 341771 - RNA, 21 nt, Human
ccccacuccccaccauuuccc

SEQ ID NO: 341772 - RNA, 22 nt, Human
ccccacuccccaccauuuccca

SEQ ID NO: 341773 - RNA, 18 nt, Human
ccuccuguugccccucuc

SEQ ID NO: 341774 - RNA, 18 nt, Human
ccuggcuugggcuucacu

SEQ ID NO: 341775 - RNA, 25 nt, Human
cuaguagcagccagucagcaucuuc

SEQ ID NO: 341776 - RNA, 21 nt, Human
cucaauuuggccucuucuacc

SEQ ID NO: 341777 - RNA, 20 nt, Human
cuggcucauggcucccuucu

SEQ ID NO: 341778 - RNA, 26 nt, Human
cuucuugcagcuggaggaaugggagc

SEQ ID NO: 341779 - RNA, 21 nt, Human
gaaaaggagcguguccucuca

SEQ ID NO: 341780 - RNA, 22 nt, Human
gagcguguccucucaggggcca

SEQ ID NO: 341781 - RNA, 19 nt, Human
gccccacuccccaccauuu

SEQ ID NO: 341782 - RNA, 21 nt, Human
ggaaugggagcucaaaaagaa

SEQ ID NO: 341783 - RNA, 22 nt, Human
ggcuugggcuucacuguaacug

SEQ ID NO: 341784 - RNA, 18 nt, Human
guucccccuauuguaccc

SEQ ID NO: 341785 - RNA, 21 nt, Human
uccccaccauuucccagccuc

SEQ ID NO: 341786 - RNA, 21 nt, Human
ucccuguggagacgcugccug

SEQ ID NO: 341787 - RNA, 24 nt, Human
uccuucuggcucauggcucccuuc

SEQ ID NO: 341788 - RNA, 18 nt, Human
ucucggcuggcgcucgca

SEQ ID NO: 341789 - RNA, 19 nt, Human
ugccuguggaaaggggccu

SEQ ID NO: 341790 - RNA, 20 nt, Human
uggaggaaugggagcucaaa

SEQ ID NO: 341791 - RNA, 20 nt, Human
uggcucccuucuugcagcug

SEQ ID NO: 341792 - RNA, 23 nt, Human
uggcucccuucuugcagcuggag

SEQ ID NO: 341793 - RNA, 18 nt, Human
uggcuugggcuucacugu

SEQ ID NO: 341794 - RNA, 19 nt, Human
uggcuugggcuucacugua

SEQ ID NO: 341795 - RNA, 21 nt, Human
uguugccccucucccugugga

SEQ ID NO: 341796 - RNA, 21 nt, Human
uuuuuuuuuuuagagacagug

SEQ ID NO: 341797 - RNA, 27 nt, Human
uuuuuuuuuuuuagagacaguggcguu

SEQ ID NO: 341798 - RNA, 24 nt, Human
aggaaacuuccagaaaacuugguc

SEQ ID NO: 341799 - RNA, 18 nt, Human
aucaaaucugucucugac

SEQ ID NO: 341800 - RNA, 18 nt, Human
aucaaaucugucucugac

SEQ ID NO: 341801 - RNA, 18 nt, Human
aucaaaucugucucugac

SEQ ID NO: 341802 - RNA, 20 nt, Human
caucaccccucucuccaaca

SEQ ID NO: 341803 - RNA, 23 nt, Human
ccagcaccaggcaucaccccucu

SEQ ID NO: 341804 - RNA, 18 nt, Human
cucugugcagggguucca

SEQ ID NO: 341805 - RNA, 22 nt, Human
uaauaucaaaucugucucugac

SEQ ID NO: 341806 - RNA, 24 nt, Human
uauacauaaggagcuuugcuguca

SEQ ID NO: 341807 - RNA, 21 nt, Human
uccaacagccaaaugaggaaa

SEQ ID NO: 341808 - RNA, 23 nt, Human
ucucuccaacaccuacuugaggg

SEQ ID NO: 341809 - RNA, 25 nt, Human
ugagaggaaguugucuuguuuuuga

SEQ ID NO: 341810 - RNA, 25 nt, Human
ugagaggaaguugucuuguuuuuga

SEQ ID NO: 341811 - RNA, 20 nt, Human
uuccaccagcaccaggcauc

SEQ ID NO: 341812 - RNA, 21 nt, Human
uuccaccagcaccaggcauca

SEQ ID NO: 341813 - RNA, 18 nt, Human
uuccagaaaacuugguca

SEQ ID NO: 341814 - RNA, 19 nt, Human
uucuuggaugcuuuugcuu

SEQ ID NO: 341815 - RNA, 24 nt, Human
uuuaauaucaaaucugucucugac

SEQ ID NO: 341816 - RNA, 24 nt, Human
uuuaauaucaaaucugucucugac

SEQ ID NO: 341817 - RNA, 19 nt, Human
aagaccccaggcagaggca

SEQ ID NO: 341818 - RNA, 20 nt, Human
aagaccccaggcagaggcag

SEQ ID NO: 341819 - RNA, 25 nt, Human
accccaggcagaggcagaacuucug

SEQ ID NO: 341820 - RNA, 20 nt, Human
agagcucagguucacccacc

SEQ ID NO: 341821 - RNA, 18 nt, Human
agggcagggguggaggca

SEQ ID NO: 341822 - RNA, 23 nt, Human
agggcagggguggaggcaccuug

SEQ ID NO: 341823 - RNA, 18 nt, Human
cacccaccaggucccagc

SEQ ID NO: 341824 - RNA, 20 nt, Human
caccuugaggccaagccagc

SEQ ID NO: 341825 - RNA, 21 nt, Human
cagaacccggcuuggaugccc

SEQ ID NO: 341826 - RNA, 20 nt, Human
ccaccaggucccagccccac

SEQ ID NO: 341827 - RNA, 23 nt, Human
ccccugggaugaaggggagggca

SEQ ID NO: 341828 - RNA, 20 nt, Human
cucugggccccaggagaguc

SEQ ID NO: 341829 - RNA, 20 nt, Human
gaaggggagggcaggggugg

SEQ ID NO: 341830 - RNA, 18 nt, Human
gccugcuccucaccugcc

SEQ ID NO: 341831 - RNA, 21 nt, Human
gcucagguucacccaccaggu

SEQ ID NO: 341832 - RNA, 20 nt, Human
gggcagggguggaggcaccu

SEQ ID NO: 341833 - RNA, 21 nt, Human
gggcagggguggaggcaccuu

SEQ ID NO: 341834 - RNA, 21 nt, Human
ggguggaggcaccuugaggcc

SEQ ID NO: 341835 - RNA, 20 nt, Human
gguggaggcaccuugaggcc

SEQ ID NO: 341836 - RNA, 20 nt, Human
gucuguggagccugcuccuc

SEQ ID NO: 341837 - RNA, 22 nt, Human
uagaagagccucauagguggug

SEQ ID NO: 341838 - RNA, 19 nt, Human
ucccagccccacuuugagc

SEQ ID NO: 341839 - RNA, 20 nt, Human
ucucaggcagacccccuggg

SEQ ID NO: 341840 - RNA, 19 nt, Human
ugaaggggagggcaggggu

SEQ ID NO: 341841 - RNA, 20 nt, Human
ugagccuguuuuucuccaau

SEQ ID NO: 341842 - RNA, 26 nt, Human
ugcagccagaacccggcuuggaugcc

SEQ ID NO: 341843 - RNA, 21 nt, Human
ugccacgcacacaacacagag

SEQ ID NO: 341844 - RNA, 18 nt, Human
ugcccacuuuguagcuuc

SEQ ID NO: 341845 - RNA, 25 nt, Human
uuuuuuuuuuuuuuuuuuacaaagg

SEQ ID NO: 341846 - RNA, 22 nt, Human
aaaaaaaaaaaaaaaaaacaag

SEQ ID NO: 341847 - RNA, 20 nt, Human
aaaaaaaaaaaaaaaaacaa

SEQ ID NO: 341848 - RNA, 24 nt, Human
aaaaaaaaaaaaaaaaacaaggaa

SEQ ID NO: 341849 - RNA, 24 nt, Human
aaaaaaaaaaaaaaaaacaaggaa

SEQ ID NO: 341850 - RNA, 25 nt, Human
aaaaaaaaaaaguauaaaaaucuga

SEQ ID NO: 341851 - RNA, 23 nt, Human
aaaaaaaaaguauaaaaaucuga

SEQ ID NO: 341852 - RNA, 22 nt, Human
aaacaaaaagaaccuuggucug

SEQ ID NO: 341853 - RNA, 22 nt, Human
aaacaaaaagaaccuuggucug

SEQ ID NO: 341854 - RNA, 18 nt, Human
aaagcaguuucuaugagc

SEQ ID NO: 341855 - RNA, 18 nt, Human
aaagcaguuucuaugagc

SEQ ID NO: 341856 - RNA, 19 nt, Human
aacauggugaaaccccauc

SEQ ID NO: 341857 - RNA, 19 nt, Human
aacauggugaaaccccauc

SEQ ID NO: 341858 - RNA, 20 nt, Human
aacauggugaaaccccaucu

SEQ ID NO: 341859 - RNA, 20 nt, Human
aacauggugaaaccccaucu

SEQ ID NO: 341860 - RNA, 21 nt, Human
aacauggugaaaccccaucuu

SEQ ID NO: 341861 - RNA, 21 nt, Human
aacauggugaaaccccaucuu

SEQ ID NO: 341862 - RNA, 22 nt, Human
aacauggugaaaccccaucuuu

SEQ ID NO: 341863 - RNA, 23 nt, Human
aacauggugaaaccccaucuuua

SEQ ID NO: 341864 - RNA, 18 nt, Human
aacauggugaaacccugu

SEQ ID NO: 341865 - RNA, 18 nt, Human
aacauggugaaacccugu

SEQ ID NO: 341866 - RNA, 19 nt, Human
aacauggugaaacccuguc

SEQ ID NO: 341867 - RNA, 19 nt, Human
aacauggugaaacccuguc

SEQ ID NO: 341868 - RNA, 24 nt, Human
aauugcuugaaccugggaggcgga

SEQ ID NO: 341869 - RNA, 24 nt, Human
aauugcuugaaccugggaggcgga

SEQ ID NO: 341870 - RNA, 23 nt, Human
acaaaaagaaccuuggucugcca

SEQ ID NO: 341871 - RNA, 23 nt, Human
acaaaaagaaccuuggucugcca

SEQ ID NO: 341872 - RNA, 24 nt, Human
acagaguaagacuacaucucaaaa

SEQ ID NO: 341873 - RNA, 24 nt, Human
acagaguaagacuacaucucaaaa

SEQ ID NO: 341874 - RNA, 24 nt, Human
acagagugagacuccguuucaaaa

SEQ ID NO: 341875 - RNA, 24 nt, Human
acagagugagacuccguuucaaaa

SEQ ID NO: 341876 - RNA, 24 nt, Human
acccaggagguagagguugcagug

SEQ ID NO: 341877 - RNA, 24 nt, Human
accccaucuuuacuaaaaauacaa

SEQ ID NO: 341878 - RNA, 24 nt, Human
accccaucuuuacuaaaaauacaa

SEQ ID NO: 341879 - RNA, 28 nt, Human
acuacaucucaaaaaaaaaaaaaaaaaa

SEQ ID NO: 341880 - RNA, 23 nt, Human
acuccagccuggugacagaguga

SEQ ID NO: 341881 - RNA, 23 nt, Human
acuccagccuggugacagaguga

SEQ ID NO: 341882 - RNA, 23 nt, Human
acugcacuccagccuggugacag

SEQ ID NO: 341883 - RNA, 23 nt, Human
acugcacuccagccuggugacag

SEQ ID NO: 341884 - RNA, 25 nt, Human
acugcacuccagccuggugacagag

SEQ ID NO: 341885 - RNA, 25 nt, Human
acugcacuccagccuggugacagag

SEQ ID NO: 341886 - RNA, 24 nt, Human
acuugaggucaggaguuugagauc

SEQ ID NO: 341887 - RNA, 24 nt, Human
acuugaggucaggaguuugagauc

SEQ ID NO: 341888 - RNA, 18 nt, Human
acuuuggaggcugaggca

SEQ ID NO: 341889 - RNA, 18 nt, Human
acuuuggaggcugaggca

SEQ ID NO: 341890 - RNA, 26 nt, Human
acuuuggaggcugaggcaggagauuu

SEQ ID NO: 341891 - RNA, 26 nt, Human
acuuuggaggcugaggcaggagauuu

SEQ ID NO: 341892 - RNA, 25 nt, Human
agaaaaccgcuuauucauuuuccac

SEQ ID NO: 341893 - RNA, 25 nt, Human
agaaaaccgcuuauucauuuuccac

SEQ ID NO: 341894 - RNA, 19 nt, Human
agaaccuuggucugccaga

SEQ ID NO: 341895 - RNA, 19 nt, Human
agaaccuuggucugccaga

SEQ ID NO: 341896 - RNA, 18 nt, Human
agagguugcagugagcca

SEQ ID NO: 341897 - RNA, 18 nt, Human
agagguugcagugagcca

SEQ ID NO: 341898 - RNA, 20 nt, Human
agagguugcagugagccaag

SEQ ID NO: 341899 - RNA, 20 nt, Human
agagguugcagugagccaag

SEQ ID NO: 341900 - RNA, 22 nt, Human
agagguugcagugagccaagau

SEQ ID NO: 341901 - RNA, 22 nt, Human
agagguugcagugagccaagau

SEQ ID NO: 341902 - RNA, 24 nt, Human
agagguugcagugagccaagaugg

SEQ ID NO: 341903 - RNA, 24 nt, Human
agagguugcagugagccaagaugg

SEQ ID NO: 341904 - RNA, 22 nt, Human
agaucacuugaggucaggaguu

SEQ ID NO: 341905 - RNA, 22 nt, Human
agaucacuugaggucaggaguu

SEQ ID NO: 341906 - RNA, 25 nt, Human
agaucacuugaggucaggaguuuga

SEQ ID NO: 341907 - RNA, 24 nt, Human
agcacuuugggaggccgaggcagg

SEQ ID NO: 341908 - RNA, 24 nt, Human
agcacuuugggaggccgaggcagg

SEQ ID NO: 341909 - RNA, 24 nt, Human
agcacuuugggaggccgaggcggg

SEQ ID NO: 341910 - RNA, 24 nt, Human
agcacuuugggaggccgaggcggg

SEQ ID NO: 341911 - RNA, 22 nt, Human
agccuggccaacauggugaaac

SEQ ID NO: 341912 - RNA, 22 nt, Human
agccuggccaacauggugaaac

SEQ ID NO: 341913 - RNA, 24 nt, Human
agccuggccaacauggugaaaccc

SEQ ID NO: 341914 - RNA, 24 nt, Human
agccuggccaacauggugaaaccc

SEQ ID NO: 341915 - RNA, 22 nt, Human
agccugggugacagaguaagac

SEQ ID NO: 341916 - RNA, 22 nt, Human
agccugggugacagaguaagac

SEQ ID NO: 341917 - RNA, 21 nt, Human
agccuggugacagagugagac

SEQ ID NO: 341918 - RNA, 21 nt, Human
agccuggugacagagugagac

SEQ ID NO: 341919 - RNA, 23 nt, Human
agccuggugacagagugagacuc

SEQ ID NO: 341920 - RNA, 23 nt, Human
agccuggugacagagugagacuc

SEQ ID NO: 341921 - RNA, 18 nt, Human
agcugggugugguagugc

SEQ ID NO: 341922 - RNA, 18 nt, Human
agcugggugugguagugc

SEQ ID NO: 341923 - RNA, 24 nt, Human
aggaaacuuccagaaaacuugguc

SEQ ID NO: 341924 - RNA, 22 nt, Human
aggcaggagaauugcuugaacc

SEQ ID NO: 341925 - RNA, 22 nt, Human
aggcaggagaauugcuugaacc

SEQ ID NO: 341926 - RNA, 24 nt, Human
aggcaggagaauugcuugaaccug

SEQ ID NO: 341927 - RNA, 24 nt, Human
aggcaggagaauugcuugaaccug

SEQ ID NO: 341928 - RNA, 18 nt, Human
aggcaggagauuugcuug

SEQ ID NO: 341929 - RNA, 18 nt, Human
aggcaggagauuugcuug

SEQ ID NO: 341930 - RNA, 24 nt, Human
aggcaggagauuugcuugaaccca

SEQ ID NO: 341931 - RNA, 24 nt, Human
aggcaggagauuugcuugaaccca

SEQ ID NO: 341932 - RNA, 19 nt, Human
aggcaggcugaucaugagg

SEQ ID NO: 341933 - RNA, 19 nt, Human
aggcaggcugaucaugagg

SEQ ID NO: 341934 - RNA, 24 nt, Human
aggcaggcugaucaugaggccaag

SEQ ID NO: 341935 - RNA, 24 nt, Human
aggcaggcugaucaugaggccaag

SEQ ID NO: 341936 - RNA, 20 nt, Human
aggccgaggcaggcugauca

SEQ ID NO: 341937 - RNA, 20 nt, Human
aggccgaggcaggcugauca

SEQ ID NO: 341938 - RNA, 21 nt, Human
aggcggagguugcagugagcc

SEQ ID NO: 341939 - RNA, 24 nt, Human
aggcggagguugcagugagccgag

SEQ ID NO: 341940 - RNA, 24 nt, Human
aggcggagguugcagugagccgag

SEQ ID NO: 341941 - RNA, 21 nt, Human
aggcgggcagaucacuugagg

SEQ ID NO: 341942 - RNA, 22 nt, Human
aggcgggcagaucacuugaggu

SEQ ID NO: 341943 - RNA, 22 nt, Human
aggcgggcagaucacuugaggu

SEQ ID NO: 341944 - RNA, 23 nt, Human
aggcgggcagaucacuugagguc

SEQ ID NO: 341945 - RNA, 23 nt, Human
aggcgggcagaucacuugagguc

SEQ ID NO: 341946 - RNA, 26 nt, Human
aggcgggcagaucacuugaggucagg

SEQ ID NO: 341947 - RNA, 26 nt, Human
aggcgggcagaucacuugaggucagg

SEQ ID NO: 341948 - RNA, 21 nt, Human
aggcugaggcaggagaauugc

SEQ ID NO: 341949 - RNA, 21 nt, Human
aggcugaggcaggagaauugc

SEQ ID NO: 341950 - RNA, 24 nt, Human
aggcugaggcaggagaauugcuug

SEQ ID NO: 341951 - RNA, 24 nt, Human
aggcugaggcaggagaauugcuug

SEQ ID NO: 341952 - RNA, 24 nt, Human
aggcugaggcaggagauuugcuug

SEQ ID NO: 341953 - RNA, 24 nt, Human
aggcugaggcaggagauuugcuug

SEQ ID NO: 341954 - RNA, 24 nt, Human
agguagagguugcagugagccaag

SEQ ID NO: 341955 - RNA, 24 nt, Human
agguagagguugcagugagccaag

SEQ ID NO: 341956 - RNA, 22 nt, Human
aguggcucaggccugugguucc

SEQ ID NO: 341957 - RNA, 22 nt, Human
aguggcucaggccugugguucc

SEQ ID NO: 341958 - RNA, 24 nt, Human
aguggcucaggccugugguuccag

SEQ ID NO: 341959 - RNA, 24 nt, Human
aguggcucaggccugugguuccag

SEQ ID NO: 341960 - RNA, 20 nt, Human
aucacuugaggucaggaguu

SEQ ID NO: 341961 - RNA, 24 nt, Human
aucacuugaggucaggaguuugag

SEQ ID NO: 341962 - RNA, 18 nt, Human
auugcacucuagccuggg

SEQ ID NO: 341963 - RNA, 21 nt, Human
auugcacucuagccuggguga

SEQ ID NO: 341964 - RNA, 24 nt, Human
auugcacucuagccugggugacag

SEQ ID NO: 341965 - RNA, 24 nt, Human
auugcacucuagccugggugacag

SEQ ID NO: 341966 - RNA, 24 nt, Human
auugcggcacugcacuccagccug

SEQ ID NO: 341967 - RNA, 24 nt, Human
auugcggcacugcacuccagccug

SEQ ID NO: 341968 - RNA, 26 nt, Human
caaaacaccaaaugguauucaaaaag

SEQ ID NO: 341969 - RNA, 26 nt, Human
caaaacaccaaaugguauucaaaaag

SEQ ID NO: 341970 - RNA, 21 nt, Human
caacauggugaaaccccaucu

SEQ ID NO: 341971 - RNA, 21 nt, Human
caacauggugaaaccccaucu

SEQ ID NO: 341972 - RNA, 24 nt, Human
caacauggugaaaccccaucuuua

SEQ ID NO: 341973 - RNA, 18 nt, Human
caacauggugaaacccug

SEQ ID NO: 341974 - RNA, 24 nt, Human
cacaccuguaaucccagcacuuug

SEQ ID NO: 341975 - RNA, 24 nt, Human
cacaccuguaaucccagcacuuug

SEQ ID NO: 341976 - RNA, 19 nt, Human
caccuguaaucccagcacu

SEQ ID NO: 341977 - RNA, 23 nt, Human
caccuguaaucccagcacuuugg

SEQ ID NO: 341978 - RNA, 24 nt, Human
caccuguaaucccagcacuuuggg

SEQ ID NO: 341979 - RNA, 24 nt, Human
caccuguaaucccagcacuuuggg

SEQ ID NO: 341980 - RNA, 21 nt, Human
cacuccagccuggugacagag

SEQ ID NO: 341981 - RNA, 21 nt, Human
cacuccagccuggugacagag

SEQ ID NO: 341982 - RNA, 23 nt, Human
cacuccagccuggugacagagug

SEQ ID NO: 341983 - RNA, 23 nt, Human
cacuccagccuggugacagagug

SEQ ID NO: 341984 - RNA, 22 nt, Human
cacucuagccugggugacagag

SEQ ID NO: 341985 - RNA, 22 nt, Human
cacucuagccugggugacagag

SEQ ID NO: 341986 - RNA, 22 nt, Human
cacucuagccugggugacagag

SEQ ID NO: 341987 - RNA, 22 nt, Human
cacucuagccugggugacagag

SEQ ID NO: 341988 - RNA, 18 nt, Human
cacugcacuccagccugg

SEQ ID NO: 341989 - RNA, 18 nt, Human
cacugcacuccagccugg

SEQ ID NO: 341990 - RNA, 18 nt, Human
cacugcacuccagccugg

SEQ ID NO: 341991 - RNA, 18 nt, Human
cacugcacuccagccugg

SEQ ID NO: 341992 - RNA, 18 nt, Human
cacugcacuccagccugg

SEQ ID NO: 341993 - RNA, 18 nt, Human
cacugcacuccagccugg

SEQ ID NO: 341994 - RNA, 20 nt, Human
cacugcacuccagccuggug

SEQ ID NO: 341995 - RNA, 22 nt, Human
cacugcacuccagccuggugac

SEQ ID NO: 341996 - RNA, 22 nt, Human
cacugcacuccagccuggugac

SEQ ID NO: 341997 - RNA, 23 nt, Human
cacugcacuccagccuggugaca

SEQ ID NO: 341998 - RNA, 23 nt, Human
cacugcacuccagccuggugaca

SEQ ID NO: 341999 - RNA, 23 nt, Human
cacugcacuccagccuggugaca

SEQ ID NO: 342000 - RNA, 24 nt, Human
cacugcacuccagccuggugacag

SEQ ID NO: 342001 - RNA, 23 nt, Human
cacuugaggucaggaguuugaga

SEQ ID NO: 342002 - RNA, 23 nt, Human
cacuugaggucaggaguuugaga

SEQ ID NO: 342003 - RNA, 23 nt, Human
cacuuguaaucccagcuacucgg

SEQ ID NO: 342004 - RNA, 23 nt, Human
cacuuguaaucccagcuacucgg

SEQ ID NO: 342005 - RNA, 24 nt, Human
cacuuguaaucccagcuacucggg

SEQ ID NO: 342006 - RNA, 24 nt, Human
cacuuguaaucccagcuacucggg

SEQ ID NO: 342007 - RNA, 24 nt, Human
cagaucacuugaggucaggaguuu

SEQ ID NO: 342008 - RNA, 24 nt, Human
cagaucacuugaggucaggaguuu

SEQ ID NO: 342009 - RNA, 27 nt, Human
cagaucacuugaggucaggaguuugag

SEQ ID NO: 342010 - RNA, 22 nt, Human
cagcacuuugggaggccgaggc

SEQ ID NO: 342011 - RNA, 24 nt, Human
cagcacuuugggaggccgaggcag

SEQ ID NO: 342012 - RNA, 24 nt, Human
cagcacuuugggaggccgaggcag

SEQ ID NO: 342013 - RNA, 25 nt, Human
cagcacuuugggaggccgaggcagg

SEQ ID NO: 342014 - RNA, 25 nt, Human
cagcacuuugggaggccgaggcagg

SEQ ID NO: 342015 - RNA, 24 nt, Human
cagcacuuugggaggccgaggcgg

SEQ ID NO: 342016 - RNA, 24 nt, Human
cagcacuuugggaggccgaggcgg

SEQ ID NO: 342017 - RNA, 24 nt, Human
cagcuacucgggaggcugaggcag

SEQ ID NO: 342018 - RNA, 24 nt, Human
cagcuacucgggaggcugaggcag

SEQ ID NO: 342019 - RNA, 24 nt, Human
caggccugugguuccagcacuuug

SEQ ID NO: 342020 - RNA, 24 nt, Human
caucucaaaaaaaaaaaaaaaaaa

SEQ ID NO: 342021 - RNA, 19 nt, Human
cauugcacucuagccuggg

SEQ ID NO: 342022 - RNA, 19 nt, Human
cauugcacucuagccuggg

SEQ ID NO: 342023 - RNA, 21 nt, Human
cauugcacucuagccugggug

SEQ ID NO: 342024 - RNA, 21 nt, Human
cauugcacucuagccugggug

SEQ ID NO: 342025 - RNA, 22 nt, Human
cauugcacucuagccuggguga

SEQ ID NO: 342026 - RNA, 22 nt, Human
cauugcacucuagccuggguga

SEQ ID NO: 342027 - RNA, 24 nt, Human
cauugcacucuagccugggugaca

SEQ ID NO: 342028 - RNA, 24 nt, Human
cauugcacucuagccugggugaca

SEQ ID NO: 342029 - RNA, 24 nt, Human
cauugcacucuagccugggugaca

SEQ ID NO: 342030 - RNA, 24 nt, Human
cauugcacucuagccugggugaca

SEQ ID NO: 342031 - RNA, 21 nt, Human
ccaacauggugaaacccuguc

SEQ ID NO: 342032 - RNA, 21 nt, Human
ccaacauggugaaacccuguc

SEQ ID NO: 342033 - RNA, 22 nt, Human
ccaggagguagagguugcagug

SEQ ID NO: 342034 - RNA, 20 nt, Human
ccauugcacucuagccuggg

SEQ ID NO: 342035 - RNA, 20 nt, Human
ccauugcacucuagccuggg

SEQ ID NO: 342036 - RNA, 21 nt, Human
ccauugcacucuagccugggu

SEQ ID NO: 342037 - RNA, 21 nt, Human
ccauugcacucuagccugggu

SEQ ID NO: 342038 - RNA, 21 nt, Human
ccauugcacucuagccugggu

SEQ ID NO: 342039 - RNA, 21 nt, Human
ccauugcacucuagccugggu

SEQ ID NO: 342040 - RNA, 22 nt, Human
ccauugcacucuagccugggug

SEQ ID NO: 342041 - RNA, 22 nt, Human
ccauugcacucuagccugggug

SEQ ID NO: 342042 - RNA, 23 nt, Human
ccauugcacucuagccuggguga

SEQ ID NO: 342043 - RNA, 23 nt, Human
ccauugcacucuagccuggguga

SEQ ID NO: 342044 - RNA, 24 nt, Human
ccauugcacucuagccugggugac

SEQ ID NO: 342045 - RNA, 24 nt, Human
ccauugcacucuagccugggugac

SEQ ID NO: 342046 - RNA, 22 nt, Human
ccuagccaacauggugaaaccc

SEQ ID NO: 342047 - RNA, 22 nt, Human
ccuagccaacauggugaaaccc

SEQ ID NO: 342048 - RNA, 22 nt, Human
ccuagccaacauggugaaaccc

SEQ ID NO: 342049 - RNA, 22 nt, Human
ccuagccaacauggugaaaccc

SEQ ID NO: 342050 - RNA, 24 nt, Human
ccuagccaacauggugaaacccug

SEQ ID NO: 342051 - RNA, 24 nt, Human
ccuagccaacauggugaaacccug

SEQ ID NO: 342052 - RNA, 23 nt, Human
ccuggccaacauggugaaacccc

SEQ ID NO: 342053 - RNA, 23 nt, Human
ccuggccaacauggugaaacccc

SEQ ID NO: 342054 - RNA, 24 nt, Human
ccuggccaacauggugaaacccca

SEQ ID NO: 342055 - RNA, 24 nt, Human
ccuggccaacauggugaaacccca

SEQ ID NO: 342056 - RNA, 19 nt, Human
ccugggaggcggagguugc

SEQ ID NO: 342057 - RNA, 20 nt, Human
ccugggugacagaguaagac

SEQ ID NO: 342058 - RNA, 20 nt, Human
ccugggugacagaguaagac

SEQ ID NO: 342059 - RNA, 21 nt, Human
ccuggugacagagugagacuc

SEQ ID NO: 342060 - RNA, 21 nt, Human
ccuggugacagagugagacuc

SEQ ID NO: 342061 - RNA, 18 nt, Human
ccuguaaucccagcuacu

SEQ ID NO: 342062 - RNA, 21 nt, Human
ccuguaaucccagcuacuuug

SEQ ID NO: 342063 - RNA, 22 nt, Human
ccuguaaucccagcuacuuugg

SEQ ID NO: 342064 - RNA, 22 nt, Human
ccuguaaucccagcuacuuugg

SEQ ID NO: 342065 - RNA, 20 nt, Human
ccugugguuccagcacuuug

SEQ ID NO: 342066 - RNA, 24 nt, Human
cgagauugcggcacugcacuccag

SEQ ID NO: 342067 - RNA, 24 nt, Human
cgagauugcggcacugcacuccag

SEQ ID NO: 342068 - RNA, 24 nt, Human
cgaggcaggcugaucaugaggcca

SEQ ID NO: 342069 - RNA, 24 nt, Human
cgaggcaggcugaucaugaggcca

SEQ ID NO: 342070 - RNA, 24 nt, Human
cgaggcgggcagaucacuugaggu

SEQ ID NO: 342071 - RNA, 24 nt, Human
cgaggcgggcagaucacuugaggu

SEQ ID NO: 342072 - RNA, 26 nt, Human
cgaggcgggcagaucacuugagguca

SEQ ID NO: 342073 - RNA, 26 nt, Human
cgaggcgggcagaucacuugagguca

SEQ ID NO: 342074 - RNA, 19 nt, Human
cgcacuuguaaucccagcu

SEQ ID NO: 342075 - RNA, 24 nt, Human
cgggcagaucacuugaggucagga

SEQ ID NO: 342076 - RNA, 24 nt, Human
cgggcagaucacuugaggucagga

SEQ ID NO: 342077 - RNA, 24 nt, Human
cuacaucucaaaaaaaaaaaaaaa

SEQ ID NO: 342078 - RNA, 24 nt, Human
cuacaucucaaaaaaaaaaaaaaa

SEQ ID NO: 342079 - RNA, 18 nt, Human
cucaaaaaaaaaaaaaaa

SEQ ID NO: 342080 - RNA, 18 nt, Human
cucaaaaaaaaaaaaaaa

SEQ ID NO: 342081 - RNA, 23 nt, Human
cucaaaaaaaaaaaaaaaaaaaa

SEQ ID NO: 342082 - RNA, 22 nt, Human
cucacaccuguaaucccagcac

SEQ ID NO: 342083 - RNA, 22 nt, Human
cucacaccuguaaucccagcac

SEQ ID NO: 342084 - RNA, 24 nt, Human
cucacaccuguaaucccagcacuu

SEQ ID NO: 342085 - RNA, 24 nt, Human
cucacaccuguaaucccagcacuu

SEQ ID NO: 342086 - RNA, 22 nt, Human
cucaggccugugguuccagcac

SEQ ID NO: 342087 - RNA, 22 nt, Human
cucaggccugugguuccagcac

SEQ ID NO: 342088 - RNA, 24 nt, Human
cucaggccugugguuccagcacuu

SEQ ID NO: 342089 - RNA, 24 nt, Human
cucaggccugugguuccagcacuu

SEQ ID NO: 342090 - RNA, 18 nt, Human
cucugugcagggguucca

SEQ ID NO: 342091 - RNA, 23 nt, Human
cuggccaacauggugaaacccca

SEQ ID NO: 342092 - RNA, 23 nt, Human
cuggccaacauggugaaacccca

SEQ ID NO: 342093 - RNA, 19 nt, Human
cuugaaccugggaggcgga

SEQ ID NO: 342094 - RNA, 21 nt, Human
cuuguaaucccagcuacucgg

SEQ ID NO: 342095 - RNA, 21 nt, Human
cuuguaaucccagcuacucgg

SEQ ID NO: 342096 - RNA, 18 nt, Human
gaaucacaagcacugcca

SEQ ID NO: 342097 - RNA, 18 nt, Human
gaaucacaagcacugcca

SEQ ID NO: 342098 - RNA, 24 nt, Human
gacagagugagacuccguuucaaa

SEQ ID NO: 342099 - RNA, 24 nt, Human
gacagagugagacuccguuucaaa

SEQ ID NO: 342100 - RNA, 23 nt, Human
gagaauugcuugaaccugggagg

SEQ ID NO: 342101 - RNA, 23 nt, Human
gagaauugcuugaaccugggagg

SEQ ID NO: 342102 - RNA, 23 nt, Human
gagaucagccuggccaacauggu

SEQ ID NO: 342103 - RNA, 23 nt, Human
gagcauuuaaacacugccacacg

SEQ ID NO: 342104 - RNA, 23 nt, Human
gagcauuuaaacacugccacacg

SEQ ID NO: 342105 - RNA, 18 nt, Human
gagguugcagugagccaa

SEQ ID NO: 342106 - RNA, 21 nt, Human
gagguugcagugagccgagau

SEQ ID NO: 342107 - RNA, 21 nt, Human
gagguugcagugagccgagau

SEQ ID NO: 342108 - RNA, 23 nt, Human
gagguugcagugagccgagauug

SEQ ID NO: 342109 - RNA, 23 nt, Human
gagguugcagugagccgagauug

SEQ ID NO: 342110 - RNA, 24 nt, Human
gaucacuugaggucaggaguuuga

SEQ ID NO: 342111 - RNA, 24 nt, Human
gaucacuugaggucaggaguuuga

SEQ ID NO: 342112 - RNA, 22 nt, Human
gcacuccagccuggugacagag

SEQ ID NO: 342113 - RNA, 23 nt, Human
gcacuccagccuggugacagagu

SEQ ID NO: 342114 - RNA, 23 nt, Human
gcacuccagccuggugacagagu

SEQ ID NO: 342115 - RNA, 23 nt, Human
gcacucuagccugggugacagag

SEQ ID NO: 342116 - RNA, 24 nt, Human
gcacucuagccugggugacagagu

SEQ ID NO: 342117 - RNA, 20 nt, Human
gcacugcacuccagccuggu

SEQ ID NO: 342118 - RNA, 20 nt, Human
gcacugcacuccagccuggu

SEQ ID NO: 342119 - RNA, 23 nt, Human
gcacugcacuccagccuggugac

SEQ ID NO: 342120 - RNA, 22 nt, Human
gcaggagauuugcuugaaccca

SEQ ID NO: 342121 - RNA, 22 nt, Human
gcaggagauuugcuugaaccca

SEQ ID NO: 342122 - RNA, 20 nt, Human
gcagucaugucaaagcaguu

SEQ ID NO: 342123 - RNA, 20 nt, Human
gcagucaugucaaagcaguu

SEQ ID NO: 342124 - RNA, 23 nt, Human
gccaacauggugaaaccccaucu

SEQ ID NO: 342125 - RNA, 23 nt, Human
gccaacauggugaaaccccaucu

SEQ ID NO: 342126 - RNA, 22 nt, Human
gccaacauggugaaacccuguc

SEQ ID NO: 342127 - RNA, 22 nt, Human
gccaacauggugaaacccuguc

SEQ ID NO: 342128 - RNA, 24 nt, Human
gccauugcacucuagccuggguga

SEQ ID NO: 342129 - RNA, 24 nt, Human
gccauugcacucuagccuggguga

SEQ ID NO: 342130 - RNA, 24 nt, Human
gccugugguuccagcacuuuggga

SEQ ID NO: 342131 - RNA, 24 nt, Human
gccugugguuccagcacuuuggga

SEQ ID NO: 342132 - RNA, 18 nt, Human
gcgcacuuguaaucccag

SEQ ID NO: 342133 - RNA, 18 nt, Human
gcgcacuuguaaucccag

SEQ ID NO: 342134 - RNA, 21 nt, Human
gcggcacugcacuccagccug

SEQ ID NO: 342135 - RNA, 21 nt, Human
gcggcacugcacuccagccug

SEQ ID NO: 342136 - RNA, 22 nt, Human
ggagguagagguugcagugagc

SEQ ID NO: 342137 - RNA, 22 nt, Human
ggagguagagguugcagugagc

SEQ ID NO: 342138 - RNA, 22 nt, Human
ggagguugcagugagccgagau

SEQ ID NO: 342139 - RNA, 22 nt, Human
ggagguugcagugagccgagau

SEQ ID NO: 342140 - RNA, 24 nt, Human
ggagguugcagugagccgagauug

SEQ ID NO: 342141 - RNA, 24 nt, Human
ggagguugcagugagccgagauug

SEQ ID NO: 342142 - RNA, 23 nt, Human
ggcacgguggcucacaccuguaa

SEQ ID NO: 342143 - RNA, 25 nt, Human
ggcagaucacuugaggucaggaguu

SEQ ID NO: 342144 - RNA, 25 nt, Human
ggcagaucacuugaggucaggaguu

SEQ ID NO: 342145 - RNA, 24 nt, Human
gggcacaguggcucaggccugugg

SEQ ID NO: 342146 - RNA, 24 nt, Human
gggcacaguggcucaggccugugg

SEQ ID NO: 342147 - RNA, 24 nt, Human
gggcacgguggcucacaccuguaa

SEQ ID NO: 342148 - RNA, 24 nt, Human
gguagugcgcacuuguaaucccag

SEQ ID NO: 342149 - RNA, 24 nt, Human
gguagugcgcacuuguaaucccag

SEQ ID NO: 342150 - RNA, 19 nt, Human
ggucaggaguuugagauca

SEQ ID NO: 342151 - RNA, 19 nt, Human
ggucaggaguuugagauca

SEQ ID NO: 342152 - RNA, 25 nt, Human
ggugccuguaaucccagcuacuuug

SEQ ID NO: 342153 - RNA, 23 nt, Human
gguggcucacaccuguaauccca

SEQ ID NO: 342154 - RNA, 23 nt, Human
gguggcucacaccuguaauccca

SEQ ID NO: 342155 - RNA, 24 nt, Human
gguggcucacaccuguaaucccag

SEQ ID NO: 342156 - RNA, 24 nt, Human
gguggcucacaccuguaaucccag

SEQ ID NO: 342157 - RNA, 19 nt, Human
gguuccagcacuuugggag

SEQ ID NO: 342158 - RNA, 23 nt, Human
guggugggugccuguaaucccag

SEQ ID NO: 342159 - RNA, 21 nt, Human
gugguuccagcacuuugggag

SEQ ID NO: 342160 - RNA, 19 nt, Human
guugcagugagccgagauu

SEQ ID NO: 342161 - RNA, 19 nt, Human
guugcagugagccgagauu

SEQ ID NO: 342162 - RNA, 21 nt, Human
guugcagugagccgagauugc

SEQ ID NO: 342163 - RNA, 18 nt, Human
uacuaaaaauacaaaaaa

SEQ ID NO: 342164 - RNA, 18 nt, Human
uacuaaaaauacaaaaaa

SEQ ID NO: 342165 - RNA, 23 nt, Human
uagccaacauggugaaacccugu

SEQ ID NO: 342166 - RNA, 23 nt, Human
uagccaacauggugaaacccugu

SEQ ID NO: 342167 - RNA, 21 nt, Human
uagccagauguggugggugcc

SEQ ID NO: 342168 - RNA, 23 nt, Human
uaggcugggcacgguggcucaca

SEQ ID NO: 342169 - RNA, 23 nt, Human
uaggcugggcacgguggcucaca

SEQ ID NO: 342170 - RNA, 19 nt, Human
uauguaaacaaaaagaacc

SEQ ID NO: 342171 - RNA, 21 nt, Human
uauguaaacaaaaagaaccuu

SEQ ID NO: 342172 - RNA, 22 nt, Human
uauguguuucuuaagcaaugga

SEQ ID NO: 342173 - RNA, 22 nt, Human
uauguguuucuuaagcaaugga

SEQ ID NO: 342174 - RNA, 22 nt, Human
ucaaaaaaaaaaaaaaaaaaaa

SEQ ID NO: 342175 - RNA, 23 nt, Human
ucaaaaaaaaaaaaaaaaaaaaa

SEQ ID NO: 342176 - RNA, 23 nt, Human
ucaaaaaaaaaaaaaaaaaaaaa

SEQ ID NO: 342177 - RNA, 22 nt, Human
ucaaaacaccaaaugguauuca

SEQ ID NO: 342178 - RNA, 22 nt, Human
ucaaaacaccaaaugguauuca

SEQ ID NO: 342179 - RNA, 19 nt, Human
ucacuugaggucaggaguu

SEQ ID NO: 342180 - RNA, 22 nt, Human
ucaggccugugguuccagcacu

SEQ ID NO: 342181 - RNA, 22 nt, Human
ucaggccugugguuccagcacu

SEQ ID NO: 342182 - RNA, 21 nt, Human
uccaacagccaaaugaggaaa

SEQ ID NO: 342183 - RNA, 22 nt, Human
uccagccuggugacagagugag

SEQ ID NO: 342184 - RNA, 22 nt, Human
uccagccuggugacagagugag

SEQ ID NO: 342185 - RNA, 23 nt, Human
uccagccuggugacagagugaga

SEQ ID NO: 342186 - RNA, 23 nt, Human
uccagccuggugacagagugaga

SEQ ID NO: 342187 - RNA, 22 nt, Human
uccccuuggucucaauggaagc

SEQ ID NO: 342188 - RNA, 22 nt, Human
uccccuuggucucaauggaagc

SEQ ID NO: 342189 - RNA, 23 nt, Human
ucgggaggcugaggcaggagaau

SEQ ID NO: 342190 - RNA, 23 nt, Human
ucgggaggcugaggcaggagaau

SEQ ID NO: 342191 - RNA, 24 nt, Human
ucuagccugggugacagaguaaga

SEQ ID NO: 342192 - RNA, 24 nt, Human
ucuagccugggugacagaguaaga

SEQ ID NO: 342193 - RNA, 19 nt, Human
ucucaaaaaaaaaaaaaaa

SEQ ID NO: 342194 - RNA, 19 nt, Human
ucucaaaaaaaaaaaaaaa

SEQ ID NO: 342195 - RNA, 19 nt, Human
ugaaaccccaucuuuacua

SEQ ID NO: 342196 - RNA, 19 nt, Human
ugaaaccccaucuuuacua

SEQ ID NO: 342197 - RNA, 24 nt, Human
ugaaacuauccuagccaacauggu

SEQ ID NO: 342198 - RNA, 24 nt, Human
ugaaacuauccuagccaacauggu

SEQ ID NO: 342199 - RNA, 24 nt, Human
ugaaccugggaggcggagguugca

SEQ ID NO: 342200 - RNA, 24 nt, Human
ugaaccugggaggcggagguugca

SEQ ID NO: 342201 - RNA, 19 nt, Human
ugaagcacaugauugcagu

SEQ ID NO: 342202 - RNA, 19 nt, Human
ugaagcacaugauugcagu

SEQ ID NO: 342203 - RNA, 24 nt, Human
ugaccaccaucauauaugcagucu

SEQ ID NO: 342204 - RNA, 24 nt, Human
ugaccaccaucauauaugcagucu

SEQ ID NO: 342205 - RNA, 22 nt, Human
ugacuaaaugguguuuaugugu

SEQ ID NO: 342206 - RNA, 22 nt, Human
ugacuaaaugguguuuaugugu

SEQ ID NO: 342207 - RNA, 25 nt, Human
ugagaggaaguugucuuguuuuuga

SEQ ID NO: 342208 - RNA, 25 nt, Human
ugagaggaaguugucuuguuuuuga

SEQ ID NO: 342209 - RNA, 23 nt, Human
ugagaucagccuggccaacaugg

SEQ ID NO: 342210 - RNA, 23 nt, Human
ugagaucagccuggccaacaugg

SEQ ID NO: 342211 - RNA, 24 nt, Human
ugagaucagccuggccaacauggu

SEQ ID NO: 342212 - RNA, 18 nt, Human
ugagcacacuguuaucug

SEQ ID NO: 342213 - RNA, 18 nt, Human
ugagcacacuguuaucug

SEQ ID NO: 342214 - RNA, 22 nt, Human
ugagccgagauugcggcacugc

SEQ ID NO: 342215 - RNA, 22 nt, Human
ugagccgagauugcggcacugc

SEQ ID NO: 342216 - RNA, 24 nt, Human
ugaggcaggagaauugcuugaacc

SEQ ID NO: 342217 - RNA, 24 nt, Human
ugaggcaggagaauugcuugaacc

SEQ ID NO: 342218 - RNA, 24 nt, Human
ugaggcaggagaauugcuugaacc

SEQ ID NO: 342219 - RNA, 25 nt, Human
ugaggcaggagaauugcuugaaccu

SEQ ID NO: 342220 - RNA, 24 nt, Human
ugaggcaggagauuugcuugaacc

SEQ ID NO: 342221 - RNA, 24 nt, Human
ugaggcaggagauuugcuugaacc

SEQ ID NO: 342222 - RNA, 25 nt, Human
ugaggcaggagauuugcuugaaccc

SEQ ID NO: 342223 - RNA, 25 nt, Human
ugaggcaggagauuugcuugaaccc

SEQ ID NO: 342224 - RNA, 18 nt, Human
ugaggucaggaguuugag

SEQ ID NO: 342225 - RNA, 18 nt, Human
ugaggucaggaguuugag

SEQ ID NO: 342226 - RNA, 24 nt, Human
ugcacucuagccugggugacagag

SEQ ID NO: 342227 - RNA, 24 nt, Human
ugcacucuagccugggugacagag

SEQ ID NO: 342228 - RNA, 20 nt, Human
ugccagaauuuucaaagaaa

SEQ ID NO: 342229 - RNA, 20 nt, Human
ugccagaauuuucaaagaaa

SEQ ID NO: 342230 - RNA, 19 nt, Human
ugccuguaaucccagcuac

SEQ ID NO: 342231 - RNA, 19 nt, Human
ugccuguaaucccagcuac

SEQ ID NO: 342232 - RNA, 24 nt, Human
ugccuguaaucccagcuacuuugg

SEQ ID NO: 342233 - RNA, 21 nt, Human
ugcuugaaccugggaggcgga

SEQ ID NO: 342234 - RNA, 19 nt, Human
uggcaaagugugacacaua

SEQ ID NO: 342235 - RNA, 19 nt, Human
uggcaaagugugacacaua

SEQ ID NO: 342236 - RNA, 24 nt, Human
uggccaacauggugaaaccccauc

SEQ ID NO: 342237 - RNA, 24 nt, Human
uggccaacauggugaaaccccauc

SEQ ID NO: 342238 - RNA, 21 nt, Human
uggcucacaccuguaauccca

SEQ ID NO: 342239 - RNA, 21 nt, Human
uggcucacaccuguaauccca

SEQ ID NO: 342240 - RNA, 22 nt, Human
uggcucacaccuguaaucccag

SEQ ID NO: 342241 - RNA, 22 nt, Human
uggcucacaccuguaaucccag

SEQ ID NO: 342242 - RNA, 24 nt, Human
uggcucacaccuguaaucccagca

SEQ ID NO: 342243 - RNA, 24 nt, Human
uggcucacaccuguaaucccagca

SEQ ID NO: 342244 - RNA, 20 nt, Human
ugggaggccgaggcaggcug

SEQ ID NO: 342245 - RNA, 20 nt, Human
ugggaggccgaggcaggcug

SEQ ID NO: 342246 - RNA, 24 nt, Human
ugggaggccgaggcaggcugauca

SEQ ID NO: 342247 - RNA, 24 nt, Human
ugggaggccgaggcaggcugauca

SEQ ID NO: 342248 - RNA, 19 nt, Human
ugggaggccgaggcgggca

SEQ ID NO: 342249 - RNA, 20 nt, Human
ugggaggccgaggcgggcag

SEQ ID NO: 342250 - RNA, 20 nt, Human
ugggaggccgaggcgggcag

SEQ ID NO: 342251 - RNA, 24 nt, Human
ugggaggccgaggcgggcagauca

SEQ ID NO: 342252 - RNA, 24 nt, Human
ugggaggccgaggcgggcagauca

SEQ ID NO: 342253 - RNA, 29 nt, Human
ugggaggcggagguugcagugacaacggu

SEQ ID NO: 342254 - RNA, 29 nt, Human
ugggaggcggagguugcagugacaacggu

SEQ ID NO: 342255 - RNA, 24 nt, Human
ugggaggcggagguugcagugagc

SEQ ID NO: 342256 - RNA, 24 nt, Human
ugggaggcggagguugcagugagc

SEQ ID NO: 342257 - RNA, 24 nt, Human
ugguagugcgcacuuguaauccca

SEQ ID NO: 342258 - RNA, 24 nt, Human
ugguagugcgcacuuguaauccca

SEQ ID NO: 342259 - RNA, 21 nt, Human
uggugggugccuguaauccca

SEQ ID NO: 342260 - RNA, 21 nt, Human
uggugggugccuguaauccca

SEQ ID NO: 342261 - RNA, 22 nt, Human
uggugggugccuguaaucccag

SEQ ID NO: 342262 - RNA, 24 nt, Human
uggugggugccuguaaucccagcu

SEQ ID NO: 342263 - RNA, 24 nt, Human
uggugggugccuguaaucccagcu

SEQ ID NO: 342264 - RNA, 23 nt, Human
ugguguuuauguguuucuuaagc

SEQ ID NO: 342265 - RNA, 23 nt, Human
ugguguuuauguguuucuuaagc

SEQ ID NO: 342266 - RNA, 20 nt, Human
uguaaucccagcuacucggg

SEQ ID NO: 342267 - RNA, 24 nt, Human
uguggugggugccuguaaucccag

SEQ ID NO: 342268 - RNA, 24 nt, Human
uguggugggugccuguaaucccag

SEQ ID NO: 342269 - RNA, 21 nt, Human
uguuucuuaagcaauggaguu

SEQ ID NO: 342270 - RNA, 21 nt, Human
uguuucuuaagcaauggaguu

SEQ ID NO: 342271 - RNA, 23 nt, Human
uuacuggaugaccaccaucauau

SEQ ID NO: 342272 - RNA, 23 nt, Human
uuacuggaugaccaccaucauau

SEQ ID NO: 342273 - RNA, 21 nt, Human
uuagccagauguggugggugc

SEQ ID NO: 342274 - RNA, 21 nt, Human
uuagccagauguggugggugc

SEQ ID NO: 342275 - RNA, 22 nt, Human
uuagccagauguggugggugcc

SEQ ID NO: 342276 - RNA, 22 nt, Human
uuagccagauguggugggugcc

SEQ ID NO: 342277 - RNA, 20 nt, Human
uuagcugggugugguagugc

SEQ ID NO: 342278 - RNA, 20 nt, Human
uuagcugggugugguagugc

SEQ ID NO: 342279 - RNA, 20 nt, Human
uuagcugggugugguagugc

SEQ ID NO: 342280 - RNA, 20 nt, Human
uuagcugggugugguagugc

SEQ ID NO: 342281 - RNA, 18 nt, Human
uuccagaaaacuugguca

SEQ ID NO: 342282 - RNA, 19 nt, Human
uucuuggaugcuuuugcuu

SEQ ID NO: 342283 - RNA, 24 nt, Human
uugaaccugggaggcggagguugc

SEQ ID NO: 342284 - RNA, 24 nt, Human
uugaaccugggaggcggagguugc

SEQ ID NO: 342285 - RNA, 22 nt, Human
uugcagugagccaagauggugc

SEQ ID NO: 342286 - RNA, 22 nt, Human
uugcagugagccaagauggugc

SEQ ID NO: 342287 - RNA, 18 nt, Human
uugcagugagccgagauu

SEQ ID NO: 342288 - RNA, 19 nt, Human
uugcagugagccgagauug

SEQ ID NO: 342289 - RNA, 19 nt, Human
uugcagugagccgagauug

SEQ ID NO: 342290 - RNA, 20 nt, Human
uugcagugagccgagauugc

SEQ ID NO: 342291 - RNA, 20 nt, Human
uugcagugagccgagauugc

SEQ ID NO: 342292 - RNA, 24 nt, Human
uugcuugaacccaggagguagagg

SEQ ID NO: 342293 - RNA, 24 nt, Human
uugcuugaacccaggagguagagg

SEQ ID NO: 342294 - RNA, 24 nt, Human
uugcuugaaccugggaggcggagg

SEQ ID NO: 342295 - RNA, 24 nt, Human
uugcuugaaccugggaggcggagg

SEQ ID NO: 342296 - RNA, 25 nt, Human
uugggaggccgaggcaggcugauca

SEQ ID NO: 342297 - RNA, 25 nt, Human
uugggaggccgaggcaggcugauca

SEQ ID NO: 342298 - RNA, 25 nt, Human
uugggaggccgaggcgggcagauca

SEQ ID NO: 342299 - RNA, 25 nt, Human
uugggaggccgaggcgggcagauca

SEQ ID NO: 342300 - RNA, 21 nt, Human
uuguaaucccagcuacucggg

SEQ ID NO: 342301 - RNA, 22 nt, Human
aaaaaaaggggacgccgcgaug

SEQ ID NO: 342302 - RNA, 25 nt, Human
aaaaagaagcauaguuuaucuucaa

SEQ ID NO: 342303 - RNA, 18 nt, Human
aaaggcaaaaaaaagggg

SEQ ID NO: 342304 - RNA, 24 nt, Human
aacacgcccacgugaccggccggc

SEQ ID NO: 342305 - RNA, 21 nt, Human
aacucgcugcgucaugacccu

SEQ ID NO: 342306 - RNA, 18 nt, Human
aagaaaaaagaagcauag

SEQ ID NO: 342307 - RNA, 21 nt, Human
aauaaacacugauauacugaa

SEQ ID NO: 342308 - RNA, 18 nt, Human
acauuuaacacaaugaaa

SEQ ID NO: 342309 - RNA, 18 nt, Human
accgcccggaaccgaccg

SEQ ID NO: 342310 - RNA, 20 nt, Human
acuuuaaaggcaaaaaaaag

SEQ ID NO: 342311 - RNA, 21 nt, Human
acuuuaaaggcaaaaaaaagg

SEQ ID NO: 342312 - RNA, 18 nt, Human
agcaggggcggcggcggg

SEQ ID NO: 342313 - RNA, 19 nt, Human
aguauacauuuaacacaau

SEQ ID NO: 342314 - RNA, 21 nt, Human
caccgccccucuucgcgccgu

SEQ ID NO: 342315 - RNA, 20 nt, Human
cccacaacacgcccacguga

SEQ ID NO: 342316 - RNA, 20 nt, Human
cccccccacaacacgcccac

SEQ ID NO: 342317 - RNA, 21 nt, Human
ccccgaaauacgcggggggug

SEQ ID NO: 342318 - RNA, 23 nt, Human
ccccucccccccacaacacgccc

SEQ ID NO: 342319 - RNA, 22 nt, Human
cccgccgccuccgccccccgaa

SEQ ID NO: 342320 - RNA, 19 nt, Human
ccgccgccuuuuaauuacg

SEQ ID NO: 342321 - RNA, 24 nt, Human
ccgccuccgccccccgaaauacgc

SEQ ID NO: 342322 - RNA, 21 nt, Human
ccgcgcggcggcgccccuccc

SEQ ID NO: 342323 - RNA, 23 nt, Human
ccggcgucagcaccgccccucuu

SEQ ID NO: 342324 - RNA, 24 nt, Human
ccguggcccgccgccuccgccccc

SEQ ID NO: 342325 - RNA, 27 nt, Human
cgaugcccccagaaaagucacgacuga

SEQ ID NO: 342326 - RNA, 25 nt, Human
cgccuccgccccccgaaauacgcgg

SEQ ID NO: 342327 - RNA, 19 nt, Human
cgcgccguggcccgccgcc

SEQ ID NO: 342328 - RNA, 22 nt, Human
cgcgccguggcccgccgccucc

SEQ ID NO: 342329 - RNA, 19 nt, Human
cggcgggcgcggcugccuc

SEQ ID NO: 342330 - RNA, 24 nt, Human
cguggcccgccgccuccgcccccc

SEQ ID NO: 342331 - RNA, 23 nt, Human
cuacacugaaaaauuaaugccga

SEQ ID NO: 342332 - RNA, 26 nt, Human
cucagccccggcccaaccacaucaac

SEQ ID NO: 342333 - RNA, 23 nt, Human
cuucgcgccguggcccgccgccu

SEQ ID NO: 342334 - RNA, 25 nt, Human
cuucgcgccguggcccgccgccucc

SEQ ID NO: 342335 - RNA, 24 nt, Human
cuuggcggccuccucagccccggc

SEQ ID NO: 342336 - RNA, 20 nt, Human
gaaaaaagaagcauaguuua

SEQ ID NO: 342337 - RNA, 21 nt, Human
gagcaggggcggcggcgggcg

SEQ ID NO: 342338 - RNA, 23 nt, Human
gcaccgccccucuucgcgccgug

SEQ ID NO: 342339 - RNA, 23 nt, Human
gccggcgucagcaccgccccucu

SEQ ID NO: 342340 - RNA, 24 nt, Human
gcgccccucccccccacaacacgc

SEQ ID NO: 342341 - RNA, 21 nt, Human
gcggcggcgguggcuccugcu

SEQ ID NO: 342342 - RNA, 23 nt, Human
ggcggcggccgcgccgggagaga

SEQ ID NO: 342343 - RNA, 21 nt, Human
ggcggcgggcgcggcugccuc

SEQ ID NO: 342344 - RNA, 22 nt, Human
gggacgccgcgaugcccccaga

SEQ ID NO: 342345 - RNA, 19 nt, Human
gggcggcggcgggcgcggc

SEQ ID NO: 342346 - RNA, 22 nt, Human
uaaacaacaaacuacacugaaa

SEQ ID NO: 342347 - RNA, 19 nt, Human
uaacagaagaaaaaagaag

SEQ ID NO: 342348 - RNA, 23 nt, Human
uagaauauauucccaguguccuc

SEQ ID NO: 342349 - RNA, 24 nt, Human
uagcucgcgcgcucccaaccgccc

SEQ ID NO: 342350 - RNA, 24 nt, Human
ucaaccgcggcggcgguggcuccu

SEQ ID NO: 342351 - RNA, 20 nt, Human
ucagguuaacagaagaaaaa

SEQ ID NO: 342352 - RNA, 20 nt, Human
ucccaccuucuuccgccgcc

SEQ ID NO: 342353 - RNA, 22 nt, Human
ucggcggcggccgcgccgggag

SEQ ID NO: 342354 - RNA, 24 nt, Human
ucuucgcgccguggcccgccgccu

SEQ ID NO: 342355 - RNA, 24 nt, Human
ugaaauaaacacugauauacugaa

SEQ ID NO: 342356 - RNA, 23 nt, Human
uggcggccuccucagccccggcc

SEQ ID NO: 342357 - RNA, 21 nt, Human
uggcuccugcugcugugaucg

SEQ ID NO: 342358 - RNA, 24 nt, Human
uucgcgccguggcccgccgccucc

SEQ ID NO: 342359 - RNA, 21 nt, Human
uuuuuuuuuuuuuuuuugagg

SEQ ID NO: 342360 - RNA, 22 nt, Human
aacacacacauagacacacaca

SEQ ID NO: 342361 - RNA, 22 nt, Human
aauccagccaucccagggucag

SEQ ID NO: 342362 - RNA, 23 nt, Human
acccaccaccguuaauaccaaca

SEQ ID NO: 342363 - RNA, 19 nt, Human
accucuagccccaggggac

SEQ ID NO: 342364 - RNA, 19 nt, Human
agaagaaagugaggcccag

SEQ ID NO: 342365 - RNA, 21 nt, Human
agaagaaagugaggcccaggg

SEQ ID NO: 342366 - RNA, 19 nt, Human
agaagggggagcaguuacu

SEQ ID NO: 342367 - RNA, 18 nt, Human
agacacuuaucccuaagc

SEQ ID NO: 342368 - RNA, 18 nt, Human
agagcaaaagagcaggug

SEQ ID NO: 342369 - RNA, 18 nt, Human
agcccaacccccagcccu

SEQ ID NO: 342370 - RNA, 18 nt, Human
agcuuuuuggagcagauu

SEQ ID NO: 342371 - RNA, 19 nt, Human
agggaucugggauuuccau

SEQ ID NO: 342372 - RNA, 24 nt, Human
aguguuguuuuuucaggucugaug

SEQ ID NO: 342373 - RNA, 24 nt, Human
aucccgcuggccuuggggaacgug

SEQ ID NO: 342374 - RNA, 18 nt, Human
augucccuucucaggcug

SEQ ID NO: 342375 - RNA, 24 nt, Human
caaaacccaccaccguuaauacca

SEQ ID NO: 342376 - RNA, 23 nt, Human
caacauaggagcugagcuuuuaa

SEQ ID NO: 342377 - RNA, 24 nt, Human
caacccccagcccuggucuggccu

SEQ ID NO: 342378 - RNA, 22 nt, Human
cacacacauagacacacacaca

SEQ ID NO: 342379 - RNA, 23 nt, Human
cacacauagacacacacacaccu

SEQ ID NO: 342380 - RNA, 20 nt, Human
caccucuagccccaggggac

SEQ ID NO: 342381 - RNA, 18 nt, Human
caggaccagggaucuggg

SEQ ID NO: 342382 - RNA, 20 nt, Human
caggaccagggaucugggau

SEQ ID NO: 342383 - RNA, 22 nt, Human
cauagacacacacacaccucuu

SEQ ID NO: 342384 - RNA, 20 nt, Human
cauaggccacauugggaagg

SEQ ID NO: 342385 - RNA, 21 nt, Human
cauccagcauuuauuaagcac

SEQ ID NO: 342386 - RNA, 24 nt, Human
cccaacccccagcccuggucuggc

SEQ ID NO: 342387 - RNA, 18 nt, Human
cccaugaacauccccaag

SEQ ID NO: 342388 - RNA, 21 nt, Human
cccauucauuccuccauuccu

SEQ ID NO: 342389 - RNA, 18 nt, Human
ccccaaggaagguaggcc

SEQ ID NO: 342390 - RNA, 20 nt, Human
ccccaagguugggugaaacc

SEQ ID NO: 342391 - RNA, 19 nt, Human
ccccaucaucugaaugccc

SEQ ID NO: 342392 - RNA, 21 nt, Human
cccccagcccuggucuggccu

SEQ ID NO: 342393 - RNA, 19 nt, Human
cccccucccccaguguugu

SEQ ID NO: 342394 - RNA, 24 nt, Human
cccguggcugcucccacccaagaa

SEQ ID NO: 342395 - RNA, 21 nt, Human
cgggugagcauggcuucuaga

SEQ ID NO: 342396 - RNA, 18 nt, Human
cuacagcccaacccccag

SEQ ID NO: 342397 - RNA, 24 nt, Human
cuaggggugagaccccaggcccaa

SEQ ID NO: 342398 - RNA, 22 nt, Human
cucauugcucaauccagccauc

SEQ ID NO: 342399 - RNA, 21 nt, Human
cuccuccaccucuagccccag

SEQ ID NO: 342400 - RNA, 24 nt, Human
cuccuccaccucuagccccagggg

SEQ ID NO: 342401 - RNA, 19 nt, Human
cugcgagggucugagagga

SEQ ID NO: 342402 - RNA, 18 nt, Human
cuuaaaaaaaaaaaaaaa

SEQ ID NO: 342403 - RNA, 18 nt, Human
cuuaucccuaagcuggga

SEQ ID NO: 342404 - RNA, 21 nt, Human
gagcagauucuccagaaugga

SEQ ID NO: 342405 - RNA, 22 nt, Human
gccagcuuuuuggagcagauuc

SEQ ID NO: 342406 - RNA, 18 nt, Human
gcccaugaacauccccaa

SEQ ID NO: 342407 - RNA, 21 nt, Human
gcuagagcaaaagagcaggug

SEQ ID NO: 342408 - RNA, 21 nt, Human
gcuauuuacaaagugcugaaa

SEQ ID NO: 342409 - RNA, 18 nt, Human
gcugcucccacccaagaa

SEQ ID NO: 342410 - RNA, 20 nt, Human
gcuuuuuggagcagauucuc

SEQ ID NO: 342411 - RNA, 22 nt, Human
ggaaacuggaaacuggggccca

SEQ ID NO: 342412 - RNA, 22 nt, Human
ggagaagaaagugaggcccagg

SEQ ID NO: 342413 - RNA, 20 nt, Human
ggcuguggcccuuguggcug

SEQ ID NO: 342414 - RNA, 24 nt, Human
uacagcccaacccccagcccuggu

SEQ ID NO: 342415 - RNA, 27 nt, Human
uagagugugaaagcaacaaaacccacc

SEQ ID NO: 342416 - RNA, 18 nt, Human
uaggagaagaaagugagg

SEQ ID NO: 342417 - RNA, 21 nt, Human
uaucauuagccaaguaugagu

SEQ ID NO: 342418 - RNA, 24 nt, Human
uccagaauggagaauggacuagca

SEQ ID NO: 342419 - RNA, 21 nt, Human
ucccauucauuccuccauucc

SEQ ID NO: 342420 - RNA, 26 nt, Human
ucccauucauuccuccauuccuuccu

SEQ ID NO: 342421 - RNA, 24 nt, Human
ucccauucccaggacugccuccuc

SEQ ID NO: 342422 - RNA, 18 nt, Human
ugaaaccccaucaucuga

SEQ ID NO: 342423 - RNA, 21 nt, Human
ugaaagaugaguugggaggag

SEQ ID NO: 342424 - RNA, 22 nt, Human
ugaaagaugaguugggaggagg

SEQ ID NO: 342425 - RNA, 19 nt, Human
ugaaagcaacaaaacccac

SEQ ID NO: 342426 - RNA, 24 nt, Human
ugaaagcaacaaaacccaccaccg

SEQ ID NO: 342427 - RNA, 20 nt, Human
ugaguugggaggaggagggg

SEQ ID NO: 342428 - RNA, 21 nt, Human
ugaguugggaggaggaggggc

SEQ ID NO: 342429 - RNA, 24 nt, Human
ugaguugggaggaggaggggcaac

SEQ ID NO: 342430 - RNA, 22 nt, Human
ugccuagcuaauuuuuaaaaac

SEQ ID NO: 342431 - RNA, 23 nt, Human
ugccuccuccaccucuagcccca

SEQ ID NO: 342432 - RNA, 22 nt, Human
ugcugaaacacacacauagaca

SEQ ID NO: 342433 - RNA, 20 nt, Human
ugcugcugcgagggucugag

SEQ ID NO: 342434 - RNA, 22 nt, Human
uggcaagggaaacuggaaacug

SEQ ID NO: 342435 - RNA, 22 nt, Human
ugggaacuuggccuucaccguc

SEQ ID NO: 342436 - RNA, 23 nt, Human
ugggaaggggaggcacgggaccu

SEQ ID NO: 342437 - RNA, 24 nt, Human
ugggaggaggaggggcacacaucc

SEQ ID NO: 342438 - RNA, 24 nt, Human
uguacagcuucuugcuauuuacaa

SEQ ID NO: 342439 - RNA, 21 nt, Human
ugugacugucccugccuacag

SEQ ID NO: 342440 - RNA, 23 nt, Human
ugugcugcuuggcucugcucauu

SEQ ID NO: 342441 - RNA, 20 nt, Human
uuaagcaccuacugugugcc

SEQ ID NO: 342442 - RNA, 20 nt, Human
uuuaauggcccaauuugccu

SEQ ID NO: 342443 - RNA, 20 nt, Human
aaguugauugucugucuccg

SEQ ID NO: 342444 - RNA, 19 nt, Human
agcgaagcucggggccgcc

SEQ ID NO: 342445 - RNA, 23 nt, Human
aggaggagcagcggcggcggcgg

SEQ ID NO: 342446 - RNA, 23 nt, Human
aggaggaggagcagcggcggcgg

SEQ ID NO: 342447 - RNA, 21 nt, Human
aggcggaggcgcggcgggaga

SEQ ID NO: 342448 - RNA, 20 nt, Human
aguagaagugcaccaaugcu

SEQ ID NO: 342449 - RNA, 24 nt, Human
aucuaguagaagugcaccaaugcu

SEQ ID NO: 342450 - RNA, 21 nt, Human
caacaaugcuuucgaucauga

SEQ ID NO: 342451 - RNA, 19 nt, Human
cagcagcagagccggggag

SEQ ID NO: 342452 - RNA, 21 nt, Human
cagcagcagcagagccgggga

SEQ ID NO: 342453 - RNA, 28 nt, Human
cagcagcagcagcagcagagccggggag

SEQ ID NO: 342454 - RNA, 18 nt, Human
cagccccggaugcugccu

SEQ ID NO: 342455 - RNA, 19 nt, Human
cagccucggccggcgggga

SEQ ID NO: 342456 - RNA, 20 nt, Human
cauccacccagccccggaug

SEQ ID NO: 342457 - RNA, 26 nt, Human
ccagcagcugcgccccugcuuccccc

SEQ ID NO: 342458 - RNA, 22 nt, Human
ccagccccggaugcugccuuug

SEQ ID NO: 342459 - RNA, 21 nt, Human
ccagccucggccggcgggggc

SEQ ID NO: 342460 - RNA, 19 nt, Human
ccccugcuucccccucaca

SEQ ID NO: 342461 - RNA, 20 nt, Human
cccgcagcccagccucggcc

SEQ ID NO: 342462 - RNA, 22 nt, Human
ccuccuacucagcauggugagc

SEQ ID NO: 342463 - RNA, 18 nt, Human
cgcagcccagccucggcc

SEQ ID NO: 342464 - RNA, 19 nt, Human
cgcucucuggcucucaccu

SEQ ID NO: 342465 - RNA, 19 nt, Human
cggccgccucccgcagccc

SEQ ID NO: 342466 - RNA, 30 nt, Human
cggcggcggcagcagcagcagcagcagagg

SEQ ID NO: 342467 - RNA, 18 nt, Human
cggcggcggcaggaggag

SEQ ID NO: 342468 - RNA, 23 nt, Human
gagccggggagagcgagaaccca

SEQ ID NO: 342469 - RNA, 25 nt, Human
gagccggggagagcgagaacccagu

SEQ ID NO: 342470 - RNA, 20 nt, Human
gcagcggcggcggcggcagc

SEQ ID NO: 342471 - RNA, 19 nt, Human
gcaggaggaggagcagcgg

SEQ ID NO: 342472 - RNA, 19 nt, Human
gcaguggucaaucugugcc

SEQ ID NO: 342473 - RNA, 24 nt, Human
ggagcagcggcggcggcggcagca

SEQ ID NO: 342474 - RNA, 18 nt, Human
gggcgggcaggcggaggc

SEQ ID NO: 342475 - RNA, 18 nt, Human
ggucgcccuagcgaagcu

SEQ ID NO: 342476 - RNA, 22 nt, Human
guuguuugcauccacccagccc

SEQ ID NO: 342477 - RNA, 18 nt, Human
uagcggcggcggcaggag

SEQ ID NO: 342478 - RNA, 23 nt, Human
ucacuuggugcaggcaguauguc

SEQ ID NO: 342479 - RNA, 24 nt, Human
ucacuuggugcaggcaguaugucc

SEQ ID NO: 342480 - RNA, 19 nt, Human
ucaguuccuccuacucagc

SEQ ID NO: 342481 - RNA, 19 nt, Human
ucaguugauuguuggccac

SEQ ID NO: 342482 - RNA, 23 nt, Human
ucccccucacagcggagcccuag

SEQ ID NO: 342483 - RNA, 18 nt, Human
ucggggccgcccggccgc

SEQ ID NO: 342484 - RNA, 23 nt, Human
ucuccaacaaugcuuucgaucau

SEQ ID NO: 342485 - RNA, 22 nt, Human
ugagcaguggucaaucugugcc

SEQ ID NO: 342486 - RNA, 20 nt, Human
ugcucgcucucuggcucuca

SEQ ID NO: 342487 - RNA, 21 nt, Human
uggugagcaguggucaaucug

SEQ ID NO: 342488 - RNA, 22 nt, Human
ugguucagauuauuauccugaa

SEQ ID NO: 342489 - RNA, 22 nt, Human
uuucaugguuguuugcauccac

SEQ ID NO: 342490 - RNA, 21 nt, Human
aaucaucuauuugcugacacc

SEQ ID NO: 342491 - RNA, 23 nt, Human
ccgugcagcuuucggcuuucucc

SEQ ID NO: 342492 - RNA, 19 nt, Human
gcagcuuucggcuuucucc

SEQ ID NO: 342493 - RNA, 18 nt, Human
guaacgcugguugcugug

SEQ ID NO: 342494 - RNA, 24 nt, Human
uaaaaacacgccaaucaaguucca

SEQ ID NO: 342495 - RNA, 24 nt, Human
uaaaaucaucuauuugcugacacc

SEQ ID NO: 342496 - RNA, 23 nt, Human
ucuccugacuguagcaagaauug

SEQ ID NO: 342497 - RNA, 21 nt, Human
ucuccugagcucuguaaaaac

SEQ ID NO: 342498 - RNA, 26 nt, Human
ucuuucuuuuuuuuuccccuucccuc

SEQ ID NO: 342499 - RNA, 24 nt, Human
uuauuuuucccuaccaccugucuu

SEQ ID NO: 342500 - RNA, 23 nt, Human
uuucuuucuuuuuuuuuccccuu

SEQ ID NO: 342501 - RNA, 22 nt, Human
aaagaggaaaaaagcacguuug

SEQ ID NO: 342502 - RNA, 23 nt, Human
augggaggguucuucaccuucuc

SEQ ID NO: 342503 - RNA, 23 nt, Human
augguccccuuccucuggcuguc

SEQ ID NO: 342504 - RNA, 19 nt, Human
caaagaagcuggggugaua

SEQ ID NO: 342505 - RNA, 20 nt, Human
ccccuuccucuggcuguccc

SEQ ID NO: 342506 - RNA, 18 nt, Human
gcaauagaaaaggcagca

SEQ ID NO: 342507 - RNA, 22 nt, Human
gcgggcgugaaugggaggguuc

SEQ ID NO: 342508 - RNA, 23 nt, Human
ggcgggcgugaaugggaggguuc

SEQ ID NO: 342509 - RNA, 18 nt, Human
ggcuggcugggcuggggg

SEQ ID NO: 342510 - RNA, 19 nt, Human
uaccccaugguccccuucc

SEQ ID NO: 342511 - RNA, 20 nt, Human
uacugggggacaaagaagcu

SEQ ID NO: 342512 - RNA, 21 nt, Human
uagaaaggugguguggguuag

SEQ ID NO: 342513 - RNA, 24 nt, Human
uauggcuuccugaaggcaucagug

SEQ ID NO: 342514 - RNA, 19 nt, Human
uccucuggcuguccccugg

SEQ ID NO: 342515 - RNA, 21 nt, Human
uccucuggcuguccccuggug

SEQ ID NO: 342516 - RNA, 18 nt, Human
uggcuggcugggcugggg

SEQ ID NO: 342517 - RNA, 23 nt, Human
uggcuggcugggcuggggguacu

SEQ ID NO: 342518 - RNA, 21 nt, Human
uggcugggcuggggguacugg

SEQ ID NO: 342519 - RNA, 24 nt, Human
uggcugggcuggggguacuggggg

SEQ ID NO: 342520 - RNA, 27 nt, Human
uggcugggcuggggguacugggggaca

SEQ ID NO: 342521 - RNA, 23 nt, Human
ugggaggguucuucaccuucucc

SEQ ID NO: 342522 - RNA, 18 nt, Human
ugggggacaaagaagcug

SEQ ID NO: 342523 - RNA, 18 nt, Human
ugggggcguguuuugccc

SEQ ID NO: 342524 - RNA, 21 nt, Human
uggggugauagaccaggacac

SEQ ID NO: 342525 - RNA, 19 nt, Human
uggguuagagggaaagggg

SEQ ID NO: 342526 - RNA, 21 nt, Human
uggguuagagggaaagggguu

SEQ ID NO: 342527 - RNA, 19 nt, Human
uugcagggcaauagaaaaa

SEQ ID NO: 342528 - RNA, 19 nt, Human
accacagucaucucaagca

SEQ ID NO: 342529 - RNA, 19 nt, Human
aggaaaugauugagaaaau

SEQ ID NO: 342530 - RNA, 18 nt, Human
aggcccagagauucuaac

SEQ ID NO: 342531 - RNA, 22 nt, Human
caacuugagaacagggugacac

SEQ ID NO: 342532 - RNA, 22 nt, Human
caagaggcagccugcuguggcg

SEQ ID NO: 342533 - RNA, 22 nt, Human
cacagaguccuuggaaaaagaa

SEQ ID NO: 342534 - RNA, 22 nt, Human
cagccggccccuucccuaggau

SEQ ID NO: 342535 - RNA, 19 nt, Human
cccccaacuugagaacagg

SEQ ID NO: 342536 - RNA, 19 nt, Human
ccuccuuggggcuaccugg

SEQ ID NO: 342537 - RNA, 20 nt, Human
ccugcuguggcgcaaaaguu

SEQ ID NO: 342538 - RNA, 20 nt, Human
ccuggguucaaguucuucuc

SEQ ID NO: 342539 - RNA, 18 nt, Human
cuccuuggggcuaccugg

SEQ ID NO: 342540 - RNA, 22 nt, Human
cuuccacuugcaggcugugagg

SEQ ID NO: 342541 - RNA, 22 nt, Human
gacaccugagcucacucgggcu

SEQ ID NO: 342542 - RNA, 23 nt, Human
gaccacagucaucucaagcagcc

SEQ ID NO: 342543 - RNA, 18 nt, Human
gagucuuugaaauacaac

SEQ ID NO: 342544 - RNA, 21 nt, Human
gccaggucggcagcuccuccu

SEQ ID NO: 342545 - RNA, 22 nt, Human
uaggauaggaagucagggccaa

SEQ ID NO: 342546 - RNA, 21 nt, Human
uauaacuauccccaguucuuc

SEQ ID NO: 342547 - RNA, 21 nt, Human
ucuaaggggggaccacaguca

SEQ ID NO: 342548 - RNA, 24 nt, Human
ucucaagcagcccuuuccuagccu

SEQ ID NO: 342549 - RNA, 23 nt, Human
ucucucuuuuaucuucuuuuauu

SEQ ID NO: 342550 - RNA, 20 nt, Human
ugaaauacaaccuuacacaa

SEQ ID NO: 342551 - RNA, 23 nt, Human
ugaaauacaaccuuacacaaaaa

SEQ ID NO: 342552 - RNA, 24 nt, Human
ugagaaaaugaauucgagucuuug

SEQ ID NO: 342553 - RNA, 19 nt, Human
ugagaacagggugacaccu

SEQ ID NO: 342554 - RNA, 20 nt, Human
ugagaacagggugacaccug

SEQ ID NO: 342555 - RNA, 24 nt, Human
ugagcucacucgggcuuagggagu

SEQ ID NO: 342556 - RNA, 18 nt, Human
ugaggagaggcccagaga

SEQ ID NO: 342557 - RNA, 20 nt, Human
ugaggagaggcccagagauu

SEQ ID NO: 342558 - RNA, 18 nt, Human
ugccaggucggcagcucc

SEQ ID NO: 342559 - RNA, 19 nt, Human
ugccuauggaagacacaga

SEQ ID NO: 342560 - RNA, 18 nt, Human
uggggcuaccugguaccu

SEQ ID NO: 342561 - RNA, 20 nt, Human
uguuacaaaggaaaugauug

SEQ ID NO: 342562 - RNA, 24 nt, Human
uuggguccaggacaguugaggaga

SEQ ID NO: 342563 - RNA, 24 nt, Human
uuuuuccucucucuuuuaucuucu

SEQ ID NO: 342564 - RNA, 27 nt, Human
uuuuuccucucucuuuuaucuucuuuu

SEQ ID NO: 342565 - RNA, 21 nt, Human
aaacaaacaaaaauaaaccca

SEQ ID NO: 342566 - RNA, 18 nt, Human
aaacaaguguacaguucc

SEQ ID NO: 342567 - RNA, 27 nt, Human
acaaaaauaaacccaaucauuaaacca

SEQ ID NO: 342568 - RNA, 22 nt, Human
acaaacaaacaaaaauaaaccc

SEQ ID NO: 342569 - RNA, 18 nt, Human
acaaagcacccucaggug

SEQ ID NO: 342570 - RNA, 20 nt, Human
acaauauauuacacaaagca

SEQ ID NO: 342571 - RNA, 23 nt, Human
acacuuaauuugaaaaaggaagc

SEQ ID NO: 342572 - RNA, 25 nt, Human
acuccauaucccuuucccuagcccu

SEQ ID NO: 342573 - RNA, 21 nt, Human
cacccucaggugcacauucaa

SEQ ID NO: 342574 - RNA, 19 nt, Human
cccauguugcaguguugga

SEQ ID NO: 342575 - RNA, 20 nt, Human
cccuuucccuagcccuccca

SEQ ID NO: 342576 - RNA, 18 nt, Human
ccuagcccucccacccug

SEQ ID NO: 342577 - RNA, 20 nt, Human
gcaccaaacaaguguacagu

SEQ ID NO: 342578 - RNA, 23 nt, Human
gcuucucagccuuuguucgaguu

SEQ ID NO: 342579 - RNA, 19 nt, Human
uaaaccaacuggagagcua

SEQ ID NO: 342580 - RNA, 19 nt, Human
ucaugcacacuuaauuuga

SEQ ID NO: 342581 - RNA, 18 nt, Human
ucccuagcccucccaccc

SEQ ID NO: 342582 - RNA, 23 nt, Human
ucccuagcccucccacccuggga

SEQ ID NO: 342583 - RNA, 22 nt, Human
ugauguauuaauuagcaccaaa

SEQ ID NO: 342584 - RNA, 19 nt, Human
ugcaguguuggagccaguc

SEQ ID NO: 342585 - RNA, 22 nt, Human
uggcugcuucucagccuuuguu

SEQ ID NO: 342586 - RNA, 22 nt, Human
uucccuagcccucccacccugg

SEQ ID NO: 342587 - RNA, 19 nt, Human
uuucccuagcccucccacc

SEQ ID NO: 342588 - RNA, 20 nt, Human
aaaaagacaaaaagacuuca

SEQ ID NO: 342589 - RNA, 22 nt, Human
aaacauuaauaaagauuucuua

SEQ ID NO: 342590 - RNA, 19 nt, Human
aaagugucauuuacagaaa

SEQ ID NO: 342591 - RNA, 20 nt, Human
aucaagacuaugugugaaaa

SEQ ID NO: 342592 - RNA, 19 nt, Human
caagaugugcacaauuagc

SEQ ID NO: 342593 - RNA, 28 nt, Human
cagaaacuacaaucauacaaccuucagg

SEQ ID NO: 342594 - RNA, 20 nt, Human
cagcauuaaaaagaaucaac

SEQ ID NO: 342595 - RNA, 22 nt, Human
cagcauuaaaaagaaucaacac

SEQ ID NO: 342596 - RNA, 23 nt, Human
cugggccuggucucuccuggagg

SEQ ID NO: 342597 - RNA, 22 nt, Human
cugggccugugugccugucccg

SEQ ID NO: 342598 - RNA, 22 nt, Human
gaccugacagaagcaucaguga

SEQ ID NO: 342599 - RNA, 23 nt, Human
gcaucagugaaaugucaucaaga

SEQ ID NO: 342600 - RNA, 20 nt, Human
gcugcuguggccuacacacc

SEQ ID NO: 342601 - RNA, 21 nt, Human
gggccuggucucuccuggagg

SEQ ID NO: 342602 - RNA, 23 nt, Human
uacagaaacuacaaucauacaaa

SEQ ID NO: 342603 - RNA, 23 nt, Human
uccuggaggucuggguguugcag

SEQ ID NO: 342604 - RNA, 20 nt, Human
ucucuccuggaggucugggu

SEQ ID NO: 342605 - RNA, 18 nt, Human
ugaaaaaucuaaacauua

SEQ ID NO: 342606 - RNA, 25 nt, Human
ugaaaaaucuaaacauuaauaaaga

SEQ ID NO: 342607 - RNA, 24 nt, Human
ugaaaauuagacaagaugugcaca

SEQ ID NO: 342608 - RNA, 19 nt, Human
ugcuuucccuacccggcuc

SEQ ID NO: 342609 - RNA, 21 nt, Human
ugggaccugacagaagcauca

SEQ ID NO: 342610 - RNA, 18 nt, Human
ugugugaaaauuagacaa

SEQ ID NO: 342611 - RNA, 18 nt, Human
ugugugccugucccgggc

SEQ ID NO: 342612 - RNA, 21 nt, Human
uguugcagccuuucaggacug

SEQ ID NO: 342613 - RNA, 27 nt, Human
aaaaaaaucuaaacaucaacaaagaug

SEQ ID NO: 342614 - RNA, 27 nt, Human
aaaaaaaucuaaacaucaacaaagaug

SEQ ID NO: 342615 - RNA, 22 nt, Human
aaagaacauuuucuuacacauc

SEQ ID NO: 342616 - RNA, 21 nt, Human
agacuggaaucuuuuaauaca

SEQ ID NO: 342617 - RNA, 18 nt, Human
agagaagacuggaaucuu

SEQ ID NO: 342618 - RNA, 24 nt, Human
caaagaacauuuucuuacacauca

SEQ ID NO: 342619 - RNA, 24 nt, Human
caaagaacauuuucuuacacauca

SEQ ID NO: 342620 - RNA, 21 nt, Human
caaauuagcaacaaauucuga

SEQ ID NO: 342621 - RNA, 19 nt, Human
cgagaugugcacaauuagc

SEQ ID NO: 342622 - RNA, 19 nt, Human
cgagaugugcacaauuagc

SEQ ID NO: 342623 - RNA, 20 nt, Human
gaccuaauaucuaacaaaga

SEQ ID NO: 342624 - RNA, 20 nt, Human
gaccuaauaucuaacaaaga

SEQ ID NO: 342625 - RNA, 22 nt, Human
gaccugauagaagcaucaguga

SEQ ID NO: 342626 - RNA, 22 nt, Human
gaccugauagaagcaucaguga

SEQ ID NO: 342627 - RNA, 21 nt, Human
ggaccuaauaucuaacaaaga

SEQ ID NO: 342628 - RNA, 21 nt, Human
ggaccuaauaucuaacaaaga

SEQ ID NO: 342629 - RNA, 21 nt, Human
uaaaaaaaucuaaacaucaac

SEQ ID NO: 342630 - RNA, 21 nt, Human
uaaaaaaaucuaaacaucaac

SEQ ID NO: 342631 - RNA, 24 nt, Human
ucacacaaagaacauuuucuuaca

SEQ ID NO: 342632 - RNA, 24 nt, Human
ucacacaaagaacauuuucuuaca

SEQ ID NO: 342633 - RNA, 20 nt, Human
ucugcggcuucacuuugucu

SEQ ID NO: 342634 - RNA, 22 nt, Human
ugaugggaccuaauaucuaaca

SEQ ID NO: 342635 - RNA, 22 nt, Human
ugaugggaccuaauaucuaaca

SEQ ID NO: 342636 - RNA, 21 nt, Human
ugggaccugauagaagcauca

SEQ ID NO: 342637 - RNA, 21 nt, Human
ugggaccugauagaagcauca

SEQ ID NO: 342638 - RNA, 23 nt, Human
ugugcacaauuagcuucaucuca

SEQ ID NO: 342639 - RNA, 21 nt, Human
uucugaaggacugcugucugc

SEQ ID NO: 342640 - RNA, 20 nt, Human
aaaagcguguacccuuuucc

SEQ ID NO: 342641 - RNA, 19 nt, Human
aaagcguguacccuuuucc

SEQ ID NO: 342642 - RNA, 19 nt, Human
aacccacucuucaccccca

SEQ ID NO: 342643 - RNA, 19 nt, Human
aacccacucuucaccccca

SEQ ID NO: 342644 - RNA, 22 nt, Human
aagacugccuccacccuuucag

SEQ ID NO: 342645 - RNA, 21 nt, Human
aagcgaggucuuccuccccuc

SEQ ID NO: 342646 - RNA, 21 nt, Human
aaggaagagggaagaggcagc

SEQ ID NO: 342647 - RNA, 20 nt, Human
aaguugggguucccacgacc

SEQ ID NO: 342648 - RNA, 20 nt, Human
acaccacgugggguaagagc

SEQ ID NO: 342649 - RNA, 19 nt, Human
accuagacagaaccgcuuc

SEQ ID NO: 342650 - RNA, 21 nt, Human
agaaacaguaccuagacagaa

SEQ ID NO: 342651 - RNA, 22 nt, Human
agaaacaguaccuagacagaac

SEQ ID NO: 342652 - RNA, 21 nt, Human
agaaagaguggagggguuaac

SEQ ID NO: 342653 - RNA, 20 nt, Human
agacaccagucugaagucug

SEQ ID NO: 342654 - RNA, 26 nt, Human
agaggaaauaggguaagguauggggg

SEQ ID NO: 342655 - RNA, 19 nt, Human
agcugaaugaugcagugga

SEQ ID NO: 342656 - RNA, 25 nt, Human
agggaagaggcagcuguggagagga

SEQ ID NO: 342657 - RNA, 26 nt, Human
agggaagaggcagcuguggagaggau

SEQ ID NO: 342658 - RNA, 18 nt, Human
agggaugggacucaggaa

SEQ ID NO: 342659 - RNA, 23 nt, Human
caaagcgaggucuuccuccccuc

SEQ ID NO: 342660 - RNA, 31 nt, Human
caacacagaagaagacuucugugaccaaugg

SEQ ID NO: 342661 - RNA, 22 nt, Human
caacccacucuucacccccaaa

SEQ ID NO: 342662 - RNA, 23 nt, Human
caagucagaagggaaggcauuua

SEQ ID NO: 342663 - RNA, 19 nt, Human
caaugccagaaacaguacc

SEQ ID NO: 342664 - RNA, 21 nt, Human
cacaacuacagggcaccaccc

SEQ ID NO: 342665 - RNA, 25 nt, Human
cacaacuacagggcaccacccucuc

SEQ ID NO: 342666 - RNA, 24 nt, Human
caccucacaacccacucuucaccc

SEQ ID NO: 342667 - RNA, 25 nt, Human
caccucacaacccacucuucacccc

SEQ ID NO: 342668 - RNA, 23 nt, Human
cacgacccccucuuuagguucaa

SEQ ID NO: 342669 - RNA, 23 nt, Human
cacuacaacuaucaacacagaag

SEQ ID NO: 342670 - RNA, 19 nt, Human
cagaaaccauguaugaaaa

SEQ ID NO: 342671 - RNA, 19 nt, Human
cagaggaaauaggguaagg

SEQ ID NO: 342672 - RNA, 19 nt, Human
cagaucccauagauugggg

SEQ ID NO: 342673 - RNA, 18 nt, Human
caguaccuagacagaacc

SEQ ID NO: 342674 - RNA, 18 nt, Human
ccaagucagaagggaagg

SEQ ID NO: 342675 - RNA, 20 nt, Human
ccaagucagaagggaaggca

SEQ ID NO: 342676 - RNA, 18 nt, Human
ccacucuccaaagcgagg

SEQ ID NO: 342677 - RNA, 20 nt, Human
cccacucuccaaagcgaggu

SEQ ID NO: 342678 - RNA, 20 nt, Human
cccacucuccaaagcgaggu

SEQ ID NO: 342679 - RNA, 21 nt, Human
cccacucuccaaagcgagguc

SEQ ID NO: 342680 - RNA, 20 nt, Human
ccccaagacugccuccaccc

SEQ ID NO: 342681 - RNA, 24 nt, Human
cccccaaaaucacgcagggauggg

SEQ ID NO: 342682 - RNA, 21 nt, Human
cccugggcuccacccuccagg

SEQ ID NO: 342683 - RNA, 24 nt, Human
cucacaacccacucuucaccccca

SEQ ID NO: 342684 - RNA, 23 nt, Human
cucacaacccacucuucacccuu

SEQ ID NO: 342685 - RNA, 21 nt, Human
cucacacacuaaccaguggac

SEQ ID NO: 342686 - RNA, 18 nt, Human
cucaggaaagggaagcau

SEQ ID NO: 342687 - RNA, 21 nt, Human
cuccaggaccuccaugugucc

SEQ ID NO: 342688 - RNA, 18 nt, Human
cuccauucaccguucucc

SEQ ID NO: 342689 - RNA, 18 nt, Human
cucugcugucacacuaca

SEQ ID NO: 342690 - RNA, 19 nt, Human
cuggaaggcaaugccagaa

SEQ ID NO: 342691 - RNA, 19 nt, Human
cuggaaggcaaugccagaa

SEQ ID NO: 342692 - RNA, 19 nt, Human
cuggaguggccacagaccu

SEQ ID NO: 342693 - RNA, 19 nt, Human
cugugaccaaugguaggga

SEQ ID NO: 342694 - RNA, 24 nt, Human
cuucccacaacuacagggcaccac

SEQ ID NO: 342695 - RNA, 19 nt, Human
gaaaggugagggaagagua

SEQ ID NO: 342696 - RNA, 19 nt, Human
gaaggaagagggaagaggc

SEQ ID NO: 342697 - RNA, 22 nt, Human
gacucaauuccaacacuacugg

SEQ ID NO: 342698 - RNA, 22 nt, Human
gacuucugugaccaaugguagg

SEQ ID NO: 342699 - RNA, 25 nt, Human
gcaaugccagaaacaguaccuagac

SEQ ID NO: 342700 - RNA, 20 nt, Human
ggagaggaugagguugaggg

SEQ ID NO: 342701 - RNA, 22 nt, Human
gggaugggacucaggaaaggga

SEQ ID NO: 342702 - RNA, 19 nt, Human
ggggaaggucuuaagaugc

SEQ ID NO: 342703 - RNA, 18 nt, Human
ggguguguucgggaaaac

SEQ ID NO: 342704 - RNA, 19 nt, Human
uaaaauggagaaauugggu

SEQ ID NO: 342705 - RNA, 28 nt, Human
uaacauggggcccaccucacaacccacu

SEQ ID NO: 342706 - RNA, 21 nt, Human
uaaggaacuuaugagccagaa

SEQ ID NO: 342707 - RNA, 22 nt, Human
uaccuagacagaaccgcuucag

SEQ ID NO: 342708 - RNA, 18 nt, Human
uauagcaagggcuaagga

SEQ ID NO: 342709 - RNA, 27 nt, Human
ucacaacccacucuucacccccaaaag

SEQ ID NO: 342710 - RNA, 20 nt, Human
uccagaagcucguuucucgg

SEQ ID NO: 342711 - RNA, 22 nt, Human
uccagcuauccagaagcucguu

SEQ ID NO: 342712 - RNA, 24 nt, Human
uccauguguccagcuauccagaag

SEQ ID NO: 342713 - RNA, 24 nt, Human
ucccauagauugggggcucggucc

SEQ ID NO: 342714 - RNA, 18 nt, Human
ucccugggcuccacccuc

SEQ ID NO: 342715 - RNA, 29 nt, Human
ucucuggggaaggucuuaagaugcaacgu

SEQ ID NO: 342716 - RNA, 25 nt, Human
ugaccuacaaagugaccuaaaaucc

SEQ ID NO: 342717 - RNA, 24 nt, Human
ugaccuacaaagugaccuggaucu

SEQ ID NO: 342718 - RNA, 19 nt, Human
ugagagagauggaaagcug

SEQ ID NO: 342719 - RNA, 20 nt, Human
ugagggaagaguacaguccu

SEQ ID NO: 342720 - RNA, 19 nt, Human
uggaaggcaaugccagaaa

SEQ ID NO: 342721 - RNA, 21 nt, Human
uggagauagugucagauccca

SEQ ID NO: 342722 - RNA, 19 nt, Human
uggagggguuaacaugggg

SEQ ID NO: 342723 - RNA, 23 nt, Human
ugggguaagagcccugcucccau

SEQ ID NO: 342724 - RNA, 18 nt, Human
uggugucugagagagaug

SEQ ID NO: 342725 - RNA, 19 nt, Human
uguccagcuauccagaagc

SEQ ID NO: 342726 - RNA, 23 nt, Human
uguggaaauggauaguaaaaugg

SEQ ID NO: 342727 - RNA, 25 nt, Human
uucuucccuagaacuccuuuucaaa

SEQ ID NO: 342728 - RNA, 23 nt, Human
uugcuggaguggccacagaccuu

SEQ ID NO: 342729 - RNA, 22 nt, Human
uuuauggaagcuucaugaugcc

SEQ ID NO: 342730 - RNA, 23 nt, Human
uuucccagaaaagcguguacccu

SEQ ID NO: 342731 - RNA, 23 nt, Human
uuucccagaaaagcguguacccu

SEQ ID NO: 342732 - RNA, 18 nt, Human
aggaaagcugaaggggua

SEQ ID NO: 342733 - RNA, 19 nt, Human
cuguagcuccugugagaac

SEQ ID NO: 342734 - RNA, 19 nt, Human
gagagaugggaucuuggcu

SEQ ID NO: 342735 - RNA, 24 nt, Human
gguuguucugggguucaggggcag

SEQ ID NO: 342736 - RNA, 23 nt, Human
gugaugaugaggagugcugauac

SEQ ID NO: 342737 - RNA, 18 nt, Human
ugagaacugauccagcug

SEQ ID NO: 342738 - RNA, 20 nt, Human
uggagagaugggaucuuggc

SEQ ID NO: 342739 - RNA, 19 nt, Human
acauggagggaugggaucu

SEQ ID NO: 342740 - RNA, 19 nt, Human
cagcugguuguucuggggc

SEQ ID NO: 342741 - RNA, 19 nt, Human
caggaaagcugaaggggua

SEQ ID NO: 342742 - RNA, 22 nt, Human
cagucucugagcuguggcuccu

SEQ ID NO: 342743 - RNA, 20 nt, Human
gagugaugaugaggacugcu

SEQ ID NO: 342744 - RNA, 21 nt, Human
gaugaugaggacugcugauac

SEQ ID NO: 342745 - RNA, 23 nt, Human
gugaugaugaggacugcugauac

SEQ ID NO: 342746 - RNA, 24 nt, Human
ucacaaggacuucagcucaggaaa

SEQ ID NO: 342747 - RNA, 20 nt, Human
ucucugagcuguggcuccug

SEQ ID NO: 342748 - RNA, 18 nt, Human
ugaauuugcaaagcaguu

SEQ ID NO: 342749 - RNA, 18 nt, Human
ugagaacugauccagcug

SEQ ID NO: 342750 - RNA, 23 nt, Human
uuucccagucucugagcuguggc

SEQ ID NO: 342751 - RNA, 20 nt, Human
aaaaaaagcagacacuuuca

SEQ ID NO: 342752 - RNA, 26 nt, Human
aaaaaaagcagacacuuucaaaacau

SEQ ID NO: 342753 - RNA, 23 nt, Human
aaguggccagcuacacuggauuu

SEQ ID NO: 342754 - RNA, 26 nt, Human
acaaggaaaacauaaaaaaucuuuca

SEQ ID NO: 342755 - RNA, 18 nt, Human
acccgcuucuuccucccu

SEQ ID NO: 342756 - RNA, 21 nt, Human
acccgcuucuuccucccuagu

SEQ ID NO: 342757 - RNA, 21 nt, Human
agaaaacgcaaagauguucuu

SEQ ID NO: 342758 - RNA, 19 nt, Human
agacagagccuggggcagc

SEQ ID NO: 342759 - RNA, 18 nt, Human
agagcuaagcugaccagu

SEQ ID NO: 342760 - RNA, 21 nt, Human
agagcucacauuuugcuggca

SEQ ID NO: 342761 - RNA, 21 nt, Human
aggauaaaaaaagcagacacc

SEQ ID NO: 342762 - RNA, 18 nt, Human
aguagaaaaagcccugga

SEQ ID NO: 342763 - RNA, 20 nt, Human
auaaaaggaagcuuauuaca

SEQ ID NO: 342764 - RNA, 24 nt, Human
auacauuuccaaauuuuuaaugcc

SEQ ID NO: 342765 - RNA, 21 nt, Human
aucauuuucuuaaucuuauua

SEQ ID NO: 342766 - RNA, 21 nt, Human
caaacauaagaaugccaaaaa

SEQ ID NO: 342767 - RNA, 21 nt, Human
cagagccuggggcagcucaaa

SEQ ID NO: 342768 - RNA, 22 nt, Human
cagagccuggggcagcucaaau

SEQ ID NO: 342769 - RNA, 18 nt, Human
cagcucaaaugcauuacu

SEQ ID NO: 342770 - RNA, 26 nt, Human
cauaagaaugccaaaaaauacagagc

SEQ ID NO: 342771 - RNA, 19 nt, Human
gaggagacagagccugggg

SEQ ID NO: 342772 - RNA, 25 nt, Human
gcuacacuggauuuuugucucaauu

SEQ ID NO: 342773 - RNA, 19 nt, Human
ggcaggacaauggaaagaa

SEQ ID NO: 342774 - RNA, 23 nt, Human
uaaaaaaagcagacacuuucaaa

SEQ ID NO: 342775 - RNA, 21 nt, Human
uaaaaggaagcuuauuacaga

SEQ ID NO: 342776 - RNA, 19 nt, Human
uacagaaaagcccagccuc

SEQ ID NO: 342777 - RNA, 22 nt, Human
uacagaaaagcccagccucauu

SEQ ID NO: 342778 - RNA, 22 nt, Human
uacuagggugauucaaaguuuc

SEQ ID NO: 342779 - RNA, 23 nt, Human
uauguagugacaucauuauaagu

SEQ ID NO: 342780 - RNA, 21 nt, Human
uccaaauuuuuaaugccuccc

SEQ ID NO: 342781 - RNA, 21 nt, Human
ucccuuaacuuugagcuucua

SEQ ID NO: 342782 - RNA, 25 nt, Human
ucggccucagaacaaguccgcagaa

SEQ ID NO: 342783 - RNA, 19 nt, Human
ucuucagcaaaucccuuaa

SEQ ID NO: 342784 - RNA, 24 nt, Human
ugagagagcuaagcugaccaguag

SEQ ID NO: 342785 - RNA, 25 nt, Human
ugagcugaggagacagagccugggg

SEQ ID NO: 342786 - RNA, 18 nt, Human
ugaggagacagagccugg

SEQ ID NO: 342787 - RNA, 22 nt, Human
ugauucaaaguuucaggaaaaa

SEQ ID NO: 342788 - RNA, 20 nt, Human
ugccaaaaaauacagagcuc

SEQ ID NO: 342789 - RNA, 25 nt, Human
ugccaaaaaauacagagcucacauu

SEQ ID NO: 342790 - RNA, 23 nt, Human
ugccucggccucagaacaagucc

SEQ ID NO: 342791 - RNA, 18 nt, Human
uggauuuuugucucaauu

SEQ ID NO: 342792 - RNA, 22 nt, Human
uuaauagaaugaguuauauaga

SEQ ID NO: 342793 - RNA, 18 nt, Human
uucaggaaaaagaaaauu

SEQ ID NO: 342794 - RNA, 22 nt, Human
uuucucacccgcuucuuccucc

SEQ ID NO: 342795 - RNA, 21 nt, Human
uuuuuuuuuuuucagguaccu

SEQ ID NO: 342796 - RNA, 19 nt, Human
uuuuuuuuuuuuuuucagg

SEQ ID NO: 342797 - RNA, 18 nt, Human
aaaguacagaacuacaaa

SEQ ID NO: 342798 - RNA, 20 nt, Human
aagaaaaucaacaaaagaaa

SEQ ID NO: 342799 - RNA, 22 nt, Human
aagaaacaacaugacugaaaac

SEQ ID NO: 342800 - RNA, 23 nt, Human
aaggggaagaaauauucugagaa

SEQ ID NO: 342801 - RNA, 25 nt, Human
agaaaaucaacaaaagaaaagaaaa

SEQ ID NO: 342802 - RNA, 22 nt, Human
agcaggaagugguuuuauugcc

SEQ ID NO: 342803 - RNA, 20 nt, Human
aggcacucgaauucuccaaa

SEQ ID NO: 342804 - RNA, 19 nt, Human
aguacagaacuacaaagca

SEQ ID NO: 342805 - RNA, 22 nt, Human
caaagcucagaagcuguugucu

SEQ ID NO: 342806 - RNA, 18 nt, Human
caacaaaagaaaagaaaa

SEQ ID NO: 342807 - RNA, 25 nt, Human
caccuuucuucuuucuucuacggga

SEQ ID NO: 342808 - RNA, 25 nt, Human
cagaacuacaaagcagaaaauaauc

SEQ ID NO: 342809 - RNA, 19 nt, Human
cagcaggaagugguuuuau

SEQ ID NO: 342810 - RNA, 23 nt, Human
cagggcaauaaagcuuggcaaaa

SEQ ID NO: 342811 - RNA, 26 nt, Human
cugugauuaguccaaagccggggucc

SEQ ID NO: 342812 - RNA, 21 nt, Human
gaaaagaaaacguggaugcaa

SEQ ID NO: 342813 - RNA, 23 nt, Human
gaaaaguacagaacuacaaagca

SEQ ID NO: 342814 - RNA, 28 nt, Human
gaacaagaaaaucaacaaaagaaaagaa

SEQ ID NO: 342815 - RNA, 22 nt, Human
gaaggggaagaaauauucugag

SEQ ID NO: 342816 - RNA, 20 nt, Human
gaauucuccaaacaccuuuc

SEQ ID NO: 342817 - RNA, 23 nt, Human
gcuccugcugagaacagaggcug

SEQ ID NO: 342818 - RNA, 23 nt, Human
ggaacaagaaaaucaacaaaaga

SEQ ID NO: 342819 - RNA, 19 nt, Human
ggaaggcuaaaccaacuua

SEQ ID NO: 342820 - RNA, 23 nt, Human
ggaaggggaagaaauauucugag

SEQ ID NO: 342821 - RNA, 26 nt, Human
gggaacaagaaaaucaacaaaagaaa

SEQ ID NO: 342822 - RNA, 26 nt, Human
gugguuuuauugcugugaacacaggg

SEQ ID NO: 342823 - RNA, 21 nt, Human
uaaaacaguaucauuaucaca

SEQ ID NO: 342824 - RNA, 22 nt, Human
uauucccuucucucgaaaagua

SEQ ID NO: 342825 - RNA, 20 nt, Human
uccaaacaccuuucuucuuu

SEQ ID NO: 342826 - RNA, 18 nt, Human
ucuuucuuugcugucuuc

SEQ ID NO: 342827 - RNA, 23 nt, Human
uggcaaaaguugcaggggacguc

SEQ ID NO: 342828 - RNA, 24 nt, Human
uggcagauuaacuucuugugcaga

SEQ ID NO: 342829 - RNA, 22 nt, Human
uggggcuccugcugagaacaga

SEQ ID NO: 342830 - RNA, 22 nt, Human
uucagaaugcagcaggaagugg

SEQ ID NO: 342831 - RNA, 22 nt, Human
uucuucuuucuucuacgggaac

SEQ ID NO: 342832 - RNA, 22 nt, Human
uuggcagauuaacuucuugugc

SEQ ID NO: 342833 - RNA, 22 nt, Human
uuuuucagaaugcagcaggaag

SEQ ID NO: 342834 - RNA, 22 nt, Human
uuuuuuuuuuuuuuuuuuucag

SEQ ID NO: 342835 - RNA, 28 nt, Human
aggcuauuuuccacaccaguaaguacag

SEQ ID NO: 342836 - RNA, 20 nt, Human
caagacagccgcuggcucaa

SEQ ID NO: 342837 - RNA, 21 nt, Human
cagcaagacagccgcuggcuc

SEQ ID NO: 342838 - RNA, 20 nt, Human
ccggcgcuuaacaccgcacu

SEQ ID NO: 342839 - RNA, 19 nt, Human
uaaguacaggcagcaagac

SEQ ID NO: 342840 - RNA, 19 nt, Human
ucacagaaggccacugugc

SEQ ID NO: 342841 - RNA, 23 nt, Human
ucccggcaccgggaagcauuucg

SEQ ID NO: 342842 - RNA, 18 nt, Human
uuuauaaacacaugucac

SEQ ID NO: 342843 - RNA, 25 nt, Human
uuuuuuuuuuuuuaaaagauguuca

SEQ ID NO: 342844 - RNA, 23 nt, Human
uuuuuuuuuuuuuuuuuuaaaag

SEQ ID NO: 342845 - RNA, 22 nt, Human
cgccucagccgccgccaccagc

SEQ ID NO: 342846 - RNA, 18 nt, Human
cuggguuggggaagcagg

SEQ ID NO: 342847 - RNA, 21 nt, Human
gccucagccgccgccaccagc

SEQ ID NO: 342848 - RNA, 19 nt, Human
gccucagccgccgccaccg

SEQ ID NO: 342849 - RNA, 19 nt, Human
aaaaacuggagaaaggaca

SEQ ID NO: 342850 - RNA, 20 nt, Human
aagugauuccuguuugccca

SEQ ID NO: 342851 - RNA, 20 nt, Human
cagucuauuauagagucacc

SEQ ID NO: 342852 - RNA, 19 nt, Human
caucugaguuuugcggugg

SEQ ID NO: 342853 - RNA, 22 nt, Human
ccgccgccgccgaggcugcucc

SEQ ID NO: 342854 - RNA, 18 nt, Human
ccucuuugcccacuucuu

SEQ ID NO: 342855 - RNA, 28 nt, Human
ccuuuuauucuggaacaaaaacuggaga

SEQ ID NO: 342856 - RNA, 18 nt, Human
cuccgcaccucccuggcc

SEQ ID NO: 342857 - RNA, 22 nt, Human
cugacuucugcgcugugcugca

SEQ ID NO: 342858 - RNA, 25 nt, Human
cuggaacaaaaacuggagaaaggac

SEQ ID NO: 342859 - RNA, 25 nt, Human
gaacaaaaacuggagaaaggacaau

SEQ ID NO: 342860 - RNA, 24 nt, Human
gacucacugcucuccaagauuggu

SEQ ID NO: 342861 - RNA, 22 nt, Human
ggaacaaaaacuggagaaagga

SEQ ID NO: 342862 - RNA, 22 nt, Human
uaaguaccacucaaaaagugga

SEQ ID NO: 342863 - RNA, 21 nt, Human
uagaaagcuucuucucgaucc

SEQ ID NO: 342864 - RNA, 21 nt, Human
uauuauagagucaccauuaga

SEQ ID NO: 342865 - RNA, 24 nt, Human
uauuuccaguuugucugacagagu

SEQ ID NO: 342866 - RNA, 23 nt, Human
uccucuuugcccacuucuuguug

SEQ ID NO: 342867 - RNA, 20 nt, Human
ugaguuuugcgguggugggc

SEQ ID NO: 342868 - RNA, 19 nt, Human
ugaugaacaaguggaaaau

SEQ ID NO: 342869 - RNA, 20 nt, Human
uggcuuuuaaaauauuuccu

SEQ ID NO: 342870 - RNA, 18 nt, Human
uuugcuguagucgucuca

SEQ ID NO: 342871 - RNA, 19 nt, Human
aaaaagccaacaaaaccca

SEQ ID NO: 342872 - RNA, 21 nt, Human
aaaaagccaacaaaacccaga

SEQ ID NO: 342873 - RNA, 28 nt, Human
aaacagaagguagggcaaaggggacccc

SEQ ID NO: 342874 - RNA, 19 nt, Human
aaccucguucuuccauauc

SEQ ID NO: 342875 - RNA, 23 nt, Human
aagacaauuuuucaaaaagccaa

SEQ ID NO: 342876 - RNA, 21 nt, Human
aagcauccucuuugacaaucc

SEQ ID NO: 342877 - RNA, 18 nt, Human
aagccaacaaaacccaga

SEQ ID NO: 342878 - RNA, 22 nt, Human
accgcagucuguauuucagcuc

SEQ ID NO: 342879 - RNA, 21 nt, Human
agaucaaaaugacacuggacc

SEQ ID NO: 342880 - RNA, 23 nt, Human
aggaaaaaaagaauacguucuca

SEQ ID NO: 342881 - RNA, 21 nt, Human
aggaaagacaauuuuucaaaa

SEQ ID NO: 342882 - RNA, 21 nt, Human
aggaagagugaaugaauagua

SEQ ID NO: 342883 - RNA, 23 nt, Human
aucuagguucuaacacccaggaa

SEQ ID NO: 342884 - RNA, 19 nt, Human
caaagaaagaguaugaagc

SEQ ID NO: 342885 - RNA, 20 nt, Human
caaagagaacugacuuggca

SEQ ID NO: 342886 - RNA, 19 nt, Human
cacucuggacacacacacc

SEQ ID NO: 342887 - RNA, 19 nt, Human
cagaaaguuaggacuggaa

SEQ ID NO: 342888 - RNA, 19 nt, Human
caguggaccauauacacca

SEQ ID NO: 342889 - RNA, 21 nt, Human
ccaaagagaacugacuuggca

SEQ ID NO: 342890 - RNA, 23 nt, Human
ccaacaaaacccagaaaaaggaa

SEQ ID NO: 342891 - RNA, 18 nt, Human
ccagaacacugcuguugc

SEQ ID NO: 342892 - RNA, 19 nt, Human
ccagucaguuauggaguaa

SEQ ID NO: 342893 - RNA, 20 nt, Human
ccccucuucuccuuaccuaa

SEQ ID NO: 342894 - RNA, 24 nt, Human
ccuagaaacgcccugcucaaccgg

SEQ ID NO: 342895 - RNA, 20 nt, Human
ccugccaucgccgccagccg

SEQ ID NO: 342896 - RNA, 21 nt, Human
cuaauaaauaucaagugcccc

SEQ ID NO: 342897 - RNA, 23 nt, Human
cuagaaacgcccugcucaaccgg

SEQ ID NO: 342898 - RNA, 20 nt, Human
cucacucuggacacacacac

SEQ ID NO: 342899 - RNA, 21 nt, Human
cucuugaccccucuucuccuu

SEQ ID NO: 342900 - RNA, 28 nt, Human
cugaaaccaguggaccauauacaccccu

SEQ ID NO: 342901 - RNA, 24 nt, Human
cugcugaagcuggguaagaggccc

SEQ ID NO: 342902 - RNA, 24 nt, Human
cuuccauaucuugagcaguaguua

SEQ ID NO: 342903 - RNA, 18 nt, Human
gaacauucagcuugggaa

SEQ ID NO: 342904 - RNA, 21 nt, Human
gaaugaauaguacccuaaaua

SEQ ID NO: 342905 - RNA, 18 nt, Human
gaccaggccuagaaacgc

SEQ ID NO: 342906 - RNA, 18 nt, Human
gagaauguggaacaaaag

SEQ ID NO: 342907 - RNA, 22 nt, Human
ggaaagcugaauagaacuuaaa

SEQ ID NO: 342908 - RNA, 23 nt, Human
guucaauuuuucuguccucuuuu

SEQ ID NO: 342909 - RNA, 23 nt, Human
uaaaugcagauauaauucaagaa

SEQ ID NO: 342910 - RNA, 22 nt, Human
uaacaaaguaggaaaaaaagaa

SEQ ID NO: 342911 - RNA, 20 nt, Human
uaacugguggagcugagacu

SEQ ID NO: 342912 - RNA, 19 nt, Human
uaccacaugaaaauauaaa

SEQ ID NO: 342913 - RNA, 19 nt, Human
uaucaagugccccacagga

SEQ ID NO: 342914 - RNA, 21 nt, Human
ucaguauaauuuucauaaggc

SEQ ID NO: 342915 - RNA, 24 nt, Human
ucaguauaauuuucauaaggcuuc

SEQ ID NO: 342916 - RNA, 18 nt, Human
ucccaccaaugauaagga

SEQ ID NO: 342917 - RNA, 23 nt, Human
uccugccaucgccgccagccgac

SEQ ID NO: 342918 - RNA, 27 nt, Human
uccuuacaaacagaagguagggcaaag

SEQ ID NO: 342919 - RNA, 21 nt, Human
ucuguccucuuuuccaaaaaa

SEQ ID NO: 342920 - RNA, 21 nt, Human
ucuuugacaauccaaaaacau

SEQ ID NO: 342921 - RNA, 20 nt, Human
ugaaaagcagaucaaaauga

SEQ ID NO: 342922 - RNA, 24 nt, Human
ugaaaagcagaucaaaaugacacu

SEQ ID NO: 342923 - RNA, 24 nt, Human
ugaaaauauaaaccucguucuucc

SEQ ID NO: 342924 - RNA, 22 nt, Human
ugaaccuuuggcuuauaaauuu

SEQ ID NO: 342925 - RNA, 21 nt, Human
ugaagcuggguaagaggccaa

SEQ ID NO: 342926 - RNA, 21 nt, Human
ugcaauaacaaaguaggaaaa

SEQ ID NO: 342927 - RNA, 19 nt, Human
uggaccauauacaccacua

SEQ ID NO: 342928 - RNA, 22 nt, Human
uggcagaaauuuagguugguag

SEQ ID NO: 342929 - RNA, 20 nt, Human
ugggcuuccuccaaagagaa

SEQ ID NO: 342930 - RNA, 22 nt, Human
uguacuugacggaagauuaggg

SEQ ID NO: 342931 - RNA, 24 nt, Human
uucaaaaagccaacaaaacccaga

SEQ ID NO: 342932 - RNA, 21 nt, Human
uuccuggaauuaauauuaaaa

SEQ ID NO: 342933 - RNA, 24 nt, Human
uuucaaaaagccaacaaaacccag

SEQ ID NO: 342934 - RNA, 18 nt, Human
aacuccacuacaucaagc

SEQ ID NO: 342935 - RNA, 25 nt, Human
acuagcucugcagaacuacacauac

SEQ ID NO: 342936 - RNA, 20 nt, Human
agaaacauugaaaaaaugag

SEQ ID NO: 342937 - RNA, 18 nt, Human
agaaauggcaaggaucua

SEQ ID NO: 342938 - RNA, 19 nt, Human
cagcagaggaaugacgcca

SEQ ID NO: 342939 - RNA, 19 nt, Human
uaagccagagugaacauuu

SEQ ID NO: 342940 - RNA, 24 nt, Human
uacagaaacauugaaaaaaugaga

SEQ ID NO: 342941 - RNA, 22 nt, Human
uggcuuacaaaaacuagcucug

SEQ ID NO: 342942 - RNA, 21 nt, Human
uugaaaaaaugagaaaguguc

SEQ ID NO: 342943 - RNA, 23 nt, Human
aaaaaagagaauauacuguaugc

SEQ ID NO: 342944 - RNA, 20 nt, Human
aaaagaucccgacugucuuc

SEQ ID NO: 342945 - RNA, 22 nt, Human
aacccaauugugggagcugcuu

SEQ ID NO: 342946 - RNA, 21 nt, Human
aaugguucccacaacgauuuu

SEQ ID NO: 342947 - RNA, 22 nt, Human
agaacccaauugugggagcugc

SEQ ID NO: 342948 - RNA, 19 nt, Human
agagaauauacuguaugcc

SEQ ID NO: 342949 - RNA, 20 nt, Human
aguuagauaaagaggaagaa

SEQ ID NO: 342950 - RNA, 24 nt, Human
aguucaccucaaggucagaagcuc

SEQ ID NO: 342951 - RNA, 20 nt, Human
caccaaaaugcaguucuaag

SEQ ID NO: 342952 - RNA, 21 nt, Human
caguccaucaggaaaagaaau

SEQ ID NO: 342953 - RNA, 19 nt, Human
caguucuaagugcaguccu

SEQ ID NO: 342954 - RNA, 19 nt, Human
cauucagacaugucuguca

SEQ ID NO: 342955 - RNA, 20 nt, Human
ccuggaguucuuuuaauggu

SEQ ID NO: 342956 - RNA, 18 nt, Human
cuucauucagacaugucu

SEQ ID NO: 342957 - RNA, 25 nt, Human
gaaaagaaaucccccgcuggcugga

SEQ ID NO: 342958 - RNA, 21 nt, Human
uaaaauagagccuauuugucc

SEQ ID NO: 342959 - RNA, 26 nt, Human
uaacauuagaaggcaauucaagacau

SEQ ID NO: 342960 - RNA, 18 nt, Human
uacaguccaucaggaaaa

SEQ ID NO: 342961 - RNA, 24 nt, Human
uacguauacuuuuagcguuuucag

SEQ ID NO: 342962 - RNA, 21 nt, Human
uaguuagauaaagaggaagaa

SEQ ID NO: 342963 - RNA, 21 nt, Human
ucagaggucaccaaaaugcag

SEQ ID NO: 342964 - RNA, 26 nt, Human
uccaaaaauaauuuuguuaaguucac

SEQ ID NO: 342965 - RNA, 22 nt, Human
uccaaguuuuuugcaugaagca

SEQ ID NO: 342966 - RNA, 21 nt, Human
ucuccuucagagaaaacugag

SEQ ID NO: 342967 - RNA, 24 nt, Human
ucucuucuguguccuuuuauaaga

SEQ ID NO: 342968 - RNA, 22 nt, Human
ugacagucauaaauaaagaaaa

SEQ ID NO: 342969 - RNA, 19 nt, Human
ugcuuaagcaaaugugaga

SEQ ID NO: 342970 - RNA, 22 nt, Human
ugguuuaaagucaauagggggc

SEQ ID NO: 342971 - RNA, 23 nt, Human
uguaauauaguuagauaaagagg

SEQ ID NO: 342972 - RNA, 22 nt, Human
ugucucuucuguguccuuuuau

SEQ ID NO: 342973 - RNA, 18 nt, Human
aaaccagaagcagacagg

SEQ ID NO: 342974 - RNA, 20 nt, Human
aagaaucugaggaagaagug

SEQ ID NO: 342975 - RNA, 20 nt, Human
aagcagacagggguaacccc

SEQ ID NO: 342976 - RNA, 24 nt, Human
aagcagacagggguaaccccagag

SEQ ID NO: 342977 - RNA, 21 nt, Human
aagcagacagggguaaccccg

SEQ ID NO: 342978 - RNA, 24 nt, Human
aagcgaaggcgagcccaggccgua

SEQ ID NO: 342979 - RNA, 24 nt, Human
accagggcacaggggcucuggcug

SEQ ID NO: 342980 - RNA, 25 nt, Human
acccuagugaaaugugcacagucuu

SEQ ID NO: 342981 - RNA, 25 nt, Human
acgaagcugcaagccccugggcccu

SEQ ID NO: 342982 - RNA, 22 nt, Human
agagaacuuuauucauuggaaa

SEQ ID NO: 342983 - RNA, 21 nt, Human
agaggcaucugggugggcccu

SEQ ID NO: 342984 - RNA, 19 nt, Human
aggaaaugugaaggaggca

SEQ ID NO: 342985 - RNA, 19 nt, Human
aggcagagguggcucugag

SEQ ID NO: 342986 - RNA, 23 nt, Human
aggcagagguggcucugagggca

SEQ ID NO: 342987 - RNA, 29 nt, Human
aggcaggaaaaggaccuauagaucuccaa

SEQ ID NO: 342988 - RNA, 25 nt, Human
agguuuugaagaugggcuguuuggg

SEQ ID NO: 342989 - RNA, 23 nt, Human
agugacaggggaaagagcagaaa

SEQ ID NO: 342990 - RNA, 21 nt, Human
auguauggcaggauggccaca

SEQ ID NO: 342991 - RNA, 26 nt, Human
caaaacacccaaaugacacugaugug

SEQ ID NO: 342992 - RNA, 22 nt, Human
caacagaaaaaccagaagcaga

SEQ ID NO: 342993 - RNA, 23 nt, Human
caagccccugggcccugggcccu

SEQ ID NO: 342994 - RNA, 22 nt, Human
cacccgagagauacuaaccuug

SEQ ID NO: 342995 - RNA, 18 nt, Human
cagaagcagacaggggua

SEQ ID NO: 342996 - RNA, 22 nt, Human
cagaccgggaggagacgaggaa

SEQ ID NO: 342997 - RNA, 20 nt, Human
cagcaucgaagggacccacu

SEQ ID NO: 342998 - RNA, 22 nt, Human
cagcaucgaagggacccacugg

SEQ ID NO: 342999 - RNA, 19 nt, Human
cagggagagacagagagga

SEQ ID NO: 343000 - RNA, 22 nt, Human
caucccccaucccagggguaaa

SEQ ID NO: 343001 - RNA, 20 nt, Human
ccaaaacaaagucuggcucc

SEQ ID NO: 343002 - RNA, 19 nt, Human
ccaaaacacccaaaugaca

SEQ ID NO: 343003 - RNA, 22 nt, Human
ccaacgccuaccagggcacagg

SEQ ID NO: 343004 - RNA, 18 nt, Human
ccccugaguugccaaaac

SEQ ID NO: 343005 - RNA, 18 nt, Human
ccccugggcccugggccc

SEQ ID NO: 343006 - RNA, 18 nt, Human
cccgagagauacuaaccc

SEQ ID NO: 343007 - RNA, 23 nt, Human
cccucagcaucgaagggacccac

SEQ ID NO: 343008 - RNA, 20 nt, Human
cccugggcccugggcccuuc

SEQ ID NO: 343009 - RNA, 21 nt, Human
ccucacgaagcugcaagcccc

SEQ ID NO: 343010 - RNA, 22 nt, Human
ccucacgaagcugcaagccccu

SEQ ID NO: 343011 - RNA, 21 nt, Human
ccuccugagacucccagugag

SEQ ID NO: 343012 - RNA, 19 nt, Human
ccugagacucccagugagc

SEQ ID NO: 343013 - RNA, 21 nt, Human
ccugcguggagcauggagggg

SEQ ID NO: 343014 - RNA, 21 nt, Human
ccugggcccugggcccuucug

SEQ ID NO: 343015 - RNA, 21 nt, Human
ccuucuguauuugaacccuag

SEQ ID NO: 343016 - RNA, 21 nt, Human
cgaagcugcaagccccugggc

SEQ ID NO: 343017 - RNA, 18 nt, Human
cucuaaagcgaaggcgag

SEQ ID NO: 343018 - RNA, 20 nt, Human
cugggcccugggcccuucug

SEQ ID NO: 343019 - RNA, 25 nt, Human
gaaccacggccgggcaacgggucag

SEQ ID NO: 343020 - RNA, 21 nt, Human
gaagcagacagggguaacccc

SEQ ID NO: 343021 - RNA, 21 nt, Human
gaccgggaggagacgaggaac

SEQ ID NO: 343022 - RNA, 23 nt, Human
gaggcaggaaaaggaccuauagg

SEQ ID NO: 343023 - RNA, 20 nt, Human
gaucauagucuuccaacuca

SEQ ID NO: 343024 - RNA, 19 nt, Human
gaucauccgaaggccccug

SEQ ID NO: 343025 - RNA, 24 nt, Human
gaugugggagugacaggggaaaga

SEQ ID NO: 343026 - RNA, 22 nt, Human
gccccugaguugccaaaacacc

SEQ ID NO: 343027 - RNA, 20 nt, Human
gcccugggcccuucuguauu

SEQ ID NO: 343028 - RNA, 22 nt, Human
gcgagcccaggccguaggagcg

SEQ ID NO: 343029 - RNA, 18 nt, Human
ggaaaugugaaggaggcc

SEQ ID NO: 343030 - RNA, 18 nt, Human
ggacccggagaugaggug

SEQ ID NO: 343031 - RNA, 22 nt, Human
gggaaagguggccaggugccag

SEQ ID NO: 343032 - RNA, 19 nt, Human
gggaggaaaugugaaggag

SEQ ID NO: 343033 - RNA, 26 nt, Human
gggcaggcuggaggagagcccacagc

SEQ ID NO: 343034 - RNA, 23 nt, Human
gguaccaagaaucugaggaagaa

SEQ ID NO: 343035 - RNA, 20 nt, Human
gguuaucccuccugagacuc

SEQ ID NO: 343036 - RNA, 24 nt, Human
guaaacuccugagacuggcuuuug

SEQ ID NO: 343037 - RNA, 21 nt, Human
gugaaggaggcaggaaaagga

SEQ ID NO: 343038 - RNA, 18 nt, Human
guggcucugagggcaccc

SEQ ID NO: 343039 - RNA, 23 nt, Human
gugggcccugggcaggcuggagg

SEQ ID NO: 343040 - RNA, 23 nt, Human
uaaagagaagccauguuauccug

SEQ ID NO: 343041 - RNA, 21 nt, Human
uaagacggaaguggagucuug

SEQ ID NO: 343042 - RNA, 24 nt, Human
ucacaggcagagguggcucugagg

SEQ ID NO: 343043 - RNA, 18 nt, Human
ucagguugggagggagcc

SEQ ID NO: 343044 - RNA, 18 nt, Human
ucccagggguaaacuccu

SEQ ID NO: 343045 - RNA, 23 nt, Human
ugaaaugugcacagucugcccuc

SEQ ID NO: 343046 - RNA, 23 nt, Human
ugacauacucaccacccucagca

SEQ ID NO: 343047 - RNA, 24 nt, Human
ugacauacucaccacccucagcau

SEQ ID NO: 343048 - RNA, 21 nt, Human
ugagcuggggugccacagggc

SEQ ID NO: 343049 - RNA, 18 nt, Human
ugccugcguggagcaugg

SEQ ID NO: 343050 - RNA, 20 nt, Human
ugccugcguggagcauggag

SEQ ID NO: 343051 - RNA, 19 nt, Human
uggaggggugggcaggcag

SEQ ID NO: 343052 - RNA, 24 nt, Human
uggcuccucgguugggggguuguc

SEQ ID NO: 343053 - RNA, 20 nt, Human
ugggagugacaggggaaaga

SEQ ID NO: 343054 - RNA, 21 nt, Human
ugucaagagaacuuuauucau

SEQ ID NO: 343055 - RNA, 19 nt, Human
ugugaugugggagugacag

SEQ ID NO: 343056 - RNA, 23 nt, Human
uuuaagaucauccgaaggcccuu

SEQ ID NO: 343057 - RNA, 18 nt, Human
uuuuuuuuuuuuuuuuug

SEQ ID NO: 343058 - RNA, 21 nt, Human
aaacaacauauaacacaaacu

SEQ ID NO: 343059 - RNA, 22 nt, Human
aacacaaacucaguuaccaccc

SEQ ID NO: 343060 - RNA, 22 nt, Human
aagaacaggaagagagcauugu

SEQ ID NO: 343061 - RNA, 24 nt, Human
aagaacaggaagagagcauugugc

SEQ ID NO: 343062 - RNA, 26 nt, Human
acaucaccuccccauugccccuccag

SEQ ID NO: 343063 - RNA, 18 nt, Human
accccauccuccugcuca

SEQ ID NO: 343064 - RNA, 19 nt, Human
accccauccuccugcucag

SEQ ID NO: 343065 - RNA, 21 nt, Human
accccucccacccugggccug

SEQ ID NO: 343066 - RNA, 24 nt, Human
acccuagucccugcucucugagcc

SEQ ID NO: 343067 - RNA, 18 nt, Human
agaacaggaagagagcau

SEQ ID NO: 343068 - RNA, 24 nt, Human
aggggccccgaccccucccacccu

SEQ ID NO: 343069 - RNA, 22 nt, Human
aucaccuccccauugccccucc

SEQ ID NO: 343070 - RNA, 22 nt, Human
caaaacaccgggucggauccug

SEQ ID NO: 343071 - RNA, 20 nt, Human
caacauauaacacaaacuca

SEQ ID NO: 343072 - RNA, 21 nt, Human
cagucucucugcaucuggggg

SEQ ID NO: 343073 - RNA, 20 nt, Human
caucugggggccucucauuc

SEQ ID NO: 343074 - RNA, 22 nt, Human
ccaaggccgcugggccccuccc

SEQ ID NO: 343075 - RNA, 19 nt, Human
ccacgccuagcugccuccu

SEQ ID NO: 343076 - RNA, 19 nt, Human
ccccucccacccugggccu

SEQ ID NO: 343077 - RNA, 20 nt, Human
cccgaccccucccacccugg

SEQ ID NO: 343078 - RNA, 20 nt, Human
cccuccaggggccccgaccc

SEQ ID NO: 343079 - RNA, 21 nt, Human
cccuccaggggccccgacccc

SEQ ID NO: 343080 - RNA, 24 nt, Human
ccuggcuuccuuccccucuuucug

SEQ ID NO: 343081 - RNA, 25 nt, Human
ccuguuggcuuccuucuccuggugc

SEQ ID NO: 343082 - RNA, 20 nt, Human
ccuucuccuggugcccgaau

SEQ ID NO: 343083 - RNA, 19 nt, Human
cuccccauugccccuccag

SEQ ID NO: 343084 - RNA, 23 nt, Human
cuccucuacuaacuuugcucuaa

SEQ ID NO: 343085 - RNA, 24 nt, Human
cugaaauacagcacaucgucccug

SEQ ID NO: 343086 - RNA, 19 nt, Human
gcuuccuuccccucuuucu

SEQ ID NO: 343087 - RNA, 19 nt, Human
ggccccuccccacccucuc

SEQ ID NO: 343088 - RNA, 25 nt, Human
uaacacaaacucaguuaccaccccc

SEQ ID NO: 343089 - RNA, 18 nt, Human
uacagcacaucgucccug

SEQ ID NO: 343090 - RNA, 25 nt, Human
uauaacacaaacucaguuaccaccc

SEQ ID NO: 343091 - RNA, 24 nt, Human
ucaagcacguuuccaauucugguu

SEQ ID NO: 343092 - RNA, 22 nt, Human
ucccugcucucugagcagagag

SEQ ID NO: 343093 - RNA, 23 nt, Human
ucccugugagugcuaccccaucc

SEQ ID NO: 343094 - RNA, 19 nt, Human
uccuacccuagucccugcu

SEQ ID NO: 343095 - RNA, 22 nt, Human
uccuccugcucaggaaaggaag

SEQ ID NO: 343096 - RNA, 22 nt, Human
ucuccagucucucugcaucugg

SEQ ID NO: 343097 - RNA, 24 nt, Human
ugagugcuaccccauccuccugcu

SEQ ID NO: 343098 - RNA, 20 nt, Human
ugcuggacgcagcggugagg

SEQ ID NO: 343099 - RNA, 23 nt, Human
uggcauacauauacaaguauaua

SEQ ID NO: 343100 - RNA, 27 nt, Human
ugggauagacacugaaauacagcacau

SEQ ID NO: 343101 - RNA, 26 nt, Human
ugggggccucucauucauccagcucc

SEQ ID NO: 343102 - RNA, 23 nt, Human
acugcuggucauauauccaaagg

SEQ ID NO: 343103 - RNA, 21 nt, Human
agucugguccacaugacaccc

SEQ ID NO: 343104 - RNA, 18 nt, Human
auucucuauucagaaguc

SEQ ID NO: 343105 - RNA, 20 nt, Human
ccaaaggaaaaaaaaaaaaa

SEQ ID NO: 343106 - RNA, 24 nt, Human
ccagaggcaauguucuuaagcgcg

SEQ ID NO: 343107 - RNA, 22 nt, Human
ccagcaaucccacugcugguca

SEQ ID NO: 343108 - RNA, 23 nt, Human
cccaaaaaaaucuccgcuccccu

SEQ ID NO: 343109 - RNA, 18 nt, Human
cccccguuuuuugggccc

SEQ ID NO: 343110 - RNA, 18 nt, Human
ccccuuuuuaucaccccc

SEQ ID NO: 343111 - RNA, 22 nt, Human
uaagcgcggcggccgggagcac

SEQ ID NO: 343112 - RNA, 23 nt, Human
ucccacugcuggucauauaucca

SEQ ID NO: 343113 - RNA, 25 nt, Human
uuucccaaaaaaaucuccgcucccc

SEQ ID NO: 343114 - RNA, 24 nt, Human
aaaaggaagggguuggaaacaaaa

SEQ ID NO: 343115 - RNA, 24 nt, Human
aaaaggaagugaucuauaccaagg

SEQ ID NO: 343116 - RNA, 18 nt, Human
aaccugggauccucgagc

SEQ ID NO: 343117 - RNA, 21 nt, Human
aaugauaaggugcaggcagaa

SEQ ID NO: 343118 - RNA, 18 nt, Human
aaugaugagagcugcgga

SEQ ID NO: 343119 - RNA, 19 nt, Human
aaugguuuuauuuccaucu

SEQ ID NO: 343120 - RNA, 23 nt, Human
aauguaacaaagaaagaguugaa

SEQ ID NO: 343121 - RNA, 21 nt, Human
acacaucacaaugaugagagc

SEQ ID NO: 343122 - RNA, 26 nt, Human
acaggugggccagguucuccgaacau

SEQ ID NO: 343123 - RNA, 22 nt, Human
acauugaaaaaaggaaagacau

SEQ ID NO: 343124 - RNA, 24 nt, Human
acuuuuauaauuaaccacugaagu

SEQ ID NO: 343125 - RNA, 21 nt, Human
agacacuugggacaaaaggug

SEQ ID NO: 343126 - RNA, 22 nt, Human
agacaggugggccagguucucc

SEQ ID NO: 343127 - RNA, 18 nt, Human
agaggaacagagauggcc

SEQ ID NO: 343128 - RNA, 20 nt, Human
agaggaacagagauggccug

SEQ ID NO: 343129 - RNA, 19 nt, Human
agcagucagaagcccgaag

SEQ ID NO: 343130 - RNA, 20 nt, Human
agcagucagaagcccgaagc

SEQ ID NO: 343131 - RNA, 23 nt, Human
agccaaacaguuaaaaagucaga

SEQ ID NO: 343132 - RNA, 20 nt, Human
aggaagcuucugaaauaaaa

SEQ ID NO: 343133 - RNA, 24 nt, Human
aggaaggacgacaguggaagagga

SEQ ID NO: 343134 - RNA, 20 nt, Human
aggagagguugucaucuggg

SEQ ID NO: 343135 - RNA, 19 nt, Human
aggcagaaucacgggugac

SEQ ID NO: 343136 - RNA, 22 nt, Human
aggccucucucguuagccaccc

SEQ ID NO: 343137 - RNA, 24 nt, Human
aggggagugcccugcagaguuucu

SEQ ID NO: 343138 - RNA, 22 nt, Human
aucacaaugaugagagcugcgg

SEQ ID NO: 343139 - RNA, 20 nt, Human
aucuggcuugcaaaauaauu

SEQ ID NO: 343140 - RNA, 24 nt, Human
auggggcaacagugaccugggcaa

SEQ ID NO: 343141 - RNA, 24 nt, Human
caaaacuuaaauuuuaaaaugggu

SEQ ID NO: 343142 - RNA, 23 nt, Human
cagucagaagcccgaagcaucca

SEQ ID NO: 343143 - RNA, 21 nt, Human
caguggccaggaagcuucuga

SEQ ID NO: 343144 - RNA, 19 nt, Human
cagugggaacugaggacug

SEQ ID NO: 343145 - RNA, 20 nt, Human
cauuaagccucugaggggga

SEQ ID NO: 343146 - RNA, 23 nt, Human
ccacaauuacugccaccaccucu

SEQ ID NO: 343147 - RNA, 19 nt, Human
ccaccgccuucgcacuccg

SEQ ID NO: 343148 - RNA, 18 nt, Human
ccacucuagaacuggacc

SEQ ID NO: 343149 - RNA, 19 nt, Human
ccacuggagaaccuggcug

SEQ ID NO: 343150 - RNA, 19 nt, Human
ccagacuggaaccacgauu

SEQ ID NO: 343151 - RNA, 22 nt, Human
ccccugagagaaccugaggcuc

SEQ ID NO: 343152 - RNA, 25 nt, Human
ccccugagagaaccugaggcucccg

SEQ ID NO: 343153 - RNA, 20 nt, Human
ccgaagcauccaagcccagu

SEQ ID NO: 343154 - RNA, 22 nt, Human
ccgaagcauccaagcccagugg

SEQ ID NO: 343155 - RNA, 27 nt, Human
cgccuucgcacuccggagaagaagcuc

SEQ ID NO: 343156 - RNA, 21 nt, Human
cucccacucuagaacuggacc

SEQ ID NO: 343157 - RNA, 22 nt, Human
cugcaaccagacuggaaccacg

SEQ ID NO: 343158 - RNA, 25 nt, Human
cugcaaccagacuggaaccacgauu

SEQ ID NO: 343159 - RNA, 21 nt, Human
cugcccucuucaacuccaagu

SEQ ID NO: 343160 - RNA, 18 nt, Human
cuggagauaacaaaagga

SEQ ID NO: 343161 - RNA, 22 nt, Human
cuggagcauggguaagguuccu

SEQ ID NO: 343162 - RNA, 23 nt, Human
cuggagcauggguaagguuccug

SEQ ID NO: 343163 - RNA, 23 nt, Human
cugucaggggcagcuugggccac

SEQ ID NO: 343164 - RNA, 26 nt, Human
cugugcugucaggggcagcuugggcc

SEQ ID NO: 343165 - RNA, 25 nt, Human
gaaaagagaggacacccaaacacgu

SEQ ID NO: 343166 - RNA, 22 nt, Human
gaagcuccuucuucagccgccc

SEQ ID NO: 343167 - RNA, 19 nt, Human
gaauaguagaaacaaaaca

SEQ ID NO: 343168 - RNA, 19 nt, Human
gaccggcagacacuuggga

SEQ ID NO: 343169 - RNA, 23 nt, Human
gcaaacuuuccaaacagggaaaa

SEQ ID NO: 343170 - RNA, 18 nt, Human
gcaacauuaagccucuga

SEQ ID NO: 343171 - RNA, 19 nt, Human
gccaagacaggugggccag

SEQ ID NO: 343172 - RNA, 19 nt, Human
gccauagcaucaaacugga

SEQ ID NO: 343173 - RNA, 23 nt, Human
gccgugaugcccagaagaaaguu

SEQ ID NO: 343174 - RNA, 21 nt, Human
gcgccaccgccuucgcacucc

SEQ ID NO: 343175 - RNA, 21 nt, Human
gcugagucccugcuccuucag

SEQ ID NO: 343176 - RNA, 22 nt, Human
ggaaaauggaggcagauaccac

SEQ ID NO: 343177 - RNA, 18 nt, Human
ggaacugagcggcugaua

SEQ ID NO: 343178 - RNA, 22 nt, Human
ggacaaaagguggugugcccgg

SEQ ID NO: 343179 - RNA, 20 nt, Human
ggagugcccugcagaguuuc

SEQ ID NO: 343180 - RNA, 25 nt, Human
ggauuuuaucagaaaagagaggaca

SEQ ID NO: 343181 - RNA, 23 nt, Human
gggcaacagugaccugggcaaaa

SEQ ID NO: 343182 - RNA, 19 nt, Human
gggcagaaacgggcuggga

SEQ ID NO: 343183 - RNA, 24 nt, Human
gggcaucgugacacugccgugaug

SEQ ID NO: 343184 - RNA, 26 nt, Human
ggugggccagguucuccgaacauggg

SEQ ID NO: 343185 - RNA, 25 nt, Human
guccugugccaggugaaggacgcug

SEQ ID NO: 343186 - RNA, 20 nt, Human
gugauuggucuuuccagggc

SEQ ID NO: 343187 - RNA, 23 nt, Human
uacauugaaaaaaggaaagacau

SEQ ID NO: 343188 - RNA, 24 nt, Human
uacauugaaaaaaggaaagacauu

SEQ ID NO: 343189 - RNA, 23 nt, Human
uaccacuggagaaccuggcuguc

SEQ ID NO: 343190 - RNA, 23 nt, Human
uagaacuggaccaccccagagga

SEQ ID NO: 343191 - RNA, 19 nt, Human
uagccacccccaggcccug

SEQ ID NO: 343192 - RNA, 24 nt, Human
uaggcagugggaacugaggacugg

SEQ ID NO: 343193 - RNA, 18 nt, Human
uaguagaaacaaaacaca

SEQ ID NO: 343194 - RNA, 22 nt, Human
uaucagaaaagagaggacaccc

SEQ ID NO: 343195 - RNA, 23 nt, Human
uccacaggcaacauuaagccucu

SEQ ID NO: 343196 - RNA, 24 nt, Human
uccacaggcaacauuaagccucug

SEQ ID NO: 343197 - RNA, 18 nt, Human
uccagggccucaaggggc

SEQ ID NO: 343198 - RNA, 24 nt, Human
uccgcaggcgccaccgccuucgca

SEQ ID NO: 343199 - RNA, 20 nt, Human
uccggagaagaagcuccuuc

SEQ ID NO: 343200 - RNA, 22 nt, Human
ucuaaagugaauucugugcuga

SEQ ID NO: 343201 - RNA, 22 nt, Human
ucuagaacuggaccaccccaga

SEQ ID NO: 343202 - RNA, 22 nt, Human
ucuauaccaagguuugcaggga

SEQ ID NO: 343203 - RNA, 22 nt, Human
ucucaggaaaauggaggcagau

SEQ ID NO: 343204 - RNA, 20 nt, Human
ucugucuguccauccgucuu

SEQ ID NO: 343205 - RNA, 24 nt, Human
ucugugcugagucccugcuccuuc

SEQ ID NO: 343206 - RNA, 22 nt, Human
ucuugcauguccugugccaggu

SEQ ID NO: 343207 - RNA, 24 nt, Human
ugaaaaaaggaaagacauuuuuuc

SEQ ID NO: 343208 - RNA, 18 nt, Human
ugaaaaguagguaacgaa

SEQ ID NO: 343209 - RNA, 23 nt, Human
ugaccugggcaaaagccuggaac

SEQ ID NO: 343210 - RNA, 21 nt, Human
ugagagaaccugaggcucccg

SEQ ID NO: 343211 - RNA, 18 nt, Human
ugaggacuggagggcgug

SEQ ID NO: 343212 - RNA, 21 nt, Human
ugccaggugaaggacgcugga

SEQ ID NO: 343213 - RNA, 24 nt, Human
ugcccagaagaaaguuaauggcaa

SEQ ID NO: 343214 - RNA, 19 nt, Human
ugccuugcuccaagucugg

SEQ ID NO: 343215 - RNA, 21 nt, Human
uggcgugaggcccucugagga

SEQ ID NO: 343216 - RNA, 18 nt, Human
ugggagggcccugggucc

SEQ ID NO: 343217 - RNA, 23 nt, Human
ugguuucgaaacagucuuuuuga

SEQ ID NO: 343218 - RNA, 25 nt, Human
uguaacacuagcagaggaguccaaa

SEQ ID NO: 343219 - RNA, 25 nt, Human
uguccugugccaggugaaggacgcu

SEQ ID NO: 343220 - RNA, 24 nt, Human
ugugcagauucugcaaccagacug

SEQ ID NO: 343221 - RNA, 20 nt, Human
ugugcugucaggggcagcuu

SEQ ID NO: 343222 - RNA, 24 nt, Human
ugugcugucaggggcagcuugggc

SEQ ID NO: 343223 - RNA, 23 nt, Human
uucaccagucaaaaccuauggag

SEQ ID NO: 343224 - RNA, 21 nt, Human
uucagccgcccaggagagcuc

SEQ ID NO: 343225 - RNA, 23 nt, Human
uugcagggaagucaaauguucuc

SEQ ID NO: 343226 - RNA, 23 nt, Human
uuggauccggacagauuuccagu

SEQ ID NO: 343227 - RNA, 23 nt, Human
uugggccacuuugcugccccuga

SEQ ID NO: 343228 - RNA, 20 nt, Human
uuggucgaccggcagacacu

SEQ ID NO: 343229 - RNA, 19 nt, Human
uuugcagaaaucacugcag

SEQ ID NO: 343230 - RNA, 21 nt, Human
uuugcagaaaucacugcagau

SEQ ID NO: 343231 - RNA, 22 nt, Human
uuuggcgugaggcccucugagg

SEQ ID NO: 343232 - RNA, 28 nt, Human
uuuuuuuuuuuuuuuuuuuuuuuggggg

SEQ ID NO: 343233 - RNA, 27 nt, Human
aaaaagcacacgaaaaauaguucaaac

SEQ ID NO: 343234 - RNA, 19 nt, Human
aaacauuuuagagguuauu

SEQ ID NO: 343235 - RNA, 19 nt, Human
aaaguuacaaaaaggcuga

SEQ ID NO: 343236 - RNA, 22 nt, Human
acggcaggccccagcccuucuu

SEQ ID NO: 343237 - RNA, 22 nt, Human
agaacggcaggccccagcccuu

SEQ ID NO: 343238 - RNA, 21 nt, Human
agcaauauuaacuauucugua

SEQ ID NO: 343239 - RNA, 21 nt, Human
agccaaauacucuuucaugaa

SEQ ID NO: 343240 - RNA, 22 nt, Human
agcguggggucguccagcugga

SEQ ID NO: 343241 - RNA, 20 nt, Human
agcuaaucacaaauaacuca

SEQ ID NO: 343242 - RNA, 19 nt, Human
aggagagaagccggaagcc

SEQ ID NO: 343243 - RNA, 21 nt, Human
auauaccuauauauacaccua

SEQ ID NO: 343244 - RNA, 21 nt, Human
auuuuuagccuccaagugaac

SEQ ID NO: 343245 - RNA, 20 nt, Human
caaaugucuagauauaagua

SEQ ID NO: 343246 - RNA, 18 nt, Human
cacaaguuaaauaaccua

SEQ ID NO: 343247 - RNA, 23 nt, Human
cacgcuuuuaacauaugccaugg

SEQ ID NO: 343248 - RNA, 18 nt, Human
ccacugaggagagaagcc

SEQ ID NO: 343249 - RNA, 18 nt, Human
ccccagcccuucuuuccc

SEQ ID NO: 343250 - RNA, 18 nt, Human
ccgacagccacgccgccc

SEQ ID NO: 343251 - RNA, 19 nt, Human
ccgccgcgccuccggagcc

SEQ ID NO: 343252 - RNA, 20 nt, Human
ccuaugguaugcugcauauu

SEQ ID NO: 343253 - RNA, 21 nt, Human
ccuccggagcccgcugugccc

SEQ ID NO: 343254 - RNA, 22 nt, Human
cuaaaaaacaguauuugaguag

SEQ ID NO: 343255 - RNA, 21 nt, Human
gaaccaaacuuguagacugaa

SEQ ID NO: 343256 - RNA, 19 nt, Human
gccgcucauuuuuuuuuuu

SEQ ID NO: 343257 - RNA, 24 nt, Human
gcugaacacaaguuaaauaaccua

SEQ ID NO: 343258 - RNA, 21 nt, Human
ggaggcugugguugggaggcg

SEQ ID NO: 343259 - RNA, 18 nt, Human
ggauaggcuugccgccgc

SEQ ID NO: 343260 - RNA, 20 nt, Human
guggggucguccagcuggag

SEQ ID NO: 343261 - RNA, 22 nt, Human
uaaaaaguuaaugaaaagcuua

SEQ ID NO: 343262 - RNA, 27 nt, Human
uaacaaguuuaaaaaagcacacgaaaa

SEQ ID NO: 343263 - RNA, 23 nt, Human
uaaugaaaagcuuauuuagacac

SEQ ID NO: 343264 - RNA, 26 nt, Human
uacaaaaaggcugaacacaaguuaaa

SEQ ID NO: 343265 - RNA, 22 nt, Human
uacucgggaggaagaacggcag

SEQ ID NO: 343266 - RNA, 22 nt, Human
uagauugucagagacgcuucag

SEQ ID NO: 343267 - RNA, 23 nt, Human
uagcaugacaaaauuaccaaaau

SEQ ID NO: 343268 - RNA, 25 nt, Human
uaugauguaaauuuuccauuucuga

SEQ ID NO: 343269 - RNA, 24 nt, Human
uauuaagaaaaagaagauugauuc

SEQ ID NO: 343270 - RNA, 19 nt, Human
ucccgacagccacgccgcc

SEQ ID NO: 343271 - RNA, 19 nt, Human
ucguccagcuggaggggau

SEQ ID NO: 343272 - RNA, 20 nt, Human
ucuccaggucuugggccuuc

SEQ ID NO: 343273 - RNA, 23 nt, Human
ucucugagaugaacuugccaaua

SEQ ID NO: 343274 - RNA, 23 nt, Human
ucugauucuuuauagacuuuuag

SEQ ID NO: 343275 - RNA, 20 nt, Human
ugaagcuaaagucugcugua

SEQ ID NO: 343276 - RNA, 20 nt, Human
ugaauugugcagauacaaaa

SEQ ID NO: 343277 - RNA, 21 nt, Human
ugagaaaccaugcauacugua

SEQ ID NO: 343278 - RNA, 18 nt, Human
ugcagauacaaaagugcu

SEQ ID NO: 343279 - RNA, 18 nt, Human
ugcaguauuagcccaaaa

SEQ ID NO: 343280 - RNA, 21 nt, Human
uuaaaauuauaucugaauccc

SEQ ID NO: 343281 - RNA, 19 nt, Human
uuacaaaaaggcugaacac

SEQ ID NO: 343282 - RNA, 20 nt, Human
uucguuuuguuuucacugga

SEQ ID NO: 343283 - RNA, 24 nt, Human
uucuacuaaaaaacaguauuugag

SEQ ID NO: 343284 - RNA, 22 nt, Human
uuuuucaguauuauauauugcu

SEQ ID NO: 343285 - RNA, 24 nt, Human
uuuuuuuuuuuuuuuacagucuuu

SEQ ID NO: 343286 - RNA, 19 nt, Human
aaaguucucugaaacugcu

SEQ ID NO: 343287 - RNA, 22 nt, Human
aaccaaggcuuugaugaguccc

SEQ ID NO: 343288 - RNA, 19 nt, Human
aauuuggagcucuuuccuu

SEQ ID NO: 343289 - RNA, 19 nt, Human
agccgacggcggcgccgcg

SEQ ID NO: 343290 - RNA, 19 nt, Human
caaaaugcuaaaccaaggc

SEQ ID NO: 343291 - RNA, 25 nt, Human
caugcaaaaaguucucugaaacugc

SEQ ID NO: 343292 - RNA, 19 nt, Human
ccaccagggcucugaacaa

SEQ ID NO: 343293 - RNA, 25 nt, Human
ccaccagggcucugaacaacugcgc

SEQ ID NO: 343294 - RNA, 21 nt, Human
ccccuguaguguucuagccuu

SEQ ID NO: 343295 - RNA, 24 nt, Human
ccgcggagccgacggcgcucgugc

SEQ ID NO: 343296 - RNA, 23 nt, Human
cuuuccuuuuuuauagcacuucu

SEQ ID NO: 343297 - RNA, 21 nt, Human
uaggaaggaccaccuuuaaua

SEQ ID NO: 343298 - RNA, 19 nt, Human
uaguguucuagccuuugua

SEQ ID NO: 343299 - RNA, 24 nt, Human
ucucugaaacugcuuccacugccu

SEQ ID NO: 343300 - RNA, 21 nt, Human
ugcgcgacacacaccacagag

SEQ ID NO: 343301 - RNA, 18 nt, Human
uggauuacaagauccacc

SEQ ID NO: 343302 - RNA, 22 nt, Human
ugugcgcgacacacaccacaga

SEQ ID NO: 343303 - RNA, 18 nt, Human
uuuuuuuuuuuuuugggu

SEQ ID NO: 343304 - RNA, 20 nt, Human
uuuuuuuuuuuuuuuugggu

SEQ ID NO: 343305 - RNA, 21 nt, Human
uuuuuuuuuuuuuuuuuuggg

SEQ ID NO: 343306 - RNA, 25 nt, Human
uuuuuuuuuuuuuuuuuuggguuuu

SEQ ID NO: 343307 - RNA, 22 nt, Human
aaaaauaaauacacuagccucc

SEQ ID NO: 343308 - RNA, 22 nt, Human
aaacagaugaaaauacucaaaa

SEQ ID NO: 343309 - RNA, 22 nt, Human
aacacaacuucuaaaaaauacu

SEQ ID NO: 343310 - RNA, 18 nt, Human
aacacucuaguaaaaaaa

SEQ ID NO: 343311 - RNA, 20 nt, Human
aacagaaauaacauccgcag

SEQ ID NO: 343312 - RNA, 19 nt, Human
aagcaaauguaaccaucca

SEQ ID NO: 343313 - RNA, 20 nt, Human
aagcaaauguaaccauccac

SEQ ID NO: 343314 - RNA, 19 nt, Human
aaguauuuacaggcuggcu

SEQ ID NO: 343315 - RNA, 20 nt, Human
acaauguccaaaauccugcc

SEQ ID NO: 343316 - RNA, 19 nt, Human
acaccgggguccgagacac

SEQ ID NO: 343317 - RNA, 19 nt, Human
acaugugauaacugaagaa

SEQ ID NO: 343318 - RNA, 23 nt, Human
accuggugguguauguccaaguu

SEQ ID NO: 343319 - RNA, 19 nt, Human
acugcagaugguauuaugu

SEQ ID NO: 343320 - RNA, 21 nt, Human
agaaggagcacauuuccuuca

SEQ ID NO: 343321 - RNA, 19 nt, Human
agacaaucaauuagccgcc

SEQ ID NO: 343322 - RNA, 18 nt, Human
agcacugcaggagaaaac

SEQ ID NO: 343323 - RNA, 19 nt, Human
aggcucggagggaaagcag

SEQ ID NO: 343324 - RNA, 21 nt, Human
aguaacucaaaaccacugccc

SEQ ID NO: 343325 - RNA, 25 nt, Human
agucauccacaccuuuuccuaacaa

SEQ ID NO: 343326 - RNA, 18 nt, Human
auagaauucucgcuuuga

SEQ ID NO: 343327 - RNA, 23 nt, Human
auauuuaguuccuacagaugucu

SEQ ID NO: 343328 - RNA, 21 nt, Human
auuuacauauacaauucagac

SEQ ID NO: 343329 - RNA, 19 nt, Human
caaaaagcaaaagcuuuca

SEQ ID NO: 343330 - RNA, 18 nt, Human
caaaagggcucugccuuu

SEQ ID NO: 343331 - RNA, 24 nt, Human
caaaggaaugcaguuggcaaacac

SEQ ID NO: 343332 - RNA, 19 nt, Human
caauucacaaaaauggagc

SEQ ID NO: 343333 - RNA, 21 nt, Human
caccgcgccuuuggagccgcc

SEQ ID NO: 343334 - RNA, 19 nt, Human
cagaauggacacacuggau

SEQ ID NO: 343335 - RNA, 22 nt, Human
cauauacuuacacagauaugca

SEQ ID NO: 343336 - RNA, 21 nt, Human
ccacaccuuuuccuaacaaaa

SEQ ID NO: 343337 - RNA, 23 nt, Human
ccauagaucacagugaguugugu

SEQ ID NO: 343338 - RNA, 18 nt, Human
cccauauauaaacaaggc

SEQ ID NO: 343339 - RNA, 20 nt, Human
ccggugcacaccgggguccg

SEQ ID NO: 343340 - RNA, 23 nt, Human
ccucuagauuaucccccugaccu

SEQ ID NO: 343341 - RNA, 18 nt, Human
cgacaaaaaugggcaaca

SEQ ID NO: 343342 - RNA, 21 nt, Human
cgagacacccgaaucgcagcc

SEQ ID NO: 343343 - RNA, 22 nt, Human
cggugcacaccgggguccgaga

SEQ ID NO: 343344 - RNA, 24 nt, Human
cguaauuaacaaugugcugauacc

SEQ ID NO: 343345 - RNA, 23 nt, Human
cugagcauuucacggaaagcaaa

SEQ ID NO: 343346 - RNA, 20 nt, Human
cugccucuagauuauccccc

SEQ ID NO: 343347 - RNA, 19 nt, Human
cuggguguauuaaaaguga

SEQ ID NO: 343348 - RNA, 25 nt, Human
cuugcuuucguaucugcaaaagggc

SEQ ID NO: 343349 - RNA, 21 nt, Human
gaaacgaaugcaucaaguauu

SEQ ID NO: 343350 - RNA, 21 nt, Human
gaaugcaucaaguauuuacag

SEQ ID NO: 343351 - RNA, 18 nt, Human
gacaaaaaugggcaacag

SEQ ID NO: 343352 - RNA, 20 nt, Human
gauaugcauuuacauauaca

SEQ ID NO: 343353 - RNA, 25 nt, Human
gcaaaguuuucuuauucuugucuaa

SEQ ID NO: 343354 - RNA, 18 nt, Human
gccaacuacucuauguca

SEQ ID NO: 343355 - RNA, 22 nt, Human
ggcgcagagcugcccucccuca

SEQ ID NO: 343356 - RNA, 19 nt, Human
guaaagauacuauggaacc

SEQ ID NO: 343357 - RNA, 23 nt, Human
gugaagcuacccauauauaaaca

SEQ ID NO: 343358 - RNA, 20 nt, Human
uaaaaaugcgcaaagacuug

SEQ ID NO: 343359 - RNA, 24 nt, Human
uaaaaggaaaauuugcuacaguug

SEQ ID NO: 343360 - RNA, 18 nt, Human
uaaagaucauuggcaaaa

SEQ ID NO: 343361 - RNA, 21 nt, Human
uaacaaaaagcaaaagcuuuc

SEQ ID NO: 343362 - RNA, 22 nt, Human
uaacaaaaagcaaaagcuuuca

SEQ ID NO: 343363 - RNA, 23 nt, Human
uaacaaugugcugauaccacuga

SEQ ID NO: 343364 - RNA, 23 nt, Human
uaacacaacuucuaaaaaauaau

SEQ ID NO: 343365 - RNA, 19 nt, Human
uaacagaaauaacauccgc

SEQ ID NO: 343366 - RNA, 23 nt, Human
uaacagaaauaacauccgcagaa

SEQ ID NO: 343367 - RNA, 19 nt, Human
uacaacuuaacaacccuuu

SEQ ID NO: 343368 - RNA, 21 nt, Human
uacaguuguaacacaacuucu

SEQ ID NO: 343369 - RNA, 19 nt, Human
uagaaaagcacugcaggag

SEQ ID NO: 343370 - RNA, 21 nt, Human
uagagucauccacaccuuuuc

SEQ ID NO: 343371 - RNA, 23 nt, Human
uauaacagaaauaacauccgcag

SEQ ID NO: 343372 - RNA, 18 nt, Human
uauaauugaaaggaaaga

SEQ ID NO: 343373 - RNA, 21 nt, Human
uauaguacaacuuaacaaccc

SEQ ID NO: 343374 - RNA, 23 nt, Human
ucaccgcgccuuuggagccgccu

SEQ ID NO: 343375 - RNA, 18 nt, Human
ucauccacaccuuuuccu

SEQ ID NO: 343376 - RNA, 19 nt, Human
ucauugauuuccaucuugu

SEQ ID NO: 343377 - RNA, 22 nt, Human
uccauauagaaaucccgucaga

SEQ ID NO: 343378 - RNA, 23 nt, Human
uccaugaaguaacucaaaaccac

SEQ ID NO: 343379 - RNA, 23 nt, Human
ucucagaaauguaggaaauccau

SEQ ID NO: 343380 - RNA, 21 nt, Human
ucucagaguucuuucacaaac

SEQ ID NO: 343381 - RNA, 20 nt, Human
ucucggcgacaaaaaugggc

SEQ ID NO: 343382 - RNA, 21 nt, Human
ucuuuuuuuuuaaaaaaaauu

SEQ ID NO: 343383 - RNA, 22 nt, Human
ugaaaauaaaugucuugauuuc

SEQ ID NO: 343384 - RNA, 18 nt, Human
ugaaaauacucaaaauag

SEQ ID NO: 343385 - RNA, 22 nt, Human
ugaagugagcugagaaggagca

SEQ ID NO: 343386 - RNA, 19 nt, Human
ugacacacaauuggaaaag

SEQ ID NO: 343387 - RNA, 25 nt, Human
ugacagcauucuauuccaugacugg

SEQ ID NO: 343388 - RNA, 22 nt, Human
ugaggaaacgaaugcaucaacu

SEQ ID NO: 343389 - RNA, 25 nt, Human
ugcaaaaacacucuaguaaaaaacg

SEQ ID NO: 343390 - RNA, 19 nt, Human
ugcauauacuuacacagau

SEQ ID NO: 343391 - RNA, 20 nt, Human
ugcaucaaguauuuacaggc

SEQ ID NO: 343392 - RNA, 21 nt, Human
uggaagagucacucguccugg

SEQ ID NO: 343393 - RNA, 25 nt, Human
uggcaucaguuguuuuaaucccuuc

SEQ ID NO: 343394 - RNA, 23 nt, Human
uggugguguauguccaaguucca

SEQ ID NO: 343395 - RNA, 20 nt, Human
ugguguauguccaaguucca

SEQ ID NO: 343396 - RNA, 24 nt, Human
uucacggaaagcaaauguaaccau

SEQ ID NO: 343397 - RNA, 22 nt, Human
uugaaguugcauaggcauuuuu

SEQ ID NO: 343398 - RNA, 20 nt, Human
uugagaauuuucccuccuuc

SEQ ID NO: 343399 - RNA, 21 nt, Human
uuuaaugccauugccuggauu

SEQ ID NO: 343400 - RNA, 21 nt, Human
uuucauugauuuccaucuugu

SEQ ID NO: 343401 - RNA, 20 nt, Human
uuucucggcgacaaaaaugg

SEQ ID NO: 343402 - RNA, 19 nt, Human
uuucuuuuacauuuccaaa

SEQ ID NO: 343403 - RNA, 20 nt, Human
aaccacuugauggccacaaa

SEQ ID NO: 343404 - RNA, 24 nt, Human
aagaggcuccccuggaaagcaagc

SEQ ID NO: 343405 - RNA, 19 nt, Human
acaaagccagagaccuccc

SEQ ID NO: 343406 - RNA, 19 nt, Human
acaaagccagagaccuccc

SEQ ID NO: 343407 - RNA, 19 nt, Human
acaaagccagagaccuccc

SEQ ID NO: 343408 - RNA, 21 nt, Human
acaaagccagagaccucccag

SEQ ID NO: 343409 - RNA, 21 nt, Human
acaaggccccugguaccaacu

SEQ ID NO: 343410 - RNA, 22 nt, Human
acccacccccagaaaggccacc

SEQ ID NO: 343411 - RNA, 22 nt, Human
acccacccccagaaaggccacc

SEQ ID NO: 343412 - RNA, 21 nt, Human
acccccagaaaggccaccaug

SEQ ID NO: 343413 - RNA, 21 nt, Human
acccccagaaaggccaccaug

SEQ ID NO: 343414 - RNA, 20 nt, Human
acccugaagccuccccaggc

SEQ ID NO: 343415 - RNA, 20 nt, Human
acccugaagccuccccaggc

SEQ ID NO: 343416 - RNA, 22 nt, Human
acccugaagccuccccaggcac

SEQ ID NO: 343417 - RNA, 22 nt, Human
acccugaagccuccccaggcac

SEQ ID NO: 343418 - RNA, 20 nt, Human
acuagcccagaggcugggcu

SEQ ID NO: 343419 - RNA, 20 nt, Human
acuagcccagaggcugggcu

SEQ ID NO: 343420 - RNA, 18 nt, Human
agaaauaagcggaucuga

SEQ ID NO: 343421 - RNA, 19 nt, Human
agagaacagcccaccccag

SEQ ID NO: 343422 - RNA, 22 nt, Human
agaggccccugguaccaacugg

SEQ ID NO: 343423 - RNA, 23 nt, Human
agaggggaggcuugugaugggaa

SEQ ID NO: 343424 - RNA, 22 nt, Human
agcuuccugagucugugugccu

SEQ ID NO: 343425 - RNA, 21 nt, Human
agcuuggguaaugcagaugcc

SEQ ID NO: 343426 - RNA, 21 nt, Human
agcuuggguaaugcagaugcc

SEQ ID NO: 343427 - RNA, 21 nt, Human
aggaggcuuggauggccagga

SEQ ID NO: 343428 - RNA, 25 nt, Human
aggcagagaacagcccaccccaaaa

SEQ ID NO: 343429 - RNA, 18 nt, Human
aggcagagacagccaccc

SEQ ID NO: 343430 - RNA, 18 nt, Human
aggcagagggaagaggac

SEQ ID NO: 343431 - RNA, 18 nt, Human
aggcagagggaagaggac

SEQ ID NO: 343432 - RNA, 24 nt, Human
aggcaggcugcccacaaagccaga

SEQ ID NO: 343433 - RNA, 24 nt, Human
aggcaggcugcccacaaagccaga

SEQ ID NO: 343434 - RNA, 20 nt, Human
aggcucccuggaagcagcag

SEQ ID NO: 343435 - RNA, 18 nt, Human
agggaccagcacccaccc

SEQ ID NO: 343436 - RNA, 18 nt, Human
agggaccagcacccaccc

SEQ ID NO: 343437 - RNA, 19 nt, Human
agggguggguggggugggg

SEQ ID NO: 343438 - RNA, 23 nt, Human
auaacaagcagggcaaggaaccc

SEQ ID NO: 343439 - RNA, 21 nt, Human
aucagggguggggcagggggc

SEQ ID NO: 343440 - RNA, 21 nt, Human
aucagggguggggcagggggc

SEQ ID NO: 343441 - RNA, 20 nt, Human
augcaaccccagcugcccuu

SEQ ID NO: 343442 - RNA, 19 nt, Human
augcggggagggguggguc

SEQ ID NO: 343443 - RNA, 19 nt, Human
caaaauauacuggcagaaa

SEQ ID NO: 343444 - RNA, 21 nt, Human
caaagccagagaccucccagg

SEQ ID NO: 343445 - RNA, 23 nt, Human
caacaggaccgcuugagaggcuc

SEQ ID NO: 343446 - RNA, 19 nt, Human
caaccgacccgaagcacgu

SEQ ID NO: 343447 - RNA, 20 nt, Human
caagaggccccugguaccaa

SEQ ID NO: 343448 - RNA, 22 nt, Human
cacaaagccagagaccucccag

SEQ ID NO: 343449 - RNA, 22 nt, Human
cacaaagccagagaccucccag

SEQ ID NO: 343450 - RNA, 20 nt, Human
cacaguguccgaagcaagac

SEQ ID NO: 343451 - RNA, 20 nt, Human
cacaguguccgaagcaagac

SEQ ID NO: 343452 - RNA, 20 nt, Human
cacaguuucacaggccggag

SEQ ID NO: 343453 - RNA, 20 nt, Human
cacaguuucacaggccggag

SEQ ID NO: 343454 - RNA, 28 nt, Human
caccacccagccucugugggcaccuccu

SEQ ID NO: 343455 - RNA, 28 nt, Human
caccacccagccucugugggcaccuccu

SEQ ID NO: 343456 - RNA, 23 nt, Human
cacccagccucugugggcaccuc

SEQ ID NO: 343457 - RNA, 23 nt, Human
cacccagccucugugggcaccuc

SEQ ID NO: 343458 - RNA, 21 nt, Human
cacccugaagccuccccaggc

SEQ ID NO: 343459 - RNA, 21 nt, Human
cacccugaagccuccccaggc

SEQ ID NO: 343460 - RNA, 18 nt, Human
caccugccaagcacuggc

SEQ ID NO: 343461 - RNA, 22 nt, Human
caccugccaagcacuggccugg

SEQ ID NO: 343462 - RNA, 18 nt, Human
caccuuugucucuggagc

SEQ ID NO: 343463 - RNA, 26 nt, Human
cagagaacagcccaccccaaaaccuu

SEQ ID NO: 343464 - RNA, 22 nt, Human
cagcacccuccccaccuuuguc

SEQ ID NO: 343465 - RNA, 22 nt, Human
cagcacccuccccaccuuuguc

SEQ ID NO: 343466 - RNA, 25 nt, Human
cagcagggcaggaaccuggagagga

SEQ ID NO: 343467 - RNA, 24 nt, Human
cagcccgggaagccccugccucuc

SEQ ID NO: 343468 - RNA, 24 nt, Human
cagcccgggaagccccugccucuc

SEQ ID NO: 343469 - RNA, 21 nt, Human
cagccucugugggcaccuccu

SEQ ID NO: 343470 - RNA, 21 nt, Human
cagccucugugggcaccuccu

SEQ ID NO: 343471 - RNA, 24 nt, Human
cagccucugugggcaccuccuccu

SEQ ID NO: 343472 - RNA, 24 nt, Human
cagccucugugggcaccuccuccu

SEQ ID NO: 343473 - RNA, 22 nt, Human
cagccugggaugggcacagcug

SEQ ID NO: 343474 - RNA, 22 nt, Human
cagccugggaugggcacagcug

SEQ ID NO: 343475 - RNA, 23 nt, Human
cagcuuccugagucugugugccu

SEQ ID NO: 343476 - RNA, 25 nt, Human
caggacaggcagacugugcgggcca

SEQ ID NO: 343477 - RNA, 25 nt, Human
caggacaggcagacugugcgggcca

SEQ ID NO: 343478 - RNA, 24 nt, Human
caggccggagauucugcaaacagg

SEQ ID NO: 343479 - RNA, 24 nt, Human
caggccggagauucugcaaacagg

SEQ ID NO: 343480 - RNA, 21 nt, Human
caggcugcccacaaagccaga

SEQ ID NO: 343481 - RNA, 21 nt, Human
caggcugcccacaaagccaga

SEQ ID NO: 343482 - RNA, 18 nt, Human
cagggcaggaaccuggag

SEQ ID NO: 343483 - RNA, 21 nt, Human
caggggcuggugggccccagg

SEQ ID NO: 343484 - RNA, 22 nt, Human
caguggcaaaggguggugacau

SEQ ID NO: 343485 - RNA, 21 nt, Human
cauccagaagccccagaaagu

SEQ ID NO: 343486 - RNA, 19 nt, Human
caugggcagcagagcuugg

SEQ ID NO: 343487 - RNA, 19 nt, Human
caugggcagcagagcuugg

SEQ ID NO: 343488 - RNA, 23 nt, Human
ccagaaaggccaccaugggcagc

SEQ ID NO: 343489 - RNA, 23 nt, Human
ccagaaaggccaccaugggcagc

SEQ ID NO: 343490 - RNA, 24 nt, Human
ccaggcaggcugcccacaaagcca

SEQ ID NO: 343491 - RNA, 24 nt, Human
ccaggcaggcugcccacaaagcca

SEQ ID NO: 343492 - RNA, 23 nt, Human
cccacggcacacuagcccagagg

SEQ ID NO: 343493 - RNA, 23 nt, Human
cccacggcacacuagcccagagg

SEQ ID NO: 343494 - RNA, 18 nt, Human
cccacggcacacuagccu

SEQ ID NO: 343495 - RNA, 19 nt, Human
ccccaaaaccuuggguggg

SEQ ID NO: 343496 - RNA, 22 nt, Human
ccccacggcacacuagcccaga

SEQ ID NO: 343497 - RNA, 22 nt, Human
ccccacggcacacuagcccaga

SEQ ID NO: 343498 - RNA, 18 nt, Human
ccccagaaaggccaccau

SEQ ID NO: 343499 - RNA, 18 nt, Human
ccccagaaaggccaccau

SEQ ID NO: 343500 - RNA, 19 nt, Human
ccccagaaaggccaccaug

SEQ ID NO: 343501 - RNA, 19 nt, Human
ccccagaaaggccaccaug

SEQ ID NO: 343502 - RNA, 21 nt, Human
cccccagcuuccugagucugu

SEQ ID NO: 343503 - RNA, 25 nt, Human
cccccagcuuccugagucugugugc

SEQ ID NO: 343504 - RNA, 20 nt, Human
cccggccacaguguccgaag

SEQ ID NO: 343505 - RNA, 20 nt, Human
cccggccacaguguccgaag

SEQ ID NO: 343506 - RNA, 20 nt, Human
cccugagagcacagcucagg

SEQ ID NO: 343507 - RNA, 24 nt, Human
cccuucagaaagacggccaacagg

SEQ ID NO: 343508 - RNA, 20 nt, Human
ccgaagcaagacagagcagg

SEQ ID NO: 343509 - RNA, 20 nt, Human
ccgaagcaagacagagcagg

SEQ ID NO: 343510 - RNA, 21 nt, Human
ccgaagcaagacagagcaggg

SEQ ID NO: 343511 - RNA, 21 nt, Human
ccgaagcaagacagagcaggg

SEQ ID NO: 343512 - RNA, 19 nt, Human
ccuccccaggcacaggccc

SEQ ID NO: 343513 - RNA, 19 nt, Human
ccuccugccccacagaggg

SEQ ID NO: 343514 - RNA, 19 nt, Human
ccuccugccccacagaggg

SEQ ID NO: 343515 - RNA, 21 nt, Human
ccugccaagcacuggccuggg

SEQ ID NO: 343516 - RNA, 28 nt, Human
ccugccccacggcacacuagcccagagg

SEQ ID NO: 343517 - RNA, 28 nt, Human
ccugccccacggcacacuagcccagagg

SEQ ID NO: 343518 - RNA, 22 nt, Human
cgaagcacgugagcaaaaccga

SEQ ID NO: 343519 - RNA, 22 nt, Human
cgggacagcagcagcccgggaa

SEQ ID NO: 343520 - RNA, 22 nt, Human
cgggacagcagcagcccgggaa

SEQ ID NO: 343521 - RNA, 24 nt, Human
cuccccaggcacaggcccugaaua

SEQ ID NO: 343522 - RNA, 24 nt, Human
cuccccaggcacaggcccugaaua

SEQ ID NO: 343523 - RNA, 18 nt, Human
cuccuggcuaucaccacc

SEQ ID NO: 343524 - RNA, 18 nt, Human
cuccuggcuaucaccacc

SEQ ID NO: 343525 - RNA, 28 nt, Human
cucugcaccaggcuacagcacauccccc

SEQ ID NO: 343526 - RNA, 28 nt, Human
cucugcaccaggcuacagcacauccccc

SEQ ID NO: 343527 - RNA, 18 nt, Human
cuggagcaccugucaagg

SEQ ID NO: 343528 - RNA, 19 nt, Human
cuggagcagacaucagggg

SEQ ID NO: 343529 - RNA, 19 nt, Human
cuggagcagacaucagggg

SEQ ID NO: 343530 - RNA, 20 nt, Human
cugugugccuggcacuccuc

SEQ ID NO: 343531 - RNA, 19 nt, Human
cuucagaggcggcuggucc

SEQ ID NO: 343532 - RNA, 21 nt, Human
gaagcacgugagcaaaaccga

SEQ ID NO: 343533 - RNA, 24 nt, Human
gacaggcagacugugcgggccagg

SEQ ID NO: 343534 - RNA, 24 nt, Human
gacaggcagacugugcgggccagg

SEQ ID NO: 343535 - RNA, 20 nt, Human
gacaggguaggguggggugg

SEQ ID NO: 343536 - RNA, 20 nt, Human
gacaggguaggguggggugg

SEQ ID NO: 343537 - RNA, 20 nt, Human
gacccgaagcacgugagcaa

SEQ ID NO: 343538 - RNA, 19 nt, Human
gagcaccugucaaggaacu

SEQ ID NO: 343539 - RNA, 21 nt, Human
gagcaccugucaaggaacugg

SEQ ID NO: 343540 - RNA, 18 nt, Human
gagccgcagccucucccu

SEQ ID NO: 343541 - RNA, 20 nt, Human
gagccgcagccucucccugg

SEQ ID NO: 343542 - RNA, 24 nt, Human
gagccuggaggccccagcagggga

SEQ ID NO: 343543 - RNA, 24 nt, Human
gagccuggaggccccagcagggga

SEQ ID NO: 343544 - RNA, 19 nt, Human
gcaaacaggacccacaggg

SEQ ID NO: 343545 - RNA, 19 nt, Human
gcaaacaggacccacaggg

SEQ ID NO: 343546 - RNA, 19 nt, Human
gcaaccccagcugcccuuc

SEQ ID NO: 343547 - RNA, 22 nt, Human
gcaaggaagaggcuccccugga

SEQ ID NO: 343548 - RNA, 23 nt, Human
gcacccacccccagaaaggccac

SEQ ID NO: 343549 - RNA, 23 nt, Human
gcacccacccccagaaaggccac

SEQ ID NO: 343550 - RNA, 24 nt, Human
gcaggcugcccacaaagccagaga

SEQ ID NO: 343551 - RNA, 24 nt, Human
gcaggcugcccacaaagccagaga

SEQ ID NO: 343552 - RNA, 23 nt, Human
gccccacagagggcgggacagca

SEQ ID NO: 343553 - RNA, 23 nt, Human
gccccacagagggcgggacagca

SEQ ID NO: 343554 - RNA, 19 nt, Human
gcccugaauauggaaggag

SEQ ID NO: 343555 - RNA, 19 nt, Human
gcccugaauauggaaggag

SEQ ID NO: 343556 - RNA, 19 nt, Human
gcccugacacccccagcuu

SEQ ID NO: 343557 - RNA, 22 nt, Human
gcccugagagcacagcucaggu

SEQ ID NO: 343558 - RNA, 20 nt, Human
gccuccccaggcacaggccc

SEQ ID NO: 343559 - RNA, 23 nt, Human
gcgggacagcagcagcccgggaa

SEQ ID NO: 343560 - RNA, 23 nt, Human
gcgggacagcagcagcccgggaa

SEQ ID NO: 343561 - RNA, 18 nt, Human
gcuacagcacauccccug

SEQ ID NO: 343562 - RNA, 18 nt, Human
gcuacagcacauccccug

SEQ ID NO: 343563 - RNA, 20 nt, Human
gcugggugggucagccuggg

SEQ ID NO: 343564 - RNA, 18 nt, Human
ggaccagcacccaccccc

SEQ ID NO: 343565 - RNA, 18 nt, Human
ggaccagcacccaccccc

SEQ ID NO: 343566 - RNA, 24 nt, Human
ggagagggcucucauccagaagcc

SEQ ID NO: 343567 - RNA, 18 nt, Human
ggaggcagagggaagagg

SEQ ID NO: 343568 - RNA, 18 nt, Human
ggaggcagagggaagagg

SEQ ID NO: 343569 - RNA, 20 nt, Human
ggaggcagagggaagaggac

SEQ ID NO: 343570 - RNA, 24 nt, Human
ggagguuccugaggcccugagagc

SEQ ID NO: 343571 - RNA, 24 nt, Human
ggagguuccugaggcccugagagc

SEQ ID NO: 343572 - RNA, 20 nt, Human
ggcagaaauaagcggaucug

SEQ ID NO: 343573 - RNA, 24 nt, Human
ggcaggggcuggugggccccaggg

SEQ ID NO: 343574 - RNA, 19 nt, Human
ggcccuggggaaagugguc

SEQ ID NO: 343575 - RNA, 22 nt, Human
ggcuacagcacauccccugccc

SEQ ID NO: 343576 - RNA, 22 nt, Human
ggcuacagcacauccccugccc

SEQ ID NO: 343577 - RNA, 20 nt, Human
gggaaaguggucaaggcaga

SEQ ID NO: 343578 - RNA, 20 nt, Human
gggaaaguggucaggcagag

SEQ ID NO: 343579 - RNA, 19 nt, Human
gggaggcagagggaagagg

SEQ ID NO: 343580 - RNA, 19 nt, Human
gggaggcagagggaagagg

SEQ ID NO: 343581 - RNA, 21 nt, Human
gggaggcagagggaagaggac

SEQ ID NO: 343582 - RNA, 19 nt, Human
gggcaaggaagaggcuccc

SEQ ID NO: 343583 - RNA, 28 nt, Human
gggcaggaaccuggagaggaggcuugga

SEQ ID NO: 343584 - RNA, 18 nt, Human
gggcuggugggccccagg

SEQ ID NO: 343585 - RNA, 22 nt, Human
ggggaggggugggugggguggg

SEQ ID NO: 343586 - RNA, 21 nt, Human
ggggcagggggcagggaccag

SEQ ID NO: 343587 - RNA, 21 nt, Human
ggggcagggggcagggaccag

SEQ ID NO: 343588 - RNA, 18 nt, Human
gggguggggcagggggca

SEQ ID NO: 343589 - RNA, 18 nt, Human
gggguggggcagggggca

SEQ ID NO: 343590 - RNA, 19 nt, Human
gggguggguggggugggga

SEQ ID NO: 343591 - RNA, 18 nt, Human
ggguggguggggugggga

SEQ ID NO: 343592 - RNA, 18 nt, Human
ggugggaggcagagggaa

SEQ ID NO: 343593 - RNA, 18 nt, Human
ggugggaggcagagggaa

SEQ ID NO: 343594 - RNA, 20 nt, Human
ggugggguggucugugagcc

SEQ ID NO: 343595 - RNA, 20 nt, Human
ggugggguggucugugagcc

SEQ ID NO: 343596 - RNA, 21 nt, Human
gugggguggggagagggcucu

SEQ ID NO: 343597 - RNA, 21 nt, Human
ucaaggcagagaacagcccac

SEQ ID NO: 343598 - RNA, 20 nt, Human
uccacacgccugggcgcccg

SEQ ID NO: 343599 - RNA, 25 nt, Human
ucccacggccccacauggaggaacu

SEQ ID NO: 343600 - RNA, 19 nt, Human
uccccaggcacaggcccug

SEQ ID NO: 343601 - RNA, 19 nt, Human
uccccaggcacaggcccug

SEQ ID NO: 343602 - RNA, 21 nt, Human
uccccaggcacaggcccugaa

SEQ ID NO: 343603 - RNA, 21 nt, Human
uccccaggcacaggcccugaa

SEQ ID NO: 343604 - RNA, 18 nt, Human
ucccugagcaccugccaa

SEQ ID NO: 343605 - RNA, 18 nt, Human
ucugcaaacaggacccac

SEQ ID NO: 343606 - RNA, 18 nt, Human
ucugcaaacaggacccac

SEQ ID NO: 343607 - RNA, 23 nt, Human
ucugcaaacaggacccacagggc

SEQ ID NO: 343608 - RNA, 23 nt, Human
ucugcaaacaggacccacagggc

SEQ ID NO: 343609 - RNA, 21 nt, Human
ugagcaaaaccgaccagggug

SEQ ID NO: 343610 - RNA, 22 nt, Human
ugaggcccugagagcacagcuc

SEQ ID NO: 343611 - RNA, 22 nt, Human
ugaggcccugagagcacagcuc

SEQ ID NO: 343612 - RNA, 18 nt, Human
ugaguggaggcaagaggc

SEQ ID NO: 343613 - RNA, 18 nt, Human
ugaguggaggcacaaggc

SEQ ID NO: 343614 - RNA, 21 nt, Human
ugcaaacaggacccacagggc

SEQ ID NO: 343615 - RNA, 21 nt, Human
ugcaaacaggacccacagggc

SEQ ID NO: 343616 - RNA, 22 nt, Human
ugcagaugccagcccaucuccu

SEQ ID NO: 343617 - RNA, 22 nt, Human
ugcagaugccagcccaucuccu

SEQ ID NO: 343618 - RNA, 18 nt, Human
ugccaagcacuggccugg

SEQ ID NO: 343619 - RNA, 25 nt, Human
ugccagcccaucuccuggcuaucac

SEQ ID NO: 343620 - RNA, 25 nt, Human
ugccagcccaucuccuggcuaucac

SEQ ID NO: 343621 - RNA, 18 nt, Human
ugccccacagagggcggg

SEQ ID NO: 343622 - RNA, 18 nt, Human
ugccccacagagggcggg

SEQ ID NO: 343623 - RNA, 18 nt, Human
ugcccugacacccccagc

SEQ ID NO: 343624 - RNA, 24 nt, Human
ugcccugacacccccagcuuccug

SEQ ID NO: 343625 - RNA, 21 nt, Human
uggaaagcaagcaaccacuug

SEQ ID NO: 343626 - RNA, 20 nt, Human
uggaagcagcagcacugaug

SEQ ID NO: 343627 - RNA, 21 nt, Human
uggaauaacaagcagggcaag

SEQ ID NO: 343628 - RNA, 23 nt, Human
uggaauaacaagcagggcaagga

SEQ ID NO: 343629 - RNA, 22 nt, Human
uggaggccccagcaggggagca

SEQ ID NO: 343630 - RNA, 22 nt, Human
uggaggccccagcaggggagca

SEQ ID NO: 343631 - RNA, 18 nt, Human
uggauggccaggaaggcu

SEQ ID NO: 343632 - RNA, 23 nt, Human
ugggaggaaagacgcaaggcugg

SEQ ID NO: 343633 - RNA, 21 nt, Human
ugggcaaggacaggguagggu

SEQ ID NO: 343634 - RNA, 21 nt, Human
ugggcaaggacaggguagggu

SEQ ID NO: 343635 - RNA, 19 nt, Human
ugggcaccuccuccugccc

SEQ ID NO: 343636 - RNA, 19 nt, Human
ugggcaccuccuccugccc

SEQ ID NO: 343637 - RNA, 22 nt, Human
ugggcucggguccacacgccug

SEQ ID NO: 343638 - RNA, 24 nt, Human
uggggaaaguggucaggcagagac

SEQ ID NO: 343639 - RNA, 19 nt, Human
uggggcagggggcagggac

SEQ ID NO: 343640 - RNA, 19 nt, Human
uggggcagggggcagggac

SEQ ID NO: 343641 - RNA, 19 nt, Human
ugggugggguggggagagg

SEQ ID NO: 343642 - RNA, 20 nt, Human
uggguggguggauacauuua

SEQ ID NO: 343643 - RNA, 18 nt, Human
ugguagaggggaggcuug

SEQ ID NO: 343644 - RNA, 19 nt, Human
ugguagaggggaggcuugu

SEQ ID NO: 343645 - RNA, 19 nt, Human
uggucaaggcagagaacag

SEQ ID NO: 343646 - RNA, 21 nt, Human
uuaaugauuauaaagugucca

SEQ ID NO: 343647 - RNA, 27 nt, Human
uuccauggcccccuucugggguugggg

SEQ ID NO: 343648 - RNA, 27 nt, Human
uuccauggcccccuucugggguugggg

SEQ ID NO: 343649 - RNA, 26 nt, Human
uugggcaaggacaggguagggugggg

SEQ ID NO: 343650 - RNA, 26 nt, Human
uugggcaaggacaggguagggugggg

SEQ ID NO: 343651 - RNA, 24 nt, Human
aaaaaugcuauauaacaaaaccau

SEQ ID NO: 343652 - RNA, 19 nt, Human
aaacauuagcugucagcuc

SEQ ID NO: 343653 - RNA, 22 nt, Human
aaacugcauggcaggucuggga

SEQ ID NO: 343654 - RNA, 18 nt, Human
aaagccccaaaauuccaa

SEQ ID NO: 343655 - RNA, 22 nt, Human
aaagugcugagguuguaacaga

SEQ ID NO: 343656 - RNA, 23 nt, Human
aaagugcugagguuguaacagaa

SEQ ID NO: 343657 - RNA, 18 nt, Human
aacaggccaucaaguacc

SEQ ID NO: 343658 - RNA, 20 nt, Human
aacagugggcucaguccccc

SEQ ID NO: 343659 - RNA, 23 nt, Human
aacaguucuuaagucaauaucca

SEQ ID NO: 343660 - RNA, 18 nt, Human
aacccaggagaaguccag

SEQ ID NO: 343661 - RNA, 20 nt, Human
aaggagacacaggggcuugg

SEQ ID NO: 343662 - RNA, 25 nt, Human
aaggaguggggugacuuuaggccua

SEQ ID NO: 343663 - RNA, 20 nt, Human
aaguccagggagcaggggac

SEQ ID NO: 343664 - RNA, 20 nt, Human
aaucauggcuuaauaauuua

SEQ ID NO: 343665 - RNA, 20 nt, Human
aauggugagggugggaagga

SEQ ID NO: 343666 - RNA, 22 nt, Human
aauuucuuuggagagucacccu

SEQ ID NO: 343667 - RNA, 25 nt, Human
acaaaaccauagaaaugagcacacu

SEQ ID NO: 343668 - RNA, 23 nt, Human
acaaugaaauauuauacaaccau

SEQ ID NO: 343669 - RNA, 21 nt, Human
acacacaggacaaaucugaac

SEQ ID NO: 343670 - RNA, 18 nt, Human
acagaacacggccccucu

SEQ ID NO: 343671 - RNA, 21 nt, Human
accauagaaaugagcacacua

SEQ ID NO: 343672 - RNA, 25 nt, Human
acccuggacccagagaaccuggcug

SEQ ID NO: 343673 - RNA, 19 nt, Human
acugaaaugaggaaaucca

SEQ ID NO: 343674 - RNA, 19 nt, Human
acuggagaguacccuugga

SEQ ID NO: 343675 - RNA, 23 nt, Human
acuuccuauuugaccaacaggcc

SEQ ID NO: 343676 - RNA, 24 nt, Human
acuuccuuuccccaccucacugac

SEQ ID NO: 343677 - RNA, 18 nt, Human
agaaagccccaaaauucc

SEQ ID NO: 343678 - RNA, 20 nt, Human
agagcggucaugcucccuca

SEQ ID NO: 343679 - RNA, 23 nt, Human
agaggcaaauggaauucuuagaa

SEQ ID NO: 343680 - RNA, 20 nt, Human
aggacaaaucugaacacugg

SEQ ID NO: 343681 - RNA, 24 nt, Human
agggaaucugacggggggcuucug

SEQ ID NO: 343682 - RNA, 18 nt, Human
aggugcaggcacuaagga

SEQ ID NO: 343683 - RNA, 20 nt, Human
aguagccaaaccuucauuac

SEQ ID NO: 343684 - RNA, 18 nt, Human
aguccucuuccuaacagu

SEQ ID NO: 343685 - RNA, 20 nt, Human
auauuauacaaccaugagaa

SEQ ID NO: 343686 - RNA, 22 nt, Human
aucaucgcaauccccaguuccg

SEQ ID NO: 343687 - RNA, 19 nt, Human
aucguggugaggugcaggc

SEQ ID NO: 343688 - RNA, 18 nt, Human
augcgcuuagaacucagg

SEQ ID NO: 343689 - RNA, 20 nt, Human
caaaaugcaauaaauugcua

SEQ ID NO: 343690 - RNA, 18 nt, Human
caaaccagacagaacuaa

SEQ ID NO: 343691 - RNA, 19 nt, Human
caaagagaguuaacaaaac

SEQ ID NO: 343692 - RNA, 25 nt, Human
caacaggccaucaaguaccacaggc

SEQ ID NO: 343693 - RNA, 25 nt, Human
caauccagccauguucccagaucaa

SEQ ID NO: 343694 - RNA, 23 nt, Human
cacaaugaaauauuauacaacca

SEQ ID NO: 343695 - RNA, 20 nt, Human
cacacacaggacaaaucuga

SEQ ID NO: 343696 - RNA, 24 nt, Human
cacacauccagcacagccaaacgc

SEQ ID NO: 343697 - RNA, 20 nt, Human
cacagguuagaacacggcuc

SEQ ID NO: 343698 - RNA, 19 nt, Human
cacccuggacccagagaac

SEQ ID NO: 343699 - RNA, 24 nt, Human
cacuaagcuaaaaaacaggcugaa

SEQ ID NO: 343700 - RNA, 18 nt, Human
cacugagcuugcagcaac

SEQ ID NO: 343701 - RNA, 23 nt, Human
cacugugcuggcaaucuaccuuu

SEQ ID NO: 343702 - RNA, 22 nt, Human
cacuuacauucaacuguacaga

SEQ ID NO: 343703 - RNA, 24 nt, Human
cagaaggaacugaaaugaggaaau

SEQ ID NO: 343704 - RNA, 22 nt, Human
cagacagcaaauguugaauuuc

SEQ ID NO: 343705 - RNA, 22 nt, Human
cagaggucccaacucauucuua

SEQ ID NO: 343706 - RNA, 24 nt, Human
cagccaaacuggagaguacccuug

SEQ ID NO: 343707 - RNA, 18 nt, Human
cagcgccugcaggugugg

SEQ ID NO: 343708 - RNA, 19 nt, Human
cagcgccugcagguguggc

SEQ ID NO: 343709 - RNA, 21 nt, Human
caggacagaacacggccccuc

SEQ ID NO: 343710 - RNA, 20 nt, Human
caggcugcagaaggaacuga

SEQ ID NO: 343711 - RNA, 21 nt, Human
cauaauggcacuaagcuaaaa

SEQ ID NO: 343712 - RNA, 20 nt, Human
cauccugcacauuuagaauu

SEQ ID NO: 343713 - RNA, 22 nt, Human
caugaaccaacacuuucaauga

SEQ ID NO: 343714 - RNA, 20 nt, Human
cauggcugagcaagcuuugu

SEQ ID NO: 343715 - RNA, 22 nt, Human
cauuuagaauuaaaaucaacag

SEQ ID NO: 343716 - RNA, 22 nt, Human
ccaaaaugacuuaaggcaaaaa

SEQ ID NO: 343717 - RNA, 24 nt, Human
cccaaagaauucaacaucagcauu

SEQ ID NO: 343718 - RNA, 21 nt, Human
ccccaaaauuccaaaauucua

SEQ ID NO: 343719 - RNA, 19 nt, Human
ccccagagcaucuucucag

SEQ ID NO: 343720 - RNA, 20 nt, Human
ccccucugggacuacugccu

SEQ ID NO: 343721 - RNA, 24 nt, Human
ccucucccugccaugcaggcuaaa

SEQ ID NO: 343722 - RNA, 23 nt, Human
ccugacaccaacaacagugggcu

SEQ ID NO: 343723 - RNA, 19 nt, Human
ccugaccaauauacuccca

SEQ ID NO: 343724 - RNA, 21 nt, Human
ccugaccaauauacucccaac

SEQ ID NO: 343725 - RNA, 21 nt, Human
cguggaagagguuucaggcua

SEQ ID NO: 343726 - RNA, 19 nt, Human
cucaauugcucugcuucau

SEQ ID NO: 343727 - RNA, 25 nt, Human
cucacagaauugcaauacuuuccac

SEQ ID NO: 343728 - RNA, 21 nt, Human
cucacugugcuggcaaucuac

SEQ ID NO: 343729 - RNA, 22 nt, Human
cugaacacaagccacuagugcu

SEQ ID NO: 343730 - RNA, 24 nt, Human
cugacagugcccugggauccaguc

SEQ ID NO: 343731 - RNA, 21 nt, Human
cugacggggggcuucuggggu

SEQ ID NO: 343732 - RNA, 20 nt, Human
cuggauacucgacucaaaac

SEQ ID NO: 343733 - RNA, 20 nt, Human
cugguaacacuuuguggaga

SEQ ID NO: 343734 - RNA, 23 nt, Human
cuugaaguuguacaguacccaau

SEQ ID NO: 343735 - RNA, 22 nt, Human
cuugcucucugcuccuuucugu

SEQ ID NO: 343736 - RNA, 21 nt, Human
gaaaaagaaauucccaaagag

SEQ ID NO: 343737 - RNA, 18 nt, Human
gaaauauuauacaaccau

SEQ ID NO: 343738 - RNA, 20 nt, Human
gaaugaaaacgaaccugcau

SEQ ID NO: 343739 - RNA, 22 nt, Human
gaccaauauacucccaacucug

SEQ ID NO: 343740 - RNA, 20 nt, Human
gagucaucugggcugacacc

SEQ ID NO: 343741 - RNA, 24 nt, Human
gcacaacccaggagaaggggaacc

SEQ ID NO: 343742 - RNA, 22 nt, Human
gcaggacagaacacggccccuc

SEQ ID NO: 343743 - RNA, 22 nt, Human
gcagggccaagccugauggugc

SEQ ID NO: 343744 - RNA, 18 nt, Human
gcaguauuacuuauuucc

SEQ ID NO: 343745 - RNA, 24 nt, Human
gccucuauuuugcagacccuagag

SEQ ID NO: 343746 - RNA, 18 nt, Human
gcucaaggaggaaggugg

SEQ ID NO: 343747 - RNA, 23 nt, Human
ggagagucacccuggacccagag

SEQ ID NO: 343748 - RNA, 19 nt, Human
ggaugggggagcaggcugg

SEQ ID NO: 343749 - RNA, 19 nt, Human
gggccuggucccuggauuu

SEQ ID NO: 343750 - RNA, 18 nt, Human
ggggagggggguguaggg

SEQ ID NO: 343751 - RNA, 21 nt, Human
ggggagggggguguagggugg

SEQ ID NO: 343752 - RNA, 19 nt, Human
guauuacuuauuuccaaaa

SEQ ID NO: 343753 - RNA, 18 nt, Human
guccaagguauguugccc

SEQ ID NO: 343754 - RNA, 20 nt, Human
gucccuggauuuggccuccu

SEQ ID NO: 343755 - RNA, 20 nt, Human
gugaagaauuuagcaaagug

SEQ ID NO: 343756 - RNA, 22 nt, Human
gugacucugcagagucacuccc

SEQ ID NO: 343757 - RNA, 23 nt, Human
uaaauugcuaaaauuuuagcuaa

SEQ ID NO: 343758 - RNA, 25 nt, Human
uaacuucagcaauacauauugaaca

SEQ ID NO: 343759 - RNA, 18 nt, Human
uaagaucauagaggcaaa

SEQ ID NO: 343760 - RNA, 22 nt, Human
uaagucaauauccagaaacuua

SEQ ID NO: 343761 - RNA, 19 nt, Human
uacacaagugacaacuuua

SEQ ID NO: 343762 - RNA, 20 nt, Human
uacacaaguguaguagccuu

SEQ ID NO: 343763 - RNA, 23 nt, Human
uacagaccauuaaauguugaaaa

SEQ ID NO: 343764 - RNA, 27 nt, Human
uacauggcaucagauggugagaauauu

SEQ ID NO: 343765 - RNA, 18 nt, Human
uacccaauagguucacac

SEQ ID NO: 343766 - RNA, 20 nt, Human
uaccuggccaucucauggcu

SEQ ID NO: 343767 - RNA, 23 nt, Human
uacgaagaaugcauaauuccauu

SEQ ID NO: 343768 - RNA, 23 nt, Human
uacuugaauacaaaucaaaauga

SEQ ID NO: 343769 - RNA, 23 nt, Human
uagaauaccgaacauuuagacua

SEQ ID NO: 343770 - RNA, 23 nt, Human
uagaauauucacacuggcauuuu

SEQ ID NO: 343771 - RNA, 20 nt, Human
uagaauuaaaaucaacagac

SEQ ID NO: 343772 - RNA, 19 nt, Human
uaggccuacaugggagcag

SEQ ID NO: 343773 - RNA, 20 nt, Human
uaguagccuuugcacugguu

SEQ ID NO: 343774 - RNA, 22 nt, Human
uauggcaccauuuguucaauga

SEQ ID NO: 343775 - RNA, 20 nt, Human
uauugcuuauuucugaagug

SEQ ID NO: 343776 - RNA, 25 nt, Human
uccaaaaugacuuaaggcaaaaaga

SEQ ID NO: 343777 - RNA, 22 nt, Human
uccaccuuggugaucggagagg

SEQ ID NO: 343778 - RNA, 28 nt, Human
ucccacagaagugguuaaaaacugccag

SEQ ID NO: 343779 - RNA, 20 nt, Human
ucccagaucaaucaucgcaa

SEQ ID NO: 343780 - RNA, 19 nt, Human
uccccaaaccagacagaac

SEQ ID NO: 343781 - RNA, 18 nt, Human
uccccagagcaucuucuc

SEQ ID NO: 343782 - RNA, 24 nt, Human
ucucuaacccccucuuucaacaaa

SEQ ID NO: 343783 - RNA, 20 nt, Human
ucuuuggagagucacccugg

SEQ ID NO: 343784 - RNA, 18 nt, Human
ugaaaagaaaccagauac

SEQ ID NO: 343785 - RNA, 20 nt, Human
ugaagaaagguaaauguguc

SEQ ID NO: 343786 - RNA, 22 nt, Human
ugaaggcacagcagggccaagc

SEQ ID NO: 343787 - RNA, 24 nt, Human
ugacaccauuuacaaaccuuuccu

SEQ ID NO: 343788 - RNA, 19 nt, Human
ugacggggggcuucugggg

SEQ ID NO: 343789 - RNA, 22 nt, Human
ugagauuuugguaucacagaaa

SEQ ID NO: 343790 - RNA, 19 nt, Human
ugagcaagcuuugucuucu

SEQ ID NO: 343791 - RNA, 20 nt, Human
ugagcaagcuuugucuucuu

SEQ ID NO: 343792 - RNA, 23 nt, Human
ugaggagggggugugaaaauccu

SEQ ID NO: 343793 - RNA, 21 nt, Human
ugagggugggaagagaauccc

SEQ ID NO: 343794 - RNA, 21 nt, Human
ugcaacucuaacaccaugaac

SEQ ID NO: 343795 - RNA, 19 nt, Human
ugcagaaggaacugaaaug

SEQ ID NO: 343796 - RNA, 26 nt, Human
ugcaggugguggaugggucgggcgcu

SEQ ID NO: 343797 - RNA, 24 nt, Human
ugccaugcaggcuaaacuagauuu

SEQ ID NO: 343798 - RNA, 21 nt, Human
ugcccugggauccaguccugu

SEQ ID NO: 343799 - RNA, 22 nt, Human
ugcuaaaaaguuugcaacucua

SEQ ID NO: 343800 - RNA, 19 nt, Human
uggaaaagcagucaguuac

SEQ ID NO: 343801 - RNA, 20 nt, Human
uggaauucuuagaacauuac

SEQ ID NO: 343802 - RNA, 21 nt, Human
uggaggaagaacugauaaggc

SEQ ID NO: 343803 - RNA, 24 nt, Human
uggagggcaggcccagcuugagga

SEQ ID NO: 343804 - RNA, 20 nt, Human
uggauguccugugcuuccuu

SEQ ID NO: 343805 - RNA, 23 nt, Human
uggcagcauccugcacauuuaga

SEQ ID NO: 343806 - RNA, 25 nt, Human
uggcuccaguaagccucccugacac

SEQ ID NO: 343807 - RNA, 21 nt, Human
uggcuggguacugaaggcaca

SEQ ID NO: 343808 - RNA, 20 nt, Human
ugggaaacucacugugcugg

SEQ ID NO: 343809 - RNA, 18 nt, Human
ugggaagaguuuaguugc

SEQ ID NO: 343810 - RNA, 21 nt, Human
uggugaaaagaaaccagauac

SEQ ID NO: 343811 - RNA, 19 nt, Human
uguaugcacgugcuccacu

SEQ ID NO: 343812 - RNA, 23 nt, Human
ugucaaggaagaguccuacuagc

SEQ ID NO: 343813 - RNA, 20 nt, Human
ugucagagggcggggaauga

SEQ ID NO: 343814 - RNA, 23 nt, Human
ugugcaacaugucuacaugggag

SEQ ID NO: 343815 - RNA, 19 nt, Human
uguggagauucacaggcug

SEQ ID NO: 343816 - RNA, 21 nt, Human
uguggaugggggagcaggcug

SEQ ID NO: 343817 - RNA, 22 nt, Human
uuaaaaacugccagcuccucuc

SEQ ID NO: 343818 - RNA, 24 nt, Human
uuagaacacggcucccacagaagu

SEQ ID NO: 343819 - RNA, 24 nt, Human
uuauuaccuguuaauuaagaccag

SEQ ID NO: 343820 - RNA, 19 nt, Human
uucuaaccagcuccugaau

SEQ ID NO: 343821 - RNA, 23 nt, Human
uugaagaguacuugaauacaaau

SEQ ID NO: 343822 - RNA, 25 nt, Human
uugcagcaacaggugcucuuccccu

SEQ ID NO: 343823 - RNA, 18 nt, Human
uugcucugcuucauucuu

SEQ ID NO: 343824 - RNA, 21 nt, Human
uugguggugccuaucugauuu

SEQ ID NO: 343825 - RNA, 21 nt, Human
uuugugcaggacagaacacgg

SEQ ID NO: 343826 - RNA, 22 nt, Human
aagaaaaaggacagaaagagaa

SEQ ID NO: 343827 - RNA, 21 nt, Human
aagaacaaucagaaugccagc

SEQ ID NO: 343828 - RNA, 19 nt, Human
accagagcagaggcccaag

SEQ ID NO: 343829 - RNA, 18 nt, Human
agaaaaaagaagagcauc

SEQ ID NO: 343830 - RNA, 18 nt, Human
agaaagagaaaaaagaag

SEQ ID NO: 343831 - RNA, 24 nt, Human
agcaagaaaaaggacagaaagaga

SEQ ID NO: 343832 - RNA, 20 nt, Human
aggcaggggccaugcacacg

SEQ ID NO: 343833 - RNA, 22 nt, Human
auuugggaacaaacaauuauuc

SEQ ID NO: 343834 - RNA, 21 nt, Human
cagagcagaggcccaagaguc

SEQ ID NO: 343835 - RNA, 24 nt, Human
cccaccagagcagaggcccaagag

SEQ ID NO: 343836 - RNA, 22 nt, Human
ccugaaaaaagaacaaucagaa

SEQ ID NO: 343837 - RNA, 21 nt, Human
ccugcagccuguagcggggag

SEQ ID NO: 343838 - RNA, 20 nt, Human
ccuguagcggggagagcugu

SEQ ID NO: 343839 - RNA, 20 nt, Human
gagaaaaaagaagagcauca

SEQ ID NO: 343840 - RNA, 19 nt, Human
gagcaucaguccucuccac

SEQ ID NO: 343841 - RNA, 22 nt, Human
gcaagaaaaaggacagaaagag

SEQ ID NO: 343842 - RNA, 23 nt, Human
ggacagaaagagaaaaaagaaga

SEQ ID NO: 343843 - RNA, 22 nt, Human
uaaaccugaaaaaagaacaauc

SEQ ID NO: 343844 - RNA, 20 nt, Human
uaagcuagagaauagauuau

SEQ ID NO: 343845 - RNA, 23 nt, Human
ucaguccucuccacuucuuccca

SEQ ID NO: 343846 - RNA, 23 nt, Human
ugaggggauauaaacuccaggaa

SEQ ID NO: 343847 - RNA, 19 nt, Human
uggagagccugaagaggca

SEQ ID NO: 343848 - RNA, 19 nt, Human
uggggaggagaauacccgc

SEQ ID NO: 343849 - RNA, 20 nt, Human
aacugaggcugccaacccca

SEQ ID NO: 343850 - RNA, 25 nt, Human
acaaccauccucucccugugucccc

SEQ ID NO: 343851 - RNA, 20 nt, Human
accugcacccccgauggcgc

SEQ ID NO: 343852 - RNA, 20 nt, Human
agagcccaggggaggggcuu

SEQ ID NO: 343853 - RNA, 19 nt, Human
agcaggcgggcucggagcc

SEQ ID NO: 343854 - RNA, 20 nt, Human
agcgggggcggcggcgcggg

SEQ ID NO: 343855 - RNA, 21 nt, Human
aggaagcuacaagagacaggc

SEQ ID NO: 343856 - RNA, 19 nt, Human
aggcgaaggcgcagggcgu

SEQ ID NO: 343857 - RNA, 21 nt, Human
aggcgggcagcgggggcggcg

SEQ ID NO: 343858 - RNA, 23 nt, Human
aggcgggcagcgggggcggcggc

SEQ ID NO: 343859 - RNA, 23 nt, Human
aggugcacuucacggcaggugug

SEQ ID NO: 343860 - RNA, 24 nt, Human
caaccauccucucccugugucccc

SEQ ID NO: 343861 - RNA, 21 nt, Human
caacugaggcugccaacccca

SEQ ID NO: 343862 - RNA, 26 nt, Human
caacugaggcugccaaccccaggggc

SEQ ID NO: 343863 - RNA, 19 nt, Human
caggcucuggccgccucuc

SEQ ID NO: 343864 - RNA, 24 nt, Human
caucacagcagucccaggcuggag

SEQ ID NO: 343865 - RNA, 18 nt, Human
ccacacucucccuggguc

SEQ ID NO: 343866 - RNA, 18 nt, Human
ccaggggccaacugaggc

SEQ ID NO: 343867 - RNA, 19 nt, Human
ccaggggcggggugcaggg

SEQ ID NO: 343868 - RNA, 19 nt, Human
ccagguccacaggucucug

SEQ ID NO: 343869 - RNA, 21 nt, Human
ccagguccacaggucucugcc

SEQ ID NO: 343870 - RNA, 21 nt, Human
ccauagggcugcuggggcccu

SEQ ID NO: 343871 - RNA, 22 nt, Human
ccccagggacaaccauccucuc

SEQ ID NO: 343872 - RNA, 23 nt, Human
ccccagggacaaccauccucucc

SEQ ID NO: 343873 - RNA, 24 nt, Human
ccccaggggcggggugcagggcug

SEQ ID NO: 343874 - RNA, 18 nt, Human
ccccggcccgggggcgga

SEQ ID NO: 343875 - RNA, 18 nt, Human
cccuggguccugggacuc

SEQ ID NO: 343876 - RNA, 20 nt, Human
cccuguguccccugcccccc

SEQ ID NO: 343877 - RNA, 27 nt, Human
ccucggggaaggcgggcagcgggggcg

SEQ ID NO: 343878 - RNA, 21 nt, Human
ccucugccaggggccaacuga

SEQ ID NO: 343879 - RNA, 22 nt, Human
ccugcagcucgggcggcagcgu

SEQ ID NO: 343880 - RNA, 23 nt, Human
ccuguccccacacucucccuggg

SEQ ID NO: 343881 - RNA, 20 nt, Human
ccugugccucccaccccagg

SEQ ID NO: 343882 - RNA, 22 nt, Human
ccugugccucccaccccaggaa

SEQ ID NO: 343883 - RNA, 18 nt, Human
cgcaggaugaccuggaag

SEQ ID NO: 343884 - RNA, 20 nt, Human
cgggcagcgggggcggcggc

SEQ ID NO: 343885 - RNA, 25 nt, Human
cgggggcggcggcgcgggccccggc

SEQ ID NO: 343886 - RNA, 22 nt, Human
cucccaccccaggaagcuacaa

SEQ ID NO: 343887 - RNA, 24 nt, Human
cuccccauucucccugccugggag

SEQ ID NO: 343888 - RNA, 20 nt, Human
cucuggccgccucucccagc

SEQ ID NO: 343889 - RNA, 21 nt, Human
cugccaggggccaacugaggc

SEQ ID NO: 343890 - RNA, 23 nt, Human
cuggaagggcuggugcgccugca

SEQ ID NO: 343891 - RNA, 22 nt, Human
cuguccccacacucucccuggg

SEQ ID NO: 343892 - RNA, 20 nt, Human
cuguccuguccccacacucu

SEQ ID NO: 343893 - RNA, 19 nt, Human
cugugccucccaccccagg

SEQ ID NO: 343894 - RNA, 18 nt, Human
gaccuggaagggcuggug

SEQ ID NO: 343895 - RNA, 27 nt, Human
gagagcccaggggaggggcuugugggc

SEQ ID NO: 343896 - RNA, 25 nt, Human
gagcccaggggaggggcuugugggc

SEQ ID NO: 343897 - RNA, 19 nt, Human
gagccgggcgccucgggga

SEQ ID NO: 343898 - RNA, 23 nt, Human
gcacccccgauggcgccuugacg

SEQ ID NO: 343899 - RNA, 18 nt, Human
gcacuucacggcaggugu

SEQ ID NO: 343900 - RNA, 20 nt, Human
gcagggacagcacagccugg

SEQ ID NO: 343901 - RNA, 19 nt, Human
gccauaggucagcucuggg

SEQ ID NO: 343902 - RNA, 20 nt, Human
gccugggcccccggcagaca

SEQ ID NO: 343903 - RNA, 19 nt, Human
gcgcagccauaggucagcu

SEQ ID NO: 343904 - RNA, 20 nt, Human
gcgcagccauaggucagcuc

SEQ ID NO: 343905 - RNA, 18 nt, Human
gcgccugcagcucgggcg

SEQ ID NO: 343906 - RNA, 20 nt, Human
gcgggcagcgggggcggcgg

SEQ ID NO: 343907 - RNA, 21 nt, Human
gcugccaaccccaggggcggg

SEQ ID NO: 343908 - RNA, 24 nt, Human
ggaagggcuggugcgccugcagcu

SEQ ID NO: 343909 - RNA, 20 nt, Human
ggagagcccaggggaggggc

SEQ ID NO: 343910 - RNA, 22 nt, Human
ggcaggugcuggcauccggggc

SEQ ID NO: 343911 - RNA, 22 nt, Human
ggcccgggggcggagaaggcga

SEQ ID NO: 343912 - RNA, 24 nt, Human
ggcggcggcgcgggccccggcccg

SEQ ID NO: 343913 - RNA, 19 nt, Human
gggaaugucuguguccuug

SEQ ID NO: 343914 - RNA, 18 nt, Human
gggaggggcuugugggcc

SEQ ID NO: 343915 - RNA, 20 nt, Human
gggcagagcucauggccaga

SEQ ID NO: 343916 - RNA, 21 nt, Human
gggccagagggcccuccccag

SEQ ID NO: 343917 - RNA, 23 nt, Human
gggccagagggcccuccccaggg

SEQ ID NO: 343918 - RNA, 23 nt, Human
gggcggcggcgcgggccccggcc

SEQ ID NO: 343919 - RNA, 23 nt, Human
ggggcggcggcgcgggccccggc

SEQ ID NO: 343920 - RNA, 23 nt, Human
ggucgagggucagcccgccaaca

SEQ ID NO: 343921 - RNA, 21 nt, Human
guccuuguuccucugccagga

SEQ ID NO: 343922 - RNA, 18 nt, Human
gugcgggcuggccccagg

SEQ ID NO: 343923 - RNA, 23 nt, Human
guggugucugggaggucgagggu

SEQ ID NO: 343924 - RNA, 20 nt, Human
uaccgcaggaugaccuggaa

SEQ ID NO: 343925 - RNA, 21 nt, Human
uccacaggucucugccagaca

SEQ ID NO: 343926 - RNA, 23 nt, Human
ucccaggcuggaggccccaggcu

SEQ ID NO: 343927 - RNA, 25 nt, Human
uccccugccccccacacugagggaa

SEQ ID NO: 343928 - RNA, 19 nt, Human
ucccugccugggagagccc

SEQ ID NO: 343929 - RNA, 22 nt, Human
ucccuggguccugggacucccu

SEQ ID NO: 343930 - RNA, 18 nt, Human
ucccuguguccccugccc

SEQ ID NO: 343931 - RNA, 22 nt, Human
uccuuguuccucugccaggggc

SEQ ID NO: 343932 - RNA, 23 nt, Human
ucggugaacggguccacccugaa

SEQ ID NO: 343933 - RNA, 18 nt, Human
ucuggccgccucucccag

SEQ ID NO: 343934 - RNA, 18 nt, Human
ugaccuggaagggcuggu

SEQ ID NO: 343935 - RNA, 26 nt, Human
ugaggggcuaagguugccuggggcca

SEQ ID NO: 343936 - RNA, 21 nt, Human
ugcagggacagcacagccugg

SEQ ID NO: 343937 - RNA, 20 nt, Human
ugcagugcaagagagcuggg

SEQ ID NO: 343938 - RNA, 23 nt, Human
ugccccggggcggcaccuggcag

SEQ ID NO: 343939 - RNA, 18 nt, Human
ugccuggggccagagggc

SEQ ID NO: 343940 - RNA, 20 nt, Human
ugccuggggccagagggccc

SEQ ID NO: 343941 - RNA, 18 nt, Human
ugcgccugcagcucgggc

SEQ ID NO: 343942 - RNA, 19 nt, Human
ugcuuugccccugugccuc

SEQ ID NO: 343943 - RNA, 21 nt, Human
ugcuuugccccugugccuccc

SEQ ID NO: 343944 - RNA, 24 nt, Human
uggcaggccuggcccacagaaggc

SEQ ID NO: 343945 - RNA, 22 nt, Human
uggcaggugcuggcauccgggg

SEQ ID NO: 343946 - RNA, 23 nt, Human
uggcaggugcuggcauccggggc

SEQ ID NO: 343947 - RNA, 22 nt, Human
uggcauccggggcuaggcacag

SEQ ID NO: 343948 - RNA, 23 nt, Human
uggcauccggggcuaggcacagc

SEQ ID NO: 343949 - RNA, 19 nt, Human
ugggagagcccaggggagg

SEQ ID NO: 343950 - RNA, 19 nt, Human
ugggaggucgagggucagc

SEQ ID NO: 343951 - RNA, 18 nt, Human
uguggcggucaccauagg

SEQ ID NO: 343952 - RNA, 22 nt, Human
uguguccuuguuccucugccag

SEQ ID NO: 343953 - RNA, 26 nt, Human
uucccugggguauugcuuugccccug

SEQ ID NO: 343954 - RNA, 24 nt, Human
aaaaagaaaaacuggacuaaaaga

SEQ ID NO: 343955 - RNA, 23 nt, Human
aaagccccaccuugcaacaggaa

SEQ ID NO: 343956 - RNA, 24 nt, Human
aaaguuuaaagccccaccuugcaa

SEQ ID NO: 343957 - RNA, 18 nt, Human
aagaaaauggcaacagcu

SEQ ID NO: 343958 - RNA, 22 nt, Human
aagccgagcccgggaaccagga

SEQ ID NO: 343959 - RNA, 23 nt, Human
aagccgagcccgggaaccaggaa

SEQ ID NO: 343960 - RNA, 22 nt, Human
aaugcaguuaguguggcugccc

SEQ ID NO: 343961 - RNA, 20 nt, Human
acaaauauaugagagggaaa

SEQ ID NO: 343962 - RNA, 21 nt, Human
acauacacuacauauagccuu

SEQ ID NO: 343963 - RNA, 24 nt, Human
accacacugcuaaugcaguuagug

SEQ ID NO: 343964 - RNA, 21 nt, Human
acgaagucauacucucuugga

SEQ ID NO: 343965 - RNA, 22 nt, Human
agaaaaacauaaccggaacuga

SEQ ID NO: 343966 - RNA, 23 nt, Human
agcuggcggucccgggcggccga

SEQ ID NO: 343967 - RNA, 23 nt, Human
agggaucaguaagcugcaacuuc

SEQ ID NO: 343968 - RNA, 23 nt, Human
agguuuuggagaaaaacauaacc

SEQ ID NO: 343969 - RNA, 19 nt, Human
auauauauauauauauaua

SEQ ID NO: 343970 - RNA, 27 nt, Human
auuuuuugcauauauauauauauauau

SEQ ID NO: 343971 - RNA, 20 nt, Human
caacagaguaaaaauguuca

SEQ ID NO: 343972 - RNA, 18 nt, Human
caauguagguuucacgug

SEQ ID NO: 343973 - RNA, 20 nt, Human
cacacugcuaaugcaguuag

SEQ ID NO: 343974 - RNA, 25 nt, Human
cacugcugcaccuuuggccguaaac

SEQ ID NO: 343975 - RNA, 20 nt, Human
cagaagaaagaaguaaccac

SEQ ID NO: 343976 - RNA, 21 nt, Human
cagaccagaacaaagggcaca

SEQ ID NO: 343977 - RNA, 21 nt, Human
caggaagaaacaucaaugucg

SEQ ID NO: 343978 - RNA, 22 nt, Human
caggaagaaacaucaaugucgg

SEQ ID NO: 343979 - RNA, 24 nt, Human
caguaagcugcaacuucuccugcu

SEQ ID NO: 343980 - RNA, 18 nt, Human
ccauuguuucccuuccaa

SEQ ID NO: 343981 - RNA, 20 nt, Human
cccagguuacaaauauauga

SEQ ID NO: 343982 - RNA, 22 nt, Human
cgaagccgagcccgggaaccag

SEQ ID NO: 343983 - RNA, 22 nt, Human
cgacuacauuccauaaagagga

SEQ ID NO: 343984 - RNA, 21 nt, Human
cguuucaauguaguguuuagc

SEQ ID NO: 343985 - RNA, 20 nt, Human
cucaucuuaagcagcaucua

SEQ ID NO: 343986 - RNA, 24 nt, Human
cuccgccccauuguuucccuucca

SEQ ID NO: 343987 - RNA, 19 nt, Human
cuuguguguauauauauau

SEQ ID NO: 343988 - RNA, 18 nt, Human
gaacagaugccuauaucu

SEQ ID NO: 343989 - RNA, 18 nt, Human
gaagaaagaaguaaccac

SEQ ID NO: 343990 - RNA, 18 nt, Human
gacacauacacuacauau

SEQ ID NO: 343991 - RNA, 21 nt, Human
gagcuggcggucccgggcggc

SEQ ID NO: 343992 - RNA, 18 nt, Human
gcaauguugaaaacaagc

SEQ ID NO: 343993 - RNA, 18 nt, Human
gcagcggacagagcuggc

SEQ ID NO: 343994 - RNA, 19 nt, Human
gcggcgcggcggcggcggc

SEQ ID NO: 343995 - RNA, 24 nt, Human
gcggcggcggcggcggcuaccgca

SEQ ID NO: 343996 - RNA, 21 nt, Human
gcuaaugcaguuaguguggcu

SEQ ID NO: 343997 - RNA, 20 nt, Human
ggagcagcucagauacugcu

SEQ ID NO: 343998 - RNA, 18 nt, Human
ggcagcggacagagcugg

SEQ ID NO: 343999 - RNA, 19 nt, Human
ggcgaagccgagcccgggg

SEQ ID NO: 344000 - RNA, 24 nt, Human
ggcgcggcgcggcggcggcggcgg

SEQ ID NO: 344001 - RNA, 21 nt, Human
ggcggccgagcagauccggcg

SEQ ID NO: 344002 - RNA, 21 nt, Human
gggcacaaacgcacuaagacc

SEQ ID NO: 344003 - RNA, 19 nt, Human
guguggcugccccacauga

SEQ ID NO: 344004 - RNA, 21 nt, Human
uaaaagacaaggaaaacaaga

SEQ ID NO: 344005 - RNA, 23 nt, Human
uaaaccaaaaucugcuguccaag

SEQ ID NO: 344006 - RNA, 21 nt, Human
uaaacuaaauuguacagcuug

SEQ ID NO: 344007 - RNA, 19 nt, Human
uaaaugcuauugcgauguu

SEQ ID NO: 344008 - RNA, 22 nt, Human
uaacauggacaauguaauggcc

SEQ ID NO: 344009 - RNA, 18 nt, Human
uaauuuuaacauggacaa

SEQ ID NO: 344010 - RNA, 19 nt, Human
uauauauauauauauauau

SEQ ID NO: 344011 - RNA, 25 nt, Human
uauauauauuuuuugcauauauaua

SEQ ID NO: 344012 - RNA, 18 nt, Human
uaugaacauagcaaugua

SEQ ID NO: 344013 - RNA, 21 nt, Human
ucaaaauagaaugagccaaca

SEQ ID NO: 344014 - RNA, 24 nt, Human
ucacuaauuuuuuuuuaagccaag

SEQ ID NO: 344015 - RNA, 22 nt, Human
ucagaccagaacaaagggcaca

SEQ ID NO: 344016 - RNA, 18 nt, Human
ucaguuuaggacccaggu

SEQ ID NO: 344017 - RNA, 18 nt, Human
ucgaggcagaagaaagaa

SEQ ID NO: 344018 - RNA, 27 nt, Human
ucgaggcagaagaaagaaguaaccaca

SEQ ID NO: 344019 - RNA, 23 nt, Human
ucgcaagagucagaccagaacaa

SEQ ID NO: 344020 - RNA, 18 nt, Human
ucuacaguuuuuucagua

SEQ ID NO: 344021 - RNA, 21 nt, Human
ugaaacgcucaucuuaagcag

SEQ ID NO: 344022 - RNA, 24 nt, Human
ugaacagaugccuauauuguaaua

SEQ ID NO: 344023 - RNA, 18 nt, Human
ugaaggagaaugaugagc

SEQ ID NO: 344024 - RNA, 20 nt, Human
ugaaggagaaugaugagcau

SEQ ID NO: 344025 - RNA, 23 nt, Human
ugagagggaaaaagaaaaacugg

SEQ ID NO: 344026 - RNA, 21 nt, Human
ugaggugcagcaauauccguc

SEQ ID NO: 344027 - RNA, 19 nt, Human
ugauaagcacugcugcacc

SEQ ID NO: 344028 - RNA, 19 nt, Human
ugcauauauauauauauau

SEQ ID NO: 344029 - RNA, 20 nt, Human
ugcauauauauauauauaua

SEQ ID NO: 344030 - RNA, 20 nt, Human
ugcauauauauauauauaua

SEQ ID NO: 344031 - RNA, 23 nt, Human
ugcccuccgccccauuguuuccc

SEQ ID NO: 344032 - RNA, 21 nt, Human
uggaaaugggucugaauguug

SEQ ID NO: 344033 - RNA, 21 nt, Human
uggagaaaaacauaaccggaa

SEQ ID NO: 344034 - RNA, 19 nt, Human
ugugggcagcggacagagc

SEQ ID NO: 344035 - RNA, 18 nt, Human
uguguguauauauauauu

SEQ ID NO: 344036 - RNA, 24 nt, Human
uuaccaaguugaucaaaauuacau

SEQ ID NO: 344037 - RNA, 21 nt, Human
uucaaauguggaugaacagau

SEQ ID NO: 344038 - RNA, 19 nt, Human
uucagguuuuggagaaaaa

SEQ ID NO: 344039 - RNA, 22 nt, Human
uuguuucaaugaaaaaaaaaaa

SEQ ID NO: 344040 - RNA, 20 nt, Human
uuuaaaagaucaaaauccua

SEQ ID NO: 344041 - RNA, 22 nt, Human
uuuaaagccccaccuugcaaca

SEQ ID NO: 344042 - RNA, 19 nt, Human
uuugcauauauauauauau

SEQ ID NO: 344043 - RNA, 20 nt, Human
uuuuaagcaccauuaagugg

SEQ ID NO: 344044 - RNA, 20 nt, Human
aaaaccaaaaaaaaaaaaaa

SEQ ID NO: 344045 - RNA, 23 nt, Human
aaacaacaacaauaaaaacccaa

SEQ ID NO: 344046 - RNA, 22 nt, Human
aaaugaacaaguuugguuuugg

SEQ ID NO: 344047 - RNA, 22 nt, Human
aacaacaaagagccgaggcaga

SEQ ID NO: 344048 - RNA, 22 nt, Human
aacaacaacaauaaaaacccaa

SEQ ID NO: 344049 - RNA, 18 nt, Human
aacauuuuaucuggcguc

SEQ ID NO: 344050 - RNA, 18 nt, Human
aaccauccaaagcgaaca

SEQ ID NO: 344051 - RNA, 19 nt, Human
aagaggaauaaaaacgaca

SEQ ID NO: 344052 - RNA, 19 nt, Human
aagcgaacaacaaagagcc

SEQ ID NO: 344053 - RNA, 24 nt, Human
aaugaagccaaaauaaaauaccac

SEQ ID NO: 344054 - RNA, 18 nt, Human
acaacaacaauaaaaacc

SEQ ID NO: 344055 - RNA, 23 nt, Human
accacacacaaaggcuuaauaua

SEQ ID NO: 344056 - RNA, 19 nt, Human
accccagcuccucccggau

SEQ ID NO: 344057 - RNA, 19 nt, Human
acucgcacgucuucugggc

SEQ ID NO: 344058 - RNA, 18 nt, Human
agaaccauuugguucaug

SEQ ID NO: 344059 - RNA, 23 nt, Human
agaggagggaguggaaauagggu

SEQ ID NO: 344060 - RNA, 19 nt, Human
agcccaaacuuccuggggg

SEQ ID NO: 344061 - RNA, 21 nt, Human
agcgaacaacaaagagccgag

SEQ ID NO: 344062 - RNA, 18 nt, Human
agcuccucccggaucagc

SEQ ID NO: 344063 - RNA, 19 nt, Human
aggagggaguggaaauagg

SEQ ID NO: 344064 - RNA, 21 nt, Human
aggcagaagcgcaguagugcc

SEQ ID NO: 344065 - RNA, 23 nt, Human
agggcaucauuugucaauugaaa

SEQ ID NO: 344066 - RNA, 23 nt, Human
agggggcggugcggcgacagcgg

SEQ ID NO: 344067 - RNA, 18 nt, Human
auacaaacauagagcauu

SEQ ID NO: 344068 - RNA, 23 nt, Human
auaucccaauaagaggaauaaaa

SEQ ID NO: 344069 - RNA, 18 nt, Human
aucauuugucaauugaaa

SEQ ID NO: 344070 - RNA, 25 nt, Human
caaaaaaggaucauagaaaucuacu

SEQ ID NO: 344071 - RNA, 18 nt, Human
caagaggagggaguggaa

SEQ ID NO: 344072 - RNA, 21 nt, Human
caccccuggcucguggaagcu

SEQ ID NO: 344073 - RNA, 22 nt, Human
cagaggaagaauuccaagguuu

SEQ ID NO: 344074 - RNA, 18 nt, Human
cagcgggccacccgcggc

SEQ ID NO: 344075 - RNA, 19 nt, Human
cagcucccggcucuccccg

SEQ ID NO: 344076 - RNA, 21 nt, Human
cauccaaagcgaacaacaaag

SEQ ID NO: 344077 - RNA, 22 nt, Human
ccaaaauaaaauaccaccaggg

SEQ ID NO: 344078 - RNA, 20 nt, Human
ccauccaaagcgaacaacaa

SEQ ID NO: 344079 - RNA, 25 nt, Human
ccaucugucauuauucaaauauucc

SEQ ID NO: 344080 - RNA, 24 nt, Human
cccaaauguaugaagccacacacc

SEQ ID NO: 344081 - RNA, 23 nt, Human
cccagccccgcgcggcgcccaac

SEQ ID NO: 344082 - RNA, 27 nt, Human
ccccacaaugugcggccgagcgccgcu

SEQ ID NO: 344083 - RNA, 19 nt, Human
cccccacaaugugcggccg

SEQ ID NO: 344084 - RNA, 19 nt, Human
ccccuaaacuacgcagaag

SEQ ID NO: 344085 - RNA, 23 nt, Human
ccccuaaacuacgcagaagccca

SEQ ID NO: 344086 - RNA, 21 nt, Human
ccgcugcgagggcaggcgcgg

SEQ ID NO: 344087 - RNA, 20 nt, Human
cgaggggaauaggaaggcuc

SEQ ID NO: 344088 - RNA, 22 nt, Human
cgcccccagccccgcgcggcgc

SEQ ID NO: 344089 - RNA, 21 nt, Human
cggcaaaaugcaaaagaacag

SEQ ID NO: 344090 - RNA, 20 nt, Human
cgggguggcagagaagggcc

SEQ ID NO: 344091 - RNA, 21 nt, Human
cuagacaaccagagauccaac

SEQ ID NO: 344092 - RNA, 21 nt, Human
cucaccccagcuccucccgga

SEQ ID NO: 344093 - RNA, 19 nt, Human
cucggccccucgcccucuc

SEQ ID NO: 344094 - RNA, 19 nt, Human
gaacugacacuaccagaag

SEQ ID NO: 344095 - RNA, 23 nt, Human
gaauaaauguacauuuuuuucuu

SEQ ID NO: 344096 - RNA, 20 nt, Human
gacaauuuguacacucugau

SEQ ID NO: 344097 - RNA, 18 nt, Human
gagagcgagcgagggggc

SEQ ID NO: 344098 - RNA, 18 nt, Human
gaggaagggcucggggug

SEQ ID NO: 344099 - RNA, 19 nt, Human
gaggaggcucagacacuuu

SEQ ID NO: 344100 - RNA, 21 nt, Human
gaggaggcucagacacuuuca

SEQ ID NO: 344101 - RNA, 19 nt, Human
gaggggaauaggaaggcuc

SEQ ID NO: 344102 - RNA, 18 nt, Human
gccaaaguagaagcagcg

SEQ ID NO: 344103 - RNA, 20 nt, Human
gcccucggccccucgcccuc

SEQ ID NO: 344104 - RNA, 21 nt, Human
gcccucggccccucgcccucu

SEQ ID NO: 344105 - RNA, 18 nt, Human
gccgcggcucaccccagc

SEQ ID NO: 344106 - RNA, 23 nt, Human
gcggcgacagcggcugccugggc

SEQ ID NO: 344107 - RNA, 21 nt, Human
gcucguggaagcuguaaagag

SEQ ID NO: 344108 - RNA, 18 nt, Human
gcugccugggcgggcccu

SEQ ID NO: 344109 - RNA, 23 nt, Human
ggcagagaggaugcugcugcggg

SEQ ID NO: 344110 - RNA, 18 nt, Human
ggcgcggcggcggcggca

SEQ ID NO: 344111 - RNA, 18 nt, Human
ggcggcggcgauagcagc

SEQ ID NO: 344112 - RNA, 18 nt, Human
ggcucggggugccgggag

SEQ ID NO: 344113 - RNA, 20 nt, Human
ggggaugcggaggguacugg

SEQ ID NO: 344114 - RNA, 22 nt, Human
gguacuggagacagcagcagga

SEQ ID NO: 344115 - RNA, 18 nt, Human
gucauuaaaaacauccac

SEQ ID NO: 344116 - RNA, 21 nt, Human
guuaaaaacgcuucucaacaa

SEQ ID NO: 344117 - RNA, 23 nt, Human
uaaaauaccaccaggguuugcaa

SEQ ID NO: 344118 - RNA, 25 nt, Human
uaaagaggcagcucccggcucuccc

SEQ ID NO: 344119 - RNA, 22 nt, Human
uacuuugagagcccuugugagg

SEQ ID NO: 344120 - RNA, 22 nt, Human
uagaagcagcagcuccggagga

SEQ ID NO: 344121 - RNA, 19 nt, Human
uagagcauuaacaaaacag

SEQ ID NO: 344122 - RNA, 19 nt, Human
uauaagcagugcaaugcca

SEQ ID NO: 344123 - RNA, 23 nt, Human
uaucuaugaauaaauguacauuu

SEQ ID NO: 344124 - RNA, 20 nt, Human
uauggcuaaaaauaaggggc

SEQ ID NO: 344125 - RNA, 18 nt, Human
ucaaugauugaaaugaag

SEQ ID NO: 344126 - RNA, 18 nt, Human
uccccgggguggcagaga

SEQ ID NO: 344127 - RNA, 20 nt, Human
ucccggcgugcgcccccaca

SEQ ID NO: 344128 - RNA, 20 nt, Human
uccgaggaggcucagacacu

SEQ ID NO: 344129 - RNA, 22 nt, Human
ucuucugggcgcccccagcccu

SEQ ID NO: 344130 - RNA, 22 nt, Human
ucuugcuggcugaugacugaag

SEQ ID NO: 344131 - RNA, 22 nt, Human
ugaaaaacugauuuugaaauca

SEQ ID NO: 344132 - RNA, 23 nt, Human
ugaaaguugaacugacacuacca

SEQ ID NO: 344133 - RNA, 22 nt, Human
ugaagccacacaccacacacaa

SEQ ID NO: 344134 - RNA, 18 nt, Human
ugacugaagcaagaaguc

SEQ ID NO: 344135 - RNA, 21 nt, Human
ugauacuuaucuaucuaugaa

SEQ ID NO: 344136 - RNA, 19 nt, Human
ugauugaaaugaagccaaa

SEQ ID NO: 344137 - RNA, 23 nt, Human
ugcaaagaguaaauauuuacaau

SEQ ID NO: 344138 - RNA, 23 nt, Human
ugcauguuacuucaccaucuguc

SEQ ID NO: 344139 - RNA, 25 nt, Human
ugccaagaggagggaguggaaauag

SEQ ID NO: 344140 - RNA, 18 nt, Human
ugccugggcgggcccuug

SEQ ID NO: 344141 - RNA, 19 nt, Human
ugcggccgagcgccgcugc

SEQ ID NO: 344142 - RNA, 23 nt, Human
ugcugagggagggccaaaaagug

SEQ ID NO: 344143 - RNA, 18 nt, Human
uggauuuucaguaugcaa

SEQ ID NO: 344144 - RNA, 19 nt, Human
uggcagagaagggcagaga

SEQ ID NO: 344145 - RNA, 20 nt, Human
ugggagagacggccgccgcg

SEQ ID NO: 344146 - RNA, 21 nt, Human
ugggggaugcggaggguacug

SEQ ID NO: 344147 - RNA, 22 nt, Human
ugggucaauuagccaagaguuu

SEQ ID NO: 344148 - RNA, 23 nt, Human
ugugguucaguuuuguuuggcuu

SEQ ID NO: 344149 - RNA, 19 nt, Human
uguuuuaauuugcauuagc

SEQ ID NO: 344150 - RNA, 24 nt, Human
uuagcccuacuuauccaaaaguac

SEQ ID NO: 344151 - RNA, 23 nt, Human
uucauaaaaugacaaaaaaggau

SEQ ID NO: 344152 - RNA, 22 nt, Human
uuuacuagguuuacuuaugaca

SEQ ID NO: 344153 - RNA, 18 nt, Human
uuugcauuagcaguuggc

SEQ ID NO: 344154 - RNA, 18 nt, Human
uuuguaggguuagggauc

SEQ ID NO: 344155 - RNA, 24 nt, Human
uuugugguucugcauuugcuauau

SEQ ID NO: 344156 - RNA, 24 nt, Human
uuuuucaaauuaucuaaaugaaca

SEQ ID NO: 344157 - RNA, 23 nt, Human
aaaaaaaaacaaaaacaaaaaaa

SEQ ID NO: 344158 - RNA, 21 nt, Human
aaaaaacaaaaacaaaaaaaa

SEQ ID NO: 344159 - RNA, 23 nt, Human
aaacaaaaacaaaaaaaaaacuu

SEQ ID NO: 344160 - RNA, 22 nt, Human
aaacuccaacauuauggcuuua

SEQ ID NO: 344161 - RNA, 19 nt, Human
aaagugcuaggauuacagg

SEQ ID NO: 344162 - RNA, 25 nt, Human
aaccuguugcuucaaaggagcccag

SEQ ID NO: 344163 - RNA, 19 nt, Human
aaguagcugggauuacagg

SEQ ID NO: 344164 - RNA, 23 nt, Human
aaguagcugggauuacaggccac

SEQ ID NO: 344165 - RNA, 26 nt, Human
aagugcuaggauuacaggcguaagcc

SEQ ID NO: 344166 - RNA, 21 nt, Human
aaucauuguugguucaaccug

SEQ ID NO: 344167 - RNA, 20 nt, Human
aauccauucccagauucuuc

SEQ ID NO: 344168 - RNA, 20 nt, Human
acaggccaccaccaucaugc

SEQ ID NO: 344169 - RNA, 22 nt, Human
acaggccaccaccaucaugccc

SEQ ID NO: 344170 - RNA, 18 nt, Human
acaggcguaagccaccau

SEQ ID NO: 344171 - RNA, 23 nt, Human
acauauauguaugaguguaugua

SEQ ID NO: 344172 - RNA, 25 nt, Human
accauccauuauuguuucuauaacc

SEQ ID NO: 344173 - RNA, 24 nt, Human
accauugcugcauauuguugcagu

SEQ ID NO: 344174 - RNA, 19 nt, Human
acccgcacucaggcuccuc

SEQ ID NO: 344175 - RNA, 23 nt, Human
accgccccgcccucuggggcccc

SEQ ID NO: 344176 - RNA, 22 nt, Human
accucaggugauccgcccgucu

SEQ ID NO: 344177 - RNA, 22 nt, Human
accucaggugauccgcccgucu

SEQ ID NO: 344178 - RNA, 18 nt, Human
acggaguuucacuauguu

SEQ ID NO: 344179 - RNA, 24 nt, Human
acggaguuucacuauguugggcag

SEQ ID NO: 344180 - RNA, 24 nt, Human
acuauguugggcaggcuggucuug

SEQ ID NO: 344181 - RNA, 19 nt, Human
acugcaaccaccgucuccu

SEQ ID NO: 344182 - RNA, 24 nt, Human
acuucauaauauaaaaaaaaacaa

SEQ ID NO: 344183 - RNA, 19 nt, Human
agcaccgcccccgaaccac

SEQ ID NO: 344184 - RNA, 24 nt, Human
agcgauucuccugucucagccucc

SEQ ID NO: 344185 - RNA, 18 nt, Human
aggcugaagcccaggccu

SEQ ID NO: 344186 - RNA, 25 nt, Human
aggcuggagugcaguggcucgaucu

SEQ ID NO: 344187 - RNA, 22 nt, Human
aggugauccgcccgucuuggcc

SEQ ID NO: 344188 - RNA, 24 nt, Human
aggugauccgcccgucuuggccuc

SEQ ID NO: 344189 - RNA, 21 nt, Human
agugcaguggcucgaucuucg

SEQ ID NO: 344190 - RNA, 18 nt, Human
auauauauauauauaugu

SEQ ID NO: 344191 - RNA, 24 nt, Human
caaaauggguaaaguugccuauca

SEQ ID NO: 344192 - RNA, 24 nt, Human
caaagugcuaggauuacaggcgua

SEQ ID NO: 344193 - RNA, 22 nt, Human
caagcgauucuccugucucagc

SEQ ID NO: 344194 - RNA, 26 nt, Human
caauaauacuuuaaaaacauuuguua

SEQ ID NO: 344195 - RNA, 20 nt, Human
caccucaggugauccgcccg

SEQ ID NO: 344196 - RNA, 24 nt, Human
cacuauguugggcaggcuggucuu

SEQ ID NO: 344197 - RNA, 23 nt, Human
cacugcaaccaccgucuccuggg

SEQ ID NO: 344198 - RNA, 21 nt, Human
cagaugauguauuuaaauauc

SEQ ID NO: 344199 - RNA, 18 nt, Human
cagcugcccaggcuggag

SEQ ID NO: 344200 - RNA, 21 nt, Human
caggggcccgcccggcccagc

SEQ ID NO: 344201 - RNA, 24 nt, Human
cagguacacaggaaugagugauau

SEQ ID NO: 344202 - RNA, 21 nt, Human
cauauauccuuagucuaucaa

SEQ ID NO: 344203 - RNA, 24 nt, Human
caucaaggauauauuaguuccaac

SEQ ID NO: 344204 - RNA, 21 nt, Human
caugcccggcuaauuuuugua

SEQ ID NO: 344205 - RNA, 20 nt, Human
ccaaagugcuaggauuacag

SEQ ID NO: 344206 - RNA, 22 nt, Human
ccaaagugcuaggauuacaggc

SEQ ID NO: 344207 - RNA, 24 nt, Human
ccaaagugcuaggauuacaggcgu

SEQ ID NO: 344208 - RNA, 21 nt, Human
ccagcccggcccggcccugcc

SEQ ID NO: 344209 - RNA, 21 nt, Human
ccauggucgccgccggccgcc

SEQ ID NO: 344210 - RNA, 23 nt, Human
cccaaguagcugggauuacaggc

SEQ ID NO: 344211 - RNA, 19 nt, Human
cccaggcuggagugcagug

SEQ ID NO: 344212 - RNA, 18 nt, Human
cccccgaaccaccagcuc

SEQ ID NO: 344213 - RNA, 20 nt, Human
cccccgaaccaccagcuccg

SEQ ID NO: 344214 - RNA, 20 nt, Human
ccccgccugggggcugcucc

SEQ ID NO: 344215 - RNA, 21 nt, Human
ccccgggaggcugaagcccag

SEQ ID NO: 344216 - RNA, 24 nt, Human
ccccucagucagauucgcgccgcc

SEQ ID NO: 344217 - RNA, 23 nt, Human
cccgcccucuggggccccgggag

SEQ ID NO: 344218 - RNA, 23 nt, Human
cccggcccggcccugccgggagc

SEQ ID NO: 344219 - RNA, 22 nt, Human
cccgucuuggccucccaaagug

SEQ ID NO: 344220 - RNA, 20 nt, Human
cccucagucagauucgcgcc

SEQ ID NO: 344221 - RNA, 19 nt, Human
ccgcacucaggcuccucgc

SEQ ID NO: 344222 - RNA, 21 nt, Human
ccgccgcggcccggaccgccc

SEQ ID NO: 344223 - RNA, 21 nt, Human
ccgcugccauggucgccgccg

SEQ ID NO: 344224 - RNA, 24 nt, Human
ccggcccggcccugccgggagcgg

SEQ ID NO: 344225 - RNA, 18 nt, Human
ccgggacuccacccgggc

SEQ ID NO: 344226 - RNA, 24 nt, Human
ccucaccucaggugauccgcccgu

SEQ ID NO: 344227 - RNA, 21 nt, Human
ccucucuguugaagcuagaaa

SEQ ID NO: 344228 - RNA, 18 nt, Human
ccugggccacuacggccg

SEQ ID NO: 344229 - RNA, 23 nt, Human
ccuggguucaagcgauucuccug

SEQ ID NO: 344230 - RNA, 23 nt, Human
cgagugcccgcaggaguccucgg

SEQ ID NO: 344231 - RNA, 19 nt, Human
cgccgccaccgccgcggcc

SEQ ID NO: 344232 - RNA, 20 nt, Human
cgccgccaccgccgcggccc

SEQ ID NO: 344233 - RNA, 22 nt, Human
cgcuggacccgcacucaggcuc

SEQ ID NO: 344234 - RNA, 24 nt, Human
cggagucuuguucagcugcccagg

SEQ ID NO: 344235 - RNA, 21 nt, Human
cggcccugccgggagcggcgg

SEQ ID NO: 344236 - RNA, 22 nt, Human
cgggcccaccgccugccucuag

SEQ ID NO: 344237 - RNA, 25 nt, Human
cuaaaauacugccacacacagcugc

SEQ ID NO: 344238 - RNA, 18 nt, Human
cuauauauauauauauau

SEQ ID NO: 344239 - RNA, 19 nt, Human
cuauauauauauauauaua

SEQ ID NO: 344240 - RNA, 24 nt, Human
cucacugcaaccaccgucuccugg

SEQ ID NO: 344241 - RNA, 24 nt, Human
cucagccucccaaguagcugggau

SEQ ID NO: 344242 - RNA, 18 nt, Human
cucaggucccgcagccuc

SEQ ID NO: 344243 - RNA, 21 nt, Human
cuccacccgggcccaccgccu

SEQ ID NO: 344244 - RNA, 24 nt, Human
cuccacccgggcccaccgccugcc

SEQ ID NO: 344245 - RNA, 21 nt, Human
cuccuggguucaagcgauucu

SEQ ID NO: 344246 - RNA, 20 nt, Human
cucggggccuagcaccgccc

SEQ ID NO: 344247 - RNA, 23 nt, Human
cugcaaccaccgucuccuggguu

SEQ ID NO: 344248 - RNA, 24 nt, Human
cugcccaggcuggagugcaguggc

SEQ ID NO: 344249 - RNA, 22 nt, Human
cugcguaaacuguaacuuugac

SEQ ID NO: 344250 - RNA, 23 nt, Human
cugucucagccucccaaguagcu

SEQ ID NO: 344251 - RNA, 23 nt, Human
gaggcugaagcccaggccugggc

SEQ ID NO: 344252 - RNA, 19 nt, Human
gauuacaggccaccaccau

SEQ ID NO: 344253 - RNA, 18 nt, Human
gauuacaggcguaagcca

SEQ ID NO: 344254 - RNA, 21 nt, Human
gauuacaggcguaagccacca

SEQ ID NO: 344255 - RNA, 24 nt, Human
gauuacaggcguaagccaccaugc

SEQ ID NO: 344256 - RNA, 19 nt, Human
gcaaccaccgucuccuggg

SEQ ID NO: 344257 - RNA, 24 nt, Human
gcgauucuccugucucagccuccc

SEQ ID NO: 344258 - RNA, 20 nt, Human
gcugcccaggcuggagugca

SEQ ID NO: 344259 - RNA, 19 nt, Human
gcuggagugcaguggcucg

SEQ ID NO: 344260 - RNA, 23 nt, Human
ggagucuuguucagcugcccagg

SEQ ID NO: 344261 - RNA, 23 nt, Human
ggaguuucacuauguugggcagg

SEQ ID NO: 344262 - RNA, 24 nt, Human
ggauuacaggccaccaccaucaug

SEQ ID NO: 344263 - RNA, 22 nt, Human
ggauuacaggcguaagccacca

SEQ ID NO: 344264 - RNA, 24 nt, Human
ggauuacaggcguaagccaccaug

SEQ ID NO: 344265 - RNA, 19 nt, Human
ggcuggagugcaguggcuc

SEQ ID NO: 344266 - RNA, 24 nt, Human
ggcuggucuugaacuccucaccuc

SEQ ID NO: 344267 - RNA, 19 nt, Human
gggaacagacggcgucccc

SEQ ID NO: 344268 - RNA, 21 nt, Human
gguagccagcaaauuuaaagc

SEQ ID NO: 344269 - RNA, 23 nt, Human
ggugauccgcccgucuuggccuc

SEQ ID NO: 344270 - RNA, 26 nt, Human
guacuauauauauauauauauaugug

SEQ ID NO: 344271 - RNA, 18 nt, Human
guagagacggaguuucac

SEQ ID NO: 344272 - RNA, 22 nt, Human
guagagacggaguuucacuaug

SEQ ID NO: 344273 - RNA, 18 nt, Human
guagcugggauuacaggc

SEQ ID NO: 344274 - RNA, 24 nt, Human
gucuuguucagcugcccaggcugg

SEQ ID NO: 344275 - RNA, 25 nt, Human
guguguuuauauauauauacacaga

SEQ ID NO: 344276 - RNA, 25 nt, Human
uaaaaaaaaacaaaaacaaaaaaaa

SEQ ID NO: 344277 - RNA, 22 nt, Human
uaaaaagaguugaaugaauaau

SEQ ID NO: 344278 - RNA, 19 nt, Human
uaagugccuuugaggccac

SEQ ID NO: 344279 - RNA, 21 nt, Human
uaagugccuuugaggccacuu

SEQ ID NO: 344280 - RNA, 22 nt, Human
uaauacuuuaaaaacauuuguu

SEQ ID NO: 344281 - RNA, 23 nt, Human
uaauuuuuguauauugguagaga

SEQ ID NO: 344282 - RNA, 22 nt, Human
uacacaguauaauggucacuuc

SEQ ID NO: 344283 - RNA, 23 nt, Human
uacagacagggcugagacuuuga

SEQ ID NO: 344284 - RNA, 23 nt, Human
uacaggccaccaccaucaugccc

SEQ ID NO: 344285 - RNA, 22 nt, Human
uacaggcguaagccaccaugcc

SEQ ID NO: 344286 - RNA, 21 nt, Human
uacuaaaauacugccacacac

SEQ ID NO: 344287 - RNA, 24 nt, Human
uacugaggucuguaaaaagaguug

SEQ ID NO: 344288 - RNA, 22 nt, Human
uagagacggaguuucacuaugu

SEQ ID NO: 344289 - RNA, 22 nt, Human
uagcaccgcccccgaaccacca

SEQ ID NO: 344290 - RNA, 23 nt, Human
uagccuuuaacucuucucaaucc

SEQ ID NO: 344291 - RNA, 22 nt, Human
uaggauuacaggcguaagccac

SEQ ID NO: 344292 - RNA, 24 nt, Human
uaggauuacaggcguaagccacca

SEQ ID NO: 344293 - RNA, 25 nt, Human
uaggauuacaggcguaagccaccau

SEQ ID NO: 344294 - RNA, 21 nt, Human
uaguggaauccauucccagau

SEQ ID NO: 344295 - RNA, 19 nt, Human
uauauauauauauauauau

SEQ ID NO: 344296 - RNA, 19 nt, Human
uauauauauaugugugugu

SEQ ID NO: 344297 - RNA, 24 nt, Human
uauauauauguguguguguuuaua

SEQ ID NO: 344298 - RNA, 20 nt, Human
uauauguaugaguguaugua

SEQ ID NO: 344299 - RNA, 23 nt, Human
uaucagucucucaggaaaauaua

SEQ ID NO: 344300 - RNA, 23 nt, Human
uaucaugaagcauuaggaaacug

SEQ ID NO: 344301 - RNA, 24 nt, Human
uauguugggcaggcuggucuugaa

SEQ ID NO: 344302 - RNA, 19 nt, Human
uauuacagggaaaagggga

SEQ ID NO: 344303 - RNA, 26 nt, Human
ucaaauuaagugccuuugaggcccug

SEQ ID NO: 344304 - RNA, 24 nt, Human
ucaauaucacuguaguggaaucca

SEQ ID NO: 344305 - RNA, 20 nt, Human
ucacagacuaauacugaggu

SEQ ID NO: 344306 - RNA, 18 nt, Human
ucaccucaggugauccgc

SEQ ID NO: 344307 - RNA, 24 nt, Human
ucaccucaggugauccgcccgucu

SEQ ID NO: 344308 - RNA, 22 nt, Human
ucacuauguugggcaggcuggu

SEQ ID NO: 344309 - RNA, 24 nt, Human
ucacugcaaccaccgucuccuggg

SEQ ID NO: 344310 - RNA, 18 nt, Human
ucagccucccaaguagcu

SEQ ID NO: 344311 - RNA, 19 nt, Human
ucagcugcccaggcuggag

SEQ ID NO: 344312 - RNA, 21 nt, Human
uccacaaagcuaguuuacauc

SEQ ID NO: 344313 - RNA, 24 nt, Human
ucccaaagugcuaggauuacaggc

SEQ ID NO: 344314 - RNA, 24 nt, Human
ucccaaguagcugggauuacaggc

SEQ ID NO: 344315 - RNA, 21 nt, Human
uccuggguucaagcgauucuc

SEQ ID NO: 344316 - RNA, 24 nt, Human
uccuggguucaagcgauucuccug

SEQ ID NO: 344317 - RNA, 24 nt, Human
ucuccuggguucaagcgauucucc

SEQ ID NO: 344318 - RNA, 26 nt, Human
ucuccugucucagccucccaaguagc

SEQ ID NO: 344319 - RNA, 23 nt, Human
ucuuguucagcugcccaggcugg

SEQ ID NO: 344320 - RNA, 24 nt, Human
ucuuguucagcugcccaggcugga

SEQ ID NO: 344321 - RNA, 22 nt, Human
ugcccaggcuggagugcagugg

SEQ ID NO: 344322 - RNA, 25 nt, Human
ugcccaggcuggagugcaguggcuc

SEQ ID NO: 344323 - RNA, 22 nt, Human
ugcccgcaggaguccucgggcg

SEQ ID NO: 344324 - RNA, 18 nt, Human
ugcccggcuaauuuuugu

SEQ ID NO: 344325 - RNA, 19 nt, Human
ugccucuagcuccggcuuc

SEQ ID NO: 344326 - RNA, 25 nt, Human
ugccucuagcuccggcuucgggucu

SEQ ID NO: 344327 - RNA, 24 nt, Human
ugcuaggauuacaggcguaagcca

SEQ ID NO: 344328 - RNA, 19 nt, Human
uggagugcaguggcucgau

SEQ ID NO: 344329 - RNA, 19 nt, Human
uggagugcaguggcucgau

SEQ ID NO: 344330 - RNA, 18 nt, Human
uggccucccaaagugcua

SEQ ID NO: 344331 - RNA, 19 nt, Human
ugggaaaaauuuugaaucu

SEQ ID NO: 344332 - RNA, 21 nt, Human
ugggaucaugagaauacggca

SEQ ID NO: 344333 - RNA, 18 nt, Human
ugggauuacaggccacca

SEQ ID NO: 344334 - RNA, 21 nt, Human
ugggauuacaggccaccacca

SEQ ID NO: 344335 - RNA, 22 nt, Human
ugggauuacaggccaccaccau

SEQ ID NO: 344336 - RNA, 24 nt, Human
ugggcaggcuggucuugaacuccu

SEQ ID NO: 344337 - RNA, 23 nt, Human
uggguucaagcgauucuccuguc

SEQ ID NO: 344338 - RNA, 24 nt, Human
uggguucaagcgauucuccugucu

SEQ ID NO: 344339 - RNA, 24 nt, Human
ugguagagacggaguuucacuaug

SEQ ID NO: 344340 - RNA, 23 nt, Human
uguaaucacaaaugucuuuacca

SEQ ID NO: 344341 - RNA, 24 nt, Human
ugucucagccucccaaguagcugg

SEQ ID NO: 344342 - RNA, 24 nt, Human
ugucugaggaucauauuuaaauau

SEQ ID NO: 344343 - RNA, 20 nt, Human
uguguaaaaauagugcacca

SEQ ID NO: 344344 - RNA, 26 nt, Human
uguguguguguuuauauauauaaugu

SEQ ID NO: 344345 - RNA, 18 nt, Human
uguguuuauauauauaua

SEQ ID NO: 344346 - RNA, 20 nt, Human
uguguuuauauauauauaca

SEQ ID NO: 344347 - RNA, 19 nt, Human
uguugcuucaaaggagccc

SEQ ID NO: 344348 - RNA, 20 nt, Human
uguugggcaggcuggucuug

SEQ ID NO: 344349 - RNA, 23 nt, Human
uguuuauauauauauacacagua

SEQ ID NO: 344350 - RNA, 23 nt, Human
uguuuuuuaauacagacagggcu

SEQ ID NO: 344351 - RNA, 20 nt, Human
uuagccuuuaacucuucuca

SEQ ID NO: 344352 - RNA, 21 nt, Human
uuaguuccaacaccauccauu

SEQ ID NO: 344353 - RNA, 23 nt, Human
uucaagcgauucuccugucucag

SEQ ID NO: 344354 - RNA, 24 nt, Human
uugguagagacggaguuucacuau

SEQ ID NO: 344355 - RNA, 24 nt, Human
uuguucagcugcccaggcuggagu

SEQ ID NO: 344356 - RNA, 19 nt, Human
uuuuuguauauugguagag

SEQ ID NO: 344357 - RNA, 21 nt, Human
uuuuuguauauugguagagac

SEQ ID NO: 344358 - RNA, 27 nt, Human
uuuuuuuguuuuuuaauacagacaggg

SEQ ID NO: 344359 - RNA, 22 nt, Human
aaccuggagccuugguaaggag

SEQ ID NO: 344360 - RNA, 18 nt, Human
accccaauacccugagca

SEQ ID NO: 344361 - RNA, 20 nt, Human
acucuguucuuugcuguucc

SEQ ID NO: 344362 - RNA, 21 nt, Human
acucuguucuuugcuguuccc

SEQ ID NO: 344363 - RNA, 26 nt, Human
agcugggcuaaugccacccugacccc

SEQ ID NO: 344364 - RNA, 19 nt, Human
aggugucagggauggaagc

SEQ ID NO: 344365 - RNA, 24 nt, Human
aucccucccucuuccucaccccaa

SEQ ID NO: 344366 - RNA, 21 nt, Human
auccuuagccccucuaauccu

SEQ ID NO: 344367 - RNA, 28 nt, Human
cauccaaaaacuuuauugagucuauauc

SEQ ID NO: 344368 - RNA, 25 nt, Human
caucccucccucuuccucaccccaa

SEQ ID NO: 344369 - RNA, 26 nt, Human
caucucugcccaagggagugcagagg

SEQ ID NO: 344370 - RNA, 18 nt, Human
caugucacuuucccauca

SEQ ID NO: 344371 - RNA, 20 nt, Human
ccaucccucccucuuccuca

SEQ ID NO: 344372 - RNA, 20 nt, Human
cccaauacccugagcauccu

SEQ ID NO: 344373 - RNA, 20 nt, Human
ccccaauacccugagcaucc

SEQ ID NO: 344374 - RNA, 21 nt, Human
cccucuuccucaccccaagcu

SEQ ID NO: 344375 - RNA, 24 nt, Human
ccuacgauccccccaaccuggagc

SEQ ID NO: 344376 - RNA, 20 nt, Human
ccuccaggccuucucauguc

SEQ ID NO: 344377 - RNA, 23 nt, Human
ccucccucuuccucaccccaagc

SEQ ID NO: 344378 - RNA, 22 nt, Human
cuaauccuacgauccccccaac

SEQ ID NO: 344379 - RNA, 20 nt, Human
cucccucuuccucaccccaa

SEQ ID NO: 344380 - RNA, 21 nt, Human
cucccucuuccucaccccaag

SEQ ID NO: 344381 - RNA, 23 nt, Human
cucuuccucaccccaagcuccag

SEQ ID NO: 344382 - RNA, 23 nt, Human
cuuguccaucccucccucuuccu

SEQ ID NO: 344383 - RNA, 19 nt, Human
gacuuguccaucccucccu

SEQ ID NO: 344384 - RNA, 21 nt, Human
gggagugcagaggugucaggg

SEQ ID NO: 344385 - RNA, 21 nt, Human
guccaucccucccucuuccuc

SEQ ID NO: 344386 - RNA, 19 nt, Human
gugcagaggugucagggau

SEQ ID NO: 344387 - RNA, 21 nt, Human
uccaaaaacuuuauugagucu

SEQ ID NO: 344388 - RNA, 18 nt, Human
uccaucccucccucuucc

SEQ ID NO: 344389 - RNA, 18 nt, Human
ucccuggugguucugacu

SEQ ID NO: 344390 - RNA, 23 nt, Human
uccuacgauccccccaaccugga

SEQ ID NO: 344391 - RNA, 23 nt, Human
ugagcugggcuaaugccacccug

SEQ ID NO: 344392 - RNA, 21 nt, Human
ugagguuuucagacuugucca

SEQ ID NO: 344393 - RNA, 18 nt, Human
ugcuguucccuggugguu

SEQ ID NO: 344394 - RNA, 21 nt, Human
uggcuggggcaggaugcugag

SEQ ID NO: 344395 - RNA, 21 nt, Human
ugggcuaaugccacccugacc

SEQ ID NO: 344396 - RNA, 23 nt, Human
ugggcuaaugccacccugacccc

SEQ ID NO: 344397 - RNA, 21 nt, Human
uucugacuacaagggcuaggc

SEQ ID NO: 344398 - RNA, 28 nt, Human
uucuuugcuguucccuggugguucugac

SEQ ID NO: 344399 - RNA, 25 nt, Human
ccaggccgcgcgcagaacauccacg

SEQ ID NO: 344400 - RNA, 21 nt, Human
cccucuggcugcagccucgcc

SEQ ID NO: 344401 - RNA, 21 nt, Human
ccucuggaugccgcgagcgcg

SEQ ID NO: 344402 - RNA, 19 nt, Human
cggcggcggcgguggcggc

SEQ ID NO: 344403 - RNA, 27 nt, Human
cucggcggcggcgguggcggcugcucc

SEQ ID NO: 344404 - RNA, 27 nt, Human
cugaggcggcggcggcggcggcucccu

SEQ ID NO: 344405 - RNA, 21 nt, Human
cugccgucccggggcucccuc

SEQ ID NO: 344406 - RNA, 25 nt, Human
cugcgcccaggggcugccgucccgg

SEQ ID NO: 344407 - RNA, 18 nt, Human
cugcucccucgccuccgc

SEQ ID NO: 344408 - RNA, 18 nt, Human
cuggccgagugucugucc

SEQ ID NO: 344409 - RNA, 19 nt, Human
gaggcggcggcggcggcgg

SEQ ID NO: 344410 - RNA, 18 nt, Human
gaucccuucccagcccuc

SEQ ID NO: 344411 - RNA, 18 nt, Human
gcccucuggcugcagccu

SEQ ID NO: 344412 - RNA, 25 nt, Human
gcggcggcggcggcggcucccaggc

SEQ ID NO: 344413 - RNA, 22 nt, Human
gcggcggcggcggcucccaggc

SEQ ID NO: 344414 - RNA, 19 nt, Human
gcggcggcgguggcggcug

SEQ ID NO: 344415 - RNA, 22 nt, Human
gcucccucgccuccgccuggcc

SEQ ID NO: 344416 - RNA, 23 nt, Human
gcugaggcggcggcggcggcgac

SEQ ID NO: 344417 - RNA, 20 nt, Human
ggccggcgggucagucccag

SEQ ID NO: 344418 - RNA, 18 nt, Human
gggacgucugcaaagcuc

SEQ ID NO: 344419 - RNA, 20 nt, Human
gggacgucugcaaagcucuu

SEQ ID NO: 344420 - RNA, 21 nt, Human
gggcucccggccgccucgucc

SEQ ID NO: 344421 - RNA, 29 nt, Human
ggggcucccucggcggcggcgguggcggg

SEQ ID NO: 344422 - RNA, 22 nt, Human
ggucggacuccgagaacagcgc

SEQ ID NO: 344423 - RNA, 23 nt, Human
uaaaugagaaccuuacuuuaaua

SEQ ID NO: 344424 - RNA, 21 nt, Human
uaaccugcucccucgccuccg

SEQ ID NO: 344425 - RNA, 25 nt, Human
uaagacacagugaaacuucacagaa

SEQ ID NO: 344426 - RNA, 25 nt, Human
uccacgggcucuucccgggcucccg

SEQ ID NO: 344427 - RNA, 19 nt, Human
ucccgggcucccggccgcc

SEQ ID NO: 344428 - RNA, 22 nt, Human
ucccucggcggcggcgguggcg

SEQ ID NO: 344429 - RNA, 25 nt, Human
uccucucgcugaggcggcggcggcg

SEQ ID NO: 344430 - RNA, 24 nt, Human
ucgccugggccggcgggucagucc

SEQ ID NO: 344431 - RNA, 23 nt, Human
ucgcugaggcggcggcggcggcg

SEQ ID NO: 344432 - RNA, 19 nt, Human
ucggcggcggcgguggcgg

SEQ ID NO: 344433 - RNA, 23 nt, Human
uggcgcucgcaggacgccgggga

SEQ ID NO: 344434 - RNA, 22 nt, Human
uggcugcagccucgccugggcc

SEQ ID NO: 344435 - RNA, 23 nt, Human
ugucugcuaaaugagaaccuuac

SEQ ID NO: 344436 - RNA, 18 nt, Human
aaaccaagaccaacugga

SEQ ID NO: 344437 - RNA, 19 nt, Human
aagaccaacuggaucccaa

SEQ ID NO: 344438 - RNA, 24 nt, Human
aauggagccccuucauccucaaac

SEQ ID NO: 344439 - RNA, 22 nt, Human
accucacccagucugcaaacaa

SEQ ID NO: 344440 - RNA, 18 nt, Human
acuucaaugaaaauggca

SEQ ID NO: 344441 - RNA, 18 nt, Human
agaagcaaaccaagacca

SEQ ID NO: 344442 - RNA, 22 nt, Human
agaggacagagaggagcagggc

SEQ ID NO: 344443 - RNA, 20 nt, Human
agcagggcuccaccucaccc

SEQ ID NO: 344444 - RNA, 18 nt, Human
aggacagagaggagcagg

SEQ ID NO: 344445 - RNA, 22 nt, Human
aggacagagaggagcagggcuc

SEQ ID NO: 344446 - RNA, 18 nt, Human
aggcagcagaaauggagc

SEQ ID NO: 344447 - RNA, 19 nt, Human
aggcagggcagcucucugu

SEQ ID NO: 344448 - RNA, 26 nt, Human
auuuuguuguaucucaggaacuccca

SEQ ID NO: 344449 - RNA, 19 nt, Human
caaauaggaccaacaaugu

SEQ ID NO: 344450 - RNA, 18 nt, Human
cacccagucugcaaacaa

SEQ ID NO: 344451 - RNA, 22 nt, Human
cagaaucaauguauacagcccu

SEQ ID NO: 344452 - RNA, 19 nt, Human
cagagaggagcagggcucc

SEQ ID NO: 344453 - RNA, 22 nt, Human
cagcagaaauggagccccuuca

SEQ ID NO: 344454 - RNA, 19 nt, Human
caguuaaauuacuaaaguc

SEQ ID NO: 344455 - RNA, 28 nt, Human
cauauuaaaaacauauaaauuacauuua

SEQ ID NO: 344456 - RNA, 21 nt, Human
ccccuugucuuccgaccccaa

SEQ ID NO: 344457 - RNA, 24 nt, Human
ccguuccagcgaaucuuuggcugc

SEQ ID NO: 344458 - RNA, 23 nt, Human
ccucugaacauuccaaacccaag

SEQ ID NO: 344459 - RNA, 22 nt, Human
cgaaccccgggcccuggugcca

SEQ ID NO: 344460 - RNA, 18 nt, Human
cgaccccaacaggcagca

SEQ ID NO: 344461 - RNA, 18 nt, Human
cgccgugcugccagaccc

SEQ ID NO: 344462 - RNA, 19 nt, Human
cgccgugcugccagacccc

SEQ ID NO: 344463 - RNA, 21 nt, Human
cggcccggaugcgccgcucgg

SEQ ID NO: 344464 - RNA, 18 nt, Human
cggcuccggccacggcaa

SEQ ID NO: 344465 - RNA, 19 nt, Human
cggggucgggcgccaccac

SEQ ID NO: 344466 - RNA, 20 nt, Human
cucacuaccagucuaccacc

SEQ ID NO: 344467 - RNA, 22 nt, Human
cugaacauuccaaacccaagaa

SEQ ID NO: 344468 - RNA, 25 nt, Human
cugaguauggugucuucucaaaggu

SEQ ID NO: 344469 - RNA, 21 nt, Human
cuuaacaaaaauaacaauacc

SEQ ID NO: 344470 - RNA, 18 nt, Human
gaagcaaaccaagaccag

SEQ ID NO: 344471 - RNA, 22 nt, Human
gagaggagcagggcuccaccuc

SEQ ID NO: 344472 - RNA, 19 nt, Human
gaugcguccgcuccuccuu

SEQ ID NO: 344473 - RNA, 22 nt, Human
gcagagggcagccuccguucca

SEQ ID NO: 344474 - RNA, 21 nt, Human
gcagcagaaauggagccccuu

SEQ ID NO: 344475 - RNA, 19 nt, Human
gcccggaugcgccgcucgg

SEQ ID NO: 344476 - RNA, 21 nt, Human
gcuucuauccccgaaccccgg

SEQ ID NO: 344477 - RNA, 18 nt, Human
ggcaaaauacacauggag

SEQ ID NO: 344478 - RNA, 20 nt, Human
ggccgggaagcccucagagc

SEQ ID NO: 344479 - RNA, 19 nt, Human
gggaggcagcagaaaugga

SEQ ID NO: 344480 - RNA, 19 nt, Human
gggcacagacggcugccug

SEQ ID NO: 344481 - RNA, 25 nt, Human
gucccuguggggucucggcggggcu

SEQ ID NO: 344482 - RNA, 19 nt, Human
gugaagcugccaccuauuu

SEQ ID NO: 344483 - RNA, 18 nt, Human
gugguacagagagaagca

SEQ ID NO: 344484 - RNA, 18 nt, Human
uaaaaugaauggaccuca

SEQ ID NO: 344485 - RNA, 24 nt, Human
uaaaaugaauggaccucaugugca

SEQ ID NO: 344486 - RNA, 19 nt, Human
uaacaggggcuguaaaaug

SEQ ID NO: 344487 - RNA, 22 nt, Human
ucagaagccccuugucuuccga

SEQ ID NO: 344488 - RNA, 24 nt, Human
ucagagcuucgggccggggcgcgg

SEQ ID NO: 344489 - RNA, 23 nt, Human
uccccaggacgccgugcugccag

SEQ ID NO: 344490 - RNA, 19 nt, Human
uccccgaaccccgggcccu

SEQ ID NO: 344491 - RNA, 23 nt, Human
ucggcggggcuucuauccccgaa

SEQ ID NO: 344492 - RNA, 23 nt, Human
ucgggccggggcgcggggucggg

SEQ ID NO: 344493 - RNA, 19 nt, Human
ugacugaggucccuguggg

SEQ ID NO: 344494 - RNA, 18 nt, Human
ugaggucccugugggguc

SEQ ID NO: 344495 - RNA, 18 nt, Human
ugcugccagacccccugc

SEQ ID NO: 344496 - RNA, 24 nt, Human
ugcuuccucugaacauuccaaacc

SEQ ID NO: 344497 - RNA, 20 nt, Human
uggagccccuucauccucaa

SEQ ID NO: 344498 - RNA, 22 nt, Human
uggagugaagcugccaccuauu

SEQ ID NO: 344499 - RNA, 24 nt, Human
ugucaggaaccucaagacccgagg

SEQ ID NO: 344500 - RNA, 25 nt, Human
ugucaguuucuuugaaggcacacau

SEQ ID NO: 344501 - RNA, 20 nt, Human
uguggggucucggcggggcu

SEQ ID NO: 344502 - RNA, 23 nt, Human
uucuccggcccggaugcgccgcu

SEQ ID NO: 344503 - RNA, 18 nt, Human
agaaugauggggaggagu

SEQ ID NO: 344504 - RNA, 20 nt, Human
cagacagauggcuccaacag

SEQ ID NO: 344505 - RNA, 21 nt, Human
cccccucugccgccgccgcua

SEQ ID NO: 344506 - RNA, 18 nt, Human
ccccggagcccccucugc

SEQ ID NO: 344507 - RNA, 20 nt, Human
ccccucugccgccgccgcgc

SEQ ID NO: 344508 - RNA, 19 nt, Human
ccgccgcgccgccgccgcc

SEQ ID NO: 344509 - RNA, 20 nt, Human
ccuccagaaacuggggcugu

SEQ ID NO: 344510 - RNA, 18 nt, Human
ccucugccgccgccgcgc

SEQ ID NO: 344511 - RNA, 24 nt, Human
cgaucaccaaaagaugugcagugu

SEQ ID NO: 344512 - RNA, 22 nt, Human
cuccagaaacuggggcugugcu

SEQ ID NO: 344513 - RNA, 18 nt, Human
cugaccccgaucaccaaa

SEQ ID NO: 344514 - RNA, 22 nt, Human
gaccccggagcccccucugccg

SEQ ID NO: 344515 - RNA, 21 nt, Human
gccgccgccgcgccgccgccg

SEQ ID NO: 344516 - RNA, 18 nt, Human
ggcugugcuuugccccag

SEQ ID NO: 344517 - RNA, 18 nt, Human
ggggaggaguauggggga

SEQ ID NO: 344518 - RNA, 21 nt, Human
gguggagaaugauggggagga

SEQ ID NO: 344519 - RNA, 21 nt, Human
gugcagggccauauaaagugu

SEQ ID NO: 344520 - RNA, 19 nt, Human
uacccaucugccuccagaa

SEQ ID NO: 344521 - RNA, 22 nt, Human
uacccaucugccuccagaaacu

SEQ ID NO: 344522 - RNA, 18 nt, Human
uacuauggaguccaaggu

SEQ ID NO: 344523 - RNA, 21 nt, Human
ugcagggccauauaaaguguc

SEQ ID NO: 344524 - RNA, 21 nt, Human
uggggcugugcuuugccccag

SEQ ID NO: 344525 - RNA, 18 nt, Human
uguuuuucauguuuguac

SEQ ID NO: 344526 - RNA, 22 nt, Human
aaaaaaggaaacagaaagaaaa

SEQ ID NO: 344527 - RNA, 19 nt, Human
aaaaaaugccaccgccucc

SEQ ID NO: 344528 - RNA, 21 nt, Human
aaaaaggaaacagaaagaaaa

SEQ ID NO: 344529 - RNA, 24 nt, Human
aaaaaggaaacagaaagaaaagaa

SEQ ID NO: 344530 - RNA, 29 nt, Human
aaaaaggaaacagaaagaaaagggacccc

SEQ ID NO: 344531 - RNA, 27 nt, Human
aaaacaaacaaacaaauaaaagagccc

SEQ ID NO: 344532 - RNA, 19 nt, Human
aaacaaauaaaagagcccc

SEQ ID NO: 344533 - RNA, 21 nt, Human
aaacaaauaaaagagccccac

SEQ ID NO: 344534 - RNA, 22 nt, Human
aaacagaaagaaaagaaagaaa

SEQ ID NO: 344535 - RNA, 21 nt, Human
aaagaaaagaaagaaaggcgg

SEQ ID NO: 344536 - RNA, 19 nt, Human
aaagaagagggagaaggaa

SEQ ID NO: 344537 - RNA, 22 nt, Human
aaagaagagggagaaggaacaa

SEQ ID NO: 344538 - RNA, 22 nt, Human
aaagaagagggagaaggaacaa

SEQ ID NO: 344539 - RNA, 26 nt, Human
aaagaagagggagaaggaacaagggg

SEQ ID NO: 344540 - RNA, 20 nt, Human
aaagagccccacucaggugc

SEQ ID NO: 344541 - RNA, 19 nt, Human
aaauaaaagagccccacuc

SEQ ID NO: 344542 - RNA, 18 nt, Human
aacaagggggaaaaaagg

SEQ ID NO: 344543 - RNA, 23 nt, Human
aaccaucccuuuaggcggacgcc

SEQ ID NO: 344544 - RNA, 20 nt, Human
aacuaccuaaaaacauagaa

SEQ ID NO: 344545 - RNA, 20 nt, Human
aagaaaagaaagaaaggcgg

SEQ ID NO: 344546 - RNA, 24 nt, Human
aagcacugaaaucaagcuuguuuc

SEQ ID NO: 344547 - RNA, 22 nt, Human
aauguuaucuguggccuaauuc

SEQ ID NO: 344548 - RNA, 19 nt, Human
acagaaagaaaagaaagaa

SEQ ID NO: 344549 - RNA, 19 nt, Human
acucugggucuucucuuuc

SEQ ID NO: 344550 - RNA, 23 nt, Human
acuguuuggucaaaaaagucuug

SEQ ID NO: 344551 - RNA, 23 nt, Human
agagagaaaauguuuacaugaaa

SEQ ID NO: 344552 - RNA, 22 nt, Human
agcccgaaccccggagagccca

SEQ ID NO: 344553 - RNA, 21 nt, Human
aggaggaggaagggcagcagc

SEQ ID NO: 344554 - RNA, 18 nt, Human
aggaggaggaggaagggc

SEQ ID NO: 344555 - RNA, 21 nt, Human
aggaggaggaguugguggugg

SEQ ID NO: 344556 - RNA, 21 nt, Human
aggcgguguggauggcagagc

SEQ ID NO: 344557 - RNA, 24 nt, Human
agguggucggcgaagagcugcucu

SEQ ID NO: 344558 - RNA, 22 nt, Human
aguuacaaagaagagggagaag

SEQ ID NO: 344559 - RNA, 19 nt, Human
aucccuuuaggcggacgcc

SEQ ID NO: 344560 - RNA, 21 nt, Human
augucauugacagaaauagag

SEQ ID NO: 344561 - RNA, 22 nt, Human
auuuauucuuuuaacuuuccua

SEQ ID NO: 344562 - RNA, 25 nt, Human
caaacaaacaaauaaaagagcccca

SEQ ID NO: 344563 - RNA, 21 nt, Human
caauaagcacugaaaucaagc

SEQ ID NO: 344564 - RNA, 22 nt, Human
cagaaagaaaagaaagaaaggc

SEQ ID NO: 344565 - RNA, 27 nt, Human
caggaggaggaguugguggugguuuug

SEQ ID NO: 344566 - RNA, 21 nt, Human
cccaaaaaucccgcucagcac

SEQ ID NO: 344567 - RNA, 22 nt, Human
cccagcccgaaccccggagagc

SEQ ID NO: 344568 - RNA, 23 nt, Human
cccgaaccccggagagcccaaaa

SEQ ID NO: 344569 - RNA, 25 nt, Human
ccgaaccccggagagcccaaaaauc

SEQ ID NO: 344570 - RNA, 26 nt, Human
ccgaauaaaauuaaaaaaaggauaac

SEQ ID NO: 344571 - RNA, 21 nt, Human
cgccuccggcucagaagauuu

SEQ ID NO: 344572 - RNA, 21 nt, Human
cugugccuguuagcggaucca

SEQ ID NO: 344573 - RNA, 22 nt, Human
gaacaagggggaaaaaaggaaa

SEQ ID NO: 344574 - RNA, 18 nt, Human
gaaccccggagagcccaa

SEQ ID NO: 344575 - RNA, 18 nt, Human
gaggaagggcagcagcag

SEQ ID NO: 344576 - RNA, 20 nt, Human
gaguugguaccguccugcca

SEQ ID NO: 344577 - RNA, 21 nt, Human
gccacacauuauguuuauucc

SEQ ID NO: 344578 - RNA, 20 nt, Human
gcccgaaccccggagagccc

SEQ ID NO: 344579 - RNA, 18 nt, Human
gcgaagagcugcucugcc

SEQ ID NO: 344580 - RNA, 28 nt, Human
gcucccagcccgaaccccggagagccca

SEQ ID NO: 344581 - RNA, 24 nt, Human
ggacugaggaggaggaggaagggc

SEQ ID NO: 344582 - RNA, 24 nt, Human
ggagagcccaaaaaucccgcucag

SEQ ID NO: 344583 - RNA, 19 nt, Human
ggaggaggaguugguggug

SEQ ID NO: 344584 - RNA, 23 nt, Human
ggcagcagcaggaggaggaguug

SEQ ID NO: 344585 - RNA, 21 nt, Human
gggaaaaaaggaaacagaaag

SEQ ID NO: 344586 - RNA, 23 nt, Human
gggcagcagcaggaggaggaguu

SEQ ID NO: 344587 - RNA, 23 nt, Human
gggucuucucuuucuaccuuuuc

SEQ ID NO: 344588 - RNA, 22 nt, Human
gguuuuguuuuucuuuuucuuu

SEQ ID NO: 344589 - RNA, 18 nt, Human
gucaaguuuuugcuacau

SEQ ID NO: 344590 - RNA, 24 nt, Human
guguggccgcucucccgcuccgcg

SEQ ID NO: 344591 - RNA, 19 nt, Human
uaaaaaaugccaccgccuc

SEQ ID NO: 344592 - RNA, 24 nt, Human
uaacaaauacauuaaagaaaggaa

SEQ ID NO: 344593 - RNA, 26 nt, Human
uaacaaauacauuaaagaaggguuuc

SEQ ID NO: 344594 - RNA, 19 nt, Human
uaagccuauuaaguggaau

SEQ ID NO: 344595 - RNA, 22 nt, Human
uaauggugaugcauuccaugac

SEQ ID NO: 344596 - RNA, 23 nt, Human
uauauacuuauuacauacaugca

SEQ ID NO: 344597 - RNA, 24 nt, Human
ucaaaaaagucuuggaccuugcaa

SEQ ID NO: 344598 - RNA, 26 nt, Human
ucagaagauuucuuuugugaucacuu

SEQ ID NO: 344599 - RNA, 20 nt, Human
ucauagaagagagccugacu

SEQ ID NO: 344600 - RNA, 18 nt, Human
uccaaaagaaaaaaagug

SEQ ID NO: 344601 - RNA, 18 nt, Human
uccaugacuaugagacag

SEQ ID NO: 344602 - RNA, 18 nt, Human
ucccaaaacauacccgaa

SEQ ID NO: 344603 - RNA, 24 nt, Human
ucccagcccgaaccccggagagcc

SEQ ID NO: 344604 - RNA, 25 nt, Human
ucuauaaacaguugucucccaaaac

SEQ ID NO: 344605 - RNA, 21 nt, Human
ucucuccaaugugcuugcuuu

SEQ ID NO: 344606 - RNA, 21 nt, Human
ucugccgagaaaaccaucccu

SEQ ID NO: 344607 - RNA, 23 nt, Human
ucuggcugucuggugccuggguu

SEQ ID NO: 344608 - RNA, 23 nt, Human
ugaaaaauaauucuauuaagugc

SEQ ID NO: 344609 - RNA, 18 nt, Human
ugaaaacucuggcuggga

SEQ ID NO: 344610 - RNA, 19 nt, Human
ugaaacaggaaaauggcuu

SEQ ID NO: 344611 - RNA, 24 nt, Human
ugaaacaggaaaauggcuuaaaau

SEQ ID NO: 344612 - RNA, 19 nt, Human
ugagacaguucucuugucc

SEQ ID NO: 344613 - RNA, 19 nt, Human
ugaggaggaggaggaaggg

SEQ ID NO: 344614 - RNA, 21 nt, Human
ugcucccagcccgaaccccgg

SEQ ID NO: 344615 - RNA, 22 nt, Human
uggcauuguugcccuggguucu

SEQ ID NO: 344616 - RNA, 23 nt, Human
uggcugucuggugccuggguuuu

SEQ ID NO: 344617 - RNA, 21 nt, Human
ugucauugacagaaauagagu

SEQ ID NO: 344618 - RNA, 22 nt, Human
uguuuauuccuuuguagacuua

SEQ ID NO: 344619 - RNA, 22 nt, Human
uuaaaauacugucuccuuccca

SEQ ID NO: 344620 - RNA, 21 nt, Human
uuaguuacaaagaagagggag

SEQ ID NO: 344621 - RNA, 20 nt, Human
uucuuuuucuuucucuccaa

SEQ ID NO: 344622 - RNA, 23 nt, Human
uugauguugguggugacuguuuu

SEQ ID NO: 344623 - RNA, 22 nt, Human
uuugccgccgccgccgcuaugu

SEQ ID NO: 344624 - RNA, 30 nt, Human
uuuguuaguuacaaagaagagggagaagga

SEQ ID NO: 344625 - RNA, 31 nt, Human
uuuuguuuugguuuuguuuuucuuuuucuuu

SEQ ID NO: 344626 - RNA, 27 nt, Human
agggugaggguggaacgggguccaggg

SEQ ID NO: 344627 - RNA, 19 nt, Human
caaggagucccucuuccag

SEQ ID NO: 344628 - RNA, 22 nt, Human
cagcaucugcucacuuccaaag

SEQ ID NO: 344629 - RNA, 20 nt, Human
ccagggaggugggccagcag

SEQ ID NO: 344630 - RNA, 19 nt, Human
ccguccuggcugcccuggc

SEQ ID NO: 344631 - RNA, 22 nt, Human
ccguccuggcugcccuggcugc

SEQ ID NO: 344632 - RNA, 21 nt, Human
cugacagaaagccagccgcag

SEQ ID NO: 344633 - RNA, 24 nt, Human
gccauagggagaggcaaggagucc

SEQ ID NO: 344634 - RNA, 21 nt, Human
ggcagggagcagggcccaggg

SEQ ID NO: 344635 - RNA, 19 nt, Human
ucacuuccaaagagcuggu

SEQ ID NO: 344636 - RNA, 19 nt, Human
uccagggaggugggccagc

SEQ ID NO: 344637 - RNA, 19 nt, Human
ugcccuggcugcccaggag

SEQ ID NO: 344638 - RNA, 23 nt, Human
ugguggggaccacccuccagggu

SEQ ID NO: 344639 - RNA, 20 nt, Human
auggauuuugcuuuguuugu

SEQ ID NO: 344640 - RNA, 20 nt, Human
gcagaguuuucuuucaguaa

SEQ ID NO: 344641 - RNA, 20 nt, Human
uagccuuuuucauuuagacc

SEQ ID NO: 344642 - RNA, 23 nt, Human
uaggauauacuugccuuuugaaa

SEQ ID NO: 344643 - RNA, 22 nt, Human
ucauuuagaccuuugaaugcuu

SEQ ID NO: 344644 - RNA, 25 nt, Human
uuagauggccggucuaauuuucucc

SEQ ID NO: 344645 - RNA, 18 nt, Human
uuuugcuuuguuuguuuu

SEQ ID NO: 344646 - RNA, 27 nt, Human
aaaaaaaaaaaaaauguaaguucagaa

SEQ ID NO: 344647 - RNA, 23 nt, Human
aaaaaacagagacauuaugaaag

SEQ ID NO: 344648 - RNA, 21 nt, Human
aaaaaaugaauugacaaagaa

SEQ ID NO: 344649 - RNA, 22 nt, Human
aauauacauuuuacaccaagcu

SEQ ID NO: 344650 - RNA, 23 nt, Human
agaaacuuccaaaauaagagaac

SEQ ID NO: 344651 - RNA, 23 nt, Human
agaaccugagucuguaauuguug

SEQ ID NO: 344652 - RNA, 23 nt, Human
auucgucacaugugcuucaucuc

SEQ ID NO: 344653 - RNA, 25 nt, Human
caaaaaaaaucauagauaccaaaaa

SEQ ID NO: 344654 - RNA, 20 nt, Human
cacaacuugaaacgucccuu

SEQ ID NO: 344655 - RNA, 19 nt, Human
cacuggauauguaaccuca

SEQ ID NO: 344656 - RNA, 22 nt, Human
cagaacaaaaccagauagaaac

SEQ ID NO: 344657 - RNA, 18 nt, Human
cuaguccguauucgucac

SEQ ID NO: 344658 - RNA, 18 nt, Human
gucuuuggauuuauucuc

SEQ ID NO: 344659 - RNA, 20 nt, Human
uaagagaaccugagucugua

SEQ ID NO: 344660 - RNA, 20 nt, Human
uccaaaauaagagaaccuga

SEQ ID NO: 344661 - RNA, 18 nt, Human
ugagcaaaaaaaaucaua

SEQ ID NO: 344662 - RNA, 20 nt, Human
uggaaaaacaaaaaacagag

SEQ ID NO: 344663 - RNA, 21 nt, Human
uggaaaaacaaaaaacagaga

SEQ ID NO: 344664 - RNA, 20 nt, Human
ugggaaaaaaugaauugaca

SEQ ID NO: 344665 - RNA, 22 nt, Human
uugaugcccugagcaaaaaaaa

SEQ ID NO: 344666 - RNA, 23 nt, Human
uuggcugagaccacaacuugaaa

SEQ ID NO: 344667 - RNA, 23 nt, Human
uuguuggaaaaacaaaaaacaga

SEQ ID NO: 344668 - RNA, 21 nt, Human
uuuuuaucaaaucaguaguua

SEQ ID NO: 344669 - RNA, 23 nt, Human
aaaagcuagacauaaauauaaag

SEQ ID NO: 344670 - RNA, 23 nt, Human
aaacauuuuaaacaugaaaauac

SEQ ID NO: 344671 - RNA, 19 nt, Human
aaagaacuuaguuuauagc

SEQ ID NO: 344672 - RNA, 21 nt, Human
aaauuaaauggguaaaagguc

SEQ ID NO: 344673 - RNA, 24 nt, Human
aaccgcccaacgguccgcagccuu

SEQ ID NO: 344674 - RNA, 20 nt, Human
aaccuauugacaccuccuga

SEQ ID NO: 344675 - RNA, 20 nt, Human
aacguggaaaaaccccaucu

SEQ ID NO: 344676 - RNA, 23 nt, Human
aagagcuaauaaaaguuaucacc

SEQ ID NO: 344677 - RNA, 19 nt, Human
aagcaaaacaaaaacagca

SEQ ID NO: 344678 - RNA, 18 nt, Human
aagcugguuaucaaaugc

SEQ ID NO: 344679 - RNA, 22 nt, Human
aaguagcucuccucugcuuccu

SEQ ID NO: 344680 - RNA, 21 nt, Human
aauacacaaaaguguauuauc

SEQ ID NO: 344681 - RNA, 24 nt, Human
aaucgcuugaacccaggaggcgga

SEQ ID NO: 344682 - RNA, 20 nt, Human
acaagagugaaacuccaccu

SEQ ID NO: 344683 - RNA, 24 nt, Human
acagaguuuccccugaagacugaa

SEQ ID NO: 344684 - RNA, 22 nt, Human
acagugcuuuaaagcaaccaaa

SEQ ID NO: 344685 - RNA, 24 nt, Human
accugaggucaggaguucgagacc

SEQ ID NO: 344686 - RNA, 23 nt, Human
accuuuuuaaaaacugcugguga

SEQ ID NO: 344687 - RNA, 19 nt, Human
agagaaacaaaacugcaag

SEQ ID NO: 344688 - RNA, 22 nt, Human
agccagguguaguggcgcaugc

SEQ ID NO: 344689 - RNA, 21 nt, Human
agcucacaccuguaaucccag

SEQ ID NO: 344690 - RNA, 23 nt, Human
agcucuuugggaggcugaggugg

SEQ ID NO: 344691 - RNA, 23 nt, Human
aggcaggagaaucgcuugaaccc

SEQ ID NO: 344692 - RNA, 24 nt, Human
aggcaggagaaucgcuugaaccca

SEQ ID NO: 344693 - RNA, 24 nt, Human
aggcgcgguagcucacaccuguaa

SEQ ID NO: 344694 - RNA, 21 nt, Human
aggcggauguuguggugagcc

SEQ ID NO: 344695 - RNA, 24 nt, Human
aggcggauguuguggugagccgag

SEQ ID NO: 344696 - RNA, 20 nt, Human
aggcugaggcaggagaaucg

SEQ ID NO: 344697 - RNA, 24 nt, Human
aggcugaggcaggagaaucgcuug

SEQ ID NO: 344698 - RNA, 22 nt, Human
agguggacggaucaccugaggu

SEQ ID NO: 344699 - RNA, 22 nt, Human
auaagaauaucauaugcagaga

SEQ ID NO: 344700 - RNA, 18 nt, Human
auagaaacaaccauagca

SEQ ID NO: 344701 - RNA, 24 nt, Human
aucaccugaggucaggaguucgag

SEQ ID NO: 344702 - RNA, 24 nt, Human
aucgcgccauugcacuccagcuug

SEQ ID NO: 344703 - RNA, 22 nt, Human
auggagcacugaggaaaguuua

SEQ ID NO: 344704 - RNA, 18 nt, Human
auugcacuccagcuuggg

SEQ ID NO: 344705 - RNA, 23 nt, Human
caaaagcuauucagaaaugaaau

SEQ ID NO: 344706 - RNA, 22 nt, Human
caacguggaaaaaccccaucuc

SEQ ID NO: 344707 - RNA, 24 nt, Human
cacaccuguaaucccagcucuuug

SEQ ID NO: 344708 - RNA, 20 nt, Human
caccaacuuuuauuugcacc

SEQ ID NO: 344709 - RNA, 23 nt, Human
caccugaggucaggaguucgaga

SEQ ID NO: 344710 - RNA, 23 nt, Human
caccuguaaucccagcucuuugg

SEQ ID NO: 344711 - RNA, 24 nt, Human
caccuguaaucccagcucuuuggg

SEQ ID NO: 344712 - RNA, 23 nt, Human
cacuccagcuugggcaacaagag

SEQ ID NO: 344713 - RNA, 24 nt, Human
cacuccagcuugggcaacaagagu

SEQ ID NO: 344714 - RNA, 25 nt, Human
cacuccagcuugggcaacaagagug

SEQ ID NO: 344715 - RNA, 19 nt, Human
cagcacccccggacgcgug

SEQ ID NO: 344716 - RNA, 24 nt, Human
cagcuacucaggaggcugaggcag

SEQ ID NO: 344717 - RNA, 24 nt, Human
cagcucuuugggaggcugaggugg

SEQ ID NO: 344718 - RNA, 20 nt, Human
caguacuauuaaugcaagag

SEQ ID NO: 344719 - RNA, 24 nt, Human
cauggccaggcgcgguagcucaca

SEQ ID NO: 344720 - RNA, 24 nt, Human
cauucagaagccaaaugacugucc

SEQ ID NO: 344721 - RNA, 19 nt, Human
cauugcacuccagcuuggg

SEQ ID NO: 344722 - RNA, 21 nt, Human
cauugcacuccagcuugggca

SEQ ID NO: 344723 - RNA, 22 nt, Human
cauugcacuccagcuugggcaa

SEQ ID NO: 344724 - RNA, 23 nt, Human
cauugcacuccagcuugggcaac

SEQ ID NO: 344725 - RNA, 24 nt, Human
cauugcacuccagcuugggcaaca

SEQ ID NO: 344726 - RNA, 18 nt, Human
cauugcuaauacacaaaa

SEQ ID NO: 344727 - RNA, 20 nt, Human
ccaacaucuguuaguagagu

SEQ ID NO: 344728 - RNA, 22 nt, Human
ccauauaaugcaacuaggaagc

SEQ ID NO: 344729 - RNA, 20 nt, Human
ccauugcacuccagcuuggg

SEQ ID NO: 344730 - RNA, 21 nt, Human
ccauugcacuccagcuugggc

SEQ ID NO: 344731 - RNA, 23 nt, Human
ccauugcacuccagcuugggcaa

SEQ ID NO: 344732 - RNA, 24 nt, Human
ccauugcacuccagcuugggcaac

SEQ ID NO: 344733 - RNA, 25 nt, Human
cccaaaaauauccaaaaacauuuua

SEQ ID NO: 344734 - RNA, 19 nt, Human
ccgcagccuuaguuugccc

SEQ ID NO: 344735 - RNA, 24 nt, Human
ccugaccaacguggaaaaacccca

SEQ ID NO: 344736 - RNA, 22 nt, Human
ccugaggucaggaguucgagac

SEQ ID NO: 344737 - RNA, 21 nt, Human
ccuguaaucccagcucuuugg

SEQ ID NO: 344738 - RNA, 23 nt, Human
cgacuaguaacaaaucccucuua

SEQ ID NO: 344739 - RNA, 24 nt, Human
cgccauugcacuccagcuugggca

SEQ ID NO: 344740 - RNA, 19 nt, Human
cggacaacgccccgcggaa

SEQ ID NO: 344741 - RNA, 24 nt, Human
cggaucaccugaggucaggaguuc

SEQ ID NO: 344742 - RNA, 27 nt, Human
cggaucaccugaggucaggaguucgag

SEQ ID NO: 344743 - RNA, 19 nt, Human
cguggaaaaaccccaucuc

SEQ ID NO: 344744 - RNA, 20 nt, Human
cucacaccuguaaucccagc

SEQ ID NO: 344745 - RNA, 24 nt, Human
cucacaccuguaaucccagcucuu

SEQ ID NO: 344746 - RNA, 22 nt, Human
cuccagcuugggcaacaagagu

SEQ ID NO: 344747 - RNA, 27 nt, Human
cugagguggacggaucaccugagguca

SEQ ID NO: 344748 - RNA, 21 nt, Human
gaaaaaccccaucucaacuaa

SEQ ID NO: 344749 - RNA, 18 nt, Human
gaaaugugaauaauggug

SEQ ID NO: 344750 - RNA, 23 nt, Human
gagaaucgcuugaacccaggagg

SEQ ID NO: 344751 - RNA, 23 nt, Human
gagaccagccugaccaacgugga

SEQ ID NO: 344752 - RNA, 23 nt, Human
gagaucgcgccauugcacuccag

SEQ ID NO: 344753 - RNA, 23 nt, Human
gagguggacggaucaccugaggu

SEQ ID NO: 344754 - RNA, 19 nt, Human
gagucccuuuaauuuagcu

SEQ ID NO: 344755 - RNA, 21 nt, Human
gaucaccugaggucaggaguu

SEQ ID NO: 344756 - RNA, 24 nt, Human
gaucaccugaggucaggaguucga

SEQ ID NO: 344757 - RNA, 19 nt, Human
gauguggauggcagauuca

SEQ ID NO: 344758 - RNA, 19 nt, Human
gcagccuuaguuugcccgc

SEQ ID NO: 344759 - RNA, 22 nt, Human
gcaggagaaucgcuugaaccca

SEQ ID NO: 344760 - RNA, 22 nt, Human
gccauugcacuccagcuugggc

SEQ ID NO: 344761 - RNA, 24 nt, Human
gccauugcacuccagcuugggcaa

SEQ ID NO: 344762 - RNA, 23 nt, Human
ggaucaccugaggucaggaguuc

SEQ ID NO: 344763 - RNA, 24 nt, Human
ggauguuguggugagccgagaucg

SEQ ID NO: 344764 - RNA, 18 nt, Human
guggaaaaaccccaucuc

SEQ ID NO: 344765 - RNA, 20 nt, Human
guggcgcaugcuguauuccc

SEQ ID NO: 344766 - RNA, 21 nt, Human
uaaaaauacaaaaauuagcca

SEQ ID NO: 344767 - RNA, 18 nt, Human
uaaaaucguuucaaacau

SEQ ID NO: 344768 - RNA, 21 nt, Human
uaaagaagcaaaacaaaaaca

SEQ ID NO: 344769 - RNA, 21 nt, Human
uaacaggauggagucccuuua

SEQ ID NO: 344770 - RNA, 23 nt, Human
uaaugguguuuaauaauaucauc

SEQ ID NO: 344771 - RNA, 22 nt, Human
uaccaaguccugguuccacauu

SEQ ID NO: 344772 - RNA, 22 nt, Human
uagcucacaccuguaaucccag

SEQ ID NO: 344773 - RNA, 22 nt, Human
uaguagaguuacuugccaagcu

SEQ ID NO: 344774 - RNA, 19 nt, Human
uauaaaagaauugaaauga

SEQ ID NO: 344775 - RNA, 20 nt, Human
uaucaggaagcagaagaguc

SEQ ID NO: 344776 - RNA, 18 nt, Human
uaugcagagaaacaaaac

SEQ ID NO: 344777 - RNA, 19 nt, Human
uccagcuugggcaacaaga

SEQ ID NO: 344778 - RNA, 18 nt, Human
ucccagcccgcggagcuc

SEQ ID NO: 344779 - RNA, 21 nt, Human
uccggacaacgccccgcggaa

SEQ ID NO: 344780 - RNA, 23 nt, Human
uccuagaguguggcgugaacccu

SEQ ID NO: 344781 - RNA, 25 nt, Human
ugaaagcugauuucauaauagcugc

SEQ ID NO: 344782 - RNA, 24 nt, Human
ugaaccaauuacuuuagauuacaa

SEQ ID NO: 344783 - RNA, 22 nt, Human
ugagccgagaucgcgccauugc

SEQ ID NO: 344784 - RNA, 19 nt, Human
ugaggauuggguccaagaa

SEQ ID NO: 344785 - RNA, 19 nt, Human
ugaggauuggguccaagaa

SEQ ID NO: 344786 - RNA, 21 nt, Human
ugaggauuggguccaagaaug

SEQ ID NO: 344787 - RNA, 20 nt, Human
ugaggcaggagaaucgcuug

SEQ ID NO: 344788 - RNA, 24 nt, Human
ugaggcaggagaaucgcuugaacc

SEQ ID NO: 344789 - RNA, 25 nt, Human
ugaggcaggagaaucgcuugaaccc

SEQ ID NO: 344790 - RNA, 20 nt, Human
ugagguggacggaucaccug

SEQ ID NO: 344791 - RNA, 24 nt, Human
ugagguggacggaucaccugaggu

SEQ ID NO: 344792 - RNA, 18 nt, Human
ugauauggagucucaaaa

SEQ ID NO: 344793 - RNA, 19 nt, Human
ugcacuccagcuugggcaa

SEQ ID NO: 344794 - RNA, 22 nt, Human
ugcacuccagcuugggcaacaa

SEQ ID NO: 344795 - RNA, 23 nt, Human
ugcccuuauaaaagaauugaaau

SEQ ID NO: 344796 - RNA, 23 nt, Human
ugccuauuucuuaccuaaaaguc

SEQ ID NO: 344797 - RNA, 23 nt, Human
ugcuguauucccagcuacucagg

SEQ ID NO: 344798 - RNA, 24 nt, Human
uggacggaucaccugaggucagga

SEQ ID NO: 344799 - RNA, 18 nt, Human
ugggaggcugagguggac

SEQ ID NO: 344800 - RNA, 19 nt, Human
ugggaggcugagguggacg

SEQ ID NO: 344801 - RNA, 24 nt, Human
ugggaggcugagguggacggauca

SEQ ID NO: 344802 - RNA, 18 nt, Human
uguacaaaaucucauuug

SEQ ID NO: 344803 - RNA, 21 nt, Human
uguacaaaaucucauuugcca

SEQ ID NO: 344804 - RNA, 18 nt, Human
ugugauguggauggcaga

SEQ ID NO: 344805 - RNA, 24 nt, Human
ugugauguggauggcagauucagu

SEQ ID NO: 344806 - RNA, 22 nt, Human
uguguacauaaaaaugugcaua

SEQ ID NO: 344807 - RNA, 18 nt, Human
uuaaaaaauucaauuuac

SEQ ID NO: 344808 - RNA, 22 nt, Human
uuaaaacuacuuaauuuaaaau

SEQ ID NO: 344809 - RNA, 18 nt, Human
uuaaauagcuauaccaac

SEQ ID NO: 344810 - RNA, 24 nt, Human
uuaaauagcuuuuaagcugauuaa

SEQ ID NO: 344811 - RNA, 20 nt, Human
uuaacccaaaaauauccaaa

SEQ ID NO: 344812 - RNA, 18 nt, Human
uuacuugauaugaauggc

SEQ ID NO: 344813 - RNA, 21 nt, Human
uuagcacaaggccacgcacag

SEQ ID NO: 344814 - RNA, 23 nt, Human
uugauaugaauggcauaucuaau

SEQ ID NO: 344815 - RNA, 23 nt, Human
uugccaagcugguuaucaaaugc

SEQ ID NO: 344816 - RNA, 25 nt, Human
uugggaggcugagguggacggauca

SEQ ID NO: 344817 - RNA, 18 nt, Human
uuguggugagccgagauc

SEQ ID NO: 344818 - RNA, 22 nt, Human
uuguggugagccgagaucgcgc

SEQ ID NO: 344819 - RNA, 20 nt, Human
uuuagcuacuucuguuuucu

SEQ ID NO: 344820 - RNA, 19 nt, Human
uuuuaagcuuugguuaaua

SEQ ID NO: 344821 - RNA, 24 nt, Human
uuuugaaccucaaguaaaugaugu

SEQ ID NO: 344822 - RNA, 26 nt, Human
aaaaaaaguaaaaauaaaacaaaaaa

SEQ ID NO: 344823 - RNA, 24 nt, Human
aaaaaaauuccccccaaaccaaaa

SEQ ID NO: 344824 - RNA, 23 nt, Human
aaaaaauuccccccaaaccaaaa

SEQ ID NO: 344825 - RNA, 28 nt, Human
aaaaaauuccccccaaaccaaaacacca

SEQ ID NO: 344826 - RNA, 19 nt, Human
aaaaauuccccccaaacca

SEQ ID NO: 344827 - RNA, 22 nt, Human
aaaaauuccccccaaaccaaaa

SEQ ID NO: 344828 - RNA, 18 nt, Human
aaaacaaaaaaacccuca

SEQ ID NO: 344829 - RNA, 26 nt, Human
aaaacaaaaaaacccucaugccuaaa

SEQ ID NO: 344830 - RNA, 18 nt, Human
aaacacacacagccauau

SEQ ID NO: 344831 - RNA, 21 nt, Human
aaaccaccauuagaagaauga

SEQ ID NO: 344832 - RNA, 19 nt, Human
aaauaaaacaaaaaaaccc

SEQ ID NO: 344833 - RNA, 23 nt, Human
aaauacugaaagcagcaagauuc

SEQ ID NO: 344834 - RNA, 26 nt, Human
aaaucuucaagacaggaaacaaaaca

SEQ ID NO: 344835 - RNA, 25 nt, Human
aaaugaccauuuucagcauaaaagc

SEQ ID NO: 344836 - RNA, 22 nt, Human
aacccucaugccuaaauuuaga

SEQ ID NO: 344837 - RNA, 24 nt, Human
aaccuuuugaaaucaagagucuaa

SEQ ID NO: 344838 - RNA, 21 nt, Human
aagugaacagggaaaugacca

SEQ ID NO: 344839 - RNA, 20 nt, Human
aaugacaaaaaaaaaguaaa

SEQ ID NO: 344840 - RNA, 20 nt, Human
acaaaacaguacauauauau

SEQ ID NO: 344841 - RNA, 23 nt, Human
acacacacacacacacacacaca

SEQ ID NO: 344842 - RNA, 23 nt, Human
acacacacacacacacacacaca

SEQ ID NO: 344843 - RNA, 23 nt, Human
acacacacacacacacacacaca

SEQ ID NO: 344844 - RNA, 23 nt, Human
acacacacacacacacacacaca

SEQ ID NO: 344845 - RNA, 23 nt, Human
acacacauacacacacacacaca

SEQ ID NO: 344846 - RNA, 25 nt, Human
acacagacucaaacacacacagcca

SEQ ID NO: 344847 - RNA, 23 nt, Human
accauaacucaaaaucuucaaga

SEQ ID NO: 344848 - RNA, 21 nt, Human
agaaacccuucuucacauguc

SEQ ID NO: 344849 - RNA, 22 nt, Human
agaagacaagcccaaaccacca

SEQ ID NO: 344850 - RNA, 18 nt, Human
agacaggaaacaaaacag

SEQ ID NO: 344851 - RNA, 20 nt, Human
agauguauccuuaaaguuuu

SEQ ID NO: 344852 - RNA, 24 nt, Human
aguaaaaauaaaacaaaaaaaccc

SEQ ID NO: 344853 - RNA, 23 nt, Human
auaaaacaaaaaaacccucaugc

SEQ ID NO: 344854 - RNA, 22 nt, Human
auaagaugaaauccacaauguu

SEQ ID NO: 344855 - RNA, 24 nt, Human
auaaucaucaaacauuugaaguau

SEQ ID NO: 344856 - RNA, 19 nt, Human
auauauauauauauauaua

SEQ ID NO: 344857 - RNA, 19 nt, Human
auauauauauauauauaua

SEQ ID NO: 344858 - RNA, 19 nt, Human
auauauauauauauauaua

SEQ ID NO: 344859 - RNA, 19 nt, Human
auauauauauauauauaua

SEQ ID NO: 344860 - RNA, 19 nt, Human
auauauauauauauauaua

SEQ ID NO: 344861 - RNA, 19 nt, Human
auauauauauauauauaua

SEQ ID NO: 344862 - RNA, 19 nt, Human
auauauauauauauauaua

SEQ ID NO: 344863 - RNA, 19 nt, Human
auauauauauauauauaua

SEQ ID NO: 344864 - RNA, 19 nt, Human
auauauauauauauauaua

SEQ ID NO: 344865 - RNA, 19 nt, Human
auauauauauauauauaua

SEQ ID NO: 344866 - RNA, 19 nt, Human
auauauauauauauauaua

SEQ ID NO: 344867 - RNA, 22 nt, Human
augguccacagauauaagauga

SEQ ID NO: 344868 - RNA, 19 nt, Human
augugauuugccaggaaaa

SEQ ID NO: 344869 - RNA, 25 nt, Human
caaaaaaaucaggaaauacugaaag

SEQ ID NO: 344870 - RNA, 24 nt, Human
caaaacaguaaauagacuagaagc

SEQ ID NO: 344871 - RNA, 23 nt, Human
caacaaaauaagaagucauuaaa

SEQ ID NO: 344872 - RNA, 18 nt, Human
caagacaggaaacaaaac

SEQ ID NO: 344873 - RNA, 22 nt, Human
caagagucuaaaacacaauaca

SEQ ID NO: 344874 - RNA, 22 nt, Human
cacaauacauuuuucagguagg

SEQ ID NO: 344875 - RNA, 18 nt, Human
cacacacacacacacaca

SEQ ID NO: 344876 - RNA, 20 nt, Human
cacacacacacacacacaca

SEQ ID NO: 344877 - RNA, 20 nt, Human
cacacacacacacacacaca

SEQ ID NO: 344878 - RNA, 20 nt, Human
cacacacacacacacacaca

SEQ ID NO: 344879 - RNA, 20 nt, Human
cacacacacacacacacaca

SEQ ID NO: 344880 - RNA, 20 nt, Human
cacacacacacacacacaca

SEQ ID NO: 344881 - RNA, 20 nt, Human
cacacacacacacacacaca

SEQ ID NO: 344882 - RNA, 20 nt, Human
cacacacacacacacacaca

SEQ ID NO: 344883 - RNA, 22 nt, Human
cacacacacacacacacacaca

SEQ ID NO: 344884 - RNA, 22 nt, Human
cacacacacacacacacacaca

SEQ ID NO: 344885 - RNA, 18 nt, Human
cacacauacacacacaca

SEQ ID NO: 344886 - RNA, 21 nt, Human
cacagacucaaacacacacag

SEQ ID NO: 344887 - RNA, 28 nt, Human
caccauaaagcuucuaagacuuauggga

SEQ ID NO: 344888 - RNA, 23 nt, Human
cacgcaagauagcauucugcuuu

SEQ ID NO: 344889 - RNA, 21 nt, Human
cacuaaagauaaucuucaucu

SEQ ID NO: 344890 - RNA, 22 nt, Human
cacuaaagauaaucuucaucuc

SEQ ID NO: 344891 - RNA, 25 nt, Human
caggaaaaaaaaaaaauucccccca

SEQ ID NO: 344892 - RNA, 19 nt, Human
ccaaaccaccauuagaaga

SEQ ID NO: 344893 - RNA, 21 nt, Human
cccaagcagaaucuauuccua

SEQ ID NO: 344894 - RNA, 19 nt, Human
cccagacuagaagacaagc

SEQ ID NO: 344895 - RNA, 19 nt, Human
ccccaaaccaaaacaccau

SEQ ID NO: 344896 - RNA, 18 nt, Human
cccccaaaccaaaacacc

SEQ ID NO: 344897 - RNA, 22 nt, Human
ccccccaaaccaaaacaccauu

SEQ ID NO: 344898 - RNA, 18 nt, Human
cccucagucugaauugug

SEQ ID NO: 344899 - RNA, 28 nt, Human
ccuaugguucaguuuaaaaccggggucc

SEQ ID NO: 344900 - RNA, 20 nt, Human
cggcccagacuagaagacaa

SEQ ID NO: 344901 - RNA, 22 nt, Human
gaaacacuuaggaguuaaagca

SEQ ID NO: 344902 - RNA, 24 nt, Human
gaauaaacuaggaugguccacaga

SEQ ID NO: 344903 - RNA, 23 nt, Human
gaccauaaucaucaaacauuuga

SEQ ID NO: 344904 - RNA, 18 nt, Human
gcauaauguagacaggag

SEQ ID NO: 344905 - RNA, 21 nt, Human
gccaucauagugaacaaccuu

SEQ ID NO: 344906 - RNA, 20 nt, Human
gcgugugugugucucucccu

SEQ ID NO: 344907 - RNA, 24 nt, Human
ggaaccuuuugaaaucaagagucu

SEQ ID NO: 344908 - RNA, 27 nt, Human
ggcuuuuguaauuuaaaaaaaaaaaaa

SEQ ID NO: 344909 - RNA, 21 nt, Human
gggaguuuaccggaaugagga

SEQ ID NO: 344910 - RNA, 20 nt, Human
guaaauagacuagaagccag

SEQ ID NO: 344911 - RNA, 19 nt, Human
uaaaaagcaguuuugauau

SEQ ID NO: 344912 - RNA, 22 nt, Human
uaaaacaaaaaaacccucaugc

SEQ ID NO: 344913 - RNA, 23 nt, Human
uaaaacaaaaaaacccucaugcc

SEQ ID NO: 344914 - RNA, 23 nt, Human
uaaccauaacucaaaaucuucaa

SEQ ID NO: 344915 - RNA, 22 nt, Human
uaacucaaaaucuucaagacag

SEQ ID NO: 344916 - RNA, 24 nt, Human
uaagaaguuuuuauaaauuguuuu

SEQ ID NO: 344917 - RNA, 20 nt, Human
uaagaugccaucauagugaa

SEQ ID NO: 344918 - RNA, 18 nt, Human
uagaagaaugaaauacga

SEQ ID NO: 344919 - RNA, 19 nt, Human
uagaagacaagcccaaacc

SEQ ID NO: 344920 - RNA, 20 nt, Human
uaguaccaaccugaugacaa

SEQ ID NO: 344921 - RNA, 20 nt, Human
uauauagauauauagauaua

SEQ ID NO: 344922 - RNA, 19 nt, Human
uauauauacacacauacac

SEQ ID NO: 344923 - RNA, 19 nt, Human
uauauauauauauauauau

SEQ ID NO: 344924 - RNA, 19 nt, Human
uauauauauauauauauau

SEQ ID NO: 344925 - RNA, 19 nt, Human
uauauauauauauauauau

SEQ ID NO: 344926 - RNA, 19 nt, Human
uauauauauauauauauau

SEQ ID NO: 344927 - RNA, 23 nt, Human
uauauauauauauauauauauac

SEQ ID NO: 344928 - RNA, 18 nt, Human
uaugcagaugauauucac

SEQ ID NO: 344929 - RNA, 22 nt, Human
uaugugacaggcagauaagcau

SEQ ID NO: 344930 - RNA, 27 nt, Human
uauugccucuguugguaauaugacagg

SEQ ID NO: 344931 - RNA, 20 nt, Human
uauuguacagacuauguaca

SEQ ID NO: 344932 - RNA, 25 nt, Human
ucaagacaggaaacaaaacaguaca

SEQ ID NO: 344933 - RNA, 18 nt, Human
ucacagacacagacucaa

SEQ ID NO: 344934 - RNA, 21 nt, Human
ucacugcagcuuuuauugccu

SEQ ID NO: 344935 - RNA, 20 nt, Human
uccagccagcagaaauugac

SEQ ID NO: 344936 - RNA, 21 nt, Human
ucugcuuugaugagaaaacug

SEQ ID NO: 344937 - RNA, 18 nt, Human
ugacaggcagauaagcau

SEQ ID NO: 344938 - RNA, 23 nt, Human
ugagaaaacugagcuaaucugag

SEQ ID NO: 344939 - RNA, 23 nt, Human
ugauaugucauuguuucuuaaaa

SEQ ID NO: 344940 - RNA, 21 nt, Human
ugauuugccaggaaaaaaaaa

SEQ ID NO: 344941 - RNA, 21 nt, Human
ugcaauuuucuguuguauuua

SEQ ID NO: 344942 - RNA, 21 nt, Human
uggcaaaaaggaaacuguacc

SEQ ID NO: 344943 - RNA, 22 nt, Human
uggcaaaaaggaaacuguaccu

SEQ ID NO: 344944 - RNA, 18 nt, Human
ugggagaauaaacuagga

SEQ ID NO: 344945 - RNA, 20 nt, Human
ugggagaauaaacuaggaug

SEQ ID NO: 344946 - RNA, 19 nt, Human
uguagccagacauuuaucu

SEQ ID NO: 344947 - RNA, 21 nt, Human
uguagccagacauuuaucuuc

SEQ ID NO: 344948 - RNA, 19 nt, Human
uguccuccaggccucuccc

SEQ ID NO: 344949 - RNA, 23 nt, Human
ugugaggauugaucuucaguuca

SEQ ID NO: 344950 - RNA, 19 nt, Human
uguggaaccuuuugaaauc

SEQ ID NO: 344951 - RNA, 20 nt, Human
uuaaaaaaaaaaaaaaaaaa

SEQ ID NO: 344952 - RNA, 20 nt, Human
uuaaaaaaaaaaaaaaaaaa

SEQ ID NO: 344953 - RNA, 24 nt, Human
uuaaaaaaaaaaaaaaaaaaaaau

SEQ ID NO: 344954 - RNA, 27 nt, Human
uucccuguagccagacauuuaucuuca

SEQ ID NO: 344955 - RNA, 20 nt, Human
uugcauaaaauguacugcua

SEQ ID NO: 344956 - RNA, 23 nt, Human
uugguguccuccaggccucuccc

SEQ ID NO: 344957 - RNA, 21 nt, Human
uuguaccuguuuugacauuug

SEQ ID NO: 344958 - RNA, 24 nt, Human
uuugacauuuggcaaaaaggaaac

SEQ ID NO: 344959 - RNA, 20 nt, Human
uuuggcaaaaaggaaacugu

SEQ ID NO: 344960 - RNA, 26 nt, Human
aaaaaaacaaaauacaugaaugcagg

SEQ ID NO: 344961 - RNA, 23 nt, Human
aaaacaaagcaagggaaacaaaa

SEQ ID NO: 344962 - RNA, 18 nt, Human
aaaaguacgcacucacca

SEQ ID NO: 344963 - RNA, 26 nt, Human
aaaauccuuuccauguaacauagcuu

SEQ ID NO: 344964 - RNA, 21 nt, Human
aaagcaagggaaacaaaaggc

SEQ ID NO: 344965 - RNA, 23 nt, Human
aaagcaagggaaacaaaaggcuu

SEQ ID NO: 344966 - RNA, 19 nt, Human
aaaguacgcacucaccaag

SEQ ID NO: 344967 - RNA, 23 nt, Human
aagggaaacaaaaggcuucaaaa

SEQ ID NO: 344968 - RNA, 18 nt, Human
aaugcaggaauguguaca

SEQ ID NO: 344969 - RNA, 20 nt, Human
acaaagcaagggaaacaaaa

SEQ ID NO: 344970 - RNA, 20 nt, Human
acaaagcaagggaaacaaaa

SEQ ID NO: 344971 - RNA, 20 nt, Human
acaaagcaagggaaacaaaa

SEQ ID NO: 344972 - RNA, 23 nt, Human
acacagucuacaccacaaccacc

SEQ ID NO: 344973 - RNA, 20 nt, Human
acaccacaaccaccugagcg

SEQ ID NO: 344974 - RNA, 22 nt, Human
acagcaagucaaugcuuaucag

SEQ ID NO: 344975 - RNA, 18 nt, Human
acucagucuauuaaaccc

SEQ ID NO: 344976 - RNA, 20 nt, Human
acuggagaagcaaaaaccua

SEQ ID NO: 344977 - RNA, 20 nt, Human
agaaagagagagccuucgaa

SEQ ID NO: 344978 - RNA, 18 nt, Human
aggaagacacacuuacua

SEQ ID NO: 344979 - RNA, 21 nt, Human
aggaauguguacagguagaaa

SEQ ID NO: 344980 - RNA, 18 nt, Human
aguuagggucagugacuu

SEQ ID NO: 344981 - RNA, 19 nt, Human
aucagacccaucugacuca

SEQ ID NO: 344982 - RNA, 21 nt, Human
caagcauuaccaacuauguag

SEQ ID NO: 344983 - RNA, 23 nt, Human
cacagucuacaccacaaccaccu

SEQ ID NO: 344984 - RNA, 24 nt, Human
caccgccaagacuuccccgcggac

SEQ ID NO: 344985 - RNA, 22 nt, Human
cacuguguagcuaacaugggau

SEQ ID NO: 344986 - RNA, 19 nt, Human
cagaagccugaaggcagag

SEQ ID NO: 344987 - RNA, 28 nt, Human
cagcgguccucagaagagacaauuuuga

SEQ ID NO: 344988 - RNA, 23 nt, Human
caucaagagccucugcacugugu

SEQ ID NO: 344989 - RNA, 22 nt, Human
ccaagacuuccccgcggacccc

SEQ ID NO: 344990 - RNA, 21 nt, Human
ccgcggaccccgcaacagcuc

SEQ ID NO: 344991 - RNA, 21 nt, Human
cgccccgcugagaagaaccca

SEQ ID NO: 344992 - RNA, 18 nt, Human
cuucauggucugcaguua

SEQ ID NO: 344993 - RNA, 20 nt, Human
gacacacuuacuaaaauccc

SEQ ID NO: 344994 - RNA, 22 nt, Human
gacacacuuacuaaaaucccca

SEQ ID NO: 344995 - RNA, 22 nt, Human
gaccgcuucucagcucgccccg

SEQ ID NO: 344996 - RNA, 19 nt, Human
gagcggggauggggggggg

SEQ ID NO: 344997 - RNA, 24 nt, Human
gccaagacuuccccgcggacccuu

SEQ ID NO: 344998 - RNA, 19 nt, Human
gccugaaggcagagggagu

SEQ ID NO: 344999 - RNA, 19 nt, Human
ggggauggggggggggugg

SEQ ID NO: 345000 - RNA, 22 nt, Human
uacaugaaugcaggaaugugua

SEQ ID NO: 345001 - RNA, 20 nt, Human
uagaaaaaguacgcacucac

SEQ ID NO: 345002 - RNA, 21 nt, Human
ucaaaauccuuuccauguaac

SEQ ID NO: 345003 - RNA, 21 nt, Human
uccaccaucaagagccucugc

SEQ ID NO: 345004 - RNA, 19 nt, Human
uccccaggugcucaugacc

SEQ ID NO: 345005 - RNA, 23 nt, Human
uccguaggccugacacagucuac

SEQ ID NO: 345006 - RNA, 19 nt, Human
ugaaauugacagaagccug

SEQ ID NO: 345007 - RNA, 25 nt, Human
ugacuggucuugcgcuagccacugg

SEQ ID NO: 345008 - RNA, 20 nt, Human
ugacuuacgacauaauuccu

SEQ ID NO: 345009 - RNA, 24 nt, Human
ugagaagaacccaaguugugagcg

SEQ ID NO: 345010 - RNA, 24 nt, Human
uggcugacuccguaggccugacac

SEQ ID NO: 345011 - RNA, 20 nt, Human
ugggaucgucacacggaggu

SEQ ID NO: 345012 - RNA, 21 nt, Human
uuaguccaccaucaagagccu

SEQ ID NO: 345013 - RNA, 21 nt, Human
uuccauguaacauagcuuuag

SEQ ID NO: 345014 - RNA, 23 nt, Human
uuugcaaacuucugcccgauugg

SEQ ID NO: 345015 - RNA, 23 nt, Human
uuuuuuuuuuuuuuuuuuuuagg

SEQ ID NO: 345016 - RNA, 23 nt, Human
aaaacaaaauaaaacagaagagc

SEQ ID NO: 345017 - RNA, 19 nt, Human
aaaacgcaguaacacuucu

SEQ ID NO: 345018 - RNA, 22 nt, Human
aaaagccuccgcggccaucuuu

SEQ ID NO: 345019 - RNA, 20 nt, Human
aaacaggcagaggccagcag

SEQ ID NO: 345020 - RNA, 23 nt, Human
aaacauuuuaagaagagaaacuc

SEQ ID NO: 345021 - RNA, 23 nt, Human
aacagauugugaaacuaggucca

SEQ ID NO: 345022 - RNA, 24 nt, Human
aaccuacuuccuagaagcccccug

SEQ ID NO: 345023 - RNA, 22 nt, Human
aagcaggaaagugcaauucuga

SEQ ID NO: 345024 - RNA, 19 nt, Human
aaggaagucagaggagaca

SEQ ID NO: 345025 - RNA, 21 nt, Human
acaaaacaaaauaaaacagaa

SEQ ID NO: 345026 - RNA, 19 nt, Human
acacuucuucuuuuccucu

SEQ ID NO: 345027 - RNA, 21 nt, Human
accacaaacgccuucccgcga

SEQ ID NO: 345028 - RNA, 18 nt, Human
agaacgcggccgccacug

SEQ ID NO: 345029 - RNA, 18 nt, Human
agagcaguaaguuucaaa

SEQ ID NO: 345030 - RNA, 18 nt, Human
aggaagucagaggagaca

SEQ ID NO: 345031 - RNA, 24 nt, Human
aggcagaggccagcagguuucucg

SEQ ID NO: 345032 - RNA, 21 nt, Human
auaaaacagaagagcaguaag

SEQ ID NO: 345033 - RNA, 19 nt, Human
caaagaggccgagaaggug

SEQ ID NO: 345034 - RNA, 25 nt, Human
cacuucuucuuuuccucugccccug

SEQ ID NO: 345035 - RNA, 27 nt, Human
cagaagagcaguaaguuucaaaaggaa

SEQ ID NO: 345036 - RNA, 23 nt, Human
cagcuguaaaauaucucagguac

SEQ ID NO: 345037 - RNA, 18 nt, Human
caggcagaggccagcagg

SEQ ID NO: 345038 - RNA, 23 nt, Human
caucccugucaauugcccaucuc

SEQ ID NO: 345039 - RNA, 18 nt, Human
caugacaagcaggaaagu

SEQ ID NO: 345040 - RNA, 25 nt, Human
ccacacaaccaaagugggaaaugaa

SEQ ID NO: 345041 - RNA, 19 nt, Human
cccaguuggcuccaaaagc

SEQ ID NO: 345042 - RNA, 24 nt, Human
cccucugagcuucaaacaaaacaa

SEQ ID NO: 345043 - RNA, 22 nt, Human
ccuauaacgcccugguccugcu

SEQ ID NO: 345044 - RNA, 19 nt, Human
ccucaagaaaucccacccu

SEQ ID NO: 345045 - RNA, 20 nt, Human
ccugcucaucuuucagcagu

SEQ ID NO: 345046 - RNA, 24 nt, Human
cgcucccaguuggcuccaaaagcc

SEQ ID NO: 345047 - RNA, 24 nt, Human
cuccaaaagccuccgcggccaucu

SEQ ID NO: 345048 - RNA, 18 nt, Human
cuccucugcccaugcucc

SEQ ID NO: 345049 - RNA, 18 nt, Human
cugcucaucuuucagcag

SEQ ID NO: 345050 - RNA, 22 nt, Human
cuggcaccacaaacgccuuccc

SEQ ID NO: 345051 - RNA, 21 nt, Human
cugucuccucugcccaugcuc

SEQ ID NO: 345052 - RNA, 22 nt, Human
cugucuccucugcccaugcucc

SEQ ID NO: 345053 - RNA, 23 nt, Human
cuuccuagaagcccccuggccag

SEQ ID NO: 345054 - RNA, 20 nt, Human
gaaaacaggcagaggccagc

SEQ ID NO: 345055 - RNA, 19 nt, Human
gaaaacgcguacugcgcuc

SEQ ID NO: 345056 - RNA, 19 nt, Human
gcccugguccugcucaucu

SEQ ID NO: 345057 - RNA, 20 nt, Human
ggagccagucagcucccggg

SEQ ID NO: 345058 - RNA, 22 nt, Human
gggaauagcggaaaaccacaga

SEQ ID NO: 345059 - RNA, 20 nt, Human
guaaaauaucucagguaccc

SEQ ID NO: 345060 - RNA, 20 nt, Human
uaaacauuuuaagaagagaa

SEQ ID NO: 345061 - RNA, 18 nt, Human
uacaaaacgcaguaacac

SEQ ID NO: 345062 - RNA, 22 nt, Human
uaccgcagaacuucauguucac

SEQ ID NO: 345063 - RNA, 19 nt, Human
uagaagcccccuggccaga

SEQ ID NO: 345064 - RNA, 21 nt, Human
uagcauccuuccaauuccauc

SEQ ID NO: 345065 - RNA, 19 nt, Human
uaucucagguacccaguua

SEQ ID NO: 345066 - RNA, 19 nt, Human
ucagccaaucggugcucac

SEQ ID NO: 345067 - RNA, 21 nt, Human
ucagcucccggggugcucgcu

SEQ ID NO: 345068 - RNA, 18 nt, Human
uccugucuccucugccca

SEQ ID NO: 345069 - RNA, 21 nt, Human
ucuccugguagcauccuucca

SEQ ID NO: 345070 - RNA, 25 nt, Human
ucuggcaccacaaacgccuucccgc

SEQ ID NO: 345071 - RNA, 22 nt, Human
ugauagaugaaaccuacuuccu

SEQ ID NO: 345072 - RNA, 24 nt, Human
ugccacacaaccaaagugggaaau

SEQ ID NO: 345073 - RNA, 26 nt, Human
uggcaccacaaacgccuucccgcgaa

SEQ ID NO: 345074 - RNA, 24 nt, Human
ugggggaauagcggaaaaccacag

SEQ ID NO: 345075 - RNA, 18 nt, Human
uguaacaagcuuauuugu

SEQ ID NO: 345076 - RNA, 24 nt, Human
ugugucaaaaagucaugacaagca

SEQ ID NO: 345077 - RNA, 20 nt, Human
uuccuagaagcccccuggcc

SEQ ID NO: 345078 - RNA, 21 nt, Human
uuccucaagaaaucccacccu

SEQ ID NO: 345079 - RNA, 19 nt, Human
uucuucuuuuccucugccc

SEQ ID NO: 345080 - RNA, 22 nt, Human
uuuguacaaaacgcaguaacac

SEQ ID NO: 345081 - RNA, 20 nt, Human
aaauguccucuuggagccuc

SEQ ID NO: 345082 - RNA, 22 nt, Human
aauaaguaagaagaauguggua

SEQ ID NO: 345083 - RNA, 19 nt, Human
acuugaccccggaaguggg

SEQ ID NO: 345084 - RNA, 19 nt, Human
acuuucuccacuuucucca

SEQ ID NO: 345085 - RNA, 20 nt, Human
agaggcaguggaggcgggac

SEQ ID NO: 345086 - RNA, 20 nt, Human
agagucaaaagagcuaggcg

SEQ ID NO: 345087 - RNA, 26 nt, Human
aucgcaaucgcgcugucucugaaagg

SEQ ID NO: 345088 - RNA, 27 nt, Human
cauucuucccgcgaacagagucaaaag

SEQ ID NO: 345089 - RNA, 27 nt, Human
ccaagacugcggcuggcgggaaaccca

SEQ ID NO: 345090 - RNA, 24 nt, Human
ccacaccauuucagccucauuuuc

SEQ ID NO: 345091 - RNA, 27 nt, Human
cccaggugcucugcugcuugguuaggg

SEQ ID NO: 345092 - RNA, 21 nt, Human
cccccuuggagaugggccgcg

SEQ ID NO: 345093 - RNA, 19 nt, Human
cccgcccccuuggagaugg

SEQ ID NO: 345094 - RNA, 21 nt, Human
cccgcccccuuggagaugggc

SEQ ID NO: 345095 - RNA, 21 nt, Human
ccgcggugcugugggugcugc

SEQ ID NO: 345096 - RNA, 19 nt, Human
cgagaggcaguggaggcgg

SEQ ID NO: 345097 - RNA, 21 nt, Human
cguaccagcuguucacugcug

SEQ ID NO: 345098 - RNA, 23 nt, Human
cuacuuucuccacuuucuccacc

SEQ ID NO: 345099 - RNA, 22 nt, Human
cucauaaaauaaguaagaagaa

SEQ ID NO: 345100 - RNA, 18 nt, Human
cucgccuucccucuugcc

SEQ ID NO: 345101 - RNA, 21 nt, Human
cucuugccaguucugcguggg

SEQ ID NO: 345102 - RNA, 21 nt, Human
cugaaacuauuguauucccug

SEQ ID NO: 345103 - RNA, 22 nt, Human
cugugcauugucuucacauccu

SEQ ID NO: 345104 - RNA, 21 nt, Human
cuuacuguuuccccauucuuc

SEQ ID NO: 345105 - RNA, 18 nt, Human
cuuucuccacuuucucca

SEQ ID NO: 345106 - RNA, 19 nt, Human
gaaagggguggagaagggg

SEQ ID NO: 345107 - RNA, 24 nt, Human
gaugaagcaaaaggaaacuguaca

SEQ ID NO: 345108 - RNA, 18 nt, Human
gcgugggaggcgcgggag

SEQ ID NO: 345109 - RNA, 19 nt, Human
gcuggcgggaaacccacgg

SEQ ID NO: 345110 - RNA, 19 nt, Human
gcugucucugaaaggggug

SEQ ID NO: 345111 - RNA, 19 nt, Human
gcuucgccaauuaaaugcg

SEQ ID NO: 345112 - RNA, 22 nt, Human
ggagaugggccgcggggucauc

SEQ ID NO: 345113 - RNA, 21 nt, Human
ggugcggcgggggacugcggg

SEQ ID NO: 345114 - RNA, 23 nt, Human
guucacugcugucucgccuuccc

SEQ ID NO: 345115 - RNA, 20 nt, Human
uaaguaagaagaauguggua

SEQ ID NO: 345116 - RNA, 18 nt, Human
uacauuguugcaggagau

SEQ ID NO: 345117 - RNA, 22 nt, Human
ucagugaucuugaucacuuucu

SEQ ID NO: 345118 - RNA, 23 nt, Human
ucauuacauuguugcaggagaug

SEQ ID NO: 345119 - RNA, 20 nt, Human
uccaaaaauguccucuugga

SEQ ID NO: 345120 - RNA, 18 nt, Human
ucccuuagcugcgucacu

SEQ ID NO: 345121 - RNA, 23 nt, Human
ucccuuagcugcgucacucuacu

SEQ ID NO: 345122 - RNA, 19 nt, Human
ucgcgggaggcgccgcaac

SEQ ID NO: 345123 - RNA, 20 nt, Human
ucuacuuucuccacuuucuc

SEQ ID NO: 345124 - RNA, 27 nt, Human
ucuucccgcgaacagagucaaaagagc

SEQ ID NO: 345125 - RNA, 21 nt, Human
ugaaagggguggagaaggggc

SEQ ID NO: 345126 - RNA, 24 nt, Human
ugaaagggguggagaaggggcugg

SEQ ID NO: 345127 - RNA, 21 nt, Human
ugaccccggaaguggggugug

SEQ ID NO: 345128 - RNA, 20 nt, Human
ugacuugaccccggaagugg

SEQ ID NO: 345129 - RNA, 18 nt, Human
ugcauugucuucacaucc

SEQ ID NO: 345130 - RNA, 18 nt, Human
ugcgugggaggcgcggga

SEQ ID NO: 345131 - RNA, 19 nt, Human
uggaagaauaguaucucau

SEQ ID NO: 345132 - RNA, 30 nt, Human
uuaauauagcucauuuacaaucguaugaaa

SEQ ID NO: 345133 - RNA, 22 nt, Human
uuuuuuuuuuuuuuuuuccuuu

SEQ ID NO: 345134 - RNA, 26 nt, Human
uuuuuuuuuuuuuuuuuuuccuuuaa

SEQ ID NO: 345135 - RNA, 25 nt, Human
uuuuuuuuuuuuuuuuuuuuccuuu

SEQ ID NO: 345136 - RNA, 25 nt, Human
uuuuuuuuuuuuuuuuuuuuuccuu

SEQ ID NO: 345137 - RNA, 25 nt, Human
aaaaaaccauaaagacuuccuuugc

SEQ ID NO: 345138 - RNA, 23 nt, Human
aaacaaaagccagacaaacccaa

SEQ ID NO: 345139 - RNA, 25 nt, Human
aaacaaaagccagacaaaccgacgc

SEQ ID NO: 345140 - RNA, 24 nt, Human
aaacaaaucacaauaacaugaaau

SEQ ID NO: 345141 - RNA, 26 nt, Human
aaacagcugagaaacaacaaaauucu

SEQ ID NO: 345142 - RNA, 19 nt, Human
aaagaaaaagaaaacaaaa

SEQ ID NO: 345143 - RNA, 20 nt, Human
aaagcuuucccaagcugaau

SEQ ID NO: 345144 - RNA, 21 nt, Human
aacaaaagccagacaaaccca

SEQ ID NO: 345145 - RNA, 23 nt, Human
aacaaaagccagacaaacccaag

SEQ ID NO: 345146 - RNA, 19 nt, Human
aacacccugauaaaaucua

SEQ ID NO: 345147 - RNA, 21 nt, Human
aacaguaucuuacucacuaau

SEQ ID NO: 345148 - RNA, 28 nt, Human
aacaugaaauagaaaaaaaccauaaagg

SEQ ID NO: 345149 - RNA, 22 nt, Human
aacccaccucccaagggcucca

SEQ ID NO: 345150 - RNA, 23 nt, Human
aagaaaaagaaaacaaaagccag

SEQ ID NO: 345151 - RNA, 22 nt, Human
aagaaugguggggaggaaucac

SEQ ID NO: 345152 - RNA, 24 nt, Human
aagccagacaaacccaaguugucc

SEQ ID NO: 345153 - RNA, 18 nt, Human
aaucaguuuuaaucacug

SEQ ID NO: 345154 - RNA, 18 nt, Human
acaaacccaaguugucca

SEQ ID NO: 345155 - RNA, 24 nt, Human
acaaagcuuucccaagcugaauaa

SEQ ID NO: 345156 - RNA, 20 nt, Human
acagacaaaauuuguuuuug

SEQ ID NO: 345157 - RNA, 21 nt, Human
acagagguuuuacuuuuuccu

SEQ ID NO: 345158 - RNA, 18 nt, Human
acaggaacacugggcucc

SEQ ID NO: 345159 - RNA, 22 nt, Human
acccaccucccaagggcuccau

SEQ ID NO: 345160 - RNA, 26 nt, Human
auccuuuccaggguaccacccuauua

SEQ ID NO: 345161 - RNA, 22 nt, Human
caaagcuuucccaagcugaaua

SEQ ID NO: 345162 - RNA, 22 nt, Human
caagcaagcucuagucugugcu

SEQ ID NO: 345163 - RNA, 22 nt, Human
cacacaucaaguguaaggugaa

SEQ ID NO: 345164 - RNA, 19 nt, Human
cacgaguccccggcaaggc

SEQ ID NO: 345165 - RNA, 22 nt, Human
caggaagaaacccaagcaagcu

SEQ ID NO: 345166 - RNA, 21 nt, Human
ccauaccgcuggcucccaaaa

SEQ ID NO: 345167 - RNA, 21 nt, Human
cccuggguuucacacauuguu

SEQ ID NO: 345168 - RNA, 18 nt, Human
ccggagcacucggccccu

SEQ ID NO: 345169 - RNA, 24 nt, Human
ccggcaaggcuagagcgucacccc

SEQ ID NO: 345170 - RNA, 24 nt, Human
cguucuuaagaaugguggggagga

SEQ ID NO: 345171 - RNA, 22 nt, Human
cuacucagagcuaacacaacag

SEQ ID NO: 345172 - RNA, 23 nt, Human
cucaagaagucuauugauauugg

SEQ ID NO: 345173 - RNA, 22 nt, Human
cucagagcuaacacaacagcau

SEQ ID NO: 345174 - RNA, 19 nt, Human
cuggaaugaauaacugcuc

SEQ ID NO: 345175 - RNA, 20 nt, Human
gacucuguauccugucaucu

SEQ ID NO: 345176 - RNA, 18 nt, Human
gaguccccggcaaggcua

SEQ ID NO: 345177 - RNA, 18 nt, Human
ggccccuaaauuggccag

SEQ ID NO: 345178 - RNA, 23 nt, Human
gguaccacccuauuaagcauuaa

SEQ ID NO: 345179 - RNA, 19 nt, Human
uaaaaacaguaucuuacuc

SEQ ID NO: 345180 - RNA, 20 nt, Human
uaaacaaaucacaauaacau

SEQ ID NO: 345181 - RNA, 20 nt, Human
uaaauugcaucacuaaaaau

SEQ ID NO: 345182 - RNA, 18 nt, Human
uaaguaaaaagcuucuuu

SEQ ID NO: 345183 - RNA, 24 nt, Human
uaauaugcccuccuuagacauuaa

SEQ ID NO: 345184 - RNA, 22 nt, Human
uacagaccagaaauucuaccac

SEQ ID NO: 345185 - RNA, 22 nt, Human
uaccgcuggcucccaaaagcaa

SEQ ID NO: 345186 - RNA, 23 nt, Human
uaccuaacccaccucccaagggc

SEQ ID NO: 345187 - RNA, 24 nt, Human
uacuuuauaacucacaaaaauaua

SEQ ID NO: 345188 - RNA, 21 nt, Human
uagaaaaaaaccauaaagacu

SEQ ID NO: 345189 - RNA, 23 nt, Human
uagaaccccuggguuucacacau

SEQ ID NO: 345190 - RNA, 22 nt, Human
uagcugacacauauuuuuagac

SEQ ID NO: 345191 - RNA, 24 nt, Human
ucaacccaauauuaccuccaaaca

SEQ ID NO: 345192 - RNA, 21 nt, Human
ucagagcuaacacaacagcau

SEQ ID NO: 345193 - RNA, 21 nt, Human
ucuuaagaaugguggggagga

SEQ ID NO: 345194 - RNA, 23 nt, Human
ucuuaagaaugguggggaggaau

SEQ ID NO: 345195 - RNA, 18 nt, Human
ucuuauuuuuugaaccuu

SEQ ID NO: 345196 - RNA, 21 nt, Human
ugauagauuuuaagaaccaag

SEQ ID NO: 345197 - RNA, 18 nt, Human
ugcaggaagaaacccaag

SEQ ID NO: 345198 - RNA, 21 nt, Human
ugcuuugacaaaacacccuga

SEQ ID NO: 345199 - RNA, 21 nt, Human
uggccaggucgcuguugagga

SEQ ID NO: 345200 - RNA, 20 nt, Human
uguuaaagguccagcuagaa

SEQ ID NO: 345201 - RNA, 21 nt, Human
uguuaaagguccagcuagaaa

SEQ ID NO: 345202 - RNA, 21 nt, Human
uuaagaaccaagaauauggua

SEQ ID NO: 345203 - RNA, 23 nt, Human
uuaauucucaacagaaccccaca

SEQ ID NO: 345204 - RNA, 20 nt, Human
uucuaaauucugggacuagu

SEQ ID NO: 345205 - RNA, 25 nt, Human
uuuaaagaaaaagaaaacaaaagcc

SEQ ID NO: 345206 - RNA, 19 nt, Human
uuucaugaacaggaacacu

SEQ ID NO: 345207 - RNA, 18 nt, Human
aaaccaugacauauagca

SEQ ID NO: 345208 - RNA, 20 nt, Human
agcugauuuucucaguuuug

SEQ ID NO: 345209 - RNA, 24 nt, Human
auacuagaauuaagauauaaaaca

SEQ ID NO: 345210 - RNA, 23 nt, Human
auguuaaaaauauaauuggagca

SEQ ID NO: 345211 - RNA, 25 nt, Human
caacauuaucccauaaucugauuuu

SEQ ID NO: 345212 - RNA, 21 nt, Human
cauuuuaugcucuguuuuuuu

SEQ ID NO: 345213 - RNA, 19 nt, Human
cccugguuugagaaaaagu

SEQ ID NO: 345214 - RNA, 23 nt, Human
ccuuauugcaugauacuuccuug

SEQ ID NO: 345215 - RNA, 19 nt, Human
cuuaaucucugagauguua

SEQ ID NO: 345216 - RNA, 23 nt, Human
gcaucugcaaguuaaaaccauga

SEQ ID NO: 345217 - RNA, 24 nt, Human
gcgcaucugcaaguuaaaaccaug

SEQ ID NO: 345218 - RNA, 18 nt, Human
ggaauuaaaagccauuua

SEQ ID NO: 345219 - RNA, 20 nt, Human
uaaaacagauacuagaauua

SEQ ID NO: 345220 - RNA, 24 nt, Human
uaagcuuuuaauauauaacuuaau

SEQ ID NO: 345221 - RNA, 20 nt, Human
uagaauuaagauauaaaaca

SEQ ID NO: 345222 - RNA, 21 nt, Human
uauaauaggaauuaaaagcca

SEQ ID NO: 345223 - RNA, 23 nt, Human
ucccugguuugagaaaaaguuug

SEQ ID NO: 345224 - RNA, 23 nt, Human
uccuugacucagcaaagccacau

SEQ ID NO: 345225 - RNA, 21 nt, Human
ucucaguuuugcuaccaaaaa

SEQ ID NO: 345226 - RNA, 23 nt, Human
ucuuagaugauagucccugguuu

SEQ ID NO: 345227 - RNA, 23 nt, Human
ugaagcugauuuucucaguuuug

SEQ ID NO: 345228 - RNA, 22 nt, Human
ugagcaguuacguauacgcaaa

SEQ ID NO: 345229 - RNA, 24 nt, Human
ugcacaaugcuuaaauacaauuaa

SEQ ID NO: 345230 - RNA, 25 nt, Human
ugcucuguuuuuuuaaauauaguca

SEQ ID NO: 345231 - RNA, 19 nt, Human
ugcuuucaagcauaaaaca

SEQ ID NO: 345232 - RNA, 23 nt, Human
uggaacaaaagaaauuuaaaaac

SEQ ID NO: 345233 - RNA, 23 nt, Human
uggagcagauagguaccuaaaau

SEQ ID NO: 345234 - RNA, 22 nt, Human
ugguugagaggccucaguugau

SEQ ID NO: 345235 - RNA, 18 nt, Human
uguaauaaacggaaaggu

SEQ ID NO: 345236 - RNA, 18 nt, Human
uuagaugauagucccugg

SEQ ID NO: 345237 - RNA, 23 nt, Human
uugagaggccucaguugauuaaa

SEQ ID NO: 345238 - RNA, 22 nt, Human
uugauugcagaccugaagcuga

SEQ ID NO: 345239 - RNA, 22 nt, Human
uuugguuugacauuuaguaauu

SEQ ID NO: 345240 - RNA, 24 nt, Human
caauacugaacaguuaaggccaca

SEQ ID NO: 345241 - RNA, 25 nt, Human
ccacaacacuuuagggagaauuuga

SEQ ID NO: 345242 - RNA, 21 nt, Human
ccugcgccggggccaggaggc

SEQ ID NO: 345243 - RNA, 25 nt, Human
ggcaguacgggcagccugcgccggg

SEQ ID NO: 345244 - RNA, 22 nt, Human
uaaauaaauaucaaaacugguc

SEQ ID NO: 345245 - RNA, 23 nt, Human
uagcauaaauaaauaucaaaacu

SEQ ID NO: 345246 - RNA, 18 nt, Human
uauacauuacaauacacu

SEQ ID NO: 345247 - RNA, 19 nt, Human
ugacugugaaaacauaaau

SEQ ID NO: 345248 - RNA, 21 nt, Human
uuaagucuuauaucuuuuaaa

SEQ ID NO: 345249 - RNA, 22 nt, Human
aaagaaacuaaacagacccagg

SEQ ID NO: 345250 - RNA, 19 nt, Human
aacauggagaaaccccauc

SEQ ID NO: 345251 - RNA, 20 nt, Human
aacauggagaaaccccaucu

SEQ ID NO: 345252 - RNA, 21 nt, Human
aacauggagaaaccccaucuc

SEQ ID NO: 345253 - RNA, 19 nt, Human
aaccaaagaaacuaaacag

SEQ ID NO: 345254 - RNA, 24 nt, Human
aaggaccggucagggaggagccgg

SEQ ID NO: 345255 - RNA, 25 nt, Human
aaggcccuuccagacccaggaaccc

SEQ ID NO: 345256 - RNA, 24 nt, Human
aaucgcuugagcccgggaggugga

SEQ ID NO: 345257 - RNA, 21 nt, Human
acaaaaaccaaagaaacuaaa

SEQ ID NO: 345258 - RNA, 19 nt, Human
acacugcaugugggaaacc

SEQ ID NO: 345259 - RNA, 19 nt, Human
accagagcuucccagcucc

SEQ ID NO: 345260 - RNA, 27 nt, Human
acgcagcuucggaggccgugcccuagg

SEQ ID NO: 345261 - RNA, 18 nt, Human
acugcaccccagccuggg

SEQ ID NO: 345262 - RNA, 23 nt, Human
acugcaccccagccugggcaaca

SEQ ID NO: 345263 - RNA, 23 nt, Human
agacaggcugagcaaaaaccagg

SEQ ID NO: 345264 - RNA, 24 nt, Human
agacaggcugagcaaaaaccaggc

SEQ ID NO: 345265 - RNA, 24 nt, Human
agcacuuugggaggccgaggcggg

SEQ ID NO: 345266 - RNA, 24 nt, Human
agccuggccaacauggagaaaccc

SEQ ID NO: 345267 - RNA, 21 nt, Human
aggacaaaaagugaauggugg

SEQ ID NO: 345268 - RNA, 19 nt, Human
aggaggcaggaaggauggg

SEQ ID NO: 345269 - RNA, 21 nt, Human
aggauugggugcgguggcuca

SEQ ID NO: 345270 - RNA, 23 nt, Human
aggcaggaaggaugggagggugu

SEQ ID NO: 345271 - RNA, 18 nt, Human
aggcaggccaugagggga

SEQ ID NO: 345272 - RNA, 21 nt, Human
aggccgaggcgggcggaucac

SEQ ID NO: 345273 - RNA, 24 nt, Human
aggccgugcccuagguuucauuua

SEQ ID NO: 345274 - RNA, 26 nt, Human
aggcgggcggaucacuugagaccagg

SEQ ID NO: 345275 - RNA, 24 nt, Human
aggcugaggugagagaaucgcuug

SEQ ID NO: 345276 - RNA, 20 nt, Human
agggagagggagaggguggg

SEQ ID NO: 345277 - RNA, 22 nt, Human
agggaggagccgggcagggucu

SEQ ID NO: 345278 - RNA, 18 nt, Human
aggugagagaaucgcuug

SEQ ID NO: 345279 - RNA, 24 nt, Human
aggugagagaaucgcuugagcccg

SEQ ID NO: 345280 - RNA, 21 nt, Human
agguggagguugcagugagcc

SEQ ID NO: 345281 - RNA, 22 nt, Human
agguggagguugcagugagccg

SEQ ID NO: 345282 - RNA, 23 nt, Human
agugaauggugggggcccaggag

SEQ ID NO: 345283 - RNA, 23 nt, Human
auagcaacggagauagccccacc

SEQ ID NO: 345284 - RNA, 24 nt, Human
aucacuugagaccaggaguucaag

SEQ ID NO: 345285 - RNA, 24 nt, Human
aucgugccacugcaccccagccug

SEQ ID NO: 345286 - RNA, 25 nt, Human
caaaaacaaacaaacauacaaaaac

SEQ ID NO: 345287 - RNA, 26 nt, Human
caaaaacaaacaaacauacaaaaacc

SEQ ID NO: 345288 - RNA, 21 nt, Human
caaaaaccaaagaaacuaaac

SEQ ID NO: 345289 - RNA, 24 nt, Human
caaacauacaaaaaccaaagaaac

SEQ ID NO: 345290 - RNA, 21 nt, Human
caaagcugucagcugcaggcc

SEQ ID NO: 345291 - RNA, 24 nt, Human
caacauggagaaaccccaucucuu

SEQ ID NO: 345292 - RNA, 24 nt, Human
cacaccuguaaucccagcacuuug

SEQ ID NO: 345293 - RNA, 18 nt, Human
cacccgcgguccugggcc

SEQ ID NO: 345294 - RNA, 19 nt, Human
caccugaacgcugcucuuc

SEQ ID NO: 345295 - RNA, 23 nt, Human
caccuguaaucccagcacuuugg

SEQ ID NO: 345296 - RNA, 24 nt, Human
caccuguaaucccagcacuuuggg

SEQ ID NO: 345297 - RNA, 23 nt, Human
cacugcaccccagccugggcaac

SEQ ID NO: 345298 - RNA, 24 nt, Human
cacugcaccccagccugggcaaca

SEQ ID NO: 345299 - RNA, 21 nt, Human
cagacccaggaacccgggguu

SEQ ID NO: 345300 - RNA, 24 nt, Human
cagcacuuugggaggccgaggcgg

SEQ ID NO: 345301 - RNA, 24 nt, Human
cagccuggccaacauggagaaacc

SEQ ID NO: 345302 - RNA, 20 nt, Human
caucuguaaucccaccuacu

SEQ ID NO: 345303 - RNA, 24 nt, Human
caucuguaaucccaccuacucagg

SEQ ID NO: 345304 - RNA, 19 nt, Human
ccaaagaaacuaaacagac

SEQ ID NO: 345305 - RNA, 20 nt, Human
ccaacccaagacacgcgcaa

SEQ ID NO: 345306 - RNA, 23 nt, Human
ccaacccaagacacgcgcaaacu

SEQ ID NO: 345307 - RNA, 22 nt, Human
ccaagccaaaccuccugaagag

SEQ ID NO: 345308 - RNA, 21 nt, Human
ccacugcaccccagccugggc

SEQ ID NO: 345309 - RNA, 23 nt, Human
ccacugcaccccagccugggcaa

SEQ ID NO: 345310 - RNA, 24 nt, Human
ccacugcaccccagccugggcaac

SEQ ID NO: 345311 - RNA, 26 nt, Human
ccagaagcauuugcccauacucugaa

SEQ ID NO: 345312 - RNA, 18 nt, Human
ccagcccaugggaggggg

SEQ ID NO: 345313 - RNA, 24 nt, Human
cccaagacacgcgcaaacuuaaaa

SEQ ID NO: 345314 - RNA, 19 nt, Human
cccccagcccaacccaaga

SEQ ID NO: 345315 - RNA, 19 nt, Human
ccccccagcccaacccaag

SEQ ID NO: 345316 - RNA, 21 nt, Human
cccgggagguggagguugcag

SEQ ID NO: 345317 - RNA, 19 nt, Human
ccgacacacacacacacgg

SEQ ID NO: 345318 - RNA, 19 nt, Human
ccucaugcuugcugucucc

SEQ ID NO: 345319 - RNA, 19 nt, Human
ccuccugaagagaagugaa

SEQ ID NO: 345320 - RNA, 24 nt, Human
ccucuaaggggccacacgcagcuu

SEQ ID NO: 345321 - RNA, 24 nt, Human
ccuggccaacauggagaaacccca

SEQ ID NO: 345322 - RNA, 19 nt, Human
ccugggccagcccauggga

SEQ ID NO: 345323 - RNA, 19 nt, Human
cgacacacacacacacguu

SEQ ID NO: 345324 - RNA, 23 nt, Human
cgaggcgggcggaucacuugaga

SEQ ID NO: 345325 - RNA, 22 nt, Human
cgcgaucgugccacugcacccc

SEQ ID NO: 345326 - RNA, 24 nt, Human
cggaucacuugagaccaggaguuc

SEQ ID NO: 345327 - RNA, 27 nt, Human
cggaucacuugagaccaggaguucaag

SEQ ID NO: 345328 - RNA, 29 nt, Human
cgggagguggagguugcagugacaacggu

SEQ ID NO: 345329 - RNA, 24 nt, Human
cgggagguggagguugcagugagc

SEQ ID NO: 345330 - RNA, 24 nt, Human
cgggcggaucacuugagaccagga

SEQ ID NO: 345331 - RNA, 23 nt, Human
cguacaaguguccacuacacaaa

SEQ ID NO: 345332 - RNA, 22 nt, Human
cucacaccuguaaucccagcac

SEQ ID NO: 345333 - RNA, 24 nt, Human
cucacaccuguaaucccagcacuu

SEQ ID NO: 345334 - RNA, 22 nt, Human
cuccacagggaagucuguucca

SEQ ID NO: 345335 - RNA, 19 nt, Human
cuggcucugaugcucaccu

SEQ ID NO: 345336 - RNA, 25 nt, Human
cugggccagcccaugggaggggggc

SEQ ID NO: 345337 - RNA, 21 nt, Human
cuguaaucccaccuacucagg

SEQ ID NO: 345338 - RNA, 22 nt, Human
cuucagggaaggguuuuccaga

SEQ ID NO: 345339 - RNA, 21 nt, Human
gacaaaaagugaauggugggg

SEQ ID NO: 345340 - RNA, 21 nt, Human
gagauagccccaccgggcggc

SEQ ID NO: 345341 - RNA, 30 nt, Human
gagcaaaaaccaggcaggccaugaggggaa

SEQ ID NO: 345342 - RNA, 25 nt, Human
gaggcgggcggaucacuugagacca

SEQ ID NO: 345343 - RNA, 24 nt, Human
gagggcagugguuggagggggugg

SEQ ID NO: 345344 - RNA, 23 nt, Human
gagucacaucugagaugaaguca

SEQ ID NO: 345345 - RNA, 24 nt, Human
gaucacuugagaccaggaguucaa

SEQ ID NO: 345346 - RNA, 24 nt, Human
gccaacauggagaaaccccaucuc

SEQ ID NO: 345347 - RNA, 24 nt, Human
gccacugcaccccagccugggcaa

SEQ ID NO: 345348 - RNA, 20 nt, Human
gcgagacugugucaaaaaca

SEQ ID NO: 345349 - RNA, 20 nt, Human
gcgguggcucacaccuguaa

SEQ ID NO: 345350 - RNA, 21 nt, Human
gcucuggcucugaugcucacc

SEQ ID NO: 345351 - RNA, 18 nt, Human
ggagcacccggcuggggg

SEQ ID NO: 345352 - RNA, 24 nt, Human
ggagguugcagugagccgcgaucg

SEQ ID NO: 345353 - RNA, 23 nt, Human
ggaucacuugagaccaggaguuc

SEQ ID NO: 345354 - RNA, 26 nt, Human
ggcaggaggcaggaaggaugggaggg

SEQ ID NO: 345355 - RNA, 19 nt, Human
gggcccaggagcucccagc

SEQ ID NO: 345356 - RNA, 19 nt, Human
ggguuuggggcaggaggca

SEQ ID NO: 345357 - RNA, 23 nt, Human
gguggcucacaccuguaauccca

SEQ ID NO: 345358 - RNA, 24 nt, Human
gguggcucacaccuguaaucccag

SEQ ID NO: 345359 - RNA, 18 nt, Human
gucagguucacagccacu

SEQ ID NO: 345360 - RNA, 24 nt, Human
guugcagugagccgcgaucgugcc

SEQ ID NO: 345361 - RNA, 24 nt, Human
uaaacagacccagguuucacccgc

SEQ ID NO: 345362 - RNA, 18 nt, Human
uaacgugccacagggaaa

SEQ ID NO: 345363 - RNA, 23 nt, Human
uacaaaaaccaaagaaacuaaac

SEQ ID NO: 345364 - RNA, 25 nt, Human
uacaaaaaccaaagaaacuaaacag

SEQ ID NO: 345365 - RNA, 20 nt, Human
uacaaguguccacuacacaa

SEQ ID NO: 345366 - RNA, 20 nt, Human
uagaugguuucaauaaggca

SEQ ID NO: 345367 - RNA, 24 nt, Human
uaggauugggugcgguggcucaca

SEQ ID NO: 345368 - RNA, 22 nt, Human
ucaauaaggcagacgauccucc

SEQ ID NO: 345369 - RNA, 19 nt, Human
ucacccgcgguccugggcc

SEQ ID NO: 345370 - RNA, 19 nt, Human
ucagggaggagccgggcag

SEQ ID NO: 345371 - RNA, 20 nt, Human
uccacuacacaaauucugcu

SEQ ID NO: 345372 - RNA, 19 nt, Human
ucccagcuccucaagcuga

SEQ ID NO: 345373 - RNA, 24 nt, Human
ucgcuugagcccgggagguggagg

SEQ ID NO: 345374 - RNA, 20 nt, Human
ucggaggccgugcccuaggu

SEQ ID NO: 345375 - RNA, 23 nt, Human
ucgugccacugcaccccagccug

SEQ ID NO: 345376 - RNA, 22 nt, Human
ucuccaaagugcacguacaagu

SEQ ID NO: 345377 - RNA, 20 nt, Human
ugaagggagagggagagggu

SEQ ID NO: 345378 - RNA, 18 nt, Human
ugaauggugggggcccag

SEQ ID NO: 345379 - RNA, 21 nt, Human
ugaauggugggggcccaggag

SEQ ID NO: 345380 - RNA, 24 nt, Human
ugagcccgggagguggagguugca

SEQ ID NO: 345381 - RNA, 22 nt, Human
ugagccgcgaucgugccacugc

SEQ ID NO: 345382 - RNA, 21 nt, Human
ugagcuggggaggcagacggc

SEQ ID NO: 345383 - RNA, 23 nt, Human
ugcagaaaggcacugagcugggg

SEQ ID NO: 345384 - RNA, 22 nt, Human
ugcagugagccgcgaucgugcc

SEQ ID NO: 345385 - RNA, 24 nt, Human
ugccacugcaccccagccugggca

SEQ ID NO: 345386 - RNA, 22 nt, Human
uggccaacagggugucugguga

SEQ ID NO: 345387 - RNA, 21 nt, Human
uggcucacaccuguaauccca

SEQ ID NO: 345388 - RNA, 22 nt, Human
uggcucacaccuguaaucccag

SEQ ID NO: 345389 - RNA, 24 nt, Human
uggcucacaccuguaaucccagca

SEQ ID NO: 345390 - RNA, 18 nt, Human
uggcuggggaugcaccug

SEQ ID NO: 345391 - RNA, 19 nt, Human
ugggaaaccccccagccca

SEQ ID NO: 345392 - RNA, 21 nt, Human
ugggaaaccccccagcccaac

SEQ ID NO: 345393 - RNA, 19 nt, Human
ugggaggccgaggcgggcg

SEQ ID NO: 345394 - RNA, 24 nt, Human
ugggaggccgaggcgggcggauca

SEQ ID NO: 345395 - RNA, 18 nt, Human
ugggaggggaggguaaua

SEQ ID NO: 345396 - RNA, 19 nt, Human
ugggaggggggcacugcgc

SEQ ID NO: 345397 - RNA, 23 nt, Human
uggggcaggaggcaggaaggaug

SEQ ID NO: 345398 - RNA, 19 nt, Human
ugggggugugggaggggag

SEQ ID NO: 345399 - RNA, 24 nt, Human
ugguggcgggcaucuguaauccca

SEQ ID NO: 345400 - RNA, 26 nt, Human
ugugaucaccgacacacacacacacg

SEQ ID NO: 345401 - RNA, 19 nt, Human
ugugucaaaaacaaacaaa

SEQ ID NO: 345402 - RNA, 24 nt, Human
ugugucaaaaacaaacaaacauac

SEQ ID NO: 345403 - RNA, 18 nt, Human
uuaacugggugugguggc

SEQ ID NO: 345404 - RNA, 21 nt, Human
uuaauucugaagcauaacgug

SEQ ID NO: 345405 - RNA, 22 nt, Human
uucacagccacucaaagcuguc

SEQ ID NO: 345406 - RNA, 21 nt, Human
uucacccgcgguccugggccc

SEQ ID NO: 345407 - RNA, 21 nt, Human
uucaugccaagccaaaccucc

SEQ ID NO: 345408 - RNA, 22 nt, Human
uugagaccaggaguucaagacc

SEQ ID NO: 345409 - RNA, 24 nt, Human
uugagcccgggagguggagguugc

SEQ ID NO: 345410 - RNA, 22 nt, Human
uugcagugagccgcgaucgugc

SEQ ID NO: 345411 - RNA, 25 nt, Human
uugggaggccgaggcgggcggauca

SEQ ID NO: 345412 - RNA, 26 nt, Human
uuugcccauacucugaaugaaguauu

SEQ ID NO: 345413 - RNA, 25 nt, Human
aaaaaccaaggugaagccagggaug

SEQ ID NO: 345414 - RNA, 23 nt, Human
agacacacagacaaucacaaaca

SEQ ID NO: 345415 - RNA, 19 nt, Human
agacacggucccugcccuc

SEQ ID NO: 345416 - RNA, 22 nt, Human
agacagacacacagacaaucac

SEQ ID NO: 345417 - RNA, 22 nt, Human
caaagaagaucuagggucaucc

SEQ ID NO: 345418 - RNA, 22 nt, Human
cacacagacaaucacaaacaca

SEQ ID NO: 345419 - RNA, 24 nt, Human
cacacagacaaucacaaacacagu

SEQ ID NO: 345420 - RNA, 18 nt, Human
cacagccugccuugucuc

SEQ ID NO: 345421 - RNA, 24 nt, Human
cacagugagcacucgcucuguucc

SEQ ID NO: 345422 - RNA, 23 nt, Human
ccaaggugaagccagggaugagg

SEQ ID NO: 345423 - RNA, 23 nt, Human
ccaccccucccggagccccaaac

SEQ ID NO: 345424 - RNA, 23 nt, Human
ccccaccccucccggagccccaa

SEQ ID NO: 345425 - RNA, 19 nt, Human
cccccugccuuugcgcccg

SEQ ID NO: 345426 - RNA, 19 nt, Human
cccgcugcccccccacccc

SEQ ID NO: 345427 - RNA, 24 nt, Human
cccgcugcccccccaccccucccg

SEQ ID NO: 345428 - RNA, 26 nt, Human
cccgcugcccccccaccccucccgga

SEQ ID NO: 345429 - RNA, 24 nt, Human
cccggagccccaaacccgucgcug

SEQ ID NO: 345430 - RNA, 21 nt, Human
cccggcccccucgcucccucc

SEQ ID NO: 345431 - RNA, 22 nt, Human
cccucuguccgacggggccccu

SEQ ID NO: 345432 - RNA, 21 nt, Human
cccugcccucauggagcucac

SEQ ID NO: 345433 - RNA, 20 nt, Human
ccgccgcccgcugccccccc

SEQ ID NO: 345434 - RNA, 24 nt, Human
ccgccgcccgcugcccccccaccc

SEQ ID NO: 345435 - RNA, 20 nt, Human
ccggcggcgaugccagagca

SEQ ID NO: 345436 - RNA, 23 nt, Human
ccuuccauggccaucccccugcc

SEQ ID NO: 345437 - RNA, 20 nt, Human
cguugaaguccugggcauuc

SEQ ID NO: 345438 - RNA, 19 nt, Human
cucaacccuuccauggcca

SEQ ID NO: 345439 - RNA, 21 nt, Human
cucuguccgacggggccccuc

SEQ ID NO: 345440 - RNA, 22 nt, Human
cugcugccgccgcccgcugccc

SEQ ID NO: 345441 - RNA, 19 nt, Human
gaaaagacaggauauucag

SEQ ID NO: 345442 - RNA, 21 nt, Human
gagacagacacacagacaauc

SEQ ID NO: 345443 - RNA, 20 nt, Human
gcugccgccgcccgcugccc

SEQ ID NO: 345444 - RNA, 22 nt, Human
ggaaaaaccaaggugaagccag

SEQ ID NO: 345445 - RNA, 18 nt, Human
uaaaaaagaaaagacagg

SEQ ID NO: 345446 - RNA, 19 nt, Human
uccaagcacuggggauaca

SEQ ID NO: 345447 - RNA, 18 nt, Human
ucccccugccuuugcgcc

SEQ ID NO: 345448 - RNA, 23 nt, Human
ucccggagccccaaacccgucgc

SEQ ID NO: 345449 - RNA, 21 nt, Human
ucccugcccucauggagcuca

SEQ ID NO: 345450 - RNA, 21 nt, Human
ugcccccccaccccucccgga

SEQ ID NO: 345451 - RNA, 27 nt, Human
ugcccggcccccucgcucccucccccg

SEQ ID NO: 345452 - RNA, 27 nt, Human
ugggaaaaaccaaggugaagccaggga

SEQ ID NO: 345453 - RNA, 24 nt, Human
uggggauacagagaacggacaaga

SEQ ID NO: 345454 - RNA, 21 nt, Human
uuccauggccaucccccugcc

SEQ ID NO: 345455 - RNA, 23 nt, Human
uuuugagggucauccucucucuu

SEQ ID NO: 345456 - RNA, 20 nt, Human
uuuuuuuuuuuuugaggguc

SEQ ID NO: 345457 - RNA, 22 nt, Human
uuuuuuuuuuuuuuuuugaggg

SEQ ID NO: 345458 - RNA, 21 nt, Human
aaaaugccagcagcaugccgg

SEQ ID NO: 345459 - RNA, 21 nt, Human
aaagggcaaugacccaaaggu

SEQ ID NO: 345460 - RNA, 22 nt, Human
aagaggggggcagcacauugga

SEQ ID NO: 345461 - RNA, 20 nt, Human
aaggcccugggaaugcaggu

SEQ ID NO: 345462 - RNA, 22 nt, Human
aaggcuuugcugcagcugugcu

SEQ ID NO: 345463 - RNA, 18 nt, Human
acaaaaaaccagaggccu

SEQ ID NO: 345464 - RNA, 19 nt, Human
acagaugcucaggccaccc

SEQ ID NO: 345465 - RNA, 24 nt, Human
acagcaaaaugccagcagcaugcc

SEQ ID NO: 345466 - RNA, 19 nt, Human
accaaggaggaauggccaa

SEQ ID NO: 345467 - RNA, 20 nt, Human
accaggaaaccauuaagccc

SEQ ID NO: 345468 - RNA, 24 nt, Human
accaucaccccaagguaaaaaaaa

SEQ ID NO: 345469 - RNA, 18 nt, Human
accccaagguaaaaaaaa

SEQ ID NO: 345470 - RNA, 21 nt, Human
accccaagguaaaaaaaaaau

SEQ ID NO: 345471 - RNA, 24 nt, Human
agcuaaaaagcugugugaacccag

SEQ ID NO: 345472 - RNA, 19 nt, Human
aggggugggggcauggggc

SEQ ID NO: 345473 - RNA, 18 nt, Human
agguauguuuggcaaaau

SEQ ID NO: 345474 - RNA, 20 nt, Human
aggucagacaucuaagaucc

SEQ ID NO: 345475 - RNA, 23 nt, Human
agucuguguugguacaggcuucu

SEQ ID NO: 345476 - RNA, 22 nt, Human
agugaaagggcaaugacccaaa

SEQ ID NO: 345477 - RNA, 18 nt, Human
caagaauguagauacaaa

SEQ ID NO: 345478 - RNA, 20 nt, Human
caauagcuacaaggagggug

SEQ ID NO: 345479 - RNA, 20 nt, Human
caccccaagguaaaaaaaaa

SEQ ID NO: 345480 - RNA, 23 nt, Human
cagccucuagcccacaagccccu

SEQ ID NO: 345481 - RNA, 26 nt, Human
caggaaaaacacuggcugggacgcua

SEQ ID NO: 345482 - RNA, 26 nt, Human
caggacacagcaaaaugccagcagca

SEQ ID NO: 345483 - RNA, 21 nt, Human
caggucagacaucuaagaucc

SEQ ID NO: 345484 - RNA, 19 nt, Human
cauaaggccaccaguccca

SEQ ID NO: 345485 - RNA, 21 nt, Human
cauaaggccaccagucccagc

SEQ ID NO: 345486 - RNA, 23 nt, Human
caucaccccaagguaaaaaaaaa

SEQ ID NO: 345487 - RNA, 22 nt, Human
ccaaaccagaugggugagaaca

SEQ ID NO: 345488 - RNA, 18 nt, Human
ccaaaccaugccacacac

SEQ ID NO: 345489 - RNA, 22 nt, Human
ccaccaaggaggaauggccaaa

SEQ ID NO: 345490 - RNA, 21 nt, Human
ccagcccuuugcaggguuugc

SEQ ID NO: 345491 - RNA, 21 nt, Human
ccaggccaaaccaugccacac

SEQ ID NO: 345492 - RNA, 23 nt, Human
cccaaaagccagcgcuguucuac

SEQ ID NO: 345493 - RNA, 22 nt, Human
ccccaaaagccagcgcuguucu

SEQ ID NO: 345494 - RNA, 26 nt, Human
ccccagccugggauugcaaggcuuug

SEQ ID NO: 345495 - RNA, 22 nt, Human
cccccaaaagccagcgcuguuc

SEQ ID NO: 345496 - RNA, 24 nt, Human
ccccucccuuccauccuccucucc

SEQ ID NO: 345497 - RNA, 25 nt, Human
ccgcugagcagccacacucgcaccu

SEQ ID NO: 345498 - RNA, 23 nt, Human
ccuaggaccuggggagguccaag

SEQ ID NO: 345499 - RNA, 20 nt, Human
ccucccuuccauccuccucu

SEQ ID NO: 345500 - RNA, 21 nt, Human
ccucccuuccauccuccucuc

SEQ ID NO: 345501 - RNA, 23 nt, Human
ccucccuuccauccuccucucca

SEQ ID NO: 345502 - RNA, 24 nt, Human
ccucccuuccauccuccucuccaa

SEQ ID NO: 345503 - RNA, 21 nt, Human
ccucuagcccacaagccccuc

SEQ ID NO: 345504 - RNA, 21 nt, Human
ccugaaaccagcaaacaccgg

SEQ ID NO: 345505 - RNA, 23 nt, Human
ccugaaaccagcaaacaccggga

SEQ ID NO: 345506 - RNA, 22 nt, Human
ccuuuggucagguggugaaggc

SEQ ID NO: 345507 - RNA, 25 nt, Human
cggaaaggggcugcaggacacagca

SEQ ID NO: 345508 - RNA, 18 nt, Human
cuagaaggggugggggca

SEQ ID NO: 345509 - RNA, 24 nt, Human
cuagcccacaagccccucuugguc

SEQ ID NO: 345510 - RNA, 22 nt, Human
cuccacacagaaaaucugcacc

SEQ ID NO: 345511 - RNA, 23 nt, Human
cugaaaccagcaaacaccgggaa

SEQ ID NO: 345512 - RNA, 24 nt, Human
cugaaaccagcaaacaccgggaaa

SEQ ID NO: 345513 - RNA, 23 nt, Human
cugggugcuguagucuguguugg

SEQ ID NO: 345514 - RNA, 25 nt, Human
cuguaggcugaccccagccugggau

SEQ ID NO: 345515 - RNA, 20 nt, Human
cuuugcaggguuugcugccu

SEQ ID NO: 345516 - RNA, 24 nt, Human
gaccuggggagguccaagucaagc

SEQ ID NO: 345517 - RNA, 19 nt, Human
gccaacauaccccagcucu

SEQ ID NO: 345518 - RNA, 19 nt, Human
gccuuuggaguccuguccc

SEQ ID NO: 345519 - RNA, 19 nt, Human
gcgacaccaggaucuucag

SEQ ID NO: 345520 - RNA, 18 nt, Human
gggcauggggcccaggag

SEQ ID NO: 345521 - RNA, 20 nt, Human
gguaauuaaaaaccuaagaa

SEQ ID NO: 345522 - RNA, 19 nt, Human
ggucagacaucuaagaucc

SEQ ID NO: 345523 - RNA, 19 nt, Human
uaagcaacacaacuguagg

SEQ ID NO: 345524 - RNA, 22 nt, Human
uaagccccaauagcuacaagga

SEQ ID NO: 345525 - RNA, 21 nt, Human
uaagcuaaaaagcugugugaa

SEQ ID NO: 345526 - RNA, 21 nt, Human
uaauaagcaacacaacuguag

SEQ ID NO: 345527 - RNA, 23 nt, Human
uaucaaacuccuucccugaaacc

SEQ ID NO: 345528 - RNA, 18 nt, Human
ucaccccaagguaaaaaa

SEQ ID NO: 345529 - RNA, 20 nt, Human
ucccagaggaaguuccuucc

SEQ ID NO: 345530 - RNA, 21 nt, Human
ucccggaaaggggcugcagga

SEQ ID NO: 345531 - RNA, 18 nt, Human
ucccugaaaccagcaaac

SEQ ID NO: 345532 - RNA, 21 nt, Human
uccugggugcuguagucugug

SEQ ID NO: 345533 - RNA, 19 nt, Human
ucuacaauaguucagguca

SEQ ID NO: 345534 - RNA, 23 nt, Human
ucucauuuuugcugcucccccaa

SEQ ID NO: 345535 - RNA, 20 nt, Human
ucuccacacagaaaaucugc

SEQ ID NO: 345536 - RNA, 20 nt, Human
ugaaggcccugggaaugcag

SEQ ID NO: 345537 - RNA, 22 nt, Human
ugaaggcccugggaaugcaggu

SEQ ID NO: 345538 - RNA, 19 nt, Human
ugcagguucuagaaggggu

SEQ ID NO: 345539 - RNA, 20 nt, Human
ugccggaccccucccuucca

SEQ ID NO: 345540 - RNA, 18 nt, Human
ugccuaggaccuggggag

SEQ ID NO: 345541 - RNA, 22 nt, Human
ugccucaugagcagggcugagu

SEQ ID NO: 345542 - RNA, 25 nt, Human
ugcuucaugaaaagcacuucagugu

SEQ ID NO: 345543 - RNA, 21 nt, Human
ugggaaugcagguucuagaag

SEQ ID NO: 345544 - RNA, 20 nt, Human
ugggauugcaaggcuuugcu

SEQ ID NO: 345545 - RNA, 21 nt, Human
ugggugagaacaagcccaaug

SEQ ID NO: 345546 - RNA, 23 nt, Human
ugggugagaacaagcccaaugug

SEQ ID NO: 345547 - RNA, 23 nt, Human
uguaaacugagauuacaaaaaac

SEQ ID NO: 345548 - RNA, 18 nt, Human
uucaggucagacaucuaa

SEQ ID NO: 345549 - RNA, 18 nt, Human
uuugggagccacaggcug

SEQ ID NO: 345550 - RNA, 18 nt, Human
uuuuuuuuuuuuuuuuug

SEQ ID NO: 345551 - RNA, 21 nt, Human
uuuuuuuuuuuuuuuuugcag

SEQ ID NO: 345552 - RNA, 23 nt, Human
uuuuuuuuuuuuuuuuugcagau

SEQ ID NO: 345553 - RNA, 22 nt, Human
uauugcucuuuuggauagaaac

SEQ ID NO: 345554 - RNA, 22 nt, Human
ucuuuuggauagaaacgggaau

SEQ ID NO: 345555 - RNA, 21 nt, Human
ugcacauuucacugaaaacuu

SEQ ID NO: 345556 - RNA, 18 nt, Human
aaaaagucuacaccugcc

SEQ ID NO: 345557 - RNA, 22 nt, Human
aaauaaaccagcagagcauugc

SEQ ID NO: 345558 - RNA, 18 nt, Human
aacaguagucuagucucc

SEQ ID NO: 345559 - RNA, 22 nt, Human
aagccauggcacugaaccagga

SEQ ID NO: 345560 - RNA, 21 nt, Human
acccuggacaacaguagucua

SEQ ID NO: 345561 - RNA, 21 nt, Human
acuaaaaaaaacgcagccacu

SEQ ID NO: 345562 - RNA, 20 nt, Human
agaaacaagauacaccacca

SEQ ID NO: 345563 - RNA, 26 nt, Human
agaacaagagaaauaacugcagaaaa

SEQ ID NO: 345564 - RNA, 21 nt, Human
agacaaauaacaccuguaagc

SEQ ID NO: 345565 - RNA, 20 nt, Human
auuuaaaaugguacugugga

SEQ ID NO: 345566 - RNA, 22 nt, Human
caaacagaaaugcaauguggug

SEQ ID NO: 345567 - RNA, 26 nt, Human
caagauacaccaccacuuauugucuu

SEQ ID NO: 345568 - RNA, 23 nt, Human
caccaguguuuaccauuaccacu

SEQ ID NO: 345569 - RNA, 20 nt, Human
cacuccgauaaagcugcagg

SEQ ID NO: 345570 - RNA, 24 nt, Human
cacuugaaaauaaaccagcagagc

SEQ ID NO: 345571 - RNA, 19 nt, Human
cagcaaagucagaauuuaa

SEQ ID NO: 345572 - RNA, 22 nt, Human
cauggcacugaaccaggagcuu

SEQ ID NO: 345573 - RNA, 23 nt, Human
ccagaacaagagaaauaacugca

SEQ ID NO: 345574 - RNA, 21 nt, Human
ccaugaagccauggcacugaa

SEQ ID NO: 345575 - RNA, 21 nt, Human
ccccuagagaagauaggagaa

SEQ ID NO: 345576 - RNA, 21 nt, Human
cccuaauaagauaaagcaaag

SEQ ID NO: 345577 - RNA, 21 nt, Human
ccuggaaaucaauuaacugag

SEQ ID NO: 345578 - RNA, 18 nt, Human
cuagagaagauaggagaa

SEQ ID NO: 345579 - RNA, 20 nt, Human
cucaaauugacccuggacaa

SEQ ID NO: 345580 - RNA, 27 nt, Human
cuucaaaacacaccaguguuuaccauu

SEQ ID NO: 345581 - RNA, 19 nt, Human
gaaacaagauacaccacca

SEQ ID NO: 345582 - RNA, 24 nt, Human
gaacaagagaaauaacugcagaaa

SEQ ID NO: 345583 - RNA, 20 nt, Human
gagaaauaacugcagaaaac

SEQ ID NO: 345584 - RNA, 23 nt, Human
gaguggacagaguggguaaccca

SEQ ID NO: 345585 - RNA, 20 nt, Human
ggcuaguuucaguucucucc

SEQ ID NO: 345586 - RNA, 20 nt, Human
guacuuccuggaaaucaauu

SEQ ID NO: 345587 - RNA, 22 nt, Human
uaaagcccaacuuaaaaagucu

SEQ ID NO: 345588 - RNA, 24 nt, Human
uaaauuaagucagcaaagucagaa

SEQ ID NO: 345589 - RNA, 19 nt, Human
uaacugagucuuuugaaac

SEQ ID NO: 345590 - RNA, 20 nt, Human
uaagaucuuuucuuuuuuug

SEQ ID NO: 345591 - RNA, 21 nt, Human
uagaaacaagauacaccacca

SEQ ID NO: 345592 - RNA, 21 nt, Human
uaggguuguuuggccagaaca

SEQ ID NO: 345593 - RNA, 24 nt, Human
uauagccaacuacuuucccccuaa

SEQ ID NO: 345594 - RNA, 24 nt, Human
uaugacuuaagaucuuuucuuuuu

SEQ ID NO: 345595 - RNA, 23 nt, Human
ucaaaacacaccaguguuuacca

SEQ ID NO: 345596 - RNA, 22 nt, Human
ucacaauuagcauuacgguuaa

SEQ ID NO: 345597 - RNA, 24 nt, Human
ucagaacgagcauuuaaauuaagu

SEQ ID NO: 345598 - RNA, 24 nt, Human
ucccuaauaagauaaagcaaagac

SEQ ID NO: 345599 - RNA, 20 nt, Human
ucuguagccuaugggagugg

SEQ ID NO: 345600 - RNA, 20 nt, Human
ugaaugccaugaagccaugg

SEQ ID NO: 345601 - RNA, 19 nt, Human
ugacaaagcauucaagaaa

SEQ ID NO: 345602 - RNA, 23 nt, Human
ugacccuggacaacaguagucua

SEQ ID NO: 345603 - RNA, 19 nt, Human
ugacgucuaagcucacacu

SEQ ID NO: 345604 - RNA, 21 nt, Human
ugacuggacuaagaaugacgu

SEQ ID NO: 345605 - RNA, 23 nt, Human
ugcagaaaacacauaugguugga

SEQ ID NO: 345606 - RNA, 20 nt, Human
ugcagguuucaucacaugca

SEQ ID NO: 345607 - RNA, 21 nt, Human
ugccaugaagccauggcacug

SEQ ID NO: 345608 - RNA, 19 nt, Human
uggaagacauggugcaaac

SEQ ID NO: 345609 - RNA, 21 nt, Human
uuaaaauugggcaauuccuug

SEQ ID NO: 345610 - RNA, 22 nt, Human
uuaacagacaaauaacaccugu

SEQ ID NO: 345611 - RNA, 18 nt, Human
uuggcuuaccugauggcu

SEQ ID NO: 345612 - RNA, 19 nt, Human
uuuaacuuucuuaauuuga

SEQ ID NO: 345613 - RNA, 22 nt, Human
uuuaacuuucuuaauuugacaa

SEQ ID NO: 345614 - RNA, 22 nt, Human
uuugugaagaaauuuaggucuc

SEQ ID NO: 345615 - RNA, 21 nt, Human
aaguagccacacgggccucac

SEQ ID NO: 345616 - RNA, 20 nt, Human
caccaagggcuugcuuuccc

SEQ ID NO: 345617 - RNA, 19 nt, Human
ccaaagguguccuaagaaa

SEQ ID NO: 345618 - RNA, 21 nt, Human
ccaccaagggcuugcuuuccc

SEQ ID NO: 345619 - RNA, 20 nt, Human
cgcagccauacuuuccccca

SEQ ID NO: 345620 - RNA, 25 nt, Human
uaagaaaugccaucaucgcagccau

SEQ ID NO: 345621 - RNA, 21 nt, Human
uacuuacaguaacucauucaa

SEQ ID NO: 345622 - RNA, 19 nt, Human
ucgaacagcugcucagaga

SEQ ID NO: 345623 - RNA, 22 nt, Human
ucugucaauacguacuuacagu

SEQ ID NO: 345624 - RNA, 22 nt, Human
ugcucagagaguaguuguuuuc

SEQ ID NO: 345625 - RNA, 23 nt, Human
uguuuucauuauuaauccaaagg

SEQ ID NO: 345626 - RNA, 18 nt, Human
uucacagaucaccuagag

SEQ ID NO: 345627 - RNA, 23 nt, Human
uuuuuuuuuuuuuuuuuuccuuu

SEQ ID NO: 345628 - RNA, 24 nt, Human
uuuuuuuuuuuuuuuuuuccuuuu

SEQ ID NO: 345629 - RNA, 25 nt, Human
uuuuuuuuuuuuuuuuuuuuccuuu

SEQ ID NO: 345630 - RNA, 25 nt, Human
uuuuuuuuuuuuuuuuuuuuuccuu

SEQ ID NO: 345631 - RNA, 30 nt, Human
uuuuuuuuuuuuuuuuuuuuuccuuuuaaa

SEQ ID NO: 345632 - RNA, 23 nt, Human
uaauaagagaguaggauccaggg

SEQ ID NO: 345633 - RNA, 22 nt, Human
uggcgccuccugcucggccagg

SEQ ID NO: 345634 - RNA, 21 nt, Human
gcucuccgcguucgccgccac

SEQ ID NO: 345635 - RNA, 21 nt, Human
ucuccgcguucgccgccaccc

SEQ ID NO: 345636 - RNA, 24 nt, Human
aguauguacagacaaagugggagg

SEQ ID NO: 345637 - RNA, 19 nt, Human
uuuuuuuuuuuuuuuuugu

SEQ ID NO: 345638 - RNA, 20 nt, Human
uuuuuuuuuuuuuuuuuugg

SEQ ID NO: 345639 - RNA, 20 nt, Human
aaaauuuuccagauaaauga

SEQ ID NO: 345640 - RNA, 24 nt, Human
accaccauuuugguucccaaguuu

SEQ ID NO: 345641 - RNA, 23 nt, Human
agagauacaaggauaaaccacca

SEQ ID NO: 345642 - RNA, 19 nt, Human
cacugcagagauacaagga

SEQ ID NO: 345643 - RNA, 22 nt, Human
cagagauacaaggauaaaccac

SEQ ID NO: 345644 - RNA, 24 nt, Human
ccacacugcagagauacaaggaua

SEQ ID NO: 345645 - RNA, 21 nt, Human
cccuuugacuaugauuuccaa

SEQ ID NO: 345646 - RNA, 22 nt, Human
gguucccaaguuuuauucaaga

SEQ ID NO: 345647 - RNA, 19 nt, Human
ucaaguuacaaauaaauga

SEQ ID NO: 345648 - RNA, 23 nt, Human
uccacacugcagagauacaagga

SEQ ID NO: 345649 - RNA, 18 nt, Human
ucccaaguuuuauucaag

SEQ ID NO: 345650 - RNA, 21 nt, Human
ugacuaugauuuccaauuuuc

SEQ ID NO: 345651 - RNA, 20 nt, Human
gguuuaguuuuuuuuuauuu

SEQ ID NO: 345652 - RNA, 24 nt, Human
ugaacgccggaaaaaagaaaaaag

SEQ ID NO: 345653 - RNA, 19 nt, Human
uugaacgccggaaaaaaga

SEQ ID NO: 345654 - RNA, 24 nt, Human
gaaagacaaaagauggcgaaaaga

SEQ ID NO: 345655 - RNA, 23 nt, Human
cucccgcuucggugauggccgca

SEQ ID NO: 345656 - RNA, 19 nt, Human
ggugauggccgcaaaaggg

SEQ ID NO: 345657 - RNA, 19 nt, Human
uuuaaugaaacucccucca

SEQ ID NO: 345658 - RNA, 19 nt, Human
aaauagggucaacaacgcc

SEQ ID NO: 345659 - RNA, 18 nt, Human
agagaaaggggcugcggu

SEQ ID NO: 345660 - RNA, 21 nt, Human
aggaggaccccagccccaugc

SEQ ID NO: 345661 - RNA, 18 nt, Human
aggggcgggggugggggg

SEQ ID NO: 345662 - RNA, 19 nt, Human
aggggcggggguggggggu

SEQ ID NO: 345663 - RNA, 21 nt, Human
caccauaagccgcggcucccg

SEQ ID NO: 345664 - RNA, 20 nt, Human
ccaggggcgggggugggggg

SEQ ID NO: 345665 - RNA, 19 nt, Human
cccgaagcgccuagaaccg

SEQ ID NO: 345666 - RNA, 18 nt, Human
ccucauguuggcagagau

SEQ ID NO: 345667 - RNA, 18 nt, Human
ggcggggguggggggucg

SEQ ID NO: 345668 - RNA, 18 nt, Human
ggggcggggguggggggu

SEQ ID NO: 345669 - RNA, 19 nt, Human
ucccgaagcgccuagaacc

SEQ ID NO: 345670 - RNA, 25 nt, Human
ucgcaccaguccuucuguccucaug

SEQ ID NO: 345671 - RNA, 20 nt, Human
ugcagcacgggaaauagggu

SEQ ID NO: 345672 - RNA, 27 nt, Human
uuuuuuuuuuuuuuuuuuuuccugggg

SEQ ID NO: 345673 - RNA, 24 nt, Human
uuuuuuuuuuuuuuuuuuuuuccu

SEQ ID NO: 345674 - RNA, 20 nt, Human
ugagaccccaccaacugcaa

SEQ ID NO: 345675 - RNA, 20 nt, Human
uuuuuuuuuuuuucagugga

SEQ ID NO: 345676 - RNA, 22 nt, Human
uuuuuuuuuuuuuuuucagugg

SEQ ID NO: 345677 - RNA, 21 nt, Human
uuuuuuuuuuuuuuuuuucag

SEQ ID NO: 345678 - RNA, 26 nt, Human
aaccaacagcagccgcuaagauggcc

SEQ ID NO: 345679 - RNA, 18 nt, Human
cagcagccgcuaagaugg

SEQ ID NO: 345680 - RNA, 19 nt, Human
cagcagccgcuaagauggc

SEQ ID NO: 345681 - RNA, 24 nt, Human
cagccgcuaagauggccggggaac

SEQ ID NO: 345682 - RNA, 21 nt, Human
ccaacagcagccgcuaagaag

SEQ ID NO: 345683 - RNA, 21 nt, Human
ccaaccaacagcagccgcuaa

SEQ ID NO: 345684 - RNA, 19 nt, Human
cccccaaccaacagcagcc

SEQ ID NO: 345685 - RNA, 24 nt, Human
gguuugcaggugaaauuuuguagg

SEQ ID NO: 345686 - RNA, 24 nt, Human
uaagguuugcaggugaaauuuugu

SEQ ID NO: 345687 - RNA, 26 nt, Human
uuuuuuuuuuuuuuuacaauguuuuu

SEQ ID NO: 345688 - RNA, 22 nt, Human
uuuuuuuuuuuuuuuuuuacaa

SEQ ID NO: 345689 - RNA, 20 nt, Human
cgcggaaagaaagaaaccgc

SEQ ID NO: 345690 - RNA, 20 nt, Human
uuuuuuuuuuuuuuuuuugg

SEQ ID NO: 345691 - RNA, 23 nt, Human
cccgacaccuggcccuucgcagc

SEQ ID NO: 345692 - RNA, 23 nt, Human
ccgacaccuggcccuucgcagcu

SEQ ID NO: 345693 - RNA, 24 nt, Human
ccuggcccuucgcagcucucgcca

SEQ ID NO: 345694 - RNA, 20 nt, Human
cguaagaauaucacuguauu

SEQ ID NO: 345695 - RNA, 18 nt, Human
cuucaaaauugaagaaaa

SEQ ID NO: 345696 - RNA, 20 nt, Human
uauaugaugaaaacgagaaa

SEQ ID NO: 345697 - RNA, 21 nt, Human
ucacuguauuuauuuucccuc

SEQ ID NO: 345698 - RNA, 26 nt, Human
uucaaaauugaagaaaaauaucccaa

SEQ ID NO: 345699 - RNA, 18 nt, Human
uuuuuuuuuuuuuuuuug

SEQ ID NO: 345700 - RNA, 21 nt, Human
uuuuuuuuuuuuuuuuugcgu

SEQ ID NO: 345701 - RNA, 24 nt, Human
uuuuuuuuuuuuuuuuuugcguaa

SEQ ID NO: 345702 - RNA, 20 nt, Human
ccagaacauuuauugcauga

SEQ ID NO: 345703 - RNA, 18 nt, Human
cggccgagaccagaaaga

SEQ ID NO: 345704 - RNA, 21 nt, Human
gcaugacuaaucguugacauu

SEQ ID NO: 345705 - RNA, 19 nt, Human
uuaaaaccagaacauuuau

SEQ ID NO: 345706 - RNA, 22 nt, Human
acucacagcaagcagcaaccgg

SEQ ID NO: 345707 - RNA, 19 nt, Human
agcaagcagcaaccgggga

SEQ ID NO: 345708 - RNA, 19 nt, Human
cacucacagcaagcagcaa

SEQ ID NO: 345709 - RNA, 20 nt, Human
cacucacagcaagcagcaac

SEQ ID NO: 345710 - RNA, 24 nt, Human
cuggcgcggaccaggaccuuucuc

SEQ ID NO: 345711 - RNA, 21 nt, Human
caaaagaagcuguccaaaaug

SEQ ID NO: 345712 - RNA, 26 nt, Human
ucacugccuguauaaucaggucuuua

SEQ ID NO: 345713 - RNA, 25 nt, Human
uccaaaaugauuugaccuuuaugga

SEQ ID NO: 345714 - RNA, 20 nt, Human
ugccuguauaaucaggucuu

SEQ ID NO: 345715 - RNA, 22 nt, Human
uuuuuuuuuuuuuuucauguuu

SEQ ID NO: 345716 - RNA, 22 nt, Human
ccugcaggcccagcggcgcuag

SEQ ID NO: 345717 - RNA, 23 nt, Human
cggaacagagaccggcguccgcu

SEQ ID NO: 345718 - RNA, 22 nt, Human
uaucugaaaaaaucauagaaaa

SEQ ID NO: 345719 - RNA, 18 nt, Human
uuuuuuuuuuuuuuuuug

SEQ ID NO: 345720 - RNA, 19 nt, Human
uuuuuuuuuuuuuuuuugu

SEQ ID NO: 345721 - RNA, 21 nt, Human
aaaaauaaucaugguagacac

SEQ ID NO: 345722 - RNA, 24 nt, Human
uagaaaaauaaucaugguagacac

SEQ ID NO: 345723 - RNA, 24 nt, Human
aggaaaauuuguauuauuucaauu

SEQ ID NO: 345724 - RNA, 19 nt, Human
aggagggccgguccggguc

SEQ ID NO: 345725 - RNA, 25 nt, Human
cgacgggucccucuccgcgggcgcc

SEQ ID NO: 345726 - RNA, 19 nt, Human
cucucaggagggccggucc

SEQ ID NO: 345727 - RNA, 18 nt, Human
gagggccgguccgggucu

SEQ ID NO: 345728 - RNA, 18 nt, Human
ucacggaagaggauggcg

SEQ ID NO: 345729 - RNA, 18 nt, Human
uuuauugaggcccucagc

SEQ ID NO: 345730 - RNA, 19 nt, Human
uuuuuuggcauaaacacaa

SEQ ID NO: 345731 - RNA, 18 nt, Human
uuuuuuuuuuuuuuuuug

SEQ ID NO: 345732 - RNA, 22 nt, Human
uuuuuuuuuuuuuuuuuggcau

SEQ ID NO: 345733 - RNA, 22 nt, Human
uuuuuuuuuuuuuuuuuuuggc

SEQ ID NO: 345734 - RNA, 22 nt, Human
gcaguagacgcagcaaagaaag

SEQ ID NO: 345735 - RNA, 20 nt, Human
gucuuaagugucaucuggcc

SEQ ID NO: 345736 - RNA, 24 nt, Human
ucuuaagugucaucuggcaucuuc

SEQ ID NO: 345737 - RNA, 19 nt, Human
agacagggagcucaggccu

SEQ ID NO: 345738 - RNA, 20 nt, Human
cacugaggagagacagggag

SEQ ID NO: 345739 - RNA, 23 nt, Human
cuaaguugguugcuuuuugguga

SEQ ID NO: 345740 - RNA, 20 nt, Human
gacacccaucccgcgguccc

SEQ ID NO: 345741 - RNA, 22 nt, Human
gagagacagggagcucaggccu

SEQ ID NO: 345742 - RNA, 23 nt, Human
gaggagagacagggagcucaggc

SEQ ID NO: 345743 - RNA, 19 nt, Human
ggagagacagggagcucag

SEQ ID NO: 345744 - RNA, 20 nt, Human
gucacgccgacacccauccc

SEQ ID NO: 345745 - RNA, 23 nt, Human
uaaaacuggcuaaguugguugcu

SEQ ID NO: 345746 - RNA, 21 nt, Human
uaaguugguugcuuuuuggug

SEQ ID NO: 345747 - RNA, 21 nt, Human
ucacgccgacacccaucccgc

SEQ ID NO: 345748 - RNA, 18 nt, Human
ucacugaggagagacagg

SEQ ID NO: 345749 - RNA, 21 nt, Human
ugaggagagacagggagcuca

SEQ ID NO: 345750 - RNA, 24 nt, Human
uuuuuuuuuuaaagaaguaagccu

SEQ ID NO: 345751 - RNA, 25 nt, Human
uuuuuuuuuuuuaaagaaguaagcc

SEQ ID NO: 345752 - RNA, 22 nt, Human
uuuuuuuuuuuuuaaagaagua

SEQ ID NO: 345753 - RNA, 19 nt, Human
uuuuuuuuuuuuuuuuuaa

SEQ ID NO: 345754 - RNA, 22 nt, Human
uuuuuuuuuuuuuuuuuuaaag

SEQ ID NO: 345755 - RNA, 21 nt, Human
aacgcagccuuagcuuccucg

SEQ ID NO: 345756 - RNA, 18 nt, Human
accccaacgcagccuuag

SEQ ID NO: 345757 - RNA, 19 nt, Human
aguucagcuuuuuauugaa

SEQ ID NO: 345758 - RNA, 21 nt, Human
augaagugagggccucacccc

SEQ ID NO: 345759 - RNA, 23 nt, Human
ccucaccccaacgcagccuuagc

SEQ ID NO: 345760 - RNA, 18 nt, Human
gcgcgggcgaguguaggg

SEQ ID NO: 345761 - RNA, 23 nt, Human
ggccucaccccaacgcagccuua

SEQ ID NO: 345762 - RNA, 24 nt, Human
ucggaaggaccgagcaccuuggcg

SEQ ID NO: 345763 - RNA, 20 nt, Human
uggcggcagcugaggaaagg

SEQ ID NO: 345764 - RNA, 25 nt, Human
uuccucggaaggaccgagcaccuug

SEQ ID NO: 345765 - RNA, 19 nt, Human
aaacacaugcacucacaca

SEQ ID NO: 345766 - RNA, 21 nt, Human
aaucugccugccacagcaaag

SEQ ID NO: 345767 - RNA, 19 nt, Human
acacaugcacucacacaau

SEQ ID NO: 345768 - RNA, 23 nt, Human
acggcaaacucacacugccugac

SEQ ID NO: 345769 - RNA, 22 nt, Human
acucacacaauacccaaacauc

SEQ ID NO: 345770 - RNA, 23 nt, Human
aguagcugggauuacaggcaugu

SEQ ID NO: 345771 - RNA, 24 nt, Human
aguuuuuuuaaaguuuucuuuuuu

SEQ ID NO: 345772 - RNA, 21 nt, Human
auucuccugccucagccuccc

SEQ ID NO: 345773 - RNA, 19 nt, Human
auugaaaauuccuuuguuc

SEQ ID NO: 345774 - RNA, 18 nt, Human
caaccucccacuaccacc

SEQ ID NO: 345775 - RNA, 19 nt, Human
caaccucccacuaccaccc

SEQ ID NO: 345776 - RNA, 20 nt, Human
caaccucugccucccggguu

SEQ ID NO: 345777 - RNA, 22 nt, Human
caagcaauucuccugccucagc

SEQ ID NO: 345778 - RNA, 24 nt, Human
caggcacccugggcccccuggagg

SEQ ID NO: 345779 - RNA, 25 nt, Human
cccaaacaucagaauuagaagggca

SEQ ID NO: 345780 - RNA, 20 nt, Human
cccccuggaggaugcgggca

SEQ ID NO: 345781 - RNA, 23 nt, Human
cccgaguagcugggauuacaggc

SEQ ID NO: 345782 - RNA, 24 nt, Human
cccgaguagcugggauuacaggca

SEQ ID NO: 345783 - RNA, 23 nt, Human
cccggguucaagcaauucuccug

SEQ ID NO: 345784 - RNA, 23 nt, Human
ccgaguagcugggauuacaggca

SEQ ID NO: 345785 - RNA, 24 nt, Human
ccgaguagcugggauuacaggcau

SEQ ID NO: 345786 - RNA, 28 nt, Human
ccuccaugcacaaccucccacuaccacc

SEQ ID NO: 345787 - RNA, 24 nt, Human
ccucccacuaccacccaaucugcc

SEQ ID NO: 345788 - RNA, 24 nt, Human
ccucccggguucaagcaauucucc

SEQ ID NO: 345789 - RNA, 19 nt, Human
ccugccacagcaaagugca

SEQ ID NO: 345790 - RNA, 23 nt, Human
ccugccucagccucccgaguagc

SEQ ID NO: 345791 - RNA, 24 nt, Human
ccugccucagccucccgaguagcu

SEQ ID NO: 345792 - RNA, 24 nt, Human
cggcugcaaccucugccucccggg

SEQ ID NO: 345793 - RNA, 20 nt, Human
cucacacaauacccaaacau

SEQ ID NO: 345794 - RNA, 24 nt, Human
cucagccucccgaguagcugggau

SEQ ID NO: 345795 - RNA, 22 nt, Human
cugaaaaauauccuagacuuca

SEQ ID NO: 345796 - RNA, 24 nt, Human
cugacgcagggccugguuucucuu

SEQ ID NO: 345797 - RNA, 19 nt, Human
cugcaaccucugccucccg

SEQ ID NO: 345798 - RNA, 20 nt, Human
cugcaaccucugccucccgg

SEQ ID NO: 345799 - RNA, 21 nt, Human
cugcaaccucugccucccggg

SEQ ID NO: 345800 - RNA, 24 nt, Human
cugcaaccucugccucccggguuc

SEQ ID NO: 345801 - RNA, 18 nt, Human
cugccugccacagcaaag

SEQ ID NO: 345802 - RNA, 25 nt, Human
gaguagcugggauuacaggcaugug

SEQ ID NO: 345803 - RNA, 18 nt, Human
gauuacaggcaugugcca

SEQ ID NO: 345804 - RNA, 24 nt, Human
gauuacaggcaugugccaccaugc

SEQ ID NO: 345805 - RNA, 25 nt, Human
gcacaaccucccacuaccacccaau

SEQ ID NO: 345806 - RNA, 24 nt, Human
ggauuacaggcaugugccaccaug

SEQ ID NO: 345807 - RNA, 18 nt, Human
ggccugguuucucuuccu

SEQ ID NO: 345808 - RNA, 20 nt, Human
guagcugggauuacaggcau

SEQ ID NO: 345809 - RNA, 23 nt, Human
uaaaaaaaaaaaaaaaaaaacac

SEQ ID NO: 345810 - RNA, 22 nt, Human
uacaggcaugugccaccaugcc

SEQ ID NO: 345811 - RNA, 19 nt, Human
uaggcugaaaaauauccua

SEQ ID NO: 345812 - RNA, 33 nt, Human
ucacacacgcuuuaaaaaaaaaaaaaaaaaaaa

SEQ ID NO: 345813 - RNA, 20 nt, Human
ucagccucccgaguagcugg

SEQ ID NO: 345814 - RNA, 24 nt, Human
ucccgaguagcugggauuacaggc

SEQ ID NO: 345815 - RNA, 21 nt, Human
ucccggguucaagcaauucuc

SEQ ID NO: 345816 - RNA, 24 nt, Human
ucccggguucaagcaauucuccug

SEQ ID NO: 345817 - RNA, 24 nt, Human
ucuccugccucagccucccgagua

SEQ ID NO: 345818 - RNA, 18 nt, Human
ugcacaaccucccacuac

SEQ ID NO: 345819 - RNA, 24 nt, Human
ugccucagccucccgaguagcugg

SEQ ID NO: 345820 - RNA, 22 nt, Human
ugccucccggguucaagcaauu

SEQ ID NO: 345821 - RNA, 19 nt, Human
ugccugacgcagggccugg

SEQ ID NO: 345822 - RNA, 22 nt, Human
uggccuccaugcacaaccuccc

SEQ ID NO: 345823 - RNA, 24 nt, Human
uggcgccaucucagccggcugcaa

SEQ ID NO: 345824 - RNA, 21 nt, Human
ugggaguuuuuuuaaaguuuu

SEQ ID NO: 345825 - RNA, 18 nt, Human
ugggauuacaggcaugug

SEQ ID NO: 345826 - RNA, 21 nt, Human
ugggauuacaggcaugugcca

SEQ ID NO: 345827 - RNA, 22 nt, Human
ugggauuacaggcaugugccac

SEQ ID NO: 345828 - RNA, 24 nt, Human
ugggauuacaggcaugugccacca

SEQ ID NO: 345829 - RNA, 21 nt, Human
uucaagcaauucuccugccuc

SEQ ID NO: 345830 - RNA, 24 nt, Human
uucaagcaauucuccugccucagc

SEQ ID NO: 345831 - RNA, 20 nt, Human
uuccauuuguucacacacgc

SEQ ID NO: 345832 - RNA, 24 nt, Human
uuuaaaaaaaaaaaaaaagaaagu

SEQ ID NO: 345833 - RNA, 25 nt, Human
uuuaaaaaaaaaaaaaaagaaaguu

SEQ ID NO: 345834 - RNA, 23 nt, Human
uuuccauuuguucacacacgcuu

SEQ ID NO: 345835 - RNA, 28 nt, Human
uuucuuuuuuaaaaaaaaaaaaaaagaa

SEQ ID NO: 345836 - RNA, 20 nt, Human
aaacugaaaaacaagcaaaa

SEQ ID NO: 345837 - RNA, 24 nt, Human
aaacugaaaaacaagcaaaaguau

SEQ ID NO: 345838 - RNA, 22 nt, Human
aagcaaaaguauaacuacaauc

SEQ ID NO: 345839 - RNA, 24 nt, Human
aagcaaaaguauaacuacaaucug

SEQ ID NO: 345840 - RNA, 26 nt, Human
aagcaaaaguauaacuacaaucuggg

SEQ ID NO: 345841 - RNA, 20 nt, Human
acccgccucucccccgcgcc

SEQ ID NO: 345842 - RNA, 19 nt, Human
acucgcggcaggcucugcg

SEQ ID NO: 345843 - RNA, 18 nt, Human
aggaauauucacagcuuc

SEQ ID NO: 345844 - RNA, 19 nt, Human
cacagggccuugcaguucc

SEQ ID NO: 345845 - RNA, 26 nt, Human
cacagugucagagaaagagacuaucu

SEQ ID NO: 345846 - RNA, 27 nt, Human
cagcagccgcggccgggaaggaccuuc

SEQ ID NO: 345847 - RNA, 21 nt, Human
cagcaggucccgccggagucc

SEQ ID NO: 345848 - RNA, 23 nt, Human
ccagcagccgcggccgggauccc

SEQ ID NO: 345849 - RNA, 18 nt, Human
cccgaggacagacccgcc

SEQ ID NO: 345850 - RNA, 22 nt, Human
cccgaggacagacccgccucuc

SEQ ID NO: 345851 - RNA, 22 nt, Human
ccuugcaguucccgaggacaga

SEQ ID NO: 345852 - RNA, 20 nt, Human
cgaggacagacccgccucuc

SEQ ID NO: 345853 - RNA, 20 nt, Human
cgccacaggggacgccaggg

SEQ ID NO: 345854 - RNA, 26 nt, Human
cggccgggaucccaguccucccgcuc

SEQ ID NO: 345855 - RNA, 20 nt, Human
cucacagggccuugcaguuc

SEQ ID NO: 345856 - RNA, 24 nt, Human
cuccaagagcccgccacaggggac

SEQ ID NO: 345857 - RNA, 25 nt, Human
cugaaaaacaagcaaaaguauaaag

SEQ ID NO: 345858 - RNA, 23 nt, Human
cugagcuucgacgcuuccagcag

SEQ ID NO: 345859 - RNA, 22 nt, Human
cuuacacagugucagagaaaga

SEQ ID NO: 345860 - RNA, 27 nt, Human
cuucucauacugugaauuguucuugac

SEQ ID NO: 345861 - RNA, 22 nt, Human
gacccgccucucccccgcgccc

SEQ ID NO: 345862 - RNA, 25 nt, Human
gaguuccgcuggggaaaguggcucc

SEQ ID NO: 345863 - RNA, 21 nt, Human
gaucccaguccucccgcucac

SEQ ID NO: 345864 - RNA, 22 nt, Human
ggacagacccgccucucccccg

SEQ ID NO: 345865 - RNA, 22 nt, Human
gugaauuguucuugacuccuuu

SEQ ID NO: 345866 - RNA, 24 nt, Human
uaaguuaggaauauucacagcuuc

SEQ ID NO: 345867 - RNA, 18 nt, Human
ucagagaaagagacuauc

SEQ ID NO: 345868 - RNA, 24 nt, Human
ucauacugugaauuguucuugacu

SEQ ID NO: 345869 - RNA, 22 nt, Human
uccaagagcccgccacagggga

SEQ ID NO: 345870 - RNA, 18 nt, Human
ucccccgcgcccaggccc

SEQ ID NO: 345871 - RNA, 19 nt, Human
ucccccgcgcccaggccca

SEQ ID NO: 345872 - RNA, 22 nt, Human
ucccgcucacagggccuugcag

SEQ ID NO: 345873 - RNA, 23 nt, Human
uccgcuggggaaaguggcuccaa

SEQ ID NO: 345874 - RNA, 18 nt, Human
ugaaaaacaagcaaaagu

SEQ ID NO: 345875 - RNA, 25 nt, Human
ugaaaaacaagcaaaaguauaacua

SEQ ID NO: 345876 - RNA, 28 nt, Human
ugaaaaacaagcaaaaguauaacuacaa

SEQ ID NO: 345877 - RNA, 21 nt, Human
uggcuccaagagcccgccaca

SEQ ID NO: 345878 - RNA, 18 nt, Human
uuuccaucuuucuucugg

SEQ ID NO: 345879 - RNA, 23 nt, Human
uuuccuauuguuacccucuuuau

SEQ ID NO: 345880 - RNA, 27 nt, Human
uuuuuuuuuuuuuuccuauuguuaccc

SEQ ID NO: 345881 - RNA, 22 nt, Human
uuuuuuuuuuuuuuuuccuauu

SEQ ID NO: 345882 - RNA, 19 nt, Human
acaauuacccccacccuca

SEQ ID NO: 345883 - RNA, 21 nt, Human
accccaggucccagagaaaga

SEQ ID NO: 345884 - RNA, 21 nt, Human
agagaaagaaggaugugggug

SEQ ID NO: 345885 - RNA, 20 nt, Human
caauaguuacagaccgcaua

SEQ ID NO: 345886 - RNA, 21 nt, Human
cagaguccuuugggcuuccag

SEQ ID NO: 345887 - RNA, 24 nt, Human
cagcccaaguaaccgcgaccccag

SEQ ID NO: 345888 - RNA, 19 nt, Human
cauggcucugguccgaggu

SEQ ID NO: 345889 - RNA, 23 nt, Human
ccagcccaaguaaccgcgacccc

SEQ ID NO: 345890 - RNA, 20 nt, Human
ccccaggucccagagaaaga

SEQ ID NO: 345891 - RNA, 19 nt, Human
cgcgcgaggcccgcucccc

SEQ ID NO: 345892 - RNA, 20 nt, Human
cuagugcaacaggauuuuuu

SEQ ID NO: 345893 - RNA, 18 nt, Human
cuccaggcgcgcgaggcc

SEQ ID NO: 345894 - RNA, 18 nt, Human
cuccccgccaggccacuc

SEQ ID NO: 345895 - RNA, 25 nt, Human
gaacaggccuuuucuuacauggcuc

SEQ ID NO: 345896 - RNA, 19 nt, Human
uacagaccgcauacacaca

SEQ ID NO: 345897 - RNA, 25 nt, Human
uacccccacccucaaugcagagucc

SEQ ID NO: 345898 - RNA, 20 nt, Human
ucacggaggggauaagugga

SEQ ID NO: 345899 - RNA, 22 nt, Human
uccuuugggcuuccagggaaca

SEQ ID NO: 345900 - RNA, 21 nt, Human
ugggugcaagcagccagccag

SEQ ID NO: 345901 - RNA, 24 nt, Human
uuacauggcucugguccgaggucc

SEQ ID NO: 345902 - RNA, 21 nt, Human
uuuuuuuuuuuggcaggacac

SEQ ID NO: 345903 - RNA, 18 nt, Human
uuuuuuuuuuuuuuuuug

SEQ ID NO: 345904 - RNA, 23 nt, Human
uuuuuuuuuuuuuuuuuggcagg

SEQ ID NO: 345905 - RNA, 22 nt, Human
uuuuuuuuuuuuuuuuuuuggc

SEQ ID NO: 345906 - RNA, 22 nt, Human
aaaaaaaaaaaaaaauagccag

SEQ ID NO: 345907 - RNA, 20 nt, Human
aaaacaaaaugaaacaaaaa

SEQ ID NO: 345908 - RNA, 24 nt, Human
aaaacaaaaugaaacaaaaauacc

SEQ ID NO: 345909 - RNA, 19 nt, Human
aaacaguaaaucacacaaa

SEQ ID NO: 345910 - RNA, 20 nt, Human
aacaaagacccuaucucaaa

SEQ ID NO: 345911 - RNA, 19 nt, Human
aacacggugaaaccccguc

SEQ ID NO: 345912 - RNA, 20 nt, Human
aacacggugaaaccccgucu

SEQ ID NO: 345913 - RNA, 21 nt, Human
aacacggugaaaccccgucuc

SEQ ID NO: 345914 - RNA, 24 nt, Human
aacaugaucccauuauaaaaauaa

SEQ ID NO: 345915 - RNA, 24 nt, Human
aacgccuguaaucccagcacuuug

SEQ ID NO: 345916 - RNA, 23 nt, Human
aacuaaaaguaaggaauccuauu

SEQ ID NO: 345917 - RNA, 26 nt, Human
aagaagcuuaaaacaagaggaacuaa

SEQ ID NO: 345918 - RNA, 23 nt, Human
aagagaccagauguaauuuuaca

SEQ ID NO: 345919 - RNA, 22 nt, Human
aagcagugaaggaagagaccag

SEQ ID NO: 345920 - RNA, 23 nt, Human
aagcagugaaggaagagaccaga

SEQ ID NO: 345921 - RNA, 18 nt, Human
aagcgggaggaucacuug

SEQ ID NO: 345922 - RNA, 20 nt, Human
aaucucucuuugucuucuuc

SEQ ID NO: 345923 - RNA, 19 nt, Human
acaagaggaacuaaaguca

SEQ ID NO: 345924 - RNA, 22 nt, Human
acagagcgagacugucucaaaa

SEQ ID NO: 345925 - RNA, 20 nt, Human
acauggcgagcgccuguagu

SEQ ID NO: 345926 - RNA, 21 nt, Human
accccgucucugcuaaauaca

SEQ ID NO: 345927 - RNA, 24 nt, Human
acuccagccugggggacagagcga

SEQ ID NO: 345928 - RNA, 18 nt, Human
acugcacuccagccuggg

SEQ ID NO: 345929 - RNA, 24 nt, Human
acugcacuccagccugggggacag

SEQ ID NO: 345930 - RNA, 18 nt, Human
acuguacuccagccugag

SEQ ID NO: 345931 - RNA, 24 nt, Human
agagaucgagccacugcacuccag

SEQ ID NO: 345932 - RNA, 24 nt, Human
agcacuuugggaggccgaggcggg

SEQ ID NO: 345933 - RNA, 18 nt, Human
agccaggugugguagugc

SEQ ID NO: 345934 - RNA, 22 nt, Human
agcuguaguuaaccugcgcagu

SEQ ID NO: 345935 - RNA, 22 nt, Human
aggaggccaaagcgggaggaug

SEQ ID NO: 345936 - RNA, 21 nt, Human
aggauugagguugcagugagc

SEQ ID NO: 345937 - RNA, 24 nt, Human
aggcaggagaauggcaugaaccca

SEQ ID NO: 345938 - RNA, 27 nt, Human
aggcaggagaauggcaugaacccagga

SEQ ID NO: 345939 - RNA, 18 nt, Human
aggccgaggcggguggaa

SEQ ID NO: 345940 - RNA, 21 nt, Human
aggccgaggcggguggaauau

SEQ ID NO: 345941 - RNA, 24 nt, Human
aggcggagcuugcagugagcagag

SEQ ID NO: 345942 - RNA, 24 nt, Human
aggcggguggaauaugaggucagg

SEQ ID NO: 345943 - RNA, 24 nt, Human
aggcugaagcgggaggaucacuug

SEQ ID NO: 345944 - RNA, 19 nt, Human
aggcugaggcaggagaaug

SEQ ID NO: 345945 - RNA, 20 nt, Human
agggaagaagggagugcuga

SEQ ID NO: 345946 - RNA, 19 nt, Human
aggucaggagauugagacc

SEQ ID NO: 345947 - RNA, 24 nt, Human
aggugugguagugcacaccuguag

SEQ ID NO: 345948 - RNA, 24 nt, Human
aguggcuaacgccuguaaucccag

SEQ ID NO: 345949 - RNA, 19 nt, Human
auaaaaagcuacuucuacu

SEQ ID NO: 345950 - RNA, 24 nt, Human
auaugaggucaggagauugagacc

SEQ ID NO: 345951 - RNA, 22 nt, Human
aucccagcacuuuaggaggcca

SEQ ID NO: 345952 - RNA, 23 nt, Human
auccucucuccuuccacaaauuc

SEQ ID NO: 345953 - RNA, 24 nt, Human
aucgagccacugcacuccagccug

SEQ ID NO: 345954 - RNA, 25 nt, Human
augaaacaaaaauaccugaaacauu

SEQ ID NO: 345955 - RNA, 19 nt, Human
augaaagaagcuuaaaaca

SEQ ID NO: 345956 - RNA, 24 nt, Human
augccacuguacuccagccugagc

SEQ ID NO: 345957 - RNA, 23 nt, Human
auggcgagcgccuguagucccag

SEQ ID NO: 345958 - RNA, 24 nt, Human
auuaugccacuguacuccagccug

SEQ ID NO: 345959 - RNA, 25 nt, Human
caaaaacaaaaugaaacaaaaauac

SEQ ID NO: 345960 - RNA, 21 nt, Human
caacauagugagaccaugucu

SEQ ID NO: 345961 - RNA, 21 nt, Human
caacccgcagaacaguugucu

SEQ ID NO: 345962 - RNA, 21 nt, Human
caagggaaaaaaaaaaaaaaa

SEQ ID NO: 345963 - RNA, 24 nt, Human
cacaccuguaguucccgcugcuug

SEQ ID NO: 345964 - RNA, 18 nt, Human
caccuguaguucccgcug

SEQ ID NO: 345965 - RNA, 23 nt, Human
caccuguaguucccgcugcuuga

SEQ ID NO: 345966 - RNA, 23 nt, Human
cacuccagccugggggacagagc

SEQ ID NO: 345967 - RNA, 24 nt, Human
cacuccagccugggggacagagcg

SEQ ID NO: 345968 - RNA, 18 nt, Human
cacugcacuccagccugg

SEQ ID NO: 345969 - RNA, 19 nt, Human
cacugcacuccagccuggg

SEQ ID NO: 345970 - RNA, 20 nt, Human
cacugcacuccagccugggg

SEQ ID NO: 345971 - RNA, 22 nt, Human
cacugcacuccagccuggggga

SEQ ID NO: 345972 - RNA, 24 nt, Human
cacugcacuccagccugggggaca

SEQ ID NO: 345973 - RNA, 24 nt, Human
cacugcacuccagccugggggaca

SEQ ID NO: 345974 - RNA, 19 nt, Human
cacuguacuccagccugag

SEQ ID NO: 345975 - RNA, 21 nt, Human
cacuguacuccagccugagca

SEQ ID NO: 345976 - RNA, 22 nt, Human
cacuguacuccagccugagcaa

SEQ ID NO: 345977 - RNA, 24 nt, Human
cacuguacuccagccugagcaaca

SEQ ID NO: 345978 - RNA, 22 nt, Human
cagcacuuuaggaggccaaagc

SEQ ID NO: 345979 - RNA, 24 nt, Human
cagcacuuuaggaggccaaagcgg

SEQ ID NO: 345980 - RNA, 22 nt, Human
cagcacuuugggaggccgaggc

SEQ ID NO: 345981 - RNA, 24 nt, Human
cagcacuuugggaggccgaggcgg

SEQ ID NO: 345982 - RNA, 20 nt, Human
cagccgcugagcccgccccu

SEQ ID NO: 345983 - RNA, 24 nt, Human
cagcuacucaggaggcugaggcag

SEQ ID NO: 345984 - RNA, 20 nt, Human
cauaaaugcauguauuugca

SEQ ID NO: 345985 - RNA, 23 nt, Human
caucuaccaccagaauuugugug

SEQ ID NO: 345986 - RNA, 21 nt, Human
caugaacccaggaggcggagc

SEQ ID NO: 345987 - RNA, 19 nt, Human
ccacugcacuccagccugg

SEQ ID NO: 345988 - RNA, 20 nt, Human
ccacugcacuccagccuggg

SEQ ID NO: 345989 - RNA, 22 nt, Human
ccacugcacuccagccuggggg

SEQ ID NO: 345990 - RNA, 24 nt, Human
ccacugcacuccagccugggggac

SEQ ID NO: 345991 - RNA, 20 nt, Human
ccacuguacuccagccugag

SEQ ID NO: 345992 - RNA, 21 nt, Human
ccacuguacuccagccugagc

SEQ ID NO: 345993 - RNA, 22 nt, Human
ccacuguacuccagccugagca

SEQ ID NO: 345994 - RNA, 24 nt, Human
ccacuguacuccagccugagcaac

SEQ ID NO: 345995 - RNA, 18 nt, Human
ccgcugagcccgccccuc

SEQ ID NO: 345996 - RNA, 24 nt, Human
ccgcugagcccgccccucaggcau

SEQ ID NO: 345997 - RNA, 18 nt, Human
ccucucuccuuccacaaa

SEQ ID NO: 345998 - RNA, 19 nt, Human
ccucuggcucuacuccauu

SEQ ID NO: 345999 - RNA, 22 nt, Human
ccugaaacauuuuauucaagua

SEQ ID NO: 346000 - RNA, 23 nt, Human
ccuggcuaacacggugaaacccc

SEQ ID NO: 346001 - RNA, 24 nt, Human
ccuggcuaacacggugaaaccccg

SEQ ID NO: 346002 - RNA, 19 nt, Human
ccuguagucccagcuacuc

SEQ ID NO: 346003 - RNA, 21 nt, Human
ccuguagucccagcuacucag

SEQ ID NO: 346004 - RNA, 19 nt, Human
ccuguaguucccgcugcuu

SEQ ID NO: 346005 - RNA, 22 nt, Human
cgaggcggguggaauaugaggu

SEQ ID NO: 346006 - RNA, 23 nt, Human
cgcagccgcugagcccgccccuc

SEQ ID NO: 346007 - RNA, 23 nt, Human
cgccuguaaucccagcacuuugg

SEQ ID NO: 346008 - RNA, 24 nt, Human
cgccuguaaucccagcacuuuggg

SEQ ID NO: 346009 - RNA, 24 nt, Human
cgccuguagucccagcuacucagg

SEQ ID NO: 346010 - RNA, 18 nt, Human
cgcugagcccgccccucc

SEQ ID NO: 346011 - RNA, 25 nt, Human
cgggccgggcgcaguggcuaacgcc

SEQ ID NO: 346012 - RNA, 22 nt, Human
cggguggaauaugaggucagga

SEQ ID NO: 346013 - RNA, 24 nt, Human
cuaacgccuguaaucccagcacuu

SEQ ID NO: 346014 - RNA, 18 nt, Human
cucaaaaaaaaaaaaaaa

SEQ ID NO: 346015 - RNA, 26 nt, Human
cugaacgacaauguuugguucccccu

SEQ ID NO: 346016 - RNA, 20 nt, Human
cugaagucccaugaccgucc

SEQ ID NO: 346017 - RNA, 20 nt, Human
cugagcccgccccucaggca

SEQ ID NO: 346018 - RNA, 18 nt, Human
cuggcuaacacggugaaa

SEQ ID NO: 346019 - RNA, 22 nt, Human
cugucucaaaaaaaaaaaaaaa

SEQ ID NO: 346020 - RNA, 23 nt, Human
cuuucucuugcuuaaaaaaauuu

SEQ ID NO: 346021 - RNA, 25 nt, Human
gaaauaaccagucuuucucucuuaa

SEQ ID NO: 346022 - RNA, 23 nt, Human
gaggcggguggaauaugagguca

SEQ ID NO: 346023 - RNA, 19 nt, Human
gagguugcagugagcuggc

SEQ ID NO: 346024 - RNA, 21 nt, Human
gagguugcagugagcugugau

SEQ ID NO: 346025 - RNA, 22 nt, Human
gagugcugacagagacuggggc

SEQ ID NO: 346026 - RNA, 22 nt, Human
gaucacuugagcccaggauuga

SEQ ID NO: 346027 - RNA, 24 nt, Human
gcacuccagccugggggacagagc

SEQ ID NO: 346028 - RNA, 22 nt, Human
gcaggagaauggcaugaaccca

SEQ ID NO: 346029 - RNA, 18 nt, Human
gcagugaaggaagagacc

SEQ ID NO: 346030 - RNA, 19 nt, Human
gcagugaaggaagagacca

SEQ ID NO: 346031 - RNA, 20 nt, Human
gccacuguacuccagccuga

SEQ ID NO: 346032 - RNA, 22 nt, Human
gccacuguacuccagccugagc

SEQ ID NO: 346033 - RNA, 24 nt, Human
gccacuguacuccagccugagcaa

SEQ ID NO: 346034 - RNA, 19 nt, Human
gccugagcaacaaagaccc

SEQ ID NO: 346035 - RNA, 20 nt, Human
gcgcaguggcuaacgccugu

SEQ ID NO: 346036 - RNA, 24 nt, Human
gcuaacacggugaaaccccgucuc

SEQ ID NO: 346037 - RNA, 18 nt, Human
ggagcuugcagugagcag

SEQ ID NO: 346038 - RNA, 24 nt, Human
ggagcuugcagugagcagagaucg

SEQ ID NO: 346039 - RNA, 20 nt, Human
ggagugcugacagagacugg

SEQ ID NO: 346040 - RNA, 23 nt, Human
ggcgcaguggcuaacgccuguaa

SEQ ID NO: 346041 - RNA, 23 nt, Human
ggcggguggaauaugaggucagg

SEQ ID NO: 346042 - RNA, 21 nt, Human
ggcugcaugugguggcucaug

SEQ ID NO: 346043 - RNA, 21 nt, Human
gugaaaccccgucucugcuaa

SEQ ID NO: 346044 - RNA, 19 nt, Human
guggcucauguaaucccag

SEQ ID NO: 346045 - RNA, 21 nt, Human
uaaaacaagaggaacuaaagu

SEQ ID NO: 346046 - RNA, 23 nt, Human
uaaaacaagaggaacuaaaguca

SEQ ID NO: 346047 - RNA, 23 nt, Human
uaaaaguaaggaauccuauuuca

SEQ ID NO: 346048 - RNA, 20 nt, Human
uaaaauauucaaacaucugg

SEQ ID NO: 346049 - RNA, 22 nt, Human
uaacacggugaaaccccgucuc

SEQ ID NO: 346050 - RNA, 23 nt, Human
uaacacggugaaaccccgucucu

SEQ ID NO: 346051 - RNA, 18 nt, Human
uaaccugcgcaguccguc

SEQ ID NO: 346052 - RNA, 23 nt, Human
uaaguuugaauaucuucaaaaua

SEQ ID NO: 346053 - RNA, 20 nt, Human
uaauacagcuaucaggaaaa

SEQ ID NO: 346054 - RNA, 21 nt, Human
uacauggcgagcgccuguagu

SEQ ID NO: 346055 - RNA, 23 nt, Human
uagaaaaaaaugcugauuugaau

SEQ ID NO: 346056 - RNA, 22 nt, Human
uagagcccuuacauuaauauug

SEQ ID NO: 346057 - RNA, 19 nt, Human
uauugcauaaaugcaugua

SEQ ID NO: 346058 - RNA, 22 nt, Human
ucaaaaaaaaaaaaaaaaaaaa

SEQ ID NO: 346059 - RNA, 24 nt, Human
ucaaacaucuggcugcauguggug

SEQ ID NO: 346060 - RNA, 23 nt, Human
uccagccugggggacagagcgag

SEQ ID NO: 346061 - RNA, 24 nt, Human
uccagccugggggacagagcgaga

SEQ ID NO: 346062 - RNA, 23 nt, Human
ucccaugaccguccgcgcgcgcc

SEQ ID NO: 346063 - RNA, 20 nt, Human
uccgcgcgcgccagucugcg

SEQ ID NO: 346064 - RNA, 22 nt, Human
uccgcgcgcgccagucugcgca

SEQ ID NO: 346065 - RNA, 18 nt, Human
uccuaggaguuugagacc

SEQ ID NO: 346066 - RNA, 24 nt, Human
ucgggccgggcgcaguggcuaacg

SEQ ID NO: 346067 - RNA, 22 nt, Human
ucucuacaagggaaaaaaaaaa

SEQ ID NO: 346068 - RNA, 23 nt, Human
ucucuaccuccaguugacuaggg

SEQ ID NO: 346069 - RNA, 22 nt, Human
ucugaacgacaauguuugguuc

SEQ ID NO: 346070 - RNA, 23 nt, Human
ugaaaacaguaaaucacacaaag

SEQ ID NO: 346071 - RNA, 18 nt, Human
ugaaggaagagaccagau

SEQ ID NO: 346072 - RNA, 22 nt, Human
ugaaggaagagaccagauguaa

SEQ ID NO: 346073 - RNA, 18 nt, Human
ugagaccagccucagcaa

SEQ ID NO: 346074 - RNA, 24 nt, Human
ugagaccagccucagcaacauagu

SEQ ID NO: 346075 - RNA, 24 nt, Human
ugagaccauccuggcuaacacggu

SEQ ID NO: 346076 - RNA, 24 nt, Human
ugagaggcugaagcgggaggauca

SEQ ID NO: 346077 - RNA, 23 nt, Human
ugaggcaggagaauggcaugaac

SEQ ID NO: 346078 - RNA, 24 nt, Human
ugaggcaggagaauggcaugaacc

SEQ ID NO: 346079 - RNA, 25 nt, Human
ugaggcaggagaauggcaugaaccc

SEQ ID NO: 346080 - RNA, 23 nt, Human
ugagguugcagugagcugugauu

SEQ ID NO: 346081 - RNA, 22 nt, Human
ugauccuaggaguuugagacca

SEQ ID NO: 346082 - RNA, 23 nt, Human
ugcagugagcagagaucgagcca

SEQ ID NO: 346083 - RNA, 20 nt, Human
ugcauaaaugcauguauuug

SEQ ID NO: 346084 - RNA, 24 nt, Human
ugcauaaaugcauguauuugcaua

SEQ ID NO: 346085 - RNA, 21 nt, Human
ugcaugugguggcucauguaa

SEQ ID NO: 346086 - RNA, 23 nt, Human
uggaauaugaggucaggagauug

SEQ ID NO: 346087 - RNA, 21 nt, Human
uggcgagcgccuguaguccca

SEQ ID NO: 346088 - RNA, 24 nt, Human
uggcuaacgccuguaaucccagca

SEQ ID NO: 346089 - RNA, 19 nt, Human
ugggaggccgaggcgggug

SEQ ID NO: 346090 - RNA, 22 nt, Human
uuacauguguauccucucuccu

SEQ ID NO: 346091 - RNA, 23 nt, Human
uuaugccacuguacuccagccug

SEQ ID NO: 346092 - RNA, 19 nt, Human
uucaucuaccaccagaauu

SEQ ID NO: 346093 - RNA, 23 nt, Human
uucggagaaacuuacuugcuuug

SEQ ID NO: 346094 - RNA, 25 nt, Human
uugagaggcugaagcgggaggauca

SEQ ID NO: 346095 - RNA, 19 nt, Human
uugcagugagcagagaucg

SEQ ID NO: 346096 - RNA, 25 nt, Human
uugcagugagcagagaucgagccac

SEQ ID NO: 346097 - RNA, 21 nt, Human
uugcagugagcugugauuaug

SEQ ID NO: 346098 - RNA, 18 nt, Human
uugguucccccuggaggg

SEQ ID NO: 346099 - RNA, 22 nt, Human
uuugagaccagccucagcaaca

SEQ ID NO: 346100 - RNA, 24 nt, Human
uuuuuuuuuuuuuuuuucgcuuuu

SEQ ID NO: 346101 - RNA, 31 nt, Human
uuuuuuuuuuuuuuuuuuucgcuuuuaaugg

SEQ ID NO: 346102 - RNA, 31 nt, Human
uuuuuuuuuuuuuuuuuuuuucgcuuuuaaa

SEQ ID NO: 346103 - RNA, 27 nt, Human
uuuuuuuuuuuuuuuuuuuuuucgggg

SEQ ID NO: 346104 - RNA, 18 nt, Human
aaacuguaugacaugaca

SEQ ID NO: 346105 - RNA, 18 nt, Human
uacaagguguccuuucac

SEQ ID NO: 346106 - RNA, 19 nt, Human
ugaaaauccuggaacucac

SEQ ID NO: 346107 - RNA, 22 nt, Human
cgguaccggggcuggaaaagaa

SEQ ID NO: 346108 - RNA, 23 nt, Human
gcaggguccgguaccggggcugg

SEQ ID NO: 346109 - RNA, 19 nt, Human
gguaccggggcuggaaaag

SEQ ID NO: 346110 - RNA, 18 nt, Human
gguccgguaccggggcug

SEQ ID NO: 346111 - RNA, 19 nt, Human
auuucauuguggggagcgg

SEQ ID NO: 346112 - RNA, 24 nt, Human
ccgccugaaaaaaagaaaggggca

SEQ ID NO: 346113 - RNA, 21 nt, Human
cggccgccugaaaaaaagaaa

SEQ ID NO: 346114 - RNA, 22 nt, Human
uuuuuuuuuuuuuuuuuggaau

SEQ ID NO: 346115 - RNA, 28 nt, Human
uuuuuuuuuuuuuuuuuuuuuuuggggg

SEQ ID NO: 346116 - RNA, 23 nt, Human
cgggugaagcugaaucuugaacg

SEQ ID NO: 346117 - RNA, 21 nt, Human
ucuugaacgcacccaagccuc

SEQ ID NO: 346118 - RNA, 18 nt, Human
uuuuuuuuuuuuuuuuug

SEQ ID NO: 346119 - RNA, 19 nt, Human
uuuuuuuuuuuuuuuuugu

SEQ ID NO: 346120 - RNA, 20 nt, Human
ucaggcaacgaaaggagagc

SEQ ID NO: 346121 - RNA, 19 nt, Human
uggcggcgaucaggcaacg

SEQ ID NO: 346122 - RNA, 22 nt, Human
uggcggcgaucaggcaacgaaa

SEQ ID NO: 346123 - RNA, 18 nt, Human
acagaaaauauuuugagg

SEQ ID NO: 346124 - RNA, 18 nt, Human
acuccacaccggaaagag

SEQ ID NO: 346125 - RNA, 20 nt, Human
ugcacgucgucuccagacuc

SEQ ID NO: 346126 - RNA, 21 nt, Human
uuuuuuuuuuuuuuuuuuaca

SEQ ID NO: 346127 - RNA, 18 nt, Human
ucagaagagaucgcuuug

SEQ ID NO: 346128 - RNA, 21 nt, Human
uagauugcaggauggcgccga

SEQ ID NO: 346129 - RNA, 20 nt, Human
ucucagagagugcuacucac

SEQ ID NO: 346130 - RNA, 22 nt, Human
ugcaggauggcgccgauggcag

SEQ ID NO: 346131 - RNA, 23 nt, Human
acuuuaaaaucccucaaaaacug

SEQ ID NO: 346132 - RNA, 19 nt, Human
caccgcgcggcgccgcaac

SEQ ID NO: 346133 - RNA, 22 nt, Human
ccucaccgcgcggcgccgcaac

SEQ ID NO: 346134 - RNA, 20 nt, Human
uugaaacuuuaaaaucccuc

SEQ ID NO: 346135 - RNA, 24 nt, Human
aauaauacagcacuacagaaaaaa

SEQ ID NO: 346136 - RNA, 19 nt, Human
uuuuuugcuguugucccag

SEQ ID NO: 346137 - RNA, 24 nt, Human
uuuuuuuuugcuguugucccagau

SEQ ID NO: 346138 - RNA, 21 nt, Human
uuuuuuuuuugcuguuguccc

SEQ ID NO: 346139 - RNA, 21 nt, Human
uuuuuuuuuuuuuuuugcugu

SEQ ID NO: 346140 - RNA, 20 nt, Human
uuuuuuuuuuuuuuuuugcu

SEQ ID NO: 346141 - RNA, 27 nt, Human
uuuuuuuuuuuuuuuuuuuuuuugggg

SEQ ID NO: 346142 - RNA, 20 nt, Human
ggcugcagcacaagcggcgg

SEQ ID NO: 346143 - RNA, 21 nt, Human
ugcagcacaagcggcggcgug

SEQ ID NO: 346144 - RNA, 18 nt, Human
aggggaaagggaacgacg

SEQ ID NO: 346145 - RNA, 22 nt, Human
cagccaggggaaagggaacgac

SEQ ID NO: 346146 - RNA, 22 nt, Human
gccaggggaaagggaacgacgg

SEQ ID NO: 346147 - RNA, 19 nt, Human
gggaaagggaacgacgggg

SEQ ID NO: 346148 - RNA, 19 nt, Human
uccgcgcugccagccaggg

SEQ ID NO: 346149 - RNA, 22 nt, Human
uuuuuuuuuuuuucacgcuuaa

SEQ ID NO: 346150 - RNA, 22 nt, Human
uuuuuuuuuuuuuuucacgcuu

SEQ ID NO: 346151 - RNA, 20 nt, Human
uuuuuuuuuuuuuuuuucac

SEQ ID NO: 346152 - RNA, 23 nt, Human
ccaaaaauccucagcccuuacga

SEQ ID NO: 346153 - RNA, 21 nt, Human
cuggucaucaauuuauuaaaa

SEQ ID NO: 346154 - RNA, 18 nt, Human
uccugaccgacuuguucc

SEQ ID NO: 346155 - RNA, 20 nt, Human
ucggcgagagcgaacagcgg

SEQ ID NO: 346156 - RNA, 23 nt, Human
ugagucaggagcaggagcgugcc

SEQ ID NO: 346157 - RNA, 19 nt, Human
uuccucggcgagagcgaac

SEQ ID NO: 346158 - RNA, 21 nt, Human
uugcgcgcgggcuuccugacc

SEQ ID NO: 346159 - RNA, 23 nt, Human
uuuuuuuuuuuuaacaacugguc

SEQ ID NO: 346160 - RNA, 20 nt, Human
cugcugccaccacaccgcgc

SEQ ID NO: 346161 - RNA, 23 nt, Human
ggcugggcugcgccugcugccac

SEQ ID NO: 346162 - RNA, 23 nt, Human
uacuacaguguuuucaccauuaa

SEQ ID NO: 346163 - RNA, 20 nt, Human
agcuaacaucauugcagcac

SEQ ID NO: 346164 - RNA, 21 nt, Human
cagcuaacaucauugcagcac

SEQ ID NO: 346165 - RNA, 24 nt, Human
ccuuuacuccuucggcugugaucc

SEQ ID NO: 346166 - RNA, 19 nt, Human
cgaaaaauccacaguggcc

SEQ ID NO: 346167 - RNA, 19 nt, Human
cgaaaaauccacaguggcc

SEQ ID NO: 346168 - RNA, 22 nt, Human
cuuuacuccuucggcugugauc

SEQ ID NO: 346169 - RNA, 20 nt, Human
uccacaguggccacagcuaa

SEQ ID NO: 346170 - RNA, 20 nt, Human
uccacaguggccacagcuaa

SEQ ID NO: 346171 - RNA, 22 nt, Human
ugcgaaaaauccacaguggcca

SEQ ID NO: 346172 - RNA, 22 nt, Human
ugcgaaaaauccacaguggcca

SEQ ID NO: 346173 - RNA, 24 nt, Human
uugcagcaccuuuacuccuucggc

SEQ ID NO: 346174 - RNA, 21 nt, Human
aagcucggagaauagcagcag

SEQ ID NO: 346175 - RNA, 21 nt, Human
gagaauagcagcagacaccgc

SEQ ID NO: 346176 - RNA, 22 nt, Human
uagcagcagacaccgcagccuc

SEQ ID NO: 346177 - RNA, 18 nt, Human
ucggagaauagcagcaga

SEQ ID NO: 346178 - RNA, 22 nt, Human
ugauuuaauaaaguuuuauuuu

SEQ ID NO: 346179 - RNA, 20 nt, Human
ugcgaagcucggagaauagc

SEQ ID NO: 346180 - RNA, 18 nt, Human
uuuuuuuuuuuuuuuuug

SEQ ID NO: 346181 - RNA, 23 nt, Human
uuuuuuuuuuuuuuuuuugauuu

SEQ ID NO: 346182 - RNA, 22 nt, Human
uuuuuuuuuuuuuuuuuuuaag

SEQ ID NO: 346183 - RNA, 21 nt, Human
cacucaucuugacucagagug

SEQ ID NO: 346184 - RNA, 20 nt, Human
uaggucgucaccgccggaaa

SEQ ID NO: 346185 - RNA, 20 nt, Human
aaaaggagcagauugugaca

SEQ ID NO: 346186 - RNA, 23 nt, Human
aguggucgaacccgacauccaag

SEQ ID NO: 346187 - RNA, 23 nt, Human
ccaagacccagcgagcagccaag

SEQ ID NO: 346188 - RNA, 25 nt, Human
ccgacauccaagacccagcgagcag

SEQ ID NO: 346189 - RNA, 26 nt, Human
ccgacauccaagacccagcgagcagc

SEQ ID NO: 346190 - RNA, 22 nt, Human
gcgcggcggcggucuggcggag

SEQ ID NO: 346191 - RNA, 22 nt, Human
ggcggcgcggcggcggucuggc

SEQ ID NO: 346192 - RNA, 22 nt, Human
ucggccaaguggucgaacccga

SEQ ID NO: 346193 - RNA, 18 nt, Human
uggcggcgcggcggcggu

SEQ ID NO: 346194 - RNA, 20 nt, Human
uguggcggacaaaaaaaagg

SEQ ID NO: 346195 - RNA, 24 nt, Human
uuuuuuuuuuuuuuuuuuaacuug

SEQ ID NO: 346196 - RNA, 18 nt, Human
cccggauaauccucugaa

SEQ ID NO: 346197 - RNA, 23 nt, Human
ucagcagugcaacgagguaaaag

SEQ ID NO: 346198 - RNA, 22 nt, Human
aauacagcugccaaggagaccc

SEQ ID NO: 346199 - RNA, 19 nt, Human
agagcaacauccagacucc

SEQ ID NO: 346200 - RNA, 21 nt, Human
caacauccagacuccagaaua

SEQ ID NO: 346201 - RNA, 22 nt, Human
uccagaauacagcugccaagga

SEQ ID NO: 346202 - RNA, 22 nt, Human
ucuuuagagagcaacauccaga

SEQ ID NO: 346203 - RNA, 21 nt, Human
uuuuuuuuuuuuuuugucuuu

SEQ ID NO: 346204 - RNA, 21 nt, Human
ggucagagagccaaaagggcg

SEQ ID NO: 346205 - RNA, 22 nt, Human
ucagaagcaaaccaucacaaau

SEQ ID NO: 346206 - RNA, 18 nt, Human
uuuucagaagcaaaccau

SEQ ID NO: 346207 - RNA, 23 nt, Human
uuuuuuuuucagaagcaaaccau

SEQ ID NO: 346208 - RNA, 22 nt, Human
uuuuuuuuuuuuuuuuuuucag

SEQ ID NO: 346209 - RNA, 18 nt, Human
caaggaaagaggaccucc

SEQ ID NO: 346210 - RNA, 18 nt, Human
ucugacaugucacccagg

SEQ ID NO: 346211 - RNA, 21 nt, Human
uuuuuuuuuuuuuuuugcuau

SEQ ID NO: 346212 - RNA, 18 nt, Human
uuuuuuuuuuuuuuuuug

SEQ ID NO: 346213 - RNA, 20 nt, Human
uuuuuuuuuuuuuuuuugcu

SEQ ID NO: 346214 - RNA, 26 nt, Human
uuuuuuuuuuuuuuuuuugcuauuaa

SEQ ID NO: 346215 - RNA, 18 nt, Human
uugugcaaagaaaaaaag

SEQ ID NO: 346216 - RNA, 25 nt, Human
uuuuuuuuuuuuaaacgagaauuca

SEQ ID NO: 346217 - RNA, 18 nt, Human
uuuuuuuuuuuuuuaaac

SEQ ID NO: 346218 - RNA, 23 nt, Human
uuuuuuuuuuuuuuuuuuaaacg

SEQ ID NO: 346219 - RNA, 18 nt, Human
acacagccugagcgucuc

SEQ ID NO: 346220 - RNA, 23 nt, Human
cuccgaggcgccacggaaaagag

SEQ ID NO: 346221 - RNA, 19 nt, Human
aagaggccuccccugggga

SEQ ID NO: 346222 - RNA, 21 nt, Human
aagccaugcccacccaccuca

SEQ ID NO: 346223 - RNA, 21 nt, Human
acacuagauuagcaaaaaaag

SEQ ID NO: 346224 - RNA, 21 nt, Human
accccacucacccaucccuca

SEQ ID NO: 346225 - RNA, 19 nt, Human
acccgaaccgccgcgcccc

SEQ ID NO: 346226 - RNA, 22 nt, Human
accgccgcgcccccccgagccc

SEQ ID NO: 346227 - RNA, 19 nt, Human
accuggcccuugguaaugg

SEQ ID NO: 346228 - RNA, 23 nt, Human
agacaggauuugaauacagggcu

SEQ ID NO: 346229 - RNA, 23 nt, Human
augcccacccaccucaggauggc

SEQ ID NO: 346230 - RNA, 20 nt, Human
caaaguaccuggcccuuggu

SEQ ID NO: 346231 - RNA, 23 nt, Human
cacacuagauuagcaaaaaaaga

SEQ ID NO: 346232 - RNA, 18 nt, Human
caccccacucacccaucc

SEQ ID NO: 346233 - RNA, 19 nt, Human
caccccacucacccauccc

SEQ ID NO: 346234 - RNA, 19 nt, Human
caccccacucacccauccc

SEQ ID NO: 346235 - RNA, 21 nt, Human
cagcuggcacuaccacccacc

SEQ ID NO: 346236 - RNA, 22 nt, Human
cccacucacccaucccucagau

SEQ ID NO: 346237 - RNA, 20 nt, Human
cccccgagccccucgcgcuc

SEQ ID NO: 346238 - RNA, 21 nt, Human
cccccgagccccucgcgcucc

SEQ ID NO: 346239 - RNA, 18 nt, Human
ccccuggcuccuuaguua

SEQ ID NO: 346240 - RNA, 20 nt, Human
ccccuggggaggcuggggug

SEQ ID NO: 346241 - RNA, 21 nt, Human
ccccuggggaggcuggggugg

SEQ ID NO: 346242 - RNA, 22 nt, Human
ccccuggggaggcugggguggg

SEQ ID NO: 346243 - RNA, 24 nt, Human
cccgaaccgccgcgcccccccgag

SEQ ID NO: 346244 - RNA, 24 nt, Human
ccgccgccgccgccgcggcacuag

SEQ ID NO: 346245 - RNA, 21 nt, Human
ccgccgcgcccccccgagccc

SEQ ID NO: 346246 - RNA, 22 nt, Human
ccgccgcgcccccccgagcccc

SEQ ID NO: 346247 - RNA, 18 nt, Human
ccgcgcccccccgagccc

SEQ ID NO: 346248 - RNA, 18 nt, Human
ccggcugcgccgccuccc

SEQ ID NO: 346249 - RNA, 18 nt, Human
ccguccgccgccgccgcc

SEQ ID NO: 346250 - RNA, 20 nt, Human
ccugccccuggcuccuuagu

SEQ ID NO: 346251 - RNA, 21 nt, Human
cgccgccgccgccgcggcacu

SEQ ID NO: 346252 - RNA, 23 nt, Human
cgccucccggguccugggguccc

SEQ ID NO: 346253 - RNA, 22 nt, Human
cuaccacccaccccacucaccc

SEQ ID NO: 346254 - RNA, 23 nt, Human
cuaccacccaccccacucaccca

SEQ ID NO: 346255 - RNA, 20 nt, Human
cuccggcggccccggcugcg

SEQ ID NO: 346256 - RNA, 18 nt, Human
cugggguggggcuggagg

SEQ ID NO: 346257 - RNA, 18 nt, Human
gaaccgccgcgccccccc

SEQ ID NO: 346258 - RNA, 21 nt, Human
gaccucuaaagguggcaucuc

SEQ ID NO: 346259 - RNA, 26 nt, Human
gccuccccuggggaggcugggguggg

SEQ ID NO: 346260 - RNA, 24 nt, Human
gccucccggguccuggggucccug

SEQ ID NO: 346261 - RNA, 20 nt, Human
gcuccggcugggccguccgc

SEQ ID NO: 346262 - RNA, 18 nt, Human
gggcagcuggcacuacca

SEQ ID NO: 346263 - RNA, 19 nt, Human
ggggaggcugggguggggc

SEQ ID NO: 346264 - RNA, 24 nt, Human
uaaagccagaucuuauuccaacuc

SEQ ID NO: 346265 - RNA, 22 nt, Human
uaaguagcucuacagucauuga

SEQ ID NO: 346266 - RNA, 24 nt, Human
uagaagaggccuccccuggggagg

SEQ ID NO: 346267 - RNA, 21 nt, Human
uagcaaaaaaagacgggcaac

SEQ ID NO: 346268 - RNA, 23 nt, Human
uagcaaaaaaagacgggcaacau

SEQ ID NO: 346269 - RNA, 24 nt, Human
uagcaaaaaaagacgggcaacauu

SEQ ID NO: 346270 - RNA, 20 nt, Human
uagcaguaccacgcaggggu

SEQ ID NO: 346271 - RNA, 21 nt, Human
uccccuggggaggcuggggug

SEQ ID NO: 346272 - RNA, 25 nt, Human
ucccggguccuggggucccuggcuc

SEQ ID NO: 346273 - RNA, 18 nt, Human
ucccucagauugcccaag

SEQ ID NO: 346274 - RNA, 19 nt, Human
uccggcggccccggcugcg

SEQ ID NO: 346275 - RNA, 21 nt, Human
uccuccggcggccccggcugc

SEQ ID NO: 346276 - RNA, 18 nt, Human
uccuggggucccuggcuc

SEQ ID NO: 346277 - RNA, 19 nt, Human
ucgccgccgccaggucacc

SEQ ID NO: 346278 - RNA, 21 nt, Human
ucuacagucauugagcuagua

SEQ ID NO: 346279 - RNA, 19 nt, Human
ugaagcaacugugugaggc

SEQ ID NO: 346280 - RNA, 21 nt, Human
ugacugggcggguguugcagg

SEQ ID NO: 346281 - RNA, 21 nt, Human
ugggaaaacuaaggcucaggg

SEQ ID NO: 346282 - RNA, 20 nt, Human
uggggaggcugggguggggc

SEQ ID NO: 346283 - RNA, 18 nt, Human
ugggguggggcuggaggc

SEQ ID NO: 346284 - RNA, 19 nt, Human
ugggguggggcuggaggcu

SEQ ID NO: 346285 - RNA, 21 nt, Human
uuauuccaacucaccaccugc

SEQ ID NO: 346286 - RNA, 21 nt, Human
aaaaagaaaacacggacacgg

SEQ ID NO: 346287 - RNA, 23 nt, Human
aaaaagaaaacacggacacggcg

SEQ ID NO: 346288 - RNA, 25 nt, Human
aaaaagaaaacacggacacggggac

SEQ ID NO: 346289 - RNA, 18 nt, Human
aaaacgcaacacaaagcc

SEQ ID NO: 346290 - RNA, 22 nt, Human
aaaacgcaacacaaagccacag

SEQ ID NO: 346291 - RNA, 27 nt, Human
aaacacggacacggcgagggcgggcgc

SEQ ID NO: 346292 - RNA, 18 nt, Human
aaagaagcccccggccuc

SEQ ID NO: 346293 - RNA, 22 nt, Human
aaagagagcgggcggggaggcu

SEQ ID NO: 346294 - RNA, 20 nt, Human
aacacagcaaaaccacagcu

SEQ ID NO: 346295 - RNA, 18 nt, Human
aaccccgucauccagccc

SEQ ID NO: 346296 - RNA, 24 nt, Human
aagccacagcaucuacaaagugca

SEQ ID NO: 346297 - RNA, 21 nt, Human
aagcccccaggucaggacccu

SEQ ID NO: 346298 - RNA, 23 nt, Human
acaaaacgcaacacaaagccaca

SEQ ID NO: 346299 - RNA, 25 nt, Human
acacaaaacgcaacacaaagccaca

SEQ ID NO: 346300 - RNA, 25 nt, Human
acacagcaaaaccacagcuuuaggu

SEQ ID NO: 346301 - RNA, 22 nt, Human
acagcaaaaccacagcuuuagg

SEQ ID NO: 346302 - RNA, 24 nt, Human
acccagcaccucaggcaaaaacug

SEQ ID NO: 346303 - RNA, 21 nt, Human
acccuuacaggacaaugaagg

SEQ ID NO: 346304 - RNA, 21 nt, Human
agacuggagguggacacaggc

SEQ ID NO: 346305 - RNA, 20 nt, Human
agaucugugcaacagagaca

SEQ ID NO: 346306 - RNA, 18 nt, Human
agcccggagcagccgcag

SEQ ID NO: 346307 - RNA, 19 nt, Human
agcccggcacggcggccau

SEQ ID NO: 346308 - RNA, 20 nt, Human
agccgcagggccgggggacg

SEQ ID NO: 346309 - RNA, 21 nt, Human
agccuccagauagcugugugg

SEQ ID NO: 346310 - RNA, 18 nt, Human
aggcaaaaacugaagggc

SEQ ID NO: 346311 - RNA, 19 nt, Human
aggcuccuccgagaggcac

SEQ ID NO: 346312 - RNA, 18 nt, Human
aggcuggcgcagugaggc

SEQ ID NO: 346313 - RNA, 18 nt, Human
aggcuuggagaagccccc

SEQ ID NO: 346314 - RNA, 19 nt, Human
agggcaggccgcgccggcc

SEQ ID NO: 346315 - RNA, 25 nt, Human
caaaacgcaacacaaagccacagcc

SEQ ID NO: 346316 - RNA, 20 nt, Human
caaagauccagccugccuuc

SEQ ID NO: 346317 - RNA, 22 nt, Human
cacagaccagaaaaaucgaagu

SEQ ID NO: 346318 - RNA, 22 nt, Human
cacagaccagaaaaaucgaagu

SEQ ID NO: 346319 - RNA, 26 nt, Human
cacagaccagaaaaaucgaagugaac

SEQ ID NO: 346320 - RNA, 20 nt, Human
caccuccugaagcccugcuu

SEQ ID NO: 346321 - RNA, 21 nt, Human
cagaaaaaucgaagugaacac

SEQ ID NO: 346322 - RNA, 18 nt, Human
cagaagccauguaugaga

SEQ ID NO: 346323 - RNA, 20 nt, Human
cagagacacaaaacgcaaca

SEQ ID NO: 346324 - RNA, 30 nt, Human
cagagacacaaaacgcaacacaaagccacc

SEQ ID NO: 346325 - RNA, 19 nt, Human
cagcccguggggagccccg

SEQ ID NO: 346326 - RNA, 19 nt, Human
cagcccguggggagccccg

SEQ ID NO: 346327 - RNA, 19 nt, Human
caggaagccgacacagggc

SEQ ID NO: 346328 - RNA, 22 nt, Human
cagugccaaccccgucauccag

SEQ ID NO: 346329 - RNA, 18 nt, Human
caucuccuccuggacgcc

SEQ ID NO: 346330 - RNA, 20 nt, Human
ccacaaucgcucccuccgcc

SEQ ID NO: 346331 - RNA, 23 nt, Human
ccaccggguaccugggacguggg

SEQ ID NO: 346332 - RNA, 19 nt, Human
ccagaaaaaucgaagugaa

SEQ ID NO: 346333 - RNA, 22 nt, Human
ccagcaccucaggcaaaaacug

SEQ ID NO: 346334 - RNA, 22 nt, Human
ccaggcaucuccuccuggacgc

SEQ ID NO: 346335 - RNA, 22 nt, Human
cccaccugugccucugccccuc

SEQ ID NO: 346336 - RNA, 25 nt, Human
cccaggucaggacccucuccggggc

SEQ ID NO: 346337 - RNA, 28 nt, Human
ccccacacccgcccugugugcacaccca

SEQ ID NO: 346338 - RNA, 24 nt, Human
ccccagcccucuggggcccugcaa

SEQ ID NO: 346339 - RNA, 19 nt, Human
ccccgcgcccagcccggag

SEQ ID NO: 346340 - RNA, 23 nt, Human
ccccgcgcccagcccggagcagc

SEQ ID NO: 346341 - RNA, 25 nt, Human
cccgcccugugugcacacccagggg

SEQ ID NO: 346342 - RNA, 18 nt, Human
cccgcgcccagcccggag

SEQ ID NO: 346343 - RNA, 19 nt, Human
cccggaaccucucacucga

SEQ ID NO: 346344 - RNA, 20 nt, Human
cccuccgccuccuucuccgc

SEQ ID NO: 346345 - RNA, 21 nt, Human
ccgcgccggccaccgcggccg

SEQ ID NO: 346346 - RNA, 21 nt, Human
ccgcugcccucccaccugugc

SEQ ID NO: 346347 - RNA, 18 nt, Human
ccggaaccucucacucga

SEQ ID NO: 346348 - RNA, 18 nt, Human
ccuccgccuccuucuccg

SEQ ID NO: 346349 - RNA, 21 nt, Human
ccucgcacgggcacgcgaggu

SEQ ID NO: 346350 - RNA, 22 nt, Human
ccucuggggcccugcaaccacc

SEQ ID NO: 346351 - RNA, 20 nt, Human
ccugcaaagccuccagauag

SEQ ID NO: 346352 - RNA, 22 nt, Human
ccugcaaccaccaauggcugcg

SEQ ID NO: 346353 - RNA, 18 nt, Human
ccugugccucugccccuc

SEQ ID NO: 346354 - RNA, 22 nt, Human
cgaagugaacacagcaaaacca

SEQ ID NO: 346355 - RNA, 18 nt, Human
cgagaacccacgacuccc

SEQ ID NO: 346356 - RNA, 22 nt, Human
cgcuccuguccacgcugaucuc

SEQ ID NO: 346357 - RNA, 19 nt, Human
cggcagaaacagaagccau

SEQ ID NO: 346358 - RNA, 23 nt, Human
cggcaucccaggcgcggggcuca

SEQ ID NO: 346359 - RNA, 21 nt, Human
cggccggggccacaaucgcuc

SEQ ID NO: 346360 - RNA, 21 nt, Human
cggcuggacugggcgucgauc

SEQ ID NO: 346361 - RNA, 22 nt, Human
cggggaaagccgagacuggagg

SEQ ID NO: 346362 - RNA, 22 nt, Human
cuaaaugccccacacccgcccu

SEQ ID NO: 346363 - RNA, 18 nt, Human
cuccagccuccagcugga

SEQ ID NO: 346364 - RNA, 23 nt, Human
cucccugcaaagccuccagauag

SEQ ID NO: 346365 - RNA, 18 nt, Human
cuccgcugcccucccacc

SEQ ID NO: 346366 - RNA, 20 nt, Human
cuccgcugcccucccaccug

SEQ ID NO: 346367 - RNA, 20 nt, Human
cuccuguccacgcugaucuc

SEQ ID NO: 346368 - RNA, 22 nt, Human
cugaaagaagcccccggccucg

SEQ ID NO: 346369 - RNA, 18 nt, Human
cugaagcccugcuugcug

SEQ ID NO: 346370 - RNA, 18 nt, Human
cugagcggcgccuccucc

SEQ ID NO: 346371 - RNA, 20 nt, Human
cugcaaagccuccagauagc

SEQ ID NO: 346372 - RNA, 19 nt, Human
cugcccucccaccugugcc

SEQ ID NO: 346373 - RNA, 19 nt, Human
cugcccucccaccugugcc

SEQ ID NO: 346374 - RNA, 20 nt, Human
cuuggagaagcccccagguc

SEQ ID NO: 346375 - RNA, 22 nt, Human
gaaaaccuggcuguggccagcg

SEQ ID NO: 346376 - RNA, 18 nt, Human
gaaggacccguguguucc

SEQ ID NO: 346377 - RNA, 23 nt, Human
gaagugaacacagcaaaaccaca

SEQ ID NO: 346378 - RNA, 19 nt, Human
gacucccugcaaagccucc

SEQ ID NO: 346379 - RNA, 18 nt, Human
gagaggcacccccuucca

SEQ ID NO: 346380 - RNA, 22 nt, Human
gagcacagcauggccuaaaugc

SEQ ID NO: 346381 - RNA, 18 nt, Human
gagcaggugcgagaaccc

SEQ ID NO: 346382 - RNA, 23 nt, Human
gagcaggugcgagaacccacgac

SEQ ID NO: 346383 - RNA, 18 nt, Human
gagcggcgccuccuccca

SEQ ID NO: 346384 - RNA, 19 nt, Human
gauccagccugccuuccuc

SEQ ID NO: 346385 - RNA, 23 nt, Human
gcacagcauggccuaaaugcccc

SEQ ID NO: 346386 - RNA, 23 nt, Human
gcacggcggccaugggcgcgggg

SEQ ID NO: 346387 - RNA, 18 nt, Human
gcccggaaccucucacuc

SEQ ID NO: 346388 - RNA, 20 nt, Human
gcccugugugcacacccagg

SEQ ID NO: 346389 - RNA, 23 nt, Human
gcgggcggggaggcuggcgcagu

SEQ ID NO: 346390 - RNA, 19 nt, Human
gcggggcguggggcgcgag

SEQ ID NO: 346391 - RNA, 24 nt, Human
gcuggguggggccugugucucccu

SEQ ID NO: 346392 - RNA, 19 nt, Human
ggaaaaccuggcuguggcc

SEQ ID NO: 346393 - RNA, 22 nt, Human
ggacacaggcuccuccgagagg

SEQ ID NO: 346394 - RNA, 18 nt, Human
ggacgugggugucgggag

SEQ ID NO: 346395 - RNA, 18 nt, Human
ggacugggcgucgauccg

SEQ ID NO: 346396 - RNA, 22 nt, Human
ggaugcuggcaggggacgcugg

SEQ ID NO: 346397 - RNA, 24 nt, Human
ggcagaaacagaagccauguauga

SEQ ID NO: 346398 - RNA, 18 nt, Human
ggccaugggcgcggggcg

SEQ ID NO: 346399 - RNA, 21 nt, Human
ggccugugucucccuccagcc

SEQ ID NO: 346400 - RNA, 23 nt, Human
ggccugugucucccuccagccuc

SEQ ID NO: 346401 - RNA, 18 nt, Human
ggcgaggaggaaacggcu

SEQ ID NO: 346402 - RNA, 18 nt, Human
ggcucugaaagaagcccc

SEQ ID NO: 346403 - RNA, 22 nt, Human
gggacgcgcauccccggcaucc

SEQ ID NO: 346404 - RNA, 18 nt, Human
ggggaggcuggcgcagug

SEQ ID NO: 346405 - RNA, 22 nt, Human
ggggaggcuggcgcagugaggc

SEQ ID NO: 346406 - RNA, 21 nt, Human
gugagcccacgaggaugcugg

SEQ ID NO: 346407 - RNA, 22 nt, Human
guggccacgggagcuggggaca

SEQ ID NO: 346408 - RNA, 23 nt, Human
uagggaaaaccuggcuguggcca

SEQ ID NO: 346409 - RNA, 18 nt, Human
ucaaugaaguagagcaca

SEQ ID NO: 346410 - RNA, 21 nt, Human
uccacagaccagaaaaaucga

SEQ ID NO: 346411 - RNA, 23 nt, Human
uccacagaccagaaaaaucgaag

SEQ ID NO: 346412 - RNA, 25 nt, Human
uccacgcugaucuccgcugcccucc

SEQ ID NO: 346413 - RNA, 21 nt, Human
ucccaccugugccucugcccc

SEQ ID NO: 346414 - RNA, 19 nt, Human
ucccuccgccuccuucucc

SEQ ID NO: 346415 - RNA, 21 nt, Human
ucccugcaaagccuccagaua

SEQ ID NO: 346416 - RNA, 24 nt, Human
uccgagaggcacccccuuccaucc

SEQ ID NO: 346417 - RNA, 20 nt, Human
uccgccuccuucuccgccuc

SEQ ID NO: 346418 - RNA, 19 nt, Human
uccgcugcccucccaccug

SEQ ID NO: 346419 - RNA, 24 nt, Human
ucgcacugccacuuucccaccggg

SEQ ID NO: 346420 - RNA, 27 nt, Human
ucuccaauucacaguuucuccacagac

SEQ ID NO: 346421 - RNA, 21 nt, Human
ucucucggcagaaacagaagc

SEQ ID NO: 346422 - RNA, 20 nt, Human
ugaaaaaacagaucugugca

SEQ ID NO: 346423 - RNA, 22 nt, Human
ugaaaaagaaaacacggacacg

SEQ ID NO: 346424 - RNA, 21 nt, Human
ugaacacagcaaaaccacagc

SEQ ID NO: 346425 - RNA, 22 nt, Human
ugaacacagcaaaaccacagcu

SEQ ID NO: 346426 - RNA, 24 nt, Human
ugacacggagcucucaaggcaaag

SEQ ID NO: 346427 - RNA, 23 nt, Human
ugaggcuuggagaagcccccagg

SEQ ID NO: 346428 - RNA, 18 nt, Human
ugcaucgcuccuguccac

SEQ ID NO: 346429 - RNA, 19 nt, Human
ugccaggucaccccagccc

SEQ ID NO: 346430 - RNA, 23 nt, Human
ugccccacacccgcccugugugc

SEQ ID NO: 346431 - RNA, 18 nt, Human
ugccucugccccucaguc

SEQ ID NO: 346432 - RNA, 18 nt, Human
uggacgccacagugccaa

SEQ ID NO: 346433 - RNA, 19 nt, Human
uggcaggggacgcuggggc

SEQ ID NO: 346434 - RNA, 25 nt, Human
uggccacgggagcuggggacagacg

SEQ ID NO: 346435 - RNA, 19 nt, Human
uggccagggagcccggcac

SEQ ID NO: 346436 - RNA, 19 nt, Human
uggguacgagaaucgagau

SEQ ID NO: 346437 - RNA, 23 nt, Human
ugggugggaagccacagagcucc

SEQ ID NO: 346438 - RNA, 20 nt, Human
uguggucacucugggugcca

SEQ ID NO: 346439 - RNA, 24 nt, Human
uuugggugggaagccacagagcuc

SEQ ID NO: 346440 - RNA, 20 nt, Human
uuuuuuuuuuuuuuaguugg

SEQ ID NO: 346441 - RNA, 24 nt, Human
uuuuuuuuuuuuuuuuuaguuggg

SEQ ID NO: 346442 - RNA, 21 nt, Human
aaaaacauacacauagcuuag

SEQ ID NO: 346443 - RNA, 18 nt, Human
aagcauaaaagaucgacu

SEQ ID NO: 346444 - RNA, 27 nt, Human
aaguagaaaaugaaaauaaagggaccc

SEQ ID NO: 346445 - RNA, 21 nt, Human
aauaaauggcaaaaauacagu

SEQ ID NO: 346446 - RNA, 19 nt, Human
aauugccaggaaagagcag

SEQ ID NO: 346447 - RNA, 23 nt, Human
acauacacauagcuuagcaugca

SEQ ID NO: 346448 - RNA, 22 nt, Human
accccuuucucugauaaaucau

SEQ ID NO: 346449 - RNA, 22 nt, Human
agagacauguaccuuaauauuc

SEQ ID NO: 346450 - RNA, 20 nt, Human
aguggcugacuacaugacac

SEQ ID NO: 346451 - RNA, 25 nt, Human
caaauugccaggaaagagcagugca

SEQ ID NO: 346452 - RNA, 22 nt, Human
caacacaguguacaaauaugaa

SEQ ID NO: 346453 - RNA, 18 nt, Human
cagcggacgcccgucccc

SEQ ID NO: 346454 - RNA, 24 nt, Human
caggaaagagcagugcaaaauuaa

SEQ ID NO: 346455 - RNA, 22 nt, Human
cauacacauagcuuagcaugca

SEQ ID NO: 346456 - RNA, 26 nt, Human
caucuggaaaaccugugacuuacaag

SEQ ID NO: 346457 - RNA, 22 nt, Human
caugcuagguucguaaaaagag

SEQ ID NO: 346458 - RNA, 23 nt, Human
ccacaaggcaaagcaaaagguau

SEQ ID NO: 346459 - RNA, 20 nt, Human
ccccucgcagccgcugccgc

SEQ ID NO: 346460 - RNA, 20 nt, Human
cccgaauacagaguauggga

SEQ ID NO: 346461 - RNA, 18 nt, Human
ccucgcagccgcugccgc

SEQ ID NO: 346462 - RNA, 19 nt, Human
cuccuuuuuuuccgauccc

SEQ ID NO: 346463 - RNA, 20 nt, Human
gacagcggacgcccgucccc

SEQ ID NO: 346464 - RNA, 23 nt, Human
gaccccuuucucugauaaaucau

SEQ ID NO: 346465 - RNA, 21 nt, Human
gacuacaugacacaacaaggc

SEQ ID NO: 346466 - RNA, 21 nt, Human
ggaaauuccucacuguaguac

SEQ ID NO: 346467 - RNA, 19 nt, Human
gggaaacauuuuuaaaagc

SEQ ID NO: 346468 - RNA, 20 nt, Human
guaaccauaaaauaaaaaca

SEQ ID NO: 346469 - RNA, 18 nt, Human
gucucuuucccgcucugg

SEQ ID NO: 346470 - RNA, 22 nt, Human
uaaagugcaauauuacuuaaaa

SEQ ID NO: 346471 - RNA, 21 nt, Human
uaaaugccgcaaucuuucaau

SEQ ID NO: 346472 - RNA, 21 nt, Human
uaaguggcugacuacaugaca

SEQ ID NO: 346473 - RNA, 26 nt, Human
uaauaauagcagguuaucaucauaug

SEQ ID NO: 346474 - RNA, 18 nt, Human
uacaacacaguguacaaa

SEQ ID NO: 346475 - RNA, 20 nt, Human
uacaggaggaaauuccucac

SEQ ID NO: 346476 - RNA, 22 nt, Human
uaccuuaauauucugcaauaac

SEQ ID NO: 346477 - RNA, 22 nt, Human
uagaaaaugaaaauaaauggca

SEQ ID NO: 346478 - RNA, 18 nt, Human
uagaagaggcaugugagg

SEQ ID NO: 346479 - RNA, 18 nt, Human
uagcuuagcaugcaucuc

SEQ ID NO: 346480 - RNA, 18 nt, Human
uaugauucuaaaauauua

SEQ ID NO: 346481 - RNA, 21 nt, Human
ucaacagaaaaauuuccaaac

SEQ ID NO: 346482 - RNA, 21 nt, Human
ucacuguaguacaacacagug

SEQ ID NO: 346483 - RNA, 22 nt, Human
uccccucgcagccgcugccgcg

SEQ ID NO: 346484 - RNA, 26 nt, Human
uccucacauuggugcauaaguggcug

SEQ ID NO: 346485 - RNA, 24 nt, Human
ucgcagccgcugccgcggccccag

SEQ ID NO: 346486 - RNA, 24 nt, Human
ucggggugcggcggcuccagaacu

SEQ ID NO: 346487 - RNA, 24 nt, Human
ucuuauaucuuuuuuauuuuuuuu

SEQ ID NO: 346488 - RNA, 20 nt, Human
ugaaaacagaccccuuucuc

SEQ ID NO: 346489 - RNA, 21 nt, Human
ugaaaacagaccccuuucucu

SEQ ID NO: 346490 - RNA, 23 nt, Human
ugaaaacagaccccuuucucuga

SEQ ID NO: 346491 - RNA, 25 nt, Human
ugacuacaugacacaacaaggcccc

SEQ ID NO: 346492 - RNA, 19 nt, Human
ugagaccaacgggaaacau

SEQ ID NO: 346493 - RNA, 23 nt, Human
ugagggaauaaaggugcaaugga

SEQ ID NO: 346494 - RNA, 23 nt, Human
uggcaucaugcuagguucguaaa

SEQ ID NO: 346495 - RNA, 20 nt, Human
uguaaccauaaaauaaaaac

SEQ ID NO: 346496 - RNA, 23 nt, Human
uguauuuuuaaaugccgcaaucu

SEQ ID NO: 346497 - RNA, 19 nt, Human
uuaaaguagaaaaugaaaa

SEQ ID NO: 346498 - RNA, 25 nt, Human
uuagcaugcaucucagauggauccc

SEQ ID NO: 346499 - RNA, 22 nt, Human
uuguccacaaggcaaagcaaaa

SEQ ID NO: 346500 - RNA, 26 nt, Human
uuuuauuuuuuuucacuuuuuagaaa

SEQ ID NO: 346501 - RNA, 21 nt, Human
uuuuuuuuuuuuugcauaggg

SEQ ID NO: 346502 - RNA, 25 nt, Human
aaacacuugaacacuacugcaaaca

SEQ ID NO: 346503 - RNA, 20 nt, Human
aagaauaggaaaaaagccac

SEQ ID NO: 346504 - RNA, 19 nt, Human
agacaacgaugccuuugau

SEQ ID NO: 346505 - RNA, 19 nt, Human
cugguggacaccaauuaua

SEQ ID NO: 346506 - RNA, 20 nt, Human
gccuaggaacaccacaaauc

SEQ ID NO: 346507 - RNA, 20 nt, Human
uaacuuuauuugaaaggaau

SEQ ID NO: 346508 - RNA, 22 nt, Human
ucucacuuccccuaaaaauggg

SEQ ID NO: 346509 - RNA, 22 nt, Human
ugugcagagaaguugugaggac

SEQ ID NO: 346510 - RNA, 21 nt, Human
uuagcagacaacgaugccuuu

SEQ ID NO: 346511 - RNA, 27 nt, Human
uuuuuuuuuuaaauauuaaaguaacuu

SEQ ID NO: 346512 - RNA, 18 nt, Human
cgagagcacgucaaaauc

SEQ ID NO: 346513 - RNA, 18 nt, Human
uaggaagagacccaaauc

SEQ ID NO: 346514 - RNA, 21 nt, Human
ugggagaacuugccgagcgcc

SEQ ID NO: 346515 - RNA, 22 nt, Human
uuaggaagagacccaaaucucg

SEQ ID NO: 346516 - RNA, 24 nt, Human
uuuuuuuuuuuuuuuuuacuguga

SEQ ID NO: 346517 - RNA, 25 nt, Human
acaaaacaauaaacaccuuuauuac

SEQ ID NO: 346518 - RNA, 22 nt, Human
caaaacaauaaacaccuuuauu

SEQ ID NO: 346519 - RNA, 19 nt, Human
ugggaacaaaacaauaaac

SEQ ID NO: 346520 - RNA, 19 nt, Human
ugggaacaaaacaauaaac

SEQ ID NO: 346521 - RNA, 23 nt, Human
ugugggaacaaaacaauaaacac

SEQ ID NO: 346522 - RNA, 21 nt, Human
cagcagcccaggagggacagg

SEQ ID NO: 346523 - RNA, 21 nt, Human
cuccgcuuccccgucugcgcc

SEQ ID NO: 346524 - RNA, 18 nt, Human
gcagcccaggagggacag

SEQ ID NO: 346525 - RNA, 23 nt, Human
ggcaggaaaacgagacaauccag

SEQ ID NO: 346526 - RNA, 18 nt, Human
acccagagucugagccug

SEQ ID NO: 346527 - RNA, 24 nt, Human
acucguaguccggacucggacuuu

SEQ ID NO: 346528 - RNA, 23 nt, Human
aggaggccacgcacucguagucc

SEQ ID NO: 346529 - RNA, 22 nt, Human
agggcagcacugucuaucuguc

SEQ ID NO: 346530 - RNA, 21 nt, Human
caaaaaucugcauguaaacaa

SEQ ID NO: 346531 - RNA, 22 nt, Human
cacccgggcugugaaaaaaggc

SEQ ID NO: 346532 - RNA, 24 nt, Human
cacccggggcaguuggcugggcca

SEQ ID NO: 346533 - RNA, 18 nt, Human
cagcuccgagggacccag

SEQ ID NO: 346534 - RNA, 23 nt, Human
ccaacccuuccguucgucuccca

SEQ ID NO: 346535 - RNA, 20 nt, Human
cccaccauagugggagcggg

SEQ ID NO: 346536 - RNA, 21 nt, Human
ccuccagggcaggcacacccg

SEQ ID NO: 346537 - RNA, 21 nt, Human
cgagggacccagagucugagc

SEQ ID NO: 346538 - RNA, 24 nt, Human
cugcgcaugcaucucugugggccc

SEQ ID NO: 346539 - RNA, 22 nt, Human
gaaaaaaggcagaguccucucc

SEQ ID NO: 346540 - RNA, 21 nt, Human
gcacccggggcaguuggcugg

SEQ ID NO: 346541 - RNA, 23 nt, Human
gcagaguccucucccggcacgca

SEQ ID NO: 346542 - RNA, 24 nt, Human
gcagaguccucucccggcacgcag

SEQ ID NO: 346543 - RNA, 23 nt, Human
gcaggccugcccggcggcugcgc

SEQ ID NO: 346544 - RNA, 19 nt, Human
gcaugcaucucugugggcc

SEQ ID NO: 346545 - RNA, 21 nt, Human
gcgcaugcaucucugugggcc

SEQ ID NO: 346546 - RNA, 21 nt, Human
gcugggccagcccaccaaccc

SEQ ID NO: 346547 - RNA, 19 nt, Human
gugcccggcuggcagcucc

SEQ ID NO: 346548 - RNA, 23 nt, Human
guuuccgccgccgcugcugcugc

SEQ ID NO: 346549 - RNA, 18 nt, Human
uaaacaaguagcuaccgc

SEQ ID NO: 346550 - RNA, 18 nt, Human
uacaaaaaucugcaugua

SEQ ID NO: 346551 - RNA, 19 nt, Human
uccaugaccaugagguugg

SEQ ID NO: 346552 - RNA, 25 nt, Human
uccgccgccgcugcugcugcagcca

SEQ ID NO: 346553 - RNA, 19 nt, Human
ucucccaccauagugggag

SEQ ID NO: 346554 - RNA, 24 nt, Human
ugaaaaaaggcagaguccucuccc

SEQ ID NO: 346555 - RNA, 22 nt, Human
uggcagcuccgagggacccaga

SEQ ID NO: 346556 - RNA, 21 nt, Human
uguaaacaaguagcuaccgca

SEQ ID NO: 346557 - RNA, 21 nt, Human
uuccgccgccgcugcugcugc

SEQ ID NO: 346558 - RNA, 24 nt, Human
uuccgccgccgcugcugcugcagc

SEQ ID NO: 346559 - RNA, 22 nt, Human
aagaggccaggaaguaagggug

SEQ ID NO: 346560 - RNA, 23 nt, Human
acccggagccccucacccccacc

SEQ ID NO: 346561 - RNA, 24 nt, Human
acccggagccccucacccccacca

SEQ ID NO: 346562 - RNA, 24 nt, Human
agagcuuguggugguugcuucucu

SEQ ID NO: 346563 - RNA, 22 nt, Human
agcccagaagaggccaggaagu

SEQ ID NO: 346564 - RNA, 20 nt, Human
aggcuuagguggggacagga

SEQ ID NO: 346565 - RNA, 19 nt, Human
cagaagaggccaggaagua

SEQ ID NO: 346566 - RNA, 18 nt, Human
caguggcaguagcccaga

SEQ ID NO: 346567 - RNA, 23 nt, Human
cccgagagcuuguggugguugcu

SEQ ID NO: 346568 - RNA, 19 nt, Human
cgccaccgcugcugcugcc

SEQ ID NO: 346569 - RNA, 23 nt, Human
cugcugccuucgcuaccgccugc

SEQ ID NO: 346570 - RNA, 21 nt, Human
cuuguggugguugcuucucuc

SEQ ID NO: 346571 - RNA, 20 nt, Human
gacccggagccccucacccc

SEQ ID NO: 346572 - RNA, 19 nt, Human
ggccaggaaguaagggugg

SEQ ID NO: 346573 - RNA, 23 nt, Human
ggggaggggaguuauauacagca

SEQ ID NO: 346574 - RNA, 19 nt, Human
uagguggggacaggaggcg

SEQ ID NO: 346575 - RNA, 18 nt, Human
ugacccggagccccucac

SEQ ID NO: 346576 - RNA, 21 nt, Human
ugacccggagccccucacccc

SEQ ID NO: 346577 - RNA, 19 nt, Human
ugaggaaauugaggcucag

SEQ ID NO: 346578 - RNA, 24 nt, Human
ugaggaaauugaggcucagugagg

SEQ ID NO: 346579 - RNA, 19 nt, Human
uggcagaaggcacacagug

SEQ ID NO: 346580 - RNA, 20 nt, Human
uggcagaaggcacacagugg

SEQ ID NO: 346581 - RNA, 22 nt, Human
uggcagaaggcacacaguggca

SEQ ID NO: 346582 - RNA, 19 nt, Human
uguggugguugcuucucuc

SEQ ID NO: 346583 - RNA, 23 nt, Human
uuggcagugacauuuauuuuucu

SEQ ID NO: 346584 - RNA, 18 nt, Human
uuuuuuuuuuuuuuuucg

SEQ ID NO: 346585 - RNA, 22 nt, Human
uuuuuuuuuuuuuuuucguugg

SEQ ID NO: 346586 - RNA, 21 nt, Human
uuuuuuuuuuuuuuuuucguu

SEQ ID NO: 346587 - RNA, 20 nt, Human
aaagagcaugucuguguaua

SEQ ID NO: 346588 - RNA, 24 nt, Human
aaagauaggcaaaaauucacauua

SEQ ID NO: 346589 - RNA, 23 nt, Human
agaaaggacuagccagcuucuug

SEQ ID NO: 346590 - RNA, 21 nt, Human
cagcuuagauuccaaaacuga

SEQ ID NO: 346591 - RNA, 23 nt, Human
cgccgagccgccgcugccgcccc

SEQ ID NO: 346592 - RNA, 25 nt, Human
cggccgggcugggguccccgggacc

SEQ ID NO: 346593 - RNA, 30 nt, Human
cugacugcgccgagccgccgcugccgcccc

SEQ ID NO: 346594 - RNA, 18 nt, Human
cugcgggcgagcggccgg

SEQ ID NO: 346595 - RNA, 19 nt, Human
gacauauauuuuaaaggaa

SEQ ID NO: 346596 - RNA, 22 nt, Human
gagcggccgggcuggggucccg

SEQ ID NO: 346597 - RNA, 21 nt, Human
gcgagcggccgggcugggguc

SEQ ID NO: 346598 - RNA, 20 nt, Human
gcgccgagccgccgcugccg

SEQ ID NO: 346599 - RNA, 19 nt, Human
gcgcggcgcuggggacugg

SEQ ID NO: 346600 - RNA, 25 nt, Human
gcggcgcuggggacuggcuggguac

SEQ ID NO: 346601 - RNA, 22 nt, Human
ggcaaaaauucacauuaaaaaa

SEQ ID NO: 346602 - RNA, 22 nt, Human
uaacaaaggcugacauugaaau

SEQ ID NO: 346603 - RNA, 21 nt, Human
uaacauggugaucauuugucu

SEQ ID NO: 346604 - RNA, 23 nt, Human
uaauccauaaauacaacaggcau

SEQ ID NO: 346605 - RNA, 21 nt, Human
uagaaagguaccaacaagaug

SEQ ID NO: 346606 - RNA, 24 nt, Human
uagcuucagcuuggcaaacagcuu

SEQ ID NO: 346607 - RNA, 21 nt, Human
uauauuuuaaaggaaucagau

SEQ ID NO: 346608 - RNA, 21 nt, Human
ucccggguaccgggaggcguc

SEQ ID NO: 346609 - RNA, 22 nt, Human
uggaaaugaccauuguauuagc

SEQ ID NO: 346610 - RNA, 22 nt, Human
uguaguaucaguaaaggucuga

SEQ ID NO: 346611 - RNA, 20 nt, Human
uguuuccuuuaaauuugucu

SEQ ID NO: 346612 - RNA, 24 nt, Human
uuaaaaaaaacccuauauuucuau

SEQ ID NO: 346613 - RNA, 22 nt, Human
uuaaagauaggcaaaaauucac

SEQ ID NO: 346614 - RNA, 18 nt, Human
uucacagaaaggacuagc

SEQ ID NO: 346615 - RNA, 25 nt, Human
uugaagcagccuuaguguuuccuuu

SEQ ID NO: 346616 - RNA, 21 nt, Human
uuuuuuuuuuuuauaagcagu

SEQ ID NO: 346617 - RNA, 28 nt, Human
caguaacuucuuuuuccaaagaggaaac

SEQ ID NO: 346618 - RNA, 20 nt, Human
ccagagacgcgagagggaaa

SEQ ID NO: 346619 - RNA, 19 nt, Human
gaauguguaaggcauuuug

SEQ ID NO: 346620 - RNA, 18 nt, Human
gggaaagcgagagggcag

SEQ ID NO: 346621 - RNA, 22 nt, Human
gggaaagcgagagggcaggagc

SEQ ID NO: 346622 - RNA, 23 nt, Human
uaaguugaacaguaacuucuuuu

SEQ ID NO: 346623 - RNA, 18 nt, Human
uuuuuuuuuuuuuuuuug

SEQ ID NO: 346624 - RNA, 19 nt, Human
uuuuuuuuuuuuuuuuugu

SEQ ID NO: 346625 - RNA, 22 nt, Human
uuuuuuuuuuuuuuuuuguagg

SEQ ID NO: 346626 - RNA, 21 nt, Human
acacacucggagcaacccuga

SEQ ID NO: 346627 - RNA, 22 nt, Human
acccugauaaguagacacauca

SEQ ID NO: 346628 - RNA, 26 nt, Human
agcggccggcggcggcggcggcggcg

SEQ ID NO: 346629 - RNA, 23 nt, Human
aggcugcgguaaggcuauggcac

SEQ ID NO: 346630 - RNA, 18 nt, Human
agucuguguugacuucuu

SEQ ID NO: 346631 - RNA, 18 nt, Human
cacuggaaucggcacggg

SEQ ID NO: 346632 - RNA, 21 nt, Human
cagagccaccacuccuggaac

SEQ ID NO: 346633 - RNA, 23 nt, Human
cauccccuacgacgagcugggag

SEQ ID NO: 346634 - RNA, 20 nt, Human
ccaagccagcgggacgaacu

SEQ ID NO: 346635 - RNA, 21 nt, Human
cggacuggggggggugagggg

SEQ ID NO: 346636 - RNA, 22 nt, Human
cggcggcggcggcggcggcggc

SEQ ID NO: 346637 - RNA, 18 nt, Human
cucccgcgcaggcugcgg

SEQ ID NO: 346638 - RNA, 21 nt, Human
cuccugcgagucuccugggga

SEQ ID NO: 346639 - RNA, 26 nt, Human
cucucucacuccucaacagccaaagg

SEQ ID NO: 346640 - RNA, 27 nt, Human
cucucucucucucacuccucaacagcc

SEQ ID NO: 346641 - RNA, 18 nt, Human
cucucucucucucucucu

SEQ ID NO: 346642 - RNA, 18 nt, Human
cucucucucucucucucu

SEQ ID NO: 346643 - RNA, 18 nt, Human
cucucucucucucucucu

SEQ ID NO: 346644 - RNA, 18 nt, Human
cucucucucucucucucu

SEQ ID NO: 346645 - RNA, 18 nt, Human
cucucucucucucucucu

SEQ ID NO: 346646 - RNA, 18 nt, Human
cucucucucucucucucu

SEQ ID NO: 346647 - RNA, 24 nt, Human
cucucucucucucucucucucaag

SEQ ID NO: 346648 - RNA, 24 nt, Human
cucugcuggcuuuugucugugcug

SEQ ID NO: 346649 - RNA, 27 nt, Human
cugcuauaaaacuccauuuucugaccc

SEQ ID NO: 346650 - RNA, 19 nt, Human
cuguggccucccgcgcagg

SEQ ID NO: 346651 - RNA, 18 nt, Human
gacacuguuuucuuugug

SEQ ID NO: 346652 - RNA, 25 nt, Human
gcaacccugauaaguagacacauca

SEQ ID NO: 346653 - RNA, 21 nt, Human
gcacugagcgagcagccacgc

SEQ ID NO: 346654 - RNA, 21 nt, Human
gccggcggcggcggcggcggc

SEQ ID NO: 346655 - RNA, 24 nt, Human
gcgagcagccacgcuccugcuugu

SEQ ID NO: 346656 - RNA, 20 nt, Human
gcggcggcggcggcggcggc

SEQ ID NO: 346657 - RNA, 24 nt, Human
gcggcggcggcggcggcggcgcuc

SEQ ID NO: 346658 - RNA, 23 nt, Human
gcggcggcggcggcggcggcggc

SEQ ID NO: 346659 - RNA, 23 nt, Human
gcggcggcggcggcggcggcggc

SEQ ID NO: 346660 - RNA, 18 nt, Human
gcugaggcugucacucca

SEQ ID NO: 346661 - RNA, 24 nt, Human
ggccggcggcggcggcggcggcgg

SEQ ID NO: 346662 - RNA, 25 nt, Human
ggcggcggcggcggcgcucggacug

SEQ ID NO: 346663 - RNA, 23 nt, Human
ggcggcggcggcggcggcggcgg

SEQ ID NO: 346664 - RNA, 23 nt, Human
ggcggcggcggcggcggcggcgg

SEQ ID NO: 346665 - RNA, 22 nt, Human
gggucacaccucagagccacca

SEQ ID NO: 346666 - RNA, 23 nt, Human
uacaacacccaugauaauaugga

SEQ ID NO: 346667 - RNA, 21 nt, Human
uagacgcuuugcucugcuggc

SEQ ID NO: 346668 - RNA, 20 nt, Human
uccccugcuguagcuaucau

SEQ ID NO: 346669 - RNA, 21 nt, Human
ucucacuccucaacagccaaa

SEQ ID NO: 346670 - RNA, 19 nt, Human
ucuccuggggacguguuac

SEQ ID NO: 346671 - RNA, 22 nt, Human
ucucucacuccucaacagccaa

SEQ ID NO: 346672 - RNA, 21 nt, Human
ucucucucucucucucucuca

SEQ ID NO: 346673 - RNA, 18 nt, Human
ugacuucuugucuucuuc

SEQ ID NO: 346674 - RNA, 20 nt, Human
ugacuucuugucuucuucuc

SEQ ID NO: 346675 - RNA, 21 nt, Human
ugcugagggggcugaggcugu

SEQ ID NO: 346676 - RNA, 20 nt, Human
uggcacugagcgagcagcca

SEQ ID NO: 346677 - RNA, 20 nt, Human
uggcugggcccaaacguggg

SEQ ID NO: 346678 - RNA, 19 nt, Human
uggggggggugagggggag

SEQ ID NO: 346679 - RNA, 21 nt, Human
ugucuucuucucuugguagua

SEQ ID NO: 346680 - RNA, 22 nt, Human
uguugacuucuugucuucuucu

SEQ ID NO: 346681 - RNA, 22 nt, Human
uuccaagccagcgggacgaacu

SEQ ID NO: 346682 - RNA, 21 nt, Human
uuucuuuguguuaucaagcug

SEQ ID NO: 346683 - RNA, 19 nt, Human
aaagaacuggaguuggagc

SEQ ID NO: 346684 - RNA, 19 nt, Human
aagcgccggcgggaucgag

SEQ ID NO: 346685 - RNA, 21 nt, Human
acagcacuuucuucagagcag

SEQ ID NO: 346686 - RNA, 22 nt, Human
accaccucaagcaaacccacua

SEQ ID NO: 346687 - RNA, 19 nt, Human
aguuggagccagacagcac

SEQ ID NO: 346688 - RNA, 22 nt, Human
caaagcaguaaaacuaaaucuc

SEQ ID NO: 346689 - RNA, 19 nt, Human
caccucaagcaaacccacu

SEQ ID NO: 346690 - RNA, 18 nt, Human
cagcacuuucuucagagc

SEQ ID NO: 346691 - RNA, 25 nt, Human
caucauuaacaguacuuuaaaucaa

SEQ ID NO: 346692 - RNA, 23 nt, Human
cauuccuaaaacuucuacuuuga

SEQ ID NO: 346693 - RNA, 22 nt, Human
ccaccagucaaagcaguaaaac

SEQ ID NO: 346694 - RNA, 24 nt, Human
ccaccagucaaagcaguaaaacua

SEQ ID NO: 346695 - RNA, 23 nt, Human
ccugcaacaggguccagcaaagc

SEQ ID NO: 346696 - RNA, 23 nt, Human
cugaagacaugcuggucucuucc

SEQ ID NO: 346697 - RNA, 24 nt, Human
cuuaacaaaacugaagucuucaga

SEQ ID NO: 346698 - RNA, 20 nt, Human
cuucuagagacccaccaguc

SEQ ID NO: 346699 - RNA, 19 nt, Human
gaaguaguuuggcuacuga

SEQ ID NO: 346700 - RNA, 20 nt, Human
ggugacagagugggaagggu

SEQ ID NO: 346701 - RNA, 26 nt, Human
uaacaaaacugaagucuucagaaaag

SEQ ID NO: 346702 - RNA, 24 nt, Human
uaggaccauauccagauaaagguc

SEQ ID NO: 346703 - RNA, 24 nt, Human
ucaaagcaguaaaacuaaaucucc

SEQ ID NO: 346704 - RNA, 18 nt, Human
ucaagaaguaguuuggcu

SEQ ID NO: 346705 - RNA, 23 nt, Human
ucaagcaaacccacuauaccuau

SEQ ID NO: 346706 - RNA, 21 nt, Human
uccaagacuggacugcggcuc

SEQ ID NO: 346707 - RNA, 23 nt, Human
uccccuucccgcgcccgccaccc

SEQ ID NO: 346708 - RNA, 23 nt, Human
ucucaugaguuaucacucaguuu

SEQ ID NO: 346709 - RNA, 24 nt, Human
ugaaaaucccaauauaugaguuua

SEQ ID NO: 346710 - RNA, 20 nt, Human
ugcuucuagagacccaccag

SEQ ID NO: 346711 - RNA, 22 nt, Human
ugggaaggguuagguuccaggc

SEQ ID NO: 346712 - RNA, 18 nt, Human
uuuuuuuuuuuuucacuu

SEQ ID NO: 346713 - RNA, 25 nt, Human
uuuuuuuuuuuuucacuuagaaaug

SEQ ID NO: 346714 - RNA, 24 nt, Human
uuuuuuuuuuuuuuuucacuuaau

SEQ ID NO: 346715 - RNA, 23 nt, Human
aaacagacaggacugguugugag

SEQ ID NO: 346716 - RNA, 18 nt, Human
aaaccaaauaaaucaagc

SEQ ID NO: 346717 - RNA, 27 nt, Human
aacacaaccugucuucuaucuggcacc

SEQ ID NO: 346718 - RNA, 25 nt, Human
aagggucaccccucacuuuaaagcc

SEQ ID NO: 346719 - RNA, 18 nt, Human
acaggauaaaaacacaac

SEQ ID NO: 346720 - RNA, 24 nt, Human
accuacuuacaccaaacaaaacua

SEQ ID NO: 346721 - RNA, 20 nt, Human
acuaccuuagcucccacaua

SEQ ID NO: 346722 - RNA, 22 nt, Human
acucacacaaccuacuuacacc

SEQ ID NO: 346723 - RNA, 20 nt, Human
agaaaccaaauaaaucaagc

SEQ ID NO: 346724 - RNA, 22 nt, Human
agcagccaggacaggacggcug

SEQ ID NO: 346725 - RNA, 23 nt, Human
agccacaggauaaaaacacaacc

SEQ ID NO: 346726 - RNA, 20 nt, Human
aggacacuacacaagccaca

SEQ ID NO: 346727 - RNA, 19 nt, Human
aggcugcaucuuuuaacug

SEQ ID NO: 346728 - RNA, 18 nt, Human
aguugauuucaccacuua

SEQ ID NO: 346729 - RNA, 18 nt, Human
auguauuugguguagaaa

SEQ ID NO: 346730 - RNA, 21 nt, Human
caaaaggugauacuaccagca

SEQ ID NO: 346731 - RNA, 23 nt, Human
caagccacaggauaaaaacacaa

SEQ ID NO: 346732 - RNA, 20 nt, Human
cacaagccacaggauaaaaa

SEQ ID NO: 346733 - RNA, 23 nt, Human
cacacaaccuacuuacaccaaac

SEQ ID NO: 346734 - RNA, 21 nt, Human
cacacauaugaaggcccagau

SEQ ID NO: 346735 - RNA, 23 nt, Human
caccccuaaauuucuagugauuu

SEQ ID NO: 346736 - RNA, 19 nt, Human
caccccucacuuuaaagcc

SEQ ID NO: 346737 - RNA, 22 nt, Human
caccccucacuuuaaagccaag

SEQ ID NO: 346738 - RNA, 23 nt, Human
caccccucacuuuaaagccaaga

SEQ ID NO: 346739 - RNA, 20 nt, Human
cacuacacaagccacaggau

SEQ ID NO: 346740 - RNA, 18 nt, Human
cacuauaaacagacagga

SEQ ID NO: 346741 - RNA, 19 nt, Human
cagcagccuuuaaaucucc

SEQ ID NO: 346742 - RNA, 19 nt, Human
cagccagccaggccuucug

SEQ ID NO: 346743 - RNA, 22 nt, Human
caggauaaaaacacaaccuguc

SEQ ID NO: 346744 - RNA, 24 nt, Human
cauaguaaauauaaaugaauuaac

SEQ ID NO: 346745 - RNA, 23 nt, Human
cauuggcugugccaugccuccga

SEQ ID NO: 346746 - RNA, 22 nt, Human
ccaaacaaaacuagaaugaaca

SEQ ID NO: 346747 - RNA, 21 nt, Human
cccacauaugaaaacucuuca

SEQ ID NO: 346748 - RNA, 19 nt, Human
ccuccgacccuucccauug

SEQ ID NO: 346749 - RNA, 19 nt, Human
cgcgcgcucccggcccuuc

SEQ ID NO: 346750 - RNA, 25 nt, Human
cgcucccggcccuucccauuggcuu

SEQ ID NO: 346751 - RNA, 21 nt, Human
cggcugggacagggugcacgg

SEQ ID NO: 346752 - RNA, 21 nt, Human
cugugccaugccuccgacccu

SEQ ID NO: 346753 - RNA, 30 nt, Human
cuucccauuggcugugccaugccuccgacu

SEQ ID NO: 346754 - RNA, 19 nt, Human
gaaaauacagugagaaaua

SEQ ID NO: 346755 - RNA, 19 nt, Human
gacacuacacaagccacag

SEQ ID NO: 346756 - RNA, 18 nt, Human
gaccccucacuccagcag

SEQ ID NO: 346757 - RNA, 21 nt, Human
gaccccucacuccagcagccu

SEQ ID NO: 346758 - RNA, 21 nt, Human
gagauggaaaaaaaaaaucag

SEQ ID NO: 346759 - RNA, 20 nt, Human
gagggggcagagaaucccag

SEQ ID NO: 346760 - RNA, 18 nt, Human
ggcagagaaucccaggac

SEQ ID NO: 346761 - RNA, 20 nt, Human
uaaaaacacaaccugucuuc

SEQ ID NO: 346762 - RNA, 19 nt, Human
uaaaucucccgcgccgcgc

SEQ ID NO: 346763 - RNA, 18 nt, Human
uaagaagcuccuugcccu

SEQ ID NO: 346764 - RNA, 21 nt, Human
uaagggcacaucuucaguuca

SEQ ID NO: 346765 - RNA, 23 nt, Human
uacaccaaacaaaacuagaauga

SEQ ID NO: 346766 - RNA, 23 nt, Human
uacaccaaacaaaacuagaauga

SEQ ID NO: 346767 - RNA, 18 nt, Human
uaucccacaacacucuac

SEQ ID NO: 346768 - RNA, 18 nt, Human
ucaccacuuaacaggggc

SEQ ID NO: 346769 - RNA, 22 nt, Human
uccagcagccuuuaaaucuccc

SEQ ID NO: 346770 - RNA, 21 nt, Human
ucccacaacacucuacucaga

SEQ ID NO: 346771 - RNA, 20 nt, Human
ucccgcgccgcgcgcucccg

SEQ ID NO: 346772 - RNA, 21 nt, Human
ugacuugaaauuuuacaauac

SEQ ID NO: 346773 - RNA, 18 nt, Human
ugagauggaaaaaaaaaa

SEQ ID NO: 346774 - RNA, 21 nt, Human
ugagauggaaaaaaaaaauca

SEQ ID NO: 346775 - RNA, 18 nt, Human
ugccccggcccuucccau

SEQ ID NO: 346776 - RNA, 25 nt, Human
uggcugugccaugccuccgacccuu

SEQ ID NO: 346777 - RNA, 23 nt, Human
uuaugagauggaaaaaaaaaauc

SEQ ID NO: 346778 - RNA, 26 nt, Human
uucucacacauaugaaggcccagauc

SEQ ID NO: 346779 - RNA, 19 nt, Human
uuggugccccggcccuucc

SEQ ID NO: 346780 - RNA, 24 nt, Human
uuuggugccccggcccuucccauu

SEQ ID NO: 346781 - RNA, 19 nt, Human
aaaaaaauacuguacagac

SEQ ID NO: 346782 - RNA, 21 nt, Human
aaaaaaauuuagauacaccac

SEQ ID NO: 346783 - RNA, 22 nt, Human
aaaaacacuuggcaaacugaag

SEQ ID NO: 346784 - RNA, 26 nt, Human
aaaagcaaucauucucuccagccuuc

SEQ ID NO: 346785 - RNA, 22 nt, Human
aaacaguuguaaacacacucuu

SEQ ID NO: 346786 - RNA, 22 nt, Human
aaagaaacacagccuaagucaa

SEQ ID NO: 346787 - RNA, 18 nt, Human
aacacacucuuaauuuuu

SEQ ID NO: 346788 - RNA, 18 nt, Human
aaccacauaaugccaucu

SEQ ID NO: 346789 - RNA, 19 nt, Human
aaccauaaagaaacacagc

SEQ ID NO: 346790 - RNA, 20 nt, Human
aagaaccaaaguauugaaca

SEQ ID NO: 346791 - RNA, 23 nt, Human
aagacuucuucauccaaagacag

SEQ ID NO: 346792 - RNA, 26 nt, Human
aagacuucuucauccaaagacagguc

SEQ ID NO: 346793 - RNA, 20 nt, Human
aagacuucuucauccaaauc

SEQ ID NO: 346794 - RNA, 23 nt, Human
aagacuucuucauccaaauccag

SEQ ID NO: 346795 - RNA, 20 nt, Human
aagccaaaaaaauaagaaaa

SEQ ID NO: 346796 - RNA, 21 nt, Human
aauccuuucuuccuaaugccu

SEQ ID NO: 346797 - RNA, 23 nt, Human
aauuggacagcaaaacccagucc

SEQ ID NO: 346798 - RNA, 18 nt, Human
acacuagcugggugagau

SEQ ID NO: 346799 - RNA, 25 nt, Human
acagaauccccuuuuucccccaaaa

SEQ ID NO: 346800 - RNA, 19 nt, Human
acuacgacagcacccaggu

SEQ ID NO: 346801 - RNA, 21 nt, Human
agacaaaagcaaaucaacaua

SEQ ID NO: 346802 - RNA, 23 nt, Human
agcuuucuauguacacaguaaau

SEQ ID NO: 346803 - RNA, 18 nt, Human
aggaaauguacaaaauga

SEQ ID NO: 346804 - RNA, 20 nt, Human
aggcuggggccagcuuaguu

SEQ ID NO: 346805 - RNA, 19 nt, Human
aggggcagacuucucaaaa

SEQ ID NO: 346806 - RNA, 24 nt, Human
aggugguccgcugguccgcugggu

SEQ ID NO: 346807 - RNA, 25 nt, Human
aguaaauaguaaauaacuuugcuaa

SEQ ID NO: 346808 - RNA, 19 nt, Human
aguuuguugggaaugggaa

SEQ ID NO: 346809 - RNA, 20 nt, Human
aguuuuaaaacaagagguuu

SEQ ID NO: 346810 - RNA, 21 nt, Human
auaaugccaucuuuuauuuca

SEQ ID NO: 346811 - RNA, 19 nt, Human
auccagaauuguauaaagu

SEQ ID NO: 346812 - RNA, 24 nt, Human
caaaaaaauaucuagaggagcuaa

SEQ ID NO: 346813 - RNA, 22 nt, Human
caaagaacuuauucuugcguga

SEQ ID NO: 346814 - RNA, 19 nt, Human
caacuaacaacuaaauuuu

SEQ ID NO: 346815 - RNA, 19 nt, Human
cacacacuggaguaagggc

SEQ ID NO: 346816 - RNA, 24 nt, Human
caccacacauaauaaagcuuucua

SEQ ID NO: 346817 - RNA, 19 nt, Human
cacccaggugguccgcugg

SEQ ID NO: 346818 - RNA, 22 nt, Human
cacuccauaaguaggcuuccca

SEQ ID NO: 346819 - RNA, 20 nt, Human
cacuggaguaagggcagaac

SEQ ID NO: 346820 - RNA, 18 nt, Human
cagaaccuuagacucaug

SEQ ID NO: 346821 - RNA, 24 nt, Human
cagaauccccuuuuucccccaaaa

SEQ ID NO: 346822 - RNA, 18 nt, Human
cagacagugacgaugagc

SEQ ID NO: 346823 - RNA, 21 nt, Human
cagcacccaggugguccgcug

SEQ ID NO: 346824 - RNA, 20 nt, Human
cagcucuagggacucggccg

SEQ ID NO: 346825 - RNA, 24 nt, Human
cagggcgagauaaauuuauguacc

SEQ ID NO: 346826 - RNA, 19 nt, Human
caggugguccgcugguccg

SEQ ID NO: 346827 - RNA, 18 nt, Human
caguccauaagcccuucc

SEQ ID NO: 346828 - RNA, 18 nt, Human
cauaaguaggcuucccaa

SEQ ID NO: 346829 - RNA, 23 nt, Human
ccaaaaaaauaagaaaacaacua

SEQ ID NO: 346830 - RNA, 22 nt, Human
ccaaaagaucucaaguuucuga

SEQ ID NO: 346831 - RNA, 23 nt, Human
cccaaguccacuaccaauucacu

SEQ ID NO: 346832 - RNA, 18 nt, Human
cccgccccgccgcgccgg

SEQ ID NO: 346833 - RNA, 18 nt, Human
cccggccccgccuccccc

SEQ ID NO: 346834 - RNA, 24 nt, Human
cccugcgccggcccggccccgccu

SEQ ID NO: 346835 - RNA, 18 nt, Human
ccgaagcuacgggcgcug

SEQ ID NO: 346836 - RNA, 23 nt, Human
ccgccccgccgcgccgguccugc

SEQ ID NO: 346837 - RNA, 24 nt, Human
ccgccgaagcuacgggcgcugagg

SEQ ID NO: 346838 - RNA, 20 nt, Human
ccucggggcuccgccuaacu

SEQ ID NO: 346839 - RNA, 21 nt, Human
ccucuaaaaaaaaauacugua

SEQ ID NO: 346840 - RNA, 25 nt, Human
ccucuaaaaaaaaauacuguacaga

SEQ ID NO: 346841 - RNA, 29 nt, Human
cgcccccagcucuagggacucggccggcc

SEQ ID NO: 346842 - RNA, 20 nt, Human
cucccccgccucggggcucc

SEQ ID NO: 346843 - RNA, 23 nt, Human
cuccucaggccaccuccaacuac

SEQ ID NO: 346844 - RNA, 19 nt, Human
cucggccagcuuuuuccaa

SEQ ID NO: 346845 - RNA, 19 nt, Human
cucggccggccccgccccg

SEQ ID NO: 346846 - RNA, 20 nt, Human
cucggggcuccgccuaacuu

SEQ ID NO: 346847 - RNA, 23 nt, Human
cugagccucauucuuuccaucug

SEQ ID NO: 346848 - RNA, 18 nt, Human
cugcuccuuuugcauuca

SEQ ID NO: 346849 - RNA, 22 nt, Human
cugguccgcuggguccgccccg

SEQ ID NO: 346850 - RNA, 19 nt, Human
gaauauugugaccuuauuu

SEQ ID NO: 346851 - RNA, 18 nt, Human
gcauuaaaaauacaaaga

SEQ ID NO: 346852 - RNA, 20 nt, Human
gcgcugagggaacugagcuc

SEQ ID NO: 346853 - RNA, 23 nt, Human
gcuauuauaaauaagcuucacau

SEQ ID NO: 346854 - RNA, 22 nt, Human
ggaaauagacaaaagcaaauca

SEQ ID NO: 346855 - RNA, 22 nt, Human
gggaauucuaugacagugaugu

SEQ ID NO: 346856 - RNA, 23 nt, Human
gggaauucuaugacagugauguu

SEQ ID NO: 346857 - RNA, 25 nt, Human
gguaaaaaacaucuguguuaaguau

SEQ ID NO: 346858 - RNA, 21 nt, Human
uaaaaccauaaagaaacacag

SEQ ID NO: 346859 - RNA, 28 nt, Human
uaaaaccauaaagaaacacagccuaagu

SEQ ID NO: 346860 - RNA, 21 nt, Human
uaaacaagauuaagccccaaa

SEQ ID NO: 346861 - RNA, 22 nt, Human
uaaacacacucuuaauuuuuuu

SEQ ID NO: 346862 - RNA, 19 nt, Human
uaaagggaaauggugggaa

SEQ ID NO: 346863 - RNA, 24 nt, Human
uaaauacauguacuguaaaaaaga

SEQ ID NO: 346864 - RNA, 18 nt, Human
uaaauaucuuuaaacaua

SEQ ID NO: 346865 - RNA, 21 nt, Human
uaaaugguucucggccagcuu

SEQ ID NO: 346866 - RNA, 23 nt, Human
uaaaugguucucggccagcuuuu

SEQ ID NO: 346867 - RNA, 26 nt, Human
uaacagguaaaaaacaucuguguuaa

SEQ ID NO: 346868 - RNA, 18 nt, Human
uaacaguaguaguguugg

SEQ ID NO: 346869 - RNA, 24 nt, Human
uaacugacuugccaagggucacac

SEQ ID NO: 346870 - RNA, 18 nt, Human
uaacuucccugagccuca

SEQ ID NO: 346871 - RNA, 24 nt, Human
uaagccaaaaaaauaagaaaacaa

SEQ ID NO: 346872 - RNA, 20 nt, Human
uaagccccaaauugaaggga

SEQ ID NO: 346873 - RNA, 23 nt, Human
uaaguacaccgagguuuaccagu

SEQ ID NO: 346874 - RNA, 21 nt, Human
uacaaaaugaugaagauacca

SEQ ID NO: 346875 - RNA, 22 nt, Human
uacaaaaugaugaagauaccau

SEQ ID NO: 346876 - RNA, 23 nt, Human
uacaccgagguuuaccaagauua

SEQ ID NO: 346877 - RNA, 22 nt, Human
uaccauguucucccuuucucag

SEQ ID NO: 346878 - RNA, 20 nt, Human
uacuguaaaaaagagaaaac

SEQ ID NO: 346879 - RNA, 23 nt, Human
uagagaaaccuccuuuucccuca

SEQ ID NO: 346880 - RNA, 25 nt, Human
uauaaauaagcuucacauuaaggca

SEQ ID NO: 346881 - RNA, 23 nt, Human
uauaaauaucuuuaaacauauua

SEQ ID NO: 346882 - RNA, 23 nt, Human
uauaacagcucaagaguuuuaaa

SEQ ID NO: 346883 - RNA, 21 nt, Human
uauaauuggacagcaaaaccc

SEQ ID NO: 346884 - RNA, 18 nt, Human
uaucauguugcauaguca

SEQ ID NO: 346885 - RNA, 21 nt, Human
uaucuagaggagcuaauagcu

SEQ ID NO: 346886 - RNA, 23 nt, Human
uaugaaaaagauuuggauucaaa

SEQ ID NO: 346887 - RNA, 20 nt, Human
uauguacacaguaaauagua

SEQ ID NO: 346888 - RNA, 23 nt, Human
uauugcuauuauaaauaagcuuc

SEQ ID NO: 346889 - RNA, 19 nt, Human
ucaaagaacuuauucuugc

SEQ ID NO: 346890 - RNA, 20 nt, Human
ucaggcuaccucuugauacu

SEQ ID NO: 346891 - RNA, 18 nt, Human
ucaugucugaccccucgc

SEQ ID NO: 346892 - RNA, 21 nt, Human
uccauaaguaggcuucccaaa

SEQ ID NO: 346893 - RNA, 23 nt, Human
uccauaaguaggcuucccaaagc

SEQ ID NO: 346894 - RNA, 23 nt, Human
ucccaaguccacuaccaauucac

SEQ ID NO: 346895 - RNA, 22 nt, Human
uccccuuuuucccccaaaaaaa

SEQ ID NO: 346896 - RNA, 20 nt, Human
ucccugcgccggcccggccc

SEQ ID NO: 346897 - RNA, 23 nt, Human
ucccugcgccggcccggccccgc

SEQ ID NO: 346898 - RNA, 22 nt, Human
uccgcuggguccgccccgcccc

SEQ ID NO: 346899 - RNA, 18 nt, Human
uccucaggccaccuccaa

SEQ ID NO: 346900 - RNA, 23 nt, Human
ucggccagcuuuuuccaaucuuu

SEQ ID NO: 346901 - RNA, 19 nt, Human
ucgggaauaugagauucuc

SEQ ID NO: 346902 - RNA, 20 nt, Human
ucuaaacauuccagagcuaa

SEQ ID NO: 346903 - RNA, 22 nt, Human
ucuagagaaaccuccuuuuccc

SEQ ID NO: 346904 - RNA, 24 nt, Human
ucucgccuguccauugagugacuc

SEQ ID NO: 346905 - RNA, 18 nt, Human
ucucuccagccuuccauc

SEQ ID NO: 346906 - RNA, 20 nt, Human
ucugacaguguaucuaacaa

SEQ ID NO: 346907 - RNA, 20 nt, Human
ucuguacaugcaggcuuggc

SEQ ID NO: 346908 - RNA, 24 nt, Human
ucuucuagagaaaccuccuuuucc

SEQ ID NO: 346909 - RNA, 19 nt, Human
ucuucucaaguccuuccug

SEQ ID NO: 346910 - RNA, 21 nt, Human
ugaaaacacaguuguaaaaca

SEQ ID NO: 346911 - RNA, 20 nt, Human
ugaccccucgccccaugcuc

SEQ ID NO: 346912 - RNA, 25 nt, Human
ugacgaugagcagaucuuggccaag

SEQ ID NO: 346913 - RNA, 23 nt, Human
ugagaauuauguucuuuuuaagg

SEQ ID NO: 346914 - RNA, 24 nt, Human
ugagcaaacccccaguccuuuaaa

SEQ ID NO: 346915 - RNA, 25 nt, Human
ugaggaaauagacaaaagcaaauca

SEQ ID NO: 346916 - RNA, 26 nt, Human
ugaggaaauagacaaaagcaaaucaa

SEQ ID NO: 346917 - RNA, 21 nt, Human
ugcaaagagaaaaucucuaag

SEQ ID NO: 346918 - RNA, 23 nt, Human
ugcaaucuaucauagaacugcaa

SEQ ID NO: 346919 - RNA, 22 nt, Human
ugccaagggucacacacuggag

SEQ ID NO: 346920 - RNA, 19 nt, Human
uggaaagaauggagccaaa

SEQ ID NO: 346921 - RNA, 18 nt, Human
uggcaaacugaagcaaug

SEQ ID NO: 346922 - RNA, 18 nt, Human
ugggaaugggaaacaacu

SEQ ID NO: 346923 - RNA, 24 nt, Human
ugggaaugggaaacaacugcuuga

SEQ ID NO: 346924 - RNA, 18 nt, Human
ugguccgcugguccgcug

SEQ ID NO: 346925 - RNA, 20 nt, Human
uguaaaaaagagaaaacagu

SEQ ID NO: 346926 - RNA, 24 nt, Human
uguacaaaaugaugaagauaccau

SEQ ID NO: 346927 - RNA, 25 nt, Human
uguauuaauaucaagacaaggcugg

SEQ ID NO: 346928 - RNA, 22 nt, Human
ugucuaaaagcaauggaucaaa

SEQ ID NO: 346929 - RNA, 20 nt, Human
uguuauggaaagaauggagc

SEQ ID NO: 346930 - RNA, 27 nt, Human
uuaaaaccauaaagaaacacagccuaa

SEQ ID NO: 346931 - RNA, 19 nt, Human
uuaauaucaagacaaggcu

SEQ ID NO: 346932 - RNA, 21 nt, Human
uucaacauacuaagccaaaaa

SEQ ID NO: 346933 - RNA, 22 nt, Human
uucauucugaugucauuacaga

SEQ ID NO: 346934 - RNA, 24 nt, Human
uuccccuaagcauuaaaaauacaa

SEQ ID NO: 346935 - RNA, 21 nt, Human
uuccuuuugagcaaaccccca

SEQ ID NO: 346936 - RNA, 19 nt, Human
uuuuaaggaaaugagagua

SEQ ID NO: 346937 - RNA, 26 nt, Human
aaagggggccagucgcuuaggagacu

SEQ ID NO: 346938 - RNA, 18 nt, Human
aagcucgagagagagcag

SEQ ID NO: 346939 - RNA, 20 nt, Human
aagguggggcccauggaugg

SEQ ID NO: 346940 - RNA, 20 nt, Human
agagggcaggcccgaggcaa

SEQ ID NO: 346941 - RNA, 19 nt, Human
aggucccugauugucccag

SEQ ID NO: 346942 - RNA, 24 nt, Human
agguggcgggcgcgcgagcggcuc

SEQ ID NO: 346943 - RNA, 20 nt, Human
agguucaaaagggggccagu

SEQ ID NO: 346944 - RNA, 20 nt, Human
auggagcuugggaccugguu

SEQ ID NO: 346945 - RNA, 28 nt, Human
caagguggggcccauggauggcacuguc

SEQ ID NO: 346946 - RNA, 18 nt, Human
caauccaggucccugauu

SEQ ID NO: 346947 - RNA, 22 nt, Human
caauccaggucccugauugucc

SEQ ID NO: 346948 - RNA, 20 nt, Human
cagacaccgccuccgccccg

SEQ ID NO: 346949 - RNA, 18 nt, Human
caggcccgaggcaggagg

SEQ ID NO: 346950 - RNA, 21 nt, Human
cagggcggagacuucccuguc

SEQ ID NO: 346951 - RNA, 23 nt, Human
ccaggccgugcgccccgcgcgcc

SEQ ID NO: 346952 - RNA, 19 nt, Human
ccagugaagcuccaggagc

SEQ ID NO: 346953 - RNA, 21 nt, Human
cccagugaaguugggcgaucc

SEQ ID NO: 346954 - RNA, 18 nt, Human
ccccgcgcgcccugcccg

SEQ ID NO: 346955 - RNA, 18 nt, Human
ccccgcgcuggaaagccu

SEQ ID NO: 346956 - RNA, 25 nt, Human
cccgcgcgcccugcccggugcgcca

SEQ ID NO: 346957 - RNA, 25 nt, Human
cccgcgcgcccugcccggugcgcca

SEQ ID NO: 346958 - RNA, 26 nt, Human
cccgcgcgcccugcccggugcgccac

SEQ ID NO: 346959 - RNA, 25 nt, Human
ccguccaauccaggucccugauugu

SEQ ID NO: 346960 - RNA, 23 nt, Human
cgccuccgccccgcagcgccaac

SEQ ID NO: 346961 - RNA, 21 nt, Human
cggagcaccgagaccggagag

SEQ ID NO: 346962 - RNA, 20 nt, Human
cggccccgucgcgcuucucg

SEQ ID NO: 346963 - RNA, 21 nt, Human
cggccggcgcugccgcucccc

SEQ ID NO: 346964 - RNA, 19 nt, Human
cugguuggguccaaugagg

SEQ ID NO: 346965 - RNA, 21 nt, Human
gaagcuccaggagcaggcugc

SEQ ID NO: 346966 - RNA, 20 nt, Human
gagcaggcugcguguuucca

SEQ ID NO: 346967 - RNA, 21 nt, Human
gagcuggcggcgggagggcag

SEQ ID NO: 346968 - RNA, 22 nt, Human
gcaggagcuggcggcgggaggg

SEQ ID NO: 346969 - RNA, 21 nt, Human
gccaaguccuuuccauccaau

SEQ ID NO: 346970 - RNA, 26 nt, Human
gcgcccccaggccgugcgccccgcgc

SEQ ID NO: 346971 - RNA, 21 nt, Human
gcgcucagacaccgccuccgc

SEQ ID NO: 346972 - RNA, 19 nt, Human
gcgcugccgcuccccgcgc

SEQ ID NO: 346973 - RNA, 21 nt, Human
ggugccgaagcucgagagaga

SEQ ID NO: 346974 - RNA, 18 nt, Human
gugaagcuccaggagcag

SEQ ID NO: 346975 - RNA, 18 nt, Human
uccaauccaggucccuga

SEQ ID NO: 346976 - RNA, 22 nt, Human
uccccgcgcuggaaagccucau

SEQ ID NO: 346977 - RNA, 21 nt, Human
uccucauccaaucagggcgga

SEQ ID NO: 346978 - RNA, 23 nt, Human
ugaagcuccaggagcaggcugcg

SEQ ID NO: 346979 - RNA, 18 nt, Human
uggcauaaagaauauguc

SEQ ID NO: 346980 - RNA, 24 nt, Human
uggcggcgggagggcagacagaca

SEQ ID NO: 346981 - RNA, 18 nt, Human
uucaaaagggggccaguc

SEQ ID NO: 346982 - RNA, 28 nt, Human
uucccuuuuauuaucccgugguaggugg

SEQ ID NO: 346983 - RNA, 19 nt, Human
uucucgucgccccucggag

SEQ ID NO: 346984 - RNA, 18 nt, Human
aaaaacaguaaaaaaacc

SEQ ID NO: 346985 - RNA, 18 nt, Human
aaaaauuggagaaaauuc

SEQ ID NO: 346986 - RNA, 20 nt, Human
aaacaaaacaccacaguaga

SEQ ID NO: 346987 - RNA, 18 nt, Human
aaagagcucagauauuuc

SEQ ID NO: 346988 - RNA, 23 nt, Human
aaaggcauauauacaauuauaga

SEQ ID NO: 346989 - RNA, 19 nt, Human
aaaucuccucggacgccgc

SEQ ID NO: 346990 - RNA, 23 nt, Human
agaaggaaaaaaaaauuggagaa

SEQ ID NO: 346991 - RNA, 20 nt, Human
agaugaaaaugcaaaauggc

SEQ ID NO: 346992 - RNA, 22 nt, Human
aggaaaaaaaaauuggagaaaa

SEQ ID NO: 346993 - RNA, 22 nt, Human
agguauugugaggguagggguu

SEQ ID NO: 346994 - RNA, 20 nt, Human
aguaaaaaaacuugugaagg

SEQ ID NO: 346995 - RNA, 22 nt, Human
aguaaaaaaacuugugaaggga

SEQ ID NO: 346996 - RNA, 19 nt, Human
aucuccucggacgccgccg

SEQ ID NO: 346997 - RNA, 26 nt, Human
caaaacaccacaguagauuaaguggg

SEQ ID NO: 346998 - RNA, 21 nt, Human
caaaacuaauaaacaaaacac

SEQ ID NO: 346999 - RNA, 21 nt, Human
cacacacaaugcugguguuac

SEQ ID NO: 347000 - RNA, 18 nt, Human
cagcaguuuggggcuugc

SEQ ID NO: 347001 - RNA, 22 nt, Human
cagcaguuuggggcuugccccu

SEQ ID NO: 347002 - RNA, 22 nt, Human
cagucucuggauuaaaucuccu

SEQ ID NO: 347003 - RNA, 21 nt, Human
cagugucaaagcuuaaccaaa

SEQ ID NO: 347004 - RNA, 23 nt, Human
ccuguugccacuaucuuucccca

SEQ ID NO: 347005 - RNA, 18 nt, Human
cggggagacuaaagggca

SEQ ID NO: 347006 - RNA, 25 nt, Human
cuaaugaucauuuuaaguguuuucu

SEQ ID NO: 347007 - RNA, 20 nt, Human
cuccuuugccuguugccacu

SEQ ID NO: 347008 - RNA, 20 nt, Human
gagaaggaaaaaaaaauugg

SEQ ID NO: 347009 - RNA, 23 nt, Human
gcauggaagauacauuuuaugac

SEQ ID NO: 347010 - RNA, 21 nt, Human
gccuggaaauaucuuaggugc

SEQ ID NO: 347011 - RNA, 21 nt, Human
ggggggccaauaaauguaaug

SEQ ID NO: 347012 - RNA, 18 nt, Human
ggugaagaaauaaaagga

SEQ ID NO: 347013 - RNA, 20 nt, Human
uaaaaggaaaacaaacaaau

SEQ ID NO: 347014 - RNA, 28 nt, Human
uaaaauguccccacagcaguuuggggcu

SEQ ID NO: 347015 - RNA, 23 nt, Human
uaaauagauucaaacuggucgau

SEQ ID NO: 347016 - RNA, 24 nt, Human
uaaccaaaaaaucuaaauauacaa

SEQ ID NO: 347017 - RNA, 20 nt, Human
uacaauauauagaagcugaa

SEQ ID NO: 347018 - RNA, 23 nt, Human
uaccugccagagaaggaaaaaaa

SEQ ID NO: 347019 - RNA, 25 nt, Human
uaccugccagagaaggaaaaaaaaa

SEQ ID NO: 347020 - RNA, 23 nt, Human
uagaugaaaaugcaaaauggcac

SEQ ID NO: 347021 - RNA, 19 nt, Human
uagauuauaaaaugucccc

SEQ ID NO: 347022 - RNA, 26 nt, Human
uauaaccaaaaauuucaacugguacc

SEQ ID NO: 347023 - RNA, 18 nt, Human
uauguuuuuuucccaaaa

SEQ ID NO: 347024 - RNA, 18 nt, Human
ucaggugcuuugaggucc

SEQ ID NO: 347025 - RNA, 23 nt, Human
ucauacggggagacuaaagggca

SEQ ID NO: 347026 - RNA, 26 nt, Human
uccccacagcaguuuggggcuugccc

SEQ ID NO: 347027 - RNA, 21 nt, Human
uccuuugccuguugccacuau

SEQ ID NO: 347028 - RNA, 23 nt, Human
ucgaggugaaaacucaccuacua

SEQ ID NO: 347029 - RNA, 22 nt, Human
ucuaaaaacaguaaaaaaacuu

SEQ ID NO: 347030 - RNA, 21 nt, Human
ucuccucggacgccgccgccu

SEQ ID NO: 347031 - RNA, 18 nt, Human
ucugcacacacaaugcug

SEQ ID NO: 347032 - RNA, 22 nt, Human
ucuuuuucaaaaagguaaaugu

SEQ ID NO: 347033 - RNA, 22 nt, Human
ugaagaaauaaaaggaaaacaa

SEQ ID NO: 347034 - RNA, 23 nt, Human
ugaagaaauaaaaggaaaacaaa

SEQ ID NO: 347035 - RNA, 19 nt, Human
ugagguccuucauuuucuu

SEQ ID NO: 347036 - RNA, 23 nt, Human
ugcaaaauggcacauuuuuucaa

SEQ ID NO: 347037 - RNA, 20 nt, Human
ugcacacacaaugcuggugu

SEQ ID NO: 347038 - RNA, 22 nt, Human
ugcacacacaaugcugguguua

SEQ ID NO: 347039 - RNA, 24 nt, Human
ugccacuaucuuuccccaaccauu

SEQ ID NO: 347040 - RNA, 20 nt, Human
uggauuaaaucuccucggag

SEQ ID NO: 347041 - RNA, 22 nt, Human
uguuauguccuaaugaucauuu

SEQ ID NO: 347042 - RNA, 22 nt, Human
uuaagugggugcagcauauaga

SEQ ID NO: 347043 - RNA, 19 nt, Human
uuagguguuuuauacuggc

SEQ ID NO: 347044 - RNA, 22 nt, Human
uucaaaaagguaaauguccaaa

SEQ ID NO: 347045 - RNA, 19 nt, Human
uuguguauguuuuuuuccc

SEQ ID NO: 347046 - RNA, 20 nt, Human
uuuacauaucuagaagacau

SEQ ID NO: 347047 - RNA, 25 nt, Human
uuuauaaucacaccuaaguauuauc

SEQ ID NO: 347048 - RNA, 23 nt, Human
uuuauuuaaaucuggugaagaaa

SEQ ID NO: 347049 - RNA, 20 nt, Human
aaagaaacaaauggaaaugg

SEQ ID NO: 347050 - RNA, 20 nt, Human
aaagagagugaaaagaaaaa

SEQ ID NO: 347051 - RNA, 22 nt, Human
aagcauuagaaagagagugaaa

SEQ ID NO: 347052 - RNA, 21 nt, Human
acagggcaagagagaaugaag

SEQ ID NO: 347053 - RNA, 22 nt, Human
acagggcaagagagaaugaagu

SEQ ID NO: 347054 - RNA, 18 nt, Human
acuguucuuuuauucuga

SEQ ID NO: 347055 - RNA, 23 nt, Human
agaaagagagugaaaagaaaaau

SEQ ID NO: 347056 - RNA, 18 nt, Human
agagacagggcaagagag

SEQ ID NO: 347057 - RNA, 18 nt, Human
agagagaaggugcuggaa

SEQ ID NO: 347058 - RNA, 18 nt, Human
agagagaaggugcuggaa

SEQ ID NO: 347059 - RNA, 20 nt, Human
agagagaaugaaguguugga

SEQ ID NO: 347060 - RNA, 19 nt, Human
agagugaaaaguguuaaca

SEQ ID NO: 347061 - RNA, 21 nt, Human
aggugcuggaaggccagccuc

SEQ ID NO: 347062 - RNA, 26 nt, Human
agugaaaagaaaaauaaaaaaggccu

SEQ ID NO: 347063 - RNA, 24 nt, Human
auaaaaaaggccucacacgcagca

SEQ ID NO: 347064 - RNA, 18 nt, Human
auaaagcaaaauaaugag

SEQ ID NO: 347065 - RNA, 19 nt, Human
auaauaagcaaccuuguga

SEQ ID NO: 347066 - RNA, 24 nt, Human
caaacucaagauuuuauuaaaauc

SEQ ID NO: 347067 - RNA, 27 nt, Human
cacuauggaauucgcaguugaauaaga

SEQ ID NO: 347068 - RNA, 19 nt, Human
cagggcaagagagaaugaa

SEQ ID NO: 347069 - RNA, 23 nt, Human
gagaaugaaguguuggagagaga

SEQ ID NO: 347070 - RNA, 19 nt, Human
gagagaaugaaguguugga

SEQ ID NO: 347071 - RNA, 18 nt, Human
gugaaucaacagaaagag

SEQ ID NO: 347072 - RNA, 21 nt, Human
uaaaaaaggccucacacgcag

SEQ ID NO: 347073 - RNA, 22 nt, Human
uauggaauucgcaguugaauaa

SEQ ID NO: 347074 - RNA, 23 nt, Human
uauucuuuugauaauaagcaacc

SEQ ID NO: 347075 - RNA, 21 nt, Human
ucaagaaaagccagagcccac

SEQ ID NO: 347076 - RNA, 22 nt, Human
ucgguggugaaggaagacuuuu

SEQ ID NO: 347077 - RNA, 28 nt, Human
ugaaaagaaaaauaaaaaaggccucacu

SEQ ID NO: 347078 - RNA, 21 nt, Human
ugaaucaacagaaagagugaa

SEQ ID NO: 347079 - RNA, 24 nt, Human
ugaaucaacagaaagagugaaaag

SEQ ID NO: 347080 - RNA, 19 nt, Human
ugagagacagggcaagaga

SEQ ID NO: 347081 - RNA, 20 nt, Human
ugaguuaggugaaucaacaa

SEQ ID NO: 347082 - RNA, 20 nt, Human
uggaaaugguuuaaagaccu

SEQ ID NO: 347083 - RNA, 22 nt, Human
uggagagagaaggugcuggaag

SEQ ID NO: 347084 - RNA, 21 nt, Human
uguuggagagagaaggugcug

SEQ ID NO: 347085 - RNA, 23 nt, Human
uuugagagacagggcaagagaga

SEQ ID NO: 347086 - RNA, 21 nt, Human
aaaugaagcucugcagaaacc

SEQ ID NO: 347087 - RNA, 23 nt, Human
aacuacagaggccuuuccaaaug

SEQ ID NO: 347088 - RNA, 21 nt, Human
augaagcucugcagaaaccac

SEQ ID NO: 347089 - RNA, 21 nt, Human
caacuacagaggccuuuccaa

SEQ ID NO: 347090 - RNA, 18 nt, Human
cacauuuauucacucaca

SEQ ID NO: 347091 - RNA, 24 nt, Human
cagaggccuuuccaaaugaagcuc

SEQ ID NO: 347092 - RNA, 23 nt, Human
ccuuuccaaaugaagcucugcag

SEQ ID NO: 347093 - RNA, 24 nt, Human
cucugcagaaaccacucacugccu

SEQ ID NO: 347094 - RNA, 24 nt, Human
cugcagaaaccacucacugccucc

SEQ ID NO: 347095 - RNA, 21 nt, Human
cugccuccgcagcccuuucug

SEQ ID NO: 347096 - RNA, 19 nt, Human
gccuccgcagcccuuucug

SEQ ID NO: 347097 - RNA, 22 nt, Human
ggccaaccuauucaguugccag

SEQ ID NO: 347098 - RNA, 22 nt, Human
uccaaaugaagcucugcagaaa

SEQ ID NO: 347099 - RNA, 18 nt, Human
uccagcagcguccgcggc

SEQ ID NO: 347100 - RNA, 24 nt, Human
uccaguagcccgcgccacuggcca

SEQ ID NO: 347101 - RNA, 18 nt, Human
uccccaacuacagaggcc

SEQ ID NO: 347102 - RNA, 22 nt, Human
ucugcagaaaccacucacugcc

SEQ ID NO: 347103 - RNA, 23 nt, Human
uugccaggcgacuccagcagcgu

SEQ ID NO: 347104 - RNA, 24 nt, Human
uuuuuuuuuuuuuaaagagacuua

SEQ ID NO: 347105 - RNA, 19 nt, Human
uuuuuuuuuuuuuuuuuaa

SEQ ID NO: 347106 - RNA, 20 nt, Human
aagcugcccuuaucccucug

SEQ ID NO: 347107 - RNA, 20 nt, Human
accauggcaaccacaauuua

SEQ ID NO: 347108 - RNA, 24 nt, Human
agacagcgccguauccagagccca

SEQ ID NO: 347109 - RNA, 25 nt, Human
agacuggccaacuugcuauagacag

SEQ ID NO: 347110 - RNA, 18 nt, Human
agaggaacaggaggccag

SEQ ID NO: 347111 - RNA, 19 nt, Human
aggggcuucugcccacccc

SEQ ID NO: 347112 - RNA, 24 nt, Human
agguggccagcucuugggcagagg

SEQ ID NO: 347113 - RNA, 26 nt, Human
agucuuuaaagagguggccagcucuu

SEQ ID NO: 347114 - RNA, 23 nt, Human
auagacagcgccguauccagagc

SEQ ID NO: 347115 - RNA, 19 nt, Human
cagcgagccccaggaauga

SEQ ID NO: 347116 - RNA, 25 nt, Human
cauuuucucuucugggcagauccua

SEQ ID NO: 347117 - RNA, 21 nt, Human
ccaguuuucuuccaggaaggg

SEQ ID NO: 347118 - RNA, 20 nt, Human
cccccggugcccuuucccuu

SEQ ID NO: 347119 - RNA, 18 nt, Human
ccuccagaggggggacag

SEQ ID NO: 347120 - RNA, 19 nt, Human
ccuccagaggggggacaga

SEQ ID NO: 347121 - RNA, 25 nt, Human
cgccguauccagagcccaacugcgc

SEQ ID NO: 347122 - RNA, 23 nt, Human
gguuccaguuuucuuccaggaag

SEQ ID NO: 347123 - RNA, 18 nt, Human
guaccauggcaaccacaa

SEQ ID NO: 347124 - RNA, 18 nt, Human
gucccagcgagccccagg

SEQ ID NO: 347125 - RNA, 18 nt, Human
uaccacacugucccacag

SEQ ID NO: 347126 - RNA, 21 nt, Human
uaccauggcaaccacaauuua

SEQ ID NO: 347127 - RNA, 21 nt, Human
uagguaccacacugucccaca

SEQ ID NO: 347128 - RNA, 20 nt, Human
ucgguaccauggcaaccaca

SEQ ID NO: 347129 - RNA, 24 nt, Human
uggccaacuugcuauagacagcgc

SEQ ID NO: 347130 - RNA, 25 nt, Human
uuuuuugcuguuaaauaacuuuaau

SEQ ID NO: 347131 - RNA, 20 nt, Human
uuuuuuuuuuuuuuugcugu

SEQ ID NO: 347132 - RNA, 23 nt, Human
uuuuuuuuuuuuuuugcuguuaa

SEQ ID NO: 347133 - RNA, 18 nt, Human
aacacaaaauuaaaaacc

SEQ ID NO: 347134 - RNA, 26 nt, Human
aagaacaccgaagagggaaagauaac

SEQ ID NO: 347135 - RNA, 23 nt, Human
aagagaagaagaacaccgaagag

SEQ ID NO: 347136 - RNA, 21 nt, Human
aaucagcccaccaaucccaua

SEQ ID NO: 347137 - RNA, 19 nt, Human
acauuccuguuugugucca

SEQ ID NO: 347138 - RNA, 22 nt, Human
agagaagaagaacaccgaagag

SEQ ID NO: 347139 - RNA, 24 nt, Human
agagaagaagaacaccgaagaggg

SEQ ID NO: 347140 - RNA, 26 nt, Human
agagaagagaagaagaacaccgaaga

SEQ ID NO: 347141 - RNA, 27 nt, Human
agcuacagaagcauugcagagaagaga

SEQ ID NO: 347142 - RNA, 18 nt, Human
aggaaaggccuagccacg

SEQ ID NO: 347143 - RNA, 18 nt, Human
aguaaugaguaagaagag

SEQ ID NO: 347144 - RNA, 22 nt, Human
caacccaaggacauauaagcga

SEQ ID NO: 347145 - RNA, 19 nt, Human
caagugacucaaauauccu

SEQ ID NO: 347146 - RNA, 22 nt, Human
cacuccagacauuccuguuugu

SEQ ID NO: 347147 - RNA, 23 nt, Human
ccauacauguaaaucagcccacc

SEQ ID NO: 347148 - RNA, 23 nt, Human
cggcgcggcgacggcggcuuggc

SEQ ID NO: 347149 - RNA, 20 nt, Human
cggcuuggcugggcagaggc

SEQ ID NO: 347150 - RNA, 22 nt, Human
cucccugcugcuguccccggag

SEQ ID NO: 347151 - RNA, 19 nt, Human
gaagaacaccgaagaggga

SEQ ID NO: 347152 - RNA, 23 nt, Human
gaagagaagaagaacaccgaaga

SEQ ID NO: 347153 - RNA, 22 nt, Human
gaagcuacagaagcauugcaga

SEQ ID NO: 347154 - RNA, 22 nt, Human
gcaaauauccagaguccguaau

SEQ ID NO: 347155 - RNA, 18 nt, Human
gcagagaagagaagaaga

SEQ ID NO: 347156 - RNA, 22 nt, Human
gcagaggcucgguggcugcgcg

SEQ ID NO: 347157 - RNA, 20 nt, Human
ggggaacauuagaagcuaca

SEQ ID NO: 347158 - RNA, 24 nt, Human
gguacuggagggaggggggaaaga

SEQ ID NO: 347159 - RNA, 23 nt, Human
guggcugcgcgggcgcucccugc

SEQ ID NO: 347160 - RNA, 22 nt, Human
guguguuggaaaaaugcuaaaa

SEQ ID NO: 347161 - RNA, 21 nt, Human
uaagaagagagcuguuaccac

SEQ ID NO: 347162 - RNA, 18 nt, Human
uacaacaaaaguacugca

SEQ ID NO: 347163 - RNA, 24 nt, Human
uacaaggaacagccuaaaaacagc

SEQ ID NO: 347164 - RNA, 23 nt, Human
uaucaaguacauaagugcaaaua

SEQ ID NO: 347165 - RNA, 18 nt, Human
uauccuaagaguacaagg

SEQ ID NO: 347166 - RNA, 24 nt, Human
uccguaauugaauccauuaggaac

SEQ ID NO: 347167 - RNA, 20 nt, Human
ucucuauacuuuagugguug

SEQ ID NO: 347168 - RNA, 18 nt, Human
ugacacaagugacucaaa

SEQ ID NO: 347169 - RNA, 21 nt, Human
uggagggaggggggaaagaca

SEQ ID NO: 347170 - RNA, 22 nt, Human
ugggcagaggcucgguggcugc

SEQ ID NO: 347171 - RNA, 23 nt, Human
ugggcucucaccaucaugcacuu

SEQ ID NO: 347172 - RNA, 21 nt, Human
uuaaaaaccacaucuaauaca

SEQ ID NO: 347173 - RNA, 19 nt, Human
uuagaagcuacagaagcau

SEQ ID NO: 347174 - RNA, 21 nt, Human
uugcagagaagagaagaagaa

SEQ ID NO: 347175 - RNA, 22 nt, Human
uuuagugguugacacaagugac

SEQ ID NO: 347176 - RNA, 22 nt, Human
aaggugccucgucuuuccugga

SEQ ID NO: 347177 - RNA, 22 nt, Human
accaacgccucacggcgccucc

SEQ ID NO: 347178 - RNA, 21 nt, Human
aggccccgcggccaagacccu

SEQ ID NO: 347179 - RNA, 26 nt, Human
aggggggugggugggaacggacaaga

SEQ ID NO: 347180 - RNA, 19 nt, Human
caagagauggagggggcca

SEQ ID NO: 347181 - RNA, 18 nt, Human
cccaccgggaaaaggcuc

SEQ ID NO: 347182 - RNA, 20 nt, Human
cccagcaggccccgcggcca

SEQ ID NO: 347183 - RNA, 19 nt, Human
cccaugcaaagccccggcg

SEQ ID NO: 347184 - RNA, 22 nt, Human
cccugggccccaugcaaagccc

SEQ ID NO: 347185 - RNA, 23 nt, Human
cccugggccccaugcaaagcccc

SEQ ID NO: 347186 - RNA, 20 nt, Human
cccugucuaggcaacuacaa

SEQ ID NO: 347187 - RNA, 20 nt, Human
ccgcgcccacgacgccgcug

SEQ ID NO: 347188 - RNA, 19 nt, Human
ccggcugugccgcccuggg

SEQ ID NO: 347189 - RNA, 21 nt, Human
ccggcugugccgcccugggcc

SEQ ID NO: 347190 - RNA, 23 nt, Human
ccucgggccugcaucgggacccc

SEQ ID NO: 347191 - RNA, 23 nt, Human
ccucuugggaaauguaguccugg

SEQ ID NO: 347192 - RNA, 21 nt, Human
cgcccacgacgccgcugccau

SEQ ID NO: 347193 - RNA, 19 nt, Human
cgggacccccgcccacucc

SEQ ID NO: 347194 - RNA, 22 nt, Human
cgggccugcaucgggacccccg

SEQ ID NO: 347195 - RNA, 23 nt, Human
cguccugcgggcagagacaccgu

SEQ ID NO: 347196 - RNA, 20 nt, Human
cucgccgccuccuccucccg

SEQ ID NO: 347197 - RNA, 20 nt, Human
cugcaucgggacccccgccc

SEQ ID NO: 347198 - RNA, 23 nt, Human
cuggagcagagccucuugggaaa

SEQ ID NO: 347199 - RNA, 24 nt, Human
cugggccccaugcaaagccccggc

SEQ ID NO: 347200 - RNA, 20 nt, Human
gaacggacaagagauggagg

SEQ ID NO: 347201 - RNA, 24 nt, Human
gacaagagauggagggggccagag

SEQ ID NO: 347202 - RNA, 22 nt, Human
gagggggccagagggcugcggg

SEQ ID NO: 347203 - RNA, 19 nt, Human
gaggggggugggugggaac

SEQ ID NO: 347204 - RNA, 20 nt, Human
gcugcgggggcugggggcag

SEQ ID NO: 347205 - RNA, 18 nt, Human
ggagggggguggguggga

SEQ ID NO: 347206 - RNA, 21 nt, Human
ggccccaugcaaagccccggc

SEQ ID NO: 347207 - RNA, 22 nt, Human
ggccugcaucgggacccccgcc

SEQ ID NO: 347208 - RNA, 21 nt, Human
ggcugggggcaggcguccugc

SEQ ID NO: 347209 - RNA, 18 nt, Human
ggcugugccgcccugggc

SEQ ID NO: 347210 - RNA, 24 nt, Human
gggaacggacaagagauggagggg

SEQ ID NO: 347211 - RNA, 25 nt, Human
gggcugggggcaggcguccugcggg

SEQ ID NO: 347212 - RNA, 18 nt, Human
gugccgcccugggcccgg

SEQ ID NO: 347213 - RNA, 18 nt, Human
ucuugggaaauguagucc

SEQ ID NO: 347214 - RNA, 21 nt, Human
ugcaucgggacccccgcccac

SEQ ID NO: 347215 - RNA, 18 nt, Human
ugcgggggcugggggcag

SEQ ID NO: 347216 - RNA, 21 nt, Human
uggacuccuggagcagagccu

SEQ ID NO: 347217 - RNA, 27 nt, Human
uggagggggccagagggcugcgggggg

SEQ ID NO: 347218 - RNA, 19 nt, Human
ugggccccaugcaaagccc

SEQ ID NO: 347219 - RNA, 21 nt, Human
uggugcccugucuaggcaacu

SEQ ID NO: 347220 - RNA, 18 nt, Human
uuggggcuaguagcaucc

SEQ ID NO: 347221 - RNA, 18 nt, Human
aaaaaaaaagcuuggaau

SEQ ID NO: 347222 - RNA, 21 nt, Human
aaaagaaaagaacuggaugug

SEQ ID NO: 347223 - RNA, 23 nt, Human
aaagaaaagaacuggauguggca

SEQ ID NO: 347224 - RNA, 19 nt, Human
aacuguugcauuucugguu

SEQ ID NO: 347225 - RNA, 18 nt, Human
aaggacccagagguguuc

SEQ ID NO: 347226 - RNA, 19 nt, Human
aaggaugggagaaaacacc

SEQ ID NO: 347227 - RNA, 18 nt, Human
aagguccuuuggagggga

SEQ ID NO: 347228 - RNA, 18 nt, Human
acaaaagaaaagaacugg

SEQ ID NO: 347229 - RNA, 23 nt, Human
acagcagcaacaaaagaaaagaa

SEQ ID NO: 347230 - RNA, 24 nt, Human
acagcagcaacaaaagaaaagaac

SEQ ID NO: 347231 - RNA, 20 nt, Human
acgaguucucaaacuaaugc

SEQ ID NO: 347232 - RNA, 25 nt, Human
agcuacagguaaaggcucuaccacc

SEQ ID NO: 347233 - RNA, 18 nt, Human
agcugaguaagacuagug

SEQ ID NO: 347234 - RNA, 21 nt, Human
agggaggaaagcacauucggg

SEQ ID NO: 347235 - RNA, 22 nt, Human
aggugggcaggggagagggagg

SEQ ID NO: 347236 - RNA, 20 nt, Human
aguggcagagggagugaccg

SEQ ID NO: 347237 - RNA, 18 nt, Human
auaacugaggagcccaca

SEQ ID NO: 347238 - RNA, 20 nt, Human
aucaagaaaaaaaggcuuuc

SEQ ID NO: 347239 - RNA, 21 nt, Human
augcaggcucaagcugacacu

SEQ ID NO: 347240 - RNA, 21 nt, Human
augguguuuuaguaacuguug

SEQ ID NO: 347241 - RNA, 19 nt, Human
caagucccuuuacuccgcc

SEQ ID NO: 347242 - RNA, 23 nt, Human
caauaacugaggagcccacaugc

SEQ ID NO: 347243 - RNA, 19 nt, Human
cacacaguuucauuaguaa

SEQ ID NO: 347244 - RNA, 23 nt, Human
cacagcagcaacaaaagaaaaga

SEQ ID NO: 347245 - RNA, 19 nt, Human
caccgcagcaugccugcug

SEQ ID NO: 347246 - RNA, 22 nt, Human
cagauggcauucuuggaaucag

SEQ ID NO: 347247 - RNA, 18 nt, Human
cagcagcaacaaaagaaa

SEQ ID NO: 347248 - RNA, 23 nt, Human
caggaauuaucacuaucaccuau

SEQ ID NO: 347249 - RNA, 19 nt, Human
ccgccaccgcagcaugccu

SEQ ID NO: 347250 - RNA, 19 nt, Human
ccuccaaucuuuccccuuu

SEQ ID NO: 347251 - RNA, 22 nt, Human
ccuuccacuacuuuuugcagcu

SEQ ID NO: 347252 - RNA, 21 nt, Human
ccuuuggaggggaagcccaaa

SEQ ID NO: 347253 - RNA, 21 nt, Human
cgccagugcauauucccucug

SEQ ID NO: 347254 - RNA, 24 nt, Human
cucucagucccacuuuccauuucc

SEQ ID NO: 347255 - RNA, 19 nt, Human
cugaaggaacucacagaug

SEQ ID NO: 347256 - RNA, 23 nt, Human
cuggauguggcacuuccacugca

SEQ ID NO: 347257 - RNA, 23 nt, Human
cuuaaaaaaaaaaaaaauccugu

SEQ ID NO: 347258 - RNA, 23 nt, Human
gaaggugaagaaaaaaacuugcc

SEQ ID NO: 347259 - RNA, 19 nt, Human
gaauguucccccccagacu

SEQ ID NO: 347260 - RNA, 19 nt, Human
gagggcagaggaugaggau

SEQ ID NO: 347261 - RNA, 22 nt, Human
gcaacaaaagaaaagaacugga

SEQ ID NO: 347262 - RNA, 18 nt, Human
gcauucuuggaaucagga

SEQ ID NO: 347263 - RNA, 18 nt, Human
ggaagguaucacacuccu

SEQ ID NO: 347264 - RNA, 24 nt, Human
ggcacaaagaucucuucaauuauc

SEQ ID NO: 347265 - RNA, 18 nt, Human
gggaaaagaucaagaaaa

SEQ ID NO: 347266 - RNA, 26 nt, Human
gggaagcccaaaaagacaaucacuga

SEQ ID NO: 347267 - RNA, 19 nt, Human
gggcaggggagagggagga

SEQ ID NO: 347268 - RNA, 18 nt, Human
ggggcaggaagauaggau

SEQ ID NO: 347269 - RNA, 19 nt, Human
guugcauuucugguuucca

SEQ ID NO: 347270 - RNA, 22 nt, Human
uaagacuagugcugaaaacugg

SEQ ID NO: 347271 - RNA, 23 nt, Human
uacagguaaaggcucuaccacca

SEQ ID NO: 347272 - RNA, 18 nt, Human
uacuguauuuuuauguug

SEQ ID NO: 347273 - RNA, 25 nt, Human
uagguuuuucuuaaaaaaaaaaaaa

SEQ ID NO: 347274 - RNA, 19 nt, Human
uaguacaaguaacgacguu

SEQ ID NO: 347275 - RNA, 30 nt, Human
uauguugcacgcacagacacguacacacag

SEQ ID NO: 347276 - RNA, 19 nt, Human
uauuucaccucuugagaau

SEQ ID NO: 347277 - RNA, 18 nt, Human
ucacugacuuccugggag

SEQ ID NO: 347278 - RNA, 21 nt, Human
ucagauggcauucuuggaauc

SEQ ID NO: 347279 - RNA, 19 nt, Human
ucaguccaucaauuuuugu

SEQ ID NO: 347280 - RNA, 21 nt, Human
ucccuggggauaguggcagag

SEQ ID NO: 347281 - RNA, 21 nt, Human
ucccuggggauaguggcagag

SEQ ID NO: 347282 - RNA, 19 nt, Human
uccuuuggaggggaagccc

SEQ ID NO: 347283 - RNA, 21 nt, Human
ucugaaggaucaugacuauga

SEQ ID NO: 347284 - RNA, 24 nt, Human
ucuuucaaguucgcugaauucuca

SEQ ID NO: 347285 - RNA, 18 nt, Human
ugaaggugaagaaaaaaa

SEQ ID NO: 347286 - RNA, 22 nt, Human
ugaauucucauauugaagguga

SEQ ID NO: 347287 - RNA, 24 nt, Human
ugacuaugagugagaaccugaagg

SEQ ID NO: 347288 - RNA, 28 nt, Human
ugagauaggaucacaaaaacucaauaac

SEQ ID NO: 347289 - RNA, 20 nt, Human
ugaggguuaaagggaaagga

SEQ ID NO: 347290 - RNA, 22 nt, Human
ugcaaaaaaaaaccaaggaagg

SEQ ID NO: 347291 - RNA, 23 nt, Human
ugcaaaaaaaaaccaaggaaggu

SEQ ID NO: 347292 - RNA, 19 nt, Human
ugccugcugacucccucuc

SEQ ID NO: 347293 - RNA, 18 nt, Human
uggaaugcaggcucaagc

SEQ ID NO: 347294 - RNA, 23 nt, Human
uggaaugcaggcucaagcugaca

SEQ ID NO: 347295 - RNA, 26 nt, Human
uggacagaaggacccagagguguucu

SEQ ID NO: 347296 - RNA, 23 nt, Human
ugggagaaaacaccaaauuaaaa

SEQ ID NO: 347297 - RNA, 24 nt, Human
ugggagaaaacaccaaauuaaaaa

SEQ ID NO: 347298 - RNA, 21 nt, Human
ugggagaagggugaaaagaga

SEQ ID NO: 347299 - RNA, 20 nt, Human
uggggcaggaagauaggauu

SEQ ID NO: 347300 - RNA, 19 nt, Human
uuaaaaaaaaagcuuggaa

SEQ ID NO: 347301 - RNA, 23 nt, Human
uuaaagggaaaggaugggagaaa

SEQ ID NO: 347302 - RNA, 23 nt, Human
uuaccuccaaucuuuccccuuuc

SEQ ID NO: 347303 - RNA, 20 nt, Human
uucucauauugaaggugaag

SEQ ID NO: 347304 - RNA, 19 nt, Human
uuuccccuuucaagcuaca

SEQ ID NO: 347305 - RNA, 18 nt, Human
uuugauucuuucuucuuc

SEQ ID NO: 347306 - RNA, 18 nt, Human
aauccauacauagcagcu

SEQ ID NO: 347307 - RNA, 20 nt, Human
acugcacugcaacgucaagg

SEQ ID NO: 347308 - RNA, 20 nt, Human
agaggggcugggccgacuga

SEQ ID NO: 347309 - RNA, 25 nt, Human
agauaggaaaaagauaugauuacgg

SEQ ID NO: 347310 - RNA, 20 nt, Human
aggacugagaggggcugggc

SEQ ID NO: 347311 - RNA, 21 nt, Human
cagauagauaggaaaaagaua

SEQ ID NO: 347312 - RNA, 20 nt, Human
ccucacaacagugcauggcu

SEQ ID NO: 347313 - RNA, 20 nt, Human
cgucucagagccgcgggcgg

SEQ ID NO: 347314 - RNA, 24 nt, Human
cuagcuccaccaucucugcaacuu

SEQ ID NO: 347315 - RNA, 19 nt, Human
gagccgcgggcgguugugg

SEQ ID NO: 347316 - RNA, 21 nt, Human
gcaacaaaguaaaauauacag

SEQ ID NO: 347317 - RNA, 22 nt, Human
gcagcugcugccgccgccgccg

SEQ ID NO: 347318 - RNA, 22 nt, Human
gcugccgccgccgccggggccg

SEQ ID NO: 347319 - RNA, 20 nt, Human
ggacugagaggggcugggcc

SEQ ID NO: 347320 - RNA, 21 nt, Human
ggguuggggaggacugagagg

SEQ ID NO: 347321 - RNA, 19 nt, Human
guucuucccugacccuccc

SEQ ID NO: 347322 - RNA, 21 nt, Human
uaaauccauacauagcagcuu

SEQ ID NO: 347323 - RNA, 18 nt, Human
uaagaugaugaacacaug

SEQ ID NO: 347324 - RNA, 22 nt, Human
uacagguuuuuuauuccaccag

SEQ ID NO: 347325 - RNA, 22 nt, Human
uagauaggaaaaagauaugauu

SEQ ID NO: 347326 - RNA, 24 nt, Human
ucccugacccucccccguauaauc

SEQ ID NO: 347327 - RNA, 25 nt, Human
ucucagagccgcgggcgguuguggg

SEQ ID NO: 347328 - RNA, 23 nt, Human
uggaggguggagaugaugcugca

SEQ ID NO: 347329 - RNA, 24 nt, Human
uguggggguuggggaggacugaga

SEQ ID NO: 347330 - RNA, 21 nt, Human
aagagcucuuuauuccacguc

SEQ ID NO: 347331 - RNA, 23 nt, Human
acacacaccuggcugcugagcac

SEQ ID NO: 347332 - RNA, 18 nt, Human
acccuguaaacaugaugg

SEQ ID NO: 347333 - RNA, 24 nt, Human
acgcugccgccgaacccuguaaac

SEQ ID NO: 347334 - RNA, 20 nt, Human
aucugggugggaggcggcgu

SEQ ID NO: 347335 - RNA, 21 nt, Human
caaguaaaauaaaaugcauau

SEQ ID NO: 347336 - RNA, 21 nt, Human
ccccguauguacacacaccug

SEQ ID NO: 347337 - RNA, 19 nt, Human
ccgcccggcuggcuuggcg

SEQ ID NO: 347338 - RNA, 21 nt, Human
cggcguucuggaacaaacgcu

SEQ ID NO: 347339 - RNA, 19 nt, Human
gcguucuggaacaaacgcu

SEQ ID NO: 347340 - RNA, 22 nt, Human
gcuggcuuggcggcguggagag

SEQ ID NO: 347341 - RNA, 18 nt, Human
ggagauggggguggcggg

SEQ ID NO: 347342 - RNA, 18 nt, Human
guaaaauaaaaugcauau

SEQ ID NO: 347343 - RNA, 24 nt, Human
guugggcggggcgcgucggggacu

SEQ ID NO: 347344 - RNA, 21 nt, Human
uggccuggccugccccacggg

SEQ ID NO: 347345 - RNA, 22 nt, Human
uggccuggccugccccacgggu

SEQ ID NO: 347346 - RNA, 18 nt, Human
ugggaggcggcguucugg

SEQ ID NO: 347347 - RNA, 18 nt, Human
uuacacaaguaaaauaaa

SEQ ID NO: 347348 - RNA, 24 nt, Human
uuuuuuuuuuuuaagaaaagagcu

SEQ ID NO: 347349 - RNA, 19 nt, Human
uuuuuuuuuuuuuuuuuaa

SEQ ID NO: 347350 - RNA, 18 nt, Human
agccaaucaggacccgca

SEQ ID NO: 347351 - RNA, 21 nt, Human
agcuugcaggacucggaguag

SEQ ID NO: 347352 - RNA, 24 nt, Human
agugucacauuauauucagcaaua

SEQ ID NO: 347353 - RNA, 24 nt, Human
caauugucuuccagugcaaauucu

SEQ ID NO: 347354 - RNA, 18 nt, Human
cacaugcaauaaaaguaa

SEQ ID NO: 347355 - RNA, 19 nt, Human
caccacaccagguucaccu

SEQ ID NO: 347356 - RNA, 19 nt, Human
caccugcuacgggcagaau

SEQ ID NO: 347357 - RNA, 21 nt, Human
ccgcacccagggcgcgggauc

SEQ ID NO: 347358 - RNA, 20 nt, Human
ccgccgccucagcucgcugc

SEQ ID NO: 347359 - RNA, 22 nt, Human
ccgccgccucagcucgcugcuu

SEQ ID NO: 347360 - RNA, 22 nt, Human
ccgccucagcucgcugcuucgg

SEQ ID NO: 347361 - RNA, 23 nt, Human
ccugcuacgggcagaaucaaggu

SEQ ID NO: 347362 - RNA, 22 nt, Human
cgaacgagaaacugacgaaucc

SEQ ID NO: 347363 - RNA, 20 nt, Human
cuccugaaacgaacgagaaa

SEQ ID NO: 347364 - RNA, 19 nt, Human
cugacgaauccacagguga

SEQ ID NO: 347365 - RNA, 24 nt, Human
cuggccgccgccucagcucgcugc

SEQ ID NO: 347366 - RNA, 20 nt, Human
cuuuacaaguggcaauuguc

SEQ ID NO: 347367 - RNA, 22 nt, Human
gcaauaaaaguaaguaauuauc

SEQ ID NO: 347368 - RNA, 24 nt, Human
uaggcuucuaauguuauaauucgu

SEQ ID NO: 347369 - RNA, 21 nt, Human
uauuuaauauuucuauaugac

SEQ ID NO: 347370 - RNA, 19 nt, Human
ucaccgcacccagggcgcg

SEQ ID NO: 347371 - RNA, 18 nt, Human
ucaccugcuacgggcaga

SEQ ID NO: 347372 - RNA, 27 nt, Human
ucagcaauaacuaugugcuuaucuuuc

SEQ ID NO: 347373 - RNA, 25 nt, Human
uccacaggugaaagagaaguaacgg

SEQ ID NO: 347374 - RNA, 22 nt, Human
ucccagcggccucaccgcaccc

SEQ ID NO: 347375 - RNA, 18 nt, Human
uccccgcuggccgccgcc

SEQ ID NO: 347376 - RNA, 18 nt, Human
ucgcugcuucgcgucggg

SEQ ID NO: 347377 - RNA, 21 nt, Human
ugaaacgaacgagaaacugac

SEQ ID NO: 347378 - RNA, 22 nt, Human
uuaaaacacaugcaauaaaagu

SEQ ID NO: 347379 - RNA, 24 nt, Human
uuccccgcuggccgccgccucagc

SEQ ID NO: 347380 - RNA, 24 nt, Human
aaaaaaaaagccagcgccgccuug

SEQ ID NO: 347381 - RNA, 21 nt, Human
aaaaaacaacuacccaaaagu

SEQ ID NO: 347382 - RNA, 22 nt, Human
aaaacaaaacaaaaaaaaacaa

SEQ ID NO: 347383 - RNA, 25 nt, Human
aaaacaaaacaaaacaaaaaaaaac

SEQ ID NO: 347384 - RNA, 23 nt, Human
aaaauaagaauuagaugccaaac

SEQ ID NO: 347385 - RNA, 20 nt, Human
aaaaugacccaaagcuguag

SEQ ID NO: 347386 - RNA, 26 nt, Human
aaacaaaaaaaaacaacuacccaaaa

SEQ ID NO: 347387 - RNA, 19 nt, Human
aaacaaaacaaaacaaaaa

SEQ ID NO: 347388 - RNA, 25 nt, Human
aaacaaaacaaaacaaaaaaaaaca

SEQ ID NO: 347389 - RNA, 21 nt, Human
aaacaacuacccaaaagucca

SEQ ID NO: 347390 - RNA, 22 nt, Human
aaacacacaaaaaucccaaaac

SEQ ID NO: 347391 - RNA, 18 nt, Human
aaacagggcgaguugcau

SEQ ID NO: 347392 - RNA, 23 nt, Human
aaauacucuucagaguugaccug

SEQ ID NO: 347393 - RNA, 21 nt, Human
aacaaaaauaaaaaucaucag

SEQ ID NO: 347394 - RNA, 20 nt, Human
aacaaacacacaaaaauccc

SEQ ID NO: 347395 - RNA, 22 nt, Human
aacaacuacccaaaaguccaaa

SEQ ID NO: 347396 - RNA, 19 nt, Human
aacccaaggcagcagaaag

SEQ ID NO: 347397 - RNA, 27 nt, Human
aagagaacacaggaaaaggaggaggga

SEQ ID NO: 347398 - RNA, 23 nt, Human
aaggaggagggagaaagugggga

SEQ ID NO: 347399 - RNA, 25 nt, Human
aaggaggagggagaaagugggguuu

SEQ ID NO: 347400 - RNA, 23 nt, Human
aauacaguaguuaaaaaugaccc

SEQ ID NO: 347401 - RNA, 22 nt, Human
acaaaaauaaaaaucaucagga

SEQ ID NO: 347402 - RNA, 25 nt, Human
acaaaacaaaaaaaaacaacuaccc

SEQ ID NO: 347403 - RNA, 20 nt, Human
acacaaaaaucccaaaacaa

SEQ ID NO: 347404 - RNA, 23 nt, Human
acacacacacacgcacacacaca

SEQ ID NO: 347405 - RNA, 23 nt, Human
acacacacgcacacacacacaca

SEQ ID NO: 347406 - RNA, 20 nt, Human
acaggagaaaggcugacaaa

SEQ ID NO: 347407 - RNA, 25 nt, Human
accccucuagcccuacaucucucuu

SEQ ID NO: 347408 - RNA, 21 nt, Human
acgcacacacacacacauaca

SEQ ID NO: 347409 - RNA, 20 nt, Human
acuacaguuugauuuuuuuu

SEQ ID NO: 347410 - RNA, 20 nt, Human
agaaaaagaaagaacugaag

SEQ ID NO: 347411 - RNA, 22 nt, Human
agacaccagcuugacaguuccc

SEQ ID NO: 347412 - RNA, 21 nt, Human
agacccuuguugagccuggca

SEQ ID NO: 347413 - RNA, 19 nt, Human
agacggcggcggcgugggc

SEQ ID NO: 347414 - RNA, 23 nt, Human
agacuucugacacugccaggcua

SEQ ID NO: 347415 - RNA, 23 nt, Human
agaggaagagagaaaaaaaggga

SEQ ID NO: 347416 - RNA, 21 nt, Human
agcaaaccuaagaaaaagucc

SEQ ID NO: 347417 - RNA, 21 nt, Human
agccgggccaggccuggcgcc

SEQ ID NO: 347418 - RNA, 20 nt, Human
aggcagaaaucugcaauccg

SEQ ID NO: 347419 - RNA, 22 nt, Human
aggcggcggcccgcguggccca

SEQ ID NO: 347420 - RNA, 19 nt, Human
agucugugaaacucuaaau

SEQ ID NO: 347421 - RNA, 19 nt, Human
auaaaacuuaaagaaaagg

SEQ ID NO: 347422 - RNA, 22 nt, Human
auaaacaaaguuagaaagaagc

SEQ ID NO: 347423 - RNA, 20 nt, Human
auagugagaaaaagaaagaa

SEQ ID NO: 347424 - RNA, 18 nt, Human
auccagaauaacacaaau

SEQ ID NO: 347425 - RNA, 22 nt, Human
caaaaaaaaacaacuacccaaa

SEQ ID NO: 347426 - RNA, 23 nt, Human
caaaaaaaaacaacuacccaaaa

SEQ ID NO: 347427 - RNA, 18 nt, Human
caaaaaucccaaaacaaa

SEQ ID NO: 347428 - RNA, 24 nt, Human
caaaacaaaaaaaaacaacuaccc

SEQ ID NO: 347429 - RNA, 20 nt, Human
caaaauuccacacucuuugg

SEQ ID NO: 347430 - RNA, 21 nt, Human
caaaauucccaacaaacacac

SEQ ID NO: 347431 - RNA, 23 nt, Human
caaacccaauaacugccacacaa

SEQ ID NO: 347432 - RNA, 22 nt, Human
caaauaaccaacaguucuuuuu

SEQ ID NO: 347433 - RNA, 21 nt, Human
caacaaacacacaaaaauccc

SEQ ID NO: 347434 - RNA, 26 nt, Human
caacaacugcauucugaccaaauccu

SEQ ID NO: 347435 - RNA, 23 nt, Human
caacccaaauuacaaauuuaacu

SEQ ID NO: 347436 - RNA, 18 nt, Human
caacuacccaaaagucca

SEQ ID NO: 347437 - RNA, 19 nt, Human
caagauacauaaauaucug

SEQ ID NO: 347438 - RNA, 21 nt, Human
caaggcagaaaucugcaaucc

SEQ ID NO: 347439 - RNA, 24 nt, Human
caauagugacaagcccccuccaca

SEQ ID NO: 347440 - RNA, 22 nt, Human
cacaaaaaucccaaaacaaaug

SEQ ID NO: 347441 - RNA, 24 nt, Human
cacacacacacacgcacacacaca

SEQ ID NO: 347442 - RNA, 18 nt, Human
caccacgcugcgaaaccc

SEQ ID NO: 347443 - RNA, 23 nt, Human
caccuuggagagaggguucuggg

SEQ ID NO: 347444 - RNA, 22 nt, Human
cacucuuuggaauaaacaacuu

SEQ ID NO: 347445 - RNA, 18 nt, Human
cagaaaucaaauccucuc

SEQ ID NO: 347446 - RNA, 23 nt, Human
cagaauaacacaaauaaccaaca

SEQ ID NO: 347447 - RNA, 19 nt, Human
cagacaugguaacaugugc

SEQ ID NO: 347448 - RNA, 18 nt, Human
cagcagacggcggcggcg

SEQ ID NO: 347449 - RNA, 24 nt, Human
cagcagcaguccagcugcccugcu

SEQ ID NO: 347450 - RNA, 20 nt, Human
cagccgggccaggccuggcg

SEQ ID NO: 347451 - RNA, 21 nt, Human
caucccuccucuccccccacc

SEQ ID NO: 347452 - RNA, 23 nt, Human
caucccuccucuccccccacccc

SEQ ID NO: 347453 - RNA, 18 nt, Human
caucucucuuucuucucc

SEQ ID NO: 347454 - RNA, 22 nt, Human
cauuaacaauauuuuauaauga

SEQ ID NO: 347455 - RNA, 19 nt, Human
ccaaauccuccaauaaaaa

SEQ ID NO: 347456 - RNA, 24 nt, Human
ccaacaaacacacaaaaaucccaa

SEQ ID NO: 347457 - RNA, 20 nt, Human
ccagaucauuuggagcacac

SEQ ID NO: 347458 - RNA, 19 nt, Human
ccagcgccgccuuggcugu

SEQ ID NO: 347459 - RNA, 22 nt, Human
cccaacaaacacacaaaaaucc

SEQ ID NO: 347460 - RNA, 20 nt, Human
ccccaaaaauaaaaaccaac

SEQ ID NO: 347461 - RNA, 23 nt, Human
cccccaaaaauaaaaaccaacaa

SEQ ID NO: 347462 - RNA, 21 nt, Human
ccccccaaaaauaaaaaccaa

SEQ ID NO: 347463 - RNA, 23 nt, Human
cccgcguggcccagccgggccag

SEQ ID NO: 347464 - RNA, 18 nt, Human
cccuacaucucucuuucu

SEQ ID NO: 347465 - RNA, 20 nt, Human
cccuaggugggggcuggcuu

SEQ ID NO: 347466 - RNA, 20 nt, Human
cccugggugcuggggccggc

SEQ ID NO: 347467 - RNA, 18 nt, Human
ccggcggacacccucgag

SEQ ID NO: 347468 - RNA, 22 nt, Human
ccuacaguauuuagcaaaccua

SEQ ID NO: 347469 - RNA, 26 nt, Human
ccuccucuccccccaccccaaccaaa

SEQ ID NO: 347470 - RNA, 18 nt, Human
ccucugggacuccccaag

SEQ ID NO: 347471 - RNA, 23 nt, Human
ccugaaaaugcacccucuucuga

SEQ ID NO: 347472 - RNA, 21 nt, Human
ccugcagccaaagauuugccu

SEQ ID NO: 347473 - RNA, 22 nt, Human
ccuuggagagaggguucuggga

SEQ ID NO: 347474 - RNA, 19 nt, Human
ccuuguugagccuggcaga

SEQ ID NO: 347475 - RNA, 22 nt, Human
cgcccggaggcgaaggcggcgg

SEQ ID NO: 347476 - RNA, 24 nt, Human
cggagcgaaaaccaagacagguca

SEQ ID NO: 347477 - RNA, 21 nt, Human
cggcggcgugggcuucugggc

SEQ ID NO: 347478 - RNA, 21 nt, Human
cgggcccagggcccgggaucc

SEQ ID NO: 347479 - RNA, 19 nt, Human
cgguaaacaaaaaggcauu

SEQ ID NO: 347480 - RNA, 20 nt, Human
cucaaugauuucuuuuaccu

SEQ ID NO: 347481 - RNA, 23 nt, Human
cuccaauaaaaauagugccauaa

SEQ ID NO: 347482 - RNA, 22 nt, Human
cugaaauuugguacuggguggg

SEQ ID NO: 347483 - RNA, 24 nt, Human
cugaacaucaagauacauaaauau

SEQ ID NO: 347484 - RNA, 24 nt, Human
cugcacagaaacccaaggcagcag

SEQ ID NO: 347485 - RNA, 22 nt, Human
cuggaacuagauugaccuucuc

SEQ ID NO: 347486 - RNA, 20 nt, Human
cuggcuaaaaacaaaauucc

SEQ ID NO: 347487 - RNA, 24 nt, Human
cuuauucaauacuucuccuggacc

SEQ ID NO: 347488 - RNA, 18 nt, Human
cuuuaugugaagggggaa

SEQ ID NO: 347489 - RNA, 19 nt, Human
gaacaggaggcccgcgcgc

SEQ ID NO: 347490 - RNA, 18 nt, Human
gacggcggcggcgugggc

SEQ ID NO: 347491 - RNA, 18 nt, Human
gagcagcacaggacaggg

SEQ ID NO: 347492 - RNA, 21 nt, Human
gaggaaggcucugguggcucc

SEQ ID NO: 347493 - RNA, 20 nt, Human
gaggcccgcgcgcccggagg

SEQ ID NO: 347494 - RNA, 22 nt, Human
gcagaaaauuccauacuucuga

SEQ ID NO: 347495 - RNA, 18 nt, Human
gccaggcuacccaacuug

SEQ ID NO: 347496 - RNA, 22 nt, Human
gcccaaagaaguuuucacacaa

SEQ ID NO: 347497 - RNA, 19 nt, Human
gcccggaggcgaaggcggc

SEQ ID NO: 347498 - RNA, 19 nt, Human
gccgccuuggcuguggguu

SEQ ID NO: 347499 - RNA, 21 nt, Human
gccucaacccucuggaacuag

SEQ ID NO: 347500 - RNA, 18 nt, Human
gcgaaggcggcggcccgc

SEQ ID NO: 347501 - RNA, 22 nt, Human
gcggcggcgugggcuucugggc

SEQ ID NO: 347502 - RNA, 18 nt, Human
gcuucugggcgcaggagg

SEQ ID NO: 347503 - RNA, 18 nt, Human
ggaagagagggagggaaa

SEQ ID NO: 347504 - RNA, 20 nt, Human
ggcccagccgggccaggccu

SEQ ID NO: 347505 - RNA, 22 nt, Human
ggcuguguucuguuacacagca

SEQ ID NO: 347506 - RNA, 19 nt, Human
gggcccgggaucccggcgg

SEQ ID NO: 347507 - RNA, 25 nt, Human
ggggaggcggcccacccgacugugu

SEQ ID NO: 347508 - RNA, 23 nt, Human
gggggcuggcuuaaauaggacca

SEQ ID NO: 347509 - RNA, 25 nt, Human
ggguagggucucagccuggugaaag

SEQ ID NO: 347510 - RNA, 18 nt, Human
gguucagacuucugacac

SEQ ID NO: 347511 - RNA, 18 nt, Human
gucuccacugaggcacac

SEQ ID NO: 347512 - RNA, 19 nt, Human
gucucgcacaggugggacc

SEQ ID NO: 347513 - RNA, 28 nt, Human
gugaaacucuaaaugaccaauccaguga

SEQ ID NO: 347514 - RNA, 18 nt, Human
guggcuccugaacagcag

SEQ ID NO: 347515 - RNA, 22 nt, Human
uaaaaacaaaauucccaacaaa

SEQ ID NO: 347516 - RNA, 21 nt, Human
uaaaaacaaauauucaaauug

SEQ ID NO: 347517 - RNA, 20 nt, Human
uaaaagacccaaacauguca

SEQ ID NO: 347518 - RNA, 18 nt, Human
uaaaagcccauauacccc

SEQ ID NO: 347519 - RNA, 20 nt, Human
uaagaaaacucaaaaacaag

SEQ ID NO: 347520 - RNA, 18 nt, Human
uaauuugggggaaauggg

SEQ ID NO: 347521 - RNA, 21 nt, Human
uacccaaaaguccaaaagaaa

SEQ ID NO: 347522 - RNA, 22 nt, Human
uauacgcuacgguaaacaaaaa

SEQ ID NO: 347523 - RNA, 21 nt, Human
uauaugaaacugaguugugga

SEQ ID NO: 347524 - RNA, 27 nt, Human
uaucuagaaacaccuuggagagagggu

SEQ ID NO: 347525 - RNA, 21 nt, Human
uaugugaagggggaagaacug

SEQ ID NO: 347526 - RNA, 20 nt, Human
uauuucaaggcagaaaucug

SEQ ID NO: 347527 - RNA, 23 nt, Human
ucaaaaaaacaaaacaaaacaaa

SEQ ID NO: 347528 - RNA, 21 nt, Human
ucaaauccucuccaaagaugu

SEQ ID NO: 347529 - RNA, 19 nt, Human
ucaguagauguguuauacc

SEQ ID NO: 347530 - RNA, 19 nt, Human
ucaucuggcugaagacacc

SEQ ID NO: 347531 - RNA, 24 nt, Human
ucauuccccccaaaaauaaaaacc

SEQ ID NO: 347532 - RNA, 20 nt, Human
ucauuuggagcacacaugug

SEQ ID NO: 347533 - RNA, 20 nt, Human
ucauuuggagcacacaugug

SEQ ID NO: 347534 - RNA, 22 nt, Human
uccagcuguuuuugcugccugc

SEQ ID NO: 347535 - RNA, 23 nt, Human
uccagcuguuuuugcugccugca

SEQ ID NO: 347536 - RNA, 18 nt, Human
uccauggucaaagcaaga

SEQ ID NO: 347537 - RNA, 18 nt, Human
ucccaaagaaacagguag

SEQ ID NO: 347538 - RNA, 18 nt, Human
uccccccaaaaauaaaaa

SEQ ID NO: 347539 - RNA, 23 nt, Human
uccucgaggccugcuucuggugg

SEQ ID NO: 347540 - RNA, 18 nt, Human
uccugaacagcagcaguc

SEQ ID NO: 347541 - RNA, 24 nt, Human
ucgaggccugcuucugguggcccu

SEQ ID NO: 347542 - RNA, 28 nt, Human
ucucaaaaaaacaaaacaaaacaaaaaa

SEQ ID NO: 347543 - RNA, 25 nt, Human
ucugaaauuugguacuggguggggg

SEQ ID NO: 347544 - RNA, 28 nt, Human
ucugcuggauaccucugggacuccccaa

SEQ ID NO: 347545 - RNA, 20 nt, Human
ucugggcgcaggaggcugcg

SEQ ID NO: 347546 - RNA, 21 nt, Human
ugaaaucauaaauagggacau

SEQ ID NO: 347547 - RNA, 18 nt, Human
ugaagucaaugaaugcaa

SEQ ID NO: 347548 - RNA, 24 nt, Human
ugacaaaccauguuccuuuaugug

SEQ ID NO: 347549 - RNA, 18 nt, Human
ugacaguuccccuuuaag

SEQ ID NO: 347550 - RNA, 24 nt, Human
ugaccuggcuaaaaacaaaauucc

SEQ ID NO: 347551 - RNA, 18 nt, Human
ugagaaaaagaaagaacu

SEQ ID NO: 347552 - RNA, 19 nt, Human
ugagcaaaucccugggcag

SEQ ID NO: 347553 - RNA, 23 nt, Human
ugaguaagcaguagaaauggcuu

SEQ ID NO: 347554 - RNA, 22 nt, Human
ugaguuggaauaucuucaguua

SEQ ID NO: 347555 - RNA, 18 nt, Human
ugauucguccugccugcu

SEQ ID NO: 347556 - RNA, 19 nt, Human
ugauucguccugccugcug

SEQ ID NO: 347557 - RNA, 23 nt, Human
ugauuugguuccuauguaaaugu

SEQ ID NO: 347558 - RNA, 20 nt, Human
ugcaacucuucuggaaggaa

SEQ ID NO: 347559 - RNA, 18 nt, Human
ugcagccaaagauuugcc

SEQ ID NO: 347560 - RNA, 22 nt, Human
ugcagugccugcucuccugugc

SEQ ID NO: 347561 - RNA, 27 nt, Human
ugcaucccuccucuccccccaccccaa

SEQ ID NO: 347562 - RNA, 19 nt, Human
ugcccaggaaguuugcugg

SEQ ID NO: 347563 - RNA, 24 nt, Human
ugcuggggccggcggacacccucg

SEQ ID NO: 347564 - RNA, 18 nt, Human
uggaauaucuucaguuaa

SEQ ID NO: 347565 - RNA, 19 nt, Human
uggccgucgggcgcccucg

SEQ ID NO: 347566 - RNA, 21 nt, Human
uggcuaaaaacaaaauuccca

SEQ ID NO: 347567 - RNA, 22 nt, Human
uggcuaaaaacaaaauucccaa

SEQ ID NO: 347568 - RNA, 21 nt, Human
uggcuguggguuggugaugcu

SEQ ID NO: 347569 - RNA, 21 nt, Human
ugggauauucucucaugucau

SEQ ID NO: 347570 - RNA, 19 nt, Human
ugggguuuggaagauagag

SEQ ID NO: 347571 - RNA, 24 nt, Human
uggucaaagcaagaaagaagcaag

SEQ ID NO: 347572 - RNA, 18 nt, Human
ugguggcuccugaacagc

SEQ ID NO: 347573 - RNA, 21 nt, Human
ugucaaacaaauuuucaugua

SEQ ID NO: 347574 - RNA, 19 nt, Human
ugugguacaaagagaggaa

SEQ ID NO: 347575 - RNA, 18 nt, Human
uguucugaaguccugcuu

SEQ ID NO: 347576 - RNA, 26 nt, Human
uuaagagaacacaggaaaaggaggag

SEQ ID NO: 347577 - RNA, 20 nt, Human
uucaaggcagaaaucugcaa

SEQ ID NO: 347578 - RNA, 19 nt, Human
uucaauacuucuccuggac

SEQ ID NO: 347579 - RNA, 20 nt, Human
uucacacacacacacacaca

SEQ ID NO: 347580 - RNA, 21 nt, Human
uucacacacacacacacacac

SEQ ID NO: 347581 - RNA, 19 nt, Human
uuccauggucaaagcaaga

SEQ ID NO: 347582 - RNA, 18 nt, Human
uuccugucacacuggugc

SEQ ID NO: 347583 - RNA, 21 nt, Human
uucucucaugucaucuggcug

SEQ ID NO: 347584 - RNA, 18 nt, Human
uugcaucccuccucuccc

SEQ ID NO: 347585 - RNA, 19 nt, Human
uuggcacccgccucaaccc

SEQ ID NO: 347586 - RNA, 20 nt, Human
uugguuccuauguaaaugug

SEQ ID NO: 347587 - RNA, 24 nt, Human
uuucucaaaaaaacaaaacaaaac

SEQ ID NO: 347588 - RNA, 19 nt, Human
uuuuucuuuuuuugcacca

SEQ ID NO: 347589 - RNA, 23 nt, Human
aaaaacaaacaccaagcaaacga

SEQ ID NO: 347590 - RNA, 19 nt, Human
aaacagguuacagacaggu

SEQ ID NO: 347591 - RNA, 23 nt, Human
aaacgauagugcaaagcaguuuc

SEQ ID NO: 347592 - RNA, 19 nt, Human
aaagugcugggcacuggga

SEQ ID NO: 347593 - RNA, 22 nt, Human
aagagaccuuguguuugaaaac

SEQ ID NO: 347594 - RNA, 24 nt, Human
aaggugccucccacgcugaccugg

SEQ ID NO: 347595 - RNA, 18 nt, Human
acaaacaccaagcaaacg

SEQ ID NO: 347596 - RNA, 22 nt, Human
acagaagacaguuuacuguaca

SEQ ID NO: 347597 - RNA, 19 nt, Human
acagcuuggcuggacccag

SEQ ID NO: 347598 - RNA, 24 nt, Human
acagugcucucacagagacaacca

SEQ ID NO: 347599 - RNA, 20 nt, Human
acagugcuucuguccugcca

SEQ ID NO: 347600 - RNA, 20 nt, Human
accaccuaggggaaagggga

SEQ ID NO: 347601 - RNA, 20 nt, Human
accagaaggacugccuaacc

SEQ ID NO: 347602 - RNA, 18 nt, Human
accagcuauaaccagaga

SEQ ID NO: 347603 - RNA, 21 nt, Human
acccagcuccauccucucgcc

SEQ ID NO: 347604 - RNA, 22 nt, Human
acccuaauaaccccacacccuc

SEQ ID NO: 347605 - RNA, 24 nt, Human
agaugcagccagaggcucccacca

SEQ ID NO: 347606 - RNA, 18 nt, Human
agcauuuuguagggcaga

SEQ ID NO: 347607 - RNA, 24 nt, Human
agccuguggugcaggcugguggga

SEQ ID NO: 347608 - RNA, 21 nt, Human
agcgcccacuuucccauuuug

SEQ ID NO: 347609 - RNA, 19 nt, Human
agcuggggguccgcggggg

SEQ ID NO: 347610 - RNA, 22 nt, Human
aggggaugggggaugggguagg

SEQ ID NO: 347611 - RNA, 18 nt, Human
aggugcaggggucgggag

SEQ ID NO: 347612 - RNA, 19 nt, Human
aguaacacuauaucaaaac

SEQ ID NO: 347613 - RNA, 22 nt, Human
agugaggacaggccaagagaaa

SEQ ID NO: 347614 - RNA, 19 nt, Human
auccugcccaccuccgccc

SEQ ID NO: 347615 - RNA, 18 nt, Human
caaaacgucuuccuuucc

SEQ ID NO: 347616 - RNA, 21 nt, Human
caaaaugaucccucaccucaa

SEQ ID NO: 347617 - RNA, 18 nt, Human
caagagaaaccgcagcag

SEQ ID NO: 347618 - RNA, 18 nt, Human
caagauuuggcuggaucc

SEQ ID NO: 347619 - RNA, 25 nt, Human
caccagcugggaccacccugggacc

SEQ ID NO: 347620 - RNA, 18 nt, Human
cagcagcgugcugggucc

SEQ ID NO: 347621 - RNA, 19 nt, Human
cagccagaggcucccacca

SEQ ID NO: 347622 - RNA, 22 nt, Human
cagccaguacuccccaccucuc

SEQ ID NO: 347623 - RNA, 19 nt, Human
caggagacaugggucccau

SEQ ID NO: 347624 - RNA, 18 nt, Human
cauccugcccaccuccgc

SEQ ID NO: 347625 - RNA, 19 nt, Human
cauccugcccaccuccgcc

SEQ ID NO: 347626 - RNA, 23 nt, Human
ccaagcaaacgauagugcaaagc

SEQ ID NO: 347627 - RNA, 23 nt, Human
ccagcagcgugcuggguccugcc

SEQ ID NO: 347628 - RNA, 23 nt, Human
ccaggagucgcaagauuuggcug

SEQ ID NO: 347629 - RNA, 24 nt, Human
ccaggagucgcaagauuuggcugg

SEQ ID NO: 347630 - RNA, 20 nt, Human
ccaggcugucuguacccacu

SEQ ID NO: 347631 - RNA, 22 nt, Human
ccaguacuccccaccucucaca

SEQ ID NO: 347632 - RNA, 23 nt, Human
cccaaaggugccucccacgcuga

SEQ ID NO: 347633 - RNA, 24 nt, Human
cccaccuccgcccagccuccugga

SEQ ID NO: 347634 - RNA, 18 nt, Human
cccacgcugaccugggac

SEQ ID NO: 347635 - RNA, 21 nt, Human
ccccaccucucacauccugcc

SEQ ID NO: 347636 - RNA, 23 nt, Human
ccccccucccccgcccugccaag

SEQ ID NO: 347637 - RNA, 24 nt, Human
cccugggaccgagaccacccugga

SEQ ID NO: 347638 - RNA, 23 nt, Human
ccuaauaaccccacacccucagg

SEQ ID NO: 347639 - RNA, 24 nt, Human
ccuauccccccucccccgcccugc

SEQ ID NO: 347640 - RNA, 19 nt, Human
ccuaucuaucuggcccucc

SEQ ID NO: 347641 - RNA, 19 nt, Human
ccucccaggaggcuugggg

SEQ ID NO: 347642 - RNA, 19 nt, Human
ccuccuauccccccucccc

SEQ ID NO: 347643 - RNA, 20 nt, Human
ccuccuguucucuccacaaa

SEQ ID NO: 347644 - RNA, 20 nt, Human
ccugcccaccuccgcccagc

SEQ ID NO: 347645 - RNA, 23 nt, Human
ccuggcccuuggcaagcgcccac

SEQ ID NO: 347646 - RNA, 19 nt, Human
ccugggaccgagaccaccc

SEQ ID NO: 347647 - RNA, 25 nt, Human
ccugggaccgagaccacccuggagc

SEQ ID NO: 347648 - RNA, 20 nt, Human
ccugugggccaaugcugccu

SEQ ID NO: 347649 - RNA, 19 nt, Human
cgcccagccuccuggacag

SEQ ID NO: 347650 - RNA, 22 nt, Human
cggagccggcccaucacugguc

SEQ ID NO: 347651 - RNA, 21 nt, Human
cuacaaggacaauggauucau

SEQ ID NO: 347652 - RNA, 21 nt, Human
cucaaaccaucucugccagca

SEQ ID NO: 347653 - RNA, 18 nt, Human
cucaucagcguuucccuc

SEQ ID NO: 347654 - RNA, 25 nt, Human
cugacccaaaaugaucccucaccuc

SEQ ID NO: 347655 - RNA, 23 nt, Human
cugaggcuuauccugugacgucc

SEQ ID NO: 347656 - RNA, 24 nt, Human
cugcauccacagaggccgaggcag

SEQ ID NO: 347657 - RNA, 23 nt, Human
cugggaccagcuauaaccagaga

SEQ ID NO: 347658 - RNA, 22 nt, Human
cugggcacugggaacccaaagg

SEQ ID NO: 347659 - RNA, 25 nt, Human
cugggccgggggcaguaucccgggc

SEQ ID NO: 347660 - RNA, 21 nt, Human
cuggucuugaagguuguuagg

SEQ ID NO: 347661 - RNA, 21 nt, Human
gaccugggaccagcuauaacc

SEQ ID NO: 347662 - RNA, 24 nt, Human
gaggcagcuggggguccgcggggg

SEQ ID NO: 347663 - RNA, 23 nt, Human
gcagcaggagggaauggaauagg

SEQ ID NO: 347664 - RNA, 19 nt, Human
gcagccuuguaaauaagga

SEQ ID NO: 347665 - RNA, 22 nt, Human
gcagcuggggguccgcgggggg

SEQ ID NO: 347666 - RNA, 22 nt, Human
gcaggaggcugauuccccacag

SEQ ID NO: 347667 - RNA, 22 nt, Human
gcaggggucgggagguuuccca

SEQ ID NO: 347668 - RNA, 19 nt, Human
gccacgcacagccaguacu

SEQ ID NO: 347669 - RNA, 20 nt, Human
gcccuuggcaagcgcccacu

SEQ ID NO: 347670 - RNA, 18 nt, Human
gccucucucuggaagaga

SEQ ID NO: 347671 - RNA, 20 nt, Human
gcuggggggacuggcuugga

SEQ ID NO: 347672 - RNA, 24 nt, Human
ggaggggaagcugggcugggggga

SEQ ID NO: 347673 - RNA, 21 nt, Human
ggagguuucccagggccugag

SEQ ID NO: 347674 - RNA, 18 nt, Human
ggagucagcaacuauuuu

SEQ ID NO: 347675 - RNA, 19 nt, Human
ggaugcugccugaugggga

SEQ ID NO: 347676 - RNA, 19 nt, Human
ggcaagcgcccacuuuccc

SEQ ID NO: 347677 - RNA, 22 nt, Human
ggcagcuggggguccgcggggg

SEQ ID NO: 347678 - RNA, 19 nt, Human
ggccguugugacagguugg

SEQ ID NO: 347679 - RNA, 21 nt, Human
ggcuggggggacuggcuugga

SEQ ID NO: 347680 - RNA, 24 nt, Human
ggcuugggggauggggcacagcuu

SEQ ID NO: 347681 - RNA, 20 nt, Human
gggaagcugggcugggggga

SEQ ID NO: 347682 - RNA, 22 nt, Human
gggaugcugccugauggggagu

SEQ ID NO: 347683 - RNA, 24 nt, Human
ggggagccuguggugcaggcuggu

SEQ ID NO: 347684 - RNA, 23 nt, Human
ggggguccgcgggggggagaggg

SEQ ID NO: 347685 - RNA, 22 nt, Human
ggggucgggagguuucccaggg

SEQ ID NO: 347686 - RNA, 19 nt, Human
ggucccaugcagcacuggg

SEQ ID NO: 347687 - RNA, 22 nt, Human
gguggugggggugggggacacu

SEQ ID NO: 347688 - RNA, 18 nt, Human
guggugcaggcugguggg

SEQ ID NO: 347689 - RNA, 19 nt, Human
guggugggggugggggaca

SEQ ID NO: 347690 - RNA, 19 nt, Human
guguagccccuugagaaag

SEQ ID NO: 347691 - RNA, 20 nt, Human
uaaaauaccgcaugcugcua

SEQ ID NO: 347692 - RNA, 21 nt, Human
uaaauaaggaccuacuuuuac

SEQ ID NO: 347693 - RNA, 19 nt, Human
uaaaugcagagggggcugg

SEQ ID NO: 347694 - RNA, 24 nt, Human
uacaagcaaguugugcguuaaaaa

SEQ ID NO: 347695 - RNA, 21 nt, Human
uacccacuuugggccuuacag

SEQ ID NO: 347696 - RNA, 18 nt, Human
uaccgcaugcugcuagcc

SEQ ID NO: 347697 - RNA, 19 nt, Human
uaggguccccgccuccagg

SEQ ID NO: 347698 - RNA, 23 nt, Human
ucagcaugacaauaugucacaaa

SEQ ID NO: 347699 - RNA, 22 nt, Human
uccacaaauggaauuaugagac

SEQ ID NO: 347700 - RNA, 23 nt, Human
uccacaaauggaauuaugagacc

SEQ ID NO: 347701 - RNA, 18 nt, Human
ucccagggccugaggcuu

SEQ ID NO: 347702 - RNA, 21 nt, Human
ucccauuuugcaaaauucagg

SEQ ID NO: 347703 - RNA, 20 nt, Human
uccugccacgcacagccagg

SEQ ID NO: 347704 - RNA, 21 nt, Human
ucucugggccugggaccgugc

SEQ ID NO: 347705 - RNA, 18 nt, Human
ucugcuaggaccuaucua

SEQ ID NO: 347706 - RNA, 22 nt, Human
ucuguaggugcuuuccugguuu

SEQ ID NO: 347707 - RNA, 25 nt, Human
ugacaauaugucacaaaagauuggu

SEQ ID NO: 347708 - RNA, 18 nt, Human
ugacagguugggugggga

SEQ ID NO: 347709 - RNA, 22 nt, Human
ugagcugcgcuggagagcccuu

SEQ ID NO: 347710 - RNA, 23 nt, Human
ugagcugcgcuggagagcccuuu

SEQ ID NO: 347711 - RNA, 24 nt, Human
ugagugcagcaggugucacaccuc

SEQ ID NO: 347712 - RNA, 20 nt, Human
ugccauagacucaucuucuc

SEQ ID NO: 347713 - RNA, 20 nt, Human
ugccgucacuuuuugucagg

SEQ ID NO: 347714 - RNA, 19 nt, Human
ugcguuaaaaacaaacacc

SEQ ID NO: 347715 - RNA, 19 nt, Human
ugcugccucucucuggaag

SEQ ID NO: 347716 - RNA, 18 nt, Human
uggaagagagauggccuc

SEQ ID NO: 347717 - RNA, 21 nt, Human
uggaauaggaucaccagaagg

SEQ ID NO: 347718 - RNA, 24 nt, Human
uggcaggaggcugauuccccacag

SEQ ID NO: 347719 - RNA, 21 nt, Human
ugggaugcugccugaugggga

SEQ ID NO: 347720 - RNA, 20 nt, Human
ugggcuggggggacuggcuu

SEQ ID NO: 347721 - RNA, 19 nt, Human
ugggggauggggcacagcu

SEQ ID NO: 347722 - RNA, 22 nt, Human
ugggggauggggcacagcuugg

SEQ ID NO: 347723 - RNA, 24 nt, Human
uggggggacuggcuuggauguguu

SEQ ID NO: 347724 - RNA, 23 nt, Human
uguuaggguccccgccccggggg

SEQ ID NO: 347725 - RNA, 22 nt, Human
uuacuguacaagcaaguugugc

SEQ ID NO: 347726 - RNA, 22 nt, Human
uucuagggccagagaacucuga

SEQ ID NO: 347727 - RNA, 18 nt, Human
uuggcuggacccaggggg

SEQ ID NO: 347728 - RNA, 19 nt, Human
uuggcuggacccagggggg

SEQ ID NO: 347729 - RNA, 21 nt, Human
uuuccaguucugacucaaauc

SEQ ID NO: 347730 - RNA, 25 nt, Human
uuucccauuuugcaaaauucagggg

SEQ ID NO: 347731 - RNA, 23 nt, Human
uuuuuguuuuuuuguuuuuuuuu

SEQ ID NO: 347732 - RNA, 27 nt, Human
uuuuuuuuguuuuuuuguuuuuuuuuu

SEQ ID NO: 347733 - RNA, 23 nt, Human
uuuuuuuuuuuuuuuugcucagg

SEQ ID NO: 347734 - RNA, 18 nt, Human
uuuuuuuuuuuuuuuuug

SEQ ID NO: 347735 - RNA, 23 nt, Human
aacaggguggggucgggggauga

SEQ ID NO: 347736 - RNA, 21 nt, Human
acagagucacagugucagaac

SEQ ID NO: 347737 - RNA, 20 nt, Human
acucugguggaaaacagggu

SEQ ID NO: 347738 - RNA, 31 nt, Human
cugguggaaaacaggguggggucgggggaga

SEQ ID NO: 347739 - RNA, 23 nt, Human
ggaaaacaggguggggucggggg

SEQ ID NO: 347740 - RNA, 24 nt, Human
uggaaaacaggguggggucggggg

SEQ ID NO: 347741 - RNA, 18 nt, Human
uggggucgggggaugaca

SEQ ID NO: 347742 - RNA, 23 nt, Human
uggggucgggggaugacauccaa

SEQ ID NO: 347743 - RNA, 18 nt, Human
aaaauaaacacaaaacac

SEQ ID NO: 347744 - RNA, 23 nt, Human
aaacagucccagcccuccccccg

SEQ ID NO: 347745 - RNA, 19 nt, Human
aaaccaacagcacuguaca

SEQ ID NO: 347746 - RNA, 22 nt, Human
aaacgaaacagucccagcccuc

SEQ ID NO: 347747 - RNA, 22 nt, Human
aaaggggcuaccuucccccuca

SEQ ID NO: 347748 - RNA, 25 nt, Human
aaccaacagcacuguacaacuacaa

SEQ ID NO: 347749 - RNA, 21 nt, Human
aaccuguaggcagcuccccuc

SEQ ID NO: 347750 - RNA, 23 nt, Human
aacgaaacagucccagcccuccc

SEQ ID NO: 347751 - RNA, 23 nt, Human
aacggaaacaaaagccccguucc

SEQ ID NO: 347752 - RNA, 21 nt, Human
aacgggugggcacaaaggaug

SEQ ID NO: 347753 - RNA, 23 nt, Human
aagaagcagccgaccccccgcaa

SEQ ID NO: 347754 - RNA, 22 nt, Human
aagcagaaacgaaacaguccca

SEQ ID NO: 347755 - RNA, 23 nt, Human
acacaacagagcaaggcuuuaaa

SEQ ID NO: 347756 - RNA, 18 nt, Human
acaccacacaccugcgug

SEQ ID NO: 347757 - RNA, 21 nt, Human
acaccacacaccugcguggac

SEQ ID NO: 347758 - RNA, 23 nt, Human
acaccagccgacuacccacaggc

SEQ ID NO: 347759 - RNA, 23 nt, Human
acagagggcagcucauguucuca

SEQ ID NO: 347760 - RNA, 25 nt, Human
acagcaacggaaacaaaagccccgu

SEQ ID NO: 347761 - RNA, 20 nt, Human
acagggacaccagccgacuu

SEQ ID NO: 347762 - RNA, 21 nt, Human
acagggcagcuugcuugcccc

SEQ ID NO: 347763 - RNA, 22 nt, Human
acauacauguuuacaccacaca

SEQ ID NO: 347764 - RNA, 24 nt, Human
accagaucacgcaccccagcucca

SEQ ID NO: 347765 - RNA, 19 nt, Human
accagcaucgauaaacagc

SEQ ID NO: 347766 - RNA, 23 nt, Human
acccccuccgguaucccccccau

SEQ ID NO: 347767 - RNA, 23 nt, Human
accccgcagagcaaggagaagac

SEQ ID NO: 347768 - RNA, 24 nt, Human
agaaacgaaacagucccagcccuc

SEQ ID NO: 347769 - RNA, 22 nt, Human
agaagccacuucacagucaguc

SEQ ID NO: 347770 - RNA, 18 nt, Human
agagcacagggcagcuug

SEQ ID NO: 347771 - RNA, 25 nt, Human
agcacugccaccaggccgccagccc

SEQ ID NO: 347772 - RNA, 20 nt, Human
agcaggcguucagugaggcu

SEQ ID NO: 347773 - RNA, 20 nt, Human
agccagcgccggaaacgaca

SEQ ID NO: 347774 - RNA, 18 nt, Human
agccccgcccccacccca

SEQ ID NO: 347775 - RNA, 28 nt, Human
agccucgccgccgucacaggagcccucu

SEQ ID NO: 347776 - RNA, 18 nt, Human
aggaagccccugcuccag

SEQ ID NO: 347777 - RNA, 22 nt, Human
aggcaccagguguuggcguugg

SEQ ID NO: 347778 - RNA, 21 nt, Human
aggcagagaagggcagggaca

SEQ ID NO: 347779 - RNA, 27 nt, Human
aggcagagaagggcagggacagggcuc

SEQ ID NO: 347780 - RNA, 19 nt, Human
aggcagagagaaaacaggg

SEQ ID NO: 347781 - RNA, 22 nt, Human
aggcagagagaaaacagggggg

SEQ ID NO: 347782 - RNA, 27 nt, Human
aggcagcuccccucaccacugaggaag

SEQ ID NO: 347783 - RNA, 23 nt, Human
aggcagggguggagggcggcggg

SEQ ID NO: 347784 - RNA, 22 nt, Human
aggcaggguggccagaacgggu

SEQ ID NO: 347785 - RNA, 23 nt, Human
aggccgaugagaaagggacggga

SEQ ID NO: 347786 - RNA, 21 nt, Human
aggcugcugccucaggaaagc

SEQ ID NO: 347787 - RNA, 21 nt, Human
aggcuggggaggggccggggc

SEQ ID NO: 347788 - RNA, 21 nt, Human
agggaaaccaacaggccaccc

SEQ ID NO: 347789 - RNA, 24 nt, Human
agggaagaaaacccuugaaagccu

SEQ ID NO: 347790 - RNA, 18 nt, Human
agggguggagggcggcgg

SEQ ID NO: 347791 - RNA, 18 nt, Human
agggguuggcggccgggg

SEQ ID NO: 347792 - RNA, 22 nt, Human
agugagguggugaugccccacc

SEQ ID NO: 347793 - RNA, 20 nt, Human
auaaggagggugacaacaca

SEQ ID NO: 347794 - RNA, 23 nt, Human
caacacaucucuuaggcagagca

SEQ ID NO: 347795 - RNA, 23 nt, Human
caacagcacuguacaacuacaag

SEQ ID NO: 347796 - RNA, 21 nt, Human
caacaggacacaacagagcaa

SEQ ID NO: 347797 - RNA, 19 nt, Human
caacggaaacaaaagcccc

SEQ ID NO: 347798 - RNA, 22 nt, Human
caacuccugcagcuccagggcu

SEQ ID NO: 347799 - RNA, 19 nt, Human
caaggcagagagaaaacag

SEQ ID NO: 347800 - RNA, 25 nt, Human
caaggcagagagaaaacaggggggu

SEQ ID NO: 347801 - RNA, 19 nt, Human
caauaccaggcuggguggu

SEQ ID NO: 347802 - RNA, 26 nt, Human
cacauacauguuuacaccacacaccu

SEQ ID NO: 347803 - RNA, 20 nt, Human
caccaaggcagagagaaaac

SEQ ID NO: 347804 - RNA, 19 nt, Human
caccccagcuccacgacag

SEQ ID NO: 347805 - RNA, 19 nt, Human
cacccccccgcaucauucc

SEQ ID NO: 347806 - RNA, 23 nt, Human
cacccuccugccauuuccaccac

SEQ ID NO: 347807 - RNA, 22 nt, Human
cacccuccugccccgagggaag

SEQ ID NO: 347808 - RNA, 23 nt, Human
cacccucuguucaggcaccugcc

SEQ ID NO: 347809 - RNA, 22 nt, Human
cacgcaccccagcuccacgaca

SEQ ID NO: 347810 - RNA, 19 nt, Human
cagaacaccaaggcagaga

SEQ ID NO: 347811 - RNA, 19 nt, Human
cagaauucuugggaaacac

SEQ ID NO: 347812 - RNA, 21 nt, Human
cagagggcagcucauguucuc

SEQ ID NO: 347813 - RNA, 19 nt, Human
cagcaaggccagugagguc

SEQ ID NO: 347814 - RNA, 19 nt, Human
cagcaucgauaaacagcaa

SEQ ID NO: 347815 - RNA, 22 nt, Human
cagcccuccccccgccauaucc

SEQ ID NO: 347816 - RNA, 18 nt, Human
cagcgccggaaacgacaa

SEQ ID NO: 347817 - RNA, 19 nt, Human
cagcgccggaaacgacaaa

SEQ ID NO: 347818 - RNA, 20 nt, Human
cagcgggcggcgggcgcggc

SEQ ID NO: 347819 - RNA, 24 nt, Human
cagcuggccggggaccugguacag

SEQ ID NO: 347820 - RNA, 22 nt, Human
caggccaaagggagggccuucc

SEQ ID NO: 347821 - RNA, 22 nt, Human
caggccccaggguggaaggucc

SEQ ID NO: 347822 - RNA, 20 nt, Human
caggcccgagggcgcugcga

SEQ ID NO: 347823 - RNA, 24 nt, Human
cagggccagcccugcaggaaacaa

SEQ ID NO: 347824 - RNA, 23 nt, Human
cagggggccaccucuagggaucc

SEQ ID NO: 347825 - RNA, 19 nt, Human
cagggguggagggcggcgg

SEQ ID NO: 347826 - RNA, 20 nt, Human
cagggguuggcggccggggg

SEQ ID NO: 347827 - RNA, 21 nt, Human
cagugaugagccgcacucccc

SEQ ID NO: 347828 - RNA, 18 nt, Human
ccaagaguaccugcaccc

SEQ ID NO: 347829 - RNA, 19 nt, Human
ccagcaucgauaaacagca

SEQ ID NO: 347830 - RNA, 20 nt, Human
ccagccagcgccggaaacga

SEQ ID NO: 347831 - RNA, 18 nt, Human
ccagggaggccagguucu

SEQ ID NO: 347832 - RNA, 21 nt, Human
ccagggccagcccugcaggaa

SEQ ID NO: 347833 - RNA, 19 nt, Human
ccauccccgcgggccucac

SEQ ID NO: 347834 - RNA, 22 nt, Human
cccaagaagcagccgacccccc

SEQ ID NO: 347835 - RNA, 20 nt, Human
cccacgaguccccucucauc

SEQ ID NO: 347836 - RNA, 26 nt, Human
cccagcccuccccccgccauauccaa

SEQ ID NO: 347837 - RNA, 22 nt, Human
ccccaaaguccaaacaggccag

SEQ ID NO: 347838 - RNA, 18 nt, Human
ccccaagccccgccccca

SEQ ID NO: 347839 - RNA, 22 nt, Human
ccccaccccaccuucaaccaga

SEQ ID NO: 347840 - RNA, 20 nt, Human
cccccaccccaccuucaacc

SEQ ID NO: 347841 - RNA, 23 nt, Human
cccccaccccaccuucaaccaga

SEQ ID NO: 347842 - RNA, 21 nt, Human
cccccauccacccucuguuca

SEQ ID NO: 347843 - RNA, 19 nt, Human
cccccccauccacccucug

SEQ ID NO: 347844 - RNA, 21 nt, Human
ccccccgcaucauuccuagac

SEQ ID NO: 347845 - RNA, 22 nt, Human
ccccuccugauuagggggaagc

SEQ ID NO: 347846 - RNA, 20 nt, Human
ccccucucucuccaggccac

SEQ ID NO: 347847 - RNA, 23 nt, Human
cccgcaccaccggagcccggggg

SEQ ID NO: 347848 - RNA, 22 nt, Human
cccgcccccaccccaccuucaa

SEQ ID NO: 347849 - RNA, 19 nt, Human
cccgccccugcagccugga

SEQ ID NO: 347850 - RNA, 19 nt, Human
cccugcccgagccagggcc

SEQ ID NO: 347851 - RNA, 22 nt, Human
cccuggguccccaggaagcagc

SEQ ID NO: 347852 - RNA, 18 nt, Human
cccugugccuccagcaag

SEQ ID NO: 347853 - RNA, 20 nt, Human
cccuugaaagccucaggccc

SEQ ID NO: 347854 - RNA, 19 nt, Human
ccgaaaccuugcacagagg

SEQ ID NO: 347855 - RNA, 18 nt, Human
ccgcuccgccuuuccugg

SEQ ID NO: 347856 - RNA, 21 nt, Human
ccgcuccgccuuuccugggug

SEQ ID NO: 347857 - RNA, 23 nt, Human
ccggaaacgacaaaguucccaag

SEQ ID NO: 347858 - RNA, 21 nt, Human
ccgggacacguagagcggugg

SEQ ID NO: 347859 - RNA, 19 nt, Human
ccucacagauggcugcagg

SEQ ID NO: 347860 - RNA, 23 nt, Human
ccucagcccaccccgcagagcaa

SEQ ID NO: 347861 - RNA, 18 nt, Human
ccuccugccauuuccacc

SEQ ID NO: 347862 - RNA, 22 nt, Human
ccuccugccauuuccaccacac

SEQ ID NO: 347863 - RNA, 21 nt, Human
ccucucacacuucucccuuug

SEQ ID NO: 347864 - RNA, 21 nt, Human
ccucugagggaaaccaacagg

SEQ ID NO: 347865 - RNA, 20 nt, Human
ccugaaggugccggggugcc

SEQ ID NO: 347866 - RNA, 24 nt, Human
ccugccauuuccaccacacccgcc

SEQ ID NO: 347867 - RNA, 21 nt, Human
cgacaaaguucccaagaagca

SEQ ID NO: 347868 - RNA, 24 nt, Human
cgacagggacaccagccgacuacc

SEQ ID NO: 347869 - RNA, 21 nt, Human
cgacgcagccuaggggagccc

SEQ ID NO: 347870 - RNA, 22 nt, Human
cgcgggcauucccaaggguccg

SEQ ID NO: 347871 - RNA, 21 nt, Human
cggaaacaaaagccccguucc

SEQ ID NO: 347872 - RNA, 20 nt, Human
cggcgguuuccucccaagcc

SEQ ID NO: 347873 - RNA, 19 nt, Human
cggggacaggcacaggugg

SEQ ID NO: 347874 - RNA, 21 nt, Human
cguggacaauaccaggcuggg

SEQ ID NO: 347875 - RNA, 18 nt, Human
cucagagcacagggcagc

SEQ ID NO: 347876 - RNA, 23 nt, Human
cuccagcaaggccagugaggugg

SEQ ID NO: 347877 - RNA, 24 nt, Human
cuccagcacugccaccaggccgcc

SEQ ID NO: 347878 - RNA, 20 nt, Human
cuccaggccaccugcccccu

SEQ ID NO: 347879 - RNA, 20 nt, Human
cuccaggccaccugcccccu

SEQ ID NO: 347880 - RNA, 21 nt, Human
cucccaagccucgccgccguc

SEQ ID NO: 347881 - RNA, 18 nt, Human
cucccaaguaaggcucug

SEQ ID NO: 347882 - RNA, 22 nt, Human
cuccccacacaucaccuuuuca

SEQ ID NO: 347883 - RNA, 24 nt, Human
cuccccucaccacugaggaagccc

SEQ ID NO: 347884 - RNA, 18 nt, Human
cuccggguucucagauuc

SEQ ID NO: 347885 - RNA, 19 nt, Human
cuccugagccucaggagcc

SEQ ID NO: 347886 - RNA, 20 nt, Human
cuggcagccagagagaaggc

SEQ ID NO: 347887 - RNA, 21 nt, Human
cuguacaacuacaaggccgau

SEQ ID NO: 347888 - RNA, 19 nt, Human
cuguccccuccugauuagg

SEQ ID NO: 347889 - RNA, 23 nt, Human
cugugaguuaucuuuggaaaaag

SEQ ID NO: 347890 - RNA, 18 nt, Human
gaaaaaggggcuaccuuc

SEQ ID NO: 347891 - RNA, 21 nt, Human
gaagguccuggcaggccagcu

SEQ ID NO: 347892 - RNA, 18 nt, Human
gagccggcaacaggacac

SEQ ID NO: 347893 - RNA, 23 nt, Human
gagccugcgggaggagcgccagg

SEQ ID NO: 347894 - RNA, 19 nt, Human
gaggccccgucccugggcu

SEQ ID NO: 347895 - RNA, 21 nt, Human
gcaccagaucacgcaccccag

SEQ ID NO: 347896 - RNA, 24 nt, Human
gcacugccaccaggccgccagccc

SEQ ID NO: 347897 - RNA, 18 nt, Human
gcagagagaaaacagggg

SEQ ID NO: 347898 - RNA, 26 nt, Human
gcagagcagugacaggcugugccccc

SEQ ID NO: 347899 - RNA, 21 nt, Human
gcagccagagagaaggccuga

SEQ ID NO: 347900 - RNA, 21 nt, Human
gccacagacaaguaguaacag

SEQ ID NO: 347901 - RNA, 21 nt, Human
gccacgaaggcugcugccuca

SEQ ID NO: 347902 - RNA, 21 nt, Human
gccccaagccccgcccccacc

SEQ ID NO: 347903 - RNA, 26 nt, Human
gccccaagccccgcccccaccccacc

SEQ ID NO: 347904 - RNA, 23 nt, Human
gccccaucugaacggcaaagccg

SEQ ID NO: 347905 - RNA, 19 nt, Human
gcccugcggggaagccgcu

SEQ ID NO: 347906 - RNA, 21 nt, Human
gcggcgcaggcagcgggcggc

SEQ ID NO: 347907 - RNA, 21 nt, Human
gcggcugacacaggccccagg

SEQ ID NO: 347908 - RNA, 20 nt, Human
gcugacacaggccccagggu

SEQ ID NO: 347909 - RNA, 19 nt, Human
gcugcugccucaggaaagc

SEQ ID NO: 347910 - RNA, 20 nt, Human
gcuggggcccgaagacccug

SEQ ID NO: 347911 - RNA, 20 nt, Human
gcuguggccagggaggccag

SEQ ID NO: 347912 - RNA, 21 nt, Human
ggaaagcugccucuccaagcc

SEQ ID NO: 347913 - RNA, 19 nt, Human
ggaagacaagacccccucc

SEQ ID NO: 347914 - RNA, 19 nt, Human
ggaagguccuggcaggcca

SEQ ID NO: 347915 - RNA, 25 nt, Human
ggaagugggggcccugcggggaagc

SEQ ID NO: 347916 - RNA, 22 nt, Human
ggagcaucugccccacccacga

SEQ ID NO: 347917 - RNA, 19 nt, Human
ggccucacagauggcugca

SEQ ID NO: 347918 - RNA, 18 nt, Human
ggcggcgggcgcggcggc

SEQ ID NO: 347919 - RNA, 19 nt, Human
ggcggcggggaggagaggc

SEQ ID NO: 347920 - RNA, 23 nt, Human
ggcguucagugaggcucccaagu

SEQ ID NO: 347921 - RNA, 21 nt, Human
ggcucugggugaacaacgcug

SEQ ID NO: 347922 - RNA, 20 nt, Human
ggcuggggaggggccggggc

SEQ ID NO: 347923 - RNA, 21 nt, Human
gggaagacaagacccccuccg

SEQ ID NO: 347924 - RNA, 18 nt, Human
gggaagugggggcccugc

SEQ ID NO: 347925 - RNA, 21 nt, Human
gggaggccccaagccccgccc

SEQ ID NO: 347926 - RNA, 23 nt, Human
gggagucgggagucugaaaccag

SEQ ID NO: 347927 - RNA, 18 nt, Human
gggccccaagaguaccug

SEQ ID NO: 347928 - RNA, 18 nt, Human
gggcgcugcgacuccggg

SEQ ID NO: 347929 - RNA, 20 nt, Human
gggcggcggggaggagaggc

SEQ ID NO: 347930 - RNA, 22 nt, Human
ggggaaagacuauggagaaggc

SEQ ID NO: 347931 - RNA, 21 nt, Human
gggguguggcaggguguccug

SEQ ID NO: 347932 - RNA, 19 nt, Human
gggguuggcggccgggggg

SEQ ID NO: 347933 - RNA, 21 nt, Human
gggucaucuccagcacugcca

SEQ ID NO: 347934 - RNA, 22 nt, Human
ggguggccagaacgggugggca

SEQ ID NO: 347935 - RNA, 22 nt, Human
ggguguggcaggguguccugag

SEQ ID NO: 347936 - RNA, 19 nt, Human
gguccuggcaggccagcuu

SEQ ID NO: 347937 - RNA, 20 nt, Human
ggugagugacccgccccugc

SEQ ID NO: 347938 - RNA, 21 nt, Human
gguguggcaggguguccugag

SEQ ID NO: 347939 - RNA, 18 nt, Human
gguuggcggccggggggc

SEQ ID NO: 347940 - RNA, 18 nt, Human
guggccagggaggccagg

SEQ ID NO: 347941 - RNA, 26 nt, Human
gugggcgcuggcugcaaaaggcacca

SEQ ID NO: 347942 - RNA, 21 nt, Human
uaaacagcaacggaaacaaaa

SEQ ID NO: 347943 - RNA, 21 nt, Human
uaacagaaauaaggaggguga

SEQ ID NO: 347944 - RNA, 22 nt, Human
uacaaaaaaucaccuuaauuga

SEQ ID NO: 347945 - RNA, 25 nt, Human
uacagccagccagccagccagcgcc

SEQ ID NO: 347946 - RNA, 21 nt, Human
uacagguaugaggcucaacac

SEQ ID NO: 347947 - RNA, 22 nt, Human
uaccuucccccucacucagagc

SEQ ID NO: 347948 - RNA, 19 nt, Human
uacucagugaugagccgca

SEQ ID NO: 347949 - RNA, 18 nt, Human
uagagcgguggguaaggc

SEQ ID NO: 347950 - RNA, 20 nt, Human
ucacucagagcacagggcag

SEQ ID NO: 347951 - RNA, 20 nt, Human
ucccaguuccugagccccuc

SEQ ID NO: 347952 - RNA, 23 nt, Human
ucccauccccgcgggccucacag

SEQ ID NO: 347953 - RNA, 26 nt, Human
uccccacacaucaccuuuucaaacca

SEQ ID NO: 347954 - RNA, 19 nt, Human
uccccgcgggccucacaga

SEQ ID NO: 347955 - RNA, 20 nt, Human
uccugagccccucucucucc

SEQ ID NO: 347956 - RNA, 20 nt, Human
uccugagccucaggagcccc

SEQ ID NO: 347957 - RNA, 18 nt, Human
uccugggugccccacggg

SEQ ID NO: 347958 - RNA, 21 nt, Human
uccuggguggcgcuggugugc

SEQ ID NO: 347959 - RNA, 24 nt, Human
ucggaaaaccgaaggucagggcug

SEQ ID NO: 347960 - RNA, 25 nt, Human
ucuccaagccacugccucccggucc

SEQ ID NO: 347961 - RNA, 19 nt, Human
ucuccucucacacuucucc

SEQ ID NO: 347962 - RNA, 19 nt, Human
ucucuccacacgcgucucu

SEQ ID NO: 347963 - RNA, 18 nt, Human
ucuguccuggcguuucuc

SEQ ID NO: 347964 - RNA, 21 nt, Human
ugaaaccagaacaccaaggcu

SEQ ID NO: 347965 - RNA, 23 nt, Human
ugaaaggcagggguggagggcgg

SEQ ID NO: 347966 - RNA, 20 nt, Human
ugagccccucucucuccagg

SEQ ID NO: 347967 - RNA, 23 nt, Human
ugauuaaaaauaaacacaaaaca

SEQ ID NO: 347968 - RNA, 21 nt, Human
ugauuagggggaagcugucac

SEQ ID NO: 347969 - RNA, 22 nt, Human
ugcacucccaccgcuggggccc

SEQ ID NO: 347970 - RNA, 30 nt, Human
ugccccacccugcccgagccagggccagcc

SEQ ID NO: 347971 - RNA, 24 nt, Human
ugcccuggguccccaggaagcagc

SEQ ID NO: 347972 - RNA, 19 nt, Human
ugccucaggaaagccacug

SEQ ID NO: 347973 - RNA, 21 nt, Human
ugcuugccccacgaguccccu

SEQ ID NO: 347974 - RNA, 21 nt, Human
ugggaagacaagacccccucc

SEQ ID NO: 347975 - RNA, 19 nt, Human
ugggaagugggggcccugc

SEQ ID NO: 347976 - RNA, 20 nt, Human
ugggaagugggggcccugcg

SEQ ID NO: 347977 - RNA, 18 nt, Human
ugggaggggcccagcugg

SEQ ID NO: 347978 - RNA, 24 nt, Human
ugggcaccaguauucagagcagau

SEQ ID NO: 347979 - RNA, 18 nt, Human
ugggugaacaacgcuguc

SEQ ID NO: 347980 - RNA, 24 nt, Human
ugugaguuaucuuuggaaaaaggg

SEQ ID NO: 347981 - RNA, 18 nt, Human
uguggcccaggcccgagg

SEQ ID NO: 347982 - RNA, 23 nt, Human
uucacagucagucacaggaaggc

SEQ ID NO: 347983 - RNA, 18 nt, Human
uucccagaggccgugugc

SEQ ID NO: 347984 - RNA, 22 nt, Human
uuccugagccccucucucucca

SEQ ID NO: 347985 - RNA, 19 nt, Human
uugcguguuccuuuuccac

SEQ ID NO: 347986 - RNA, 29 nt, Human
uuggcggccggggggcuucaggguagucc

SEQ ID NO: 347987 - RNA, 25 nt, Human
uuggcggccggggggcuucagugcu

SEQ ID NO: 347988 - RNA, 20 nt, Human
uuguuucuccucucacacuu

SEQ ID NO: 347989 - RNA, 23 nt, Human
uuucucggacgaagcuuucaccu

SEQ ID NO: 347990 - RNA, 24 nt, Human
uuucucggacgaagcuuucaccuc

SEQ ID NO: 347991 - RNA, 24 nt, Human
uuuuaccuuuccagaugcuuuaga

SEQ ID NO: 347992 - RNA, 20 nt, Human
uuuuccacaauucuaaugcu

SEQ ID NO: 347993 - RNA, 24 nt, Human
uuuuccacaauucuaaugcuacug

SEQ ID NO: 347994 - RNA, 22 nt, Human
uuuuuuuuaccuuuccagaugc

SEQ ID NO: 347995 - RNA, 20 nt, Human
aaaaagagacucuggacagu

SEQ ID NO: 347996 - RNA, 24 nt, Human
aagcgauuuuauguaugagagggg

SEQ ID NO: 347997 - RNA, 24 nt, Human
aaggagccccaaagagaagggacg

SEQ ID NO: 347998 - RNA, 22 nt, Human
aaucaugcagccccagcacccc

SEQ ID NO: 347999 - RNA, 19 nt, Human
acucgugaaaccauccccu

SEQ ID NO: 348000 - RNA, 18 nt, Human
agacaggaagagaugggg

SEQ ID NO: 348001 - RNA, 19 nt, Human
agaguagggauaccgaaga

SEQ ID NO: 348002 - RNA, 24 nt, Human
aggaagcaagguccuggaggcaag

SEQ ID NO: 348003 - RNA, 21 nt, Human
aggcaagaugagaaggaagca

SEQ ID NO: 348004 - RNA, 19 nt, Human
aggggaaaggagccccaaa

SEQ ID NO: 348005 - RNA, 22 nt, Human
aucuccaccagccccuucacca

SEQ ID NO: 348006 - RNA, 19 nt, Human
augcuaugugcccagggcu

SEQ ID NO: 348007 - RNA, 21 nt, Human
caaaaugacagcgccaaugug

SEQ ID NO: 348008 - RNA, 23 nt, Human
caaggccaccgaagagagacaac

SEQ ID NO: 348009 - RNA, 21 nt, Human
cacagcccaggccccuucccc

SEQ ID NO: 348010 - RNA, 22 nt, Human
cacagcccaggccccuucccca

SEQ ID NO: 348011 - RNA, 19 nt, Human
caccacuggcauuucuuag

SEQ ID NO: 348012 - RNA, 21 nt, Human
caccccaaaucaugggagacu

SEQ ID NO: 348013 - RNA, 22 nt, Human
caccgaagagagacaaccaguc

SEQ ID NO: 348014 - RNA, 23 nt, Human
caccuccccucaauucucaggcc

SEQ ID NO: 348015 - RNA, 23 nt, Human
cagcaccccaccucugcggggaa

SEQ ID NO: 348016 - RNA, 19 nt, Human
cagcccaggccccuucccc

SEQ ID NO: 348017 - RNA, 19 nt, Human
cagccccuucaccaccacc

SEQ ID NO: 348018 - RNA, 22 nt, Human
cagcuugggaggccugcccccc

SEQ ID NO: 348019 - RNA, 22 nt, Human
caggauccuguguccccagccu

SEQ ID NO: 348020 - RNA, 20 nt, Human
cagggccccucccucuucca

SEQ ID NO: 348021 - RNA, 21 nt, Human
caguauccaccucugggggag

SEQ ID NO: 348022 - RNA, 21 nt, Human
caugcagccccagcaccccac

SEQ ID NO: 348023 - RNA, 22 nt, Human
caugcagccccagcaccccacc

SEQ ID NO: 348024 - RNA, 18 nt, Human
ccaaaaugacagcgccaa

SEQ ID NO: 348025 - RNA, 20 nt, Human
ccaauguggcagccaucuuu

SEQ ID NO: 348026 - RNA, 19 nt, Human
cccaccuccaccacuggca

SEQ ID NO: 348027 - RNA, 18 nt, Human
cccagcaccccaccucug

SEQ ID NO: 348028 - RNA, 20 nt, Human
cccaguauccaccucugggg

SEQ ID NO: 348029 - RNA, 21 nt, Human
cccaucugccagguuugagag

SEQ ID NO: 348030 - RNA, 19 nt, Human
ccccaucaagguucuggga

SEQ ID NO: 348031 - RNA, 21 nt, Human
ccccccacccugccccagggc

SEQ ID NO: 348032 - RNA, 24 nt, Human
ccccugagagaaagacucuggccu

SEQ ID NO: 348033 - RNA, 19 nt, Human
cccugccccagggcuugga

SEQ ID NO: 348034 - RNA, 23 nt, Human
ccgucgcucugcucaguaccaaa

SEQ ID NO: 348035 - RNA, 21 nt, Human
ccuaugcuaugugcccagggc

SEQ ID NO: 348036 - RNA, 19 nt, Human
ccucacagcccaggccccu

SEQ ID NO: 348037 - RNA, 19 nt, Human
ccuguccucacagcccagg

SEQ ID NO: 348038 - RNA, 18 nt, Human
cuucaccaccaccaccac

SEQ ID NO: 348039 - RNA, 19 nt, Human
cuuggagagcccuagggac

SEQ ID NO: 348040 - RNA, 20 nt, Human
gaaaggagccccaaagagaa

SEQ ID NO: 348041 - RNA, 20 nt, Human
gagaaggaagcaagguccug

SEQ ID NO: 348042 - RNA, 22 nt, Human
gagaaggaagcaagguccugga

SEQ ID NO: 348043 - RNA, 18 nt, Human
gaucgguuccuacaucuc

SEQ ID NO: 348044 - RNA, 20 nt, Human
gcagccccagcaccccaccu

SEQ ID NO: 348045 - RNA, 24 nt, Human
gcagggcaaaaaucaugcagcccc

SEQ ID NO: 348046 - RNA, 19 nt, Human
gcccaggccccuuccccaa

SEQ ID NO: 348047 - RNA, 21 nt, Human
gccccagcaccccaccucugc

SEQ ID NO: 348048 - RNA, 21 nt, Human
gccugccccccaguauccacc

SEQ ID NO: 348049 - RNA, 19 nt, Human
gcgggcuggccaccucccc

SEQ ID NO: 348050 - RNA, 20 nt, Human
gcgggcuggccaccuccccu

SEQ ID NO: 348051 - RNA, 22 nt, Human
gcucugcucaguaccaaaauga

SEQ ID NO: 348052 - RNA, 21 nt, Human
ggaaaggagccccaaagagaa

SEQ ID NO: 348053 - RNA, 19 nt, Human
ggaagcaaaaugaggcaag

SEQ ID NO: 348054 - RNA, 20 nt, Human
ggaguuccccauuuccacuc

SEQ ID NO: 348055 - RNA, 25 nt, Human
ggcccugccuuucccaaacacccac

SEQ ID NO: 348056 - RNA, 19 nt, Human
gggcccuguccucacagcc

SEQ ID NO: 348057 - RNA, 19 nt, Human
gggcuggccaccuccccuc

SEQ ID NO: 348058 - RNA, 22 nt, Human
gggggcccuguccucacagccc

SEQ ID NO: 348059 - RNA, 21 nt, Human
ggggggcggcgggaagcuggg

SEQ ID NO: 348060 - RNA, 21 nt, Human
gggggggcggcgggaagcugg

SEQ ID NO: 348061 - RNA, 19 nt, Human
gguuccuacaucuccacca

SEQ ID NO: 348062 - RNA, 23 nt, Human
uaaaaauagcagaucgguuccua

SEQ ID NO: 348063 - RNA, 19 nt, Human
uaauuugaaagcgauuuua

SEQ ID NO: 348064 - RNA, 25 nt, Human
uacaucuccaccagccccuucacca

SEQ ID NO: 348065 - RNA, 24 nt, Human
uagacaggaagagauggggggggc

SEQ ID NO: 348066 - RNA, 19 nt, Human
uagcugagcacgaggaagc

SEQ ID NO: 348067 - RNA, 20 nt, Human
ucagucugacugcagaagga

SEQ ID NO: 348068 - RNA, 18 nt, Human
uccacucuucagauggga

SEQ ID NO: 348069 - RNA, 22 nt, Human
uccagagaggcccccaucugcc

SEQ ID NO: 348070 - RNA, 20 nt, Human
uccccagccuaugcuaugug

SEQ ID NO: 348071 - RNA, 21 nt, Human
ucccuggcugagaguagggau

SEQ ID NO: 348072 - RNA, 27 nt, Human
ucccuuggaggguuuauguucuugacc

SEQ ID NO: 348073 - RNA, 20 nt, Human
ucgcucugcucaguaccaaa

SEQ ID NO: 348074 - RNA, 21 nt, Human
ucgcucugcucaguaccaaaa

SEQ ID NO: 348075 - RNA, 24 nt, Human
ucuuccagagaggcccccaucugc

SEQ ID NO: 348076 - RNA, 22 nt, Human
ugacagggccccucccucuucc

SEQ ID NO: 348077 - RNA, 21 nt, Human
ugagaaggaagcaagguccug

SEQ ID NO: 348078 - RNA, 18 nt, Human
ugagaggggaaaggagcc

SEQ ID NO: 348079 - RNA, 21 nt, Human
ugagaggggaaaggagcccca

SEQ ID NO: 348080 - RNA, 18 nt, Human
ugagaguagggauaccga

SEQ ID NO: 348081 - RNA, 25 nt, Human
uggcauuucuuagucaaccugggaa

SEQ ID NO: 348082 - RNA, 22 nt, Human
uggggggggcggcgggaagcug

SEQ ID NO: 348083 - RNA, 23 nt, Human
uggggggggcggcgggaagcugg

SEQ ID NO: 348084 - RNA, 24 nt, Human
uggggggggcggcgggaagcuggg

SEQ ID NO: 348085 - RNA, 18 nt, Human
uguaaagggaaggccucc

SEQ ID NO: 348086 - RNA, 19 nt, Human
ugucagggcccuacucuca

SEQ ID NO: 348087 - RNA, 24 nt, Human
ugugcugggggaaggacagagggu

SEQ ID NO: 348088 - RNA, 21 nt, Human
ugugggggcccuguccucaca

SEQ ID NO: 348089 - RNA, 23 nt, Human
ugugggggcccuguccucacagg

SEQ ID NO: 348090 - RNA, 23 nt, Human
uucugcccuguacuucucacccc

SEQ ID NO: 348091 - RNA, 21 nt, Human
uuggaugugugcuccuccagu

SEQ ID NO: 348092 - RNA, 22 nt, Human
uuucagggcccugccuuuccca

SEQ ID NO: 348093 - RNA, 23 nt, Human
uuucccaaacacccaccuccacc

SEQ ID NO: 348094 - RNA, 24 nt, Human
uuuuuuuuuuuuuuuuuuaauuug

SEQ ID NO: 348095 - RNA, 20 nt, Human
accgccucucucggcuccca

SEQ ID NO: 348096 - RNA, 19 nt, Human
aggaaagugcagggugggg

SEQ ID NO: 348097 - RNA, 19 nt, Human
caacuugggcuaacaagag

SEQ ID NO: 348098 - RNA, 22 nt, Human
cagcuucuaaauauuaccgccu

SEQ ID NO: 348099 - RNA, 27 nt, Human
caggguggggguccacacacaccugcc

SEQ ID NO: 348100 - RNA, 18 nt, Human
caguucauguuccucucc

SEQ ID NO: 348101 - RNA, 19 nt, Human
caguucauguuccucuccu

SEQ ID NO: 348102 - RNA, 23 nt, Human
caguucauguuccucuccugugc

SEQ ID NO: 348103 - RNA, 19 nt, Human
ccacacacaccugcccagg

SEQ ID NO: 348104 - RNA, 21 nt, Human
ccuggguggggaggcuguggc

SEQ ID NO: 348105 - RNA, 18 nt, Human
cggggagcacaggcuggg

SEQ ID NO: 348106 - RNA, 21 nt, Human
cucccaggcacagcccggcuu

SEQ ID NO: 348107 - RNA, 21 nt, Human
gacaggaagggggucagggug

SEQ ID NO: 348108 - RNA, 22 nt, Human
gacaggaagggggucagggugg

SEQ ID NO: 348109 - RNA, 19 nt, Human
gagcacaggcugggccagc

SEQ ID NO: 348110 - RNA, 21 nt, Human
gcagcccggggagcacaggcu

SEQ ID NO: 348111 - RNA, 24 nt, Human
gcccggggagcacaggcugggcca

SEQ ID NO: 348112 - RNA, 18 nt, Human
ggacaggaagggggucag

SEQ ID NO: 348113 - RNA, 20 nt, Human
ggagguggaggaaagugcag

SEQ ID NO: 348114 - RNA, 24 nt, Human
ggagguggaggaaagugcagggug

SEQ ID NO: 348115 - RNA, 21 nt, Human
ggggucagggugggaggugga

SEQ ID NO: 348116 - RNA, 27 nt, Human
gggugggagguggaggaaagugcaggg

SEQ ID NO: 348117 - RNA, 26 nt, Human
ggugggagguggaggaaagugcaggg

SEQ ID NO: 348118 - RNA, 19 nt, Human
gucauccuggguggggagg

SEQ ID NO: 348119 - RNA, 20 nt, Human
ucagggugggagguggagga

SEQ ID NO: 348120 - RNA, 20 nt, Human
ucauccuggguggggaggcu

SEQ ID NO: 348121 - RNA, 22 nt, Human
uccacacacaccugcccagggg

SEQ ID NO: 348122 - RNA, 23 nt, Human
ugcccaggggucauccugggugg

SEQ ID NO: 348123 - RNA, 20 nt, Human
ugggagguggaggaaagugc

SEQ ID NO: 348124 - RNA, 22 nt, Human
ugggauuagucaggaaucugcc

SEQ ID NO: 348125 - RNA, 21 nt, Human
uggggguccacacacaccugc

SEQ ID NO: 348126 - RNA, 19 nt, Human
uuuggggacaggaaggggg

SEQ ID NO: 348127 - RNA, 19 nt, Human
uuuuuuuuuuuuuuuuugu

SEQ ID NO: 348128 - RNA, 20 nt, Human
uuuuuuuuuuuuuuuuuugg

SEQ ID NO: 348129 - RNA, 19 nt, Human
agaccucuggagacaccag

SEQ ID NO: 348130 - RNA, 21 nt, Human
agggagggggcugcgggcugg

SEQ ID NO: 348131 - RNA, 21 nt, Human
agggagggggcugcgggcugg

SEQ ID NO: 348132 - RNA, 21 nt, Human
agguggggguggagggccagc

SEQ ID NO: 348133 - RNA, 22 nt, Human
cacuugagguggggguggaggg

SEQ ID NO: 348134 - RNA, 22 nt, Human
ccagggucugaggucggggaac

SEQ ID NO: 348135 - RNA, 19 nt, Human
cgaggucggaagcccaggg

SEQ ID NO: 348136 - RNA, 25 nt, Human
cggaagcccagggucugaggucggg

SEQ ID NO: 348137 - RNA, 23 nt, Human
cgggcugggcgggagggcugggg

SEQ ID NO: 348138 - RNA, 21 nt, Human
gaagcccagggucugaggucg

SEQ ID NO: 348139 - RNA, 24 nt, Human
gaggggcuuggggacuaaggggcu

SEQ ID NO: 348140 - RNA, 22 nt, Human
ggaacagagggagggggcugcg

SEQ ID NO: 348141 - RNA, 19 nt, Human
ggcacuugaggugggggug

SEQ ID NO: 348142 - RNA, 23 nt, Human
gggaggggcuuggggacuaaggg

SEQ ID NO: 348143 - RNA, 19 nt, Human
gggagggggcugcgggcug

SEQ ID NO: 348144 - RNA, 22 nt, Human
gggagggggcugcgggcugggc

SEQ ID NO: 348145 - RNA, 18 nt, Human
gggcgggagggcuggggg

SEQ ID NO: 348146 - RNA, 21 nt, Human
gggcugggcgggagggcuggg

SEQ ID NO: 348147 - RNA, 23 nt, Human
gggcugggcgggagggcuggggg

SEQ ID NO: 348148 - RNA, 18 nt, Human
ggggcugcgggcugggcg

SEQ ID NO: 348149 - RNA, 21 nt, Human
gggggcugcgggcugggcgac

SEQ ID NO: 348150 - RNA, 25 nt, Human
gucggggaacagagggagggggcug

SEQ ID NO: 348151 - RNA, 27 nt, Human
guggggguggagggccagcugggggug

SEQ ID NO: 348152 - RNA, 24 nt, Human
ugagguggggguggagggccagcu

SEQ ID NO: 348153 - RNA, 19 nt, Human
ugccuuagggggaggggcu

SEQ ID NO: 348154 - RNA, 18 nt, Human
ugggggcgggcugggguc

SEQ ID NO: 348155 - RNA, 19 nt, Human
uggggguggagggccagcu

SEQ ID NO: 348156 - RNA, 21 nt, Human
aaacagagcuucgaugcuccc

SEQ ID NO: 348157 - RNA, 23 nt, Human
aagaaaggucgacauaaagaaaa

SEQ ID NO: 348158 - RNA, 18 nt, Human
acuccgggagucucagaa

SEQ ID NO: 348159 - RNA, 25 nt, Human
agaaaagaaaggucgacauaaagaa

SEQ ID NO: 348160 - RNA, 21 nt, Human
agaaaagacuaaaggaaaaaa

SEQ ID NO: 348161 - RNA, 22 nt, Human
agaaaggucgacauaaagaaaa

SEQ ID NO: 348162 - RNA, 21 nt, Human
agccgggggcuggagggggcc

SEQ ID NO: 348163 - RNA, 24 nt, Human
aggaaaaaaaaaaaaccucacaaa

SEQ ID NO: 348164 - RNA, 25 nt, Human
aggaaaaaaaaaaaaccucacaaaa

SEQ ID NO: 348165 - RNA, 22 nt, Human
agguggggggaggaaacagcuc

SEQ ID NO: 348166 - RNA, 25 nt, Human
agguggggggaggaaacaggggacc

SEQ ID NO: 348167 - RNA, 21 nt, Human
caugcacguaucuucugcaua

SEQ ID NO: 348168 - RNA, 20 nt, Human
ccacuaaagaaaagacuaaa

SEQ ID NO: 348169 - RNA, 26 nt, Human
ccucccccacuaaagaaaagacuaaa

SEQ ID NO: 348170 - RNA, 23 nt, Human
ccuucugcuucugcugccgggag

SEQ ID NO: 348171 - RNA, 24 nt, Human
ccuucugcuucugcugccgggagc

SEQ ID NO: 348172 - RNA, 21 nt, Human
cggcggcggcggcggccccug

SEQ ID NO: 348173 - RNA, 19 nt, Human
cuaaagaaaagacuaaagg

SEQ ID NO: 348174 - RNA, 25 nt, Human
cuaaaggaaaaaaaaaaaaccucac

SEQ ID NO: 348175 - RNA, 27 nt, Human
cucggcggcggcggcggccccuggcgc

SEQ ID NO: 348176 - RNA, 22 nt, Human
gaaaacacacaucgcuggcaau

SEQ ID NO: 348177 - RNA, 24 nt, Human
gacacaccacccguuuuuuuuuuu

SEQ ID NO: 348178 - RNA, 18 nt, Human
gaggaaacagcucuuccg

SEQ ID NO: 348179 - RNA, 22 nt, Human
gcggcggcggcggccccuggcg

SEQ ID NO: 348180 - RNA, 20 nt, Human
gcugggugaguguggcugcc

SEQ ID NO: 348181 - RNA, 26 nt, Human
ggagccgggggcuggagggggccgcg

SEQ ID NO: 348182 - RNA, 19 nt, Human
ggagcucggcggcggcggc

SEQ ID NO: 348183 - RNA, 21 nt, Human
ggagcucggcggcggcggcgg

SEQ ID NO: 348184 - RNA, 21 nt, Human
ggugaaauaaagaggcugggu

SEQ ID NO: 348185 - RNA, 18 nt, Human
guccugagacacaccacc

SEQ ID NO: 348186 - RNA, 19 nt, Human
uaagugcuacagugcucug

SEQ ID NO: 348187 - RNA, 19 nt, Human
uagcucgagaagacuccgg

SEQ ID NO: 348188 - RNA, 21 nt, Human
uagcucgagaagacuccggga

SEQ ID NO: 348189 - RNA, 18 nt, Human
uagcugaaugagaagagc

SEQ ID NO: 348190 - RNA, 22 nt, Human
uccagaauuccuuuuuuugucu

SEQ ID NO: 348191 - RNA, 21 nt, Human
uccaggauggugaaauaaaga

SEQ ID NO: 348192 - RNA, 20 nt, Human
ucccgagccccgcggagcuc

SEQ ID NO: 348193 - RNA, 20 nt, Human
ucuaagaaaagaaaggucga

SEQ ID NO: 348194 - RNA, 19 nt, Human
ugaaauaaagaggcugggu

SEQ ID NO: 348195 - RNA, 18 nt, Human
ugacaguguccagaaugg

SEQ ID NO: 348196 - RNA, 20 nt, Human
ugagagagggagagagaggg

SEQ ID NO: 348197 - RNA, 18 nt, Human
ugcaaacugcuuuucuua

SEQ ID NO: 348198 - RNA, 20 nt, Human
ugcuuuucuuacccuccccc

SEQ ID NO: 348199 - RNA, 23 nt, Human
uggggggaggaaacagcucuucc

SEQ ID NO: 348200 - RNA, 19 nt, Human
uucacaaaaucagcaaaau

SEQ ID NO: 348201 - RNA, 25 nt, Human
uuccgcgccuccucgccggggccgg

SEQ ID NO: 348202 - RNA, 22 nt, Human
uuuuucuuuuuaagugcaaacu

SEQ ID NO: 348203 - RNA, 21 nt, Human
uuuuuuuuuuuucuuuuuaag

SEQ ID NO: 348204 - RNA, 23 nt, Human
aaaaacuuguaugaauaaccuuc

SEQ ID NO: 348205 - RNA, 23 nt, Human
aaaucaauuucaaaauagcacag

SEQ ID NO: 348206 - RNA, 23 nt, Human
aacacaaacauaaaaaacuugca

SEQ ID NO: 348207 - RNA, 20 nt, Human
aagggaggcauuuagaaaau

SEQ ID NO: 348208 - RNA, 20 nt, Human
acugcaguuauuaucuuuug

SEQ ID NO: 348209 - RNA, 24 nt, Human
cagccuccggcgccucugcuuccc

SEQ ID NO: 348210 - RNA, 21 nt, Human
cauaaaaaacuugcauagcua

SEQ ID NO: 348211 - RNA, 21 nt, Human
cauuuagaaaaugucacauuu

SEQ ID NO: 348212 - RNA, 19 nt, Human
ccuagagauuacuugauuc

SEQ ID NO: 348213 - RNA, 21 nt, Human
cucagaacuggaaaacuugaa

SEQ ID NO: 348214 - RNA, 18 nt, Human
cuucgccuuccuucuucg

SEQ ID NO: 348215 - RNA, 23 nt, Human
cuucgccuuccuucuucgacauu

SEQ ID NO: 348216 - RNA, 22 nt, Human
gaacuaguuaccucagaacugg

SEQ ID NO: 348217 - RNA, 21 nt, Human
gaacuggaaaacuugaaggca

SEQ ID NO: 348218 - RNA, 25 nt, Human
gagcagcuccacuacuuacaaggga

SEQ ID NO: 348219 - RNA, 18 nt, Human
gcagugggcacuucauug

SEQ ID NO: 348220 - RNA, 23 nt, Human
gugucgguuuuuuucuguuucuu

SEQ ID NO: 348221 - RNA, 19 nt, Human
uaacagcaguugacugaca

SEQ ID NO: 348222 - RNA, 21 nt, Human
uaagacggaagaucacaacua

SEQ ID NO: 348223 - RNA, 19 nt, Human
uacaagggaccauaaagca

SEQ ID NO: 348224 - RNA, 25 nt, Human
uaccaugggaaaaauuagacugcag

SEQ ID NO: 348225 - RNA, 24 nt, Human
uaugaauaaccuucaagugcaguu

SEQ ID NO: 348226 - RNA, 20 nt, Human
ucuuuuggagugaguucaga

SEQ ID NO: 348227 - RNA, 23 nt, Human
ugaaggcauuugccuagagauua

SEQ ID NO: 348228 - RNA, 22 nt, Human
ugaggagauucaccuaaacaga

SEQ ID NO: 348229 - RNA, 18 nt, Human
ugauucuucgccuuccuu

SEQ ID NO: 348230 - RNA, 18 nt, Human
ugccuagagauuacuuga

SEQ ID NO: 348231 - RNA, 21 nt, Human
uggaacacaaacauaaaaaac

SEQ ID NO: 348232 - RNA, 22 nt, Human
uggaacacaaacauaaaaaacu

SEQ ID NO: 348233 - RNA, 18 nt, Human
uggagugaguucagaccc

SEQ ID NO: 348234 - RNA, 19 nt, Human
ugggaaaaauuagacugca

SEQ ID NO: 348235 - RNA, 22 nt, Human
uguaaaaaggggacuuuauuuc

SEQ ID NO: 348236 - RNA, 19 nt, Human
ugucacauuucagauaugu

SEQ ID NO: 348237 - RNA, 19 nt, Human
uguugcagaacuguaaaaa

SEQ ID NO: 348238 - RNA, 22 nt, Human
uguugcagaacuguaaaaaggg

SEQ ID NO: 348239 - RNA, 19 nt, Human
uuagaaaaugucacauuuc

SEQ ID NO: 348240 - RNA, 23 nt, Human
uugacagguucucucccacagug

SEQ ID NO: 348241 - RNA, 22 nt, Human
uugcagaacuguaaaaagggga

SEQ ID NO: 348242 - RNA, 20 nt, Human
uuucaugggaaguugacugu

SEQ ID NO: 348243 - RNA, 21 nt, Human
uuuuuauugguacguauuacu

SEQ ID NO: 348244 - RNA, 23 nt, Human
aagaggcaggucugggagggugg

SEQ ID NO: 348245 - RNA, 21 nt, Human
aagcagggggaagaggcaggu

SEQ ID NO: 348246 - RNA, 22 nt, Human
agaggcaggucugggagggugg

SEQ ID NO: 348247 - RNA, 18 nt, Human
auggagagggauaagugg

SEQ ID NO: 348248 - RNA, 22 nt, Human
cagugcacgguuggccugggcc

SEQ ID NO: 348249 - RNA, 20 nt, Human
cccuuggugggggugggggu

SEQ ID NO: 348250 - RNA, 22 nt, Human
cgcccuuggugggggugggggu

SEQ ID NO: 348251 - RNA, 19 nt, Human
cugggaggguggagaggaa

SEQ ID NO: 348252 - RNA, 19 nt, Human
gccugaggugggagcaggu

SEQ ID NO: 348253 - RNA, 20 nt, Human
gcuggagcuguguguggaga

SEQ ID NO: 348254 - RNA, 23 nt, Human
ggcaagggugggguuauggagag

SEQ ID NO: 348255 - RNA, 18 nt, Human
gggaagaggcaggucugg

SEQ ID NO: 348256 - RNA, 20 nt, Human
gggaagaggcaggucuggga

SEQ ID NO: 348257 - RNA, 21 nt, Human
gggaagaggcaggucugggag

SEQ ID NO: 348258 - RNA, 18 nt, Human
gggagcagguucuggaca

SEQ ID NO: 348259 - RNA, 28 nt, Human
gggcaagggugggguuauggggacugcc

SEQ ID NO: 348260 - RNA, 24 nt, Human
ggggaagaggcaggucugggaggg

SEQ ID NO: 348261 - RNA, 23 nt, Human
ggggguggggugggcaagggugg

SEQ ID NO: 348262 - RNA, 26 nt, Human
ggggguggggugggcaaggguggggu

SEQ ID NO: 348263 - RNA, 20 nt, Human
gggguggggguggggugggc

SEQ ID NO: 348264 - RNA, 18 nt, Human
gggguggggugggcaagg

SEQ ID NO: 348265 - RNA, 19 nt, Human
gggguggggugggcaaggg

SEQ ID NO: 348266 - RNA, 19 nt, Human
gggguggggugggcaaggg

SEQ ID NO: 348267 - RNA, 18 nt, Human
ggguggggugggcaaggg

SEQ ID NO: 348268 - RNA, 18 nt, Human
gggugggguuauggagag

SEQ ID NO: 348269 - RNA, 24 nt, Human
ggugagguggaagcagggggaaga

SEQ ID NO: 348270 - RNA, 24 nt, Human
uacucuugcgcccuuggugggggu

SEQ ID NO: 348271 - RNA, 21 nt, Human
ucugggaggguggagaggaag

SEQ ID NO: 348272 - RNA, 24 nt, Human
ugaggugggagcagguucuggaca

SEQ ID NO: 348273 - RNA, 21 nt, Human
ugcagcagugcacgguuggcc

SEQ ID NO: 348274 - RNA, 21 nt, Human
ugggagcagguucuggacaga

SEQ ID NO: 348275 - RNA, 18 nt, Human
uggggguggggguggggu

SEQ ID NO: 348276 - RNA, 19 nt, Human
uggggguggggugggcaag

SEQ ID NO: 348277 - RNA, 22 nt, Human
uggggugagguggaagcagggg

SEQ ID NO: 348278 - RNA, 23 nt, Human
ugguggggguggggguggggucg

SEQ ID NO: 348279 - RNA, 24 nt, Human
uggugggggugggggugggguggg

SEQ ID NO: 348280 - RNA, 26 nt, Human
uuggaccgcuacucuugcgcccuugg

SEQ ID NO: 348281 - RNA, 19 nt, Human
uuggugggggugggggugg

SEQ ID NO: 348282 - RNA, 21 nt, Human
aauacaaaaaucaaaagcuua

SEQ ID NO: 348283 - RNA, 23 nt, Human
aauacaaaaaucaaaagcuuauu

SEQ ID NO: 348284 - RNA, 19 nt, Human
acccugcagggaguggcac

SEQ ID NO: 348285 - RNA, 20 nt, Human
accucagaggcacuaucaga

SEQ ID NO: 348286 - RNA, 18 nt, Human
acgcggggcggagaggcg

SEQ ID NO: 348287 - RNA, 19 nt, Human
agaggcgagcgcggcgggc

SEQ ID NO: 348288 - RNA, 25 nt, Human
caaacaauacaaaaaucaaaagcuu

SEQ ID NO: 348289 - RNA, 25 nt, Human
caacucuuaucagggaggagcgaac

SEQ ID NO: 348290 - RNA, 19 nt, Human
cagggcauccccacccuga

SEQ ID NO: 348291 - RNA, 22 nt, Human
ccccacccugagccugcccuuc

SEQ ID NO: 348292 - RNA, 24 nt, Human
ccccagaagccgggcuucccgccu

SEQ ID NO: 348293 - RNA, 24 nt, Human
cccccgaccccgggcgcgcggccc

SEQ ID NO: 348294 - RNA, 20 nt, Human
cccccgacucccccgacccc

SEQ ID NO: 348295 - RNA, 23 nt, Human
cccccucuuccugcccccgacuc

SEQ ID NO: 348296 - RNA, 24 nt, Human
cccgaccccgggcgcgcggcccac

SEQ ID NO: 348297 - RNA, 24 nt, Human
ccucccccucuuccugcccccgac

SEQ ID NO: 348298 - RNA, 23 nt, Human
ccugcccccgacucccccgaccc

SEQ ID NO: 348299 - RNA, 21 nt, Human
ccugucuccucccccucuucc

SEQ ID NO: 348300 - RNA, 22 nt, Human
ccuuggccgaggcgcggcggac

SEQ ID NO: 348301 - RNA, 21 nt, Human
cgaauauuucagggcaucccc

SEQ ID NO: 348302 - RNA, 22 nt, Human
cgcccugcccucgcucccggac

SEQ ID NO: 348303 - RNA, 23 nt, Human
cgcggcccacgcccugcccucgc

SEQ ID NO: 348304 - RNA, 18 nt, Human
cgcggcggacgcugggcg

SEQ ID NO: 348305 - RNA, 19 nt, Human
cggagaggcgagcgcggcg

SEQ ID NO: 348306 - RNA, 21 nt, Human
cggcgggcugugcgccuuccu

SEQ ID NO: 348307 - RNA, 21 nt, Human
cgggcgcgcggcccacgcccu

SEQ ID NO: 348308 - RNA, 22 nt, Human
cucaugaaauccuucuaugggg

SEQ ID NO: 348309 - RNA, 20 nt, Human
cuccccagaagccgggcuuc

SEQ ID NO: 348310 - RNA, 26 nt, Human
cucccccgaccccgggcgcgcggccc

SEQ ID NO: 348311 - RNA, 22 nt, Human
cucgaauauuucagggcauccc

SEQ ID NO: 348312 - RNA, 23 nt, Human
cucgcagaggccucgcccgcccc

SEQ ID NO: 348313 - RNA, 20 nt, Human
cuuccugcccccgacucccc

SEQ ID NO: 348314 - RNA, 24 nt, Human
cuuccugcccccgacucccccgac

SEQ ID NO: 348315 - RNA, 19 nt, Human
gaaacgguccugcucucga

SEQ ID NO: 348316 - RNA, 20 nt, Human
gagaggcgagcgcggcgggc

SEQ ID NO: 348317 - RNA, 21 nt, Human
gagcgcggcgggcugugcgcc

SEQ ID NO: 348318 - RNA, 22 nt, Human
gcaccuccccagaagccgggcu

SEQ ID NO: 348319 - RNA, 19 nt, Human
ggcggcgcgggagcgggag

SEQ ID NO: 348320 - RNA, 22 nt, Human
ggggcggagaggcgagcgcggc

SEQ ID NO: 348321 - RNA, 22 nt, Human
guaaacuucucuucaguagaaa

SEQ ID NO: 348322 - RNA, 21 nt, Human
guccugcucucgaauauuuca

SEQ ID NO: 348323 - RNA, 19 nt, Human
uaacuuuucuuucucugcu

SEQ ID NO: 348324 - RNA, 20 nt, Human
uacaaaucaaagaacccggc

SEQ ID NO: 348325 - RNA, 18 nt, Human
ucagauuagcccuaggag

SEQ ID NO: 348326 - RNA, 19 nt, Human
ucccccagcccugucuccu

SEQ ID NO: 348327 - RNA, 22 nt, Human
ucccccagcccugucuccuccc

SEQ ID NO: 348328 - RNA, 22 nt, Human
uccugcggguggggcacgcugg

SEQ ID NO: 348329 - RNA, 21 nt, Human
ucucggguuugguuuuagaaa

SEQ ID NO: 348330 - RNA, 22 nt, Human
ucucugcuugucaaaugagagu

SEQ ID NO: 348331 - RNA, 21 nt, Human
ugcccccgacucccccgaccc

SEQ ID NO: 348332 - RNA, 19 nt, Human
ugcccucgcucccggaccc

SEQ ID NO: 348333 - RNA, 26 nt, Human
ugcccuuccucucggguuugguuuua

SEQ ID NO: 348334 - RNA, 18 nt, Human
uguacaaaucaaagaacc

SEQ ID NO: 348335 - RNA, 22 nt, Human
uuuuacauuugcuaaguguccu

SEQ ID NO: 348336 - RNA, 21 nt, Human
agcucugugcgcgcggcgucg

SEQ ID NO: 348337 - RNA, 23 nt, Human
caggggaugggugggcuguggag

SEQ ID NO: 348338 - RNA, 21 nt, Human
ccucaacccacgcccuucccg

SEQ ID NO: 348339 - RNA, 24 nt, Human
cgggaggcuguggcugggagcggc

SEQ ID NO: 348340 - RNA, 21 nt, Human
cuggagccucuccucaaccca

SEQ ID NO: 348341 - RNA, 23 nt, Human
gaugacagaaaggcuggaaggaa

SEQ ID NO: 348342 - RNA, 21 nt, Human
gcccuucccggcccagccuug

SEQ ID NO: 348343 - RNA, 22 nt, Human
gcgcgcggcgugcgggucugga

SEQ ID NO: 348344 - RNA, 19 nt, Human
gcgcggcgugcgggucugg

SEQ ID NO: 348345 - RNA, 21 nt, Human
gcgcggcgugcgggucuggag

SEQ ID NO: 348346 - RNA, 20 nt, Human
ggcugggagcggcgcugaga

SEQ ID NO: 348347 - RNA, 23 nt, Human
gggaggcuguggcugggagcggc

SEQ ID NO: 348348 - RNA, 18 nt, Human
ggggaugggugggcugug

SEQ ID NO: 348349 - RNA, 25 nt, Human
uagugugcucaggggaugggugggc

SEQ ID NO: 348350 - RNA, 22 nt, Human
ugacagaaaggcuggaaggaaa

SEQ ID NO: 348351 - RNA, 25 nt, Human
ugcucaggggaugggugggcugugg

SEQ ID NO: 348352 - RNA, 18 nt, Human
ugggcuguggagaugaug

SEQ ID NO: 348353 - RNA, 18 nt, Human
ugugcgcgcggcgugcgg

SEQ ID NO: 348354 - RNA, 21 nt, Human
agaaaagacccucauugagga

SEQ ID NO: 348355 - RNA, 19 nt, Human
aggcuggguuuuggugagg

SEQ ID NO: 348356 - RNA, 20 nt, Human
ggcaaggcuggguuuuggug

SEQ ID NO: 348357 - RNA, 20 nt, Human
gggaaagaaaagacccucau

SEQ ID NO: 348358 - RNA, 20 nt, Human
uccccacgggcaaggcuggg

SEQ ID NO: 348359 - RNA, 20 nt, Human
uguggagcuacagcaaaaag

SEQ ID NO: 348360 - RNA, 26 nt, Human
uguguuuauuaacucuuacuccccac

SEQ ID NO: 348361 - RNA, 20 nt, Human
aaacucaaaggcaucaacag

SEQ ID NO: 348362 - RNA, 19 nt, Human
aacucaaaggcaucaacag

SEQ ID NO: 348363 - RNA, 19 nt, Human
caacaguccugggcccaag

SEQ ID NO: 348364 - RNA, 19 nt, Human
ccauggcaggaagucaaga

SEQ ID NO: 348365 - RNA, 18 nt, Human
cccaagagauccauggca

SEQ ID NO: 348366 - RNA, 18 nt, Human
uccugggcccaagagauc

SEQ ID NO: 348367 - RNA, 19 nt, Human
uggcaggaagucaagaguu

SEQ ID NO: 348368 - RNA, 22 nt, Human
ugggcccaagagauccauggca

SEQ ID NO: 348369 - RNA, 20 nt, Human
aacugaucgcagaagaccug

SEQ ID NO: 348370 - RNA, 23 nt, Human
acagccagcgcacccccuggagc

SEQ ID NO: 348371 - RNA, 18 nt, Human
agagaggguaggaggggg

SEQ ID NO: 348372 - RNA, 23 nt, Human
agaucccgccuccucccauccac

SEQ ID NO: 348373 - RNA, 25 nt, Human
aggcaggcugggccccagaguggcu

SEQ ID NO: 348374 - RNA, 18 nt, Human
auccugaggaaggagccc

SEQ ID NO: 348375 - RNA, 21 nt, Human
caagggaggccacaggggugc

SEQ ID NO: 348376 - RNA, 19 nt, Human
cagagcagaucccgccucc

SEQ ID NO: 348377 - RNA, 21 nt, Human
cagcgcacccccuggagcaga

SEQ ID NO: 348378 - RNA, 20 nt, Human
cagucaggaaccugaaccag

SEQ ID NO: 348379 - RNA, 23 nt, Human
cccagaguggcucuaccccucau

SEQ ID NO: 348380 - RNA, 22 nt, Human
ccccgacagccagcgcaccccc

SEQ ID NO: 348381 - RNA, 22 nt, Human
cccucacaucucugggccuccu

SEQ ID NO: 348382 - RNA, 22 nt, Human
cgcucugcugagccucgagggc

SEQ ID NO: 348383 - RNA, 24 nt, Human
gacagccagcgcacccccuggagc

SEQ ID NO: 348384 - RNA, 19 nt, Human
gagagaggguaggaggggg

SEQ ID NO: 348385 - RNA, 20 nt, Human
gcacgcucugcugagccucg

SEQ ID NO: 348386 - RNA, 18 nt, Human
ggagacaugcccagcccc

SEQ ID NO: 348387 - RNA, 22 nt, Human
ggugcggcaggcaggcugggcc

SEQ ID NO: 348388 - RNA, 27 nt, Human
uaaauaggcccuuucccaucguggucu

SEQ ID NO: 348389 - RNA, 19 nt, Human
uaacugaucgcagaagacc

SEQ ID NO: 348390 - RNA, 22 nt, Human
uauuaggaguuaaauaggcccu

SEQ ID NO: 348391 - RNA, 21 nt, Human
ugcccagcccccgacagccag

SEQ ID NO: 348392 - RNA, 18 nt, Human
ugcugagccucgagggcc

SEQ ID NO: 348393 - RNA, 24 nt, Human
ugugggagacaugcccagcccccg

SEQ ID NO: 348394 - RNA, 19 nt, Human
aagaaagaagaagcgcuga

SEQ ID NO: 348395 - RNA, 22 nt, Human
aagaaucuuuauugaacuugcu

SEQ ID NO: 348396 - RNA, 21 nt, Human
aagcccacaucucagaagcac

SEQ ID NO: 348397 - RNA, 23 nt, Human
acuuccaagaaucuuuauugaac

SEQ ID NO: 348398 - RNA, 18 nt, Human
aggaucaaaccaagaaag

SEQ ID NO: 348399 - RNA, 19 nt, Human
cacuggcgacagggagggc

SEQ ID NO: 348400 - RNA, 18 nt, Human
cagcagucaggaucaaac

SEQ ID NO: 348401 - RNA, 22 nt, Human
cagcagucaggaucacacguac

SEQ ID NO: 348402 - RNA, 21 nt, Human
cagggagggccccagcuggca

SEQ ID NO: 348403 - RNA, 24 nt, Human
cgacagggagggccccagcuggca

SEQ ID NO: 348404 - RNA, 22 nt, Human
gaggagagaggguuguagagag

SEQ ID NO: 348405 - RNA, 23 nt, Human
gcgacagggagggccccagcugg

SEQ ID NO: 348406 - RNA, 24 nt, Human
uagcaacagcgugugcaagcccac

SEQ ID NO: 348407 - RNA, 21 nt, Human
ucaaaccaagaaagaagaagc

SEQ ID NO: 348408 - RNA, 21 nt, Human
ugaggagagaggguuguagag

SEQ ID NO: 348409 - RNA, 21 nt, Human
uggaaaaaaaaaagugcccac

SEQ ID NO: 348410 - RNA, 24 nt, Human
uggaaaaaaaaaagugcccacugg

SEQ ID NO: 348411 - RNA, 25 nt, Human
uggcgacagggagggccccagcugg

SEQ ID NO: 348412 - RNA, 18 nt, Human
ugucugaaggagccaggg

SEQ ID NO: 348413 - RNA, 21 nt, Human
aaaccaggcuguccuggaaag

SEQ ID NO: 348414 - RNA, 21 nt, Human
aacaauaagccgaagaaggga

SEQ ID NO: 348415 - RNA, 19 nt, Human
aagaagggaaaccaggcug

SEQ ID NO: 348416 - RNA, 21 nt, Human
aaggguggagggugagggugg

SEQ ID NO: 348417 - RNA, 22 nt, Human
acaaacaagggcuggggacaca

SEQ ID NO: 348418 - RNA, 18 nt, Human
aggagcagccgaggucag

SEQ ID NO: 348419 - RNA, 20 nt, Human
aggagggcagggggccaaag

SEQ ID NO: 348420 - RNA, 18 nt, Human
agggagaggagggcaggg

SEQ ID NO: 348421 - RNA, 21 nt, Human
agggagaggagggcagggggc

SEQ ID NO: 348422 - RNA, 22 nt, Human
agggagaggagggcagggggcc

SEQ ID NO: 348423 - RNA, 24 nt, Human
caauaagccgaagaagggaaacca

SEQ ID NO: 348424 - RNA, 24 nt, Human
cagaacucaaaaucugaaaucuga

SEQ ID NO: 348425 - RNA, 24 nt, Human
cagcagcaaaggguggagggugag

SEQ ID NO: 348426 - RNA, 19 nt, Human
cagccgaggucagcagcaa

SEQ ID NO: 348427 - RNA, 22 nt, Human
ccaaaaaucagaacucaaaauc

SEQ ID NO: 348428 - RNA, 23 nt, Human
ccuucugccuuuauuucccugau

SEQ ID NO: 348429 - RNA, 18 nt, Human
cugggagggagaggaggg

SEQ ID NO: 348430 - RNA, 21 nt, Human
gagggugaggguggagggcag

SEQ ID NO: 348431 - RNA, 18 nt, Human
gaggguggagggcagccc

SEQ ID NO: 348432 - RNA, 20 nt, Human
gcacacacguccccaauccc

SEQ ID NO: 348433 - RNA, 20 nt, Human
ggagaggagggcagggggcc

SEQ ID NO: 348434 - RNA, 18 nt, Human
ggagggagaggagggcag

SEQ ID NO: 348435 - RNA, 19 nt, Human
ggagggugaggguggaggg

SEQ ID NO: 348436 - RNA, 24 nt, Human
gguccaucugggagggagaggagg

SEQ ID NO: 348437 - RNA, 24 nt, Human
guggagggugaggguggagggcag

SEQ ID NO: 348438 - RNA, 23 nt, Human
ucacugccuucugccuuuauucu

SEQ ID NO: 348439 - RNA, 18 nt, Human
ucagcagcaaagggugga

SEQ ID NO: 348440 - RNA, 24 nt, Human
ucccauagcacacacguccccaau

SEQ ID NO: 348441 - RNA, 20 nt, Human
uccccaaucccagaaacuuu

SEQ ID NO: 348442 - RNA, 24 nt, Human
uccccaaucccagaaacuuuacuc

SEQ ID NO: 348443 - RNA, 21 nt, Human
ucccugaucucugucccuucc

SEQ ID NO: 348444 - RNA, 21 nt, Human
uccuuguuuacaaacaagggc

SEQ ID NO: 348445 - RNA, 18 nt, Human
ucugauggaacaauaagc

SEQ ID NO: 348446 - RNA, 21 nt, Human
ucugugagaggagcagccgag

SEQ ID NO: 348447 - RNA, 22 nt, Human
ugaccaaaaaucagaacucaaa

SEQ ID NO: 348448 - RNA, 22 nt, Human
ugaggguggagggcagcccugg

SEQ ID NO: 348449 - RNA, 19 nt, Human
ugaucucugucccuuccuu

SEQ ID NO: 348450 - RNA, 19 nt, Human
uggaacaauaagccgaaga

SEQ ID NO: 348451 - RNA, 23 nt, Human
ugggagggagaggagggcagggg

SEQ ID NO: 348452 - RNA, 21 nt, Human
ugugagaggagcagccgaggu

SEQ ID NO: 348453 - RNA, 19 nt, Human
gagcgguagggaggcggcc

SEQ ID NO: 348454 - RNA, 21 nt, Human
gggaggcggccaaaugcgacg

SEQ ID NO: 348455 - RNA, 18 nt, Human
uggagcgguagggaggcg

SEQ ID NO: 348456 - RNA, 18 nt, Human
ugucgcaguccgacuggc

SEQ ID NO: 348457 - RNA, 22 nt, Human
ugucuccaucuucccuauuuau

SEQ ID NO: 348458 - RNA, 22 nt, Human
aaaaagccagagcugggaagcg

SEQ ID NO: 348459 - RNA, 19 nt, Human
cugggucucuggaggccca

SEQ ID NO: 348460 - RNA, 18 nt, Human
gggucucuggaggcccau

SEQ ID NO: 348461 - RNA, 24 nt, Human
gucucuggaggcccauuggugggg

SEQ ID NO: 348462 - RNA, 20 nt, Human
uccugggucucuggaggccc

SEQ ID NO: 348463 - RNA, 20 nt, Human
uccugggucucuggaggccc

SEQ ID NO: 348464 - RNA, 22 nt, Human
uccugggucucuggaggcccau

SEQ ID NO: 348465 - RNA, 21 nt, Human
ucucuggaggcccauuggugg

SEQ ID NO: 348466 - RNA, 19 nt, Human
uggaggcccauuggugggg

SEQ ID NO: 348467 - RNA, 21 nt, Human
uggaggcccauugguggggcu

SEQ ID NO: 348468 - RNA, 22 nt, Human
uuccugggucucuggaggccca

SEQ ID NO: 348469 - RNA, 18 nt, Human
uuguuccugggucucugg

SEQ ID NO: 348470 - RNA, 20 nt, Human
uuguuccugggucucuggag

SEQ ID NO: 348471 - RNA, 24 nt, Human
uuucaaaaagccagagcugggaag

SEQ ID NO: 348472 - RNA, 22 nt, Human
cagguacauguccaggggccca

SEQ ID NO: 348473 - RNA, 23 nt, Human
ccaggucuucugaaagacagcug

SEQ ID NO: 348474 - RNA, 18 nt, Human
gacuugccccaccagguc

SEQ ID NO: 348475 - RNA, 18 nt, Human
ggcccagccucugggccc

SEQ ID NO: 348476 - RNA, 19 nt, Human
ggggcccagccucugggcc

SEQ ID NO: 348477 - RNA, 20 nt, Human
ggggcccagccucugggccc

SEQ ID NO: 348478 - RNA, 23 nt, Human
uucugcagguacauguccagggg

SEQ ID NO: 348479 - RNA, 23 nt, Human
uugaugacuuuauuauucugcag

SEQ ID NO: 348480 - RNA, 18 nt, Human
uuuuuuuuuuuuuuuuug

SEQ ID NO: 348481 - RNA, 21 nt, Human
uuuuuuuuuuuuuuuuugagg

SEQ ID NO: 348482 - RNA, 19 nt, Human
agccccuagccccacagcc

SEQ ID NO: 348483 - RNA, 21 nt, Human
agccccuagccccacagccaa

SEQ ID NO: 348484 - RNA, 19 nt, Human
aggaagagacuuuauuugg

SEQ ID NO: 348485 - RNA, 22 nt, Human
caaagccgaggagccacacaga

SEQ ID NO: 348486 - RNA, 31 nt, Human
cagccccuagccccacagccaagacaguuuu

SEQ ID NO: 348487 - RNA, 24 nt, Human
ccagccccuagccccacagccaag

SEQ ID NO: 348488 - RNA, 22 nt, Human
cccacagccaagacaguuugac

SEQ ID NO: 348489 - RNA, 18 nt, Human
cccagccccuagccccac

SEQ ID NO: 348490 - RNA, 23 nt, Human
cccagccccuagccccacagccg

SEQ ID NO: 348491 - RNA, 21 nt, Human
ccccagccccuagccccacag

SEQ ID NO: 348492 - RNA, 23 nt, Human
ccccagccccuagccccacagcc

SEQ ID NO: 348493 - RNA, 20 nt, Human
ccccggggcccugguugggg

SEQ ID NO: 348494 - RNA, 20 nt, Human
ccccggggcccugguugggu

SEQ ID NO: 348495 - RNA, 20 nt, Human
gacuguggccauggccgugg

SEQ ID NO: 348496 - RNA, 20 nt, Human
gccacugugaucuuggccac

SEQ ID NO: 348497 - RNA, 18 nt, Human
gugaucuuggccacugug

SEQ ID NO: 348498 - RNA, 19 nt, Human
uagaggcaggguggccugg

SEQ ID NO: 348499 - RNA, 18 nt, Human
ucccaaagccgaggagcc

SEQ ID NO: 348500 - RNA, 20 nt, Human
ugacuguggccauggccgug

SEQ ID NO: 348501 - RNA, 21 nt, Human
uggccuccugauuaguggccu

SEQ ID NO: 348502 - RNA, 18 nt, Human
uuggccccagccccuagc

SEQ ID NO: 348503 - RNA, 19 nt, Human
aaaacagccuuuggaaaga

SEQ ID NO: 348504 - RNA, 20 nt, Human
aacacggcuggaaagcuccu

SEQ ID NO: 348505 - RNA, 22 nt, Human
aagccgcaugugcuggaggcac

SEQ ID NO: 348506 - RNA, 19 nt, Human
acaggaaagguuuggcugc

SEQ ID NO: 348507 - RNA, 23 nt, Human
accccuuccuggucuccuugcug

SEQ ID NO: 348508 - RNA, 21 nt, Human
agcaguguuuucaaauaaugc

SEQ ID NO: 348509 - RNA, 18 nt, Human
aggcaaggauccugcagc

SEQ ID NO: 348510 - RNA, 20 nt, Human
aggcacguuggaggcaagga

SEQ ID NO: 348511 - RNA, 18 nt, Human
cacacaggccuaauauag

SEQ ID NO: 348512 - RNA, 19 nt, Human
caccacgcccuugcagggc

SEQ ID NO: 348513 - RNA, 23 nt, Human
cacggaggccacgcuggagcccc

SEQ ID NO: 348514 - RNA, 22 nt, Human
cagagcccccgguagugcccuc

SEQ ID NO: 348515 - RNA, 19 nt, Human
cagagcuggcucggauugc

SEQ ID NO: 348516 - RNA, 22 nt, Human
cagcaguguuuucaaauaaugc

SEQ ID NO: 348517 - RNA, 20 nt, Human
cagccgcgacuugaaucgca

SEQ ID NO: 348518 - RNA, 19 nt, Human
caggccuaauauagcagaa

SEQ ID NO: 348519 - RNA, 22 nt, Human
ccacgcccuugcagggccacac

SEQ ID NO: 348520 - RNA, 19 nt, Human
cgcgguggcucagagcccc

SEQ ID NO: 348521 - RNA, 19 nt, Human
cgcugagcguucaccuggu

SEQ ID NO: 348522 - RNA, 21 nt, Human
cgcuggagcccccagagcugg

SEQ ID NO: 348523 - RNA, 20 nt, Human
cuacaacacggcuggaaagc

SEQ ID NO: 348524 - RNA, 21 nt, Human
gaacagcaguguuuucaaaaa

SEQ ID NO: 348525 - RNA, 19 nt, Human
gagcccccagagcuggcuc

SEQ ID NO: 348526 - RNA, 21 nt, Human
gauccugcagccgcgacuuga

SEQ ID NO: 348527 - RNA, 19 nt, Human
gcaggccgaagccaccacg

SEQ ID NO: 348528 - RNA, 24 nt, Human
gcccucggaagccgcaugugcugg

SEQ ID NO: 348529 - RNA, 21 nt, Human
gcuggaaagcucagcuccuac

SEQ ID NO: 348530 - RNA, 24 nt, Human
ucaccuggugaucaggcgcauccc

SEQ ID NO: 348531 - RNA, 23 nt, Human
ucagagcccccgguagugcccuc

SEQ ID NO: 348532 - RNA, 20 nt, Human
uccuugucucaccccuuccu

SEQ ID NO: 348533 - RNA, 21 nt, Human
ucuacacggccauggcgggcu

SEQ ID NO: 348534 - RNA, 23 nt, Human
ucucaccccuuccuggucuccuu

SEQ ID NO: 348535 - RNA, 19 nt, Human
ucucuguuacaggaaaggu

SEQ ID NO: 348536 - RNA, 21 nt, Human
ucuguuacaggaaagguuugg

SEQ ID NO: 348537 - RNA, 20 nt, Human
ugcugucugcuuucuugcau

SEQ ID NO: 348538 - RNA, 20 nt, Human
uggaaagcucagcuccuacu

SEQ ID NO: 348539 - RNA, 22 nt, Human
uggagcccccagagcuggcucg

SEQ ID NO: 348540 - RNA, 23 nt, Human
uggagcccccagagcuggcucgg

SEQ ID NO: 348541 - RNA, 22 nt, Human
uggaguugcuuuuuccaggacg

SEQ ID NO: 348542 - RNA, 18 nt, Human
ugugcuggaggcacguug

SEQ ID NO: 348543 - RNA, 22 nt, Human
uuaaaacagccuuuggaaagag

SEQ ID NO: 348544 - RNA, 26 nt, Human
uuaaagaacagcaguguuuucaaaua

SEQ ID NO: 348545 - RNA, 20 nt, Human
uuacaggaaagguuuggcug

SEQ ID NO: 348546 - RNA, 18 nt, Human
uugcuuuuuccaggacgc

SEQ ID NO: 348547 - RNA, 24 nt, Human
aggaaucugugacaucuccagggc

SEQ ID NO: 348548 - RNA, 22 nt, Human
auuuauuaaucagagguacaug

SEQ ID NO: 348549 - RNA, 18 nt, Human
cacuuuugggaagccugg

SEQ ID NO: 348550 - RNA, 19 nt, Human
cagagguacaugagcaggc

SEQ ID NO: 348551 - RNA, 18 nt, Human
uaauugccaacaaacacu

SEQ ID NO: 348552 - RNA, 18 nt, Human
agcucagugacccugugu

SEQ ID NO: 348553 - RNA, 21 nt, Human
aggugcccuauaccaguuccu

SEQ ID NO: 348554 - RNA, 24 nt, Human
ccucuaggugcccuauaccaguuc

SEQ ID NO: 348555 - RNA, 23 nt, Human
cuggggggagaaguguguggcuc

SEQ ID NO: 348556 - RNA, 27 nt, Human
cuguggaccuuucuccagcugaaauuu

SEQ ID NO: 348557 - RNA, 19 nt, Human
guggaccuuucuccagcug

SEQ ID NO: 348558 - RNA, 18 nt, Human
ucagugacccuguguccc

SEQ ID NO: 348559 - RNA, 22 nt, Human
ucccugagagcagaggagcagg

SEQ ID NO: 348560 - RNA, 18 nt, Human
ugacccugugucccuguc

SEQ ID NO: 348561 - RNA, 19 nt, Human
ugagagcagaggagcagga

SEQ ID NO: 348562 - RNA, 20 nt, Human
ugcuguggaccuuucuccag

SEQ ID NO: 348563 - RNA, 24 nt, Human
uguggaccuuucuccagcugaaau

SEQ ID NO: 348564 - RNA, 21 nt, Human
uguguggcucacagcccaguu

SEQ ID NO: 348565 - RNA, 22 nt, Human
uuucaguaaaggcagagcugcu

SEQ ID NO: 348566 - RNA, 21 nt, Human
aagcagucuccaaauaggucu

SEQ ID NO: 348567 - RNA, 21 nt, Human
agacaggagaggaggccgggu

SEQ ID NO: 348568 - RNA, 21 nt, Human
caaauaggucuucuccacuuu

SEQ ID NO: 348569 - RNA, 22 nt, Human
caggagaggaggccgggugaca

SEQ ID NO: 348570 - RNA, 27 nt, Human
cuucuccacuucauccagggcugagga

SEQ ID NO: 348571 - RNA, 20 nt, Human
gcuuauuaaaaucuuuuuuc

SEQ ID NO: 348572 - RNA, 23 nt, Human
ggaaaagccagaccucaguuagg

SEQ ID NO: 348573 - RNA, 19 nt, Human
ggcugaggaaaagccagac

SEQ ID NO: 348574 - RNA, 19 nt, Human
uauggugacaggaagcagu

SEQ ID NO: 348575 - RNA, 23 nt, Human
uccagggcugaggaaaagccaga

SEQ ID NO: 348576 - RNA, 21 nt, Human
uccagggcugaggaaaagccg

SEQ ID NO: 348577 - RNA, 21 nt, Human
ugaagacagcugaagcgccag

SEQ ID NO: 348578 - RNA, 21 nt, Human
ugacaggaagcagucuccaaa

SEQ ID NO: 348579 - RNA, 20 nt, Human
aaaacagaggcagcuuugga

SEQ ID NO: 348580 - RNA, 21 nt, Human
aaaggagcuagguuuuuaaaa

SEQ ID NO: 348581 - RNA, 23 nt, Human
aacaagacccucucagaggccug

SEQ ID NO: 348582 - RNA, 25 nt, Human
aacuacagaggguuuuccagcuauu

SEQ ID NO: 348583 - RNA, 27 nt, Human
aagaaaccaaaauguauagugggcacc

SEQ ID NO: 348584 - RNA, 20 nt, Human
aagcauauuuuucagguuug

SEQ ID NO: 348585 - RNA, 22 nt, Human
aauauuggaaaaaaacuguaca

SEQ ID NO: 348586 - RNA, 19 nt, Human
aaugaaacugagcuacaaa

SEQ ID NO: 348587 - RNA, 20 nt, Human
acaauggaaucuuccaagcc

SEQ ID NO: 348588 - RNA, 21 nt, Human
acaauggaaucuuccaagcca

SEQ ID NO: 348589 - RNA, 23 nt, Human
accucauccuccucuuuccuauc

SEQ ID NO: 348590 - RNA, 19 nt, Human
accuuaagaucuaacacac

SEQ ID NO: 348591 - RNA, 19 nt, Human
acugauuuuaaacuacaga

SEQ ID NO: 348592 - RNA, 24 nt, Human
agacacauucauugauagccaaca

SEQ ID NO: 348593 - RNA, 18 nt, Human
agaguaccaugcgugaaa

SEQ ID NO: 348594 - RNA, 21 nt, Human
aggcagcuuuggaccucuagc

SEQ ID NO: 348595 - RNA, 22 nt, Human
aguaacaucagaucaauucugu

SEQ ID NO: 348596 - RNA, 22 nt, Human
agugcaauaugaaaucuagaac

SEQ ID NO: 348597 - RNA, 27 nt, Human
auuacaauuugaauauacaaucugacu

SEQ ID NO: 348598 - RNA, 21 nt, Human
caauaguaaagagaccauccu

SEQ ID NO: 348599 - RNA, 20 nt, Human
caccuccuuccuucucucuc

SEQ ID NO: 348600 - RNA, 21 nt, Human
caccuccuuccuucucucucc

SEQ ID NO: 348601 - RNA, 21 nt, Human
cagcuuuggaccucuagcgua

SEQ ID NO: 348602 - RNA, 19 nt, Human
cauugauagccaacaaaau

SEQ ID NO: 348603 - RNA, 24 nt, Human
cauuuuauuuucacuuauggacau

SEQ ID NO: 348604 - RNA, 19 nt, Human
ccaccuccuuccuucucuc

SEQ ID NO: 348605 - RNA, 20 nt, Human
ccccagaccucauccuccuc

SEQ ID NO: 348606 - RNA, 20 nt, Human
ccccgcgccgccaccucggc

SEQ ID NO: 348607 - RNA, 18 nt, Human
ccuccuuccuucucucuc

SEQ ID NO: 348608 - RNA, 24 nt, Human
ccugcacaaccaccuccuuccuuc

SEQ ID NO: 348609 - RNA, 19 nt, Human
ccugcauggagcacaagau

SEQ ID NO: 348610 - RNA, 21 nt, Human
ccugcuaauagugaccgcuuc

SEQ ID NO: 348611 - RNA, 19 nt, Human
ccuuccuucucucuccgcc

SEQ ID NO: 348612 - RNA, 20 nt, Human
ccuuccuucucucuccgccc

SEQ ID NO: 348613 - RNA, 21 nt, Human
gaaaaacaucaagaguaccau

SEQ ID NO: 348614 - RNA, 18 nt, Human
gaacagauucagcuucca

SEQ ID NO: 348615 - RNA, 21 nt, Human
gaccgcuucuacaaugacaau

SEQ ID NO: 348616 - RNA, 20 nt, Human
uaacacacugauauuagucc

SEQ ID NO: 348617 - RNA, 19 nt, Human
uaacuaccuggaagcacua

SEQ ID NO: 348618 - RNA, 22 nt, Human
uaagagacuuacauuuuauaaa

SEQ ID NO: 348619 - RNA, 25 nt, Human
uacaguacaugaauuuagaaauaaa

SEQ ID NO: 348620 - RNA, 20 nt, Human
uaccuuaagaucuaacacac

SEQ ID NO: 348621 - RNA, 23 nt, Human
uaccuuaagaucuaacacacuga

SEQ ID NO: 348622 - RNA, 21 nt, Human
uacuauaacuaccuggaagca

SEQ ID NO: 348623 - RNA, 23 nt, Human
uagaacaagacccucucagaggc

SEQ ID NO: 348624 - RNA, 22 nt, Human
uagccaacaaaauccuugacag

SEQ ID NO: 348625 - RNA, 18 nt, Human
uagugguaauuauacuac

SEQ ID NO: 348626 - RNA, 23 nt, Human
ucaagcacaacacugaaauauug

SEQ ID NO: 348627 - RNA, 22 nt, Human
ucuagaacaagacccucucaga

SEQ ID NO: 348628 - RNA, 26 nt, Human
ucuguaagagacuuacauuuuauaaa

SEQ ID NO: 348629 - RNA, 18 nt, Human
ugaaaugcccagcagcau

SEQ ID NO: 348630 - RNA, 21 nt, Human
ugaauucucucaucacaccuu

SEQ ID NO: 348631 - RNA, 22 nt, Human
ugacagagugaaaaacaucaag

SEQ ID NO: 348632 - RNA, 22 nt, Human
ugagugacccucaaagaaacca

SEQ ID NO: 348633 - RNA, 20 nt, Human
ugcacuggcaguucaagcug

SEQ ID NO: 348634 - RNA, 20 nt, Human
uggaaaaguaugccugcuaa

SEQ ID NO: 348635 - RNA, 24 nt, Human
uggaacaaauuaugcuuauuuaca

SEQ ID NO: 348636 - RNA, 22 nt, Human
uggaagcacuaaguuuuagaca

SEQ ID NO: 348637 - RNA, 20 nt, Human
ugggcaucuuccacauuggg

SEQ ID NO: 348638 - RNA, 23 nt, Human
uguuguagcuguugacauuaagu

SEQ ID NO: 348639 - RNA, 21 nt, Human
uuaaagaaccccagaccucau

SEQ ID NO: 348640 - RNA, 18 nt, Human
uucaagcacaacacugaa

SEQ ID NO: 348641 - RNA, 23 nt, Human
uuccaagccaagccgcuuuccac

SEQ ID NO: 348642 - RNA, 22 nt, Human
uuuaaaaagauaaaguauaucu

SEQ ID NO: 348643 - RNA, 22 nt, Human
uuuuaaaaagauaaaguauauc

SEQ ID NO: 348644 - RNA, 21 nt, Human
uuuucagguuuguuuuugcac

SEQ ID NO: 348645 - RNA, 21 nt, Human
aaacuggaagggguaccccag

SEQ ID NO: 348646 - RNA, 26 nt, Human
aaaugauaaaggccauuuuggaagcc

SEQ ID NO: 348647 - RNA, 21 nt, Human
aaggccauuuuggaagcccac

SEQ ID NO: 348648 - RNA, 22 nt, Human
aaugauaaaggccauuuuggaa

SEQ ID NO: 348649 - RNA, 18 nt, Human
accugaagacacugggau

SEQ ID NO: 348650 - RNA, 24 nt, Human
acuuccggcaacugucagucccgg

SEQ ID NO: 348651 - RNA, 27 nt, Human
acuuugaaaaacacaaugacucagagg

SEQ ID NO: 348652 - RNA, 22 nt, Human
agaaaagaaaucacuuugaaaa

SEQ ID NO: 348653 - RNA, 19 nt, Human
agccccggaaccuucgcug

SEQ ID NO: 348654 - RNA, 21 nt, Human
aggcagguaagccaugucaag

SEQ ID NO: 348655 - RNA, 22 nt, Human
aggggaagaaacaagccuuggg

SEQ ID NO: 348656 - RNA, 20 nt, Human
aguuguuugacuccagcugu

SEQ ID NO: 348657 - RNA, 24 nt, Human
caaaaagcuacagaaaagaaauca

SEQ ID NO: 348658 - RNA, 18 nt, Human
caaagggucuuccucagc

SEQ ID NO: 348659 - RNA, 23 nt, Human
cacaaacuagccccggaaccuuc

SEQ ID NO: 348660 - RNA, 22 nt, Human
cacugggauauucagaaggcca

SEQ ID NO: 348661 - RNA, 26 nt, Human
cacuuugaaaaacacaaugacucaga

SEQ ID NO: 348662 - RNA, 20 nt, Human
caggaaaggagggugacaga

SEQ ID NO: 348663 - RNA, 23 nt, Human
ccagcaauuccaagagcugagga

SEQ ID NO: 348664 - RNA, 24 nt, Human
ccccuugccagcaauuccaagagc

SEQ ID NO: 348665 - RNA, 25 nt, Human
cccgcagccucacuuccggcaacuu

SEQ ID NO: 348666 - RNA, 24 nt, Human
ccuuucagcucuaaccacuucacc

SEQ ID NO: 348667 - RNA, 23 nt, Human
cuaaccacuucacccaacugcaa

SEQ ID NO: 348668 - RNA, 23 nt, Human
cuagccccggaaccuucgcuguu

SEQ ID NO: 348669 - RNA, 22 nt, Human
cucuuaccuaugaaccuuacga

SEQ ID NO: 348670 - RNA, 20 nt, Human
cugaaacacaaacuagcccc

SEQ ID NO: 348671 - RNA, 23 nt, Human
cuuccggcaacugucagucccgg

SEQ ID NO: 348672 - RNA, 23 nt, Human
cuuucagcucuaaccacuucacc

SEQ ID NO: 348673 - RNA, 19 nt, Human
gaagaaacaagccuugggg

SEQ ID NO: 348674 - RNA, 22 nt, Human
gacacugggauauucagaaggc

SEQ ID NO: 348675 - RNA, 23 nt, Human
gccccggaaccuucgcuguucuc

SEQ ID NO: 348676 - RNA, 21 nt, Human
gucuuccucagcgcgaaaucg

SEQ ID NO: 348677 - RNA, 27 nt, Human
guucaaauugcugagaucuuaggucaa

SEQ ID NO: 348678 - RNA, 19 nt, Human
uaggucaaaaagcuacaga

SEQ ID NO: 348679 - RNA, 24 nt, Human
ucugaaacacaaacuagccccgga

SEQ ID NO: 348680 - RNA, 25 nt, Human
ugaaaaacacaaugacucagaggca

SEQ ID NO: 348681 - RNA, 24 nt, Human
ugaaacacaaacuagccccggaac

SEQ ID NO: 348682 - RNA, 18 nt, Human
ugcugggagugaaggcag

SEQ ID NO: 348683 - RNA, 24 nt, Human
ugcugggagugaaggcagguaagc

SEQ ID NO: 348684 - RNA, 20 nt, Human
uggaagggguaccccaggug

SEQ ID NO: 348685 - RNA, 19 nt, Human
uggaagucugaaacacaaa

SEQ ID NO: 348686 - RNA, 22 nt, Human
uggaagucugaaacacaaacua

SEQ ID NO: 348687 - RNA, 18 nt, Human
uggaauggggugcagaag

SEQ ID NO: 348688 - RNA, 20 nt, Human
uggaauggggugcagaaguc

SEQ ID NO: 348689 - RNA, 22 nt, Human
ugggaagcaaggggaaaacugg

SEQ ID NO: 348690 - RNA, 28 nt, Human
uuacaggggaagaaacaagccuugggug

SEQ ID NO: 348691 - RNA, 20 nt, Human
uugaaaaacacaaugacuca

SEQ ID NO: 348692 - RNA, 22 nt, Human
uugaaaaacacaaugacucaga

SEQ ID NO: 348693 - RNA, 24 nt, Human
uuugacuccagcuguccccccagg

SEQ ID NO: 348694 - RNA, 21 nt, Human
aaaaaaacuccacuacaugcc

SEQ ID NO: 348695 - RNA, 21 nt, Human
aaacaauacuaacaacuggua

SEQ ID NO: 348696 - RNA, 19 nt, Human
aaacaggaagccuguaaac

SEQ ID NO: 348697 - RNA, 23 nt, Human
aacugccaccauuuugaguuuuc

SEQ ID NO: 348698 - RNA, 21 nt, Human
aagaagcauggcgagacaaac

SEQ ID NO: 348699 - RNA, 18 nt, Human
accauuuugaguuuuccg

SEQ ID NO: 348700 - RNA, 20 nt, Human
acugccaccauuuugaguuu

SEQ ID NO: 348701 - RNA, 21 nt, Human
agagccagcugaugagaaaau

SEQ ID NO: 348702 - RNA, 22 nt, Human
aggauccacuuaaaaaaaugac

SEQ ID NO: 348703 - RNA, 23 nt, Human
auaagauguuaaaaaaaaauuua

SEQ ID NO: 348704 - RNA, 25 nt, Human
auccagaagcaauaaaauguggagg

SEQ ID NO: 348705 - RNA, 24 nt, Human
cacucuaaaaaguacuaccuucac

SEQ ID NO: 348706 - RNA, 21 nt, Human
cagcugaugagaaaauaacgc

SEQ ID NO: 348707 - RNA, 26 nt, Human
caucccaaucauucaaauccauccag

SEQ ID NO: 348708 - RNA, 22 nt, Human
ccagcugaugagaaaauaacgc

SEQ ID NO: 348709 - RNA, 21 nt, Human
ccauccagcuauuuugcagcu

SEQ ID NO: 348710 - RNA, 21 nt, Human
ccuuauucccaauaaaaguaa

SEQ ID NO: 348711 - RNA, 27 nt, Human
cgugcuacaacacauucaagaucuacc

SEQ ID NO: 348712 - RNA, 22 nt, Human
cuacaacacauucaagaucuac

SEQ ID NO: 348713 - RNA, 22 nt, Human
gcuacaacacauucaagaucua

SEQ ID NO: 348714 - RNA, 20 nt, Human
gguaauaagaacugccacca

SEQ ID NO: 348715 - RNA, 19 nt, Human
guacacacaaacauaaagc

SEQ ID NO: 348716 - RNA, 19 nt, Human
uaaagaagcauggcgagac

SEQ ID NO: 348717 - RNA, 22 nt, Human
uaaagcaaguguucuaacaguu

SEQ ID NO: 348718 - RNA, 18 nt, Human
uaagauguuaaaaaaaaa

SEQ ID NO: 348719 - RNA, 26 nt, Human
uaauuacaugauuucacauccagaag

SEQ ID NO: 348720 - RNA, 24 nt, Human
uacaacaaauucaugaucagagcc

SEQ ID NO: 348721 - RNA, 23 nt, Human
uaccuucacacucuuagucaagu

SEQ ID NO: 348722 - RNA, 26 nt, Human
uauauaacagcagaaauaauuacaug

SEQ ID NO: 348723 - RNA, 23 nt, Human
uauguacacacaaacauaaagca

SEQ ID NO: 348724 - RNA, 22 nt, Human
ucaguuaagguuuuccguuggu

SEQ ID NO: 348725 - RNA, 21 nt, Human
ucauucaaauccauccagcua

SEQ ID NO: 348726 - RNA, 19 nt, Human
ucuguaagcccuuaauugc

SEQ ID NO: 348727 - RNA, 18 nt, Human
ugagaaaauaacgcaucc

SEQ ID NO: 348728 - RNA, 19 nt, Human
ugagaaaauaacgcaucca

SEQ ID NO: 348729 - RNA, 25 nt, Human
ugcacucagugcacucuaaaaagua

SEQ ID NO: 348730 - RNA, 22 nt, Human
uggcaagcaguuuccagaaaca

SEQ ID NO: 348731 - RNA, 21 nt, Human
uucccaauaaaaguaaaaaaa

SEQ ID NO: 348732 - RNA, 23 nt, Human
uucgugcuacaacacauucaaga

SEQ ID NO: 348733 - RNA, 24 nt, Human
uuucuuaaaugcacugaguacaac

SEQ ID NO: 348734 - RNA, 19 nt, Human
aaaaaaaaaaaaccccaaa

SEQ ID NO: 348735 - RNA, 19 nt, Human
aaaaaaaaaaaaccccaaa

SEQ ID NO: 348736 - RNA, 26 nt, Human
aaaaaaaccccaaaacgaaaaacaaa

SEQ ID NO: 348737 - RNA, 24 nt, Human
aaaaaccccaaaacgaaaaacaaa

SEQ ID NO: 348738 - RNA, 21 nt, Human
aaaaccccaaaacgaaaaaca

SEQ ID NO: 348739 - RNA, 19 nt, Human
accccaaaacgaaaaacaa

SEQ ID NO: 348740 - RNA, 20 nt, Human
accccaaaacgaaaaacaaa

SEQ ID NO: 348741 - RNA, 21 nt, Human
acccuggcuccgccgcccacu

SEQ ID NO: 348742 - RNA, 23 nt, Human
auagccuuguugccacgagacag

SEQ ID NO: 348743 - RNA, 19 nt, Human
cacgagacaggacacagga

SEQ ID NO: 348744 - RNA, 23 nt, Human
ccaaaacgaaaaacaaauucaca

SEQ ID NO: 348745 - RNA, 19 nt, Human
uccagggacccuggcuccg

SEQ ID NO: 348746 - RNA, 22 nt, Human
ugccacgagacaggacacagga

SEQ ID NO: 348747 - RNA, 21 nt, Human
uuuuuuuuuuuuuaaagggua

SEQ ID NO: 348748 - RNA, 23 nt, Human
uuuuuuuuuuuuuuuuuaaaggg

SEQ ID NO: 348749 - RNA, 23 nt, Human
acaccuugugauugucaccaacc

SEQ ID NO: 348750 - RNA, 22 nt, Human
agccagccccuguucugagcaa

SEQ ID NO: 348751 - RNA, 18 nt, Human
agccugaaggggcagcgc

SEQ ID NO: 348752 - RNA, 19 nt, Human
agccugaaggggcagcgcu

SEQ ID NO: 348753 - RNA, 18 nt, Human
aggugggaagggccgggu

SEQ ID NO: 348754 - RNA, 21 nt, Human
caaccaggugggaagggccgg

SEQ ID NO: 348755 - RNA, 21 nt, Human
cagcauaacuccaaaggacua

SEQ ID NO: 348756 - RNA, 18 nt, Human
cagcgcugaggcuccugg

SEQ ID NO: 348757 - RNA, 21 nt, Human
ccaggugggaagggccgggug

SEQ ID NO: 348758 - RNA, 19 nt, Human
cggguggcaaggagagggu

SEQ ID NO: 348759 - RNA, 21 nt, Human
cuccaaaggacuaaacugugg

SEQ ID NO: 348760 - RNA, 22 nt, Human
cuccaaaggacuaaacuguggg

SEQ ID NO: 348761 - RNA, 18 nt, Human
cugagcaagcugguaccg

SEQ ID NO: 348762 - RNA, 23 nt, Human
cugguaacuacaggucauuuucc

SEQ ID NO: 348763 - RNA, 19 nt, Human
uacgugauguggggaauuu

SEQ ID NO: 348764 - RNA, 23 nt, Human
ucugagcaagcugguaccgucuu

SEQ ID NO: 348765 - RNA, 18 nt, Human
ugggaagggccggguggc

SEQ ID NO: 348766 - RNA, 19 nt, Human
ugggaagggccggguggca

SEQ ID NO: 348767 - RNA, 22 nt, Human
ugucccuggcaacuucuacacu

SEQ ID NO: 348768 - RNA, 22 nt, Human
aguaucauggaaguaaaaugga

SEQ ID NO: 348769 - RNA, 19 nt, Human
aucagucuuguuggaagcu

SEQ ID NO: 348770 - RNA, 23 nt, Human
caggauuugcacagagaccaguu

SEQ ID NO: 348771 - RNA, 23 nt, Human
uagaagagcagcccugaaccuug

SEQ ID NO: 348772 - RNA, 21 nt, Human
uaucauggaaguaaaauggaa

SEQ ID NO: 348773 - RNA, 18 nt, Human
ucacauauuuauaaaaau

SEQ ID NO: 348774 - RNA, 22 nt, Human
aaaaagcacaauacaaauagca

SEQ ID NO: 348775 - RNA, 22 nt, Human
aaggaguaggaggccaccauag

SEQ ID NO: 348776 - RNA, 18 nt, Human
agaaggaaggggcggggc

SEQ ID NO: 348777 - RNA, 21 nt, Human
agaaggaaggggcggggcggg

SEQ ID NO: 348778 - RNA, 20 nt, Human
aggaaggggcggggcggggu

SEQ ID NO: 348779 - RNA, 26 nt, Human
aggaaggggcggggcggggugggggg

SEQ ID NO: 348780 - RNA, 22 nt, Human
aggggcggggcggggugggggg

SEQ ID NO: 348781 - RNA, 19 nt, Human
auagaucuggggaacagaa

SEQ ID NO: 348782 - RNA, 18 nt, Human
auagcaguucaaaaugga

SEQ ID NO: 348783 - RNA, 23 nt, Human
augccagauuacaacugccuagc

SEQ ID NO: 348784 - RNA, 19 nt, Human
caaguaaaaagcacaauac

SEQ ID NO: 348785 - RNA, 23 nt, Human
ccaaaccuuucaaagaaccacac

SEQ ID NO: 348786 - RNA, 21 nt, Human
cuuauuaacauugaagacgac

SEQ ID NO: 348787 - RNA, 19 nt, Human
gcggggcgggguggggggc

SEQ ID NO: 348788 - RNA, 19 nt, Human
ggaguaggaggccaccaua

SEQ ID NO: 348789 - RNA, 18 nt, Human
gggaacagaaggaagggg

SEQ ID NO: 348790 - RNA, 21 nt, Human
gggaacagaaggaaggggccg

SEQ ID NO: 348791 - RNA, 27 nt, Human
uaaaaaaccaaaccuuucaaagaacca

SEQ ID NO: 348792 - RNA, 20 nt, Human
uaaaaagcacaauacaaaua

SEQ ID NO: 348793 - RNA, 24 nt, Human
uaaaucgacaaaaaaaagguugaa

SEQ ID NO: 348794 - RNA, 21 nt, Human
uaggaggccaccauaggucgc

SEQ ID NO: 348795 - RNA, 23 nt, Human
uaguccaaaauacagaagaccaa

SEQ ID NO: 348796 - RNA, 19 nt, Human
uaguucauagaucugggga

SEQ ID NO: 348797 - RNA, 21 nt, Human
uccaaaauacagaagaccaaa

SEQ ID NO: 348798 - RNA, 22 nt, Human
uguacagaaacuuauuaacauu

SEQ ID NO: 348799 - RNA, 21 nt, Human
uuaaaucuguuuugaaagauu

SEQ ID NO: 348800 - RNA, 18 nt, Human
uuagaacucuaaaguuga

SEQ ID NO: 348801 - RNA, 20 nt, Human
aaacuagaagcauacuagug

SEQ ID NO: 348802 - RNA, 19 nt, Human
aaagagcagcagguacaga

SEQ ID NO: 348803 - RNA, 19 nt, Human
aaggaaaauacaaggggcc

SEQ ID NO: 348804 - RNA, 21 nt, Human
acacagacucucucucucucu

SEQ ID NO: 348805 - RNA, 20 nt, Human
acuacaacucauuacaagac

SEQ ID NO: 348806 - RNA, 20 nt, Human
acuacagaaaagccacuagg

SEQ ID NO: 348807 - RNA, 22 nt, Human
acuacagaaaagccacuaggga

SEQ ID NO: 348808 - RNA, 27 nt, Human
agaaaaagacaaaaucagggcucaaag

SEQ ID NO: 348809 - RNA, 21 nt, Human
agagaaaaagacaaaaucagg

SEQ ID NO: 348810 - RNA, 20 nt, Human
agagaggagggggaagaagg

SEQ ID NO: 348811 - RNA, 20 nt, Human
agaguugggagagggagggg

SEQ ID NO: 348812 - RNA, 22 nt, Human
agaguugggagagggaggggca

SEQ ID NO: 348813 - RNA, 20 nt, Human
agcagaaaggucaccccaga

SEQ ID NO: 348814 - RNA, 23 nt, Human
aggagagaggagggggaagaagg

SEQ ID NO: 348815 - RNA, 24 nt, Human
aggaggggggcugucuucuccuug

SEQ ID NO: 348816 - RNA, 21 nt, Human
agggaggacgccaccuggagc

SEQ ID NO: 348817 - RNA, 21 nt, Human
agguacaaagaaugaggaggg

SEQ ID NO: 348818 - RNA, 22 nt, Human
agguggagcuggaauuccaggg

SEQ ID NO: 348819 - RNA, 19 nt, Human
augaaugagaagcuggaga

SEQ ID NO: 348820 - RNA, 20 nt, Human
augucacuauuagcccaaaa

SEQ ID NO: 348821 - RNA, 19 nt, Human
caaagacacaagccccagc

SEQ ID NO: 348822 - RNA, 21 nt, Human
caaagacacaagccccagccu

SEQ ID NO: 348823 - RNA, 23 nt, Human
caauagcaaaacccucacucucu

SEQ ID NO: 348824 - RNA, 18 nt, Human
cacuauuagcccaaaaga

SEQ ID NO: 348825 - RNA, 25 nt, Human
cacucucuccuccucagaacuccug

SEQ ID NO: 348826 - RNA, 20 nt, Human
cacugccuugggugcaggag

SEQ ID NO: 348827 - RNA, 21 nt, Human
cagccacaguuccuaggccaa

SEQ ID NO: 348828 - RNA, 23 nt, Human
caggaaugccacauacugguucu

SEQ ID NO: 348829 - RNA, 21 nt, Human
cagguacaaagaaugaggagg

SEQ ID NO: 348830 - RNA, 19 nt, Human
ccagacaaugacaaagaca

SEQ ID NO: 348831 - RNA, 25 nt, Human
ccagacaaugacaaagacacaagcc

SEQ ID NO: 348832 - RNA, 21 nt, Human
ccagagacagcugccagcccu

SEQ ID NO: 348833 - RNA, 20 nt, Human
cccaccagcugagcagaaag

SEQ ID NO: 348834 - RNA, 20 nt, Human
cccuggaucccauuguugga

SEQ ID NO: 348835 - RNA, 23 nt, Human
ccuacagcuugaggagaagccau

SEQ ID NO: 348836 - RNA, 23 nt, Human
ccuccagagacagcugccagccc

SEQ ID NO: 348837 - RNA, 19 nt, Human
ccucuuggcaagaaaucag

SEQ ID NO: 348838 - RNA, 19 nt, Human
ccuugggugcaggaggcug

SEQ ID NO: 348839 - RNA, 21 nt, Human
cgcccccuuuuuuucuucagc

SEQ ID NO: 348840 - RNA, 23 nt, Human
cuccagagacagcugccagcccu

SEQ ID NO: 348841 - RNA, 20 nt, Human
cucucucucuuucucucuca

SEQ ID NO: 348842 - RNA, 23 nt, Human
cucucucucuuucucucucaauc

SEQ ID NO: 348843 - RNA, 18 nt, Human
cuucccagccacaguucc

SEQ ID NO: 348844 - RNA, 21 nt, Human
cuuccuucauuucucccuacu

SEQ ID NO: 348845 - RNA, 24 nt, Human
cuuggagugguaguggagguggag

SEQ ID NO: 348846 - RNA, 18 nt, Human
gaccagccaaaaccuuua

SEQ ID NO: 348847 - RNA, 20 nt, Human
gagagggaggggcaacgcuc

SEQ ID NO: 348848 - RNA, 22 nt, Human
gagcagaaaggucaccccagag

SEQ ID NO: 348849 - RNA, 19 nt, Human
gagguggagcuggaauucc

SEQ ID NO: 348850 - RNA, 18 nt, Human
gaguugggagagggaggg

SEQ ID NO: 348851 - RNA, 21 nt, Human
gcacaguaauuuccaagcuca

SEQ ID NO: 348852 - RNA, 21 nt, Human
gcacugggcccuccagagaca

SEQ ID NO: 348853 - RNA, 22 nt, Human
ggaaaucccccaugaucccugg

SEQ ID NO: 348854 - RNA, 20 nt, Human
ggaauuccagggcuucaugg

SEQ ID NO: 348855 - RNA, 19 nt, Human
ggagaagccaucguucaag

SEQ ID NO: 348856 - RNA, 21 nt, Human
ggagaggagagaggaggggga

SEQ ID NO: 348857 - RNA, 21 nt, Human
ggaggaagaaggaauguacag

SEQ ID NO: 348858 - RNA, 21 nt, Human
ggagguggagcuggaauucca

SEQ ID NO: 348859 - RNA, 22 nt, Human
gggggcugucuucuccuuggcu

SEQ ID NO: 348860 - RNA, 21 nt, Human
gguacaaagaaugaggaggga

SEQ ID NO: 348861 - RNA, 20 nt, Human
ggugcaccuaccaaagggaa

SEQ ID NO: 348862 - RNA, 20 nt, Human
guaccggcaccuucuggagc

SEQ ID NO: 348863 - RNA, 21 nt, Human
guggggccaggcuuggagugg

SEQ ID NO: 348864 - RNA, 23 nt, Human
guucuugacucucucucuuucuc

SEQ ID NO: 348865 - RNA, 25 nt, Human
uaagaaccagacaaugacaaagaca

SEQ ID NO: 348866 - RNA, 21 nt, Human
uacaaagaaugaggagggaag

SEQ ID NO: 348867 - RNA, 21 nt, Human
uacaacucauuacaagacgga

SEQ ID NO: 348868 - RNA, 20 nt, Human
uacaaggggccagggaauag

SEQ ID NO: 348869 - RNA, 21 nt, Human
uacaguuugcuacuucuuguc

SEQ ID NO: 348870 - RNA, 20 nt, Human
uagaaagauaggggacccau

SEQ ID NO: 348871 - RNA, 21 nt, Human
uagaaagauaggggacccaua

SEQ ID NO: 348872 - RNA, 24 nt, Human
uagaaagauaggggacccauaccc

SEQ ID NO: 348873 - RNA, 20 nt, Human
uagcaaaacccucacucucu

SEQ ID NO: 348874 - RNA, 22 nt, Human
uagcccaaaagaauauuaacga

SEQ ID NO: 348875 - RNA, 20 nt, Human
uaggaggggggcugucuucu

SEQ ID NO: 348876 - RNA, 24 nt, Human
ucagggcucauaacucugggaggu

SEQ ID NO: 348877 - RNA, 22 nt, Human
ucccagccacaguuccuaggcc

SEQ ID NO: 348878 - RNA, 19 nt, Human
ucccuuacaucaugucccu

SEQ ID NO: 348879 - RNA, 18 nt, Human
uccuaggguugggucacc

SEQ ID NO: 348880 - RNA, 19 nt, Human
uccugggagaccucuuggc

SEQ ID NO: 348881 - RNA, 24 nt, Human
uccuuaacucucucaucauuaguu

SEQ ID NO: 348882 - RNA, 22 nt, Human
uccuuagggggccauccccuug

SEQ ID NO: 348883 - RNA, 18 nt, Human
ucgucucccccuuggguc

SEQ ID NO: 348884 - RNA, 22 nt, Human
ucucucucugauucucuguucu

SEQ ID NO: 348885 - RNA, 26 nt, Human
ucucucucugauucucuguucuugac

SEQ ID NO: 348886 - RNA, 20 nt, Human
ucugcacacuaugucacuau

SEQ ID NO: 348887 - RNA, 20 nt, Human
ucuguucuugacucucucuc

SEQ ID NO: 348888 - RNA, 24 nt, Human
ucuucagcuucuucccuacgcuuc

SEQ ID NO: 348889 - RNA, 18 nt, Human
ugaaagaggaagauaagg

SEQ ID NO: 348890 - RNA, 23 nt, Human
ugaaagaggaagauaaggaaaau

SEQ ID NO: 348891 - RNA, 21 nt, Human
ugaccuggucucgucuccccc

SEQ ID NO: 348892 - RNA, 26 nt, Human
ugacucucucucuuucucucucaaag

SEQ ID NO: 348893 - RNA, 25 nt, Human
ugagaagcuggagaggucuuggcac

SEQ ID NO: 348894 - RNA, 18 nt, Human
ugaucccugguacaccuc

SEQ ID NO: 348895 - RNA, 21 nt, Human
ugaugggcuucucaggcacug

SEQ ID NO: 348896 - RNA, 21 nt, Human
uggagcaucuucaguaccggc

SEQ ID NO: 348897 - RNA, 21 nt, Human
uggagguggagcuggaauucc

SEQ ID NO: 348898 - RNA, 20 nt, Human
uggcaagaaaucagcuuguu

SEQ ID NO: 348899 - RNA, 23 nt, Human
uggcacacugaccagccaaaacu

SEQ ID NO: 348900 - RNA, 18 nt, Human
ugggagguccuuuuguga

SEQ ID NO: 348901 - RNA, 22 nt, Human
ugggagguccuuuugugaagcu

SEQ ID NO: 348902 - RNA, 23 nt, Human
ugggugcaggaggcugaaauagg

SEQ ID NO: 348903 - RNA, 19 nt, Human
ugguggggccaggcuugga

SEQ ID NO: 348904 - RNA, 22 nt, Human
uguaagcacaguaauuuccaag

SEQ ID NO: 348905 - RNA, 24 nt, Human
uucaucaaccaugcugaccaaaaa

SEQ ID NO: 348906 - RNA, 24 nt, Human
uucaugggcaggccauuugacagg

SEQ ID NO: 348907 - RNA, 21 nt, Human
uuccuuaacucucucaucauu

SEQ ID NO: 348908 - RNA, 18 nt, Human
uuccuuagggggccaucc

SEQ ID NO: 348909 - RNA, 22 nt, Human
uucucaggcacugccuugggug

SEQ ID NO: 348910 - RNA, 21 nt, Human
uugacauuuuacuagguuagg

SEQ ID NO: 348911 - RNA, 22 nt, Human
uuggcacacugaccagccaaaa

SEQ ID NO: 348912 - RNA, 20 nt, Human
uuuccaagcucagggacuac

SEQ ID NO: 348913 - RNA, 22 nt, Human
aaaaaaaaaaaaccuggaaaag

SEQ ID NO: 348914 - RNA, 21 nt, Human
aaaaaauagaaucacuuuccu

SEQ ID NO: 348915 - RNA, 19 nt, Human
aaacaaaugcuacaauacu

SEQ ID NO: 348916 - RNA, 24 nt, Human
aaacagccugagagaccaaauucu

SEQ ID NO: 348917 - RNA, 19 nt, Human
aaagacuggcuaaaaucug

SEQ ID NO: 348918 - RNA, 18 nt, Human
aaaggaacagcucuacag

SEQ ID NO: 348919 - RNA, 21 nt, Human
aacagcggcuggcucggaccc

SEQ ID NO: 348920 - RNA, 19 nt, Human
aacccacagauuucuagcu

SEQ ID NO: 348921 - RNA, 26 nt, Human
aacccauucuauaauuaacuccucca

SEQ ID NO: 348922 - RNA, 20 nt, Human
aaccuagcuuaccacagugg

SEQ ID NO: 348923 - RNA, 18 nt, Human
aagagcacaugucaccac

SEQ ID NO: 348924 - RNA, 23 nt, Human
aagagcacaugucaccacuccac

SEQ ID NO: 348925 - RNA, 23 nt, Human
aaggagaaaaaauguaaaaaaaa

SEQ ID NO: 348926 - RNA, 19 nt, Human
aaucugcuacacauuccuu

SEQ ID NO: 348927 - RNA, 20 nt, Human
aauguaaaaaaaagagcucc

SEQ ID NO: 348928 - RNA, 22 nt, Human
aaugucccccagaaucugugca

SEQ ID NO: 348929 - RNA, 24 nt, Human
acaauuucauaucaaaaaaaaaaa

SEQ ID NO: 348930 - RNA, 21 nt, Human
acccaaaugagcucuggccuc

SEQ ID NO: 348931 - RNA, 18 nt, Human
acccggcaaauccugcca

SEQ ID NO: 348932 - RNA, 24 nt, Human
acccggcaaauccugccagcuucc

SEQ ID NO: 348933 - RNA, 20 nt, Human
acgaaaugcaugcacuuccc

SEQ ID NO: 348934 - RNA, 18 nt, Human
acuacggccugaggggcu

SEQ ID NO: 348935 - RNA, 18 nt, Human
agaauaaagacauccucc

SEQ ID NO: 348936 - RNA, 22 nt, Human
agagacaggugagcucagggga

SEQ ID NO: 348937 - RNA, 20 nt, Human
agagcccuuaagcuguuaac

SEQ ID NO: 348938 - RNA, 21 nt, Human
agcucaggggagcuucucuca

SEQ ID NO: 348939 - RNA, 23 nt, Human
aggaaugaaccuagcuuaccaca

SEQ ID NO: 348940 - RNA, 24 nt, Human
aggcagucagagagacaggugagc

SEQ ID NO: 348941 - RNA, 26 nt, Human
agugacaagggacaaauaggggaaaa

SEQ ID NO: 348942 - RNA, 19 nt, Human
auacugagucuuuacugcc

SEQ ID NO: 348943 - RNA, 21 nt, Human
auccagcuauguuugcuaaua

SEQ ID NO: 348944 - RNA, 21 nt, Human
auccugccagcuuccaagucc

SEQ ID NO: 348945 - RNA, 24 nt, Human
augcaugcacuucccacauauaua

SEQ ID NO: 348946 - RNA, 20 nt, Human
auuaguuuaaaaaaaaaaaa

SEQ ID NO: 348947 - RNA, 23 nt, Human
caaaaguauaaaagcaaagacug

SEQ ID NO: 348948 - RNA, 23 nt, Human
caaagagcugcccuauguauaac

SEQ ID NO: 348949 - RNA, 21 nt, Human
caaauccugccagcuuccaag

SEQ ID NO: 348950 - RNA, 25 nt, Human
caaauccugccagcuuccaaguccc

SEQ ID NO: 348951 - RNA, 22 nt, Human
caacaaagugacaagggacaaa

SEQ ID NO: 348952 - RNA, 22 nt, Human
caacaauaacccauucuauaau

SEQ ID NO: 348953 - RNA, 24 nt, Human
caacuaaagaacaaugccuccuuc

SEQ ID NO: 348954 - RNA, 23 nt, Human
caauuucauaucaaaaaaaaaaa

SEQ ID NO: 348955 - RNA, 19 nt, Human
cacauguggcacuaggaaa

SEQ ID NO: 348956 - RNA, 22 nt, Human
cacucugauaaaacagaaugag

SEQ ID NO: 348957 - RNA, 23 nt, Human
cagcagcacccgggaccgccagc

SEQ ID NO: 348958 - RNA, 23 nt, Human
cagcaggaguaaguuuacccaaa

SEQ ID NO: 348959 - RNA, 26 nt, Human
cagccugagagaccaaauucugcaaa

SEQ ID NO: 348960 - RNA, 20 nt, Human
caguaugugacacgagagau

SEQ ID NO: 348961 - RNA, 21 nt, Human
caguaugugacacgagagaug

SEQ ID NO: 348962 - RNA, 21 nt, Human
cagucagagagacaggugagc

SEQ ID NO: 348963 - RNA, 22 nt, Human
cauccucccaacuuuucaucuc

SEQ ID NO: 348964 - RNA, 20 nt, Human
ccaggauacugaccugcacc

SEQ ID NO: 348965 - RNA, 27 nt, Human
cccaacuuuucaucuccuaucuccaau

SEQ ID NO: 348966 - RNA, 20 nt, Human
cccagaaucugugcaaaagu

SEQ ID NO: 348967 - RNA, 19 nt, Human
cccaucacccaaguaggga

SEQ ID NO: 348968 - RNA, 24 nt, Human
cccaugauggcauacagcuuuacc

SEQ ID NO: 348969 - RNA, 18 nt, Human
cccuauguauaacccaca

SEQ ID NO: 348970 - RNA, 23 nt, Human
ccggcaaaacagcggcuggcucu

SEQ ID NO: 348971 - RNA, 22 nt, Human
ccugcaccagcacguggggcag

SEQ ID NO: 348972 - RNA, 20 nt, Human
cgggguucugccccuuuucu

SEQ ID NO: 348973 - RNA, 27 nt, Human
cuaaccagcagcacccgggaccgccag

SEQ ID NO: 348974 - RNA, 22 nt, Human
cucaacucuuuuaugaggucaa

SEQ ID NO: 348975 - RNA, 19 nt, Human
cuccacagugaacaaucug

SEQ ID NO: 348976 - RNA, 18 nt, Human
cugccacaacugcaaggc

SEQ ID NO: 348977 - RNA, 22 nt, Human
cuggcuaaaaucuguaacuuca

SEQ ID NO: 348978 - RNA, 23 nt, Human
cuucccacauauauacuucacug

SEQ ID NO: 348979 - RNA, 18 nt, Human
gaaaacgaaaaaggaagg

SEQ ID NO: 348980 - RNA, 22 nt, Human
gaacaaucugcuacacauuccu

SEQ ID NO: 348981 - RNA, 21 nt, Human
gacaugguuggagagcuuucc

SEQ ID NO: 348982 - RNA, 24 nt, Human
gaccugcaccagcacguggggcag

SEQ ID NO: 348983 - RNA, 24 nt, Human
gagaaagacaauuucauaucaaaa

SEQ ID NO: 348984 - RNA, 22 nt, Human
gauaacugaaaacgaaaaagga

SEQ ID NO: 348985 - RNA, 23 nt, Human
gccccuuuucuaguucucugugc

SEQ ID NO: 348986 - RNA, 20 nt, Human
gcuccucacagcagcuucuu

SEQ ID NO: 348987 - RNA, 19 nt, Human
ggaagcugugaauaggauc

SEQ ID NO: 348988 - RNA, 21 nt, Human
ggcaaaacagcggcuggcucg

SEQ ID NO: 348989 - RNA, 22 nt, Human
ggcucggacccucccucagagc

SEQ ID NO: 348990 - RNA, 18 nt, Human
guauaaaagcaaagacug

SEQ ID NO: 348991 - RNA, 19 nt, Human
uaaaugacuguuuuacuuu

SEQ ID NO: 348992 - RNA, 27 nt, Human
uaacaacaauaacccauucuauaauua

SEQ ID NO: 348993 - RNA, 21 nt, Human
uaagaauaacaacaauaaccc

SEQ ID NO: 348994 - RNA, 18 nt, Human
uacaaggugcugauccug

SEQ ID NO: 348995 - RNA, 22 nt, Human
uacagcuuuacccggcaaaucc

SEQ ID NO: 348996 - RNA, 21 nt, Human
uaggggaaaaaaaaaauuaag

SEQ ID NO: 348997 - RNA, 24 nt, Human
uaguucauucacuguuagcuagau

SEQ ID NO: 348998 - RNA, 20 nt, Human
uauauacuucacugagccuu

SEQ ID NO: 348999 - RNA, 25 nt, Human
uaucaaaaaaaaaaaaaaaaaaacc

SEQ ID NO: 349000 - RNA, 25 nt, Human
uaugcacucugauaaaacagaauga

SEQ ID NO: 349001 - RNA, 19 nt, Human
uaugggggaccuuuaacca

SEQ ID NO: 349002 - RNA, 21 nt, Human
ucaaaaaaaaaaaaaaaaaaa

SEQ ID NO: 349003 - RNA, 23 nt, Human
ucaacucacagaauuaagagccc

SEQ ID NO: 349004 - RNA, 19 nt, Human
ucauaggagauauaucuuu

SEQ ID NO: 349005 - RNA, 26 nt, Human
ucauaucaaaaaaaaaaaaaaaaaaa

SEQ ID NO: 349006 - RNA, 26 nt, Human
ucauuaguuuaaaaaaaaaaaagaaa

SEQ ID NO: 349007 - RNA, 25 nt, Human
ucccaaacagccugagagaccaaau

SEQ ID NO: 349008 - RNA, 21 nt, Human
uccgaacagagaaguaugggg

SEQ ID NO: 349009 - RNA, 23 nt, Human
uccuccggcaaaacagcggcugg

SEQ ID NO: 349010 - RNA, 20 nt, Human
uccuucaccccaguaauguu

SEQ ID NO: 349011 - RNA, 20 nt, Human
ucucaacgccagacaugguu

SEQ ID NO: 349012 - RNA, 19 nt, Human
ucuccgaacagagaaguau

SEQ ID NO: 349013 - RNA, 22 nt, Human
ucucugugcacaagguuaugcc

SEQ ID NO: 349014 - RNA, 26 nt, Human
ucucugugcacaagguuaugccaccu

SEQ ID NO: 349015 - RNA, 21 nt, Human
ucugccccuuuucuaguucuc

SEQ ID NO: 349016 - RNA, 18 nt, Human
ugaaguaucuaaauguca

SEQ ID NO: 349017 - RNA, 19 nt, Human
ugaauacauuuuucaugga

SEQ ID NO: 349018 - RNA, 19 nt, Human
ugaggucaaagucacuuuu

SEQ ID NO: 349019 - RNA, 20 nt, Human
ugaugaggaaugaaccuagc

SEQ ID NO: 349020 - RNA, 24 nt, Human
ugcaacaaagugacaagggacaaa

SEQ ID NO: 349021 - RNA, 18 nt, Human
ugccuccuucaccccagu

SEQ ID NO: 349022 - RNA, 20 nt, Human
ugcuuaggauacagauugac

SEQ ID NO: 349023 - RNA, 24 nt, Human
uggaaugcuauaaaauuaaucccc

SEQ ID NO: 349024 - RNA, 20 nt, Human
uggagaagagcacaugucac

SEQ ID NO: 349025 - RNA, 21 nt, Human
uggcuaaaaucuguaacuuca

SEQ ID NO: 349026 - RNA, 22 nt, Human
uggcuaaaaucuguaacuucau

SEQ ID NO: 349027 - RNA, 23 nt, Human
uggcucggacccucccucagagc

SEQ ID NO: 349028 - RNA, 18 nt, Human
uguccugucuuccuauuc

SEQ ID NO: 349029 - RNA, 18 nt, Human
ugugcaaaaguaacugau

SEQ ID NO: 349030 - RNA, 23 nt, Human
uuagaauaaagacauccucccaa

SEQ ID NO: 349031 - RNA, 21 nt, Human
uuauauuaccuaguucauuca

SEQ ID NO: 349032 - RNA, 21 nt, Human
uucagaaaaaugucccccaga

SEQ ID NO: 349033 - RNA, 23 nt, Human
uucaugaggaagcugugaauagg

SEQ ID NO: 349034 - RNA, 23 nt, Human
uugauaacugaaaacgaaaaagg

SEQ ID NO: 349035 - RNA, 26 nt, Human
uuucuuuucaggugccccaugauggc

SEQ ID NO: 349036 - RNA, 24 nt, Human
uuuuuuuuuuuuguuuuaacuuuu

SEQ ID NO: 349037 - RNA, 18 nt, Human
uuuuuuuuuuuuuuuuug

SEQ ID NO: 349038 - RNA, 18 nt, Human
aaaacgcagcagucacca

SEQ ID NO: 349039 - RNA, 21 nt, Human
agaaaaacgcagcagucacca

SEQ ID NO: 349040 - RNA, 20 nt, Human
agaauggauggacagcaugg

SEQ ID NO: 349041 - RNA, 22 nt, Human
agagggcaaggaaggagugugg

SEQ ID NO: 349042 - RNA, 18 nt, Human
aggaaggaguguggccca

SEQ ID NO: 349043 - RNA, 23 nt, Human
agggagcuggggugguguggggg

SEQ ID NO: 349044 - RNA, 20 nt, Human
caacagggugacgaaugagc

SEQ ID NO: 349045 - RNA, 19 nt, Human
caagccauggucccugagc

SEQ ID NO: 349046 - RNA, 22 nt, Human
cacccaacagggugacgaauga

SEQ ID NO: 349047 - RNA, 22 nt, Human
ccauggucccugagcccaagac

SEQ ID NO: 349048 - RNA, 20 nt, Human
ccuaggcuaaggacagggag

SEQ ID NO: 349049 - RNA, 18 nt, Human
ccucagcaaaacagggag

SEQ ID NO: 349050 - RNA, 23 nt, Human
ccugggacccagggccauuuggg

SEQ ID NO: 349051 - RNA, 20 nt, Human
cuccagggcaguggccgggu

SEQ ID NO: 349052 - RNA, 23 nt, Human
cuggcuggguccaggguccuggg

SEQ ID NO: 349053 - RNA, 21 nt, Human
cuggggcagaggaccuccucu

SEQ ID NO: 349054 - RNA, 20 nt, Human
gaaagggcuacaagccaugg

SEQ ID NO: 349055 - RNA, 19 nt, Human
gagcccaagacacuuacag

SEQ ID NO: 349056 - RNA, 21 nt, Human
ggaugguguggcuugcccagu

SEQ ID NO: 349057 - RNA, 25 nt, Human
ggccuaggcuaaggacagggagggc

SEQ ID NO: 349058 - RNA, 20 nt, Human
gggcagaggaccuccucuuu

SEQ ID NO: 349059 - RNA, 23 nt, Human
ggggugguguggggguccugggg

SEQ ID NO: 349060 - RNA, 20 nt, Human
ggugguguggggguccuggg

SEQ ID NO: 349061 - RNA, 23 nt, Human
guccugggacccagggccauuuu

SEQ ID NO: 349062 - RNA, 19 nt, Human
ucacguggggcuuaucaag

SEQ ID NO: 349063 - RNA, 18 nt, Human
ugcccaguggccugagcu

SEQ ID NO: 349064 - RNA, 21 nt, Human
uggaaagggcuacaagccaug

SEQ ID NO: 349065 - RNA, 19 nt, Human
uggacagcaugggaugggg

SEQ ID NO: 349066 - RNA, 22 nt, Human
uggggugguguggggguccugg

SEQ ID NO: 349067 - RNA, 24 nt, Human
ugugagaauggauggacagcaugg

SEQ ID NO: 349068 - RNA, 23 nt, Human
uucuggcuggguccaggguccug

SEQ ID NO: 349069 - RNA, 25 nt, Human
uuuuuuuuuuuucacguggggcuua

SEQ ID NO: 349070 - RNA, 24 nt, Human
uuuuuuuuuuuuuuuucacgugau

SEQ ID NO: 349071 - RNA, 22 nt, Human
uuuuuuuuuuuuuuuuucacgu

SEQ ID NO: 349072 - RNA, 25 nt, Human
uuuuuuuuuuuuuuuuucacguggg

SEQ ID NO: 349073 - RNA, 22 nt, Human
aggcagggccggggcgggaggg

SEQ ID NO: 349074 - RNA, 23 nt, Human
aggcagggccggggcgggagggc

SEQ ID NO: 349075 - RNA, 21 nt, Human
gaaaaaauaaggagggagccg

SEQ ID NO: 349076 - RNA, 21 nt, Human
ggcacguccacuccgagcccg

SEQ ID NO: 349077 - RNA, 18 nt, Human
ggccggggcgggagggcg

SEQ ID NO: 349078 - RNA, 20 nt, Human
ggccggggcgggagggcgcu

SEQ ID NO: 349079 - RNA, 20 nt, Human
uuugaaaaaauaaggaggga

SEQ ID NO: 349080 - RNA, 27 nt, Human
uuuuuuuuuuuuuuuuuuuuuuugggg

SEQ ID NO: 349081 - RNA, 21 nt, Human
aaaaacaccauaggaccacca

SEQ ID NO: 349082 - RNA, 22 nt, Human
aaaaacaccauaggaccaccaa

SEQ ID NO: 349083 - RNA, 23 nt, Human
aaacaccauaggaccaccaagcu

SEQ ID NO: 349084 - RNA, 27 nt, Human
aaggaaaauacaguauuaucuguaauc

SEQ ID NO: 349085 - RNA, 19 nt, Human
accaagcuauuucuauugc

SEQ ID NO: 349086 - RNA, 26 nt, Human
aguacuuccccaaggaagcucacacu

SEQ ID NO: 349087 - RNA, 20 nt, Human
auacuuccaaaaacaccaua

SEQ ID NO: 349088 - RNA, 22 nt, Human
augaaaaucaacauucauaaua

SEQ ID NO: 349089 - RNA, 19 nt, Human
caaaaacaccauaggacca

SEQ ID NO: 349090 - RNA, 22 nt, Human
caaaaacaccauaggaccacca

SEQ ID NO: 349091 - RNA, 22 nt, Human
caaaaugaccagguaauuuaua

SEQ ID NO: 349092 - RNA, 22 nt, Human
cagagccagcucccgguccucc

SEQ ID NO: 349093 - RNA, 21 nt, Human
cagccuccagagccagcuccc

SEQ ID NO: 349094 - RNA, 22 nt, Human
caucaaggaaauauucauucau

SEQ ID NO: 349095 - RNA, 23 nt, Human
caucaaggaaauauucauucaua

SEQ ID NO: 349096 - RNA, 21 nt, Human
ccaaauacuuccaaaaacacc

SEQ ID NO: 349097 - RNA, 21 nt, Human
ccaaaucuccaaggcagccaa

SEQ ID NO: 349098 - RNA, 22 nt, Human
ccaaaucuccaaggcagccaaa

SEQ ID NO: 349099 - RNA, 21 nt, Human
ccaccaagcuauuucuauugc

SEQ ID NO: 349100 - RNA, 18 nt, Human
cggcgucgccuccgcagc

SEQ ID NO: 349101 - RNA, 24 nt, Human
cucaagaaguacuuccccaaggaa

SEQ ID NO: 349102 - RNA, 23 nt, Human
cuuccccaaggaagcucacacca

SEQ ID NO: 349103 - RNA, 22 nt, Human
gaagcucacaccaucauaccag

SEQ ID NO: 349104 - RNA, 22 nt, Human
ggaaaaaaaucugauaaucugg

SEQ ID NO: 349105 - RNA, 27 nt, Human
uaaaaaaacauaagaaucauauccaaa

SEQ ID NO: 349106 - RNA, 25 nt, Human
uaaaacauccuguuaguuacauaac

SEQ ID NO: 349107 - RNA, 27 nt, Human
uaaccaagcauaugugugcagagacca

SEQ ID NO: 349108 - RNA, 24 nt, Human
uaagaaaaaacauuacuuuaaaaa

SEQ ID NO: 349109 - RNA, 19 nt, Human
uaauuuguuaaaaugaauc

SEQ ID NO: 349110 - RNA, 20 nt, Human
uaauuuguuaaaaugaaucu

SEQ ID NO: 349111 - RNA, 20 nt, Human
uccugcuccaauuucuccac

SEQ ID NO: 349112 - RNA, 20 nt, Human
ucguucucuccggcgucgcc

SEQ ID NO: 349113 - RNA, 20 nt, Human
ucucagaauuguauucuuca

SEQ ID NO: 349114 - RNA, 22 nt, Human
ucuccaaaucuccaaggcagcc

SEQ ID NO: 349115 - RNA, 23 nt, Human
ucuccaaaucuccaaggcagcca

SEQ ID NO: 349116 - RNA, 21 nt, Human
ucugaauagccauccagaucu

SEQ ID NO: 349117 - RNA, 22 nt, Human
ucuucugcuaucauuuuuugcc

SEQ ID NO: 349118 - RNA, 20 nt, Human
ugaagaagguuuucuauuaa

SEQ ID NO: 349119 - RNA, 22 nt, Human
ugaaugcaugcaaguaaccaag

SEQ ID NO: 349120 - RNA, 19 nt, Human
ugagggaaaaaaaucugau

SEQ ID NO: 349121 - RNA, 20 nt, Human
ugccaaauacuuccaaaaac

SEQ ID NO: 349122 - RNA, 23 nt, Human
ugccaaauacuuccaaaaacacc

SEQ ID NO: 349123 - RNA, 23 nt, Human
uguauucuucagucuuuuccaca

SEQ ID NO: 349124 - RNA, 18 nt, Human
uuccugcuccaauuucuc

SEQ ID NO: 349125 - RNA, 18 nt, Human
uuucacaauuaugauguu

SEQ ID NO: 349126 - RNA, 21 nt, Human
uuucucagaauuguauucuuc

SEQ ID NO: 349127 - RNA, 23 nt, Human
uuugauaauuucuuuuccugcuc

SEQ ID NO: 349128 - RNA, 24 nt, Human
uuuucuauuaaaaaaacauaagaa

SEQ ID NO: 349129 - RNA, 20 nt, Human
uuuuuugccauguuaucuga

SEQ ID NO: 349130 - RNA, 24 nt, Human
uuuuuuuuuuuuuuuuucacaauu

SEQ ID NO: 349131 - RNA, 22 nt, Human
aaaaaccacuuggaagaaggga

SEQ ID NO: 349132 - RNA, 23 nt, Human
aaaacgguuacagacccuagaua

SEQ ID NO: 349133 - RNA, 20 nt, Human
aaacagcuaagaaugacucc

SEQ ID NO: 349134 - RNA, 23 nt, Human
aaacagcuaagaaugacuccagc

SEQ ID NO: 349135 - RNA, 20 nt, Human
aacauggugaaacccugucu

SEQ ID NO: 349136 - RNA, 21 nt, Human
aacauggugaaacccugucuc

SEQ ID NO: 349137 - RNA, 25 nt, Human
aacgcggguggaucaccugagguca

SEQ ID NO: 349138 - RNA, 18 nt, Human
aagaaugacuccagcccc

SEQ ID NO: 349139 - RNA, 24 nt, Human
acagagcaagacucugugucaaaa

SEQ ID NO: 349140 - RNA, 20 nt, Human
accaggguauguugagguga

SEQ ID NO: 349141 - RNA, 23 nt, Human
acccaauacucugcgccugcacc

SEQ ID NO: 349142 - RNA, 24 nt, Human
acccugucucuacuaaaaauacaa

SEQ ID NO: 349143 - RNA, 24 nt, Human
acuaacauggugaaacccugucuc

SEQ ID NO: 349144 - RNA, 23 nt, Human
agaaaagucagaaggauccaaag

SEQ ID NO: 349145 - RNA, 24 nt, Human
agacugaggcaggaggaucgcuug

SEQ ID NO: 349146 - RNA, 21 nt, Human
agagcagaagaaaagucagaa

SEQ ID NO: 349147 - RNA, 18 nt, Human
agagguugcggugagccg

SEQ ID NO: 349148 - RNA, 23 nt, Human
agagguugcggugagccgagauc

SEQ ID NO: 349149 - RNA, 24 nt, Human
agagguugcggugagccgagauca

SEQ ID NO: 349150 - RNA, 24 nt, Human
agccugacuaacauggugaaaccc

SEQ ID NO: 349151 - RNA, 24 nt, Human
agccugggcaacagagcaagacuc

SEQ ID NO: 349152 - RNA, 20 nt, Human
agcggcucgggguccaaagc

SEQ ID NO: 349153 - RNA, 25 nt, Human
aggaagagaaagcuuagagagagca

SEQ ID NO: 349154 - RNA, 21 nt, Human
aggcagagguugcggugagcc

SEQ ID NO: 349155 - RNA, 24 nt, Human
aggcagagguugcggugagccgag

SEQ ID NO: 349156 - RNA, 24 nt, Human
aggcaggaggaucgcuugaacccg

SEQ ID NO: 349157 - RNA, 22 nt, Human
aggcggggcgugguggcucacg

SEQ ID NO: 349158 - RNA, 24 nt, Human
aggcgugguggugcacaccuguaa

SEQ ID NO: 349159 - RNA, 19 nt, Human
aggucaggaguucgagacc

SEQ ID NO: 349160 - RNA, 28 nt, Human
aguggucccaaggacuuggggggagggu

SEQ ID NO: 349161 - RNA, 21 nt, Human
aucaccugaggucaggaguuc

SEQ ID NO: 349162 - RNA, 24 nt, Human
aucaugccauugcacuccagccug

SEQ ID NO: 349163 - RNA, 22 nt, Human
aucgaggccagccaaacccaau

SEQ ID NO: 349164 - RNA, 23 nt, Human
aucgcuugaacccgggaggcaga

SEQ ID NO: 349165 - RNA, 24 nt, Human
auugcacuccagccugggcaacag

SEQ ID NO: 349166 - RNA, 24 nt, Human
caacgcggguggaucaccugaggu

SEQ ID NO: 349167 - RNA, 24 nt, Human
cacaccuguaaucccagcuacuug

SEQ ID NO: 349168 - RNA, 23 nt, Human
caccugaggucaggaguucgaga

SEQ ID NO: 349169 - RNA, 20 nt, Human
caccuguaaucccagcuacu

SEQ ID NO: 349170 - RNA, 24 nt, Human
caccuguaaucccagcuacuuggg

SEQ ID NO: 349171 - RNA, 24 nt, Human
cacgccuauaaucccagcacguug

SEQ ID NO: 349172 - RNA, 23 nt, Human
cacuccagccugggcaacagagc

SEQ ID NO: 349173 - RNA, 20 nt, Human
cagaagcuucccauauccuc

SEQ ID NO: 349174 - RNA, 24 nt, Human
cagcacguugggaggccaacgcgg

SEQ ID NO: 349175 - RNA, 23 nt, Human
cagcggcucgggguccaaagccu

SEQ ID NO: 349176 - RNA, 22 nt, Human
cauccuaugcacucacagaagc

SEQ ID NO: 349177 - RNA, 18 nt, Human
cauugcacuccagccugg

SEQ ID NO: 349178 - RNA, 19 nt, Human
cauugcacuccagccuggg

SEQ ID NO: 349179 - RNA, 21 nt, Human
cauugcacuccagccugggca

SEQ ID NO: 349180 - RNA, 24 nt, Human
cauugcacuccagccugggcaaca

SEQ ID NO: 349181 - RNA, 27 nt, Human
cauugcacuccagccugggcaacagag

SEQ ID NO: 349182 - RNA, 21 nt, Human
ccagccaaacccaauacucug

SEQ ID NO: 349183 - RNA, 20 nt, Human
ccauugcacuccagccuggg

SEQ ID NO: 349184 - RNA, 21 nt, Human
ccauugcacuccagccugggc

SEQ ID NO: 349185 - RNA, 23 nt, Human
ccauugcacuccagccugggcaa

SEQ ID NO: 349186 - RNA, 24 nt, Human
ccauugcacuccagccugggcaac

SEQ ID NO: 349187 - RNA, 20 nt, Human
cccagcacguugggaggcca

SEQ ID NO: 349188 - RNA, 19 nt, Human
ccggccgccgccgccgccg

SEQ ID NO: 349189 - RNA, 22 nt, Human
ccggccgccgccgccgccgccu

SEQ ID NO: 349190 - RNA, 25 nt, Human
ccucuguuuggcuuugccauugugc

SEQ ID NO: 349191 - RNA, 22 nt, Human
ccugacuaacauggugaaaccc

SEQ ID NO: 349192 - RNA, 24 nt, Human
ccugacuaacauggugaaacccug

SEQ ID NO: 349193 - RNA, 22 nt, Human
ccugaggucaggaguucgagac

SEQ ID NO: 349194 - RNA, 22 nt, Human
ccugcuuauuacaggaaagagu

SEQ ID NO: 349195 - RNA, 22 nt, Human
ccugggcaacagagcaagacuc

SEQ ID NO: 349196 - RNA, 21 nt, Human
ccuguaaucccagcuacuugg

SEQ ID NO: 349197 - RNA, 24 nt, Human
cgagaccagccugacuaacauggu

SEQ ID NO: 349198 - RNA, 24 nt, Human
cgagaucaugccauugcacuccag

SEQ ID NO: 349199 - RNA, 19 nt, Human
cgaggccagccaaacccaa

SEQ ID NO: 349200 - RNA, 23 nt, Human
cgccuauaaucccagcacguugg

SEQ ID NO: 349201 - RNA, 24 nt, Human
cgccuauaaucccagcacguuggg

SEQ ID NO: 349202 - RNA, 24 nt, Human
cgggaggcagagguugcggugagc

SEQ ID NO: 349203 - RNA, 24 nt, Human
cggguggaucaccugaggucagga

SEQ ID NO: 349204 - RNA, 22 nt, Human
cucacgccuauaaucccagcac

SEQ ID NO: 349205 - RNA, 22 nt, Human
cucacgccuauaaucccagcac

SEQ ID NO: 349206 - RNA, 27 nt, Human
cucacuaccagucuggguccggccgcc

SEQ ID NO: 349207 - RNA, 23 nt, Human
cuccagcccccauccuaugcacu

SEQ ID NO: 349208 - RNA, 20 nt, Human
cuccuuggcccuaucccuga

SEQ ID NO: 349209 - RNA, 20 nt, Human
cucugugucaaaaaaaaaaa

SEQ ID NO: 349210 - RNA, 21 nt, Human
cugacaaagcuuagaaaggaa

SEQ ID NO: 349211 - RNA, 24 nt, Human
cugacuaacauggugaaacccugu

SEQ ID NO: 349212 - RNA, 21 nt, Human
cuguaaucccagcuacuuggg

SEQ ID NO: 349213 - RNA, 19 nt, Human
cuuagagagagcagaagaa

SEQ ID NO: 349214 - RNA, 24 nt, Human
cuuagagccacaccaggguauguu

SEQ ID NO: 349215 - RNA, 19 nt, Human
gaaacccugucucuacuaa

SEQ ID NO: 349216 - RNA, 20 nt, Human
gaagcuucccauauccucuu

SEQ ID NO: 349217 - RNA, 21 nt, Human
gacccaaguggucccaaggac

SEQ ID NO: 349218 - RNA, 22 nt, Human
gacugacaaagcuuagaaagga

SEQ ID NO: 349219 - RNA, 18 nt, Human
gacuuuccugcaaaaccu

SEQ ID NO: 349220 - RNA, 20 nt, Human
gaggaagagaaagcuuagag

SEQ ID NO: 349221 - RNA, 23 nt, Human
gaggaucgcuugaacccgggagg

SEQ ID NO: 349222 - RNA, 21 nt, Human
gaucaccugaggucaggaguu

SEQ ID NO: 349223 - RNA, 24 nt, Human
gaucaccugaggucaggaguucga

SEQ ID NO: 349224 - RNA, 24 nt, Human
gcacuccagccugggcaacagagc

SEQ ID NO: 349225 - RNA, 22 nt, Human
gccauugcacuccagccugggc

SEQ ID NO: 349226 - RNA, 24 nt, Human
gccauugcacuccagccugggcaa

SEQ ID NO: 349227 - RNA, 24 nt, Human
gccuuuccuuuuucucaaaccaaa

SEQ ID NO: 349228 - RNA, 19 nt, Human
gcggguggaucaccugagg

SEQ ID NO: 349229 - RNA, 27 nt, Human
ggaaacagcuaagaaugaccgguaccc

SEQ ID NO: 349230 - RNA, 23 nt, Human
ggaagaagggacuuuccugcaaa

SEQ ID NO: 349231 - RNA, 18 nt, Human
ggacuuggggggagggua

SEQ ID NO: 349232 - RNA, 19 nt, Human
ggagagagaggaagaaagu

SEQ ID NO: 349233 - RNA, 18 nt, Human
ggcggggcgugguggcuc

SEQ ID NO: 349234 - RNA, 21 nt, Human
ggcucacgccuauaaucccag

SEQ ID NO: 349235 - RNA, 18 nt, Human
gggacccaagugguccca

SEQ ID NO: 349236 - RNA, 24 nt, Human
gggcgugguggcucacgccuauaa

SEQ ID NO: 349237 - RNA, 21 nt, Human
ggugcacaccuguaaucccag

SEQ ID NO: 349238 - RNA, 24 nt, Human
gguggcucacgccuauaaucccag

SEQ ID NO: 349239 - RNA, 23 nt, Human
guggcucacgccuauaaucccag

SEQ ID NO: 349240 - RNA, 23 nt, Human
guggugcacaccuguaaucccag

SEQ ID NO: 349241 - RNA, 24 nt, Human
guugcggugagccgagaucaugcc

SEQ ID NO: 349242 - RNA, 22 nt, Human
uaaaaauacaaaauuagucagg

SEQ ID NO: 349243 - RNA, 23 nt, Human
uaaaaauacaaaauuagucaggc

SEQ ID NO: 349244 - RNA, 19 nt, Human
uaaaauaugucaaggcaua

SEQ ID NO: 349245 - RNA, 22 nt, Human
uaaaucgaggccagccaaaccc

SEQ ID NO: 349246 - RNA, 22 nt, Human
uaacauggugaaacccugucuc

SEQ ID NO: 349247 - RNA, 24 nt, Human
uaacauggugaaacccugucucua

SEQ ID NO: 349248 - RNA, 19 nt, Human
uaagaaugacuccagcccc

SEQ ID NO: 349249 - RNA, 18 nt, Human
uacaggaaagaguucuug

SEQ ID NO: 349250 - RNA, 21 nt, Human
uaccagucuggguccggccgc

SEQ ID NO: 349251 - RNA, 21 nt, Human
uaggcggggcgugguggcuca

SEQ ID NO: 349252 - RNA, 22 nt, Human
uaggcggggcgugguggcucac

SEQ ID NO: 349253 - RNA, 18 nt, Human
ucaaaccaaaacgguuac

SEQ ID NO: 349254 - RNA, 24 nt, Human
ucaaaccaaaacgguuacagaccc

SEQ ID NO: 349255 - RNA, 22 nt, Human
ucaaggcauaaagucuugcuau

SEQ ID NO: 349256 - RNA, 20 nt, Human
ucaccugaggucaggaguuc

SEQ ID NO: 349257 - RNA, 23 nt, Human
ucaugccauugcacuccagccug

SEQ ID NO: 349258 - RNA, 22 nt, Human
uccaaagccucacuaccagucu

SEQ ID NO: 349259 - RNA, 18 nt, Human
ucgcuugaacccgggagg

SEQ ID NO: 349260 - RNA, 20 nt, Human
ucucuacuaaaaauacaaaa

SEQ ID NO: 349261 - RNA, 21 nt, Human
ucuugguuguuuucuccuugg

SEQ ID NO: 349262 - RNA, 23 nt, Human
ucuuuuuuuuuuuuuuaauguuu

SEQ ID NO: 349263 - RNA, 24 nt, Human
ugacaaagcuuagaaaggaacuga

SEQ ID NO: 349264 - RNA, 24 nt, Human
ugacuaacauggugaaacccuguc

SEQ ID NO: 349265 - RNA, 22 nt, Human
ugagccgagaucaugccauugc

SEQ ID NO: 349266 - RNA, 24 nt, Human
ugaggcaggaggaucgcuugaacc

SEQ ID NO: 349267 - RNA, 25 nt, Human
ugaggcaggaggaucgcuugaaccc

SEQ ID NO: 349268 - RNA, 22 nt, Human
ugcacuccagccugggcaacag

SEQ ID NO: 349269 - RNA, 22 nt, Human
ugcacuccagccugggcaacag

SEQ ID NO: 349270 - RNA, 24 nt, Human
ugccauugcacuccagccugggca

SEQ ID NO: 349271 - RNA, 18 nt, Human
uggaaaaaccacuuggaa

SEQ ID NO: 349272 - RNA, 24 nt, Human
uggaucaccugaggucaggaguuc

SEQ ID NO: 349273 - RNA, 27 nt, Human
uggaucaccugaggucaggaguucgag

SEQ ID NO: 349274 - RNA, 21 nt, Human
uggcucacgccuauaauccca

SEQ ID NO: 349275 - RNA, 24 nt, Human
uggcucacgccuauaaucccagca

SEQ ID NO: 349276 - RNA, 23 nt, Human
ugggagacugaggcaggaggauc

SEQ ID NO: 349277 - RNA, 24 nt, Human
ugggaggccaacgcggguggauca

SEQ ID NO: 349278 - RNA, 24 nt, Human
uggggacccaaguggucccaagga

SEQ ID NO: 349279 - RNA, 19 nt, Human
uggucuuuuuuuuuuuuuu

SEQ ID NO: 349280 - RNA, 22 nt, Human
uggugcacaccuguaaucccag

SEQ ID NO: 349281 - RNA, 24 nt, Human
ugguggcucacgccuauaauccca

SEQ ID NO: 349282 - RNA, 24 nt, Human
ugguggugcacaccuguaauccca

SEQ ID NO: 349283 - RNA, 19 nt, Human
ugucaaaaaaaaaaagaau

SEQ ID NO: 349284 - RNA, 21 nt, Human
uuccugcaaaaccuuaaagac

SEQ ID NO: 349285 - RNA, 19 nt, Human
uucuugguuguuuucuccu

SEQ ID NO: 349286 - RNA, 18 nt, Human
uugcggugagccgagauc

SEQ ID NO: 349287 - RNA, 19 nt, Human
uugcggugagccgagauca

SEQ ID NO: 349288 - RNA, 20 nt, Human
uugcggugagccgagaucau

SEQ ID NO: 349289 - RNA, 24 nt, Human
uugggagacugaggcaggaggauc

SEQ ID NO: 349290 - RNA, 21 nt, Human
uuuaauguuucuuccucuguu

SEQ ID NO: 349291 - RNA, 20 nt, Human
uuuccugcaaaaccuuaaag

SEQ ID NO: 349292 - RNA, 24 nt, Human
uuucuccuuggcccuaucccugau

SEQ ID NO: 349293 - RNA, 25 nt, Human
uuuuuuuuuuuuuuuuuuuuaaugg

SEQ ID NO: 349294 - RNA, 20 nt, Human
aaacagaaacucuaaguacc

SEQ ID NO: 349295 - RNA, 23 nt, Human
aaacagaaacucuaaguaccagu

SEQ ID NO: 349296 - RNA, 20 nt, Human
aagagaaguugggaauuuau

SEQ ID NO: 349297 - RNA, 23 nt, Human
agaaguugggaauuuauucuaaa

SEQ ID NO: 349298 - RNA, 23 nt, Human
aggagaaagaucugacucuccaa

SEQ ID NO: 349299 - RNA, 19 nt, Human
aggaggugguuccucauuc

SEQ ID NO: 349300 - RNA, 24 nt, Human
auagaaagcaagagaaguugggaa

SEQ ID NO: 349301 - RNA, 19 nt, Human
caaacagaaacucuaagua

SEQ ID NO: 349302 - RNA, 27 nt, Human
caacaacgccacugguaauaaagcuuu

SEQ ID NO: 349303 - RNA, 24 nt, Human
cagaccucauuucaaacaugcaac

SEQ ID NO: 349304 - RNA, 18 nt, Human
ccacuuuaaacagaccuc

SEQ ID NO: 349305 - RNA, 21 nt, Human
cgaaagauauucaaggagaaa

SEQ ID NO: 349306 - RNA, 20 nt, Human
cuuuugcuuuucuucccuuu

SEQ ID NO: 349307 - RNA, 20 nt, Human
gacccaaggaaccucggcga

SEQ ID NO: 349308 - RNA, 21 nt, Human
ggauaaacaccagucggcccg

SEQ ID NO: 349309 - RNA, 24 nt, Human
uaaacagaccucauuucaaacaug

SEQ ID NO: 349310 - RNA, 19 nt, Human
uagaaagcaagagaaguug

SEQ ID NO: 349311 - RNA, 26 nt, Human
ucagucaggcuggcaccaugacccaa

SEQ ID NO: 349312 - RNA, 21 nt, Human
uccucuucucagucaggcugg

SEQ ID NO: 349313 - RNA, 20 nt, Human
ugaacaguaggaggaggugg

SEQ ID NO: 349314 - RNA, 21 nt, Human
uugaacaguaggaggaggugg

SEQ ID NO: 349315 - RNA, 19 nt, Human
accgucccuccauccagau

SEQ ID NO: 349316 - RNA, 21 nt, Human
caaaauaaguuagggccggcc

SEQ ID NO: 349317 - RNA, 24 nt, Human
cacacucaggaauggugaccgucc

SEQ ID NO: 349318 - RNA, 22 nt, Human
cacucaggaauggugaccgucc

SEQ ID NO: 349319 - RNA, 19 nt, Human
cagagcagccgggcagggc

SEQ ID NO: 349320 - RNA, 26 nt, Human
cagcaacaaucacaucgagcagcucc

SEQ ID NO: 349321 - RNA, 22 nt, Human
cagccgggcagggcugggaggc

SEQ ID NO: 349322 - RNA, 20 nt, Human
cagcuccugggucucugccu

SEQ ID NO: 349323 - RNA, 18 nt, Human
cagcugagccggcaggau

SEQ ID NO: 349324 - RNA, 18 nt, Human
caggcccauugcgggcug

SEQ ID NO: 349325 - RNA, 20 nt, Human
ccagcacacgcugacggggc

SEQ ID NO: 349326 - RNA, 21 nt, Human
ccagcacacgcugacggggcc

SEQ ID NO: 349327 - RNA, 22 nt, Human
ccagcacacgcugacggggccg

SEQ ID NO: 349328 - RNA, 19 nt, Human
ccauugcgggcuguaccuu

SEQ ID NO: 349329 - RNA, 23 nt, Human
cccugcccaccccuaguggucgg

SEQ ID NO: 349330 - RNA, 20 nt, Human
ccuccagcagcugagccggc

SEQ ID NO: 349331 - RNA, 23 nt, Human
ccugcagccgcuggcuggaccag

SEQ ID NO: 349332 - RNA, 23 nt, Human
cgccugcagccgcuggcuggacc

SEQ ID NO: 349333 - RNA, 25 nt, Human
cuagaaacucgccugcagccgcugg

SEQ ID NO: 349334 - RNA, 18 nt, Human
cucccggcacggugcuca

SEQ ID NO: 349335 - RNA, 18 nt, Human
cucugcaguggcucuggc

SEQ ID NO: 349336 - RNA, 19 nt, Human
cuggaaggccgcguugacc

SEQ ID NO: 349337 - RNA, 26 nt, Human
gcggggacgggggcuguugcuggagc

SEQ ID NO: 349338 - RNA, 21 nt, Human
gcggggcggggacgggggcug

SEQ ID NO: 349339 - RNA, 19 nt, Human
gcggggcggggcggggacg

SEQ ID NO: 349340 - RNA, 18 nt, Human
gcuguaucugagaggaaa

SEQ ID NO: 349341 - RNA, 19 nt, Human
ggcggggcggggacggggg

SEQ ID NO: 349342 - RNA, 20 nt, Human
ggggcggggcggggacgggg

SEQ ID NO: 349343 - RNA, 18 nt, Human
gugggugugcugaggacc

SEQ ID NO: 349344 - RNA, 19 nt, Human
uacaggcccauugcgggcu

SEQ ID NO: 349345 - RNA, 23 nt, Human
ucaggaauggugaccgucccucc

SEQ ID NO: 349346 - RNA, 22 nt, Human
ucgguaacgaccggaagcagag

SEQ ID NO: 349347 - RNA, 21 nt, Human
ucugcaguggcucuggcaagg

SEQ ID NO: 349348 - RNA, 22 nt, Human
ucuggcaaggguggaaugugca

SEQ ID NO: 349349 - RNA, 21 nt, Human
ugccuggaaggccgcguugac

SEQ ID NO: 349350 - RNA, 23 nt, Human
ugcgucugacucugcaguggcuc

SEQ ID NO: 349351 - RNA, 21 nt, Human
ugcugaggaccuccagcagcu

SEQ ID NO: 349352 - RNA, 21 nt, Human
uugaccccaaugaugaagggc

SEQ ID NO: 349353 - RNA, 24 nt, Human
uugaccccaaugaugaagggcgug

SEQ ID NO: 349354 - RNA, 18 nt, Human
aaaaaagaaauacgauga

SEQ ID NO: 349355 - RNA, 20 nt, Human
aaaaaagaaauacgaugaua

SEQ ID NO: 349356 - RNA, 21 nt, Human
aagugaggggagaagaggagg

SEQ ID NO: 349357 - RNA, 21 nt, Human
agaggaaguagggaaaaguga

SEQ ID NO: 349358 - RNA, 22 nt, Human
agugaggggagaagaggaggaa

SEQ ID NO: 349359 - RNA, 20 nt, Human
aucaaauuucuuuuuuuaaa

SEQ ID NO: 349360 - RNA, 23 nt, Human
aucuggcauuuuaagcauaagag

SEQ ID NO: 349361 - RNA, 22 nt, Human
aucuucuucugaccuaccacua

SEQ ID NO: 349362 - RNA, 18 nt, Human
auuucuugguuauggugc

SEQ ID NO: 349363 - RNA, 25 nt, Human
caauuuaacuaaaaaaucaguagug

SEQ ID NO: 349364 - RNA, 20 nt, Human
cagaggaaguagggaaaagu

SEQ ID NO: 349365 - RNA, 23 nt, Human
cagugcccacgaugcugauuucc

SEQ ID NO: 349366 - RNA, 23 nt, Human
cauaccaacguugaagaauuaac

SEQ ID NO: 349367 - RNA, 20 nt, Human
cccccgaacaacaucuggca

SEQ ID NO: 349368 - RNA, 19 nt, Human
ccugaaacaagaaacaauc

SEQ ID NO: 349369 - RNA, 18 nt, Human
gugaggggagaagaggag

SEQ ID NO: 349370 - RNA, 21 nt, Human
uaaaaaaaagaaauacgauga

SEQ ID NO: 349371 - RNA, 18 nt, Human
uaaccauuccugaaacaa

SEQ ID NO: 349372 - RNA, 19 nt, Human
uagaaugccuuuacaaacu

SEQ ID NO: 349373 - RNA, 19 nt, Human
uagaaugccuuuacaaacu

SEQ ID NO: 349374 - RNA, 21 nt, Human
uauguuuuugcaauauauuug

SEQ ID NO: 349375 - RNA, 18 nt, Human
ucaaauuucuuuuuuuaa

SEQ ID NO: 349376 - RNA, 24 nt, Human
uccaauuuauuuguuaaucaguaa

SEQ ID NO: 349377 - RNA, 20 nt, Human
ugaaacaagaaacaaucuuu

SEQ ID NO: 349378 - RNA, 20 nt, Human
ugcugcuagaaagauacaag

SEQ ID NO: 349379 - RNA, 19 nt, Human
uggcauuuuaagcauaaga

SEQ ID NO: 349380 - RNA, 25 nt, Human
uguuuuugcaauauauuuguuacaa

SEQ ID NO: 349381 - RNA, 19 nt, Human
uuccugaaacaagaaacaa

SEQ ID NO: 349382 - RNA, 19 nt, Human
aaaaaaaaaaaaaguguaa

SEQ ID NO: 349383 - RNA, 18 nt, Human
aaaaaaaaaaaguguaau

SEQ ID NO: 349384 - RNA, 20 nt, Human
aaaaaaaaauucccacaagg

SEQ ID NO: 349385 - RNA, 22 nt, Human
aaaaaagccauucugaaaauaa

SEQ ID NO: 349386 - RNA, 18 nt, Human
aaaaaaguauauucucug

SEQ ID NO: 349387 - RNA, 19 nt, Human
aaaaaaguauauucucugu

SEQ ID NO: 349388 - RNA, 24 nt, Human
aaaaagaaaaacacuggacaaaaa

SEQ ID NO: 349389 - RNA, 20 nt, Human
aaaaagcaagagaaugaaaa

SEQ ID NO: 349390 - RNA, 22 nt, Human
aaaaagccaaaagggaaugagc

SEQ ID NO: 349391 - RNA, 22 nt, Human
aaaaagccauucugaaaauaac

SEQ ID NO: 349392 - RNA, 22 nt, Human
aaaaaugaguauucucuucucc

SEQ ID NO: 349393 - RNA, 24 nt, Human
aaaacaaauguggaagcaaaggcc

SEQ ID NO: 349394 - RNA, 20 nt, Human
aaaacugcaggaauaucaca

SEQ ID NO: 349395 - RNA, 24 nt, Human
aaaaggagacaggcucauuggcca

SEQ ID NO: 349396 - RNA, 22 nt, Human
aaaaugaguauucucuucucca

SEQ ID NO: 349397 - RNA, 25 nt, Human
aaacaaaaagaaaaacaaaaccuaa

SEQ ID NO: 349398 - RNA, 18 nt, Human
aaacaaaacaaaacaaaa

SEQ ID NO: 349399 - RNA, 21 nt, Human
aaacaaaacaaaauccagagc

SEQ ID NO: 349400 - RNA, 25 nt, Human
aaacaaaauccagagcuacaacaac

SEQ ID NO: 349401 - RNA, 21 nt, Human
aaacaggaaagaaagaacaaa

SEQ ID NO: 349402 - RNA, 26 nt, Human
aaacccaacacacucaccuaacagaa

SEQ ID NO: 349403 - RNA, 22 nt, Human
aaacccacaaaugauauuucgg

SEQ ID NO: 349404 - RNA, 27 nt, Human
aaaggaacauaaccuuauaaaauggcc

SEQ ID NO: 349405 - RNA, 18 nt, Human
aaaguggacauaguacag

SEQ ID NO: 349406 - RNA, 24 nt, Human
aaauacccuuucuggguuuguacc

SEQ ID NO: 349407 - RNA, 23 nt, Human
aaauguggaagcaaaggccucca

SEQ ID NO: 349408 - RNA, 23 nt, Human
aacaaaauccagagcuacaacaa

SEQ ID NO: 349409 - RNA, 20 nt, Human
aacacacucaccuaacagaa

SEQ ID NO: 349410 - RNA, 19 nt, Human
aacacagcucaagaagccc

SEQ ID NO: 349411 - RNA, 23 nt, Human
aacacgcucagaacgcacacaca

SEQ ID NO: 349412 - RNA, 21 nt, Human
aaccaaacaaggaaaaagcca

SEQ ID NO: 349413 - RNA, 22 nt, Human
aaccaaacaaggaaaaagccaa

SEQ ID NO: 349414 - RNA, 27 nt, Human
aacccaacacacucaccuaacagaaaa

SEQ ID NO: 349415 - RNA, 22 nt, Human
aaccugcaagcaccaucaaaga

SEQ ID NO: 349416 - RNA, 23 nt, Human
aacggcaccgaagaauuucuacc

SEQ ID NO: 349417 - RNA, 25 nt, Human
aagaaagaacaaaagacggcugucg

SEQ ID NO: 349418 - RNA, 19 nt, Human
aagcaagagaaugaaaugg

SEQ ID NO: 349419 - RNA, 19 nt, Human
aagcaccaucaaagaaagg

SEQ ID NO: 349420 - RNA, 23 nt, Human
aagcagaaaugaaaucccgcaug

SEQ ID NO: 349421 - RNA, 23 nt, Human
aagcagaaaugaaaucccgcaug

SEQ ID NO: 349422 - RNA, 24 nt, Human
aagcagaaaugaaaucccgcaugu

SEQ ID NO: 349423 - RNA, 27 nt, Human
aagcagaaaugaaaucccgcauguggu

SEQ ID NO: 349424 - RNA, 22 nt, Human
aagcauuggagauuuuucucuc

SEQ ID NO: 349425 - RNA, 18 nt, Human
aaggagacaggcucauug

SEQ ID NO: 349426 - RNA, 21 nt, Human
aaggucaccacaaauacugac

SEQ ID NO: 349427 - RNA, 19 nt, Human
acaaaacaaaacaaaaucc

SEQ ID NO: 349428 - RNA, 22 nt, Human
acaaaacaaaacaaaauccaga

SEQ ID NO: 349429 - RNA, 25 nt, Human
acaaauagacacaccacgauuagaa

SEQ ID NO: 349430 - RNA, 25 nt, Human
acaaccaacacagcucaagaagccc

SEQ ID NO: 349431 - RNA, 20 nt, Human
acacagcucaagaagcccgg

SEQ ID NO: 349432 - RNA, 24 nt, Human
accaucaaaggcuaaaaaacaaaa

SEQ ID NO: 349433 - RNA, 18 nt, Human
acccaacacacucaccua

SEQ ID NO: 349434 - RNA, 25 nt, Human
accccagaaaacgguuuauaaaaau

SEQ ID NO: 349435 - RNA, 19 nt, Human
accccgaggaggggccugc

SEQ ID NO: 349436 - RNA, 22 nt, Human
acccuaugaaaacagcacgucg

SEQ ID NO: 349437 - RNA, 23 nt, Human
acccuggugacaucgcugcacua

SEQ ID NO: 349438 - RNA, 21 nt, Human
accgaauugggccauggaguc

SEQ ID NO: 349439 - RNA, 21 nt, Human
acucagcauccgcagcagggg

SEQ ID NO: 349440 - RNA, 19 nt, Human
acuccacuggcuggaaaug

SEQ ID NO: 349441 - RNA, 26 nt, Human
acucuucccacgggacuuuucuccug

SEQ ID NO: 349442 - RNA, 19 nt, Human
acuugguauucuggaggac

SEQ ID NO: 349443 - RNA, 22 nt, Human
agaaaaagagacccucacucgc

SEQ ID NO: 349444 - RNA, 22 nt, Human
agaaggcaggcacugugaagcc

SEQ ID NO: 349445 - RNA, 20 nt, Human
agacagcaaacaaacuaaag

SEQ ID NO: 349446 - RNA, 24 nt, Human
agacagccaaaauguggguugaua

SEQ ID NO: 349447 - RNA, 18 nt, Human
agacucuuucacuaugcu

SEQ ID NO: 349448 - RNA, 20 nt, Human
agagaccaagaugcuuggua

SEQ ID NO: 349449 - RNA, 27 nt, Human
agagagugaggcagagggaggcagaga

SEQ ID NO: 349450 - RNA, 23 nt, Human
agaggcugcucugggagccucgg

SEQ ID NO: 349451 - RNA, 19 nt, Human
agaugaggaaaccccgcca

SEQ ID NO: 349452 - RNA, 19 nt, Human
agcacgguauuagugucuu

SEQ ID NO: 349453 - RNA, 20 nt, Human
agcagaucuuuucacgaaga

SEQ ID NO: 349454 - RNA, 20 nt, Human
agcaggggaaaggugggagg

SEQ ID NO: 349455 - RNA, 19 nt, Human
agccaaaagguggugugug

SEQ ID NO: 349456 - RNA, 24 nt, Human
agcccugaccgcuccugcugugcc

SEQ ID NO: 349457 - RNA, 22 nt, Human
agcccugcucuggccagaaugg

SEQ ID NO: 349458 - RNA, 21 nt, Human
agccucagccuauacuucacc

SEQ ID NO: 349459 - RNA, 21 nt, Human
agcuacaacaacaaaaauaaa

SEQ ID NO: 349460 - RNA, 18 nt, Human
aggaaagaaagaacaaaa

SEQ ID NO: 349461 - RNA, 20 nt, Human
aggaaagaaagaacaaaaga

SEQ ID NO: 349462 - RNA, 28 nt, Human
aggacacagaccccgaggaggggccugc

SEQ ID NO: 349463 - RNA, 20 nt, Human
aggacuccacuggcuggaaa

SEQ ID NO: 349464 - RNA, 21 nt, Human
aggccauaaccauacaaaucu

SEQ ID NO: 349465 - RNA, 19 nt, Human
agggaggggacgagauucu

SEQ ID NO: 349466 - RNA, 22 nt, Human
aggugguccccuccacagccac

SEQ ID NO: 349467 - RNA, 22 nt, Human
agguuuccuuaguagucacaga

SEQ ID NO: 349468 - RNA, 21 nt, Human
agugcaaaggguuucagaagg

SEQ ID NO: 349469 - RNA, 29 nt, Human
agugcuucaaaauuuuguuuucuucagcu

SEQ ID NO: 349470 - RNA, 18 nt, Human
aguggugaccgugggugg

SEQ ID NO: 349471 - RNA, 24 nt, Human
aguuugcaucuaccucuugggagu

SEQ ID NO: 349472 - RNA, 21 nt, Human
auacccuaugaaaacagcacg

SEQ ID NO: 349473 - RNA, 22 nt, Human
aucaaaucaucccaaacuaaac

SEQ ID NO: 349474 - RNA, 22 nt, Human
aucaccaccgaagaaaccgaau

SEQ ID NO: 349475 - RNA, 28 nt, Human
auccaucucuguaucccucccucccccc

SEQ ID NO: 349476 - RNA, 26 nt, Human
aucccucccuccccccucugccccag

SEQ ID NO: 349477 - RNA, 21 nt, Human
augaaacaguagccaugacaa

SEQ ID NO: 349478 - RNA, 25 nt, Human
augaaacaguagccaugacaaccaa

SEQ ID NO: 349479 - RNA, 18 nt, Human
augcugccacuuccuggu

SEQ ID NO: 349480 - RNA, 24 nt, Human
auggaaaacaggaaagaaagaaca

SEQ ID NO: 349481 - RNA, 18 nt, Human
auugcuguacaaggauga

SEQ ID NO: 349482 - RNA, 25 nt, Human
auuggcacagaaaguauugcacaug

SEQ ID NO: 349483 - RNA, 23 nt, Human
caaaaagauuucgcaaacucaac

SEQ ID NO: 349484 - RNA, 22 nt, Human
caaaacaaaacaaaauccagag

SEQ ID NO: 349485 - RNA, 25 nt, Human
caaacaaaucugcagcuugaaugga

SEQ ID NO: 349486 - RNA, 21 nt, Human
caaacucaacgugaagagcuu

SEQ ID NO: 349487 - RNA, 22 nt, Human
caaagacaaaaagauuucgcaa

SEQ ID NO: 349488 - RNA, 20 nt, Human
caaagugaaaagugccuccc

SEQ ID NO: 349489 - RNA, 20 nt, Human
caaagugaaaagugccuccc

SEQ ID NO: 349490 - RNA, 26 nt, Human
caacaacagaaaucaaaucaucccaa

SEQ ID NO: 349491 - RNA, 25 nt, Human
caacacaauagcagaugcaugugcu

SEQ ID NO: 349492 - RNA, 21 nt, Human
caacacacucaccuaacagaa

SEQ ID NO: 349493 - RNA, 21 nt, Human
caacacagcucaagaagcccg

SEQ ID NO: 349494 - RNA, 22 nt, Human
caacagaaaucaaaucauccca

SEQ ID NO: 349495 - RNA, 23 nt, Human
caacagaaaucaaaucaucccaa

SEQ ID NO: 349496 - RNA, 20 nt, Human
caacauagaaaauuauccug

SEQ ID NO: 349497 - RNA, 19 nt, Human
caacccaacacaauagcag

SEQ ID NO: 349498 - RNA, 18 nt, Human
caagagagugaggcagag

SEQ ID NO: 349499 - RNA, 25 nt, Human
caauaaacagacucgaguguauccu

SEQ ID NO: 349500 - RNA, 25 nt, Human
caauucaauacucgaaguaagccaa

SEQ ID NO: 349501 - RNA, 18 nt, Human
cacacaccugccccgucc

SEQ ID NO: 349502 - RNA, 19 nt, Human
cacagaacugaaugcacag

SEQ ID NO: 349503 - RNA, 19 nt, Human
cacagcgccugugcacccc

SEQ ID NO: 349504 - RNA, 22 nt, Human
caccauggagacuucccacagg

SEQ ID NO: 349505 - RNA, 21 nt, Human
cacccgaguuguccauaguca

SEQ ID NO: 349506 - RNA, 28 nt, Human
cacgucaguguaccacacacacagugug

SEQ ID NO: 349507 - RNA, 22 nt, Human
cacuaaguuugaagcuucaaaa

SEQ ID NO: 349508 - RNA, 23 nt, Human
cagaggcugcucugggagccucg

SEQ ID NO: 349509 - RNA, 24 nt, Human
cagcagaucuuuucacgaagauuu

SEQ ID NO: 349510 - RNA, 21 nt, Human
cagcgcccccggcugcuucug

SEQ ID NO: 349511 - RNA, 18 nt, Human
caguaugacugcaagaau

SEQ ID NO: 349512 - RNA, 22 nt, Human
caguauucucaaaucgcagaau

SEQ ID NO: 349513 - RNA, 20 nt, Human
caucaaagaaagggaccaua

SEQ ID NO: 349514 - RNA, 21 nt, Human
caucuccccguggguacaauc

SEQ ID NO: 349515 - RNA, 18 nt, Human
caucuucaaaaucuaauu

SEQ ID NO: 349516 - RNA, 24 nt, Human
caugacaaccaacacagcucaaga

SEQ ID NO: 349517 - RNA, 18 nt, Human
cauguguguuuucccauc

SEQ ID NO: 349518 - RNA, 19 nt, Human
ccaaacaaggaaaaagcca

SEQ ID NO: 349519 - RNA, 23 nt, Human
ccaacacacucaccuaacagaaa

SEQ ID NO: 349520 - RNA, 21 nt, Human
ccaaccccccuuaccccaugu

SEQ ID NO: 349521 - RNA, 19 nt, Human
ccacaacacccuggugacu

SEQ ID NO: 349522 - RNA, 20 nt, Human
ccacagaaaaggagacaggc

SEQ ID NO: 349523 - RNA, 22 nt, Human
ccacagcuguccaguuuccacu

SEQ ID NO: 349524 - RNA, 20 nt, Human
ccacgauuagaaaauagaau

SEQ ID NO: 349525 - RNA, 21 nt, Human
ccacucuuucucucuuguucc

SEQ ID NO: 349526 - RNA, 20 nt, Human
ccacuuaaaaaaaaaaaaaa

SEQ ID NO: 349527 - RNA, 25 nt, Human
ccacuuaaaaaaaaaaaaaguguaa

SEQ ID NO: 349528 - RNA, 21 nt, Human
ccagaaaacgguuuauaaaaa

SEQ ID NO: 349529 - RNA, 25 nt, Human
ccagacaaacugaaauaauucuuaa

SEQ ID NO: 349530 - RNA, 19 nt, Human
ccagcccugcucuggccag

SEQ ID NO: 349531 - RNA, 21 nt, Human
ccaggcucagaggcagggcuc

SEQ ID NO: 349532 - RNA, 18 nt, Human
ccaggcucuucaugagga

SEQ ID NO: 349533 - RNA, 19 nt, Human
cccaaccccccuuacccca

SEQ ID NO: 349534 - RNA, 21 nt, Human
cccacaggcucuggagggcuc

SEQ ID NO: 349535 - RNA, 21 nt, Human
cccacccccaaccccccuuac

SEQ ID NO: 349536 - RNA, 22 nt, Human
cccaugccgauagcaagagagu

SEQ ID NO: 349537 - RNA, 19 nt, Human
ccccaaccccccuuacccc

SEQ ID NO: 349538 - RNA, 21 nt, Human
ccccaaccccccuuaccccau

SEQ ID NO: 349539 - RNA, 23 nt, Human
ccccacccccaaccccccuuacc

SEQ ID NO: 349540 - RNA, 23 nt, Human
ccccaggaggacacugcucugaa

SEQ ID NO: 349541 - RNA, 20 nt, Human
cccccaaaccuuucccacaa

SEQ ID NO: 349542 - RNA, 20 nt, Human
cccccaaccccccuuacccc

SEQ ID NO: 349543 - RNA, 20 nt, Human
cccccaaccccccuuacccu

SEQ ID NO: 349544 - RNA, 20 nt, Human
cccccacccccaaccccccu

SEQ ID NO: 349545 - RNA, 18 nt, Human
cccccauuuaaaugaggu

SEQ ID NO: 349546 - RNA, 19 nt, Human
ccccgaggaggggccugcc

SEQ ID NO: 349547 - RNA, 22 nt, Human
ccccuccacagccacuggccaa

SEQ ID NO: 349548 - RNA, 19 nt, Human
cccuccagcccugcucugg

SEQ ID NO: 349549 - RNA, 22 nt, Human
cccuccuggcuccuucccucca

SEQ ID NO: 349550 - RNA, 20 nt, Human
cccugcaccccugcaggacc

SEQ ID NO: 349551 - RNA, 22 nt, Human
cccuuccucccgcccgcucacu

SEQ ID NO: 349552 - RNA, 21 nt, Human
ccgccaacgucugcaaacagg

SEQ ID NO: 349553 - RNA, 19 nt, Human
ccuagaaaaccugcaagca

SEQ ID NO: 349554 - RNA, 18 nt, Human
ccuagaccaaaaaccauu

SEQ ID NO: 349555 - RNA, 24 nt, Human
ccucacccauaucugaaauagcac

SEQ ID NO: 349556 - RNA, 21 nt, Human
ccuccuuccucuccacacucc

SEQ ID NO: 349557 - RNA, 24 nt, Human
ccucugccccaguguggcccagac

SEQ ID NO: 349558 - RNA, 19 nt, Human
ccugaaauagaaccacaaa

SEQ ID NO: 349559 - RNA, 21 nt, Human
ccugaaauagaaccacaaaaa

SEQ ID NO: 349560 - RNA, 19 nt, Human
ccugcgacacaccugcugu

SEQ ID NO: 349561 - RNA, 21 nt, Human
ccugguggggggaaaaaaccc

SEQ ID NO: 349562 - RNA, 22 nt, Human
cgccacagcgccugugcacccc

SEQ ID NO: 349563 - RNA, 18 nt, Human
cgcucagaacgcacacac

SEQ ID NO: 349564 - RNA, 21 nt, Human
cgguuccucccccgggucucc

SEQ ID NO: 349565 - RNA, 23 nt, Human
cguacuguucacagguagccuca

SEQ ID NO: 349566 - RNA, 22 nt, Human
cuaaaaaacaaaaagaaaaaca

SEQ ID NO: 349567 - RNA, 20 nt, Human
cuacaaauagacacaccacg

SEQ ID NO: 349568 - RNA, 19 nt, Human
cuagaaaaccugcaagcac

SEQ ID NO: 349569 - RNA, 18 nt, Human
cuauaccugaaauagaac

SEQ ID NO: 349570 - RNA, 21 nt, Human
cucacccauaucugaaauagc

SEQ ID NO: 349571 - RNA, 20 nt, Human
cucacugacagacacucgug

SEQ ID NO: 349572 - RNA, 22 nt, Human
cucacugacagacacucgugga

SEQ ID NO: 349573 - RNA, 19 nt, Human
cucaugucacacuggaauc

SEQ ID NO: 349574 - RNA, 19 nt, Human
cucccucucccccaccccc

SEQ ID NO: 349575 - RNA, 21 nt, Human
cuccugucacaauaaaagcuc

SEQ ID NO: 349576 - RNA, 19 nt, Human
cucucccccacccccaacc

SEQ ID NO: 349577 - RNA, 18 nt, Human
cucucucccucuccccca

SEQ ID NO: 349578 - RNA, 22 nt, Human
cucucugcaagcaugcugagag

SEQ ID NO: 349579 - RNA, 18 nt, Human
cucuguacuggccauguc

SEQ ID NO: 349580 - RNA, 19 nt, Human
cucuucuccaucccuuuuc

SEQ ID NO: 349581 - RNA, 22 nt, Human
cucuugggcucaggcguguucu

SEQ ID NO: 349582 - RNA, 21 nt, Human
cugaagcuggguuccugaugu

SEQ ID NO: 349583 - RNA, 21 nt, Human
cugaagggcaguuugcaucua

SEQ ID NO: 349584 - RNA, 20 nt, Human
cugcaacguggcggcagacg

SEQ ID NO: 349585 - RNA, 21 nt, Human
cugcacagaaaccagcguggg

SEQ ID NO: 349586 - RNA, 23 nt, Human
cugcagugaaacagguccuguac

SEQ ID NO: 349587 - RNA, 18 nt, Human
cugcugugcccuuccucc

SEQ ID NO: 349588 - RNA, 20 nt, Human
cugcuuccucacccauaucu

SEQ ID NO: 349589 - RNA, 23 nt, Human
cuggaaucugaaaaaaaaaaaag

SEQ ID NO: 349590 - RNA, 26 nt, Human
cuggcuccuucccuccagcccugcuc

SEQ ID NO: 349591 - RNA, 20 nt, Human
cuuccucacccauaucugaa

SEQ ID NO: 349592 - RNA, 20 nt, Human
cuuuucacgaagauuuugcu

SEQ ID NO: 349593 - RNA, 22 nt, Human
gaaaaaaaaaaaaguggcaccc

SEQ ID NO: 349594 - RNA, 19 nt, Human
gaaaaggagacaggcucau

SEQ ID NO: 349595 - RNA, 19 nt, Human
gaaaugaaucugccuccuu

SEQ ID NO: 349596 - RNA, 20 nt, Human
gaaauucgaggaaagucaag

SEQ ID NO: 349597 - RNA, 22 nt, Human
gaacgcacacacacaacaggcc

SEQ ID NO: 349598 - RNA, 21 nt, Human
gaauuuaagaauuguaagugg

SEQ ID NO: 349599 - RNA, 23 nt, Human
gacacaccugcuguaacucuaau

SEQ ID NO: 349600 - RNA, 19 nt, Human
gagaaaaagagacccucac

SEQ ID NO: 349601 - RNA, 21 nt, Human
gagcaguucaggcuggggaga

SEQ ID NO: 349602 - RNA, 24 nt, Human
gaugugguaaaaagaccaaaauga

SEQ ID NO: 349603 - RNA, 20 nt, Human
gcacgugggaaccccaggag

SEQ ID NO: 349604 - RNA, 19 nt, Human
gcucagagaaguacuuuca

SEQ ID NO: 349605 - RNA, 19 nt, Human
gcucucucccucuccccca

SEQ ID NO: 349606 - RNA, 21 nt, Human
ggaaagaaaacgugggugaag

SEQ ID NO: 349607 - RNA, 19 nt, Human
ggaagauuaagcaaguucu

SEQ ID NO: 349608 - RNA, 22 nt, Human
ggacacugcgguuccucccccg

SEQ ID NO: 349609 - RNA, 20 nt, Human
ggacaugaaaaacugaagcc

SEQ ID NO: 349610 - RNA, 20 nt, Human
ggagaaggagggaugcugcc

SEQ ID NO: 349611 - RNA, 26 nt, Human
ggagcccugaccgcuccugcugugcc

SEQ ID NO: 349612 - RNA, 21 nt, Human
ggaguagaggugugcaaguug

SEQ ID NO: 349613 - RNA, 20 nt, Human
ggcuaaaaaacaaaaagaaa

SEQ ID NO: 349614 - RNA, 21 nt, Human
gggagccucggggcccgccaa

SEQ ID NO: 349615 - RNA, 18 nt, Human
gggcagagggagagaaac

SEQ ID NO: 349616 - RNA, 20 nt, Human
guaaagaucaaacugugcag

SEQ ID NO: 349617 - RNA, 19 nt, Human
gucaaggaacuauucuagc

SEQ ID NO: 349618 - RNA, 21 nt, Human
gucaaucguuuccuuaaaaaa

SEQ ID NO: 349619 - RNA, 21 nt, Human
guccccccuccacggugacug

SEQ ID NO: 349620 - RNA, 22 nt, Human
gugaacaacacuuccaacgaag

SEQ ID NO: 349621 - RNA, 21 nt, Human
gugaggcagagggaggcagag

SEQ ID NO: 349622 - RNA, 18 nt, Human
gugguuccuguaagaacc

SEQ ID NO: 349623 - RNA, 18 nt, Human
guguguuuuucugagucc

SEQ ID NO: 349624 - RNA, 20 nt, Human
guuacuaguuuaaaaaugga

SEQ ID NO: 349625 - RNA, 22 nt, Human
guuucccuaugccagaaacaca

SEQ ID NO: 349626 - RNA, 24 nt, Human
guuucucugccaacucugcauaug

SEQ ID NO: 349627 - RNA, 24 nt, Human
uaaaaagaaaaacacuggacaaaa

SEQ ID NO: 349628 - RNA, 26 nt, Human
uaaaaguucaucuuaaaaagaaaaac

SEQ ID NO: 349629 - RNA, 24 nt, Human
uaaaugaauacuagacagccaaaa

SEQ ID NO: 349630 - RNA, 18 nt, Human
uaagcaaguucucugaac

SEQ ID NO: 349631 - RNA, 24 nt, Human
uaagcaaguucucugaacagaaac

SEQ ID NO: 349632 - RNA, 18 nt, Human
uaagcugaacggcaccga

SEQ ID NO: 349633 - RNA, 19 nt, Human
uacaaggaugacaaacaaa

SEQ ID NO: 349634 - RNA, 23 nt, Human
uacacaggagaaaguuagcuacc

SEQ ID NO: 349635 - RNA, 21 nt, Human
uaccaaguucaaaugcacuaa

SEQ ID NO: 349636 - RNA, 19 nt, Human
uaccuagaaaaccugcaag

SEQ ID NO: 349637 - RNA, 19 nt, Human
uaccugaaauagaaccaca

SEQ ID NO: 349638 - RNA, 23 nt, Human
uaccugaaauagaaccacaaaaa

SEQ ID NO: 349639 - RNA, 21 nt, Human
uacuugguauucuggaggaca

SEQ ID NO: 349640 - RNA, 21 nt, Human
uagaaaaccugcaagcaccau

SEQ ID NO: 349641 - RNA, 18 nt, Human
uagaaagaaccaauuauu

SEQ ID NO: 349642 - RNA, 20 nt, Human
uagaaaggguggcaguggag

SEQ ID NO: 349643 - RNA, 22 nt, Human
uaggaacaggaagugcugaaaa

SEQ ID NO: 349644 - RNA, 21 nt, Human
uaguggcaguggaggaggaga

SEQ ID NO: 349645 - RNA, 23 nt, Human
uauacagacaauuuauuuaaaac

SEQ ID NO: 349646 - RNA, 23 nt, Human
uauauagcacacuggucagacuc

SEQ ID NO: 349647 - RNA, 21 nt, Human
uaucacacaaguuauaaacuc

SEQ ID NO: 349648 - RNA, 21 nt, Human
uauggaaauucuuagagauug

SEQ ID NO: 349649 - RNA, 21 nt, Human
uauguuggagagaaaaauguu

SEQ ID NO: 349650 - RNA, 24 nt, Human
uauuuguucaguuuaguugcagcc

SEQ ID NO: 349651 - RNA, 19 nt, Human
ucaaacugugcaaagagug

SEQ ID NO: 349652 - RNA, 18 nt, Human
ucaaaucaucccaaacua

SEQ ID NO: 349653 - RNA, 30 nt, Human
ucaacaacaacagaaaucaaaucaucccaa

SEQ ID NO: 349654 - RNA, 22 nt, Human
ucaauacucgaaguaagccaaa

SEQ ID NO: 349655 - RNA, 22 nt, Human
ucagucccccaaaccuuuccca

SEQ ID NO: 349656 - RNA, 24 nt, Human
ucaguuuaguugcagccauccaag

SEQ ID NO: 349657 - RNA, 19 nt, Human
ucauuuauugucacauacu

SEQ ID NO: 349658 - RNA, 19 nt, Human
uccaaguuagaaaugggau

SEQ ID NO: 349659 - RNA, 21 nt, Human
uccacacuccacauucacuau

SEQ ID NO: 349660 - RNA, 22 nt, Human
uccacucuuucucucuuguucc

SEQ ID NO: 349661 - RNA, 23 nt, Human
uccagacagcaaacaaacuaaag

SEQ ID NO: 349662 - RNA, 21 nt, Human
uccagcccugcucuggccaga

SEQ ID NO: 349663 - RNA, 22 nt, Human
uccaggcucagaggcagggcuc

SEQ ID NO: 349664 - RNA, 30 nt, Human
ucccccacccccaaccccccuuaccccauu

SEQ ID NO: 349665 - RNA, 20 nt, Human
ucccgccauuacacaggaga

SEQ ID NO: 349666 - RNA, 24 nt, Human
ucccucccuccccccucugccccc

SEQ ID NO: 349667 - RNA, 21 nt, Human
ucccuguaguggcaguggagg

SEQ ID NO: 349668 - RNA, 21 nt, Human
uccgccaacagcagcucugga

SEQ ID NO: 349669 - RNA, 20 nt, Human
uccgugcaggcugaaaucca

SEQ ID NO: 349670 - RNA, 18 nt, Human
uccuuucagauaagaaaa

SEQ ID NO: 349671 - RNA, 20 nt, Human
ucuaaaccuauucaaauguu

SEQ ID NO: 349672 - RNA, 18 nt, Human
ucucagagauggcucugg

SEQ ID NO: 349673 - RNA, 23 nt, Human
ucucaguuucucugccaacucug

SEQ ID NO: 349674 - RNA, 20 nt, Human
ucuccacacuccacauucaa

SEQ ID NO: 349675 - RNA, 19 nt, Human
ucucccccacccccaaccc

SEQ ID NO: 349676 - RNA, 20 nt, Human
ucugaaaaaaaaaaaagugg

SEQ ID NO: 349677 - RNA, 21 nt, Human
ucugcagcuugaauggaccac

SEQ ID NO: 349678 - RNA, 18 nt, Human
ucugcauaugccuugaac

SEQ ID NO: 349679 - RNA, 23 nt, Human
ucugccccaguguggcccagaca

SEQ ID NO: 349680 - RNA, 19 nt, Human
ucugccuccuuccucucca

SEQ ID NO: 349681 - RNA, 24 nt, Human
ucugccuccuuccucuccacacuc

SEQ ID NO: 349682 - RNA, 21 nt, Human
ucuguaggggauccaggcucu

SEQ ID NO: 349683 - RNA, 18 nt, Human
ucuugguaacugcucuga

SEQ ID NO: 349684 - RNA, 22 nt, Human
ucuuuaaaaguucaucuuaaaa

SEQ ID NO: 349685 - RNA, 18 nt, Human
ugaaaaacugaagccggu

SEQ ID NO: 349686 - RNA, 26 nt, Human
ugaaacaguagccaugacaaccaaca

SEQ ID NO: 349687 - RNA, 21 nt, Human
ugaaauagaaccacaaaaauu

SEQ ID NO: 349688 - RNA, 21 nt, Human
ugaacccccccggcccaugcc

SEQ ID NO: 349689 - RNA, 18 nt, Human
ugaagaaaauucucagag

SEQ ID NO: 349690 - RNA, 22 nt, Human
ugacaaacaaaucugcagcuug

SEQ ID NO: 349691 - RNA, 21 nt, Human
ugagaaauacccuaugaaaac

SEQ ID NO: 349692 - RNA, 25 nt, Human
ugagaacaaagucuauguggcagcc

SEQ ID NO: 349693 - RNA, 20 nt, Human
ugagguaaguggcauccauc

SEQ ID NO: 349694 - RNA, 18 nt, Human
ugaguagaaaggguggca

SEQ ID NO: 349695 - RNA, 27 nt, Human
ugaguauucucuucuccaucccuuuuc

SEQ ID NO: 349696 - RNA, 19 nt, Human
ugauauuucggaucucugg

SEQ ID NO: 349697 - RNA, 23 nt, Human
ugaucugauauuaaaacauccag

SEQ ID NO: 349698 - RNA, 18 nt, Human
ugcacgcauauggaaaaa

SEQ ID NO: 349699 - RNA, 19 nt, Human
ugcagaaaagaccguggaa

SEQ ID NO: 349700 - RNA, 20 nt, Human
ugccacaagggaguggugac

SEQ ID NO: 349701 - RNA, 26 nt, Human
ugcucaucuucaaaaucuaauuccuc

SEQ ID NO: 349702 - RNA, 19 nt, Human
ugcucugaacccccccggc

SEQ ID NO: 349703 - RNA, 22 nt, Human
uggaaaacaggaaagaaagaac

SEQ ID NO: 349704 - RNA, 23 nt, Human
uggaaaacaggaaagaaagaaca

SEQ ID NO: 349705 - RNA, 24 nt, Human
uggaaaagagaggaaaccaaccca

SEQ ID NO: 349706 - RNA, 25 nt, Human
uggagccaggacuccacuggcugga

SEQ ID NO: 349707 - RNA, 18 nt, Human
uggagcccugaccgcucc

SEQ ID NO: 349708 - RNA, 24 nt, Human
uggauaaaaacugcaggaauauca

SEQ ID NO: 349709 - RNA, 22 nt, Human
uggcagcccguauuccucuuac

SEQ ID NO: 349710 - RNA, 24 nt, Human
uggcaggugguccccuccacagcc

SEQ ID NO: 349711 - RNA, 18 nt, Human
uggcaguggaggaggaga

SEQ ID NO: 349712 - RNA, 18 nt, Human
uggcaguugcucuuuaaa

SEQ ID NO: 349713 - RNA, 21 nt, Human
uggccaacacgcucagaacgc

SEQ ID NO: 349714 - RNA, 20 nt, Human
uggcuggcucuuucugcaac

SEQ ID NO: 349715 - RNA, 23 nt, Human
uggcuguugcuccacggggcuug

SEQ ID NO: 349716 - RNA, 22 nt, Human
ugggaaugaaagguuuaaaaac

SEQ ID NO: 349717 - RNA, 22 nt, Human
ugggccagaaaacugaaagagu

SEQ ID NO: 349718 - RNA, 21 nt, Human
uggggaagggggggcagaggg

SEQ ID NO: 349719 - RNA, 18 nt, Human
uggguggcaggugguccc

SEQ ID NO: 349720 - RNA, 23 nt, Human
uggguugacuccaggcuacaugg

SEQ ID NO: 349721 - RNA, 18 nt, Human
uggguuuagaguugagca

SEQ ID NO: 349722 - RNA, 19 nt, Human
uguaaauggaucugggguu

SEQ ID NO: 349723 - RNA, 21 nt, Human
uguaacaaaaauaacaauaag

SEQ ID NO: 349724 - RNA, 20 nt, Human
uguaagaaccagagaaaacc

SEQ ID NO: 349725 - RNA, 19 nt, Human
uguaccacacacacaccug

SEQ ID NO: 349726 - RNA, 27 nt, Human
ugucuggauggcucugauuuuagucug

SEQ ID NO: 349727 - RNA, 19 nt, Human
ugugaaagguuccgcagag

SEQ ID NO: 349728 - RNA, 22 nt, Human
ugugaugcacuucccuguagug

SEQ ID NO: 349729 - RNA, 22 nt, Human
ugugcacccccacaugcgugca

SEQ ID NO: 349730 - RNA, 19 nt, Human
uguggaagcaaaggccucc

SEQ ID NO: 349731 - RNA, 21 nt, Human
uguuccuggucugcagcagca

SEQ ID NO: 349732 - RNA, 24 nt, Human
uguucgcucucucccucuccccca

SEQ ID NO: 349733 - RNA, 22 nt, Human
uguuuggaguuucccuaugcca

SEQ ID NO: 349734 - RNA, 21 nt, Human
uuagaaaauagaauaugaauu

SEQ ID NO: 349735 - RNA, 19 nt, Human
uuagaaagaaauuuugcua

SEQ ID NO: 349736 - RNA, 22 nt, Human
uuagaaaugaaucugccuccuu

SEQ ID NO: 349737 - RNA, 23 nt, Human
uuauugucacauacuaguucaua

SEQ ID NO: 349738 - RNA, 21 nt, Human
uucaucuuaaaaagaaaaaca

SEQ ID NO: 349739 - RNA, 19 nt, Human
uucgcccugacuaauuucu

SEQ ID NO: 349740 - RNA, 21 nt, Human
uucuuggugauuguguuccau

SEQ ID NO: 349741 - RNA, 24 nt, Human
uugcagcugcuguugcucuggcug

SEQ ID NO: 349742 - RNA, 23 nt, Human
uuggcacagaaaguauugcacau

SEQ ID NO: 349743 - RNA, 23 nt, Human
uugggccauggagucugcuggcc

SEQ ID NO: 349744 - RNA, 21 nt, Human
uuggguuuagaguugagcagu

SEQ ID NO: 349745 - RNA, 22 nt, Human
uuuagucugauaaacggaaagu

SEQ ID NO: 349746 - RNA, 19 nt, Human
uuucccaucuuaguguugg

SEQ ID NO: 349747 - RNA, 22 nt, Human
uuuuuuuuugcaauuggcacug

SEQ ID NO: 349748 - RNA, 19 nt, Human
aacuuccaguuucggcaag

SEQ ID NO: 349749 - RNA, 21 nt, Human
acucugaaacagcauauggaa

SEQ ID NO: 349750 - RNA, 18 nt, Human
agaacgugagguggcccc

SEQ ID NO: 349751 - RNA, 22 nt, Human
agaagggaggagggaauuuggc

SEQ ID NO: 349752 - RNA, 18 nt, Human
aguagaagggaggaggga

SEQ ID NO: 349753 - RNA, 25 nt, Human
caaguaucuuccacugcaagugaac

SEQ ID NO: 349754 - RNA, 23 nt, Human
caaguuccuaaaugccucuacuc

SEQ ID NO: 349755 - RNA, 21 nt, Human
cggaagucggaggggucagac

SEQ ID NO: 349756 - RNA, 19 nt, Human
cgggagggacacgugagga

SEQ ID NO: 349757 - RNA, 19 nt, Human
cgguuccuccagggcagcc

SEQ ID NO: 349758 - RNA, 21 nt, Human
cucuuuaccggaagucggagg

SEQ ID NO: 349759 - RNA, 23 nt, Human
cuuccacugcaagugaacuguua

SEQ ID NO: 349760 - RNA, 23 nt, Human
gaagcagaacgugagguggcccc

SEQ ID NO: 349761 - RNA, 22 nt, Human
gaagcaguagaagggaggaggg

SEQ ID NO: 349762 - RNA, 21 nt, Human
gaauagcccccaaguuccuaa

SEQ ID NO: 349763 - RNA, 21 nt, Human
gcagaacgugagguggccccg

SEQ ID NO: 349764 - RNA, 26 nt, Human
gcggcgcgcuggguugcuuucucggg

SEQ ID NO: 349765 - RNA, 19 nt, Human
gcgggcgcgccgaggcgcc

SEQ ID NO: 349766 - RNA, 19 nt, Human
ggaauagcccccaaguucc

SEQ ID NO: 349767 - RNA, 21 nt, Human
gggaggagggaauuuggccuu

SEQ ID NO: 349768 - RNA, 20 nt, Human
uagaagcaguagaagggagg

SEQ ID NO: 349769 - RNA, 25 nt, Human
uagcagcaagaaucacucuuguuac

SEQ ID NO: 349770 - RNA, 19 nt, Human
uagcaguaauagcagcaag

SEQ ID NO: 349771 - RNA, 24 nt, Human
uauggaauuauggaauagccccca

SEQ ID NO: 349772 - RNA, 18 nt, Human
uccaaguaucuuccacug

SEQ ID NO: 349773 - RNA, 23 nt, Human
uccuaaaugccucuacucggucc

SEQ ID NO: 349774 - RNA, 18 nt, Human
uggauguuacaagaaauc

SEQ ID NO: 349775 - RNA, 21 nt, Human
uuggauguuacaagaaaucaa

SEQ ID NO: 349776 - RNA, 24 nt, Human
uuuuaaaaacaaaauaaaugaaau

SEQ ID NO: 349777 - RNA, 23 nt, Human
aaaaacaaaacaaaaacaaaaac

SEQ ID NO: 349778 - RNA, 21 nt, Human
aaaacaaaacaaaaacaaaaa

SEQ ID NO: 349779 - RNA, 24 nt, Human
aaaagcaauucgguggcugaacuu

SEQ ID NO: 349780 - RNA, 20 nt, Human
aaaaggaaggagggagaaag

SEQ ID NO: 349781 - RNA, 20 nt, Human
aaacaaaaacuucucacaga

SEQ ID NO: 349782 - RNA, 24 nt, Human
aaacaaaacaaaaacaaaaacuuc

SEQ ID NO: 349783 - RNA, 20 nt, Human
aaacaacuacacacaaggca

SEQ ID NO: 349784 - RNA, 24 nt, Human
aaauaaaagcaccccaucacgauc

SEQ ID NO: 349785 - RNA, 19 nt, Human
acaaaacaaaaacaaaaac

SEQ ID NO: 349786 - RNA, 24 nt, Human
acaaaacaaaaacaaaaacuucuc

SEQ ID NO: 349787 - RNA, 18 nt, Human
acccuugaggcccacagg

SEQ ID NO: 349788 - RNA, 27 nt, Human
agagaaaaauaaaagcaccccaucacg

SEQ ID NO: 349789 - RNA, 19 nt, Human
agagugcugaguggaggug

SEQ ID NO: 349790 - RNA, 21 nt, Human
agccuaauucccuucuucaga

SEQ ID NO: 349791 - RNA, 18 nt, Human
aggcccacaggagguugg

SEQ ID NO: 349792 - RNA, 18 nt, Human
aguuuguaaguuagaaac

SEQ ID NO: 349793 - RNA, 19 nt, Human
auccugaucaauuuaccaa

SEQ ID NO: 349794 - RNA, 23 nt, Human
augcagcccuguguucucuggaa

SEQ ID NO: 349795 - RNA, 20 nt, Human
caaaucagcugcacuggugc

SEQ ID NO: 349796 - RNA, 21 nt, Human
caaaucagcugcacuggugcc

SEQ ID NO: 349797 - RNA, 18 nt, Human
caagcaguucagaccacu

SEQ ID NO: 349798 - RNA, 20 nt, Human
cacaaggcaacguuucucau

SEQ ID NO: 349799 - RNA, 18 nt, Human
cagaggguugcucgggau

SEQ ID NO: 349800 - RNA, 22 nt, Human
cagagugcugaguggaggugua

SEQ ID NO: 349801 - RNA, 25 nt, Human
caguguccuuuaugaguacucacug

SEQ ID NO: 349802 - RNA, 20 nt, Human
cauugagcacccccgccccc

SEQ ID NO: 349803 - RNA, 21 nt, Human
ccaaacaacuacacacaaggc

SEQ ID NO: 349804 - RNA, 19 nt, Human
ccagagugcugaguggagg

SEQ ID NO: 349805 - RNA, 20 nt, Human
ccagagugcugaguggaggu

SEQ ID NO: 349806 - RNA, 21 nt, Human
ccagagugcugaguggaggug

SEQ ID NO: 349807 - RNA, 22 nt, Human
ccagagugcugaguggaggugu

SEQ ID NO: 349808 - RNA, 21 nt, Human
ccccacuuucaacuuccccuu

SEQ ID NO: 349809 - RNA, 24 nt, Human
cccccgcccccacuuucaacuucc

SEQ ID NO: 349810 - RNA, 18 nt, Human
ccgcccccacuuucaacu

SEQ ID NO: 349811 - RNA, 18 nt, Human
ccucauccaccucucacc

SEQ ID NO: 349812 - RNA, 22 nt, Human
cuacagaugacaguguuaaaaa

SEQ ID NO: 349813 - RNA, 21 nt, Human
cuaucaaaaucuaaagccuaa

SEQ ID NO: 349814 - RNA, 24 nt, Human
cucacagauugguagcaagcaguu

SEQ ID NO: 349815 - RNA, 22 nt, Human
cugacagcuucuuuucccaaau

SEQ ID NO: 349816 - RNA, 20 nt, Human
cugcaaguuaaaaaacaaaa

SEQ ID NO: 349817 - RNA, 19 nt, Human
cugcugcaauugugaaagc

SEQ ID NO: 349818 - RNA, 19 nt, Human
cuggaagguuucuggucuc

SEQ ID NO: 349819 - RNA, 22 nt, Human
cuggugccuguuuccucaucca

SEQ ID NO: 349820 - RNA, 25 nt, Human
cuugaggcccacaggagguugggaa

SEQ ID NO: 349821 - RNA, 24 nt, Human
cuugccaaaacauucuuuugccca

SEQ ID NO: 349822 - RNA, 24 nt, Human
cuuuccgcuccuuuucuuuggagg

SEQ ID NO: 349823 - RNA, 23 nt, Human
gcucgggaugcagcccuguguuc

SEQ ID NO: 349824 - RNA, 21 nt, Human
ggacgauggcaacacgcuccu

SEQ ID NO: 349825 - RNA, 20 nt, Human
ggcaucaaaaauuucaaacc

SEQ ID NO: 349826 - RNA, 23 nt, Human
guugcugucgauacuugcugucu

SEQ ID NO: 349827 - RNA, 19 nt, Human
uaaaagcaccccaucacga

SEQ ID NO: 349828 - RNA, 22 nt, Human
uaaaagcaccccaucacgauca

SEQ ID NO: 349829 - RNA, 19 nt, Human
uaaaaggaaggagggagaa

SEQ ID NO: 349830 - RNA, 23 nt, Human
uaagauagggacagucacauaga

SEQ ID NO: 349831 - RNA, 18 nt, Human
uaaguuagaaacuucuga

SEQ ID NO: 349832 - RNA, 22 nt, Human
uacucacugcuagagacauagc

SEQ ID NO: 349833 - RNA, 21 nt, Human
uagcaagcaguucagaccacu

SEQ ID NO: 349834 - RNA, 22 nt, Human
uauacugcaaguuaaaaaacaa

SEQ ID NO: 349835 - RNA, 24 nt, Human
uauacugcaaguuaaaaaacaaaa

SEQ ID NO: 349836 - RNA, 22 nt, Human
ucaaagagaaaaauaaaagcac

SEQ ID NO: 349837 - RNA, 23 nt, Human
ucagaggguugcucgggaugcag

SEQ ID NO: 349838 - RNA, 21 nt, Human
ucucuggaagguuucuggucu

SEQ ID NO: 349839 - RNA, 19 nt, Human
ugaaucaaagugacuuuug

SEQ ID NO: 349840 - RNA, 18 nt, Human
ugacaguguuaaaaaaaa

SEQ ID NO: 349841 - RNA, 18 nt, Human
ugagcacccccgccccca

SEQ ID NO: 349842 - RNA, 21 nt, Human
ugauaaaagcaauucgguggc

SEQ ID NO: 349843 - RNA, 22 nt, Human
ugcaaguuaaaaaacaaaacaa

SEQ ID NO: 349844 - RNA, 18 nt, Human
ugcuagagacauagcuuc

SEQ ID NO: 349845 - RNA, 19 nt, Human
ugcugaguggagguguaac

SEQ ID NO: 349846 - RNA, 23 nt, Human
uggaagguuucuggucuccaguu

SEQ ID NO: 349847 - RNA, 19 nt, Human
uggcaacacgcuccugguc

SEQ ID NO: 349848 - RNA, 20 nt, Human
ugguaguaaaaggaaggagg

SEQ ID NO: 349849 - RNA, 19 nt, Human
ugugguggaauugggugcc

SEQ ID NO: 349850 - RNA, 20 nt, Human
uucagaggguugcucgggau

SEQ ID NO: 349851 - RNA, 22 nt, Human
uucccuucuucagaggguugcu

SEQ ID NO: 349852 - RNA, 18 nt, Human
uucgucuuaauucuguuc

SEQ ID NO: 349853 - RNA, 24 nt, Human
uugauccaguguccuuuaugagua

SEQ ID NO: 349854 - RNA, 27 nt, Human
uuucccaaauuacucucaaaaggcugg

SEQ ID NO: 349855 - RNA, 21 nt, Human
aaaaaaaagaaaagaaaaaga

SEQ ID NO: 349856 - RNA, 19 nt, Human
aaacagcuaaaaagcaagc

SEQ ID NO: 349857 - RNA, 23 nt, Human
aaagguaacaguguauuguuuga

SEQ ID NO: 349858 - RNA, 23 nt, Human
aaagguaacaguguauuguuuga

SEQ ID NO: 349859 - RNA, 22 nt, Human
aaauaauucacugaaugucauc

SEQ ID NO: 349860 - RNA, 22 nt, Human
aaauaauucacugaaugucauc

SEQ ID NO: 349861 - RNA, 20 nt, Human
aacuucuuauauugcacccc

SEQ ID NO: 349862 - RNA, 25 nt, Human
aagcaagccaauuuaaaaucccuaa

SEQ ID NO: 349863 - RNA, 18 nt, Human
aagcaguacagaagccaa

SEQ ID NO: 349864 - RNA, 20 nt, Human
aagugaacaggaaauaucca

SEQ ID NO: 349865 - RNA, 20 nt, Human
aagugaacaggaaauaucca

SEQ ID NO: 349866 - RNA, 21 nt, Human
agaaaagaaaaagaugacaaa

SEQ ID NO: 349867 - RNA, 22 nt, Human
agacgaagaagaauacaaagaa

SEQ ID NO: 349868 - RNA, 25 nt, Human
agccaauuuaaaaucccuaagucuc

SEQ ID NO: 349869 - RNA, 20 nt, Human
agcugcacuagaugcugcag

SEQ ID NO: 349870 - RNA, 23 nt, Human
aucagcuauucuaaaaaaaagaa

SEQ ID NO: 349871 - RNA, 19 nt, Human
augcugugaaaagugcugc

SEQ ID NO: 349872 - RNA, 23 nt, Human
augugcaauccuuaucucuaaag

SEQ ID NO: 349873 - RNA, 21 nt, Human
cacugaaugucaucccccaaa

SEQ ID NO: 349874 - RNA, 21 nt, Human
cacugaaugucaucccccaaa

SEQ ID NO: 349875 - RNA, 20 nt, Human
cagcuaaaaagcaagccaau

SEQ ID NO: 349876 - RNA, 21 nt, Human
ccaaccacaauugccccaguu

SEQ ID NO: 349877 - RNA, 24 nt, Human
ccacugaaauaauucacugaaugu

SEQ ID NO: 349878 - RNA, 24 nt, Human
ccacugaaauaauucacugaaugu

SEQ ID NO: 349879 - RNA, 18 nt, Human
cccaaaaauauggagaau

SEQ ID NO: 349880 - RNA, 18 nt, Human
cccaaaaauauggagaau

SEQ ID NO: 349881 - RNA, 23 nt, Human
ccccugaauccuacaaccauaag

SEQ ID NO: 349882 - RNA, 22 nt, Human
ccccugcgcgcucacgucgccc

SEQ ID NO: 349883 - RNA, 25 nt, Human
cccuaagucucugcuggccuauuuc

SEQ ID NO: 349884 - RNA, 19 nt, Human
ccgccgccccccugcgcgc

SEQ ID NO: 349885 - RNA, 21 nt, Human
ccgccgccccccugcgcgcuc

SEQ ID NO: 349886 - RNA, 22 nt, Human
ccuacaaccauaagcaguacag

SEQ ID NO: 349887 - RNA, 26 nt, Human
ccuacaaccauaagcaguacagaagc

SEQ ID NO: 349888 - RNA, 21 nt, Human
cgacccaggcgcagagagaga

SEQ ID NO: 349889 - RNA, 19 nt, Human
cuaaaaagcaagccaauuu

SEQ ID NO: 349890 - RNA, 18 nt, Human
cuauucuaaaaaaaagaa

SEQ ID NO: 349891 - RNA, 21 nt, Human
cuccuguugggccuucucaaa

SEQ ID NO: 349892 - RNA, 22 nt, Human
cucucuggcucucggcgucacc

SEQ ID NO: 349893 - RNA, 21 nt, Human
cugguuacccuugaaagcauu

SEQ ID NO: 349894 - RNA, 25 nt, Human
cuguugggccuucucaaaacuagca

SEQ ID NO: 349895 - RNA, 18 nt, Human
gaacaggaaauauccaug

SEQ ID NO: 349896 - RNA, 18 nt, Human
gaacaggaaauauccaug

SEQ ID NO: 349897 - RNA, 18 nt, Human
gaaugucaucccccaaaa

SEQ ID NO: 349898 - RNA, 18 nt, Human
gaaugucaucccccaaaa

SEQ ID NO: 349899 - RNA, 21 nt, Human
gcacauaggcucuucacuggg

SEQ ID NO: 349900 - RNA, 18 nt, Human
ggagaauauuuauuuagc

SEQ ID NO: 349901 - RNA, 18 nt, Human
ggagaauauuuauuuagc

SEQ ID NO: 349902 - RNA, 21 nt, Human
ggugacugaaacagcuaaaaa

SEQ ID NO: 349903 - RNA, 21 nt, Human
guauuguuugaagauucuuaa

SEQ ID NO: 349904 - RNA, 21 nt, Human
uaaccccugaauccuacaacc

SEQ ID NO: 349905 - RNA, 19 nt, Human
uaagaaauguggugcccau

SEQ ID NO: 349906 - RNA, 21 nt, Human
uaagacaaggaaguuuuccug

SEQ ID NO: 349907 - RNA, 21 nt, Human
uaagacaaggaaguuuuccug

SEQ ID NO: 349908 - RNA, 21 nt, Human
uaagcaguacagaagccaaaa

SEQ ID NO: 349909 - RNA, 24 nt, Human
uaaguaccauuauuaauuuucagu

SEQ ID NO: 349910 - RNA, 24 nt, Human
uaaguaccauuauuaauuuucagu

SEQ ID NO: 349911 - RNA, 19 nt, Human
uauaaacuucuuauauugc

SEQ ID NO: 349912 - RNA, 21 nt, Human
uauggagaauauuuauuuagc

SEQ ID NO: 349913 - RNA, 21 nt, Human
uauggagaauauuuauuuagc

SEQ ID NO: 349914 - RNA, 19 nt, Human
uauugcacccccaaacuuu

SEQ ID NO: 349915 - RNA, 18 nt, Human
uauuuugguugagaccag

SEQ ID NO: 349916 - RNA, 20 nt, Human
ucaaaacuagcaccuguugu

SEQ ID NO: 349917 - RNA, 25 nt, Human
ucaaaagguaacaguguauuguuug

SEQ ID NO: 349918 - RNA, 25 nt, Human
ucaaaagguaacaguguauuguuug

SEQ ID NO: 349919 - RNA, 22 nt, Human
uccauuaaccccugaauccuac

SEQ ID NO: 349920 - RNA, 20 nt, Human
ucccccaaaaauauggagaa

SEQ ID NO: 349921 - RNA, 20 nt, Human
ucccccaaaaauauggagaa

SEQ ID NO: 349922 - RNA, 19 nt, Human
uccuguugggccuucucaa

SEQ ID NO: 349923 - RNA, 25 nt, Human
ucucuggcucucggcgucacccacc

SEQ ID NO: 349924 - RNA, 23 nt, Human
ugaaacagcuaaaaagcaagcca

SEQ ID NO: 349925 - RNA, 19 nt, Human
ugaacaggaaauauccaug

SEQ ID NO: 349926 - RNA, 19 nt, Human
ugaacaggaaauauccaug

SEQ ID NO: 349927 - RNA, 23 nt, Human
ugaacaggaaauauccaugcugu

SEQ ID NO: 349928 - RNA, 23 nt, Human
ugaacaggaaauauccaugcugu

SEQ ID NO: 349929 - RNA, 21 nt, Human
ugacaaauauagacgaagaag

SEQ ID NO: 349930 - RNA, 22 nt, Human
ugacaaauauagacgaagaaga

SEQ ID NO: 349931 - RNA, 18 nt, Human
ugagaccaguaagggaug

SEQ ID NO: 349932 - RNA, 22 nt, Human
uggacaucacaccuguugcaaa

SEQ ID NO: 349933 - RNA, 22 nt, Human
uguacugcauauuauauaaacu

SEQ ID NO: 349934 - RNA, 19 nt, Human
uuauauugcacccccaaac

SEQ ID NO: 349935 - RNA, 21 nt, Human
uucacugaaugucauccccca

SEQ ID NO: 349936 - RNA, 21 nt, Human
uucacugaaugucauccccca

SEQ ID NO: 349937 - RNA, 25 nt, Human
uugagaccaguaagggaugaaaucc

SEQ ID NO: 349938 - RNA, 20 nt, Human
uuuuuuuuuuuuuuuuuggu

SEQ ID NO: 349939 - RNA, 28 nt, Human
uuuuuuuuuuuuuuuuuuuuuuuggggg

SEQ ID NO: 349940 - RNA, 24 nt, Human
acaaccaccaccacauaaggcacc

SEQ ID NO: 349941 - RNA, 20 nt, Human
acuccgcgaacgcugcugcc

SEQ ID NO: 349942 - RNA, 23 nt, Human
aggcgagagaaaggcugaggggg

SEQ ID NO: 349943 - RNA, 24 nt, Human
cagaaggcaggcgagagaaaggcc

SEQ ID NO: 349944 - RNA, 23 nt, Human
caggucugugcugggcacaacca

SEQ ID NO: 349945 - RNA, 23 nt, Human
ccaccacauaaggcacccacgga

SEQ ID NO: 349946 - RNA, 21 nt, Human
ccacggaaagugcagcucaga

SEQ ID NO: 349947 - RNA, 23 nt, Human
ccacggcaagaacccugccaggu

SEQ ID NO: 349948 - RNA, 22 nt, Human
ccagacccagcggcgcuucgug

SEQ ID NO: 349949 - RNA, 19 nt, Human
ccuccgggcacccagaccc

SEQ ID NO: 349950 - RNA, 21 nt, Human
ccuccgggcacccagacccag

SEQ ID NO: 349951 - RNA, 22 nt, Human
cucagaaggcaggcgagagaaa

SEQ ID NO: 349952 - RNA, 20 nt, Human
cuccgcgaacgcugcugccu

SEQ ID NO: 349953 - RNA, 21 nt, Human
cugccaggucugugcugggga

SEQ ID NO: 349954 - RNA, 19 nt, Human
gagagaagagaggaggaag

SEQ ID NO: 349955 - RNA, 22 nt, Human
ggagagcuggucgcugagggag

SEQ ID NO: 349956 - RNA, 22 nt, Human
ggcaagaacccugccaggucug

SEQ ID NO: 349957 - RNA, 23 nt, Human
uaaggcacccacggaaagugcag

SEQ ID NO: 349958 - RNA, 22 nt, Human
uccgcgaacgcugcugccuccg

SEQ ID NO: 349959 - RNA, 24 nt, Human
uccgcgaacgcugcugccuccggg

SEQ ID NO: 349960 - RNA, 25 nt, Human
uccgcgaacgcugcugccuccgggc

SEQ ID NO: 349961 - RNA, 21 nt, Human
ugagggaggaggaagagccac

SEQ ID NO: 349962 - RNA, 21 nt, Human
ugagggggagagaagagagga

SEQ ID NO: 349963 - RNA, 24 nt, Human
ugagggggagagaagagaggagga

SEQ ID NO: 349964 - RNA, 21 nt, Human
uuccagggagagcuggucgcu

SEQ ID NO: 349965 - RNA, 24 nt, Human
uucccugucccucccguuccaggg

SEQ ID NO: 349966 - RNA, 22 nt, Human
uuuuuuuuuuuuuuuuaccaga

SEQ ID NO: 349967 - RNA, 22 nt, Human
uuuuuuuuuuuuuuuuuaccag

SEQ ID NO: 349968 - RNA, 22 nt, Human
aaagugcccccacgugauaccu

SEQ ID NO: 349969 - RNA, 21 nt, Human
acacgccugucagguucagca

SEQ ID NO: 349970 - RNA, 18 nt, Human
acagcagagggaagcugg

SEQ ID NO: 349971 - RNA, 22 nt, Human
acccagugcccacaaccaacua

SEQ ID NO: 349972 - RNA, 22 nt, Human
agcaguggcgguagcgguagcc

SEQ ID NO: 349973 - RNA, 24 nt, Human
agcuaagacgaaagugcccccacg

SEQ ID NO: 349974 - RNA, 22 nt, Human
auggccauaggauugggagcac

SEQ ID NO: 349975 - RNA, 20 nt, Human
caaggauccccgcagcagcc

SEQ ID NO: 349976 - RNA, 22 nt, Human
caagucccagagaccuuaggga

SEQ ID NO: 349977 - RNA, 19 nt, Human
cagcaguggcgguagcggu

SEQ ID NO: 349978 - RNA, 23 nt, Human
cagcucccucaaguagcagggcc

SEQ ID NO: 349979 - RNA, 19 nt, Human
cagggccagggcaucccag

SEQ ID NO: 349980 - RNA, 23 nt, Human
ccacacgccugucagguucagca

SEQ ID NO: 349981 - RNA, 20 nt, Human
ccacgugauaccucuaaccc

SEQ ID NO: 349982 - RNA, 21 nt, Human
ccagugcccacaaccaacuac

SEQ ID NO: 349983 - RNA, 23 nt, Human
cccagugcccacaaccaacuacc

SEQ ID NO: 349984 - RNA, 20 nt, Human
cccucagaguccacuucacu

SEQ ID NO: 349985 - RNA, 21 nt, Human
cccucagaguccacuucacuc

SEQ ID NO: 349986 - RNA, 22 nt, Human
ccuccgcggcccucugcccucc

SEQ ID NO: 349987 - RNA, 18 nt, Human
cgaagcaacagccguggc

SEQ ID NO: 349988 - RNA, 30 nt, Human
cgcagcaguggcgguagcgguagcccucuu

SEQ ID NO: 349989 - RNA, 23 nt, Human
cggccuccgcggcccucugcccu

SEQ ID NO: 349990 - RNA, 21 nt, Human
cuccgcggcccucugcccucc

SEQ ID NO: 349991 - RNA, 21 nt, Human
cugcggccuccgcggcccucu

SEQ ID NO: 349992 - RNA, 19 nt, Human
gaccggaagggccacaagg

SEQ ID NO: 349993 - RNA, 24 nt, Human
gcagcaguguggccugaugggggg

SEQ ID NO: 349994 - RNA, 25 nt, Human
ggcagcaguguggccugaugggggg

SEQ ID NO: 349995 - RNA, 26 nt, Human
guggcgguagcgguagcccucagagu

SEQ ID NO: 349996 - RNA, 23 nt, Human
uaacccagugcccacaaccaacu

SEQ ID NO: 349997 - RNA, 24 nt, Human
uaaccgaagcaacagccguggcac

SEQ ID NO: 349998 - RNA, 21 nt, Human
uagcgguagcccucagagucc

SEQ ID NO: 349999 - RNA, 26 nt, Human
uccaccgaccggaagggccacaagga

SEQ ID NO: 350000 - RNA, 18 nt, Human
ugaugucucuccaagucc

SEQ ID NO: 350001 - RNA, 18 nt, Human
ugcaacugcggccuccgc

SEQ ID NO: 350002 - RNA, 19 nt, Human
uggcacagcagagggaagc

SEQ ID NO: 350003 - RNA, 22 nt, Human
uggcagcaguguggccugaugg

SEQ ID NO: 350004 - RNA, 19 nt, Human
uggccugauggggggacua

SEQ ID NO: 350005 - RNA, 21 nt, Human
uggcgguagcgguagcccucu

SEQ ID NO: 350006 - RNA, 21 nt, Human
uuuuauuuaaauaaccgaagc

SEQ ID NO: 350007 - RNA, 20 nt, Human
uuuuuuuuuuuuuuugucag

SEQ ID NO: 350008 - RNA, 18 nt, Human
uuuuuuuuuuuuuuuuug

SEQ ID NO: 350009 - RNA, 23 nt, Human
uuuuuuuuuuuuuuuuugucagu

SEQ ID NO: 350010 - RNA, 19 nt, Human
aaccaguaauguccuccuc

SEQ ID NO: 350011 - RNA, 20 nt, Human
aagaauauauuuccuggguu

SEQ ID NO: 350012 - RNA, 19 nt, Human
acucugaggugucaagaga

SEQ ID NO: 350013 - RNA, 21 nt, Human
agaacaaccaguaauguccuc

SEQ ID NO: 350014 - RNA, 27 nt, Human
agccagaacaaccaguaauguccuccu

SEQ ID NO: 350015 - RNA, 21 nt, Human
aggaguccaaggcguuggugg

SEQ ID NO: 350016 - RNA, 19 nt, Human
aggcaggagagagggaaga

SEQ ID NO: 350017 - RNA, 19 nt, Human
caaaccagccagaacaacu

SEQ ID NO: 350018 - RNA, 25 nt, Human
caguaauguccuccucccaagguuu

SEQ ID NO: 350019 - RNA, 22 nt, Human
ccaguaauguccuccucccaag

SEQ ID NO: 350020 - RNA, 20 nt, Human
ccucccaagguuuccuucuc

SEQ ID NO: 350021 - RNA, 19 nt, Human
cgggaggcggacgggcugg

SEQ ID NO: 350022 - RNA, 22 nt, Human
cuuacagucacucugagguguc

SEQ ID NO: 350023 - RNA, 19 nt, Human
cuucccacuugucuuacug

SEQ ID NO: 350024 - RNA, 20 nt, Human
gacacauuuacacaugggga

SEQ ID NO: 350025 - RNA, 18 nt, Human
ggagagaggcgggacggg

SEQ ID NO: 350026 - RNA, 21 nt, Human
ggcagaaguagggagugggaa

SEQ ID NO: 350027 - RNA, 22 nt, Human
gggacggggcgcgggcccuggu

SEQ ID NO: 350028 - RNA, 20 nt, Human
gggcgcgggcccuggucggg

SEQ ID NO: 350029 - RNA, 23 nt, Human
gugggaacuuuugaugaucaguu

SEQ ID NO: 350030 - RNA, 18 nt, Human
uaaaggcaggagagaggg

SEQ ID NO: 350031 - RNA, 18 nt, Human
uggacacauuuacacaug

SEQ ID NO: 350032 - RNA, 18 nt, Human
uggcugggcgggagagag

SEQ ID NO: 350033 - RNA, 18 nt, Human
ugggguggcagaaguagg

SEQ ID NO: 350034 - RNA, 19 nt, Human
ugucaagagacuugggucu

SEQ ID NO: 350035 - RNA, 20 nt, Human
uguggaaaaggcagaugugg

SEQ ID NO: 350036 - RNA, 22 nt, Human
uguguggacacauuuacacaug

SEQ ID NO: 350037 - RNA, 20 nt, Human
uugaugaacgugccucuucc

SEQ ID NO: 350038 - RNA, 23 nt, Human
uugggucucuucagcaaagagag

SEQ ID NO: 350039 - RNA, 25 nt, Human
uuguguggacacauuuacacauggg

SEQ ID NO: 350040 - RNA, 22 nt, Human
aaaaaacucgcaugauacacua

SEQ ID NO: 350041 - RNA, 25 nt, Human
aaacauuacaaaucacaccagaagu

SEQ ID NO: 350042 - RNA, 24 nt, Human
aagcaauucucgugccuuggccuc

SEQ ID NO: 350043 - RNA, 19 nt, Human
aaguagcugggacugcagg

SEQ ID NO: 350044 - RNA, 20 nt, Human
aaguagcugggacugcaggu

SEQ ID NO: 350045 - RNA, 24 nt, Human
aauagugaugaauucuucacacaa

SEQ ID NO: 350046 - RNA, 18 nt, Human
acaggguuucaccauguu

SEQ ID NO: 350047 - RNA, 21 nt, Human
acaggguuucaccauguuggc

SEQ ID NO: 350048 - RNA, 22 nt, Human
acaggguuucaccauguuggcc

SEQ ID NO: 350049 - RNA, 25 nt, Human
acaggguuucaccauguuggccugg

SEQ ID NO: 350050 - RNA, 25 nt, Human
acucugucgcccaggcuggagugca

SEQ ID NO: 350051 - RNA, 20 nt, Human
acuuggcuaauuuuuaguag

SEQ ID NO: 350052 - RNA, 24 nt, Human
agcaauucucgugccuuggccucc

SEQ ID NO: 350053 - RNA, 25 nt, Human
aggcuggagugcaguggcgcgaucu

SEQ ID NO: 350054 - RNA, 21 nt, Human
aggugaccgacgggguggggc

SEQ ID NO: 350055 - RNA, 23 nt, Human
agugcaguggcgcgaucuuggcu

SEQ ID NO: 350056 - RNA, 24 nt, Human
agugcaguggcgcgaucuuggcuc

SEQ ID NO: 350057 - RNA, 19 nt, Human
auucuuuagcauucuuugu

SEQ ID NO: 350058 - RNA, 27 nt, Human
caagcaauucucgugccuuggccuccc

SEQ ID NO: 350059 - RNA, 21 nt, Human
caauaguagcauacuaugcua

SEQ ID NO: 350060 - RNA, 20 nt, Human
cacauucuucagcaucuacc

SEQ ID NO: 350061 - RNA, 18 nt, Human
caccauguuggccuggcu

SEQ ID NO: 350062 - RNA, 24 nt, Human
cacucugucgcccaggcuggagug

SEQ ID NO: 350063 - RNA, 22 nt, Human
cagcaucuaccaaaaaaaacuc

SEQ ID NO: 350064 - RNA, 27 nt, Human
cagcaucuaccaaaaaaaacucgcaug

SEQ ID NO: 350065 - RNA, 24 nt, Human
caggguuucaccauguuggccugg

SEQ ID NO: 350066 - RNA, 19 nt, Human
caguggcgcgaucuuggcu

SEQ ID NO: 350067 - RNA, 23 nt, Human
ccaaaaaaaacucgcaugauaca

SEQ ID NO: 350068 - RNA, 25 nt, Human
ccacauucuucagcaucuaccaaaa

SEQ ID NO: 350069 - RNA, 22 nt, Human
cccaaguagcugggacugcagg

SEQ ID NO: 350070 - RNA, 23 nt, Human
cccaaguagcugggacugcaggu

SEQ ID NO: 350071 - RNA, 22 nt, Human
cccggauuaagaacagcggggc

SEQ ID NO: 350072 - RNA, 18 nt, Human
cgaccuagacucaggcua

SEQ ID NO: 350073 - RNA, 24 nt, Human
cgcccaggcuggagugcaguggcg

SEQ ID NO: 350074 - RNA, 24 nt, Human
cgggccggggcucacaacaaggaa

SEQ ID NO: 350075 - RNA, 23 nt, Human
cuaccaaaaaaaacucgcaugau

SEQ ID NO: 350076 - RNA, 24 nt, Human
cuaccaaaaaaaacucgcaugaua

SEQ ID NO: 350077 - RNA, 24 nt, Human
cucacucugucgcccaggcuggag

SEQ ID NO: 350078 - RNA, 19 nt, Human
cucacugcaaccucugccu

SEQ ID NO: 350079 - RNA, 22 nt, Human
cucacugcaaccucugccuacc

SEQ ID NO: 350080 - RNA, 25 nt, Human
cucgugccuuggccucccaaguagc

SEQ ID NO: 350081 - RNA, 19 nt, Human
cucgugcuuucaugacgcu

SEQ ID NO: 350082 - RNA, 24 nt, Human
cugcaaccucugccuaccuuguuc

SEQ ID NO: 350083 - RNA, 19 nt, Human
cugucgcccaggcuggagu

SEQ ID NO: 350084 - RNA, 24 nt, Human
cuuggccucccaaguagcugggac

SEQ ID NO: 350085 - RNA, 20 nt, Human
gaccuagacucaggcuagcg

SEQ ID NO: 350086 - RNA, 21 nt, Human
gaccuagacucaggcuagcgg

SEQ ID NO: 350087 - RNA, 21 nt, Human
gagcgcagggcgugcggggaa

SEQ ID NO: 350088 - RNA, 19 nt, Human
gcccaggcuggagugcagu

SEQ ID NO: 350089 - RNA, 20 nt, Human
gcccaggcuggagugcagug

SEQ ID NO: 350090 - RNA, 23 nt, Human
gcggcccggauuaagaacagcgg

SEQ ID NO: 350091 - RNA, 19 nt, Human
gcuggagugcaguggcgcg

SEQ ID NO: 350092 - RNA, 18 nt, Human
ggccggggcucacaacaa

SEQ ID NO: 350093 - RNA, 20 nt, Human
gguagggugguauuucuuag

SEQ ID NO: 350094 - RNA, 22 nt, Human
gugccuuggccucccaaguagc

SEQ ID NO: 350095 - RNA, 23 nt, Human
gugccuuggccucccaaguagcu

SEQ ID NO: 350096 - RNA, 18 nt, Human
uaaauccaaagcauuugc

SEQ ID NO: 350097 - RNA, 18 nt, Human
uacuaugcuauaguagac

SEQ ID NO: 350098 - RNA, 22 nt, Human
uagacucaggcuagcggcccgg

SEQ ID NO: 350099 - RNA, 22 nt, Human
uagagacaggguuucaccaugu

SEQ ID NO: 350100 - RNA, 24 nt, Human
uaguagagacaggguuucaccaug

SEQ ID NO: 350101 - RNA, 26 nt, Human
uaguagagacaggguuucaccauguu

SEQ ID NO: 350102 - RNA, 24 nt, Human
uauccuucauuuaauuucacauca

SEQ ID NO: 350103 - RNA, 18 nt, Human
ucacugcaaccucugccu

SEQ ID NO: 350104 - RNA, 19 nt, Human
ucacugcaaccucugccua

SEQ ID NO: 350105 - RNA, 24 nt, Human
ucacugcaaccucugccuaccuug

SEQ ID NO: 350106 - RNA, 24 nt, Human
ucccaaguagcugggacugcaggu

SEQ ID NO: 350107 - RNA, 24 nt, Human
ucgcccaggcuggagugcaguggc

SEQ ID NO: 350108 - RNA, 23 nt, Human
ucucacucugucgcccaggcugg

SEQ ID NO: 350109 - RNA, 24 nt, Human
ucucacucugucgcccaggcugga

SEQ ID NO: 350110 - RNA, 26 nt, Human
ucucacucugucgcccaggcuggagu

SEQ ID NO: 350111 - RNA, 27 nt, Human
ucucacucugucgcccaggcuggagug

SEQ ID NO: 350112 - RNA, 24 nt, Human
ucugucgcccaggcuggagugcag

SEQ ID NO: 350113 - RNA, 22 nt, Human
ugagauggagucucacucuguc

SEQ ID NO: 350114 - RNA, 19 nt, Human
ugccauuugcaacuucauc

SEQ ID NO: 350115 - RNA, 24 nt, Human
uggagucucacucugucgcccagg

SEQ ID NO: 350116 - RNA, 23 nt, Human
uggagugcaguggcgcgaucuug

SEQ ID NO: 350117 - RNA, 24 nt, Human
uggagugcaguggcgcgaucuugg

SEQ ID NO: 350118 - RNA, 24 nt, Human
uggcucacugcaaccucugccuac

SEQ ID NO: 350119 - RNA, 18 nt, Human
ugguagggugguauuucu

SEQ ID NO: 350120 - RNA, 19 nt, Human
uguccaaugauuaagaaac

SEQ ID NO: 350121 - RNA, 22 nt, Human
uuaauauccuucauuuaauuuc

SEQ ID NO: 350122 - RNA, 24 nt, Human
uuaguagagacaggguuucaccau

SEQ ID NO: 350123 - RNA, 21 nt, Human
uugccaggcccaucaucgcac

SEQ ID NO: 350124 - RNA, 23 nt, Human
uuggcuaauuuuuaguagagaca

SEQ ID NO: 350125 - RNA, 19 nt, Human
uuguacgguaaaaugcuuu

SEQ ID NO: 350126 - RNA, 21 nt, Human
uuucaccauguuggccuggcu

SEQ ID NO: 350127 - RNA, 24 nt, Human
uuuuuaguagagacaggguuucac

SEQ ID NO: 350128 - RNA, 26 nt, Human
uuuuuuuuuucugagauggagucuca

SEQ ID NO: 350129 - RNA, 24 nt, Human
aaaagaaaacccuuccccagcaga

SEQ ID NO: 350130 - RNA, 23 nt, Human
aaaaucccacccaaucacagaaa

SEQ ID NO: 350131 - RNA, 22 nt, Human
aaacacaaucucagauuaguac

SEQ ID NO: 350132 - RNA, 21 nt, Human
aaacaucccucuuuggaaggg

SEQ ID NO: 350133 - RNA, 19 nt, Human
aaagaccauucguuuuagg

SEQ ID NO: 350134 - RNA, 24 nt, Human
aaagcauuagucaugccucaaaac

SEQ ID NO: 350135 - RNA, 18 nt, Human
aacacugugauuagaaaa

SEQ ID NO: 350136 - RNA, 20 nt, Human
aaccaccagcauaacauggc

SEQ ID NO: 350137 - RNA, 21 nt, Human
aacuucaagacuucuugauau

SEQ ID NO: 350138 - RNA, 24 nt, Human
aagagauuccuaacccugcccccu

SEQ ID NO: 350139 - RNA, 19 nt, Human
aagguucucaaauucuguu

SEQ ID NO: 350140 - RNA, 22 nt, Human
aaguugucagcacaccccccaa

SEQ ID NO: 350141 - RNA, 18 nt, Human
acacacucccacccacac

SEQ ID NO: 350142 - RNA, 20 nt, Human
acacacucccacccacaccc

SEQ ID NO: 350143 - RNA, 19 nt, Human
acacuguguucagcagggu

SEQ ID NO: 350144 - RNA, 21 nt, Human
acagaaaaggcauccucugua

SEQ ID NO: 350145 - RNA, 22 nt, Human
acagacaggguagagccaggaa

SEQ ID NO: 350146 - RNA, 23 nt, Human
acagagacccccuucuccucaaa

SEQ ID NO: 350147 - RNA, 21 nt, Human
acauucaaauuauuuccaccc

SEQ ID NO: 350148 - RNA, 21 nt, Human
accacuuuuacuacaaacuua

SEQ ID NO: 350149 - RNA, 23 nt, Human
acccccuucuccucaaaaaaaaa

SEQ ID NO: 350150 - RNA, 18 nt, Human
acccugccccccaggcag

SEQ ID NO: 350151 - RNA, 23 nt, Human
accguguccgguauuuccucagc

SEQ ID NO: 350152 - RNA, 22 nt, Human
accuauuugagcuacacuuaca

SEQ ID NO: 350153 - RNA, 19 nt, Human
acuaaacuacagugaucuu

SEQ ID NO: 350154 - RNA, 20 nt, Human
acuucuacaagcauugcacu

SEQ ID NO: 350155 - RNA, 20 nt, Human
agaaaagcagcccuaacaaa

SEQ ID NO: 350156 - RNA, 19 nt, Human
agacacacucccacccaca

SEQ ID NO: 350157 - RNA, 21 nt, Human
agacacacucccacccacacc

SEQ ID NO: 350158 - RNA, 18 nt, Human
agagaauacacccaagau

SEQ ID NO: 350159 - RNA, 22 nt, Human
agaggcuuucugggccagagau

SEQ ID NO: 350160 - RNA, 20 nt, Human
agagggagggagagagaggc

SEQ ID NO: 350161 - RNA, 20 nt, Human
agagggagggagagagaggc

SEQ ID NO: 350162 - RNA, 22 nt, Human
agagggagggagagagaggcuu

SEQ ID NO: 350163 - RNA, 19 nt, Human
agcagaaagaggaaagaac

SEQ ID NO: 350164 - RNA, 25 nt, Human
agccuugucuugagccaucagugug

SEQ ID NO: 350165 - RNA, 18 nt, Human
aggaaaccugagggaccc

SEQ ID NO: 350166 - RNA, 20 nt, Human
aggaaucaagaaucagggua

SEQ ID NO: 350167 - RNA, 26 nt, Human
agggguaggugcacagguccccaagg

SEQ ID NO: 350168 - RNA, 23 nt, Human
aguccaggcuaaccccuguagcc

SEQ ID NO: 350169 - RNA, 23 nt, Human
agugguuggagaggcccuggccu

SEQ ID NO: 350170 - RNA, 23 nt, Human
aguguggcaggggagcacagggg

SEQ ID NO: 350171 - RNA, 19 nt, Human
auaaaaagggaaaaaaucc

SEQ ID NO: 350172 - RNA, 22 nt, Human
aucuagcaaaagccugggcuga

SEQ ID NO: 350173 - RNA, 20 nt, Human
auguauauauguauauauau

SEQ ID NO: 350174 - RNA, 20 nt, Human
caacaugagcgcuuggcuug

SEQ ID NO: 350175 - RNA, 21 nt, Human
caaguaacuacuauaucccac

SEQ ID NO: 350176 - RNA, 23 nt, Human
cacaccccccaaagcagggacug

SEQ ID NO: 350177 - RNA, 23 nt, Human
cacccaagauacuagcaaaccaa

SEQ ID NO: 350178 - RNA, 21 nt, Human
cacccuccaucaaaugugggc

SEQ ID NO: 350179 - RNA, 19 nt, Human
cacucaguaaccuucucaa

SEQ ID NO: 350180 - RNA, 18 nt, Human
cacuguguucagcagggu

SEQ ID NO: 350181 - RNA, 20 nt, Human
cagaagaaaggccuuccucc

SEQ ID NO: 350182 - RNA, 22 nt, Human
cagaaggaaaacugaggcaccu

SEQ ID NO: 350183 - RNA, 22 nt, Human
cagacacacucccacccacacc

SEQ ID NO: 350184 - RNA, 21 nt, Human
cagagcagaaagaggaaagaa

SEQ ID NO: 350185 - RNA, 21 nt, Human
cagcacaccccccaaagcagg

SEQ ID NO: 350186 - RNA, 21 nt, Human
cagcaguggagaggaaauugg

SEQ ID NO: 350187 - RNA, 21 nt, Human
caggagugguccaagguucuc

SEQ ID NO: 350188 - RNA, 21 nt, Human
caguauuauuauccccauuuu

SEQ ID NO: 350189 - RNA, 18 nt, Human
cagugguuggagaggccc

SEQ ID NO: 350190 - RNA, 18 nt, Human
caugguggacauuccuau

SEQ ID NO: 350191 - RNA, 19 nt, Human
cauugcacugccagcugag

SEQ ID NO: 350192 - RNA, 23 nt, Human
cauugcacugccagcugagagca

SEQ ID NO: 350193 - RNA, 23 nt, Human
ccaacuucaagacuucuugauau

SEQ ID NO: 350194 - RNA, 18 nt, Human
ccacacccacagccacac

SEQ ID NO: 350195 - RNA, 19 nt, Human
ccacagccacacauacauu

SEQ ID NO: 350196 - RNA, 20 nt, Human
ccagcugcuugccugggagg

SEQ ID NO: 350197 - RNA, 23 nt, Human
ccauccagccuuauguaggguca

SEQ ID NO: 350198 - RNA, 18 nt, Human
cccaacuaauuccuccuc

SEQ ID NO: 350199 - RNA, 18 nt, Human
cccacacccacagccaca

SEQ ID NO: 350200 - RNA, 26 nt, Human
cccacagccacacauacauuggggcc

SEQ ID NO: 350201 - RNA, 19 nt, Human
cccacccacacccacagcc

SEQ ID NO: 350202 - RNA, 20 nt, Human
cccacccacacccacagcca

SEQ ID NO: 350203 - RNA, 21 nt, Human
cccacccacacccacagccac

SEQ ID NO: 350204 - RNA, 22 nt, Human
cccgagccgggaauuuaaaggc

SEQ ID NO: 350205 - RNA, 19 nt, Human
cccucagccucuccaucuc

SEQ ID NO: 350206 - RNA, 19 nt, Human
cccucagccugaggugcca

SEQ ID NO: 350207 - RNA, 19 nt, Human
cccuggccuuaaccaccag

SEQ ID NO: 350208 - RNA, 18 nt, Human
ccggagcggaguucgggg

SEQ ID NO: 350209 - RNA, 19 nt, Human
ccuaacccugccccccagg

SEQ ID NO: 350210 - RNA, 18 nt, Human
ccucagccugaggugcca

SEQ ID NO: 350211 - RNA, 24 nt, Human
ccugaagauggcagagcagaaaga

SEQ ID NO: 350212 - RNA, 19 nt, Human
ccugcaaaucgugauacug

SEQ ID NO: 350213 - RNA, 24 nt, Human
ccuggccuuaaccaccagcauaac

SEQ ID NO: 350214 - RNA, 19 nt, Human
ccuuccagcacuggggcuc

SEQ ID NO: 350215 - RNA, 23 nt, Human
cgagccgggaauuuaaaggcuag

SEQ ID NO: 350216 - RNA, 23 nt, Human
cgauagcaauaaagugaaaagga

SEQ ID NO: 350217 - RNA, 24 nt, Human
cuaacccugccccccaggcaguug

SEQ ID NO: 350218 - RNA, 21 nt, Human
cuagcucaagccaccuacuuc

SEQ ID NO: 350219 - RNA, 19 nt, Human
cucaaaagacaaggaugcc

SEQ ID NO: 350220 - RNA, 21 nt, Human
cucaaauucuguuuuuguuuu

SEQ ID NO: 350221 - RNA, 20 nt, Human
cucaaggaaagagaguuauc

SEQ ID NO: 350222 - RNA, 18 nt, Human
cucauggaauacucaaaa

SEQ ID NO: 350223 - RNA, 23 nt, Human
cuccuacuucuacaagcauugca

SEQ ID NO: 350224 - RNA, 18 nt, Human
cuccucuccuucagaguu

SEQ ID NO: 350225 - RNA, 22 nt, Human
cugacuccagggaacagggccu

SEQ ID NO: 350226 - RNA, 24 nt, Human
cuucccagugagaacuguuuccuc

SEQ ID NO: 350227 - RNA, 26 nt, Human
cuucugcuuugaugacugagcuacag

SEQ ID NO: 350228 - RNA, 20 nt, Human
cuuggcucucggaugccggg

SEQ ID NO: 350229 - RNA, 22 nt, Human
cuuggguucuugcccuugcuuc

SEQ ID NO: 350230 - RNA, 21 nt, Human
cuuucaauacuuuugaauuuu

SEQ ID NO: 350231 - RNA, 23 nt, Human
gaaaacccuuccccagcagagac

SEQ ID NO: 350232 - RNA, 21 nt, Human
gaaaagaaaacccuuccccag

SEQ ID NO: 350233 - RNA, 19 nt, Human
gaaaagcagcccuaacaaa

SEQ ID NO: 350234 - RNA, 21 nt, Human
gaaauaccagcagacauuucc

SEQ ID NO: 350235 - RNA, 18 nt, Human
gaaggaucccaaaaugcu

SEQ ID NO: 350236 - RNA, 21 nt, Human
gagcagcucauggaauacuca

SEQ ID NO: 350237 - RNA, 18 nt, Human
gagguccccgagccggga

SEQ ID NO: 350238 - RNA, 18 nt, Human
gcaauaagggaaaggagg

SEQ ID NO: 350239 - RNA, 21 nt, Human
gcagagaccacuuuuacuaca

SEQ ID NO: 350240 - RNA, 18 nt, Human
gcagagggagugagggca

SEQ ID NO: 350241 - RNA, 19 nt, Human
gccacacauacauuggggc

SEQ ID NO: 350242 - RNA, 22 nt, Human
gcuacaaccaucuuuuaaccca

SEQ ID NO: 350243 - RNA, 22 nt, Human
gcuaguuauccaccgcuucucc

SEQ ID NO: 350244 - RNA, 24 nt, Human
gcuaguuauccaccgcuucuccaa

SEQ ID NO: 350245 - RNA, 25 nt, Human
ggaaaaaaucccacccaaucacaga

SEQ ID NO: 350246 - RNA, 20 nt, Human
ggaacagggccuccuuucga

SEQ ID NO: 350247 - RNA, 21 nt, Human
ggagagagaggcuuucugggc

SEQ ID NO: 350248 - RNA, 23 nt, Human
ggcugugccucaugagagaggga

SEQ ID NO: 350249 - RNA, 20 nt, Human
gggggcugaggcuccggagc

SEQ ID NO: 350250 - RNA, 22 nt, Human
guauauauguauauauauuuua

SEQ ID NO: 350251 - RNA, 20 nt, Human
gucuugagccaucagugugg

SEQ ID NO: 350252 - RNA, 22 nt, Human
gugaauagcucaaaagacaagg

SEQ ID NO: 350253 - RNA, 23 nt, Human
guuggagaggcccuggccuuaac

SEQ ID NO: 350254 - RNA, 21 nt, Human
uaaaaagggaaaaaaucccac

SEQ ID NO: 350255 - RNA, 22 nt, Human
uaaaggcuagagcuggcaacgg

SEQ ID NO: 350256 - RNA, 19 nt, Human
uaacacagaagaaaggccu

SEQ ID NO: 350257 - RNA, 19 nt, Human
uaacagaaggaaaacugag

SEQ ID NO: 350258 - RNA, 18 nt, Human
uaacauggccaccucgcu

SEQ ID NO: 350259 - RNA, 23 nt, Human
uaaccaccagcauaacauggcca

SEQ ID NO: 350260 - RNA, 22 nt, Human
uaaccccuguagccucuacgca

SEQ ID NO: 350261 - RNA, 24 nt, Human
uaagugacuugcccagggucacac

SEQ ID NO: 350262 - RNA, 20 nt, Human
uacuuucaaaagagaagcag

SEQ ID NO: 350263 - RNA, 19 nt, Human
uagaagcugccuauagauc

SEQ ID NO: 350264 - RNA, 20 nt, Human
uagcauccugguagcauuau

SEQ ID NO: 350265 - RNA, 24 nt, Human
uagcauugccaaacaccgcagcca

SEQ ID NO: 350266 - RNA, 24 nt, Human
uaggaagaagugaaaguuguuuuu

SEQ ID NO: 350267 - RNA, 21 nt, Human
uagggucucaggugcaaaggg

SEQ ID NO: 350268 - RNA, 25 nt, Human
uaugugguggggcuugaaguccuca

SEQ ID NO: 350269 - RNA, 25 nt, Human
ucaaaaaaaaaugagugaaggggca

SEQ ID NO: 350270 - RNA, 21 nt, Human
ucaaaauuccaugagcugcug

SEQ ID NO: 350271 - RNA, 22 nt, Human
ucaagaaucaggguagugaaga

SEQ ID NO: 350272 - RNA, 18 nt, Human
ucagccaaagcuuugcag

SEQ ID NO: 350273 - RNA, 23 nt, Human
ucaggccccuuuuucuaccagcc

SEQ ID NO: 350274 - RNA, 18 nt, Human
ucaguagggucucaggug

SEQ ID NO: 350275 - RNA, 21 nt, Human
ucaguggcacagugguuggag

SEQ ID NO: 350276 - RNA, 21 nt, Human
ucccaacuaauuccuccucuc

SEQ ID NO: 350277 - RNA, 20 nt, Human
ucccacauaaaaagggaaaa

SEQ ID NO: 350278 - RNA, 20 nt, Human
ucccaggucucagccaaaga

SEQ ID NO: 350279 - RNA, 19 nt, Human
ucccucagccucuccaucu

SEQ ID NO: 350280 - RNA, 20 nt, Human
uccuccacucaggccccuuu

SEQ ID NO: 350281 - RNA, 21 nt, Human
ucggggucgccggaggacugc

SEQ ID NO: 350282 - RNA, 24 nt, Human
ucuaagcaauguauauauguauau

SEQ ID NO: 350283 - RNA, 19 nt, Human
ucucagccaaagcuuugca

SEQ ID NO: 350284 - RNA, 27 nt, Human
ugaauacacacaaaggaggcugccugu

SEQ ID NO: 350285 - RNA, 22 nt, Human
ugacccagagagaggggacuga

SEQ ID NO: 350286 - RNA, 24 nt, Human
ugacugagcuacagggacaggagu

SEQ ID NO: 350287 - RNA, 25 nt, Human
ugagagagggagggagagagaggcu

SEQ ID NO: 350288 - RNA, 23 nt, Human
ugagagcacugacucaggcgggg

SEQ ID NO: 350289 - RNA, 20 nt, Human
ugagccaucaguguggcagg

SEQ ID NO: 350290 - RNA, 18 nt, Human
ugagcuacagggacagga

SEQ ID NO: 350291 - RNA, 24 nt, Human
ugagguaggucaguauuauuaucc

SEQ ID NO: 350292 - RNA, 19 nt, Human
ugaggugaauagcucaaaa

SEQ ID NO: 350293 - RNA, 20 nt, Human
ugaggugccauccagccuua

SEQ ID NO: 350294 - RNA, 21 nt, Human
ugaguuuaucauuaauguguc

SEQ ID NO: 350295 - RNA, 22 nt, Human
ugcaaagggauucugcagaggg

SEQ ID NO: 350296 - RNA, 20 nt, Human
ugcagagggagugagggcag

SEQ ID NO: 350297 - RNA, 24 nt, Human
ugcaguucacccugacuccaggga

SEQ ID NO: 350298 - RNA, 22 nt, Human
ugccgggaucacuuuccagggg

SEQ ID NO: 350299 - RNA, 21 nt, Human
ugcucuguggcuggcccacug

SEQ ID NO: 350300 - RNA, 20 nt, Human
uggaauggguuaacaucauc

SEQ ID NO: 350301 - RNA, 18 nt, Human
uggcagagcagaaagagg

SEQ ID NO: 350302 - RNA, 24 nt, Human
uggcuaguuauccaccgcuucucc

SEQ ID NO: 350303 - RNA, 23 nt, Human
ugggaggcaauaagggaaaggag

SEQ ID NO: 350304 - RNA, 24 nt, Human
uggggcccucagccugaggugcca

SEQ ID NO: 350305 - RNA, 25 nt, Human
uggggcucaacaguggacugagugu

SEQ ID NO: 350306 - RNA, 19 nt, Human
ugguggggcuugaaguccu

SEQ ID NO: 350307 - RNA, 20 nt, Human
ugguuggagaggcccuggcc

SEQ ID NO: 350308 - RNA, 18 nt, Human
uguauauauguauauaua

SEQ ID NO: 350309 - RNA, 18 nt, Human
ugucacuugaauugagcu

SEQ ID NO: 350310 - RNA, 21 nt, Human
uguccgguauuuccucagccc

SEQ ID NO: 350311 - RNA, 18 nt, Human
ugucuaggcuuuggaagc

SEQ ID NO: 350312 - RNA, 18 nt, Human
ugucugcccuaggcugua

SEQ ID NO: 350313 - RNA, 21 nt, Human
uguggcuggcccacuggcuca

SEQ ID NO: 350314 - RNA, 19 nt, Human
uguucagcaggguuugugg

SEQ ID NO: 350315 - RNA, 19 nt, Human
uuaaccaccagcauaacau

SEQ ID NO: 350316 - RNA, 23 nt, Human
uucaaauuauuuccacccuccau

SEQ ID NO: 350317 - RNA, 23 nt, Human
uucacuuuuauuaugaacaaaca

SEQ ID NO: 350318 - RNA, 23 nt, Human
uuccucccuuccagcacuggggc

SEQ ID NO: 350319 - RNA, 24 nt, Human
uucucaaauucuguuuuuguuuuu

SEQ ID NO: 350320 - RNA, 19 nt, Human
uugcugaacagacacugug

SEQ ID NO: 350321 - RNA, 23 nt, Human
uuucugggaggguuugccagccu

SEQ ID NO: 350322 - RNA, 20 nt, Human
uuugcaguucacccugacuc

SEQ ID NO: 350323 - RNA, 18 nt, Human
uuuuaaaugcuacaacca

SEQ ID NO: 350324 - RNA, 22 nt, Human
uuuugcucuguggcuggcccac

SEQ ID NO: 350325 - RNA, 23 nt, Human
ccagagaccagauggcucuuuuu

SEQ ID NO: 350326 - RNA, 23 nt, Human
cugccuuccaguaaggaccucua

SEQ ID NO: 350327 - RNA, 19 nt, Human
gcucuuuuuauguguguga

SEQ ID NO: 350328 - RNA, 25 nt, Human
gcugccuuccaguaaggaccucuau

SEQ ID NO: 350329 - RNA, 22 nt, Human
uaacucuagccagagaccagau

SEQ ID NO: 350330 - RNA, 25 nt, Human
uaaugagugcuuuucaucuugauuu

SEQ ID NO: 350331 - RNA, 18 nt, Human
uagauuacauauuauuaa

SEQ ID NO: 350332 - RNA, 21 nt, Human
uaugcaauaacagaauuguua

SEQ ID NO: 350333 - RNA, 19 nt, Human
uuuaauuccuuaaugagug

SEQ ID NO: 350334 - RNA, 22 nt, Human
aaagauauuacaguguuaacag

SEQ ID NO: 350335 - RNA, 22 nt, Human
aacauuuacacauauccauaca

SEQ ID NO: 350336 - RNA, 24 nt, Human
acaaaacgcuacagacaguaacaa

SEQ ID NO: 350337 - RNA, 19 nt, Human
acacuuuuuuaucauaugu

SEQ ID NO: 350338 - RNA, 18 nt, Human
acauauccauacacaaga

SEQ ID NO: 350339 - RNA, 21 nt, Human
acuccacaaaacgcuacagac

SEQ ID NO: 350340 - RNA, 25 nt, Human
agaaauguugggauuugcuuggggu

SEQ ID NO: 350341 - RNA, 20 nt, Human
caacacacugaagagaaaug

SEQ ID NO: 350342 - RNA, 22 nt, Human
cagcucagaggaaaugaagcag

SEQ ID NO: 350343 - RNA, 19 nt, Human
ccacagcauauuccucccc

SEQ ID NO: 350344 - RNA, 22 nt, Human
cccagugaccugguuucaucug

SEQ ID NO: 350345 - RNA, 19 nt, Human
uacuccacaaaacgcuaca

SEQ ID NO: 350346 - RNA, 21 nt, Human
uagauauacuauuaaacacag

SEQ ID NO: 350347 - RNA, 19 nt, Human
uccacaaaacgcuacagac

SEQ ID NO: 350348 - RNA, 21 nt, Human
uccccagugaccugguuucau

SEQ ID NO: 350349 - RNA, 24 nt, Human
uccccagugaccugguuucaucug

SEQ ID NO: 350350 - RNA, 25 nt, Human
uccccagugaccugguuucaucugc

SEQ ID NO: 350351 - RNA, 21 nt, Human
ugcuuggggugggaggaauga

SEQ ID NO: 350352 - RNA, 26 nt, Human
ugcuuuauuuuuuugguccaguacuc

SEQ ID NO: 350353 - RNA, 22 nt, Human
ugggauuugcuuggggugggag

SEQ ID NO: 350354 - RNA, 22 nt, Human
uggggugggaggaaugaaagua

SEQ ID NO: 350355 - RNA, 26 nt, Human
uggggugggaggaaugaaaguagggu

SEQ ID NO: 350356 - RNA, 21 nt, Human
ugguccaguacuccacaaaac

SEQ ID NO: 350357 - RNA, 18 nt, Human
uuaaacacagucauagau

SEQ ID NO: 350358 - RNA, 20 nt, Human
uuccucuuuuuguuuauaug

SEQ ID NO: 350359 - RNA, 24 nt, Human
uugaaagauuuccucuuuuuguuu

SEQ ID NO: 350360 - RNA, 18 nt, Human
uugguccaguacuccaca

SEQ ID NO: 350361 - RNA, 21 nt, Human
aaaaaagcagauggcuccucc

SEQ ID NO: 350362 - RNA, 23 nt, Human
aaaaguucuccaaggccccacuc

SEQ ID NO: 350363 - RNA, 28 nt, Human
aaacagaacccccuuaauucuucgggga

SEQ ID NO: 350364 - RNA, 23 nt, Human
aaagagcagccaaaaaagcagau

SEQ ID NO: 350365 - RNA, 19 nt, Human
aagcagauggcuccuccaa

SEQ ID NO: 350366 - RNA, 18 nt, Human
aagcaggguuggggcgcg

SEQ ID NO: 350367 - RNA, 21 nt, Human
aaggaggaguaaaaacaggaa

SEQ ID NO: 350368 - RNA, 18 nt, Human
acaacuuuacuuucagau

SEQ ID NO: 350369 - RNA, 22 nt, Human
acaauccucuuguaagacagaa

SEQ ID NO: 350370 - RNA, 21 nt, Human
accugaacagguugcugcugc

SEQ ID NO: 350371 - RNA, 22 nt, Human
acuccaaucccccgggaaugga

SEQ ID NO: 350372 - RNA, 21 nt, Human
acucucgcucccuccuggaga

SEQ ID NO: 350373 - RNA, 21 nt, Human
acugcugguggaaaugacauc

SEQ ID NO: 350374 - RNA, 22 nt, Human
agaauuagaaguguuuuaagcu

SEQ ID NO: 350375 - RNA, 23 nt, Human
agaauuagaaguguuuuaagcua

SEQ ID NO: 350376 - RNA, 23 nt, Human
agccaaaaaagcagauggcuccu

SEQ ID NO: 350377 - RNA, 21 nt, Human
agcccggcgcugggcuccugg

SEQ ID NO: 350378 - RNA, 20 nt, Human
agcggcaggcgaccugaaca

SEQ ID NO: 350379 - RNA, 22 nt, Human
aggaaguguuaagaacaggggg

SEQ ID NO: 350380 - RNA, 18 nt, Human
aggccccacucgacccag

SEQ ID NO: 350381 - RNA, 22 nt, Human
agggcuguguuugugguggggg

SEQ ID NO: 350382 - RNA, 20 nt, Human
aggguuggggcgcgcgggag

SEQ ID NO: 350383 - RNA, 19 nt, Human
agguagaggggagcgcugu

SEQ ID NO: 350384 - RNA, 19 nt, Human
aguguuaagaacaggggga

SEQ ID NO: 350385 - RNA, 19 nt, Human
auccagcaaauccuauacc

SEQ ID NO: 350386 - RNA, 22 nt, Human
aucucucuuuauaaguaaacuc

SEQ ID NO: 350387 - RNA, 20 nt, Human
augaagagcaaaaggacaaa

SEQ ID NO: 350388 - RNA, 21 nt, Human
augaagagcaaaaggacaaag

SEQ ID NO: 350389 - RNA, 21 nt, Human
caaagcuuccacagcggcagg

SEQ ID NO: 350390 - RNA, 19 nt, Human
cacuguauguuuccagggc

SEQ ID NO: 350391 - RNA, 24 nt, Human
ccaaaaaagcagauggcuccucca

SEQ ID NO: 350392 - RNA, 22 nt, Human
ccagcuaaaaagagcagccaaa

SEQ ID NO: 350393 - RNA, 25 nt, Human
ccagcuaaaaagagcagccaaaaaa

SEQ ID NO: 350394 - RNA, 22 nt, Human
ccaggaggguggguguggggcg

SEQ ID NO: 350395 - RNA, 21 nt, Human
cccuuugcucucuguugagaa

SEQ ID NO: 350396 - RNA, 21 nt, Human
ccucuuguaagacagaaaagu

SEQ ID NO: 350397 - RNA, 22 nt, Human
cgggacugggcggcugcaggau

SEQ ID NO: 350398 - RNA, 18 nt, Human
cgggagaggggccgggac

SEQ ID NO: 350399 - RNA, 19 nt, Human
cgggagaggggccgggacu

SEQ ID NO: 350400 - RNA, 21 nt, Human
cgggaggggauggcgucggug

SEQ ID NO: 350401 - RNA, 24 nt, Human
cucacuaauacacaaauuacauau

SEQ ID NO: 350402 - RNA, 22 nt, Human
cuccaacgcuacuccaaucccc

SEQ ID NO: 350403 - RNA, 22 nt, Human
cuccugcuacgccagaggcggg

SEQ ID NO: 350404 - RNA, 25 nt, Human
cucugcaaggugcuuuaguacuugg

SEQ ID NO: 350405 - RNA, 21 nt, Human
cugagccuaauaaaaagccag

SEQ ID NO: 350406 - RNA, 23 nt, Human
cuucaccucucacuaauacacaa

SEQ ID NO: 350407 - RNA, 22 nt, Human
cuuggcaugccuugaaaacaga

SEQ ID NO: 350408 - RNA, 23 nt, Human
cuuuacucucgcucccuccugga

SEQ ID NO: 350409 - RNA, 22 nt, Human
gaguaaaaacaggaagagccag

SEQ ID NO: 350410 - RNA, 22 nt, Human
gcccuuuuuuucaauccucccu

SEQ ID NO: 350411 - RNA, 22 nt, Human
gcgggagaggggccgggacugg

SEQ ID NO: 350412 - RNA, 18 nt, Human
gcuggcugggguggccag

SEQ ID NO: 350413 - RNA, 20 nt, Human
gcugggguggccagauuuua

SEQ ID NO: 350414 - RNA, 22 nt, Human
ggagaggggccgggacugggcg

SEQ ID NO: 350415 - RNA, 20 nt, Human
ggagcgcuguccgcccuguc

SEQ ID NO: 350416 - RNA, 22 nt, Human
ggaugagacaguggaagaagga

SEQ ID NO: 350417 - RNA, 24 nt, Human
gggaacugcugguggaaaugacau

SEQ ID NO: 350418 - RNA, 25 nt, Human
gggccgggacugggcggcugcagga

SEQ ID NO: 350419 - RNA, 23 nt, Human
gggcguagcuuuacucucgcucc

SEQ ID NO: 350420 - RNA, 20 nt, Human
gggcuccuggagcuguagcu

SEQ ID NO: 350421 - RNA, 24 nt, Human
gggcuguguuuguggugggggcug

SEQ ID NO: 350422 - RNA, 19 nt, Human
gugcuuuaguacuuggcau

SEQ ID NO: 350423 - RNA, 18 nt, Human
uaaaaagagcagccaaaa

SEQ ID NO: 350424 - RNA, 19 nt, Human
uaaaaagagcagccaaaaa

SEQ ID NO: 350425 - RNA, 22 nt, Human
uaaaaagccagcuaaaaagagc

SEQ ID NO: 350426 - RNA, 23 nt, Human
uaaaaagccagcuaaaaagagca

SEQ ID NO: 350427 - RNA, 18 nt, Human
uaaccacuuguaaaaggu

SEQ ID NO: 350428 - RNA, 18 nt, Human
uaacuacuguaaauucag

SEQ ID NO: 350429 - RNA, 21 nt, Human
uaagggaacugcugguggaaa

SEQ ID NO: 350430 - RNA, 18 nt, Human
uaaguaaacucaaugucu

SEQ ID NO: 350431 - RNA, 21 nt, Human
uaaguaaacucaaugucugaa

SEQ ID NO: 350432 - RNA, 24 nt, Human
uacagagcgcugauugguguguuu

SEQ ID NO: 350433 - RNA, 21 nt, Human
uacuuggcaugccuugaaaac

SEQ ID NO: 350434 - RNA, 20 nt, Human
uagauaacugagauguggca

SEQ ID NO: 350435 - RNA, 21 nt, Human
uauguggaugagacaguggaa

SEQ ID NO: 350436 - RNA, 24 nt, Human
uauucccuuauuuguccccuccca

SEQ ID NO: 350437 - RNA, 19 nt, Human
ucauuaaccuuuuccucca

SEQ ID NO: 350438 - RNA, 18 nt, Human
uccaacgcuacuccaauc

SEQ ID NO: 350439 - RNA, 19 nt, Human
uccaaggccccacucgacc

SEQ ID NO: 350440 - RNA, 20 nt, Human
uccaaggccccacucgaccc

SEQ ID NO: 350441 - RNA, 20 nt, Human
uccaggaaagcugcucgacc

SEQ ID NO: 350442 - RNA, 21 nt, Human
uccauuagaggcuuuuucaaa

SEQ ID NO: 350443 - RNA, 24 nt, Human
ucccauguuccguuuuugcccuau

SEQ ID NO: 350444 - RNA, 25 nt, Human
ucgcucccuccuggagaggaaguga

SEQ ID NO: 350445 - RNA, 21 nt, Human
ucuaugaggaaauaaggauuc

SEQ ID NO: 350446 - RNA, 21 nt, Human
ucuccaaggccccacucgacc

SEQ ID NO: 350447 - RNA, 22 nt, Human
ucuccaaggccccacucgaccc

SEQ ID NO: 350448 - RNA, 20 nt, Human
ugaaaacagaacccccuuaa

SEQ ID NO: 350449 - RNA, 23 nt, Human
ugaaaacagaacccccuuaauuc

SEQ ID NO: 350450 - RNA, 18 nt, Human
ugaaagacuccuggaucu

SEQ ID NO: 350451 - RNA, 24 nt, Human
ugaaagacuccuggaucuuuugcc

SEQ ID NO: 350452 - RNA, 24 nt, Human
ugacuccaacgcuacuccaauccc

SEQ ID NO: 350453 - RNA, 23 nt, Human
ugagaaaacuuggcuuggaucua

SEQ ID NO: 350454 - RNA, 26 nt, Human
ugccuggcccuuugcucucuguuggu

SEQ ID NO: 350455 - RNA, 21 nt, Human
ugccuugaaaacagaaccccc

SEQ ID NO: 350456 - RNA, 22 nt, Human
uggagaggaagugaggaaggaa

SEQ ID NO: 350457 - RNA, 24 nt, Human
uggaugagacaguggaagaaggau

SEQ ID NO: 350458 - RNA, 18 nt, Human
uggcugggguggccagau

SEQ ID NO: 350459 - RNA, 20 nt, Human
uggggcgcgcgggagucaag

SEQ ID NO: 350460 - RNA, 20 nt, Human
ugggggcugaguugcaggga

SEQ ID NO: 350461 - RNA, 20 nt, Human
uggugggggcugaguugcag

SEQ ID NO: 350462 - RNA, 24 nt, Human
uggugggggcugaguugcagggac

SEQ ID NO: 350463 - RNA, 25 nt, Human
uguauacaaaaucucagcuuacaua

SEQ ID NO: 350464 - RNA, 23 nt, Human
ugucugaaaagucacuaauagga

SEQ ID NO: 350465 - RNA, 18 nt, Human
uguuaguaaauccagcaa

SEQ ID NO: 350466 - RNA, 22 nt, Human
uuaaucacagaauuagaagugu

SEQ ID NO: 350467 - RNA, 18 nt, Human
uuuuuuuuuuuuuuuuug

SEQ ID NO: 350468 - RNA, 22 nt, Human
agaggcuggagcaguuggggau

SEQ ID NO: 350469 - RNA, 20 nt, Human
augcucuggccugucucugg

SEQ ID NO: 350470 - RNA, 18 nt, Human
cagcggcagaggcuggag

SEQ ID NO: 350471 - RNA, 21 nt, Human
cagcggcagaggcuggagcag

SEQ ID NO: 350472 - RNA, 19 nt, Human
cuggagcaguuggggaucu

SEQ ID NO: 350473 - RNA, 24 nt, Human
ggacucaaagcauggcagcggcag

SEQ ID NO: 350474 - RNA, 24 nt, Human
ggcuggagcaguuggggaucuuca

SEQ ID NO: 350475 - RNA, 23 nt, Human
ucucugguuccgucucugccucg

SEQ ID NO: 350476 - RNA, 22 nt, Human
ugcucuggccugucucugguuc

SEQ ID NO: 350477 - RNA, 22 nt, Human
uggaggagggggaugcucuggc

SEQ ID NO: 350478 - RNA, 23 nt, Human
uggcagcggcagaggcuggagca

SEQ ID NO: 350479 - RNA, 18 nt, Human
uugaagagagcaaggcug

SEQ ID NO: 350480 - RNA, 27 nt, Human
uuuuuuuuuuuuuuuuuuuuuuugggg

SEQ ID NO: 350481 - RNA, 18 nt, Human
aaaaagacaacacaagaa

SEQ ID NO: 350482 - RNA, 24 nt, Human
aaaaagacaacacaagaaagaaaa

SEQ ID NO: 350483 - RNA, 20 nt, Human
caagaaagaaaagugguuuc

SEQ ID NO: 350484 - RNA, 20 nt, Human
cagggaucaaggaaguugcu

SEQ ID NO: 350485 - RNA, 20 nt, Human
cauaaaaagacaacacaaga

SEQ ID NO: 350486 - RNA, 23 nt, Human
cuggccauagucuguagcccucu

SEQ ID NO: 350487 - RNA, 24 nt, Human
guuuccacauaaaaagacaacaca

SEQ ID NO: 350488 - RNA, 25 nt, Human
uaaaaagacaacacaagaaagaaaa

SEQ ID NO: 350489 - RNA, 22 nt, Human
ucuguagcccucugagccaaac

SEQ ID NO: 350490 - RNA, 28 nt, Human
ugagguuucaacaguugucuagcaguuu

SEQ ID NO: 350491 - RNA, 23 nt, Human
uugucuagcaguuuccacauaaa

SEQ ID NO: 350492 - RNA, 21 nt, Human
aguaaaaagacauaagaaaga

SEQ ID NO: 350493 - RNA, 24 nt, Human
aguaaaaagacauaagaaagagaa

SEQ ID NO: 350494 - RNA, 24 nt, Human
gugaggcugcugcugucgguguuc

SEQ ID NO: 350495 - RNA, 18 nt, Human
uacccugcaguucuguga

SEQ ID NO: 350496 - RNA, 20 nt, Human
uugucuuguaguuuguagua

SEQ ID NO: 350497 - RNA, 19 nt, Human
aaaaaucagaaaaaucuag

SEQ ID NO: 350498 - RNA, 24 nt, Human
aguauucauugcuuuauuuguccu

SEQ ID NO: 350499 - RNA, 19 nt, Human
cauuugaucuauaauuggu

SEQ ID NO: 350500 - RNA, 20 nt, Human
cuuccauccccauccaccuc

SEQ ID NO: 350501 - RNA, 20 nt, Human
cuugccauacaaaguguccc

SEQ ID NO: 350502 - RNA, 18 nt, Human
ucacuacauuuuagggca

SEQ ID NO: 350503 - RNA, 20 nt, Human
ucacuacauuuuagggcauu

SEQ ID NO: 350504 - RNA, 22 nt, Human
ucagaaaaaucuagcaaaaucc

SEQ ID NO: 350505 - RNA, 21 nt, Human
ucaggcagggaggauaggagc

SEQ ID NO: 350506 - RNA, 23 nt, Human
ucuauaauugguagaaccggggc

SEQ ID NO: 350507 - RNA, 19 nt, Human
ugcuuuauuuguccuuuuc

SEQ ID NO: 350508 - RNA, 28 nt, Human
uuaaaaaucagaaaaaucuagcaaaauc

SEQ ID NO: 350509 - RNA, 22 nt, Human
uuauuuguccuuuucacggguc

SEQ ID NO: 350510 - RNA, 23 nt, Human
uuugaucuauaauugguagaaca

SEQ ID NO: 350511 - RNA, 22 nt, Human
uuuuagggcauuugaucuauaa

SEQ ID NO: 350512 - RNA, 19 nt, Human
aagcuuuuuaacaagccgg

SEQ ID NO: 350513 - RNA, 20 nt, Human
aaggguuuuuuuuuuuuucu

SEQ ID NO: 350514 - RNA, 21 nt, Human
aaggguuuuuuuuuuuuucug

SEQ ID NO: 350515 - RNA, 21 nt, Human
aggaguugucaacccugauaa

SEQ ID NO: 350516 - RNA, 26 nt, Human
auacuccagaaagagauauauauggg

SEQ ID NO: 350517 - RNA, 18 nt, Human
auucaaucauaggaguug

SEQ ID NO: 350518 - RNA, 18 nt, Human
caaaauaaagcccccaaa

SEQ ID NO: 350519 - RNA, 19 nt, Human
cacaauguaauaacaaagu

SEQ ID NO: 350520 - RNA, 22 nt, Human
cagaaagagauauauaugggua

SEQ ID NO: 350521 - RNA, 26 nt, Human
cagauacaauauucgguuccuaguuc

SEQ ID NO: 350522 - RNA, 25 nt, Human
cauaaaauacaguuaugccuuuuaa

SEQ ID NO: 350523 - RNA, 22 nt, Human
cauccaaaccacccuugcggua

SEQ ID NO: 350524 - RNA, 21 nt, Human
ccacagggaucucgcauggaa

SEQ ID NO: 350525 - RNA, 18 nt, Human
ccagguuuugcagagcau

SEQ ID NO: 350526 - RNA, 19 nt, Human
cccugauaauaccucucuu

SEQ ID NO: 350527 - RNA, 26 nt, Human
cgcuucggaaagguccuggcaccgga

SEQ ID NO: 350528 - RNA, 24 nt, Human
gacagagccugucacgccggccuc

SEQ ID NO: 350529 - RNA, 19 nt, Human
gcaaacaaugaaaguguag

SEQ ID NO: 350530 - RNA, 22 nt, Human
gcacauaauaaaaguuuauaug

SEQ ID NO: 350531 - RNA, 22 nt, Human
gcagaaaaaugauuccacacua

SEQ ID NO: 350532 - RNA, 24 nt, Human
gccauuucaaauuuuuuuuaaaaa

SEQ ID NO: 350533 - RNA, 19 nt, Human
ggaaaccgggccuggucac

SEQ ID NO: 350534 - RNA, 22 nt, Human
ggagaacuucccuguauggaaa

SEQ ID NO: 350535 - RNA, 25 nt, Human
uaaaaaguaaguugagagguacuaa

SEQ ID NO: 350536 - RNA, 19 nt, Human
uaaacaccugaggacuguu

SEQ ID NO: 350537 - RNA, 18 nt, Human
uaaagaaugaauuuucua

SEQ ID NO: 350538 - RNA, 23 nt, Human
uaaguaagaaucuuaugacaugu

SEQ ID NO: 350539 - RNA, 27 nt, Human
uacaaaacaaaaacgacuaaagggcag

SEQ ID NO: 350540 - RNA, 19 nt, Human
ucacgcgcacgcgagacca

SEQ ID NO: 350541 - RNA, 22 nt, Human
ucagacuucauccaaaccaccc

SEQ ID NO: 350542 - RNA, 21 nt, Human
ucgcauggaaacguuggauuu

SEQ ID NO: 350543 - RNA, 20 nt, Human
ucggaaagguccuggcaccg

SEQ ID NO: 350544 - RNA, 21 nt, Human
ucuagaaguuggcccaaucua

SEQ ID NO: 350545 - RNA, 18 nt, Human
ucuucaguauuacaggau

SEQ ID NO: 350546 - RNA, 22 nt, Human
uggaaacuuguagaauacugca

SEQ ID NO: 350547 - RNA, 18 nt, Human
uggcucagaauuaagcaa

SEQ ID NO: 350548 - RNA, 22 nt, Human
ugggcgacagcugugaccguua

SEQ ID NO: 350549 - RNA, 24 nt, Human
uuaaaugguuuuuaaagaaguaga

SEQ ID NO: 350550 - RNA, 23 nt, Human
uuaagagcacauaauaaaaguuu

SEQ ID NO: 350551 - RNA, 25 nt, Human
uuuaagcuuuuuaacaagccgguaa

SEQ ID NO: 350552 - RNA, 19 nt, Human
uuuguaaacaauauaauaa

SEQ ID NO: 350553 - RNA, 19 nt, Human
uuuugguucucuguaucga

SEQ ID NO: 350554 - RNA, 19 nt, Human
uuuuuuuuuuuuucuguuu

SEQ ID NO: 350555 - RNA, 19 nt, Human
aaaacaaaguugacugaac

SEQ ID NO: 350556 - RNA, 21 nt, Human
aaacaccugaggacuguucaa

SEQ ID NO: 350557 - RNA, 19 nt, Human
aaagaaguagacuggggga

SEQ ID NO: 350558 - RNA, 18 nt, Human
aaagacauaaagaacugc

SEQ ID NO: 350559 - RNA, 24 nt, Human
aaagccccaaacauggcugggcag

SEQ ID NO: 350560 - RNA, 21 nt, Human
aaagguuaaccaaaaucaaag

SEQ ID NO: 350561 - RNA, 21 nt, Human
aacaaaaacugcuaagagaaa

SEQ ID NO: 350562 - RNA, 18 nt, Human
aacaauaagucagaacua

SEQ ID NO: 350563 - RNA, 23 nt, Human
aacagaacaccacagaguaucac

SEQ ID NO: 350564 - RNA, 19 nt, Human
aacauggagaaaccccauc

SEQ ID NO: 350565 - RNA, 20 nt, Human
aacauggagaaaccccaucu

SEQ ID NO: 350566 - RNA, 21 nt, Human
aacauggagaaaccccaucuc

SEQ ID NO: 350567 - RNA, 24 nt, Human
aaguacauuugguuuucuaaaaag

SEQ ID NO: 350568 - RNA, 19 nt, Human
aauaugccaauacuaaccu

SEQ ID NO: 350569 - RNA, 19 nt, Human
aaucccugauauuuucccc

SEQ ID NO: 350570 - RNA, 23 nt, Human
aauugcuugaaccagggaggcga

SEQ ID NO: 350571 - RNA, 23 nt, Human
acaaaacaaaaacugcuaagaga

SEQ ID NO: 350572 - RNA, 19 nt, Human
acaagagugaaacuccauc

SEQ ID NO: 350573 - RNA, 20 nt, Human
acaagagugaaacuccaucu

SEQ ID NO: 350574 - RNA, 21 nt, Human
acaagagugaaacuccaucuc

SEQ ID NO: 350575 - RNA, 24 nt, Human
accugaggucaggaguuugagacc

SEQ ID NO: 350576 - RNA, 24 nt, Human
acuccagccugggcacaagaguga

SEQ ID NO: 350577 - RNA, 21 nt, Human
acugaacuguuacuacaguuc

SEQ ID NO: 350578 - RNA, 23 nt, Human
acuucaugaaagcuuauaagcuu

SEQ ID NO: 350579 - RNA, 22 nt, Human
agaaaauguacauucuugcccc

SEQ ID NO: 350580 - RNA, 23 nt, Human
agaaaauguacauucuugccccu

SEQ ID NO: 350581 - RNA, 20 nt, Human
agaaacuuggcauuaggacg

SEQ ID NO: 350582 - RNA, 18 nt, Human
agaacacuucaugaaagc

SEQ ID NO: 350583 - RNA, 18 nt, Human
agauuguuucauaucccc

SEQ ID NO: 350584 - RNA, 22 nt, Human
agccugggcacaagagugaaac

SEQ ID NO: 350585 - RNA, 24 nt, Human
agcuauugcacuccagccugggca

SEQ ID NO: 350586 - RNA, 20 nt, Human
agcugggcgugguggugcau

SEQ ID NO: 350587 - RNA, 24 nt, Human
aggaaaaaaacaaaguugacugaa

SEQ ID NO: 350588 - RNA, 31 nt, Human
aggaaaaauucucauggauuuaauuauagaa

SEQ ID NO: 350589 - RNA, 20 nt, Human
aggaguuugagaccagccug

SEQ ID NO: 350590 - RNA, 22 nt, Human
aggcaggagaauugcuugaacc

SEQ ID NO: 350591 - RNA, 24 nt, Human
aggcaggagaauugcuugaaccag

SEQ ID NO: 350592 - RNA, 21 nt, Human
aggccgaggugggcggaucac

SEQ ID NO: 350593 - RNA, 20 nt, Human
aggcgagguugcagugagcc

SEQ ID NO: 350594 - RNA, 23 nt, Human
agggaggcgagguugcagugagc

SEQ ID NO: 350595 - RNA, 22 nt, Human
aggugggcggaucaccugaggu

SEQ ID NO: 350596 - RNA, 22 nt, Human
aguauauuuguaaacuguacaa

SEQ ID NO: 350597 - RNA, 22 nt, Human
auagaacaugaacagaacacca

SEQ ID NO: 350598 - RNA, 24 nt, Human
aucgagcuauugcacuccagccug

SEQ ID NO: 350599 - RNA, 18 nt, Human
auugcacuccagccuggg

SEQ ID NO: 350600 - RNA, 20 nt, Human
auugcacuccagccugggca

SEQ ID NO: 350601 - RNA, 23 nt, Human
auugcacuccagccugggcacaa

SEQ ID NO: 350602 - RNA, 18 nt, Human
caaaacaaaaacugcuaa

SEQ ID NO: 350603 - RNA, 19 nt, Human
caaaauuagcugggcgugg

SEQ ID NO: 350604 - RNA, 22 nt, Human
caaagugcccagauuaaauuca

SEQ ID NO: 350605 - RNA, 26 nt, Human
caacauacagagaaauaauaaaagga

SEQ ID NO: 350606 - RNA, 18 nt, Human
caacgaaauucuguccca

SEQ ID NO: 350607 - RNA, 23 nt, Human
caccugaggucaggaguuugaga

SEQ ID NO: 350608 - RNA, 22 nt, Human
cacuccagccugggcacaagag

SEQ ID NO: 350609 - RNA, 22 nt, Human
cacuccagccugggcacaagag

SEQ ID NO: 350610 - RNA, 24 nt, Human
cacuccagccugggcacaagagug

SEQ ID NO: 350611 - RNA, 21 nt, Human
cagcauuuugcaaggccgagg

SEQ ID NO: 350612 - RNA, 24 nt, Human
cagccugaccaacauggagaaacc

SEQ ID NO: 350613 - RNA, 20 nt, Human
caggaaaaaaacaaaguuga

SEQ ID NO: 350614 - RNA, 22 nt, Human
cauaaaugaagcuauucuuuaa

SEQ ID NO: 350615 - RNA, 18 nt, Human
cauggcugggcagguggc

SEQ ID NO: 350616 - RNA, 20 nt, Human
ccacagaguaucacacaaaa

SEQ ID NO: 350617 - RNA, 20 nt, Human
ccagggaggcgagguugcag

SEQ ID NO: 350618 - RNA, 21 nt, Human
ccauccaaacaacccucguag

SEQ ID NO: 350619 - RNA, 25 nt, Human
ccccaacaauaagucagaacuaaua

SEQ ID NO: 350620 - RNA, 21 nt, Human
ccccugaagaguaagcugaga

SEQ ID NO: 350621 - RNA, 24 nt, Human
ccccuguggcagugcaaagugccc

SEQ ID NO: 350622 - RNA, 24 nt, Human
ccugaccaacauggagaaacccca

SEQ ID NO: 350623 - RNA, 22 nt, Human
ccugaggucaggaguuugagac

SEQ ID NO: 350624 - RNA, 24 nt, Human
ccugggcacaagagugaaacucca

SEQ ID NO: 350625 - RNA, 20 nt, Human
ccuguaaucccagcauuuug

SEQ ID NO: 350626 - RNA, 24 nt, Human
cgaggugggcggaucaccugaggu

SEQ ID NO: 350627 - RNA, 26 nt, Human
cgaggugggcggaucaccugagguca

SEQ ID NO: 350628 - RNA, 24 nt, Human
cgagguugcagugagccgagaucg

SEQ ID NO: 350629 - RNA, 24 nt, Human
cggaucaccugaggucaggaguuu

SEQ ID NO: 350630 - RNA, 18 nt, Human
cuaauacuuuuauaacug

SEQ ID NO: 350631 - RNA, 18 nt, Human
cuacaaaacaaaaacugc

SEQ ID NO: 350632 - RNA, 27 nt, Human
cuauauacauaguuccaucgucacccc

SEQ ID NO: 350633 - RNA, 21 nt, Human
cuauugcacuccagccugggc

SEQ ID NO: 350634 - RNA, 24 nt, Human
cucaugccuguaaucccagcauuu

SEQ ID NO: 350635 - RNA, 25 nt, Human
cuccugcauaaaaugacaauucuau

SEQ ID NO: 350636 - RNA, 22 nt, Human
cugacuccauccaaacaacccu

SEQ ID NO: 350637 - RNA, 22 nt, Human
cugggcagguggcucaugccug

SEQ ID NO: 350638 - RNA, 27 nt, Human
cugucuacaaaacaaaaacugcuaaga

SEQ ID NO: 350639 - RNA, 18 nt, Human
cuuugggauuuagcuguu

SEQ ID NO: 350640 - RNA, 19 nt, Human
gaaaagaugauaucuacag

SEQ ID NO: 350641 - RNA, 25 nt, Human
gagaaaagaugauaucuacaggugc

SEQ ID NO: 350642 - RNA, 22 nt, Human
gagaauugcuugaaccagggag

SEQ ID NO: 350643 - RNA, 23 nt, Human
gagaucgagcuauugcacuccag

SEQ ID NO: 350644 - RNA, 24 nt, Human
gaggcgagguugcagugagccgag

SEQ ID NO: 350645 - RNA, 23 nt, Human
gagguugcagugagccgagaucg

SEQ ID NO: 350646 - RNA, 24 nt, Human
gaucaccugaggucaggaguuuga

SEQ ID NO: 350647 - RNA, 22 nt, Human
gcuauugcacuccagccugggc

SEQ ID NO: 350648 - RNA, 21 nt, Human
gcugggcagguggcucaugcc

SEQ ID NO: 350649 - RNA, 23 nt, Human
gcugguuggugacuccaggaaaa

SEQ ID NO: 350650 - RNA, 22 nt, Human
ggaucaccugaggucaggaguu

SEQ ID NO: 350651 - RNA, 22 nt, Human
ggaucaccugaggucaggaguu

SEQ ID NO: 350652 - RNA, 25 nt, Human
ggaucaccugaggucaggaguuuga

SEQ ID NO: 350653 - RNA, 22 nt, Human
ggcagguggcucaugccuguaa

SEQ ID NO: 350654 - RNA, 21 nt, Human
ggcggaucaccugaggucagg

SEQ ID NO: 350655 - RNA, 21 nt, Human
ggcugugucucccaaagcugg

SEQ ID NO: 350656 - RNA, 19 nt, Human
ggucaggaguuugagacca

SEQ ID NO: 350657 - RNA, 23 nt, Human
gguggcucaugccuguaauccca

SEQ ID NO: 350658 - RNA, 24 nt, Human
gguggcucaugccuguaaucccag

SEQ ID NO: 350659 - RNA, 23 nt, Human
gugacuccaggaaaaaaacaaag

SEQ ID NO: 350660 - RNA, 23 nt, Human
guggcucaugccuguaaucccag

SEQ ID NO: 350661 - RNA, 19 nt, Human
guugcagugagccgagauc

SEQ ID NO: 350662 - RNA, 20 nt, Human
uaaaauaaagccccaaacau

SEQ ID NO: 350663 - RNA, 22 nt, Human
uaaaauaaagccccaaacaugg

SEQ ID NO: 350664 - RNA, 20 nt, Human
uaaaauguuaacaguacacc

SEQ ID NO: 350665 - RNA, 19 nt, Human
uaaacaccugaggacuguu

SEQ ID NO: 350666 - RNA, 21 nt, Human
uaaaccuacagguauaaaaca

SEQ ID NO: 350667 - RNA, 19 nt, Human
uaaacuguacaaugaaaau

SEQ ID NO: 350668 - RNA, 18 nt, Human
uaaagccccaaacauggc

SEQ ID NO: 350669 - RNA, 20 nt, Human
uaacuuauaaaauaaagccc

SEQ ID NO: 350670 - RNA, 23 nt, Human
uaacuuauaaaauaaagccccaa

SEQ ID NO: 350671 - RNA, 19 nt, Human
uaagaaaagaaugccuagu

SEQ ID NO: 350672 - RNA, 23 nt, Human
uaaguaagaaucuuaugacaugu

SEQ ID NO: 350673 - RNA, 18 nt, Human
uaaucugacuccauccaa

SEQ ID NO: 350674 - RNA, 24 nt, Human
uacacaaaguaauaacaauaaaca

SEQ ID NO: 350675 - RNA, 21 nt, Human
uagcagaauaaauggcucaga

SEQ ID NO: 350676 - RNA, 19 nt, Human
uauaaauaucuccugcaua

SEQ ID NO: 350677 - RNA, 23 nt, Human
uauagaaguugucaaucccugau

SEQ ID NO: 350678 - RNA, 27 nt, Human
uauauuuguaaacuguaccacccaagg

SEQ ID NO: 350679 - RNA, 20 nt, Human
uauugcacuccagccugggc

SEQ ID NO: 350680 - RNA, 21 nt, Human
uauugcacuccagccugggca

SEQ ID NO: 350681 - RNA, 19 nt, Human
ucaccugaggucaggaguu

SEQ ID NO: 350682 - RNA, 20 nt, Human
ucaugccuguaaucccagca

SEQ ID NO: 350683 - RNA, 25 nt, Human
uccaggaaaaaaacaaaguugacug

SEQ ID NO: 350684 - RNA, 24 nt, Human
ucuucaaaaauuuuggacacaggu

SEQ ID NO: 350685 - RNA, 23 nt, Human
ugaaaacaacgaaauucuguccc

SEQ ID NO: 350686 - RNA, 24 nt, Human
ugaacagaacaccacagaguauca

SEQ ID NO: 350687 - RNA, 19 nt, Human
ugaagaauaaacacauaca

SEQ ID NO: 350688 - RNA, 22 nt, Human
ugacugaacuguuacuacaguu

SEQ ID NO: 350689 - RNA, 24 nt, Human
ugagaccagccugaccaacaugga

SEQ ID NO: 350690 - RNA, 22 nt, Human
ugagccgagaucgagcuauugc

SEQ ID NO: 350691 - RNA, 24 nt, Human
ugaggcaggagaauugcuugaacc

SEQ ID NO: 350692 - RNA, 18 nt, Human
ugaggucaggaguuugag

SEQ ID NO: 350693 - RNA, 18 nt, Human
ugcacuccagccugggca

SEQ ID NO: 350694 - RNA, 18 nt, Human
ugcacuccagccugggca

SEQ ID NO: 350695 - RNA, 18 nt, Human
ugcacuccagccugggca

SEQ ID NO: 350696 - RNA, 24 nt, Human
ugcacuccagccugggcacaagag

SEQ ID NO: 350697 - RNA, 21 nt, Human
uggcagugcaaagugcccaga

SEQ ID NO: 350698 - RNA, 22 nt, Human
uggcucagaacuaagcaaauua

SEQ ID NO: 350699 - RNA, 22 nt, Human
uggcucaugccuguaaucccag

SEQ ID NO: 350700 - RNA, 24 nt, Human
uggcucaugccuguaaucccagca

SEQ ID NO: 350701 - RNA, 19 nt, Human
uggcugggcagguggcuca

SEQ ID NO: 350702 - RNA, 22 nt, Human
uggcugggcagguggcucaugc

SEQ ID NO: 350703 - RNA, 23 nt, Human
uggcugggcagguggcucaugcc

SEQ ID NO: 350704 - RNA, 24 nt, Human
ugggcggaucaccugaggucagga

SEQ ID NO: 350705 - RNA, 22 nt, Human
ugguaagaacacuucaugaaag

SEQ ID NO: 350706 - RNA, 25 nt, Human
uguuuugguucuagauauaaagguu

SEQ ID NO: 350707 - RNA, 20 nt, Human
uuagcugggcgugguggugc

SEQ ID NO: 350708 - RNA, 21 nt, Human
uuagcugggcgugguggugca

SEQ ID NO: 350709 - RNA, 22 nt, Human
uuagcugggcgugguggugcau

SEQ ID NO: 350710 - RNA, 19 nt, Human
uuccccuuugggauuuagc

SEQ ID NO: 350711 - RNA, 20 nt, Human
uuccuguaaucgcugaggca

SEQ ID NO: 350712 - RNA, 18 nt, Human
uugcagugagccgagauc

SEQ ID NO: 350713 - RNA, 19 nt, Human
uugcagugagccgagaucg

SEQ ID NO: 350714 - RNA, 25 nt, Human
uugcagugagccgagaucgagcuau

SEQ ID NO: 350715 - RNA, 18 nt, Human
uugcuugaaccagggagg

SEQ ID NO: 350716 - RNA, 23 nt, Human
uuuguaaacuguacaaugaaaau

SEQ ID NO: 350717 - RNA, 27 nt, Human
uuuuauuggcauuuacaacaaauggcu

SEQ ID NO: 350718 - RNA, 23 nt, Human
uuuugguucuagauauaaagguu

SEQ ID NO: 350719 - RNA, 22 nt, Human
aaacaaccccaaaaucacaggu

SEQ ID NO: 350720 - RNA, 27 nt, Human
aaagcaccuccacuuaucacccaauua

SEQ ID NO: 350721 - RNA, 23 nt, Human
aaagcaccuccacuuaucacccu

SEQ ID NO: 350722 - RNA, 19 nt, Human
aaagcagaaaucuacaacu

SEQ ID NO: 350723 - RNA, 20 nt, Human
aaaguauauauuccugugaa

SEQ ID NO: 350724 - RNA, 24 nt, Human
aaaucacagguuugcaccccuuga

SEQ ID NO: 350725 - RNA, 24 nt, Human
aacaaagcaccuccacuuaucacc

SEQ ID NO: 350726 - RNA, 21 nt, Human
aacagaauccccuugcaauaa

SEQ ID NO: 350727 - RNA, 20 nt, Human
aagcagaaaucuacaacuac

SEQ ID NO: 350728 - RNA, 22 nt, Human
aagugcugcaaacuauugcuuc

SEQ ID NO: 350729 - RNA, 25 nt, Human
aaugacuauuuacauaauaaauagc

SEQ ID NO: 350730 - RNA, 19 nt, Human
acaaaaauagucacauaua

SEQ ID NO: 350731 - RNA, 19 nt, Human
acaaagugcaggaaaaagc

SEQ ID NO: 350732 - RNA, 24 nt, Human
acaaagugcaggaaaaagcagaaa

SEQ ID NO: 350733 - RNA, 24 nt, Human
acgcaaauguaaugacagugaaau

SEQ ID NO: 350734 - RNA, 20 nt, Human
acuccaaagaaaugaaaaca

SEQ ID NO: 350735 - RNA, 21 nt, Human
agacagaacacagucaggauc

SEQ ID NO: 350736 - RNA, 21 nt, Human
agucaguuuggcauugaccuc

SEQ ID NO: 350737 - RNA, 24 nt, Human
aguggauacaauuacuacacuaaa

SEQ ID NO: 350738 - RNA, 18 nt, Human
auaagugauucaaaagua

SEQ ID NO: 350739 - RNA, 22 nt, Human
caaaaagaugaauccacuaaca

SEQ ID NO: 350740 - RNA, 22 nt, Human
caaaaagcuguuaaagugcugc

SEQ ID NO: 350741 - RNA, 20 nt, Human
caaaacaagaucaacaaagc

SEQ ID NO: 350742 - RNA, 18 nt, Human
caacaaagcaccuccacu

SEQ ID NO: 350743 - RNA, 20 nt, Human
caauagccgcaagagauucu

SEQ ID NO: 350744 - RNA, 19 nt, Human
cacauggauuaacaaaaag

SEQ ID NO: 350745 - RNA, 22 nt, Human
cacugaaccggaagauggccuu

SEQ ID NO: 350746 - RNA, 19 nt, Human
cagaaaguaagaaaaguga

SEQ ID NO: 350747 - RNA, 20 nt, Human
cagagucacaguuugcugac

SEQ ID NO: 350748 - RNA, 22 nt, Human
cagcauuacuccaaagaaauga

SEQ ID NO: 350749 - RNA, 26 nt, Human
cagcauuacuccaaagaaaugaaaac

SEQ ID NO: 350750 - RNA, 23 nt, Human
caguaaccuccugucaaggucau

SEQ ID NO: 350751 - RNA, 25 nt, Human
cagugucaaccuugcugagagccga

SEQ ID NO: 350752 - RNA, 20 nt, Human
caucuaaaaaacccuccagg

SEQ ID NO: 350753 - RNA, 22 nt, Human
caucuccccuuuacacagaguc

SEQ ID NO: 350754 - RNA, 25 nt, Human
caugcaaaccacgacuuuguguagc

SEQ ID NO: 350755 - RNA, 19 nt, Human
caugugguugccauacccc

SEQ ID NO: 350756 - RNA, 23 nt, Human
caugugguugccauaccccccag

SEQ ID NO: 350757 - RNA, 21 nt, Human
cauucuuuguccaaucaggag

SEQ ID NO: 350758 - RNA, 23 nt, Human
cauuuaugacuccaaacauuuga

SEQ ID NO: 350759 - RNA, 21 nt, Human
ccacauaguagugcaucuaaa

SEQ ID NO: 350760 - RNA, 23 nt, Human
ccagauacagcagcaugguaaua

SEQ ID NO: 350761 - RNA, 19 nt, Human
cccaauuaccccucccaga

SEQ ID NO: 350762 - RNA, 21 nt, Human
cccaauuaccccucccagaaa

SEQ ID NO: 350763 - RNA, 23 nt, Human
cccacaaauaaucuacuuggucu

SEQ ID NO: 350764 - RNA, 20 nt, Human
ccccaaaaucacagguuugc

SEQ ID NO: 350765 - RNA, 21 nt, Human
cccccagguggcauaccuguu

SEQ ID NO: 350766 - RNA, 19 nt, Human
ccuacagucugacuagcca

SEQ ID NO: 350767 - RNA, 20 nt, Human
ccucaugcaaaccacgacuu

SEQ ID NO: 350768 - RNA, 21 nt, Human
cggaagauggccuucccuuua

SEQ ID NO: 350769 - RNA, 24 nt, Human
cuacaacuacccagucuuguuuuc

SEQ ID NO: 350770 - RNA, 19 nt, Human
cuacucuguuuuuguggaa

SEQ ID NO: 350771 - RNA, 25 nt, Human
cuccaggggcucugacaccaucucu

SEQ ID NO: 350772 - RNA, 24 nt, Human
cuucauauuuauguacauaaugcu

SEQ ID NO: 350773 - RNA, 23 nt, Human
gaaaacauaaaccgaagucagaa

SEQ ID NO: 350774 - RNA, 21 nt, Human
gaacacagucaggaucauuac

SEQ ID NO: 350775 - RNA, 20 nt, Human
gagcagcauuacuccaaaga

SEQ ID NO: 350776 - RNA, 19 nt, Human
gcaaaacaagaucaacaaa

SEQ ID NO: 350777 - RNA, 19 nt, Human
gcagguacuaccagaaaua

SEQ ID NO: 350778 - RNA, 19 nt, Human
gcccaugaacagcugcagc

SEQ ID NO: 350779 - RNA, 25 nt, Human
gccgaagauggcuaaacaaagugca

SEQ ID NO: 350780 - RNA, 18 nt, Human
gcucugacaccaucucug

SEQ ID NO: 350781 - RNA, 24 nt, Human
ggaaaaagcagaaauuuauaaaga

SEQ ID NO: 350782 - RNA, 19 nt, Human
guaaaaucuucuaaacaga

SEQ ID NO: 350783 - RNA, 21 nt, Human
gucaaccuugcugagagccga

SEQ ID NO: 350784 - RNA, 23 nt, Human
gucuuauuuagcaaauuucuuuc

SEQ ID NO: 350785 - RNA, 19 nt, Human
uaaaaagcagaaaucuaca

SEQ ID NO: 350786 - RNA, 18 nt, Human
uaaaauuagcaaauguaa

SEQ ID NO: 350787 - RNA, 22 nt, Human
uaaacaaccccaaaaucacagg

SEQ ID NO: 350788 - RNA, 21 nt, Human
uaaaugguacagaauacauuu

SEQ ID NO: 350789 - RNA, 23 nt, Human
uaacaaaaagaugaauccacuaa

SEQ ID NO: 350790 - RNA, 24 nt, Human
uaaccaaaaagcuguuaaagugcu

SEQ ID NO: 350791 - RNA, 23 nt, Human
uacuuggucuaggggcuggauuu

SEQ ID NO: 350792 - RNA, 23 nt, Human
uagagcagcauuacuccaaagaa

SEQ ID NO: 350793 - RNA, 19 nt, Human
uagagguccuuagccuauu

SEQ ID NO: 350794 - RNA, 21 nt, Human
uagccuauuucucaacagaaa

SEQ ID NO: 350795 - RNA, 22 nt, Human
uauacuauguuccuccaaggaa

SEQ ID NO: 350796 - RNA, 23 nt, Human
ucaauacuauaaaaguuuucuua

SEQ ID NO: 350797 - RNA, 21 nt, Human
ucagcagugucagcugguagu

SEQ ID NO: 350798 - RNA, 23 nt, Human
ucauguuaaacaaccccaaaauc

SEQ ID NO: 350799 - RNA, 24 nt, Human
uccacuaacagauuccauaaaaau

SEQ ID NO: 350800 - RNA, 25 nt, Human
uccacuaacagauuccauaaaaaug

SEQ ID NO: 350801 - RNA, 23 nt, Human
uccacuuaucacccaauuacccc

SEQ ID NO: 350802 - RNA, 19 nt, Human
ucccucuggacauuggcug

SEQ ID NO: 350803 - RNA, 22 nt, Human
ucuagagcagcauuacuccaaa

SEQ ID NO: 350804 - RNA, 23 nt, Human
ucuauacuauguuccuccaagga

SEQ ID NO: 350805 - RNA, 23 nt, Human
ucuggugaagaaguugaagcugu

SEQ ID NO: 350806 - RNA, 19 nt, Human
ugaaaaaguacuauggaca

SEQ ID NO: 350807 - RNA, 20 nt, Human
ugaagaaguugaagcuguca

SEQ ID NO: 350808 - RNA, 19 nt, Human
ugaagcugucagguccugg

SEQ ID NO: 350809 - RNA, 22 nt, Human
ugaagcugucagguccuggugg

SEQ ID NO: 350810 - RNA, 21 nt, Human
ugaccuccuaaaggaguccug

SEQ ID NO: 350811 - RNA, 23 nt, Human
ugacuauuuacauaauaaauagc

SEQ ID NO: 350812 - RNA, 24 nt, Human
ugacugaaaucgucuucaaugcuc

SEQ ID NO: 350813 - RNA, 24 nt, Human
ugagaacaguaaccuccucccugg

SEQ ID NO: 350814 - RNA, 21 nt, Human
ugagaacaguaaccuccuguc

SEQ ID NO: 350815 - RNA, 22 nt, Human
ugagcagugagagaaaccagau

SEQ ID NO: 350816 - RNA, 24 nt, Human
ugcaauaaauacugugcuuagguu

SEQ ID NO: 350817 - RNA, 19 nt, Human
uggauaugaaucgugaacc

SEQ ID NO: 350818 - RNA, 20 nt, Human
uggcgguggagggugagggg

SEQ ID NO: 350819 - RNA, 20 nt, Human
uggcuaaacaaagugcagga

SEQ ID NO: 350820 - RNA, 19 nt, Human
ugggagggccaugugguug

SEQ ID NO: 350821 - RNA, 18 nt, Human
ugggauucuuugccuuuu

SEQ ID NO: 350822 - RNA, 21 nt, Human
ugguuugcuucuguaagaaac

SEQ ID NO: 350823 - RNA, 22 nt, Human
ugguuugggauucuuugccuuu

SEQ ID NO: 350824 - RNA, 21 nt, Human
ugguuuucaggccuggaauga

SEQ ID NO: 350825 - RNA, 25 nt, Human
ugucuuauuuagcaaauuucuuuca

SEQ ID NO: 350826 - RNA, 21 nt, Human
uguguagcugggagggccaug

SEQ ID NO: 350827 - RNA, 20 nt, Human
uuaaacaaccccaaaaucac

SEQ ID NO: 350828 - RNA, 19 nt, Human
uuccaauugcaaagcauaa

SEQ ID NO: 350829 - RNA, 22 nt, Human
uuccucagguugcccaugaaca

SEQ ID NO: 350830 - RNA, 22 nt, Human
uugaaugaaguuugcaccugcu

SEQ ID NO: 350831 - RNA, 23 nt, Human
uuguuugcucaaacgugcaccac

SEQ ID NO: 350832 - RNA, 22 nt, Human
uuuacaaaaauagucacauaua

SEQ ID NO: 350833 - RNA, 20 nt, Human
uuucaugaaaaaguacuaug

SEQ ID NO: 350834 - RNA, 20 nt, Human
uuuugucugguuugggauuc

SEQ ID NO: 350835 - RNA, 22 nt, Human
aggcggcgggaccuggcggcgg

SEQ ID NO: 350836 - RNA, 22 nt, Human
ccgguauuaauagcggggcgag

SEQ ID NO: 350837 - RNA, 18 nt, Human
cggcgggaccuggcggcg

SEQ ID NO: 350838 - RNA, 18 nt, Human
cugcgccccccucccggg

SEQ ID NO: 350839 - RNA, 19 nt, Human
gcggcgcgugcugcgcccc

SEQ ID NO: 350840 - RNA, 19 nt, Human
ggcggcgggaccuggcggc

SEQ ID NO: 350841 - RNA, 18 nt, Human
acacaaacacaucaccau

SEQ ID NO: 350842 - RNA, 23 nt, Human
cccagaguuugggauugauaagc

SEQ ID NO: 350843 - RNA, 19 nt, Human
ccuguugacacaaacacau

SEQ ID NO: 350844 - RNA, 21 nt, Human
ccuugcauaagaaagugcccu

SEQ ID NO: 350845 - RNA, 20 nt, Human
cugaguuccaguuugcugac

SEQ ID NO: 350846 - RNA, 21 nt, Human
uaagaaagugcccuguagaau

SEQ ID NO: 350847 - RNA, 27 nt, Human
ucauccugcuccuuuaaucacuguuua

SEQ ID NO: 350848 - RNA, 20 nt, Human
uggcauagaccuccuguggg

SEQ ID NO: 350849 - RNA, 24 nt, Human
uguuauaggcacugaccuuaagua

SEQ ID NO: 350850 - RNA, 23 nt, Human
uuucuccaguuuacugaguucca

SEQ ID NO: 350851 - RNA, 19 nt, Human
agagggugauuugaggggg

SEQ ID NO: 350852 - RNA, 23 nt, Human
augcuaaaaaaaaagccucgugc

SEQ ID NO: 350853 - RNA, 22 nt, Human
gaacuacaagggaggaaugguu

SEQ ID NO: 350854 - RNA, 21 nt, Human
ggugggcuacgggagagggug

SEQ ID NO: 350855 - RNA, 24 nt, Human
uaaaaaaaaagccucgugccaagc

SEQ ID NO: 350856 - RNA, 27 nt, Human
aaaaaaaaacaucuaugaauaaaaggg

SEQ ID NO: 350857 - RNA, 20 nt, Human
aaaaaucaaaagcaaaagca

SEQ ID NO: 350858 - RNA, 25 nt, Human
aaaacaaaaacaaaaaaccccagag

SEQ ID NO: 350859 - RNA, 22 nt, Human
aaacaaaaaaccccagagccca

SEQ ID NO: 350860 - RNA, 21 nt, Human
aaacaaaaacaaaaaacccca

SEQ ID NO: 350861 - RNA, 23 nt, Human
aaacaaaaacaaaaaaccccaga

SEQ ID NO: 350862 - RNA, 24 nt, Human
aaacaaaaacaaaaaaccccagaa

SEQ ID NO: 350863 - RNA, 23 nt, Human
aaacaaacauaacagacuaaaau

SEQ ID NO: 350864 - RNA, 23 nt, Human
aaacugccaacagcaaaaaacaa

SEQ ID NO: 350865 - RNA, 21 nt, Human
aaauuauucugcuugacauaa

SEQ ID NO: 350866 - RNA, 18 nt, Human
aacaaaaaaccccagagc

SEQ ID NO: 350867 - RNA, 20 nt, Human
aacaaaaaaccccagagccc

SEQ ID NO: 350868 - RNA, 22 nt, Human
aacaaagaaauccauaaaaccc

SEQ ID NO: 350869 - RNA, 20 nt, Human
aacaaagcccagcauccaag

SEQ ID NO: 350870 - RNA, 21 nt, Human
aagaaaacaaagagaccuuuc

SEQ ID NO: 350871 - RNA, 18 nt, Human
aagacuagucugcauacg

SEQ ID NO: 350872 - RNA, 25 nt, Human
aagcauaaaguaaaauaaagggacc

SEQ ID NO: 350873 - RNA, 23 nt, Human
aagcauuugaccuaaauuaaaua

SEQ ID NO: 350874 - RNA, 18 nt, Human
aagcuccaggucccuucu

SEQ ID NO: 350875 - RNA, 20 nt, Human
acaacuuugccacuuuguuc

SEQ ID NO: 350876 - RNA, 29 nt, Human
acagcaaaaaacaaaaacaaaagggaccc

SEQ ID NO: 350877 - RNA, 18 nt, Human
accacaggauaaaauaac

SEQ ID NO: 350878 - RNA, 20 nt, Human
acccauuaucuaacuuuuau

SEQ ID NO: 350879 - RNA, 28 nt, Human
agaauccucucugcuuaugccuccgcuu

SEQ ID NO: 350880 - RNA, 27 nt, Human
agcaaaaaacaaaaacaaaaaacccca

SEQ ID NO: 350881 - RNA, 21 nt, Human
agcaaccucuugucaacguug

SEQ ID NO: 350882 - RNA, 22 nt, Human
agcaaccucuugucaacguuga

SEQ ID NO: 350883 - RNA, 19 nt, Human
agcagaagauggcaaaggg

SEQ ID NO: 350884 - RNA, 23 nt, Human
auaaaaaaaaacaucuaugaaua

SEQ ID NO: 350885 - RNA, 21 nt, Human
auaaucucugauaaaacagag

SEQ ID NO: 350886 - RNA, 25 nt, Human
auaugaagaauagguuuugucagua

SEQ ID NO: 350887 - RNA, 18 nt, Human
auccagagagauaccaua

SEQ ID NO: 350888 - RNA, 19 nt, Human
auuauccauugaaaaaucu

SEQ ID NO: 350889 - RNA, 23 nt, Human
caaaaaacaaaaacaaaaaaccc

SEQ ID NO: 350890 - RNA, 22 nt, Human
caaaaaaccccagagcccaaua

SEQ ID NO: 350891 - RNA, 19 nt, Human
caacagcaaaaaacaaaaa

SEQ ID NO: 350892 - RNA, 20 nt, Human
caacagcaaaaaacaaaaac

SEQ ID NO: 350893 - RNA, 22 nt, Human
caacagcaaaaaacaaaaacaa

SEQ ID NO: 350894 - RNA, 19 nt, Human
caaggacuguacuaaaggu

SEQ ID NO: 350895 - RNA, 18 nt, Human
caccaaguaauuaggaga

SEQ ID NO: 350896 - RNA, 21 nt, Human
caccuuuuuccggaaaagcuc

SEQ ID NO: 350897 - RNA, 22 nt, Human
cacuaguuuguuguaaaauuca

SEQ ID NO: 350898 - RNA, 20 nt, Human
cagcaaaaaacaaaaacaaa

SEQ ID NO: 350899 - RNA, 25 nt, Human
cagcaaaaaacaaaaacaaaaaacc

SEQ ID NO: 350900 - RNA, 22 nt, Human
cagcaaccucuugucaacguug

SEQ ID NO: 350901 - RNA, 24 nt, Human
cagcaaccucuugucaacguugau

SEQ ID NO: 350902 - RNA, 21 nt, Human
cagcagaaaguggaacaacua

SEQ ID NO: 350903 - RNA, 20 nt, Human
cauaaaaguucacaaagcug

SEQ ID NO: 350904 - RNA, 20 nt, Human
cauaaauccaaggguucuuu

SEQ ID NO: 350905 - RNA, 19 nt, Human
caucaaccugaaaauaauu

SEQ ID NO: 350906 - RNA, 21 nt, Human
cccuauagucuagguagccau

SEQ ID NO: 350907 - RNA, 22 nt, Human
cuaaaauacuuucaaaauuaaa

SEQ ID NO: 350908 - RNA, 20 nt, Human
cuauauauauauuugcccaa

SEQ ID NO: 350909 - RNA, 22 nt, Human
cugccaacagcaaaaaacaaaa

SEQ ID NO: 350910 - RNA, 24 nt, Human
cugccaacagcaaaaaacaaaaac

SEQ ID NO: 350911 - RNA, 20 nt, Human
cuugcugaaacagaauacuu

SEQ ID NO: 350912 - RNA, 18 nt, Human
gauaagaaaacaaagaga

SEQ ID NO: 350913 - RNA, 18 nt, Human
gaugucaucaaccugaaa

SEQ ID NO: 350914 - RNA, 21 nt, Human
gcaaaaaacaaaaacaaaaaa

SEQ ID NO: 350915 - RNA, 23 nt, Human
gguagaaaaugaucuagguuuga

SEQ ID NO: 350916 - RNA, 24 nt, Human
gguuucuccucagcagugucagcu

SEQ ID NO: 350917 - RNA, 19 nt, Human
guucagcuuuuuuuuuuuu

SEQ ID NO: 350918 - RNA, 23 nt, Human
uaaaaacagcaaccucuugucaa

SEQ ID NO: 350919 - RNA, 20 nt, Human
uaaaaaucaaaagcaaaagc

SEQ ID NO: 350920 - RNA, 21 nt, Human
uaaaauagagcagcauaggca

SEQ ID NO: 350921 - RNA, 21 nt, Human
uaaacaaguuuuagacauauu

SEQ ID NO: 350922 - RNA, 21 nt, Human
uaaacaauugaucacaaagau

SEQ ID NO: 350923 - RNA, 19 nt, Human
uaaacugccaacagcaaaa

SEQ ID NO: 350924 - RNA, 24 nt, Human
uaagaaaacaaagagaccuuucca

SEQ ID NO: 350925 - RNA, 19 nt, Human
uacaauaucccuagaagag

SEQ ID NO: 350926 - RNA, 19 nt, Human
uacuauuauuaucaaaccu

SEQ ID NO: 350927 - RNA, 21 nt, Human
uagaaaauggaaguaacugaa

SEQ ID NO: 350928 - RNA, 20 nt, Human
uagaagagauucuuugcucc

SEQ ID NO: 350929 - RNA, 19 nt, Human
uagcaauucccugcaugca

SEQ ID NO: 350930 - RNA, 18 nt, Human
uagguaauugcacaacuu

SEQ ID NO: 350931 - RNA, 19 nt, Human
uagugcagcaggaauuaaa

SEQ ID NO: 350932 - RNA, 18 nt, Human
uaguuuguuguaaaauuc

SEQ ID NO: 350933 - RNA, 21 nt, Human
uauuaucaaaccugaaaguug

SEQ ID NO: 350934 - RNA, 23 nt, Human
uauugaggcaaccauaguuggua

SEQ ID NO: 350935 - RNA, 18 nt, Human
ucaguaggcaguauccag

SEQ ID NO: 350936 - RNA, 22 nt, Human
uccaaggguucuugaaaaaaaa

SEQ ID NO: 350937 - RNA, 23 nt, Human
uccagagagauaccauaugauac

SEQ ID NO: 350938 - RNA, 19 nt, Human
ucuaaagcaauacuuuaga

SEQ ID NO: 350939 - RNA, 19 nt, Human
ucucucuggcaaaacaccu

SEQ ID NO: 350940 - RNA, 24 nt, Human
ucuggcagcuguucagcuuuuuuu

SEQ ID NO: 350941 - RNA, 26 nt, Human
ugaaacagaauacuuugcauaaaaau

SEQ ID NO: 350942 - RNA, 22 nt, Human
ugaaaugcaauaaaaaaugaaa

SEQ ID NO: 350943 - RNA, 25 nt, Human
ugaauccuugacagguaucucaucc

SEQ ID NO: 350944 - RNA, 19 nt, Human
ugacguagcucaccauucu

SEQ ID NO: 350945 - RNA, 18 nt, Human
ugagaauaagaguuuggu

SEQ ID NO: 350946 - RNA, 20 nt, Human
ugcacacauaaaaguucaca

SEQ ID NO: 350947 - RNA, 21 nt, Human
ugccaacagcaaaaaacaaaa

SEQ ID NO: 350948 - RNA, 24 nt, Human
ugccaacagcaaaaaacaaaaaca

SEQ ID NO: 350949 - RNA, 21 nt, Human
uggaacaacuauucuaaagca

SEQ ID NO: 350950 - RNA, 24 nt, Human
uggcaaagcaauacugcagcagaa

SEQ ID NO: 350951 - RNA, 20 nt, Human
uggcuaaaaagaacaaaguc

SEQ ID NO: 350952 - RNA, 18 nt, Human
ugguaauaaaaacagcaa

SEQ ID NO: 350953 - RNA, 24 nt, Human
ugguagaaaaugaucuagguuuga

SEQ ID NO: 350954 - RNA, 24 nt, Human
uguaaaaauauggcagauauggaa

SEQ ID NO: 350955 - RNA, 21 nt, Human
uguacaaaaugcugacaaaua

SEQ ID NO: 350956 - RNA, 22 nt, Human
uguauacaaaugucagaucaag

SEQ ID NO: 350957 - RNA, 25 nt, Human
ugugcaaaaaacaaaaauuuauauc

SEQ ID NO: 350958 - RNA, 18 nt, Human
uguuuaaugaaugauaca

SEQ ID NO: 350959 - RNA, 21 nt, Human
uuaaaacagucaguuuggcau

SEQ ID NO: 350960 - RNA, 21 nt, Human
uuagauagucacagcaccuuu

SEQ ID NO: 350961 - RNA, 21 nt, Human
uucacuuugcacaacuauccc

SEQ ID NO: 350962 - RNA, 24 nt, Human
uucccaguaagccacucuacuaug

SEQ ID NO: 350963 - RNA, 19 nt, Human
uucuuucuuucucugugga

SEQ ID NO: 350964 - RNA, 23 nt, Human
uugacauagacuaucagcuuugc

SEQ ID NO: 350965 - RNA, 21 nt, Human
uugagcaaaaauuuuaucucu

SEQ ID NO: 350966 - RNA, 21 nt, Human
uugcagugacagagaggucac

SEQ ID NO: 350967 - RNA, 22 nt, Human
uuggggaccauggaaaugcacu

SEQ ID NO: 350968 - RNA, 23 nt, Human
uuucuugcuccauaaucucugau

SEQ ID NO: 350969 - RNA, 20 nt, Human
uuucuuucuuucucugugga

SEQ ID NO: 350970 - RNA, 24 nt, Human
uuuuucuuucuuucucuguggaua

SEQ ID NO: 350971 - RNA, 18 nt, Human
uuuuuuuuuuuuuuuuug

SEQ ID NO: 350972 - RNA, 18 nt, Human
aaacaggaaggggaggag

SEQ ID NO: 350973 - RNA, 27 nt, Human
aaacaggaaggggaggagaggggaccc

SEQ ID NO: 350974 - RNA, 18 nt, Human
aaagacaacucuggccca

SEQ ID NO: 350975 - RNA, 21 nt, Human
aacaagaagaaaaagaagagg

SEQ ID NO: 350976 - RNA, 19 nt, Human
aagaaaaagaagaggcacu

SEQ ID NO: 350977 - RNA, 21 nt, Human
aagaaaaagaagaggcacuua

SEQ ID NO: 350978 - RNA, 18 nt, Human
aagaagaaaaagaagagg

SEQ ID NO: 350979 - RNA, 19 nt, Human
aagacaucuuugucugggc

SEQ ID NO: 350980 - RNA, 21 nt, Human
aagcagacacacagccacagg

SEQ ID NO: 350981 - RNA, 23 nt, Human
aagcagacacacagccacaggua

SEQ ID NO: 350982 - RNA, 21 nt, Human
aagcagcaggauccaguggcc

SEQ ID NO: 350983 - RNA, 23 nt, Human
acacacacacacguguucacaca

SEQ ID NO: 350984 - RNA, 23 nt, Human
acacacacacagcuauacacaca

SEQ ID NO: 350985 - RNA, 22 nt, Human
acacacacacauacagucacgc

SEQ ID NO: 350986 - RNA, 19 nt, Human
acacagccacagguacacc

SEQ ID NO: 350987 - RNA, 22 nt, Human
acaggaaguuggaagguugagc

SEQ ID NO: 350988 - RNA, 22 nt, Human
acccagccugucucacuccccc

SEQ ID NO: 350989 - RNA, 23 nt, Human
acgggggagcucuggggacuaug

SEQ ID NO: 350990 - RNA, 23 nt, Human
acucuggugauggggggcaacug

SEQ ID NO: 350991 - RNA, 24 nt, Human
agaagaaaaagaagaggcacuuag

SEQ ID NO: 350992 - RNA, 19 nt, Human
agaaucuucuuacugagca

SEQ ID NO: 350993 - RNA, 24 nt, Human
agagauucgaauguucugaccucc

SEQ ID NO: 350994 - RNA, 18 nt, Human
agagggcuguucaggcag

SEQ ID NO: 350995 - RNA, 20 nt, Human
agcacagguccacucuccca

SEQ ID NO: 350996 - RNA, 18 nt, Human
agcauggagccccugagc

SEQ ID NO: 350997 - RNA, 19 nt, Human
aggaagagauggaaggagg

SEQ ID NO: 350998 - RNA, 19 nt, Human
aggaagagguuucaggagu

SEQ ID NO: 350999 - RNA, 20 nt, Human
aggagacauaggcaggaggc

SEQ ID NO: 351000 - RNA, 21 nt, Human
aggcaccacgggggagcucug

SEQ ID NO: 351001 - RNA, 23 nt, Human
aggcagaggggcaaugugccagg

SEQ ID NO: 351002 - RNA, 22 nt, Human
aggcagggagaggccggacccg

SEQ ID NO: 351003 - RNA, 22 nt, Human
aggggcugugccagcccagggc

SEQ ID NO: 351004 - RNA, 22 nt, Human
aggugucugcacucccugaggu

SEQ ID NO: 351005 - RNA, 23 nt, Human
aguugggccuucccugcugcacg

SEQ ID NO: 351006 - RNA, 21 nt, Human
augcaggcuccaguacacagu

SEQ ID NO: 351007 - RNA, 18 nt, Human
caagugaauaaauccagc

SEQ ID NO: 351008 - RNA, 22 nt, Human
cacacagugguucacacacaca

SEQ ID NO: 351009 - RNA, 27 nt, Human
cacacauacagucacgcacuugaacac

SEQ ID NO: 351010 - RNA, 22 nt, Human
cacacauauauacacauauaua

SEQ ID NO: 351011 - RNA, 22 nt, Human
cacagcacagguccacucuccc

SEQ ID NO: 351012 - RNA, 22 nt, Human
cacagcuauacacacaggccua

SEQ ID NO: 351013 - RNA, 23 nt, Human
cacaggccuauaaaagcauacaa

SEQ ID NO: 351014 - RNA, 26 nt, Human
cacaguccgaggagaauauccaauca

SEQ ID NO: 351015 - RNA, 21 nt, Human
caccagccguacuccauggac

SEQ ID NO: 351016 - RNA, 18 nt, Human
cacuuaggccaacagaau

SEQ ID NO: 351017 - RNA, 21 nt, Human
cacuuuggggagagagguggg

SEQ ID NO: 351018 - RNA, 21 nt, Human
cagaacagcgaugcagcagaa

SEQ ID NO: 351019 - RNA, 19 nt, Human
cagaagggugguggguggc

SEQ ID NO: 351020 - RNA, 24 nt, Human
cagaggccuggcccugccaugccc

SEQ ID NO: 351021 - RNA, 23 nt, Human
cagccguacuccauggaccuuga

SEQ ID NO: 351022 - RNA, 18 nt, Human
caggagggcaaggcagag

SEQ ID NO: 351023 - RNA, 19 nt, Human
caggagucaccaucccagc

SEQ ID NO: 351024 - RNA, 24 nt, Human
cagucccagauucaaagcccuccu

SEQ ID NO: 351025 - RNA, 25 nt, Human
ccacacacucacagcacagguccac

SEQ ID NO: 351026 - RNA, 19 nt, Human
ccacagguacacacacaag

SEQ ID NO: 351027 - RNA, 23 nt, Human
ccacaugcguucacacgcaucca

SEQ ID NO: 351028 - RNA, 20 nt, Human
ccagaggaggucagagcaac

SEQ ID NO: 351029 - RNA, 18 nt, Human
ccagcagaggccuggccc

SEQ ID NO: 351030 - RNA, 18 nt, Human
cccccaggccaaaaggag

SEQ ID NO: 351031 - RNA, 18 nt, Human
cccuaggagccagccagg

SEQ ID NO: 351032 - RNA, 20 nt, Human
cccugccaugcccagaacag

SEQ ID NO: 351033 - RNA, 24 nt, Human
ccuaggaagagguuucaggaguca

SEQ ID NO: 351034 - RNA, 23 nt, Human
ccuauaaaagcauacaagcagac

SEQ ID NO: 351035 - RNA, 21 nt, Human
ccucagacccagcauggagcc

SEQ ID NO: 351036 - RNA, 26 nt, Human
ccuccugagccagcagaggccuggcc

SEQ ID NO: 351037 - RNA, 18 nt, Human
ccuggacguggccuagga

SEQ ID NO: 351038 - RNA, 21 nt, Human
ccuggagcccugguggugcuc

SEQ ID NO: 351039 - RNA, 22 nt, Human
ccuggcccugccaugcccagaa

SEQ ID NO: 351040 - RNA, 20 nt, Human
ccuucugcucuuccccuagg

SEQ ID NO: 351041 - RNA, 18 nt, Human
cgagaaacaggaagggga

SEQ ID NO: 351042 - RNA, 18 nt, Human
cgagaaacaggaagggga

SEQ ID NO: 351043 - RNA, 19 nt, Human
cgcaggcgcucgggccugg

SEQ ID NO: 351044 - RNA, 21 nt, Human
cuccaggggcugugccagccc

SEQ ID NO: 351045 - RNA, 19 nt, Human
cugaggcuccaggggcugu

SEQ ID NO: 351046 - RNA, 21 nt, Human
cuggagcccugguggugcuca

SEQ ID NO: 351047 - RNA, 21 nt, Human
cuggggacuaugccgagacuc

SEQ ID NO: 351048 - RNA, 19 nt, Human
cugggugucagccccagug

SEQ ID NO: 351049 - RNA, 23 nt, Human
gaaacaggaaggggaggagaggg

SEQ ID NO: 351050 - RNA, 21 nt, Human
gaagguuuugcugcuuccuga

SEQ ID NO: 351051 - RNA, 19 nt, Human
gaccucccccaggccaaaa

SEQ ID NO: 351052 - RNA, 19 nt, Human
gacggggcguggggagaug

SEQ ID NO: 351053 - RNA, 24 nt, Human
gacggggcguggggagaugagaag

SEQ ID NO: 351054 - RNA, 21 nt, Human
gagacugcccccauuagacga

SEQ ID NO: 351055 - RNA, 22 nt, Human
gagaggggagugagagagaggg

SEQ ID NO: 351056 - RNA, 21 nt, Human
gagccccugagcgcaauuccc

SEQ ID NO: 351057 - RNA, 23 nt, Human
gaggagaggggagugagagagag

SEQ ID NO: 351058 - RNA, 22 nt, Human
gaggccuggcccugccaugccc

SEQ ID NO: 351059 - RNA, 19 nt, Human
gaggcuccuggagcccugg

SEQ ID NO: 351060 - RNA, 27 nt, Human
gaugugcacacacacacacguguucac

SEQ ID NO: 351061 - RNA, 18 nt, Human
gcaccccagagucaaagg

SEQ ID NO: 351062 - RNA, 25 nt, Human
gcaggggaggggccacaggcaggga

SEQ ID NO: 351063 - RNA, 23 nt, Human
gcccagaacagcgaugcagcagg

SEQ ID NO: 351064 - RNA, 19 nt, Human
gccugaaccaguugggccu

SEQ ID NO: 351065 - RNA, 21 nt, Human
gcucacggaggagugaggcag

SEQ ID NO: 351066 - RNA, 26 nt, Human
gcucagagaccagaaggguggugggu

SEQ ID NO: 351067 - RNA, 19 nt, Human
gcuggcagugcccuggggu

SEQ ID NO: 351068 - RNA, 18 nt, Human
gcuggccuggugggugaa

SEQ ID NO: 351069 - RNA, 21 nt, Human
ggaaggggaggagaggggagu

SEQ ID NO: 351070 - RNA, 18 nt, Human
ggaagguugagccugaac

SEQ ID NO: 351071 - RNA, 24 nt, Human
ggcacacauauauacacauauaua

SEQ ID NO: 351072 - RNA, 22 nt, Human
ggcacgggaacacucccaggga

SEQ ID NO: 351073 - RNA, 18 nt, Human
ggcauccuuccuucugcu

SEQ ID NO: 351074 - RNA, 21 nt, Human
ggccacaggcagggagaggcc

SEQ ID NO: 351075 - RNA, 18 nt, Human
ggccuggcgugggaccug

SEQ ID NO: 351076 - RNA, 19 nt, Human
ggccuggugggugaagcug

SEQ ID NO: 351077 - RNA, 18 nt, Human
ggcgacagggcccagagg

SEQ ID NO: 351078 - RNA, 22 nt, Human
ggcguggggagaugagaaggga

SEQ ID NO: 351079 - RNA, 24 nt, Human
ggcugugccagcccagggcccagg

SEQ ID NO: 351080 - RNA, 21 nt, Human
gggcagagauucgaauguucu

SEQ ID NO: 351081 - RNA, 21 nt, Human
ggggaggggccacaggcaggg

SEQ ID NO: 351082 - RNA, 19 nt, Human
gggugaagcugcaccccag

SEQ ID NO: 351083 - RNA, 23 nt, Human
gggugguggguggccuggggagc

SEQ ID NO: 351084 - RNA, 19 nt, Human
gguggguggccuggggagc

SEQ ID NO: 351085 - RNA, 19 nt, Human
gucagccccaguguggcca

SEQ ID NO: 351086 - RNA, 21 nt, Human
guccagggcacacauauauac

SEQ ID NO: 351087 - RNA, 19 nt, Human
gucucucaccccuccuccu

SEQ ID NO: 351088 - RNA, 23 nt, Human
gugggcuggcagugcccuggggu

SEQ ID NO: 351089 - RNA, 19 nt, Human
gugggugaagcugcacccc

SEQ ID NO: 351090 - RNA, 20 nt, Human
gugguggguggccuggggag

SEQ ID NO: 351091 - RNA, 19 nt, Human
guucacacgcauccacaca

SEQ ID NO: 351092 - RNA, 20 nt, Human
uaaaucuuggaggcaggggc

SEQ ID NO: 351093 - RNA, 23 nt, Human
uacacagugguucacacaguggu

SEQ ID NO: 351094 - RNA, 21 nt, Human
uaccacaugcguucacacgca

SEQ ID NO: 351095 - RNA, 19 nt, Human
uacccagacacgugcauaa

SEQ ID NO: 351096 - RNA, 23 nt, Human
uaggcaggaggcagggagcaggg

SEQ ID NO: 351097 - RNA, 19 nt, Human
uaggccaacagaaugcccu

SEQ ID NO: 351098 - RNA, 24 nt, Human
uauaaaagcauacaagcagacaca

SEQ ID NO: 351099 - RNA, 20 nt, Human
uaugacacaccagccguacu

SEQ ID NO: 351100 - RNA, 23 nt, Human
ucaaagcccuccucccucacucu

SEQ ID NO: 351101 - RNA, 22 nt, Human
ucacacacacacauacagucaa

SEQ ID NO: 351102 - RNA, 19 nt, Human
ucagccccaguguggccaa

SEQ ID NO: 351103 - RNA, 22 nt, Human
ucaggccaugugcagcgaucca

SEQ ID NO: 351104 - RNA, 18 nt, Human
ucagggagccaggcacag

SEQ ID NO: 351105 - RNA, 19 nt, Human
ucccagauucaaagcccuc

SEQ ID NO: 351106 - RNA, 20 nt, Human
ucccccgugcuuccuagaaa

SEQ ID NO: 351107 - RNA, 19 nt, Human
ucccugacucccgcucagg

SEQ ID NO: 351108 - RNA, 23 nt, Human
uccuggagcccugguggugcuca

SEQ ID NO: 351109 - RNA, 21 nt, Human
ucugaccucccccaggccaaa

SEQ ID NO: 351110 - RNA, 22 nt, Human
ucuuaggaucacuuuggggaga

SEQ ID NO: 351111 - RNA, 25 nt, Human
ugaacacacacacagcuauacacac

SEQ ID NO: 351112 - RNA, 22 nt, Human
ugaaggaagagauggaaggagu

SEQ ID NO: 351113 - RNA, 25 nt, Human
ugaguacacaccuuaccacaugcgg

SEQ ID NO: 351114 - RNA, 21 nt, Human
ugcagugcgcagccccggggu

SEQ ID NO: 351115 - RNA, 19 nt, Human
ugccaggaaggggagacug

SEQ ID NO: 351116 - RNA, 23 nt, Human
ugccaggaaggggagacugcccc

SEQ ID NO: 351117 - RNA, 18 nt, Human
ugcuggccuggcguggga

SEQ ID NO: 351118 - RNA, 21 nt, Human
uggaaggaguggaggccuccu

SEQ ID NO: 351119 - RNA, 22 nt, Human
uggaagguugagccugaaccag

SEQ ID NO: 351120 - RNA, 23 nt, Human
uggacaauaaagacaacucuggc

SEQ ID NO: 351121 - RNA, 18 nt, Human
ugggaagcaggugagaga

SEQ ID NO: 351122 - RNA, 20 nt, Human
ugggcuggggcugagggggg

SEQ ID NO: 351123 - RNA, 20 nt, Human
ugggcuggggcugagggggg

SEQ ID NO: 351124 - RNA, 22 nt, Human
uggggcugaggggggucugagc

SEQ ID NO: 351125 - RNA, 23 nt, Human
ugggguuaggugucugcacuccc

SEQ ID NO: 351126 - RNA, 25 nt, Human
ugucugggcuggggcugaggggggu

SEQ ID NO: 351127 - RNA, 23 nt, Human
ugugcacacacacacacguguuc

SEQ ID NO: 351128 - RNA, 18 nt, Human
uguggccaaauccugucc

SEQ ID NO: 351129 - RNA, 20 nt, Human
uguggccaaauccugucccc

SEQ ID NO: 351130 - RNA, 24 nt, Human
uucacacacucaagcacacauaca

SEQ ID NO: 351131 - RNA, 22 nt, Human
uucccauggucugggaacgcag

SEQ ID NO: 351132 - RNA, 19 nt, Human
uuggaagguugagccugaa

SEQ ID NO: 351133 - RNA, 24 nt, Human
aaaaagugaauuuggcaugaaguc

SEQ ID NO: 351134 - RNA, 19 nt, Human
aacaacagcacuucuccag

SEQ ID NO: 351135 - RNA, 22 nt, Human
cagaagauccacacucuuuuca

SEQ ID NO: 351136 - RNA, 22 nt, Human
cuggcuuaggcuuucaacauuu

SEQ ID NO: 351137 - RNA, 24 nt, Human
gaacaacagcacuucuccagaaga

SEQ ID NO: 351138 - RNA, 20 nt, Human
ggcuuaggcuuucaacauuu

SEQ ID NO: 351139 - RNA, 18 nt, Human
ucgguuguaaagaacuga

SEQ ID NO: 351140 - RNA, 21 nt, Human
ucgguuguaaagaacugauua

SEQ ID NO: 351141 - RNA, 18 nt, Human
ucuccagaagauccacac

SEQ ID NO: 351142 - RNA, 22 nt, Human
ugaaaagaggugguaaguggua

SEQ ID NO: 351143 - RNA, 20 nt, Human
aacugacaauuaaaugacau

SEQ ID NO: 351144 - RNA, 21 nt, Human
aagugaugcuuucugcuucug

SEQ ID NO: 351145 - RNA, 19 nt, Human
augugagugugugugugug

SEQ ID NO: 351146 - RNA, 18 nt, Human
caaaggcugacccagugc

SEQ ID NO: 351147 - RNA, 19 nt, Human
cacgugaagcccaugugga

SEQ ID NO: 351148 - RNA, 20 nt, Human
cagugcaagggacuagauua

SEQ ID NO: 351149 - RNA, 21 nt, Human
ccaaaccacgugaagcccaug

SEQ ID NO: 351150 - RNA, 19 nt, Human
cccggcagccucucuucug

SEQ ID NO: 351151 - RNA, 23 nt, Human
ccggcagccucucuucuguuucu

SEQ ID NO: 351152 - RNA, 23 nt, Human
cgcggccggacugcaaaggcgcc

SEQ ID NO: 351153 - RNA, 19 nt, Human
cggacugcaaaggcgccga

SEQ ID NO: 351154 - RNA, 21 nt, Human
cggcggcgagggaggcagcgg

SEQ ID NO: 351155 - RNA, 18 nt, Human
cuggucccggcagccucu

SEQ ID NO: 351156 - RNA, 21 nt, Human
cuuuuugcugcuuagcuuaac

SEQ ID NO: 351157 - RNA, 22 nt, Human
gacccagugcaagggacuagau

SEQ ID NO: 351158 - RNA, 22 nt, Human
gcaaguccuccucagccugaag

SEQ ID NO: 351159 - RNA, 20 nt, Human
gcagccucucuucuguuucu

SEQ ID NO: 351160 - RNA, 21 nt, Human
gcagcggcggcggcgagggag

SEQ ID NO: 351161 - RNA, 20 nt, Human
gccggacugcaaaggcgccg

SEQ ID NO: 351162 - RNA, 20 nt, Human
gccugaagaaaccugauugu

SEQ ID NO: 351163 - RNA, 22 nt, Human
gcggccggacugcaaaggcgcc

SEQ ID NO: 351164 - RNA, 19 nt, Human
ggucagcuggcagcggcgg

SEQ ID NO: 351165 - RNA, 21 nt, Human
gucccggcagccucucuucug

SEQ ID NO: 351166 - RNA, 21 nt, Human
guguguguguguuuucuuuuu

SEQ ID NO: 351167 - RNA, 22 nt, Human
guuuucuuuuugcugcuuagcu

SEQ ID NO: 351168 - RNA, 20 nt, Human
uaaaugugagugugugugug

SEQ ID NO: 351169 - RNA, 21 nt, Human
uaacuaauguaagaaugcaaa

SEQ ID NO: 351170 - RNA, 23 nt, Human
uaagaacucaaagaauuguagcc

SEQ ID NO: 351171 - RNA, 21 nt, Human
uauggaucucaugcaugacuu

SEQ ID NO: 351172 - RNA, 22 nt, Human
uauucaggaaguuuguaaacaa

SEQ ID NO: 351173 - RNA, 21 nt, Human
ucaaagaaacugacaauuaaa

SEQ ID NO: 351174 - RNA, 20 nt, Human
ucagguuagagucuccacag

SEQ ID NO: 351175 - RNA, 20 nt, Human
ucccggcagccucucuucug

SEQ ID NO: 351176 - RNA, 24 nt, Human
ucccggcagccucucuucuguuuc

SEQ ID NO: 351177 - RNA, 21 nt, Human
ucuccaaaccacgugaagccc

SEQ ID NO: 351178 - RNA, 18 nt, Human
ugaaaaaauaaaauccau

SEQ ID NO: 351179 - RNA, 26 nt, Human
ugaagaaaccugauuguuuuccccca

SEQ ID NO: 351180 - RNA, 24 nt, Human
ugacaugggcuaaaugugagugug

SEQ ID NO: 351181 - RNA, 21 nt, Human
ugacccagugcaagggacuag

SEQ ID NO: 351182 - RNA, 23 nt, Human
ugcaagggacuagauuaguagug

SEQ ID NO: 351183 - RNA, 21 nt, Human
ugcggugggcgccaucuugga

SEQ ID NO: 351184 - RNA, 19 nt, Human
uggaacaugcaguaaccac

SEQ ID NO: 351185 - RNA, 18 nt, Human
uggcagcggcggcggcga

SEQ ID NO: 351186 - RNA, 21 nt, Human
uggcagcggcggcggcgaggg

SEQ ID NO: 351187 - RNA, 21 nt, Human
ugguaagcagacgacguuugg

SEQ ID NO: 351188 - RNA, 23 nt, Human
uguauggaucucaugcaugacuu

SEQ ID NO: 351189 - RNA, 19 nt, Human
uguccugugguguauggau

SEQ ID NO: 351190 - RNA, 22 nt, Human
uguguguguguguuuucuuuuc

SEQ ID NO: 351191 - RNA, 21 nt, Human
uucagguuagagucuccacag

SEQ ID NO: 351192 - RNA, 27 nt, Human
uugcaugaacaaacgaacuuuuaaagu

SEQ ID NO: 351193 - RNA, 20 nt, Human
uuucuuuuugcugcuuagcu

SEQ ID NO: 351194 - RNA, 22 nt, Human
acccaucuugcuuccccuccac

SEQ ID NO: 351195 - RNA, 19 nt, Human
agcccucgggagucaggga

SEQ ID NO: 351196 - RNA, 19 nt, Human
agcuccugccuacuugcuc

SEQ ID NO: 351197 - RNA, 19 nt, Human
agggcuggagccaaggcac

SEQ ID NO: 351198 - RNA, 24 nt, Human
aggggaauugccuaaguaacaaag

SEQ ID NO: 351199 - RNA, 24 nt, Human
aucuugcuuccccuccacacauca

SEQ ID NO: 351200 - RNA, 23 nt, Human
auguuauagugugcuacgggagc

SEQ ID NO: 351201 - RNA, 23 nt, Human
auuuuggggaagacaagaugugg

SEQ ID NO: 351202 - RNA, 21 nt, Human
caacuuccugagcccuuaccc

SEQ ID NO: 351203 - RNA, 18 nt, Human
cacggguaugaggcuaga

SEQ ID NO: 351204 - RNA, 23 nt, Human
cagcaacacuccagcagauguua

SEQ ID NO: 351205 - RNA, 22 nt, Human
cagcgguuucuuaggaaaguuc

SEQ ID NO: 351206 - RNA, 25 nt, Human
caguaccaagggguacagggcugga

SEQ ID NO: 351207 - RNA, 21 nt, Human
caguguggccaggccagucgg

SEQ ID NO: 351208 - RNA, 19 nt, Human
caucuugcuuccccuccac

SEQ ID NO: 351209 - RNA, 25 nt, Human
ccaaggcacuucugggcagcuucau

SEQ ID NO: 351210 - RNA, 20 nt, Human
cccgugcaugccugcgugua

SEQ ID NO: 351211 - RNA, 21 nt, Human
cccuccacacaucaacggcag

SEQ ID NO: 351212 - RNA, 25 nt, Human
ccuuacccaucuugcuuccccucca

SEQ ID NO: 351213 - RNA, 23 nt, Human
cggcaguuugggcggcucugaga

SEQ ID NO: 351214 - RNA, 19 nt, Human
cggggcauggcucugugag

SEQ ID NO: 351215 - RNA, 18 nt, Human
cucuggcagaugguuggg

SEQ ID NO: 351216 - RNA, 18 nt, Human
cugccuacuugcuccaag

SEQ ID NO: 351217 - RNA, 23 nt, Human
gaggagcaucugccuugguguga

SEQ ID NO: 351218 - RNA, 21 nt, Human
gaugguuggggaaacuuucag

SEQ ID NO: 351219 - RNA, 20 nt, Human
gcaggaaacccgugcaugcc

SEQ ID NO: 351220 - RNA, 19 nt, Human
gcuggagccaaggcacuuc

SEQ ID NO: 351221 - RNA, 21 nt, Human
gcuggagccaaggcacuucug

SEQ ID NO: 351222 - RNA, 18 nt, Human
gcuuuugggugggguuuc

SEQ ID NO: 351223 - RNA, 18 nt, Human
ggagcccaggagaaggcg

SEQ ID NO: 351224 - RNA, 23 nt, Human
ggcacuuacagucuaguugggaa

SEQ ID NO: 351225 - RNA, 20 nt, Human
ggcagaugguuggggaaacu

SEQ ID NO: 351226 - RNA, 25 nt, Human
ggccaggccagucgggggcuggcuu

SEQ ID NO: 351227 - RNA, 23 nt, Human
ggcggagugaucaauuuugggga

SEQ ID NO: 351228 - RNA, 19 nt, Human
ggcugauccaagggaaaaa

SEQ ID NO: 351229 - RNA, 19 nt, Human
gggaaaccagaguguucag

SEQ ID NO: 351230 - RNA, 19 nt, Human
gggaagacaagauguggca

SEQ ID NO: 351231 - RNA, 22 nt, Human
gggcaagauucagucccugacc

SEQ ID NO: 351232 - RNA, 20 nt, Human
gggcauggcucugugagggc

SEQ ID NO: 351233 - RNA, 27 nt, Human
gguuguguuuuguccugguuaucagcg

SEQ ID NO: 351234 - RNA, 20 nt, Human
gucagggaaggggaauugcc

SEQ ID NO: 351235 - RNA, 24 nt, Human
uacaagaaaguauggugcaacagc

SEQ ID NO: 351236 - RNA, 21 nt, Human
uaggguccugcuccuccagga

SEQ ID NO: 351237 - RNA, 18 nt, Human
uccaagggaaaaagagac

SEQ ID NO: 351238 - RNA, 18 nt, Human
uccccuccacacaucaac

SEQ ID NO: 351239 - RNA, 18 nt, Human
ucuaagggaugcauagga

SEQ ID NO: 351240 - RNA, 21 nt, Human
ugagaaaccucuccuucccuc

SEQ ID NO: 351241 - RNA, 18 nt, Human
ugaggaaauaucucaagc

SEQ ID NO: 351242 - RNA, 24 nt, Human
ugcaacaaacauuuauugagcucc

SEQ ID NO: 351243 - RNA, 21 nt, Human
ugccuaaguaacaaagggggc

SEQ ID NO: 351244 - RNA, 18 nt, Human
ugccugcguguacccuug

SEQ ID NO: 351245 - RNA, 23 nt, Human
ugccugcguguacccuugguugu

SEQ ID NO: 351246 - RNA, 19 nt, Human
ugcuacgggagcccaggag

SEQ ID NO: 351247 - RNA, 19 nt, Human
uggccaggccagucggggg

SEQ ID NO: 351248 - RNA, 21 nt, Human
uggggaagacaagauguggca

SEQ ID NO: 351249 - RNA, 21 nt, Human
ugguaugggcugcagaggucu

SEQ ID NO: 351250 - RNA, 21 nt, Human
ugugcuacgggagcccaggag

SEQ ID NO: 351251 - RNA, 23 nt, Human
uucaagaggaggagcagacaucu

SEQ ID NO: 351252 - RNA, 23 nt, Human
uuccccuccacacaucaacggca

SEQ ID NO: 351253 - RNA, 22 nt, Human
aaggacacaagcucuggccugg

SEQ ID NO: 351254 - RNA, 24 nt, Human
aaguggccugccaccaggagaggg

SEQ ID NO: 351255 - RNA, 19 nt, Human
accaggagaggguguuccg

SEQ ID NO: 351256 - RNA, 22 nt, Human
acugggagggaaguggccugcc

SEQ ID NO: 351257 - RNA, 20 nt, Human
aggaaggagaaaaccacaug

SEQ ID NO: 351258 - RNA, 18 nt, Human
aggccagccaaggccagg

SEQ ID NO: 351259 - RNA, 21 nt, Human
aggccagccaaggccaggaag

SEQ ID NO: 351260 - RNA, 20 nt, Human
agugaguuucacccacccgg

SEQ ID NO: 351261 - RNA, 21 nt, Human
aucaggugccacuuggcaggg

SEQ ID NO: 351262 - RNA, 22 nt, Human
caagcucuggccuggagagcua

SEQ ID NO: 351263 - RNA, 21 nt, Human
caccccugccccagaggccag

SEQ ID NO: 351264 - RNA, 19 nt, Human
cacccgggguggacagggg

SEQ ID NO: 351265 - RNA, 21 nt, Human
cagccaaggccaggaaggaga

SEQ ID NO: 351266 - RNA, 22 nt, Human
caggacagguagggacgagggu

SEQ ID NO: 351267 - RNA, 22 nt, Human
caggaccaggaucaggacaggu

SEQ ID NO: 351268 - RNA, 19 nt, Human
caggugccacuuggcaggg

SEQ ID NO: 351269 - RNA, 23 nt, Human
ccccagaggccagccaaggccag

SEQ ID NO: 351270 - RNA, 20 nt, Human
cccuacaccugaugcccuuc

SEQ ID NO: 351271 - RNA, 21 nt, Human
ccucucugggguggauggaga

SEQ ID NO: 351272 - RNA, 24 nt, Human
ccuguauccuguaccagcaccguu

SEQ ID NO: 351273 - RNA, 19 nt, Human
cggcgguggcggaggcggc

SEQ ID NO: 351274 - RNA, 21 nt, Human
cgggcggcggagcggggacac

SEQ ID NO: 351275 - RNA, 18 nt, Human
cgguggcggaggcggcgg

SEQ ID NO: 351276 - RNA, 25 nt, Human
cuccaccaccccugccccagaggcc

SEQ ID NO: 351277 - RNA, 25 nt, Human
cucuccaccaccccugccccagagg

SEQ ID NO: 351278 - RNA, 19 nt, Human
gagaggguguuccgagggg

SEQ ID NO: 351279 - RNA, 19 nt, Human
gcggagcggggacacggag

SEQ ID NO: 351280 - RNA, 21 nt, Human
gcgguggcggaggcggcggug

SEQ ID NO: 351281 - RNA, 20 nt, Human
ggagacuggcacugggaggg

SEQ ID NO: 351282 - RNA, 24 nt, Human
ggauggagacuggcacugggaggg

SEQ ID NO: 351283 - RNA, 20 nt, Human
ggcggagcggggacacggag

SEQ ID NO: 351284 - RNA, 20 nt, Human
gggaaguggccugccaccag

SEQ ID NO: 351285 - RNA, 19 nt, Human
gggguggauggagacuggc

SEQ ID NO: 351286 - RNA, 20 nt, Human
ucaggacagguagggacgag

SEQ ID NO: 351287 - RNA, 22 nt, Human
ucaggacagguagggacgaggg

SEQ ID NO: 351288 - RNA, 20 nt, Human
ucggcgguggcggaggcggc

SEQ ID NO: 351289 - RNA, 21 nt, Human
ucuccaccaccccugccccag

SEQ ID NO: 351290 - RNA, 24 nt, Human
ugaaggacacaagcucuggccugg

SEQ ID NO: 351291 - RNA, 19 nt, Human
ugcccuuccaucucuccac

SEQ ID NO: 351292 - RNA, 19 nt, Human
uggcggcggcggccgagug

SEQ ID NO: 351293 - RNA, 25 nt, Human
uguaccagcaccguugauucuucag

SEQ ID NO: 351294 - RNA, 20 nt, Human
uucuucagagcccuuggcca

SEQ ID NO: 351295 - RNA, 21 nt, Human
uuuuuuuuuuuuuuuucucag

SEQ ID NO: 351296 - RNA, 24 nt, Human
aaaauucuuaguucauggacaaaa

SEQ ID NO: 351297 - RNA, 26 nt, Human
aaagcaaaaauaaaaauucuuggcug

SEQ ID NO: 351298 - RNA, 24 nt, Human
aagaucauuugaggccaggaguuc

SEQ ID NO: 351299 - RNA, 22 nt, Human
acagacacgaauuggaugccac

SEQ ID NO: 351300 - RNA, 20 nt, Human
acugccucggcucccagucu

SEQ ID NO: 351301 - RNA, 23 nt, Human
agccugggcaacauagugagauc

SEQ ID NO: 351302 - RNA, 24 nt, Human
agccugggcaacauagugagaucc

SEQ ID NO: 351303 - RNA, 25 nt, Human
agccugggcaacauagugagauccu

SEQ ID NO: 351304 - RNA, 20 nt, Human
aggggucagcucugucuugg

SEQ ID NO: 351305 - RNA, 18 nt, Human
aguaucugaaaagcccag

SEQ ID NO: 351306 - RNA, 23 nt, Human
aguccuucccucucaagacccgu

SEQ ID NO: 351307 - RNA, 21 nt, Human
augaagaacaguuuauucaca

SEQ ID NO: 351308 - RNA, 20 nt, Human
auggaggacaccuuucucca

SEQ ID NO: 351309 - RNA, 19 nt, Human
auggcuccuccugcgcaug

SEQ ID NO: 351310 - RNA, 21 nt, Human
caccaacacuccaagggcucu

SEQ ID NO: 351311 - RNA, 18 nt, Human
cacugugucaccuugggc

SEQ ID NO: 351312 - RNA, 18 nt, Human
cagcaccacugccucggc

SEQ ID NO: 351313 - RNA, 22 nt, Human
cagguugcuaagacagagcuaa

SEQ ID NO: 351314 - RNA, 24 nt, Human
ccacccaugccccaaagugaggac

SEQ ID NO: 351315 - RNA, 18 nt, Human
ccagcuucagggcuggca

SEQ ID NO: 351316 - RNA, 18 nt, Human
ccccaacccaggcuggca

SEQ ID NO: 351317 - RNA, 20 nt, Human
cccgauccauguccuuagac

SEQ ID NO: 351318 - RNA, 20 nt, Human
ccuagcucugccaccuccuc

SEQ ID NO: 351319 - RNA, 19 nt, Human
ccuccccaagcaaagugac

SEQ ID NO: 351320 - RNA, 20 nt, Human
ccucggcuuuggggcuuugg

SEQ ID NO: 351321 - RNA, 22 nt, Human
ccugggcaacauagugagaucc

SEQ ID NO: 351322 - RNA, 24 nt, Human
ccugggcaacauagugagauccua

SEQ ID NO: 351323 - RNA, 23 nt, Human
ccuucacuugggccagcaccacu

SEQ ID NO: 351324 - RNA, 19 nt, Human
ccuugggccccaacccagg

SEQ ID NO: 351325 - RNA, 22 nt, Human
ccuugggccgguaacuuaaucu

SEQ ID NO: 351326 - RNA, 24 nt, Human
cuccugcgcaugcccaggccccau

SEQ ID NO: 351327 - RNA, 22 nt, Human
cuccuggagccacccaugcccc

SEQ ID NO: 351328 - RNA, 19 nt, Human
cucugaucuccaccaacac

SEQ ID NO: 351329 - RNA, 24 nt, Human
cugcacuuugggaggcugaagugg

SEQ ID NO: 351330 - RNA, 21 nt, Human
cugcugccugagggcauggag

SEQ ID NO: 351331 - RNA, 19 nt, Human
cuggagccacccaugcccc

SEQ ID NO: 351332 - RNA, 18 nt, Human
cugucuucucaacccugc

SEQ ID NO: 351333 - RNA, 18 nt, Human
cuucccucucaagacccg

SEQ ID NO: 351334 - RNA, 23 nt, Human
cuugggccccaacccaggcuggc

SEQ ID NO: 351335 - RNA, 24 nt, Human
gaagaucauuugaggccaggaguu

SEQ ID NO: 351336 - RNA, 20 nt, Human
gacacucaaggucacauccu

SEQ ID NO: 351337 - RNA, 18 nt, Human
gagcaguuggcuuguugg

SEQ ID NO: 351338 - RNA, 18 nt, Human
gaggcugaagugggaaga

SEQ ID NO: 351339 - RNA, 18 nt, Human
gaucauuugaggccagga

SEQ ID NO: 351340 - RNA, 24 nt, Human
gaucauuugaggccaggaguucaa

SEQ ID NO: 351341 - RNA, 23 nt, Human
gcacuuugggaggcugaaguggg

SEQ ID NO: 351342 - RNA, 25 nt, Human
gccacaaucaugaagucagauuguc

SEQ ID NO: 351343 - RNA, 19 nt, Human
gccccaaagugaggacacu

SEQ ID NO: 351344 - RNA, 19 nt, Human
gccuguaaucccugcacuu

SEQ ID NO: 351345 - RNA, 18 nt, Human
gccuuuggugguggaggg

SEQ ID NO: 351346 - RNA, 22 nt, Human
gccuuuggugguggagggguca

SEQ ID NO: 351347 - RNA, 24 nt, Human
gccuuuggugguggaggggucagc

SEQ ID NO: 351348 - RNA, 22 nt, Human
gcggaacaacauuugcagcccc

SEQ ID NO: 351349 - RNA, 22 nt, Human
gcugggcacgguggcuugugcc

SEQ ID NO: 351350 - RNA, 20 nt, Human
gcuuaucgcugcccgggacu

SEQ ID NO: 351351 - RNA, 22 nt, Human
ggacaaaaacagggauuuggug

SEQ ID NO: 351352 - RNA, 18 nt, Human
ggagccacccaugcccca

SEQ ID NO: 351353 - RNA, 23 nt, Human
ggcacgguggcuugugccuguaa

SEQ ID NO: 351354 - RNA, 23 nt, Human
ggccagcaccacugccucggcuc

SEQ ID NO: 351355 - RNA, 20 nt, Human
ggcugggcacgguggcuugu

SEQ ID NO: 351356 - RNA, 24 nt, Human
gguggcuugugccuguaaucccug

SEQ ID NO: 351357 - RNA, 19 nt, Human
gugcacacgucugggggca

SEQ ID NO: 351358 - RNA, 21 nt, Human
guggcuugugccuguaauccc

SEQ ID NO: 351359 - RNA, 23 nt, Human
gugggucaucugugagcaguugg

SEQ ID NO: 351360 - RNA, 20 nt, Human
uagaucugucuucucaaccc

SEQ ID NO: 351361 - RNA, 25 nt, Human
uaguucauggacaaaaacagggauu

SEQ ID NO: 351362 - RNA, 18 nt, Human
uaucugaaaagcccagag

SEQ ID NO: 351363 - RNA, 20 nt, Human
ucauggacaaaaacagggau

SEQ ID NO: 351364 - RNA, 23 nt, Human
ucauuugaggccaggaguucaag

SEQ ID NO: 351365 - RNA, 24 nt, Human
uccaagggcucugggccaguucuc

SEQ ID NO: 351366 - RNA, 21 nt, Human
uccaccaacacuccaagggcu

SEQ ID NO: 351367 - RNA, 19 nt, Human
uccaccacggcacucugau

SEQ ID NO: 351368 - RNA, 21 nt, Human
uccagccuugacacucaaggu

SEQ ID NO: 351369 - RNA, 24 nt, Human
uccccugugcacacgucugggggc

SEQ ID NO: 351370 - RNA, 21 nt, Human
ucccugcacuuugggaggcug

SEQ ID NO: 351371 - RNA, 23 nt, Human
uccugcgcaugcccaggccccuc

SEQ ID NO: 351372 - RNA, 23 nt, Human
ucuccuggagccacccaugcccc

SEQ ID NO: 351373 - RNA, 19 nt, Human
ucugaaaagcccagagugg

SEQ ID NO: 351374 - RNA, 22 nt, Human
ucuugcgguuuaaagcaggcuu

SEQ ID NO: 351375 - RNA, 25 nt, Human
ucuugcgguuuaaagcaggcuuuuu

SEQ ID NO: 351376 - RNA, 26 nt, Human
ugaaaagcccagaguggggcagaggg

SEQ ID NO: 351377 - RNA, 18 nt, Human
ugaaacccucggcuuugg

SEQ ID NO: 351378 - RNA, 26 nt, Human
ugaagugggaagaucauuugaggcca

SEQ ID NO: 351379 - RNA, 20 nt, Human
ugagggcauggaggacaccu

SEQ ID NO: 351380 - RNA, 18 nt, Human
ugaucuccaccaacacuc

SEQ ID NO: 351381 - RNA, 23 nt, Human
ugccuguaaucccugcacuuugg

SEQ ID NO: 351382 - RNA, 23 nt, Human
ugccuguaaucccugcacuuugg

SEQ ID NO: 351383 - RNA, 24 nt, Human
ugccuguaaucccugcacuuuggg

SEQ ID NO: 351384 - RNA, 18 nt, Human
uggaugccacaaucauga

SEQ ID NO: 351385 - RNA, 18 nt, Human
uggcugggcacgguggcu

SEQ ID NO: 351386 - RNA, 24 nt, Human
uggcuugugccuguaaucccugca

SEQ ID NO: 351387 - RNA, 20 nt, Human
ugggaggcugaagugggaag

SEQ ID NO: 351388 - RNA, 24 nt, Human
ugggaggcugaagugggaagauca

SEQ ID NO: 351389 - RNA, 24 nt, Human
ugggccaguucucugcugccugag

SEQ ID NO: 351390 - RNA, 19 nt, Human
uggggcagaggguccccug

SEQ ID NO: 351391 - RNA, 19 nt, Human
uggugguggaggggucagc

SEQ ID NO: 351392 - RNA, 20 nt, Human
ugugagcaguuggcuuguug

SEQ ID NO: 351393 - RNA, 24 nt, Human
ugugccuguaaucccugcacuuug

SEQ ID NO: 351394 - RNA, 21 nt, Human
uuaguucauggacaaaaacag

SEQ ID NO: 351395 - RNA, 20 nt, Human
uucauggacaaaaacaggga

SEQ ID NO: 351396 - RNA, 24 nt, Human
uuggcugggcacgguggcuugugc

SEQ ID NO: 351397 - RNA, 23 nt, Human
uuggcuuguuggugagagacagg

SEQ ID NO: 351398 - RNA, 25 nt, Human
uugggaggcugaagugggaagauca

SEQ ID NO: 351399 - RNA, 21 nt, Human
uuggugagagacaggccuuug

SEQ ID NO: 351400 - RNA, 22 nt, Human
uugugccuguaaucccugcacu

SEQ ID NO: 351401 - RNA, 23 nt, Human
uugugccuguaaucccugcacuu

SEQ ID NO: 351402 - RNA, 23 nt, Human
uuuuuuuuuuuuuuuuuggggcu

SEQ ID NO: 351403 - RNA, 25 nt, Human
uuuuuuuuuuuuuuuuuuuuugggg

SEQ ID NO: 351404 - RNA, 19 nt, Human
acacaaaguacaauccagu

SEQ ID NO: 351405 - RNA, 18 nt, Human
agaagagcaaagaacuca

SEQ ID NO: 351406 - RNA, 24 nt, Human
agaagagcaaagaacucaagaaga

SEQ ID NO: 351407 - RNA, 27 nt, Human
agagcaaagaacucaagaagaggcaag

SEQ ID NO: 351408 - RNA, 21 nt, Human
agcuauuugagcaagggccca

SEQ ID NO: 351409 - RNA, 20 nt, Human
aggaaugcacuggcugugcc

SEQ ID NO: 351410 - RNA, 18 nt, Human
caaaguacaauccaguau

SEQ ID NO: 351411 - RNA, 26 nt, Human
caaaguacaauccaguauaugcagaa

SEQ ID NO: 351412 - RNA, 27 nt, Human
caauagauuuccucuucauuagucaaa

SEQ ID NO: 351413 - RNA, 21 nt, Human
cagcuuccugggagacuuugg

SEQ ID NO: 351414 - RNA, 22 nt, Human
caggugggcucuucacuggcuu

SEQ ID NO: 351415 - RNA, 22 nt, Human
caguauaugcagaaagguacuc

SEQ ID NO: 351416 - RNA, 21 nt, Human
caguuccaagaaucaauuuug

SEQ ID NO: 351417 - RNA, 22 nt, Human
cauaaaagaaccccuagagaaa

SEQ ID NO: 351418 - RNA, 21 nt, Human
cccacagcuuccugggagacu

SEQ ID NO: 351419 - RNA, 18 nt, Human
ccccgccauguccuucca

SEQ ID NO: 351420 - RNA, 24 nt, Human
cuaaaaaucacauaaaagaacccc

SEQ ID NO: 351421 - RNA, 21 nt, Human
cucaagaagaggcaagcaaga

SEQ ID NO: 351422 - RNA, 25 nt, Human
cucugaauggcagagacccuaaucu

SEQ ID NO: 351423 - RNA, 23 nt, Human
cuguucgcaggcaggaaugcacu

SEQ ID NO: 351424 - RNA, 18 nt, Human
gaacucaagaagaggcaa

SEQ ID NO: 351425 - RNA, 27 nt, Human
gaagagcaaagaacucaagaagaggcc

SEQ ID NO: 351426 - RNA, 26 nt, Human
gagcaaagaacucaagaagaggcaag

SEQ ID NO: 351427 - RNA, 18 nt, Human
gccccgccauguccuucc

SEQ ID NO: 351428 - RNA, 18 nt, Human
ggaaauuauauucuuuuc

SEQ ID NO: 351429 - RNA, 22 nt, Human
ggagggccuguucgcaggcagg

SEQ ID NO: 351430 - RNA, 19 nt, Human
guaugaaggccauucugua

SEQ ID NO: 351431 - RNA, 24 nt, Human
gucacugaaaaccuggcacaccac

SEQ ID NO: 351432 - RNA, 19 nt, Human
gugggcucuucacuggcuu

SEQ ID NO: 351433 - RNA, 21 nt, Human
gugggcucuucacuggcuuca

SEQ ID NO: 351434 - RNA, 21 nt, Human
guuuucaagcaucaacucuga

SEQ ID NO: 351435 - RNA, 24 nt, Human
uaaaagaaccccuagagaaaucaa

SEQ ID NO: 351436 - RNA, 23 nt, Human
uaaucugacuguuauuagccacc

SEQ ID NO: 351437 - RNA, 23 nt, Human
uaggcuccuaugcgagacaguuu

SEQ ID NO: 351438 - RNA, 23 nt, Human
ucaagaagaggcaagcaagagca

SEQ ID NO: 351439 - RNA, 23 nt, Human
ucacuggcuucacuucagcuuga

SEQ ID NO: 351440 - RNA, 25 nt, Human
ucagcuugauccucuggucucccca

SEQ ID NO: 351441 - RNA, 22 nt, Human
ugaacgcaaggguaacaucccc

SEQ ID NO: 351442 - RNA, 25 nt, Human
ugccucgccccgccauguccuucca

SEQ ID NO: 351443 - RNA, 18 nt, Human
uggagaggcggcaaagcu

SEQ ID NO: 351444 - RNA, 21 nt, Human
uggcacaccacuuagcuaaaa

SEQ ID NO: 351445 - RNA, 22 nt, Human
ugggagggccuguucgcaggca

SEQ ID NO: 351446 - RNA, 19 nt, Human
uguagagugcacguauaua

SEQ ID NO: 351447 - RNA, 18 nt, Human
ugugaaauucagucccac

SEQ ID NO: 351448 - RNA, 24 nt, Human
uuccacaggugggcucuucacugg

SEQ ID NO: 351449 - RNA, 18 nt, Human
uuuuuuuuuuuuuuuuug

SEQ ID NO: 351450 - RNA, 20 nt, Human
accuccagcucccugggcuc

SEQ ID NO: 351451 - RNA, 20 nt, Human
agaggaagcgccgaccucca

SEQ ID NO: 351452 - RNA, 25 nt, Human
ccgaccuccagcucccugggcucug

SEQ ID NO: 351453 - RNA, 19 nt, Human
cgcgucaguggaccaagca

SEQ ID NO: 351454 - RNA, 24 nt, Human
aaaaaggaaaauuauaacaaagga

SEQ ID NO: 351455 - RNA, 23 nt, Human
aaacugaaucuucagcagaauaa

SEQ ID NO: 351456 - RNA, 23 nt, Human
aauugauuaaugacaugaagugc

SEQ ID NO: 351457 - RNA, 19 nt, Human
acccagagcauaggaaaaa

SEQ ID NO: 351458 - RNA, 20 nt, Human
agagcauaggaaaaacagga

SEQ ID NO: 351459 - RNA, 23 nt, Human
aguauuagaaaaacuaggaaaaa

SEQ ID NO: 351460 - RNA, 23 nt, Human
aguuauuuuaauuuucuauuaaa

SEQ ID NO: 351461 - RNA, 19 nt, Human
cagcuguuggcauuguguu

SEQ ID NO: 351462 - RNA, 22 nt, Human
ccagagcauaggaaaaacagga

SEQ ID NO: 351463 - RNA, 20 nt, Human
ccaucaggcucuauucaccc

SEQ ID NO: 351464 - RNA, 23 nt, Human
cugcaucugaaagcaaacuuuau

SEQ ID NO: 351465 - RNA, 24 nt, Human
cuuuauuguucaauuauucuuaau

SEQ ID NO: 351466 - RNA, 19 nt, Human
gaaaacugcaucugaaagc

SEQ ID NO: 351467 - RNA, 25 nt, Human
gaccauaauuaccauauuaacuuug

SEQ ID NO: 351468 - RNA, 18 nt, Human
gcaaagcaguaguauacc

SEQ ID NO: 351469 - RNA, 19 nt, Human
gccagcuguuggcauugug

SEQ ID NO: 351470 - RNA, 22 nt, Human
uaccccagaccauaauuaccau

SEQ ID NO: 351471 - RNA, 20 nt, Human
uacuuuguaagcaaaacaaa

SEQ ID NO: 351472 - RNA, 23 nt, Human
uaggaaaaacaggauuggucaca

SEQ ID NO: 351473 - RNA, 19 nt, Human
uauccuauaucucacugaa

SEQ ID NO: 351474 - RNA, 21 nt, Human
uauuuuuauuuuaaaaauaag

SEQ ID NO: 351475 - RNA, 23 nt, Human
ucagucuaaauucugacaauaaa

SEQ ID NO: 351476 - RNA, 18 nt, Human
ucuauuaaacauucuucu

SEQ ID NO: 351477 - RNA, 20 nt, Human
ucuuaaacugaaucuucagc

SEQ ID NO: 351478 - RNA, 18 nt, Human
ugaagugcacaacacuaa

SEQ ID NO: 351479 - RNA, 21 nt, Human
uguaaugcacaguuguaugca

SEQ ID NO: 351480 - RNA, 25 nt, Human
uuagaaaaacuaggaaaaaagauaa

SEQ ID NO: 351481 - RNA, 22 nt, Human
uucugacaauaaaauguaugga

SEQ ID NO: 351482 - RNA, 23 nt, Human
uuggauuuuacuguuccuaauuu

SEQ ID NO: 351483 - RNA, 21 nt, Human
uuguaagcaaaacaaaagcuu

SEQ ID NO: 351484 - RNA, 20 nt, Human
uuuagauuuuuaaucucacu

SEQ ID NO: 351485 - RNA, 26 nt, Human
uuuggauuuuacuguuccuaauuuua

SEQ ID NO: 351486 - RNA, 20 nt, Human
acccggacgccagcgaagac

SEQ ID NO: 351487 - RNA, 20 nt, Human
agccggggcuugggggggcu

SEQ ID NO: 351488 - RNA, 21 nt, Human
agcggcggaggcagcgcggga

SEQ ID NO: 351489 - RNA, 19 nt, Human
agguucgguucuaggucuc

SEQ ID NO: 351490 - RNA, 20 nt, Human
auuccugcggggcuccggcg

SEQ ID NO: 351491 - RNA, 25 nt, Human
cacccccgucuucagagacccaacu

SEQ ID NO: 351492 - RNA, 23 nt, Human
cccacaacgcgucuaacacugcc

SEQ ID NO: 351493 - RNA, 21 nt, Human
ccccuggcgggcggggcgggg

SEQ ID NO: 351494 - RNA, 24 nt, Human
cccgacccacaacgcgucuaacac

SEQ ID NO: 351495 - RNA, 24 nt, Human
ccgcaggcccugcgcuagaaggcu

SEQ ID NO: 351496 - RNA, 18 nt, Human
ccgggccccccucccccu

SEQ ID NO: 351497 - RNA, 21 nt, Human
ccuccggccccuccacccgga

SEQ ID NO: 351498 - RNA, 19 nt, Human
ccugcgacgcgauccaggg

SEQ ID NO: 351499 - RNA, 24 nt, Human
ccuggcgggcggggcgggguggga

SEQ ID NO: 351500 - RNA, 23 nt, Human
cgcuagaaggcuugggaaggggu

SEQ ID NO: 351501 - RNA, 22 nt, Human
cugcuaggcaggggcgucccug

SEQ ID NO: 351502 - RNA, 22 nt, Human
cugcuccgccccggccugcugc

SEQ ID NO: 351503 - RNA, 26 nt, Human
cuggaggggaggggagggggcucggg

SEQ ID NO: 351504 - RNA, 21 nt, Human
gaggguaggagggcggcuccg

SEQ ID NO: 351505 - RNA, 18 nt, Human
gccccccucccccuauug

SEQ ID NO: 351506 - RNA, 19 nt, Human
gcccgcccuccggccccuc

SEQ ID NO: 351507 - RNA, 22 nt, Human
gcccgcccuccggccccuccac

SEQ ID NO: 351508 - RNA, 23 nt, Human
gcgggagaggaagggcgcucccu

SEQ ID NO: 351509 - RNA, 26 nt, Human
ggagaaagccgggggcacccuggagg

SEQ ID NO: 351510 - RNA, 23 nt, Human
ggaggacagagcccgggaagcug

SEQ ID NO: 351511 - RNA, 19 nt, Human
ggaggggaggggagggggc

SEQ ID NO: 351512 - RNA, 21 nt, Human
ggagggggcucgggguggguc

SEQ ID NO: 351513 - RNA, 18 nt, Human
ggcgcagaggcgggagag

SEQ ID NO: 351514 - RNA, 24 nt, Human
ggcuccgacugaggccccagaagc

SEQ ID NO: 351515 - RNA, 20 nt, Human
gggaagcugggcuggaagaa

SEQ ID NO: 351516 - RNA, 23 nt, Human
gggaggggagggggcucggggug

SEQ ID NO: 351517 - RNA, 18 nt, Human
gggcggggugggaccggg

SEQ ID NO: 351518 - RNA, 21 nt, Human
ggggaggggagggggcucggg

SEQ ID NO: 351519 - RNA, 23 nt, Human
ggggaggggagggggcucggggu

SEQ ID NO: 351520 - RNA, 25 nt, Human
ggggaggggagggggcucggggugg

SEQ ID NO: 351521 - RNA, 19 nt, Human
ggggugggucuccccucgg

SEQ ID NO: 351522 - RNA, 25 nt, Human
gugggaccgggccccccucccccua

SEQ ID NO: 351523 - RNA, 22 nt, Human
uccccucgggacccuauugcuu

SEQ ID NO: 351524 - RNA, 18 nt, Human
ucccuaccucaccucacc

SEQ ID NO: 351525 - RNA, 21 nt, Human
ucccuaccucaccucaccccc

SEQ ID NO: 351526 - RNA, 22 nt, Human
ugcggggcuccggcgcuguggg

SEQ ID NO: 351527 - RNA, 23 nt, Human
ugcuugaaggggccggcaaggcc

SEQ ID NO: 351528 - RNA, 18 nt, Human
ugggaagggguggggaag

SEQ ID NO: 351529 - RNA, 19 nt, Human
ugggagaaagccgggggca

SEQ ID NO: 351530 - RNA, 20 nt, Human
uugaaggggccggcaaggcc

SEQ ID NO: 351531 - RNA, 22 nt, Human
aaguaccaccccucccccucuc

SEQ ID NO: 351532 - RNA, 20 nt, Human
accaccccucccccucuccc

SEQ ID NO: 351533 - RNA, 20 nt, Human
auuggugccaaguaccaccc

SEQ ID NO: 351534 - RNA, 20 nt, Human
caccccucccccucuccccc

SEQ ID NO: 351535 - RNA, 21 nt, Human
caccccucccccucuccccca

SEQ ID NO: 351536 - RNA, 23 nt, Human
cagguggugaggggguuccuucc

SEQ ID NO: 351537 - RNA, 21 nt, Human
cauccugccccccaccccaaa

SEQ ID NO: 351538 - RNA, 21 nt, Human
ccaaguaccaccccucccccu

SEQ ID NO: 351539 - RNA, 21 nt, Human
ccccauccugccccccacccc

SEQ ID NO: 351540 - RNA, 19 nt, Human
cccccucucccccauccug

SEQ ID NO: 351541 - RNA, 20 nt, Human
ccugccccccaccccaaaug

SEQ ID NO: 351542 - RNA, 23 nt, Human
cugggccgggcagguggugaggg

SEQ ID NO: 351543 - RNA, 19 nt, Human
gcagcugcgcuccugggcc

SEQ ID NO: 351544 - RNA, 18 nt, Human
gggucggggcgcaggagc

SEQ ID NO: 351545 - RNA, 19 nt, Human
ucccccauccugcccccca

SEQ ID NO: 351546 - RNA, 24 nt, Human
uuggugccaaguaccaccccuccc

SEQ ID NO: 351547 - RNA, 23 nt, Human
acgaaccaaaucccaggcccuug

SEQ ID NO: 351548 - RNA, 22 nt, Human
agcaaacgaaccaaaucccagg

SEQ ID NO: 351549 - RNA, 18 nt, Human
cagcgccccgcgcagggu

SEQ ID NO: 351550 - RNA, 21 nt, Human
cagcgccccgcgcaggguccc

SEQ ID NO: 351551 - RNA, 22 nt, Human
cagcgccccgcgcagggucccg

SEQ ID NO: 351552 - RNA, 26 nt, Human
cagggucccgggcuccggccggccuc

SEQ ID NO: 351553 - RNA, 24 nt, Human
ccacagcagugcccagccuucgca

SEQ ID NO: 351554 - RNA, 18 nt, Human
ccaggcccuuguccugcc

SEQ ID NO: 351555 - RNA, 20 nt, Human
cccacagcagugcccagccu

SEQ ID NO: 351556 - RNA, 18 nt, Human
cccagaagagcaaacgaa

SEQ ID NO: 351557 - RNA, 18 nt, Human
cccaggcccuuguccugc

SEQ ID NO: 351558 - RNA, 24 nt, Human
ccccgacguccgccugcccgugcc

SEQ ID NO: 351559 - RNA, 19 nt, Human
cgccugcccgugcccucug

SEQ ID NO: 351560 - RNA, 24 nt, Human
cgccugcccgugcccucugcccgc

SEQ ID NO: 351561 - RNA, 21 nt, Human
cggaagaguccaaggccuggg

SEQ ID NO: 351562 - RNA, 18 nt, Human
gccucacaucccuucgga

SEQ ID NO: 351563 - RNA, 22 nt, Human
ggaccccugaacuucucuuccc

SEQ ID NO: 351564 - RNA, 21 nt, Human
ggccuggggaggggcaucuuc

SEQ ID NO: 351565 - RNA, 21 nt, Human
uauuucccugucccuuucugg

SEQ ID NO: 351566 - RNA, 21 nt, Human
ucccagaagagcaaacgaacc

SEQ ID NO: 351567 - RNA, 24 nt, Human
uccgccugcccgugcccucugccc

SEQ ID NO: 351568 - RNA, 25 nt, Human
uccgugggugacccugcuccagccu

SEQ ID NO: 351569 - RNA, 22 nt, Human
ugcccgcacguuccccgagggc

SEQ ID NO: 351570 - RNA, 20 nt, Human
ugcccgugcccucugcccgc

SEQ ID NO: 351571 - RNA, 19 nt, Human
ugcugggaagacuggcugu

SEQ ID NO: 351572 - RNA, 22 nt, Human
ugggaagacuggcugucccaca

SEQ ID NO: 351573 - RNA, 23 nt, Human
ugggaagacuggcugucccacag

SEQ ID NO: 351574 - RNA, 21 nt, Human
ugggugacccugcuccagccu

SEQ ID NO: 351575 - RNA, 22 nt, Human
uguccugccccacagugccuca

SEQ ID NO: 351576 - RNA, 18 nt, Human
uuguccugccccacagug

SEQ ID NO: 351577 - RNA, 21 nt, Human
aaaaaaaaaaaaaaaaagucu

SEQ ID NO: 351578 - RNA, 19 nt, Human
aacagaccaccagaaacgg

SEQ ID NO: 351579 - RNA, 20 nt, Human
aacccacaggcccuuccucg

SEQ ID NO: 351580 - RNA, 20 nt, Human
aagagacaacacacaaacua

SEQ ID NO: 351581 - RNA, 22 nt, Human
aagauggggggauaccgaauca

SEQ ID NO: 351582 - RNA, 22 nt, Human
aagcaagauggggggauaccga

SEQ ID NO: 351583 - RNA, 22 nt, Human
aagugcuacaggugugugagcc

SEQ ID NO: 351584 - RNA, 22 nt, Human
aauaaacccacaggcccuuccu

SEQ ID NO: 351585 - RNA, 22 nt, Human
aauuuccaggaggaagcagccc

SEQ ID NO: 351586 - RNA, 18 nt, Human
acacaggcacgacugcuu

SEQ ID NO: 351587 - RNA, 20 nt, Human
acagggaaaaacccauugga

SEQ ID NO: 351588 - RNA, 23 nt, Human
accccuggugcccuaagucucca

SEQ ID NO: 351589 - RNA, 21 nt, Human
agacaacacacaaacuaagcc

SEQ ID NO: 351590 - RNA, 22 nt, Human
agacaacacacaaacuaagccu

SEQ ID NO: 351591 - RNA, 23 nt, Human
agacaacacacaaacuaagccua

SEQ ID NO: 351592 - RNA, 18 nt, Human
agagaagcagaguggagc

SEQ ID NO: 351593 - RNA, 23 nt, Human
agagacaacacacaaacuaagcc

SEQ ID NO: 351594 - RNA, 19 nt, Human
agaggcugcuucaguuugg

SEQ ID NO: 351595 - RNA, 21 nt, Human
agcacaccccacgacuccgug

SEQ ID NO: 351596 - RNA, 18 nt, Human
agcggcaggcugcgcggg

SEQ ID NO: 351597 - RNA, 18 nt, Human
aggcacgacugcuugaaa

SEQ ID NO: 351598 - RNA, 23 nt, Human
aggcagaagucagagaagcagag

SEQ ID NO: 351599 - RNA, 24 nt, Human
aggugcuggcugugguggaaaggu

SEQ ID NO: 351600 - RNA, 18 nt, Human
agguggccugguggcagg

SEQ ID NO: 351601 - RNA, 21 nt, Human
agucagagaagcagaguggag

SEQ ID NO: 351602 - RNA, 21 nt, Human
aguggagcucccagcacaccc

SEQ ID NO: 351603 - RNA, 23 nt, Human
aguuuaaaaaaaaaaaaaaaaaa

SEQ ID NO: 351604 - RNA, 21 nt, Human
auauuccugauuccagcccag

SEQ ID NO: 351605 - RNA, 20 nt, Human
caaaagcaaaagacuaucac

SEQ ID NO: 351606 - RNA, 22 nt, Human
caaagcagucggaucccccucc

SEQ ID NO: 351607 - RNA, 21 nt, Human
caaaguggacuccuguccccu

SEQ ID NO: 351608 - RNA, 24 nt, Human
caaaguggacuccuguccccugcc

SEQ ID NO: 351609 - RNA, 23 nt, Human
caacguggcagcggcccaggccu

SEQ ID NO: 351610 - RNA, 19 nt, Human
cacacgggcuucuccaacg

SEQ ID NO: 351611 - RNA, 21 nt, Human
caccagaaacggggccaccag

SEQ ID NO: 351612 - RNA, 22 nt, Human
caccagaaacggggccaccaga

SEQ ID NO: 351613 - RNA, 23 nt, Human
caccagacagauaguccauaccc

SEQ ID NO: 351614 - RNA, 22 nt, Human
caccucucccgccgagcuccga

SEQ ID NO: 351615 - RNA, 19 nt, Human
cagaaacggggccaccaga

SEQ ID NO: 351616 - RNA, 20 nt, Human
cagaagucagagaagcagag

SEQ ID NO: 351617 - RNA, 26 nt, Human
cagaccaccagaaacggggccaccag

SEQ ID NO: 351618 - RNA, 23 nt, Human
cagagccagcucugcccaagaca

SEQ ID NO: 351619 - RNA, 25 nt, Human
cagaguggagcucccagcacacccc

SEQ ID NO: 351620 - RNA, 20 nt, Human
cagcacaccccacgacuccg

SEQ ID NO: 351621 - RNA, 22 nt, Human
cagccugccaacagaccaccag

SEQ ID NO: 351622 - RNA, 21 nt, Human
caggguggggccacaggagcu

SEQ ID NO: 351623 - RNA, 24 nt, Human
cauuuggaaaaucuacuguacagg

SEQ ID NO: 351624 - RNA, 26 nt, Human
cauuuggaaaaucuacuguacaggga

SEQ ID NO: 351625 - RNA, 18 nt, Human
ccacaggcaggacgggcg

SEQ ID NO: 351626 - RNA, 21 nt, Human
ccacucagcggccaccccccc

SEQ ID NO: 351627 - RNA, 18 nt, Human
ccagcccagggcccaggg

SEQ ID NO: 351628 - RNA, 19 nt, Human
ccaggccccugccgcccuc

SEQ ID NO: 351629 - RNA, 18 nt, Human
ccaguaagugcuacaggu

SEQ ID NO: 351630 - RNA, 20 nt, Human
cccagcgcgccgcuguccca

SEQ ID NO: 351631 - RNA, 24 nt, Human
cccagcgcgccgcugucccaggcg

SEQ ID NO: 351632 - RNA, 18 nt, Human
ccccaagccccacccgca

SEQ ID NO: 351633 - RNA, 18 nt, Human
cccccaagaugcuugguc

SEQ ID NO: 351634 - RNA, 24 nt, Human
ccccugccacucagcggccacccc

SEQ ID NO: 351635 - RNA, 21 nt, Human
ccccugccgcccucccuacag

SEQ ID NO: 351636 - RNA, 20 nt, Human
cccgcaggaucuuccagcca

SEQ ID NO: 351637 - RNA, 22 nt, Human
ccgcaggaucuuccagccacau

SEQ ID NO: 351638 - RNA, 22 nt, Human
ccgcugcucgaugcucucuugg

SEQ ID NO: 351639 - RNA, 26 nt, Human
ccuuauaauaaacccacaggcccuuc

SEQ ID NO: 351640 - RNA, 22 nt, Human
cgacaaacucaagagacaacac

SEQ ID NO: 351641 - RNA, 23 nt, Human
cgcaccucucccgccgagcuccg

SEQ ID NO: 351642 - RNA, 21 nt, Human
cgcucagagccagcucugccc

SEQ ID NO: 351643 - RNA, 25 nt, Human
cggcccgcaccucucccgccgagcu

SEQ ID NO: 351644 - RNA, 22 nt, Human
cggcucggauucggcccgcacc

SEQ ID NO: 351645 - RNA, 25 nt, Human
cgggccggcuucgcggguuccgcug

SEQ ID NO: 351646 - RNA, 19 nt, Human
cuacaguccucucugucug

SEQ ID NO: 351647 - RNA, 18 nt, Human
cucuacugccggauuccu

SEQ ID NO: 351648 - RNA, 20 nt, Human
cucugcccaagacaccccuc

SEQ ID NO: 351649 - RNA, 26 nt, Human
cucugucugaaggcugaggagcucau

SEQ ID NO: 351650 - RNA, 21 nt, Human
cugccaacagaccaccagaaa

SEQ ID NO: 351651 - RNA, 18 nt, Human
cugccgcccucccuacag

SEQ ID NO: 351652 - RNA, 20 nt, Human
gaacaaagaacuagaggaaa

SEQ ID NO: 351653 - RNA, 21 nt, Human
gacuccuguccccugccacuc

SEQ ID NO: 351654 - RNA, 20 nt, Human
gagcggcaggcugcgcgggu

SEQ ID NO: 351655 - RNA, 19 nt, Human
gagcuggaccuggggagag

SEQ ID NO: 351656 - RNA, 21 nt, Human
gagucccagcauucacuucuc

SEQ ID NO: 351657 - RNA, 18 nt, Human
gaguccgcucucuacugc

SEQ ID NO: 351658 - RNA, 21 nt, Human
gaugccaggugcuggcugugg

SEQ ID NO: 351659 - RNA, 23 nt, Human
gaugccaggugcuggcuguggug

SEQ ID NO: 351660 - RNA, 21 nt, Human
gcacaccccacgacuccgugg

SEQ ID NO: 351661 - RNA, 21 nt, Human
gcagaagucagagaagcagag

SEQ ID NO: 351662 - RNA, 18 nt, Human
gcaggggaggccagggcc

SEQ ID NO: 351663 - RNA, 24 nt, Human
gccagcucugcccaagacaccccu

SEQ ID NO: 351664 - RNA, 20 nt, Human
gccugccaacagaccaccag

SEQ ID NO: 351665 - RNA, 25 nt, Human
gcuggaaugcuggggagguggccug

SEQ ID NO: 351666 - RNA, 19 nt, Human
ggagguggccugguggcag

SEQ ID NO: 351667 - RNA, 24 nt, Human
ggcaggacgggcguggucugcagg

SEQ ID NO: 351668 - RNA, 21 nt, Human
ggccagggccugcaguucuuc

SEQ ID NO: 351669 - RNA, 27 nt, Human
ggccuuggauggaggcgcucagagcca

SEQ ID NO: 351670 - RNA, 20 nt, Human
ggcggagggggcgcauggcu

SEQ ID NO: 351671 - RNA, 23 nt, Human
gggccacaggagcuaacggagaa

SEQ ID NO: 351672 - RNA, 20 nt, Human
gggcggagggggcgcauggc

SEQ ID NO: 351673 - RNA, 18 nt, Human
gggcguggucugcaggag

SEQ ID NO: 351674 - RNA, 20 nt, Human
ggggcuggaaugcuggggag

SEQ ID NO: 351675 - RNA, 18 nt, Human
gguccgccggcuggaguc

SEQ ID NO: 351676 - RNA, 28 nt, Human
gguucuccuaguuuaaaaaaaaaaaaaa

SEQ ID NO: 351677 - RNA, 24 nt, Human
guggggccacaggagcuaacggag

SEQ ID NO: 351678 - RNA, 20 nt, Human
uaacuuaccucagaaguaac

SEQ ID NO: 351679 - RNA, 18 nt, Human
uaagccuacauuuuggcu

SEQ ID NO: 351680 - RNA, 21 nt, Human
uaaguagaguuuugccaaaag

SEQ ID NO: 351681 - RNA, 25 nt, Human
uaagucuccaggcagaagucagaga

SEQ ID NO: 351682 - RNA, 18 nt, Human
uacuguacagggaaaaac

SEQ ID NO: 351683 - RNA, 19 nt, Human
ucagcggccacccccccaa

SEQ ID NO: 351684 - RNA, 21 nt, Human
uccaacguggcagcggcccag

SEQ ID NO: 351685 - RNA, 23 nt, Human
uccgcugcucgaugcucucuugg

SEQ ID NO: 351686 - RNA, 19 nt, Human
uccugauuccagcccaggg

SEQ ID NO: 351687 - RNA, 21 nt, Human
ucgaugcucucuugggcgccu

SEQ ID NO: 351688 - RNA, 18 nt, Human
ucuccaggccccugccgc

SEQ ID NO: 351689 - RNA, 19 nt, Human
ucuccaggccccugccgcc

SEQ ID NO: 351690 - RNA, 26 nt, Human
ucuccuaguuuaaaaaaaaaaaaaaa

SEQ ID NO: 351691 - RNA, 24 nt, Human
ucuugggcgccugcccagcgcgcc

SEQ ID NO: 351692 - RNA, 21 nt, Human
ugagccccaagccccacccgc

SEQ ID NO: 351693 - RNA, 24 nt, Human
ugagccccaagccccacccgcagg

SEQ ID NO: 351694 - RNA, 22 nt, Human
ugauuccagcccagggcccagg

SEQ ID NO: 351695 - RNA, 20 nt, Human
ugcccggaccggcggcggga

SEQ ID NO: 351696 - RNA, 24 nt, Human
ugcccggaccggcggcgggagagc

SEQ ID NO: 351697 - RNA, 18 nt, Human
ugcccuaagucuccaggc

SEQ ID NO: 351698 - RNA, 23 nt, Human
ugcgcgggucgcggcugcgggcc

SEQ ID NO: 351699 - RNA, 22 nt, Human
ugcuggggagguggccuggugg

SEQ ID NO: 351700 - RNA, 21 nt, Human
uggaaagguccuaugcgagaa

SEQ ID NO: 351701 - RNA, 24 nt, Human
uggaaugcuggggagguggccugg

SEQ ID NO: 351702 - RNA, 24 nt, Human
uggauggaggcgcucagagccagc

SEQ ID NO: 351703 - RNA, 20 nt, Human
uggcccugagcgcauggaca

SEQ ID NO: 351704 - RNA, 23 nt, Human
uggcuuccagauuugguucuccu

SEQ ID NO: 351705 - RNA, 22 nt, Human
ugggggccuagugaguggcagg

SEQ ID NO: 351706 - RNA, 18 nt, Human
ugguggcaggggaggcca

SEQ ID NO: 351707 - RNA, 22 nt, Human
ugugcaaaaacaagucgauauc

SEQ ID NO: 351708 - RNA, 25 nt, Human
uuggagaaaccgagucagaauggug

SEQ ID NO: 351709 - RNA, 21 nt, Human
uuggauggaggcgcucagagc

SEQ ID NO: 351710 - RNA, 18 nt, Human
uuuuuuuuuacuuuauaa

SEQ ID NO: 351711 - RNA, 22 nt, Human
aaaacaaaaaacaaagaucuuc

SEQ ID NO: 351712 - RNA, 26 nt, Human
aaacccacgucauccuugagagcaga

SEQ ID NO: 351713 - RNA, 25 nt, Human
aaacugauuuuucuuuaaaccucua

SEQ ID NO: 351714 - RNA, 21 nt, Human
aacacuuagaaaucaaaccca

SEQ ID NO: 351715 - RNA, 19 nt, Human
aacaucuuuggguuugcug

SEQ ID NO: 351716 - RNA, 25 nt, Human
aagcaaguguaaaauggauagucug

SEQ ID NO: 351717 - RNA, 22 nt, Human
aaguguaaaauggauagucuga

SEQ ID NO: 351718 - RNA, 20 nt, Human
aauggcucuuuaaugaaaac

SEQ ID NO: 351719 - RNA, 22 nt, Human
aauguucucaaaaugaaauauu

SEQ ID NO: 351720 - RNA, 22 nt, Human
acaaguuacauagaaucagagg

SEQ ID NO: 351721 - RNA, 22 nt, Human
acacuaaauuaccauuaucuga

SEQ ID NO: 351722 - RNA, 22 nt, Human
accaacaucaggaaagccccau

SEQ ID NO: 351723 - RNA, 22 nt, Human
agaaaaaggaaauguuuaguac

SEQ ID NO: 351724 - RNA, 21 nt, Human
agggagggcagaggagaggaa

SEQ ID NO: 351725 - RNA, 26 nt, Human
aggggacaacagauaaauuaacaaag

SEQ ID NO: 351726 - RNA, 22 nt, Human
augcauuuuuaagaacaaaaac

SEQ ID NO: 351727 - RNA, 18 nt, Human
caaaacgaagccuccugc

SEQ ID NO: 351728 - RNA, 19 nt, Human
caaaacgaagccuccugcc

SEQ ID NO: 351729 - RNA, 18 nt, Human
cacaguacccucauaacu

SEQ ID NO: 351730 - RNA, 22 nt, Human
cacuuguugguuucugcacucc

SEQ ID NO: 351731 - RNA, 19 nt, Human
cagaacacugcagauguua

SEQ ID NO: 351732 - RNA, 18 nt, Human
cagugagacccucauuuu

SEQ ID NO: 351733 - RNA, 22 nt, Human
cauagaaucagaggcacuucaa

SEQ ID NO: 351734 - RNA, 22 nt, Human
ccaaagcuacagguaaugaaaa

SEQ ID NO: 351735 - RNA, 18 nt, Human
ccaugaacaucgaggguu

SEQ ID NO: 351736 - RNA, 20 nt, Human
ccccagggaccggcugcucc

SEQ ID NO: 351737 - RNA, 23 nt, Human
ccccagggaccggcugcucccag

SEQ ID NO: 351738 - RNA, 18 nt, Human
cccgccgcccgcagcugc

SEQ ID NO: 351739 - RNA, 21 nt, Human
cccucauaacuccaucuccuu

SEQ ID NO: 351740 - RNA, 18 nt, Human
cccuccuccucccgcgcc

SEQ ID NO: 351741 - RNA, 22 nt, Human
ccgcgccgcgccucccuccccg

SEQ ID NO: 351742 - RNA, 19 nt, Human
ccgcgccucccuccccggg

SEQ ID NO: 351743 - RNA, 19 nt, Human
ccggguccuccuccuucuc

SEQ ID NO: 351744 - RNA, 21 nt, Human
ccucccgcgccgcgccucccu

SEQ ID NO: 351745 - RNA, 24 nt, Human
ccuccgcggacuccuuucccgugc

SEQ ID NO: 351746 - RNA, 19 nt, Human
ccuccucccgcgccgcgcc

SEQ ID NO: 351747 - RNA, 18 nt, Human
ccuccuucuccuccucuu

SEQ ID NO: 351748 - RNA, 20 nt, Human
ccuccuucuccuccucuucu

SEQ ID NO: 351749 - RNA, 19 nt, Human
ccugcucccgccgcccgca

SEQ ID NO: 351750 - RNA, 24 nt, Human
cgcccgcagcugcgccccgggaac

SEQ ID NO: 351751 - RNA, 19 nt, Human
cggccguuagcaaagggga

SEQ ID NO: 351752 - RNA, 20 nt, Human
cggcgcagcccgcgcacacg

SEQ ID NO: 351753 - RNA, 20 nt, Human
cggcugcgccccuccuccuc

SEQ ID NO: 351754 - RNA, 23 nt, Human
cggcugcucccagccgcugcuug

SEQ ID NO: 351755 - RNA, 21 nt, Human
cgggggcgcucgcuuccuccu

SEQ ID NO: 351756 - RNA, 18 nt, Human
cuaaagaaauacaugaaa

SEQ ID NO: 351757 - RNA, 24 nt, Human
cucauuaacaccagucugcaacaa

SEQ ID NO: 351758 - RNA, 19 nt, Human
cuccgcggcugcgccccuc

SEQ ID NO: 351759 - RNA, 22 nt, Human
cuccucuucuuuuccucuggcu

SEQ ID NO: 351760 - RNA, 24 nt, Human
cuccucuucuuuuccucuggcucc

SEQ ID NO: 351761 - RNA, 19 nt, Human
cugcgccugcucccgccgc

SEQ ID NO: 351762 - RNA, 22 nt, Human
cuggcagccuuccaauaucucu

SEQ ID NO: 351763 - RNA, 21 nt, Human
cuguugcaaaucugcccaaag

SEQ ID NO: 351764 - RNA, 21 nt, Human
cuuacaucaaauccucccaaa

SEQ ID NO: 351765 - RNA, 22 nt, Human
cuuacaucaaauccucccaaaa

SEQ ID NO: 351766 - RNA, 19 nt, Human
cuucuugcucugcuguggu

SEQ ID NO: 351767 - RNA, 21 nt, Human
gaaaaagacaaucauuuugua

SEQ ID NO: 351768 - RNA, 21 nt, Human
gaaauccccuggcagccuucc

SEQ ID NO: 351769 - RNA, 18 nt, Human
gaccggcugcucccagcc

SEQ ID NO: 351770 - RNA, 28 nt, Human
gcacaauuccaaagguaaagggaacgcc

SEQ ID NO: 351771 - RNA, 28 nt, Human
gcggacuccuuucccgugccgagguucu

SEQ ID NO: 351772 - RNA, 20 nt, Human
gcuuucaucuuugagucaua

SEQ ID NO: 351773 - RNA, 21 nt, Human
gggagggcagaggagaggaag

SEQ ID NO: 351774 - RNA, 26 nt, Human
gggcagagcggcgggagcgcgcgauu

SEQ ID NO: 351775 - RNA, 18 nt, Human
gguaaaauagaaaaagga

SEQ ID NO: 351776 - RNA, 19 nt, Human
gguaucuggagagcagcgc

SEQ ID NO: 351777 - RNA, 19 nt, Human
guggcaauuccagggaaug

SEQ ID NO: 351778 - RNA, 21 nt, Human
uaaaauacuguuaacaucuuu

SEQ ID NO: 351779 - RNA, 24 nt, Human
uaaaauggauagucugacacuuaa

SEQ ID NO: 351780 - RNA, 25 nt, Human
uaaagcaaguguaaaauggauaguc

SEQ ID NO: 351781 - RNA, 18 nt, Human
uaaaguaaacacuguucc

SEQ ID NO: 351782 - RNA, 23 nt, Human
uaacuuacaucaaauccucccaa

SEQ ID NO: 351783 - RNA, 20 nt, Human
uaagacuacaaaaguuacca

SEQ ID NO: 351784 - RNA, 18 nt, Human
uaagggcacaagaaggga

SEQ ID NO: 351785 - RNA, 18 nt, Human
uacagcagugacaaaaua

SEQ ID NO: 351786 - RNA, 22 nt, Human
uacauagaaucagaggcacuuc

SEQ ID NO: 351787 - RNA, 20 nt, Human
uacccucauaacuccaucuc

SEQ ID NO: 351788 - RNA, 18 nt, Human
uagauaccaacaucagga

SEQ ID NO: 351789 - RNA, 24 nt, Human
uagauaccaacaucaggaaagccc

SEQ ID NO: 351790 - RNA, 23 nt, Human
ucaaauccucccaaaagaagauc

SEQ ID NO: 351791 - RNA, 24 nt, Human
ucacucuuuccagccacuucaauc

SEQ ID NO: 351792 - RNA, 18 nt, Human
ucagaggcacuucaaagg

SEQ ID NO: 351793 - RNA, 20 nt, Human
ucaguaguuuuuauguuccc

SEQ ID NO: 351794 - RNA, 22 nt, Human
ucauaggaaaaagacaaucauu

SEQ ID NO: 351795 - RNA, 23 nt, Human
uccaaagacaaauugcaccauga

SEQ ID NO: 351796 - RNA, 21 nt, Human
uccaauaucucuaccuagaca

SEQ ID NO: 351797 - RNA, 21 nt, Human
uccccaggcaucacucuuucc

SEQ ID NO: 351798 - RNA, 22 nt, Human
uccccaggcaucacucuuucca

SEQ ID NO: 351799 - RNA, 18 nt, Human
uccccagggaccggcugc

SEQ ID NO: 351800 - RNA, 23 nt, Human
uccccagggaccggcugcuccca

SEQ ID NO: 351801 - RNA, 18 nt, Human
uccccggguccuccuccu

SEQ ID NO: 351802 - RNA, 19 nt, Human
ucccgccgcccgcagcugc

SEQ ID NO: 351803 - RNA, 20 nt, Human
ucccugccuacccuccuucc

SEQ ID NO: 351804 - RNA, 20 nt, Human
uccgcgcggcuggagcuccg

SEQ ID NO: 351805 - RNA, 18 nt, Human
uccuaaagcagugagacc

SEQ ID NO: 351806 - RNA, 18 nt, Human
uccuccuucuccuccucu

SEQ ID NO: 351807 - RNA, 22 nt, Human
uccucuggcucccucccuccug

SEQ ID NO: 351808 - RNA, 23 nt, Human
uccugcgccugcucccgccgccc

SEQ ID NO: 351809 - RNA, 21 nt, Human
ucgggggcgcucgcuuccucc

SEQ ID NO: 351810 - RNA, 21 nt, Human
ucucuaccuagacacacacag

SEQ ID NO: 351811 - RNA, 21 nt, Human
ucuguaauugagggacacagc

SEQ ID NO: 351812 - RNA, 21 nt, Human
ugaaaaguucagugaucucau

SEQ ID NO: 351813 - RNA, 24 nt, Human
ugaaauguuuuaaauacaauggga

SEQ ID NO: 351814 - RNA, 22 nt, Human
ugcaaccagggcaaaacgaagc

SEQ ID NO: 351815 - RNA, 19 nt, Human
uggguuugcugaggcuugu

SEQ ID NO: 351816 - RNA, 20 nt, Human
ugucuauucauaagacuaca

SEQ ID NO: 351817 - RNA, 22 nt, Human
uuaaaccaauuccaugaacauc

SEQ ID NO: 351818 - RNA, 23 nt, Human
uuccaaagacaaauugcaccaug

SEQ ID NO: 351819 - RNA, 18 nt, Human
uuccccaggcaucacucu

SEQ ID NO: 351820 - RNA, 24 nt, Human
uugcaaaucugcccaaagcuacag

SEQ ID NO: 351821 - RNA, 20 nt, Human
uugcuuuacagcagugacaa

SEQ ID NO: 351822 - RNA, 20 nt, Human
uuguucuaaagaaauacaug

SEQ ID NO: 351823 - RNA, 18 nt, Human
uuuaaaccaauuccauga

SEQ ID NO: 351824 - RNA, 23 nt, Human
uuuccuggcacggauauucccag

SEQ ID NO: 351825 - RNA, 27 nt, Human
uuuugcuccuccgcggacuccuuuccc

SEQ ID NO: 351826 - RNA, 21 nt, Human
aaaaaaaacuauguuucggca

SEQ ID NO: 351827 - RNA, 20 nt, Human
aaaaaaacgaacaaacacua

SEQ ID NO: 351828 - RNA, 24 nt, Human
aaaacaaaaacaaaaaccauuaaa

SEQ ID NO: 351829 - RNA, 27 nt, Human
aaaauagauuuacaaauauucuauaaa

SEQ ID NO: 351830 - RNA, 21 nt, Human
aaacaaaaacaaaaacaaaaa

SEQ ID NO: 351831 - RNA, 23 nt, Human
aaacaaaaacaaaaaccauuaaa

SEQ ID NO: 351832 - RNA, 26 nt, Human
aaacaaaaacaaaaaccauuaaauac

SEQ ID NO: 351833 - RNA, 19 nt, Human
aaacaaacaaaaacaaaaa

SEQ ID NO: 351834 - RNA, 21 nt, Human
aaacaaacaaaaacaaaaaca

SEQ ID NO: 351835 - RNA, 19 nt, Human
aaacagaaggcagaaaggg

SEQ ID NO: 351836 - RNA, 19 nt, Human
aaacuggaaacaccacacu

SEQ ID NO: 351837 - RNA, 21 nt, Human
aaauucacucacucaaccacc

SEQ ID NO: 351838 - RNA, 27 nt, Human
aacaaaaacaaaaacaaaaaccauuaa

SEQ ID NO: 351839 - RNA, 25 nt, Human
aaccaaagaacaccagcuggguccc

SEQ ID NO: 351840 - RNA, 23 nt, Human
aagaaacaaacaaaaacaaaaac

SEQ ID NO: 351841 - RNA, 19 nt, Human
aagaacacagacacaaaua

SEQ ID NO: 351842 - RNA, 24 nt, Human
aagagaacaaagaaagaagagggg

SEQ ID NO: 351843 - RNA, 19 nt, Human
aagaggaagcagcuucaga

SEQ ID NO: 351844 - RNA, 24 nt, Human
aagaggacccagccagcugggacc

SEQ ID NO: 351845 - RNA, 19 nt, Human
aagcaaaccaaagaacacc

SEQ ID NO: 351846 - RNA, 22 nt, Human
aagcagcuucagaaagggccaa

SEQ ID NO: 351847 - RNA, 19 nt, Human
aaggguagaaccauccacc

SEQ ID NO: 351848 - RNA, 23 nt, Human
acaaacaaaaacaaaaacaaaaa

SEQ ID NO: 351849 - RNA, 24 nt, Human
acaaacaaaaacaaaaacaaaaac

SEQ ID NO: 351850 - RNA, 24 nt, Human
acaaaggaaugaacaguuaaaaaa

SEQ ID NO: 351851 - RNA, 21 nt, Human
acacaacauccguuagccccc

SEQ ID NO: 351852 - RNA, 23 nt, Human
acacagacacaaauaucccacca

SEQ ID NO: 351853 - RNA, 20 nt, Human
acagggcaagagaaaaaggc

SEQ ID NO: 351854 - RNA, 20 nt, Human
acaugaaaauucacucacuc

SEQ ID NO: 351855 - RNA, 20 nt, Human
accaaggaagaauaauaaua

SEQ ID NO: 351856 - RNA, 23 nt, Human
acccagcaacaucaaacuggaaa

SEQ ID NO: 351857 - RNA, 21 nt, Human
acuauguuucggcaaaagcua

SEQ ID NO: 351858 - RNA, 21 nt, Human
acucaaccacccagcaacauc

SEQ ID NO: 351859 - RNA, 21 nt, Human
acucucagcucuuuuccccau

SEQ ID NO: 351860 - RNA, 24 nt, Human
agaaaaaggcaaaaacccacccag

SEQ ID NO: 351861 - RNA, 22 nt, Human
agaaacaaacaaaaacaaaaac

SEQ ID NO: 351862 - RNA, 24 nt, Human
agaaacaaacaaaaacaaaaacaa

SEQ ID NO: 351863 - RNA, 19 nt, Human
agaagaggggaagggaggc

SEQ ID NO: 351864 - RNA, 18 nt, Human
agaauggccccagguaua

SEQ ID NO: 351865 - RNA, 18 nt, Human
agacaaugucucuucuga

SEQ ID NO: 351866 - RNA, 19 nt, Human
agagauauacacucugcac

SEQ ID NO: 351867 - RNA, 18 nt, Human
agauauacacucugcaca

SEQ ID NO: 351868 - RNA, 22 nt, Human
agccuagaauggccccagguau

SEQ ID NO: 351869 - RNA, 19 nt, Human
agcuucagaaagggccaag

SEQ ID NO: 351870 - RNA, 23 nt, Human
aggaaggccacugggggaggacc

SEQ ID NO: 351871 - RNA, 22 nt, Human
aggaggagacacgaccugccca

SEQ ID NO: 351872 - RNA, 21 nt, Human
aggaggugcucacuccaacac

SEQ ID NO: 351873 - RNA, 19 nt, Human
aggcaaaaacccacccagc

SEQ ID NO: 351874 - RNA, 19 nt, Human
aggccaugaggagcggggu

SEQ ID NO: 351875 - RNA, 25 nt, Human
agggaggaaggccacugggggagga

SEQ ID NO: 351876 - RNA, 26 nt, Human
agggaggaaggccacugggggaggac

SEQ ID NO: 351877 - RNA, 21 nt, Human
agggcaacugaggcccaaagc

SEQ ID NO: 351878 - RNA, 22 nt, Human
agguauauaccacagagauucc

SEQ ID NO: 351879 - RNA, 22 nt, Human
aguaacagacaacagugugaga

SEQ ID NO: 351880 - RNA, 20 nt, Human
aguuccuucccccauuuccu

SEQ ID NO: 351881 - RNA, 24 nt, Human
aucagcccucccccauuccccccc

SEQ ID NO: 351882 - RNA, 21 nt, Human
caaaaacaaaaacaaaaacca

SEQ ID NO: 351883 - RNA, 18 nt, Human
caaaauccccuggcuucc

SEQ ID NO: 351884 - RNA, 23 nt, Human
caaacaaaaacaaaaacaaaaac

SEQ ID NO: 351885 - RNA, 24 nt, Human
caaacaaaaacaaaaacaaaaacc

SEQ ID NO: 351886 - RNA, 28 nt, Human
caaacaaaaacaaaaacaaaaaccauua

SEQ ID NO: 351887 - RNA, 19 nt, Human
caacaucaaacuggaaaca

SEQ ID NO: 351888 - RNA, 20 nt, Human
caacaucaaacuggaaacac

SEQ ID NO: 351889 - RNA, 22 nt, Human
caacugaggcccaaagcucaag

SEQ ID NO: 351890 - RNA, 26 nt, Human
caagaaacaaacaaaaacaaaaacaa

SEQ ID NO: 351891 - RNA, 23 nt, Human
caagaagaaccuggcagaacagu

SEQ ID NO: 351892 - RNA, 21 nt, Human
caagagaaaaaggcaaaaacc

SEQ ID NO: 351893 - RNA, 25 nt, Human
caagagaaaaaggcaaaaacccacc

SEQ ID NO: 351894 - RNA, 24 nt, Human
caaguacccauuuacagaaacauc

SEQ ID NO: 351895 - RNA, 21 nt, Human
cacaaauaucccaccaucccc

SEQ ID NO: 351896 - RNA, 28 nt, Human
cacagcccuagagccugaagaaagcaaa

SEQ ID NO: 351897 - RNA, 19 nt, Human
caccacacuauuuccugaa

SEQ ID NO: 351898 - RNA, 27 nt, Human
cacccagcaacaucaaacuggaaacac

SEQ ID NO: 351899 - RNA, 22 nt, Human
caccucggcaccuccacacucu

SEQ ID NO: 351900 - RNA, 21 nt, Human
cagaaacaucucaaggugcag

SEQ ID NO: 351901 - RNA, 24 nt, Human
cagaaggcagaaaggguagaacca

SEQ ID NO: 351902 - RNA, 20 nt, Human
cagacacaaauaucccacca

SEQ ID NO: 351903 - RNA, 21 nt, Human
cagcucuuuuccccauccucc

SEQ ID NO: 351904 - RNA, 22 nt, Human
cagcucuuuuccccauccuccc

SEQ ID NO: 351905 - RNA, 21 nt, Human
cagcuucagaaagggccaagg

SEQ ID NO: 351906 - RNA, 21 nt, Human
caguagccaugaacuacauac

SEQ ID NO: 351907 - RNA, 18 nt, Human
cagugugagaggugccua

SEQ ID NO: 351908 - RNA, 21 nt, Human
caucaaacuggaaacaccaca

SEQ ID NO: 351909 - RNA, 23 nt, Human
ccaagccagugcccacaagcaag

SEQ ID NO: 351910 - RNA, 18 nt, Human
ccaccaggccuccccucu

SEQ ID NO: 351911 - RNA, 20 nt, Human
ccacugggggaggaccucca

SEQ ID NO: 351912 - RNA, 19 nt, Human
ccacuggggucaggaggag

SEQ ID NO: 351913 - RNA, 18 nt, Human
ccagggagacaagggucg

SEQ ID NO: 351914 - RNA, 20 nt, Human
cccaaagcucaagaagaacc

SEQ ID NO: 351915 - RNA, 23 nt, Human
cccaaggggaagggcacuggggg

SEQ ID NO: 351916 - RNA, 22 nt, Human
cccagccagcugggacccuggg

SEQ ID NO: 351917 - RNA, 21 nt, Human
cccagguauauaccacagaga

SEQ ID NO: 351918 - RNA, 21 nt, Human
ccccauuccccccccccuacc

SEQ ID NO: 351919 - RNA, 21 nt, Human
cccccaaauaaaaaagguuga

SEQ ID NO: 351920 - RNA, 25 nt, Human
cccccauuccccccccccuacccag

SEQ ID NO: 351921 - RNA, 19 nt, Human
ccccccccuacccagggag

SEQ ID NO: 351922 - RNA, 22 nt, Human
cccccuggcuucagaggagcuc

SEQ ID NO: 351923 - RNA, 20 nt, Human
ccccuggcuucccuccccgc

SEQ ID NO: 351924 - RNA, 19 nt, Human
cccuacccuaauguccacc

SEQ ID NO: 351925 - RNA, 23 nt, Human
cccuacccuaauguccacccuuc

SEQ ID NO: 351926 - RNA, 27 nt, Human
cccuacccuaauguccacccuucaaaa

SEQ ID NO: 351927 - RNA, 19 nt, Human
ccgcuaaaguccaagccag

SEQ ID NO: 351928 - RNA, 25 nt, Human
ccggcugugaaaggaagggaggaag

SEQ ID NO: 351929 - RNA, 25 nt, Human
cgaacaaacacuaaaaauagauuua

SEQ ID NO: 351930 - RNA, 18 nt, Human
cuaaagcuauaaauagua

SEQ ID NO: 351931 - RNA, 24 nt, Human
cuaauguccacccuucaaaauccc

SEQ ID NO: 351932 - RNA, 22 nt, Human
cuaguuccuucccccauuuccu

SEQ ID NO: 351933 - RNA, 22 nt, Human
cuccacacaacauccguuagcc

SEQ ID NO: 351934 - RNA, 19 nt, Human
cuccacacucuugcccagg

SEQ ID NO: 351935 - RNA, 19 nt, Human
cucucauuuucaagaaaca

SEQ ID NO: 351936 - RNA, 23 nt, Human
cugccagggcaacugaggcccaa

SEQ ID NO: 351937 - RNA, 20 nt, Human
cugggggcagaagaggaccc

SEQ ID NO: 351938 - RNA, 26 nt, Human
cuucaaaauccccuggcuucccuccc

SEQ ID NO: 351939 - RNA, 21 nt, Human
cuucaaagguaaucagagcug

SEQ ID NO: 351940 - RNA, 20 nt, Human
gaacacagacacaaauaucc

SEQ ID NO: 351941 - RNA, 18 nt, Human
gaaccuggcagaacagua

SEQ ID NO: 351942 - RNA, 19 nt, Human
gaagaaagcaaaccaaaga

SEQ ID NO: 351943 - RNA, 25 nt, Human
gaccucacccuacccuaauguccac

SEQ ID NO: 351944 - RNA, 22 nt, Human
gagaaugaagacaccucggcac

SEQ ID NO: 351945 - RNA, 21 nt, Human
gaggagacacgaccugcccag

SEQ ID NO: 351946 - RNA, 23 nt, Human
gcacagcccuagagccugaagaa

SEQ ID NO: 351947 - RNA, 18 nt, Human
gccagcugggacccuggg

SEQ ID NO: 351948 - RNA, 21 nt, Human
gcccaaagcucaagaagaacc

SEQ ID NO: 351949 - RNA, 22 nt, Human
gcccaaggggaagggcacuggg

SEQ ID NO: 351950 - RNA, 18 nt, Human
gccucaucagcccucccc

SEQ ID NO: 351951 - RNA, 19 nt, Human
gccucaucagcccuccccc

SEQ ID NO: 351952 - RNA, 22 nt, Human
gccuucagaaaggccaaguuga

SEQ ID NO: 351953 - RNA, 18 nt, Human
ggagacaagggucguccc

SEQ ID NO: 351954 - RNA, 25 nt, Human
ggcaccaggaacagggcaagagaaa

SEQ ID NO: 351955 - RNA, 18 nt, Human
ggccacuggugcagcaag

SEQ ID NO: 351956 - RNA, 22 nt, Human
gggaagggcacugggggcagaa

SEQ ID NO: 351957 - RNA, 24 nt, Human
ggggaagggcacugggggcagaag

SEQ ID NO: 351958 - RNA, 21 nt, Human
gucccagacaacaggccccag

SEQ ID NO: 351959 - RNA, 21 nt, Human
uaaaaaaaaaacuggggaagg

SEQ ID NO: 351960 - RNA, 26 nt, Human
uaaauaguaaaaaaaaaaaaaaaaaa

SEQ ID NO: 351961 - RNA, 28 nt, Human
uaagaacacagacacaaauaucccacca

SEQ ID NO: 351962 - RNA, 28 nt, Human
uaagaacacagacacaaauuggagaccc

SEQ ID NO: 351963 - RNA, 22 nt, Human
uaauauauuauaagaacacaga

SEQ ID NO: 351964 - RNA, 20 nt, Human
uaccagguuuuauuaucuuu

SEQ ID NO: 351965 - RNA, 28 nt, Human
uauaaaaaaaaaacuggggaagggguuu

SEQ ID NO: 351966 - RNA, 18 nt, Human
uauaaauaguaaaaaaaa

SEQ ID NO: 351967 - RNA, 28 nt, Human
uaucaaaaaaaaucaguaacagacaaca

SEQ ID NO: 351968 - RNA, 23 nt, Human
ucaaaaaaaaucaguaacagaca

SEQ ID NO: 351969 - RNA, 18 nt, Human
ucaaacuggaaacaccac

SEQ ID NO: 351970 - RNA, 23 nt, Human
ucaaccacccagcaacaucaaac

SEQ ID NO: 351971 - RNA, 19 nt, Human
ucagaaggcaccaggaaca

SEQ ID NO: 351972 - RNA, 22 nt, Human
ucagcccucccccauucccccc

SEQ ID NO: 351973 - RNA, 18 nt, Human
ucaguacaguagccauga

SEQ ID NO: 351974 - RNA, 22 nt, Human
uccaaaagucacuugaaagagc

SEQ ID NO: 351975 - RNA, 24 nt, Human
uccaccucaacuauuccagcccca

SEQ ID NO: 351976 - RNA, 18 nt, Human
uccagccccaucagaagg

SEQ ID NO: 351977 - RNA, 21 nt, Human
uccccucucaggagagggagg

SEQ ID NO: 351978 - RNA, 21 nt, Human
uccccuggcuucccuccccga

SEQ ID NO: 351979 - RNA, 22 nt, Human
ugagaggugccuacagaggagg

SEQ ID NO: 351980 - RNA, 26 nt, Human
ugcaacugaggaaggaauuuuuaauc

SEQ ID NO: 351981 - RNA, 22 nt, Human
ugcccaggcuaagccaccaggc

SEQ ID NO: 351982 - RNA, 19 nt, Human
uggauagcacagcccuaga

SEQ ID NO: 351983 - RNA, 21 nt, Human
uggcagaacaguagaagacaa

SEQ ID NO: 351984 - RNA, 22 nt, Human
uggcagagagaccggcugugaa

SEQ ID NO: 351985 - RNA, 20 nt, Human
uggggucaggaggagacacg

SEQ ID NO: 351986 - RNA, 23 nt, Human
uggggucaggaggagacacgacc

SEQ ID NO: 351987 - RNA, 23 nt, Human
ugggucccaaacagaaggcagaa

SEQ ID NO: 351988 - RNA, 19 nt, Human
uggguugcaguggugacgg

SEQ ID NO: 351989 - RNA, 23 nt, Human
uguccacccuucaaaauccccug

SEQ ID NO: 351990 - RNA, 18 nt, Human
uuccccauccuccccccc

SEQ ID NO: 351991 - RNA, 21 nt, Human
uuccccauccucccccccaaa

SEQ ID NO: 351992 - RNA, 23 nt, Human
uuccuggcagagagaccggcugu

SEQ ID NO: 351993 - RNA, 23 nt, Human
uugaccucacccuacccuaaugu

SEQ ID NO: 351994 - RNA, 24 nt, Human
uuuccccauccucccccccaaaua

SEQ ID NO: 351995 - RNA, 20 nt, Human
uuuuccccauccuccccccc

SEQ ID NO: 351996 - RNA, 18 nt, Human
aacauugugcguuaacag

SEQ ID NO: 351997 - RNA, 20 nt, Human
acacagccacuauuuucugu

SEQ ID NO: 351998 - RNA, 18 nt, Human
agagagaaaauaggggga

SEQ ID NO: 351999 - RNA, 20 nt, Human
agcuaagagggauguuuccc

SEQ ID NO: 352000 - RNA, 19 nt, Human
auaaaaagcaucugccccu

SEQ ID NO: 352001 - RNA, 18 nt, Human
aucccaaggugaggcagc

SEQ ID NO: 352002 - RNA, 22 nt, Human
cauugugcguuaacaguggcuc

SEQ ID NO: 352003 - RNA, 18 nt, Human
ccaaggaacuuguggcag

SEQ ID NO: 352004 - RNA, 21 nt, Human
ccaaggugaggcagcaacaga

SEQ ID NO: 352005 - RNA, 25 nt, Human
cggagccccaaaucuucgaagaaaa

SEQ ID NO: 352006 - RNA, 19 nt, Human
cugaagcuuccaaacacag

SEQ ID NO: 352007 - RNA, 19 nt, Human
cugcccaaggaacuugugg

SEQ ID NO: 352008 - RNA, 21 nt, Human
gaaagaacugacccacgcaag

SEQ ID NO: 352009 - RNA, 22 nt, Human
gugaggcagcaacagaugucug

SEQ ID NO: 352010 - RNA, 22 nt, Human
uaacuguaucgcggagccccaa

SEQ ID NO: 352011 - RNA, 19 nt, Human
ucaauggugacauggccac

SEQ ID NO: 352012 - RNA, 22 nt, Human
ucagaaagaacugacccacgca

SEQ ID NO: 352013 - RNA, 20 nt, Human
uccaugaugccaagcuccug

SEQ ID NO: 352014 - RNA, 21 nt, Human
ucccucaguuuguuuuaucag

SEQ ID NO: 352015 - RNA, 21 nt, Human
uccugaagaguaaaaguuucc

SEQ ID NO: 352016 - RNA, 20 nt, Human
ugacauggccacugcccaag

SEQ ID NO: 352017 - RNA, 26 nt, Human
ugccaagcuccugaagaguaaaaguu

SEQ ID NO: 352018 - RNA, 18 nt, Human
ugcccaaggaacuugugg

SEQ ID NO: 352019 - RNA, 18 nt, Human
uggagagagaaaauaggg

SEQ ID NO: 352020 - RNA, 25 nt, Human
uggagagagaaaauagggggaaaau

SEQ ID NO: 352021 - RNA, 27 nt, Human
uuuucuguuguauaucuucaucucaau

SEQ ID NO: 352022 - RNA, 23 nt, Human
acacaugcaugagcuauuauaca

SEQ ID NO: 352023 - RNA, 21 nt, Human
agagcugugcccaguuuuauc

SEQ ID NO: 352024 - RNA, 22 nt, Human
agccacuaggugccaaucuccc

SEQ ID NO: 352025 - RNA, 21 nt, Human
caauguacuccuucuucccca

SEQ ID NO: 352026 - RNA, 24 nt, Human
cacaagaaugaagcaagggacaaa

SEQ ID NO: 352027 - RNA, 19 nt, Human
cacuaggugccaaucuccc

SEQ ID NO: 352028 - RNA, 21 nt, Human
cacuggguuccuggcaagcuc

SEQ ID NO: 352029 - RNA, 25 nt, Human
ccacuggguuccuggcaagcuccca

SEQ ID NO: 352030 - RNA, 24 nt, Human
ccagagugcagaagcguaugaaga

SEQ ID NO: 352031 - RNA, 22 nt, Human
cucccuggccacuggguuccug

SEQ ID NO: 352032 - RNA, 23 nt, Human
cucccuggccacuggguuccugg

SEQ ID NO: 352033 - RNA, 21 nt, Human
cugcuguugccgccgcgcagu

SEQ ID NO: 352034 - RNA, 27 nt, Human
gaagacaguuaugacauggacacaugc

SEQ ID NO: 352035 - RNA, 18 nt, Human
ggguuccuggcaagcucc

SEQ ID NO: 352036 - RNA, 21 nt, Human
uaugacauggacacaugcaug

SEQ ID NO: 352037 - RNA, 26 nt, Human
ucucacaagaaugaagcaagggacaa

SEQ ID NO: 352038 - RNA, 19 nt, Human
ucugcuguugccgccgcgc

SEQ ID NO: 352039 - RNA, 22 nt, Human
ucugcuguugccgccgcgcagu

SEQ ID NO: 352040 - RNA, 24 nt, Human
ugauucugucaucaccacaucuug

SEQ ID NO: 352041 - RNA, 26 nt, Human
uggacacaugcaugagcuauuauaca

SEQ ID NO: 352042 - RNA, 21 nt, Human
cccuuaaccccgaggucgcuc

SEQ ID NO: 352043 - RNA, 25 nt, Human
ccugacgucagccccaccccuuaac

SEQ ID NO: 352044 - RNA, 18 nt, Human
cgaggucgcucuccgccg

SEQ ID NO: 352045 - RNA, 18 nt, Human
cgcucuccgccggugucc

SEQ ID NO: 352046 - RNA, 19 nt, Human
cgcucuccgccgguguccc

SEQ ID NO: 352047 - RNA, 19 nt, Human
ucgcucuccgccggugucc

SEQ ID NO: 352048 - RNA, 21 nt, Human
uggaaaaccaagaucuuuaaa

SEQ ID NO: 352049 - RNA, 22 nt, Human
uggaaaaccaagaucuuuaaag

SEQ ID NO: 352050 - RNA, 27 nt, Human
uggcuccugacgucagccccaccccuu

SEQ ID NO: 352051 - RNA, 21 nt, Human
aaaagcagcugcuccaagaac

SEQ ID NO: 352052 - RNA, 23 nt, Human
aaaauacaaaaggaucuaaacaa

SEQ ID NO: 352053 - RNA, 23 nt, Human
aaacaaggggaaaacuagacccu

SEQ ID NO: 352054 - RNA, 23 nt, Human
aaagccucaccaacccacccccc

SEQ ID NO: 352055 - RNA, 18 nt, Human
aacaaauaaggagaacuu

SEQ ID NO: 352056 - RNA, 21 nt, Human
aacccggcccauccccagggc

SEQ ID NO: 352057 - RNA, 23 nt, Human
aacccggcccauccccagggcag

SEQ ID NO: 352058 - RNA, 19 nt, Human
aacugcuucuaggccgaga

SEQ ID NO: 352059 - RNA, 22 nt, Human
aagaaaaagaaauaaccauuaa

SEQ ID NO: 352060 - RNA, 20 nt, Human
aagccagcaacccacaggca

SEQ ID NO: 352061 - RNA, 25 nt, Human
aagcccaauauggagagagaauaac

SEQ ID NO: 352062 - RNA, 21 nt, Human
aagccucaccaacccaccccc

SEQ ID NO: 352063 - RNA, 24 nt, Human
aagccucaccaacccaccccccaa

SEQ ID NO: 352064 - RNA, 21 nt, Human
acaggcaguggcacccaaagc

SEQ ID NO: 352065 - RNA, 24 nt, Human
acaggcaguggcacccaaagccuc

SEQ ID NO: 352066 - RNA, 27 nt, Human
acccaaagccucaccaacccacccccc

SEQ ID NO: 352067 - RNA, 19 nt, Human
acccaccccccaacccggc

SEQ ID NO: 352068 - RNA, 22 nt, Human
agaaacaaggggaaaacuagac

SEQ ID NO: 352069 - RNA, 23 nt, Human
agauaagaaugacaaacagaaag

SEQ ID NO: 352070 - RNA, 18 nt, Human
aggagccaaaagcugacc

SEQ ID NO: 352071 - RNA, 20 nt, Human
auuuucuccucaaaagcagc

SEQ ID NO: 352072 - RNA, 20 nt, Human
caagaaaaagaaauaaccau

SEQ ID NO: 352073 - RNA, 27 nt, Human
caccaacccaccccccaacccggccca

SEQ ID NO: 352074 - RNA, 18 nt, Human
caccccccaacccggccc

SEQ ID NO: 352075 - RNA, 23 nt, Human
cagaaagaugggugaauguaaua

SEQ ID NO: 352076 - RNA, 23 nt, Human
cagaagccacagagcuggcauug

SEQ ID NO: 352077 - RNA, 24 nt, Human
cagcaacccacaggcaguggcacc

SEQ ID NO: 352078 - RNA, 18 nt, Human
caguuucagaaaaaaagg

SEQ ID NO: 352079 - RNA, 25 nt, Human
ccaaaagcugacccucagcacaaau

SEQ ID NO: 352080 - RNA, 18 nt, Human
ccaaagccucaccaaccc

SEQ ID NO: 352081 - RNA, 24 nt, Human
ccaacccaccccccaacccggccc

SEQ ID NO: 352082 - RNA, 24 nt, Human
ccaggcuggagauaagaaugacaa

SEQ ID NO: 352083 - RNA, 24 nt, Human
cccaaagccucaccaacccacccc

SEQ ID NO: 352084 - RNA, 25 nt, Human
cccaaagccucaccaacccaccccc

SEQ ID NO: 352085 - RNA, 24 nt, Human
cccacaggcaguggcacccaaagc

SEQ ID NO: 352086 - RNA, 24 nt, Human
ccccccaacccggcccaguccgag

SEQ ID NO: 352087 - RNA, 22 nt, Human
cccucagcacaaaucaaagccc

SEQ ID NO: 352088 - RNA, 24 nt, Human
cccucagcacaaaucaaagcccaa

SEQ ID NO: 352089 - RNA, 19 nt, Human
ccucaaaagcagcugcucc

SEQ ID NO: 352090 - RNA, 19 nt, Human
ccucaccaacccacccccc

SEQ ID NO: 352091 - RNA, 23 nt, Human
ccucaucuuuagaaacaagggga

SEQ ID NO: 352092 - RNA, 25 nt, Human
ccucuagcugggacagaccgggguc

SEQ ID NO: 352093 - RNA, 25 nt, Human
cgagaguaggcaagcugugggcaaa

SEQ ID NO: 352094 - RNA, 21 nt, Human
cuaauuccccuccacccccac

SEQ ID NO: 352095 - RNA, 19 nt, Human
cuacugcuccaaggagauc

SEQ ID NO: 352096 - RNA, 23 nt, Human
cucaccaacccaccccccaaccc

SEQ ID NO: 352097 - RNA, 19 nt, Human
cuucuaggccgagaguagg

SEQ ID NO: 352098 - RNA, 23 nt, Human
gcaagcugugggcaaaaaagggg

SEQ ID NO: 352099 - RNA, 21 nt, Human
gcacccaaagccucaccaacc

SEQ ID NO: 352100 - RNA, 23 nt, Human
uaauuccccuccacccccaccuc

SEQ ID NO: 352101 - RNA, 24 nt, Human
uacaaaaggaucuaaacaaauaag

SEQ ID NO: 352102 - RNA, 21 nt, Human
uaccagguacucuacugcucc

SEQ ID NO: 352103 - RNA, 23 nt, Human
uacucuacugcuccaaggagauc

SEQ ID NO: 352104 - RNA, 24 nt, Human
uagcugggacagacuaauuccccu

SEQ ID NO: 352105 - RNA, 20 nt, Human
ucagaaaaaaaggguacauu

SEQ ID NO: 352106 - RNA, 21 nt, Human
ucagcacaaaucaaagcccaa

SEQ ID NO: 352107 - RNA, 20 nt, Human
uccaagaaaaagaaauaacc

SEQ ID NO: 352108 - RNA, 21 nt, Human
uccaaggagaucugaaaauac

SEQ ID NO: 352109 - RNA, 18 nt, Human
ugaugcugggagccuccu

SEQ ID NO: 352110 - RNA, 23 nt, Human
ugugggcaaaaaaggggaguuuu

SEQ ID NO: 352111 - RNA, 21 nt, Human
uguguaggaagaugaugcugg

SEQ ID NO: 352112 - RNA, 21 nt, Human
uguuaauggccugggcucuca

SEQ ID NO: 352113 - RNA, 21 nt, Human
uuaagccagcaacccacaggc

SEQ ID NO: 352114 - RNA, 24 nt, Human
uuucccaggcuggagauaagaaug

SEQ ID NO: 352115 - RNA, 24 nt, Human
uuugcagccaccucaucuuuagaa

SEQ ID NO: 352116 - RNA, 22 nt, Human
aaagaggcauacaucaauucuu

SEQ ID NO: 352117 - RNA, 21 nt, Human
acaaagcagaggcaaagaggc

SEQ ID NO: 352118 - RNA, 24 nt, Human
caaggcaaauauggaaguuugauc

SEQ ID NO: 352119 - RNA, 20 nt, Human
caccagaauauagaacucag

SEQ ID NO: 352120 - RNA, 21 nt, Human
uaagagaagaaggcuguccac

SEQ ID NO: 352121 - RNA, 20 nt, Human
uagaacucagucucacaacu

SEQ ID NO: 352122 - RNA, 20 nt, Human
uauucagaagcacuccaagc

SEQ ID NO: 352123 - RNA, 20 nt, Human
uauuuugauacaucuacggg

SEQ ID NO: 352124 - RNA, 21 nt, Human
ucaaaguaugaagucaaaaag

SEQ ID NO: 352125 - RNA, 20 nt, Human
ugacaaagcagaggcaaaga

SEQ ID NO: 352126 - RNA, 21 nt, Human
ugacaaagcagaggcaaagga

SEQ ID NO: 352127 - RNA, 20 nt, Human
ugugauuaagagaagaaggc

SEQ ID NO: 352128 - RNA, 21 nt, Human
uucaaaguaugaagucaaaaa

SEQ ID NO: 352129 - RNA, 24 nt, Human
uuccucucaaaccuuuuccucaaa

SEQ ID NO: 352130 - RNA, 22 nt, Human
uuuaagagauugauaaauugaa

SEQ ID NO: 352131 - RNA, 19 nt, Human
uuuucgaaaauuaaacacu

SEQ ID NO: 352132 - RNA, 22 nt, Human
aagaguuuguucuucagcccug

SEQ ID NO: 352133 - RNA, 22 nt, Human
acgcaggagugggugagucgug

SEQ ID NO: 352134 - RNA, 28 nt, Human
caaguaaacaaccaacugaucaucucuu

SEQ ID NO: 352135 - RNA, 21 nt, Human
cagaguacgguggaaauacaa

SEQ ID NO: 352136 - RNA, 18 nt, Human
ccaggauauacgaacuuc

SEQ ID NO: 352137 - RNA, 21 nt, Human
cugggagcugcuucuugcucg

SEQ ID NO: 352138 - RNA, 19 nt, Human
gagcacagcacaggauggc

SEQ ID NO: 352139 - RNA, 18 nt, Human
gaguccgugacaggucgc

SEQ ID NO: 352140 - RNA, 22 nt, Human
gaguuuguucuucagcccuggc

SEQ ID NO: 352141 - RNA, 23 nt, Human
guauauuauauaucaacacuuaa

SEQ ID NO: 352142 - RNA, 23 nt, Human
guuggagcucagggcaccagucu

SEQ ID NO: 352143 - RNA, 19 nt, Human
uaaaacaaugguuucuagc

SEQ ID NO: 352144 - RNA, 23 nt, Human
uaaacaaccaacugaucaucucu

SEQ ID NO: 352145 - RNA, 25 nt, Human
uaaacaaccaacugaucaucucuuu

SEQ ID NO: 352146 - RNA, 23 nt, Human
uaauaauuagauucacagaguac

SEQ ID NO: 352147 - RNA, 26 nt, Human
uaauuagauucacagaguacggugga

SEQ ID NO: 352148 - RNA, 21 nt, Human
uaggaugaggcccgcugguuu

SEQ ID NO: 352149 - RNA, 24 nt, Human
uauuaagaaaaauacagcuuuaac

SEQ ID NO: 352150 - RNA, 20 nt, Human
uauuuguaauguccuuuauu

SEQ ID NO: 352151 - RNA, 20 nt, Human
uccaaauuuucuuucuuacu

SEQ ID NO: 352152 - RNA, 21 nt, Human
ucucucugggagcugcuucuu

SEQ ID NO: 352153 - RNA, 20 nt, Human
ugacaaaaaagaaugaauca

SEQ ID NO: 352154 - RNA, 20 nt, Human
ugagaaguugcgguggugag

SEQ ID NO: 352155 - RNA, 21 nt, Human
ugccuggacaggaacgcagga

SEQ ID NO: 352156 - RNA, 18 nt, Human
uggagcucagggcaccag

SEQ ID NO: 352157 - RNA, 21 nt, Human
uugcgguggugaggguguagg

SEQ ID NO: 352158 - RNA, 21 nt, Human
uuggagcucagggcaccaguc

SEQ ID NO: 352159 - RNA, 22 nt, Human
uuuauaaucucuucauuuuucc

SEQ ID NO: 352160 - RNA, 19 nt, Human
aaaggugaugggucugagc

SEQ ID NO: 352161 - RNA, 24 nt, Human
accaaaaagguccaauucauagcc

SEQ ID NO: 352162 - RNA, 22 nt, Human
aggagucagagccaagccagcg

SEQ ID NO: 352163 - RNA, 25 nt, Human
caagaaguuaaccugcacccagggc

SEQ ID NO: 352164 - RNA, 21 nt, Human
cacccagggccacaggugcuc

SEQ ID NO: 352165 - RNA, 25 nt, Human
cacccagggccacaggugcucagcc

SEQ ID NO: 352166 - RNA, 20 nt, Human
ccagccccuccaggggucuc

SEQ ID NO: 352167 - RNA, 21 nt, Human
ccucugcauagugggcuccug

SEQ ID NO: 352168 - RNA, 20 nt, Human
cgaccuuuggccucugcaua

SEQ ID NO: 352169 - RNA, 21 nt, Human
gagcaggagucagagccaagc

SEQ ID NO: 352170 - RNA, 25 nt, Human
gagucagagccaagccagcgaggga

SEQ ID NO: 352171 - RNA, 22 nt, Human
gcgcuggauaaacuccagcccc

SEQ ID NO: 352172 - RNA, 19 nt, Human
uaaacuccagccccuccag

SEQ ID NO: 352173 - RNA, 20 nt, Human
uaggagagcacagaucggua

SEQ ID NO: 352174 - RNA, 20 nt, Human
ucagagccaagccagcgagg

SEQ ID NO: 352175 - RNA, 19 nt, Human
ucgcuggcugccgaccuuu

SEQ ID NO: 352176 - RNA, 26 nt, Human
uggccucugcauagugggcuccuucc

SEQ ID NO: 352177 - RNA, 20 nt, Human
uuggccucugcauagugggc

SEQ ID NO: 352178 - RNA, 20 nt, Human
aaaaaugacccaaaauagau

SEQ ID NO: 352179 - RNA, 20 nt, Human
aaaaccccccaaauaaugcc

SEQ ID NO: 352180 - RNA, 27 nt, Human
aaccccccaaauaaugccugaacccaa

SEQ ID NO: 352181 - RNA, 18 nt, Human
acuuguaguuucuuccuc

SEQ ID NO: 352182 - RNA, 21 nt, Human
caaaaccccccaaauaaugcc

SEQ ID NO: 352183 - RNA, 20 nt, Human
cagcacaagcccaugauugc

SEQ ID NO: 352184 - RNA, 18 nt, Human
cccaggaaggggcagucc

SEQ ID NO: 352185 - RNA, 21 nt, Human
ccuggagcuggcgggugggga

SEQ ID NO: 352186 - RNA, 20 nt, Human
ccuuuggaaacaaaaccccc

SEQ ID NO: 352187 - RNA, 23 nt, Human
cugggaaaauaauccuguuggag

SEQ ID NO: 352188 - RNA, 19 nt, Human
cuguuggaguugggggcuc

SEQ ID NO: 352189 - RNA, 25 nt, Human
gcccaugauugcggcgguggcugcc

SEQ ID NO: 352190 - RNA, 20 nt, Human
ggcucuucccaguugucugg

SEQ ID NO: 352191 - RNA, 19 nt, Human
guuaguuggcccaggaagg

SEQ ID NO: 352192 - RNA, 25 nt, Human
uaaaaaugacccaaaauagauuuga

SEQ ID NO: 352193 - RNA, 22 nt, Human
uaacuccuccugggaaaauaau

SEQ ID NO: 352194 - RNA, 21 nt, Human
uauuuaguuccuuuggaaaca

SEQ ID NO: 352195 - RNA, 19 nt, Human
uggaaacaaaaccccccaa

SEQ ID NO: 352196 - RNA, 21 nt, Human
uggacaguagauuacaaggca

SEQ ID NO: 352197 - RNA, 21 nt, Human
uggagcuggcggguggggagc

SEQ ID NO: 352198 - RNA, 24 nt, Human
uggcccaggaaggggcaguccugg

SEQ ID NO: 352199 - RNA, 20 nt, Human
uggcggguggggagccaggc

SEQ ID NO: 352200 - RNA, 18 nt, Human
ugggggcucuucccaguu

SEQ ID NO: 352201 - RNA, 19 nt, Human
uuggcccaggaaggggcag

SEQ ID NO: 352202 - RNA, 26 nt, Human
uuuuuuuuuuauaagcaauaugacuu

SEQ ID NO: 352203 - RNA, 26 nt, Human
aaaaaaaaaaaaaaaacaccuuccca

SEQ ID NO: 352204 - RNA, 28 nt, Human
aaaaaaaaaaaacaccuucccaaaggag

SEQ ID NO: 352205 - RNA, 25 nt, Human
aaaaaaaaaacaccuucccaaagga

SEQ ID NO: 352206 - RNA, 23 nt, Human
aaaaaaaaacaccuucccaaagg

SEQ ID NO: 352207 - RNA, 24 nt, Human
aaaaaaacaccuucccaaaggacu

SEQ ID NO: 352208 - RNA, 19 nt, Human
aaaaucacaaaugucacca

SEQ ID NO: 352209 - RNA, 19 nt, Human
acccuaugucucaguuacc

SEQ ID NO: 352210 - RNA, 19 nt, Human
agagaaagccucugccccc

SEQ ID NO: 352211 - RNA, 26 nt, Human
auacuggagucuuguuuaaaaggcca

SEQ ID NO: 352212 - RNA, 19 nt, Human
cagggcaucucuuuucuug

SEQ ID NO: 352213 - RNA, 23 nt, Human
cauuuuagcuucuuaaucaagga

SEQ ID NO: 352214 - RNA, 19 nt, Human
cccagagaaagccucugcc

SEQ ID NO: 352215 - RNA, 20 nt, Human
cccccgaaagagacuuucua

SEQ ID NO: 352216 - RNA, 20 nt, Human
ccgccgcgacaacaguuaua

SEQ ID NO: 352217 - RNA, 23 nt, Human
ccgccgcgacaacaguuauaccc

SEQ ID NO: 352218 - RNA, 22 nt, Human
ccuacuggguucuagguucucc

SEQ ID NO: 352219 - RNA, 18 nt, Human
gagaaugccccagccagu

SEQ ID NO: 352220 - RNA, 21 nt, Human
gcaaggucuuuagagggcaga

SEQ ID NO: 352221 - RNA, 21 nt, Human
ggagcacagcaauuaaccuuc

SEQ ID NO: 352222 - RNA, 20 nt, Human
ggcccggaaggcccuuggcg

SEQ ID NO: 352223 - RNA, 21 nt, Human
gucaaaaaaaaaaaaaaaaaa

SEQ ID NO: 352224 - RNA, 21 nt, Human
guggagcacagcaauuaaccu

SEQ ID NO: 352225 - RNA, 21 nt, Human
uaaaaggccaucaaaaacuca

SEQ ID NO: 352226 - RNA, 21 nt, Human
uaaagcaauugugcaauaagc

SEQ ID NO: 352227 - RNA, 19 nt, Human
uaaggaguaaaugagagaa

SEQ ID NO: 352228 - RNA, 27 nt, Human
uacugaaaaucacaaaugucaccaaca

SEQ ID NO: 352229 - RNA, 23 nt, Human
ucaaaaaaaaaaaaaaaaaaaaa

SEQ ID NO: 352230 - RNA, 21 nt, Human
ucagggcaucucuuuucuugc

SEQ ID NO: 352231 - RNA, 19 nt, Human
ucaguuaccggagauccag

SEQ ID NO: 352232 - RNA, 19 nt, Human
ucauuaaaugaggugcaac

SEQ ID NO: 352233 - RNA, 19 nt, Human
ucccaaaggacugccuucu

SEQ ID NO: 352234 - RNA, 18 nt, Human
uccucacuuccuccgccg

SEQ ID NO: 352235 - RNA, 19 nt, Human
uccucacuuccuccgccgc

SEQ ID NO: 352236 - RNA, 24 nt, Human
ugagaaugccccagccagugcugu

SEQ ID NO: 352237 - RNA, 21 nt, Human
ugugagcucaguuuccugaaa

SEQ ID NO: 352238 - RNA, 22 nt, Human
uuagagucaaaaaaaaaaaaaa

SEQ ID NO: 352239 - RNA, 31 nt, Human
uugauuagagucaaaaaaaaaaaaaaaaaaa

SEQ ID NO: 352240 - RNA, 23 nt, Human
uuuaaaaugcacugggagggaaa

SEQ ID NO: 352241 - RNA, 21 nt, Human
uuuaaggaguaaaugagagaa

SEQ ID NO: 352242 - RNA, 22 nt, Human
uuuaaggaguaaaugagagaaa

SEQ ID NO: 352243 - RNA, 24 nt, Human
uuuuuuuuuuuuuuuuuugucuuu

SEQ ID NO: 352244 - RNA, 27 nt, Human
uuuuuuuuuuuuuuuuuuuuuuugggg

SEQ ID NO: 352245 - RNA, 19 nt, Human
aagaccugggggguggagg

SEQ ID NO: 352246 - RNA, 23 nt, Human
aagcagagcuuggaagaccuggg

SEQ ID NO: 352247 - RNA, 23 nt, Human
aagcaugaacagaucugggucca

SEQ ID NO: 352248 - RNA, 19 nt, Human
aagggcccccaaagccugc

SEQ ID NO: 352249 - RNA, 21 nt, Human
acgaagacaaaagcaugaaca

SEQ ID NO: 352250 - RNA, 23 nt, Human
agacaaaagcaugaacagaucug

SEQ ID NO: 352251 - RNA, 21 nt, Human
agccugggguggcagaaaggg

SEQ ID NO: 352252 - RNA, 22 nt, Human
agcguccaccugaccccccagc

SEQ ID NO: 352253 - RNA, 24 nt, Human
aggagccaucccagccucuaagcc

SEQ ID NO: 352254 - RNA, 18 nt, Human
agggacguuuuggggcuu

SEQ ID NO: 352255 - RNA, 18 nt, Human
agggggauucccggugau

SEQ ID NO: 352256 - RNA, 22 nt, Human
aggugcggugggcacgagggag

SEQ ID NO: 352257 - RNA, 22 nt, Human
agucauggaacuuuuucaaagg

SEQ ID NO: 352258 - RNA, 21 nt, Human
augaacagaucuggguccaaa

SEQ ID NO: 352259 - RNA, 21 nt, Human
caaagccugcucauagccaag

SEQ ID NO: 352260 - RNA, 19 nt, Human
cacucccggguccgcuccu

SEQ ID NO: 352261 - RNA, 20 nt, Human
cagagcuuggaagaccuggg

SEQ ID NO: 352262 - RNA, 23 nt, Human
cagccucuaagcccccagacccu

SEQ ID NO: 352263 - RNA, 19 nt, Human
cagccugccaagcaagccg

SEQ ID NO: 352264 - RNA, 21 nt, Human
cagggcggccggcugugcgag

SEQ ID NO: 352265 - RNA, 22 nt, Human
ccaaagccugcucauagccaag

SEQ ID NO: 352266 - RNA, 24 nt, Human
ccagccucuaagcccccagacccu

SEQ ID NO: 352267 - RNA, 19 nt, Human
cccaggccccgccacccaa

SEQ ID NO: 352268 - RNA, 24 nt, Human
cccauacagaugaagacaucaaag

SEQ ID NO: 352269 - RNA, 23 nt, Human
ccccacaccuggggccggaccag

SEQ ID NO: 352270 - RNA, 22 nt, Human
ccccagacccuaccucggcccc

SEQ ID NO: 352271 - RNA, 19 nt, Human
cccccagacccuaccucgg

SEQ ID NO: 352272 - RNA, 19 nt, Human
ccccccagcccugaacucc

SEQ ID NO: 352273 - RNA, 19 nt, Human
ccccgccacccaaggucgg

SEQ ID NO: 352274 - RNA, 18 nt, Human
ccccgccgcagugacgaa

SEQ ID NO: 352275 - RNA, 27 nt, Human
ccccgccgcagugacgaagacaaaagc

SEQ ID NO: 352276 - RNA, 20 nt, Human
ccccggagccccaggaaaau

SEQ ID NO: 352277 - RNA, 27 nt, Human
ccccggggcugccgcggaagggccccc

SEQ ID NO: 352278 - RNA, 20 nt, Human
ccccuggcgguggggccagg

SEQ ID NO: 352279 - RNA, 18 nt, Human
ccgccgccgccucccagc

SEQ ID NO: 352280 - RNA, 20 nt, Human
ccgcgccccggagccccagg

SEQ ID NO: 352281 - RNA, 21 nt, Human
ccucuaagcccccagacccua

SEQ ID NO: 352282 - RNA, 19 nt, Human
ccuuagggacguuuugggg

SEQ ID NO: 352283 - RNA, 21 nt, Human
cgaagacaaaagcaugaacag

SEQ ID NO: 352284 - RNA, 22 nt, Human
cgcacccaggagugggugacac

SEQ ID NO: 352285 - RNA, 22 nt, Human
cgcggacggaaccuuauuuuaa

SEQ ID NO: 352286 - RNA, 22 nt, Human
cucagggcuggcucuccugugu

SEQ ID NO: 352287 - RNA, 24 nt, Human
cucuaagcccccagacccuaccuc

SEQ ID NO: 352288 - RNA, 18 nt, Human
cuuggaagaccugggggg

SEQ ID NO: 352289 - RNA, 19 nt, Human
gaaacugaggaagcagagc

SEQ ID NO: 352290 - RNA, 19 nt, Human
gaccugggggguggagggg

SEQ ID NO: 352291 - RNA, 25 nt, Human
gaccugggggguggaggggaagggu

SEQ ID NO: 352292 - RNA, 23 nt, Human
gagagacccaggccccgccaccc

SEQ ID NO: 352293 - RNA, 24 nt, Human
gagcuuggaagaccuggggggugg

SEQ ID NO: 352294 - RNA, 19 nt, Human
gaggcccagccugccaagc

SEQ ID NO: 352295 - RNA, 21 nt, Human
gaggcccagccugccaagcaa

SEQ ID NO: 352296 - RNA, 20 nt, Human
gagggaggggcaugcguccu

SEQ ID NO: 352297 - RNA, 23 nt, Human
gaggugguuccauuuuggaaacu

SEQ ID NO: 352298 - RNA, 19 nt, Human
gcaagccggugucugugcc

SEQ ID NO: 352299 - RNA, 20 nt, Human
gcagugacgaagacaaaagc

SEQ ID NO: 352300 - RNA, 22 nt, Human
gcaugcguccugguaagucggg

SEQ ID NO: 352301 - RNA, 21 nt, Human
gcccccaaagccugcucauag

SEQ ID NO: 352302 - RNA, 18 nt, Human
gccccgccacccaagguc

SEQ ID NO: 352303 - RNA, 20 nt, Human
gccccgccacccaaggucgg

SEQ ID NO: 352304 - RNA, 22 nt, Human
gcccgacccucagggcggccgg

SEQ ID NO: 352305 - RNA, 20 nt, Human
gccgcggaagggcccccaaa

SEQ ID NO: 352306 - RNA, 23 nt, Human
gcuuggaagaccuggggggugga

SEQ ID NO: 352307 - RNA, 18 nt, Human
ggccggaccagccugggg

SEQ ID NO: 352308 - RNA, 18 nt, Human
ggcuccggcaggggcccc

SEQ ID NO: 352309 - RNA, 18 nt, Human
gggaagggucugcacgca

SEQ ID NO: 352310 - RNA, 20 nt, Human
gggggguggaggggaagggu

SEQ ID NO: 352311 - RNA, 23 nt, Human
gguccaaagaggcucggcaggug

SEQ ID NO: 352312 - RNA, 21 nt, Human
guggagagagcggaccccaca

SEQ ID NO: 352313 - RNA, 19 nt, Human
uaagcccccagacccuacc

SEQ ID NO: 352314 - RNA, 22 nt, Human
uaagcccccagacccuaccucg

SEQ ID NO: 352315 - RNA, 18 nt, Human
uccaccugaccccccagc

SEQ ID NO: 352316 - RNA, 20 nt, Human
ucccagccucuaagccccca

SEQ ID NO: 352317 - RNA, 24 nt, Human
ucccagccucuaagcccccagacc

SEQ ID NO: 352318 - RNA, 23 nt, Human
uccgcgccccggagccccaggaa

SEQ ID NO: 352319 - RNA, 20 nt, Human
ucuguggguuugaugagggc

SEQ ID NO: 352320 - RNA, 23 nt, Human
ugaaacacucccggguccgcucc

SEQ ID NO: 352321 - RNA, 19 nt, Human
ugacccagcacgcggacgg

SEQ ID NO: 352322 - RNA, 19 nt, Human
ugaccccccagcccgagcc

SEQ ID NO: 352323 - RNA, 21 nt, Human
ugacgaagacaaaagcaugaa

SEQ ID NO: 352324 - RNA, 24 nt, Human
ugaggaagcagagcuuggaagacc

SEQ ID NO: 352325 - RNA, 19 nt, Human
ugagggcagagggaggggc

SEQ ID NO: 352326 - RNA, 21 nt, Human
ugagucgguuuguuuucuuca

SEQ ID NO: 352327 - RNA, 20 nt, Human
ugccaaggcccccccagccc

SEQ ID NO: 352328 - RNA, 21 nt, Human
ugcgcgaccagccccggaggc

SEQ ID NO: 352329 - RNA, 24 nt, Human
ugcgcuugcccccuggcggugggg

SEQ ID NO: 352330 - RNA, 18 nt, Human
uggaacuuuuucaaagaa

SEQ ID NO: 352331 - RNA, 22 nt, Human
uggaagaccugggggguggagg

SEQ ID NO: 352332 - RNA, 19 nt, Human
uggagagagcggaccccac

SEQ ID NO: 352333 - RNA, 20 nt, Human
uggcagaaagggaguccggg

SEQ ID NO: 352334 - RNA, 24 nt, Human
uggcagaaagggaguccgggucug

SEQ ID NO: 352335 - RNA, 27 nt, Human
ugggggguggaggggaagggucugcaa

SEQ ID NO: 352336 - RNA, 21 nt, Human
ugggguggcagaaagggaguc

SEQ ID NO: 352337 - RNA, 24 nt, Human
uggguccaaagaggcucggcaggu

SEQ ID NO: 352338 - RNA, 18 nt, Human
ugucugaggcuccggcag

SEQ ID NO: 352339 - RNA, 22 nt, Human
uuagggacguuuuggggcuuaa

SEQ ID NO: 352340 - RNA, 21 nt, Human
uuuccaccccauacagaugaa

SEQ ID NO: 352341 - RNA, 24 nt, Human
aaaaaaaaaaaaaaaaccccaaag

SEQ ID NO: 352342 - RNA, 22 nt, Human
aaaaaaaaaaaaaaccccaaag

SEQ ID NO: 352343 - RNA, 25 nt, Human
aaaaaaaaagcgagcuuauucccaa

SEQ ID NO: 352344 - RNA, 26 nt, Human
aaaaaacaaaaaacaaaaaacaaaaa

SEQ ID NO: 352345 - RNA, 25 nt, Human
aaaaaacaaaaaacaaaaacaaaaa

SEQ ID NO: 352346 - RNA, 22 nt, Human
aaaaacccacaaaaaaccaaaa

SEQ ID NO: 352347 - RNA, 18 nt, Human
aaaaaccccaaagaucaa

SEQ ID NO: 352348 - RNA, 20 nt, Human
aaaaaccccaaagaucaacc

SEQ ID NO: 352349 - RNA, 24 nt, Human
aaaacaaaaaacaaaaaacaaaaa

SEQ ID NO: 352350 - RNA, 23 nt, Human
aaaacaaaaaacaaaaacaaaaa

SEQ ID NO: 352351 - RNA, 26 nt, Human
aaaacaaaaacccacaaaaaaccaaa

SEQ ID NO: 352352 - RNA, 20 nt, Human
aaaauagcgaaaccccgucu

SEQ ID NO: 352353 - RNA, 21 nt, Human
aaaauagcgaaaccccgucuc

SEQ ID NO: 352354 - RNA, 26 nt, Human
aaacaaaaaacaaaaaacaaaaacaa

SEQ ID NO: 352355 - RNA, 28 nt, Human
aaacaaaaaacaaaaacaaaaacccaca

SEQ ID NO: 352356 - RNA, 18 nt, Human
aaacaaaaacaaaaaccc

SEQ ID NO: 352357 - RNA, 24 nt, Human
aaacaaaaacaaaaacccacaaaa

SEQ ID NO: 352358 - RNA, 22 nt, Human
aaacaaaaacccacaaaaaacc

SEQ ID NO: 352359 - RNA, 23 nt, Human
aaacaugauuauugauaaugaac

SEQ ID NO: 352360 - RNA, 23 nt, Human
aaaccaaaaagcuuauucccaau

SEQ ID NO: 352361 - RNA, 22 nt, Human
aaauagcgaaaccccgucucua

SEQ ID NO: 352362 - RNA, 22 nt, Human
aaauguuaauguaauccaagcu

SEQ ID NO: 352363 - RNA, 19 nt, Human
aacaaaaacaaaaacccac

SEQ ID NO: 352364 - RNA, 24 nt, Human
aacaaaaacccacaaaaaaccaaa

SEQ ID NO: 352365 - RNA, 19 nt, Human
aacagagcgaaacuccauc

SEQ ID NO: 352366 - RNA, 20 nt, Human
aacagagcgaaacuccaucu

SEQ ID NO: 352367 - RNA, 21 nt, Human
aacagagcgaaacuccaucuc

SEQ ID NO: 352368 - RNA, 21 nt, Human
aacccacaaaaaaccaaaaag

SEQ ID NO: 352369 - RNA, 24 nt, Human
aagaaggagaauugcuugaaccca

SEQ ID NO: 352370 - RNA, 24 nt, Human
aagaaggagaauugcuugaacccg

SEQ ID NO: 352371 - RNA, 23 nt, Human
aagauugcgccacugcacuccag

SEQ ID NO: 352372 - RNA, 23 nt, Human
aagcagacaugugacacuuagca

SEQ ID NO: 352373 - RNA, 21 nt, Human
aauauggugaaacccugucuc

SEQ ID NO: 352374 - RNA, 21 nt, Human
aauauggugaaacccugucuc

SEQ ID NO: 352375 - RNA, 24 nt, Human
aaucgccugaaccugggaggcgga

SEQ ID NO: 352376 - RNA, 24 nt, Human
aauugcuugaacccaggaggugga

SEQ ID NO: 352377 - RNA, 24 nt, Human
aauugcuugaacccgggaggugga

SEQ ID NO: 352378 - RNA, 22 nt, Human
acaaaaaacaaaaaacaaaaac

SEQ ID NO: 352379 - RNA, 24 nt, Human
acaaaaacccacaaaaaaccaaaa

SEQ ID NO: 352380 - RNA, 24 nt, Human
acagagcgaaacuccaucucaaaa

SEQ ID NO: 352381 - RNA, 21 nt, Human
acagagugagacucuguauca

SEQ ID NO: 352382 - RNA, 24 nt, Human
acagagugagacucuguaucagaa

SEQ ID NO: 352383 - RNA, 22 nt, Human
accaaaaagcuuauucccaauu

SEQ ID NO: 352384 - RNA, 24 nt, Human
accaauauggugaaacccugucuc

SEQ ID NO: 352385 - RNA, 24 nt, Human
accaauauggugaaacccugucuc

SEQ ID NO: 352386 - RNA, 21 nt, Human
acccacaaaaaaccaaaaagc

SEQ ID NO: 352387 - RNA, 24 nt, Human
accccgucucuacuaaaaacacaa

SEQ ID NO: 352388 - RNA, 24 nt, Human
acccugucucuacuaaaaauacaa

SEQ ID NO: 352389 - RNA, 24 nt, Human
acccugucucuacuaaaaauacaa

SEQ ID NO: 352390 - RNA, 23 nt, Human
acuccagccuggcaacagaguga

SEQ ID NO: 352391 - RNA, 23 nt, Human
acugcacuacagccugcacaaca

SEQ ID NO: 352392 - RNA, 24 nt, Human
acugcacuacagccugcacaacag

SEQ ID NO: 352393 - RNA, 24 nt, Human
acugcacuacagccugcacaacag

SEQ ID NO: 352394 - RNA, 24 nt, Human
acugcacuccagccugcacaacag

SEQ ID NO: 352395 - RNA, 24 nt, Human
acugcacuccagccugcacaacag

SEQ ID NO: 352396 - RNA, 23 nt, Human
acugcacuccagccuggcaacag

SEQ ID NO: 352397 - RNA, 23 nt, Human
acugcacuccagccuggcaacag

SEQ ID NO: 352398 - RNA, 21 nt, Human
acugucugagggaaaggaaau

SEQ ID NO: 352399 - RNA, 24 nt, Human
acugugccacugcacuccagccug

SEQ ID NO: 352400 - RNA, 27 nt, Human
acuugcuuuucaauggacauuuacuau

SEQ ID NO: 352401 - RNA, 25 nt, Human
agaauggaacaaaauuguucaagug

SEQ ID NO: 352402 - RNA, 22 nt, Human
agaauugcuugaagucaggagg

SEQ ID NO: 352403 - RNA, 22 nt, Human
agacugugccacugcacuccag

SEQ ID NO: 352404 - RNA, 20 nt, Human
agagacaauucccagccccc

SEQ ID NO: 352405 - RNA, 21 nt, Human
agcacuuugggaggcugaggc

SEQ ID NO: 352406 - RNA, 24 nt, Human
agcacuuugggaggcugaggcagg

SEQ ID NO: 352407 - RNA, 24 nt, Human
agcacuuugggaggcugaggcggg

SEQ ID NO: 352408 - RNA, 18 nt, Human
agccaggugugguggugc

SEQ ID NO: 352409 - RNA, 23 nt, Human
agccaggugugguggugcacgcc

SEQ ID NO: 352410 - RNA, 23 nt, Human
agccaggugugguggugcaugcc

SEQ ID NO: 352411 - RNA, 23 nt, Human
agccgggcgugguggcacgcgcc

SEQ ID NO: 352412 - RNA, 24 nt, Human
agccugaccaauauggugaaaccc

SEQ ID NO: 352413 - RNA, 24 nt, Human
agccugaccaauauggugaaaccc

SEQ ID NO: 352414 - RNA, 22 nt, Human
agccuggacaacagagcgaaac

SEQ ID NO: 352415 - RNA, 21 nt, Human
agccuggcaacagagugagac

SEQ ID NO: 352416 - RNA, 23 nt, Human
agccuggcaacagagugagacuc

SEQ ID NO: 352417 - RNA, 23 nt, Human
aggagcaagacuccaucucaaaa

SEQ ID NO: 352418 - RNA, 18 nt, Human
aggaggcagagguuacgg

SEQ ID NO: 352419 - RNA, 19 nt, Human
aggcagagguuacggugaa

SEQ ID NO: 352420 - RNA, 22 nt, Human
aggcaggagaaucgccugaacc

SEQ ID NO: 352421 - RNA, 24 nt, Human
aggcaggagaaucgccugaaccug

SEQ ID NO: 352422 - RNA, 18 nt, Human
aggcaggagaauugcuug

SEQ ID NO: 352423 - RNA, 23 nt, Human
aggccaaggcgggcagaucacga

SEQ ID NO: 352424 - RNA, 24 nt, Human
aggcggagguugcagugagccaag

SEQ ID NO: 352425 - RNA, 18 nt, Human
aggcgggcagaucacgag

SEQ ID NO: 352426 - RNA, 24 nt, Human
aggcgggcagaucacgaggucagg

SEQ ID NO: 352427 - RNA, 26 nt, Human
aggcggguggaucaacugaggucagg

SEQ ID NO: 352428 - RNA, 20 nt, Human
aggcugaggcaggagaaucg

SEQ ID NO: 352429 - RNA, 20 nt, Human
aggcugaggcaggagaaucg

SEQ ID NO: 352430 - RNA, 21 nt, Human
aggcugaggcaggagaauugc

SEQ ID NO: 352431 - RNA, 24 nt, Human
aggcugaggcaggagaauugcuug

SEQ ID NO: 352432 - RNA, 18 nt, Human
aggcugaggcggguggau

SEQ ID NO: 352433 - RNA, 24 nt, Human
aggcugaggcggguggaucaacug

SEQ ID NO: 352434 - RNA, 24 nt, Human
agguggagguugcagugagccaag

SEQ ID NO: 352435 - RNA, 24 nt, Human
agguggagguugcagugagccaag

SEQ ID NO: 352436 - RNA, 20 nt, Human
agguggguggaucacgaggu

SEQ ID NO: 352437 - RNA, 24 nt, Human
agguggguggaucacgaggucagg

SEQ ID NO: 352438 - RNA, 24 nt, Human
aggugugguggugcacgccuauaa

SEQ ID NO: 352439 - RNA, 24 nt, Human
aggugugguggugcaugccuguaa

SEQ ID NO: 352440 - RNA, 23 nt, Human
agugacagaagcaacacacuuca

SEQ ID NO: 352441 - RNA, 21 nt, Human
auacauuuuuauaacaucucu

SEQ ID NO: 352442 - RNA, 21 nt, Human
aucacgaggucaggaguucaa

SEQ ID NO: 352443 - RNA, 22 nt, Human
aucacgaggucaggaguucaag

SEQ ID NO: 352444 - RNA, 20 nt, Human
aucacgaggucaggaguucc

SEQ ID NO: 352445 - RNA, 24 nt, Human
aucagaaaaaaaaaaaaaaaaaaa

SEQ ID NO: 352446 - RNA, 22 nt, Human
aucccaguacuuugggaggcca

SEQ ID NO: 352447 - RNA, 24 nt, Human
aucgugccacugcacuacagccug

SEQ ID NO: 352448 - RNA, 19 nt, Human
aucucaaaaaaaaaaaaag

SEQ ID NO: 352449 - RNA, 22 nt, Human
aucuggagacaucuuugguugu

SEQ ID NO: 352450 - RNA, 19 nt, Human
augccuguaauccuagcac

SEQ ID NO: 352451 - RNA, 20 nt, Human
auggugaaacccugucucua

SEQ ID NO: 352452 - RNA, 20 nt, Human
auggugaaacccugucucua

SEQ ID NO: 352453 - RNA, 18 nt, Human
augugcuaucacauuuca

SEQ ID NO: 352454 - RNA, 18 nt, Human
auugcacuccagccugga

SEQ ID NO: 352455 - RNA, 24 nt, Human
auugcacuccagccuggacaacag

SEQ ID NO: 352456 - RNA, 24 nt, Human
auugcgccacugcacuccagccug

SEQ ID NO: 352457 - RNA, 26 nt, Human
caacaauacuaaaaauugccuuacaa

SEQ ID NO: 352458 - RNA, 21 nt, Human
caacaggagcaagacuccauc

SEQ ID NO: 352459 - RNA, 21 nt, Human
caacaggagcaagacuccauc

SEQ ID NO: 352460 - RNA, 24 nt, Human
caacugccauugcacuccagccug

SEQ ID NO: 352461 - RNA, 21 nt, Human
caagacuccaucucaaaaaaa

SEQ ID NO: 352462 - RNA, 21 nt, Human
caagacuccaucucaaaaaaa

SEQ ID NO: 352463 - RNA, 21 nt, Human
caaggaaauaccaauugaucu

SEQ ID NO: 352464 - RNA, 24 nt, Human
caaggcgggcagaucacgagguca

SEQ ID NO: 352465 - RNA, 24 nt, Human
caauauggugaaacccugucucua

SEQ ID NO: 352466 - RNA, 24 nt, Human
caauauggugaaacccugucucua

SEQ ID NO: 352467 - RNA, 18 nt, Human
caauugaucuauugauac

SEQ ID NO: 352468 - RNA, 21 nt, Human
cacaaaaaaccaaaaagcuua

SEQ ID NO: 352469 - RNA, 24 nt, Human
cacaaugguugguacucuaaaacu

SEQ ID NO: 352470 - RNA, 24 nt, Human
cacaccuguaaucccagcacuuug

SEQ ID NO: 352471 - RNA, 22 nt, Human
cacacuugggggagaaggugau

SEQ ID NO: 352472 - RNA, 19 nt, Human
caccuguaaucccagcacu

SEQ ID NO: 352473 - RNA, 24 nt, Human
caccuguaaucccagcacuuuggg

SEQ ID NO: 352474 - RNA, 19 nt, Human
cacgccuauaaucucagcu

SEQ ID NO: 352475 - RNA, 22 nt, Human
cacgccuguaaucccagcacuu

SEQ ID NO: 352476 - RNA, 23 nt, Human
cacgccuguaaucccagcacuuc

SEQ ID NO: 352477 - RNA, 24 nt, Human
cacgccuguaaucccaguacuuug

SEQ ID NO: 352478 - RNA, 19 nt, Human
cacuacagccugcacaaca

SEQ ID NO: 352479 - RNA, 24 nt, Human
cacuccagccuggacaacagagcg

SEQ ID NO: 352480 - RNA, 21 nt, Human
cacuccagccuggcaacagag

SEQ ID NO: 352481 - RNA, 22 nt, Human
cacuccagccuggcaacagagu

SEQ ID NO: 352482 - RNA, 23 nt, Human
cacuccagccuggcaacagagug

SEQ ID NO: 352483 - RNA, 18 nt, Human
cacugcacuacagccugc

SEQ ID NO: 352484 - RNA, 24 nt, Human
cacugcacuacagccugcacaaca

SEQ ID NO: 352485 - RNA, 18 nt, Human
cacugcacuccagccugc

SEQ ID NO: 352486 - RNA, 22 nt, Human
cacugcacuccagccugcacaa

SEQ ID NO: 352487 - RNA, 24 nt, Human
cacugcacuccagccugcacaaca

SEQ ID NO: 352488 - RNA, 18 nt, Human
cacugcacuccagccugg

SEQ ID NO: 352489 - RNA, 20 nt, Human
cacugcacuccagccuggca

SEQ ID NO: 352490 - RNA, 23 nt, Human
cacugcacuccagccuggcaaca

SEQ ID NO: 352491 - RNA, 23 nt, Human
cacugcacuccagccuggcaaca

SEQ ID NO: 352492 - RNA, 24 nt, Human
cacugcacuccagccuggcaacag

SEQ ID NO: 352493 - RNA, 24 nt, Human
cagcacuuugggaggcugaggcag

SEQ ID NO: 352494 - RNA, 25 nt, Human
cagcacuuugggaggcugaggcagg

SEQ ID NO: 352495 - RNA, 23 nt, Human
cagccugcacaacaggagcaaga

SEQ ID NO: 352496 - RNA, 29 nt, Human
caggagguggagguugcagugacaacggu

SEQ ID NO: 352497 - RNA, 24 nt, Human
caguacuuugggaggccaaggcgg

SEQ ID NO: 352498 - RNA, 23 nt, Human
caucucaaaaaaaaaaaaaaaac

SEQ ID NO: 352499 - RNA, 24 nt, Human
caugccuguaauccuagcacuuug

SEQ ID NO: 352500 - RNA, 24 nt, Human
cauggccgggcgugguggcucaca

SEQ ID NO: 352501 - RNA, 24 nt, Human
caugguugggcacgguggcucacg

SEQ ID NO: 352502 - RNA, 18 nt, Human
cauuagguuuagauaagc

SEQ ID NO: 352503 - RNA, 18 nt, Human
cauugcacuccagccugg

SEQ ID NO: 352504 - RNA, 19 nt, Human
cauugcacuccagccugga

SEQ ID NO: 352505 - RNA, 20 nt, Human
cauugcacuccagccuggac

SEQ ID NO: 352506 - RNA, 21 nt, Human
cauugcacuccagccuggaca

SEQ ID NO: 352507 - RNA, 24 nt, Human
cauugcacuccagccuggacaaca

SEQ ID NO: 352508 - RNA, 18 nt, Human
ccaaaaagcuuauuccca

SEQ ID NO: 352509 - RNA, 18 nt, Human
ccacugcacuacagccug

SEQ ID NO: 352510 - RNA, 18 nt, Human
ccacugcacuacagccug

SEQ ID NO: 352511 - RNA, 18 nt, Human
ccacugcacuccagccug

SEQ ID NO: 352512 - RNA, 18 nt, Human
ccacugcacuccagccug

SEQ ID NO: 352513 - RNA, 19 nt, Human
ccacugcacuccagccugc

SEQ ID NO: 352514 - RNA, 24 nt, Human
ccacugcacuccagccugcacaac

SEQ ID NO: 352515 - RNA, 19 nt, Human
ccacugcacuccagccugg

SEQ ID NO: 352516 - RNA, 19 nt, Human
ccacugcacuccagccugg

SEQ ID NO: 352517 - RNA, 20 nt, Human
ccacugcacuccagccuggc

SEQ ID NO: 352518 - RNA, 23 nt, Human
ccacugcacuccagccuggcaac

SEQ ID NO: 352519 - RNA, 18 nt, Human
ccagcccggccaaaauag

SEQ ID NO: 352520 - RNA, 22 nt, Human
ccaggagguggagguugcagug

SEQ ID NO: 352521 - RNA, 23 nt, Human
ccaucucaaaaaaaaaaaaaaaa

SEQ ID NO: 352522 - RNA, 30 nt, Human
ccaucucaaaaaaacaaaaaacaaaaaacc

SEQ ID NO: 352523 - RNA, 19 nt, Human
ccauugcacuccagccugg

SEQ ID NO: 352524 - RNA, 20 nt, Human
ccauugcacuccagccugga

SEQ ID NO: 352525 - RNA, 21 nt, Human
ccauugcacuccagccuggac

SEQ ID NO: 352526 - RNA, 22 nt, Human
ccauugcacuccagccuggaca

SEQ ID NO: 352527 - RNA, 21 nt, Human
cccagcacuuccugagguggg

SEQ ID NO: 352528 - RNA, 21 nt, Human
cccaggagguggagguugcag

SEQ ID NO: 352529 - RNA, 21 nt, Human
cccgggagguggagguugcag

SEQ ID NO: 352530 - RNA, 19 nt, Human
ccuagccucugguggaagc

SEQ ID NO: 352531 - RNA, 19 nt, Human
ccuauaaucucagcuacuc

SEQ ID NO: 352532 - RNA, 21 nt, Human
ccuauaaucucagcuacucgg

SEQ ID NO: 352533 - RNA, 21 nt, Human
ccucacagcacacaaugguug

SEQ ID NO: 352534 - RNA, 18 nt, Human
ccugaaccugggaggcgg

SEQ ID NO: 352535 - RNA, 22 nt, Human
ccugaccaauauggugaaaccc

SEQ ID NO: 352536 - RNA, 22 nt, Human
ccugaccaauauggugaaaccc

SEQ ID NO: 352537 - RNA, 24 nt, Human
ccugaccaauauggugaaacccug

SEQ ID NO: 352538 - RNA, 22 nt, Human
ccugcaacugcucccagcgucc

SEQ ID NO: 352539 - RNA, 24 nt, Human
ccuggacaacagagcgaaacucca

SEQ ID NO: 352540 - RNA, 21 nt, Human
ccuggcaacagagugagacuc

SEQ ID NO: 352541 - RNA, 24 nt, Human
ccuggccgggcacggugguucaug

SEQ ID NO: 352542 - RNA, 19 nt, Human
ccugggaggcggagguugc

SEQ ID NO: 352543 - RNA, 21 nt, Human
ccuguaaucccagcuacucgg

SEQ ID NO: 352544 - RNA, 22 nt, Human
ccuguaaucccaguacuuuggg

SEQ ID NO: 352545 - RNA, 22 nt, Human
ccuguaauccuagcacuuuggg

SEQ ID NO: 352546 - RNA, 21 nt, Human
ccuguagucccagcuacuugg

SEQ ID NO: 352547 - RNA, 23 nt, Human
cgaaacuccaucucaaaaaaaaa

SEQ ID NO: 352548 - RNA, 25 nt, Human
cgccacugcacuccagccuggcaac

SEQ ID NO: 352549 - RNA, 24 nt, Human
cgccuauaaucucagcuacucggg

SEQ ID NO: 352550 - RNA, 18 nt, Human
cgccuguaaucccagcac

SEQ ID NO: 352551 - RNA, 25 nt, Human
cgccuguaaucccagcacuuccuga

SEQ ID NO: 352552 - RNA, 23 nt, Human
cgccuguaaucccaguacuuugg

SEQ ID NO: 352553 - RNA, 21 nt, Human
cgccuguagucccagcuacuu

SEQ ID NO: 352554 - RNA, 23 nt, Human
cgccuguagucccagcuacuugg

SEQ ID NO: 352555 - RNA, 29 nt, Human
cgggagguggagguugcagugacaacggu

SEQ ID NO: 352556 - RNA, 24 nt, Human
cgggagguggagguugcagugagc

SEQ ID NO: 352557 - RNA, 22 nt, Human
cgggcagaucacgaggucagga

SEQ ID NO: 352558 - RNA, 24 nt, Human
cggguggaucaacugaggucagga

SEQ ID NO: 352559 - RNA, 23 nt, Human
cucaaaaaaaaaaaaaaaacccc

SEQ ID NO: 352560 - RNA, 25 nt, Human
cucaaaaaaaaaaaaagcgagcuua

SEQ ID NO: 352561 - RNA, 22 nt, Human
cucacaccuguaaucccagcac

SEQ ID NO: 352562 - RNA, 24 nt, Human
cucacaccuguaaucccagcacuu

SEQ ID NO: 352563 - RNA, 22 nt, Human
cucacgccuguaaucccaguac

SEQ ID NO: 352564 - RNA, 24 nt, Human
cucacgccuguaaucccaguacuu

SEQ ID NO: 352565 - RNA, 26 nt, Human
cuccaucucaaaaaaaaaaaaaaaac

SEQ ID NO: 352566 - RNA, 24 nt, Human
cuccaucucaaaaaaaaaaaaagc

SEQ ID NO: 352567 - RNA, 24 nt, Human
cucuguaucagaaaaaaaaaaaaa

SEQ ID NO: 352568 - RNA, 24 nt, Human
cugaaccugggaggcggagguugc

SEQ ID NO: 352569 - RNA, 24 nt, Human
cugaccaauauggugaaacccugu

SEQ ID NO: 352570 - RNA, 24 nt, Human
cugaccaauauggugaaacccugu

SEQ ID NO: 352571 - RNA, 23 nt, Human
cugagguggguggaucacgaggu

SEQ ID NO: 352572 - RNA, 24 nt, Human
gaaaaaaaaaaaaaaaaaaaacau

SEQ ID NO: 352573 - RNA, 24 nt, Human
gaaacaacugccauugcacuccag

SEQ ID NO: 352574 - RNA, 19 nt, Human
gaaacccugucucuacuaa

SEQ ID NO: 352575 - RNA, 19 nt, Human
gaaacccugucucuacuaa

SEQ ID NO: 352576 - RNA, 20 nt, Human
gaacaaaauuguucaagugc

SEQ ID NO: 352577 - RNA, 24 nt, Human
gaagaaggagaauugcuugaaccc

SEQ ID NO: 352578 - RNA, 21 nt, Human
gaaggagaauugcuugaaccc

SEQ ID NO: 352579 - RNA, 21 nt, Human
gagcaagacuccaucucaaaa

SEQ ID NO: 352580 - RNA, 23 nt, Human
gaggcggguggaucaacugaggu

SEQ ID NO: 352581 - RNA, 21 nt, Human
gagguggagguugcagugagc

SEQ ID NO: 352582 - RNA, 18 nt, Human
gagguugcagugagccaa

SEQ ID NO: 352583 - RNA, 18 nt, Human
gagguugcagugagccaa

SEQ ID NO: 352584 - RNA, 23 nt, Human
gagguugcagugagccaagacug

SEQ ID NO: 352585 - RNA, 21 nt, Human
gagguugcagugagccaagau

SEQ ID NO: 352586 - RNA, 23 nt, Human
gagguugcagugagccaagaucg

SEQ ID NO: 352587 - RNA, 23 nt, Human
gagguugcagugagccaagauug

SEQ ID NO: 352588 - RNA, 21 nt, Human
gaucaacugaggucaggaguu

SEQ ID NO: 352589 - RNA, 24 nt, Human
gaucaacugaggucaggaguuuga

SEQ ID NO: 352590 - RNA, 22 nt, Human
gaucacgaggucaggaguucaa

SEQ ID NO: 352591 - RNA, 24 nt, Human
gaucacgaggucaggaguucaaga

SEQ ID NO: 352592 - RNA, 24 nt, Human
gaucacgaggucaggaguucaaga

SEQ ID NO: 352593 - RNA, 24 nt, Human
gcacuccagccuggacaacagagc

SEQ ID NO: 352594 - RNA, 23 nt, Human
gcacuccagccuggcaacagagu

SEQ ID NO: 352595 - RNA, 20 nt, Human
gccaagaucgugccacugca

SEQ ID NO: 352596 - RNA, 22 nt, Human
gccgggcacggugguucaugcc

SEQ ID NO: 352597 - RNA, 23 nt, Human
gccuauaaucucagcuacucggg

SEQ ID NO: 352598 - RNA, 21 nt, Human
gccugcacaacaggagcaaga

SEQ ID NO: 352599 - RNA, 21 nt, Human
gcgaaaccccgucucuacuaa

SEQ ID NO: 352600 - RNA, 25 nt, Human
ggacaucuggcaauaucuggagaca

SEQ ID NO: 352601 - RNA, 18 nt, Human
ggagguugcagugagcca

SEQ ID NO: 352602 - RNA, 20 nt, Human
ggagguugcagugagccaag

SEQ ID NO: 352603 - RNA, 20 nt, Human
ggagguugcagugagccaag

SEQ ID NO: 352604 - RNA, 22 nt, Human
ggagguugcagugagccaagau

SEQ ID NO: 352605 - RNA, 24 nt, Human
ggagguugcagugagccaagaucg

SEQ ID NO: 352606 - RNA, 24 nt, Human
ggagguugcagugagccaagauug

SEQ ID NO: 352607 - RNA, 19 nt, Human
ggcaacagagugagacucu

SEQ ID NO: 352608 - RNA, 23 nt, Human
ggcacgguggcucacaccuguaa

SEQ ID NO: 352609 - RNA, 23 nt, Human
ggcacgguggcucacgccuguaa

SEQ ID NO: 352610 - RNA, 23 nt, Human
ggcacggugguucaugccuguaa

SEQ ID NO: 352611 - RNA, 23 nt, Human
ggcagaucacgaggucaggaguu

SEQ ID NO: 352612 - RNA, 20 nt, Human
ggccaaaauagcgaaacccc

SEQ ID NO: 352613 - RNA, 21 nt, Human
ggccgggcacgguggcucaca

SEQ ID NO: 352614 - RNA, 22 nt, Human
ggcgugguggcacgcgccugua

SEQ ID NO: 352615 - RNA, 23 nt, Human
ggcucacacgccuguaaucccag

SEQ ID NO: 352616 - RNA, 21 nt, Human
ggcucacgccuguaaucccag

SEQ ID NO: 352617 - RNA, 26 nt, Human
gggcgugguggcucacacgccuguaa

SEQ ID NO: 352618 - RNA, 24 nt, Human
ggguggaucacgaggucaggaguu

SEQ ID NO: 352619 - RNA, 21 nt, Human
gguggaucaacugaggucagg

SEQ ID NO: 352620 - RNA, 24 nt, Human
gguggcacgcgccuguagucccag

SEQ ID NO: 352621 - RNA, 23 nt, Human
gguggcucacaccuguaauccca

SEQ ID NO: 352622 - RNA, 24 nt, Human
gguggcucacaccuguaaucccag

SEQ ID NO: 352623 - RNA, 26 nt, Human
gguggcucacacgccuguaaucccag

SEQ ID NO: 352624 - RNA, 23 nt, Human
gguggcucacgccuguaauccca

SEQ ID NO: 352625 - RNA, 24 nt, Human
gguggcucacgccuguaaucccag

SEQ ID NO: 352626 - RNA, 24 nt, Human
gguggugcacgccuauaaucucag

SEQ ID NO: 352627 - RNA, 24 nt, Human
gguggugcaugccuguaaucccag

SEQ ID NO: 352628 - RNA, 21 nt, Human
ggugguucaugccuguaaucc

SEQ ID NO: 352629 - RNA, 24 nt, Human
ggugguucaugccuguaauccuag

SEQ ID NO: 352630 - RNA, 22 nt, Human
guggaucaacugaggucaggag

SEQ ID NO: 352631 - RNA, 23 nt, Human
guggaucacgaggucaggaguuc

SEQ ID NO: 352632 - RNA, 23 nt, Human
guggcucacaccuguaaucccag

SEQ ID NO: 352633 - RNA, 21 nt, Human
uaaaaacacaaaaauuagcca

SEQ ID NO: 352634 - RNA, 21 nt, Human
uaaaaauacaaaaauuagcca

SEQ ID NO: 352635 - RNA, 18 nt, Human
uaagcugagaauacacaa

SEQ ID NO: 352636 - RNA, 21 nt, Human
uaaucaaguaacuuacaaugu

SEQ ID NO: 352637 - RNA, 22 nt, Human
uaaugaacucuuuauaaauaac

SEQ ID NO: 352638 - RNA, 21 nt, Human
uacacauuccugaguauacac

SEQ ID NO: 352639 - RNA, 24 nt, Human
uagcacuuugggaggcugaggcgg

SEQ ID NO: 352640 - RNA, 20 nt, Human
uagccgggcgugguggcacg

SEQ ID NO: 352641 - RNA, 22 nt, Human
uaucagaaaaaaaaaaaaaaaa

SEQ ID NO: 352642 - RNA, 26 nt, Human
uaucagaaaaaaaaaaaaaaaaaaaa

SEQ ID NO: 352643 - RNA, 20 nt, Human
uauuuuggaauuuucugcau

SEQ ID NO: 352644 - RNA, 25 nt, Human
ucaaaaaaaaaaaaaaaaccccaaa

SEQ ID NO: 352645 - RNA, 19 nt, Human
ucaaaagcuuauuccuggc

SEQ ID NO: 352646 - RNA, 22 nt, Human
ucacacgccuguaaucccagca

SEQ ID NO: 352647 - RNA, 21 nt, Human
ucacgaggucaggaguucaag

SEQ ID NO: 352648 - RNA, 24 nt, Human
ucacgaggucaggaguucaagacc

SEQ ID NO: 352649 - RNA, 24 nt, Human
ucacgaggucaggaguucaagacc

SEQ ID NO: 352650 - RNA, 22 nt, Human
ucacgccuguaaucccaguacu

SEQ ID NO: 352651 - RNA, 22 nt, Human
ucagaaaaaaaaaaaaaaaaaa

SEQ ID NO: 352652 - RNA, 23 nt, Human
ucaugccuguaauccuagcacuu

SEQ ID NO: 352653 - RNA, 23 nt, Human
uccaagaggacaucuggcaauau

SEQ ID NO: 352654 - RNA, 22 nt, Human
uccagccuggcaacagagugag

SEQ ID NO: 352655 - RNA, 23 nt, Human
uccagccuggcaacagagugaga

SEQ ID NO: 352656 - RNA, 20 nt, Human
uccaggcuauuuaaucaagu

SEQ ID NO: 352657 - RNA, 23 nt, Human
uccaucucaaaaaaaaaaaaaaa

SEQ ID NO: 352658 - RNA, 19 nt, Human
uccuggccgggcacggugg

SEQ ID NO: 352659 - RNA, 24 nt, Human
ucgccugaaccugggaggcggagg

SEQ ID NO: 352660 - RNA, 25 nt, Human
ucgccugaaccugggaggcggaggu

SEQ ID NO: 352661 - RNA, 23 nt, Human
ucgggaggcugaagaaggagaau

SEQ ID NO: 352662 - RNA, 23 nt, Human
ucgggaggcugaagaaggagaau

SEQ ID NO: 352663 - RNA, 21 nt, Human
ucucaaaaaaaaaaaaagcga

SEQ ID NO: 352664 - RNA, 21 nt, Human
ucucuacuaaaaacacaaaaa

SEQ ID NO: 352665 - RNA, 21 nt, Human
ucucuacuaaaaauacaaaaa

SEQ ID NO: 352666 - RNA, 21 nt, Human
ucucuacuaaaaauacaaaaa

SEQ ID NO: 352667 - RNA, 19 nt, Human
ucuggcaauaucuggagac

SEQ ID NO: 352668 - RNA, 21 nt, Human
ucugguguaucaccuaaaaga

SEQ ID NO: 352669 - RNA, 22 nt, Human
ucuguggaucucaacccggagc

SEQ ID NO: 352670 - RNA, 22 nt, Human
ucuuugguugucacacuugggg

SEQ ID NO: 352671 - RNA, 24 nt, Human
ugaaccugggaggcggagguugca

SEQ ID NO: 352672 - RNA, 24 nt, Human
ugaagaaggagaauugcuugaacc

SEQ ID NO: 352673 - RNA, 24 nt, Human
ugaagaaggagaauugcuugaacc

SEQ ID NO: 352674 - RNA, 23 nt, Human
ugaauuggguaagucaaaagcuu

SEQ ID NO: 352675 - RNA, 24 nt, Human
ugaccaauauggugaaacccuguc

SEQ ID NO: 352676 - RNA, 24 nt, Human
ugaccaauauggugaaacccuguc

SEQ ID NO: 352677 - RNA, 22 nt, Human
ugagccaagaucgugccacugc

SEQ ID NO: 352678 - RNA, 22 nt, Human
ugagccaagauugcgccacugc

SEQ ID NO: 352679 - RNA, 20 nt, Human
ugaggcaggagaaucgccug

SEQ ID NO: 352680 - RNA, 24 nt, Human
ugaggcaggagaaucgccugaacc

SEQ ID NO: 352681 - RNA, 25 nt, Human
ugaggcaggagaaucgccugaaccu

SEQ ID NO: 352682 - RNA, 22 nt, Human
ugaggcaggagaauugcuugaa

SEQ ID NO: 352683 - RNA, 25 nt, Human
ugaggcaggagaauugcuugaaguc

SEQ ID NO: 352684 - RNA, 26 nt, Human
ugaggcaggagaauugcuugaaguca

SEQ ID NO: 352685 - RNA, 27 nt, Human
ugaggcaggagaauugcuugaagucag

SEQ ID NO: 352686 - RNA, 22 nt, Human
ugaggcggguggaucaacugag

SEQ ID NO: 352687 - RNA, 24 nt, Human
ugaggcggguggaucaacugaggu

SEQ ID NO: 352688 - RNA, 26 nt, Human
ugaggcggguggaucaacugagguca

SEQ ID NO: 352689 - RNA, 18 nt, Human
ugaggucaggaguuugaa

SEQ ID NO: 352690 - RNA, 23 nt, Human
ugaggucaggaguuugaaaccag

SEQ ID NO: 352691 - RNA, 20 nt, Human
ugagguggguggaucacgag

SEQ ID NO: 352692 - RNA, 21 nt, Human
ugagguggguggaucacgagg

SEQ ID NO: 352693 - RNA, 24 nt, Human
ugagguggguggaucacgagguca

SEQ ID NO: 352694 - RNA, 23 nt, Human
ugagguggguggaucacgagguu

SEQ ID NO: 352695 - RNA, 22 nt, Human
ugcacuccagccuggacaacag

SEQ ID NO: 352696 - RNA, 22 nt, Human
ugcacuccagccuggacaacag

SEQ ID NO: 352697 - RNA, 21 nt, Human
ugcauaaugucaacguaugug

SEQ ID NO: 352698 - RNA, 23 nt, Human
ugccuguaaucccagcuacucgg

SEQ ID NO: 352699 - RNA, 24 nt, Human
ugccuguaaucccagcuacucggg

SEQ ID NO: 352700 - RNA, 23 nt, Human
ugccuguaauccuagcacuuugg

SEQ ID NO: 352701 - RNA, 23 nt, Human
ugccuguaauccuagcacuuugg

SEQ ID NO: 352702 - RNA, 18 nt, Human
ugccuuacaauuuuuuac

SEQ ID NO: 352703 - RNA, 23 nt, Human
uggaucaacugaggucaggaguu

SEQ ID NO: 352704 - RNA, 24 nt, Human
uggaucaacugaggucaggaguuu

SEQ ID NO: 352705 - RNA, 22 nt, Human
uggaucacgaggucaggaguuc

SEQ ID NO: 352706 - RNA, 26 nt, Human
uggcaauaucuggagacaucuuuggu

SEQ ID NO: 352707 - RNA, 21 nt, Human
uggcacgcgccuguaguccca

SEQ ID NO: 352708 - RNA, 24 nt, Human
uggccgggcacggugguucaugcc

SEQ ID NO: 352709 - RNA, 21 nt, Human
uggcucacaccuguaauccca

SEQ ID NO: 352710 - RNA, 22 nt, Human
uggcucacaccuguaaucccag

SEQ ID NO: 352711 - RNA, 24 nt, Human
uggcucacaccuguaaucccagca

SEQ ID NO: 352712 - RNA, 24 nt, Human
uggcucacacgccuguaaucccag

SEQ ID NO: 352713 - RNA, 26 nt, Human
uggcucacacgccuguaaucccagca

SEQ ID NO: 352714 - RNA, 22 nt, Human
uggcucacgccuguaaucccag

SEQ ID NO: 352715 - RNA, 24 nt, Human
ugggaggccaaggcgggcagauca

SEQ ID NO: 352716 - RNA, 29 nt, Human
ugggaggcggagguugcagugacaacggu

SEQ ID NO: 352717 - RNA, 24 nt, Human
ugggaggcggagguugcagugagc

SEQ ID NO: 352718 - RNA, 19 nt, Human
ugggaggcugaggcaggag

SEQ ID NO: 352719 - RNA, 22 nt, Human
ugggaggcugaggcaggagaau

SEQ ID NO: 352720 - RNA, 20 nt, Human
ugggaggcugaggcgggugg

SEQ ID NO: 352721 - RNA, 23 nt, Human
ugggaggcugaggcggguggauc

SEQ ID NO: 352722 - RNA, 24 nt, Human
ugggaggcugaggcggguggauca

SEQ ID NO: 352723 - RNA, 26 nt, Human
uggguggaucacgaggucaggaguuc

SEQ ID NO: 352724 - RNA, 21 nt, Human
uggugcaugccuguaauccca

SEQ ID NO: 352725 - RNA, 22 nt, Human
uggugcaugccuguaaucccag

SEQ ID NO: 352726 - RNA, 24 nt, Human
ugguggcacgcgccuguaguccca

SEQ ID NO: 352727 - RNA, 26 nt, Human
ugguggcucacacgccuguaauccca

SEQ ID NO: 352728 - RNA, 24 nt, Human
ugguggugcaugccuguaauccca

SEQ ID NO: 352729 - RNA, 24 nt, Human
ugguucaugccuguaauccuagca

SEQ ID NO: 352730 - RNA, 23 nt, Human
uguguauacugccuauacauuuu

SEQ ID NO: 352731 - RNA, 24 nt, Human
uuagccaggugugguggugcacgc

SEQ ID NO: 352732 - RNA, 24 nt, Human
uuagccaggugugguggugcaugc

SEQ ID NO: 352733 - RNA, 18 nt, Human
uuagccgggcgugguggc

SEQ ID NO: 352734 - RNA, 20 nt, Human
uuagccgggcgugguggcac

SEQ ID NO: 352735 - RNA, 25 nt, Human
uuccugagguggguggaucacgagg

SEQ ID NO: 352736 - RNA, 21 nt, Human
uuccugaguauacaccauugu

SEQ ID NO: 352737 - RNA, 20 nt, Human
uucuuugacaacaauacuaa

SEQ ID NO: 352738 - RNA, 24 nt, Human
uugaacccaggagguggagguugc

SEQ ID NO: 352739 - RNA, 24 nt, Human
uugaacccgggagguggagguugc

SEQ ID NO: 352740 - RNA, 22 nt, Human
uugcagugagccaagacugugc

SEQ ID NO: 352741 - RNA, 22 nt, Human
uugcagugagccaagaucgugc

SEQ ID NO: 352742 - RNA, 22 nt, Human
uugcagugagccaagauugcgc

SEQ ID NO: 352743 - RNA, 23 nt, Human
uugcgccacugcacuccagccug

SEQ ID NO: 352744 - RNA, 24 nt, Human
uugcuugaacccaggagguggagg

SEQ ID NO: 352745 - RNA, 24 nt, Human
uugcuugaacccgggagguggagg

SEQ ID NO: 352746 - RNA, 23 nt, Human
uuggaggcugaggcaggagaauc

SEQ ID NO: 352747 - RNA, 23 nt, Human
uugggaggcugaggcaggagaau

SEQ ID NO: 352748 - RNA, 25 nt, Human
uugggaggcugaggcggguggauca

SEQ ID NO: 352749 - RNA, 19 nt, Human
uuuagcucuguggaucuca

SEQ ID NO: 352750 - RNA, 23 nt, Human
uuucaugguugggcacgguggcu

SEQ ID NO: 352751 - RNA, 24 nt, Human
uuuuacaaguacgaguaucaacag

SEQ ID NO: 352752 - RNA, 18 nt, Human
aaaaaagaagaagagagc

SEQ ID NO: 352753 - RNA, 22 nt, Human
aaaaaaguaacaaauccuuagu

SEQ ID NO: 352754 - RNA, 19 nt, Human
aaaaaccaaacccaacucc

SEQ ID NO: 352755 - RNA, 18 nt, Human
aaaaacccaccaaugcua

SEQ ID NO: 352756 - RNA, 20 nt, Human
aaaaacccaccaaugcuacc

SEQ ID NO: 352757 - RNA, 22 nt, Human
aaaaacccaccaaugcuaccuc

SEQ ID NO: 352758 - RNA, 27 nt, Human
aaaaagaaaugcaaaguaaaauaaauc

SEQ ID NO: 352759 - RNA, 18 nt, Human
aaaaagaagaagagagca

SEQ ID NO: 352760 - RNA, 23 nt, Human
aaaaauuccugggacaaggcaau

SEQ ID NO: 352761 - RNA, 23 nt, Human
aaaacaaacaagcaaauuacaga

SEQ ID NO: 352762 - RNA, 24 nt, Human
aaaagaaaaaaaaaagccacugaa

SEQ ID NO: 352763 - RNA, 20 nt, Human
aaaagaagaagagagcaaag

SEQ ID NO: 352764 - RNA, 23 nt, Human
aaacaagcaaauuacagaguagg

SEQ ID NO: 352765 - RNA, 29 nt, Human
aaacacagagacagaaaaaaagggacccc

SEQ ID NO: 352766 - RNA, 22 nt, Human
aaacagaaacugaaacuucaaa

SEQ ID NO: 352767 - RNA, 22 nt, Human
aaagaaaaaaaaaagccacuga

SEQ ID NO: 352768 - RNA, 23 nt, Human
aaagaaguaaagcucacaaaaaa

SEQ ID NO: 352769 - RNA, 22 nt, Human
aaagacaaagcaaaauaaaaaa

SEQ ID NO: 352770 - RNA, 18 nt, Human
aaagggugcuugguugug

SEQ ID NO: 352771 - RNA, 21 nt, Human
aaauauccagcugucacugaa

SEQ ID NO: 352772 - RNA, 20 nt, Human
aaaucucuacauguaagaga

SEQ ID NO: 352773 - RNA, 22 nt, Human
aacaaaauauccagcugucacu

SEQ ID NO: 352774 - RNA, 20 nt, Human
aacaaaccaaaugcacaaga

SEQ ID NO: 352775 - RNA, 21 nt, Human
aacacagagacagaaaaaaaa

SEQ ID NO: 352776 - RNA, 21 nt, Human
aacacugguuugaagaaugaa

SEQ ID NO: 352777 - RNA, 22 nt, Human
aaccaaacccaacuccuauuug

SEQ ID NO: 352778 - RNA, 21 nt, Human
aaccuuuauacugcauuucau

SEQ ID NO: 352779 - RNA, 22 nt, Human
aacuugcaacuggguuuuccuu

SEQ ID NO: 352780 - RNA, 25 nt, Human
aagaaaaggaaauucagaacauuaa

SEQ ID NO: 352781 - RNA, 18 nt, Human
aagaaguaaagcucacaa

SEQ ID NO: 352782 - RNA, 21 nt, Human
aagagaccaaacaagucucac

SEQ ID NO: 352783 - RNA, 19 nt, Human
aagauuaauaauuuauaaa

SEQ ID NO: 352784 - RNA, 25 nt, Human
aagccaagaaaaggaaauucagaac

SEQ ID NO: 352785 - RNA, 20 nt, Human
aaguagaaacaagccaagaa

SEQ ID NO: 352786 - RNA, 19 nt, Human
aaguauauuccauuccaaa

SEQ ID NO: 352787 - RNA, 21 nt, Human
aaugugcaugugaaauguuag

SEQ ID NO: 352788 - RNA, 20 nt, Human
acaaaauaccauuaccaaaa

SEQ ID NO: 352789 - RNA, 18 nt, Human
acaaagcaaaauaaaaaa

SEQ ID NO: 352790 - RNA, 21 nt, Human
acaacuucauauauaaaagcc

SEQ ID NO: 352791 - RNA, 22 nt, Human
acaaggcaaugcauaaacaaac

SEQ ID NO: 352792 - RNA, 23 nt, Human
acagaaacugaaacuucaaacac

SEQ ID NO: 352793 - RNA, 18 nt, Human
acagcauacaggauaacc

SEQ ID NO: 352794 - RNA, 20 nt, Human
acaggcuggugaacaccacc

SEQ ID NO: 352795 - RNA, 22 nt, Human
acaggguuuuacugucaucaag

SEQ ID NO: 352796 - RNA, 21 nt, Human
acaguacagagacagaauggc

SEQ ID NO: 352797 - RNA, 21 nt, Human
accaacaaaccaaaugcacaa

SEQ ID NO: 352798 - RNA, 23 nt, Human
accucaguuaccucuuugaguug

SEQ ID NO: 352799 - RNA, 22 nt, Human
acuccauauggcacugaaacaa

SEQ ID NO: 352800 - RNA, 18 nt, Human
acuuaguccauccucugg

SEQ ID NO: 352801 - RNA, 25 nt, Human
agaaaaaaaaaaaaaaacccaccaa

SEQ ID NO: 352802 - RNA, 18 nt, Human
agaaagacaaagcaaaau

SEQ ID NO: 352803 - RNA, 22 nt, Human
agacaaagcaaaauaaaaaaaa

SEQ ID NO: 352804 - RNA, 23 nt, Human
agacagaaaaaaaaaaaaaaacc

SEQ ID NO: 352805 - RNA, 25 nt, Human
agacagaaaaaaaaaaaaagggacc

SEQ ID NO: 352806 - RNA, 24 nt, Human
agcaguaccuccuuuugaacugau

SEQ ID NO: 352807 - RNA, 19 nt, Human
agccaagaaaaggaaauuc

SEQ ID NO: 352808 - RNA, 29 nt, Human
aggcaggaagacagacuagaagggacccc

SEQ ID NO: 352809 - RNA, 19 nt, Human
aggcaggcauugccccagg

SEQ ID NO: 352810 - RNA, 19 nt, Human
agggugcuugguugugguc

SEQ ID NO: 352811 - RNA, 19 nt, Human
aggguggauggcagaagaa

SEQ ID NO: 352812 - RNA, 20 nt, Human
agugagaaaauggugacuau

SEQ ID NO: 352813 - RNA, 20 nt, Human
aguggaaucuuuauuucaca

SEQ ID NO: 352814 - RNA, 21 nt, Human
aguuagacauuaauacacaug

SEQ ID NO: 352815 - RNA, 20 nt, Human
aucagaguucuacucaaaag

SEQ ID NO: 352816 - RNA, 21 nt, Human
auccaaagaaagauagcugga

SEQ ID NO: 352817 - RNA, 24 nt, Human
auccaaagaaagauagcuggauac

SEQ ID NO: 352818 - RNA, 20 nt, Human
auccuuuucaugcacacaac

SEQ ID NO: 352819 - RNA, 23 nt, Human
aucguaguaccccaaccagaguu

SEQ ID NO: 352820 - RNA, 25 nt, Human
augaacaaaaaagaagaagagagca

SEQ ID NO: 352821 - RNA, 18 nt, Human
auguguaauacauauaua

SEQ ID NO: 352822 - RNA, 21 nt, Human
caaacacagagacagaaaaaa

SEQ ID NO: 352823 - RNA, 21 nt, Human
caaaccaaaugcacaagagaa

SEQ ID NO: 352824 - RNA, 20 nt, Human
caaaguacuguaccaacugc

SEQ ID NO: 352825 - RNA, 23 nt, Human
caaccagaguucguuuuguuuuc

SEQ ID NO: 352826 - RNA, 28 nt, Human
caacuucaaaaaucaaagcaguacaacu

SEQ ID NO: 352827 - RNA, 19 nt, Human
caagacagucggcuaacca

SEQ ID NO: 352828 - RNA, 23 nt, Human
caagacagucggcuaaccaacaa

SEQ ID NO: 352829 - RNA, 20 nt, Human
caauccugaagcauaguagc

SEQ ID NO: 352830 - RNA, 20 nt, Human
cacaauaccuuaaagauggu

SEQ ID NO: 352831 - RNA, 26 nt, Human
cacagagacagaaaaaaaaaaaaaaa

SEQ ID NO: 352832 - RNA, 19 nt, Human
caccaauaagaaaccuccc

SEQ ID NO: 352833 - RNA, 21 nt, Human
caccaauaagaaaccucccaa

SEQ ID NO: 352834 - RNA, 18 nt, Human
cacugacugugcucccac

SEQ ID NO: 352835 - RNA, 18 nt, Human
cagcagauaacuuccuuc

SEQ ID NO: 352836 - RNA, 21 nt, Human
cagccuguuucucaaaccaaa

SEQ ID NO: 352837 - RNA, 24 nt, Human
cagccuuagguggcacacacuguu

SEQ ID NO: 352838 - RNA, 18 nt, Human
cagucucagacaagauac

SEQ ID NO: 352839 - RNA, 19 nt, Human
cauaguagccuugauuuuc

SEQ ID NO: 352840 - RNA, 21 nt, Human
caucagaucaucaccagauca

SEQ ID NO: 352841 - RNA, 22 nt, Human
caucuggggucacugacugugc

SEQ ID NO: 352842 - RNA, 23 nt, Human
caugagaaaaaauugugugguuu

SEQ ID NO: 352843 - RNA, 25 nt, Human
cauuaaaaaauuggauucauucagc

SEQ ID NO: 352844 - RNA, 20 nt, Human
cauuucuuagcaaauucaug

SEQ ID NO: 352845 - RNA, 23 nt, Human
ccaaagaaguaaagcucacaaaa

SEQ ID NO: 352846 - RNA, 24 nt, Human
ccaaccagaguucguuuuguuuuc

SEQ ID NO: 352847 - RNA, 25 nt, Human
ccaacccucccuuuuaaaauaacaa

SEQ ID NO: 352848 - RNA, 21 nt, Human
ccaaccuaaacuagcaucaua

SEQ ID NO: 352849 - RNA, 18 nt, Human
ccacaaguacaauuugag

SEQ ID NO: 352850 - RNA, 19 nt, Human
ccacaagugaauguuuuca

SEQ ID NO: 352851 - RNA, 20 nt, Human
ccacacauuuaaaauccaga

SEQ ID NO: 352852 - RNA, 23 nt, Human
ccagaaaagaaaaaaaaaagcca

SEQ ID NO: 352853 - RNA, 24 nt, Human
cccauacuauuuaaccagacaauc

SEQ ID NO: 352854 - RNA, 18 nt, Human
cccaugaacaaaaaagaa

SEQ ID NO: 352855 - RNA, 21 nt, Human
cccugcacauaaccaaggaau

SEQ ID NO: 352856 - RNA, 22 nt, Human
ccucccaacccucccuuuuaaa

SEQ ID NO: 352857 - RNA, 21 nt, Human
ccugcaugcauacuuccaaaa

SEQ ID NO: 352858 - RNA, 19 nt, Human
ccuugugccgugccucuuc

SEQ ID NO: 352859 - RNA, 22 nt, Human
ccuugugccgugccucuucugg

SEQ ID NO: 352860 - RNA, 21 nt, Human
cuaaccaacaaaccaaaugca

SEQ ID NO: 352861 - RNA, 25 nt, Human
cucaaaccaaauaggaaaaacagcc

SEQ ID NO: 352862 - RNA, 21 nt, Human
cugaaacuucaaacacagaga

SEQ ID NO: 352863 - RNA, 22 nt, Human
cugcuguaacuuaaucuaagca

SEQ ID NO: 352864 - RNA, 20 nt, Human
cuuaccagguuucccauaau

SEQ ID NO: 352865 - RNA, 23 nt, Human
cuucuacauauuuauagugguua

SEQ ID NO: 352866 - RNA, 19 nt, Human
cuuugauucucugaguuuu

SEQ ID NO: 352867 - RNA, 20 nt, Human
gaaauucugauuuuuuuuac

SEQ ID NO: 352868 - RNA, 23 nt, Human
gagaaagacaaagcaaaauaaaa

SEQ ID NO: 352869 - RNA, 26 nt, Human
gcaauaaaagggccauacauuuugaa

SEQ ID NO: 352870 - RNA, 30 nt, Human
gcacucaaaucucuacauguaagagaccaa

SEQ ID NO: 352871 - RNA, 22 nt, Human
gcagcaagugacccaggguuaa

SEQ ID NO: 352872 - RNA, 23 nt, Human
gcuggaacauuuuaccucaguua

SEQ ID NO: 352873 - RNA, 21 nt, Human
ggaaagggugcuugguugugg

SEQ ID NO: 352874 - RNA, 19 nt, Human
ggauucauucagcuuaaaa

SEQ ID NO: 352875 - RNA, 19 nt, Human
guaaaauaaaacuagaagc

SEQ ID NO: 352876 - RNA, 18 nt, Human
guacucaauggagggaag

SEQ ID NO: 352877 - RNA, 18 nt, Human
guagucacuguaagccau

SEQ ID NO: 352878 - RNA, 24 nt, Human
gucaaggucaucuggggucacuga

SEQ ID NO: 352879 - RNA, 23 nt, Human
gucaucuuugauuuacuuuuucu

SEQ ID NO: 352880 - RNA, 23 nt, Human
gucucugcaaguccucuuaaaaa

SEQ ID NO: 352881 - RNA, 20 nt, Human
guugccacaguuugcaucau

SEQ ID NO: 352882 - RNA, 23 nt, Human
guuuuguuuucuaauuucuccca

SEQ ID NO: 352883 - RNA, 20 nt, Human
uaaaacuagaagcaaaauga

SEQ ID NO: 352884 - RNA, 19 nt, Human
uaaaauccagaucgugccu

SEQ ID NO: 352885 - RNA, 23 nt, Human
uaaaaugaaguagaaacaagcca

SEQ ID NO: 352886 - RNA, 21 nt, Human
uaaaucaucagaucaucacca

SEQ ID NO: 352887 - RNA, 21 nt, Human
uaacagugagaaaauggugac

SEQ ID NO: 352888 - RNA, 21 nt, Human
uaagagaccaaacaagucuca

SEQ ID NO: 352889 - RNA, 24 nt, Human
uaaguauauuccauuccaaagaag

SEQ ID NO: 352890 - RNA, 22 nt, Human
uaauacacaugcuauacacaua

SEQ ID NO: 352891 - RNA, 23 nt, Human
uacaaauucaguuuaagcuguaa

SEQ ID NO: 352892 - RNA, 21 nt, Human
uacaagaguugccuaaagcaa

SEQ ID NO: 352893 - RNA, 18 nt, Human
uacagagacagaauggcu

SEQ ID NO: 352894 - RNA, 21 nt, Human
uacaggauaaccaaaagugga

SEQ ID NO: 352895 - RNA, 22 nt, Human
uacaggcuggugaacaccacca

SEQ ID NO: 352896 - RNA, 18 nt, Human
uacauguaagagaccaaa

SEQ ID NO: 352897 - RNA, 18 nt, Human
uaccuagaaaacagaaac

SEQ ID NO: 352898 - RNA, 19 nt, Human
uacgugucucugcaagucc

SEQ ID NO: 352899 - RNA, 23 nt, Human
uacgugucucugcaaguccucuu

SEQ ID NO: 352900 - RNA, 20 nt, Human
uagaaaacagaaacugaagg

SEQ ID NO: 352901 - RNA, 21 nt, Human
uaggaaaaacagcaugugaga

SEQ ID NO: 352902 - RNA, 21 nt, Human
uaggagagaugggcuaccaug

SEQ ID NO: 352903 - RNA, 18 nt, Human
uagguaccaugucccaug

SEQ ID NO: 352904 - RNA, 18 nt, Human
uaugaacaacaagacugc

SEQ ID NO: 352905 - RNA, 24 nt, Human
uauggcacugaaacaaacauucag

SEQ ID NO: 352906 - RNA, 28 nt, Human
ucaaaacaaacaagcaaauuacagagua

SEQ ID NO: 352907 - RNA, 18 nt, Human
ucaaaauauaauacuacc

SEQ ID NO: 352908 - RNA, 24 nt, Human
ucaaaauauaauacuaccaauaaa

SEQ ID NO: 352909 - RNA, 21 nt, Human
ucaaaccaaauaggaaaaaca

SEQ ID NO: 352910 - RNA, 19 nt, Human
ucaaagcacguacucaaug

SEQ ID NO: 352911 - RNA, 24 nt, Human
ucacuauuuacaagaguugccuaa

SEQ ID NO: 352912 - RNA, 20 nt, Human
ucagaaacaaaauauccagc

SEQ ID NO: 352913 - RNA, 22 nt, Human
ucauaaaggaaguuaggaaaga

SEQ ID NO: 352914 - RNA, 20 nt, Human
uccaaagaaagauagcugga

SEQ ID NO: 352915 - RNA, 23 nt, Human
ucccauacuauuuaaccagacaa

SEQ ID NO: 352916 - RNA, 21 nt, Human
uccucuggcuucuggaucaag

SEQ ID NO: 352917 - RNA, 22 nt, Human
uccucuuaaaaaauuccuggga

SEQ ID NO: 352918 - RNA, 21 nt, Human
ucgaauuuggaagcaauuauc

SEQ ID NO: 352919 - RNA, 18 nt, Human
ucuaccaugguguuccuu

SEQ ID NO: 352920 - RNA, 18 nt, Human
ucugggaaaaaagcauga

SEQ ID NO: 352921 - RNA, 23 nt, Human
ucuguuauauucaaaacaaacaa

SEQ ID NO: 352922 - RNA, 26 nt, Human
ucuucaguuuuuuucccauacuauuu

SEQ ID NO: 352923 - RNA, 22 nt, Human
ucuuugaaggagaggaguaugg

SEQ ID NO: 352924 - RNA, 18 nt, Human
ucuuugauuuacuuuuuc

SEQ ID NO: 352925 - RNA, 19 nt, Human
ucuuugauuuacuuuuucu

SEQ ID NO: 352926 - RNA, 27 nt, Human
ugaaacaaacauucagcucaguuuagg

SEQ ID NO: 352927 - RNA, 21 nt, Human
ugaaacuucaaacacagagac

SEQ ID NO: 352928 - RNA, 22 nt, Human
ugaaacuucaaacacagagaca

SEQ ID NO: 352929 - RNA, 24 nt, Human
ugaacaggcaggcauugccccagg

SEQ ID NO: 352930 - RNA, 21 nt, Human
ugaagaaugaacaugaggaua

SEQ ID NO: 352931 - RNA, 21 nt, Human
ugaauaguauagaacaguaca

SEQ ID NO: 352932 - RNA, 18 nt, Human
ugacacaucuuguuuuga

SEQ ID NO: 352933 - RNA, 19 nt, Human
ugacuaugauagcuaagca

SEQ ID NO: 352934 - RNA, 26 nt, Human
ugagaugauucccugcacauaaccaa

SEQ ID NO: 352935 - RNA, 21 nt, Human
ugagugucucacauauguuuc

SEQ ID NO: 352936 - RNA, 22 nt, Human
ugaguugccugcugggaagcug

SEQ ID NO: 352937 - RNA, 19 nt, Human
ugcaaaaagaaaugcaaag

SEQ ID NO: 352938 - RNA, 22 nt, Human
ugcacaagagaauacuaaacag

SEQ ID NO: 352939 - RNA, 22 nt, Human
ugccauugacugcuaaucaaaa

SEQ ID NO: 352940 - RNA, 22 nt, Human
ugcuaaagggaaaaugaggguu

SEQ ID NO: 352941 - RNA, 21 nt, Human
ugcuaaucaaaaauaagccuu

SEQ ID NO: 352942 - RNA, 23 nt, Human
uggagggaaggaaaguuagauau

SEQ ID NO: 352943 - RNA, 23 nt, Human
uggcagaagaaaaaaagugaaaa

SEQ ID NO: 352944 - RNA, 23 nt, Human
uggugaacaggcaggcauugccc

SEQ ID NO: 352945 - RNA, 22 nt, Human
uguaaaauaaaacuagaagcaa

SEQ ID NO: 352946 - RNA, 22 nt, Human
uguaagagaccaaacaagucuc

SEQ ID NO: 352947 - RNA, 19 nt, Human
uguaauuauguugaaacuc

SEQ ID NO: 352948 - RNA, 25 nt, Human
uguaccaacugcacucaaaucucua

SEQ ID NO: 352949 - RNA, 22 nt, Human
uguagcccacuuccaauugcac

SEQ ID NO: 352950 - RNA, 23 nt, Human
ugucacugaucaaggcuggaccc

SEQ ID NO: 352951 - RNA, 20 nt, Human
ugucuggaaagggugcuugg

SEQ ID NO: 352952 - RNA, 21 nt, Human
ugugcaaaaagaaaugcaaag

SEQ ID NO: 352953 - RNA, 18 nt, Human
uguguaauacauauauau

SEQ ID NO: 352954 - RNA, 22 nt, Human
uguuuaaaagaaauuaacccag

SEQ ID NO: 352955 - RNA, 24 nt, Human
uuaaaagauaacauuucuuagcaa

SEQ ID NO: 352956 - RNA, 21 nt, Human
uuaacccagauaaaaagaauu

SEQ ID NO: 352957 - RNA, 28 nt, Human
uuaacccagauaaaaagaauuuggccuc

SEQ ID NO: 352958 - RNA, 21 nt, Human
uuaggagagaugggcuaccau

SEQ ID NO: 352959 - RNA, 25 nt, Human
uuaucugggaggaaaguuuugcuua

SEQ ID NO: 352960 - RNA, 20 nt, Human
uucagaagcuucugaauuuc

SEQ ID NO: 352961 - RNA, 24 nt, Human
uuccaaagaaguaaagcucacaaa

SEQ ID NO: 352962 - RNA, 23 nt, Human
uucgcugucacugaucaaggcug

SEQ ID NO: 352963 - RNA, 20 nt, Human
uugaaagacaccauucacaa

SEQ ID NO: 352964 - RNA, 18 nt, Human
uugagacagucuuuaagu

SEQ ID NO: 352965 - RNA, 21 nt, Human
uugcacuuuguguacauguuc

SEQ ID NO: 352966 - RNA, 25 nt, Human
uugccacaguuugcaucauguaggc

SEQ ID NO: 352967 - RNA, 21 nt, Human
uugcuaaagggaaaaugaggg

SEQ ID NO: 352968 - RNA, 23 nt, Human
uugcuuagguaccaugucccaug

SEQ ID NO: 352969 - RNA, 18 nt, Human
uuggacuuguaaaaaucu

SEQ ID NO: 352970 - RNA, 20 nt, Human
uuggacuuguaaaaaucuga

SEQ ID NO: 352971 - RNA, 19 nt, Human
uugguugugguauauuaca

SEQ ID NO: 352972 - RNA, 21 nt, Human
uuuaggaaaaguaugucugug

SEQ ID NO: 352973 - RNA, 22 nt, Human
uuucagaaacaaaauauccagc

SEQ ID NO: 352974 - RNA, 21 nt, Human
uuucuggcagaugagggauuc

SEQ ID NO: 352975 - RNA, 22 nt, Human
uuuguagcccacuuccaauugc

SEQ ID NO: 352976 - RNA, 21 nt, Human
uuuuauuuuucguaguuucua

SEQ ID NO: 352977 - RNA, 25 nt, Human
uuuuccuuuuuaacacugaucaguu

SEQ ID NO: 352978 - RNA, 25 nt, Human
uuuucuggcagaugagggauucugg

SEQ ID NO: 352979 - RNA, 24 nt, Human
uuuuucuuauucguaaaaaaauac

SEQ ID NO: 352980 - RNA, 23 nt, Human
aaaaacaacuguaguaaaaacac

SEQ ID NO: 352981 - RNA, 20 nt, Human
aaaacucaaacacaaaccac

SEQ ID NO: 352982 - RNA, 21 nt, Human
aaaacucaaacacaaaccaca

SEQ ID NO: 352983 - RNA, 21 nt, Human
aaaagaaagaaagccacaaaa

SEQ ID NO: 352984 - RNA, 24 nt, Human
aaacaaauagggaauaacuauuag

SEQ ID NO: 352985 - RNA, 20 nt, Human
aaacagauguaacauaauua

SEQ ID NO: 352986 - RNA, 22 nt, Human
aaccacacugguauuucacaca

SEQ ID NO: 352987 - RNA, 20 nt, Human
aacccuccaugcauuugccu

SEQ ID NO: 352988 - RNA, 21 nt, Human
aagaguucuuuucacccaaag

SEQ ID NO: 352989 - RNA, 27 nt, Human
aauaaaacucaaacacaaaccacacug

SEQ ID NO: 352990 - RNA, 23 nt, Human
acauaucacaucugacaaacauc

SEQ ID NO: 352991 - RNA, 24 nt, Human
agaaaauauccuuucccuucauua

SEQ ID NO: 352992 - RNA, 19 nt, Human
agaagaaaacaaauaggga

SEQ ID NO: 352993 - RNA, 20 nt, Human
agaguucuuuucacccaaag

SEQ ID NO: 352994 - RNA, 23 nt, Human
agcaagggagaguuagaaaagga

SEQ ID NO: 352995 - RNA, 24 nt, Human
agcacccuaacauacagaagaaaa

SEQ ID NO: 352996 - RNA, 22 nt, Human
agccaacacuuucuugauccug

SEQ ID NO: 352997 - RNA, 19 nt, Human
aggaaagggaacacugagu

SEQ ID NO: 352998 - RNA, 24 nt, Human
aggcaagaagggccagagacccga

SEQ ID NO: 352999 - RNA, 19 nt, Human
aggcaucuggcauaguagg

SEQ ID NO: 353000 - RNA, 25 nt, Human
aguuagaaaaggaauucugagauuu

SEQ ID NO: 353001 - RNA, 23 nt, Human
auccugagaguaggaaagggaac

SEQ ID NO: 353002 - RNA, 22 nt, Human
aucugacaaacaucuuuguagg

SEQ ID NO: 353003 - RNA, 18 nt, Human
auugugcauaguaacccu

SEQ ID NO: 353004 - RNA, 25 nt, Human
caaaaaacaacuguaguaaaaacac

SEQ ID NO: 353005 - RNA, 18 nt, Human
caaaagaaagaaagccac

SEQ ID NO: 353006 - RNA, 22 nt, Human
caaaauauuguguuucugugcc

SEQ ID NO: 353007 - RNA, 19 nt, Human
caaagaaaauaacacugua

SEQ ID NO: 353008 - RNA, 20 nt, Human
caaagcacauccaucuuucu

SEQ ID NO: 353009 - RNA, 20 nt, Human
caagaagggccagagacccg

SEQ ID NO: 353010 - RNA, 19 nt, Human
cauaucacaucugacaaac

SEQ ID NO: 353011 - RNA, 21 nt, Human
cauaucacaucugacaaacau

SEQ ID NO: 353012 - RNA, 22 nt, Human
cauaucacaucugacaaacauc

SEQ ID NO: 353013 - RNA, 21 nt, Human
cauccaucuuucuguauucuu

SEQ ID NO: 353014 - RNA, 23 nt, Human
ccagaguuuuucugccccuuuaa

SEQ ID NO: 353015 - RNA, 21 nt, Human
cccuaacauacagaagaaaac

SEQ ID NO: 353016 - RNA, 18 nt, Human
cucucuuauuucccagag

SEQ ID NO: 353017 - RNA, 19 nt, Human
gaaggccguccuugccugc

SEQ ID NO: 353018 - RNA, 19 nt, Human
gaaguuuuucaucguggaa

SEQ ID NO: 353019 - RNA, 22 nt, Human
gagcacccuaacauacagaaga

SEQ ID NO: 353020 - RNA, 27 nt, Human
gagcacccuaacauacagaagaaaaca

SEQ ID NO: 353021 - RNA, 23 nt, Human
gaguucuuuucacccaaagguuu

SEQ ID NO: 353022 - RNA, 26 nt, Human
gggcauucaacaucugucauuuuuuu

SEQ ID NO: 353023 - RNA, 19 nt, Human
ggugauggguguugcgguu

SEQ ID NO: 353024 - RNA, 18 nt, Human
gugaucaacugaaaacug

SEQ ID NO: 353025 - RNA, 20 nt, Human
uaaaacucaaacacaaacca

SEQ ID NO: 353026 - RNA, 21 nt, Human
uaaaacucaaacacaaaccac

SEQ ID NO: 353027 - RNA, 23 nt, Human
uaaaacucaaacacaaaccacac

SEQ ID NO: 353028 - RNA, 21 nt, Human
uaaaauucucaauaaaacuca

SEQ ID NO: 353029 - RNA, 23 nt, Human
uaaauaaacauaaaugcuugcuc

SEQ ID NO: 353030 - RNA, 22 nt, Human
uaguucaaaacguuuggccuca

SEQ ID NO: 353031 - RNA, 25 nt, Human
ucaaaaaacaacuguaguaaaaaca

SEQ ID NO: 353032 - RNA, 20 nt, Human
ucaguaggauuugcaccauu

SEQ ID NO: 353033 - RNA, 21 nt, Human
ucccagaguuuuucugccccu

SEQ ID NO: 353034 - RNA, 22 nt, Human
uccccagaugcaccuguuucug

SEQ ID NO: 353035 - RNA, 26 nt, Human
uccccagaugcaccuguuucugauuc

SEQ ID NO: 353036 - RNA, 19 nt, Human
uccuuaucacaucucuguu

SEQ ID NO: 353037 - RNA, 22 nt, Human
ucuccaauucuaccauguuuuc

SEQ ID NO: 353038 - RNA, 19 nt, Human
ucucuucaccuuugcuugg

SEQ ID NO: 353039 - RNA, 24 nt, Human
ugaaaacuggagauuccuuuggaa

SEQ ID NO: 353040 - RNA, 24 nt, Human
ugaaauaaauuuaaaacagaugua

SEQ ID NO: 353041 - RNA, 18 nt, Human
ugaagggcaaaagaaaga

SEQ ID NO: 353042 - RNA, 21 nt, Human
ugaagggcaaaagaaagaaag

SEQ ID NO: 353043 - RNA, 20 nt, Human
ugaaguggugauggguguug

SEQ ID NO: 353044 - RNA, 19 nt, Human
ugaucaacugaaaacugga

SEQ ID NO: 353045 - RNA, 18 nt, Human
ugauccuuaucacaucuc

SEQ ID NO: 353046 - RNA, 19 nt, Human
ugccagugaucaacugaaa

SEQ ID NO: 353047 - RNA, 21 nt, Human
uggagauuccuuuggaauugu

SEQ ID NO: 353048 - RNA, 23 nt, Human
uucaaaacguuuggccucaugga

SEQ ID NO: 353049 - RNA, 21 nt, Human
uucaguaggauuugcaccauu

SEQ ID NO: 353050 - RNA, 23 nt, Human
uucauuagccaacacuuucuuga

SEQ ID NO: 353051 - RNA, 24 nt, Human
uucucucuuauuucccagaguuuu

SEQ ID NO: 353052 - RNA, 21 nt, Human
uugcauuuaugcuuuuauuag

SEQ ID NO: 353053 - RNA, 22 nt, Human
uuuaccauaucauaguugacag

SEQ ID NO: 353054 - RNA, 19 nt, Human
uuuugggaagcaguuguuc

SEQ ID NO: 353055 - RNA, 21 nt, Human
uuuuuuuccucuaaacucugg

SEQ ID NO: 353056 - RNA, 18 nt, Human
aagccagguccccaagga

SEQ ID NO: 353057 - RNA, 18 nt, Human
agaaugaagccagguccc

SEQ ID NO: 353058 - RNA, 24 nt, Human
agcagaaugaagccagguccccaa

SEQ ID NO: 353059 - RNA, 22 nt, Human
agggcccaaaauagggagugug

SEQ ID NO: 353060 - RNA, 26 nt, Human
cagcacagugagcaacaagcaacagg

SEQ ID NO: 353061 - RNA, 18 nt, Human
gagggcccaaaauaggga

SEQ ID NO: 353062 - RNA, 20 nt, Human
gccacagucucagcuuggcu

SEQ ID NO: 353063 - RNA, 20 nt, Human
ggcggguuugcugugcuggu

SEQ ID NO: 353064 - RNA, 24 nt, Human
gggagugugggugaugagggugga

SEQ ID NO: 353065 - RNA, 19 nt, Human
uagggagugugggugauga

SEQ ID NO: 353066 - RNA, 21 nt, Human
uaugacucaacacauugccac

SEQ ID NO: 353067 - RNA, 24 nt, Human
uauuucuuggugccuccaagagcu

SEQ ID NO: 353068 - RNA, 18 nt, Human
uccccaaggaagugaggg

SEQ ID NO: 353069 - RNA, 19 nt, Human
ugaaggacaggguuacgag

SEQ ID NO: 353070 - RNA, 21 nt, Human
ugacucaacacauugccacag

SEQ ID NO: 353071 - RNA, 19 nt, Human
ugccaagggucgggugcca

SEQ ID NO: 353072 - RNA, 23 nt, Human
ugccaagggucgggugccaagag

SEQ ID NO: 353073 - RNA, 20 nt, Human
ugguacacuuugaucccggc

SEQ ID NO: 353074 - RNA, 18 nt, Human
uuucuuggugccuccaag

SEQ ID NO: 353075 - RNA, 21 nt, Human
uuuuuuuuuugaaggacaggg

SEQ ID NO: 353076 - RNA, 25 nt, Human
uuuuuuuuuuuugaaggacaggguu

SEQ ID NO: 353077 - RNA, 28 nt, Human
uuuuuuuuuuuuuuuuugaaggacaggg

SEQ ID NO: 353078 - RNA, 22 nt, Human
aaaacaagagucaagaaagagc

SEQ ID NO: 353079 - RNA, 20 nt, Human
aaacguuucauggaaggauu

SEQ ID NO: 353080 - RNA, 24 nt, Human
aaagacaaaaagcugagcuguaua

SEQ ID NO: 353081 - RNA, 28 nt, Human
aaauaggacucuuucaacuugagcagga

SEQ ID NO: 353082 - RNA, 22 nt, Human
aacagcgcaggcuauuucucuc

SEQ ID NO: 353083 - RNA, 21 nt, Human
aacuguuggucagguagaaau

SEQ ID NO: 353084 - RNA, 22 nt, Human
acccccaaacuaaaaaacagcg

SEQ ID NO: 353085 - RNA, 23 nt, Human
acuaauaauaucgugauaaaaga

SEQ ID NO: 353086 - RNA, 20 nt, Human
agaagguggggaggcugaag

SEQ ID NO: 353087 - RNA, 20 nt, Human
agaaguggugggguugaggg

SEQ ID NO: 353088 - RNA, 22 nt, Human
agaaucuagguaaguggauaaa

SEQ ID NO: 353089 - RNA, 19 nt, Human
aggcuauuucucucuucuc

SEQ ID NO: 353090 - RNA, 18 nt, Human
aggucugggggcagggga

SEQ ID NO: 353091 - RNA, 26 nt, Human
agguggcugaagaagguggggaggcu

SEQ ID NO: 353092 - RNA, 20 nt, Human
aguuauaaaagaaguggugg

SEQ ID NO: 353093 - RNA, 24 nt, Human
auuuagaagugucugucaucaagu

SEQ ID NO: 353094 - RNA, 23 nt, Human
caaaacccccaaacuaaaaaaca

SEQ ID NO: 353095 - RNA, 27 nt, Human
cacaugaauccuuucccuuuauggucu

SEQ ID NO: 353096 - RNA, 19 nt, Human
caccuguuuuaacucuucc

SEQ ID NO: 353097 - RNA, 19 nt, Human
cacuugcagcuagcauuuc

SEQ ID NO: 353098 - RNA, 22 nt, Human
cagcaaaacccccaaacuaaaa

SEQ ID NO: 353099 - RNA, 20 nt, Human
cagcgcaggcuauuucucuc

SEQ ID NO: 353100 - RNA, 27 nt, Human
caggcuauuucucucuucucuccuuuu

SEQ ID NO: 353101 - RNA, 23 nt, Human
ccaagaauuuucuuucaccaagg

SEQ ID NO: 353102 - RNA, 20 nt, Human
ccaguuaaauaggauggucc

SEQ ID NO: 353103 - RNA, 19 nt, Human
cccccaaacuaaaaaacag

SEQ ID NO: 353104 - RNA, 22 nt, Human
cccccaaacuaaaaaacagcgc

SEQ ID NO: 353105 - RNA, 19 nt, Human
cucuuccauaugacaucaa

SEQ ID NO: 353106 - RNA, 22 nt, Human
cugaguccauauucacauaugu

SEQ ID NO: 353107 - RNA, 24 nt, Human
cuucccagaugcacugaaggaaac

SEQ ID NO: 353108 - RNA, 21 nt, Human
gaaaacaagagucaagaaaga

SEQ ID NO: 353109 - RNA, 19 nt, Human
gaaaucuucccagaugcac

SEQ ID NO: 353110 - RNA, 20 nt, Human
gagguggcugaagaaggugg

SEQ ID NO: 353111 - RNA, 26 nt, Human
gcaaaacccccaaacuaaaaaacagg

SEQ ID NO: 353112 - RNA, 22 nt, Human
gcaggcuauuucucucuucucu

SEQ ID NO: 353113 - RNA, 19 nt, Human
ggaaaggagagcauuucau

SEQ ID NO: 353114 - RNA, 18 nt, Human
ggaguuagaaagaaagga

SEQ ID NO: 353115 - RNA, 21 nt, Human
guccaauucacagacggcgag

SEQ ID NO: 353116 - RNA, 29 nt, Human
uaaguggauaaaaggucugggggcagggg

SEQ ID NO: 353117 - RNA, 22 nt, Human
uauaagaaauaggaaugggucu

SEQ ID NO: 353118 - RNA, 22 nt, Human
ucccagaugcacugaaggaaac

SEQ ID NO: 353119 - RNA, 19 nt, Human
ucucagguccuugcccaaa

SEQ ID NO: 353120 - RNA, 21 nt, Human
ucuccucagaaaagacaaaaa

SEQ ID NO: 353121 - RNA, 18 nt, Human
ucucuaguucuucugcag

SEQ ID NO: 353122 - RNA, 18 nt, Human
ucucucuucucuccuuuu

SEQ ID NO: 353123 - RNA, 26 nt, Human
ucugcagcccauugagccuugcgugc

SEQ ID NO: 353124 - RNA, 21 nt, Human
ucugggggcaggggaaaggag

SEQ ID NO: 353125 - RNA, 21 nt, Human
ugaagaagguggggaggcuga

SEQ ID NO: 353126 - RNA, 20 nt, Human
ugauaaaagaaacauugacu

SEQ ID NO: 353127 - RNA, 20 nt, Human
ugcaaaauugcauguuacag

SEQ ID NO: 353128 - RNA, 18 nt, Human
ugcaaauaggacucuuuc

SEQ ID NO: 353129 - RNA, 21 nt, Human
ugcuuggcacucaugagaugc

SEQ ID NO: 353130 - RNA, 20 nt, Human
uggaagucagccaacugaaa

SEQ ID NO: 353131 - RNA, 23 nt, Human
uggucuuauuuguuucuccucag

SEQ ID NO: 353132 - RNA, 20 nt, Human
uguuacaggguaaccuuuca

SEQ ID NO: 353133 - RNA, 26 nt, Human
uuagaaagaaaggagagcguagacuu

SEQ ID NO: 353134 - RNA, 18 nt, Human
uucauuuagaagugucug

SEQ ID NO: 353135 - RNA, 21 nt, Human
uucuccucagaaaagacaaaa

SEQ ID NO: 353136 - RNA, 22 nt, Human
uucuucugcagcccauugagcc

SEQ ID NO: 353137 - RNA, 24 nt, Human
uuuaacucuuccauaugacaucaa

SEQ ID NO: 353138 - RNA, 27 nt, Human
uuugcuugguccuucucuaguucuucu

SEQ ID NO: 353139 - RNA, 21 nt, Human
aacaggcugguccagagcuaa

SEQ ID NO: 353140 - RNA, 21 nt, Human
acaggguugguccagagcggg

SEQ ID NO: 353141 - RNA, 18 nt, Human
acuccagaagaugcuaca

SEQ ID NO: 353142 - RNA, 22 nt, Human
acuccagaagaugcuacaggaa

SEQ ID NO: 353143 - RNA, 19 nt, Human
agagaagaggugggacagg

SEQ ID NO: 353144 - RNA, 20 nt, Human
agaggugggacaggaagggg

SEQ ID NO: 353145 - RNA, 24 nt, Human
agcacagagacuacugcagaaaca

SEQ ID NO: 353146 - RNA, 18 nt, Human
aggaaacaggguuggucc

SEQ ID NO: 353147 - RNA, 18 nt, Human
aggaauuucuuccaauua

SEQ ID NO: 353148 - RNA, 19 nt, Human
agguauuuuuauuucucca

SEQ ID NO: 353149 - RNA, 21 nt, Human
caagaggccucaucaacagca

SEQ ID NO: 353150 - RNA, 19 nt, Human
caaguaacaggugagucaa

SEQ ID NO: 353151 - RNA, 19 nt, Human
cagaagaugcuacaggaau

SEQ ID NO: 353152 - RNA, 27 nt, Human
cagagcagagguccaagaggccucauc

SEQ ID NO: 353153 - RNA, 21 nt, Human
cagaggacucucuggaagccu

SEQ ID NO: 353154 - RNA, 18 nt, Human
cagccucuggugccaucc

SEQ ID NO: 353155 - RNA, 21 nt, Human
ccacaaucccaaacucaggaa

SEQ ID NO: 353156 - RNA, 19 nt, Human
ccacuggagacuccagaag

SEQ ID NO: 353157 - RNA, 24 nt, Human
cuagcuugauucuuggccuucugc

SEQ ID NO: 353158 - RNA, 22 nt, Human
cucaucaacagcaaccacugga

SEQ ID NO: 353159 - RNA, 21 nt, Human
cugguauuucaaguaacaggu

SEQ ID NO: 353160 - RNA, 20 nt, Human
gagucaaagcacagagacua

SEQ ID NO: 353161 - RNA, 21 nt, Human
ggaaggggugguagguugaga

SEQ ID NO: 353162 - RNA, 21 nt, Human
gguccagagcuaaucuaaggu

SEQ ID NO: 353163 - RNA, 22 nt, Human
ucaaucaaaaaauaaagaggua

SEQ ID NO: 353164 - RNA, 21 nt, Human
ucagagcagagguccaagagg

SEQ ID NO: 353165 - RNA, 23 nt, Human
ucagaugcuccagucucuuuggu

SEQ ID NO: 353166 - RNA, 26 nt, Human
ucagaugcuccagucucuuugguuga

SEQ ID NO: 353167 - RNA, 19 nt, Human
uccaagaggccucaucaac

SEQ ID NO: 353168 - RNA, 23 nt, Human
uccacggugacauguggccuucu

SEQ ID NO: 353169 - RNA, 23 nt, Human
ucugcugguuuucugccuucugc

SEQ ID NO: 353170 - RNA, 21 nt, Human
ugcuccuggcuucuguggcuu

SEQ ID NO: 353171 - RNA, 20 nt, Human
uggccuucugcagccucugg

SEQ ID NO: 353172 - RNA, 22 nt, Human
ugguccagagcggguccaacag

SEQ ID NO: 353173 - RNA, 19 nt, Human
ugugagucagaugcuccag

SEQ ID NO: 353174 - RNA, 21 nt, Human
uguguuacaggaagagaagag

SEQ ID NO: 353175 - RNA, 22 nt, Human
uguguuacaggaagagaagagg

SEQ ID NO: 353176 - RNA, 23 nt, Human
uucacugguauuucaaguaacag

SEQ ID NO: 353177 - RNA, 18 nt, Human
uuugcuccuggcuucugu

SEQ ID NO: 353178 - RNA, 22 nt, Human
aaaaggagagaaucugucucaa

SEQ ID NO: 353179 - RNA, 18 nt, Human
aaagaaaggucugcccuu

SEQ ID NO: 353180 - RNA, 22 nt, Human
aagacagaguccacccuggaaa

SEQ ID NO: 353181 - RNA, 27 nt, Human
aaguaaauggccuccugcuguaaugac

SEQ ID NO: 353182 - RNA, 22 nt, Human
aagucagaggagcagcaggaaa

SEQ ID NO: 353183 - RNA, 24 nt, Human
aauguccacuuccuguuuggugac

SEQ ID NO: 353184 - RNA, 28 nt, Human
acacagucccaaagaaagggggaacgcc

SEQ ID NO: 353185 - RNA, 20 nt, Human
agagaagaugggggacagga

SEQ ID NO: 353186 - RNA, 22 nt, Human
agaguccacccuggaaaguggc

SEQ ID NO: 353187 - RNA, 19 nt, Human
agcuccuugguccacacag

SEQ ID NO: 353188 - RNA, 22 nt, Human
agcugccucgugggcccagaag

SEQ ID NO: 353189 - RNA, 27 nt, Human
aggagcagcaggaaacagccgguaccc

SEQ ID NO: 353190 - RNA, 21 nt, Human
aggcaagaggcgauagcuggg

SEQ ID NO: 353191 - RNA, 20 nt, Human
augggggacaggaaaaagga

SEQ ID NO: 353192 - RNA, 18 nt, Human
caccgugcucagcagagc

SEQ ID NO: 353193 - RNA, 19 nt, Human
cagaaguccgucacucuuc

SEQ ID NO: 353194 - RNA, 21 nt, Human
cagcaggaaacagccucagaa

SEQ ID NO: 353195 - RNA, 24 nt, Human
cagcugccucgugggcccagaaga

SEQ ID NO: 353196 - RNA, 23 nt, Human
caggaaaaaggagagaaucuguc

SEQ ID NO: 353197 - RNA, 18 nt, Human
cagugaccaggagaagcg

SEQ ID NO: 353198 - RNA, 22 nt, Human
ccaagucagaggagcagcagga

SEQ ID NO: 353199 - RNA, 18 nt, Human
ccaggagaagcggggaga

SEQ ID NO: 353200 - RNA, 19 nt, Human
cccaaagaaaggucugccc

SEQ ID NO: 353201 - RNA, 23 nt, Human
cccacgaaacccaucccagcccu

SEQ ID NO: 353202 - RNA, 19 nt, Human
ccuuggguacauggggagg

SEQ ID NO: 353203 - RNA, 19 nt, Human
cucccuuagaauguccacu

SEQ ID NO: 353204 - RNA, 21 nt, Human
cuguggaauggggucugggca

SEQ ID NO: 353205 - RNA, 23 nt, Human
gaaacccaucccagcccucacag

SEQ ID NO: 353206 - RNA, 18 nt, Human
gagcagcaggaaacagcc

SEQ ID NO: 353207 - RNA, 19 nt, Human
gagcuccaucuuccuuggg

SEQ ID NO: 353208 - RNA, 22 nt, Human
gauccccauccccaggggucuc

SEQ ID NO: 353209 - RNA, 18 nt, Human
gaugggggacaggaaaaa

SEQ ID NO: 353210 - RNA, 18 nt, Human
gcaagaggcgauagcugg

SEQ ID NO: 353211 - RNA, 24 nt, Human
gcccacgaaacccaucccagcccu

SEQ ID NO: 353212 - RNA, 18 nt, Human
gcccaggagagcccgugg

SEQ ID NO: 353213 - RNA, 22 nt, Human
gccccaagucagaggagcagca

SEQ ID NO: 353214 - RNA, 21 nt, Human
gcuccacuugcccgucugcuu

SEQ ID NO: 353215 - RNA, 21 nt, Human
gcugggcuucauccgcggagg

SEQ ID NO: 353216 - RNA, 18 nt, Human
ggaaaguggccacagggg

SEQ ID NO: 353217 - RNA, 19 nt, Human
ggagaagcggggagagcca

SEQ ID NO: 353218 - RNA, 22 nt, Human
ucacuugucacuagauggaagc

SEQ ID NO: 353219 - RNA, 21 nt, Human
uccacuuccuguuuggugacc

SEQ ID NO: 353220 - RNA, 21 nt, Human
ucccaaagaaaggucugcccu

SEQ ID NO: 353221 - RNA, 19 nt, Human
ucccagagaggugcccaag

SEQ ID NO: 353222 - RNA, 25 nt, Human
ucccagagaggugcccaagaagacc

SEQ ID NO: 353223 - RNA, 18 nt, Human
ucccagcccucacaggcu

SEQ ID NO: 353224 - RNA, 21 nt, Human
ucccagcccucacaggcugaa

SEQ ID NO: 353225 - RNA, 19 nt, Human
ugaacaagacagaguccac

SEQ ID NO: 353226 - RNA, 18 nt, Human
ugaagauccccaucccca

SEQ ID NO: 353227 - RNA, 22 nt, Human
ugcccaagaagacccaagcugc

SEQ ID NO: 353228 - RNA, 22 nt, Human
ugccccaagucagaggagcagc

SEQ ID NO: 353229 - RNA, 22 nt, Human
ugcccuugggcccacgaaaccc

SEQ ID NO: 353230 - RNA, 19 nt, Human
ugcucagcagagcauggga

SEQ ID NO: 353231 - RNA, 18 nt, Human
ugcucuuguccuguuugg

SEQ ID NO: 353232 - RNA, 18 nt, Human
uggcccaggagagcccgu

SEQ ID NO: 353233 - RNA, 22 nt, Human
ugggacagcugccucgugggcc

SEQ ID NO: 353234 - RNA, 22 nt, Human
uggggaggagacuccagugacc

SEQ ID NO: 353235 - RNA, 23 nt, Human
ugggggacaggaaaaaggagaga

SEQ ID NO: 353236 - RNA, 28 nt, Human
uucccagagaggugcccaagaagacccc

SEQ ID NO: 353237 - RNA, 21 nt, Human
uuccuucccugaagaucccca

SEQ ID NO: 353238 - RNA, 24 nt, Human
uugggcccacgaaacccaucccag

SEQ ID NO: 353239 - RNA, 22 nt, Human
uuguccuguuuggguggccaga

SEQ ID NO: 353240 - RNA, 19 nt, Human
accucccucccuuccaauc

SEQ ID NO: 353241 - RNA, 25 nt, Human
aggggccuagggcccaggaagcagg

SEQ ID NO: 353242 - RNA, 19 nt, Human
auauauauauauauauaua

SEQ ID NO: 353243 - RNA, 19 nt, Human
auauauauauauauauaua

SEQ ID NO: 353244 - RNA, 19 nt, Human
auauauauauauauauaua

SEQ ID NO: 353245 - RNA, 19 nt, Human
auauauauauauauauaua

SEQ ID NO: 353246 - RNA, 19 nt, Human
auauauauauauauauaua

SEQ ID NO: 353247 - RNA, 19 nt, Human
auauauauauauauauaua

SEQ ID NO: 353248 - RNA, 19 nt, Human
auauauauauauauauaua

SEQ ID NO: 353249 - RNA, 19 nt, Human
caauaaccccgaauaacgc

SEQ ID NO: 353250 - RNA, 19 nt, Human
caccucccucccuuccaau

SEQ ID NO: 353251 - RNA, 22 nt, Human
caggaagcaggcuccacucucu

SEQ ID NO: 353252 - RNA, 21 nt, Human
ccaaaaaggaaaaaaggucuc

SEQ ID NO: 353253 - RNA, 21 nt, Human
ccaaaaaggaaaaaaggucuc

SEQ ID NO: 353254 - RNA, 23 nt, Human
cccauggcaggcacaggcagcug

SEQ ID NO: 353255 - RNA, 18 nt, Human
ccuagccuggcccauggc

SEQ ID NO: 353256 - RNA, 23 nt, Human
ccucccucccuuccaaucacccc

SEQ ID NO: 353257 - RNA, 21 nt, Human
ccuuccaaucaccccccaccc

SEQ ID NO: 353258 - RNA, 24 nt, Human
cggacaaggucuccaaaaaggaaa

SEQ ID NO: 353259 - RNA, 23 nt, Human
cuagccuggcccauggcaggcac

SEQ ID NO: 353260 - RNA, 23 nt, Human
cuuccaaucaccccccaccccga

SEQ ID NO: 353261 - RNA, 18 nt, Human
ggacaaggucuccaaaaa

SEQ ID NO: 353262 - RNA, 20 nt, Human
ggaggggccuagggcccagg

SEQ ID NO: 353263 - RNA, 18 nt, Human
ggcccaggaagcaggcuc

SEQ ID NO: 353264 - RNA, 19 nt, Human
gugaggacagaaagucuac

SEQ ID NO: 353265 - RNA, 19 nt, Human
uauauauauauauauauau

SEQ ID NO: 353266 - RNA, 19 nt, Human
uauauauauauauauauau

SEQ ID NO: 353267 - RNA, 25 nt, Human
uauuuuaauauauauauauauauau

SEQ ID NO: 353268 - RNA, 20 nt, Human
uccaaucaccccccaccccg

SEQ ID NO: 353269 - RNA, 22 nt, Human
ugugggaggggccuagggccca

SEQ ID NO: 353270 - RNA, 19 nt, Human
accaagaaucugaaacuac

SEQ ID NO: 353271 - RNA, 19 nt, Human
aggaagcaugggcaggugg

SEQ ID NO: 353272 - RNA, 26 nt, Human
cagaauucacugaggucaacugacac

SEQ ID NO: 353273 - RNA, 21 nt, Human
cauggaccaagaaucugaaac

SEQ ID NO: 353274 - RNA, 21 nt, Human
cuugauauugguccauccuuu

SEQ ID NO: 353275 - RNA, 19 nt, Human
ggaaagccuaauucaagga

SEQ ID NO: 353276 - RNA, 22 nt, Human
uccauccuuucacaugguuacc

SEQ ID NO: 353277 - RNA, 24 nt, Human
ucucagaaacaucacagaauucac

SEQ ID NO: 353278 - RNA, 28 nt, Human
uucagguuaggaaagccuaauucaagga

SEQ ID NO: 353279 - RNA, 24 nt, Human
aaacaucaaagacuucacugaggu

SEQ ID NO: 353280 - RNA, 21 nt, Human
aggaagcaugggaagguggug

SEQ ID NO: 353281 - RNA, 21 nt, Human
ccacaugggagucugccucuc

SEQ ID NO: 353282 - RNA, 21 nt, Human
gaaaaugaucccuuuauugga

SEQ ID NO: 353283 - RNA, 19 nt, Human
gccucucagaaacaucaaa

SEQ ID NO: 353284 - RNA, 20 nt, Human
uagaaagccuaaugcaagga

SEQ ID NO: 353285 - RNA, 19 nt, Human
ucugccucucagaaacauc

SEQ ID NO: 353286 - RNA, 20 nt, Human
uugguccagcuuuucaagug

SEQ ID NO: 353287 - RNA, 21 nt, Human
aaaaaaauaccuacaaaccau

SEQ ID NO: 353288 - RNA, 18 nt, Human
aaaaaacacccccaaauc

SEQ ID NO: 353289 - RNA, 20 nt, Human
aaaauaccuacaaaccauga

SEQ ID NO: 353290 - RNA, 18 nt, Human
aaacaaaacaaaacaaaa

SEQ ID NO: 353291 - RNA, 22 nt, Human
aacaaaacaaaauugagaacaa

SEQ ID NO: 353292 - RNA, 21 nt, Human
aagacuggcuccuguugagac

SEQ ID NO: 353293 - RNA, 21 nt, Human
aagcugcagggggucccgucu

SEQ ID NO: 353294 - RNA, 20 nt, Human
aauauggugaaaccccaucu

SEQ ID NO: 353295 - RNA, 21 nt, Human
aauauggugaaaccccaucuc

SEQ ID NO: 353296 - RNA, 18 nt, Human
aauuagccagccauggug

SEQ ID NO: 353297 - RNA, 24 nt, Human
aauugcuugaaccugggaggugga

SEQ ID NO: 353298 - RNA, 22 nt, Human
acaaaacaaaacaaaauugaga

SEQ ID NO: 353299 - RNA, 24 nt, Human
acaaaacaaaacaaaauugagaac

SEQ ID NO: 353300 - RNA, 20 nt, Human
acagagcaagacuccgucuc

SEQ ID NO: 353301 - RNA, 24 nt, Human
acagagcaagacuccgucucaaaa

SEQ ID NO: 353302 - RNA, 24 nt, Human
accaauauggugaaaccccaucuc

SEQ ID NO: 353303 - RNA, 24 nt, Human
accccaucucuacuaaaaauacaa

SEQ ID NO: 353304 - RNA, 22 nt, Human
acccugagccucgaggccuggu

SEQ ID NO: 353305 - RNA, 24 nt, Human
accugagugacccugggcaaguca

SEQ ID NO: 353306 - RNA, 19 nt, Human
acgaaggcucuagauaaac

SEQ ID NO: 353307 - RNA, 20 nt, Human
agaguacaggcaugccugug

SEQ ID NO: 353308 - RNA, 24 nt, Human
agcacuuugggaggcugaggcagg

SEQ ID NO: 353309 - RNA, 18 nt, Human
agcagcaggagaagggcu

SEQ ID NO: 353310 - RNA, 21 nt, Human
agcagcuuccagagccaaaug

SEQ ID NO: 353311 - RNA, 24 nt, Human
agccaugguggcaugcaccuguaa

SEQ ID NO: 353312 - RNA, 23 nt, Human
agccgccuuggcagccuggcccc

SEQ ID NO: 353313 - RNA, 24 nt, Human
agccugaccaauauggugaaaccc

SEQ ID NO: 353314 - RNA, 18 nt, Human
agccugacuucaagaccu

SEQ ID NO: 353315 - RNA, 19 nt, Human
agccuggcugagcuggcug

SEQ ID NO: 353316 - RNA, 24 nt, Human
agccugggugacagagcaagacuc

SEQ ID NO: 353317 - RNA, 22 nt, Human
aggcaagagaauugcuugaacc

SEQ ID NO: 353318 - RNA, 23 nt, Human
aggcaagagaauugcuugaaccu

SEQ ID NO: 353319 - RNA, 24 nt, Human
aggcaagagaauugcuugaaccug

SEQ ID NO: 353320 - RNA, 23 nt, Human
aggcacaggagggcaguccgggg

SEQ ID NO: 353321 - RNA, 19 nt, Human
aggcagggagagaggugag

SEQ ID NO: 353322 - RNA, 21 nt, Human
aggcagggagagaggugaggg

SEQ ID NO: 353323 - RNA, 18 nt, Human
aggcagguggaucaccug

SEQ ID NO: 353324 - RNA, 22 nt, Human
aggcagguggaucaccugaggu

SEQ ID NO: 353325 - RNA, 26 nt, Human
aggcagguggaucaccugaggucaga

SEQ ID NO: 353326 - RNA, 19 nt, Human
aggcaugccugugggccuu

SEQ ID NO: 353327 - RNA, 24 nt, Human
aggcugaggcaagagaauugcuug

SEQ ID NO: 353328 - RNA, 21 nt, Human
aggcugaggcagguggaucac

SEQ ID NO: 353329 - RNA, 24 nt, Human
aggcugaggcagguggaucaccug

SEQ ID NO: 353330 - RNA, 20 nt, Human
agggagccuggcugagcugg

SEQ ID NO: 353331 - RNA, 18 nt, Human
aggggguggggagagaac

SEQ ID NO: 353332 - RNA, 20 nt, Human
aggggguggggagagaacug

SEQ ID NO: 353333 - RNA, 24 nt, Human
agguggagguugcagugagccaag

SEQ ID NO: 353334 - RNA, 24 nt, Human
agugagacacucugguuugaaagg

SEQ ID NO: 353335 - RNA, 21 nt, Human
aguguuagaggagugacaggg

SEQ ID NO: 353336 - RNA, 19 nt, Human
auaaaaagagagacuggcc

SEQ ID NO: 353337 - RNA, 24 nt, Human
auagcacuccagccugggugacag

SEQ ID NO: 353338 - RNA, 24 nt, Human
aucgagccauagcacuccagccug

SEQ ID NO: 353339 - RNA, 20 nt, Human
auggggcugcugccggggaa

SEQ ID NO: 353340 - RNA, 20 nt, Human
auggugaaaccccaucucua

SEQ ID NO: 353341 - RNA, 24 nt, Human
caaaaaacacccccaaauccagau

SEQ ID NO: 353342 - RNA, 24 nt, Human
caaaacaaaauugagaacaagacu

SEQ ID NO: 353343 - RNA, 24 nt, Human
caaagucccaagaguggccaaggg

SEQ ID NO: 353344 - RNA, 24 nt, Human
caauauggugaaaccccaucucua

SEQ ID NO: 353345 - RNA, 19 nt, Human
cacagggagccuggcugag

SEQ ID NO: 353346 - RNA, 23 nt, Human
caccuguaaucccagcuacucgg

SEQ ID NO: 353347 - RNA, 24 nt, Human
caccuguaaucccagcuacucggg

SEQ ID NO: 353348 - RNA, 19 nt, Human
caccugugccugacaggau

SEQ ID NO: 353349 - RNA, 24 nt, Human
caccugugccugacaggauggggg

SEQ ID NO: 353350 - RNA, 24 nt, Human
cacgccuguaaucccagcacuuug

SEQ ID NO: 353351 - RNA, 22 nt, Human
cacuccagccugggugacagag

SEQ ID NO: 353352 - RNA, 23 nt, Human
cacuccagccugggugacagagc

SEQ ID NO: 353353 - RNA, 22 nt, Human
cagauaaggccucagaaagccc

SEQ ID NO: 353354 - RNA, 24 nt, Human
cagcacuuugggaggcugaggcag

SEQ ID NO: 353355 - RNA, 24 nt, Human
cagcacuuugggaggcugaggcag

SEQ ID NO: 353356 - RNA, 19 nt, Human
cagcuggggacaucaggca

SEQ ID NO: 353357 - RNA, 18 nt, Human
caggacacagggagccug

SEQ ID NO: 353358 - RNA, 21 nt, Human
caggacguggaccaaaguccc

SEQ ID NO: 353359 - RNA, 19 nt, Human
caggauggggggggaggca

SEQ ID NO: 353360 - RNA, 24 nt, Human
cagguggaucaccugaggucagaa

SEQ ID NO: 353361 - RNA, 19 nt, Human
cagugcuggggaucaugga

SEQ ID NO: 353362 - RNA, 25 nt, Human
cagugcuggggaucauggauccucu

SEQ ID NO: 353363 - RNA, 19 nt, Human
cauagcacuccagccuggg

SEQ ID NO: 353364 - RNA, 19 nt, Human
cauagcacuccagccuggg

SEQ ID NO: 353365 - RNA, 23 nt, Human
cauagcacuccagccugggugac

SEQ ID NO: 353366 - RNA, 24 nt, Human
cauagcacuccagccugggugaca

SEQ ID NO: 353367 - RNA, 25 nt, Human
cauagcacuccagccugggugacag

SEQ ID NO: 353368 - RNA, 22 nt, Human
caugccaaaaaacacccccaaa

SEQ ID NO: 353369 - RNA, 23 nt, Human
caugccccaucuggucuggaggu

SEQ ID NO: 353370 - RNA, 21 nt, Human
ccaaggcagccuaggaguggg

SEQ ID NO: 353371 - RNA, 20 nt, Human
ccauagcacuccagccuggg

SEQ ID NO: 353372 - RNA, 21 nt, Human
ccauagcacuccagccugggu

SEQ ID NO: 353373 - RNA, 24 nt, Human
ccauagcacuccagccugggugac

SEQ ID NO: 353374 - RNA, 22 nt, Human
ccaucuggucuggaggucagag

SEQ ID NO: 353375 - RNA, 19 nt, Human
ccaugccaaaaaacacccc

SEQ ID NO: 353376 - RNA, 24 nt, Human
cccagagcagcaggagaagggcuc

SEQ ID NO: 353377 - RNA, 20 nt, Human
cccagagguagaagagcuag

SEQ ID NO: 353378 - RNA, 21 nt, Human
ccccagagguagaagagcuag

SEQ ID NO: 353379 - RNA, 21 nt, Human
ccccagagguagaagagcuuc

SEQ ID NO: 353380 - RNA, 21 nt, Human
cccccaaauccagaugcagac

SEQ ID NO: 353381 - RNA, 20 nt, Human
ccccggguggggugaggggg

SEQ ID NO: 353382 - RNA, 20 nt, Human
cccuccuggcuggggcuucu

SEQ ID NO: 353383 - RNA, 20 nt, Human
cccucucccacccugagccu

SEQ ID NO: 353384 - RNA, 19 nt, Human
cccugggccucgggaaccc

SEQ ID NO: 353385 - RNA, 21 nt, Human
ccgccuuggcagccuggcccc

SEQ ID NO: 353386 - RNA, 21 nt, Human
ccgucucaaaacaaaacaaaa

SEQ ID NO: 353387 - RNA, 19 nt, Human
ccucacaggcuugucguga

SEQ ID NO: 353388 - RNA, 27 nt, Human
ccucucccacccugagccucgaggccu

SEQ ID NO: 353389 - RNA, 24 nt, Human
ccugaccaauauggugaaacccca

SEQ ID NO: 353390 - RNA, 21 nt, Human
ccugcagagacccugugcuaa

SEQ ID NO: 353391 - RNA, 21 nt, Human
ccugggagguggagguugcag

SEQ ID NO: 353392 - RNA, 22 nt, Human
ccugggugacagagcaagacuc

SEQ ID NO: 353393 - RNA, 22 nt, Human
ccuguaaucccagcacuuuggg

SEQ ID NO: 353394 - RNA, 21 nt, Human
ccuguaaucccagcuacucgg

SEQ ID NO: 353395 - RNA, 19 nt, Human
ccugugggccuuuguggag

SEQ ID NO: 353396 - RNA, 19 nt, Human
ccuuccuucuuccucugcc

SEQ ID NO: 353397 - RNA, 23 nt, Human
ccuuggcagccuggccccuccug

SEQ ID NO: 353398 - RNA, 20 nt, Human
cgagugacagucagagcuag

SEQ ID NO: 353399 - RNA, 18 nt, Human
cgcuggcucccgcagucc

SEQ ID NO: 353400 - RNA, 25 nt, Human
cggagaugucugccuuccuucuucc

SEQ ID NO: 353401 - RNA, 22 nt, Human
cucacgccuguaaucccagcac

SEQ ID NO: 353402 - RNA, 24 nt, Human
cucacgccuguaaucccagcacuu

SEQ ID NO: 353403 - RNA, 19 nt, Human
cucccagagcagcaggaga

SEQ ID NO: 353404 - RNA, 22 nt, Human
cuccucccuccauucuucaccc

SEQ ID NO: 353405 - RNA, 22 nt, Human
cugcagucugaaaugggcugag

SEQ ID NO: 353406 - RNA, 20 nt, Human
cugcccccgucaccugugcc

SEQ ID NO: 353407 - RNA, 21 nt, Human
cugcccccgucaccugugccu

SEQ ID NO: 353408 - RNA, 18 nt, Human
cuggccccuccuggcugg

SEQ ID NO: 353409 - RNA, 19 nt, Human
cuggccccuccuggcuggg

SEQ ID NO: 353410 - RNA, 21 nt, Human
cuguaaucccagcuacucggg

SEQ ID NO: 353411 - RNA, 18 nt, Human
cuucacaguaaacuuccc

SEQ ID NO: 353412 - RNA, 20 nt, Human
cuuccuagccugcuccuccc

SEQ ID NO: 353413 - RNA, 18 nt, Human
cuuggcccugggccucgg

SEQ ID NO: 353414 - RNA, 19 nt, Human
cuuggcccugggccucggg

SEQ ID NO: 353415 - RNA, 24 nt, Human
gacagagcaagacuccgucucaaa

SEQ ID NO: 353416 - RNA, 23 nt, Human
gagaauugcuugaaccugggagg

SEQ ID NO: 353417 - RNA, 21 nt, Human
gagagaacugggggcugggga

SEQ ID NO: 353418 - RNA, 20 nt, Human
gagcaucagacgcccucccu

SEQ ID NO: 353419 - RNA, 21 nt, Human
gagccgagugacagucagagc

SEQ ID NO: 353420 - RNA, 25 nt, Human
gagccgagugacagucagagcuaga

SEQ ID NO: 353421 - RNA, 18 nt, Human
gagguugcagugagccaa

SEQ ID NO: 353422 - RNA, 23 nt, Human
gagguugcagugagccaagaucg

SEQ ID NO: 353423 - RNA, 22 nt, Human
gaucaccugaggucagaaguuc

SEQ ID NO: 353424 - RNA, 25 nt, Human
gaucaccugaggucagaaguuccag

SEQ ID NO: 353425 - RNA, 21 nt, Human
gaugcagacuuuggagccaca

SEQ ID NO: 353426 - RNA, 24 nt, Human
gauugcucacgccuguaaucccag

SEQ ID NO: 353427 - RNA, 21 nt, Human
gcacuccagccugggugacag

SEQ ID NO: 353428 - RNA, 23 nt, Human
gcacuccagccugggugacagag

SEQ ID NO: 353429 - RNA, 24 nt, Human
gcacuccagccugggugacagagc

SEQ ID NO: 353430 - RNA, 24 nt, Human
gcagcaggagaagggcucgcaugg

SEQ ID NO: 353431 - RNA, 21 nt, Human
gccaccauggagccaaggcug

SEQ ID NO: 353432 - RNA, 19 nt, Human
gccauagcacuccagccug

SEQ ID NO: 353433 - RNA, 24 nt, Human
gccauagcacuccagccuggguga

SEQ ID NO: 353434 - RNA, 24 nt, Human
gcccagaggcuccagaagacuggc

SEQ ID NO: 353435 - RNA, 19 nt, Human
gccccagagguagaagagc

SEQ ID NO: 353436 - RNA, 21 nt, Human
gcccggggcccucucccaccc

SEQ ID NO: 353437 - RNA, 19 nt, Human
gcccugggccucgggaacc

SEQ ID NO: 353438 - RNA, 26 nt, Human
gccugacaggauggggggggaggcag

SEQ ID NO: 353439 - RNA, 19 nt, Human
gcgcuggcucccgcagucc

SEQ ID NO: 353440 - RNA, 18 nt, Human
gcggcggcugccggcggc

SEQ ID NO: 353441 - RNA, 22 nt, Human
gcuaaaggcagaaaccccuuca

SEQ ID NO: 353442 - RNA, 22 nt, Human
gcucacgccuguaaucccagca

SEQ ID NO: 353443 - RNA, 21 nt, Human
gcuucuugauguuuccugugg

SEQ ID NO: 353444 - RNA, 19 nt, Human
ggagagggugguggccccg

SEQ ID NO: 353445 - RNA, 18 nt, Human
ggaggcagagagagagca

SEQ ID NO: 353446 - RNA, 24 nt, Human
ggaggucagaggggagugagacac

SEQ ID NO: 353447 - RNA, 20 nt, Human
ggagguugcagugagccaag

SEQ ID NO: 353448 - RNA, 24 nt, Human
ggagguugcagugagccaagaucg

SEQ ID NO: 353449 - RNA, 23 nt, Human
ggauuucggauucagccaucaug

SEQ ID NO: 353450 - RNA, 23 nt, Human
ggcacgauugcucacgccuguaa

SEQ ID NO: 353451 - RNA, 21 nt, Human
ggcaugcaccuguaaucccag

SEQ ID NO: 353452 - RNA, 23 nt, Human
ggcccucccagagcagcaggaga

SEQ ID NO: 353453 - RNA, 23 nt, Human
ggcugaaagcaaggagagggugg

SEQ ID NO: 353454 - RNA, 19 nt, Human
ggcuggggagggggcagcc

SEQ ID NO: 353455 - RNA, 23 nt, Human
gggagccgccuuggcagccuggc

SEQ ID NO: 353456 - RNA, 19 nt, Human
gggaggcugaggcaagaga

SEQ ID NO: 353457 - RNA, 24 nt, Human
gggcaguccgggguauggccagga

SEQ ID NO: 353458 - RNA, 23 nt, Human
gggccaagcagcuuccagagcca

SEQ ID NO: 353459 - RNA, 23 nt, Human
gggcugcccccgucaccugugcc

SEQ ID NO: 353460 - RNA, 24 nt, Human
ggggagccgccuuggcagccuggc

SEQ ID NO: 353461 - RNA, 18 nt, Human
ggggcugcugccggggaa

SEQ ID NO: 353462 - RNA, 27 nt, Human
ggggguggggagagaacugggggcugg

SEQ ID NO: 353463 - RNA, 22 nt, Human
ggguggggagagaacugggggc

SEQ ID NO: 353464 - RNA, 19 nt, Human
ggguggggugagggggugg

SEQ ID NO: 353465 - RNA, 19 nt, Human
ggugaggggguggggagag

SEQ ID NO: 353466 - RNA, 19 nt, Human
ggugaggggguggggagag

SEQ ID NO: 353467 - RNA, 21 nt, Human
gguggggagagaacugggggc

SEQ ID NO: 353468 - RNA, 21 nt, Human
gucucaaaacaaaacaaaaca

SEQ ID NO: 353469 - RNA, 23 nt, Human
gugggggacaugaacugcagagg

SEQ ID NO: 353470 - RNA, 19 nt, Human
uaaaaacacuuuucugcac

SEQ ID NO: 353471 - RNA, 21 nt, Human
uaaaaauacaaaaauuagcca

SEQ ID NO: 353472 - RNA, 20 nt, Human
uagccuggggcaccccugga

SEQ ID NO: 353473 - RNA, 23 nt, Human
uagccuggggcaccccugguugc

SEQ ID NO: 353474 - RNA, 18 nt, Human
uagcuggucaguggcgug

SEQ ID NO: 353475 - RNA, 20 nt, Human
uaggcggugggagugccuug

SEQ ID NO: 353476 - RNA, 19 nt, Human
ucagccugaccaauauggu

SEQ ID NO: 353477 - RNA, 22 nt, Human
ucaggacguggaccaaaguccc

SEQ ID NO: 353478 - RNA, 23 nt, Human
ucaggcacaggagggcaguccgg

SEQ ID NO: 353479 - RNA, 21 nt, Human
ucaguggaucuuguacccucc

SEQ ID NO: 353480 - RNA, 24 nt, Human
uccagccugggugacagagcaaga

SEQ ID NO: 353481 - RNA, 19 nt, Human
ucccaggacacagggagcc

SEQ ID NO: 353482 - RNA, 23 nt, Human
ucgggaggcugaggcaagagaau

SEQ ID NO: 353483 - RNA, 19 nt, Human
ucuacccgccaccauggag

SEQ ID NO: 353484 - RNA, 22 nt, Human
ucuacccgccaccauggagcca

SEQ ID NO: 353485 - RNA, 21 nt, Human
ucucuacuaaaaauacaaaaa

SEQ ID NO: 353486 - RNA, 19 nt, Human
ucugcagucugaaaugggc

SEQ ID NO: 353487 - RNA, 18 nt, Human
ucugggggggccaagcag

SEQ ID NO: 353488 - RNA, 19 nt, Human
ugaaaccccaucucuacua

SEQ ID NO: 353489 - RNA, 19 nt, Human
ugaaagcaaggagagggug

SEQ ID NO: 353490 - RNA, 20 nt, Human
ugaaagcaaggagagggugg

SEQ ID NO: 353491 - RNA, 22 nt, Human
ugaaaugggcugaggaccaacu

SEQ ID NO: 353492 - RNA, 24 nt, Human
ugaaccugggagguggagguugca

SEQ ID NO: 353493 - RNA, 24 nt, Human
ugaccaauauggugaaaccccauc

SEQ ID NO: 353494 - RNA, 23 nt, Human
ugagaacaagacuggcuggggaa

SEQ ID NO: 353495 - RNA, 20 nt, Human
ugagacacucugguuugaaa

SEQ ID NO: 353496 - RNA, 24 nt, Human
ugaggcaagagaauugcuugaacc

SEQ ID NO: 353497 - RNA, 25 nt, Human
ugaggcaagagaauugcuugaaccu

SEQ ID NO: 353498 - RNA, 20 nt, Human
ugaggcagguggaucaccug

SEQ ID NO: 353499 - RNA, 24 nt, Human
ugaggcagguggaucaccugaggu

SEQ ID NO: 353500 - RNA, 26 nt, Human
ugaggcagguggaucaccugagguca

SEQ ID NO: 353501 - RNA, 18 nt, Human
ugcaaagacaucaagcug

SEQ ID NO: 353502 - RNA, 24 nt, Human
ugcaaagacaucaagcuggaccca

SEQ ID NO: 353503 - RNA, 22 nt, Human
ugcaaggucugaggggcaagag

SEQ ID NO: 353504 - RNA, 21 nt, Human
ugcacauauaaaaagagagac

SEQ ID NO: 353505 - RNA, 19 nt, Human
ugcaccuguaaucccagcu

SEQ ID NO: 353506 - RNA, 23 nt, Human
ugccaaaaaacacccccaaaucc

SEQ ID NO: 353507 - RNA, 20 nt, Human
ugccaggcugagugagcccc

SEQ ID NO: 353508 - RNA, 23 nt, Human
ugccccaucuggucuggagguca

SEQ ID NO: 353509 - RNA, 24 nt, Human
ugccggggaagccacugccccucc

SEQ ID NO: 353510 - RNA, 21 nt, Human
ugccugugggccuuuguggag

SEQ ID NO: 353511 - RNA, 25 nt, Human
ugccuuggcccugggccucgggaac

SEQ ID NO: 353512 - RNA, 20 nt, Human
ugcggcuggcggcggcugcc

SEQ ID NO: 353513 - RNA, 19 nt, Human
ugcuaaaggcagaaacccc

SEQ ID NO: 353514 - RNA, 22 nt, Human
ugcuaagguaggcggugggagu

SEQ ID NO: 353515 - RNA, 21 nt, Human
ugcuugaaccugggaggugga

SEQ ID NO: 353516 - RNA, 18 nt, Human
uggaacuggcccucccag

SEQ ID NO: 353517 - RNA, 24 nt, Human
uggagccaaggcugugguggccac

SEQ ID NO: 353518 - RNA, 24 nt, Human
uggaucaccugaggucagaaguuc

SEQ ID NO: 353519 - RNA, 27 nt, Human
uggaucaccugaggucagaaguuccag

SEQ ID NO: 353520 - RNA, 30 nt, Human
uggcagccuggccccuccuggcuggggcuu

SEQ ID NO: 353521 - RNA, 22 nt, Human
uggcaugcaccuguaaucccag

SEQ ID NO: 353522 - RNA, 20 nt, Human
uggcccucccagagcagcag

SEQ ID NO: 353523 - RNA, 24 nt, Human
uggcccugggccucgggaaccccc

SEQ ID NO: 353524 - RNA, 19 nt, Human
uggcucaggacguggacca

SEQ ID NO: 353525 - RNA, 24 nt, Human
uggcugagcuggcuggcucaugcc

SEQ ID NO: 353526 - RNA, 24 nt, Human
uggcuggguugugcuucuguggau

SEQ ID NO: 353527 - RNA, 18 nt, Human
ugggaggcugaggcaggu

SEQ ID NO: 353528 - RNA, 24 nt, Human
ugggaggcugaggcagguggauca

SEQ ID NO: 353529 - RNA, 18 nt, Human
ugggagguggagguugca

SEQ ID NO: 353530 - RNA, 29 nt, Human
ugggagguggagguugcagugacaacggu

SEQ ID NO: 353531 - RNA, 24 nt, Human
ugggagguggagguugcagugagc

SEQ ID NO: 353532 - RNA, 22 nt, Human
ugggagugccuuggcccugggc

SEQ ID NO: 353533 - RNA, 27 nt, Human
uggggaaaacaggcagggagagaggug

SEQ ID NO: 353534 - RNA, 24 nt, Human
uggggagagaacugggggcugggg

SEQ ID NO: 353535 - RNA, 25 nt, Human
uggggagagaacugggggcugggga

SEQ ID NO: 353536 - RNA, 23 nt, Human
ugggggcuggggagggggcagcc

SEQ ID NO: 353537 - RNA, 18 nt, Human
uggggugggagugggcgg

SEQ ID NO: 353538 - RNA, 20 nt, Human
uggggugggagugggcggca

SEQ ID NO: 353539 - RNA, 23 nt, Human
uggggugggagugggcggcaucu

SEQ ID NO: 353540 - RNA, 24 nt, Human
ugguggcaugcaccuguaauccca

SEQ ID NO: 353541 - RNA, 22 nt, Human
ugguggccccgucuuccuagcc

SEQ ID NO: 353542 - RNA, 19 nt, Human
ugucgugaggauuaaguga

SEQ ID NO: 353543 - RNA, 18 nt, Human
uuccagaucagccugacc

SEQ ID NO: 353544 - RNA, 24 nt, Human
uugaaccugggagguggagguugc

SEQ ID NO: 353545 - RNA, 22 nt, Human
uugcagugagccaagaucgagc

SEQ ID NO: 353546 - RNA, 24 nt, Human
uugcucacgccuguaaucccagca

SEQ ID NO: 353547 - RNA, 24 nt, Human
uugcuugaaccugggagguggagg

SEQ ID NO: 353548 - RNA, 25 nt, Human
uugggaggcugaggcagguggauca

SEQ ID NO: 353549 - RNA, 20 nt, Human
uuugaaaggccuuccuuucc

SEQ ID NO: 353550 - RNA, 22 nt, Human
aaaaaagacauauuaaccaaaa

SEQ ID NO: 353551 - RNA, 24 nt, Human
aaaaagacauauuaaccaaaagcu

SEQ ID NO: 353552 - RNA, 23 nt, Human
aaaagaaaaaaaaagacauauua

SEQ ID NO: 353553 - RNA, 20 nt, Human
aaaugaaauugugucuagac

SEQ ID NO: 353554 - RNA, 21 nt, Human
aaauggaaagcaugucuuugu

SEQ ID NO: 353555 - RNA, 21 nt, Human
aaauggaaagcaugucuuugu

SEQ ID NO: 353556 - RNA, 18 nt, Human
aagcaaauagaacacugg

SEQ ID NO: 353557 - RNA, 21 nt, Human
aagcaaauagaacacuggaaa

SEQ ID NO: 353558 - RNA, 21 nt, Human
aaguaaaggaaaaaauggaaa

SEQ ID NO: 353559 - RNA, 21 nt, Human
acuaagcaauauagagacaga

SEQ ID NO: 353560 - RNA, 21 nt, Human
acuaagcaauauagagacaga

SEQ ID NO: 353561 - RNA, 20 nt, Human
acugcauucuugcuuaauag

SEQ ID NO: 353562 - RNA, 20 nt, Human
acugcauucuugcuuaauag

SEQ ID NO: 353563 - RNA, 28 nt, Human
agaaaaaaaaagacauauuaaccaaaag

SEQ ID NO: 353564 - RNA, 23 nt, Human
agcaaauagaacacuggaaaaag

SEQ ID NO: 353565 - RNA, 19 nt, Human
auagaacacuggaaaaaga

SEQ ID NO: 353566 - RNA, 23 nt, Human
caacauuagagaaagaaagauac

SEQ ID NO: 353567 - RNA, 23 nt, Human
caacauuagagaaagaaagauac

SEQ ID NO: 353568 - RNA, 20 nt, Human
caguagauuucuccauguuu

SEQ ID NO: 353569 - RNA, 19 nt, Human
cauugacuauggaaauacu

SEQ ID NO: 353570 - RNA, 22 nt, Human
cugcaaucaccuuucaguugcu

SEQ ID NO: 353571 - RNA, 20 nt, Human
cuggaaaaagaaaaaaaaag

SEQ ID NO: 353572 - RNA, 23 nt, Human
gcugcaaucaccuuucaguugcu

SEQ ID NO: 353573 - RNA, 23 nt, Human
uaaaccaucauugacuauggaaa

SEQ ID NO: 353574 - RNA, 23 nt, Human
uaaaccaucauugacuauggaaa

SEQ ID NO: 353575 - RNA, 20 nt, Human
uaaagcaaauagaacacugg

SEQ ID NO: 353576 - RNA, 21 nt, Human
uaaagcaaauagaacacugga

SEQ ID NO: 353577 - RNA, 22 nt, Human
uaagcaauauagagacagacaa

SEQ ID NO: 353578 - RNA, 22 nt, Human
uaagcaauauagagacagacaa

SEQ ID NO: 353579 - RNA, 25 nt, Human
uaagcaauauagagacagacaauau

SEQ ID NO: 353580 - RNA, 25 nt, Human
uaagcaauauagagacagacaauau

SEQ ID NO: 353581 - RNA, 25 nt, Human
uacaacauuagagaaagaaagauac

SEQ ID NO: 353582 - RNA, 25 nt, Human
uacaacauuagagaaagaaagauac

SEQ ID NO: 353583 - RNA, 25 nt, Human
uagagacagacaauauuaucuuucc

SEQ ID NO: 353584 - RNA, 25 nt, Human
uagagacagacaauauuaucuuucc

SEQ ID NO: 353585 - RNA, 24 nt, Human
uauuaaccaaaagcugcaaucacc

SEQ ID NO: 353586 - RNA, 25 nt, Human
uauuaaccaaaagcugcaaucaccu

SEQ ID NO: 353587 - RNA, 22 nt, Human
ucauugacuauggaaauacuaa

SEQ ID NO: 353588 - RNA, 21 nt, Human
uccuccauucuaaacugcuaa

SEQ ID NO: 353589 - RNA, 21 nt, Human
uccuccauucuaaacugcuaa

SEQ ID NO: 353590 - RNA, 18 nt, Human
ucuuccuccauucuaaac

SEQ ID NO: 353591 - RNA, 18 nt, Human
ucuuccuccauucuaaac

SEQ ID NO: 353592 - RNA, 22 nt, Human
ucuuuguuguucuuccuccauu

SEQ ID NO: 353593 - RNA, 22 nt, Human
ucuuuguuguucuuccuccauu

SEQ ID NO: 353594 - RNA, 21 nt, Human
ugacuauggaaauacuaagca

SEQ ID NO: 353595 - RNA, 19 nt, Human
ugagagauaaguaaaggaa

SEQ ID NO: 353596 - RNA, 19 nt, Human
uggaaaaagaaaaaaaaag

SEQ ID NO: 353597 - RNA, 19 nt, Human
uuaaaaguagaagauugaa

SEQ ID NO: 353598 - RNA, 19 nt, Human
uuaaaaguagaagauugaa

SEQ ID NO: 353599 - RNA, 18 nt, Human
uuaaagcaaauagaacac

SEQ ID NO: 353600 - RNA, 18 nt, Human
uuuaagacagccacucaa

SEQ ID NO: 353601 - RNA, 19 nt, Human
uuuaagacagccacucaag

SEQ ID NO: 353602 - RNA, 22 nt, Human
uuuguuguucuuccuccauucu

SEQ ID NO: 353603 - RNA, 22 nt, Human
uuuguuguucuuccuccauucu

SEQ ID NO: 353604 - RNA, 25 nt, Human
uuuuuuuuuuuuuuuuaagguuuuu

SEQ ID NO: 353605 - RNA, 23 nt, Human
uuuuuuuuuuuuuuuuuuuaagg

SEQ ID NO: 353606 - RNA, 18 nt, Human
aaccacugcgcccugccu

SEQ ID NO: 353607 - RNA, 19 nt, Human
acccgcguccaccuccccu

SEQ ID NO: 353608 - RNA, 20 nt, Human
acccgcguccaccuccccuc

SEQ ID NO: 353609 - RNA, 21 nt, Human
agagacagggccaggaaaaga

SEQ ID NO: 353610 - RNA, 22 nt, Human
agauggggggugauuucagcau

SEQ ID NO: 353611 - RNA, 20 nt, Human
agcaaaugagucucuuuucc

SEQ ID NO: 353612 - RNA, 25 nt, Human
agcaucacccacccuccuauauggc

SEQ ID NO: 353613 - RNA, 18 nt, Human
agccggggccuugggagu

SEQ ID NO: 353614 - RNA, 19 nt, Human
agccugggagaugugggcc

SEQ ID NO: 353615 - RNA, 20 nt, Human
aggccuccgagcauguacag

SEQ ID NO: 353616 - RNA, 20 nt, Human
auugggccucacaggggaga

SEQ ID NO: 353617 - RNA, 25 nt, Human
caaaugagucucuuuuccaagaaac

SEQ ID NO: 353618 - RNA, 24 nt, Human
caacguguggccucaguguggugg

SEQ ID NO: 353619 - RNA, 18 nt, Human
cacagcccaggccugucc

SEQ ID NO: 353620 - RNA, 19 nt, Human
cacagcccaggccuguccc

SEQ ID NO: 353621 - RNA, 25 nt, Human
cacccagggcucaccuccuggaggc

SEQ ID NO: 353622 - RNA, 21 nt, Human
caccuagagugagcagggggc

SEQ ID NO: 353623 - RNA, 25 nt, Human
caggggagaguccagagacagggcc

SEQ ID NO: 353624 - RNA, 18 nt, Human
ccauccccacucuggcug

SEQ ID NO: 353625 - RNA, 21 nt, Human
ccccacucuggcuggccugga

SEQ ID NO: 353626 - RNA, 22 nt, Human
ccccacucuggcuggccuggaa

SEQ ID NO: 353627 - RNA, 19 nt, Human
ccccucguggacgagaggc

SEQ ID NO: 353628 - RNA, 26 nt, Human
ccccucguggacgagaggccaagggu

SEQ ID NO: 353629 - RNA, 23 nt, Human
ccuauauggccaggccuccgagc

SEQ ID NO: 353630 - RNA, 21 nt, Human
ccuccgagcauguacaguaag

SEQ ID NO: 353631 - RNA, 18 nt, Human
cgacccgacgaccgccgg

SEQ ID NO: 353632 - RNA, 22 nt, Human
cgacgcccaggguuccaacucc

SEQ ID NO: 353633 - RNA, 20 nt, Human
cuaagcagaagugaggcaag

SEQ ID NO: 353634 - RNA, 22 nt, Human
cugucuccuaagcagccuggga

SEQ ID NO: 353635 - RNA, 18 nt, Human
cuugccgcugccaacuga

SEQ ID NO: 353636 - RNA, 23 nt, Human
cuugccgcugccaacugaccaaa

SEQ ID NO: 353637 - RNA, 22 nt, Human
cuugggaagggccucccugcag

SEQ ID NO: 353638 - RNA, 20 nt, Human
gaccaaaggcugccgacccg

SEQ ID NO: 353639 - RNA, 19 nt, Human
gaccauccccacucuggcu

SEQ ID NO: 353640 - RNA, 18 nt, Human
gagcagggggcuaaguca

SEQ ID NO: 353641 - RNA, 19 nt, Human
gaguccagagacagggcca

SEQ ID NO: 353642 - RNA, 21 nt, Human
gcaagcuacuuccgcacagau

SEQ ID NO: 353643 - RNA, 20 nt, Human
gcagugaccagggccagggc

SEQ ID NO: 353644 - RNA, 20 nt, Human
gccaggaaaagaaggugagg

SEQ ID NO: 353645 - RNA, 23 nt, Human
ggccucacaggggagaguccaga

SEQ ID NO: 353646 - RNA, 21 nt, Human
gggccucacaggggagagucc

SEQ ID NO: 353647 - RNA, 20 nt, Human
uaagauggggggugauuuca

SEQ ID NO: 353648 - RNA, 21 nt, Human
ucagagccggggccuugggag

SEQ ID NO: 353649 - RNA, 18 nt, Human
ucagcaaaugagucucuu

SEQ ID NO: 353650 - RNA, 18 nt, Human
ucagcaucacccacccuc

SEQ ID NO: 353651 - RNA, 19 nt, Human
ucauuugucuauggauuuc

SEQ ID NO: 353652 - RNA, 23 nt, Human
uccaagaaacgaaaaggucuugu

SEQ ID NO: 353653 - RNA, 24 nt, Human
uccaagaaacgaaaaggucuuguu

SEQ ID NO: 353654 - RNA, 21 nt, Human
ucccugcaggugugcacugca

SEQ ID NO: 353655 - RNA, 22 nt, Human
ucccugcaggugugcacugcag

SEQ ID NO: 353656 - RNA, 27 nt, Human
ucucuuuuccaagaaacgaaaaggucu

SEQ ID NO: 353657 - RNA, 23 nt, Human
ucugucuccuaagcagccuggga

SEQ ID NO: 353658 - RNA, 20 nt, Human
ugaccagggccagggcggcu

SEQ ID NO: 353659 - RNA, 24 nt, Human
ugccuuccugucucgacgcccagg

SEQ ID NO: 353660 - RNA, 21 nt, Human
ugggaagggccucccugcagg

SEQ ID NO: 353661 - RNA, 21 nt, Human
uggggggugauuucagcauca

SEQ ID NO: 353662 - RNA, 20 nt, Human
uguaacgucauucagagacc

SEQ ID NO: 353663 - RNA, 19 nt, Human
uguggccucaguguggugg

SEQ ID NO: 353664 - RNA, 21 nt, Human
uguggccucagugugguggcc

SEQ ID NO: 353665 - RNA, 20 nt, Human
ugugguggccgucuggggug

SEQ ID NO: 353666 - RNA, 24 nt, Human
ugugguggccgucuggggugggug

SEQ ID NO: 353667 - RNA, 22 nt, Human
uguuucaaccacugcgcccugc

SEQ ID NO: 353668 - RNA, 20 nt, Human
uugccgcugccaacugacca

SEQ ID NO: 353669 - RNA, 22 nt, Human
uuuuuuuuuuuuuuuuucauuu

SEQ ID NO: 353670 - RNA, 20 nt, Human
agacagggccacacaugcca

SEQ ID NO: 353671 - RNA, 21 nt, Human
aggggccaggcugugcccaga

SEQ ID NO: 353672 - RNA, 18 nt, Human
caggacccuccagacuga

SEQ ID NO: 353673 - RNA, 21 nt, Human
ccagagacccaggcauccagc

SEQ ID NO: 353674 - RNA, 22 nt, Human
cccagagacccaggcauccagc

SEQ ID NO: 353675 - RNA, 23 nt, Human
cccagagacccaggcauccagcu

SEQ ID NO: 353676 - RNA, 25 nt, Human
cccuccagacugaagaguccauggg

SEQ ID NO: 353677 - RNA, 19 nt, Human
ggaggcccaggacccucca

SEQ ID NO: 353678 - RNA, 18 nt, Human
uugcugucaggaggccca

SEQ ID NO: 353679 - RNA, 22 nt, Human
acucacucccagcccuccccug

SEQ ID NO: 353680 - RNA, 23 nt, Human
agaggcugcacagcaccagggug

SEQ ID NO: 353681 - RNA, 18 nt, Human
cacagcaccagggugugg

SEQ ID NO: 353682 - RNA, 18 nt, Human
caccugcuguccuggacu

SEQ ID NO: 353683 - RNA, 24 nt, Human
cagcccuccccugccacauccucc

SEQ ID NO: 353684 - RNA, 19 nt, Human
ccccaacucuaaacacaga

SEQ ID NO: 353685 - RNA, 20 nt, Human
ccccuggguggcugucucag

SEQ ID NO: 353686 - RNA, 23 nt, Human
ccccuggguggcugucucagcuc

SEQ ID NO: 353687 - RNA, 21 nt, Human
ccccuuuccagaggcagaaac

SEQ ID NO: 353688 - RNA, 21 nt, Human
cccgcccccuuuccagaggca

SEQ ID NO: 353689 - RNA, 23 nt, Human
cccugcccaucucagugccccuc

SEQ ID NO: 353690 - RNA, 21 nt, Human
ccuccccugccacauccuccu

SEQ ID NO: 353691 - RNA, 20 nt, Human
ccucugcacucucaggcggc

SEQ ID NO: 353692 - RNA, 23 nt, Human
ccugcuguccuggacuccuggac

SEQ ID NO: 353693 - RNA, 23 nt, Human
cucagugccccuccccgcucccc

SEQ ID NO: 353694 - RNA, 22 nt, Human
cucccagcccuccccugccaca

SEQ ID NO: 353695 - RNA, 19 nt, Human
cuccccugccacauccucc

SEQ ID NO: 353696 - RNA, 18 nt, Human
cucuaaacacagagcuac

SEQ ID NO: 353697 - RNA, 20 nt, Human
gccagcaccugcuguccugg

SEQ ID NO: 353698 - RNA, 23 nt, Human
gcccccuuuccagaggcagaaac

SEQ ID NO: 353699 - RNA, 22 nt, Human
ggcugcacagcaccagggugug

SEQ ID NO: 353700 - RNA, 21 nt, Human
uacucacucccagcccucccc

SEQ ID NO: 353701 - RNA, 22 nt, Human
uacucacucccagcccuccccu

SEQ ID NO: 353702 - RNA, 22 nt, Human
ucagugccccuccccgcucccc

SEQ ID NO: 353703 - RNA, 19 nt, Human
uccaagaggucggaugcuu

SEQ ID NO: 353704 - RNA, 18 nt, Human
uccuggacuccuggaccu

SEQ ID NO: 353705 - RNA, 22 nt, Human
uccuuguccccaacucuaaaca

SEQ ID NO: 353706 - RNA, 23 nt, Human
ugcacucucaggcggcacagucu

SEQ ID NO: 353707 - RNA, 19 nt, Human
uggaguggacccccugggu

SEQ ID NO: 353708 - RNA, 21 nt, Human
ugugaaaagggcccgcccccu

SEQ ID NO: 353709 - RNA, 24 nt, Human
uuuuuuuuuuuuuuuuuuucaugg

SEQ ID NO: 353710 - RNA, 18 nt, Human
aagugugggaccagccuu

SEQ ID NO: 353711 - RNA, 22 nt, Human
acacagcacguuaggacugaaa

SEQ ID NO: 353712 - RNA, 21 nt, Human
agcaagaaucugauccuugua

SEQ ID NO: 353713 - RNA, 20 nt, Human
auuugcaaaaggcuucccuu

SEQ ID NO: 353714 - RNA, 24 nt, Human
caaaaggcuucccuucuuccacuc

SEQ ID NO: 353715 - RNA, 22 nt, Human
cacagcaagaaucugauccuug

SEQ ID NO: 353716 - RNA, 24 nt, Human
caccccagccuuucuauaugauuu

SEQ ID NO: 353717 - RNA, 22 nt, Human
cacugagcugggcaucaagggc

SEQ ID NO: 353718 - RNA, 22 nt, Human
ccugcaacugacacucuacuau

SEQ ID NO: 353719 - RNA, 20 nt, Human
cugagguccagagagggaaa

SEQ ID NO: 353720 - RNA, 23 nt, Human
cugcugauaagugugggaccagc

SEQ ID NO: 353721 - RNA, 22 nt, Human
cuguagauuucaggagaagccc

SEQ ID NO: 353722 - RNA, 21 nt, Human
cuuccugguggcccucaucca

SEQ ID NO: 353723 - RNA, 21 nt, Human
gacccacucaccucugcugcc

SEQ ID NO: 353724 - RNA, 19 nt, Human
gaugggccauagcauagcc

SEQ ID NO: 353725 - RNA, 22 nt, Human
gcugccuuggauaccugaaaug

SEQ ID NO: 353726 - RNA, 21 nt, Human
ggcuucccuucuuccacuccc

SEQ ID NO: 353727 - RNA, 25 nt, Human
gggaaacugagguccagagagggaa

SEQ ID NO: 353728 - RNA, 20 nt, Human
uaccugaaaugugucccgua

SEQ ID NO: 353729 - RNA, 23 nt, Human
uagcauagcccccuucaucuccc

SEQ ID NO: 353730 - RNA, 24 nt, Human
uauaugauuucaggaguucuuggg

SEQ ID NO: 353731 - RNA, 28 nt, Human
ucagacucccauuccaacauuuuuccca

SEQ ID NO: 353732 - RNA, 23 nt, Human
ucauuagucaacuaaaccugugu

SEQ ID NO: 353733 - RNA, 19 nt, Human
uccacauuuccccaaggca

SEQ ID NO: 353734 - RNA, 20 nt, Human
uccacuggaacaucccuccu

SEQ ID NO: 353735 - RNA, 22 nt, Human
ucuuaaaggaugaauggcacuu

SEQ ID NO: 353736 - RNA, 23 nt, Human
ugaacugacaguuguugcugcug

SEQ ID NO: 353737 - RNA, 21 nt, Human
ugagcugggcaucaagggccg

SEQ ID NO: 353738 - RNA, 18 nt, Human
ugagguccagagagggaa

SEQ ID NO: 353739 - RNA, 23 nt, Human
ugagguccagagagggaaagugu

SEQ ID NO: 353740 - RNA, 19 nt, Human
ugauaagugugggaccagc

SEQ ID NO: 353741 - RNA, 26 nt, Human
ugcaacugacacucuacuauuugcaa

SEQ ID NO: 353742 - RNA, 22 nt, Human
uggcuguucuuuguucuaugag

SEQ ID NO: 353743 - RNA, 20 nt, Human
uuccaccuugauauccagau

SEQ ID NO: 353744 - RNA, 22 nt, Human
uucccuucuuccacucccagcc

SEQ ID NO: 353745 - RNA, 22 nt, Human
uuccugguggcccucauccacu

SEQ ID NO: 353746 - RNA, 19 nt, Human
uucuaugaggaaacggagg

SEQ ID NO: 353747 - RNA, 20 nt, Human
uuggauaccugaaauguguc

SEQ ID NO: 353748 - RNA, 18 nt, Human
uuguggcacugagcuggg

SEQ ID NO: 353749 - RNA, 18 nt, Human
uuuuuuuuuuuuuuuuug

SEQ ID NO: 353750 - RNA, 22 nt, Human
uuuuuuuuuuuuuuuuuuguuu

SEQ ID NO: 353751 - RNA, 22 nt, Human
aaaaaagcucaaccuaauuaga

SEQ ID NO: 353752 - RNA, 24 nt, Human
aaacaaauggccaauaagcacaua

SEQ ID NO: 353753 - RNA, 19 nt, Human
aaacauaugugaacacaaa

SEQ ID NO: 353754 - RNA, 18 nt, Human
aaagcagcaaugccaugg

SEQ ID NO: 353755 - RNA, 21 nt, Human
aaaggaaaccaaaggggagau

SEQ ID NO: 353756 - RNA, 25 nt, Human
aaauggccaauaagcacauaaaaaa

SEQ ID NO: 353757 - RNA, 21 nt, Human
aaauggcuauaaucauaaaga

SEQ ID NO: 353758 - RNA, 18 nt, Human
aacacugguaguuguuuu

SEQ ID NO: 353759 - RNA, 24 nt, Human
aacagaaaaugaaaaacauaugug

SEQ ID NO: 353760 - RNA, 19 nt, Human
aagacaagacagacaaccc

SEQ ID NO: 353761 - RNA, 19 nt, Human
aagacgccagacacaaaau

SEQ ID NO: 353762 - RNA, 24 nt, Human
aagacgccagacacaaaauacuac

SEQ ID NO: 353763 - RNA, 24 nt, Human
aauguuagaauggaagaugaaaau

SEQ ID NO: 353764 - RNA, 18 nt, Human
acaaaacuacaagauacc

SEQ ID NO: 353765 - RNA, 24 nt, Human
agaaaaaaagggaaacuuuucuaa

SEQ ID NO: 353766 - RNA, 22 nt, Human
agaaaaugaaaaacauauguga

SEQ ID NO: 353767 - RNA, 21 nt, Human
agaaagaaaaacuuauaaaga

SEQ ID NO: 353768 - RNA, 18 nt, Human
agacuggaaaugcaagug

SEQ ID NO: 353769 - RNA, 24 nt, Human
agagauuauuaagaacucauuuaa

SEQ ID NO: 353770 - RNA, 22 nt, Human
agaugaaccucaagaacaccau

SEQ ID NO: 353771 - RNA, 19 nt, Human
augaggaaauguccacgua

SEQ ID NO: 353772 - RNA, 25 nt, Human
auggcccagcaauuucuagccuagg

SEQ ID NO: 353773 - RNA, 24 nt, Human
caaaaaaaaaaaaaaaaaccagaa

SEQ ID NO: 353774 - RNA, 27 nt, Human
caaaaaaaaaaaaaaaaaccagaaaaa

SEQ ID NO: 353775 - RNA, 20 nt, Human
caaaaaaaaggacauuucac

SEQ ID NO: 353776 - RNA, 23 nt, Human
caaaaaaaaggacauuucacuuu

SEQ ID NO: 353777 - RNA, 26 nt, Human
caaaaagcaucuucagaaaauaucau

SEQ ID NO: 353778 - RNA, 22 nt, Human
caaacaaauggccaauaagcac

SEQ ID NO: 353779 - RNA, 19 nt, Human
caacuacaucauuuaucuu

SEQ ID NO: 353780 - RNA, 18 nt, Human
caagacagacaacccaaa

SEQ ID NO: 353781 - RNA, 19 nt, Human
caagacgccagacacaaaa

SEQ ID NO: 353782 - RNA, 21 nt, Human
caagacuggaaaugcaaguga

SEQ ID NO: 353783 - RNA, 23 nt, Human
caagauaccaauuuacuuucaaa

SEQ ID NO: 353784 - RNA, 21 nt, Human
cauaaagacacaauccuggau

SEQ ID NO: 353785 - RNA, 20 nt, Human
cauggaaauauucuaaaacu

SEQ ID NO: 353786 - RNA, 22 nt, Human
ccaaaggggagauuaucaauga

SEQ ID NO: 353787 - RNA, 18 nt, Human
ccaaaugucccucaacug

SEQ ID NO: 353788 - RNA, 23 nt, Human
ccucacucaaaaaaaaaaaaaaa

SEQ ID NO: 353789 - RNA, 24 nt, Human
ccucacucaaaaaaaaaaaaaaag

SEQ ID NO: 353790 - RNA, 20 nt, Human
cuaaaagcagcaaugccaug

SEQ ID NO: 353791 - RNA, 20 nt, Human
cuagaaauaaaauaggucuu

SEQ ID NO: 353792 - RNA, 26 nt, Human
cucaaauaccacauuuauuacacaau

SEQ ID NO: 353793 - RNA, 19 nt, Human
cucaaccuaauuagauauu

SEQ ID NO: 353794 - RNA, 24 nt, Human
cucggguuuuuggagagacggugg

SEQ ID NO: 353795 - RNA, 23 nt, Human
gagcauuagguauagauucagag

SEQ ID NO: 353796 - RNA, 21 nt, Human
gaucuuguuaaaaacuggagg

SEQ ID NO: 353797 - RNA, 19 nt, Human
gauguuggugaggauuuga

SEQ ID NO: 353798 - RNA, 24 nt, Human
ggaaacuucuuagggucauggaaa

SEQ ID NO: 353799 - RNA, 22 nt, Human
ggaacaauccaaaugucccuca

SEQ ID NO: 353800 - RNA, 21 nt, Human
uaaaaccaccaugagaugcca

SEQ ID NO: 353801 - RNA, 22 nt, Human
uaaaaccaccaugagaugccac

SEQ ID NO: 353802 - RNA, 19 nt, Human
uaaaagcagcaaugccaug

SEQ ID NO: 353803 - RNA, 24 nt, Human
uaacgcuagaaaauuuacuaaaag

SEQ ID NO: 353804 - RNA, 18 nt, Human
uaaguaucaauacauacu

SEQ ID NO: 353805 - RNA, 19 nt, Human
uaagugcaagacgccagac

SEQ ID NO: 353806 - RNA, 19 nt, Human
uacaaagucuaaaaaggug

SEQ ID NO: 353807 - RNA, 22 nt, Human
uagaaagaaaaacuuauaaaga

SEQ ID NO: 353808 - RNA, 23 nt, Human
uauuaagaacucauuuaacucaa

SEQ ID NO: 353809 - RNA, 23 nt, Human
ucacucaaaaaaaaaaaaaaaaa

SEQ ID NO: 353810 - RNA, 27 nt, Human
ucacucaaaaaaaaaaaaaaaaaccag

SEQ ID NO: 353811 - RNA, 22 nt, Human
ugaaaaacauaugugaacacaa

SEQ ID NO: 353812 - RNA, 19 nt, Human
ugagaugccacuuuguacc

SEQ ID NO: 353813 - RNA, 21 nt, Human
ugaggaaacuucuuaggguca

SEQ ID NO: 353814 - RNA, 23 nt, Human
ugaggauuugaagacacuaguuu

SEQ ID NO: 353815 - RNA, 22 nt, Human
ugauggccaagacuggaaaugc

SEQ ID NO: 353816 - RNA, 20 nt, Human
ugauuuguauacauuucacc

SEQ ID NO: 353817 - RNA, 21 nt, Human
ugauuuuagcgagaccucggg

SEQ ID NO: 353818 - RNA, 24 nt, Human
uggaaaugcaaauuaaaaccacca

SEQ ID NO: 353819 - RNA, 20 nt, Human
uggcuauaaucauaaagaca

SEQ ID NO: 353820 - RNA, 22 nt, Human
uggcugggcaacgaacuaggaa

SEQ ID NO: 353821 - RNA, 21 nt, Human
ugggaaaacaguuugacuguu

SEQ ID NO: 353822 - RNA, 24 nt, Human
uguauacauuucaccaaacaaagu

SEQ ID NO: 353823 - RNA, 22 nt, Human
uucaccaaacaaagucaaacaa

SEQ ID NO: 353824 - RNA, 18 nt, Human
uugacucaccuuacgcau

SEQ ID NO: 353825 - RNA, 24 nt, Human
uuucaaaggaaaccaaaggggaga

SEQ ID NO: 353826 - RNA, 24 nt, Human
uuucauaaucauaugaguaacacu

SEQ ID NO: 353827 - RNA, 22 nt, Human
uuugcuacuguauucccaaauc

SEQ ID NO: 353828 - RNA, 19 nt, Human
uuuuguccugggcauuuga

SEQ ID NO: 353829 - RNA, 23 nt, Human
uuuuuuuuuuuuuuuuuaugagg

SEQ ID NO: 353830 - RNA, 18 nt, Human
aaaguaaaaguuaauguu

SEQ ID NO: 353831 - RNA, 24 nt, Human
agaagagcagaaauauguagaaaa

SEQ ID NO: 353832 - RNA, 20 nt, Human
cugacgggcaaugcuccucu

SEQ ID NO: 353833 - RNA, 24 nt, Human
cugacgggcaaugcuccucugaga

SEQ ID NO: 353834 - RNA, 24 nt, Human
gcaugaucccauuuuagaagacca

SEQ ID NO: 353835 - RNA, 24 nt, Human
guuguucucugguuauucucugag

SEQ ID NO: 353836 - RNA, 31 nt, Human
uaaauuuuuggcaauuugaaauagcaauucu

SEQ ID NO: 353837 - RNA, 24 nt, Human
uaacagaucaucugcuucuauaac

SEQ ID NO: 353838 - RNA, 18 nt, Human
uacagacauauauaugug

SEQ ID NO: 353839 - RNA, 21 nt, Human
uacuuauucuucauuaugaga

SEQ ID NO: 353840 - RNA, 25 nt, Human
uauaagauacagacauauauaugug

SEQ ID NO: 353841 - RNA, 24 nt, Human
ucaaucugguuguucucugguuau

SEQ ID NO: 353842 - RNA, 19 nt, Human
ugauaguaaggaaaaucua

SEQ ID NO: 353843 - RNA, 21 nt, Human
aaacaggucacaaacagaauu

SEQ ID NO: 353844 - RNA, 23 nt, Human
aaagaaauguguguuucuaggga

SEQ ID NO: 353845 - RNA, 26 nt, Human
aagaaaagaaauaugagccaagagaa

SEQ ID NO: 353846 - RNA, 23 nt, Human
aagaaggauuuagguaucaccua

SEQ ID NO: 353847 - RNA, 25 nt, Human
aaucacaaaauuuagaaacauaaga

SEQ ID NO: 353848 - RNA, 25 nt, Human
agaaaagaaauaugagccaagagaa

SEQ ID NO: 353849 - RNA, 21 nt, Human
agaaacauaagaaggauuuag

SEQ ID NO: 353850 - RNA, 24 nt, Human
agaaagaaaagaaauaugagccaa

SEQ ID NO: 353851 - RNA, 27 nt, Human
agaaagaaaagaaauaugagccaagag

SEQ ID NO: 353852 - RNA, 18 nt, Human
agagaaagagagaaaggc

SEQ ID NO: 353853 - RNA, 19 nt, Human
agagaaagagagaaaggca

SEQ ID NO: 353854 - RNA, 25 nt, Human
agaggaagcagaggugggcagagag

SEQ ID NO: 353855 - RNA, 23 nt, Human
cacaaaauuuagaaacagcggac

SEQ ID NO: 353856 - RNA, 19 nt, Human
caguuuaccagaacaucug

SEQ ID NO: 353857 - RNA, 23 nt, Human
caucaagaugagaaagaaaagaa

SEQ ID NO: 353858 - RNA, 19 nt, Human
ccagaacaucugcagguga

SEQ ID NO: 353859 - RNA, 25 nt, Human
uauagaaucacaaaauuuagaaaca

SEQ ID NO: 353860 - RNA, 22 nt, Human
uauuuuauugaugauguguuuu

SEQ ID NO: 353861 - RNA, 21 nt, Human
ucaagaugagaaagaaaagaa

SEQ ID NO: 353862 - RNA, 22 nt, Human
uccucaaggagaauuuuucugg

SEQ ID NO: 353863 - RNA, 18 nt, Human
ugagccaagagaaucugu

SEQ ID NO: 353864 - RNA, 21 nt, Human
uggaagaaaaaguacauuuau

SEQ ID NO: 353865 - RNA, 23 nt, Human
ugggcuuauuaagagaaagagag

SEQ ID NO: 353866 - RNA, 19 nt, Human
uuccuagaggaagcagagg

SEQ ID NO: 353867 - RNA, 21 nt, Human
uugaugaugacgaucaucauc

SEQ ID NO: 353868 - RNA, 23 nt, Human
aaagaaauguguguuucuaggga

SEQ ID NO: 353869 - RNA, 23 nt, Human
aacaccucuaggugaacauuuuc

SEQ ID NO: 353870 - RNA, 23 nt, Human
aagaaggauuuagguaucaccua

SEQ ID NO: 353871 - RNA, 25 nt, Human
aaucacaaaauuuagaaacauaaga

SEQ ID NO: 353872 - RNA, 21 nt, Human
aaugaagggugagauccuaaa

SEQ ID NO: 353873 - RNA, 25 nt, Human
agaaaagaaauaugagccaagagaa

SEQ ID NO: 353874 - RNA, 21 nt, Human
agaaacauaagaaggauuuag

SEQ ID NO: 353875 - RNA, 19 nt, Human
agagaaagagagaaaggca

SEQ ID NO: 353876 - RNA, 25 nt, Human
agaggaagcagaggugggcagagag

SEQ ID NO: 353877 - RNA, 27 nt, Human
agaggaagcagaggugggcagagaggc

SEQ ID NO: 353878 - RNA, 24 nt, Human
agauagaaaagaaauaugagccaa

SEQ ID NO: 353879 - RNA, 23 nt, Human
aggaagcagaggugggcagagag

SEQ ID NO: 353880 - RNA, 23 nt, Human
cacaaaauuuagaaacagcggac

SEQ ID NO: 353881 - RNA, 18 nt, Human
cauuauuuuauugaugau

SEQ ID NO: 353882 - RNA, 23 nt, Human
ccagaacaccucuaggugaacau

SEQ ID NO: 353883 - RNA, 21 nt, Human
uaaaugauucaucuuaucuug

SEQ ID NO: 353884 - RNA, 26 nt, Human
uagaaaagaaauaugagccaagagaa

SEQ ID NO: 353885 - RNA, 20 nt, Human
uagaagacacgguauuaaau

SEQ ID NO: 353886 - RNA, 25 nt, Human
uauagaaucacaaaauuuagaaaca

SEQ ID NO: 353887 - RNA, 22 nt, Human
uauuuuauugaugauguguuuu

SEQ ID NO: 353888 - RNA, 21 nt, Human
ugaagagaaaguaugauuugg

SEQ ID NO: 353889 - RNA, 19 nt, Human
ugacuaucaucaucaagau

SEQ ID NO: 353890 - RNA, 18 nt, Human
ugagccaagagaaucugu

SEQ ID NO: 353891 - RNA, 25 nt, Human
ugggcagagaggcugugugugucug

SEQ ID NO: 353892 - RNA, 23 nt, Human
ugggcuuauuaagagaaagagag

SEQ ID NO: 353893 - RNA, 19 nt, Human
uuccuagaggaagcagagg

SEQ ID NO: 353894 - RNA, 21 nt, Human
aaaaaggaaacaaaagauaga

SEQ ID NO: 353895 - RNA, 24 nt, Human
aaaaggaaacaaaagauagaauug

SEQ ID NO: 353896 - RNA, 21 nt, Human
aaaaggaacaggcaagcgagg

SEQ ID NO: 353897 - RNA, 22 nt, Human
aaaaggucuaucugugugaagg

SEQ ID NO: 353898 - RNA, 19 nt, Human
aaacaaaagauagaauugg

SEQ ID NO: 353899 - RNA, 24 nt, Human
aaagaaggaaagcauagugcuggg

SEQ ID NO: 353900 - RNA, 25 nt, Human
aagaaccuauuuacaaugcauguca

SEQ ID NO: 353901 - RNA, 18 nt, Human
aagaaggaaagcauagug

SEQ ID NO: 353902 - RNA, 31 nt, Human
aagaaggaaagcauagugcugggaagaagaa

SEQ ID NO: 353903 - RNA, 25 nt, Human
acaagaagaaccuauuuacaaugca

SEQ ID NO: 353904 - RNA, 21 nt, Human
agaaggaaagcauagugcugg

SEQ ID NO: 353905 - RNA, 18 nt, Human
agacugaaaaacuaugug

SEQ ID NO: 353906 - RNA, 19 nt, Human
agcauagugcugggaagaa

SEQ ID NO: 353907 - RNA, 28 nt, Human
agucagggaggacuuaacaugggcuaug

SEQ ID NO: 353908 - RNA, 19 nt, Human
auagacugaaaaacuaugu

SEQ ID NO: 353909 - RNA, 21 nt, Human
aucccaaagaaggaaagcaua

SEQ ID NO: 353910 - RNA, 19 nt, Human
augaaucucuggaugcaga

SEQ ID NO: 353911 - RNA, 18 nt, Human
caacagggauagcuuauc

SEQ ID NO: 353912 - RNA, 26 nt, Human
caacagggauagcuuauccacccaac

SEQ ID NO: 353913 - RNA, 22 nt, Human
caagaagaaccuauuuacaaug

SEQ ID NO: 353914 - RNA, 23 nt, Human
cagaacaagaagaaccuauuuac

SEQ ID NO: 353915 - RNA, 19 nt, Human
cagcuagaagccccugcca

SEQ ID NO: 353916 - RNA, 23 nt, Human
cagggaggacuuaacaugggcua

SEQ ID NO: 353917 - RNA, 23 nt, Human
cagggauagcuuauccacccaac

SEQ ID NO: 353918 - RNA, 23 nt, Human
cauacgcauuuggcagcaaauuu

SEQ ID NO: 353919 - RNA, 21 nt, Human
cccaaagaaggaaagcauagu

SEQ ID NO: 353920 - RNA, 19 nt, Human
cuagaagccccugccacca

SEQ ID NO: 353921 - RNA, 19 nt, Human
cuggcggcuuccugaucca

SEQ ID NO: 353922 - RNA, 19 nt, Human
gaaaucggcauccacagaa

SEQ ID NO: 353923 - RNA, 22 nt, Human
gaacaagaagaaccuauuuaca

SEQ ID NO: 353924 - RNA, 20 nt, Human
gccuggagucacaguuaucc

SEQ ID NO: 353925 - RNA, 19 nt, Human
gggaaaaaaggaaacaaaa

SEQ ID NO: 353926 - RNA, 19 nt, Human
gggaaaaaaggaaacaaaa

SEQ ID NO: 353927 - RNA, 22 nt, Human
guaacuaaacccauagacugaa

SEQ ID NO: 353928 - RNA, 23 nt, Human
uaaacccauagacugaaaaacua

SEQ ID NO: 353929 - RNA, 22 nt, Human
uaaaguaacuaaacccauagac

SEQ ID NO: 353930 - RNA, 26 nt, Human
uaacuaaacccauagacugaaaaacu

SEQ ID NO: 353931 - RNA, 23 nt, Human
uagacugaaaaacuaugugucaa

SEQ ID NO: 353932 - RNA, 23 nt, Human
uagcauaggagaaauucaauauu

SEQ ID NO: 353933 - RNA, 21 nt, Human
uaggaauuuucuuuguggaag

SEQ ID NO: 353934 - RNA, 19 nt, Human
uauaguagccugagcaugu

SEQ ID NO: 353935 - RNA, 19 nt, Human
ucaacacaaauucugauau

SEQ ID NO: 353936 - RNA, 18 nt, Human
ucacuggagccagggcag

SEQ ID NO: 353937 - RNA, 21 nt, Human
ucagaacaagaagaaccuauu

SEQ ID NO: 353938 - RNA, 20 nt, Human
ucagggaggacuuaacaugg

SEQ ID NO: 353939 - RNA, 18 nt, Human
ucccaaagaaggaaagca

SEQ ID NO: 353940 - RNA, 19 nt, Human
ucuacauuuuguugcagca

SEQ ID NO: 353941 - RNA, 22 nt, Human
ucuagaaaaugaaucucuggau

SEQ ID NO: 353942 - RNA, 24 nt, Human
ucuaucccaaagaaggaaagcaua

SEQ ID NO: 353943 - RNA, 25 nt, Human
ucugauccaugaaguucuauaacau

SEQ ID NO: 353944 - RNA, 20 nt, Human
ugaagagacaaguuccuuca

SEQ ID NO: 353945 - RNA, 21 nt, Human
ugagaaucccugugcgaguca

SEQ ID NO: 353946 - RNA, 19 nt, Human
ugauaucggcuauugugag

SEQ ID NO: 353947 - RNA, 23 nt, Human
ugccaucuaaaguaacuaaaccc

SEQ ID NO: 353948 - RNA, 18 nt, Human
uggaacauucucuauccc

SEQ ID NO: 353949 - RNA, 22 nt, Human
uggagccagggcaguuucgugg

SEQ ID NO: 353950 - RNA, 24 nt, Human
ugucauugucuuaugggaaaaaag

SEQ ID NO: 353951 - RNA, 24 nt, Human
uuauccaacauuccacaaucugaa

SEQ ID NO: 353952 - RNA, 21 nt, Human
uuccuucaacacaaauucuga

SEQ ID NO: 353953 - RNA, 21 nt, Human
uuuauagguugcugccccaga

SEQ ID NO: 353954 - RNA, 24 nt, Human
uuuauuguaucuagaaaaugaauc

SEQ ID NO: 353955 - RNA, 18 nt, Human
uuugucugaauauucuac

SEQ ID NO: 353956 - RNA, 23 nt, Human
uuuguugcagcauauuaaggucg

SEQ ID NO: 353957 - RNA, 19 nt, Human
aacccugauuauuaccauc

SEQ ID NO: 353958 - RNA, 21 nt, Human
aggggacagagaggagagggg

SEQ ID NO: 353959 - RNA, 23 nt, Human
aggggacagagaggagaggggcu

SEQ ID NO: 353960 - RNA, 25 nt, Human
augggcccuuuauuucugaacugcc

SEQ ID NO: 353961 - RNA, 24 nt, Human
ccaacccugauuauuaccaucucc

SEQ ID NO: 353962 - RNA, 23 nt, Human
ccacaaaugggcccuuuauuucu

SEQ ID NO: 353963 - RNA, 18 nt, Human
cuagauaaaucuaaaucc

SEQ ID NO: 353964 - RNA, 29 nt, Human
cucccuugguacuuccugcuccucaccgg

SEQ ID NO: 353965 - RNA, 19 nt, Human
cucuucaaggcccaaauca

SEQ ID NO: 353966 - RNA, 20 nt, Human
gggacagagaggagaggggc

SEQ ID NO: 353967 - RNA, 24 nt, Human
uaaauccagucaauuacucuucaa

SEQ ID NO: 353968 - RNA, 24 nt, Human
ucagauauucuccacccaacccug

SEQ ID NO: 353969 - RNA, 18 nt, Human
ucuaaauccagucaauua

SEQ ID NO: 353970 - RNA, 21 nt, Human
ucugcugggaacgaccuuucu

SEQ ID NO: 353971 - RNA, 21 nt, Human
ugauuauuaccaucuccaucc

SEQ ID NO: 353972 - RNA, 22 nt, Human
ugcacggauaaggccacuuggg

SEQ ID NO: 353973 - RNA, 18 nt, Human
ugcggcaucccacaaaug

SEQ ID NO: 353974 - RNA, 21 nt, Human
uggguugcaggcacacugugg

SEQ ID NO: 353975 - RNA, 24 nt, Human
uguuguucuuguugcuucugcugg

SEQ ID NO: 353976 - RNA, 26 nt, Human
uuggguugcaggcacacuguggagug

SEQ ID NO: 353977 - RNA, 18 nt, Human
uuguugcuucugcuggga

SEQ ID NO: 353978 - RNA, 28 nt, Human
aaggucuccugcugcugcugcugcugcc

SEQ ID NO: 353979 - RNA, 24 nt, Human
agaaggucuccugcugcugcugcu

SEQ ID NO: 353980 - RNA, 22 nt, Human
ccgccgccgccgccgccgcugc

SEQ ID NO: 353981 - RNA, 22 nt, Human
ccgccgccgccgccgccgcugc

SEQ ID NO: 353982 - RNA, 22 nt, Human
ccgccgccgccgccgccgcugc

SEQ ID NO: 353983 - RNA, 25 nt, Human
ccgccgccgccgccgccgcugcugc

SEQ ID NO: 353984 - RNA, 26 nt, Human
ccgccgccgccgccgccgcugcugcu

SEQ ID NO: 353985 - RNA, 18 nt, Human
cgccgccgccgcugcugc

SEQ ID NO: 353986 - RNA, 21 nt, Human
cugccgccgccgccgccgccg

SEQ ID NO: 353987 - RNA, 20 nt, Human
gccgccgccgccgccgccgc

SEQ ID NO: 353988 - RNA, 22 nt, Human
gcugccgccgccgccgccgccg

SEQ ID NO: 353989 - RNA, 22 nt, Human
gcugcugccgccgccgccgccg

SEQ ID NO: 353990 - RNA, 22 nt, Human
gcugcugcugccgccgccgccg

SEQ ID NO: 353991 - RNA, 22 nt, Human
gcugcugcugcugccgccgccg

SEQ ID NO: 353992 - RNA, 21 nt, Human
gucuccugcugcugcugcugc

SEQ ID NO: 353993 - RNA, 19 nt, Human
uagguagaaggaaaggagg

SEQ ID NO: 353994 - RNA, 21 nt, Human
uagguagaaggaaaggagggu

SEQ ID NO: 353995 - RNA, 23 nt, Human
ucuccugcugcugcugcugcugc

SEQ ID NO: 353996 - RNA, 24 nt, Human
aaaaaaaaaacucagugauaucca

SEQ ID NO: 353997 - RNA, 22 nt, Human
aaaagauacugaacuagggcug

SEQ ID NO: 353998 - RNA, 23 nt, Human
aaacaaauacagguacacaaaca

SEQ ID NO: 353999 - RNA, 21 nt, Human
aaacaacccaaaguccaucaa

SEQ ID NO: 354000 - RNA, 25 nt, Human
aacaaaauuuaaaaggcaauacaag

SEQ ID NO: 354001 - RNA, 19 nt, Human
aacacggugaaaccccguc

SEQ ID NO: 354002 - RNA, 20 nt, Human
aacacggugaaaccccgucu

SEQ ID NO: 354003 - RNA, 21 nt, Human
aacacggugaaaccccgucuc

SEQ ID NO: 354004 - RNA, 18 nt, Human
aacacuguuuauuaauga

SEQ ID NO: 354005 - RNA, 20 nt, Human
aacccaaaguccaucaauga

SEQ ID NO: 354006 - RNA, 19 nt, Human
aagaagccagacacaaaag

SEQ ID NO: 354007 - RNA, 23 nt, Human
aagagccaauaaaugcauagaac

SEQ ID NO: 354008 - RNA, 22 nt, Human
aagcagaaaaguagguguguga

SEQ ID NO: 354009 - RNA, 24 nt, Human
aagucagaaacaacccaaagucca

SEQ ID NO: 354010 - RNA, 21 nt, Human
aauacagguacacaaacauuc

SEQ ID NO: 354011 - RNA, 20 nt, Human
aauugcuugaauccaggagg

SEQ ID NO: 354012 - RNA, 24 nt, Human
acacuccagccugggugacagagu

SEQ ID NO: 354013 - RNA, 23 nt, Human
acagagugaggcacugucucaaa

SEQ ID NO: 354014 - RNA, 24 nt, Human
acagagugaggcacugucucaaaa

SEQ ID NO: 354015 - RNA, 18 nt, Human
accacuaauaaaagaaau

SEQ ID NO: 354016 - RNA, 24 nt, Human
accccgucucuacuaaaaauacaa

SEQ ID NO: 354017 - RNA, 25 nt, Human
accccgucucuacugaaaaauacaa

SEQ ID NO: 354018 - RNA, 18 nt, Human
acuacacuccagccuggg

SEQ ID NO: 354019 - RNA, 24 nt, Human
acuacacuccagccugggugacag

SEQ ID NO: 354020 - RNA, 21 nt, Human
acuaugaggggcacccagaua

SEQ ID NO: 354021 - RNA, 24 nt, Human
acuccagccugggugacagaguga

SEQ ID NO: 354022 - RNA, 24 nt, Human
acugaaaaauacaaaauuagccgg

SEQ ID NO: 354023 - RNA, 24 nt, Human
acugcacuccagccugggcgacag

SEQ ID NO: 354024 - RNA, 26 nt, Human
acugcacuccagccugggcgacagag

SEQ ID NO: 354025 - RNA, 26 nt, Human
agaaaggaaaaacuucucaaagaaga

SEQ ID NO: 354026 - RNA, 24 nt, Human
agaacauuuuuuuuggaacuuuaa

SEQ ID NO: 354027 - RNA, 22 nt, Human
agagaaaauauaaaacagaggg

SEQ ID NO: 354028 - RNA, 24 nt, Human
agagaucgagccacugcacuccag

SEQ ID NO: 354029 - RNA, 24 nt, Human
agcacuuugggaggccgaggcggg

SEQ ID NO: 354030 - RNA, 24 nt, Human
agcacuuugggaggcugagguagg

SEQ ID NO: 354031 - RNA, 22 nt, Human
agccgggugugguggugggugc

SEQ ID NO: 354032 - RNA, 23 nt, Human
agccgggugugguggugggugcu

SEQ ID NO: 354033 - RNA, 20 nt, Human
agccugggugacagagugag

SEQ ID NO: 354034 - RNA, 21 nt, Human
aggaagagggaaauggccgag

SEQ ID NO: 354035 - RNA, 19 nt, Human
aggaggagguugcagugag

SEQ ID NO: 354036 - RNA, 23 nt, Human
aggaguucaagaccaacacggcc

SEQ ID NO: 354037 - RNA, 23 nt, Human
aggcaaagacauauguaaaaacg

SEQ ID NO: 354038 - RNA, 20 nt, Human
aggcagcggguuaaggaaug

SEQ ID NO: 354039 - RNA, 21 nt, Human
aggcagcggguuaaggaaugu

SEQ ID NO: 354040 - RNA, 21 nt, Human
aggcaggagaauggcgugaac

SEQ ID NO: 354041 - RNA, 24 nt, Human
aggcaggagaauggcgugaacccg

SEQ ID NO: 354042 - RNA, 21 nt, Human
aggccgaggcggguggaucac

SEQ ID NO: 354043 - RNA, 24 nt, Human
aggcggagcuugcagugagcagag

SEQ ID NO: 354044 - RNA, 24 nt, Human
aggcggguggaucacgaggucagg

SEQ ID NO: 354045 - RNA, 19 nt, Human
aggcugaggcaggagaaug

SEQ ID NO: 354046 - RNA, 24 nt, Human
aggcugagguaggcggauugcuug

SEQ ID NO: 354047 - RNA, 23 nt, Human
agguaggcggauugcuugaggcc

SEQ ID NO: 354048 - RNA, 26 nt, Human
agguaggcggauugcuugaggccagg

SEQ ID NO: 354049 - RNA, 23 nt, Human
aguaggugugugaaugacaauuc

SEQ ID NO: 354050 - RNA, 21 nt, Human
aguggcuuaugccuguaaucc

SEQ ID NO: 354051 - RNA, 24 nt, Human
aguggcuuaugccuguaauccuag

SEQ ID NO: 354052 - RNA, 24 nt, Human
aucaugccacuacacuccagccug

SEQ ID NO: 354053 - RNA, 24 nt, Human
aucgagccacugcacuccagccug

SEQ ID NO: 354054 - RNA, 22 nt, Human
augccacuacacuccagccugg

SEQ ID NO: 354055 - RNA, 21 nt, Human
caacuuacuuauuacugcacu

SEQ ID NO: 354056 - RNA, 24 nt, Human
caagaaugagagaaaauauaaaac

SEQ ID NO: 354057 - RNA, 18 nt, Human
caauagccaaaagucaga

SEQ ID NO: 354058 - RNA, 19 nt, Human
cacgaaagaagugcccucc

SEQ ID NO: 354059 - RNA, 24 nt, Human
cacuacacuccagccugggugaca

SEQ ID NO: 354060 - RNA, 24 nt, Human
cacuccagccugggcgacagagag

SEQ ID NO: 354061 - RNA, 22 nt, Human
cacuccagccugggugacagag

SEQ ID NO: 354062 - RNA, 24 nt, Human
cacuccagccugggugacagagug

SEQ ID NO: 354063 - RNA, 19 nt, Human
cacugcacuccagccuggg

SEQ ID NO: 354064 - RNA, 20 nt, Human
cacugcacuccagccugggc

SEQ ID NO: 354065 - RNA, 22 nt, Human
cacugcacuccagccugggcga

SEQ ID NO: 354066 - RNA, 23 nt, Human
cacugcacuccagccugggcgac

SEQ ID NO: 354067 - RNA, 24 nt, Human
cacugcacuccagccugggcgaca

SEQ ID NO: 354068 - RNA, 20 nt, Human
cacugcacuccagccugggg

SEQ ID NO: 354069 - RNA, 21 nt, Human
cagaaauuggaauucucauac

SEQ ID NO: 354070 - RNA, 24 nt, Human
cagcacuuugggaggccgaggcgg

SEQ ID NO: 354071 - RNA, 24 nt, Human
cagcuacucgggaggcugaggcag

SEQ ID NO: 354072 - RNA, 20 nt, Human
ccacuacacuccagccuggg

SEQ ID NO: 354073 - RNA, 21 nt, Human
ccacuacacuccagccugggu

SEQ ID NO: 354074 - RNA, 21 nt, Human
ccacuacacuccagccugggu

SEQ ID NO: 354075 - RNA, 24 nt, Human
ccacuacacuccagccugggugac

SEQ ID NO: 354076 - RNA, 20 nt, Human
ccacugcacuccagccuggg

SEQ ID NO: 354077 - RNA, 21 nt, Human
ccacugcacuccagccugggc

SEQ ID NO: 354078 - RNA, 21 nt, Human
ccacugcacuccagccugggc

SEQ ID NO: 354079 - RNA, 23 nt, Human
ccacugcacuccagccugggcga

SEQ ID NO: 354080 - RNA, 24 nt, Human
ccacugcacuccagccugggcgac

SEQ ID NO: 354081 - RNA, 22 nt, Human
ccaggaggaggagguugcagug

SEQ ID NO: 354082 - RNA, 20 nt, Human
cccagaucaugccacuacac

SEQ ID NO: 354083 - RNA, 20 nt, Human
ccgugccgcgcuccgagccu

SEQ ID NO: 354084 - RNA, 19 nt, Human
ccuagauauauacccaaga

SEQ ID NO: 354085 - RNA, 23 nt, Human
ccuggcuaacacggugaaacccc

SEQ ID NO: 354086 - RNA, 24 nt, Human
ccuggcuaacacggugaaaccccg

SEQ ID NO: 354087 - RNA, 18 nt, Human
ccugggugacagagugag

SEQ ID NO: 354088 - RNA, 20 nt, Human
ccuguaaucccagcacuuug

SEQ ID NO: 354089 - RNA, 22 nt, Human
ccuguaaucccagcacuuuggg

SEQ ID NO: 354090 - RNA, 19 nt, Human
ccuguagucccagcuacuc

SEQ ID NO: 354091 - RNA, 21 nt, Human
ccuguagucccagcuacucgg

SEQ ID NO: 354092 - RNA, 22 nt, Human
ccuguagucccagcuacucggg

SEQ ID NO: 354093 - RNA, 24 nt, Human
cgacaccauccuggcuaacacggu

SEQ ID NO: 354094 - RNA, 20 nt, Human
cgacccccgaggcgcagccu

SEQ ID NO: 354095 - RNA, 24 nt, Human
cgaggcggguggaucacgagguca

SEQ ID NO: 354096 - RNA, 24 nt, Human
cgccuguagucccagcuacucggg

SEQ ID NO: 354097 - RNA, 24 nt, Human
cggauugcuugaggccaggaguuc

SEQ ID NO: 354098 - RNA, 18 nt, Human
cggccaauguggcgaaac

SEQ ID NO: 354099 - RNA, 19 nt, Human
cucaaaaagcuaaacauag

SEQ ID NO: 354100 - RNA, 24 nt, Human
cucaagccuguaaucccagcacuu

SEQ ID NO: 354101 - RNA, 19 nt, Human
cucaucuuugcacuuggcu

SEQ ID NO: 354102 - RNA, 18 nt, Human
cuggcuaacacggugaaa

SEQ ID NO: 354103 - RNA, 22 nt, Human
cugucucaaaaaaaaaaaaaaa

SEQ ID NO: 354104 - RNA, 19 nt, Human
cuugaggccaggaguucaa

SEQ ID NO: 354105 - RNA, 20 nt, Human
gaaagaagccagacacaaaa

SEQ ID NO: 354106 - RNA, 20 nt, Human
gaaagcacagggucgccaga

SEQ ID NO: 354107 - RNA, 21 nt, Human
gaaggaaggaauggagaguaa

SEQ ID NO: 354108 - RNA, 20 nt, Human
gacauauguaaaaacgaagc

SEQ ID NO: 354109 - RNA, 23 nt, Human
gagaauugcuugaauccaggagg

SEQ ID NO: 354110 - RNA, 24 nt, Human
gagauaccacuucacacccacuaa

SEQ ID NO: 354111 - RNA, 18 nt, Human
gagcccagaucaugccac

SEQ ID NO: 354112 - RNA, 21 nt, Human
gaggaaauucaagagccaaua

SEQ ID NO: 354113 - RNA, 26 nt, Human
gagggcagacagguaaggaaucugcc

SEQ ID NO: 354114 - RNA, 19 nt, Human
gagguugcagugagcccag

SEQ ID NO: 354115 - RNA, 28 nt, Human
gcacugucucaaaaaaaaaaaaaaaaaa

SEQ ID NO: 354116 - RNA, 24 nt, Human
gccaauguggcgaaaccccgucuc

SEQ ID NO: 354117 - RNA, 19 nt, Human
gccacuacacuccagccug

SEQ ID NO: 354118 - RNA, 24 nt, Human
gccacuacacuccagccuggguga

SEQ ID NO: 354119 - RNA, 22 nt, Human
gccacugcacuccagccugggc

SEQ ID NO: 354120 - RNA, 24 nt, Human
gccacugcacuccagccugggcga

SEQ ID NO: 354121 - RNA, 20 nt, Human
gcccagaucaugccacuaca

SEQ ID NO: 354122 - RNA, 19 nt, Human
gccuguaauccuagcacuu

SEQ ID NO: 354123 - RNA, 21 nt, Human
gcgaaaccccgucucuacuga

SEQ ID NO: 354124 - RNA, 24 nt, Human
gcuaacacggugaaaccccgucuc

SEQ ID NO: 354125 - RNA, 22 nt, Human
gcugaggcaggagaauggcgug

SEQ ID NO: 354126 - RNA, 22 nt, Human
ggaaucauuauggucuauuuuc

SEQ ID NO: 354127 - RNA, 18 nt, Human
ggagcuugcagugagcag

SEQ ID NO: 354128 - RNA, 24 nt, Human
ggagcuugcagugagcagagaucg

SEQ ID NO: 354129 - RNA, 22 nt, Human
ggaggaggagguugcagugagc

SEQ ID NO: 354130 - RNA, 20 nt, Human
ggagguugcagugagcccag

SEQ ID NO: 354131 - RNA, 24 nt, Human
ggagguugcagugagcccagauca

SEQ ID NO: 354132 - RNA, 23 nt, Human
ggauugcuugaggccaggaguuc

SEQ ID NO: 354133 - RNA, 18 nt, Human
ggcgugguggcgggcgcc

SEQ ID NO: 354134 - RNA, 24 nt, Human
gggcgcgguggcucaagccuguaa

SEQ ID NO: 354135 - RNA, 24 nt, Human
gggcgugguggcgggcgccuguag

SEQ ID NO: 354136 - RNA, 24 nt, Human
gggcucaguggcuuaugccuguaa

SEQ ID NO: 354137 - RNA, 21 nt, Human
gguggaucacgaggucaggag

SEQ ID NO: 354138 - RNA, 24 nt, Human
gguggcgggcgccuguagucccag

SEQ ID NO: 354139 - RNA, 23 nt, Human
gguggcucaagccuguaauccca

SEQ ID NO: 354140 - RNA, 24 nt, Human
gguggcucaagccuguaaucccag

SEQ ID NO: 354141 - RNA, 23 nt, Human
gguggugguuaugcaacauuguu

SEQ ID NO: 354142 - RNA, 19 nt, Human
guacuaagugaaagaagcc

SEQ ID NO: 354143 - RNA, 19 nt, Human
gugaaagaagccagacaca

SEQ ID NO: 354144 - RNA, 22 nt, Human
guggaaaacaguuugucuguuc

SEQ ID NO: 354145 - RNA, 20 nt, Human
guggggaucuggggacacag

SEQ ID NO: 354146 - RNA, 20 nt, Human
guguacuucacuuuguuuuc

SEQ ID NO: 354147 - RNA, 20 nt, Human
gugugugaaugacaauucau

SEQ ID NO: 354148 - RNA, 24 nt, Human
uaaaaauaaaagaacuaccacgaa

SEQ ID NO: 354149 - RNA, 20 nt, Human
uaaacaguccaaccugguca

SEQ ID NO: 354150 - RNA, 21 nt, Human
uaaauaaaucucaaaaacuug

SEQ ID NO: 354151 - RNA, 22 nt, Human
uaacacggugaaaccccgucuc

SEQ ID NO: 354152 - RNA, 24 nt, Human
uaacacggugaaaccccgucucua

SEQ ID NO: 354153 - RNA, 18 nt, Human
uaagacagagucccaacc

SEQ ID NO: 354154 - RNA, 22 nt, Human
uaaguguacuucacuuuguuuu

SEQ ID NO: 354155 - RNA, 18 nt, Human
uaaguugaaagacauuaa

SEQ ID NO: 354156 - RNA, 23 nt, Human
uacacaaacauucauagcagcac

SEQ ID NO: 354157 - RNA, 22 nt, Human
uacuaagugaaagaagccagac

SEQ ID NO: 354158 - RNA, 24 nt, Human
uagcaagaauagauaaaaccauag

SEQ ID NO: 354159 - RNA, 19 nt, Human
uagcaauaucuagcaccau

SEQ ID NO: 354160 - RNA, 24 nt, Human
uagcacuuugggaggcugagguag

SEQ ID NO: 354161 - RNA, 28 nt, Human
uagcacuuugggaggcugagguaggcgg

SEQ ID NO: 354162 - RNA, 24 nt, Human
uaggcggauugcuugaggccagga

SEQ ID NO: 354163 - RNA, 20 nt, Human
uaugccuguaauccuagcac

SEQ ID NO: 354164 - RNA, 24 nt, Human
uaugccuguaauccuagcacuuug

SEQ ID NO: 354165 - RNA, 20 nt, Human
uauggucuauuuucucaaga

SEQ ID NO: 354166 - RNA, 19 nt, Human
uauuacugcacuaugaggg

SEQ ID NO: 354167 - RNA, 22 nt, Human
ucaaaaaaaaaaaaaaaaaaaa

SEQ ID NO: 354168 - RNA, 23 nt, Human
ucaaaaaaaaaaaaaaaaaaaaa

SEQ ID NO: 354169 - RNA, 19 nt, Human
ucacacccacuaagauggc

SEQ ID NO: 354170 - RNA, 18 nt, Human
ucacgaggucaggagauc

SEQ ID NO: 354171 - RNA, 24 nt, Human
ucacgaggucaggagaucgacacc

SEQ ID NO: 354172 - RNA, 22 nt, Human
ucagaaaaaaaaaaaaaaaaaa

SEQ ID NO: 354173 - RNA, 25 nt, Human
ucagcauuaucuaucaaagggaccu

SEQ ID NO: 354174 - RNA, 20 nt, Human
uccaagauguccacuuggcc

SEQ ID NO: 354175 - RNA, 21 nt, Human
uccaagauguccacuuggccc

SEQ ID NO: 354176 - RNA, 22 nt, Human
uccaagauguccacuuggcccu

SEQ ID NO: 354177 - RNA, 20 nt, Human
uccagccugggcgacagaga

SEQ ID NO: 354178 - RNA, 23 nt, Human
uccagccugggugacagagugag

SEQ ID NO: 354179 - RNA, 24 nt, Human
uccagccugggugacagagugagg

SEQ ID NO: 354180 - RNA, 22 nt, Human
ucucuacuaaaaauacaaaaaa

SEQ ID NO: 354181 - RNA, 21 nt, Human
ucucuacugaaaaauacaaaa

SEQ ID NO: 354182 - RNA, 22 nt, Human
ucuggggacacaggaagaggga

SEQ ID NO: 354183 - RNA, 21 nt, Human
ugaaagacauuaaacagucca

SEQ ID NO: 354184 - RNA, 25 nt, Human
ugaagcaagagaauugcuugaaucc

SEQ ID NO: 354185 - RNA, 21 nt, Human
ugacccagcaguuccacuccu

SEQ ID NO: 354186 - RNA, 18 nt, Human
ugaggcacugucucaaaa

SEQ ID NO: 354187 - RNA, 24 nt, Human
ugaggcaggagaauggcgugaacc

SEQ ID NO: 354188 - RNA, 25 nt, Human
ugaggcaggagaauggcgugaaccc

SEQ ID NO: 354189 - RNA, 24 nt, Human
ugagguaggcggauugcuugaggc

SEQ ID NO: 354190 - RNA, 26 nt, Human
ugagguaggcggauugcuugaggcca

SEQ ID NO: 354191 - RNA, 23 nt, Human
ugcagugagcagagaucgagcca

SEQ ID NO: 354192 - RNA, 23 nt, Human
ugccuguaauccuagcacuuugg

SEQ ID NO: 354193 - RNA, 24 nt, Human
ugccuguaauccuagcacuuuggg

SEQ ID NO: 354194 - RNA, 21 nt, Human
ugcuuaaugggaugggguuuc

SEQ ID NO: 354195 - RNA, 24 nt, Human
ugcuuguagucucagcuacuuggg

SEQ ID NO: 354196 - RNA, 21 nt, Human
uggcacugaacuucucacuuu

SEQ ID NO: 354197 - RNA, 19 nt, Human
uggcgaaaccccgucucua

SEQ ID NO: 354198 - RNA, 24 nt, Human
uggcucaagccuguaaucccagca

SEQ ID NO: 354199 - RNA, 19 nt, Human
uggcuuaugccuguaaucc

SEQ ID NO: 354200 - RNA, 24 nt, Human
uggcuuaugccuguaauccuagca

SEQ ID NO: 354201 - RNA, 23 nt, Human
ugggaggccgaggcggguggauc

SEQ ID NO: 354202 - RNA, 24 nt, Human
ugggaggccgaggcggguggauca

SEQ ID NO: 354203 - RNA, 18 nt, Human
ugggaggcugagguaggc

SEQ ID NO: 354204 - RNA, 22 nt, Human
ugggaggcugagguaggcggau

SEQ ID NO: 354205 - RNA, 24 nt, Human
ugggaggcugagguaggcggauug

SEQ ID NO: 354206 - RNA, 23 nt, Human
ugggcacagaacugaagaccagg

SEQ ID NO: 354207 - RNA, 24 nt, Human
ugguggcgggcgccuguaguccca

SEQ ID NO: 354208 - RNA, 18 nt, Human
uggugggugcuuguaguc

SEQ ID NO: 354209 - RNA, 24 nt, Human
ugguggugggugcuuguagucuca

SEQ ID NO: 354210 - RNA, 23 nt, Human
uggugguugcugggggcuggagg

SEQ ID NO: 354211 - RNA, 24 nt, Human
uguaaaaacgaagcagaaaaguag

SEQ ID NO: 354212 - RNA, 22 nt, Human
uguacuaagugaaagaagccag

SEQ ID NO: 354213 - RNA, 22 nt, Human
uguggaaaacaguuugucuguu

SEQ ID NO: 354214 - RNA, 21 nt, Human
uguucuaaaaacaaacaaaug

SEQ ID NO: 354215 - RNA, 19 nt, Human
uguugcagauguuuauaau

SEQ ID NO: 354216 - RNA, 19 nt, Human
uguuuauuaaugaaacauc

SEQ ID NO: 354217 - RNA, 21 nt, Human
uguuuucauuccuccucuaaa

SEQ ID NO: 354218 - RNA, 26 nt, Human
uuaauaaaaauaaaagaacuaccacg

SEQ ID NO: 354219 - RNA, 18 nt, Human
uuagccgggcgugguggc

SEQ ID NO: 354220 - RNA, 22 nt, Human
uuagccgggcgugguggcgggc

SEQ ID NO: 354221 - RNA, 24 nt, Human
uuagccgggcgugguggcgggcgc

SEQ ID NO: 354222 - RNA, 24 nt, Human
uuagccgggugugguggugggugc

SEQ ID NO: 354223 - RNA, 24 nt, Human
uucaagagccaauaaaugcauaga

SEQ ID NO: 354224 - RNA, 22 nt, Human
uugaggccaggaguucaagacc

SEQ ID NO: 354225 - RNA, 19 nt, Human
uugcagugagcagagaucg

SEQ ID NO: 354226 - RNA, 25 nt, Human
uugcagugagcagagaucgagccac

SEQ ID NO: 354227 - RNA, 20 nt, Human
uugcagugagcccagaucau

SEQ ID NO: 354228 - RNA, 20 nt, Human
uugcauguggaauucuagaa

SEQ ID NO: 354229 - RNA, 27 nt, Human
uugcauguggaauucuagaagaacuuu

SEQ ID NO: 354230 - RNA, 18 nt, Human
uugcuugaauccaggagg

SEQ ID NO: 354231 - RNA, 21 nt, Human
uugcuugaauccaggaggagg

SEQ ID NO: 354232 - RNA, 23 nt, Human
uugcuugaggccaggaguucaag

SEQ ID NO: 354233 - RNA, 25 nt, Human
uugggaggccgaggcggguggauca

SEQ ID NO: 354234 - RNA, 23 nt, Human
uugggaggcugaagcaagagaau

SEQ ID NO: 354235 - RNA, 20 nt, Human
uuggugguugcugggggcug

SEQ ID NO: 354236 - RNA, 23 nt, Human
aaacaaaaugagggugcccccaa

SEQ ID NO: 354237 - RNA, 23 nt, Human
aagcuccucucauaugggccucg

SEQ ID NO: 354238 - RNA, 22 nt, Human
aaguggcgcuucagaugaaagc

SEQ ID NO: 354239 - RNA, 23 nt, Human
aauggaaacaaaaugagggugcc

SEQ ID NO: 354240 - RNA, 18 nt, Human
accggagcgggaggugcu

SEQ ID NO: 354241 - RNA, 18 nt, Human
agaaguggcgcuucagau

SEQ ID NO: 354242 - RNA, 19 nt, Human
aggcaacagcaggagggac

SEQ ID NO: 354243 - RNA, 21 nt, Human
aggcuuugagaaaauuaagcc

SEQ ID NO: 354244 - RNA, 21 nt, Human
agggcaccccucauaugucuu

SEQ ID NO: 354245 - RNA, 24 nt, Human
caacaagccucucuucuuggucgu

SEQ ID NO: 354246 - RNA, 24 nt, Human
caagccucucuucuuggucguuuc

SEQ ID NO: 354247 - RNA, 18 nt, Human
caccggagcgggaggugc

SEQ ID NO: 354248 - RNA, 18 nt, Human
cacuacaguuacagugac

SEQ ID NO: 354249 - RNA, 21 nt, Human
gaaacaaaaugagggugcccc

SEQ ID NO: 354250 - RNA, 19 nt, Human
gagggugcccccaaggcac

SEQ ID NO: 354251 - RNA, 23 nt, Human
gcauucaucauggauuugaaagg

SEQ ID NO: 354252 - RNA, 20 nt, Human
ggagggacugauggcauuca

SEQ ID NO: 354253 - RNA, 25 nt, Human
ggcaacagcaggagggacugauggc

SEQ ID NO: 354254 - RNA, 23 nt, Human
gggcaccccucauaugucuugag

SEQ ID NO: 354255 - RNA, 18 nt, Human
gggucaccggagcgggag

SEQ ID NO: 354256 - RNA, 24 nt, Human
gucacagggaggcaacagcaggag

SEQ ID NO: 354257 - RNA, 23 nt, Human
uaagcuccucucauaugggccuc

SEQ ID NO: 354258 - RNA, 21 nt, Human
ucagacaccuagaccuccacc

SEQ ID NO: 354259 - RNA, 20 nt, Human
uccaggucacagggaggcaa

SEQ ID NO: 354260 - RNA, 20 nt, Human
ucucguuguuggaauggaac

SEQ ID NO: 354261 - RNA, 19 nt, Human
ucuguguguuucugagaag

SEQ ID NO: 354262 - RNA, 25 nt, Human
ugagaaaauuaagcccuaacauuag

SEQ ID NO: 354263 - RNA, 23 nt, Human
ugagguggcuucuucccuggaca

SEQ ID NO: 354264 - RNA, 26 nt, Human
uggaaacaaaaugagggugcccccaa

SEQ ID NO: 354265 - RNA, 20 nt, Human
uggaauggaaacaaaaugag

SEQ ID NO: 354266 - RNA, 20 nt, Human
uggaauggaaacaaaaugag

SEQ ID NO: 354267 - RNA, 23 nt, Human
uggacaucaagaauggugcuagu

SEQ ID NO: 354268 - RNA, 21 nt, Human
uggagaaaggcuugagugaca

SEQ ID NO: 354269 - RNA, 23 nt, Human
uuggucguuucuaagcuccucuc

SEQ ID NO: 354270 - RNA, 18 nt, Human
aaaaagaggggcgcgggg

SEQ ID NO: 354271 - RNA, 22 nt, Human
aaagagucauuaacacuaaaau

SEQ ID NO: 354272 - RNA, 23 nt, Human
aacccaugcacacuguuucuggg

SEQ ID NO: 354273 - RNA, 24 nt, Human
aagcaauccucccgccuuggccuc

SEQ ID NO: 354274 - RNA, 25 nt, Human
aagcaauccucccgccuuggccucc

SEQ ID NO: 354275 - RNA, 25 nt, Human
aagcaggugccccagauggucccgc

SEQ ID NO: 354276 - RNA, 20 nt, Human
aagguggcagugugggcucc

SEQ ID NO: 354277 - RNA, 19 nt, Human
acaaaagcuccuguaagcc

SEQ ID NO: 354278 - RNA, 22 nt, Human
acacaaaagcuccuguaagccc

SEQ ID NO: 354279 - RNA, 22 nt, Human
acaccccuccccaccaagagau

SEQ ID NO: 354280 - RNA, 28 nt, Human
agagauuggggggugaagagcugggcac

SEQ ID NO: 354281 - RNA, 22 nt, Human
agaggccaaggucuuggagaca

SEQ ID NO: 354282 - RNA, 21 nt, Human
agcaauccucccgccuuggcc

SEQ ID NO: 354283 - RNA, 18 nt, Human
aggaagcagaaaucugcu

SEQ ID NO: 354284 - RNA, 24 nt, Human
aggagaggccaaggucuuggagac

SEQ ID NO: 354285 - RNA, 27 nt, Human
caagcaauccucccgccuuggccuccc

SEQ ID NO: 354286 - RNA, 27 nt, Human
caagcaauccucccgccuuggccuccc

SEQ ID NO: 354287 - RNA, 20 nt, Human
cacaaagaaacacuaggagc

SEQ ID NO: 354288 - RNA, 24 nt, Human
cacacaaaagcuccuguaagcccc

SEQ ID NO: 354289 - RNA, 19 nt, Human
cacagaccacaaagaaaca

SEQ ID NO: 354290 - RNA, 27 nt, Human
cacagaccacaaagaaacacuaggagc

SEQ ID NO: 354291 - RNA, 19 nt, Human
caccaaugcggcugugagu

SEQ ID NO: 354292 - RNA, 19 nt, Human
caccccccccucacguguc

SEQ ID NO: 354293 - RNA, 23 nt, Human
caccccccccucacguguccacu

SEQ ID NO: 354294 - RNA, 20 nt, Human
cacuccguccuuuugauccc

SEQ ID NO: 354295 - RNA, 23 nt, Human
cacucugccaccugcagcacccc

SEQ ID NO: 354296 - RNA, 24 nt, Human
cagaaagagucauuaacacuaaaa

SEQ ID NO: 354297 - RNA, 19 nt, Human
cagcagccggaaaugacac

SEQ ID NO: 354298 - RNA, 19 nt, Human
cagugccacaguggacucu

SEQ ID NO: 354299 - RNA, 22 nt, Human
caucugagucucugucccccca

SEQ ID NO: 354300 - RNA, 22 nt, Human
ccacugcucacacacagcagcc

SEQ ID NO: 354301 - RNA, 24 nt, Human
ccaggccaggagaguugggccaca

SEQ ID NO: 354302 - RNA, 24 nt, Human
ccaggcuggucuugaacuccuggg

SEQ ID NO: 354303 - RNA, 19 nt, Human
cccaugcacacuguuucug

SEQ ID NO: 354304 - RNA, 25 nt, Human
ccccacuccguccuuuugauccccu

SEQ ID NO: 354305 - RNA, 22 nt, Human
ccuacacuccaaaauaacccau

SEQ ID NO: 354306 - RNA, 26 nt, Human
ccucccgccuuggccucccaaagugc

SEQ ID NO: 354307 - RNA, 26 nt, Human
ccugcaaagggccucagugggaaccc

SEQ ID NO: 354308 - RNA, 21 nt, Human
ccugcagcaccccuguacugg

SEQ ID NO: 354309 - RNA, 20 nt, Human
cggcggcugcugagcugcag

SEQ ID NO: 354310 - RNA, 24 nt, Human
cucaagcaauccucccgccuuggc

SEQ ID NO: 354311 - RNA, 21 nt, Human
cuccaaaauaacccaugcaca

SEQ ID NO: 354312 - RNA, 22 nt, Human
cuccuccgcgguggcaggcagu

SEQ ID NO: 354313 - RNA, 25 nt, Human
cuccugggcucaagcaauccucccg

SEQ ID NO: 354314 - RNA, 23 nt, Human
cugacauuucuuccucuauuccu

SEQ ID NO: 354315 - RNA, 18 nt, Human
cuggccuuuggccuguca

SEQ ID NO: 354316 - RNA, 19 nt, Human
cuggucuugaacuccuggg

SEQ ID NO: 354317 - RNA, 23 nt, Human
cuucaaacuucucucccaggguc

SEQ ID NO: 354318 - RNA, 18 nt, Human
gaggaugaaauuguaugg

SEQ ID NO: 354319 - RNA, 23 nt, Human
gagucucuguccccccacuccgu

SEQ ID NO: 354320 - RNA, 19 nt, Human
gcagacccgagugggcaga

SEQ ID NO: 354321 - RNA, 20 nt, Human
gcgcggggggcgcggggggc

SEQ ID NO: 354322 - RNA, 20 nt, Human
ggccaggagaguugggccac

SEQ ID NO: 354323 - RNA, 18 nt, Human
ggcuggucuugaacuccu

SEQ ID NO: 354324 - RNA, 22 nt, Human
gggcgcggggggcgcggggggc

SEQ ID NO: 354325 - RNA, 21 nt, Human
gggggcgcgagggucucaggc

SEQ ID NO: 354326 - RNA, 24 nt, Human
gggggucuugguauguugcccagg

SEQ ID NO: 354327 - RNA, 24 nt, Human
ggggugugugccagucaaguggcu

SEQ ID NO: 354328 - RNA, 24 nt, Human
gggucucaggcggccacaaggugg

SEQ ID NO: 354329 - RNA, 22 nt, Human
gggucuugguauguugcccagg

SEQ ID NO: 354330 - RNA, 24 nt, Human
gguauguugcccaggcuggucuug

SEQ ID NO: 354331 - RNA, 18 nt, Human
uaaacaagucaccuacac

SEQ ID NO: 354332 - RNA, 25 nt, Human
uaaacaagucaccuacacuccaaaa

SEQ ID NO: 354333 - RNA, 19 nt, Human
uacaccccuccccaccaag

SEQ ID NO: 354334 - RNA, 23 nt, Human
uagguacaccccuccccaccaag

SEQ ID NO: 354335 - RNA, 21 nt, Human
uagguuuucagaaauauuauc

SEQ ID NO: 354336 - RNA, 21 nt, Human
uaugauaaauauuuagguaca

SEQ ID NO: 354337 - RNA, 23 nt, Human
uauguugcccaggcuggucuuga

SEQ ID NO: 354338 - RNA, 24 nt, Human
uauguugcccaggcuggucuugaa

SEQ ID NO: 354339 - RNA, 25 nt, Human
ucacccaccccccccucacgugucc

SEQ ID NO: 354340 - RNA, 23 nt, Human
ucacgcuggauguccggaggggu

SEQ ID NO: 354341 - RNA, 20 nt, Human
uccaaggagaggccaagguc

SEQ ID NO: 354342 - RNA, 19 nt, Human
uccggaggggugugugcca

SEQ ID NO: 354343 - RNA, 18 nt, Human
uccugggcucaagcaauc

SEQ ID NO: 354344 - RNA, 21 nt, Human
uccugggcucaagcaauccuc

SEQ ID NO: 354345 - RNA, 22 nt, Human
uccugggcucaagcaauccucc

SEQ ID NO: 354346 - RNA, 21 nt, Human
uccuuaguaguucucuuucuc

SEQ ID NO: 354347 - RNA, 22 nt, Human
uccuuuugauccccugaaggag

SEQ ID NO: 354348 - RNA, 24 nt, Human
ucucacccaccccccccucacgug

SEQ ID NO: 354349 - RNA, 24 nt, Human
ucucccagggucucagguggagac

SEQ ID NO: 354350 - RNA, 18 nt, Human
ucucuguccccccacucc

SEQ ID NO: 354351 - RNA, 24 nt, Human
ucugagucucuguccccccacucc

SEQ ID NO: 354352 - RNA, 23 nt, Human
ucuugaacuccugggcucaagca

SEQ ID NO: 354353 - RNA, 23 nt, Human
ucuugguauguugcccaggcugg

SEQ ID NO: 354354 - RNA, 24 nt, Human
ucuugguauguugcccaggcuggu

SEQ ID NO: 354355 - RNA, 24 nt, Human
ugaacuccugggcucaagcaaucc

SEQ ID NO: 354356 - RNA, 25 nt, Human
ugaacuccugggcucaagcaauccu

SEQ ID NO: 354357 - RNA, 23 nt, Human
ugacacagaccacaaagaaacac

SEQ ID NO: 354358 - RNA, 23 nt, Human
ugagucucuguccccccacuccg

SEQ ID NO: 354359 - RNA, 24 nt, Human
ugcaaagggccucagugggaacca

SEQ ID NO: 354360 - RNA, 24 nt, Human
ugcccaggcuggucuugaacuccu

SEQ ID NO: 354361 - RNA, 28 nt, Human
ugcccaggcuggucuugaacuccugggc

SEQ ID NO: 354362 - RNA, 18 nt, Human
ugcucuggcggcggcugc

SEQ ID NO: 354363 - RNA, 19 nt, Human
ugcucuggcggcggcugcu

SEQ ID NO: 354364 - RNA, 20 nt, Human
ugcuucaaacuucucuccca

SEQ ID NO: 354365 - RNA, 25 nt, Human
uggacuuccugagauacggugacac

SEQ ID NO: 354366 - RNA, 20 nt, Human
uggagaccuuaagggaguug

SEQ ID NO: 354367 - RNA, 22 nt, Human
ugggaaccaggucugcagaccc

SEQ ID NO: 354368 - RNA, 24 nt, Human
ugggcucaagcaauccucccgccu

SEQ ID NO: 354369 - RNA, 18 nt, Human
uggggggugaagagcugg

SEQ ID NO: 354370 - RNA, 24 nt, Human
ugguauguugcccaggcuggucuu

SEQ ID NO: 354371 - RNA, 20 nt, Human
ugucucucucacccaccccc

SEQ ID NO: 354372 - RNA, 24 nt, Human
ugucucucucacccaccccccccu

SEQ ID NO: 354373 - RNA, 19 nt, Human
uucuguccugguaggucau

SEQ ID NO: 354374 - RNA, 20 nt, Human
uugaauccgagcugccuguc

SEQ ID NO: 354375 - RNA, 26 nt, Human
uuggaaaccacucuguccucaucuga

SEQ ID NO: 354376 - RNA, 23 nt, Human
uuucuaccaggcacacaaaagcu

SEQ ID NO: 354377 - RNA, 22 nt, Human
aaacaacaacaacaacaacaac

SEQ ID NO: 354378 - RNA, 19 nt, Human
aacaacaaaaacacaaaga

SEQ ID NO: 354379 - RNA, 20 nt, Human
aacaacaaaaacacaaagag

SEQ ID NO: 354380 - RNA, 25 nt, Human
aacaacaacaacaaaaacacaaaga

SEQ ID NO: 354381 - RNA, 25 nt, Human
aacagaaacacuugcaucgagucug

SEQ ID NO: 354382 - RNA, 24 nt, Human
aacuaguuuugaaaaagaagcgau

SEQ ID NO: 354383 - RNA, 24 nt, Human
aacuaugaaagaugcaggaaagga

SEQ ID NO: 354384 - RNA, 22 nt, Human
aagaggcuagagauuucaccgu

SEQ ID NO: 354385 - RNA, 19 nt, Human
aagcggcggcggcgaggag

SEQ ID NO: 354386 - RNA, 21 nt, Human
aagcggcggcggcgaggaggg

SEQ ID NO: 354387 - RNA, 21 nt, Human
aagcggcggcggcgaggaggg

SEQ ID NO: 354388 - RNA, 24 nt, Human
aauacaaaaaugcaaauccaagga

SEQ ID NO: 354389 - RNA, 24 nt, Human
acaaaacaaaacaaaaauuccuga

SEQ ID NO: 354390 - RNA, 21 nt, Human
acaacaaaaacacaaagaggc

SEQ ID NO: 354391 - RNA, 22 nt, Human
acaacaaaaacacaaagaggcu

SEQ ID NO: 354392 - RNA, 19 nt, Human
acaacaacaaaaacacaaa

SEQ ID NO: 354393 - RNA, 21 nt, Human
acaacaacaaaaacacaaaga

SEQ ID NO: 354394 - RNA, 19 nt, Human
acaacaacaacaacaacaa

SEQ ID NO: 354395 - RNA, 27 nt, Human
acaacaacaacaacaacaaaaacacaa

SEQ ID NO: 354396 - RNA, 22 nt, Human
acaacaacaacaacaacaacaa

SEQ ID NO: 354397 - RNA, 21 nt, Human
acacugcacaacagcaaccuu

SEQ ID NO: 354398 - RNA, 21 nt, Human
acaggcacacugcacaacagc

SEQ ID NO: 354399 - RNA, 21 nt, Human
accauaaaacauuuuuuuuuc

SEQ ID NO: 354400 - RNA, 19 nt, Human
acuaugaaagaugcaggaa

SEQ ID NO: 354401 - RNA, 24 nt, Human
acuaugaaagaugcaggaaaggag

SEQ ID NO: 354402 - RNA, 22 nt, Human
agcaaccuugucuagcaagaca

SEQ ID NO: 354403 - RNA, 18 nt, Human
aggagggucacagccgga

SEQ ID NO: 354404 - RNA, 22 nt, Human
aggcacacugcacaacagcaac

SEQ ID NO: 354405 - RNA, 19 nt, Human
agggggaugggggaaaagg

SEQ ID NO: 354406 - RNA, 22 nt, Human
agggggcggccgcggagggcgg

SEQ ID NO: 354407 - RNA, 24 nt, Human
aguagugacaggcacacugcacaa

SEQ ID NO: 354408 - RNA, 19 nt, Human
auaaaacaacaacaacaac

SEQ ID NO: 354409 - RNA, 26 nt, Human
auaaaacaacaacaacaacaacaaca

SEQ ID NO: 354410 - RNA, 21 nt, Human
caaaacaaaaauuccugaacc

SEQ ID NO: 354411 - RNA, 23 nt, Human
caaaauacaaaaaugcaaaucca

SEQ ID NO: 354412 - RNA, 24 nt, Human
caacaaaaacacaaagaggcuaga

SEQ ID NO: 354413 - RNA, 28 nt, Human
caacaacaacaacaacaaaaacacaaag

SEQ ID NO: 354414 - RNA, 22 nt, Human
caagcggcggcggcgaggaggg

SEQ ID NO: 354415 - RNA, 18 nt, Human
caaggaguacagaccagu

SEQ ID NO: 354416 - RNA, 21 nt, Human
cagaacagaaacacuugcauc

SEQ ID NO: 354417 - RNA, 18 nt, Human
cagcccgggcagccccac

SEQ ID NO: 354418 - RNA, 21 nt, Human
cagcgguggcgccugcagacg

SEQ ID NO: 354419 - RNA, 18 nt, Human
caguacaguguuccagcc

SEQ ID NO: 354420 - RNA, 22 nt, Human
cauauagacaaaacaaaacaaa

SEQ ID NO: 354421 - RNA, 25 nt, Human
ccaguagugacaggcacacugcaca

SEQ ID NO: 354422 - RNA, 18 nt, Human
ccgcaaccggagcgggag

SEQ ID NO: 354423 - RNA, 24 nt, Human
ccguuucuaccaccaaaauaacgc

SEQ ID NO: 354424 - RNA, 23 nt, Human
ccucccagaacagaaacacuugc

SEQ ID NO: 354425 - RNA, 19 nt, Human
ccugaacuggacaaacagc

SEQ ID NO: 354426 - RNA, 20 nt, Human
ccuuucuauucauuccucag

SEQ ID NO: 354427 - RNA, 22 nt, Human
cgcuugcuaucaagacuuugga

SEQ ID NO: 354428 - RNA, 23 nt, Human
cucaguacaguguuccagccauc

SEQ ID NO: 354429 - RNA, 22 nt, Human
cuucugaaaagccgcacauaua

SEQ ID NO: 354430 - RNA, 22 nt, Human
gaaaaagaagcgauguacaaaa

SEQ ID NO: 354431 - RNA, 21 nt, Human
gagucuguuccuaagaacuag

SEQ ID NO: 354432 - RNA, 23 nt, Human
gcaaauccaaggaguacagacca

SEQ ID NO: 354433 - RNA, 22 nt, Human
gccgcgcagcccgggcagcccc

SEQ ID NO: 354434 - RNA, 24 nt, Human
ggaaaggagucuuucuucguagca

SEQ ID NO: 354435 - RNA, 18 nt, Human
ggagcgggagccuggucu

SEQ ID NO: 354436 - RNA, 23 nt, Human
ggcggugcggccgcaaccggagc

SEQ ID NO: 354437 - RNA, 20 nt, Human
guagugacaggcacacugcc

SEQ ID NO: 354438 - RNA, 24 nt, Human
uaaaaaguaaaagcuaccauaaaa

SEQ ID NO: 354439 - RNA, 28 nt, Human
uaaaacaacaacaacaacaacaacaaaa

SEQ ID NO: 354440 - RNA, 27 nt, Human
uaacagaacuaugaaagaugcaggaaa

SEQ ID NO: 354441 - RNA, 23 nt, Human
uaaccuagguaacaguucaguag

SEQ ID NO: 354442 - RNA, 19 nt, Human
uacagaccaguagugacag

SEQ ID NO: 354443 - RNA, 19 nt, Human
uaccucccagaacagaaac

SEQ ID NO: 354444 - RNA, 22 nt, Human
uauauaaaacaacaacaacaac

SEQ ID NO: 354445 - RNA, 21 nt, Human
uccccagggggcggccgcgga

SEQ ID NO: 354446 - RNA, 26 nt, Human
ucuucguagcaaaguagucguugcuu

SEQ ID NO: 354447 - RNA, 19 nt, Human
ugaacuggacaaacagcaa

SEQ ID NO: 354448 - RNA, 19 nt, Human
ugaauacaugcauuauaua

SEQ ID NO: 354449 - RNA, 25 nt, Human
ugaauacaugcauuauauaaaacaa

SEQ ID NO: 354450 - RNA, 24 nt, Human
uggaagccuuucuauucauuccuc

SEQ ID NO: 354451 - RNA, 25 nt, Human
uguacaaaauacaaaaaugcaaauc

SEQ ID NO: 354452 - RNA, 19 nt, Human
ugucuagcaagacaggagu

SEQ ID NO: 354453 - RNA, 21 nt, Human
uguuccagccauccugcuugu

SEQ ID NO: 354454 - RNA, 24 nt, Human
uguuuuuucccuccaauaccuccc

SEQ ID NO: 354455 - RNA, 25 nt, Human
uguuuuuucccuccaauaccuccca

SEQ ID NO: 354456 - RNA, 24 nt, Human
uucauaaaaaguaaaagcuaccau

SEQ ID NO: 354457 - RNA, 18 nt, Human
uuccugaacuggacaaac

SEQ ID NO: 354458 - RNA, 20 nt, Human
uucguagcaaaguagucguu

SEQ ID NO: 354459 - RNA, 26 nt, Human
uuuuuuaaauuuuauuuuagugaaua

SEQ ID NO: 354460 - RNA, 24 nt, Human
cacccgguacaggucauagccgaa

SEQ ID NO: 354461 - RNA, 27 nt, Human
ucuaggguauuggaauauuaaacuggg

SEQ ID NO: 354462 - RNA, 25 nt, Human
ucugcugucccucggguuuucuucu

SEQ ID NO: 354463 - RNA, 23 nt, Human
uguggaaucugcugucccucggg

SEQ ID NO: 354464 - RNA, 21 nt, Human
aaagcagguuggaaagaguca

SEQ ID NO: 354465 - RNA, 20 nt, Human
agacaggagaggaaggaagg

SEQ ID NO: 354466 - RNA, 21 nt, Human
aggaagggaaaugcuggcagu

SEQ ID NO: 354467 - RNA, 20 nt, Human
aggagccgugggaagucugg

SEQ ID NO: 354468 - RNA, 21 nt, Human
aggagggagacaggagaggaa

SEQ ID NO: 354469 - RNA, 21 nt, Human
aggcacaggggguaggaugga

SEQ ID NO: 354470 - RNA, 21 nt, Human
auggaggcugauggacucucg

SEQ ID NO: 354471 - RNA, 22 nt, Human
cacuacaaaaaccuuacaaaag

SEQ ID NO: 354472 - RNA, 21 nt, Human
cagccgcgcccccccccaccc

SEQ ID NO: 354473 - RNA, 22 nt, Human
cagccgcgcccccccccacccu

SEQ ID NO: 354474 - RNA, 25 nt, Human
cagccgcgcccccccccacccuaaa

SEQ ID NO: 354475 - RNA, 19 nt, Human
ccaccagggcccgucucuc

SEQ ID NO: 354476 - RNA, 19 nt, Human
ccagcugacguggggagca

SEQ ID NO: 354477 - RNA, 21 nt, Human
cccacccuaaacuccccaaga

SEQ ID NO: 354478 - RNA, 18 nt, Human
cccagccgcgcccccccc

SEQ ID NO: 354479 - RNA, 20 nt, Human
ccccacccuaaacuccccaa

SEQ ID NO: 354480 - RNA, 18 nt, Human
ccccccacccuaaacucc

SEQ ID NO: 354481 - RNA, 19 nt, Human
ccccccacccuaaacuccc

SEQ ID NO: 354482 - RNA, 24 nt, Human
ccccccacccuaaacuccccaaga

SEQ ID NO: 354483 - RNA, 24 nt, Human
ccccccccacccuaaacuccccaa

SEQ ID NO: 354484 - RNA, 21 nt, Human
cccccccccacccuaaacucc

SEQ ID NO: 354485 - RNA, 19 nt, Human
ccccugccccagugccaca

SEQ ID NO: 354486 - RNA, 19 nt, Human
ccggccccugccccagugc

SEQ ID NO: 354487 - RNA, 22 nt, Human
ccuagccuaggugucccgggac

SEQ ID NO: 354488 - RNA, 21 nt, Human
cgcggggcugaggacaacgcu

SEQ ID NO: 354489 - RNA, 19 nt, Human
cgcuucgccucccgagcca

SEQ ID NO: 354490 - RNA, 18 nt, Human
cgggcagaggagggagac

SEQ ID NO: 354491 - RNA, 18 nt, Human
cucccagccgcgcccccc

SEQ ID NO: 354492 - RNA, 20 nt, Human
cuccccgaugccugcccucc

SEQ ID NO: 354493 - RNA, 24 nt, Human
gaauuccuuuuuuuuuuuuuuuuu

SEQ ID NO: 354494 - RNA, 20 nt, Human
gagaggcugguccaggcagg

SEQ ID NO: 354495 - RNA, 20 nt, Human
gaggacaacgcuucgccucc

SEQ ID NO: 354496 - RNA, 24 nt, Human
gcagaacuagaagcaccucccucc

SEQ ID NO: 354497 - RNA, 18 nt, Human
gcagaggagggagacagg

SEQ ID NO: 354498 - RNA, 21 nt, Human
gccacaaagcagguuggaaag

SEQ ID NO: 354499 - RNA, 24 nt, Human
gcccuccucccagccgcgcccccc

SEQ ID NO: 354500 - RNA, 25 nt, Human
ggaaaugcuggcaguguugggaucu

SEQ ID NO: 354501 - RNA, 18 nt, Human
ggacaaguccaaaggcaa

SEQ ID NO: 354502 - RNA, 18 nt, Human
ggagacaggagaggaagg

SEQ ID NO: 354503 - RNA, 18 nt, Human
gggagacaggagaggaag

SEQ ID NO: 354504 - RNA, 19 nt, Human
gggcugaggacaacgcuuc

SEQ ID NO: 354505 - RNA, 20 nt, Human
gguguugggaaagaauggcc

SEQ ID NO: 354506 - RNA, 22 nt, Human
ucccagccgcgcccccccccac

SEQ ID NO: 354507 - RNA, 22 nt, Human
ucccgagccaccaccagggccc

SEQ ID NO: 354508 - RNA, 25 nt, Human
ucccgggcagaggagggagacagga

SEQ ID NO: 354509 - RNA, 19 nt, Human
ucccuuuuucucugguaaa

SEQ ID NO: 354510 - RNA, 18 nt, Human
uccuuuuuuuuuuuuuuu

SEQ ID NO: 354511 - RNA, 18 nt, Human
uccuuuuuuuuuuuuuuu

SEQ ID NO: 354512 - RNA, 21 nt, Human
ucucagacugcccccggcccc

SEQ ID NO: 354513 - RNA, 20 nt, Human
ucucccccucccuuuuucuc

SEQ ID NO: 354514 - RNA, 24 nt, Human
ucucugguaaacaaaagucggggu

SEQ ID NO: 354515 - RNA, 22 nt, Human
ucugagccuguuuggaagaaag

SEQ ID NO: 354516 - RNA, 24 nt, Human
ugacguggggagcagcuaaccugu

SEQ ID NO: 354517 - RNA, 22 nt, Human
ugaguggagaggcugguccagg

SEQ ID NO: 354518 - RNA, 19 nt, Human
ugccccagugccacaaagc

SEQ ID NO: 354519 - RNA, 24 nt, Human
ugccugcccuccucccagccgcgc

SEQ ID NO: 354520 - RNA, 20 nt, Human
uggaaagagucacaugagug

SEQ ID NO: 354521 - RNA, 24 nt, Human
uggaaagagucacaugaguggaga

SEQ ID NO: 354522 - RNA, 22 nt, Human
uggacucucggcagguuaggcc

SEQ ID NO: 354523 - RNA, 18 nt, Human
uggaugccacagccacgg

SEQ ID NO: 354524 - RNA, 21 nt, Human
uggcagaacuagaagcaccuc

SEQ ID NO: 354525 - RNA, 22 nt, Human
ugggaaagaauggccucucuca

SEQ ID NO: 354526 - RNA, 19 nt, Human
uuuuuuuuuuuuuugccca

SEQ ID NO: 354527 - RNA, 21 nt, Human
uuuuuuuuuuuuuuuugccca

SEQ ID NO: 354528 - RNA, 18 nt, Human
uuuuuuuuuuuuuuuuug

SEQ ID NO: 354529 - RNA, 21 nt, Human
uuuuuuuuuuuuuuuuugccc

SEQ ID NO: 354530 - RNA, 24 nt, Human
aaaaaaauguacaaauaaguucuu

SEQ ID NO: 354531 - RNA, 26 nt, Human
aaaaaaggaagaaacaaaacaaaaag

SEQ ID NO: 354532 - RNA, 20 nt, Human
aaaggaagaaacaaaacaaa

SEQ ID NO: 354533 - RNA, 20 nt, Human
aacaaaaaguucauccccac

SEQ ID NO: 354534 - RNA, 21 nt, Human
aacuaaaaaaggaagaaacaa

SEQ ID NO: 354535 - RNA, 19 nt, Human
aagccccuccugggagcuc

SEQ ID NO: 354536 - RNA, 22 nt, Human
acaaaacaaaaaguucaucccc

SEQ ID NO: 354537 - RNA, 22 nt, Human
accacggugggccugggucggg

SEQ ID NO: 354538 - RNA, 20 nt, Human
accccauggaguauccaagg

SEQ ID NO: 354539 - RNA, 22 nt, Human
accucaccucccccccaacccc

SEQ ID NO: 354540 - RNA, 24 nt, Human
accucaccucccccccaaccccaa

SEQ ID NO: 354541 - RNA, 24 nt, Human
accucccccccaaccccaauagca

SEQ ID NO: 354542 - RNA, 18 nt, Human
acuuucagggcaggcaga

SEQ ID NO: 354543 - RNA, 24 nt, Human
agagcuggggaggcagcugaggug

SEQ ID NO: 354544 - RNA, 18 nt, Human
aggaagaaacaaaacaaa

SEQ ID NO: 354545 - RNA, 21 nt, Human
aggcagaaugacuauggccca

SEQ ID NO: 354546 - RNA, 19 nt, Human
aggcaggcuugaucuggga

SEQ ID NO: 354547 - RNA, 22 nt, Human
augguaucuggggcccaugucc

SEQ ID NO: 354548 - RNA, 22 nt, Human
auguucccccuucccucccuau

SEQ ID NO: 354549 - RNA, 22 nt, Human
caauccgccucacugcggccag

SEQ ID NO: 354550 - RNA, 21 nt, Human
cacccccaccccauggaguau

SEQ ID NO: 354551 - RNA, 23 nt, Human
cagaagccccuccugggagcucc

SEQ ID NO: 354552 - RNA, 19 nt, Human
cccccaaccccaauagcac

SEQ ID NO: 354553 - RNA, 21 nt, Human
cccccaaccccaauagcaccc

SEQ ID NO: 354554 - RNA, 23 nt, Human
ccccccaaccccaauagcaccca

SEQ ID NO: 354555 - RNA, 21 nt, Human
cccccccaaccccaauagcac

SEQ ID NO: 354556 - RNA, 22 nt, Human
cccccccaaccccaauagcacc

SEQ ID NO: 354557 - RNA, 23 nt, Human
cccccccaaccccaauagcaccc

SEQ ID NO: 354558 - RNA, 20 nt, Human
ccccuucccucccuaucuuu

SEQ ID NO: 354559 - RNA, 22 nt, Human
ccucccccccaaccccaauagc

SEQ ID NO: 354560 - RNA, 20 nt, Human
cggucugcuuuuccaccccc

SEQ ID NO: 354561 - RNA, 22 nt, Human
cucaggagccuuuggaugccuc

SEQ ID NO: 354562 - RNA, 25 nt, Human
cugcccagaagccccuccugggagc

SEQ ID NO: 354563 - RNA, 22 nt, Human
cugguaccucaccuccccccca

SEQ ID NO: 354564 - RNA, 21 nt, Human
cuugaccagagucugcccaga

SEQ ID NO: 354565 - RNA, 21 nt, Human
cuuugaagaacuaaaaaagga

SEQ ID NO: 354566 - RNA, 19 nt, Human
gaagccccuccugggagcu

SEQ ID NO: 354567 - RNA, 18 nt, Human
gcagaaugacuauggccc

SEQ ID NO: 354568 - RNA, 19 nt, Human
ggagagguugggauagagc

SEQ ID NO: 354569 - RNA, 22 nt, Human
ggagcuccuucucaauccgccu

SEQ ID NO: 354570 - RNA, 20 nt, Human
ggcugguaccucaccucccc

SEQ ID NO: 354571 - RNA, 23 nt, Human
gggaggcagcugagguguuuuag

SEQ ID NO: 354572 - RNA, 21 nt, Human
ggggcccauguccaaguggag

SEQ ID NO: 354573 - RNA, 24 nt, Human
ggucccacaggauguggaguuucc

SEQ ID NO: 354574 - RNA, 18 nt, Human
gguugggauagagcuggg

SEQ ID NO: 354575 - RNA, 23 nt, Human
gucucaggagccuuuggaugccu

SEQ ID NO: 354576 - RNA, 19 nt, Human
uaaaaaaggaagaaacaaa

SEQ ID NO: 354577 - RNA, 23 nt, Human
uaaguucuuggauugauagcaac

SEQ ID NO: 354578 - RNA, 19 nt, Human
uaccucaccucccccccaa

SEQ ID NO: 354579 - RNA, 22 nt, Human
uaccucaccucccccccaaccc

SEQ ID NO: 354580 - RNA, 23 nt, Human
uagagcuggggaggcagcugagg

SEQ ID NO: 354581 - RNA, 22 nt, Human
ucaauccgccucacugcggcca

SEQ ID NO: 354582 - RNA, 23 nt, Human
ucaggagccuuuggaugccuccu

SEQ ID NO: 354583 - RNA, 20 nt, Human
uccacccccaccccauggag

SEQ ID NO: 354584 - RNA, 26 nt, Human
uccacccccaccccauggaguaucca

SEQ ID NO: 354585 - RNA, 23 nt, Human
ucccacaggauguggaguuuccg

SEQ ID NO: 354586 - RNA, 24 nt, Human
ucuuggauugauagcaacaaaggc

SEQ ID NO: 354587 - RNA, 23 nt, Human
ugaccagagucugcccagaagcc

SEQ ID NO: 354588 - RNA, 22 nt, Human
ugaggcaggcuugaucugggac

SEQ ID NO: 354589 - RNA, 19 nt, Human
ugccauccugugugcaccc

SEQ ID NO: 354590 - RNA, 26 nt, Human
ugcggccaggucauucugggggugcc

SEQ ID NO: 354591 - RNA, 20 nt, Human
ugggaagguccgcucaggca

SEQ ID NO: 354592 - RNA, 18 nt, Human
ugggagagguugggauag

SEQ ID NO: 354593 - RNA, 21 nt, Human
ugggauagagcuggggaggca

SEQ ID NO: 354594 - RNA, 22 nt, Human
ugggauagagcuggggaggcag

SEQ ID NO: 354595 - RNA, 25 nt, Human
ugggauagagcuggggaggcagcug

SEQ ID NO: 354596 - RNA, 22 nt, Human
ugggucgggcugggcuagcgcc

SEQ ID NO: 354597 - RNA, 25 nt, Human
aaauauauaccaguugcaaacauaa

SEQ ID NO: 354598 - RNA, 24 nt, Human
aagccucccacacaccugcaaccc

SEQ ID NO: 354599 - RNA, 23 nt, Human
acagcacacaaacacaaugacau

SEQ ID NO: 354600 - RNA, 20 nt, Human
agauauacuguaaaacacaa

SEQ ID NO: 354601 - RNA, 22 nt, Human
caaacacaaugacauaacagga

SEQ ID NO: 354602 - RNA, 22 nt, Human
ccugcaaccccugacgggaugc

SEQ ID NO: 354603 - RNA, 24 nt, Human
uaacaggaccauuagcuuaauacu

SEQ ID NO: 354604 - RNA, 18 nt, Human
uaagauauacuguaaaac

SEQ ID NO: 354605 - RNA, 19 nt, Human
uaccaguugcaaacauaau

SEQ ID NO: 354606 - RNA, 25 nt, Human
aaaaaaaaaaaaaaaagacugcaag

SEQ ID NO: 354607 - RNA, 19 nt, Human
aaaaaaaggaagguuggaa

SEQ ID NO: 354608 - RNA, 26 nt, Human
aaaaagaaacccaaaaauaaacagga

SEQ ID NO: 354609 - RNA, 21 nt, Human
aaaaaugaacuucgaacagaa

SEQ ID NO: 354610 - RNA, 23 nt, Human
aaaaaugaacuucgaacagaaag

SEQ ID NO: 354611 - RNA, 20 nt, Human
aaacaagagaaaguagacag

SEQ ID NO: 354612 - RNA, 20 nt, Human
aaacuuggaaggucauagua

SEQ ID NO: 354613 - RNA, 19 nt, Human
aacaucucaaaccccaccc

SEQ ID NO: 354614 - RNA, 21 nt, Human
aacaucucaaaccccaccccu

SEQ ID NO: 354615 - RNA, 21 nt, Human
aaccauggaguagagaaaaga

SEQ ID NO: 354616 - RNA, 22 nt, Human
aacccaaaaauaaacaggaaca

SEQ ID NO: 354617 - RNA, 26 nt, Human
aaccccaccccuuugcugaccuucua

SEQ ID NO: 354618 - RNA, 18 nt, Human
aagagaaaguagacagau

SEQ ID NO: 354619 - RNA, 19 nt, Human
aaucccauuacucaaucca

SEQ ID NO: 354620 - RNA, 24 nt, Human
acaauagagaaugucaauuccaaa

SEQ ID NO: 354621 - RNA, 22 nt, Human
acagagaaaggaggaaaaaagc

SEQ ID NO: 354622 - RNA, 20 nt, Human
acagguucugcugauucucc

SEQ ID NO: 354623 - RNA, 23 nt, Human
acaugccaaaggagaagccaugu

SEQ ID NO: 354624 - RNA, 20 nt, Human
accagaaagcagggacaguu

SEQ ID NO: 354625 - RNA, 24 nt, Human
accagaaagcagggacaguuacug

SEQ ID NO: 354626 - RNA, 22 nt, Human
acccaaacaucucaaaccccac

SEQ ID NO: 354627 - RNA, 20 nt, Human
accugugcagaaauuacaua

SEQ ID NO: 354628 - RNA, 22 nt, Human
agaaaauuuaaaaaaaggaagg

SEQ ID NO: 354629 - RNA, 22 nt, Human
agacaggaagggauaaaaauga

SEQ ID NO: 354630 - RNA, 23 nt, Human
agacaggaagggauaaaagggac

SEQ ID NO: 354631 - RNA, 22 nt, Human
agagagccaaugaagacaugcc

SEQ ID NO: 354632 - RNA, 25 nt, Human
agagagccaaugaagacaugccagc

SEQ ID NO: 354633 - RNA, 20 nt, Human
agaguauugagcuaucuggu

SEQ ID NO: 354634 - RNA, 25 nt, Human
agcaccaggucuguuggaugguggu

SEQ ID NO: 354635 - RNA, 21 nt, Human
aggagagaauuuauuuuaaaa

SEQ ID NO: 354636 - RNA, 18 nt, Human
aggaggaaaaaagcuaga

SEQ ID NO: 354637 - RNA, 18 nt, Human
agggugacaaaguuugac

SEQ ID NO: 354638 - RNA, 18 nt, Human
auauacagagaaaggagg

SEQ ID NO: 354639 - RNA, 24 nt, Human
aucaaguuuuauacaucaaaaagc

SEQ ID NO: 354640 - RNA, 21 nt, Human
caaaccccaccccuuugcuga

SEQ ID NO: 354641 - RNA, 20 nt, Human
caagaacagggcgacugagc

SEQ ID NO: 354642 - RNA, 23 nt, Human
cacuuggagauaaaaaucaaggg

SEQ ID NO: 354643 - RNA, 24 nt, Human
cagagaaaggaggaaaaaagcuag

SEQ ID NO: 354644 - RNA, 23 nt, Human
cagagcugaguccauuaucccac

SEQ ID NO: 354645 - RNA, 23 nt, Human
caggaacaaaauuacaauagaga

SEQ ID NO: 354646 - RNA, 20 nt, Human
caggucuguuggaugguggu

SEQ ID NO: 354647 - RNA, 23 nt, Human
cagugauguuauacaagucaaac

SEQ ID NO: 354648 - RNA, 25 nt, Human
cauagcccugaggucauccugcaaa

SEQ ID NO: 354649 - RNA, 23 nt, Human
caucucaaaccccaccccuuugc

SEQ ID NO: 354650 - RNA, 24 nt, Human
cauuaucccacccagauucacaug

SEQ ID NO: 354651 - RNA, 19 nt, Human
ccaaaaauaaacaggaaca

SEQ ID NO: 354652 - RNA, 22 nt, Human
ccaaacaucucaaaccccaccc

SEQ ID NO: 354653 - RNA, 27 nt, Human
ccacccaaacaucucaaaccccacccc

SEQ ID NO: 354654 - RNA, 18 nt, Human
cccaaaaauaaacaggaa

SEQ ID NO: 354655 - RNA, 24 nt, Human
cccaaacaucucaaaccccacccc

SEQ ID NO: 354656 - RNA, 23 nt, Human
cccacccaaacaucucaaacccc

SEQ ID NO: 354657 - RNA, 25 nt, Human
cccacccaaacaucucaaaccccac

SEQ ID NO: 354658 - RNA, 18 nt, Human
cccacuaacccacccaaa

SEQ ID NO: 354659 - RNA, 20 nt, Human
cccagauucacauggucaca

SEQ ID NO: 354660 - RNA, 21 nt, Human
cccuccagcuuccagcagagc

SEQ ID NO: 354661 - RNA, 20 nt, Human
ccuuuauuggagcaagauuc

SEQ ID NO: 354662 - RNA, 23 nt, Human
cuagauagguuguuacacuuuug

SEQ ID NO: 354663 - RNA, 19 nt, Human
cuccagcuuccagcagagc

SEQ ID NO: 354664 - RNA, 22 nt, Human
cugagcacaagagggaaaaaaa

SEQ ID NO: 354665 - RNA, 22 nt, Human
cuuccagcagagcaaagggagc

SEQ ID NO: 354666 - RNA, 21 nt, Human
gaccugugcagaaauuacaua

SEQ ID NO: 354667 - RNA, 22 nt, Human
gagaguauugagcuaucuggua

SEQ ID NO: 354668 - RNA, 22 nt, Human
gagcagacagagcugaguccau

SEQ ID NO: 354669 - RNA, 21 nt, Human
ggcgacugagcacaagaggga

SEQ ID NO: 354670 - RNA, 24 nt, Human
gugaaacaaaaagaaacccaaaaa

SEQ ID NO: 354671 - RNA, 23 nt, Human
uaaacagagaccugugcagaaau

SEQ ID NO: 354672 - RNA, 21 nt, Human
uaaacaggaacaaaauuacaa

SEQ ID NO: 354673 - RNA, 20 nt, Human
uaaacaggaacaaaauuacu

SEQ ID NO: 354674 - RNA, 23 nt, Human
uaacaaagcaacuuguacacuuu

SEQ ID NO: 354675 - RNA, 22 nt, Human
uaacuuggcauuagagcaccag

SEQ ID NO: 354676 - RNA, 23 nt, Human
uacaauagagaaugucaauucca

SEQ ID NO: 354677 - RNA, 23 nt, Human
uacagagaaaggaggaaaaaagc

SEQ ID NO: 354678 - RNA, 18 nt, Human
uagcacccuccagcuucc

SEQ ID NO: 354679 - RNA, 20 nt, Human
ucaaaaugcccacuaaccca

SEQ ID NO: 354680 - RNA, 22 nt, Human
ucauaguaagcauaccuaugcu

SEQ ID NO: 354681 - RNA, 18 nt, Human
ucaucuuaaacugcaagg

SEQ ID NO: 354682 - RNA, 18 nt, Human
uccacauagcccugaggu

SEQ ID NO: 354683 - RNA, 24 nt, Human
uccauacaguuuuuguucagaaaa

SEQ ID NO: 354684 - RNA, 23 nt, Human
ucccagggacuggagaaaauuua

SEQ ID NO: 354685 - RNA, 19 nt, Human
ucucaaaccccaccccuuu

SEQ ID NO: 354686 - RNA, 21 nt, Human
ucucugagcccaauauacaga

SEQ ID NO: 354687 - RNA, 23 nt, Human
ugagcacaagagggaaaaaaaaa

SEQ ID NO: 354688 - RNA, 21 nt, Human
ugaguccauuaucccacccag

SEQ ID NO: 354689 - RNA, 21 nt, Human
ugauuccauacaguuuuuguu

SEQ ID NO: 354690 - RNA, 23 nt, Human
uggagaaaauuuaaaaaaaggaa

SEQ ID NO: 354691 - RNA, 23 nt, Human
uggcaaauugaacccacguuucc

SEQ ID NO: 354692 - RNA, 24 nt, Human
uggcaggcacaauuaauuuauauc

SEQ ID NO: 354693 - RNA, 20 nt, Human
uguuacacuuuugccuauug

SEQ ID NO: 354694 - RNA, 20 nt, Human
uguucagacaggaagggaua

SEQ ID NO: 354695 - RNA, 21 nt, Human
uuaaaaagcuuaugcauuagg

SEQ ID NO: 354696 - RNA, 22 nt, Human
uucaaaucccauuacucaaucc

SEQ ID NO: 354697 - RNA, 20 nt, Human
uuccugaucgguauacagug

SEQ ID NO: 354698 - RNA, 23 nt, Human
uuggcauuagagcaccaggucug

SEQ ID NO: 354699 - RNA, 24 nt, Human
aaaaaaccaaagccauucuauugc

SEQ ID NO: 354700 - RNA, 24 nt, Human
aaugaugauauagaaagaaccaga

SEQ ID NO: 354701 - RNA, 20 nt, Human
acagcccuuucaauuccuug

SEQ ID NO: 354702 - RNA, 20 nt, Human
accacugacuaaaaaugacu

SEQ ID NO: 354703 - RNA, 24 nt, Human
acuauggaaaaaccacugacuaaa

SEQ ID NO: 354704 - RNA, 18 nt, Human
agaaaaaaaccaaagcca

SEQ ID NO: 354705 - RNA, 18 nt, Human
aggagcagucggggcugg

SEQ ID NO: 354706 - RNA, 19 nt, Human
aggaggaggaggaagagga

SEQ ID NO: 354707 - RNA, 25 nt, Human
auagaaagaaccagagagaccuaca

SEQ ID NO: 354708 - RNA, 22 nt, Human
auuuagagaauaaagauguagu

SEQ ID NO: 354709 - RNA, 19 nt, Human
caauuugcacuggccauag

SEQ ID NO: 354710 - RNA, 19 nt, Human
cacaucuuaaagcaaagau

SEQ ID NO: 354711 - RNA, 21 nt, Human
cacugccucccccuacagccc

SEQ ID NO: 354712 - RNA, 20 nt, Human
cacugcuauugaugcaaaaa

SEQ ID NO: 354713 - RNA, 25 nt, Human
cagcccuuucaauuccuuggccuuc

SEQ ID NO: 354714 - RNA, 18 nt, Human
cagcucggggcugcgcgg

SEQ ID NO: 354715 - RNA, 20 nt, Human
cagcugcugcggcagcagcc

SEQ ID NO: 354716 - RNA, 21 nt, Human
cccuucgcccacuugccccuc

SEQ ID NO: 354717 - RNA, 25 nt, Human
ccggcggcugagcgagcucuggggc

SEQ ID NO: 354718 - RNA, 18 nt, Human
ccuaguuaguaugcgaga

SEQ ID NO: 354719 - RNA, 19 nt, Human
cgcacugccucccccuaca

SEQ ID NO: 354720 - RNA, 18 nt, Human
cgcggcugccucccgucc

SEQ ID NO: 354721 - RNA, 19 nt, Human
cgcggcugccucccguccc

SEQ ID NO: 354722 - RNA, 19 nt, Human
cuagcacuacugaaaauag

SEQ ID NO: 354723 - RNA, 19 nt, Human
cucaaggaggaaaaaauua

SEQ ID NO: 354724 - RNA, 24 nt, Human
cucggggcugcgcggcugccuccc

SEQ ID NO: 354725 - RNA, 21 nt, Human
cucuuccauaacuuaaugcaa

SEQ ID NO: 354726 - RNA, 20 nt, Human
cugaaccccaaagccaggcc

SEQ ID NO: 354727 - RNA, 24 nt, Human
cugacuaaaaaugacugaaaaacc

SEQ ID NO: 354728 - RNA, 21 nt, Human
gaaaaaaaccaaagccauucu

SEQ ID NO: 354729 - RNA, 20 nt, Human
gaggaagaggaggagcaguc

SEQ ID NO: 354730 - RNA, 25 nt, Human
gaggaagaggaggagcagucggggc

SEQ ID NO: 354731 - RNA, 22 nt, Human
gaugauauagaaagaaccagag

SEQ ID NO: 354732 - RNA, 19 nt, Human
gcaagugugcuaacacaau

SEQ ID NO: 354733 - RNA, 21 nt, Human
gcagcagccgucguccccccu

SEQ ID NO: 354734 - RNA, 22 nt, Human
gcgcggcugccucccgucccuc

SEQ ID NO: 354735 - RNA, 20 nt, Human
ggaggaagaggaggagcagu

SEQ ID NO: 354736 - RNA, 18 nt, Human
ggaggaggaagaggagga

SEQ ID NO: 354737 - RNA, 18 nt, Human
ggaggaggaggaagagga

SEQ ID NO: 354738 - RNA, 22 nt, Human
ggcagcagccgucguccccccu

SEQ ID NO: 354739 - RNA, 20 nt, Human
ggcugagcgagcucuggggc

SEQ ID NO: 354740 - RNA, 21 nt, Human
gugugccgccuuggccgcugc

SEQ ID NO: 354741 - RNA, 23 nt, Human
guugucccauugucagauaaacg

SEQ ID NO: 354742 - RNA, 18 nt, Human
uaagaaaaaaaccaaagc

SEQ ID NO: 354743 - RNA, 20 nt, Human
uaccgcuuagagauacuagu

SEQ ID NO: 354744 - RNA, 19 nt, Human
uaccucucaguaggacguu

SEQ ID NO: 354745 - RNA, 24 nt, Human
uacuaagaaaaaaaccaaagccau

SEQ ID NO: 354746 - RNA, 19 nt, Human
uagaaagaaccagagagac

SEQ ID NO: 354747 - RNA, 24 nt, Human
uauggaaaaaccacugacuaaaaa

SEQ ID NO: 354748 - RNA, 31 nt, Human
uauggaaaaaccacugacuaaaaaugacugg

SEQ ID NO: 354749 - RNA, 23 nt, Human
uaugucaaaugcucgacaauacc

SEQ ID NO: 354750 - RNA, 19 nt, Human
ucccggcggcugagcgagc

SEQ ID NO: 354751 - RNA, 20 nt, Human
ucgcacugccucccccuaca

SEQ ID NO: 354752 - RNA, 22 nt, Human
ugaaccccaaagccaggacccu

SEQ ID NO: 354753 - RNA, 22 nt, Human
ugagcagucccugguuguccca

SEQ ID NO: 354754 - RNA, 22 nt, Human
ugcacuggccauaggaaaaaag

SEQ ID NO: 354755 - RNA, 22 nt, Human
uggaaguuuucucuuguaaagg

SEQ ID NO: 354756 - RNA, 23 nt, Human
uggaggaggaggaggaagaggag

SEQ ID NO: 354757 - RNA, 19 nt, Human
uggggacacugcccagcuc

SEQ ID NO: 354758 - RNA, 18 nt, Human
uggugagaggaugugacg

SEQ ID NO: 354759 - RNA, 25 nt, Human
uuaaagcaaagauaucuuuguuuac

SEQ ID NO: 354760 - RNA, 23 nt, Human
uuauacuacauuuagagaauaaa

SEQ ID NO: 354761 - RNA, 20 nt, Human
uucuucucuucuuucuuaaa

SEQ ID NO: 354762 - RNA, 25 nt, Human
uugaugcaaaaauccauuuggaagu

SEQ ID NO: 354763 - RNA, 24 nt, Human
uuggaggaggaggaggaagaggag

SEQ ID NO: 354764 - RNA, 21 nt, Human
agggaucaucugguccagaac

SEQ ID NO: 354765 - RNA, 25 nt, Human
caaccagaccccagacucacaacuc

SEQ ID NO: 354766 - RNA, 22 nt, Human
caccaaccagaccccagacuca

SEQ ID NO: 354767 - RNA, 22 nt, Human
ccaaccagaccccagacucaca

SEQ ID NO: 354768 - RNA, 27 nt, Human
ccauuucuaucaacuaggagcuggggg

SEQ ID NO: 354769 - RNA, 18 nt, Human
cuccauucuaagaacaaa

SEQ ID NO: 354770 - RNA, 22 nt, Human
cucucccgucuuccagcuucaa

SEQ ID NO: 354771 - RNA, 21 nt, Human
cuuuuguccucucccgucuuc

SEQ ID NO: 354772 - RNA, 18 nt, Human
ggguugggaagaaggcug

SEQ ID NO: 354773 - RNA, 21 nt, Human
guuagaguggugaucucuccc

SEQ ID NO: 354774 - RNA, 19 nt, Human
uagaguggugaucucuccc

SEQ ID NO: 354775 - RNA, 18 nt, Human
ucaagaaauaauacaaac

SEQ ID NO: 354776 - RNA, 24 nt, Human
ucaccaaccagaccccagacucac

SEQ ID NO: 354777 - RNA, 20 nt, Human
uuagaguggugaucucuccc

SEQ ID NO: 354778 - RNA, 22 nt, Human
uucaccaaccagaccccagacu

SEQ ID NO: 354779 - RNA, 21 nt, Human
uuccagcuucaagggcucuuu

SEQ ID NO: 354780 - RNA, 25 nt, Human
uuggacaaauaugggaugggaggga

SEQ ID NO: 354781 - RNA, 18 nt, Human
uuuggagguggagaaggg

SEQ ID NO: 354782 - RNA, 18 nt, Human
uuuggagguggagaaggg

SEQ ID NO: 354783 - RNA, 23 nt, Human
aagcagcggugacagggcuggga

SEQ ID NO: 354784 - RNA, 18 nt, Human
aggcccaggcuccccggg

SEQ ID NO: 354785 - RNA, 19 nt, Human
aggcccugggacgcuggcu

SEQ ID NO: 354786 - RNA, 18 nt, Human
agggcuagcaucucccuc

SEQ ID NO: 354787 - RNA, 21 nt, Human
auccagcaccagcucgcccag

SEQ ID NO: 354788 - RNA, 22 nt, Human
caaagcucguccggcuggccuc

SEQ ID NO: 354789 - RNA, 26 nt, Human
caaagcucguccggcuggccucuaaa

SEQ ID NO: 354790 - RNA, 22 nt, Human
caaggcccccagggccuuuggg

SEQ ID NO: 354791 - RNA, 22 nt, Human
ccaacuucuccuuucucccucc

SEQ ID NO: 354792 - RNA, 23 nt, Human
ccaggcuucuccguggaggagga

SEQ ID NO: 354793 - RNA, 22 nt, Human
cccaaagggcuagcaucucccu

SEQ ID NO: 354794 - RNA, 23 nt, Human
cccauccagcaccagcucgccca

SEQ ID NO: 354795 - RNA, 24 nt, Human
cccccagggccuuuggauaaaugu

SEQ ID NO: 354796 - RNA, 21 nt, Human
ccgggucccccggugggccag

SEQ ID NO: 354797 - RNA, 18 nt, Human
ccuugggccucagcugcu

SEQ ID NO: 354798 - RNA, 20 nt, Human
cgcccagcacuuccgccgac

SEQ ID NO: 354799 - RNA, 20 nt, Human
cggggaaauugggguugagu

SEQ ID NO: 354800 - RNA, 18 nt, Human
cuaggcccugggacgcug

SEQ ID NO: 354801 - RNA, 19 nt, Human
cuccccggguucuggccuc

SEQ ID NO: 354802 - RNA, 24 nt, Human
cucuccggggcuccugagggcagg

SEQ ID NO: 354803 - RNA, 24 nt, Human
cuugggccucagcugcuuccuggc

SEQ ID NO: 354804 - RNA, 19 nt, Human
cuuucgguccagccaaagg

SEQ ID NO: 354805 - RNA, 19 nt, Human
gcagaguucaccugcuuga

SEQ ID NO: 354806 - RNA, 21 nt, Human
gccuugggccucagcugcuuc

SEQ ID NO: 354807 - RNA, 24 nt, Human
ggacaguggcugcggagguggccu

SEQ ID NO: 354808 - RNA, 18 nt, Human
ggacccaaagggcuagca

SEQ ID NO: 354809 - RNA, 18 nt, Human
gggaagagcaucuuggaa

SEQ ID NO: 354810 - RNA, 23 nt, Human
gggcaggagguaaggacccaaag

SEQ ID NO: 354811 - RNA, 20 nt, Human
gggccucagcugcuuccugg

SEQ ID NO: 354812 - RNA, 20 nt, Human
ggggcacuucugaugccucc

SEQ ID NO: 354813 - RNA, 18 nt, Human
gugcagagggugcggucc

SEQ ID NO: 354814 - RNA, 21 nt, Human
uaaaaaguuuaaccaaaaaac

SEQ ID NO: 354815 - RNA, 18 nt, Human
uaaggacccaaagggcua

SEQ ID NO: 354816 - RNA, 19 nt, Human
ucaccugcuugagcgaagg

SEQ ID NO: 354817 - RNA, 21 nt, Human
uccagcaccagcucgcccagc

SEQ ID NO: 354818 - RNA, 21 nt, Human
uccccggguucuggccucugg

SEQ ID NO: 354819 - RNA, 19 nt, Human
ucccucgggaagagcaucu

SEQ ID NO: 354820 - RNA, 18 nt, Human
uccucggaggccacgaug

SEQ ID NO: 354821 - RNA, 19 nt, Human
uccucggaggccacgaugg

SEQ ID NO: 354822 - RNA, 20 nt, Human
ucuccggggcuccugagggc

SEQ ID NO: 354823 - RNA, 19 nt, Human
ucuccguggaggaggagag

SEQ ID NO: 354824 - RNA, 24 nt, Human
ugaggguggcccuccuaagggcgg

SEQ ID NO: 354825 - RNA, 22 nt, Human
ugcggagguggccuugggccuc

SEQ ID NO: 354826 - RNA, 19 nt, Human
uggaagcagcggugacagg

SEQ ID NO: 354827 - RNA, 25 nt, Human
uggacaguggcugcggagguggccu

SEQ ID NO: 354828 - RNA, 23 nt, Human
uggccucuaaaccaacuucuccu

SEQ ID NO: 354829 - RNA, 19 nt, Human
uggcugcggagguggccuu

SEQ ID NO: 354830 - RNA, 18 nt, Human
ugugugggccacauaggg

SEQ ID NO: 354831 - RNA, 24 nt, Human
uguuaaaaaguuuaaccaaaaaac

SEQ ID NO: 354832 - RNA, 26 nt, Human
uuggacaguggcugcggagguggccu

SEQ ID NO: 354833 - RNA, 23 nt, Human
aaaaauuaauaaaaauuucacga

SEQ ID NO: 354834 - RNA, 20 nt, Human
aaaacaaaacauaaaaggaa

SEQ ID NO: 354835 - RNA, 23 nt, Human
aaacauaaaaggaagccuuccag

SEQ ID NO: 354836 - RNA, 23 nt, Human
aaagauaaagaaguaacaaagga

SEQ ID NO: 354837 - RNA, 24 nt, Human
aaaggaaggagaaugaacaagggg

SEQ ID NO: 354838 - RNA, 20 nt, Human
aaauggaaucugaggcagcu

SEQ ID NO: 354839 - RNA, 21 nt, Human
aaauggaaucugaggcagcuu

SEQ ID NO: 354840 - RNA, 25 nt, Human
aaauggcggcggaguucggugggcu

SEQ ID NO: 354841 - RNA, 20 nt, Human
aaauuucacgauauggagcc

SEQ ID NO: 354842 - RNA, 20 nt, Human
aacaccgaaaaaagcccaga

SEQ ID NO: 354843 - RNA, 18 nt, Human
aacuuuacaagacucccu

SEQ ID NO: 354844 - RNA, 24 nt, Human
aagaaaaaaauuaauaaaaauuuc

SEQ ID NO: 354845 - RNA, 25 nt, Human
aagaaaaaaauuaauaaaaauuuca

SEQ ID NO: 354846 - RNA, 19 nt, Human
aagcgggaggaaaaaggaa

SEQ ID NO: 354847 - RNA, 19 nt, Human
acaaaacauaaaaggaagc

SEQ ID NO: 354848 - RNA, 20 nt, Human
acaaaacauaaaaggaagcc

SEQ ID NO: 354849 - RNA, 19 nt, Human
acaccgaaaaaagcccaga

SEQ ID NO: 354850 - RNA, 20 nt, Human
acacugcaaaacauucagac

SEQ ID NO: 354851 - RNA, 20 nt, Human
agaaaggaaaagauaaagaa

SEQ ID NO: 354852 - RNA, 21 nt, Human
agacauuugggauuaaaacaa

SEQ ID NO: 354853 - RNA, 19 nt, Human
agagggaggagagagggca

SEQ ID NO: 354854 - RNA, 21 nt, Human
agagggcaccgcgggggcggg

SEQ ID NO: 354855 - RNA, 20 nt, Human
aggaaggagaaugaacaagg

SEQ ID NO: 354856 - RNA, 22 nt, Human
aggagaaugaacaaggggcuca

SEQ ID NO: 354857 - RNA, 24 nt, Human
aggccaagcgaggaaauggcggcg

SEQ ID NO: 354858 - RNA, 22 nt, Human
aguaacaaaggaaaaagaaaaa

SEQ ID NO: 354859 - RNA, 21 nt, Human
auggcaccuugaaaaacccac

SEQ ID NO: 354860 - RNA, 22 nt, Human
caaaacauaaaaggaagccuuc

SEQ ID NO: 354861 - RNA, 24 nt, Human
caaaccccuacacacugcaaaaca

SEQ ID NO: 354862 - RNA, 23 nt, Human
cacacugcaaaacauucagacau

SEQ ID NO: 354863 - RNA, 26 nt, Human
cacgauauggagccagcguguuccga

SEQ ID NO: 354864 - RNA, 22 nt, Human
caggaagaacuccaggcuggca

SEQ ID NO: 354865 - RNA, 24 nt, Human
cauuauugucaacagaaucacuuc

SEQ ID NO: 354866 - RNA, 21 nt, Human
ccaaaaccauuugcuccccuc

SEQ ID NO: 354867 - RNA, 22 nt, Human
ccaaagcccuugcccaaaacca

SEQ ID NO: 354868 - RNA, 23 nt, Human
ccacacugcucuuuuauucaaug

SEQ ID NO: 354869 - RNA, 22 nt, Human
cccuugcccaaaaccauuugcu

SEQ ID NO: 354870 - RNA, 18 nt, Human
ccgaaccguuaggccaag

SEQ ID NO: 354871 - RNA, 27 nt, Human
ccgauuggcggagccucaguccuucuu

SEQ ID NO: 354872 - RNA, 23 nt, Human
ccuggauugggccgggccgaggc

SEQ ID NO: 354873 - RNA, 23 nt, Human
cgcuuuaaacaaacauauuuggg

SEQ ID NO: 354874 - RNA, 21 nt, Human
cgggccgaggcgaagggucga

SEQ ID NO: 354875 - RNA, 28 nt, Human
cugcagauaaaccagugaagagaacgcg

SEQ ID NO: 354876 - RNA, 23 nt, Human
gaaaaacccacaaccagcuugac

SEQ ID NO: 354877 - RNA, 22 nt, Human
gccgggggcggcggggccgggg

SEQ ID NO: 354878 - RNA, 19 nt, Human
gcggcgggcggcggcggcg

SEQ ID NO: 354879 - RNA, 22 nt, Human
gcguugcugaggcugucugccu

SEQ ID NO: 354880 - RNA, 24 nt, Human
ggaaaagauaaagaaguaacaaag

SEQ ID NO: 354881 - RNA, 26 nt, Human
ggaagccuuccaggaaggagaggacc

SEQ ID NO: 354882 - RNA, 25 nt, Human
ggagaacuggagagaagggaaagga

SEQ ID NO: 354883 - RNA, 19 nt, Human
ggagagggaagcgggagga

SEQ ID NO: 354884 - RNA, 19 nt, Human
ggaggagagagggcaccgc

SEQ ID NO: 354885 - RNA, 21 nt, Human
ggccgggccgaggcgaagggu

SEQ ID NO: 354886 - RNA, 20 nt, Human
ggcggcggaguucggugggc

SEQ ID NO: 354887 - RNA, 21 nt, Human
ggcggcggaguucggugggcu

SEQ ID NO: 354888 - RNA, 19 nt, Human
ggcgggcggcggcggcgcg

SEQ ID NO: 354889 - RNA, 22 nt, Human
gggccgaggcgaagggucgaaa

SEQ ID NO: 354890 - RNA, 24 nt, Human
ggugaucaaggagcacaggaagaa

SEQ ID NO: 354891 - RNA, 23 nt, Human
gucgaaaucggcggccuccgauu

SEQ ID NO: 354892 - RNA, 25 nt, Human
uaaaaaaccccacgcuuuaaacaaa

SEQ ID NO: 354893 - RNA, 23 nt, Human
uaaaccagugaagagaacgcgca

SEQ ID NO: 354894 - RNA, 22 nt, Human
uaacaaaggaaaaagaaaaaaa

SEQ ID NO: 354895 - RNA, 19 nt, Human
uacccucggcaacuuuaca

SEQ ID NO: 354896 - RNA, 23 nt, Human
ucacgcggcgggcggcggcggcg

SEQ ID NO: 354897 - RNA, 18 nt, Human
ucauggagagggaagcgg

SEQ ID NO: 354898 - RNA, 21 nt, Human
uccaggaaggagaggaccaaa

SEQ ID NO: 354899 - RNA, 18 nt, Human
ucccuugacaaggguggc

SEQ ID NO: 354900 - RNA, 21 nt, Human
ucccuugacaaggguggcaga

SEQ ID NO: 354901 - RNA, 18 nt, Human
ucucacgcggcgggcggc

SEQ ID NO: 354902 - RNA, 22 nt, Human
ugaaaaacccacaaccagcuug

SEQ ID NO: 354903 - RNA, 22 nt, Human
uggcaccuugaaaaacccacaa

SEQ ID NO: 354904 - RNA, 23 nt, Human
uggcaggaucgccaggacggaug

SEQ ID NO: 354905 - RNA, 18 nt, Human
uggcaggcgagcccgagg

SEQ ID NO: 354906 - RNA, 21 nt, Human
uugccgaaccauccuguccac

SEQ ID NO: 354907 - RNA, 20 nt, Human
aaugggcugcugaagaaaug

SEQ ID NO: 354908 - RNA, 24 nt, Human
agaaaacccagcuacucuuaccaa

SEQ ID NO: 354909 - RNA, 22 nt, Human
agacaggagaggcaaaagggac

SEQ ID NO: 354910 - RNA, 18 nt, Human
aggagaggcaaaauggca

SEQ ID NO: 354911 - RNA, 18 nt, Human
aggagaggcaaaauggca

SEQ ID NO: 354912 - RNA, 21 nt, Human
aggcaaggcaaagccucaggg

SEQ ID NO: 354913 - RNA, 22 nt, Human
auucuauuagccaagugccacc

SEQ ID NO: 354914 - RNA, 19 nt, Human
caagacagccuccccgcuc

SEQ ID NO: 354915 - RNA, 19 nt, Human
caguugcuaaugggcugcu

SEQ ID NO: 354916 - RNA, 24 nt, Human
ccaccugucacuaugaaacuaucc

SEQ ID NO: 354917 - RNA, 22 nt, Human
ccucaggggggcuccugggucu

SEQ ID NO: 354918 - RNA, 20 nt, Human
ccugucacuaugaaacuauc

SEQ ID NO: 354919 - RNA, 24 nt, Human
cgaaacaaauaugcaggcaaggca

SEQ ID NO: 354920 - RNA, 21 nt, Human
cgagacccuaacacaaagaga

SEQ ID NO: 354921 - RNA, 19 nt, Human
cuguaggacaucccugggc

SEQ ID NO: 354922 - RNA, 24 nt, Human
cuuagaaaacccagcuacucuuac

SEQ ID NO: 354923 - RNA, 23 nt, Human
gaaacaaauaugcaggcaaggca

SEQ ID NO: 354924 - RNA, 19 nt, Human
gcaggacaauuugaauucc

SEQ ID NO: 354925 - RNA, 21 nt, Human
ggagacaggagaggcaaaaug

SEQ ID NO: 354926 - RNA, 19 nt, Human
ggcagggggugggagacag

SEQ ID NO: 354927 - RNA, 19 nt, Human
ggucuggggcagggggugg

SEQ ID NO: 354928 - RNA, 19 nt, Human
uaggacaucccugggcucu

SEQ ID NO: 354929 - RNA, 21 nt, Human
uaggacaucccugggcucuca

SEQ ID NO: 354930 - RNA, 18 nt, Human
ucccugggcucucaguug

SEQ ID NO: 354931 - RNA, 21 nt, Human
uccugggucuggggcaggggg

SEQ ID NO: 354932 - RNA, 24 nt, Human
uccugggucuggggcagggggugg

SEQ ID NO: 354933 - RNA, 20 nt, Human
uccuguaggacaucccuggg

SEQ ID NO: 354934 - RNA, 22 nt, Human
ucucaguugcuaaugggcugcu

SEQ ID NO: 354935 - RNA, 28 nt, Human
ugcaggcaaggcaaagccucaggggggc

SEQ ID NO: 354936 - RNA, 20 nt, Human
uggggcagggggugggagac

SEQ ID NO: 354937 - RNA, 21 nt, Human
uggggcagggggugggagaca

SEQ ID NO: 354938 - RNA, 24 nt, Human
uuuuuuuuuuuuuuuuuucacaag

SEQ ID NO: 354939 - RNA, 25 nt, Human
uuuuuuuuuuuuuuuuuucacaaga

SEQ ID NO: 354940 - RNA, 20 nt, Human
agagcaccuggcgcugggcu

SEQ ID NO: 354941 - RNA, 21 nt, Human
caaaagagcagccuucucuca

SEQ ID NO: 354942 - RNA, 25 nt, Human
caagagcaccuggcgcugggcuugc

SEQ ID NO: 354943 - RNA, 26 nt, Human
cagagcccaaggccgcguuccgaggg

SEQ ID NO: 354944 - RNA, 25 nt, Human
cuccucguuucgccaccuccacgac

SEQ ID NO: 354945 - RNA, 22 nt, Human
gcaguacaaaagagcagccuuc

SEQ ID NO: 354946 - RNA, 20 nt, Human
gccaccuccacgacuucguu

SEQ ID NO: 354947 - RNA, 20 nt, Human
gcugggcuugcugggggagg

SEQ ID NO: 354948 - RNA, 22 nt, Human
ggcgcugggcuugcugggggag

SEQ ID NO: 354949 - RNA, 20 nt, Human
guuucgccaccuccacgacu

SEQ ID NO: 354950 - RNA, 18 nt, Human
ucguuuggcgaacggcgg

SEQ ID NO: 354951 - RNA, 25 nt, Human
ucucucagugggaaaaggcaagagc

SEQ ID NO: 354952 - RNA, 21 nt, Human
uggcgcugggcuugcuggggg

SEQ ID NO: 354953 - RNA, 24 nt, Human
uggcgcugggcuugcugggggagg

SEQ ID NO: 354954 - RNA, 22 nt, Human
ugggggaggcuguuuaaugagc

SEQ ID NO: 354955 - RNA, 24 nt, Human
uuggcgaacggcgggcaaagaaag

SEQ ID NO: 354956 - RNA, 18 nt, Human
uuuuuuuuuuuuuggggg

SEQ ID NO: 354957 - RNA, 20 nt, Human
uuuuuuuuuuuuuuggggga

SEQ ID NO: 354958 - RNA, 20 nt, Human
uuuuuuuuuuuuuuuggggg

SEQ ID NO: 354959 - RNA, 22 nt, Human
uuuuuuuuuuuuuuuuuggggg

SEQ ID NO: 354960 - RNA, 21 nt, Human
aucacuguguucuuggucacu

SEQ ID NO: 354961 - RNA, 23 nt, Human
aucaugcuacuggauuucuagcu

SEQ ID NO: 354962 - RNA, 21 nt, Human
cacuguguucuuggucacuac

SEQ ID NO: 354963 - RNA, 21 nt, Human
ccuuuaaacacaaggaaugag

SEQ ID NO: 354964 - RNA, 20 nt, Human
cuagcucuuccucuaugacc

SEQ ID NO: 354965 - RNA, 18 nt, Human
uaaaaaugaaaucccucc

SEQ ID NO: 354966 - RNA, 19 nt, Human
uccucuaugaccaguucua

SEQ ID NO: 354967 - RNA, 22 nt, Human
ucucaauuaaacauucccuuua

SEQ ID NO: 354968 - RNA, 19 nt, Human
ucuuggucacuacuggcau

SEQ ID NO: 354969 - RNA, 21 nt, Human
ugaaguagcugugcauuaaac

SEQ ID NO: 354970 - RNA, 21 nt, Human
cuggagguggcggcggcggca

SEQ ID NO: 354971 - RNA, 24 nt, Human
cuggagguggcggcggcggcagcu

SEQ ID NO: 354972 - RNA, 19 nt, Human
gccaaaaaaagggcuagug

SEQ ID NO: 354973 - RNA, 22 nt, Human
ggagguggcggcggcggcagcu

SEQ ID NO: 354974 - RNA, 21 nt, Human
guggcggcggcggcagcugca

SEQ ID NO: 354975 - RNA, 25 nt, Human
guggcggcggcggcagcugcaauuc

SEQ ID NO: 354976 - RNA, 28 nt, Human
uaaaauaagaacaugaaaugacaagucc

SEQ ID NO: 354977 - RNA, 22 nt, Human
uacaaaacaggucuaaaauaag

SEQ ID NO: 354978 - RNA, 24 nt, Human
uggagguggcggcggcggcagcug

SEQ ID NO: 354979 - RNA, 18 nt, Human
uggcggcggcggcagcug

SEQ ID NO: 354980 - RNA, 22 nt, Human
uucaucucuuuccuugggaaac

SEQ ID NO: 354981 - RNA, 24 nt, Human
uuuuuuuuuuuuuuuucaucucuu

SEQ ID NO: 354982 - RNA, 23 nt, Human
aaacacacagucucuggcaagcc

SEQ ID NO: 354983 - RNA, 20 nt, Human
aacuguauuuacaagaaaac

SEQ ID NO: 354984 - RNA, 19 nt, Human
accugagccacccagaccu

SEQ ID NO: 354985 - RNA, 19 nt, Human
acuguauuuacaagaaaac

SEQ ID NO: 354986 - RNA, 20 nt, Human
agccagguggcagugauggu

SEQ ID NO: 354987 - RNA, 24 nt, Human
agcuguugacuuucauaaugcagu

SEQ ID NO: 354988 - RNA, 18 nt, Human
aggccuugguuacaccaa

SEQ ID NO: 354989 - RNA, 18 nt, Human
agggauggcuuuggggaa

SEQ ID NO: 354990 - RNA, 24 nt, Human
agguggcagugauggugguggggg

SEQ ID NO: 354991 - RNA, 20 nt, Human
auccagucacccuccugcca

SEQ ID NO: 354992 - RNA, 24 nt, Human
caaaaguagacaggagagucaaga

SEQ ID NO: 354993 - RNA, 20 nt, Human
caacggaugcuaccucccuu

SEQ ID NO: 354994 - RNA, 24 nt, Human
caagccccaccgggaaaggagggc

SEQ ID NO: 354995 - RNA, 21 nt, Human
cacagccugccuccuuccucc

SEQ ID NO: 354996 - RNA, 22 nt, Human
caccaacuccaacauacuggcg

SEQ ID NO: 354997 - RNA, 22 nt, Human
cacccagaccuccaggccuugg

SEQ ID NO: 354998 - RNA, 22 nt, Human
caguacggaguccaagaaagcc

SEQ ID NO: 354999 - RNA, 23 nt, Human
cauuccaggagaagagcugaggg

SEQ ID NO: 355000 - RNA, 24 nt, Human
ccaccaccaacuccaacauacugg

SEQ ID NO: 355001 - RNA, 19 nt, Human
ccacccagaccuccaggcc

SEQ ID NO: 355002 - RNA, 18 nt, Human
cccaccgggaaaggaggg

SEQ ID NO: 355003 - RNA, 26 nt, Human
cccuucaaaacuuaagccaccaccaa

SEQ ID NO: 355004 - RNA, 19 nt, Human
ccucccuucaaaacuuaag

SEQ ID NO: 355005 - RNA, 22 nt, Human
ccucccuucaaaacuuaagcca

SEQ ID NO: 355006 - RNA, 22 nt, Human
ccuccugccacauggcagaagc

SEQ ID NO: 355007 - RNA, 22 nt, Human
ccuucaaaacuuaagccaccac

SEQ ID NO: 355008 - RNA, 19 nt, Human
cuucaaaacuuaagccacc

SEQ ID NO: 355009 - RNA, 20 nt, Human
gaaacaaaacacacagucuc

SEQ ID NO: 355010 - RNA, 18 nt, Human
gagcugaggggaaagagc

SEQ ID NO: 355011 - RNA, 20 nt, Human
gauggcuuuggggaaugggg

SEQ ID NO: 355012 - RNA, 20 nt, Human
ggaguccaagaaagccugca

SEQ ID NO: 355013 - RNA, 20 nt, Human
gggaagccagucauuccagg

SEQ ID NO: 355014 - RNA, 24 nt, Human
ggggaaugggggacucagguucua

SEQ ID NO: 355015 - RNA, 23 nt, Human
uaccucccuucaaaacuuaagcc

SEQ ID NO: 355016 - RNA, 19 nt, Human
ucaaugcagggauggcuuu

SEQ ID NO: 355017 - RNA, 24 nt, Human
uccaggagaagagcugaggggaaa

SEQ ID NO: 355018 - RNA, 19 nt, Human
ugaggggaagccagucauu

SEQ ID NO: 355019 - RNA, 20 nt, Human
ugauacuauacccuacccag

SEQ ID NO: 355020 - RNA, 21 nt, Human
ugcaggaaaccugagccaccc

SEQ ID NO: 355021 - RNA, 19 nt, Human
ugccacauggcagaagcca

SEQ ID NO: 355022 - RNA, 19 nt, Human
uggcagaagccagguggca

SEQ ID NO: 355023 - RNA, 18 nt, Human
uggcagugaugguggugg

SEQ ID NO: 355024 - RNA, 25 nt, Human
uggcagugaugguggugggggaaac

SEQ ID NO: 355025 - RNA, 24 nt, Human
uggggagaaguguagcaaaucuca

SEQ ID NO: 355026 - RNA, 19 nt, Human
uggggucauguaucaugua

SEQ ID NO: 355027 - RNA, 18 nt, Human
uguagcaaaucucagugc

SEQ ID NO: 355028 - RNA, 18 nt, Human
uucaaaacuuaagccacc

SEQ ID NO: 355029 - RNA, 19 nt, Human
uucaaaacuuaagccacca

SEQ ID NO: 355030 - RNA, 19 nt, Human
uuccaggagaagagcugag

SEQ ID NO: 355031 - RNA, 19 nt, Human
aaaauacucaggaccaaca

SEQ ID NO: 355032 - RNA, 19 nt, Human
aaaguuacauuaaaaaggg

SEQ ID NO: 355033 - RNA, 19 nt, Human
aggaauagaaaagauauug

SEQ ID NO: 355034 - RNA, 22 nt, Human
caaaauacucaggaccaacaua

SEQ ID NO: 355035 - RNA, 24 nt, Human
caacauaaaaaagaaauaccuccu

SEQ ID NO: 355036 - RNA, 23 nt, Human
ccccaaggagcuacagcaucucu

SEQ ID NO: 355037 - RNA, 20 nt, Human
gggaauggagugggggugcu

SEQ ID NO: 355038 - RNA, 24 nt, Human
uaaaaaagaaauaccuccugugga

SEQ ID NO: 355039 - RNA, 20 nt, Human
uggagugggggugcugaaag

SEQ ID NO: 355040 - RNA, 20 nt, Human
uggagugggggugcugaaag

SEQ ID NO: 355041 - RNA, 22 nt, Human
uuuuuuuuuuuuuuaacaagga

SEQ ID NO: 355042 - RNA, 25 nt, Human
uuuuuuuuuuuuuuuuuuaacaagg

SEQ ID NO: 355043 - RNA, 19 nt, Human
aaguagccugguccugggg

SEQ ID NO: 355044 - RNA, 23 nt, Human
acacacacacacacacacacaca

SEQ ID NO: 355045 - RNA, 23 nt, Human
acacacacacacacacacacaca

SEQ ID NO: 355046 - RNA, 24 nt, Human
acacacacacacacacacccaucu

SEQ ID NO: 355047 - RNA, 24 nt, Human
acacccaucuccagccccugccac

SEQ ID NO: 355048 - RNA, 19 nt, Human
agaagagugggauccccag

SEQ ID NO: 355049 - RNA, 19 nt, Human
agccccagguggccucagc

SEQ ID NO: 355050 - RNA, 19 nt, Human
aggaaacauggucacaccc

SEQ ID NO: 355051 - RNA, 23 nt, Human
aggcagcaggggcaggagggagg

SEQ ID NO: 355052 - RNA, 20 nt, Human
agggaggcaagaggagggga

SEQ ID NO: 355053 - RNA, 18 nt, Human
aggggagaaggguggggc

SEQ ID NO: 355054 - RNA, 25 nt, Human
agggggcagggcggggcgguggcgg

SEQ ID NO: 355055 - RNA, 23 nt, Human
aguucucagccacaaggcgggac

SEQ ID NO: 355056 - RNA, 20 nt, Human
caacagcugcaagaagagug

SEQ ID NO: 355057 - RNA, 20 nt, Human
cacacacacacacacacaca

SEQ ID NO: 355058 - RNA, 20 nt, Human
cacacacacacacacacaca

SEQ ID NO: 355059 - RNA, 20 nt, Human
cacacacacacacacacaca

SEQ ID NO: 355060 - RNA, 20 nt, Human
cacacacacacacacacaca

SEQ ID NO: 355061 - RNA, 20 nt, Human
cacacacacacacacacaca

SEQ ID NO: 355062 - RNA, 20 nt, Human
cacacacacacacacacaca

SEQ ID NO: 355063 - RNA, 20 nt, Human
cacacacacacacacacaca

SEQ ID NO: 355064 - RNA, 20 nt, Human
cacacacacacacacacaca

SEQ ID NO: 355065 - RNA, 22 nt, Human
cacacacacacacacacacaca

SEQ ID NO: 355066 - RNA, 22 nt, Human
cacacacacacacacacacaca

SEQ ID NO: 355067 - RNA, 22 nt, Human
cacacacacacacacacacaca

SEQ ID NO: 355068 - RNA, 22 nt, Human
cacacacacacacacacacaca

SEQ ID NO: 355069 - RNA, 26 nt, Human
cacacacacacacacacacacacaca

SEQ ID NO: 355070 - RNA, 26 nt, Human
cacacacacacacacacacacacaca

SEQ ID NO: 355071 - RNA, 26 nt, Human
cacacacacacacacacacacacaca

SEQ ID NO: 355072 - RNA, 26 nt, Human
cacacacacacacacacacacacaca

SEQ ID NO: 355073 - RNA, 30 nt, Human; identical to SEQ ID NO: 326474

SEQ ID NO: 355074 - RNA, 28 nt, Human
cacacacacacacacacacacacaccca

SEQ ID NO: 355075 - RNA, 24 nt, Human
cacacacacacacacacccaucuc

SEQ ID NO: 355076 - RNA, 20 nt, Human
cacacacacacccaucucca

SEQ ID NO: 355077 - RNA, 21 nt, Human
cacacacccaucuccagcccc

SEQ ID NO: 355078 - RNA, 28 nt, Human
caggggcaggagggaggcaagaggaggg

SEQ ID NO: 355079 - RNA, 19 nt, Human
caggggugggggcaugacc

SEQ ID NO: 355080 - RNA, 23 nt, Human
ccagcagacaugcuuucccucaa

SEQ ID NO: 355081 - RNA, 20 nt, Human
ccauacuaguccucucggca

SEQ ID NO: 355082 - RNA, 22 nt, Human
cccagccccagguggccucagc

SEQ ID NO: 355083 - RNA, 23 nt, Human
ccccagguggccucagcucugcc

SEQ ID NO: 355084 - RNA, 18 nt, Human
ccccauacuaguccucuc

SEQ ID NO: 355085 - RNA, 24 nt, Human
ccuacgaucagaggcagcaggggc

SEQ ID NO: 355086 - RNA, 21 nt, Human
ccuggggucgggaggaagccg

SEQ ID NO: 355087 - RNA, 20 nt, Human
ccuggggucgggaggaagcg

SEQ ID NO: 355088 - RNA, 20 nt, Human
cgaucagaggcagcaggggc

SEQ ID NO: 355089 - RNA, 20 nt, Human
cgcacacacacacacacaca

SEQ ID NO: 355090 - RNA, 25 nt, Human
cgcacacacacacacacacacacac

SEQ ID NO: 355091 - RNA, 24 nt, Human
cgccuaggggagaaggguggggcc

SEQ ID NO: 355092 - RNA, 25 nt, Human
cgcgcgcacacacacacacacacac

SEQ ID NO: 355093 - RNA, 19 nt, Human
cggcgggcuaacugcugcc

SEQ ID NO: 355094 - RNA, 20 nt, Human
cgggcuaacugcugccuggg

SEQ ID NO: 355095 - RNA, 19 nt, Human
cuccacggagcccuuugga

SEQ ID NO: 355096 - RNA, 23 nt, Human
cugccacuguccaguucucagcc

SEQ ID NO: 355097 - RNA, 20 nt, Human
gagaaguagccugguccugg

SEQ ID NO: 355098 - RNA, 18 nt, Human
gagcaggggugggggcau

SEQ ID NO: 355099 - RNA, 22 nt, Human
gagcaggggugggggcaugacc

SEQ ID NO: 355100 - RNA, 20 nt, Human
gcaggagggaggcaagagga

SEQ ID NO: 355101 - RNA, 23 nt, Human
gcgcacacacacacacacacaca

SEQ ID NO: 355102 - RNA, 24 nt, Human
gcgcgcacacacacacacacacag

SEQ ID NO: 355103 - RNA, 21 nt, Human
ggacacacaggcgggcggcgg

SEQ ID NO: 355104 - RNA, 19 nt, Human
ggacuggagggggcagggc

SEQ ID NO: 355105 - RNA, 25 nt, Human
ggacuggagggggcagggcggggcg

SEQ ID NO: 355106 - RNA, 20 nt, Human
ggagagcaggggugggggca

SEQ ID NO: 355107 - RNA, 18 nt, Human
ggagggggcagggcgggg

SEQ ID NO: 355108 - RNA, 18 nt, Human
ggagggggcagggcgggg

SEQ ID NO: 355109 - RNA, 21 nt, Human
ggcaggagggaggcaagagga

SEQ ID NO: 355110 - RNA, 21 nt, Human
ggcgggcggcgggcuaacugc

SEQ ID NO: 355111 - RNA, 25 nt, Human
gggcagggcggggcgguggcgggca

SEQ ID NO: 355112 - RNA, 18 nt, Human
gggcggggcgguggcggg

SEQ ID NO: 355113 - RNA, 19 nt, Human
gggucgggaggaagcgggu

SEQ ID NO: 355114 - RNA, 19 nt, Human
gggucgggaggaagcgggu

SEQ ID NO: 355115 - RNA, 18 nt, Human
ggucgggaggaagcgggu

SEQ ID NO: 355116 - RNA, 20 nt, Human
gucgggaggaagcgggugcg

SEQ ID NO: 355117 - RNA, 21 nt, Human
gugcggagagcaggggugggg

SEQ ID NO: 355118 - RNA, 19 nt, Human
uacuaguccucucggcagg

SEQ ID NO: 355119 - RNA, 18 nt, Human
ucagaggcagcaggggca

SEQ ID NO: 355120 - RNA, 22 nt, Human
ucagcucugccagucccucucc

SEQ ID NO: 355121 - RNA, 21 nt, Human
uccccagccccagguggccuc

SEQ ID NO: 355122 - RNA, 26 nt, Human
uccccagccccagguggccucagcuc

SEQ ID NO: 355123 - RNA, 21 nt, Human
uccuggggucgggaggaagcg

SEQ ID NO: 355124 - RNA, 18 nt, Human
ucugccagucccucucca

SEQ ID NO: 355125 - RNA, 21 nt, Human
ucugccagucccucuccacgg

SEQ ID NO: 355126 - RNA, 18 nt, Human
ugcaagaagagugggauc

SEQ ID NO: 355127 - RNA, 18 nt, Human
ugcggagagcaggggugg

SEQ ID NO: 355128 - RNA, 22 nt, Human
ugcggagagcaggggugggggc

SEQ ID NO: 355129 - RNA, 18 nt, Human
uggccucagcucugccag

SEQ ID NO: 355130 - RNA, 21 nt, Human
uggccucagcucugccagucc

SEQ ID NO: 355131 - RNA, 23 nt, Human
ugggauccccagccccagguggc

SEQ ID NO: 355132 - RNA, 23 nt, Human
uggggacacacaggcgggcggcg

SEQ ID NO: 355133 - RNA, 27 nt, Human
uggggccucccaccccauacuaguccu

SEQ ID NO: 355134 - RNA, 20 nt, Human
ugggggacuggagggggcag

SEQ ID NO: 355135 - RNA, 20 nt, Human
aaaaaaacaaaacaaacugg

SEQ ID NO: 355136 - RNA, 20 nt, Human
aaaaaagaaaaaauaaagaa

SEQ ID NO: 355137 - RNA, 19 nt, Human
aaaaaauucuccuguucca

SEQ ID NO: 355138 - RNA, 30 nt, Human
aaaaagaaaaaauaaagaaauaaaaaggaa

SEQ ID NO: 355139 - RNA, 23 nt, Human
aaaagauugguaucuaaacaaaa

SEQ ID NO: 355140 - RNA, 21 nt, Human
aaaauacuuagcaccagcgug

SEQ ID NO: 355141 - RNA, 21 nt, Human
aaacguggaggccaccuugcu

SEQ ID NO: 355142 - RNA, 21 nt, Human
aaacugcuaacauccauaaaa

SEQ ID NO: 355143 - RNA, 20 nt, Human
aaaugaccuuuccacuuuuc

SEQ ID NO: 355144 - RNA, 20 nt, Human
aacguggaggccaccuugcu

SEQ ID NO: 355145 - RNA, 23 nt, Human
acaaaacaaacuggaaugaaagc

SEQ ID NO: 355146 - RNA, 18 nt, Human
acaguaaaaaaaaaaaaa

SEQ ID NO: 355147 - RNA, 25 nt, Human
acaguaaaaaaaaaaaaauugguac

SEQ ID NO: 355148 - RNA, 20 nt, Human
acccacuuucacccccuacc

SEQ ID NO: 355149 - RNA, 21 nt, Human
acccacuuucacccccuacca

SEQ ID NO: 355150 - RNA, 19 nt, Human
acuaaaaugcaagaauuua

SEQ ID NO: 355151 - RNA, 19 nt, Human
acuuucacccccuaccaau

SEQ ID NO: 355152 - RNA, 21 nt, Human
agaaagcaauacuuagccucc

SEQ ID NO: 355153 - RNA, 18 nt, Human
agaagcaugaauggcaaa

SEQ ID NO: 355154 - RNA, 20 nt, Human
aggcaaaagcgaagaagacg

SEQ ID NO: 355155 - RNA, 23 nt, Human
aggcaaaagcgaagaagacgcuc

SEQ ID NO: 355156 - RNA, 23 nt, Human
aggcaaaagcgaagaagagggac

SEQ ID NO: 355157 - RNA, 24 nt, Human
agggacauuauacaguaaaaaaga

SEQ ID NO: 355158 - RNA, 20 nt, Human
auauuccugaagauuuacag

SEQ ID NO: 355159 - RNA, 24 nt, Human
caaacaaaucaucaaacuacuucu

SEQ ID NO: 355160 - RNA, 25 nt, Human
caacaaaaugaccuuuccacuuuuc

SEQ ID NO: 355161 - RNA, 21 nt, Human
cacugccauaaacuugaggga

SEQ ID NO: 355162 - RNA, 23 nt, Human
cauaaaagauccauuuaaucaaa

SEQ ID NO: 355163 - RNA, 23 nt, Human
cauccauaaaaagauagcuuucu

SEQ ID NO: 355164 - RNA, 20 nt, Human
caugcuuucaauguggaaua

SEQ ID NO: 355165 - RNA, 19 nt, Human
ccaaacagaccauuuacaa

SEQ ID NO: 355166 - RNA, 20 nt, Human
ccaaacagaccauuuacaaa

SEQ ID NO: 355167 - RNA, 27 nt, Human
cccaaacagaccauuuacaaauauuag

SEQ ID NO: 355168 - RNA, 20 nt, Human
cugcccaaacagaccauuua

SEQ ID NO: 355169 - RNA, 29 nt, Human
cuugagggacauuauacaguaaaaaagag

SEQ ID NO: 355170 - RNA, 23 nt, Human
gaaauggcauaugccauucaaag

SEQ ID NO: 355171 - RNA, 18 nt, Human
gaauuuaaaagauuggua

SEQ ID NO: 355172 - RNA, 24 nt, Human
gccauuuauagggcuugagauuug

SEQ ID NO: 355173 - RNA, 22 nt, Human
ggacauuauacaguaaaaaaga

SEQ ID NO: 355174 - RNA, 22 nt, Human
gggcaauuauuuguagaaagca

SEQ ID NO: 355175 - RNA, 19 nt, Human
guggaggccaccuugcuuc

SEQ ID NO: 355176 - RNA, 24 nt, Human
uaaaaaagaaaaaauaaagaaaua

SEQ ID NO: 355177 - RNA, 24 nt, Human
uaaaaacaagaaauggggaaaugc

SEQ ID NO: 355178 - RNA, 24 nt, Human
uaucuaaacaaaaaaacaaaacaa

SEQ ID NO: 355179 - RNA, 18 nt, Human
ucaauaaacugcuaacau

SEQ ID NO: 355180 - RNA, 23 nt, Human
ucaguggcacaagguacacugcc

SEQ ID NO: 355181 - RNA, 22 nt, Human
uccagaugcauuucccagaaau

SEQ ID NO: 355182 - RNA, 19 nt, Human
ucccagaaauggcauaugc

SEQ ID NO: 355183 - RNA, 18 nt, Human
ucgaggcaaaagcgaaga

SEQ ID NO: 355184 - RNA, 21 nt, Human
ucgaggcaaaagcgaagaaga

SEQ ID NO: 355185 - RNA, 22 nt, Human
ucuaaacaaaaaaacaaaacaa

SEQ ID NO: 355186 - RNA, 24 nt, Human
ucuaaacaaaaaaacaaaacaaac

SEQ ID NO: 355187 - RNA, 22 nt, Human
ucucaugcuuucaauguggaau

SEQ ID NO: 355188 - RNA, 25 nt, Human
ucuguggucaaggggcggucgaggc

SEQ ID NO: 355189 - RNA, 25 nt, Human
uguagaaagcaauacuuagccucca

SEQ ID NO: 355190 - RNA, 21 nt, Human
ugucuuacacccauuccacaa

SEQ ID NO: 355191 - RNA, 24 nt, Human
uuaccugcccaaacagaccauuua

SEQ ID NO: 355192 - RNA, 24 nt, Human
uugaagcacaguaaaaaaaaaaaa

SEQ ID NO: 355193 - RNA, 21 nt, Human
uuguagaaagcaauacuuagc

SEQ ID NO: 355194 - RNA, 21 nt, Human
aaaaaacaacacaaaugaaau

SEQ ID NO: 355195 - RNA, 18 nt, Human
aaaccccuccacuaagga

SEQ ID NO: 355196 - RNA, 23 nt, Human
aaagaaacuacucuggaccugaa

SEQ ID NO: 355197 - RNA, 18 nt, Human
aagaaaaaaacggaaagc

SEQ ID NO: 355198 - RNA, 26 nt, Human
aagggcuuugggaaguaucucagggu

SEQ ID NO: 355199 - RNA, 21 nt, Human
aaucauccaaaauuacaggca

SEQ ID NO: 355200 - RNA, 22 nt, Human
acccugggguuuggagcguggc

SEQ ID NO: 355201 - RNA, 21 nt, Human
acuggguauaagcauuggccc

SEQ ID NO: 355202 - RNA, 21 nt, Human
agaaagaaacuacucuggacc

SEQ ID NO: 355203 - RNA, 18 nt, Human
agagagggcccgguugca

SEQ ID NO: 355204 - RNA, 21 nt, Human
agagccaaguguuacacagga

SEQ ID NO: 355205 - RNA, 21 nt, Human
aggcaggcacaggcugccccu

SEQ ID NO: 355206 - RNA, 21 nt, Human
aggcggcgcgggcggggaggc

SEQ ID NO: 355207 - RNA, 22 nt, Human
aggugcggcgagcaggaaggcg

SEQ ID NO: 355208 - RNA, 18 nt, Human
aguaacuaaugacacuca

SEQ ID NO: 355209 - RNA, 21 nt, Human
aguuaugacacagcaaccagu

SEQ ID NO: 355210 - RNA, 23 nt, Human
auacuggagucuucaagaguuaa

SEQ ID NO: 355211 - RNA, 22 nt, Human
augaaacaaauauauguaaaaa

SEQ ID NO: 355212 - RNA, 21 nt, Human
caaaaugagcagauacguaug

SEQ ID NO: 355213 - RNA, 25 nt, Human
caaaaugagcagauacguaugagca

SEQ ID NO: 355214 - RNA, 24 nt, Human
caaacagaucaccugagccuccug

SEQ ID NO: 355215 - RNA, 21 nt, Human
caaaccuccucucucggagac

SEQ ID NO: 355216 - RNA, 25 nt, Human
caaaucacuuaagguccccagcacu

SEQ ID NO: 355217 - RNA, 21 nt, Human
cacaggcaaaccuccucucuc

SEQ ID NO: 355218 - RNA, 18 nt, Human
cacccaugucaacuuucc

SEQ ID NO: 355219 - RNA, 27 nt, Human
caccccacccgaggcucccuccccacc

SEQ ID NO: 355220 - RNA, 24 nt, Human
cagaacuaagacccagauccacgc

SEQ ID NO: 355221 - RNA, 25 nt, Human
cagaucaccugagccuccugcaucu

SEQ ID NO: 355222 - RNA, 21 nt, Human
cagccaauagauccacaccaa

SEQ ID NO: 355223 - RNA, 23 nt, Human
cagcccgaaaaucgccgucucuc

SEQ ID NO: 355224 - RNA, 25 nt, Human
cagcuacacuaccagggaaauccgc

SEQ ID NO: 355225 - RNA, 18 nt, Human
caggccaaucagucugca

SEQ ID NO: 355226 - RNA, 19 nt, Human
caggcuagggccgcagggg

SEQ ID NO: 355227 - RNA, 20 nt, Human
cagggaaauccgccucccuu

SEQ ID NO: 355228 - RNA, 18 nt, Human
cauaagcgauaacaucaa

SEQ ID NO: 355229 - RNA, 24 nt, Human
cauccaaaauuacaggcaaaucac

SEQ ID NO: 355230 - RNA, 25 nt, Human
ccaaaauuacaggcaaaucacuuaa

SEQ ID NO: 355231 - RNA, 19 nt, Human
ccaccccacccgaggcucc

SEQ ID NO: 355232 - RNA, 20 nt, Human
ccagggaaauccgccucccu

SEQ ID NO: 355233 - RNA, 21 nt, Human
ccagggaccuccggggacaaa

SEQ ID NO: 355234 - RNA, 22 nt, Human
cccacccgaggcucccucccca

SEQ ID NO: 355235 - RNA, 20 nt, Human
ccccacccgaggcucccucc

SEQ ID NO: 355236 - RNA, 22 nt, Human
ccccacccgaggcucccucccc

SEQ ID NO: 355237 - RNA, 24 nt, Human
ccccacccgaggcucccuccccac

SEQ ID NO: 355238 - RNA, 18 nt, Human
ccccacccugcccccggg

SEQ ID NO: 355239 - RNA, 19 nt, Human
ccccacccugcccccggga

SEQ ID NO: 355240 - RNA, 21 nt, Human
cccccccgcucccaccccacc

SEQ ID NO: 355241 - RNA, 18 nt, Human
ccccccgcucccacccca

SEQ ID NO: 355242 - RNA, 28 nt, Human
cccccgcucccaccccacccgaggcucc

SEQ ID NO: 355243 - RNA, 19 nt, Human
cccgcgcgcguccugccgc

SEQ ID NO: 355244 - RNA, 23 nt, Human
ccgccgccuccccgcgcgcgucc

SEQ ID NO: 355245 - RNA, 24 nt, Human
ccgccgccuccccgcgcgcguccu

SEQ ID NO: 355246 - RNA, 18 nt, Human
ccgguagguaacuaggcg

SEQ ID NO: 355247 - RNA, 23 nt, Human
ccuccacuaaggacucugccgca

SEQ ID NO: 355248 - RNA, 20 nt, Human
ccuccccgcgcgcguccugc

SEQ ID NO: 355249 - RNA, 24 nt, Human
ccuccccgcgcgcguccugccgca

SEQ ID NO: 355250 - RNA, 23 nt, Human
ccucccuuggcaaaugccuggga

SEQ ID NO: 355251 - RNA, 20 nt, Human
ccugcucuuccguauucugu

SEQ ID NO: 355252 - RNA, 18 nt, Human
ccuucucagcccgaaaau

SEQ ID NO: 355253 - RNA, 23 nt, Human
cgaaacuuuggggcaucugagac

SEQ ID NO: 355254 - RNA, 18 nt, Human
cggccaguggcggcccuc

SEQ ID NO: 355255 - RNA, 18 nt, Human
cucacugcagcauccuca

SEQ ID NO: 355256 - RNA, 24 nt, Human
cucccggaggugcggcgagcagga

SEQ ID NO: 355257 - RNA, 23 nt, Human
cuccgcggccgcaagcugcugcc

SEQ ID NO: 355258 - RNA, 18 nt, Human
cugaagcuguugcuuccu

SEQ ID NO: 355259 - RNA, 20 nt, Human
cugcagaaaugaaacaaaua

SEQ ID NO: 355260 - RNA, 19 nt, Human
cugccuucucagcccgaaa

SEQ ID NO: 355261 - RNA, 21 nt, Human
cugcuggcucucacuuuccgc

SEQ ID NO: 355262 - RNA, 20 nt, Human
cugggcuugaccuuaauugu

SEQ ID NO: 355263 - RNA, 23 nt, Human
cuuuggggcaucugagacuggcu

SEQ ID NO: 355264 - RNA, 22 nt, Human
cuuuugguucugaaauugcuga

SEQ ID NO: 355265 - RNA, 20 nt, Human
gaaguuaugacacagcaacc

SEQ ID NO: 355266 - RNA, 21 nt, Human
gagaauucccauuuagagagc

SEQ ID NO: 355267 - RNA, 23 nt, Human
gaggcucccuccccacccugccc

SEQ ID NO: 355268 - RNA, 19 nt, Human
gccacacagcuacacuacc

SEQ ID NO: 355269 - RNA, 18 nt, Human
gccauggcuacccugggg

SEQ ID NO: 355270 - RNA, 20 nt, Human
gccccgggcucauaggaacc

SEQ ID NO: 355271 - RNA, 20 nt, Human
gcguggcuauggagggaaag

SEQ ID NO: 355272 - RNA, 18 nt, Human
gcugccuccgccgccucc

SEQ ID NO: 355273 - RNA, 21 nt, Human
gcugcugcccgguccccccgg

SEQ ID NO: 355274 - RNA, 24 nt, Human
ggaacaggcaggcuguucugaauu

SEQ ID NO: 355275 - RNA, 19 nt, Human
ggacaaucauaaauguccu

SEQ ID NO: 355276 - RNA, 25 nt, Human
ggacaaucauaaauguccucaaagu

SEQ ID NO: 355277 - RNA, 21 nt, Human
ggagagcugcuccucugggaa

SEQ ID NO: 355278 - RNA, 20 nt, Human
ggcaggcacaggcugccccu

SEQ ID NO: 355279 - RNA, 21 nt, Human
ggccaguggcggcccucggcc

SEQ ID NO: 355280 - RNA, 22 nt, Human
ggcgcaguccccagcguugccc

SEQ ID NO: 355281 - RNA, 25 nt, Human
ggcggcgggcgcgcggcacugacuc

SEQ ID NO: 355282 - RNA, 22 nt, Human
ggcugaaaaagcaugaaaauaa

SEQ ID NO: 355283 - RNA, 21 nt, Human
gucaggcuagggccgcagggg

SEQ ID NO: 355284 - RNA, 21 nt, Human
guccccagcacuuuacgauga

SEQ ID NO: 355285 - RNA, 18 nt, Human
uaaaaaaacaacacaaau

SEQ ID NO: 355286 - RNA, 21 nt, Human
uaaaaugcaguuaaaaaaaca

SEQ ID NO: 355287 - RNA, 21 nt, Human
uaaaauguuuuuggaauccuc

SEQ ID NO: 355288 - RNA, 23 nt, Human
uaacccacagguaccaagagcca

SEQ ID NO: 355289 - RNA, 24 nt, Human
uaagcucuucacccaauuucacaa

SEQ ID NO: 355290 - RNA, 21 nt, Human
uagaauccuaagcucuucacc

SEQ ID NO: 355291 - RNA, 22 nt, Human
uagaauccuaagcucuucaccc

SEQ ID NO: 355292 - RNA, 20 nt, Human
uaggaucuaaaagaggagua

SEQ ID NO: 355293 - RNA, 19 nt, Human
uaggggguguuagguucua

SEQ ID NO: 355294 - RNA, 20 nt, Human
uagggugcucuccucaaaca

SEQ ID NO: 355295 - RNA, 23 nt, Human
uagguaacuaggcgggcaugcug

SEQ ID NO: 355296 - RNA, 21 nt, Human
uaugacacagcaaccaguuac

SEQ ID NO: 355297 - RNA, 24 nt, Human
uauucuucaaagauuuaacugagu

SEQ ID NO: 355298 - RNA, 21 nt, Human
uauuuugagcucuuucugaag

SEQ ID NO: 355299 - RNA, 23 nt, Human
ucacccaauuucacaauucaccc

SEQ ID NO: 355300 - RNA, 22 nt, Human
ucacugcagcauccucacuggg

SEQ ID NO: 355301 - RNA, 22 nt, Human
ucagaucaugccccgggcucau

SEQ ID NO: 355302 - RNA, 21 nt, Human
uccaaaauuacaggcaaauca

SEQ ID NO: 355303 - RNA, 25 nt, Human
uccacuaaggacucugccgcagaga

SEQ ID NO: 355304 - RNA, 18 nt, Human
ucccaggacucuauccag

SEQ ID NO: 355305 - RNA, 19 nt, Human
uccccagcguugcccggcu

SEQ ID NO: 355306 - RNA, 19 nt, Human
uccccgcgcgcguccugcc

SEQ ID NO: 355307 - RNA, 19 nt, Human
ucccuuggcaaaugccugg

SEQ ID NO: 355308 - RNA, 18 nt, Human
uccugccgcaaacuucca

SEQ ID NO: 355309 - RNA, 22 nt, Human
uccugccgcaaacuuccaggga

SEQ ID NO: 355310 - RNA, 20 nt, Human
uccugugcaguggcugcugc

SEQ ID NO: 355311 - RNA, 23 nt, Human
ucuccgcgacgucggggcugccu

SEQ ID NO: 355312 - RNA, 18 nt, Human
ucugccaaggaccuccca

SEQ ID NO: 355313 - RNA, 24 nt, Human
ugaaacaaauauauguaaaaagug

SEQ ID NO: 355314 - RNA, 23 nt, Human
ugaccacggguucccgggcacuu

SEQ ID NO: 355315 - RNA, 19 nt, Human
ugagaaaaacagauuuuag

SEQ ID NO: 355316 - RNA, 23 nt, Human
ugagacagacggugguaaaaccc

SEQ ID NO: 355317 - RNA, 19 nt, Human
ugauuuucauacuggaguc

SEQ ID NO: 355318 - RNA, 22 nt, Human
ugcagagauguuuugcuuuuga

SEQ ID NO: 355319 - RNA, 23 nt, Human
ugcaguggcugcugcuccacauu

SEQ ID NO: 355320 - RNA, 19 nt, Human
ugcccgguccccccggcca

SEQ ID NO: 355321 - RNA, 21 nt, Human
ugccuacagagagccucccuu

SEQ ID NO: 355322 - RNA, 20 nt, Human
ugccuccgccgccuccccgc

SEQ ID NO: 355323 - RNA, 21 nt, Human
ugcgggggaacaggcaggcug

SEQ ID NO: 355324 - RNA, 22 nt, Human
uggaaaugguuugucaccuccu

SEQ ID NO: 355325 - RNA, 19 nt, Human
uggauggggacaccccacc

SEQ ID NO: 355326 - RNA, 18 nt, Human
uggcuauggagggaaagg

SEQ ID NO: 355327 - RNA, 18 nt, Human
ugggaaaaacugcagaga

SEQ ID NO: 355328 - RNA, 21 nt, Human
ugggaagcagccucggacgga

SEQ ID NO: 355329 - RNA, 20 nt, Human
ugggcuugaccuuaauugua

SEQ ID NO: 355330 - RNA, 18 nt, Human
uggguauaagcauuggcc

SEQ ID NO: 355331 - RNA, 18 nt, Human
ugguaugagucuguuucc

SEQ ID NO: 355332 - RNA, 22 nt, Human
uguccuguguaucugcuggcaa

SEQ ID NO: 355333 - RNA, 22 nt, Human
ugucuuggggaucagaucaugc

SEQ ID NO: 355334 - RNA, 21 nt, Human
ugugaaaaggaaaaaacauga

SEQ ID NO: 355335 - RNA, 21 nt, Human
ugugguaugagucuguuucca

SEQ ID NO: 355336 - RNA, 24 nt, Human
ugugugugaccacggguucccggg

SEQ ID NO: 355337 - RNA, 28 nt, Human
uguuggaaaugguuugucaaccgugagg

SEQ ID NO: 355338 - RNA, 26 nt, Human
uguuuugaaaacuacugccuucucag

SEQ ID NO: 355339 - RNA, 22 nt, Human
uucacaguauucaaagcuuuug

SEQ ID NO: 355340 - RNA, 19 nt, Human
uugcacuuuuccucccugc

SEQ ID NO: 355341 - RNA, 19 nt, Human
uuggagcguggcuauggag

SEQ ID NO: 355342 - RNA, 21 nt, Human
uuucugaagcuguugcuuccu

SEQ ID NO: 355343 - RNA, 18 nt, Human
uuugucaccuccuccugu

SEQ ID NO: 355344 - RNA, 24 nt, Human
aaauggucagccgugcucuggagc

SEQ ID NO: 355345 - RNA, 18 nt, Human
agacuggagcagcuagga

SEQ ID NO: 355346 - RNA, 18 nt, Human
caccgggaggacagcgcg

SEQ ID NO: 355347 - RNA, 18 nt, Human
cagcgcgggcgaggcgcu

SEQ ID NO: 355348 - RNA, 21 nt, Human
cagcuccggggggcuccgacc

SEQ ID NO: 355349 - RNA, 19 nt, Human
ccccgaaaagcuggcagcc

SEQ ID NO: 355350 - RNA, 22 nt, Human
ccccgagggggcagagggagcg

SEQ ID NO: 355351 - RNA, 24 nt, Human
ccggcggcuggggcgcggagaagc

SEQ ID NO: 355352 - RNA, 18 nt, Human
cuggagcaggccugucgg

SEQ ID NO: 355353 - RNA, 20 nt, Human
cuugucccgggcccgcucuc

SEQ ID NO: 355354 - RNA, 22 nt, Human
gcagagggagcggagccgggga

SEQ ID NO: 355355 - RNA, 24 nt, Human
gcagcuccggggggcuccgacccg

SEQ ID NO: 355356 - RNA, 21 nt, Human
gccggcggcuggggcgcggag

SEQ ID NO: 355357 - RNA, 22 nt, Human
gcgaccccgagggggcagaggg

SEQ ID NO: 355358 - RNA, 20 nt, Human
gcgcgaccccgagggggcag

SEQ ID NO: 355359 - RNA, 24 nt, Human
gcgcgaccccgagggggccggcgc

SEQ ID NO: 355360 - RNA, 23 nt, Human
gggaacgggagcugagaucccgg

SEQ ID NO: 355361 - RNA, 24 nt, Human
gggcgcgcgaccccgagggggcag

SEQ ID NO: 355362 - RNA, 21 nt, Human
ucgcugggugcgacucggggc

SEQ ID NO: 355363 - RNA, 19 nt, Human
ugcaaaaggcagggggaag

SEQ ID NO: 355364 - RNA, 21 nt, Human
uggagcaggccugucggagcc

SEQ ID NO: 355365 - RNA, 19 nt, Human
uugucccgggcccgcucuc

SEQ ID NO: 355366 - RNA, 22 nt, Human
uugucccgggcccgcucucuuc

SEQ ID NO: 355367 - RNA, 18 nt, Human
aaaaaauccccuuucauc

SEQ ID NO: 355368 - RNA, 23 nt, Human
aaaauccccuuucaucacaaaaa

SEQ ID NO: 355369 - RNA, 19 nt, Human
aaaggaggcagguuaugaa

SEQ ID NO: 355370 - RNA, 20 nt, Human
aacaacagauaucaaaaggu

SEQ ID NO: 355371 - RNA, 24 nt, Human
aagaaaauauuuaaaugaagaaaa

SEQ ID NO: 355372 - RNA, 18 nt, Human
acaaagaaaaacugaagc

SEQ ID NO: 355373 - RNA, 20 nt, Human
acuauggaauauaacacagc

SEQ ID NO: 355374 - RNA, 20 nt, Human
agggcaaggggcacauggcc

SEQ ID NO: 355375 - RNA, 21 nt, Human
aguaagaugagugacauaccu

SEQ ID NO: 355376 - RNA, 23 nt, Human
auccccuuucaucacaaaaaucc

SEQ ID NO: 355377 - RNA, 19 nt, Human
augguacagacaaacucac

SEQ ID NO: 355378 - RNA, 26 nt, Human
caaagaaaaacugaagcauagccuua

SEQ ID NO: 355379 - RNA, 25 nt, Human
caacagauaucaaaagguaauaaaa

SEQ ID NO: 355380 - RNA, 22 nt, Human
caacaguuuguugaguaaugca

SEQ ID NO: 355381 - RNA, 19 nt, Human
cacagcuguuagaaaugag

SEQ ID NO: 355382 - RNA, 19 nt, Human
caccuaaguauccaauagc

SEQ ID NO: 355383 - RNA, 24 nt, Human
caccuucuguaccaaagggcaaac

SEQ ID NO: 355384 - RNA, 18 nt, Human
cacuaacauugcaacaac

SEQ ID NO: 355385 - RNA, 18 nt, Human
cagcaaagcggggccgcg

SEQ ID NO: 355386 - RNA, 23 nt, Human
cagugaagaaaccaccuaaguau

SEQ ID NO: 355387 - RNA, 22 nt, Human
cauccuguaaggaagucggaag

SEQ ID NO: 355388 - RNA, 24 nt, Human
cauuauaauuuuccauaugcuacu

SEQ ID NO: 355389 - RNA, 22 nt, Human
cccccaaacuccagucggcagc

SEQ ID NO: 355390 - RNA, 23 nt, Human
ccggcagacagaaagcgccuucu

SEQ ID NO: 355391 - RNA, 22 nt, Human
cgcgggguccggccgcggagcu

SEQ ID NO: 355392 - RNA, 18 nt, Human
cggcagacagaaagcgcc

SEQ ID NO: 355393 - RNA, 21 nt, Human
cuagcuaaaaacagaaacuga

SEQ ID NO: 355394 - RNA, 24 nt, Human
cucaucuuucgcugucccuucgcc

SEQ ID NO: 355395 - RNA, 18 nt, Human
cucuguguaguggagagu

SEQ ID NO: 355396 - RNA, 24 nt, Human
cuuccugccacccucaucuuucgc

SEQ ID NO: 355397 - RNA, 18 nt, Human
gcaaggggcacauggccu

SEQ ID NO: 355398 - RNA, 18 nt, Human
gcugucccuucgccgagg

SEQ ID NO: 355399 - RNA, 20 nt, Human
ggcaaagaaaauauuuaaau

SEQ ID NO: 355400 - RNA, 19 nt, Human
ggccgcgggguccggccgc

SEQ ID NO: 355401 - RNA, 25 nt, Human
ggccgcgggguccggccgcggagcu

SEQ ID NO: 355402 - RNA, 22 nt, Human
uaaaacaucacuaacauugcaa

SEQ ID NO: 355403 - RNA, 21 nt, Human
uaacaagcauuauuuucccua

SEQ ID NO: 355404 - RNA, 23 nt, Human
uaaccaaaaaacaggaauccaga

SEQ ID NO: 355405 - RNA, 26 nt, Human
uaaccaaaaaacaggaauccagacau

SEQ ID NO: 355406 - RNA, 21 nt, Human
uaagaggguguugacaagaag

SEQ ID NO: 355407 - RNA, 24 nt, Human
uaagaugagugacauaccucucuu

SEQ ID NO: 355408 - RNA, 18 nt, Human
uaagcaaacaccuggaga

SEQ ID NO: 355409 - RNA, 19 nt, Human
uaagcaaacaccuggagaa

SEQ ID NO: 355410 - RNA, 25 nt, Human
uaagcaaacaccuggagaauaauau

SEQ ID NO: 355411 - RNA, 21 nt, Human
uacaaagaaaaacugaagcau

SEQ ID NO: 355412 - RNA, 18 nt, Human
uagcuaaaaacagaaacu

SEQ ID NO: 355413 - RNA, 24 nt, Human
uaggcaaagaaaauauuuaaauga

SEQ ID NO: 355414 - RNA, 21 nt, Human
uccacaauuaugaaauuuguu

SEQ ID NO: 355415 - RNA, 19 nt, Human
uccccuuucaucacaaaaa

SEQ ID NO: 355416 - RNA, 26 nt, Human
ucggaagucuccgcuuuggaaacuag

SEQ ID NO: 355417 - RNA, 20 nt, Human
ucggcagcaaagcggggccu

SEQ ID NO: 355418 - RNA, 24 nt, Human
ugaagaaaccaccuaaguauccaa

SEQ ID NO: 355419 - RNA, 24 nt, Human
ugaagagcacugcagugaguuguu

SEQ ID NO: 355420 - RNA, 22 nt, Human
ugcaacaacagauaucaaaagg

SEQ ID NO: 355421 - RNA, 21 nt, Human
ugcaagaugugucuaugaaga

SEQ ID NO: 355422 - RNA, 21 nt, Human
ugguacagacaaacucacugu

SEQ ID NO: 355423 - RNA, 23 nt, Human
uguaacaagcauuauuuucccua

SEQ ID NO: 355424 - RNA, 21 nt, Human
uucaguauugucagugaagaa

SEQ ID NO: 355425 - RNA, 18 nt, Human
uucauuccacuacuguuc

SEQ ID NO: 355426 - RNA, 22 nt, Human
uucccccaaacuccagucggca

SEQ ID NO: 355427 - RNA, 21 nt, Human
uucgcugucccuucgccgagg

SEQ ID NO: 355428 - RNA, 20 nt, Human
uucuagcuaaaaacagaaac

SEQ ID NO: 355429 - RNA, 23 nt, Human
aacauucgugaaaacacccucca

SEQ ID NO: 355430 - RNA, 24 nt, Human
acccagccgccgccgccgccgccg

SEQ ID NO: 355431 - RNA, 19 nt, Human
acucugaaaccuccgccuc

SEQ ID NO: 355432 - RNA, 22 nt, Human
agaaaacccaacccugcaugua

SEQ ID NO: 355433 - RNA, 19 nt, Human
agagggcaagcaaggcaca

SEQ ID NO: 355434 - RNA, 20 nt, Human
agccuggaaguuggggcggg

SEQ ID NO: 355435 - RNA, 19 nt, Human
agccugggcuccgugccca

SEQ ID NO: 355436 - RNA, 20 nt, Human
aggcaggggguguggcugga

SEQ ID NO: 355437 - RNA, 24 nt, Human
aggcaggggguguggcuggaggca

SEQ ID NO: 355438 - RNA, 22 nt, Human
agggaccccaggaccccugggu

SEQ ID NO: 355439 - RNA, 20 nt, Human
aucccagggaccccaggacc

SEQ ID NO: 355440 - RNA, 20 nt, Human
caaggugaggccccaccacc

SEQ ID NO: 355441 - RNA, 25 nt, Human
caccuucuacucugaaaccuccgcc

SEQ ID NO: 355442 - RNA, 27 nt, Human
caccuuucccuuacccucuccuccccu

SEQ ID NO: 355443 - RNA, 21 nt, Human
ccaccuuucccuuacccucuc

SEQ ID NO: 355444 - RNA, 22 nt, Human
ccaguagggccgggucagccug

SEQ ID NO: 355445 - RNA, 19 nt, Human
ccccaggaccccuggguca

SEQ ID NO: 355446 - RNA, 20 nt, Human
cccccggcccugacucuacc

SEQ ID NO: 355447 - RNA, 18 nt, Human
ccgccgccgccgccgccg

SEQ ID NO: 355448 - RNA, 21 nt, Human
ccgccgccgccgccgccgcgg

SEQ ID NO: 355449 - RNA, 21 nt, Human
ccggcgugcgcccccggcccu

SEQ ID NO: 355450 - RNA, 21 nt, Human
ccucagggugcccugagcccc

SEQ ID NO: 355451 - RNA, 24 nt, Human
ccucagggugcccugagccccucc

SEQ ID NO: 355452 - RNA, 24 nt, Human
ccuccgccucagggugcccugagc

SEQ ID NO: 355453 - RNA, 18 nt, Human
ccugcgcugcgggugccc

SEQ ID NO: 355454 - RNA, 21 nt, Human
ccugcgcugcgggugccccga

SEQ ID NO: 355455 - RNA, 22 nt, Human
ccuuaggccuugugccaguaac

SEQ ID NO: 355456 - RNA, 18 nt, Human
cgacagaggggagcugga

SEQ ID NO: 355457 - RNA, 23 nt, Human
cggaccagaagggggucuaugcc

SEQ ID NO: 355458 - RNA, 19 nt, Human
cuaugccgaggcugggcug

SEQ ID NO: 355459 - RNA, 18 nt, Human
cucacagcaguagcaaua

SEQ ID NO: 355460 - RNA, 24 nt, Human
cuccgccucagggugcccugagcc

SEQ ID NO: 355461 - RNA, 21 nt, Human
cuccugagagaggaagcccaa

SEQ ID NO: 355462 - RNA, 19 nt, Human
cugcgcccucuccaggguc

SEQ ID NO: 355463 - RNA, 19 nt, Human
gacucuacccagccgccgc

SEQ ID NO: 355464 - RNA, 19 nt, Human
gagaagcagaggcugagga

SEQ ID NO: 355465 - RNA, 20 nt, Human
gauaaaagggagaagcagag

SEQ ID NO: 355466 - RNA, 20 nt, Human
gauaaaagggagaagcagag

SEQ ID NO: 355467 - RNA, 21 nt, Human
gcaagcuggggaaggcagggg

SEQ ID NO: 355468 - RNA, 23 nt, Human
ggagcucugggccuuggggcagg

SEQ ID NO: 355469 - RNA, 20 nt, Human
ggauaaaagggagaagcaga

SEQ ID NO: 355470 - RNA, 21 nt, Human
ggccuuggggcagggaaaugg

SEQ ID NO: 355471 - RNA, 25 nt, Human
ggggagcucugggccuuggggcagg

SEQ ID NO: 355472 - RNA, 25 nt, Human
ggucaaaaaggacagccugggcucc

SEQ ID NO: 355473 - RNA, 22 nt, Human
ggugcccugagccccuccaccu

SEQ ID NO: 355474 - RNA, 22 nt, Human
guacaggggcgguggggagaac

SEQ ID NO: 355475 - RNA, 19 nt, Human
gugcccugagccccuccac

SEQ ID NO: 355476 - RNA, 18 nt, Human
uacccagccgccgccgcc

SEQ ID NO: 355477 - RNA, 18 nt, Human
ucacagcaguagcaauaa

SEQ ID NO: 355478 - RNA, 24 nt, Human
uccccugccuacuuucugagaccc

SEQ ID NO: 355479 - RNA, 23 nt, Human
ucccucuucaaggugaggcccca

SEQ ID NO: 355480 - RNA, 28 nt, Human
ucccucuucaaggugaggccccaccagu

SEQ ID NO: 355481 - RNA, 18 nt, Human
ucccuuacccucuccucc

SEQ ID NO: 355482 - RNA, 19 nt, Human
ucccuuacccucuccuccc

SEQ ID NO: 355483 - RNA, 21 nt, Human
ucuaugccgaggcugggcugg

SEQ ID NO: 355484 - RNA, 26 nt, Human
ucuaugccgaggcugggcugggcuug

SEQ ID NO: 355485 - RNA, 19 nt, Human
ugagccccuccaccuuucc

SEQ ID NO: 355486 - RNA, 18 nt, Human
ugaggccccaccaccgac

SEQ ID NO: 355487 - RNA, 18 nt, Human
ugcccugagccccuccac

SEQ ID NO: 355488 - RNA, 28 nt, Human
ugcgcccccggcccugacucuacccagg

SEQ ID NO: 355489 - RNA, 19 nt, Human
uggaaguuggggcggggcc

SEQ ID NO: 355490 - RNA, 19 nt, Human
uggaggcacugagacccua

SEQ ID NO: 355491 - RNA, 24 nt, Human
uggcagccugcgcugcgggugccc

SEQ ID NO: 355492 - RNA, 18 nt, Human
uguggcuggaggcacuga

SEQ ID NO: 355493 - RNA, 22 nt, Human
uguuccggcgugcgcccccggc

SEQ ID NO: 355494 - RNA, 22 nt, Human
uucacccagaugaagaagcccu

SEQ ID NO: 355495 - RNA, 20 nt, Human
aaaaaauccacacgaaugcg

SEQ ID NO: 355496 - RNA, 22 nt, Human
aaaauacaauuuaucaaagaca

SEQ ID NO: 355497 - RNA, 23 nt, Human
aaaauacaauuuaucaaagacac

SEQ ID NO: 355498 - RNA, 20 nt, Human
aaacccccccuuuccccuuu

SEQ ID NO: 355499 - RNA, 20 nt, Human
aaaccuuuauaaccagcaaa

SEQ ID NO: 355500 - RNA, 24 nt, Human
aacaguuugaauuaaaaaaugaaa

SEQ ID NO: 355501 - RNA, 19 nt, Human
aaccagcaaaaccaaaaaa

SEQ ID NO: 355502 - RNA, 23 nt, Human
aaccuacuuauucuucaacucca

SEQ ID NO: 355503 - RNA, 19 nt, Human
aagaagcauuuuguauuua

SEQ ID NO: 355504 - RNA, 21 nt, Human
aagggaauguagauguuagga

SEQ ID NO: 355505 - RNA, 22 nt, Human
aagucuaaaacuaaaucuaaug

SEQ ID NO: 355506 - RNA, 19 nt, Human
aaucuaaugcucccauuug

SEQ ID NO: 355507 - RNA, 25 nt, Human
aauucauccucccuauccuauccac

SEQ ID NO: 355508 - RNA, 29 nt, Human
acaaaaugggcaauauaauuuugccccug

SEQ ID NO: 355509 - RNA, 18 nt, Human
acaauuccaucgugcauc

SEQ ID NO: 355510 - RNA, 25 nt, Human
accacaaacacccccaacaucccag

SEQ ID NO: 355511 - RNA, 20 nt, Human
accuuuauaaccagcaaaac

SEQ ID NO: 355512 - RNA, 22 nt, Human
accuuuauaaccagcaaaacca

SEQ ID NO: 355513 - RNA, 22 nt, Human
agcaaaaccaaaaaagaggagg

SEQ ID NO: 355514 - RNA, 21 nt, Human
agcaggucacacauuaacagu

SEQ ID NO: 355515 - RNA, 21 nt, Human
agcauucuuaauccaucucuu

SEQ ID NO: 355516 - RNA, 22 nt, Human
aggaaaaaaaaaaucuuuggaa

SEQ ID NO: 355517 - RNA, 25 nt, Human
aggcaaaauguuagauacuguaauc

SEQ ID NO: 355518 - RNA, 24 nt, Human
aguuguaacuaagcacugugacaa

SEQ ID NO: 355519 - RNA, 20 nt, Human
auaaaggaaaacuguauaca

SEQ ID NO: 355520 - RNA, 24 nt, Human
caaaaaacgcaaaacacaauucca

SEQ ID NO: 355521 - RNA, 22 nt, Human
caaaaaagaggaggcaaaaugu

SEQ ID NO: 355522 - RNA, 22 nt, Human
caaaacacaauuccaucgugca

SEQ ID NO: 355523 - RNA, 22 nt, Human
caaagcaauuguagcuaaagac

SEQ ID NO: 355524 - RNA, 24 nt, Human
caaucgucaaaaauaggaaaaaaa

SEQ ID NO: 355525 - RNA, 22 nt, Human
caauugccaagguuuaaaaagc

SEQ ID NO: 355526 - RNA, 28 nt, Human
cacaauaucacagucugaagaguaugga

SEQ ID NO: 355527 - RNA, 19 nt, Human
cacaauccuuaauccaaag

SEQ ID NO: 355528 - RNA, 19 nt, Human
cacauguacaccaacagca

SEQ ID NO: 355529 - RNA, 20 nt, Human
cagcaggucacacauuaacc

SEQ ID NO: 355530 - RNA, 23 nt, Human
cagcguauuacagguuucguggu

SEQ ID NO: 355531 - RNA, 21 nt, Human
cagguaagauaaccacaaaca

SEQ ID NO: 355532 - RNA, 24 nt, Human
cagugagcccucuccaauccaaac

SEQ ID NO: 355533 - RNA, 21 nt, Human
caguucaacugauaaugccaa

SEQ ID NO: 355534 - RNA, 26 nt, Human
cauguacaccaacagcaggucacaca

SEQ ID NO: 355535 - RNA, 23 nt, Human
cauuuugucuuaaaaaaaugaaa

SEQ ID NO: 355536 - RNA, 24 nt, Human
ccaacaucccaguucacacaaacc

SEQ ID NO: 355537 - RNA, 22 nt, Human
ccagcaaaaccaaaaaagagga

SEQ ID NO: 355538 - RNA, 28 nt, Human
ccagguccucgcuuugcuccuuuuacca

SEQ ID NO: 355539 - RNA, 25 nt, Human
cccccccuuuccccuuuaaauguuu

SEQ ID NO: 355540 - RNA, 22 nt, Human
ccccccuuuccccuuuaaaugu

SEQ ID NO: 355541 - RNA, 18 nt, Human
ccuguacccacauguaca

SEQ ID NO: 355542 - RNA, 25 nt, Human
cgucaaaaauaggaaaaaaaaaauc

SEQ ID NO: 355543 - RNA, 19 nt, Human
cuccagguccucgcuuugc

SEQ ID NO: 355544 - RNA, 20 nt, Human
cucccauuugcaauuuaauu

SEQ ID NO: 355545 - RNA, 19 nt, Human
cuggggaaugaugaguuau

SEQ ID NO: 355546 - RNA, 23 nt, Human
cuucagauaugucuacagaaaga

SEQ ID NO: 355547 - RNA, 22 nt, Human
gaagggaauguagauguuagga

SEQ ID NO: 355548 - RNA, 19 nt, Human
gagcaaaauaaguugcuac

SEQ ID NO: 355549 - RNA, 25 nt, Human
gagcaaggggauauuacaagaaugc

SEQ ID NO: 355550 - RNA, 19 nt, Human
gauguuaggagcaagggga

SEQ ID NO: 355551 - RNA, 19 nt, Human
gcuacaaaaugggcaauau

SEQ ID NO: 355552 - RNA, 19 nt, Human
ggcaggaauccacuccuau

SEQ ID NO: 355553 - RNA, 21 nt, Human
gggcuccaaucgucaaaaaua

SEQ ID NO: 355554 - RNA, 22 nt, Human
gucaaaaauaggaaaaaaaaaa

SEQ ID NO: 355555 - RNA, 19 nt, Human
gugacuuacugauuuacua

SEQ ID NO: 355556 - RNA, 21 nt, Human
gugagcccucuccaauccaaa

SEQ ID NO: 355557 - RNA, 19 nt, Human
uaaaaacacccuguaccca

SEQ ID NO: 355558 - RNA, 25 nt, Human
uaaacaaacccccccuuuccccuuu

SEQ ID NO: 355559 - RNA, 20 nt, Human
uaacaguuguaacuaagcac

SEQ ID NO: 355560 - RNA, 23 nt, Human
uaaccacaaacacccccaacauc

SEQ ID NO: 355561 - RNA, 18 nt, Human
uaagauaaccacaaacac

SEQ ID NO: 355562 - RNA, 19 nt, Human
uaagauaaccacaaacacc

SEQ ID NO: 355563 - RNA, 20 nt, Human
uaauucauccucccuauccu

SEQ ID NO: 355564 - RNA, 21 nt, Human
uacagguuucgugguugcaag

SEQ ID NO: 355565 - RNA, 22 nt, Human
uaccaaaaaacgcaaaacacaa

SEQ ID NO: 355566 - RNA, 23 nt, Human
uaccaaaaaacgcaaaacacaau

SEQ ID NO: 355567 - RNA, 20 nt, Human
uacccacauguacaccaaca

SEQ ID NO: 355568 - RNA, 19 nt, Human
uagcuaaagacaacugaau

SEQ ID NO: 355569 - RNA, 25 nt, Human
uaucaaauuccccaaaacaaguuuc

SEQ ID NO: 355570 - RNA, 22 nt, Human
ucagauaaauuuuagaaacuua

SEQ ID NO: 355571 - RNA, 24 nt, Human
uccaaagcauucuuaauccaucuc

SEQ ID NO: 355572 - RNA, 20 nt, Human
ucccgcuccaugaauccugg

SEQ ID NO: 355573 - RNA, 22 nt, Human
uccucgcuuugcuccuuuuacc

SEQ ID NO: 355574 - RNA, 25 nt, Human
ucgcuuugcuccuuuuaccaaaaaa

SEQ ID NO: 355575 - RNA, 23 nt, Human
ugaaaagcaagauaaacauaaga

SEQ ID NO: 355576 - RNA, 23 nt, Human
ugacaaauuagccaguucuuccc

SEQ ID NO: 355577 - RNA, 25 nt, Human
ugccaagguuuaaaaagcaaagcaa

SEQ ID NO: 355578 - RNA, 23 nt, Human
uggaacucuauauuuugcuuuca

SEQ ID NO: 355579 - RNA, 18 nt, Human
uggauuuaaaaacacccu

SEQ ID NO: 355580 - RNA, 23 nt, Human
uuaaaaacacccuguacccacau

SEQ ID NO: 355581 - RNA, 20 nt, Human
uuaaaaguauucccaacuag

SEQ ID NO: 355582 - RNA, 23 nt, Human
uuaaggaaaauguauauaaucau

SEQ ID NO: 355583 - RNA, 24 nt, Human
uuacuguacagcguauuacagguu

SEQ ID NO: 355584 - RNA, 20 nt, Human
uuccccaaaacaaguuucug

SEQ ID NO: 355585 - RNA, 31 nt, Human
uuccccagguaagauaaccacaaacaccccu

SEQ ID NO: 355586 - RNA, 23 nt, Human
uugccaagguuuaaaaagcaaag

SEQ ID NO: 355587 - RNA, 23 nt, Human
uuggagucauaccauugccucca

SEQ ID NO: 355588 - RNA, 18 nt, Human
uugguuggggcaggaauc

SEQ ID NO: 355589 - RNA, 20 nt, Human
uuuuaccaaaaaacgcaaaa

SEQ ID NO: 355590 - RNA, 25 nt, Human
uuuuuuguuuuuuaaaaaauguuua

SEQ ID NO: 355591 - RNA, 18 nt, Human
aaaggccuugccgcagaa

SEQ ID NO: 355592 - RNA, 26 nt, Human
aagucagcacuauauaacaacagggg

SEQ ID NO: 355593 - RNA, 18 nt, Human
aagugcaguugucaggca

SEQ ID NO: 355594 - RNA, 22 nt, Human
accucaaauauccaaauccaau

SEQ ID NO: 355595 - RNA, 22 nt, Human
agaaaacaggaaacagccaagc

SEQ ID NO: 355596 - RNA, 24 nt, Human
agacaaauguuacaaaauaaccuu

SEQ ID NO: 355597 - RNA, 19 nt, Human
agcacuauauaacaaaaug

SEQ ID NO: 355598 - RNA, 22 nt, Human
agucaaucucuugacagcuuua

SEQ ID NO: 355599 - RNA, 23 nt, Human
caccugaaaagucuuuauacaaa

SEQ ID NO: 355600 - RNA, 24 nt, Human
cacguuuuccuuaaaagucaggag

SEQ ID NO: 355601 - RNA, 25 nt, Human
cacuauauaacaaaaugaaauuuua

SEQ ID NO: 355602 - RNA, 18 nt, Human
cagaauauucauaagcaa

SEQ ID NO: 355603 - RNA, 22 nt, Human
cagcacuauauaacaaaaugaa

SEQ ID NO: 355604 - RNA, 20 nt, Human
caggaggccacaaauuaggu

SEQ ID NO: 355605 - RNA, 26 nt, Human
caucuuuacacaggagcaaucgggag

SEQ ID NO: 355606 - RNA, 22 nt, Human
ccgcagaacagcacggacgggc

SEQ ID NO: 355607 - RNA, 19 nt, Human
cgccucucaggcaguugcc

SEQ ID NO: 355608 - RNA, 21 nt, Human
cggagccccgcgaacuggcgc

SEQ ID NO: 355609 - RNA, 23 nt, Human
cggagccccgcgaacuggcgccg

SEQ ID NO: 355610 - RNA, 22 nt, Human
cuguuuaauuucaaacaaaaaa

SEQ ID NO: 355611 - RNA, 28 nt, Human
gacuggaagugcaguugucccgccgacg

SEQ ID NO: 355612 - RNA, 24 nt, Human
gauaugaucagauuuaccauuuuu

SEQ ID NO: 355613 - RNA, 19 nt, Human
gcaacaaaauggcacauaa

SEQ ID NO: 355614 - RNA, 18 nt, Human
gcuuccuuaacauuuucc

SEQ ID NO: 355615 - RNA, 18 nt, Human
ggcgccggcuuccucagc

SEQ ID NO: 355616 - RNA, 24 nt, Human
ggggacacugggaaaggccuugcc

SEQ ID NO: 355617 - RNA, 20 nt, Human
guccuuuuuccccaaguccu

SEQ ID NO: 355618 - RNA, 21 nt, Human
uaaccagcauuacucaacugc

SEQ ID NO: 355619 - RNA, 18 nt, Human
uaagagaagagauuagaa

SEQ ID NO: 355620 - RNA, 26 nt, Human
uaagagaagagauuagaauuguguuu

SEQ ID NO: 355621 - RNA, 25 nt, Human
uacaaaauaaccuuuucaauagcca

SEQ ID NO: 355622 - RNA, 21 nt, Human
uacaaccauuugcuuccuuaa

SEQ ID NO: 355623 - RNA, 24 nt, Human
uauaugcaaggcccgggugacugg

SEQ ID NO: 355624 - RNA, 24 nt, Human
ucugcacugcaacacgccaccuua

SEQ ID NO: 355625 - RNA, 24 nt, Human
ugaauaacagcaacaaaauggcac

SEQ ID NO: 355626 - RNA, 18 nt, Human
ugacuggaagugcaguug

SEQ ID NO: 355627 - RNA, 20 nt, Human
ugaucagauuuaccauuuuu

SEQ ID NO: 355628 - RNA, 23 nt, Human
ugcacaaaaauacauaagagaag

SEQ ID NO: 355629 - RNA, 24 nt, Human
ugcuacacaacugcgccuagugca

SEQ ID NO: 355630 - RNA, 22 nt, Human
ugggaaaggccuugccgcagaa

SEQ ID NO: 355631 - RNA, 22 nt, Human
uguguaauggcugcacacggug

SEQ ID NO: 355632 - RNA, 24 nt, Human
uucaaaaaaucaagucuuuucacc

SEQ ID NO: 355633 - RNA, 21 nt, Human
uucaauagccaguugcuuguu

SEQ ID NO: 355634 - RNA, 22 nt, Human
uuguagguuuuuaauuuuaagg

SEQ ID NO: 355635 - RNA, 20 nt, Human
uuuagaucugaagguaaaua

SEQ ID NO: 355636 - RNA, 18 nt, Human
uuuagggggaagagggaa

SEQ ID NO: 355637 - RNA, 18 nt, Human
uuuguagguuuuuaauuu

SEQ ID NO: 355638 - RNA, 18 nt, Human
uuuuccccaaguccuccg

SEQ ID NO: 355639 - RNA, 18 nt, Human
aaaaccagugcacuuaga

SEQ ID NO: 355640 - RNA, 21 nt, Human
aaacagaaaggagacuucuaa

SEQ ID NO: 355641 - RNA, 24 nt, Human
aaacugcugggaauacaggcguga

SEQ ID NO: 355642 - RNA, 24 nt, Human
aaagaugcacauuccuuuaaaccc

SEQ ID NO: 355643 - RNA, 20 nt, Human
aacaucugaguaauaugacu

SEQ ID NO: 355644 - RNA, 23 nt, Human
aacuuucuuaaugacacugaaau

SEQ ID NO: 355645 - RNA, 23 nt, Human
aagcaaaaggagagagaagggac

SEQ ID NO: 355646 - RNA, 25 nt, Human
aagcgauccucccaccucagccucc

SEQ ID NO: 355647 - RNA, 24 nt, Human
aagugaucugccugccucggccuc

SEQ ID NO: 355648 - RNA, 23 nt, Human
aaucacaguuauguaugauuuuc

SEQ ID NO: 355649 - RNA, 19 nt, Human
acacagggauuaggagcac

SEQ ID NO: 355650 - RNA, 18 nt, Human
acaggguuuugccauguu

SEQ ID NO: 355651 - RNA, 19 nt, Human
acaggguuuugccauguug

SEQ ID NO: 355652 - RNA, 23 nt, Human
accaugcccagcuaauuuuugua

SEQ ID NO: 355653 - RNA, 24 nt, Human
acccaggcuggagugcaauggcgu

SEQ ID NO: 355654 - RNA, 18 nt, Human
acucugucacccaggcug

SEQ ID NO: 355655 - RNA, 27 nt, Human
acucugucacccaggcuggagugcaau

SEQ ID NO: 355656 - RNA, 21 nt, Human
acuuucccuugaauuuugugg

SEQ ID NO: 355657 - RNA, 18 nt, Human
agacaggguuuugccaug

SEQ ID NO: 355658 - RNA, 23 nt, Human
agacaggguuuugccauguugcc

SEQ ID NO: 355659 - RNA, 21 nt, Human
agagagaaaauggucaaguua

SEQ ID NO: 355660 - RNA, 20 nt, Human
agccucaaccucccaggcuc

SEQ ID NO: 355661 - RNA, 23 nt, Human
agccucaaccucccaggcucaag

SEQ ID NO: 355662 - RNA, 23 nt, Human
agcuggucucaaacuccugaguu

SEQ ID NO: 355663 - RNA, 24 nt, Human
agguagcugggacuacaggcaugc

SEQ ID NO: 355664 - RNA, 19 nt, Human
agugcaauggcgugaucac

SEQ ID NO: 355665 - RNA, 21 nt, Human
agugcaauggcgugaucacug

SEQ ID NO: 355666 - RNA, 24 nt, Human
aucaacuuucuuaaugacacugaa

SEQ ID NO: 355667 - RNA, 18 nt, Human
auuccuuuaaacccuuua

SEQ ID NO: 355668 - RNA, 21 nt, Human
auugcacuuugcagauauccu

SEQ ID NO: 355669 - RNA, 24 nt, Human
caaaaagcuauacauuuuccagua

SEQ ID NO: 355670 - RNA, 24 nt, Human
caaacugcugggaauacaggcgug

SEQ ID NO: 355671 - RNA, 23 nt, Human
caaagccuccaaguuguaauuuc

SEQ ID NO: 355672 - RNA, 19 nt, Human
caacacagggauuaggagc

SEQ ID NO: 355673 - RNA, 22 nt, Human
caacccccaacacagucaaaaa

SEQ ID NO: 355674 - RNA, 27 nt, Human
caagcgauccucccaccucagccuccc

SEQ ID NO: 355675 - RNA, 27 nt, Human
caagcgauccucccaccucagccuccc

SEQ ID NO: 355676 - RNA, 22 nt, Human
caagugaucugccugccucggc

SEQ ID NO: 355677 - RNA, 22 nt, Human
cacagaagccucaaccucccag

SEQ ID NO: 355678 - RNA, 21 nt, Human
caccaacccccaacacaguca

SEQ ID NO: 355679 - RNA, 24 nt, Human
caccucagccucccagguagcugg

SEQ ID NO: 355680 - RNA, 23 nt, Human
cacucugucacccaggcuggagu

SEQ ID NO: 355681 - RNA, 24 nt, Human
cacucugucacccaggcuggagug

SEQ ID NO: 355682 - RNA, 21 nt, Human
cagaagccucaaccucccagg

SEQ ID NO: 355683 - RNA, 24 nt, Human
caggcgugagcuacugugcccggc

SEQ ID NO: 355684 - RNA, 18 nt, Human
caggguuuugccauguug

SEQ ID NO: 355685 - RNA, 21 nt, Human
caugaauuaauaaagacucaa

SEQ ID NO: 355686 - RNA, 24 nt, Human
cauguugcccaagcuggucucaaa

SEQ ID NO: 355687 - RNA, 24 nt, Human
ccaaacugcugggaauacaggcgu

SEQ ID NO: 355688 - RNA, 24 nt, Human
ccacacuauaacacaguccuagua

SEQ ID NO: 355689 - RNA, 22 nt, Human
ccauguugcccaagcuggucuc

SEQ ID NO: 355690 - RNA, 18 nt, Human
cccaggcucaagcgaucc

SEQ ID NO: 355691 - RNA, 23 nt, Human
cccagguagcugggacuacaggc

SEQ ID NO: 355692 - RNA, 24 nt, Human
cccagguagcugggacuacaggca

SEQ ID NO: 355693 - RNA, 25 nt, Human
ccucccaccucagccucccagguag

SEQ ID NO: 355694 - RNA, 24 nt, Human
ccucccagguagcugggacuacag

SEQ ID NO: 355695 - RNA, 21 nt, Human
ccugaguucaagugaucugcc

SEQ ID NO: 355696 - RNA, 22 nt, Human
ccugaguucaagugaucugccu

SEQ ID NO: 355697 - RNA, 23 nt, Human
ccugaguucaagugaucugccug

SEQ ID NO: 355698 - RNA, 24 nt, Human
cgcacagaagccucaaccucccag

SEQ ID NO: 355699 - RNA, 18 nt, Human
cgucuugauccucuggua

SEQ ID NO: 355700 - RNA, 21 nt, Human
cuacuuaauauaugcacuacc

SEQ ID NO: 355701 - RNA, 24 nt, Human
cuagcuacuuaauauaugcacuac

SEQ ID NO: 355702 - RNA, 25 nt, Human
cucaaagccuccaaguuguaauuuc

SEQ ID NO: 355703 - RNA, 24 nt, Human
cucaagcgauccucccaccucagc

SEQ ID NO: 355704 - RNA, 24 nt, Human
cucacucugucacccaggcuggag

SEQ ID NO: 355705 - RNA, 24 nt, Human
cucagccucccagguagcugggac

SEQ ID NO: 355706 - RNA, 25 nt, Human
cucccaggcucaagcgauccuccca

SEQ ID NO: 355707 - RNA, 18 nt, Human
gaagccucaaccucccag

SEQ ID NO: 355708 - RNA, 24 nt, Human
gacuacaggcaugcacuaccaugc

SEQ ID NO: 355709 - RNA, 20 nt, Human
gagacagggucucacucugu

SEQ ID NO: 355710 - RNA, 20 nt, Human
gaggggaaggaaggauacag

SEQ ID NO: 355711 - RNA, 26 nt, Human
gauaugaaagccugaaacagaaagga

SEQ ID NO: 355712 - RNA, 20 nt, Human
gccauguugcccaagcuggu

SEQ ID NO: 355713 - RNA, 22 nt, Human
gcccagcuaauuuuuguauuuu

SEQ ID NO: 355714 - RNA, 22 nt, Human
gcguaacaagcagcauaaccuu

SEQ ID NO: 355715 - RNA, 22 nt, Human
gcucaagcgauccucccaccuc

SEQ ID NO: 355716 - RNA, 19 nt, Human
gcuggagugcaauggcgug

SEQ ID NO: 355717 - RNA, 24 nt, Human
ggacuacaggcaugcacuaccaug

SEQ ID NO: 355718 - RNA, 18 nt, Human
ggauaugaaagccugaaa

SEQ ID NO: 355719 - RNA, 22 nt, Human
ggcuggagugcaauggcgugau

SEQ ID NO: 355720 - RNA, 18 nt, Human
guacauauacauugugga

SEQ ID NO: 355721 - RNA, 20 nt, Human
guagcugggacuacaggcau

SEQ ID NO: 355722 - RNA, 24 nt, Human
uaauagagacaggguuuugccaug

SEQ ID NO: 355723 - RNA, 22 nt, Human
uaauuaauuaacagauguuacu

SEQ ID NO: 355724 - RNA, 24 nt, Human
uaauuuuuguauuuuuaauagaga

SEQ ID NO: 355725 - RNA, 24 nt, Human
uacaggcaugcacuaccaugccca

SEQ ID NO: 355726 - RNA, 19 nt, Human
uagaaacauuuuucauggu

SEQ ID NO: 355727 - RNA, 18 nt, Human
uagagaaaaaaaaaaagg

SEQ ID NO: 355728 - RNA, 21 nt, Human
uagagaaaaaaaaaaaggaaa

SEQ ID NO: 355729 - RNA, 21 nt, Human
uagagacaggguuuugccaug

SEQ ID NO: 355730 - RNA, 22 nt, Human
uagagacaggguuuugccaugu

SEQ ID NO: 355731 - RNA, 21 nt, Human
uagcauaaaauagucugcaac

SEQ ID NO: 355732 - RNA, 24 nt, Human
uagcuacuaacaucugaguaauau

SEQ ID NO: 355733 - RNA, 19 nt, Human
uagcuacuuaauauaugca

SEQ ID NO: 355734 - RNA, 20 nt, Human
uaucuaagcaaaaggagaga

SEQ ID NO: 355735 - RNA, 20 nt, Human
ucaagugaucugccugccuc

SEQ ID NO: 355736 - RNA, 18 nt, Human
ucacccaggcuggagugc

SEQ ID NO: 355737 - RNA, 24 nt, Human
ucacucugucacccaggcuggagu

SEQ ID NO: 355738 - RNA, 21 nt, Human
ucacuggagcaaucaucgcgc

SEQ ID NO: 355739 - RNA, 24 nt, Human
ucaguuccucaaagccuccaaguu

SEQ ID NO: 355740 - RNA, 23 nt, Human
uccacacuauaacacaguccuag

SEQ ID NO: 355741 - RNA, 21 nt, Human
uccaugaauuaauaaagacuc

SEQ ID NO: 355742 - RNA, 24 nt, Human
ucccaaacugcugggaauacaggc

SEQ ID NO: 355743 - RNA, 21 nt, Human
ucccaggcucaagcgauccuc

SEQ ID NO: 355744 - RNA, 24 nt, Human
ucccagguagcugggacuacaggc

SEQ ID NO: 355745 - RNA, 18 nt, Human
uccugaguucaagugauc

SEQ ID NO: 355746 - RNA, 23 nt, Human
ucuaauuuaugcacuccauugcc

SEQ ID NO: 355747 - RNA, 30 nt, Human
ucuaugguuuggauaugaaagccugaaacc

SEQ ID NO: 355748 - RNA, 23 nt, Human
ucucaaacuccugaguucaagug

SEQ ID NO: 355749 - RNA, 22 nt, Human
ucucacucugucacccaggcug

SEQ ID NO: 355750 - RNA, 23 nt, Human
ucucacucugucacccaggcugg

SEQ ID NO: 355751 - RNA, 24 nt, Human
ucucacucugucacccaggcugga

SEQ ID NO: 355752 - RNA, 26 nt, Human
ucucacucugucacccaggcuggagu

SEQ ID NO: 355753 - RNA, 27 nt, Human
ucucacucugucacccaggcuggagug

SEQ ID NO: 355754 - RNA, 24 nt, Human
ucugucacccaggcuggagugcaa

SEQ ID NO: 355755 - RNA, 22 nt, Human
ugaaagccugaaacagaaagga

SEQ ID NO: 355756 - RNA, 24 nt, Human
ugaagaguguuucaauguuuugaa

SEQ ID NO: 355757 - RNA, 20 nt, Human
ugagaacacuuuacguccac

SEQ ID NO: 355758 - RNA, 18 nt, Human
ugaguucaagugaucugc

SEQ ID NO: 355759 - RNA, 20 nt, Human
ugaguucaagugaucugccu

SEQ ID NO: 355760 - RNA, 19 nt, Human
ugcauagcuacuaacaucu

SEQ ID NO: 355761 - RNA, 27 nt, Human
ugccauguugcccaagcuggucucaaa

SEQ ID NO: 355762 - RNA, 20 nt, Human
ugcccggccaugaucuggga

SEQ ID NO: 355763 - RNA, 19 nt, Human
ugcccuaaucaaaaagcua

SEQ ID NO: 355764 - RNA, 21 nt, Human
ugccucggccucccaaacugc

SEQ ID NO: 355765 - RNA, 24 nt, Human
ugccucggccucccaaacugcugg

SEQ ID NO: 355766 - RNA, 19 nt, Human
uggagugcaauggcgugau

SEQ ID NO: 355767 - RNA, 21 nt, Human
uggagugcaauggcgugauca

SEQ ID NO: 355768 - RNA, 25 nt, Human
uggagugcaauggcgugaucacugg

SEQ ID NO: 355769 - RNA, 20 nt, Human
uggauaugaaagccugaaac

SEQ ID NO: 355770 - RNA, 19 nt, Human
ugggaauacaggcgugagc

SEQ ID NO: 355771 - RNA, 19 nt, Human
ugggaauacaggcgugagc

SEQ ID NO: 355772 - RNA, 22 nt, Human
ugggaauacaggcgugagcuac

SEQ ID NO: 355773 - RNA, 24 nt, Human
ugggaauacaggcgugagcuacug

SEQ ID NO: 355774 - RNA, 19 nt, Human
ugggacuacaggcaugcac

SEQ ID NO: 355775 - RNA, 24 nt, Human
ugggacuacaggcaugcacuacca

SEQ ID NO: 355776 - RNA, 23 nt, Human
ugguacauguugaaauugcacuu

SEQ ID NO: 355777 - RNA, 20 nt, Human
ugucacccaggcuggagugc

SEQ ID NO: 355778 - RNA, 24 nt, Human
uuaauagagacaggguuuugccau

SEQ ID NO: 355779 - RNA, 22 nt, Human
uuaugcacuccauugcccuaau

SEQ ID NO: 355780 - RNA, 18 nt, Human
uucaagugaucugccugc

SEQ ID NO: 355781 - RNA, 21 nt, Human
uucaagugaucugccugccuc

SEQ ID NO: 355782 - RNA, 21 nt, Human
uucaagugaucugccugccuc

SEQ ID NO: 355783 - RNA, 20 nt, Human
uuuaaaaaaaaaaaaaaagu

SEQ ID NO: 355784 - RNA, 22 nt, Human
uuuacucgugauaauuuuuuuu

SEQ ID NO: 355785 - RNA, 21 nt, Human
uuuuuaauagagacaggguuu

SEQ ID NO: 355786 - RNA, 21 nt, Human
uuuuuaauagagacaggguuu

SEQ ID NO: 355787 - RNA, 20 nt, Human
uuuuuguauuuuuaauagag

SEQ ID NO: 355788 - RNA, 23 nt, Human
uuuuuguauuuuuaauagagaca

SEQ ID NO: 355789 - RNA, 27 nt, Human
uuuuuuuuuuuuggagacagggucuca

SEQ ID NO: 355790 - RNA, 24 nt, Human
uuuuuuuuuuuuuuggagacaggg

SEQ ID NO: 355791 - RNA, 20 nt, Human
aaacuugaugcagaccagua

SEQ ID NO: 355792 - RNA, 21 nt, Human
aaaugugccaaauaaaaaccc

SEQ ID NO: 355793 - RNA, 22 nt, Human
aacaauccaaauaacuuccaac

SEQ ID NO: 355794 - RNA, 23 nt, Human
aacauacuagcggucaaacuacc

SEQ ID NO: 355795 - RNA, 24 nt, Human
aacuaccgaauaaacuugaugcag

SEQ ID NO: 355796 - RNA, 29 nt, Human
aacuaccgaauaaacuugaugcagacccc

SEQ ID NO: 355797 - RNA, 22 nt, Human
aagauacuuaaaauuugaauaa

SEQ ID NO: 355798 - RNA, 19 nt, Human
aagguguuuugucccaauu

SEQ ID NO: 355799 - RNA, 22 nt, Human
aauaaaaacccacauuuucaga

SEQ ID NO: 355800 - RNA, 21 nt, Human
aaucuaacgacgaucaaacug

SEQ ID NO: 355801 - RNA, 19 nt, Human
aauucagccagucaaaauu

SEQ ID NO: 355802 - RNA, 23 nt, Human
acacaccuucacccgccaagagu

SEQ ID NO: 355803 - RNA, 21 nt, Human
accaacuucaaacggauuagc

SEQ ID NO: 355804 - RNA, 20 nt, Human
agacuuaaccaacaccuuuc

SEQ ID NO: 355805 - RNA, 25 nt, Human
agaugacucgaggggaucuggccuc

SEQ ID NO: 355806 - RNA, 24 nt, Human
agcaagcagcgcccagggcucgag

SEQ ID NO: 355807 - RNA, 21 nt, Human
agcgcccagggcucgagugac

SEQ ID NO: 355808 - RNA, 20 nt, Human
aggaagagcccggguucgcg

SEQ ID NO: 355809 - RNA, 21 nt, Human
augcucauuuagacacaucag

SEQ ID NO: 355810 - RNA, 19 nt, Human
auguagguauguaugaaua

SEQ ID NO: 355811 - RNA, 22 nt, Human
auucaacaaaauuuauauuauc

SEQ ID NO: 355812 - RNA, 24 nt, Human
caagaccauugagaguagaacucc

SEQ ID NO: 355813 - RNA, 22 nt, Human
caaguugcaauaguauccaaug

SEQ ID NO: 355814 - RNA, 24 nt, Human
cacacaccuucacccgccaagagu

SEQ ID NO: 355815 - RNA, 22 nt, Human
cagaacaauuaaagcuaaccaa

SEQ ID NO: 355816 - RNA, 25 nt, Human
cagccagucaaaauuccaaaaacaa

SEQ ID NO: 355817 - RNA, 23 nt, Human
cauacuagcggucaaacuaccga

SEQ ID NO: 355818 - RNA, 18 nt, Human
caucacaaaucccuuaua

SEQ ID NO: 355819 - RNA, 18 nt, Human
ccccaauuguaagccaaa

SEQ ID NO: 355820 - RNA, 20 nt, Human
ccuacuaacaccaacuucaa

SEQ ID NO: 355821 - RNA, 21 nt, Human
cuaccaaaaaauauuagcuac

SEQ ID NO: 355822 - RNA, 24 nt, Human
cuaguagccugaaagcugcaauua

SEQ ID NO: 355823 - RNA, 21 nt, Human
cuggaaaauuuugcaaagcug

SEQ ID NO: 355824 - RNA, 21 nt, Human
gaaagcaaagaaacaagacca

SEQ ID NO: 355825 - RNA, 22 nt, Human
gaaccagaccuagaucuucuga

SEQ ID NO: 355826 - RNA, 23 nt, Human
gaccucgacggggauuggaaaua

SEQ ID NO: 355827 - RNA, 22 nt, Human
gaggaagagcccggguucgcgu

SEQ ID NO: 355828 - RNA, 24 nt, Human
gaucauacaauaccuacuaacacc

SEQ ID NO: 355829 - RNA, 24 nt, Human
gcugcaauuaguauaaagaucauc

SEQ ID NO: 355830 - RNA, 22 nt, Human
ggagaugcugaccuugaccuuc

SEQ ID NO: 355831 - RNA, 22 nt, Human
gugaaauagaccuggaucuuga

SEQ ID NO: 355832 - RNA, 21 nt, Human
uaaaaacccacauuuucagac

SEQ ID NO: 355833 - RNA, 24 nt, Human
uaaaauuugaauaaagaaccuacu

SEQ ID NO: 355834 - RNA, 18 nt, Human
uaaagcuaaccaagugca

SEQ ID NO: 355835 - RNA, 22 nt, Human
uaaaugugccaaauaaaaaccc

SEQ ID NO: 355836 - RNA, 18 nt, Human
uaacaccaacuucaaacg

SEQ ID NO: 355837 - RNA, 19 nt, Human
uacagaacaauuaaagcua

SEQ ID NO: 355838 - RNA, 18 nt, Human
uaccaaccauaauucagc

SEQ ID NO: 355839 - RNA, 20 nt, Human
uagaaagcaaagaaacaaga

SEQ ID NO: 355840 - RNA, 22 nt, Human
uagaaagcaaagaaacaagacc

SEQ ID NO: 355841 - RNA, 21 nt, Human
uagaccgugaccuugcaaguu

SEQ ID NO: 355842 - RNA, 19 nt, Human
uagaugacucgaggggauc

SEQ ID NO: 355843 - RNA, 22 nt, Human
uagcaagcagcgcccagggccg

SEQ ID NO: 355844 - RNA, 25 nt, Human
uagcuacauggaguguugcuaaaua

SEQ ID NO: 355845 - RNA, 18 nt, Human
uagguguagaugacucga

SEQ ID NO: 355846 - RNA, 26 nt, Human
uauagaaccagaccuagaucuucuga

SEQ ID NO: 355847 - RNA, 21 nt, Human
uaugccaccuaguagccugaa

SEQ ID NO: 355848 - RNA, 18 nt, Human
uauuagcuacauggagug

SEQ ID NO: 355849 - RNA, 18 nt, Human
ucagaauaagacaaucca

SEQ ID NO: 355850 - RNA, 18 nt, Human
ucagccagucaaaauucc

SEQ ID NO: 355851 - RNA, 25 nt, Human
ucauccagaaauguuucuauuucuc

SEQ ID NO: 355852 - RNA, 21 nt, Human
uccccugcuccugcugcguga

SEQ ID NO: 355853 - RNA, 20 nt, Human
ucccuuaagauccuggccaa

SEQ ID NO: 355854 - RNA, 24 nt, Human
ucuaaaccggaggggggccggggc

SEQ ID NO: 355855 - RNA, 21 nt, Human
ucuagauguuuucuucaaucu

SEQ ID NO: 355856 - RNA, 21 nt, Human
ucugauugacaucuuuaauua

SEQ ID NO: 355857 - RNA, 19 nt, Human
ugaagaguaucugggcugg

SEQ ID NO: 355858 - RNA, 25 nt, Human
ugaauaaagaaccuacuggcuaugu

SEQ ID NO: 355859 - RNA, 18 nt, Human
ugaccagaaaacucucaa

SEQ ID NO: 355860 - RNA, 25 nt, Human
ugacgcaaaagcugacacacaccuu

SEQ ID NO: 355861 - RNA, 19 nt, Human
ugagccaggugaggcuuga

SEQ ID NO: 355862 - RNA, 23 nt, Human
ugagugaagcugaucuugaucua

SEQ ID NO: 355863 - RNA, 18 nt, Human
ugcaacagauaaauaagc

SEQ ID NO: 355864 - RNA, 21 nt, Human
ugcaacagauaaauaagccug

SEQ ID NO: 355865 - RNA, 20 nt, Human
ugcccuacuauucuuaagau

SEQ ID NO: 355866 - RNA, 18 nt, Human
ugcucggcucuuuagcaa

SEQ ID NO: 355867 - RNA, 21 nt, Human
uggaaaauuuugcaaagcugg

SEQ ID NO: 355868 - RNA, 19 nt, Human
uggccucuuaugcugauca

SEQ ID NO: 355869 - RNA, 21 nt, Human
ugguaaaagcuugaccagaaa

SEQ ID NO: 355870 - RNA, 19 nt, Human
uguaagccaaauuuacugu

SEQ ID NO: 355871 - RNA, 20 nt, Human
uuaaccaacaccuuucaauu

SEQ ID NO: 355872 - RNA, 21 nt, Human
uuaacuaauguagaaagcaaa

SEQ ID NO: 355873 - RNA, 18 nt, Human
uuagaugguugaauuauc

SEQ ID NO: 355874 - RNA, 19 nt, Human
uuaguuccugucaugcuca

SEQ ID NO: 355875 - RNA, 24 nt, Human
uuccucaaacaugcauuuuuuggu

SEQ ID NO: 355876 - RNA, 20 nt, Human
uucugagugaagcugaucuu

SEQ ID NO: 355877 - RNA, 22 nt, Human
uucuuggucgugaaauagaccu

SEQ ID NO: 355878 - RNA, 21 nt, Human
uugaccagaaaacucucaaaa

SEQ ID NO: 355879 - RNA, 24 nt, Human
uuuacagacaucacaaaucccuuu

SEQ ID NO: 355880 - RNA, 20 nt, Human
uuucaggacuugcacuucug

SEQ ID NO: 355881 - RNA, 21 nt, Human
agccuuuguguguaguaacgg

SEQ ID NO: 355882 - RNA, 21 nt, Human
aggaagccuccaucucaugcc

SEQ ID NO: 355883 - RNA, 22 nt, Human
aggcagagcugaggggaccagg

SEQ ID NO: 355884 - RNA, 25 nt, Human
aggcagugggcugcagaggcagagc

SEQ ID NO: 355885 - RNA, 21 nt, Human
aggggugggguggcugggagc

SEQ ID NO: 355886 - RNA, 21 nt, Human
caaaggccaaggcuaggagug

SEQ ID NO: 355887 - RNA, 21 nt, Human
caagacacauccuaagaccug

SEQ ID NO: 355888 - RNA, 24 nt, Human
cacagucagggcuucccugaaauc

SEQ ID NO: 355889 - RNA, 19 nt, Human
caccuggagagccugacca

SEQ ID NO: 355890 - RNA, 19 nt, Human
cacucaaaacauuucacuc

SEQ ID NO: 355891 - RNA, 20 nt, Human
cagagccuccagcugcuugg

SEQ ID NO: 355892 - RNA, 23 nt, Human
caucucacagaccaaguggaucc

SEQ ID NO: 355893 - RNA, 26 nt, Human
ccaagacacauccuaagaccuggcac

SEQ ID NO: 355894 - RNA, 22 nt, Human
ccaaguggauccuggggaugga

SEQ ID NO: 355895 - RNA, 24 nt, Human
ccacagagaccucagagugccaga

SEQ ID NO: 355896 - RNA, 19 nt, Human
ccacugggcccucugacca

SEQ ID NO: 355897 - RNA, 21 nt, Human
ccagacaggauccucccuguc

SEQ ID NO: 355898 - RNA, 18 nt, Human
cccuagaggccuuggccg

SEQ ID NO: 355899 - RNA, 18 nt, Human
ccuccaggucagggggcu

SEQ ID NO: 355900 - RNA, 19 nt, Human
ccuggggugcagugcuggg

SEQ ID NO: 355901 - RNA, 20 nt, Human
ccuucuuuucaggcuccaag

SEQ ID NO: 355902 - RNA, 21 nt, Human
cuaggaguggcugccuggggu

SEQ ID NO: 355903 - RNA, 18 nt, Human
cucaaaacauuucacucc

SEQ ID NO: 355904 - RNA, 21 nt, Human
cucugugugacuuuggaggau

SEQ ID NO: 355905 - RNA, 18 nt, Human
cuggucagugauuauggg

SEQ ID NO: 355906 - RNA, 20 nt, Human
gaccaaguggauccugggga

SEQ ID NO: 355907 - RNA, 21 nt, Human
gcagagcugaggggaccagga

SEQ ID NO: 355908 - RNA, 20 nt, Human
gcugggagcaugaacuucag

SEQ ID NO: 355909 - RNA, 21 nt, Human
ggcauccaaagacucaaagga

SEQ ID NO: 355910 - RNA, 23 nt, Human
ggcugcagaggcagagcugaggg

SEQ ID NO: 355911 - RNA, 21 nt, Human
guacaugucagucacaggguu

SEQ ID NO: 355912 - RNA, 23 nt, Human
uaaauauccccaagagucaccgg

SEQ ID NO: 355913 - RNA, 22 nt, Human
uaacacucaaaacauuucacuc

SEQ ID NO: 355914 - RNA, 19 nt, Human
uaccccaaggccucacugc

SEQ ID NO: 355915 - RNA, 21 nt, Human
uaggaguggcugccuggggug

SEQ ID NO: 355916 - RNA, 21 nt, Human
uauuaauaaaaggggaaagug

SEQ ID NO: 355917 - RNA, 19 nt, Human
ucaccggguacugugccca

SEQ ID NO: 355918 - RNA, 18 nt, Human
ucccauggccuaaaugcc

SEQ ID NO: 355919 - RNA, 22 nt, Human
uccccauuucacagaugaagau

SEQ ID NO: 355920 - RNA, 24 nt, Human
ucugcaguggggggcucuucccua

SEQ ID NO: 355921 - RNA, 20 nt, Human
ugaaggaacuggaccagaug

SEQ ID NO: 355922 - RNA, 22 nt, Human
ugaaguggggugcagauuuguu

SEQ ID NO: 355923 - RNA, 19 nt, Human
ugaccaccuggagagccug

SEQ ID NO: 355924 - RNA, 24 nt, Human
ugaccaggccugccacagagaccu

SEQ ID NO: 355925 - RNA, 18 nt, Human
ugccaaaggccaaggcua

SEQ ID NO: 355926 - RNA, 27 nt, Human
ugccacagagaccucagagugccagag

SEQ ID NO: 355927 - RNA, 20 nt, Human
ugccuccagcucuaauagcc

SEQ ID NO: 355928 - RNA, 22 nt, Human
uggcugccuggggugcagugcu

SEQ ID NO: 355929 - RNA, 21 nt, Human
uggcugggagcaugaacuuca

SEQ ID NO: 355930 - RNA, 21 nt, Human
ugggaugguuugcaaggggag

SEQ ID NO: 355931 - RNA, 20 nt, Human
ugggcugcagaggcagagcu

SEQ ID NO: 355932 - RNA, 22 nt, Human
ugggcugcagaggcagagcuga

SEQ ID NO: 355933 - RNA, 22 nt, Human
uggggcaccacugggcccucug

SEQ ID NO: 355934 - RNA, 23 nt, Human
ugggggguggugugaaugcccac

SEQ ID NO: 355935 - RNA, 19 nt, Human
uggguaaacaauacugguc

SEQ ID NO: 355936 - RNA, 23 nt, Human
ugguaugugcucggucaauagcc

SEQ ID NO: 355937 - RNA, 18 nt, Human
ugucaaggcuggucagug

SEQ ID NO: 355938 - RNA, 18 nt, Human
ugugaaugcccaccgagg

SEQ ID NO: 355939 - RNA, 19 nt, Human
uucacagaugaagauauag

SEQ ID NO: 355940 - RNA, 21 nt, Human
aaaagacccuuugcccggggc

SEQ ID NO: 355941 - RNA, 18 nt, Human
aagcagcuucuugcccgu

SEQ ID NO: 355942 - RNA, 22 nt, Human
cacucccauccucuccccaagc

SEQ ID NO: 355943 - RNA, 21 nt, Human
cccacucccauccucucccca

SEQ ID NO: 355944 - RNA, 19 nt, Human
cccauccucuccccaagcu

SEQ ID NO: 355945 - RNA, 20 nt, Human
cccauccucuccccaagcuc

SEQ ID NO: 355946 - RNA, 23 nt, Human
cccauccucuccccaagcuccca

SEQ ID NO: 355947 - RNA, 23 nt, Human
cccauuucuccagggcuuguccc

SEQ ID NO: 355948 - RNA, 22 nt, Human
ccccugggcgccaccucugccc

SEQ ID NO: 355949 - RNA, 21 nt, Human
cccugggcgccaccucugccc

SEQ ID NO: 355950 - RNA, 26 nt, Human
ccucugcccacucccauccucucccc

SEQ ID NO: 355951 - RNA, 23 nt, Human
cugacccugcucaccggaggcgu

SEQ ID NO: 355952 - RNA, 27 nt, Human
cugcccacucccauccucuccccaagc

SEQ ID NO: 355953 - RNA, 21 nt, Human
gcccacucccauccucucccc

SEQ ID NO: 355954 - RNA, 22 nt, Human
gcccacucccauccucucccca

SEQ ID NO: 355955 - RNA, 20 nt, Human
gccccugggcgccaccucug

SEQ ID NO: 355956 - RNA, 21 nt, Human
ggcagaagcagcuucuugccc

SEQ ID NO: 355957 - RNA, 19 nt, Human
ucccauccucuccccaagc

SEQ ID NO: 355958 - RNA, 18 nt, Human
ucccauuucuccagggcu

SEQ ID NO: 355959 - RNA, 24 nt, Human
ucccauuucuccagggcuuguccc

SEQ ID NO: 355960 - RNA, 25 nt, Human
uccccaagcucccauuucuccaggg

SEQ ID NO: 355961 - RNA, 21 nt, Human
ucccgggccccugggcgccac

SEQ ID NO: 355962 - RNA, 19 nt, Human
ucccugcggugugggcaga

SEQ ID NO: 355963 - RNA, 22 nt, Human
ucccugcggugugggcagaagc

SEQ ID NO: 355964 - RNA, 23 nt, Human
ucugcaaaagcugcaaaagaccc

SEQ ID NO: 355965 - RNA, 21 nt, Human
ugcaaaagcugcaaaagaccc

SEQ ID NO: 355966 - RNA, 18 nt, Human
ugcccgucugcaaaagcu

SEQ ID NO: 355967 - RNA, 19 nt, Human
uaggccccaggagcuccaa

SEQ ID NO: 355968 - RNA, 19 nt, Human
ucuuuuuguuaggccccag

SEQ ID NO: 355969 - RNA, 18 nt, Human
ugacuucuggccaaacuc

SEQ ID NO: 355970 - RNA, 19 nt, Human
ugccccacccaccccaguu

SEQ ID NO: 355971 - RNA, 21 nt, Human
ugggccaagcacugccccacc

SEQ ID NO: 355972 - RNA, 21 nt, Human
uugacuucuggccaaacuccu

SEQ ID NO: 355973 - RNA, 23 nt, Human
uuuuuuuuuuuuuuuuuuuaugg

SEQ ID NO: 355974 - RNA, 23 nt, Human
acacacucucaccccaccccacc

SEQ ID NO: 355975 - RNA, 23 nt, Human
accccaccccacccccucucccu

SEQ ID NO: 355976 - RNA, 18 nt, Human
acucucaccccaccccac

SEQ ID NO: 355977 - RNA, 23 nt, Human
agaagggaggaugaagucagggc

SEQ ID NO: 355978 - RNA, 20 nt, Human
agagaagggaggaugaaguc

SEQ ID NO: 355979 - RNA, 19 nt, Human
agggaggaugaagucaggg

SEQ ID NO: 355980 - RNA, 20 nt, Human
agggaggaugaagucagggc

SEQ ID NO: 355981 - RNA, 23 nt, Human
agggaggaugaagucagggcugg

SEQ ID NO: 355982 - RNA, 23 nt, Human
agggccaggagcuggaaucagca

SEQ ID NO: 355983 - RNA, 25 nt, Human
caccccacccccucucccugcuugu

SEQ ID NO: 355984 - RNA, 18 nt, Human
cacccccucucccugcuu

SEQ ID NO: 355985 - RNA, 23 nt, Human
cccaccccacccccucucccugc

SEQ ID NO: 355986 - RNA, 19 nt, Human
ccccaccccacccccucuc

SEQ ID NO: 355987 - RNA, 21 nt, Human
ccccaccccacccccucuccc

SEQ ID NO: 355988 - RNA, 23 nt, Human
ccccaccccacccccucucccug

SEQ ID NO: 355989 - RNA, 20 nt, Human
cucaccccaccccacccccu

SEQ ID NO: 355990 - RNA, 21 nt, Human
cucaccccaccccacccccuc

SEQ ID NO: 355991 - RNA, 19 nt, Human
cucucccugcuuguuuaga

SEQ ID NO: 355992 - RNA, 19 nt, Human
gagaggcugccagcagcaa

SEQ ID NO: 355993 - RNA, 20 nt, Human
gggagaggcugccagcagca

SEQ ID NO: 355994 - RNA, 22 nt, Human
uacuccacacacucucacccca

SEQ ID NO: 355995 - RNA, 23 nt, Human
uccacacacucucaccccacccc

SEQ ID NO: 355996 - RNA, 23 nt, Human
ucccugcuuguuuagagccuggg

SEQ ID NO: 355997 - RNA, 18 nt, Human
ucucaccccaccccaccc

SEQ ID NO: 355998 - RNA, 24 nt, Human
ucucaccccaccccacccccucuc

SEQ ID NO: 355999 - RNA, 25 nt, Human
ugccagcagcaauuggugagcagag

SEQ ID NO: 356000 - RNA, 19 nt, Human
ugguguggacagagaaggg

SEQ ID NO: 356001 - RNA, 22 nt, Human
uuagagccuggguuccaggagg

SEQ ID NO: 356002 - RNA, 21 nt, Human
aaacaaaacagauaugcuuac

SEQ ID NO: 356003 - RNA, 20 nt, Human
aaacagcugcuucagaccuu

SEQ ID NO: 356004 - RNA, 24 nt, Human
aaacagcugcuucagaccuuuaac

SEQ ID NO: 356005 - RNA, 23 nt, Human
aaaguucuuuaaugacuucacuu

SEQ ID NO: 356006 - RNA, 19 nt, Human
aacauucuuuuacaaaaua

SEQ ID NO: 356007 - RNA, 23 nt, Human
aagaagaugagaaucaaacaaaa

SEQ ID NO: 356008 - RNA, 21 nt, Human
aaggaaccauuguuucuaucu

SEQ ID NO: 356009 - RNA, 18 nt, Human
agaagcuaaaaggcagag

SEQ ID NO: 356010 - RNA, 22 nt, Human
agauauaaacauguuggugacc

SEQ ID NO: 356011 - RNA, 23 nt, Human
agaugaacaaagguuaauuuaaa

SEQ ID NO: 356012 - RNA, 23 nt, Human
cagagcaugaaacgcugaugcca

SEQ ID NO: 356013 - RNA, 21 nt, Human
caggguuguggugagaauugg

SEQ ID NO: 356014 - RNA, 22 nt, Human
ccaacucugcuacuuacuauau

SEQ ID NO: 356015 - RNA, 19 nt, Human
cccgcgcccgccgccgccg

SEQ ID NO: 356016 - RNA, 19 nt, Human
ccgccgagcuccccgcccc

SEQ ID NO: 356017 - RNA, 20 nt, Human
ccgccgagcuccccgcccga

SEQ ID NO: 356018 - RNA, 22 nt, Human
ccgccgagcuccccgcccgacu

SEQ ID NO: 356019 - RNA, 19 nt, Human
ccgccgccgagcuccccgc

SEQ ID NO: 356020 - RNA, 25 nt, Human
ccgcgcccgccgccgccgagcuccc

SEQ ID NO: 356021 - RNA, 19 nt, Human
cuaaacagcugcuucagac

SEQ ID NO: 356022 - RNA, 18 nt, Human
cuagaaaucugcaucuuu

SEQ ID NO: 356023 - RNA, 22 nt, Human
cucugagaagauuuuaacuaug

SEQ ID NO: 356024 - RNA, 21 nt, Human
cuuaacuucucugaucuucag

SEQ ID NO: 356025 - RNA, 23 nt, Human
guuaaaaaaaaaaaaaaaggaau

SEQ ID NO: 356026 - RNA, 23 nt, Human
uaaaaaagucaagucaagauaua

SEQ ID NO: 356027 - RNA, 19 nt, Human
uacaaaauauuuucuuccc

SEQ ID NO: 356028 - RNA, 21 nt, Human
uagaagaugcucaauaaagau

SEQ ID NO: 356029 - RNA, 22 nt, Human
uagaagcuaaaaggcagagcau

SEQ ID NO: 356030 - RNA, 22 nt, Human
uagagaacaguaaauaugaaga

SEQ ID NO: 356031 - RNA, 26 nt, Human
uaucauuauuauuuaaaaguuaaagc

SEQ ID NO: 356032 - RNA, 18 nt, Human
ucaagucaagauauaaac

SEQ ID NO: 356033 - RNA, 22 nt, Human
uccaaaugccauguuguuuuca

SEQ ID NO: 356034 - RNA, 20 nt, Human
ucccgcgcccgccgccgccg

SEQ ID NO: 356035 - RNA, 21 nt, Human
ucccgcgcccgccgccgccga

SEQ ID NO: 356036 - RNA, 26 nt, Human
ucuaguuaaaaaaaaaaaaaaaggaa

SEQ ID NO: 356037 - RNA, 23 nt, Human
ugagaagauuuuaacuauguaga

SEQ ID NO: 356038 - RNA, 19 nt, Human
ugauguugagcaaguuucu

SEQ ID NO: 356039 - RNA, 20 nt, Human
ugcaaaacuaaggaaccauu

SEQ ID NO: 356040 - RNA, 24 nt, Human
uuaaagcugagaugguguuuuaau

SEQ ID NO: 356041 - RNA, 21 nt, Human
uuguuucuaucucacauaugu

SEQ ID NO: 356042 - RNA, 20 nt, Human
aaccggccgaugaaaaccgc

SEQ ID NO: 356043 - RNA, 23 nt, Human
aagccaaaaaaggccuuuaugcu

SEQ ID NO: 356044 - RNA, 23 nt, Human
acacacacguacacauacacaca

SEQ ID NO: 356045 - RNA, 23 nt, Human
acgcacacacacguacacauaca

SEQ ID NO: 356046 - RNA, 18 nt, Human
agccagugucuaaagcca

SEQ ID NO: 356047 - RNA, 23 nt, Human
agcuggcagccagugucuaaagc

SEQ ID NO: 356048 - RNA, 22 nt, Human
caacaauguccacuauggauag

SEQ ID NO: 356049 - RNA, 19 nt, Human
cacucaacacucccggcag

SEQ ID NO: 356050 - RNA, 25 nt, Human
cguacacauacacacaaggucuuug

SEQ ID NO: 356051 - RNA, 20 nt, Human
cuaaagccaaaaaaggccuu

SEQ ID NO: 356052 - RNA, 25 nt, Human
gcacgcacacacacguacacauaca

SEQ ID NO: 356053 - RNA, 25 nt, Human
gcacgcacacacacguacacauagu

SEQ ID NO: 356054 - RNA, 29 nt, Human
gcgaacacacucaagcacgcacacacagg

SEQ ID NO: 356055 - RNA, 20 nt, Human
uauauccacccacacacgcg

SEQ ID NO: 356056 - RNA, 22 nt, Human
ucccggcaguaaugucucucuc

SEQ ID NO: 356057 - RNA, 24 nt, Human
ucccggcaguaaugucucucucuu

SEQ ID NO: 356058 - RNA, 20 nt, Human
ucucucuuguccguuucaca

SEQ ID NO: 356059 - RNA, 20 nt, Human
ucucuuguccguuucacaaa

SEQ ID NO: 356060 - RNA, 22 nt, Human
ugucucucucuuguccguuuca

SEQ ID NO: 356061 - RNA, 23 nt, Human
uugauaggcuuucuguguucuag

SEQ ID NO: 356062 - RNA, 19 nt, Human
uuuauauccacccacacac

SEQ ID NO: 356063 - RNA, 18 nt, Human
uuuuuuuuuuuuuuuuug

SEQ ID NO: 356064 - RNA, 24 nt, Human
uuuuuuuuuuuuuuuuugauacag

SEQ ID NO: 356065 - RNA, 18 nt, Human
aagagaaaagaaauguga

SEQ ID NO: 356066 - RNA, 18 nt, Human
caaaaaugcuuuaaguac

SEQ ID NO: 356067 - RNA, 20 nt, Human
ccccucccuuucuucuuccc

SEQ ID NO: 356068 - RNA, 18 nt, Human
cccucccuuucuucuucc

SEQ ID NO: 356069 - RNA, 19 nt, Human
ccuccccucccuuucuucu

SEQ ID NO: 356070 - RNA, 19 nt, Human
ggccuggcuaggccguccg

SEQ ID NO: 356071 - RNA, 21 nt, Human
ucauugcuucagucaguuuuc

SEQ ID NO: 356072 - RNA, 24 nt, Human
ucuccccuccccucccuuucuucu

SEQ ID NO: 356073 - RNA, 18 nt, Human
ugcauaacauaugccaga

SEQ ID NO: 356074 - RNA, 23 nt, Human
uggaagagaaaagaaaugugaug

SEQ ID NO: 356075 - RNA, 22 nt, Human
uguaacugcuauauugucugau

SEQ ID NO: 356076 - RNA, 19 nt, Human
ugucugauuauaaauucau

SEQ ID NO: 356077 - RNA, 19 nt, Human
aagcguuuacuucccaucc

SEQ ID NO: 356078 - RNA, 19 nt, Human
aggaaaugcuguauagaac

SEQ ID NO: 356079 - RNA, 19 nt, Human
cacacggcaacucaacacu

SEQ ID NO: 356080 - RNA, 21 nt, Human
cauccacgcugccucagucuu

SEQ ID NO: 356081 - RNA, 18 nt, Human
cauuuuaguacugagcaa

SEQ ID NO: 356082 - RNA, 23 nt, Human
ccacacggacaagauagggggag

SEQ ID NO: 356083 - RNA, 18 nt, Human
cccauccacgcugccuca

SEQ ID NO: 356084 - RNA, 18 nt, Human
cccuucaaaacuugaaaa

SEQ ID NO: 356085 - RNA, 23 nt, Human
ccuuuaacuacaucuugaaaacc

SEQ ID NO: 356086 - RNA, 20 nt, Human
cucaacacucagugugugcc

SEQ ID NO: 356087 - RNA, 23 nt, Human
cuccacacggcaacucaacacuc

SEQ ID NO: 356088 - RNA, 20 nt, Human
cuuucacgaugugcagcugc

SEQ ID NO: 356089 - RNA, 22 nt, Human
cuuuugugucucacauccacgu

SEQ ID NO: 356090 - RNA, 18 nt, Human
gaacuacagcuggcccga

SEQ ID NO: 356091 - RNA, 21 nt, Human
gacuauauacagaaaguuuaa

SEQ ID NO: 356092 - RNA, 19 nt, Human
gcagcugcucccugggugu

SEQ ID NO: 356093 - RNA, 22 nt, Human
gcugccucagucuuucacgauu

SEQ ID NO: 356094 - RNA, 26 nt, Human
gugauuuauuccuuuaacuacaucuu

SEQ ID NO: 356095 - RNA, 23 nt, Human
guuuacuucccauccacgcugcc

SEQ ID NO: 356096 - RNA, 19 nt, Human
uaagaaaagcacacuggcg

SEQ ID NO: 356097 - RNA, 21 nt, Human
uaccacagacagaauguuuca

SEQ ID NO: 356098 - RNA, 23 nt, Human
uagaacuuuggggcauuuuagua

SEQ ID NO: 356099 - RNA, 21 nt, Human
ucccugggugugaggaucugg

SEQ ID NO: 356100 - RNA, 22 nt, Human
ucccugggugugaggaucuggg

SEQ ID NO: 356101 - RNA, 19 nt, Human
ucuaccacagacagaaugu

SEQ ID NO: 356102 - RNA, 26 nt, Human
ucuaccacagacagaauguuucaaac

SEQ ID NO: 356103 - RNA, 24 nt, Human
ugaaaauuaauccaguggaaaaac

SEQ ID NO: 356104 - RNA, 23 nt, Human
ugagagcaaaggaugaagcuuca

SEQ ID NO: 356105 - RNA, 19 nt, Human
ugaggaucuggggccggca

SEQ ID NO: 356106 - RNA, 20 nt, Human
uggcccgagcucuaccacag

SEQ ID NO: 356107 - RNA, 23 nt, Human
uggcccgagcucuaccacagaca

SEQ ID NO: 356108 - RNA, 19 nt, Human
uucccauccacgcugccuc

SEQ ID NO: 356109 - RNA, 25 nt, Human
uugaaaauuuucuugugaaaccuga

SEQ ID NO: 356110 - RNA, 20 nt, Human
uuuuauugcuuauugacuau

SEQ ID NO: 356111 - RNA, 24 nt, Human
uuuuuaacucugaaaaaugagguu

SEQ ID NO: 356112 - RNA, 18 nt, Human
aaaauccuuuaaaaccaa

SEQ ID NO: 356113 - RNA, 21 nt, Human
aaaauccuuuaaaaccaagcc

SEQ ID NO: 356114 - RNA, 23 nt, Human
aauccuuuaaaaccaagcccuaa

SEQ ID NO: 356115 - RNA, 19 nt, Human
aaugcaaaaaaaaaaacau

SEQ ID NO: 356116 - RNA, 21 nt, Human
aaugcccauuuuacaggugac

SEQ ID NO: 356117 - RNA, 19 nt, Human
acacagcauauccacaagg

SEQ ID NO: 356118 - RNA, 29 nt, Human
acucacacgacgguucacacagcauaucc

SEQ ID NO: 356119 - RNA, 18 nt, Human
aggcauaccacacucaca

SEQ ID NO: 356120 - RNA, 21 nt, Human
aucacagcccagacagaucug

SEQ ID NO: 356121 - RNA, 21 nt, Human
augagcucacugaggagaaug

SEQ ID NO: 356122 - RNA, 23 nt, Human
caauaagauugcuaagcuuccag

SEQ ID NO: 356123 - RNA, 25 nt, Human
caaugaaaaacaccaacggcucuga

SEQ ID NO: 356124 - RNA, 23 nt, Human
cacacaaaaaaaguugugugaug

SEQ ID NO: 356125 - RNA, 18 nt, Human
cacacucacacgacgguu

SEQ ID NO: 356126 - RNA, 25 nt, Human
cacauaaaauccuuuaaaaccaagc

SEQ ID NO: 356127 - RNA, 20 nt, Human
caggaaugcaaaaaaaaaaa

SEQ ID NO: 356128 - RNA, 26 nt, Human
ccacacucacacgacgguucacacag

SEQ ID NO: 356129 - RNA, 19 nt, Human
ccuuuaaaaccaagcccua

SEQ ID NO: 356130 - RNA, 22 nt, Human
gaaaaacaccaacggcucugac

SEQ ID NO: 356131 - RNA, 22 nt, Human
gaaaaccucaugagcucacuga

SEQ ID NO: 356132 - RNA, 18 nt, Human
gaagaaacaaacaauguc

SEQ ID NO: 356133 - RNA, 25 nt, Human
gcaaugcuuucuuuaggcaucugaa

SEQ ID NO: 356134 - RNA, 18 nt, Human
ggaaaagcuuuggagcua

SEQ ID NO: 356135 - RNA, 22 nt, Human
gggcauugguccauaaaaaccc

SEQ ID NO: 356136 - RNA, 19 nt, Human
gucagcuggcggcuccacc

SEQ ID NO: 356137 - RNA, 19 nt, Human
guccgcuuucuaacgaaac

SEQ ID NO: 356138 - RNA, 20 nt, Human
gugaugggaugagggaagga

SEQ ID NO: 356139 - RNA, 19 nt, Human
uaaaaccaagcccuaacag

SEQ ID NO: 356140 - RNA, 19 nt, Human
uaaacaaugaaaaacacca

SEQ ID NO: 356141 - RNA, 18 nt, Human
uaacaaaauccaucugug

SEQ ID NO: 356142 - RNA, 22 nt, Human
uaaccguaucuuacaaaaaagu

SEQ ID NO: 356143 - RNA, 27 nt, Human
uaccacacucacacgacgguucacaca

SEQ ID NO: 356144 - RNA, 20 nt, Human
uaggaaaagcuuuggagcua

SEQ ID NO: 356145 - RNA, 21 nt, Human
uaggaaaagcuuuggagcuaa

SEQ ID NO: 356146 - RNA, 21 nt, Human
uauacaauacauacaauuauc

SEQ ID NO: 356147 - RNA, 18 nt, Human
uaucuuccaaauauggaa

SEQ ID NO: 356148 - RNA, 23 nt, Human
ucauaauauucgucaucacagcc

SEQ ID NO: 356149 - RNA, 23 nt, Human
ugaaaaacaccaacggcucugac

SEQ ID NO: 356150 - RNA, 20 nt, Human
ugaggagaaugugcucuuca

SEQ ID NO: 356151 - RNA, 19 nt, Human
ugagggaaggauuguacgu

SEQ ID NO: 356152 - RNA, 21 nt, Human
ugaugggaugagggaaggauu

SEQ ID NO: 356153 - RNA, 20 nt, Human
uggaagaaacaaacaauguc

SEQ ID NO: 356154 - RNA, 24 nt, Human
uggaagaaacaaacaaugucccac

SEQ ID NO: 356155 - RNA, 21 nt, Human
uggggcauugguccauaaaaa

SEQ ID NO: 356156 - RNA, 22 nt, Human
uggggcauugguccauaaaaac

SEQ ID NO: 356157 - RNA, 20 nt, Human
ugugaucaggcauaccacac

SEQ ID NO: 356158 - RNA, 23 nt, Human
ugugaugggaugagggaaggauu

SEQ ID NO: 356159 - RNA, 19 nt, Human
uuaaacaaugaaaaacacc

SEQ ID NO: 356160 - RNA, 19 nt, Human
uucuuuaggcaucugaaua

SEQ ID NO: 356161 - RNA, 21 nt, Human
uuuguagcagcaaugcuuucu

SEQ ID NO: 356162 - RNA, 25 nt, Human
uuuuuuuuuuuuuuauuuuucaagg

SEQ ID NO: 356163 - RNA, 25 nt, Human
uuuuuuuuuuuuuuuuuuuauuuuu

SEQ ID NO: 356164 - RNA, 21 nt, Human
aaaauaguacaaccucagaca

SEQ ID NO: 356165 - RNA, 18 nt, Human
aacccaagaaacaaaaaa

SEQ ID NO: 356166 - RNA, 20 nt, Human
acauaagccaugcugaggcc

SEQ ID NO: 356167 - RNA, 21 nt, Human
acccaagaaacaaaaaagcuc

SEQ ID NO: 356168 - RNA, 21 nt, Human
agacaccauuuuaaacugcaa

SEQ ID NO: 356169 - RNA, 23 nt, Human
caaaaagcagaaucaucggugug

SEQ ID NO: 356170 - RNA, 25 nt, Human
caagugaaaugugucagcuccuccu

SEQ ID NO: 356171 - RNA, 18 nt, Human
cacgugcacauaagccau

SEQ ID NO: 356172 - RNA, 24 nt, Human
cauuuuaaaaacccaagaaacaaa

SEQ ID NO: 356173 - RNA, 21 nt, Human
cgaggggcagcccgaggagcg

SEQ ID NO: 356174 - RNA, 21 nt, Human
cuccuccucuugaguacagcc

SEQ ID NO: 356175 - RNA, 27 nt, Human
cuuuuuauuguugacauucacauuuua

SEQ ID NO: 356176 - RNA, 21 nt, Human
gaagacaauacacuaucuaca

SEQ ID NO: 356177 - RNA, 20 nt, Human
gaggggcagcccgaggagcg

SEQ ID NO: 356178 - RNA, 27 nt, Human
guacaaccucagacaccauuuuaaacu

SEQ ID NO: 356179 - RNA, 18 nt, Human
gugaaaugugucagcucc

SEQ ID NO: 356180 - RNA, 19 nt, Human
guuuucgucuagcaucuuc

SEQ ID NO: 356181 - RNA, 22 nt, Human
uaaaaacccaagaaacaaaaaa

SEQ ID NO: 356182 - RNA, 18 nt, Human
uaacagguaauguggguu

SEQ ID NO: 356183 - RNA, 22 nt, Human
uagcaaaaagcagaaucaucgg

SEQ ID NO: 356184 - RNA, 19 nt, Human
uauaacaaugcccaagggc

SEQ ID NO: 356185 - RNA, 19 nt, Human
ugaaaugugucagcuccuc

SEQ ID NO: 356186 - RNA, 27 nt, Human
uggccaaaauaguacaaccucagacac

SEQ ID NO: 356187 - RNA, 25 nt, Human
uuauucuaauuuagcaaaaagcaga

SEQ ID NO: 356188 - RNA, 23 nt, Human
uuggccaaaauaguacaaccuca

SEQ ID NO: 356189 - RNA, 18 nt, Human
uuuagcaaaaagcagaau

SEQ ID NO: 356190 - RNA, 21 nt, Human
aaaaaccacaaaaggaagaua

SEQ ID NO: 356191 - RNA, 24 nt, Human
accacaaaaggaagauaagaggaa

SEQ ID NO: 356192 - RNA, 24 nt, Human
agaacaagaauccugaggcucaag

SEQ ID NO: 356193 - RNA, 19 nt, Human
aggaagaacaagaauccug

SEQ ID NO: 356194 - RNA, 24 nt, Human
auggagcaagaccagaugucaaag

SEQ ID NO: 356195 - RNA, 19 nt, Human
cagccuccucuccgcgcuc

SEQ ID NO: 356196 - RNA, 23 nt, Human
uccauaucccaagaaccuucuga

SEQ ID NO: 356197 - RNA, 22 nt, Human
uccugaggcucaagcugucuca

SEQ ID NO: 356198 - RNA, 25 nt, Human
ucuccgcgcuccccuuuuucagacu

SEQ ID NO: 356199 - RNA, 19 nt, Human
uggagcaagaccagauguc

SEQ ID NO: 356200 - RNA, 21 nt, Human
aaacacucaagugaccgagcu

SEQ ID NO: 356201 - RNA, 18 nt, Human
aaacauccaggacagaag

SEQ ID NO: 356202 - RNA, 18 nt, Human
aaaccugccacuucucug

SEQ ID NO: 356203 - RNA, 21 nt, Human
aagcuucccuggggggccccg

SEQ ID NO: 356204 - RNA, 22 nt, Human
aagcuucccuggggggccccgg

SEQ ID NO: 356205 - RNA, 24 nt, Human
acaacgccuauuuauuccccacac

SEQ ID NO: 356206 - RNA, 18 nt, Human
acaccgggagcaggcagc

SEQ ID NO: 356207 - RNA, 18 nt, Human
acauggcccgcggugccc

SEQ ID NO: 356208 - RNA, 22 nt, Human
accccaggauucuagaaaacac

SEQ ID NO: 356209 - RNA, 22 nt, Human
acgcccugcaccccgggugggc

SEQ ID NO: 356210 - RNA, 21 nt, Human
acugcgccuaccucacagacg

SEQ ID NO: 356211 - RNA, 18 nt, Human
agaaaaugagggugggag

SEQ ID NO: 356212 - RNA, 22 nt, Human
agacggccaggagccagggagc

SEQ ID NO: 356213 - RNA, 21 nt, Human
agagauaaaaggggaaaaucc

SEQ ID NO: 356214 - RNA, 22 nt, Human
aggaaguggcagacaaccagaa

SEQ ID NO: 356215 - RNA, 22 nt, Human
aggaugcuccgacugacaaccc

SEQ ID NO: 356216 - RNA, 20 nt, Human
aggcugccugcuguccggcc

SEQ ID NO: 356217 - RNA, 26 nt, Human
aggcuuuggaagccacacgauccgcc

SEQ ID NO: 356218 - RNA, 19 nt, Human
agggaguuacaaaaaggga

SEQ ID NO: 356219 - RNA, 21 nt, Human
caaacacacauggcccgcggu

SEQ ID NO: 356220 - RNA, 22 nt, Human
caacaugcccaacuggagaaaa

SEQ ID NO: 356221 - RNA, 22 nt, Human
caagguggguggcaccugaggu

SEQ ID NO: 356222 - RNA, 21 nt, Human
caagugaccgagcuuucuggg

SEQ ID NO: 356223 - RNA, 20 nt, Human
cacacauggcccgcggugcc

SEQ ID NO: 356224 - RNA, 19 nt, Human
cacacggcugaacgugaaa

SEQ ID NO: 356225 - RNA, 24 nt, Human
cagaagaggugauaccucucaggc

SEQ ID NO: 356226 - RNA, 19 nt, Human
cagcaggaugggacacaga

SEQ ID NO: 356227 - RNA, 23 nt, Human
caggacggcuccugagccgcgga

SEQ ID NO: 356228 - RNA, 23 nt, Human
ccacacgucacgcccugcacccc

SEQ ID NO: 356229 - RNA, 20 nt, Human
ccacccagcacaggaggggu

SEQ ID NO: 356230 - RNA, 18 nt, Human
cccagaagaggugauacc

SEQ ID NO: 356231 - RNA, 23 nt, Human
cccagcugccuucccugugcccg

SEQ ID NO: 356232 - RNA, 19 nt, Human
ccccaggccucaggaaccc

SEQ ID NO: 356233 - RNA, 22 nt, Human
cccccaggccucaggaacccag

SEQ ID NO: 356234 - RNA, 20 nt, Human
cccggccccggccccagggc

SEQ ID NO: 356235 - RNA, 23 nt, Human
cccggggcuaaggcggccgggac

SEQ ID NO: 356236 - RNA, 21 nt, Human
ccgcagccgucucuuaggugu

SEQ ID NO: 356237 - RNA, 21 nt, Human
ccgggcccaugaaacauccag

SEQ ID NO: 356238 - RNA, 23 nt, Human
ccgugggcucgucugccaccccc

SEQ ID NO: 356239 - RNA, 24 nt, Human
ccucacagacggccaggagccagg

SEQ ID NO: 356240 - RNA, 23 nt, Human
cggccaggagccagggagcccca

SEQ ID NO: 356241 - RNA, 21 nt, Human
cgggucggccagggaaggacg

SEQ ID NO: 356242 - RNA, 25 nt, Human
cgucacgcccugcaccccggguggg

SEQ ID NO: 356243 - RNA, 20 nt, Human
cucuccggcugcuuuccugg

SEQ ID NO: 356244 - RNA, 18 nt, Human
cugggggcuguaagggag

SEQ ID NO: 356245 - RNA, 26 nt, Human
gagcaccccaggauucuagaaaacac

SEQ ID NO: 356246 - RNA, 21 nt, Human
gagcccagaagaggugauacc

SEQ ID NO: 356247 - RNA, 19 nt, Human
gaggggaaacaugucuguc

SEQ ID NO: 356248 - RNA, 20 nt, Human
gcgccuaccucacagacggc

SEQ ID NO: 356249 - RNA, 23 nt, Human
gcuguuuuagggccaaggugggu

SEQ ID NO: 356250 - RNA, 20 nt, Human
ggcacagggccgggguggcc

SEQ ID NO: 356251 - RNA, 19 nt, Human
ggccgggguggccgggagg

SEQ ID NO: 356252 - RNA, 20 nt, Human
ggcugcuuuccugguggcug

SEQ ID NO: 356253 - RNA, 19 nt, Human
gggccaagguggguggcac

SEQ ID NO: 356254 - RNA, 19 nt, Human
gggccgggguggccgggag

SEQ ID NO: 356255 - RNA, 23 nt, Human
gggcucgucugccacccccaggc

SEQ ID NO: 356256 - RNA, 18 nt, Human
gggcuguaaaaggcuuug

SEQ ID NO: 356257 - RNA, 22 nt, Human
gggugggaggaggggaaacaug

SEQ ID NO: 356258 - RNA, 21 nt, Human
ggugggaggaggggaaacaug

SEQ ID NO: 356259 - RNA, 24 nt, Human
uaaggcggccgggacagaagguca

SEQ ID NO: 356260 - RNA, 22 nt, Human
uacacgguacugcgccuaccuc

SEQ ID NO: 356261 - RNA, 22 nt, Human
uaccucacagacggccaggagc

SEQ ID NO: 356262 - RNA, 26 nt, Human
uacgauacacgguacugcgccuaccu

SEQ ID NO: 356263 - RNA, 19 nt, Human
uagaaaacacucaagugac

SEQ ID NO: 356264 - RNA, 24 nt, Human
uagaaaacacucaagugaccgagc

SEQ ID NO: 356265 - RNA, 25 nt, Human
uaggugucugccacuaaagaguucc

SEQ ID NO: 356266 - RNA, 18 nt, Human
ucaggcaguccaacagga

SEQ ID NO: 356267 - RNA, 21 nt, Human
ucccuggggggccccgggccc

SEQ ID NO: 356268 - RNA, 21 nt, Human
ucccuggggggccccgggccc

SEQ ID NO: 356269 - RNA, 22 nt, Human
ucccugugcccggggcuaaggc

SEQ ID NO: 356270 - RNA, 22 nt, Human
uccucaugcaaacacacauggc

SEQ ID NO: 356271 - RNA, 24 nt, Human
ucucaggcgaccgauccccgaccc

SEQ ID NO: 356272 - RNA, 20 nt, Human
ucucucucuuccccucucuc

SEQ ID NO: 356273 - RNA, 18 nt, Human
ucucuuccccucucucag

SEQ ID NO: 356274 - RNA, 20 nt, Human
ugaaacauccaggacagaag

SEQ ID NO: 356275 - RNA, 22 nt, Human
ugagcccagaagaggugauacc

SEQ ID NO: 356276 - RNA, 19 nt, Human
ugagcucuuccgagcaggc

SEQ ID NO: 356277 - RNA, 22 nt, Human
ugagcucuuccgagcaggcacu

SEQ ID NO: 356278 - RNA, 22 nt, Human
ugagggugggaggaggggaaac

SEQ ID NO: 356279 - RNA, 24 nt, Human
ugaggugucccguggccuccaccc

SEQ ID NO: 356280 - RNA, 21 nt, Human
ugaugucgccccuggcucuca

SEQ ID NO: 356281 - RNA, 21 nt, Human
ugcaaacacacauggcccgcg

SEQ ID NO: 356282 - RNA, 23 nt, Human
ugccacccccaggccucaggaac

SEQ ID NO: 356283 - RNA, 24 nt, Human
ugccacccccaggccucaggaacc

SEQ ID NO: 356284 - RNA, 25 nt, Human
ugccacccccaggccucaggaaccc

SEQ ID NO: 356285 - RNA, 18 nt, Human
ugccacuucucugagagc

SEQ ID NO: 356286 - RNA, 19 nt, Human
ugcccaggccgcagcuggc

SEQ ID NO: 356287 - RNA, 25 nt, Human
ugcccggggcuaaggcggccgggac

SEQ ID NO: 356288 - RNA, 22 nt, Human
ugcuggucugugcucagcuugc

SEQ ID NO: 356289 - RNA, 25 nt, Human
ugcuggucugugcucagcuugcugg

SEQ ID NO: 356290 - RNA, 24 nt, Human
uggcagacaaccagaaggcuuccu

SEQ ID NO: 356291 - RNA, 23 nt, Human
uggcuguuuuagggccaaggugg

SEQ ID NO: 356292 - RNA, 18 nt, Human
ugggacacagacagaaac

SEQ ID NO: 356293 - RNA, 18 nt, Human
ugggggcuggaagggagg

SEQ ID NO: 356294 - RNA, 21 nt, Human
uguuuuagggccaaggugggu

SEQ ID NO: 356295 - RNA, 23 nt, Human
uuccugcagacagaccacgggau

SEQ ID NO: 356296 - RNA, 18 nt, Human
uugagcccagaagaggug

SEQ ID NO: 356297 - RNA, 20 nt, Human
uuuagggccaaggugggugg

SEQ ID NO: 356298 - RNA, 19 nt, Human
uuuuuuuuuuuuagagguc

SEQ ID NO: 356299 - RNA, 22 nt, Human
uuuuuuuuuuuuuuuuuagagg

SEQ ID NO: 356300 - RNA, 19 nt, Human
aaaaucccaaaagagccua

SEQ ID NO: 356301 - RNA, 30 nt, Human
aaagugacauauaaucaaucacaaaaucaa

SEQ ID NO: 356302 - RNA, 22 nt, Human
aaaucccaaaagagccuaugac

SEQ ID NO: 356303 - RNA, 23 nt, Human
aaccaaguucaccaacacccaua

SEQ ID NO: 356304 - RNA, 19 nt, Human
aaccacccauaaugcauua

SEQ ID NO: 356305 - RNA, 19 nt, Human
aagacaagggacaccagcc

SEQ ID NO: 356306 - RNA, 20 nt, Human
aagcuuuuuuucaaaaaaag

SEQ ID NO: 356307 - RNA, 20 nt, Human
aaguucaccaacacccauac

SEQ ID NO: 356308 - RNA, 19 nt, Human
aauuccuuuacaaguucau

SEQ ID NO: 356309 - RNA, 21 nt, Human
accaaguucaccaacacccau

SEQ ID NO: 356310 - RNA, 20 nt, Human
accagccaacuucccaccau

SEQ ID NO: 356311 - RNA, 21 nt, Human
accagccaacuucccaccaua

SEQ ID NO: 356312 - RNA, 18 nt, Human
acuccagguuggucugug

SEQ ID NO: 356313 - RNA, 19 nt, Human
agaaaauaaaguacaaggu

SEQ ID NO: 356314 - RNA, 22 nt, Human
agccagaugugcaaaaaagaga

SEQ ID NO: 356315 - RNA, 20 nt, Human
agggaccagguguuuuuacu

SEQ ID NO: 356316 - RNA, 19 nt, Human
agggagaugccgcugcuac

SEQ ID NO: 356317 - RNA, 21 nt, Human
aggguucauacagagagggga

SEQ ID NO: 356318 - RNA, 24 nt, Human
auacagcuucaaaaaucccaaaag

SEQ ID NO: 356319 - RNA, 25 nt, Human
aucacaaaaauauaaaugugagaag

SEQ ID NO: 356320 - RNA, 18 nt, Human
aucaggucuugccaguac

SEQ ID NO: 356321 - RNA, 18 nt, Human
augccgcugcuacugcag

SEQ ID NO: 356322 - RNA, 22 nt, Human
auggagaauagcucugucucuc

SEQ ID NO: 356323 - RNA, 22 nt, Human
auuauccuuuuguuucccauuu

SEQ ID NO: 356324 - RNA, 23 nt, Human
auuauuccagaaugaacacauua

SEQ ID NO: 356325 - RNA, 23 nt, Human
auuguuucuuuucucguccaaca

SEQ ID NO: 356326 - RNA, 18 nt, Human
caaaaaaaggcucuugga

SEQ ID NO: 356327 - RNA, 26 nt, Human
caaaaaagagagaagcaccccaacaa

SEQ ID NO: 356328 - RNA, 18 nt, Human
caaaagagccuaugacac

SEQ ID NO: 356329 - RNA, 21 nt, Human
caacaagacagugaacugaga

SEQ ID NO: 356330 - RNA, 18 nt, Human
caaccaccugacucccag

SEQ ID NO: 356331 - RNA, 20 nt, Human
caagacagugaacugagagc

SEQ ID NO: 356332 - RNA, 21 nt, Human
caagucaaccaccugacuccc

SEQ ID NO: 356333 - RNA, 23 nt, Human
caagucaaccaccugacucccag

SEQ ID NO: 356334 - RNA, 24 nt, Human
caaucacaaaaucacaaaaauaua

SEQ ID NO: 356335 - RNA, 21 nt, Human
caauccagaauucccaguuau

SEQ ID NO: 356336 - RNA, 21 nt, Human
cacacaguauacagcuucaaa

SEQ ID NO: 356337 - RNA, 19 nt, Human
cacaguauacagcuucaaa

SEQ ID NO: 356338 - RNA, 21 nt, Human
caccauacaaucaagcaagac

SEQ ID NO: 356339 - RNA, 20 nt, Human
cacccauaaugcauuacuca

SEQ ID NO: 356340 - RNA, 26 nt, Human
cacccauaaugcauuacucaggccac

SEQ ID NO: 356341 - RNA, 21 nt, Human
cacccauacacaauccagaau

SEQ ID NO: 356342 - RNA, 23 nt, Human
cacuaaaaauggagcuuuucaca

SEQ ID NO: 356343 - RNA, 22 nt, Human
cacuccacuuuuguacucccac

SEQ ID NO: 356344 - RNA, 26 nt, Human
cagaaugaacacauuauagaguuaaa

SEQ ID NO: 356345 - RNA, 21 nt, Human
cagaguauuugcacugaccua

SEQ ID NO: 356346 - RNA, 21 nt, Human
cagccaggcacaagucaacca

SEQ ID NO: 356347 - RNA, 22 nt, Human
ccaacacccauacacaauccag

SEQ ID NO: 356348 - RNA, 21 nt, Human
ccaccauacaaucaagcaaga

SEQ ID NO: 356349 - RNA, 18 nt, Human
ccagaugugcaaaaaaga

SEQ ID NO: 356350 - RNA, 21 nt, Human
cucaagaaaugguaaaccacc

SEQ ID NO: 356351 - RNA, 22 nt, Human
cucaagaaaugguaaaccaccc

SEQ ID NO: 356352 - RNA, 18 nt, Human
cucaggccacacuccacu

SEQ ID NO: 356353 - RNA, 22 nt, Human
cugcagccaggcacaagucaac

SEQ ID NO: 356354 - RNA, 21 nt, Human
cuucaaaaaucccaaaagagc

SEQ ID NO: 356355 - RNA, 21 nt, Human
cuugccuuaaaccuccuucuc

SEQ ID NO: 356356 - RNA, 18 nt, Human
cuuggcaaagacaaggga

SEQ ID NO: 356357 - RNA, 23 nt, Human
gaaugaacacauuauagaguuaa

SEQ ID NO: 356358 - RNA, 26 nt, Human
gcaagaagguugcuuuccuccccugg

SEQ ID NO: 356359 - RNA, 23 nt, Human
gcagccaggcacaagucaaccac

SEQ ID NO: 356360 - RNA, 19 nt, Human
gccgcugcuacugcagcca

SEQ ID NO: 356361 - RNA, 21 nt, Human
ggacaccagccaacuucccac

SEQ ID NO: 356362 - RNA, 19 nt, Human
ggaggaacauuggaagaag

SEQ ID NO: 356363 - RNA, 20 nt, Human
ggaggaacauuggaagaaga

SEQ ID NO: 356364 - RNA, 19 nt, Human
guggauuuuacuguccaau

SEQ ID NO: 356365 - RNA, 21 nt, Human
uaaagaccagaucuaccuaca

SEQ ID NO: 356366 - RNA, 22 nt, Human
uaaaguauucauuauccuuuug

SEQ ID NO: 356367 - RNA, 18 nt, Human
uaaugcauuacucaggcc

SEQ ID NO: 356368 - RNA, 24 nt, Human
uacagagaggggaggaacauugga

SEQ ID NO: 356369 - RNA, 19 nt, Human
uacucaggccacacuccac

SEQ ID NO: 356370 - RNA, 21 nt, Human
uacuuuaaaaggaggcuuguu

SEQ ID NO: 356371 - RNA, 21 nt, Human
uagcuaguggagaacuuggca

SEQ ID NO: 356372 - RNA, 25 nt, Human
ucaaaaaaagcuuuuuuucaaaaaa

SEQ ID NO: 356373 - RNA, 22 nt, Human
ucacuaaaaauggagcuuuuca

SEQ ID NO: 356374 - RNA, 22 nt, Human
uccaauaucagaacacuaggca

SEQ ID NO: 356375 - RNA, 19 nt, Human
ucuaucugccucuaaagac

SEQ ID NO: 356376 - RNA, 24 nt, Human
ucucguccaacaagacagugaacu

SEQ ID NO: 356377 - RNA, 20 nt, Human
ucugugagcccuguagcaaa

SEQ ID NO: 356378 - RNA, 22 nt, Human
ucuugggcaggccgaggaggag

SEQ ID NO: 356379 - RNA, 22 nt, Human
ugaaaagaaaaacucauuucau

SEQ ID NO: 356380 - RNA, 24 nt, Human
ugaaagacuugaugauucaaaaaa

SEQ ID NO: 356381 - RNA, 19 nt, Human
ugaacugagagcagggacc

SEQ ID NO: 356382 - RNA, 21 nt, Human
ugaacugagagcagggaccag

SEQ ID NO: 356383 - RNA, 19 nt, Human
ugacauauaaucaaucaca

SEQ ID NO: 356384 - RNA, 22 nt, Human
ugagaagaaaaugccgcauaaa

SEQ ID NO: 356385 - RNA, 21 nt, Human
ugcauuuguagcucaccgaac

SEQ ID NO: 356386 - RNA, 21 nt, Human
uguagguuucaaucacuugga

SEQ ID NO: 356387 - RNA, 25 nt, Human
uuaaaaccaaguucaccaacaccca

SEQ ID NO: 356388 - RNA, 21 nt, Human
uuaaaauuaguagcuauaaaa

SEQ ID NO: 356389 - RNA, 18 nt, Human
uucacugucuuuuaucgu

SEQ ID NO: 356390 - RNA, 18 nt, Human
uucacugucuuuuaucgu

SEQ ID NO: 356391 - RNA, 29 nt, Human
uuuaaacucaagccauauaauuaaaaauu

SEQ ID NO: 356392 - RNA, 21 nt, Human
uuucaaaaaaaggcucuugga

SEQ ID NO: 356393 - RNA, 19 nt, Human
uuucacaaaaacugaggau

SEQ ID NO: 356394 - RNA, 20 nt, Human
acagugggagcuaacagggc

SEQ ID NO: 356395 - RNA, 26 nt, Human
accaaaccauuccucagacaacagcc

SEQ ID NO: 356396 - RNA, 20 nt, Human
agacaagaaucaacaaaccg

SEQ ID NO: 356397 - RNA, 24 nt, Human
agacucaaaaggcucagagggcca

SEQ ID NO: 356398 - RNA, 21 nt, Human
agcaggguguguguauguguu

SEQ ID NO: 356399 - RNA, 18 nt, Human
agccauuggauucuuggg

SEQ ID NO: 356400 - RNA, 25 nt, Human
aggacagugggagcuaaccgguacc

SEQ ID NO: 356401 - RNA, 19 nt, Human
aggagaaaccaggacagug

SEQ ID NO: 356402 - RNA, 26 nt, Human
aggagaaggcaguuggugaugauuua

SEQ ID NO: 356403 - RNA, 20 nt, Human
aggcuccgcauuugcuucuc

SEQ ID NO: 356404 - RNA, 22 nt, Human
caccaaaccauuccucagacaa

SEQ ID NO: 356405 - RNA, 18 nt, Human
cacuucuuugcugucuua

SEQ ID NO: 356406 - RNA, 22 nt, Human
cagcagcauuggaccagggccc

SEQ ID NO: 356407 - RNA, 20 nt, Human
caggcuucuuuguugggggu

SEQ ID NO: 356408 - RNA, 24 nt, Human
ccagggcccagacucaaaaggcuc

SEQ ID NO: 356409 - RNA, 23 nt, Human
ccucagacaacagcagcauugga

SEQ ID NO: 356410 - RNA, 22 nt, Human
gagggagcaggcuccgcauuug

SEQ ID NO: 356411 - RNA, 19 nt, Human
gcccagacucaaaaggcuc

SEQ ID NO: 356412 - RNA, 20 nt, Human
gcuucuuuguugggggucag

SEQ ID NO: 356413 - RNA, 22 nt, Human
ggaccagggcccagacucaaaa

SEQ ID NO: 356414 - RNA, 18 nt, Human
ggccaaggaaauuagacu

SEQ ID NO: 356415 - RNA, 21 nt, Human
uagccagacaagaaucaacaa

SEQ ID NO: 356416 - RNA, 22 nt, Human
uaggagaaggcaguuggugaug

SEQ ID NO: 356417 - RNA, 22 nt, Human
ucagagggccaaggaaauuaga

SEQ ID NO: 356418 - RNA, 19 nt, Human
uccaggaggagaaaccagg

SEQ ID NO: 356419 - RNA, 20 nt, Human
ucccuguaggagaaggcagu

SEQ ID NO: 356420 - RNA, 18 nt, Human
uggaccagggcccagacu

SEQ ID NO: 356421 - RNA, 18 nt, Human
uggauucuugggaucuuc

SEQ ID NO: 356422 - RNA, 20 nt, Human
uguaggagaaggcaguuggu

SEQ ID NO: 356423 - RNA, 24 nt, Human
aaaagaaaaaaaaaucuucaaaag

SEQ ID NO: 356424 - RNA, 21 nt, Human
aaaagccaagacugucaggca

SEQ ID NO: 356425 - RNA, 22 nt, Human
agcaaaaaagaaaaaaaaaucu

SEQ ID NO: 356426 - RNA, 24 nt, Human
aggcagcauaaguccucaguaacc

SEQ ID NO: 356427 - RNA, 18 nt, Human
augaagguaugcauaaac

SEQ ID NO: 356428 - RNA, 18 nt, Human
caaaagccaagacuguca

SEQ ID NO: 356429 - RNA, 24 nt, Human
caaaagccaagacugucaggcaca

SEQ ID NO: 356430 - RNA, 20 nt, Human
cagagcaaaaaagaaaaaaa

SEQ ID NO: 356431 - RNA, 19 nt, Human
caugccuugaaaucauuuu

SEQ ID NO: 356432 - RNA, 21 nt, Human
ccuccauguacaucuaaccag

SEQ ID NO: 356433 - RNA, 18 nt, Human
cuccucccuccauuggcc

SEQ ID NO: 356434 - RNA, 20 nt, Human
cuucauuuuaaaaccuguuu

SEQ ID NO: 356435 - RNA, 18 nt, Human
cuugggcuccucccucca

SEQ ID NO: 356436 - RNA, 19 nt, Human
gaaaauauuugauuggucg

SEQ ID NO: 356437 - RNA, 18 nt, Human
uaaguccucaguaacccu

SEQ ID NO: 356438 - RNA, 20 nt, Human
ucacagagaacuuccaugcc

SEQ ID NO: 356439 - RNA, 20 nt, Human
ugaaaucauuuuuuucagag

SEQ ID NO: 356440 - RNA, 24 nt, Human
ugaaaucauuuuuuucagaguauu

SEQ ID NO: 356441 - RNA, 23 nt, Human
ugcagagcaaaaaagaaaaaaaa

SEQ ID NO: 356442 - RNA, 26 nt, Human
ugcagagcaaaaaagaaaaaaaaauc

SEQ ID NO: 356443 - RNA, 27 nt, Human
ugcagagcaaaaaagaaaaaaaaaucc

SEQ ID NO: 356444 - RNA, 19 nt, Human
ugcauaaacggucuucaca

SEQ ID NO: 356445 - RNA, 23 nt, Human
uuaauaagauggucuagcuaugc

SEQ ID NO: 356446 - RNA, 25 nt, Human
uucagaguauuauuaauaagauggu

SEQ ID NO: 356447 - RNA, 21 nt, Human
uuuauuuauaugaugguucuc

SEQ ID NO: 356448 - RNA, 22 nt, Human
aaaaaaaaaagaaaagaaaaag

SEQ ID NO: 356449 - RNA, 21 nt, Human
aaaaaaagaaaagaaaaagaa

SEQ ID NO: 356450 - RNA, 18 nt, Human
aaaaacaaaaaacuaaaa

SEQ ID NO: 356451 - RNA, 23 nt, Human
aaaaacaaaauaaauaaaaagaa

SEQ ID NO: 356452 - RNA, 20 nt, Human
aaaaacaagaacacaagacu

SEQ ID NO: 356453 - RNA, 22 nt, Human
aaaaacaagaacacaagacuca

SEQ ID NO: 356454 - RNA, 25 nt, Human
aaaagaaaaagaaaaagacaacaag

SEQ ID NO: 356455 - RNA, 20 nt, Human
aaaagcuucuucccugcuga

SEQ ID NO: 356456 - RNA, 24 nt, Human
aaacaagaacacaagacucacaua

SEQ ID NO: 356457 - RNA, 24 nt, Human
aaagcaccuccagagcccuaaccc

SEQ ID NO: 356458 - RNA, 18 nt, Human
aacaaaagugcaagagga

SEQ ID NO: 356459 - RNA, 21 nt, Human
aacacacgugcaucagagaca

SEQ ID NO: 356460 - RNA, 20 nt, Human
aacaugauaaaaucccgucu

SEQ ID NO: 356461 - RNA, 20 nt, Human
aacauggugaaaccccgguu

SEQ ID NO: 356462 - RNA, 21 nt, Human
aacauggugaaaccccgguuc

SEQ ID NO: 356463 - RNA, 21 nt, Human
aacauggugaaaccccgguuc

SEQ ID NO: 356464 - RNA, 22 nt, Human
aaccacagguccccagaacaca

SEQ ID NO: 356465 - RNA, 25 nt, Human
aaccacaucucgcacccaauucucc

SEQ ID NO: 356466 - RNA, 20 nt, Human
aagaaaaaucacaaggauuc

SEQ ID NO: 356467 - RNA, 19 nt, Human
aagagaaacuauggccaca

SEQ ID NO: 356468 - RNA, 19 nt, Human
aagcacccagcucggcacc

SEQ ID NO: 356469 - RNA, 23 nt, Human
aagcacccagcucggcaccucac

SEQ ID NO: 356470 - RNA, 23 nt, Human
aagcaccuccagagcccuaaccc

SEQ ID NO: 356471 - RNA, 19 nt, Human
aagcagacggcaacgccag

SEQ ID NO: 356472 - RNA, 21 nt, Human
aagcagacggcaacgccaggg

SEQ ID NO: 356473 - RNA, 18 nt, Human
aagccagggcagagaggc

SEQ ID NO: 356474 - RNA, 18 nt, Human
aagcuggaccaaggcccc

SEQ ID NO: 356475 - RNA, 25 nt, Human
aagggaauucuguuuuacugcuggu

SEQ ID NO: 356476 - RNA, 24 nt, Human
aauccacucuagccugggcgacag

SEQ ID NO: 356477 - RNA, 22 nt, Human
acaaaaauuuggcaggcagcug

SEQ ID NO: 356478 - RNA, 19 nt, Human
acaaaagugcaagaggaag

SEQ ID NO: 356479 - RNA, 24 nt, Human
acacccaggggaagggggcugcag

SEQ ID NO: 356480 - RNA, 24 nt, Human
acagagugagacugugucccaaaa

SEQ ID NO: 356481 - RNA, 23 nt, Human
acagggugagacuacaucucaaa

SEQ ID NO: 356482 - RNA, 24 nt, Human
acagggugagacuacaucucaaaa

SEQ ID NO: 356483 - RNA, 23 nt, Human
acccaggggaagggggcugcagg

SEQ ID NO: 356484 - RNA, 24 nt, Human
accccaaacuagaaacaaaccaac

SEQ ID NO: 356485 - RNA, 24 nt, Human
accccaacacacucuugaaacuga

SEQ ID NO: 356486 - RNA, 24 nt, Human
accugaggucaggaguucgagacc

SEQ ID NO: 356487 - RNA, 24 nt, Human
acuccagccugggcgacaggguga

SEQ ID NO: 356488 - RNA, 24 nt, Human
acucuagccugggcgacagaguga

SEQ ID NO: 356489 - RNA, 20 nt, Human
acugcucgcuaaugcaggga

SEQ ID NO: 356490 - RNA, 18 nt, Human
acugcucuccagucuggg

SEQ ID NO: 356491 - RNA, 21 nt, Human
acuuccuaacaguguguuagg

SEQ ID NO: 356492 - RNA, 27 nt, Human
agaaaaagaaaaagacaacaaguuaaa

SEQ ID NO: 356493 - RNA, 18 nt, Human
agacagguaggggucugc

SEQ ID NO: 356494 - RNA, 19 nt, Human
agaggaaaccccugcagag

SEQ ID NO: 356495 - RNA, 21 nt, Human
agagucccuucguccucugga

SEQ ID NO: 356496 - RNA, 23 nt, Human
agaucaccugaggucaggaguuc

SEQ ID NO: 356497 - RNA, 18 nt, Human
agcaaaccagcacccucc

SEQ ID NO: 356498 - RNA, 23 nt, Human
agcacuugggaggccaagguggg

SEQ ID NO: 356499 - RNA, 24 nt, Human
agcacuuugggaggccaagguggg

SEQ ID NO: 356500 - RNA, 19 nt, Human
agccccggcccccacccag

SEQ ID NO: 356501 - RNA, 24 nt, Human
agccuggccaacaugauaaaaucc

SEQ ID NO: 356502 - RNA, 22 nt, Human
agccuggccaacauggugaaac

SEQ ID NO: 356503 - RNA, 24 nt, Human
agccuggccaacauggugaaaccc

SEQ ID NO: 356504 - RNA, 22 nt, Human
agccuggcgccugguucagccc

SEQ ID NO: 356505 - RNA, 22 nt, Human
agccugggcgacagagugagac

SEQ ID NO: 356506 - RNA, 22 nt, Human
agccugggcgacagggugagac

SEQ ID NO: 356507 - RNA, 20 nt, Human
agcucggcaccucacagaug

SEQ ID NO: 356508 - RNA, 22 nt, Human
aggcaagcacagccuugcuccu

SEQ ID NO: 356509 - RNA, 20 nt, Human
aggcacagcuugguccuggg

SEQ ID NO: 356510 - RNA, 24 nt, Human
aggcacaguggcucaugccuguaa

SEQ ID NO: 356511 - RNA, 25 nt, Human
aggcagcagaacuggugaguggggu

SEQ ID NO: 356512 - RNA, 21 nt, Human
aggcaggaaaaucgcuugaac

SEQ ID NO: 356513 - RNA, 24 nt, Human
aggcaggaaaaucgcuugaacuag

SEQ ID NO: 356514 - RNA, 23 nt, Human
aggcaggagaaucgauugaaccc

SEQ ID NO: 356515 - RNA, 25 nt, Human
aggcaggagaaucgauugaacccug

SEQ ID NO: 356516 - RNA, 21 nt, Human
aggcaggggccagggucuagg

SEQ ID NO: 356517 - RNA, 20 nt, Human
aggcagggggugugugcgag

SEQ ID NO: 356518 - RNA, 21 nt, Human
aggcagggggugugugcgagg

SEQ ID NO: 356519 - RNA, 21 nt, Human
aggccaaggugggcagaucac

SEQ ID NO: 356520 - RNA, 18 nt, Human
aggccaaggugggcggau

SEQ ID NO: 356521 - RNA, 24 nt, Human
aggcggagguggcagugagcggag

SEQ ID NO: 356522 - RNA, 21 nt, Human
aggcugaggcaggaaaaucgc

SEQ ID NO: 356523 - RNA, 24 nt, Human
aggcugaggcaggaaaaucgcuug

SEQ ID NO: 356524 - RNA, 21 nt, Human
agggcacuugggugcuggcaa

SEQ ID NO: 356525 - RNA, 19 nt, Human
aggggugagugugaugggg

SEQ ID NO: 356526 - RNA, 21 nt, Human
aggggugagugugaugggggg

SEQ ID NO: 356527 - RNA, 26 nt, Human
aggugggcagaucaccugaggucagg

SEQ ID NO: 356528 - RNA, 25 nt, Human
aggugguggggguugucugucaagc

SEQ ID NO: 356529 - RNA, 18 nt, Human
aguggcagaggugggacu

SEQ ID NO: 356530 - RNA, 23 nt, Human
aguggcucaugccuguaauccca

SEQ ID NO: 356531 - RNA, 24 nt, Human
aguggcucaugccuguaaucccag

SEQ ID NO: 356532 - RNA, 24 nt, Human
aguugaggucaggaguucaagacc

SEQ ID NO: 356533 - RNA, 19 nt, Human
auaaagcacagaaacagga

SEQ ID NO: 356534 - RNA, 21 nt, Human
auaacuauacaccccaccaga

SEQ ID NO: 356535 - RNA, 24 nt, Human
aucacgccaauccacucuagccug

SEQ ID NO: 356536 - RNA, 24 nt, Human
aucacggcauugcacuccagccug

SEQ ID NO: 356537 - RNA, 23 nt, Human
aucagaacaacagaagcucccug

SEQ ID NO: 356538 - RNA, 19 nt, Human
augccuguaaucccagcac

SEQ ID NO: 356539 - RNA, 24 nt, Human
auggcccccuggggucacagccuc

SEQ ID NO: 356540 - RNA, 21 nt, Human
auugcacuccagccugggcga

SEQ ID NO: 356541 - RNA, 23 nt, Human
auugcacuccagccugggcgaca

SEQ ID NO: 356542 - RNA, 22 nt, Human
caaaaaacacacgugcaucaga

SEQ ID NO: 356543 - RNA, 22 nt, Human
caaacaauggaaguuuuuagca

SEQ ID NO: 356544 - RNA, 24 nt, Human
caacaugauaaaaucccgucucua

SEQ ID NO: 356545 - RNA, 18 nt, Human
caacauggugaaaccccg

SEQ ID NO: 356546 - RNA, 22 nt, Human
caacauggugaaaccccgguuc

SEQ ID NO: 356547 - RNA, 18 nt, Human
caagaacacaagacucac

SEQ ID NO: 356548 - RNA, 26 nt, Human
caagaacacaagacucacauaagcca

SEQ ID NO: 356549 - RNA, 24 nt, Human
caagaccagccuggccaacauggu

SEQ ID NO: 356550 - RNA, 19 nt, Human
caagacucacauaagccag

SEQ ID NO: 356551 - RNA, 23 nt, Human
caagagacccccacaacgaccau

SEQ ID NO: 356552 - RNA, 18 nt, Human
caagaggaagucuucaag

SEQ ID NO: 356553 - RNA, 24 nt, Human
caaggccuaggccuccugccagcc

SEQ ID NO: 356554 - RNA, 24 nt, Human
caaggugggcagaucaccugaggu

SEQ ID NO: 356555 - RNA, 24 nt, Human
caaggugggcggaucaguugaggu

SEQ ID NO: 356556 - RNA, 18 nt, Human
caccauuugcaaaaaaca

SEQ ID NO: 356557 - RNA, 20 nt, Human
caccccaacacacucuugaa

SEQ ID NO: 356558 - RNA, 25 nt, Human
caccccaacacacucuugaaacuga

SEQ ID NO: 356559 - RNA, 25 nt, Human
caccccaggcaccaggcuggaaacc

SEQ ID NO: 356560 - RNA, 19 nt, Human
cacccuccaacaaaagugc

SEQ ID NO: 356561 - RNA, 23 nt, Human
caccugaggucaggaguucgaga

SEQ ID NO: 356562 - RNA, 20 nt, Human
cacuccagccugggcgacag

SEQ ID NO: 356563 - RNA, 20 nt, Human
cacuccagccugggcgacag

SEQ ID NO: 356564 - RNA, 20 nt, Human
cacuccagccugggcgacag

SEQ ID NO: 356565 - RNA, 24 nt, Human
cacuccagccugggcgacagggug

SEQ ID NO: 356566 - RNA, 18 nt, Human
cacucuagccugggcgac

SEQ ID NO: 356567 - RNA, 22 nt, Human
cacucuagccugggcgacagag

SEQ ID NO: 356568 - RNA, 22 nt, Human
cacucuagccugggcgacagag

SEQ ID NO: 356569 - RNA, 24 nt, Human
cacucuagccugggcgacagagug

SEQ ID NO: 356570 - RNA, 24 nt, Human
cagaucaccugaggucaggaguuc

SEQ ID NO: 356571 - RNA, 27 nt, Human
cagaucaccugaggucaggaguucgag

SEQ ID NO: 356572 - RNA, 20 nt, Human
cagcacuugggaggccaagg

SEQ ID NO: 356573 - RNA, 24 nt, Human
cagcacuuugggaggccaaggugg

SEQ ID NO: 356574 - RNA, 24 nt, Human
cagcuacucgggaggcugaggcag

SEQ ID NO: 356575 - RNA, 19 nt, Human
cagcugcccuggcccugcc

SEQ ID NO: 356576 - RNA, 19 nt, Human
cagcugcccuggcccugcc

SEQ ID NO: 356577 - RNA, 23 nt, Human
cagcuguaaucccagcuacaugg

SEQ ID NO: 356578 - RNA, 24 nt, Human
cagcuguaaucccagcuacauggg

SEQ ID NO: 356579 - RNA, 20 nt, Human
caggacugccccuagggcaa

SEQ ID NO: 356580 - RNA, 18 nt, Human
cagggcgugcaggcagag

SEQ ID NO: 356581 - RNA, 23 nt, Human
cagggcuucuagcucuguagccc

SEQ ID NO: 356582 - RNA, 24 nt, Human
cagggucacugccccucuucccca

SEQ ID NO: 356583 - RNA, 20 nt, Human
caggucccaggucccccucu

SEQ ID NO: 356584 - RNA, 19 nt, Human
caggugaccguguaaguga

SEQ ID NO: 356585 - RNA, 22 nt, Human
caggugaccguguaagugacau

SEQ ID NO: 356586 - RNA, 22 nt, Human
caguggggaguggcaugacucc

SEQ ID NO: 356587 - RNA, 24 nt, Human
caguguuccuguccuuggagccca

SEQ ID NO: 356588 - RNA, 23 nt, Human
caguugaggucaggaguucaaga

SEQ ID NO: 356589 - RNA, 20 nt, Human
caucucaaaaacaaaaaacu

SEQ ID NO: 356590 - RNA, 20 nt, Human
caugccuguaaucccagcac

SEQ ID NO: 356591 - RNA, 24 nt, Human
caugccuguaaucccagcacuuug

SEQ ID NO: 356592 - RNA, 19 nt, Human
cauugcacuccagccuggg

SEQ ID NO: 356593 - RNA, 19 nt, Human
cauugcacuccagccuggg

SEQ ID NO: 356594 - RNA, 20 nt, Human
cauugcacuccagccugggc

SEQ ID NO: 356595 - RNA, 20 nt, Human
cauugcacuccagccugggc

SEQ ID NO: 356596 - RNA, 20 nt, Human
cauugcacuccagccugggc

SEQ ID NO: 356597 - RNA, 21 nt, Human
cauugcacuccagccugggcg

SEQ ID NO: 356598 - RNA, 22 nt, Human
cauugcacuccagccugggcga

SEQ ID NO: 356599 - RNA, 24 nt, Human
cauugcacuccagccugggcgaca

SEQ ID NO: 356600 - RNA, 22 nt, Human
cauuguguguaguuaccccaaa

SEQ ID NO: 356601 - RNA, 21 nt, Human
ccaaacuagaaacaaaccaac

SEQ ID NO: 356602 - RNA, 22 nt, Human
ccaaagaagccagcugccagaa

SEQ ID NO: 356603 - RNA, 24 nt, Human
ccaaagccacuggggcccuuuucc

SEQ ID NO: 356604 - RNA, 20 nt, Human
ccaacaaaagugcaagagga

SEQ ID NO: 356605 - RNA, 21 nt, Human
ccaacacacucuugaaacuga

SEQ ID NO: 356606 - RNA, 20 nt, Human
ccaagcaaaugaugucaagc

SEQ ID NO: 356607 - RNA, 18 nt, Human
ccacugcucuccagucug

SEQ ID NO: 356608 - RNA, 21 nt, Human
ccacugcucuccagucugggc

SEQ ID NO: 356609 - RNA, 23 nt, Human
ccacugcucuccagucugggcaa

SEQ ID NO: 356610 - RNA, 24 nt, Human
ccacugcucuccagucugggcaac

SEQ ID NO: 356611 - RNA, 19 nt, Human
ccagacugcccaaguuugg

SEQ ID NO: 356612 - RNA, 18 nt, Human
ccagcaaaccacaggucc

SEQ ID NO: 356613 - RNA, 24 nt, Human
ccagcacuugggaggccaaggugg

SEQ ID NO: 356614 - RNA, 21 nt, Human
ccagcccacccucacagaccc

SEQ ID NO: 356615 - RNA, 26 nt, Human
ccagcgaggggcuugaugcugcuggg

SEQ ID NO: 356616 - RNA, 21 nt, Human
ccaggcaagagacccccacaa

SEQ ID NO: 356617 - RNA, 20 nt, Human
ccaggcaugcaggagguacc

SEQ ID NO: 356618 - RNA, 21 nt, Human
cccaacccuacccuuauaugu

SEQ ID NO: 356619 - RNA, 20 nt, Human
cccaucccaccccaacacac

SEQ ID NO: 356620 - RNA, 20 nt, Human
ccccaaggacaggcaaccuc

SEQ ID NO: 356621 - RNA, 19 nt, Human
ccccaauaagcccugccug

SEQ ID NO: 356622 - RNA, 20 nt, Human
ccccaauaagcccugccugc

SEQ ID NO: 356623 - RNA, 19 nt, Human
ccccaaugcccacccucgc

SEQ ID NO: 356624 - RNA, 18 nt, Human
ccccagaacacacccagg

SEQ ID NO: 356625 - RNA, 18 nt, Human
ccccagugcuguggcccc

SEQ ID NO: 356626 - RNA, 19 nt, Human
ccccaucccaccccaacac

SEQ ID NO: 356627 - RNA, 20 nt, Human
ccccaucccaccccaacaca

SEQ ID NO: 356628 - RNA, 22 nt, Human
cccccacccagcugcccuggcc

SEQ ID NO: 356629 - RNA, 23 nt, Human
cccccacccagcugcccuggccc

SEQ ID NO: 356630 - RNA, 20 nt, Human
ccccuagggcaaggccuagg

SEQ ID NO: 356631 - RNA, 19 nt, Human
ccccuccuucccaaucaag

SEQ ID NO: 356632 - RNA, 19 nt, Human
ccccucuuccccaaggaca

SEQ ID NO: 356633 - RNA, 20 nt, Human
ccccucuuccccaaggacag

SEQ ID NO: 356634 - RNA, 22 nt, Human
cccgucucuacuaaaaauacaa

SEQ ID NO: 356635 - RNA, 19 nt, Human
cccuaccucccugagucug

SEQ ID NO: 356636 - RNA, 24 nt, Human
cccuagaacccaggagucagacuc

SEQ ID NO: 356637 - RNA, 22 nt, Human
cccucggccuagaacagcucac

SEQ ID NO: 356638 - RNA, 19 nt, Human
cccuggggcugcgcugagc

SEQ ID NO: 356639 - RNA, 19 nt, Human
cccugugcuccagccucgg

SEQ ID NO: 356640 - RNA, 19 nt, Human
cccugugcuccagccucgg

SEQ ID NO: 356641 - RNA, 20 nt, Human
cccugugcuccagccucggc

SEQ ID NO: 356642 - RNA, 18 nt, Human
ccuaacccuagcccuggg

SEQ ID NO: 356643 - RNA, 22 nt, Human
ccuaacccuagcccugggagcc

SEQ ID NO: 356644 - RNA, 20 nt, Human
ccucauacccagcugucccc

SEQ ID NO: 356645 - RNA, 22 nt, Human
ccucgcccauccugaggugcag

SEQ ID NO: 356646 - RNA, 24 nt, Human
ccucuggagccuggcgccugguuc

SEQ ID NO: 356647 - RNA, 18 nt, Human
ccugaacucaucuugaag

SEQ ID NO: 356648 - RNA, 20 nt, Human
ccugcacacccagcugcccu

SEQ ID NO: 356649 - RNA, 23 nt, Human
ccugcacacccagcugcccugga

SEQ ID NO: 356650 - RNA, 25 nt, Human
ccugcucacccucccaugugggccc

SEQ ID NO: 356651 - RNA, 20 nt, Human
ccuggaaggccugcgaagcu

SEQ ID NO: 356652 - RNA, 19 nt, Human
ccuggaaucccagcuacuc

SEQ ID NO: 356653 - RNA, 22 nt, Human
ccuggaaucccagcuacucggg

SEQ ID NO: 356654 - RNA, 23 nt, Human
ccuggccaacaugauaaaauccc

SEQ ID NO: 356655 - RNA, 24 nt, Human
ccuggccaacaugauaaaaucccg

SEQ ID NO: 356656 - RNA, 23 nt, Human
ccuggccaacauggugaaacccc

SEQ ID NO: 356657 - RNA, 24 nt, Human
ccuggccaacauggugaaaccccg

SEQ ID NO: 356658 - RNA, 18 nt, Human
ccuggccugaccugaggc

SEQ ID NO: 356659 - RNA, 23 nt, Human
ccuggcucugggccccaggaugc

SEQ ID NO: 356660 - RNA, 20 nt, Human
ccuggguuucugggauuggg

SEQ ID NO: 356661 - RNA, 22 nt, Human
ccuguaaucccagcacuuuggg

SEQ ID NO: 356662 - RNA, 24 nt, Human
ccugugcuccagccucggcugugg

SEQ ID NO: 356663 - RNA, 21 nt, Human
ccuugcuccugcucacccucc

SEQ ID NO: 356664 - RNA, 22 nt, Human
ccuuggacaccugguuccugga

SEQ ID NO: 356665 - RNA, 21 nt, Human
cgagaccagccuggccaacau

SEQ ID NO: 356666 - RNA, 24 nt, Human
cgccuggaaucccagcuacucggg

SEQ ID NO: 356667 - RNA, 22 nt, Human
cgccuguaaucccagcacuugg

SEQ ID NO: 356668 - RNA, 20 nt, Human
cgcgccuguaaucccagcac

SEQ ID NO: 356669 - RNA, 23 nt, Human
cgcgccuguaaucccagcacuug

SEQ ID NO: 356670 - RNA, 24 nt, Human
cggaucaguugaggucaggaguuc

SEQ ID NO: 356671 - RNA, 18 nt, Human
cuacgcacccuuggccug

SEQ ID NO: 356672 - RNA, 22 nt, Human
cuaggccaucccuccagcgccu

SEQ ID NO: 356673 - RNA, 20 nt, Human
cucaaaagcuucuucccugc

SEQ ID NO: 356674 - RNA, 22 nt, Human
cucacccucccaugugggccca

SEQ ID NO: 356675 - RNA, 24 nt, Human
cucacuagcucagcaccccaggca

SEQ ID NO: 356676 - RNA, 24 nt, Human
cucaugccuguaaucccagcacuu

SEQ ID NO: 356677 - RNA, 21 nt, Human
cuccagagcccuaacccuagc

SEQ ID NO: 356678 - RNA, 18 nt, Human
cuccccagugcuguggcc

SEQ ID NO: 356679 - RNA, 24 nt, Human
cucgcgccuguaaucccagcacuu

SEQ ID NO: 356680 - RNA, 18 nt, Human
cucugggccccaggaugc

SEQ ID NO: 356681 - RNA, 23 nt, Human
cugagcuucaaucugccuuucua

SEQ ID NO: 356682 - RNA, 25 nt, Human
cugcacacccagcugcccuggacac

SEQ ID NO: 356683 - RNA, 26 nt, Human
cugcagggccuucuagcucugcagca

SEQ ID NO: 356684 - RNA, 20 nt, Human
cugcagggcuucuagcucgu

SEQ ID NO: 356685 - RNA, 19 nt, Human
cugcggucaccacuuagac

SEQ ID NO: 356686 - RNA, 18 nt, Human
cugcugcggucaccacuu

SEQ ID NO: 356687 - RNA, 19 nt, Human
cuggaaggccugcgaagcu

SEQ ID NO: 356688 - RNA, 19 nt, Human
cuggagccugugucuuagc

SEQ ID NO: 356689 - RNA, 23 nt, Human
cuguacccaucaaaucucccucc

SEQ ID NO: 356690 - RNA, 24 nt, Human
cugucuucugccggccucggccug

SEQ ID NO: 356691 - RNA, 22 nt, Human
cuucacagggucacugccccuc

SEQ ID NO: 356692 - RNA, 27 nt, Human
cuucccaaagccacuggggcccuuuuc

SEQ ID NO: 356693 - RNA, 21 nt, Human
gaaggugugccagggagagug

SEQ ID NO: 356694 - RNA, 23 nt, Human
gaaucugugaacuacgauacagc

SEQ ID NO: 356695 - RNA, 22 nt, Human
gaccugaggcagcagaacuggu

SEQ ID NO: 356696 - RNA, 21 nt, Human
gacugcagggaggaggaaugg

SEQ ID NO: 356697 - RNA, 22 nt, Human
gagacaagcacggcccucccau

SEQ ID NO: 356698 - RNA, 21 nt, Human
gagaggccggaagugacacug

SEQ ID NO: 356699 - RNA, 20 nt, Human
gagaucacgccaauccacuc

SEQ ID NO: 356700 - RNA, 26 nt, Human
gagcccccagucccugcacacccagg

SEQ ID NO: 356701 - RNA, 21 nt, Human
gaggaggaauggcugguuuuc

SEQ ID NO: 356702 - RNA, 24 nt, Human
gaucaccugaggucaggaguucga

SEQ ID NO: 356703 - RNA, 23 nt, Human
gaucaguugaggucaggaguuca

SEQ ID NO: 356704 - RNA, 24 nt, Human
gaucaguugaggucaggaguucaa

SEQ ID NO: 356705 - RNA, 20 nt, Human
gauuggggcugggccugagc

SEQ ID NO: 356706 - RNA, 24 nt, Human
gcaaaccagcacccuccaacaaaa

SEQ ID NO: 356707 - RNA, 21 nt, Human
gcaagcacagccuugcuccug

SEQ ID NO: 356708 - RNA, 18 nt, Human
gcacagcuugguccuggg

SEQ ID NO: 356709 - RNA, 20 nt, Human
gcacccuggggaagucacuc

SEQ ID NO: 356710 - RNA, 24 nt, Human
gcacuccagccugggcgacagggu

SEQ ID NO: 356711 - RNA, 22 nt, Human
gcagcagcacugcccuggccug

SEQ ID NO: 356712 - RNA, 20 nt, Human
gcaggcagcuguaaucccag

SEQ ID NO: 356713 - RNA, 21 nt, Human
gcaguuucacuccccagugcu

SEQ ID NO: 356714 - RNA, 21 nt, Human
gcauugcacuccagccugggc

SEQ ID NO: 356715 - RNA, 24 nt, Human
gcauugcacuccagccugggcgac

SEQ ID NO: 356716 - RNA, 24 nt, Human
gccaacauggugaaaccccgguuc

SEQ ID NO: 356717 - RNA, 24 nt, Human
gccaauccacucuagccugggcga

SEQ ID NO: 356718 - RNA, 22 nt, Human
gccacauucaaaggcauccugg

SEQ ID NO: 356719 - RNA, 19 nt, Human
gccacugcucuccagucug

SEQ ID NO: 356720 - RNA, 24 nt, Human
gccacugcucuccagucugggcaa

SEQ ID NO: 356721 - RNA, 23 nt, Human
gccaggccagaggccccugucug

SEQ ID NO: 356722 - RNA, 20 nt, Human
gccagggucuaggcucagag

SEQ ID NO: 356723 - RNA, 19 nt, Human
gcccccuggggucacagcc

SEQ ID NO: 356724 - RNA, 19 nt, Human
gcccuuuucccaagcccca

SEQ ID NO: 356725 - RNA, 26 nt, Human
gccggccucggccugggucacccggc

SEQ ID NO: 356726 - RNA, 23 nt, Human
gccuuggacaccugguuccugga

SEQ ID NO: 356727 - RNA, 19 nt, Human
gcgccuguaaucccagcac

SEQ ID NO: 356728 - RNA, 24 nt, Human
gcgccuguaaucccagcacuuggg

SEQ ID NO: 356729 - RNA, 24 nt, Human
gcugcuucuccaagcaaaugaugu

SEQ ID NO: 356730 - RNA, 19 nt, Human
gcuggaccaaggccccagc

SEQ ID NO: 356731 - RNA, 21 nt, Human
ggacaccugguuccuggaagc

SEQ ID NO: 356732 - RNA, 24 nt, Human
ggagaucacggcauugcacuccag

SEQ ID NO: 356733 - RNA, 19 nt, Human
ggagcuccgcacaacgugg

SEQ ID NO: 356734 - RNA, 24 nt, Human
ggagguggcagugagcggagauca

SEQ ID NO: 356735 - RNA, 22 nt, Human
ggaucaguugaggucaggaguu

SEQ ID NO: 356736 - RNA, 23 nt, Human
ggaucaguugaggucaggaguuc

SEQ ID NO: 356737 - RNA, 25 nt, Human
ggcagaucaccugaggucaggaguu

SEQ ID NO: 356738 - RNA, 21 nt, Human
ggcagcugucuggcagccugg

SEQ ID NO: 356739 - RNA, 18 nt, Human
ggccagggucuaggcuca

SEQ ID NO: 356740 - RNA, 20 nt, Human
ggccuucuagcucugcagca

SEQ ID NO: 356741 - RNA, 21 nt, Human
ggcggaucaguugaggucagg

SEQ ID NO: 356742 - RNA, 21 nt, Human
ggcucgcgccuguaaucccag

SEQ ID NO: 356743 - RNA, 21 nt, Human
gggacuugaacccaggccucu

SEQ ID NO: 356744 - RNA, 19 nt, Human
gggagggcacuugggugcu

SEQ ID NO: 356745 - RNA, 19 nt, Human
gggcaacgcagggugaggc

SEQ ID NO: 356746 - RNA, 20 nt, Human
gggcagcugucuggcagccu

SEQ ID NO: 356747 - RNA, 20 nt, Human
gggcccaagugcugaccuca

SEQ ID NO: 356748 - RNA, 24 nt, Human
gggcgccguggcucgcgccuguaa

SEQ ID NO: 356749 - RNA, 19 nt, Human
ggggcucaccacaauccuu

SEQ ID NO: 356750 - RNA, 19 nt, Human
ggggcugggccugagccag

SEQ ID NO: 356751 - RNA, 18 nt, Human
gggguccgaaggagggua

SEQ ID NO: 356752 - RNA, 22 nt, Human
ggugaguggggugugggcuccc

SEQ ID NO: 356753 - RNA, 20 nt, Human
gguuccuggaagcagcuggc

SEQ ID NO: 356754 - RNA, 18 nt, Human
guaagcaccucauaccca

SEQ ID NO: 356755 - RNA, 23 nt, Human
guggcucgcgccuguaaucccag

SEQ ID NO: 356756 - RNA, 22 nt, Human
guggggccagggaagaagcaga

SEQ ID NO: 356757 - RNA, 24 nt, Human
uaaggcagggggugugugcgaggu

SEQ ID NO: 356758 - RNA, 22 nt, Human
uacaugggagggugaggcagga

SEQ ID NO: 356759 - RNA, 21 nt, Human
uacccaguaaccaggcacuaa

SEQ ID NO: 356760 - RNA, 18 nt, Human
uaccccaaacuagaaaca

SEQ ID NO: 356761 - RNA, 24 nt, Human
uacuggagccugugucuuagcguu

SEQ ID NO: 356762 - RNA, 20 nt, Human
uagaacagcucacacagacg

SEQ ID NO: 356763 - RNA, 18 nt, Human
uagaacccaggagucaga

SEQ ID NO: 356764 - RNA, 19 nt, Human
uagacagguaggggucugc

SEQ ID NO: 356765 - RNA, 21 nt, Human
uagcaggugcagaaucuggga

SEQ ID NO: 356766 - RNA, 19 nt, Human
uagcucagcaccccaggca

SEQ ID NO: 356767 - RNA, 18 nt, Human
uaggccaucccuccagcg

SEQ ID NO: 356768 - RNA, 23 nt, Human
uagggucacaugccaguuagugg

SEQ ID NO: 356769 - RNA, 19 nt, Human
uagguugugcauuuauguu

SEQ ID NO: 356770 - RNA, 21 nt, Human
uaugcaaguucuggaacgggg

SEQ ID NO: 356771 - RNA, 21 nt, Human
ucaagcacccagcucggcacc

SEQ ID NO: 356772 - RNA, 20 nt, Human
ucaccugaggucaggaguuc

SEQ ID NO: 356773 - RNA, 20 nt, Human
ucagaacaacagaagcuccc

SEQ ID NO: 356774 - RNA, 19 nt, Human
ucagcaggcagucuaggug

SEQ ID NO: 356775 - RNA, 24 nt, Human
ucagucacugucagugggcccaag

SEQ ID NO: 356776 - RNA, 23 nt, Human
ucaguugaggucaggaguucaag

SEQ ID NO: 356777 - RNA, 22 nt, Human
ucaugccuguaaucccagcacu

SEQ ID NO: 356778 - RNA, 23 nt, Human
uccagccugggcgacagggugag

SEQ ID NO: 356779 - RNA, 24 nt, Human
uccagccugggcgacagggugaga

SEQ ID NO: 356780 - RNA, 21 nt, Human
ucccaaaaaaaaaagaaaaaa

SEQ ID NO: 356781 - RNA, 21 nt, Human
ucccaaagccacuggggcccu

SEQ ID NO: 356782 - RNA, 22 nt, Human
ucccaagccccagaacugagcc

SEQ ID NO: 356783 - RNA, 23 nt, Human
ucccaagccccagaacugagccc

SEQ ID NO: 356784 - RNA, 22 nt, Human
ucccaaucaagccccagccacc

SEQ ID NO: 356785 - RNA, 19 nt, Human
ucccaccccaacacacucu

SEQ ID NO: 356786 - RNA, 20 nt, Human
ucccaccccaacacacucuu

SEQ ID NO: 356787 - RNA, 23 nt, Human
ucccagcccagacugcccaaguu

SEQ ID NO: 356788 - RNA, 19 nt, Human
ucccugcacacccagcugc

SEQ ID NO: 356789 - RNA, 23 nt, Human
ucccugcugagcuucaaucugcc

SEQ ID NO: 356790 - RNA, 20 nt, Human
ucccuggggcugcgcugagc

SEQ ID NO: 356791 - RNA, 20 nt, Human
ucccugugcuccagccucgg

SEQ ID NO: 356792 - RNA, 21 nt, Human
ucccugugcuccagccucggc

SEQ ID NO: 356793 - RNA, 22 nt, Human
uccuagggguccgaaggagggu

SEQ ID NO: 356794 - RNA, 18 nt, Human
uccuggcacugcccccuc

SEQ ID NO: 356795 - RNA, 21 nt, Human
uccuucccaaucaagccccag

SEQ ID NO: 356796 - RNA, 24 nt, Human
ucgcuugaacuagagaggcggagg

SEQ ID NO: 356797 - RNA, 24 nt, Human
ucgggaggcugaggcaggaaaauc

SEQ ID NO: 356798 - RNA, 24 nt, Human
ucuagccugggcgacagagugaga

SEQ ID NO: 356799 - RNA, 21 nt, Human
ucucaccccaggcaggcugaa

SEQ ID NO: 356800 - RNA, 22 nt, Human
ucucuacuaaaaauacaaaaaa

SEQ ID NO: 356801 - RNA, 24 nt, Human
ucugcagcagcacugcccuggccu

SEQ ID NO: 356802 - RNA, 21 nt, Human
ucuguuucauuaaaaauccag

SEQ ID NO: 356803 - RNA, 19 nt, Human
ugaaagcaccuccagagcc

SEQ ID NO: 356804 - RNA, 24 nt, Human
ugaaagcaccuccagagcccuaac

SEQ ID NO: 356805 - RNA, 19 nt, Human
ugaacucaucuugaaggua

SEQ ID NO: 356806 - RNA, 23 nt, Human
ugaagcagcuguagcugcagggc

SEQ ID NO: 356807 - RNA, 23 nt, Human
ugaagcagcuguagcugcagggc

SEQ ID NO: 356808 - RNA, 21 nt, Human
ugaccugaggcagcagaacug

SEQ ID NO: 356809 - RNA, 20 nt, Human
ugacugcagggaggaggaau

SEQ ID NO: 356810 - RNA, 22 nt, Human
ugacugcagggaggaggaaugg

SEQ ID NO: 356811 - RNA, 22 nt, Human
ugagaauggcuggaagauggcu

SEQ ID NO: 356812 - RNA, 18 nt, Human
ugagccgagaucacgcca

SEQ ID NO: 356813 - RNA, 19 nt, Human
ugagcuaaaaaaaaaaauc

SEQ ID NO: 356814 - RNA, 20 nt, Human
ugaggcaggaaaaucgcuug

SEQ ID NO: 356815 - RNA, 23 nt, Human
ugaggcaggaaaaucgcuugaac

SEQ ID NO: 356816 - RNA, 20 nt, Human
ugaggcaggagaaucgauug

SEQ ID NO: 356817 - RNA, 24 nt, Human
ugaggcaggagaaucgauugaacc

SEQ ID NO: 356818 - RNA, 25 nt, Human
ugaggcaggagaaucgauugaaccc

SEQ ID NO: 356819 - RNA, 22 nt, Human
ugagggguggcagggagccugg

SEQ ID NO: 356820 - RNA, 21 nt, Human
ugagugaaagcaccuccagag

SEQ ID NO: 356821 - RNA, 21 nt, Human
ugauuggccacugcucuccag

SEQ ID NO: 356822 - RNA, 22 nt, Human
ugcacuccagccugggcgacag

SEQ ID NO: 356823 - RNA, 19 nt, Human
ugcaggcagagauaaggca

SEQ ID NO: 356824 - RNA, 22 nt, Human
ugcccagcgaggggcuugaugc

SEQ ID NO: 356825 - RNA, 19 nt, Human
ugccccaucccaccccaac

SEQ ID NO: 356826 - RNA, 18 nt, Human
ugcccuggccugaccuga

SEQ ID NO: 356827 - RNA, 19 nt, Human
ugcccuggccugaccugag

SEQ ID NO: 356828 - RNA, 21 nt, Human
ugcccuggccugaccugaggc

SEQ ID NO: 356829 - RNA, 19 nt, Human
ugccucagcucugagcccc

SEQ ID NO: 356830 - RNA, 18 nt, Human
ugccucagggaacuaagc

SEQ ID NO: 356831 - RNA, 19 nt, Human
ugccucagggaacuaagcc

SEQ ID NO: 356832 - RNA, 23 nt, Human
ugccuguaaucccagcacuuugg

SEQ ID NO: 356833 - RNA, 23 nt, Human
ugccuguaaucccagcacuuugg

SEQ ID NO: 356834 - RNA, 23 nt, Human
ugcgaggugcccagcgaggggcu

SEQ ID NO: 356835 - RNA, 20 nt, Human
ugcgcugagccccaaccagc

SEQ ID NO: 356836 - RNA, 18 nt, Human
ugcuggaggaccacggcc

SEQ ID NO: 356837 - RNA, 24 nt, Human
uggaaaccacaucucgcacccaau

SEQ ID NO: 356838 - RNA, 20 nt, Human
uggaagacuugggcaucugg

SEQ ID NO: 356839 - RNA, 19 nt, Human
uggagccuggcgccugguu

SEQ ID NO: 356840 - RNA, 21 nt, Human
uggaggcaacagccccuacug

SEQ ID NO: 356841 - RNA, 19 nt, Human
uggauuggggcugggccug

SEQ ID NO: 356842 - RNA, 23 nt, Human
uggcaaaagugaaaugucugcca

SEQ ID NO: 356843 - RNA, 19 nt, Human
uggcagccacauggacugc

SEQ ID NO: 356844 - RNA, 22 nt, Human
uggcagugagcggagaucacgg

SEQ ID NO: 356845 - RNA, 25 nt, Human
uggccaacauggugaaaccccgguu

SEQ ID NO: 356846 - RNA, 27 nt, Human
uggcccccuggggucacagccuccccu

SEQ ID NO: 356847 - RNA, 20 nt, Human
uggcccuucccccauucccc

SEQ ID NO: 356848 - RNA, 22 nt, Human
uggcucaugccuguaaucccag

SEQ ID NO: 356849 - RNA, 24 nt, Human
uggcucaugccuguaaucccagca

SEQ ID NO: 356850 - RNA, 22 nt, Human
uggcucgcgccuguaaucccag

SEQ ID NO: 356851 - RNA, 24 nt, Human
uggcucgcgccuguaaucccagca

SEQ ID NO: 356852 - RNA, 19 nt, Human
ugggaacuccucauggcug

SEQ ID NO: 356853 - RNA, 18 nt, Human
ugggagccaggcaagaga

SEQ ID NO: 356854 - RNA, 20 nt, Human
ugggaggccaaggugggcag

SEQ ID NO: 356855 - RNA, 24 nt, Human
ugggaggccaaggugggcagauca

SEQ ID NO: 356856 - RNA, 19 nt, Human
ugggaggccaaggugggcg

SEQ ID NO: 356857 - RNA, 24 nt, Human
ugggaggccaaggugggcggauca

SEQ ID NO: 356858 - RNA, 18 nt, Human
ugggcagaucaccugagg

SEQ ID NO: 356859 - RNA, 25 nt, Human
ugggcucccagcccagacugcccaa

SEQ ID NO: 356860 - RNA, 19 nt, Human
uggggucagggccccugug

SEQ ID NO: 356861 - RNA, 19 nt, Human
uggugaguggggugugggc

SEQ ID NO: 356862 - RNA, 21 nt, Human
uguaagugacauaaagcaaag

SEQ ID NO: 356863 - RNA, 24 nt, Human
uguccuaggccaucccuccagcgc

SEQ ID NO: 356864 - RNA, 23 nt, Human
ugugaacucagccaggccagagg

SEQ ID NO: 356865 - RNA, 19 nt, Human
ugugacugccuuggccugg

SEQ ID NO: 356866 - RNA, 22 nt, Human
ugugcaccauuugcaaaaaacu

SEQ ID NO: 356867 - RNA, 21 nt, Human
uguuuuaagaaaguuuacaaa

SEQ ID NO: 356868 - RNA, 24 nt, Human
uuacaggaagagaaacuauggcca

SEQ ID NO: 356869 - RNA, 23 nt, Human
uuccccucgucuagagacaagca

SEQ ID NO: 356870 - RNA, 20 nt, Human
uucugguucuaaaaacaucu

SEQ ID NO: 356871 - RNA, 21 nt, Human
uucuucccugcugagcuucaa

SEQ ID NO: 356872 - RNA, 20 nt, Human
uugcauugagccgagaucac

SEQ ID NO: 356873 - RNA, 19 nt, Human
uuuggcuuccauggaccau

SEQ ID NO: 356874 - RNA, 21 nt, Human
uuuuacugcuggugggcacgu

SEQ ID NO: 356875 - RNA, 24 nt, Human
uuuuccagagauagaucagaacaa

SEQ ID NO: 356876 - RNA, 23 nt, Human
aaaaggugauagauggucucugg

SEQ ID NO: 356877 - RNA, 20 nt, Human
aaacacacacacacuuaaca

SEQ ID NO: 356878 - RNA, 20 nt, Human
aaauaccuauauacaucucu

SEQ ID NO: 356879 - RNA, 19 nt, Human
aacaaauagaaagcuaugu

SEQ ID NO: 356880 - RNA, 23 nt, Human
aaccgaacgagcaucuuuccggg

SEQ ID NO: 356881 - RNA, 25 nt, Human
aagaggcagcaaacucuaugggaaa

SEQ ID NO: 356882 - RNA, 24 nt, Human
aagcacggaagacaaucaaauccg

SEQ ID NO: 356883 - RNA, 20 nt, Human
aaugacuaauugcacacugg

SEQ ID NO: 356884 - RNA, 18 nt, Human
acacuuaacagguuaaaa

SEQ ID NO: 356885 - RNA, 22 nt, Human
acagaaaacacacacacacuua

SEQ ID NO: 356886 - RNA, 19 nt, Human
acuacgagugaggcaaagc

SEQ ID NO: 356887 - RNA, 20 nt, Human
acugaagcucaccaaagauu

SEQ ID NO: 356888 - RNA, 22 nt, Human
agaaaacacacacacacuuaac

SEQ ID NO: 356889 - RNA, 26 nt, Human
agacaaucaaauccgaggagggagca

SEQ ID NO: 356890 - RNA, 20 nt, Human
agauaccaccuuucucauag

SEQ ID NO: 356891 - RNA, 18 nt, Human
agcagcaggaggggaggg

SEQ ID NO: 356892 - RNA, 20 nt, Human
agccgggggcgcgcgcggcu

SEQ ID NO: 356893 - RNA, 20 nt, Human
aggcagucccuucaggccuc

SEQ ID NO: 356894 - RNA, 18 nt, Human
aggugcaacugguuuugu

SEQ ID NO: 356895 - RNA, 23 nt, Human
agugaaagagguccaacaaccga

SEQ ID NO: 356896 - RNA, 18 nt, Human
auggugggaugauuggcg

SEQ ID NO: 356897 - RNA, 21 nt, Human
auucgggaucccaaauggucc

SEQ ID NO: 356898 - RNA, 22 nt, Human
caaauggucccugacaacugca

SEQ ID NO: 356899 - RNA, 21 nt, Human
caagaaagcaguuuuagagaa

SEQ ID NO: 356900 - RNA, 20 nt, Human
caaggaaaaaacaguacaau

SEQ ID NO: 356901 - RNA, 21 nt, Human
cacacuggcaggggcccuaaa

SEQ ID NO: 356902 - RNA, 24 nt, Human
cacacuggcaggggcccuaaagac

SEQ ID NO: 356903 - RNA, 18 nt, Human
cacagcaucugcaauaag

SEQ ID NO: 356904 - RNA, 19 nt, Human
cacagcaugucugcacccu

SEQ ID NO: 356905 - RNA, 21 nt, Human
caccuaaaugcuaaugcggga

SEQ ID NO: 356906 - RNA, 21 nt, Human
cacggcggcggcggcggcggu

SEQ ID NO: 356907 - RNA, 23 nt, Human
cacucugcccacugaagcucacc

SEQ ID NO: 356908 - RNA, 22 nt, Human
cagaaaacacacacacacuuaa

SEQ ID NO: 356909 - RNA, 20 nt, Human
cagaaacgcucccagugacc

SEQ ID NO: 356910 - RNA, 24 nt, Human
cagcagggcacgcagggcagaaga

SEQ ID NO: 356911 - RNA, 18 nt, Human
cagcauaaaauagcuaau

SEQ ID NO: 356912 - RNA, 20 nt, Human
cagcauaaaauagcuaaugu

SEQ ID NO: 356913 - RNA, 21 nt, Human
cagcuggcaccucugcacauc

SEQ ID NO: 356914 - RNA, 23 nt, Human
cagggaccaccucacucucaaau

SEQ ID NO: 356915 - RNA, 21 nt, Human
cagggcacgcagggcagaaga

SEQ ID NO: 356916 - RNA, 18 nt, Human
ccaaccacagcaucugca

SEQ ID NO: 356917 - RNA, 19 nt, Human
ccaccuuucucauagaucc

SEQ ID NO: 356918 - RNA, 19 nt, Human
ccagagcagcaggagggga

SEQ ID NO: 356919 - RNA, 20 nt, Human
ccagagcagcaggaggggag

SEQ ID NO: 356920 - RNA, 19 nt, Human
ccaggacacggccuucugu

SEQ ID NO: 356921 - RNA, 23 nt, Human
cccaaauggucccugacaacugc

SEQ ID NO: 356922 - RNA, 21 nt, Human
cccucgauggaggagggcggc

SEQ ID NO: 356923 - RNA, 19 nt, Human
cccuuccucccucuucagc

SEQ ID NO: 356924 - RNA, 21 nt, Human
cccuuccucccucuucagcuc

SEQ ID NO: 356925 - RNA, 22 nt, Human
ccucaagcaaacacgcugcgcg

SEQ ID NO: 356926 - RNA, 23 nt, Human
ccucguagcagcagggaccaccu

SEQ ID NO: 356927 - RNA, 21 nt, Human
ccuuccucccucuucagcucc

SEQ ID NO: 356928 - RNA, 23 nt, Human
cgagagucaguggccaccaaggc

SEQ ID NO: 356929 - RNA, 19 nt, Human
cgccccuuccucccucuuc

SEQ ID NO: 356930 - RNA, 24 nt, Human
cuaaaguuauuaaugcaacacugu

SEQ ID NO: 356931 - RNA, 22 nt, Human
cucaaggaaaaaacaguacaau

SEQ ID NO: 356932 - RNA, 19 nt, Human
cucaccaaagauucacaua

SEQ ID NO: 356933 - RNA, 20 nt, Human
cuccgcggugacagcagggc

SEQ ID NO: 356934 - RNA, 19 nt, Human
cucgaaacucgcuucccgg

SEQ ID NO: 356935 - RNA, 23 nt, Human
cugggagaaauuaugggguggag

SEQ ID NO: 356936 - RNA, 20 nt, Human
cugugucaaguuccugauuu

SEQ ID NO: 356937 - RNA, 23 nt, Human
cuuaacagguuaaaauauccaaa

SEQ ID NO: 356938 - RNA, 18 nt, Human
cuugcacuccagagcagc

SEQ ID NO: 356939 - RNA, 22 nt, Human
gacacagguacaccaggaagga

SEQ ID NO: 356940 - RNA, 22 nt, Human
gaccaccucacucucaaauggc

SEQ ID NO: 356941 - RNA, 18 nt, Human
gagaagggagacgcuggc

SEQ ID NO: 356942 - RNA, 20 nt, Human
gaggagacacagguacaccg

SEQ ID NO: 356943 - RNA, 20 nt, Human
gaguuuggcaaauggcagcu

SEQ ID NO: 356944 - RNA, 21 nt, Human
gcacggaagacaaucaaaucc

SEQ ID NO: 356945 - RNA, 20 nt, Human
gcggcggcggcggcgguagu

SEQ ID NO: 356946 - RNA, 20 nt, Human
gcggcggcggcgguaguggc

SEQ ID NO: 356947 - RNA, 25 nt, Human
gcggcggcgguaguggcgaggggcc

SEQ ID NO: 356948 - RNA, 28 nt, Human
ggaagacaaucaaauccgaggagggagc

SEQ ID NO: 356949 - RNA, 19 nt, Human
ggaaggaagagggguuaag

SEQ ID NO: 356950 - RNA, 20 nt, Human
ggagggcggcgcaugauggg

SEQ ID NO: 356951 - RNA, 21 nt, Human
ggcaauauguuucuuccuggu

SEQ ID NO: 356952 - RNA, 19 nt, Human
ggccagcggcucggcccag

SEQ ID NO: 356953 - RNA, 19 nt, Human
ggcggcggcggcgguagug

SEQ ID NO: 356954 - RNA, 18 nt, Human
ggcuccugaggcuccgcu

SEQ ID NO: 356955 - RNA, 24 nt, Human
gggacucacggcggcggcggcggc

SEQ ID NO: 356956 - RNA, 26 nt, Human
gggacucacggcggcggcggcggcgg

SEQ ID NO: 356957 - RNA, 20 nt, Human
ggggaaaaggugauagaugg

SEQ ID NO: 356958 - RNA, 23 nt, Human
ggguguagccuagcuggcgggcc

SEQ ID NO: 356959 - RNA, 24 nt, Human
ggucccugacaacugcaggcacac

SEQ ID NO: 356960 - RNA, 25 nt, Human
ggugauagauggucucugggagaaa

SEQ ID NO: 356961 - RNA, 22 nt, Human
gguguagccuagcuggcgggcc

SEQ ID NO: 356962 - RNA, 22 nt, Human
guacccguuuacugaaaagcca

SEQ ID NO: 356963 - RNA, 23 nt, Human
guuauauggugggaugauuggcg

SEQ ID NO: 356964 - RNA, 23 nt, Human
guuucuucuuuggggaaaaggug

SEQ ID NO: 356965 - RNA, 23 nt, Human
uacaaaaugcucaucuugcucag

SEQ ID NO: 356966 - RNA, 22 nt, Human
uacugaaaagccacuuuuuccc

SEQ ID NO: 356967 - RNA, 21 nt, Human
uagcagcagggaccaccucac

SEQ ID NO: 356968 - RNA, 23 nt, Human
uauuucuuccuccaguuauccca

SEQ ID NO: 356969 - RNA, 25 nt, Human
ucaacagccugugccccuauuuucu

SEQ ID NO: 356970 - RNA, 22 nt, Human
ucacacagcaugucugcacccu

SEQ ID NO: 356971 - RNA, 26 nt, Human
ucacggcggcggcggcggcgguagug

SEQ ID NO: 356972 - RNA, 18 nt, Human
ucagggcaccuaaaugcu

SEQ ID NO: 356973 - RNA, 21 nt, Human
ucauggcugcuuucuaaucua

SEQ ID NO: 356974 - RNA, 21 nt, Human
ucccacgugauucaccuucuu

SEQ ID NO: 356975 - RNA, 24 nt, Human
uccccgccggcuccugaggcuccc

SEQ ID NO: 356976 - RNA, 18 nt, Human
uccucccucuucagcucc

SEQ ID NO: 356977 - RNA, 22 nt, Human
ucgcauggcguccccgccggcu

SEQ ID NO: 356978 - RNA, 25 nt, Human
ucgcauggcguccccgccggcuccu

SEQ ID NO: 356979 - RNA, 19 nt, Human
ugaaagagguccaacaacc

SEQ ID NO: 356980 - RNA, 22 nt, Human
ugaauaaguagcuauacaacgu

SEQ ID NO: 356981 - RNA, 25 nt, Human
ugacagcagggcacgcagggcagaa

SEQ ID NO: 356982 - RNA, 23 nt, Human
ugaccucaaggaaaaaacaguac

SEQ ID NO: 356983 - RNA, 22 nt, Human
ugacuaauugcacacuggcagg

SEQ ID NO: 356984 - RNA, 24 nt, Human
ugagcagccgccccuuccucccuc

SEQ ID NO: 356985 - RNA, 21 nt, Human
ugcacuccagagcagcaggag

SEQ ID NO: 356986 - RNA, 23 nt, Human
ugcgggacuucacucugcccacu

SEQ ID NO: 356987 - RNA, 22 nt, Human
uggaggagggcggcgcaugaug

SEQ ID NO: 356988 - RNA, 18 nt, Human
uggcaaauggcagcuggc

SEQ ID NO: 356989 - RNA, 23 nt, Human
uggcaaauggcagcuggcaccuc

SEQ ID NO: 356990 - RNA, 18 nt, Human
ugguuuaaggugcaacug

SEQ ID NO: 356991 - RNA, 22 nt, Human
ugugagucacauuuucauuuuu

SEQ ID NO: 356992 - RNA, 20 nt, Human
ugugucaaguuccugauuuu

SEQ ID NO: 356993 - RNA, 24 nt, Human
uguuucuucuuuggggaaaaggug

SEQ ID NO: 356994 - RNA, 21 nt, Human
uucacacagcaugucugcacc

SEQ ID NO: 356995 - RNA, 24 nt, Human
uucccacgugauucaccuucuuac

SEQ ID NO: 356996 - RNA, 19 nt, Human
uugaccucaaggaaaaaac

SEQ ID NO: 356997 - RNA, 22 nt, Human
uugaccucaaggaaaaaacagu

SEQ ID NO: 356998 - RNA, 23 nt, Human
uugcauaggaaacuauuuaaagc

SEQ ID NO: 356999 - RNA, 18 nt, Human
uuggucuucaguaucuga

SEQ ID NO: 357000 - RNA, 23 nt, Human
uuuauacuuaacaaauagaaagc

SEQ ID NO: 357001 - RNA, 24 nt, Human
uuuuuuuuuuuuuuuuagguuuca

SEQ ID NO: 357002 - RNA, 23 nt, Human
uuuuuuuuuuuuuuuuuuuuagg

SEQ ID NO: 357003 - RNA, 21 nt, Human
aaaaaagaagucacuauugua

SEQ ID NO: 357004 - RNA, 20 nt, Human
aaauaaccuuguaauuaaga

SEQ ID NO: 357005 - RNA, 24 nt, Human
aaccuagucacagucuacccacaa

SEQ ID NO: 357006 - RNA, 21 nt, Human
aaccuucucccccacagccac

SEQ ID NO: 357007 - RNA, 24 nt, Human
aagacaaaaauacagugcucuaaa

SEQ ID NO: 357008 - RNA, 20 nt, Human
aagacaaguacaaaauaacc

SEQ ID NO: 357009 - RNA, 22 nt, Human
aagauuuggcauauauuaaaug

SEQ ID NO: 357010 - RNA, 23 nt, Human
aagccuccacugggucaaaaaua

SEQ ID NO: 357011 - RNA, 24 nt, Human
aauaacaguggcaaccauucuuca

SEQ ID NO: 357012 - RNA, 24 nt, Human
accaugaaaacguuaaagaaaagc

SEQ ID NO: 357013 - RNA, 22 nt, Human
acccucauccccccgcaucccc

SEQ ID NO: 357014 - RNA, 24 nt, Human
acccucauccccccgcauccccac

SEQ ID NO: 357015 - RNA, 19 nt, Human
accuuguaauuaagauacu

SEQ ID NO: 357016 - RNA, 23 nt, Human
agaaccuucucccccacagccac

SEQ ID NO: 357017 - RNA, 18 nt, Human
agacaaaaauacagugcu

SEQ ID NO: 357018 - RNA, 21 nt, Human
agacaaguacaaaauaaccuu

SEQ ID NO: 357019 - RNA, 24 nt, Human
aggaauacuagugcagcauaaccc

SEQ ID NO: 357020 - RNA, 20 nt, Human
auccccccgcauccccacug

SEQ ID NO: 357021 - RNA, 22 nt, Human
auucaccuuucccaccccaaaa

SEQ ID NO: 357022 - RNA, 24 nt, Human
auuuucuuaacaagacaaaaauac

SEQ ID NO: 357023 - RNA, 24 nt, Human
caaccuacagagaaauuaacaucu

SEQ ID NO: 357024 - RNA, 26 nt, Human
cacaacaagaacucugcucugaaaaa

SEQ ID NO: 357025 - RNA, 22 nt, Human
caccccaaaaagugcagcucau

SEQ ID NO: 357026 - RNA, 18 nt, Human
caccuuucccaccccaaa

SEQ ID NO: 357027 - RNA, 24 nt, Human
cagaagaacaaucuuuagcccuca

SEQ ID NO: 357028 - RNA, 22 nt, Human
caucuccauuuucccauacaaa

SEQ ID NO: 357029 - RNA, 30 nt, Human
caucuccauuuucccauacaaacugagggg

SEQ ID NO: 357030 - RNA, 24 nt, Human
cauuaccaugaaaacguuaaagaa

SEQ ID NO: 357031 - RNA, 20 nt, Human
ccacaaauccccuucuauaa

SEQ ID NO: 357032 - RNA, 20 nt, Human
ccagcccaagagcucuuacc

SEQ ID NO: 357033 - RNA, 21 nt, Human
cccauacaaacugagggugag

SEQ ID NO: 357034 - RNA, 19 nt, Human
ccccacagccacaaauccc

SEQ ID NO: 357035 - RNA, 24 nt, Human
ccccacuggcauucaccuuuccca

SEQ ID NO: 357036 - RNA, 21 nt, Human
ccccccgcauccccacuggca

SEQ ID NO: 357037 - RNA, 22 nt, Human
ccccccgcauccccacuggcau

SEQ ID NO: 357038 - RNA, 19 nt, Human
ccccucuuccuccuccucc

SEQ ID NO: 357039 - RNA, 21 nt, Human
cccuucuauaagucccuccua

SEQ ID NO: 357040 - RNA, 22 nt, Human
cccuuggcuggcaggauaaggc

SEQ ID NO: 357041 - RNA, 19 nt, Human
ccucauccccccgcauccc

SEQ ID NO: 357042 - RNA, 21 nt, Human
ccuccuccuccuccucguccc

SEQ ID NO: 357043 - RNA, 22 nt, Human
ccuccuccuccucgucccgggc

SEQ ID NO: 357044 - RNA, 25 nt, Human
ccuucuauaagucccuccuacccuc

SEQ ID NO: 357045 - RNA, 24 nt, Human
ccuuucccaccccaaaaagugcag

SEQ ID NO: 357046 - RNA, 21 nt, Human
cuagucacagucuacccacaa

SEQ ID NO: 357047 - RNA, 24 nt, Human
cucccccacagccacaaauccccu

SEQ ID NO: 357048 - RNA, 23 nt, Human
cugcucugaaaaaccagcccaag

SEQ ID NO: 357049 - RNA, 18 nt, Human
cuucccagccaucuuccc

SEQ ID NO: 357050 - RNA, 22 nt, Human
gaacaccagagguggugaaaau

SEQ ID NO: 357051 - RNA, 21 nt, Human
gaacucugcucugaaaaacca

SEQ ID NO: 357052 - RNA, 21 nt, Human
gaagaacaaucuuuagcccuc

SEQ ID NO: 357053 - RNA, 23 nt, Human
gggcaggcggcaggauuucggcu

SEQ ID NO: 357054 - RNA, 19 nt, Human
gucccuccuacccucaucc

SEQ ID NO: 357055 - RNA, 21 nt, Human
uaagacaaguacaaaauaacc

SEQ ID NO: 357056 - RNA, 24 nt, Human
uaagacaaguacaaaauaaccuug

SEQ ID NO: 357057 - RNA, 21 nt, Human
uagccuucuagaaaaugguuu

SEQ ID NO: 357058 - RNA, 23 nt, Human
uagccuucuagaaaaugguuuua

SEQ ID NO: 357059 - RNA, 19 nt, Human
uagugcagcauaacccuua

SEQ ID NO: 357060 - RNA, 21 nt, Human
uauacggaauguuccacaaag

SEQ ID NO: 357061 - RNA, 24 nt, Human
uaugcuguagaaccuucuccccca

SEQ ID NO: 357062 - RNA, 19 nt, Human
uauuaagacaaguacaaaa

SEQ ID NO: 357063 - RNA, 18 nt, Human
uccacaaaggcugugaac

SEQ ID NO: 357064 - RNA, 20 nt, Human
ucccccacagccacaaaucc

SEQ ID NO: 357065 - RNA, 21 nt, Human
ucucuuagaauaaauccccuu

SEQ ID NO: 357066 - RNA, 22 nt, Human
ucuuccuccuccuccuccucgu

SEQ ID NO: 357067 - RNA, 20 nt, Human
ugaaaaaccagcccaagagc

SEQ ID NO: 357068 - RNA, 24 nt, Human
ugaaaacguuaaagaaaagcaguc

SEQ ID NO: 357069 - RNA, 19 nt, Human
ugaaagaggguugcuuuuu

SEQ ID NO: 357070 - RNA, 24 nt, Human
ugaagagauuuacaaaugacuaaa

SEQ ID NO: 357071 - RNA, 22 nt, Human
ugagaagagaaagagaagcaag

SEQ ID NO: 357072 - RNA, 24 nt, Human
ugcagcucaugguagccuucuaga

SEQ ID NO: 357073 - RNA, 21 nt, Human
ugcccccacuuuggccuggcu

SEQ ID NO: 357074 - RNA, 22 nt, Human
ugcccccacuuuggccuggcuu

SEQ ID NO: 357075 - RNA, 24 nt, Human
ugcuguagaaccuucucccccaca

SEQ ID NO: 357076 - RNA, 19 nt, Human
uggcaggauaaggcuuaug

SEQ ID NO: 357077 - RNA, 21 nt, Human
uggcuucccagccaucuuccc

SEQ ID NO: 357078 - RNA, 18 nt, Human
ugggauaaaguggagagg

SEQ ID NO: 357079 - RNA, 23 nt, Human
uggguuuucuuucuuuuucauuu

SEQ ID NO: 357080 - RNA, 22 nt, Human
uuaaaagcccccucugaacacc

SEQ ID NO: 357081 - RNA, 24 nt, Human
uuagaaaugcuaaauuuucuuaac

SEQ ID NO: 357082 - RNA, 20 nt, Human
uucccauacaaacugagggu

SEQ ID NO: 357083 - RNA, 19 nt, Human
uuuuuuuuuuuuaagccuc

SEQ ID NO: 357084 - RNA, 23 nt, Human
aagcccccccacccaaguguggg

SEQ ID NO: 357085 - RNA, 18 nt, Human
agaugucggggcugccug

SEQ ID NO: 357086 - RNA, 19 nt, Human
agcaggcccgggaggcggu

SEQ ID NO: 357087 - RNA, 18 nt, Human
agccugggguccggagcu

SEQ ID NO: 357088 - RNA, 21 nt, Human
aggcauccccacccacccaga

SEQ ID NO: 357089 - RNA, 21 nt, Human
aggcgggggugcauuggcccu

SEQ ID NO: 357090 - RNA, 20 nt, Human
agggcagggcagagcagagc

SEQ ID NO: 357091 - RNA, 22 nt, Human
aggggcggggcggggacacggg

SEQ ID NO: 357092 - RNA, 21 nt, Human
aggugugcuggggugggugug

SEQ ID NO: 357093 - RNA, 24 nt, Human
cacccacccagauaagccccccca

SEQ ID NO: 357094 - RNA, 27 nt, Human
cacccacccagauaagcccccccaccc

SEQ ID NO: 357095 - RNA, 23 nt, Human
cagagccugggguccggagcuuc

SEQ ID NO: 357096 - RNA, 27 nt, Human
cagcgcuaguguaaacaggcaucccca

SEQ ID NO: 357097 - RNA, 22 nt, Human
cagcggcucagcaaggggagcc

SEQ ID NO: 357098 - RNA, 20 nt, Human
caggagacccagcagggggu

SEQ ID NO: 357099 - RNA, 19 nt, Human
caggcauccccacccaccc

SEQ ID NO: 357100 - RNA, 23 nt, Human
caguuaaaaagcugaaaagguac

SEQ ID NO: 357101 - RNA, 21 nt, Human
cauccuguuaaggcugcggga

SEQ ID NO: 357102 - RNA, 18 nt, Human
caucgauuuugcauuggg

SEQ ID NO: 357103 - RNA, 23 nt, Human
ccacccacccagauaagcccccc

SEQ ID NO: 357104 - RNA, 24 nt, Human
ccacccagauaagcccccccaccc

SEQ ID NO: 357105 - RNA, 24 nt, Human
ccaccccauggggacccucgaucc

SEQ ID NO: 357106 - RNA, 21 nt, Human
cccacccacccagauaagccc

SEQ ID NO: 357107 - RNA, 18 nt, Human
cccagauaagccccccca

SEQ ID NO: 357108 - RNA, 19 nt, Human
cccagauaagcccccccac

SEQ ID NO: 357109 - RNA, 19 nt, Human
cccccacccaagugugggg

SEQ ID NO: 357110 - RNA, 21 nt, Human
ccccccacccaaguguggggu

SEQ ID NO: 357111 - RNA, 23 nt, Human
ccucccuggguugggaugggggc

SEQ ID NO: 357112 - RNA, 18 nt, Human
ccuggguugggauggggg

SEQ ID NO: 357113 - RNA, 19 nt, Human
cggccagcugggcgagaag

SEQ ID NO: 357114 - RNA, 19 nt, Human
cggccaguguggacggagg

SEQ ID NO: 357115 - RNA, 19 nt, Human
cucacuggaaccuuugugc

SEQ ID NO: 357116 - RNA, 18 nt, Human
cucccuggguugggaugg

SEQ ID NO: 357117 - RNA, 25 nt, Human
cucugagccaccccauggggacccu

SEQ ID NO: 357118 - RNA, 20 nt, Human
cugcaagcugacagcaggcc

SEQ ID NO: 357119 - RNA, 18 nt, Human
cuggcccagagaacuccc

SEQ ID NO: 357120 - RNA, 23 nt, Human
cugugugcucaucucugcgcccc

SEQ ID NO: 357121 - RNA, 19 nt, Human
gacggaggugggggcugcc

SEQ ID NO: 357122 - RNA, 21 nt, Human
gagcagagccugggguccgga

SEQ ID NO: 357123 - RNA, 19 nt, Human
gagcgggggaggaggcugg

SEQ ID NO: 357124 - RNA, 22 nt, Human
gaggagaaggagugcgugugug

SEQ ID NO: 357125 - RNA, 21 nt, Human
gaggcagggcccugcaggaga

SEQ ID NO: 357126 - RNA, 19 nt, Human
gcagcuugugccagaguga

SEQ ID NO: 357127 - RNA, 18 nt, Human
gccuugaggagaaggagu

SEQ ID NO: 357128 - RNA, 19 nt, Human
gccuuggucuagaggagau

SEQ ID NO: 357129 - RNA, 21 nt, Human
gcugcaagcugacagcaggcc

SEQ ID NO: 357130 - RNA, 20 nt, Human
ggagaaggagugcgugugug

SEQ ID NO: 357131 - RNA, 18 nt, Human
ggcgauagaggaagcaga

SEQ ID NO: 357132 - RNA, 18 nt, Human
gggagcgggggaggaggc

SEQ ID NO: 357133 - RNA, 18 nt, Human
gggaguaccucaagggcc

SEQ ID NO: 357134 - RNA, 21 nt, Human
gggcccagguggcgccggcag

SEQ ID NO: 357135 - RNA, 18 nt, Human
gggcgagaaguuggggag

SEQ ID NO: 357136 - RNA, 19 nt, Human
gggcggggcggggacacgg

SEQ ID NO: 357137 - RNA, 21 nt, Human
gggcggggcggggacacgggu

SEQ ID NO: 357138 - RNA, 22 nt, Human
gggcggggcuugggaggcaggg

SEQ ID NO: 357139 - RNA, 22 nt, Human
ggggagccuggccaccagggcu

SEQ ID NO: 357140 - RNA, 18 nt, Human
gggggcugccccagagga

SEQ ID NO: 357141 - RNA, 22 nt, Human
ggggggugcagggcagggcaga

SEQ ID NO: 357142 - RNA, 20 nt, Human
ggguccugcucagggaguac

SEQ ID NO: 357143 - RNA, 21 nt, Human
gguccggagcuucacuggacc

SEQ ID NO: 357144 - RNA, 18 nt, Human
gugcauuggcccuggagu

SEQ ID NO: 357145 - RNA, 28 nt, Human
gugcugggguggguguggguggcuggga

SEQ ID NO: 357146 - RNA, 20 nt, Human
uaaacaggcauccccacccc

SEQ ID NO: 357147 - RNA, 22 nt, Human
uaagagcaccuuaguguugccc

SEQ ID NO: 357148 - RNA, 19 nt, Human
uaagcccccccacccaagu

SEQ ID NO: 357149 - RNA, 20 nt, Human
uagggccagggcccaucacc

SEQ ID NO: 357150 - RNA, 20 nt, Human
ucaagggccggggcccaggu

SEQ ID NO: 357151 - RNA, 21 nt, Human
ucacuggaccacagagggagg

SEQ ID NO: 357152 - RNA, 23 nt, Human
uccccacccacccagauaagccc

SEQ ID NO: 357153 - RNA, 23 nt, Human
ucccuggguugggaugggggcag

SEQ ID NO: 357154 - RNA, 20 nt, Human
ugacacaggccucccugggu

SEQ ID NO: 357155 - RNA, 22 nt, Human
ugagccaccccauggggacccu

SEQ ID NO: 357156 - RNA, 22 nt, Human
ugaggugugcuggggugggugu

SEQ ID NO: 357157 - RNA, 26 nt, Human
ugcaggagacccagcagggggugccg

SEQ ID NO: 357158 - RNA, 22 nt, Human
ugcgcucacuggaaccuuugug

SEQ ID NO: 357159 - RNA, 23 nt, Human
ugcucagggaguaccucaagggc

SEQ ID NO: 357160 - RNA, 21 nt, Human
ugcuggggugggugugggugg

SEQ ID NO: 357161 - RNA, 22 nt, Human
ugcugggguggguguggguggg

SEQ ID NO: 357162 - RNA, 18 nt, Human
uggaaugcaggagaccca

SEQ ID NO: 357163 - RNA, 22 nt, Human
uggaguagggccagggcccauc

SEQ ID NO: 357164 - RNA, 24 nt, Human
uggcagcuugugccagagugacac

SEQ ID NO: 357165 - RNA, 21 nt, Human
uggcuggggccacuucccaca

SEQ ID NO: 357166 - RNA, 18 nt, Human
uggcuuucugagggcggg

SEQ ID NO: 357167 - RNA, 19 nt, Human
uggggccacuucccacagg

SEQ ID NO: 357168 - RNA, 24 nt, Human
uggguguggguggcuggugguggc

SEQ ID NO: 357169 - RNA, 28 nt, Human
uggguguggguggcuggugguggcagcu

SEQ ID NO: 357170 - RNA, 20 nt, Human
uggguugggaugggggcagu

SEQ ID NO: 357171 - RNA, 22 nt, Human
uuaaggcugcgggacucgaggg

SEQ ID NO: 357172 - RNA, 19 nt, Human
uucuguuuacaaaauucag

SEQ ID NO: 357173 - RNA, 21 nt, Human
aaagcaaaagcuuucuccucu

SEQ ID NO: 357174 - RNA, 18 nt, Human
aaauaaaaaaacacacug

SEQ ID NO: 357175 - RNA, 23 nt, Human
aaauagccauaagugugaggagc

SEQ ID NO: 357176 - RNA, 23 nt, Human
aaccucugaaagagucuguacag

SEQ ID NO: 357177 - RNA, 20 nt, Human
aagaggaggcgagccagcca

SEQ ID NO: 357178 - RNA, 20 nt, Human
acaugccacgcccaccaggc

SEQ ID NO: 357179 - RNA, 19 nt, Human
agaaaugcaaagagaccuu

SEQ ID NO: 357180 - RNA, 27 nt, Human
agaaaugcaaagagaccuucagauggc

SEQ ID NO: 357181 - RNA, 22 nt, Human
agacaaauucauucagaucagg

SEQ ID NO: 357182 - RNA, 20 nt, Human
agcaaggagggaagaaaacu

SEQ ID NO: 357183 - RNA, 18 nt, Human
agcaguaagauuugccuu

SEQ ID NO: 357184 - RNA, 19 nt, Human
agcgacugaauugggaaag

SEQ ID NO: 357185 - RNA, 19 nt, Human
aggagcugagaugccuauu

SEQ ID NO: 357186 - RNA, 19 nt, Human
auaagcagcauugccaaag

SEQ ID NO: 357187 - RNA, 21 nt, Human
auacauacauaguucuguaua

SEQ ID NO: 357188 - RNA, 18 nt, Human
auagcaaggagggaagaa

SEQ ID NO: 357189 - RNA, 24 nt, Human
aucaucuuuauuugguccucauug

SEQ ID NO: 357190 - RNA, 21 nt, Human
cacaaauaaaacugaagugaa

SEQ ID NO: 357191 - RNA, 20 nt, Human
cacagcacuguacacacaaa

SEQ ID NO: 357192 - RNA, 22 nt, Human
cacaugccacgcccaccaggcu

SEQ ID NO: 357193 - RNA, 23 nt, Human
cacuguacacacaaaaugaagac

SEQ ID NO: 357194 - RNA, 21 nt, Human
cagagaaugcuuugaacccac

SEQ ID NO: 357195 - RNA, 20 nt, Human
caggaggccgcgcuggcggc

SEQ ID NO: 357196 - RNA, 21 nt, Human
cauguaauucacaaauaaaac

SEQ ID NO: 357197 - RNA, 28 nt, Human
ccuuaaacugcuaagcacaaaaaucauc

SEQ ID NO: 357198 - RNA, 22 nt, Human
cggaagcagcacguuaaaccuc

SEQ ID NO: 357199 - RNA, 25 nt, Human
cucacaauaaugcugauuaacuguc

SEQ ID NO: 357200 - RNA, 24 nt, Human
cugauacaaauaaaaaaacacacu

SEQ ID NO: 357201 - RNA, 23 nt, Human
cugcugugcgggagggaggcggc

SEQ ID NO: 357202 - RNA, 19 nt, Human
cugugcccuucagaauagc

SEQ ID NO: 357203 - RNA, 18 nt, Human
gauuugccuuucacucca

SEQ ID NO: 357204 - RNA, 18 nt, Human
gcagcauugccaaagcag

SEQ ID NO: 357205 - RNA, 18 nt, Human
gccaaauggauucaugaa

SEQ ID NO: 357206 - RNA, 24 nt, Human
uaaauacauacauaguucuguaua

SEQ ID NO: 357207 - RNA, 21 nt, Human
uaagauuugccuuucacucca

SEQ ID NO: 357208 - RNA, 22 nt, Human
uacaaauaaaaaaacacacuga

SEQ ID NO: 357209 - RNA, 20 nt, Human
uacacacagcacuguacaca

SEQ ID NO: 357210 - RNA, 27 nt, Human
uagaaagggcagaaguaaaaguagcgg

SEQ ID NO: 357211 - RNA, 22 nt, Human
uagauaaauagaacucuggaua

SEQ ID NO: 357212 - RNA, 19 nt, Human
uagcaagaaauuuaagcuu

SEQ ID NO: 357213 - RNA, 23 nt, Human
uagcaaggagggaagaaaacugg

SEQ ID NO: 357214 - RNA, 24 nt, Human
uagcaaggagggaagaaaacuggc

SEQ ID NO: 357215 - RNA, 21 nt, Human
ucacuccacaugauccacuac

SEQ ID NO: 357216 - RNA, 20 nt, Human
ucagauggccccugggguga

SEQ ID NO: 357217 - RNA, 20 nt, Human
ucauccaucaccaugacucc

SEQ ID NO: 357218 - RNA, 23 nt, Human
uccucuuugcauggagaaaugca

SEQ ID NO: 357219 - RNA, 22 nt, Human
uccuugugucucugugccaaaa

SEQ ID NO: 357220 - RNA, 20 nt, Human
ucucugugccaaauggauuc

SEQ ID NO: 357221 - RNA, 23 nt, Human
ugaaacauguaauucacaaauaa

SEQ ID NO: 357222 - RNA, 24 nt, Human
ugaacuaguggaaaguugguuacu

SEQ ID NO: 357223 - RNA, 24 nt, Human
ugagaacuguguaaacagcaguuc

SEQ ID NO: 357224 - RNA, 24 nt, Human
ugcaggaggccgcgcuggcggcug

SEQ ID NO: 357225 - RNA, 27 nt, Human
uggcggcugcugugcgggagggaggcg

SEQ ID NO: 357226 - RNA, 22 nt, Human
uggggcuggaugacguggacca

SEQ ID NO: 357227 - RNA, 24 nt, Human
uggugagaguuuauacauuaagca

SEQ ID NO: 357228 - RNA, 22 nt, Human
uggugagggaaggcuuacuuug

SEQ ID NO: 357229 - RNA, 21 nt, Human
ugguggggcuggaugacgugg

SEQ ID NO: 357230 - RNA, 24 nt, Human
uuaaacugcuaagcacaaaaauca

SEQ ID NO: 357231 - RNA, 22 nt, Human
uucagaucaggagacaauuugc

SEQ ID NO: 357232 - RNA, 20 nt, Human
uugccuuucacuccacauga

SEQ ID NO: 357233 - RNA, 20 nt, Human
uuggaauuacgacucuggcu

SEQ ID NO: 357234 - RNA, 20 nt, Human
uuucacuccacaugauccac

SEQ ID NO: 357235 - RNA, 23 nt, Human
uuucucaguauaugaacuagugg

SEQ ID NO: 357236 - RNA, 18 nt, Human
uuuuuuuuuuuuuuucug

SEQ ID NO: 357237 - RNA, 22 nt, Human
uuuuuuuuuuuuuuucugucuu

SEQ ID NO: 357238 - RNA, 26 nt, Human
aaacaaaauauuuagcauuucuuagu

SEQ ID NO: 357239 - RNA, 20 nt, Human
aaacccaagaaccagccuca

SEQ ID NO: 357240 - RNA, 25 nt, Human
aaauacaaugaaaagaaaagaccag

SEQ ID NO: 357241 - RNA, 18 nt, Human
aacauggugaaacccauc

SEQ ID NO: 357242 - RNA, 19 nt, Human
aacauggugaaacccaucu

SEQ ID NO: 357243 - RNA, 20 nt, Human
aacauggugaaacccaucuc

SEQ ID NO: 357244 - RNA, 23 nt, Human
aaccagccucauaaccugggagc

SEQ ID NO: 357245 - RNA, 18 nt, Human
aacugcuucuucagcccg

SEQ ID NO: 357246 - RNA, 22 nt, Human
aagcaaaaaagaaaacaaggga

SEQ ID NO: 357247 - RNA, 19 nt, Human
aagcaaaaaagaaaacaau

SEQ ID NO: 357248 - RNA, 21 nt, Human
aagcagaucaaugagcaugau

SEQ ID NO: 357249 - RNA, 24 nt, Human
aagcuuaaaauacaaugaaaagaa

SEQ ID NO: 357250 - RNA, 22 nt, Human
acaaugaaaagaaaagaccaga

SEQ ID NO: 357251 - RNA, 24 nt, Human
accauuucauugcagcugaggaau

SEQ ID NO: 357252 - RNA, 20 nt, Human
agaagaggcugggcacagug

SEQ ID NO: 357253 - RNA, 19 nt, Human
aggacaggaagcaaaaaag

SEQ ID NO: 357254 - RNA, 20 nt, Human
aggacaggaagcaaaaaaga

SEQ ID NO: 357255 - RNA, 20 nt, Human
aggcaggcggaucacgaggu

SEQ ID NO: 357256 - RNA, 24 nt, Human
aggcaggcggaucacgaggucagg

SEQ ID NO: 357257 - RNA, 26 nt, Human
aggcaggcggaucacgaggucaggag

SEQ ID NO: 357258 - RNA, 21 nt, Human
aggccgaggcaggcggaucac

SEQ ID NO: 357259 - RNA, 23 nt, Human
aggccgaggcaggcggaucacga

SEQ ID NO: 357260 - RNA, 22 nt, Human
aggcggaucacgaggucaggag

SEQ ID NO: 357261 - RNA, 24 nt, Human
aguggcucacaccuguaaucccag

SEQ ID NO: 357262 - RNA, 20 nt, Human
aucaggaaugucgagaaaca

SEQ ID NO: 357263 - RNA, 22 nt, Human
augacacugcucauugggaaaa

SEQ ID NO: 357264 - RNA, 20 nt, Human
augauucccagagucaaacc

SEQ ID NO: 357265 - RNA, 23 nt, Human
caacauggugaaacccaucucua

SEQ ID NO: 357266 - RNA, 21 nt, Human
caagaaccagccucauaaccu

SEQ ID NO: 357267 - RNA, 24 nt, Human
cacaccuguaaucccagcacucug

SEQ ID NO: 357268 - RNA, 23 nt, Human
caccuguaaucccagcacucugg

SEQ ID NO: 357269 - RNA, 24 nt, Human
caccuguaaucccagcacucuggg

SEQ ID NO: 357270 - RNA, 18 nt, Human
cagaacaccgcacugaga

SEQ ID NO: 357271 - RNA, 24 nt, Human
cagagucaaacccaagaaccagcc

SEQ ID NO: 357272 - RNA, 24 nt, Human
cagcacucugggaggccgaggcag

SEQ ID NO: 357273 - RNA, 26 nt, Human
cagcacucugggaggccgaggcaggc

SEQ ID NO: 357274 - RNA, 20 nt, Human
cagcccggccaccgacaucu

SEQ ID NO: 357275 - RNA, 22 nt, Human
cccagagucaaacccaagaacc

SEQ ID NO: 357276 - RNA, 24 nt, Human
cgagaccauauuggccaacauggu

SEQ ID NO: 357277 - RNA, 24 nt, Human
cgaggcaggcggaucacgagguca

SEQ ID NO: 357278 - RNA, 23 nt, Human
cucacaccuguaaucccagcacu

SEQ ID NO: 357279 - RNA, 24 nt, Human
cucacaccuguaaucccagcacuc

SEQ ID NO: 357280 - RNA, 22 nt, Human
cuuaaaagcuccuucuuccuuu

SEQ ID NO: 357281 - RNA, 22 nt, Human
gaaaagaccagacgucaucagg

SEQ ID NO: 357282 - RNA, 25 nt, Human
gacaggaagcaaaaaagaagggacc

SEQ ID NO: 357283 - RNA, 21 nt, Human
gagaaacaaaauauuuagcau

SEQ ID NO: 357284 - RNA, 22 nt, Human
gagcacacuggugugaauucau

SEQ ID NO: 357285 - RNA, 19 nt, Human
gagcagcgccugcaggcag

SEQ ID NO: 357286 - RNA, 19 nt, Human
gcugggcacaguggcucac

SEQ ID NO: 357287 - RNA, 20 nt, Human
gcugggcacaguggcucaca

SEQ ID NO: 357288 - RNA, 22 nt, Human
ggacaggaagcaaaaaagaaaa

SEQ ID NO: 357289 - RNA, 23 nt, Human
ggcacaguggcucacaccuguaa

SEQ ID NO: 357290 - RNA, 24 nt, Human
ggccaacauggugaaacccaucuc

SEQ ID NO: 357291 - RNA, 19 nt, Human
uaaaauacauuauaaagag

SEQ ID NO: 357292 - RNA, 22 nt, Human
uacaaugaaaagaaaagaccag

SEQ ID NO: 357293 - RNA, 21 nt, Human
uagcauuucuuaguuucaaau

SEQ ID NO: 357294 - RNA, 19 nt, Human
uaggaaaagcagaucaaug

SEQ ID NO: 357295 - RNA, 23 nt, Human
uagguauucacugacaugauuag

SEQ ID NO: 357296 - RNA, 20 nt, Human
uagugagagaagaggcuggg

SEQ ID NO: 357297 - RNA, 18 nt, Human
uauugggcuauucacagg

SEQ ID NO: 357298 - RNA, 18 nt, Human
ucacgaggucaggagauc

SEQ ID NO: 357299 - RNA, 24 nt, Human
ucacgaggucaggagaucgagacc

SEQ ID NO: 357300 - RNA, 24 nt, Human
ucaggagaucgagaccauauuggc

SEQ ID NO: 357301 - RNA, 19 nt, Human
ucugcaggacccacaucca

SEQ ID NO: 357302 - RNA, 19 nt, Human
ugaaagacugguuagagcu

SEQ ID NO: 357303 - RNA, 18 nt, Human
ugagagaagaggcugggc

SEQ ID NO: 357304 - RNA, 20 nt, Human
uggccaacauggugaaaccc

SEQ ID NO: 357305 - RNA, 20 nt, Human
uggccaacauggugaaaccc

SEQ ID NO: 357306 - RNA, 21 nt, Human
uggccaacauggugaaaccca

SEQ ID NO: 357307 - RNA, 23 nt, Human
uggccaacauggugaaacccauc

SEQ ID NO: 357308 - RNA, 21 nt, Human
uggcucacaccuguaauccca

SEQ ID NO: 357309 - RNA, 22 nt, Human
uggcucacaccuguaaucccag

SEQ ID NO: 357310 - RNA, 24 nt, Human
uggcucacaccuguaaucccagca

SEQ ID NO: 357311 - RNA, 24 nt, Human
ugggagcagcgccugcaggcaggu

SEQ ID NO: 357312 - RNA, 20 nt, Human
ugggaggccgaggcaggcgg

SEQ ID NO: 357313 - RNA, 24 nt, Human
ugggaggccgaggcaggcggauca

SEQ ID NO: 357314 - RNA, 23 nt, Human
ugucacagaacaccgcacugaga

SEQ ID NO: 357315 - RNA, 23 nt, Human
uuagagcuggccucagguucugc

SEQ ID NO: 357316 - RNA, 22 nt, Human
uuaggacaggaagcaaaaaaga

SEQ ID NO: 357317 - RNA, 21 nt, Human
uuccuuuagcuuuauggugca

SEQ ID NO: 357318 - RNA, 21 nt, Human
aaaaaaaaaaacaaaaccaug

SEQ ID NO: 357319 - RNA, 22 nt, Human
aaaaagaauucugagaggcaga

SEQ ID NO: 357320 - RNA, 23 nt, Human
aaaacacccaaggcacacacuuu

SEQ ID NO: 357321 - RNA, 23 nt, Human
aaaagcacaaaaguaacagcaac

SEQ ID NO: 357322 - RNA, 22 nt, Human
aaagagguagcaaaauaaauua

SEQ ID NO: 357323 - RNA, 21 nt, Human
aaagcacacggaaguaaagcg

SEQ ID NO: 357324 - RNA, 19 nt, Human
aaagcagaggacggagguc

SEQ ID NO: 357325 - RNA, 22 nt, Human
aaagcgccuuaauauucaauug

SEQ ID NO: 357326 - RNA, 24 nt, Human
aaauggaaccaaggcagauuagcu

SEQ ID NO: 357327 - RNA, 21 nt, Human
aacaucuggcccucaccaacu

SEQ ID NO: 357328 - RNA, 22 nt, Human
aagaaacuuuaggaacuaaaga

SEQ ID NO: 357329 - RNA, 21 nt, Human
aagcacaaaaguaacagcaac

SEQ ID NO: 357330 - RNA, 24 nt, Human
aagcagaggacggaggucucagga

SEQ ID NO: 357331 - RNA, 18 nt, Human
aagccuuagcaugugguu

SEQ ID NO: 357332 - RNA, 22 nt, Human
acacaguaaaggcaaugcugaa

SEQ ID NO: 357333 - RNA, 18 nt, Human
acaccaccuccacggcca

SEQ ID NO: 357334 - RNA, 20 nt, Human
acaggacagugccccugggg

SEQ ID NO: 357335 - RNA, 20 nt, Human
acaguaaaggcaaugcugaa

SEQ ID NO: 357336 - RNA, 21 nt, Human
accaccccgcccacccucccg

SEQ ID NO: 357337 - RNA, 20 nt, Human
accacuuugaagaaauuguc

SEQ ID NO: 357338 - RNA, 23 nt, Human
accccgcccacccucccgcuuua

SEQ ID NO: 357339 - RNA, 20 nt, Human
accuccacggccacuuacug

SEQ ID NO: 357340 - RNA, 20 nt, Human
acuaaagacaacaaguuuuc

SEQ ID NO: 357341 - RNA, 20 nt, Human
acucucacagggcaagggcu

SEQ ID NO: 357342 - RNA, 18 nt, Human
acugaaguggcacaaagg

SEQ ID NO: 357343 - RNA, 23 nt, Human
agaaacacauuccaguucgccag

SEQ ID NO: 357344 - RNA, 21 nt, Human
agacaaauacgcagcuuuccc

SEQ ID NO: 357345 - RNA, 18 nt, Human
agacaaauuaauggccaa

SEQ ID NO: 357346 - RNA, 18 nt, Human
agagcaaaaggacugucu

SEQ ID NO: 357347 - RNA, 21 nt, Human
agagcuugagggugaacuaca

SEQ ID NO: 357348 - RNA, 22 nt, Human
agaggagacgcugucucacugg

SEQ ID NO: 357349 - RNA, 26 nt, Human
agaggcccagggcucagaauuccuga

SEQ ID NO: 357350 - RNA, 20 nt, Human
agaggcugcugcucaacugg

SEQ ID NO: 357351 - RNA, 18 nt, Human
agaugacagaagccaccc

SEQ ID NO: 357352 - RNA, 20 nt, Human
agcaaagauagaaaauauaa

SEQ ID NO: 357353 - RNA, 21 nt, Human
agccagcuugcuugugguuag

SEQ ID NO: 357354 - RNA, 18 nt, Human
agcugcccggaaagcaga

SEQ ID NO: 357355 - RNA, 20 nt, Human
aggaaaaaaaaaaaacaaaa

SEQ ID NO: 357356 - RNA, 22 nt, Human
aggaaauggaaccaaggcagau

SEQ ID NO: 357357 - RNA, 21 nt, Human
agggacuccggggaaagaaag

SEQ ID NO: 357358 - RNA, 26 nt, Human
agggacuccggggaaagaaaggggcg

SEQ ID NO: 357359 - RNA, 18 nt, Human
aggggaaaagccucuaag

SEQ ID NO: 357360 - RNA, 18 nt, Human
aguggaaucaauggacag

SEQ ID NO: 357361 - RNA, 22 nt, Human
aguuccagaguggaaucaaugg

SEQ ID NO: 357362 - RNA, 18 nt, Human
aguugaucuuaaaaccug

SEQ ID NO: 357363 - RNA, 18 nt, Human
auaaaaccaaaaaccuga

SEQ ID NO: 357364 - RNA, 22 nt, Human
auacuuuuauaauuauuccaca

SEQ ID NO: 357365 - RNA, 24 nt, Human
aucaauauuguggcccacacacaa

SEQ ID NO: 357366 - RNA, 21 nt, Human
auuacaggagcuuuuuuuuuu

SEQ ID NO: 357367 - RNA, 21 nt, Human
auuuccagaacacacaggaca

SEQ ID NO: 357368 - RNA, 19 nt, Human
auuuguuggucagugcagg

SEQ ID NO: 357369 - RNA, 21 nt, Human
caaaacacccaaggcacacac

SEQ ID NO: 357370 - RNA, 22 nt, Human
caaaacacccaaggcacacacu

SEQ ID NO: 357371 - RNA, 21 nt, Human
caaaauaagcagauagagaua

SEQ ID NO: 357372 - RNA, 25 nt, Human
caagacaaauacgcagcuuucccug

SEQ ID NO: 357373 - RNA, 19 nt, Human
caagaugacagaagccacc

SEQ ID NO: 357374 - RNA, 20 nt, Human
caagaugacagaagccaccc

SEQ ID NO: 357375 - RNA, 22 nt, Human
caaucagaaccacaaccuuagu

SEQ ID NO: 357376 - RNA, 22 nt, Human
caccaauacagcauggauuaga

SEQ ID NO: 357377 - RNA, 20 nt, Human
caccaccccgcccacccucc

SEQ ID NO: 357378 - RNA, 26 nt, Human
caccccgcccacccucccgcuuuacc

SEQ ID NO: 357379 - RNA, 22 nt, Human
cacccucccgcuuuacccugcu

SEQ ID NO: 357380 - RNA, 21 nt, Human
cacuggcagccgcaugugccc

SEQ ID NO: 357381 - RNA, 19 nt, Human
cagaagguccaaaaacuug

SEQ ID NO: 357382 - RNA, 18 nt, Human
cagagucccaggguugcc

SEQ ID NO: 357383 - RNA, 21 nt, Human
cagcaacauagauaaugcgaa

SEQ ID NO: 357384 - RNA, 24 nt, Human
cagcagcccagaggcauuuccaga

SEQ ID NO: 357385 - RNA, 21 nt, Human
caggaacgauaaacaaaauca

SEQ ID NO: 357386 - RNA, 24 nt, Human
cagggaacccacuuacccuuccca

SEQ ID NO: 357387 - RNA, 23 nt, Human
caguccugucugcaugcagcugc

SEQ ID NO: 357388 - RNA, 23 nt, Human
cagugcagguucugauaggucua

SEQ ID NO: 357389 - RNA, 20 nt, Human
caugccggggccuggggugg

SEQ ID NO: 357390 - RNA, 23 nt, Human
cauggaauagggccucguccuaa

SEQ ID NO: 357391 - RNA, 22 nt, Human
cauguuguggacacaacucagu

SEQ ID NO: 357392 - RNA, 20 nt, Human
ccaaacucccagcacugcca

SEQ ID NO: 357393 - RNA, 25 nt, Human
ccagaacacacaggacagugccccc

SEQ ID NO: 357394 - RNA, 21 nt, Human
ccaggguugccuccacaacuc

SEQ ID NO: 357395 - RNA, 26 nt, Human
cccaaccacccuuggaaguacaucug

SEQ ID NO: 357396 - RNA, 19 nt, Human
cccacaaagcacgggcagu

SEQ ID NO: 357397 - RNA, 19 nt, Human
cccacccucuggugggugg

SEQ ID NO: 357398 - RNA, 23 nt, Human
cccauccaaacucccagcacugc

SEQ ID NO: 357399 - RNA, 20 nt, Human
cccgcccagcucccagagga

SEQ ID NO: 357400 - RNA, 24 nt, Human
cccuucccacccugagcagggcag

SEQ ID NO: 357401 - RNA, 20 nt, Human
ccggggaaagaaaggggcgg

SEQ ID NO: 357402 - RNA, 22 nt, Human
ccuacaguuauccaccugagac

SEQ ID NO: 357403 - RNA, 20 nt, Human
ccuaguagaccagccacuuu

SEQ ID NO: 357404 - RNA, 18 nt, Human
ccucauggccaaagagcc

SEQ ID NO: 357405 - RNA, 22 nt, Human
ccuccacggccacuuacugccu

SEQ ID NO: 357406 - RNA, 21 nt, Human
ccuucuguucucaacccuggg

SEQ ID NO: 357407 - RNA, 24 nt, Human
cgagagcaaaaggacugucucagc

SEQ ID NO: 357408 - RNA, 23 nt, Human
cgcaccaccccgcccacccuccc

SEQ ID NO: 357409 - RNA, 23 nt, Human
cgccaaggcaacugugagaggcc

SEQ ID NO: 357410 - RNA, 21 nt, Human
cgcuuuacccugcuggaauua

SEQ ID NO: 357411 - RNA, 19 nt, Human
cuccacggccacuuacugc

SEQ ID NO: 357412 - RNA, 18 nt, Human
cuccccuccauuguggaa

SEQ ID NO: 357413 - RNA, 20 nt, Human
cucgcaccaccccgcccacc

SEQ ID NO: 357414 - RNA, 24 nt, Human
cugagacucacaagcacgcugcgc

SEQ ID NO: 357415 - RNA, 19 nt, Human
cugcaugcagcugcugugg

SEQ ID NO: 357416 - RNA, 24 nt, Human
cuggcagggccuugcugggguggg

SEQ ID NO: 357417 - RNA, 20 nt, Human
cuggugguggcuggggaaug

SEQ ID NO: 357418 - RNA, 21 nt, Human
cuuggccaggucuccccucca

SEQ ID NO: 357419 - RNA, 18 nt, Human
gaaagaaaggggcggggc

SEQ ID NO: 357420 - RNA, 20 nt, Human
gaaaggaaggcaguuuucug

SEQ ID NO: 357421 - RNA, 22 nt, Human
gaaauucucugauuccccacaa

SEQ ID NO: 357422 - RNA, 19 nt, Human
gaaccacaaccuuagugca

SEQ ID NO: 357423 - RNA, 22 nt, Human
gaacccacuuacccuucccacc

SEQ ID NO: 357424 - RNA, 20 nt, Human
gacacccacauggugagcca

SEQ ID NO: 357425 - RNA, 22 nt, Human
gacuguguauuuuccacagucu

SEQ ID NO: 357426 - RNA, 18 nt, Human
gagcaaaaggacugucuc

SEQ ID NO: 357427 - RNA, 18 nt, Human
gagcagucugcgaggugg

SEQ ID NO: 357428 - RNA, 21 nt, Human
gagcagucugcgagguggaga

SEQ ID NO: 357429 - RNA, 20 nt, Human
gagcuggccacaaugccuga

SEQ ID NO: 357430 - RNA, 19 nt, Human
gaggacggaggucucagga

SEQ ID NO: 357431 - RNA, 23 nt, Human
gaguggaaucaauggacagggau

SEQ ID NO: 357432 - RNA, 18 nt, Human
gauccugccgcccaccuu

SEQ ID NO: 357433 - RNA, 21 nt, Human
gaugacagaagccacccuaga

SEQ ID NO: 357434 - RNA, 25 nt, Human
gcaucagguguccucugagaggcca

SEQ ID NO: 357435 - RNA, 21 nt, Human
gcauggauuagaaaucaaagu

SEQ ID NO: 357436 - RNA, 18 nt, Human
gccaagugcaggagaaag

SEQ ID NO: 357437 - RNA, 21 nt, Human
gcccacccucccgcuuuaccc

SEQ ID NO: 357438 - RNA, 18 nt, Human
gcguguguguggugugug

SEQ ID NO: 357439 - RNA, 25 nt, Human
gcucgcaccaccccgcccacccucc

SEQ ID NO: 357440 - RNA, 21 nt, Human
gcuggggaaugcagggaaccc

SEQ ID NO: 357441 - RNA, 18 nt, Human
gcuguuguacuguuaaga

SEQ ID NO: 357442 - RNA, 26 nt, Human
ggaauuuuuccugaacguggaagcau

SEQ ID NO: 357443 - RNA, 26 nt, Human
gggagcuuuaagcacagcagacacca

SEQ ID NO: 357444 - RNA, 22 nt, Human
gggcagggugggggaggggggu

SEQ ID NO: 357445 - RNA, 18 nt, Human
ggggugggacgccaaggc

SEQ ID NO: 357446 - RNA, 18 nt, Human
gggugggggagggggguu

SEQ ID NO: 357447 - RNA, 20 nt, Human
gggugggggagggggguugg

SEQ ID NO: 357448 - RNA, 26 nt, Human
ggucaguuuuagagaggcagagcugg

SEQ ID NO: 357449 - RNA, 24 nt, Human
guaucuuggcagguauacauaauu

SEQ ID NO: 357450 - RNA, 23 nt, Human
guauuccaaauuuaacauacucc

SEQ ID NO: 357451 - RNA, 23 nt, Human
guuuuguuuuuguuuuuggagaa

SEQ ID NO: 357452 - RNA, 22 nt, Human
uaaaaauaaacuauguuaucag

SEQ ID NO: 357453 - RNA, 19 nt, Human
uaaaagcacaaaaguaaca

SEQ ID NO: 357454 - RNA, 21 nt, Human
uaaacaaaaucaccaauacag

SEQ ID NO: 357455 - RNA, 27 nt, Human
uaaauuacuugaaaugaaaaaaagucc

SEQ ID NO: 357456 - RNA, 23 nt, Human
uaacaagagcagucugcgaggug

SEQ ID NO: 357457 - RNA, 23 nt, Human
uaacauuuguuccaccauuaaag

SEQ ID NO: 357458 - RNA, 27 nt, Human
uaacugggcuucaagaugacagaagcc

SEQ ID NO: 357459 - RNA, 26 nt, Human
uaagggaaggguccggaucuggcugg

SEQ ID NO: 357460 - RNA, 21 nt, Human
uaagguucacuaaccugauag

SEQ ID NO: 357461 - RNA, 22 nt, Human
uaauaauaaaaccaaaaaccug

SEQ ID NO: 357462 - RNA, 24 nt, Human
uacucgaugagagagauuuuucug

SEQ ID NO: 357463 - RNA, 18 nt, Human
uauaacaagagcagucug

SEQ ID NO: 357464 - RNA, 22 nt, Human
ucaaagggucaagugugaccuu

SEQ ID NO: 357465 - RNA, 22 nt, Human
uccaaauaagguugauuuaaaa

SEQ ID NO: 357466 - RNA, 22 nt, Human
uccaaauuuaacauacuccuug

SEQ ID NO: 357467 - RNA, 19 nt, Human
uccacggccacuuacugcc

SEQ ID NO: 357468 - RNA, 19 nt, Human
uccaugugacaucugcuug

SEQ ID NO: 357469 - RNA, 19 nt, Human
ucccgcuuuacccugcugg

SEQ ID NO: 357470 - RNA, 21 nt, Human
ucccuagugggcaaggccagg

SEQ ID NO: 357471 - RNA, 24 nt, Human
ucccuagugggcaaggccagguuc

SEQ ID NO: 357472 - RNA, 22 nt, Human
ucccugcuuuccucuccucacg

SEQ ID NO: 357473 - RNA, 21 nt, Human
ucccuggccuccgagagcaaa

SEQ ID NO: 357474 - RNA, 21 nt, Human
uccgcggcaccgcugcuucca

SEQ ID NO: 357475 - RNA, 20 nt, Human
uccugaacguggaagcauag

SEQ ID NO: 357476 - RNA, 23 nt, Human
uccuugugggaggacauuuuggc

SEQ ID NO: 357477 - RNA, 27 nt, Human
uccuuuuuuuuuuucuuuucuguguuu

SEQ ID NO: 357478 - RNA, 25 nt, Human
ucgcaccaccccgcccacccucccg

SEQ ID NO: 357479 - RNA, 19 nt, Human
ucucacagggcaagggccu

SEQ ID NO: 357480 - RNA, 18 nt, Human
ucucuauaauaagacagu

SEQ ID NO: 357481 - RNA, 19 nt, Human
ucugagaggccacaggacu

SEQ ID NO: 357482 - RNA, 20 nt, Human
ucugcugagcucauacucca

SEQ ID NO: 357483 - RNA, 25 nt, Human
ugacaggagccuguuuacucgauga

SEQ ID NO: 357484 - RNA, 18 nt, Human
ugacauucgaguauccuc

SEQ ID NO: 357485 - RNA, 20 nt, Human
ugacuaacuccaugugacau

SEQ ID NO: 357486 - RNA, 18 nt, Human
ugagaaaaaaauuuacca

SEQ ID NO: 357487 - RNA, 21 nt, Human
ugagcucauacuccaggccug

SEQ ID NO: 357488 - RNA, 19 nt, Human
ugaggaacuauugcuuuca

SEQ ID NO: 357489 - RNA, 27 nt, Human
ugaggccaaagaagaaguucaacguuu

SEQ ID NO: 357490 - RNA, 24 nt, Human
ugaguaauuuuuauauuaugugaa

SEQ ID NO: 357491 - RNA, 21 nt, Human
ugauaugggcuucucaguuca

SEQ ID NO: 357492 - RNA, 21 nt, Human
ugcagaucagguucaaaacac

SEQ ID NO: 357493 - RNA, 21 nt, Human
ugccuacaguuauccaccuga

SEQ ID NO: 357494 - RNA, 24 nt, Human
ugcucuuguccuggagaccuggag

SEQ ID NO: 357495 - RNA, 18 nt, Human
ugcugguucagaugcauc

SEQ ID NO: 357496 - RNA, 20 nt, Human
uggaaccaaggcagauuagc

SEQ ID NO: 357497 - RNA, 18 nt, Human
uggaagcaaagucuaggg

SEQ ID NO: 357498 - RNA, 22 nt, Human
uggagggacuccggggaaagaa

SEQ ID NO: 357499 - RNA, 21 nt, Human
uggauuagaaaucaaagugau

SEQ ID NO: 357500 - RNA, 20 nt, Human
uggcagccgcaugugcccgc

SEQ ID NO: 357501 - RNA, 19 nt, Human
uggcauguggcuuggagua

SEQ ID NO: 357502 - RNA, 21 nt, Human
uggcauguggcuuggaguauc

SEQ ID NO: 357503 - RNA, 19 nt, Human
uggccaaagagccauggau

SEQ ID NO: 357504 - RNA, 22 nt, Human
uggcucgcaccaccccgcccac

SEQ ID NO: 357505 - RNA, 22 nt, Human
uggcuggggaaugcaggggagc

SEQ ID NO: 357506 - RNA, 18 nt, Human
ugggaaaaucaauauugu

SEQ ID NO: 357507 - RNA, 20 nt, Human
ugggaaaaucaauauugugg

SEQ ID NO: 357508 - RNA, 20 nt, Human
ugggcacagaacugaggaug

SEQ ID NO: 357509 - RNA, 22 nt, Human
ugggcaguugcacgcuggcugg

SEQ ID NO: 357510 - RNA, 23 nt, Human
uggggugggacgccaaggcaacu

SEQ ID NO: 357511 - RNA, 22 nt, Human
uggguccucaaagaagcuguug

SEQ ID NO: 357512 - RNA, 20 nt, Human
uggguggugauuugaaugag

SEQ ID NO: 357513 - RNA, 19 nt, Human
uggugaggccaaagaagaa

SEQ ID NO: 357514 - RNA, 20 nt, Human
ugguguguguuuuguuuuug

SEQ ID NO: 357515 - RNA, 25 nt, Human
ugguuugcuugucaaccagagaggc

SEQ ID NO: 357516 - RNA, 20 nt, Human
uguaaaguucagcaaaucaa

SEQ ID NO: 357517 - RNA, 24 nt, Human
ugugacauuaagaagaaaggaagg

SEQ ID NO: 357518 - RNA, 18 nt, Human
ugugcuuauaaacuaucu

SEQ ID NO: 357519 - RNA, 20 nt, Human
ugugguuaguggcauguggc

SEQ ID NO: 357520 - RNA, 22 nt, Human
uguguaggaaaaaguuucucug

SEQ ID NO: 357521 - RNA, 26 nt, Human
uguuacacaaacuauagugugaaaca

SEQ ID NO: 357522 - RNA, 20 nt, Human
uuacccuucccacccugagc

SEQ ID NO: 357523 - RNA, 20 nt, Human
uucaagaugacagaagccac

SEQ ID NO: 357524 - RNA, 18 nt, Human
uucauucuagagcuguuc

SEQ ID NO: 357525 - RNA, 21 nt, Human
uucccugaguuugcuggugca

SEQ ID NO: 357526 - RNA, 22 nt, Human
uugcagaaauaaagaaagcuaa

SEQ ID NO: 357527 - RNA, 19 nt, Human
uuggagaaacugcugcauu

SEQ ID NO: 357528 - RNA, 21 nt, Human
uuggcugggcacagaacugag

SEQ ID NO: 357529 - RNA, 24 nt, Human
uuuaaacuugcaguaaagaaagau

SEQ ID NO: 357530 - RNA, 21 nt, Human
uuuauaauuauuccacagaaa

SEQ ID NO: 357531 - RNA, 18 nt, Human
uuucgagaccugacccaa

SEQ ID NO: 357532 - RNA, 21 nt, Human
uuuggagaaacugcugcauua

SEQ ID NO: 357533 - RNA, 22 nt, Human
uuugugcuuugacuaacuccau

SEQ ID NO: 357534 - RNA, 24 nt, Human
uuuuccacagucuuaugaugagaa

SEQ ID NO: 357535 - RNA, 24 nt, Human
uuuuucuggucaguuuuagagagg

SEQ ID NO: 357536 - RNA, 21 nt, Human
acaacacaaacgacacagcca

SEQ ID NO: 357537 - RNA, 18 nt, Human
acacaacacaaacgacac

SEQ ID NO: 357538 - RNA, 22 nt, Human
acacaacacaaacgacacagcc

SEQ ID NO: 357539 - RNA, 21 nt, Human
acacacaacacaaacgacaca

SEQ ID NO: 357540 - RNA, 23 nt, Human
aggcagccggcgcccgccggagc

SEQ ID NO: 357541 - RNA, 22 nt, Human
caagucuccaggcucugucaca

SEQ ID NO: 357542 - RNA, 27 nt, Human
cacaacacaaacgacacagccagcaac

SEQ ID NO: 357543 - RNA, 23 nt, Human
cacacaacacaaacgacacagcc

SEQ ID NO: 357544 - RNA, 25 nt, Human
cacacaacacaaacgacacagccag

SEQ ID NO: 357545 - RNA, 18 nt, Human
cagcaacaguggcugggg

SEQ ID NO: 357546 - RNA, 21 nt, Human
cagcauucuagagacaugcag

SEQ ID NO: 357547 - RNA, 24 nt, Human
ccacgccgcggacccuuuggccgu

SEQ ID NO: 357548 - RNA, 19 nt, Human
ccgcagccuccgccuuggc

SEQ ID NO: 357549 - RNA, 21 nt, Human
ccggagcccgcgcgcccgugc

SEQ ID NO: 357550 - RNA, 23 nt, Human
ccucuggcaccuccaagucucca

SEQ ID NO: 357551 - RNA, 18 nt, Human
cgacacagccagcaacag

SEQ ID NO: 357552 - RNA, 22 nt, Human
cgcagcggaggagaaugcggcc

SEQ ID NO: 357553 - RNA, 18 nt, Human
cgccggagcccgcgcgcc

SEQ ID NO: 357554 - RNA, 22 nt, Human
cgccggagcccgcgcgcccgug

SEQ ID NO: 357555 - RNA, 24 nt, Human
cgggagagacagcgagcgacggag

SEQ ID NO: 357556 - RNA, 23 nt, Human
cugucacagagcagggcaggucu

SEQ ID NO: 357557 - RNA, 23 nt, Human
cuuuauccaggccuccagccccc

SEQ ID NO: 357558 - RNA, 19 nt, Human
cuuuggccguacgccccuc

SEQ ID NO: 357559 - RNA, 19 nt, Human
gagaaugcggccgggagag

SEQ ID NO: 357560 - RNA, 21 nt, Human
gagacagcgagcgacggagga

SEQ ID NO: 357561 - RNA, 21 nt, Human
gagccgcagccuccgccuugg

SEQ ID NO: 357562 - RNA, 23 nt, Human
gagcucggccccgcagcggagga

SEQ ID NO: 357563 - RNA, 19 nt, Human
gaggaaggcagccggcgcc

SEQ ID NO: 357564 - RNA, 23 nt, Human
gaggagaaugcggccgggagaga

SEQ ID NO: 357565 - RNA, 22 nt, Human
gccgggauccgcggcugccgcg

SEQ ID NO: 357566 - RNA, 23 nt, Human
gcggccgggagagacagcgagcg

SEQ ID NO: 357567 - RNA, 23 nt, Human
gcugggggcugguuggugggggg

SEQ ID NO: 357568 - RNA, 26 nt, Human
ggcugggggcugguugguggggggcc

SEQ ID NO: 357569 - RNA, 19 nt, Human
gggccucuggcaccuccaa

SEQ ID NO: 357570 - RNA, 23 nt, Human
gggccucuggcaccuccaagucu

SEQ ID NO: 357571 - RNA, 18 nt, Human
ggggcugguugguggggg

SEQ ID NO: 357572 - RNA, 22 nt, Human
uccacgccgcggacccuuuggc

SEQ ID NO: 357573 - RNA, 21 nt, Human
ucggcguccucggcucccuuc

SEQ ID NO: 357574 - RNA, 20 nt, Human
uggcaccuccaagucuccag

SEQ ID NO: 357575 - RNA, 20 nt, Human
uggcugggggcugguuggug

SEQ ID NO: 357576 - RNA, 21 nt, Human
ugggggcugguuggugggggg

SEQ ID NO: 357577 - RNA, 22 nt, Human
ugguugguggggggccucuggc

SEQ ID NO: 357578 - RNA, 22 nt, Human
ugucacagagcagggcaggucu

SEQ ID NO: 357579 - RNA, 20 nt, Human
uuccuuccugcgagcgcugg

SEQ ID NO: 357580 - RNA, 19 nt, Human
aaaaugccaagagcuguaa

SEQ ID NO: 357581 - RNA, 19 nt, Human
aaaaugccaagagcuguaa

SEQ ID NO: 357582 - RNA, 21 nt, Human
aaacagcaaaaggaggccagg

SEQ ID NO: 357583 - RNA, 22 nt, Human
aaacauccaaacagcaaaagga

SEQ ID NO: 357584 - RNA, 18 nt, Human
aaaguuuaaacauggggg

SEQ ID NO: 357585 - RNA, 21 nt, Human
aagaacacaggucccagaagc

SEQ ID NO: 357586 - RNA, 24 nt, Human
aagagacccaaguuuuucuagucc

SEQ ID NO: 357587 - RNA, 24 nt, Human
aagagacccaaguuuuucuagucc

SEQ ID NO: 357588 - RNA, 18 nt, Human
aagcacucaccuucuugg

SEQ ID NO: 357589 - RNA, 18 nt, Human
aaggguugcauaucccca

SEQ ID NO: 357590 - RNA, 25 nt, Human
aaguuuuucuaguccuagauggaaa

SEQ ID NO: 357591 - RNA, 25 nt, Human
aaguuuuucuaguccuagauggaaa

SEQ ID NO: 357592 - RNA, 21 nt, Human
acaaggccaagcccacagaac

SEQ ID NO: 357593 - RNA, 20 nt, Human
acagaacacucccaaacgag

SEQ ID NO: 357594 - RNA, 21 nt, Human
acccagaguccaugcuacucc

SEQ ID NO: 357595 - RNA, 20 nt, Human
acuccugccucuguuauccc

SEQ ID NO: 357596 - RNA, 22 nt, Human
agaacacucccaaacgaggucc

SEQ ID NO: 357597 - RNA, 18 nt, Human
agacccguggaaacaucc

SEQ ID NO: 357598 - RNA, 21 nt, Human
agcaagaacacaggucccaga

SEQ ID NO: 357599 - RNA, 18 nt, Human
agcugccacuccugccuc

SEQ ID NO: 357600 - RNA, 21 nt, Human
aggaaaggcccaggugagggg

SEQ ID NO: 357601 - RNA, 20 nt, Human
aggaagggcugcacuuuggc

SEQ ID NO: 357602 - RNA, 22 nt, Human
aggccaaaagagggggggccgg

SEQ ID NO: 357603 - RNA, 21 nt, Human
agggagagggacaaguggcuu

SEQ ID NO: 357604 - RNA, 23 nt, Human
agguacucaggaacugcagguuu

SEQ ID NO: 357605 - RNA, 24 nt, Human
agucacagaaguccuggggaggga

SEQ ID NO: 357606 - RNA, 21 nt, Human
augaaacccagaguccaugcu

SEQ ID NO: 357607 - RNA, 22 nt, Human
augaaauguauauacagacccc

SEQ ID NO: 357608 - RNA, 22 nt, Human
caagaacacaggucccagaagc

SEQ ID NO: 357609 - RNA, 23 nt, Human
caagaacacaggucccagaagcc

SEQ ID NO: 357610 - RNA, 22 nt, Human
caaggccaagcccacagaacac

SEQ ID NO: 357611 - RNA, 26 nt, Human
caaggccaagcccacagaacacuccu

SEQ ID NO: 357612 - RNA, 22 nt, Human
cacaaggccaagcccacagaac

SEQ ID NO: 357613 - RNA, 25 nt, Human
cacagaacacucccaaacgaggucc

SEQ ID NO: 357614 - RNA, 19 nt, Human
caccacaggacauuuucca

SEQ ID NO: 357615 - RNA, 23 nt, Human
caccccgggccuaggcugggccg

SEQ ID NO: 357616 - RNA, 28 nt, Human
cagaacacucccaaacgaggucccgaag

SEQ ID NO: 357617 - RNA, 20 nt, Human
cagaguacauaggcaugcaa

SEQ ID NO: 357618 - RNA, 24 nt, Human
cagcaagaacacaggucccagaag

SEQ ID NO: 357619 - RNA, 18 nt, Human
caggucucugguauaaaa

SEQ ID NO: 357620 - RNA, 18 nt, Human
caggucucugguauaaaa

SEQ ID NO: 357621 - RNA, 24 nt, Human
cauccaaacagcaaaaggaggcca

SEQ ID NO: 357622 - RNA, 18 nt, Human
cccacagaacacucccaa

SEQ ID NO: 357623 - RNA, 19 nt, Human
cccacagaacacucccaaa

SEQ ID NO: 357624 - RNA, 20 nt, Human
cccacagaacacucccaaac

SEQ ID NO: 357625 - RNA, 21 nt, Human
cccacagaacacucccaaacg

SEQ ID NO: 357626 - RNA, 21 nt, Human
cccaccccgcccucccagaaa

SEQ ID NO: 357627 - RNA, 20 nt, Human
ccccaccccgcccucccaga

SEQ ID NO: 357628 - RNA, 20 nt, Human
ccccugccaguuugggcaag

SEQ ID NO: 357629 - RNA, 25 nt, Human
ccccuugcccagaagggugacuguu

SEQ ID NO: 357630 - RNA, 22 nt, Human
cccguggaaacauccaaacagc

SEQ ID NO: 357631 - RNA, 21 nt, Human
ccgggaguggggcucuggggc

SEQ ID NO: 357632 - RNA, 19 nt, Human
cgcuccccagcucagaccc

SEQ ID NO: 357633 - RNA, 18 nt, Human
cuaggcgaggaaaaugcc

SEQ ID NO: 357634 - RNA, 18 nt, Human
cuaggcgaggaaaaugcc

SEQ ID NO: 357635 - RNA, 21 nt, Human
cucaccuccacaaaauccacc

SEQ ID NO: 357636 - RNA, 24 nt, Human
cucagcaagaacacaggucccaga

SEQ ID NO: 357637 - RNA, 18 nt, Human
cucccgccuggccgggag

SEQ ID NO: 357638 - RNA, 21 nt, Human
cuguuccacugggccugucac

SEQ ID NO: 357639 - RNA, 23 nt, Human
cuucuuggggaaggggcaucagg

SEQ ID NO: 357640 - RNA, 20 nt, Human
gaaaggcccaggugaggggc

SEQ ID NO: 357641 - RNA, 23 nt, Human
gaagaauucagggguccaagaac

SEQ ID NO: 357642 - RNA, 20 nt, Human
gacaggcauucgggcugacu

SEQ ID NO: 357643 - RNA, 21 nt, Human
gacccaaguuuuucuaguccu

SEQ ID NO: 357644 - RNA, 21 nt, Human
gacccaaguuuuucuaguccu

SEQ ID NO: 357645 - RNA, 19 nt, Human
gacccagacaguuucaggc

SEQ ID NO: 357646 - RNA, 22 nt, Human
gacccagacaguuucaggcccc

SEQ ID NO: 357647 - RNA, 22 nt, Human
gaggaagggcugcacuuuggcg

SEQ ID NO: 357648 - RNA, 18 nt, Human
gaggccaggaugaaaacg

SEQ ID NO: 357649 - RNA, 24 nt, Human
gagggagagggacaaguggcuucc

SEQ ID NO: 357650 - RNA, 18 nt, Human
gagggggggccggcuugc

SEQ ID NO: 357651 - RNA, 20 nt, Human
gaguacauaggcaugcaaca

SEQ ID NO: 357652 - RNA, 24 nt, Human
gcacucaccuucuuggggaagggg

SEQ ID NO: 357653 - RNA, 21 nt, Human
gccuaggcugggccgggccug

SEQ ID NO: 357654 - RNA, 22 nt, Human
gcggguguugagaggggucugg

SEQ ID NO: 357655 - RNA, 18 nt, Human
gcugcugcccagccuggc

SEQ ID NO: 357656 - RNA, 23 nt, Human
gcuggauaugaaacccagagucc

SEQ ID NO: 357657 - RNA, 22 nt, Human
ggacaaguggcuuccgcucccc

SEQ ID NO: 357658 - RNA, 18 nt, Human
ggccaggcaggggguauc

SEQ ID NO: 357659 - RNA, 18 nt, Human
gggaauaggguggaaagg

SEQ ID NO: 357660 - RNA, 18 nt, Human
gggagggcaggccuuaug

SEQ ID NO: 357661 - RNA, 19 nt, Human
gggauacccugaagcccag

SEQ ID NO: 357662 - RNA, 20 nt, Human
gggcggguguugagaggggu

SEQ ID NO: 357663 - RNA, 20 nt, Human
gggcugcugcccagccuggc

SEQ ID NO: 357664 - RNA, 26 nt, Human
gggcugcugcccagccuggccccccu

SEQ ID NO: 357665 - RNA, 18 nt, Human
ggggaaggggcaucaggu

SEQ ID NO: 357666 - RNA, 21 nt, Human
gguauccccaggcccuuaccc

SEQ ID NO: 357667 - RNA, 19 nt, Human
gucacagaaguccugggga

SEQ ID NO: 357668 - RNA, 21 nt, Human
guuggcacaggaaaggcccag

SEQ ID NO: 357669 - RNA, 18 nt, Human
guuuugcguuuccccucc

SEQ ID NO: 357670 - RNA, 25 nt, Human
uaaaagggcuuggaaaagucaaaaa

SEQ ID NO: 357671 - RNA, 25 nt, Human
uaaaagggcuuggaaaagucaaaaa

SEQ ID NO: 357672 - RNA, 23 nt, Human
uaaaauauaugcauauaaaacuu

SEQ ID NO: 357673 - RNA, 22 nt, Human
uaaaauaucauuagaccuaaga

SEQ ID NO: 357674 - RNA, 19 nt, Human
uaagcaauggaaaagaaaa

SEQ ID NO: 357675 - RNA, 19 nt, Human
uacauaggcaugcaacaug

SEQ ID NO: 357676 - RNA, 20 nt, Human
uacccugguuggaccucugu

SEQ ID NO: 357677 - RNA, 23 nt, Human
ucaaugccccuuuucucaccucc

SEQ ID NO: 357678 - RNA, 23 nt, Human
ucagacccagacaguuucaggcc

SEQ ID NO: 357679 - RNA, 19 nt, Human
ucaggaacugcagguuuug

SEQ ID NO: 357680 - RNA, 24 nt, Human
ucagucacccccaccccgcccucc

SEQ ID NO: 357681 - RNA, 20 nt, Human
ucauuagaccuaagagaugg

SEQ ID NO: 357682 - RNA, 19 nt, Human
ucauugaagaauucagggg

SEQ ID NO: 357683 - RNA, 19 nt, Human
uccacugggccugucacca

SEQ ID NO: 357684 - RNA, 21 nt, Human
uccccaggcccuuacccuggu

SEQ ID NO: 357685 - RNA, 19 nt, Human
ucccccuugcccagaaggg

SEQ ID NO: 357686 - RNA, 20 nt, Human
ucugccucucagucucgcgg

SEQ ID NO: 357687 - RNA, 23 nt, Human
ucuguacauuaauacuuugguga

SEQ ID NO: 357688 - RNA, 21 nt, Human
ucuguuaucccaacccaaacc

SEQ ID NO: 357689 - RNA, 18 nt, Human
ugaagaguuuucccuuug

SEQ ID NO: 357690 - RNA, 18 nt, Human
ugacacaaggccaagccc

SEQ ID NO: 357691 - RNA, 20 nt, Human
ugacucaaacccucucacuc

SEQ ID NO: 357692 - RNA, 21 nt, Human
ugacuucugccucucagucuc

SEQ ID NO: 357693 - RNA, 21 nt, Human
ugacuucugccucucagucuc

SEQ ID NO: 357694 - RNA, 23 nt, Human
ugagacccguggaaacauccaaa

SEQ ID NO: 357695 - RNA, 21 nt, Human
ugaggugaaagaggggcugcu

SEQ ID NO: 357696 - RNA, 22 nt, Human
ugaggugaaagaggggcugcug

SEQ ID NO: 357697 - RNA, 21 nt, Human
ugauuaauguuuggggagagg

SEQ ID NO: 357698 - RNA, 19 nt, Human
ugcaacaugggagggcagg

SEQ ID NO: 357699 - RNA, 18 nt, Human
ugccucaggucucuggua

SEQ ID NO: 357700 - RNA, 18 nt, Human
ugccucaggucucuggua

SEQ ID NO: 357701 - RNA, 22 nt, Human
uggaaacauccaaacagcaaaa

SEQ ID NO: 357702 - RNA, 20 nt, Human
uggaagagagcgcuagggca

SEQ ID NO: 357703 - RNA, 18 nt, Human
uggaccucuguggcccag

SEQ ID NO: 357704 - RNA, 25 nt, Human
uggauaugaaacccagaguccaugc

SEQ ID NO: 357705 - RNA, 23 nt, Human
uggggaaggggcaucagguuggc

SEQ ID NO: 357706 - RNA, 19 nt, Human
uggggagaggcaggauucu

SEQ ID NO: 357707 - RNA, 21 nt, Human
uggggagggagagggacaagu

SEQ ID NO: 357708 - RNA, 23 nt, Human
uggggagggagagggacaagugg

SEQ ID NO: 357709 - RNA, 21 nt, Human
uggggcucuggggcaaucucu

SEQ ID NO: 357710 - RNA, 22 nt, Human
uggggggggcggguguugagag

SEQ ID NO: 357711 - RNA, 19 nt, Human
uggucaaaggcacaaaguu

SEQ ID NO: 357712 - RNA, 19 nt, Human
uuaauguuuggggagaggc

SEQ ID NO: 357713 - RNA, 24 nt, Human
uuagaccuaagagauggucaaagg

SEQ ID NO: 357714 - RNA, 18 nt, Human
uuaucauuuugugcucaa

SEQ ID NO: 357715 - RNA, 18 nt, Human
uucaggaggaagggcugc

SEQ ID NO: 357716 - RNA, 19 nt, Human
uugaggugaaagaggggcu

SEQ ID NO: 357717 - RNA, 24 nt, Human
uuuuuuuuuuuagaagaaauacgg

SEQ ID NO: 357718 - RNA, 21 nt, Human
cauggaacugaugacuuccga

SEQ ID NO: 357719 - RNA, 21 nt, Human
cccucccgcgccccucccccg

SEQ ID NO: 357720 - RNA, 20 nt, Human
ccgcgccccucccccggccc

SEQ ID NO: 357721 - RNA, 22 nt, Human
cgcgccccucccccggcccccc

SEQ ID NO: 357722 - RNA, 20 nt, Human
cuccggcucgcccgcucgcu

SEQ ID NO: 357723 - RNA, 22 nt, Human
cucgcccgcucgcucucucccu

SEQ ID NO: 357724 - RNA, 20 nt, Human
gcccgcucgcucucucccuc

SEQ ID NO: 357725 - RNA, 25 nt, Human
gcggcgggugugugcgugugcgcuc

SEQ ID NO: 357726 - RNA, 18 nt, Human
ugacuuccgagcuguccc

SEQ ID NO: 357727 - RNA, 20 nt, Human
uucccuuccucgcuccggcu

SEQ ID NO: 357728 - RNA, 24 nt, Human
aacaugaaaaaaguccaaaagaaa

SEQ ID NO: 357729 - RNA, 21 nt, Human
aacccccucaaagggcccgag

SEQ ID NO: 357730 - RNA, 21 nt, Human
aagcugccuagcgacgccucc

SEQ ID NO: 357731 - RNA, 20 nt, Human
acagcaaaacccucccacca

SEQ ID NO: 357732 - RNA, 22 nt, Human
acagcaaaacccucccaccaua

SEQ ID NO: 357733 - RNA, 19 nt, Human
accauacuuugagcuacug

SEQ ID NO: 357734 - RNA, 22 nt, Human
agacuuaaacaaauuuugauuu

SEQ ID NO: 357735 - RNA, 22 nt, Human
agcaaaacccucccaccauacu

SEQ ID NO: 357736 - RNA, 23 nt, Human
caccaggaugggacugggacuuc

SEQ ID NO: 357737 - RNA, 22 nt, Human
cacuucugauuuacagcagaag

SEQ ID NO: 357738 - RNA, 23 nt, Human
ccagggagaguaaaacgcuacaa

SEQ ID NO: 357739 - RNA, 22 nt, Human
cccaggauggagggaggaggcc

SEQ ID NO: 357740 - RNA, 24 nt, Human
ccucagaagcuaauucaguucucc

SEQ ID NO: 357741 - RNA, 19 nt, Human
cgccggugccugccucgug

SEQ ID NO: 357742 - RNA, 26 nt, Human
cuacaaucuuucuaacagcuuugccc

SEQ ID NO: 357743 - RNA, 24 nt, Human
cugggugcaucuuguuuacucuug

SEQ ID NO: 357744 - RNA, 23 nt, Human
cuguggacaugggcauuuccucu

SEQ ID NO: 357745 - RNA, 19 nt, Human
gcaucuuguuuacucuuga

SEQ ID NO: 357746 - RNA, 23 nt, Human
gccgccgccggugccugccucgg

SEQ ID NO: 357747 - RNA, 24 nt, Human
gcuauaauucuuguagacauucug

SEQ ID NO: 357748 - RNA, 18 nt, Human
guccagagugggcccgcu

SEQ ID NO: 357749 - RNA, 24 nt, Human
gugaagaaaacaugaaaaaagucc

SEQ ID NO: 357750 - RNA, 18 nt, Human
gugacauuuggcuuccug

SEQ ID NO: 357751 - RNA, 18 nt, Human
guggguccagagugggcc

SEQ ID NO: 357752 - RNA, 22 nt, Human
uaaaauuucuuugggaagguga

SEQ ID NO: 357753 - RNA, 22 nt, Human
uaacagcuuugcccuacaccac

SEQ ID NO: 357754 - RNA, 23 nt, Human
uaacagcuuugcccuacaccacc

SEQ ID NO: 357755 - RNA, 24 nt, Human
uaagaaauuaauuuauuugaguuc

SEQ ID NO: 357756 - RNA, 23 nt, Human
uacaagcuguggacaugggcauu

SEQ ID NO: 357757 - RNA, 19 nt, Human
uagcgacgccuccguccua

SEQ ID NO: 357758 - RNA, 19 nt, Human
uagugagggggcagugugu

SEQ ID NO: 357759 - RNA, 20 nt, Human
ucaaagggcccgagugucaa

SEQ ID NO: 357760 - RNA, 21 nt, Human
uccaaaagaaacccccucaaa

SEQ ID NO: 357761 - RNA, 22 nt, Human
uccaaaagaaacccccucaaag

SEQ ID NO: 357762 - RNA, 19 nt, Human
uccuuuggcaugccacugg

SEQ ID NO: 357763 - RNA, 21 nt, Human
ucgaagcugccuagcgacgcc

SEQ ID NO: 357764 - RNA, 20 nt, Human
ugaaaaaaguccaaaagaaa

SEQ ID NO: 357765 - RNA, 22 nt, Human
ugaaaaaaguccaaaagaaacc

SEQ ID NO: 357766 - RNA, 18 nt, Human
ugacagcaaaacccuccc

SEQ ID NO: 357767 - RNA, 18 nt, Human
ugauuugugaagaaaaca

SEQ ID NO: 357768 - RNA, 19 nt, Human
ugauuugugaagaaaacau

SEQ ID NO: 357769 - RNA, 21 nt, Human
ugcccuacaccaccaucuaaa

SEQ ID NO: 357770 - RNA, 20 nt, Human
uggagcagcucauccaucuc

SEQ ID NO: 357771 - RNA, 22 nt, Human
uggcaugccacuggauaacaag

SEQ ID NO: 357772 - RNA, 23 nt, Human
uggcaugccacuggauaacaaga

SEQ ID NO: 357773 - RNA, 24 nt, Human
ugugcuuauuaaaaauggucaucu

SEQ ID NO: 357774 - RNA, 19 nt, Human
uucaguucuccuuuggcau

SEQ ID NO: 357775 - RNA, 19 nt, Human
uugcccuacaccaccaucu

SEQ ID NO: 357776 - RNA, 24 nt, Human
uuguauuuuuuaaagcuauaauuc

SEQ ID NO: 357777 - RNA, 20 nt, Human
uugugcuuauuaaaaauggu

SEQ ID NO: 357778 - RNA, 24 nt, Human
uuuuuuuuuuuuuuuuuuacuuuu

SEQ ID NO: 357779 - RNA, 29 nt, Human
uuuuuuuuuuuuuuuuuuuuacuuuuuaa

SEQ ID NO: 357780 - RNA, 19 nt, Human
aaaaaugucauucuugucc

SEQ ID NO: 357781 - RNA, 19 nt, Human
aacacauacugaaaaauga

SEQ ID NO: 357782 - RNA, 25 nt, Human
aacuggcugccugagagaggagagg

SEQ ID NO: 357783 - RNA, 22 nt, Human
aagaagacagaacagagaucag

SEQ ID NO: 357784 - RNA, 24 nt, Human
aagaagacagaacagagaucagua

SEQ ID NO: 357785 - RNA, 18 nt, Human
aagagaaaaccagcagaa

SEQ ID NO: 357786 - RNA, 19 nt, Human
aagcaccagaugccuucug

SEQ ID NO: 357787 - RNA, 23 nt, Human
aaucugcauguuccugcagguuu

SEQ ID NO: 357788 - RNA, 20 nt, Human
acacugugaucaugacaggg

SEQ ID NO: 357789 - RNA, 20 nt, Human
acuccacugcccugagcugg

SEQ ID NO: 357790 - RNA, 24 nt, Human
agaaaagaucuucucaguuacaaa

SEQ ID NO: 357791 - RNA, 23 nt, Human
agaaggaagucuuauuguccagc

SEQ ID NO: 357792 - RNA, 23 nt, Human
agagaggagagggguccccagag

SEQ ID NO: 357793 - RNA, 25 nt, Human
agaggagagggguccccagaguggg

SEQ ID NO: 357794 - RNA, 21 nt, Human
agcaggaagcaacuggcugcc

SEQ ID NO: 357795 - RNA, 20 nt, Human
aggaagacacugugugucca

SEQ ID NO: 357796 - RNA, 19 nt, Human
aggagagggguccccagag

SEQ ID NO: 357797 - RNA, 20 nt, Human
aggaggccaccaggcucagc

SEQ ID NO: 357798 - RNA, 25 nt, Human
aggcaacagaucucaaucuucggga

SEQ ID NO: 357799 - RNA, 30 nt, Human
aggcagaguccaccuagucugauuuuuuuu

SEQ ID NO: 357800 - RNA, 22 nt, Human
aggggauaagagaaaaccagca

SEQ ID NO: 357801 - RNA, 20 nt, Human
agggguugcagguauagcgc

SEQ ID NO: 357802 - RNA, 18 nt, Human
agucgcugagcucuuggg

SEQ ID NO: 357803 - RNA, 24 nt, Human
aucaucuucuuaaaaugcagauuc

SEQ ID NO: 357804 - RNA, 21 nt, Human
augauuacacugugagcucca

SEQ ID NO: 357805 - RNA, 19 nt, Human
caacaugauaagugugaca

SEQ ID NO: 357806 - RNA, 28 nt, Human
caagccccaaguaaucguccaucaggga

SEQ ID NO: 357807 - RNA, 21 nt, Human
caagccccaaguaaucguccu

SEQ ID NO: 357808 - RNA, 19 nt, Human
caccaaaaaauagaaaggc

SEQ ID NO: 357809 - RNA, 23 nt, Human
caccaaaaaauagaaaggcuuuc

SEQ ID NO: 357810 - RNA, 18 nt, Human
cacuguguguccaagagc

SEQ ID NO: 357811 - RNA, 24 nt, Human
cacuuccuagaguaggaccaaggg

SEQ ID NO: 357812 - RNA, 22 nt, Human
cagaagauauauagaggcccau

SEQ ID NO: 357813 - RNA, 23 nt, Human
cagcagccagacuggaccucugg

SEQ ID NO: 357814 - RNA, 19 nt, Human
cagguaggcaggcagaguc

SEQ ID NO: 357815 - RNA, 24 nt, Human
caguaguuaagcuacaagaagcac

SEQ ID NO: 357816 - RNA, 18 nt, Human
caguauguguaagaccaa

SEQ ID NO: 357817 - RNA, 18 nt, Human
ccaaguacuccacugccc

SEQ ID NO: 357818 - RNA, 25 nt, Human
ccaccaggcucagcuuacaagcccc

SEQ ID NO: 357819 - RNA, 19 nt, Human
ccagaccagguaggcaggc

SEQ ID NO: 357820 - RNA, 19 nt, Human
cccagagagcuuaaugacc

SEQ ID NO: 357821 - RNA, 19 nt, Human
ccccaagaaagaggacgcg

SEQ ID NO: 357822 - RNA, 18 nt, Human
cccugugcagguccccuc

SEQ ID NO: 357823 - RNA, 18 nt, Human
ccuaagugagaggucuuc

SEQ ID NO: 357824 - RNA, 24 nt, Human
ccuccacaacagcagccagacugg

SEQ ID NO: 357825 - RNA, 18 nt, Human
ccucuggacaacaugaua

SEQ ID NO: 357826 - RNA, 22 nt, Human
ccugcagguuuuucugaugcug

SEQ ID NO: 357827 - RNA, 21 nt, Human
ccuugccuccacaacagcagc

SEQ ID NO: 357828 - RNA, 18 nt, Human
ccuuguucugagcccaac

SEQ ID NO: 357829 - RNA, 20 nt, Human
cgaguaggaguuggggaggg

SEQ ID NO: 357830 - RNA, 22 nt, Human
cugccccagacagucuugauuc

SEQ ID NO: 357831 - RNA, 21 nt, Human
cugugaucaugacagggguuc

SEQ ID NO: 357832 - RNA, 21 nt, Human
cuucucaguuacaaauucugg

SEQ ID NO: 357833 - RNA, 21 nt, Human
cuuucuauuucacuggcccag

SEQ ID NO: 357834 - RNA, 20 nt, Human
gaacccaaagcaggaagcaa

SEQ ID NO: 357835 - RNA, 21 nt, Human
gaagaguccaaccugcaagga

SEQ ID NO: 357836 - RNA, 19 nt, Human
gagaaucaucuucuuaaaa

SEQ ID NO: 357837 - RNA, 19 nt, Human
gagaggagaggggucccca

SEQ ID NO: 357838 - RNA, 21 nt, Human
gaggaugagaaacaggaagac

SEQ ID NO: 357839 - RNA, 22 nt, Human
gaguaacuuugagucugugggc

SEQ ID NO: 357840 - RNA, 20 nt, Human
gaguccaaccugcaaggagg

SEQ ID NO: 357841 - RNA, 21 nt, Human
gauucuguagggaauaaggag

SEQ ID NO: 357842 - RNA, 23 nt, Human
gcaccagaugccuucugggauga

SEQ ID NO: 357843 - RNA, 22 nt, Human
gcagagggcgcccugggaaccc

SEQ ID NO: 357844 - RNA, 18 nt, Human
ggaaggagaguaacuuug

SEQ ID NO: 357845 - RNA, 23 nt, Human
ggagagcagacacaggaacaaug

SEQ ID NO: 357846 - RNA, 18 nt, Human
ggcacaggggauaagaga

SEQ ID NO: 357847 - RNA, 23 nt, Human
ggccccucugugcaaagcccaga

SEQ ID NO: 357848 - RNA, 19 nt, Human
ggggauaagagaaaaccag

SEQ ID NO: 357849 - RNA, 18 nt, Human
ggggguagggucggggag

SEQ ID NO: 357850 - RNA, 24 nt, Human
gucugugggccucauuucccaggu

SEQ ID NO: 357851 - RNA, 22 nt, Human
gugccuacccaccccugccugc

SEQ ID NO: 357852 - RNA, 21 nt, Human
guggucccugggcacagggga

SEQ ID NO: 357853 - RNA, 22 nt, Human
uaagagaaaaccagcagaauga

SEQ ID NO: 357854 - RNA, 20 nt, Human
uacaagaagcaccagaugcc

SEQ ID NO: 357855 - RNA, 26 nt, Human
uaccaaaaaaaggaaaaagaaaagau

SEQ ID NO: 357856 - RNA, 27 nt, Human
uaccaaaaaaaggaaaaagaaaagauc

SEQ ID NO: 357857 - RNA, 20 nt, Human
uagaggcccauggugugugg

SEQ ID NO: 357858 - RNA, 25 nt, Human
uagaggcccaugguguguggucccu

SEQ ID NO: 357859 - RNA, 24 nt, Human
uaggaucaaacuccaucucugaag

SEQ ID NO: 357860 - RNA, 23 nt, Human
uagggucggggagagcaaaagga

SEQ ID NO: 357861 - RNA, 24 nt, Human
uaguuaagcuacaagaagcaccag

SEQ ID NO: 357862 - RNA, 23 nt, Human
uauagaggcccaugguguguggu

SEQ ID NO: 357863 - RNA, 24 nt, Human
uauuucacuggcccagguaggggg

SEQ ID NO: 357864 - RNA, 18 nt, Human
ucagcugagagaaggaag

SEQ ID NO: 357865 - RNA, 23 nt, Human
ucauucuuguccacacggguccc

SEQ ID NO: 357866 - RNA, 18 nt, Human
uccaaccugcaaggagga

SEQ ID NO: 357867 - RNA, 21 nt, Human
uccaagaaggcuggaguccuu

SEQ ID NO: 357868 - RNA, 19 nt, Human
uccacugcccugagcuggg

SEQ ID NO: 357869 - RNA, 23 nt, Human
ucccaggcuacuuccuuccuccc

SEQ ID NO: 357870 - RNA, 20 nt, Human
uccccaagaaagaggacgcg

SEQ ID NO: 357871 - RNA, 18 nt, Human
ucccucccgcaccaaaaa

SEQ ID NO: 357872 - RNA, 18 nt, Human
ucccugugcagguccccu

SEQ ID NO: 357873 - RNA, 22 nt, Human
ucgaucugcuuuuucuggucau

SEQ ID NO: 357874 - RNA, 24 nt, Human
ucuggucauucauucagaagauau

SEQ ID NO: 357875 - RNA, 18 nt, Human
ucugugcaaagcccagag

SEQ ID NO: 357876 - RNA, 19 nt, Human
ucugugggccucauuuccc

SEQ ID NO: 357877 - RNA, 19 nt, Human
ucuucgggaugccugagaa

SEQ ID NO: 357878 - RNA, 21 nt, Human
ucuucgggaugccugagaauc

SEQ ID NO: 357879 - RNA, 21 nt, Human
ugagaaacaggaagacacugu

SEQ ID NO: 357880 - RNA, 24 nt, Human
ugagcccaacacggguccuggcac

SEQ ID NO: 357881 - RNA, 26 nt, Human
ugauaagugugacaaucacacuuccu

SEQ ID NO: 357882 - RNA, 22 nt, Human
ugcaaggaggaugagaaacagg

SEQ ID NO: 357883 - RNA, 20 nt, Human
ugccuccacaacagcagcca

SEQ ID NO: 357884 - RNA, 22 nt, Human
ugcuacuggcucugaagggcac

SEQ ID NO: 357885 - RNA, 29 nt, Human
ugggaacccaaagcaggaagcaacuggcu

SEQ ID NO: 357886 - RNA, 22 nt, Human
uggggguagggucggggagagc

SEQ ID NO: 357887 - RNA, 22 nt, Human
ugugaagaguccaaccugcaag

SEQ ID NO: 357888 - RNA, 25 nt, Human
ugugcaaagcccagagauggucaaa

SEQ ID NO: 357889 - RNA, 23 nt, Human
uguuaccaaaaaaaggaaaaaga

SEQ ID NO: 357890 - RNA, 21 nt, Human
uuagauaaaaacaggaaggag

SEQ ID NO: 357891 - RNA, 20 nt, Human
uuaggaucaaacuccaucuc

SEQ ID NO: 357892 - RNA, 23 nt, Human
uuggaguuaggaucaaacuccau

SEQ ID NO: 357893 - RNA, 22 nt, Human
uuuuuuuuuugagaaccaaggg

SEQ ID NO: 357894 - RNA, 18 nt, Human
uuuuuuuuuuuuuuuuug

SEQ ID NO: 357895 - RNA, 18 nt, Human
uuuuuuuuuuuuuuuuug

SEQ ID NO: 357896 - RNA, 22 nt, Human
uuuuuuuuuuuuuuuuugcagg

SEQ ID NO: 357897 - RNA, 20 nt, Human
aaaacaaacaaaagaaaucc

SEQ ID NO: 357898 - RNA, 19 nt, Human
aaaacagagcaaaucaaaa

SEQ ID NO: 357899 - RNA, 19 nt, Human
aaacaaacaaaagaaaucc

SEQ ID NO: 357900 - RNA, 20 nt, Human
aaacaaacaaaagaaaucca

SEQ ID NO: 357901 - RNA, 21 nt, Human
aaacagagcaaaucaaaacaa

SEQ ID NO: 357902 - RNA, 18 nt, Human
aaacauacauacauugca

SEQ ID NO: 357903 - RNA, 19 nt, Human
aaagcacuaugcccauuuc

SEQ ID NO: 357904 - RNA, 21 nt, Human
aaagcagaacaacaguccaaa

SEQ ID NO: 357905 - RNA, 21 nt, Human
aacagaaaaacauccaucaaa

SEQ ID NO: 357906 - RNA, 21 nt, Human
aaccauaguacacuguuaaau

SEQ ID NO: 357907 - RNA, 20 nt, Human
aacuaccaagaaaggaaaga

SEQ ID NO: 357908 - RNA, 21 nt, Human
aacuauacuaccucugucccu

SEQ ID NO: 357909 - RNA, 21 nt, Human
aagcaaacuggcauaucagau

SEQ ID NO: 357910 - RNA, 26 nt, Human
aagcagugaagcaaagaaaagggacc

SEQ ID NO: 357911 - RNA, 23 nt, Human
aauagugcuggucaaucaaugau

SEQ ID NO: 357912 - RNA, 21 nt, Human
acaacagaaaaacauccauca

SEQ ID NO: 357913 - RNA, 23 nt, Human
acaacagaaaaacauccaucaaa

SEQ ID NO: 357914 - RNA, 24 nt, Human
acgcccaacuaaauggaaaaaaaa

SEQ ID NO: 357915 - RNA, 21 nt, Human
acugcaaguuucucuuccccc

SEQ ID NO: 357916 - RNA, 22 nt, Human
agaaaaacauccaucaaauuca

SEQ ID NO: 357917 - RNA, 23 nt, Human
agaauugaaagauguacaaggca

SEQ ID NO: 357918 - RNA, 18 nt, Human
agcaaaucaaaacaaaca

SEQ ID NO: 357919 - RNA, 21 nt, Human
agcagaggauucaaacucuag

SEQ ID NO: 357920 - RNA, 22 nt, Human
agccccgacuccgccauccucc

SEQ ID NO: 357921 - RNA, 22 nt, Human
aguauuaaaagcagugaagcaa

SEQ ID NO: 357922 - RNA, 27 nt, Human
aguauuaaaagcagugaagcaaagaaa

SEQ ID NO: 357923 - RNA, 21 nt, Human
auaauguguuggcaaauguuu

SEQ ID NO: 357924 - RNA, 30 nt, Human
auauaccaauaucuacauaaauagauacaa

SEQ ID NO: 357925 - RNA, 26 nt, Human
aucagauuacacaacagaaaaacauc

SEQ ID NO: 357926 - RNA, 18 nt, Human
aucuucaccugccuucca

SEQ ID NO: 357927 - RNA, 22 nt, Human
augaagagacaaagauccuaca

SEQ ID NO: 357928 - RNA, 20 nt, Human
auggcagucuauuuuugaac

SEQ ID NO: 357929 - RNA, 18 nt, Human
auucauacuagaaaaggu

SEQ ID NO: 357930 - RNA, 23 nt, Human
caaaucucaaaauaaguuaaaga

SEQ ID NO: 357931 - RNA, 23 nt, Human
caaauuucuaucuuaauaucaua

SEQ ID NO: 357932 - RNA, 22 nt, Human
caacaauacugcuaaguauuaa

SEQ ID NO: 357933 - RNA, 23 nt, Human
caacucgucagagaagcaaaauu

SEQ ID NO: 357934 - RNA, 20 nt, Human
caagccuggacaaaaacuac

SEQ ID NO: 357935 - RNA, 21 nt, Human
caagccuggacaaaaacuaca

SEQ ID NO: 357936 - RNA, 23 nt, Human
caaggcaagucaagauauaaaac

SEQ ID NO: 357937 - RNA, 25 nt, Human
caaggcaagucaagauauaaaacca

SEQ ID NO: 357938 - RNA, 22 nt, Human
caaugugccucuuuuccauaac

SEQ ID NO: 357939 - RNA, 21 nt, Human
cacaacgcccaacuaaaugga

SEQ ID NO: 357940 - RNA, 22 nt, Human
cacaacucgucagagaagcaaa

SEQ ID NO: 357941 - RNA, 27 nt, Human
cacaagcagcaauauguaauuauacaa

SEQ ID NO: 357942 - RNA, 22 nt, Human
cacacaagcagcaauauguaau

SEQ ID NO: 357943 - RNA, 25 nt, Human
cagaacaacaguccaaauuucuauc

SEQ ID NO: 357944 - RNA, 21 nt, Human
cagagcaaaucaaaacaaaca

SEQ ID NO: 357945 - RNA, 26 nt, Human
cagcagauggggggaaaaaaaaaaga

SEQ ID NO: 357946 - RNA, 21 nt, Human
caucuagaacgcaccuugcuc

SEQ ID NO: 357947 - RNA, 19 nt, Human
cgacuccgccauccuccuc

SEQ ID NO: 357948 - RNA, 18 nt, Human
cgucaggagccccgacuc

SEQ ID NO: 357949 - RNA, 23 nt, Human
cuacacaaucaaaaaaguacugg

SEQ ID NO: 357950 - RNA, 22 nt, Human
cuccccaauggcuucuaugcaa

SEQ ID NO: 357951 - RNA, 19 nt, Human
cuuccacugaacuccccaa

SEQ ID NO: 357952 - RNA, 21 nt, Human
cuuucagggccuacaauacua

SEQ ID NO: 357953 - RNA, 21 nt, Human
gaaaaaaaaaaaaacacacaa

SEQ ID NO: 357954 - RNA, 20 nt, Human
gaaaagcagaacaacagucc

SEQ ID NO: 357955 - RNA, 20 nt, Human
gaaaaggucucaauacccuu

SEQ ID NO: 357956 - RNA, 19 nt, Human
gauuguguguguuuauaug

SEQ ID NO: 357957 - RNA, 20 nt, Human
gauuguguguguuuauaugu

SEQ ID NO: 357958 - RNA, 28 nt, Human
gcaaguuucucuucccccaaacuuaaaa

SEQ ID NO: 357959 - RNA, 22 nt, Human
gccaggaaaagcagaacaacag

SEQ ID NO: 357960 - RNA, 23 nt, Human
ggaaaaaaaaaaaaacacacaag

SEQ ID NO: 357961 - RNA, 23 nt, Human
ggggggaaaaaaaaaagaaagga

SEQ ID NO: 357962 - RNA, 21 nt, Human
gugacucaagccuggacaaaa

SEQ ID NO: 357963 - RNA, 20 nt, Human
gugccaggaaaagcagaaca

SEQ ID NO: 357964 - RNA, 24 nt, Human
guuucucuucccccaaacuuaaaa

SEQ ID NO: 357965 - RNA, 22 nt, Human
uaaaaaauauucauacuagaaa

SEQ ID NO: 357966 - RNA, 21 nt, Human
uaacuauacuaccucuguccc

SEQ ID NO: 357967 - RNA, 25 nt, Human
uacacaacagaaaaacauccaucaa

SEQ ID NO: 357968 - RNA, 23 nt, Human
uacacuguuaaauaaccuugaaa

SEQ ID NO: 357969 - RNA, 21 nt, Human
uaccaagaaaggaaagaugag

SEQ ID NO: 357970 - RNA, 21 nt, Human
uaccaagaaaggaaagaugag

SEQ ID NO: 357971 - RNA, 24 nt, Human
uacccaaagacucacuucagguau

SEQ ID NO: 357972 - RNA, 20 nt, Human
uaccucugucccuuaaauuu

SEQ ID NO: 357973 - RNA, 23 nt, Human
uagccuuaauucaaaaaugguuu

SEQ ID NO: 357974 - RNA, 23 nt, Human
uauaaacaaaauuuuaacugaaa

SEQ ID NO: 357975 - RNA, 19 nt, Human
uauacuaccucugucccuu

SEQ ID NO: 357976 - RNA, 25 nt, Human
uauauacauauauagauugugugug

SEQ ID NO: 357977 - RNA, 21 nt, Human
uauauagcauuguauauacau

SEQ ID NO: 357978 - RNA, 22 nt, Human
uauauagcauuguauauacaua

SEQ ID NO: 357979 - RNA, 18 nt, Human
uaucuaacuauacuaccu

SEQ ID NO: 357980 - RNA, 19 nt, Human
uaucuuaauaucauagccu

SEQ ID NO: 357981 - RNA, 22 nt, Human
uaugauauaauaaauacauauc

SEQ ID NO: 357982 - RNA, 19 nt, Human
uauucauacuagaaaaggu

SEQ ID NO: 357983 - RNA, 21 nt, Human
ucaaagaugaagagacaaaga

SEQ ID NO: 357984 - RNA, 19 nt, Human
ucaaauugacuuagaccaa

SEQ ID NO: 357985 - RNA, 18 nt, Human
ucacuuugccaguuuuuu

SEQ ID NO: 357986 - RNA, 22 nt, Human
uccaaauuucuaucuuaauauc

SEQ ID NO: 357987 - RNA, 26 nt, Human
ucuacuuucagggccuacaauacuau

SEQ ID NO: 357988 - RNA, 18 nt, Human
ucucaauacccuuccccu

SEQ ID NO: 357989 - RNA, 19 nt, Human
ugacucaagccuggacaaa

SEQ ID NO: 357990 - RNA, 24 nt, Human
ugacuguaaacaauacauaaaauu

SEQ ID NO: 357991 - RNA, 21 nt, Human
ugagugccaggaaaagcagaa

SEQ ID NO: 357992 - RNA, 21 nt, Human
ugccaggaaaagcagaacaac

SEQ ID NO: 357993 - RNA, 19 nt, Human
ugcuucacaacucgucaga

SEQ ID NO: 357994 - RNA, 23 nt, Human
ugcuucacaacucgucagagaag

SEQ ID NO: 357995 - RNA, 23 nt, Human
uggaaaaaaaaaaaaacacacaa

SEQ ID NO: 357996 - RNA, 20 nt, Human
uggacaaaaacuacaugaac

SEQ ID NO: 357997 - RNA, 20 nt, Human
uggcuucuaugcaaugugcc

SEQ ID NO: 357998 - RNA, 22 nt, Human
ugguaaggggaaaauauauaug

SEQ ID NO: 357999 - RNA, 18 nt, Human
uguacagaauuuaaaaaa

SEQ ID NO: 358000 - RNA, 23 nt, Human
uguacagaauuuaaaaaaaauuc

SEQ ID NO: 358001 - RNA, 19 nt, Human
ugugggaccagcagauuua

SEQ ID NO: 358002 - RNA, 22 nt, Human
uuagaguuccgucaggagcccc

SEQ ID NO: 358003 - RNA, 20 nt, Human
uucaggaaugaaaaaacucc

SEQ ID NO: 358004 - RNA, 28 nt, Human
uucuuuagcagaggauucaaacucuagg

SEQ ID NO: 358005 - RNA, 21 nt, Human
uugaauucaaagaugaagaga

SEQ ID NO: 358006 - RNA, 24 nt, Human
uugauccuuauaaaaucucucauu

SEQ ID NO: 358007 - RNA, 21 nt, Human
uuucaaagaaagacauucaug

SEQ ID NO: 358008 - RNA, 22 nt, Human
uuuugcuucacaacucgucaga

SEQ ID NO: 358009 - RNA, 20 nt, Human
aaaaaaaaaaaaaauaccaa

SEQ ID NO: 358010 - RNA, 26 nt, Human
aaaaaaaaaaaaaauaccaauccaaa

SEQ ID NO: 358011 - RNA, 23 nt, Human
aaaaaaaaaaacaaagugugggg

SEQ ID NO: 358012 - RNA, 26 nt, Human
aaaaaaaaaaauaaauaacaaaucca

SEQ ID NO: 358013 - RNA, 22 nt, Human
aaaaaaaaaacaaagugugggg

SEQ ID NO: 358014 - RNA, 23 nt, Human
aaaaaaaaaacaaagugugggga

SEQ ID NO: 358015 - RNA, 26 nt, Human
aaaaauaccaauccaaaacaaaacca

SEQ ID NO: 358016 - RNA, 23 nt, Human
aaaacaaaaccaaaaaaaaaaaa

SEQ ID NO: 358017 - RNA, 22 nt, Human
aaaacaaagaaauaaaagaacu

SEQ ID NO: 358018 - RNA, 26 nt, Human
aaaagaaaaagcaacaguuuucagaa

SEQ ID NO: 358019 - RNA, 19 nt, Human
aaacaaaaccaaaaaaaaa

SEQ ID NO: 358020 - RNA, 25 nt, Human
aaacaaaaccaaaaaaaaaaaacaa

SEQ ID NO: 358021 - RNA, 22 nt, Human
aaacaaaguguggggagccccc

SEQ ID NO: 358022 - RNA, 18 nt, Human
aaacacaaccacacuccc

SEQ ID NO: 358023 - RNA, 25 nt, Human
aaacacaaccacacucccagcgcgc

SEQ ID NO: 358024 - RNA, 23 nt, Human
aaaccaccaagcuugaauccaga

SEQ ID NO: 358025 - RNA, 21 nt, Human
aaaccagacccaauuugggaa

SEQ ID NO: 358026 - RNA, 24 nt, Human
aaacgaaauaaaacaaaaccaaaa

SEQ ID NO: 358027 - RNA, 22 nt, Human
aaagaaaaccaccaagcuugaa

SEQ ID NO: 358028 - RNA, 22 nt, Human
aacaaaaccaaaaaaaaaaaac

SEQ ID NO: 358029 - RNA, 20 nt, Human
aacacggugaaacgccgucu

SEQ ID NO: 358030 - RNA, 21 nt, Human
aacacggugaaacgccgucuc

SEQ ID NO: 358031 - RNA, 19 nt, Human
aacauggucaaaccccauc

SEQ ID NO: 358032 - RNA, 20 nt, Human
aacauggucaaaccccaucu

SEQ ID NO: 358033 - RNA, 21 nt, Human
aacauggucaaaccccaucuc

SEQ ID NO: 358034 - RNA, 21 nt, Human
aaccaaaaaaaaaaaacaaag

SEQ ID NO: 358035 - RNA, 22 nt, Human
aaccacacucccagcgcgccca

SEQ ID NO: 358036 - RNA, 23 nt, Human
aacucgugaagccacauccccuu

SEQ ID NO: 358037 - RNA, 21 nt, Human
aacuugaaaacucucuggauc

SEQ ID NO: 358038 - RNA, 24 nt, Human
aagaaaaagcaacaguuuucagaa

SEQ ID NO: 358039 - RNA, 22 nt, Human
aagaaacuccaguuuuccaagc

SEQ ID NO: 358040 - RNA, 22 nt, Human
aagauggaguaggggagaaaga

SEQ ID NO: 358041 - RNA, 18 nt, Human
aagcaacuguccagccca

SEQ ID NO: 358042 - RNA, 22 nt, Human
aagcaacuguccagcccaugcc

SEQ ID NO: 358043 - RNA, 22 nt, Human
aagcaagucucugucucaaaaa

SEQ ID NO: 358044 - RNA, 23 nt, Human
aagcccgcgguucacguccucag

SEQ ID NO: 358045 - RNA, 18 nt, Human
aagccucucuccucuuuu

SEQ ID NO: 358046 - RNA, 24 nt, Human
aagcuggaaccaccuacaucugca

SEQ ID NO: 358047 - RNA, 23 nt, Human
aaguccacauucaaauccacacc

SEQ ID NO: 358048 - RNA, 24 nt, Human
aaucgcuugaacucgggaggcgga

SEQ ID NO: 358049 - RNA, 24 nt, Human
acaaaaccaaaaaaaaaaaacaaa

SEQ ID NO: 358050 - RNA, 24 nt, Human
acaaagcaagucucugucucaaaa

SEQ ID NO: 358051 - RNA, 26 nt, Human
acagagcaagacucugucuuucuuaa

SEQ ID NO: 358052 - RNA, 21 nt, Human
accacacucccagcgcgccca

SEQ ID NO: 358053 - RNA, 22 nt, Human
accacacucccagcgcgcccag

SEQ ID NO: 358054 - RNA, 19 nt, Human
accagugugcuccagccug

SEQ ID NO: 358055 - RNA, 24 nt, Human
accccaucucuacugaaaauacaa

SEQ ID NO: 358056 - RNA, 19 nt, Human
accucccgcaaacccugug

SEQ ID NO: 358057 - RNA, 24 nt, Human
accugaggucaggaguucgagacc

SEQ ID NO: 358058 - RNA, 19 nt, Human
acgcagaagauggaguagg

SEQ ID NO: 358059 - RNA, 19 nt, Human
acgcagccaggcggggguu

SEQ ID NO: 358060 - RNA, 21 nt, Human
acgcgcggugcaggcggggug

SEQ ID NO: 358061 - RNA, 25 nt, Human
acugaaaauacaaacauuaucuuga

SEQ ID NO: 358062 - RNA, 18 nt, Human
acugcgcuccagccuggg

SEQ ID NO: 358063 - RNA, 21 nt, Human
acugcgcuccagccugggcga

SEQ ID NO: 358064 - RNA, 23 nt, Human
acugcgcuccagccugggcgaca

SEQ ID NO: 358065 - RNA, 19 nt, Human
agaaacacaaccacacucc

SEQ ID NO: 358066 - RNA, 21 nt, Human
agaaagaaaagcuggaaccac

SEQ ID NO: 358067 - RNA, 20 nt, Human
agacgcgcggaaacgaaaua

SEQ ID NO: 358068 - RNA, 23 nt, Human
agaggaucuuuggagcucaggag

SEQ ID NO: 358069 - RNA, 23 nt, Human
agaucaccugaggucaggaguuc

SEQ ID NO: 358070 - RNA, 20 nt, Human
agcacuuugggaggcuaagg

SEQ ID NO: 358071 - RNA, 21 nt, Human
agcccgggaguccgggcgcgc

SEQ ID NO: 358072 - RNA, 22 nt, Human
agccggggcugguggaugcgcg

SEQ ID NO: 358073 - RNA, 24 nt, Human
agccuggccaacauggucaaaccc

SEQ ID NO: 358074 - RNA, 20 nt, Human
agccugggcgacaaagcaag

SEQ ID NO: 358075 - RNA, 24 nt, Human
agccugggugacagagcaagacuc

SEQ ID NO: 358076 - RNA, 24 nt, Human
agcuacucaggaggcugagguggg

SEQ ID NO: 358077 - RNA, 23 nt, Human
agcugggugugguggugggugcc

SEQ ID NO: 358078 - RNA, 26 nt, Human
aggaaaaaaaaaaauaaauaacaaag

SEQ ID NO: 358079 - RNA, 26 nt, Human
aggaaggagcaugguaguaaagaaaa

SEQ ID NO: 358080 - RNA, 23 nt, Human
aggagcucaagaccagccucagc

SEQ ID NO: 358081 - RNA, 24 nt, Human
aggauugcuugagcccaggaguuu

SEQ ID NO: 358082 - RNA, 24 nt, Human
aggcaggagaaucgcuugaacucg

SEQ ID NO: 358083 - RNA, 18 nt, Human
aggcaggagcaucgcuug

SEQ ID NO: 358084 - RNA, 24 nt, Human
aggcaggagcaucgcuugaacccg

SEQ ID NO: 358085 - RNA, 22 nt, Human
aggccggcaauuggcuuucuuc

SEQ ID NO: 358086 - RNA, 19 nt, Human
aggcggagguugcagugag

SEQ ID NO: 358087 - RNA, 24 nt, Human
aggcggagguugcagugagucgag

SEQ ID NO: 358088 - RNA, 22 nt, Human
aggcgggcagaucaccugaggu

SEQ ID NO: 358089 - RNA, 26 nt, Human
aggcgggcagaucaccugaggucagg

SEQ ID NO: 358090 - RNA, 26 nt, Human
aggcggguggaucaccugaggucagg

SEQ ID NO: 358091 - RNA, 21 nt, Human
aggcuaaggcggguggaucac

SEQ ID NO: 358092 - RNA, 20 nt, Human
aggcugaggcaggagaaucg

SEQ ID NO: 358093 - RNA, 24 nt, Human
aggcugaggcaggagaaucgcuug

SEQ ID NO: 358094 - RNA, 20 nt, Human
aggcugaggcaggagcaucg

SEQ ID NO: 358095 - RNA, 24 nt, Human
aggcugaggcaggagcaucgcuug

SEQ ID NO: 358096 - RNA, 24 nt, Human
aggcugaggugggaggauugcuug

SEQ ID NO: 358097 - RNA, 18 nt, Human
agggcgucaccagagaaa

SEQ ID NO: 358098 - RNA, 19 nt, Human
agguccccggaacguggga

SEQ ID NO: 358099 - RNA, 23 nt, Human
agugguucaugcuuguaauucua

SEQ ID NO: 358100 - RNA, 24 nt, Human
agugugcuccagccugggugacag

SEQ ID NO: 358101 - RNA, 26 nt, Human
auaaaacaaaaccaaaaaaaaaaaac

SEQ ID NO: 358102 - RNA, 24 nt, Human
aucgcaccagugugcuccagccug

SEQ ID NO: 358103 - RNA, 20 nt, Human
auggaacguggaucucccga

SEQ ID NO: 358104 - RNA, 24 nt, Human
auugcgggacugcgcuccagccug

SEQ ID NO: 358105 - RNA, 24 nt, Human
auugcuugagcccaggaguuugag

SEQ ID NO: 358106 - RNA, 18 nt, Human
auuuaugaacguccgacc

SEQ ID NO: 358107 - RNA, 18 nt, Human
caaaaauaaaaaacaaag

SEQ ID NO: 358108 - RNA, 23 nt, Human
caaaccccuugcuguguucccag

SEQ ID NO: 358109 - RNA, 21 nt, Human
caaagcaagaucccgucucua

SEQ ID NO: 358110 - RNA, 19 nt, Human
caaaguaagaagcaggggc

SEQ ID NO: 358111 - RNA, 19 nt, Human
caaauggaucuacaguuca

SEQ ID NO: 358112 - RNA, 19 nt, Human
caaccagaaacagcucagg

SEQ ID NO: 358113 - RNA, 18 nt, Human
cacacucccagcgcgccc

SEQ ID NO: 358114 - RNA, 27 nt, Human
cacauacaucacaaaguaagaagcagg

SEQ ID NO: 358115 - RNA, 23 nt, Human
caccaaaccccuugcuguguucc

SEQ ID NO: 358116 - RNA, 18 nt, Human
caccaccucccgcaaacc

SEQ ID NO: 358117 - RNA, 22 nt, Human
caccagcgcuguuauuuacgcc

SEQ ID NO: 358118 - RNA, 18 nt, Human
caccagugugcuccagcc

SEQ ID NO: 358119 - RNA, 18 nt, Human
cacccgugauuuuugcaa

SEQ ID NO: 358120 - RNA, 23 nt, Human
caccugaggucaggaguucgaga

SEQ ID NO: 358121 - RNA, 23 nt, Human
caccuguaaucccagcuacucgg

SEQ ID NO: 358122 - RNA, 24 nt, Human
caccuguaaucccagcuacucggg

SEQ ID NO: 358123 - RNA, 20 nt, Human
caccuugcaaccacgcgucc

SEQ ID NO: 358124 - RNA, 24 nt, Human
cacgccugucaucccagcacuuug

SEQ ID NO: 358125 - RNA, 19 nt, Human
cacguccucagccucagcc

SEQ ID NO: 358126 - RNA, 22 nt, Human
cacguugggaggccgaggcggg

SEQ ID NO: 358127 - RNA, 24 nt, Human
cagaucaccugaggucaggaguuc

SEQ ID NO: 358128 - RNA, 22 nt, Human
cagcaaaaaaaaaaaaaaaaaa

SEQ ID NO: 358129 - RNA, 23 nt, Human
cagcaaagcaagaucccgucucu

SEQ ID NO: 358130 - RNA, 24 nt, Human
cagcacuuugggaggcuaaggcgg

SEQ ID NO: 358131 - RNA, 19 nt, Human
cagccccccaugcgcugcc

SEQ ID NO: 358132 - RNA, 19 nt, Human
cagccccccaugcgcugcc

SEQ ID NO: 358133 - RNA, 19 nt, Human
cagccccccaugcgcugcc

SEQ ID NO: 358134 - RNA, 20 nt, Human
cagccccccaugcgcugccu

SEQ ID NO: 358135 - RNA, 21 nt, Human
cagcuacucaggaggcugagg

SEQ ID NO: 358136 - RNA, 24 nt, Human
cagcuacucaggaggcugaggugg

SEQ ID NO: 358137 - RNA, 24 nt, Human
cagcuacucgggaggcugaggcag

SEQ ID NO: 358138 - RNA, 24 nt, Human
cagcuacucgggaggcugaggcag

SEQ ID NO: 358139 - RNA, 24 nt, Human
caggccccgagcgugccccggagg

SEQ ID NO: 358140 - RNA, 21 nt, Human
cagggccaucucuacacccgu

SEQ ID NO: 358141 - RNA, 22 nt, Human
cagugugcuccagccuggguga

SEQ ID NO: 358142 - RNA, 23 nt, Human
cagugugcuccagccugggugac

SEQ ID NO: 358143 - RNA, 24 nt, Human
cagugugcuccagccugggugaca

SEQ ID NO: 358144 - RNA, 25 nt, Human
cagugugcuccagccugggugacag

SEQ ID NO: 358145 - RNA, 21 nt, Human
caucacaaaguaagaagcagg

SEQ ID NO: 358146 - RNA, 24 nt, Human
caucgcuugaacccggggggcgga

SEQ ID NO: 358147 - RNA, 20 nt, Human
caucggagaccagcuccggg

SEQ ID NO: 358148 - RNA, 25 nt, Human
caugccagcugugacgacaaguuuu

SEQ ID NO: 358149 - RNA, 24 nt, Human
caugcuuguaauucuaacacuuug

SEQ ID NO: 358150 - RNA, 18 nt, Human
cauggucaaaccccaucu

SEQ ID NO: 358151 - RNA, 24 nt, Human
ccaauccaaaacaaaaccagaccc

SEQ ID NO: 358152 - RNA, 20 nt, Human
ccacacucccagcgcgccca

SEQ ID NO: 358153 - RNA, 21 nt, Human
ccacgggcagugguucaugcu

SEQ ID NO: 358154 - RNA, 21 nt, Human
ccagaaaaccaaucagaaaag

SEQ ID NO: 358155 - RNA, 24 nt, Human
ccagaaaaccaaucagaacaugga

SEQ ID NO: 358156 - RNA, 20 nt, Human
ccagcgcuguuauuuacgcc

SEQ ID NO: 358157 - RNA, 22 nt, Human
ccaggaguuugaggcugcagug

SEQ ID NO: 358158 - RNA, 18 nt, Human
ccaggccggcaauuggcu

SEQ ID NO: 358159 - RNA, 21 nt, Human
ccagugugcuccagccugggu

SEQ ID NO: 358160 - RNA, 21 nt, Human
ccagugugcuccagccugggu

SEQ ID NO: 358161 - RNA, 22 nt, Human
ccagugugcuccagccugggug

SEQ ID NO: 358162 - RNA, 23 nt, Human
ccagugugcuccagccuggguga

SEQ ID NO: 358163 - RNA, 24 nt, Human
ccagugugcuccagccugggugac

SEQ ID NO: 358164 - RNA, 20 nt, Human
cccacacagguuacccgcgg

SEQ ID NO: 358165 - RNA, 22 nt, Human
cccccaggccggcaauuggcuu

SEQ ID NO: 358166 - RNA, 28 nt, Human
ccccccaggccggcaauuggcuuucuuc

SEQ ID NO: 358167 - RNA, 20 nt, Human
ccccucccuuuccaaagccc

SEQ ID NO: 358168 - RNA, 21 nt, Human
cccgcaaacccugugcggacu

SEQ ID NO: 358169 - RNA, 18 nt, Human
cccggagguucauucgcg

SEQ ID NO: 358170 - RNA, 25 nt, Human
cccggccccugccuccugggauucc

SEQ ID NO: 358171 - RNA, 22 nt, Human
cccgggagccucccuccucagg

SEQ ID NO: 358172 - RNA, 24 nt, Human
ccgaaagccucucuccucuuuuuu

SEQ ID NO: 358173 - RNA, 25 nt, Human
ccgaaguccacauucaaauccacac

SEQ ID NO: 358174 - RNA, 18 nt, Human
ccgagccccccacacagg

SEQ ID NO: 358175 - RNA, 22 nt, Human
ccucaggccucuugcaggagcu

SEQ ID NO: 358176 - RNA, 23 nt, Human
ccugaggucaggaguuccgagac

SEQ ID NO: 358177 - RNA, 22 nt, Human
ccugaggucaggaguucgagac

SEQ ID NO: 358178 - RNA, 18 nt, Human
ccugcacguacaaugggc

SEQ ID NO: 358179 - RNA, 20 nt, Human
ccuggccaacacggugaaac

SEQ ID NO: 358180 - RNA, 21 nt, Human
ccuggccaacacggugaaacg

SEQ ID NO: 358181 - RNA, 24 nt, Human
ccuggccaacauggucaaacccca

SEQ ID NO: 358182 - RNA, 22 nt, Human
ccugggugacagagcaagacuc

SEQ ID NO: 358183 - RNA, 21 nt, Human
ccuguaaucccagcuacucgg

SEQ ID NO: 358184 - RNA, 19 nt, Human
ccuguagucccagcuacuc

SEQ ID NO: 358185 - RNA, 19 nt, Human
ccuguagucccagcuacuc

SEQ ID NO: 358186 - RNA, 21 nt, Human
ccuguagucccagcuacucag

SEQ ID NO: 358187 - RNA, 21 nt, Human
ccuguagucccagcuacucgg

SEQ ID NO: 358188 - RNA, 22 nt, Human
ccuguagucccagcuacucggg

SEQ ID NO: 358189 - RNA, 19 nt, Human
ccuucagaaacacaaccac

SEQ ID NO: 358190 - RNA, 20 nt, Human
ccuuggagaggcccgggcug

SEQ ID NO: 358191 - RNA, 24 nt, Human
cgagaccagccuggccaacauggu

SEQ ID NO: 358192 - RNA, 22 nt, Human
cgagcgugccccggagguucau

SEQ ID NO: 358193 - RNA, 20 nt, Human
cgaggcgggcagaucaccug

SEQ ID NO: 358194 - RNA, 26 nt, Human
cgaggcgggcagaucaccugagguca

SEQ ID NO: 358195 - RNA, 18 nt, Human
cgcaggcgcccgagcccc

SEQ ID NO: 358196 - RNA, 20 nt, Human
cgcccgagccccccacacag

SEQ ID NO: 358197 - RNA, 24 nt, Human
cgccugucaucccagcacuuuggg

SEQ ID NO: 358198 - RNA, 20 nt, Human
cgccuguccacccucccauu

SEQ ID NO: 358199 - RNA, 21 nt, Human
cgcgcaggaggggggcgcagg

SEQ ID NO: 358200 - RNA, 18 nt, Human
cgcgcggugcaggcgggg

SEQ ID NO: 358201 - RNA, 22 nt, Human
cgcugugucucccccacccccc

SEQ ID NO: 358202 - RNA, 23 nt, Human
cggaaacgaaauaaaacaaaacc

SEQ ID NO: 358203 - RNA, 18 nt, Human
cggaggaaaagaaacucc

SEQ ID NO: 358204 - RNA, 24 nt, Human
cgggaggcggagguugcagugagu

SEQ ID NO: 358205 - RNA, 24 nt, Human
cgggcagaucaccugaggucagga

SEQ ID NO: 358206 - RNA, 24 nt, Human
cggguggaucaccugaggucagga

SEQ ID NO: 358207 - RNA, 19 nt, Human
cgucacaaagauacagucu

SEQ ID NO: 358208 - RNA, 22 nt, Human
cuaacacuuugggagguggagg

SEQ ID NO: 358209 - RNA, 19 nt, Human
cuacacccgugauuuuugc

SEQ ID NO: 358210 - RNA, 20 nt, Human
cuaguaaaaaucaaaaaaau

SEQ ID NO: 358211 - RNA, 22 nt, Human
cucaagaccagccucagcagca

SEQ ID NO: 358212 - RNA, 24 nt, Human
cucacgccugucaucccagcacuu

SEQ ID NO: 358213 - RNA, 23 nt, Human
cucaggacccgggcaaaagcagg

SEQ ID NO: 358214 - RNA, 18 nt, Human
cucaggaggcugaggugg

SEQ ID NO: 358215 - RNA, 20 nt, Human
cuccagccugggugacagag

SEQ ID NO: 358216 - RNA, 22 nt, Human
cugcagugagcuaugaucgcac

SEQ ID NO: 358217 - RNA, 20 nt, Human
cuggaaaaguuauaaagucg

SEQ ID NO: 358218 - RNA, 18 nt, Human
cuggccaacacggugaaa

SEQ ID NO: 358219 - RNA, 23 nt, Human
cuggccaacauggucaaacccca

SEQ ID NO: 358220 - RNA, 21 nt, Human
cuguaaucccagcuacucggg

SEQ ID NO: 358221 - RNA, 24 nt, Human
cugucucaaaaauaaaaaacaaag

SEQ ID NO: 358222 - RNA, 20 nt, Human
cugugucucccccacccccc

SEQ ID NO: 358223 - RNA, 23 nt, Human
cugugucucccccaccccccagg

SEQ ID NO: 358224 - RNA, 20 nt, Human
gaaauaaaacaaaaccaaaa

SEQ ID NO: 358225 - RNA, 22 nt, Human
gaacauggaacguggaucuccc

SEQ ID NO: 358226 - RNA, 18 nt, Human
gaagauggaguaggggag

SEQ ID NO: 358227 - RNA, 18 nt, Human
gaagcaaaaaagaaguug

SEQ ID NO: 358228 - RNA, 18 nt, Human
gaagggggaaagauccca

SEQ ID NO: 358229 - RNA, 23 nt, Human
gagaaucgcuugaacucgggagg

SEQ ID NO: 358230 - RNA, 23 nt, Human
gagcagccggggcugguggaugc

SEQ ID NO: 358231 - RNA, 18 nt, Human
gagcccaggaguuugagg

SEQ ID NO: 358232 - RNA, 21 nt, Human
gagcucccggggugcccggag

SEQ ID NO: 358233 - RNA, 21 nt, Human
gaggugggaggauugcuugag

SEQ ID NO: 358234 - RNA, 24 nt, Human
gaggugggaggauugcuugagccc

SEQ ID NO: 358235 - RNA, 22 nt, Human
gaucaccugaggucaggaguuc

SEQ ID NO: 358236 - RNA, 24 nt, Human
gaucaccugaggucaggaguuccg

SEQ ID NO: 358237 - RNA, 25 nt, Human
gaucaccugaggucaggaguuccga

SEQ ID NO: 358238 - RNA, 24 nt, Human
gaucaccugaggucaggaguucga

SEQ ID NO: 358239 - RNA, 22 nt, Human
gauugcuugagcccaggaguuu

SEQ ID NO: 358240 - RNA, 24 nt, Human
gauugcuugagcccaggaguuuga

SEQ ID NO: 358241 - RNA, 23 nt, Human
gcaaaaaaaaaaaaaaaaaaaaa

SEQ ID NO: 358242 - RNA, 20 nt, Human
gcacguugggaggccgaggc

SEQ ID NO: 358243 - RNA, 22 nt, Human
gcagagacgcugugucuccccc

SEQ ID NO: 358244 - RNA, 21 nt, Human
gcagccggggcugguggaugc

SEQ ID NO: 358245 - RNA, 20 nt, Human
gcaggcgcccgagcccccca

SEQ ID NO: 358246 - RNA, 21 nt, Human
gcaggcgcccgagccccccac

SEQ ID NO: 358247 - RNA, 24 nt, Human
gccaacacggugaaacgccgucuc

SEQ ID NO: 358248 - RNA, 24 nt, Human
gccaacauggucaaaccccaucuc

SEQ ID NO: 358249 - RNA, 21 nt, Human
gcccagggccaucucuacacc

SEQ ID NO: 358250 - RNA, 19 nt, Human
gcccgggcuggacgcacgg

SEQ ID NO: 358251 - RNA, 24 nt, Human
gccgggcgcaggggcucacgccug

SEQ ID NO: 358252 - RNA, 20 nt, Human
gcggagguggcggugagcug

SEQ ID NO: 358253 - RNA, 21 nt, Human
gcgggacugcgcuccagccug

SEQ ID NO: 358254 - RNA, 22 nt, Human
ggaaacgaaauaaaacaaaacc

SEQ ID NO: 358255 - RNA, 22 nt, Human
ggacugcgcuccagccugggcg

SEQ ID NO: 358256 - RNA, 18 nt, Human
ggagguggcggugagcug

SEQ ID NO: 358257 - RNA, 24 nt, Human
ggagguggcggugagcugacauug

SEQ ID NO: 358258 - RNA, 18 nt, Human
ggagguugcagugagucg

SEQ ID NO: 358259 - RNA, 20 nt, Human
ggagguugcagugagucgag

SEQ ID NO: 358260 - RNA, 18 nt, Human
ggaguccgggcgcgcggg

SEQ ID NO: 358261 - RNA, 22 nt, Human
ggaucaccugaggucaggaguu

SEQ ID NO: 358262 - RNA, 22 nt, Human
ggauugcuugagcccaggaguu

SEQ ID NO: 358263 - RNA, 19 nt, Human
ggcaccuguaaucccagcu

SEQ ID NO: 358264 - RNA, 27 nt, Human
ggccggggcuggcgagcagccggggcu

SEQ ID NO: 358265 - RNA, 19 nt, Human
ggcgcaggggcucacgccu

SEQ ID NO: 358266 - RNA, 19 nt, Human
ggcuggggccggggcuggc

SEQ ID NO: 358267 - RNA, 20 nt, Human
gggaguccgggcgcgcgggg

SEQ ID NO: 358268 - RNA, 24 nt, Human
gggcacguugggaggccgaggcgg

SEQ ID NO: 358269 - RNA, 26 nt, Human
gggcagaucaccugaggucaggaguu

SEQ ID NO: 358270 - RNA, 18 nt, Human
gggcgcaggggcucacgc

SEQ ID NO: 358271 - RNA, 24 nt, Human
gggcgcaggggcucacgccuguca

SEQ ID NO: 358272 - RNA, 22 nt, Human
gggcgucugauccgcuccuacc

SEQ ID NO: 358273 - RNA, 24 nt, Human
gggcucacgccugucaucccagca

SEQ ID NO: 358274 - RNA, 18 nt, Human
ggggggcggagguggcgg

SEQ ID NO: 358275 - RNA, 24 nt, Human
gguggugggcaccuguaaucccag

SEQ ID NO: 358276 - RNA, 20 nt, Human
guaagaagcaggggcuuuug

SEQ ID NO: 358277 - RNA, 22 nt, Human
guacaccuuggugcgaaggggg

SEQ ID NO: 358278 - RNA, 18 nt, Human
gucacaaagauacagucu

SEQ ID NO: 358279 - RNA, 21 nt, Human
gucaccaccucccgcaaaccc

SEQ ID NO: 358280 - RNA, 18 nt, Human
gugccuguagucccagcu

SEQ ID NO: 358281 - RNA, 18 nt, Human
gugcgaagggggaaagau

SEQ ID NO: 358282 - RNA, 24 nt, Human
gugcuccagccugggugacagagc

SEQ ID NO: 358283 - RNA, 18 nt, Human
guguccaccgaaagccuc

SEQ ID NO: 358284 - RNA, 21 nt, Human
gugugcuccagccugggugac

SEQ ID NO: 358285 - RNA, 23 nt, Human
uaaaacauuuauaaauggcauca

SEQ ID NO: 358286 - RNA, 22 nt, Human
uaagaaaaauggaugaaugagg

SEQ ID NO: 358287 - RNA, 20 nt, Human
uaaggcggguggaucaccug

SEQ ID NO: 358288 - RNA, 24 nt, Human
uaaggcggguggaucaccugaggu

SEQ ID NO: 358289 - RNA, 26 nt, Human
uaaggcggguggaucaccugagguca

SEQ ID NO: 358290 - RNA, 22 nt, Human
uacccgccuguccacccuccca

SEQ ID NO: 358291 - RNA, 23 nt, Human
uacccgcguucucuccguggccg

SEQ ID NO: 358292 - RNA, 19 nt, Human
uacccuucuccaggguccc

SEQ ID NO: 358293 - RNA, 28 nt, Human
uacugaaaauacaaacauuaucuugaca

SEQ ID NO: 358294 - RNA, 19 nt, Human
uagaaagagacgcgcggaa

SEQ ID NO: 358295 - RNA, 21 nt, Human
uauaucucaguuuuacaagau

SEQ ID NO: 358296 - RNA, 22 nt, Human
uaugacaccuugcaaccacgcg

SEQ ID NO: 358297 - RNA, 20 nt, Human
uaugaucgcaccagugugcu

SEQ ID NO: 358298 - RNA, 25 nt, Human
uauugcacuucacuccaugucagua

SEQ ID NO: 358299 - RNA, 19 nt, Human
ucaaaaauaaaaaacaaag

SEQ ID NO: 358300 - RNA, 22 nt, Human
ucaagcaacuguccagcccaug

SEQ ID NO: 358301 - RNA, 23 nt, Human
ucaauagacucuaaggaucuucc

SEQ ID NO: 358302 - RNA, 20 nt, Human
ucaccugaggucaggaguuc

SEQ ID NO: 358303 - RNA, 22 nt, Human
ucacgccugucaucccagcacu

SEQ ID NO: 358304 - RNA, 20 nt, Human
ucaggacccgggcaaaagca

SEQ ID NO: 358305 - RNA, 18 nt, Human
uccacauucaaauccaca

SEQ ID NO: 358306 - RNA, 21 nt, Human
uccaccgaaagccucucuccu

SEQ ID NO: 358307 - RNA, 24 nt, Human
uccagccugggugacagagcaaga

SEQ ID NO: 358308 - RNA, 18 nt, Human
ucccaaccagaaacagcu

SEQ ID NO: 358309 - RNA, 24 nt, Human
uccccagcgcggucaccaccuccc

SEQ ID NO: 358310 - RNA, 18 nt, Human
uccccucccuuuccaaag

SEQ ID NO: 358311 - RNA, 23 nt, Human
uccguggccggaggaaaagaaac

SEQ ID NO: 358312 - RNA, 28 nt, Human
uccucagccucagccagagaacuauuuc

SEQ ID NO: 358313 - RNA, 23 nt, Human
uccucaggccucuugcaggagcu

SEQ ID NO: 358314 - RNA, 23 nt, Human
ucgcaccagugugcuccagccug

SEQ ID NO: 358315 - RNA, 23 nt, Human
ucgcuaagcuaauucucuuuaau

SEQ ID NO: 358316 - RNA, 24 nt, Human
ucgcuugaacccggggggcggagg

SEQ ID NO: 358317 - RNA, 24 nt, Human
ucgcuugaacucgggaggcggagg

SEQ ID NO: 358318 - RNA, 24 nt, Human
ucgggaggcugaggcaggagaauc

SEQ ID NO: 358319 - RNA, 22 nt, Human
ucuaccccucaccgccugccga

SEQ ID NO: 358320 - RNA, 26 nt, Human
ucucaaaaauaaaaaacaaagaaaua

SEQ ID NO: 358321 - RNA, 19 nt, Human
ucucauuucaucacuguuu

SEQ ID NO: 358322 - RNA, 25 nt, Human
ucuccagggucccaggacgcacggg

SEQ ID NO: 358323 - RNA, 18 nt, Human
ucucccccaccccccagg

SEQ ID NO: 358324 - RNA, 23 nt, Human
ucucuacugaaaauacaaacauu

SEQ ID NO: 358325 - RNA, 19 nt, Human
ucucuggaucucucccugg

SEQ ID NO: 358326 - RNA, 23 nt, Human
ucugcuguuuauaaaacuggggg

SEQ ID NO: 358327 - RNA, 22 nt, Human
ucuggugcaauuacuggucucc

SEQ ID NO: 358328 - RNA, 24 nt, Human
ucuggugcaauuacuggucuccgg

SEQ ID NO: 358329 - RNA, 27 nt, Human
ucugucuuucuuaaaaaaaaaaaaaaa

SEQ ID NO: 358330 - RNA, 23 nt, Human
ucuugcaggagcucccggggugc

SEQ ID NO: 358331 - RNA, 19 nt, Human
ucuuucucucucucucccc

SEQ ID NO: 358332 - RNA, 23 nt, Human
ucuuucuuaaaaaaaaaaaaaaa

SEQ ID NO: 358333 - RNA, 19 nt, Human
ugaaacgccgucucuacua

SEQ ID NO: 358334 - RNA, 22 nt, Human
ugaaacgccgucucuacuauaa

SEQ ID NO: 358335 - RNA, 19 nt, Human
ugacaugguggugggcacc

SEQ ID NO: 358336 - RNA, 20 nt, Human
ugaccaguggauguuaguaa

SEQ ID NO: 358337 - RNA, 21 nt, Human
ugagacggguccaaauggauc

SEQ ID NO: 358338 - RNA, 25 nt, Human
ugagaggaucuuuggagcucaggag

SEQ ID NO: 358339 - RNA, 22 nt, Human
ugagcccaggaguuugaggcug

SEQ ID NO: 358340 - RNA, 20 nt, Human
ugaggcaggagaaucgcuug

SEQ ID NO: 358341 - RNA, 23 nt, Human
ugaggcaggagaaucgcuugaac

SEQ ID NO: 358342 - RNA, 23 nt, Human
ugaggcaggagaaucgcuugaac

SEQ ID NO: 358343 - RNA, 25 nt, Human
ugaggcaggagaaucgcuugaacuc

SEQ ID NO: 358344 - RNA, 24 nt, Human
ugaggcaggagcaucgcuugaacc

SEQ ID NO: 358345 - RNA, 25 nt, Human
ugaggcaggagcaucgcuugaaccc

SEQ ID NO: 358346 - RNA, 23 nt, Human
ugaggcugcagugagcuaugauc

SEQ ID NO: 358347 - RNA, 20 nt, Human
ugaggugggaggauugcuug

SEQ ID NO: 358348 - RNA, 23 nt, Human
ugaggugggaggauugcuugagc

SEQ ID NO: 358349 - RNA, 24 nt, Human
ugaggugggaggauugcuugagcc

SEQ ID NO: 358350 - RNA, 23 nt, Human
ugcacguacaaugggcugaacuc

SEQ ID NO: 358351 - RNA, 18 nt, Human
ugcccggagcacgguggc

SEQ ID NO: 358352 - RNA, 21 nt, Human
ugcccucuuuuauccccuuca

SEQ ID NO: 358353 - RNA, 24 nt, Human
ugccuguagucccagcuacucagg

SEQ ID NO: 358354 - RNA, 24 nt, Human
ugccuguagucccagcuacucggg

SEQ ID NO: 358355 - RNA, 21 nt, Human
ugcguggacggucccgggagc

SEQ ID NO: 358356 - RNA, 18 nt, Human
ugcuugagcccaggaguu

SEQ ID NO: 358357 - RNA, 20 nt, Human
uggagaccacgggcaguggu

SEQ ID NO: 358358 - RNA, 21 nt, Human
uggaggugagaggaucuuugg

SEQ ID NO: 358359 - RNA, 24 nt, Human
uggaucaccugaggucaggaguuc

SEQ ID NO: 358360 - RNA, 27 nt, Human
uggaucaccugaggucaggaguucgag

SEQ ID NO: 358361 - RNA, 21 nt, Human
uggcaccaccgugcccucuuu

SEQ ID NO: 358362 - RNA, 19 nt, Human
uggcggggguggugguggc

SEQ ID NO: 358363 - RNA, 21 nt, Human
ugggaaacggugugugauuug

SEQ ID NO: 358364 - RNA, 19 nt, Human
ugggaaucaaacacuggaa

SEQ ID NO: 358365 - RNA, 20 nt, Human
ugggagaagagguaacgccu

SEQ ID NO: 358366 - RNA, 20 nt, Human
ugggaggccgaggcgggcag

SEQ ID NO: 358367 - RNA, 24 nt, Human
ugggaggccgaggcgggcagauca

SEQ ID NO: 358368 - RNA, 20 nt, Human
ugggaggcuaaggcgggugg

SEQ ID NO: 358369 - RNA, 24 nt, Human
ugggaggcuaaggcggguggauca

SEQ ID NO: 358370 - RNA, 24 nt, Human
ugggagguggaggugagaggaucu

SEQ ID NO: 358371 - RNA, 20 nt, Human
ugggggaacgcagaagaugg

SEQ ID NO: 358372 - RNA, 18 nt, Human
ugggggcacguugggagg

SEQ ID NO: 358373 - RNA, 23 nt, Human
ugguaguaaagaaaaucguuggc

SEQ ID NO: 358374 - RNA, 20 nt, Human
uggugcgaagggggaaagau

SEQ ID NO: 358375 - RNA, 24 nt, Human
ugguggcaggugccuguaguccca

SEQ ID NO: 358376 - RNA, 24 nt, Human
ugguggugggcaccuguaauccca

SEQ ID NO: 358377 - RNA, 24 nt, Human
ugguggugggugccuguaguccca

SEQ ID NO: 358378 - RNA, 18 nt, Human
uguauuuguaacccggac

SEQ ID NO: 358379 - RNA, 18 nt, Human
uguuuucaucugaagcaa

SEQ ID NO: 358380 - RNA, 20 nt, Human
uuacuggucuccgggcuccg

SEQ ID NO: 358381 - RNA, 24 nt, Human
uuagcugggugugguggugggugc

SEQ ID NO: 358382 - RNA, 19 nt, Human
uuaggaaagaaaaccacca

SEQ ID NO: 358383 - RNA, 25 nt, Human
uuauccccuucagaaacacaacccu

SEQ ID NO: 358384 - RNA, 19 nt, Human
uuauugcugccugggaggc

SEQ ID NO: 358385 - RNA, 20 nt, Human
uucauagcuuugaaacggga

SEQ ID NO: 358386 - RNA, 24 nt, Human
uugaacucgggaggcggagguugc

SEQ ID NO: 358387 - RNA, 24 nt, Human
uugcuugagcccaggaguuugagg

SEQ ID NO: 358388 - RNA, 20 nt, Human
uuggagaccacgggcagugg

SEQ ID NO: 358389 - RNA, 21 nt, Human
uuggagaccacgggcaguggu

SEQ ID NO: 358390 - RNA, 25 nt, Human
uugggaggccgaggcgggcagauca

SEQ ID NO: 358391 - RNA, 25 nt, Human
uugggaggcuaaggcggguggauca

SEQ ID NO: 358392 - RNA, 19 nt, Human
uugggagguggaggugaga

SEQ ID NO: 358393 - RNA, 23 nt, Human
uuuuuuuuuuuuaauuuccagcu

SEQ ID NO: 358394 - RNA, 19 nt, Human
aaaacacacauuuaaguug

SEQ ID NO: 358395 - RNA, 18 nt, Human
aaaaggaggcccgccucu

SEQ ID NO: 358396 - RNA, 23 nt, Human
aaagaauagagaauccuuccccc

SEQ ID NO: 358397 - RNA, 27 nt, Human
aacccgcuccuacaaaacccaauucua

SEQ ID NO: 358398 - RNA, 24 nt, Human
aagaguccaucguuguagcuuugc

SEQ ID NO: 358399 - RNA, 24 nt, Human
aagauuuuuuuuuucuaugcaaga

SEQ ID NO: 358400 - RNA, 26 nt, Human
acaagauuuuuuuuuucuaugcaaga

SEQ ID NO: 358401 - RNA, 23 nt, Human
acacacacacacgcacacacaca

SEQ ID NO: 358402 - RNA, 27 nt, Human
acacacacacgcacacacacacggacg

SEQ ID NO: 358403 - RNA, 21 nt, Human
acacacacgcacacacacacg

SEQ ID NO: 358404 - RNA, 24 nt, Human
acacacacggacgaaaacagcaca

SEQ ID NO: 358405 - RNA, 19 nt, Human
acccgcuccuacaaaaccc

SEQ ID NO: 358406 - RNA, 23 nt, Human
acgaaaacagcacagcaaauccu

SEQ ID NO: 358407 - RNA, 19 nt, Human
agacucccccaaacccgcu

SEQ ID NO: 358408 - RNA, 20 nt, Human
agacucccccaaacccgcuc

SEQ ID NO: 358409 - RNA, 25 nt, Human
aggcgggaagagggccggcucccga

SEQ ID NO: 358410 - RNA, 23 nt, Human
caaauagcaguuaagaaauaagu

SEQ ID NO: 358411 - RNA, 25 nt, Human
caacguaaaaggaggcccgccucuc

SEQ ID NO: 358412 - RNA, 24 nt, Human
cacacacacacacgcacacacaca

SEQ ID NO: 358413 - RNA, 21 nt, Human
cacagcaaauccuguuaccag

SEQ ID NO: 358414 - RNA, 31 nt, Human
cacgaacacacacacacacgcacacacacag

SEQ ID NO: 358415 - RNA, 22 nt, Human
cagacucccccaaacccgcucc

SEQ ID NO: 358416 - RNA, 20 nt, Human
cagucucucgagaaucgucu

SEQ ID NO: 358417 - RNA, 31 nt, Human
cauccacacgaacacacacacacacgcacag

SEQ ID NO: 358418 - RNA, 24 nt, Human
caugcaaaccggaauuuacuguca

SEQ ID NO: 358419 - RNA, 33 nt, Human
ccacacgaacacacacacacacgcacacacagu

SEQ ID NO: 358420 - RNA, 22 nt, Human
cccagucucucgagaaucgucu

SEQ ID NO: 358421 - RNA, 25 nt, Human
ccccaaacccgcuccuacaaaaccc

SEQ ID NO: 358422 - RNA, 26 nt, Human
ccccagcggggccacacgugcaucca

SEQ ID NO: 358423 - RNA, 28 nt, Human
cccccaaacccgcuccuacaaaacccaa

SEQ ID NO: 358424 - RNA, 20 nt, Human
ccgcgguuccagcacuaccc

SEQ ID NO: 358425 - RNA, 19 nt, Human
ccuacaaaacccaauucua

SEQ ID NO: 358426 - RNA, 23 nt, Human
ccuacaaaacccaauucuaggcc

SEQ ID NO: 358427 - RNA, 19 nt, Human
ccucgaguaggaaaacggg

SEQ ID NO: 358428 - RNA, 19 nt, Human
ccuguccagucucucucca

SEQ ID NO: 358429 - RNA, 18 nt, Human
ccuuccucuuuuucucuc

SEQ ID NO: 358430 - RNA, 20 nt, Human
ccuuccucuuuuucucuccc

SEQ ID NO: 358431 - RNA, 21 nt, Human
cgaaaacagcacagcaaaucc

SEQ ID NO: 358432 - RNA, 24 nt, Human
cgaacacacacacacacgcacaca

SEQ ID NO: 358433 - RNA, 18 nt, Human
cgagaaucgucuggguug

SEQ ID NO: 358434 - RNA, 18 nt, Human
cgugcaggcugagugccg

SEQ ID NO: 358435 - RNA, 21 nt, Human
cucccccaaacccgcuccuac

SEQ ID NO: 358436 - RNA, 23 nt, Human
cucccccaaacccgcuccuacaa

SEQ ID NO: 358437 - RNA, 24 nt, Human
cucuucuuucugcuuugccuucuu

SEQ ID NO: 358438 - RNA, 18 nt, Human
cucuuuucuugcucuucc

SEQ ID NO: 358439 - RNA, 19 nt, Human
cuuccucuuuuucucuccc

SEQ ID NO: 358440 - RNA, 21 nt, Human
cuuccucuuuuucucucccgu

SEQ ID NO: 358441 - RNA, 19 nt, Human
cuuugccuucuuagcgcau

SEQ ID NO: 358442 - RNA, 21 nt, Human
gagaagcagcggggcgcggag

SEQ ID NO: 358443 - RNA, 18 nt, Human
gcagaaaaaggucaguuu

SEQ ID NO: 358444 - RNA, 21 nt, Human
gcaguccagacaguuuugcca

SEQ ID NO: 358445 - RNA, 20 nt, Human
gggccggcucccgaggucuc

SEQ ID NO: 358446 - RNA, 18 nt, Human
gguaacggagaagcagcg

SEQ ID NO: 358447 - RNA, 21 nt, Human
gugcauccacacgaacacaca

SEQ ID NO: 358448 - RNA, 21 nt, Human
guugccuuccucuuuuucucu

SEQ ID NO: 358449 - RNA, 25 nt, Human
guugccuuccucuuuuucucucccg

SEQ ID NO: 358450 - RNA, 27 nt, Human
uaaaacacacauuuaaguugguaacuc

SEQ ID NO: 358451 - RNA, 24 nt, Human
uaaaaggaggcccgccucucucau

SEQ ID NO: 358452 - RNA, 22 nt, Human
uacccuguccagucucucucca

SEQ ID NO: 358453 - RNA, 24 nt, Human
uacugucagcaguccagacaguuu

SEQ ID NO: 358454 - RNA, 28 nt, Human
uagagaauccuucccccucguggaaucc

SEQ ID NO: 358455 - RNA, 20 nt, Human
uccacacgaacacacacaca

SEQ ID NO: 358456 - RNA, 22 nt, Human
uccacacgaacacacacacaca

SEQ ID NO: 358457 - RNA, 21 nt, Human
ucccugguccugcguggaguc

SEQ ID NO: 358458 - RNA, 19 nt, Human
ucgcauccucuuugcgauc

SEQ ID NO: 358459 - RNA, 18 nt, Human
ucucaaagggguaacgga

SEQ ID NO: 358460 - RNA, 22 nt, Human
ucucucuccagacucccccaaa

SEQ ID NO: 358461 - RNA, 18 nt, Human
ucucuuuucuugcucuuc

SEQ ID NO: 358462 - RNA, 21 nt, Human
ucuggcuuuccgaguccaaga

SEQ ID NO: 358463 - RNA, 23 nt, Human
ucuggcuuuccgaguccaagaug

SEQ ID NO: 358464 - RNA, 21 nt, Human
ucuuuuucucucccguuuguc

SEQ ID NO: 358465 - RNA, 23 nt, Human
ugagaucccugguccugcgugga

SEQ ID NO: 358466 - RNA, 22 nt, Human
ugcaaaccggaauuuacuguca

SEQ ID NO: 358467 - RNA, 18 nt, Human
ugccuuccucuuuuucuc

SEQ ID NO: 358468 - RNA, 27 nt, Human
ugcuuugccuucuuagcgcauuuuuua

SEQ ID NO: 358469 - RNA, 21 nt, Human
uuaaauaaguauaccucuucu

SEQ ID NO: 358470 - RNA, 21 nt, Human
uucccccucguggaauccugg

SEQ ID NO: 358471 - RNA, 23 nt, Human
uugcuccuugguucuccaauuuc

SEQ ID NO: 358472 - RNA, 30 nt, Human
uuuaaaacacacauuuaaguugguaacucc

SEQ ID NO: 358473 - RNA, 23 nt, Human
uuuaaaauuuguuuuugcuccuu

SEQ ID NO: 358474 - RNA, 22 nt, Human
uuugcggugagccaaacuccgc

SEQ ID NO: 358475 - RNA, 24 nt, Human
uuugcggugagccaaacuccgcgg

SEQ ID NO: 358476 - RNA, 20 nt, Human
uuuuccaugcaaaccggaau

SEQ ID NO: 358477 - RNA, 25 nt, Human
uuuucucuuuucuugcucuuccccu

SEQ ID NO: 358478 - RNA, 21 nt, Human
uuuuuuuuuuuuuuuuuccau

SEQ ID NO: 358479 - RNA, 24 nt, Human
uuuuuuuuuuuuuuuuuuuccaug

SEQ ID NO: 358480 - RNA, 23 nt, Human
aauagggcuauucaaauuuuguu

SEQ ID NO: 358481 - RNA, 22 nt, Human
caagaaccaagugaagagggaa

SEQ ID NO: 358482 - RNA, 23 nt, Human
cucuuugcuauguuguaccagac

SEQ ID NO: 358483 - RNA, 21 nt, Human
guagaguacaagaaccaagug

SEQ ID NO: 358484 - RNA, 23 nt, Human
uaaaauugaauccaagucacauu

SEQ ID NO: 358485 - RNA, 20 nt, Human
ucauagccuguucucuuugc

SEQ ID NO: 358486 - RNA, 23 nt, Human
ugaaacuuaaauccugguguuuu

SEQ ID NO: 358487 - RNA, 18 nt, Human
ugaagagggaaaauugua

SEQ ID NO: 358488 - RNA, 23 nt, Human
aaaaccaauaaauacaagaacaa

SEQ ID NO: 358489 - RNA, 23 nt, Human
aaaagaccaaaaacauuuuuugc

SEQ ID NO: 358490 - RNA, 24 nt, Human
aaaaucaauuuaucucuaaccuuc

SEQ ID NO: 358491 - RNA, 24 nt, Human
aaacaaauaugcauaucaaaagau

SEQ ID NO: 358492 - RNA, 18 nt, Human
aaacacuggccagaaaau

SEQ ID NO: 358493 - RNA, 21 nt, Human
aaauacacacaaaaaaagcac

SEQ ID NO: 358494 - RNA, 22 nt, Human
aacaauacaaucaaucuacaac

SEQ ID NO: 358495 - RNA, 24 nt, Human
aacauuuuuugcaaacugccuuuu

SEQ ID NO: 358496 - RNA, 21 nt, Human
aagaaaauauugaacacguua

SEQ ID NO: 358497 - RNA, 25 nt, Human
aagacagaaagagagcaccuuauag

SEQ ID NO: 358498 - RNA, 19 nt, Human
aagaugcccaucuugggug

SEQ ID NO: 358499 - RNA, 18 nt, Human
aagcaguggcccaugacc

SEQ ID NO: 358500 - RNA, 22 nt, Human
acaaaaaaaggaaaaaccugaa

SEQ ID NO: 358501 - RNA, 20 nt, Human
acaaaagccugauuugcagu

SEQ ID NO: 358502 - RNA, 20 nt, Human
accuucaagauuaagcucaa

SEQ ID NO: 358503 - RNA, 23 nt, Human
agcgcgccccgcaacggccgccc

SEQ ID NO: 358504 - RNA, 21 nt, Human
aggcacacacucccacggcaa

SEQ ID NO: 358505 - RNA, 22 nt, Human
aggcacacacucccacggcaaa

SEQ ID NO: 358506 - RNA, 18 nt, Human
auacauauauuuuuucag

SEQ ID NO: 358507 - RNA, 21 nt, Human
caacaaacacaaaacucagaa

SEQ ID NO: 358508 - RNA, 25 nt, Human
cacacacucccacggcaaaaacaaa

SEQ ID NO: 358509 - RNA, 21 nt, Human
cacacucccacggcaaaaaca

SEQ ID NO: 358510 - RNA, 24 nt, Human
cacgcaggcacacacucccacggc

SEQ ID NO: 358511 - RNA, 18 nt, Human
cagaaagagagcaccuua

SEQ ID NO: 358512 - RNA, 24 nt, Human
cagcacuauguauugacucacaaa

SEQ ID NO: 358513 - RNA, 23 nt, Human
caucuguagaagacagaaagaga

SEQ ID NO: 358514 - RNA, 21 nt, Human
ccaacccccgccaccgcgggc

SEQ ID NO: 358515 - RNA, 22 nt, Human
ccaccgccucuucccggcgccg

SEQ ID NO: 358516 - RNA, 18 nt, Human
ccacggcaaaaacaaacu

SEQ ID NO: 358517 - RNA, 27 nt, Human
cccgcaacggccgccccggcucccccc

SEQ ID NO: 358518 - RNA, 18 nt, Human
cccggcuccccccuggcc

SEQ ID NO: 358519 - RNA, 24 nt, Human
ccgccccggcuccccccuggccgc

SEQ ID NO: 358520 - RNA, 23 nt, Human
ccgccgccgccucucgagagcgc

SEQ ID NO: 358521 - RNA, 24 nt, Human
ccgccgccucucgagagcgcgccc

SEQ ID NO: 358522 - RNA, 23 nt, Human
gcacacacccacgcaggcacaca

SEQ ID NO: 358523 - RNA, 19 nt, Human
gcaugacgaugccuucuuc

SEQ ID NO: 358524 - RNA, 22 nt, Human
gccccgcaacggccgccccggc

SEQ ID NO: 358525 - RNA, 23 nt, Human
ggaaaagaaaauauugaacacgu

SEQ ID NO: 358526 - RNA, 21 nt, Human
ggaccccgguccuggcaccaa

SEQ ID NO: 358527 - RNA, 18 nt, Human
ggccgccgccgccucucg

SEQ ID NO: 358528 - RNA, 22 nt, Human
gggaaaagcaguggcccaugac

SEQ ID NO: 358529 - RNA, 18 nt, Human
guuuuagguuggcagaca

SEQ ID NO: 358530 - RNA, 23 nt, Human
uacaaucaaucuacaacaaacac

SEQ ID NO: 358531 - RNA, 24 nt, Human
uaucugaaaaaggaaacaaaagcc

SEQ ID NO: 358532 - RNA, 24 nt, Human
uccaagauaucugaaaaaggaaac

SEQ ID NO: 358533 - RNA, 24 nt, Human
ucugcaaaaccaauaaauacaaga

SEQ ID NO: 358534 - RNA, 24 nt, Human
ucugcaaaaccaauaaauacaaga

SEQ ID NO: 358535 - RNA, 23 nt, Human
ugaaaaacuaaaauuaauaaaaa

SEQ ID NO: 358536 - RNA, 22 nt, Human
ugauuugcuuuuaauuacaaau

SEQ ID NO: 358537 - RNA, 25 nt, Human
ugcaaaaccaauaaauacaagaaca

SEQ ID NO: 358538 - RNA, 23 nt, Human
uggcagacagaugggugccuuau

SEQ ID NO: 358539 - RNA, 20 nt, Human
uggccgccgccgccucucga

SEQ ID NO: 358540 - RNA, 20 nt, Human
uguagaagacagaaagagag

SEQ ID NO: 358541 - RNA, 19 nt, Human
ugugacucaucuguagaag

SEQ ID NO: 358542 - RNA, 18 nt, Human
uuagguuggcagacagau

SEQ ID NO: 358543 - RNA, 22 nt, Human
uuuucagugguuuacuguugac

SEQ ID NO: 358544 - RNA, 21 nt, Human
aaacaaaaguaaaggaaucug

SEQ ID NO: 358545 - RNA, 18 nt, Human
aaacaauuccuaccuccc

SEQ ID NO: 358546 - RNA, 18 nt, Human
aaacaauuccuaccuccc

SEQ ID NO: 358547 - RNA, 19 nt, Human
aaacaauuccuaccuccca

SEQ ID NO: 358548 - RNA, 22 nt, Human
aaaucaccaacaggccaacccc

SEQ ID NO: 358549 - RNA, 23 nt, Human
aacagccgcugacgcaagccccc

SEQ ID NO: 358550 - RNA, 24 nt, Human
aauuuaacccaguaauucucaaac

SEQ ID NO: 358551 - RNA, 23 nt, Human
acaaacaguaucggcagagggca

SEQ ID NO: 358552 - RNA, 24 nt, Human
agaaagacaaacaguaucggcaga

SEQ ID NO: 358553 - RNA, 18 nt, Human
agaacagcauccaaauca

SEQ ID NO: 358554 - RNA, 18 nt, Human
agccacccugcgccgggg

SEQ ID NO: 358555 - RNA, 19 nt, Human
agccauccaauuucagaaa

SEQ ID NO: 358556 - RNA, 27 nt, Human
aggcaggcaggaaggggccucccucuu

SEQ ID NO: 358557 - RNA, 21 nt, Human
aggcggugcgcgccccgcggg

SEQ ID NO: 358558 - RNA, 22 nt, Human
aggcucccuaaaucugcaauuu

SEQ ID NO: 358559 - RNA, 22 nt, Human
auccaaaucaccaacaggccaa

SEQ ID NO: 358560 - RNA, 21 nt, Human
augaaacaguagaaagacaaa

SEQ ID NO: 358561 - RNA, 18 nt, Human
caacaggccaaccccauu

SEQ ID NO: 358562 - RNA, 22 nt, Human
caacaggccaaccccauucauc

SEQ ID NO: 358563 - RNA, 24 nt, Human
caacaggccaaccccauucauccc

SEQ ID NO: 358564 - RNA, 18 nt, Human
caaugucaagggaccaau

SEQ ID NO: 358565 - RNA, 25 nt, Human
caaugucaagggaccaauaugggaa

SEQ ID NO: 358566 - RNA, 22 nt, Human
cacaauuuaacccaguaauucu

SEQ ID NO: 358567 - RNA, 18 nt, Human
caccaacaggccaacccc

SEQ ID NO: 358568 - RNA, 19 nt, Human
cacccugcgccggggcgcu

SEQ ID NO: 358569 - RNA, 21 nt, Human
cagaacagcauccaaaucacc

SEQ ID NO: 358570 - RNA, 21 nt, Human
cagagggcaaccuuaaagcac

SEQ ID NO: 358571 - RNA, 20 nt, Human
cagcauccaaaucaccaaca

SEQ ID NO: 358572 - RNA, 21 nt, Human
cagcccagguccgggcggcgg

SEQ ID NO: 358573 - RNA, 21 nt, Human
cauccaauuucagaaacacug

SEQ ID NO: 358574 - RNA, 25 nt, Human
ccaaauaauuuugaagguuuacgga

SEQ ID NO: 358575 - RNA, 18 nt, Human
ccaaaucaccaacaggcc

SEQ ID NO: 358576 - RNA, 22 nt, Human
ccaaccauggaacugcgggcgc

SEQ ID NO: 358577 - RNA, 18 nt, Human
ccagguccgggcggcgga

SEQ ID NO: 358578 - RNA, 23 nt, Human
cccaaauaauuuugaagguuuac

SEQ ID NO: 358579 - RNA, 19 nt, Human
cccgggccccgaaccccag

SEQ ID NO: 358580 - RNA, 20 nt, Human
cccgggccccgaaccccagc

SEQ ID NO: 358581 - RNA, 23 nt, Human
cccugcgccggggcgcuggcucc

SEQ ID NO: 358582 - RNA, 23 nt, Human
ccuaccucccacaaacaaaagua

SEQ ID NO: 358583 - RNA, 25 nt, Human
ccucccacaaacaaaaguaaaggaa

SEQ ID NO: 358584 - RNA, 19 nt, Human
cgcgcgcggacgugacgcc

SEQ ID NO: 358585 - RNA, 20 nt, Human
cgcgcugaugcacuccgcag

SEQ ID NO: 358586 - RNA, 22 nt, Human
cgcuuccugcucgggcugcggg

SEQ ID NO: 358587 - RNA, 24 nt, Human
cgucccgggccccgaaccccagcc

SEQ ID NO: 358588 - RNA, 23 nt, Human
cgugacgccuggacacgugugcg

SEQ ID NO: 358589 - RNA, 24 nt, Human
cugaugcacuccgcagcccccggc

SEQ ID NO: 358590 - RNA, 19 nt, Human
cuuuccacaauuuaaccca

SEQ ID NO: 358591 - RNA, 21 nt, Human
gccccgaaccccagcggugcg

SEQ ID NO: 358592 - RNA, 18 nt, Human
gccuggacacgugugcgg

SEQ ID NO: 358593 - RNA, 24 nt, Human
gcgggcgccugccugccgcggggc

SEQ ID NO: 358594 - RNA, 18 nt, Human
ggcguuccgagcacgccu

SEQ ID NO: 358595 - RNA, 22 nt, Human
gggcgccugccugccgcggggc

SEQ ID NO: 358596 - RNA, 19 nt, Human
gggucgaagccagauggga

SEQ ID NO: 358597 - RNA, 22 nt, Human
uaguuuuaauuugaggguuggg

SEQ ID NO: 358598 - RNA, 21 nt, Human
uauggaauaaaacaucuauaa

SEQ ID NO: 358599 - RNA, 18 nt, Human
ucacagaacagcauccaa

SEQ ID NO: 358600 - RNA, 19 nt, Human
uccgcccggcuccagcugg

SEQ ID NO: 358601 - RNA, 20 nt, Human
uccuaccucccacaaacaaa

SEQ ID NO: 358602 - RNA, 22 nt, Human
ucgaagccagaugggacacugc

SEQ ID NO: 358603 - RNA, 18 nt, Human
ucgcugcagcccgcgggg

SEQ ID NO: 358604 - RNA, 19 nt, Human
ugaaagaucacugaugaga

SEQ ID NO: 358605 - RNA, 18 nt, Human
ugacuugugaagacauau

SEQ ID NO: 358606 - RNA, 20 nt, Human
ugaggguugggggaaguuag

SEQ ID NO: 358607 - RNA, 24 nt, Human
ugaugcacuccgcagcccccggcg

SEQ ID NO: 358608 - RNA, 21 nt, Human
ugcacuccgcagcccccggcg

SEQ ID NO: 358609 - RNA, 24 nt, Human
ugugcggccgcccaggcgcgcggg

SEQ ID NO: 358610 - RNA, 21 nt, Human
uguggguccugacuugugaag

SEQ ID NO: 358611 - RNA, 24 nt, Human
uugaaagaucacugaugagacugu

SEQ ID NO: 358612 - RNA, 18 nt, Human
uuuagaucacagaacagc

SEQ ID NO: 358613 - RNA, 20 nt, Human
aaaucaauauuuagaugcag

SEQ ID NO: 358614 - RNA, 21 nt, Human
aauccuaccugccuguucaga

SEQ ID NO: 358615 - RNA, 24 nt, Human
acagagagagcaagcccaucucuc

SEQ ID NO: 358616 - RNA, 18 nt, Human
accaccuacuugcccccc

SEQ ID NO: 358617 - RNA, 19 nt, Human
acugagcacacugaauccu

SEQ ID NO: 358618 - RNA, 18 nt, Human
agaaaauaaacaugggaa

SEQ ID NO: 358619 - RNA, 18 nt, Human
agaagauuuggggguagg

SEQ ID NO: 358620 - RNA, 25 nt, Human
agcccaucucucuccaaauccccag

SEQ ID NO: 358621 - RNA, 21 nt, Human
aggaugcugucuggaaagaau

SEQ ID NO: 358622 - RNA, 19 nt, Human
aggcggggaggaugcuguc

SEQ ID NO: 358623 - RNA, 22 nt, Human
agguggaaggcggggaggaugc

SEQ ID NO: 358624 - RNA, 20 nt, Human
aguaaaaggagcaggcugga

SEQ ID NO: 358625 - RNA, 21 nt, Human
aguaaaaggagcaggcuggaa

SEQ ID NO: 358626 - RNA, 23 nt, Human
auaaagccuucucugauccacaa

SEQ ID NO: 358627 - RNA, 22 nt, Human
auaagcacccagucuaaggacc

SEQ ID NO: 358628 - RNA, 18 nt, Human
auaggaacacguuccagg

SEQ ID NO: 358629 - RNA, 18 nt, Human
auaugugugcaugugugu

SEQ ID NO: 358630 - RNA, 18 nt, Human
auccaugggagggaaggu

SEQ ID NO: 358631 - RNA, 18 nt, Human
auguguguggcaggaggc

SEQ ID NO: 358632 - RNA, 19 nt, Human
caaggaugcugcagaggau

SEQ ID NO: 358633 - RNA, 21 nt, Human
caccuacuugccccccagagc

SEQ ID NO: 358634 - RNA, 20 nt, Human
cacugagcacacugaauccu

SEQ ID NO: 358635 - RNA, 21 nt, Human
cagaugucugccucucucacu

SEQ ID NO: 358636 - RNA, 22 nt, Human
cagcccaaccagccagagugau

SEQ ID NO: 358637 - RNA, 20 nt, Human
cagggucaggccaggcagag

SEQ ID NO: 358638 - RNA, 28 nt, Human
ccaaccagccagagugauaggaacugac

SEQ ID NO: 358639 - RNA, 20 nt, Human
ccaggggcggcaggcccuuc

SEQ ID NO: 358640 - RNA, 28 nt, Human
ccauguuucuucucuuccucuaagacuc

SEQ ID NO: 358641 - RNA, 22 nt, Human
cccaucucucuccaaaucccca

SEQ ID NO: 358642 - RNA, 22 nt, Human
ccccagugcacugagcacacug

SEQ ID NO: 358643 - RNA, 19 nt, Human
ccccuagaguaaaaggagc

SEQ ID NO: 358644 - RNA, 22 nt, Human
ccccuagaguaaaaggagcagg

SEQ ID NO: 358645 - RNA, 23 nt, Human
cccugaugggagagauagaccuu

SEQ ID NO: 358646 - RNA, 24 nt, Human
cccuguaccaccuacuugcccccc

SEQ ID NO: 358647 - RNA, 21 nt, Human
cccugugcuauaaagccuucc

SEQ ID NO: 358648 - RNA, 26 nt, Human
cccuucagguccucaggaauuagcac

SEQ ID NO: 358649 - RNA, 24 nt, Human
cuaagacucaucugaaugccccug

SEQ ID NO: 358650 - RNA, 25 nt, Human
cuaggguuaggagaagauuuggggg

SEQ ID NO: 358651 - RNA, 18 nt, Human
cucucuccaaauccccag

SEQ ID NO: 358652 - RNA, 22 nt, Human
cucuggauugccugguaucugu

SEQ ID NO: 358653 - RNA, 22 nt, Human
cuugaagcccccauggucuugc

SEQ ID NO: 358654 - RNA, 20 nt, Human
gaaaucaauauuuagaugca

SEQ ID NO: 358655 - RNA, 18 nt, Human
gaagucacuuuguucuga

SEQ ID NO: 358656 - RNA, 19 nt, Human
gauaugugugcaugugugu

SEQ ID NO: 358657 - RNA, 20 nt, Human
gccauguuucuucucuuccu

SEQ ID NO: 358658 - RNA, 23 nt, Human
gccauguuucuucucuuccucua

SEQ ID NO: 358659 - RNA, 22 nt, Human
ggaaggcuggaccugauuuccu

SEQ ID NO: 358660 - RNA, 22 nt, Human
ggaugcagagcuuccacgcccu

SEQ ID NO: 358661 - RNA, 18 nt, Human
gggcauggaccucgggag

SEQ ID NO: 358662 - RNA, 18 nt, Human
gugcguggcccuccuggg

SEQ ID NO: 358663 - RNA, 18 nt, Human
uaagcacccagucuaagg

SEQ ID NO: 358664 - RNA, 20 nt, Human
uaccucagacauggguagga

SEQ ID NO: 358665 - RNA, 19 nt, Human
uaccugccuguucagaugu

SEQ ID NO: 358666 - RNA, 21 nt, Human
uaucugucgugaggcugcacu

SEQ ID NO: 358667 - RNA, 24 nt, Human
ucaauauuuagaugcagacuucaa

SEQ ID NO: 358668 - RNA, 19 nt, Human
uccaggggcauggaccucg

SEQ ID NO: 358669 - RNA, 24 nt, Human
ucuaagacucaucugaaugcccuu

SEQ ID NO: 358670 - RNA, 19 nt, Human
ucugauccacaaacucagu

SEQ ID NO: 358671 - RNA, 20 nt, Human
ucugauccacaaacucaguu

SEQ ID NO: 358672 - RNA, 26 nt, Human
ugaaugccccugugcuauaaagccuu

SEQ ID NO: 358673 - RNA, 20 nt, Human
ugagaauggcaucauucugc

SEQ ID NO: 358674 - RNA, 18 nt, Human
ugagcaggaaaacaagcc

SEQ ID NO: 358675 - RNA, 19 nt, Human
ugagcaggaaaacaagccu

SEQ ID NO: 358676 - RNA, 20 nt, Human
ugaggauagacacuguaucc

SEQ ID NO: 358677 - RNA, 19 nt, Human
ugcacagagagagcaagcc

SEQ ID NO: 358678 - RNA, 25 nt, Human
ugccauguuucuucucuuccucuaa

SEQ ID NO: 358679 - RNA, 20 nt, Human
ugcuucuggcuaauccccca

SEQ ID NO: 358680 - RNA, 20 nt, Human
uggagaagagugaggagccu

SEQ ID NO: 358681 - RNA, 18 nt, Human
uggcaggaggcucugggc

SEQ ID NO: 358682 - RNA, 18 nt, Human
uggcaggaggcucugggc

SEQ ID NO: 358683 - RNA, 18 nt, Human
uguaaacccagcugacag

SEQ ID NO: 358684 - RNA, 23 nt, Human
ugugcauguguguggcaggaggc

SEQ ID NO: 358685 - RNA, 21 nt, Human
uguguagagcaagguauggga

SEQ ID NO: 358686 - RNA, 23 nt, Human
uguguggcaggaggcucugggcu

SEQ ID NO: 358687 - RNA, 23 nt, Human
uguguguggcaggaggcucuggg

SEQ ID NO: 358688 - RNA, 21 nt, Human
uguucuucccaggcuggggug

SEQ ID NO: 358689 - RNA, 22 nt, Human
uguuucuucucuuccucuaaga

SEQ ID NO: 358690 - RNA, 19 nt, Human
uuaaugccugauggagaag

SEQ ID NO: 358691 - RNA, 18 nt, Human
uuagcacuauuauccaug

SEQ ID NO: 358692 - RNA, 26 nt, Human
uuuggggguagguauugaaaaggaag

SEQ ID NO: 358693 - RNA, 30 nt, Human
agcaccuuccuaccccuuaauuaaauagcc

SEQ ID NO: 358694 - RNA, 20 nt, Human
agcgacgagcccccugcccu

SEQ ID NO: 358695 - RNA, 21 nt, Human
aggcaaccgacaggcuacagc

SEQ ID NO: 358696 - RNA, 22 nt, Human
aguaggcaaccgacaggcuaca

SEQ ID NO: 358697 - RNA, 22 nt, Human
caagagggggugaguccaagug

SEQ ID NO: 358698 - RNA, 23 nt, Human
cacacaggcggaccccgcaaagc

SEQ ID NO: 358699 - RNA, 21 nt, Human
cacagcaccuuccuaccccuu

SEQ ID NO: 358700 - RNA, 21 nt, Human
cacaggcggaccccgcaaagc

SEQ ID NO: 358701 - RNA, 21 nt, Human
caccuccagcacagucagcuc

SEQ ID NO: 358702 - RNA, 21 nt, Human
caccuuuggguccugcucagc

SEQ ID NO: 358703 - RNA, 20 nt, Human
cagaauucucuacuggccuc

SEQ ID NO: 358704 - RNA, 18 nt, Human
cagcacagucagcuccca

SEQ ID NO: 358705 - RNA, 21 nt, Human
cagcagaguaggcaaccgaca

SEQ ID NO: 358706 - RNA, 19 nt, Human
cagcccacagcaccuuccu

SEQ ID NO: 358707 - RNA, 23 nt, Human
cagcgacgagcccccugcccugg

SEQ ID NO: 358708 - RNA, 19 nt, Human
caggcggaccccgcaaagc

SEQ ID NO: 358709 - RNA, 24 nt, Human
ccacagcaccuuccuaccccuuaa

SEQ ID NO: 358710 - RNA, 19 nt, Human
ccagccacccccacagcca

SEQ ID NO: 358711 - RNA, 23 nt, Human
ccagcccacagcaccuuccuacc

SEQ ID NO: 358712 - RNA, 21 nt, Human
ccagcgcccccacccugacug

SEQ ID NO: 358713 - RNA, 22 nt, Human
ccagcgcccccacccugacugg

SEQ ID NO: 358714 - RNA, 19 nt, Human
cccaaugccccugcccucc

SEQ ID NO: 358715 - RNA, 25 nt, Human
cccacagccacgcaugggggucacc

SEQ ID NO: 358716 - RNA, 22 nt, Human
ccccacaccagugcucuuccca

SEQ ID NO: 358717 - RNA, 20 nt, Human
cccccacaccagugcucuuc

SEQ ID NO: 358718 - RNA, 28 nt, Human
cccccacaccagugcucuucccaugccu

SEQ ID NO: 358719 - RNA, 18 nt, Human
cccccugcccuggccggg

SEQ ID NO: 358720 - RNA, 20 nt, Human
ccccgcaaagccugucaccu

SEQ ID NO: 358721 - RNA, 22 nt, Human
cccucucuggagggcacccacc

SEQ ID NO: 358722 - RNA, 22 nt, Human
cccugacuggaucucggcuccc

SEQ ID NO: 358723 - RNA, 28 nt, Human
ccuccagcacagucagcucccaagucga

SEQ ID NO: 358724 - RNA, 24 nt, Human
ccugcacacaggcggaccccgcaa

SEQ ID NO: 358725 - RNA, 19 nt, Human
cggcuccauaagagcagcc

SEQ ID NO: 358726 - RNA, 21 nt, Human
cuccagcgcccccacccugac

SEQ ID NO: 358727 - RNA, 19 nt, Human
cuccccaagagggggugag

SEQ ID NO: 358728 - RNA, 21 nt, Human
cucgguggaacccccacacca

SEQ ID NO: 358729 - RNA, 22 nt, Human
cugggagguagcagccccucuc

SEQ ID NO: 358730 - RNA, 23 nt, Human
gaacccccacaccagugcucuuc

SEQ ID NO: 358731 - RNA, 21 nt, Human
gacagcagaguaggcaaccga

SEQ ID NO: 358732 - RNA, 20 nt, Human
gacuccugcacacaggcgga

SEQ ID NO: 358733 - RNA, 20 nt, Human
gcacccacccauucccaaug

SEQ ID NO: 358734 - RNA, 23 nt, Human
gccacccccacagccacgcaugg

SEQ ID NO: 358735 - RNA, 21 nt, Human
gccaggcccagaacucccucc

SEQ ID NO: 358736 - RNA, 21 nt, Human
gcccagaacucccuccccaag

SEQ ID NO: 358737 - RNA, 23 nt, Human
gccccugcccuccugggaggcca

SEQ ID NO: 358738 - RNA, 19 nt, Human
gccucgggccaccuuuggg

SEQ ID NO: 358739 - RNA, 24 nt, Human
gcugggagguagcagccccucucu

SEQ ID NO: 358740 - RNA, 21 nt, Human
ggaacccccacaccagugcuc

SEQ ID NO: 358741 - RNA, 24 nt, Human
ggccgggcucccacggcuccagcg

SEQ ID NO: 358742 - RNA, 20 nt, Human
gggagagcugucaucccggc

SEQ ID NO: 358743 - RNA, 18 nt, Human
guagguuuguaaccucuu

SEQ ID NO: 358744 - RNA, 24 nt, Human
uagcagccccucucuggagggcac

SEQ ID NO: 358745 - RNA, 20 nt, Human
uccaagugggucauacuggc

SEQ ID NO: 358746 - RNA, 18 nt, Human
ucccaaugccccugcccu

SEQ ID NO: 358747 - RNA, 18 nt, Human
ucccacggcuccagcgcc

SEQ ID NO: 358748 - RNA, 23 nt, Human
uccccuucucgguggaaccccca

SEQ ID NO: 358749 - RNA, 18 nt, Human
uccguuuuaggaaaaaua

SEQ ID NO: 358750 - RNA, 21 nt, Human
uccugcucagcgaccuugcga

SEQ ID NO: 358751 - RNA, 24 nt, Human
ucucuggagggcacccacccauuc

SEQ ID NO: 358752 - RNA, 24 nt, Human
ugccccugcccuccugggaggcca

SEQ ID NO: 358753 - RNA, 18 nt, Human
ugcccuggccgggcuccc

SEQ ID NO: 358754 - RNA, 22 nt, Human
ugccucgggccaccuuuggguc

SEQ ID NO: 358755 - RNA, 23 nt, Human
uggccgggcucccacggcuccag

SEQ ID NO: 358756 - RNA, 21 nt, Human
ugggaccagcccacagcaccc

SEQ ID NO: 358757 - RNA, 26 nt, Human
uuaaugguagguuuguaaccucuuuu

SEQ ID NO: 358758 - RNA, 18 nt, Human
uuuuuuuuuuuuuuuccg

SEQ ID NO: 358759 - RNA, 24 nt, Human
uuuuuuuuuuuuuuuuuccguuuu

SEQ ID NO: 358760 - RNA, 19 nt, Human
aaccccaggcucucggcug

SEQ ID NO: 358761 - RNA, 19 nt, Human
aaccuuagguccacccagc

SEQ ID NO: 358762 - RNA, 18 nt, Human
agaccuggagguggggug

SEQ ID NO: 358763 - RNA, 22 nt, Human
agaccuggagguggggugagcc

SEQ ID NO: 358764 - RNA, 21 nt, Human
agggcuggggcugggaagggg

SEQ ID NO: 358765 - RNA, 21 nt, Human
aggggcggcuggggagggagg

SEQ ID NO: 358766 - RNA, 21 nt, Human
auggcccccgggccgggccuc

SEQ ID NO: 358767 - RNA, 23 nt, Human
caacuccaaggccccuucaccaa

SEQ ID NO: 358768 - RNA, 23 nt, Human
cacuugacagaccuggagguggg

SEQ ID NO: 358769 - RNA, 24 nt, Human
cagccugagaaguguggcaccaaa

SEQ ID NO: 358770 - RNA, 22 nt, Human
ccaaccagggcggccagccuga

SEQ ID NO: 358771 - RNA, 24 nt, Human
ccaaccagggcggccagccugaga

SEQ ID NO: 358772 - RNA, 23 nt, Human
ccagggcuggggcugggaagggg

SEQ ID NO: 358773 - RNA, 20 nt, Human
ccaucagccccagggacaaa

SEQ ID NO: 358774 - RNA, 19 nt, Human
ccccagggacaaaggccac

SEQ ID NO: 358775 - RNA, 21 nt, Human
cccuucaccaaugaaccccag

SEQ ID NO: 358776 - RNA, 18 nt, Human
ccgggccgacugggcugg

SEQ ID NO: 358777 - RNA, 24 nt, Human
ccugagaaguguggcaccaaaagg

SEQ ID NO: 358778 - RNA, 18 nt, Human
cugggguucgcaggaggc

SEQ ID NO: 358779 - RNA, 21 nt, Human
gaauggggugggaaggaaccu

SEQ ID NO: 358780 - RNA, 19 nt, Human
gaggaccaggacuggcaca

SEQ ID NO: 358781 - RNA, 19 nt, Human
gauuccacugccgcaucuc

SEQ ID NO: 358782 - RNA, 27 nt, Human
gccccggcagucacaacuccaaggccc

SEQ ID NO: 358783 - RNA, 19 nt, Human
gcucucggcugccccaacc

SEQ ID NO: 358784 - RNA, 25 nt, Human
gcuggggagggaggaccaggacugg

SEQ ID NO: 358785 - RNA, 18 nt, Human
ggcugcugucuccagggc

SEQ ID NO: 358786 - RNA, 25 nt, Human
ggcugggaaggggugggagccgggc

SEQ ID NO: 358787 - RNA, 23 nt, Human
gggcuggggcugggaaggggugg

SEQ ID NO: 358788 - RNA, 24 nt, Human
gggcuggggcugggaagggguggg

SEQ ID NO: 358789 - RNA, 19 nt, Human
ggugguaggggcggcuggg

SEQ ID NO: 358790 - RNA, 20 nt, Human
ggugguaggggcggcugggg

SEQ ID NO: 358791 - RNA, 21 nt, Human
guaggggcggcuggggaggga

SEQ ID NO: 358792 - RNA, 26 nt, Human
gugcaggcugggguucgcaggaggcu

SEQ ID NO: 358793 - RNA, 20 nt, Human
ucuccagggcuggggcuggg

SEQ ID NO: 358794 - RNA, 18 nt, Human
ugaugcuggugaguuggg

SEQ ID NO: 358795 - RNA, 21 nt, Human
uggggagggaggaccaggacu

SEQ ID NO: 358796 - RNA, 24 nt, Human
uggggcugggaaggggugggagcc

SEQ ID NO: 358797 - RNA, 21 nt, Human
uuuuuuuuuuuuuuuuccaga

SEQ ID NO: 358798 - RNA, 22 nt, Human
uuuuuuuuuuuuuuuuuuccag

SEQ ID NO: 358799 - RNA, 18 nt, Human
aacccugccucccuaccc

SEQ ID NO: 358800 - RNA, 25 nt, Human
acaauggagggagagacagccugaa

SEQ ID NO: 358801 - RNA, 21 nt, Human
acagaagaaccugucgggugg

SEQ ID NO: 358802 - RNA, 23 nt, Human
acaggaaccaaaagugugaauaa

SEQ ID NO: 358803 - RNA, 25 nt, Human
accccaggauccaaguacagagcug

SEQ ID NO: 358804 - RNA, 25 nt, Human
acgccaggaccccacgcugcccggu

SEQ ID NO: 358805 - RNA, 22 nt, Human
aggacagggccgguggcaggga

SEQ ID NO: 358806 - RNA, 18 nt, Human
aggagagggggcgccgcu

SEQ ID NO: 358807 - RNA, 19 nt, Human
agggagcucugccgcggcc

SEQ ID NO: 358808 - RNA, 21 nt, Human
agggagcucugccgcggccag

SEQ ID NO: 358809 - RNA, 25 nt, Human
auaaaacacaggaaccaaaagugug

SEQ ID NO: 358810 - RNA, 19 nt, Human
aucuugggguguggcccag

SEQ ID NO: 358811 - RNA, 23 nt, Human
caaaacgccggguuugaaucuug

SEQ ID NO: 358812 - RNA, 22 nt, Human
caagacccgggcuccguccccu

SEQ ID NO: 358813 - RNA, 18 nt, Human
caaguguccugugaagug

SEQ ID NO: 358814 - RNA, 20 nt, Human
cacagaagaaccugucgggu

SEQ ID NO: 358815 - RNA, 22 nt, Human
cagaagaaccugucggguggug

SEQ ID NO: 358816 - RNA, 18 nt, Human
caggaccccacgcugccc

SEQ ID NO: 358817 - RNA, 19 nt, Human
caggugccacgagccggag

SEQ ID NO: 358818 - RNA, 22 nt, Human
ccacgcugcccgguucggggcu

SEQ ID NO: 358819 - RNA, 24 nt, Human
ccaggauccaaguacagagcugaa

SEQ ID NO: 358820 - RNA, 18 nt, Human
ccaggccaggaggcucag

SEQ ID NO: 358821 - RNA, 21 nt, Human
ccaggggccuuccccaccccc

SEQ ID NO: 358822 - RNA, 22 nt, Human
ccccagggccccugaucuuggg

SEQ ID NO: 358823 - RNA, 21 nt, Human
ccccugaucuugggguguggc

SEQ ID NO: 358824 - RNA, 18 nt, Human
ccgagguggcggccaaug

SEQ ID NO: 358825 - RNA, 19 nt, Human
ccggcgccggaucgcgguu

SEQ ID NO: 358826 - RNA, 18 nt, Human
ccgggcagccuggcuggc

SEQ ID NO: 358827 - RNA, 26 nt, Human
ccgguuccuaacccugccucccuacc

SEQ ID NO: 358828 - RNA, 19 nt, Human
ccuccaggcgccggugccg

SEQ ID NO: 358829 - RNA, 18 nt, Human
ccugcaguuugugcucuc

SEQ ID NO: 358830 - RNA, 20 nt, Human
cgccaggaccccacgcugcc

SEQ ID NO: 358831 - RNA, 21 nt, Human
cgccaggaccccacgcugccc

SEQ ID NO: 358832 - RNA, 24 nt, Human
cgcgcugugcccugccgggggcgg

SEQ ID NO: 358833 - RNA, 23 nt, Human
cgcggccaggggccuuccccacc

SEQ ID NO: 358834 - RNA, 21 nt, Human
cggcgccggaucgcgguugcc

SEQ ID NO: 358835 - RNA, 21 nt, Human
cgggcgcgggguacggggcgg

SEQ ID NO: 358836 - RNA, 22 nt, Human
cggugggggccaggccaggagg

SEQ ID NO: 358837 - RNA, 18 nt, Human
cuaacccugccucccuac

SEQ ID NO: 358838 - RNA, 18 nt, Human
cugggggcaccaagaccg

SEQ ID NO: 358839 - RNA, 21 nt, Human
cuuccccacccccggguaccu

SEQ ID NO: 358840 - RNA, 20 nt, Human
gccaggaccccacgcugccc

SEQ ID NO: 358841 - RNA, 22 nt, Human
gcccagcgcgcugugcccugcc

SEQ ID NO: 358842 - RNA, 23 nt, Human
gcgccggaucgcgguugcccagc

SEQ ID NO: 358843 - RNA, 25 nt, Human
gcgcgcugugcccugccgggggcgg

SEQ ID NO: 358844 - RNA, 23 nt, Human
gcggccaauggggagcaagaccc

SEQ ID NO: 358845 - RNA, 22 nt, Human
gcggccaggggccuuccccacc

SEQ ID NO: 358846 - RNA, 18 nt, Human
gcgggcgcgggguacggg

SEQ ID NO: 358847 - RNA, 24 nt, Human
gcgguugcccagcgcgcugugccc

SEQ ID NO: 358848 - RNA, 19 nt, Human
ggagggggaggggcggagc

SEQ ID NO: 358849 - RNA, 19 nt, Human
ggcccagcagcaugcuagc

SEQ ID NO: 358850 - RNA, 21 nt, Human
ggcgcuggggcggcaagcagg

SEQ ID NO: 358851 - RNA, 23 nt, Human
ggcuccguccccugugcgcccca

SEQ ID NO: 358852 - RNA, 20 nt, Human
gggacagcaggagagggggc

SEQ ID NO: 358853 - RNA, 23 nt, Human
gggagcaagacccgggcuccguc

SEQ ID NO: 358854 - RNA, 20 nt, Human
gggccguggggagggggagg

SEQ ID NO: 358855 - RNA, 22 nt, Human
gggcggaugcaccggugggggc

SEQ ID NO: 358856 - RNA, 23 nt, Human
guuggcuucuaagcucugagauu

SEQ ID NO: 358857 - RNA, 19 nt, Human
uaaaacacaggaaccaaaa

SEQ ID NO: 358858 - RNA, 19 nt, Human
uaacccugccucccuaccc

SEQ ID NO: 358859 - RNA, 23 nt, Human
uaagucuucgauauaaaacacag

SEQ ID NO: 358860 - RNA, 21 nt, Human
uaccuuuaccuccaggcgccg

SEQ ID NO: 358861 - RNA, 18 nt, Human
ucacuggaaggucuaguc

SEQ ID NO: 358862 - RNA, 25 nt, Human
ucacuggaaggucuagucacugggu

SEQ ID NO: 358863 - RNA, 22 nt, Human
uccggcgccggaucgcgguugc

SEQ ID NO: 358864 - RNA, 18 nt, Human
uccugucuccacucucaa

SEQ ID NO: 358865 - RNA, 22 nt, Human
ucgaccccuccaguccggcgcc

SEQ ID NO: 358866 - RNA, 25 nt, Human
ucucgacuaagacauaaccgggguc

SEQ ID NO: 358867 - RNA, 20 nt, Human
ugagaucacuuucuucacug

SEQ ID NO: 358868 - RNA, 24 nt, Human
ugccgggcagccuggcuggcagcc

SEQ ID NO: 358869 - RNA, 23 nt, Human
ugcuuuauucacuugccgucccc

SEQ ID NO: 358870 - RNA, 24 nt, Human
ugcuuuauucacuugccgucccca

SEQ ID NO: 358871 - RNA, 20 nt, Human
uggaccucuugagaucacuu

SEQ ID NO: 358872 - RNA, 21 nt, Human
uggcgcggccggagcuggggg

SEQ ID NO: 358873 - RNA, 19 nt, Human
uggcuaaugauaggcgggc

SEQ ID NO: 358874 - RNA, 20 nt, Human
uggcuuggcuguuaaguccc

SEQ ID NO: 358875 - RNA, 19 nt, Human
uggggagggggaggggcgg

SEQ ID NO: 358876 - RNA, 20 nt, Human
ugggggcaccaagaccgcag

SEQ ID NO: 358877 - RNA, 23 nt, Human
uguagggucuuccuucagcugca

SEQ ID NO: 358878 - RNA, 18 nt, Human
uguccugucuccacucuc

SEQ ID NO: 358879 - RNA, 20 nt, Human
uguccugucuccacucucaa

SEQ ID NO: 358880 - RNA, 26 nt, Human
uguccugucuccacucucaauuccaa

SEQ ID NO: 358881 - RNA, 28 nt, Human
uucacuugccguccccagggccccugau

SEQ ID NO: 358882 - RNA, 22 nt, Human
uucagcugcaacaagggccugc

SEQ ID NO: 358883 - RNA, 23 nt, Human
uucugguuggcgcggccggagcu

SEQ ID NO: 358884 - RNA, 18 nt, Human
aaaaauacaacaaugagc

SEQ ID NO: 358885 - RNA, 24 nt, Human
aaacauggcaaaacccugucucua

SEQ ID NO: 358886 - RNA, 24 nt, Human
aaagugcugagaccacaggcguga

SEQ ID NO: 358887 - RNA, 20 nt, Human
aacauggcaaaacccugucu

SEQ ID NO: 358888 - RNA, 21 nt, Human
aacauggcaaaacccugucuc

SEQ ID NO: 358889 - RNA, 21 nt, Human
aacccugucucuaccaaaaau

SEQ ID NO: 358890 - RNA, 19 nt, Human
aagccugguggaggggcag

SEQ ID NO: 358891 - RNA, 26 nt, Human
aagugcugagaccacaggcgugagcc

SEQ ID NO: 358892 - RNA, 24 nt, Human
acagagucagacccugucucaaaa

SEQ ID NO: 358893 - RNA, 24 nt, Human
accaucuugcccaggcuggucucg

SEQ ID NO: 358894 - RNA, 20 nt, Human
acccacuucagccucccaaa

SEQ ID NO: 358895 - RNA, 24 nt, Human
acccugucucuaccaaaaauacaa

SEQ ID NO: 358896 - RNA, 25 nt, Human
acuccugacuugugauccacccacu

SEQ ID NO: 358897 - RNA, 25 nt, Human
acucuguugcccaggcuggagugca

SEQ ID NO: 358898 - RNA, 23 nt, Human
acuucagccucccaaagugcuga

SEQ ID NO: 358899 - RNA, 18 nt, Human
agagaagcuucuguagua

SEQ ID NO: 358900 - RNA, 25 nt, Human
agaggcgggcagauugcuugagccc

SEQ ID NO: 358901 - RNA, 24 nt, Human
agcugugguggcucacgucugcaa

SEQ ID NO: 358902 - RNA, 18 nt, Human
aggaguccgagaccagcc

SEQ ID NO: 358903 - RNA, 21 nt, Human
aggcagaggcgggcagauugc

SEQ ID NO: 358904 - RNA, 24 nt, Human
aggcagaggcgggcagauugcuug

SEQ ID NO: 358905 - RNA, 25 nt, Human
aggcuggagugcagugggacgaucu

SEQ ID NO: 358906 - RNA, 24 nt, Human
agguugaggcuacagugagccgag

SEQ ID NO: 358907 - RNA, 18 nt, Human
aguagcugggauuuuagg

SEQ ID NO: 358908 - RNA, 21 nt, Human
aguccgagaccagccagggaa

SEQ ID NO: 358909 - RNA, 24 nt, Human
agugcagugggacgaucucggcuc

SEQ ID NO: 358910 - RNA, 18 nt, Human
augggguuucaccaucuu

SEQ ID NO: 358911 - RNA, 19 nt, Human
augggguuucaccaucuug

SEQ ID NO: 358912 - RNA, 24 nt, Human
augggguuucaccaucuugcccag

SEQ ID NO: 358913 - RNA, 24 nt, Human
auugcaccacuggacuccggccug

SEQ ID NO: 358914 - RNA, 20 nt, Human
auuuagaaacagagucucac

SEQ ID NO: 358915 - RNA, 24 nt, Human
caaagugcugagaccacaggcgug

SEQ ID NO: 358916 - RNA, 23 nt, Human
caaccuccaccucccggguucaa

SEQ ID NO: 358917 - RNA, 23 nt, Human
caauuguagucccagccacuugg

SEQ ID NO: 358918 - RNA, 24 nt, Human
cacaggcgugagccaccaugccca

SEQ ID NO: 358919 - RNA, 24 nt, Human
caccaucuugcccaggcuggucuc

SEQ ID NO: 358920 - RNA, 27 nt, Human
caccaucuugcccaggcuggucucgaa

SEQ ID NO: 358921 - RNA, 19 nt, Human
cacccugugccuccucugc

SEQ ID NO: 358922 - RNA, 24 nt, Human
cacgucugcaaucccagcaccuug

SEQ ID NO: 358923 - RNA, 24 nt, Human
cacucuguugcccaggcuggagug

SEQ ID NO: 358924 - RNA, 21 nt, Human
cacugcaaccuccaccucccg

SEQ ID NO: 358925 - RNA, 23 nt, Human
cacugcaaccuccaccucccggg

SEQ ID NO: 358926 - RNA, 24 nt, Human
cagagucucacucuguugcccagg

SEQ ID NO: 358927 - RNA, 24 nt, Human
cagcaccuugggaggcagaggcgg

SEQ ID NO: 358928 - RNA, 22 nt, Human
cagccuuuuuuuuuuuuuuaaa

SEQ ID NO: 358929 - RNA, 19 nt, Human
caguagagaugggguuuca

SEQ ID NO: 358930 - RNA, 23 nt, Human
caguagagaugggguuucaccau

SEQ ID NO: 358931 - RNA, 26 nt, Human
caguagagaugggguuucaccaucuu

SEQ ID NO: 358932 - RNA, 24 nt, Human
caucuugcccaggcuggucucgaa

SEQ ID NO: 358933 - RNA, 22 nt, Human
ccaaagugcugagaccacaggc

SEQ ID NO: 358934 - RNA, 24 nt, Human
ccaaagugcugagaccacaggcgu

SEQ ID NO: 358935 - RNA, 19 nt, Human
ccaccaugcccggcuaacc

SEQ ID NO: 358936 - RNA, 24 nt, Human
ccaccucccggguucaaccaauuc

SEQ ID NO: 358937 - RNA, 20 nt, Human
ccaggaguccgagaccagcc

SEQ ID NO: 358938 - RNA, 24 nt, Human
ccaguagagaugggguuucaccau

SEQ ID NO: 358939 - RNA, 22 nt, Human
cccacacacuugcugguguccu

SEQ ID NO: 358940 - RNA, 18 nt, Human
cccgaguagcugggauuu

SEQ ID NO: 358941 - RNA, 20 nt, Human
cccggguucaaccaauucuc

SEQ ID NO: 358942 - RNA, 23 nt, Human
ccuagucucccgaguagcuggga

SEQ ID NO: 358943 - RNA, 23 nt, Human
ccucccggguucaaccaauucuc

SEQ ID NO: 358944 - RNA, 21 nt, Human
ccugacuugugauccacccac

SEQ ID NO: 358945 - RNA, 23 nt, Human
ccugugcuuuacacauccagaga

SEQ ID NO: 358946 - RNA, 20 nt, Human
ccuugggaggcagaggcggg

SEQ ID NO: 358947 - RNA, 22 nt, Human
cgaacuccugacuugugaucca

SEQ ID NO: 358948 - RNA, 23 nt, Human
cgucugcaaucccagcaccuugg

SEQ ID NO: 358949 - RNA, 24 nt, Human
cgucugcaaucccagcaccuuggg

SEQ ID NO: 358950 - RNA, 24 nt, Human
cucacgucugcaaucccagcaccu

SEQ ID NO: 358951 - RNA, 24 nt, Human
cucacucuguugcccaggcuggag

SEQ ID NO: 358952 - RNA, 24 nt, Human
cucacugcaaccuccaccucccgg

SEQ ID NO: 358953 - RNA, 21 nt, Human
cucccaaagugcugagaccac

SEQ ID NO: 358954 - RNA, 24 nt, Human
cucugccuagucucccgaguagcu

SEQ ID NO: 358955 - RNA, 18 nt, Human
cugcaaccuccaccuccc

SEQ ID NO: 358956 - RNA, 23 nt, Human
cugcaaccuccaccucccggguu

SEQ ID NO: 358957 - RNA, 24 nt, Human
cugcaaccuccaccucccggguuc

SEQ ID NO: 358958 - RNA, 21 nt, Human
cuggcuucugggccggccugg

SEQ ID NO: 358959 - RNA, 23 nt, Human
cuugguccucucacucucccucu

SEQ ID NO: 358960 - RNA, 21 nt, Human
cuugugauccacccacuucag

SEQ ID NO: 358961 - RNA, 23 nt, Human
gaaacuccuccagcaggaagccu

SEQ ID NO: 358962 - RNA, 21 nt, Human
gacagagucagacccugucuc

SEQ ID NO: 358963 - RNA, 20 nt, Human
gacccugucucaaaaaaagu

SEQ ID NO: 358964 - RNA, 21 nt, Human
gacuugugauccacccacuuc

SEQ ID NO: 358965 - RNA, 23 nt, Human
gacuugugauccacccacuucag

SEQ ID NO: 358966 - RNA, 18 nt, Human
gagaugggguuucaccau

SEQ ID NO: 358967 - RNA, 23 nt, Human
gagaugggguuucaccaucuugc

SEQ ID NO: 358968 - RNA, 21 nt, Human
gaggcuacagugagccgagau

SEQ ID NO: 358969 - RNA, 23 nt, Human
gaggcuacagugagccgagauug

SEQ ID NO: 358970 - RNA, 24 nt, Human
gauuuuaggcgcccgccaccaugc

SEQ ID NO: 358971 - RNA, 22 nt, Human
gcccaggaguccgagaccagcc

SEQ ID NO: 358972 - RNA, 19 nt, Human
gcccaggcuggagugcagu

SEQ ID NO: 358973 - RNA, 18 nt, Human
ggaaacauggcaaaaccc

SEQ ID NO: 358974 - RNA, 21 nt, Human
ggaggacagagucagacccug

SEQ ID NO: 358975 - RNA, 22 nt, Human
ggcaugguggcucacaauugua

SEQ ID NO: 358976 - RNA, 21 nt, Human
ggcucacgucugcaaucccag

SEQ ID NO: 358977 - RNA, 19 nt, Human
ggggcugggccugucccgg

SEQ ID NO: 358978 - RNA, 22 nt, Human
gggguuucaccaucuugcccag

SEQ ID NO: 358979 - RNA, 22 nt, Human
ggguuucaccaucuugcccagg

SEQ ID NO: 358980 - RNA, 24 nt, Human
gguggcucacaauuguagucccag

SEQ ID NO: 358981 - RNA, 21 nt, Human
guagagaugggguuucaccau

SEQ ID NO: 358982 - RNA, 24 nt, Human
gugagccaccaugcccagccuuuu

SEQ ID NO: 358983 - RNA, 24 nt, Human
gugauccacccacuucagccuccc

SEQ ID NO: 358984 - RNA, 24 nt, Human
guggaggggcagugaccauccaca

SEQ ID NO: 358985 - RNA, 23 nt, Human
guggcucacaauuguagucccag

SEQ ID NO: 358986 - RNA, 24 nt, Human
guggcucacaauuguagucccagc

SEQ ID NO: 358987 - RNA, 23 nt, Human
guggcucacgucugcaaucccag

SEQ ID NO: 358988 - RNA, 18 nt, Human
guguccuguugccaugga

SEQ ID NO: 358989 - RNA, 24 nt, Human
guuucaccaucuugcccaggcugg

SEQ ID NO: 358990 - RNA, 19 nt, Human
uagaaacagagucucacuc

SEQ ID NO: 358991 - RNA, 19 nt, Human
uaggcgcccgccaccaugc

SEQ ID NO: 358992 - RNA, 21 nt, Human
ucaccaucuugcccaggcugg

SEQ ID NO: 358993 - RNA, 24 nt, Human
ucacucuguugcccaggcuggagu

SEQ ID NO: 358994 - RNA, 23 nt, Human
ucacugcaaccuccaccucccgg

SEQ ID NO: 358995 - RNA, 24 nt, Human
ucacugcaaccuccaccucccggg

SEQ ID NO: 358996 - RNA, 25 nt, Human
ucacugcaaccuccaccucccgggu

SEQ ID NO: 358997 - RNA, 26 nt, Human
ucacugcaaccuccaccucccggguu

SEQ ID NO: 358998 - RNA, 23 nt, Human
ucagccagcugugguggcucacg

SEQ ID NO: 358999 - RNA, 25 nt, Human
ucagccagcugugguggcucacguc

SEQ ID NO: 359000 - RNA, 21 nt, Human
uccacccacuucagccuccca

SEQ ID NO: 359001 - RNA, 25 nt, Human
uccagagaagcuucuguaguaauga

SEQ ID NO: 359002 - RNA, 18 nt, Human
ucccaaagugcugagacc

SEQ ID NO: 359003 - RNA, 24 nt, Human
ucccaaagugcugagaccacaggc

SEQ ID NO: 359004 - RNA, 18 nt, Human
ucccagccacuugggagg

SEQ ID NO: 359005 - RNA, 24 nt, Human
ucccgaguagcugggauuuuaggc

SEQ ID NO: 359006 - RNA, 21 nt, Human
ucccggguucaaccaauucuc

SEQ ID NO: 359007 - RNA, 23 nt, Human
ucccggguucaaccaauucucug

SEQ ID NO: 359008 - RNA, 23 nt, Human
ucucacucuguugcccaggcugg

SEQ ID NO: 359009 - RNA, 24 nt, Human
ucucacucuguugcccaggcugga

SEQ ID NO: 359010 - RNA, 26 nt, Human
ucucacucuguugcccaggcuggagu

SEQ ID NO: 359011 - RNA, 27 nt, Human
ucucacucuguugcccaggcuggagug

SEQ ID NO: 359012 - RNA, 24 nt, Human
ucugccuagucucccgaguagcug

SEQ ID NO: 359013 - RNA, 22 nt, Human
ucuggcuucugggccggccugg

SEQ ID NO: 359014 - RNA, 18 nt, Human
ucuguugcccaggcugga

SEQ ID NO: 359015 - RNA, 24 nt, Human
ucuguugcccaggcuggagugcag

SEQ ID NO: 359016 - RNA, 22 nt, Human
ugaaaugggaggcucacuucaa

SEQ ID NO: 359017 - RNA, 21 nt, Human
ugaaccauagacacgaugccu

SEQ ID NO: 359018 - RNA, 19 nt, Human
ugaaggaagagcaugguca

SEQ ID NO: 359019 - RNA, 19 nt, Human
ugacuugugauccacccac

SEQ ID NO: 359020 - RNA, 24 nt, Human
ugagaccacaggcgugagccacca

SEQ ID NO: 359021 - RNA, 23 nt, Human
ugagcccaggaguccgagaccag

SEQ ID NO: 359022 - RNA, 24 nt, Human
ugagccgagauugcaccacuggac

SEQ ID NO: 359023 - RNA, 23 nt, Human
ugagccuggcaugguggcucaca

SEQ ID NO: 359024 - RNA, 22 nt, Human
ugcagugggacgaucucggcuc

SEQ ID NO: 359025 - RNA, 18 nt, Human
ugcccaggcuggagugca

SEQ ID NO: 359026 - RNA, 21 nt, Human
ugcccaggcuggagugcagug

SEQ ID NO: 359027 - RNA, 22 nt, Human
ugcccaggcuggagugcagugg

SEQ ID NO: 359028 - RNA, 25 nt, Human
ugcccaggcuggagugcagugggac

SEQ ID NO: 359029 - RNA, 24 nt, Human
ugcccaggcuggucucgaacuccu

SEQ ID NO: 359030 - RNA, 21 nt, Human
ugccucaaagugucaucuuca

SEQ ID NO: 359031 - RNA, 24 nt, Human
ugcugagaccacaggcgugagcca

SEQ ID NO: 359032 - RNA, 23 nt, Human
uggagugcagugggacgaucucg

SEQ ID NO: 359033 - RNA, 24 nt, Human
uggagugcagugggacgaucucgg

SEQ ID NO: 359034 - RNA, 24 nt, Human
uggcagguugaggcuacagugagc

SEQ ID NO: 359035 - RNA, 22 nt, Human
uggcaguugcagcaaacaacuc

SEQ ID NO: 359036 - RNA, 22 nt, Human
uggcucacgucugcaaucccag

SEQ ID NO: 359037 - RNA, 24 nt, Human
uggcucacgucugcaaucccagca

SEQ ID NO: 359038 - RNA, 22 nt, Human
uggcuucugggccggccuggcu

SEQ ID NO: 359039 - RNA, 19 nt, Human
uggcuucugggccggccuu

SEQ ID NO: 359040 - RNA, 19 nt, Human
ugggaaggaaacuccucca

SEQ ID NO: 359041 - RNA, 21 nt, Human
ugggaaggaaacuccuccagc

SEQ ID NO: 359042 - RNA, 18 nt, Human
ugggaggcagaggcgggc

SEQ ID NO: 359043 - RNA, 22 nt, Human
ugggaggcagaggcgggcagau

SEQ ID NO: 359044 - RNA, 24 nt, Human
ugggaggcagaggcgggcagauug

SEQ ID NO: 359045 - RNA, 18 nt, Human
ugggaggcugaaauggga

SEQ ID NO: 359046 - RNA, 19 nt, Human
ugggaggcugaaaugggag

SEQ ID NO: 359047 - RNA, 21 nt, Human
ugggauuuuaggcgcccgcca

SEQ ID NO: 359048 - RNA, 19 nt, Human
uggggauggggcugaaauc

SEQ ID NO: 359049 - RNA, 24 nt, Human
ugggguuucaccaucuugcccagg

SEQ ID NO: 359050 - RNA, 24 nt, Human
ugguggcucacaauuguaguccca

SEQ ID NO: 359051 - RNA, 24 nt, Human
ugguggcucacgucugcaauccca

SEQ ID NO: 359052 - RNA, 22 nt, Human
uguaguaaugaaccauagacac

SEQ ID NO: 359053 - RNA, 20 nt, Human
uguagucccagccacuuggg

SEQ ID NO: 359054 - RNA, 24 nt, Human
ugugauccacccacuucagccucc

SEQ ID NO: 359055 - RNA, 19 nt, Human
uucagccucccaaagugcu

SEQ ID NO: 359056 - RNA, 23 nt, Human
uugcaccacuggacuccggccug

SEQ ID NO: 359057 - RNA, 23 nt, Human
uugcccaggcuggagugcagugg

SEQ ID NO: 359058 - RNA, 21 nt, Human
uugcuugagcccaggaguccg

SEQ ID NO: 359059 - RNA, 21 nt, Human
uugggaggcagaggcgggcag

SEQ ID NO: 359060 - RNA, 24 nt, Human
uugggaggcagaggcgggcagauu

SEQ ID NO: 359061 - RNA, 24 nt, Human
uuuccaguagagaugggguuucac

SEQ ID NO: 359062 - RNA, 18 nt, Human
uuuuuuuuuuuuuuuucg

SEQ ID NO: 359063 - RNA, 22 nt, Human
uuuuuuuuuuuuuuuuucguuu

SEQ ID NO: 359064 - RNA, 24 nt, Human
aaagccccgacaggaagccggagg

SEQ ID NO: 359065 - RNA, 22 nt, Human
acagaaugggaaacugaggcac

SEQ ID NO: 359066 - RNA, 21 nt, Human
agaaagccccgacaggaagcc

SEQ ID NO: 359067 - RNA, 22 nt, Human
agacaggcuguggcuccuccag

SEQ ID NO: 359068 - RNA, 21 nt, Human
aggcacagagggaugcaguga

SEQ ID NO: 359069 - RNA, 23 nt, Human
ccagggccccagcccagucccag

SEQ ID NO: 359070 - RNA, 21 nt, Human
cccccagacaggcuguggcuc

SEQ ID NO: 359071 - RNA, 21 nt, Human
cccugacuuguccuuuccccc

SEQ ID NO: 359072 - RNA, 22 nt, Human
ccuagauuugagcccaccucuc

SEQ ID NO: 359073 - RNA, 27 nt, Human
ccuccagccaggacugaaccggggucc

SEQ ID NO: 359074 - RNA, 19 nt, Human
cgccagggccccagcccag

SEQ ID NO: 359075 - RNA, 22 nt, Human
cuuggagcacuuaaacaucagu

SEQ ID NO: 359076 - RNA, 19 nt, Human
cuuguccuuucccccagac

SEQ ID NO: 359077 - RNA, 19 nt, Human
gacugaacucugggcaaau

SEQ ID NO: 359078 - RNA, 23 nt, Human
gagcacuuaaacaucaguuaaug

SEQ ID NO: 359079 - RNA, 24 nt, Human
gauuucuuuaauguucacaacaac

SEQ ID NO: 359080 - RNA, 19 nt, Human
gccagggccuagauuugag

SEQ ID NO: 359081 - RNA, 21 nt, Human
gccccagcccagucccagguc

SEQ ID NO: 359082 - RNA, 19 nt, Human
ggagggugagugagagcug

SEQ ID NO: 359083 - RNA, 20 nt, Human
gggccccagcccagucccag

SEQ ID NO: 359084 - RNA, 22 nt, Human
ucagcaaguggucccugacuug

SEQ ID NO: 359085 - RNA, 20 nt, Human
uccgccagggccccagccca

SEQ ID NO: 359086 - RNA, 25 nt, Human
uccuccagccaggacugaacucugg

SEQ ID NO: 359087 - RNA, 19 nt, Human
ucuguuuucuuucugcucu

SEQ ID NO: 359088 - RNA, 20 nt, Human
ugcagugaauugcuugauga

SEQ ID NO: 359089 - RNA, 25 nt, Human
ugggaaacugaggcacagagggaug

SEQ ID NO: 359090 - RNA, 19 nt, Human
uguccaaacgugggguggg

SEQ ID NO: 359091 - RNA, 20 nt, Human
uguccaaacguggggugggg

SEQ ID NO: 359092 - RNA, 22 nt, Human
uucacaacaaccuuugagguag

SEQ ID NO: 359093 - RNA, 23 nt, Human
uucgugcuucagcaagugguccc

SEQ ID NO: 359094 - RNA, 22 nt, Human
uugaugacagugccagggccuu

SEQ ID NO: 359095 - RNA, 23 nt, Human
uuugauuuccauguguugauuuc

SEQ ID NO: 359096 - RNA, 24 nt, Human
aaagaagagcagaggagaagagac

SEQ ID NO: 359097 - RNA, 20 nt, Human
aacaacauuuauuucucuua

SEQ ID NO: 359098 - RNA, 23 nt, Human
aacaagagaggccuuagaaggga

SEQ ID NO: 359099 - RNA, 20 nt, Human
aagaagagcagaggagaaga

SEQ ID NO: 359100 - RNA, 23 nt, Human
aagaagagcagaggagaagagac

SEQ ID NO: 359101 - RNA, 23 nt, Human
acaaaccaucauuuuuacaacaa

SEQ ID NO: 359102 - RNA, 20 nt, Human
accaugugaagacacaagga

SEQ ID NO: 359103 - RNA, 25 nt, Human
acccagagaccugcccaaagaagag

SEQ ID NO: 359104 - RNA, 23 nt, Human
agaaaucuuuucuuuauuaacac

SEQ ID NO: 359105 - RNA, 19 nt, Human
agaaggggaagggagugga

SEQ ID NO: 359106 - RNA, 23 nt, Human
agacacaaggaggagacagccau

SEQ ID NO: 359107 - RNA, 18 nt, Human
agacccagagaccugccc

SEQ ID NO: 359108 - RNA, 23 nt, Human
agacccagagaccugcccaaaga

SEQ ID NO: 359109 - RNA, 20 nt, Human
agaggaacugcgaagccaca

SEQ ID NO: 359110 - RNA, 21 nt, Human
agcccucggagcuccacuccc

SEQ ID NO: 359111 - RNA, 24 nt, Human
caacaaaaacauuaauuuuaaaag

SEQ ID NO: 359112 - RNA, 20 nt, Human
caacaagagaggccuuagaa

SEQ ID NO: 359113 - RNA, 19 nt, Human
cagaaguccuguggucugc

SEQ ID NO: 359114 - RNA, 21 nt, Human
cagagcagacggaaacuuuga

SEQ ID NO: 359115 - RNA, 20 nt, Human
cagaggagaagagacugugu

SEQ ID NO: 359116 - RNA, 24 nt, Human
caucugaaacuauacgaaaauaaa

SEQ ID NO: 359117 - RNA, 22 nt, Human
ccaacccugauaacaccuuguu

SEQ ID NO: 359118 - RNA, 24 nt, Human
ccaucaaagacaucuuucuauugc

SEQ ID NO: 359119 - RNA, 21 nt, Human
ccaucuacaagccaacaagag

SEQ ID NO: 359120 - RNA, 22 nt, Human
ccaucuacaagccaacaagaga

SEQ ID NO: 359121 - RNA, 18 nt, Human
cccagagaccugcccaaa

SEQ ID NO: 359122 - RNA, 18 nt, Human
ccucggagcuccacuccc

SEQ ID NO: 359123 - RNA, 19 nt, Human
ccucggagcuccacucccu

SEQ ID NO: 359124 - RNA, 21 nt, Human
ccucugcacagagcagacgga

SEQ ID NO: 359125 - RNA, 20 nt, Human
gacacaguguuaugggcuaa

SEQ ID NO: 359126 - RNA, 18 nt, Human
gacugcggggaggaacgg

SEQ ID NO: 359127 - RNA, 21 nt, Human
gcccuaguaaccaauacacug

SEQ ID NO: 359128 - RNA, 21 nt, Human
gcccucggagcuccacucccu

SEQ ID NO: 359129 - RNA, 23 nt, Human
gcuaaauuguucccuucuaaaau

SEQ ID NO: 359130 - RNA, 26 nt, Human
gcucuguugcccaggcuggcauagau

SEQ ID NO: 359131 - RNA, 23 nt, Human
ggagucucgcucuguugcccagg

SEQ ID NO: 359132 - RNA, 18 nt, Human
gugguacauugcuguggc

SEQ ID NO: 359133 - RNA, 23 nt, Human
uaaaacaacauuuauuucucuua

SEQ ID NO: 359134 - RNA, 21 nt, Human
uacauugcuguggcagcccua

SEQ ID NO: 359135 - RNA, 20 nt, Human
uagaagggaccaacccugau

SEQ ID NO: 359136 - RNA, 22 nt, Human
uagaagggaccaacccugauaa

SEQ ID NO: 359137 - RNA, 22 nt, Human
ucuauugcauuuagccuuccaa

SEQ ID NO: 359138 - RNA, 18 nt, Human
ucucgcucuguugcccag

SEQ ID NO: 359139 - RNA, 19 nt, Human
ucucgcucuguugcccagg

SEQ ID NO: 359140 - RNA, 23 nt, Human
ucucgcucuguugcccaggcugg

SEQ ID NO: 359141 - RNA, 26 nt, Human
ucucgcucuguugcccaggcuggcau

SEQ ID NO: 359142 - RNA, 22 nt, Human
ucuguguuuaugucacucgguu

SEQ ID NO: 359143 - RNA, 23 nt, Human
ucuguugcccaggcuggcauaga

SEQ ID NO: 359144 - RNA, 21 nt, Human
ugaguaggcuuucuaaaacaa

SEQ ID NO: 359145 - RNA, 21 nt, Human
ugcuuguuuguuuguuuuguu

SEQ ID NO: 359146 - RNA, 24 nt, Human
uggagucucgcucuguugcccagg

SEQ ID NO: 359147 - RNA, 23 nt, Human
uggggaggagcgcgugaucucgg

SEQ ID NO: 359148 - RNA, 19 nt, Human
uguugcccaggcuggcaua

SEQ ID NO: 359149 - RNA, 20 nt, Human
uuacaauaauaaauuaucca

SEQ ID NO: 359150 - RNA, 25 nt, Human
uucacagaagaggaacugcgaagcc

SEQ ID NO: 359151 - RNA, 20 nt, Human
uugugguacauugcuguggc

SEQ ID NO: 359152 - RNA, 20 nt, Human
uuguuuguuuguuuuguuuu

SEQ ID NO: 359153 - RNA, 20 nt, Human
uuugcuacuuuccuagguuu

SEQ ID NO: 359154 - RNA, 18 nt, Human
uuuugcuuguuuguuugu

SEQ ID NO: 359155 - RNA, 20 nt, Human
agaggccagggcggggagug

SEQ ID NO: 359156 - RNA, 22 nt, Human
agaggccagggcggggagugug

SEQ ID NO: 359157 - RNA, 22 nt, Human
agaggccagggcggggagugug

SEQ ID NO: 359158 - RNA, 20 nt, Human
agggagaguuuggucaucag

SEQ ID NO: 359159 - RNA, 20 nt, Human
agggagaguuuggucaucag

SEQ ID NO: 359160 - RNA, 22 nt, Human
auacuggaucucucuuuccucc

SEQ ID NO: 359161 - RNA, 20 nt, Human
aucucucuuuccuccccuga

SEQ ID NO: 359162 - RNA, 18 nt, Human
cacagcauugagggcugc

SEQ ID NO: 359163 - RNA, 18 nt, Human
cacagcauugagggcugc

SEQ ID NO: 359164 - RNA, 21 nt, Human
cagaggccagggcggggagug

SEQ ID NO: 359165 - RNA, 22 nt, Human
cauuguugguggcuucuugucc

SEQ ID NO: 359166 - RNA, 22 nt, Human
ccccuuaugaaagcugaggggu

SEQ ID NO: 359167 - RNA, 24 nt, Human
cccucaaacaagcccgagccucug

SEQ ID NO: 359168 - RNA, 24 nt, Human
cccucaaacaagcccgagccucug

SEQ ID NO: 359169 - RNA, 19 nt, Human
cccuuaugaaagcugaggg

SEQ ID NO: 359170 - RNA, 21 nt, Human
ccucaaacaagcccgagccuc

SEQ ID NO: 359171 - RNA, 21 nt, Human
ccucaaacaagcccgagccuc

SEQ ID NO: 359172 - RNA, 18 nt, Human
ccugauagguccugaggc

SEQ ID NO: 359173 - RNA, 23 nt, Human
cgugaacccucaaacaagcccga

SEQ ID NO: 359174 - RNA, 24 nt, Human
cgugaacccucaaacaagcccuuc

SEQ ID NO: 359175 - RNA, 24 nt, Human
cgugaacccucaaacaagcccuuc

SEQ ID NO: 359176 - RNA, 19 nt, Human
cucauuguugguggcuucu

SEQ ID NO: 359177 - RNA, 26 nt, Human
gaaucagccucagacuccuuugcugg

SEQ ID NO: 359178 - RNA, 26 nt, Human
gaaucagccucagacuccuuugcugg

SEQ ID NO: 359179 - RNA, 18 nt, Human
gccagggccgcgagggaa

SEQ ID NO: 359180 - RNA, 18 nt, Human
gccagggccgcgagggaa

SEQ ID NO: 359181 - RNA, 19 nt, Human
ggaucuugaucucugagua

SEQ ID NO: 359182 - RNA, 22 nt, Human
gugaacccucaaacaagcccga

SEQ ID NO: 359183 - RNA, 18 nt, Human
uaccagaggccagggcgg

SEQ ID NO: 359184 - RNA, 18 nt, Human
uaccagaggccagggcgg

SEQ ID NO: 359185 - RNA, 20 nt, Human
uacucauuguugguggcuuc

SEQ ID NO: 359186 - RNA, 19 nt, Human
uacuggaucucucuuuccu

SEQ ID NO: 359187 - RNA, 20 nt, Human
uauauucggaaucuaaagua

SEQ ID NO: 359188 - RNA, 19 nt, Human
uaucaucugcccaggacuc

SEQ ID NO: 359189 - RNA, 19 nt, Human
ucaaacaagcccgagccuc

SEQ ID NO: 359190 - RNA, 19 nt, Human
ucaaacaagcccgagccuc

SEQ ID NO: 359191 - RNA, 23 nt, Human
ucaaacaagcccgagccucugca

SEQ ID NO: 359192 - RNA, 23 nt, Human
ucaaacaagcccgagccucugca

SEQ ID NO: 359193 - RNA, 24 nt, Human
ucaaacaagcccgagccucugcau

SEQ ID NO: 359194 - RNA, 24 nt, Human
ucaaacaagcccgagccucugcau

SEQ ID NO: 359195 - RNA, 21 nt, Human
ucagccucagacuccuuugcu

SEQ ID NO: 359196 - RNA, 21 nt, Human
ucagccucagacuccuuugcu

SEQ ID NO: 359197 - RNA, 21 nt, Human
ucugcauuuucuuacuugggg

SEQ ID NO: 359198 - RNA, 23 nt, Human
ucugggguuggaggugccagggc

SEQ ID NO: 359199 - RNA, 23 nt, Human
ucugggguuggaggugccagggc

SEQ ID NO: 359200 - RNA, 20 nt, Human
ugagggcugcuaauucuacu

SEQ ID NO: 359201 - RNA, 20 nt, Human
ugagggcugcuaauucuacu

SEQ ID NO: 359202 - RNA, 19 nt, Human
ugaguacucauuguuggug

SEQ ID NO: 359203 - RNA, 22 nt, Human
ugcauuuucaguuagacaagag

SEQ ID NO: 359204 - RNA, 22 nt, Human
ugcauuuucaguuagacaagag

SEQ ID NO: 359205 - RNA, 22 nt, Human
uggguaccagaggccagggcgg

SEQ ID NO: 359206 - RNA, 22 nt, Human
uggguaccagaggccagggcgg

SEQ ID NO: 359207 - RNA, 24 nt, Human
ugucuuguugcacagcauugaggg

SEQ ID NO: 359208 - RNA, 24 nt, Human
ugucuuguugcacagcauugaggg

SEQ ID NO: 359209 - RNA, 19 nt, Human
uguugcacagcauugaggg

SEQ ID NO: 359210 - RNA, 21 nt, Human
uucuacuggaaucagccucag

SEQ ID NO: 359211 - RNA, 21 nt, Human
uucuacuggaaucagccucag

SEQ ID NO: 359212 - RNA, 20 nt, Human
uuuuuuuuuuuuuuuucacg

SEQ ID NO: 359213 - RNA, 19 nt, Human
cgccagggccgccagggaa

SEQ ID NO: 359214 - RNA, 19 nt, Human
gcgccagggccgccaggga

SEQ ID NO: 359215 - RNA, 23 nt, Human
ucuggguuugaaggcgccagggc

SEQ ID NO: 359216 - RNA, 18 nt, Human
aaaaauaaaagggagggc

SEQ ID NO: 359217 - RNA, 18 nt, Human
aguguggauucagguuug

SEQ ID NO: 359218 - RNA, 20 nt, Human
aucauagcucaucacguuga

SEQ ID NO: 359219 - RNA, 18 nt, Human
cagccucugacuucuccc

SEQ ID NO: 359220 - RNA, 23 nt, Human
cccucaaucagggugagucucug

SEQ ID NO: 359221 - RNA, 23 nt, Human
cucaggguucuucucuccuaagg

SEQ ID NO: 359222 - RNA, 19 nt, Human
gcacaguguggauucaggu

SEQ ID NO: 359223 - RNA, 18 nt, Human
gccagggccgcgagggaa

SEQ ID NO: 359224 - RNA, 19 nt, Human
uaaagccugugugcuuuuc

SEQ ID NO: 359225 - RNA, 23 nt, Human
ucugggguuagaggugccagggc

SEQ ID NO: 359226 - RNA, 18 nt, Human
ucuguuccucaggguucu

SEQ ID NO: 359227 - RNA, 23 nt, Human
uuaguuaaaaaaauaaaagggag

SEQ ID NO: 359228 - RNA, 21 nt, Human
uugccuggaggggcugugauc

SEQ ID NO: 359229 - RNA, 18 nt, Human
agagaaguagagaagaga

SEQ ID NO: 359230 - RNA, 19 nt, Human
aggccgggggcggggagug

SEQ ID NO: 359231 - RNA, 20 nt, Human
agggagaguuuggucaucag

SEQ ID NO: 359232 - RNA, 24 nt, Human
cagaggccgggggcggggagugug

SEQ ID NO: 359233 - RNA, 18 nt, Human
cagcauggagggcuguua

SEQ ID NO: 359234 - RNA, 23 nt, Human
cgaccucagagaaguagagaaga

SEQ ID NO: 359235 - RNA, 20 nt, Human
cugcaggggucgugagcccu

SEQ ID NO: 359236 - RNA, 23 nt, Human
ucaaacaggccugagucucugca

SEQ ID NO: 359237 - RNA, 22 nt, Human
ucgugagcccucaaacaggccu

SEQ ID NO: 359238 - RNA, 25 nt, Human
ugagcccucaaacaggccugagucu

SEQ ID NO: 359239 - RNA, 18 nt, Human
uugcacagcauggagggc

SEQ ID NO: 359240 - RNA, 21 nt, Human
uuuuuuuuuuuuacgaucuca

SEQ ID NO: 359241 - RNA, 25 nt, Human
aaaaaaaaaaguacaguauaaaaga

SEQ ID NO: 359242 - RNA, 23 nt, Human
aaaaaaaaguacaguauaaaaga

SEQ ID NO: 359243 - RNA, 19 nt, Human
aaaacacacucauacucaa

SEQ ID NO: 359244 - RNA, 22 nt, Human
aaagagcaguugagacuuagag

SEQ ID NO: 359245 - RNA, 19 nt, Human
aacauggugaaaccccguc

SEQ ID NO: 359246 - RNA, 20 nt, Human
aacauggugaaaccccgucu

SEQ ID NO: 359247 - RNA, 21 nt, Human
aacauggugaaaccccgucuc

SEQ ID NO: 359248 - RNA, 24 nt, Human
aagcaggaaaaucgcuugaaccca

SEQ ID NO: 359249 - RNA, 24 nt, Human
aaucgcuugaacccaggaggcaga

SEQ ID NO: 359250 - RNA, 18 nt, Human
accaaaaccaacccacca

SEQ ID NO: 359251 - RNA, 24 nt, Human
accaacauggugaaaccccgucuc

SEQ ID NO: 359252 - RNA, 24 nt, Human
acccaggaggcagagguugcagug

SEQ ID NO: 359253 - RNA, 20 nt, Human
accccgucucgcaacuuccg

SEQ ID NO: 359254 - RNA, 18 nt, Human
agacuuauggaaaagucc

SEQ ID NO: 359255 - RNA, 24 nt, Human
agagaugcaacaugcuggaccuuc

SEQ ID NO: 359256 - RNA, 21 nt, Human
agcauuuugggaggccgaggc

SEQ ID NO: 359257 - RNA, 24 nt, Human
agcauuuugggaggccgaggcggg

SEQ ID NO: 359258 - RNA, 23 nt, Human
agccaggcguuguggcacaugcc

SEQ ID NO: 359259 - RNA, 24 nt, Human
agcccgaccaacauggugaaaccc

SEQ ID NO: 359260 - RNA, 18 nt, Human
aggcagagguugcaguga

SEQ ID NO: 359261 - RNA, 24 nt, Human
aggcagagguugcagugaucugag

SEQ ID NO: 359262 - RNA, 21 nt, Human
aggccgaggcgggcggaucac

SEQ ID NO: 359263 - RNA, 21 nt, Human
aggccgaggcggguggaucac

SEQ ID NO: 359264 - RNA, 22 nt, Human
aggcgggcggaucaccugaggg

SEQ ID NO: 359265 - RNA, 22 nt, Human
aggcgggcggaucaccugaggu

SEQ ID NO: 359266 - RNA, 26 nt, Human
aggcggguggaucaccugaagucagg

SEQ ID NO: 359267 - RNA, 24 nt, Human
aggcguuguggcacaugccuguaa

SEQ ID NO: 359268 - RNA, 20 nt, Human
aggcuccuguuuucccuaag

SEQ ID NO: 359269 - RNA, 24 nt, Human
aggggcgguggcucacgcuuguaa

SEQ ID NO: 359270 - RNA, 24 nt, Human
aguggcucacgccuguaaucccag

SEQ ID NO: 359271 - RNA, 24 nt, Human
auaaaacacacucauacucaauaa

SEQ ID NO: 359272 - RNA, 20 nt, Human
aucaccugaggucgggaguu

SEQ ID NO: 359273 - RNA, 24 nt, Human
auccugccauugcacuccagccug

SEQ ID NO: 359274 - RNA, 18 nt, Human
auugcacuccagccuggg

SEQ ID NO: 359275 - RNA, 25 nt, Human
auugcacuccagccugggcuacaag

SEQ ID NO: 359276 - RNA, 22 nt, Human
caaaaccaacccaccauacugc

SEQ ID NO: 359277 - RNA, 22 nt, Human
caacauggugaaaccccgucuc

SEQ ID NO: 359278 - RNA, 20 nt, Human
cacagaagucacucuuccca

SEQ ID NO: 359279 - RNA, 22 nt, Human
caccauacugcaaaaagcugua

SEQ ID NO: 359280 - RNA, 23 nt, Human
caccgccgacuccggccccgccu

SEQ ID NO: 359281 - RNA, 23 nt, Human
cacgccuguaaucccagcacuuu

SEQ ID NO: 359282 - RNA, 24 nt, Human
cacgcuuguaaucccagcauuuug

SEQ ID NO: 359283 - RNA, 24 nt, Human
cacuccagccugggcuacaagagc

SEQ ID NO: 359284 - RNA, 22 nt, Human
cagcacuuuaggaggccgaggc

SEQ ID NO: 359285 - RNA, 24 nt, Human
cagcacuuuaggaggccgaggcgg

SEQ ID NO: 359286 - RNA, 24 nt, Human
cagcauuuugggaggccgaggcgg

SEQ ID NO: 359287 - RNA, 24 nt, Human
cagccugaccaacauggagaaacc

SEQ ID NO: 359288 - RNA, 19 nt, Human
caggagccuugugguaggc

SEQ ID NO: 359289 - RNA, 20 nt, Human
cagugaucugagauccugcc

SEQ ID NO: 359290 - RNA, 19 nt, Human
caucugaaaaacucagaaa

SEQ ID NO: 359291 - RNA, 24 nt, Human
caugccuguaaucccagcuaccug

SEQ ID NO: 359292 - RNA, 18 nt, Human
cauugcacuccagccugg

SEQ ID NO: 359293 - RNA, 19 nt, Human
cauugcacuccagccuggg

SEQ ID NO: 359294 - RNA, 20 nt, Human
cauugcacuccagccugggc

SEQ ID NO: 359295 - RNA, 22 nt, Human
cauugcacuccagccugggcua

SEQ ID NO: 359296 - RNA, 24 nt, Human
cauugcacuccagccugggcuaca

SEQ ID NO: 359297 - RNA, 24 nt, Human
ccaccauacugcaaaaagcuguau

SEQ ID NO: 359298 - RNA, 22 nt, Human
ccagccugggcuacaagagcaa

SEQ ID NO: 359299 - RNA, 20 nt, Human
ccauugcacuccagccuggg

SEQ ID NO: 359300 - RNA, 21 nt, Human
ccauugcacuccagccugggc

SEQ ID NO: 359301 - RNA, 24 nt, Human
ccauugcacuccagccugggcuac

SEQ ID NO: 359302 - RNA, 19 nt, Human
cccaccauacugcaaaaag

SEQ ID NO: 359303 - RNA, 23 nt, Human
cccgaccaacauggugaaacccc

SEQ ID NO: 359304 - RNA, 22 nt, Human
ccugaggucgggaguuugagac

SEQ ID NO: 359305 - RNA, 21 nt, Human
ccuguaaucccagcuaccugg

SEQ ID NO: 359306 - RNA, 22 nt, Human
ccuguaaucccagcuaccuggg

SEQ ID NO: 359307 - RNA, 20 nt, Human
cgaggcgggcggaucaccug

SEQ ID NO: 359308 - RNA, 21 nt, Human
cgaggcgggcggaucaccuga

SEQ ID NO: 359309 - RNA, 24 nt, Human
cgaggcgggcggaucaccugaggu

SEQ ID NO: 359310 - RNA, 19 nt, Human
cgaggcggguggaucaccu

SEQ ID NO: 359311 - RNA, 20 nt, Human
cgaggcggguggaucaccug

SEQ ID NO: 359312 - RNA, 18 nt, Human
cgccuguaaucccagcac

SEQ ID NO: 359313 - RNA, 24 nt, Human
cgcuuguaaucccagcauuuuggg

SEQ ID NO: 359314 - RNA, 24 nt, Human
cggaucaccugaggucgggaguuu

SEQ ID NO: 359315 - RNA, 24 nt, Human
cgggcggaucaccugaggucggga

SEQ ID NO: 359316 - RNA, 24 nt, Human
cggguggaucaccugaagucagga

SEQ ID NO: 359317 - RNA, 22 nt, Human
cucacgccuguaaucccagcac

SEQ ID NO: 359318 - RNA, 24 nt, Human
cucacgccuguaaucccagcacuu

SEQ ID NO: 359319 - RNA, 21 nt, Human
cucacgcuuguaaucccagca

SEQ ID NO: 359320 - RNA, 21 nt, Human
cucacgcuuguaaucccagca

SEQ ID NO: 359321 - RNA, 22 nt, Human
cucaugucaggggcgguggcuc

SEQ ID NO: 359322 - RNA, 26 nt, Human
cuccaaggagcgccaccgccgacucc

SEQ ID NO: 359323 - RNA, 23 nt, Human
cuccgucucaaaaaaaaaaguac

SEQ ID NO: 359324 - RNA, 19 nt, Human
cucgcaacuuccgcggagc

SEQ ID NO: 359325 - RNA, 19 nt, Human
cucgcaacuuccgcggagc

SEQ ID NO: 359326 - RNA, 21 nt, Human
cugcuuuaaaagucaauggcu

SEQ ID NO: 359327 - RNA, 22 nt, Human
cuucaggagacacccugucccu

SEQ ID NO: 359328 - RNA, 21 nt, Human
gagaacuuaguccuaucacca

SEQ ID NO: 359329 - RNA, 23 nt, Human
gagcaguugagacuuagagcugg

SEQ ID NO: 359330 - RNA, 22 nt, Human
gagcgggagccggcuccaagga

SEQ ID NO: 359331 - RNA, 25 nt, Human
gaggcggguggaucaccugaaguca

SEQ ID NO: 359332 - RNA, 18 nt, Human
gaucaccugaagucagga

SEQ ID NO: 359333 - RNA, 24 nt, Human
gaucaccugaagucaggauuucca

SEQ ID NO: 359334 - RNA, 24 nt, Human
gaucaccugaggucgggaguuuga

SEQ ID NO: 359335 - RNA, 22 nt, Human
gccauugcacuccagccugggc

SEQ ID NO: 359336 - RNA, 18 nt, Human
gccggcuccaaggagcgc

SEQ ID NO: 359337 - RNA, 23 nt, Human
gcucaugucaggggcgguggcuc

SEQ ID NO: 359338 - RNA, 22 nt, Human
ggagaaaccagucucuacuaaa

SEQ ID NO: 359339 - RNA, 19 nt, Human
ggaguuugagaccagccug

SEQ ID NO: 359340 - RNA, 22 nt, Human
ggaucaccugaggucgggaguu

SEQ ID NO: 359341 - RNA, 21 nt, Human
ggcacaugccuguaaucccag

SEQ ID NO: 359342 - RNA, 22 nt, Human
gggcaguggcucacgccuguaa

SEQ ID NO: 359343 - RNA, 19 nt, Human
ggucgggaguuugagacca

SEQ ID NO: 359344 - RNA, 23 nt, Human
gguggcucacgcuuguaauccca

SEQ ID NO: 359345 - RNA, 24 nt, Human
gguggcucacgcuuguaaucccag

SEQ ID NO: 359346 - RNA, 27 nt, Human
gguugauuucgcuaauuuacccaacac

SEQ ID NO: 359347 - RNA, 22 nt, Human
guggcacaugccuguaauccca

SEQ ID NO: 359348 - RNA, 23 nt, Human
guggcucacgcuuguaaucccag

SEQ ID NO: 359349 - RNA, 20 nt, Human
uaaaaauacaaaauuagcca

SEQ ID NO: 359350 - RNA, 22 nt, Human
uaaaaauacaaaauuagccagg

SEQ ID NO: 359351 - RNA, 23 nt, Human
uaaaaauacaaaauuagccaggc

SEQ ID NO: 359352 - RNA, 21 nt, Human
uaaaagagcaguugagacuua

SEQ ID NO: 359353 - RNA, 24 nt, Human
uaggaggccgaggcgggcggauca

SEQ ID NO: 359354 - RNA, 22 nt, Human
ucaccugaagucaggauuucca

SEQ ID NO: 359355 - RNA, 20 nt, Human
ucacgcuuguaaucccagca

SEQ ID NO: 359356 - RNA, 18 nt, Human
ucaguauccagacuuaug

SEQ ID NO: 359357 - RNA, 18 nt, Human
uccagaaugaucaggagc

SEQ ID NO: 359358 - RNA, 22 nt, Human
ucccaauuggcugcuaccaaga

SEQ ID NO: 359359 - RNA, 23 nt, Human
ucccaauuggcugcuaccaagaa

SEQ ID NO: 359360 - RNA, 23 nt, Human
uccgucucaaaaaaaaaaguaca

SEQ ID NO: 359361 - RNA, 24 nt, Human
ucucgaguuuaaucaacaugcauc

SEQ ID NO: 359362 - RNA, 22 nt, Human
ucucuacuaaaaauacaaaauu

SEQ ID NO: 359363 - RNA, 21 nt, Human
ucuuaaagguuucagugaugu

SEQ ID NO: 359364 - RNA, 20 nt, Human
ugaagcaggaaaaucgcuug

SEQ ID NO: 359365 - RNA, 24 nt, Human
ugaagcaggaaaaucgcuugaacc

SEQ ID NO: 359366 - RNA, 24 nt, Human
ugagaccagccugaccaacaugga

SEQ ID NO: 359367 - RNA, 24 nt, Human
ugagauccugccauugcacuccag

SEQ ID NO: 359368 - RNA, 18 nt, Human
ugaggucgggaguuugag

SEQ ID NO: 359369 - RNA, 23 nt, Human
ugccuguaaucccagcuaccugg

SEQ ID NO: 359370 - RNA, 24 nt, Human
ugccuguaaucccagcuaccuggg

SEQ ID NO: 359371 - RNA, 27 nt, Human
ugcuaccaagaaacagugacuccagaa

SEQ ID NO: 359372 - RNA, 21 nt, Human
uggaaaaguccccauaaugcu

SEQ ID NO: 359373 - RNA, 24 nt, Human
uggauaguaucugucuacuacuua

SEQ ID NO: 359374 - RNA, 20 nt, Human
uggaucaccugaagucagga

SEQ ID NO: 359375 - RNA, 23 nt, Human
uggaucaccugaagucaggauuu

SEQ ID NO: 359376 - RNA, 21 nt, Human
uggcacaugccuguaauccca

SEQ ID NO: 359377 - RNA, 22 nt, Human
uggcacaugccuguaaucccag

SEQ ID NO: 359378 - RNA, 24 nt, Human
uggcucacgccuguaaucccagca

SEQ ID NO: 359379 - RNA, 22 nt, Human
uggcucacgcuuguaaucccag

SEQ ID NO: 359380 - RNA, 24 nt, Human
uggcucacgcuuguaaucccagca

SEQ ID NO: 359381 - RNA, 23 nt, Human
ugggaggccgaggcggguggauc

SEQ ID NO: 359382 - RNA, 24 nt, Human
ugggaggccgaggcggguggauca

SEQ ID NO: 359383 - RNA, 25 nt, Human
uguaaucccagcuaccugggaagau

SEQ ID NO: 359384 - RNA, 24 nt, Human
uguggcacaugccuguaaucccag

SEQ ID NO: 359385 - RNA, 19 nt, Human
uugcagugaucugagaucc

SEQ ID NO: 359386 - RNA, 22 nt, Human
uugcagugaucugagauccugc

SEQ ID NO: 359387 - RNA, 23 nt, Human
uuggcugcuaccaagaaacagug

SEQ ID NO: 359388 - RNA, 25 nt, Human
uugggaggccgaggcggguggauca

SEQ ID NO: 359389 - RNA, 20 nt, Human
uuuccauauaaaucugaucc

SEQ ID NO: 359390 - RNA, 23 nt, Human
uuugauagccagugugacauguu

SEQ ID NO: 359391 - RNA, 23 nt, Human
aaacacuuaacacugcugucaug

SEQ ID NO: 359392 - RNA, 19 nt, Human
aacauuuugccuauuccuu

SEQ ID NO: 359393 - RNA, 24 nt, Human
aagcuccgcagauucauccaaaac

SEQ ID NO: 359394 - RNA, 19 nt, Human
aaggagcccacacaccugc

SEQ ID NO: 359395 - RNA, 23 nt, Human
agaaaaacccucagcgccauguc

SEQ ID NO: 359396 - RNA, 18 nt, Human
agaaaauuacccauuuuu

SEQ ID NO: 359397 - RNA, 18 nt, Human
agcuggcugauuugaaac

SEQ ID NO: 359398 - RNA, 23 nt, Human
aguguucuuacuuagaaaaaccc

SEQ ID NO: 359399 - RNA, 21 nt, Human
aucuaaacuucuguguacaga

SEQ ID NO: 359400 - RNA, 23 nt, Human
caaggugaaaaauuaccucuucc

SEQ ID NO: 359401 - RNA, 22 nt, Human
caauaaggaaaauaaacauuuu

SEQ ID NO: 359402 - RNA, 26 nt, Human
cacuuaacacugcugucauguggcac

SEQ ID NO: 359403 - RNA, 25 nt, Human
ccaaaaauaaacuuucaauuagaga

SEQ ID NO: 359404 - RNA, 21 nt, Human
ccaauugagcacuccagguuu

SEQ ID NO: 359405 - RNA, 18 nt, Human
ccagagaucuagucagcu

SEQ ID NO: 359406 - RNA, 18 nt, Human
cccccuuucuucucacaa

SEQ ID NO: 359407 - RNA, 18 nt, Human
ccugaaccaaaugagcug

SEQ ID NO: 359408 - RNA, 23 nt, Human
ccuugucuaacugaaaagcaagg

SEQ ID NO: 359409 - RNA, 23 nt, Human
cgcagauucauccaaaaccaaaa

SEQ ID NO: 359410 - RNA, 24 nt, Human
cuauaaauauguuucagagauccu

SEQ ID NO: 359411 - RNA, 21 nt, Human
cuuagaaaaacccucagcgcc

SEQ ID NO: 359412 - RNA, 20 nt, Human
cuuagcucuuaacuacuugu

SEQ ID NO: 359413 - RNA, 24 nt, Human
cuucagaguacugcucuuagcucu

SEQ ID NO: 359414 - RNA, 19 nt, Human
gaaaaaacagaaugaucag

SEQ ID NO: 359415 - RNA, 24 nt, Human
gaacacguaucaaauacccaguaa

SEQ ID NO: 359416 - RNA, 23 nt, Human
gaaccauuucucuaauuuaugcc

SEQ ID NO: 359417 - RNA, 23 nt, Human
gaaugguacaacuguggucacaa

SEQ ID NO: 359418 - RNA, 19 nt, Human
guacaacuguggucacaaa

SEQ ID NO: 359419 - RNA, 24 nt, Human
guguacagaaaaaacagaaugauc

SEQ ID NO: 359420 - RNA, 21 nt, Human
uaaaauguauaccgcaguuug

SEQ ID NO: 359421 - RNA, 24 nt, Human
uaaauuguguuaaacuuugagaua

SEQ ID NO: 359422 - RNA, 19 nt, Human
uaagucacaaagcaucuaa

SEQ ID NO: 359423 - RNA, 20 nt, Human
uaaguucaguucugcucuau

SEQ ID NO: 359424 - RNA, 21 nt, Human
uacaagcaaaccccaaauaug

SEQ ID NO: 359425 - RNA, 26 nt, Human
uaccacacagauguaagaccaaguuu

SEQ ID NO: 359426 - RNA, 23 nt, Human
uauaacccugaaugcuagugcua

SEQ ID NO: 359427 - RNA, 23 nt, Human
uauaugcacacuugaucuacaug

SEQ ID NO: 359428 - RNA, 21 nt, Human
uaugcacacuugaucuacaug

SEQ ID NO: 359429 - RNA, 23 nt, Human
uaugcugagcccuuaaauugugu

SEQ ID NO: 359430 - RNA, 19 nt, Human
ucagcgccaugucagugca

SEQ ID NO: 359431 - RNA, 20 nt, Human
ugaaaagcaaggugaaaaaa

SEQ ID NO: 359432 - RNA, 24 nt, Human
ugaaaagcaaggugaaaaauuacc

SEQ ID NO: 359433 - RNA, 21 nt, Human
ugaaguauuugcaccaagaac

SEQ ID NO: 359434 - RNA, 20 nt, Human
ugaauaaagaggcugaaguc

SEQ ID NO: 359435 - RNA, 23 nt, Human
ugagcacuccagguuuuugaugu

SEQ ID NO: 359436 - RNA, 18 nt, Human
ugccuaaaggagcccaca

SEQ ID NO: 359437 - RNA, 19 nt, Human
ugccuauuccuucagagua

SEQ ID NO: 359438 - RNA, 18 nt, Human
ugccugaaccaaaugagc

SEQ ID NO: 359439 - RNA, 20 nt, Human
uggauagucacaaugcaaug

SEQ ID NO: 359440 - RNA, 19 nt, Human
uggcaaaaacauaaaacau

SEQ ID NO: 359441 - RNA, 24 nt, Human
uggcaaaaacauaaaacauacuuu

SEQ ID NO: 359442 - RNA, 20 nt, Human
uggcaguaaaagaccagcgg

SEQ ID NO: 359443 - RNA, 21 nt, Human
ugguacaacuguggucacaaa

SEQ ID NO: 359444 - RNA, 23 nt, Human
ugguacaacuguggucacaaaau

SEQ ID NO: 359445 - RNA, 19 nt, Human
ugguuuuacaagcaaaccc

SEQ ID NO: 359446 - RNA, 25 nt, Human
uguacagaaaaaacagaaugaucag

SEQ ID NO: 359447 - RNA, 23 nt, Human
uguauaacccugaaugcuagugc

SEQ ID NO: 359448 - RNA, 21 nt, Human
ugucacauuggcacauaugug

SEQ ID NO: 359449 - RNA, 24 nt, Human
ugucuuguucccccuuucuucuca

SEQ ID NO: 359450 - RNA, 21 nt, Human
uguguacagaaaaaacagaau

SEQ ID NO: 359451 - RNA, 23 nt, Human
uguguacagaaaaaacagaauga

SEQ ID NO: 359452 - RNA, 21 nt, Human
uguuuucuuugauuuuauagg

SEQ ID NO: 359453 - RNA, 19 nt, Human
uuacauagccuauauuucc

SEQ ID NO: 359454 - RNA, 23 nt, Human
uucucacaacuuaagcuccgcag

SEQ ID NO: 359455 - RNA, 19 nt, Human
uugaaaccacaaagaaguc

SEQ ID NO: 359456 - RNA, 21 nt, Human
uugauggcaguaaaagaccag

SEQ ID NO: 359457 - RNA, 22 nt, Human
aaaacaaaaauaaugagacucu

SEQ ID NO: 359458 - RNA, 26 nt, Human
aaaaccucuuuccauucagggcacuc

SEQ ID NO: 359459 - RNA, 21 nt, Human
aaaggaaucuugcaaaagaaa

SEQ ID NO: 359460 - RNA, 24 nt, Human
aaagugcugggauuacagguguga

SEQ ID NO: 359461 - RNA, 19 nt, Human
aaaguuaauaacaagguag

SEQ ID NO: 359462 - RNA, 26 nt, Human
aaaugcagcugggguguucucagcac

SEQ ID NO: 359463 - RNA, 19 nt, Human
aacugggucgcaccggccc

SEQ ID NO: 359464 - RNA, 18 nt, Human
aagaaacugaggccugga

SEQ ID NO: 359465 - RNA, 22 nt, Human
aagaaacugaggccuggagggu

SEQ ID NO: 359466 - RNA, 19 nt, Human
aaguaagagcuuguuaaug

SEQ ID NO: 359467 - RNA, 18 nt, Human
aagugcugggauuacagg

SEQ ID NO: 359468 - RNA, 19 nt, Human
aagugcugggauuacaggu

SEQ ID NO: 359469 - RNA, 26 nt, Human
aagugcugggauuacaggugugagcc

SEQ ID NO: 359470 - RNA, 22 nt, Human
aauuacagaucugugugggcca

SEQ ID NO: 359471 - RNA, 24 nt, Human
acaaaaauaaugagacucuugaau

SEQ ID NO: 359472 - RNA, 19 nt, Human
acguaauaaugaagcuuga

SEQ ID NO: 359473 - RNA, 18 nt, Human
acucuguuacccaggcug

SEQ ID NO: 359474 - RNA, 25 nt, Human
acucuguuacccaggcuggagugca

SEQ ID NO: 359475 - RNA, 18 nt, Human
agccuccagaguagcugg

SEQ ID NO: 359476 - RNA, 21 nt, Human
aggcaagacgcgugaagcccg

SEQ ID NO: 359477 - RNA, 21 nt, Human
aggcaucugcaccaucucggu

SEQ ID NO: 359478 - RNA, 22 nt, Human
aggccggguccaggcuccuggc

SEQ ID NO: 359479 - RNA, 25 nt, Human
aggcuggagugcagugaugugaucu

SEQ ID NO: 359480 - RNA, 19 nt, Human
agggcaggucccuacugug

SEQ ID NO: 359481 - RNA, 24 nt, Human
aggugauccgcccaccuuggccuc

SEQ ID NO: 359482 - RNA, 18 nt, Human
aggugugagccacugagc

SEQ ID NO: 359483 - RNA, 18 nt, Human
aguagcugggauuacagg

SEQ ID NO: 359484 - RNA, 19 nt, Human
agucuugguuuguuggcuu

SEQ ID NO: 359485 - RNA, 19 nt, Human
agugcagugaugugaucuu

SEQ ID NO: 359486 - RNA, 21 nt, Human
agugcagugaugugaucuuag

SEQ ID NO: 359487 - RNA, 22 nt, Human
agugugaagaaaauugaaggac

SEQ ID NO: 359488 - RNA, 22 nt, Human
auaaagcagcaaaaugcugcag

SEQ ID NO: 359489 - RNA, 21 nt, Human
auggaauugcauggucacccc

SEQ ID NO: 359490 - RNA, 20 nt, Human
augggguuucagcuuguugg

SEQ ID NO: 359491 - RNA, 18 nt, Human
augucaccuucacccaca

SEQ ID NO: 359492 - RNA, 24 nt, Human
auuuuuguauuuuuaguggagaug

SEQ ID NO: 359493 - RNA, 21 nt, Human
caaaaugcugcaguguugaua

SEQ ID NO: 359494 - RNA, 24 nt, Human
caaagugcugggauuacaggugug

SEQ ID NO: 359495 - RNA, 25 nt, Human
caaauuuccaccauaguuuucccca

SEQ ID NO: 359496 - RNA, 23 nt, Human
caaccuccaccucccggguucaa

SEQ ID NO: 359497 - RNA, 21 nt, Human
caagguagacacaaaagcauu

SEQ ID NO: 359498 - RNA, 21 nt, Human
caaggugaggaaaccaagccc

SEQ ID NO: 359499 - RNA, 21 nt, Human
cacccccuuagucuugguuug

SEQ ID NO: 359500 - RNA, 23 nt, Human
cacccuguagggauugugucagg

SEQ ID NO: 359501 - RNA, 24 nt, Human
caccucccggguucaagugauccu

SEQ ID NO: 359502 - RNA, 24 nt, Human
cacuauuuguagcaaacacgagcc

SEQ ID NO: 359503 - RNA, 23 nt, Human
cacucuguuacccaggcuggagu

SEQ ID NO: 359504 - RNA, 24 nt, Human
cacucuguuacccaggcuggagug

SEQ ID NO: 359505 - RNA, 21 nt, Human
cacugcaaccuccaccucccg

SEQ ID NO: 359506 - RNA, 23 nt, Human
cacugcaaccuccaccucccggg

SEQ ID NO: 359507 - RNA, 18 nt, Human
cagcaaaaugcugcagug

SEQ ID NO: 359508 - RNA, 21 nt, Human
cagcuucaccccauuuuacag

SEQ ID NO: 359509 - RNA, 19 nt, Human
caggagaaggugaaaggcc

SEQ ID NO: 359510 - RNA, 19 nt, Human
caggagucagucugcgucc

SEQ ID NO: 359511 - RNA, 19 nt, Human
caggugcucaccaccaugc

SEQ ID NO: 359512 - RNA, 18 nt, Human
cauuacacccccuuaagc

SEQ ID NO: 359513 - RNA, 21 nt, Human
ccaaagugcugggauuacagg

SEQ ID NO: 359514 - RNA, 21 nt, Human
ccaaagugcugggauuacagg

SEQ ID NO: 359515 - RNA, 24 nt, Human
ccaaagugcugggauuacaggugu

SEQ ID NO: 359516 - RNA, 24 nt, Human
ccaccucccggguucaagugaucc

SEQ ID NO: 359517 - RNA, 24 nt, Human
ccacugacagacacccuguaggga

SEQ ID NO: 359518 - RNA, 19 nt, Human
ccagaguagcugggauuac

SEQ ID NO: 359519 - RNA, 22 nt, Human
ccagaguagcugggauuacagg

SEQ ID NO: 359520 - RNA, 23 nt, Human
ccagaguagcugggauuacaggu

SEQ ID NO: 359521 - RNA, 24 nt, Human
ccagaguagcugggauuacaggug

SEQ ID NO: 359522 - RNA, 24 nt, Human
ccauaguuuuccccacuuccaaaa

SEQ ID NO: 359523 - RNA, 25 nt, Human
cccacugacagacacccuguaggga

SEQ ID NO: 359524 - RNA, 23 nt, Human
ccccaagcccacaaauuuccacc

SEQ ID NO: 359525 - RNA, 21 nt, Human
ccccagcaacugggucgcacc

SEQ ID NO: 359526 - RNA, 22 nt, Human
cccggguucaagugauccuccu

SEQ ID NO: 359527 - RNA, 21 nt, Human
ccuaagcaucuaaaagggcuc

SEQ ID NO: 359528 - RNA, 24 nt, Human
ccucccggguucaagugauccucc

SEQ ID NO: 359529 - RNA, 24 nt, Human
ccuccuaucucagccuccagagua

SEQ ID NO: 359530 - RNA, 24 nt, Human
ccugaccucaggugauccgcccac

SEQ ID NO: 359531 - RNA, 21 nt, Human
cggucaccugcccggacccgg

SEQ ID NO: 359532 - RNA, 19 nt, Human
cguuggggacaaggcaaga

SEQ ID NO: 359533 - RNA, 24 nt, Human
cucacucuguuacccaggcuggag

SEQ ID NO: 359534 - RNA, 24 nt, Human
cucacugcaaccuccaccucccgg

SEQ ID NO: 359535 - RNA, 23 nt, Human
cucagccuccagaguagcuggga

SEQ ID NO: 359536 - RNA, 24 nt, Human
cucaggugauccgcccaccuuggc

SEQ ID NO: 359537 - RNA, 18 nt, Human
cugcaaccuccaccuccc

SEQ ID NO: 359538 - RNA, 23 nt, Human
cugcaaccuccaccucccggguu

SEQ ID NO: 359539 - RNA, 19 nt, Human
cuggcaugggaaaauagcc

SEQ ID NO: 359540 - RNA, 21 nt, Human
cuggcaugggaaaauagccaa

SEQ ID NO: 359541 - RNA, 24 nt, Human
cuggguuggugaguggcauuucug

SEQ ID NO: 359542 - RNA, 19 nt, Human
cuuccaaaacuggcauggg

SEQ ID NO: 359543 - RNA, 24 nt, Human
cuugcaaaagaaaugcagcugggg

SEQ ID NO: 359544 - RNA, 20 nt, Human
gaagaaaauugaaggacggc

SEQ ID NO: 359545 - RNA, 24 nt, Human
gaaggugaaaggccauuccuuucu

SEQ ID NO: 359546 - RNA, 24 nt, Human
gaccucaggugauccgcccaccuu

SEQ ID NO: 359547 - RNA, 22 nt, Human
gagacagucucacucuguuacc

SEQ ID NO: 359548 - RNA, 18 nt, Human
gagcccggccuggggcac

SEQ ID NO: 359549 - RNA, 20 nt, Human
gaguucauagggguuagggg

SEQ ID NO: 359550 - RNA, 21 nt, Human
gauuacaggugcucaccacca

SEQ ID NO: 359551 - RNA, 18 nt, Human
gauuacaggugugagcca

SEQ ID NO: 359552 - RNA, 19 nt, Human
gauuacaggugugagccac

SEQ ID NO: 359553 - RNA, 21 nt, Human
gauuacaggugugagccacug

SEQ ID NO: 359554 - RNA, 18 nt, Human
gcaaaacccauaaaaagu

SEQ ID NO: 359555 - RNA, 21 nt, Human
gcaaaacccauaaaaaguaaa

SEQ ID NO: 359556 - RNA, 22 nt, Human
gcaaccuccaccucccggguuc

SEQ ID NO: 359557 - RNA, 19 nt, Human
gcagaggacaucugcuugc

SEQ ID NO: 359558 - RNA, 25 nt, Human
gcuccucggcccucggcaccggcgc

SEQ ID NO: 359559 - RNA, 18 nt, Human
ggaaaggaaucuugcaaa

SEQ ID NO: 359560 - RNA, 19 nt, Human
ggagaggcgggcacauccc

SEQ ID NO: 359561 - RNA, 21 nt, Human
ggaggguuuguguucuuugcc

SEQ ID NO: 359562 - RNA, 18 nt, Human
ggcaaaaaaaaaaaaaaa

SEQ ID NO: 359563 - RNA, 18 nt, Human
ggcaaaaaaaaaaaaaaa

SEQ ID NO: 359564 - RNA, 20 nt, Human
ggguucaagugauccuccua

SEQ ID NO: 359565 - RNA, 21 nt, Human
ggguuggcaaaaaaaaaaaaa

SEQ ID NO: 359566 - RNA, 22 nt, Human
ggguuuguguucuuugcccugg

SEQ ID NO: 359567 - RNA, 21 nt, Human
gguccagcgagcaaacaggag

SEQ ID NO: 359568 - RNA, 22 nt, Human
gguggguuuucccuccugaaag

SEQ ID NO: 359569 - RNA, 19 nt, Human
gguuggugaauguggccag

SEQ ID NO: 359570 - RNA, 21 nt, Human
gugcgcauuugccgggcucgg

SEQ ID NO: 359571 - RNA, 20 nt, Human
guggaacguuggggacaagg

SEQ ID NO: 359572 - RNA, 21 nt, Human
guggguuuucccuccugaaag

SEQ ID NO: 359573 - RNA, 22 nt, Human
guucuuugcccuggguuggugg

SEQ ID NO: 359574 - RNA, 18 nt, Human
guuggugaguggcauuuc

SEQ ID NO: 359575 - RNA, 21 nt, Human
uaaaccucuguucccaccuuc

SEQ ID NO: 359576 - RNA, 24 nt, Human
uaauuuuuguauuuuuaguggaga

SEQ ID NO: 359577 - RNA, 25 nt, Human
uacagccccaaaaguuaauaacaag

SEQ ID NO: 359578 - RNA, 18 nt, Human
uacaggugugagccacug

SEQ ID NO: 359579 - RNA, 19 nt, Human
uacaggugugagccacuga

SEQ ID NO: 359580 - RNA, 23 nt, Human
uacaggugugagccacugagccc

SEQ ID NO: 359581 - RNA, 20 nt, Human
uacaucauuuucauuacacc

SEQ ID NO: 359582 - RNA, 21 nt, Human
uacaucauuuucauuacaccc

SEQ ID NO: 359583 - RNA, 22 nt, Human
uacccaggcuggagugcaguga

SEQ ID NO: 359584 - RNA, 24 nt, Human
uacccaggcuggagugcagugaug

SEQ ID NO: 359585 - RNA, 19 nt, Human
uacccucggcuuauuuccu

SEQ ID NO: 359586 - RNA, 19 nt, Human
uaguggagaugggguuuca

SEQ ID NO: 359587 - RNA, 20 nt, Human
uaguggagaugggguuucag

SEQ ID NO: 359588 - RNA, 21 nt, Human
uaguggagaugggguuucagc

SEQ ID NO: 359589 - RNA, 24 nt, Human
uaguggagaugggguuucagcuug

SEQ ID NO: 359590 - RNA, 24 nt, Human
uaucaagaguucauagggguuagg

SEQ ID NO: 359591 - RNA, 24 nt, Human
uaucucagccuccagaguagcugg

SEQ ID NO: 359592 - RNA, 23 nt, Human
uauugaacugcuccgauagccuu

SEQ ID NO: 359593 - RNA, 20 nt, Human
uauuugcggagugaaaccgc

SEQ ID NO: 359594 - RNA, 22 nt, Human
ucaaggugaggaaaccaagccc

SEQ ID NO: 359595 - RNA, 24 nt, Human
ucacucuguuacccaggcuggagu

SEQ ID NO: 359596 - RNA, 23 nt, Human
ucacugcaaccuccaccucccgg

SEQ ID NO: 359597 - RNA, 24 nt, Human
ucacugcaaccuccaccucccggg

SEQ ID NO: 359598 - RNA, 25 nt, Human
ucacugcaaccuccaccucccgggu

SEQ ID NO: 359599 - RNA, 27 nt, Human
ucacugcaaccuccaccucccggguuc

SEQ ID NO: 359600 - RNA, 27 nt, Human
uccaccauaguuuuccccacuuccaaa

SEQ ID NO: 359601 - RNA, 24 nt, Human
uccagaguagcugggauuacaggu

SEQ ID NO: 359602 - RNA, 24 nt, Human
uccauugacaguguuccguauugc

SEQ ID NO: 359603 - RNA, 25 nt, Human
uccauugacaguguuccguauugca

SEQ ID NO: 359604 - RNA, 23 nt, Human
ucccaaagugcugggauuacagg

SEQ ID NO: 359605 - RNA, 22 nt, Human
uccccaagcccacaaauuucca

SEQ ID NO: 359606 - RNA, 23 nt, Human
uccccaagcccacaaauuuccac

SEQ ID NO: 359607 - RNA, 24 nt, Human
uccccaagcccacaaauuuccacc

SEQ ID NO: 359608 - RNA, 21 nt, Human
ucccggguucaagugauccuc

SEQ ID NO: 359609 - RNA, 19 nt, Human
ucccuccugaaaguggagg

SEQ ID NO: 359610 - RNA, 24 nt, Human
ucucacucuguuacccaggcugga

SEQ ID NO: 359611 - RNA, 26 nt, Human
ucucacucuguuacccaggcuggagu

SEQ ID NO: 359612 - RNA, 27 nt, Human
ucucacucuguuacccaggcuggagug

SEQ ID NO: 359613 - RNA, 24 nt, Human
ucuguuacccaggcuggagugcag

SEQ ID NO: 359614 - RNA, 18 nt, Human
ugaagaaacugaggccug

SEQ ID NO: 359615 - RNA, 22 nt, Human
ugaagaaacugaggccuggagg

SEQ ID NO: 359616 - RNA, 23 nt, Human
ugaagaaacugaggccuggaggg

SEQ ID NO: 359617 - RNA, 20 nt, Human
ugacacaggcguccccuccc

SEQ ID NO: 359618 - RNA, 22 nt, Human
ugacacaggcguccccucccag

SEQ ID NO: 359619 - RNA, 23 nt, Human
ugacacaggguuggcaaaaaaaa

SEQ ID NO: 359620 - RNA, 24 nt, Human
ugacacaggguuggcaaaaaaaaa

SEQ ID NO: 359621 - RNA, 27 nt, Human
ugacacaggguuggcaaaaaaaaaaaa

SEQ ID NO: 359622 - RNA, 18 nt, Human
ugaccucaggugauccgc

SEQ ID NO: 359623 - RNA, 21 nt, Human
ugaccucaggugauccgccca

SEQ ID NO: 359624 - RNA, 24 nt, Human
ugaccucaggugauccgcccaccu

SEQ ID NO: 359625 - RNA, 24 nt, Human
ugagagcaagaaagcacagcaagc

SEQ ID NO: 359626 - RNA, 20 nt, Human
ugaggaaaccaagcccccag

SEQ ID NO: 359627 - RNA, 23 nt, Human
ugauagggucuuuuuucucaaca

SEQ ID NO: 359628 - RNA, 24 nt, Human
ugauccgcccaccuuggccuccca

SEQ ID NO: 359629 - RNA, 21 nt, Human
ugcagcuaaaccucuguuccc

SEQ ID NO: 359630 - RNA, 19 nt, Human
ugcaguacuuuauugaaaa

SEQ ID NO: 359631 - RNA, 18 nt, Human
ugcaguccauugacagug

SEQ ID NO: 359632 - RNA, 22 nt, Human
ugcagugaugugaucuuagcuc

SEQ ID NO: 359633 - RNA, 21 nt, Human
ugcccuggguuggugaguggc

SEQ ID NO: 359634 - RNA, 21 nt, Human
ugccguccacuuggaagagcg

SEQ ID NO: 359635 - RNA, 24 nt, Human
ugcugggauuacaggugugagcca

SEQ ID NO: 359636 - RNA, 19 nt, Human
ugcuuuaugaaaggauuuc

SEQ ID NO: 359637 - RNA, 19 nt, Human
uggagugcagugaugugau

SEQ ID NO: 359638 - RNA, 19 nt, Human
uggagugcagugaugugau

SEQ ID NO: 359639 - RNA, 23 nt, Human
uggagugcagugaugugaucuua

SEQ ID NO: 359640 - RNA, 28 nt, Human
uggagugcagugaugugauggcucuagc

SEQ ID NO: 359641 - RNA, 19 nt, Human
uggcaaaaaaaaaaaaaaa

SEQ ID NO: 359642 - RNA, 23 nt, Human
uggcacugcaggcaucugcacca

SEQ ID NO: 359643 - RNA, 24 nt, Human
ugggagcugguuuugaaaaucacu

SEQ ID NO: 359644 - RNA, 19 nt, Human
ugggauuacaggugcucac

SEQ ID NO: 359645 - RNA, 21 nt, Human
ugggauuacaggugcucacca

SEQ ID NO: 359646 - RNA, 24 nt, Human
ugggauuacaggugcucaccacca

SEQ ID NO: 359647 - RNA, 25 nt, Human
ugggauuacaggugcucaccaccau

SEQ ID NO: 359648 - RNA, 18 nt, Human
ugggauuacaggugugag

SEQ ID NO: 359649 - RNA, 19 nt, Human
ugggauuacaggugugagc

SEQ ID NO: 359650 - RNA, 21 nt, Human
ugggauuacaggugugagcca

SEQ ID NO: 359651 - RNA, 22 nt, Human
ugggauuacaggugugagccac

SEQ ID NO: 359652 - RNA, 22 nt, Human
ugggauuacaggugugagccac

SEQ ID NO: 359653 - RNA, 24 nt, Human
ugggauuacaggugugagccacug

SEQ ID NO: 359654 - RNA, 20 nt, Human
uggggacaaggcaagacgcc

SEQ ID NO: 359655 - RNA, 23 nt, Human
ugggguguucucagcacauggga

SEQ ID NO: 359656 - RNA, 21 nt, Human
uggguuggugaguggcauuuc

SEQ ID NO: 359657 - RNA, 20 nt, Human
ugugagccacugagcccggc

SEQ ID NO: 359658 - RNA, 24 nt, Human
uuacccaggcuggagugcagugau

SEQ ID NO: 359659 - RNA, 20 nt, Human
uuaguggagaugggguuuca

SEQ ID NO: 359660 - RNA, 21 nt, Human
uuaguggagaugggguuucag

SEQ ID NO: 359661 - RNA, 24 nt, Human
uuaguggagaugggguuucagcuu

SEQ ID NO: 359662 - RNA, 25 nt, Human
uuaguggagaugggguuucagcuug

SEQ ID NO: 359663 - RNA, 26 nt, Human
uuaguggagaugggguuucagcuugu

SEQ ID NO: 359664 - RNA, 23 nt, Human
uucaagugauccuccuaucucag

SEQ ID NO: 359665 - RNA, 24 nt, Human
uucaagugauccuccuaucucagc

SEQ ID NO: 359666 - RNA, 19 nt, Human
uucugccugggguuggucc

SEQ ID NO: 359667 - RNA, 26 nt, Human
uugaaaaaugucggugguaucuccua

SEQ ID NO: 359668 - RNA, 20 nt, Human
uugagacagucucacucugu

SEQ ID NO: 359669 - RNA, 22 nt, Human
uugagagcaguugguguaggug

SEQ ID NO: 359670 - RNA, 19 nt, Human
uugauaaagcagcaaaaug

SEQ ID NO: 359671 - RNA, 18 nt, Human
uuggccucccaaagugcu

SEQ ID NO: 359672 - RNA, 23 nt, Human
uuguauuuuuaguggagaugggg

SEQ ID NO: 359673 - RNA, 20 nt, Human
uugugcaguucagagccaug

SEQ ID NO: 359674 - RNA, 18 nt, Human
uuguguucuuugcccugg

SEQ ID NO: 359675 - RNA, 18 nt, Human
uuugguuggugaaugugg

SEQ ID NO: 359676 - RNA, 22 nt, Human
uuuuaauggcacugcaggcauc

SEQ ID NO: 359677 - RNA, 20 nt, Human
uuuuccauguugagaucuuu

SEQ ID NO: 359678 - RNA, 22 nt, Human
uuuuuaguggagaugggguuuc

SEQ ID NO: 359679 - RNA, 20 nt, Human
uuuuuguauuuuuaguggag

SEQ ID NO: 359680 - RNA, 25 nt, Human
uuuuuuuuuuuuugagacagucuca

SEQ ID NO: 359681 - RNA, 21 nt, Human
aaaaacccaucuuuaccccac

SEQ ID NO: 359682 - RNA, 21 nt, Human
aaaacuguucuaaugaagaaa

SEQ ID NO: 359683 - RNA, 21 nt, Human
aaaccaucugauccacggcaa

SEQ ID NO: 359684 - RNA, 19 nt, Human
aaguaauggagaucacagg

SEQ ID NO: 359685 - RNA, 23 nt, Human
aaguaauggagaucacaggcacu

SEQ ID NO: 359686 - RNA, 25 nt, Human
aaucuguuacccaagcugcaguaca

SEQ ID NO: 359687 - RNA, 19 nt, Human
acauauaaugucguuuucc

SEQ ID NO: 359688 - RNA, 22 nt, Human
acaucacaguucccaaaacgac

SEQ ID NO: 359689 - RNA, 26 nt, Human
agacaaauaaaucauaaaacuguucu

SEQ ID NO: 359690 - RNA, 21 nt, Human
aggaauagacgggcuuucaaa

SEQ ID NO: 359691 - RNA, 24 nt, Human
aggcacugguccugacuucagggg

SEQ ID NO: 359692 - RNA, 23 nt, Human
aguacaguggcaucaucauagcu

SEQ ID NO: 359693 - RNA, 18 nt, Human
aguagcugggauuacggg

SEQ ID NO: 359694 - RNA, 22 nt, Human
cacggcaaaacuaacugguacc

SEQ ID NO: 359695 - RNA, 24 nt, Human
cagcaaccuucaagcacaggcacc

SEQ ID NO: 359696 - RNA, 20 nt, Human
cagccuuaaacuccugggcu

SEQ ID NO: 359697 - RNA, 24 nt, Human
cagccuuaaacuccugggcugaag

SEQ ID NO: 359698 - RNA, 23 nt, Human
cagcucaccaauauucccuuacu

SEQ ID NO: 359699 - RNA, 23 nt, Human
caguucccaaaacgacuuuaaag

SEQ ID NO: 359700 - RNA, 23 nt, Human
cauaggaauagacgggcuuucaa

SEQ ID NO: 359701 - RNA, 20 nt, Human
caucugauccacggcaaaac

SEQ ID NO: 359702 - RNA, 23 nt, Human
ccaucugauccacggcaaaacua

SEQ ID NO: 359703 - RNA, 20 nt, Human
cccaagcugcaguacagugg

SEQ ID NO: 359704 - RNA, 23 nt, Human
cccaagcugcaguacaguggcau

SEQ ID NO: 359705 - RNA, 20 nt, Human
ccccgcgccgagcccucaaa

SEQ ID NO: 359706 - RNA, 18 nt, Human
cccgagcugcagccgcgc

SEQ ID NO: 359707 - RNA, 23 nt, Human
cccgagcugcagccgcgcagaag

SEQ ID NO: 359708 - RNA, 21 nt, Human
cccgcgccgagcccucaaacc

SEQ ID NO: 359709 - RNA, 22 nt, Human
ccgagcccucaaaccgagcgca

SEQ ID NO: 359710 - RNA, 23 nt, Human
ccuccagccuuaguagcugggau

SEQ ID NO: 359711 - RNA, 23 nt, Human
ccugacuucagggggaauaggag

SEQ ID NO: 359712 - RNA, 20 nt, Human
ccugggcugaagugauccuc

SEQ ID NO: 359713 - RNA, 24 nt, Human
ccuuaaacuccugggcugaaguga

SEQ ID NO: 359714 - RNA, 23 nt, Human
ccuuaguagcugggauuacgggc

SEQ ID NO: 359715 - RNA, 18 nt, Human
ccuuggguuauggugggg

SEQ ID NO: 359716 - RNA, 21 nt, Human
cgagcccucaaaccgagcgca

SEQ ID NO: 359717 - RNA, 21 nt, Human
cuacagcaaccuucaagcaca

SEQ ID NO: 359718 - RNA, 21 nt, Human
cucacugcagccuuaaacucc

SEQ ID NO: 359719 - RNA, 24 nt, Human
cucacugcagccuuaaacuccugg

SEQ ID NO: 359720 - RNA, 21 nt, Human
cugcagccgcgcagaaggagg

SEQ ID NO: 359721 - RNA, 20 nt, Human
cuguucaugugucaaccccu

SEQ ID NO: 359722 - RNA, 23 nt, Human
cuuaguagcugggauuacgggcg

SEQ ID NO: 359723 - RNA, 18 nt, Human
gaugucaguaacuuaaaa

SEQ ID NO: 359724 - RNA, 23 nt, Human
ggccgaagucccgagcugcagcc

SEQ ID NO: 359725 - RNA, 21 nt, Human
ggcuuuuuuuuuuuuuuuuuu

SEQ ID NO: 359726 - RNA, 19 nt, Human
gggcugggucaggccgaag

SEQ ID NO: 359727 - RNA, 18 nt, Human
guagcugggauuacgggc

SEQ ID NO: 359728 - RNA, 21 nt, Human
uaaaaacccaucuuuacccca

SEQ ID NO: 359729 - RNA, 23 nt, Human
uaaauccuaccacuucuuccaaa

SEQ ID NO: 359730 - RNA, 23 nt, Human
uaacggcuuuuuuuuuuuuuuuu

SEQ ID NO: 359731 - RNA, 23 nt, Human
uaccacuucuuccaaauucccau

SEQ ID NO: 359732 - RNA, 24 nt, Human
uagcucacugcagccuuaaacucc

SEQ ID NO: 359733 - RNA, 22 nt, Human
uaguagcugggauuacgggcgc

SEQ ID NO: 359734 - RNA, 19 nt, Human
uauacauugcuuaaggugg

SEQ ID NO: 359735 - RNA, 24 nt, Human
uauucuguucaugugucaacccca

SEQ ID NO: 359736 - RNA, 24 nt, Human
uauuuuauuuaaauaaauccucca

SEQ ID NO: 359737 - RNA, 20 nt, Human
ucaaaccgagcgcagacgcc

SEQ ID NO: 359738 - RNA, 22 nt, Human
ucacaucacaguucccaaaacg

SEQ ID NO: 359739 - RNA, 24 nt, Human
ucacugcagccuuaaacuccuggg

SEQ ID NO: 359740 - RNA, 22 nt, Human
uccacaucacaucacaguuccc

SEQ ID NO: 359741 - RNA, 23 nt, Human
ucucaaucuguuacccaagcugc

SEQ ID NO: 359742 - RNA, 24 nt, Human
ucucaaucuguuacccaagcugca

SEQ ID NO: 359743 - RNA, 24 nt, Human
ucuguuacccaagcugcaguacag

SEQ ID NO: 359744 - RNA, 19 nt, Human
ugaacaaaaaauacacacc

SEQ ID NO: 359745 - RNA, 20 nt, Human
ugagacagguucucaaucug

SEQ ID NO: 359746 - RNA, 22 nt, Human
ugagacagguucucaaucuguu

SEQ ID NO: 359747 - RNA, 23 nt, Human
uggcaucaucauagcucacugca

SEQ ID NO: 359748 - RNA, 19 nt, Human
uggcuaauaccuccaggaa

SEQ ID NO: 359749 - RNA, 19 nt, Human
ugggauuacgggcgccagc

SEQ ID NO: 359750 - RNA, 20 nt, Human
ugugucaaccccaauuacag

SEQ ID NO: 359751 - RNA, 21 nt, Human
uuauugggcaagacuugcuuu

SEQ ID NO: 359752 - RNA, 27 nt, Human
uuccacaucacaucacaguucccaaaa

SEQ ID NO: 359753 - RNA, 26 nt, Human
uuggcuaauaccuccaggaaaauaaa

SEQ ID NO: 359754 - RNA, 21 nt, Human
uuuaaauccuaccacuucuuc

SEQ ID NO: 359755 - RNA, 23 nt, Human
uuuacccuucuggauuuuuccug

SEQ ID NO: 359756 - RNA, 21 nt, Human
uuuauaaaccaucugauccac

SEQ ID NO: 359757 - RNA, 21 nt, Human
uuuuauuuauuucuucuaggu

SEQ ID NO: 359758 - RNA, 19 nt, Human
uuuucugacauacuccuag

SEQ ID NO: 359759 - RNA, 26 nt, Human
uuuucugacauacuccuagacaaaua

SEQ ID NO: 359760 - RNA, 19 nt, Human
uuuuuuuuuuuuuuuuuaa

SEQ ID NO: 359761 - RNA, 24 nt, Human
aaaaaaagaacaaaacagcaccaa

SEQ ID NO: 359762 - RNA, 26 nt, Human
aaaaaaagaacaaaacagcaccaaga

SEQ ID NO: 359763 - RNA, 22 nt, Human
aaacaaaaaaagaacaaaacag

SEQ ID NO: 359764 - RNA, 25 nt, Human
aaacaaaaaaagaacaaaacagcac

SEQ ID NO: 359765 - RNA, 27 nt, Human
aaacaaaaaaagaacaaaacagcacca

SEQ ID NO: 359766 - RNA, 26 nt, Human
aaacaacaaaaaacaaaaaaagaaca

SEQ ID NO: 359767 - RNA, 25 nt, Human
aaacagcaccaagaacccccaguag

SEQ ID NO: 359768 - RNA, 22 nt, Human
aaacugagugggauuuuccauu

SEQ ID NO: 359769 - RNA, 25 nt, Human
aacaaaaaacaaaaaaagaacaaaa

SEQ ID NO: 359770 - RNA, 26 nt, Human
aacaaaaaacaaaaaaagaacaaaag

SEQ ID NO: 359771 - RNA, 19 nt, Human
aacaaaacagcaccaagaa

SEQ ID NO: 359772 - RNA, 22 nt, Human
aacaaaacagcaccaagaaccu

SEQ ID NO: 359773 - RNA, 24 nt, Human
aauaucuucuaucccugagagauc

SEQ ID NO: 359774 - RNA, 21 nt, Human
acaaaacaacaaaaaacaaaa

SEQ ID NO: 359775 - RNA, 22 nt, Human
acaaaacaacaaaaaacaaaaa

SEQ ID NO: 359776 - RNA, 18 nt, Human
caaaaaaagaacaaaaca

SEQ ID NO: 359777 - RNA, 23 nt, Human
caaaaaaagaacaaaacagcacc

SEQ ID NO: 359778 - RNA, 30 nt, Human
caaaacaacaaaaaacaaaaaaagaacaaa

SEQ ID NO: 359779 - RNA, 18 nt, Human
caaaacagcaccaagaac

SEQ ID NO: 359780 - RNA, 21 nt, Human
caaaacagcaccaagaaccua

SEQ ID NO: 359781 - RNA, 26 nt, Human
caacaaaaaacaaaaaaagaacaaaa

SEQ ID NO: 359782 - RNA, 22 nt, Human
cagcaccaagaaccuauguaaa

SEQ ID NO: 359783 - RNA, 24 nt, Human
cugcuugauuacagaaaacuguuc

SEQ ID NO: 359784 - RNA, 19 nt, Human
cuucuaucccugagagauc

SEQ ID NO: 359785 - RNA, 21 nt, Human
uaacaaaacaacaaaaaacaa

SEQ ID NO: 359786 - RNA, 23 nt, Human
uaacaaaacaacaaaaaacaaaa

SEQ ID NO: 359787 - RNA, 27 nt, Human
uaacaaaacaacaaaaaacaaaaaaag

SEQ ID NO: 359788 - RNA, 27 nt, Human
uaacaaaacaacaaaaaacaaaaaaag

SEQ ID NO: 359789 - RNA, 21 nt, Human
uaaguaaauaacaaaacaaca

SEQ ID NO: 359790 - RNA, 19 nt, Human
ucaaacuguucaucaaaaa

SEQ ID NO: 359791 - RNA, 18 nt, Human
ucuaucccugagagauca

SEQ ID NO: 359792 - RNA, 21 nt, Human
ugaauuggcauuguuuuccuc

SEQ ID NO: 359793 - RNA, 24 nt, Human
ugaauuggcauuguuuuccucaga

SEQ ID NO: 359794 - RNA, 20 nt, Human
ugauuacagaaaacuguuca

SEQ ID NO: 359795 - RNA, 18 nt, Human
ugcaagcugcuugauuac

SEQ ID NO: 359796 - RNA, 22 nt, Human
uucaaacuguucaucaaaaacu

SEQ ID NO: 359797 - RNA, 18 nt, Human
uucagauauucaaaucaa

SEQ ID NO: 359798 - RNA, 18 nt, Human
uugauuacagaaaacugu

SEQ ID NO: 359799 - RNA, 26 nt, Human
uuucuaugcaagcugcuugauuacag

SEQ ID NO: 359800 - RNA, 20 nt, Human
aaaggaccaggaggaugggg

SEQ ID NO: 359801 - RNA, 27 nt, Human
aaggaccaggaggauggggccaggagg

SEQ ID NO: 359802 - RNA, 19 nt, Human
aaggagcaacaggagccug

SEQ ID NO: 359803 - RNA, 19 nt, Human
aagucagugcccagagccc

SEQ ID NO: 359804 - RNA, 23 nt, Human
aagucccagcaguagagucagaa

SEQ ID NO: 359805 - RNA, 20 nt, Human
acaaggcuggggaguuggga

SEQ ID NO: 359806 - RNA, 20 nt, Human
accuggagagcgucuguggu

SEQ ID NO: 359807 - RNA, 25 nt, Human
acuucuguaagucccagcaguagag

SEQ ID NO: 359808 - RNA, 20 nt, Human
agagcgucugugguuuacgg

SEQ ID NO: 359809 - RNA, 25 nt, Human
agagucagaagcaggaaaggaccag

SEQ ID NO: 359810 - RNA, 21 nt, Human
aggcuggggaguugggauagg

SEQ ID NO: 359811 - RNA, 23 nt, Human
aguccugguguguuuagauuugg

SEQ ID NO: 359812 - RNA, 25 nt, Human
cagagcccaaucccauggccccugc

SEQ ID NO: 359813 - RNA, 24 nt, Human
cagcagagaugagggucccacgug

SEQ ID NO: 359814 - RNA, 21 nt, Human
caggaaaggaccaggaggaug

SEQ ID NO: 359815 - RNA, 18 nt, Human
caggaaucuggaaggcag

SEQ ID NO: 359816 - RNA, 18 nt, Human
caggagccugugggcagg

SEQ ID NO: 359817 - RNA, 19 nt, Human
caggagccugugggcaggc

SEQ ID NO: 359818 - RNA, 22 nt, Human
caggagccugugggcaggcaga

SEQ ID NO: 359819 - RNA, 25 nt, Human
caggagccugugggcaggcagaaaa

SEQ ID NO: 359820 - RNA, 20 nt, Human
ccucaacaaggcuggggagu

SEQ ID NO: 359821 - RNA, 20 nt, Human
ccugugggcaggcagauguc

SEQ ID NO: 359822 - RNA, 18 nt, Human
cugguguguuuagauuug

SEQ ID NO: 359823 - RNA, 21 nt, Human
gaaaggaccaggaggaugggg

SEQ ID NO: 359824 - RNA, 19 nt, Human
gaggauggggccaggaggc

SEQ ID NO: 359825 - RNA, 24 nt, Human
gagucagaagcaggaaaggaccag

SEQ ID NO: 359826 - RNA, 20 nt, Human
ggggaguugggauaggcagg

SEQ ID NO: 359827 - RNA, 21 nt, Human
ggggaguugggauaggcagga

SEQ ID NO: 359828 - RNA, 21 nt, Human
ggggaguugggauaggcagga

SEQ ID NO: 359829 - RNA, 20 nt, Human
guggcaggggaggaaggaau

SEQ ID NO: 359830 - RNA, 30 nt, Human
uaagucagugcccagagcccaaucccaugg

SEQ ID NO: 359831 - RNA, 25 nt, Human
uaagucccagcaguagagucagaag

SEQ ID NO: 359832 - RNA, 21 nt, Human
uagagaaccucaacaaggcug

SEQ ID NO: 359833 - RNA, 20 nt, Human
ucccauggccccugcucagg

SEQ ID NO: 359834 - RNA, 19 nt, Human
ucucaaggcgauggauggg

SEQ ID NO: 359835 - RNA, 23 nt, Human
ucuggggcauccaggucugugug

SEQ ID NO: 359836 - RNA, 18 nt, Human
ugagggucccacguggca

SEQ ID NO: 359837 - RNA, 20 nt, Human
ugcucuggggcauccagguc

SEQ ID NO: 359838 - RNA, 18 nt, Human
uggaaggcaggauaacuc

SEQ ID NO: 359839 - RNA, 18 nt, Human
uggcaggggaggaaggaa

SEQ ID NO: 359840 - RNA, 18 nt, Human
uggcaggggaggaaggaa

SEQ ID NO: 359841 - RNA, 19 nt, Human
uggcaggggaggaaggaag

SEQ ID NO: 359842 - RNA, 21 nt, Human
uggcaggggaggaaggaagga

SEQ ID NO: 359843 - RNA, 19 nt, Human
uggcauguuucucgccuuc

SEQ ID NO: 359844 - RNA, 18 nt, Human
uucaagaggcaauagaga

SEQ ID NO: 359845 - RNA, 19 nt, Human
aaaaagagcugaaaacagu

SEQ ID NO: 359846 - RNA, 23 nt, Human
aaaaauguugaaacucacuagac

SEQ ID NO: 359847 - RNA, 23 nt, Human
aaacagcaguccaaaauauuaca

SEQ ID NO: 359848 - RNA, 24 nt, Human
aaacagucuucacuguaaaaauaa

SEQ ID NO: 359849 - RNA, 21 nt, Human
aaagaaaagugaaaauaccau

SEQ ID NO: 359850 - RNA, 26 nt, Human
aaagcaacugaaacauuuccaaagca

SEQ ID NO: 359851 - RNA, 23 nt, Human
aagcuuuugcagcugagaaaguu

SEQ ID NO: 359852 - RNA, 22 nt, Human
acaaagaaaagugaaaauacca

SEQ ID NO: 359853 - RNA, 18 nt, Human
accugcacaauuauuaca

SEQ ID NO: 359854 - RNA, 20 nt, Human
acuagaagcuuuugcagcug

SEQ ID NO: 359855 - RNA, 23 nt, Human
agacaaccgagugcucuccccac

SEQ ID NO: 359856 - RNA, 20 nt, Human
agagcugaaaacagucuuca

SEQ ID NO: 359857 - RNA, 18 nt, Human
agcugccacaguuuugga

SEQ ID NO: 359858 - RNA, 18 nt, Human
agucuugaccaacagcug

SEQ ID NO: 359859 - RNA, 23 nt, Human
aucaucuauagcacacaaacauc

SEQ ID NO: 359860 - RNA, 24 nt, Human
augaacuucuugaaagacuagaag

SEQ ID NO: 359861 - RNA, 22 nt, Human
augagccaauauagacauuacu

SEQ ID NO: 359862 - RNA, 19 nt, Human
auuuauuuguuuuucaggu

SEQ ID NO: 359863 - RNA, 24 nt, Human
caaauaaauucagauugagacauc

SEQ ID NO: 359864 - RNA, 21 nt, Human
caaccgagugcucuccccaca

SEQ ID NO: 359865 - RNA, 22 nt, Human
cauuacuacauguccacaggaa

SEQ ID NO: 359866 - RNA, 21 nt, Human
ccaaaauauuacacucucccc

SEQ ID NO: 359867 - RNA, 20 nt, Human
ccaaccuauaaauauuacac

SEQ ID NO: 359868 - RNA, 18 nt, Human
ccaguagaaguaccauua

SEQ ID NO: 359869 - RNA, 19 nt, Human
ccucucuggcccuccuccc

SEQ ID NO: 359870 - RNA, 23 nt, Human
ccuguugcucuccucauuaaugg

SEQ ID NO: 359871 - RNA, 23 nt, Human
cuaagcuuuuaaauaaagauaaa

SEQ ID NO: 359872 - RNA, 24 nt, Human
cugaaaacagucuucacuguaaaa

SEQ ID NO: 359873 - RNA, 18 nt, Human
gaaaauaccauucuuugg

SEQ ID NO: 359874 - RNA, 21 nt, Human
ggaacaauuccuguaccugca

SEQ ID NO: 359875 - RNA, 20 nt, Human
ggagacauguacuuucuggc

SEQ ID NO: 359876 - RNA, 19 nt, Human
guuacaaagaaaagugaaa

SEQ ID NO: 359877 - RNA, 24 nt, Human
uaaaaauuauccaugaaaaacaau

SEQ ID NO: 359878 - RNA, 22 nt, Human
uaaaauaucaucuauagcacac

SEQ ID NO: 359879 - RNA, 27 nt, Human
uaaacaacaauggcaaauauuucaaaa

SEQ ID NO: 359880 - RNA, 22 nt, Human
uaaagacaaccgagugcucucc

SEQ ID NO: 359881 - RNA, 18 nt, Human
uaauccugaaauucuuag

SEQ ID NO: 359882 - RNA, 19 nt, Human
uacaaguaaaaaacacugg

SEQ ID NO: 359883 - RNA, 21 nt, Human
uacaauauaaaaagagcugaa

SEQ ID NO: 359884 - RNA, 22 nt, Human
uaccaaccuauaaauauuacac

SEQ ID NO: 359885 - RNA, 24 nt, Human
uacuagggcuagcaguuugguauu

SEQ ID NO: 359886 - RNA, 19 nt, Human
uagaagcuuuugcagcuga

SEQ ID NO: 359887 - RNA, 18 nt, Human
uagcacacaaacaucaug

SEQ ID NO: 359888 - RNA, 18 nt, Human
uagcugccacaguuuugg

SEQ ID NO: 359889 - RNA, 18 nt, Human
uauuucaaaaguugaagg

SEQ ID NO: 359890 - RNA, 22 nt, Human
ucacuagacaaaacaaaaaaaa

SEQ ID NO: 359891 - RNA, 19 nt, Human
ucaggggccuguugcucuc

SEQ ID NO: 359892 - RNA, 19 nt, Human
uccacaggaaguacaaaag

SEQ ID NO: 359893 - RNA, 23 nt, Human
uccacaggaaguacaaaagccau

SEQ ID NO: 359894 - RNA, 21 nt, Human
ucucuaguuuuaaggcaggga

SEQ ID NO: 359895 - RNA, 23 nt, Human
ucuggcccuccucccucgccucc

SEQ ID NO: 359896 - RNA, 21 nt, Human
ugacuuccuucuacucacacu

SEQ ID NO: 359897 - RNA, 27 nt, Human
ugcaaauggaaaacuaaauauacugca

SEQ ID NO: 359898 - RNA, 19 nt, Human
ugcaauuucauaaaguaug

SEQ ID NO: 359899 - RNA, 18 nt, Human
ugcucuccucauuaaugg

SEQ ID NO: 359900 - RNA, 21 nt, Human
uggcccuccucccucgccucc

SEQ ID NO: 359901 - RNA, 19 nt, Human
ugggagacauguacuuucu

SEQ ID NO: 359902 - RNA, 19 nt, Human
uguuaaagaaucaaaaguu

SEQ ID NO: 359903 - RNA, 23 nt, Human
uucucuggcaguaaugguccuag

SEQ ID NO: 359904 - RNA, 21 nt, Human
uuuaaaauaucaucuauagca

SEQ ID NO: 359905 - RNA, 23 nt, Human
uuuaaaauaucaucuauagcaca

SEQ ID NO: 359906 - RNA, 22 nt, Human
uuuauuuguuuuucagguuagu

SEQ ID NO: 359907 - RNA, 26 nt, Human
uuuuaugagccaauauagacauuacu

SEQ ID NO: 359908 - RNA, 23 nt, Human
uuuuuuuuuuuuuuuuuuaacag

SEQ ID NO: 359909 - RNA, 23 nt, Human
aaccacugugucccgucaccgac

SEQ ID NO: 359910 - RNA, 23 nt, Human
aaccacugugucccgucaccgac

SEQ ID NO: 359911 - RNA, 22 nt, Human
accaaccacugugucccgucac

SEQ ID NO: 359912 - RNA, 22 nt, Human
acuacaacucucagcagacauu

SEQ ID NO: 359913 - RNA, 22 nt, Human
acuacaacucucagcagacauu

SEQ ID NO: 359914 - RNA, 22 nt, Human
auagggcacagaacuacaacuc

SEQ ID NO: 359915 - RNA, 23 nt, Human
caccaaccacugugucccgucac

SEQ ID NO: 359916 - RNA, 23 nt, Human
cagcggcuccucccucagagucu

SEQ ID NO: 359917 - RNA, 23 nt, Human
cccucagagucugaaucugaguc

SEQ ID NO: 359918 - RNA, 24 nt, Human
cccucccggcucagacucccccua

SEQ ID NO: 359919 - RNA, 25 nt, Human
cccuugaggcugucaccgaccgcuc

SEQ ID NO: 359920 - RNA, 25 nt, Human
cccuugaggcugucaccgaccgcuc

SEQ ID NO: 359921 - RNA, 18 nt, Human
cgggggcaggagacagag

SEQ ID NO: 359922 - RNA, 22 nt, Human
cugcuucuccaccagcggcucc

SEQ ID NO: 359923 - RNA, 22 nt, Human
cuggaagaguuaaaaguucugg

SEQ ID NO: 359924 - RNA, 21 nt, Human
cugucccugaggagcucggca

SEQ ID NO: 359925 - RNA, 21 nt, Human
cuucuccaccagcggcuccuc

SEQ ID NO: 359926 - RNA, 26 nt, Human
gcaggagacagagugggaggucgacc

SEQ ID NO: 359927 - RNA, 20 nt, Human
gcaggagacagagugggggc

SEQ ID NO: 359928 - RNA, 18 nt, Human
gcugaaggcagagacucg

SEQ ID NO: 359929 - RNA, 24 nt, Human
ggaccccaguuuuggggagggagc

SEQ ID NO: 359930 - RNA, 20 nt, Human
ggagcccucccggcucagac

SEQ ID NO: 359931 - RNA, 23 nt, Human
gggaagugggucccacgugaaaa

SEQ ID NO: 359932 - RNA, 19 nt, Human
gggagggagcuguaagaga

SEQ ID NO: 359933 - RNA, 28 nt, Human
gggcaggagacagagugggaggucgacc

SEQ ID NO: 359934 - RNA, 21 nt, Human
ggggagggagcuguaagagau

SEQ ID NO: 359935 - RNA, 24 nt, Human
ggggcccaccacccacuuugggag

SEQ ID NO: 359936 - RNA, 20 nt, Human
gggggccaggcccgguuggg

SEQ ID NO: 359937 - RNA, 24 nt, Human
guugcugggaccccaguuuugggg

SEQ ID NO: 359938 - RNA, 28 nt, Human
uaagcaaugucuucugcccccugaaagg

SEQ ID NO: 359939 - RNA, 21 nt, Human
uagggcacagaacuacaacuc

SEQ ID NO: 359940 - RNA, 21 nt, Human
uaugguuuacuuagccacagg

SEQ ID NO: 359941 - RNA, 24 nt, Human
ucccuguccuggaagaguuaaaag

SEQ ID NO: 359942 - RNA, 21 nt, Human
ucugagcuccccagacaagaa

SEQ ID NO: 359943 - RNA, 18 nt, Human
ucugggguagcccuggcc

SEQ ID NO: 359944 - RNA, 24 nt, Human
ugaaggcagagacucgggagcccu

SEQ ID NO: 359945 - RNA, 22 nt, Human
ugaagggggcccaccacccacu

SEQ ID NO: 359946 - RNA, 24 nt, Human
ugacggcaccagaaaugggagugg

SEQ ID NO: 359947 - RNA, 24 nt, Human
ugacggcaccagaaaugggagugg

SEQ ID NO: 359948 - RNA, 26 nt, Human
ugaggcugucaccgaccgcucugucc

SEQ ID NO: 359949 - RNA, 23 nt, Human
ugccaugggcgcggugcugaagc

SEQ ID NO: 359950 - RNA, 18 nt, Human
ugcccauccagcauggga

SEQ ID NO: 359951 - RNA, 20 nt, Human
uggaagaguuaaaaguucug

SEQ ID NO: 359952 - RNA, 19 nt, Human
ugggaguggccgugauagg

SEQ ID NO: 359953 - RNA, 19 nt, Human
ugggaguggccgugauagg

SEQ ID NO: 359954 - RNA, 20 nt, Human
ugggggccaggguugcuggg

SEQ ID NO: 359955 - RNA, 30 nt, Human
ugucccgugacggcaccagaaaugggaguu

SEQ ID NO: 359956 - RNA, 30 nt, Human; identical to SEQ ID NO: 359955

SEQ ID NO: 359957 - RNA, 20 nt, Human
ugucuccaauaagcaauguc

SEQ ID NO: 359958 - RNA, 23 nt, Human
uuaaaaguucugggguagcccug

SEQ ID NO: 359959 - RNA, 27 nt, Human
uugaggcugucaccgaccgcucugucc

SEQ ID NO: 359960 - RNA, 19 nt, Human
uugcugggaccccaguuuu

SEQ ID NO: 359961 - RNA, 23 nt, Human
uugcugggaccccaguuuugggg

SEQ ID NO: 359962 - RNA, 28 nt, Human
uuuuuuguuaguuguuuuuguuuuuaau

SEQ ID NO: 359963 - RNA, 20 nt, Human
uuuuuuuuuguuaguuguuu

SEQ ID NO: 359964 - RNA, 25 nt, Human
uuuuuuuuuuuuuuuuguuaguugu

SEQ ID NO: 359965 - RNA, 18 nt, Human
uuuuuuuuuuuuuuuuug

SEQ ID NO: 359966 - RNA, 25 nt, Human
uuuuuuuuuuuuuuuuuuguuaguu

SEQ ID NO: 359967 - RNA, 21 nt, Human
aaaaauagccccacuaaagga

SEQ ID NO: 359968 - RNA, 19 nt, Human
aaauagccccacuaaagga

SEQ ID NO: 359969 - RNA, 19 nt, Human
auuaggagcuucagcagag

SEQ ID NO: 359970 - RNA, 18 nt, Human
caacaugcuagaagugcg

SEQ ID NO: 359971 - RNA, 22 nt, Human
caacuaggcacagaaagcagac

SEQ ID NO: 359972 - RNA, 20 nt, Human
cagaagaaagcuuuuuccau

SEQ ID NO: 359973 - RNA, 21 nt, Human
cauuccaguggcagccucggg

SEQ ID NO: 359974 - RNA, 20 nt, Human
cccgcggcgccccggccccg

SEQ ID NO: 359975 - RNA, 22 nt, Human
cccgcggcgccccggccccgcc

SEQ ID NO: 359976 - RNA, 21 nt, Human
cccggccccgccuccgccucc

SEQ ID NO: 359977 - RNA, 21 nt, Human
ccgccuccgccucccaccccc

SEQ ID NO: 359978 - RNA, 22 nt, Human
ccgccuccgccucccacccccg

SEQ ID NO: 359979 - RNA, 21 nt, Human
ccucccacccccgcccccggc

SEQ ID NO: 359980 - RNA, 20 nt, Human
ccuccgccucccacccccgc

SEQ ID NO: 359981 - RNA, 21 nt, Human
ccucggguguccacucaguuc

SEQ ID NO: 359982 - RNA, 18 nt, Human
cgccccgcccccggcgcc

SEQ ID NO: 359983 - RNA, 18 nt, Human
cgcccgcggcgccccggg

SEQ ID NO: 359984 - RNA, 23 nt, Human
cggcgccccgcccgcggcgcccc

SEQ ID NO: 359985 - RNA, 21 nt, Human
cugcagcucauggccugagaa

SEQ ID NO: 359986 - RNA, 24 nt, Human
gacucgccccgcccccggcgcccc

SEQ ID NO: 359987 - RNA, 22 nt, Human
gccccacuaaaggagaccaaca

SEQ ID NO: 359988 - RNA, 24 nt, Human
ggagacuaaauguauuucaugcug

SEQ ID NO: 359989 - RNA, 27 nt, Human
ggguggcccugacuguaaacacagccc

SEQ ID NO: 359990 - RNA, 20 nt, Human
gucacagucagaagaaagcu

SEQ ID NO: 359991 - RNA, 21 nt, Human
uaaaaauagccccacuaaagg

SEQ ID NO: 359992 - RNA, 23 nt, Human
uagccccacuaaaggagaccaac

SEQ ID NO: 359993 - RNA, 20 nt, Human
ucacugcagcucauggccug

SEQ ID NO: 359994 - RNA, 19 nt, Human
uccggacucgccccgcccc

SEQ ID NO: 359995 - RNA, 20 nt, Human
ucgccccgcccccggcgccc

SEQ ID NO: 359996 - RNA, 20 nt, Human
ugagaagacauuccaguggc

SEQ ID NO: 359997 - RNA, 22 nt, Human
ugaggagacuaaauguauuuca

SEQ ID NO: 359998 - RNA, 22 nt, Human
ugcccaagcugucuucaggcau

SEQ ID NO: 359999 - RNA, 20 nt, Human
uggaaagaacagauuuucuc

SEQ ID NO: 360000 - RNA, 23 nt, Human
uggaaagaacagauuuucucuca

SEQ ID NO: 360001 - RNA, 18 nt, Human
ugggauguggaugucucc

SEQ ID NO: 360002 - RNA, 28 nt, Human
uggucugauucaguucaagaggggaaag

SEQ ID NO: 360003 - RNA, 26 nt, Human
uguauuucaugcuggaaagaacagau

SEQ ID NO: 360004 - RNA, 23 nt, Human
uucugguuucaccugcccaagcu

SEQ ID NO: 360005 - RNA, 23 nt, Human
uuuuuuuuuuuuuuuuucccuuu

SEQ ID NO: 360006 - RNA, 26 nt, Human
uuuuuuuuuuuuuuuuuucccuuuga

SEQ ID NO: 360007 - RNA, 26 nt, Human
cccuacucuguugaaugggaacugga

SEQ ID NO: 360008 - RNA, 18 nt, Human
uaauuaagaauauccaca

SEQ ID NO: 360009 - RNA, 24 nt, Human
uccacacauuaagauaccuagaac

SEQ ID NO: 360010 - RNA, 20 nt, Human
uggaaucugucauuugagaa

SEQ ID NO: 360011 - RNA, 23 nt, Human
uggaaucugucauuugagaaggc

SEQ ID NO: 360012 - RNA, 23 nt, Human
uugaaugggaacuggaaucuguc

SEQ ID NO: 360013 - RNA, 20 nt, Human
aagaugguugucuccacggc

SEQ ID NO: 360014 - RNA, 22 nt, Human
acccauaagaccauuucuccuc

SEQ ID NO: 360015 - RNA, 23 nt, Human
accucacguuucaguucaaacca

SEQ ID NO: 360016 - RNA, 20 nt, Human
acuucuaaacccccaucacu

SEQ ID NO: 360017 - RNA, 20 nt, Human
agaaaauuauuuucuucuuc

SEQ ID NO: 360018 - RNA, 24 nt, Human
agaggcuauuuuuagauuguucag

SEQ ID NO: 360019 - RNA, 28 nt, Human
caaccauacacaucaaagauaccuccuu

SEQ ID NO: 360020 - RNA, 19 nt, Human
cccgcacaugcugccggcc

SEQ ID NO: 360021 - RNA, 21 nt, Human
cccgcacaugcugccggcccg

SEQ ID NO: 360022 - RNA, 21 nt, Human
ccucugcguguggccuaguuc

SEQ ID NO: 360023 - RNA, 20 nt, Human
cgccuuccaggcuuucuccu

SEQ ID NO: 360024 - RNA, 22 nt, Human
cuaagagcucuggguacccccg

SEQ ID NO: 360025 - RNA, 21 nt, Human
cucaccacccauaagaccauu

SEQ ID NO: 360026 - RNA, 24 nt, Human
cuuccaggcuuucuccuagaggcg

SEQ ID NO: 360027 - RNA, 28 nt, Human
cuuuccaguucugugacuuuugaaugug

SEQ ID NO: 360028 - RNA, 21 nt, Human
ggcgcugugucccgaccgcgc

SEQ ID NO: 360029 - RNA, 20 nt, Human
uaaccaaccauacacaucaa

SEQ ID NO: 360030 - RNA, 21 nt, Human
uaauuuacaaaauuuuucccu

SEQ ID NO: 360031 - RNA, 18 nt, Human
uaggguuuuuaccccuug

SEQ ID NO: 360032 - RNA, 20 nt, Human
uaguaggguuuuuaccccuu

SEQ ID NO: 360033 - RNA, 25 nt, Human
uauuuucuucuucuguagguuuuua

SEQ ID NO: 360034 - RNA, 21 nt, Human
ucaguacucagcucaccaccc

SEQ ID NO: 360035 - RNA, 23 nt, Human
uccaguucugugacuuuugaaug

SEQ ID NO: 360036 - RNA, 19 nt, Human
ucuuugcuacuucuaaacc

SEQ ID NO: 360037 - RNA, 18 nt, Human
ugcccagauaacaaaaau

SEQ ID NO: 360038 - RNA, 19 nt, Human
uuauuuuccacuaaaacuu

SEQ ID NO: 360039 - RNA, 23 nt, Human
uuauuuucuucuucuguagguuu

SEQ ID NO: 360040 - RNA, 23 nt, Human
uucugugacuuuugaaugugggu

SEQ ID NO: 360041 - RNA, 24 nt, Human
uuuuuuuuuuuuuuuuuacuguag

SEQ ID NO: 360042 - RNA, 23 nt, Human
aaaaagccccacccuccccaagc

SEQ ID NO: 360043 - RNA, 24 nt, Human
aaaagccccacccuccccaagcac

SEQ ID NO: 360044 - RNA, 18 nt, Human
aaagccccacccucccca

SEQ ID NO: 360045 - RNA, 20 nt, Human
aaccccuggccuggagcaca

SEQ ID NO: 360046 - RNA, 23 nt, Human
aagccccacccuccccaagcacc

SEQ ID NO: 360047 - RNA, 21 nt, Human
accacggagggcagguguaac

SEQ ID NO: 360048 - RNA, 18 nt, Human
acccuccccaagcacccu

SEQ ID NO: 360049 - RNA, 19 nt, Human
agcacagcucucagagccc

SEQ ID NO: 360050 - RNA, 21 nt, Human
agggagggaccacggagggca

SEQ ID NO: 360051 - RNA, 18 nt, Human
agggcccagccucaccuc

SEQ ID NO: 360052 - RNA, 26 nt, Human
aguaacaaagugagaccacgagagaa

SEQ ID NO: 360053 - RNA, 20 nt, Human
cacaguuucuacaaaaagcc

SEQ ID NO: 360054 - RNA, 20 nt, Human
cacgucucccuccagcccca

SEQ ID NO: 360055 - RNA, 22 nt, Human
cacgucucccuccagccccaaa

SEQ ID NO: 360056 - RNA, 22 nt, Human
cacuccuguuuaagcuggagac

SEQ ID NO: 360057 - RNA, 27 nt, Human
cagagcccugaggcucccggggacaga

SEQ ID NO: 360058 - RNA, 21 nt, Human
cagggagggcccagccucacc

SEQ ID NO: 360059 - RNA, 23 nt, Human
ccccacccuccccaagcacccug

SEQ ID NO: 360060 - RNA, 18 nt, Human
ccccuggagcccagggag

SEQ ID NO: 360061 - RNA, 18 nt, Human
cccugaggcucccgggga

SEQ ID NO: 360062 - RNA, 21 nt, Human
ccugcagggcccauggaggag

SEQ ID NO: 360063 - RNA, 23 nt, Human
cucagagcccugaggcucccggg

SEQ ID NO: 360064 - RNA, 22 nt, Human
cugguggacccacgucucccuc

SEQ ID NO: 360065 - RNA, 23 nt, Human
gacccacgucucccuccagcccc

SEQ ID NO: 360066 - RNA, 19 nt, Human
gacuuuuccagaagccugg

SEQ ID NO: 360067 - RNA, 22 nt, Human
gcaagccucuacugauccccca

SEQ ID NO: 360068 - RNA, 23 nt, Human
gcaccagaggccccuggagccca

SEQ ID NO: 360069 - RNA, 20 nt, Human
gcccugaggcucccggggac

SEQ ID NO: 360070 - RNA, 23 nt, Human
gcccugaggcucccggggacaga

SEQ ID NO: 360071 - RNA, 25 nt, Human
ggcccagaagggaggcccuggggac

SEQ ID NO: 360072 - RNA, 24 nt, Human
ggccuggagcacagcucucagagc

SEQ ID NO: 360073 - RNA, 19 nt, Human
gggguagggugggcuguag

SEQ ID NO: 360074 - RNA, 23 nt, Human
ggguagggugggcuguagggggc

SEQ ID NO: 360075 - RNA, 20 nt, Human
uacaaaaagccccacccucc

SEQ ID NO: 360076 - RNA, 21 nt, Human
uacaaaaagccccacccuccc

SEQ ID NO: 360077 - RNA, 19 nt, Human
uccugcagggcccauggag

SEQ ID NO: 360078 - RNA, 23 nt, Human
ucuacaaaaagccccacccuccc

SEQ ID NO: 360079 - RNA, 18 nt, Human
ucuccccuccugcagggc

SEQ ID NO: 360080 - RNA, 23 nt, Human
uggggacagagggaguucacucc

SEQ ID NO: 360081 - RNA, 21 nt, Human
ugggguguggcuucuucccgg

SEQ ID NO: 360082 - RNA, 24 nt, Human
uguugaggccgcuuccgccggaag

SEQ ID NO: 360083 - RNA, 18 nt, Human
uucacuccuguuuaagcu

SEQ ID NO: 360084 - RNA, 23 nt, Human
uuugcaagaaagaaauuguuuuu

SEQ ID NO: 360085 - RNA, 19 nt, Human
uuuuuauugcauugaggac

SEQ ID NO: 360086 - RNA, 20 nt, Human
uuuuuauugcauugaggacu

SEQ ID NO: 360087 - RNA, 21 nt, Human
aacccagccuucaccgugaca

SEQ ID NO: 360088 - RNA, 25 nt, Human
acucugcaggccggggcugaaauaa

SEQ ID NO: 360089 - RNA, 23 nt, Human
caggccguaucaggguacaaccg

SEQ ID NO: 360090 - RNA, 23 nt, Human
caucugcaaagugccaacuguuc

SEQ ID NO: 360091 - RNA, 21 nt, Human
ccaggccguaucaggguacaa

SEQ ID NO: 360092 - RNA, 22 nt, Human
ccccaaagaguucguucucccu

SEQ ID NO: 360093 - RNA, 23 nt, Human
ccccaaagaguucguucucccua

SEQ ID NO: 360094 - RNA, 22 nt, Human
ccccuggagaccugcucuuccg

SEQ ID NO: 360095 - RNA, 24 nt, Human
ccccuggagaccugcucuuccgcu

SEQ ID NO: 360096 - RNA, 19 nt, Human
cccuggagaccugcucuuc

SEQ ID NO: 360097 - RNA, 19 nt, Human
cggaugggcagguguccuc

SEQ ID NO: 360098 - RNA, 23 nt, Human
cggcugccaccucuugacacaga

SEQ ID NO: 360099 - RNA, 22 nt, Human
cuagacccgugggggcaaccca

SEQ ID NO: 360100 - RNA, 18 nt, Human
cuggccaucugcaaagug

SEQ ID NO: 360101 - RNA, 18 nt, Human
gaccugcucuuccgcuuc

SEQ ID NO: 360102 - RNA, 19 nt, Human
gacuggccuggugagcgag

SEQ ID NO: 360103 - RNA, 19 nt, Human
gaggaaaggccgcugggcg

SEQ ID NO: 360104 - RNA, 22 nt, Human
gcccugagacuggccuggugag

SEQ ID NO: 360105 - RNA, 22 nt, Human
ggccuggugagcgaggaaaggc

SEQ ID NO: 360106 - RNA, 22 nt, Human
uccccuggagaccugcucuucc

SEQ ID NO: 360107 - RNA, 24 nt, Human
uccucgauggccaggagugcguca

SEQ ID NO: 360108 - RNA, 21 nt, Human
ucucccuagacccgugggggc

SEQ ID NO: 360109 - RNA, 18 nt, Human
ugaaaaugucauccccaa

SEQ ID NO: 360110 - RNA, 22 nt, Human
ugacacuggccaucugcaaagu

SEQ ID NO: 360111 - RNA, 18 nt, Human
uguccucgauggccaggc

SEQ ID NO: 360112 - RNA, 18 nt, Human
uugacacagaggccggau

SEQ ID NO: 360113 - RNA, 23 nt, Human
aagugagaaccugggaguuuggg

SEQ ID NO: 360114 - RNA, 21 nt, Human
aaguuccagguccacuccagu

SEQ ID NO: 360115 - RNA, 19 nt, Human
accccucccccaccgccca

SEQ ID NO: 360116 - RNA, 18 nt, Human
acgccccgcugugccagg

SEQ ID NO: 360117 - RNA, 18 nt, Human
acugucuuugccuccucc

SEQ ID NO: 360118 - RNA, 20 nt, Human
agaaauaaggagggggcuac

SEQ ID NO: 360119 - RNA, 22 nt, Human
aggaaguccgggguagaucaca

SEQ ID NO: 360120 - RNA, 22 nt, Human
auaaggagggggcuacugucuu

SEQ ID NO: 360121 - RNA, 24 nt, Human
cacuucuuacucccaucccuccuc

SEQ ID NO: 360122 - RNA, 21 nt, Human
cagaagaaggaagugagaacc

SEQ ID NO: 360123 - RNA, 25 nt, Human
ccccaccgcccacuuccugugccug

SEQ ID NO: 360124 - RNA, 18 nt, Human
ccgcagcucagcaucccc

SEQ ID NO: 360125 - RNA, 19 nt, Human
ccgcagcucagcaucccca

SEQ ID NO: 360126 - RNA, 19 nt, Human
ccgcccacuuccugugccu

SEQ ID NO: 360127 - RNA, 25 nt, Human
ccugugccugaggagacacugaggc

SEQ ID NO: 360128 - RNA, 21 nt, Human
ccuuaccccucccccaccgcc

SEQ ID NO: 360129 - RNA, 20 nt, Human
gagcggggguggggaggauc

SEQ ID NO: 360130 - RNA, 22 nt, Human
gcagugcacgccccgcugugcc

SEQ ID NO: 360131 - RNA, 18 nt, Human
gcccuuaccccuccccca

SEQ ID NO: 360132 - RNA, 19 nt, Human
gcuacugucuuugccuccu

SEQ ID NO: 360133 - RNA, 19 nt, Human
ggagacuguauucuccugc

SEQ ID NO: 360134 - RNA, 18 nt, Human
gggguggggaggaucugg

SEQ ID NO: 360135 - RNA, 20 nt, Human
ucgggucccucccgucucua

SEQ ID NO: 360136 - RNA, 23 nt, Human
ugagaaccugggaguuugggggc

SEQ ID NO: 360137 - RNA, 20 nt, Human
ugcccugagaugucucccuu

SEQ ID NO: 360138 - RNA, 21 nt, Human
uggagacuguauucuccugcu

SEQ ID NO: 360139 - RNA, 21 nt, Human
ugggaguuugggggcuaagag

SEQ ID NO: 360140 - RNA, 22 nt, Human
uuggcaauggcagcccgucuuu

SEQ ID NO: 360141 - RNA, 19 nt, Human
aaacaacuccagaaacaag

SEQ ID NO: 360142 - RNA, 28 nt, Human
aaacaacuccagaaacaagcugcaaaaa

SEQ ID NO: 360143 - RNA, 23 nt, Human
aaacaagcugcaaaaauguuccu

SEQ ID NO: 360144 - RNA, 22 nt, Human
aagagaaggcggaggaguaggg

SEQ ID NO: 360145 - RNA, 24 nt, Human
aaugcaaaaguggaaagaguugga

SEQ ID NO: 360146 - RNA, 22 nt, Human
acggcccaggcgcacgcggcag

SEQ ID NO: 360147 - RNA, 18 nt, Human
agaggcagggggcggcgg

SEQ ID NO: 360148 - RNA, 25 nt, Human
agaggcagggggcggcggccgcagg

SEQ ID NO: 360149 - RNA, 21 nt, Human
agcagagccgagaggcagggg

SEQ ID NO: 360150 - RNA, 19 nt, Human
aggaguaggggagguucug

SEQ ID NO: 360151 - RNA, 21 nt, Human
aggcgaaaaccggagucggaa

SEQ ID NO: 360152 - RNA, 18 nt, Human
agggggcggcggccgcag

SEQ ID NO: 360153 - RNA, 18 nt, Human
caaacaacuccagaaaca

SEQ ID NO: 360154 - RNA, 20 nt, Human
caagcugcaaaaauguuccu

SEQ ID NO: 360155 - RNA, 22 nt, Human
caagcugcaaaaauguuccuga

SEQ ID NO: 360156 - RNA, 20 nt, Human
cagugguugcugcuccagga

SEQ ID NO: 360157 - RNA, 18 nt, Human
ccuccuccuuaggcuuug

SEQ ID NO: 360158 - RNA, 24 nt, Human
ccuccuuaggcuuugcaaaggcga

SEQ ID NO: 360159 - RNA, 20 nt, Human
cgcugcagugguugcugcuc

SEQ ID NO: 360160 - RNA, 22 nt, Human
cggcagggagcagagccgagag

SEQ ID NO: 360161 - RNA, 18 nt, Human
cggccgcagggagggggg

SEQ ID NO: 360162 - RNA, 22 nt, Human
cuccagaaacaagcugcaaaaa

SEQ ID NO: 360163 - RNA, 18 nt, Human
cugcagugguugcugcuc

SEQ ID NO: 360164 - RNA, 20 nt, Human
cuuuaugcgcaaacaacucc

SEQ ID NO: 360165 - RNA, 20 nt, Human
gaagagaaggcggaggagua

SEQ ID NO: 360166 - RNA, 19 nt, Human
gcacggcccaggcgcacgc

SEQ ID NO: 360167 - RNA, 22 nt, Human
gcagggggcggcggccgcaggg

SEQ ID NO: 360168 - RNA, 21 nt, Human
gccgagaggcagggggcggcg

SEQ ID NO: 360169 - RNA, 21 nt, Human
gcugcaaaaauguuccugauu

SEQ ID NO: 360170 - RNA, 18 nt, Human
ggcagggagcagagccga

SEQ ID NO: 360171 - RNA, 22 nt, Human
ggccgcagggaggggggcgcgg

SEQ ID NO: 360172 - RNA, 23 nt, Human
gggcggccaaggaagagaaggcg

SEQ ID NO: 360173 - RNA, 19 nt, Human
gggcggcggccgcagggag

SEQ ID NO: 360174 - RNA, 18 nt, Human
uccaggaaucccuucgag

SEQ ID NO: 360175 - RNA, 18 nt, Human
uccuccuuaggcuuugca

SEQ ID NO: 360176 - RNA, 24 nt, Human
uccuuuaugcgcaaacaacuccag

SEQ ID NO: 360177 - RNA, 18 nt, Human
ugaaaguccaccauuccu

SEQ ID NO: 360178 - RNA, 23 nt, Human
ugcaaaggcgaaaaccggagucg

SEQ ID NO: 360179 - RNA, 23 nt, Human
ugcgcaaacaacuccagaaacaa

SEQ ID NO: 360180 - RNA, 23 nt, Human
aaaaggcaagacaagagagggua

SEQ ID NO: 360181 - RNA, 23 nt, Human
aaacaagaaccaacauagacagc

SEQ ID NO: 360182 - RNA, 18 nt, Human
aaaggaagaggaaagggg

SEQ ID NO: 360183 - RNA, 24 nt, Human
aaauaaaucccaaacaagaaccaa

SEQ ID NO: 360184 - RNA, 18 nt, Human
aagaaccaacauagacag

SEQ ID NO: 360185 - RNA, 18 nt, Human
aagacagggguacauacg

SEQ ID NO: 360186 - RNA, 18 nt, Human
aagcagaaaaaagaaaag

SEQ ID NO: 360187 - RNA, 22 nt, Human
aagcugacaccugcagcuccca

SEQ ID NO: 360188 - RNA, 19 nt, Human
aaggaagggaaaggaagag

SEQ ID NO: 360189 - RNA, 19 nt, Human
aaggagagaaugaacggug

SEQ ID NO: 360190 - RNA, 21 nt, Human
acacagaguacaagagacugg

SEQ ID NO: 360191 - RNA, 21 nt, Human
acaccgccacuccacgucccc

SEQ ID NO: 360192 - RNA, 23 nt, Human
agaaaaaagaaaagagaaggaag

SEQ ID NO: 360193 - RNA, 19 nt, Human
agacagaaagcagaaaaaa

SEQ ID NO: 360194 - RNA, 24 nt, Human
agacagaaagcagaaaaaagaaaa

SEQ ID NO: 360195 - RNA, 28 nt, Human
agacagaaagcagaaaaaaggggacccc

SEQ ID NO: 360196 - RNA, 19 nt, Human
agagagaaggaggaggggc

SEQ ID NO: 360197 - RNA, 23 nt, Human
agaggaaagggggaaaaggcaag

SEQ ID NO: 360198 - RNA, 23 nt, Human
agcaauacaaggagagggagaaa

SEQ ID NO: 360199 - RNA, 20 nt, Human
aggaagagcgcgguguggcg

SEQ ID NO: 360200 - RNA, 19 nt, Human
aggaagggaaaggaagagg

SEQ ID NO: 360201 - RNA, 24 nt, Human
aguacaagagacuggcaggagaga

SEQ ID NO: 360202 - RNA, 19 nt, Human
agucacagucccgggagga

SEQ ID NO: 360203 - RNA, 25 nt, Human
agucggcggcucggggggcgcgcuc

SEQ ID NO: 360204 - RNA, 21 nt, Human
cacgaagcuccgaaccccaac

SEQ ID NO: 360205 - RNA, 19 nt, Human
caggacacagaguacaaga

SEQ ID NO: 360206 - RNA, 23 nt, Human
ccaaacaagaaccaacauagaca

SEQ ID NO: 360207 - RNA, 18 nt, Human
cccaaacaagaaccaaca

SEQ ID NO: 360208 - RNA, 18 nt, Human
ccccaacggcccgcgcgc

SEQ ID NO: 360209 - RNA, 25 nt, Human
cccccuacuccgguaaagcgagggc

SEQ ID NO: 360210 - RNA, 21 nt, Human
ccccuggacaccgccacucca

SEQ ID NO: 360211 - RNA, 20 nt, Human
cccgcgcgcgcccucaccgg

SEQ ID NO: 360212 - RNA, 24 nt, Human
cccgcgcgcgcccucaccgggccg

SEQ ID NO: 360213 - RNA, 26 nt, Human
cccgcgcgcgcccucaccgggccgcg

SEQ ID NO: 360214 - RNA, 25 nt, Human
cccgggggccgcccggggcgccgcu

SEQ ID NO: 360215 - RNA, 24 nt, Human
cccuacccggcuguucuacccgcu

SEQ ID NO: 360216 - RNA, 22 nt, Human
cccucaccgggccgcgcggucc

SEQ ID NO: 360217 - RNA, 19 nt, Human
ccgcgggucccacgaagcu

SEQ ID NO: 360218 - RNA, 20 nt, Human
ccgcgggucccacgaagcuc

SEQ ID NO: 360219 - RNA, 25 nt, Human
ccuggacaccgccacuccacguccc

SEQ ID NO: 360220 - RNA, 19 nt, Human
ccugucuuuucucuccucu

SEQ ID NO: 360221 - RNA, 21 nt, Human
cggcucggggggcgcgcucag

SEQ ID NO: 360222 - RNA, 22 nt, Human
cgggagcgcuguagucacaguc

SEQ ID NO: 360223 - RNA, 19 nt, Human
cgggaggaagagcgcggug

SEQ ID NO: 360224 - RNA, 23 nt, Human
cgggaggaagagcgcgguguggc

SEQ ID NO: 360225 - RNA, 19 nt, Human
cgggccgagacgcgggcgg

SEQ ID NO: 360226 - RNA, 21 nt, Human
cgggggccgcccggggcgccg

SEQ ID NO: 360227 - RNA, 22 nt, Human
cguccgggccgagacgcgggcg

SEQ ID NO: 360228 - RNA, 20 nt, Human
cuaucugcccuacccggcug

SEQ ID NO: 360229 - RNA, 19 nt, Human
cuccgaaccccaacggccc

SEQ ID NO: 360230 - RNA, 20 nt, Human
cugcagcucccacugaccca

SEQ ID NO: 360231 - RNA, 20 nt, Human
cugcagcucccacugaccca

SEQ ID NO: 360232 - RNA, 20 nt, Human
gaaaaggcaagacaagagag

SEQ ID NO: 360233 - RNA, 23 nt, Human
gaaccccaacggcccgcgcgccu

SEQ ID NO: 360234 - RNA, 22 nt, Human
gaagaacauucacaugagggca

SEQ ID NO: 360235 - RNA, 21 nt, Human
gaagaggaaagggggaaaagg

SEQ ID NO: 360236 - RNA, 23 nt, Human
gacaccugcagcucccacugacc

SEQ ID NO: 360237 - RNA, 24 nt, Human
gagaaagacagaaagcagaaaaaa

SEQ ID NO: 360238 - RNA, 25 nt, Human
gagaaagacagggguacauacggag

SEQ ID NO: 360239 - RNA, 20 nt, Human
gcacuggcccccggugagcc

SEQ ID NO: 360240 - RNA, 22 nt, Human
gcccaagcccucgcccaagccc

SEQ ID NO: 360241 - RNA, 21 nt, Human
gcgcucagccgggagcgcugu

SEQ ID NO: 360242 - RNA, 23 nt, Human
gcgcugcccuuucucucucacuu

SEQ ID NO: 360243 - RNA, 25 nt, Human
ggaagggaaaggaagaggaaagggg

SEQ ID NO: 360244 - RNA, 25 nt, Human
ggaccaggacacagaguacaagaga

SEQ ID NO: 360245 - RNA, 18 nt, Human
ggagagagagaaugacag

SEQ ID NO: 360246 - RNA, 20 nt, Human
ggcaagucggcggcucgggg

SEQ ID NO: 360247 - RNA, 22 nt, Human
ggcagauagaccaccagucagg

SEQ ID NO: 360248 - RNA, 24 nt, Human
gggccguccgggccgagacgcggg

SEQ ID NO: 360249 - RNA, 19 nt, Human
ggggccgcaggggcggggc

SEQ ID NO: 360250 - RNA, 19 nt, Human
ggggccgcaggggcggggc

SEQ ID NO: 360251 - RNA, 23 nt, Human
uaaaauaaaagcagaaauauuuc

SEQ ID NO: 360252 - RNA, 18 nt, Human
uaaaucccaaacaagaag

SEQ ID NO: 360253 - RNA, 21 nt, Human
uaacuuguugaaaauaaaucc

SEQ ID NO: 360254 - RNA, 23 nt, Human
uacaaggagagggagaaagacag

SEQ ID NO: 360255 - RNA, 19 nt, Human
uaccugguggggccgcagg

SEQ ID NO: 360256 - RNA, 23 nt, Human
uaccugguggggccgcaggggcg

SEQ ID NO: 360257 - RNA, 22 nt, Human
uacuagacgaaaagcugacacc

SEQ ID NO: 360258 - RNA, 18 nt, Human
uagacgaaaagcugacac

SEQ ID NO: 360259 - RNA, 19 nt, Human
ucacugccguacguccccg

SEQ ID NO: 360260 - RNA, 20 nt, Human
ucaggaggagaaagacaggg

SEQ ID NO: 360261 - RNA, 23 nt, Human
ucaguaccugguggggccgcagg

SEQ ID NO: 360262 - RNA, 24 nt, Human
ucaguaccugguggggccgcaggg

SEQ ID NO: 360263 - RNA, 19 nt, Human
ucagucuccagccccaaaa

SEQ ID NO: 360264 - RNA, 25 nt, Human
uccccgcgccggccgcgggucccac

SEQ ID NO: 360265 - RNA, 24 nt, Human
uccgggccgagacgcgggcggggc

SEQ ID NO: 360266 - RNA, 23 nt, Human
ucucccacccccuacuccgguaa

SEQ ID NO: 360267 - RNA, 18 nt, Human
ucuccucuucccucuccc

SEQ ID NO: 360268 - RNA, 18 nt, Human
ucucuccucuucccucuc

SEQ ID NO: 360269 - RNA, 24 nt, Human
ugaaaauaaaucccaaacaagaac

SEQ ID NO: 360270 - RNA, 18 nt, Human
ugccggcugcguccccgc

SEQ ID NO: 360271 - RNA, 18 nt, Human
uggcccccggugagcccc

SEQ ID NO: 360272 - RNA, 20 nt, Human
uggcccccuggcccggcacu

SEQ ID NO: 360273 - RNA, 23 nt, Human
uggcccggcacuggcccccgguc

SEQ ID NO: 360274 - RNA, 19 nt, Human
ugggagcuuccucgccggg

SEQ ID NO: 360275 - RNA, 19 nt, Human
ugggcgagggaaaaggccu

SEQ ID NO: 360276 - RNA, 18 nt, Human
ugguggggccgcaggggc

SEQ ID NO: 360277 - RNA, 26 nt, Human
uuucucuccucuucccucucccaccc

SEQ ID NO: 360278 - RNA, 21 nt, Human
uuuuuuuuuuuuuuuuuauuu

SEQ ID NO: 360279 - RNA, 20 nt, Human
aagagagaggggaggaagag

SEQ ID NO: 360280 - RNA, 24 nt, Human
aaggaggggggagcaggaggagga

SEQ ID NO: 360281 - RNA, 19 nt, Human
acaacagccucauaauauc

SEQ ID NO: 360282 - RNA, 19 nt, Human
acacacacacacccgcgca

SEQ ID NO: 360283 - RNA, 19 nt, Human
acacauccacacacacaca

SEQ ID NO: 360284 - RNA, 20 nt, Human
agaaggaaaggaggggggag

SEQ ID NO: 360285 - RNA, 23 nt, Human
agaaggaaaggaggggggagcag

SEQ ID NO: 360286 - RNA, 25 nt, Human
agaaggaaaggaggggggagcagga

SEQ ID NO: 360287 - RNA, 22 nt, Human
agaaggaagaggaggaagagga

SEQ ID NO: 360288 - RNA, 19 nt, Human
agagagggagguaggagag

SEQ ID NO: 360289 - RNA, 20 nt, Human
agagagggagguaggagagc

SEQ ID NO: 360290 - RNA, 18 nt, Human
agagaggggaggaagagg

SEQ ID NO: 360291 - RNA, 19 nt, Human
agagaggggaggaagagga

SEQ ID NO: 360292 - RNA, 18 nt, Human
agaggaggaagaggagga

SEQ ID NO: 360293 - RNA, 22 nt, Human
agaggaggaagaggaggagggc

SEQ ID NO: 360294 - RNA, 22 nt, Human
agaggaggagggcuaggaggcg

SEQ ID NO: 360295 - RNA, 25 nt, Human
agagggagagaggagagggagagcc

SEQ ID NO: 360296 - RNA, 18 nt, Human
agagggaggagggcggcc

SEQ ID NO: 360297 - RNA, 20 nt, Human
agaggggggaggaggagaag

SEQ ID NO: 360298 - RNA, 19 nt, Human
aggaaaggaggggggagca

SEQ ID NO: 360299 - RNA, 21 nt, Human
aggaagagagaggggaggaag

SEQ ID NO: 360300 - RNA, 18 nt, Human
aggaagaggaggaagagg

SEQ ID NO: 360301 - RNA, 19 nt, Human
aggaagaggaggaagagga

SEQ ID NO: 360302 - RNA, 24 nt, Human
aggaggaagaggaggagggcuagg

SEQ ID NO: 360303 - RNA, 22 nt, Human
aggaggagaaggaaaggagggg

SEQ ID NO: 360304 - RNA, 19 nt, Human
aggaggagaaggaagagga

SEQ ID NO: 360305 - RNA, 18 nt, Human
aggaggaggagggagagg

SEQ ID NO: 360306 - RNA, 19 nt, Human
aggaggagggagaggagga

SEQ ID NO: 360307 - RNA, 22 nt, Human
aggagggagaggagagggggga

SEQ ID NO: 360308 - RNA, 22 nt, Human
aggcggaggggaaggagugggg

SEQ ID NO: 360309 - RNA, 24 nt, Human
agggagaggaggaagggcguaagg

SEQ ID NO: 360310 - RNA, 20 nt, Human
aggggggagcaggaggagga

SEQ ID NO: 360311 - RNA, 24 nt, Human
auccacacacacacacacccgcgc

SEQ ID NO: 360312 - RNA, 19 nt, Human
aucuuuguauagucgacuc

SEQ ID NO: 360313 - RNA, 20 nt, Human
augcagguggggugccgggu

SEQ ID NO: 360314 - RNA, 26 nt, Human
cacacacacacacacccgcgcagcca

SEQ ID NO: 360315 - RNA, 25 nt, Human
cacacacacacacccgcgcagccac

SEQ ID NO: 360316 - RNA, 19 nt, Human
cacccacaccccacacaca

SEQ ID NO: 360317 - RNA, 23 nt, Human
cacccacaccccacacacaucca

SEQ ID NO: 360318 - RNA, 20 nt, Human
caccccacacacauccacac

SEQ ID NO: 360319 - RNA, 26 nt, Human
caccgcaaucgcccuaaugacaacag

SEQ ID NO: 360320 - RNA, 29 nt, Human
cagggagaggaagagagaggggaggaagg

SEQ ID NO: 360321 - RNA, 20 nt, Human
cauccacacacacacacacc

SEQ ID NO: 360322 - RNA, 21 nt, Human
cauugcccucuuguccucgug

SEQ ID NO: 360323 - RNA, 21 nt, Human
ccacacacauccacacacaca

SEQ ID NO: 360324 - RNA, 28 nt, Human
ccacacacauccacacacacacacaccc

SEQ ID NO: 360325 - RNA, 27 nt, Human
ccacaccccacacacauccacacacac

SEQ ID NO: 360326 - RNA, 24 nt, Human
cccacacacauccacacacacaca

SEQ ID NO: 360327 - RNA, 26 nt, Human
cccacacacauccacacacacacaca

SEQ ID NO: 360328 - RNA, 22 nt, Human
cccagauacaaauaaaucguca

SEQ ID NO: 360329 - RNA, 23 nt, Human
ccuagaaaguauacaauugucac

SEQ ID NO: 360330 - RNA, 21 nt, Human
ccuuugggguggccguagugg

SEQ ID NO: 360331 - RNA, 18 nt, Human
cggaacggagacggcgac

SEQ ID NO: 360332 - RNA, 21 nt, Human
cggcccggugcgcgcgcgcag

SEQ ID NO: 360333 - RNA, 18 nt, Human
gagaaggaagaggaggaa

SEQ ID NO: 360334 - RNA, 20 nt, Human
gagagggagagaggagaggg

SEQ ID NO: 360335 - RNA, 19 nt, Human
gagagggaggagggcggcc

SEQ ID NO: 360336 - RNA, 19 nt, Human
gaggaagaggaggagggcu

SEQ ID NO: 360337 - RNA, 18 nt, Human
gaggagggagaggagagg

SEQ ID NO: 360338 - RNA, 21 nt, Human
gaggagggagaggaggaaggg

SEQ ID NO: 360339 - RNA, 18 nt, Human
gaggaggggaaggagagg

SEQ ID NO: 360340 - RNA, 19 nt, Human
gagggagaggaggaagggc

SEQ ID NO: 360341 - RNA, 18 nt, Human
gaggggaaggagagggag

SEQ ID NO: 360342 - RNA, 18 nt, Human
gagguaggagagcggccc

SEQ ID NO: 360343 - RNA, 20 nt, Human
gcagagagagaacccgagac

SEQ ID NO: 360344 - RNA, 19 nt, Human
ggaaaggaggggggagcag

SEQ ID NO: 360345 - RNA, 23 nt, Human
ggaaaggaggggggagcaggagg

SEQ ID NO: 360346 - RNA, 18 nt, Human
ggaaggagagggaggagg

SEQ ID NO: 360347 - RNA, 20 nt, Human
ggagaaaauucagggagagg

SEQ ID NO: 360348 - RNA, 18 nt, Human
ggagaaggaaaggagggg

SEQ ID NO: 360349 - RNA, 18 nt, Human
ggagaaggaagaggagga

SEQ ID NO: 360350 - RNA, 21 nt, Human
ggagagccaaccaccgccgag

SEQ ID NO: 360351 - RNA, 24 nt, Human
ggagaggaagagagaggggaggaa

SEQ ID NO: 360352 - RNA, 24 nt, Human
ggagaggaagagagaggggaggaa

SEQ ID NO: 360353 - RNA, 22 nt, Human
ggagaggagaggggggaggaga

SEQ ID NO: 360354 - RNA, 24 nt, Human
ggagaggagaggggggaggaggaa

SEQ ID NO: 360355 - RNA, 21 nt, Human
ggagagggagagaggagaggg

SEQ ID NO: 360356 - RNA, 23 nt, Human
ggagagggaggagggcggccuug

SEQ ID NO: 360357 - RNA, 25 nt, Human
ggagaggggggaggaggagaaggaa

SEQ ID NO: 360358 - RNA, 21 nt, Human
ggaggaggagggagaggagga

SEQ ID NO: 360359 - RNA, 20 nt, Human
ggaggagggagaggagaggg

SEQ ID NO: 360360 - RNA, 30 nt, Human
ggaggggaaggagugggggaggaggggaaa

SEQ ID NO: 360361 - RNA, 21 nt, Human
ggaggggggagcaggaggagg

SEQ ID NO: 360362 - RNA, 24 nt, Human
ggcgaugaggaccaggaggaggga

SEQ ID NO: 360363 - RNA, 20 nt, Human
gggaaggagagggaggaggg

SEQ ID NO: 360364 - RNA, 20 nt, Human
gggagaggagaggggggagg

SEQ ID NO: 360365 - RNA, 20 nt, Human
gggaggaggggaaggagagg

SEQ ID NO: 360366 - RNA, 20 nt, Human
ggggaaggagagggaggagg

SEQ ID NO: 360367 - RNA, 23 nt, Human
ggggaggaggagaaggaaaggag

SEQ ID NO: 360368 - RNA, 18 nt, Human
ggggaggaggggaaggag

SEQ ID NO: 360369 - RNA, 22 nt, Human
ggggaggaggggaaggagaggg

SEQ ID NO: 360370 - RNA, 23 nt, Human
gggggagcaggaggaggagggag

SEQ ID NO: 360371 - RNA, 28 nt, Human
gggggaggaggagaaggaaaggaggggg

SEQ ID NO: 360372 - RNA, 23 nt, Human
gggggaggaggggaaggagaggg

SEQ ID NO: 360373 - RNA, 24 nt, Human
gucaugcagguggggugccggguc

SEQ ID NO: 360374 - RNA, 19 nt, Human
gugguggugauugaucuuu

SEQ ID NO: 360375 - RNA, 20 nt, Human
guguguguggacuuguaugu

SEQ ID NO: 360376 - RNA, 19 nt, Human
guuuuuuauauauuuuugg

SEQ ID NO: 360377 - RNA, 24 nt, Human
uaacuagagagaauauuuucccag

SEQ ID NO: 360378 - RNA, 27 nt, Human
uaagggacacccacaccccacacacau

SEQ ID NO: 360379 - RNA, 19 nt, Human
uaaugacaacagccucaua

SEQ ID NO: 360380 - RNA, 19 nt, Human
uccacacacacacacaccc

SEQ ID NO: 360381 - RNA, 30 nt, Human
uccacacacacacacacccgcgcagccaca

SEQ ID NO: 360382 - RNA, 20 nt, Human
ucuguucaugcucauugccc

SEQ ID NO: 360383 - RNA, 22 nt, Human
ugauaguuugcgguuaauuugu

SEQ ID NO: 360384 - RNA, 23 nt, Human
ugauuucgguuuguucugggggg

SEQ ID NO: 360385 - RNA, 24 nt, Human
ugcucauugcccucuuguccucgu

SEQ ID NO: 360386 - RNA, 19 nt, Human
uggcuggggugggagugug

SEQ ID NO: 360387 - RNA, 21 nt, Human
ugggaguguguguggacuugu

SEQ ID NO: 360388 - RNA, 21 nt, Human
uggggauggaggaggagaagg

SEQ ID NO: 360389 - RNA, 19 nt, Human
ugggggaggaggggaagga

SEQ ID NO: 360390 - RNA, 19 nt, Human
ugguagauggugguugggg

SEQ ID NO: 360391 - RNA, 22 nt, Human
uggugguuggggguuguugaua

SEQ ID NO: 360392 - RNA, 20 nt, Human
uguguggacuuguaugugug

SEQ ID NO: 360393 - RNA, 24 nt, Human
uucccagauacaaauaaaucguca

SEQ ID NO: 360394 - RNA, 23 nt, Human
uuggcuggggugggagugugugu

SEQ ID NO: 360395 - RNA, 24 nt, Human
uuuuuggcuggggugggagugugu

SEQ ID NO: 360396 - RNA, 20 nt, Human
aaacggcaacccgagcccgc

SEQ ID NO: 360397 - RNA, 20 nt, Human
aacccgagcccgcggguccc

SEQ ID NO: 360398 - RNA, 23 nt, Human
aagcaagaagaacguggugcugg

SEQ ID NO: 360399 - RNA, 19 nt, Human
acagaacccaucaccacca

SEQ ID NO: 360400 - RNA, 25 nt, Human
agcccggagcgggacacgcagcagg

SEQ ID NO: 360401 - RNA, 20 nt, Human
aggaaaaagcaaagcaagaa

SEQ ID NO: 360402 - RNA, 22 nt, Human
aggaaaaagcaaagcaagaaga

SEQ ID NO: 360403 - RNA, 23 nt, Human
cacacagaacccaucaccaccag

SEQ ID NO: 360404 - RNA, 20 nt, Human
cacagaacccaucaccacca

SEQ ID NO: 360405 - RNA, 29 nt, Human
caucuucuuccccucuuucauuuuguuuu

SEQ ID NO: 360406 - RNA, 21 nt, Human
ccaaagggcgccagugaagcc

SEQ ID NO: 360407 - RNA, 24 nt, Human
cccaagcuacagagaaaccuacca

SEQ ID NO: 360408 - RNA, 22 nt, Human
cccguggucgcggccaaagggc

SEQ ID NO: 360409 - RNA, 25 nt, Human
ccgagcccgcgggucccuggucacc

SEQ ID NO: 360410 - RNA, 21 nt, Human
ccguggucgcggccaaagggc

SEQ ID NO: 360411 - RNA, 22 nt, Human
cgagggcacugagcccggagcg

SEQ ID NO: 360412 - RNA, 22 nt, Human
cgccagugaagccaggccggcc

SEQ ID NO: 360413 - RNA, 18 nt, Human
cuccacacagaacccauc

SEQ ID NO: 360414 - RNA, 21 nt, Human
cuccacacagaacccaucacc

SEQ ID NO: 360415 - RNA, 24 nt, Human
cucucaucuucuuccccucuuuca

SEQ ID NO: 360416 - RNA, 20 nt, Human
cuuccccucuuucauuuugu

SEQ ID NO: 360417 - RNA, 19 nt, Human
gggucccuggucaccuggc

SEQ ID NO: 360418 - RNA, 21 nt, Human
gugccggcggcggcgagggca

SEQ ID NO: 360419 - RNA, 20 nt, Human
uaauuaagaagguugcccac

SEQ ID NO: 360420 - RNA, 18 nt, Human
ucaccuggcuucucuggc

SEQ ID NO: 360421 - RNA, 22 nt, Human
uccccaagcuacagagaaaccu

SEQ ID NO: 360422 - RNA, 21 nt, Human
ucucaucuucuuccccucuuu

SEQ ID NO: 360423 - RNA, 25 nt, Human
ucucaucuucuuccccucuuucauu

SEQ ID NO: 360424 - RNA, 25 nt, Human
ucucucaucuucuuccccucuuuca

SEQ ID NO: 360425 - RNA, 23 nt, Human
ugcugggucaggccucaccgcug

SEQ ID NO: 360426 - RNA, 18 nt, Human
uucauuuuguuuuucucg

SEQ ID NO: 360427 - RNA, 20 nt, Human
aagacagauaucuugggggu

SEQ ID NO: 360428 - RNA, 18 nt, Human
aagcagaggaccagcagg

SEQ ID NO: 360429 - RNA, 18 nt, Human
agaaaaaccccugcuguc

SEQ ID NO: 360430 - RNA, 19 nt, Human
agaauguuccagcaagcag

SEQ ID NO: 360431 - RNA, 21 nt, Human
agaccuggguccuugucgcug

SEQ ID NO: 360432 - RNA, 23 nt, Human
agaugcuggaaggcacagaacga

SEQ ID NO: 360433 - RNA, 24 nt, Human
agcugcaccgcccagccgcgcccc

SEQ ID NO: 360434 - RNA, 22 nt, Human
aggcggcacgugugcccggagg

SEQ ID NO: 360435 - RNA, 22 nt, Human
augaacgaacaaaaaaaaagaa

SEQ ID NO: 360436 - RNA, 22 nt, Human
augcugcagccucagucccaaa

SEQ ID NO: 360437 - RNA, 23 nt, Human
cacccccacuccguugcgggucu

SEQ ID NO: 360438 - RNA, 21 nt, Human
caccgcccagccgcgcccccc

SEQ ID NO: 360439 - RNA, 22 nt, Human
cacugucccugcucucccuggc

SEQ ID NO: 360440 - RNA, 19 nt, Human
cagcagcaggaagaccugg

SEQ ID NO: 360441 - RNA, 24 nt, Human
cagucccaaaaugaagggagcgac

SEQ ID NO: 360442 - RNA, 23 nt, Human
ccagccgcgccccccugcacccg

SEQ ID NO: 360443 - RNA, 24 nt, Human
cccccccggcccccgccgccgccc

SEQ ID NO: 360444 - RNA, 19 nt, Human
cccccccggcccccgccuc

SEQ ID NO: 360445 - RNA, 22 nt, Human
cccccggcccccgccgccgccc

SEQ ID NO: 360446 - RNA, 21 nt, Human
ccccggcccccgccgccgccc

SEQ ID NO: 360447 - RNA, 24 nt, Human
ccccugcuguccucacgcagccgc

SEQ ID NO: 360448 - RNA, 25 nt, Human
cccggucaggcggcacgugugcccg

SEQ ID NO: 360449 - RNA, 22 nt, Human
cccugcuguccucacgcagccg

SEQ ID NO: 360450 - RNA, 23 nt, Human
ccgccagccacggucaccacccg

SEQ ID NO: 360451 - RNA, 19 nt, Human
ccgcgcgcccgggcccccc

SEQ ID NO: 360452 - RNA, 22 nt, Human
cgaacaaaaaaaaagaaagaaa

SEQ ID NO: 360453 - RNA, 18 nt, Human
cgcccgggcccccccggc

SEQ ID NO: 360454 - RNA, 19 nt, Human
cggcggcgcugcggcggca

SEQ ID NO: 360455 - RNA, 23 nt, Human
cggcuuacucacuugaacuuggc

SEQ ID NO: 360456 - RNA, 19 nt, Human
cucagucccaaaaugaagg

SEQ ID NO: 360457 - RNA, 20 nt, Human
cucagucccaaaaugaaggg

SEQ ID NO: 360458 - RNA, 24 nt, Human
cuggaaggcacagaacgacccccg

SEQ ID NO: 360459 - RNA, 18 nt, Human
gcccgggcccccccggcc

SEQ ID NO: 360460 - RNA, 19 nt, Human
gcccgggcccccccggccc

SEQ ID NO: 360461 - RNA, 21 nt, Human
gcggcaguaaggcgggcagug

SEQ ID NO: 360462 - RNA, 21 nt, Human
gcgggcgggguaggcggcagu

SEQ ID NO: 360463 - RNA, 23 nt, Human
gcugagggcgugaccgccagcca

SEQ ID NO: 360464 - RNA, 19 nt, Human
gcuggcaucgacggcggcg

SEQ ID NO: 360465 - RNA, 20 nt, Human
ggaccagcaggccgccgagc

SEQ ID NO: 360466 - RNA, 25 nt, Human
ggcaguguucgagcucauggcagcc

SEQ ID NO: 360467 - RNA, 18 nt, Human
ggggaauagaaagagaag

SEQ ID NO: 360468 - RNA, 18 nt, Human
ggggcggagccgggcgga

SEQ ID NO: 360469 - RNA, 25 nt, Human
ggguaggcggcaguaaggcgggcaa

SEQ ID NO: 360470 - RNA, 23 nt, Human
guggcgggcgggguaggcggcag

SEQ ID NO: 360471 - RNA, 23 nt, Human
uaaaaaccucaguucacugggga

SEQ ID NO: 360472 - RNA, 25 nt, Human
uaaaaaccucaguucacuggggaau

SEQ ID NO: 360473 - RNA, 20 nt, Human
uaaggcgggcaguguucgag

SEQ ID NO: 360474 - RNA, 21 nt, Human
uacaagaugcuggaaggcaca

SEQ ID NO: 360475 - RNA, 21 nt, Human
uagaaaauuuugcaguggguu

SEQ ID NO: 360476 - RNA, 27 nt, Human
uaggcggcaguaaggcgggcaguguuc

SEQ ID NO: 360477 - RNA, 18 nt, Human
ucagucccaaaaugaagg

SEQ ID NO: 360478 - RNA, 19 nt, Human
ucagucccaaaaugaaggg

SEQ ID NO: 360479 - RNA, 18 nt, Human
ucccaaaaugaagggagc

SEQ ID NO: 360480 - RNA, 22 nt, Human
uccccggguggggagggugggg

SEQ ID NO: 360481 - RNA, 23 nt, Human
uccccucagcuccggggcagcuc

SEQ ID NO: 360482 - RNA, 25 nt, Human
uccccucagcuccggggcagcuccc

SEQ ID NO: 360483 - RNA, 22 nt, Human
ucccgcgcgcccgggccccccc

SEQ ID NO: 360484 - RNA, 19 nt, Human
ucgugguggaggagcgugg

SEQ ID NO: 360485 - RNA, 19 nt, Human
ucuuggggguaaaaagaca

SEQ ID NO: 360486 - RNA, 26 nt, Human
ucuuuuguuccaaugcugcagccuca

SEQ ID NO: 360487 - RNA, 21 nt, Human
ugaaaagggucgcccggucag

SEQ ID NO: 360488 - RNA, 21 nt, Human
ugaagacagauaucuuggggg

SEQ ID NO: 360489 - RNA, 20 nt, Human
ugagcugugauggcuucccc

SEQ ID NO: 360490 - RNA, 20 nt, Human
ugcagaggagccgaagaccg

SEQ ID NO: 360491 - RNA, 18 nt, Human
ugcccggagggcugaggg

SEQ ID NO: 360492 - RNA, 19 nt, Human
ugcggcggcaggcacggaa

SEQ ID NO: 360493 - RNA, 21 nt, Human
uggcagcagcaggaagaccug

SEQ ID NO: 360494 - RNA, 18 nt, Human
ugggggacgcggcuuacu

SEQ ID NO: 360495 - RNA, 28 nt, Human
ugucgcugaaaaaauagacucugaagaa

SEQ ID NO: 360496 - RNA, 19 nt, Human
ugugcugugugggcugcag

SEQ ID NO: 360497 - RNA, 18 nt, Human
ugugugggcugcaggggc

SEQ ID NO: 360498 - RNA, 26 nt, Human
uguguugauuuucugaauuucaaguc

SEQ ID NO: 360499 - RNA, 22 nt, Human
accuggaccgguggaaggccgg

SEQ ID NO: 360500 - RNA, 24 nt, Human
agccacagcagcugccuggcagcc

SEQ ID NO: 360501 - RNA, 19 nt, Human
caacuuccgguacagcccc

SEQ ID NO: 360502 - RNA, 19 nt, Human
cagcccggaagugcggcaa

SEQ ID NO: 360503 - RNA, 22 nt, Human
ccccggaacgggcggaaguaga

SEQ ID NO: 360504 - RNA, 20 nt, Human
cccucggguaaggcccucug

SEQ ID NO: 360505 - RNA, 20 nt, Human
cccucugcuucucacucuuc

SEQ ID NO: 360506 - RNA, 21 nt, Human
cggccggagaccguggggccc

SEQ ID NO: 360507 - RNA, 23 nt, Human
gccgcccccucggguaaggcccu

SEQ ID NO: 360508 - RNA, 19 nt, Human
gccguuucucuguucuucc

SEQ ID NO: 360509 - RNA, 20 nt, Human
gccuggggccgccuugguua

SEQ ID NO: 360510 - RNA, 21 nt, Human
gcgcggccggagaccgugggg

SEQ ID NO: 360511 - RNA, 18 nt, Human
gcgcgggcgcggccggag

SEQ ID NO: 360512 - RNA, 18 nt, Human
gcggccagcgcgggcgcg

SEQ ID NO: 360513 - RNA, 22 nt, Human
gcugcggaggggcagaccugga

SEQ ID NO: 360514 - RNA, 19 nt, Human
ggcggaaguagaggcaacu

SEQ ID NO: 360515 - RNA, 21 nt, Human
gggcagaccuggaccggugga

SEQ ID NO: 360516 - RNA, 18 nt, Human
ggggcccccgguugccgc

SEQ ID NO: 360517 - RNA, 21 nt, Human
guagaggcaacuuccgguaca

SEQ ID NO: 360518 - RNA, 20 nt, Human
gucaucguugugagcccgcu

SEQ ID NO: 360519 - RNA, 25 nt, Human
gugagcccgcuaucagcggccagcg

SEQ ID NO: 360520 - RNA, 18 nt, Human
ucuuugcguugcucugcg

SEQ ID NO: 360521 - RNA, 18 nt, Human
ugagcccgcuaucagcgg

SEQ ID NO: 360522 - RNA, 18 nt, Human
uggagccacagcagcugc

SEQ ID NO: 360523 - RNA, 24 nt, Human
uuucucauagccguuucucuguuc

SEQ ID NO: 360524 - RNA, 21 nt, Human
uuuuuuuuuuugugcuuugcu

SEQ ID NO: 360525 - RNA, 18 nt, Human
uuuuuuuuuuuuuuuuug

SEQ ID NO: 360526 - RNA, 23 nt, Human
uuuuuuuuuuuuuuuuugugcuu

SEQ ID NO: 360527 - RNA, 25 nt, Human
agaauaaaacuagcuaaguacucca

SEQ ID NO: 360528 - RNA, 19 nt, Human
agccagacccgcuaagccu

SEQ ID NO: 360529 - RNA, 19 nt, Human
agccagacccgcuaagccu

SEQ ID NO: 360530 - RNA, 19 nt, Human
aggcaaagggaaaaccaag

SEQ ID NO: 360531 - RNA, 18 nt, Human
cagccagacccgcuaagc

SEQ ID NO: 360532 - RNA, 18 nt, Human
cagccagacccgcuaagc

SEQ ID NO: 360533 - RNA, 19 nt, Human
cccccagcagccagacccg

SEQ ID NO: 360534 - RNA, 19 nt, Human
cccccagcagccagacccg

SEQ ID NO: 360535 - RNA, 18 nt, Human
cgcaaggcucuacagccc

SEQ ID NO: 360536 - RNA, 20 nt, Human
cuaaagaagagacaccaucc

SEQ ID NO: 360537 - RNA, 21 nt, Human
cucgggcccccagcagccaga

SEQ ID NO: 360538 - RNA, 21 nt, Human
cucgggcccccagcagccaga

SEQ ID NO: 360539 - RNA, 19 nt, Human
gcagagcugcucgccuccc

SEQ ID NO: 360540 - RNA, 21 nt, Human
gcgcaaggcucuacagcccgg

SEQ ID NO: 360541 - RNA, 22 nt, Human
ggcgcgcggcggcuccgagcgu

SEQ ID NO: 360542 - RNA, 22 nt, Human
ggcgcgcggcggcuccgagcgu

SEQ ID NO: 360543 - RNA, 20 nt, Human
ggcuuccugccuauuuuccc

SEQ ID NO: 360544 - RNA, 22 nt, Human
gggcuuccugccuauuuucccu

SEQ ID NO: 360545 - RNA, 24 nt, Human
uaacugcagagcugcucgccuccc

SEQ ID NO: 360546 - RNA, 21 nt, Human
ugcagaaugaaggcaaaggga

SEQ ID NO: 360547 - RNA, 21 nt, Human
uuuuuaguuuaagcacucauu

SEQ ID NO: 360548 - RNA, 21 nt, Human
aaaaaucccucugggugcucc

SEQ ID NO: 360549 - RNA, 22 nt, Human
aaaaucccucugggugcucccc

SEQ ID NO: 360550 - RNA, 20 nt, Human
aaacccagaccuucugccag

SEQ ID NO: 360551 - RNA, 21 nt, Human
aaauacaugauuuagcaaagu

SEQ ID NO: 360552 - RNA, 21 nt, Human
aagccauggcugcagacauca

SEQ ID NO: 360553 - RNA, 22 nt, Human
acaacggaaaacaacacauaag

SEQ ID NO: 360554 - RNA, 19 nt, Human
acacauaccaguagcacga

SEQ ID NO: 360555 - RNA, 23 nt, Human
acucugaagagcagcuggaaaau

SEQ ID NO: 360556 - RNA, 23 nt, Human
agacagggagagauacugcaagc

SEQ ID NO: 360557 - RNA, 23 nt, Human
agagaggaaagcauaccagaagu

SEQ ID NO: 360558 - RNA, 22 nt, Human
agagcaguccuggugcccuuuc

SEQ ID NO: 360559 - RNA, 21 nt, Human
agcagcuggaaaaugagcucc

SEQ ID NO: 360560 - RNA, 21 nt, Human
agccauggcugcagacaucag

SEQ ID NO: 360561 - RNA, 22 nt, Human
auacugcaagcauguuccccuc

SEQ ID NO: 360562 - RNA, 20 nt, Human
aucuuuuuuuuuuuuuugga

SEQ ID NO: 360563 - RNA, 19 nt, Human
augcugggcuuuuccaagc

SEQ ID NO: 360564 - RNA, 24 nt, Human
auggcugcagacaucagggaagcu

SEQ ID NO: 360565 - RNA, 22 nt, Human
augugugcauacauacaugcug

SEQ ID NO: 360566 - RNA, 19 nt, Human
cagaggacuuaaugcaaug

SEQ ID NO: 360567 - RNA, 21 nt, Human
caggaucccuuugaaacaggg

SEQ ID NO: 360568 - RNA, 22 nt, Human
cagggcacccaucugcaaaccc

SEQ ID NO: 360569 - RNA, 20 nt, Human
caugacaucauuaauccacu

SEQ ID NO: 360570 - RNA, 24 nt, Human
cauucagggcacccaucugcaaac

SEQ ID NO: 360571 - RNA, 21 nt, Human
cccaaauguuccaaucacauu

SEQ ID NO: 360572 - RNA, 25 nt, Human
cccacacacacaaugugugcauaca

SEQ ID NO: 360573 - RNA, 21 nt, Human
ccccuccuuccccaggauccc

SEQ ID NO: 360574 - RNA, 18 nt, Human
cccucugcagaaccaggg

SEQ ID NO: 360575 - RNA, 20 nt, Human
cccucugcagaaccagggag

SEQ ID NO: 360576 - RNA, 19 nt, Human
ccucugcagaaccagggag

SEQ ID NO: 360577 - RNA, 25 nt, Human
cgcugcaaagccauggcugcagaca

SEQ ID NO: 360578 - RNA, 23 nt, Human
cgguuggggaaaccacagauguc

SEQ ID NO: 360579 - RNA, 22 nt, Human
cuauacauuguguuuucucccu

SEQ ID NO: 360580 - RNA, 20 nt, Human
cucauucuucuggcccucug

SEQ ID NO: 360581 - RNA, 18 nt, Human
cuggacagguccaguucc

SEQ ID NO: 360582 - RNA, 21 nt, Human
cuggacagguccaguuccuug

SEQ ID NO: 360583 - RNA, 21 nt, Human
gaaguucucuccaaugaccuu

SEQ ID NO: 360584 - RNA, 26 nt, Human
gagaagaugcgaauuugagucuccau

SEQ ID NO: 360585 - RNA, 19 nt, Human
gagagcaguccuggugccc

SEQ ID NO: 360586 - RNA, 22 nt, Human
gagaggaaagcauaccagaagu

SEQ ID NO: 360587 - RNA, 18 nt, Human
gcaguucuagucucgccu

SEQ ID NO: 360588 - RNA, 20 nt, Human
gcgggaagucaauguccaca

SEQ ID NO: 360589 - RNA, 21 nt, Human
ggaaagcauaccagaaguccc

SEQ ID NO: 360590 - RNA, 22 nt, Human
gggcugguuccuuugaaauagc

SEQ ID NO: 360591 - RNA, 19 nt, Human
ggguuaggacuuagcaucu

SEQ ID NO: 360592 - RNA, 18 nt, Human
guuuccucucccucucag

SEQ ID NO: 360593 - RNA, 24 nt, Human
uaccagaagucccuauggauuagu

SEQ ID NO: 360594 - RNA, 21 nt, Human
uagcaucuuuuuuuuuuuuuu

SEQ ID NO: 360595 - RNA, 23 nt, Human
uaggacuuagcaucuuuuuuuuu

SEQ ID NO: 360596 - RNA, 19 nt, Human
ucacaacggaaaacaacac

SEQ ID NO: 360597 - RNA, 23 nt, Human
ucagggcacccaucugcaaaccc

SEQ ID NO: 360598 - RNA, 20 nt, Human
uccauguggcuucucuuggc

SEQ ID NO: 360599 - RNA, 18 nt, Human
ucccagagaaguucuguu

SEQ ID NO: 360600 - RNA, 25 nt, Human
ucccaggcaauaguuggaacuucug

SEQ ID NO: 360601 - RNA, 19 nt, Human
ucccagggaucagggaacc

SEQ ID NO: 360602 - RNA, 21 nt, Human
ucccucugggugcuccccaaa

SEQ ID NO: 360603 - RNA, 20 nt, Human
uccucauauggaugccagac

SEQ ID NO: 360604 - RNA, 24 nt, Human
ucuccauguggcuucucuuggcuu

SEQ ID NO: 360605 - RNA, 23 nt, Human
ucugcaaacccagaccuucugcc

SEQ ID NO: 360606 - RNA, 19 nt, Human
ucugcagaaccagggaggc

SEQ ID NO: 360607 - RNA, 19 nt, Human
ucuuaaaauuaugcaugac

SEQ ID NO: 360608 - RNA, 22 nt, Human
ugaaacagggaaacaugaguca

SEQ ID NO: 360609 - RNA, 18 nt, Human
ugacaucauuaauccacu

SEQ ID NO: 360610 - RNA, 20 nt, Human
ugaggcucccagggaucagg

SEQ ID NO: 360611 - RNA, 23 nt, Human
ugagugucccucaccugucucua

SEQ ID NO: 360612 - RNA, 23 nt, Human
ugauccaauguuuugugaugcca

SEQ ID NO: 360613 - RNA, 25 nt, Human
ugcacauacacauaccaguagcacg

SEQ ID NO: 360614 - RNA, 19 nt, Human
ugcagaaccagggaggcca

SEQ ID NO: 360615 - RNA, 19 nt, Human
ugccaggacacagcuuuug

SEQ ID NO: 360616 - RNA, 19 nt, Human
uggagcugagcauuuuucc

SEQ ID NO: 360617 - RNA, 21 nt, Human
uggaguguaacugucuggaca

SEQ ID NO: 360618 - RNA, 18 nt, Human
ugucuccuuguauaaaca

SEQ ID NO: 360619 - RNA, 20 nt, Human
uguguaacugcacauacaca

SEQ ID NO: 360620 - RNA, 19 nt, Human
ugugugcauacauacaugc

SEQ ID NO: 360621 - RNA, 27 nt, Human
ugugugcauacauacaugcugggcuuu

SEQ ID NO: 360622 - RNA, 22 nt, Human
uuagcaaaguguaaugcuuccc

SEQ ID NO: 360623 - RNA, 23 nt, Human
uuccuggagcugagcauuuuucc

SEQ ID NO: 360624 - RNA, 18 nt, Human
uucuaaaaaauccagcua

SEQ ID NO: 360625 - RNA, 18 nt, Human
uugaaggcuaagaagucc

SEQ ID NO: 360626 - RNA, 19 nt, Human
uuuguuuccucucccucuc

SEQ ID NO: 360627 - RNA, 18 nt, Human
aaagccuuucccacccca

SEQ ID NO: 360628 - RNA, 21 nt, Human
aaagccuuucccaccccaccu

SEQ ID NO: 360629 - RNA, 21 nt, Human
aacagggcaagacuccgucuc

SEQ ID NO: 360630 - RNA, 24 nt, Human
aacagggcaagacuccgucucaaa

SEQ ID NO: 360631 - RNA, 21 nt, Human
aaccccaaacucaagaacuaa

SEQ ID NO: 360632 - RNA, 18 nt, Human
aauuagccaggcauggug

SEQ ID NO: 360633 - RNA, 24 nt, Human
aauuguuugaauccaggagaugga

SEQ ID NO: 360634 - RNA, 24 nt, Human
acagggcaagacuccgucucaaaa

SEQ ID NO: 360635 - RNA, 21 nt, Human
accccaaacucaagaacuaac

SEQ ID NO: 360636 - RNA, 19 nt, Human
accuuguggguggggccug

SEQ ID NO: 360637 - RNA, 25 nt, Human
agaggaaagagcaaggguacaggug

SEQ ID NO: 360638 - RNA, 24 nt, Human
agauggagguugcagugagcugag

SEQ ID NO: 360639 - RNA, 24 nt, Human
agcacuuugggaggccaagguggg

SEQ ID NO: 360640 - RNA, 23 nt, Human
agccaggcauggugguguacgcc

SEQ ID NO: 360641 - RNA, 19 nt, Human
agccuggccaaugugguga

SEQ ID NO: 360642 - RNA, 22 nt, Human
agccuggccaauguggugaaac

SEQ ID NO: 360643 - RNA, 24 nt, Human
agccuggccaauguggugaaaccc

SEQ ID NO: 360644 - RNA, 23 nt, Human
aggagauggagguugcagugagc

SEQ ID NO: 360645 - RNA, 22 nt, Human
aggaggcuuauucucuuuuugg

SEQ ID NO: 360646 - RNA, 18 nt, Human
aggcagcagggaaaucaa

SEQ ID NO: 360647 - RNA, 23 nt, Human
aggcaggagaauuguuugaaucc

SEQ ID NO: 360648 - RNA, 24 nt, Human
aggcaggagaauuguuugaaucca

SEQ ID NO: 360649 - RNA, 24 nt, Human
aggcauggugguguacgccuguaa

SEQ ID NO: 360650 - RNA, 21 nt, Human
aggccaagguggguggaucac

SEQ ID NO: 360651 - RNA, 21 nt, Human
aggcugaggcaggagaauugu

SEQ ID NO: 360652 - RNA, 24 nt, Human
aggcugaggcaggagaauuguuug

SEQ ID NO: 360653 - RNA, 21 nt, Human
aucaccugaggucaggaguuc

SEQ ID NO: 360654 - RNA, 24 nt, Human
aucauggcacuggaaggaaguagg

SEQ ID NO: 360655 - RNA, 24 nt, Human
auccaggagauggagguugcagug

SEQ ID NO: 360656 - RNA, 22 nt, Human
aucccagcacuuugggaggcca

SEQ ID NO: 360657 - RNA, 23 nt, Human
aucccucuuucuuccucucccug

SEQ ID NO: 360658 - RNA, 24 nt, Human
aucgugccauugcacuccagcaug

SEQ ID NO: 360659 - RNA, 22 nt, Human
auugggguucuaggugugcagc

SEQ ID NO: 360660 - RNA, 19 nt, Human
caacaggcagggcauccag

SEQ ID NO: 360661 - RNA, 21 nt, Human
caagacuccgucucaaaaaaa

SEQ ID NO: 360662 - RNA, 24 nt, Human
caagguggguggaucaccugaggu

SEQ ID NO: 360663 - RNA, 26 nt, Human
caagguggguggaucaccugagguca

SEQ ID NO: 360664 - RNA, 24 nt, Human
cacaccuguaaucccagcacuuug

SEQ ID NO: 360665 - RNA, 22 nt, Human
caccccaucccucuuucuuccu

SEQ ID NO: 360666 - RNA, 18 nt, Human
cacccucccucccugagu

SEQ ID NO: 360667 - RNA, 19 nt, Human
caccuguaaucccagcacu

SEQ ID NO: 360668 - RNA, 24 nt, Human
caccuguaaucccagcacuuuggg

SEQ ID NO: 360669 - RNA, 23 nt, Human
cacuccagcaugggcaacagggc

SEQ ID NO: 360670 - RNA, 24 nt, Human
cagcacuuugggaggccaaggugg

SEQ ID NO: 360671 - RNA, 21 nt, Human
cagcauggcuguaugugcgug

SEQ ID NO: 360672 - RNA, 18 nt, Human
cagcaugggcaacagggc

SEQ ID NO: 360673 - RNA, 18 nt, Human
cagggaaaucaagggcug

SEQ ID NO: 360674 - RNA, 18 nt, Human
cauugcacuccagcaugg

SEQ ID NO: 360675 - RNA, 19 nt, Human
cauugcacuccagcauggg

SEQ ID NO: 360676 - RNA, 21 nt, Human
cauugcacuccagcaugggca

SEQ ID NO: 360677 - RNA, 23 nt, Human
cauugcacuccagcaugggcaac

SEQ ID NO: 360678 - RNA, 24 nt, Human
cauugcacuccagcaugggcaaca

SEQ ID NO: 360679 - RNA, 22 nt, Human
cauuugaggaccuagacugucc

SEQ ID NO: 360680 - RNA, 23 nt, Human
ccaccccaucccucuuucuuccu

SEQ ID NO: 360681 - RNA, 19 nt, Human
ccaggaggcuuauucucuu

SEQ ID NO: 360682 - RNA, 24 nt, Human
ccaggcauggugguguacgccugu

SEQ ID NO: 360683 - RNA, 18 nt, Human
ccauugcacuccagcaug

SEQ ID NO: 360684 - RNA, 20 nt, Human
ccauugcacuccagcauggg

SEQ ID NO: 360685 - RNA, 21 nt, Human
ccauugcacuccagcaugggc

SEQ ID NO: 360686 - RNA, 24 nt, Human
ccauugcacuccagcaugggcaac

SEQ ID NO: 360687 - RNA, 19 nt, Human
cccucuuucuuccucuccc

SEQ ID NO: 360688 - RNA, 20 nt, Human
ccucacugcagugugcuaga

SEQ ID NO: 360689 - RNA, 22 nt, Human
ccucccaccccaucccucuuuc

SEQ ID NO: 360690 - RNA, 19 nt, Human
ccucuggauucagaugaaa

SEQ ID NO: 360691 - RNA, 22 nt, Human
ccucuggauucagaugaaacau

SEQ ID NO: 360692 - RNA, 23 nt, Human
ccuggccaauguggugaaacccc

SEQ ID NO: 360693 - RNA, 24 nt, Human
ccuggccaauguggugaaacccca

SEQ ID NO: 360694 - RNA, 23 nt, Human
ccuggcccuggucccaccuucuc

SEQ ID NO: 360695 - RNA, 19 nt, Human
ccuguaaucccagcuauuc

SEQ ID NO: 360696 - RNA, 22 nt, Human
ccuguaaucccagcuauucugg

SEQ ID NO: 360697 - RNA, 22 nt, Human
ccuugccucuggggugcccagg

SEQ ID NO: 360698 - RNA, 19 nt, Human
ccuuguggguggggccugg

SEQ ID NO: 360699 - RNA, 24 nt, Human
cgacaccagccuggccaauguggu

SEQ ID NO: 360700 - RNA, 24 nt, Human
cgccuguaaucccagcuauucugg

SEQ ID NO: 360701 - RNA, 22 nt, Human
cucaacaggcagggcauccaga

SEQ ID NO: 360702 - RNA, 22 nt, Human
cucacaccuguaaucccagcac

SEQ ID NO: 360703 - RNA, 24 nt, Human
cucacaccuguaaucccagcacuu

SEQ ID NO: 360704 - RNA, 22 nt, Human
cucugcacucgcacuagagguc

SEQ ID NO: 360705 - RNA, 18 nt, Human
cucugugucccacccucc

SEQ ID NO: 360706 - RNA, 21 nt, Human
cuggggcuguuguccucaaug

SEQ ID NO: 360707 - RNA, 20 nt, Human
gaccucuuucuguuuaugga

SEQ ID NO: 360708 - RNA, 23 nt, Human
gagaauuguuugaauccaggaga

SEQ ID NO: 360709 - RNA, 23 nt, Human
gagaucgugccauugcacuccag

SEQ ID NO: 360710 - RNA, 23 nt, Human
gagguugcagugagcugagaucg

SEQ ID NO: 360711 - RNA, 24 nt, Human
gaucaccugaggucaggaguucga

SEQ ID NO: 360712 - RNA, 23 nt, Human
gcagcagggaaaucaagggcugg

SEQ ID NO: 360713 - RNA, 18 nt, Human
gccaauguggugaaaccc

SEQ ID NO: 360714 - RNA, 18 nt, Human
gccacaagauggcaaggc

SEQ ID NO: 360715 - RNA, 24 nt, Human
gccauugcacuccagcaugggcaa

SEQ ID NO: 360716 - RNA, 21 nt, Human
gccugguuaaugguggggaug

SEQ ID NO: 360717 - RNA, 20 nt, Human
ggagguugcagugagcugag

SEQ ID NO: 360718 - RNA, 22 nt, Human
ggagguugcagugagcugagau

SEQ ID NO: 360719 - RNA, 23 nt, Human
ggagguugcagugagcugagauc

SEQ ID NO: 360720 - RNA, 24 nt, Human
ggagguugcagugagcugagaucg

SEQ ID NO: 360721 - RNA, 22 nt, Human
ggaucaccugaggucaggaguu

SEQ ID NO: 360722 - RNA, 18 nt, Human
ggauuugguguaggcugu

SEQ ID NO: 360723 - RNA, 21 nt, Human
ggcucacaccuguaaucccag

SEQ ID NO: 360724 - RNA, 24 nt, Human
gggugccguggcucacaccuguaa

SEQ ID NO: 360725 - RNA, 20 nt, Human
gguacuggaaaccccaaacu

SEQ ID NO: 360726 - RNA, 21 nt, Human
gguggaucaccugaggucagg

SEQ ID NO: 360727 - RNA, 24 nt, Human
ggugguguacgccuguaaucccag

SEQ ID NO: 360728 - RNA, 19 nt, Human
gucuuucucuuugcucugg

SEQ ID NO: 360729 - RNA, 23 nt, Human
gugguguacgccuguaaucccag

SEQ ID NO: 360730 - RNA, 24 nt, Human
guugcagugagcugagaucgugcc

SEQ ID NO: 360731 - RNA, 18 nt, Human
uaccuuguggguggggcc

SEQ ID NO: 360732 - RNA, 22 nt, Human
uaccuuguggguggggccuggu

SEQ ID NO: 360733 - RNA, 19 nt, Human
uacgccuguaaucccagcu

SEQ ID NO: 360734 - RNA, 21 nt, Human
uacuggaaaccccaaacucaa

SEQ ID NO: 360735 - RNA, 21 nt, Human
uagaauggggcucaacaggca

SEQ ID NO: 360736 - RNA, 24 nt, Human
uagcaccuucugaugccccugccc

SEQ ID NO: 360737 - RNA, 21 nt, Human
uaggagcacuggagggggugc

SEQ ID NO: 360738 - RNA, 22 nt, Human
ucaauggcauuucaagucuucu

SEQ ID NO: 360739 - RNA, 19 nt, Human
ucagaccccccaggaggcu

SEQ ID NO: 360740 - RNA, 20 nt, Human
uccagcaugggcaacagggc

SEQ ID NO: 360741 - RNA, 21 nt, Human
uccaggagauggagguugcag

SEQ ID NO: 360742 - RNA, 21 nt, Human
uccauagcacaguacaugcag

SEQ ID NO: 360743 - RNA, 25 nt, Human
ucccaccccaccuguagcuugggaa

SEQ ID NO: 360744 - RNA, 18 nt, Human
ucccugagugcacagccu

SEQ ID NO: 360745 - RNA, 23 nt, Human
ucccuuagcggauccagcagacc

SEQ ID NO: 360746 - RNA, 20 nt, Human
ucccuucuaggccacagucc

SEQ ID NO: 360747 - RNA, 22 nt, Human
uccgucucaaaaaaaagaaaaa

SEQ ID NO: 360748 - RNA, 22 nt, Human
uccgucucaaaaaaaagaaaaa

SEQ ID NO: 360749 - RNA, 20 nt, Human
ucuacuaaaaauacaaaaaa

SEQ ID NO: 360750 - RNA, 18 nt, Human
ucuccaucggguguagag

SEQ ID NO: 360751 - RNA, 22 nt, Human
ucuccaucggguguagaguuuu

SEQ ID NO: 360752 - RNA, 24 nt, Human
ugaggcaggagaauuguuugaauc

SEQ ID NO: 360753 - RNA, 25 nt, Human
ugaggcaggagaauuguuugaaucc

SEQ ID NO: 360754 - RNA, 21 nt, Human
ugaggugccuggccucacugc

SEQ ID NO: 360755 - RNA, 22 nt, Human
ugcacuccagcaugggcaacag

SEQ ID NO: 360756 - RNA, 20 nt, Human
ugcccaggaggcugaauugg

SEQ ID NO: 360757 - RNA, 18 nt, Human
ugccucccaccccauccc

SEQ ID NO: 360758 - RNA, 18 nt, Human
ugccuggccucacugcag

SEQ ID NO: 360759 - RNA, 21 nt, Human
ugcucuggaggucacauagag

SEQ ID NO: 360760 - RNA, 24 nt, Human
uggaacccuggcccuggucccacc

SEQ ID NO: 360761 - RNA, 24 nt, Human
uggaucaccugaggucaggaguuc

SEQ ID NO: 360762 - RNA, 25 nt, Human
uggaucaccugaggucaggaguucg

SEQ ID NO: 360763 - RNA, 24 nt, Human
uggcaaggccagugugcuagggaa

SEQ ID NO: 360764 - RNA, 25 nt, Human
uggccaauguggugaaaccccaugu

SEQ ID NO: 360765 - RNA, 21 nt, Human
uggcucacaccuguaauccca

SEQ ID NO: 360766 - RNA, 22 nt, Human
uggcucacaccuguaaucccag

SEQ ID NO: 360767 - RNA, 24 nt, Human
uggcucacaccuguaaucccagca

SEQ ID NO: 360768 - RNA, 23 nt, Human
ugggaggccaagguggguggauc

SEQ ID NO: 360769 - RNA, 24 nt, Human
ugggaggccaagguggguggauca

SEQ ID NO: 360770 - RNA, 25 nt, Human
uggggccugguuaaugguggggaug

SEQ ID NO: 360771 - RNA, 24 nt, Human
uggguggaucaccugaggucagga

SEQ ID NO: 360772 - RNA, 19 nt, Human
uggugaaaccccaugucua

SEQ ID NO: 360773 - RNA, 24 nt, Human
uggugguguacgccuguaauccca

SEQ ID NO: 360774 - RNA, 21 nt, Human
ugguguacgccuguaauccca

SEQ ID NO: 360775 - RNA, 22 nt, Human
ugguguacgccuguaaucccag

SEQ ID NO: 360776 - RNA, 23 nt, Human
ugucccacccucccucccugagu

SEQ ID NO: 360777 - RNA, 18 nt, Human
uguggguggggccugguu

SEQ ID NO: 360778 - RNA, 18 nt, Human
uugacucuagggguuguu

SEQ ID NO: 360779 - RNA, 21 nt, Human
uugcagugagcugagaucgug

SEQ ID NO: 360780 - RNA, 22 nt, Human
uugcagugagcugagaucgugc

SEQ ID NO: 360781 - RNA, 24 nt, Human
uuggccucuccuuugggaggacgc

SEQ ID NO: 360782 - RNA, 24 nt, Human
uuguuugaauccaggagauggagg

SEQ ID NO: 360783 - RNA, 18 nt, Human
uuugccaaguggagcugu

SEQ ID NO: 360784 - RNA, 26 nt, Human
uuuggccucuccuuugggaggacggc

SEQ ID NO: 360785 - RNA, 19 nt, Human
uuuuuuuuuuuuuugccaa

SEQ ID NO: 360786 - RNA, 18 nt, Human
uuuuuuuuuuuuuuuuug

SEQ ID NO: 360787 - RNA, 22 nt, Human
uuuuuuuuuuuuuuuuugccaa

SEQ ID NO: 360788 - RNA, 23 nt, Human
uuuuuuuuuuuuuuuuugccaag

SEQ ID NO: 360789 - RNA, 19 nt, Human
aaaaauaauucagcaugag

SEQ ID NO: 360790 - RNA, 24 nt, Human
aaguacuuucuuggacuuagcucc

SEQ ID NO: 360791 - RNA, 22 nt, Human
acucugcugcccuaacucuugg

SEQ ID NO: 360792 - RNA, 19 nt, Human
agagcagggcagggccuga

SEQ ID NO: 360793 - RNA, 18 nt, Human
agcucaauuuaacaaugu

SEQ ID NO: 360794 - RNA, 21 nt, Human
aggcugaggcggcggcggcgc

SEQ ID NO: 360795 - RNA, 21 nt, Human
agugcacacacaugcuuggug

SEQ ID NO: 360796 - RNA, 18 nt, Human
auacaaaagcaauagaaa

SEQ ID NO: 360797 - RNA, 19 nt, Human
auacucacuauacauaaaa

SEQ ID NO: 360798 - RNA, 21 nt, Human
auccaaaacaguccaccugac

SEQ ID NO: 360799 - RNA, 19 nt, Human
caauaacugaagaugccug

SEQ ID NO: 360800 - RNA, 21 nt, Human
cagcuuacccuggaggacaac

SEQ ID NO: 360801 - RNA, 22 nt, Human
cagguacaagugcacacacaug

SEQ ID NO: 360802 - RNA, 20 nt, Human
cauacaaaagcaauagaaac

SEQ ID NO: 360803 - RNA, 23 nt, Human
ccauauaacuuacauaaaacuca

SEQ ID NO: 360804 - RNA, 22 nt, Human
cccauacaaaagcaauagaaac

SEQ ID NO: 360805 - RNA, 23 nt, Human
ccuuuuuauuuuugcaauauccc

SEQ ID NO: 360806 - RNA, 21 nt, Human
cgggcgcgcagcgcagggccg

SEQ ID NO: 360807 - RNA, 19 nt, Human
cuccacucugcugcccuaa

SEQ ID NO: 360808 - RNA, 19 nt, Human
cuguggaaaaccaguuaug

SEQ ID NO: 360809 - RNA, 22 nt, Human
gagcagggcagggccugaggca

SEQ ID NO: 360810 - RNA, 21 nt, Human
gaggcugaggcggcggcggcg

SEQ ID NO: 360811 - RNA, 21 nt, Human
gcggcggcgcgggcagagagc

SEQ ID NO: 360812 - RNA, 19 nt, Human
ggccaaaaauuaaguuucc

SEQ ID NO: 360813 - RNA, 23 nt, Human
ggccgggcgcgcagcgcagggcc

SEQ ID NO: 360814 - RNA, 18 nt, Human
guagagcagggcagggcc

SEQ ID NO: 360815 - RNA, 24 nt, Human
uaaaacaugcaaaauauacucacu

SEQ ID NO: 360816 - RNA, 19 nt, Human
uaaaaggccaaaaauuaag

SEQ ID NO: 360817 - RNA, 25 nt, Human
uaaauccaaaacaguccaccugaca

SEQ ID NO: 360818 - RNA, 22 nt, Human
uaacagagaaaccaccagguac

SEQ ID NO: 360819 - RNA, 24 nt, Human
uaaggcaaaaauaauucagcauga

SEQ ID NO: 360820 - RNA, 22 nt, Human
uacaaguaccaaauuaagacca

SEQ ID NO: 360821 - RNA, 19 nt, Human
ucccauggauuacaugguu

SEQ ID NO: 360822 - RNA, 21 nt, Human
ucuaacuagugcuauuuacaa

SEQ ID NO: 360823 - RNA, 20 nt, Human
ugacaagcaauaacugaaga

SEQ ID NO: 360824 - RNA, 21 nt, Human
ugaugccuauaaaaguagcug

SEQ ID NO: 360825 - RNA, 21 nt, Human
uuacaauuuaaaacaugcaaa

SEQ ID NO: 360826 - RNA, 18 nt, Human
uuuuuuuuuuuuugaggg

SEQ ID NO: 360827 - RNA, 23 nt, Human
uuuuuuuuuuuuuuuuuugaggg

SEQ ID NO: 360828 - RNA, 20 nt, Human
agacucaggcaagacuggug

SEQ ID NO: 360829 - RNA, 18 nt, Human
agauguacuggaaaugcu

SEQ ID NO: 360830 - RNA, 19 nt, Human
agcaagaggcagauucggu

SEQ ID NO: 360831 - RNA, 22 nt, Human
aggcuucuuggguagacacccu

SEQ ID NO: 360832 - RNA, 24 nt, Human
cacuugugagcauuuauuucucuu

SEQ ID NO: 360833 - RNA, 21 nt, Human
cagaauccaggccaccagggg

SEQ ID NO: 360834 - RNA, 22 nt, Human
ccuccugugaggcaguggaaga

SEQ ID NO: 360835 - RNA, 18 nt, Human
ccuuguucuccggcugac

SEQ ID NO: 360836 - RNA, 20 nt, Human
cuggaaaugcuggagaaaga

SEQ ID NO: 360837 - RNA, 20 nt, Human
cuugugcaguucuugcugga

SEQ ID NO: 360838 - RNA, 27 nt, Human
gacuccguuucuugugcaguucuugcu

SEQ ID NO: 360839 - RNA, 26 nt, Human
ggaccagaauccaggccaccagggga

SEQ ID NO: 360840 - RNA, 18 nt, Human
ggcugacuccguuucuug

SEQ ID NO: 360841 - RNA, 23 nt, Human
gggaccagaauccaggccaccag

SEQ ID NO: 360842 - RNA, 21 nt, Human
uaaguagcaaauucuaaguug

SEQ ID NO: 360843 - RNA, 25 nt, Human
uagaacuucugaaguuuaauucuac

SEQ ID NO: 360844 - RNA, 23 nt, Human
uccugugaggcaguggaagacca

SEQ ID NO: 360845 - RNA, 23 nt, Human
ucuaaguuggggauaggugaggc

SEQ ID NO: 360846 - RNA, 20 nt, Human
ucugauagauguacuggaaa

SEQ ID NO: 360847 - RNA, 23 nt, Human
ucuguguucccggccaagacuug

SEQ ID NO: 360848 - RNA, 19 nt, Human
ucuugugcaguucuugcug

SEQ ID NO: 360849 - RNA, 18 nt, Human
ucuuuugggucacaaaac

SEQ ID NO: 360850 - RNA, 22 nt, Human
uggaaaugcuggagaaagacuc

SEQ ID NO: 360851 - RNA, 22 nt, Human
ugggaccagaauccaggccacc

SEQ ID NO: 360852 - RNA, 18 nt, Human
uuaaaauaaguagcaaau

SEQ ID NO: 360853 - RNA, 28 nt, Human
uuuuagagaucccagcaagaggcagauu

SEQ ID NO: 360854 - RNA, 25 nt, Human
aaaauacccaaugcaaaauggaaca

SEQ ID NO: 360855 - RNA, 19 nt, Human
aaaauuauuuaguccauuu

SEQ ID NO: 360856 - RNA, 23 nt, Human
aaagcccuuucagccaaacacuu

SEQ ID NO: 360857 - RNA, 20 nt, Human
aaauauauagguugcaaagc

SEQ ID NO: 360858 - RNA, 23 nt, Human
aaaucaacucugaacuaguacag

SEQ ID NO: 360859 - RNA, 20 nt, Human
aacguaauuuggaacucguc

SEQ ID NO: 360860 - RNA, 25 nt, Human
aaugcaaaaagcccuuucagccaaa

SEQ ID NO: 360861 - RNA, 25 nt, Human
acacaggaaaaccuugaggaagucc

SEQ ID NO: 360862 - RNA, 22 nt, Human
accaugccauauaaaaagagcc

SEQ ID NO: 360863 - RNA, 22 nt, Human
accaugccauauaaaaagagcu

SEQ ID NO: 360864 - RNA, 18 nt, Human
acucugaauaguacagaa

SEQ ID NO: 360865 - RNA, 19 nt, Human
acuucugucuuugcaccuc

SEQ ID NO: 360866 - RNA, 19 nt, Human
agccauaggaaccaugcca

SEQ ID NO: 360867 - RNA, 21 nt, Human
aucauuuuagaaagcucagcu

SEQ ID NO: 360868 - RNA, 22 nt, Human
aucccucaccccucuacuggaa

SEQ ID NO: 360869 - RNA, 25 nt, Human
auggaacaaaaccacuaaggaccga

SEQ ID NO: 360870 - RNA, 19 nt, Human
auuaaagaauugggccacc

SEQ ID NO: 360871 - RNA, 20 nt, Human
caaacacuugaaauagacuc

SEQ ID NO: 360872 - RNA, 20 nt, Human
caaauacacaccguuugaaa

SEQ ID NO: 360873 - RNA, 19 nt, Human
cacaaaaguccagcaaaau

SEQ ID NO: 360874 - RNA, 27 nt, Human
cacugcacacaggaaaaccuugaggaa

SEQ ID NO: 360875 - RNA, 24 nt, Human
cagaaucccucaccccucuacugg

SEQ ID NO: 360876 - RNA, 19 nt, Human
cauaaaaagaucaauguua

SEQ ID NO: 360877 - RNA, 20 nt, Human
caugcaaaugcaaaaagccc

SEQ ID NO: 360878 - RNA, 20 nt, Human
cauuuuagaaagcucagcua

SEQ ID NO: 360879 - RNA, 21 nt, Human
ccaaacacuugaaauagacuc

SEQ ID NO: 360880 - RNA, 19 nt, Human
ccacugcacacaggaaaac

SEQ ID NO: 360881 - RNA, 22 nt, Human
ccagcagaaucugaacucagaa

SEQ ID NO: 360882 - RNA, 21 nt, Human
cccauaaugcuugggugcacc

SEQ ID NO: 360883 - RNA, 25 nt, Human
ccccaucaaacuuuuaaaccccucc

SEQ ID NO: 360884 - RNA, 23 nt, Human
ccccuggcagccguaaaccccug

SEQ ID NO: 360885 - RNA, 18 nt, Human
cccugggcccuggcucug

SEQ ID NO: 360886 - RNA, 21 nt, Human
ccuccugccaccucccugacc

SEQ ID NO: 360887 - RNA, 25 nt, Human
ccugggcccuggcucugcugcuggu

SEQ ID NO: 360888 - RNA, 18 nt, Human
cucaagucacaaguuacc

SEQ ID NO: 360889 - RNA, 23 nt, Human
cucaauacuucugucuuugcacc

SEQ ID NO: 360890 - RNA, 27 nt, Human
cucagaacaugcaaaugcaaaaagccc

SEQ ID NO: 360891 - RNA, 23 nt, Human
cuccacuagagucuugguguuuc

SEQ ID NO: 360892 - RNA, 20 nt, Human
cucccagauuugaagagcuc

SEQ ID NO: 360893 - RNA, 22 nt, Human
cugacacucucuaagaaggaag

SEQ ID NO: 360894 - RNA, 22 nt, Human
cugcugaguuaagagccugcau

SEQ ID NO: 360895 - RNA, 21 nt, Human
gaaaagcagaaucccucaccc

SEQ ID NO: 360896 - RNA, 22 nt, Human
gagaauauuuugggggaauauu

SEQ ID NO: 360897 - RNA, 19 nt, Human
gauguuuucauucucggug

SEQ ID NO: 360898 - RNA, 18 nt, Human
gccauaggaaccaugcca

SEQ ID NO: 360899 - RNA, 19 nt, Human
gcccuggcucugcugcugg

SEQ ID NO: 360900 - RNA, 21 nt, Human
gcccuugauuuuggguguguu

SEQ ID NO: 360901 - RNA, 21 nt, Human
gcgcuggucccugggcccugg

SEQ ID NO: 360902 - RNA, 19 nt, Human
gcugguggggcccuucuga

SEQ ID NO: 360903 - RNA, 23 nt, Human
gguguguugaaauuacaagagga

SEQ ID NO: 360904 - RNA, 19 nt, Human
guccuaccaaaacaaauaa

SEQ ID NO: 360905 - RNA, 23 nt, Human
uaaaaaacaauaaagcuaggaug

SEQ ID NO: 360906 - RNA, 20 nt, Human
uaaaaagagccacguuaaug

SEQ ID NO: 360907 - RNA, 19 nt, Human
uaaaaagagcuguguuaau

SEQ ID NO: 360908 - RNA, 20 nt, Human
uaaaaagagcuguguuaaug

SEQ ID NO: 360909 - RNA, 18 nt, Human
uacccccugcugccucca

SEQ ID NO: 360910 - RNA, 19 nt, Human
uacccccugcugccuccac

SEQ ID NO: 360911 - RNA, 20 nt, Human
uagcauuacaacacagagca

SEQ ID NO: 360912 - RNA, 22 nt, Human
uaggaaacaauauuugucccau

SEQ ID NO: 360913 - RNA, 25 nt, Human
uauaaaaagagccacguuaauguuu

SEQ ID NO: 360914 - RNA, 19 nt, Human
uauaguuacgguuuaagaa

SEQ ID NO: 360915 - RNA, 23 nt, Human
uauauaaaacauauacauauaua

SEQ ID NO: 360916 - RNA, 22 nt, Human
uauaugaguauacauacauaua

SEQ ID NO: 360917 - RNA, 19 nt, Human
uaucacuggaccccugagg

SEQ ID NO: 360918 - RNA, 21 nt, Human
uaugucacuuggugucucuuu

SEQ ID NO: 360919 - RNA, 18 nt, Human
uauuuuauacuaucuccc

SEQ ID NO: 360920 - RNA, 20 nt, Human
uccaacacuugaugaguuau

SEQ ID NO: 360921 - RNA, 18 nt, Human
uccacagaagcgcugguc

SEQ ID NO: 360922 - RNA, 22 nt, Human
uccaggcccuugauuuugggug

SEQ ID NO: 360923 - RNA, 20 nt, Human
ucccugcugaguuaagagcc

SEQ ID NO: 360924 - RNA, 18 nt, Human
uccucgaggguuuguugg

SEQ ID NO: 360925 - RNA, 22 nt, Human
ucgaggguuuguuggauaauuu

SEQ ID NO: 360926 - RNA, 22 nt, Human
ucugauugcugcagaaugaggg

SEQ ID NO: 360927 - RNA, 18 nt, Human
ucuguacccccugcugcc

SEQ ID NO: 360928 - RNA, 27 nt, Human
ugaaaagcagaaucccucaccccucua

SEQ ID NO: 360929 - RNA, 20 nt, Human
ugaaaauacccaaugcaaaa

SEQ ID NO: 360930 - RNA, 18 nt, Human
ugaagguuuguuggauaa

SEQ ID NO: 360931 - RNA, 19 nt, Human
ugaagucagauauuugccc

SEQ ID NO: 360932 - RNA, 22 nt, Human
ugaaucacaaaaguccagcaaa

SEQ ID NO: 360933 - RNA, 25 nt, Human
ugaauuccaaugaaauuccaauuuu

SEQ ID NO: 360934 - RNA, 24 nt, Human
ugaccauggugcuuacugugggug

SEQ ID NO: 360935 - RNA, 22 nt, Human
ugcaccuccugccaccucccug

SEQ ID NO: 360936 - RNA, 19 nt, Human
ugccucaccugucuugcuc

SEQ ID NO: 360937 - RNA, 22 nt, Human
ugccucaccugucuugcucaac

SEQ ID NO: 360938 - RNA, 21 nt, Human
uggaacaaaaccacuaaggac

SEQ ID NO: 360939 - RNA, 18 nt, Human
uggacugccacuggagaa

SEQ ID NO: 360940 - RNA, 20 nt, Human
ugggaaauguguaggaggua

SEQ ID NO: 360941 - RNA, 25 nt, Human
uggguggucccugucaacugacuag

SEQ ID NO: 360942 - RNA, 25 nt, Human
ugguguuucucucaauacuucuguc

SEQ ID NO: 360943 - RNA, 20 nt, Human
ugucuugcucaacagggagg

SEQ ID NO: 360944 - RNA, 21 nt, Human
ugugaaucacaaaaguccagc

SEQ ID NO: 360945 - RNA, 21 nt, Human
uguucucccauuucccuuuca

SEQ ID NO: 360946 - RNA, 23 nt, Human
uuaagagccugcauccaauaugg

SEQ ID NO: 360947 - RNA, 25 nt, Human
uuauucaacuguaaauggaaauccu

SEQ ID NO: 360948 - RNA, 21 nt, Human
uuccaauuuucacuuuaacuc

SEQ ID NO: 360949 - RNA, 23 nt, Human
uucccauaaugcuugggugcacc

SEQ ID NO: 360950 - RNA, 19 nt, Human
uuccuggcugguggggccc

SEQ ID NO: 360951 - RNA, 23 nt, Human
uucuuauacuacuuacuccugca

SEQ ID NO: 360952 - RNA, 24 nt, Human
uuucugauugaugggaaaugugua

SEQ ID NO: 360953 - RNA, 18 nt, Human
uuuuagaaagcucagcua

SEQ ID NO: 360954 - RNA, 18 nt, Human
aaaagaaaaggggcccag

SEQ ID NO: 360955 - RNA, 21 nt, Human
aaacaaaaccuucacaagugu

SEQ ID NO: 360956 - RNA, 21 nt, Human
aaauuagcuagucuugaacaa

SEQ ID NO: 360957 - RNA, 19 nt, Human
aacacuguagcugaaguug

SEQ ID NO: 360958 - RNA, 22 nt, Human
aagaacaaaagaaaaggggccg

SEQ ID NO: 360959 - RNA, 26 nt, Human
aauacaaaggugcucuuuaagcuaaa

SEQ ID NO: 360960 - RNA, 24 nt, Human
acacccucauguucuacaacacag

SEQ ID NO: 360961 - RNA, 20 nt, Human
acaggagugcaaggaacugg

SEQ ID NO: 360962 - RNA, 18 nt, Human
accaugcugugaagugcu

SEQ ID NO: 360963 - RNA, 25 nt, Human
acgugacuaaccacucuuuuacgua

SEQ ID NO: 360964 - RNA, 18 nt, Human
agggauuuucuuuuuucc

SEQ ID NO: 360965 - RNA, 20 nt, Human
aguacagauaagaaucuguc

SEQ ID NO: 360966 - RNA, 20 nt, Human
caaaauaagcacaugugcuc

SEQ ID NO: 360967 - RNA, 21 nt, Human
cauagcaaaucauuaugucau

SEQ ID NO: 360968 - RNA, 23 nt, Human
ccugcagcuuacaugauaaccau

SEQ ID NO: 360969 - RNA, 23 nt, Human
cgacgacuuuggcaaagaacaaa

SEQ ID NO: 360970 - RNA, 26 nt, Human
cgagccuagcggacgcccugagccag

SEQ ID NO: 360971 - RNA, 19 nt, Human
cuaacacuguagcugaagu

SEQ ID NO: 360972 - RNA, 22 nt, Human
cucaaggcacagcugugguaaa

SEQ ID NO: 360973 - RNA, 21 nt, Human
cucaugagaaauaggggaauu

SEQ ID NO: 360974 - RNA, 24 nt, Human
cucuauauaaucuaguaacaggau

SEQ ID NO: 360975 - RNA, 21 nt, Human
cugcaguacaaaauaagcaca

SEQ ID NO: 360976 - RNA, 24 nt, Human
cugcggcugcuaucgcugcugcug

SEQ ID NO: 360977 - RNA, 18 nt, Human
cugcugcucucgcugagg

SEQ ID NO: 360978 - RNA, 22 nt, Human
cuguagcugaaguuggaaaggc

SEQ ID NO: 360979 - RNA, 24 nt, Human
cuuacacccucauguucuacaacc

SEQ ID NO: 360980 - RNA, 20 nt, Human
cuuagguuuccuaaacagcu

SEQ ID NO: 360981 - RNA, 21 nt, Human
cuucuaccugcagcuuacaug

SEQ ID NO: 360982 - RNA, 19 nt, Human
cuucuguguggcuuuuggc

SEQ ID NO: 360983 - RNA, 24 nt, Human
gaacaagagugaguuuugcagaaa

SEQ ID NO: 360984 - RNA, 18 nt, Human
gggaauucaguguuauca

SEQ ID NO: 360985 - RNA, 23 nt, Human
guuaauuucugcugacuuagguu

SEQ ID NO: 360986 - RNA, 22 nt, Human
uaaaaacacaacagccuugggc

SEQ ID NO: 360987 - RNA, 22 nt, Human
uaaagaaagugcucauagcaac

SEQ ID NO: 360988 - RNA, 25 nt, Human
uaacaugaguuaaauugggauucuu

SEQ ID NO: 360989 - RNA, 21 nt, Human
uaagcacaugugcucuauaua

SEQ ID NO: 360990 - RNA, 21 nt, Human
uaagcuaaaccauaaaccuua

SEQ ID NO: 360991 - RNA, 22 nt, Human
uacaacauagcaaaucauuaug

SEQ ID NO: 360992 - RNA, 22 nt, Human
uagcugaaguuggaaaggcaaa

SEQ ID NO: 360993 - RNA, 18 nt, Human
uagguuuccuaaacagcu

SEQ ID NO: 360994 - RNA, 20 nt, Human
uauuagagaauucuaguuaa

SEQ ID NO: 360995 - RNA, 22 nt, Human
ucacuaaugaugauaacaugag

SEQ ID NO: 360996 - RNA, 19 nt, Human
uccaugaaagugcauauaa

SEQ ID NO: 360997 - RNA, 21 nt, Human
uccaugccucaacauaaggga

SEQ ID NO: 360998 - RNA, 18 nt, Human
ucgcugcugcugcucucg

SEQ ID NO: 360999 - RNA, 19 nt, Human
ucgcugcugcugcucucgc

SEQ ID NO: 361000 - RNA, 21 nt, Human
ucuacauguaacuugccaggc

SEQ ID NO: 361001 - RNA, 18 nt, Human
ucuucugcggcugcuauc

SEQ ID NO: 361002 - RNA, 24 nt, Human
ucuuuaagcuaaaccauaaaccuu

SEQ ID NO: 361003 - RNA, 19 nt, Human
ugaagcaaaggauuaaacu

SEQ ID NO: 361004 - RNA, 21 nt, Human
ugauuuguaaaacaaaaccuu

SEQ ID NO: 361005 - RNA, 21 nt, Human
ugcaaggaacuggagauagca

SEQ ID NO: 361006 - RNA, 18 nt, Human
ugcagucuccaugaaagu

SEQ ID NO: 361007 - RNA, 19 nt, Human
ugcccuucuguguggcuuu

SEQ ID NO: 361008 - RNA, 18 nt, Human
ugcuaucgcugcugcugc

SEQ ID NO: 361009 - RNA, 19 nt, Human
uggcaaagaacaaaagaaa

SEQ ID NO: 361010 - RNA, 27 nt, Human
uggcaaagaacaaaagaaaaggggccc

SEQ ID NO: 361011 - RNA, 21 nt, Human
uggcuucuagguucuaugacc

SEQ ID NO: 361012 - RNA, 18 nt, Human
ugggaggcucagcagguc

SEQ ID NO: 361013 - RNA, 19 nt, Human
ugggcuuucuacauguaac

SEQ ID NO: 361014 - RNA, 20 nt, Human
uguaucuacucaugagaaau

SEQ ID NO: 361015 - RNA, 20 nt, Human
ugucauacuguagaaagaug

SEQ ID NO: 361016 - RNA, 23 nt, Human
ugugaagugcuacauaugcuuca

SEQ ID NO: 361017 - RNA, 18 nt, Human
ugugguaaaaacagagca

SEQ ID NO: 361018 - RNA, 22 nt, Human
uguguuaaaucaagugauuugu

SEQ ID NO: 361019 - RNA, 21 nt, Human
uuagcuaacacuguagcugaa

SEQ ID NO: 361020 - RNA, 25 nt, Human
uuccacauacauguaaauaccuuaa

SEQ ID NO: 361021 - RNA, 24 nt, Human
uucugcggcugcuaucgcugcugc

SEQ ID NO: 361022 - RNA, 18 nt, Human
uugguacagacauguugc

SEQ ID NO: 361023 - RNA, 22 nt, Human
uuucugcugacuuagguuuccu

SEQ ID NO: 361024 - RNA, 21 nt, Human
uuucuuuuuuccuucuuucca

SEQ ID NO: 361025 - RNA, 21 nt, Human
uuugcagaaaacugacauauc

SEQ ID NO: 361026 - RNA, 21 nt, Human
uuuggcaaagaacaaaagaaa

SEQ ID NO: 361027 - RNA, 20 nt, Human
uuuuuuuuuuuuuuuuuaag

SEQ ID NO: 361028 - RNA, 18 nt, Human
aaacuacucucacaaacu

SEQ ID NO: 361029 - RNA, 22 nt, Human
acuucaguucaacagagaagaa

SEQ ID NO: 361030 - RNA, 21 nt, Human
agcaagcuuuccugugugcuu

SEQ ID NO: 361031 - RNA, 19 nt, Human
agcacgcccuccacacccc

SEQ ID NO: 361032 - RNA, 25 nt, Human
auuucagguuacuacacuaggcacu

SEQ ID NO: 361033 - RNA, 20 nt, Human
caaaggaaaacuacucucac

SEQ ID NO: 361034 - RNA, 18 nt, Human
cacgcccuccacaccccu

SEQ ID NO: 361035 - RNA, 18 nt, Human
cagccgcaagaccaggug

SEQ ID NO: 361036 - RNA, 20 nt, Human
ccauugugauguuaaugugu

SEQ ID NO: 361037 - RNA, 21 nt, Human
ccgccgccugcgggccgccgc

SEQ ID NO: 361038 - RNA, 19 nt, Human
ccggcgguggccacagccg

SEQ ID NO: 361039 - RNA, 21 nt, Human
ccggcgguggccacagccgca

SEQ ID NO: 361040 - RNA, 26 nt, Human
cuggccggcgguggccacagccgcaa

SEQ ID NO: 361041 - RNA, 23 nt, Human
gcagagcccggcggacgucuccg

SEQ ID NO: 361042 - RNA, 19 nt, Human
ggccggcgguggccacagc

SEQ ID NO: 361043 - RNA, 20 nt, Human
uaaaaccgaagucuccauac

SEQ ID NO: 361044 - RNA, 19 nt, Human
ucuggagggcuguccacug

SEQ ID NO: 361045 - RNA, 20 nt, Human
ugcccgacccccggcggaac

SEQ ID NO: 361046 - RNA, 20 nt, Human
ugucauugaagauuucaggu

SEQ ID NO: 361047 - RNA, 21 nt, Human
uuacuacacuaggcacugaag

SEQ ID NO: 361048 - RNA, 22 nt, Human
uucaacagagaagaaucaccau

SEQ ID NO: 361049 - RNA, 22 nt, Human
uugacuaaaaccgaagucucca

SEQ ID NO: 361050 - RNA, 22 nt, Human
uuucuccccgccgccugcgggg

SEQ ID NO: 361051 - RNA, 22 nt, Human
aaggagaccuagcaaagcuggg

SEQ ID NO: 361052 - RNA, 24 nt, Human
aaggagaccuagcaaagcuggguc

SEQ ID NO: 361053 - RNA, 18 nt, Human
acuccaggccacaagaug

SEQ ID NO: 361054 - RNA, 20 nt, Human
agaccugggauccaucucca

SEQ ID NO: 361055 - RNA, 20 nt, Human
aggacagggccaggcaagca

SEQ ID NO: 361056 - RNA, 21 nt, Human
aggugggugcugggaagaggc

SEQ ID NO: 361057 - RNA, 21 nt, Human
aguaaaguccccaaacauccc

SEQ ID NO: 361058 - RNA, 24 nt, Human
caaagcuggguccaggacagggcc

SEQ ID NO: 361059 - RNA, 23 nt, Human
caagaccucgacuccaggccaca

SEQ ID NO: 361060 - RNA, 24 nt, Human
caauaaauaugcaauaaauagcgc

SEQ ID NO: 361061 - RNA, 24 nt, Human
cacccgccgucccagccgcccgcc

SEQ ID NO: 361062 - RNA, 20 nt, Human
cagccgcccgccgcuguccc

SEQ ID NO: 361063 - RNA, 22 nt, Human
cagccgcccgccgcuguccccg

SEQ ID NO: 361064 - RNA, 22 nt, Human
caggccacaagaugacacuggg

SEQ ID NO: 361065 - RNA, 23 nt, Human
cauccaaacaauaaauaugcaau

SEQ ID NO: 361066 - RNA, 25 nt, Human
cauccaaacaauaaauaugcaauaa

SEQ ID NO: 361067 - RNA, 22 nt, Human
caucuccauuuugaggcccagg

SEQ ID NO: 361068 - RNA, 22 nt, Human
cccacaagaccugggauccauc

SEQ ID NO: 361069 - RNA, 20 nt, Human
ccccgccgcacccgccgucc

SEQ ID NO: 361070 - RNA, 18 nt, Human
cccgccgcuguccccgcc

SEQ ID NO: 361071 - RNA, 20 nt, Human
cccgccgucccagccgcccg

SEQ ID NO: 361072 - RNA, 20 nt, Human
ccgcacccgccgucccagcc

SEQ ID NO: 361073 - RNA, 19 nt, Human
ccgccgcuguccccgcccc

SEQ ID NO: 361074 - RNA, 21 nt, Human
ccgccgcuguccccgccccuc

SEQ ID NO: 361075 - RNA, 21 nt, Human
ccgccgcuguccccgccgcug

SEQ ID NO: 361076 - RNA, 24 nt, Human
ccgccgcuguccccgccgcugucc

SEQ ID NO: 361077 - RNA, 25 nt, Human
ccgccgcuguccccgccgcuguccc

SEQ ID NO: 361078 - RNA, 18 nt, Human
ccgccgucccagccgccc

SEQ ID NO: 361079 - RNA, 18 nt, Human
ccgucccagccgcccgcc

SEQ ID NO: 361080 - RNA, 25 nt, Human
ccgucccagccgcccgccgcugucc

SEQ ID NO: 361081 - RNA, 22 nt, Human
ccucccuggcuacccuucccuu

SEQ ID NO: 361082 - RNA, 19 nt, Human
ccugcaggcagcugggcug

SEQ ID NO: 361083 - RNA, 21 nt, Human
ccugcaggcagcugggcugga

SEQ ID NO: 361084 - RNA, 21 nt, Human
ccuggccaagaccucgacucc

SEQ ID NO: 361085 - RNA, 18 nt, Human
ccugggcugggccgggcc

SEQ ID NO: 361086 - RNA, 22 nt, Human
cggcugccuucaaaccccacuc

SEQ ID NO: 361087 - RNA, 21 nt, Human
cugggauccaucuccauuuug

SEQ ID NO: 361088 - RNA, 18 nt, Human
cuguccccgccgcugucc

SEQ ID NO: 361089 - RNA, 19 nt, Human
cuguccccgccgcuguccc

SEQ ID NO: 361090 - RNA, 20 nt, Human
cuucaaaccccacucggccc

SEQ ID NO: 361091 - RNA, 21 nt, Human
gcagggcuggcaggugggugc

SEQ ID NO: 361092 - RNA, 20 nt, Human
gccgcacccgccgucccagc

SEQ ID NO: 361093 - RNA, 31 nt, Human
gccgcccgccgcuguccccgccgcugucccc

SEQ ID NO: 361094 - RNA, 19 nt, Human
gcucagcuugguggggggc

SEQ ID NO: 361095 - RNA, 19 nt, Human
ggcaggugggugcugggaa

SEQ ID NO: 361096 - RNA, 18 nt, Human
ggcuggcaggugggugcu

SEQ ID NO: 361097 - RNA, 21 nt, Human
gucccacaagaccugggaucc

SEQ ID NO: 361098 - RNA, 19 nt, Human
uaaauagcgcuccugggcu

SEQ ID NO: 361099 - RNA, 27 nt, Human
uacacaauguuuuauugaaaaagucag

SEQ ID NO: 361100 - RNA, 18 nt, Human
uaccagucuucucuggcc

SEQ ID NO: 361101 - RNA, 19 nt, Human
uaccccagaccacagcuug

SEQ ID NO: 361102 - RNA, 24 nt, Human
uacccuucccuucgucucugaugg

SEQ ID NO: 361103 - RNA, 24 nt, Human
uaguagacugagccagaucuuccu

SEQ ID NO: 361104 - RNA, 22 nt, Human
uccaaacaauaaauaugcaaua

SEQ ID NO: 361105 - RNA, 20 nt, Human
ucccagggucccacaagacc

SEQ ID NO: 361106 - RNA, 24 nt, Human
uccccaaacaucccagggucccac

SEQ ID NO: 361107 - RNA, 18 nt, Human
uccccgccgcuguccccc

SEQ ID NO: 361108 - RNA, 25 nt, Human
ucucuggccaggacaggccgggguc

SEQ ID NO: 361109 - RNA, 23 nt, Human
ugaggcccaggccugguuuccaa

SEQ ID NO: 361110 - RNA, 23 nt, Human
ugccuucaaaccccacucggccc

SEQ ID NO: 361111 - RNA, 26 nt, Human
uggcaggugggugcugggaagaggcu

SEQ ID NO: 361112 - RNA, 22 nt, Human
uggggugcuagauaguaaaguc

SEQ ID NO: 361113 - RNA, 24 nt, Human
uggggugcuagauaguaaaguccc

SEQ ID NO: 361114 - RNA, 21 nt, Human
uggguccaggacagggccagg

SEQ ID NO: 361115 - RNA, 22 nt, Human
uugaggcccaggccugguuucc

SEQ ID NO: 361116 - RNA, 23 nt, Human
uuuuuuuuuuuuuuuuugcccag

SEQ ID NO: 361117 - RNA, 27 nt, Human
uuuuuuuuuuuuuuuuuuuuuuugggg

SEQ ID NO: 361118 - RNA, 21 nt, Human
aaugacugcagaucagauggg

SEQ ID NO: 361119 - RNA, 18 nt, Human
agacguggcuugaaagac

SEQ ID NO: 361120 - RNA, 22 nt, Human
agaugggagcucuuuuacacag

SEQ ID NO: 361121 - RNA, 21 nt, Human
aguaaugagcuggcacuucca

SEQ ID NO: 361122 - RNA, 22 nt, Human
auuguucugauguugagggaau

SEQ ID NO: 361123 - RNA, 23 nt, Human
ggagcucuuuuacacagguacuu

SEQ ID NO: 361124 - RNA, 20 nt, Human
uacagaacacaggcuucuag

SEQ ID NO: 361125 - RNA, 22 nt, Human
uacuuugcucuuucuguauuua

SEQ ID NO: 361126 - RNA, 22 nt, Human
ugacugcagaucagaugggagc

SEQ ID NO: 361127 - RNA, 22 nt, Human
uguacagaacacaggcuucuag

SEQ ID NO: 361128 - RNA, 21 nt, Human
uguacagaacacaggcuucuc

SEQ ID NO: 361129 - RNA, 23 nt, Human
aaaagaacuuccagaaaccaagg

SEQ ID NO: 361130 - RNA, 21 nt, Human
aacacaaagacagucaaggaa

SEQ ID NO: 361131 - RNA, 21 nt, Human
aacaggagagcccuaggugac

SEQ ID NO: 361132 - RNA, 21 nt, Human
aaccacuggguaaauccagcc

SEQ ID NO: 361133 - RNA, 18 nt, Human
aagcagaaacucacagcc

SEQ ID NO: 361134 - RNA, 24 nt, Human
aagccccaugggcagcuugggugg

SEQ ID NO: 361135 - RNA, 20 nt, Human
aaggaacagagugacucgga

SEQ ID NO: 361136 - RNA, 19 nt, Human
aaggaugccuggugcuugc

SEQ ID NO: 361137 - RNA, 19 nt, Human
aagguggauggagacucgg

SEQ ID NO: 361138 - RNA, 20 nt, Human
acaaagcagaaacucacagc

SEQ ID NO: 361139 - RNA, 21 nt, Human
acacagacagacagggaaacc

SEQ ID NO: 361140 - RNA, 22 nt, Human
acagaaacacaaagacagucag

SEQ ID NO: 361141 - RNA, 22 nt, Human
accaugcaagccagacguagcc

SEQ ID NO: 361142 - RNA, 18 nt, Human
agaaaccaaggcaagggc

SEQ ID NO: 361143 - RNA, 23 nt, Human
agacagacagggaaaccuacaaa

SEQ ID NO: 361144 - RNA, 18 nt, Human
agaggcugcagcccaggg

SEQ ID NO: 361145 - RNA, 21 nt, Human
agaggcugcagcccagggcgg

SEQ ID NO: 361146 - RNA, 22 nt, Human
agcagcgucugcccucagaugc

SEQ ID NO: 361147 - RNA, 23 nt, Human
agccaaggaaaagaacuuccaga

SEQ ID NO: 361148 - RNA, 21 nt, Human
agccaccaaccaacguucaga

SEQ ID NO: 361149 - RNA, 22 nt, Human
agccagacagaccugacaccag

SEQ ID NO: 361150 - RNA, 23 nt, Human
agccagacagaccugacaccagg

SEQ ID NO: 361151 - RNA, 23 nt, Human
agccagacguagcccaaggccug

SEQ ID NO: 361152 - RNA, 18 nt, Human
agccagcaccauguggcc

SEQ ID NO: 361153 - RNA, 22 nt, Human
agccgaagugcaaaguguuggg

SEQ ID NO: 361154 - RNA, 20 nt, Human
agccugcaaaugugaccaca

SEQ ID NO: 361155 - RNA, 21 nt, Human
aggcaagggcucacuggcuuc

SEQ ID NO: 361156 - RNA, 24 nt, Human
aggcagaggcugugggaacugcug

SEQ ID NO: 361157 - RNA, 19 nt, Human
auagaagcaaccucuuuau

SEQ ID NO: 361158 - RNA, 21 nt, Human
auaugccacauagaaagggag

SEQ ID NO: 361159 - RNA, 21 nt, Human
caaaguguugggcccuugaaa

SEQ ID NO: 361160 - RNA, 20 nt, Human
caaccaacguucagagccag

SEQ ID NO: 361161 - RNA, 25 nt, Human
caaccuaaccacuggguaaauccag

SEQ ID NO: 361162 - RNA, 24 nt, Human
caaccucuuuauggacaaccuugu

SEQ ID NO: 361163 - RNA, 23 nt, Human
cacaggaccugccggccccaucc

SEQ ID NO: 361164 - RNA, 24 nt, Human
cacaggccauggcaggggacgccc

SEQ ID NO: 361165 - RNA, 20 nt, Human
caccacacacccgacagaug

SEQ ID NO: 361166 - RNA, 21 nt, Human
caccaggcgccacugcugccu

SEQ ID NO: 361167 - RNA, 20 nt, Human
caccauguggccgcugugcc

SEQ ID NO: 361168 - RNA, 21 nt, Human
cacggaguugacaacacaaag

SEQ ID NO: 361169 - RNA, 19 nt, Human
cacgggcauggacagaguc

SEQ ID NO: 361170 - RNA, 18 nt, Human
cacucugcgcgcgugugc

SEQ ID NO: 361171 - RNA, 21 nt, Human
cacuggcuucuugugaccugc

SEQ ID NO: 361172 - RNA, 18 nt, Human
cacuggguaaauccagcc

SEQ ID NO: 361173 - RNA, 21 nt, Human
cagacagggaaaccuacaaaa

SEQ ID NO: 361174 - RNA, 21 nt, Human
cagaccugacaccaggcgcca

SEQ ID NO: 361175 - RNA, 19 nt, Human
cagcccagggcgggggcag

SEQ ID NO: 361176 - RNA, 18 nt, Human
cagccgaagugcaaagug

SEQ ID NO: 361177 - RNA, 19 nt, Human
cagccugcaaaugugacca

SEQ ID NO: 361178 - RNA, 21 nt, Human
cagcuucagcuccgggugcuc

SEQ ID NO: 361179 - RNA, 19 nt, Human
caucagggacagcuucagc

SEQ ID NO: 361180 - RNA, 21 nt, Human
caugaaauguggaccugccga

SEQ ID NO: 361181 - RNA, 18 nt, Human
caugcaagccagacguag

SEQ ID NO: 361182 - RNA, 22 nt, Human
caugcaaggcacaggccauggc

SEQ ID NO: 361183 - RNA, 20 nt, Human
ccagacagaccugacaccag

SEQ ID NO: 361184 - RNA, 19 nt, Human
ccaggcccaggcugcccac

SEQ ID NO: 361185 - RNA, 21 nt, Human
ccaggcccaggcugcccacgc

SEQ ID NO: 361186 - RNA, 21 nt, Human
ccagggcgggggcagagcuga

SEQ ID NO: 361187 - RNA, 25 nt, Human
ccaugcaagccagacguagcccaag

SEQ ID NO: 361188 - RNA, 19 nt, Human
ccaugggcagcuugggugg

SEQ ID NO: 361189 - RNA, 24 nt, Human
cccgcagccugcaaaugugaccac

SEQ ID NO: 361190 - RNA, 19 nt, Human
cccugagcggagccauggc

SEQ ID NO: 361191 - RNA, 18 nt, Human
cccugggccaagcccagg

SEQ ID NO: 361192 - RNA, 21 nt, Human
cccugggccaagcccaggccc

SEQ ID NO: 361193 - RNA, 24 nt, Human
cccuggguuucagugcauuugccu

SEQ ID NO: 361194 - RNA, 19 nt, Human
ccguaggaagccccauggg

SEQ ID NO: 361195 - RNA, 20 nt, Human
ccuacaaaaggaaacggagu

SEQ ID NO: 361196 - RNA, 18 nt, Human
ccucagaagcagggcugu

SEQ ID NO: 361197 - RNA, 26 nt, Human
ccuccuucccuggagcaccggggugg

SEQ ID NO: 361198 - RNA, 19 nt, Human
ccuguggcugugggcuggg

SEQ ID NO: 361199 - RNA, 18 nt, Human
cgagaagaucuggccacg

SEQ ID NO: 361200 - RNA, 19 nt, Human
cgcugugccucuagccugc

SEQ ID NO: 361201 - RNA, 21 nt, Human
cggggcccugagcggagccau

SEQ ID NO: 361202 - RNA, 19 nt, Human
cgggggcagagcugagccc

SEQ ID NO: 361203 - RNA, 22 nt, Human
cgggguggggauggcacgugug

SEQ ID NO: 361204 - RNA, 20 nt, Human
cgggugcucuuccaagaaug

SEQ ID NO: 361205 - RNA, 19 nt, Human
cggugccacugcccgcagc

SEQ ID NO: 361206 - RNA, 19 nt, Human
cguucuggaaaagccgagg

SEQ ID NO: 361207 - RNA, 20 nt, Human
cuaaagguggauggagacuc

SEQ ID NO: 361208 - RNA, 19 nt, Human
cucuacagcaaugccagcc

SEQ ID NO: 361209 - RNA, 19 nt, Human
cuggagcaccggggugggg

SEQ ID NO: 361210 - RNA, 21 nt, Human
cuggggugggguggggugggg

SEQ ID NO: 361211 - RNA, 22 nt, Human
cugugccucuagccugcucucc

SEQ ID NO: 361212 - RNA, 21 nt, Human
cuucagcuccgggugcucuuc

SEQ ID NO: 361213 - RNA, 22 nt, Human
cuuuauggacaaccuuguuacc

SEQ ID NO: 361214 - RNA, 18 nt, Human
gaaagggaggcccaaguc

SEQ ID NO: 361215 - RNA, 20 nt, Human
gaaaugcaaccuaaccacug

SEQ ID NO: 361216 - RNA, 18 nt, Human
gagaagaucuggccacgu

SEQ ID NO: 361217 - RNA, 19 nt, Human
gcacaggccauggcagggg

SEQ ID NO: 361218 - RNA, 20 nt, Human
gcagagcugagcccucagga

SEQ ID NO: 361219 - RNA, 21 nt, Human
gcagccgucacucuacagcaa

SEQ ID NO: 361220 - RNA, 24 nt, Human
gcucaugaaauguggaccugccga

SEQ ID NO: 361221 - RNA, 18 nt, Human
gcugaacugugugccgug

SEQ ID NO: 361222 - RNA, 21 nt, Human
ggaaacggagucaauuguaaa

SEQ ID NO: 361223 - RNA, 19 nt, Human
ggacacaggaccugccggc

SEQ ID NO: 361224 - RNA, 21 nt, Human
ggacagcugcaaacacagccc

SEQ ID NO: 361225 - RNA, 19 nt, Human
gggauggcacgugugagcc

SEQ ID NO: 361226 - RNA, 18 nt, Human
gggcagagcugagcccuc

SEQ ID NO: 361227 - RNA, 19 nt, Human
gguacagaaacacaaagac

SEQ ID NO: 361228 - RNA, 24 nt, Human
gugucugccgucugguucccuggg

SEQ ID NO: 361229 - RNA, 19 nt, Human
uacaaaaggaaacggaguc

SEQ ID NO: 361230 - RNA, 19 nt, Human
uacaaagcagaaacucaca

SEQ ID NO: 361231 - RNA, 20 nt, Human
uagaaaugcaaccuaaccac

SEQ ID NO: 361232 - RNA, 24 nt, Human
uaggugacgggccuagaaacuucc

SEQ ID NO: 361233 - RNA, 20 nt, Human
uaugccacauagaaagggag

SEQ ID NO: 361234 - RNA, 19 nt, Human
ucacagccagccgaagugc

SEQ ID NO: 361235 - RNA, 21 nt, Human
ucacagccagccgaagugcaa

SEQ ID NO: 361236 - RNA, 18 nt, Human
ucacugggggacaggugu

SEQ ID NO: 361237 - RNA, 19 nt, Human
ucagaaacaucugggggca

SEQ ID NO: 361238 - RNA, 19 nt, Human
ucagaaacaucugggggca

SEQ ID NO: 361239 - RNA, 26 nt, Human
ucagcucaugaaauguggaccugccc

SEQ ID NO: 361240 - RNA, 18 nt, Human
ucagugccuugagguaca

SEQ ID NO: 361241 - RNA, 20 nt, Human
uccagcuucagugccuugag

SEQ ID NO: 361242 - RNA, 21 nt, Human
ucccuggagcaccgggguggg

SEQ ID NO: 361243 - RNA, 19 nt, Human
uccuggggugggguggggu

SEQ ID NO: 361244 - RNA, 21 nt, Human
uccuggggugggguggggugg

SEQ ID NO: 361245 - RNA, 18 nt, Human
ucggugccacugcccgca

SEQ ID NO: 361246 - RNA, 23 nt, Human
ucucuucagugccaccgccgccu

SEQ ID NO: 361247 - RNA, 22 nt, Human
ucuucagugccaccgccgccuc

SEQ ID NO: 361248 - RNA, 18 nt, Human
ugaacaggagagcccuag

SEQ ID NO: 361249 - RNA, 21 nt, Human
ugacaccaggcgccacugcug

SEQ ID NO: 361250 - RNA, 19 nt, Human
ugaccggggcccugagcgg

SEQ ID NO: 361251 - RNA, 19 nt, Human
ugagccagcucagaggcug

SEQ ID NO: 361252 - RNA, 18 nt, Human
ugagcggagccauggcca

SEQ ID NO: 361253 - RNA, 20 nt, Human
ugcaagccagacguagccca

SEQ ID NO: 361254 - RNA, 22 nt, Human
ugcagaggcugcagcccagggc

SEQ ID NO: 361255 - RNA, 20 nt, Human
ugccugucccagagugccgu

SEQ ID NO: 361256 - RNA, 20 nt, Human
ugcgugaggcacugaucgca

SEQ ID NO: 361257 - RNA, 18 nt, Human
ugcgugcagaggcugcag

SEQ ID NO: 361258 - RNA, 21 nt, Human
ugcuccugggguggggugggg

SEQ ID NO: 361259 - RNA, 19 nt, Human
uggcagagccacagcuggg

SEQ ID NO: 361260 - RNA, 22 nt, Human
uggcagagccacagcugggggc

SEQ ID NO: 361261 - RNA, 20 nt, Human
uggcaggggacgcccgggac

SEQ ID NO: 361262 - RNA, 18 nt, Human
uggcaucacugggggaca

SEQ ID NO: 361263 - RNA, 21 nt, Human
uggcugugggcugggcccugu

SEQ ID NO: 361264 - RNA, 21 nt, Human
ugggaacugcugagccccgcu

SEQ ID NO: 361265 - RNA, 24 nt, Human
ugggaacugcugagccccgcugug

SEQ ID NO: 361266 - RNA, 18 nt, Human
ugggcugggcccugucag

SEQ ID NO: 361267 - RNA, 20 nt, Human
ugggguggggagggcagucc

SEQ ID NO: 361268 - RNA, 22 nt, Human
uggggugggguggggagggcag

SEQ ID NO: 361269 - RNA, 19 nt, Human
uggguaaauccagccaagg

SEQ ID NO: 361270 - RNA, 23 nt, Human
ugucugccgucugguucccuggg

SEQ ID NO: 361271 - RNA, 21 nt, Human
ugucugggacacgcucugggc

SEQ ID NO: 361272 - RNA, 24 nt, Human
uguggaccugccgagcccagaggc

SEQ ID NO: 361273 - RNA, 18 nt, Human
ugugugccgugcuccugg

SEQ ID NO: 361274 - RNA, 21 nt, Human
ugugugccgugcuccuggggu

SEQ ID NO: 361275 - RNA, 22 nt, Human
uguuaccacguaacucccuggg

SEQ ID NO: 361276 - RNA, 21 nt, Human
uguucacucugcgcgcgugug

SEQ ID NO: 361277 - RNA, 30 nt, Human
uucaccacacacccgacagaugauccaccc

SEQ ID NO: 361278 - RNA, 21 nt, Human
uucaccuucaucaucagggac

SEQ ID NO: 361279 - RNA, 22 nt, Human
uucaccuucaucaucagggaca

SEQ ID NO: 361280 - RNA, 20 nt, Human
uuuccagauggcccuggccc

SEQ ID NO: 361281 - RNA, 18 nt, Human
agcagcaagggcugcuac

SEQ ID NO: 361282 - RNA, 22 nt, Human
gagcuugggguguccccuccgg

SEQ ID NO: 361283 - RNA, 24 nt, Human
ggaauggggugggucuuccugggc

SEQ ID NO: 361284 - RNA, 19 nt, Human
gggcugcuacagccacugc

SEQ ID NO: 361285 - RNA, 20 nt, Human
gguaacagaaggaccaaaga

SEQ ID NO: 361286 - RNA, 24 nt, Human
guggagcagcaagggcugcuacag

SEQ ID NO: 361287 - RNA, 21 nt, Human
uguggagcagcaagggcuggu

SEQ ID NO: 361288 - RNA, 24 nt, Human
aagcgcuccuaggggaaucuccac

SEQ ID NO: 361289 - RNA, 19 nt, Human
aaggagcuuauuucucagg

SEQ ID NO: 361290 - RNA, 21 nt, Human
aaugauaaaacagcuaacuga

SEQ ID NO: 361291 - RNA, 23 nt, Human
acacugguugugaacagcuggaa

SEQ ID NO: 361292 - RNA, 26 nt, Human
agcaacugaccgccuugcagccacag

SEQ ID NO: 361293 - RNA, 24 nt, Human
aggcagacaccacuuccagccucg

SEQ ID NO: 361294 - RNA, 20 nt, Human
aucacacacugguugugaac

SEQ ID NO: 361295 - RNA, 19 nt, Human
aucagaagucuuagaaauc

SEQ ID NO: 361296 - RNA, 18 nt, Human
auggagagaucaaggcca

SEQ ID NO: 361297 - RNA, 18 nt, Human
caccccaugggagggcag

SEQ ID NO: 361298 - RNA, 19 nt, Human
cagaaugggcaccaacuaa

SEQ ID NO: 361299 - RNA, 19 nt, Human
cagccccaguggguuguaa

SEQ ID NO: 361300 - RNA, 18 nt, Human
caggacccaggccuggcc

SEQ ID NO: 361301 - RNA, 19 nt, Human
caugagucaccccauggga

SEQ ID NO: 361302 - RNA, 19 nt, Human
cauggagagaucaaggcca

SEQ ID NO: 361303 - RNA, 22 nt, Human
cccaggaaagugaucuuuaaag

SEQ ID NO: 361304 - RNA, 18 nt, Human
cccaguggguuguaacug

SEQ ID NO: 361305 - RNA, 21 nt, Human
ccccaguggguuguaacugug

SEQ ID NO: 361306 - RNA, 24 nt, Human
ccuccuaucccaacuguacgagac

SEQ ID NO: 361307 - RNA, 20 nt, Human
ccugcugggacaagcagcaa

SEQ ID NO: 361308 - RNA, 25 nt, Human
ccuggccugaccccagaauuauggc

SEQ ID NO: 361309 - RNA, 25 nt, Human
cgagacaaacaccaugccagauuug

SEQ ID NO: 361310 - RNA, 25 nt, Human
cuaaugcugggccauuccauucagc

SEQ ID NO: 361311 - RNA, 20 nt, Human
cuccaaggauuaaaaaagaa

SEQ ID NO: 361312 - RNA, 21 nt, Human
cugaccgccuugcagccacag

SEQ ID NO: 361313 - RNA, 23 nt, Human
cugcugggacaagcagcaacuga

SEQ ID NO: 361314 - RNA, 25 nt, Human
cuuccagucccauacaacgcaucuc

SEQ ID NO: 361315 - RNA, 18 nt, Human
cuuccugagggccugagc

SEQ ID NO: 361316 - RNA, 21 nt, Human
cuuugaaugaaccucuugcuu

SEQ ID NO: 361317 - RNA, 21 nt, Human
gacaagcagcaacugaccgcc

SEQ ID NO: 361318 - RNA, 23 nt, Human
gagaaacagcaaagaggcuuugc

SEQ ID NO: 361319 - RNA, 22 nt, Human
gagggcaggacccaggccuggc

SEQ ID NO: 361320 - RNA, 21 nt, Human
gaugaaacaggagaauccuaa

SEQ ID NO: 361321 - RNA, 21 nt, Human
gcaggacccaggccuggccug

SEQ ID NO: 361322 - RNA, 22 nt, Human
gcucacuuggaaaggaggugga

SEQ ID NO: 361323 - RNA, 22 nt, Human
ggccaaacugacccagaugaaa

SEQ ID NO: 361324 - RNA, 19 nt, Human
gggccccugggcugguguc

SEQ ID NO: 361325 - RNA, 21 nt, Human
gggcgcugccuucccagcugg

SEQ ID NO: 361326 - RNA, 23 nt, Human
ggugauggugacagcccuuugag

SEQ ID NO: 361327 - RNA, 24 nt, Human
ggugauggugacagcccuuugaga

SEQ ID NO: 361328 - RNA, 24 nt, Human
uaaaacaacuggugcagaaugggc

SEQ ID NO: 361329 - RNA, 22 nt, Human
uaaaacagcuaacugauaaagg

SEQ ID NO: 361330 - RNA, 25 nt, Human
uaaaacagcuaacugauaaaggagc

SEQ ID NO: 361331 - RNA, 20 nt, Human
uaggaaagggaagugugacg

SEQ ID NO: 361332 - RNA, 24 nt, Human
uaggagaguccuggcuggaggggu

SEQ ID NO: 361333 - RNA, 18 nt, Human
uaucccaacuguacgaga

SEQ ID NO: 361334 - RNA, 18 nt, Human
uauccuagauaauggcuc

SEQ ID NO: 361335 - RNA, 18 nt, Human
ucauguccuuggaaagcu

SEQ ID NO: 361336 - RNA, 18 nt, Human
ucccaccagccccagugg

SEQ ID NO: 361337 - RNA, 19 nt, Human
ucccagcuggccaagcgcu

SEQ ID NO: 361338 - RNA, 18 nt, Human
ugaaacaggagaauccua

SEQ ID NO: 361339 - RNA, 22 nt, Human
ugaaacaggagaauccuaaauc

SEQ ID NO: 361340 - RNA, 18 nt, Human
ugaaccucuugcuuccag

SEQ ID NO: 361341 - RNA, 20 nt, Human
ugaaggcagacaccacuucc

SEQ ID NO: 361342 - RNA, 18 nt, Human
ugaauggccuccuauccc

SEQ ID NO: 361343 - RNA, 23 nt, Human
ugagagauaccugggcuuugaac

SEQ ID NO: 361344 - RNA, 21 nt, Human
ugagggccugagcucuucacu

SEQ ID NO: 361345 - RNA, 19 nt, Human
ugcacagucucauguccuu

SEQ ID NO: 361346 - RNA, 18 nt, Human
ugcagaaggggacaaucu

SEQ ID NO: 361347 - RNA, 21 nt, Human
ugcagaaugggcaccaacuaa

SEQ ID NO: 361348 - RNA, 23 nt, Human
ugcagccacagaggccuaugggg

SEQ ID NO: 361349 - RNA, 21 nt, Human
uggagcucaacuuccaacuca

SEQ ID NO: 361350 - RNA, 23 nt, Human
uggccuuuuacaaggccccaauu

SEQ ID NO: 361351 - RNA, 21 nt, Human
uggcuggaggggucaugaguc

SEQ ID NO: 361352 - RNA, 19 nt, Human
ugggaaugaauggccuccu

SEQ ID NO: 361353 - RNA, 24 nt, Human
ugggacaagcagcaacugaccgcc

SEQ ID NO: 361354 - RNA, 23 nt, Human
ugggagggcaggacccaggccug

SEQ ID NO: 361355 - RNA, 21 nt, Human
ugggcaccaacuaagcaaaau

SEQ ID NO: 361356 - RNA, 23 nt, Human
ugguuacaaaucccaugaguuuc

SEQ ID NO: 361357 - RNA, 20 nt, Human
ugguuaucggcagggguaaa

SEQ ID NO: 361358 - RNA, 25 nt, Human
uuacccauaugcagaaggggacaau

SEQ ID NO: 361359 - RNA, 20 nt, Human
uucacaguauuuuugaucag

SEQ ID NO: 361360 - RNA, 24 nt, Human
uugaugacacugggcugucuugua

SEQ ID NO: 361361 - RNA, 21 nt, Human
uuugcacagucucauguccuu

SEQ ID NO: 361362 - RNA, 23 nt, Human
uuugcacagucucauguccuugg

SEQ ID NO: 361363 - RNA, 20 nt, Human
acaagcaccugagcuuguca

SEQ ID NO: 361364 - RNA, 21 nt, Human
acauuaaaaacgcucagagca

SEQ ID NO: 361365 - RNA, 20 nt, Human
agaguccuccuucgucuugg

SEQ ID NO: 361366 - RNA, 23 nt, Human
agcaaaaaggaacugggaaagga

SEQ ID NO: 361367 - RNA, 24 nt, Human
aggaagaagacacuaacagcgaaa

SEQ ID NO: 361368 - RNA, 25 nt, Human
aggaagaagacacuaacagcgaaag

SEQ ID NO: 361369 - RNA, 19 nt, Human
aggaugauaaacgggggca

SEQ ID NO: 361370 - RNA, 25 nt, Human
auuuaauuuuuauuuucuuuuucuu

SEQ ID NO: 361371 - RNA, 23 nt, Human
caccuuugcugcugcugcucggc

SEQ ID NO: 361372 - RNA, 18 nt, Human
cacuaacagcgaacgaug

SEQ ID NO: 361373 - RNA, 20 nt, Human
cagagcacauugugcucucc

SEQ ID NO: 361374 - RNA, 23 nt, Human
cagcagaaacccccuuaauccuu

SEQ ID NO: 361375 - RNA, 25 nt, Human
caguucacuugagguggcggaaucu

SEQ ID NO: 361376 - RNA, 21 nt, Human
ccuuaaaacaagcaccugagc

SEQ ID NO: 361377 - RNA, 19 nt, Human
ccuucgucuugggggcaga

SEQ ID NO: 361378 - RNA, 18 nt, Human
ccuuugcugcugcugcuc

SEQ ID NO: 361379 - RNA, 21 nt, Human
ccuuugcugcugcugcucggc

SEQ ID NO: 361380 - RNA, 21 nt, Human
cgccucuguccucuccagcuc

SEQ ID NO: 361381 - RNA, 21 nt, Human
cgcucagagcacauugugcuc

SEQ ID NO: 361382 - RNA, 19 nt, Human
cuccuggugguccuagugg

SEQ ID NO: 361383 - RNA, 18 nt, Human
cuggccuccugcuuuagg

SEQ ID NO: 361384 - RNA, 22 nt, Human
cuggugguccuagugguuuucu

SEQ ID NO: 361385 - RNA, 24 nt, Human
cuggugguccuagugguuuucuuu

SEQ ID NO: 361386 - RNA, 24 nt, Human
cuuaaaaacauuaaaaacgcucag

SEQ ID NO: 361387 - RNA, 23 nt, Human
cuuuaagccacaccuuugcugcu

SEQ ID NO: 361388 - RNA, 26 nt, Human
cuuuccuuaaaacaagcaccugagaa

SEQ ID NO: 361389 - RNA, 19 nt, Human
gaaaggaugauaaacgggg

SEQ ID NO: 361390 - RNA, 24 nt, Human
gaagaaaucauuuaaaagcuuaaa

SEQ ID NO: 361391 - RNA, 20 nt, Human
gacuucagguggggcugcug

SEQ ID NO: 361392 - RNA, 21 nt, Human
gagaguccuccuucgucuugg

SEQ ID NO: 361393 - RNA, 23 nt, Human
gccacaccuuugcugcugcugcc

SEQ ID NO: 361394 - RNA, 21 nt, Human
gggcaggaagaagacacuaac

SEQ ID NO: 361395 - RNA, 18 nt, Human
uaaaacaagcaccugagc

SEQ ID NO: 361396 - RNA, 21 nt, Human
uaaaacaagcaccugagcuug

SEQ ID NO: 361397 - RNA, 23 nt, Human
uagugguuuucuuugccuguggu

SEQ ID NO: 361398 - RNA, 20 nt, Human
ucagguggggcugcuggucg

SEQ ID NO: 361399 - RNA, 26 nt, Human
ucccaggacgugguaccuuaacucuu

SEQ ID NO: 361400 - RNA, 19 nt, Human
uccugcaguucacuugagg

SEQ ID NO: 361401 - RNA, 23 nt, Human
ucugggguugugugcuccuggug

SEQ ID NO: 361402 - RNA, 21 nt, Human
ucuuaaaccuuucuuggcuuc

SEQ ID NO: 361403 - RNA, 28 nt, Human
ucuugggggcagaacgggagggcaguua

SEQ ID NO: 361404 - RNA, 19 nt, Human
ugaagaaaucauuuaaaag

SEQ ID NO: 361405 - RNA, 23 nt, Human
ugaagaaaucauuuaaaagcuua

SEQ ID NO: 361406 - RNA, 21 nt, Human
ugaccagcaaaaaggaacugg

SEQ ID NO: 361407 - RNA, 23 nt, Human
ugcucggccuugaagaaaucauu

SEQ ID NO: 361408 - RNA, 19 nt, Human
ugcugcugcugcucggccu

SEQ ID NO: 361409 - RNA, 20 nt, Human
uggcuuccgagaguccuccu

SEQ ID NO: 361410 - RNA, 21 nt, Human
ugggaaaggaugauaaacggg

SEQ ID NO: 361411 - RNA, 22 nt, Human
uggggcugcuggucgcucccag

SEQ ID NO: 361412 - RNA, 23 nt, Human
uggggcugcuggucgcucccagg

SEQ ID NO: 361413 - RNA, 21 nt, Human
ugguugggccaguuuguacac

SEQ ID NO: 361414 - RNA, 21 nt, Human
uucagguggggcugcuggucg

SEQ ID NO: 361415 - RNA, 26 nt, Human
uuccuuaaaacaagcaccugagcucc

SEQ ID NO: 361416 - RNA, 19 nt, Human
uugagguggcggaaucuuc

SEQ ID NO: 361417 - RNA, 24 nt, Human
uugauuaguaauagaguaacuuca

SEQ ID NO: 361418 - RNA, 18 nt, Human
uugcugcugcugcucggc

SEQ ID NO: 361419 - RNA, 18 nt, Human
uuucuugagcuguggugc

SEQ ID NO: 361420 - RNA, 24 nt, Human
uuuuaauuuaauuuuuauuuucuu

SEQ ID NO: 361421 - RNA, 22 nt, Human
uuuuuuuuuuuuucuuugucuu

SEQ ID NO: 361422 - RNA, 24 nt, Human
uuuuuuuuuuuuuuuuucuuuggg

SEQ ID NO: 361423 - RNA, 24 nt, Human
aaagugcugggauuacaggcguga

SEQ ID NO: 361424 - RNA, 24 nt, Human
aaaugacucgugaccauggcugca

SEQ ID NO: 361425 - RNA, 20 nt, Human
aacuucgauuuugugacugu

SEQ ID NO: 361426 - RNA, 21 nt, Human
aagcaaucugcccgccugggc

SEQ ID NO: 361427 - RNA, 25 nt, Human
aaguagcuggaacuacaggcaccca

SEQ ID NO: 361428 - RNA, 19 nt, Human
aagugcugggauuacaggc

SEQ ID NO: 361429 - RNA, 19 nt, Human
aagugcugggauuacaggc

SEQ ID NO: 361430 - RNA, 22 nt, Human
acaacuuauaaaaauaacaccc

SEQ ID NO: 361431 - RNA, 21 nt, Human
acaggcacccaccaccaugcc

SEQ ID NO: 361432 - RNA, 21 nt, Human
acaggcacccaccaccaugcc

SEQ ID NO: 361433 - RNA, 18 nt, Human
acaggcgugagcaccaca

SEQ ID NO: 361434 - RNA, 19 nt, Human
acaggguuucaccaugcug

SEQ ID NO: 361435 - RNA, 24 nt, Human
acaggguuucaccaugcugcccag

SEQ ID NO: 361436 - RNA, 18 nt, Human
accaagaauaucaauaaa

SEQ ID NO: 361437 - RNA, 24 nt, Human
accaugcugcccaggcuggucuug

SEQ ID NO: 361438 - RNA, 25 nt, Human
accaugcugcccaggcuggucuuga

SEQ ID NO: 361439 - RNA, 23 nt, Human
acccagguuggagugcaguggug

SEQ ID NO: 361440 - RNA, 24 nt, Human
acucuugucacccagguuggagug

SEQ ID NO: 361441 - RNA, 19 nt, Human
agaaaugacucgugaccau

SEQ ID NO: 361442 - RNA, 21 nt, Human
agcagaaggcaguggcugaua

SEQ ID NO: 361443 - RNA, 21 nt, Human
agcucacugcagccuccuccu

SEQ ID NO: 361444 - RNA, 18 nt, Human
aggaaguggggacugagc

SEQ ID NO: 361445 - RNA, 25 nt, Human
aggaauucaacaacuuauaaaaaua

SEQ ID NO: 361446 - RNA, 21 nt, Human
aggcagaaaugacucgugacc

SEQ ID NO: 361447 - RNA, 20 nt, Human
agggauagggugcaggccau

SEQ ID NO: 361448 - RNA, 25 nt, Human
agguuggagugcaguggugcaaucu

SEQ ID NO: 361449 - RNA, 21 nt, Human
agugcaguggugcaaucuuag

SEQ ID NO: 361450 - RNA, 18 nt, Human
agugcugggauuacaggc

SEQ ID NO: 361451 - RNA, 22 nt, Human
auuuucccaccucagccuccca

SEQ ID NO: 361452 - RNA, 19 nt, Human
caaaaugagcauaagaaca

SEQ ID NO: 361453 - RNA, 24 nt, Human
caaagugcugggauuacaggcgug

SEQ ID NO: 361454 - RNA, 24 nt, Human
caccaugccuggcuaauuuuugua

SEQ ID NO: 361455 - RNA, 24 nt, Human
caccaugcugcccaggcuggucuu

SEQ ID NO: 361456 - RNA, 27 nt, Human
caccaugcugcccaggcuggucuugaa

SEQ ID NO: 361457 - RNA, 18 nt, Human
cacccaccaccaugccug

SEQ ID NO: 361458 - RNA, 24 nt, Human
cacccagguuggagugcaguggug

SEQ ID NO: 361459 - RNA, 21 nt, Human
cacccguaagcauucugaccu

SEQ ID NO: 361460 - RNA, 24 nt, Human
caccucagccucccaaguagcugg

SEQ ID NO: 361461 - RNA, 24 nt, Human
cacucuugucacccagguuggagu

SEQ ID NO: 361462 - RNA, 21 nt, Human
cacugcagccuccuccuccug

SEQ ID NO: 361463 - RNA, 21 nt, Human
cagcagaaggcaguggcugau

SEQ ID NO: 361464 - RNA, 23 nt, Human
cagccuccuccuccugggcucaa

SEQ ID NO: 361465 - RNA, 24 nt, Human
caggguuucaccaugcugcccagg

SEQ ID NO: 361466 - RNA, 24 nt, Human
caugcugcccaggcuggucuugaa

SEQ ID NO: 361467 - RNA, 20 nt, Human
ccaaagugcugggauuacag

SEQ ID NO: 361468 - RNA, 22 nt, Human
ccaaagugcugggauuacaggc

SEQ ID NO: 361469 - RNA, 22 nt, Human
ccaaagugcugggauuacaggc

SEQ ID NO: 361470 - RNA, 24 nt, Human
ccaaagugcugggauuacaggcgu

SEQ ID NO: 361471 - RNA, 24 nt, Human
ccagagcacaucaccuggauguga

SEQ ID NO: 361472 - RNA, 24 nt, Human
ccaggcuggucuugaacuccuggg

SEQ ID NO: 361473 - RNA, 18 nt, Human
ccauaggcuuagguuggg

SEQ ID NO: 361474 - RNA, 23 nt, Human
cccaacauugucccaugagagaa

SEQ ID NO: 361475 - RNA, 23 nt, Human
cccaccucagccucccaaguagc

SEQ ID NO: 361476 - RNA, 20 nt, Human
cccaccuccacgacaaggga

SEQ ID NO: 361477 - RNA, 24 nt, Human
ccccaaagugcugggauuacaggc

SEQ ID NO: 361478 - RNA, 24 nt, Human
cccguaagcauucugaccuuugcc

SEQ ID NO: 361479 - RNA, 23 nt, Human
cccuuuauuucuuuuuggugguu

SEQ ID NO: 361480 - RNA, 22 nt, Human
ccguaagcauucugaccuuugc

SEQ ID NO: 361481 - RNA, 28 nt, Human
ccuccacgacaagggagagugcuuuucg

SEQ ID NO: 361482 - RNA, 18 nt, Human
ccuccuccugggcucaag

SEQ ID NO: 361483 - RNA, 18 nt, Human
ccuggguucaagcaaucu

SEQ ID NO: 361484 - RNA, 22 nt, Human
ccuggguucaagcaaucugccc

SEQ ID NO: 361485 - RNA, 21 nt, Human
ccuuucucccucuugcagucc

SEQ ID NO: 361486 - RNA, 21 nt, Human
ccuuucucccucuugcagucc

SEQ ID NO: 361487 - RNA, 20 nt, Human
cgacaagggagagugcuuac

SEQ ID NO: 361488 - RNA, 24 nt, Human
cucaagucauuuucccaccucagc

SEQ ID NO: 361489 - RNA, 21 nt, Human
cucacugcagccuccuccucc

SEQ ID NO: 361490 - RNA, 23 nt, Human
cucacugcagccuccuccuccug

SEQ ID NO: 361491 - RNA, 24 nt, Human
cucacugcagccuccuccuccugg

SEQ ID NO: 361492 - RNA, 20 nt, Human
cuccuggguucaagcaaucu

SEQ ID NO: 361493 - RNA, 23 nt, Human
cugcagccuccuccuccugggcu

SEQ ID NO: 361494 - RNA, 21 nt, Human
cugggcuccccaaagugcugg

SEQ ID NO: 361495 - RNA, 19 nt, Human
cuggucuugaacuccuggg

SEQ ID NO: 361496 - RNA, 18 nt, Human
cuuagguuggguuuaugg

SEQ ID NO: 361497 - RNA, 24 nt, Human
cuugucacccagguuggagugcag

SEQ ID NO: 361498 - RNA, 19 nt, Human
gaaaaaccccaacauuguc

SEQ ID NO: 361499 - RNA, 20 nt, Human
gaacagauuacagacgcguc

SEQ ID NO: 361500 - RNA, 20 nt, Human
gaacagguuaagccaggaac

SEQ ID NO: 361501 - RNA, 21 nt, Human
gauuacaggcgugagcaccac

SEQ ID NO: 361502 - RNA, 22 nt, Human
gcucacugcagccuccuccucc

SEQ ID NO: 361503 - RNA, 20 nt, Human
gcuggaacuacaggcaccca

SEQ ID NO: 361504 - RNA, 18 nt, Human
ggaguugaaaggaaaaua

SEQ ID NO: 361505 - RNA, 18 nt, Human
ggcuggucuugaacuccu

SEQ ID NO: 361506 - RNA, 21 nt, Human
guagauacaggguuucaccau

SEQ ID NO: 361507 - RNA, 22 nt, Human
guagauacaggguuucaccaug

SEQ ID NO: 361508 - RNA, 18 nt, Human
gucauuuucccaccucag

SEQ ID NO: 361509 - RNA, 25 nt, Human
guugcaauacagaauaauuuugauu

SEQ ID NO: 361510 - RNA, 23 nt, Human
uaaaaaaaaagccaagcugcuua

SEQ ID NO: 361511 - RNA, 28 nt, Human
uaaaaaaaaagccaagcugcuuaucacu

SEQ ID NO: 361512 - RNA, 21 nt, Human
uaacuucgauuuugugacugu

SEQ ID NO: 361513 - RNA, 22 nt, Human
uaauuuuuguauuuuuuguaga

SEQ ID NO: 361514 - RNA, 23 nt, Human
uacaggcgugagcaccacacuca

SEQ ID NO: 361515 - RNA, 20 nt, Human
uacaggguuucaccaugcug

SEQ ID NO: 361516 - RNA, 18 nt, Human
uaccagagcacaucaccu

SEQ ID NO: 361517 - RNA, 21 nt, Human
uaccagagcacaucaccugga

SEQ ID NO: 361518 - RNA, 19 nt, Human
uacucgugaaaaacagcag

SEQ ID NO: 361519 - RNA, 21 nt, Human
uagauacaggguuucaccaug

SEQ ID NO: 361520 - RNA, 23 nt, Human
uagcucacugcagccuccuccuc

SEQ ID NO: 361521 - RNA, 26 nt, Human
uaggcuuagguuggguuuaugggggu

SEQ ID NO: 361522 - RNA, 20 nt, Human
uagggugcaggccauuguuu

SEQ ID NO: 361523 - RNA, 23 nt, Human
uaucaauaaauacuaauaguuug

SEQ ID NO: 361524 - RNA, 19 nt, Human
uauuuuuuguagauacagg

SEQ ID NO: 361525 - RNA, 22 nt, Human
ucacacacacaagggauagggu

SEQ ID NO: 361526 - RNA, 22 nt, Human
ucacccagguuggagugcagug

SEQ ID NO: 361527 - RNA, 23 nt, Human
ucacucuugucacccagguugga

SEQ ID NO: 361528 - RNA, 24 nt, Human
ucacugcagccuccuccuccuggg

SEQ ID NO: 361529 - RNA, 20 nt, Human
ucagccucccaaguagcugg

SEQ ID NO: 361530 - RNA, 25 nt, Human
uccauaccagagcacaucaccugga

SEQ ID NO: 361531 - RNA, 24 nt, Human
ucccaaguagcuggaacuacaggc

SEQ ID NO: 361532 - RNA, 20 nt, Human
uccccaaagugcugggauua

SEQ ID NO: 361533 - RNA, 24 nt, Human
uccccaaagugcugggauuacagg

SEQ ID NO: 361534 - RNA, 20 nt, Human
uccucaaaugaauaaaaaaa

SEQ ID NO: 361535 - RNA, 23 nt, Human
uccucaaaugaauaaaaaaauau

SEQ ID NO: 361536 - RNA, 21 nt, Human
uccugggcucaagucauuuuc

SEQ ID NO: 361537 - RNA, 22 nt, Human
uccugggcucaagucauuuucc

SEQ ID NO: 361538 - RNA, 24 nt, Human
uccugggcucaagucauuuuccca

SEQ ID NO: 361539 - RNA, 18 nt, Human
uccuggguucaagcaauc

SEQ ID NO: 361540 - RNA, 18 nt, Human
uccuggguucaagcaauc

SEQ ID NO: 361541 - RNA, 20 nt, Human
uccuggguucaagcaaucug

SEQ ID NO: 361542 - RNA, 22 nt, Human
uccuucuguuggagcacuuuga

SEQ ID NO: 361543 - RNA, 26 nt, Human
ucgugaccauggcugcaaauggggcu

SEQ ID NO: 361544 - RNA, 23 nt, Human
ucuaaauuaaggaauucaacaac

SEQ ID NO: 361545 - RNA, 23 nt, Human
ucuugaacuccuggguucaagca

SEQ ID NO: 361546 - RNA, 21 nt, Human
ugaaaaaccccaacauugucc

SEQ ID NO: 361547 - RNA, 30 nt, Human
ugaaaaaccccaacauugucccaugagagg

SEQ ID NO: 361548 - RNA, 24 nt, Human
ugaacuccuggguucaagcaaucu

SEQ ID NO: 361549 - RNA, 20 nt, Human
ugacuguggauuccauaggc

SEQ ID NO: 361550 - RNA, 21 nt, Human
ugagagagaauauugugagug

SEQ ID NO: 361551 - RNA, 22 nt, Human
ugcaguggugcaaucuuagcuc

SEQ ID NO: 361552 - RNA, 26 nt, Human
ugcccaccuccacgacaagggagagu

SEQ ID NO: 361553 - RNA, 24 nt, Human
ugcccaggcuggucuugaacuccu

SEQ ID NO: 361554 - RNA, 25 nt, Human
ugcccaggcuggucuugaacuccug

SEQ ID NO: 361555 - RNA, 22 nt, Human
ugcugcccaggcuggucuugaa

SEQ ID NO: 361556 - RNA, 23 nt, Human
ugcugggauuacaggcgugagca

SEQ ID NO: 361557 - RNA, 21 nt, Human
uggaacuacaggcacccacca

SEQ ID NO: 361558 - RNA, 24 nt, Human
uggaacuacaggcacccaccacca

SEQ ID NO: 361559 - RNA, 18 nt, Human
uggagugcaguggugcaa

SEQ ID NO: 361560 - RNA, 23 nt, Human
uggagugcaguggugcaaucuua

SEQ ID NO: 361561 - RNA, 24 nt, Human
uggagugcaguggugcaaucuuag

SEQ ID NO: 361562 - RNA, 21 nt, Human
uggcagcagaaggcaguggcu

SEQ ID NO: 361563 - RNA, 18 nt, Human
ugggauuacaggcgugag

SEQ ID NO: 361564 - RNA, 19 nt, Human
ugggauuacaggcgugagc

SEQ ID NO: 361565 - RNA, 23 nt, Human
ugggauuacaggcgugagcacca

SEQ ID NO: 361566 - RNA, 24 nt, Human
ugggcucaagucauuuucccaccu

SEQ ID NO: 361567 - RNA, 21 nt, Human
uggguucaagcaaucugcccg

SEQ ID NO: 361568 - RNA, 24 nt, Human
uggugcaaucuuagcucacugcag

SEQ ID NO: 361569 - RNA, 19 nt, Human
uuacaggcgugagcaccac

SEQ ID NO: 361570 - RNA, 23 nt, Human
uuagugccaaggccccauugggg

SEQ ID NO: 361571 - RNA, 24 nt, Human
uucacucuugucacccagguugga

SEQ ID NO: 361572 - RNA, 23 nt, Human
uucccaccucagccucccaagua

SEQ ID NO: 361573 - RNA, 20 nt, Human
uuccucuggcucuauaaucu

SEQ ID NO: 361574 - RNA, 22 nt, Human
uugcaggaaguggggacugagc

SEQ ID NO: 361575 - RNA, 18 nt, Human
uugcccaccuccacgacu

SEQ ID NO: 361576 - RNA, 19 nt, Human
uugcugagacccuggaagu

SEQ ID NO: 361577 - RNA, 24 nt, Human
uuguagauacaggguuucaccaug

SEQ ID NO: 361578 - RNA, 24 nt, Human
uuucacucuugucacccagguugg

SEQ ID NO: 361579 - RNA, 23 nt, Human
uuucccaccucagccucccaagu

SEQ ID NO: 361580 - RNA, 24 nt, Human
uuuguagauacaggguuucaccau

SEQ ID NO: 361581 - RNA, 18 nt, Human
uuuuuguauuuuuuguag

SEQ ID NO: 361582 - RNA, 21 nt, Human
uuuuuguauuuuuuguagaua

SEQ ID NO: 361583 - RNA, 24 nt, Human
uuuuuuguagauacaggguuucac

SEQ ID NO: 361584 - RNA, 24 nt, Human
aaagugcugggauuacaggcguga

SEQ ID NO: 361585 - RNA, 23 nt, Human
aagcaaacuuggaccuucucaau

SEQ ID NO: 361586 - RNA, 19 nt, Human
aaguagcugggaauacagg

SEQ ID NO: 361587 - RNA, 19 nt, Human
aagugcugggauuacaggc

SEQ ID NO: 361588 - RNA, 19 nt, Human
aagugcugggauuacaggc

SEQ ID NO: 361589 - RNA, 26 nt, Human
aagugcugggauuacaggcgugagcc

SEQ ID NO: 361590 - RNA, 25 nt, Human
aauccguugcccaggcuggagugca

SEQ ID NO: 361591 - RNA, 24 nt, Human
aaucucuugaaccugggaggugga

SEQ ID NO: 361592 - RNA, 24 nt, Human
aauggccgggugcggcggcccacg

SEQ ID NO: 361593 - RNA, 21 nt, Human
aauguggugaaaccccgucuc

SEQ ID NO: 361594 - RNA, 21 nt, Human
acagaccaaagggaaggcuaa

SEQ ID NO: 361595 - RNA, 23 nt, Human
acagagcaaacugugucucaaaa

SEQ ID NO: 361596 - RNA, 24 nt, Human
accccgucucuacuaaaaauacaa

SEQ ID NO: 361597 - RNA, 25 nt, Human
acccgccucggccucccaaagugcu

SEQ ID NO: 361598 - RNA, 25 nt, Human
accucccggguucacgccauuuucc

SEQ ID NO: 361599 - RNA, 21 nt, Human
acugggauuacaauuugagau

SEQ ID NO: 361600 - RNA, 19 nt, Human
agaacagaccaaagggaag

SEQ ID NO: 361601 - RNA, 24 nt, Human
agaagagggcaaguuccccacaaa

SEQ ID NO: 361602 - RNA, 24 nt, Human
agacagaagaaucucuugaaccug

SEQ ID NO: 361603 - RNA, 23 nt, Human
agcagggugugguggcacacacu

SEQ ID NO: 361604 - RNA, 19 nt, Human
agccuggccaaugugguga

SEQ ID NO: 361605 - RNA, 22 nt, Human
agccuggccaauguggugaaac

SEQ ID NO: 361606 - RNA, 24 nt, Human
agccuggccaauguggugaaaccc

SEQ ID NO: 361607 - RNA, 21 nt, Human
aggccgagucggguggaucac

SEQ ID NO: 361608 - RNA, 23 nt, Human
aggcgugagccaccgugcccggc

SEQ ID NO: 361609 - RNA, 25 nt, Human
aggcuggagugcaguggcgugaucu

SEQ ID NO: 361610 - RNA, 25 nt, Human
aggggaagcaaacuuggaccuucuc

SEQ ID NO: 361611 - RNA, 24 nt, Human
agguggagguugcagugagccaag

SEQ ID NO: 361612 - RNA, 18 nt, Human
agguguggacacagagcc

SEQ ID NO: 361613 - RNA, 21 nt, Human
aguagagaugggucucaccau

SEQ ID NO: 361614 - RNA, 23 nt, Human
agugcaguggcgugaucuuggcu

SEQ ID NO: 361615 - RNA, 24 nt, Human
agugcaguggcgugaucuuggcuc

SEQ ID NO: 361616 - RNA, 24 nt, Human
aguguacuccagccugggugacag

SEQ ID NO: 361617 - RNA, 28 nt, Human
auacauuucaaaacaaaauugugccccg

SEQ ID NO: 361618 - RNA, 24 nt, Human
auagugccaguguacuccagccug

SEQ ID NO: 361619 - RNA, 21 nt, Human
aucauucugccccuggccccu

SEQ ID NO: 361620 - RNA, 20 nt, Human
aucuggacggcgugcugaag

SEQ ID NO: 361621 - RNA, 18 nt, Human
auguucgccaggaugguc

SEQ ID NO: 361622 - RNA, 22 nt, Human
auucugccccuggccccuccca

SEQ ID NO: 361623 - RNA, 21 nt, Human
auuuuccugccucagccuccc

SEQ ID NO: 361624 - RNA, 24 nt, Human
auuuuuaguagagaugggucucac

SEQ ID NO: 361625 - RNA, 23 nt, Human
caaaccauaucauucugccccug

SEQ ID NO: 361626 - RNA, 24 nt, Human
caaagugcugggauuacaggcgug

SEQ ID NO: 361627 - RNA, 22 nt, Human
caagauagugccaguguacucc

SEQ ID NO: 361628 - RNA, 23 nt, Human
caagucccuuccaccuaugagcc

SEQ ID NO: 361629 - RNA, 24 nt, Human
caauccguugcccaggcuggagug

SEQ ID NO: 361630 - RNA, 18 nt, Human
caccauguucgccaggau

SEQ ID NO: 361631 - RNA, 24 nt, Human
caccauguucgccaggauggucuc

SEQ ID NO: 361632 - RNA, 23 nt, Human
cacccgccucggccucccaaagu

SEQ ID NO: 361633 - RNA, 19 nt, Human
caccucccggguucacgcc

SEQ ID NO: 361634 - RNA, 22 nt, Human
cacgccauuuuccugccucagc

SEQ ID NO: 361635 - RNA, 24 nt, Human
cacgccuguaaucccagcacuuug

SEQ ID NO: 361636 - RNA, 18 nt, Human
cagaagagagagauggug

SEQ ID NO: 361637 - RNA, 20 nt, Human
cagcacuuugagaggccgag

SEQ ID NO: 361638 - RNA, 24 nt, Human
cagcacuuugagaggccgagucgg

SEQ ID NO: 361639 - RNA, 20 nt, Human
cagcaugggggaaaccgcuc

SEQ ID NO: 361640 - RNA, 19 nt, Human
caggugcccgccaccaugc

SEQ ID NO: 361641 - RNA, 22 nt, Human
caguguacuccagccuggguga

SEQ ID NO: 361642 - RNA, 23 nt, Human
caguguacuccagccugggugac

SEQ ID NO: 361643 - RNA, 25 nt, Human
caguguacuccagccugggugacag

SEQ ID NO: 361644 - RNA, 20 nt, Human
cauacacgcuucuuuguguu

SEQ ID NO: 361645 - RNA, 21 nt, Human
cauugcuggggaggccucagg

SEQ ID NO: 361646 - RNA, 21 nt, Human
ccaaaccauaucauucugccc

SEQ ID NO: 361647 - RNA, 22 nt, Human
ccaaagugcugggauuacaggc

SEQ ID NO: 361648 - RNA, 22 nt, Human
ccaaagugcugggauuacaggc

SEQ ID NO: 361649 - RNA, 24 nt, Human
ccaaagugcugggauuacaggcgu

SEQ ID NO: 361650 - RNA, 23 nt, Human
ccaccuaugagccaguaaaauca

SEQ ID NO: 361651 - RNA, 19 nt, Human
ccacgccuguaaucccagc

SEQ ID NO: 361652 - RNA, 20 nt, Human
ccaguaaaaucaaaagcaaa

SEQ ID NO: 361653 - RNA, 22 nt, Human
ccagucaccuugcccugggucc

SEQ ID NO: 361654 - RNA, 21 nt, Human
ccaguguacuccagccugggu

SEQ ID NO: 361655 - RNA, 21 nt, Human
ccaguguacuccagccugggu

SEQ ID NO: 361656 - RNA, 22 nt, Human
ccaguguacuccagccugggug

SEQ ID NO: 361657 - RNA, 24 nt, Human
ccaguguacuccagccugggugac

SEQ ID NO: 361658 - RNA, 23 nt, Human
cccaaguagcugggaauacaggu

SEQ ID NO: 361659 - RNA, 22 nt, Human
cccacgccuguaaucccagcac

SEQ ID NO: 361660 - RNA, 24 nt, Human
cccacgccuguaaucccagcacuu

SEQ ID NO: 361661 - RNA, 23 nt, Human
cccggguucacgccauuuuccug

SEQ ID NO: 361662 - RNA, 20 nt, Human
ccuagcuacugggaggcuga

SEQ ID NO: 361663 - RNA, 20 nt, Human
ccugaccucgugauccaccc

SEQ ID NO: 361664 - RNA, 23 nt, Human
ccuggccaauguggugaaacccc

SEQ ID NO: 361665 - RNA, 24 nt, Human
ccuggccaauguggugaaaccccg

SEQ ID NO: 361666 - RNA, 21 nt, Human
ccugggagguggagguugcag

SEQ ID NO: 361667 - RNA, 18 nt, Human
ccugggugacagagcaaa

SEQ ID NO: 361668 - RNA, 24 nt, Human
cgagaccagccuggccaauguggu

SEQ ID NO: 361669 - RNA, 24 nt, Human
cgccucggccucccaaagugcugg

SEQ ID NO: 361670 - RNA, 18 nt, Human
cgccuguaaucccagcac

SEQ ID NO: 361671 - RNA, 22 nt, Human
cggcccacgccuguaaucccag

SEQ ID NO: 361672 - RNA, 24 nt, Human
cggcccacgccuguaaucccagca

SEQ ID NO: 361673 - RNA, 24 nt, Human
cggguggaucacuugacgucagaa

SEQ ID NO: 361674 - RNA, 21 nt, Human
cguugcccaggcuggagugca

SEQ ID NO: 361675 - RNA, 24 nt, Human
cucacugcaagcuccaccucccgg

SEQ ID NO: 361676 - RNA, 24 nt, Human
cuccugaccucgugauccacccgc

SEQ ID NO: 361677 - RNA, 24 nt, Human
cugcaagcuccaccucccggguuc

SEQ ID NO: 361678 - RNA, 23 nt, Human
cugccucagccucccaaguagcu

SEQ ID NO: 361679 - RNA, 24 nt, Human
cugugucucaaaaaaaaaaaaaaa

SEQ ID NO: 361680 - RNA, 21 nt, Human
cuugaaccugggagguggagg

SEQ ID NO: 361681 - RNA, 22 nt, Human
gaaagcuaaggguauaaagucu

SEQ ID NO: 361682 - RNA, 24 nt, Human
gaauacaggugcccgccaccaugc

SEQ ID NO: 361683 - RNA, 22 nt, Human
gaccucgugauccacccgccuc

SEQ ID NO: 361684 - RNA, 22 nt, Human
gaccucgugauccacccgccuc

SEQ ID NO: 361685 - RNA, 28 nt, Human
gagaacagcaugggggaaaccgguaccc

SEQ ID NO: 361686 - RNA, 18 nt, Human
gagguugcagugagccaa

SEQ ID NO: 361687 - RNA, 21 nt, Human
gagguugcagugagccaagau

SEQ ID NO: 361688 - RNA, 25 nt, Human
gagucggguggaucacuugacguca

SEQ ID NO: 361689 - RNA, 24 nt, Human
gaucacuugacgucagaaguucga

SEQ ID NO: 361690 - RNA, 20 nt, Human
gauccagucaccuugcccug

SEQ ID NO: 361691 - RNA, 18 nt, Human
gauuacaggcgugagcca

SEQ ID NO: 361692 - RNA, 20 nt, Human
gauuacaggcgugagccacc

SEQ ID NO: 361693 - RNA, 21 nt, Human
gauuacaggcgugagccaccg

SEQ ID NO: 361694 - RNA, 24 nt, Human
gccaauguggugaaaccccgucuc

SEQ ID NO: 361695 - RNA, 19 nt, Human
gccaguguacuccagccug

SEQ ID NO: 361696 - RNA, 24 nt, Human
gccaguguacuccagccuggguga

SEQ ID NO: 361697 - RNA, 20 nt, Human
gcccaggcuggagugcagug

SEQ ID NO: 361698 - RNA, 24 nt, Human
gcccaggcuggagugcaguggcgu

SEQ ID NO: 361699 - RNA, 20 nt, Human
gccucagccucccaaguagc

SEQ ID NO: 361700 - RNA, 23 nt, Human
gccuggcuaauuuuuuguauuuu

SEQ ID NO: 361701 - RNA, 23 nt, Human
gcggcccacgccuguaaucccag

SEQ ID NO: 361702 - RNA, 20 nt, Human
ggaaagcuaaggguauaaag

SEQ ID NO: 361703 - RNA, 20 nt, Human
ggaagcaaacuuggaccuuc

SEQ ID NO: 361704 - RNA, 18 nt, Human
ggagguugcagugagcca

SEQ ID NO: 361705 - RNA, 20 nt, Human
ggagguugcagugagccaag

SEQ ID NO: 361706 - RNA, 24 nt, Human
ggauggucucgaucuccugaccuc

SEQ ID NO: 361707 - RNA, 24 nt, Human
ggcggcccacgccuguaaucccag

SEQ ID NO: 361708 - RNA, 22 nt, Human
ggcuggagugcaguggcgugau

SEQ ID NO: 361709 - RNA, 24 nt, Human
gggugcggcggcccacgccuguaa

SEQ ID NO: 361710 - RNA, 24 nt, Human
guacuccagccugggugacagagc

SEQ ID NO: 361711 - RNA, 18 nt, Human
gucacagccacucuucua

SEQ ID NO: 361712 - RNA, 24 nt, Human
gugauccacccgccucggccuccc

SEQ ID NO: 361713 - RNA, 21 nt, Human
guguacuccagccugggugac

SEQ ID NO: 361714 - RNA, 21 nt, Human
uaaaaucaaaagcaaauggcc

SEQ ID NO: 361715 - RNA, 26 nt, Human
uaaaaucaaaagcaaauggccgggug

SEQ ID NO: 361716 - RNA, 24 nt, Human
uaauuuuuuguauuuuuaguagag

SEQ ID NO: 361717 - RNA, 25 nt, Human
uaauuuuuuguauuuuuaguagaga

SEQ ID NO: 361718 - RNA, 23 nt, Human
uacaggcgugagccaccgugccc

SEQ ID NO: 361719 - RNA, 22 nt, Human
uacuccagccugggugacagag

SEQ ID NO: 361720 - RNA, 21 nt, Human
uagagaugggucucaccaugu

SEQ ID NO: 361721 - RNA, 23 nt, Human
uagcaacagucccccaaagucuu

SEQ ID NO: 361722 - RNA, 19 nt, Human
uagcagggugugguggcac

SEQ ID NO: 361723 - RNA, 23 nt, Human
uaguagagaugggucucaccaug

SEQ ID NO: 361724 - RNA, 21 nt, Human
uaucacgagaacagcaugggg

SEQ ID NO: 361725 - RNA, 22 nt, Human
uaugagccaguaaaaucaaaag

SEQ ID NO: 361726 - RNA, 24 nt, Human
ucaauccguugcccaggcuggagu

SEQ ID NO: 361727 - RNA, 22 nt, Human
ucacagaacagaccaaagggaa

SEQ ID NO: 361728 - RNA, 23 nt, Human
ucaccuugcccuggguccugccc

SEQ ID NO: 361729 - RNA, 24 nt, Human
ucacugcaagcuccaccucccggg

SEQ ID NO: 361730 - RNA, 20 nt, Human
ucagccucccaaguagcugg

SEQ ID NO: 361731 - RNA, 18 nt, Human
uccagccugggugacaga

SEQ ID NO: 361732 - RNA, 24 nt, Human
ucccaaagugcugggauuacaggc

SEQ ID NO: 361733 - RNA, 24 nt, Human
ucccaaguagcugggaauacaggu

SEQ ID NO: 361734 - RNA, 24 nt, Human
ucccggguucacgccauuuuccug

SEQ ID NO: 361735 - RNA, 18 nt, Human
ucggccucccaaagugcu

SEQ ID NO: 361736 - RNA, 23 nt, Human
ucuaaacuaaacauaucuuugau

SEQ ID NO: 361737 - RNA, 19 nt, Human
ucucaaaaaaaaaaaaaaa

SEQ ID NO: 361738 - RNA, 24 nt, Human
ucucaauccguugcccaggcugga

SEQ ID NO: 361739 - RNA, 21 nt, Human
ucucuacuaaaaauacaaaaa

SEQ ID NO: 361740 - RNA, 22 nt, Human
ucucuugaaccugggaggugga

SEQ ID NO: 361741 - RNA, 24 nt, Human
ucucuugaaccugggagguggagg

SEQ ID NO: 361742 - RNA, 24 nt, Human
ucugccccuggccccucccagaua

SEQ ID NO: 361743 - RNA, 21 nt, Human
ucuuauccuggggaucuggac

SEQ ID NO: 361744 - RNA, 24 nt, Human
ugaaccugggagguggagguugca

SEQ ID NO: 361745 - RNA, 24 nt, Human
ugagacagaagaaucucuugaacc

SEQ ID NO: 361746 - RNA, 19 nt, Human
ugagacagagucucaaucc

SEQ ID NO: 361747 - RNA, 24 nt, Human
ugagaggccgagucggguggauca

SEQ ID NO: 361748 - RNA, 22 nt, Human
ugagccaguaaaaucaaaagca

SEQ ID NO: 361749 - RNA, 22 nt, Human
ugcaguggcgugaucuuggcuc

SEQ ID NO: 361750 - RNA, 18 nt, Human
ugcccaggcuggagugca

SEQ ID NO: 361751 - RNA, 21 nt, Human
ugcccaggcuggagugcagug

SEQ ID NO: 361752 - RNA, 22 nt, Human
ugcccaggcuggagugcagugg

SEQ ID NO: 361753 - RNA, 24 nt, Human
ugcccaggcuggagugcaguggcg

SEQ ID NO: 361754 - RNA, 18 nt, Human
ugcccuggguccugcccu

SEQ ID NO: 361755 - RNA, 22 nt, Human
ugcccuggguccugcccucaac

SEQ ID NO: 361756 - RNA, 24 nt, Human
ugccucagccucccaaguagcugg

SEQ ID NO: 361757 - RNA, 23 nt, Human
ugccuuagcaacagucccccaaa

SEQ ID NO: 361758 - RNA, 18 nt, Human
ugcugaagccugaauuua

SEQ ID NO: 361759 - RNA, 24 nt, Human
ugcugggauuacaggcgugagcca

SEQ ID NO: 361760 - RNA, 21 nt, Human
uggaaggcgaaggggaagcaa

SEQ ID NO: 361761 - RNA, 18 nt, Human
uggacacagagccaaacc

SEQ ID NO: 361762 - RNA, 19 nt, Human
uggagugcaguggcgugau

SEQ ID NO: 361763 - RNA, 23 nt, Human
uggagugcaguggcgugaucuug

SEQ ID NO: 361764 - RNA, 24 nt, Human
uggagugcaguggcgugaucuugg

SEQ ID NO: 361765 - RNA, 24 nt, Human
uggaucacuugacgucagaaguuc

SEQ ID NO: 361766 - RNA, 24 nt, Human
uggccaauguggugaaaccccguc

SEQ ID NO: 361767 - RNA, 23 nt, Human
uggccgggugcggcggcccacgg

SEQ ID NO: 361768 - RNA, 19 nt, Human
uggcucacugcaagcucca

SEQ ID NO: 361769 - RNA, 21 nt, Human
ugggaauacaggugcccgcca

SEQ ID NO: 361770 - RNA, 22 nt, Human
ugggaauacaggugcccgccac

SEQ ID NO: 361771 - RNA, 24 nt, Human
ugggaauacaggugcccgccacca

SEQ ID NO: 361772 - RNA, 27 nt, Human
ugggaggcugagacagaagaaucucuu

SEQ ID NO: 361773 - RNA, 18 nt, Human
ugggagguggagguugca

SEQ ID NO: 361774 - RNA, 29 nt, Human
ugggagguggagguugcagugacaacggu

SEQ ID NO: 361775 - RNA, 24 nt, Human
ugggagguggagguugcagugagc

SEQ ID NO: 361776 - RNA, 18 nt, Human
ugggauuacaggcgugag

SEQ ID NO: 361777 - RNA, 21 nt, Human
ugggauuacaggcgugagcca

SEQ ID NO: 361778 - RNA, 22 nt, Human
ugggauuacaggcgugagccac

SEQ ID NO: 361779 - RNA, 23 nt, Human
ugggauuacaggcgugagccacc

SEQ ID NO: 361780 - RNA, 23 nt, Human
ugggauuacaggcgugagccacc

SEQ ID NO: 361781 - RNA, 24 nt, Human
ugggauuacaggcgugagccaccg

SEQ ID NO: 361782 - RNA, 20 nt, Human
ugggugacagagcaaacugu

SEQ ID NO: 361783 - RNA, 19 nt, Human
uggugaaaccccgucucua

SEQ ID NO: 361784 - RNA, 22 nt, Human
ugguguggagcaggaaccugcc

SEQ ID NO: 361785 - RNA, 18 nt, Human
uguggacacagagccaaa

SEQ ID NO: 361786 - RNA, 24 nt, Human
uguggagcaggaaccugccaaaca

SEQ ID NO: 361787 - RNA, 18 nt, Human
uuagcagggugugguggc

SEQ ID NO: 361788 - RNA, 19 nt, Human
uuagcagggugugguggca

SEQ ID NO: 361789 - RNA, 23 nt, Human
uuaguagagaugggucucaccau

SEQ ID NO: 361790 - RNA, 24 nt, Human
uuaguagagaugggucucaccaug

SEQ ID NO: 361791 - RNA, 24 nt, Human
uugaaccugggagguggagguugc

SEQ ID NO: 361792 - RNA, 23 nt, Human
uugagacagagucucaauccguu

SEQ ID NO: 361793 - RNA, 22 nt, Human
uugcagugagccaagauagugc

SEQ ID NO: 361794 - RNA, 24 nt, Human
uuuaguagagaugggucucaccau

SEQ ID NO: 361795 - RNA, 21 nt, Human
uuuuuguauuuuuaguagaga

SEQ ID NO: 361796 - RNA, 24 nt, Human
uuuuuuguauuuuuaguagagaug

SEQ ID NO: 361797 - RNA, 20 nt, Human
uuuuuuuuuuugagacagag

SEQ ID NO: 361798 - RNA, 26 nt, Human
uuuuuuuuuuuugagacagagucuca

SEQ ID NO: 361799 - RNA, 26 nt, Human
aaaaaaaaaaaaaaaaaagaaaagaa

SEQ ID NO: 361800 - RNA, 24 nt, Human
aaaaaaaaaaaagaaaagaaaaag

SEQ ID NO: 361801 - RNA, 21 nt, Human
aaaaaaaagaaaagaaaaaga

SEQ ID NO: 361802 - RNA, 21 nt, Human
aaaaaaagaaaagaaaaagaa

SEQ ID NO: 361803 - RNA, 21 nt, Human
aaaaaucauuacucggccuuc

SEQ ID NO: 361804 - RNA, 23 nt, Human
aaaauaacaaaaacccaaaggua

SEQ ID NO: 361805 - RNA, 20 nt, Human
aaacaaaauaacaaaaaccc

SEQ ID NO: 361806 - RNA, 21 nt, Human
aaacaaaauaacaaaaaccca

SEQ ID NO: 361807 - RNA, 28 nt, Human
aaacaaaauaacaaaaacccaaagguaa

SEQ ID NO: 361808 - RNA, 19 nt, Human
aacauggugaaaccccauc

SEQ ID NO: 361809 - RNA, 20 nt, Human
aacauggugaaaccccaucu

SEQ ID NO: 361810 - RNA, 21 nt, Human
aacauggugaaaccccaucuc

SEQ ID NO: 361811 - RNA, 21 nt, Human
aacauggugaaaccccaucuc

SEQ ID NO: 361812 - RNA, 19 nt, Human
aagaaaaagaaaaaagaaa

SEQ ID NO: 361813 - RNA, 23 nt, Human
aagagcaaaacucugucucaaaa

SEQ ID NO: 361814 - RNA, 22 nt, Human
aagccuuucaaacagaagacuu

SEQ ID NO: 361815 - RNA, 24 nt, Human
aauaacaaaaacccaaagguaaag

SEQ ID NO: 361816 - RNA, 24 nt, Human
aauuacuugaaccugggaggcgga

SEQ ID NO: 361817 - RNA, 21 nt, Human
accagcuggcccuuaucacag

SEQ ID NO: 361818 - RNA, 24 nt, Human
accccaucucuacuaaaaauacaa

SEQ ID NO: 361819 - RNA, 28 nt, Human
acucugucucaaaaaaaaaaaaaaaaaa

SEQ ID NO: 361820 - RNA, 20 nt, Human
acuugaaccugggaggcgga

SEQ ID NO: 361821 - RNA, 21 nt, Human
agaaaagaaaaagaaaaaaga

SEQ ID NO: 361822 - RNA, 22 nt, Human
agaugaccaauguggggugggc

SEQ ID NO: 361823 - RNA, 24 nt, Human
agcacuuuggcaggccgagguggg

SEQ ID NO: 361824 - RNA, 23 nt, Human
agccuguaaucccagcacuuugg

SEQ ID NO: 361825 - RNA, 21 nt, Human
agcucaagccuguaaucccag

SEQ ID NO: 361826 - RNA, 20 nt, Human
agcugggcgugguggugcau

SEQ ID NO: 361827 - RNA, 23 nt, Human
agcugggcgugguggugcaugcc

SEQ ID NO: 361828 - RNA, 22 nt, Human
aggcaggagaauuacuugaacc

SEQ ID NO: 361829 - RNA, 24 nt, Human
aggcaggagaauuacuugaaccug

SEQ ID NO: 361830 - RNA, 21 nt, Human
aggccgaggugggcagaucac

SEQ ID NO: 361831 - RNA, 20 nt, Human
aggcggagguugcagugagc

SEQ ID NO: 361832 - RNA, 24 nt, Human
aggcggagguugcagugagcugag

SEQ ID NO: 361833 - RNA, 21 nt, Human
aggcugaggcaggagaauuac

SEQ ID NO: 361834 - RNA, 24 nt, Human
aggcugaggcaggagaauuacuug

SEQ ID NO: 361835 - RNA, 20 nt, Human
aggggccauccaauggagug

SEQ ID NO: 361836 - RNA, 20 nt, Human
auagcugggcgugguggugc

SEQ ID NO: 361837 - RNA, 24 nt, Human
aucgugccauugcacuccagccug

SEQ ID NO: 361838 - RNA, 23 nt, Human
augccgcuaaucccagccacucg

SEQ ID NO: 361839 - RNA, 18 nt, Human
auugcacuccagccugga

SEQ ID NO: 361840 - RNA, 25 nt, Human
auugcacuccagccuggacaacaag

SEQ ID NO: 361841 - RNA, 21 nt, Human
caaaaauagcugggcguggug

SEQ ID NO: 361842 - RNA, 23 nt, Human
caaacagaagacuucuuccagaa

SEQ ID NO: 361843 - RNA, 24 nt, Human
caagccuguaaucccagcacuuug

SEQ ID NO: 361844 - RNA, 19 nt, Human
cacagccauuuuaaaccug

SEQ ID NO: 361845 - RNA, 20 nt, Human
cacuccagccuggacaacaa

SEQ ID NO: 361846 - RNA, 24 nt, Human
cacuccagccuggacaacaagagc

SEQ ID NO: 361847 - RNA, 24 nt, Human
cacuuuuggccuuggcuccugccu

SEQ ID NO: 361848 - RNA, 21 nt, Human
cagcacuuuggcaggccgagg

SEQ ID NO: 361849 - RNA, 24 nt, Human
cagcacuuuggcaggccgaggugg

SEQ ID NO: 361850 - RNA, 24 nt, Human
cagccacucgggaggcugaggcag

SEQ ID NO: 361851 - RNA, 21 nt, Human
cagcuggcccuuaucacagcc

SEQ ID NO: 361852 - RNA, 21 nt, Human
cagggcuccugcgacugccgg

SEQ ID NO: 361853 - RNA, 18 nt, Human
caggggccauccaaugga

SEQ ID NO: 361854 - RNA, 18 nt, Human
cauugcacuccagccugg

SEQ ID NO: 361855 - RNA, 19 nt, Human
cauugcacuccagccugga

SEQ ID NO: 361856 - RNA, 20 nt, Human
cauugcacuccagccuggac

SEQ ID NO: 361857 - RNA, 21 nt, Human
cauugcacuccagccuggaca

SEQ ID NO: 361858 - RNA, 24 nt, Human
cauugcacuccagccuggacaaca

SEQ ID NO: 361859 - RNA, 23 nt, Human
ccagcuggcccuuaucacagcca

SEQ ID NO: 361860 - RNA, 22 nt, Human
ccaguccauccuccacuugccu

SEQ ID NO: 361861 - RNA, 19 nt, Human
ccauugcacuccagccugg

SEQ ID NO: 361862 - RNA, 20 nt, Human
ccauugcacuccagccugga

SEQ ID NO: 361863 - RNA, 21 nt, Human
ccauugcacuccagccuggac

SEQ ID NO: 361864 - RNA, 22 nt, Human
ccauugcacuccagccuggaca

SEQ ID NO: 361865 - RNA, 24 nt, Human
ccugcuaccugggggcagagguug

SEQ ID NO: 361866 - RNA, 22 nt, Human
ccugguuaacauggugaaaccc

SEQ ID NO: 361867 - RNA, 23 nt, Human
ccugguuaacauggugaaacccc

SEQ ID NO: 361868 - RNA, 24 nt, Human
ccugguuaacauggugaaacccca

SEQ ID NO: 361869 - RNA, 24 nt, Human
cgagaccauccugguuaacauggu

SEQ ID NO: 361870 - RNA, 24 nt, Human
cgaggugggcagaucaccagguca

SEQ ID NO: 361871 - RNA, 22 nt, Human
cuagaaaaacaaaauaacaaaa

SEQ ID NO: 361872 - RNA, 18 nt, Human
cucaaaaaaaaaaaaaaa

SEQ ID NO: 361873 - RNA, 23 nt, Human
cucaaaaaaaaaaaaaaaaaaaa

SEQ ID NO: 361874 - RNA, 24 nt, Human
cucaagccuguaaucccagcacuu

SEQ ID NO: 361875 - RNA, 19 nt, Human
cucugucucaaaaaaaaaa

SEQ ID NO: 361876 - RNA, 23 nt, Human
cugguuaacauggugaaacccca

SEQ ID NO: 361877 - RNA, 19 nt, Human
cuuagaaaauagcguucac

SEQ ID NO: 361878 - RNA, 20 nt, Human
cuucaccugagccugucuuu

SEQ ID NO: 361879 - RNA, 23 nt, Human
cuuuggcaggccgaggugggcag

SEQ ID NO: 361880 - RNA, 23 nt, Human
gagaauuacuugaaccugggagg

SEQ ID NO: 361881 - RNA, 23 nt, Human
gagaucgugccauugcacuccag

SEQ ID NO: 361882 - RNA, 20 nt, Human
gaggucagggcaucugcggc

SEQ ID NO: 361883 - RNA, 23 nt, Human
gagguugcagugagcugagaucg

SEQ ID NO: 361884 - RNA, 24 nt, Human
gaucaccaggucaagagaucgaga

SEQ ID NO: 361885 - RNA, 21 nt, Human
gccggcgggacgugcuccugg

SEQ ID NO: 361886 - RNA, 22 nt, Human
ggagguugcagugagcugagau

SEQ ID NO: 361887 - RNA, 23 nt, Human
ggagguugcagugagcugagauc

SEQ ID NO: 361888 - RNA, 24 nt, Human
ggagguugcagugagcugagaucg

SEQ ID NO: 361889 - RNA, 18 nt, Human
ggcagaucaccaggucaa

SEQ ID NO: 361890 - RNA, 22 nt, Human
gggcccaguccauccuccacuu

SEQ ID NO: 361891 - RNA, 24 nt, Human
gggcgcgguagcucaagccuguaa

SEQ ID NO: 361892 - RNA, 24 nt, Human
gguagcucaagccuguaaucccag

SEQ ID NO: 361893 - RNA, 24 nt, Human
gguggugcaugccgcuaaucccag

SEQ ID NO: 361894 - RNA, 23 nt, Human
guagcucaagccuguaaucccag

SEQ ID NO: 361895 - RNA, 21 nt, Human
guagggacuagaaaaacaaaa

SEQ ID NO: 361896 - RNA, 21 nt, Human
guggugcaugccgcuaauccc

SEQ ID NO: 361897 - RNA, 24 nt, Human
guugcagugagcugagaucgugcc

SEQ ID NO: 361898 - RNA, 19 nt, Human
uaaacacagguagggacua

SEQ ID NO: 361899 - RNA, 22 nt, Human
uaacauggugaaaccccaucuc

SEQ ID NO: 361900 - RNA, 24 nt, Human
uaacauggugaaaccccaucucua

SEQ ID NO: 361901 - RNA, 21 nt, Human
uaccugggggcagaggucagg

SEQ ID NO: 361902 - RNA, 24 nt, Human
uagcucaagccuguaaucccagca

SEQ ID NO: 361903 - RNA, 23 nt, Human
uagcugggcgugguggugcaugc

SEQ ID NO: 361904 - RNA, 22 nt, Human
uaucacagccauuuuaaaccug

SEQ ID NO: 361905 - RNA, 25 nt, Human
ucaaaaaaaaaaaaaaaaaaaagaa

SEQ ID NO: 361906 - RNA, 24 nt, Human
ucaccaggucaagagaucgagacc

SEQ ID NO: 361907 - RNA, 26 nt, Human
uccauaauuuaaacacagguagggac

SEQ ID NO: 361908 - RNA, 23 nt, Human
ucgggaggcugaggcaggagaau

SEQ ID NO: 361909 - RNA, 23 nt, Human
ucgugccauugcacuccagccug

SEQ ID NO: 361910 - RNA, 25 nt, Human
ucucuacuaaaaauacaaaaauagc

SEQ ID NO: 361911 - RNA, 23 nt, Human
ucugucucaaaaaaaaaaaaaaa

SEQ ID NO: 361912 - RNA, 22 nt, Human
ucuuccagaguuuuagauucac

SEQ ID NO: 361913 - RNA, 19 nt, Human
ugaaaccccaucucuacua

SEQ ID NO: 361914 - RNA, 24 nt, Human
ugaaccugggaggcggagguugca

SEQ ID NO: 361915 - RNA, 20 nt, Human
ugaggcaggagaauuacuug

SEQ ID NO: 361916 - RNA, 24 nt, Human
ugaggcaggagaauuacuugaacc

SEQ ID NO: 361917 - RNA, 25 nt, Human
ugaggcaggagaauuacuugaaccu

SEQ ID NO: 361918 - RNA, 25 nt, Human
ugcacuccagccuggacaacaagag

SEQ ID NO: 361919 - RNA, 23 nt, Human
uggaguguccugcuaccuggggg

SEQ ID NO: 361920 - RNA, 20 nt, Human
uggcaggccgaggugggcag

SEQ ID NO: 361921 - RNA, 24 nt, Human
uggcaggccgaggugggcagauca

SEQ ID NO: 361922 - RNA, 29 nt, Human
ugggaggcggagguugcagugacaacggu

SEQ ID NO: 361923 - RNA, 24 nt, Human
ugggaggcggagguugcagugagc

SEQ ID NO: 361924 - RNA, 24 nt, Human
ugggcgugguggugcaugccgcua

SEQ ID NO: 361925 - RNA, 22 nt, Human
uggugcaugccgcuaaucccag

SEQ ID NO: 361926 - RNA, 24 nt, Human
ugguggugcaugccgcuaauccca

SEQ ID NO: 361927 - RNA, 20 nt, Human
ugugugauagggaagaugac

SEQ ID NO: 361928 - RNA, 22 nt, Human
ugugugauagggaagaugacca

SEQ ID NO: 361929 - RNA, 24 nt, Human
uuacuugaaccugggaggcggagg

SEQ ID NO: 361930 - RNA, 26 nt, Human
uucccaauucugaagucuuccucauc

SEQ ID NO: 361931 - RNA, 24 nt, Human
uugaaccugggaggcggagguugc

SEQ ID NO: 361932 - RNA, 18 nt, Human
uugcagugagcugagauc

SEQ ID NO: 361933 - RNA, 22 nt, Human
uugcagugagcugagaucgugc

SEQ ID NO: 361934 - RNA, 23 nt, Human
aaaaaaaaacaaaaaaacaaaaa

SEQ ID NO: 361935 - RNA, 19 nt, Human
aaaaaaacaaaaacaccaa

SEQ ID NO: 361936 - RNA, 20 nt, Human
aaaaaaacaaaaacaccaaa

SEQ ID NO: 361937 - RNA, 26 nt, Human
aaaaacaaaaaaacaaaaacaccaaa

SEQ ID NO: 361938 - RNA, 18 nt, Human
aaaaacaaaaacaccaaa

SEQ ID NO: 361939 - RNA, 22 nt, Human
aaaacaaaaaaacaaaaacacc

SEQ ID NO: 361940 - RNA, 24 nt, Human
aaacaaaaaaacaaaaacaccaaa

SEQ ID NO: 361941 - RNA, 29 nt, Human
aaacaaaaaucccaucaaugaacaaccga

SEQ ID NO: 361942 - RNA, 26 nt, Human
aaaccuuaaaaaaaaaaaaacaaaaa

SEQ ID NO: 361943 - RNA, 23 nt, Human
aacaaaaaaacaaaaacaccaaa

SEQ ID NO: 361944 - RNA, 25 nt, Human
aagaaaauagacauuugggagaaga

SEQ ID NO: 361945 - RNA, 22 nt, Human
aagcagauauaaaugggaccac

SEQ ID NO: 361946 - RNA, 21 nt, Human
aagcaucccaagaaaagguac

SEQ ID NO: 361947 - RNA, 22 nt, Human
aaggggaaaaauuccaggaaaa

SEQ ID NO: 361948 - RNA, 23 nt, Human
aauuacuuauuaaaacuaagcac

SEQ ID NO: 361949 - RNA, 20 nt, Human
aauucuaagcacaacaauuu

SEQ ID NO: 361950 - RNA, 22 nt, Human
acaaaaaucccaucaaugaaca

SEQ ID NO: 361951 - RNA, 21 nt, Human
acaaaacaaaacagaaccuac

SEQ ID NO: 361952 - RNA, 21 nt, Human
acacugugucuagaacagcca

SEQ ID NO: 361953 - RNA, 25 nt, Human
accaaucauucccuccucaaauuca

SEQ ID NO: 361954 - RNA, 28 nt, Human
accuuaaaaaaaaaaaaacaaaaaaaca

SEQ ID NO: 361955 - RNA, 21 nt, Human
agacauuugggagaagaaaug

SEQ ID NO: 361956 - RNA, 21 nt, Human
agauaaauuccaaaaugcaac

SEQ ID NO: 361957 - RNA, 23 nt, Human
agauuaaaacaaaacaaaacaga

SEQ ID NO: 361958 - RNA, 21 nt, Human
agcuaagauuaaaacaaaaca

SEQ ID NO: 361959 - RNA, 19 nt, Human
aggguccggcucccguccu

SEQ ID NO: 361960 - RNA, 20 nt, Human
augcaucuuugaacagggga

SEQ ID NO: 361961 - RNA, 18 nt, Human
auucugguccaccuuccc

SEQ ID NO: 361962 - RNA, 18 nt, Human
auuuuucuggcccuuuuu

SEQ ID NO: 361963 - RNA, 21 nt, Human
caaaaaaacaaaaacaccaaa

SEQ ID NO: 361964 - RNA, 22 nt, Human
caaaaaugguuuaagaaguuaa

SEQ ID NO: 361965 - RNA, 22 nt, Human
caaaacagaaccuacuucuuuc

SEQ ID NO: 361966 - RNA, 25 nt, Human
caacugguaugauuuccacacaaau

SEQ ID NO: 361967 - RNA, 22 nt, Human
caaggcccaaaaugaaaccugg

SEQ ID NO: 361968 - RNA, 22 nt, Human
caauucuaagcacaacaauuuu

SEQ ID NO: 361969 - RNA, 21 nt, Human
cacacacauaucucacacaua

SEQ ID NO: 361970 - RNA, 22 nt, Human
cacacauagcacuaagcuagaa

SEQ ID NO: 361971 - RNA, 24 nt, Human
cacacauaucucacacauagcacu

SEQ ID NO: 361972 - RNA, 23 nt, Human
caccaaacacacacauaucucac

SEQ ID NO: 361973 - RNA, 18 nt, Human
cagaaacauaugccagaa

SEQ ID NO: 361974 - RNA, 23 nt, Human
cauagcacuaagcuagaagcaga

SEQ ID NO: 361975 - RNA, 20 nt, Human
cauccagcaauucuaagcac

SEQ ID NO: 361976 - RNA, 19 nt, Human
cauuucucuacuuuucagg

SEQ ID NO: 361977 - RNA, 22 nt, Human
ccaguacccacgcagcuagcca

SEQ ID NO: 361978 - RNA, 21 nt, Human
cccaaaaugaaaccugguaau

SEQ ID NO: 361979 - RNA, 19 nt, Human
ccuggugccaaauuuuucu

SEQ ID NO: 361980 - RNA, 22 nt, Human
ccuuaagcacuuuacuuggcuu

SEQ ID NO: 361981 - RNA, 20 nt, Human
ccuuauacugaauccauuuc

SEQ ID NO: 361982 - RNA, 19 nt, Human
ccuuauccuuauacugaau

SEQ ID NO: 361983 - RNA, 22 nt, Human
cgcagcgccgagcgugugcgug

SEQ ID NO: 361984 - RNA, 19 nt, Human
cggcucccguccuucgcuc

SEQ ID NO: 361985 - RNA, 25 nt, Human
cuuaaaaaaaaaaaaacaaaaaaaa

SEQ ID NO: 361986 - RNA, 26 nt, Human
cuuaaaaaaaaaaaaacaaaaaaaca

SEQ ID NO: 361987 - RNA, 23 nt, Human
cuucuuucccaauccuaucuuua

SEQ ID NO: 361988 - RNA, 22 nt, Human
gaaacauaugccagaaaucuac

SEQ ID NO: 361989 - RNA, 19 nt, Human
gaaauagaugaauucagca

SEQ ID NO: 361990 - RNA, 19 nt, Human
gcaacuucuuucccaaucc

SEQ ID NO: 361991 - RNA, 21 nt, Human
gcaauauuuuccucaagaaaa

SEQ ID NO: 361992 - RNA, 22 nt, Human
gcccaggguccggcucccgucc

SEQ ID NO: 361993 - RNA, 20 nt, Human
ggcagugaucuauaaacacu

SEQ ID NO: 361994 - RNA, 18 nt, Human
gggagaagaaauguuuuc

SEQ ID NO: 361995 - RNA, 19 nt, Human
ggguugacaaguacacugu

SEQ ID NO: 361996 - RNA, 18 nt, Human
guagaauauuuucagaua

SEQ ID NO: 361997 - RNA, 22 nt, Human
uaaaacaaaacaaaacagaacc

SEQ ID NO: 361998 - RNA, 22 nt, Human
uaaagacuaaaacuuaaggcac

SEQ ID NO: 361999 - RNA, 18 nt, Human
uaaggcacauauuauaau

SEQ ID NO: 362000 - RNA, 23 nt, Human
uaaugaaaacaaaccuuaagcac

SEQ ID NO: 362001 - RNA, 23 nt, Human
uacacugugucuagaacagccaa

SEQ ID NO: 362002 - RNA, 22 nt, Human
uacauguaacaaugaagcaaga

SEQ ID NO: 362003 - RNA, 18 nt, Human
uagauguguuguauuuac

SEQ ID NO: 362004 - RNA, 19 nt, Human
uagcagaaacauaugccag

SEQ ID NO: 362005 - RNA, 18 nt, Human
uauacugaauccauuucu

SEQ ID NO: 362006 - RNA, 21 nt, Human
uaucuauacuuuuacucuguc

SEQ ID NO: 362007 - RNA, 22 nt, Human
uaucucacacauagcacuaagc

SEQ ID NO: 362008 - RNA, 20 nt, Human
uaucuuuauucguuugccug

SEQ ID NO: 362009 - RNA, 25 nt, Human
uauuuuugucagcauuuuguaaaau

SEQ ID NO: 362010 - RNA, 21 nt, Human
ucagguaagugaaagggguca

SEQ ID NO: 362011 - RNA, 22 nt, Human
uccaaaaugcaggucaaaucca

SEQ ID NO: 362012 - RNA, 20 nt, Human
ucccaucaaugaacaacugg

SEQ ID NO: 362013 - RNA, 22 nt, Human
ucccguccuucgcucgcugccu

SEQ ID NO: 362014 - RNA, 20 nt, Human
uccugggucaugaacugcuc

SEQ ID NO: 362015 - RNA, 25 nt, Human
ucuaagcacaacaauuuucuguaag

SEQ ID NO: 362016 - RNA, 20 nt, Human
ucucacacauagcacuaagc

SEQ ID NO: 362017 - RNA, 18 nt, Human
ucuuuuuuuuuuuuuuuu

SEQ ID NO: 362018 - RNA, 21 nt, Human
ugaaauaucugucuacauuua

SEQ ID NO: 362019 - RNA, 23 nt, Human
ugacaaguacacugugucuagaa

SEQ ID NO: 362020 - RNA, 19 nt, Human
ugagagggguugacaagua

SEQ ID NO: 362021 - RNA, 24 nt, Human
ugcucaauuuacccuucagcccca

SEQ ID NO: 362022 - RNA, 21 nt, Human
uggcuucuaauaagcaucccu

SEQ ID NO: 362023 - RNA, 22 nt, Human
ugguaugauuuccacacaaaug

SEQ ID NO: 362024 - RNA, 26 nt, Human
uggugccaaauuuuucuggcccuuuu

SEQ ID NO: 362025 - RNA, 18 nt, Human
ugguggcgcaggcuggag

SEQ ID NO: 362026 - RNA, 19 nt, Human
uguagauuuuaauacuaac

SEQ ID NO: 362027 - RNA, 21 nt, Human
uuaccaaggaggcacaaauau

SEQ ID NO: 362028 - RNA, 18 nt, Human
uucccuccucaaauucag

SEQ ID NO: 362029 - RNA, 20 nt, Human
uucuguucauaaaucuucca

SEQ ID NO: 362030 - RNA, 21 nt, Human
uugaaauaucugucuacauuu

SEQ ID NO: 362031 - RNA, 23 nt, Human
uugcaaaccuuaaaaaaaaaaaa

SEQ ID NO: 362032 - RNA, 21 nt, Human
uuggcuucuaauaagcauccc

SEQ ID NO: 362033 - RNA, 24 nt, Human
uuuaacacaacacucgaaauagau

SEQ ID NO: 362034 - RNA, 21 nt, Human
uuuccacacaaaugucuacua

SEQ ID NO: 362035 - RNA, 18 nt, Human
uuugaaauaucugucuac

SEQ ID NO: 362036 - RNA, 25 nt, Human
uuuucuguaaggccuucucugaaaa

SEQ ID NO: 362037 - RNA, 25 nt, Human
uuuuuuuuuuuuuuuuuuuucaagg

SEQ ID NO: 362038 - RNA, 22 nt, Human
aaaaaaagaaggaagggaagag

SEQ ID NO: 362039 - RNA, 18 nt, Human
aaaaaagaaggaagggaa

SEQ ID NO: 362040 - RNA, 18 nt, Human
aaacagagauuugggccu

SEQ ID NO: 362041 - RNA, 21 nt, Human
aaagaggcagagugaggagag

SEQ ID NO: 362042 - RNA, 19 nt, Human
aaccucauccuccuggccc

SEQ ID NO: 362043 - RNA, 18 nt, Human
aacuacugccccuccucc

SEQ ID NO: 362044 - RNA, 19 nt, Human
aagaaggaagggaagaggg

SEQ ID NO: 362045 - RNA, 20 nt, Human
aagaaggaagggaagagggg

SEQ ID NO: 362046 - RNA, 25 nt, Human
aagagguccuacagaaccacccucu

SEQ ID NO: 362047 - RNA, 22 nt, Human
aagcucacaugugcacaaccac

SEQ ID NO: 362048 - RNA, 18 nt, Human
aagguggcaaguuacugu

SEQ ID NO: 362049 - RNA, 18 nt, Human
aaguuccgggucccuccc

SEQ ID NO: 362050 - RNA, 22 nt, Human
aaugcccucuaagcaaaguggc

SEQ ID NO: 362051 - RNA, 23 nt, Human
aauggggugcugggagggccuug

SEQ ID NO: 362052 - RNA, 18 nt, Human
acaagaauggggugcugg

SEQ ID NO: 362053 - RNA, 23 nt, Human
acaugugcacaaccacaugugug

SEQ ID NO: 362054 - RNA, 20 nt, Human
accacauguguggaagaagu

SEQ ID NO: 362055 - RNA, 20 nt, Human
accaugccccagcugccugu

SEQ ID NO: 362056 - RNA, 20 nt, Human
acccaguggcucccaaauau

SEQ ID NO: 362057 - RNA, 18 nt, Human
acuacugccccuccuccc

SEQ ID NO: 362058 - RNA, 18 nt, Human
acuccagccgccacugcc

SEQ ID NO: 362059 - RNA, 20 nt, Human
agaaaaagagacacaaagaa

SEQ ID NO: 362060 - RNA, 25 nt, Human
agaaaaagagacacaaagaggcaga

SEQ ID NO: 362061 - RNA, 23 nt, Human
agaggaaaaaaagaaggaaggga

SEQ ID NO: 362062 - RNA, 22 nt, Human
agaggggaaagaguauggagag

SEQ ID NO: 362063 - RNA, 23 nt, Human
agagugagguggggagaaaugga

SEQ ID NO: 362064 - RNA, 21 nt, Human
aggaacugauuuuuuuuuucu

SEQ ID NO: 362065 - RNA, 22 nt, Human
aggagaaaaagagacacaaaga

SEQ ID NO: 362066 - RNA, 23 nt, Human
aggagaaaaagagacacaaagag

SEQ ID NO: 362067 - RNA, 23 nt, Human
aggaguuucuucacauuuugcca

SEQ ID NO: 362068 - RNA, 18 nt, Human
aggcagagugaggagaga

SEQ ID NO: 362069 - RNA, 22 nt, Human
aggcagagugaggagagaggcc

SEQ ID NO: 362070 - RNA, 26 nt, Human
aggcagccgcuacagccucgcucuuc

SEQ ID NO: 362071 - RNA, 19 nt, Human
agggugggaugaaggggaa

SEQ ID NO: 362072 - RNA, 18 nt, Human
agguagaaauauagaccu

SEQ ID NO: 362073 - RNA, 21 nt, Human
auccugggaggagaaaggccc

SEQ ID NO: 362074 - RNA, 19 nt, Human
aucucucucuccucccccu

SEQ ID NO: 362075 - RNA, 25 nt, Human
augcugagcagggugggaugaaggg

SEQ ID NO: 362076 - RNA, 22 nt, Human
auuuugccucccugccccucca

SEQ ID NO: 362077 - RNA, 22 nt, Human
caaaaagaugaugaaagggugg

SEQ ID NO: 362078 - RNA, 21 nt, Human
caacauucucuccaaaagcac

SEQ ID NO: 362079 - RNA, 21 nt, Human
caaccucauccuccuggcccg

SEQ ID NO: 362080 - RNA, 19 nt, Human
caagaauggggugcuggga

SEQ ID NO: 362081 - RNA, 19 nt, Human
caagugacagccaggaaug

SEQ ID NO: 362082 - RNA, 21 nt, Human
cacaauagacaaaggcucaga

SEQ ID NO: 362083 - RNA, 21 nt, Human
cacacaagcucacaugugcac

SEQ ID NO: 362084 - RNA, 21 nt, Human
cacagccuggcagugcccucu

SEQ ID NO: 362085 - RNA, 18 nt, Human
cacauguguggaagaagu

SEQ ID NO: 362086 - RNA, 24 nt, Human
caccauaucaauaacuacugcccc

SEQ ID NO: 362087 - RNA, 22 nt, Human
cagcaaacagagauuugggccu

SEQ ID NO: 362088 - RNA, 23 nt, Human
cagcaacucuaagacuaaccaag

SEQ ID NO: 362089 - RNA, 20 nt, Human
cagcaugggagacacauugg

SEQ ID NO: 362090 - RNA, 21 nt, Human
cagcccuuccuccuccuuuua

SEQ ID NO: 362091 - RNA, 20 nt, Human
cagccgccacugccuccccc

SEQ ID NO: 362092 - RNA, 19 nt, Human
cagcucccuucccaaacua

SEQ ID NO: 362093 - RNA, 20 nt, Human
caguggucucuccugggagu

SEQ ID NO: 362094 - RNA, 21 nt, Human
caugaaaacugagagaugggg

SEQ ID NO: 362095 - RNA, 21 nt, Human
cauuuugccucccugccccuc

SEQ ID NO: 362096 - RNA, 19 nt, Human
ccaaaagcacacaagcuca

SEQ ID NO: 362097 - RNA, 25 nt, Human
ccacaccccccaccucuuccucccu

SEQ ID NO: 362098 - RNA, 21 nt, Human
ccaccucuuccucccucaaca

SEQ ID NO: 362099 - RNA, 20 nt, Human
ccacugccucccccagcucc

SEQ ID NO: 362100 - RNA, 25 nt, Human
ccagauccugggaggagaaaggaag

SEQ ID NO: 362101 - RNA, 23 nt, Human
cccaaaagaaauuuuccaacccu

SEQ ID NO: 362102 - RNA, 19 nt, Human
cccagcccuuccuccuccc

SEQ ID NO: 362103 - RNA, 20 nt, Human
ccccaccucuuccucccuca

SEQ ID NO: 362104 - RNA, 23 nt, Human
ccccccaccucuuccucccucaa

SEQ ID NO: 362105 - RNA, 23 nt, Human
ccccucaggacaaccucauccuc

SEQ ID NO: 362106 - RNA, 19 nt, Human
cccuccacccaguggcucc

SEQ ID NO: 362107 - RNA, 24 nt, Human
cccuccacccaguggcucccaaau

SEQ ID NO: 362108 - RNA, 25 nt, Human
cccuuccuacccacagagcuaagaa

SEQ ID NO: 362109 - RNA, 20 nt, Human
cccuuccuccuccuuuuacu

SEQ ID NO: 362110 - RNA, 25 nt, Human
cccuuccuccuccuuuuacucgccu

SEQ ID NO: 362111 - RNA, 20 nt, Human
ccuacccuauuaggcuccug

SEQ ID NO: 362112 - RNA, 19 nt, Human
ccuagggcccagauucucc

SEQ ID NO: 362113 - RNA, 19 nt, Human
ccucccccagcucccuucc

SEQ ID NO: 362114 - RNA, 24 nt, Human
ccucccccagcucccuucccaaac

SEQ ID NO: 362115 - RNA, 19 nt, Human
ccuggcagugcccucugcc

SEQ ID NO: 362116 - RNA, 18 nt, Human
ccuuggacuguaagauuu

SEQ ID NO: 362117 - RNA, 20 nt, Human
cuaaauauuaauacugugcu

SEQ ID NO: 362118 - RNA, 23 nt, Human
cuacccacagagcuaagaaccag

SEQ ID NO: 362119 - RNA, 21 nt, Human
cuccacccaguggcucccaaa

SEQ ID NO: 362120 - RNA, 26 nt, Human
cucccccuccuccacaccccccaccu

SEQ ID NO: 362121 - RNA, 20 nt, Human
cuccuguuccacuacuguuc

SEQ ID NO: 362122 - RNA, 19 nt, Human
cucuccucccccuccucca

SEQ ID NO: 362123 - RNA, 23 nt, Human
cucucucuccucccccuccucca

SEQ ID NO: 362124 - RNA, 21 nt, Human
cugcugccuguaccuuuuugg

SEQ ID NO: 362125 - RNA, 19 nt, Human
cugcuuuugccaaucaaca

SEQ ID NO: 362126 - RNA, 24 nt, Human
cugggaggagaaaggcccuggaaa

SEQ ID NO: 362127 - RNA, 20 nt, Human
gaccuaugaaugucuucccu

SEQ ID NO: 362128 - RNA, 23 nt, Human
gagagguuccaaaggccaggggu

SEQ ID NO: 362129 - RNA, 24 nt, Human
gaggagaaaaagagacacaaagag

SEQ ID NO: 362130 - RNA, 18 nt, Human
gaggagaaaggcccugga

SEQ ID NO: 362131 - RNA, 21 nt, Human
gaggcugauuggcccaaguuc

SEQ ID NO: 362132 - RNA, 22 nt, Human
gaggucccauccuccuccuccc

SEQ ID NO: 362133 - RNA, 23 nt, Human
gcacacaagcucacaugugcaca

SEQ ID NO: 362134 - RNA, 21 nt, Human
gccaucugcaucuuaagcaac

SEQ ID NO: 362135 - RNA, 22 nt, Human
gcccuuccuccuccuuuuacuc

SEQ ID NO: 362136 - RNA, 22 nt, Human
gcccuuucuagggccccuuccu

SEQ ID NO: 362137 - RNA, 19 nt, Human
gccuaccuacuccagccgc

SEQ ID NO: 362138 - RNA, 23 nt, Human
gccucgcucuucuccccagcccu

SEQ ID NO: 362139 - RNA, 18 nt, Human
gccuguaccuuuuuggga

SEQ ID NO: 362140 - RNA, 19 nt, Human
gcuacagccucgcucuucu

SEQ ID NO: 362141 - RNA, 18 nt, Human
gcucagccugagaugagu

SEQ ID NO: 362142 - RNA, 22 nt, Human
gcugugcuaacugaacacagcc

SEQ ID NO: 362143 - RNA, 21 nt, Human
ggaauguucuucaguaagacu

SEQ ID NO: 362144 - RNA, 19 nt, Human
ggagaauuuaguuaaugag

SEQ ID NO: 362145 - RNA, 19 nt, Human
ggaguugauaagagcugga

SEQ ID NO: 362146 - RNA, 19 nt, Human
ggcacugcuuguacccagu

SEQ ID NO: 362147 - RNA, 21 nt, Human
gggaccagcggagggggcuca

SEQ ID NO: 362148 - RNA, 20 nt, Human
gggcauaaggaggcaucagu

SEQ ID NO: 362149 - RNA, 22 nt, Human
guacccaguucuugggaagcca

SEQ ID NO: 362150 - RNA, 22 nt, Human
gucccauccuccuccuccccca

SEQ ID NO: 362151 - RNA, 23 nt, Human
gugguucccaagcuuucccagaa

SEQ ID NO: 362152 - RNA, 22 nt, Human
guuacagggcuccuagggccca

SEQ ID NO: 362153 - RNA, 18 nt, Human
uaacuaggcccuuucuag

SEQ ID NO: 362154 - RNA, 20 nt, Human
uacccacagagcuaagaacc

SEQ ID NO: 362155 - RNA, 22 nt, Human
uagaggaaaaaaagaaggaagg

SEQ ID NO: 362156 - RNA, 20 nt, Human
uagauuuaacuguggugcau

SEQ ID NO: 362157 - RNA, 18 nt, Human
uagggcccagauucuccu

SEQ ID NO: 362158 - RNA, 19 nt, Human
uagggccccuuccuaccca

SEQ ID NO: 362159 - RNA, 19 nt, Human
uagugggugacuaacaagc

SEQ ID NO: 362160 - RNA, 18 nt, Human
uauggagagaagucagua

SEQ ID NO: 362161 - RNA, 25 nt, Human
ucaccauaucaauaacuacugcccc

SEQ ID NO: 362162 - RNA, 21 nt, Human
ucaguagaggaaaaaaagaag

SEQ ID NO: 362163 - RNA, 23 nt, Human
ucaguagaggaaaaaaagaagga

SEQ ID NO: 362164 - RNA, 21 nt, Human
ucaguccuccucuaccugcug

SEQ ID NO: 362165 - RNA, 18 nt, Human
uccacaccccccaccucu

SEQ ID NO: 362166 - RNA, 24 nt, Human
ucccagauccugggaggagaaagg

SEQ ID NO: 362167 - RNA, 22 nt, Human
ucccauccuccuccucccccag

SEQ ID NO: 362168 - RNA, 21 nt, Human
ucccccagagcuuagaaagua

SEQ ID NO: 362169 - RNA, 21 nt, Human
ucccccagcucccuucccaaa

SEQ ID NO: 362170 - RNA, 19 nt, Human
ucccccuccuccacacccc

SEQ ID NO: 362171 - RNA, 19 nt, Human
ucccugccccuccacccag

SEQ ID NO: 362172 - RNA, 19 nt, Human
uccuagggcccagauucuc

SEQ ID NO: 362173 - RNA, 18 nt, Human
uccuccacaccccccacc

SEQ ID NO: 362174 - RNA, 25 nt, Human
uccuccacaccccccaccucuuccu

SEQ ID NO: 362175 - RNA, 21 nt, Human
ucgccuaccuacuccagccgc

SEQ ID NO: 362176 - RNA, 23 nt, Human
ucucauuuugccucccugccccu

SEQ ID NO: 362177 - RNA, 24 nt, Human
ucucauuuugccucccugccccuc

SEQ ID NO: 362178 - RNA, 23 nt, Human
ucuccaaaagcacacaagcucac

SEQ ID NO: 362179 - RNA, 20 nt, Human
ucuucacauuuugccaugug

SEQ ID NO: 362180 - RNA, 20 nt, Human
ugaaaggaguuucuucacau

SEQ ID NO: 362181 - RNA, 21 nt, Human
ugaaugggcagauuugggacc

SEQ ID NO: 362182 - RNA, 20 nt, Human
ugaaugucuucccuucaucu

SEQ ID NO: 362183 - RNA, 22 nt, Human
ugacaggaacacaauagacaaa

SEQ ID NO: 362184 - RNA, 21 nt, Human
ugacaggauaguaacuaggcc

SEQ ID NO: 362185 - RNA, 21 nt, Human
ugaggagagaggcugagcucc

SEQ ID NO: 362186 - RNA, 21 nt, Human
ugaggagagaggcugagcuuc

SEQ ID NO: 362187 - RNA, 24 nt, Human
ugagugggaacuauugucuucuuu

SEQ ID NO: 362188 - RNA, 20 nt, Human
ugcaacugcugccuguaccu

SEQ ID NO: 362189 - RNA, 19 nt, Human
ugccccagcugccuguuug

SEQ ID NO: 362190 - RNA, 18 nt, Human
ugcccucugccccuagcc

SEQ ID NO: 362191 - RNA, 25 nt, Human
uggaagaaguaaauugauaucccac

SEQ ID NO: 362192 - RNA, 20 nt, Human
uggagagguuccaaaggcca

SEQ ID NO: 362193 - RNA, 21 nt, Human
uggagcuuugacuccaaggag

SEQ ID NO: 362194 - RNA, 19 nt, Human
uggaggccaaccaugcccc

SEQ ID NO: 362195 - RNA, 18 nt, Human
uggcaaugaccuccucag

SEQ ID NO: 362196 - RNA, 19 nt, Human
uggcaccuuuaaugcccuc

SEQ ID NO: 362197 - RNA, 21 nt, Human
uggccuaggaugcccagcaug

SEQ ID NO: 362198 - RNA, 21 nt, Human
ugggaaagggcacacaauggc

SEQ ID NO: 362199 - RNA, 24 nt, Human
ugggaccagcggagggggcucagg

SEQ ID NO: 362200 - RNA, 19 nt, Human
ugggauggcuuccccuucc

SEQ ID NO: 362201 - RNA, 21 nt, Human
uggggaguugauaagagcugg

SEQ ID NO: 362202 - RNA, 21 nt, Human
uggggugcugggagggccuug

SEQ ID NO: 362203 - RNA, 18 nt, Human
uggugcauaagaggcugc

SEQ ID NO: 362204 - RNA, 20 nt, Human
ugguucagagucuaccuuuc

SEQ ID NO: 362205 - RNA, 24 nt, Human
ugucaugaaaacugagagaugggg

SEQ ID NO: 362206 - RNA, 22 nt, Human
ugugugcgcaggucugggaaca

SEQ ID NO: 362207 - RNA, 19 nt, Human
uguugccagagccugggca

SEQ ID NO: 362208 - RNA, 20 nt, Human
uuaggcuccuggggacacag

SEQ ID NO: 362209 - RNA, 24 nt, Human
uucauggcaccuuuaaugcccucu

SEQ ID NO: 362210 - RNA, 21 nt, Human
uuccgggucccuccuuucuuc

SEQ ID NO: 362211 - RNA, 23 nt, Human
uuugccaaucaacauucucucca

SEQ ID NO: 362212 - RNA, 19 nt, Human
uuugccucccugccccucc

SEQ ID NO: 362213 - RNA, 21 nt, Human
uuuguaaaaaucagugacugg

SEQ ID NO: 362214 - RNA, 23 nt, Human
aaaaaacaaaaugaaaaacaaac

SEQ ID NO: 362215 - RNA, 20 nt, Human
aaauaaaccuauagcaugga

SEQ ID NO: 362216 - RNA, 19 nt, Human
agggguuugggauucagaa

SEQ ID NO: 362217 - RNA, 18 nt, Human
caccacacccagagucag

SEQ ID NO: 362218 - RNA, 21 nt, Human
cacccagagucagguauggaa

SEQ ID NO: 362219 - RNA, 22 nt, Human
cagcuaaaaccuuuucuaauac

SEQ ID NO: 362220 - RNA, 18 nt, Human
ccacacccagagucaggu

SEQ ID NO: 362221 - RNA, 19 nt, Human
ccaccacacccagagucag

SEQ ID NO: 362222 - RNA, 21 nt, Human
ccgaaagucacuggaagacuu

SEQ ID NO: 362223 - RNA, 24 nt, Human
cuccauauaaccaagaccgaaagu

SEQ ID NO: 362224 - RNA, 18 nt, Human
cuccuagauaaagucaua

SEQ ID NO: 362225 - RNA, 25 nt, Human
cuccucuccccaccugaggcagaag

SEQ ID NO: 362226 - RNA, 23 nt, Human
cuucuaccuacuuaaaccagggg

SEQ ID NO: 362227 - RNA, 26 nt, Human
guguaagaggggauaauuaauugucu

SEQ ID NO: 362228 - RNA, 21 nt, Human
uaaccaccacacccagaguca

SEQ ID NO: 362229 - RNA, 23 nt, Human
uauaaccaagaccgaaagucacu

SEQ ID NO: 362230 - RNA, 23 nt, Human
uauggaaauaaaccuauagcaug

SEQ ID NO: 362231 - RNA, 21 nt, Human
uauuuuaaccaccacacccag

SEQ ID NO: 362232 - RNA, 20 nt, Human
ucacuggaagacuuuaaaau

SEQ ID NO: 362233 - RNA, 22 nt, Human
uccccaccugaggcagaaguug

SEQ ID NO: 362234 - RNA, 20 nt, Human
ucuauggacuccucucccca

SEQ ID NO: 362235 - RNA, 23 nt, Human
ucuauggacuccucuccccaccu

SEQ ID NO: 362236 - RNA, 22 nt, Human
ugaaaaacaaacuccuagauaa

SEQ ID NO: 362237 - RNA, 22 nt, Human
ugaucuauggacuccucucccc

SEQ ID NO: 362238 - RNA, 22 nt, Human
uguaagaggggauaauuaauug

SEQ ID NO: 362239 - RNA, 21 nt, Human
uguauaaagggucacuuugua

SEQ ID NO: 362240 - RNA, 24 nt, Human
uguauaaagggucacuuuguagga

SEQ ID NO: 362241 - RNA, 23 nt, Human
uguguacauguggguaaguaugu

SEQ ID NO: 362242 - RNA, 28 nt, Human
uguguacauguggguaaguaugugggag

SEQ ID NO: 362243 - RNA, 30 nt, Human
uuaaaaaaacaaaaugaaaaacaaacuccc

SEQ ID NO: 362244 - RNA, 22 nt, Human
uuaaccaccacacccagaguca

SEQ ID NO: 362245 - RNA, 19 nt, Human
accaccuucuuccuggugc

SEQ ID NO: 362246 - RNA, 20 nt, Human
accaccuucuuccuggugcu

SEQ ID NO: 362247 - RNA, 19 nt, Human
ccccuaggacuccuccuac

SEQ ID NO: 362248 - RNA, 23 nt, Human
ccccuaggacuccuccuaccacc

SEQ ID NO: 362249 - RNA, 24 nt, Human
ccccuaggacuccuccuaccaccu

SEQ ID NO: 362250 - RNA, 21 nt, Human
cuccuccuaccaccuucuucc

SEQ ID NO: 362251 - RNA, 22 nt, Human
cuggugcuggugacugccccuc

SEQ ID NO: 362252 - RNA, 23 nt, Human
gccucagccucaugugcuggucc

SEQ ID NO: 362253 - RNA, 19 nt, Human
uccuggugcuggugacugc

SEQ ID NO: 362254 - RNA, 25 nt, Human
ugucccaggcucugcaagugcucug

SEQ ID NO: 362255 - RNA, 19 nt, Human
aaaacuguucccuccccuu

SEQ ID NO: 362256 - RNA, 24 nt, Human
aauaaccugccccaccaugaagau

SEQ ID NO: 362257 - RNA, 23 nt, Human
agaaguaaaaaauguuuaaaaag

SEQ ID NO: 362258 - RNA, 20 nt, Human
agcagaucuucucugcaucc

SEQ ID NO: 362259 - RNA, 22 nt, Human
caaaaagaagaaaagcacuuac

SEQ ID NO: 362260 - RNA, 21 nt, Human
caguggcuucucaagccuugc

SEQ ID NO: 362261 - RNA, 20 nt, Human
cauccaauaaccugccccac

SEQ ID NO: 362262 - RNA, 20 nt, Human
ccagaguuaagaacugcuga

SEQ ID NO: 362263 - RNA, 19 nt, Human
cccaaaaagaagaaaagca

SEQ ID NO: 362264 - RNA, 19 nt, Human
ccuagacuauaaggcuaac

SEQ ID NO: 362265 - RNA, 18 nt, Human
ccugccccaccaugaaga

SEQ ID NO: 362266 - RNA, 21 nt, Human
ccuuauguugcuguuaauguc

SEQ ID NO: 362267 - RNA, 21 nt, Human
cgagcagaucuucucugcauc

SEQ ID NO: 362268 - RNA, 23 nt, Human
cgagcagaucuucucugcaucca

SEQ ID NO: 362269 - RNA, 19 nt, Human
cucuaaggaguaucuaaaa

SEQ ID NO: 362270 - RNA, 20 nt, Human
cucuaaggaguaucuaaaaa

SEQ ID NO: 362271 - RNA, 24 nt, Human
cugaaucucuuuuacuacgacagu

SEQ ID NO: 362272 - RNA, 22 nt, Human
cuuaauggaccuuugguaaguu

SEQ ID NO: 362273 - RNA, 25 nt, Human
cuuauaaaggcuccccagggaagac

SEQ ID NO: 362274 - RNA, 18 nt, Human
cuuuucaaguuuguccag

SEQ ID NO: 362275 - RNA, 22 nt, Human
gguggaguuucccugugcccug

SEQ ID NO: 362276 - RNA, 20 nt, Human
gucccaaguaucagugucuu

SEQ ID NO: 362277 - RNA, 24 nt, Human
uaaaggcuccccagggaagacuaa

SEQ ID NO: 362278 - RNA, 22 nt, Human
uaacacacagccagaguuaaga

SEQ ID NO: 362279 - RNA, 23 nt, Human
uaagcccuagacuauaaggcuaa

SEQ ID NO: 362280 - RNA, 21 nt, Human
uaguaucuggguuccacccca

SEQ ID NO: 362281 - RNA, 18 nt, Human
uauggucaggaauaugga

SEQ ID NO: 362282 - RNA, 19 nt, Human
uauggucaggaauauggag

SEQ ID NO: 362283 - RNA, 23 nt, Human
ucaaccccgggcgcaugcuagaa

SEQ ID NO: 362284 - RNA, 22 nt, Human
ucaguuaucuuuuucagagagu

SEQ ID NO: 362285 - RNA, 19 nt, Human
uccacaguguccauuggua

SEQ ID NO: 362286 - RNA, 23 nt, Human
uccacaguguccauugguaccag

SEQ ID NO: 362287 - RNA, 19 nt, Human
ucccugugcccugaaucuc

SEQ ID NO: 362288 - RNA, 20 nt, Human
ucuacccaaaaagaagaaaa

SEQ ID NO: 362289 - RNA, 22 nt, Human
ucugcauccaauaaccugcccc

SEQ ID NO: 362290 - RNA, 24 nt, Human
ucuggguuccaccccagaccaauu

SEQ ID NO: 362291 - RNA, 20 nt, Human
uggagugggucccaaguauc

SEQ ID NO: 362292 - RNA, 21 nt, Human
uggcuucucaagccuugcccu

SEQ ID NO: 362293 - RNA, 18 nt, Human
ugguaccaguggcuucuc

SEQ ID NO: 362294 - RNA, 19 nt, Human
ugucuuauaaaggcucccc

SEQ ID NO: 362295 - RNA, 20 nt, Human
uguucccuccccuuaaugga

SEQ ID NO: 362296 - RNA, 22 nt, Human
uguuuaaaaaguucaugcucag

SEQ ID NO: 362297 - RNA, 24 nt, Human
uuaaugucuuuucucugacuucuc

SEQ ID NO: 362298 - RNA, 22 nt, Human
aaagaucugcacaaagccaaaa

SEQ ID NO: 362299 - RNA, 25 nt, Human
aagcagauguggggcagaagucaag

SEQ ID NO: 362300 - RNA, 18 nt, Human
acaaugaugaacuaagca

SEQ ID NO: 362301 - RNA, 25 nt, Human
acauguuaaagaucugcacaaagcc

SEQ ID NO: 362302 - RNA, 19 nt, Human
agaaagaagguaacugucc

SEQ ID NO: 362303 - RNA, 23 nt, Human
agaaagaagguaacuguccaaaa

SEQ ID NO: 362304 - RNA, 21 nt, Human
agaggcggcucugauuccaaa

SEQ ID NO: 362305 - RNA, 19 nt, Human
agauggccagaaagaaggu

SEQ ID NO: 362306 - RNA, 20 nt, Human
agccaaaaagcagauguggg

SEQ ID NO: 362307 - RNA, 23 nt, Human
caaaaagcagauguggggcagaa

SEQ ID NO: 362308 - RNA, 22 nt, Human
caacucccuugugauucucagu

SEQ ID NO: 362309 - RNA, 30 nt, Human
cacaaagccaaaaagcagauguggggcagg

SEQ ID NO: 362310 - RNA, 21 nt, Human
cagacacguucauuccucuua

SEQ ID NO: 362311 - RNA, 27 nt, Human
ccaaaagcuaacucuggaagcacaggu

SEQ ID NO: 362312 - RNA, 22 nt, Human
cuaagcaccaggaucuagcacu

SEQ ID NO: 362313 - RNA, 24 nt, Human
cuacacacauuucuccagacauuu

SEQ ID NO: 362314 - RNA, 22 nt, Human
cuuuccuccuugacauuuuuca

SEQ ID NO: 362315 - RNA, 21 nt, Human
gaaaacaaugaugaacuaagc

SEQ ID NO: 362316 - RNA, 23 nt, Human
gaaaacacuaugcuuucuguugu

SEQ ID NO: 362317 - RNA, 22 nt, Human
gaaagagaaaugucugugaggg

SEQ ID NO: 362318 - RNA, 19 nt, Human
gacacguucauuccucuua

SEQ ID NO: 362319 - RNA, 22 nt, Human
gcaaacgaaggcagauaucaug

SEQ ID NO: 362320 - RNA, 18 nt, Human
gccaaaaagcagaugugg

SEQ ID NO: 362321 - RNA, 23 nt, Human
ggaggggcuagaagagacacugg

SEQ ID NO: 362322 - RNA, 21 nt, Human
gggauuccaacagucagaggg

SEQ ID NO: 362323 - RNA, 24 nt, Human
gggcagaagucaagauggccagaa

SEQ ID NO: 362324 - RNA, 18 nt, Human
ggucacuguccaaaagca

SEQ ID NO: 362325 - RNA, 21 nt, Human
gucuguucacuaacauguuaa

SEQ ID NO: 362326 - RNA, 21 nt, Human
gugauucucaguucucggucc

SEQ ID NO: 362327 - RNA, 19 nt, Human
guuguuuggggcuuucuuu

SEQ ID NO: 362328 - RNA, 19 nt, Human
uaaagaucugcacaaagcc

SEQ ID NO: 362329 - RNA, 22 nt, Human
uaucuugcucccauuaguugca

SEQ ID NO: 362330 - RNA, 23 nt, Human
ucauuauuguucuuuccuccuug

SEQ ID NO: 362331 - RNA, 19 nt, Human
uccaaaagcuaacucugga

SEQ ID NO: 362332 - RNA, 22 nt, Human
ucuuaugauccuccaugcugcc

SEQ ID NO: 362333 - RNA, 18 nt, Human
ugaaaugguuuugcuauc

SEQ ID NO: 362334 - RNA, 24 nt, Human
ugaagaacuguuggaggggcuaga

SEQ ID NO: 362335 - RNA, 19 nt, Human
ugcuuucuguuguuugggg

SEQ ID NO: 362336 - RNA, 19 nt, Human
uggaagcacagguauucca

SEQ ID NO: 362337 - RNA, 19 nt, Human
uggcuuaucagucaagcag

SEQ ID NO: 362338 - RNA, 18 nt, Human
uuccuagggacuggcauu

SEQ ID NO: 362339 - RNA, 19 nt, Human
uugaauugaauccuacuga

SEQ ID NO: 362340 - RNA, 24 nt, Human
uugaggacagcucagaggauucau

SEQ ID NO: 362341 - RNA, 19 nt, Human
uuuuacuaggauaacagug

SEQ ID NO: 362342 - RNA, 24 nt, Human
aaaaaauucucguguagcuuaaaa

SEQ ID NO: 362343 - RNA, 18 nt, Human
aaaaagacauagaaugcu

SEQ ID NO: 362344 - RNA, 22 nt, Human
aaaauucucguguagcuuaaaa

SEQ ID NO: 362345 - RNA, 24 nt, Human
aaacauugccauagcaauuuaaag

SEQ ID NO: 362346 - RNA, 24 nt, Human
aaagugcugggacuacaggcauga

SEQ ID NO: 362347 - RNA, 20 nt, Human
aacacagcacauagaaauuu

SEQ ID NO: 362348 - RNA, 23 nt, Human
aacacagcacauagaaauuuaua

SEQ ID NO: 362349 - RNA, 25 nt, Human
aaccacagccacuggaggauggucc

SEQ ID NO: 362350 - RNA, 23 nt, Human
aaccagaaguaaagaugauuacc

SEQ ID NO: 362351 - RNA, 19 nt, Human
aagugcugggacuacaggc

SEQ ID NO: 362352 - RNA, 26 nt, Human
aagugcugggacuacaggcaugagcc

SEQ ID NO: 362353 - RNA, 20 nt, Human
acaaaacgagaccccaucuc

SEQ ID NO: 362354 - RNA, 18 nt, Human
acacaauacagaaggcac

SEQ ID NO: 362355 - RNA, 23 nt, Human
acagaaggcacuuugagguuaca

SEQ ID NO: 362356 - RNA, 24 nt, Human
acaggcugggcacaguggcucaug

SEQ ID NO: 362357 - RNA, 23 nt, Human
accacagccacuggaggaugguc

SEQ ID NO: 362358 - RNA, 24 nt, Human
accaugcuggccaggcuggucucg

SEQ ID NO: 362359 - RNA, 18 nt, Human
acccugaagccagggagg

SEQ ID NO: 362360 - RNA, 23 nt, Human
accucagccccccaaagugcugg

SEQ ID NO: 362361 - RNA, 21 nt, Human
acugggcaucgcacuuuucuu

SEQ ID NO: 362362 - RNA, 24 nt, Human
agacagacugaacaaaccggaccc

SEQ ID NO: 362363 - RNA, 18 nt, Human
agacaggaggaucgcuug

SEQ ID NO: 362364 - RNA, 18 nt, Human
agaugaagacagacugaa

SEQ ID NO: 362365 - RNA, 21 nt, Human
agccaggaguucaaaaccagc

SEQ ID NO: 362366 - RNA, 24 nt, Human
agccugggcgacaaaacgagaccc

SEQ ID NO: 362367 - RNA, 23 nt, Human
aggaguucaaaaccagccugggc

SEQ ID NO: 362368 - RNA, 24 nt, Human
aggaucgcuugaagccaggaguuc

SEQ ID NO: 362369 - RNA, 18 nt, Human
aggcagguaugugaaccu

SEQ ID NO: 362370 - RNA, 21 nt, Human
aggcaugagccaccgugcccg

SEQ ID NO: 362371 - RNA, 23 nt, Human
aggcaugagccaccgugcccggc

SEQ ID NO: 362372 - RNA, 24 nt, Human
aggccgagacaggaggaucgcuug

SEQ ID NO: 362373 - RNA, 25 nt, Human
aggcuggagugcaguggcgugaucu

SEQ ID NO: 362374 - RNA, 21 nt, Human
agguucaagugauucuccuac

SEQ ID NO: 362375 - RNA, 22 nt, Human
agguucaagugauucuccuacc

SEQ ID NO: 362376 - RNA, 18 nt, Human
aguaucugggauuacagg

SEQ ID NO: 362377 - RNA, 23 nt, Human
agugcaguggcgugaucuugguu

SEQ ID NO: 362378 - RNA, 24 nt, Human
agugcaguggcgugaucuugguuc

SEQ ID NO: 362379 - RNA, 18 nt, Human
aguggcucaugccuguag

SEQ ID NO: 362380 - RNA, 23 nt, Human
aguggcucaugccuguagucuca

SEQ ID NO: 362381 - RNA, 22 nt, Human
augaagacagacugaacaaaca

SEQ ID NO: 362382 - RNA, 19 nt, Human
augccuguagucucaacac

SEQ ID NO: 362383 - RNA, 21 nt, Human
augcucaacaaccacagccac

SEQ ID NO: 362384 - RNA, 19 nt, Human
augggguuucaccaugcug

SEQ ID NO: 362385 - RNA, 24 nt, Human
augggguuucaccaugcuggccag

SEQ ID NO: 362386 - RNA, 19 nt, Human
auuaaaaaaaaaauucucg

SEQ ID NO: 362387 - RNA, 21 nt, Human
auuaaaaaaagacauagaaug

SEQ ID NO: 362388 - RNA, 24 nt, Human
caaaacacagcacauagaaauuua

SEQ ID NO: 362389 - RNA, 22 nt, Human
caaaacauaaacuaaguuuuaa

SEQ ID NO: 362390 - RNA, 22 nt, Human
caaaacgagaccccaucucuac

SEQ ID NO: 362391 - RNA, 25 nt, Human
caaaauacaaacgaacaaaacacag

SEQ ID NO: 362392 - RNA, 24 nt, Human
caaagugcugggacuacaggcaug

SEQ ID NO: 362393 - RNA, 23 nt, Human
caacacuuugugaggccgagaca

SEQ ID NO: 362394 - RNA, 23 nt, Human
caacuuccaucucccagguucaa

SEQ ID NO: 362395 - RNA, 20 nt, Human
caagugauucuccuaccuca

SEQ ID NO: 362396 - RNA, 22 nt, Human
caagugauucuccuaccucagc

SEQ ID NO: 362397 - RNA, 19 nt, Human
caccagccgaagagucgac

SEQ ID NO: 362398 - RNA, 21 nt, Human
caccaugcuggccaggcuggu

SEQ ID NO: 362399 - RNA, 24 nt, Human
caccaugcuggccaggcuggucuc

SEQ ID NO: 362400 - RNA, 27 nt, Human
caccaugcuggccaggcuggucucgaa

SEQ ID NO: 362401 - RNA, 23 nt, Human
cacucugacccugaagccaggga

SEQ ID NO: 362402 - RNA, 20 nt, Human
cagccuccugaguaucuggg

SEQ ID NO: 362403 - RNA, 21 nt, Human
caggcgcccgucaccacgccc

SEQ ID NO: 362404 - RNA, 19 nt, Human
cagggagggagugcuuggc

SEQ ID NO: 362405 - RNA, 19 nt, Human
cagguugcaugccagccaa

SEQ ID NO: 362406 - RNA, 20 nt, Human
caugccuguagucucaacac

SEQ ID NO: 362407 - RNA, 24 nt, Human
caugccuguagucucaacacuuug

SEQ ID NO: 362408 - RNA, 24 nt, Human
caugcuggccaggcuggucucgaa

SEQ ID NO: 362409 - RNA, 19 nt, Human
ccaaagugcugggacuaca

SEQ ID NO: 362410 - RNA, 24 nt, Human
ccaaagugcugggacuacaggcau

SEQ ID NO: 362411 - RNA, 19 nt, Human
ccacuggaaaaauaugauu

SEQ ID NO: 362412 - RNA, 24 nt, Human
cccaaagugcugggacuacaggca

SEQ ID NO: 362413 - RNA, 23 nt, Human
cccagguucaagugauucuccuc

SEQ ID NO: 362414 - RNA, 24 nt, Human
ccccaaagugcugggacuacaggc

SEQ ID NO: 362415 - RNA, 20 nt, Human
ccuaaaaaaucaacagaacu

SEQ ID NO: 362416 - RNA, 19 nt, Human
ccugaguaucugggauuac

SEQ ID NO: 362417 - RNA, 23 nt, Human
ccugaguaucugggauuacaggc

SEQ ID NO: 362418 - RNA, 24 nt, Human
ccugggcgacaaaacgagacccca

SEQ ID NO: 362419 - RNA, 22 nt, Human
cgaacaaaacacagcacauaga

SEQ ID NO: 362420 - RNA, 18 nt, Human
cgacagcccgaagccccc

SEQ ID NO: 362421 - RNA, 26 nt, Human
cgagacaggaggaucgcuugaagcca

SEQ ID NO: 362422 - RNA, 24 nt, Human
cgcccaggcuggagugcaguggcg

SEQ ID NO: 362423 - RNA, 18 nt, Human
cggcccgacagcccgaag

SEQ ID NO: 362424 - RNA, 20 nt, Human
cgugggucgacccacgcguc

SEQ ID NO: 362425 - RNA, 20 nt, Human
cgugggucgacccacgcguc

SEQ ID NO: 362426 - RNA, 20 nt, Human
cgugggucgacccacgcguu

SEQ ID NO: 362427 - RNA, 18 nt, Human
cuacacauugauagcccc

SEQ ID NO: 362428 - RNA, 21 nt, Human
cucagccccccaaagugcugg

SEQ ID NO: 362429 - RNA, 24 nt, Human
cucaugccuguagucucaacacuu

SEQ ID NO: 362430 - RNA, 20 nt, Human
cuccaucgcccaggcuggag

SEQ ID NO: 362431 - RNA, 18 nt, Human
cucccagguucaagugau

SEQ ID NO: 362432 - RNA, 20 nt, Human
cuccugaucucaugauucgc

SEQ ID NO: 362433 - RNA, 22 nt, Human
cugaguaucugggauuacaggc

SEQ ID NO: 362434 - RNA, 24 nt, Human
cugcaacuuccaucucccagguuc

SEQ ID NO: 362435 - RNA, 22 nt, Human
cuuuuuuuuuuuuugaguugga

SEQ ID NO: 362436 - RNA, 23 nt, Human
gaaagcaugcucaacaaccacag

SEQ ID NO: 362437 - RNA, 20 nt, Human
gacuacaggcaugagccacc

SEQ ID NO: 362438 - RNA, 21 nt, Human
gacuacaggcaugagccaccg

SEQ ID NO: 362439 - RNA, 19 nt, Human
gacugggcaucgcacuuuu

SEQ ID NO: 362440 - RNA, 22 nt, Human
gacugggcaucgcacuuuucuu

SEQ ID NO: 362441 - RNA, 18 nt, Human
gagaugggguuucaccau

SEQ ID NO: 362442 - RNA, 24 nt, Human
gagaugggguuucaccaugcuggc

SEQ ID NO: 362443 - RNA, 24 nt, Human
gaucgcuugaagccaggaguucaa

SEQ ID NO: 362444 - RNA, 21 nt, Human
gaucucacugcucuugccuac

SEQ ID NO: 362445 - RNA, 22 nt, Human
gaucucaugauucgcccaccuc

SEQ ID NO: 362446 - RNA, 21 nt, Human
gauucuccuaccucagccucc

SEQ ID NO: 362447 - RNA, 23 nt, Human
gcccagcuaauuuuuuguauuuu

SEQ ID NO: 362448 - RNA, 20 nt, Human
gcccaggcuggagugcagug

SEQ ID NO: 362449 - RNA, 24 nt, Human
gcccaggcuggagugcaguggcgu

SEQ ID NO: 362450 - RNA, 25 nt, Human
gcuccaucgcccaggcuggagugca

SEQ ID NO: 362451 - RNA, 19 nt, Human
gcuggagugcaguggcgug

SEQ ID NO: 362452 - RNA, 21 nt, Human
ggacuacaggcaugagccacc

SEQ ID NO: 362453 - RNA, 24 nt, Human
ggacuacaggcaugagccaccgug

SEQ ID NO: 362454 - RNA, 23 nt, Human
ggagucucgcuccaucgcccagg

SEQ ID NO: 362455 - RNA, 22 nt, Human
ggaguucaaaaccagccugggc

SEQ ID NO: 362456 - RNA, 23 nt, Human
ggaucgcuugaagccaggaguuc

SEQ ID NO: 362457 - RNA, 22 nt, Human
ggcacaguggcucaugccugua

SEQ ID NO: 362458 - RNA, 22 nt, Human
ggcgacaaaacgagaccccauc

SEQ ID NO: 362459 - RNA, 22 nt, Human
ggcuggagugcaguggcgugau

SEQ ID NO: 362460 - RNA, 23 nt, Human
ggcugggcacaguggcucaugcc

SEQ ID NO: 362461 - RNA, 24 nt, Human
ggcuggucucgaacuccugaucuc

SEQ ID NO: 362462 - RNA, 18 nt, Human
gggcacaguggcucaugc

SEQ ID NO: 362463 - RNA, 18 nt, Human
gggguuucaccaugcugg

SEQ ID NO: 362464 - RNA, 22 nt, Human
gggguuucaccaugcuggccag

SEQ ID NO: 362465 - RNA, 23 nt, Human
gggguuucaccaugcuggccagg

SEQ ID NO: 362466 - RNA, 19 nt, Human
gggucgacccacgcguccg

SEQ ID NO: 362467 - RNA, 23 nt, Human
gugauucuccuaccucagccucc

SEQ ID NO: 362468 - RNA, 19 nt, Human
guggccuuuaaaagucacu

SEQ ID NO: 362469 - RNA, 21 nt, Human
gugggucgacccacgcguccg

SEQ ID NO: 362470 - RNA, 22 nt, Human
gugggucgacccacgcguccgc

SEQ ID NO: 362471 - RNA, 23 nt, Human
gugggucgacccacgcguccgcg

SEQ ID NO: 362472 - RNA, 22 nt, Human
uaaaaauacauuaauagaggca

SEQ ID NO: 362473 - RNA, 23 nt, Human
uaaaagucacuuuaacuuuaaac

SEQ ID NO: 362474 - RNA, 24 nt, Human
uaauuuuuuguauuuuuaguagag

SEQ ID NO: 362475 - RNA, 23 nt, Human
uacaaacgaacaaaacacagcac

SEQ ID NO: 362476 - RNA, 23 nt, Human
uacaggcaugagccaccgugccc

SEQ ID NO: 362477 - RNA, 24 nt, Human
uaccucagccuccugaguaucugg

SEQ ID NO: 362478 - RNA, 21 nt, Human
uagaacaggcugggcacagug

SEQ ID NO: 362479 - RNA, 24 nt, Human
uaguagagaugggguuucaccaug

SEQ ID NO: 362480 - RNA, 26 nt, Human
uaguagagaugggguuucaccaugcu

SEQ ID NO: 362481 - RNA, 19 nt, Human
uauacaguggauggcagcu

SEQ ID NO: 362482 - RNA, 23 nt, Human
uauggcccuaaaaaaucaacaga

SEQ ID NO: 362483 - RNA, 24 nt, Human
ucacugcaacuuccaucucccagg

SEQ ID NO: 362484 - RNA, 21 nt, Human
ucagaggaaaggcaccagccg

SEQ ID NO: 362485 - RNA, 20 nt, Human
ucagccccccaaagugcugg

SEQ ID NO: 362486 - RNA, 24 nt, Human
uccaucgcccaggcuggagugcag

SEQ ID NO: 362487 - RNA, 21 nt, Human
ucccagguucaagugauucuc

SEQ ID NO: 362488 - RNA, 23 nt, Human
ucccagguucaagugauucuccu

SEQ ID NO: 362489 - RNA, 24 nt, Human
uccugaguaucugggauuacaggc

SEQ ID NO: 362490 - RNA, 18 nt, Human
ucgcauuuuucuuuugca

SEQ ID NO: 362491 - RNA, 22 nt, Human
ucgcccaggcuggagugcagug

SEQ ID NO: 362492 - RNA, 24 nt, Human
ucgcuccaucgcccaggcuggagu

SEQ ID NO: 362493 - RNA, 20 nt, Human
ucuacaaaauacaaacgaac

SEQ ID NO: 362494 - RNA, 19 nt, Human
ucucccagguucaagugau

SEQ ID NO: 362495 - RNA, 24 nt, Human
ucucccagguucaagugauucucc

SEQ ID NO: 362496 - RNA, 18 nt, Human
ucuccuaccucagccucc

SEQ ID NO: 362497 - RNA, 19 nt, Human
ucucgaacuccugaucuca

SEQ ID NO: 362498 - RNA, 22 nt, Human
ucucgcuccaucgcccaggcug

SEQ ID NO: 362499 - RNA, 23 nt, Human
ucucgcuccaucgcccaggcugg

SEQ ID NO: 362500 - RNA, 24 nt, Human
ucucgcuccaucgcccaggcugga

SEQ ID NO: 362501 - RNA, 26 nt, Human
ucucgcuccaucgcccaggcuggagu

SEQ ID NO: 362502 - RNA, 27 nt, Human
ucucgcuccaucgcccaggcuggagug

SEQ ID NO: 362503 - RNA, 18 nt, Human
ucugacccugaagccagg

SEQ ID NO: 362504 - RNA, 21 nt, Human
ucugugcugggaagggaaagu

SEQ ID NO: 362505 - RNA, 26 nt, Human
ugaaagcaugcucaacaaccacagcc

SEQ ID NO: 362506 - RNA, 24 nt, Human
ugacccugaagccagggagggagu

SEQ ID NO: 362507 - RNA, 20 nt, Human
ugagaauuaucaucuaguuu

SEQ ID NO: 362508 - RNA, 25 nt, Human
ugaggaaagugaacaacaacaggug

SEQ ID NO: 362509 - RNA, 24 nt, Human
ugauucgcccaccucagcccccca

SEQ ID NO: 362510 - RNA, 20 nt, Human
ugauucuccuaccucagccu

SEQ ID NO: 362511 - RNA, 23 nt, Human
ugcaacuuccaucucccagguuc

SEQ ID NO: 362512 - RNA, 18 nt, Human
ugccugggcacacucccc

SEQ ID NO: 362513 - RNA, 20 nt, Human
ugccugggcacacuccccuc

SEQ ID NO: 362514 - RNA, 22 nt, Human
ugccugggcacacuccccucag

SEQ ID NO: 362515 - RNA, 18 nt, Human
ugcuggccaggcuggucu

SEQ ID NO: 362516 - RNA, 19 nt, Human
uggagugcaguggcgugau

SEQ ID NO: 362517 - RNA, 23 nt, Human
uggagugcaguggcgugaucuug

SEQ ID NO: 362518 - RNA, 24 nt, Human
uggagugcaguggcgugaucuugg

SEQ ID NO: 362519 - RNA, 21 nt, Human
uggaugcugccucugauaaac

SEQ ID NO: 362520 - RNA, 24 nt, Human
uggccaggcuggucucgaacuccu

SEQ ID NO: 362521 - RNA, 21 nt, Human
uggcucaugccuguagucuca

SEQ ID NO: 362522 - RNA, 21 nt, Human
ugggaagggaaaguuugagga

SEQ ID NO: 362523 - RNA, 18 nt, Human
ugggacuacaggcaugag

SEQ ID NO: 362524 - RNA, 21 nt, Human
ugggacuacaggcaugagcca

SEQ ID NO: 362525 - RNA, 22 nt, Human
ugggacuacaggcaugagccac

SEQ ID NO: 362526 - RNA, 23 nt, Human
ugggacuacaggcaugagccacc

SEQ ID NO: 362527 - RNA, 24 nt, Human
ugggacuacaggcaugagccaccg

SEQ ID NO: 362528 - RNA, 21 nt, Human
ugggauuacaggcgcccguca

SEQ ID NO: 362529 - RNA, 22 nt, Human
ugggauuacaggcgcccgucac

SEQ ID NO: 362530 - RNA, 24 nt, Human
ugggauuacaggcgcccgucacca

SEQ ID NO: 362531 - RNA, 21 nt, Human
ugggcacacuccccucagucc

SEQ ID NO: 362532 - RNA, 23 nt, Human
ugggcuuggaugcugccucugau

SEQ ID NO: 362533 - RNA, 24 nt, Human
ugggguuucaccaugcuggccagg

SEQ ID NO: 362534 - RNA, 21 nt, Human
uguauuuuuaguagagauggg

SEQ ID NO: 362535 - RNA, 23 nt, Human
uuacacaauacagaaggcacuuu

SEQ ID NO: 362536 - RNA, 18 nt, Human
uuaguagagaugggguuu

SEQ ID NO: 362537 - RNA, 22 nt, Human
uuaguagagaugggguuucacc

SEQ ID NO: 362538 - RNA, 24 nt, Human
uuaguagagaugggguuucaccau

SEQ ID NO: 362539 - RNA, 23 nt, Human
uucaagugauucuccuaccucag

SEQ ID NO: 362540 - RNA, 24 nt, Human
uucaagugauucuccuaccucagc

SEQ ID NO: 362541 - RNA, 18 nt, Human
uucgcccaccucagcccc

SEQ ID NO: 362542 - RNA, 21 nt, Human
uucgcccaccucagcccccca

SEQ ID NO: 362543 - RNA, 23 nt, Human
uucuuuuuuuuuuuuugaguugg

SEQ ID NO: 362544 - RNA, 24 nt, Human
uucuuuuuuuuuuuuugaguugga

SEQ ID NO: 362545 - RNA, 23 nt, Human
uuguauuuuuaguagagaugggg

SEQ ID NO: 362546 - RNA, 25 nt, Human
uuuaaacugcaacacaaacuuagau

SEQ ID NO: 362547 - RNA, 21 nt, Human
uuucaccaugcuggccaggcu

SEQ ID NO: 362548 - RNA, 24 nt, Human
uuuuuaguagagaugggguuucac

SEQ ID NO: 362549 - RNA, 21 nt, Human
uuuuuguauuuuuaguagaga

SEQ ID NO: 362550 - RNA, 24 nt, Human
uuuuuuguauuuuuaguagagaug

SEQ ID NO: 362551 - RNA, 25 nt, Human
uuuuuuuuuuuugaguuggagucuc

SEQ ID NO: 362552 - RNA, 24 nt, Human
aaacugucagucugcagcuucacu

SEQ ID NO: 362553 - RNA, 18 nt, Human
aaaggagaugggagcuga

SEQ ID NO: 362554 - RNA, 23 nt, Human
aaggagagauuugaaaccacuga

SEQ ID NO: 362555 - RNA, 19 nt, Human
agagggucuugagaaauuu

SEQ ID NO: 362556 - RNA, 18 nt, Human
aggacagagaggagcagg

SEQ ID NO: 362557 - RNA, 21 nt, Human
agggaaccuuuaggggaauuu

SEQ ID NO: 362558 - RNA, 20 nt, Human
aggggaauuuggguauccuu

SEQ ID NO: 362559 - RNA, 18 nt, Human
aggggagaugugaagugg

SEQ ID NO: 362560 - RNA, 18 nt, Human
cacugggaacaagggaga

SEQ ID NO: 362561 - RNA, 27 nt, Human
cagcuucacuaccccugagaggcaauu

SEQ ID NO: 362562 - RNA, 27 nt, Human
caggccagagaugaguggaauggaggu

SEQ ID NO: 362563 - RNA, 18 nt, Human
ccacugaggcagaacggg

SEQ ID NO: 362564 - RNA, 20 nt, Human
ccccugagaggcaauuggga

SEQ ID NO: 362565 - RNA, 23 nt, Human
cccugagaggcaauugggaagga

SEQ ID NO: 362566 - RNA, 21 nt, Human
cuggaaacugccauucagugg

SEQ ID NO: 362567 - RNA, 20 nt, Human
gaaaccgccauuuuccauca

SEQ ID NO: 362568 - RNA, 20 nt, Human
gagagggaaccuuuagggga

SEQ ID NO: 362569 - RNA, 21 nt, Human
gaguggaauggagguccugga

SEQ ID NO: 362570 - RNA, 19 nt, Human
gauuugaaacuucuagagg

SEQ ID NO: 362571 - RNA, 24 nt, Human
gcugguaggggagaugugaagugg

SEQ ID NO: 362572 - RNA, 25 nt, Human
gggaacaagggagagugccgguacc

SEQ ID NO: 362573 - RNA, 19 nt, Human
gggaauuuggguauccuug

SEQ ID NO: 362574 - RNA, 25 nt, Human
gggucuugagaaauuuggugcuuuc

SEQ ID NO: 362575 - RNA, 22 nt, Human
gguggagagggaaccuuuaggg

SEQ ID NO: 362576 - RNA, 23 nt, Human
ucaggccagagaugaguggaaug

SEQ ID NO: 362577 - RNA, 20 nt, Human
ugaaaccacugaggcagaac

SEQ ID NO: 362578 - RNA, 20 nt, Human
ugaaacuucuagaggaggac

SEQ ID NO: 362579 - RNA, 23 nt, Human
ugaaaggagagauuugaaaccac

SEQ ID NO: 362580 - RNA, 21 nt, Human
ugacagcacugggaacaaggg

SEQ ID NO: 362581 - RNA, 24 nt, Human
ugaguggaauggagguccuggaaa

SEQ ID NO: 362582 - RNA, 18 nt, Human
uggaauggcggggacgag

SEQ ID NO: 362583 - RNA, 20 nt, Human
uggcggggacgaguaauugg

SEQ ID NO: 362584 - RNA, 20 nt, Human
uucgcagaaucugcugguag

SEQ ID NO: 362585 - RNA, 23 nt, Human
uucuagaggaggaccuugaauuu

SEQ ID NO: 362586 - RNA, 21 nt, Human
uugaaaccacugaggcagaac

SEQ ID NO: 362587 - RNA, 18 nt, Human
uugaaaccgccauuuucc

SEQ ID NO: 362588 - RNA, 19 nt, Human
uugaaaccgccauuuucca

SEQ ID NO: 362589 - RNA, 20 nt, Human
uugaaaccgccauuuuccau

SEQ ID NO: 362590 - RNA, 19 nt, Human
uugaauuuuucugaaagga

SEQ ID NO: 362591 - RNA, 22 nt, Human
aaaaacaaaacaaaacucuuca

SEQ ID NO: 362592 - RNA, 18 nt, Human
aaacucuucaagcuggca

SEQ ID NO: 362593 - RNA, 18 nt, Human
aaagagguggucacugag

SEQ ID NO: 362594 - RNA, 21 nt, Human
acaaaacaaaacucuucaagc

SEQ ID NO: 362595 - RNA, 22 nt, Human
acagcagcgggaaggugcauca

SEQ ID NO: 362596 - RNA, 19 nt, Human
acauuacaccccuccuauu

SEQ ID NO: 362597 - RNA, 20 nt, Human
acauuuucucaacucggcug

SEQ ID NO: 362598 - RNA, 18 nt, Human
acccgggaaagaacacgu

SEQ ID NO: 362599 - RNA, 19 nt, Human
agcaagacaaugcugagaa

SEQ ID NO: 362600 - RNA, 22 nt, Human
agcgggaaggugcaucacucug

SEQ ID NO: 362601 - RNA, 23 nt, Human
agguaugugaagcccacugagcc

SEQ ID NO: 362602 - RNA, 18 nt, Human
aucacucugucuucccau

SEQ ID NO: 362603 - RNA, 20 nt, Human
caaaacaaaacucuucaagc

SEQ ID NO: 362604 - RNA, 23 nt, Human
cacagcucaaguuuaaucaaccu

SEQ ID NO: 362605 - RNA, 21 nt, Human
cagggacaguguccaugggag

SEQ ID NO: 362606 - RNA, 24 nt, Human
caucaugaauucaaggagcaccuu

SEQ ID NO: 362607 - RNA, 23 nt, Human
cauuuucucaacucggcugggaa

SEQ ID NO: 362608 - RNA, 19 nt, Human
ccagagaaaaucaggcaac

SEQ ID NO: 362609 - RNA, 20 nt, Human
ccagcagaagagaaaugggc

SEQ ID NO: 362610 - RNA, 22 nt, Human
ccauggugaucuggucccaggg

SEQ ID NO: 362611 - RNA, 26 nt, Human
cccaggcagagguaugugaagcccac

SEQ ID NO: 362612 - RNA, 22 nt, Human
ccggacuggggcagucuuuccc

SEQ ID NO: 362613 - RNA, 28 nt, Human
ccucacagcagcgggaaggugcaucacu

SEQ ID NO: 362614 - RNA, 21 nt, Human
ccucuaugcaaugagucaccc

SEQ ID NO: 362615 - RNA, 21 nt, Human
ccugcagccuuuauggaagag

SEQ ID NO: 362616 - RNA, 23 nt, Human
cugcgggcucuuagggaaggucc

SEQ ID NO: 362617 - RNA, 19 nt, Human
gaagacacuuuucacugag

SEQ ID NO: 362618 - RNA, 19 nt, Human
gacacuguucucugaacgu

SEQ ID NO: 362619 - RNA, 26 nt, Human
gaggaaagaagauucccaggcagagg

SEQ ID NO: 362620 - RNA, 21 nt, Human
gcacauuacucacuaccaccu

SEQ ID NO: 362621 - RNA, 23 nt, Human
gcagaacccgucacagcucaagu

SEQ ID NO: 362622 - RNA, 18 nt, Human
gcagcaagacaaugcuga

SEQ ID NO: 362623 - RNA, 23 nt, Human
gccauggugaucuggucccaggg

SEQ ID NO: 362624 - RNA, 24 nt, Human
gccuuuauggaagaggggagggag

SEQ ID NO: 362625 - RNA, 22 nt, Human
ggaaagaagauucccaggcaga

SEQ ID NO: 362626 - RNA, 18 nt, Human
ggacuaugccagagaaaa

SEQ ID NO: 362627 - RNA, 21 nt, Human
ggauucuguguaugugugugu

SEQ ID NO: 362628 - RNA, 23 nt, Human
gggacuaugccagagaaaaucag

SEQ ID NO: 362629 - RNA, 24 nt, Human
gguaaagcccuuuuagcagcucua

SEQ ID NO: 362630 - RNA, 24 nt, Human
uaaauggaaaaaaaacaaaacaaa

SEQ ID NO: 362631 - RNA, 21 nt, Human
uagaagacacuuuucacugag

SEQ ID NO: 362632 - RNA, 22 nt, Human
ucacucugucuucccauaaaag

SEQ ID NO: 362633 - RNA, 23 nt, Human
ucacuuuauuaaaaaaaaaaaau

SEQ ID NO: 362634 - RNA, 18 nt, Human
ucagaaaagguaggaaca

SEQ ID NO: 362635 - RNA, 19 nt, Human
ucuaagagguucagaaaag

SEQ ID NO: 362636 - RNA, 23 nt, Human
ucuacaaucaggagggauuucaa

SEQ ID NO: 362637 - RNA, 19 nt, Human
ucugaacguggaugugcug

SEQ ID NO: 362638 - RNA, 25 nt, Human
ucuucuacuuuuauuucuaagaguc

SEQ ID NO: 362639 - RNA, 18 nt, Human
ucuuucccugcgggcucu

SEQ ID NO: 362640 - RNA, 22 nt, Human
ucuuucuucuacuuuuauuucu

SEQ ID NO: 362641 - RNA, 19 nt, Human
ugaaagauaaugaaaauag

SEQ ID NO: 362642 - RNA, 21 nt, Human
ugaaagauaaugaaaauagaa

SEQ ID NO: 362643 - RNA, 23 nt, Human
ugaacaaugucacauuacacccc

SEQ ID NO: 362644 - RNA, 21 nt, Human
ugagaacauuuucucaacucg

SEQ ID NO: 362645 - RNA, 19 nt, Human
ugaggcaucaugaauucaa

SEQ ID NO: 362646 - RNA, 23 nt, Human
uggaaaaaaaacaaaacaaaacu

SEQ ID NO: 362647 - RNA, 21 nt, Human
uggaagaggggagggagucug

SEQ ID NO: 362648 - RNA, 23 nt, Human
uggagcccauguuggugugaggc

SEQ ID NO: 362649 - RNA, 23 nt, Human
uggcagcaagacaaugcugagaa

SEQ ID NO: 362650 - RNA, 21 nt, Human
ugggaggggaggaaagaagau

SEQ ID NO: 362651 - RNA, 25 nt, Human
ugggaggggaggaaagaagauuccc

SEQ ID NO: 362652 - RNA, 18 nt, Human
uguguaugugugugugug

SEQ ID NO: 362653 - RNA, 24 nt, Human
uuggugugaggcacucagugaggu

SEQ ID NO: 362654 - RNA, 21 nt, Human
acuuugaugauuuuugaggau

SEQ ID NO: 362655 - RNA, 19 nt, Human
cuuugaugauuuuugagga

SEQ ID NO: 362656 - RNA, 18 nt, Human
gcucggggucgcuugcga

SEQ ID NO: 362657 - RNA, 21 nt, Human
aagagagaaagggauauggaa

SEQ ID NO: 362658 - RNA, 24 nt, Human
agccccgccgcugcgcuccccucc

SEQ ID NO: 362659 - RNA, 24 nt, Human
aggcgagggcagcgggacuucggg

SEQ ID NO: 362660 - RNA, 24 nt, Human
cagagcagcccccgccgcgcuaaa

SEQ ID NO: 362661 - RNA, 21 nt, Human
cagcgucccgggaaaggaaag

SEQ ID NO: 362662 - RNA, 21 nt, Human
caggcucuacacaggggagcc

SEQ ID NO: 362663 - RNA, 19 nt, Human
ccaagccccauuggacaag

SEQ ID NO: 362664 - RNA, 22 nt, Human
ccaaguuuggcacugggagcaa

SEQ ID NO: 362665 - RNA, 23 nt, Human
ccccaccccgaugcucuuccgaa

SEQ ID NO: 362666 - RNA, 20 nt, Human
cccccaccccgaugcucuuc

SEQ ID NO: 362667 - RNA, 18 nt, Human
ccccugugccucaggugg

SEQ ID NO: 362668 - RNA, 22 nt, Human
cccgcagugcagaggcgagggc

SEQ ID NO: 362669 - RNA, 20 nt, Human
cccgccgcgcuaagaggccg

SEQ ID NO: 362670 - RNA, 21 nt, Human
ccgcccgcccgcuugcccgcc

SEQ ID NO: 362671 - RNA, 22 nt, Human
ccgccgcgcuaagaggccgccc

SEQ ID NO: 362672 - RNA, 21 nt, Human
ccgcggagcucauggcccagc

SEQ ID NO: 362673 - RNA, 21 nt, Human
ccgcggcugcugggcucaggg

SEQ ID NO: 362674 - RNA, 20 nt, Human
ccgcugcgcuccccuccccu

SEQ ID NO: 362675 - RNA, 24 nt, Human
cgaagacgccuccgccagggccga

SEQ ID NO: 362676 - RNA, 20 nt, Human
cgagggacaugcuguugccg

SEQ ID NO: 362677 - RNA, 23 nt, Human
cgcacuucgcccggggcgcgccc

SEQ ID NO: 362678 - RNA, 18 nt, Human
cgcgcccagagcagcccc

SEQ ID NO: 362679 - RNA, 25 nt, Human
cgucccgcagugcagaggcgagggc

SEQ ID NO: 362680 - RNA, 19 nt, Human
cugcugggcucaggggcgg

SEQ ID NO: 362681 - RNA, 20 nt, Human
cugcugggcucaggggcggc

SEQ ID NO: 362682 - RNA, 18 nt, Human
gcuugcccgcccguuagc

SEQ ID NO: 362683 - RNA, 20 nt, Human
ggaaaggacuccguccggcg

SEQ ID NO: 362684 - RNA, 23 nt, Human
ggcacugggagcaauggaaggaa

SEQ ID NO: 362685 - RNA, 19 nt, Human
ggcgcacuucgcccggggc

SEQ ID NO: 362686 - RNA, 18 nt, Human
ggcggaggcgccgcggug

SEQ ID NO: 362687 - RNA, 21 nt, Human
ggcuucgcuggccucggugcu

SEQ ID NO: 362688 - RNA, 18 nt, Human
gggccggggccggagacu

SEQ ID NO: 362689 - RNA, 19 nt, Human
ggggagccgcaggugggga

SEQ ID NO: 362690 - RNA, 23 nt, Human
gguugggugggcuggaggaggag

SEQ ID NO: 362691 - RNA, 22 nt, Human
gucccgggaaaggaaaggacuc

SEQ ID NO: 362692 - RNA, 19 nt, Human
ucaggguccucuucaccuc

SEQ ID NO: 362693 - RNA, 18 nt, Human
ucgcuggccucggugcuc

SEQ ID NO: 362694 - RNA, 18 nt, Human
ucuuagccgaucccggga

SEQ ID NO: 362695 - RNA, 21 nt, Human
uggaacgggucacagggaggg

SEQ ID NO: 362696 - RNA, 21 nt, Human
uggaggaggugggcccugagc

SEQ ID NO: 362697 - RNA, 19 nt, Human
uggcugggguacucgcugg

SEQ ID NO: 362698 - RNA, 22 nt, Human
uggcugggguacucgcuggagg

SEQ ID NO: 362699 - RNA, 22 nt, Human
ugggcagaagucaagguugagg

SEQ ID NO: 362700 - RNA, 18 nt, Human
ugggcuugcagagcagcc

SEQ ID NO: 362701 - RNA, 19 nt, Human
ugggugggcuggaggagga

SEQ ID NO: 362702 - RNA, 21 nt, Human
uucggggaggcuguccuggcc

SEQ ID NO: 362703 - RNA, 18 nt, Human
uugggcagaagucaaggu

SEQ ID NO: 362704 - RNA, 26 nt, Human
aaaaaaaaaaagcaucuuucaaaaaa

SEQ ID NO: 362705 - RNA, 22 nt, Human
aaaaaaaaagcaucuuucaaaa

SEQ ID NO: 362706 - RNA, 23 nt, Human
aaaagcaucuuucaaaaaagcaa

SEQ ID NO: 362707 - RNA, 21 nt, Human
aaaccucggcccgcgccccgc

SEQ ID NO: 362708 - RNA, 24 nt, Human
aaggcagcccccccaaggcugccc

SEQ ID NO: 362709 - RNA, 24 nt, Human
acaaaggcagcccccccaaggcug

SEQ ID NO: 362710 - RNA, 19 nt, Human
acacuucagaaggacagac

SEQ ID NO: 362711 - RNA, 21 nt, Human
acagacaggaccauggagggc

SEQ ID NO: 362712 - RNA, 22 nt, Human
accagcaaugucacagcucagc

SEQ ID NO: 362713 - RNA, 22 nt, Human
acccaccggcuggcccgucccg

SEQ ID NO: 362714 - RNA, 19 nt, Human
accccgcagcccccgacac

SEQ ID NO: 362715 - RNA, 22 nt, Human
acguacuuccccagcgcccacc

SEQ ID NO: 362716 - RNA, 20 nt, Human
acgugccugggcgcgcucac

SEQ ID NO: 362717 - RNA, 18 nt, Human
acugugccuucccucugg

SEQ ID NO: 362718 - RNA, 25 nt, Human
agaaggacagacaggaccauggagg

SEQ ID NO: 362719 - RNA, 20 nt, Human
agacagagaagccacaugca

SEQ ID NO: 362720 - RNA, 19 nt, Human
agacaggaccauggagggc

SEQ ID NO: 362721 - RNA, 18 nt, Human
agcccccgacacugcgac

SEQ ID NO: 362722 - RNA, 24 nt, Human
agcccuggggggcagaaaggauuu

SEQ ID NO: 362723 - RNA, 21 nt, Human
agcgcccaccacaaaggcagc

SEQ ID NO: 362724 - RNA, 21 nt, Human
aggcaggcagacuccccagga

SEQ ID NO: 362725 - RNA, 21 nt, Human
aggcaggggucguggggaugc

SEQ ID NO: 362726 - RNA, 19 nt, Human
agggccccgagacaccccg

SEQ ID NO: 362727 - RNA, 21 nt, Human
agggggaauccuagggggccu

SEQ ID NO: 362728 - RNA, 20 nt, Human
agugugggagcagcugagga

SEQ ID NO: 362729 - RNA, 22 nt, Human
augcaguucuucauucuacguc

SEQ ID NO: 362730 - RNA, 19 nt, Human
caaaggcagcccccccaag

SEQ ID NO: 362731 - RNA, 20 nt, Human
caagagcaccaaggaugacc

SEQ ID NO: 362732 - RNA, 28 nt, Human
caagagcaccaaggaugacuggagaccc

SEQ ID NO: 362733 - RNA, 26 nt, Human
caagccccccaaggggcaugagccag

SEQ ID NO: 362734 - RNA, 25 nt, Human
caagccuggcacauaccaaggccag

SEQ ID NO: 362735 - RNA, 18 nt, Human
caaggggcaugagccagu

SEQ ID NO: 362736 - RNA, 18 nt, Human
caccaaggaugaccagca

SEQ ID NO: 362737 - RNA, 23 nt, Human
caccaaggaugaccagcaauguc

SEQ ID NO: 362738 - RNA, 22 nt, Human
caccacccaccucuuccagcaa

SEQ ID NO: 362739 - RNA, 21 nt, Human
caccccgcagcccccgacacu

SEQ ID NO: 362740 - RNA, 19 nt, Human
cacgcguggcuggcagggu

SEQ ID NO: 362741 - RNA, 21 nt, Human
cacuucagaaggacagacagg

SEQ ID NO: 362742 - RNA, 27 nt, Human
cagcgcccaccacaaaggcagcccccc

SEQ ID NO: 362743 - RNA, 19 nt, Human
cagcugcuccaaggggaag

SEQ ID NO: 362744 - RNA, 24 nt, Human
caucacaucagauggucccgcacc

SEQ ID NO: 362745 - RNA, 22 nt, Human
cauggagggcugcccuuagggu

SEQ ID NO: 362746 - RNA, 19 nt, Human
ccacaaaggcagccccccc

SEQ ID NO: 362747 - RNA, 22 nt, Human
ccacagagacagagaagccaca

SEQ ID NO: 362748 - RNA, 21 nt, Human
ccacccaccucuuccagcaac

SEQ ID NO: 362749 - RNA, 24 nt, Human
ccagcggcuguccaggcucucucu

SEQ ID NO: 362750 - RNA, 18 nt, Human
ccagcuuaguuggccugu

SEQ ID NO: 362751 - RNA, 21 nt, Human
cccagcccaggcaagccuggc

SEQ ID NO: 362752 - RNA, 21 nt, Human
cccauugcuaaggcaggcggc

SEQ ID NO: 362753 - RNA, 24 nt, Human
ccccaaggcugcccagcccaggca

SEQ ID NO: 362754 - RNA, 21 nt, Human
ccccagggccccgagacaccc

SEQ ID NO: 362755 - RNA, 22 nt, Human
cccccaaggcugcccagcccag

SEQ ID NO: 362756 - RNA, 21 nt, Human
ccccccaaggcugcccagccc

SEQ ID NO: 362757 - RNA, 20 nt, Human
cccgcagcccccgacacugc

SEQ ID NO: 362758 - RNA, 23 nt, Human
cccgcagcccccgacacugcgac

SEQ ID NO: 362759 - RNA, 18 nt, Human
cccgucccgaagcaacac

SEQ ID NO: 362760 - RNA, 24 nt, Human
cccuagggggauggcuuuccugcu

SEQ ID NO: 362761 - RNA, 19 nt, Human
cccucuggaugcauucugg

SEQ ID NO: 362762 - RNA, 29 nt, Human
ccgccugcaaaguuaccacaggggcuggg

SEQ ID NO: 362763 - RNA, 21 nt, Human
ccgcugggacguacuucccca

SEQ ID NO: 362764 - RNA, 19 nt, Human
ccugagcugguauccaaga

SEQ ID NO: 362765 - RNA, 19 nt, Human
ccugcaaaccucggcccgc

SEQ ID NO: 362766 - RNA, 20 nt, Human
ccugugggcaaggcacuagc

SEQ ID NO: 362767 - RNA, 22 nt, Human
ccuguguccugaggccaggcag

SEQ ID NO: 362768 - RNA, 19 nt, Human
cgagacaccccgcagcccc

SEQ ID NO: 362769 - RNA, 22 nt, Human
cuacaaagcuucuggcacagga

SEQ ID NO: 362770 - RNA, 22 nt, Human
cuccccaggacaggaguuuccg

SEQ ID NO: 362771 - RNA, 21 nt, Human
gaaaggcuccagcggcugucc

SEQ ID NO: 362772 - RNA, 18 nt, Human
gaaccagcuccgaggacc

SEQ ID NO: 362773 - RNA, 18 nt, Human
gacaggaguuuccgaugg

SEQ ID NO: 362774 - RNA, 25 nt, Human
gagacaccccgcagcccccgacacu

SEQ ID NO: 362775 - RNA, 21 nt, Human
gcagcccccccaaggcugccc

SEQ ID NO: 362776 - RNA, 21 nt, Human
gccaguguccccugagcuggu

SEQ ID NO: 362777 - RNA, 24 nt, Human
gcccugcaaaccucggcccgcgcc

SEQ ID NO: 362778 - RNA, 22 nt, Human
gcccuggggggcagaaaggauu

SEQ ID NO: 362779 - RNA, 19 nt, Human
gcggggcggcugcccuggg

SEQ ID NO: 362780 - RNA, 19 nt, Human
ggagaugugccaggggccc

SEQ ID NO: 362781 - RNA, 19 nt, Human
ggcacauaccaaggccagc

SEQ ID NO: 362782 - RNA, 20 nt, Human
gggcacagugcagggacagc

SEQ ID NO: 362783 - RNA, 18 nt, Human
gggcaugagccagugagg

SEQ ID NO: 362784 - RNA, 24 nt, Human
gggccagcuuaguuggccuguguc

SEQ ID NO: 362785 - RNA, 18 nt, Human
gggcggcugcccuggggc

SEQ ID NO: 362786 - RNA, 23 nt, Human
gucaguuaaaaaaaaaaaaagca

SEQ ID NO: 362787 - RNA, 24 nt, Human
guggacgcagaagcccaccaccca

SEQ ID NO: 362788 - RNA, 20 nt, Human
uaagcggaggcccccauugc

SEQ ID NO: 362789 - RNA, 22 nt, Human
uagcgcuccuuagacccugagg

SEQ ID NO: 362790 - RNA, 23 nt, Human
ucaaaaaagcaagagcaccaagg

SEQ ID NO: 362791 - RNA, 24 nt, Human
ucaagccccccaaggggcaugagc

SEQ ID NO: 362792 - RNA, 23 nt, Human
ucagauggucccgcaccuguggg

SEQ ID NO: 362793 - RNA, 19 nt, Human
ucaggccacgugcagcucc

SEQ ID NO: 362794 - RNA, 20 nt, Human
ucaguuaaaaaaaaaaaaag

SEQ ID NO: 362795 - RNA, 19 nt, Human
uccacagagacagagaagc

SEQ ID NO: 362796 - RNA, 22 nt, Human
uccccagcgcccaccacaaagg

SEQ ID NO: 362797 - RNA, 19 nt, Human
uccccuccgggcuggcaca

SEQ ID NO: 362798 - RNA, 18 nt, Human
ucccgaagcaacacgugc

SEQ ID NO: 362799 - RNA, 21 nt, Human
ucccgaagcaacacgugccug

SEQ ID NO: 362800 - RNA, 20 nt, Human
ucccggcucccacccugccc

SEQ ID NO: 362801 - RNA, 19 nt, Human
ucccucuggaugcauucug

SEQ ID NO: 362802 - RNA, 25 nt, Human
uccgcacccacagcugcuccaaggg

SEQ ID NO: 362803 - RNA, 23 nt, Human
uccgcggugaccgggaccggggc

SEQ ID NO: 362804 - RNA, 19 nt, Human
uccgcuggauccgcaccca

SEQ ID NO: 362805 - RNA, 22 nt, Human
ucgccagcacgcuguggccacc

SEQ ID NO: 362806 - RNA, 23 nt, Human
ucuggcacaggagacaauggucu

SEQ ID NO: 362807 - RNA, 25 nt, Human
ucuggcacaggagacaauggucugg

SEQ ID NO: 362808 - RNA, 19 nt, Human
ugcccuggggcucccggac

SEQ ID NO: 362809 - RNA, 22 nt, Human
ugccgccaaccugagauggcuu

SEQ ID NO: 362810 - RNA, 19 nt, Human
ugccugggcgcgcucacag

SEQ ID NO: 362811 - RNA, 18 nt, Human
ugcuaaggcaggcggccc

SEQ ID NO: 362812 - RNA, 23 nt, Human
uggacgcagaagcccaccaccca

SEQ ID NO: 362813 - RNA, 19 nt, Human
uggaugcauucuggauuuc

SEQ ID NO: 362814 - RNA, 24 nt, Human
uggcaggguucacccaccggcugg

SEQ ID NO: 362815 - RNA, 18 nt, Human
uggccuguguccugaggc

SEQ ID NO: 362816 - RNA, 21 nt, Human
ugggagcagcugaggacccgc

SEQ ID NO: 362817 - RNA, 19 nt, Human
uggggaugcacugagggcc

SEQ ID NO: 362818 - RNA, 20 nt, Human
uguccccugagcugguaucc

SEQ ID NO: 362819 - RNA, 22 nt, Human
ugucucaagccccccaaggggc

SEQ ID NO: 362820 - RNA, 19 nt, Human
uuagacccugaggccgcug

SEQ ID NO: 362821 - RNA, 19 nt, Human
aaaaaaagaaaaacagaca

SEQ ID NO: 362822 - RNA, 22 nt, Human
aaaaaaagaaaaacagacagaa

SEQ ID NO: 362823 - RNA, 21 nt, Human
aaaaaagaaaaacagacagaa

SEQ ID NO: 362824 - RNA, 20 nt, Human
aaaaaaucaaacacauccag

SEQ ID NO: 362825 - RNA, 21 nt, Human
aaaaagggggaaaacaucuga

SEQ ID NO: 362826 - RNA, 18 nt, Human
aaaacaaagcaaaaaaag

SEQ ID NO: 362827 - RNA, 18 nt, Human
aaacaaaacaaagcaaaa

SEQ ID NO: 362828 - RNA, 19 nt, Human
aaacaaaacaaagcaaaaa

SEQ ID NO: 362829 - RNA, 19 nt, Human
aaauauggccacauaccaa

SEQ ID NO: 362830 - RNA, 25 nt, Human
aacaaagcaaaaaaagaaaaacaga

SEQ ID NO: 362831 - RNA, 24 nt, Human
aacggggugccaaaaaaaaggggg

SEQ ID NO: 362832 - RNA, 18 nt, Human
aacuauguagaaagacca

SEQ ID NO: 362833 - RNA, 22 nt, Human
aacuuuacuucuggcuccucug

SEQ ID NO: 362834 - RNA, 26 nt, Human
aagcaaaaaaagaaaaacagacagaa

SEQ ID NO: 362835 - RNA, 23 nt, Human
aaguggcugcugugaagucaaga

SEQ ID NO: 362836 - RNA, 23 nt, Human
acaaagcaaaaaaagaaaaacag

SEQ ID NO: 362837 - RNA, 24 nt, Human
acaaauacaaauggccuaguuaca

SEQ ID NO: 362838 - RNA, 25 nt, Human
acauuuuguggccucuguggagccc

SEQ ID NO: 362839 - RNA, 20 nt, Human
accagaacaaauauugccag

SEQ ID NO: 362840 - RNA, 22 nt, Human
accaugugcugcuuugauugcu

SEQ ID NO: 362841 - RNA, 18 nt, Human
acugcacugcagccuggg

SEQ ID NO: 362842 - RNA, 24 nt, Human
acugcacugcagccugggcaacag

SEQ ID NO: 362843 - RNA, 22 nt, Human
agaaaaacagacagaauguaaa

SEQ ID NO: 362844 - RNA, 21 nt, Human
agacagaauguaaaaugaagg

SEQ ID NO: 362845 - RNA, 22 nt, Human
agcaauggaauaauuaaaaaga

SEQ ID NO: 362846 - RNA, 21 nt, Human
agcagccccuugguagacuga

SEQ ID NO: 362847 - RNA, 19 nt, Human
aggcaguugcugugcagag

SEQ ID NO: 362848 - RNA, 23 nt, Human
aggcaguugcugugcagaguucu

SEQ ID NO: 362849 - RNA, 24 nt, Human
aggcucaguuuaugaaaaaggccu

SEQ ID NO: 362850 - RNA, 23 nt, Human
agggggaagagucaaagguaaaa

SEQ ID NO: 362851 - RNA, 18 nt, Human
aguaacacagaaauaaga

SEQ ID NO: 362852 - RNA, 19 nt, Human
auaaauauggccacauacc

SEQ ID NO: 362853 - RNA, 23 nt, Human
auccaggcaguugcugugcagag

SEQ ID NO: 362854 - RNA, 24 nt, Human
caaacaaaacaaagcaaaaaaaga

SEQ ID NO: 362855 - RNA, 24 nt, Human
caacagugcaagacugucucaaaa

SEQ ID NO: 362856 - RNA, 22 nt, Human
caagauaaggcaacaaagucag

SEQ ID NO: 362857 - RNA, 21 nt, Human
cacaaacaaaacaaagcaaaa

SEQ ID NO: 362858 - RNA, 25 nt, Human
caccuuaaaauacagaacacuaaac

SEQ ID NO: 362859 - RNA, 20 nt, Human
cacugcacugcagccugggc

SEQ ID NO: 362860 - RNA, 23 nt, Human
cacugcacugcagccugggcaac

SEQ ID NO: 362861 - RNA, 24 nt, Human
cacugcacugcagccugggcaaca

SEQ ID NO: 362862 - RNA, 20 nt, Human
cacuuguaaccgcgagugac

SEQ ID NO: 362863 - RNA, 20 nt, Human
cagaacccccagcuuuaccc

SEQ ID NO: 362864 - RNA, 24 nt, Human
cauaugugaccuauaaaacaccaa

SEQ ID NO: 362865 - RNA, 22 nt, Human
caucuauccuaguuccuguccc

SEQ ID NO: 362866 - RNA, 24 nt, Human
cauuugcuucuaggauuccugcuu

SEQ ID NO: 362867 - RNA, 21 nt, Human
ccaaaaaaaagggggaaaaca

SEQ ID NO: 362868 - RNA, 20 nt, Human
ccacugcacugcagccuggg

SEQ ID NO: 362869 - RNA, 20 nt, Human
ccacugcacugcagccuggg

SEQ ID NO: 362870 - RNA, 21 nt, Human
ccacugcacugcagccugggc

SEQ ID NO: 362871 - RNA, 24 nt, Human
ccacugcacugcagccugggcaac

SEQ ID NO: 362872 - RNA, 20 nt, Human
ccccuuccuucuccuccucc

SEQ ID NO: 362873 - RNA, 22 nt, Human
cccggccccuuccuucuccucc

SEQ ID NO: 362874 - RNA, 22 nt, Human
cccuggucccaccaggccaagc

SEQ ID NO: 362875 - RNA, 21 nt, Human
ccuacugaaauagaagauaaa

SEQ ID NO: 362876 - RNA, 19 nt, Human
ccuccggcuacagaacccc

SEQ ID NO: 362877 - RNA, 26 nt, Human
ccucuagggucgcugccugaucgccc

SEQ ID NO: 362878 - RNA, 18 nt, Human
ccucugaauaguaucaug

SEQ ID NO: 362879 - RNA, 27 nt, Human
cgcuuuaaaaaaucaaacacauccagg

SEQ ID NO: 362880 - RNA, 19 nt, Human
cuccggcuacagaaccccc

SEQ ID NO: 362881 - RNA, 23 nt, Human
cugcauacaguacaacuugcaca

SEQ ID NO: 362882 - RNA, 18 nt, Human
gaacccccagcuuuaccc

SEQ ID NO: 362883 - RNA, 22 nt, Human
gccacauaccaagaugugaaca

SEQ ID NO: 362884 - RNA, 24 nt, Human
gccacugcacugcagccugggcaa

SEQ ID NO: 362885 - RNA, 26 nt, Human
gccuccggcuacagaacccccagcuu

SEQ ID NO: 362886 - RNA, 22 nt, Human
gcuaugaaguuucagaacaagg

SEQ ID NO: 362887 - RNA, 22 nt, Human
ggcaagaagauuccucccuggg

SEQ ID NO: 362888 - RNA, 23 nt, Human
gucaagaaaugcacauucauaaa

SEQ ID NO: 362889 - RNA, 23 nt, Human
gugcaacggggugccaaaaaaaa

SEQ ID NO: 362890 - RNA, 18 nt, Human
guuucugggauauaaugg

SEQ ID NO: 362891 - RNA, 25 nt, Human
uaaaaagagauaagagcagugccaa

SEQ ID NO: 362892 - RNA, 20 nt, Human
uaaaaucccucaaacagcac

SEQ ID NO: 362893 - RNA, 25 nt, Human
uaaaaucccucaaacagcacuuuuc

SEQ ID NO: 362894 - RNA, 19 nt, Human
uaagaagaagcccuucagc

SEQ ID NO: 362895 - RNA, 21 nt, Human
uaaggaagaaugcuuuaaaaa

SEQ ID NO: 362896 - RNA, 23 nt, Human
uacaacaccaugugcugcuuuga

SEQ ID NO: 362897 - RNA, 18 nt, Human
uacaacuugcacauugag

SEQ ID NO: 362898 - RNA, 22 nt, Human
uacacaauucccaaauuagcac

SEQ ID NO: 362899 - RNA, 23 nt, Human
uacagaacacuaaaccagaacaa

SEQ ID NO: 362900 - RNA, 24 nt, Human
uacagaacacuaaaccagaacaaa

SEQ ID NO: 362901 - RNA, 22 nt, Human
uacagaacccccagcuuuaccc

SEQ ID NO: 362902 - RNA, 25 nt, Human
uacagaacccccagcuuuacccuac

SEQ ID NO: 362903 - RNA, 21 nt, Human
uagauacagacauaugugacc

SEQ ID NO: 362904 - RNA, 19 nt, Human
uagcacaaacaaaacaaag

SEQ ID NO: 362905 - RNA, 22 nt, Human
uagcagccccuugguagacuga

SEQ ID NO: 362906 - RNA, 18 nt, Human
ucacaaagcaauggaaua

SEQ ID NO: 362907 - RNA, 19 nt, Human
uccauccaucaugacuugc

SEQ ID NO: 362908 - RNA, 21 nt, Human
uccgccaacuggagugagggu

SEQ ID NO: 362909 - RNA, 24 nt, Human
ucgcccaguuuaagggagacccgu

SEQ ID NO: 362910 - RNA, 22 nt, Human
ucgccgccgccuccggcuacag

SEQ ID NO: 362911 - RNA, 18 nt, Human
ucuaaagcuccuacugaa

SEQ ID NO: 362912 - RNA, 19 nt, Human
ucuguggagcccugguccc

SEQ ID NO: 362913 - RNA, 24 nt, Human
ugaaaagaggcucaguuuaugaaa

SEQ ID NO: 362914 - RNA, 24 nt, Human
ugaaauagaagauaaauuuaaaac

SEQ ID NO: 362915 - RNA, 24 nt, Human
ugacuugcaacauuuuguggccuc

SEQ ID NO: 362916 - RNA, 28 nt, Human
ugacuugcaacauuuuguggccucugug

SEQ ID NO: 362917 - RNA, 18 nt, Human
ugaguaacacagaaauaa

SEQ ID NO: 362918 - RNA, 24 nt, Human
ugcaaaaacguacuucuaaacaaa

SEQ ID NO: 362919 - RNA, 22 nt, Human
ugcaacauuuuguggccucugu

SEQ ID NO: 362920 - RNA, 22 nt, Human
ugcauacaguacaacuugcaca

SEQ ID NO: 362921 - RNA, 18 nt, Human
ugcaugaaaaauuuccag

SEQ ID NO: 362922 - RNA, 18 nt, Human
uggagcccuggucccacc

SEQ ID NO: 362923 - RNA, 23 nt, Human
uggagcccuggucccaccaggcc

SEQ ID NO: 362924 - RNA, 21 nt, Human
uggcugcugugaagucaagaa

SEQ ID NO: 362925 - RNA, 20 nt, Human
uguagaaagaccaauguaca

SEQ ID NO: 362926 - RNA, 21 nt, Human
ugugucauucuaaaaaaguua

SEQ ID NO: 362927 - RNA, 22 nt, Human
uucccaaauuagcacaaacaaa

SEQ ID NO: 362928 - RNA, 25 nt, Human
uuguggccucuguggagcccugguc

SEQ ID NO: 362929 - RNA, 22 nt, Human
uuugaaaugguauauuaaaaaa

SEQ ID NO: 362930 - RNA, 23 nt, Human
aagaauccuucucccuuucuucc

SEQ ID NO: 362931 - RNA, 21 nt, Human
aaucccaaaacccagagcgca

SEQ ID NO: 362932 - RNA, 21 nt, Human
aaugacaagcagaggauguaa

SEQ ID NO: 362933 - RNA, 20 nt, Human
acacccaaaucccaaaaccc

SEQ ID NO: 362934 - RNA, 20 nt, Human
acauuuuggcacauuaacug

SEQ ID NO: 362935 - RNA, 18 nt, Human
accauaauacaucucugc

SEQ ID NO: 362936 - RNA, 25 nt, Human
acccaaaucccaaaacccagagcgc

SEQ ID NO: 362937 - RNA, 21 nt, Human
accccacacccaaaucccaaa

SEQ ID NO: 362938 - RNA, 23 nt, Human
acccuaugcccaucuuaaaacug

SEQ ID NO: 362939 - RNA, 23 nt, Human
agaacuuuccuuuaaauugauuu

SEQ ID NO: 362940 - RNA, 23 nt, Human
agaggugagagccggccgcugca

SEQ ID NO: 362941 - RNA, 21 nt, Human
agcacuuaucuacucuucugc

SEQ ID NO: 362942 - RNA, 19 nt, Human
auaaauauauacauauaua

SEQ ID NO: 362943 - RNA, 21 nt, Human
auagaauuucuaaaacccaga

SEQ ID NO: 362944 - RNA, 21 nt, Human
auauauacauauauauauaua

SEQ ID NO: 362945 - RNA, 21 nt, Human
auauauacauauauauauaua

SEQ ID NO: 362946 - RNA, 23 nt, Human
caaaucccaaaacccagagcgca

SEQ ID NO: 362947 - RNA, 25 nt, Human
caccaccgccguugccgccgccacc

SEQ ID NO: 362948 - RNA, 21 nt, Human
cacccaaaucccaaaacccag

SEQ ID NO: 362949 - RNA, 22 nt, Human
cacccaaaucccaaaacccaga

SEQ ID NO: 362950 - RNA, 18 nt, Human
cagaauacugcagaaaca

SEQ ID NO: 362951 - RNA, 21 nt, Human
cagaaugacaagcagaggaug

SEQ ID NO: 362952 - RNA, 18 nt, Human
cagcucaaaucuggaagu

SEQ ID NO: 362953 - RNA, 25 nt, Human
cauagaauggaacuauuucccccga

SEQ ID NO: 362954 - RNA, 24 nt, Human
caucucugcuuuagagcugauaua

SEQ ID NO: 362955 - RNA, 25 nt, Human
ccaaaucccaaaacccagagcgcaa

SEQ ID NO: 362956 - RNA, 19 nt, Human
ccaccgccguugccgccgc

SEQ ID NO: 362957 - RNA, 18 nt, Human
cccaaaacccagagcgca

SEQ ID NO: 362958 - RNA, 21 nt, Human
cccacacccaaaucccaaaac

SEQ ID NO: 362959 - RNA, 22 nt, Human
cccacacccaaaucccaaaacc

SEQ ID NO: 362960 - RNA, 28 nt, Human
cccacacccaaaucccaaaacccagagc

SEQ ID NO: 362961 - RNA, 24 nt, Human
cccagagcgcaaaggcugugaauc

SEQ ID NO: 362962 - RNA, 26 nt, Human
cccagagcgcaaaggcugugaaucca

SEQ ID NO: 362963 - RNA, 18 nt, Human
cccagguuaggggaagcc

SEQ ID NO: 362964 - RNA, 25 nt, Human
cccccgaaccagugauaccagcuuu

SEQ ID NO: 362965 - RNA, 20 nt, Human
ccgccguugccgccgccacc

SEQ ID NO: 362966 - RNA, 24 nt, Human
ccuuaagcaguguuugagaugacu

SEQ ID NO: 362967 - RNA, 23 nt, Human
ccuucaacuuaccccacacccaa

SEQ ID NO: 362968 - RNA, 21 nt, Human
cuuccaaacccuaugcccauc

SEQ ID NO: 362969 - RNA, 22 nt, Human
cuuggaagaauaaagccuucca

SEQ ID NO: 362970 - RNA, 24 nt, Human
gaaccagugauaccagcuuauguc

SEQ ID NO: 362971 - RNA, 18 nt, Human
gaagaauaaagccuucca

SEQ ID NO: 362972 - RNA, 24 nt, Human
gagaacucuuuauuucacauugac

SEQ ID NO: 362973 - RNA, 24 nt, Human
gagaggugagagccggccgcugca

SEQ ID NO: 362974 - RNA, 23 nt, Human
gauuucccuucaacuuaccccac

SEQ ID NO: 362975 - RNA, 18 nt, Human
gccgugcgcgcgugggcu

SEQ ID NO: 362976 - RNA, 18 nt, Human
gcgcugggcucggccgug

SEQ ID NO: 362977 - RNA, 21 nt, Human
gcuacagaauacugcagaaac

SEQ ID NO: 362978 - RNA, 22 nt, Human
gcuccuuagaaaggaguucuga

SEQ ID NO: 362979 - RNA, 23 nt, Human
gggcugggcgacccggggacugc

SEQ ID NO: 362980 - RNA, 19 nt, Human
guacauugaaaaaagaauc

SEQ ID NO: 362981 - RNA, 19 nt, Human
gucaucugcagccaggggc

SEQ ID NO: 362982 - RNA, 22 nt, Human
guuuacauaacaauucaguauc

SEQ ID NO: 362983 - RNA, 22 nt, Human
uaaauuagcagaaugacaagca

SEQ ID NO: 362984 - RNA, 24 nt, Human
uaagccccaaagcagaccuggguu

SEQ ID NO: 362985 - RNA, 20 nt, Human
uaaguuggcuacagaauacu

SEQ ID NO: 362986 - RNA, 20 nt, Human
uacugcagaaacaugacuau

SEQ ID NO: 362987 - RNA, 21 nt, Human
uagaauuucuaaaacccagau

SEQ ID NO: 362988 - RNA, 18 nt, Human
uagauuucagauguaggu

SEQ ID NO: 362989 - RNA, 19 nt, Human
uauacauauauauauauau

SEQ ID NO: 362990 - RNA, 20 nt, Human
uauauacauauauauauaua

SEQ ID NO: 362991 - RNA, 20 nt, Human
uauauacauauauauauaua

SEQ ID NO: 362992 - RNA, 23 nt, Human
uauauacauauauauauauauau

SEQ ID NO: 362993 - RNA, 24 nt, Human
uauauacauauauauauauauaua

SEQ ID NO: 362994 - RNA, 23 nt, Human
uauggauucccuccaggcagcuc

SEQ ID NO: 362995 - RNA, 19 nt, Human
ucaaauguacacuuggcca

SEQ ID NO: 362996 - RNA, 32 nt, Human
ucgccgccgucaccaccgccguugccgccggc

SEQ ID NO: 362997 - RNA, 23 nt, Human
ucuaaaacccagauaauagaacu

SEQ ID NO: 362998 - RNA, 19 nt, Human
ucuaugcugaacacugggu

SEQ ID NO: 362999 - RNA, 25 nt, Human
ugaaaaaagaauccuucucccuuuc

SEQ ID NO: 363000 - RNA, 25 nt, Human
uggaaucgugguuauuauucaagua

SEQ ID NO: 363001 - RNA, 21 nt, Human
uggaggaggagacaagaguca

SEQ ID NO: 363002 - RNA, 23 nt, Human
ugggauuuacucugcaacaaccc

SEQ ID NO: 363003 - RNA, 21 nt, Human
ugggcgacccggggacugcug

SEQ ID NO: 363004 - RNA, 22 nt, Human
uuaggggaagcucuuuuucugc

SEQ ID NO: 363005 - RNA, 21 nt, Human
aagccucggcuaacagauuaa

SEQ ID NO: 363006 - RNA, 18 nt, Human
acaagagcuccucuaagc

SEQ ID NO: 363007 - RNA, 18 nt, Human
acacagcaccgugccugu

SEQ ID NO: 363008 - RNA, 22 nt, Human
agcggacgccggggugagcgcg

SEQ ID NO: 363009 - RNA, 20 nt, Human
agcgugcgugcgcgugugcg

SEQ ID NO: 363010 - RNA, 20 nt, Human
aggcgguggaggccgcugcg

SEQ ID NO: 363011 - RNA, 22 nt, Human
aggcgguggaggccgcugcgcu

SEQ ID NO: 363012 - RNA, 23 nt, Human
cagccgcugccaccugugcuuug

SEQ ID NO: 363013 - RNA, 23 nt, Human
caggagggcgcacgccggcgaug

SEQ ID NO: 363014 - RNA, 18 nt, Human
cauuucugcaucuuggga

SEQ ID NO: 363015 - RNA, 18 nt, Human
cccccuccucuucagcac

SEQ ID NO: 363016 - RNA, 21 nt, Human
ccccugcagccgcugccaccu

SEQ ID NO: 363017 - RNA, 18 nt, Human
cccuggaguguaccacac

SEQ ID NO: 363018 - RNA, 22 nt, Human
ccucuaagccucggcuaacaga

SEQ ID NO: 363019 - RNA, 22 nt, Human
ccucugcccgcccuuccacccg

SEQ ID NO: 363020 - RNA, 24 nt, Human
ccucugcccgcccuuccacccgcc

SEQ ID NO: 363021 - RNA, 21 nt, Human
ccugcagccgcugccaccugu

SEQ ID NO: 363022 - RNA, 33 nt, Human
cgcuaauccgcgucccggcucuccacggcgccg

SEQ ID NO: 363023 - RNA, 21 nt, Human
cggugagcgugcgugcgcgug

SEQ ID NO: 363024 - RNA, 22 nt, Human
cgugcgcgugugcgggugugug

SEQ ID NO: 363025 - RNA, 21 nt, Human
cgugcgugcgcgugugcgggu

SEQ ID NO: 363026 - RNA, 19 nt, Human
cugcagccgcugccaccug

SEQ ID NO: 363027 - RNA, 21 nt, Human
cugccaccugugcuuugcugc

SEQ ID NO: 363028 - RNA, 19 nt, Human
cugucaucacugacucaca

SEQ ID NO: 363029 - RNA, 18 nt, Human
gccggggugagcgcgaag

SEQ ID NO: 363030 - RNA, 18 nt, Human
gccucaacgggcgcagga

SEQ ID NO: 363031 - RNA, 19 nt, Human
gcgaagugcggccgggagc

SEQ ID NO: 363032 - RNA, 21 nt, Human
gcgacccgcgcuccccuccgc

SEQ ID NO: 363033 - RNA, 19 nt, Human
gggaaaagagcauccacau

SEQ ID NO: 363034 - RNA, 21 nt, Human
gggcgcggcgaguggcgggag

SEQ ID NO: 363035 - RNA, 22 nt, Human
ggggauggcgcuuggcggggag

SEQ ID NO: 363036 - RNA, 18 nt, Human
ggucuggggaacgccccc

SEQ ID NO: 363037 - RNA, 21 nt, Human
gugguggcagaggacggugag

SEQ ID NO: 363038 - RNA, 19 nt, Human
uauacgcauuuuuuuccuu

SEQ ID NO: 363039 - RNA, 19 nt, Human
uccaacugauuccuccagc

SEQ ID NO: 363040 - RNA, 29 nt, Human
uccuccagcagcauccauucaaauaauaa

SEQ ID NO: 363041 - RNA, 25 nt, Human
ucuccacggcgcgcgacccgcgcuc

SEQ ID NO: 363042 - RNA, 21 nt, Human
ucugcaucuugggagaaaagg

SEQ ID NO: 363043 - RNA, 21 nt, Human
ucuucaauuccaacugauucc

SEQ ID NO: 363044 - RNA, 18 nt, Human
ugcgugcgcgugugcggg

SEQ ID NO: 363045 - RNA, 23 nt, Human
uggcaagaacgugucuucaauuc

SEQ ID NO: 363046 - RNA, 19 nt, Human
uggcagaggacggugagcg

SEQ ID NO: 363047 - RNA, 22 nt, Human
uggcagaggacggugagcgugc

SEQ ID NO: 363048 - RNA, 21 nt, Human
uggcuuccccgagagagcgau

SEQ ID NO: 363049 - RNA, 24 nt, Human
ugggagaaaagggaagcuggcaag

SEQ ID NO: 363050 - RNA, 18 nt, Human
uguaccacacugcuuuac

SEQ ID NO: 363051 - RNA, 24 nt, Human
ugugugcgcgccuggggaggcggu

SEQ ID NO: 363052 - RNA, 20 nt, Human
uucagcacuauccggcagcu

SEQ ID NO: 363053 - RNA, 20 nt, Human
uuuggcaaagacacagcacc

SEQ ID NO: 363054 - RNA, 25 nt, Human
aaaaaaagccagaaaaaugaaccuc

SEQ ID NO: 363055 - RNA, 21 nt, Human
aaacaaaacaaaagcaaaccc

SEQ ID NO: 363056 - RNA, 23 nt, Human
aaacaaaacaaaagcaaacccca

SEQ ID NO: 363057 - RNA, 24 nt, Human
aaacaaaacaaaagcaaaccccac

SEQ ID NO: 363058 - RNA, 21 nt, Human
aaacaaaagcaaaccccacuc

SEQ ID NO: 363059 - RNA, 26 nt, Human
aaacuaaugccccugcuguuuuuuuc

SEQ ID NO: 363060 - RNA, 22 nt, Human
aaagaaaaacacuuucaaauaa

SEQ ID NO: 363061 - RNA, 25 nt, Human
aagaagaccuguacucuugguguuu

SEQ ID NO: 363062 - RNA, 22 nt, Human
aauacccacucaacucauggac

SEQ ID NO: 363063 - RNA, 23 nt, Human
acaaaagcaaaccccacuccagc

SEQ ID NO: 363064 - RNA, 25 nt, Human
acaaacaaaacaaaagcaaacccca

SEQ ID NO: 363065 - RNA, 20 nt, Human
acacagcugcuacugccuga

SEQ ID NO: 363066 - RNA, 21 nt, Human
acaggaugucugggcuggaag

SEQ ID NO: 363067 - RNA, 22 nt, Human
accaccacacacagccauccug

SEQ ID NO: 363068 - RNA, 25 nt, Human
agagaccaugaagacuucuagggaa

SEQ ID NO: 363069 - RNA, 21 nt, Human
auacaucuacaaaguaaugcu

SEQ ID NO: 363070 - RNA, 20 nt, Human
auacugauucaucuucuacc

SEQ ID NO: 363071 - RNA, 18 nt, Human
augauuaagucuuugcuc

SEQ ID NO: 363072 - RNA, 21 nt, Human
augguacaggguguucugagg

SEQ ID NO: 363073 - RNA, 22 nt, Human
auguuaacuuuuaugcacagaa

SEQ ID NO: 363074 - RNA, 19 nt, Human
caaaacaaaagcaaacccc

SEQ ID NO: 363075 - RNA, 21 nt, Human
caaaacaaaagcaaaccccac

SEQ ID NO: 363076 - RNA, 18 nt, Human
caaaagcaaaccccacuc

SEQ ID NO: 363077 - RNA, 24 nt, Human
caaacaaaacaaaagcaaacccca

SEQ ID NO: 363078 - RNA, 25 nt, Human
caaacaaaacaaaagcaaaccccac

SEQ ID NO: 363079 - RNA, 21 nt, Human
cacaaacaaaacaaaagcaaa

SEQ ID NO: 363080 - RNA, 26 nt, Human
cagccagaaacucaaacacagcugcu

SEQ ID NO: 363081 - RNA, 22 nt, Human
caggugaaaaaaaaagccagaa

SEQ ID NO: 363082 - RNA, 26 nt, Human
caucacaggaugucugggcuggaaga

SEQ ID NO: 363083 - RNA, 21 nt, Human
cauuuauaggaauugugugcc

SEQ ID NO: 363084 - RNA, 18 nt, Human
ccacccaaaauccucccu

SEQ ID NO: 363085 - RNA, 27 nt, Human
ccagucagaagagaaagggauaaaauc

SEQ ID NO: 363086 - RNA, 26 nt, Human
cccacagaaagccaaaccuccucuuu

SEQ ID NO: 363087 - RNA, 22 nt, Human
ccccacaggaccuuuccauaag

SEQ ID NO: 363088 - RNA, 18 nt, Human
cgaggugaauuccccagc

SEQ ID NO: 363089 - RNA, 18 nt, Human
cuacaagcacccuugcua

SEQ ID NO: 363090 - RNA, 24 nt, Human
cuacugccugacagcucccacuca

SEQ ID NO: 363091 - RNA, 24 nt, Human
cuauauaaaaauaucucuaauugu

SEQ ID NO: 363092 - RNA, 22 nt, Human
cucacaggaccuggugaccacc

SEQ ID NO: 363093 - RNA, 25 nt, Human
cucauugacagugucuucauacuga

SEQ ID NO: 363094 - RNA, 26 nt, Human
cuccccacaggaccuuuccauaagaa

SEQ ID NO: 363095 - RNA, 21 nt, Human
cucccuuguguuuuggaggac

SEQ ID NO: 363096 - RNA, 22 nt, Human
cugaaggccucgugcuccaugg

SEQ ID NO: 363097 - RNA, 24 nt, Human
gaaagaagggaauacuucccccau

SEQ ID NO: 363098 - RNA, 19 nt, Human
gaagggaauacuuccccca

SEQ ID NO: 363099 - RNA, 20 nt, Human
gaaucacccacagaaagcca

SEQ ID NO: 363100 - RNA, 22 nt, Human
gagcgaaugagcuguaaugaga

SEQ ID NO: 363101 - RNA, 23 nt, Human
gccuagaggugagaugggacuug

SEQ ID NO: 363102 - RNA, 23 nt, Human
ggacacaaacaaaacaaaagcaa

SEQ ID NO: 363103 - RNA, 23 nt, Human
ggcaggagacauucuucccagag

SEQ ID NO: 363104 - RNA, 21 nt, Human
gggaagaugacgggcuugcug

SEQ ID NO: 363105 - RNA, 19 nt, Human
uaaaaauuaaucucuaaac

SEQ ID NO: 363106 - RNA, 23 nt, Human
uaacaugaaaugauuuaaaaauu

SEQ ID NO: 363107 - RNA, 22 nt, Human
uaagaaauacccacucaacuca

SEQ ID NO: 363108 - RNA, 20 nt, Human
uaagacuaacaugaaaugau

SEQ ID NO: 363109 - RNA, 22 nt, Human
uaagcagacuucacggggggaa

SEQ ID NO: 363110 - RNA, 19 nt, Human
uagccuacuauuugucucu

SEQ ID NO: 363111 - RNA, 27 nt, Human
uagcugcuagucuucucaacccuccgg

SEQ ID NO: 363112 - RNA, 20 nt, Human
uaggaaagaagggaauacuu

SEQ ID NO: 363113 - RNA, 18 nt, Human
uauaccagucagaagaga

SEQ ID NO: 363114 - RNA, 22 nt, Human
uauuagagagcucauucauuug

SEQ ID NO: 363115 - RNA, 19 nt, Human
ucaacucuuuccuagcucu

SEQ ID NO: 363116 - RNA, 18 nt, Human
ucauacugauucaucuuc

SEQ ID NO: 363117 - RNA, 23 nt, Human
uccacacugagugcauguguaug

SEQ ID NO: 363118 - RNA, 27 nt, Human
uccauucuucaccauuuucagccagaa

SEQ ID NO: 363119 - RNA, 21 nt, Human
ucucauaaccucauugacagu

SEQ ID NO: 363120 - RNA, 18 nt, Human
ucuuuaguguuccacagu

SEQ ID NO: 363121 - RNA, 19 nt, Human
ugaaauagguauaccaguc

SEQ ID NO: 363122 - RNA, 24 nt, Human
ugaggacacugaggccuagaggug

SEQ ID NO: 363123 - RNA, 18 nt, Human
ugagugcauguguaugca

SEQ ID NO: 363124 - RNA, 23 nt, Human
ugauuuuguaagggguggaagau

SEQ ID NO: 363125 - RNA, 22 nt, Human
ugcuucccaguccacacugagu

SEQ ID NO: 363126 - RNA, 19 nt, Human
uggaagagaccaugaagac

SEQ ID NO: 363127 - RNA, 22 nt, Human
uggacacaaacaaaacaaaagc

SEQ ID NO: 363128 - RNA, 18 nt, Human
uggcaggagacauucuuc

SEQ ID NO: 363129 - RNA, 20 nt, Human
uggccacccaaaauccuccc

SEQ ID NO: 363130 - RNA, 19 nt, Human
ugggaugaacugggcaaag

SEQ ID NO: 363131 - RNA, 25 nt, Human
uguaugcagagccugugauggccga

SEQ ID NO: 363132 - RNA, 20 nt, Human
ugugcaccuagcuacuaaug

SEQ ID NO: 363133 - RNA, 24 nt, Human
uguuuuggaggacuauuuuccagu

SEQ ID NO: 363134 - RNA, 19 nt, Human
uuccagucuuaucagaagg

SEQ ID NO: 363135 - RNA, 18 nt, Human
uucuaaggacuuuugauu

SEQ ID NO: 363136 - RNA, 19 nt, Human
uucuagggaagucccucau

SEQ ID NO: 363137 - RNA, 19 nt, Human
uucugaggggaaacagagg

SEQ ID NO: 363138 - RNA, 19 nt, Human
uuuaaaaauuucaauugug

SEQ ID NO: 363139 - RNA, 22 nt, Human
uuuaaaaauuucaauuguggga

SEQ ID NO: 363140 - RNA, 24 nt, Human
uuuauagaugaggacacugaggcc

SEQ ID NO: 363141 - RNA, 20 nt, Human
uuucuaggagggucucuucu

SEQ ID NO: 363142 - RNA, 21 nt, Human
aaaaaagaagaacauacuggg

SEQ ID NO: 363143 - RNA, 24 nt, Human
aaaaaagauuuacugaagccugaa

SEQ ID NO: 363144 - RNA, 20 nt, Human
aaaaagccaaaguguuauca

SEQ ID NO: 363145 - RNA, 22 nt, Human
aaacagcacgcucucagaucuu

SEQ ID NO: 363146 - RNA, 19 nt, Human
aaacuuggauguacuggca

SEQ ID NO: 363147 - RNA, 25 nt, Human
aaagccaaaguguuaucagaggccc

SEQ ID NO: 363148 - RNA, 18 nt, Human
aacaccugagucccagcu

SEQ ID NO: 363149 - RNA, 20 nt, Human
aacucgaggcaaugcgacag

SEQ ID NO: 363150 - RNA, 20 nt, Human
aagauaccacagacauacaa

SEQ ID NO: 363151 - RNA, 23 nt, Human
aagcacccuucuccagacccaga

SEQ ID NO: 363152 - RNA, 21 nt, Human
aagcagaaaagugccccaggg

SEQ ID NO: 363153 - RNA, 23 nt, Human
acacacacgcacacacacacaca

SEQ ID NO: 363154 - RNA, 26 nt, Human
acagagcaguccuuucuccaaaggaa

SEQ ID NO: 363155 - RNA, 22 nt, Human
acauuaggaagaggcggcauuu

SEQ ID NO: 363156 - RNA, 20 nt, Human
acccaccuggaguauuucua

SEQ ID NO: 363157 - RNA, 19 nt, Human
acccugugaguccaugauu

SEQ ID NO: 363158 - RNA, 19 nt, Human
accugagucccagcucagc

SEQ ID NO: 363159 - RNA, 20 nt, Human
agaaagagaacagcagggga

SEQ ID NO: 363160 - RNA, 22 nt, Human
agaaaggacucugcuccacaga

SEQ ID NO: 363161 - RNA, 22 nt, Human
agaacccucugccccgcuucuc

SEQ ID NO: 363162 - RNA, 20 nt, Human
agcaaaaucaggcgcccaga

SEQ ID NO: 363163 - RNA, 22 nt, Human
agcacccuucuccagacccaga

SEQ ID NO: 363164 - RNA, 24 nt, Human
agccaaaguguuaucagaggccca

SEQ ID NO: 363165 - RNA, 24 nt, Human
agccaggggaccugggaaccugug

SEQ ID NO: 363166 - RNA, 18 nt, Human
agcuagagguggcagggg

SEQ ID NO: 363167 - RNA, 23 nt, Human
aggaagaaaaaaagauuuacuga

SEQ ID NO: 363168 - RNA, 20 nt, Human
aggaagaggcggcauuugaa

SEQ ID NO: 363169 - RNA, 18 nt, Human
aggaagcagaaaagugcc

SEQ ID NO: 363170 - RNA, 18 nt, Human
aggaagcagaaaagugcc

SEQ ID NO: 363171 - RNA, 20 nt, Human
aggaagcagaaaagugcccc

SEQ ID NO: 363172 - RNA, 18 nt, Human
aggcaauugucacaugua

SEQ ID NO: 363173 - RNA, 20 nt, Human
aggcugcauucccucuccuu

SEQ ID NO: 363174 - RNA, 18 nt, Human
agugcagcauuuuacaga

SEQ ID NO: 363175 - RNA, 20 nt, Human
aguuguuuaccuaaggcugu

SEQ ID NO: 363176 - RNA, 18 nt, Human
auauacauaugugugugu

SEQ ID NO: 363177 - RNA, 21 nt, Human
caaaaucaggcgcccagaacc

SEQ ID NO: 363178 - RNA, 25 nt, Human
caaacagaucccugguguacacaca

SEQ ID NO: 363179 - RNA, 23 nt, Human
caacagccacaaacagcacgcuc

SEQ ID NO: 363180 - RNA, 19 nt, Human
cacaaacucuuuaaacacc

SEQ ID NO: 363181 - RNA, 21 nt, Human
cacacagaacaagggcaugau

SEQ ID NO: 363182 - RNA, 23 nt, Human
cacagcaaaaucaggcgcccaga

SEQ ID NO: 363183 - RNA, 19 nt, Human
caccacagugcuaacaccc

SEQ ID NO: 363184 - RNA, 21 nt, Human
caccacagugcuaacacccac

SEQ ID NO: 363185 - RNA, 21 nt, Human
caccugcacacucucggaagc

SEQ ID NO: 363186 - RNA, 20 nt, Human
cacgguuccuggucccuuuu

SEQ ID NO: 363187 - RNA, 19 nt, Human
cacugcuggcaggcaagcc

SEQ ID NO: 363188 - RNA, 18 nt, Human
cagaaaggacucugcucc

SEQ ID NO: 363189 - RNA, 20 nt, Human
cagaucccugguguacacac

SEQ ID NO: 363190 - RNA, 21 nt, Human
cagcaaaaucaggcgcccaga

SEQ ID NO: 363191 - RNA, 20 nt, Human
cagcaaaggccagccauggc

SEQ ID NO: 363192 - RNA, 21 nt, Human
caguccuuucuccaaagcugu

SEQ ID NO: 363193 - RNA, 18 nt, Human
cauauacacaacacacau

SEQ ID NO: 363194 - RNA, 21 nt, Human
cauauacacaacacacaugug

SEQ ID NO: 363195 - RNA, 25 nt, Human
cauauguguguguguguuguguaua

SEQ ID NO: 363196 - RNA, 21 nt, Human
caucaacagccacaaacagca

SEQ ID NO: 363197 - RNA, 18 nt, Human
ccaggaccuguuacauca

SEQ ID NO: 363198 - RNA, 22 nt, Human
ccaguuuccuuugcacgguucc

SEQ ID NO: 363199 - RNA, 24 nt, Human
ccauaagcgugugccccugucugu

SEQ ID NO: 363200 - RNA, 19 nt, Human
cccagaacccagggaucag

SEQ ID NO: 363201 - RNA, 26 nt, Human
cccagggcugggaugcgaacugggac

SEQ ID NO: 363202 - RNA, 20 nt, Human
ccccauuuuacaaauggggu

SEQ ID NO: 363203 - RNA, 21 nt, Human
cccuggucuaccgacucugug

SEQ ID NO: 363204 - RNA, 22 nt, Human
cccugguguacacacaguugca

SEQ ID NO: 363205 - RNA, 23 nt, Human
ccucaggccagcgacugggccaa

SEQ ID NO: 363206 - RNA, 24 nt, Human
ccugcacacucucggaagcacccu

SEQ ID NO: 363207 - RNA, 21 nt, Human
ccuggcugggucaacucugug

SEQ ID NO: 363208 - RNA, 24 nt, Human
cgaauaugcaucaacagccacaaa

SEQ ID NO: 363209 - RNA, 21 nt, Human
cgacagaugacuauaaacccc

SEQ ID NO: 363210 - RNA, 21 nt, Human
cgacugggccaaagcauugcu

SEQ ID NO: 363211 - RNA, 21 nt, Human
cgagaaaggcgaggagaggcg

SEQ ID NO: 363212 - RNA, 23 nt, Human
cggaagcacccuucuccagaccc

SEQ ID NO: 363213 - RNA, 21 nt, Human
cggcugggugaacaggguggg

SEQ ID NO: 363214 - RNA, 20 nt, Human
cguuccaucuacccauucuc

SEQ ID NO: 363215 - RNA, 21 nt, Human
cuaaugcacauagagaacaaa

SEQ ID NO: 363216 - RNA, 20 nt, Human
cuagagguggcaggggacgu

SEQ ID NO: 363217 - RNA, 21 nt, Human
cuauaaacccccuugguuugc

SEQ ID NO: 363218 - RNA, 26 nt, Human
cucccagaacccagggaucagaagcu

SEQ ID NO: 363219 - RNA, 21 nt, Human
cucuccuuuuuucuuugaccu

SEQ ID NO: 363220 - RNA, 21 nt, Human
cucugccccgcuucuccccca

SEQ ID NO: 363221 - RNA, 19 nt, Human
cugaacagauuuaccacaa

SEQ ID NO: 363222 - RNA, 19 nt, Human
cugcaacucgaggcaaugc

SEQ ID NO: 363223 - RNA, 23 nt, Human
cugccccgcuucucccccacaag

SEQ ID NO: 363224 - RNA, 21 nt, Human
cugggucaacucuguguccca

SEQ ID NO: 363225 - RNA, 21 nt, Human
cuugagccuggcagcucaagg

SEQ ID NO: 363226 - RNA, 20 nt, Human
gacagaugacuauaaacccc

SEQ ID NO: 363227 - RNA, 18 nt, Human
gaggcugaacacugggga

SEQ ID NO: 363228 - RNA, 22 nt, Human
gcaccugcagucucccagaacc

SEQ ID NO: 363229 - RNA, 18 nt, Human
gcagaaacaguggcuggg

SEQ ID NO: 363230 - RNA, 21 nt, Human
gcauucccucuccuuuuuucu

SEQ ID NO: 363231 - RNA, 20 nt, Human
gccccgcuucucccccacaa

SEQ ID NO: 363232 - RNA, 20 nt, Human
gcucucagaucuuccccuuc

SEQ ID NO: 363233 - RNA, 24 nt, Human
gcugcauucccucuccuuuuuucu

SEQ ID NO: 363234 - RNA, 24 nt, Human
gcugggucaacucugugucgugca

SEQ ID NO: 363235 - RNA, 19 nt, Human
gcuucaccaaaucccucug

SEQ ID NO: 363236 - RNA, 23 nt, Human
ggcgcaggagcaggugcgagaaa

SEQ ID NO: 363237 - RNA, 22 nt, Human
ggcggcugggugaacagggugg

SEQ ID NO: 363238 - RNA, 25 nt, Human
gggaccugggaaccugugaaugggg

SEQ ID NO: 363239 - RNA, 21 nt, Human
gggagcccaaugccagugccg

SEQ ID NO: 363240 - RNA, 21 nt, Human
gggaggguaaaaguuggcaag

SEQ ID NO: 363241 - RNA, 21 nt, Human
gggccaggccaggacacagga

SEQ ID NO: 363242 - RNA, 25 nt, Human
guaaagugaggccccaggaccuguu

SEQ ID NO: 363243 - RNA, 19 nt, Human
guacaugguuuucucuggg

SEQ ID NO: 363244 - RNA, 21 nt, Human
guccuuguccuugguaaccag

SEQ ID NO: 363245 - RNA, 21 nt, Human
gugaaggaggcugaacacugg

SEQ ID NO: 363246 - RNA, 18 nt, Human
guggaccagagaccacca

SEQ ID NO: 363247 - RNA, 20 nt, Human
guguauagauauacauaugu

SEQ ID NO: 363248 - RNA, 27 nt, Human
guguguguguguuguguauauauauua

SEQ ID NO: 363249 - RNA, 25 nt, Human
guuccaucuacccauucucaucuca

SEQ ID NO: 363250 - RNA, 19 nt, Human
guuguguauauauauauga

SEQ ID NO: 363251 - RNA, 21 nt, Human
uaaacaccugagucccagcuc

SEQ ID NO: 363252 - RNA, 18 nt, Human
uaacuacaucacaccucc

SEQ ID NO: 363253 - RNA, 19 nt, Human
uacacacacgcacacacac

SEQ ID NO: 363254 - RNA, 22 nt, Human
uacacacagaacaagggcauga

SEQ ID NO: 363255 - RNA, 22 nt, Human
uacauaaaaaagaagaacauac

SEQ ID NO: 363256 - RNA, 24 nt, Human
uaccuaaggcuguggaccagagac

SEQ ID NO: 363257 - RNA, 18 nt, Human
uagugaguguucauuuac

SEQ ID NO: 363258 - RNA, 18 nt, Human
uaguucaugaaaacuuga

SEQ ID NO: 363259 - RNA, 19 nt, Human
uauccaaacacaaacuugc

SEQ ID NO: 363260 - RNA, 25 nt, Human
uauccacaccuagcuauagcacaaa

SEQ ID NO: 363261 - RNA, 25 nt, Human
uauguguguguguguuguguauaua

SEQ ID NO: 363262 - RNA, 28 nt, Human
ucaaguaacuacacacagaacaagggcc

SEQ ID NO: 363263 - RNA, 22 nt, Human
ucauuuaccauuuggaaucaaa

SEQ ID NO: 363264 - RNA, 24 nt, Human
uccaaacacaaacuugcuuggcuu

SEQ ID NO: 363265 - RNA, 19 nt, Human
uccaagaagugaaaugguc

SEQ ID NO: 363266 - RNA, 21 nt, Human
uccaagauguaaccacacagg

SEQ ID NO: 363267 - RNA, 19 nt, Human
uccaaggggaagggccacc

SEQ ID NO: 363268 - RNA, 20 nt, Human
uccaugacuggcggcugggu

SEQ ID NO: 363269 - RNA, 19 nt, Human
uccccagucacguaacccc

SEQ ID NO: 363270 - RNA, 21 nt, Human
uccccagucacguaaccccug

SEQ ID NO: 363271 - RNA, 25 nt, Human
ucggccaguugugcuccgcagguuc

SEQ ID NO: 363272 - RNA, 21 nt, Human
ucuaaguuguuuaccuaaggc

SEQ ID NO: 363273 - RNA, 24 nt, Human
ucuccagacccagacacgcuucuu

SEQ ID NO: 363274 - RNA, 24 nt, Human
ucuuugaccucagaaucuaaguug

SEQ ID NO: 363275 - RNA, 19 nt, Human
ugaaaacagaagaguauca

SEQ ID NO: 363276 - RNA, 20 nt, Human
ugaaaacagaagaguaucag

SEQ ID NO: 363277 - RNA, 20 nt, Human
ugaaauacaucugcauuuuu

SEQ ID NO: 363278 - RNA, 22 nt, Human
ugaaaucagccaaagccagggg

SEQ ID NO: 363279 - RNA, 25 nt, Human
ugcaccuggacauggaucaagccga

SEQ ID NO: 363280 - RNA, 20 nt, Human
ugcauauacacaacacacau

SEQ ID NO: 363281 - RNA, 24 nt, Human
ugcauucccucuccuuuuuucuuu

SEQ ID NO: 363282 - RNA, 21 nt, Human
ugcgacagaugacuauaaacc

SEQ ID NO: 363283 - RNA, 19 nt, Human
ugcucagaaaacaccugau

SEQ ID NO: 363284 - RNA, 21 nt, Human
ugcucagaaaacaccugaugc

SEQ ID NO: 363285 - RNA, 25 nt, Human
uggaguauuucuaacuugacaaugu

SEQ ID NO: 363286 - RNA, 20 nt, Human
uggcaaaagacgggguuccc

SEQ ID NO: 363287 - RNA, 22 nt, Human
uggcaagaaagggcucuauauu

SEQ ID NO: 363288 - RNA, 20 nt, Human
uggcaagggcagugcccugu

SEQ ID NO: 363289 - RNA, 22 nt, Human
uggcaagggcagugcccugugu

SEQ ID NO: 363290 - RNA, 20 nt, Human
uggcagaaacaguggcuggg

SEQ ID NO: 363291 - RNA, 21 nt, Human
uggcaggcaagcccaaagccc

SEQ ID NO: 363292 - RNA, 23 nt, Human
uggcaggggacgugggcucuggc

SEQ ID NO: 363293 - RNA, 18 nt, Human
ugggaggguaaaaguugg

SEQ ID NO: 363294 - RNA, 22 nt, Human
ugguggaaggugggguugcuag

SEQ ID NO: 363295 - RNA, 19 nt, Human
ugguuuaaagagagcuggg

SEQ ID NO: 363296 - RNA, 19 nt, Human
uguauagauauacauaugu

SEQ ID NO: 363297 - RNA, 29 nt, Human
uguauagauauacauaugugugugugugu

SEQ ID NO: 363298 - RNA, 22 nt, Human
ugucagaguguccuuguccuug

SEQ ID NO: 363299 - RNA, 19 nt, Human
uguguauagauauacauau

SEQ ID NO: 363300 - RNA, 23 nt, Human
uguguauagauauacauaugugu

SEQ ID NO: 363301 - RNA, 27 nt, Human
uguguauagauauacauaugugugugu

SEQ ID NO: 363302 - RNA, 18 nt, Human
uguguguauagauauaca

SEQ ID NO: 363303 - RNA, 18 nt, Human
uguguguguguguugugu

SEQ ID NO: 363304 - RNA, 23 nt, Human
uguguguguguguuguguauaua

SEQ ID NO: 363305 - RNA, 24 nt, Human
uguguguguuguguauauauauau

SEQ ID NO: 363306 - RNA, 21 nt, Human
uguuacaggguggcagaaaca

SEQ ID NO: 363307 - RNA, 22 nt, Human
uucacccuuucugcucaggcuc

SEQ ID NO: 363308 - RNA, 20 nt, Human
uucugggaagccgccccggg

SEQ ID NO: 363309 - RNA, 21 nt, Human
uuuacaaaugggguaaaguga

SEQ ID NO: 363310 - RNA, 18 nt, Human
uuuccaguuuccuuugca

SEQ ID NO: 363311 - RNA, 19 nt, Human
uuucucuggggugguggug

SEQ ID NO: 363312 - RNA, 18 nt, Human
aacauuauuucuccaucu

SEQ ID NO: 363313 - RNA, 28 nt, Human
aagcggaccuccggaaacaggggaccca

SEQ ID NO: 363314 - RNA, 23 nt, Human
acacacacacacacacacacaca

SEQ ID NO: 363315 - RNA, 23 nt, Human
acacacacacacacacacacaca

SEQ ID NO: 363316 - RNA, 23 nt, Human
acacacacacacacacacacaca

SEQ ID NO: 363317 - RNA, 23 nt, Human
acacacacacacacacacacaca

SEQ ID NO: 363318 - RNA, 23 nt, Human
acacacacacacacacacacaca

SEQ ID NO: 363319 - RNA, 24 nt, Human
acacacacacacacacacacacag

SEQ ID NO: 363320 - RNA, 23 nt, Human
acacacacacacacacacacacg

SEQ ID NO: 363321 - RNA, 22 nt, Human
acacacacacacacacacacag

SEQ ID NO: 363322 - RNA, 23 nt, Human
acacacacacacacacacgugca

SEQ ID NO: 363323 - RNA, 23 nt, Human
acacacacacacacacacgugca

SEQ ID NO: 363324 - RNA, 28 nt, Human
acacacacacacacacgugcacacacaa

SEQ ID NO: 363325 - RNA, 23 nt, Human
acacacacacacacgugcacaca

SEQ ID NO: 363326 - RNA, 25 nt, Human
acacacacacacgugcacacacaca

SEQ ID NO: 363327 - RNA, 18 nt, Human
acacacacauccccccac

SEQ ID NO: 363328 - RNA, 21 nt, Human
acacacauccccccacaacua

SEQ ID NO: 363329 - RNA, 24 nt, Human
acacauguacuccagcagccaggc

SEQ ID NO: 363330 - RNA, 31 nt, Human
acagaacacacacacacacacacacacacag

SEQ ID NO: 363331 - RNA, 21 nt, Human
acauguacuccagcagccagg

SEQ ID NO: 363332 - RNA, 24 nt, Human
acccuugugaacacauguacucca

SEQ ID NO: 363333 - RNA, 18 nt, Human
agacaggggaggccaggc

SEQ ID NO: 363334 - RNA, 20 nt, Human
agagugugcaggcagacccc

SEQ ID NO: 363335 - RNA, 21 nt, Human
agcgccuggaagcuggcuggg

SEQ ID NO: 363336 - RNA, 21 nt, Human
agcgccuggaagcuggcuggg

SEQ ID NO: 363337 - RNA, 27 nt, Human
agcggaccuccggaaacaggggaccca

SEQ ID NO: 363338 - RNA, 18 nt, Human
aggcaggucacggugggg

SEQ ID NO: 363339 - RNA, 19 nt, Human
aggcaggucacggugggga

SEQ ID NO: 363340 - RNA, 20 nt, Human
aggcgguggucugguguccg

SEQ ID NO: 363341 - RNA, 20 nt, Human
aggcgguggucugguguccg

SEQ ID NO: 363342 - RNA, 19 nt, Human
aggggaucuggggacaggg

SEQ ID NO: 363343 - RNA, 19 nt, Human
aggggaucuggggacaggg

SEQ ID NO: 363344 - RNA, 20 nt, Human
agguauuuguccucagccuc

SEQ ID NO: 363345 - RNA, 20 nt, Human
agguauuuguccucagccuc

SEQ ID NO: 363346 - RNA, 24 nt, Human
auaauccaguguccaaagagcacc

SEQ ID NO: 363347 - RNA, 19 nt, Human
auccgggaggcggggaccc

SEQ ID NO: 363348 - RNA, 19 nt, Human
auccgggaggcggggaccc

SEQ ID NO: 363349 - RNA, 22 nt, Human
caaaauaaccagcaugguguug

SEQ ID NO: 363350 - RNA, 22 nt, Human
caaagagcacccccagcagggc

SEQ ID NO: 363351 - RNA, 19 nt, Human
cacaacuacagccgccaaa

SEQ ID NO: 363352 - RNA, 20 nt, Human
cacacacacacacacacaca

SEQ ID NO: 363353 - RNA, 20 nt, Human
cacacacacacacacacaca

SEQ ID NO: 363354 - RNA, 20 nt, Human
cacacacacacacacacaca

SEQ ID NO: 363355 - RNA, 20 nt, Human
cacacacacacacacacaca

SEQ ID NO: 363356 - RNA, 20 nt, Human
cacacacacacacacacaca

SEQ ID NO: 363357 - RNA, 20 nt, Human
cacacacacacacacacaca

SEQ ID NO: 363358 - RNA, 20 nt, Human
cacacacacacacacacaca

SEQ ID NO: 363359 - RNA, 20 nt, Human
cacacacacacacacacaca

SEQ ID NO: 363360 - RNA, 20 nt, Human
cacacacacacacacacaca

SEQ ID NO: 363361 - RNA, 22 nt, Human
cacacacacacacacacacaca

SEQ ID NO: 363362 - RNA, 22 nt, Human
cacacacacacacacacacaca

SEQ ID NO: 363363 - RNA, 22 nt, Human
cacacacacacacacacacaca

SEQ ID NO: 363364 - RNA, 22 nt, Human
cacacacacacacacacacaca

SEQ ID NO: 363365 - RNA, 22 nt, Human
cacacacacacacacacacaca

SEQ ID NO: 363366 - RNA, 22 nt, Human
cacacacacacacacacacaca

SEQ ID NO: 363367 - RNA, 22 nt, Human
cacacacacacacacacacaca

SEQ ID NO: 363368 - RNA, 26 nt, Human
cacacacacacacacacacacacaca

SEQ ID NO: 363369 - RNA, 26 nt, Human
cacacacacacacacacacacacaca

SEQ ID NO: 363370 - RNA, 26 nt, Human
cacacacacacacacacacacacaca

SEQ ID NO: 363371 - RNA, 26 nt, Human
cacacacacacacacacacacacaca

SEQ ID NO: 363372 - RNA, 26 nt, Human
cacacacacacacacacacacacaca

SEQ ID NO: 363373 - RNA, 26 nt, Human
cacacacacacacacacacacacacg

SEQ ID NO: 363374 - RNA, 26 nt, Human
cacacacacacacacacacacacgug

SEQ ID NO: 363375 - RNA, 26 nt, Human
cacacacacacacacacacacgugca

SEQ ID NO: 363376 - RNA, 25 nt, Human
cacacacacacacacacacgugcac

SEQ ID NO: 363377 - RNA, 26 nt, Human
cacacacacacacacacgugcacaca

SEQ ID NO: 363378 - RNA, 26 nt, Human
cacacacacacacacgugcacacaca

SEQ ID NO: 363379 - RNA, 30 nt, Human
cacacacacacacgugcacacacacauccu

SEQ ID NO: 363380 - RNA, 24 nt, Human
cacacacacacgugcacacacaca

SEQ ID NO: 363381 - RNA, 22 nt, Human
cacacacacgugcacacacaca

SEQ ID NO: 363382 - RNA, 23 nt, Human
cacauccccccacaacuacagcc

SEQ ID NO: 363383 - RNA, 24 nt, Human
cacgugcacacacacaucccccca

SEQ ID NO: 363384 - RNA, 23 nt, Human
cagcagggcagggaaggucccuc

SEQ ID NO: 363385 - RNA, 20 nt, Human
caguguccaaagagcacccc

SEQ ID NO: 363386 - RNA, 25 nt, Human
cauaauccaguguccaaagagcacc

SEQ ID NO: 363387 - RNA, 22 nt, Human
cauccccccacaacuacagccg

SEQ ID NO: 363388 - RNA, 18 nt, Human
cauccccccacaacuacg

SEQ ID NO: 363389 - RNA, 19 nt, Human
cauguacuccagcagccag

SEQ ID NO: 363390 - RNA, 21 nt, Human
cauguacuccagcagccaggc

SEQ ID NO: 363391 - RNA, 25 nt, Human
ccacaacuacagccgccaaaauaac

SEQ ID NO: 363392 - RNA, 22 nt, Human
ccagagugugcaggcagacccc

SEQ ID NO: 363393 - RNA, 20 nt, Human
ccagcagccaggcaucccag

SEQ ID NO: 363394 - RNA, 18 nt, Human
ccagcagggcagggaagg

SEQ ID NO: 363395 - RNA, 22 nt, Human
ccaggcucuuagguccgggagg

SEQ ID NO: 363396 - RNA, 22 nt, Human
ccaggcucuuagguccgggagg

SEQ ID NO: 363397 - RNA, 24 nt, Human
ccaggcugggcgcugagcuucucu

SEQ ID NO: 363398 - RNA, 23 nt, Human
cccauggugaccugugaccugcu

SEQ ID NO: 363399 - RNA, 18 nt, Human
ccccagagcccuagcuca

SEQ ID NO: 363400 - RNA, 23 nt, Human
cccccacaacuacagccgccaaa

SEQ ID NO: 363401 - RNA, 24 nt, Human
cccccagagcccuagcucauccau

SEQ ID NO: 363402 - RNA, 22 nt, Human
cccccagauggcggaggucugc

SEQ ID NO: 363403 - RNA, 21 nt, Human
ccccgugugccagauguccga

SEQ ID NO: 363404 - RNA, 21 nt, Human
ccccgugugccagauguccga

SEQ ID NO: 363405 - RNA, 19 nt, Human
ccgggaguagcgguuacca

SEQ ID NO: 363406 - RNA, 22 nt, Human
ccuccggaaacaggggacccag

SEQ ID NO: 363407 - RNA, 22 nt, Human
ccuccggaaacaggggacccag

SEQ ID NO: 363408 - RNA, 21 nt, Human
ccucuccccagagucccuggg

SEQ ID NO: 363409 - RNA, 21 nt, Human
ccucuccccagagucccuggg

SEQ ID NO: 363410 - RNA, 19 nt, Human
ccucuggagugacagcagg

SEQ ID NO: 363411 - RNA, 22 nt, Human
ccuggagggugcuggggccccu

SEQ ID NO: 363412 - RNA, 20 nt, Human
ccuggcuccccagagugugc

SEQ ID NO: 363413 - RNA, 20 nt, Human
ccugggucuuggacacugag

SEQ ID NO: 363414 - RNA, 20 nt, Human
ccugggucuuggacacugag

SEQ ID NO: 363415 - RNA, 22 nt, Human
ccugugaccugcucccugagac

SEQ ID NO: 363416 - RNA, 26 nt, Human
cgcccggguuccuuggcccuaggagc

SEQ ID NO: 363417 - RNA, 26 nt, Human
cgcccggguuccuuggcccuaggagc

SEQ ID NO: 363418 - RNA, 23 nt, Human
cgguuaccagccagagaaagccu

SEQ ID NO: 363419 - RNA, 19 nt, Human
cguaccauggggacaggag

SEQ ID NO: 363420 - RNA, 19 nt, Human
cguaccauggggacaggag

SEQ ID NO: 363421 - RNA, 22 nt, Human
cgugcacacacacaucccccca

SEQ ID NO: 363422 - RNA, 20 nt, Human
cuccaucuugcuguuuucua

SEQ ID NO: 363423 - RNA, 20 nt, Human
cucugggugggacguggggc

SEQ ID NO: 363424 - RNA, 20 nt, Human
cucugggugggacguggggc

SEQ ID NO: 363425 - RNA, 22 nt, Human
cugaggcuucucugcucugccc

SEQ ID NO: 363426 - RNA, 23 nt, Human
cugggagcgcuugggcuccuucc

SEQ ID NO: 363427 - RNA, 20 nt, Human
cuuagcgccuggaagcuggc

SEQ ID NO: 363428 - RNA, 20 nt, Human
cuuagcgccuggaagcuggc

SEQ ID NO: 363429 - RNA, 20 nt, Human
cuuggcuccaggagguugag

SEQ ID NO: 363430 - RNA, 24 nt, Human
gaacacauguacuccagcagccag

SEQ ID NO: 363431 - RNA, 21 nt, Human
gacaugagugagaacuggggg

SEQ ID NO: 363432 - RNA, 20 nt, Human
gaggucugcaggaggcuagg

SEQ ID NO: 363433 - RNA, 20 nt, Human
gaggucugcaggaggcuagg

SEQ ID NO: 363434 - RNA, 19 nt, Human
gaucuccuguccuggaggg

SEQ ID NO: 363435 - RNA, 23 nt, Human
gcccccagauggcggaggucugc

SEQ ID NO: 363436 - RNA, 19 nt, Human
gccuggaagcuggcuggga

SEQ ID NO: 363437 - RNA, 19 nt, Human
gccuggaagcuggcuggga

SEQ ID NO: 363438 - RNA, 21 nt, Human
gccuggaagcuggcugggagc

SEQ ID NO: 363439 - RNA, 21 nt, Human
gccuggaagcuggcugggagc

SEQ ID NO: 363440 - RNA, 24 nt, Human
gccuugaguuggggacaugaguga

SEQ ID NO: 363441 - RNA, 25 nt, Human
gcgcugagcuucucugcuuggaccc

SEQ ID NO: 363442 - RNA, 24 nt, Human
gcgcuugggcuccuucccaggacc

SEQ ID NO: 363443 - RNA, 24 nt, Human
gcgcuugggcuccuucccaggacc

SEQ ID NO: 363444 - RNA, 18 nt, Human
gcuagaauuccccauggu

SEQ ID NO: 363445 - RNA, 18 nt, Human
ggaggccaggcaggucac

SEQ ID NO: 363446 - RNA, 19 nt, Human
ggagggaauaggggaucug

SEQ ID NO: 363447 - RNA, 19 nt, Human
ggagggaauaggggaucug

SEQ ID NO: 363448 - RNA, 23 nt, Human
ggagguugagugcccccagaugg

SEQ ID NO: 363449 - RNA, 23 nt, Human
ggagguugagugcccccagaugg

SEQ ID NO: 363450 - RNA, 19 nt, Human
ggcuagaauuccccauggu

SEQ ID NO: 363451 - RNA, 24 nt, Human
gggaauaggggaucuggggacagg

SEQ ID NO: 363452 - RNA, 24 nt, Human
gggaauaggggaucuggggacagg

SEQ ID NO: 363453 - RNA, 18 nt, Human
gggccccuggcuccccag

SEQ ID NO: 363454 - RNA, 20 nt, Human
ggggaggccaggcaggucac

SEQ ID NO: 363455 - RNA, 31 nt, Human
ggucacagaacacacacacacacacacacag

SEQ ID NO: 363456 - RNA, 19 nt, Human
ggucuuggacacugagggc

SEQ ID NO: 363457 - RNA, 33 nt, Human
gucacagaacacacacacacacacacacacagu

SEQ ID NO: 363458 - RNA, 33 nt, Human; identical to SEQ ID NO: 363457

SEQ ID NO: 363459 - RNA, 18 nt, Human
gucuuggacacugagggc

SEQ ID NO: 363460 - RNA, 20 nt, Human
uagaauuccccauggugacc

SEQ ID NO: 363461 - RNA, 18 nt, Human
ucacagaacacacacaca

SEQ ID NO: 363462 - RNA, 18 nt, Human
ucacagaacacacacaca

SEQ ID NO: 363463 - RNA, 19 nt, Human
uccaguguccaaagagcac

SEQ ID NO: 363464 - RNA, 28 nt, Human
uccccagagucccugggaguguuucugu

SEQ ID NO: 363465 - RNA, 28 nt, Human
uccccagagucccugggaguguuucugu

SEQ ID NO: 363466 - RNA, 18 nt, Human
ucccugggaguguuucug

SEQ ID NO: 363467 - RNA, 18 nt, Human
ucccugggaguguuucug

SEQ ID NO: 363468 - RNA, 18 nt, Human
ucccugggaguguuucug

SEQ ID NO: 363469 - RNA, 18 nt, Human
ucccugggaguguuucug

SEQ ID NO: 363470 - RNA, 24 nt, Human
uccucagccucuccccagaguccc

SEQ ID NO: 363471 - RNA, 21 nt, Human
uccucuggagugacagcaggu

SEQ ID NO: 363472 - RNA, 18 nt, Human
ucugggugggacgugggg

SEQ ID NO: 363473 - RNA, 18 nt, Human
ucugggugggacgugggg

SEQ ID NO: 363474 - RNA, 20 nt, Human
ugaccugcucccugagacag

SEQ ID NO: 363475 - RNA, 20 nt, Human
ugaccugugaccugcucccu

SEQ ID NO: 363476 - RNA, 20 nt, Human
ugagugcccccagauggcgg

SEQ ID NO: 363477 - RNA, 20 nt, Human
ugagugcccccagauggcgg

SEQ ID NO: 363478 - RNA, 22 nt, Human
ugaguucacagcacugaaguuc

SEQ ID NO: 363479 - RNA, 22 nt, Human
ugaguucacagcacugaaguuc

SEQ ID NO: 363480 - RNA, 19 nt, Human
ugaguugaguaacagcacc

SEQ ID NO: 363481 - RNA, 19 nt, Human
ugaguugaguaacagcacc

SEQ ID NO: 363482 - RNA, 23 nt, Human
ugcaggcagacccccagagcccu

SEQ ID NO: 363483 - RNA, 21 nt, Human
ugccugggucuuggacacuga

SEQ ID NO: 363484 - RNA, 21 nt, Human
ugccugggucuuggacacuga

SEQ ID NO: 363485 - RNA, 18 nt, Human
ugcuguuuucuagccuug

SEQ ID NO: 363486 - RNA, 23 nt, Human
ugcuguuuucuagccuugaguug

SEQ ID NO: 363487 - RNA, 24 nt, Human
ugcuguuuucuagccuugaguugg

SEQ ID NO: 363488 - RNA, 25 nt, Human
uggaagcuggcugggagcgcuuggg

SEQ ID NO: 363489 - RNA, 25 nt, Human
uggaagcuggcugggagcgcuuggg

SEQ ID NO: 363490 - RNA, 20 nt, Human
uggagggaauaggggaucug

SEQ ID NO: 363491 - RNA, 20 nt, Human
uggagggaauaggggaucug

SEQ ID NO: 363492 - RNA, 18 nt, Human
uggcccuaggagcuggga

SEQ ID NO: 363493 - RNA, 18 nt, Human
uggcccuaggagcuggga

SEQ ID NO: 363494 - RNA, 18 nt, Human
uggcuccaggagguugag

SEQ ID NO: 363495 - RNA, 19 nt, Human
ugggaugcgggccccugug

SEQ ID NO: 363496 - RNA, 19 nt, Human
ugggaugcgggccccugug

SEQ ID NO: 363497 - RNA, 24 nt, Human
ugggcuccuucccaggacccgacg

SEQ ID NO: 363498 - RNA, 24 nt, Human
ugggcuccuucccaggacccgacg

SEQ ID NO: 363499 - RNA, 22 nt, Human
uggggcccuuggcuccaggagg

SEQ ID NO: 363500 - RNA, 22 nt, Human
uggggcccuuggcuccaggagg

SEQ ID NO: 363501 - RNA, 18 nt, Human
ugugaguucacagcacug

SEQ ID NO: 363502 - RNA, 18 nt, Human
ugugaguucacagcacug

SEQ ID NO: 363503 - RNA, 21 nt, Human
uguggagggaauaggggaucu

SEQ ID NO: 363504 - RNA, 21 nt, Human
uguggagggaauaggggaucu

SEQ ID NO: 363505 - RNA, 24 nt, Human
uguuguaacauccccccagugggg

SEQ ID NO: 363506 - RNA, 23 nt, Human
uuagcgccuggaagcuggcuggg

SEQ ID NO: 363507 - RNA, 23 nt, Human
uuagcgccuggaagcuggcuggg

SEQ ID NO: 363508 - RNA, 21 nt, Human
uucuccaucuugcuguuuucu

SEQ ID NO: 363509 - RNA, 24 nt, Human
uugcuguuuucuagccuugaguug

SEQ ID NO: 363510 - RNA, 24 nt, Human
aaaaaaagaaaaaaaaaucacaag

SEQ ID NO: 363511 - RNA, 22 nt, Human
aaauaaccaagauugccaacag

SEQ ID NO: 363512 - RNA, 18 nt, Human
aaauacuguaaacuacgg

SEQ ID NO: 363513 - RNA, 21 nt, Human
aagaagcucccgaauaugcca

SEQ ID NO: 363514 - RNA, 20 nt, Human
aagucaucuucagagacaac

SEQ ID NO: 363515 - RNA, 22 nt, Human
agaaauaaccaagauugccaac

SEQ ID NO: 363516 - RNA, 18 nt, Human
agccugauacaaaaagua

SEQ ID NO: 363517 - RNA, 19 nt, Human
agcgccuuucaagaugugu

SEQ ID NO: 363518 - RNA, 21 nt, Human
agggaaaagggagggcggagc

SEQ ID NO: 363519 - RNA, 19 nt, Human
auggcggagaagagaaagg

SEQ ID NO: 363520 - RNA, 24 nt, Human
caacaggcuuuuucuuucuuacuu

SEQ ID NO: 363521 - RNA, 24 nt, Human
cacacggcccgggucggcggcacc

SEQ ID NO: 363522 - RNA, 23 nt, Human
cacagaaaccgagccgucagaga

SEQ ID NO: 363523 - RNA, 25 nt, Human
cacugccagaaaucuuaaagaaaua

SEQ ID NO: 363524 - RNA, 23 nt, Human
caggagggcuaaaagcacggagc

SEQ ID NO: 363525 - RNA, 23 nt, Human
cagggaaaagggagggcggagcg

SEQ ID NO: 363526 - RNA, 21 nt, Human
ccaaaguucacauuccacuuc

SEQ ID NO: 363527 - RNA, 19 nt, Human
cccacuuaacuugcccaaa

SEQ ID NO: 363528 - RNA, 19 nt, Human
cccagaaggaaaggggacc

SEQ ID NO: 363529 - RNA, 19 nt, Human
cggcggcaccggggacagc

SEQ ID NO: 363530 - RNA, 19 nt, Human
cucccaaauaaaaagacuc

SEQ ID NO: 363531 - RNA, 21 nt, Human
cuucuuagcaauaacagucaa

SEQ ID NO: 363532 - RNA, 21 nt, Human
gagaacuacugagcgccuuuc

SEQ ID NO: 363533 - RNA, 19 nt, Human
ggaaguuguaguuauauuu

SEQ ID NO: 363534 - RNA, 19 nt, Human
ggcuauuuuacacagcuaa

SEQ ID NO: 363535 - RNA, 22 nt, Human
ggcucaggagggcuaaaagcac

SEQ ID NO: 363536 - RNA, 25 nt, Human
guuuaaaaaaaagaaaaaaaaaucc

SEQ ID NO: 363537 - RNA, 22 nt, Human
uaaacuacggcacagaaaccga

SEQ ID NO: 363538 - RNA, 23 nt, Human
uaacacuucccuccucuggcucc

SEQ ID NO: 363539 - RNA, 23 nt, Human
uaacagucaauaaacugcuugca

SEQ ID NO: 363540 - RNA, 24 nt, Human
uaagaagcucccgaauaugccaaa

SEQ ID NO: 363541 - RNA, 25 nt, Human
uaagaagcucccgaauaugccaaua

SEQ ID NO: 363542 - RNA, 21 nt, Human
uaagauggucccaaacauuga

SEQ ID NO: 363543 - RNA, 22 nt, Human
uagcacaaguaacacuucccuc

SEQ ID NO: 363544 - RNA, 20 nt, Human
ucaaaaaugcuauaauaaau

SEQ ID NO: 363545 - RNA, 26 nt, Human
ucaugguuuaaaaaaaagaaaaaaaa

SEQ ID NO: 363546 - RNA, 20 nt, Human
uccaucccacacugccagaa

SEQ ID NO: 363547 - RNA, 23 nt, Human
uccauggcggagaagagaaagga

SEQ ID NO: 363548 - RNA, 25 nt, Human
ucccugugcaugugagggcagaagc

SEQ ID NO: 363549 - RNA, 21 nt, Human
ucgaggcgacagcggcuggag

SEQ ID NO: 363550 - RNA, 23 nt, Human
ucgaggcgacagcggcuggagcc

SEQ ID NO: 363551 - RNA, 23 nt, Human
ugaagccugauacaaaaaguaga

SEQ ID NO: 363552 - RNA, 19 nt, Human
ugacaggagggcagaguac

SEQ ID NO: 363553 - RNA, 23 nt, Human
ugagggcagaagcuggugaaacc

SEQ ID NO: 363554 - RNA, 21 nt, Human
ugccaacaggcuuuuucuuuc

SEQ ID NO: 363555 - RNA, 22 nt, Human
ugcuauacgcugcguaugggca

SEQ ID NO: 363556 - RNA, 24 nt, Human
uggaaggcugucccacuuaacuug

SEQ ID NO: 363557 - RNA, 18 nt, Human
uggcggagaagagaaagg

SEQ ID NO: 363558 - RNA, 20 nt, Human
uggcucaggagggcuaaaag

SEQ ID NO: 363559 - RNA, 22 nt, Human
uggcucccaaauaaaaagacuc

SEQ ID NO: 363560 - RNA, 22 nt, Human
ugugcaugugagggcagaagcu

SEQ ID NO: 363561 - RNA, 20 nt, Human
uguguaaacagaauaugagg

SEQ ID NO: 363562 - RNA, 22 nt, Human
uuccacuucauucauccauccc

SEQ ID NO: 363563 - RNA, 18 nt, Human
uugaagccugauacaaaa

SEQ ID NO: 363564 - RNA, 23 nt, Human
uuuaaaaaaaagaaaaaaaaauc

SEQ ID NO: 363565 - RNA, 19 nt, Human
aaaacaucauuuggaaaaa

SEQ ID NO: 363566 - RNA, 18 nt, Human
aacagugugggauggagc

SEQ ID NO: 363567 - RNA, 22 nt, Human
aaggaaaggccacugcaaggug

SEQ ID NO: 363568 - RNA, 22 nt, Human
aauguuagaggcuggacaaacu

SEQ ID NO: 363569 - RNA, 20 nt, Human
acaaggaaaggccacugcaa

SEQ ID NO: 363570 - RNA, 20 nt, Human
acaaugugaaaacguaacac

SEQ ID NO: 363571 - RNA, 21 nt, Human
acauuauaucaccacgauacc

SEQ ID NO: 363572 - RNA, 19 nt, Human
accgccacacacugcucug

SEQ ID NO: 363573 - RNA, 23 nt, Human
acucugaugacaaggaaaggcca

SEQ ID NO: 363574 - RNA, 21 nt, Human
acugcaccacauuauaucacc

SEQ ID NO: 363575 - RNA, 18 nt, Human
acuuuccuuuuagaaggc

SEQ ID NO: 363576 - RNA, 21 nt, Human
agaaauacuccauccagcauc

SEQ ID NO: 363577 - RNA, 19 nt, Human
agagccuggggguguccag

SEQ ID NO: 363578 - RNA, 23 nt, Human
agccacacgcccucaccaacacc

SEQ ID NO: 363579 - RNA, 22 nt, Human
agccacacgcccucaccaacag

SEQ ID NO: 363580 - RNA, 20 nt, Human
agccacggcguggcgcaugc

SEQ ID NO: 363581 - RNA, 21 nt, Human
agccuggggguguccagcuuu

SEQ ID NO: 363582 - RNA, 22 nt, Human
agucgcccgcuuccggaagccc

SEQ ID NO: 363583 - RNA, 19 nt, Human
auauaaguaacugcaccac

SEQ ID NO: 363584 - RNA, 24 nt, Human
auccaggauucucccucccucuca

SEQ ID NO: 363585 - RNA, 23 nt, Human
augauuccccugcuucuuuggua

SEQ ID NO: 363586 - RNA, 22 nt, Human
caaggugggugggaucuggggu

SEQ ID NO: 363587 - RNA, 21 nt, Human
caauacacaguauaugaacaa

SEQ ID NO: 363588 - RNA, 20 nt, Human
cacacgcccucaccaacacc

SEQ ID NO: 363589 - RNA, 19 nt, Human
cacaugucucccacacgcc

SEQ ID NO: 363590 - RNA, 23 nt, Human
cacaugucucccacacgccaaca

SEQ ID NO: 363591 - RNA, 23 nt, Human
cacauuauaucaccacgauaccu

SEQ ID NO: 363592 - RNA, 22 nt, Human
ccaacaccagaccaucccuuua

SEQ ID NO: 363593 - RNA, 24 nt, Human
ccaacaccagaccaucccuuuagc

SEQ ID NO: 363594 - RNA, 21 nt, Human
ccaacaccugugcauucucua

SEQ ID NO: 363595 - RNA, 18 nt, Human
ccaagaaaauguuuguca

SEQ ID NO: 363596 - RNA, 22 nt, Human
ccauauuuuuccucccgaucug

SEQ ID NO: 363597 - RNA, 22 nt, Human
cccacacgccaacaccagacca

SEQ ID NO: 363598 - RNA, 24 nt, Human
ccucagagaaauacuccauccagc

SEQ ID NO: 363599 - RNA, 18 nt, Human
ccuccuggaagggaggca

SEQ ID NO: 363600 - RNA, 21 nt, Human
cucaucccugaagugcuagaa

SEQ ID NO: 363601 - RNA, 21 nt, Human
cucccaacuugaauauguuug

SEQ ID NO: 363602 - RNA, 18 nt, Human
cucccacacgccaacacc

SEQ ID NO: 363603 - RNA, 18 nt, Human
cucccucccucucauccc

SEQ ID NO: 363604 - RNA, 22 nt, Human
cucccucccucucaucccugaa

SEQ ID NO: 363605 - RNA, 22 nt, Human
cugcagggucagguugccuguu

SEQ ID NO: 363606 - RNA, 23 nt, Human
cugcccucggucccgugcggucc

SEQ ID NO: 363607 - RNA, 20 nt, Human
cuugugagcucccgucccgc

SEQ ID NO: 363608 - RNA, 20 nt, Human
gacaaugaaguaccaagaaa

SEQ ID NO: 363609 - RNA, 21 nt, Human
gagacaaggauccguucuuca

SEQ ID NO: 363610 - RNA, 26 nt, Human
gagcacacaugucucccacacgccaa

SEQ ID NO: 363611 - RNA, 24 nt, Human
gagcuggucaugagagagccgugc

SEQ ID NO: 363612 - RNA, 19 nt, Human
gcccggucccggcgcggag

SEQ ID NO: 363613 - RNA, 21 nt, Human
gggugugguggcgguggcacu

SEQ ID NO: 363614 - RNA, 25 nt, Human
guggagcugcgagucgcccgcuucc

SEQ ID NO: 363615 - RNA, 26 nt, Human
guggcacgagcacacaugucucccac

SEQ ID NO: 363616 - RNA, 24 nt, Human
guggcgguggcacugcugguggga

SEQ ID NO: 363617 - RNA, 24 nt, Human
uaaacuucguaaggccaagaguuc

SEQ ID NO: 363618 - RNA, 22 nt, Human
uaacauuugccaucgaaauagu

SEQ ID NO: 363619 - RNA, 21 nt, Human
uacaguauauuagaaggcaaa

SEQ ID NO: 363620 - RNA, 19 nt, Human
uagaaggcaaaaacaucaa

SEQ ID NO: 363621 - RNA, 21 nt, Human
uagaaugucaaagcacagaaa

SEQ ID NO: 363622 - RNA, 18 nt, Human
uagcagcauuuccauagu

SEQ ID NO: 363623 - RNA, 19 nt, Human
uaucaaaaaaagaagagac

SEQ ID NO: 363624 - RNA, 20 nt, Human
uaucaaaaaaagaagagacu

SEQ ID NO: 363625 - RNA, 22 nt, Human
uaucaaaaaaagaagagacucc

SEQ ID NO: 363626 - RNA, 26 nt, Human
uaucaaaaaaagaagagacuccaaug

SEQ ID NO: 363627 - RNA, 22 nt, Human
ucagagaaauacuccauccagc

SEQ ID NO: 363628 - RNA, 21 nt, Human
ucagcgguaaaacacauucca

SEQ ID NO: 363629 - RNA, 18 nt, Human
uccccgaaacuccgagca

SEQ ID NO: 363630 - RNA, 21 nt, Human
uccgcagccugggugaacagu

SEQ ID NO: 363631 - RNA, 22 nt, Human
uccuggaagggaggcagagagc

SEQ ID NO: 363632 - RNA, 23 nt, Human
uccuggaagggaggcagagagcu

SEQ ID NO: 363633 - RNA, 22 nt, Human
ucgcccgcuuccggaagcccgc

SEQ ID NO: 363634 - RNA, 20 nt, Human
ucucccacacgccaacacca

SEQ ID NO: 363635 - RNA, 21 nt, Human
ucuccgcagccugggugaaca

SEQ ID NO: 363636 - RNA, 23 nt, Human
ucuccgcagccugggugaacagu

SEQ ID NO: 363637 - RNA, 18 nt, Human
ucuuugguacuuuccaaa

SEQ ID NO: 363638 - RNA, 19 nt, Human
ugaacagugugggauggag

SEQ ID NO: 363639 - RNA, 21 nt, Human
ugcagggucagguugccuguu

SEQ ID NO: 363640 - RNA, 22 nt, Human
ugcccucggucccgugcggucc

SEQ ID NO: 363641 - RNA, 18 nt, Human
ugcuggacaauguuagag

SEQ ID NO: 363642 - RNA, 21 nt, Human
uggcacugcuggugggagcca

SEQ ID NO: 363643 - RNA, 24 nt, Human
ugggagacagacaaugugaaaacg

SEQ ID NO: 363644 - RNA, 18 nt, Human
ugggauagaaacugacuc

SEQ ID NO: 363645 - RNA, 21 nt, Human
ugggauggaguagagccuggg

SEQ ID NO: 363646 - RNA, 24 nt, Human
uguauguguggcacgagcacacau

SEQ ID NO: 363647 - RNA, 20 nt, Human
ugucaaagcacagaaaaagc

SEQ ID NO: 363648 - RNA, 22 nt, Human
ugucaaagcacagaaaaagccu

SEQ ID NO: 363649 - RNA, 20 nt, Human
ugucaggacaguucauuugg

SEQ ID NO: 363650 - RNA, 21 nt, Human
ugucuccuccugcccucgguc

SEQ ID NO: 363651 - RNA, 19 nt, Human
ugugguggcgguggcacug

SEQ ID NO: 363652 - RNA, 21 nt, Human
uguguggcacgagcacacaug

SEQ ID NO: 363653 - RNA, 22 nt, Human
uguuagaggcuggacaaacugc

SEQ ID NO: 363654 - RNA, 19 nt, Human
uguucugaagcucauuacc

SEQ ID NO: 363655 - RNA, 19 nt, Human
uuccccugcuucuuuggua

SEQ ID NO: 363656 - RNA, 18 nt, Human
uucuuguaaacagugagu

SEQ ID NO: 363657 - RNA, 20 nt, Human
uuuggaaagugggugccggg

SEQ ID NO: 363658 - RNA, 18 nt, Human
uuugguuguguucaguca

SEQ ID NO: 363659 - RNA, 19 nt, Human
uuuuuuuucugaggggcau

SEQ ID NO: 363660 - RNA, 21 nt, Human
uuuuuuuuuucugaggggcau

SEQ ID NO: 363661 - RNA, 20 nt, Human
uuuuuuuuuuucugaggggc

SEQ ID NO: 363662 - RNA, 22 nt, Human
uuuuuuuuuuuuuuucugaggg

SEQ ID NO: 363663 - RNA, 21 nt, Human
aacucccacacccccaguccc

SEQ ID NO: 363664 - RNA, 20 nt, Human
aacuguggggaggacucugg

SEQ ID NO: 363665 - RNA, 18 nt, Human
aauacaaaaaggaaauga

SEQ ID NO: 363666 - RNA, 20 nt, Human
acaaagucggucuccaauaa

SEQ ID NO: 363667 - RNA, 18 nt, Human
accaacucccacaccccc

SEQ ID NO: 363668 - RNA, 19 nt, Human
accaacucccacaccccca

SEQ ID NO: 363669 - RNA, 25 nt, Human
accaacucccacacccccaguccca

SEQ ID NO: 363670 - RNA, 21 nt, Human
accucaucugcugccagggag

SEQ ID NO: 363671 - RNA, 18 nt, Human
acguagcagcugugucuc

SEQ ID NO: 363672 - RNA, 24 nt, Human
acucugcuucaucacuugcuuugc

SEQ ID NO: 363673 - RNA, 25 nt, Human
acucugcuucaucacuugcuuugcu

SEQ ID NO: 363674 - RNA, 25 nt, Human
acuggcuguuuugugggccgcagcu

SEQ ID NO: 363675 - RNA, 26 nt, Human
acuggcuguuuugugggccgcagcuu

SEQ ID NO: 363676 - RNA, 25 nt, Human
agaaagacagggauaacaugugagg

SEQ ID NO: 363677 - RNA, 20 nt, Human
agaauaaagguuugggagug

SEQ ID NO: 363678 - RNA, 19 nt, Human
agacagggaagugcaugug

SEQ ID NO: 363679 - RNA, 18 nt, Human
agacagggauaacaugug

SEQ ID NO: 363680 - RNA, 20 nt, Human
aggaacuguggggaggacuc

SEQ ID NO: 363681 - RNA, 19 nt, Human
aggacucugggaggaagag

SEQ ID NO: 363682 - RNA, 18 nt, Human
aggcuuuuccagaggugg

SEQ ID NO: 363683 - RNA, 22 nt, Human
augggaaugguaugagcauguc

SEQ ID NO: 363684 - RNA, 21 nt, Human
auuacucugagaugagggggu

SEQ ID NO: 363685 - RNA, 21 nt, Human
caacccaggcauccaccucuc

SEQ ID NO: 363686 - RNA, 22 nt, Human
caacucccacacccccaguccc

SEQ ID NO: 363687 - RNA, 25 nt, Human
caacucccacacccccagucccaca

SEQ ID NO: 363688 - RNA, 25 nt, Human
caagcagaaccauuucaaaugcuaa

SEQ ID NO: 363689 - RNA, 21 nt, Human
cacacagcccggguacacagu

SEQ ID NO: 363690 - RNA, 21 nt, Human
cacacccccagucccacacug

SEQ ID NO: 363691 - RNA, 19 nt, Human
caccgagcacacccuggga

SEQ ID NO: 363692 - RNA, 20 nt, Human
cagccccccaguucuggccc

SEQ ID NO: 363693 - RNA, 23 nt, Human
cagcuguuccagaggacaugggg

SEQ ID NO: 363694 - RNA, 19 nt, Human
cagcuugccauccagcuug

SEQ ID NO: 363695 - RNA, 23 nt, Human
caggauccuucaugccaaucugu

SEQ ID NO: 363696 - RNA, 22 nt, Human
caggcauccaccucucuggagg

SEQ ID NO: 363697 - RNA, 21 nt, Human
cagggaagugcaugugaagcc

SEQ ID NO: 363698 - RNA, 20 nt, Human
cauccagaauggccucuagg

SEQ ID NO: 363699 - RNA, 24 nt, Human
cauccagcuuggugacaguggaca

SEQ ID NO: 363700 - RNA, 24 nt, Human
caugacccaugcccagcuguucca

SEQ ID NO: 363701 - RNA, 23 nt, Human
caugcccagcuguuccagaggac

SEQ ID NO: 363702 - RNA, 18 nt, Human
cauuuuccaagcagaacc

SEQ ID NO: 363703 - RNA, 20 nt, Human
ccaacauggcagcauccaga

SEQ ID NO: 363704 - RNA, 22 nt, Human
ccagcuuggugacaguggacau

SEQ ID NO: 363705 - RNA, 22 nt, Human
ccaguucuggcccacacagccc

SEQ ID NO: 363706 - RNA, 19 nt, Human
cccacacagcccggguaca

SEQ ID NO: 363707 - RNA, 19 nt, Human
cccagcuguuccagaggac

SEQ ID NO: 363708 - RNA, 23 nt, Human
cccaugcccagcuguuccagagg

SEQ ID NO: 363709 - RNA, 18 nt, Human
ccccagggcuggugaggg

SEQ ID NO: 363710 - RNA, 22 nt, Human
ccccagucucccaguggcucug

SEQ ID NO: 363711 - RNA, 26 nt, Human
ccccccagggcuggugaggggccccu

SEQ ID NO: 363712 - RNA, 18 nt, Human
ccccugccacucugcagg

SEQ ID NO: 363713 - RNA, 19 nt, Human
ccucaucugcugccaggga

SEQ ID NO: 363714 - RNA, 18 nt, Human
ccuggcugccucaguggg

SEQ ID NO: 363715 - RNA, 23 nt, Human
cgcggaguggcgcggggucgggg

SEQ ID NO: 363716 - RNA, 19 nt, Human
cggcuggccgggcgcggag

SEQ ID NO: 363717 - RNA, 18 nt, Human
cguagucugugcugaugc

SEQ ID NO: 363718 - RNA, 18 nt, Human
cucccacacccccagucc

SEQ ID NO: 363719 - RNA, 21 nt, Human
cugaaaccaggaaagccaacc

SEQ ID NO: 363720 - RNA, 22 nt, Human
cugaaaccaggaaagccaaccc

SEQ ID NO: 363721 - RNA, 20 nt, Human
cugagguuacauugagccuc

SEQ ID NO: 363722 - RNA, 18 nt, Human
cugaugccaaacccaggu

SEQ ID NO: 363723 - RNA, 21 nt, Human
cuuccaguaugcuucuggagg

SEQ ID NO: 363724 - RNA, 23 nt, Human
cuugccauccagcuuggugacag

SEQ ID NO: 363725 - RNA, 21 nt, Human
cuuugcacaaagucggucucc

SEQ ID NO: 363726 - RNA, 25 nt, Human
gaaccauuucaaaugcuaaaacugg

SEQ ID NO: 363727 - RNA, 19 nt, Human
gagaacccugauuagcauu

SEQ ID NO: 363728 - RNA, 18 nt, Human
gagggaagcuccauggag

SEQ ID NO: 363729 - RNA, 21 nt, Human
gagguggcuuuggaaauaagc

SEQ ID NO: 363730 - RNA, 19 nt, Human
gcaaccaaucuucuagaac

SEQ ID NO: 363731 - RNA, 20 nt, Human
gcaagaagggcagauacccu

SEQ ID NO: 363732 - RNA, 18 nt, Human
gcagagacuguacuuccc

SEQ ID NO: 363733 - RNA, 23 nt, Human
gccaugggaaagaccaggguuag

SEQ ID NO: 363734 - RNA, 21 nt, Human
gccgcagcuugccauccagcu

SEQ ID NO: 363735 - RNA, 20 nt, Human
gcggcuggccgggcgcggag

SEQ ID NO: 363736 - RNA, 20 nt, Human
gcucuggcuauuaauaacuc

SEQ ID NO: 363737 - RNA, 24 nt, Human
gcuuggugacaguggacauccacc

SEQ ID NO: 363738 - RNA, 19 nt, Human
ggacagcacuuagaugacc

SEQ ID NO: 363739 - RNA, 24 nt, Human
ggaggaagagguagggaaggcaaa

SEQ ID NO: 363740 - RNA, 21 nt, Human
ggagggaggugagguaagagc

SEQ ID NO: 363741 - RNA, 18 nt, Human
ggcgcggaguggcgcggg

SEQ ID NO: 363742 - RNA, 19 nt, Human
gggccaggugcagagucag

SEQ ID NO: 363743 - RNA, 20 nt, Human
gggcgcggaguggcgcgggg

SEQ ID NO: 363744 - RNA, 23 nt, Human
gggucugagggggagggagccag

SEQ ID NO: 363745 - RNA, 19 nt, Human
gguuucucagucccugcuc

SEQ ID NO: 363746 - RNA, 22 nt, Human
guggcuucuugcuguccccacc

SEQ ID NO: 363747 - RNA, 18 nt, Human
guggggaggacucuggga

SEQ ID NO: 363748 - RNA, 20 nt, Human
uaaauggagggaggugaggu

SEQ ID NO: 363749 - RNA, 18 nt, Human
uacaaaaaggaaaugacg

SEQ ID NO: 363750 - RNA, 24 nt, Human
ucaauggaggacucaacacugaag

SEQ ID NO: 363751 - RNA, 19 nt, Human
ucaccaacucccacacccc

SEQ ID NO: 363752 - RNA, 19 nt, Human
ucagcugaaggcagugccu

SEQ ID NO: 363753 - RNA, 20 nt, Human
ucagucccugcucuggugcc

SEQ ID NO: 363754 - RNA, 21 nt, Human
ucagucccugcucuggugccu

SEQ ID NO: 363755 - RNA, 21 nt, Human
ucagucccugcucuggugccu

SEQ ID NO: 363756 - RNA, 24 nt, Human
ucauuuuccaagcagaaccauuuc

SEQ ID NO: 363757 - RNA, 20 nt, Human
uccagcuuggugacagugga

SEQ ID NO: 363758 - RNA, 21 nt, Human
uccccaccucuccuccugcuc

SEQ ID NO: 363759 - RNA, 22 nt, Human
uccucaguuugaaacguacccc

SEQ ID NO: 363760 - RNA, 20 nt, Human
ucuagguacaggaagugaga

SEQ ID NO: 363761 - RNA, 19 nt, Human
ucucauggcauuggacuuu

SEQ ID NO: 363762 - RNA, 25 nt, Human
ucuucugccucucuacuccucggaa

SEQ ID NO: 363763 - RNA, 18 nt, Human
ugaaacguaccccagaaa

SEQ ID NO: 363764 - RNA, 18 nt, Human
ugacuggcuguuuugugg

SEQ ID NO: 363765 - RNA, 21 nt, Human
ugagcaugucugaaaccagga

SEQ ID NO: 363766 - RNA, 22 nt, Human
ugagggggagggagccagcccc

SEQ ID NO: 363767 - RNA, 18 nt, Human
ugccagggagauguggga

SEQ ID NO: 363768 - RNA, 22 nt, Human
ugccuggcaagaagggcagaua

SEQ ID NO: 363769 - RNA, 22 nt, Human
ugcuuugcacaaagucggucuc

SEQ ID NO: 363770 - RNA, 27 nt, Human
uggaagagucaagguccacucucugga

SEQ ID NO: 363771 - RNA, 21 nt, Human
uggaggcagagaagaggcuga

SEQ ID NO: 363772 - RNA, 19 nt, Human
uggcaaagggccaggugca

SEQ ID NO: 363773 - RNA, 19 nt, Human
uggcagcauccagaauggc

SEQ ID NO: 363774 - RNA, 22 nt, Human
ugggaggaagagguagggaagg

SEQ ID NO: 363775 - RNA, 18 nt, Human
uguuccagaggacauggg

SEQ ID NO: 363776 - RNA, 19 nt, Human
uucugccucucuacuccuc

SEQ ID NO: 363777 - RNA, 18 nt, Human
uuggacauugacauaaau

SEQ ID NO: 363778 - RNA, 21 nt, Human
aaagcagggugaggcauugcc

SEQ ID NO: 363779 - RNA, 21 nt, Human
aaauccauugcauuacaaaaa

SEQ ID NO: 363780 - RNA, 21 nt, Human
aacccuugagcucagcaaucc

SEQ ID NO: 363781 - RNA, 19 nt, Human
aaccugcacguugugcaca

SEQ ID NO: 363782 - RNA, 24 nt, Human
aagaacgauuccuaaauagaauaa

SEQ ID NO: 363783 - RNA, 19 nt, Human
aagaagauguaggcuucuc

SEQ ID NO: 363784 - RNA, 18 nt, Human
aagcaaacaaaaaaauau

SEQ ID NO: 363785 - RNA, 28 nt, Human
acacaccagggccuguuguggggugggg

SEQ ID NO: 363786 - RNA, 22 nt, Human
acaccaacauggcacauguaua

SEQ ID NO: 363787 - RNA, 23 nt, Human
agaacaaucugaguuauguccuc

SEQ ID NO: 363788 - RNA, 18 nt, Human
agaagacgggugauuucu

SEQ ID NO: 363789 - RNA, 21 nt, Human
agaaggagauguaggaaguac

SEQ ID NO: 363790 - RNA, 20 nt, Human
agacaagaaaaaguuaucua

SEQ ID NO: 363791 - RNA, 22 nt, Human
agacaagaaaaaguuaucuauu

SEQ ID NO: 363792 - RNA, 24 nt, Human
agcaaugagggaaauauccagaaa

SEQ ID NO: 363793 - RNA, 22 nt, Human
aguaagugcugaaaaugaacaa

SEQ ID NO: 363794 - RNA, 22 nt, Human
auaggaacagcuccggugcaca

SEQ ID NO: 363795 - RNA, 20 nt, Human
auaugucuuacuucuacccu

SEQ ID NO: 363796 - RNA, 21 nt, Human
aucuucuuuagggggcuguua

SEQ ID NO: 363797 - RNA, 25 nt, Human
cacccuuacuucgaugaauuaaggg

SEQ ID NO: 363798 - RNA, 26 nt, Human
caccgugcgcaagccaaagcaggguu

SEQ ID NO: 363799 - RNA, 21 nt, Human
cagaagacgggugauuucugc

SEQ ID NO: 363800 - RNA, 20 nt, Human
caggaacaaggggagaggag

SEQ ID NO: 363801 - RNA, 26 nt, Human
caggcuuaaaaaacggcgcgccacaa

SEQ ID NO: 363802 - RNA, 22 nt, Human
cagggaguucccuuucugaguc

SEQ ID NO: 363803 - RNA, 25 nt, Human
cauagcaggcacuucacaaagcacc

SEQ ID NO: 363804 - RNA, 22 nt, Human
cauaguaggaugcucugcaacc

SEQ ID NO: 363805 - RNA, 19 nt, Human
cccuccuaggaaaacucaa

SEQ ID NO: 363806 - RNA, 21 nt, Human
ccgugcgcaagccaaagcagg

SEQ ID NO: 363807 - RNA, 20 nt, Human
ccugcacguugugcacaugu

SEQ ID NO: 363808 - RNA, 18 nt, Human
cggugcacagcucccagc

SEQ ID NO: 363809 - RNA, 22 nt, Human
cuacccuuucaagcaaacaaaa

SEQ ID NO: 363810 - RNA, 18 nt, Human
cuacgcccauggagucuc

SEQ ID NO: 363811 - RNA, 19 nt, Human
cucagcaaucccaguugug

SEQ ID NO: 363812 - RNA, 25 nt, Human
cucagcaaugagggaaauauccaga

SEQ ID NO: 363813 - RNA, 19 nt, Human
cucccacccgaauacugcg

SEQ ID NO: 363814 - RNA, 22 nt, Human
cugcaacccuugagcucagcaa

SEQ ID NO: 363815 - RNA, 18 nt, Human
cuucaaacaaagaauagu

SEQ ID NO: 363816 - RNA, 18 nt, Human
cuugucaggaagaugaug

SEQ ID NO: 363817 - RNA, 24 nt, Human
gaaagguaaauuugcucauaaaaa

SEQ ID NO: 363818 - RNA, 21 nt, Human
gaacaacauaauugaaaucca

SEQ ID NO: 363819 - RNA, 19 nt, Human
gaacuuggagagaaaggua

SEQ ID NO: 363820 - RNA, 22 nt, Human
gcaggcacuucacaaagcaccg

SEQ ID NO: 363821 - RNA, 23 nt, Human
gcgcaccgugcgcaagccaaagc

SEQ ID NO: 363822 - RNA, 19 nt, Human
ggacagaguauuuucaggg

SEQ ID NO: 363823 - RNA, 25 nt, Human
gggagaacuuggagagaaagguaaa

SEQ ID NO: 363824 - RNA, 18 nt, Human
gggagggauagcauuagg

SEQ ID NO: 363825 - RNA, 24 nt, Human
ggggaacaucacacaccagggccu

SEQ ID NO: 363826 - RNA, 19 nt, Human
gggggaaggggggagggau

SEQ ID NO: 363827 - RNA, 20 nt, Human
ggggugggggaaggggggag

SEQ ID NO: 363828 - RNA, 23 nt, Human
ggggugggggaaggggggaggga

SEQ ID NO: 363829 - RNA, 18 nt, Human
ggugcgcgcaccgugcgc

SEQ ID NO: 363830 - RNA, 18 nt, Human
gugcagcacaccaacaug

SEQ ID NO: 363831 - RNA, 18 nt, Human
guuucucaggguuuccaa

SEQ ID NO: 363832 - RNA, 22 nt, Human
uaaaaaacggcgcgccacaaga

SEQ ID NO: 363833 - RNA, 21 nt, Human
uaaaaauaaagcuggcucuaa

SEQ ID NO: 363834 - RNA, 22 nt, Human
uaaagaacgauuccuaaauaga

SEQ ID NO: 363835 - RNA, 23 nt, Human
uaaagaacgauuccuaaauagaa

SEQ ID NO: 363836 - RNA, 25 nt, Human
uaaagcaucauucuuuugaaguaag

SEQ ID NO: 363837 - RNA, 19 nt, Human
uaacauagcaggcacuuca

SEQ ID NO: 363838 - RNA, 21 nt, Human
uaaggcauauaagcccaggac

SEQ ID NO: 363839 - RNA, 23 nt, Human
uaagugcugaaaaugaacaacau

SEQ ID NO: 363840 - RNA, 20 nt, Human
uacagauuagaaaaucaugg

SEQ ID NO: 363841 - RNA, 22 nt, Human
uacccuuuguaaagagugugca

SEQ ID NO: 363842 - RNA, 24 nt, Human
uacugcgcucuuccaacaggcuua

SEQ ID NO: 363843 - RNA, 18 nt, Human
uagaaggagauguaggaa

SEQ ID NO: 363844 - RNA, 19 nt, Human
uagaaugaauaagaagagu

SEQ ID NO: 363845 - RNA, 23 nt, Human
uagcaggcacuucacaaagcacc

SEQ ID NO: 363846 - RNA, 21 nt, Human
uagucccauuaaaaucaggaa

SEQ ID NO: 363847 - RNA, 18 nt, Human
ucaaagaaaggggugacu

SEQ ID NO: 363848 - RNA, 27 nt, Human
ucgagguaguuuuucuuggaagcccau

SEQ ID NO: 363849 - RNA, 22 nt, Human
ucugcauucucagcaaugaggg

SEQ ID NO: 363850 - RNA, 23 nt, Human
ucuucacauaacagaaugagaau

SEQ ID NO: 363851 - RNA, 27 nt, Human
ugaaaaugaacaacauaauugaaaucc

SEQ ID NO: 363852 - RNA, 19 nt, Human
ugaugaguuaaugggugca

SEQ ID NO: 363853 - RNA, 24 nt, Human
ugaugauaguaacauagcaggcac

SEQ ID NO: 363854 - RNA, 21 nt, Human
ugcaaagauuucuacagcacc

SEQ ID NO: 363855 - RNA, 25 nt, Human
ugcgcaagccaaagcagggugaggc

SEQ ID NO: 363856 - RNA, 20 nt, Human
uggaagcccauagcaauaug

SEQ ID NO: 363857 - RNA, 21 nt, Human
uggaagcgauaaacuugaaua

SEQ ID NO: 363858 - RNA, 19 nt, Human
uggcacauguauacauaug

SEQ ID NO: 363859 - RNA, 18 nt, Human
ugggaagcccaagggguc

SEQ ID NO: 363860 - RNA, 21 nt, Human
ugggggaaggggggagggaua

SEQ ID NO: 363861 - RNA, 19 nt, Human
uggggugggggaagggggg

SEQ ID NO: 363862 - RNA, 21 nt, Human
uggggugggggaaggggggag

SEQ ID NO: 363863 - RNA, 22 nt, Human
uggggugggggaaggggggagg

SEQ ID NO: 363864 - RNA, 27 nt, Human
uguauacauauguaacaaaccugcacg

SEQ ID NO: 363865 - RNA, 21 nt, Human
ugucuuacuucuacccuuuca

SEQ ID NO: 363866 - RNA, 20 nt, Human
uguggggugggggaaggggg

SEQ ID NO: 363867 - RNA, 18 nt, Human
uguuguggggugggggaa

SEQ ID NO: 363868 - RNA, 21 nt, Human
uuaaaaaacggcgcgccacaa

SEQ ID NO: 363869 - RNA, 22 nt, Human
uuagaaauaucauuagugaaca

SEQ ID NO: 363870 - RNA, 19 nt, Human
uucaagcaaacaaaaaaau

SEQ ID NO: 363871 - RNA, 24 nt, Human
aaaaacagugucacagaacuaaac

SEQ ID NO: 363872 - RNA, 18 nt, Human
aaacaaaacaagggcuga

SEQ ID NO: 363873 - RNA, 20 nt, Human
aaacauuauccacacugccc

SEQ ID NO: 363874 - RNA, 21 nt, Human
aaacauuauccacacugcccc

SEQ ID NO: 363875 - RNA, 27 nt, Human
aacaacucuuugguucagacuagcaag

SEQ ID NO: 363876 - RNA, 21 nt, Human
aacacagcaaaugcccaaaca

SEQ ID NO: 363877 - RNA, 21 nt, Human
aacuucuguaccucccuuuuc

SEQ ID NO: 363878 - RNA, 19 nt, Human
aaggaaauaaccaggccag

SEQ ID NO: 363879 - RNA, 18 nt, Human
aaggacucagaggaggua

SEQ ID NO: 363880 - RNA, 18 nt, Human
aaguguuugucucccugg

SEQ ID NO: 363881 - RNA, 19 nt, Human
acaaaacaagggcugaugu

SEQ ID NO: 363882 - RNA, 19 nt, Human
acacagacccaggcaccca

SEQ ID NO: 363883 - RNA, 24 nt, Human
acccccagcacagggccaggaagc

SEQ ID NO: 363884 - RNA, 20 nt, Human
acugcuguggcugcuacucu

SEQ ID NO: 363885 - RNA, 19 nt, Human
agaaauggccaacacagca

SEQ ID NO: 363886 - RNA, 24 nt, Human
agacacggggucaguucuucuugg

SEQ ID NO: 363887 - RNA, 19 nt, Human
agacagcagcaggugagcc

SEQ ID NO: 363888 - RNA, 23 nt, Human
agcugaguguacccugaccgcac

SEQ ID NO: 363889 - RNA, 19 nt, Human
aggacucagaggagguacu

SEQ ID NO: 363890 - RNA, 18 nt, Human
aggcaagggccacaugug

SEQ ID NO: 363891 - RNA, 22 nt, Human
aggcaucggagaaccaggugcc

SEQ ID NO: 363892 - RNA, 22 nt, Human
aggugacacagacccaggcacc

SEQ ID NO: 363893 - RNA, 25 nt, Human
aggugccacccccaaaaaacagugu

SEQ ID NO: 363894 - RNA, 18 nt, Human
agguggggugguaauagg

SEQ ID NO: 363895 - RNA, 18 nt, Human
agguggggugguaauagg

SEQ ID NO: 363896 - RNA, 23 nt, Human
agucuugcucaaacucagcccca

SEQ ID NO: 363897 - RNA, 23 nt, Human
agugcagaccugggcuggggccc

SEQ ID NO: 363898 - RNA, 22 nt, Human
auaaacauccuaaaagccucau

SEQ ID NO: 363899 - RNA, 22 nt, Human
auggagggcagccuggcccacu

SEQ ID NO: 363900 - RNA, 24 nt, Human
caaaaaacagugucacagaacuaa

SEQ ID NO: 363901 - RNA, 21 nt, Human
caaacccucuccuccccgcaa

SEQ ID NO: 363902 - RNA, 18 nt, Human
caaacucagccccaagua

SEQ ID NO: 363903 - RNA, 23 nt, Human
caaacucagccccaaguaucucc

SEQ ID NO: 363904 - RNA, 23 nt, Human
cacagaacuaaacauuauccacc

SEQ ID NO: 363905 - RNA, 19 nt, Human
cacuuugcuauccuagggc

SEQ ID NO: 363906 - RNA, 20 nt, Human
cagcauggagggcagccugg

SEQ ID NO: 363907 - RNA, 23 nt, Human
cagcuccguccucccugugggag

SEQ ID NO: 363908 - RNA, 21 nt, Human
caggguccagcucagugcucu

SEQ ID NO: 363909 - RNA, 19 nt, Human
caguaggucccagcgaggu

SEQ ID NO: 363910 - RNA, 18 nt, Human
cagugcucugccuccagg

SEQ ID NO: 363911 - RNA, 21 nt, Human
ccaaccagcaaaauaaaaagg

SEQ ID NO: 363912 - RNA, 25 nt, Human
ccagaauggaacacagggcucuuga

SEQ ID NO: 363913 - RNA, 20 nt, Human
ccaggacagcuggcuggcug

SEQ ID NO: 363914 - RNA, 24 nt, Human
ccaggccagauaagacuagccaua

SEQ ID NO: 363915 - RNA, 18 nt, Human
ccagggcccagacuugcc

SEQ ID NO: 363916 - RNA, 21 nt, Human
cccacccccagcacagggcca

SEQ ID NO: 363917 - RNA, 20 nt, Human
cccaggagaaaauagagaaa

SEQ ID NO: 363918 - RNA, 20 nt, Human
cccagggcccagacuugccc

SEQ ID NO: 363919 - RNA, 18 nt, Human
ccccagcuuccccccacc

SEQ ID NO: 363920 - RNA, 19 nt, Human
ccccagcuuccccccaccc

SEQ ID NO: 363921 - RNA, 19 nt, Human
ccccagggcccagacuugc

SEQ ID NO: 363922 - RNA, 21 nt, Human
ccccagggcccagacuugccc

SEQ ID NO: 363923 - RNA, 19 nt, Human
cccgcaaggaaauaaccag

SEQ ID NO: 363924 - RNA, 23 nt, Human
cccuaaggcagguguugggccuc

SEQ ID NO: 363925 - RNA, 22 nt, Human
cccugucugcugccucccgagc

SEQ ID NO: 363926 - RNA, 23 nt, Human
ccgcaaggaaauaaccaggccag

SEQ ID NO: 363927 - RNA, 23 nt, Human
ccucccuaccccagggcccagac

SEQ ID NO: 363928 - RNA, 18 nt, Human
ccucccuuuucuuuuauc

SEQ ID NO: 363929 - RNA, 19 nt, Human
ccugaggccagcuccgucc

SEQ ID NO: 363930 - RNA, 22 nt, Human
ccugagucucccucccuacccc

SEQ ID NO: 363931 - RNA, 19 nt, Human
ccugggccugacaccagcc

SEQ ID NO: 363932 - RNA, 24 nt, Human
ccuggucacaugugugaaaucuug

SEQ ID NO: 363933 - RNA, 19 nt, Human
cggggucaguucuucuugg

SEQ ID NO: 363934 - RNA, 21 nt, Human
cucauuacacagagcugagcu

SEQ ID NO: 363935 - RNA, 18 nt, Human
cugcugccucccgagcag

SEQ ID NO: 363936 - RNA, 26 nt, Human
cuguaccucccuuuucuuuuaucaug

SEQ ID NO: 363937 - RNA, 22 nt, Human
gaacacagggcucuugacaccc

SEQ ID NO: 363938 - RNA, 24 nt, Human
gaaccaggugccacccccaaaaaa

SEQ ID NO: 363939 - RNA, 25 nt, Human
gagcaguaggucccagcgagguggg

SEQ ID NO: 363940 - RNA, 18 nt, Human
gagguacugcuguggcug

SEQ ID NO: 363941 - RNA, 19 nt, Human
gcccccagcuuccccccac

SEQ ID NO: 363942 - RNA, 22 nt, Human
gcccccagcuuccccccacccc

SEQ ID NO: 363943 - RNA, 24 nt, Human
gcugcuggaguuggggaggagagc

SEQ ID NO: 363944 - RNA, 28 nt, Human
gcuggagugcagugagcuccagccccua

SEQ ID NO: 363945 - RNA, 19 nt, Human
gcuggggcccagcauggag

SEQ ID NO: 363946 - RNA, 22 nt, Human
ggaccuggagcuuagcagggga

SEQ ID NO: 363947 - RNA, 19 nt, Human
ggagauggcuaaggcucaa

SEQ ID NO: 363948 - RNA, 19 nt, Human
ggagguacugcuguggcug

SEQ ID NO: 363949 - RNA, 21 nt, Human
ggagucuacccaggguccagc

SEQ ID NO: 363950 - RNA, 24 nt, Human
ggccagauaagacuagccauaaaa

SEQ ID NO: 363951 - RNA, 19 nt, Human
gggagucuugcucaaacuc

SEQ ID NO: 363952 - RNA, 19 nt, Human
gggcugggagcagauuagc

SEQ ID NO: 363953 - RNA, 20 nt, Human
gucucaaagcccuggcacug

SEQ ID NO: 363954 - RNA, 22 nt, Human
gugcagaccugggcuggggccc

SEQ ID NO: 363955 - RNA, 26 nt, Human
guggccccuggucacaugugugaaau

SEQ ID NO: 363956 - RNA, 22 nt, Human
guggcucccugagggcaagggc

SEQ ID NO: 363957 - RNA, 19 nt, Human
uaaaacaaaacaagggcug

SEQ ID NO: 363958 - RNA, 23 nt, Human
uaaacauuuacagauaccaacca

SEQ ID NO: 363959 - RNA, 21 nt, Human
uaagacacgagcaagccauag

SEQ ID NO: 363960 - RNA, 19 nt, Human
uacacagagcugagcuuua

SEQ ID NO: 363961 - RNA, 18 nt, Human
uacagauaccaaccagca

SEQ ID NO: 363962 - RNA, 18 nt, Human
uagcaggggagaggaggc

SEQ ID NO: 363963 - RNA, 22 nt, Human
uauaaacauccuaaaagccuca

SEQ ID NO: 363964 - RNA, 22 nt, Human
uauccacacugccccaggugac

SEQ ID NO: 363965 - RNA, 19 nt, Human
ucagaggagguacugcugu

SEQ ID NO: 363966 - RNA, 21 nt, Human
ucaggaccuggagcuuagcaa

SEQ ID NO: 363967 - RNA, 19 nt, Human
ucagugcucugccuccagg

SEQ ID NO: 363968 - RNA, 23 nt, Human
ucccagcacuacaguccugggcc

SEQ ID NO: 363969 - RNA, 19 nt, Human
uccccccacccccagcaca

SEQ ID NO: 363970 - RNA, 21 nt, Human
ucccuaccccagggcccagau

SEQ ID NO: 363971 - RNA, 20 nt, Human
ucccugcaaaaccugggaaa

SEQ ID NO: 363972 - RNA, 21 nt, Human
ucccugcaaaaccugggaaac

SEQ ID NO: 363973 - RNA, 21 nt, Human
uccugggccugacaccagccc

SEQ ID NO: 363974 - RNA, 23 nt, Human
ucuccaaguguuugucucccugg

SEQ ID NO: 363975 - RNA, 25 nt, Human
ucuuggccagguggggccccaagac

SEQ ID NO: 363976 - RNA, 21 nt, Human
ugaaauucuuggcguugauag

SEQ ID NO: 363977 - RNA, 19 nt, Human
ugaaggcccugccaagucu

SEQ ID NO: 363978 - RNA, 22 nt, Human
ugaaggcccugccaagucuggg

SEQ ID NO: 363979 - RNA, 24 nt, Human
ugaaggcccugccaagucugggug

SEQ ID NO: 363980 - RNA, 20 nt, Human
ugacacagacccaggcaccc

SEQ ID NO: 363981 - RNA, 19 nt, Human
ugaggccagcuccguccuc

SEQ ID NO: 363982 - RNA, 27 nt, Human
ugcaauaacggugggagcuccagacac

SEQ ID NO: 363983 - RNA, 22 nt, Human
ugccuccagggggcgccaaagg

SEQ ID NO: 363984 - RNA, 22 nt, Human
ugccucccgagcaguagguccc

SEQ ID NO: 363985 - RNA, 21 nt, Human
ugcugguggcucccugucugc

SEQ ID NO: 363986 - RNA, 19 nt, Human
uggagugcagugagcucca

SEQ ID NO: 363987 - RNA, 21 nt, Human
uggccaacacagcaaaugccc

SEQ ID NO: 363988 - RNA, 18 nt, Human
uggccccaggacagcugg

SEQ ID NO: 363989 - RNA, 18 nt, Human
ugggaaagucucaaagcc

SEQ ID NO: 363990 - RNA, 21 nt, Human
ugggagcagauuagcaaaccc

SEQ ID NO: 363991 - RNA, 21 nt, Human
ugggcaaaggacucagaggag

SEQ ID NO: 363992 - RNA, 20 nt, Human
ugggcugggagcagauuagc

SEQ ID NO: 363993 - RNA, 24 nt, Human
uggggaggagagcugaguguaccc

SEQ ID NO: 363994 - RNA, 22 nt, Human
uggggcccccacacaggccucu

SEQ ID NO: 363995 - RNA, 18 nt, Human
ugucacagaacuaaacau

SEQ ID NO: 363996 - RNA, 23 nt, Human
ugucacagaacuaaacauuaucc

SEQ ID NO: 363997 - RNA, 20 nt, Human
uguccagacacagguuaggg

SEQ ID NO: 363998 - RNA, 23 nt, Human
ugugggagucuacccagggucca

SEQ ID NO: 363999 - RNA, 22 nt, Human
ugugugaaaucuuggcaauguu

SEQ ID NO: 364000 - RNA, 21 nt, Human
uguuugucucccugggucacu

SEQ ID NO: 364001 - RNA, 24 nt, Human
uuaaacauuuacagauaccaacca

SEQ ID NO: 364002 - RNA, 22 nt, Human
uuccagacuuuuuuucccugca

SEQ ID NO: 364003 - RNA, 27 nt, Human
uucccugcaaaaccugggaaacaagag

SEQ ID NO: 364004 - RNA, 22 nt, Human
uugaaggcccugccaagucugg

SEQ ID NO: 364005 - RNA, 24 nt, Human
uuucccugcaaaaccugggaaaca

SEQ ID NO: 364006 - RNA, 23 nt, Human
uuugaaauucuuggcguugauag

SEQ ID NO: 364007 - RNA, 22 nt, Human
aagaauacagagaagugaaggc

SEQ ID NO: 364008 - RNA, 26 nt, Human
acacgacaucgccgcaaaacaucucu

SEQ ID NO: 364009 - RNA, 21 nt, Human
acuccaucuucaucccuccaa

SEQ ID NO: 364010 - RNA, 25 nt, Human
cagaggauaacuccaucuucauccc

SEQ ID NO: 364011 - RNA, 18 nt, Human
caucgccgcaaaacaucu

SEQ ID NO: 364012 - RNA, 22 nt, Human
caucuucaucccuccaacacga

SEQ ID NO: 364013 - RNA, 22 nt, Human
ccagaccuguuuuggggugcag

SEQ ID NO: 364014 - RNA, 21 nt, Human
ccuccaacacgacaucgccgc

SEQ ID NO: 364015 - RNA, 24 nt, Human
cucauggccguggccagaccuguu

SEQ ID NO: 364016 - RNA, 21 nt, Human
uaauuuggggguaggcaagua

SEQ ID NO: 364017 - RNA, 21 nt, Human
ucugcagaggauaacuccauc

SEQ ID NO: 364018 - RNA, 22 nt, Human
uuuuuuuuuuuuuuuuuucuuu

SEQ ID NO: 364019 - RNA, 25 nt, Human
uuuuuuuuuuuuuuuuuucuuuagg

SEQ ID NO: 364020 - RNA, 19 nt, Human
aacucgccuccacgcucug

SEQ ID NO: 364021 - RNA, 20 nt, Human
acaggcuccuguagggcccg

SEQ ID NO: 364022 - RNA, 24 nt, Human
aggagucuuugacuaaaggggcuc

SEQ ID NO: 364023 - RNA, 19 nt, Human
aggcaacuccuuuccagga

SEQ ID NO: 364024 - RNA, 20 nt, Human
aggcccuugaagucgcccaa

SEQ ID NO: 364025 - RNA, 23 nt, Human
agggcagggagaagaggagugag

SEQ ID NO: 364026 - RNA, 26 nt, Human
cacgcucugauuggagaagaggcaac

SEQ ID NO: 364027 - RNA, 23 nt, Human
cauucucauuucacagaugaggg

SEQ ID NO: 364028 - RNA, 18 nt, Human
cauuuauuuggccggugc

SEQ ID NO: 364029 - RNA, 20 nt, Human
ccaggcccuugaagucgccc

SEQ ID NO: 364030 - RNA, 25 nt, Human
cccggguaagguggggaaucugauc

SEQ ID NO: 364031 - RNA, 20 nt, Human
cccuugaagucgcccaacuc

SEQ ID NO: 364032 - RNA, 18 nt, Human
gagauuggaacccagucu

SEQ ID NO: 364033 - RNA, 20 nt, Human
gcagggagaagaggagugag

SEQ ID NO: 364034 - RNA, 26 nt, Human
gccacgcuguccacucggccacggcu

SEQ ID NO: 364035 - RNA, 20 nt, Human
gcccuggggggugggucacg

SEQ ID NO: 364036 - RNA, 19 nt, Human
ggcguggcugagugaaggu

SEQ ID NO: 364037 - RNA, 21 nt, Human
ggcugagcggacugcugaccu

SEQ ID NO: 364038 - RNA, 23 nt, Human
gggcauggccaucugcacaggcu

SEQ ID NO: 364039 - RNA, 19 nt, Human
uaagguggggaaucugauc

SEQ ID NO: 364040 - RNA, 20 nt, Human
ucagggcagggagaagagga

SEQ ID NO: 364041 - RNA, 22 nt, Human
uccaggagucuuugacuaaagg

SEQ ID NO: 364042 - RNA, 21 nt, Human
ucucauuucacagaugagggc

SEQ ID NO: 364043 - RNA, 22 nt, Human
ugagccuggcagggaaagggag

SEQ ID NO: 364044 - RNA, 23 nt, Human
ugaucagggcagggagaagagga

SEQ ID NO: 364045 - RNA, 24 nt, Human
uggcagggaaagggaggggaaccg

SEQ ID NO: 364046 - RNA, 18 nt, Human
uggcguggcugagugaag

SEQ ID NO: 364047 - RNA, 23 nt, Human
uuggagaagaggcaacuccuuuc

SEQ ID NO: 364048 - RNA, 25 nt, Human
uuuuuuuuuuuuuuuuuuuaucugg

SEQ ID NO: 364049 - RNA, 22 nt, Human
aaagaggccagggcaacgggcc

SEQ ID NO: 364050 - RNA, 18 nt, Human
aagagaaggugggccagg

SEQ ID NO: 364051 - RNA, 19 nt, Human
aaggggacagcaggcagag

SEQ ID NO: 364052 - RNA, 23 nt, Human
aaguggcagugcggagucaagca

SEQ ID NO: 364053 - RNA, 27 nt, Human
aaugccucucuggcccagcgcugugug

SEQ ID NO: 364054 - RNA, 21 nt, Human
acaaaggcuggcccagggcaa

SEQ ID NO: 364055 - RNA, 21 nt, Human
acagaagaagucucuuccucu

SEQ ID NO: 364056 - RNA, 19 nt, Human
acucauaggcuggcagggu

SEQ ID NO: 364057 - RNA, 21 nt, Human
agaaggugggccaggggaucc

SEQ ID NO: 364058 - RNA, 21 nt, Human
agaccuccagcaucuccccag

SEQ ID NO: 364059 - RNA, 23 nt, Human
agagaacagaagaagucucuucc

SEQ ID NO: 364060 - RNA, 22 nt, Human
agcaucuccccagagaggcagc

SEQ ID NO: 364061 - RNA, 25 nt, Human
agccacgagggcagggcagggugau

SEQ ID NO: 364062 - RNA, 19 nt, Human
aggcuguguggccuggccc

SEQ ID NO: 364063 - RNA, 19 nt, Human
agguggcugaggccuggag

SEQ ID NO: 364064 - RNA, 19 nt, Human
aguagggaauguggagacu

SEQ ID NO: 364065 - RNA, 18 nt, Human
agugugaccggugacacu

SEQ ID NO: 364066 - RNA, 23 nt, Human
aucucaggcuggcccuggacccc

SEQ ID NO: 364067 - RNA, 20 nt, Human
caacccucugggaacucaua

SEQ ID NO: 364068 - RNA, 24 nt, Human
caaggccagcucguuccccugggc

SEQ ID NO: 364069 - RNA, 25 nt, Human
caaggccagcucguuccccugggcc

SEQ ID NO: 364070 - RNA, 21 nt, Human
cacccguggcuccugccucca

SEQ ID NO: 364071 - RNA, 23 nt, Human
caccuggaggggcagcccugggg

SEQ ID NO: 364072 - RNA, 20 nt, Human
cagagggcagccucugggcc

SEQ ID NO: 364073 - RNA, 23 nt, Human
cagagggcagccucugggccucu

SEQ ID NO: 364074 - RNA, 25 nt, Human
cagcugcuccagaccucccgggaaa

SEQ ID NO: 364075 - RNA, 19 nt, Human
cauggggaggggccagggg

SEQ ID NO: 364076 - RNA, 20 nt, Human
ccacuucacaaaggcuggcc

SEQ ID NO: 364077 - RNA, 23 nt, Human
ccagagaggcagcugcuccagac

SEQ ID NO: 364078 - RNA, 20 nt, Human
ccagcggcuaggcuucacag

SEQ ID NO: 364079 - RNA, 23 nt, Human
ccccacccguggcuccugccucc

SEQ ID NO: 364080 - RNA, 19 nt, Human
ccccugcgccucccaggcu

SEQ ID NO: 364081 - RNA, 23 nt, Human
ccccugugugcccaccucccaga

SEQ ID NO: 364082 - RNA, 23 nt, Human
cccgcguugaggcaggcgcagac

SEQ ID NO: 364083 - RNA, 18 nt, Human
cccucugcucuccgaagc

SEQ ID NO: 364084 - RNA, 18 nt, Human
cccugaggccgcgugagg

SEQ ID NO: 364085 - RNA, 23 nt, Human
cccuggaccccuggaaggggggc

SEQ ID NO: 364086 - RNA, 18 nt, Human
cccugggggagagugggg

SEQ ID NO: 364087 - RNA, 21 nt, Human
cccugugugcccaccucccag

SEQ ID NO: 364088 - RNA, 18 nt, Human
cccuucggugccccugug

SEQ ID NO: 364089 - RNA, 23 nt, Human
ccguggcuccugccuccacucac

SEQ ID NO: 364090 - RNA, 22 nt, Human
ccuaaguuuuucuccuggcggc

SEQ ID NO: 364091 - RNA, 18 nt, Human
ccuccacucaccugcugu

SEQ ID NO: 364092 - RNA, 19 nt, Human
ccucccaggcuguguggcc

SEQ ID NO: 364093 - RNA, 24 nt, Human
ccucccaggcuguguggccuggcc

SEQ ID NO: 364094 - RNA, 21 nt, Human
ccucugggaacucauaggcug

SEQ ID NO: 364095 - RNA, 22 nt, Human
ccucugggccucuggaaaugga

SEQ ID NO: 364096 - RNA, 19 nt, Human
ccugaccccucugcucucc

SEQ ID NO: 364097 - RNA, 18 nt, Human
ccugcucugugccagguc

SEQ ID NO: 364098 - RNA, 21 nt, Human
ccugcuggugucacuuggggu

SEQ ID NO: 364099 - RNA, 18 nt, Human
ccuggccccacccguggc

SEQ ID NO: 364100 - RNA, 23 nt, Human
ccuggccccacccguggcuccug

SEQ ID NO: 364101 - RNA, 19 nt, Human
cggcuaggcuucacagacu

SEQ ID NO: 364102 - RNA, 22 nt, Human
cgggaaagcugaauuuggaaag

SEQ ID NO: 364103 - RNA, 20 nt, Human
cguggcuccugccuccacuc

SEQ ID NO: 364104 - RNA, 22 nt, Human
cucaaggggcccagaagagggg

SEQ ID NO: 364105 - RNA, 22 nt, Human
cuccaacugggcccugaggccc

SEQ ID NO: 364106 - RNA, 28 nt, Human
cuccagaccucccgggaaagcugaauuu

SEQ ID NO: 364107 - RNA, 21 nt, Human
cuccagcccagcggcuaggcu

SEQ ID NO: 364108 - RNA, 23 nt, Human
cucuccgaagccacgagggcagg

SEQ ID NO: 364109 - RNA, 20 nt, Human
cugaagacuuuaauuuuaga

SEQ ID NO: 364110 - RNA, 18 nt, Human
cugcuccagaccucccgg

SEQ ID NO: 364111 - RNA, 21 nt, Human
cugcuggugucacuuggggug

SEQ ID NO: 364112 - RNA, 19 nt, Human
cugcuugggggccagggcc

SEQ ID NO: 364113 - RNA, 23 nt, Human
cuggaaggggggcuggguuuggg

SEQ ID NO: 364114 - RNA, 22 nt, Human
cugggccucuggaaauggaggu

SEQ ID NO: 364115 - RNA, 20 nt, Human
cugggccugaccccucugcu

SEQ ID NO: 364116 - RNA, 21 nt, Human
cuggguuuggggguuaagugg

SEQ ID NO: 364117 - RNA, 22 nt, Human
cugugugcccaccucccagagu

SEQ ID NO: 364118 - RNA, 18 nt, Human
cuuggacugugagagggg

SEQ ID NO: 364119 - RNA, 21 nt, Human
cuugggucacuggcagcugcc

SEQ ID NO: 364120 - RNA, 19 nt, Human
gacaaguggcagugcggag

SEQ ID NO: 364121 - RNA, 21 nt, Human
gaggccuggagggacaugggg

SEQ ID NO: 364122 - RNA, 19 nt, Human
gcaaggccagcucguuccc

SEQ ID NO: 364123 - RNA, 21 nt, Human
gcagacgcgagggaggugcag

SEQ ID NO: 364124 - RNA, 22 nt, Human
gcccagcggcuaggcuucacag

SEQ ID NO: 364125 - RNA, 19 nt, Human
gcccagggcaaagaggcca

SEQ ID NO: 364126 - RNA, 18 nt, Human
gccccugcgccucccagg

SEQ ID NO: 364127 - RNA, 20 nt, Human
gccuccucugcuugggggcc

SEQ ID NO: 364128 - RNA, 18 nt, Human
gccuggagggacaugggg

SEQ ID NO: 364129 - RNA, 21 nt, Human
gccuggagggacauggggagg

SEQ ID NO: 364130 - RNA, 19 nt, Human
gcucugugccaggucuugg

SEQ ID NO: 364131 - RNA, 19 nt, Human
gcuggcccuggaccccugg

SEQ ID NO: 364132 - RNA, 23 nt, Human
ggacauggggaggggccaggggc

SEQ ID NO: 364133 - RNA, 21 nt, Human
ggauggugguuagcucugagc

SEQ ID NO: 364134 - RNA, 18 nt, Human
ggcaaagaggccagggca

SEQ ID NO: 364135 - RNA, 21 nt, Human
ggcagcugcccagccccugcg

SEQ ID NO: 364136 - RNA, 22 nt, Human
ggcagcugcuccagaccucccg

SEQ ID NO: 364137 - RNA, 20 nt, Human
ggcagggcucaccuggaggg

SEQ ID NO: 364138 - RNA, 21 nt, Human
ggcagguggcugaggccugga

SEQ ID NO: 364139 - RNA, 21 nt, Human
gggagaguggggaccucagag

SEQ ID NO: 364140 - RNA, 18 nt, Human
gggagcugggacaugggg

SEQ ID NO: 364141 - RNA, 19 nt, Human
gggcagggcucaccuggag

SEQ ID NO: 364142 - RNA, 21 nt, Human
gggccggaggcucaggcucuc

SEQ ID NO: 364143 - RNA, 20 nt, Human
ggggcagggcucaccuggag

SEQ ID NO: 364144 - RNA, 19 nt, Human
ggugauggugcacuggguc

SEQ ID NO: 364145 - RNA, 24 nt, Human
uacagggcuucuggguaaagcugu

SEQ ID NO: 364146 - RNA, 20 nt, Human
uccagagaacagaagaaguc

SEQ ID NO: 364147 - RNA, 22 nt, Human
ucccucgcaccaaugccucucu

SEQ ID NO: 364148 - RNA, 22 nt, Human
ucuggguaaagcuguggagcug

SEQ ID NO: 364149 - RNA, 25 nt, Human
ugacacuuauggaaucgaguuuagc

SEQ ID NO: 364150 - RNA, 20 nt, Human
ugcacugggucaccuccugc

SEQ ID NO: 364151 - RNA, 20 nt, Human
ugccagggcugccugcuccc

SEQ ID NO: 364152 - RNA, 23 nt, Human
ugccagggcugccugcucccuuc

SEQ ID NO: 364153 - RNA, 26 nt, Human
ugcccagccccugcgccucccaggcu

SEQ ID NO: 364154 - RNA, 19 nt, Human
ugccccaacccucugggaa

SEQ ID NO: 364155 - RNA, 21 nt, Human
ugcuuguguggagcuaggagg

SEQ ID NO: 364156 - RNA, 20 nt, Human
uggaaaguagggaaugugga

SEQ ID NO: 364157 - RNA, 24 nt, Human
uggaaggggggcuggguuuggggg

SEQ ID NO: 364158 - RNA, 18 nt, Human
uggaauuaaagugugacc

SEQ ID NO: 364159 - RNA, 22 nt, Human
uggaggucuuugcuuuccuccu

SEQ ID NO: 364160 - RNA, 18 nt, Human
uggcagcugcccagcccc

SEQ ID NO: 364161 - RNA, 19 nt, Human
uggcccagcgcuguguggg

SEQ ID NO: 364162 - RNA, 22 nt, Human
uggcccagggcaaagaggccag

SEQ ID NO: 364163 - RNA, 21 nt, Human
uggcggcugugggaugccagg

SEQ ID NO: 364164 - RNA, 19 nt, Human
uggcgggcagguggcugag

SEQ ID NO: 364165 - RNA, 23 nt, Human
uggcuccaacugggcccugaggc

SEQ ID NO: 364166 - RNA, 21 nt, Human
uggcuccugccuccacucacc

SEQ ID NO: 364167 - RNA, 19 nt, Human
ugggaacucauaggcuggc

SEQ ID NO: 364168 - RNA, 21 nt, Human
ugggaaggggacagcaggccg

SEQ ID NO: 364169 - RNA, 18 nt, Human
ugggaggaggcaggcuug

SEQ ID NO: 364170 - RNA, 21 nt, Human
ugggcuugggucacuggcagc

SEQ ID NO: 364171 - RNA, 20 nt, Human
uggggaccucagagggcagg

SEQ ID NO: 364172 - RNA, 20 nt, Human
uggggagcugggacaugggg

SEQ ID NO: 364173 - RNA, 21 nt, Human
ugggguggcuccaacugggcc

SEQ ID NO: 364174 - RNA, 21 nt, Human
ugguuagcucugagcucuggg

SEQ ID NO: 364175 - RNA, 24 nt, Human
uguggcgggcagguggcugaggcc

SEQ ID NO: 364176 - RNA, 19 nt, Human
uucacaaaggcuggcccag

SEQ ID NO: 364177 - RNA, 19 nt, Human
uuccccugggccugacccc

SEQ ID NO: 364178 - RNA, 21 nt, Human
uuugcuuuccuccugccuucu

SEQ ID NO: 364179 - RNA, 20 nt, Human
uuuuuuuuuuuuuuuugcca

SEQ ID NO: 364180 - RNA, 18 nt, Human
uuuuuuuuuuuuuuuuug

SEQ ID NO: 364181 - RNA, 23 nt, Human
uuuuuuuuuuuuuuuuugccauu

SEQ ID NO: 364182 - RNA, 21 nt, Human
aaaguccaguugauccgggca

SEQ ID NO: 364183 - RNA, 24 nt, Human
aagcaggaggcuggcggagcaggg

SEQ ID NO: 364184 - RNA, 20 nt, Human
aggaguuuauugccagucug

SEQ ID NO: 364185 - RNA, 22 nt, Human
cacugggucccaggcagcaccc

SEQ ID NO: 364186 - RNA, 23 nt, Human
cccaggcagcacccgccuggccu

SEQ ID NO: 364187 - RNA, 23 nt, Human
cuggcggagcagggggcaaaagu

SEQ ID NO: 364188 - RNA, 20 nt, Human
cugggucccaggcagcaccc

SEQ ID NO: 364189 - RNA, 19 nt, Human
cuggugccgguggggugag

SEQ ID NO: 364190 - RNA, 19 nt, Human
cuuugcaggggcgggcuug

SEQ ID NO: 364191 - RNA, 22 nt, Human
gccugccuuugcaggggcgggc

SEQ ID NO: 364192 - RNA, 21 nt, Human
gcggagcagggggcaaaaguc

SEQ ID NO: 364193 - RNA, 18 nt, Human
uccaagcaggaggcuggc

SEQ ID NO: 364194 - RNA, 21 nt, Human
ugcaggggcgggcuugggcac

SEQ ID NO: 364195 - RNA, 27 nt, Human
ugccuuugcaggggcgggcuugggcac

SEQ ID NO: 364196 - RNA, 23 nt, Human
uuuuuuuuuuuuuuuuuuuucgg

SEQ ID NO: 364197 - RNA, 24 nt, Human
uuuuuuuuuuuuuuuuuuuuucgu

SEQ ID NO: 364198 - RNA, 20 nt, Human
aaaaagaaacaaaaggaaca

SEQ ID NO: 364199 - RNA, 21 nt, Human
aaagaaacaaaaggaacaaua

SEQ ID NO: 364200 - RNA, 27 nt, Human
accaguuggaggccgggcggggaaggg

SEQ ID NO: 364201 - RNA, 23 nt, Human
accccagccccugcagccccagc

SEQ ID NO: 364202 - RNA, 18 nt, Human
agagaguggggguggggg

SEQ ID NO: 364203 - RNA, 21 nt, Human
agcacauccugugcuccagcu

SEQ ID NO: 364204 - RNA, 19 nt, Human
agccccugcagccccagcc

SEQ ID NO: 364205 - RNA, 23 nt, Human
cacaccccagccccugcagcccc

SEQ ID NO: 364206 - RNA, 27 nt, Human
caccccagccccugcagccccagccag

SEQ ID NO: 364207 - RNA, 20 nt, Human
caccucggggcucaggugug

SEQ ID NO: 364208 - RNA, 18 nt, Human
cagcuucagugccagccc

SEQ ID NO: 364209 - RNA, 19 nt, Human
caugcaguucuccaucgug

SEQ ID NO: 364210 - RNA, 23 nt, Human
ccaguuggaggccgggcggggaa

SEQ ID NO: 364211 - RNA, 26 nt, Human
ccaguuggaggccgggcggggaaggg

SEQ ID NO: 364212 - RNA, 21 nt, Human
cccagccccugcagccccagc

SEQ ID NO: 364213 - RNA, 19 nt, Human
cccccgucagcacauccug

SEQ ID NO: 364214 - RNA, 21 nt, Human
ccgcuguuccuccugcccucc

SEQ ID NO: 364215 - RNA, 21 nt, Human
ccucugcagccgcaaaaucca

SEQ ID NO: 364216 - RNA, 21 nt, Human
ccugcagccccagccagggcu

SEQ ID NO: 364217 - RNA, 25 nt, Human
cgcuuaagcugaguaaguuaaggac

SEQ ID NO: 364218 - RNA, 22 nt, Human
cucaaccaguucccuggcuacc

SEQ ID NO: 364219 - RNA, 22 nt, Human
cuccagcuucagugccagcccc

SEQ ID NO: 364220 - RNA, 21 nt, Human
cugcagccccagccagggcug

SEQ ID NO: 364221 - RNA, 23 nt, Human
gacaaaaaaaaaggucucuccga

SEQ ID NO: 364222 - RNA, 20 nt, Human
gacagcacuccgcugccucu

SEQ ID NO: 364223 - RNA, 21 nt, Human
gccccgggagaagccaugggg

SEQ ID NO: 364224 - RNA, 25 nt, Human
gcuucagugccagccccgggagaag

SEQ ID NO: 364225 - RNA, 21 nt, Human
ggaaggguggggacagacagc

SEQ ID NO: 364226 - RNA, 18 nt, Human
gggaaaaaagaaacaaaa

SEQ ID NO: 364227 - RNA, 19 nt, Human
gggagaagccauggggagc

SEQ ID NO: 364228 - RNA, 23 nt, Human
ggggaaggguggggacagacagc

SEQ ID NO: 364229 - RNA, 21 nt, Human
gugcagucagcuguuaaugug

SEQ ID NO: 364230 - RNA, 20 nt, Human
uaacacaccccagccccugc

SEQ ID NO: 364231 - RNA, 20 nt, Human
ucaugacaaaaaaaaagguc

SEQ ID NO: 364232 - RNA, 19 nt, Human
uccaaagggaaaaaagaaa

SEQ ID NO: 364233 - RNA, 24 nt, Human
uccaaagggaaaaaagaaacaaaa

SEQ ID NO: 364234 - RNA, 23 nt, Human
ucgcagagagugggggugggggu

SEQ ID NO: 364235 - RNA, 21 nt, Human
ucggggcucaggugugcaguc

SEQ ID NO: 364236 - RNA, 20 nt, Human
ucugcagccgcaaaauccag

SEQ ID NO: 364237 - RNA, 21 nt, Human
ucugcagccgcaaaauccagu

SEQ ID NO: 364238 - RNA, 18 nt, Human
ugacaaaaaaaaaggucu

SEQ ID NO: 364239 - RNA, 23 nt, Human
ugcuccagcuucagugccagccc

SEQ ID NO: 364240 - RNA, 18 nt, Human
uggacccccgucagcaca

SEQ ID NO: 364241 - RNA, 23 nt, Human
uggcuaccugaggcccugcuuca

SEQ ID NO: 364242 - RNA, 21 nt, Human
uucccuggcuaccugaggccc

SEQ ID NO: 364243 - RNA, 22 nt, Human
uuucaugcugccagggccccuc

SEQ ID NO: 364244 - RNA, 24 nt, Human
aaaaaaacccuccagaaaaccaag

SEQ ID NO: 364245 - RNA, 21 nt, Human
aaaaaacccuccagaaaacca

SEQ ID NO: 364246 - RNA, 24 nt, Human
aaaaaacccuccagaaaaccaaug

SEQ ID NO: 364247 - RNA, 21 nt, Human
aaaaacccuccagaaaaccaa

SEQ ID NO: 364248 - RNA, 22 nt, Human
aaacccuccagaaaaccaaugg

SEQ ID NO: 364249 - RNA, 21 nt, Human
aaauggccaugagaacuccag

SEQ ID NO: 364250 - RNA, 23 nt, Human
aagaagaagaaguugggcagaga

SEQ ID NO: 364251 - RNA, 23 nt, Human
aagaagaaguugggcagagaaac

SEQ ID NO: 364252 - RNA, 24 nt, Human
aagcuaggucaugacagcagcaac

SEQ ID NO: 364253 - RNA, 27 nt, Human
aauacaaagauggaaaaaaaacccucc

SEQ ID NO: 364254 - RNA, 21 nt, Human
aauagagcaagaagaagaagu

SEQ ID NO: 364255 - RNA, 19 nt, Human
acaaagauggaaaaaaaac

SEQ ID NO: 364256 - RNA, 19 nt, Human
accaauguccaauguccua

SEQ ID NO: 364257 - RNA, 21 nt, Human
accccagcuagcaccaggagc

SEQ ID NO: 364258 - RNA, 22 nt, Human
agaaaauagaugcuccucuccc

SEQ ID NO: 364259 - RNA, 22 nt, Human
agagaaacugugaacugcaacc

SEQ ID NO: 364260 - RNA, 18 nt, Human
agagcagagccaagagga

SEQ ID NO: 364261 - RNA, 22 nt, Human
agcgguggucaggggugaagcc

SEQ ID NO: 364262 - RNA, 21 nt, Human
aggaagugcguaagccacccc

SEQ ID NO: 364263 - RNA, 19 nt, Human
aggaaugcugagaauaaag

SEQ ID NO: 364264 - RNA, 25 nt, Human
aggggcccaguggcaggcggcuccu

SEQ ID NO: 364265 - RNA, 26 nt, Human
aggggugaagcccaggaagacgaugc

SEQ ID NO: 364266 - RNA, 22 nt, Human
aguaauagagcaagaagaagaa

SEQ ID NO: 364267 - RNA, 20 nt, Human
aguuguaugggcuuugugau

SEQ ID NO: 364268 - RNA, 21 nt, Human
auugcaaagaaaagaaucaaa

SEQ ID NO: 364269 - RNA, 24 nt, Human
caaacccuggccagaagucaaaga

SEQ ID NO: 364270 - RNA, 19 nt, Human
cagagaaacugugaacugc

SEQ ID NO: 364271 - RNA, 24 nt, Human
cagcacaaacccuggccagaaguc

SEQ ID NO: 364272 - RNA, 20 nt, Human
cagcagcaacggucucucuu

SEQ ID NO: 364273 - RNA, 18 nt, Human
cagcugcagcauuuauga

SEQ ID NO: 364274 - RNA, 18 nt, Human
caggaucuggucccaugg

SEQ ID NO: 364275 - RNA, 20 nt, Human
cagguccugggcccggcacc

SEQ ID NO: 364276 - RNA, 22 nt, Human
caugacagcagcaacggucucu

SEQ ID NO: 364277 - RNA, 24 nt, Human
ccagaaaaccaauguccaaugucc

SEQ ID NO: 364278 - RNA, 24 nt, Human
ccccacuguucuccgauaucuccg

SEQ ID NO: 364279 - RNA, 23 nt, Human
ccuagcccacaguuccccuaugu

SEQ ID NO: 364280 - RNA, 24 nt, Human
ccugcaggcaggagggcccgaggc

SEQ ID NO: 364281 - RNA, 24 nt, Human
cgaagguagccgagagcagagcca

SEQ ID NO: 364282 - RNA, 19 nt, Human
cgagccaggcgucucguac

SEQ ID NO: 364283 - RNA, 33 nt, Human
cuaggucaugacagcagcaacggucucucuuuu

SEQ ID NO: 364284 - RNA, 18 nt, Human
cuccgcccaacaaauucu

SEQ ID NO: 364285 - RNA, 28 nt, Human
cuccggggcuccggcagcggggcaaauc

SEQ ID NO: 364286 - RNA, 19 nt, Human
cugggagacucagguaugc

SEQ ID NO: 364287 - RNA, 20 nt, Human
cuguaguuaggaggcagagc

SEQ ID NO: 364288 - RNA, 22 nt, Human
cuuacggccaaaccugucugcu

SEQ ID NO: 364289 - RNA, 20 nt, Human
cuuuuggucuugcugccauc

SEQ ID NO: 364290 - RNA, 23 nt, Human
gaauagguccaacauccaggagu

SEQ ID NO: 364291 - RNA, 19 nt, Human
gagcuuacggccaaaccug

SEQ ID NO: 364292 - RNA, 25 nt, Human
gaggaaaaacauuugcuucuggaaa

SEQ ID NO: 364293 - RNA, 28 nt, Human
gauggaaaaaaaacccuccagaaaacca

SEQ ID NO: 364294 - RNA, 22 nt, Human
gcaggaucuggucccaugggua

SEQ ID NO: 364295 - RNA, 19 nt, Human
gcccacguagaugggcgcg

SEQ ID NO: 364296 - RNA, 27 nt, Human
ggcccaguggcaggcggcuccuguugg

SEQ ID NO: 364297 - RNA, 18 nt, Human
gggagaucagccaccugg

SEQ ID NO: 364298 - RNA, 20 nt, Human
ggucaggggugaagcccagg

SEQ ID NO: 364299 - RNA, 20 nt, Human
guagccgauacucauagagc

SEQ ID NO: 364300 - RNA, 22 nt, Human
guccacgguggugggcaugauc

SEQ ID NO: 364301 - RNA, 22 nt, Human
uaaaaaauccccacuguucucc

SEQ ID NO: 364302 - RNA, 22 nt, Human
uaagaaaauagaugcuccucuc

SEQ ID NO: 364303 - RNA, 22 nt, Human
uagccgagagcagagccaagag

SEQ ID NO: 364304 - RNA, 22 nt, Human
uaggcaacuugguaaaaaaucc

SEQ ID NO: 364305 - RNA, 19 nt, Human
uaggucaugacagcagcaa

SEQ ID NO: 364306 - RNA, 19 nt, Human
uauuuuguuugccuagccc

SEQ ID NO: 364307 - RNA, 22 nt, Human
uccagcugcagcauuuaugagg

SEQ ID NO: 364308 - RNA, 21 nt, Human
uccuguugguguccaggcugg

SEQ ID NO: 364309 - RNA, 18 nt, Human
ucgaaggugcucugguuc

SEQ ID NO: 364310 - RNA, 20 nt, Human
ugagcuggaagaauuuggca

SEQ ID NO: 364311 - RNA, 19 nt, Human
ugcaaagaaaagaaucaaa

SEQ ID NO: 364312 - RNA, 22 nt, Human
ugcuccucucccaacuuuacug

SEQ ID NO: 364313 - RNA, 19 nt, Human
ugcugaccaguccuuggau

SEQ ID NO: 364314 - RNA, 22 nt, Human
uggaaaaaaaacccuccagaaa

SEQ ID NO: 364315 - RNA, 18 nt, Human
uggaauagguccaacauc

SEQ ID NO: 364316 - RNA, 24 nt, Human
uggauuaagcgaaaaauuaacauc

SEQ ID NO: 364317 - RNA, 22 nt, Human
uguagccgauacucauagagcc

SEQ ID NO: 364318 - RNA, 21 nt, Human
uuaacauccacguauagguug

SEQ ID NO: 364319 - RNA, 26 nt, Human
uugccuagcccacaguuccccuaugu

SEQ ID NO: 364320 - RNA, 22 nt, Human
uuggggaggcuucgcccgcagg

SEQ ID NO: 364321 - RNA, 20 nt, Human
uuuggcaggaucugguccca

SEQ ID NO: 364322 - RNA, 18 nt, Human
uuugguugaguuguaugg

SEQ ID NO: 364323 - RNA, 22 nt, Human
aaaauacaauucaacaaugcaa

SEQ ID NO: 364324 - RNA, 22 nt, Human
aaaauauccacucaaaauacaa

SEQ ID NO: 364325 - RNA, 27 nt, Human
aaaauaucccuucacuuuuaaaauccu

SEQ ID NO: 364326 - RNA, 21 nt, Human
aaccaugccuggaaccccagc

SEQ ID NO: 364327 - RNA, 18 nt, Human
aagaagggaaucuguggc

SEQ ID NO: 364328 - RNA, 22 nt, Human
aagacccagaaaucagaaucca

SEQ ID NO: 364329 - RNA, 22 nt, Human
aauggagagaaaagcaaaacug

SEQ ID NO: 364330 - RNA, 18 nt, Human
acaagaaaaaaacccagg

SEQ ID NO: 364331 - RNA, 22 nt, Human
acaagaaaaaaacccaggaagg

SEQ ID NO: 364332 - RNA, 23 nt, Human
acaaguuccacauuucaaaagcc

SEQ ID NO: 364333 - RNA, 19 nt, Human
agaaaaaaacccaggaagg

SEQ ID NO: 364334 - RNA, 19 nt, Human
aggaucagcuccuggauag

SEQ ID NO: 364335 - RNA, 22 nt, Human
agggaacacaagaaaaaaaccc

SEQ ID NO: 364336 - RNA, 18 nt, Human
aucccuucacuuuuaaaa

SEQ ID NO: 364337 - RNA, 21 nt, Human
aucccuucacuuuuaaaaucc

SEQ ID NO: 364338 - RNA, 22 nt, Human
caaaaaaagaaagaucaauccc

SEQ ID NO: 364339 - RNA, 20 nt, Human
caaagugcuaagaaugaaua

SEQ ID NO: 364340 - RNA, 24 nt, Human
caaauauaagaaaaauaucccuuc

SEQ ID NO: 364341 - RNA, 26 nt, Human
caaauccuuggucggcacaucccaca

SEQ ID NO: 364342 - RNA, 19 nt, Human
caacuuucucaaauccuug

SEQ ID NO: 364343 - RNA, 18 nt, Human
cacagggaacacaagaaa

SEQ ID NO: 364344 - RNA, 19 nt, Human
cagcuccuggauagcuccu

SEQ ID NO: 364345 - RNA, 24 nt, Human
cagcuucuuuguuaaacuggcuac

SEQ ID NO: 364346 - RNA, 23 nt, Human
cauaaaauauagacugcaucuga

SEQ ID NO: 364347 - RNA, 20 nt, Human
cauauuauguguucccagaa

SEQ ID NO: 364348 - RNA, 24 nt, Human
ccaggaagggcugugcaccugaca

SEQ ID NO: 364349 - RNA, 18 nt, Human
ccaugccuggaaccccag

SEQ ID NO: 364350 - RNA, 21 nt, Human
cccaaauaaucucagaaccac

SEQ ID NO: 364351 - RNA, 19 nt, Human
ccgccgcccgccgcccgca

SEQ ID NO: 364352 - RNA, 24 nt, Human
ccuaaaccaugccuggaaccccag

SEQ ID NO: 364353 - RNA, 19 nt, Human
ccuaagacccagaaaucag

SEQ ID NO: 364354 - RNA, 23 nt, Human
ccuggaaccccagcuguuacaga

SEQ ID NO: 364355 - RNA, 19 nt, Human
ccuucuuucugucuuuguc

SEQ ID NO: 364356 - RNA, 20 nt, Human
ccuucuuucugucuuugucg

SEQ ID NO: 364357 - RNA, 22 nt, Human
cggcacaucccacauucuugau

SEQ ID NO: 364358 - RNA, 22 nt, Human
cgggagggacuccugaccuguu

SEQ ID NO: 364359 - RNA, 19 nt, Human
cucacaaauauaagaaaaa

SEQ ID NO: 364360 - RNA, 21 nt, Human
cucauuaacaggauucccaga

SEQ ID NO: 364361 - RNA, 19 nt, Human
cuuucugucuuugucgggg

SEQ ID NO: 364362 - RNA, 22 nt, Human
cuuuuaaaauccuaagacccag

SEQ ID NO: 364363 - RNA, 21 nt, Human
gaaaccaaggugagcagagaa

SEQ ID NO: 364364 - RNA, 19 nt, Human
gaacagggccuaaaccaug

SEQ ID NO: 364365 - RNA, 22 nt, Human
gaaccccagcuguuacagagga

SEQ ID NO: 364366 - RNA, 21 nt, Human
gaaggugugcggaaaccaagg

SEQ ID NO: 364367 - RNA, 20 nt, Human
gacgggagggacuccugacc

SEQ ID NO: 364368 - RNA, 25 nt, Human
ggagguggacgggagggacuccuga

SEQ ID NO: 364369 - RNA, 30 nt, Human
guaaagcuuuuccccaagacaugucaaagg

SEQ ID NO: 364370 - RNA, 19 nt, Human
uaaagaagggaaucugugg

SEQ ID NO: 364371 - RNA, 20 nt, Human
uacagcagagaaauggagag

SEQ ID NO: 364372 - RNA, 24 nt, Human
uagccuaaugggucagagaccaca

SEQ ID NO: 364373 - RNA, 23 nt, Human
uauaacauauaaagcagaacaca

SEQ ID NO: 364374 - RNA, 24 nt, Human
ucaaaauacaauucaacaaugcaa

SEQ ID NO: 364375 - RNA, 22 nt, Human
ucacacccuuuggcccaggugc

SEQ ID NO: 364376 - RNA, 22 nt, Human
ucagagaccacagggaacacaa

SEQ ID NO: 364377 - RNA, 18 nt, Human
uccacucaaaauacaauu

SEQ ID NO: 364378 - RNA, 18 nt, Human
uccaugcaaucuucagaa

SEQ ID NO: 364379 - RNA, 18 nt, Human
uccuaagacccagaaauc

SEQ ID NO: 364380 - RNA, 19 nt, Human
uccuccaugcaaucuucag

SEQ ID NO: 364381 - RNA, 20 nt, Human
uccuucuuucugucuuuguc

SEQ ID NO: 364382 - RNA, 23 nt, Human
uccuucuuucugucuuugucggg

SEQ ID NO: 364383 - RNA, 23 nt, Human
ucgauaacaaaaaaagaaagauc

SEQ ID NO: 364384 - RNA, 22 nt, Human
ugaaaagauauugaauauaaca

SEQ ID NO: 364385 - RNA, 21 nt, Human
ugaaaugcacacgugcaucuc

SEQ ID NO: 364386 - RNA, 22 nt, Human
ugaaaugcacacgugcaucucu

SEQ ID NO: 364387 - RNA, 19 nt, Human
ugaacacauuucuguacaa

SEQ ID NO: 364388 - RNA, 24 nt, Human
ugaacucacaaauauaagaaaaau

SEQ ID NO: 364389 - RNA, 22 nt, Human
ugccugugauucagccuucuca

SEQ ID NO: 364390 - RNA, 23 nt, Human
uggaacagggccuaaaccaugcc

SEQ ID NO: 364391 - RNA, 23 nt, Human
ugggggcuucucuugucucucuu

SEQ ID NO: 364392 - RNA, 24 nt, Human
uguagcugaaaugcacacgugcag

SEQ ID NO: 364393 - RNA, 21 nt, Human
uuaaaauuuuaauuguuacca

SEQ ID NO: 364394 - RNA, 23 nt, Human
uuacagcagagaaauggagagaa

SEQ ID NO: 364395 - RNA, 26 nt, Human
uuuggcccaggugccugugauucagc

SEQ ID NO: 364396 - RNA, 24 nt, Human
uuuuacgauuacgcgacauguguu

SEQ ID NO: 364397 - RNA, 23 nt, Human
aaaaaaaaaaaaaaagacacaaa

SEQ ID NO: 364398 - RNA, 25 nt, Human
aaaaaaaaaagacacaaaccaggag

SEQ ID NO: 364399 - RNA, 22 nt, Human
aaaaaaaaagacacaaaccagg

SEQ ID NO: 364400 - RNA, 23 nt, Human
aaaaaaaaagacacaaaccagga

SEQ ID NO: 364401 - RNA, 28 nt, Human
aaaaaaaaagacacaaaccaggaggcua

SEQ ID NO: 364402 - RNA, 22 nt, Human
aaaaaaaagacacaaaccagga

SEQ ID NO: 364403 - RNA, 21 nt, Human
aaacaaaacccacauuacagc

SEQ ID NO: 364404 - RNA, 18 nt, Human
aaaggccuuugucacugg

SEQ ID NO: 364405 - RNA, 24 nt, Human
aagugcauucugaagggcaaauaa

SEQ ID NO: 364406 - RNA, 20 nt, Human
aagugcuagaggcuagggcu

SEQ ID NO: 364407 - RNA, 26 nt, Human
acacugaacacaaaauaucacccaau

SEQ ID NO: 364408 - RNA, 21 nt, Human
agaaaaggauacaacaacaaa

SEQ ID NO: 364409 - RNA, 19 nt, Human
agaggggaguggggaaagg

SEQ ID NO: 364410 - RNA, 20 nt, Human
agaggggaguggggaaaggg

SEQ ID NO: 364411 - RNA, 23 nt, Human
aggcucgcgagcugacaccgccg

SEQ ID NO: 364412 - RNA, 18 nt, Human
aggggaguggggaaaggg

SEQ ID NO: 364413 - RNA, 24 nt, Human
aggggaguggggaaaggggugggg

SEQ ID NO: 364414 - RNA, 25 nt, Human
auaaauuuccuuuaaaccauacaua

SEQ ID NO: 364415 - RNA, 19 nt, Human
auaaucagcaaagagaaga

SEQ ID NO: 364416 - RNA, 24 nt, Human
auagggcgcacgaccagggaaggu

SEQ ID NO: 364417 - RNA, 27 nt, Human
auucugcuccaucuucauuaccuuuca

SEQ ID NO: 364418 - RNA, 24 nt, Human
caaaccaggaggcuaaggaaccag

SEQ ID NO: 364419 - RNA, 24 nt, Human
caaauaaacaguaaaacaaaaccc

SEQ ID NO: 364420 - RNA, 21 nt, Human
caagaaaggaacacacacaau

SEQ ID NO: 364421 - RNA, 19 nt, Human
caagaggacaaacagcaaa

SEQ ID NO: 364422 - RNA, 22 nt, Human
caagccaggcagcaggcgaccc

SEQ ID NO: 364423 - RNA, 23 nt, Human
cacaaaccaggaggcuaaggaac

SEQ ID NO: 364424 - RNA, 19 nt, Human
cacagagcgcggccugggg

SEQ ID NO: 364425 - RNA, 18 nt, Human
cacauuccuccagaucuc

SEQ ID NO: 364426 - RNA, 20 nt, Human
cacgaccagggaagguuccg

SEQ ID NO: 364427 - RNA, 19 nt, Human
cagcaaaggccuuugucac

SEQ ID NO: 364428 - RNA, 19 nt, Human
cagcaggcgacccaagacc

SEQ ID NO: 364429 - RNA, 23 nt, Human
cagcaggcgacccaagaccgucc

SEQ ID NO: 364430 - RNA, 22 nt, Human
cagcuuugagagaaaagacaac

SEQ ID NO: 364431 - RNA, 22 nt, Human
cagggaagguuccgggccuggg

SEQ ID NO: 364432 - RNA, 23 nt, Human
caggucaagaggacaaacagcaa

SEQ ID NO: 364433 - RNA, 19 nt, Human
cagucuuuccucuucaguu

SEQ ID NO: 364434 - RNA, 21 nt, Human
ccacagcaguggaaaacaaga

SEQ ID NO: 364435 - RNA, 21 nt, Human
ccacuagaggggaguggggaa

SEQ ID NO: 364436 - RNA, 19 nt, Human
cccuagcucugcgcucucc

SEQ ID NO: 364437 - RNA, 22 nt, Human
ccugauaaauuuccuuuaaacc

SEQ ID NO: 364438 - RNA, 25 nt, Human
ccuugguccugccgcggcuggccuu

SEQ ID NO: 364439 - RNA, 19 nt, Human
cucacacaucagugcacuu

SEQ ID NO: 364440 - RNA, 20 nt, Human
cuccagaucucacugguucu

SEQ ID NO: 364441 - RNA, 24 nt, Human
cugaaagacuaugaacacaauuua

SEQ ID NO: 364442 - RNA, 19 nt, Human
cugcgcucuccugcccugg

SEQ ID NO: 364443 - RNA, 21 nt, Human
cuguguuuaaaaaaaaaaaaa

SEQ ID NO: 364444 - RNA, 18 nt, Human
gacacuguuuuuggcacu

SEQ ID NO: 364445 - RNA, 24 nt, Human
gaccucuagccuuauuaggggccu

SEQ ID NO: 364446 - RNA, 20 nt, Human
gacucggagucugcacaagc

SEQ ID NO: 364447 - RNA, 18 nt, Human
gagaagacaauuacacug

SEQ ID NO: 364448 - RNA, 20 nt, Human
gagaagugcuagaggcuagg

SEQ ID NO: 364449 - RNA, 26 nt, Human
gagcugacaccgccgccuugguccug

SEQ ID NO: 364450 - RNA, 24 nt, Human
gcaaugauccaguuaauguccucu

SEQ ID NO: 364451 - RNA, 21 nt, Human
gcauaugcuucucacauuccu

SEQ ID NO: 364452 - RNA, 23 nt, Human
gcccagugcuuugaucagaugua

SEQ ID NO: 364453 - RNA, 24 nt, Human
gccccagugucccuagaggaaggu

SEQ ID NO: 364454 - RNA, 23 nt, Human
gccuggggucggggaacgcggcg

SEQ ID NO: 364455 - RNA, 23 nt, Human
gcggcgggcuuugcgcgugcgcg

SEQ ID NO: 364456 - RNA, 22 nt, Human
ggaggugcugaguccaucauug

SEQ ID NO: 364457 - RNA, 20 nt, Human
gggaguggggaaaggggugg

SEQ ID NO: 364458 - RNA, 18 nt, Human
ggggaguggggaaagggg

SEQ ID NO: 364459 - RNA, 26 nt, Human
guaaaacaaaacccacauuacagcuu

SEQ ID NO: 364460 - RNA, 25 nt, Human
guaucaagaaaggaacacacacaau

SEQ ID NO: 364461 - RNA, 19 nt, Human
uaaaacaaaacccacauua

SEQ ID NO: 364462 - RNA, 23 nt, Human
uaaaacaaaacccacauuacagc

SEQ ID NO: 364463 - RNA, 22 nt, Human
uaaaacuuucucauuucccaag

SEQ ID NO: 364464 - RNA, 23 nt, Human
uaaaguuacaggacuaaagugag

SEQ ID NO: 364465 - RNA, 21 nt, Human
uaacauaaucagcaaagagaa

SEQ ID NO: 364466 - RNA, 25 nt, Human
uaacauaaucagcaaagagaagaca

SEQ ID NO: 364467 - RNA, 18 nt, Human
uagcucugcgcucuccug

SEQ ID NO: 364468 - RNA, 18 nt, Human
uagugaaaaauuaacugc

SEQ ID NO: 364469 - RNA, 18 nt, Human
uaucaagaaaggaacaca

SEQ ID NO: 364470 - RNA, 25 nt, Human
uaucaagaaaggaacacacacaaug

SEQ ID NO: 364471 - RNA, 23 nt, Human
uccuccagaucucacugguucua

SEQ ID NO: 364472 - RNA, 18 nt, Human
ucugcacaagcuggccau

SEQ ID NO: 364473 - RNA, 24 nt, Human
ucuguguuuaaaaaaaaaaaaaaa

SEQ ID NO: 364474 - RNA, 26 nt, Human
ucuguguuuaaaaaaaaaaaaaaaaa

SEQ ID NO: 364475 - RNA, 22 nt, Human
ugacuaaguaucaagaaaggaa

SEQ ID NO: 364476 - RNA, 20 nt, Human
ugagaaaagguaagaaucaa

SEQ ID NO: 364477 - RNA, 21 nt, Human
ugagagaaaagacaacguugc

SEQ ID NO: 364478 - RNA, 18 nt, Human
ugcccuggggaagcaaug

SEQ ID NO: 364479 - RNA, 19 nt, Human
ugcugaguggucuuaagag

SEQ ID NO: 364480 - RNA, 20 nt, Human
uggggucggggaacgcggcg

SEQ ID NO: 364481 - RNA, 23 nt, Human
ugguaacauaaucagcaaagaga

SEQ ID NO: 364482 - RNA, 23 nt, Human
ugguccugccgcggcuggccuua

SEQ ID NO: 364483 - RNA, 21 nt, Human
ugucacugaaggacucggagu

SEQ ID NO: 364484 - RNA, 22 nt, Human
uguuuguucuuuuuuaaccagg

SEQ ID NO: 364485 - RNA, 23 nt, Human
uuaggggccuuuucaaguagucu

SEQ ID NO: 364486 - RNA, 20 nt, Human
uucaaguagucuaaaauuaa

SEQ ID NO: 364487 - RNA, 20 nt, Human
uucccuagcucugcgcucuc

SEQ ID NO: 364488 - RNA, 26 nt, Human
uuccucuucaguuucucccuuacugg

SEQ ID NO: 364489 - RNA, 24 nt, Human
uucucacauuccuccagaucucac

SEQ ID NO: 364490 - RNA, 25 nt, Human
uuuaaaaaaaaaaaaaaaaagacac

SEQ ID NO: 364491 - RNA, 23 nt, Human
acagaauccuccccaaccgugag

SEQ ID NO: 364492 - RNA, 21 nt, Human
accaaaugcuucaggugcagc

SEQ ID NO: 364493 - RNA, 22 nt, Human
agccccugcugcagagcuucuc

SEQ ID NO: 364494 - RNA, 25 nt, Human
agcggguacuggcagcaacuccggc

SEQ ID NO: 364495 - RNA, 22 nt, Human
aggggcaccuuuauuuacagaa

SEQ ID NO: 364496 - RNA, 18 nt, Human
auuuacagaauccucccc

SEQ ID NO: 364497 - RNA, 26 nt, Human
caacuccggcccuaggcagaggguuc

SEQ ID NO: 364498 - RNA, 22 nt, Human
caccacugccccaacccaaggg

SEQ ID NO: 364499 - RNA, 21 nt, Human
cagaauccuccccaaccguga

SEQ ID NO: 364500 - RNA, 21 nt, Human
cagagcccagggcagacucag

SEQ ID NO: 364501 - RNA, 18 nt, Human
cagaggguucgauacucc

SEQ ID NO: 364502 - RNA, 23 nt, Human
cagccccugcugcagagcuucug

SEQ ID NO: 364503 - RNA, 20 nt, Human
ccaaccgugagaggggugcc

SEQ ID NO: 364504 - RNA, 22 nt, Human
ccagccagcucaaacugcccac

SEQ ID NO: 364505 - RNA, 19 nt, Human
ccagggcucuucccacagc

SEQ ID NO: 364506 - RNA, 21 nt, Human
cccacugcauucugggaaguc

SEQ ID NO: 364507 - RNA, 18 nt, Human
cccagccugaguugcagg

SEQ ID NO: 364508 - RNA, 18 nt, Human
cuauccagggcucuuccc

SEQ ID NO: 364509 - RNA, 24 nt, Human
cuauccagggcucuucccacagcu

SEQ ID NO: 364510 - RNA, 24 nt, Human
cucaaacugcccaccacauagacc

SEQ ID NO: 364511 - RNA, 22 nt, Human
cucacccaccaaaugcuucagg

SEQ ID NO: 364512 - RNA, 23 nt, Human
cugccccaacccaaggggcaccu

SEQ ID NO: 364513 - RNA, 18 nt, Human
cuucaggugcagccuccc

SEQ ID NO: 364514 - RNA, 23 nt, Human
gagcagagggagcggguacuggc

SEQ ID NO: 364515 - RNA, 19 nt, Human
gagcccagggcagacucag

SEQ ID NO: 364516 - RNA, 18 nt, Human
gcccagcagcccacugca

SEQ ID NO: 364517 - RNA, 27 nt, Human
gcucaaacugcccaccacauagacccu

SEQ ID NO: 364518 - RNA, 18 nt, Human
gggccugccuccacuccc

SEQ ID NO: 364519 - RNA, 24 nt, Human
ggugaaguuuuaucagagcccagg

SEQ ID NO: 364520 - RNA, 19 nt, Human
guugcagggccugcccuuc

SEQ ID NO: 364521 - RNA, 22 nt, Human
uagaagccaaauaaucaaggau

SEQ ID NO: 364522 - RNA, 24 nt, Human
ucccacagcucgucaccacugccc

SEQ ID NO: 364523 - RNA, 22 nt, Human
ucccagccugaguugaagggcc

SEQ ID NO: 364524 - RNA, 22 nt, Human
ugaguugaagggccugcccuuc

SEQ ID NO: 364525 - RNA, 23 nt, Human
ugaguugaagggccugcccuucu

SEQ ID NO: 364526 - RNA, 26 nt, Human
ugaguugaagggccugcccuucugcu

SEQ ID NO: 364527 - RNA, 22 nt, Human
ugaguugcagggccugcccuuc

SEQ ID NO: 364528 - RNA, 23 nt, Human
ugaguugcagggccugcccuucu

SEQ ID NO: 364529 - RNA, 23 nt, Human
ugcccuucugcucucccagcccc

SEQ ID NO: 364530 - RNA, 22 nt, Human
ugcucacccaccaaaugcuuca

SEQ ID NO: 364531 - RNA, 21 nt, Human
ugcugcagagcuucuguggag

SEQ ID NO: 364532 - RNA, 24 nt, Human
uggaugagcagagggagcggguac

SEQ ID NO: 364533 - RNA, 18 nt, Human
uguggagggccugccucc

SEQ ID NO: 364534 - RNA, 20 nt, Human
uugcagggccugcccuucug

SEQ ID NO: 364535 - RNA, 18 nt, Human
uuuacagaauccucccca

SEQ ID NO: 364536 - RNA, 22 nt, Human
uuuuuuuuuuuuuuuuuaaugg

SEQ ID NO: 364537 - RNA, 24 nt, Human
aagcagagaugaggccugcaaacg

SEQ ID NO: 364538 - RNA, 19 nt, Human
agauacaugccucacugcg

SEQ ID NO: 364539 - RNA, 22 nt, Human
auacaugccucacugcggccag

SEQ ID NO: 364540 - RNA, 19 nt, Human
cagcaaggaacuacagaua

SEQ ID NO: 364541 - RNA, 21 nt, Human
cagccggcucuucuagugccu

SEQ ID NO: 364542 - RNA, 19 nt, Human
cauuacaauucgcugaguu

SEQ ID NO: 364543 - RNA, 22 nt, Human
ccuggagcccccgauucucaag

SEQ ID NO: 364544 - RNA, 21 nt, Human
cucacugcggccaggccacag

SEQ ID NO: 364545 - RNA, 20 nt, Human
cugcggccaggccacagggc

SEQ ID NO: 364546 - RNA, 19 nt, Human
gaagugaaggcuuauucaa

SEQ ID NO: 364547 - RNA, 20 nt, Human
gaagugaaggcuuauucaag

SEQ ID NO: 364548 - RNA, 20 nt, Human
gccuggagcccccgauucuc

SEQ ID NO: 364549 - RNA, 25 nt, Human
ggaacuacagauacaugccucacug

SEQ ID NO: 364550 - RNA, 22 nt, Human
uaggagcccaggaucagccgga

SEQ ID NO: 364551 - RNA, 24 nt, Human
ucgcugaguuacauuugcuuaugc

SEQ ID NO: 364552 - RNA, 19 nt, Human
ugcuuaugcaccaaggucc

SEQ ID NO: 364553 - RNA, 23 nt, Human
uggaagugaaggcuuauucaagc

SEQ ID NO: 364554 - RNA, 19 nt, Human
uuuuacuucuuguuacuca

SEQ ID NO: 364555 - RNA, 21 nt, Human
aaaaauagcauuguccacugg

SEQ ID NO: 364556 - RNA, 19 nt, Human
aaacuagaaaauacuggua

SEQ ID NO: 364557 - RNA, 22 nt, Human
aaccuuugcccccaguuaucuc

SEQ ID NO: 364558 - RNA, 23 nt, Human
aagagccaaacucugucucaaaa

SEQ ID NO: 364559 - RNA, 24 nt, Human
aagagccaaacucugucucaaaaa

SEQ ID NO: 364560 - RNA, 21 nt, Human
accccauucuccugcccccag

SEQ ID NO: 364561 - RNA, 20 nt, Human
acugauggagacaacacgaa

SEQ ID NO: 364562 - RNA, 24 nt, Human
acuuuauaaaccagauguggcgcu

SEQ ID NO: 364563 - RNA, 23 nt, Human
agaaccucacaauuugaacagaa

SEQ ID NO: 364564 - RNA, 18 nt, Human
agacaaaauugcagcgug

SEQ ID NO: 364565 - RNA, 26 nt, Human
agcaagcagugguauuuaauauacaa

SEQ ID NO: 364566 - RNA, 24 nt, Human
agcacuuugggaggccgaggcggg

SEQ ID NO: 364567 - RNA, 18 nt, Human
agccauauuuaccaucau

SEQ ID NO: 364568 - RNA, 25 nt, Human
agccugggcaacaagagccaaacuc

SEQ ID NO: 364569 - RNA, 18 nt, Human
agcuggacagcagggaac

SEQ ID NO: 364570 - RNA, 22 nt, Human
aggcaggagaauugcuugaacc

SEQ ID NO: 364571 - RNA, 23 nt, Human
aggcaggagaauugcuugaaccg

SEQ ID NO: 364572 - RNA, 22 nt, Human
aggccaggcgcgguggcugacg

SEQ ID NO: 364573 - RNA, 23 nt, Human
aggccgaggcgggcagaucacga

SEQ ID NO: 364574 - RNA, 24 nt, Human
aggcgcgguggcugacgccuguaa

SEQ ID NO: 364575 - RNA, 24 nt, Human
aggcgggcagaucacgacuucagg

SEQ ID NO: 364576 - RNA, 21 nt, Human
aggcugaggcaggagaauugc

SEQ ID NO: 364577 - RNA, 24 nt, Human
aggcugaggcaggagaauugcuug

SEQ ID NO: 364578 - RNA, 22 nt, Human
aggcugggucgggugugaaggg

SEQ ID NO: 364579 - RNA, 19 nt, Human
agggaacaccccauucucc

SEQ ID NO: 364580 - RNA, 21 nt, Human
aggugaagguuguggugugcc

SEQ ID NO: 364581 - RNA, 24 nt, Human
aggugaagguuguggugugccgag

SEQ ID NO: 364582 - RNA, 21 nt, Human
aguaguacugcacuuuucuca

SEQ ID NO: 364583 - RNA, 26 nt, Human
auacuuggaacaccuuagccaucauu

SEQ ID NO: 364584 - RNA, 24 nt, Human
aucacgccauugcacaccagccug

SEQ ID NO: 364585 - RNA, 18 nt, Human
auucuuggaauuucccuu

SEQ ID NO: 364586 - RNA, 19 nt, Human
caagagauacaguaacuuc

SEQ ID NO: 364587 - RNA, 24 nt, Human
cacaccagccugggcaacaagagc

SEQ ID NO: 364588 - RNA, 18 nt, Human
caccccauucuccugccc

SEQ ID NO: 364589 - RNA, 21 nt, Human
caccccauucuccugccccca

SEQ ID NO: 364590 - RNA, 22 nt, Human
cacgacuucaggcugaggcagg

SEQ ID NO: 364591 - RNA, 21 nt, Human
cagaucacgacuucaggcuga

SEQ ID NO: 364592 - RNA, 24 nt, Human
cagcacuuugggaggccgaggcgg

SEQ ID NO: 364593 - RNA, 18 nt, Human
cagcagggaacaccccau

SEQ ID NO: 364594 - RNA, 18 nt, Human
cauaaaccacagaagaaa

SEQ ID NO: 364595 - RNA, 24 nt, Human
cauuagaaugucuaaucccucaag

SEQ ID NO: 364596 - RNA, 19 nt, Human
cauugcacaccagccuggg

SEQ ID NO: 364597 - RNA, 22 nt, Human
cauugcacaccagccugggcaa

SEQ ID NO: 364598 - RNA, 24 nt, Human
cauugcacaccagccugggcaaca

SEQ ID NO: 364599 - RNA, 26 nt, Human
cauuuagaaaacccucuggcuccagg

SEQ ID NO: 364600 - RNA, 25 nt, Human
ccaaggacaaacuuuagucucagau

SEQ ID NO: 364601 - RNA, 22 nt, Human
ccacaacccuucagaccuugac

SEQ ID NO: 364602 - RNA, 21 nt, Human
ccagccaggggguauccacaa

SEQ ID NO: 364603 - RNA, 23 nt, Human
ccagccugggcaacaagagccaa

SEQ ID NO: 364604 - RNA, 23 nt, Human
ccagggguccuucuacugccucc

SEQ ID NO: 364605 - RNA, 26 nt, Human
ccauucuccugcccccagcucuccua

SEQ ID NO: 364606 - RNA, 21 nt, Human
ccauugcacaccagccugggc

SEQ ID NO: 364607 - RNA, 22 nt, Human
ccauugcacaccagccugggca

SEQ ID NO: 364608 - RNA, 23 nt, Human
ccauugcacaccagccugggcaa

SEQ ID NO: 364609 - RNA, 24 nt, Human
ccauugcacaccagccugggcaac

SEQ ID NO: 364610 - RNA, 22 nt, Human
ccccagcucuccuauggaaucc

SEQ ID NO: 364611 - RNA, 21 nt, Human
ccccauucuccugcccccagc

SEQ ID NO: 364612 - RNA, 19 nt, Human
cccuucccacuccacucaa

SEQ ID NO: 364613 - RNA, 18 nt, Human
ccucuggcuccagggguc

SEQ ID NO: 364614 - RNA, 22 nt, Human
ccuguaaucccagcacuuuggg

SEQ ID NO: 364615 - RNA, 19 nt, Human
ccuuagacucaccaauaac

SEQ ID NO: 364616 - RNA, 24 nt, Human
cgaggcgggcagaucacgacuuca

SEQ ID NO: 364617 - RNA, 23 nt, Human
cgccuguaaucccagcacuuugg

SEQ ID NO: 364618 - RNA, 18 nt, Human
cucaaaaaaaaaaaaaag

SEQ ID NO: 364619 - RNA, 23 nt, Human
cucaaaaaaaaaaaaaagaaaaa

SEQ ID NO: 364620 - RNA, 21 nt, Human
cuccaugaagcccagccaggg

SEQ ID NO: 364621 - RNA, 22 nt, Human
cuccauguaauagaugucugca

SEQ ID NO: 364622 - RNA, 19 nt, Human
cuccugcccccagcucucc

SEQ ID NO: 364623 - RNA, 19 nt, Human
cucugucucaaaaaaaaaa

SEQ ID NO: 364624 - RNA, 26 nt, Human
cugaagcuacagugauuacaaaccug

SEQ ID NO: 364625 - RNA, 24 nt, Human
cugacgccuguaaucccagcacuu

SEQ ID NO: 364626 - RNA, 18 nt, Human
cugguuacagaaggccuc

SEQ ID NO: 364627 - RNA, 18 nt, Human
gaagcuggacagcaggga

SEQ ID NO: 364628 - RNA, 24 nt, Human
gaagguuguggugugccgagauca

SEQ ID NO: 364629 - RNA, 24 nt, Human
gacgccuguaaucccagcacuuug

SEQ ID NO: 364630 - RNA, 23 nt, Human
gagaauugcuugaaccggggagg

SEQ ID NO: 364631 - RNA, 23 nt, Human
gagaucacgccauugcacaccag

SEQ ID NO: 364632 - RNA, 22 nt, Human
gccauugcacaccagccugggc

SEQ ID NO: 364633 - RNA, 19 nt, Human
gcgcgguggcugacgccug

SEQ ID NO: 364634 - RNA, 19 nt, Human
ggaacaccuuagccaucau

SEQ ID NO: 364635 - RNA, 19 nt, Human
ggaacagugagcguaggag

SEQ ID NO: 364636 - RNA, 22 nt, Human
gggaacaccccauucuccugcc

SEQ ID NO: 364637 - RNA, 19 nt, Human
ggugaucagagaagauuuc

SEQ ID NO: 364638 - RNA, 23 nt, Human
gguggcugacgccuguaauccca

SEQ ID NO: 364639 - RNA, 24 nt, Human
gguggcugacgccuguaaucccag

SEQ ID NO: 364640 - RNA, 20 nt, Human
gucucaaaaaaaaaaaaaag

SEQ ID NO: 364641 - RNA, 23 nt, Human
guggcugacgccuguaaucccag

SEQ ID NO: 364642 - RNA, 19 nt, Human
uaaaccagauguggcgcua

SEQ ID NO: 364643 - RNA, 25 nt, Human
uaaauggccucuagaguaguuuucc

SEQ ID NO: 364644 - RNA, 19 nt, Human
uaagaucauucauaaacca

SEQ ID NO: 364645 - RNA, 22 nt, Human
uacaguaacuucugcauggucu

SEQ ID NO: 364646 - RNA, 25 nt, Human
uaggccaggcgcgguggcugacgcc

SEQ ID NO: 364647 - RNA, 23 nt, Human
uauacaaacucaucaaauuccac

SEQ ID NO: 364648 - RNA, 26 nt, Human
uaucugguuacagaaggccucucauu

SEQ ID NO: 364649 - RNA, 23 nt, Human
ucaaaaaaaaaaaaaagaaaaau

SEQ ID NO: 364650 - RNA, 23 nt, Human
ucacgccauugcacaccagccug

SEQ ID NO: 364651 - RNA, 21 nt, Human
uccaaagaaugagaauccugg

SEQ ID NO: 364652 - RNA, 19 nt, Human
ucccaaccuuugcccccag

SEQ ID NO: 364653 - RNA, 19 nt, Human
uccuaggucacccaguucc

SEQ ID NO: 364654 - RNA, 23 nt, Human
uccuauggaauccuaauucaagg

SEQ ID NO: 364655 - RNA, 19 nt, Human
ucgugcgccuaucccaacc

SEQ ID NO: 364656 - RNA, 21 nt, Human
ucugcagucacccgagcucau

SEQ ID NO: 364657 - RNA, 18 nt, Human
ucugcaucuuuugggcca

SEQ ID NO: 364658 - RNA, 22 nt, Human
ucugucucaaaaaaaaaaaaaa

SEQ ID NO: 364659 - RNA, 27 nt, Human
ucugucucaaaaaaaaaaaaaagaaaa

SEQ ID NO: 364660 - RNA, 24 nt, Human
ucugucucaaaaaaaaaaaaaagg

SEQ ID NO: 364661 - RNA, 18 nt, Human
ucuuuugggccagcagcc

SEQ ID NO: 364662 - RNA, 19 nt, Human
ugaaccggggaggugaagg

SEQ ID NO: 364663 - RNA, 21 nt, Human
ugagcugcagguguuuccaag

SEQ ID NO: 364664 - RNA, 24 nt, Human
ugaggcaggagaauugcuugaacc

SEQ ID NO: 364665 - RNA, 18 nt, Human
ugagucagggguagaaac

SEQ ID NO: 364666 - RNA, 24 nt, Human
ugauccaugcccauugugagcaag

SEQ ID NO: 364667 - RNA, 19 nt, Human
ugcacaccagccugggcaa

SEQ ID NO: 364668 - RNA, 22 nt, Human
uggccucuagaguaguuuuccu

SEQ ID NO: 364669 - RNA, 18 nt, Human
uggcuccagggguccuuc

SEQ ID NO: 364670 - RNA, 22 nt, Human
uggcugacgccuguaaucccag

SEQ ID NO: 364671 - RNA, 24 nt, Human
uggcugacgccuguaaucccagca

SEQ ID NO: 364672 - RNA, 19 nt, Human
ugggaggccgaggcgggca

SEQ ID NO: 364673 - RNA, 20 nt, Human
ugggaggccgaggcgggcag

SEQ ID NO: 364674 - RNA, 24 nt, Human
ugggaggccgaggcgggcagauca

SEQ ID NO: 364675 - RNA, 22 nt, Human
ugggauucacaguuuauugaaa

SEQ ID NO: 364676 - RNA, 19 nt, Human
ugggugagaacaugcugga

SEQ ID NO: 364677 - RNA, 18 nt, Human
uuaccuuaagaucauuca

SEQ ID NO: 364678 - RNA, 18 nt, Human
uugcuugaaccggggagg

SEQ ID NO: 364679 - RNA, 25 nt, Human
uugggaggccgaggcgggcagauca

SEQ ID NO: 364680 - RNA, 20 nt, Human
uuguggugugccgagaucac

SEQ ID NO: 364681 - RNA, 20 nt, Human
uuucaggcugcuuuuuaaau

SEQ ID NO: 364682 - RNA, 22 nt, Human
acacagaccacaggggggacac

SEQ ID NO: 364683 - RNA, 24 nt, Human
agaccaggcuacagagcucgaggg

SEQ ID NO: 364684 - RNA, 23 nt, Human
agaguggugggugccacccuguc

SEQ ID NO: 364685 - RNA, 18 nt, Human
augugagacaaagguagg

SEQ ID NO: 364686 - RNA, 19 nt, Human
cacagaacaugaaacacag

SEQ ID NO: 364687 - RNA, 19 nt, Human
cacagaccaggcuacagag

SEQ ID NO: 364688 - RNA, 22 nt, Human
cacgugacacagaacaugaaac

SEQ ID NO: 364689 - RNA, 21 nt, Human
cauccagccauggcugggcca

SEQ ID NO: 364690 - RNA, 22 nt, Human
cauccagccauggcugggccag

SEQ ID NO: 364691 - RNA, 18 nt, Human
ccagccauggcugggcca

SEQ ID NO: 364692 - RNA, 26 nt, Human
cccaggccacacgggcaccccgggag

SEQ ID NO: 364693 - RNA, 21 nt, Human
cccuguggcggcuucgggucc

SEQ ID NO: 364694 - RNA, 19 nt, Human
ccgguuuauucugccuugg

SEQ ID NO: 364695 - RNA, 18 nt, Human
cgggaggcggggcacagg

SEQ ID NO: 364696 - RNA, 20 nt, Human
cucgagggacgugggaaggg

SEQ ID NO: 364697 - RNA, 23 nt, Human
cucgguccgcgguggcggcggcg

SEQ ID NO: 364698 - RNA, 21 nt, Human
gaagcagggggcugcagcccc

SEQ ID NO: 364699 - RNA, 24 nt, Human
gccagggcaggguggaaggcaccg

SEQ ID NO: 364700 - RNA, 20 nt, Human
gccgaggcccggaggcagcu

SEQ ID NO: 364701 - RNA, 19 nt, Human
gcgguggcggcggcggccg

SEQ ID NO: 364702 - RNA, 20 nt, Human
ggagaagcagggggcugcag

SEQ ID NO: 364703 - RNA, 21 nt, Human
ggccacacgggcaccccggga

SEQ ID NO: 364704 - RNA, 18 nt, Human
gggcacagggucauaggc

SEQ ID NO: 364705 - RNA, 18 nt, Human
gggugguccugagagugg

SEQ ID NO: 364706 - RNA, 24 nt, Human
ggucauaggccagaugcacaucca

SEQ ID NO: 364707 - RNA, 21 nt, Human
gguccgcgguggcggcggcgg

SEQ ID NO: 364708 - RNA, 24 nt, Human
ggugaagccaggccgaggcccgga

SEQ ID NO: 364709 - RNA, 23 nt, Human
gugacacagaacaugaaacacag

SEQ ID NO: 364710 - RNA, 20 nt, Human
guggcggcggcggccgguua

SEQ ID NO: 364711 - RNA, 19 nt, Human
gugguccugagaguggugg

SEQ ID NO: 364712 - RNA, 23 nt, Human
uccgcgguggcggcggcggccuu

SEQ ID NO: 364713 - RNA, 21 nt, Human
uccggggcggagagagggccc

SEQ ID NO: 364714 - RNA, 19 nt, Human
ugcacagaccaggcuacag

SEQ ID NO: 364715 - RNA, 21 nt, Human
ugcggugaagccaggccgagg

SEQ ID NO: 364716 - RNA, 18 nt, Human
uggaaugcggugaagcca

SEQ ID NO: 364717 - RNA, 21 nt, Human
uggcgggagaagcagggggcu

SEQ ID NO: 364718 - RNA, 20 nt, Human
ugggaaggggccuuuuggca

SEQ ID NO: 364719 - RNA, 22 nt, Human
uggggcgguccccuugcggccu

SEQ ID NO: 364720 - RNA, 24 nt, Human
aaacuaaaacccagggggaggcca

SEQ ID NO: 364721 - RNA, 25 nt, Human
agaccaaguccuuuaccgcagagga

SEQ ID NO: 364722 - RNA, 23 nt, Human
agggaaauaaauagaggggucca

SEQ ID NO: 364723 - RNA, 18 nt, Human
agggccacaucucccucu

SEQ ID NO: 364724 - RNA, 20 nt, Human
aggggguagaacagaccaag

SEQ ID NO: 364725 - RNA, 20 nt, Human
aguccucaaugagggggagg

SEQ ID NO: 364726 - RNA, 22 nt, Human
caaggacagagaaaucacagga

SEQ ID NO: 364727 - RNA, 20 nt, Human
caccgcgcgcgcaacagagc

SEQ ID NO: 364728 - RNA, 23 nt, Human
cccuuugaccaucuugauggcuu

SEQ ID NO: 364729 - RNA, 24 nt, Human
ccugcaagaauagccaaggacaga

SEQ ID NO: 364730 - RNA, 20 nt, Human
cgcgcggccccgcucgcgcc

SEQ ID NO: 364731 - RNA, 21 nt, Human
cgcggccccgcucgcgcccaa

SEQ ID NO: 364732 - RNA, 20 nt, Human
cuccagcucucccucgugcc

SEQ ID NO: 364733 - RNA, 20 nt, Human
cucgcgcccaaggugacacc

SEQ ID NO: 364734 - RNA, 21 nt, Human
cugcuccucccuguccccuca

SEQ ID NO: 364735 - RNA, 24 nt, Human
cuucugcuccucccuguccccuca

SEQ ID NO: 364736 - RNA, 18 nt, Human
gcaagaauagccaaggac

SEQ ID NO: 364737 - RNA, 22 nt, Human
gcagcagagcccaggcccccag

SEQ ID NO: 364738 - RNA, 27 nt, Human
gcgcgcgcacgccccuccagcucuccc

SEQ ID NO: 364739 - RNA, 24 nt, Human
gcuccgggucccgugcgcgcgcgg

SEQ ID NO: 364740 - RNA, 19 nt, Human
ggaagaaaccacacugugg

SEQ ID NO: 364741 - RNA, 22 nt, Human
gggaggccagaaauccucagga

SEQ ID NO: 364742 - RNA, 21 nt, Human
uaaaacccagggggaggccag

SEQ ID NO: 364743 - RNA, 22 nt, Human
uaccgcagaggaagaaaccaca

SEQ ID NO: 364744 - RNA, 23 nt, Human
ucagcucugccuugguuucccca

SEQ ID NO: 364745 - RNA, 23 nt, Human
uccccucagcucugccuugguuu

SEQ ID NO: 364746 - RNA, 18 nt, Human
ucuucugcuguccugugu

SEQ ID NO: 364747 - RNA, 18 nt, Human
ugagggggaggaagggcc

SEQ ID NO: 364748 - RNA, 22 nt, Human
ugcccugaaacuaaaacccagg

SEQ ID NO: 364749 - RNA, 22 nt, Human
ugcuguccugugugcccugaaa

SEQ ID NO: 364750 - RNA, 19 nt, Human
uggugucaucaauccaauu

SEQ ID NO: 364751 - RNA, 26 nt, Human
uuuuuugcuggugucaucaauccaau

SEQ ID NO: 364752 - RNA, 20 nt, Human
uuuuuuuuuuuuuuuuugcu

SEQ ID NO: 364753 - RNA, 22 nt, Human
uuuuuuuuuuuuuuuuugcugg

SEQ ID NO: 364754 - RNA, 23 nt, Human
uuuuuuuuuuuuuuuuuugcugg

SEQ ID NO: 364755 - RNA, 27 nt, Human
uuuuuuuuuuuuuuuuuuuuuuugggg

SEQ ID NO: 364756 - RNA, 20 nt, Human
aaggaaagcaaaacuaagcc

SEQ ID NO: 364757 - RNA, 21 nt, Human
acagggcugcucuccuaggcc

SEQ ID NO: 364758 - RNA, 23 nt, Human
aguaucacuuauucagugguagc

SEQ ID NO: 364759 - RNA, 24 nt, Human
aguauccuuuacucuuuugaaagc

SEQ ID NO: 364760 - RNA, 25 nt, Human
caagucauuagccugguccucuggc

SEQ ID NO: 364761 - RNA, 19 nt, Human
caaucacuguaagugcaag

SEQ ID NO: 364762 - RNA, 20 nt, Human
cacucagaaccgcauuacau

SEQ ID NO: 364763 - RNA, 21 nt, Human
cagaaagaagaguuugacucc

SEQ ID NO: 364764 - RNA, 23 nt, Human
cauacagaaagaagaguuugacu

SEQ ID NO: 364765 - RNA, 21 nt, Human
caucagcacacacaagucauu

SEQ ID NO: 364766 - RNA, 19 nt, Human
cauuacagggcugcucucc

SEQ ID NO: 364767 - RNA, 22 nt, Human
ccuuuuuauuccagaauggaaa

SEQ ID NO: 364768 - RNA, 21 nt, Human
cguugugguuuuuucccuggg

SEQ ID NO: 364769 - RNA, 18 nt, Human
gacuaaagcuugaaacag

SEQ ID NO: 364770 - RNA, 18 nt, Human
gaggagggucuacacaca

SEQ ID NO: 364771 - RNA, 18 nt, Human
gcuuggccuuugccuuac

SEQ ID NO: 364772 - RNA, 22 nt, Human
guauauguauaugucauacaga

SEQ ID NO: 364773 - RNA, 23 nt, Human
uacacacauuaaauacaaaugga

SEQ ID NO: 364774 - RNA, 19 nt, Human
uauauguauaugucauaca

SEQ ID NO: 364775 - RNA, 18 nt, Human
uaucacuuauucaguggu

SEQ ID NO: 364776 - RNA, 25 nt, Human
uauuuccauaagucaccaauaagag

SEQ ID NO: 364777 - RNA, 23 nt, Human
ucaaaacauucuguacauuucaa

SEQ ID NO: 364778 - RNA, 23 nt, Human
uccacuggcaugcaucuuuccaa

SEQ ID NO: 364779 - RNA, 24 nt, Human
uccagaauggaaaacaaacuagga

SEQ ID NO: 364780 - RNA, 18 nt, Human
ucccugggcaaaugauua

SEQ ID NO: 364781 - RNA, 18 nt, Human
uccucuggcauccacugg

SEQ ID NO: 364782 - RNA, 20 nt, Human
ugccaagaugucucuguaca

SEQ ID NO: 364783 - RNA, 24 nt, Human
ugccaaggcuuacaaaaacauuuc

SEQ ID NO: 364784 - RNA, 18 nt, Human
uggauacauuacagggcu

SEQ ID NO: 364785 - RNA, 21 nt, Human
uggugugcauuuuauuuuuga

SEQ ID NO: 364786 - RNA, 21 nt, Human
ugucaaaggaaagcaaaacua

SEQ ID NO: 364787 - RNA, 19 nt, Human
uuccagaauggaaaacaaa

SEQ ID NO: 364788 - RNA, 19 nt, Human
uugacuggaaucauaucca

SEQ ID NO: 364789 - RNA, 20 nt, Human
uugauugaugaacagaggag

SEQ ID NO: 364790 - RNA, 24 nt, Human
uuuuuuuuuuuuuuuacauuuugg

SEQ ID NO: 364791 - RNA, 18 nt, Human
aaaaaagccuggacuuga

SEQ ID NO: 364792 - RNA, 20 nt, Human
aaaaagacagcacuauccca

SEQ ID NO: 364793 - RNA, 21 nt, Human
aaaaagacagcacuaucccag

SEQ ID NO: 364794 - RNA, 25 nt, Human
aaacaaagguuucugggcagagggc

SEQ ID NO: 364795 - RNA, 29 nt, Human
aaacaagagauggacguaaaagggacccc

SEQ ID NO: 364796 - RNA, 18 nt, Human
aaacacccagaaaaugaa

SEQ ID NO: 364797 - RNA, 25 nt, Human
aaagccuggacuugaauuuaaacaa

SEQ ID NO: 364798 - RNA, 20 nt, Human
aaagguuucugggcagaggg

SEQ ID NO: 364799 - RNA, 22 nt, Human
aaaguacuucccuaaaguacaa

SEQ ID NO: 364800 - RNA, 21 nt, Human
aacauguuucacauaaaagcu

SEQ ID NO: 364801 - RNA, 20 nt, Human
acaaaaagacagcacuaucc

SEQ ID NO: 364802 - RNA, 18 nt, Human
agacagaauuugugcaug

SEQ ID NO: 364803 - RNA, 22 nt, Human
agagauggacguaaaagggaug

SEQ ID NO: 364804 - RNA, 20 nt, Human
agggauguucuuuacugcag

SEQ ID NO: 364805 - RNA, 24 nt, Human
aucauguuaguguugaccaaaucc

SEQ ID NO: 364806 - RNA, 21 nt, Human
augaagcauugcuucauuccc

SEQ ID NO: 364807 - RNA, 19 nt, Human
caaggcaacaugaauuaaa

SEQ ID NO: 364808 - RNA, 25 nt, Human
ccuaaaguacaaaggcauuucccua

SEQ ID NO: 364809 - RNA, 22 nt, Human
cgaaacacugcucugagcacca

SEQ ID NO: 364810 - RNA, 22 nt, Human
cggcggcggcgucggugggggc

SEQ ID NO: 364811 - RNA, 18 nt, Human
cggcucacuucuaguccc

SEQ ID NO: 364812 - RNA, 21 nt, Human
cggcucacuucuagucccggc

SEQ ID NO: 364813 - RNA, 19 nt, Human
cugagcaccaugauugccu

SEQ ID NO: 364814 - RNA, 23 nt, Human
cuggcuggcguuugggacccggg

SEQ ID NO: 364815 - RNA, 20 nt, Human
gcaaggcaacaugaauuaaa

SEQ ID NO: 364816 - RNA, 19 nt, Human
gcggcucacuucuaguccc

SEQ ID NO: 364817 - RNA, 22 nt, Human
ggcguuugggacccgggcggcu

SEQ ID NO: 364818 - RNA, 20 nt, Human
ggcucacuucuagucccggc

SEQ ID NO: 364819 - RNA, 21 nt, Human
guucaaggaggggaguacuaa

SEQ ID NO: 364820 - RNA, 22 nt, Human
uaaaaugccaaaaguacuuccc

SEQ ID NO: 364821 - RNA, 19 nt, Human
uaaauaugcaccuaguuuc

SEQ ID NO: 364822 - RNA, 24 nt, Human
uaauccagagacagaauuugugca

SEQ ID NO: 364823 - RNA, 25 nt, Human
uacccacaaaaagacagcacuaucc

SEQ ID NO: 364824 - RNA, 25 nt, Human
uccccaaaucauguuaguguugacc

SEQ ID NO: 364825 - RNA, 24 nt, Human
ucugguuaagaaaacacccagaaa

SEQ ID NO: 364826 - RNA, 22 nt, Human
ucuuuacugcaguacccacaaa

SEQ ID NO: 364827 - RNA, 23 nt, Human
ugaagcauugcuucauucccagg

SEQ ID NO: 364828 - RNA, 18 nt, Human
ugacuggcuggcuggcgu

SEQ ID NO: 364829 - RNA, 24 nt, Human
ugaucugguuaagaaaacacccag

SEQ ID NO: 364830 - RNA, 19 nt, Human
uggcuggcuggcguuuggg

SEQ ID NO: 364831 - RNA, 21 nt, Human
ugggacuacaauccuaguuca

SEQ ID NO: 364832 - RNA, 23 nt, Human
ugggggcggcgauacggccaggc

SEQ ID NO: 364833 - RNA, 21 nt, Human
ugguuaagaaaacacccagaa

SEQ ID NO: 364834 - RNA, 24 nt, Human
ugugcaugcuuacaauuugaagcc

SEQ ID NO: 364835 - RNA, 23 nt, Human
uuaaaacacacacgaaacacugc

SEQ ID NO: 364836 - RNA, 22 nt, Human
uucacaugauaaaaaagccugg

SEQ ID NO: 364837 - RNA, 19 nt, Human
uuuuuuuuuuuuucacuuu

SEQ ID NO: 364838 - RNA, 23 nt, Human
uuuuuuuuuuuuuuucacuuuaa

SEQ ID NO: 364839 - RNA, 26 nt, Human
aacacaaacauagaaauaacuuugaa

SEQ ID NO: 364840 - RNA, 22 nt, Human
aaccaccccacuguucuuccau

SEQ ID NO: 364841 - RNA, 19 nt, Human
aacuuugaaccaccccacu

SEQ ID NO: 364842 - RNA, 23 nt, Human
acauugucaaaauacauuagaac

SEQ ID NO: 364843 - RNA, 18 nt, Human
accccacuguucuuccau

SEQ ID NO: 364844 - RNA, 19 nt, Human
accccacuguucuuccauc

SEQ ID NO: 364845 - RNA, 19 nt, Human
agaaaggcuggcagggcug

SEQ ID NO: 364846 - RNA, 22 nt, Human
agaaaggcuggcagggcugggc

SEQ ID NO: 364847 - RNA, 21 nt, Human
aggcggccucccagggggguc

SEQ ID NO: 364848 - RNA, 19 nt, Human
ccacuguucuuccaucagg

SEQ ID NO: 364849 - RNA, 19 nt, Human
ccagaagagugaaagacag

SEQ ID NO: 364850 - RNA, 26 nt, Human
ccagagucucaauguuaacacuuucu

SEQ ID NO: 364851 - RNA, 21 nt, Human
cggggaaaaguuaacauggua

SEQ ID NO: 364852 - RNA, 19 nt, Human
cuggggccagagucucaau

SEQ ID NO: 364853 - RNA, 21 nt, Human
cuugccaguuccucagcuguc

SEQ ID NO: 364854 - RNA, 23 nt, Human
gaagauaccaaucuggggccaga

SEQ ID NO: 364855 - RNA, 22 nt, Human
gccuucugcucuagcccaaguc

SEQ ID NO: 364856 - RNA, 18 nt, Human
ggaguagaaaggcuggca

SEQ ID NO: 364857 - RNA, 24 nt, Human
uaacacauauagcaauaaccaccc

SEQ ID NO: 364858 - RNA, 21 nt, Human
uagaagauaccaaucuggggc

SEQ ID NO: 364859 - RNA, 18 nt, Human
uagcaauaaccacccugg

SEQ ID NO: 364860 - RNA, 21 nt, Human
ucaaaauacauuagaacacgg

SEQ ID NO: 364861 - RNA, 20 nt, Human
ucacccaucaguauccaucu

SEQ ID NO: 364862 - RNA, 20 nt, Human
ugaaccaccccacuguucuu

SEQ ID NO: 364863 - RNA, 24 nt, Human
ugccuucugcucuagcccaagucu

SEQ ID NO: 364864 - RNA, 19 nt, Human
uggagagaagggaggcgcc

SEQ ID NO: 364865 - RNA, 24 nt, Human
uggcagggcugggcucacauauaa

SEQ ID NO: 364866 - RNA, 24 nt, Human
uggcagggcugggcucacauauag

SEQ ID NO: 364867 - RNA, 21 nt, Human
ugucagagcgagcucguggag

SEQ ID NO: 364868 - RNA, 28 nt, Human
uuaacaugguaacacaaacauagaaaua

SEQ ID NO: 364869 - RNA, 19 nt, Human
uuagaacacgggaaaaggg

SEQ ID NO: 364870 - RNA, 19 nt, Human
uugccaguuccucagcugu

SEQ ID NO: 364871 - RNA, 20 nt, Human
uugccaguuccucagcuguc

SEQ ID NO: 364872 - RNA, 25 nt, Human
uuuucaaugucacccaucaguaucc

SEQ ID NO: 364873 - RNA, 25 nt, Human
aaaaagcaaauggaagaccagccau

SEQ ID NO: 364874 - RNA, 21 nt, Human
aaaaagcuuaaggaaccugga

SEQ ID NO: 364875 - RNA, 24 nt, Human
aaaaugaugaggcuaacuuaagua

SEQ ID NO: 364876 - RNA, 22 nt, Human
aaagcaccacucaguagcuacu

SEQ ID NO: 364877 - RNA, 27 nt, Human
aaauaaacaagguaccaaacuguauuu

SEQ ID NO: 364878 - RNA, 22 nt, Human
aagaaaucagaauaacuucaca

SEQ ID NO: 364879 - RNA, 25 nt, Human
aagacaaaaagcaaaauucccaaga

SEQ ID NO: 364880 - RNA, 18 nt, Human
aagcaaacagaaugaaua

SEQ ID NO: 364881 - RNA, 18 nt, Human
aagcaaccauuuauaagc

SEQ ID NO: 364882 - RNA, 21 nt, Human
aauagcuccauggcacaagag

SEQ ID NO: 364883 - RNA, 18 nt, Human
accauauggccaaagaac

SEQ ID NO: 364884 - RNA, 18 nt, Human
agaaaagcaaaguagaaa

SEQ ID NO: 364885 - RNA, 19 nt, Human
agacaaaaagcaaaauucc

SEQ ID NO: 364886 - RNA, 24 nt, Human
agcgauucuccugccucagccucc

SEQ ID NO: 364887 - RNA, 20 nt, Human
agggaagacaaaaagcaaaa

SEQ ID NO: 364888 - RNA, 23 nt, Human
aguagcugggacuacaggcacgu

SEQ ID NO: 364889 - RNA, 21 nt, Human
agugcaguggcacaauuucag

SEQ ID NO: 364890 - RNA, 21 nt, Human
augacagggaucuccucccca

SEQ ID NO: 364891 - RNA, 24 nt, Human
augguuuucacuuaaagaaaaagc

SEQ ID NO: 364892 - RNA, 23 nt, Human
caaaaagcaaaauucccaagaaa

SEQ ID NO: 364893 - RNA, 18 nt, Human
caaaauagagguucuucc

SEQ ID NO: 364894 - RNA, 23 nt, Human
caaauggaagaccagccauaaua

SEQ ID NO: 364895 - RNA, 20 nt, Human
caagcgauucuccugccuca

SEQ ID NO: 364896 - RNA, 22 nt, Human
caagcgauucuccugccucagc

SEQ ID NO: 364897 - RNA, 18 nt, Human
cacaaaaugaugaggcua

SEQ ID NO: 364898 - RNA, 20 nt, Human
cacugagcaggggacugugg

SEQ ID NO: 364899 - RNA, 21 nt, Human
cacugcaacuucugccucccg

SEQ ID NO: 364900 - RNA, 23 nt, Human
cacugcaacuucugccucccggg

SEQ ID NO: 364901 - RNA, 24 nt, Human
cacuggucuuguacuccaagaaac

SEQ ID NO: 364902 - RNA, 19 nt, Human
cagaaacacauacauggua

SEQ ID NO: 364903 - RNA, 19 nt, Human
cagaacuauauuccaccuu

SEQ ID NO: 364904 - RNA, 19 nt, Human
cagcaaaaagcuuaaggaa

SEQ ID NO: 364905 - RNA, 22 nt, Human
cagcaaaaagcuuaaggaaccu

SEQ ID NO: 364906 - RNA, 20 nt, Human
cagccuccugaguagcuggg

SEQ ID NO: 364907 - RNA, 20 nt, Human
cagcucaggcuccgccgccc

SEQ ID NO: 364908 - RNA, 20 nt, Human
caucuucaugagaaaugauc

SEQ ID NO: 364909 - RNA, 22 nt, Human
ccacugaaauuucuuuagacac

SEQ ID NO: 364910 - RNA, 20 nt, Human
ccagucccauuucuauuuua

SEQ ID NO: 364911 - RNA, 27 nt, Human
cccaagaaaucagaauaacuucacacu

SEQ ID NO: 364912 - RNA, 23 nt, Human
cccagucuggagugcaguggcac

SEQ ID NO: 364913 - RNA, 21 nt, Human
cccgccgcgccggcguggccg

SEQ ID NO: 364914 - RNA, 23 nt, Human
cccgccgcgccggcguggccgcg

SEQ ID NO: 364915 - RNA, 20 nt, Human
cccggguucaagcgauucuc

SEQ ID NO: 364916 - RNA, 23 nt, Human
cccggguucaagcgauucuccug

SEQ ID NO: 364917 - RNA, 20 nt, Human
cccucuggcuucuggcucug

SEQ ID NO: 364918 - RNA, 19 nt, Human
ccgcccgcucucggcuccg

SEQ ID NO: 364919 - RNA, 23 nt, Human
ccgccgcccgcucucggcuccgg

SEQ ID NO: 364920 - RNA, 23 nt, Human
ccucaaacaccugugcuuggcuc

SEQ ID NO: 364921 - RNA, 24 nt, Human
ccucccggguucaagcgauucucc

SEQ ID NO: 364922 - RNA, 23 nt, Human
ccugaguagcugggacuacaggc

SEQ ID NO: 364923 - RNA, 24 nt, Human
ccugaguagcugggacuacaggca

SEQ ID NO: 364924 - RNA, 23 nt, Human
ccugccucagccuccugaguagc

SEQ ID NO: 364925 - RNA, 18 nt, Human
cgggucgccggcuguggc

SEQ ID NO: 364926 - RNA, 24 nt, Human
cucagccuccugaguagcugggac

SEQ ID NO: 364927 - RNA, 20 nt, Human
cucauaucccuggcccucug

SEQ ID NO: 364928 - RNA, 23 nt, Human
cugcaacuucugccucccggguu

SEQ ID NO: 364929 - RNA, 24 nt, Human
cugcaacuucugccucccggguuc

SEQ ID NO: 364930 - RNA, 23 nt, Human
cugccucagccuccugaguagcu

SEQ ID NO: 364931 - RNA, 23 nt, Human
cugcuggucuuguggaaggcagc

SEQ ID NO: 364932 - RNA, 26 nt, Human
cuggcccucuggcuucuggcucugug

SEQ ID NO: 364933 - RNA, 22 nt, Human
cuucacacuggucuuguacucc

SEQ ID NO: 364934 - RNA, 25 nt, Human
cuuuuuuuuuuugagaugaagucuc

SEQ ID NO: 364935 - RNA, 23 nt, Human
gaaaucagaauaacuucacacug

SEQ ID NO: 364936 - RNA, 20 nt, Human
gaguagcugggacuacaggc

SEQ ID NO: 364937 - RNA, 25 nt, Human
gaguagcugggacuacaggcacgug

SEQ ID NO: 364938 - RNA, 19 nt, Human
gaugcaaaauagagguucu

SEQ ID NO: 364939 - RNA, 21 nt, Human
gccaccacuuagaaaaguaca

SEQ ID NO: 364940 - RNA, 22 nt, Human
gcccucuggcuucuggcucugu

SEQ ID NO: 364941 - RNA, 24 nt, Human
gcgauucuccugccucagccuccu

SEQ ID NO: 364942 - RNA, 24 nt, Human
ggcccucuggcuucuggcucugug

SEQ ID NO: 364943 - RNA, 18 nt, Human
ggcguggccgcguccagc

SEQ ID NO: 364944 - RNA, 21 nt, Human
ggcguggccgcguccagcuca

SEQ ID NO: 364945 - RNA, 18 nt, Human
gggaagacaaaaagcaaa

SEQ ID NO: 364946 - RNA, 21 nt, Human
gggggaucagaugaagugugg

SEQ ID NO: 364947 - RNA, 19 nt, Human
gguagaagggaagacaaaa

SEQ ID NO: 364948 - RNA, 24 nt, Human
gucuuguacuccaagaaacccuga

SEQ ID NO: 364949 - RNA, 23 nt, Human
guugguuggucagugaauuuuug

SEQ ID NO: 364950 - RNA, 20 nt, Human
guuuacguaaaagcccugac

SEQ ID NO: 364951 - RNA, 20 nt, Human
uaagcaaccauuuauaagca

SEQ ID NO: 364952 - RNA, 21 nt, Human
uaagcagacccuacaucuaga

SEQ ID NO: 364953 - RNA, 19 nt, Human
uauaccauauggccaaaga

SEQ ID NO: 364954 - RNA, 22 nt, Human
ucaaacaccugugcuuggcuca

SEQ ID NO: 364955 - RNA, 23 nt, Human
ucacugcaacuucugccucccgg

SEQ ID NO: 364956 - RNA, 24 nt, Human
ucacugcaacuucugccucccggg

SEQ ID NO: 364957 - RNA, 25 nt, Human
ucacugcaacuucugccucccgggu

SEQ ID NO: 364958 - RNA, 23 nt, Human
ucagccuccugaguagcugggac

SEQ ID NO: 364959 - RNA, 22 nt, Human
ucccaaccuaaguuuccguucc

SEQ ID NO: 364960 - RNA, 22 nt, Human
ucccgccgcgccggcguggccg

SEQ ID NO: 364961 - RNA, 21 nt, Human
ucccggguucaagcgauucuc

SEQ ID NO: 364962 - RNA, 24 nt, Human
ucccggguucaagcgauucuccug

SEQ ID NO: 364963 - RNA, 23 nt, Human
ucccucaacacauaacuguccaa

SEQ ID NO: 364964 - RNA, 21 nt, Human
ucccuggcccucuggcuucug

SEQ ID NO: 364965 - RNA, 24 nt, Human
uccugaguagcugggacuacaggc

SEQ ID NO: 364966 - RNA, 20 nt, Human
ucucccaaccuaaguuuccg

SEQ ID NO: 364967 - RNA, 24 nt, Human
ucuccugccucagccuccugagua

SEQ ID NO: 364968 - RNA, 24 nt, Human
ucucgcugugucacccagucugga

SEQ ID NO: 364969 - RNA, 21 nt, Human
ucugaagcaguuuacuuccug

SEQ ID NO: 364970 - RNA, 23 nt, Human
ucuucaugagaaaugaucaccuc

SEQ ID NO: 364971 - RNA, 24 nt, Human
ugaaauaaacaagguaccaaacug

SEQ ID NO: 364972 - RNA, 22 nt, Human
ugaaauagcacaaacuguacuc

SEQ ID NO: 364973 - RNA, 19 nt, Human
ugacaggcaccacauaucc

SEQ ID NO: 364974 - RNA, 19 nt, Human
ugaccauuuaaguauggag

SEQ ID NO: 364975 - RNA, 18 nt, Human
ugacuucuuuccggacac

SEQ ID NO: 364976 - RNA, 22 nt, Human
ugagaaaugaucaccucugggu

SEQ ID NO: 364977 - RNA, 26 nt, Human
ugagaugaacuguaguccucaaacac

SEQ ID NO: 364978 - RNA, 22 nt, Human
ugcaguggcacaauuucaguuc

SEQ ID NO: 364979 - RNA, 20 nt, Human
ugccacagaggauucaugga

SEQ ID NO: 364980 - RNA, 24 nt, Human
ugccucagccuccugaguagcugg

SEQ ID NO: 364981 - RNA, 22 nt, Human
ugccuggaguacagauaugaaa

SEQ ID NO: 364982 - RNA, 21 nt, Human
uggaaggcagcucucuggagc

SEQ ID NO: 364983 - RNA, 20 nt, Human
uggacagaaaugauaugaug

SEQ ID NO: 364984 - RNA, 22 nt, Human
uggacagcaaaaagcuuaagga

SEQ ID NO: 364985 - RNA, 18 nt, Human
uggagugcaguggcacaa

SEQ ID NO: 364986 - RNA, 23 nt, Human
uggagugcaguggcacaauuuca

SEQ ID NO: 364987 - RNA, 24 nt, Human
uggagugcaguggcacaauuucag

SEQ ID NO: 364988 - RNA, 20 nt, Human
uggcacaauuucaguucacu

SEQ ID NO: 364989 - RNA, 24 nt, Human
uggcacaauuucaguucacugcaa

SEQ ID NO: 364990 - RNA, 22 nt, Human
uggcccucuggcuucuggcucu

SEQ ID NO: 364991 - RNA, 21 nt, Human
ugggacuacaggcacgugcca

SEQ ID NO: 364992 - RNA, 22 nt, Human
ugggacuacaggcacgugccac

SEQ ID NO: 364993 - RNA, 24 nt, Human
ugggacuacaggcacgugccacca

SEQ ID NO: 364994 - RNA, 22 nt, Human
ugguauggacuauuauuaaaau

SEQ ID NO: 364995 - RNA, 20 nt, Human
ugugcuuggcucaggcccac

SEQ ID NO: 364996 - RNA, 24 nt, Human
ugugucacccagucuggagugcag

SEQ ID NO: 364997 - RNA, 21 nt, Human
uucaagcgauucuccugccuc

SEQ ID NO: 364998 - RNA, 23 nt, Human
uucaagcgauucuccugccucag

SEQ ID NO: 364999 - RNA, 24 nt, Human
uucaagcgauucuccugccucagc

SEQ ID NO: 365000 - RNA, 19 nt, Human
uugaauuaggugcauaagg

SEQ ID NO: 365001 - RNA, 20 nt, Human
uuggucagugaauuuuuggu

SEQ ID NO: 365002 - RNA, 26 nt, Human
uuuuaccaagagcaagagcggucacu

SEQ ID NO: 365003 - RNA, 24 nt, Human
aaaacaccaacacugagacauaca

SEQ ID NO: 365004 - RNA, 18 nt, Human
acaaaaauaaagucaugc

SEQ ID NO: 365005 - RNA, 23 nt, Human
acccagccacacuuuucccacag

SEQ ID NO: 365006 - RNA, 24 nt, Human
accccaaaauccaaccagccagca

SEQ ID NO: 365007 - RNA, 20 nt, Human
agcaaaauaguccauuucuc

SEQ ID NO: 365008 - RNA, 22 nt, Human
agccacacuuuucccacagaug

SEQ ID NO: 365009 - RNA, 24 nt, Human
aggaaaggagcaccggagcucagg

SEQ ID NO: 365010 - RNA, 21 nt, Human
agggcuuguaagaauggacac

SEQ ID NO: 365011 - RNA, 22 nt, Human
caaaauccaaccagccagcaug

SEQ ID NO: 365012 - RNA, 24 nt, Human
caaacacuaaugaauaagugacau

SEQ ID NO: 365013 - RNA, 21 nt, Human
caccccaaaauccaaccagcc

SEQ ID NO: 365014 - RNA, 20 nt, Human
caccucuccuuaagcaggga

SEQ ID NO: 365015 - RNA, 22 nt, Human
cauuaguccaacugccacccca

SEQ ID NO: 365016 - RNA, 21 nt, Human
ccaaaauccaaccagccagca

SEQ ID NO: 365017 - RNA, 21 nt, Human
ccaaccagccagcaugacaau

SEQ ID NO: 365018 - RNA, 20 nt, Human
cccacagaugccgcagccag

SEQ ID NO: 365019 - RNA, 18 nt, Human
cccagccacacuuuuccc

SEQ ID NO: 365020 - RNA, 22 nt, Human
cccagccacacuuuucccacag

SEQ ID NO: 365021 - RNA, 21 nt, Human
cucauauccaaaaaagacacc

SEQ ID NO: 365022 - RNA, 19 nt, Human
gacugaccagggcuuguaa

SEQ ID NO: 365023 - RNA, 19 nt, Human
gagccagagucaagggaga

SEQ ID NO: 365024 - RNA, 20 nt, Human
gaugcuuuucaagccaauga

SEQ ID NO: 365025 - RNA, 22 nt, Human
gggaaaaaaaagcccaacaaaa

SEQ ID NO: 365026 - RNA, 23 nt, Human
uagaaaacauuacacaugagagc

SEQ ID NO: 365027 - RNA, 20 nt, Human
uccaaaaaagacaccucucc

SEQ ID NO: 365028 - RNA, 19 nt, Human
uccaaccagccagcaugac

SEQ ID NO: 365029 - RNA, 20 nt, Human
ucccacagaugccgcagcca

SEQ ID NO: 365030 - RNA, 21 nt, Human
ucccugugcacccuuggaugc

SEQ ID NO: 365031 - RNA, 25 nt, Human
ucuccuuaagcagggaaaaaaaagc

SEQ ID NO: 365032 - RNA, 26 nt, Human
ucucuuaagaaaaccaauaaacacuc

SEQ ID NO: 365033 - RNA, 19 nt, Human
ugccaccccaaaauccaac

SEQ ID NO: 365034 - RNA, 18 nt, Human
ugcccguggacaagcccu

SEQ ID NO: 365035 - RNA, 21 nt, Human
uggacaagcccuaauguuagu

SEQ ID NO: 365036 - RNA, 27 nt, Human
uggaugcuuuucaagccaaugagggua

SEQ ID NO: 365037 - RNA, 20 nt, Human
uggugcaggagccagaguca

SEQ ID NO: 365038 - RNA, 19 nt, Human
uucacauuaguccaacugc

SEQ ID NO: 365039 - RNA, 18 nt, Human
uuugggugaacaauuuuc

SEQ ID NO: 365040 - RNA, 19 nt, Human
uuuuuuuuuuuuuuuuugu

SEQ ID NO: 365041 - RNA, 27 nt, Human
uuuuuuuuuuuuuuuuuuuuuuugggg

SEQ ID NO: 365042 - RNA, 19 nt, Human
aaaaagcaucccuuccagg

SEQ ID NO: 365043 - RNA, 18 nt, Human
aacuuccugcuccuucuc

SEQ ID NO: 365044 - RNA, 22 nt, Human
aaucuuccuuccuucaggaggc

SEQ ID NO: 365045 - RNA, 18 nt, Human
accacguccugcauuccc

SEQ ID NO: 365046 - RNA, 19 nt, Human
agauguacuuuuuuucacg

SEQ ID NO: 365047 - RNA, 20 nt, Human
agccccauccagaccaggaa

SEQ ID NO: 365048 - RNA, 23 nt, Human
agcuaaaaagcaucccuuccagg

SEQ ID NO: 365049 - RNA, 18 nt, Human
aggcagggcugauaggug

SEQ ID NO: 365050 - RNA, 23 nt, Human
cacacaauguccaucaguaucaa

SEQ ID NO: 365051 - RNA, 21 nt, Human
cagcagccccauccagaccag

SEQ ID NO: 365052 - RNA, 19 nt, Human
cagcuaaaaagcaucccuu

SEQ ID NO: 365053 - RNA, 21 nt, Human
cagggaagaccugggguccuu

SEQ ID NO: 365054 - RNA, 24 nt, Human
ccucuggcccacacaauguccauc

SEQ ID NO: 365055 - RNA, 23 nt, Human
ccugccucuggcccacacaaugu

SEQ ID NO: 365056 - RNA, 18 nt, Human
ccuuugcagugugggcug

SEQ ID NO: 365057 - RNA, 23 nt, Human
cucugcacucaagcagcagcccc

SEQ ID NO: 365058 - RNA, 18 nt, Human
cuggguggguucaaggcu

SEQ ID NO: 365059 - RNA, 21 nt, Human
cuggucagaggagaaacagca

SEQ ID NO: 365060 - RNA, 20 nt, Human
cuuccugcuccuucucacug

SEQ ID NO: 365061 - RNA, 23 nt, Human
cuucucacugugucguuggcuca

SEQ ID NO: 365062 - RNA, 25 nt, Human
gcccuggaccuucuggugguguccc

SEQ ID NO: 365063 - RNA, 22 nt, Human
ggaaaaacaggccaaguguagg

SEQ ID NO: 365064 - RNA, 20 nt, Human
guguucuguucuccuggcaa

SEQ ID NO: 365065 - RNA, 22 nt, Human
uaaaaagcaucccuuccaggaa

SEQ ID NO: 365066 - RNA, 18 nt, Human
ucagcuaaaaagcauccc

SEQ ID NO: 365067 - RNA, 23 nt, Human
ucaguggagacugaaucuuccuu

SEQ ID NO: 365068 - RNA, 22 nt, Human
uccaggagauguacuuuuuuuc

SEQ ID NO: 365069 - RNA, 21 nt, Human
uccagggaagaccuggggucc

SEQ ID NO: 365070 - RNA, 26 nt, Human
ucuccuggcaggcagggcugauaggu

SEQ ID NO: 365071 - RNA, 24 nt, Human
ucucucauggggagagcccuggac

SEQ ID NO: 365072 - RNA, 18 nt, Human
uggaaaaacaggccaagu

SEQ ID NO: 365073 - RNA, 21 nt, Human
uggaaaaacaggccaagugua

SEQ ID NO: 365074 - RNA, 24 nt, Human
uggagacugaaucuuccuuccuuc

SEQ ID NO: 365075 - RNA, 21 nt, Human
uggccugcagggaagggccag

SEQ ID NO: 365076 - RNA, 22 nt, Human
uguucuguucuccuggcaggca

SEQ ID NO: 365077 - RNA, 18 nt, Human
uucugguggugucccagc

SEQ ID NO: 365078 - RNA, 18 nt, Human
uuuuuuuuuuuguguguu

SEQ ID NO: 365079 - RNA, 18 nt, Human
uuuuuuuuuuuuuuuuug

SEQ ID NO: 365080 - RNA, 19 nt, Human
uuuuuuuuuuuuuuuuugu

SEQ ID NO: 365081 - RNA, 21 nt, Human
aacucuugccuuaagcaagag

SEQ ID NO: 365082 - RNA, 20 nt, Human
acucuugccuuaagcaagag

SEQ ID NO: 365083 - RNA, 23 nt, Human
acucuugccuuaagcaagaguug

SEQ ID NO: 365084 - RNA, 20 nt, Human
caacaagcagauucagucca

SEQ ID NO: 365085 - RNA, 20 nt, Human
caagaguacuacaguaauua

SEQ ID NO: 365086 - RNA, 21 nt, Human
caagaguacuacaguaauuau

SEQ ID NO: 365087 - RNA, 19 nt, Human
cacacaaccacucccuugg

SEQ ID NO: 365088 - RNA, 20 nt, Human
cucuugccuuaagcaagagu

SEQ ID NO: 365089 - RNA, 20 nt, Human
uacacugucaaauauauaaa

SEQ ID NO: 365090 - RNA, 19 nt, Human
uaucaggaauagacaauuu

SEQ ID NO: 365091 - RNA, 18 nt, Human
ucaguccacauuugcuuu

SEQ ID NO: 365092 - RNA, 21 nt, Human
ugaucaacaagcagauucagu

SEQ ID NO: 365093 - RNA, 22 nt, Human
ugccuuaagcaagaguacuaca

SEQ ID NO: 365094 - RNA, 22 nt, Human
aaccacacaauggaucugugaa

SEQ ID NO: 365095 - RNA, 23 nt, Human
aagcaucucuucugagguauucc

SEQ ID NO: 365096 - RNA, 25 nt, Human
aagcaucucuucugagguauuccuu

SEQ ID NO: 365097 - RNA, 21 nt, Human
augaacacucaaugaagcauc

SEQ ID NO: 365098 - RNA, 19 nt, Human
ccgcaggcagcccguucgu

SEQ ID NO: 365099 - RNA, 19 nt, Human
cucucagcccgcaggcagc

SEQ ID NO: 365100 - RNA, 20 nt, Human
cucucgcccacgcccggccu

SEQ ID NO: 365101 - RNA, 19 nt, Human
cugagguauuccuuucagu

SEQ ID NO: 365102 - RNA, 25 nt, Human
cuuucagucugguuuuaucccagaa

SEQ ID NO: 365103 - RNA, 23 nt, Human
ugaacacucaaugaagcaucucu

SEQ ID NO: 365104 - RNA, 21 nt, Human
uucgugcucucgcccacgccc

SEQ ID NO: 365105 - RNA, 25 nt, Human
aaagaggaggcagacugcugcagga

SEQ ID NO: 365106 - RNA, 21 nt, Human
aagaggaggcagacugcugca

SEQ ID NO: 365107 - RNA, 22 nt, Human
agaggaggcagacugcugcagg

SEQ ID NO: 365108 - RNA, 22 nt, Human
cagggggaaaaauccuaggaaa

SEQ ID NO: 365109 - RNA, 19 nt, Human
caucaucaucaucauggaa

SEQ ID NO: 365110 - RNA, 21 nt, Human
cgggaaccguuugacuccggc

SEQ ID NO: 365111 - RNA, 20 nt, Human
cgggacugggccgggaaccg

SEQ ID NO: 365112 - RNA, 23 nt, Human
uaaaguaguugccacugagaaac

SEQ ID NO: 365113 - RNA, 24 nt, Human
uggaaauggcuuuagaggaaaacu

SEQ ID NO: 365114 - RNA, 19 nt, Human
uguguuauagaauacaaca

SEQ ID NO: 365115 - RNA, 22 nt, Human
uuagauauuuuuauuucuccaa

SEQ ID NO: 365116 - RNA, 19 nt, Human
aaaggacggagcagccacc

SEQ ID NO: 365117 - RNA, 21 nt, Human
aaauaaauacuuagaacacga

SEQ ID NO: 365118 - RNA, 19 nt, Human
accccgugaucaagacacg

SEQ ID NO: 365119 - RNA, 18 nt, Human
agaacacgacuuggcucc

SEQ ID NO: 365120 - RNA, 19 nt, Human
aggauucuacgugguucuc

SEQ ID NO: 365121 - RNA, 26 nt, Human
caacauagaacauacucgccaguacu

SEQ ID NO: 365122 - RNA, 24 nt, Human
caaugcgccccuuuucuagagccu

SEQ ID NO: 365123 - RNA, 21 nt, Human
cccaugggccccacgcaggga

SEQ ID NO: 365124 - RNA, 25 nt, Human
cccgugaucaagacacggaaucggc

SEQ ID NO: 365125 - RNA, 22 nt, Human
ccgaaaggacggagcagccacc

SEQ ID NO: 365126 - RNA, 23 nt, Human
ccugccgccgccuggaccgaaag

SEQ ID NO: 365127 - RNA, 19 nt, Human
cgacuuggcuccuacaagc

SEQ ID NO: 365128 - RNA, 23 nt, Human
cgccuggaccgaaaggacggagc

SEQ ID NO: 365129 - RNA, 23 nt, Human
cucugcguccucuguuuauuguu

SEQ ID NO: 365130 - RNA, 23 nt, Human
cuggcucagcccugccgccgccu

SEQ ID NO: 365131 - RNA, 18 nt, Human
gaaaggacggagcagcca

SEQ ID NO: 365132 - RNA, 19 nt, Human
gaacacgacuuggcuccua

SEQ ID NO: 365133 - RNA, 20 nt, Human
gccggagaacgggcgcggag

SEQ ID NO: 365134 - RNA, 21 nt, Human
gccuggaccgaaaggacggag

SEQ ID NO: 365135 - RNA, 19 nt, Human
gcgccccuuuucuagagcc

SEQ ID NO: 365136 - RNA, 19 nt, Human
gcucagcccugccgccgcc

SEQ ID NO: 365137 - RNA, 18 nt, Human
ggagaacgggcgcggaga

SEQ ID NO: 365138 - RNA, 22 nt, Human
ggccccacgcagggacgccacg

SEQ ID NO: 365139 - RNA, 20 nt, Human
gggcgucgcuggcucagccc

SEQ ID NO: 365140 - RNA, 20 nt, Human
uacucgccaguacucggcug

SEQ ID NO: 365141 - RNA, 22 nt, Human
uccgcacgguugaggauucuac

SEQ ID NO: 365142 - RNA, 18 nt, Human
ucgcuggcucagcccugc

SEQ ID NO: 365143 - RNA, 23 nt, Human
ugcaaaacaggggcuagcgcuga

SEQ ID NO: 365144 - RNA, 21 nt, Human
ugcggcugggaaaaagacaac

SEQ ID NO: 365145 - RNA, 18 nt, Human
ugggaaaaagacaacugg

SEQ ID NO: 365146 - RNA, 27 nt, Human
ugggaaaaagacaacuggaauuucucg

SEQ ID NO: 365147 - RNA, 19 nt, Human
uggugugugugugugugug

SEQ ID NO: 365148 - RNA, 18 nt, Human
ugugcaaaacaggggcua

SEQ ID NO: 365149 - RNA, 18 nt, Human
uuagaacacgacuuggcu

SEQ ID NO: 365150 - RNA, 20 nt, Human
aaagaagucuacagcacuuc

SEQ ID NO: 365151 - RNA, 19 nt, Human
aaaugccauuagcuucaaa

SEQ ID NO: 365152 - RNA, 21 nt, Human
aaccguauuuucuucuuuuug

SEQ ID NO: 365153 - RNA, 18 nt, Human
aagccucuugaccuaugg

SEQ ID NO: 365154 - RNA, 22 nt, Human
aaggacaggaauggcacuuucc

SEQ ID NO: 365155 - RNA, 23 nt, Human
acuacaagaacaaaccugucuag

SEQ ID NO: 365156 - RNA, 24 nt, Human
acuuccaauguaaaucccaacuuc

SEQ ID NO: 365157 - RNA, 20 nt, Human
acuuugugauccagaagccu

SEQ ID NO: 365158 - RNA, 21 nt, Human
auaaccccuaaaacaggagag

SEQ ID NO: 365159 - RNA, 24 nt, Human
aucccaacuucaccgcuucaucuc

SEQ ID NO: 365160 - RNA, 22 nt, Human
augcacaguccaaauguauaac

SEQ ID NO: 365161 - RNA, 20 nt, Human
caagaaagccugaaaccgua

SEQ ID NO: 365162 - RNA, 19 nt, Human
ccacuguggaacugggaaa

SEQ ID NO: 365163 - RNA, 21 nt, Human
ccagcuacaagcucugcugca

SEQ ID NO: 365164 - RNA, 27 nt, Human
cuacagcacuuccaauguaaaucccaa

SEQ ID NO: 365165 - RNA, 21 nt, Human
gagacugugccuuaaggacag

SEQ ID NO: 365166 - RNA, 18 nt, Human
ggacaggaauggcacuuu

SEQ ID NO: 365167 - RNA, 20 nt, Human
ggacaggaauggcacuuucc

SEQ ID NO: 365168 - RNA, 18 nt, Human
ggagcaaagacuggggau

SEQ ID NO: 365169 - RNA, 20 nt, Human
uagaaaacuacaagaacaaa

SEQ ID NO: 365170 - RNA, 21 nt, Human
uauaaccccuaaaacaggaga

SEQ ID NO: 365171 - RNA, 22 nt, Human
uccaauguaaaucccaacuuca

SEQ ID NO: 365172 - RNA, 24 nt, Human
ucuucuuuuugacucuguccagcu

SEQ ID NO: 365173 - RNA, 23 nt, Human
ugcugcaguguguauauacaaau

SEQ ID NO: 365174 - RNA, 24 nt, Human
uguccagcuacaagcucugcugca

SEQ ID NO: 365175 - RNA, 22 nt, Human
uuggacacuugaaauuuuaacc

SEQ ID NO: 365176 - RNA, 19 nt, Human
uuggcuagacauucuucua

SEQ ID NO: 365177 - RNA, 26 nt, Human
uuucuucuuuuugacucuguccagcu

SEQ ID NO: 365178 - RNA, 21 nt, Human
aaaugccugacacauacucug

SEQ ID NO: 365179 - RNA, 22 nt, Human
cuauguggugaacacuucuucu

SEQ ID NO: 365180 - RNA, 22 nt, Human
uaauggaaauauauuaauauga

SEQ ID NO: 365181 - RNA, 21 nt, Human
uacuuauauaauuucauacua

SEQ ID NO: 365182 - RNA, 22 nt, Human
uaugugaaaaauaugccaugcu

SEQ ID NO: 365183 - RNA, 19 nt, Human
uauucugucaaaaauacuc

SEQ ID NO: 365184 - RNA, 20 nt, Human
ucuuguuccaaaguuugaaa

SEQ ID NO: 365185 - RNA, 20 nt, Human
ucuuuuuuuuuuucacugua

SEQ ID NO: 365186 - RNA, 19 nt, Human
ugaagaccuuugcaacuau

SEQ ID NO: 365187 - RNA, 19 nt, Human
ugagauucaaaacaguggc

SEQ ID NO: 365188 - RNA, 22 nt, Human
ugaggagcuucugcaacagugg

SEQ ID NO: 365189 - RNA, 23 nt, Human
uguggugaacacuucuucuugcc

SEQ ID NO: 365190 - RNA, 20 nt, Human
uucuucuugccuuuagcagg

SEQ ID NO: 365191 - RNA, 21 nt, Human
uugaagaccuuugcaacuaug

SEQ ID NO: 365192 - RNA, 20 nt, Human
uuguuccaaaguuugaaaca

SEQ ID NO: 365193 - RNA, 25 nt, Human
aaaaaagauuuuuauaaaccaugaa

SEQ ID NO: 365194 - RNA, 22 nt, Human
aaagugagcagugcauauuucc

SEQ ID NO: 365195 - RNA, 24 nt, Human
aaagugcugggauuacaggcauga

SEQ ID NO: 365196 - RNA, 25 nt, Human
aaauagcugggacuacaggcgcccg

SEQ ID NO: 365197 - RNA, 22 nt, Human
aaauccuaccccuccugcauuc

SEQ ID NO: 365198 - RNA, 18 nt, Human
aagaaaaacagagaagcc

SEQ ID NO: 365199 - RNA, 19 nt, Human
aagaaaaacagagaagcca

SEQ ID NO: 365200 - RNA, 22 nt, Human
aagaaugaguguuuugagucug

SEQ ID NO: 365201 - RNA, 25 nt, Human
aagacauucucaauuggggaccugg

SEQ ID NO: 365202 - RNA, 19 nt, Human
aagugcugggauuacaggc

SEQ ID NO: 365203 - RNA, 21 nt, Human
aagugcugggauuacaggcau

SEQ ID NO: 365204 - RNA, 26 nt, Human
aagugcugggauuacaggcaugagcc

SEQ ID NO: 365205 - RNA, 21 nt, Human
aaucauucgugacucgcuuga

SEQ ID NO: 365206 - RNA, 23 nt, Human
accagaauucaggauuaacccag

SEQ ID NO: 365207 - RNA, 23 nt, Human
accaugguuauguaagcacauca

SEQ ID NO: 365208 - RNA, 23 nt, Human
accauguuagccaggauggucuc

SEQ ID NO: 365209 - RNA, 22 nt, Human
accccuccugcauucuuccccu

SEQ ID NO: 365210 - RNA, 25 nt, Human
acccgccucggccucccaaagugcu

SEQ ID NO: 365211 - RNA, 21 nt, Human
accuuacauggugaucagugc

SEQ ID NO: 365212 - RNA, 18 nt, Human
acgggguuuuaccauguu

SEQ ID NO: 365213 - RNA, 19 nt, Human
acgggguuuuaccauguua

SEQ ID NO: 365214 - RNA, 20 nt, Human
acgggguuuuaccauguuag

SEQ ID NO: 365215 - RNA, 24 nt, Human
acgggguuuuaccauguuagccag

SEQ ID NO: 365216 - RNA, 19 nt, Human
acuacaggcgcccgccagg

SEQ ID NO: 365217 - RNA, 20 nt, Human
acugcaagcuccgccucccg

SEQ ID NO: 365218 - RNA, 23 nt, Human
agagaagccauucuaucuuuagg

SEQ ID NO: 365219 - RNA, 20 nt, Human
agagaccucccgaacccacu

SEQ ID NO: 365220 - RNA, 26 nt, Human
agauuuacaaccagaauucaggauua

SEQ ID NO: 365221 - RNA, 20 nt, Human
aggcuaauuucuuuuuuucu

SEQ ID NO: 365222 - RNA, 19 nt, Human
aggcuggagugcaguggca

SEQ ID NO: 365223 - RNA, 23 nt, Human
agugcaguggcacgaccucggcu

SEQ ID NO: 365224 - RNA, 24 nt, Human
agugcaguggcacgaccucggcuc

SEQ ID NO: 365225 - RNA, 18 nt, Human
agugcugggauuacaggc

SEQ ID NO: 365226 - RNA, 21 nt, Human
augaaguacaacuucauucac

SEQ ID NO: 365227 - RNA, 23 nt, Human
augucaucacaaaugaacccaga

SEQ ID NO: 365228 - RNA, 18 nt, Human
caaaauauauuggccugg

SEQ ID NO: 365229 - RNA, 24 nt, Human
caaagugcugggauuacaggcaug

SEQ ID NO: 365230 - RNA, 22 nt, Human
caagcaagacauucucaauugg

SEQ ID NO: 365231 - RNA, 23 nt, Human
cacccgccucggccucccaaagu

SEQ ID NO: 365232 - RNA, 22 nt, Human
cacgccauucuccugccuuagc

SEQ ID NO: 365233 - RNA, 23 nt, Human
cagaagaaaaacagagaagccau

SEQ ID NO: 365234 - RNA, 23 nt, Human
cagcauuauaauccuaguuaugc

SEQ ID NO: 365235 - RNA, 21 nt, Human
cagcauuuacuaaaugugacc

SEQ ID NO: 365236 - RNA, 20 nt, Human
caguggcacgaccucggcca

SEQ ID NO: 365237 - RNA, 21 nt, Human
caguggcacgaccucggcuca

SEQ ID NO: 365238 - RNA, 18 nt, Human
cauucacuccagugugaa

SEQ ID NO: 365239 - RNA, 25 nt, Human
cauucacuccagugugaaacagugg

SEQ ID NO: 365240 - RNA, 26 nt, Human
cauuuuuaaaacuccaauuuauuauc

SEQ ID NO: 365241 - RNA, 23 nt, Human
ccaaagugcugggauuacaggca

SEQ ID NO: 365242 - RNA, 24 nt, Human
ccaaagugcugggauuacaggcau

SEQ ID NO: 365243 - RNA, 24 nt, Human
cccaaagugcugggauuacaggca

SEQ ID NO: 365244 - RNA, 23 nt, Human
cccaaauagcugggacuacaggc

SEQ ID NO: 365245 - RNA, 18 nt, Human
ccccuuucccgaaccggg

SEQ ID NO: 365246 - RNA, 21 nt, Human
ccuccaugcaaugaucauuuc

SEQ ID NO: 365247 - RNA, 20 nt, Human
ccugaccucgugauccaccc

SEQ ID NO: 365248 - RNA, 23 nt, Human
ccugccuuagccucccaaauagc

SEQ ID NO: 365249 - RNA, 24 nt, Human
ccugccuuagccucccaaauagcu

SEQ ID NO: 365250 - RNA, 18 nt, Human
ccugucucugcucgcgcc

SEQ ID NO: 365251 - RNA, 21 nt, Human
ccugucucugcucgcgccccg

SEQ ID NO: 365252 - RNA, 19 nt, Human
ccuuggucgaagggaaaga

SEQ ID NO: 365253 - RNA, 26 nt, Human
cgcccggaaugccccgcggacuaccc

SEQ ID NO: 365254 - RNA, 19 nt, Human
cgccucccggguucacgcc

SEQ ID NO: 365255 - RNA, 24 nt, Human
cgccucggccucccaaagugcugg

SEQ ID NO: 365256 - RNA, 23 nt, Human
cggaaugccccgcggacuacccu

SEQ ID NO: 365257 - RNA, 26 nt, Human
cggagcaacagacaccuuggucgaag

SEQ ID NO: 365258 - RNA, 24 nt, Human
cggagucuugcucugucgcccagg

SEQ ID NO: 365259 - RNA, 22 nt, Human
cucauagagaccucccgaaccc

SEQ ID NO: 365260 - RNA, 20 nt, Human
cuccagugugaaauauaugg

SEQ ID NO: 365261 - RNA, 24 nt, Human
cucccaaauagcugggacuacagg

SEQ ID NO: 365262 - RNA, 21 nt, Human
cucccggguucacgccauucu

SEQ ID NO: 365263 - RNA, 24 nt, Human
cuccugaccucgugauccacccgc

SEQ ID NO: 365264 - RNA, 20 nt, Human
cucugucgcccaggcuggag

SEQ ID NO: 365265 - RNA, 21 nt, Human
cugcauucuuccccuuucccg

SEQ ID NO: 365266 - RNA, 24 nt, Human
cuuagccucccaaauagcugggac

SEQ ID NO: 365267 - RNA, 23 nt, Human
cuugcucauagagaccucccgaa

SEQ ID NO: 365268 - RNA, 22 nt, Human
gaccucgugauccacccgccuc

SEQ ID NO: 365269 - RNA, 22 nt, Human
gaccucgugauccacccgccuc

SEQ ID NO: 365270 - RNA, 24 nt, Human
gaccucgugauccacccgccucgg

SEQ ID NO: 365271 - RNA, 24 nt, Human
gagacgggguuuuaccauguuagc

SEQ ID NO: 365272 - RNA, 24 nt, Human
gagccaccgcgccuggccuacauu

SEQ ID NO: 365273 - RNA, 18 nt, Human
gauuacaggcaugagcca

SEQ ID NO: 365274 - RNA, 22 nt, Human
gauuacaggcaugagccaccgc

SEQ ID NO: 365275 - RNA, 22 nt, Human
gauuacaggcaugagccaccgc

SEQ ID NO: 365276 - RNA, 19 nt, Human
gcccaggcuggagugcagu

SEQ ID NO: 365277 - RNA, 23 nt, Human
gcccaggcuggagugcaguggca

SEQ ID NO: 365278 - RNA, 19 nt, Human
gccccgcggacuacccuuc

SEQ ID NO: 365279 - RNA, 25 nt, Human
gccucccggguucacgccauucucc

SEQ ID NO: 365280 - RNA, 25 nt, Human
gcucugucgcccaggcuggagugca

SEQ ID NO: 365281 - RNA, 19 nt, Human
gcuggagugcaguggcacg

SEQ ID NO: 365282 - RNA, 19 nt, Human
gcuuacccuggacgcugcc

SEQ ID NO: 365283 - RNA, 20 nt, Human
gcuuuuagguaaaccauuuc

SEQ ID NO: 365284 - RNA, 23 nt, Human
ggagucuugcucugucgcccagg

SEQ ID NO: 365285 - RNA, 22 nt, Human
ggauuacaggcaugagccaccg

SEQ ID NO: 365286 - RNA, 23 nt, Human
gggguuuuaccauguuagccagg

SEQ ID NO: 365287 - RNA, 22 nt, Human
ggguuuuaccauguuagccagg

SEQ ID NO: 365288 - RNA, 20 nt, Human
ggucucgaucuccugaccuc

SEQ ID NO: 365289 - RNA, 23 nt, Human
guagagacgggguuuuaccaugu

SEQ ID NO: 365290 - RNA, 20 nt, Human
gucuuagugcuucucuuuca

SEQ ID NO: 365291 - RNA, 19 nt, Human
gucuuucccaaccgauccu

SEQ ID NO: 365292 - RNA, 24 nt, Human
gugauccacccgccucggccuccc

SEQ ID NO: 365293 - RNA, 20 nt, Human
guuguauuucagaagaaaaa

SEQ ID NO: 365294 - RNA, 21 nt, Human
guuuauuuuauaaauaaagcc

SEQ ID NO: 365295 - RNA, 21 nt, Human
uaaaagacaacuuuacauuua

SEQ ID NO: 365296 - RNA, 21 nt, Human
uaaacucauuuuaaucaccau

SEQ ID NO: 365297 - RNA, 24 nt, Human
uaaagauuacuuacuuuacacacu

SEQ ID NO: 365298 - RNA, 21 nt, Human
uaaccagauuuacaaccagaa

SEQ ID NO: 365299 - RNA, 31 nt, Human
uaauuucuuuuuuucuauuuuuaguagagaa

SEQ ID NO: 365300 - RNA, 22 nt, Human
uacaggcaugagccaccgcgcc

SEQ ID NO: 365301 - RNA, 19 nt, Human
uaccauguuagccaggaug

SEQ ID NO: 365302 - RNA, 22 nt, Human
uaccauguuagccaggaugguc

SEQ ID NO: 365303 - RNA, 24 nt, Human
uaccauguuagccaggauggucuc

SEQ ID NO: 365304 - RNA, 19 nt, Human
uacuuuacacacugcuaaa

SEQ ID NO: 365305 - RNA, 22 nt, Human
uagaagagacaguauucccgca

SEQ ID NO: 365306 - RNA, 21 nt, Human
uagaagcagucuuagugcuuc

SEQ ID NO: 365307 - RNA, 22 nt, Human
uagagacgggguuuuaccaugu

SEQ ID NO: 365308 - RNA, 24 nt, Human
uaguagagacgggguuuuaccaug

SEQ ID NO: 365309 - RNA, 24 nt, Human
uauaacaccagcuuacccuggacg

SEQ ID NO: 365310 - RNA, 18 nt, Human
uauacaugccuccaugca

SEQ ID NO: 365311 - RNA, 18 nt, Human
uaucaggaaagaaauccu

SEQ ID NO: 365312 - RNA, 22 nt, Human
ucaaaaaaaccuguauuuuuca

SEQ ID NO: 365313 - RNA, 23 nt, Human
ucaagcaagacauucucaauugg

SEQ ID NO: 365314 - RNA, 18 nt, Human
ucacugcaagcuccgccu

SEQ ID NO: 365315 - RNA, 19 nt, Human
ucacugcaagcuccgccuc

SEQ ID NO: 365316 - RNA, 24 nt, Human
ucacugcaagcuccgccucccggg

SEQ ID NO: 365317 - RNA, 19 nt, Human
ucaggaaagaaauccuacc

SEQ ID NO: 365318 - RNA, 23 nt, Human
ucauucacuccagugugaaauau

SEQ ID NO: 365319 - RNA, 23 nt, Human
ucauuugucugcaucaauauuuc

SEQ ID NO: 365320 - RNA, 28 nt, Human
uccaaaguauuuucaaaggcuuuuauug

SEQ ID NO: 365321 - RNA, 24 nt, Human
ucccaaagugcugggauuacaggc

SEQ ID NO: 365322 - RNA, 24 nt, Human
ucccaaauagcugggacuacaggc

SEQ ID NO: 365323 - RNA, 19 nt, Human
uccccaagaucaaagccug

SEQ ID NO: 365324 - RNA, 21 nt, Human
ucccggguucacgccauucuc

SEQ ID NO: 365325 - RNA, 24 nt, Human
ucccggguucacgccauucuccug

SEQ ID NO: 365326 - RNA, 23 nt, Human
uccuaccccuccugcauucuucc

SEQ ID NO: 365327 - RNA, 22 nt, Human
uccugcauucuuccccuuuccc

SEQ ID NO: 365328 - RNA, 21 nt, Human
uccuugcucauagagaccucc

SEQ ID NO: 365329 - RNA, 22 nt, Human
ucgcccaggcuggagugcagug

SEQ ID NO: 365330 - RNA, 18 nt, Human
ucggccucccaaagugcu

SEQ ID NO: 365331 - RNA, 22 nt, Human
ucgucugaauaauucuagccau

SEQ ID NO: 365332 - RNA, 23 nt, Human
ucuagaaaauuguuggcacuuag

SEQ ID NO: 365333 - RNA, 26 nt, Human
ucuccugccuuagccucccaaauagc

SEQ ID NO: 365334 - RNA, 20 nt, Human
ucugcaucaauauuucaaaa

SEQ ID NO: 365335 - RNA, 24 nt, Human
ucugucgcccaggcuggagugcag

SEQ ID NO: 365336 - RNA, 18 nt, Human
ucuuccccuuucccgaac

SEQ ID NO: 365337 - RNA, 22 nt, Human
ucuugcucugucgcccaggcug

SEQ ID NO: 365338 - RNA, 23 nt, Human
ucuugcucugucgcccaggcugg

SEQ ID NO: 365339 - RNA, 24 nt, Human
ucuugcucugucgcccaggcugga

SEQ ID NO: 365340 - RNA, 20 nt, Human
ugaagaaauagucaaugcau

SEQ ID NO: 365341 - RNA, 19 nt, Human
ugagaaaaaauauaaacuc

SEQ ID NO: 365342 - RNA, 21 nt, Human
ugagaaaaaauauaaacucau

SEQ ID NO: 365343 - RNA, 22 nt, Human
ugagacggagucuugcucuguc

SEQ ID NO: 365344 - RNA, 23 nt, Human
ugagcagugcauauuuccuuuau

SEQ ID NO: 365345 - RNA, 23 nt, Human
ugcaggacuugagugugcacaaa

SEQ ID NO: 365346 - RNA, 20 nt, Human
ugcaguggcacgaccucggc

SEQ ID NO: 365347 - RNA, 19 nt, Human
ugccccgcggacuacccuu

SEQ ID NO: 365348 - RNA, 18 nt, Human
ugccuccaugcaaugauc

SEQ ID NO: 365349 - RNA, 24 nt, Human
ugccuuagccucccaaauagcugg

SEQ ID NO: 365350 - RNA, 23 nt, Human
uggagugcaguggcacgaccucg

SEQ ID NO: 365351 - RNA, 24 nt, Human
uggagugcaguggcacgaccucgg

SEQ ID NO: 365352 - RNA, 18 nt, Human
uggccugguucuguagcu

SEQ ID NO: 365353 - RNA, 19 nt, Human
ugggacuacaggcgcccgc

SEQ ID NO: 365354 - RNA, 21 nt, Human
ugggacuacaggcgcccgcca

SEQ ID NO: 365355 - RNA, 25 nt, Human
ugggacuacaggcgcccgccagcca

SEQ ID NO: 365356 - RNA, 28 nt, Human
ugggacuacaggcgcccgccagccacca

SEQ ID NO: 365357 - RNA, 18 nt, Human
ugggauuacaggcaugag

SEQ ID NO: 365358 - RNA, 19 nt, Human
ugggauuacaggcaugagc

SEQ ID NO: 365359 - RNA, 21 nt, Human
ugggauuacaggcaugagcca

SEQ ID NO: 365360 - RNA, 22 nt, Human
ugggauuacaggcaugagccac

SEQ ID NO: 365361 - RNA, 23 nt, Human
ugggauuacaggcaugagccacc

SEQ ID NO: 365362 - RNA, 24 nt, Human
ugggauuacaggcaugagccaccg

SEQ ID NO: 365363 - RNA, 24 nt, Human
ugggauuacaggcaugagccaccg

SEQ ID NO: 365364 - RNA, 23 nt, Human
uguagaucagcagcguauuauaa

SEQ ID NO: 365365 - RNA, 24 nt, Human
uuaccauguuagccaggauggucu

SEQ ID NO: 365366 - RNA, 21 nt, Human
uuagcaaaucugugauguaga

SEQ ID NO: 365367 - RNA, 18 nt, Human
uuaguagagacgggguuu

SEQ ID NO: 365368 - RNA, 22 nt, Human
uuaguagagacgggguuuuacc

SEQ ID NO: 365369 - RNA, 24 nt, Human
uuaguagagacgggguuuuaccau

SEQ ID NO: 365370 - RNA, 21 nt, Human
uucaaauguacaugauuugau

SEQ ID NO: 365371 - RNA, 18 nt, Human
uucacaaaauacauagaa

SEQ ID NO: 365372 - RNA, 23 nt, Human
uucacaaaauacauagaagagac

SEQ ID NO: 365373 - RNA, 24 nt, Human
uugcucugucgcccaggcuggagu

SEQ ID NO: 365374 - RNA, 21 nt, Human
uuggucaaaaaaaccuguauu

SEQ ID NO: 365375 - RNA, 22 nt, Human
uuugcugacuuaugucaucaca

SEQ ID NO: 365376 - RNA, 24 nt, Human
uuuuuaguagagacgggguuuuac

SEQ ID NO: 365377 - RNA, 22 nt, Human
uuuuucuauuuuuaguagagaa

SEQ ID NO: 365378 - RNA, 24 nt, Human
uuuuuucuauuuuuaguagagacg

SEQ ID NO: 365379 - RNA, 22 nt, Human
uuuuuucuauuuuuaguagagg

SEQ ID NO: 365380 - RNA, 27 nt, Human
uuuuuuuuuuuuuuuuuuuuuuugggg

SEQ ID NO: 365381 - RNA, 23 nt, Human
agaugguucccgggggagaacag

SEQ ID NO: 365382 - RNA, 23 nt, Human
agggaagguggggacagaugguu

SEQ ID NO: 365383 - RNA, 25 nt, Human
aguccuguggcuucccugaagaggg

SEQ ID NO: 365384 - RNA, 19 nt, Human
ccucagaagcgcagaagca

SEQ ID NO: 365385 - RNA, 20 nt, Human
ccuguggcuucccugaagag

SEQ ID NO: 365386 - RNA, 23 nt, Human
ggaagguggggacagaugguucc

SEQ ID NO: 365387 - RNA, 20 nt, Human
gggaagguggggacagaugg

SEQ ID NO: 365388 - RNA, 22 nt, Human
gguucccgggggagaacagccc

SEQ ID NO: 365389 - RNA, 22 nt, Human
uaaguccuguggcuucccugaa

SEQ ID NO: 365390 - RNA, 23 nt, Human
uaaguccuguggcuucccugaag

SEQ ID NO: 365391 - RNA, 18 nt, Human
ucccugaagagggcucug

SEQ ID NO: 365392 - RNA, 19 nt, Human
aaacaucuuggugagugag

SEQ ID NO: 365393 - RNA, 19 nt, Human
aaagcgcugggauuacagg

SEQ ID NO: 365394 - RNA, 24 nt, Human
aaagcgcugggauuacaggcguga

SEQ ID NO: 365395 - RNA, 19 nt, Human
aagcgcugggauuacaggc

SEQ ID NO: 365396 - RNA, 26 nt, Human
aagcgcugggauuacaggcgugagcc

SEQ ID NO: 365397 - RNA, 23 nt, Human
acccagcuuggggaauugauucc

SEQ ID NO: 365398 - RNA, 18 nt, Human
acgggguuucaccguguu

SEQ ID NO: 365399 - RNA, 19 nt, Human
acgggguuucaccguguua

SEQ ID NO: 365400 - RNA, 20 nt, Human
acgggguuucaccguguuag

SEQ ID NO: 365401 - RNA, 24 nt, Human
acgggguuucaccguguuagccag

SEQ ID NO: 365402 - RNA, 19 nt, Human
agagacgggguuucaccgu

SEQ ID NO: 365403 - RNA, 18 nt, Human
agcgcugggauuacaggc

SEQ ID NO: 365404 - RNA, 18 nt, Human
aggcgugagccacugagc

SEQ ID NO: 365405 - RNA, 20 nt, Human
aguacaguggcgcgaucccg

SEQ ID NO: 365406 - RNA, 21 nt, Human
aguagagacgggguuucaccg

SEQ ID NO: 365407 - RNA, 21 nt, Human
aguagcugggacuacagucgc

SEQ ID NO: 365408 - RNA, 24 nt, Human
caaagcgcugggauuacaggcgug

SEQ ID NO: 365409 - RNA, 24 nt, Human
caauuuuuuguaccuuuaguagag

SEQ ID NO: 365410 - RNA, 18 nt, Human
caccguguuagccaggau

SEQ ID NO: 365411 - RNA, 24 nt, Human
caccguguuagccaggauggucuc

SEQ ID NO: 365412 - RNA, 21 nt, Human
cacgccauucuccugccucag

SEQ ID NO: 365413 - RNA, 18 nt, Human
cagucgcccgacaccacu

SEQ ID NO: 365414 - RNA, 22 nt, Human
ccaaagcgcugggauuacaggc

SEQ ID NO: 365415 - RNA, 23 nt, Human
ccaaagcgcugggauuacaggcg

SEQ ID NO: 365416 - RNA, 24 nt, Human
ccaaagcgcugggauuacaggcgu

SEQ ID NO: 365417 - RNA, 21 nt, Human
cccgccucggccucccaaagc

SEQ ID NO: 365418 - RNA, 21 nt, Human
cccggcucgcugcaagcuccg

SEQ ID NO: 365419 - RNA, 24 nt, Human
ccucccggauucacgccauucucc

SEQ ID NO: 365420 - RNA, 20 nt, Human
ccugacccugcgauccgccc

SEQ ID NO: 365421 - RNA, 19 nt, Human
cgccucccggauucacgcc

SEQ ID NO: 365422 - RNA, 24 nt, Human
cgccucggccucccaaagcgcugg

SEQ ID NO: 365423 - RNA, 22 nt, Human
cgcucugucacccaggcuggag

SEQ ID NO: 365424 - RNA, 24 nt, Human
cgggguuucaccguguuagccagg

SEQ ID NO: 365425 - RNA, 24 nt, Human
cucagucucgcgaguagcugggac

SEQ ID NO: 365426 - RNA, 24 nt, Human
cuccugacccugcgauccgcccgc

SEQ ID NO: 365427 - RNA, 24 nt, Human
cucgcucugucacccaggcuggag

SEQ ID NO: 365428 - RNA, 23 nt, Human
cucugucacccaggcuggaguac

SEQ ID NO: 365429 - RNA, 23 nt, Human
cugccucagucucgcgaguagcu

SEQ ID NO: 365430 - RNA, 19 nt, Human
cugucacccaggcuggagu

SEQ ID NO: 365431 - RNA, 24 nt, Human
gagacgggguuucaccguguuagc

SEQ ID NO: 365432 - RNA, 18 nt, Human
gauuacaggcgugagcca

SEQ ID NO: 365433 - RNA, 21 nt, Human
gauuacaggcgugagccacug

SEQ ID NO: 365434 - RNA, 24 nt, Human
gauuacaggcgugagccacugagc

SEQ ID NO: 365435 - RNA, 24 nt, Human
gcgauccgcccgccucggccuccc

SEQ ID NO: 365436 - RNA, 24 nt, Human
gcuggaguacaguggcgcgauccc

SEQ ID NO: 365437 - RNA, 23 nt, Human
gcugggauuacaggcgugagcca

SEQ ID NO: 365438 - RNA, 23 nt, Human
gggguuucaccguguuagccagg

SEQ ID NO: 365439 - RNA, 23 nt, Human
guagagacgggguuucaccgugu

SEQ ID NO: 365440 - RNA, 19 nt, Human
gugagccacugagcccggc

SEQ ID NO: 365441 - RNA, 18 nt, Human
uacaggcgugagccacug

SEQ ID NO: 365442 - RNA, 19 nt, Human
uacaggcgugagccacuga

SEQ ID NO: 365443 - RNA, 23 nt, Human
uacaggcgugagccacugagccc

SEQ ID NO: 365444 - RNA, 21 nt, Human
uaguagagacgggguuucacc

SEQ ID NO: 365445 - RNA, 24 nt, Human
uaguagagacgggguuucaccgug

SEQ ID NO: 365446 - RNA, 26 nt, Human
uaguagagacgggguuucaccguguu

SEQ ID NO: 365447 - RNA, 24 nt, Human
ucaccguguuagccaggauggucu

SEQ ID NO: 365448 - RNA, 24 nt, Human
ucccaaagcgcugggauuacaggc

SEQ ID NO: 365449 - RNA, 20 nt, Human
ucccggauucacgccauucu

SEQ ID NO: 365450 - RNA, 24 nt, Human
ucccggauucacgccauucuccug

SEQ ID NO: 365451 - RNA, 18 nt, Human
ucgcccgacaccacuccc

SEQ ID NO: 365452 - RNA, 23 nt, Human
ucgcgaguagcugggacuacagu

SEQ ID NO: 365453 - RNA, 18 nt, Human
ucgcugcaagcuccgccu

SEQ ID NO: 365454 - RNA, 19 nt, Human
ucgcugcaagcuccgccuc

SEQ ID NO: 365455 - RNA, 23 nt, Human
ucgcugcaagcuccgccucccgg

SEQ ID NO: 365456 - RNA, 24 nt, Human
ucgcugcaagcuccgccucccgga

SEQ ID NO: 365457 - RNA, 19 nt, Human
ucuccucaacccagcuugg

SEQ ID NO: 365458 - RNA, 19 nt, Human
ucucgcucugucacccagg

SEQ ID NO: 365459 - RNA, 23 nt, Human
ucucgcucugucacccaggcugg

SEQ ID NO: 365460 - RNA, 24 nt, Human
ucucgcucugucacccaggcugga

SEQ ID NO: 365461 - RNA, 25 nt, Human
ucucgcucugucacccaggcuggag

SEQ ID NO: 365462 - RNA, 26 nt, Human
ucucgcucugucacccaggcuggagu

SEQ ID NO: 365463 - RNA, 18 nt, Human
ucugucacccaggcugga

SEQ ID NO: 365464 - RNA, 24 nt, Human
ucugucacccaggcuggaguacag

SEQ ID NO: 365465 - RNA, 18 nt, Human
ugagacagagucucgcuc

SEQ ID NO: 365466 - RNA, 22 nt, Human
ugagacagagucucgcucuguc

SEQ ID NO: 365467 - RNA, 24 nt, Human
ugccucagucucgcgaguagcugg

SEQ ID NO: 365468 - RNA, 24 nt, Human
uggaguacaguggcgcgaucccgg

SEQ ID NO: 365469 - RNA, 18 nt, Human
ugggauuacaggcgugag

SEQ ID NO: 365470 - RNA, 19 nt, Human
ugggauuacaggcgugagc

SEQ ID NO: 365471 - RNA, 21 nt, Human
ugggauuacaggcgugagcca

SEQ ID NO: 365472 - RNA, 22 nt, Human
ugggauuacaggcgugagccac

SEQ ID NO: 365473 - RNA, 22 nt, Human
ugggauuacaggcgugagccac

SEQ ID NO: 365474 - RNA, 24 nt, Human
ugggauuacaggcgugagccacug

SEQ ID NO: 365475 - RNA, 26 nt, Human
ugggauuacaggcgugagccacugag

SEQ ID NO: 365476 - RNA, 20 nt, Human
uguucuccucaacccagcuu

SEQ ID NO: 365477 - RNA, 18 nt, Human
uuaguagagacgggguuu

SEQ ID NO: 365478 - RNA, 22 nt, Human
uuaguagagacgggguuucacc

SEQ ID NO: 365479 - RNA, 24 nt, Human
uuaguagagacgggguuucaccgu

SEQ ID NO: 365480 - RNA, 21 nt, Human
uugcaaucacaaagcuuuuaa

SEQ ID NO: 365481 - RNA, 19 nt, Human
uuggggaauugauucccuc

SEQ ID NO: 365482 - RNA, 19 nt, Human
uuucaccguguuagccagg

SEQ ID NO: 365483 - RNA, 21 nt, Human
uuuuuguaccuuuaguagaga

SEQ ID NO: 365484 - RNA, 24 nt, Human
uuuuuuguaccuuuaguagagacg

SEQ ID NO: 365485 - RNA, 18 nt, Human
aaaugccgaggcuacacc

SEQ ID NO: 365486 - RNA, 23 nt, Human
aagcagggaucagucagagccaa

SEQ ID NO: 365487 - RNA, 25 nt, Human
acacauacacagagacacacguggg

SEQ ID NO: 365488 - RNA, 19 nt, Human
accccaggacaggcagaca

SEQ ID NO: 365489 - RNA, 18 nt, Human
agacacacagacacauac

SEQ ID NO: 365490 - RNA, 19 nt, Human
agaggaggaggcgcagggg

SEQ ID NO: 365491 - RNA, 21 nt, Human
agggggacauggaaaaaacac

SEQ ID NO: 365492 - RNA, 23 nt, Human
caagaaagguuuauuuaaaucag

SEQ ID NO: 365493 - RNA, 19 nt, Human
caagagccuccacuggccu

SEQ ID NO: 365494 - RNA, 21 nt, Human
caagcagggaucagucagagc

SEQ ID NO: 365495 - RNA, 21 nt, Human
caagcccaagagccuccacug

SEQ ID NO: 365496 - RNA, 20 nt, Human
cacacguguucuccaagccc

SEQ ID NO: 365497 - RNA, 19 nt, Human
cagacagggagggaggcag

SEQ ID NO: 365498 - RNA, 23 nt, Human
cagacagggagggaggcaggcag

SEQ ID NO: 365499 - RNA, 18 nt, Human
cagacagucugacagaca

SEQ ID NO: 365500 - RNA, 23 nt, Human
cagaggcucccuccccagggccu

SEQ ID NO: 365501 - RNA, 21 nt, Human
cagcucccucccucaggggcc

SEQ ID NO: 365502 - RNA, 19 nt, Human
cagcuggacagcgcagccc

SEQ ID NO: 365503 - RNA, 18 nt, Human
cagggccuggagauccgg

SEQ ID NO: 365504 - RNA, 18 nt, Human
caggggccugcugagacu

SEQ ID NO: 365505 - RNA, 24 nt, Human
caugauggguaaaaacugggcaug

SEQ ID NO: 365506 - RNA, 20 nt, Human
ccaaacccacaaugucccca

SEQ ID NO: 365507 - RNA, 22 nt, Human
ccaaacccacaauguccccacu

SEQ ID NO: 365508 - RNA, 23 nt, Human
ccaagcccaagagccuccacugg

SEQ ID NO: 365509 - RNA, 21 nt, Human
ccagaccacucaggaucaccc

SEQ ID NO: 365510 - RNA, 26 nt, Human
ccagaggcucccuccccagggccugg

SEQ ID NO: 365511 - RNA, 21 nt, Human
ccagcacacgccguggaaagc

SEQ ID NO: 365512 - RNA, 20 nt, Human
cccacaauguccccacuguc

SEQ ID NO: 365513 - RNA, 23 nt, Human
cccacaauguccccacuguccgu

SEQ ID NO: 365514 - RNA, 24 nt, Human
ccuccacuggccugcacaagcagg

SEQ ID NO: 365515 - RNA, 20 nt, Human
ccucccucaggggccugcug

SEQ ID NO: 365516 - RNA, 22 nt, Human
ccugcugagacuuuggagugag

SEQ ID NO: 365517 - RNA, 19 nt, Human
ccuggcugacagcucccuc

SEQ ID NO: 365518 - RNA, 20 nt, Human
cgacucugagccccaaaccc

SEQ ID NO: 365519 - RNA, 21 nt, Human
cggacgcagacacacagacac

SEQ ID NO: 365520 - RNA, 22 nt, Human
cguccagaggcucccuccccag

SEQ ID NO: 365521 - RNA, 21 nt, Human
cucccucccucaggggccugc

SEQ ID NO: 365522 - RNA, 20 nt, Human
cucggggcuggggccauagc

SEQ ID NO: 365523 - RNA, 19 nt, Human
cugagccccaaacccacaa

SEQ ID NO: 365524 - RNA, 24 nt, Human
gaaaaaaccgccagaccacucagg

SEQ ID NO: 365525 - RNA, 23 nt, Human
gaauggaguauaucaggucaaac

SEQ ID NO: 365526 - RNA, 22 nt, Human
gagaaacucaagcaaaugccga

SEQ ID NO: 365527 - RNA, 24 nt, Human
gaugguguucucgguuuucccugg

SEQ ID NO: 365528 - RNA, 23 nt, Human
gcagacacacagacacauacaca

SEQ ID NO: 365529 - RNA, 19 nt, Human
gcaguccuucuguccaucc

SEQ ID NO: 365530 - RNA, 18 nt, Human
gccauagccacagcugga

SEQ ID NO: 365531 - RNA, 23 nt, Human
ggaaaaaacacagaggaggaggc

SEQ ID NO: 365532 - RNA, 18 nt, Human
ggacgcagacacacagac

SEQ ID NO: 365533 - RNA, 22 nt, Human
ggcaggaggcagacagggaggg

SEQ ID NO: 365534 - RNA, 18 nt, Human
gggcaggaggcagacagg

SEQ ID NO: 365535 - RNA, 24 nt, Human
gugaugguguucucgguuuucccu

SEQ ID NO: 365536 - RNA, 24 nt, Human
guggaaagcagaagucaguuagaa

SEQ ID NO: 365537 - RNA, 22 nt, Human
uaaaaaaggcaguaacguggca

SEQ ID NO: 365538 - RNA, 25 nt, Human
uagaagaaaaaaccgccagaccacu

SEQ ID NO: 365539 - RNA, 19 nt, Human
uagccacagcuggacagcg

SEQ ID NO: 365540 - RNA, 21 nt, Human
ucagacccagcuccuagccac

SEQ ID NO: 365541 - RNA, 22 nt, Human
ucagagagccucugaaggcacc

SEQ ID NO: 365542 - RNA, 22 nt, Human
ucaggaucaccccuggcagaag

SEQ ID NO: 365543 - RNA, 22 nt, Human
ucaguuagaagaaaaaacccua

SEQ ID NO: 365544 - RNA, 23 nt, Human
uccguccagaggcucccucccca

SEQ ID NO: 365545 - RNA, 19 nt, Human
uccuagccaccccaggaca

SEQ ID NO: 365546 - RNA, 20 nt, Human
ucgacucugagccccaaacc

SEQ ID NO: 365547 - RNA, 22 nt, Human
ucuccaagcccaagagccucca

SEQ ID NO: 365548 - RNA, 24 nt, Human
ugagccccaaacccacaauguccc

SEQ ID NO: 365549 - RNA, 18 nt, Human
ugauggguaaaaacuggg

SEQ ID NO: 365550 - RNA, 22 nt, Human
ugauggguaaaaacugggcaug

SEQ ID NO: 365551 - RNA, 24 nt, Human
ugauggguaaaaacugggcauggg

SEQ ID NO: 365552 - RNA, 19 nt, Human
uggaaaaaacacagaggag

SEQ ID NO: 365553 - RNA, 21 nt, Human
uggaaaaaacacagaggagga

SEQ ID NO: 365554 - RNA, 18 nt, Human
uggagugagcauccggac

SEQ ID NO: 365555 - RNA, 23 nt, Human
uggcugacagcucccucccucag

SEQ ID NO: 365556 - RNA, 18 nt, Human
uggggaguugggaggggg

SEQ ID NO: 365557 - RNA, 19 nt, Human
uuagaagaaaaaaccgcca

SEQ ID NO: 365558 - RNA, 22 nt, Human
uucccaggccugcgggccccua

SEQ ID NO: 365559 - RNA, 19 nt, Human
uucccuggcugacagcucc

SEQ ID NO: 365560 - RNA, 18 nt, Human
accgguggugauuucuuc

SEQ ID NO: 365561 - RNA, 19 nt, Human
acuccaaguggaugaagag

SEQ ID NO: 365562 - RNA, 21 nt, Human
agaggcugccaaagagccugg

SEQ ID NO: 365563 - RNA, 21 nt, Human
augaagagcagcuccugcccg

SEQ ID NO: 365564 - RNA, 22 nt, Human
augaccgguggugauuucuucc

SEQ ID NO: 365565 - RNA, 23 nt, Human
augaccgguggugauuucuuccc

SEQ ID NO: 365566 - RNA, 18 nt, Human
caaagagccuggaggggc

SEQ ID NO: 365567 - RNA, 24 nt, Human
ccaagcucgccauucgcccugggc

SEQ ID NO: 365568 - RNA, 22 nt, Human
cccgcagaggccugagccaagg

SEQ ID NO: 365569 - RNA, 20 nt, Human
ccgcagaggccugagccaag

SEQ ID NO: 365570 - RNA, 18 nt, Human
ccucaggcccaggggccu

SEQ ID NO: 365571 - RNA, 24 nt, Human
cucaggcccaggggccuccacccc

SEQ ID NO: 365572 - RNA, 25 nt, Human
cuccugcccgcugcuggcagccuca

SEQ ID NO: 365573 - RNA, 23 nt, Human
uccaaguggaugaagagcagcuc

SEQ ID NO: 365574 - RNA, 19 nt, Human
uccccgcagcacuccaagu

SEQ ID NO: 365575 - RNA, 21 nt, Human
ucgagaagaggcugccaaaga

SEQ ID NO: 365576 - RNA, 22 nt, Human
ugauuucuuccccgcagcacuc

SEQ ID NO: 365577 - RNA, 18 nt, Human
ugccaaagagccuggagg

SEQ ID NO: 365578 - RNA, 19 nt, Human
uggaugaagagcagcuccu

SEQ ID NO: 365579 - RNA, 19 nt, Human
ugggcuggaucucagcucc

SEQ ID NO: 365580 - RNA, 23 nt, Human
aaauccuaauggagccugacccc

SEQ ID NO: 365581 - RNA, 18 nt, Human
aacccggcagcccagacu

SEQ ID NO: 365582 - RNA, 18 nt, Human
aaccuccuacccucaauc

SEQ ID NO: 365583 - RNA, 22 nt, Human
aaugcgauuucaagccugagca

SEQ ID NO: 365584 - RNA, 20 nt, Human
acacaacagggcaggagucu

SEQ ID NO: 365585 - RNA, 21 nt, Human
acagucuugcuuuuguuaaaa

SEQ ID NO: 365586 - RNA, 18 nt, Human
accaaaaauauauauaaa

SEQ ID NO: 365587 - RNA, 21 nt, Human
accaacuaucaaauaugugau

SEQ ID NO: 365588 - RNA, 18 nt, Human
acuggcccuuccccucuc

SEQ ID NO: 365589 - RNA, 22 nt, Human
acuggcccuuccccucuccucc

SEQ ID NO: 365590 - RNA, 19 nt, Human
agaaaggagccccaggccc

SEQ ID NO: 365591 - RNA, 18 nt, Human
agacuagaacccggcagc

SEQ ID NO: 365592 - RNA, 20 nt, Human
agccccaggcccggcucggc

SEQ ID NO: 365593 - RNA, 24 nt, Human
agccguugcagugguugcaacccc

SEQ ID NO: 365594 - RNA, 23 nt, Human
caagaggacacugaugagaggua

SEQ ID NO: 365595 - RNA, 22 nt, Human
caagccugagcaucacggcugg

SEQ ID NO: 365596 - RNA, 19 nt, Human
cagcagaacggguggccau

SEQ ID NO: 365597 - RNA, 19 nt, Human
caucuauacacaacagggc

SEQ ID NO: 365598 - RNA, 25 nt, Human
ccaacuggucucagguaaagaaaga

SEQ ID NO: 365599 - RNA, 22 nt, Human
ccagacuggcccuuccccucuc

SEQ ID NO: 365600 - RNA, 19 nt, Human
ccauccaaaccuccuaccc

SEQ ID NO: 365601 - RNA, 18 nt, Human
ccccaggcccggcucggc

SEQ ID NO: 365602 - RNA, 18 nt, Human
cccuuccccucuccuccc

SEQ ID NO: 365603 - RNA, 22 nt, Human
ccugaccccuagaguggggaga

SEQ ID NO: 365604 - RNA, 19 nt, Human
cgcugcgcugguggcucug

SEQ ID NO: 365605 - RNA, 23 nt, Human
cggguggccauagccaccuccug

SEQ ID NO: 365606 - RNA, 23 nt, Human
cuaguguuuuuuugaacaccaac

SEQ ID NO: 365607 - RNA, 20 nt, Human
cugacaucugucagguuugg

SEQ ID NO: 365608 - RNA, 24 nt, Human
gacaaccaaaaauauauauaaaua

SEQ ID NO: 365609 - RNA, 18 nt, Human
gcaggcucccacaggccc

SEQ ID NO: 365610 - RNA, 18 nt, Human
gcaggcucccacaggccc

SEQ ID NO: 365611 - RNA, 21 nt, Human
gcugggagcaggccgggcugg

SEQ ID NO: 365612 - RNA, 20 nt, Human
ggcucggcugacaucuguca

SEQ ID NO: 365613 - RNA, 20 nt, Human
ggcuuagucuccacccucag

SEQ ID NO: 365614 - RNA, 22 nt, Human
uaaaaauaacaaaaucaguaau

SEQ ID NO: 365615 - RNA, 23 nt, Human
uaacaaaaucaguaauaaaaaaa

SEQ ID NO: 365616 - RNA, 20 nt, Human
uaucuugcaucuauacacaa

SEQ ID NO: 365617 - RNA, 23 nt, Human
ucaaaauaaugcgauuucaagcc

SEQ ID NO: 365618 - RNA, 21 nt, Human
ucaggcucgugcuccgguccg

SEQ ID NO: 365619 - RNA, 22 nt, Human
ucaggcugauauaaaaauaaca

SEQ ID NO: 365620 - RNA, 23 nt, Human
ucaggcugauauaaaaauaacaa

SEQ ID NO: 365621 - RNA, 20 nt, Human
uccaaaccuccuacccucaa

SEQ ID NO: 365622 - RNA, 22 nt, Human
uccaaaccuccuacccucaauc

SEQ ID NO: 365623 - RNA, 21 nt, Human
uccacccucaggcauggaacc

SEQ ID NO: 365624 - RNA, 21 nt, Human
ucccauccaaaccuccuaccc

SEQ ID NO: 365625 - RNA, 18 nt, Human
uccccucuccucccugca

SEQ ID NO: 365626 - RNA, 21 nt, Human
ugagcaacagucuugcuuuug

SEQ ID NO: 365627 - RNA, 18 nt, Human
ugagcagugaguuugcag

SEQ ID NO: 365628 - RNA, 19 nt, Human
ugcaaccccacuuacuucu

SEQ ID NO: 365629 - RNA, 19 nt, Human
uggcccuuccccucuccuc

SEQ ID NO: 365630 - RNA, 22 nt, Human
uggcuggagaaaggagccccag

SEQ ID NO: 365631 - RNA, 22 nt, Human
ugggaaggggcaaauccuaaug

SEQ ID NO: 365632 - RNA, 21 nt, Human
ugggauagaagcuuuguaguu

SEQ ID NO: 365633 - RNA, 22 nt, Human
ugggcacaggagacucaggcug

SEQ ID NO: 365634 - RNA, 20 nt, Human
uggguaggaagagaugggaa

SEQ ID NO: 365635 - RNA, 24 nt, Human
ugguugcaaccccacuuacuucug

SEQ ID NO: 365636 - RNA, 19 nt, Human
uuacuucugucucacuccc

SEQ ID NO: 365637 - RNA, 21 nt, Human
uuauaaaaccuguugcuuguc

SEQ ID NO: 365638 - RNA, 18 nt, Human
uuggaagucucauccagc

SEQ ID NO: 365639 - RNA, 20 nt, Human
uuuggaagucucauccagcu

SEQ ID NO: 365640 - RNA, 25 nt, Human
aaaauuuuaagcaaaauacaaauuc

SEQ ID NO: 365641 - RNA, 19 nt, Human
aaauauuagaaccaccugc

SEQ ID NO: 365642 - RNA, 19 nt, Human
aaauauuuguugcauccuc

SEQ ID NO: 365643 - RNA, 19 nt, Human
aaccaggcuguccucaauu

SEQ ID NO: 365644 - RNA, 24 nt, Human
aacuuauuaggaauuugagguaau

SEQ ID NO: 365645 - RNA, 19 nt, Human
aagaaccuuguuauaaaga

SEQ ID NO: 365646 - RNA, 23 nt, Human
aagaaccuuguuauaaagaacag

SEQ ID NO: 365647 - RNA, 19 nt, Human
aagaaggaaaugucaaagg

SEQ ID NO: 365648 - RNA, 20 nt, Human
aagcccacacucaggaaucc

SEQ ID NO: 365649 - RNA, 23 nt, Human
aauggaagaguugucuauuuuaa

SEQ ID NO: 365650 - RNA, 19 nt, Human
acagaacaaaaguaaaauu

SEQ ID NO: 365651 - RNA, 22 nt, Human
acagagcuaaaaauauuagaac

SEQ ID NO: 365652 - RNA, 22 nt, Human
accaaaaaugaaaguuuuucuc

SEQ ID NO: 365653 - RNA, 21 nt, Human
agaaaaaagcugagugcaaua

SEQ ID NO: 365654 - RNA, 20 nt, Human
agaaaacagccuagagauac

SEQ ID NO: 365655 - RNA, 21 nt, Human
agagggaggaguugggcuacc

SEQ ID NO: 365656 - RNA, 23 nt, Human
agcacccugcuaagcuuuuggga

SEQ ID NO: 365657 - RNA, 19 nt, Human
agcuaagacaaagaaggaa

SEQ ID NO: 365658 - RNA, 18 nt, Human
aggaaaugucaaaggaga

SEQ ID NO: 365659 - RNA, 19 nt, Human
aggaaaugucaaaggagac

SEQ ID NO: 365660 - RNA, 18 nt, Human
aggagagggaggaguugg

SEQ ID NO: 365661 - RNA, 20 nt, Human
augaaguuucagaagcccac

SEQ ID NO: 365662 - RNA, 22 nt, Human
cacccugcuaagcuuuugggac

SEQ ID NO: 365663 - RNA, 24 nt, Human
cacccugcuaagcuuuugggaccu

SEQ ID NO: 365664 - RNA, 22 nt, Human
caccugacuagcuccugccugu

SEQ ID NO: 365665 - RNA, 30 nt, Human
cacuaggaaagaaaaugggagcaggucccc

SEQ ID NO: 365666 - RNA, 18 nt, Human
cacucaggaauccucaaa

SEQ ID NO: 365667 - RNA, 24 nt, Human
cauggaacuuauugccacuagcca

SEQ ID NO: 365668 - RNA, 24 nt, Human
ccaccugcccuuuaguguaacaaa

SEQ ID NO: 365669 - RNA, 22 nt, Human
ccauuuggccauuaaauaaagg

SEQ ID NO: 365670 - RNA, 20 nt, Human
cccacacucaggaauccuca

SEQ ID NO: 365671 - RNA, 19 nt, Human
ccucaauuaaaaagcaaag

SEQ ID NO: 365672 - RNA, 20 nt, Human
ccucagcaaccuguggcuuc

SEQ ID NO: 365673 - RNA, 22 nt, Human
cucaaacccuaccuuuucaacu

SEQ ID NO: 365674 - RNA, 18 nt, Human
gaaagaaaaugggagcag

SEQ ID NO: 365675 - RNA, 18 nt, Human
gagaaaacagccuagaga

SEQ ID NO: 365676 - RNA, 20 nt, Human
gaggaguugggcuacccaga

SEQ ID NO: 365677 - RNA, 24 nt, Human
gcuguccucaauuaaaaagcaaag

SEQ ID NO: 365678 - RNA, 19 nt, Human
ggaacuaaaaugguuuucu

SEQ ID NO: 365679 - RNA, 19 nt, Human
ggaauccucaaacccuacc

SEQ ID NO: 365680 - RNA, 19 nt, Human
ggagaaaacagccuagaga

SEQ ID NO: 365681 - RNA, 24 nt, Human
ggagaaaacagccuagagauacgu

SEQ ID NO: 365682 - RNA, 21 nt, Human
ggaggaggagcaaggagaggg

SEQ ID NO: 365683 - RNA, 23 nt, Human
ggauuuugauaaaagucugaagc

SEQ ID NO: 365684 - RNA, 22 nt, Human
ggcuagaaucuguauacagcua

SEQ ID NO: 365685 - RNA, 23 nt, Human
guguaacaaaauaaacuagccuu

SEQ ID NO: 365686 - RNA, 21 nt, Human
guuuaaucaucuguguauuuc

SEQ ID NO: 365687 - RNA, 19 nt, Human
guuuauucgcagcucugcc

SEQ ID NO: 365688 - RNA, 26 nt, Human
uaaaaagcaaagcaaacuauaacuca

SEQ ID NO: 365689 - RNA, 22 nt, Human
uaagugcuuugccucagcaacc

SEQ ID NO: 365690 - RNA, 23 nt, Human
uaagugcuuugccucagcaaccu

SEQ ID NO: 365691 - RNA, 23 nt, Human
uaccagaagggaaucaacauggu

SEQ ID NO: 365692 - RNA, 20 nt, Human
uagaaaacaaagcaaauguu

SEQ ID NO: 365693 - RNA, 20 nt, Human
uaggaacacaccauaaaaca

SEQ ID NO: 365694 - RNA, 21 nt, Human
uauaaagaacagagcuaaaaa

SEQ ID NO: 365695 - RNA, 18 nt, Human
uauaauagauguuaaugu

SEQ ID NO: 365696 - RNA, 25 nt, Human
uauguuaggaacacaccauaaaaca

SEQ ID NO: 365697 - RNA, 25 nt, Human
ucaucuguguauuuccaauuugccu

SEQ ID NO: 365698 - RNA, 23 nt, Human
ugacauuucugaugagagcacau

SEQ ID NO: 365699 - RNA, 23 nt, Human
ugagagcacauaaaaauaaaaca

SEQ ID NO: 365700 - RNA, 19 nt, Human
ugaguguggcacaugcacc

SEQ ID NO: 365701 - RNA, 20 nt, Human
ugcaccugacuagcuccugc

SEQ ID NO: 365702 - RNA, 23 nt, Human
ugcaccugacuagcuccugccug

SEQ ID NO: 365703 - RNA, 19 nt, Human
ugccucagcaaccuguggc

SEQ ID NO: 365704 - RNA, 19 nt, Human
uuaaaaagcaaagcaaacu

SEQ ID NO: 365705 - RNA, 23 nt, Human
uuaaagcaaacauaagaaggauu

SEQ ID NO: 365706 - RNA, 18 nt, Human
uuauaaagaacagagcua

SEQ ID NO: 365707 - RNA, 22 nt, Human
uugacuguaagcuaaagucugu

SEQ ID NO: 365708 - RNA, 25 nt, Human
uugaucagugcuccaguugguggag

SEQ ID NO: 365709 - RNA, 24 nt, Human
uuugguaauauuugaugacauuuc

SEQ ID NO: 365710 - RNA, 24 nt, Human
uuuugggacccaucagaacuauau

SEQ ID NO: 365711 - RNA, 24 nt, Human
aaaaaaauccucucccagagcuga

SEQ ID NO: 365712 - RNA, 21 nt, Human
aaaacucaaguuaauuugcca

SEQ ID NO: 365713 - RNA, 21 nt, Human
aaaauaagucaacaauaacgu

SEQ ID NO: 365714 - RNA, 19 nt, Human
aaagaaaaaagcuccaagg

SEQ ID NO: 365715 - RNA, 20 nt, Human
aaagaacaaaguggaaaaau

SEQ ID NO: 365716 - RNA, 24 nt, Human
aaagugcugggauuacaggcguga

SEQ ID NO: 365717 - RNA, 24 nt, Human
aacaauaacguacuuccacccaga

SEQ ID NO: 365718 - RNA, 18 nt, Human
aacaccucccucuaaucu

SEQ ID NO: 365719 - RNA, 19 nt, Human
aaccugcacauucggcaca

SEQ ID NO: 365720 - RNA, 19 nt, Human
aagauccaacaaaccgcag

SEQ ID NO: 365721 - RNA, 18 nt, Human
aagcagaagaggaugucc

SEQ ID NO: 365722 - RNA, 18 nt, Human
aagcagaagaggaugucc

SEQ ID NO: 365723 - RNA, 22 nt, Human
aagcagaagaggauguccagga

SEQ ID NO: 365724 - RNA, 21 nt, Human
aagcccccagccccaccccac

SEQ ID NO: 365725 - RNA, 22 nt, Human
aagcccccagccccaccccacc

SEQ ID NO: 365726 - RNA, 22 nt, Human
aagcgugccgugagccuaaagc

SEQ ID NO: 365727 - RNA, 19 nt, Human
aaguagcugggauuacagg

SEQ ID NO: 365728 - RNA, 25 nt, Human
aaguagcugggauuacaggcgcccg

SEQ ID NO: 365729 - RNA, 19 nt, Human
aagugcugggauuacaggc

SEQ ID NO: 365730 - RNA, 19 nt, Human
aagugcugggauuacaggc

SEQ ID NO: 365731 - RNA, 26 nt, Human
aagugcugggauuacaggcgugagcc

SEQ ID NO: 365732 - RNA, 20 nt, Human
aaguuaauuugccacguaga

SEQ ID NO: 365733 - RNA, 23 nt, Human
aauaucagaacccaagggaggaa

SEQ ID NO: 365734 - RNA, 23 nt, Human
acaacagaaaaucaacaccuaaa

SEQ ID NO: 365735 - RNA, 21 nt, Human
acaauagaaaauccauaugga

SEQ ID NO: 365736 - RNA, 23 nt, Human
acaccucccucuaaucucaauuu

SEQ ID NO: 365737 - RNA, 23 nt, Human
acaggcgcccgccaccacgcccg

SEQ ID NO: 365738 - RNA, 24 nt, Human
acaggguuucacgauguuggccag

SEQ ID NO: 365739 - RNA, 21 nt, Human
acccuccaauaaugaacaaca

SEQ ID NO: 365740 - RNA, 24 nt, Human
acgauguuggccagacuggucucg

SEQ ID NO: 365741 - RNA, 26 nt, Human
agaaacagcuuuuucagccaacaaaa

SEQ ID NO: 365742 - RNA, 18 nt, Human
agacaggguuucacgaug

SEQ ID NO: 365743 - RNA, 20 nt, Human
agccaccgcauccggccuca

SEQ ID NO: 365744 - RNA, 23 nt, Human
agccauugaagauccaacaaacc

SEQ ID NO: 365745 - RNA, 19 nt, Human
aggaccacagugacauggu

SEQ ID NO: 365746 - RNA, 19 nt, Human
aggagcagagggaacagug

SEQ ID NO: 365747 - RNA, 22 nt, Human
agguggcuuucccaugccggga

SEQ ID NO: 365748 - RNA, 19 nt, Human
aguaacaauagaaaaucca

SEQ ID NO: 365749 - RNA, 25 nt, Human
aguaaugagacuacuacaagaagga

SEQ ID NO: 365750 - RNA, 20 nt, Human
auccucucccagagcugagg

SEQ ID NO: 365751 - RNA, 24 nt, Human
augauucucccgccucagcuuccc

SEQ ID NO: 365752 - RNA, 27 nt, Human
augguaacagacauacgcaagcgugcc

SEQ ID NO: 365753 - RNA, 18 nt, Human
auguguaagcaccaagaa

SEQ ID NO: 365754 - RNA, 20 nt, Human
auuucauccagugaggggaa

SEQ ID NO: 365755 - RNA, 22 nt, Human
auuucauccagugaggggaaca

SEQ ID NO: 365756 - RNA, 23 nt, Human
auuucauccagugaggggaacag

SEQ ID NO: 365757 - RNA, 24 nt, Human
auuuuugcauuuuuaguagagaca

SEQ ID NO: 365758 - RNA, 24 nt, Human
caaagugcugggauuacaggcgug

SEQ ID NO: 365759 - RNA, 20 nt, Human
caaaucuucuacucuauaac

SEQ ID NO: 365760 - RNA, 25 nt, Human
caagcccccagccccaccccacccc

SEQ ID NO: 365761 - RNA, 22 nt, Human
caccaagaagggaaagggagac

SEQ ID NO: 365762 - RNA, 25 nt, Human
caccaagaagggaaagggagacuga

SEQ ID NO: 365763 - RNA, 19 nt, Human
caccuuaaccucuccagca

SEQ ID NO: 365764 - RNA, 24 nt, Human
caccuuaaccucuccagcaucaaa

SEQ ID NO: 365765 - RNA, 24 nt, Human
cacgauguuggccagacuggucuc

SEQ ID NO: 365766 - RNA, 21 nt, Human
cacugcaaccccugcgucccg

SEQ ID NO: 365767 - RNA, 20 nt, Human
cagaaaaaaauccucuccca

SEQ ID NO: 365768 - RNA, 21 nt, Human
cagaaaaaaauccucucccag

SEQ ID NO: 365769 - RNA, 24 nt, Human
cagaaaaucaacaccuaaaaucuc

SEQ ID NO: 365770 - RNA, 21 nt, Human
cagaguaacaauagaaaaucc

SEQ ID NO: 365771 - RNA, 19 nt, Human
cagcauucagaagcguccu

SEQ ID NO: 365772 - RNA, 21 nt, Human
cagccaacaaaaccuucaaaa

SEQ ID NO: 365773 - RNA, 21 nt, Human
caggaaggauccaaagucuca

SEQ ID NO: 365774 - RNA, 23 nt, Human
caggaaggauccaaagucucacc

SEQ ID NO: 365775 - RNA, 25 nt, Human
caggcaccacaucauuuacccucca

SEQ ID NO: 365776 - RNA, 21 nt, Human
caggcgcccgccaccacgccc

SEQ ID NO: 365777 - RNA, 19 nt, Human
caggguuucacgauguugg

SEQ ID NO: 365778 - RNA, 24 nt, Human
caugauucucccgccucagcuucc

SEQ ID NO: 365779 - RNA, 24 nt, Human
cauucagaagcguccuggguucau

SEQ ID NO: 365780 - RNA, 22 nt, Human
cauucagaauuuuuauuuuaaa

SEQ ID NO: 365781 - RNA, 24 nt, Human
ccaaagucucaccauuacaggcau

SEQ ID NO: 365782 - RNA, 20 nt, Human
ccaaagugcugggauuacag

SEQ ID NO: 365783 - RNA, 22 nt, Human
ccaaagugcugggauuacaggc

SEQ ID NO: 365784 - RNA, 22 nt, Human
ccaaagugcugggauuacaggc

SEQ ID NO: 365785 - RNA, 24 nt, Human
ccaaagugcugggauuacaggcgu

SEQ ID NO: 365786 - RNA, 22 nt, Human
ccaaguagcugggauuacaggc

SEQ ID NO: 365787 - RNA, 21 nt, Human
ccacccagagcaaagugacag

SEQ ID NO: 365788 - RNA, 19 nt, Human
ccagaaaguugacaugaag

SEQ ID NO: 365789 - RNA, 18 nt, Human
ccauauggaaauauucac

SEQ ID NO: 365790 - RNA, 22 nt, Human
ccaucugaaggacagaaauugu

SEQ ID NO: 365791 - RNA, 21 nt, Human
cccaagggaggaaaagcuggc

SEQ ID NO: 365792 - RNA, 23 nt, Human
cccaaguagcugggauuacaggc

SEQ ID NO: 365793 - RNA, 24 nt, Human
cccaaguagcugggauuacaggcg

SEQ ID NO: 365794 - RNA, 20 nt, Human
cccagccccaccccaccccc

SEQ ID NO: 365795 - RNA, 18 nt, Human
ccccagccccaccccacc

SEQ ID NO: 365796 - RNA, 19 nt, Human
ccccagccccaccccaccc

SEQ ID NO: 365797 - RNA, 18 nt, Human
cccccagccccaccccac

SEQ ID NO: 365798 - RNA, 20 nt, Human
cccccagccccaccccaccc

SEQ ID NO: 365799 - RNA, 22 nt, Human
cccccagccccaccccacccca

SEQ ID NO: 365800 - RNA, 24 nt, Human
ccccugaccgcccgccuaggccuc

SEQ ID NO: 365801 - RNA, 20 nt, Human
ccuaaagaacaaaguggaaa

SEQ ID NO: 365802 - RNA, 21 nt, Human
ccuagugcggcaauaucagaa

SEQ ID NO: 365803 - RNA, 23 nt, Human
ccucaggaaggauccaaagucuc

SEQ ID NO: 365804 - RNA, 24 nt, Human
ccuguggcccaggcuagagugcaa

SEQ ID NO: 365805 - RNA, 24 nt, Human
cgcccuguggcccaggcuagagug

SEQ ID NO: 365806 - RNA, 24 nt, Human
cgucccggguucacaugauucucc

SEQ ID NO: 365807 - RNA, 19 nt, Human
cuaaaaucuccuaaagaac

SEQ ID NO: 365808 - RNA, 21 nt, Human
cuacuguuugaggagccagaa

SEQ ID NO: 365809 - RNA, 21 nt, Human
cuaggccucccaaagugcugg

SEQ ID NO: 365810 - RNA, 20 nt, Human
cuagugcggcaauaucagaa

SEQ ID NO: 365811 - RNA, 24 nt, Human
cucacugcaaccccugcgucccgg

SEQ ID NO: 365812 - RNA, 24 nt, Human
cucagcuucccaaguagcugggau

SEQ ID NO: 365813 - RNA, 18 nt, Human
cuccaauaaugaacaagg

SEQ ID NO: 365814 - RNA, 22 nt, Human
cucgauagcuaugugcauuuuu

SEQ ID NO: 365815 - RNA, 19 nt, Human
cucuccagcaucaaaucuu

SEQ ID NO: 365816 - RNA, 23 nt, Human
cugcaaccccugcgucccggguu

SEQ ID NO: 365817 - RNA, 24 nt, Human
cugcaaccccugcgucccggguuc

SEQ ID NO: 365818 - RNA, 21 nt, Human
cuuccacacucauauguaucu

SEQ ID NO: 365819 - RNA, 20 nt, Human
gaaauauucacaaucuucuc

SEQ ID NO: 365820 - RNA, 18 nt, Human
gaaccccugaccgcccgc

SEQ ID NO: 365821 - RNA, 20 nt, Human
gaccucaggcaccacaucau

SEQ ID NO: 365822 - RNA, 22 nt, Human
gagcaaagugacagugcacaua

SEQ ID NO: 365823 - RNA, 22 nt, Human
gauaauaaucgcucagaaaaaa

SEQ ID NO: 365824 - RNA, 23 nt, Human
gaucaugacuauuuauaaucucc

SEQ ID NO: 365825 - RNA, 22 nt, Human
gaucuccgcucacugcaacccc

SEQ ID NO: 365826 - RNA, 18 nt, Human
gauuacaggcgcccgcca

SEQ ID NO: 365827 - RNA, 18 nt, Human
gauuacaggcgugagcca

SEQ ID NO: 365828 - RNA, 20 nt, Human
gauuacaggcgugagccacc

SEQ ID NO: 365829 - RNA, 23 nt, Human
gauuacaggcgugagccaccgca

SEQ ID NO: 365830 - RNA, 18 nt, Human
gcccccagccccacccca

SEQ ID NO: 365831 - RNA, 20 nt, Human
gcccccagccccaccccacc

SEQ ID NO: 365832 - RNA, 23 nt, Human
gccucagcuucccaaguagcugg

SEQ ID NO: 365833 - RNA, 24 nt, Human
gccucagcuucccaaguagcuggg

SEQ ID NO: 365834 - RNA, 20 nt, Human
ggaacaaacacagagaaaau

SEQ ID NO: 365835 - RNA, 19 nt, Human
ggagggagguggaaggagg

SEQ ID NO: 365836 - RNA, 23 nt, Human
ggguucacaugauucucccgccu

SEQ ID NO: 365837 - RNA, 24 nt, Human
uaaagaaaaaagcuccaaggaaau

SEQ ID NO: 365838 - RNA, 18 nt, Human
uaaccucucuuuaaacac

SEQ ID NO: 365839 - RNA, 21 nt, Human
uaaccucucuuuaaacaccuc

SEQ ID NO: 365840 - RNA, 24 nt, Human
uaauuuuugcauuuuuaguagaga

SEQ ID NO: 365841 - RNA, 23 nt, Human
uacaggcgcccgccaccacgccc

SEQ ID NO: 365842 - RNA, 23 nt, Human
uacaggcgugagccaccgcaucc

SEQ ID NO: 365843 - RNA, 19 nt, Human
uacccuccaauaaugaaca

SEQ ID NO: 365844 - RNA, 23 nt, Human
uacuacaagaaggaguuauuuca

SEQ ID NO: 365845 - RNA, 22 nt, Human
uagagacaggguuucacgaugu

SEQ ID NO: 365846 - RNA, 24 nt, Human
uaguagagacaggguuucacgaug

SEQ ID NO: 365847 - RNA, 22 nt, Human
uauaaccucucuuuaaacaccu

SEQ ID NO: 365848 - RNA, 22 nt, Human
uaugaguuaaaauacaacagaa

SEQ ID NO: 365849 - RNA, 21 nt, Human
uauucaaaggcuccaggagca

SEQ ID NO: 365850 - RNA, 18 nt, Human
uauuuuagguuucuuauu

SEQ ID NO: 365851 - RNA, 19 nt, Human
ucaacaccuaaaaucuccu

SEQ ID NO: 365852 - RNA, 19 nt, Human
ucacaugauucucccgccu

SEQ ID NO: 365853 - RNA, 24 nt, Human
ucacugcaaccccugcgucccggg

SEQ ID NO: 365854 - RNA, 21 nt, Human
ucaggcaccacaucauuuacc

SEQ ID NO: 365855 - RNA, 25 nt, Human
ucagugagaaaugggacccugccuu

SEQ ID NO: 365856 - RNA, 24 nt, Human
ucccaaagugcugggauuacaggc

SEQ ID NO: 365857 - RNA, 24 nt, Human
ucccaaguagcugggauuacaggc

SEQ ID NO: 365858 - RNA, 21 nt, Human
ucccggguucacaugauucuc

SEQ ID NO: 365859 - RNA, 26 nt, Human
ucccuaaauucuuauugcaccuucua

SEQ ID NO: 365860 - RNA, 20 nt, Human
ucccucuaaucucaauuucc

SEQ ID NO: 365861 - RNA, 23 nt, Human
uccugaaacuuaaaguaaaaaaa

SEQ ID NO: 365862 - RNA, 24 nt, Human
ucuagaaaucacuuucucuucccu

SEQ ID NO: 365863 - RNA, 24 nt, Human
ucucgcccuguggcccaggcuaga

SEQ ID NO: 365864 - RNA, 18 nt, Human
ucuuuaaacaccucccuc

SEQ ID NO: 365865 - RNA, 21 nt, Human
ugaaagggcgacaagccccca

SEQ ID NO: 365866 - RNA, 21 nt, Human
ugaacaacauuucucccuaaa

SEQ ID NO: 365867 - RNA, 24 nt, Human
ugacaugaaguugcaaggucaccu

SEQ ID NO: 365868 - RNA, 18 nt, Human
ugagaaaggaauuaagua

SEQ ID NO: 365869 - RNA, 22 nt, Human
ugagaacuaagaaccaaaauac

SEQ ID NO: 365870 - RNA, 18 nt, Human
ugagccuaaagcaacaac

SEQ ID NO: 365871 - RNA, 22 nt, Human
ugagggagagguggcuuuccca

SEQ ID NO: 365872 - RNA, 24 nt, Human
ugagggagagguggcuuucccaug

SEQ ID NO: 365873 - RNA, 20 nt, Human
ugauucucccgccucagcuu

SEQ ID NO: 365874 - RNA, 20 nt, Human
ugccgugagccuaaagcaac

SEQ ID NO: 365875 - RNA, 21 nt, Human
ugcuauaaacauucuuugggg

SEQ ID NO: 365876 - RNA, 24 nt, Human
ugcugggauuacaggcgugagcca

SEQ ID NO: 365877 - RNA, 25 nt, Human
uggaaaaauaaugaaucucuaccaa

SEQ ID NO: 365878 - RNA, 18 nt, Human
uggcaaaguugucaugug

SEQ ID NO: 365879 - RNA, 24 nt, Human
uggccagacuggucucgaaccccu

SEQ ID NO: 365880 - RNA, 25 nt, Human
uggccagacuggucucgaaccccug

SEQ ID NO: 365881 - RNA, 19 nt, Human
uggcccaggcuagagugca

SEQ ID NO: 365882 - RNA, 21 nt, Human
ugggauuacaggcgcccgcca

SEQ ID NO: 365883 - RNA, 22 nt, Human
ugggauuacaggcgcccgccac

SEQ ID NO: 365884 - RNA, 24 nt, Human
ugggauuacaggcgcccgccacca

SEQ ID NO: 365885 - RNA, 18 nt, Human
ugggauuacaggcgugag

SEQ ID NO: 365886 - RNA, 19 nt, Human
ugggauuacaggcgugagc

SEQ ID NO: 365887 - RNA, 21 nt, Human
ugggauuacaggcgugagcca

SEQ ID NO: 365888 - RNA, 22 nt, Human
ugggauuacaggcgugagccac

SEQ ID NO: 365889 - RNA, 23 nt, Human
ugggauuacaggcgugagccacc

SEQ ID NO: 365890 - RNA, 24 nt, Human
ugggauuacaggcgugagccaccg

SEQ ID NO: 365891 - RNA, 21 nt, Human
uggucucgaaccccugaccgc

SEQ ID NO: 365892 - RNA, 19 nt, Human
uguaggaacaaacacagag

SEQ ID NO: 365893 - RNA, 21 nt, Human
uguggcccaggcuagagugca

SEQ ID NO: 365894 - RNA, 25 nt, Human
uguggcccaggcuagagugcaauga

SEQ ID NO: 365895 - RNA, 24 nt, Human
uuacaaauuccaaguuugcuauaa

SEQ ID NO: 365896 - RNA, 18 nt, Human
uuaguagagacaggguuu

SEQ ID NO: 365897 - RNA, 21 nt, Human
uucaaaauguccuucucagca

SEQ ID NO: 365898 - RNA, 22 nt, Human
uucaaguccccugagggcauuc

SEQ ID NO: 365899 - RNA, 18 nt, Human
uucacaugauucucccgc

SEQ ID NO: 365900 - RNA, 24 nt, Human
uuccaaguuugcuauaaacauucu

SEQ ID NO: 365901 - RNA, 23 nt, Human
uuccacacucauauguaucugcu

SEQ ID NO: 365902 - RNA, 27 nt, Human
uuccagaaacagcuuuuuuccuggugg

SEQ ID NO: 365903 - RNA, 19 nt, Human
uuggauggcucucccacga

SEQ ID NO: 365904 - RNA, 26 nt, Human
uugucaugugccaagcggccaauccc

SEQ ID NO: 365905 - RNA, 21 nt, Human
uuucacgauguuggccagacu

SEQ ID NO: 365906 - RNA, 19 nt, Human
uuucccaugccgggaggga

SEQ ID NO: 365907 - RNA, 24 nt, Human
uuuuuaguagagacaggguuucac

SEQ ID NO: 365908 - RNA, 20 nt, Human
uuuuugcauuuuuaguagag

SEQ ID NO: 365909 - RNA, 25 nt, Human
uuuuuuuuuuuugagacggagucuc

SEQ ID NO: 365910 - RNA, 27 nt, Human
aacacauaaauaauccaaccugaacgg

SEQ ID NO: 365911 - RNA, 19 nt, Human
aagguggugggaaacugga

SEQ ID NO: 365912 - RNA, 18 nt, Human
accgauccuggagucucu

SEQ ID NO: 365913 - RNA, 18 nt, Human
agagaggguuaaagugcu

SEQ ID NO: 365914 - RNA, 19 nt, Human
agagggaggggagaguggc

SEQ ID NO: 365915 - RNA, 27 nt, Human
aggaagagggaggggagaguggcccaa

SEQ ID NO: 365916 - RNA, 22 nt, Human
aggggaugggggaaggaagagg

SEQ ID NO: 365917 - RNA, 23 nt, Human
auucuggagcugagucuggggaa

SEQ ID NO: 365918 - RNA, 21 nt, Human
cacccuucccccagcuuccca

SEQ ID NO: 365919 - RNA, 18 nt, Human
cagaaccugcggaggccg

SEQ ID NO: 365920 - RNA, 18 nt, Human
cagcuucccaauucuacc

SEQ ID NO: 365921 - RNA, 19 nt, Human
cagggauucuuuuccaccc

SEQ ID NO: 365922 - RNA, 21 nt, Human
ccacaacacauaaauaaucca

SEQ ID NO: 365923 - RNA, 20 nt, Human
ccugcucucugcucugguuu

SEQ ID NO: 365924 - RNA, 23 nt, Human
cgaagaagguauucuggagcuga

SEQ ID NO: 365925 - RNA, 20 nt, Human
cucccaccccugccuggccc

SEQ ID NO: 365926 - RNA, 22 nt, Human
gaagaagguauucuggagcuga

SEQ ID NO: 365927 - RNA, 19 nt, Human
gaagagaggguuaaagugc

SEQ ID NO: 365928 - RNA, 21 nt, Human
gaaggaagagggaggggagag

SEQ ID NO: 365929 - RNA, 22 nt, Human
gaaggaagagggaggggagagu

SEQ ID NO: 365930 - RNA, 22 nt, Human
gaccugucuucccuccaauccc

SEQ ID NO: 365931 - RNA, 23 nt, Human
gaccugucuucccuccaaucccc

SEQ ID NO: 365932 - RNA, 22 nt, Human
gcagcgaagaagguauucugga

SEQ ID NO: 365933 - RNA, 22 nt, Human
ggaaaggggaugggggaaggaa

SEQ ID NO: 365934 - RNA, 21 nt, Human
ggccuggagcgcagaaccugc

SEQ ID NO: 365935 - RNA, 18 nt, Human
ggcucucccaccccugcc

SEQ ID NO: 365936 - RNA, 23 nt, Human
gggaagagaggguuaaagugcug

SEQ ID NO: 365937 - RNA, 18 nt, Human
gggaaggaagagggaggg

SEQ ID NO: 365938 - RNA, 21 nt, Human
gggaagguggggaggaaaggg

SEQ ID NO: 365939 - RNA, 21 nt, Human
gggaagguggggaggaaaggg

SEQ ID NO: 365940 - RNA, 22 nt, Human
gggaugggggaaggaagaggga

SEQ ID NO: 365941 - RNA, 19 nt, Human
guccugcucucugcucugg

SEQ ID NO: 365942 - RNA, 22 nt, Human
gucuagaccugucuucccucca

SEQ ID NO: 365943 - RNA, 22 nt, Human
uccaagguggugggaaacugga

SEQ ID NO: 365944 - RNA, 18 nt, Human
uccaaucccccuucucua

SEQ ID NO: 365945 - RNA, 19 nt, Human
uccaaucccccuucucuag

SEQ ID NO: 365946 - RNA, 19 nt, Human
ucccccagcuucccaauuc

SEQ ID NO: 365947 - RNA, 25 nt, Human
ucccccagcuucccaauucuaccag

SEQ ID NO: 365948 - RNA, 21 nt, Human
ucucugacuccggccuggagc

SEQ ID NO: 365949 - RNA, 22 nt, Human
ugagucuggggaagguggggag

SEQ ID NO: 365950 - RNA, 24 nt, Human
ugagucuggggaagguggggagga

SEQ ID NO: 365951 - RNA, 21 nt, Human
ugggaggaguccaagguggug

SEQ ID NO: 365952 - RNA, 25 nt, Human
uggggaagguggggaggaaaggggg

SEQ ID NO: 365953 - RNA, 22 nt, Human
uggggaggaaaggggauggggg

SEQ ID NO: 365954 - RNA, 22 nt, Human
ugggggaaggaagagggagggg

SEQ ID NO: 365955 - RNA, 24 nt, Human
aagaacagcaaggcagcccuuugc

SEQ ID NO: 365956 - RNA, 26 nt, Human
aagaacagcaaggcagcccuuugcac

SEQ ID NO: 365957 - RNA, 18 nt, Human
aagaggaugaauuuggcu

SEQ ID NO: 365958 - RNA, 18 nt, Human
aagccccuggcagaccag

SEQ ID NO: 365959 - RNA, 21 nt, Human
aagccccuggcagaccagcuc

SEQ ID NO: 365960 - RNA, 23 nt, Human
acagcaaggcagcccuuugcaca

SEQ ID NO: 365961 - RNA, 20 nt, Human
caagaacagcaaggcagccc

SEQ ID NO: 365962 - RNA, 23 nt, Human
cacaguucccacuggggugggga

SEQ ID NO: 365963 - RNA, 23 nt, Human
cagcccagcuucaagaacagcaa

SEQ ID NO: 365964 - RNA, 22 nt, Human
cauuguuucugacaucacaccu

SEQ ID NO: 365965 - RNA, 23 nt, Human
ccaccgaguuaguuucucuggca

SEQ ID NO: 365966 - RNA, 21 nt, Human
ccacugggguggggaggcugg

SEQ ID NO: 365967 - RNA, 23 nt, Human
cccauggccccggaagaccuguu

SEQ ID NO: 365968 - RNA, 20 nt, Human
ccccggaagaccuguugggg

SEQ ID NO: 365969 - RNA, 22 nt, Human
ccgcucaccuccuuuuagccaa

SEQ ID NO: 365970 - RNA, 20 nt, Human
ccuagacagguauuucugga

SEQ ID NO: 365971 - RNA, 20 nt, Human
cuccacuggcuuccucucca

SEQ ID NO: 365972 - RNA, 24 nt, Human
cugcauuccacaucagaguuguuu

SEQ ID NO: 365973 - RNA, 18 nt, Human
cuggaaaaggaucuggua

SEQ ID NO: 365974 - RNA, 24 nt, Human
gaauuuggcucuaaacaaaugccc

SEQ ID NO: 365975 - RNA, 18 nt, Human
gccaaagugggaagcccc

SEQ ID NO: 365976 - RNA, 23 nt, Human
gccacacgaaggcugaaccagca

SEQ ID NO: 365977 - RNA, 23 nt, Human
gcccagcuucaagaacagcaagg

SEQ ID NO: 365978 - RNA, 18 nt, Human
gcugaaccagcaaagugg

SEQ ID NO: 365979 - RNA, 21 nt, Human
ggcagagugccgcucaccucc

SEQ ID NO: 365980 - RNA, 19 nt, Human
ggccccggaagaccuguug

SEQ ID NO: 365981 - RNA, 19 nt, Human
uaagaggaugaauuuggcu

SEQ ID NO: 365982 - RNA, 23 nt, Human
uaagccaaagugggaagccccug

SEQ ID NO: 365983 - RNA, 25 nt, Human
uaccaggagccacacaaagguugac

SEQ ID NO: 365984 - RNA, 25 nt, Human
uaccaggagccacacgaaggcugaa

SEQ ID NO: 365985 - RNA, 23 nt, Human
ucagaaaaauaagccaaaguggg

SEQ ID NO: 365986 - RNA, 21 nt, Human
ucagcuuucuggaugucauug

SEQ ID NO: 365987 - RNA, 19 nt, Human
uccacuggcuuccucucca

SEQ ID NO: 365988 - RNA, 19 nt, Human
ugaaccagcaaaguggagg

SEQ ID NO: 365989 - RNA, 21 nt, Human
ugacuacacagaagcaauucc

SEQ ID NO: 365990 - RNA, 22 nt, Human
ugacuacacagaagcaauucca

SEQ ID NO: 365991 - RNA, 22 nt, Human
ugcccauggccccggaagaccu

SEQ ID NO: 365992 - RNA, 22 nt, Human
uucaagaacagcaaggcagccc

SEQ ID NO: 365993 - RNA, 20 nt, Human
uuccuagacagguauuucug

SEQ ID NO: 365994 - RNA, 24 nt, Human
uuucuggaugucauuguuucugac

SEQ ID NO: 365995 - RNA, 28 nt, Human
uuugcacaguucccacugggguggggag

SEQ ID NO: 365996 - RNA, 18 nt, Human
uuuuauugacuacacaga

SEQ ID NO: 365997 - RNA, 24 nt, Human
aaagugcugggauuacaggcguga

SEQ ID NO: 365998 - RNA, 21 nt, Human
aacacaguuugcagauaggag

SEQ ID NO: 365999 - RNA, 24 nt, Human
aaguagcuggaacuacgggugugu

SEQ ID NO: 366000 - RNA, 19 nt, Human
aagugcugggauuacaggc

SEQ ID NO: 366001 - RNA, 19 nt, Human
aagugcugggauuacaggc

SEQ ID NO: 366002 - RNA, 26 nt, Human
aagugcugggauuacaggcgugagcc

SEQ ID NO: 366003 - RNA, 22 nt, Human
accauguuggccaggcuggucu

SEQ ID NO: 366004 - RNA, 18 nt, Human
acgggguuucaccauguu

SEQ ID NO: 366005 - RNA, 23 nt, Human
acgggguuucaccauguuggcca

SEQ ID NO: 366006 - RNA, 24 nt, Human
acgggguuucaccauguuggccag

SEQ ID NO: 366007 - RNA, 20 nt, Human
acucucguugcccaggcugg

SEQ ID NO: 366008 - RNA, 21 nt, Human
acucucguugcccaggcugga

SEQ ID NO: 366009 - RNA, 23 nt, Human
acucucguugcccaggcuggagu

SEQ ID NO: 366010 - RNA, 24 nt, Human
acucucguugcccaggcuggagug

SEQ ID NO: 366011 - RNA, 21 nt, Human
agcaaugcugccucagccucc

SEQ ID NO: 366012 - RNA, 23 nt, Human
agcugccuguucccagagguugg

SEQ ID NO: 366013 - RNA, 18 nt, Human
agugcugggauuacaggc

SEQ ID NO: 366014 - RNA, 18 nt, Human
augccaccagaucagagc

SEQ ID NO: 366015 - RNA, 24 nt, Human
caaagugcugggauuacaggcgug

SEQ ID NO: 366016 - RNA, 23 nt, Human
caaugcugccucagccucccaag

SEQ ID NO: 366017 - RNA, 19 nt, Human
cacaguuugcagauaggag

SEQ ID NO: 366018 - RNA, 21 nt, Human
caccauguuggccaggcuggu

SEQ ID NO: 366019 - RNA, 23 nt, Human
caccauguuggccaggcuggucu

SEQ ID NO: 366020 - RNA, 24 nt, Human
caccauguuggccaggcuggucuu

SEQ ID NO: 366021 - RNA, 27 nt, Human
caccauguuggccaggcuggucuugaa

SEQ ID NO: 366022 - RNA, 24 nt, Human
caccugcuuuggccucccaaagug

SEQ ID NO: 366023 - RNA, 19 nt, Human
cacugugggcugccugggc

SEQ ID NO: 366024 - RNA, 21 nt, Human
cagaugccaccagaucagagc

SEQ ID NO: 366025 - RNA, 21 nt, Human
cagcagugcuaccugucccga

SEQ ID NO: 366026 - RNA, 23 nt, Human
cagccuccaccucccggguucaa

SEQ ID NO: 366027 - RNA, 24 nt, Human
caggcgugagccacugugcccggc

SEQ ID NO: 366028 - RNA, 24 nt, Human
cauguuggccaggcuggucuugaa

SEQ ID NO: 366029 - RNA, 22 nt, Human
ccaaagugcugggauuacaggc

SEQ ID NO: 366030 - RNA, 22 nt, Human
ccaaagugcugggauuacaggc

SEQ ID NO: 366031 - RNA, 24 nt, Human
ccaaagugcugggauuacaggcgu

SEQ ID NO: 366032 - RNA, 19 nt, Human
ccacgccagguccuuugcc

SEQ ID NO: 366033 - RNA, 19 nt, Human
ccagagguugggcuggggc

SEQ ID NO: 366034 - RNA, 20 nt, Human
ccagguccuuugcccuggcu

SEQ ID NO: 366035 - RNA, 21 nt, Human
cccaucacacugcucuuccug

SEQ ID NO: 366036 - RNA, 21 nt, Human
ccccaucacacugcucuuccu

SEQ ID NO: 366037 - RNA, 18 nt, Human
cccccuccaggcggggac

SEQ ID NO: 366038 - RNA, 33 nt, Human
ccucccggguucaagcaaugcugccucagcccc

SEQ ID NO: 366039 - RNA, 24 nt, Human
ccugcuuuggccucccaaagugcu

SEQ ID NO: 366040 - RNA, 21 nt, Human
ccuggccuuggguaauccacc

SEQ ID NO: 366041 - RNA, 22 nt, Human
ccuguucccagagguugggcug

SEQ ID NO: 366042 - RNA, 19 nt, Human
cgcaagggaaagggacuag

SEQ ID NO: 366043 - RNA, 24 nt, Human
cgggguuucaccauguuggccagg

SEQ ID NO: 366044 - RNA, 20 nt, Human
cguugcccaggcuggagugc

SEQ ID NO: 366045 - RNA, 22 nt, Human
cguugcccaggcuggagugcaa

SEQ ID NO: 366046 - RNA, 24 nt, Human
cucauugcagccuccaccucccgg

SEQ ID NO: 366047 - RNA, 23 nt, Human
cuccuggccuuggguaauccacc

SEQ ID NO: 366048 - RNA, 19 nt, Human
cucucguugcccaggcugg

SEQ ID NO: 366049 - RNA, 23 nt, Human
cugccucagccucccaaguagcu

SEQ ID NO: 366050 - RNA, 24 nt, Human
cugcugccucuuggucccagggug

SEQ ID NO: 366051 - RNA, 24 nt, Human
cuggagugcaauggcaugaucuca

SEQ ID NO: 366052 - RNA, 23 nt, Human
cuuccugugcucuggcugguggc

SEQ ID NO: 366053 - RNA, 24 nt, Human
cuuggguaauccaccugcuuuggc

SEQ ID NO: 366054 - RNA, 24 nt, Human
gagacgggguuucaccauguuggc

SEQ ID NO: 366055 - RNA, 19 nt, Human
gagcugccuguucccagag

SEQ ID NO: 366056 - RNA, 19 nt, Human
gaggcccagccacuggggg

SEQ ID NO: 366057 - RNA, 22 nt, Human
gaggcccagccacuggggguuu

SEQ ID NO: 366058 - RNA, 18 nt, Human
gauuacaggcgugagcca

SEQ ID NO: 366059 - RNA, 19 nt, Human
gauuacaggcgugagccac

SEQ ID NO: 366060 - RNA, 21 nt, Human
gauuacaggcgugagccacug

SEQ ID NO: 366061 - RNA, 24 nt, Human
gcccaggcuggagugcaauggcau

SEQ ID NO: 366062 - RNA, 19 nt, Human
gcccauggcuacgugcagc

SEQ ID NO: 366063 - RNA, 23 nt, Human
gcccauggcuacgugcagcacug

SEQ ID NO: 366064 - RNA, 24 nt, Human
gccuguucccagagguugggcugg

SEQ ID NO: 366065 - RNA, 19 nt, Human
gcugccuccagcccugucc

SEQ ID NO: 366066 - RNA, 19 nt, Human
gcugccugggcuggggcug

SEQ ID NO: 366067 - RNA, 22 nt, Human
gcuuuggccucccaaagugcug

SEQ ID NO: 366068 - RNA, 23 nt, Human
gcuuuuuuuuuuuuuuuuuuggc

SEQ ID NO: 366069 - RNA, 21 nt, Human
ggaaguggccacgccaggucc

SEQ ID NO: 366070 - RNA, 18 nt, Human
ggcaaagccgggucuucc

SEQ ID NO: 366071 - RNA, 21 nt, Human
ggcuggggcaggaggaagugg

SEQ ID NO: 366072 - RNA, 23 nt, Human
ggcuggucuugaacuccuggccu

SEQ ID NO: 366073 - RNA, 21 nt, Human
gggcuggggcaggaggaagug

SEQ ID NO: 366074 - RNA, 18 nt, Human
gggcuggggcuguggcug

SEQ ID NO: 366075 - RNA, 23 nt, Human
gggguuucaccauguuggccagg

SEQ ID NO: 366076 - RNA, 23 nt, Human
gguaauccaccugcuuuggccuc

SEQ ID NO: 366077 - RNA, 24 nt, Human
guaauccaccugcuuuggccuccc

SEQ ID NO: 366078 - RNA, 23 nt, Human
guagagacgggguuucaccaugu

SEQ ID NO: 366079 - RNA, 18 nt, Human
guccaggauguucccugu

SEQ ID NO: 366080 - RNA, 18 nt, Human
gugcccggccugcccugg

SEQ ID NO: 366081 - RNA, 22 nt, Human
gugcuaccugucccgagccagg

SEQ ID NO: 366082 - RNA, 19 nt, Human
guggugcccauaagacuug

SEQ ID NO: 366083 - RNA, 23 nt, Human
uacaggcgugagccacugugccc

SEQ ID NO: 366084 - RNA, 23 nt, Human
uacaggcgugagccacugugccc

SEQ ID NO: 366085 - RNA, 24 nt, Human
uacgggugugugccaccacaccca

SEQ ID NO: 366086 - RNA, 22 nt, Human
uagagacgggguuucaccaugu

SEQ ID NO: 366087 - RNA, 24 nt, Human
uaguagagacgggguuucaccaug

SEQ ID NO: 366088 - RNA, 26 nt, Human
uaguagagacgggguuucaccauguu

SEQ ID NO: 366089 - RNA, 19 nt, Human
ucacacugcucuuccugug

SEQ ID NO: 366090 - RNA, 22 nt, Human
ucacccagcagggccguguccc

SEQ ID NO: 366091 - RNA, 23 nt, Human
ucacucucguugcccaggcugga

SEQ ID NO: 366092 - RNA, 20 nt, Human
ucagccucccaaguagcugg

SEQ ID NO: 366093 - RNA, 19 nt, Human
ucaguccuccccguagccu

SEQ ID NO: 366094 - RNA, 24 nt, Human
ucauugcagccuccaccucccggg

SEQ ID NO: 366095 - RNA, 25 nt, Human
ucauugcagccuccaccucccgggu

SEQ ID NO: 366096 - RNA, 24 nt, Human
ucccaaagugcugggauuacaggc

SEQ ID NO: 366097 - RNA, 24 nt, Human
ucccaaguagcuggaacuacgggu

SEQ ID NO: 366098 - RNA, 21 nt, Human
ucccagagguugggcuggggc

SEQ ID NO: 366099 - RNA, 18 nt, Human
uccccguagccuucugug

SEQ ID NO: 366100 - RNA, 20 nt, Human
ucuugaacuccuggccuugg

SEQ ID NO: 366101 - RNA, 20 nt, Human
ugcagauaggagcugccugu

SEQ ID NO: 366102 - RNA, 20 nt, Human
ugcagauaggagcugccugu

SEQ ID NO: 366103 - RNA, 20 nt, Human
ugcagccuccaccucccggg

SEQ ID NO: 366104 - RNA, 23 nt, Human
ugccaccacacccagcuuuuuug

SEQ ID NO: 366105 - RNA, 18 nt, Human
ugcccaggcuggagugca

SEQ ID NO: 366106 - RNA, 21 nt, Human
ugcccaggcuggagugcaaug

SEQ ID NO: 366107 - RNA, 24 nt, Human
ugcccaggcuggagugcaauggca

SEQ ID NO: 366108 - RNA, 18 nt, Human
ugcccggccugcccuggc

SEQ ID NO: 366109 - RNA, 19 nt, Human
ugcccuggcuuuuuaaguc

SEQ ID NO: 366110 - RNA, 24 nt, Human
ugccucagccucccaaguagcugg

SEQ ID NO: 366111 - RNA, 26 nt, Human
ugccuccagcccuguccucucagucc

SEQ ID NO: 366112 - RNA, 19 nt, Human
ugccugggcuggggcugug

SEQ ID NO: 366113 - RNA, 21 nt, Human
ugccugggcuggggcuguggc

SEQ ID NO: 366114 - RNA, 24 nt, Human
ugccugggcuggggcuguggccuc

SEQ ID NO: 366115 - RNA, 24 nt, Human
ugcugggauuacaggcgugagcca

SEQ ID NO: 366116 - RNA, 24 nt, Human
uggaacuacgggugugugccacca

SEQ ID NO: 366117 - RNA, 19 nt, Human
uggagugcaauggcaugau

SEQ ID NO: 366118 - RNA, 24 nt, Human
uggagugcaauggcaugaucucag

SEQ ID NO: 366119 - RNA, 24 nt, Human
uggcaugaucucagcucauugcag

SEQ ID NO: 366120 - RNA, 24 nt, Human
uggccaggcuggucuugaacuccu

SEQ ID NO: 366121 - RNA, 24 nt, Human
uggccuuggguaauccaccugcuu

SEQ ID NO: 366122 - RNA, 22 nt, Human
uggcuuuuuuuuuuuuuuuuuu

SEQ ID NO: 366123 - RNA, 18 nt, Human
ugggauuacaggcgugag

SEQ ID NO: 366124 - RNA, 21 nt, Human
ugggauuacaggcgugagcca

SEQ ID NO: 366125 - RNA, 22 nt, Human
ugggauuacaggcgugagccac

SEQ ID NO: 366126 - RNA, 22 nt, Human
ugggauuacaggcgugagccac

SEQ ID NO: 366127 - RNA, 22 nt, Human
ugggauuacaggcgugagccac

SEQ ID NO: 366128 - RNA, 24 nt, Human
ugggauuacaggcgugagccacug

SEQ ID NO: 366129 - RNA, 26 nt, Human
ugggauuacaggcgugagccacugug

SEQ ID NO: 366130 - RNA, 18 nt, Human
ugugagggcaaagccggg

SEQ ID NO: 366131 - RNA, 20 nt, Human
ugugugccaccacacccagc

SEQ ID NO: 366132 - RNA, 18 nt, Human
uuaguagagacgggguuu

SEQ ID NO: 366133 - RNA, 22 nt, Human
uuaguagagacgggguuucacc

SEQ ID NO: 366134 - RNA, 24 nt, Human
uuaguagagacgggguuucaccau

SEQ ID NO: 366135 - RNA, 24 nt, Human
uucacucucguugcccaggcugga

SEQ ID NO: 366136 - RNA, 20 nt, Human
uugcagccuccaccucccgg

SEQ ID NO: 366137 - RNA, 23 nt, Human
uugcagccuccaccucccggguu

SEQ ID NO: 366138 - RNA, 24 nt, Human
uugcagccuccaccucccggguuc

SEQ ID NO: 366139 - RNA, 18 nt, Human
uugcccaggcuggagugc

SEQ ID NO: 366140 - RNA, 24 nt, Human
uuucaccauguuggccaggcuggu

SEQ ID NO: 366141 - RNA, 24 nt, Human
uuucacucucguugcccaggcugg

SEQ ID NO: 366142 - RNA, 19 nt, Human
uuuggccucccaaagugcu

SEQ ID NO: 366143 - RNA, 24 nt, Human
uuuuuaguagagacgggguuucac

SEQ ID NO: 366144 - RNA, 23 nt, Human
uuuuuuaguagagacgggguuuc

SEQ ID NO: 366145 - RNA, 25 nt, Human
uuuuuuguauuuuuuaguagagacg

SEQ ID NO: 366146 - RNA, 23 nt, Human
uuuuuuuuuuuggcagggggugg

SEQ ID NO: 366147 - RNA, 20 nt, Human
uuuuuuuuuuuuggcagggg

SEQ ID NO: 366148 - RNA, 25 nt, Human
uuuuuuuuuuuuuuuuuggcagggg

SEQ ID NO: 366149 - RNA, 18 nt, Human
aaccuccaaaagcaccuc

SEQ ID NO: 366150 - RNA, 22 nt, Human
aacugagcuugcacaaagccca

SEQ ID NO: 366151 - RNA, 19 nt, Human
aagacaaagauccuagagg

SEQ ID NO: 366152 - RNA, 24 nt, Human
aagcaccuccagccagaagacaaa

SEQ ID NO: 366153 - RNA, 22 nt, Human
aaggcuccaaggggcuggauuc

SEQ ID NO: 366154 - RNA, 20 nt, Human
acccaaccuccaaaagcacc

SEQ ID NO: 366155 - RNA, 21 nt, Human
acccaaccuccaaaagcaccu

SEQ ID NO: 366156 - RNA, 25 nt, Human
caaaagcaccuccagccagaagaca

SEQ ID NO: 366157 - RNA, 21 nt, Human
caaacaaauuuccuucccgau

SEQ ID NO: 366158 - RNA, 20 nt, Human
caaagauccuagaggcccac

SEQ ID NO: 366159 - RNA, 22 nt, Human
caaauuuccuucccgauaaggc

SEQ ID NO: 366160 - RNA, 22 nt, Human
caaccuccaaaagcaccuccag

SEQ ID NO: 366161 - RNA, 24 nt, Human
caaccuccaaaagcaccuccagcc

SEQ ID NO: 366162 - RNA, 19 nt, Human
cacaaagcccagagacacu

SEQ ID NO: 366163 - RNA, 25 nt, Human
cacaaagcccagagacagcggaccg

SEQ ID NO: 366164 - RNA, 21 nt, Human
cacaggcuugcuccauccccu

SEQ ID NO: 366165 - RNA, 20 nt, Human
cacccaaccuccaaaagcac

SEQ ID NO: 366166 - RNA, 25 nt, Human
caccuccucuuccgcugcuuuaguc

SEQ ID NO: 366167 - RNA, 18 nt, Human
cagcacccaaccuccaaa

SEQ ID NO: 366168 - RNA, 22 nt, Human
cagcacccaaccuccaaaagca

SEQ ID NO: 366169 - RNA, 18 nt, Human
cagugagccuccuagccc

SEQ ID NO: 366170 - RNA, 21 nt, Human
cccagcacccaaccuccaaaa

SEQ ID NO: 366171 - RNA, 23 nt, Human
cccagcacccaaccuccaaaagc

SEQ ID NO: 366172 - RNA, 22 nt, Human
ccuccagccagaagacaaagau

SEQ ID NO: 366173 - RNA, 18 nt, Human
cgaucggccagcucuggc

SEQ ID NO: 366174 - RNA, 21 nt, Human
cucugggcuugggcccagcuu

SEQ ID NO: 366175 - RNA, 20 nt, Human
gacccagggaacugagccca

SEQ ID NO: 366176 - RNA, 21 nt, Human
gagcagcagcaggagcuggaa

SEQ ID NO: 366177 - RNA, 23 nt, Human
gauaaggcagccgcgugagagga

SEQ ID NO: 366178 - RNA, 19 nt, Human
gcacccaaccuccaaaagc

SEQ ID NO: 366179 - RNA, 22 nt, Human
gcagcagcaggagcuggaacag

SEQ ID NO: 366180 - RNA, 20 nt, Human
gcaggcaggggcucugggcu

SEQ ID NO: 366181 - RNA, 18 nt, Human
gcccagagacacugaccu

SEQ ID NO: 366182 - RNA, 21 nt, Human
gcccagagacacugaccugau

SEQ ID NO: 366183 - RNA, 20 nt, Human
gccugaaccgccccucgugc

SEQ ID NO: 366184 - RNA, 23 nt, Human
gcuugcacaaagcccagagacac

SEQ ID NO: 366185 - RNA, 19 nt, Human
ggaaggagggacccugcag

SEQ ID NO: 366186 - RNA, 20 nt, Human
ggcaggggcucugggcuugg

SEQ ID NO: 366187 - RNA, 21 nt, Human
ggcagugagccuccuagcccc

SEQ ID NO: 366188 - RNA, 22 nt, Human
ggggcaggcaggggcucugggc

SEQ ID NO: 366189 - RNA, 23 nt, Human
uaaggcagccgcgugagaggagc

SEQ ID NO: 366190 - RNA, 21 nt, Human
uagccagaaaugacuucucag

SEQ ID NO: 366191 - RNA, 22 nt, Human
ucacaggcuugcuccauccccu

SEQ ID NO: 366192 - RNA, 22 nt, Human
ucagagcagcagcaggagcugg

SEQ ID NO: 366193 - RNA, 21 nt, Human
uccaaaagcaccuccagccag

SEQ ID NO: 366194 - RNA, 22 nt, Human
uccaaaagcaccuccagccaga

SEQ ID NO: 366195 - RNA, 21 nt, Human
uccccuggggcaggcaggggc

SEQ ID NO: 366196 - RNA, 21 nt, Human
uccccuggggcaggcaggggc

SEQ ID NO: 366197 - RNA, 19 nt, Human
ucugcaaagcucgaaggug

SEQ ID NO: 366198 - RNA, 19 nt, Human
ugaaugcccagcacccaac

SEQ ID NO: 366199 - RNA, 27 nt, Human
ugacaggaaggagggacccugcagacc

SEQ ID NO: 366200 - RNA, 22 nt, Human
ugcccagcacccaaccuccaaa

SEQ ID NO: 366201 - RNA, 19 nt, Human
uggcgccugaaccgccccu

SEQ ID NO: 366202 - RNA, 22 nt, Human
ugggaauaaacccuuuucaaac

SEQ ID NO: 366203 - RNA, 18 nt, Human
ugugucagucuuuauuug

SEQ ID NO: 366204 - RNA, 21 nt, Human
uugcgcauggagggcugaccg

SEQ ID NO: 366205 - RNA, 21 nt, Human
uuuucugugucagucuuuauu

SEQ ID NO: 366206 - RNA, 18 nt, Human
uuuuuuuuuuuuuuuuug

SEQ ID NO: 366207 - RNA, 28 nt, Human
uuuuuuuuuuuuuuuuugguuuguuuuu

SEQ ID NO: 366208 - RNA, 23 nt, Human
uuuuuuuuuuuuuuuuuugguuu

SEQ ID NO: 366209 - RNA, 21 nt, Human
aagggcacagcaccaacagag

SEQ ID NO: 366210 - RNA, 23 nt, Human
acacacacacacacacacacaca

SEQ ID NO: 366211 - RNA, 23 nt, Human
acacacacacacacacacacaca

SEQ ID NO: 366212 - RNA, 23 nt, Human
acacacacacacacacacacaca

SEQ ID NO: 366213 - RNA, 23 nt, Human
acacacacacacacacacacaca

SEQ ID NO: 366214 - RNA, 23 nt, Human
acacacacacacacacacacaca

SEQ ID NO: 366215 - RNA, 23 nt, Human
acacacacacacacacacacaca

SEQ ID NO: 366216 - RNA, 23 nt, Human
acacacacacacacacacacaca

SEQ ID NO: 366217 - RNA, 22 nt, Human
acacacacacacacagacaaaa

SEQ ID NO: 366218 - RNA, 27 nt, Human
acacacagacaaaaccacagggcuaag

SEQ ID NO: 366219 - RNA, 27 nt, Human
acacggacaaagugcgggcuuuggggc

SEQ ID NO: 366220 - RNA, 19 nt, Human
acacugaggccugggaguc

SEQ ID NO: 366221 - RNA, 22 nt, Human
acaggccuucaacacacccugc

SEQ ID NO: 366222 - RNA, 21 nt, Human
accaacagagggauggagaga

SEQ ID NO: 366223 - RNA, 31 nt, Human
accaagaacacacacacacacacacacacag

SEQ ID NO: 366224 - RNA, 23 nt, Human
agacaaaaccacagggcuaagac

SEQ ID NO: 366225 - RNA, 21 nt, Human
agacagagcgagggccaugug

SEQ ID NO: 366226 - RNA, 24 nt, Human
agagaggaagggguauggaccugg

SEQ ID NO: 366227 - RNA, 26 nt, Human
agaugcugagagucuggggcugagcc

SEQ ID NO: 366228 - RNA, 18 nt, Human
agccacauaggcacagag

SEQ ID NO: 366229 - RNA, 18 nt, Human
aggagggagagaggaagg

SEQ ID NO: 366230 - RNA, 18 nt, Human
aggcacagagacacacag

SEQ ID NO: 366231 - RNA, 21 nt, Human
auagcacagccacauaggcac

SEQ ID NO: 366232 - RNA, 18 nt, Human
auggagagauagaccccc

SEQ ID NO: 366233 - RNA, 21 nt, Human
caaaaccacagggcuaagaca

SEQ ID NO: 366234 - RNA, 23 nt, Human
caaacagacacauggauggagca

SEQ ID NO: 366235 - RNA, 20 nt, Human
caacacacccugccacacug

SEQ ID NO: 366236 - RNA, 21 nt, Human
caagaacacacacacacacac

SEQ ID NO: 366237 - RNA, 31 nt, Human
caagaacacacacacacacacacacacacag

SEQ ID NO: 366238 - RNA, 20 nt, Human
cacacacacacacacacaca

SEQ ID NO: 366239 - RNA, 20 nt, Human
cacacacacacacacacaca

SEQ ID NO: 366240 - RNA, 20 nt, Human
cacacacacacacacacaca

SEQ ID NO: 366241 - RNA, 20 nt, Human
cacacacacacacacacaca

SEQ ID NO: 366242 - RNA, 20 nt, Human
cacacacacacacacacaca

SEQ ID NO: 366243 - RNA, 20 nt, Human
cacacacacacacacacaca

SEQ ID NO: 366244 - RNA, 20 nt, Human
cacacacacacacacacaca

SEQ ID NO: 366245 - RNA, 20 nt, Human
cacacacacacacacacaca

SEQ ID NO: 366246 - RNA, 20 nt, Human
cacacacacacacacacaca

SEQ ID NO: 366247 - RNA, 20 nt, Human
cacacacacacacacacaca

SEQ ID NO: 366248 - RNA, 20 nt, Human
cacacacacacacacacaca

SEQ ID NO: 366249 - RNA, 22 nt, Human
cacacacacacacacacacaca

SEQ ID NO: 366250 - RNA, 22 nt, Human
cacacacacacacacacacaca

SEQ ID NO: 366251 - RNA, 22 nt, Human
cacacacacacacacacacaca

SEQ ID NO: 366252 - RNA, 26 nt, Human
cacacacacacacacacacacacaca

SEQ ID NO: 366253 - RNA, 26 nt, Human
cacacacacacacacacacacacaca

SEQ ID NO: 366254 - RNA, 26 nt, Human
cacacacacacacacacacacacaca

SEQ ID NO: 366255 - RNA, 26 nt, Human
cacacacacacacacacacacacaca

SEQ ID NO: 366256 - RNA, 26 nt, Human
cacacacacacacacacacacacaca

SEQ ID NO: 366257 - RNA, 26 nt, Human
cacacacacacacacacacacacaca

SEQ ID NO: 366258 - RNA, 26 nt, Human
cacacacacacacacacacacacaca

SEQ ID NO: 366259 - RNA, 28 nt, Human
cacacacacacacacacacacacagaca

SEQ ID NO: 366260 - RNA, 24 nt, Human
cacacacacacacacagacaaaac

SEQ ID NO: 366261 - RNA, 21 nt, Human
cacacacacacacagacaaaa

SEQ ID NO: 366262 - RNA, 23 nt, Human
cacacacacacagacaaaaccac

SEQ ID NO: 366263 - RNA, 23 nt, Human
cacagcaccaacagagggaugga

SEQ ID NO: 366264 - RNA, 22 nt, Human
cacagccacauaggcacagaga

SEQ ID NO: 366265 - RNA, 24 nt, Human
caccacaggccuucaacacacccu

SEQ ID NO: 366266 - RNA, 24 nt, Human
caccacaggccuucaacacacccu

SEQ ID NO: 366267 - RNA, 20 nt, Human
caccccacuccccgccacac

SEQ ID NO: 366268 - RNA, 20 nt, Human
cacuggggcuggggcugggg

SEQ ID NO: 366269 - RNA, 20 nt, Human
cacuuuggucuugcccacug

SEQ ID NO: 366270 - RNA, 21 nt, Human
cagcggaguccucccucuuuc

SEQ ID NO: 366271 - RNA, 23 nt, Human
cauagaaaccauagcacagccac

SEQ ID NO: 366272 - RNA, 21 nt, Human
ccacacagacaaauggacugc

SEQ ID NO: 366273 - RNA, 23 nt, Human
ccacagcaccaagaacacacaca

SEQ ID NO: 366274 - RNA, 22 nt, Human
cccaccccacuccccgccacac

SEQ ID NO: 366275 - RNA, 19 nt, Human
cccccgggauccccgcagg

SEQ ID NO: 366276 - RNA, 18 nt, Human
ccccgaccgucuaggccc

SEQ ID NO: 366277 - RNA, 25 nt, Human
ccccgcgccaaguccgagcagcccc

SEQ ID NO: 366278 - RNA, 19 nt, Human
ccccgggauccccgcaggg

SEQ ID NO: 366279 - RNA, 20 nt, Human
ccccgggauccccgcagggc

SEQ ID NO: 366280 - RNA, 23 nt, Human
cccugacucccaccccacucccc

SEQ ID NO: 366281 - RNA, 23 nt, Human
ccugccacacugaggccugggag

SEQ ID NO: 366282 - RNA, 19 nt, Human
cgccgacccccgggauccc

SEQ ID NO: 366283 - RNA, 20 nt, Human
cggccccgcgccaaguccga

SEQ ID NO: 366284 - RNA, 21 nt, Human
cggccuggcaguggggugagg

SEQ ID NO: 366285 - RNA, 23 nt, Human
cucccaccccacuccccgccaca

SEQ ID NO: 366286 - RNA, 24 nt, Human
cucccucuuucagggauagccaag

SEQ ID NO: 366287 - RNA, 20 nt, Human
cugacucccaccccacuccc

SEQ ID NO: 366288 - RNA, 23 nt, Human
cugacucccaccccacuccccgc

SEQ ID NO: 366289 - RNA, 20 nt, Human
cuggggcugagccucggccu

SEQ ID NO: 366290 - RNA, 20 nt, Human
cuggggcuggggcugaggcu

SEQ ID NO: 366291 - RNA, 21 nt, Human
gaagggguauggaccuggcuc

SEQ ID NO: 366292 - RNA, 27 nt, Human
gacacacaggccacagcaccaagaaca

SEQ ID NO: 366293 - RNA, 18 nt, Human
gagauggcaccacaggcc

SEQ ID NO: 366294 - RNA, 20 nt, Human
gagcugcagcggaguccucc

SEQ ID NO: 366295 - RNA, 22 nt, Human
gaggcuggggaaacuggcaggu

SEQ ID NO: 366296 - RNA, 31 nt, Human
gcaccaagaacacacacacacacacacacag

SEQ ID NO: 366297 - RNA, 21 nt, Human
gccacagcaccaagaacacac

SEQ ID NO: 366298 - RNA, 22 nt, Human
gccuggcaguggggugagggca

SEQ ID NO: 366299 - RNA, 22 nt, Human
gcgacuguggcgcgcggagucc

SEQ ID NO: 366300 - RNA, 22 nt, Human
ggaagggguauggaccuggcuc

SEQ ID NO: 366301 - RNA, 21 nt, Human
ggcacagagacacacaggcca

SEQ ID NO: 366302 - RNA, 19 nt, Human
gggcuggggcugaggcugg

SEQ ID NO: 366303 - RNA, 18 nt, Human
ggggcugaggcuggggaa

SEQ ID NO: 366304 - RNA, 22 nt, Human
ggugguaggagggagagaggaa

SEQ ID NO: 366305 - RNA, 23 nt, Human
guaggagggagagaggaaggggu

SEQ ID NO: 366306 - RNA, 28 nt, Human
uagacaggcagaugcccccagccagcca

SEQ ID NO: 366307 - RNA, 18 nt, Human
uagacccccaaacagaca

SEQ ID NO: 366308 - RNA, 21 nt, Human
uagacccccaaacagacacau

SEQ ID NO: 366309 - RNA, 24 nt, Human
uagacccccaaacagacacaugga

SEQ ID NO: 366310 - RNA, 22 nt, Human
ucaacacacccugccacacuga

SEQ ID NO: 366311 - RNA, 23 nt, Human
ucugugaucagggcagcagaugc

SEQ ID NO: 366312 - RNA, 22 nt, Human
ucuuucagggauagccaagggc

SEQ ID NO: 366313 - RNA, 25 nt, Human
ugaccucccccaggcauaggcacac

SEQ ID NO: 366314 - RNA, 19 nt, Human
ugacucccaccccacuccc

SEQ ID NO: 366315 - RNA, 23 nt, Human
ugagagucuggggcugagccucg

SEQ ID NO: 366316 - RNA, 18 nt, Human
ugagccucggccuggcag

SEQ ID NO: 366317 - RNA, 19 nt, Human
ugcccccagccagccagcc

SEQ ID NO: 366318 - RNA, 18 nt, Human
uggagagauagaccccca

SEQ ID NO: 366319 - RNA, 22 nt, Human
uggagcugcagcggaguccucc

SEQ ID NO: 366320 - RNA, 18 nt, Human
uggcaggugguaggaggg

SEQ ID NO: 366321 - RNA, 21 nt, Human
uggggaaacuggcagguggua

SEQ ID NO: 366322 - RNA, 23 nt, Human
uggggagggggccccuacugacc

SEQ ID NO: 366323 - RNA, 22 nt, Human
uggggcuggggcugaggcuggg

SEQ ID NO: 366324 - RNA, 22 nt, Human
uggggugagggcagggccaugg

SEQ ID NO: 366325 - RNA, 21 nt, Human
uuucagggauagccaagggca

SEQ ID NO: 366326 - RNA, 21 nt, Human
uuuuuuuuuuuuuuuugcagu

SEQ ID NO: 366327 - RNA, 20 nt, Human
aacucaucuccccgcccccg

SEQ ID NO: 366328 - RNA, 24 nt, Human
cagccaccgccucuccccgcccug

SEQ ID NO: 366329 - RNA, 24 nt, Human
caggauaaauaaggcaggaguucc

SEQ ID NO: 366330 - RNA, 25 nt, Human
cauccuggggcgcugccgcggggcc

SEQ ID NO: 366331 - RNA, 21 nt, Human
ccaccgccucuccccgcccug

SEQ ID NO: 366332 - RNA, 22 nt, Human
cccacagccaccgccucucccc

SEQ ID NO: 366333 - RNA, 25 nt, Human
cccacagccaccgccucuccccgcc

SEQ ID NO: 366334 - RNA, 21 nt, Human
cccgcccccggccggcucagc

SEQ ID NO: 366335 - RNA, 24 nt, Human
ccgccgcgcccgcugcuggaggcc

SEQ ID NO: 366336 - RNA, 19 nt, Human
ccggacgcccacagccacc

SEQ ID NO: 366337 - RNA, 21 nt, Human
cgcgcccgccgcgcccgcugc

SEQ ID NO: 366338 - RNA, 23 nt, Human
cggacgcccacagccaccgccuc

SEQ ID NO: 366339 - RNA, 24 nt, Human
cggggccggacgcccacagccacc

SEQ ID NO: 366340 - RNA, 25 nt, Human
cggugcggaacggcuugggggaggc

SEQ ID NO: 366341 - RNA, 21 nt, Human
gcccgcugcuggaggccggcu

SEQ ID NO: 366342 - RNA, 18 nt, Human
gcugcuccacccgcggcc

SEQ ID NO: 366343 - RNA, 18 nt, Human
ggagaguggggucgugcu

SEQ ID NO: 366344 - RNA, 20 nt, Human
gggcucgcgcugcuccaccc

SEQ ID NO: 366345 - RNA, 19 nt, Human
uccacccgcggccgcagga

SEQ ID NO: 366346 - RNA, 25 nt, Human
ucugugacugcaggauaaauaaggc

SEQ ID NO: 366347 - RNA, 18 nt, Human
ucuuuuuuuuuuuuuuuu

SEQ ID NO: 366348 - RNA, 25 nt, Human
ucuuuuuuuuuuuuuuuuucucauu

SEQ ID NO: 366349 - RNA, 18 nt, Human
ugacugcaggauaaauaa

SEQ ID NO: 366350 - RNA, 20 nt, Human
uggggcgcugccgcggggcc

SEQ ID NO: 366351 - RNA, 21 nt, Human
ugugacugcaggauaaauaag

SEQ ID NO: 366352 - RNA, 18 nt, Human
uucccaaaauacauaaaa

SEQ ID NO: 366353 - RNA, 22 nt, Human
uuuuuuuuuuuuuuucucauuu

SEQ ID NO: 366354 - RNA, 22 nt, Human
uuuuuuuuuuuuuuuucuuuuu

SEQ ID NO: 366355 - RNA, 18 nt, Human
aaacuaaaccucuguuga

SEQ ID NO: 366356 - RNA, 23 nt, Human
aaagugcugggauuacaggcaug

SEQ ID NO: 366357 - RNA, 24 nt, Human
aaagugcugggauuacaggcaugg

SEQ ID NO: 366358 - RNA, 25 nt, Human
aaagugcugggauuacaggcauggg

SEQ ID NO: 366359 - RNA, 24 nt, Human
aacccgucacccccucacgacucu

SEQ ID NO: 366360 - RNA, 19 nt, Human
aagugcugggauuacaggc

SEQ ID NO: 366361 - RNA, 21 nt, Human
aagugcugggauuacaggcau

SEQ ID NO: 366362 - RNA, 23 nt, Human
acaggcgcccaccaccaugcccg

SEQ ID NO: 366363 - RNA, 18 nt, Human
acgggguuuccccauguu

SEQ ID NO: 366364 - RNA, 20 nt, Human
acgggguuuccccauguugg

SEQ ID NO: 366365 - RNA, 24 nt, Human
acgggguuuccccauguuggccag

SEQ ID NO: 366366 - RNA, 24 nt, Human
acucuugucacccaggcuggagug

SEQ ID NO: 366367 - RNA, 20 nt, Human
agaaggaaaagacaucucau

SEQ ID NO: 366368 - RNA, 19 nt, Human
aggaaucacgucuucaagu

SEQ ID NO: 366369 - RNA, 21 nt, Human
agguucaagugauucuccugc

SEQ ID NO: 366370 - RNA, 18 nt, Human
aguagcugggauuacagg

SEQ ID NO: 366371 - RNA, 19 nt, Human
aguagcugggauuacaggc

SEQ ID NO: 366372 - RNA, 24 nt, Human
agugauucuccugccucagccuuc

SEQ ID NO: 366373 - RNA, 24 nt, Human
agugcaauggcgccaucuuggcuc

SEQ ID NO: 366374 - RNA, 22 nt, Human
aucaagucauugaacaaaaagc

SEQ ID NO: 366375 - RNA, 24 nt, Human
aucucagcuuauuagaaaaaacaa

SEQ ID NO: 366376 - RNA, 24 nt, Human
auuuuuguauuuuuaguagagacg

SEQ ID NO: 366377 - RNA, 24 nt, Human
caaagugcugggauuacaggcaug

SEQ ID NO: 366378 - RNA, 18 nt, Human
caaaguguuaagugggaa

SEQ ID NO: 366379 - RNA, 21 nt, Human
caagaagggaugauuggagca

SEQ ID NO: 366380 - RNA, 20 nt, Human
caagugauucuccugccuca

SEQ ID NO: 366381 - RNA, 22 nt, Human
caagugauucuccugccucagc

SEQ ID NO: 366382 - RNA, 23 nt, Human
caaguucauggcuaaucaaagug

SEQ ID NO: 366383 - RNA, 24 nt, Human
caccaugcccggcuaauuuuugua

SEQ ID NO: 366384 - RNA, 20 nt, Human
caccucucucuccgaaucuu

SEQ ID NO: 366385 - RNA, 18 nt, Human
cacgucuucaagucuuca

SEQ ID NO: 366386 - RNA, 24 nt, Human
cacuagcaccucucucuccgaauc

SEQ ID NO: 366387 - RNA, 24 nt, Human
cacucuugucacccaggcuggagu

SEQ ID NO: 366388 - RNA, 21 nt, Human
cacugacccaggggaaaaaac

SEQ ID NO: 366389 - RNA, 21 nt, Human
cacugcaaccuccgccuccua

SEQ ID NO: 366390 - RNA, 22 nt, Human
cagaagauucuuuccaggucaa

SEQ ID NO: 366391 - RNA, 19 nt, Human
caggaaaaguugagaguca

SEQ ID NO: 366392 - RNA, 22 nt, Human
caggaaaaguugagagucagca

SEQ ID NO: 366393 - RNA, 21 nt, Human
caggcgcccaccaccaugccc

SEQ ID NO: 366394 - RNA, 25 nt, Human
caggucaaguccagccacuagcacc

SEQ ID NO: 366395 - RNA, 18 nt, Human
caugggccacuguguccg

SEQ ID NO: 366396 - RNA, 19 nt, Human
caugggccacuguguccgg

SEQ ID NO: 366397 - RNA, 24 nt, Human
cauguuggccagacuggucucgaa

SEQ ID NO: 366398 - RNA, 23 nt, Human
ccaaagugcugggauuacaggca

SEQ ID NO: 366399 - RNA, 24 nt, Human
ccaaagugcugggauuacaggcau

SEQ ID NO: 366400 - RNA, 18 nt, Human
ccaggggaaaaaaccacc

SEQ ID NO: 366401 - RNA, 21 nt, Human
ccaggggaaaaaaccaccaaa

SEQ ID NO: 366402 - RNA, 20 nt, Human
ccauccaagaauacacacuc

SEQ ID NO: 366403 - RNA, 25 nt, Human
ccauccaagaauacacacucugcaa

SEQ ID NO: 366404 - RNA, 22 nt, Human
ccauguuggccagacuggucuc

SEQ ID NO: 366405 - RNA, 24 nt, Human
cccaaagugcugggauuacaggca

SEQ ID NO: 366406 - RNA, 18 nt, Human
cccaggcuggagugcaau

SEQ ID NO: 366407 - RNA, 19 nt, Human
cccaggggaaaaaaccacc

SEQ ID NO: 366408 - RNA, 24 nt, Human
cccauguuggccagacuggucucg

SEQ ID NO: 366409 - RNA, 24 nt, Human
ccccaaagugcugggauuacaggc

SEQ ID NO: 366410 - RNA, 24 nt, Human
ccgccuccuagguucaagugauuc

SEQ ID NO: 366411 - RNA, 23 nt, Human
ccuagguucaagugauucuccuc

SEQ ID NO: 366412 - RNA, 23 nt, Human
ccuagguucaagugauucuccug

SEQ ID NO: 366413 - RNA, 22 nt, Human
ccucaggugauccagccugccu

SEQ ID NO: 366414 - RNA, 24 nt, Human
ccuccuagguucaagugauucucc

SEQ ID NO: 366415 - RNA, 18 nt, Human
ccucuguugagcaggggu

SEQ ID NO: 366416 - RNA, 25 nt, Human
ccuguccucaggugauccagccugc

SEQ ID NO: 366417 - RNA, 18 nt, Human
ccuuuccaucacugaccc

SEQ ID NO: 366418 - RNA, 19 nt, Human
cgggguuuccccauguugg

SEQ ID NO: 366419 - RNA, 23 nt, Human
cucagccuucugaguagcuggga

SEQ ID NO: 366420 - RNA, 19 nt, Human
cuccuagguucaagugauu

SEQ ID NO: 366421 - RNA, 22 nt, Human
cugaguagcugggauuacaggc

SEQ ID NO: 366422 - RNA, 23 nt, Human
cugcaaccuccgccuccuagguu

SEQ ID NO: 366423 - RNA, 24 nt, Human
cugcaaccuccgccuccuagguuc

SEQ ID NO: 366424 - RNA, 23 nt, Human
cugccucagccuucugaguagcu

SEQ ID NO: 366425 - RNA, 18 nt, Human
cuuaacccgucacccccu

SEQ ID NO: 366426 - RNA, 21 nt, Human
cuuggccccccaaagugcugg

SEQ ID NO: 366427 - RNA, 24 nt, Human
cuugucacccaggcuggagugcaa

SEQ ID NO: 366428 - RNA, 24 nt, Human
gagacgggguuuccccauguuggc

SEQ ID NO: 366429 - RNA, 25 nt, Human
gaguagcugggauuacaggcgccca

SEQ ID NO: 366430 - RNA, 20 nt, Human
gaugauggagaaggaaaaga

SEQ ID NO: 366431 - RNA, 18 nt, Human
gauuacaggcaugggcca

SEQ ID NO: 366432 - RNA, 21 nt, Human
gauuacaggcaugggccacug

SEQ ID NO: 366433 - RNA, 24 nt, Human
gauuacaggcaugggccacugugu

SEQ ID NO: 366434 - RNA, 22 nt, Human
gauuacaggcgcccaccaccau

SEQ ID NO: 366435 - RNA, 22 nt, Human
gcaaccuccgccuccuagguuc

SEQ ID NO: 366436 - RNA, 22 nt, Human
gcccggcuaauuuuuguauuuu

SEQ ID NO: 366437 - RNA, 18 nt, Human
gcgccaucuuggcucacu

SEQ ID NO: 366438 - RNA, 20 nt, Human
gcuggagugcaauggcgcca

SEQ ID NO: 366439 - RNA, 23 nt, Human
ggaguuucacucuugucacccag

SEQ ID NO: 366440 - RNA, 24 nt, Human
ggauuacaggcaugggccacugug

SEQ ID NO: 366441 - RNA, 21 nt, Human
ggugugugugugugugugugu

SEQ ID NO: 366442 - RNA, 23 nt, Human
guagagacgggguuuccccaugu

SEQ ID NO: 366443 - RNA, 18 nt, Human
guagcugggauuacaggc

SEQ ID NO: 366444 - RNA, 25 nt, Human
guccucaggugauccagccugccuu

SEQ ID NO: 366445 - RNA, 22 nt, Human
gugauccagccugccuuggccc

SEQ ID NO: 366446 - RNA, 24 nt, Human
gugauucuccugccucagccuucu

SEQ ID NO: 366447 - RNA, 21 nt, Human
guguguguguguguguacgug

SEQ ID NO: 366448 - RNA, 20 nt, Human
gugugugugugugugugugu

SEQ ID NO: 366449 - RNA, 21 nt, Human
gugugugugugugugugugug

SEQ ID NO: 366450 - RNA, 19 nt, Human
uaacuuggcucuaagauga

SEQ ID NO: 366451 - RNA, 24 nt, Human
uaauuuuuguauuuuuaguagaga

SEQ ID NO: 366452 - RNA, 23 nt, Human
uacaggcaugggccacugugucc

SEQ ID NO: 366453 - RNA, 23 nt, Human
uacgugcacaaagaggagcaaga

SEQ ID NO: 366454 - RNA, 21 nt, Human
uagaaaaaacaauuugggagg

SEQ ID NO: 366455 - RNA, 23 nt, Human
uagguucaagugauucuccugcc

SEQ ID NO: 366456 - RNA, 24 nt, Human
uaguagagacgggguuuccccaug

SEQ ID NO: 366457 - RNA, 18 nt, Human
uauuucuauuuucucaaa

SEQ ID NO: 366458 - RNA, 19 nt, Human
ucaagugauucuccugccu

SEQ ID NO: 366459 - RNA, 18 nt, Human
ucacccaggcuggagugc

SEQ ID NO: 366460 - RNA, 22 nt, Human
ucacucuugucacccaggcugg

SEQ ID NO: 366461 - RNA, 23 nt, Human
ucacucuugucacccaggcugga

SEQ ID NO: 366462 - RNA, 24 nt, Human
ucacugacccaggggaaaaaacca

SEQ ID NO: 366463 - RNA, 19 nt, Human
ucacugcaaccuccgccuc

SEQ ID NO: 366464 - RNA, 24 nt, Human
ucacugcaaccuccgccuccuagg

SEQ ID NO: 366465 - RNA, 25 nt, Human
ucacugcaaccuccgccuccuaggu

SEQ ID NO: 366466 - RNA, 26 nt, Human
ucacugcaaccuccgccuccuagguu

SEQ ID NO: 366467 - RNA, 20 nt, Human
ucagccuucugaguagcugg

SEQ ID NO: 366468 - RNA, 18 nt, Human
uccaucacugacccaggg

SEQ ID NO: 366469 - RNA, 20 nt, Human
ucccacucauugaauccaaa

SEQ ID NO: 366470 - RNA, 21 nt, Human
uccuagguucaagugauucuc

SEQ ID NO: 366471 - RNA, 24 nt, Human
uccuagguucaagugauucuccug

SEQ ID NO: 366472 - RNA, 24 nt, Human
ucgaugcaucagccauccaagaau

SEQ ID NO: 366473 - RNA, 24 nt, Human
ucuccgaaucuuaacccgucaccc

SEQ ID NO: 366474 - RNA, 24 nt, Human
ucuccugccucagccuucugagua

SEQ ID NO: 366475 - RNA, 21 nt, Human
ucuccuuaagagaaaugggaa

SEQ ID NO: 366476 - RNA, 22 nt, Human
ucuccuuaagagaaaugggaau

SEQ ID NO: 366477 - RNA, 23 nt, Human
ucugaguagcugggauuacaggc

SEQ ID NO: 366478 - RNA, 24 nt, Human
ucugaguagcugggauuacaggcg

SEQ ID NO: 366479 - RNA, 18 nt, Human
ucuugucacccaggcugg

SEQ ID NO: 366480 - RNA, 23 nt, Human
ucuuuucuuuuuuuuugagaugg

SEQ ID NO: 366481 - RNA, 22 nt, Human
ucuuuuuuuuugagauggaguu

SEQ ID NO: 366482 - RNA, 20 nt, Human
ugaacaaaaagcuacaugga

SEQ ID NO: 366483 - RNA, 20 nt, Human
ugauucuccugccucagccu

SEQ ID NO: 366484 - RNA, 22 nt, Human
ugccaucaauccuggcugaagu

SEQ ID NO: 366485 - RNA, 24 nt, Human
ugcccggcuaauuuuuguauuuuu

SEQ ID NO: 366486 - RNA, 24 nt, Human
ugccucagccuucugaguagcugg

SEQ ID NO: 366487 - RNA, 21 nt, Human
ugccuuggccccccaaagugc

SEQ ID NO: 366488 - RNA, 19 nt, Human
uggaccuuauuuucuaaug

SEQ ID NO: 366489 - RNA, 23 nt, Human
uggagugcaauggcgccaucuug

SEQ ID NO: 366490 - RNA, 24 nt, Human
uggagugcaauggcgccaucuugg

SEQ ID NO: 366491 - RNA, 24 nt, Human
uggccagacuggucucgaacuccu

SEQ ID NO: 366492 - RNA, 20 nt, Human
ugggagguuacuacuuuagu

SEQ ID NO: 366493 - RNA, 21 nt, Human
ugggauuacaggcaugggcca

SEQ ID NO: 366494 - RNA, 22 nt, Human
ugggauuacaggcaugggccac

SEQ ID NO: 366495 - RNA, 22 nt, Human
ugggauuacaggcaugggccac

SEQ ID NO: 366496 - RNA, 22 nt, Human
ugggauuacaggcaugggccac

SEQ ID NO: 366497 - RNA, 24 nt, Human
ugggauuacaggcaugggccacug

SEQ ID NO: 366498 - RNA, 26 nt, Human
ugggauuacaggcaugggccacugug

SEQ ID NO: 366499 - RNA, 21 nt, Human
ugggauuacaggcgcccacca

SEQ ID NO: 366500 - RNA, 24 nt, Human
ugggauuacaggcgcccaccacca

SEQ ID NO: 366501 - RNA, 25 nt, Human
ugggauuacaggcgcccaccaccau

SEQ ID NO: 366502 - RNA, 23 nt, Human
uggucucgaacuccuguccucag

SEQ ID NO: 366503 - RNA, 21 nt, Human
uguauuuuuaguagagacggg

SEQ ID NO: 366504 - RNA, 20 nt, Human
ugucacccaggcuggagugc

SEQ ID NO: 366505 - RNA, 25 nt, Human
uguccucaggugauccagccugccu

SEQ ID NO: 366506 - RNA, 21 nt, Human
uguguguguguguguacgugc

SEQ ID NO: 366507 - RNA, 21 nt, Human
uguguguguguguguguacgu

SEQ ID NO: 366508 - RNA, 18 nt, Human
ugugugugugugugugug

SEQ ID NO: 366509 - RNA, 18 nt, Human
ugugugugugugugugug

SEQ ID NO: 366510 - RNA, 18 nt, Human
ugugugugugugugugug

SEQ ID NO: 366511 - RNA, 18 nt, Human
ugugugugugugugugug

SEQ ID NO: 366512 - RNA, 18 nt, Human
ugugugugugugugugug

SEQ ID NO: 366513 - RNA, 18 nt, Human
ugugugugugugugugug

SEQ ID NO: 366514 - RNA, 18 nt, Human
ugugugugugugugugug

SEQ ID NO: 366515 - RNA, 18 nt, Human
ugugugugugugugugug

SEQ ID NO: 366516 - RNA, 18 nt, Human
ugugugugugugugugug

SEQ ID NO: 366517 - RNA, 20 nt, Human
ugugugugugugugugugua

SEQ ID NO: 366518 - RNA, 21 nt, Human
ugugugugugugugugugugu

SEQ ID NO: 366519 - RNA, 21 nt, Human
ugugugugugugugugugugu

SEQ ID NO: 366520 - RNA, 21 nt, Human
ugugugugugugugugugugu

SEQ ID NO: 366521 - RNA, 21 nt, Human
ugugugugugugugugugugu

SEQ ID NO: 366522 - RNA, 21 nt, Human
ugugugugugugugugugugu

SEQ ID NO: 366523 - RNA, 21 nt, Human
ugugugugugugugugugugu

SEQ ID NO: 366524 - RNA, 21 nt, Human
ugugugugugugugugugugu

SEQ ID NO: 366525 - RNA, 21 nt, Human
ugugugugugugugugugugu

SEQ ID NO: 366526 - RNA, 21 nt, Human
ugugugugugugugugugugu

SEQ ID NO: 366527 - RNA, 21 nt, Human
ugugugugugugugugugugu

SEQ ID NO: 366528 - RNA, 21 nt, Human
ugugugugugugugugugugu

SEQ ID NO: 366529 - RNA, 21 nt, Human
ugugugugugugugugugugu

SEQ ID NO: 366530 - RNA, 21 nt, Human
ugugugugugugugugugugu

SEQ ID NO: 366531 - RNA, 21 nt, Human
ugugugugugugugugugugu

SEQ ID NO: 366532 - RNA, 21 nt, Human
ugugugugugugugugugugu

SEQ ID NO: 366533 - RNA, 22 nt, Human
ugugugugugugugugugugua

SEQ ID NO: 366534 - RNA, 22 nt, Human
ugugugugugugugugugugug

SEQ ID NO: 366535 - RNA, 22 nt, Human
ugugugugugugugugugugug

SEQ ID NO: 366536 - RNA, 22 nt, Human
ugugugugugugugugugugug

SEQ ID NO: 366537 - RNA, 22 nt, Human
ugugugugugugugugugugug

SEQ ID NO: 366538 - RNA, 22 nt, Human
ugugugugugugugugugugug

SEQ ID NO: 366539 - RNA, 22 nt, Human
ugugugugugugugugugugug

SEQ ID NO: 366540 - RNA, 25 nt, Human
uguuaagugggaaugcaagucgaug

SEQ ID NO: 366541 - RNA, 19 nt, Human
uuaagugggaaugcaaguc

SEQ ID NO: 366542 - RNA, 18 nt, Human
uuaguagagacgggguuu

SEQ ID NO: 366543 - RNA, 24 nt, Human
uuaguagagacgggguuuccccau

SEQ ID NO: 366544 - RNA, 21 nt, Human
uucaagugauucuccugccuc

SEQ ID NO: 366545 - RNA, 23 nt, Human
uucaagugauucuccugccucag

SEQ ID NO: 366546 - RNA, 24 nt, Human
uucaagugauucuccugccucagc

SEQ ID NO: 366547 - RNA, 24 nt, Human
uucacucuugucacccaggcugga

SEQ ID NO: 366548 - RNA, 20 nt, Human
uuccaggucaaguccagcca

SEQ ID NO: 366549 - RNA, 24 nt, Human
uucugaguagcugggauuacaggc

SEQ ID NO: 366550 - RNA, 26 nt, Human
uucuuuuuuuuugagauggaguuuca

SEQ ID NO: 366551 - RNA, 33 nt, Human
uugagcagggguguguguguguguguguguggu

SEQ ID NO: 366552 - RNA, 23 nt, Human
uuguauuuuuaguagagacgggg

SEQ ID NO: 366553 - RNA, 21 nt, Human
uuuccccauguuggccagacu

SEQ ID NO: 366554 - RNA, 21 nt, Human
uuucuuuuuuuuugagaugga

SEQ ID NO: 366555 - RNA, 22 nt, Human
uuuuuaguagagacgggguuuc

SEQ ID NO: 366556 - RNA, 20 nt, Human
uuuuuguauuuuuaguagag

SEQ ID NO: 366557 - RNA, 23 nt, Human
acaagagaacaguuaguacagaa

SEQ ID NO: 366558 - RNA, 20 nt, Human
agaaaacacugaaauuucac

SEQ ID NO: 366559 - RNA, 23 nt, Human
agaaauguguaucaucuaacagc

SEQ ID NO: 366560 - RNA, 21 nt, Human
caccacccagaaauuguccga

SEQ ID NO: 366561 - RNA, 24 nt, Human
ccucuuguaagaaaagagcuaggu

SEQ ID NO: 366562 - RNA, 19 nt, Human
cuaccuucugagauugacu

SEQ ID NO: 366563 - RNA, 23 nt, Human
gcacuaaagggguacucacuaaa

SEQ ID NO: 366564 - RNA, 20 nt, Human
gccucaccaugauuuuuuuu

SEQ ID NO: 366565 - RNA, 19 nt, Human
gggucauccuucuccccgg

SEQ ID NO: 366566 - RNA, 22 nt, Human
uaaaacaauaguagaccccaaa

SEQ ID NO: 366567 - RNA, 23 nt, Human
uaaaacaauaguagaccccaaac

SEQ ID NO: 366568 - RNA, 20 nt, Human
uaacccuuagacauuguccc

SEQ ID NO: 366569 - RNA, 22 nt, Human
uaaguuucuguauuagcaguuc

SEQ ID NO: 366570 - RNA, 18 nt, Human
uacaaaagugacauuaga

SEQ ID NO: 366571 - RNA, 19 nt, Human
uacaaauuauauauacaca

SEQ ID NO: 366572 - RNA, 21 nt, Human
uagaaaacacugaaauuucac

SEQ ID NO: 366573 - RNA, 23 nt, Human
uauagaaaacacugaaauuucac

SEQ ID NO: 366574 - RNA, 18 nt, Human
uauagcacuaaaggggua

SEQ ID NO: 366575 - RNA, 19 nt, Human
ucuaaaacaauaguagacc

SEQ ID NO: 366576 - RNA, 24 nt, Human
ucuaacagcaaagaaauaugaacc

SEQ ID NO: 366577 - RNA, 22 nt, Human
ucuguauuagcaguucacucag

SEQ ID NO: 366578 - RNA, 20 nt, Human
ugaauggcacaaauauagca

SEQ ID NO: 366579 - RNA, 26 nt, Human
ugaauggcacaaauauagcacuaaag

SEQ ID NO: 366580 - RNA, 19 nt, Human
ugcaaauaaaguuuauugc

SEQ ID NO: 366581 - RNA, 18 nt, Human
ugcuaccuucugagauug

SEQ ID NO: 366582 - RNA, 22 nt, Human
ugcugaauuuccccauuaacau

SEQ ID NO: 366583 - RNA, 19 nt, Human
ugucuuguuucugccucuu

SEQ ID NO: 366584 - RNA, 20 nt, Human
uguuucugccucuuguaaga

SEQ ID NO: 366585 - RNA, 23 nt, Human
uucugccucuuguaagaaaagag

SEQ ID NO: 366586 - RNA, 21 nt, Human
uuuuuuuuuuuuuugcaaaua

SEQ ID NO: 366587 - RNA, 21 nt, Human
uuuuuuuuuuuuuuuuugcaa

SEQ ID NO: 366588 - RNA, 23 nt, Human
uuuuuuuuuuuuuuuuugcaaau

SEQ ID NO: 366589 - RNA, 27 nt, Human
uuuuuuuuuuuuuuuuuuuuuuugggg

SEQ ID NO: 366590 - RNA, 18 nt, Human
aagagagaacgaggccag

SEQ ID NO: 366591 - RNA, 18 nt, Human
accucacucuaccccuaa

SEQ ID NO: 366592 - RNA, 19 nt, Human
agcuggcaggggcuggggg

SEQ ID NO: 366593 - RNA, 20 nt, Human
aggggugguggggacaggga

SEQ ID NO: 366594 - RNA, 22 nt, Human
aggggugguggggacagggagu

SEQ ID NO: 366595 - RNA, 19 nt, Human
gcaggggugguggggacag

SEQ ID NO: 366596 - RNA, 19 nt, Human
gcccuggguggggcagggg

SEQ ID NO: 366597 - RNA, 21 nt, Human
gcccuggguggggcaggggug

SEQ ID NO: 366598 - RNA, 19 nt, Human
ggagcuggcaggggcuggg

SEQ ID NO: 366599 - RNA, 22 nt, Human
ggcuggggggcugagcugaggu

SEQ ID NO: 366600 - RNA, 21 nt, Human
gggcaggggugguggggacag

SEQ ID NO: 366601 - RNA, 20 nt, Human
ggggggcugagcugaggugg

SEQ ID NO: 366602 - RNA, 21 nt, Human
ggggggcugagcugagguggg

SEQ ID NO: 366603 - RNA, 20 nt, Human
ggggugguggggacagggag

SEQ ID NO: 366604 - RNA, 22 nt, Human
ggguggggcagggguggugggg

SEQ ID NO: 366605 - RNA, 19 nt, Human
guggagcuggcaggggcug

SEQ ID NO: 366606 - RNA, 19 nt, Human
uacacaacacauuuuauuu

SEQ ID NO: 366607 - RNA, 18 nt, Human
uaguguggagcuggcagg

SEQ ID NO: 366608 - RNA, 25 nt, Human
uccagugucuaccucacucuacccc

SEQ ID NO: 366609 - RNA, 20 nt, Human
uggagcuggcaggggcuggg

SEQ ID NO: 366610 - RNA, 21 nt, Human
uggggggcugagcugaggugg

SEQ ID NO: 366611 - RNA, 22 nt, Human
uguggagcuggcaggggcuggu

SEQ ID NO: 366612 - RNA, 21 nt, Human
agagauuaagggcuaaccucc

SEQ ID NO: 366613 - RNA, 22 nt, Human
agcaauccuucauuuaguaauc

SEQ ID NO: 366614 - RNA, 18 nt, Human
agcacaggagcaacugga

SEQ ID NO: 366615 - RNA, 25 nt, Human
caaaauucuccaaauguagauauua

SEQ ID NO: 366616 - RNA, 24 nt, Human
caacuggauugcuuucagcagucu

SEQ ID NO: 366617 - RNA, 22 nt, Human
cccgcagcgccgccggcucccg

SEQ ID NO: 366618 - RNA, 24 nt, Human
cccgcagcgccgccggcucccguc

SEQ ID NO: 366619 - RNA, 18 nt, Human
ccgccggcucccgucgcc

SEQ ID NO: 366620 - RNA, 19 nt, Human
ccgccggcucccgucgccg

SEQ ID NO: 366621 - RNA, 18 nt, Human
cgcgaccgcugacccgca

SEQ ID NO: 366622 - RNA, 25 nt, Human
cuagugccccaucgugaaaaaccag

SEQ ID NO: 366623 - RNA, 26 nt, Human
cuuucuaacuguauacaguauaugcu

SEQ ID NO: 366624 - RNA, 23 nt, Human
gcacuaaaauaucuuaaaauuca

SEQ ID NO: 366625 - RNA, 23 nt, Human
ggcugagcccaccaccgggggcc

SEQ ID NO: 366626 - RNA, 20 nt, Human
gggcgccccaggcugccgag

SEQ ID NO: 366627 - RNA, 26 nt, Human
guaaaaucuuuuuaaacucagauuuc

SEQ ID NO: 366628 - RNA, 25 nt, Human
ucccuggaaauacuuucaaguuuug

SEQ ID NO: 366629 - RNA, 21 nt, Human
ucgaccggcugagcccaccac

SEQ ID NO: 366630 - RNA, 22 nt, Human
ucuugaagcacuaaaauaucuu

SEQ ID NO: 366631 - RNA, 18 nt, Human
ucuuuuguauaaauauaa

SEQ ID NO: 366632 - RNA, 18 nt, Human
ugcagcaaucaaaaaggu

SEQ ID NO: 366633 - RNA, 24 nt, Human
ugcagcaaucaaaaagguaaaauc

SEQ ID NO: 366634 - RNA, 20 nt, Human
ugccccaucgugaaaaacca

SEQ ID NO: 366635 - RNA, 19 nt, Human
uggauugcuuucagcaguc

SEQ ID NO: 366636 - RNA, 23 nt, Human
uguugugugcucuugcaaagagu

SEQ ID NO: 366637 - RNA, 20 nt, Human
uuaaacucagauuucaaguu

SEQ ID NO: 366638 - RNA, 24 nt, Human
uucaaauuauacuucuauuuuuca

SEQ ID NO: 366639 - RNA, 19 nt, Human
uucucuggcuaccaucuag

SEQ ID NO: 366640 - RNA, 23 nt, Human
aaaacaaaacaaaacaaaaaagu

SEQ ID NO: 366641 - RNA, 25 nt, Human
aaaacaaaacaaaacaaaaaaguuc

SEQ ID NO: 366642 - RNA, 19 nt, Human
aaaagucuguagaaacaac

SEQ ID NO: 366643 - RNA, 26 nt, Human
aaacaaaaaauuuccccaaauccaac

SEQ ID NO: 366644 - RNA, 19 nt, Human
aaacaaaacaaaacaaaaa

SEQ ID NO: 366645 - RNA, 22 nt, Human
aaacaaacaaaaaauuucccca

SEQ ID NO: 366646 - RNA, 22 nt, Human
aaacaggacaaaaauggaccaa

SEQ ID NO: 366647 - RNA, 25 nt, Human
aaacaugaacacaacuaagccauac

SEQ ID NO: 366648 - RNA, 19 nt, Human
aaaguaauuauuuucauuu

SEQ ID NO: 366649 - RNA, 23 nt, Human
aacaaaaaccaugucuccacauu

SEQ ID NO: 366650 - RNA, 22 nt, Human
aacccaagacccaaaccugaca

SEQ ID NO: 366651 - RNA, 19 nt, Human
aacugcuucugaauaaagu

SEQ ID NO: 366652 - RNA, 21 nt, Human
aagaaccagcgaggaaucugc

SEQ ID NO: 366653 - RNA, 20 nt, Human
aagcacugggaggaaucggg

SEQ ID NO: 366654 - RNA, 18 nt, Human
aaugacuacuaacacuca

SEQ ID NO: 366655 - RNA, 28 nt, Human
acaaaaaaaaaaaaaaagucuguagaaa

SEQ ID NO: 366656 - RNA, 23 nt, Human
acaaaacaaaacaaaaaaguuca

SEQ ID NO: 366657 - RNA, 20 nt, Human
acacuggagacagaugcaac

SEQ ID NO: 366658 - RNA, 20 nt, Human
accaaaaugacuacuaacac

SEQ ID NO: 366659 - RNA, 20 nt, Human
acccaagacccaaaccugac

SEQ ID NO: 366660 - RNA, 22 nt, Human
acugaauaaacccuguuuuacc

SEQ ID NO: 366661 - RNA, 24 nt, Human
agaagaaccagcgaggaaucugca

SEQ ID NO: 366662 - RNA, 19 nt, Human
agacaagauagcucccaga

SEQ ID NO: 366663 - RNA, 19 nt, Human
aguaguugaguuuacucaa

SEQ ID NO: 366664 - RNA, 19 nt, Human
aguuauuuuauuucccaca

SEQ ID NO: 366665 - RNA, 22 nt, Human
auacaaaaaaaaaaaaaaaguc

SEQ ID NO: 366666 - RNA, 24 nt, Human
auacacuugaacccaagacccaaa

SEQ ID NO: 366667 - RNA, 19 nt, Human
auccauuggaauuuucccu

SEQ ID NO: 366668 - RNA, 21 nt, Human
augaacacaacuaagccauac

SEQ ID NO: 366669 - RNA, 24 nt, Human
augacacagccaagcauguggcuu

SEQ ID NO: 366670 - RNA, 24 nt, Human
auggaauuauguauauuagauuuu

SEQ ID NO: 366671 - RNA, 18 nt, Human
auggagugccuaaagccc

SEQ ID NO: 366672 - RNA, 24 nt, Human
auuaugccuacaaaaaggcaaacc

SEQ ID NO: 366673 - RNA, 21 nt, Human
auuuuuuuuccauuccuuccu

SEQ ID NO: 366674 - RNA, 22 nt, Human
caaaaaaagacccagagcuguc

SEQ ID NO: 366675 - RNA, 22 nt, Human
caaaacaaaacaaaaaaguuca

SEQ ID NO: 366676 - RNA, 21 nt, Human
caaaaugacuacuaacacuca

SEQ ID NO: 366677 - RNA, 22 nt, Human
caaaaugcaguuaagaaacuua

SEQ ID NO: 366678 - RNA, 21 nt, Human
caaaucauaaaaaacaaacaa

SEQ ID NO: 366679 - RNA, 22 nt, Human
caacuaagccauacauugucaa

SEQ ID NO: 366680 - RNA, 18 nt, Human
caacugaauaaacccugu

SEQ ID NO: 366681 - RNA, 21 nt, Human
caagggcaaaccuuacagcca

SEQ ID NO: 366682 - RNA, 21 nt, Human
caagguagacaagauagcucc

SEQ ID NO: 366683 - RNA, 28 nt, Human
caauauauguacauagauuaucauaaua

SEQ ID NO: 366684 - RNA, 23 nt, Human
cacaguaucuucucccauacaaa

SEQ ID NO: 366685 - RNA, 21 nt, Human
caccauacacugugacguacg

SEQ ID NO: 366686 - RNA, 20 nt, Human
cacuauauacacaaaguuaa

SEQ ID NO: 366687 - RNA, 19 nt, Human
cacucagaagaaccagcga

SEQ ID NO: 366688 - RNA, 18 nt, Human
cacuugauuuugaaccuu

SEQ ID NO: 366689 - RNA, 18 nt, Human
cagaguucaucugauuug

SEQ ID NO: 366690 - RNA, 20 nt, Human
cagcggcccgcgagucggcc

SEQ ID NO: 366691 - RNA, 23 nt, Human
cauacaaaaaaaaaaaaaaaguc

SEQ ID NO: 366692 - RNA, 21 nt, Human
cauauaauacaagaaugcgua

SEQ ID NO: 366693 - RNA, 20 nt, Human
caucaaaugcccauuuucca

SEQ ID NO: 366694 - RNA, 23 nt, Human
caugagaaacccaguggccuacg

SEQ ID NO: 366695 - RNA, 19 nt, Human
cauuacacuagaucacauu

SEQ ID NO: 366696 - RNA, 19 nt, Human
cauuacacuagaucacauu

SEQ ID NO: 366697 - RNA, 23 nt, Human
ccaaaaugacuacuaacacucag

SEQ ID NO: 366698 - RNA, 21 nt, Human
ccaucaaaugcccauuuucca

SEQ ID NO: 366699 - RNA, 22 nt, Human
ccccaaacaacauuuuuaguuc

SEQ ID NO: 366700 - RNA, 25 nt, Human
cccuaggcacuugauuuugaaccuu

SEQ ID NO: 366701 - RNA, 22 nt, Human
cgagacucgugguuuuguuguu

SEQ ID NO: 366702 - RNA, 24 nt, Human
cgauaaaugugcucuuaaagccaa

SEQ ID NO: 366703 - RNA, 21 nt, Human
cgcaaagagaacuuauaucau

SEQ ID NO: 366704 - RNA, 25 nt, Human
cgggugcagcuaguagcgcugggcu

SEQ ID NO: 366705 - RNA, 21 nt, Human
cuaggcacuugauuuugaacc

SEQ ID NO: 366706 - RNA, 22 nt, Human
cuaguagcgcugggcuccuuuu

SEQ ID NO: 366707 - RNA, 23 nt, Human
cucaacacuggcaucagauggac

SEQ ID NO: 366708 - RNA, 24 nt, Human
cucaacacuggcaucagauggacu

SEQ ID NO: 366709 - RNA, 22 nt, Human
cucaagguagacaagauagcuc

SEQ ID NO: 366710 - RNA, 24 nt, Human
cucuugguauucccuggcaggucu

SEQ ID NO: 366711 - RNA, 21 nt, Human
gaaaaaguguacucucuggac

SEQ ID NO: 366712 - RNA, 22 nt, Human
gaaaagacaaauugccgcccca

SEQ ID NO: 366713 - RNA, 18 nt, Human
gaaacgguguagcacucu

SEQ ID NO: 366714 - RNA, 19 nt, Human
gaauggagugccuaaagcc

SEQ ID NO: 366715 - RNA, 21 nt, Human
gacaaaacaugaacacaacua

SEQ ID NO: 366716 - RNA, 20 nt, Human
gacacagccaagcauguggc

SEQ ID NO: 366717 - RNA, 24 nt, Human
gacugcucauuaaugggaauucau

SEQ ID NO: 366718 - RNA, 23 nt, Human
gauaaaugugcucuuaaagccaa

SEQ ID NO: 366719 - RNA, 19 nt, Human
gcaaagagaacuuauauca

SEQ ID NO: 366720 - RNA, 18 nt, Human
ggaauuuucccuaggcac

SEQ ID NO: 366721 - RNA, 20 nt, Human
guagacaaaacaugaacaca

SEQ ID NO: 366722 - RNA, 19 nt, Human
gucaaaaaagggcuggccc

SEQ ID NO: 366723 - RNA, 25 nt, Human
gucuuuaauuacacauguaucuugu

SEQ ID NO: 366724 - RNA, 22 nt, Human
uaaaaaaacaaaacaaaacaaa

SEQ ID NO: 366725 - RNA, 21 nt, Human
uaacauuacaguuguaacuga

SEQ ID NO: 366726 - RNA, 20 nt, Human
uaaccuguggauuagaccuc

SEQ ID NO: 366727 - RNA, 19 nt, Human
uaaguugaagacacaaaca

SEQ ID NO: 366728 - RNA, 18 nt, Human
uacaacacuggagacaga

SEQ ID NO: 366729 - RNA, 24 nt, Human
uacgauaaaugugcucuuaaagcc

SEQ ID NO: 366730 - RNA, 22 nt, Human
uagcacuacaagacgucuucca

SEQ ID NO: 366731 - RNA, 25 nt, Human
uaggcacauucaaguaaaaucauaa

SEQ ID NO: 366732 - RNA, 23 nt, Human
uaguaguugaguuuacucaacac

SEQ ID NO: 366733 - RNA, 22 nt, Human
uauacaaccuauuuacaaauac

SEQ ID NO: 366734 - RNA, 23 nt, Human
uauauacacuugaacccaagacc

SEQ ID NO: 366735 - RNA, 22 nt, Human
uaugccuacaaaaaggcaaacc

SEQ ID NO: 366736 - RNA, 21 nt, Human
uauggacagacaauauaugua

SEQ ID NO: 366737 - RNA, 25 nt, Human
ucaagggcaaaccuuacagccagau

SEQ ID NO: 366738 - RNA, 22 nt, Human
ucagaagaaccagcgaggaauc

SEQ ID NO: 366739 - RNA, 23 nt, Human
uccaacaacaggcaggaaaaaua

SEQ ID NO: 366740 - RNA, 18 nt, Human
ucucacgcagacgucuuc

SEQ ID NO: 366741 - RNA, 25 nt, Human
ucucccauacaaaaaaaaaaaaaaa

SEQ ID NO: 366742 - RNA, 22 nt, Human
ugaagacacaaacauuucaguc

SEQ ID NO: 366743 - RNA, 19 nt, Human
ugacguuuaaauggaaaaa

SEQ ID NO: 366744 - RNA, 27 nt, Human
ugccacaguaucuucucccauacaaaa

SEQ ID NO: 366745 - RNA, 23 nt, Human
uggcggugggugcagcggcccgc

SEQ ID NO: 366746 - RNA, 18 nt, Human
uggggacagagaagaaaa

SEQ ID NO: 366747 - RNA, 24 nt, Human
uguagagaaaagaauuuuuuuucc

SEQ ID NO: 366748 - RNA, 22 nt, Human
uuaucuucauagaaacaggaca

SEQ ID NO: 366749 - RNA, 24 nt, Human
uuauuugcuuccuucaaccacuua

SEQ ID NO: 366750 - RNA, 21 nt, Human
uucaguggguuucucucaguc

SEQ ID NO: 366751 - RNA, 22 nt, Human
uucucacaucaaaugguuccau

SEQ ID NO: 366752 - RNA, 23 nt, Human
uucugcacucagaagaaccagcg

SEQ ID NO: 366753 - RNA, 23 nt, Human
uuucauaguaguugaguuuacuc

SEQ ID NO: 366754 - RNA, 22 nt, Human
uuucucacaucaaaugguucca

SEQ ID NO: 366755 - RNA, 19 nt, Human
uuugcuguaaauuaaaaag

SEQ ID NO: 366756 - RNA, 24 nt, Human
uuuuauaaagcuuacugcaugaga

SEQ ID NO: 366757 - RNA, 19 nt, Human
uuuuccauuccuuccuggu

SEQ ID NO: 366758 - RNA, 31 nt, Human
uuuugauuacugcauuuugaaaauguauucc

SEQ ID NO: 366759 - RNA, 23 nt, Human
aaggagggaaugaggggcuuggg

SEQ ID NO: 366760 - RNA, 19 nt, Human
acuggggucuuuggcuccc

SEQ ID NO: 366761 - RNA, 21 nt, Human
agcuccagagccuagcagggu

SEQ ID NO: 366762 - RNA, 21 nt, Human
agggcccaggagucugaaaag

SEQ ID NO: 366763 - RNA, 24 nt, Human
aggggggaaaacaagugggcuggg

SEQ ID NO: 366764 - RNA, 18 nt, Human
aguggcccaagggccuug

SEQ ID NO: 366765 - RNA, 22 nt, Human
auccugugaagggagaugggag

SEQ ID NO: 366766 - RNA, 20 nt, Human
caacagucagaugucuggcc

SEQ ID NO: 366767 - RNA, 23 nt, Human
cagcagggucgggggauggcugc

SEQ ID NO: 366768 - RNA, 19 nt, Human
cagcccuacccugcuccca

SEQ ID NO: 366769 - RNA, 19 nt, Human
caggggucucuuggggguc

SEQ ID NO: 366770 - RNA, 21 nt, Human
caggguaguggcccaagggcc

SEQ ID NO: 366771 - RNA, 19 nt, Human
ccacagagaggacaugggg

SEQ ID NO: 366772 - RNA, 19 nt, Human
cccaagggccuugguccug

SEQ ID NO: 366773 - RNA, 24 nt, Human
cccacccuaucccaguguggccac

SEQ ID NO: 366774 - RNA, 27 nt, Human
cccuacaccagccccacccucagcaga

SEQ ID NO: 366775 - RNA, 24 nt, Human
ccuacccugcucccaguucaggaa

SEQ ID NO: 366776 - RNA, 22 nt, Human
cuagggaauaaaaggggggaaa

SEQ ID NO: 366777 - RNA, 21 nt, Human
cugcaggcugaucccagcugu

SEQ ID NO: 366778 - RNA, 23 nt, Human
cugcaggcugaucccagcugugu

SEQ ID NO: 366779 - RNA, 20 nt, Human
cuuuggcucccgggggcagg

SEQ ID NO: 366780 - RNA, 22 nt, Human
gacaggggucucuugggggucc

SEQ ID NO: 366781 - RNA, 21 nt, Human
gagggaaugaggggcuugggc

SEQ ID NO: 366782 - RNA, 21 nt, Human
gaugggagaagaguauccaag

SEQ ID NO: 366783 - RNA, 19 nt, Human
gcaggcugaucccagcugu

SEQ ID NO: 366784 - RNA, 21 nt, Human
gccagccuccccacccuaucc

SEQ ID NO: 366785 - RNA, 18 nt, Human
gcugccagccuccccacc

SEQ ID NO: 366786 - RNA, 25 nt, Human
ggaauaaaaggggggaaaacaagug

SEQ ID NO: 366787 - RNA, 20 nt, Human
ggagcacuggucucacacca

SEQ ID NO: 366788 - RNA, 21 nt, Human
ggagggaaugaggggcuuggg

SEQ ID NO: 366789 - RNA, 23 nt, Human
ggccuguuucuucucccagcagu

SEQ ID NO: 366790 - RNA, 20 nt, Human
ggcuugggcgggaucuaagg

SEQ ID NO: 366791 - RNA, 18 nt, Human
gggaaaacaagugggcug

SEQ ID NO: 366792 - RNA, 22 nt, Human
gggaaugaggggcuugggcggg

SEQ ID NO: 366793 - RNA, 22 nt, Human
gggcagggcugcuagggugagu

SEQ ID NO: 366794 - RNA, 23 nt, Human
ggggaaaacaagugggcuggggg

SEQ ID NO: 366795 - RNA, 19 nt, Human
ggggagaugaggccccagg

SEQ ID NO: 366796 - RNA, 21 nt, Human
gggggagaugaggccccaggg

SEQ ID NO: 366797 - RNA, 23 nt, Human
uaaggcgacagcccuacccugcu

SEQ ID NO: 366798 - RNA, 22 nt, Human
uccacagagaggacauggggcc

SEQ ID NO: 366799 - RNA, 21 nt, Human
uccccaggacuggugaaggga

SEQ ID NO: 366800 - RNA, 23 nt, Human
ucccuacaccagccccacccuca

SEQ ID NO: 366801 - RNA, 22 nt, Human
ucgcucugcucccggccucgug

SEQ ID NO: 366802 - RNA, 21 nt, Human
ucgggccggugcgguucgcuc

SEQ ID NO: 366803 - RNA, 26 nt, Human
ugaacaaaaaccuuccacagagagga

SEQ ID NO: 366804 - RNA, 20 nt, Human
ugaagagucugggcagggcu

SEQ ID NO: 366805 - RNA, 20 nt, Human
ugaagggacaggacaggggu

SEQ ID NO: 366806 - RNA, 24 nt, Human
ugaagggagaugggagaagaguaa

SEQ ID NO: 366807 - RNA, 21 nt, Human
ugcaaggagggaaugaggggc

SEQ ID NO: 366808 - RNA, 19 nt, Human
uggcccaggcuuguggcag

SEQ ID NO: 366809 - RNA, 22 nt, Human
ugggagcaggggcugaagaguc

SEQ ID NO: 366810 - RNA, 20 nt, Human
ugggcugggggagaugaggc

SEQ ID NO: 366811 - RNA, 18 nt, Human
ugggggagaugaggcccc

SEQ ID NO: 366812 - RNA, 21 nt, Human
ugugcaaggagggaaugaggg

SEQ ID NO: 366813 - RNA, 22 nt, Human
uguuucuucucccagcagugga

SEQ ID NO: 366814 - RNA, 22 nt, Human
uuaaucgcgucuuucuccuccc

SEQ ID NO: 366815 - RNA, 20 nt, Human
uugguccuggcucuugaaca

SEQ ID NO: 366816 - RNA, 20 nt, Human
aaaaaaaaaagaaagaacug

SEQ ID NO: 366817 - RNA, 23 nt, Human
aaaaaaaaaagaaagaacugcgg

SEQ ID NO: 366818 - RNA, 22 nt, Human
aaaauaaagagcaagcaggccc

SEQ ID NO: 366819 - RNA, 21 nt, Human
aaaauagaggaguaagcagga

SEQ ID NO: 366820 - RNA, 22 nt, Human
aaaauauuucugccccacccca

SEQ ID NO: 366821 - RNA, 19 nt, Human
aacaaccuuccuccuaccc

SEQ ID NO: 366822 - RNA, 22 nt, Human
aagaagaguaggagggguccac

SEQ ID NO: 366823 - RNA, 25 nt, Human
aagugucuuccccaauccuaauguc

SEQ ID NO: 366824 - RNA, 25 nt, Human
acagagcgagacccugucuccaaaa

SEQ ID NO: 366825 - RNA, 19 nt, Human
acagcagcaguagauggcu

SEQ ID NO: 366826 - RNA, 19 nt, Human
acagcagcaguagauggcu

SEQ ID NO: 366827 - RNA, 18 nt, Human
acccguuccacagcagcu

SEQ ID NO: 366828 - RNA, 23 nt, Human
acccugucuccaaaaauaagaau

SEQ ID NO: 366829 - RNA, 24 nt, Human
accgcacuccagccugggcaacag

SEQ ID NO: 366830 - RNA, 24 nt, Human
accgcacuccagccugggcaacag

SEQ ID NO: 366831 - RNA, 21 nt, Human
agagaucgggagcgggagcgg

SEQ ID NO: 366832 - RNA, 22 nt, Human
agaugggaggagggagauaggu

SEQ ID NO: 366833 - RNA, 20 nt, Human
aggaaggggauuuguuuggc

SEQ ID NO: 366834 - RNA, 21 nt, Human
aggagggagauagguaugagg

SEQ ID NO: 366835 - RNA, 18 nt, Human
aggcgggagaaucaccug

SEQ ID NO: 366836 - RNA, 24 nt, Human
aggcgggagaaucaccugagcccg

SEQ ID NO: 366837 - RNA, 19 nt, Human
agggagagaccauuuggcg

SEQ ID NO: 366838 - RNA, 24 nt, Human
aguggcucgcgccugugguccuag

SEQ ID NO: 366839 - RNA, 26 nt, Human
auaccaaaauuggcagggagagacca

SEQ ID NO: 366840 - RNA, 24 nt, Human
aucgcaccaccgcacuccagccug

SEQ ID NO: 366841 - RNA, 28 nt, Human
aucgcaccaccgcacuccagccugggca

SEQ ID NO: 366842 - RNA, 19 nt, Human
auuucccuuccccuuuccu

SEQ ID NO: 366843 - RNA, 22 nt, Human
caacagagcgagacccugucuc

SEQ ID NO: 366844 - RNA, 19 nt, Human
caagugucuuccccaaucc

SEQ ID NO: 366845 - RNA, 22 nt, Human
cacagcccucccuccccaaaaa

SEQ ID NO: 366846 - RNA, 22 nt, Human
cacgaccgacugccaauggcag

SEQ ID NO: 366847 - RNA, 26 nt, Human
cacgaccgacugccaauggcagcacc

SEQ ID NO: 366848 - RNA, 18 nt, Human
cacuccaaguggcagggu

SEQ ID NO: 366849 - RNA, 18 nt, Human
cacuccaaguggcagggu

SEQ ID NO: 366850 - RNA, 23 nt, Human
cacuccagccugggcaacagagc

SEQ ID NO: 366851 - RNA, 24 nt, Human
cacuccagccugggcaacagagcg

SEQ ID NO: 366852 - RNA, 22 nt, Human
cagcaccgagugggcggggaca

SEQ ID NO: 366853 - RNA, 24 nt, Human
cagcagcuggguacccaccuccag

SEQ ID NO: 366854 - RNA, 23 nt, Human
cagcccucccuccccaaaaauaa

SEQ ID NO: 366855 - RNA, 26 nt, Human
caggucccaaaacaggucaguuaaua

SEQ ID NO: 366856 - RNA, 21 nt, Human
caucaaucuccccugccccuc

SEQ ID NO: 366857 - RNA, 23 nt, Human
cauguccauguccccauauuccu

SEQ ID NO: 366858 - RNA, 23 nt, Human
ccaaccucugauucuagcaguca

SEQ ID NO: 366859 - RNA, 20 nt, Human
ccaccgcacuccagccuggg

SEQ ID NO: 366860 - RNA, 21 nt, Human
ccaccgcacuccagccugggc

SEQ ID NO: 366861 - RNA, 24 nt, Human
ccaccgcacuccagccugggcaac

SEQ ID NO: 366862 - RNA, 23 nt, Human
ccagcccagaaaauauuucugcc

SEQ ID NO: 366863 - RNA, 25 nt, Human
ccagcccagaaaauauuucugcccc

SEQ ID NO: 366864 - RNA, 24 nt, Human
ccauguccauguccccauauuccu

SEQ ID NO: 366865 - RNA, 22 nt, Human
cccaauccuaauguccccugau

SEQ ID NO: 366866 - RNA, 18 nt, Human
cccagaaaauauuucugc

SEQ ID NO: 366867 - RNA, 23 nt, Human
cccagaaaauauuucugccccac

SEQ ID NO: 366868 - RNA, 18 nt, Human
ccccaaaaauaacgcugg

SEQ ID NO: 366869 - RNA, 19 nt, Human
ccccaaaggcucuaucuuu

SEQ ID NO: 366870 - RNA, 19 nt, Human
ccccuuuccuuccuauucc

SEQ ID NO: 366871 - RNA, 22 nt, Human
ccccuuuccuuccuauucccca

SEQ ID NO: 366872 - RNA, 18 nt, Human
cccuaugcacagcccucc

SEQ ID NO: 366873 - RNA, 19 nt, Human
cccugucuccaaaaauaag

SEQ ID NO: 366874 - RNA, 19 nt, Human
cccuucccccuugggcucc

SEQ ID NO: 366875 - RNA, 21 nt, Human
cccuucccccuugggcuccuc

SEQ ID NO: 366876 - RNA, 19 nt, Human
ccucuugucugcccacuuc

SEQ ID NO: 366877 - RNA, 25 nt, Human
ccuuccuauuccccacaacuggggg

SEQ ID NO: 366878 - RNA, 21 nt, Human
cgcaccaccgcacuccagccu

SEQ ID NO: 366879 - RNA, 22 nt, Human
cggagcaggcgaccuggcugcu

SEQ ID NO: 366880 - RNA, 24 nt, Human
cggccggacgcaguggcucgcgcc

SEQ ID NO: 366881 - RNA, 23 nt, Human
cgggaccaaaauaaagagcaagc

SEQ ID NO: 366882 - RNA, 18 nt, Human
cgggagcgggcggagcag

SEQ ID NO: 366883 - RNA, 24 nt, Human
cuaagaagaguaggagggguccac

SEQ ID NO: 366884 - RNA, 20 nt, Human
cucaguguuuaucaucuggg

SEQ ID NO: 366885 - RNA, 24 nt, Human
cuccaaaaauaagaauaaagaaaa

SEQ ID NO: 366886 - RNA, 21 nt, Human
cuccagccucccaugugagcc

SEQ ID NO: 366887 - RNA, 21 nt, Human
cuccagugacucucagaccca

SEQ ID NO: 366888 - RNA, 22 nt, Human
cuccagugacucucagacccac

SEQ ID NO: 366889 - RNA, 24 nt, Human
cuccagugacucucagacccacga

SEQ ID NO: 366890 - RNA, 22 nt, Human
cucccaugugagccuguccuua

SEQ ID NO: 366891 - RNA, 28 nt, Human
cuccccaaaaauaacgcuggggguaggg

SEQ ID NO: 366892 - RNA, 23 nt, Human
cucgcgccugugguccuagcugc

SEQ ID NO: 366893 - RNA, 18 nt, Human
cugcaacaaccuuccucc

SEQ ID NO: 366894 - RNA, 20 nt, Human
cugccccucucuugaagccc

SEQ ID NO: 366895 - RNA, 21 nt, Human
cugccccucucuugaagcccc

SEQ ID NO: 366896 - RNA, 21 nt, Human
cuggagaggccagagaagaua

SEQ ID NO: 366897 - RNA, 23 nt, Human
cuucccggcgauucauauucugg

SEQ ID NO: 366898 - RNA, 18 nt, Human
cuuccuccuaccccagcc

SEQ ID NO: 366899 - RNA, 19 nt, Human
gagcgggagcgggcggagc

SEQ ID NO: 366900 - RNA, 21 nt, Human
gauccgggaccaaaauaaaga

SEQ ID NO: 366901 - RNA, 22 nt, Human
gcacagcccucccuccccaaaa

SEQ ID NO: 366902 - RNA, 20 nt, Human
gcaccaccgcacuccagccu

SEQ ID NO: 366903 - RNA, 24 nt, Human
gcacuccagccugggcaacagagc

SEQ ID NO: 366904 - RNA, 24 nt, Human
ggacgcaguggcucgcgccugugg

SEQ ID NO: 366905 - RNA, 20 nt, Human
ggagcaggcgaccuggcugc

SEQ ID NO: 366906 - RNA, 22 nt, Human
ggagggaagggagaacaggggc

SEQ ID NO: 366907 - RNA, 19 nt, Human
gggggagggaagggagaac

SEQ ID NO: 366908 - RNA, 21 nt, Human
gucaagugucuuccccaaucc

SEQ ID NO: 366909 - RNA, 20 nt, Human
uaacaggucccaaaacaggu

SEQ ID NO: 366910 - RNA, 24 nt, Human
uaacgcuggggguaggcauugccc

SEQ ID NO: 366911 - RNA, 25 nt, Human
uaggagggguccacuccaaguggca

SEQ ID NO: 366912 - RNA, 25 nt, Human
uauuccccacaacugggggagggaa

SEQ ID NO: 366913 - RNA, 20 nt, Human
ucaccugagcccgggagguc

SEQ ID NO: 366914 - RNA, 23 nt, Human
ucacugaggugcuggguagggcu

SEQ ID NO: 366915 - RNA, 20 nt, Human
ucagacccacgaccgacugc

SEQ ID NO: 366916 - RNA, 23 nt, Human
ucagacccacgaccgacugccaa

SEQ ID NO: 366917 - RNA, 23 nt, Human
uccagccugggcaacagagcgag

SEQ ID NO: 366918 - RNA, 24 nt, Human
uccagccugggcaacagagcgaga

SEQ ID NO: 366919 - RNA, 24 nt, Human
uccauacccguuccacagcagcug

SEQ ID NO: 366920 - RNA, 20 nt, Human
uccccugccccucucuugaa

SEQ ID NO: 366921 - RNA, 20 nt, Human
uccccuuuccuuccuauucc

SEQ ID NO: 366922 - RNA, 24 nt, Human
uccgggaccaaaauaaagagcaag

SEQ ID NO: 366923 - RNA, 21 nt, Human
uccuugggacuggggccagcc

SEQ ID NO: 366924 - RNA, 31 nt, Human
ucgcaccaccgcacuccagccugggcaacaa

SEQ ID NO: 366925 - RNA, 24 nt, Human
ucuugucugcccacuucccucuca

SEQ ID NO: 366926 - RNA, 23 nt, Human
ugaaaugggcuaggaccaacagg

SEQ ID NO: 366927 - RNA, 20 nt, Human
ugacucuagguuuaugaccu

SEQ ID NO: 366928 - RNA, 20 nt, Human
ugagcccgggaggucggggg

SEQ ID NO: 366929 - RNA, 25 nt, Human
ugagcccgggaggucgggggcugca

SEQ ID NO: 366930 - RNA, 20 nt, Human
ugaggcgggagaaucaccug

SEQ ID NO: 366931 - RNA, 24 nt, Human
ugaggcgggagaaucaccugagcc

SEQ ID NO: 366932 - RNA, 21 nt, Human
uggcagcucaguguuuaucau

SEQ ID NO: 366933 - RNA, 23 nt, Human
uggcagggagagaccauuuggcg

SEQ ID NO: 366934 - RNA, 19 nt, Human
uggccugacucuccuccuc

SEQ ID NO: 366935 - RNA, 23 nt, Human
ugggaggagggagauagguauga

SEQ ID NO: 366936 - RNA, 24 nt, Human
ugggcaacagagcgagacccuguc

SEQ ID NO: 366937 - RNA, 21 nt, Human
ugggcaugggacaccaugucc

SEQ ID NO: 366938 - RNA, 19 nt, Human
uggggccagccucuugucu

SEQ ID NO: 366939 - RNA, 21 nt, Human
uggguacccaccuccagccuc

SEQ ID NO: 366940 - RNA, 22 nt, Human
uggguacccaccuccagccucc

SEQ ID NO: 366941 - RNA, 25 nt, Human
uuaaaaaaauguuuuggcagcucag

SEQ ID NO: 366942 - RNA, 20 nt, Human
uuagcucccagagaacuuuu

SEQ ID NO: 366943 - RNA, 23 nt, Human
uugcccuucccccuugggcuccu

SEQ ID NO: 366944 - RNA, 20 nt, Human
uuggcacuuuaaaaauagag

SEQ ID NO: 366945 - RNA, 24 nt, Human
uuuaaaaaaauguuuuggcagcuc

SEQ ID NO: 366946 - RNA, 20 nt, Human
uuuccuuccuauuccccaca

SEQ ID NO: 366947 - RNA, 22 nt, Human
uuuuuuuuuucuagaaacaucu

SEQ ID NO: 366948 - RNA, 19 nt, Human
acaguggucccccaucccc

SEQ ID NO: 366949 - RNA, 23 nt, Human
aggccccuguccugcuuccccaa

SEQ ID NO: 366950 - RNA, 19 nt, Human
agggggaguuggcccuggg

SEQ ID NO: 366951 - RNA, 27 nt, Human
caaccccuggcgcccuuccgucucccu

SEQ ID NO: 366952 - RNA, 21 nt, Human
caggccccuguccugcuuccc

SEQ ID NO: 366953 - RNA, 18 nt, Human
cccagugcuucugggcug

SEQ ID NO: 366954 - RNA, 23 nt, Human
cccuuccgucuccccaggccccu

SEQ ID NO: 366955 - RNA, 21 nt, Human
ccucaugagcaggaggguggg

SEQ ID NO: 366956 - RNA, 23 nt, Human
ccuccuccgccuccuggaguuuu

SEQ ID NO: 366957 - RNA, 20 nt, Human
ccuggcgcccuuccgucucc

SEQ ID NO: 366958 - RNA, 20 nt, Human
ccuggggagaagagggacug

SEQ ID NO: 366959 - RNA, 20 nt, Human
ccugucugcccucaugagca

SEQ ID NO: 366960 - RNA, 26 nt, Human
cggcagggggaguuggcccugggguc

SEQ ID NO: 366961 - RNA, 20 nt, Human
cucaaccccuggcgcccuuc

SEQ ID NO: 366962 - RNA, 19 nt, Human
cucaugagcaggagggugg

SEQ ID NO: 366963 - RNA, 19 nt, Human
cugagggcggcuuugcugg

SEQ ID NO: 366964 - RNA, 22 nt, Human
cuuugcugggguuguccagggc

SEQ ID NO: 366965 - RNA, 20 nt, Human
gcccagugcuucugggcugg

SEQ ID NO: 366966 - RNA, 20 nt, Human
ggguccuggggagaagaggg

SEQ ID NO: 366967 - RNA, 22 nt, Human
uacuggaguugggacuggggcc

SEQ ID NO: 366968 - RNA, 22 nt, Human
ucaaaggugggggacuagggca

SEQ ID NO: 366969 - RNA, 19 nt, Human
ucagcucccagcgugcuca

SEQ ID NO: 366970 - RNA, 19 nt, Human
uccaagggacaagaguguc

SEQ ID NO: 366971 - RNA, 18 nt, Human
uccccaggccccuguccu

SEQ ID NO: 366972 - RNA, 19 nt, Human
uccccaggccccuguccug

SEQ ID NO: 366973 - RNA, 25 nt, Human
ugcccucaugagcaggagggugggc

SEQ ID NO: 366974 - RNA, 19 nt, Human
ugcugggguuguccagggc

SEQ ID NO: 366975 - RNA, 24 nt, Human
uggcagagggccggcagggggagu

SEQ ID NO: 366976 - RNA, 20 nt, Human
uggccuguggggagggucag

SEQ ID NO: 366977 - RNA, 24 nt, Human
uggcugagggcggcuuugcugggg

SEQ ID NO: 366978 - RNA, 20 nt, Human
ugggaucuuaagucaaaggu

SEQ ID NO: 366979 - RNA, 20 nt, Human
ugggaucuuaagucaaaggu

SEQ ID NO: 366980 - RNA, 22 nt, Human
uggggagaagagggacuguguc

SEQ ID NO: 366981 - RNA, 21 nt, Human
uuacuggaguugggacugggg

SEQ ID NO: 366982 - RNA, 21 nt, Human
uuacuggaguugggacugggg

SEQ ID NO: 366983 - RNA, 24 nt, Human
uuacuggaguugggacuggggccc

SEQ ID NO: 366984 - RNA, 19 nt, Human
uucugggcuggcugagggc

SEQ ID NO: 366985 - RNA, 25 nt, Human
uuuuuuuuuuuuuuuuuuuccaagg

SEQ ID NO: 366986 - RNA, 26 nt, Human
uuuuuuuuuuuuuuuuuuuccaaggg

SEQ ID NO: 366987 - RNA, 23 nt, Human
uuuuuuuuuuuuuuuuuuuucca

SEQ ID NO: 366988 - RNA, 24 nt, Human
uuuuuuuuuuuuuuuuuuuuuccu

SEQ ID NO: 366989 - RNA, 22 nt, Human
cuuacaaucccacugaaaugcc

SEQ ID NO: 366990 - RNA, 21 nt, Human
uacaaucccacugaaaugcca

SEQ ID NO: 366991 - RNA, 19 nt, Human
uacaugaagcuauuacaaa

SEQ ID NO: 366992 - RNA, 23 nt, Human
uauuacaaaugcuuacaauccca

SEQ ID NO: 366993 - RNA, 19 nt, Human
uuuuuucaaaacauuugag

SEQ ID NO: 366994 - RNA, 20 nt, Human
aacacagucagaccccgucu

SEQ ID NO: 366995 - RNA, 21 nt, Human
aacacagucagaccccgucuc

SEQ ID NO: 366996 - RNA, 19 nt, Human
aacacagugagaccccaac

SEQ ID NO: 366997 - RNA, 20 nt, Human
aacacagugagaccccaacu

SEQ ID NO: 366998 - RNA, 21 nt, Human
aacacagugagaccccaacuc

SEQ ID NO: 366999 - RNA, 21 nt, Human
aacacagugagaccccaacuc

SEQ ID NO: 367000 - RNA, 23 nt, Human
aagaggaucaccugaggccaaga

SEQ ID NO: 367001 - RNA, 20 nt, Human
aaggggcagcucagaacagg

SEQ ID NO: 367002 - RNA, 20 nt, Human
acacagugagaccccaacuc

SEQ ID NO: 367003 - RNA, 19 nt, Human
accagucugggcaacacag

SEQ ID NO: 367004 - RNA, 20 nt, Human
acccuggacaccagccuccg

SEQ ID NO: 367005 - RNA, 22 nt, Human
agaguugaagaccagccugggu

SEQ ID NO: 367006 - RNA, 18 nt, Human
agccuggguaacacaguc

SEQ ID NO: 367007 - RNA, 24 nt, Human
agccuggguaacacagucagaccc

SEQ ID NO: 367008 - RNA, 24 nt, Human
aggaucaccugaggccaagaguuc

SEQ ID NO: 367009 - RNA, 27 nt, Human
aggaucacuugaggccaagaguugaag

SEQ ID NO: 367010 - RNA, 18 nt, Human
aggcaggaggaucacuug

SEQ ID NO: 367011 - RNA, 18 nt, Human
aggcggauccugcacaca

SEQ ID NO: 367012 - RNA, 22 nt, Human
agucugggcaacacagugagac

SEQ ID NO: 367013 - RNA, 24 nt, Human
agucugggcaacacagugagaccc

SEQ ID NO: 367014 - RNA, 19 nt, Human
caacucugagucguccccc

SEQ ID NO: 367015 - RNA, 18 nt, Human
cacacagguuuggggugu

SEQ ID NO: 367016 - RNA, 19 nt, Human
caccgcuccugccacaugc

SEQ ID NO: 367017 - RNA, 24 nt, Human
caccugaggccaagaguucgagac

SEQ ID NO: 367018 - RNA, 23 nt, Human
cacuugaggccaagaguugaaga

SEQ ID NO: 367019 - RNA, 20 nt, Human
ccaagccgcaaugcggucgg

SEQ ID NO: 367020 - RNA, 19 nt, Human
cccgcgcugagacccugga

SEQ ID NO: 367021 - RNA, 21 nt, Human
cccuggacaccagccuccgaa

SEQ ID NO: 367022 - RNA, 23 nt, Human
ccuggguaacacagucagacccc

SEQ ID NO: 367023 - RNA, 20 nt, Human
cgcgcugagacccuggacac

SEQ ID NO: 367024 - RNA, 24 nt, Human
cgcgcugagacccuggacaccagc

SEQ ID NO: 367025 - RNA, 24 nt, Human
cugagacccuggacaccagccucc

SEQ ID NO: 367026 - RNA, 23 nt, Human
cugggcaacacagugagacccca

SEQ ID NO: 367027 - RNA, 19 nt, Human
gaaggaaaggagaagggua

SEQ ID NO: 367028 - RNA, 22 nt, Human
gacacgacggcgaucgaggcuu

SEQ ID NO: 367029 - RNA, 24 nt, Human
gaucaccugaggccaagaguucga

SEQ ID NO: 367030 - RNA, 23 nt, Human
gaucacuugaggccaagaguuga

SEQ ID NO: 367031 - RNA, 26 nt, Human
gaucucaccgcuccugccacaugcac

SEQ ID NO: 367032 - RNA, 18 nt, Human
gcacugggugagaaaacc

SEQ ID NO: 367033 - RNA, 23 nt, Human
gcagcucagaacaggguuagagg

SEQ ID NO: 367034 - RNA, 18 nt, Human
gcggauccugcacacagg

SEQ ID NO: 367035 - RNA, 19 nt, Human
ggaaaggagaaggguagug

SEQ ID NO: 367036 - RNA, 23 nt, Human
ggaucaccugaggccaagaguuc

SEQ ID NO: 367037 - RNA, 19 nt, Human
ggaucacuugaggccaaga

SEQ ID NO: 367038 - RNA, 19 nt, Human
ggccaagaguugaagacca

SEQ ID NO: 367039 - RNA, 23 nt, Human
gggcaacacagugagaccccaac

SEQ ID NO: 367040 - RNA, 20 nt, Human
gggugugugggcaaggggca

SEQ ID NO: 367041 - RNA, 24 nt, Human
uaacacagucagaccccgucucua

SEQ ID NO: 367042 - RNA, 20 nt, Human
uaaggcaggaggaucacuug

SEQ ID NO: 367043 - RNA, 23 nt, Human
uaaggcaggaggaucacuugagg

SEQ ID NO: 367044 - RNA, 25 nt, Human
uaaggcaggaggaucacuugaggcc

SEQ ID NO: 367045 - RNA, 26 nt, Human
uaaggcaggaggaucacuugaggcca

SEQ ID NO: 367046 - RNA, 18 nt, Human
ucagcauucuuggaagcu

SEQ ID NO: 367047 - RNA, 19 nt, Human
ucccccgcgcugagacccu

SEQ ID NO: 367048 - RNA, 27 nt, Human
ucgacacgacggcgaucgaggcuucuu

SEQ ID NO: 367049 - RNA, 19 nt, Human
ugagaaaaccaagccgcaa

SEQ ID NO: 367050 - RNA, 20 nt, Human
ugagggaagaggaucaccug

SEQ ID NO: 367051 - RNA, 23 nt, Human
ugagggaagaggaucaccugagg

SEQ ID NO: 367052 - RNA, 24 nt, Human
ugggaagcugagggaagaggauca

SEQ ID NO: 367053 - RNA, 22 nt, Human
ugggcaacacagugagacccca

SEQ ID NO: 367054 - RNA, 18 nt, Human
ugugugggcaaggggcag

SEQ ID NO: 367055 - RNA, 24 nt, Human
uucaggaggcuguagcuccaugga

SEQ ID NO: 367056 - RNA, 24 nt, Human
uuggaagcuaaggcaggaggauca

SEQ ID NO: 367057 - RNA, 21 nt, Human
uuuuuuuuuuuuuuuuugcaa

SEQ ID NO: 367058 - RNA, 21 nt, Human
uuuuuuuuuuuuuuuuuuugg

SEQ ID NO: 367059 - RNA, 24 nt, Human
aagcaccccacccgcucacccacc

SEQ ID NO: 367060 - RNA, 22 nt, Human
acauguaucuuugguccucagu

SEQ ID NO: 367061 - RNA, 22 nt, Human
accccacccgcucacccaccuc

SEQ ID NO: 367062 - RNA, 22 nt, Human
acccgcucacccaccuccugcc

SEQ ID NO: 367063 - RNA, 21 nt, Human
acuucugcuuuuccuuggaag

SEQ ID NO: 367064 - RNA, 23 nt, Human
agaagaggaaauauaggccugga

SEQ ID NO: 367065 - RNA, 18 nt, Human
agcagaguggggaaggga

SEQ ID NO: 367066 - RNA, 18 nt, Human
aggagggacugugcaaca

SEQ ID NO: 367067 - RNA, 21 nt, Human
aggcuacccuuuguggaaggu

SEQ ID NO: 367068 - RNA, 21 nt, Human
agggacuuacccaaggucaca

SEQ ID NO: 367069 - RNA, 24 nt, Human
agugaaaguguggcaacaggaggg

SEQ ID NO: 367070 - RNA, 18 nt, Human
caacaggagggacugugc

SEQ ID NO: 367071 - RNA, 22 nt, Human
caagcaccccacccgcucaccc

SEQ ID NO: 367072 - RNA, 18 nt, Human
caagggacuuacccaagg

SEQ ID NO: 367073 - RNA, 28 nt, Human
caagggacuuacccaaggucacacagca

SEQ ID NO: 367074 - RNA, 21 nt, Human
cacacagcaagcaccccaccc

SEQ ID NO: 367075 - RNA, 20 nt, Human
cacccaccuccugccuuugc

SEQ ID NO: 367076 - RNA, 21 nt, Human
caccccacccgcucacccacc

SEQ ID NO: 367077 - RNA, 23 nt, Human
caccccacccgcucacccaccuc

SEQ ID NO: 367078 - RNA, 21 nt, Human
cacgccuuccuuccccaccca

SEQ ID NO: 367079 - RNA, 19 nt, Human
caugaacuucugcuuuucc

SEQ ID NO: 367080 - RNA, 21 nt, Human
ccaaggucacacagcaagcac

SEQ ID NO: 367081 - RNA, 21 nt, Human
ccacagcccuggggccucagc

SEQ ID NO: 367082 - RNA, 24 nt, Human
cccagccagaaaagccaggcuacc

SEQ ID NO: 367083 - RNA, 22 nt, Human
cccccagcauaacccgcaccgc

SEQ ID NO: 367084 - RNA, 18 nt, Human
cccgcaccgcgggucccu

SEQ ID NO: 367085 - RNA, 23 nt, Human
cccgcucacccaccuccugccuu

SEQ ID NO: 367086 - RNA, 19 nt, Human
cccuggggccucagcugcu

SEQ ID NO: 367087 - RNA, 19 nt, Human
ccgcaccgcgggucccugc

SEQ ID NO: 367088 - RNA, 23 nt, Human
ccugccuguaccuuccuucaccc

SEQ ID NO: 367089 - RNA, 23 nt, Human
ccugguucaaaucccagcugcac

SEQ ID NO: 367090 - RNA, 24 nt, Human
ccuguaccuuccuucacccaggac

SEQ ID NO: 367091 - RNA, 22 nt, Human
ccugugcugggaagagggaggg

SEQ ID NO: 367092 - RNA, 23 nt, Human
cgcucacccaccuccugccuuug

SEQ ID NO: 367093 - RNA, 18 nt, Human
cggaccuugaaaucagaa

SEQ ID NO: 367094 - RNA, 22 nt, Human
cgugguccugaguguccaguug

SEQ ID NO: 367095 - RNA, 22 nt, Human
cuaccccugccugugcugggaa

SEQ ID NO: 367096 - RNA, 19 nt, Human
cugggaagagggagggcuc

SEQ ID NO: 367097 - RNA, 21 nt, Human
cuggggccucagcugcugcuc

SEQ ID NO: 367098 - RNA, 21 nt, Human
cugguucaaaucccagcugcc

SEQ ID NO: 367099 - RNA, 19 nt, Human
gcccagagaagagggucuc

SEQ ID NO: 367100 - RNA, 19 nt, Human
ggacacgccuuccuucccc

SEQ ID NO: 367101 - RNA, 21 nt, Human
ggagucacaggggaagggaaa

SEQ ID NO: 367102 - RNA, 18 nt, Human
ggauguggaauggugggg

SEQ ID NO: 367103 - RNA, 18 nt, Human
gggaaaguggacgcauga

SEQ ID NO: 367104 - RNA, 21 nt, Human
gggaagagggagggcucagau

SEQ ID NO: 367105 - RNA, 22 nt, Human
gggagggucuagggccugggcc

SEQ ID NO: 367106 - RNA, 22 nt, Human
gggggagggucuagggccuggg

SEQ ID NO: 367107 - RNA, 19 nt, Human
gucaagggacuuacccaag

SEQ ID NO: 367108 - RNA, 18 nt, Human
gucacaggggaagggaaa

SEQ ID NO: 367109 - RNA, 23 nt, Human
uacauguaucuuugguccucagu

SEQ ID NO: 367110 - RNA, 26 nt, Human
uagaacagucccuguggaguuuacaa

SEQ ID NO: 367111 - RNA, 20 nt, Human
uaucuuugguccucaguaac

SEQ ID NO: 367112 - RNA, 19 nt, Human
ucaaaucccagcuauguga

SEQ ID NO: 367113 - RNA, 25 nt, Human
ucaagguaggggcugggagcagagu

SEQ ID NO: 367114 - RNA, 23 nt, Human
ucaauauacccauuuuacagaag

SEQ ID NO: 367115 - RNA, 22 nt, Human
ucaguucaaaucccagcuaugu

SEQ ID NO: 367116 - RNA, 20 nt, Human
uccagcacgggauccccagu

SEQ ID NO: 367117 - RNA, 21 nt, Human
ucuagggccugggcccgcccc

SEQ ID NO: 367118 - RNA, 21 nt, Human
ucucaagguaggggcugggag

SEQ ID NO: 367119 - RNA, 24 nt, Human
ugccuuugcuucuaccccugccug

SEQ ID NO: 367120 - RNA, 21 nt, Human
ugcugggaagagggagggcuc

SEQ ID NO: 367121 - RNA, 24 nt, Human
uggaagguggggauguggaauggu

SEQ ID NO: 367122 - RNA, 18 nt, Human
uggggaagggaggaguca

SEQ ID NO: 367123 - RNA, 23 nt, Human
uggggaagggaggagucacaggg

SEQ ID NO: 367124 - RNA, 24 nt, Human
uggggauguggaauggugggggag

SEQ ID NO: 367125 - RNA, 22 nt, Human
uggugggggagggucuagggcc

SEQ ID NO: 367126 - RNA, 18 nt, Human
ugguucaaaucccagcug

SEQ ID NO: 367127 - RNA, 21 nt, Human
ugugcugggaagagggagggc

SEQ ID NO: 367128 - RNA, 22 nt, Human
ugugcugggaagagggagggcu

SEQ ID NO: 367129 - RNA, 20 nt, Human
uuacagaagaggaaauauag

SEQ ID NO: 367130 - RNA, 19 nt, Human
aaacuaaaaagaaguuuga

SEQ ID NO: 367131 - RNA, 20 nt, Human
aaagaaguuugacuaccuuu

SEQ ID NO: 367132 - RNA, 24 nt, Human
aacaguuuuuuaugauccaaguau

SEQ ID NO: 367133 - RNA, 19 nt, Human
acucgcucugcuuagccgg

SEQ ID NO: 367134 - RNA, 21 nt, Human
aggcgucuucaggucucuaaa

SEQ ID NO: 367135 - RNA, 23 nt, Human
caacuaucccugagucagcuuuc

SEQ ID NO: 367136 - RNA, 19 nt, Human
cagugucuucagugucuua

SEQ ID NO: 367137 - RNA, 18 nt, Human
ccucuggaauaagcaccu

SEQ ID NO: 367138 - RNA, 23 nt, Human
cucauauauauguaaaaaauaaa

SEQ ID NO: 367139 - RNA, 18 nt, Human
cucgcucugcuuagccgg

SEQ ID NO: 367140 - RNA, 20 nt, Human
cugagucagcuuucuucucu

SEQ ID NO: 367141 - RNA, 22 nt, Human
cuuucuucucuuuucggcuuuc

SEQ ID NO: 367142 - RNA, 26 nt, Human
gacuaccuuucaaaaauucuccugaa

SEQ ID NO: 367143 - RNA, 21 nt, Human
gagucauagacaagucucccu

SEQ ID NO: 367144 - RNA, 21 nt, Human
uaaauaagaaaaaugaaacag

SEQ ID NO: 367145 - RNA, 19 nt, Human
uacacucagcccggcacuc

SEQ ID NO: 367146 - RNA, 24 nt, Human
uacaguagccaaaugcauaaauac

SEQ ID NO: 367147 - RNA, 23 nt, Human
uagguguauaugacuuaucucuu

SEQ ID NO: 367148 - RNA, 18 nt, Human
ucagaauccaguuuacaa

SEQ ID NO: 367149 - RNA, 18 nt, Human
ucccugagucagcuuucu

SEQ ID NO: 367150 - RNA, 23 nt, Human
ucccugagucagcuuucuucucu

SEQ ID NO: 367151 - RNA, 24 nt, Human
ucuucagugucuuacacucagccc

SEQ ID NO: 367152 - RNA, 23 nt, Human
ugcuccgaaauuuuaacaccgaa

SEQ ID NO: 367153 - RNA, 25 nt, Human
uggagcaaaacuuacaguagccaaa

SEQ ID NO: 367154 - RNA, 23 nt, Human
uguaacgccucuggaauaagcac

SEQ ID NO: 367155 - RNA, 22 nt, Human
aacauaugguucccuuuuuaca

SEQ ID NO: 367156 - RNA, 22 nt, Human
aagaacacagaacgaaaagcca

SEQ ID NO: 367157 - RNA, 23 nt, Human
aagccagucaccagaucuuacaa

SEQ ID NO: 367158 - RNA, 21 nt, Human
agacagccgcccagcccgcuc

SEQ ID NO: 367159 - RNA, 19 nt, Human
auaauaugagaaaaacaaa

SEQ ID NO: 367160 - RNA, 21 nt, Human
caagaacacagaacgaaaagc

SEQ ID NO: 367161 - RNA, 23 nt, Human
caagaacacagaacgaaaagcca

SEQ ID NO: 367162 - RNA, 21 nt, Human
caauuugauacauuaucccaa

SEQ ID NO: 367163 - RNA, 22 nt, Human
cacagaacgaaaagccagucac

SEQ ID NO: 367164 - RNA, 23 nt, Human
cagauaaauuuaggaagccaaga

SEQ ID NO: 367165 - RNA, 18 nt, Human
cagcagugaauagugugg

SEQ ID NO: 367166 - RNA, 21 nt, Human
caugguccacaagguuuucuu

SEQ ID NO: 367167 - RNA, 23 nt, Human
ccacaagguuuucuuuugggauu

SEQ ID NO: 367168 - RNA, 23 nt, Human
cccgcucugcgacgcagcaguga

SEQ ID NO: 367169 - RNA, 19 nt, Human
cgcccagcccgcucugcga

SEQ ID NO: 367170 - RNA, 18 nt, Human
gaaaagccagucaccaga

SEQ ID NO: 367171 - RNA, 18 nt, Human
gaaaagccagucaccaga

SEQ ID NO: 367172 - RNA, 22 nt, Human
gcagcagugaauagugugguac

SEQ ID NO: 367173 - RNA, 25 nt, Human
gggcagauaaauuuaggaagccaag

SEQ ID NO: 367174 - RNA, 23 nt, Human
guuacaacgggaucguaaugacu

SEQ ID NO: 367175 - RNA, 20 nt, Human
uagcuugauugagaagaagc

SEQ ID NO: 367176 - RNA, 20 nt, Human
uaggaagccaagaacacaga

SEQ ID NO: 367177 - RNA, 22 nt, Human
ucaucuaaacuucucuggccau

SEQ ID NO: 367178 - RNA, 23 nt, Human
ucucacuuuacaaauucucaaaa

SEQ ID NO: 367179 - RNA, 19 nt, Human
ugagaaaaacaaaacgguu

SEQ ID NO: 367180 - RNA, 20 nt, Human
ugagaaaaacaaaacgguua

SEQ ID NO: 367181 - RNA, 19 nt, Human
ugagaagaagcgcuuccgg

SEQ ID NO: 367182 - RNA, 21 nt, Human
ugagaagaagcgcuuccggcg

SEQ ID NO: 367183 - RNA, 21 nt, Human
ugggcagauaaauuuaggaag

SEQ ID NO: 367184 - RNA, 24 nt, Human
ugggcagauaaauuuaggaagcca

SEQ ID NO: 367185 - RNA, 25 nt, Human
uuaucgggaugcugugcagaacggg

SEQ ID NO: 367186 - RNA, 19 nt, Human
aaucuuagcccuuuucgcu

SEQ ID NO: 367187 - RNA, 21 nt, Human
aggagggaggggcaugggagg

SEQ ID NO: 367188 - RNA, 22 nt, Human
aggagggaggggcaugggaggg

SEQ ID NO: 367189 - RNA, 25 nt, Human
caucccaccagccuguccccucguc

SEQ ID NO: 367190 - RNA, 23 nt, Human
ccaucggucccucggcugucccu

SEQ ID NO: 367191 - RNA, 18 nt, Human
cccgugcccaccccgggg

SEQ ID NO: 367192 - RNA, 21 nt, Human
ccuuuucgcugucgcugcggc

SEQ ID NO: 367193 - RNA, 20 nt, Human
cgacugccccgugcccaccc

SEQ ID NO: 367194 - RNA, 22 nt, Human
cgaggcggaggcauaacccgcu

SEQ ID NO: 367195 - RNA, 18 nt, Human
gagggaggggcaugggag

SEQ ID NO: 367196 - RNA, 18 nt, Human
ggagggaggggcauggga

SEQ ID NO: 367197 - RNA, 24 nt, Human
ggaggggcaugggagggggaaccc

SEQ ID NO: 367198 - RNA, 24 nt, Human
ucacuuaaauaaaaaggagggagg

SEQ ID NO: 367199 - RNA, 19 nt, Human
ucagggcaacgaggcggag

SEQ ID NO: 367200 - RNA, 21 nt, Human
uccaucggucccucggcuguc

SEQ ID NO: 367201 - RNA, 24 nt, Human
ucccucggcugucccucgguggcg

SEQ ID NO: 367202 - RNA, 23 nt, Human
ucgcugucgcugcggcuuucaac

SEQ ID NO: 367203 - RNA, 23 nt, Human
ucguccaucggucccucggcugu

SEQ ID NO: 367204 - RNA, 20 nt, Human
uuaaauaaaaaggagggagg

SEQ ID NO: 367205 - RNA, 22 nt, Human
uuacugcaggggcaguggggga

SEQ ID NO: 367206 - RNA, 27 nt, Human
uucacuuaaauaaaaaggagggagggg

SEQ ID NO: 367207 - RNA, 19 nt, Human
uuuuuugggggccaaagca

SEQ ID NO: 367208 - RNA, 20 nt, Human
uuuuuuuuuuuuugggggcc

SEQ ID NO: 367209 - RNA, 20 nt, Human
uuuuuuuuuuuuuuuggggg

SEQ ID NO: 367210 - RNA, 22 nt, Human
uuuuuuuuuuuuuuuuuggggg

SEQ ID NO: 367211 - RNA, 24 nt, Human
aaacaaaaacaaaugacauuaaca

SEQ ID NO: 367212 - RNA, 23 nt, Human
aaacaaacagccaaacaaaaaca

SEQ ID NO: 367213 - RNA, 24 nt, Human
aaacaaacagccaaacaaaaacaa

SEQ ID NO: 367214 - RNA, 21 nt, Human
aaacaacaaaaucuaggaaga

SEQ ID NO: 367215 - RNA, 18 nt, Human
aaacagaauucuugcuuu

SEQ ID NO: 367216 - RNA, 19 nt, Human
aaacagccaaacaaaaaca

SEQ ID NO: 367217 - RNA, 18 nt, Human
aaaccaccaccaaauccg

SEQ ID NO: 367218 - RNA, 24 nt, Human
aaaccaccaccaaauccgguucau

SEQ ID NO: 367219 - RNA, 18 nt, Human
aaagaaaucaaagcccuu

SEQ ID NO: 367220 - RNA, 24 nt, Human
aaaguuaauaaagacuuaagagaa

SEQ ID NO: 367221 - RNA, 20 nt, Human
aacaaaaacaaaugacauua

SEQ ID NO: 367222 - RNA, 19 nt, Human
aacaaaaguaccuuuaacu

SEQ ID NO: 367223 - RNA, 22 nt, Human
aaccaaaaaacucggaagacaa

SEQ ID NO: 367224 - RNA, 19 nt, Human
aauacaaaugugaagccag

SEQ ID NO: 367225 - RNA, 18 nt, Human
aauauguaauguaucaua

SEQ ID NO: 367226 - RNA, 22 nt, Human
acaaaaccagaggcauuuuugc

SEQ ID NO: 367227 - RNA, 18 nt, Human
acaaacagguuacaaugu

SEQ ID NO: 367228 - RNA, 25 nt, Human
acagccaaacaaaaacaaaugacau

SEQ ID NO: 367229 - RNA, 18 nt, Human
acauuccagcacuugcua

SEQ ID NO: 367230 - RNA, 24 nt, Human
accucuacucagaggcugaaauga

SEQ ID NO: 367231 - RNA, 18 nt, Human
acuccacagauaaguuca

SEQ ID NO: 367232 - RNA, 20 nt, Human
acuccacagauaaguucauu

SEQ ID NO: 367233 - RNA, 24 nt, Human
agaaacaaaaccaccaccaaaucc

SEQ ID NO: 367234 - RNA, 20 nt, Human
agacacuugacuuagucauc

SEQ ID NO: 367235 - RNA, 20 nt, Human
agcacauacacaaacacaca

SEQ ID NO: 367236 - RNA, 20 nt, Human
aggcauuuuugcucuuuuga

SEQ ID NO: 367237 - RNA, 21 nt, Human
auaaagaaaaaaggaaagucu

SEQ ID NO: 367238 - RNA, 22 nt, Human
auagaaacaaaaccaccaccaa

SEQ ID NO: 367239 - RNA, 23 nt, Human
auagagcacaaugaaaugagcca

SEQ ID NO: 367240 - RNA, 21 nt, Human
aucaaagcccuucucuauucc

SEQ ID NO: 367241 - RNA, 23 nt, Human
augacauuuuuaaaaacuucccu

SEQ ID NO: 367242 - RNA, 22 nt, Human
augagcauaaaauacacgcaaa

SEQ ID NO: 367243 - RNA, 23 nt, Human
caaaaugagaaaaugucuaacaa

SEQ ID NO: 367244 - RNA, 24 nt, Human
caaauccccaaucuaaagccaaaa

SEQ ID NO: 367245 - RNA, 25 nt, Human
caaauccccaaucuaaagccaaaaa

SEQ ID NO: 367246 - RNA, 21 nt, Human
caaauguaagguacuauucug

SEQ ID NO: 367247 - RNA, 20 nt, Human
caaggaaaacagugcguccc

SEQ ID NO: 367248 - RNA, 26 nt, Human
caagugagguuuuaacacaauaacau

SEQ ID NO: 367249 - RNA, 22 nt, Human
cacuggaugacuuuagcccuga

SEQ ID NO: 367250 - RNA, 18 nt, Human
cagacaaagacaagccag

SEQ ID NO: 367251 - RNA, 24 nt, Human
caguaagcacagcuccaaagcuaa

SEQ ID NO: 367252 - RNA, 19 nt, Human
cauaucuaaaucucuggcc

SEQ ID NO: 367253 - RNA, 20 nt, Human
caugaaaccacagauacuuu

SEQ ID NO: 367254 - RNA, 21 nt, Human
caugagcauaaaauacacgca

SEQ ID NO: 367255 - RNA, 22 nt, Human
cauuguaggacugggacaaagu

SEQ ID NO: 367256 - RNA, 19 nt, Human
cauuuucauaaaagguguu

SEQ ID NO: 367257 - RNA, 25 nt, Human
ccagacaaagacaagccaguaagcc

SEQ ID NO: 367258 - RNA, 21 nt, Human
ccccagccccacuccucaacc

SEQ ID NO: 367259 - RNA, 18 nt, Human
ccccuggcacacaaaaca

SEQ ID NO: 367260 - RNA, 20 nt, Human
ccugcuaagccucccaaauc

SEQ ID NO: 367261 - RNA, 24 nt, Human
ccugcuaagccucccaaaucccca

SEQ ID NO: 367262 - RNA, 22 nt, Human
ccuuugguucugaacuguaucu

SEQ ID NO: 367263 - RNA, 25 nt, Human
cuaaagccaaaaagaaaucaaagcc

SEQ ID NO: 367264 - RNA, 22 nt, Human
cuccccagccccacuccucaac

SEQ ID NO: 367265 - RNA, 27 nt, Human
cucuccccagccccacuccucaaccuu

SEQ ID NO: 367266 - RNA, 22 nt, Human
cugaaagugcguauugauucug

SEQ ID NO: 367267 - RNA, 27 nt, Human
cugaucuugccuucuggcuuacccuag

SEQ ID NO: 367268 - RNA, 23 nt, Human
cugcuucuaguauaccccucaac

SEQ ID NO: 367269 - RNA, 21 nt, Human
cuggcuuacccuagagauugu

SEQ ID NO: 367270 - RNA, 19 nt, Human
gaauauguaccagccauga

SEQ ID NO: 367271 - RNA, 19 nt, Human
gagaagcagagagagcgcu

SEQ ID NO: 367272 - RNA, 22 nt, Human
gagcacauacacaaacacacaa

SEQ ID NO: 367273 - RNA, 21 nt, Human
gaggagagagguuuuuguuuu

SEQ ID NO: 367274 - RNA, 23 nt, Human
gaucacggguuaagcugaauuua

SEQ ID NO: 367275 - RNA, 21 nt, Human
gaugcaucauuucucucucca

SEQ ID NO: 367276 - RNA, 20 nt, Human
gugucugugucuugagugac

SEQ ID NO: 367277 - RNA, 26 nt, Human
uaaaaaauaaacaaacagccaaacaa

SEQ ID NO: 367278 - RNA, 18 nt, Human
uaaaaagaggcaacuauu

SEQ ID NO: 367279 - RNA, 18 nt, Human
uaaaacuguaaaauacua

SEQ ID NO: 367280 - RNA, 21 nt, Human
uaaaauagcagcacuuuuucc

SEQ ID NO: 367281 - RNA, 23 nt, Human
uaaacaaacagccaaacaaaaac

SEQ ID NO: 367282 - RNA, 18 nt, Human
uaacacaauaacauauaa

SEQ ID NO: 367283 - RNA, 18 nt, Human
uaacauaacaaugagugg

SEQ ID NO: 367284 - RNA, 20 nt, Human
uaacauauaauucaccacua

SEQ ID NO: 367285 - RNA, 27 nt, Human
uaacauugcacauauauacaccagcca

SEQ ID NO: 367286 - RNA, 23 nt, Human
uaacuacuucuguuccuuugaaa

SEQ ID NO: 367287 - RNA, 23 nt, Human
uaagaaagacaaacagguuacaa

SEQ ID NO: 367288 - RNA, 18 nt, Human
uaagaagaucacggguaa

SEQ ID NO: 367289 - RNA, 20 nt, Human
uaaguccucuccccagcccc

SEQ ID NO: 367290 - RNA, 24 nt, Human
uaaguccucuccccagccccacuc

SEQ ID NO: 367291 - RNA, 22 nt, Human
uacaaaauccuuaauacuucca

SEQ ID NO: 367292 - RNA, 24 nt, Human
uacacaaauauaucuaaauguccc

SEQ ID NO: 367293 - RNA, 19 nt, Human
uacacgcaaacugaauuac

SEQ ID NO: 367294 - RNA, 22 nt, Human
uacacuguacucugcagcucug

SEQ ID NO: 367295 - RNA, 25 nt, Human
uacuauguuauaggaauuuuaggau

SEQ ID NO: 367296 - RNA, 19 nt, Human
uagaaacaaaaccaccacc

SEQ ID NO: 367297 - RNA, 25 nt, Human
uagaaagcuagauaauauagacuca

SEQ ID NO: 367298 - RNA, 22 nt, Human
uauaaaaaaauuuacuguugua

SEQ ID NO: 367299 - RNA, 24 nt, Human
uauacaccagccauggcacagagc

SEQ ID NO: 367300 - RNA, 19 nt, Human
uaugaaaaggauugaagaa

SEQ ID NO: 367301 - RNA, 24 nt, Human
uauuuguguguguauguaugugua

SEQ ID NO: 367302 - RNA, 25 nt, Human
ucaaaggacacaucugaaaguuuaa

SEQ ID NO: 367303 - RNA, 20 nt, Human
ucacuggaugacuuuagccc

SEQ ID NO: 367304 - RNA, 20 nt, Human
ucacuggaugacuuuagccc

SEQ ID NO: 367305 - RNA, 23 nt, Human
ucacuggaugacuuuagcccuga

SEQ ID NO: 367306 - RNA, 26 nt, Human
ucccaaauccccaaucuaaagccaaa

SEQ ID NO: 367307 - RNA, 18 nt, Human
ucccugaacaaugucaac

SEQ ID NO: 367308 - RNA, 19 nt, Human
ucgguuauucucaugacau

SEQ ID NO: 367309 - RNA, 24 nt, Human
ucuaaaucucuggccaaaacacaa

SEQ ID NO: 367310 - RNA, 20 nt, Human
ucuccccagccccacuccuu

SEQ ID NO: 367311 - RNA, 23 nt, Human
ucuguaauacaacucaaauuauu

SEQ ID NO: 367312 - RNA, 18 nt, Human
ucugucuggaggucaagg

SEQ ID NO: 367313 - RNA, 22 nt, Human
ugaaaaaaauugcaugagagua

SEQ ID NO: 367314 - RNA, 23 nt, Human
ugaaaaggauugaagaaggcuuu

SEQ ID NO: 367315 - RNA, 19 nt, Human
ugaaauguuuucuguucuu

SEQ ID NO: 367316 - RNA, 21 nt, Human
ugacauaggaguuugucucuu

SEQ ID NO: 367317 - RNA, 23 nt, Human
ugacuuagucaucucuuuucuuc

SEQ ID NO: 367318 - RNA, 26 nt, Human
ugacuuagucaucucuuuucuuccaa

SEQ ID NO: 367319 - RNA, 21 nt, Human
ugagaaaaugucuaacaauac

SEQ ID NO: 367320 - RNA, 23 nt, Human
ugcauagaaacaaaaccaccacc

SEQ ID NO: 367321 - RNA, 20 nt, Human
ugcauaggacauugacgugg

SEQ ID NO: 367322 - RNA, 23 nt, Human
ugccuaccaucacucuuuugccu

SEQ ID NO: 367323 - RNA, 22 nt, Human
uggaaggcugaggagagagguu

SEQ ID NO: 367324 - RNA, 20 nt, Human
uggccaaaacacaacuugac

SEQ ID NO: 367325 - RNA, 21 nt, Human
uggccugugaccaaaaacuga

SEQ ID NO: 367326 - RNA, 20 nt, Human
ugggagaagaggcagggaca

SEQ ID NO: 367327 - RNA, 22 nt, Human
uguaaaaaucacauuauauaca

SEQ ID NO: 367328 - RNA, 23 nt, Human
uguaaaaguaacagcuaacucag

SEQ ID NO: 367329 - RNA, 22 nt, Human
ugucucuucucccucaaucucc

SEQ ID NO: 367330 - RNA, 20 nt, Human
ugucuugagugacagaauuu

SEQ ID NO: 367331 - RNA, 19 nt, Human
uguguauuuguguguguau

SEQ ID NO: 367332 - RNA, 21 nt, Human
uucaaugacuuugcccucugc

SEQ ID NO: 367333 - RNA, 22 nt, Human
uuccugcuaagccucccaaauc

SEQ ID NO: 367334 - RNA, 19 nt, Human
uucucccaaacacaaaacc

SEQ ID NO: 367335 - RNA, 19 nt, Human
uucuucaauguacuccaca

SEQ ID NO: 367336 - RNA, 22 nt, Human
uugguucuccaccacucuccag

SEQ ID NO: 367337 - RNA, 24 nt, Human
uuguaaucaaaauuacaaggagac

SEQ ID NO: 367338 - RNA, 19 nt, Human
uuuacagaaagccuggcag

SEQ ID NO: 367339 - RNA, 21 nt, Human
uuuauauugcauguuagagcu

SEQ ID NO: 367340 - RNA, 22 nt, Human
uuuauauugcauguuagagcua

SEQ ID NO: 367341 - RNA, 21 nt, Human
uuuguguguguauguaugugu

SEQ ID NO: 367342 - RNA, 22 nt, Human
uuuuacagaaagccuggcagcu

SEQ ID NO: 367343 - RNA, 19 nt, Human
aaacauccaucagcucaug

SEQ ID NO: 367344 - RNA, 24 nt, Human
aaaccaggauccaaaucccaggga

SEQ ID NO: 367345 - RNA, 24 nt, Human
aaaccaggauccaaaucccaggga

SEQ ID NO: 367346 - RNA, 25 nt, Human
aaaccaggauccaaaucccagggag

SEQ ID NO: 367347 - RNA, 19 nt, Human
aaggaagaaucagagugag

SEQ ID NO: 367348 - RNA, 21 nt, Human
agguuaucuuacacucccacc

SEQ ID NO: 367349 - RNA, 19 nt, Human
caaaucccagggaggccag

SEQ ID NO: 367350 - RNA, 24 nt, Human
caagcuuuggcaggugguacaaua

SEQ ID NO: 367351 - RNA, 26 nt, Human
caggauccaaaucccagggaggccag

SEQ ID NO: 367352 - RNA, 18 nt, Human
ccccuuuuuuucucuucc

SEQ ID NO: 367353 - RNA, 23 nt, Human
cuccuuuuuuuccuucucuggga

SEQ ID NO: 367354 - RNA, 18 nt, Human
cucuuccucuucuugucu

SEQ ID NO: 367355 - RNA, 23 nt, Human
cuggaaaccaggauccaaauccc

SEQ ID NO: 367356 - RNA, 19 nt, Human
cuuagcucuggaaaccagg

SEQ ID NO: 367357 - RNA, 19 nt, Human
cuuccagauuguuugugcc

SEQ ID NO: 367358 - RNA, 19 nt, Human
ggaggagggaacuggggcu

SEQ ID NO: 367359 - RNA, 20 nt, Human
ggauccaaaucccagggagg

SEQ ID NO: 367360 - RNA, 27 nt, Human
guccaggguugagaagggaacauacug

SEQ ID NO: 367361 - RNA, 19 nt, Human
ucccagggaggccagaacc

SEQ ID NO: 367362 - RNA, 21 nt, Human
ucuguuccacaguaugugcaa

SEQ ID NO: 367363 - RNA, 21 nt, Human
ucuuccucuucuugucuguug

SEQ ID NO: 367364 - RNA, 19 nt, Human
ugagaagggaacauacugu

SEQ ID NO: 367365 - RNA, 19 nt, Human
ugauggugucagcacucuu

SEQ ID NO: 367366 - RNA, 19 nt, Human
uggaaacauccaucagcuc

SEQ ID NO: 367367 - RNA, 18 nt, Human
uggcaggugguacaauau

SEQ ID NO: 367368 - RNA, 20 nt, Human
uggguggucuucaggguacu

SEQ ID NO: 367369 - RNA, 24 nt, Human
uuguuugugccaagcuuuggcagg

SEQ ID NO: 367370 - RNA, 19 nt, Human
uuuucuggcaaugcagugg

SEQ ID NO: 367371 - RNA, 25 nt, Human
aaaaaaaauuuaaacauaaaaguua

SEQ ID NO: 367372 - RNA, 18 nt, Human
aaaaugucauuaaucuga

SEQ ID NO: 367373 - RNA, 19 nt, Human
aaacaggauucacauguua

SEQ ID NO: 367374 - RNA, 22 nt, Human
aaauguucaauaugugcuaauu

SEQ ID NO: 367375 - RNA, 19 nt, Human
aacaaaacaaaacuggggu

SEQ ID NO: 367376 - RNA, 21 nt, Human
aaccuugaauaauaaagcaac

SEQ ID NO: 367377 - RNA, 23 nt, Human
aagcaacaaaagccacaacacaa

SEQ ID NO: 367378 - RNA, 20 nt, Human
aagcauuguaaaaacauuuu

SEQ ID NO: 367379 - RNA, 21 nt, Human
aagccacaacacaaaaacuaa

SEQ ID NO: 367380 - RNA, 30 nt, Human
aauaaagcaacaaaagccacaacacaaaag

SEQ ID NO: 367381 - RNA, 23 nt, Human
aaucacuuaaaacaagcaguuaa

SEQ ID NO: 367382 - RNA, 19 nt, Human
aaucugguuuacaaauaca

SEQ ID NO: 367383 - RNA, 23 nt, Human
acaagcaguuaauuacuuaaaca

SEQ ID NO: 367384 - RNA, 24 nt, Human
acaauggauaccuagauaugaagg

SEQ ID NO: 367385 - RNA, 22 nt, Human
acacaauuaaauaaaaucacag

SEQ ID NO: 367386 - RNA, 22 nt, Human
acuaagcuccauucuggaaauc

SEQ ID NO: 367387 - RNA, 18 nt, Human
acuacugcuuacauacac

SEQ ID NO: 367388 - RNA, 19 nt, Human
acuauguuuuccuauaauu

SEQ ID NO: 367389 - RNA, 19 nt, Human
agaaaagcaaaaacuaagg

SEQ ID NO: 367390 - RNA, 23 nt, Human
agacaaucucccccauggggaaa

SEQ ID NO: 367391 - RNA, 18 nt, Human
agagugggaaucauuggc

SEQ ID NO: 367392 - RNA, 24 nt, Human
agguaaaucaguacauagcaacua

SEQ ID NO: 367393 - RNA, 19 nt, Human
agguggcucuguggccagg

SEQ ID NO: 367394 - RNA, 24 nt, Human
aguuucagaaagcauuuuucuuuc

SEQ ID NO: 367395 - RNA, 18 nt, Human
auaaagcacuaacaaaag

SEQ ID NO: 367396 - RNA, 21 nt, Human
auaaauaaauaaacuagggug

SEQ ID NO: 367397 - RNA, 24 nt, Human
auacugauaaaaaugaugugaucu

SEQ ID NO: 367398 - RNA, 18 nt, Human
auauaucuauauguauaa

SEQ ID NO: 367399 - RNA, 20 nt, Human
aucaauggcuuacacaguug

SEQ ID NO: 367400 - RNA, 18 nt, Human
aucuauauguauaaugcc

SEQ ID NO: 367401 - RNA, 18 nt, Human
augccuuguuucugauga

SEQ ID NO: 367402 - RNA, 21 nt, Human
auuguuggaauaaaccaaaag

SEQ ID NO: 367403 - RNA, 19 nt, Human
caaggcagagaacagagug

SEQ ID NO: 367404 - RNA, 24 nt, Human
cacaaggaaaugaugugaggaaau

SEQ ID NO: 367405 - RNA, 23 nt, Human
cacaauuaaauaaaaucacagaa

SEQ ID NO: 367406 - RNA, 19 nt, Human
cauaaagagaaaaugaaag

SEQ ID NO: 367407 - RNA, 19 nt, Human
cauuauuaaaguuucuauu

SEQ ID NO: 367408 - RNA, 19 nt, Human
ccacaacacaaaaacuaau

SEQ ID NO: 367409 - RNA, 23 nt, Human
cgaauugccacugaugaacagag

SEQ ID NO: 367410 - RNA, 22 nt, Human
cguuauaucaauggcuuacaca

SEQ ID NO: 367411 - RNA, 22 nt, Human
cuacagaaaugaaacacaaaua

SEQ ID NO: 367412 - RNA, 27 nt, Human
cugaugauguaaugcaguaacucccuu

SEQ ID NO: 367413 - RNA, 23 nt, Human
cuuaaagucuuuaaacuuacuuu

SEQ ID NO: 367414 - RNA, 18 nt, Human
gaaaauuucaggaaacac

SEQ ID NO: 367415 - RNA, 23 nt, Human
gaaacaccuaaaaauuauaaaca

SEQ ID NO: 367416 - RNA, 20 nt, Human
gaaaccaguaacauuuagaa

SEQ ID NO: 367417 - RNA, 24 nt, Human
gauaauaaacauaaaugaaaguaa

SEQ ID NO: 367418 - RNA, 22 nt, Human
gcaacaaaagccacaacacaaa

SEQ ID NO: 367419 - RNA, 22 nt, Human
gccacaacacaaaaacuaauca

SEQ ID NO: 367420 - RNA, 18 nt, Human
ggaguuuuaaaaauagca

SEQ ID NO: 367421 - RNA, 19 nt, Human
gguuaaagggagcauugga

SEQ ID NO: 367422 - RNA, 21 nt, Human
guuaccccugauguccagaca

SEQ ID NO: 367423 - RNA, 22 nt, Human
uaaaaaaacaaaacaaaacugg

SEQ ID NO: 367424 - RNA, 18 nt, Human
uaaaacaggauucacaug

SEQ ID NO: 367425 - RNA, 19 nt, Human
uaaaagccauaaaaauugg

SEQ ID NO: 367426 - RNA, 18 nt, Human
uaaaaucacagaaacacu

SEQ ID NO: 367427 - RNA, 20 nt, Human
uaaaaucacagguaacaagc

SEQ ID NO: 367428 - RNA, 23 nt, Human
uaaaaucuaucaauugcuuuaag

SEQ ID NO: 367429 - RNA, 21 nt, Human
uaaacagcaugacauacaaua

SEQ ID NO: 367430 - RNA, 22 nt, Human
uaaagcaacaaaagccacaaca

SEQ ID NO: 367431 - RNA, 19 nt, Human
uaacagauauaagaucagu

SEQ ID NO: 367432 - RNA, 25 nt, Human
uaauaaacauaaaugaaaguaagca

SEQ ID NO: 367433 - RNA, 21 nt, Human
uagucaagaacuugaaccuga

SEQ ID NO: 367434 - RNA, 18 nt, Human
uauaaacaaaguaucacu

SEQ ID NO: 367435 - RNA, 24 nt, Human
uauaucaauggcuuacacaguuga

SEQ ID NO: 367436 - RNA, 24 nt, Human
uaugaaacaaauuugaaaggcagg

SEQ ID NO: 367437 - RNA, 19 nt, Human
uauguauauaucuauaugu

SEQ ID NO: 367438 - RNA, 23 nt, Human
ucaggaaacaccuaaaaauuaua

SEQ ID NO: 367439 - RNA, 21 nt, Human
ucauuauuaaaguuucuauug

SEQ ID NO: 367440 - RNA, 24 nt, Human
uccagacacuacuuuuaaaaaccc

SEQ ID NO: 367441 - RNA, 22 nt, Human
ucuccaaaaaaauaguuuucau

SEQ ID NO: 367442 - RNA, 21 nt, Human
ucuccacauccuucuauugca

SEQ ID NO: 367443 - RNA, 22 nt, Human
ucugguuuacaaauacaugcau

SEQ ID NO: 367444 - RNA, 23 nt, Human
ucugucacugucucucaaugaau

SEQ ID NO: 367445 - RNA, 22 nt, Human
ucuuugauuauuuuucaaaaac

SEQ ID NO: 367446 - RNA, 22 nt, Human
ugaaacacaaauagagaagccc

SEQ ID NO: 367447 - RNA, 18 nt, Human
ugaaacagcauucagaaa

SEQ ID NO: 367448 - RNA, 24 nt, Human
ugaaaggcaggaugauucacaaua

SEQ ID NO: 367449 - RNA, 18 nt, Human
ugaauaguuaagaaccau

SEQ ID NO: 367450 - RNA, 23 nt, Human
ugacaugauacgcacacauuaca

SEQ ID NO: 367451 - RNA, 20 nt, Human
ugcaaaguauuuugcaagug

SEQ ID NO: 367452 - RNA, 20 nt, Human
ugccacagcuuuuuaaaaca

SEQ ID NO: 367453 - RNA, 21 nt, Human
ugcucaaucaacuucaguaac

SEQ ID NO: 367454 - RNA, 22 nt, Human
uggaauuucauaaaauuuucau

SEQ ID NO: 367455 - RNA, 18 nt, Human
uggggaaagaaaaaaaaa

SEQ ID NO: 367456 - RNA, 18 nt, Human
ugugcuaauuaaauuuca

SEQ ID NO: 367457 - RNA, 21 nt, Human
uuaaaacaccagacuugcuaa

SEQ ID NO: 367458 - RNA, 18 nt, Human
uuaaacauuggaagacaa

SEQ ID NO: 367459 - RNA, 21 nt, Human
uuaaaguuucuauuguucuac

SEQ ID NO: 367460 - RNA, 19 nt, Human
uuaauuaucaaaucaccug

SEQ ID NO: 367461 - RNA, 20 nt, Human
uuacaaacuccagacacuac

SEQ ID NO: 367462 - RNA, 20 nt, Human
uucaaaaacaguggaagaaa

SEQ ID NO: 367463 - RNA, 20 nt, Human
uucacacaaacauacacaca

SEQ ID NO: 367464 - RNA, 21 nt, Human
uucacacaaacauacacacac

SEQ ID NO: 367465 - RNA, 21 nt, Human
uucuaaagaaaagcagcuaca

SEQ ID NO: 367466 - RNA, 19 nt, Human
uugaaccugauggaaacua

SEQ ID NO: 367467 - RNA, 18 nt, Human
uuuacaaauacaugcauu

SEQ ID NO: 367468 - RNA, 23 nt, Human
uuuacaucauuguuuucucaaaa

SEQ ID NO: 367469 - RNA, 21 nt, Human
uuuccaacuauguuuuccuau

SEQ ID NO: 367470 - RNA, 23 nt, Human
aaacuucuggccucaaguaaucc

SEQ ID NO: 367471 - RNA, 22 nt, Human
aaugaaaaaagacagaaagucc

SEQ ID NO: 367472 - RNA, 18 nt, Human
acacauucuuucuuugca

SEQ ID NO: 367473 - RNA, 23 nt, Human
acuauuuuaggcacuaacuguau

SEQ ID NO: 367474 - RNA, 19 nt, Human
agacagaagcaagaauccc

SEQ ID NO: 367475 - RNA, 23 nt, Human
agacagaagcaagaaucccuaau

SEQ ID NO: 367476 - RNA, 24 nt, Human
agacagaagcaagaaucccuaauc

SEQ ID NO: 367477 - RNA, 18 nt, Human
agcuccuaaauauaaccc

SEQ ID NO: 367478 - RNA, 20 nt, Human
agcugagaacaucuuugggg

SEQ ID NO: 367479 - RNA, 24 nt, Human
aggcacuaacuguauuuggaaaca

SEQ ID NO: 367480 - RNA, 21 nt, Human
aggguccauuguguagaugac

SEQ ID NO: 367481 - RNA, 19 nt, Human
agguaugagccuggugagu

SEQ ID NO: 367482 - RNA, 22 nt, Human
agugcugagggaaaugaaaaaa

SEQ ID NO: 367483 - RNA, 22 nt, Human
caaaggacacuauuuuaggcac

SEQ ID NO: 367484 - RNA, 21 nt, Human
caaccacagcaccauuugcaa

SEQ ID NO: 367485 - RNA, 20 nt, Human
cagcuccuaaauauaacccu

SEQ ID NO: 367486 - RNA, 24 nt, Human
cagggucucaucauauugcccagg

SEQ ID NO: 367487 - RNA, 24 nt, Human
cauauugcccaggcuagucucaaa

SEQ ID NO: 367488 - RNA, 24 nt, Human
caucauauugcccaggcuagucuc

SEQ ID NO: 367489 - RNA, 21 nt, Human
cauucuaggaaauaauggggg

SEQ ID NO: 367490 - RNA, 20 nt, Human
cauuguguagaugacaagau

SEQ ID NO: 367491 - RNA, 22 nt, Human
ccaaccacagcaccauuugcaa

SEQ ID NO: 367492 - RNA, 22 nt, Human
ccacagcaccauuugcaauuag

SEQ ID NO: 367493 - RNA, 26 nt, Human
ccagacaugcugacuuuucacaugac

SEQ ID NO: 367494 - RNA, 21 nt, Human
cuuuugaaagaaugugagcca

SEQ ID NO: 367495 - RNA, 21 nt, Human
gaaaaaagacagaaaguccua

SEQ ID NO: 367496 - RNA, 18 nt, Human
uaagugguugucaaaccc

SEQ ID NO: 367497 - RNA, 18 nt, Human
uaagugguugucaaaccc

SEQ ID NO: 367498 - RNA, 18 nt, Human
uacuguauguucacauug

SEQ ID NO: 367499 - RNA, 24 nt, Human
uagcugagaacaucuuugggggua

SEQ ID NO: 367500 - RNA, 25 nt, Human
ucacauuguagguaugagccuggug

SEQ ID NO: 367501 - RNA, 23 nt, Human
ucccaaaagcccuggaauuacag

SEQ ID NO: 367502 - RNA, 18 nt, Human
uccuccagcuucaacucc

SEQ ID NO: 367503 - RNA, 19 nt, Human
ugacaagaugccaagugcu

SEQ ID NO: 367504 - RNA, 21 nt, Human
ugacaagaugccaagugcuga

SEQ ID NO: 367505 - RNA, 24 nt, Human
ugccaagugcugagggaaaugaaa

SEQ ID NO: 367506 - RNA, 22 nt, Human
ugcccaggcuagucucaaacuu

SEQ ID NO: 367507 - RNA, 22 nt, Human
ugcuacacauucuuucuuugca

SEQ ID NO: 367508 - RNA, 21 nt, Human
uggaauuacagggauaaccca

SEQ ID NO: 367509 - RNA, 24 nt, Human
uggaauuacagggauaacccacua

SEQ ID NO: 367510 - RNA, 21 nt, Human
uggccuaaaaaaaagucuuuu

SEQ ID NO: 367511 - RNA, 18 nt, Human
uggccucaaguaauccuc

SEQ ID NO: 367512 - RNA, 25 nt, Human
uggccucaaguaauccuccagcuuc

SEQ ID NO: 367513 - RNA, 20 nt, Human
uucuuucuuugcacauauag

SEQ ID NO: 367514 - RNA, 24 nt, Human
uuguagagacagggucucaucaua

SEQ ID NO: 367515 - RNA, 18 nt, Human
uuuguagagacagggucu

SEQ ID NO: 367516 - RNA, 21 nt, Human
uuuguagagacagggucucau

SEQ ID NO: 367517 - RNA, 23 nt, Human
aaaccacacugacacccggaauc

SEQ ID NO: 367518 - RNA, 20 nt, Human
cacauuuauccaccugggca

SEQ ID NO: 367519 - RNA, 20 nt, Human
cacugacacccggaaucuac

SEQ ID NO: 367520 - RNA, 21 nt, Human
cauggcuucugauucuuaguc

SEQ ID NO: 367521 - RNA, 21 nt, Human
ccagggagaccaaaguuucua

SEQ ID NO: 367522 - RNA, 18 nt, Human
cggacaggaaaaguggca

SEQ ID NO: 367523 - RNA, 25 nt, Human
cgucagacaucaaucacauggcuuc

SEQ ID NO: 367524 - RNA, 20 nt, Human
gaccaaaguuucuaaaacaa

SEQ ID NO: 367525 - RNA, 20 nt, Human
ggcaggaaccagggagacca

SEQ ID NO: 367526 - RNA, 19 nt, Human
uaaaccacacugacacccg

SEQ ID NO: 367527 - RNA, 20 nt, Human
uaaaccacacugacacccgg

SEQ ID NO: 367528 - RNA, 24 nt, Human
uaaugguuuucuuccagcuagccu

SEQ ID NO: 367529 - RNA, 20 nt, Human
uauaaaccacacugacaccc

SEQ ID NO: 367530 - RNA, 20 nt, Human
ugaguaagaguccagccaug

SEQ ID NO: 367531 - RNA, 25 nt, Human
ugaguaagaguccagccaugguaaa

SEQ ID NO: 367532 - RNA, 24 nt, Human
ugaguggacucccuucugcggcuc

SEQ ID NO: 367533 - RNA, 23 nt, Human
uggcaggaaccagggagaccaaa

SEQ ID NO: 367534 - RNA, 24 nt, Human
uggcaggaaccagggagaccaaag

SEQ ID NO: 367535 - RNA, 18 nt, Human
uggggaggaggacggaca

SEQ ID NO: 367536 - RNA, 18 nt, Human
ugguaaaucuacagcaaa

SEQ ID NO: 367537 - RNA, 20 nt, Human
ugguaaaucuacagcaaaag

SEQ ID NO: 367538 - RNA, 22 nt, Human
ugguaaaucuacagcaaaaggu

SEQ ID NO: 367539 - RNA, 20 nt, Human
uguacacauuuauccaccuu

SEQ ID NO: 367540 - RNA, 26 nt, Human
uuaacagcaaacuaaugguuuucuuc

SEQ ID NO: 367541 - RNA, 19 nt, Human
uucaacaccacaggacgag

SEQ ID NO: 367542 - RNA, 19 nt, Human
aggcagcuuuauuuuuccu

SEQ ID NO: 367543 - RNA, 18 nt, Human
aggcuccucacccccacu

SEQ ID NO: 367544 - RNA, 21 nt, Human
cacuuccugugaggcuguggc

SEQ ID NO: 367545 - RNA, 25 nt, Human
cagcuuuauuuuuccuuagggcaac

SEQ ID NO: 367546 - RNA, 22 nt, Human
ccugugaggcuguggcuuaugg

SEQ ID NO: 367547 - RNA, 19 nt, Human
cugccccuuccccuuuucu

SEQ ID NO: 367548 - RNA, 19 nt, Human
ggccgggagaaggggagcc

SEQ ID NO: 367549 - RNA, 19 nt, Human
gugggccaggcccucaugg

SEQ ID NO: 367550 - RNA, 24 nt, Human
ucucaccccacugccccuuccccu

SEQ ID NO: 367551 - RNA, 21 nt, Human
ugacugccaaucagaugcagu

SEQ ID NO: 367552 - RNA, 22 nt, Human
ugaggcuguggcuuaugguguc

SEQ ID NO: 367553 - RNA, 21 nt, Human
ugcagcgggugggccaggccc

SEQ ID NO: 367554 - RNA, 21 nt, Human
ugccccuuccccuuuucuggg

SEQ ID NO: 367555 - RNA, 23 nt, Human
aaaugaccucccggaggcagggc

SEQ ID NO: 367556 - RNA, 20 nt, Human
aggacggggagggcgggugg

SEQ ID NO: 367557 - RNA, 24 nt, Human
aggcaggacggggagggcgggugg

SEQ ID NO: 367558 - RNA, 23 nt, Human
caauccagccaaucagagcccaa

SEQ ID NO: 367559 - RNA, 18 nt, Human
caccuccccucucacucu

SEQ ID NO: 367560 - RNA, 21 nt, Human
cagagcccaaggccaugggcc

SEQ ID NO: 367561 - RNA, 20 nt, Human
cagccggcugucugucccuc

SEQ ID NO: 367562 - RNA, 24 nt, Human
ccccgcugucugucucugcguccg

SEQ ID NO: 367563 - RNA, 19 nt, Human
cgggggaagcuggcagggg

SEQ ID NO: 367564 - RNA, 20 nt, Human
cucccggaggcagggccucc

SEQ ID NO: 367565 - RNA, 21 nt, Human
cucccuguccccgcugucugu

SEQ ID NO: 367566 - RNA, 22 nt, Human
cuggggacgguugaagcaaggg

SEQ ID NO: 367567 - RNA, 19 nt, Human
cugucucugcguccgcccc

SEQ ID NO: 367568 - RNA, 19 nt, Human
gaagcggcgagaggggccg

SEQ ID NO: 367569 - RNA, 21 nt, Human
gaggggccggggcucccuggg

SEQ ID NO: 367570 - RNA, 23 nt, Human
gaggggccggggcucccuggguu

SEQ ID NO: 367571 - RNA, 23 nt, Human
gcguccgccccugcugucugucu

SEQ ID NO: 367572 - RNA, 22 nt, Human
gcucaagcgggggaagcuggca

SEQ ID NO: 367573 - RNA, 23 nt, Human
gcucaagcgggggaagcuggcag

SEQ ID NO: 367574 - RNA, 24 nt, Human
ggacggggagggcgggugggagga

SEQ ID NO: 367575 - RNA, 23 nt, Human
ggggagggcgggugggaggaugc

SEQ ID NO: 367576 - RNA, 25 nt, Human
guccugccaccuccccucucacucu

SEQ ID NO: 367577 - RNA, 18 nt, Human
ucccagggugucaguccc

SEQ ID NO: 367578 - RNA, 23 nt, Human
ucccagggugucagucccgccgu

SEQ ID NO: 367579 - RNA, 29 nt, Human
ucccuggguuaggaaucuaugggcugucg

SEQ ID NO: 367580 - RNA, 25 nt, Human
ucuggggugggaagcggcgagaggg

SEQ ID NO: 367581 - RNA, 20 nt, Human
ucugucucugcguccgcccc

SEQ ID NO: 367582 - RNA, 21 nt, Human
ucugucuguccugccaccucc

SEQ ID NO: 367583 - RNA, 21 nt, Human
ugaccucccggaggcagggcc

SEQ ID NO: 367584 - RNA, 20 nt, Human
ugcagccggcugucuguccc

SEQ ID NO: 367585 - RNA, 18 nt, Human
uggcaggggccgaggagg

SEQ ID NO: 367586 - RNA, 20 nt, Human
uggcaggggccgaggaggca

SEQ ID NO: 367587 - RNA, 19 nt, Human
uguccgugucggccucccu

SEQ ID NO: 367588 - RNA, 18 nt, Human
uguccugccaccuccccu

SEQ ID NO: 367589 - RNA, 22 nt, Human
uguccugccaccuccccucuca

SEQ ID NO: 367590 - RNA, 25 nt, Human
ugucugucccucucccugggcgcug

SEQ ID NO: 367591 - RNA, 18 nt, Human
ugugcucagcgcugacag

SEQ ID NO: 367592 - RNA, 25 nt, Human
uugucuggguuuggcccauccugag

SEQ ID NO: 367593 - RNA, 22 nt, Human
accagcccgccaggugccagaa

SEQ ID NO: 367594 - RNA, 21 nt, Human
aggugccagaagccaccgggu

SEQ ID NO: 367595 - RNA, 23 nt, Human
cagaaggccuccuucugccaccc

SEQ ID NO: 367596 - RNA, 21 nt, Human
ccagcccgccaggugccagaa

SEQ ID NO: 367597 - RNA, 21 nt, Human
ccaggggucuaacuguccucc

SEQ ID NO: 367598 - RNA, 26 nt, Human
ccaggucggggggugagagugucggg

SEQ ID NO: 367599 - RNA, 23 nt, Human
cccacggcagggcccacccaggg

SEQ ID NO: 367600 - RNA, 23 nt, Human
cccaggggucuaacuguccuccc

SEQ ID NO: 367601 - RNA, 27 nt, Human
ccuccuucugccacccugggugagauc

SEQ ID NO: 367602 - RNA, 23 nt, Human
ccuggauuaaaaaggucaccagc

SEQ ID NO: 367603 - RNA, 21 nt, Human
cguggugauggugucuggacu

SEQ ID NO: 367604 - RNA, 22 nt, Human
cuaacuguccucccaccucccc

SEQ ID NO: 367605 - RNA, 20 nt, Human
cugcguggugauggugucuu

SEQ ID NO: 367606 - RNA, 21 nt, Human
gguaacaggcacagaaagaga

SEQ ID NO: 367607 - RNA, 18 nt, Human
uaacaggcacagaaagag

SEQ ID NO: 367608 - RNA, 21 nt, Human
uaacaggcacagaaagagagu

SEQ ID NO: 367609 - RNA, 22 nt, Human
ugcggcucaagggcacccuagg

SEQ ID NO: 367610 - RNA, 20 nt, Human
ugcguggugauggugucugg

SEQ ID NO: 367611 - RNA, 19 nt, Human
uggguaacaggcacagaaa

SEQ ID NO: 367612 - RNA, 21 nt, Human
aaacacugcaagaacagugcg

SEQ ID NO: 367613 - RNA, 18 nt, Human
aaacgauggugccuucca

SEQ ID NO: 367614 - RNA, 19 nt, Human
aaacuccagacugacggca

SEQ ID NO: 367615 - RNA, 25 nt, Human
aagaacagugcggaacuagggccgg

SEQ ID NO: 367616 - RNA, 18 nt, Human
aagccccuuccauuccaa

SEQ ID NO: 367617 - RNA, 22 nt, Human
aaucaucucccaagccccuucc

SEQ ID NO: 367618 - RNA, 19 nt, Human
agaggaacggacagugcag

SEQ ID NO: 367619 - RNA, 21 nt, Human
agcaagacaaugagucgugga

SEQ ID NO: 367620 - RNA, 22 nt, Human
agccgccucgcucuggccacac

SEQ ID NO: 367621 - RNA, 22 nt, Human
aggcagaggcuguccgcugagg

SEQ ID NO: 367622 - RNA, 20 nt, Human
aggccuuggcagaugaagug

SEQ ID NO: 367623 - RNA, 20 nt, Human
agggcaggagcuggagaugc

SEQ ID NO: 367624 - RNA, 30 nt, Human
auggaggguggcccugaccuagguucccgg

SEQ ID NO: 367625 - RNA, 20 nt, Human
caaaaagaccccccuuuaua

SEQ ID NO: 367626 - RNA, 20 nt, Human
caaaaccuggcucucucugu

SEQ ID NO: 367627 - RNA, 21 nt, Human
caaaugcaguacgcucuaaca

SEQ ID NO: 367628 - RNA, 24 nt, Human
caagaaggggguccccaugugaac

SEQ ID NO: 367629 - RNA, 21 nt, Human
caagacaaugagucguggagc

SEQ ID NO: 367630 - RNA, 19 nt, Human
caagaggcauccccacagu

SEQ ID NO: 367631 - RNA, 25 nt, Human
caagccccuuccauuccaaugcucc

SEQ ID NO: 367632 - RNA, 19 nt, Human
caauaucggccuugggcag

SEQ ID NO: 367633 - RNA, 24 nt, Human
cacaagagaggagucuggccucca

SEQ ID NO: 367634 - RNA, 22 nt, Human
cacacccccucucugaacucua

SEQ ID NO: 367635 - RNA, 22 nt, Human
cacaguggaauccucauaacuc

SEQ ID NO: 367636 - RNA, 19 nt, Human
caccaaaaccuggcucucu

SEQ ID NO: 367637 - RNA, 24 nt, Human
cacccaagaccacucaggagugga

SEQ ID NO: 367638 - RNA, 25 nt, Human
cacccccucucugaaccaccacugg

SEQ ID NO: 367639 - RNA, 21 nt, Human
cacucaggaguggaaccguga

SEQ ID NO: 367640 - RNA, 27 nt, Human
cagcaagacaaugagucguggagcugg

SEQ ID NO: 367641 - RNA, 22 nt, Human
cagcucagaguaaacaggggag

SEQ ID NO: 367642 - RNA, 18 nt, Human
caggagacagaggcagag

SEQ ID NO: 367643 - RNA, 23 nt, Human
caggaguugaugaaacacugcaa

SEQ ID NO: 367644 - RNA, 18 nt, Human
caguggugguguuaucag

SEQ ID NO: 367645 - RNA, 23 nt, Human
caguguguucaguugucacuucc

SEQ ID NO: 367646 - RNA, 18 nt, Human
ccaaaaagaccccccuuu

SEQ ID NO: 367647 - RNA, 19 nt, Human
ccaguggugguguuaucag

SEQ ID NO: 367648 - RNA, 20 nt, Human
cccaagaaggggguccccau

SEQ ID NO: 367649 - RNA, 19 nt, Human
ccccaagaagggggucccc

SEQ ID NO: 367650 - RNA, 25 nt, Human
cccuuccauuccaaugcuccaggag

SEQ ID NO: 367651 - RNA, 21 nt, Human
ccggcccaucugcccaggucc

SEQ ID NO: 367652 - RNA, 21 nt, Human
ccuaacggaaccuccgaucca

SEQ ID NO: 367653 - RNA, 25 nt, Human
ccuccgauccaacacaguguguuca

SEQ ID NO: 367654 - RNA, 21 nt, Human
ccuggagcacauucggaggau

SEQ ID NO: 367655 - RNA, 21 nt, Human
ccuuccauuccaaugcuccag

SEQ ID NO: 367656 - RNA, 24 nt, Human
cggcccaucugcccagguccuuga

SEQ ID NO: 367657 - RNA, 19 nt, Human
cuaacaagaggcaucccca

SEQ ID NO: 367658 - RNA, 18 nt, Human
cucagccuagccucuggc

SEQ ID NO: 367659 - RNA, 22 nt, Human
cucagccuagccucuggccucc

SEQ ID NO: 367660 - RNA, 22 nt, Human
cugacggcaugcaaaggcuugc

SEQ ID NO: 367661 - RNA, 18 nt, Human
cuggagcacauucggagg

SEQ ID NO: 367662 - RNA, 20 nt, Human
cuuaggagccgccucgcucu

SEQ ID NO: 367663 - RNA, 20 nt, Human
gaaccuccgauccaacacag

SEQ ID NO: 367664 - RNA, 21 nt, Human
gacaaugagucguggagcugg

SEQ ID NO: 367665 - RNA, 20 nt, Human
gauugugaggugggaaagaa

SEQ ID NO: 367666 - RNA, 18 nt, Human
gcccugaccuagguuccc

SEQ ID NO: 367667 - RNA, 19 nt, Human
gccuggagcacauucggag

SEQ ID NO: 367668 - RNA, 18 nt, Human
ggaaggauccccuaacgg

SEQ ID NO: 367669 - RNA, 20 nt, Human
ggagacagaggcagaggcug

SEQ ID NO: 367670 - RNA, 23 nt, Human
ggagaugccaugagagacucgga

SEQ ID NO: 367671 - RNA, 20 nt, Human
ggcaggagacagaggcagag

SEQ ID NO: 367672 - RNA, 18 nt, Human
ggccuccaaaaagacccc

SEQ ID NO: 367673 - RNA, 18 nt, Human
gggaaggagcugcuccag

SEQ ID NO: 367674 - RNA, 21 nt, Human
ggucaggcaaaucacaccccc

SEQ ID NO: 367675 - RNA, 23 nt, Human
gucaggcaaaucacacccccucu

SEQ ID NO: 367676 - RNA, 18 nt, Human
gucccuuugucucuuugg

SEQ ID NO: 367677 - RNA, 18 nt, Human
gugaacuugaaaaagucc

SEQ ID NO: 367678 - RNA, 19 nt, Human
guucaguugucacuuccaa

SEQ ID NO: 367679 - RNA, 22 nt, Human
uacacacuuguuaacuaaggca

SEQ ID NO: 367680 - RNA, 24 nt, Human
uacacacuuguuaacuaaggcagg

SEQ ID NO: 367681 - RNA, 19 nt, Human
uagccucuggccuccaggu

SEQ ID NO: 367682 - RNA, 21 nt, Human
uagggcaggagcuggagaugc

SEQ ID NO: 367683 - RNA, 23 nt, Human
uaguuuucugaguuugcagauga

SEQ ID NO: 367684 - RNA, 24 nt, Human
uauagcuccucuccccguguacaa

SEQ ID NO: 367685 - RNA, 24 nt, Human
uccagacugacggcaugcaaaggc

SEQ ID NO: 367686 - RNA, 22 nt, Human
ucccaagccccuuccauuccaa

SEQ ID NO: 367687 - RNA, 18 nt, Human
uccccuaacggaaccucc

SEQ ID NO: 367688 - RNA, 27 nt, Human
ucgccuggagcacauucggaggauugu

SEQ ID NO: 367689 - RNA, 18 nt, Human
ucuccagguuccucaucc

SEQ ID NO: 367690 - RNA, 19 nt, Human
ucucuggcccccaagaagg

SEQ ID NO: 367691 - RNA, 20 nt, Human
ucucuuuggucuccagguuc

SEQ ID NO: 367692 - RNA, 18 nt, Human
ucugaacucuaaguuucc

SEQ ID NO: 367693 - RNA, 26 nt, Human
ucugcugagugaccucagccuagccu

SEQ ID NO: 367694 - RNA, 24 nt, Human
ucuuuggucuccagguuccucauc

SEQ ID NO: 367695 - RNA, 22 nt, Human
ugaagugauucacccaagacca

SEQ ID NO: 367696 - RNA, 22 nt, Human
ugagaauggaggguggcccuga

SEQ ID NO: 367697 - RNA, 21 nt, Human
uggagaugccaugagagacuc

SEQ ID NO: 367698 - RNA, 27 nt, Human
uggcaccaaaaccuggcucucucugua

SEQ ID NO: 367699 - RNA, 26 nt, Human
uggcccccaagaagggggucccuccu

SEQ ID NO: 367700 - RNA, 24 nt, Human
uggcccccaagaagggggucccuu

SEQ ID NO: 367701 - RNA, 22 nt, Human
ugggaagccccgcugggugggc

SEQ ID NO: 367702 - RNA, 20 nt, Human
ugggcagaggaacggacagu

SEQ ID NO: 367703 - RNA, 20 nt, Human
ugggcaggaugacgagggcc

SEQ ID NO: 367704 - RNA, 21 nt, Human
ugggugggcaggaugacgagg

SEQ ID NO: 367705 - RNA, 21 nt, Human
ugguguuaucagcaaagggga

SEQ ID NO: 367706 - RNA, 18 nt, Human
ugucccaucaggcucucc

SEQ ID NO: 367707 - RNA, 21 nt, Human
ugucccuuuuuaucuguacag

SEQ ID NO: 367708 - RNA, 21 nt, Human
uguucaguugucacuuccaac

SEQ ID NO: 367709 - RNA, 18 nt, Human
aagaagagaggaucagaa

SEQ ID NO: 367710 - RNA, 25 nt, Human
aaggacaacuuccaggggaggaauc

SEQ ID NO: 367711 - RNA, 19 nt, Human
acauuggcauggggguucc

SEQ ID NO: 367712 - RNA, 20 nt, Human
agaaggugaacaaaaacuac

SEQ ID NO: 367713 - RNA, 23 nt, Human
caaaaacuacagucacgaaauca

SEQ ID NO: 367714 - RNA, 27 nt, Human
ccaggccagaugcacagaaggugguac

SEQ ID NO: 367715 - RNA, 19 nt, Human
ccuggacauuggcaugggg

SEQ ID NO: 367716 - RNA, 21 nt, Human
cuccucugagcuaacagcccc

SEQ ID NO: 367717 - RNA, 23 nt, Human
gcagcggaugccugugaccugga

SEQ ID NO: 367718 - RNA, 20 nt, Human
ggacaacuuccaggggagga

SEQ ID NO: 367719 - RNA, 21 nt, Human
uccaggggaggaaucccaaga

SEQ ID NO: 367720 - RNA, 22 nt, Human
uccucugagcuaacagccccca

SEQ ID NO: 367721 - RNA, 23 nt, Human
ugaacaaaaacuacagucacgaa

SEQ ID NO: 367722 - RNA, 24 nt, Human
ugaacaaaaacuacagucacgaaa

SEQ ID NO: 367723 - RNA, 20 nt, Human
ugcuccucuccucugagcua

SEQ ID NO: 367724 - RNA, 21 nt, Human
uuccaggggaggaaucccaag

SEQ ID NO: 367725 - RNA, 19 nt, Human
uuggcauggggguuccucc

SEQ ID NO: 367726 - RNA, 23 nt, Human
uuuguaaaugggaaaagaagaga

SEQ ID NO: 367727 - RNA, 22 nt, Human
aagcagcuuuuggccaacaucc

SEQ ID NO: 367728 - RNA, 25 nt, Human
aagcagcuuuuggccaacauccuuc

SEQ ID NO: 367729 - RNA, 21 nt, Human
accaggacccccauccuccaa

SEQ ID NO: 367730 - RNA, 24 nt, Human
acugcagcggccagaaggcgaugg

SEQ ID NO: 367731 - RNA, 26 nt, Human
agagauuggucaacagacacggacaa

SEQ ID NO: 367732 - RNA, 20 nt, Human
agcaggugcgucuacaagga

SEQ ID NO: 367733 - RNA, 24 nt, Human
aggacccccauccuccaaugccgu

SEQ ID NO: 367734 - RNA, 21 nt, Human
auggaaagcagcuuuuggcca

SEQ ID NO: 367735 - RNA, 24 nt, Human
auggaaagcagcuuuuggccaaca

SEQ ID NO: 367736 - RNA, 22 nt, Human
caaaguaaauggucuaggaagc

SEQ ID NO: 367737 - RNA, 18 nt, Human
caccgagcauuacacucc

SEQ ID NO: 367738 - RNA, 18 nt, Human
cacggcgaggugcgcucc

SEQ ID NO: 367739 - RNA, 22 nt, Human
cacuuuccugucaguggcagag

SEQ ID NO: 367740 - RNA, 18 nt, Human
cagagccgggagcaggga

SEQ ID NO: 367741 - RNA, 20 nt, Human
caggaugacuuccugggguc

SEQ ID NO: 367742 - RNA, 21 nt, Human
caggcagaguguuggucugca

SEQ ID NO: 367743 - RNA, 22 nt, Human
cauaccaggacccccauccucc

SEQ ID NO: 367744 - RNA, 23 nt, Human
cauaccaggacccccauccucca

SEQ ID NO: 367745 - RNA, 18 nt, Human
caugacuggcccugcacg

SEQ ID NO: 367746 - RNA, 21 nt, Human
cauuacacuccagucccugga

SEQ ID NO: 367747 - RNA, 21 nt, Human
cauuacacuccagucccugga

SEQ ID NO: 367748 - RNA, 19 nt, Human
ccaggcagaguguuggucu

SEQ ID NO: 367749 - RNA, 19 nt, Human
ccccagaaggcaaugggga

SEQ ID NO: 367750 - RNA, 19 nt, Human
ccccagaaggcaaugggga

SEQ ID NO: 367751 - RNA, 19 nt, Human
cccuacaccacaaggaccc

SEQ ID NO: 367752 - RNA, 25 nt, Human
ccuccaaugccucugaacagacugu

SEQ ID NO: 367753 - RNA, 21 nt, Human
ccucucaggccguucccuacc

SEQ ID NO: 367754 - RNA, 18 nt, Human
ccugcccucgggcagcac

SEQ ID NO: 367755 - RNA, 22 nt, Human
ccuggggucuucgucucugcuc

SEQ ID NO: 367756 - RNA, 24 nt, Human
cgcccgggccugggcuuugcacgc

SEQ ID NO: 367757 - RNA, 22 nt, Human
cggcacggaaagguguaaacag

SEQ ID NO: 367758 - RNA, 18 nt, Human
cggcucaaggccaggcag

SEQ ID NO: 367759 - RNA, 21 nt, Human
cucgcugcacagaucuacguc

SEQ ID NO: 367760 - RNA, 19 nt, Human
cugagaacacagugccccu

SEQ ID NO: 367761 - RNA, 19 nt, Human
cuggagcccacguccacuu

SEQ ID NO: 367762 - RNA, 25 nt, Human
cuggagcccacguccacuugcaggg

SEQ ID NO: 367763 - RNA, 18 nt, Human
cuuguaaacaaaaacugc

SEQ ID NO: 367764 - RNA, 19 nt, Human
gaagagaggagucuucugc

SEQ ID NO: 367765 - RNA, 20 nt, Human
gaauuccuuuuuuuuuuucc

SEQ ID NO: 367766 - RNA, 22 nt, Human
gaauuugugguuuccuccauuu

SEQ ID NO: 367767 - RNA, 22 nt, Human
gacacgcuccucucaggccguu

SEQ ID NO: 367768 - RNA, 21 nt, Human
gacguuuuucugcccugcagg

SEQ ID NO: 367769 - RNA, 19 nt, Human
gacugugugugcaaugugu

SEQ ID NO: 367770 - RNA, 23 nt, Human
gagccgggagcagggagcaggga

SEQ ID NO: 367771 - RNA, 20 nt, Human
gcauccacuuuccugucagu

SEQ ID NO: 367772 - RNA, 19 nt, Human
gcguucugggguaguacac

SEQ ID NO: 367773 - RNA, 21 nt, Human
gcucaaggccaggcagagugu

SEQ ID NO: 367774 - RNA, 19 nt, Human
ggagcagggagcagggagg

SEQ ID NO: 367775 - RNA, 20 nt, Human
ggagcagggagggagggagc

SEQ ID NO: 367776 - RNA, 19 nt, Human
ggggauucucagcaggugc

SEQ ID NO: 367777 - RNA, 21 nt, Human
gguguaaacagucagaagaga

SEQ ID NO: 367778 - RNA, 18 nt, Human
uacacuccagucccugga

SEQ ID NO: 367779 - RNA, 18 nt, Human
uagacguuuuucugcccu

SEQ ID NO: 367780 - RNA, 21 nt, Human
uaguacacgcuccuguggggg

SEQ ID NO: 367781 - RNA, 21 nt, Human
uaguacacgcuccuguggggg

SEQ ID NO: 367782 - RNA, 21 nt, Human
uaguacacgcuccuguggggg

SEQ ID NO: 367783 - RNA, 21 nt, Human
uaguacacgcuccuguggggg

SEQ ID NO: 367784 - RNA, 21 nt, Human
uaguacacgcuccuguggggg

SEQ ID NO: 367785 - RNA, 21 nt, Human
uauugugcuuagggacccaca

SEQ ID NO: 367786 - RNA, 21 nt, Human
ucagagccgggagcagggagc

SEQ ID NO: 367787 - RNA, 21 nt, Human
uccaaugccucugaacagacu

SEQ ID NO: 367788 - RNA, 20 nt, Human
uccacuuuccugucaguggc

SEQ ID NO: 367789 - RNA, 22 nt, Human
uccauuguggaugucuuuuauu

SEQ ID NO: 367790 - RNA, 18 nt, Human
ucccggcacggaaaggug

SEQ ID NO: 367791 - RNA, 20 nt, Human
uccgcgaagccuccccuccc

SEQ ID NO: 367792 - RNA, 19 nt, Human
uccucugugucccucccca

SEQ ID NO: 367793 - RNA, 19 nt, Human
uccucugugucccucccca

SEQ ID NO: 367794 - RNA, 19 nt, Human
uccuucacucaguauugcu

SEQ ID NO: 367795 - RNA, 22 nt, Human
ugagagaaauaaaauuccagug

SEQ ID NO: 367796 - RNA, 25 nt, Human
ugcaagaacauaaacagaauuuccu

SEQ ID NO: 367797 - RNA, 19 nt, Human
ugcaauaucagcaagcagg

SEQ ID NO: 367798 - RNA, 19 nt, Human
ugccugaguggcaguagcc

SEQ ID NO: 367799 - RNA, 21 nt, Human
ugcguucugggguaguacacg

SEQ ID NO: 367800 - RNA, 20 nt, Human
uggcaguagccugagcuggu

SEQ ID NO: 367801 - RNA, 20 nt, Human
uggcaguagccugagcuggu

SEQ ID NO: 367802 - RNA, 23 nt, Human
uggcaguagccugagcugguuuc

SEQ ID NO: 367803 - RNA, 25 nt, Human
uggcgccgagagcguuccgcgaagc

SEQ ID NO: 367804 - RNA, 18 nt, Human
uggucuggccgcccgggc

SEQ ID NO: 367805 - RNA, 25 nt, Human
uggucuggccgcccgggccugggcu

SEQ ID NO: 367806 - RNA, 22 nt, Human
ugguuuguucgugucucuccca

SEQ ID NO: 367807 - RNA, 23 nt, Human
ugugccauggaaagcagcuuuug

SEQ ID NO: 367808 - RNA, 22 nt, Human
uucacaggcugacggcucccac

SEQ ID NO: 367809 - RNA, 22 nt, Human
uuccauuguggaugucuuuuau

SEQ ID NO: 367810 - RNA, 22 nt, Human
uucgcaaacauaaaaacuguug

SEQ ID NO: 367811 - RNA, 19 nt, Human
uugaagaguagaaguugcc

SEQ ID NO: 367812 - RNA, 24 nt, Human
uugcuacacggagccccuccccag

SEQ ID NO: 367813 - RNA, 24 nt, Human
uuggucaacagacacggacaacac

SEQ ID NO: 367814 - RNA, 20 nt, Human
uuugugguuuccuccauuuc

SEQ ID NO: 367815 - RNA, 22 nt, Human
aacagauaucagauaccaauga

SEQ ID NO: 367816 - RNA, 19 nt, Human
aggagguuguggagaagcc

SEQ ID NO: 367817 - RNA, 22 nt, Human
aggagguuguggagaagccuuu

SEQ ID NO: 367818 - RNA, 20 nt, Human
aggcuuagcuggaaacucau

SEQ ID NO: 367819 - RNA, 22 nt, Human
cauaccaagaaaugauacagga

SEQ ID NO: 367820 - RNA, 23 nt, Human
cauccacauccucacacguccaa

SEQ ID NO: 367821 - RNA, 22 nt, Human
ccacauccucacacguccaaaa

SEQ ID NO: 367822 - RNA, 18 nt, Human
ccugaugccacagcagca

SEQ ID NO: 367823 - RNA, 26 nt, Human
cugaugauagggugguuuucaucacc

SEQ ID NO: 367824 - RNA, 22 nt, Human
gaaaccuuuagaagcaaacaga

SEQ ID NO: 367825 - RNA, 22 nt, Human
gaggaggagguuguggagaagc

SEQ ID NO: 367826 - RNA, 19 nt, Human
ggauuagaagguucuagua

SEQ ID NO: 367827 - RNA, 20 nt, Human
uaaguggcuggaggccuuga

SEQ ID NO: 367828 - RNA, 23 nt, Human
uaccaugggaauauguccagggg

SEQ ID NO: 367829 - RNA, 24 nt, Human
uaguagauuccagcaauaaaauuc

SEQ ID NO: 367830 - RNA, 18 nt, Human
ucacagucuaccauggga

SEQ ID NO: 367831 - RNA, 25 nt, Human
ucacuuggaggggagaaggcaggcg

SEQ ID NO: 367832 - RNA, 21 nt, Human
ucagauaccaaugaucauacc

SEQ ID NO: 367833 - RNA, 26 nt, Human
ucaucaccuccauccacauccucaca

SEQ ID NO: 367834 - RNA, 20 nt, Human
uggaggccuugagucugggc

SEQ ID NO: 367835 - RNA, 22 nt, Human
uguggagaagccuuuuuccucu

SEQ ID NO: 367836 - RNA, 20 nt, Human
uuagcuggaaacucauucaa

SEQ ID NO: 367837 - RNA, 18 nt, Human
aaggugcccuugguuuga

SEQ ID NO: 367838 - RNA, 19 nt, Human
aaggugcccuugguuugac

SEQ ID NO: 367839 - RNA, 19 nt, Human
agugcaaagcaaggugccc

SEQ ID NO: 367840 - RNA, 20 nt, Human
agugcaaagcaaggugcccu

SEQ ID NO: 367841 - RNA, 22 nt, Human
aucauuacccccuuggauucaa

SEQ ID NO: 367842 - RNA, 21 nt, Human
ccggggcagagaggaaaaaca

SEQ ID NO: 367843 - RNA, 21 nt, Human
cuccagcgggagggggcugcg

SEQ ID NO: 367844 - RNA, 21 nt, Human
gucuggaccaucccacaccac

SEQ ID NO: 367845 - RNA, 19 nt, Human
guguuugaccugcccgggc

SEQ ID NO: 367846 - RNA, 20 nt, Human
uccagcgggagggggcugcg

SEQ ID NO: 367847 - RNA, 19 nt, Human
ucugacacaggcaacagac

SEQ ID NO: 367848 - RNA, 20 nt, Human
ugggaaaggccggguuugcg

SEQ ID NO: 367849 - RNA, 22 nt, Human
ugucgcuccagcgggagggggc

SEQ ID NO: 367850 - RNA, 26 nt, Human
aaaaaaaaaauacaaagaaaaauuua

SEQ ID NO: 367851 - RNA, 27 nt, Human
aaaaaaaaaauacaaagaaaaauuuac

SEQ ID NO: 367852 - RNA, 21 nt, Human
aaaaacaggaacaagauagaa

SEQ ID NO: 367853 - RNA, 19 nt, Human
aaaacucuccuaggccuuc

SEQ ID NO: 367854 - RNA, 26 nt, Human
aaacagcaggaaagccgccggccccg

SEQ ID NO: 367855 - RNA, 18 nt, Human
aaacaggaacaagauaga

SEQ ID NO: 367856 - RNA, 24 nt, Human
aaacaguaaaaucaaaucagacac

SEQ ID NO: 367857 - RNA, 18 nt, Human
aaauaucccccaaaucaa

SEQ ID NO: 367858 - RNA, 23 nt, Human
aacacacacacacgauacacaca

SEQ ID NO: 367859 - RNA, 25 nt, Human
aacacacacacacgauacacacaca

SEQ ID NO: 367860 - RNA, 22 nt, Human
aaccuucuagaaaacucuccua

SEQ ID NO: 367861 - RNA, 23 nt, Human
aagacaaaggaaaacaggucaca

SEQ ID NO: 367862 - RNA, 21 nt, Human
aagcaccccuccccgacaccg

SEQ ID NO: 367863 - RNA, 23 nt, Human
aagcaccccuccccgacaccggg

SEQ ID NO: 367864 - RNA, 20 nt, Human
aagccaguucuggggggccg

SEQ ID NO: 367865 - RNA, 19 nt, Human
acaaaauaucccccaaauc

SEQ ID NO: 367866 - RNA, 21 nt, Human
acaaagaaaaauuuaccaaau

SEQ ID NO: 367867 - RNA, 25 nt, Human
acaaagaaaaauuuaccaaauuccc

SEQ ID NO: 367868 - RNA, 21 nt, Human
acacacacacacacacacaca

SEQ ID NO: 367869 - RNA, 28 nt, Human
acacacacacgcacgcacacauacccac

SEQ ID NO: 367870 - RNA, 19 nt, Human
acagcaggaaagccgccgg

SEQ ID NO: 367871 - RNA, 21 nt, Human
accagaaccugcuaugacccc

SEQ ID NO: 367872 - RNA, 23 nt, Human
acgauacacacacacacacacac

SEQ ID NO: 367873 - RNA, 23 nt, Human
acgcacacauacccacaauuaca

SEQ ID NO: 367874 - RNA, 20 nt, Human
acuaaaguuauauaagacaa

SEQ ID NO: 367875 - RNA, 20 nt, Human
acucaccuccccaccacucc

SEQ ID NO: 367876 - RNA, 23 nt, Human
acucaccuccccaccacuccccu

SEQ ID NO: 367877 - RNA, 25 nt, Human
agaguggggaguggggagaugagga

SEQ ID NO: 367878 - RNA, 19 nt, Human
agcaccccuccccgacacc

SEQ ID NO: 367879 - RNA, 19 nt, Human
agccuucuuggaucucuag

SEQ ID NO: 367880 - RNA, 22 nt, Human
aggcaacuuuaagagaugcuga

SEQ ID NO: 367881 - RNA, 18 nt, Human
agggaaaaaacaguaaaa

SEQ ID NO: 367882 - RNA, 20 nt, Human
aggggcugggugggggugug

SEQ ID NO: 367883 - RNA, 22 nt, Human
aguggggaguggggagaugagg

SEQ ID NO: 367884 - RNA, 22 nt, Human
aguguauauauacuuauaugua

SEQ ID NO: 367885 - RNA, 24 nt, Human
auacacacacacacacacacacag

SEQ ID NO: 367886 - RNA, 22 nt, Human
auacacacacacacacacacag

SEQ ID NO: 367887 - RNA, 25 nt, Human
auagaaaaacaggaacaagauagaa

SEQ ID NO: 367888 - RNA, 23 nt, Human
auagaaucguugagaguuuggaa

SEQ ID NO: 367889 - RNA, 24 nt, Human
auaucccccaaaucaaaacaaaac

SEQ ID NO: 367890 - RNA, 21 nt, Human
aucccccaaaucaaaacaaaa

SEQ ID NO: 367891 - RNA, 21 nt, Human
auccuuugguccacucaccuc

SEQ ID NO: 367892 - RNA, 22 nt, Human
auccuuugguccacucaccucc

SEQ ID NO: 367893 - RNA, 19 nt, Human
auuacaaaaaaaaaaaaau

SEQ ID NO: 367894 - RNA, 18 nt, Human
caaaacacacacacacga

SEQ ID NO: 367895 - RNA, 21 nt, Human
caaaucaaaacaaaacacaca

SEQ ID NO: 367896 - RNA, 23 nt, Human
caaccucugcuccacauaaggcc

SEQ ID NO: 367897 - RNA, 20 nt, Human
cacacacacacacacacaca

SEQ ID NO: 367898 - RNA, 26 nt, Human
cacacacacacacacacacacgcacg

SEQ ID NO: 367899 - RNA, 25 nt, Human
cacacacacacacacacacgcacgc

SEQ ID NO: 367900 - RNA, 26 nt, Human
cacacacacacacacacgcacgcaca

SEQ ID NO: 367901 - RNA, 25 nt, Human
cacacacacacacacgcacgcacac

SEQ ID NO: 367902 - RNA, 26 nt, Human
cacacacacacacgcacgcacacaua

SEQ ID NO: 367903 - RNA, 23 nt, Human
cacacacacgauacacacacaca

SEQ ID NO: 367904 - RNA, 27 nt, Human
cacaguuuagguccaaauaggggcuuc

SEQ ID NO: 367905 - RNA, 21 nt, Human
cacauaaggcccuugaucaag

SEQ ID NO: 367906 - RNA, 25 nt, Human
caccuccccaccacuccccuagucc

SEQ ID NO: 367907 - RNA, 18 nt, Human
cacgcacgcacacauacc

SEQ ID NO: 367908 - RNA, 21 nt, Human
cacucaccuccccaccacucc

SEQ ID NO: 367909 - RNA, 25 nt, Human
cacucaccuccccaccacuccccua

SEQ ID NO: 367910 - RNA, 22 nt, Human
caguaugaaagcucugccucuc

SEQ ID NO: 367911 - RNA, 21 nt, Human
cagugacugccuuugugcgug

SEQ ID NO: 367912 - RNA, 26 nt, Human
ccaaaggcauacuccuccucccaaau

SEQ ID NO: 367913 - RNA, 18 nt, Human
ccaggugguaaaugucug

SEQ ID NO: 367914 - RNA, 24 nt, Human
cccaccacuccccuagucccucaa

SEQ ID NO: 367915 - RNA, 19 nt, Human
ccccaaaucaaaacaaaac

SEQ ID NO: 367916 - RNA, 22 nt, Human
ccccaggaaggacuguggccuc

SEQ ID NO: 367917 - RNA, 22 nt, Human
cccccaaaucaaaacaaaacaa

SEQ ID NO: 367918 - RNA, 22 nt, Human
ccccuagucccucaacagguau

SEQ ID NO: 367919 - RNA, 23 nt, Human
cccuugggagggggacaccaaag

SEQ ID NO: 367920 - RNA, 21 nt, Human
ccggccccgucgacccgagag

SEQ ID NO: 367921 - RNA, 21 nt, Human
ccuccucccaaauuuaagaag

SEQ ID NO: 367922 - RNA, 22 nt, Human
ccucugcuccuucucuggggcc

SEQ ID NO: 367923 - RNA, 22 nt, Human
ccuucucugccuggaaugcccc

SEQ ID NO: 367924 - RNA, 18 nt, Human
cuaggugccagggcagcc

SEQ ID NO: 367925 - RNA, 18 nt, Human
cuccccaccacuccccua

SEQ ID NO: 367926 - RNA, 21 nt, Human
cuccucacagcccuccuuucu

SEQ ID NO: 367927 - RNA, 21 nt, Human
cucucuggccagugguucuga

SEQ ID NO: 367928 - RNA, 22 nt, Human
cucugcuccuucucugccugga

SEQ ID NO: 367929 - RNA, 19 nt, Human
cugagcccugagaccccag

SEQ ID NO: 367930 - RNA, 21 nt, Human
cugccaaagaugggguucaga

SEQ ID NO: 367931 - RNA, 20 nt, Human
cugcccuggggauuugaaag

SEQ ID NO: 367932 - RNA, 21 nt, Human
cugcuaugaccccauucaaau

SEQ ID NO: 367933 - RNA, 19 nt, Human
gaaauauguaugccugcca

SEQ ID NO: 367934 - RNA, 19 nt, Human
gaacugggagcacuucccc

SEQ ID NO: 367935 - RNA, 20 nt, Human
gcacaguuuagguccaaauu

SEQ ID NO: 367936 - RNA, 22 nt, Human
gcccucuuccccacgugccacc

SEQ ID NO: 367937 - RNA, 23 nt, Human
gccucuccacggacaucuucccg

SEQ ID NO: 367938 - RNA, 21 nt, Human
ggaaaaaacaguaaaaucaaa

SEQ ID NO: 367939 - RNA, 22 nt, Human
ggacccugacaaucccaaccuu

SEQ ID NO: 367940 - RNA, 19 nt, Human
ggauuugaaagguauagua

SEQ ID NO: 367941 - RNA, 21 nt, Human
ggggcuggguggggguguguc

SEQ ID NO: 367942 - RNA, 22 nt, Human
ggguccucucuccugcuauuuc

SEQ ID NO: 367943 - RNA, 22 nt, Human
ggguuuccagaguuccaagagc

SEQ ID NO: 367944 - RNA, 25 nt, Human
guaaaaucaaaucagacacaaacgg

SEQ ID NO: 367945 - RNA, 19 nt, Human
gugguaaaaguauaugaca

SEQ ID NO: 367946 - RNA, 18 nt, Human
guguauauauacuuauau

SEQ ID NO: 367947 - RNA, 18 nt, Human
guguauauauacuuauau

SEQ ID NO: 367948 - RNA, 21 nt, Human
guucauuccuuuggcaucucu

SEQ ID NO: 367949 - RNA, 22 nt, Human
guuuucuuuuuguacaaaauau

SEQ ID NO: 367950 - RNA, 20 nt, Human
uaaaaguauaugacaaucuc

SEQ ID NO: 367951 - RNA, 22 nt, Human
uaagacaaaggaaaacagguca

SEQ ID NO: 367952 - RNA, 18 nt, Human
uacaaaauaucccccaaa

SEQ ID NO: 367953 - RNA, 18 nt, Human
uacaaguuucuacugcuc

SEQ ID NO: 367954 - RNA, 20 nt, Human
uacacacacacacacacaca

SEQ ID NO: 367955 - RNA, 25 nt, Human
uacacacacacacacacacacacgc

SEQ ID NO: 367956 - RNA, 25 nt, Human
uacacacacacacacacacacacgg

SEQ ID NO: 367957 - RNA, 19 nt, Human
uacauagaaaaacaggaac

SEQ ID NO: 367958 - RNA, 19 nt, Human
uacugacuauccacucacc

SEQ ID NO: 367959 - RNA, 19 nt, Human
uagcagcucccucucuggc

SEQ ID NO: 367960 - RNA, 19 nt, Human
uagggccuccucauucagc

SEQ ID NO: 367961 - RNA, 19 nt, Human
uauaccaccuuaagauggg

SEQ ID NO: 367962 - RNA, 21 nt, Human
uauagggccuccucauucagc

SEQ ID NO: 367963 - RNA, 24 nt, Human
uaucccccaaaucaaaacaaaaca

SEQ ID NO: 367964 - RNA, 19 nt, Human
ucaccuccccaccacuccc

SEQ ID NO: 367965 - RNA, 22 nt, Human
ucagcaccacgggcugcccuug

SEQ ID NO: 367966 - RNA, 21 nt, Human
ucagggaaaaaacaguaaaau

SEQ ID NO: 367967 - RNA, 19 nt, Human
uccaaauaggggcugggug

SEQ ID NO: 367968 - RNA, 19 nt, Human
uccaaauaggggcugggug

SEQ ID NO: 367969 - RNA, 19 nt, Human
uccacggacaucuucccgu

SEQ ID NO: 367970 - RNA, 20 nt, Human
uccacucaccuccccaccaa

SEQ ID NO: 367971 - RNA, 21 nt, Human
uccauaaaaucagggaaaaaa

SEQ ID NO: 367972 - RNA, 21 nt, Human
ucccaaccuucuagaaaacuc

SEQ ID NO: 367973 - RNA, 22 nt, Human
uccccaccacuccccuaguccc

SEQ ID NO: 367974 - RNA, 24 nt, Human
uccccaccacuccccuagucccuc

SEQ ID NO: 367975 - RNA, 18 nt, Human
uccccgacaccgggccca

SEQ ID NO: 367976 - RNA, 24 nt, Human
uccuaggucagcaccacgggcugc

SEQ ID NO: 367977 - RNA, 19 nt, Human
uccucucuccugcuauuuc

SEQ ID NO: 367978 - RNA, 18 nt, Human
ucucuggccagugguucu

SEQ ID NO: 367979 - RNA, 23 nt, Human
ucugagcccugagaccccagcuc

SEQ ID NO: 367980 - RNA, 18 nt, Human
ucugccuggaaugcccca

SEQ ID NO: 367981 - RNA, 20 nt, Human
ucuguaaacccagcuauugc

SEQ ID NO: 367982 - RNA, 20 nt, Human
ucuucccguggguuuucuuu

SEQ ID NO: 367983 - RNA, 18 nt, Human
ugacaaucccaaccuucu

SEQ ID NO: 367984 - RNA, 19 nt, Human
ugaggaaagaaagcacccc

SEQ ID NO: 367985 - RNA, 20 nt, Human
ugccagggcagcccagggug

SEQ ID NO: 367986 - RNA, 20 nt, Human
ugcccuuguucugaacuggg

SEQ ID NO: 367987 - RNA, 18 nt, Human
ugccgggagagccucugc

SEQ ID NO: 367988 - RNA, 19 nt, Human
ugccuggaaugccccagga

SEQ ID NO: 367989 - RNA, 21 nt, Human
ugcggucugcaccccucgagc

SEQ ID NO: 367990 - RNA, 21 nt, Human
uggggaaugaccagaaccugc

SEQ ID NO: 367991 - RNA, 20 nt, Human
uggggagaugaggaaagaaa

SEQ ID NO: 367992 - RNA, 22 nt, Human
ugggggugugucugcccugggg

SEQ ID NO: 367993 - RNA, 18 nt, Human
uggguccccaggugguaa

SEQ ID NO: 367994 - RNA, 23 nt, Human
uggguccucucuccugcuauuuc

SEQ ID NO: 367995 - RNA, 19 nt, Human
ugggugggggugugucugc

SEQ ID NO: 367996 - RNA, 19 nt, Human
uggguguuguuuggcagag

SEQ ID NO: 367997 - RNA, 20 nt, Human
uguaaacccagcuauugcag

SEQ ID NO: 367998 - RNA, 25 nt, Human
uguacaaaauaucccccaaaucaaa

SEQ ID NO: 367999 - RNA, 21 nt, Human
ugucuguaaacccagcuauug

SEQ ID NO: 368000 - RNA, 20 nt, Human
uuccagaguuccaagagccc

SEQ ID NO: 368001 - RNA, 18 nt, Human
uucugcggucugcacccc

SEQ ID NO: 368002 - RNA, 22 nt, Human
uuuguacaaaauaucccccaaa

SEQ ID NO: 368003 - RNA, 23 nt, Human
uuuguacaaaauaucccccaaau

SEQ ID NO: 368004 - RNA, 21 nt, Human
aagcaguccacgaagcacuug

SEQ ID NO: 368005 - RNA, 23 nt, Human
accacacacgcacauccacacaa

SEQ ID NO: 368006 - RNA, 25 nt, Human
acccagccccagcccugcagccucu

SEQ ID NO: 368007 - RNA, 18 nt, Human
acccucacccagccccag

SEQ ID NO: 368008 - RNA, 24 nt, Human
acugcugcuucuggggugaggggu

SEQ ID NO: 368009 - RNA, 22 nt, Human
agacucacacacgcaacagcuc

SEQ ID NO: 368010 - RNA, 23 nt, Human
agagcagagccuggagagguggg

SEQ ID NO: 368011 - RNA, 19 nt, Human
agcguggggacagccccga

SEQ ID NO: 368012 - RNA, 21 nt, Human
agcuucuauaacagggauggg

SEQ ID NO: 368013 - RNA, 30 nt, Human
aggugggcagggggugggcguggcaggggg

SEQ ID NO: 368014 - RNA, 22 nt, Human
auccacacaacagacucacacc

SEQ ID NO: 368015 - RNA, 20 nt, Human
aucucauucucucaaguuuu

SEQ ID NO: 368016 - RNA, 19 nt, Human
auggggagagggguauagc

SEQ ID NO: 368017 - RNA, 21 nt, Human
caaagggacagcguggggaca

SEQ ID NO: 368018 - RNA, 25 nt, Human
caaagggacagcguggggacagccc

SEQ ID NO: 368019 - RNA, 18 nt, Human
cacacgcacauccacaca

SEQ ID NO: 368020 - RNA, 22 nt, Human
cacacgcacauccacacaacag

SEQ ID NO: 368021 - RNA, 19 nt, Human
caccggcggcaccggggag

SEQ ID NO: 368022 - RNA, 22 nt, Human
caccggggagggccccgagggc

SEQ ID NO: 368023 - RNA, 19 nt, Human
cacuugaaagugagccuga

SEQ ID NO: 368024 - RNA, 24 nt, Human
cagaccccaaaagugucagggaaa

SEQ ID NO: 368025 - RNA, 18 nt, Human
cagagccuggagaggugg

SEQ ID NO: 368026 - RNA, 24 nt, Human
cagccucugucugggugucgggga

SEQ ID NO: 368027 - RNA, 19 nt, Human
cagcgacucgccaccucgg

SEQ ID NO: 368028 - RNA, 24 nt, Human
caggacggaauauugcagccucuu

SEQ ID NO: 368029 - RNA, 18 nt, Human
ccagcccugcagccucug

SEQ ID NO: 368030 - RNA, 19 nt, Human
ccagcccugcagccucuga

SEQ ID NO: 368031 - RNA, 23 nt, Human
cccacagacuuguggcaaaggga

SEQ ID NO: 368032 - RNA, 22 nt, Human
cccagacacccaggacggaaua

SEQ ID NO: 368033 - RNA, 21 nt, Human
cccagccccagcccugcagcc

SEQ ID NO: 368034 - RNA, 28 nt, Human
cccagccccagcccugcagccgguuccg

SEQ ID NO: 368035 - RNA, 25 nt, Human
cccaggcagaccccaaaaggaguuc

SEQ ID NO: 368036 - RNA, 19 nt, Human
ccccccgccccggccgggg

SEQ ID NO: 368037 - RNA, 21 nt, Human
ccccccgccccggccggggcc

SEQ ID NO: 368038 - RNA, 23 nt, Human
ccccggccggggcccgcggaggc

SEQ ID NO: 368039 - RNA, 18 nt, Human
ccccugccucccuucucc

SEQ ID NO: 368040 - RNA, 18 nt, Human
ccccugccucccuucucc

SEQ ID NO: 368041 - RNA, 21 nt, Human
cccgccacccucacccagccc

SEQ ID NO: 368042 - RNA, 18 nt, Human
cccgcgccccccgccccg

SEQ ID NO: 368043 - RNA, 21 nt, Human
cccgcgccccccgccccggcc

SEQ ID NO: 368044 - RNA, 23 nt, Human
ccgccacccucacccagccccag

SEQ ID NO: 368045 - RNA, 18 nt, Human
ccgcgccccccgccccgg

SEQ ID NO: 368046 - RNA, 18 nt, Human
ccgggccggggucgcggc

SEQ ID NO: 368047 - RNA, 21 nt, Human
ccgggccggggucgcggcgcc

SEQ ID NO: 368048 - RNA, 19 nt, Human
ccgucucgggacuggacgu

SEQ ID NO: 368049 - RNA, 19 nt, Human
ccgucucucccuccuuccc

SEQ ID NO: 368050 - RNA, 24 nt, Human
ccucacccagccccagcccugcag

SEQ ID NO: 368051 - RNA, 25 nt, Human
ccucccccaggcagaccccaaaagu

SEQ ID NO: 368052 - RNA, 18 nt, Human
ccucccgucucucccucc

SEQ ID NO: 368053 - RNA, 18 nt, Human
ccucccuucuccucucuc

SEQ ID NO: 368054 - RNA, 18 nt, Human
ccucgcccucuccuuccc

SEQ ID NO: 368055 - RNA, 19 nt, Human
ccucucucuccucccuccc

SEQ ID NO: 368056 - RNA, 20 nt, Human
ccuugguucugcugccccuc

SEQ ID NO: 368057 - RNA, 22 nt, Human
cgaagcacuugaaagugagccu

SEQ ID NO: 368058 - RNA, 25 nt, Human
cgacuccgguggcggugguggcggc

SEQ ID NO: 368059 - RNA, 20 nt, Human
cgcacggccgggccgggguc

SEQ ID NO: 368060 - RNA, 21 nt, Human
cggcaccggggagggccccga

SEQ ID NO: 368061 - RNA, 20 nt, Human
cggcggcaccggggagggcc

SEQ ID NO: 368062 - RNA, 21 nt, Human
cggcucccgaggcuccugccc

SEQ ID NO: 368063 - RNA, 23 nt, Human
cggcucccgaggcuccugcccgc

SEQ ID NO: 368064 - RNA, 19 nt, Human
cggcugcggcggcuccucg

SEQ ID NO: 368065 - RNA, 21 nt, Human
cggcuggcccgcgacuccggu

SEQ ID NO: 368066 - RNA, 20 nt, Human
cgggcggcgucggggcccgg

SEQ ID NO: 368067 - RNA, 19 nt, Human
cggggagggccccgagggc

SEQ ID NO: 368068 - RNA, 19 nt, Human
cggggcgcgggcggcgcag

SEQ ID NO: 368069 - RNA, 22 nt, Human
cggggcgcgggcggcgcaguca

SEQ ID NO: 368070 - RNA, 22 nt, Human
cgguggggcugaagcaggggcu

SEQ ID NO: 368071 - RNA, 18 nt, Human
cgucucgggacuggacgu

SEQ ID NO: 368072 - RNA, 26 nt, Human
cgugcacucgcacccaagcucacaca

SEQ ID NO: 368073 - RNA, 20 nt, Human
cuccccugccucccuucucc

SEQ ID NO: 368074 - RNA, 19 nt, Human
cucccuucuccucucucuc

SEQ ID NO: 368075 - RNA, 19 nt, Human
cuucuauaacagggauggg

SEQ ID NO: 368076 - RNA, 19 nt, Human
cuucuccucucucuccucc

SEQ ID NO: 368077 - RNA, 23 nt, Human
gaaaaaguuguuuuagugagcac

SEQ ID NO: 368078 - RNA, 22 nt, Human
gacucgccaccucgcuccgacu

SEQ ID NO: 368079 - RNA, 22 nt, Human
gagaggugggcagggggugggc

SEQ ID NO: 368080 - RNA, 21 nt, Human
gagcuggugaugugagcugag

SEQ ID NO: 368081 - RNA, 19 nt, Human
gaggggucacccacgggug

SEQ ID NO: 368082 - RNA, 22 nt, Human
gaucuauaaauucacacuccuu

SEQ ID NO: 368083 - RNA, 23 nt, Human
gcagaccccaaaagugucaggga

SEQ ID NO: 368084 - RNA, 20 nt, Human
gccacugcugcuucuggggu

SEQ ID NO: 368085 - RNA, 22 nt, Human
gcccccuggaggggugcgguga

SEQ ID NO: 368086 - RNA, 23 nt, Human
gccccgaggcccccaccaugcac

SEQ ID NO: 368087 - RNA, 23 nt, Human
gcccgcggaggcugcccggcugg

SEQ ID NO: 368088 - RNA, 18 nt, Human
gccuggagaggugggcag

SEQ ID NO: 368089 - RNA, 24 nt, Human
gcgacuccgguggcggugguggcg

SEQ ID NO: 368090 - RNA, 19 nt, Human
gcggcaccggggagggccc

SEQ ID NO: 368091 - RNA, 24 nt, Human
gcggcaccggggagggccccgagg

SEQ ID NO: 368092 - RNA, 20 nt, Human
gcggcggcggcggcggcggc

SEQ ID NO: 368093 - RNA, 23 nt, Human
gcggcggcggcggcggcggcggc

SEQ ID NO: 368094 - RNA, 20 nt, Human
gcggcggcggcggcggcucc

SEQ ID NO: 368095 - RNA, 24 nt, Human
gcggcggcggcggcggcucgggcg

SEQ ID NO: 368096 - RNA, 23 nt, Human
gcggcggcggcgguggcggcggc

SEQ ID NO: 368097 - RNA, 24 nt, Human
gcggcggcgguggcggcggcggcg

SEQ ID NO: 368098 - RNA, 19 nt, Human
gcggcggcucccgaggcuc

SEQ ID NO: 368099 - RNA, 23 nt, Human
gcggcgguggcggcggcggcggc

SEQ ID NO: 368100 - RNA, 19 nt, Human
gcggggugcggggcgcggg

SEQ ID NO: 368101 - RNA, 21 nt, Human
gcucgggcgcgccucgcccuc

SEQ ID NO: 368102 - RNA, 19 nt, Human
gcugaaauauuugccuugg

SEQ ID NO: 368103 - RNA, 21 nt, Human
ggcaaagggacagcgugggga

SEQ ID NO: 368104 - RNA, 18 nt, Human
ggcagggggugggcgugg

SEQ ID NO: 368105 - RNA, 23 nt, Human
ggcagggggugggcguggcaggg

SEQ ID NO: 368106 - RNA, 18 nt, Human
ggccgggccggggucgcg

SEQ ID NO: 368107 - RNA, 25 nt, Human
ggccgggcggcggcggcggcggcgg

SEQ ID NO: 368108 - RNA, 21 nt, Human
ggcgccucacggggggcggcg

SEQ ID NO: 368109 - RNA, 21 nt, Human
ggcggcggcggcggcggcucg

SEQ ID NO: 368110 - RNA, 23 nt, Human
ggcggcggcggcgguggcggcgg

SEQ ID NO: 368111 - RNA, 21 nt, Human
ggcggcggcggcucccgaggc

SEQ ID NO: 368112 - RNA, 18 nt, Human
ggcggcggcggcugcggc

SEQ ID NO: 368113 - RNA, 23 nt, Human
ggcggcggcgguggcggcggcgg

SEQ ID NO: 368114 - RNA, 23 nt, Human
ggcggcgguggcggcggcggcgg

SEQ ID NO: 368115 - RNA, 18 nt, Human
ggcggcgucggggcccgg

SEQ ID NO: 368116 - RNA, 23 nt, Human
ggcggcgucggggcccggccggg

SEQ ID NO: 368117 - RNA, 20 nt, Human
ggcggucaggcggggggcac

SEQ ID NO: 368118 - RNA, 21 nt, Human
ggcggucaggcggggggcacc

SEQ ID NO: 368119 - RNA, 23 nt, Human
ggcgguggcggcggcggcggcgg

SEQ ID NO: 368120 - RNA, 23 nt, Human
ggcggugguggcggcggcggcgg

SEQ ID NO: 368121 - RNA, 24 nt, Human
gggcggcggcggcggcggcggcgg

SEQ ID NO: 368122 - RNA, 21 nt, Human
gggcggcggcggcugcggcgg

SEQ ID NO: 368123 - RNA, 22 nt, Human
gggcggcggucaggcggggggc

SEQ ID NO: 368124 - RNA, 18 nt, Human
ggggcgcgggcggcgcag

SEQ ID NO: 368125 - RNA, 22 nt, Human
gggggcggccgggccgggggac

SEQ ID NO: 368126 - RNA, 20 nt, Human
ggggggcggcggucaggcgg

SEQ ID NO: 368127 - RNA, 20 nt, Human
ggggugggcguggcaggggc

SEQ ID NO: 368128 - RNA, 23 nt, Human
gguggcggcggcggcgguggcgg

SEQ ID NO: 368129 - RNA, 20 nt, Human
gguggcggugguggcggcgg

SEQ ID NO: 368130 - RNA, 23 nt, Human
gguggcggugguggcggcggcgg

SEQ ID NO: 368131 - RNA, 23 nt, Human
ggugguggcggcggcggcggugg

SEQ ID NO: 368132 - RNA, 22 nt, Human
ggugugccccgcacaggguggg

SEQ ID NO: 368133 - RNA, 22 nt, Human
guaaggagaggaugguuugggc

SEQ ID NO: 368134 - RNA, 23 nt, Human
guacucacgcacgcgugcacucg

SEQ ID NO: 368135 - RNA, 25 nt, Human
gugcacucgcacccaagcucacaca

SEQ ID NO: 368136 - RNA, 19 nt, Human
gugccccgcacaggguggg

SEQ ID NO: 368137 - RNA, 20 nt, Human
guggcggcggcggcggcggc

SEQ ID NO: 368138 - RNA, 20 nt, Human
guggcggcggcggcgguggc

SEQ ID NO: 368139 - RNA, 23 nt, Human
guggcggcggcggcgguggcggc

SEQ ID NO: 368140 - RNA, 23 nt, Human
guggcggugguggcggcggcggc

SEQ ID NO: 368141 - RNA, 19 nt, Human
gugguggcggcggcggcgg

SEQ ID NO: 368142 - RNA, 22 nt, Human
uaacagggauggggagaggggu

SEQ ID NO: 368143 - RNA, 20 nt, Human
uagaauguccccgcaggccc

SEQ ID NO: 368144 - RNA, 22 nt, Human
uagagaucuauauauacucucc

SEQ ID NO: 368145 - RNA, 20 nt, Human
uaggggcagagggguaaggu

SEQ ID NO: 368146 - RNA, 21 nt, Human
uaggggcagagggguaaggua

SEQ ID NO: 368147 - RNA, 20 nt, Human
uauaacagggauggggagag

SEQ ID NO: 368148 - RNA, 23 nt, Human
ucacacacgcaacagcucgaagc

SEQ ID NO: 368149 - RNA, 24 nt, Human
ucaccuuugcuaagagauagagau

SEQ ID NO: 368150 - RNA, 18 nt, Human
ucaggcggggggcaccgg

SEQ ID NO: 368151 - RNA, 21 nt, Human
uccacacaacagacucacaca

SEQ ID NO: 368152 - RNA, 22 nt, Human
uccacacaacagacucacacac

SEQ ID NO: 368153 - RNA, 21 nt, Human
uccaccuuaagccuggacgug

SEQ ID NO: 368154 - RNA, 23 nt, Human
uccacgaagcacuugaaagugag

SEQ ID NO: 368155 - RNA, 20 nt, Human
ucccaagcugccacugcugc

SEQ ID NO: 368156 - RNA, 20 nt, Human
uccccgcaggcccgccaccc

SEQ ID NO: 368157 - RNA, 18 nt, Human
uccccugccucccuucuc

SEQ ID NO: 368158 - RNA, 29 nt, Human
uccccugccucccuucuccucucucuccc

SEQ ID NO: 368159 - RNA, 20 nt, Human
ucccgucucucccuccuucc

SEQ ID NO: 368160 - RNA, 20 nt, Human
ucccucccgucucucccucc

SEQ ID NO: 368161 - RNA, 20 nt, Human
ucccuuccucacauuuccca

SEQ ID NO: 368162 - RNA, 23 nt, Human
ucccuucuccucucucuccuccc

SEQ ID NO: 368163 - RNA, 22 nt, Human
uccguacucacgcacgcgugca

SEQ ID NO: 368164 - RNA, 22 nt, Human
uccuuugcccagaggcgccauu

SEQ ID NO: 368165 - RNA, 21 nt, Human
ucgggacuggacgugacagac

SEQ ID NO: 368166 - RNA, 19 nt, Human
ucgggcggcggcggcugcg

SEQ ID NO: 368167 - RNA, 18 nt, Human
ucuccuucccggcggcgg

SEQ ID NO: 368168 - RNA, 18 nt, Human
ucucuaagcuucuauaac

SEQ ID NO: 368169 - RNA, 21 nt, Human
ucugcaaacgacggccggagc

SEQ ID NO: 368170 - RNA, 18 nt, Human
ucuggggugaggggucac

SEQ ID NO: 368171 - RNA, 21 nt, Human
ugacauguuuuuauugcuaug

SEQ ID NO: 368172 - RNA, 21 nt, Human
ugcaaacgacggccggagcag

SEQ ID NO: 368173 - RNA, 20 nt, Human
ugccacugcugcuucugggg

SEQ ID NO: 368174 - RNA, 21 nt, Human
ugccacugcugcuucuggggu

SEQ ID NO: 368175 - RNA, 22 nt, Human
ugcuuucuccccuccuccccca

SEQ ID NO: 368176 - RNA, 20 nt, Human
uggaaaaaguuguuuuagug

SEQ ID NO: 368177 - RNA, 21 nt, Human
uggagggggagaggcaucuau

SEQ ID NO: 368178 - RNA, 20 nt, Human
uggcaaagggacagcguggg

SEQ ID NO: 368179 - RNA, 18 nt, Human
uggcggcggcggcggcgg

SEQ ID NO: 368180 - RNA, 18 nt, Human
uggcggugguggcggcgg

SEQ ID NO: 368181 - RNA, 21 nt, Human
ugggaagccugagcaggccag

SEQ ID NO: 368182 - RNA, 19 nt, Human
uggggcacuaggcggggcc

SEQ ID NO: 368183 - RNA, 22 nt, Human
uggggucacucagccgucucgg

SEQ ID NO: 368184 - RNA, 19 nt, Human
uggguggggguggggcacu

SEQ ID NO: 368185 - RNA, 21 nt, Human
ugggugucggggaagccuuuc

SEQ ID NO: 368186 - RNA, 20 nt, Human
ugguggcggcggcggcggug

SEQ ID NO: 368187 - RNA, 25 nt, Human
ugguggcggcggcggcgguggcggc

SEQ ID NO: 368188 - RNA, 23 nt, Human
ugguggguugugauauuuuuggc

SEQ ID NO: 368189 - RNA, 24 nt, Human
ugguuugggcuccuuccucuuuuu

SEQ ID NO: 368190 - RNA, 18 nt, Human
ugucagggaaaggcaggc

SEQ ID NO: 368191 - RNA, 21 nt, Human
ugucagggaaaggcaggcccc

SEQ ID NO: 368192 - RNA, 24 nt, Human
ugucagggaaaggcaggcccccug

SEQ ID NO: 368193 - RNA, 21 nt, Human
uguggcaaagggacagcgugg

SEQ ID NO: 368194 - RNA, 21 nt, Human
uguggguggggguggggcacu

SEQ ID NO: 368195 - RNA, 19 nt, Human
ugugugucgggggcccggg

SEQ ID NO: 368196 - RNA, 21 nt, Human
uuccauugcuggcuggcucuc

SEQ ID NO: 368197 - RNA, 18 nt, Human
uuccugggggugugcccc

SEQ ID NO: 368198 - RNA, 18 nt, Human
uugggcuccuuccucuuu

SEQ ID NO: 368199 - RNA, 25 nt, Human
uugguggguugugauauuuuuggcg

SEQ ID NO: 368200 - RNA, 22 nt, Human
uuucccaagcugccacugcugc

SEQ ID NO: 368201 - RNA, 19 nt, Human
acacugacgcauccccugc

SEQ ID NO: 368202 - RNA, 19 nt, Human
auccccugccucucccacu

SEQ ID NO: 368203 - RNA, 24 nt, Human
cagcgcgacacugacgcauccccu

SEQ ID NO: 368204 - RNA, 20 nt, Human
ccaugcagcccagcacgggu

SEQ ID NO: 368205 - RNA, 18 nt, Human
cccacugccgggcugggc

SEQ ID NO: 368206 - RNA, 21 nt, Human
cccgcgugucuccgccgcuca

SEQ ID NO: 368207 - RNA, 19 nt, Human
ccgcuccccuggcccugcc

SEQ ID NO: 368208 - RNA, 25 nt, Human
ccucccgaagcucugccuacccgcu

SEQ ID NO: 368209 - RNA, 20 nt, Human
ccuggcccugccccuccggc

SEQ ID NO: 368210 - RNA, 19 nt, Human
cgcgacacugacgcauccc

SEQ ID NO: 368211 - RNA, 19 nt, Human
gaagcucugccuacccgcu

SEQ ID NO: 368212 - RNA, 21 nt, Human
gcagcccagcacgggugcucc

SEQ ID NO: 368213 - RNA, 20 nt, Human
gcucugccuacccgcucccc

SEQ ID NO: 368214 - RNA, 18 nt, Human
ggaguggggugugugggc

SEQ ID NO: 368215 - RNA, 21 nt, Human
ggcgagcgaucgcagccccgc

SEQ ID NO: 368216 - RNA, 24 nt, Human
ucaccucaucuccucccgaagcuc

SEQ ID NO: 368217 - RNA, 20 nt, Human
ucaucuccucccgaagcucu

SEQ ID NO: 368218 - RNA, 22 nt, Human
uccccuggcccugccccuccgg

SEQ ID NO: 368219 - RNA, 27 nt, Human
uggcccugccccuccggccagucccca

SEQ ID NO: 368220 - RNA, 20 nt, Human
ugggguggcacuccccuggc

SEQ ID NO: 368221 - RNA, 22 nt, Human
ugucuccgccgcucaucaccuc

SEQ ID NO: 368222 - RNA, 22 nt, Human
agcaaagaugucucaggaggga

SEQ ID NO: 368223 - RNA, 22 nt, Human
agccucgaucuugcagcaaaga

SEQ ID NO: 368224 - RNA, 22 nt, Human
caccagaggacagccucgaucu

SEQ ID NO: 368225 - RNA, 19 nt, Human
cacugguggggaggguggg

SEQ ID NO: 368226 - RNA, 20 nt, Human
cagaggacagccucgaucuu

SEQ ID NO: 368227 - RNA, 23 nt, Human
cagccucgaucuugcagcaaaga

SEQ ID NO: 368228 - RNA, 21 nt, Human
caggagggauacaaggaaggu

SEQ ID NO: 368229 - RNA, 20 nt, Human
ccaccuucucaccagaggac

SEQ ID NO: 368230 - RNA, 22 nt, Human
ccucggggcugcugccaccucc

SEQ ID NO: 368231 - RNA, 18 nt, Human
cggcggcggcggggcucc

SEQ ID NO: 368232 - RNA, 19 nt, Human
cggggcugcugccaccucc

SEQ ID NO: 368233 - RNA, 18 nt, Human
cucaggagggauacaagg

SEQ ID NO: 368234 - RNA, 20 nt, Human
cuggaauaugacgggaagcc

SEQ ID NO: 368235 - RNA, 20 nt, Human
gcacugguggggaggguggg

SEQ ID NO: 368236 - RNA, 23 nt, Human
gccaccuccggggggcggggcug

SEQ ID NO: 368237 - RNA, 19 nt, Human
gcugcugccaccuccgggg

SEQ ID NO: 368238 - RNA, 21 nt, Human
guggggugccucccgguccuc

SEQ ID NO: 368239 - RNA, 22 nt, Human
ucccucggggcugcugccaccu

SEQ ID NO: 368240 - RNA, 25 nt, Human
ugcacugguggggaggguggggugc

SEQ ID NO: 368241 - RNA, 24 nt, Human
uguugcacugguggggaggguggg

SEQ ID NO: 368242 - RNA, 21 nt, Human
aacccaggcugcccacaacag

SEQ ID NO: 368243 - RNA, 18 nt, Human
aagacccgaagcccagcc

SEQ ID NO: 368244 - RNA, 23 nt, Human
aagcaggugugggagggcggggc

SEQ ID NO: 368245 - RNA, 24 nt, Human
aagguccuaagguccugaggacuc

SEQ ID NO: 368246 - RNA, 25 nt, Human
accccaccacaacugcccagguagc

SEQ ID NO: 368247 - RNA, 21 nt, Human
agaaggcucugggcagagucc

SEQ ID NO: 368248 - RNA, 23 nt, Human
agcaggugugggagggcggggcc

SEQ ID NO: 368249 - RNA, 24 nt, Human
agguggccgagaagagcaccgagc

SEQ ID NO: 368250 - RNA, 19 nt, Human
aggugugggagggcggggc

SEQ ID NO: 368251 - RNA, 19 nt, Human
aguccauggcaccagcacc

SEQ ID NO: 368252 - RNA, 19 nt, Human
caccagcaccagccaaggc

SEQ ID NO: 368253 - RNA, 22 nt, Human
caccagcaccagccaaggccca

SEQ ID NO: 368254 - RNA, 25 nt, Human
cagcaggccacauggcuggccaagc

SEQ ID NO: 368255 - RNA, 23 nt, Human
cagccaaggcccacuccugaaga

SEQ ID NO: 368256 - RNA, 21 nt, Human
cagccccuggaugaagguccu

SEQ ID NO: 368257 - RNA, 22 nt, Human
cauaaacaagaaggcucugggc

SEQ ID NO: 368258 - RNA, 23 nt, Human
cauccaccccaccacaacugccc

SEQ ID NO: 368259 - RNA, 22 nt, Human
ccaccccaccacaacugcccag

SEQ ID NO: 368260 - RNA, 22 nt, Human
ccagcaccagccaaggcccacu

SEQ ID NO: 368261 - RNA, 19 nt, Human
cccaccacaacugcccagg

SEQ ID NO: 368262 - RNA, 22 nt, Human
cccaggcugcccacaacagaag

SEQ ID NO: 368263 - RNA, 23 nt, Human
cccuugggcugugggccuuccca

SEQ ID NO: 368264 - RNA, 18 nt, Human
ccugcaaacccaggcugc

SEQ ID NO: 368265 - RNA, 22 nt, Human
cuccugaagacccgaagcccag

SEQ ID NO: 368266 - RNA, 23 nt, Human
cucucggcuugucuggccucucc

SEQ ID NO: 368267 - RNA, 21 nt, Human
cugggcagaguccauggcacc

SEQ ID NO: 368268 - RNA, 19 nt, Human
cugugggccuucccauccu

SEQ ID NO: 368269 - RNA, 25 nt, Human
gcccacaacagaaggggcucucggc

SEQ ID NO: 368270 - RNA, 23 nt, Human
gccugcaaacccaggcugcccac

SEQ ID NO: 368271 - RNA, 21 nt, Human
gcuugucuggccucucuggcc

SEQ ID NO: 368272 - RNA, 22 nt, Human
uagcuggagcugaucauaaaca

SEQ ID NO: 368273 - RNA, 19 nt, Human
uccaccccaccacaacugc

SEQ ID NO: 368274 - RNA, 22 nt, Human
uccaccccaccacaacugccca

SEQ ID NO: 368275 - RNA, 18 nt, Human
ucccaagcagguguggga

SEQ ID NO: 368276 - RNA, 22 nt, Human
uccccagccugugcaggccugc

SEQ ID NO: 368277 - RNA, 20 nt, Human
uccuaagguccugaggacuc

SEQ ID NO: 368278 - RNA, 21 nt, Human
ucuggccucccaagcaggugu

SEQ ID NO: 368279 - RNA, 22 nt, Human
ugaagacccgaagcccagcccc

SEQ ID NO: 368280 - RNA, 24 nt, Human
ugaagguccuaagguccugaggac

SEQ ID NO: 368281 - RNA, 19 nt, Human
ugaggacuccccagccugu

SEQ ID NO: 368282 - RNA, 22 nt, Human
uggcaccagcaccagccaaggc

SEQ ID NO: 368283 - RNA, 19 nt, Human
uggccgagaagagcaccga

SEQ ID NO: 368284 - RNA, 18 nt, Human
ugggcagaguccauggca

SEQ ID NO: 368285 - RNA, 21 nt, Human
ugggcugugggccuucccauc

SEQ ID NO: 368286 - RNA, 18 nt, Human
aaaaaagcacaacgacug

SEQ ID NO: 368287 - RNA, 26 nt, Human
aaaaaagcacaacgacugaaaaugca

SEQ ID NO: 368288 - RNA, 24 nt, Human
aaaaagcacaacgacugaaaaugc

SEQ ID NO: 368289 - RNA, 20 nt, Human
aaaacaccugaagcccacaa

SEQ ID NO: 368290 - RNA, 21 nt, Human
aaaaccccacaaaaaagccag

SEQ ID NO: 368291 - RNA, 26 nt, Human
aaaagccagaacacccuacccaaccc

SEQ ID NO: 368292 - RNA, 18 nt, Human
aaaccccacaaaaaagcc

SEQ ID NO: 368293 - RNA, 22 nt, Human
aaaccccacaaaaaagccagaa

SEQ ID NO: 368294 - RNA, 23 nt, Human
aaauaaaaaccccacaaaaaagc

SEQ ID NO: 368295 - RNA, 18 nt, Human
aacacagucaguccaccu

SEQ ID NO: 368296 - RNA, 23 nt, Human
aagcaagagagacggacaucugg

SEQ ID NO: 368297 - RNA, 18 nt, Human
aagcacaacgacugaaaa

SEQ ID NO: 368298 - RNA, 25 nt, Human
aagcaccuccugggaggaaucaccc

SEQ ID NO: 368299 - RNA, 21 nt, Human
aagccagaacacccuacccaa

SEQ ID NO: 368300 - RNA, 24 nt, Human
acagaauaaagaaggucccagcca

SEQ ID NO: 368301 - RNA, 23 nt, Human
acagacgcuggcagcccccaugc

SEQ ID NO: 368302 - RNA, 22 nt, Human
acccaccuugcccagauccccc

SEQ ID NO: 368303 - RNA, 21 nt, Human
accccacaaaaaagccagaac

SEQ ID NO: 368304 - RNA, 20 nt, Human
acggcaucccgaggaccccu

SEQ ID NO: 368305 - RNA, 20 nt, Human
acgggaacaacagaaacaag

SEQ ID NO: 368306 - RNA, 24 nt, Human
acucagccuccaaaacuggaacag

SEQ ID NO: 368307 - RNA, 18 nt, Human
acuggccucugcgcaugc

SEQ ID NO: 368308 - RNA, 24 nt, Human
agaacacccuacccaacccagccc

SEQ ID NO: 368309 - RNA, 26 nt, Human
agacgcuggcagcccccaugcucgcc

SEQ ID NO: 368310 - RNA, 18 nt, Human
agagccccccgagcucag

SEQ ID NO: 368311 - RNA, 18 nt, Human
agagggaagaggucuugc

SEQ ID NO: 368312 - RNA, 22 nt, Human
agcacuggagugacgcuggacc

SEQ ID NO: 368313 - RNA, 19 nt, Human
agcccaggggccuccaaac

SEQ ID NO: 368314 - RNA, 18 nt, Human
agcggccccagccauuuc

SEQ ID NO: 368315 - RNA, 18 nt, Human
aggcauggcaccugcgcc

SEQ ID NO: 368316 - RNA, 21 nt, Human
aggccaggccuggugagcuag

SEQ ID NO: 368317 - RNA, 21 nt, Human
aggcggcagagacgugagcag

SEQ ID NO: 368318 - RNA, 22 nt, Human
agggaaaaagggcccaaggaga

SEQ ID NO: 368319 - RNA, 18 nt, Human
agggagcaggcauggcac

SEQ ID NO: 368320 - RNA, 19 nt, Human
agggggagggggaagcagg

SEQ ID NO: 368321 - RNA, 21 nt, Human
agggggagggggaagcaggcc

SEQ ID NO: 368322 - RNA, 24 nt, Human
aggugaucuacuuuaacuggccuc

SEQ ID NO: 368323 - RNA, 23 nt, Human
aguguuucuuuaaaaauaaaaac

SEQ ID NO: 368324 - RNA, 23 nt, Human
augaaccagaacucagccuccaa

SEQ ID NO: 368325 - RNA, 18 nt, Human
augucacaagcccaugug

SEQ ID NO: 368326 - RNA, 19 nt, Human
auucacacagcaaugcacc

SEQ ID NO: 368327 - RNA, 23 nt, Human
caaaaaagcacaacgacugaaaa

SEQ ID NO: 368328 - RNA, 24 nt, Human
caaacccuaaggcagagacauaag

SEQ ID NO: 368329 - RNA, 19 nt, Human
caaggggugcccuaguucc

SEQ ID NO: 368330 - RNA, 28 nt, Human
cacaaaacaaaaaagcacaacgacugaa

SEQ ID NO: 368331 - RNA, 21 nt, Human
cacagccgcagcagccaacag

SEQ ID NO: 368332 - RNA, 22 nt, Human
caccuugcccagaucccccacc

SEQ ID NO: 368333 - RNA, 20 nt, Human
cacucagggcugugccacag

SEQ ID NO: 368334 - RNA, 20 nt, Human
cacucugcaaacccuaaggc

SEQ ID NO: 368335 - RNA, 24 nt, Human
cacucugcaaacccuaaggcagag

SEQ ID NO: 368336 - RNA, 23 nt, Human
cagaacggcaucccgaggacccc

SEQ ID NO: 368337 - RNA, 20 nt, Human
cagaacucagccuccaaaac

SEQ ID NO: 368338 - RNA, 24 nt, Human
cagaacucagccuccaaaacugga

SEQ ID NO: 368339 - RNA, 21 nt, Human
cagaggguguccagccugguc

SEQ ID NO: 368340 - RNA, 18 nt, Human
cagcccccaugcucgccc

SEQ ID NO: 368341 - RNA, 22 nt, Human
cagcugagcacuggagugacgc

SEQ ID NO: 368342 - RNA, 28 nt, Human
cagcugcuguccuuauuugcagccaaga

SEQ ID NO: 368343 - RNA, 23 nt, Human
caggaccaggacaggacaugagc

SEQ ID NO: 368344 - RNA, 19 nt, Human
cagggcugugccacaggcc

SEQ ID NO: 368345 - RNA, 18 nt, Human
caguccaccugccugcug

SEQ ID NO: 368346 - RNA, 23 nt, Human
caugaaccagaacucagccucca

SEQ ID NO: 368347 - RNA, 21 nt, Human
cauuggaggcugaggguagcu

SEQ ID NO: 368348 - RNA, 20 nt, Human
cauuucacuagcagcuacuu

SEQ ID NO: 368349 - RNA, 20 nt, Human
ccacaaguggaaaccgcugg

SEQ ID NO: 368350 - RNA, 21 nt, Human
ccacagccgcagcagccaacc

SEQ ID NO: 368351 - RNA, 23 nt, Human
ccacagcugagcacuggagugac

SEQ ID NO: 368352 - RNA, 22 nt, Human
ccacaggguugguuuucacgaa

SEQ ID NO: 368353 - RNA, 22 nt, Human
ccagaacacccuacccaaccca

SEQ ID NO: 368354 - RNA, 19 nt, Human
ccagaucccccacccccuc

SEQ ID NO: 368355 - RNA, 18 nt, Human
ccaggacaggacaugagc

SEQ ID NO: 368356 - RNA, 21 nt, Human
cccaacccagcccaguguaac

SEQ ID NO: 368357 - RNA, 25 nt, Human
cccacagccgcagcagccaacaggc

SEQ ID NO: 368358 - RNA, 26 nt, Human
cccaccccagcucagacgcccagaag

SEQ ID NO: 368359 - RNA, 18 nt, Human
cccagaucccccaccccc

SEQ ID NO: 368360 - RNA, 21 nt, Human
cccagcucagacgcccagaag

SEQ ID NO: 368361 - RNA, 20 nt, Human
cccauagcgaaaaaaauuca

SEQ ID NO: 368362 - RNA, 20 nt, Human
cccaugcucgcccacagccg

SEQ ID NO: 368363 - RNA, 22 nt, Human
cccaugcucgcccacagccgca

SEQ ID NO: 368364 - RNA, 18 nt, Human
ccccaccaaccuucugcg

SEQ ID NO: 368365 - RNA, 21 nt, Human
ccccccgagcucaggagggau

SEQ ID NO: 368366 - RNA, 23 nt, Human
cccggggccugagaaggcagagc

SEQ ID NO: 368367 - RNA, 22 nt, Human
ccgcggugugucugccuuucuu

SEQ ID NO: 368368 - RNA, 18 nt, Human
ccuaggccgggaguggga

SEQ ID NO: 368369 - RNA, 18 nt, Human
ccuccagccacagcugag

SEQ ID NO: 368370 - RNA, 19 nt, Human
ccucccagugccacccuac

SEQ ID NO: 368371 - RNA, 19 nt, Human
ccuccggcagccacucggc

SEQ ID NO: 368372 - RNA, 21 nt, Human
ccuccggcagccacucggccu

SEQ ID NO: 368373 - RNA, 22 nt, Human
ccugcgggggggucuucuuguu

SEQ ID NO: 368374 - RNA, 20 nt, Human
ccugcuggugguccucggcc

SEQ ID NO: 368375 - RNA, 19 nt, Human
ccuggccgcggugugucug

SEQ ID NO: 368376 - RNA, 20 nt, Human
ccuuggacgaguggaauucg

SEQ ID NO: 368377 - RNA, 21 nt, Human
cgacagcaucuuuaaauuagu

SEQ ID NO: 368378 - RNA, 24 nt, Human
cgcccacagccgcagcagccaaca

SEQ ID NO: 368379 - RNA, 18 nt, Human
cggaaaaaucaagucuuc

SEQ ID NO: 368380 - RNA, 18 nt, Human
cgguggcccuggucccug

SEQ ID NO: 368381 - RNA, 27 nt, Human
cuacccaacccagcccaguguaacagg

SEQ ID NO: 368382 - RNA, 18 nt, Human
cuccagggagcacuucuc

SEQ ID NO: 368383 - RNA, 18 nt, Human
cuccugccuucccccagc

SEQ ID NO: 368384 - RNA, 20 nt, Human
cucgcccacagccgcagcag

SEQ ID NO: 368385 - RNA, 25 nt, Human
cucugcgcaugcuccuccggcagcc

SEQ ID NO: 368386 - RNA, 20 nt, Human
cugcgcaccggccgggccug

SEQ ID NO: 368387 - RNA, 18 nt, Human
cuguguggagcccagggu

SEQ ID NO: 368388 - RNA, 22 nt, Human
cuguucaucagguuucuccggg

SEQ ID NO: 368389 - RNA, 21 nt, Human
cuucguuggcucccggcuugg

SEQ ID NO: 368390 - RNA, 22 nt, Human
cuuucuugucucuguuucuaga

SEQ ID NO: 368391 - RNA, 20 nt, Human
gaaaaaaauucacgggaaca

SEQ ID NO: 368392 - RNA, 19 nt, Human
gacagggcuuugucugcau

SEQ ID NO: 368393 - RNA, 18 nt, Human
gacgaguggaauucgucc

SEQ ID NO: 368394 - RNA, 19 nt, Human
gagagacggacaucugguc

SEQ ID NO: 368395 - RNA, 24 nt, Human
gauggugucucggggcuaggauua

SEQ ID NO: 368396 - RNA, 21 nt, Human
gcacaaaacaaaaaagcacaa

SEQ ID NO: 368397 - RNA, 22 nt, Human
gcacaggcacaccugggucccu

SEQ ID NO: 368398 - RNA, 21 nt, Human
gcaggagcacaggcacaccug

SEQ ID NO: 368399 - RNA, 20 nt, Human
gcaggcauggcaccugcgcc

SEQ ID NO: 368400 - RNA, 22 nt, Human
gcauuggaggcugaggguagcu

SEQ ID NO: 368401 - RNA, 23 nt, Human
gccagaacacccuacccaaccca

SEQ ID NO: 368402 - RNA, 21 nt, Human
gcccaacacagucaguccacc

SEQ ID NO: 368403 - RNA, 20 nt, Human
gcccagaggccaggccuggu

SEQ ID NO: 368404 - RNA, 23 nt, Human
gccgggccugggacacccgggag

SEQ ID NO: 368405 - RNA, 22 nt, Human
gccucagucagcaccgcgggac

SEQ ID NO: 368406 - RNA, 21 nt, Human
gcggggaaccggaguggguuc

SEQ ID NO: 368407 - RNA, 20 nt, Human
gcuguggguugcggggaacc

SEQ ID NO: 368408 - RNA, 18 nt, Human
ggaauuccagcacagcag

SEQ ID NO: 368409 - RNA, 23 nt, Human
ggacacugcuguguggagcccag

SEQ ID NO: 368410 - RNA, 19 nt, Human
ggacagggcuuugucugca

SEQ ID NO: 368411 - RNA, 24 nt, Human
ggacaucugguccugaguccccaa

SEQ ID NO: 368412 - RNA, 25 nt, Human
ggagaagggaagcccggggccugag

SEQ ID NO: 368413 - RNA, 25 nt, Human
ggagaugccggcaccccccaacccu

SEQ ID NO: 368414 - RNA, 22 nt, Human
ggaguccaucggggccucaagc

SEQ ID NO: 368415 - RNA, 21 nt, Human
ggccacacugcccagaggccc

SEQ ID NO: 368416 - RNA, 23 nt, Human
ggccugggacacccgggagccgc

SEQ ID NO: 368417 - RNA, 18 nt, Human
ggcuguucccuggcucag

SEQ ID NO: 368418 - RNA, 22 nt, Human
gggaacccagcaccggccagaa

SEQ ID NO: 368419 - RNA, 23 nt, Human
gggagagcggggaggugccuagg

SEQ ID NO: 368420 - RNA, 18 nt, Human
gggcgcccacaugggugc

SEQ ID NO: 368421 - RNA, 20 nt, Human
gggcugugccacaggccagc

SEQ ID NO: 368422 - RNA, 19 nt, Human
ggggaggugccuaggccgg

SEQ ID NO: 368423 - RNA, 21 nt, Human
ggugccuaggccgggaguggg

SEQ ID NO: 368424 - RNA, 20 nt, Human
ggugucaaguugacccaaaa

SEQ ID NO: 368425 - RNA, 18 nt, Human
gucccuguggaauuccag

SEQ ID NO: 368426 - RNA, 20 nt, Human
gugcuuggcucugucuccua

SEQ ID NO: 368427 - RNA, 25 nt, Human
guggcugggacacagaccggggucc

SEQ ID NO: 368428 - RNA, 20 nt, Human
gugggcugucccuuggacga

SEQ ID NO: 368429 - RNA, 23 nt, Human
uaaaaaccccacaaaaaagccag

SEQ ID NO: 368430 - RNA, 20 nt, Human
uaaacaaaggagggaaggga

SEQ ID NO: 368431 - RNA, 23 nt, Human
uaacacagaauaaagaagguccc

SEQ ID NO: 368432 - RNA, 23 nt, Human
uaaguaaacaaaggagggaaggg

SEQ ID NO: 368433 - RNA, 21 nt, Human
uaccagaguuuucacagcagc

SEQ ID NO: 368434 - RNA, 23 nt, Human
uaccuucugaaguggggucccca

SEQ ID NO: 368435 - RNA, 20 nt, Human
uagcugcgaccucuggggca

SEQ ID NO: 368436 - RNA, 21 nt, Human
uagcugcgaccucuggggcag

SEQ ID NO: 368437 - RNA, 22 nt, Human
uaguucccucucugcaggcggg

SEQ ID NO: 368438 - RNA, 23 nt, Human
uauggucaggaguccaucggggc

SEQ ID NO: 368439 - RNA, 22 nt, Human
ucacaguggauggcccugcgug

SEQ ID NO: 368440 - RNA, 23 nt, Human
uccaaaacuggaacagaaauagc

SEQ ID NO: 368441 - RNA, 23 nt, Human
uccacaacagacgcuggcagccc

SEQ ID NO: 368442 - RNA, 23 nt, Human
uccaucggggccucaagcaccuc

SEQ ID NO: 368443 - RNA, 21 nt, Human
uccccaaacuguucaucaggu

SEQ ID NO: 368444 - RNA, 20 nt, Human
uccccaggcuggaguggggc

SEQ ID NO: 368445 - RNA, 18 nt, Human
ucccccacccccucccag

SEQ ID NO: 368446 - RNA, 25 nt, Human
uccccugcgguggcccuggucccug

SEQ ID NO: 368447 - RNA, 23 nt, Human
ucccuggcucaggauggugucuc

SEQ ID NO: 368448 - RNA, 21 nt, Human
uccucggccuccagaccgugg

SEQ ID NO: 368449 - RNA, 23 nt, Human
uccugaguccccaaacuguucau

SEQ ID NO: 368450 - RNA, 23 nt, Human
uccugcgggggggucuucuuguu

SEQ ID NO: 368451 - RNA, 21 nt, Human
ucggcugccucccauagcgaa

SEQ ID NO: 368452 - RNA, 22 nt, Human
ucguuggcucccggcuugggac

SEQ ID NO: 368453 - RNA, 20 nt, Human
ucugggcagcuguccggcuu

SEQ ID NO: 368454 - RNA, 22 nt, Human
ucuuguucuggggguccuuggc

SEQ ID NO: 368455 - RNA, 21 nt, Human
ugaaaacaccugaagcccaca

SEQ ID NO: 368456 - RNA, 23 nt, Human
ugaagacggaccccagcggcccc

SEQ ID NO: 368457 - RNA, 20 nt, Human
ugacagggagagcggggagg

SEQ ID NO: 368458 - RNA, 18 nt, Human
ugacgcuggaccacuugg

SEQ ID NO: 368459 - RNA, 22 nt, Human
ugagcagugcuuggcucugucu

SEQ ID NO: 368460 - RNA, 21 nt, Human
ugaggcauguccaccucccag

SEQ ID NO: 368461 - RNA, 19 nt, Human
ugcaaacccuaaggcagag

SEQ ID NO: 368462 - RNA, 24 nt, Human
ugcauuggaggcugaggguagcug

SEQ ID NO: 368463 - RNA, 20 nt, Human
ugccacccuacggcugaguu

SEQ ID NO: 368464 - RNA, 24 nt, Human
ugcccaggugggggcggcaggcuc

SEQ ID NO: 368465 - RNA, 22 nt, Human
ugccuaggccgggagugggaac

SEQ ID NO: 368466 - RNA, 21 nt, Human
ugcgcaccggccgggccuggg

SEQ ID NO: 368467 - RNA, 21 nt, Human
ugcggaggagcucccacccca

SEQ ID NO: 368468 - RNA, 19 nt, Human
ugcuuguugugguggguug

SEQ ID NO: 368469 - RNA, 22 nt, Human
ugcuuguugugguggguugugc

SEQ ID NO: 368470 - RNA, 21 nt, Human
uggaaauaaauaaacauggug

SEQ ID NO: 368471 - RNA, 21 nt, Human
uggaacagaacggcaucccga

SEQ ID NO: 368472 - RNA, 23 nt, Human
uggaggcagcgacagcucaggaa

SEQ ID NO: 368473 - RNA, 21 nt, Human
uggaguggggcacacagcacc

SEQ ID NO: 368474 - RNA, 23 nt, Human
uggaguggggcacacagcaccaa

SEQ ID NO: 368475 - RNA, 22 nt, Human
uggcagcccccaugcucgccca

SEQ ID NO: 368476 - RNA, 20 nt, Human
uggccucugcgcaugcuccu

SEQ ID NO: 368477 - RNA, 23 nt, Human
uggcugggacacagacagggagc

SEQ ID NO: 368478 - RNA, 21 nt, Human
ugggaugggcagcugagcugu

SEQ ID NO: 368479 - RNA, 24 nt, Human
ugggaugggcagcugagcuguggg

SEQ ID NO: 368480 - RNA, 27 nt, Human
ugggcagcugagcugugggacagagag

SEQ ID NO: 368481 - RNA, 23 nt, Human
uggggagaagggaagcccggggc

SEQ ID NO: 368482 - RNA, 24 nt, Human
uggggagaagggaagcccggggcc

SEQ ID NO: 368483 - RNA, 21 nt, Human
uggggcacacagcaccaagga

SEQ ID NO: 368484 - RNA, 19 nt, Human
uggggcaggggacacugcu

SEQ ID NO: 368485 - RNA, 18 nt, Human
ugggguccccaggcugga

SEQ ID NO: 368486 - RNA, 24 nt, Human
ugggucccuggcccucaguugagg

SEQ ID NO: 368487 - RNA, 20 nt, Human
ugucacaagcccaugugucu

SEQ ID NO: 368488 - RNA, 22 nt, Human
ugucacaagcccaugugucugg

SEQ ID NO: 368489 - RNA, 20 nt, Human
ugucaguggaguguggagaa

SEQ ID NO: 368490 - RNA, 22 nt, Human
ugucucuguuucuagaagacug

SEQ ID NO: 368491 - RNA, 20 nt, Human
uguucuggggguccuuggcu

SEQ ID NO: 368492 - RNA, 22 nt, Human
uguuucuuuaaaaauaaaaacc

SEQ ID NO: 368493 - RNA, 22 nt, Human
uucacagcagccuccacugccc

SEQ ID NO: 368494 - RNA, 22 nt, Human
uucacgaaugucacaagcccau

SEQ ID NO: 368495 - RNA, 24 nt, Human
uucacuagcagcuacuuuccacaa

SEQ ID NO: 368496 - RNA, 24 nt, Human
uuccaagucucaguagcucuguuu

SEQ ID NO: 368497 - RNA, 21 nt, Human
uugcccagaucccccaccccc

SEQ ID NO: 368498 - RNA, 25 nt, Human
uugcccagaucccccacccccuccc

SEQ ID NO: 368499 - RNA, 18 nt, Human
uuggaggcugaggguagc

SEQ ID NO: 368500 - RNA, 22 nt, Human
uuggccaggccucggcugccuc

SEQ ID NO: 368501 - RNA, 21 nt, Human
uuugcccagggucugggcccu

SEQ ID NO: 368502 - RNA, 21 nt, Human
aaacaacacagaacauucagc

SEQ ID NO: 368503 - RNA, 21 nt, Human
aaacagcaauauuaacagacu

SEQ ID NO: 368504 - RNA, 23 nt, Human
aaacagcaauauuaacagacuuc

SEQ ID NO: 368505 - RNA, 21 nt, Human
aaagggguaccaguggguccc

SEQ ID NO: 368506 - RNA, 23 nt, Human
aaagguauaauucaccguuauaa

SEQ ID NO: 368507 - RNA, 18 nt, Human
aacaacacagaacauuca

SEQ ID NO: 368508 - RNA, 23 nt, Human
aaccuagcauucccucuucccca

SEQ ID NO: 368509 - RNA, 23 nt, Human
aagccaccagcccuaucaaccua

SEQ ID NO: 368510 - RNA, 20 nt, Human
aagcuggggucagggaucuu

SEQ ID NO: 368511 - RNA, 23 nt, Human
aaggaaacaacacagaacauuca

SEQ ID NO: 368512 - RNA, 20 nt, Human
aaguuuccccaauauuaaag

SEQ ID NO: 368513 - RNA, 27 nt, Human
acaaagagcuggcagaaauuaauucca

SEQ ID NO: 368514 - RNA, 21 nt, Human
acaaagccuggugccagggac

SEQ ID NO: 368515 - RNA, 21 nt, Human
acaacaaaaaauccuauacgg

SEQ ID NO: 368516 - RNA, 19 nt, Human
acaacucuuacaacaacaa

SEQ ID NO: 368517 - RNA, 22 nt, Human
acagacauuucugagcccaaag

SEQ ID NO: 368518 - RNA, 26 nt, Human
acaucacacuuucauaagccaccucc

SEQ ID NO: 368519 - RNA, 22 nt, Human
accacagacauuucugagccca

SEQ ID NO: 368520 - RNA, 22 nt, Human
acccagagauuuacugucagcu

SEQ ID NO: 368521 - RNA, 21 nt, Human
accuagcauucccucuucccc

SEQ ID NO: 368522 - RNA, 24 nt, Human
acucuucacagcacccaccacaaa

SEQ ID NO: 368523 - RNA, 22 nt, Human
acuuggguggagagcccagccu

SEQ ID NO: 368524 - RNA, 22 nt, Human
acuuguaucucuucuaagcaga

SEQ ID NO: 368525 - RNA, 21 nt, Human
agaaacccagagauuuacugu

SEQ ID NO: 368526 - RNA, 23 nt, Human
agaaaugguagcauuucaggccu

SEQ ID NO: 368527 - RNA, 20 nt, Human
agaagccaccagcccuauca

SEQ ID NO: 368528 - RNA, 18 nt, Human
agacagaagucauguucu

SEQ ID NO: 368529 - RNA, 21 nt, Human
agcacuggcccugagccccac

SEQ ID NO: 368530 - RNA, 19 nt, Human
agccaccuccucauaaaug

SEQ ID NO: 368531 - RNA, 20 nt, Human
agcuuuagcuucuuggccca

SEQ ID NO: 368532 - RNA, 21 nt, Human
aggaaaaggauuuaaggagac

SEQ ID NO: 368533 - RNA, 19 nt, Human
aggaggaaagaggcagcag

SEQ ID NO: 368534 - RNA, 22 nt, Human
aggcaggagaaucgcuugaacc

SEQ ID NO: 368535 - RNA, 24 nt, Human
aggcaggagaaucgcuugaaccag

SEQ ID NO: 368536 - RNA, 20 nt, Human
aggcugaggcaggagaaucg

SEQ ID NO: 368537 - RNA, 24 nt, Human
aggcugaggcaggagaaucgcuug

SEQ ID NO: 368538 - RNA, 22 nt, Human
agggagaaaacagaagucccca

SEQ ID NO: 368539 - RNA, 24 nt, Human
agggagucggagguugcagugagc

SEQ ID NO: 368540 - RNA, 24 nt, Human
agucggagguugcagugagccaag

SEQ ID NO: 368541 - RNA, 23 nt, Human
auuaaguuuccccaauauuaaag

SEQ ID NO: 368542 - RNA, 18 nt, Human
auuaugcucugaacccag

SEQ ID NO: 368543 - RNA, 26 nt, Human
auuucaggccuuuaaagucagguguu

SEQ ID NO: 368544 - RNA, 19 nt, Human
caaacgguuccugcacacc

SEQ ID NO: 368545 - RNA, 22 nt, Human
caaaguaccuucugaacuuagc

SEQ ID NO: 368546 - RNA, 24 nt, Human
cacagcacccaccacaaaaacaaa

SEQ ID NO: 368547 - RNA, 19 nt, Human
caccacaaaaacaaacuac

SEQ ID NO: 368548 - RNA, 19 nt, Human
cacucaggaggcugaggca

SEQ ID NO: 368549 - RNA, 20 nt, Human
cacugguggggggcagcaaa

SEQ ID NO: 368550 - RNA, 21 nt, Human
cagacauuucugagcccaaag

SEQ ID NO: 368551 - RNA, 18 nt, Human
cagccugcugaagagccg

SEQ ID NO: 368552 - RNA, 22 nt, Human
cagcuuagcucagacagaaguc

SEQ ID NO: 368553 - RNA, 19 nt, Human
cagguugggauugcuuggg

SEQ ID NO: 368554 - RNA, 20 nt, Human
caugagguucugccacaugc

SEQ ID NO: 368555 - RNA, 22 nt, Human
cauggcucacuaagcaaguacu

SEQ ID NO: 368556 - RNA, 23 nt, Human
ccacaccaagguggcuccaagug

SEQ ID NO: 368557 - RNA, 23 nt, Human
ccacagacauuucugagcccaaa

SEQ ID NO: 368558 - RNA, 18 nt, Human
ccacugcacuuuaccaag

SEQ ID NO: 368559 - RNA, 18 nt, Human
ccacugcacuuuaccaag

SEQ ID NO: 368560 - RNA, 19 nt, Human
ccacugcacuuuaccaagu

SEQ ID NO: 368561 - RNA, 19 nt, Human
ccaugcuucacauaugcau

SEQ ID NO: 368562 - RNA, 19 nt, Human
cccacaaguaccaagcucu

SEQ ID NO: 368563 - RNA, 19 nt, Human
ccccaaucuuccccccacc

SEQ ID NO: 368564 - RNA, 20 nt, Human
ccccaaucuuccccccaccc

SEQ ID NO: 368565 - RNA, 21 nt, Human
ccccacaaguaccaagcucuu

SEQ ID NO: 368566 - RNA, 22 nt, Human
ccccugcagcaaggccuaauuc

SEQ ID NO: 368567 - RNA, 27 nt, Human
ccccugcagcaaggccuaauuccacuu

SEQ ID NO: 368568 - RNA, 23 nt, Human
cccucugaagcccccaccuugag

SEQ ID NO: 368569 - RNA, 20 nt, Human
ccucacuguugaccaauucc

SEQ ID NO: 368570 - RNA, 23 nt, Human
ccucggccacauaaacucuccca

SEQ ID NO: 368571 - RNA, 21 nt, Human
ccugcacaccuguguuugcug

SEQ ID NO: 368572 - RNA, 22 nt, Human
ccuucauccuaccugccaucau

SEQ ID NO: 368573 - RNA, 21 nt, Human
cgucgggcaggaauuugccgu

SEQ ID NO: 368574 - RNA, 21 nt, Human
cguuccccaaucuucccccca

SEQ ID NO: 368575 - RNA, 19 nt, Human
cuaaaccuuugccuacacu

SEQ ID NO: 368576 - RNA, 21 nt, Human
cuagcaccagguugggauugc

SEQ ID NO: 368577 - RNA, 22 nt, Human
cucuaggaaaacccuguuccuu

SEQ ID NO: 368578 - RNA, 18 nt, Human
cugugacuggguggagaa

SEQ ID NO: 368579 - RNA, 21 nt, Human
cuucacagcacccaccacaaa

SEQ ID NO: 368580 - RNA, 20 nt, Human
cuucgcucccaaagagagga

SEQ ID NO: 368581 - RNA, 18 nt, Human
cuugcuggaccugagcca

SEQ ID NO: 368582 - RNA, 22 nt, Human
cuuuauguccauuuucuaaacc

SEQ ID NO: 368583 - RNA, 25 nt, Human
gaaagaaaaaaaaacguugaaaaaa

SEQ ID NO: 368584 - RNA, 22 nt, Human
gagaaucgcuugaaccagggag

SEQ ID NO: 368585 - RNA, 24 nt, Human
gagacugcagccaccacaccucgg

SEQ ID NO: 368586 - RNA, 22 nt, Human
gaggauccugggagaagucugu

SEQ ID NO: 368587 - RNA, 22 nt, Human
gagguugcagugagccaagauc

SEQ ID NO: 368588 - RNA, 21 nt, Human
gcaaccgggugaaaaaaacaa

SEQ ID NO: 368589 - RNA, 23 nt, Human
gccaccuccucauaaaugggucc

SEQ ID NO: 368590 - RNA, 20 nt, Human
ggagguugcagugagccaag

SEQ ID NO: 368591 - RNA, 24 nt, Human
ggagguugcagugagccaagauca

SEQ ID NO: 368592 - RNA, 18 nt, Human
ggccauuagggcagaaag

SEQ ID NO: 368593 - RNA, 23 nt, Human
gggaggcuggcaggagaggagua

SEQ ID NO: 368594 - RNA, 19 nt, Human
ggggaaggggaggcuggca

SEQ ID NO: 368595 - RNA, 19 nt, Human
gguaccagugggucccuug

SEQ ID NO: 368596 - RNA, 24 nt, Human
guaaaauaaaggauuguccuucaa

SEQ ID NO: 368597 - RNA, 18 nt, Human
guaacauuguccaguaga

SEQ ID NO: 368598 - RNA, 21 nt, Human
guaccuggucagagaaaaacu

SEQ ID NO: 368599 - RNA, 22 nt, Human
gugaaaugaccuagcaccaggu

SEQ ID NO: 368600 - RNA, 22 nt, Human
gugauccaccugaauaucagaa

SEQ ID NO: 368601 - RNA, 19 nt, Human
guucaucuguccuugcugg

SEQ ID NO: 368602 - RNA, 20 nt, Human
uaaaacaacaaacauccuag

SEQ ID NO: 368603 - RNA, 23 nt, Human
uaaagcagccccucuauagggac

SEQ ID NO: 368604 - RNA, 21 nt, Human
uaaagucagguguuguaccug

SEQ ID NO: 368605 - RNA, 22 nt, Human
uaagcaaguacuagggcaccug

SEQ ID NO: 368606 - RNA, 23 nt, Human
uacaacucuuacaacaacaaaaa

SEQ ID NO: 368607 - RNA, 23 nt, Human
uaccaagcucuuccugagacugc

SEQ ID NO: 368608 - RNA, 19 nt, Human
uaccaaggacuuaaggcaa

SEQ ID NO: 368609 - RNA, 23 nt, Human
uaccacagacauuucugagccca

SEQ ID NO: 368610 - RNA, 20 nt, Human
uacgcgaacaucacacuuuc

SEQ ID NO: 368611 - RNA, 19 nt, Human
uacuccacggaggggagaa

SEQ ID NO: 368612 - RNA, 19 nt, Human
uagcuucuuggcccaggaa

SEQ ID NO: 368613 - RNA, 18 nt, Human
ucaaaagugacccuacag

SEQ ID NO: 368614 - RNA, 21 nt, Human
uccaggccucagaaagccacc

SEQ ID NO: 368615 - RNA, 19 nt, Human
ucccaaagagaggauccug

SEQ ID NO: 368616 - RNA, 21 nt, Human
ucccaaagagaggauccuggg

SEQ ID NO: 368617 - RNA, 24 nt, Human
ucccagucuucacugaucuccaca

SEQ ID NO: 368618 - RNA, 22 nt, Human
uccccccacccucugaagcccc

SEQ ID NO: 368619 - RNA, 19 nt, Human
uccugagucuccuauagcu

SEQ ID NO: 368620 - RNA, 22 nt, Human
ugaaaaaaggaagguuucuuua

SEQ ID NO: 368621 - RNA, 21 nt, Human
ugaaauagaagguucagcauu

SEQ ID NO: 368622 - RNA, 21 nt, Human
ugaagcagcuuuccucccagu

SEQ ID NO: 368623 - RNA, 23 nt, Human
ugaaugugauacauguguuuagu

SEQ ID NO: 368624 - RNA, 23 nt, Human
ugacaacuuaauaaacuguacuc

SEQ ID NO: 368625 - RNA, 20 nt, Human
ugacagcccccacgaccugg

SEQ ID NO: 368626 - RNA, 22 nt, Human
ugacaguaggaaugucacccca

SEQ ID NO: 368627 - RNA, 21 nt, Human
ugaccauuccccccguucccc

SEQ ID NO: 368628 - RNA, 20 nt, Human
ugagaaggaaaugaaguccc

SEQ ID NO: 368629 - RNA, 23 nt, Human
ugaggaggaaagaggcagcagca

SEQ ID NO: 368630 - RNA, 20 nt, Human
ugaggcaggagaaucgcuug

SEQ ID NO: 368631 - RNA, 24 nt, Human
ugaggcaggagaaucgcuugaacc

SEQ ID NO: 368632 - RNA, 23 nt, Human
ugagguccuugcuuucccuagaa

SEQ ID NO: 368633 - RNA, 25 nt, Human
ugauccaccugaauaucagaaguuu

SEQ ID NO: 368634 - RNA, 21 nt, Human
ugauugggucaaaaggcuccu

SEQ ID NO: 368635 - RNA, 20 nt, Human
ugcacagcagucccucacac

SEQ ID NO: 368636 - RNA, 23 nt, Human
ugccauaccaccaggcugccugc

SEQ ID NO: 368637 - RNA, 22 nt, Human
ugccucacuguugaccaauucc

SEQ ID NO: 368638 - RNA, 25 nt, Human
ugccucggccacauaaacucuccca

SEQ ID NO: 368639 - RNA, 23 nt, Human
ugcuaaacagcauaaaaucugug

SEQ ID NO: 368640 - RNA, 20 nt, Human
ugcucugaacccagggcaac

SEQ ID NO: 368641 - RNA, 20 nt, Human
uggagaaagcuaaagcuggg

SEQ ID NO: 368642 - RNA, 21 nt, Human
uggagaaagcuaaagcugggg

SEQ ID NO: 368643 - RNA, 22 nt, Human
uggagagcccagccugagcacc

SEQ ID NO: 368644 - RNA, 19 nt, Human
ugggagaagucuguaucca

SEQ ID NO: 368645 - RNA, 24 nt, Human
ugguggggggcagcaaauuccugg

SEQ ID NO: 368646 - RNA, 24 nt, Human
uguaguaguagacacggguggcug

SEQ ID NO: 368647 - RNA, 21 nt, Human
uguccuugcuggaccugagcc

SEQ ID NO: 368648 - RNA, 19 nt, Human
ugugcagccugcugaagag

SEQ ID NO: 368649 - RNA, 22 nt, Human
uguugaccaauuccaaaaccua

SEQ ID NO: 368650 - RNA, 22 nt, Human
uuaaaaggcaagcacauuuugc

SEQ ID NO: 368651 - RNA, 21 nt, Human
uuacaaaucccaaacccauga

SEQ ID NO: 368652 - RNA, 23 nt, Human
uuagcuucuuggcccaggaauuu

SEQ ID NO: 368653 - RNA, 21 nt, Human
uucacagcacccaccacaaaa

SEQ ID NO: 368654 - RNA, 18 nt, Human
uucaggagaguugggccc

SEQ ID NO: 368655 - RNA, 18 nt, Human
uucugugucugcacugug

SEQ ID NO: 368656 - RNA, 20 nt, Human
uucugugucugcacugugua

SEQ ID NO: 368657 - RNA, 18 nt, Human
uugagcaaggauuuugca

SEQ ID NO: 368658 - RNA, 19 nt, Human
uugagcaaggauuuugcau

SEQ ID NO: 368659 - RNA, 20 nt, Human
uugcagugagccaagaucac

SEQ ID NO: 368660 - RNA, 24 nt, Human
uugcuuccacuugugcagccugcu

SEQ ID NO: 368661 - RNA, 19 nt, Human
uuggcaguggggccaagaa

SEQ ID NO: 368662 - RNA, 21 nt, Human
uuguaccuggucagagaaaaa

SEQ ID NO: 368663 - RNA, 21 nt, Human
uuucauuuuaauguaauuagc

SEQ ID NO: 368664 - RNA, 21 nt, Human
uuugaugacuugggcccauga

SEQ ID NO: 368665 - RNA, 22 nt, Human
uuugcugguuggccugccuucc

SEQ ID NO: 368666 - RNA, 19 nt, Human
uuuugcuuaaaggauuagc

SEQ ID NO: 368667 - RNA, 19 nt, Human
aaaagaaaagaggaguagg

SEQ ID NO: 368668 - RNA, 24 nt, Human
aaacaaccaagcccaaaccugaca

SEQ ID NO: 368669 - RNA, 20 nt, Human
aacaguauguagcaaaacaa

SEQ ID NO: 368670 - RNA, 18 nt, Human
aagcugccuaggccaggc

SEQ ID NO: 368671 - RNA, 19 nt, Human
aagcugccuaggccaggcu

SEQ ID NO: 368672 - RNA, 29 nt, Human
acacagcacucucucucucuguguccucc

SEQ ID NO: 368673 - RNA, 21 nt, Human
acaggacaguagcggggaagg

SEQ ID NO: 368674 - RNA, 21 nt, Human
acccaggugcuucuaaaacaa

SEQ ID NO: 368675 - RNA, 24 nt, Human
acucucucucucuguguccuccau

SEQ ID NO: 368676 - RNA, 26 nt, Human
agaccagaaaccccugcuuuccacau

SEQ ID NO: 368677 - RNA, 21 nt, Human
agcuuccuggcauugccuccu

SEQ ID NO: 368678 - RNA, 18 nt, Human
aggaaggagugagggagg

SEQ ID NO: 368679 - RNA, 22 nt, Human
aggacaggacaguagcggggaa

SEQ ID NO: 368680 - RNA, 18 nt, Human
aggcuucuggacaggugc

SEQ ID NO: 368681 - RNA, 22 nt, Human
agggagagaagugccuuccagg

SEQ ID NO: 368682 - RNA, 19 nt, Human
agugagggagggggaaagg

SEQ ID NO: 368683 - RNA, 21 nt, Human
agugagggagggggaaaggag

SEQ ID NO: 368684 - RNA, 20 nt, Human
augucucucuaaaggagaca

SEQ ID NO: 368685 - RNA, 18 nt, Human
caaccaagcccaaaccug

SEQ ID NO: 368686 - RNA, 22 nt, Human
caagaaggguggaggaggugag

SEQ ID NO: 368687 - RNA, 19 nt, Human
caagguucacuggcccuuc

SEQ ID NO: 368688 - RNA, 23 nt, Human
cagcucugcucugggaccagggg

SEQ ID NO: 368689 - RNA, 22 nt, Human
caggaaauuggagcauuguggg

SEQ ID NO: 368690 - RNA, 18 nt, Human
caggaaucuccuuuguca

SEQ ID NO: 368691 - RNA, 21 nt, Human
ccagagcaaguuagcugagga

SEQ ID NO: 368692 - RNA, 24 nt, Human
ccaggugcuucuaaaacaaccaag

SEQ ID NO: 368693 - RNA, 19 nt, Human
cccagccagcaguaaaagg

SEQ ID NO: 368694 - RNA, 19 nt, Human
ccugacaugcuccucccca

SEQ ID NO: 368695 - RNA, 19 nt, Human
ccuggauauaagcagguuc

SEQ ID NO: 368696 - RNA, 24 nt, Human
ccuucauuguccccuuuaaaaguc

SEQ ID NO: 368697 - RNA, 19 nt, Human
cucugggaccaggggccca

SEQ ID NO: 368698 - RNA, 24 nt, Human
cuucacaucugcaaaaggggcagc

SEQ ID NO: 368699 - RNA, 20 nt, Human
cuuggcucagcacuuucugu

SEQ ID NO: 368700 - RNA, 19 nt, Human
gaagcugccuaggccaggc

SEQ ID NO: 368701 - RNA, 21 nt, Human
gaaggagugagggagggggaa

SEQ ID NO: 368702 - RNA, 18 nt, Human
gacaggacaguagcgggg

SEQ ID NO: 368703 - RNA, 24 nt, Human
gagaggaaacccuucaccagcuuc

SEQ ID NO: 368704 - RNA, 21 nt, Human
gcaguaaaagggaaggccaga

SEQ ID NO: 368705 - RNA, 24 nt, Human
gcuuuccuuuucaacuuccuuagc

SEQ ID NO: 368706 - RNA, 18 nt, Human
ggacaggugccuccaaag

SEQ ID NO: 368707 - RNA, 23 nt, Human
ggcagucagggagagaagugccu

SEQ ID NO: 368708 - RNA, 21 nt, Human
ggcuucuggacaggugccucc

SEQ ID NO: 368709 - RNA, 18 nt, Human
gggagggggaaaggagua

SEQ ID NO: 368710 - RNA, 24 nt, Human
ggggaaggaauacacagccgaccu

SEQ ID NO: 368711 - RNA, 28 nt, Human
uaaaacaaccaagcccaaaccugacaug

SEQ ID NO: 368712 - RNA, 23 nt, Human
uacacagcacucucucucucugu

SEQ ID NO: 368713 - RNA, 20 nt, Human
uagaccagaaaccccugcuu

SEQ ID NO: 368714 - RNA, 25 nt, Human
uagccaguagaccagaaaccccuuc

SEQ ID NO: 368715 - RNA, 25 nt, Human
uauuaagcaaccaucuggguccaag

SEQ ID NO: 368716 - RNA, 21 nt, Human
ucaaaaaguaaguucaaaggu

SEQ ID NO: 368717 - RNA, 18 nt, Human
ucagcucugcucugggac

SEQ ID NO: 368718 - RNA, 23 nt, Human
uccagcaccugugauaguuucau

SEQ ID NO: 368719 - RNA, 18 nt, Human
ucccagagcaaguuagcu

SEQ ID NO: 368720 - RNA, 25 nt, Human
uccuggcauugccuccuugguccug

SEQ ID NO: 368721 - RNA, 20 nt, Human
ucucucaggaaucuccuuug

SEQ ID NO: 368722 - RNA, 18 nt, Human
ucuuggcucagcacuuuc

SEQ ID NO: 368723 - RNA, 21 nt, Human
ucuuggcucagcacuuucugu

SEQ ID NO: 368724 - RNA, 23 nt, Human
ugacaugcuccuccccacaguca

SEQ ID NO: 368725 - RNA, 20 nt, Human
ugagggagggggaaaggagu

SEQ ID NO: 368726 - RNA, 22 nt, Human
ugccuaggccaggcuucuggac

SEQ ID NO: 368727 - RNA, 22 nt, Human
uggaacaguauguagcaaaaca

SEQ ID NO: 368728 - RNA, 21 nt, Human
uggacaggugccuccaaagaa

SEQ ID NO: 368729 - RNA, 21 nt, Human
uuaaaagucuggaacaguaug

SEQ ID NO: 368730 - RNA, 19 nt, Human
uucaaagguugaagcugcc

SEQ ID NO: 368731 - RNA, 23 nt, Human
uugaagcugccuaggccaggcuu

SEQ ID NO: 368732 - RNA, 25 nt, Human
aaaaaaaaaaaaaaaaggccagggg

SEQ ID NO: 368733 - RNA, 18 nt, Human
aaaaaaaaaaaaaaaggc

SEQ ID NO: 368734 - RNA, 26 nt, Human
aaaaaaaaaaaaaaaggccaggggag

SEQ ID NO: 368735 - RNA, 19 nt, Human
aaaaaaggcaagcagauaa

SEQ ID NO: 368736 - RNA, 19 nt, Human
aaaagaaauagaaauacca

SEQ ID NO: 368737 - RNA, 21 nt, Human
aaaagagaacacgaaaaauau

SEQ ID NO: 368738 - RNA, 18 nt, Human
aaaaggcaagcagauaaa

SEQ ID NO: 368739 - RNA, 20 nt, Human
aaaaggccaggggagacagu

SEQ ID NO: 368740 - RNA, 24 nt, Human
aaagagaacacgaaaaauauuccu

SEQ ID NO: 368741 - RNA, 20 nt, Human
aaagggggaggaaggagaga

SEQ ID NO: 368742 - RNA, 22 nt, Human
aaccuuacauuaaaaaaaaucc

SEQ ID NO: 368743 - RNA, 19 nt, Human
aacuuuacaaaaaaauaau

SEQ ID NO: 368744 - RNA, 21 nt, Human
aagacagcaugacacugagac

SEQ ID NO: 368745 - RNA, 25 nt, Human
aagcauccccuuggauuuugggucc

SEQ ID NO: 368746 - RNA, 22 nt, Human
aagccaaggcccagagaggaga

SEQ ID NO: 368747 - RNA, 20 nt, Human
aagcugggcggggaagcugg

SEQ ID NO: 368748 - RNA, 19 nt, Human
aagcuuuggcaccauguug

SEQ ID NO: 368749 - RNA, 21 nt, Human
aaggaggggaggaaguuggag

SEQ ID NO: 368750 - RNA, 20 nt, Human
aaggucagaggcugccagcc

SEQ ID NO: 368751 - RNA, 24 nt, Human
acaaaucucuaaaaccuacaccaa

SEQ ID NO: 368752 - RNA, 22 nt, Human
acaagaaaaguguugcuaaaaa

SEQ ID NO: 368753 - RNA, 26 nt, Human
acaccaaaguccuaccacugccugac

SEQ ID NO: 368754 - RNA, 23 nt, Human
acacuuucuggucacucgcguuu

SEQ ID NO: 368755 - RNA, 18 nt, Human
acaucaaaagaaaaaaac

SEQ ID NO: 368756 - RNA, 30 nt, Human
agaaauagaaauaccagcuucaaaaauauu

SEQ ID NO: 368757 - RNA, 21 nt, Human
agacaccauccaggccaggaa

SEQ ID NO: 368758 - RNA, 20 nt, Human
agacagaauucggggugggg

SEQ ID NO: 368759 - RNA, 21 nt, Human
agaggcuguucuucuccuugg

SEQ ID NO: 368760 - RNA, 18 nt, Human
aggauaaaagggggagga

SEQ ID NO: 368761 - RNA, 21 nt, Human
aggauaaaagggggaggaagg

SEQ ID NO: 368762 - RNA, 23 nt, Human
aggcaagcagauaaaagagaaca

SEQ ID NO: 368763 - RNA, 28 nt, Human
aggcaagcagauaaaagagaagggaccc

SEQ ID NO: 368764 - RNA, 18 nt, Human
aggcaggggcagggcugg

SEQ ID NO: 368765 - RNA, 19 nt, Human
aggcaggggcagggcuggg

SEQ ID NO: 368766 - RNA, 20 nt, Human
aggcaggggcagggcugggu

SEQ ID NO: 368767 - RNA, 23 nt, Human
aggcugccagccacagaggaggg

SEQ ID NO: 368768 - RNA, 21 nt, Human
agggaagcauccccuuggauu

SEQ ID NO: 368769 - RNA, 19 nt, Human
agggaugugucuucagaaa

SEQ ID NO: 368770 - RNA, 19 nt, Human
aggggccaaccccagccug

SEQ ID NO: 368771 - RNA, 19 nt, Human
agggggaggaaggagagag

SEQ ID NO: 368772 - RNA, 21 nt, Human
agugcagcaggaguggcuggg

SEQ ID NO: 368773 - RNA, 21 nt, Human
aguggcugcagggauagcagg

SEQ ID NO: 368774 - RNA, 23 nt, Human
aguggcugcagggauagcagggg

SEQ ID NO: 368775 - RNA, 27 nt, Human
aguguugcuaaaaaaaaaaaaaaaaaa

SEQ ID NO: 368776 - RNA, 22 nt, Human
aguuggaggaaugagaaaagag

SEQ ID NO: 368777 - RNA, 19 nt, Human
auaaaacaggagacugccu

SEQ ID NO: 368778 - RNA, 23 nt, Human
augauggggaggggcaggaaaga

SEQ ID NO: 368779 - RNA, 26 nt, Human
augcaggaggcaggggcagggcuggg

SEQ ID NO: 368780 - RNA, 24 nt, Human
auggggacagaauugcuugagccu

SEQ ID NO: 368781 - RNA, 19 nt, Human
auugggagagagcuuugaa

SEQ ID NO: 368782 - RNA, 23 nt, Human
caaaacaaccuuacauuaaaaaa

SEQ ID NO: 368783 - RNA, 21 nt, Human
caaaagaaaaaaaccucucca

SEQ ID NO: 368784 - RNA, 23 nt, Human
caaaagcugccucccuuucuaaa

SEQ ID NO: 368785 - RNA, 20 nt, Human
caaaucucuaaaaccuacac

SEQ ID NO: 368786 - RNA, 19 nt, Human
caacucagaccaaacuugg

SEQ ID NO: 368787 - RNA, 21 nt, Human
caacucagaccaaacuuggca

SEQ ID NO: 368788 - RNA, 22 nt, Human
caagcagauaaaagagaacaac

SEQ ID NO: 368789 - RNA, 21 nt, Human
caagcugggcggggaagcugg

SEQ ID NO: 368790 - RNA, 24 nt, Human
caaugcucuccucagucucccagg

SEQ ID NO: 368791 - RNA, 21 nt, Human
caauuucucaccacccacacc

SEQ ID NO: 368792 - RNA, 26 nt, Human
cacaacucagaccaaacuuggcaucu

SEQ ID NO: 368793 - RNA, 20 nt, Human
cacagccggccccaucccuc

SEQ ID NO: 368794 - RNA, 19 nt, Human
caccacccacaccaaaguc

SEQ ID NO: 368795 - RNA, 23 nt, Human
cacccacaccaaaguccuaccac

SEQ ID NO: 368796 - RNA, 21 nt, Human
cagagugggcgcccugcugcc

SEQ ID NO: 368797 - RNA, 18 nt, Human
cagcuccuggccucuccu

SEQ ID NO: 368798 - RNA, 22 nt, Human
caggaggcaggggcagggcugg

SEQ ID NO: 368799 - RNA, 20 nt, Human
caggggcagggcuggguuuc

SEQ ID NO: 368800 - RNA, 23 nt, Human
caggggccaaccccagccugccg

SEQ ID NO: 368801 - RNA, 21 nt, Human
ccaaaaaguaaggcaucaacu

SEQ ID NO: 368802 - RNA, 23 nt, Human
ccaaaguccuaccacugccugac

SEQ ID NO: 368803 - RNA, 23 nt, Human
ccacaaaacaaaucucuaaaacc

SEQ ID NO: 368804 - RNA, 24 nt, Human
ccacagcaaacuccauagccuucc

SEQ ID NO: 368805 - RNA, 22 nt, Human
ccagccugccgggcaucuacuc

SEQ ID NO: 368806 - RNA, 18 nt, Human
ccaggccaggaagggcuc

SEQ ID NO: 368807 - RNA, 20 nt, Human
ccaggccaggaagggcuccu

SEQ ID NO: 368808 - RNA, 19 nt, Human
ccaguuuaagcagacagaa

SEQ ID NO: 368809 - RNA, 20 nt, Human
ccaucccccaaaacaaccuu

SEQ ID NO: 368810 - RNA, 19 nt, Human
cccaagccaaggcccagag

SEQ ID NO: 368811 - RNA, 19 nt, Human
cccacagcaaacuccauag

SEQ ID NO: 368812 - RNA, 25 nt, Human
cccacagcaaacuccauagggcccc

SEQ ID NO: 368813 - RNA, 19 nt, Human
ccccaagacagcaugacac

SEQ ID NO: 368814 - RNA, 23 nt, Human
ccccacaaugcagcuccuggccu

SEQ ID NO: 368815 - RNA, 19 nt, Human
ccccccacaaugcagcucc

SEQ ID NO: 368816 - RNA, 22 nt, Human
ccccuuggauuuugggucccug

SEQ ID NO: 368817 - RNA, 21 nt, Human
cccuccaggggccaaccccag

SEQ ID NO: 368818 - RNA, 18 nt, Human
cccuggcuggggugggug

SEQ ID NO: 368819 - RNA, 18 nt, Human
cccuggggugagaggcug

SEQ ID NO: 368820 - RNA, 23 nt, Human
ccgaauucuggacagggagcccu

SEQ ID NO: 368821 - RNA, 23 nt, Human
ccuccaggggccaaccccagccu

SEQ ID NO: 368822 - RNA, 22 nt, Human
ccugccgggcaucuacucugaa

SEQ ID NO: 368823 - RNA, 23 nt, Human
ccugcugccacuacccuuucacc

SEQ ID NO: 368824 - RNA, 24 nt, Human
ccuuguuuuccucuuuucgauccc

SEQ ID NO: 368825 - RNA, 19 nt, Human
cgggaccaaggcagggagg

SEQ ID NO: 368826 - RNA, 19 nt, Human
cuacccuuucacccugccc

SEQ ID NO: 368827 - RNA, 20 nt, Human
cuacccuuucacccugcccc

SEQ ID NO: 368828 - RNA, 19 nt, Human
cuaccuuaaaaaucagaag

SEQ ID NO: 368829 - RNA, 20 nt, Human
cuauggguuucuuuucccuu

SEQ ID NO: 368830 - RNA, 21 nt, Human
cucaaaagcugccucccuuuc

SEQ ID NO: 368831 - RNA, 20 nt, Human
cuccccucuccuccagcagc

SEQ ID NO: 368832 - RNA, 19 nt, Human
cucccugggagggaaggca

SEQ ID NO: 368833 - RNA, 21 nt, Human
cucuaaaaaaggcaagcagau

SEQ ID NO: 368834 - RNA, 27 nt, Human
cucuaaaaccuacaccaaacgaaagaa

SEQ ID NO: 368835 - RNA, 23 nt, Human
cucugaucucaggccugaagggc

SEQ ID NO: 368836 - RNA, 21 nt, Human
cucuucuuucucgcuggucuu

SEQ ID NO: 368837 - RNA, 24 nt, Human
cugccugacaaaagcagagagagg

SEQ ID NO: 368838 - RNA, 18 nt, Human
cugcuccuuccugcggcg

SEQ ID NO: 368839 - RNA, 18 nt, Human
cugcuccuuccugcggcg

SEQ ID NO: 368840 - RNA, 18 nt, Human
cuggcuuggggguggaga

SEQ ID NO: 368841 - RNA, 24 nt, Human
cuuagugcagcaggaguggcuggg

SEQ ID NO: 368842 - RNA, 22 nt, Human
cuucagaaaccaggaugguucu

SEQ ID NO: 368843 - RNA, 23 nt, Human
cuucucaguaggauugcaaccuc

SEQ ID NO: 368844 - RNA, 22 nt, Human
cuuggcaucuccccucuccucc

SEQ ID NO: 368845 - RNA, 21 nt, Human
cuuggggguggagaggcuguu

SEQ ID NO: 368846 - RNA, 18 nt, Human
cuuuaccuccccuuaguu

SEQ ID NO: 368847 - RNA, 21 nt, Human
gaaaaacaaacugugaaccug

SEQ ID NO: 368848 - RNA, 19 nt, Human
gaaaggucagaggcugcca

SEQ ID NO: 368849 - RNA, 18 nt, Human
gacugccuuuaccucccc

SEQ ID NO: 368850 - RNA, 20 nt, Human
gagcagcuucgucauuagga

SEQ ID NO: 368851 - RNA, 22 nt, Human
gcagcugaggguguggcccgga

SEQ ID NO: 368852 - RNA, 24 nt, Human
gcagggcaccuuggcaucuccccu

SEQ ID NO: 368853 - RNA, 25 nt, Human
gcagggcaccuuggcaucuccccuc

SEQ ID NO: 368854 - RNA, 20 nt, Human
gcccacagcaaacuccauag

SEQ ID NO: 368855 - RNA, 21 nt, Human
gcuccuggccucuccucucug

SEQ ID NO: 368856 - RNA, 20 nt, Human
gcugugugcgggugugcugg

SEQ ID NO: 368857 - RNA, 19 nt, Human
ggaaagcacccuuccuccc

SEQ ID NO: 368858 - RNA, 19 nt, Human
ggaggaaguuggaggaaug

SEQ ID NO: 368859 - RNA, 24 nt, Human
ggaugugucuucagaaaccaggau

SEQ ID NO: 368860 - RNA, 19 nt, Human
ggauuucccuucaccucuc

SEQ ID NO: 368861 - RNA, 21 nt, Human
ggcaagcugggcggggaagcu

SEQ ID NO: 368862 - RNA, 23 nt, Human
ggcccacagcaaacuccauagcc

SEQ ID NO: 368863 - RNA, 19 nt, Human
ggcccggagggagguccug

SEQ ID NO: 368864 - RNA, 21 nt, Human
gggaggaaguuggaggaauga

SEQ ID NO: 368865 - RNA, 20 nt, Human
gggaggggcaggaaagaggg

SEQ ID NO: 368866 - RNA, 21 nt, Human
gggcgguggugcuggcugugu

SEQ ID NO: 368867 - RNA, 21 nt, Human
gggugagaggcugguucuuug

SEQ ID NO: 368868 - RNA, 19 nt, Human
ggucuugggucucuccagc

SEQ ID NO: 368869 - RNA, 22 nt, Human
gguguggcccggagggaggucc

SEQ ID NO: 368870 - RNA, 22 nt, Human
guaaggcaucaacuuuacaaaa

SEQ ID NO: 368871 - RNA, 22 nt, Human
guacuuucuucucuucuagaaa

SEQ ID NO: 368872 - RNA, 18 nt, Human
guccucuucuuucucgcu

SEQ ID NO: 368873 - RNA, 21 nt, Human
guccuuagcucugggaguugg

SEQ ID NO: 368874 - RNA, 21 nt, Human
guucuaacuccaucccccaaa

SEQ ID NO: 368875 - RNA, 23 nt, Human
uaaaaaaaauccaaaagaaauag

SEQ ID NO: 368876 - RNA, 27 nt, Human
uaaaagggggaggaaggagagaguagc

SEQ ID NO: 368877 - RNA, 23 nt, Human
uaaggcaucaacuuuacaaaaaa

SEQ ID NO: 368878 - RNA, 21 nt, Human
uaccacugccugacaaaagca

SEQ ID NO: 368879 - RNA, 20 nt, Human
uaccuggucccaagccaagg

SEQ ID NO: 368880 - RNA, 19 nt, Human
uacucugaaggggucacaa

SEQ ID NO: 368881 - RNA, 25 nt, Human
uaggaaaaaagagcaauccucaggu

SEQ ID NO: 368882 - RNA, 27 nt, Human
uaggauugcaaccucaaaagcugccuc

SEQ ID NO: 368883 - RNA, 20 nt, Human
uagggagggggaaagcaccc

SEQ ID NO: 368884 - RNA, 21 nt, Human
uauauugggagagagcuuuga

SEQ ID NO: 368885 - RNA, 18 nt, Human
ucaaaaauauuuauccaa

SEQ ID NO: 368886 - RNA, 24 nt, Human
ucaaaagaaaaaaaccucuccaca

SEQ ID NO: 368887 - RNA, 22 nt, Human
ucagaccaaacuuggcaucuca

SEQ ID NO: 368888 - RNA, 18 nt, Human
ucagccaaugcucuccuc

SEQ ID NO: 368889 - RNA, 21 nt, Human
uccaaaagaaauagaaauacc

SEQ ID NO: 368890 - RNA, 24 nt, Human
uccacaaaacaaaucucuaaaacc

SEQ ID NO: 368891 - RNA, 19 nt, Human
uccaggccaggaagggcuc

SEQ ID NO: 368892 - RNA, 20 nt, Human
uccccccacaaugcagcucc

SEQ ID NO: 368893 - RNA, 21 nt, Human
uccgccuuucccagguguccu

SEQ ID NO: 368894 - RNA, 19 nt, Human
uccucagucucccagggua

SEQ ID NO: 368895 - RNA, 25 nt, Human
uccuccagcagcugggagugugggc

SEQ ID NO: 368896 - RNA, 23 nt, Human
uccuugguccuuagcucugggag

SEQ ID NO: 368897 - RNA, 24 nt, Human
uccuuugaagcccagggaaagguc

SEQ ID NO: 368898 - RNA, 23 nt, Human
ucucaggccugaagggcuugggg

SEQ ID NO: 368899 - RNA, 23 nt, Human
ucuuuuaugaugaagacaaaagu

SEQ ID NO: 368900 - RNA, 23 nt, Human
ucuuuucccuuccccgucuucug

SEQ ID NO: 368901 - RNA, 23 nt, Human
ugaaggaggggaggaaguuggag

SEQ ID NO: 368902 - RNA, 24 nt, Human
ugaaggaggggaggaaguuggagg

SEQ ID NO: 368903 - RNA, 26 nt, Human
ugaaggaggggaggaaguuggaggaa

SEQ ID NO: 368904 - RNA, 18 nt, Human
ugaaggggccucccuggg

SEQ ID NO: 368905 - RNA, 24 nt, Human
ugacuuaaggcugaucuggcucug

SEQ ID NO: 368906 - RNA, 23 nt, Human
ugaggagaaccgaauucuggaca

SEQ ID NO: 368907 - RNA, 19 nt, Human
ugcacagccggccccaucc

SEQ ID NO: 368908 - RNA, 19 nt, Human
ugcaggaggcaggggcagg

SEQ ID NO: 368909 - RNA, 23 nt, Human
ugcaggaggcaggggcagggcug

SEQ ID NO: 368910 - RNA, 22 nt, Human
ugccuuuaccuccccuuaguuu

SEQ ID NO: 368911 - RNA, 18 nt, Human
uggaggaaugagaaaaga

SEQ ID NO: 368912 - RNA, 22 nt, Human
uggaguggggccugggacaugg

SEQ ID NO: 368913 - RNA, 23 nt, Human
uggcccggagggagguccugcag

SEQ ID NO: 368914 - RNA, 19 nt, Human
uggcugcagggauagcagg

SEQ ID NO: 368915 - RNA, 24 nt, Human
uggcugggaagguugcagggccca

SEQ ID NO: 368916 - RNA, 18 nt, Human
ugggaagguugcagggcc

SEQ ID NO: 368917 - RNA, 22 nt, Human
uggggaggggcaggaaagaggg

SEQ ID NO: 368918 - RNA, 21 nt, Human
ugggggagagaaucccgauuu

SEQ ID NO: 368919 - RNA, 20 nt, Human
uggggugggcaagcugggcg

SEQ ID NO: 368920 - RNA, 22 nt, Human
ugggugcagguaugauggggag

SEQ ID NO: 368921 - RNA, 24 nt, Human
ugggugcagguaugauggggaggg

SEQ ID NO: 368922 - RNA, 19 nt, Human
uggguuucuuuucccuucc

SEQ ID NO: 368923 - RNA, 19 nt, Human
ugguccccugacccuccag

SEQ ID NO: 368924 - RNA, 23 nt, Human
uggugcuggcugugugcgggugu

SEQ ID NO: 368925 - RNA, 21 nt, Human
ugugcugggaguggcugcagg

SEQ ID NO: 368926 - RNA, 23 nt, Human
uguguuggcgggaccaaggcagg

SEQ ID NO: 368927 - RNA, 23 nt, Human
uguugcuaaaaaaaaaaaaaaaa

SEQ ID NO: 368928 - RNA, 29 nt, Human
uuccugaagaggcagcugaggguguggcc

SEQ ID NO: 368929 - RNA, 18 nt, Human
uugaaggaggggaggaag

SEQ ID NO: 368930 - RNA, 19 nt, Human
uugcaaccucaaaagcugc

SEQ ID NO: 368931 - RNA, 21 nt, Human
uugcagggcccacagcaaacu

SEQ ID NO: 368932 - RNA, 21 nt, Human
uuggaggaaugagaaaagagg

SEQ ID NO: 368933 - RNA, 19 nt, Human
uugguccuuagcucuggga

SEQ ID NO: 368934 - RNA, 21 nt, Human
uuuacaauuucucaccaccca

SEQ ID NO: 368935 - RNA, 21 nt, Human
uuucccagguguccucuucuu

SEQ ID NO: 368936 - RNA, 22 nt, Human
uuuuccucuuuucgauccccgu

SEQ ID NO: 368937 - RNA, 25 nt, Human
aaaaaaaggaagaaauaaccacaaa

SEQ ID NO: 368938 - RNA, 24 nt, Human
aaaaggaagaaauaaccacaaaua

SEQ ID NO: 368939 - RNA, 18 nt, Human
aagaaaaaaaggaagaaa

SEQ ID NO: 368940 - RNA, 21 nt, Human
acccugcagagccggaggagc

SEQ ID NO: 368941 - RNA, 19 nt, Human
aggagggcgcacagcuaaa

SEQ ID NO: 368942 - RNA, 18 nt, Human
caagacgcaagugcaagc

SEQ ID NO: 368943 - RNA, 24 nt, Human
cagcagcagcagacaagacgcaag

SEQ ID NO: 368944 - RNA, 22 nt, Human
cggccuggacuaggggagcugg

SEQ ID NO: 368945 - RNA, 24 nt, Human
gagccggaggagcugcggcccagc

SEQ ID NO: 368946 - RNA, 21 nt, Human
gcccagcugaccgcccgugcc

SEQ ID NO: 368947 - RNA, 18 nt, Human
ucagcagcagcagacaag

SEQ ID NO: 368948 - RNA, 24 nt, Human
ucagcagcagcagacaagacgcaa

SEQ ID NO: 368949 - RNA, 19 nt, Human
ugacccugcagagccggag

SEQ ID NO: 368950 - RNA, 21 nt, Human
ugacuuggcuacaagagacgg

SEQ ID NO: 368951 - RNA, 24 nt, Human
uggcuuacuuaccuuccuccguga

SEQ ID NO: 368952 - RNA, 20 nt, Human
uucagcagcagcagacaaga

SEQ ID NO: 368953 - RNA, 18 nt, Human
aaagauggcccugccucc

SEQ ID NO: 368954 - RNA, 23 nt, Human
caugacaaaugucaguuuccucu

SEQ ID NO: 368955 - RNA, 24 nt, Human
cauuauacauaauuuuuauguaua

SEQ ID NO: 368956 - RNA, 25 nt, Human
ccuccaugccuuguugaacaugaug

SEQ ID NO: 368957 - RNA, 22 nt, Human
cucuccacaaguguccucaaaa

SEQ ID NO: 368958 - RNA, 20 nt, Human
gggaggugaugguuuuuuac

SEQ ID NO: 368959 - RNA, 24 nt, Human
guaagugaacaugacaaaugucag

SEQ ID NO: 368960 - RNA, 24 nt, Human
uacauaauuuuuauguauauauau

SEQ ID NO: 368961 - RNA, 18 nt, Human
uauauauauguauauaua

SEQ ID NO: 368962 - RNA, 18 nt, Human
uauauauguauauauaua

SEQ ID NO: 368963 - RNA, 19 nt, Human
uauauguauauauauaaau

SEQ ID NO: 368964 - RNA, 20 nt, Human
uauguauauauauguauaua

SEQ ID NO: 368965 - RNA, 22 nt, Human
uauguauauauauguauauaua

SEQ ID NO: 368966 - RNA, 18 nt, Human
uguauauauauguauaua

SEQ ID NO: 368967 - RNA, 19 nt, Human
uguauauauauguauauau

SEQ ID NO: 368968 - RNA, 22 nt, Human
uguauauauauguauauauaua

SEQ ID NO: 368969 - RNA, 24 nt, Human
aaagagacagcgacugaugaugag

SEQ ID NO: 368970 - RNA, 20 nt, Human
aaaguuauggggguaguugg

SEQ ID NO: 368971 - RNA, 24 nt, Human
aacaggacgauagaaugcugaaaa

SEQ ID NO: 368972 - RNA, 24 nt, Human
aagacaugcacccucccgcguccc

SEQ ID NO: 368973 - RNA, 19 nt, Human
aagggcugggagcugagac

SEQ ID NO: 368974 - RNA, 25 nt, Human
acaacaggacgauagaaugcugaaa

SEQ ID NO: 368975 - RNA, 22 nt, Human
acccacccgcuccuccccgccg

SEQ ID NO: 368976 - RNA, 24 nt, Human
accugugggaagcagaaaguuaug

SEQ ID NO: 368977 - RNA, 19 nt, Human
agaaaagagacagcgacug

SEQ ID NO: 368978 - RNA, 23 nt, Human
agaaaucacagaaaagagacagc

SEQ ID NO: 368979 - RNA, 20 nt, Human
agaacaggggcaaucaaagc

SEQ ID NO: 368980 - RNA, 22 nt, Human
agacaugcacccucccgcgucc

SEQ ID NO: 368981 - RNA, 24 nt, Human
agaccaggguccaagagcaggugc

SEQ ID NO: 368982 - RNA, 21 nt, Human
agaggaagagggaaggcugag

SEQ ID NO: 368983 - RNA, 21 nt, Human
agagggaaggcugagcuacug

SEQ ID NO: 368984 - RNA, 18 nt, Human
agaucccuuggcccaguc

SEQ ID NO: 368985 - RNA, 18 nt, Human
agccaggggagggggcgg

SEQ ID NO: 368986 - RNA, 21 nt, Human
aggaagagggaaggcugagcu

SEQ ID NO: 368987 - RNA, 22 nt, Human
aggagaccaggguccaagagca

SEQ ID NO: 368988 - RNA, 21 nt, Human
aggccuccaaaguuaaaaaug

SEQ ID NO: 368989 - RNA, 24 nt, Human
agggaaggcugagcuacuggggac

SEQ ID NO: 368990 - RNA, 22 nt, Human
aggggcaaucaaagccagggga

SEQ ID NO: 368991 - RNA, 25 nt, Human
agucccauccccccacccaucccca

SEQ ID NO: 368992 - RNA, 22 nt, Human
augagcugggggagagaagggu

SEQ ID NO: 368993 - RNA, 21 nt, Human
caaacuucuccccucgucucc

SEQ ID NO: 368994 - RNA, 21 nt, Human
cacaagccccucccuccaagg

SEQ ID NO: 368995 - RNA, 20 nt, Human
cacuauauacacacacaagc

SEQ ID NO: 368996 - RNA, 21 nt, Human
cacuauauacacacacaagcc

SEQ ID NO: 368997 - RNA, 21 nt, Human
cacugcccaaauguguccuuu

SEQ ID NO: 368998 - RNA, 18 nt, Human
cagaaaagagacagcgac

SEQ ID NO: 368999 - RNA, 22 nt, Human
cagcauuugcuggcuuguagca

SEQ ID NO: 369000 - RNA, 24 nt, Human
cagcauuugcuggcuuguagcauu

SEQ ID NO: 369001 - RNA, 22 nt, Human
caggacgauagaaugcugaaaa

SEQ ID NO: 369002 - RNA, 20 nt, Human
caggggagaucaacuggacu

SEQ ID NO: 369003 - RNA, 20 nt, Human
caugcacccucccgcguccc

SEQ ID NO: 369004 - RNA, 20 nt, Human
ccaaaguuaaaaaugcccac

SEQ ID NO: 369005 - RNA, 21 nt, Human
cccacccagaucccuuggccc

SEQ ID NO: 369006 - RNA, 19 nt, Human
cccacccgcuccuccccgc

SEQ ID NO: 369007 - RNA, 23 nt, Human
cccacccgcuccuccccgccggg

SEQ ID NO: 369008 - RNA, 19 nt, Human
cccagucccauccccccac

SEQ ID NO: 369009 - RNA, 22 nt, Human
cccauccccccacccaucccca

SEQ ID NO: 369010 - RNA, 21 nt, Human
ccccacccauccccacccccc

SEQ ID NO: 369011 - RNA, 22 nt, Human
ccccacccauccccacccccca

SEQ ID NO: 369012 - RNA, 18 nt, Human
ccccccacccauccccac

SEQ ID NO: 369013 - RNA, 20 nt, Human
ccccccacccauccccaccc

SEQ ID NO: 369014 - RNA, 19 nt, Human
ccccccaucaggcagagau

SEQ ID NO: 369015 - RNA, 24 nt, Human
ccccccaucaggcagagauguggc

SEQ ID NO: 369016 - RNA, 23 nt, Human
cccccucccccaaacacacuaua

SEQ ID NO: 369017 - RNA, 19 nt, Human
ccccucgucuccgagccug

SEQ ID NO: 369018 - RNA, 24 nt, Human
cccgcguccccccucccccaaaca

SEQ ID NO: 369019 - RNA, 22 nt, Human
cccucgucuccgagccuggaga

SEQ ID NO: 369020 - RNA, 20 nt, Human
cccuggggaggggacugggg

SEQ ID NO: 369021 - RNA, 23 nt, Human
ccucccgcguccccccuccccca

SEQ ID NO: 369022 - RNA, 24 nt, Human
ccucccgcguccccccucccccaa

SEQ ID NO: 369023 - RNA, 18 nt, Human
ccucugggacccucgguc

SEQ ID NO: 369024 - RNA, 19 nt, Human
ccucuucgaggguccugcc

SEQ ID NO: 369025 - RNA, 23 nt, Human
ccugcggcuacagccuggagcag

SEQ ID NO: 369026 - RNA, 28 nt, Human
ccuugcgcgcacacccacccgcuccucc

SEQ ID NO: 369027 - RNA, 23 nt, Human
cgagucccaggagaggaggccga

SEQ ID NO: 369028 - RNA, 18 nt, Human
cgccggggcugagcggag

SEQ ID NO: 369029 - RNA, 20 nt, Human
cgccggggcugagcggagcu

SEQ ID NO: 369030 - RNA, 23 nt, Human
cggagaagggaggccgaguccca

SEQ ID NO: 369031 - RNA, 20 nt, Human
cucaaaaguugucugucacc

SEQ ID NO: 369032 - RNA, 19 nt, Human
cuccccaaagcugguucuc

SEQ ID NO: 369033 - RNA, 24 nt, Human
cugaaaccccaaacuucuccccuc

SEQ ID NO: 369034 - RNA, 18 nt, Human
cugcugcccucucaaaag

SEQ ID NO: 369035 - RNA, 20 nt, Human
cuggagcagguccccccagc

SEQ ID NO: 369036 - RNA, 24 nt, Human
cuggagcagguccccccagcgcug

SEQ ID NO: 369037 - RNA, 22 nt, Human
cuggcacugagggcaaaaggaa

SEQ ID NO: 369038 - RNA, 23 nt, Human
cuggcaguggugggcgacuccgc

SEQ ID NO: 369039 - RNA, 18 nt, Human
cuuguagcauugguccuc

SEQ ID NO: 369040 - RNA, 23 nt, Human
gaccaggguccaagagcaggugc

SEQ ID NO: 369041 - RNA, 22 nt, Human
gagaagggaggccgagucccag

SEQ ID NO: 369042 - RNA, 23 nt, Human
gagggucccccagggaggguggg

SEQ ID NO: 369043 - RNA, 22 nt, Human
gaggguccugcccggauuggcu

SEQ ID NO: 369044 - RNA, 20 nt, Human
gaguguccucccaagaaccc

SEQ ID NO: 369045 - RNA, 20 nt, Human
gaguuggggucaccgcaggg

SEQ ID NO: 369046 - RNA, 20 nt, Human
gaguuggggucaccgcaggg

SEQ ID NO: 369047 - RNA, 18 nt, Human
gccggggcugagcggagc

SEQ ID NO: 369048 - RNA, 18 nt, Human
gcuacagccuggagcagg

SEQ ID NO: 369049 - RNA, 23 nt, Human
ggacugggguggaaauuucccca

SEQ ID NO: 369050 - RNA, 18 nt, Human
ggauuggaaggaacggug

SEQ ID NO: 369051 - RNA, 20 nt, Human
ggcacugagggcaaaaggaa

SEQ ID NO: 369052 - RNA, 23 nt, Human
ggcuaagcccugggacugaaacc

SEQ ID NO: 369053 - RNA, 21 nt, Human
gggaagcagaaaguuaugggg

SEQ ID NO: 369054 - RNA, 20 nt, Human
gggaggcucccgagaggaag

SEQ ID NO: 369055 - RNA, 18 nt, Human
ggggaagggagacuuugg

SEQ ID NO: 369056 - RNA, 19 nt, Human
ggggaggggacuggggugg

SEQ ID NO: 369057 - RNA, 20 nt, Human
ggggucaccgcaggggagga

SEQ ID NO: 369058 - RNA, 20 nt, Human
ggggugaagugggggggggg

SEQ ID NO: 369059 - RNA, 21 nt, Human
ggggugguucccuggggaggg

SEQ ID NO: 369060 - RNA, 19 nt, Human
gggugaagugggggggggg

SEQ ID NO: 369061 - RNA, 20 nt, Human
ggguggugggguccugcggc

SEQ ID NO: 369062 - RNA, 20 nt, Human
gguccugcccggauuggcug

SEQ ID NO: 369063 - RNA, 24 nt, Human
gguucugaggcucugggggagagc

SEQ ID NO: 369064 - RNA, 22 nt, Human
gucccauccccccacccauccc

SEQ ID NO: 369065 - RNA, 19 nt, Human
gucccccagggaggguggg

SEQ ID NO: 369066 - RNA, 23 nt, Human
uacacacacaagccccucccucc

SEQ ID NO: 369067 - RNA, 22 nt, Human
uacagccuggagcagguccccc

SEQ ID NO: 369068 - RNA, 19 nt, Human
uagaaugcugaaaaccugu

SEQ ID NO: 369069 - RNA, 25 nt, Human
uauggggguaguugggucauccuag

SEQ ID NO: 369070 - RNA, 19 nt, Human
ucauggcugagggagucug

SEQ ID NO: 369071 - RNA, 19 nt, Human
uccaaaguuaaaaaugccc

SEQ ID NO: 369072 - RNA, 21 nt, Human
ucccauccccccacccauccc

SEQ ID NO: 369073 - RNA, 25 nt, Human
uccccaggauauagacggucaccaa

SEQ ID NO: 369074 - RNA, 23 nt, Human
uccccccucccccaaacacacua

SEQ ID NO: 369075 - RNA, 19 nt, Human
ucccugagggcugggggga

SEQ ID NO: 369076 - RNA, 20 nt, Human
ucccuggggaggggacuggg

SEQ ID NO: 369077 - RNA, 19 nt, Human
uccuccggcuaagcccugg

SEQ ID NO: 369078 - RNA, 26 nt, Human
ucucauggcugagggagucugcugcc

SEQ ID NO: 369079 - RNA, 18 nt, Human
ucuggggggaaaaggaga

SEQ ID NO: 369080 - RNA, 23 nt, Human
ugagacggccucugacagccucc

SEQ ID NO: 369081 - RNA, 24 nt, Human
ugagggcuggggggaagggcuggg

SEQ ID NO: 369082 - RNA, 20 nt, Human
ugauucccggccuccucccc

SEQ ID NO: 369083 - RNA, 20 nt, Human
ugcagccgagucccuagccc

SEQ ID NO: 369084 - RNA, 19 nt, Human
uggaaggaacggugugcgg

SEQ ID NO: 369085 - RNA, 24 nt, Human
uggagggauuggaaggaacggugu

SEQ ID NO: 369086 - RNA, 18 nt, Human
uggcuggcacugagggca

SEQ ID NO: 369087 - RNA, 18 nt, Human
ugggggagagaaggguag

SEQ ID NO: 369088 - RNA, 21 nt, Human
ugggggcaaagccaggcuggg

SEQ ID NO: 369089 - RNA, 21 nt, Human
uggggggggggucacuagggg

SEQ ID NO: 369090 - RNA, 18 nt, Human
ugggggugguucccuggg

SEQ ID NO: 369091 - RNA, 22 nt, Human
uggggugaaguggggggggggu

SEQ ID NO: 369092 - RNA, 19 nt, Human
ugucugaaguugcagguuc

SEQ ID NO: 369093 - RNA, 18 nt, Human
uucccggccuccucccca

SEQ ID NO: 369094 - RNA, 24 nt, Human
uugcgcgcacacccacccgcuccu

SEQ ID NO: 369095 - RNA, 21 nt, Human
uuggcuggcacugagggcaaa

SEQ ID NO: 369096 - RNA, 19 nt, Human
uuucccaagacaugcaccc

SEQ ID NO: 369097 - RNA, 18 nt, Human
aaacuuaaaaaggcagca

SEQ ID NO: 369098 - RNA, 21 nt, Human
aaaggcagcacauucuggagc

SEQ ID NO: 369099 - RNA, 22 nt, Human
aaaguggggaaagggggcaagg

SEQ ID NO: 369100 - RNA, 18 nt, Human
aaccaccccugcuccagg

SEQ ID NO: 369101 - RNA, 20 nt, Human
aaggacccaggaacgaccac

SEQ ID NO: 369102 - RNA, 25 nt, Human
aaggacccaggaacgaccacgaaag

SEQ ID NO: 369103 - RNA, 22 nt, Human
acaaacaaaacuuaaaaaggca

SEQ ID NO: 369104 - RNA, 23 nt, Human
acaauccugggggagugccccag

SEQ ID NO: 369105 - RNA, 26 nt, Human
accuuacccaaaugagaguaaaaccg

SEQ ID NO: 369106 - RNA, 23 nt, Human
acuauugcacaauccugggggag

SEQ ID NO: 369107 - RNA, 21 nt, Human
acuccaaaguggggaaagggg

SEQ ID NO: 369108 - RNA, 22 nt, Human
acucuugauuaggagugggagu

SEQ ID NO: 369109 - RNA, 19 nt, Human
acugagcccuagggauaga

SEQ ID NO: 369110 - RNA, 22 nt, Human
agagaggggcagggguccaggc

SEQ ID NO: 369111 - RNA, 21 nt, Human
agagcuggcaggaggagugug

SEQ ID NO: 369112 - RNA, 20 nt, Human
agaggaaggggcaggauagg

SEQ ID NO: 369113 - RNA, 22 nt, Human
agaggaggauggacagaugggc

SEQ ID NO: 369114 - RNA, 19 nt, Human
agcagcugcgguggcuugg

SEQ ID NO: 369115 - RNA, 19 nt, Human
agccaugugccugguaccc

SEQ ID NO: 369116 - RNA, 23 nt, Human
agccugagcuaaaggaaggggac

SEQ ID NO: 369117 - RNA, 25 nt, Human
agcugugcuggggugggggcugugg

SEQ ID NO: 369118 - RNA, 18 nt, Human
aggaaggcugggaccuuu

SEQ ID NO: 369119 - RNA, 22 nt, Human
aggagaccaaaaggucuggaac

SEQ ID NO: 369120 - RNA, 21 nt, Human
aggagagagggggcugggagc

SEQ ID NO: 369121 - RNA, 25 nt, Human
aggagcugugcuggggugggggcug

SEQ ID NO: 369122 - RNA, 21 nt, Human
aggaggaggaugaggcagagg

SEQ ID NO: 369123 - RNA, 18 nt, Human
aggaggauggacagaugg

SEQ ID NO: 369124 - RNA, 23 nt, Human
aggagugugugugggcaaagguc

SEQ ID NO: 369125 - RNA, 21 nt, Human
aggcagagacacucagagaug

SEQ ID NO: 369126 - RNA, 19 nt, Human
aggcagagagacguggggg

SEQ ID NO: 369127 - RNA, 21 nt, Human
aggcagcagaguggcagcagc

SEQ ID NO: 369128 - RNA, 18 nt, Human
aggcagcucuggugggga

SEQ ID NO: 369129 - RNA, 21 nt, Human
aggcagggugugguacacaca

SEQ ID NO: 369130 - RNA, 18 nt, Human
aggccagcaggacuggag

SEQ ID NO: 369131 - RNA, 24 nt, Human
aggccagcaggacuggaggucagg

SEQ ID NO: 369132 - RNA, 19 nt, Human
aggcccaagagcuaggcag

SEQ ID NO: 369133 - RNA, 20 nt, Human
aggcgcugccugcuggcccu

SEQ ID NO: 369134 - RNA, 20 nt, Human
aguccuuccccuagcagcuu

SEQ ID NO: 369135 - RNA, 19 nt, Human
agugcaaaggaaaggaaga

SEQ ID NO: 369136 - RNA, 23 nt, Human
aguuucuucuguacaggcagcag

SEQ ID NO: 369137 - RNA, 18 nt, Human
caaacagcacuugcaugg

SEQ ID NO: 369138 - RNA, 22 nt, Human
caauccaccagccccaggggac

SEQ ID NO: 369139 - RNA, 21 nt, Human
caauuuucuggggguggaggg

SEQ ID NO: 369140 - RNA, 18 nt, Human
cacagcugagccagagac

SEQ ID NO: 369141 - RNA, 21 nt, Human
caccccugcuccaggcagaga

SEQ ID NO: 369142 - RNA, 22 nt, Human
cagagagacgugggggaggggu

SEQ ID NO: 369143 - RNA, 26 nt, Human
cagaguggcagcagcugcgguggcuu

SEQ ID NO: 369144 - RNA, 20 nt, Human
cagcagcugcgguggcuugg

SEQ ID NO: 369145 - RNA, 21 nt, Human
caggaagggcaaggggagccc

SEQ ID NO: 369146 - RNA, 18 nt, Human
caggcacagaugaggaag

SEQ ID NO: 369147 - RNA, 23 nt, Human
caggcccaagagcuaggcaggug

SEQ ID NO: 369148 - RNA, 19 nt, Human
cauggcccaguccccugca

SEQ ID NO: 369149 - RNA, 19 nt, Human
ccacaaugggcuccacagc

SEQ ID NO: 369150 - RNA, 18 nt, Human
ccacccagagaggggcag

SEQ ID NO: 369151 - RNA, 19 nt, Human
ccagccccagcaguucugc

SEQ ID NO: 369152 - RNA, 20 nt, Human
ccagccccagcaguucugcc

SEQ ID NO: 369153 - RNA, 23 nt, Human
cccaggcugagaaggagugaaac

SEQ ID NO: 369154 - RNA, 22 nt, Human
cccagugguccccgugggagca

SEQ ID NO: 369155 - RNA, 26 nt, Human
ccccaccgccuccacaaugggcucca

SEQ ID NO: 369156 - RNA, 18 nt, Human
ccccagcagccccugcuc

SEQ ID NO: 369157 - RNA, 19 nt, Human
ccccagcagccccugcucu

SEQ ID NO: 369158 - RNA, 19 nt, Human
ccccugaggggcccagugg

SEQ ID NO: 369159 - RNA, 19 nt, Human
ccccugaggggcccagugg

SEQ ID NO: 369160 - RNA, 22 nt, Human
ccccugaggggcccaguggucc

SEQ ID NO: 369161 - RNA, 18 nt, Human
ccccugcuccaggcagag

SEQ ID NO: 369162 - RNA, 21 nt, Human
cccuagcagcuuccccugagg

SEQ ID NO: 369163 - RNA, 21 nt, Human
cccuagggauagaggaagggg

SEQ ID NO: 369164 - RNA, 20 nt, Human
ccggccucaccagccccagc

SEQ ID NO: 369165 - RNA, 20 nt, Human
ccuagcagcuuccccugagg

SEQ ID NO: 369166 - RNA, 21 nt, Human
ccugagcuaaaggaaggggac

SEQ ID NO: 369167 - RNA, 22 nt, Human
ccugggggagugccccagggac

SEQ ID NO: 369168 - RNA, 23 nt, Human
cgaggacccauggcccagucccc

SEQ ID NO: 369169 - RNA, 20 nt, Human
cgaugucacccuugcauggg

SEQ ID NO: 369170 - RNA, 26 nt, Human
cucccccagccaugugccugguaccc

SEQ ID NO: 369171 - RNA, 18 nt, Human
cucccccccaccgccucc

SEQ ID NO: 369172 - RNA, 20 nt, Human
cuccgaggcccuaguccagg

SEQ ID NO: 369173 - RNA, 27 nt, Human
cuggagccacggccaguccuuccccua

SEQ ID NO: 369174 - RNA, 18 nt, Human
cuggggugggggcugugg

SEQ ID NO: 369175 - RNA, 22 nt, Human
cuuccugggugggaccacagcu

SEQ ID NO: 369176 - RNA, 19 nt, Human
gaaagggggcaaggaccca

SEQ ID NO: 369177 - RNA, 23 nt, Human
gagaggggcagggguccaggcgc

SEQ ID NO: 369178 - RNA, 25 nt, Human
gagccacggccaguccuuccccuag

SEQ ID NO: 369179 - RNA, 21 nt, Human
gagccagccucgaccuuaccc

SEQ ID NO: 369180 - RNA, 25 nt, Human
gaggagcugggacucugggcugugg

SEQ ID NO: 369181 - RNA, 23 nt, Human
gaggagcugugcugggguggggg

SEQ ID NO: 369182 - RNA, 19 nt, Human
gaggaggauggacagaugg

SEQ ID NO: 369183 - RNA, 23 nt, Human
gaggagggaguuagaggcagagc

SEQ ID NO: 369184 - RNA, 19 nt, Human
gagggguuggacagacagg

SEQ ID NO: 369185 - RNA, 23 nt, Human
gaguggcagcagcugcgguggga

SEQ ID NO: 369186 - RNA, 20 nt, Human
gagugugaggagggaguuag

SEQ ID NO: 369187 - RNA, 23 nt, Human
gcaaaaagggacacucugacuau

SEQ ID NO: 369188 - RNA, 20 nt, Human
gcagagcacuguucagccag

SEQ ID NO: 369189 - RNA, 20 nt, Human
gccaugcgguagggggaggg

SEQ ID NO: 369190 - RNA, 21 nt, Human
gccaugugccugguaccccug

SEQ ID NO: 369191 - RNA, 23 nt, Human
gcccaaacagcacuugcauggag

SEQ ID NO: 369192 - RNA, 19 nt, Human
gcccaggcugagaaggagu

SEQ ID NO: 369193 - RNA, 20 nt, Human
gcuggggugggggcuguggg

SEQ ID NO: 369194 - RNA, 19 nt, Human
gcuucuccacccagagagg

SEQ ID NO: 369195 - RNA, 18 nt, Human
ggaaguaagagcaggcca

SEQ ID NO: 369196 - RNA, 22 nt, Human
ggacagacaggcacagaugagg

SEQ ID NO: 369197 - RNA, 21 nt, Human
ggacuggaggucaggcccaag

SEQ ID NO: 369198 - RNA, 18 nt, Human
ggagagagggggcuggga

SEQ ID NO: 369199 - RNA, 23 nt, Human
ggagcccccagcagccccugcuc

SEQ ID NO: 369200 - RNA, 21 nt, Human
ggaggaggaugaggcagaggg

SEQ ID NO: 369201 - RNA, 18 nt, Human
ggcaggauagggauagug

SEQ ID NO: 369202 - RNA, 20 nt, Human
ggcugagaaggagugaaacc

SEQ ID NO: 369203 - RNA, 26 nt, Human
gggacacucugacuauugcacaaucc

SEQ ID NO: 369204 - RNA, 19 nt, Human
gggacaggggauccucagg

SEQ ID NO: 369205 - RNA, 23 nt, Human
gggacaggggauccucagggaag

SEQ ID NO: 369206 - RNA, 25 nt, Human
gggagccugagcuaaaggaagggga

SEQ ID NO: 369207 - RNA, 24 nt, Human
gggaggggcagggccaauccgggu

SEQ ID NO: 369208 - RNA, 23 nt, Human
gggcaaggggagcccccagcagc

SEQ ID NO: 369209 - RNA, 22 nt, Human
gggccaaacccaggguggggga

SEQ ID NO: 369210 - RNA, 19 nt, Human
ggggcagggccaauccggg

SEQ ID NO: 369211 - RNA, 18 nt, Human
ggggcccaggauucugcc

SEQ ID NO: 369212 - RNA, 21 nt, Human
ggucugaaugaggaggaggau

SEQ ID NO: 369213 - RNA, 20 nt, Human
ggugccaagaggccagcauc

SEQ ID NO: 369214 - RNA, 21 nt, Human
gucacccuugcauggugacuc

SEQ ID NO: 369215 - RNA, 21 nt, Human
guggagggaggcuggguuugc

SEQ ID NO: 369216 - RNA, 23 nt, Human
guggagggaggcuggguuugcaa

SEQ ID NO: 369217 - RNA, 21 nt, Human
gugugggcaaaggucucuggg

SEQ ID NO: 369218 - RNA, 18 nt, Human
uaaaggaaggggaccgaa

SEQ ID NO: 369219 - RNA, 22 nt, Human
uaaaggaaggggaccgaagggg

SEQ ID NO: 369220 - RNA, 23 nt, Human
uaaaggaagggguagggagccug

SEQ ID NO: 369221 - RNA, 20 nt, Human
uaagagcccagcaggcagag

SEQ ID NO: 369222 - RNA, 18 nt, Human
uaaggacagguugggugg

SEQ ID NO: 369223 - RNA, 19 nt, Human
uaauucuggagugugagga

SEQ ID NO: 369224 - RNA, 19 nt, Human
uagaaaccaccccugcucc

SEQ ID NO: 369225 - RNA, 23 nt, Human
uagcagcuuccccugaggggccc

SEQ ID NO: 369226 - RNA, 22 nt, Human
uaggagugugaacaaacaaaac

SEQ ID NO: 369227 - RNA, 24 nt, Human
ucagcaagugggaagagagacugg

SEQ ID NO: 369228 - RNA, 26 nt, Human
uccaaaguggggaaagggggcaagga

SEQ ID NO: 369229 - RNA, 23 nt, Human
uccacccagagaggggcaggggu

SEQ ID NO: 369230 - RNA, 22 nt, Human
uccaggcagagacacucagaga

SEQ ID NO: 369231 - RNA, 20 nt, Human
ucccccagccaugugccugg

SEQ ID NO: 369232 - RNA, 21 nt, Human
ucccccccaccgccuccacaa

SEQ ID NO: 369233 - RNA, 19 nt, Human
ucucugggggcccaggauu

SEQ ID NO: 369234 - RNA, 21 nt, Human
ucuugauuaggagugggaguu

SEQ ID NO: 369235 - RNA, 18 nt, Human
ugacugaggagcugggac

SEQ ID NO: 369236 - RNA, 22 nt, Human
ugagcuaaaggaaggggaccga

SEQ ID NO: 369237 - RNA, 21 nt, Human
ugaggaaagugacugaggagc

SEQ ID NO: 369238 - RNA, 19 nt, Human
ugaggagcugggacucugg

SEQ ID NO: 369239 - RNA, 23 nt, Human
ugaggagcugggacucugggcug

SEQ ID NO: 369240 - RNA, 20 nt, Human
ugaggcagagggaggagccu

SEQ ID NO: 369241 - RNA, 25 nt, Human
ugcaaaggaaaggaagaaggaaggg

SEQ ID NO: 369242 - RNA, 18 nt, Human
ugcccaaacagcacuugc

SEQ ID NO: 369243 - RNA, 24 nt, Human
ugccugguaccccugguuuguccc

SEQ ID NO: 369244 - RNA, 18 nt, Human
ugcucugguggaagaguc

SEQ ID NO: 369245 - RNA, 19 nt, Human
uggagaggaggauggacag

SEQ ID NO: 369246 - RNA, 24 nt, Human
ugggaaacugagcccuagggauag

SEQ ID NO: 369247 - RNA, 21 nt, Human
ugggagcacaguucgaaaagc

SEQ ID NO: 369248 - RNA, 25 nt, Human
ugggagcccaggcugagaaggagug

SEQ ID NO: 369249 - RNA, 22 nt, Human
ugggggaaguaagagcaggcca

SEQ ID NO: 369250 - RNA, 22 nt, Human
ugggggcccaggauucugccca

SEQ ID NO: 369251 - RNA, 18 nt, Human
uggucugaaugaggagga

SEQ ID NO: 369252 - RNA, 22 nt, Human
ugucacagucuucgagcaacag

SEQ ID NO: 369253 - RNA, 20 nt, Human
ugugcaaacaaucauauaua

SEQ ID NO: 369254 - RNA, 19 nt, Human
ugugcuggggugggggcug

SEQ ID NO: 369255 - RNA, 19 nt, Human
ugugggcuaaaggaagggg

SEQ ID NO: 369256 - RNA, 24 nt, Human
uucugcccaauccaccagccccag

SEQ ID NO: 369257 - RNA, 19 nt, Human
caaggggaccggcgguugg

SEQ ID NO: 369258 - RNA, 20 nt, Human
cacagagaguuuuacaugga

SEQ ID NO: 369259 - RNA, 23 nt, Human
uccguggcaugaaucugucgccc

SEQ ID NO: 369260 - RNA, 22 nt, Human
ugcaucagguuucagagugaca

SEQ ID NO: 369261 - RNA, 21 nt, Human
uuuauccguggcaugaaucug

SEQ ID NO: 369262 - RNA, 24 nt, Human
uuuuuuuuuuuuuucuucggauuu

SEQ ID NO: 369263 - RNA, 22 nt, Human
uuuuuuuuuuuuuuuucuucgg

SEQ ID NO: 369264 - RNA, 20 nt, Human
gcggcggcggcggugggcga

SEQ ID NO: 369265 - RNA, 25 nt, Human
aaaaaucauuugucaagaaagggga

SEQ ID NO: 369266 - RNA, 20 nt, Human
aaaggugggguggaaugcug

SEQ ID NO: 369267 - RNA, 19 nt, Human
acgggucagcggcgcgacu

SEQ ID NO: 369268 - RNA, 18 nt, Human
agaaggaaaaaggugggg

SEQ ID NO: 369269 - RNA, 21 nt, Human
agccaaacccuccccgugcug

SEQ ID NO: 369270 - RNA, 18 nt, Human
aggaaaaagguggggugg

SEQ ID NO: 369271 - RNA, 18 nt, Human
aggaaccagcugaauuuc

SEQ ID NO: 369272 - RNA, 18 nt, Human
aggaggagggaggcagag

SEQ ID NO: 369273 - RNA, 18 nt, Human
aggcagagucuccuuucu

SEQ ID NO: 369274 - RNA, 20 nt, Human
aggugggguggaaugcuggc

SEQ ID NO: 369275 - RNA, 22 nt, Human
aggugggguggaaugcuggcuc

SEQ ID NO: 369276 - RNA, 22 nt, Human
aguaauuggggagaaggaaaaa

SEQ ID NO: 369277 - RNA, 20 nt, Human
caaaaaucaaaugaaaacaa

SEQ ID NO: 369278 - RNA, 23 nt, Human
caaaaauuccucuagacucugca

SEQ ID NO: 369279 - RNA, 26 nt, Human
caaagggacacccgguaggaugaggc

SEQ ID NO: 369280 - RNA, 20 nt, Human
caagcaggugucccaggaac

SEQ ID NO: 369281 - RNA, 19 nt, Human
cacuggguggcagcagggc

SEQ ID NO: 369282 - RNA, 20 nt, Human
cccagcccuucuucccgucc

SEQ ID NO: 369283 - RNA, 27 nt, Human
ccuaaagucagggaagaaccggggucc

SEQ ID NO: 369284 - RNA, 18 nt, Human
ccuggcucagggaugggc

SEQ ID NO: 369285 - RNA, 23 nt, Human
cgaaccgggagcgcagcagagaa

SEQ ID NO: 369286 - RNA, 19 nt, Human
cugccacaggucucagggu

SEQ ID NO: 369287 - RNA, 18 nt, Human
cuuaacaaaaaucaaaug

SEQ ID NO: 369288 - RNA, 23 nt, Human
cuucccguccagcgaaccgggag

SEQ ID NO: 369289 - RNA, 18 nt, Human
gagagaggaccacagacc

SEQ ID NO: 369290 - RNA, 19 nt, Human
gcacucagugaggaggagg

SEQ ID NO: 369291 - RNA, 20 nt, Human
gcaggguggcaaagggacac

SEQ ID NO: 369292 - RNA, 18 nt, Human
gcgggaggacgggaacac

SEQ ID NO: 369293 - RNA, 22 nt, Human
gcugaggccacugccaugcccu

SEQ ID NO: 369294 - RNA, 24 nt, Human
ggagggaggcagagucuccuuucu

SEQ ID NO: 369295 - RNA, 24 nt, Human
ggggaugugggugcugauuuguac

SEQ ID NO: 369296 - RNA, 18 nt, Human
gguagccaaacccucccc

SEQ ID NO: 369297 - RNA, 21 nt, Human
guggaaugcuggcucggcccu

SEQ ID NO: 369298 - RNA, 21 nt, Human
uagacucugcaauacugcacu

SEQ ID NO: 369299 - RNA, 19 nt, Human
uagccaaacccuccccgug

SEQ ID NO: 369300 - RNA, 21 nt, Human
uagccaaacccuccccgugcu

SEQ ID NO: 369301 - RNA, 24 nt, Human
uagccaaacccuccccgugcugcc

SEQ ID NO: 369302 - RNA, 24 nt, Human
ucaagaaaggggaugugggugcug

SEQ ID NO: 369303 - RNA, 22 nt, Human
ucacaugggggaggaagggagg

SEQ ID NO: 369304 - RNA, 23 nt, Human
ucacaugggggaggaagggaggg

SEQ ID NO: 369305 - RNA, 24 nt, Human
ucagcggcgcgacuugggguuccu

SEQ ID NO: 369306 - RNA, 23 nt, Human
ucagggaugggcagggguagcca

SEQ ID NO: 369307 - RNA, 22 nt, Human
ucccaggcaggguggcaaaggg

SEQ ID NO: 369308 - RNA, 27 nt, Human
ucccaugauccuggcauggugcagguu

SEQ ID NO: 369309 - RNA, 18 nt, Human
uccccgugcugcccaguu

SEQ ID NO: 369310 - RNA, 21 nt, Human
ucugaaaguguuuccuuacaa

SEQ ID NO: 369311 - RNA, 23 nt, Human
ugccaugcccuggauguaacaac

SEQ ID NO: 369312 - RNA, 20 nt, Human
uggaaugcuggcucggcccu

SEQ ID NO: 369313 - RNA, 24 nt, Human
uggaaugcuggcucggcccugcca

SEQ ID NO: 369314 - RNA, 18 nt, Human
uggcucagggaugggcag

SEQ ID NO: 369315 - RNA, 21 nt, Human
ugggcagggguagccaaaccc

SEQ ID NO: 369316 - RNA, 19 nt, Human
uggggagaaggaaaaaggu

SEQ ID NO: 369317 - RNA, 21 nt, Human
uggggagaaggaaaaaggugg

SEQ ID NO: 369318 - RNA, 22 nt, Human
ugggguggaaugcuggcucggc

SEQ ID NO: 369319 - RNA, 20 nt, Human
uuaaggcugaggccacugcc

SEQ ID NO: 369320 - RNA, 23 nt, Human
uugucaagaaaggggaugugggu

SEQ ID NO: 369321 - RNA, 23 nt, Human
aaaaacacaaauuccuuucaguc

SEQ ID NO: 369322 - RNA, 23 nt, Human
aaagcaaaaacacaaauuccuuu

SEQ ID NO: 369323 - RNA, 22 nt, Human
aaaggcccucgccccgcggcug

SEQ ID NO: 369324 - RNA, 22 nt, Human
agcaggccccggcagagcagca

SEQ ID NO: 369325 - RNA, 19 nt, Human
agcucgggggcggcggcgg

SEQ ID NO: 369326 - RNA, 18 nt, Human
aggggaaggggggggguc

SEQ ID NO: 369327 - RNA, 31 nt, Human
aggggcaggaugggggcucaccggggcuggg

SEQ ID NO: 369328 - RNA, 24 nt, Human
aggggcgcgggggagcucgggggc

SEQ ID NO: 369329 - RNA, 22 nt, Human
cacccuccaguccacugaggcu

SEQ ID NO: 369330 - RNA, 20 nt, Human
cagcaaaggcccucgccccg

SEQ ID NO: 369331 - RNA, 21 nt, Human
ccagggucccgagacaggcag

SEQ ID NO: 369332 - RNA, 18 nt, Human
ccaguaccuggugggcag

SEQ ID NO: 369333 - RNA, 21 nt, Human
ccaguccacugaggcuggggg

SEQ ID NO: 369334 - RNA, 29 nt, Human
cccccaguaccuggugggcaggggcuggg

SEQ ID NO: 369335 - RNA, 27 nt, Human
ccgcccgcgggcaggggcgcgggggag

SEQ ID NO: 369336 - RNA, 23 nt, Human
ccggcagagcagcaaaggcccuc

SEQ ID NO: 369337 - RNA, 25 nt, Human
ccggggcuggggcugauuucugggc

SEQ ID NO: 369338 - RNA, 22 nt, Human
cgcgggcaggggcgcgggggag

SEQ ID NO: 369339 - RNA, 23 nt, Human
cgcugcccaccggccgcccgcgg

SEQ ID NO: 369340 - RNA, 22 nt, Human
cgggggcggcggcggcgcuggg

SEQ ID NO: 369341 - RNA, 25 nt, Human
cucucucucugucucugucucugac

SEQ ID NO: 369342 - RNA, 19 nt, Human
cugggcacccggcgguggc

SEQ ID NO: 369343 - RNA, 21 nt, Human
cugucucugucucugacucuc

SEQ ID NO: 369344 - RNA, 21 nt, Human
gaaaaaaagcaaaaacacaaa

SEQ ID NO: 369345 - RNA, 20 nt, Human
gcagagcagcaaaggcccuc

SEQ ID NO: 369346 - RNA, 21 nt, Human
gcagagcagcaaaggcccucg

SEQ ID NO: 369347 - RNA, 18 nt, Human
gcaggaugggggcucacc

SEQ ID NO: 369348 - RNA, 23 nt, Human
gcgcugggcacccggcgguggcu

SEQ ID NO: 369349 - RNA, 18 nt, Human
gcugccacaggcccccag

SEQ ID NO: 369350 - RNA, 20 nt, Human
gcugggggagcucggggcag

SEQ ID NO: 369351 - RNA, 18 nt, Human
ggaggggaaggggggggg

SEQ ID NO: 369352 - RNA, 21 nt, Human
ggcaggaugggggcucaccgg

SEQ ID NO: 369353 - RNA, 18 nt, Human
ggcaggggcaggaugggg

SEQ ID NO: 369354 - RNA, 21 nt, Human
ggcgcgggggagcucgggggc

SEQ ID NO: 369355 - RNA, 21 nt, Human
ggcggcggcggcgcugggcac

SEQ ID NO: 369356 - RNA, 21 nt, Human
ggcugggggagcucggggcag

SEQ ID NO: 369357 - RNA, 21 nt, Human
gggcaggggcaggaugggggc

SEQ ID NO: 369358 - RNA, 22 nt, Human
gggcuggggcugauuucugggc

SEQ ID NO: 369359 - RNA, 22 nt, Human
ggggaggggaaggggggggguc

SEQ ID NO: 369360 - RNA, 22 nt, Human
ggggcggcggcggcgcugggca

SEQ ID NO: 369361 - RNA, 21 nt, Human
ggggcuggggcugauuucugg

SEQ ID NO: 369362 - RNA, 20 nt, Human
gggggcggcggcggcgcugg

SEQ ID NO: 369363 - RNA, 21 nt, Human
gggggcggcggcggcgcuggg

SEQ ID NO: 369364 - RNA, 22 nt, Human
gggggcucaccggggcuggggc

SEQ ID NO: 369365 - RNA, 18 nt, Human
guggagcuggagaucuuu

SEQ ID NO: 369366 - RNA, 19 nt, Human
uaccuggugggcaggggca

SEQ ID NO: 369367 - RNA, 21 nt, Human
uagagcgcgucccaaggggga

SEQ ID NO: 369368 - RNA, 24 nt, Human
ucagcaggccccggcagagcagca

SEQ ID NO: 369369 - RNA, 22 nt, Human
uccacugaggcugggggagcuc

SEQ ID NO: 369370 - RNA, 21 nt, Human
ucgcucgcucucucucugucu

SEQ ID NO: 369371 - RNA, 23 nt, Human
ucgcucgcucucucucugucucu

SEQ ID NO: 369372 - RNA, 20 nt, Human
ucgggggcggcggcggcgcu

SEQ ID NO: 369373 - RNA, 18 nt, Human
ucucucucugugucucuu

SEQ ID NO: 369374 - RNA, 20 nt, Human
ucucugguauuaaguggaac

SEQ ID NO: 369375 - RNA, 23 nt, Human
ucucugucucucucugugucucu

SEQ ID NO: 369376 - RNA, 20 nt, Human
ucugucucucucugugucuc

SEQ ID NO: 369377 - RNA, 20 nt, Human
ucugucucugacucucucuc

SEQ ID NO: 369378 - RNA, 22 nt, Human
ucugucucugucucugacucuc

SEQ ID NO: 369379 - RNA, 19 nt, Human
ugacucucucucacaucuc

SEQ ID NO: 369380 - RNA, 19 nt, Human
ugccacaggcccccaguac

SEQ ID NO: 369381 - RNA, 19 nt, Human
ugcgggaggggucccaggg

SEQ ID NO: 369382 - RNA, 18 nt, Human
ugcugccacaggccccca

SEQ ID NO: 369383 - RNA, 20 nt, Human
uggaaaaaaagcaaaaacac

SEQ ID NO: 369384 - RNA, 26 nt, Human
uggaaaaaaagcaaaaacacaaauuc

SEQ ID NO: 369385 - RNA, 18 nt, Human
ugggcaggggcaggaugg

SEQ ID NO: 369386 - RNA, 24 nt, Human
ugggcaggggcaggaugggggcuc

SEQ ID NO: 369387 - RNA, 21 nt, Human
ugggggcucaccggggcuggg

SEQ ID NO: 369388 - RNA, 25 nt, Human
ugucucugucucugacucucucuca

SEQ ID NO: 369389 - RNA, 23 nt, Human
uguuuuauugcaauuauuuagag

SEQ ID NO: 369390 - RNA, 19 nt, Human
uugcugccacaggccccca

SEQ ID NO: 369391 - RNA, 19 nt, Human
uuuuuggaaaaaaagcaaa

SEQ ID NO: 369392 - RNA, 23 nt, Human
aaacccagacccaaggaucagaa

SEQ ID NO: 369393 - RNA, 23 nt, Human
aaacccagacccaaggaucagaa

SEQ ID NO: 369394 - RNA, 24 nt, Human
aacccaggcccuucuggccccaug

SEQ ID NO: 369395 - RNA, 21 nt, Human
aagcaggaaguggaggcagag

SEQ ID NO: 369396 - RNA, 21 nt, Human
aagcaggaaguggaggcagag

SEQ ID NO: 369397 - RNA, 20 nt, Human
aagcuggcauccacugaaga

SEQ ID NO: 369398 - RNA, 20 nt, Human
aaggccccugugaggaccag

SEQ ID NO: 369399 - RNA, 22 nt, Human
acagggcagcaaagcccaaggg

SEQ ID NO: 369400 - RNA, 22 nt, Human
acagggcagcaaagcccaaggg

SEQ ID NO: 369401 - RNA, 22 nt, Human
acccaacagggcagcaaagccc

SEQ ID NO: 369402 - RNA, 22 nt, Human
acccaacagggcagcaaagccc

SEQ ID NO: 369403 - RNA, 21 nt, Human
acccaagucucugggccuagc

SEQ ID NO: 369404 - RNA, 20 nt, Human
accugccacccugucagccc

SEQ ID NO: 369405 - RNA, 20 nt, Human
accugccacccugucagccc

SEQ ID NO: 369406 - RNA, 21 nt, Human
agaugcuggguuccuucucug

SEQ ID NO: 369407 - RNA, 21 nt, Human
caaaaaacccagacccaagga

SEQ ID NO: 369408 - RNA, 21 nt, Human
caaaaaacccagacccaagga

SEQ ID NO: 369409 - RNA, 22 nt, Human
caaaaaacccagacccaaggau

SEQ ID NO: 369410 - RNA, 22 nt, Human
caaaaaacccagacccaaggau

SEQ ID NO: 369411 - RNA, 19 nt, Human
caaaacacagggcaggugc

SEQ ID NO: 369412 - RNA, 19 nt, Human
caaaacacagggcaggugc

SEQ ID NO: 369413 - RNA, 22 nt, Human
caacaggccugaacugaagccu

SEQ ID NO: 369414 - RNA, 22 nt, Human
caacaggccugaacugaagccu

SEQ ID NO: 369415 - RNA, 20 nt, Human
caacccaagucucugggccu

SEQ ID NO: 369416 - RNA, 23 nt, Human
caagucucugggccuagcccgua

SEQ ID NO: 369417 - RNA, 22 nt, Human
caauuacuacuucaacccaggc

SEQ ID NO: 369418 - RNA, 21 nt, Human
cacagggcaggugcugauccc

SEQ ID NO: 369419 - RNA, 21 nt, Human
cacagggcaggugcugauccc

SEQ ID NO: 369420 - RNA, 19 nt, Human
cacagguuggggagggggg

SEQ ID NO: 369421 - RNA, 25 nt, Human
caccuccugcuccuccccgaggccu

SEQ ID NO: 369422 - RNA, 21 nt, Human
caccugccacccugucagccc

SEQ ID NO: 369423 - RNA, 21 nt, Human
cacugccaggucccccugccc

SEQ ID NO: 369424 - RNA, 23 nt, Human
cacugccaggucccccugcccac

SEQ ID NO: 369425 - RNA, 27 nt, Human
cagagcagcagaucccagggugacccc

SEQ ID NO: 369426 - RNA, 27 nt, Human
cagagcagcagaucccagggugacccc

SEQ ID NO: 369427 - RNA, 19 nt, Human
cagaucccagggugacccc

SEQ ID NO: 369428 - RNA, 19 nt, Human
cagaucccagggugacccc

SEQ ID NO: 369429 - RNA, 24 nt, Human
cagcaaagcccaagggugaggccu

SEQ ID NO: 369430 - RNA, 24 nt, Human
cagcaaagcccaagggugaggccu

SEQ ID NO: 369431 - RNA, 23 nt, Human
cagcaacccaagucucugggccu

SEQ ID NO: 369432 - RNA, 19 nt, Human
cagccccugcuuagccagg

SEQ ID NO: 369433 - RNA, 21 nt, Human
cagccccugcuuagccaggaa

SEQ ID NO: 369434 - RNA, 18 nt, Human
caggaaguggaggcagag

SEQ ID NO: 369435 - RNA, 18 nt, Human
caggaaguggaggcagag

SEQ ID NO: 369436 - RNA, 22 nt, Human
caggucccccugcccacucuuc

SEQ ID NO: 369437 - RNA, 21 nt, Human
cagugcuggggagggaguugg

SEQ ID NO: 369438 - RNA, 18 nt, Human
caguuaagcaacaggccu

SEQ ID NO: 369439 - RNA, 18 nt, Human
ccaaggaucagaaagguc

SEQ ID NO: 369440 - RNA, 23 nt, Human
ccaauaccuggcagcaaagggaa

SEQ ID NO: 369441 - RNA, 23 nt, Human
ccaauaccuggcagcaaagggaa

SEQ ID NO: 369442 - RNA, 19 nt, Human
ccacagggauuccaccucc

SEQ ID NO: 369443 - RNA, 23 nt, Human
ccaccucccaccccaguuccucu

SEQ ID NO: 369444 - RNA, 23 nt, Human
ccacuucccaccccaguuccucu

SEQ ID NO: 369445 - RNA, 19 nt, Human
cccaaggaucagaaagguc

SEQ ID NO: 369446 - RNA, 23 nt, Human
cccacugcccuaaaaaaauggac

SEQ ID NO: 369447 - RNA, 23 nt, Human
cccacugcccuaaaaaaauggac

SEQ ID NO: 369448 - RNA, 20 nt, Human
cccagaggccacuauguccc

SEQ ID NO: 369449 - RNA, 24 nt, Human
cccagaggccacuauguccccucc

SEQ ID NO: 369450 - RNA, 20 nt, Human
cccaguuccucuaagggcca

SEQ ID NO: 369451 - RNA, 20 nt, Human
cccaguuccucuaagggcca

SEQ ID NO: 369452 - RNA, 22 nt, Human
ccccagagcaauggagcagugg

SEQ ID NO: 369453 - RNA, 22 nt, Human
ccccagagcaauggagcagugg

SEQ ID NO: 369454 - RNA, 21 nt, Human
ccccaguuaagcaacaggccu

SEQ ID NO: 369455 - RNA, 20 nt, Human
ccccaguuccucuaagggcc

SEQ ID NO: 369456 - RNA, 20 nt, Human
ccccaguuccucuaagggcc

SEQ ID NO: 369457 - RNA, 19 nt, Human
cccggcaccgcagcggccg

SEQ ID NO: 369458 - RNA, 20 nt, Human
cccuaaaaaaauggacuaug

SEQ ID NO: 369459 - RNA, 20 nt, Human
cccuaaaaaaauggacuaug

SEQ ID NO: 369460 - RNA, 22 nt, Human
cccuccucaaaaaacccagacc

SEQ ID NO: 369461 - RNA, 19 nt, Human
cccugagaugauggguucu

SEQ ID NO: 369462 - RNA, 20 nt, Human
cccuuccucaaaaaacccaa

SEQ ID NO: 369463 - RNA, 18 nt, Human
ccgccugcccagccgccc

SEQ ID NO: 369464 - RNA, 22 nt, Human
ccgccugcccagccgcccuccc

SEQ ID NO: 369465 - RNA, 21 nt, Human
ccucaaaaaacccagacccaa

SEQ ID NO: 369466 - RNA, 21 nt, Human
ccucaaaaaacccagacccaa

SEQ ID NO: 369467 - RNA, 24 nt, Human
ccucacggagccucacugccagga

SEQ ID NO: 369468 - RNA, 20 nt, Human
ccugcuuagccaggcauccc

SEQ ID NO: 369469 - RNA, 24 nt, Human
ccuggcccagccucuuggccuugg

SEQ ID NO: 369470 - RNA, 24 nt, Human
ccuggcccagccucuuggccuugg

SEQ ID NO: 369471 - RNA, 25 nt, Human
ccuggcccagccucuuggccuuggu

SEQ ID NO: 369472 - RNA, 25 nt, Human
ccuggcccagccucuuggccuuggu

SEQ ID NO: 369473 - RNA, 20 nt, Human
ccuuccucaaaaaacccaga

SEQ ID NO: 369474 - RNA, 20 nt, Human
cgaggacacguacacugcca

SEQ ID NO: 369475 - RNA, 18 nt, Human
cucaaaaaacccagaccc

SEQ ID NO: 369476 - RNA, 18 nt, Human
cucaaaaaacccagaccc

SEQ ID NO: 369477 - RNA, 20 nt, Human
cucacugccaggacaccacu

SEQ ID NO: 369478 - RNA, 21 nt, Human
cuccucaaaaaacccagaccc

SEQ ID NO: 369479 - RNA, 24 nt, Human
cuccucaaaaaacccagacccaag

SEQ ID NO: 369480 - RNA, 18 nt, Human
cucuaagggccagccccc

SEQ ID NO: 369481 - RNA, 21 nt, Human
cugccaggacaccacugaccc

SEQ ID NO: 369482 - RNA, 20 nt, Human
cuuagccaggcaucccagcc

SEQ ID NO: 369483 - RNA, 21 nt, Human
cuuggccuuggucuuggaaaa

SEQ ID NO: 369484 - RNA, 21 nt, Human
cuuggccuuggucuuggaaaa

SEQ ID NO: 369485 - RNA, 22 nt, Human
gaaggcuggcauccacugaaga

SEQ ID NO: 369486 - RNA, 18 nt, Human
gacauggcagcccagagg

SEQ ID NO: 369487 - RNA, 20 nt, Human
gacuauggguagcugaccca

SEQ ID NO: 369488 - RNA, 20 nt, Human
gacuauggguagcugaccca

SEQ ID NO: 369489 - RNA, 18 nt, Human
gaguuggggcagggaagg

SEQ ID NO: 369490 - RNA, 18 nt, Human
gcagcccagaggccacua

SEQ ID NO: 369491 - RNA, 18 nt, Human
gcagcccagaggccacua

SEQ ID NO: 369492 - RNA, 24 nt, Human
gccggcccgcguccgcccguccgc

SEQ ID NO: 369493 - RNA, 24 nt, Human
gcuggguuccuucucuguuugggg

SEQ ID NO: 369494 - RNA, 24 nt, Human
ggagccucacugccaggacaccac

SEQ ID NO: 369495 - RNA, 24 nt, Human
ggagcuucacugccaggacaccac

SEQ ID NO: 369496 - RNA, 23 nt, Human
ggagggaguuggggcagggaagg

SEQ ID NO: 369497 - RNA, 20 nt, Human
ggccugaacugaagccuggc

SEQ ID NO: 369498 - RNA, 20 nt, Human
ggccugaacugaagccuggc

SEQ ID NO: 369499 - RNA, 22 nt, Human
gggaaggggcuaaagcaggaag

SEQ ID NO: 369500 - RNA, 22 nt, Human
gggaaggggcuaaagcaggaag

SEQ ID NO: 369501 - RNA, 18 nt, Human
gggagcacuucccacagg

SEQ ID NO: 369502 - RNA, 18 nt, Human
ggggaccagcaacccaag

SEQ ID NO: 369503 - RNA, 24 nt, Human
gguagcugacccaacagggcagca

SEQ ID NO: 369504 - RNA, 22 nt, Human
ggucuuggaaaaggaggaaaua

SEQ ID NO: 369505 - RNA, 22 nt, Human
ggucuuggaaaaggaggaaaua

SEQ ID NO: 369506 - RNA, 22 nt, Human
gguuaggagcagggagguggug

SEQ ID NO: 369507 - RNA, 21 nt, Human
guggcagggguuaggagcagg

SEQ ID NO: 369508 - RNA, 18 nt, Human
uagaaagucaccugccac

SEQ ID NO: 369509 - RNA, 18 nt, Human
uagaaagucaccugccac

SEQ ID NO: 369510 - RNA, 19 nt, Human
uagcugacccaacagggca

SEQ ID NO: 369511 - RNA, 19 nt, Human
uagcugacccaacagggca

SEQ ID NO: 369512 - RNA, 23 nt, Human
uagguucaagguacaaaacacag

SEQ ID NO: 369513 - RNA, 23 nt, Human
uagguucaagguacaaaacacag

SEQ ID NO: 369514 - RNA, 19 nt, Human
ucaaaaaacccagacccaa

SEQ ID NO: 369515 - RNA, 19 nt, Human
ucaaaaaacccagacccaa

SEQ ID NO: 369516 - RNA, 22 nt, Human
ucacggagcuucacugccagga

SEQ ID NO: 369517 - RNA, 19 nt, Human
ucagccccugcuuagccag

SEQ ID NO: 369518 - RNA, 19 nt, Human
ucagccccugcuuagccag

SEQ ID NO: 369519 - RNA, 22 nt, Human
ucagccccugcuuagccaggca

SEQ ID NO: 369520 - RNA, 21 nt, Human
ucccacugcccuaaaaaaaug

SEQ ID NO: 369521 - RNA, 21 nt, Human
ucccacugcccuaaaaaaaug

SEQ ID NO: 369522 - RNA, 24 nt, Human
ucccuagaaagucaccugccaccc

SEQ ID NO: 369523 - RNA, 24 nt, Human
ucccuagaaagucaccugccaccc

SEQ ID NO: 369524 - RNA, 19 nt, Human
uccugagccagaguagagg

SEQ ID NO: 369525 - RNA, 19 nt, Human
ucuagacuuagacccagag

SEQ ID NO: 369526 - RNA, 21 nt, Human
ugaaacagaaaguggcagggg

SEQ ID NO: 369527 - RNA, 19 nt, Human
ugacauggcagcccagagg

SEQ ID NO: 369528 - RNA, 18 nt, Human
ugacccaacagggcagca

SEQ ID NO: 369529 - RNA, 18 nt, Human
ugacccaacagggcagca

SEQ ID NO: 369530 - RNA, 19 nt, Human
ugacccaacagggcagcaa

SEQ ID NO: 369531 - RNA, 19 nt, Human
ugacccaacagggcagcaa

SEQ ID NO: 369532 - RNA, 22 nt, Human
ugacccagugcuggggagggag

SEQ ID NO: 369533 - RNA, 20 nt, Human
ugaccccaguuaagcaacag

SEQ ID NO: 369534 - RNA, 20 nt, Human
ugaccccaguuaagcaacag

SEQ ID NO: 369535 - RNA, 21 nt, Human
ugagaaaggccccugugagga

SEQ ID NO: 369536 - RNA, 19 nt, Human
ugaggccugccccaccucc

SEQ ID NO: 369537 - RNA, 19 nt, Human
ugaggccugccccacuucc

SEQ ID NO: 369538 - RNA, 22 nt, Human
ugccaggacaccacgaacauga

SEQ ID NO: 369539 - RNA, 23 nt, Human
ugccaggucccccugcccacucu

SEQ ID NO: 369540 - RNA, 20 nt, Human
ugccccaccucccaccccag

SEQ ID NO: 369541 - RNA, 20 nt, Human
ugccccacuucccaccccag

SEQ ID NO: 369542 - RNA, 21 nt, Human
ugcuggggaggauuggggcag

SEQ ID NO: 369543 - RNA, 23 nt, Human
ugcuggggagggaguuggggcag

SEQ ID NO: 369544 - RNA, 19 nt, Human
uggaaaaggaggaaauauu

SEQ ID NO: 369545 - RNA, 21 nt, Human
uggaaaaggaggaaauauuac

SEQ ID NO: 369546 - RNA, 21 nt, Human
uggaaaaggaggaaauauuac

SEQ ID NO: 369547 - RNA, 23 nt, Human
uggaaaaggaggaaauauuaccc

SEQ ID NO: 369548 - RNA, 23 nt, Human
uggaaaaggaggaaauauuaccc

SEQ ID NO: 369549 - RNA, 21 nt, Human
uggagcaguggcccugagaug

SEQ ID NO: 369550 - RNA, 21 nt, Human
uggagcaguggcccugagaug

SEQ ID NO: 369551 - RNA, 20 nt, Human
uggcccagccucuuggccuu

SEQ ID NO: 369552 - RNA, 20 nt, Human
uggcccagccucuuggccuu

SEQ ID NO: 369553 - RNA, 23 nt, Human
uggcccugagaugcuggguuccc

SEQ ID NO: 369554 - RNA, 19 nt, Human
uggggagggaguuggggca

SEQ ID NO: 369555 - RNA, 19 nt, Human
uggggcagggaagcuggca

SEQ ID NO: 369556 - RNA, 25 nt, Human
uucaacccaggcccuucuggcccca

SEQ ID NO: 369557 - RNA, 21 nt, Human
uuccucaaaaaacccagaccc

SEQ ID NO: 369558 - RNA, 20 nt, Human
uuccucuaagggccagcccc

SEQ ID NO: 369559 - RNA, 20 nt, Human
uuccucuaagggccagcccc

SEQ ID NO: 369560 - RNA, 21 nt, Human
uugcgggcaggagcagcugcc

SEQ ID NO: 369561 - RNA, 24 nt, Human
uuggggcagggaagcuggcaucca

SEQ ID NO: 369562 - RNA, 20 nt, Human
uuuuuuuuuuuuuuuuccau

SEQ ID NO: 369563 - RNA, 21 nt, Human
uuuuuuuuuuuuuuuuuucca

SEQ ID NO: 369564 - RNA, 19 nt, Human
aaaaacuucugacgacaaa

SEQ ID NO: 369565 - RNA, 21 nt, Human
aaaacagauccagucuacaga

SEQ ID NO: 369566 - RNA, 20 nt, Human
aaaaguuucccaacaaagga

SEQ ID NO: 369567 - RNA, 21 nt, Human
aaacaacaggaaaacaagucc

SEQ ID NO: 369568 - RNA, 18 nt, Human
aaacaaguccaagagcaa

SEQ ID NO: 369569 - RNA, 20 nt, Human
aaaggagccacccugcugca

SEQ ID NO: 369570 - RNA, 25 nt, Human
aaaggcagcagcuaucaacaaaagu

SEQ ID NO: 369571 - RNA, 25 nt, Human
aaauaacacucccuccucacucucc

SEQ ID NO: 369572 - RNA, 23 nt, Human
aaaucaauguucuaacuggauaa

SEQ ID NO: 369573 - RNA, 21 nt, Human
aacaacaggaaaacaagucca

SEQ ID NO: 369574 - RNA, 24 nt, Human
aaccacuauaacaucuguccaagu

SEQ ID NO: 369575 - RNA, 19 nt, Human
aacucagacuguacuucau

SEQ ID NO: 369576 - RNA, 20 nt, Human
aacuguugacauuaacuaca

SEQ ID NO: 369577 - RNA, 21 nt, Human
aagaaagagaaaauccgucac

SEQ ID NO: 369578 - RNA, 22 nt, Human
aagcauucuuccaagcauucaa

SEQ ID NO: 369579 - RNA, 22 nt, Human
aagcugccacgaaaggguacaa

SEQ ID NO: 369580 - RNA, 18 nt, Human
aaguaacuuccuaaaaca

SEQ ID NO: 369581 - RNA, 24 nt, Human
aagucucagaagucauuugcagcc

SEQ ID NO: 369582 - RNA, 18 nt, Human
aauccaaaaaaguuuguu

SEQ ID NO: 369583 - RNA, 19 nt, Human
acaaacaacaggaaaacaa

SEQ ID NO: 369584 - RNA, 23 nt, Human
acaaaggcagcagcuaucaacaa

SEQ ID NO: 369585 - RNA, 25 nt, Human
acaaaggcagcagcuaucaacaaaa

SEQ ID NO: 369586 - RNA, 21 nt, Human
acaacaucacugugaaaguaa

SEQ ID NO: 369587 - RNA, 24 nt, Human
acauaacaaauggcuaugccaaca

SEQ ID NO: 369588 - RNA, 22 nt, Human
accauucucuuuacucgccucu

SEQ ID NO: 369589 - RNA, 22 nt, Human
accccagccccuccaaaucuaa

SEQ ID NO: 369590 - RNA, 24 nt, Human
acuccagagaaaacaaaaaauaca

SEQ ID NO: 369591 - RNA, 23 nt, Human
acugagacauaaaacuaacagaa

SEQ ID NO: 369592 - RNA, 23 nt, Human
agaaaagacauaaagucucagaa

SEQ ID NO: 369593 - RNA, 23 nt, Human
agacuacuacaccugcugcacac

SEQ ID NO: 369594 - RNA, 23 nt, Human
agacuguacuucaucaaaguuca

SEQ ID NO: 369595 - RNA, 20 nt, Human
agagugcaaccaggaaaacu

SEQ ID NO: 369596 - RNA, 26 nt, Human
agcuaucaacaaaaguuucccaacaa

SEQ ID NO: 369597 - RNA, 20 nt, Human
auaggcgucugagcagaguu

SEQ ID NO: 369598 - RNA, 24 nt, Human
aucaaaaagcauucuuccaagcau

SEQ ID NO: 369599 - RNA, 18 nt, Human
aucagcucguugcaccac

SEQ ID NO: 369600 - RNA, 21 nt, Human
caaaaagcauucuuccaagca

SEQ ID NO: 369601 - RNA, 19 nt, Human
caaaauagaaucuacuuuc

SEQ ID NO: 369602 - RNA, 20 nt, Human
caaaggaaccucuccucccu

SEQ ID NO: 369603 - RNA, 24 nt, Human
caaaggcagcagcuaucaacaaaa

SEQ ID NO: 369604 - RNA, 18 nt, Human
caacaaaggaaccucucc

SEQ ID NO: 369605 - RNA, 22 nt, Human
caagagcaguucuacuugugca

SEQ ID NO: 369606 - RNA, 23 nt, Human
cacacaacaucacugugaaagua

SEQ ID NO: 369607 - RNA, 22 nt, Human
caccccagccccuccaaaucua

SEQ ID NO: 369608 - RNA, 22 nt, Human
cacuacauaacaaauggcuaug

SEQ ID NO: 369609 - RNA, 21 nt, Human
cagcaagcgggggaaaagggu

SEQ ID NO: 369610 - RNA, 23 nt, Human
cagcacauugccaaacacggaca

SEQ ID NO: 369611 - RNA, 24 nt, Human
caggucaaaaucaacaucaaaaag

SEQ ID NO: 369612 - RNA, 20 nt, Human
ccacaaacaacaggaaaaca

SEQ ID NO: 369613 - RNA, 24 nt, Human
ccacacuucacuccccaaccugaa

SEQ ID NO: 369614 - RNA, 21 nt, Human
ccaccccagccccuccaaauc

SEQ ID NO: 369615 - RNA, 25 nt, Human
ccauucaaacgcguagguuccacaa

SEQ ID NO: 369616 - RNA, 21 nt, Human
cccaaggaaauaacacucccu

SEQ ID NO: 369617 - RNA, 20 nt, Human
cccacacuucacuccccaac

SEQ ID NO: 369618 - RNA, 22 nt, Human
cccccgccucccgccccuaccc

SEQ ID NO: 369619 - RNA, 20 nt, Human
ccucccgccccuaccucacc

SEQ ID NO: 369620 - RNA, 23 nt, Human
ccucccgccccuaccucaccggc

SEQ ID NO: 369621 - RNA, 18 nt, Human
ccugcauagcaggaaagu

SEQ ID NO: 369622 - RNA, 22 nt, Human
ccugcauagcaggaaagucgcu

SEQ ID NO: 369623 - RNA, 21 nt, Human
cgaucaggacaaaggcagcag

SEQ ID NO: 369624 - RNA, 23 nt, Human
cgcguagguuccacaaacaacag

SEQ ID NO: 369625 - RNA, 18 nt, Human
cucagaccugagggaaaa

SEQ ID NO: 369626 - RNA, 21 nt, Human
cuccccccgccucccgcccuc

SEQ ID NO: 369627 - RNA, 20 nt, Human
cuccucccuagguucccaag

SEQ ID NO: 369628 - RNA, 21 nt, Human
cuccuguuuggcugcuaaaga

SEQ ID NO: 369629 - RNA, 20 nt, Human
cucuccucccuagguuccca

SEQ ID NO: 369630 - RNA, 23 nt, Human
cucugcccaccccagccccucca

SEQ ID NO: 369631 - RNA, 20 nt, Human
cugaaucaugaacaggucaa

SEQ ID NO: 369632 - RNA, 21 nt, Human
cugcccaccccagccccucca

SEQ ID NO: 369633 - RNA, 18 nt, Human
gaacacacaacaucacug

SEQ ID NO: 369634 - RNA, 22 nt, Human
gacacaguaaguucaaaaauuu

SEQ ID NO: 369635 - RNA, 23 nt, Human
gagaaaacaaaaaauacauaaag

SEQ ID NO: 369636 - RNA, 19 nt, Human
gccucuugcucucugccca

SEQ ID NO: 369637 - RNA, 19 nt, Human
ggaaaacaaguccaagagc

SEQ ID NO: 369638 - RNA, 25 nt, Human
ggaagaaaagacauaaagucucaga

SEQ ID NO: 369639 - RNA, 20 nt, Human
guagguuccacaaacaacag

SEQ ID NO: 369640 - RNA, 22 nt, Human
gucaaaaucaacaucaaaaagc

SEQ ID NO: 369641 - RNA, 19 nt, Human
uaaagugaggucaguaacc

SEQ ID NO: 369642 - RNA, 19 nt, Human
uaaaucaagugcccugaac

SEQ ID NO: 369643 - RNA, 20 nt, Human
uaacagcacauugccaaacu

SEQ ID NO: 369644 - RNA, 19 nt, Human
uaacuacagacuaacaaau

SEQ ID NO: 369645 - RNA, 19 nt, Human
uaacucagacuguacuuca

SEQ ID NO: 369646 - RNA, 23 nt, Human
uaacucagacuguacuucaucaa

SEQ ID NO: 369647 - RNA, 19 nt, Human
uaagaaagagaaaauccgu

SEQ ID NO: 369648 - RNA, 20 nt, Human
uacauaaagauuaaaagucu

SEQ ID NO: 369649 - RNA, 23 nt, Human
uacuccagagaaaacaaaaaaua

SEQ ID NO: 369650 - RNA, 19 nt, Human
uagcacagauagaugccuu

SEQ ID NO: 369651 - RNA, 24 nt, Human
uaggauaaaugccaagaaaccuua

SEQ ID NO: 369652 - RNA, 20 nt, Human
uaguuuguucacaaucugcc

SEQ ID NO: 369653 - RNA, 19 nt, Human
uauaacuuuuuuaaugaca

SEQ ID NO: 369654 - RNA, 20 nt, Human
uauaacuuuuuuaaugacag

SEQ ID NO: 369655 - RNA, 21 nt, Human
uauacagauaaaguacauaau

SEQ ID NO: 369656 - RNA, 20 nt, Human
uauaguuuguucacaaucug

SEQ ID NO: 369657 - RNA, 21 nt, Human
ucaaugcaucuuuagguauua

SEQ ID NO: 369658 - RNA, 23 nt, Human
ucagaagucauuugcagccuucu

SEQ ID NO: 369659 - RNA, 21 nt, Human
ucagguaaguuuaagaaagag

SEQ ID NO: 369660 - RNA, 20 nt, Human
ucaguaacccgacagaauag

SEQ ID NO: 369661 - RNA, 18 nt, Human
ucaugggagggauuccug

SEQ ID NO: 369662 - RNA, 26 nt, Human
uccacaaacaacaggaaaacaagucc

SEQ ID NO: 369663 - RNA, 19 nt, Human
uccccccgccucccgcccc

SEQ ID NO: 369664 - RNA, 22 nt, Human
uccuaaaacagauccagucuac

SEQ ID NO: 369665 - RNA, 19 nt, Human
uccucacucucccuccccu

SEQ ID NO: 369666 - RNA, 21 nt, Human
ucuccccccgccucccgcccc

SEQ ID NO: 369667 - RNA, 21 nt, Human
ucuccucccuagguucccaag

SEQ ID NO: 369668 - RNA, 24 nt, Human
ucucuuaugacugacuuuggugca

SEQ ID NO: 369669 - RNA, 22 nt, Human
ucugcccaccccagccccucca

SEQ ID NO: 369670 - RNA, 18 nt, Human
ucuuggucuggaagaaaa

SEQ ID NO: 369671 - RNA, 23 nt, Human
ugaauaacuuuguggguaaguga

SEQ ID NO: 369672 - RNA, 24 nt, Human
ugaaucaugaacaggucaaaauca

SEQ ID NO: 369673 - RNA, 23 nt, Human
ugaggucaguaacccgacagaau

SEQ ID NO: 369674 - RNA, 18 nt, Human
ugccacgaaaggguacaa

SEQ ID NO: 369675 - RNA, 22 nt, Human
uggaaaaucugaacaucauguu

SEQ ID NO: 369676 - RNA, 20 nt, Human
uggaagaaaagacauaaagu

SEQ ID NO: 369677 - RNA, 20 nt, Human
uggcugcuaaagagcagcaa

SEQ ID NO: 369678 - RNA, 24 nt, Human
uguacuguagucaaugaaucugug

SEQ ID NO: 369679 - RNA, 23 nt, Human
ugugaaaguaacuuccuaaaaca

SEQ ID NO: 369680 - RNA, 20 nt, Human
uuaaaagaugcaacguucaa

SEQ ID NO: 369681 - RNA, 22 nt, Human
uucacaaucacaugugcaaauu

SEQ ID NO: 369682 - RNA, 21 nt, Human
uucccuagugaaaagucuuau

SEQ ID NO: 369683 - RNA, 25 nt, Human
uugcaccacaacaggccaccagaga

SEQ ID NO: 369684 - RNA, 22 nt, Human
uuguucugugcucuuccuugag

SEQ ID NO: 369685 - RNA, 21 nt, Human
uuuuucacuggaaaaucugaa

SEQ ID NO: 369686 - RNA, 21 nt, Human
aaaauaauauggaacaaggca

SEQ ID NO: 369687 - RNA, 22 nt, Human
aaguauacaaccuuuuccaaag

SEQ ID NO: 369688 - RNA, 24 nt, Human
auacaaccuuuuccaaagacagag

SEQ ID NO: 369689 - RNA, 22 nt, Human
cacacgccucccaccgcccucu

SEQ ID NO: 369690 - RNA, 21 nt, Human
cacgccucccaccgcccucuc

SEQ ID NO: 369691 - RNA, 24 nt, Human
cagaaaaaaagucuuuauucucau

SEQ ID NO: 369692 - RNA, 21 nt, Human
cagagugccagggaaaaugug

SEQ ID NO: 369693 - RNA, 22 nt, Human
cagugucugaggcccagugccc

SEQ ID NO: 369694 - RNA, 22 nt, Human
cccaccgcccucuccacccugc

SEQ ID NO: 369695 - RNA, 20 nt, Human
ccccgccgccuccuuccucg

SEQ ID NO: 369696 - RNA, 21 nt, Human
ccccgccgccuccuuccucgc

SEQ ID NO: 369697 - RNA, 19 nt, Human
cccucuccacccugcucug

SEQ ID NO: 369698 - RNA, 18 nt, Human
ccucccaccgcccucucc

SEQ ID NO: 369699 - RNA, 21 nt, Human
cgcccucuccacccugcucug

SEQ ID NO: 369700 - RNA, 20 nt, Human
cggcacugggggcuuucuuu

SEQ ID NO: 369701 - RNA, 24 nt, Human
gccgccuccuuccucgccggcacu

SEQ ID NO: 369702 - RNA, 21 nt, Human
gccucccaccgcccucuccac

SEQ ID NO: 369703 - RNA, 23 nt, Human
ggcaguagagcccacucaggcac

SEQ ID NO: 369704 - RNA, 25 nt, Human
ucaggcacacgccucccaccgcccu

SEQ ID NO: 369705 - RNA, 22 nt, Human
ucccaccgcccucuccacccug

SEQ ID NO: 369706 - RNA, 21 nt, Human
uccccgccgccuccuuccucg

SEQ ID NO: 369707 - RNA, 19 nt, Human
uccucgccggcacuggggg

SEQ ID NO: 369708 - RNA, 20 nt, Human
ugaagcauucauuaguccca

SEQ ID NO: 369709 - RNA, 22 nt, Human
ugcacaaaauaauauggaacaa

SEQ ID NO: 369710 - RNA, 22 nt, Human
ugcugcuccgagggaaccgcgc

SEQ ID NO: 369711 - RNA, 24 nt, Human
ugucugaggcccagugcccggcgg

SEQ ID NO: 369712 - RNA, 20 nt, Human
accuuccucuccagcuucau

SEQ ID NO: 369713 - RNA, 22 nt, Human
acgcguggagcccgaggaggcg

SEQ ID NO: 369714 - RNA, 22 nt, Human
aggaggggcgagcucggugcuc

SEQ ID NO: 369715 - RNA, 19 nt, Human
agguggcaggcaggcgggc

SEQ ID NO: 369716 - RNA, 24 nt, Human
agguggcaggcaggcgggcagggg

SEQ ID NO: 369717 - RNA, 22 nt, Human
ccagcuucauuuccuucaugcu

SEQ ID NO: 369718 - RNA, 23 nt, Human
cccgcugcgcaucgcugggagug

SEQ ID NO: 369719 - RNA, 18 nt, Human
ccggcgcugccccgcugc

SEQ ID NO: 369720 - RNA, 21 nt, Human
ccgggcggcggcggcggcagc

SEQ ID NO: 369721 - RNA, 22 nt, Human
cgcggaggaggggcgagcucgg

SEQ ID NO: 369722 - RNA, 23 nt, Human
cggcggcagcaacagcagcucca

SEQ ID NO: 369723 - RNA, 19 nt, Human
cggcggggccggcgcugcc

SEQ ID NO: 369724 - RNA, 21 nt, Human
gagcggggcgcuccgggcggc

SEQ ID NO: 369725 - RNA, 21 nt, Human
gagguggcaggcaggcgggca

SEQ ID NO: 369726 - RNA, 24 nt, Human
gcccgaggaggcgcgcggggagcg

SEQ ID NO: 369727 - RNA, 19 nt, Human
gcggaggaggggcgagcuc

SEQ ID NO: 369728 - RNA, 20 nt, Human
gcggcggaguuagcgcggag

SEQ ID NO: 369729 - RNA, 23 nt, Human
gcuucauuuccuucaugcugaau

SEQ ID NO: 369730 - RNA, 20 nt, Human
ggaggggcgagcucggugcu

SEQ ID NO: 369731 - RNA, 19 nt, Human
ggcgcgcggggagcgcggg

SEQ ID NO: 369732 - RNA, 23 nt, Human
ggcgcgcggggagcgcgggcggc

SEQ ID NO: 369733 - RNA, 22 nt, Human
ggcgcuccgggcggcggcggcg

SEQ ID NO: 369734 - RNA, 25 nt, Human
ggggcgcuccgggcggcggcggcgg

SEQ ID NO: 369735 - RNA, 31 nt, Human
ggggcgcuccgggcggcggcggcggcagcaa

SEQ ID NO: 369736 - RNA, 23 nt, Human
guggcaggcaggcgggcaggggc

SEQ ID NO: 369737 - RNA, 23 nt, Human
uccagcuucauuuccuucaugcu

SEQ ID NO: 369738 - RNA, 19 nt, Human
ucccacauggcugucccaa

SEQ ID NO: 369739 - RNA, 22 nt, Human
uccuggaggaggcugccucugc

SEQ ID NO: 369740 - RNA, 27 nt, Human
ucuccagcuucauuuccuugggccgcc

SEQ ID NO: 369741 - RNA, 23 nt, Human
ucucuucuucuuuaccuuccucu

SEQ ID NO: 369742 - RNA, 22 nt, Human
ugucccaacuccaucaagcugg

SEQ ID NO: 369743 - RNA, 22 nt, Human
acagcaguggggucucagggca

SEQ ID NO: 369744 - RNA, 19 nt, Human
acauaaucaauccuagcac

SEQ ID NO: 369745 - RNA, 23 nt, Human
cauuuucaguuaagaguugggga

SEQ ID NO: 369746 - RNA, 18 nt, Human
ccucuggcuuguccucac

SEQ ID NO: 369747 - RNA, 18 nt, Human
cggcuuggugagaacugc

SEQ ID NO: 369748 - RNA, 24 nt, Human
cucaccuccugaagaggaucaaag

SEQ ID NO: 369749 - RNA, 22 nt, Human
cuggcuauggcagguuucuccu

SEQ ID NO: 369750 - RNA, 22 nt, Human
gaagaggaucaaagacacaccc

SEQ ID NO: 369751 - RNA, 24 nt, Human
gaccucuggcuuguccucaccucc

SEQ ID NO: 369752 - RNA, 21 nt, Human
gcagguuucuccucgcugucu

SEQ ID NO: 369753 - RNA, 19 nt, Human
gcaguggggucucagggca

SEQ ID NO: 369754 - RNA, 26 nt, Human
ggaauaaaucuaccguucccuggcaa

SEQ ID NO: 369755 - RNA, 22 nt, Human
guuucuccucgcugucuccaac

SEQ ID NO: 369756 - RNA, 18 nt, Human
uagcacuacagcauagca

SEQ ID NO: 369757 - RNA, 24 nt, Human
ucacaggugcccucggauggagaa

SEQ ID NO: 369758 - RNA, 20 nt, Human
uccucuaacauuccuucugg

SEQ ID NO: 369759 - RNA, 18 nt, Human
ugaagaggaucaaagaca

SEQ ID NO: 369760 - RNA, 20 nt, Human
uggcaaacacuuggcagccc

SEQ ID NO: 369761 - RNA, 21 nt, Human
uggcagcccuugggagcagca

SEQ ID NO: 369762 - RNA, 19 nt, Human
uguggugagacagaucagg

SEQ ID NO: 369763 - RNA, 19 nt, Human
uucccuggcaaacacuugg

SEQ ID NO: 369764 - RNA, 27 nt, Human
uuccuucuggcagguuggucgaacucg

SEQ ID NO: 369765 - RNA, 18 nt, Human
uugcagaccguguggguu

SEQ ID NO: 369766 - RNA, 18 nt, Human
uugggagcagcaucuuug

SEQ ID NO: 369767 - RNA, 20 nt, Human
uuugguugcagaccgugugg

SEQ ID NO: 369768 - RNA, 22 nt, Human
agucacaaguacacaagaagaa

SEQ ID NO: 369769 - RNA, 22 nt, Human
gcucuuuuuaggagcgugggug

SEQ ID NO: 369770 - RNA, 20 nt, Human
ugcuaagagucacaaguaca

SEQ ID NO: 369771 - RNA, 23 nt, Human
ugggugccucgcgaacccugccg

SEQ ID NO: 369772 - RNA, 24 nt, Human
uuuccagggauuaaagcuuugcac

SEQ ID NO: 369773 - RNA, 23 nt, Human
uuuuacaguuagcauauuaagcu

SEQ ID NO: 369774 - RNA, 26 nt, Human
uuuuuuuuuuuuuuuuuuacaguuag

SEQ ID NO: 369775 - RNA, 24 nt, Human
uuuuuuuuuuuuuuuuuuuuacag

SEQ ID NO: 369776 - RNA, 20 nt, Human
aaaacacaaaaauuagcccg

SEQ ID NO: 369777 - RNA, 23 nt, Human
aaaaggaagccgggcuugaccca

SEQ ID NO: 369778 - RNA, 20 nt, Human
aaaauguugccucaggcagg

SEQ ID NO: 369779 - RNA, 23 nt, Human
aaacucgagccaagcaggaaccu

SEQ ID NO: 369780 - RNA, 24 nt, Human
aaauuuucaacauacaccaaguuu

SEQ ID NO: 369781 - RNA, 22 nt, Human
aacaaaacaaaaagaaaaaaaa

SEQ ID NO: 369782 - RNA, 18 nt, Human
aacagagcgagacugagu

SEQ ID NO: 369783 - RNA, 19 nt, Human
aacauggugaaaccccauc

SEQ ID NO: 369784 - RNA, 20 nt, Human
aacauggugaaaccccaucu

SEQ ID NO: 369785 - RNA, 20 nt, Human
aacauggugaaaccccaucu

SEQ ID NO: 369786 - RNA, 21 nt, Human
aacauggugaaaccccaucuc

SEQ ID NO: 369787 - RNA, 22 nt, Human
aagggcaugacaaaaaggacuc

SEQ ID NO: 369788 - RNA, 24 nt, Human
aauaaaauaaaauguugccuuuaa

SEQ ID NO: 369789 - RNA, 18 nt, Human
aaucgcuugaaccuggga

SEQ ID NO: 369790 - RNA, 24 nt, Human
aaucgcuugaaccugggaggcaga

SEQ ID NO: 369791 - RNA, 18 nt, Human
acaaaacaaaaagaaaaa

SEQ ID NO: 369792 - RNA, 20 nt, Human
acacucugcaccccuucucu

SEQ ID NO: 369793 - RNA, 24 nt, Human
acagaggcagaucuugucucaaaa

SEQ ID NO: 369794 - RNA, 24 nt, Human
accaacauggugaaaccccaucuc

SEQ ID NO: 369795 - RNA, 19 nt, Human
acggucccgcuacaaucgc

SEQ ID NO: 369796 - RNA, 24 nt, Human
acugcacuccagccugggcgacag

SEQ ID NO: 369797 - RNA, 26 nt, Human
acugcacuccagccugggcgacagag

SEQ ID NO: 369798 - RNA, 24 nt, Human
acugcacuucagccugggcaacag

SEQ ID NO: 369799 - RNA, 24 nt, Human
acugcacuucagccugggcaacag

SEQ ID NO: 369800 - RNA, 20 nt, Human
agaaaaaaaaaaauuagccg

SEQ ID NO: 369801 - RNA, 22 nt, Human
agaaucgcuugaaccugggagg

SEQ ID NO: 369802 - RNA, 21 nt, Human
agagaaacggaaagaaaggaa

SEQ ID NO: 369803 - RNA, 24 nt, Human
agagaaacggaaagaaaggaaggg

SEQ ID NO: 369804 - RNA, 20 nt, Human
agagacgcauuuucucuuuc

SEQ ID NO: 369805 - RNA, 18 nt, Human
agagguugcagugagccg

SEQ ID NO: 369806 - RNA, 21 nt, Human
agagguugcagugagccgaga

SEQ ID NO: 369807 - RNA, 24 nt, Human
agcaccagguaaacacucugcacc

SEQ ID NO: 369808 - RNA, 25 nt, Human
agccaagcaggaaccuaaaugagga

SEQ ID NO: 369809 - RNA, 21 nt, Human
agccugggcaacauggcuggc

SEQ ID NO: 369810 - RNA, 24 nt, Human
agccugggcgacagaggcagaucu

SEQ ID NO: 369811 - RNA, 24 nt, Human
agcgccccacugcacuucagccug

SEQ ID NO: 369812 - RNA, 19 nt, Human
aggaaggaacaagaggccu

SEQ ID NO: 369813 - RNA, 23 nt, Human
aggaauucgaaaucugccugacc

SEQ ID NO: 369814 - RNA, 18 nt, Human
aggacagugggggcagau

SEQ ID NO: 369815 - RNA, 24 nt, Human
aggaucacuugagcccaggaguuc

SEQ ID NO: 369816 - RNA, 20 nt, Human
aggcacagguugcagugagc

SEQ ID NO: 369817 - RNA, 24 nt, Human
aggcacagguugcagugagcugag

SEQ ID NO: 369818 - RNA, 21 nt, Human
aggcagagguugcagugagcc

SEQ ID NO: 369819 - RNA, 24 nt, Human
aggcagagguugcagugagccgag

SEQ ID NO: 369820 - RNA, 22 nt, Human
aggcaggagaaucgcuugaacc

SEQ ID NO: 369821 - RNA, 24 nt, Human
aggcaggagaaucgcuugaaccug

SEQ ID NO: 369822 - RNA, 21 nt, Human
aggcaggguguugguggcuca

SEQ ID NO: 369823 - RNA, 23 nt, Human
aggccaagggcaaggcgggagga

SEQ ID NO: 369824 - RNA, 19 nt, Human
aggccgaggcggguggauc

SEQ ID NO: 369825 - RNA, 21 nt, Human
aggccgaggcggguggaucac

SEQ ID NO: 369826 - RNA, 18 nt, Human
aggcgggaggaucacuug

SEQ ID NO: 369827 - RNA, 23 nt, Human
aggcgggaggaucacuugagccc

SEQ ID NO: 369828 - RNA, 21 nt, Human
aggcggguggaucacuugagg

SEQ ID NO: 369829 - RNA, 26 nt, Human
aggcggguggaucacuugaggucagg

SEQ ID NO: 369830 - RNA, 20 nt, Human
aggcugaggcaggagaaucg

SEQ ID NO: 369831 - RNA, 24 nt, Human
aggcugaggcaggagaaucgcuug

SEQ ID NO: 369832 - RNA, 23 nt, Human
aggcugaggcugagaaucgcuug

SEQ ID NO: 369833 - RNA, 21 nt, Human
agggggcggaggcggggcugu

SEQ ID NO: 369834 - RNA, 18 nt, Human
agguuccccucccccugc

SEQ ID NO: 369835 - RNA, 21 nt, Human
agguugcagugagcugagauc

SEQ ID NO: 369836 - RNA, 18 nt, Human
agguuuuucacuccuugg

SEQ ID NO: 369837 - RNA, 19 nt, Human
aguaauagguuuuucacuc

SEQ ID NO: 369838 - RNA, 21 nt, Human
aucacuugaggucaggaauuc

SEQ ID NO: 369839 - RNA, 21 nt, Human
auccuagcacuuggaaggcca

SEQ ID NO: 369840 - RNA, 24 nt, Human
aucucgccacugcacuccagccug

SEQ ID NO: 369841 - RNA, 19 nt, Human
aucugccccugcuuucccc

SEQ ID NO: 369842 - RNA, 18 nt, Human
caaacucgagccaagcag

SEQ ID NO: 369843 - RNA, 24 nt, Human
caacauggugaaaccccaucucua

SEQ ID NO: 369844 - RNA, 23 nt, Human
caagaaggcagcccggggucucg

SEQ ID NO: 369845 - RNA, 23 nt, Human
caagaaggcagcccggggucucu

SEQ ID NO: 369846 - RNA, 21 nt, Human
caaggcgggaggaucacuuga

SEQ ID NO: 369847 - RNA, 25 nt, Human
caauagagaaacggaaagaaaggaa

SEQ ID NO: 369848 - RNA, 18 nt, Human
cacagguugcagugagcu

SEQ ID NO: 369849 - RNA, 23 nt, Human
caccccuucucuuaguaguaaua

SEQ ID NO: 369850 - RNA, 23 nt, Human
cacgccuguaauccuagcacuug

SEQ ID NO: 369851 - RNA, 25 nt, Human
cacucugcaccccuucucuuaguag

SEQ ID NO: 369852 - RNA, 19 nt, Human
cacugcacuccagccuggg

SEQ ID NO: 369853 - RNA, 20 nt, Human
cacugcacuccagccugggc

SEQ ID NO: 369854 - RNA, 22 nt, Human
cacugcacuccagccugggcga

SEQ ID NO: 369855 - RNA, 23 nt, Human
cacugcacuccagccugggcgac

SEQ ID NO: 369856 - RNA, 24 nt, Human
cacugcacuccagccugggcgaca

SEQ ID NO: 369857 - RNA, 18 nt, Human
cacugcacuucagccugg

SEQ ID NO: 369858 - RNA, 19 nt, Human
cacugcacuucagccuggg

SEQ ID NO: 369859 - RNA, 21 nt, Human
cacugcacuucagccugggca

SEQ ID NO: 369860 - RNA, 23 nt, Human
cacugcacuucagccugggcaac

SEQ ID NO: 369861 - RNA, 24 nt, Human
cacugcacuucagccugggcaaca

SEQ ID NO: 369862 - RNA, 23 nt, Human
cacuucagccugggcaacagagc

SEQ ID NO: 369863 - RNA, 24 nt, Human
cacuucagccugggcaacagagcg

SEQ ID NO: 369864 - RNA, 20 nt, Human
cacuugaggucaggaauucg

SEQ ID NO: 369865 - RNA, 21 nt, Human
cagccugggcaacagagcgag

SEQ ID NO: 369866 - RNA, 21 nt, Human
cagcgcaagccugagaccaca

SEQ ID NO: 369867 - RNA, 24 nt, Human
cagcuacucgggaggcugaggcag

SEQ ID NO: 369868 - RNA, 26 nt, Human
caggagccugcagcgcuagguagagg

SEQ ID NO: 369869 - RNA, 23 nt, Human
cagggcaggaucugccgccucuu

SEQ ID NO: 369870 - RNA, 22 nt, Human
caggguggcaucugccccugcu

SEQ ID NO: 369871 - RNA, 20 nt, Human
caggguguugguggcucacg

SEQ ID NO: 369872 - RNA, 25 nt, Human
cagguaaacacucugcaccccuucu

SEQ ID NO: 369873 - RNA, 19 nt, Human
cagugcccaagggcuaaga

SEQ ID NO: 369874 - RNA, 20 nt, Human
cagugcccaagggcuaagaa

SEQ ID NO: 369875 - RNA, 23 nt, Human
caguugugugugacggucccgcu

SEQ ID NO: 369876 - RNA, 21 nt, Human
caugccgugucccuccuccuc

SEQ ID NO: 369877 - RNA, 20 nt, Human
ccacugcacuccagccuggg

SEQ ID NO: 369878 - RNA, 21 nt, Human
ccacugcacuccagccugggc

SEQ ID NO: 369879 - RNA, 21 nt, Human
ccacugcacuccagccugggc

SEQ ID NO: 369880 - RNA, 24 nt, Human
ccacugcacuccagccugggcgac

SEQ ID NO: 369881 - RNA, 20 nt, Human
ccacugcacuucagccuggg

SEQ ID NO: 369882 - RNA, 21 nt, Human
ccacugcacuucagccugggc

SEQ ID NO: 369883 - RNA, 23 nt, Human
ccacugcacuucagccugggcaa

SEQ ID NO: 369884 - RNA, 24 nt, Human
ccacugcacuucagccugggcaac

SEQ ID NO: 369885 - RNA, 23 nt, Human
ccagcgcaagccugagaccacag

SEQ ID NO: 369886 - RNA, 21 nt, Human
ccaugccgugucccuccuccu

SEQ ID NO: 369887 - RNA, 20 nt, Human
ccccacugcacuucagccug

SEQ ID NO: 369888 - RNA, 24 nt, Human
ccccacugcacuucagccugggca

SEQ ID NO: 369889 - RNA, 21 nt, Human
ccccaugccgugucccuccuc

SEQ ID NO: 369890 - RNA, 25 nt, Human
cccccaugccgugucccuccuccuc

SEQ ID NO: 369891 - RNA, 21 nt, Human
cccccugccacaacuggcauc

SEQ ID NO: 369892 - RNA, 19 nt, Human
cccuccuccucuccacguc

SEQ ID NO: 369893 - RNA, 21 nt, Human
cccugccacaacuggcauccc

SEQ ID NO: 369894 - RNA, 22 nt, Human
ccgaggcggguggaucacuuga

SEQ ID NO: 369895 - RNA, 19 nt, Human
ccucccccugccacaacug

SEQ ID NO: 369896 - RNA, 24 nt, Human
ccugaccaacauggugaaacccca

SEQ ID NO: 369897 - RNA, 21 nt, Human
ccugcaaucccagcuacucgg

SEQ ID NO: 369898 - RNA, 22 nt, Human
ccugcaaucccagcuacucggg

SEQ ID NO: 369899 - RNA, 25 nt, Human
ccugggaggcagagguugcagugag

SEQ ID NO: 369900 - RNA, 20 nt, Human
ccugggugccaguugugugu

SEQ ID NO: 369901 - RNA, 21 nt, Human
ccuguaaucccagcuacucgg

SEQ ID NO: 369902 - RNA, 20 nt, Human
ccuguaauccuagcacuugg

SEQ ID NO: 369903 - RNA, 22 nt, Human
cgagccaagcaggaaccuaaau

SEQ ID NO: 369904 - RNA, 24 nt, Human
cgaggcggguggaucacuugaggu

SEQ ID NO: 369905 - RNA, 26 nt, Human
cgaggcggguggaucacuugagguca

SEQ ID NO: 369906 - RNA, 26 nt, Human
cgccacugcacuccagccugggcgac

SEQ ID NO: 369907 - RNA, 23 nt, Human
cgccugcaaucccagcuacucgg

SEQ ID NO: 369908 - RNA, 24 nt, Human
cgccugcaaucccagcuacucggg

SEQ ID NO: 369909 - RNA, 18 nt, Human
cgccuguaauccuagcac

SEQ ID NO: 369910 - RNA, 22 nt, Human
cgccuguaauccuagcacuugg

SEQ ID NO: 369911 - RNA, 23 nt, Human
cgcuccugcaggcagaauuuagc

SEQ ID NO: 369912 - RNA, 24 nt, Human
cgcuugaagccgggaggcacaggg

SEQ ID NO: 369913 - RNA, 24 nt, Human
cgggaggcacagguugcagugagc

SEQ ID NO: 369914 - RNA, 22 nt, Human
cgggaggcugaggcugagaauc

SEQ ID NO: 369915 - RNA, 24 nt, Human
cggguggaucacuugaggucagga

SEQ ID NO: 369916 - RNA, 18 nt, Human
cucaaacucgagccaagc

SEQ ID NO: 369917 - RNA, 24 nt, Human
cucacgccuguaauccuagcacuu

SEQ ID NO: 369918 - RNA, 21 nt, Human
cucccccggccccuucugccc

SEQ ID NO: 369919 - RNA, 23 nt, Human
cuccuccucuccacgucuccuca

SEQ ID NO: 369920 - RNA, 23 nt, Human
cuccuguaaucccagcuacucgg

SEQ ID NO: 369921 - RNA, 24 nt, Human
cuccuguaaucccagcuacucggg

SEQ ID NO: 369922 - RNA, 24 nt, Human
cuggaccccuggccugggugccag

SEQ ID NO: 369923 - RNA, 21 nt, Human
cugggcaggguggcaucugcc

SEQ ID NO: 369924 - RNA, 21 nt, Human
cuguccucacaggacaguggg

SEQ ID NO: 369925 - RNA, 22 nt, Human
cuuaaaacacaaaaauuagccc

SEQ ID NO: 369926 - RNA, 22 nt, Human
cuuaagggcaugacaaaaagga

SEQ ID NO: 369927 - RNA, 21 nt, Human
gaaacggaaagaaaggaaggg

SEQ ID NO: 369928 - RNA, 22 nt, Human
gacagugggggcagaucagaga

SEQ ID NO: 369929 - RNA, 18 nt, Human
gacgucuucagacgcucg

SEQ ID NO: 369930 - RNA, 18 nt, Human
gagacugagucucaaaca

SEQ ID NO: 369931 - RNA, 23 nt, Human
gagagcgccccacugcacuucag

SEQ ID NO: 369932 - RNA, 23 nt, Human
gagaucucgccacugcacuccag

SEQ ID NO: 369933 - RNA, 21 nt, Human
gagcagccccaagaaggcaac

SEQ ID NO: 369934 - RNA, 23 nt, Human
gagcagccccaagaaggcagccc

SEQ ID NO: 369935 - RNA, 21 nt, Human
gagcccugcgccagcuccccc

SEQ ID NO: 369936 - RNA, 24 nt, Human
gaguggggagacagggcagugugc

SEQ ID NO: 369937 - RNA, 18 nt, Human
gaucacuugaggucagga

SEQ ID NO: 369938 - RNA, 24 nt, Human
gaucacuugaggucaggaauucga

SEQ ID NO: 369939 - RNA, 18 nt, Human
gaucugccgccucuucuc

SEQ ID NO: 369940 - RNA, 24 nt, Human
gcacuucagccugggcaacagagc

SEQ ID NO: 369941 - RNA, 18 nt, Human
gcaggguguugguggcuc

SEQ ID NO: 369942 - RNA, 20 nt, Human
gcagugagccgagagcgccc

SEQ ID NO: 369943 - RNA, 22 nt, Human
gcaugacaaaaaggacuccucu

SEQ ID NO: 369944 - RNA, 22 nt, Human
gccacugcacuccagccugggc

SEQ ID NO: 369945 - RNA, 24 nt, Human
gccacugcacuccagccugggcga

SEQ ID NO: 369946 - RNA, 22 nt, Human
gcccaggaguucacgaccagcc

SEQ ID NO: 369947 - RNA, 21 nt, Human
gcccggggucucggggacucg

SEQ ID NO: 369948 - RNA, 23 nt, Human
gccugaccaacauggugaaaccc

SEQ ID NO: 369949 - RNA, 18 nt, Human
gccugggcaacauggcug

SEQ ID NO: 369950 - RNA, 21 nt, Human
gcuacucgggaggcugaggcu

SEQ ID NO: 369951 - RNA, 21 nt, Human
gcuggcaacaugaccccgugu

SEQ ID NO: 369952 - RNA, 22 nt, Human
gcuguccucacaggacaguggg

SEQ ID NO: 369953 - RNA, 23 nt, Human
ggacuccccccaugccguguccc

SEQ ID NO: 369954 - RNA, 19 nt, Human
ggagacagggcagugugcu

SEQ ID NO: 369955 - RNA, 23 nt, Human
ggaucacuugagcccaggaguuc

SEQ ID NO: 369956 - RNA, 19 nt, Human
ggcaggguguugguggcuc

SEQ ID NO: 369957 - RNA, 21 nt, Human
ggcgugguggcgggcgccugc

SEQ ID NO: 369958 - RNA, 19 nt, Human
gggcaggguggcaucugcc

SEQ ID NO: 369959 - RNA, 23 nt, Human
gggcgugguggcgggcgccugca

SEQ ID NO: 369960 - RNA, 23 nt, Human
gggcuggucaggaggcggagcag

SEQ ID NO: 369961 - RNA, 19 nt, Human
ggggagacagggcagugug

SEQ ID NO: 369962 - RNA, 18 nt, Human
ggggcggaggcggggcug

SEQ ID NO: 369963 - RNA, 18 nt, Human
gggggcggaggcggggcu

SEQ ID NO: 369964 - RNA, 21 nt, Human
gguggaucacuugaggucagg

SEQ ID NO: 369965 - RNA, 24 nt, Human
gguggcacgcuccuguaaucccag

SEQ ID NO: 369966 - RNA, 24 nt, Human
gguggcucacgccuguaauccuag

SEQ ID NO: 369967 - RNA, 24 nt, Human
gguguugguggcucacgccuguaa

SEQ ID NO: 369968 - RNA, 21 nt, Human
guaaacacucugcaccccuuc

SEQ ID NO: 369969 - RNA, 19 nt, Human
guacuaaaucauuuuugac

SEQ ID NO: 369970 - RNA, 22 nt, Human
guugcagugagccgagagcgcc

SEQ ID NO: 369971 - RNA, 23 nt, Human
uaaacacucugcaccccuucucu

SEQ ID NO: 369972 - RNA, 21 nt, Human
uaagagcagcuguacagagug

SEQ ID NO: 369973 - RNA, 24 nt, Human
uaaguaaauaaaggccgaggcggg

SEQ ID NO: 369974 - RNA, 25 nt, Human
uaauagguuuuucacuccuuggccu

SEQ ID NO: 369975 - RNA, 22 nt, Human
uacaauagagaaacggaaagaa

SEQ ID NO: 369976 - RNA, 18 nt, Human
uagagaaacggaaagaaa

SEQ ID NO: 369977 - RNA, 19 nt, Human
uagcacuuggaaggccaag

SEQ ID NO: 369978 - RNA, 20 nt, Human
uagcucuggaccccuggccu

SEQ ID NO: 369979 - RNA, 22 nt, Human
uagguagagagcccugcgccag

SEQ ID NO: 369980 - RNA, 28 nt, Human
ucaaacaaaacaaaaagaaaaaaaaaaa

SEQ ID NO: 369981 - RNA, 21 nt, Human
ucacgaccagccugggcaaca

SEQ ID NO: 369982 - RNA, 20 nt, Human
uccagccugggcgacagagg

SEQ ID NO: 369983 - RNA, 21 nt, Human
ucccuccuccucuccacgucu

SEQ ID NO: 369984 - RNA, 23 nt, Human
uccuguaaucccagcuacucggg

SEQ ID NO: 369985 - RNA, 19 nt, Human
uccuguugauguuaagucc

SEQ ID NO: 369986 - RNA, 21 nt, Human
ucgagccaagcaggaaccuaa

SEQ ID NO: 369987 - RNA, 18 nt, Human
ucgcuugaaccugggagg

SEQ ID NO: 369988 - RNA, 24 nt, Human
ucgggaggcugaggcaggagaauc

SEQ ID NO: 369989 - RNA, 23 nt, Human
ucgggaggcugaggcugagaauc

SEQ ID NO: 369990 - RNA, 29 nt, Human
ucucaaacaaaacaaaaagaaaaaaaaaa

SEQ ID NO: 369991 - RNA, 19 nt, Human
ucuccucagggacuucgag

SEQ ID NO: 369992 - RNA, 19 nt, Human
ugaaaacagguuaaacagu

SEQ ID NO: 369993 - RNA, 20 nt, Human
ugaaaacagguuaaacaguu

SEQ ID NO: 369994 - RNA, 24 nt, Human
ugaaccugggaggcagagguugca

SEQ ID NO: 369995 - RNA, 24 nt, Human
ugaccaacauggugaaaccccauc

SEQ ID NO: 369996 - RNA, 21 nt, Human
ugacccagggggcggaggcgg

SEQ ID NO: 369997 - RNA, 21 nt, Human
ugacgagggcuggucaggagg

SEQ ID NO: 369998 - RNA, 19 nt, Human
ugagagcaccagguaaaca

SEQ ID NO: 369999 - RNA, 25 nt, Human
ugagagcaccagguaaacacucugc

SEQ ID NO: 370000 - RNA, 26 nt, Human
ugagagcaccagguaaacuggagacc

SEQ ID NO: 370001 - RNA, 23 nt, Human
ugagcccaggaguucacgaccag

SEQ ID NO: 370002 - RNA, 22 nt, Human
ugagcugagaucucgccacugc

SEQ ID NO: 370003 - RNA, 24 nt, Human
ugaggcaggagaaucgcuugaacc

SEQ ID NO: 370004 - RNA, 24 nt, Human
ugaggcaggagaaucgcuugaacc

SEQ ID NO: 370005 - RNA, 22 nt, Human
ugagggguuuugaaauuuucaa

SEQ ID NO: 370006 - RNA, 21 nt, Human
ugagucucaaacaaaacaaaa

SEQ ID NO: 370007 - RNA, 23 nt, Human
uggaccccuggccugggugccag

SEQ ID NO: 370008 - RNA, 24 nt, Human
uggaucacuugaggucaggaauuc

SEQ ID NO: 370009 - RNA, 26 nt, Human
uggaucacuugaggucaggaauucga

SEQ ID NO: 370010 - RNA, 22 nt, Human
uggcacgcuccuguaaucccag

SEQ ID NO: 370011 - RNA, 21 nt, Human
uggcaucugccccugcuuucc

SEQ ID NO: 370012 - RNA, 19 nt, Human
uggcucacgccuguaaucc

SEQ ID NO: 370013 - RNA, 24 nt, Human
uggcucacgccuguaauccuagca

SEQ ID NO: 370014 - RNA, 24 nt, Human
ugggaggcagagguugcagugagc

SEQ ID NO: 370015 - RNA, 22 nt, Human
uggguaagagcagcuguacaga

SEQ ID NO: 370016 - RNA, 22 nt, Human
ugggugccaguugugugugacg

SEQ ID NO: 370017 - RNA, 24 nt, Human
ugguggcacgcuccuguaauccca

SEQ ID NO: 370018 - RNA, 22 nt, Human
ugguggcucacgccuguaaucc

SEQ ID NO: 370019 - RNA, 24 nt, Human
ugugagguaaaaaaaauggguaag

SEQ ID NO: 370020 - RNA, 18 nt, Human
ugugcagcgcgcggacgc

SEQ ID NO: 370021 - RNA, 19 nt, Human
uguugauguuaaguccugu

SEQ ID NO: 370022 - RNA, 22 nt, Human
uuagcccggagugguggcacgc

SEQ ID NO: 370023 - RNA, 18 nt, Human
uuagccgggcgugguggc

SEQ ID NO: 370024 - RNA, 22 nt, Human
uuagccgggcgugguggcgggc

SEQ ID NO: 370025 - RNA, 24 nt, Human
uuagccgggcgugguggcgggcgc

SEQ ID NO: 370026 - RNA, 24 nt, Human
uucagccugggcaacagagcgaga

SEQ ID NO: 370027 - RNA, 24 nt, Human
uugaaccugggaggcagagguugc

SEQ ID NO: 370028 - RNA, 20 nt, Human
uugagagcaccagguaaaca

SEQ ID NO: 370029 - RNA, 20 nt, Human
uugcagugagccgagagcgc

SEQ ID NO: 370030 - RNA, 21 nt, Human
uugcagugagcugagaucucc

SEQ ID NO: 370031 - RNA, 21 nt, Human
uugcagugagcugagaucucg

SEQ ID NO: 370032 - RNA, 22 nt, Human
uugcagugagcugagaucucgc

SEQ ID NO: 370033 - RNA, 21 nt, Human
uuuaaaauguugccucaggca

SEQ ID NO: 370034 - RNA, 19 nt, Human
agaagaugcuaaacauagc

SEQ ID NO: 370035 - RNA, 22 nt, Human
agacaauacaaacuagcuacga

SEQ ID NO: 370036 - RNA, 19 nt, Human
caagacaauacaaacuagc

SEQ ID NO: 370037 - RNA, 20 nt, Human
caagacaauacaaacuagcu

SEQ ID NO: 370038 - RNA, 24 nt, Human
cagguaccuccucuucuguaacuu

SEQ ID NO: 370039 - RNA, 18 nt, Human
cauggcucuguggggcca

SEQ ID NO: 370040 - RNA, 19 nt, Human
cccaugguuucugcccuaa

SEQ ID NO: 370041 - RNA, 18 nt, Human
cccgcaagcccaagcucu

SEQ ID NO: 370042 - RNA, 21 nt, Human
cgucgccaucuuggccccgaa

SEQ ID NO: 370043 - RNA, 26 nt, Human
cucuggaacugggcccgcaagcccaa

SEQ ID NO: 370044 - RNA, 19 nt, Human
cuguaacuuccaccucugg

SEQ ID NO: 370045 - RNA, 23 nt, Human
gauggaccauggcucuguggggc

SEQ ID NO: 370046 - RNA, 20 nt, Human
ggaccauggcucuguggggc

SEQ ID NO: 370047 - RNA, 21 nt, Human
ggccccgaagucuccaacccu

SEQ ID NO: 370048 - RNA, 18 nt, Human
ggggccagugcuuagcag

SEQ ID NO: 370049 - RNA, 24 nt, Human
uaaaacaggcaauugugcuacucc

SEQ ID NO: 370050 - RNA, 21 nt, Human
ucacuggugguuguuuuuuuu

SEQ ID NO: 370051 - RNA, 19 nt, Human
ucggcucaaagaggguaac

SEQ ID NO: 370052 - RNA, 22 nt, Human
ucucucggauggaccauggcuc

SEQ ID NO: 370053 - RNA, 21 nt, Human
ugacaagacaauacaaacuag

SEQ ID NO: 370054 - RNA, 21 nt, Human
uggaacugggcccgcaagccc

SEQ ID NO: 370055 - RNA, 22 nt, Human
uggccccgaagucuccaacccu

SEQ ID NO: 370056 - RNA, 21 nt, Human
uucuguaacuuccaccucugg

SEQ ID NO: 370057 - RNA, 26 nt, Human
uuuuuuuuuuuuuuuuuuuaguuuuu

SEQ ID NO: 370058 - RNA, 19 nt, Human
aaaaauacuagaaugccau

SEQ ID NO: 370059 - RNA, 22 nt, Human
aaauauaaagcuacacauuuca

SEQ ID NO: 370060 - RNA, 21 nt, Human
aagcccagacucaauagaaaa

SEQ ID NO: 370061 - RNA, 21 nt, Human
acaaaaauacuagaaugccau

SEQ ID NO: 370062 - RNA, 21 nt, Human
acacaaacaagcccagacuca

SEQ ID NO: 370063 - RNA, 21 nt, Human
agaaaagaaagcaacaaagaa

SEQ ID NO: 370064 - RNA, 19 nt, Human
agaaugccauaaaauauaa

SEQ ID NO: 370065 - RNA, 24 nt, Human
agcaacaaagaagugaaaaagucu

SEQ ID NO: 370066 - RNA, 21 nt, Human
agcuaaaaccucagcacaagc

SEQ ID NO: 370067 - RNA, 21 nt, Human
aguagggggacaaggcagggg

SEQ ID NO: 370068 - RNA, 18 nt, Human
auagaaucuagguucucu

SEQ ID NO: 370069 - RNA, 21 nt, Human
augcaagaaaucaaaaccaaa

SEQ ID NO: 370070 - RNA, 21 nt, Human
caaaaauacuagaaugccagu

SEQ ID NO: 370071 - RNA, 21 nt, Human
caaaaauacuagaaugccaua

SEQ ID NO: 370072 - RNA, 22 nt, Human
caaaauacaguacacaaaaaua

SEQ ID NO: 370073 - RNA, 18 nt, Human
caacaaagaagugaaaaa

SEQ ID NO: 370074 - RNA, 22 nt, Human
cagcacaagcuucaaaagaaca

SEQ ID NO: 370075 - RNA, 23 nt, Human
caguaugcaguaacacaaacaag

SEQ ID NO: 370076 - RNA, 21 nt, Human
ccagagcucucaguagcugac

SEQ ID NO: 370077 - RNA, 23 nt, Human
cccagacucaauagaaaagaaag

SEQ ID NO: 370078 - RNA, 24 nt, Human
cccagacucaauagaaaagaaagc

SEQ ID NO: 370079 - RNA, 24 nt, Human
ccuucuuuccagagcucucaguag

SEQ ID NO: 370080 - RNA, 19 nt, Human
cggcaguggcugcacugga

SEQ ID NO: 370081 - RNA, 21 nt, Human
cggcaguggcugcacuggaaa

SEQ ID NO: 370082 - RNA, 23 nt, Human
cggcggcaguggcugcacuggaa

SEQ ID NO: 370083 - RNA, 23 nt, Human
cuaaucacaguaugcaguaacac

SEQ ID NO: 370084 - RNA, 20 nt, Human
cuagguucucuuucaaagca

SEQ ID NO: 370085 - RNA, 18 nt, Human
gaauacacuggaacuggc

SEQ ID NO: 370086 - RNA, 19 nt, Human
gagggcuccugggcggcgg

SEQ ID NO: 370087 - RNA, 22 nt, Human
gaguagggggacaaggcagggg

SEQ ID NO: 370088 - RNA, 23 nt, Human
gcaagcacaguaucaaauauuag

SEQ ID NO: 370089 - RNA, 24 nt, Human
gcacaagcuucaaaagaacaagga

SEQ ID NO: 370090 - RNA, 19 nt, Human
gcccagacucaauagaaaa

SEQ ID NO: 370091 - RNA, 20 nt, Human
gcggcaguggcugcacugga

SEQ ID NO: 370092 - RNA, 25 nt, Human
gcggcaguggcugcacuggaaagag

SEQ ID NO: 370093 - RNA, 24 nt, Human
gcuaaucacaguaugcaguaacac

SEQ ID NO: 370094 - RNA, 19 nt, Human
ggacgagggcuccugggcg

SEQ ID NO: 370095 - RNA, 21 nt, Human
ggcggcaguggcugcacugga

SEQ ID NO: 370096 - RNA, 22 nt, Human
ggcggcaguggcugcacuggaa

SEQ ID NO: 370097 - RNA, 23 nt, Human
gggaacgaguagggggacaaggc

SEQ ID NO: 370098 - RNA, 22 nt, Human
gggagcgggaacgaguaggggg

SEQ ID NO: 370099 - RNA, 21 nt, Human
guuuuuccacagccauauaaa

SEQ ID NO: 370100 - RNA, 23 nt, Human
uaaaacauagaaaagcuaaaacc

SEQ ID NO: 370101 - RNA, 20 nt, Human
uaaaauggaaacagauuuaa

SEQ ID NO: 370102 - RNA, 22 nt, Human
uagaaaagcuaaaaccucagca

SEQ ID NO: 370103 - RNA, 20 nt, Human
uaggaaaaaaauauuuagau

SEQ ID NO: 370104 - RNA, 18 nt, Human
uaggauuucaccuucuug

SEQ ID NO: 370105 - RNA, 19 nt, Human
uagguucucuuucaaagca

SEQ ID NO: 370106 - RNA, 24 nt, Human
uauaaaacauagaaaagcuaaaac

SEQ ID NO: 370107 - RNA, 22 nt, Human
uaugcaagaaaucaaaaccaaa

SEQ ID NO: 370108 - RNA, 21 nt, Human
uaugcuaaucacaguaugcag

SEQ ID NO: 370109 - RNA, 22 nt, Human
uaugcuaaucacaguaugcagu

SEQ ID NO: 370110 - RNA, 23 nt, Human
ucguuuuuccacagccauauaaa

SEQ ID NO: 370111 - RNA, 19 nt, Human
ugaaaugcacaaaauacag

SEQ ID NO: 370112 - RNA, 26 nt, Human
ugaccucaaagaaacaauuauuaugc

SEQ ID NO: 370113 - RNA, 23 nt, Human
ugaugaagacaugaaaugcacaa

SEQ ID NO: 370114 - RNA, 21 nt, Human
uggaaagagcuagauggagca

SEQ ID NO: 370115 - RNA, 24 nt, Human
ugggagcgggaacgaguaggggga

SEQ ID NO: 370116 - RNA, 21 nt, Human
uuaggaaaaaaauauuuagau

SEQ ID NO: 370117 - RNA, 24 nt, Human
uuuccacagccauauaaauuuaaa

SEQ ID NO: 370118 - RNA, 22 nt, Human
aaaaaccucgaaaauugccuga

SEQ ID NO: 370119 - RNA, 22 nt, Human
aaacuuuuuuuuaaaucaagaa

SEQ ID NO: 370120 - RNA, 22 nt, Human
aaagaagccauccaauacacua

SEQ ID NO: 370121 - RNA, 21 nt, Human
aaauuagacccacccauagaa

SEQ ID NO: 370122 - RNA, 26 nt, Human
aagacaaaaaucuucucaucugaacc

SEQ ID NO: 370123 - RNA, 25 nt, Human
aaucaagagcaaaaaaauuaagcaa

SEQ ID NO: 370124 - RNA, 20 nt, Human
acccacauauuuuccaucaa

SEQ ID NO: 370125 - RNA, 21 nt, Human
acccagugccuauaugacaaa

SEQ ID NO: 370126 - RNA, 25 nt, Human
accucgaaaauugccugaugaaaaa

SEQ ID NO: 370127 - RNA, 22 nt, Human
acuuuagggagaaggagacgau

SEQ ID NO: 370128 - RNA, 19 nt, Human
agaaauauacuauccaccc

SEQ ID NO: 370129 - RNA, 20 nt, Human
agagcauaaaauggaaaaau

SEQ ID NO: 370130 - RNA, 18 nt, Human
agggagaaggagacgaua

SEQ ID NO: 370131 - RNA, 24 nt, Human
auagaaauauacuauccacccaca

SEQ ID NO: 370132 - RNA, 21 nt, Human
auauuuguguauguguguguu

SEQ ID NO: 370133 - RNA, 19 nt, Human
aucugaacaggugauaaaa

SEQ ID NO: 370134 - RNA, 24 nt, Human
augauauagaaacaacccagugcc

SEQ ID NO: 370135 - RNA, 18 nt, Human
caguagaguaaugcuugc

SEQ ID NO: 370136 - RNA, 21 nt, Human
cagugcuacaaaagacaaaaa

SEQ ID NO: 370137 - RNA, 22 nt, Human
cagugcuacaaaagacaaaaau

SEQ ID NO: 370138 - RNA, 26 nt, Human
caguucuaccaaggaaaaagguccau

SEQ ID NO: 370139 - RNA, 20 nt, Human
caucugaacaggugauaaaa

SEQ ID NO: 370140 - RNA, 22 nt, Human
ccaguggcuuuuaauggcuucu

SEQ ID NO: 370141 - RNA, 23 nt, Human
ccgaacaaauaaaaaccucgaaa

SEQ ID NO: 370142 - RNA, 19 nt, Human
gaacaggugauaaaaccag

SEQ ID NO: 370143 - RNA, 24 nt, Human
gacgaugaugauauagaaacaacc

SEQ ID NO: 370144 - RNA, 18 nt, Human
gagucacccagaguacag

SEQ ID NO: 370145 - RNA, 18 nt, Human
gcuuuuaauggcuucucc

SEQ ID NO: 370146 - RNA, 19 nt, Human
gugauaaaaccaggcacaa

SEQ ID NO: 370147 - RNA, 21 nt, Human
uaaaaccaggcacaaucaaac

SEQ ID NO: 370148 - RNA, 20 nt, Human
uaaccaguggcuuuuaaugg

SEQ ID NO: 370149 - RNA, 20 nt, Human
uacaccaugauaucauaugu

SEQ ID NO: 370150 - RNA, 21 nt, Human
uaccaaauuagacccacccau

SEQ ID NO: 370151 - RNA, 19 nt, Human
uaccaaggaaaaaggucca

SEQ ID NO: 370152 - RNA, 21 nt, Human
uaccacaguguaaaaaaacaa

SEQ ID NO: 370153 - RNA, 27 nt, Human
uaccacaguguaaaaaaacaauaccga

SEQ ID NO: 370154 - RNA, 21 nt, Human
uaggaaagcaccaacaccaca

SEQ ID NO: 370155 - RNA, 23 nt, Human
uaucagugcuacaaaagacaaaa

SEQ ID NO: 370156 - RNA, 21 nt, Human
uauuaggaaagcaccaacacc

SEQ ID NO: 370157 - RNA, 24 nt, Human
ucacuggguagaaaugagacaggg

SEQ ID NO: 370158 - RNA, 25 nt, Human
ucacuggguagaaaugagacagggg

SEQ ID NO: 370159 - RNA, 18 nt, Human
ucccucucugagucaccc

SEQ ID NO: 370160 - RNA, 24 nt, Human
ucugagucacccagaguacagaaa

SEQ ID NO: 370161 - RNA, 20 nt, Human
ugugcaaagaaagcaaagau

SEQ ID NO: 370162 - RNA, 22 nt, Human
uuaccaaauuagacccacccau

SEQ ID NO: 370163 - RNA, 23 nt, Human
uucuucgaaauuacuggaauuuu

SEQ ID NO: 370164 - RNA, 24 nt, Human
uuuuuuuuuuuuuuuuuuuucaag

SEQ ID NO: 370165 - RNA, 23 nt, Human
aaacugaccuuacuaaaauccca

SEQ ID NO: 370166 - RNA, 21 nt, Human
aacacauaacaauuguuuaca

SEQ ID NO: 370167 - RNA, 28 nt, Human
aagaaaacggcacagggagaaaaggacc

SEQ ID NO: 370168 - RNA, 28 nt, Human
aagaaaacggcacagggagaaaaggacc

SEQ ID NO: 370169 - RNA, 21 nt, Human
aagcagaaagaguagacugug

SEQ ID NO: 370170 - RNA, 21 nt, Human
aagcagaaagaguagacugug

SEQ ID NO: 370171 - RNA, 21 nt, Human
aaugcaaauaugguuuuugaa

SEQ ID NO: 370172 - RNA, 21 nt, Human
acacaacauugucuccgaucu

SEQ ID NO: 370173 - RNA, 21 nt, Human
acacaacauugucuccgaucu

SEQ ID NO: 370174 - RNA, 20 nt, Human
acacauaacaauuguuuaca

SEQ ID NO: 370175 - RNA, 22 nt, Human
accagguaacuucccaacugcu

SEQ ID NO: 370176 - RNA, 22 nt, Human
accagguaacuucccaacugcu

SEQ ID NO: 370177 - RNA, 22 nt, Human
agaaaagaaaaaagaugacuaa

SEQ ID NO: 370178 - RNA, 22 nt, Human
agaaaagaaaaaagaugacuaa

SEQ ID NO: 370179 - RNA, 19 nt, Human
agaaaaggacuuaucuggu

SEQ ID NO: 370180 - RNA, 19 nt, Human
agaaaaggacuuaucuggu

SEQ ID NO: 370181 - RNA, 20 nt, Human
agaaaaggacuuaucuggug

SEQ ID NO: 370182 - RNA, 18 nt, Human
agaacuguacaaaacaaa

SEQ ID NO: 370183 - RNA, 25 nt, Human
agcaagaaaacggcacagggagaaa

SEQ ID NO: 370184 - RNA, 25 nt, Human
agcaagaaaacggcacagggagaaa

SEQ ID NO: 370185 - RNA, 25 nt, Human
aggaaaaauaaaaaccugugcuaac

SEQ ID NO: 370186 - RNA, 22 nt, Human
agggagaaaaggacuuaucugg

SEQ ID NO: 370187 - RNA, 22 nt, Human
agggagaaaaggacuuaucugg

SEQ ID NO: 370188 - RNA, 23 nt, Human
auaaaguuacuuccaaaaaaagc

SEQ ID NO: 370189 - RNA, 21 nt, Human
auauaacaacaucuaacagaa

SEQ ID NO: 370190 - RNA, 21 nt, Human
auauaacaacaucuaacagaa

SEQ ID NO: 370191 - RNA, 19 nt, Human
auguagcuguaggaaaaau

SEQ ID NO: 370192 - RNA, 21 nt, Human
caacagcauagcauauaggaa

SEQ ID NO: 370193 - RNA, 21 nt, Human
caacagcauagcauauaggaa

SEQ ID NO: 370194 - RNA, 19 nt, Human
caagaaaacggcacaggga

SEQ ID NO: 370195 - RNA, 19 nt, Human
caagaaaacggcacaggga

SEQ ID NO: 370196 - RNA, 22 nt, Human
cacagcaaguuacauuuaaaca

SEQ ID NO: 370197 - RNA, 18 nt, Human
cacaguauauaacggaac

SEQ ID NO: 370198 - RNA, 19 nt, Human
cacgccucucacauauagu

SEQ ID NO: 370199 - RNA, 19 nt, Human
cacgccucucacauauagu

SEQ ID NO: 370200 - RNA, 18 nt, Human
caggccccgcagcccuga

SEQ ID NO: 370201 - RNA, 22 nt, Human
caggccccgcagcccugaagcc

SEQ ID NO: 370202 - RNA, 27 nt, Human
caggccccgcagcccugaagccgggga

SEQ ID NO: 370203 - RNA, 21 nt, Human
caucuaacagaacuguacaaa

SEQ ID NO: 370204 - RNA, 21 nt, Human
caucuaacagaacuguacaaa

SEQ ID NO: 370205 - RNA, 31 nt, Human
ccaacuuccauccagauaucacgccucucaa

SEQ ID NO: 370206 - RNA, 22 nt, Human
ccaaucaaacugaccuuacuaa

SEQ ID NO: 370207 - RNA, 22 nt, Human
ccagcccaacuuccauccagau

SEQ ID NO: 370208 - RNA, 22 nt, Human
ccagcccaacuuccauccagau

SEQ ID NO: 370209 - RNA, 23 nt, Human
ccagcccaacuuccauccagaua

SEQ ID NO: 370210 - RNA, 23 nt, Human
ccagcccaacuuccauccagaua

SEQ ID NO: 370211 - RNA, 21 nt, Human
cccacagacuauauuuauacc

SEQ ID NO: 370212 - RNA, 19 nt, Human
cccugaagccggggacaaa

SEQ ID NO: 370213 - RNA, 20 nt, Human
ccuccuuccaggccccgcag

SEQ ID NO: 370214 - RNA, 24 nt, Human
cgcagcccugaagccggggacaaa

SEQ ID NO: 370215 - RNA, 21 nt, Human
cgccucggcuccccuggaucg

SEQ ID NO: 370216 - RNA, 19 nt, Human
cggcacagggagaaaagga

SEQ ID NO: 370217 - RNA, 19 nt, Human
cggcacagggagaaaagga

SEQ ID NO: 370218 - RNA, 19 nt, Human
cgugaaaauacucagcaua

SEQ ID NO: 370219 - RNA, 24 nt, Human
cucccacagacuauauuuauaccu

SEQ ID NO: 370220 - RNA, 20 nt, Human
cugaaguauugcuauaugga

SEQ ID NO: 370221 - RNA, 20 nt, Human
cugaaguauugcuauaugga

SEQ ID NO: 370222 - RNA, 18 nt, Human
cuuccaaaaaaagcuaca

SEQ ID NO: 370223 - RNA, 27 nt, Human
cuucuuuguuuuaaauaugcucaggag

SEQ ID NO: 370224 - RNA, 19 nt, Human
cuuuggagaucauccagcc

SEQ ID NO: 370225 - RNA, 19 nt, Human
cuuuggagaucauccagcc

SEQ ID NO: 370226 - RNA, 22 nt, Human
gaagacguguucucuagaucuc

SEQ ID NO: 370227 - RNA, 23 nt, Human
gaucaggagcgcacgacugaaag

SEQ ID NO: 370228 - RNA, 24 nt, Human
uaacaaaaaaguaaaaaaaaaaga

SEQ ID NO: 370229 - RNA, 21 nt, Human
uaacacaacauugucuccgau

SEQ ID NO: 370230 - RNA, 23 nt, Human
uaacagaacuguacaaaacaaag

SEQ ID NO: 370231 - RNA, 23 nt, Human
uaagaugucuuuaagaguugaaa

SEQ ID NO: 370232 - RNA, 23 nt, Human
uaagaugucuuuaagaguugaaa

SEQ ID NO: 370233 - RNA, 27 nt, Human
uacaaggacuacaaacacugcaucaca

SEQ ID NO: 370234 - RNA, 21 nt, Human
uagcgggcuaaucccacauua

SEQ ID NO: 370235 - RNA, 21 nt, Human
uagcgggcuaaucccacauua

SEQ ID NO: 370236 - RNA, 19 nt, Human
uagcuggcuaauucacugu

SEQ ID NO: 370237 - RNA, 19 nt, Human
uagcuggcuaauucacugu

SEQ ID NO: 370238 - RNA, 21 nt, Human
uaggaaaaauaaaaaccugug

SEQ ID NO: 370239 - RNA, 23 nt, Human
uauaacacaacauugucuccgau

SEQ ID NO: 370240 - RNA, 19 nt, Human
uaucaaaugacuuccaaca

SEQ ID NO: 370241 - RNA, 26 nt, Human
uaucaaaugacuuccaacacucuuaa

SEQ ID NO: 370242 - RNA, 26 nt, Human
uaucaaaugacuuccaacacucuuaa

SEQ ID NO: 370243 - RNA, 20 nt, Human
uaucacgccucucacauaua

SEQ ID NO: 370244 - RNA, 20 nt, Human
uaucacgccucucacauaua

SEQ ID NO: 370245 - RNA, 21 nt, Human
ucaacccaaauucugcagcaa

SEQ ID NO: 370246 - RNA, 21 nt, Human
ucaacccaaauucugcagcaa

SEQ ID NO: 370247 - RNA, 19 nt, Human
uccaacauagaaaauaacu

SEQ ID NO: 370248 - RNA, 19 nt, Human
ucccuuugagcaagaaaac

SEQ ID NO: 370249 - RNA, 22 nt, Human
ucccuuugagcaagaaaacggc

SEQ ID NO: 370250 - RNA, 22 nt, Human
ucccuuugagcaagaaaacggc

SEQ ID NO: 370251 - RNA, 19 nt, Human
ucucaaauuauuucaggcc

SEQ ID NO: 370252 - RNA, 20 nt, Human
ucuuuguaagcagaaagagu

SEQ ID NO: 370253 - RNA, 19 nt, Human
ugaaauaaaaccaccuacc

SEQ ID NO: 370254 - RNA, 19 nt, Human
ugaaauaaaaccaccuacc

SEQ ID NO: 370255 - RNA, 22 nt, Human
ugaaauaaaaccaccuaccuaa

SEQ ID NO: 370256 - RNA, 23 nt, Human
ugagugggaugacaagaggagcg

SEQ ID NO: 370257 - RNA, 20 nt, Human
ugcagcaaauaaguuugcuu

SEQ ID NO: 370258 - RNA, 20 nt, Human
ugcagcaaauaaguuugcuu

SEQ ID NO: 370259 - RNA, 20 nt, Human
ugccucaaaaagggaccagg

SEQ ID NO: 370260 - RNA, 20 nt, Human
ugccucaaaaagggaccagg

SEQ ID NO: 370261 - RNA, 20 nt, Human
uggcuuuuuuauauauuuau

SEQ ID NO: 370262 - RNA, 20 nt, Human
uggcuuuuuuauauauuuau

SEQ ID NO: 370263 - RNA, 20 nt, Human
ugguaauacaaugucuucaa

SEQ ID NO: 370264 - RNA, 20 nt, Human
ugguaauacaaugucuucaa

SEQ ID NO: 370265 - RNA, 19 nt, Human
uguagcuguaggaaaaaua

SEQ ID NO: 370266 - RNA, 25 nt, Human
ugucaguaauaccucuucacuaaua

SEQ ID NO: 370267 - RNA, 20 nt, Human
uuagaagacguguucucuag

SEQ ID NO: 370268 - RNA, 22 nt, Human
uuccaaaaaaagcuacauaaau

SEQ ID NO: 370269 - RNA, 18 nt, Human
uuccaggccccgcagccc

SEQ ID NO: 370270 - RNA, 19 nt, Human
uucccuuugagcaagaaaa

SEQ ID NO: 370271 - RNA, 19 nt, Human
uucccuuugagcaagaaaa

SEQ ID NO: 370272 - RNA, 20 nt, Human
uugccaaaaacuguuuauac

SEQ ID NO: 370273 - RNA, 20 nt, Human
uuggagaucauccagcccaa

SEQ ID NO: 370274 - RNA, 20 nt, Human
uuggagaucauccagcccaa

SEQ ID NO: 370275 - RNA, 24 nt, Human
uugguucuggaaugcaaauauggu

SEQ ID NO: 370276 - RNA, 21 nt, Human
uuuaaauaugcucaggaguca

SEQ ID NO: 370277 - RNA, 21 nt, Human
uuuaaauaugcucaggaguca

SEQ ID NO: 370278 - RNA, 22 nt, Human
uuuaaauaugcucaggagucaa

SEQ ID NO: 370279 - RNA, 22 nt, Human
uuuaaauaugcucaggagucaa

SEQ ID NO: 370280 - RNA, 24 nt, Human
uuugaaauaaaaccaccuaccuaa

SEQ ID NO: 370281 - RNA, 21 nt, Human
aaaaaaauuucagcacagcug

SEQ ID NO: 370282 - RNA, 21 nt, Human
aaaaggaaaacgaaagagaga

SEQ ID NO: 370283 - RNA, 22 nt, Human
aaaaggaaaacgaaagagagac

SEQ ID NO: 370284 - RNA, 27 nt, Human
aaaaggaaaacgaaagagagacugagg

SEQ ID NO: 370285 - RNA, 18 nt, Human
aaacgaaagagagacuga

SEQ ID NO: 370286 - RNA, 21 nt, Human
agcgcuccccugcgccgcgcc

SEQ ID NO: 370287 - RNA, 21 nt, Human
cacccgagcgcuccccugcgc

SEQ ID NO: 370288 - RNA, 23 nt, Human
ccgggcccaggagcugcacacuc

SEQ ID NO: 370289 - RNA, 23 nt, Human
cgccgccuccuccucuuccucug

SEQ ID NO: 370290 - RNA, 22 nt, Human
cgccgcgccuccgcgacgggcc

SEQ ID NO: 370291 - RNA, 25 nt, Human
cgccuccuccucuuccucuggaaga

SEQ ID NO: 370292 - RNA, 21 nt, Human
cggaggguugggggaagggaa

SEQ ID NO: 370293 - RNA, 25 nt, Human
cguucugcucuuccgcggggcucua

SEQ ID NO: 370294 - RNA, 20 nt, Human
cuccgcgacgggccugagcc

SEQ ID NO: 370295 - RNA, 21 nt, Human
gacucccacccgagcgcuccc

SEQ ID NO: 370296 - RNA, 25 nt, Human
gaugucuuuaaaugacauaacaauu

SEQ ID NO: 370297 - RNA, 21 nt, Human
gcgacgggccugagccgggcc

SEQ ID NO: 370298 - RNA, 24 nt, Human
gcgccgcgccuccgcgacgggccu

SEQ ID NO: 370299 - RNA, 22 nt, Human
ggccugagccgggcccaggagc

SEQ ID NO: 370300 - RNA, 21 nt, Human
gggccugagccgggcccagga

SEQ ID NO: 370301 - RNA, 23 nt, Human
gggcggggccagacgggucacug

SEQ ID NO: 370302 - RNA, 22 nt, Human
guucugcucuuccgcggggcuc

SEQ ID NO: 370303 - RNA, 23 nt, Human
uaaugauaaaaaaauuucagcac

SEQ ID NO: 370304 - RNA, 18 nt, Human
ucacugaggucaaggaag

SEQ ID NO: 370305 - RNA, 21 nt, Human
ucaguaaacagaugaaccuga

SEQ ID NO: 370306 - RNA, 21 nt, Human
uccaggacgacgaccuacgcc

SEQ ID NO: 370307 - RNA, 23 nt, Human
ucgcaauaaacugguggaggagc

SEQ ID NO: 370308 - RNA, 19 nt, Human
ucugcucuuccgcggggcu

SEQ ID NO: 370309 - RNA, 18 nt, Human
ugacauaacaauugagca

SEQ ID NO: 370310 - RNA, 22 nt, Human
ugauaaaaaaauuucagcacag

SEQ ID NO: 370311 - RNA, 20 nt, Human
uuagagaagggcggaggguu

SEQ ID NO: 370312 - RNA, 18 nt, Human
uuccaccggcgcuuaccu

SEQ ID NO: 370313 - RNA, 19 nt, Human
uggaaaguuggcaaaagca

SEQ ID NO: 370314 - RNA, 19 nt, Human
uggaaaguuggcaaaagca

SEQ ID NO: 370315 - RNA, 19 nt, Human
uuuuuuucuuuuugccccu

SEQ ID NO: 370316 - RNA, 19 nt, Human
aaaccgaagccggaaggcg

SEQ ID NO: 370317 - RNA, 26 nt, Human
aaaccgaagccggaaggcgaaaugcg

SEQ ID NO: 370318 - RNA, 25 nt, Human
acacaaccuaaaauaagggggaacc

SEQ ID NO: 370319 - RNA, 18 nt, Human
acccgauccucaggaugg

SEQ ID NO: 370320 - RNA, 21 nt, Human
acccgauccucaggauggcgc

SEQ ID NO: 370321 - RNA, 22 nt, Human
agggaucaggagggcuggggcg

SEQ ID NO: 370322 - RNA, 20 nt, Human
agggguagggaggguggggu

SEQ ID NO: 370323 - RNA, 24 nt, Human
auacaaaaacaaaacacaaccuaa

SEQ ID NO: 370324 - RNA, 21 nt, Human
caaaacacaaccuaaaauaag

SEQ ID NO: 370325 - RNA, 24 nt, Human
caccuggaagcccccacuccaccc

SEQ ID NO: 370326 - RNA, 19 nt, Human
cagaggcgggcggccggag

SEQ ID NO: 370327 - RNA, 26 nt, Human
ccaccuggaagcccccacuccacccc

SEQ ID NO: 370328 - RNA, 21 nt, Human
ccccacuccacccccacccga

SEQ ID NO: 370329 - RNA, 21 nt, Human
ccccagagacuggggaggggu

SEQ ID NO: 370330 - RNA, 25 nt, Human
cccccacuccacccccacccgaucc

SEQ ID NO: 370331 - RNA, 19 nt, Human
ccgauccucaggauggcgc

SEQ ID NO: 370332 - RNA, 22 nt, Human
ccgccgccgccgccgcagacga

SEQ ID NO: 370333 - RNA, 21 nt, Human
ccucagccgccgccgccgccg

SEQ ID NO: 370334 - RNA, 18 nt, Human
cgccgccgccgccgcaga

SEQ ID NO: 370335 - RNA, 19 nt, Human
cgugggagccgugugcuga

SEQ ID NO: 370336 - RNA, 22 nt, Human
cucaacaaauggaaugugugcc

SEQ ID NO: 370337 - RNA, 18 nt, Human
cugaccccagagacuggg

SEQ ID NO: 370338 - RNA, 20 nt, Human
cuguccccucgccucugucc

SEQ ID NO: 370339 - RNA, 24 nt, Human
gaagauggaggagaggcggcccaa

SEQ ID NO: 370340 - RNA, 24 nt, Human
gaagcccccacuccacccccaccc

SEQ ID NO: 370341 - RNA, 19 nt, Human
gaagccggaaggcgaaaug

SEQ ID NO: 370342 - RNA, 19 nt, Human
gacgacgaccaggccgccc

SEQ ID NO: 370343 - RNA, 25 nt, Human
gagggugggguggggggcaggacug

SEQ ID NO: 370344 - RNA, 18 nt, Human
gcccccacuccaccccca

SEQ ID NO: 370345 - RNA, 21 nt, Human
gccgagggaaaccgaagccgg

SEQ ID NO: 370346 - RNA, 25 nt, Human
gcggccggagccgggcugcgaggga

SEQ ID NO: 370347 - RNA, 18 nt, Human
ggcggggccggggcgugc

SEQ ID NO: 370348 - RNA, 21 nt, Human
gggaagggccaccuggaagcc

SEQ ID NO: 370349 - RNA, 22 nt, Human
gggagggugggguggggggcag

SEQ ID NO: 370350 - RNA, 18 nt, Human
gggcggggccggggcgug

SEQ ID NO: 370351 - RNA, 23 nt, Human
gggcuggggcggggccggggcgu

SEQ ID NO: 370352 - RNA, 25 nt, Human
ggggcaggacuggggcucaacaaau

SEQ ID NO: 370353 - RNA, 18 nt, Human
gggguagggagggugggg

SEQ ID NO: 370354 - RNA, 22 nt, Human
gugggguggggggcaggacugg

SEQ ID NO: 370355 - RNA, 19 nt, Human
uaagguuucuuccugaccc

SEQ ID NO: 370356 - RNA, 20 nt, Human
uacaaaaacaaaacacaacc

SEQ ID NO: 370357 - RNA, 20 nt, Human
uagcccugccuggggcuccu

SEQ ID NO: 370358 - RNA, 22 nt, Human
uauacaaaaacaaaacacaacc

SEQ ID NO: 370359 - RNA, 21 nt, Human
ucagccgggcuccucagccgc

SEQ ID NO: 370360 - RNA, 25 nt, Human
uccucagccgccgccgccgccgcag

SEQ ID NO: 370361 - RNA, 18 nt, Human
ucuuccugaccccagaga

SEQ ID NO: 370362 - RNA, 18 nt, Human
ugccuggggcuccuauac

SEQ ID NO: 370363 - RNA, 22 nt, Human
ugccuggggcuccuauacaaaa

SEQ ID NO: 370364 - RNA, 18 nt, Human
uggggagggguagggagg

SEQ ID NO: 370365 - RNA, 24 nt, Human
uggggcucaacaaauggaaugugu

SEQ ID NO: 370366 - RNA, 25 nt, Human
ugggguggggggcaggacuggggcu

SEQ ID NO: 370367 - RNA, 24 nt, Human
uguugccuuuuauuuaaaaacugu

SEQ ID NO: 370368 - RNA, 21 nt, Human
uuccugaccccagagacuggg

SEQ ID NO: 370369 - RNA, 18 nt, Human
uugaacaugaccuguugc

SEQ ID NO: 370370 - RNA, 19 nt, Human
aaaacacccuuuccccaca

SEQ ID NO: 370371 - RNA, 22 nt, Human
aaaacacucacccccaauccaa

SEQ ID NO: 370372 - RNA, 23 nt, Human
aaaacccugugauagauggaaug

SEQ ID NO: 370373 - RNA, 21 nt, Human
aaacaaaacacucacccccaa

SEQ ID NO: 370374 - RNA, 23 nt, Human
aaacacucacccccaauccaaug

SEQ ID NO: 370375 - RNA, 24 nt, Human
aaaccaagcucuaccaaaaacacc

SEQ ID NO: 370376 - RNA, 25 nt, Human
aaaccagagccagcaggccuaggga

SEQ ID NO: 370377 - RNA, 22 nt, Human
aaagacaugaaaagaaaaagcc

SEQ ID NO: 370378 - RNA, 21 nt, Human
aaagaccugagguuacaaggg

SEQ ID NO: 370379 - RNA, 22 nt, Human
aaagccaccacuuauacugaaa

SEQ ID NO: 370380 - RNA, 21 nt, Human
aaagcucacacugcccccaga

SEQ ID NO: 370381 - RNA, 20 nt, Human
aaccaagcucuaccaaaaac

SEQ ID NO: 370382 - RNA, 18 nt, Human
aaccagagccagcaggcc

SEQ ID NO: 370383 - RNA, 18 nt, Human
aaccagagccagcaggcc

SEQ ID NO: 370384 - RNA, 24 nt, Human
aacccucaaagcucacacugcccc

SEQ ID NO: 370385 - RNA, 22 nt, Human
aagagagcaaaaaugguaaaga

SEQ ID NO: 370386 - RNA, 25 nt, Human
aagagggagaaaaaaaugcacacaa

SEQ ID NO: 370387 - RNA, 20 nt, Human
aagaguccagaacaaaaaca

SEQ ID NO: 370388 - RNA, 21 nt, Human
aagaguccagaacaaaaacaa

SEQ ID NO: 370389 - RNA, 23 nt, Human
aagcaaaaaacugcaagagagca

SEQ ID NO: 370390 - RNA, 22 nt, Human
aagcagaaauaaggucacuuau

SEQ ID NO: 370391 - RNA, 24 nt, Human
aagccaggcgcuuuggaaaccaag

SEQ ID NO: 370392 - RNA, 18 nt, Human
aaggacagaagggaggga

SEQ ID NO: 370393 - RNA, 20 nt, Human
aauaacagaaagauaaaaag

SEQ ID NO: 370394 - RNA, 18 nt, Human
acaaagcaaaaaacugca

SEQ ID NO: 370395 - RNA, 22 nt, Human
acaaagcaaaaaacugcaagag

SEQ ID NO: 370396 - RNA, 23 nt, Human
acaaagcaaaaaacugcaagaga

SEQ ID NO: 370397 - RNA, 20 nt, Human
accaaaaacacccuuucccc

SEQ ID NO: 370398 - RNA, 23 nt, Human
accaagcucuaccaaaaacaccc

SEQ ID NO: 370399 - RNA, 18 nt, Human
acccaagaaaguugagga

SEQ ID NO: 370400 - RNA, 19 nt, Human
acccucagcaucucuuuga

SEQ ID NO: 370401 - RNA, 20 nt, Human
agaaaaagauauccaaaaga

SEQ ID NO: 370402 - RNA, 18 nt, Human
agaaaagcagaaauaagg

SEQ ID NO: 370403 - RNA, 18 nt, Human
agacaugaaaagaaaaag

SEQ ID NO: 370404 - RNA, 23 nt, Human
agagaggggugguaagaggagug

SEQ ID NO: 370405 - RNA, 24 nt, Human
agagccagcaggccuagggaagga

SEQ ID NO: 370406 - RNA, 21 nt, Human
agaggaguggggaggcacggg

SEQ ID NO: 370407 - RNA, 20 nt, Human
agcaggccuagggaaggagc

SEQ ID NO: 370408 - RNA, 22 nt, Human
aggaaaaaaccgggaacucuca

SEQ ID NO: 370409 - RNA, 18 nt, Human
aggaaaaaaguucucaag

SEQ ID NO: 370410 - RNA, 18 nt, Human
aggacaagaggaaaaaac

SEQ ID NO: 370411 - RNA, 24 nt, Human
aggcacuggggucuuucuggagcc

SEQ ID NO: 370412 - RNA, 20 nt, Human
agggagggaaggacaagagg

SEQ ID NO: 370413 - RNA, 21 nt, Human
aggggugguaagaggaguggg

SEQ ID NO: 370414 - RNA, 22 nt, Human
aguaaaaauauuuccaccugga

SEQ ID NO: 370415 - RNA, 22 nt, Human
auaaacucauucucauuuccac

SEQ ID NO: 370416 - RNA, 18 nt, Human
auccaaaagauguccacc

SEQ ID NO: 370417 - RNA, 20 nt, Human
auccccacuccagcucaugg

SEQ ID NO: 370418 - RNA, 20 nt, Human
caacacaaaaagugucagaa

SEQ ID NO: 370419 - RNA, 23 nt, Human
cacacugagaaacauguuuguac

SEQ ID NO: 370420 - RNA, 18 nt, Human
cacagccuggcccacccc

SEQ ID NO: 370421 - RNA, 23 nt, Human
cacagccuggcccaccccggccc

SEQ ID NO: 370422 - RNA, 18 nt, Human
cacaguaugaaccagaau

SEQ ID NO: 370423 - RNA, 20 nt, Human
caccccaaaccucaaagcau

SEQ ID NO: 370424 - RNA, 21 nt, Human
cacugcccccagaaaaacaaa

SEQ ID NO: 370425 - RNA, 20 nt, Human
cagaacaaaaacaaaaggac

SEQ ID NO: 370426 - RNA, 18 nt, Human
cagagccagcaggccuag

SEQ ID NO: 370427 - RNA, 24 nt, Human
cauucuaaauaaugaaacugccac

SEQ ID NO: 370428 - RNA, 22 nt, Human
ccaaugaaucaucugcauagaa

SEQ ID NO: 370429 - RNA, 18 nt, Human
ccacugccgcuucccggc

SEQ ID NO: 370430 - RNA, 23 nt, Human
ccacugccgcuucccggccccgc

SEQ ID NO: 370431 - RNA, 23 nt, Human
ccagaacaaaaacaaaaggacca

SEQ ID NO: 370432 - RNA, 19 nt, Human
cccaagaaaguugaggaac

SEQ ID NO: 370433 - RNA, 21 nt, Human
ccccaaaccucaaagcaugau

SEQ ID NO: 370434 - RNA, 26 nt, Human
ccccaauccaaugaaucaucugcaua

SEQ ID NO: 370435 - RNA, 18 nt, Human
ccccagaaaaacaaaaca

SEQ ID NO: 370436 - RNA, 19 nt, Human
ccccagaaaaacaaaacac

SEQ ID NO: 370437 - RNA, 23 nt, Human
cccccaauccaaugaaucaucug

SEQ ID NO: 370438 - RNA, 18 nt, Human
cccccagaaaaacaaaac

SEQ ID NO: 370439 - RNA, 19 nt, Human
cccccagaaaaacaaaaca

SEQ ID NO: 370440 - RNA, 24 nt, Human
cccccagaaaaacaaaacacucac

SEQ ID NO: 370441 - RNA, 19 nt, Human
cccccccuucugcccauca

SEQ ID NO: 370442 - RNA, 21 nt, Human
cccgcgcgcacccccgcgcgc

SEQ ID NO: 370443 - RNA, 22 nt, Human
cccgcgcgcacccccgcgcgcg

SEQ ID NO: 370444 - RNA, 29 nt, Human
cccgcgcgcacccccgcgcgcguagccgg

SEQ ID NO: 370445 - RNA, 19 nt, Human
cccgcgcgcguagccgcca

SEQ ID NO: 370446 - RNA, 25 nt, Human
cccgcgcgcguagccgccacugccg

SEQ ID NO: 370447 - RNA, 24 nt, Human
cccgucccauccuaaccuuaaaag

SEQ ID NO: 370448 - RNA, 23 nt, Human
cccucagcaucucuuugaaaacc

SEQ ID NO: 370449 - RNA, 18 nt, Human
ccucaaagcucacacugc

SEQ ID NO: 370450 - RNA, 18 nt, Human
ccucccagccugagcacc

SEQ ID NO: 370451 - RNA, 19 nt, Human
ccucccagccugagcaccc

SEQ ID NO: 370452 - RNA, 24 nt, Human
ccucccagccugagcaccccaaac

SEQ ID NO: 370453 - RNA, 24 nt, Human
ccuggcccaccccggcccucgcgg

SEQ ID NO: 370454 - RNA, 22 nt, Human
cgcgcgcacccccgcgcgcgua

SEQ ID NO: 370455 - RNA, 23 nt, Human
cggacuccaggggaaaaaagaag

SEQ ID NO: 370456 - RNA, 18 nt, Human
cucagaaauggaagggag

SEQ ID NO: 370457 - RNA, 27 nt, Human
cucccaauauuccaacccucaaagcuu

SEQ ID NO: 370458 - RNA, 18 nt, Human
cucccagccugagcaccc

SEQ ID NO: 370459 - RNA, 23 nt, Human
cucccuccccucauuuuuuccaa

SEQ ID NO: 370460 - RNA, 24 nt, Human
cuccucuagcacauacuaguucag

SEQ ID NO: 370461 - RNA, 21 nt, Human
cucucauauguaaagcuuuag

SEQ ID NO: 370462 - RNA, 20 nt, Human
cugaaauauaacaguguuaa

SEQ ID NO: 370463 - RNA, 23 nt, Human
cugccaggcaguguggaggcccu

SEQ ID NO: 370464 - RNA, 19 nt, Human
cugcccccagaaaaacaaa

SEQ ID NO: 370465 - RNA, 18 nt, Human
gaaaagaaaaagccacca

SEQ ID NO: 370466 - RNA, 21 nt, Human
gaacaaaaacaaaaggaccaa

SEQ ID NO: 370467 - RNA, 20 nt, Human
gacaaagcaaaaaacugcaa

SEQ ID NO: 370468 - RNA, 18 nt, Human
gacaagaggaaaaaaccg

SEQ ID NO: 370469 - RNA, 22 nt, Human
gagaagaaaaauccugaaagaa

SEQ ID NO: 370470 - RNA, 22 nt, Human
gagccaaaugcauuggaacuaa

SEQ ID NO: 370471 - RNA, 20 nt, Human
gcaggaaguagguaaaaccc

SEQ ID NO: 370472 - RNA, 18 nt, Human
gccacugccgcuucccgg

SEQ ID NO: 370473 - RNA, 20 nt, Human
gcccuccucuagcacauacu

SEQ ID NO: 370474 - RNA, 18 nt, Human
gccgccacugccgcuucc

SEQ ID NO: 370475 - RNA, 21 nt, Human
gcuaaaguugacaggaccugc

SEQ ID NO: 370476 - RNA, 18 nt, Human
gcucugacugccaaguga

SEQ ID NO: 370477 - RNA, 19 nt, Human
gcuucccggccccgcccag

SEQ ID NO: 370478 - RNA, 23 nt, Human
ggaaaaaaccgggaacucucaag

SEQ ID NO: 370479 - RNA, 24 nt, Human
ggacaggggagaugcagguuauuu

SEQ ID NO: 370480 - RNA, 22 nt, Human
ggacuuguacccccagccaucc

SEQ ID NO: 370481 - RNA, 18 nt, Human
ggcuagacucauuggggg

SEQ ID NO: 370482 - RNA, 27 nt, Human
uaaaacaauaauaacagaaagauaaaa

SEQ ID NO: 370483 - RNA, 19 nt, Human
uaaagaccugagguuacaa

SEQ ID NO: 370484 - RNA, 18 nt, Human
uaacaagagguaguuugg

SEQ ID NO: 370485 - RNA, 22 nt, Human
uaaccaaguuucaugagcuaaa

SEQ ID NO: 370486 - RNA, 20 nt, Human
uaacuuaggaugcucuccuu

SEQ ID NO: 370487 - RNA, 18 nt, Human
uaagacaaagcaaaaaac

SEQ ID NO: 370488 - RNA, 23 nt, Human
uaagacaaagcaaaaaacugcaa

SEQ ID NO: 370489 - RNA, 23 nt, Human
uacaagggaccacaguaugaacc

SEQ ID NO: 370490 - RNA, 22 nt, Human
uaccaucagcaccauucuuagc

SEQ ID NO: 370491 - RNA, 23 nt, Human
uagcacauacuaguucaguggua

SEQ ID NO: 370492 - RNA, 21 nt, Human
uauaacaguguuaagaauuca

SEQ ID NO: 370493 - RNA, 23 nt, Human
uaugaaccagaauuccauuuucc

SEQ ID NO: 370494 - RNA, 22 nt, Human
uauuccaacccucaaagcucac

SEQ ID NO: 370495 - RNA, 25 nt, Human
uccaacccucaaagcucacacugcc

SEQ ID NO: 370496 - RNA, 23 nt, Human
ucccagccugagcaccccaaacc

SEQ ID NO: 370497 - RNA, 24 nt, Human
ugaccagggcacacugucgcggac

SEQ ID NO: 370498 - RNA, 23 nt, Human
ugaccagggcacacugucgcggc

SEQ ID NO: 370499 - RNA, 18 nt, Human
ugacgaaauuccacuccc

SEQ ID NO: 370500 - RNA, 26 nt, Human
ugagaaacauguuuguacaaaaacca

SEQ ID NO: 370501 - RNA, 21 nt, Human
ugagaagaaaaauccugaaag

SEQ ID NO: 370502 - RNA, 21 nt, Human
ugccaggcaguguggaggccc

SEQ ID NO: 370503 - RNA, 22 nt, Human
ugcccuccucuagcacauacua

SEQ ID NO: 370504 - RNA, 22 nt, Human
ugccucccaauauuccaacccu

SEQ ID NO: 370505 - RNA, 20 nt, Human
ugcuucacuuuucccguccc

SEQ ID NO: 370506 - RNA, 23 nt, Human
uggaagggagaagguauaaggag

SEQ ID NO: 370507 - RNA, 22 nt, Human
uggaaugaguuuccuuuggggg

SEQ ID NO: 370508 - RNA, 22 nt, Human
uggaggcccucagaggccucac

SEQ ID NO: 370509 - RNA, 23 nt, Human
uggcuauucccccccuucugccc

SEQ ID NO: 370510 - RNA, 20 nt, Human
ugggaaagacuggcaggaag

SEQ ID NO: 370511 - RNA, 21 nt, Human
ugggggguaauuacccuagac

SEQ ID NO: 370512 - RNA, 21 nt, Human
ugguaagaggaguggggaggc

SEQ ID NO: 370513 - RNA, 22 nt, Human
ugguuagaggcaaaccugaggg

SEQ ID NO: 370514 - RNA, 21 nt, Human
uguagaauuauuacuauagua

SEQ ID NO: 370515 - RNA, 20 nt, Human
ugugauagauggaaugugag

SEQ ID NO: 370516 - RNA, 23 nt, Human
uguuaagaauucagguauuuugu

SEQ ID NO: 370517 - RNA, 24 nt, Human
uguuuuauaaacaccucccuauac

SEQ ID NO: 370518 - RNA, 25 nt, Human
uuagcacuaucuacuuuuuuuuuuc

SEQ ID NO: 370519 - RNA, 25 nt, Human
uucucaaguguuuuauaaacaccuc

SEQ ID NO: 370520 - RNA, 19 nt, Human
uugacgaaauuccacuccc

SEQ ID NO: 370521 - RNA, 18 nt, Human
uuggaaugaguuuccuuu

SEQ ID NO: 370522 - RNA, 28 nt, Human
uuuaaaacaauaauaacagaaagauaaa

SEQ ID NO: 370523 - RNA, 21 nt, Human
uuuaaagagggagaaaaaaau

SEQ ID NO: 370524 - RNA, 23 nt, Human
uuuauaaacaccucccuauaccc

SEQ ID NO: 370525 - RNA, 24 nt, Human
uuuguguguggcaaaagucucaaa

SEQ ID NO: 370526 - RNA, 24 nt, Human
uuuuaaaggguuuuuuaaagaggg

SEQ ID NO: 370527 - RNA, 19 nt, Human
aaacaccuuucaccagccc

SEQ ID NO: 370528 - RNA, 22 nt, Human
aaacagaaguccuugaauaauc

SEQ ID NO: 370529 - RNA, 18 nt, Human
aguggugggggaagggcu

SEQ ID NO: 370530 - RNA, 18 nt, Human
ccacagggggugaggggg

SEQ ID NO: 370531 - RNA, 23 nt, Human
ccauccuauccucucucccagac

SEQ ID NO: 370532 - RNA, 23 nt, Human
cccauccuauccucucucccaga

SEQ ID NO: 370533 - RNA, 24 nt, Human
ccggcucgggccccgccgccgccc

SEQ ID NO: 370534 - RNA, 27 nt, Human
gcggaaggagcuuuccuuacguagugg

SEQ ID NO: 370535 - RNA, 25 nt, Human
ggaaggagcuuuccuuacguagugg

SEQ ID NO: 370536 - RNA, 23 nt, Human
ggcuuuggaggggcggaaggagc

SEQ ID NO: 370537 - RNA, 25 nt, Human
gggcuuuggaggggcggaaggagcu

SEQ ID NO: 370538 - RNA, 23 nt, Human
uaauagaaccuuguauaaacacc

SEQ ID NO: 370539 - RNA, 20 nt, Human
uagaaccuuguauaaacacc

SEQ ID NO: 370540 - RNA, 22 nt, Human
ucccauccuauccucucuccca

SEQ ID NO: 370541 - RNA, 25 nt, Human
ucccauccuauccucucucccagac

SEQ ID NO: 370542 - RNA, 19 nt, Human
ucuccaggcuggggagggu

SEQ ID NO: 370543 - RNA, 25 nt, Human
uuaaacagaaguccuugaauaaucu

SEQ ID NO: 370544 - RNA, 21 nt, Human
uuacguagugaugaacucucc

SEQ ID NO: 370545 - RNA, 18 nt, Human
uuagaagugguuaauaga

SEQ ID NO: 370546 - RNA, 21 nt, Human
uuuggaggggcggaaggagcu

SEQ ID NO: 370547 - RNA, 25 nt, Human
aaaaaacaauucaguuaauaaaaac

SEQ ID NO: 370548 - RNA, 23 nt, Human
aaaccaucucagauccaaggggc

SEQ ID NO: 370549 - RNA, 21 nt, Human
aaccggaaccggaacuccccc

SEQ ID NO: 370550 - RNA, 20 nt, Human
aacgccccaagcaagaccaa

SEQ ID NO: 370551 - RNA, 20 nt, Human
aagaccaaggcagauacuau

SEQ ID NO: 370552 - RNA, 24 nt, Human
aagcucccaacuccugggucucug

SEQ ID NO: 370553 - RNA, 21 nt, Human
aaggggccaagaucacaaggu

SEQ ID NO: 370554 - RNA, 18 nt, Human
aaguacugagcuuccuuc

SEQ ID NO: 370555 - RNA, 24 nt, Human
aauaaggggacaguacaaaaaaaa

SEQ ID NO: 370556 - RNA, 25 nt, Human
acaaaaaaaaguuugguccaugaaa

SEQ ID NO: 370557 - RNA, 22 nt, Human
acagggcaacaagugaagggag

SEQ ID NO: 370558 - RNA, 21 nt, Human
accaacagcauccccuggaac

SEQ ID NO: 370559 - RNA, 22 nt, Human
accuggccugaggcccaaucca

SEQ ID NO: 370560 - RNA, 20 nt, Human
acucauuaccacuacauguu

SEQ ID NO: 370561 - RNA, 27 nt, Human
acuccccccgccccccgagcgcccccc

SEQ ID NO: 370562 - RNA, 18 nt, Human
agaaggagcgaaagcucc

SEQ ID NO: 370563 - RNA, 22 nt, Human
agacaagggacaggaagacagg

SEQ ID NO: 370564 - RNA, 23 nt, Human
agacaagggacaggaagacaggg

SEQ ID NO: 370565 - RNA, 20 nt, Human
agagugcccacaggccugag

SEQ ID NO: 370566 - RNA, 25 nt, Human
agcacagggcccaaaucaagaauuu

SEQ ID NO: 370567 - RNA, 19 nt, Human
agccacagacuggaaaccc

SEQ ID NO: 370568 - RNA, 22 nt, Human
agcccuaggcgcuuucacuccu

SEQ ID NO: 370569 - RNA, 20 nt, Human
aggaagacagggauggccca

SEQ ID NO: 370570 - RNA, 21 nt, Human
aggaagacagggauggcccag

SEQ ID NO: 370571 - RNA, 20 nt, Human
aggaaggggaagacggggag

SEQ ID NO: 370572 - RNA, 20 nt, Human
aggaggccccggaguuccgc

SEQ ID NO: 370573 - RNA, 18 nt, Human
aggcagggagagggaaga

SEQ ID NO: 370574 - RNA, 19 nt, Human
aggcgcuuucacuccucag

SEQ ID NO: 370575 - RNA, 21 nt, Human
agggaaggaaggaaauuggau

SEQ ID NO: 370576 - RNA, 23 nt, Human
agggaaggaaggaaauuggauuc

SEQ ID NO: 370577 - RNA, 22 nt, Human
agggagcaauaaagaacaaaac

SEQ ID NO: 370578 - RNA, 24 nt, Human
agggauggcccagggcuuuuuacc

SEQ ID NO: 370579 - RNA, 19 nt, Human
agggauuuggggguggggg

SEQ ID NO: 370580 - RNA, 20 nt, Human
aguuuguuccaaaccugugg

SEQ ID NO: 370581 - RNA, 18 nt, Human
aucugagggaaucacaaa

SEQ ID NO: 370582 - RNA, 23 nt, Human
augaggcaggcagcacagggccc

SEQ ID NO: 370583 - RNA, 20 nt, Human
caaagaaccggaaccggaac

SEQ ID NO: 370584 - RNA, 21 nt, Human
caacucagcgcuauucuccag

SEQ ID NO: 370585 - RNA, 21 nt, Human
caagaccaaggcagauacuau

SEQ ID NO: 370586 - RNA, 22 nt, Human
caaggcagcagccgcgcccgcc

SEQ ID NO: 370587 - RNA, 19 nt, Human
caauccauuccaagcacuc

SEQ ID NO: 370588 - RNA, 18 nt, Human
cacugacagcaggccaac

SEQ ID NO: 370589 - RNA, 22 nt, Human
cagcacagggcccaaaucaaga

SEQ ID NO: 370590 - RNA, 27 nt, Human
cagcacagggcccaaaucaagaauuuu

SEQ ID NO: 370591 - RNA, 21 nt, Human
cagcagccgcgcccgccccuc

SEQ ID NO: 370592 - RNA, 18 nt, Human
cagcaggaaggaacagcc

SEQ ID NO: 370593 - RNA, 23 nt, Human
cagcccuaggcgcuuucacuccu

SEQ ID NO: 370594 - RNA, 24 nt, Human
cagccgcgcccgccccuccugagg

SEQ ID NO: 370595 - RNA, 20 nt, Human
cagcugccccaagguugucc

SEQ ID NO: 370596 - RNA, 18 nt, Human
caggaaggaacagccucu

SEQ ID NO: 370597 - RNA, 20 nt, Human
cagugucaaccuuucaaggg

SEQ ID NO: 370598 - RNA, 20 nt, Human
caucaauaaggggacaguac

SEQ ID NO: 370599 - RNA, 22 nt, Human
ccaagaucaacuagcuuauaga

SEQ ID NO: 370600 - RNA, 23 nt, Human
ccaaggcagauacuaugaggcag

SEQ ID NO: 370601 - RNA, 20 nt, Human
cccacccaaaugcccgggau

SEQ ID NO: 370602 - RNA, 28 nt, Human
ccccccgccccccgagcgccccccgagc

SEQ ID NO: 370603 - RNA, 19 nt, Human
ccccggaguuccgcccggg

SEQ ID NO: 370604 - RNA, 21 nt, Human
ccccggaguuccgcccgggcc

SEQ ID NO: 370605 - RNA, 22 nt, Human
ccccuugaagaccaccuggccu

SEQ ID NO: 370606 - RNA, 18 nt, Human
cccgccccccgagcgccc

SEQ ID NO: 370607 - RNA, 20 nt, Human
cccgccccuccugaggcucc

SEQ ID NO: 370608 - RNA, 18 nt, Human
ccgccccccgagcgcccc

SEQ ID NO: 370609 - RNA, 20 nt, Human
ccgccccccgagcgcccccc

SEQ ID NO: 370610 - RNA, 20 nt, Human
ccgcccgggccgccaucuuc

SEQ ID NO: 370611 - RNA, 18 nt, Human
ccgcgcccgccccuccug

SEQ ID NO: 370612 - RNA, 24 nt, Human
ccgcgcccgccccuccugaggcuc

SEQ ID NO: 370613 - RNA, 20 nt, Human
ccggaaccggaacucccccc

SEQ ID NO: 370614 - RNA, 21 nt, Human
ccugugaggcagggagaggga

SEQ ID NO: 370615 - RNA, 18 nt, Human
cgccccccgagcgccccc

SEQ ID NO: 370616 - RNA, 18 nt, Human
cgcccgggcccaaggcag

SEQ ID NO: 370617 - RNA, 21 nt, Human
cgcccgggcccaaggcagcag

SEQ ID NO: 370618 - RNA, 22 nt, Human
cgcccgggcccaaggcagcagc

SEQ ID NO: 370619 - RNA, 24 nt, Human
cggaaccggaacuccccccgcccc

SEQ ID NO: 370620 - RNA, 25 nt, Human
cggaaccggaacuccccccgccccc

SEQ ID NO: 370621 - RNA, 23 nt, Human
cuacagggcaacaagugaaggga

SEQ ID NO: 370622 - RNA, 21 nt, Human
cuagagguccuauguagaccg

SEQ ID NO: 370623 - RNA, 22 nt, Human
cucagcugccccaagguugucc

SEQ ID NO: 370624 - RNA, 21 nt, Human
cucccaacuccugggucucug

SEQ ID NO: 370625 - RNA, 20 nt, Human
cuccuggaaagaugcaaaaa

SEQ ID NO: 370626 - RNA, 20 nt, Human
cuggccugaggcccaaucca

SEQ ID NO: 370627 - RNA, 18 nt, Human
cuugugagacccucuuca

SEQ ID NO: 370628 - RNA, 20 nt, Human
cuuugugcccagcugucucc

SEQ ID NO: 370629 - RNA, 23 nt, Human
cuuugugcccagcugucucccac

SEQ ID NO: 370630 - RNA, 19 nt, Human
gaaccaacagcauccccug

SEQ ID NO: 370631 - RNA, 21 nt, Human
gaaccggaaccggaacucccc

SEQ ID NO: 370632 - RNA, 26 nt, Human
gagacccucuucauucuggggcacuc

SEQ ID NO: 370633 - RNA, 19 nt, Human
gaggggguggggaagcagg

SEQ ID NO: 370634 - RNA, 20 nt, Human
gaugcagaggcaggguggag

SEQ ID NO: 370635 - RNA, 18 nt, Human
gauuugggggugggggug

SEQ ID NO: 370636 - RNA, 23 nt, Human
gccaagaucaacuagcuuauaga

SEQ ID NO: 370637 - RNA, 18 nt, Human
gccccccgagcgcccccc

SEQ ID NO: 370638 - RNA, 20 nt, Human
gccugaggcccaauccauuc

SEQ ID NO: 370639 - RNA, 23 nt, Human
ggaaccggaacuccccccgcccc

SEQ ID NO: 370640 - RNA, 25 nt, Human
ggaacuccccccgccccccgagcgc

SEQ ID NO: 370641 - RNA, 21 nt, Human
ggaagacggggagaaaauucu

SEQ ID NO: 370642 - RNA, 18 nt, Human
ggaaguacugagcuuccu

SEQ ID NO: 370643 - RNA, 18 nt, Human
ggagaaggagcgaaagcu

SEQ ID NO: 370644 - RNA, 21 nt, Human
ggagggaaggaaggaaauugg

SEQ ID NO: 370645 - RNA, 23 nt, Human
ggagggauuugggggugggggug

SEQ ID NO: 370646 - RNA, 23 nt, Human
ggcaggaaggggaagacggggag

SEQ ID NO: 370647 - RNA, 18 nt, Human
ggcuuugucaguucugug

SEQ ID NO: 370648 - RNA, 23 nt, Human
gggaaaauggcaggaaggggaag

SEQ ID NO: 370649 - RNA, 27 nt, Human
gggaaucacaaagggcagccgguaccc

SEQ ID NO: 370650 - RNA, 18 nt, Human
gggcaaagggaagcuggg

SEQ ID NO: 370651 - RNA, 22 nt, Human
gggcaaagggaagcugggggug

SEQ ID NO: 370652 - RNA, 18 nt, Human
gggcaacaagugaaggga

SEQ ID NO: 370653 - RNA, 19 nt, Human
gggcuggggagucacaauc

SEQ ID NO: 370654 - RNA, 18 nt, Human
ggggugggaagagauagg

SEQ ID NO: 370655 - RNA, 21 nt, Human
gggguggggaagcaggggcuu

SEQ ID NO: 370656 - RNA, 25 nt, Human
ggggugggggugugcucgcaggagc

SEQ ID NO: 370657 - RNA, 20 nt, Human
ggguggagugagugaaugaa

SEQ ID NO: 370658 - RNA, 20 nt, Human
gggugugcucgcaggagccu

SEQ ID NO: 370659 - RNA, 20 nt, Human
ggugauacaaccuggaagaa

SEQ ID NO: 370660 - RNA, 23 nt, Human
gugaaagaagaggauaacaggug

SEQ ID NO: 370661 - RNA, 18 nt, Human
guuugguuuuaggcccgu

SEQ ID NO: 370662 - RNA, 24 nt, Human
uaaggggacaguacaaaaaaaagu

SEQ ID NO: 370663 - RNA, 24 nt, Human
uaaggggacaguacaaaaaaaagu

SEQ ID NO: 370664 - RNA, 23 nt, Human
uaccugaggggucugaagcuuug

SEQ ID NO: 370665 - RNA, 25 nt, Human
uaggcgcuuucacuccucagugccc

SEQ ID NO: 370666 - RNA, 21 nt, Human
uaugcuaacucgggggugaua

SEQ ID NO: 370667 - RNA, 24 nt, Human
ucaacugggcagacaagggacagg

SEQ ID NO: 370668 - RNA, 21 nt, Human
ucaagggagggaaaauggcag

SEQ ID NO: 370669 - RNA, 19 nt, Human
ucagauccaaggggccaag

SEQ ID NO: 370670 - RNA, 23 nt, Human
ucagcugccccaagguuguccag

SEQ ID NO: 370671 - RNA, 18 nt, Human
uccaauacugauguggac

SEQ ID NO: 370672 - RNA, 23 nt, Human
uccagugucaaccuuucaaggga

SEQ ID NO: 370673 - RNA, 19 nt, Human
uccaugaaaaaaacaauuc

SEQ ID NO: 370674 - RNA, 20 nt, Human
ucccaacuccugggucucug

SEQ ID NO: 370675 - RNA, 21 nt, Human
uccccaguguagaacagggag

SEQ ID NO: 370676 - RNA, 23 nt, Human
ucccccacccaaaugcccgggau

SEQ ID NO: 370677 - RNA, 18 nt, Human
ucucccacccuugcugug

SEQ ID NO: 370678 - RNA, 24 nt, Human
ucugcuggcaaugacaguucccca

SEQ ID NO: 370679 - RNA, 23 nt, Human
ugaaaaaaacaauucaguuaaua

SEQ ID NO: 370680 - RNA, 26 nt, Human
ugaaaaaaacaauucaguuaauaaaa

SEQ ID NO: 370681 - RNA, 18 nt, Human
ugaccuggggcucagugg

SEQ ID NO: 370682 - RNA, 22 nt, Human
ugaggcaggcagcacagggccc

SEQ ID NO: 370683 - RNA, 19 nt, Human
ugaggcagggagagggaag

SEQ ID NO: 370684 - RNA, 23 nt, Human
ugaggcagggagagggaagaguc

SEQ ID NO: 370685 - RNA, 19 nt, Human
ugaggcccaauccauucca

SEQ ID NO: 370686 - RNA, 24 nt, Human
ugccccaagguuguccagugucaa

SEQ ID NO: 370687 - RNA, 18 nt, Human
ugcccgggauuagggcag

SEQ ID NO: 370688 - RNA, 18 nt, Human
uggaaagaugcaaaaacc

SEQ ID NO: 370689 - RNA, 21 nt, Human
uggaacgccccaagcaagacc

SEQ ID NO: 370690 - RNA, 18 nt, Human
uggaagaagaaugugagg

SEQ ID NO: 370691 - RNA, 21 nt, Human
uggaagaagaaugugaggcuc

SEQ ID NO: 370692 - RNA, 19 nt, Human
uggagggaaggaaggaaau

SEQ ID NO: 370693 - RNA, 24 nt, Human
uggagugagugaaugaaugaguca

SEQ ID NO: 370694 - RNA, 18 nt, Human
uggcaggaaggggaagac

SEQ ID NO: 370695 - RNA, 20 nt, Human
uggcaggaaggggaagacga

SEQ ID NO: 370696 - RNA, 21 nt, Human
uggcaggaaggggaagacggg

SEQ ID NO: 370697 - RNA, 25 nt, Human
uggcaggaaggggaagacggggaga

SEQ ID NO: 370698 - RNA, 21 nt, Human
ugggaagagauagggugaaag

SEQ ID NO: 370699 - RNA, 19 nt, Human
uggggcaaagggaagcugg

SEQ ID NO: 370700 - RNA, 19 nt, Human
ugggggugggaagagauag

SEQ ID NO: 370701 - RNA, 21 nt, Human
ugggggugggaagagauaggg

SEQ ID NO: 370702 - RNA, 20 nt, Human
ugggucucugaagggcagga

SEQ ID NO: 370703 - RNA, 18 nt, Human
uguccuugaaccaacagc

SEQ ID NO: 370704 - RNA, 21 nt, Human
ugucugggagggagcaauaaa

SEQ ID NO: 370705 - RNA, 23 nt, Human
uuaggcccguuucuccauuaagg

SEQ ID NO: 370706 - RNA, 20 nt, Human
uucaagggagggaaaauggc

SEQ ID NO: 370707 - RNA, 19 nt, Human
uugaaccaacagcaucccc

SEQ ID NO: 370708 - RNA, 18 nt, Human
uugagucugcgagccugg

SEQ ID NO: 370709 - RNA, 18 nt, Human
uuucaagggagggaaaau

SEQ ID NO: 370710 - RNA, 22 nt, Human
uuuuuuuuuuucagaagauucu

SEQ ID NO: 370711 - RNA, 21 nt, Human
uuuuuuuuuuuuuuuuuucag

SEQ ID NO: 370712 - RNA, 25 nt, Human
aaacccagcagccuuugguucggaa

SEQ ID NO: 370713 - RNA, 19 nt, Human
aaacccccaacuuaccccu

SEQ ID NO: 370714 - RNA, 18 nt, Human
aagaaaagaaggaggcac

SEQ ID NO: 370715 - RNA, 23 nt, Human
aaugcaaaaaguauaaggcuuug

SEQ ID NO: 370716 - RNA, 19 nt, Human
acaccaguccucccagccu

SEQ ID NO: 370717 - RNA, 23 nt, Human
accccauaccucaggccaugcua

SEQ ID NO: 370718 - RNA, 21 nt, Human
acccgguucgggacagauucc

SEQ ID NO: 370719 - RNA, 19 nt, Human
accuccucuuccuagccca

SEQ ID NO: 370720 - RNA, 18 nt, Human
acuccgugcucugugcuc

SEQ ID NO: 370721 - RNA, 18 nt, Human
agcccucuggcaucccag

SEQ ID NO: 370722 - RNA, 21 nt, Human
agccgcuggagaggcagcccu

SEQ ID NO: 370723 - RNA, 21 nt, Human
agcgggggcagcgggaacccg

SEQ ID NO: 370724 - RNA, 21 nt, Human
aggcucccugaaaacccccaa

SEQ ID NO: 370725 - RNA, 23 nt, Human
caaaggaaaggaaaaaaccagca

SEQ ID NO: 370726 - RNA, 23 nt, Human
caaagggcaacaccaguccuccc

SEQ ID NO: 370727 - RNA, 21 nt, Human
caagcccuaggcccacccucc

SEQ ID NO: 370728 - RNA, 22 nt, Human
caagcccuaggcccacccuccu

SEQ ID NO: 370729 - RNA, 22 nt, Human
cacagacccgguucgggacaga

SEQ ID NO: 370730 - RNA, 18 nt, Human
cacagccuccagcagucc

SEQ ID NO: 370731 - RNA, 19 nt, Human
caccaagcuccaaagggca

SEQ ID NO: 370732 - RNA, 21 nt, Human
cacccuccucaccaagcucca

SEQ ID NO: 370733 - RNA, 22 nt, Human
cacccuccucaccaagcuccaa

SEQ ID NO: 370734 - RNA, 23 nt, Human
caccuaacaggcucccugaaaac

SEQ ID NO: 370735 - RNA, 20 nt, Human
caccuccucuuccuagccca

SEQ ID NO: 370736 - RNA, 18 nt, Human
cacuccucaccccagccu

SEQ ID NO: 370737 - RNA, 18 nt, Human
cagagccagcucugaccc

SEQ ID NO: 370738 - RNA, 21 nt, Human
cagcagacacuccucacccca

SEQ ID NO: 370739 - RNA, 26 nt, Human
cagcagacacuccucaccccagccua

SEQ ID NO: 370740 - RNA, 23 nt, Human
cagcagcaaggcugggcuuguag

SEQ ID NO: 370741 - RNA, 20 nt, Human
cagccuccccauucaccuua

SEQ ID NO: 370742 - RNA, 20 nt, Human
cagcucugacccucgcccca

SEQ ID NO: 370743 - RNA, 19 nt, Human
caggaucugcugcgggccc

SEQ ID NO: 370744 - RNA, 20 nt, Human
caggcuccagggcugggaag

SEQ ID NO: 370745 - RNA, 19 nt, Human
caguccucccagccucccc

SEQ ID NO: 370746 - RNA, 22 nt, Human
caguccucccagccuccccauu

SEQ ID NO: 370747 - RNA, 18 nt, Human
cauagaaaacuugcuccc

SEQ ID NO: 370748 - RNA, 27 nt, Human
cauucaccuuacccuggccuccacaug

SEQ ID NO: 370749 - RNA, 24 nt, Human
cauuuauaaaacuaaagcuggaga

SEQ ID NO: 370750 - RNA, 23 nt, Human
ccaagcccuaggcccacccuccc

SEQ ID NO: 370751 - RNA, 23 nt, Human
ccacaugcacauaccccauaccu

SEQ ID NO: 370752 - RNA, 22 nt, Human
ccaggcuccagggcugggaaga

SEQ ID NO: 370753 - RNA, 27 nt, Human
cccagccuacgugucugcggccccagc

SEQ ID NO: 370754 - RNA, 19 nt, Human
cccgcccgcgccucggccc

SEQ ID NO: 370755 - RNA, 18 nt, Human
ccgcccgcgccucggccc

SEQ ID NO: 370756 - RNA, 24 nt, Human
ccuccaggcuccagggcugggaag

SEQ ID NO: 370757 - RNA, 18 nt, Human
ccuccggagguuuggccg

SEQ ID NO: 370758 - RNA, 24 nt, Human
ccuuccguccccggccuccggagg

SEQ ID NO: 370759 - RNA, 18 nt, Human
cgaguccacuccgugcuc

SEQ ID NO: 370760 - RNA, 21 nt, Human
cgcagccacggcgccgccgcc

SEQ ID NO: 370761 - RNA, 25 nt, Human
cgcccgagucgaguuacccagaggc

SEQ ID NO: 370762 - RNA, 18 nt, Human
cgggauuuccuaauccaa

SEQ ID NO: 370763 - RNA, 21 nt, Human
cgggggcagcgggaacccgcc

SEQ ID NO: 370764 - RNA, 24 nt, Human
cuccagcaguccuacuugggccug

SEQ ID NO: 370765 - RNA, 25 nt, Human
cucccaaaauagugcaaauacccaa

SEQ ID NO: 370766 - RNA, 21 nt, Human
cucccagccuccccauucacc

SEQ ID NO: 370767 - RNA, 24 nt, Human
cuugcucccaaaauagugcaaaua

SEQ ID NO: 370768 - RNA, 24 nt, Human
cuuuggggaccaagcaacaaggaa

SEQ ID NO: 370769 - RNA, 20 nt, Human
gaacucccugccccgcccaa

SEQ ID NO: 370770 - RNA, 22 nt, Human
gaacuggaguguccccuccccg

SEQ ID NO: 370771 - RNA, 19 nt, Human
gacagauuccgcuccugcc

SEQ ID NO: 370772 - RNA, 18 nt, Human
gagauuccggauccagga

SEQ ID NO: 370773 - RNA, 23 nt, Human
gagccagcucugacccucgcccc

SEQ ID NO: 370774 - RNA, 19 nt, Human
gccccagggggagucugua

SEQ ID NO: 370775 - RNA, 22 nt, Human
ggaacccgcccgcgccucggcc

SEQ ID NO: 370776 - RNA, 19 nt, Human
ggggaggcggcgcucccag

SEQ ID NO: 370777 - RNA, 21 nt, Human
ggucccgcggggggaggcggc

SEQ ID NO: 370778 - RNA, 18 nt, Human
uaacaggcucccugaaaa

SEQ ID NO: 370779 - RNA, 21 nt, Human
uacaaaaaaaguggcucccac

SEQ ID NO: 370780 - RNA, 24 nt, Human
uacgugucugcggccccagcaagg

SEQ ID NO: 370781 - RNA, 26 nt, Human
uacuugggccugccugcagggggaag

SEQ ID NO: 370782 - RNA, 19 nt, Human
uagagggugacagcagaca

SEQ ID NO: 370783 - RNA, 22 nt, Human
uagcccagcuccccagagccag

SEQ ID NO: 370784 - RNA, 20 nt, Human
uaggaagagucugggcugca

SEQ ID NO: 370785 - RNA, 22 nt, Human
uauuuggaaauuuccaaaccug

SEQ ID NO: 370786 - RNA, 18 nt, Human
ucccagggccgcagccac

SEQ ID NO: 370787 - RNA, 20 nt, Human
ucccugaaaacccccaacuu

SEQ ID NO: 370788 - RNA, 25 nt, Human
ucccugaaaacccccaacuuacccc

SEQ ID NO: 370789 - RNA, 18 nt, Human
uccuaauccaaguucgcg

SEQ ID NO: 370790 - RNA, 19 nt, Human
ucgccaagcccuaggccca

SEQ ID NO: 370791 - RNA, 18 nt, Human
ucuguaaacaugcaaacc

SEQ ID NO: 370792 - RNA, 18 nt, Human
ugaggaaagaaaagaagg

SEQ ID NO: 370793 - RNA, 22 nt, Human
ugcaccuccucuuccuagccca

SEQ ID NO: 370794 - RNA, 21 nt, Human
ugcggccccagcaaggaccca

SEQ ID NO: 370795 - RNA, 22 nt, Human
uggaguguccccuccccggccc

SEQ ID NO: 370796 - RNA, 18 nt, Human
ugucaaagcacagccucc

SEQ ID NO: 370797 - RNA, 19 nt, Human
aaaaugcuggggcccggga

SEQ ID NO: 370798 - RNA, 21 nt, Human
accccaagguggcagaggagu

SEQ ID NO: 370799 - RNA, 21 nt, Human
augaaugacuuuuaauccagc

SEQ ID NO: 370800 - RNA, 21 nt, Human
caaaaugcuggggcccgggac

SEQ ID NO: 370801 - RNA, 23 nt, Human
cccacaccccaagguggcagagg

SEQ ID NO: 370802 - RNA, 19 nt, Human
ccccacaccccaagguggc

SEQ ID NO: 370803 - RNA, 21 nt, Human
ccccacaccccaagguggcag

SEQ ID NO: 370804 - RNA, 21 nt, Human
cccccgggaccccggcccgga

SEQ ID NO: 370805 - RNA, 22 nt, Human
cccccgggaccccggcccggag

SEQ ID NO: 370806 - RNA, 20 nt, Human
ccccgggaccccggcccgga

SEQ ID NO: 370807 - RNA, 22 nt, Human
cggccgcccgcucccugcucgg

SEQ ID NO: 370808 - RNA, 24 nt, Human
cuggagcccggggcaaaaugcugg

SEQ ID NO: 370809 - RNA, 18 nt, Human
gaugcuggagcccggggc

SEQ ID NO: 370810 - RNA, 21 nt, Human
gccccacaccccaagguggca

SEQ ID NO: 370811 - RNA, 20 nt, Human
gccgcccgcucccugcucgg

SEQ ID NO: 370812 - RNA, 20 nt, Human
ggagagucauccagugcccc

SEQ ID NO: 370813 - RNA, 21 nt, Human
ggagugaugcuggagcccggg

SEQ ID NO: 370814 - RNA, 19 nt, Human
ggcccggagcgcggccgcc

SEQ ID NO: 370815 - RNA, 19 nt, Human
uaauccagccccacacccc

SEQ ID NO: 370816 - RNA, 22 nt, Human
ugcuggggcccgggacacggcu

SEQ ID NO: 370817 - RNA, 23 nt, Human
uggagcccggggcaaaaugcugg

SEQ ID NO: 370818 - RNA, 25 nt, Human
uggagcccggggcaaaaugcugggg

SEQ ID NO: 370819 - RNA, 21 nt, Human
uggcagaggagugaugcugga

SEQ ID NO: 370820 - RNA, 18 nt, Human
aaaagaggggaggagagu

SEQ ID NO: 370821 - RNA, 21 nt, Human
aaaagcuuucuucagaucaca

SEQ ID NO: 370822 - RNA, 18 nt, Human
aaagcuuucuucagauca

SEQ ID NO: 370823 - RNA, 19 nt, Human
aacaugaacccaggaggag

SEQ ID NO: 370824 - RNA, 19 nt, Human
accacaguuaccucccaaa

SEQ ID NO: 370825 - RNA, 22 nt, Human
agaggggaggagagugggggcc

SEQ ID NO: 370826 - RNA, 22 nt, Human
agagugggggcagggguuagug

SEQ ID NO: 370827 - RNA, 22 nt, Human
agcagggauggccacccccccu

SEQ ID NO: 370828 - RNA, 24 nt, Human
agcccauccaucuaucugccucag

SEQ ID NO: 370829 - RNA, 18 nt, Human
agccuucgccaccacagu

SEQ ID NO: 370830 - RNA, 21 nt, Human
aggaaggaaaagaggggagga

SEQ ID NO: 370831 - RNA, 21 nt, Human
aggagacaggggaggacaggg

SEQ ID NO: 370832 - RNA, 24 nt, Human
aggcuaccagggagggaagacucc

SEQ ID NO: 370833 - RNA, 19 nt, Human
agggagggaagacuccagg

SEQ ID NO: 370834 - RNA, 25 nt, Human
agggagggaggacugaggugguugu

SEQ ID NO: 370835 - RNA, 24 nt, Human
aggggaagggagagggagaagggg

SEQ ID NO: 370836 - RNA, 18 nt, Human
aggggaggagaguggggg

SEQ ID NO: 370837 - RNA, 24 nt, Human
augaacccaggaggaggaaaggag

SEQ ID NO: 370838 - RNA, 22 nt, Human
caccaagcccuaggaaaccuuc

SEQ ID NO: 370839 - RNA, 18 nt, Human
caccacaguuaccuccca

SEQ ID NO: 370840 - RNA, 23 nt, Human
cacccccccuacccgcccacccc

SEQ ID NO: 370841 - RNA, 18 nt, Human
caccccccugcccaccag

SEQ ID NO: 370842 - RNA, 21 nt, Human
caccccccugcccaccagccc

SEQ ID NO: 370843 - RNA, 26 nt, Human
caccccggacugagagaaaauaguuc

SEQ ID NO: 370844 - RNA, 20 nt, Human
cagaauacaaaagucaaggg

SEQ ID NO: 370845 - RNA, 22 nt, Human
cagccccagccaccccccugcc

SEQ ID NO: 370846 - RNA, 21 nt, Human
cagcuccccagccaaauuccu

SEQ ID NO: 370847 - RNA, 21 nt, Human
cagcuccccagccaaauuccu

SEQ ID NO: 370848 - RNA, 21 nt, Human
cauggccuggccaggaccaga

SEQ ID NO: 370849 - RNA, 25 nt, Human
ccaaaagcuuucuucagaucacagg

SEQ ID NO: 370850 - RNA, 20 nt, Human
ccacaacaaaccggauccuu

SEQ ID NO: 370851 - RNA, 21 nt, Human
ccaccacaguuaccucccaaa

SEQ ID NO: 370852 - RNA, 18 nt, Human
ccaccccccaagaagcag

SEQ ID NO: 370853 - RNA, 20 nt, Human
ccacccccccuacccgccca

SEQ ID NO: 370854 - RNA, 23 nt, Human
ccagcccauccaucuaucugccu

SEQ ID NO: 370855 - RNA, 20 nt, Human
ccagccccagccaccccccu

SEQ ID NO: 370856 - RNA, 22 nt, Human
ccaggaggaggaaaggagacaa

SEQ ID NO: 370857 - RNA, 19 nt, Human
cccaaacgccgcggccuuc

SEQ ID NO: 370858 - RNA, 24 nt, Human
cccacaccacaacaaaccggaucc

SEQ ID NO: 370859 - RNA, 24 nt, Human
cccacuaccgcagccuucgccacc

SEQ ID NO: 370860 - RNA, 21 nt, Human
cccagccaaauuccuuuaaaa

SEQ ID NO: 370861 - RNA, 20 nt, Human
cccagccccagccacccccc

SEQ ID NO: 370862 - RNA, 22 nt, Human
cccauccaucuaucugccucag

SEQ ID NO: 370863 - RNA, 18 nt, Human
ccccacaccacaacaaac

SEQ ID NO: 370864 - RNA, 22 nt, Human
ccccacaccacaacaaaccgga

SEQ ID NO: 370865 - RNA, 19 nt, Human
ccccacuaccgcagccuuc

SEQ ID NO: 370866 - RNA, 19 nt, Human
cccccccuacccgcccacc

SEQ ID NO: 370867 - RNA, 23 nt, Human
cccccccuacccgcccacccccc

SEQ ID NO: 370868 - RNA, 22 nt, Human
ccccccuacccgcccacccccc

SEQ ID NO: 370869 - RNA, 19 nt, Human
ccccccugcccaccagccc

SEQ ID NO: 370870 - RNA, 23 nt, Human
cccccuacccgcccaccccccaa

SEQ ID NO: 370871 - RNA, 18 nt, Human
ccccuacccgcccacccc

SEQ ID NO: 370872 - RNA, 18 nt, Human
ccgcuguuugaagccgag

SEQ ID NO: 370873 - RNA, 21 nt, Human
ccggauccuuccgcggggugu

SEQ ID NO: 370874 - RNA, 23 nt, Human
ccuacccgcccaccccccaagaa

SEQ ID NO: 370875 - RNA, 19 nt, Human
ccuaggaaaccuucauaua

SEQ ID NO: 370876 - RNA, 23 nt, Human
ccuuccgagccucguauacguug

SEQ ID NO: 370877 - RNA, 23 nt, Human
cgccaccacaguuaccucccaaa

SEQ ID NO: 370878 - RNA, 23 nt, Human
cgucccgcuccguuucuuccaaa

SEQ ID NO: 370879 - RNA, 20 nt, Human
cuacccgcccaccccccaag

SEQ ID NO: 370880 - RNA, 27 nt, Human
cuacccgcccaccccccaagaagcagg

SEQ ID NO: 370881 - RNA, 25 nt, Human
cuccccacuaccgcagccuucgcca

SEQ ID NO: 370882 - RNA, 18 nt, Human
cucuggaauggugauggc

SEQ ID NO: 370883 - RNA, 20 nt, Human
cugacucuacugcuaccgcu

SEQ ID NO: 370884 - RNA, 21 nt, Human
cugggccagggaucgggaggc

SEQ ID NO: 370885 - RNA, 18 nt, Human
gaaaggagacaggggagg

SEQ ID NO: 370886 - RNA, 22 nt, Human
gagcacggcuaugugaaguuuc

SEQ ID NO: 370887 - RNA, 19 nt, Human
gaggacaagcaccaaaagc

SEQ ID NO: 370888 - RNA, 20 nt, Human
gaggagagugggggcagggg

SEQ ID NO: 370889 - RNA, 22 nt, Human
gaggugguugugaggacaagca

SEQ ID NO: 370890 - RNA, 19 nt, Human
gcaaugcucggaggcuagg

SEQ ID NO: 370891 - RNA, 24 nt, Human
gccacccccccuacccgcccaccc

SEQ ID NO: 370892 - RNA, 21 nt, Human
gcugaggucugaacaauaccu

SEQ ID NO: 370893 - RNA, 19 nt, Human
ggaaaggagacaggggagg

SEQ ID NO: 370894 - RNA, 21 nt, Human
ggaaaggagacaggggaggac

SEQ ID NO: 370895 - RNA, 23 nt, Human
ggacaagcaccaaaagcuuucuu

SEQ ID NO: 370896 - RNA, 19 nt, Human
ggaccagaacuggggagag

SEQ ID NO: 370897 - RNA, 18 nt, Human
ggagcccuguucagcucc

SEQ ID NO: 370898 - RNA, 22 nt, Human
ggaggacugaggugguugugag

SEQ ID NO: 370899 - RNA, 20 nt, Human
ggaggagagugggggcaggg

SEQ ID NO: 370900 - RNA, 19 nt, Human
gggacucaggggugggcgg

SEQ ID NO: 370901 - RNA, 20 nt, Human
gggaggagagugggggcagg

SEQ ID NO: 370902 - RNA, 18 nt, Human
gggcccgaggucugggcc

SEQ ID NO: 370903 - RNA, 18 nt, Human
gggcggguagcagggaug

SEQ ID NO: 370904 - RNA, 20 nt, Human
gggcggguagcagggauggc

SEQ ID NO: 370905 - RNA, 22 nt, Human
ggggaggacagggagggaggac

SEQ ID NO: 370906 - RNA, 19 nt, Human
ggggaggagagugggggca

SEQ ID NO: 370907 - RNA, 19 nt, Human
gggguguccuuccgagccu

SEQ ID NO: 370908 - RNA, 20 nt, Human
gggugggcggguagcaggga

SEQ ID NO: 370909 - RNA, 21 nt, Human
ggugggcccgaggucugggcc

SEQ ID NO: 370910 - RNA, 22 nt, Human
gguguccuuccgagccucguau

SEQ ID NO: 370911 - RNA, 21 nt, Human
gucaggggaagggagagggag

SEQ ID NO: 370912 - RNA, 20 nt, Human
gucccgcuccguuucuucca

SEQ ID NO: 370913 - RNA, 20 nt, Human
gucuccccuccccacaccac

SEQ ID NO: 370914 - RNA, 20 nt, Human
gucugaacaauaccuuggag

SEQ ID NO: 370915 - RNA, 22 nt, Human
gugggcccgaggucugggccag

SEQ ID NO: 370916 - RNA, 22 nt, Human
guuaccucccaaacgccgcggc

SEQ ID NO: 370917 - RNA, 19 nt, Human
uaccagggagggaagacuc

SEQ ID NO: 370918 - RNA, 19 nt, Human
uagcagggauggccacccc

SEQ ID NO: 370919 - RNA, 21 nt, Human
uagcagggauggccacccccc

SEQ ID NO: 370920 - RNA, 20 nt, Human
uaggaaaccuucauauagug

SEQ ID NO: 370921 - RNA, 27 nt, Human
uaggaaggaaggaaaagaggggaggag

SEQ ID NO: 370922 - RNA, 20 nt, Human
ucagggucugugcuaggcuc

SEQ ID NO: 370923 - RNA, 20 nt, Human
uccccacaccacaacaaacc

SEQ ID NO: 370924 - RNA, 21 nt, Human
ucccgcuccguuucuuccaaa

SEQ ID NO: 370925 - RNA, 22 nt, Human
ucccgcuccguuucuuccaaaa

SEQ ID NO: 370926 - RNA, 26 nt, Human
ucucuggaauggugauggcccagccc

SEQ ID NO: 370927 - RNA, 22 nt, Human
ucugggccagggaucgggaggc

SEQ ID NO: 370928 - RNA, 23 nt, Human
ugaacaauaccuuggagucagaa

SEQ ID NO: 370929 - RNA, 18 nt, Human
ugagagucucaggcugac

SEQ ID NO: 370930 - RNA, 24 nt, Human
ugaggugguugugaggacaagcac

SEQ ID NO: 370931 - RNA, 20 nt, Human
ugcaacggcggaggaacaag

SEQ ID NO: 370932 - RNA, 23 nt, Human
ugcauauacacuggccuugucuc

SEQ ID NO: 370933 - RNA, 22 nt, Human
uggccaggaccagaacugggga

SEQ ID NO: 370934 - RNA, 22 nt, Human
uggcgccgccgcuguuugaagc

SEQ ID NO: 370935 - RNA, 25 nt, Human
uggguggaacagucaggggaaggga

SEQ ID NO: 370936 - RNA, 21 nt, Human
ugguuugucagcgucuccccu

SEQ ID NO: 370937 - RNA, 20 nt, Human
uuacacaccaacaaucuucu

SEQ ID NO: 370938 - RNA, 24 nt, Human
uuccaaacugugugguugccuccc

SEQ ID NO: 370939 - RNA, 22 nt, Human
uuugucagcgucuccccucccc

SEQ ID NO: 370940 - RNA, 24 nt, Human
aaaaaaacaaaaaacaaacaaaaa

SEQ ID NO: 370941 - RNA, 23 nt, Human
aaaaagcaagauaaaaauaguau

SEQ ID NO: 370942 - RNA, 21 nt, Human
aaaacaaaaaacaaacaaaaa

SEQ ID NO: 370943 - RNA, 19 nt, Human
aaacaaacaaaaacaaccc

SEQ ID NO: 370944 - RNA, 27 nt, Human
aaacaaacaaacaaaaacaaccacaaa

SEQ ID NO: 370945 - RNA, 18 nt, Human
aacaaaaacaaccacaaa

SEQ ID NO: 370946 - RNA, 24 nt, Human
aacaaacaaaaacaaccacaaaug

SEQ ID NO: 370947 - RNA, 20 nt, Human
aacaaacaaacaaaaacaac

SEQ ID NO: 370948 - RNA, 18 nt, Human
aagcaagauaaaaauagu

SEQ ID NO: 370949 - RNA, 18 nt, Human
aagcuccuucugaggucc

SEQ ID NO: 370950 - RNA, 20 nt, Human
aaggggagaaaagaaaagga

SEQ ID NO: 370951 - RNA, 25 nt, Human
acaaaaaaacaaaaaacaaacaaaa

SEQ ID NO: 370952 - RNA, 19 nt, Human
acaaacaaaaacaaccaca

SEQ ID NO: 370953 - RNA, 22 nt, Human
acgaaaaagcaagauaaaaaua

SEQ ID NO: 370954 - RNA, 20 nt, Human
agauaggcaaaaagcuccuu

SEQ ID NO: 370955 - RNA, 21 nt, Human
agggacaaaaaaacaaaaaac

SEQ ID NO: 370956 - RNA, 23 nt, Human
aguacagaaagaggguggugggg

SEQ ID NO: 370957 - RNA, 23 nt, Human
caaaaaaacaaaaaacaaacaaa

SEQ ID NO: 370958 - RNA, 24 nt, Human
caaaaaaacaaaaaacaaacaaaa

SEQ ID NO: 370959 - RNA, 22 nt, Human
caaaaagcuccuucugaggucc

SEQ ID NO: 370960 - RNA, 18 nt, Human
cacagguagagucaugaa

SEQ ID NO: 370961 - RNA, 23 nt, Human
caccugagauaaacgcugaggac

SEQ ID NO: 370962 - RNA, 23 nt, Human
cacuccuguaugcuagcaggaau

SEQ ID NO: 370963 - RNA, 25 nt, Human
cagaacgaaaaagcaagauaaaaau

SEQ ID NO: 370964 - RNA, 23 nt, Human
cagacuagaaugaaacugguuua

SEQ ID NO: 370965 - RNA, 19 nt, Human
ccaaggggagaaaagaaaa

SEQ ID NO: 370966 - RNA, 20 nt, Human
ccgggcccugcagugugguc

SEQ ID NO: 370967 - RNA, 18 nt, Human
ccuccgggcccugcagug

SEQ ID NO: 370968 - RNA, 20 nt, Human
ccuuuuaacaguaacucuag

SEQ ID NO: 370969 - RNA, 23 nt, Human
cuagcaggaauguugcuggcaag

SEQ ID NO: 370970 - RNA, 18 nt, Human
cugagauaaacgcugagg

SEQ ID NO: 370971 - RNA, 21 nt, Human
gaaacaaacaaacaaaaacaa

SEQ ID NO: 370972 - RNA, 18 nt, Human
uaacaaaagaaaugaaau

SEQ ID NO: 370973 - RNA, 23 nt, Human
uaagaaacaaacaaacaaaaaca

SEQ ID NO: 370974 - RNA, 21 nt, Human
uaccagaggaaaacagucaac

SEQ ID NO: 370975 - RNA, 22 nt, Human
uagcaggaauguugcuggcaag

SEQ ID NO: 370976 - RNA, 19 nt, Human
uauagauaggcaaaaagcu

SEQ ID NO: 370977 - RNA, 20 nt, Human
uauucagacuagaaugaaac

SEQ ID NO: 370978 - RNA, 22 nt, Human
ucuugaccuccgggcccugcag

SEQ ID NO: 370979 - RNA, 25 nt, Human
ucuugaccuccgggcccugcagugu

SEQ ID NO: 370980 - RNA, 19 nt, Human
ugaaauuaaagauagacca

SEQ ID NO: 370981 - RNA, 20 nt, Human
ugaaguacagaaagagggug

SEQ ID NO: 370982 - RNA, 19 nt, Human
ugacagggacaaaaaaaca

SEQ ID NO: 370983 - RNA, 20 nt, Human
ugacagggacaaaaaaacaa

SEQ ID NO: 370984 - RNA, 24 nt, Human
ugaggacgcaagagcgauuuuacc

SEQ ID NO: 370985 - RNA, 20 nt, Human
uggcaagacacuucugagcc

SEQ ID NO: 370986 - RNA, 23 nt, Human
uguuugucccuauucagacuaga

SEQ ID NO: 370987 - RNA, 20 nt, Human
uuaaugcuaagcaaucguca

SEQ ID NO: 370988 - RNA, 31 nt, Human
uugguaauuacaacguacauugucuucuuuu

SEQ ID NO: 370989 - RNA, 22 nt, Human
aaaaaaauuucagucuaccucc

SEQ ID NO: 370990 - RNA, 19 nt, Human
aaagacgggguuucaccgu

SEQ ID NO: 370991 - RNA, 24 nt, Human
aaagugcugggauuacaggcguga

SEQ ID NO: 370992 - RNA, 21 nt, Human
aacccuauucuagucuggguu

SEQ ID NO: 370993 - RNA, 22 nt, Human
aaccucaugauccgcccgccuc

SEQ ID NO: 370994 - RNA, 18 nt, Human
aacggguaaguggugggg

SEQ ID NO: 370995 - RNA, 18 nt, Human
aagauggcuaaucuacua

SEQ ID NO: 370996 - RNA, 19 nt, Human
aagugcugggauuacaggc

SEQ ID NO: 370997 - RNA, 19 nt, Human
aagugcugggauuacaggc

SEQ ID NO: 370998 - RNA, 26 nt, Human
aagugcugggauuacaggcgugagcc

SEQ ID NO: 370999 - RNA, 20 nt, Human
aaucugaaugcaucaaaucu

SEQ ID NO: 371000 - RNA, 22 nt, Human
acaccccgcuccggcccggggc

SEQ ID NO: 371001 - RNA, 23 nt, Human
acaggcgcccgccaccacgcccg

SEQ ID NO: 371002 - RNA, 19 nt, Human
accccgcuccggcccgggg

SEQ ID NO: 371003 - RNA, 21 nt, Human
acccuugacccugggguugca

SEQ ID NO: 371004 - RNA, 23 nt, Human
acgacgcuggggccccggaggac

SEQ ID NO: 371005 - RNA, 18 nt, Human
acgggguuucaccguguu

SEQ ID NO: 371006 - RNA, 19 nt, Human
acgggguuucaccguguua

SEQ ID NO: 371007 - RNA, 20 nt, Human
acgggguuucaccguguuag

SEQ ID NO: 371008 - RNA, 24 nt, Human
acgggguuucaccguguuagccag

SEQ ID NO: 371009 - RNA, 18 nt, Human
acugcaagcuccgccucc

SEQ ID NO: 371010 - RNA, 18 nt, Human
agcuccgccuccuggguu

SEQ ID NO: 371011 - RNA, 24 nt, Human
agcucuguugcccaggcuggagug

SEQ ID NO: 371012 - RNA, 21 nt, Human
aggacgaggagcaggcggugg

SEQ ID NO: 371013 - RNA, 25 nt, Human
aggcuggagugcaguggcacaaucu

SEQ ID NO: 371014 - RNA, 20 nt, Human
aguaaagacgggguuucacc

SEQ ID NO: 371015 - RNA, 18 nt, Human
aguagcugggacuacagg

SEQ ID NO: 371016 - RNA, 19 nt, Human
aguagcugggacuacaggc

SEQ ID NO: 371017 - RNA, 21 nt, Human
agugaauuugaaagauggcua

SEQ ID NO: 371018 - RNA, 20 nt, Human
agugcaguggcacaaucucg

SEQ ID NO: 371019 - RNA, 24 nt, Human
agugcaguggcacaaucucggcuc

SEQ ID NO: 371020 - RNA, 18 nt, Human
agugcugggauuacaggc

SEQ ID NO: 371021 - RNA, 19 nt, Human
agugguggggaggaguagg

SEQ ID NO: 371022 - RNA, 19 nt, Human
aucuguuacauagcucucc

SEQ ID NO: 371023 - RNA, 24 nt, Human
augauccgcccgccucggccuccc

SEQ ID NO: 371024 - RNA, 22 nt, Human
augcaucaaaucuuccuuggcu

SEQ ID NO: 371025 - RNA, 19 nt, Human
auggccaagcgccgccgcc

SEQ ID NO: 371026 - RNA, 21 nt, Human
auucuccugccucagccuccc

SEQ ID NO: 371027 - RNA, 24 nt, Human
caaagugcugggauuacaggcgug

SEQ ID NO: 371028 - RNA, 22 nt, Human
caagcgccgccgcccgaaccgg

SEQ ID NO: 371029 - RNA, 18 nt, Human
caccguguuagccaggau

SEQ ID NO: 371030 - RNA, 24 nt, Human
caccguguuagccaggauggucuc

SEQ ID NO: 371031 - RNA, 22 nt, Human
cacgccauucuccugccucagc

SEQ ID NO: 371032 - RNA, 20 nt, Human
cacuggauuagcuacuuucu

SEQ ID NO: 371033 - RNA, 23 nt, Human
cacuucacagacuaauaacugaa

SEQ ID NO: 371034 - RNA, 24 nt, Human
cagagucuagcucuguugcccagg

SEQ ID NO: 371035 - RNA, 22 nt, Human
cagccaacaauuaagauuuuaa

SEQ ID NO: 371036 - RNA, 21 nt, Human
caggcgcccgccaccacgccc

SEQ ID NO: 371037 - RNA, 26 nt, Human
caggcgguggcggcagcuccucacgc

SEQ ID NO: 371038 - RNA, 19 nt, Human
caucaaaucuuccuuggcu

SEQ ID NO: 371039 - RNA, 21 nt, Human
cauggccaagcgccgccgccc

SEQ ID NO: 371040 - RNA, 20 nt, Human
ccaaagugcugggauuacag

SEQ ID NO: 371041 - RNA, 22 nt, Human
ccaaagugcugggauuacaggc

SEQ ID NO: 371042 - RNA, 22 nt, Human
ccaaagugcugggauuacaggc

SEQ ID NO: 371043 - RNA, 24 nt, Human
ccaaagugcugggauuacaggcgu

SEQ ID NO: 371044 - RNA, 23 nt, Human
ccacugugcccagccaacaauua

SEQ ID NO: 371045 - RNA, 23 nt, Human
ccccggaggacgaggaggacgag

SEQ ID NO: 371046 - RNA, 23 nt, Human
cccgaguagcugggacuacaggc

SEQ ID NO: 371047 - RNA, 24 nt, Human
cccgaguagcugggacuacaggcg

SEQ ID NO: 371048 - RNA, 20 nt, Human
ccgcagggcaggacgaggga

SEQ ID NO: 371049 - RNA, 23 nt, Human
ccgccgacaccccgcuccggccc

SEQ ID NO: 371050 - RNA, 21 nt, Human
ccgccgccgacaccccgcucc

SEQ ID NO: 371051 - RNA, 24 nt, Human
ccuccaaaaaaaaugcacacuaua

SEQ ID NO: 371052 - RNA, 23 nt, Human
ccugccucagccucccgaguagc

SEQ ID NO: 371053 - RNA, 24 nt, Human
ccugccucagccucccgaguagcu

SEQ ID NO: 371054 - RNA, 22 nt, Human
cgaaccggccgccgccgacacc

SEQ ID NO: 371055 - RNA, 21 nt, Human
cgaggagcaggcgguggcggc

SEQ ID NO: 371056 - RNA, 24 nt, Human
cgaggaggacgaggagcaggcggu

SEQ ID NO: 371057 - RNA, 19 nt, Human
cgcccgaaccggccgccgc

SEQ ID NO: 371058 - RNA, 19 nt, Human
cgccuccuggguucacgcc

SEQ ID NO: 371059 - RNA, 24 nt, Human
cgccucggccucccaaagugcugg

SEQ ID NO: 371060 - RNA, 24 nt, Human
cucagccucccgaguagcugggac

SEQ ID NO: 371061 - RNA, 24 nt, Human
cuccuaaccucaugauccgcccgc

SEQ ID NO: 371062 - RNA, 21 nt, Human
cuccuggguucacgccauucu

SEQ ID NO: 371063 - RNA, 22 nt, Human
gacgaggaggacgaggagcagg

SEQ ID NO: 371064 - RNA, 18 nt, Human
gaggaggaggaggcggcg

SEQ ID NO: 371065 - RNA, 20 nt, Human
gaggaggaggaggcggcggc

SEQ ID NO: 371066 - RNA, 20 nt, Human
gaggcggcggcggagggcgg

SEQ ID NO: 371067 - RNA, 25 nt, Human
gaguagcugggacuacaggcgcccg

SEQ ID NO: 371068 - RNA, 18 nt, Human
gauuacaggcgugagcca

SEQ ID NO: 371069 - RNA, 19 nt, Human
gauuacaggcgugagccac

SEQ ID NO: 371070 - RNA, 21 nt, Human
gauuacaggcgugagccacug

SEQ ID NO: 371071 - RNA, 25 nt, Human
gcccggcuaauuuuuuuuguauuuu

SEQ ID NO: 371072 - RNA, 20 nt, Human
gccgacaccccgcuccggcc

SEQ ID NO: 371073 - RNA, 25 nt, Human
gccuccuggguucacgccauucucc

SEQ ID NO: 371074 - RNA, 18 nt, Human
gcggcggcggagggcggg

SEQ ID NO: 371075 - RNA, 25 nt, Human
gcucuguugcccaggcuggagugca

SEQ ID NO: 371076 - RNA, 19 nt, Human
gcuggagugcaguggcaca

SEQ ID NO: 371077 - RNA, 20 nt, Human
ggaggaagccgagaaggagg

SEQ ID NO: 371078 - RNA, 19 nt, Human
ggaggacgaggaggacgag

SEQ ID NO: 371079 - RNA, 21 nt, Human
ggaggaguagggaacgauggg

SEQ ID NO: 371080 - RNA, 23 nt, Human
ggccaugguguugggcguauccc

SEQ ID NO: 371081 - RNA, 23 nt, Human
gggguuucaccguguuagccagg

SEQ ID NO: 371082 - RNA, 22 nt, Human
ggguuucaccguguuagccagg

SEQ ID NO: 371083 - RNA, 18 nt, Human
gucaacccaaccaguacu

SEQ ID NO: 371084 - RNA, 21 nt, Human
gugagcuugcuuuccuucacc

SEQ ID NO: 371085 - RNA, 26 nt, Human
gugguggggaggaguagggaacgaug

SEQ ID NO: 371086 - RNA, 19 nt, Human
guugcaucaccaccgacug

SEQ ID NO: 371087 - RNA, 24 nt, Human
guuuuuauuuuggaucagcaauuu

SEQ ID NO: 371088 - RNA, 21 nt, Human
uaaccggaauuacauuuugug

SEQ ID NO: 371089 - RNA, 21 nt, Human
uaaggaaaccuugaucaugaa

SEQ ID NO: 371090 - RNA, 23 nt, Human
uacaggcgcccgccaccacgccc

SEQ ID NO: 371091 - RNA, 23 nt, Human
uacaggcgugagccacugugccc

SEQ ID NO: 371092 - RNA, 24 nt, Human
uacaggcgugagccacugugccca

SEQ ID NO: 371093 - RNA, 20 nt, Human
uaccuccaccagaacaucac

SEQ ID NO: 371094 - RNA, 24 nt, Human
uagaaucacagaaaugacuuaaau

SEQ ID NO: 371095 - RNA, 24 nt, Human
uagcucuguugcccaggcuggagu

SEQ ID NO: 371096 - RNA, 21 nt, Human
uaguaaagacgggguuucacc

SEQ ID NO: 371097 - RNA, 24 nt, Human
uaguaaagacgggguuucaccgug

SEQ ID NO: 371098 - RNA, 26 nt, Human
uaguaaagacgggguuucaccguguu

SEQ ID NO: 371099 - RNA, 19 nt, Human
uaucaaaugaaaaacauga

SEQ ID NO: 371100 - RNA, 23 nt, Human
uauuaaaauugugcaaaaaguaa

SEQ ID NO: 371101 - RNA, 24 nt, Human
ucaccguguuagccaggauggucu

SEQ ID NO: 371102 - RNA, 22 nt, Human
ucacuauaauguauuacugaau

SEQ ID NO: 371103 - RNA, 18 nt, Human
ucacugcaagcuccgccu

SEQ ID NO: 371104 - RNA, 23 nt, Human
ucacugcaagcuccgccuccugg

SEQ ID NO: 371105 - RNA, 24 nt, Human
ucacugcaagcuccgccuccuggg

SEQ ID NO: 371106 - RNA, 23 nt, Human
ucagccucccgaguagcugggac

SEQ ID NO: 371107 - RNA, 24 nt, Human
ucccaaagugcugggauuacaggc

SEQ ID NO: 371108 - RNA, 20 nt, Human
uccccgacacgacauggcca

SEQ ID NO: 371109 - RNA, 24 nt, Human
ucccgaguagcugggacuacaggc

SEQ ID NO: 371110 - RNA, 20 nt, Human
uccucacgcucacacggcca

SEQ ID NO: 371111 - RNA, 24 nt, Human
uccuggguucacgccauucuccug

SEQ ID NO: 371112 - RNA, 18 nt, Human
ucggccucccaaagugcu

SEQ ID NO: 371113 - RNA, 22 nt, Human
ucuaccuccaccagaacaucac

SEQ ID NO: 371114 - RNA, 23 nt, Human
ucuagcucuguugcccaggcugg

SEQ ID NO: 371115 - RNA, 24 nt, Human
ucuagcucuguugcccaggcugga

SEQ ID NO: 371116 - RNA, 24 nt, Human
ucuccugccucagccucccgagua

SEQ ID NO: 371117 - RNA, 24 nt, Human
ucuguugcccaggcuggagugcag

SEQ ID NO: 371118 - RNA, 21 nt, Human
ugaaagaaacuacagcuauca

SEQ ID NO: 371119 - RNA, 19 nt, Human
ugagagaggcggaugaagg

SEQ ID NO: 371120 - RNA, 21 nt, Human
ugagagaggcggaugaaggcg

SEQ ID NO: 371121 - RNA, 23 nt, Human
ugaggaggaagccgagaaggagg

SEQ ID NO: 371122 - RNA, 22 nt, Human
ugcaucaccaccgacuguggug

SEQ ID NO: 371123 - RNA, 20 nt, Human
ugccaagcaacaaguguuac

SEQ ID NO: 371124 - RNA, 18 nt, Human
ugcccaggcuggagugca

SEQ ID NO: 371125 - RNA, 21 nt, Human
ugcccaggcuggagugcagug

SEQ ID NO: 371126 - RNA, 22 nt, Human
ugcccaggcuggagugcagugg

SEQ ID NO: 371127 - RNA, 24 nt, Human
ugcccaggcuggagugcaguggca

SEQ ID NO: 371128 - RNA, 24 nt, Human
ugccucagccucccgaguagcugg

SEQ ID NO: 371129 - RNA, 24 nt, Human
ugcugggauuacaggcgugagcca

SEQ ID NO: 371130 - RNA, 22 nt, Human
uggaauggaguuccaaaucacu

SEQ ID NO: 371131 - RNA, 23 nt, Human
uggagugcaguggcacaaucucg

SEQ ID NO: 371132 - RNA, 24 nt, Human
uggagugcaguggcacaaucucgg

SEQ ID NO: 371133 - RNA, 24 nt, Human
uggcacaaucucggcucacugcaa

SEQ ID NO: 371134 - RNA, 21 nt, Human
ugggacuacaggcgcccgcca

SEQ ID NO: 371135 - RNA, 22 nt, Human
ugggacuacaggcgcccgccac

SEQ ID NO: 371136 - RNA, 24 nt, Human
ugggacuacaggcgcccgccacca

SEQ ID NO: 371137 - RNA, 18 nt, Human
ugggauuacaggcgugag

SEQ ID NO: 371138 - RNA, 21 nt, Human
ugggauuacaggcgugagcca

SEQ ID NO: 371139 - RNA, 22 nt, Human
ugggauuacaggcgugagccac

SEQ ID NO: 371140 - RNA, 22 nt, Human
ugggauuacaggcgugagccac

SEQ ID NO: 371141 - RNA, 22 nt, Human
ugggauuacaggcgugagccac

SEQ ID NO: 371142 - RNA, 24 nt, Human
ugggauuacaggcgugagccacug

SEQ ID NO: 371143 - RNA, 26 nt, Human
ugggauuacaggcgugagccacugug

SEQ ID NO: 371144 - RNA, 24 nt, Human
uggggaggaguagggaacgauggg

SEQ ID NO: 371145 - RNA, 24 nt, Human
ugggguugcaggccaugguguugg

SEQ ID NO: 371146 - RNA, 20 nt, Human
uggguucacgccauucuccu

SEQ ID NO: 371147 - RNA, 19 nt, Human
ugguuuuuuucccuucauu

SEQ ID NO: 371148 - RNA, 22 nt, Human
uuaguaaagacgggguuucacc

SEQ ID NO: 371149 - RNA, 24 nt, Human
uuaguaaagacgggguuucaccgu

SEQ ID NO: 371150 - RNA, 23 nt, Human
uuccaaaucacucugugcuccgc

SEQ ID NO: 371151 - RNA, 24 nt, Human
uugcccaggcuggagugcaguggc

SEQ ID NO: 371152 - RNA, 18 nt, Human
uuggaucagcaauuuagc

SEQ ID NO: 371153 - RNA, 19 nt, Human
uuucaccguguuagccagg

SEQ ID NO: 371154 - RNA, 19 nt, Human
aacacccuucucacaggcc

SEQ ID NO: 371155 - RNA, 21 nt, Human
aacaguacgguggccgggagg

SEQ ID NO: 371156 - RNA, 18 nt, Human
acucuaacacuucauucc

SEQ ID NO: 371157 - RNA, 20 nt, Human
agaaaaaaacaguacaauga

SEQ ID NO: 371158 - RNA, 21 nt, Human
caaaaucuaauccacauucaa

SEQ ID NO: 371159 - RNA, 20 nt, Human
cacauuccagaucugucuga

SEQ ID NO: 371160 - RNA, 18 nt, Human
caccaccgugcuggccuc

SEQ ID NO: 371161 - RNA, 19 nt, Human
cacucuaacacuucauucc

SEQ ID NO: 371162 - RNA, 21 nt, Human
cagcguggggccccgucccuu

SEQ ID NO: 371163 - RNA, 23 nt, Human
cagucuuuuacagaugguuuuuc

SEQ ID NO: 371164 - RNA, 21 nt, Human
cauuccagaucugucugaucg

SEQ ID NO: 371165 - RNA, 22 nt, Human
ccacuuccuuuuuucuuuccca

SEQ ID NO: 371166 - RNA, 20 nt, Human
ccagucuuuuacagaugguu

SEQ ID NO: 371167 - RNA, 19 nt, Human
ccgccgcccggggcuucug

SEQ ID NO: 371168 - RNA, 21 nt, Human
cgagugguuaucgcccuccca

SEQ ID NO: 371169 - RNA, 20 nt, Human
cgggaggaccgcuuguagua

SEQ ID NO: 371170 - RNA, 18 nt, Human
cuaaaugcuuaaguaugc

SEQ ID NO: 371171 - RNA, 24 nt, Human
cuaauccacauucaaauuuucuca

SEQ ID NO: 371172 - RNA, 22 nt, Human
gaacaguacgguggccgggagg

SEQ ID NO: 371173 - RNA, 21 nt, Human
gacuuccgccgcccggggcuu

SEQ ID NO: 371174 - RNA, 20 nt, Human
gagugguuaucgcccuccca

SEQ ID NO: 371175 - RNA, 22 nt, Human
gcagcguggggccccgucccuu

SEQ ID NO: 371176 - RNA, 19 nt, Human
gcccggggcuucugggagc

SEQ ID NO: 371177 - RNA, 21 nt, Human
uaaacuacaacacccuucuca

SEQ ID NO: 371178 - RNA, 24 nt, Human
uagaaaaaaacaguacaaugaaca

SEQ ID NO: 371179 - RNA, 19 nt, Human
uauagaagauagaaaaaaa

SEQ ID NO: 371180 - RNA, 28 nt, Human
uaucauucaaaaucuaauccacauucaa

SEQ ID NO: 371181 - RNA, 20 nt, Human
ucuacgagugguuaucgccc

SEQ ID NO: 371182 - RNA, 21 nt, Human
ugcauuugguuauuacauaac

SEQ ID NO: 371183 - RNA, 23 nt, Human
ugcuggccucccacccccacccc

SEQ ID NO: 371184 - RNA, 18 nt, Human
uuaagacacucuaacacu

SEQ ID NO: 371185 - RNA, 24 nt, Human
uuacagaugguuuuucaaaagagu

SEQ ID NO: 371186 - RNA, 23 nt, Human
uuauaaacuacaacacccuucuc

SEQ ID NO: 371187 - RNA, 24 nt, Human
uuccuuuuuucuuucccaacacuu

SEQ ID NO: 371188 - RNA, 19 nt, Human
uucuacgagugguuaucgc

SEQ ID NO: 371189 - RNA, 19 nt, Human
uuuaagacacucuaacacu

SEQ ID NO: 371190 - RNA, 22 nt, Human
uuuaagacacucuaacacuuca

SEQ ID NO: 371191 - RNA, 19 nt, Human
uuuaaucaagaagaguuac

SEQ ID NO: 371192 - RNA, 20 nt, Human
uuucacauugcauuugguua

SEQ ID NO: 371193 - RNA, 18 nt, Human
uuuuuucuuucccaacac

SEQ ID NO: 371194 - RNA, 18 nt, Human
aaaaaggaaacgcaaaga

SEQ ID NO: 371195 - RNA, 18 nt, Human
aaaaaggaaacgcaaaga

SEQ ID NO: 371196 - RNA, 23 nt, Human
aacaaaagauggguuugggguag

SEQ ID NO: 371197 - RNA, 20 nt, Human
aaccccgccaacucagcaag

SEQ ID NO: 371198 - RNA, 23 nt, Human
aacccggggcccauguugggcug

SEQ ID NO: 371199 - RNA, 20 nt, Human
aaccuggaacccagccagca

SEQ ID NO: 371200 - RNA, 20 nt, Human
aagcccuagccucgcaaucc

SEQ ID NO: 371201 - RNA, 24 nt, Human
acaagcucugcauacccccugccc

SEQ ID NO: 371202 - RNA, 18 nt, Human
acccugagcuccagggcc

SEQ ID NO: 371203 - RNA, 19 nt, Human
acccugagcuccagggccc

SEQ ID NO: 371204 - RNA, 20 nt, Human
accucggcggccgcggaggc

SEQ ID NO: 371205 - RNA, 20 nt, Human
accugugcgcccagagaauc

SEQ ID NO: 371206 - RNA, 19 nt, Human
acuguauuucuucucccca

SEQ ID NO: 371207 - RNA, 19 nt, Human
agaaaacggcagccagccc

SEQ ID NO: 371208 - RNA, 19 nt, Human
agaacaaaagauggguuug

SEQ ID NO: 371209 - RNA, 21 nt, Human
agccagacauccagaacucuc

SEQ ID NO: 371210 - RNA, 21 nt, Human
agccccggcgcccccgccugc

SEQ ID NO: 371211 - RNA, 19 nt, Human
aggaauacggugcccuggc

SEQ ID NO: 371212 - RNA, 28 nt, Human
aggagaaggaggauauaggagaacaaaa

SEQ ID NO: 371213 - RNA, 18 nt, Human
augcucggugaggaagaa

SEQ ID NO: 371214 - RNA, 19 nt, Human
caaaagccccggcgccccc

SEQ ID NO: 371215 - RNA, 22 nt, Human
caaagcccacucugggaacugu

SEQ ID NO: 371216 - RNA, 27 nt, Human
caacaaaaaggaaacgcaaagagguug

SEQ ID NO: 371217 - RNA, 18 nt, Human
caagcucugcauaccccc

SEQ ID NO: 371218 - RNA, 22 nt, Human
caauccaaguugucuucagccc

SEQ ID NO: 371219 - RNA, 25 nt, Human
caccacaagcucugcauacccccug

SEQ ID NO: 371220 - RNA, 26 nt, Human
caccgcugaaacugaacugaaaugga

SEQ ID NO: 371221 - RNA, 19 nt, Human
caccucugccuccaccguu

SEQ ID NO: 371222 - RNA, 24 nt, Human
cacucacugcuccuaucccacucc

SEQ ID NO: 371223 - RNA, 23 nt, Human
cagaaaacggcagccagcccuca

SEQ ID NO: 371224 - RNA, 25 nt, Human
cagaaacaaggacccugagcuccag

SEQ ID NO: 371225 - RNA, 20 nt, Human
cagcaucuauggcuuccugc

SEQ ID NO: 371226 - RNA, 21 nt, Human
cagcuucccaggguagccccu

SEQ ID NO: 371227 - RNA, 21 nt, Human
cauggccccugugggagcagg

SEQ ID NO: 371228 - RNA, 21 nt, Human
ccagccagcaucuauggcuuc

SEQ ID NO: 371229 - RNA, 23 nt, Human
ccagccccacaaacaccugggag

SEQ ID NO: 371230 - RNA, 25 nt, Human
cccacaaacaccugggagaggaaua

SEQ ID NO: 371231 - RNA, 24 nt, Human
cccacaguccugcugcuuugagcc

SEQ ID NO: 371232 - RNA, 26 nt, Human
cccagaaaacggcagccagcccucau

SEQ ID NO: 371233 - RNA, 19 nt, Human
cccagagaauccgggcccg

SEQ ID NO: 371234 - RNA, 18 nt, Human
ccccggcgcccccgccug

SEQ ID NO: 371235 - RNA, 18 nt, Human
ccccucggcgcccaacuu

SEQ ID NO: 371236 - RNA, 24 nt, Human
cccggccacacgcacgaccucggc

SEQ ID NO: 371237 - RNA, 18 nt, Human
cccggggcccauguuggg

SEQ ID NO: 371238 - RNA, 19 nt, Human
cccucaagucuagaggacc

SEQ ID NO: 371239 - RNA, 20 nt, Human
cccucaagucuagaggaccc

SEQ ID NO: 371240 - RNA, 20 nt, Human
ccgccugcuccucggagccc

SEQ ID NO: 371241 - RNA, 24 nt, Human
ccgcugaaacugaacugaaaugga

SEQ ID NO: 371242 - RNA, 27 nt, Human
ccguuccugccccaccacaagcucugc

SEQ ID NO: 371243 - RNA, 23 nt, Human
ccugccccaccacaagcucugca

SEQ ID NO: 371244 - RNA, 20 nt, Human
cgccccggccccucggcgcc

SEQ ID NO: 371245 - RNA, 22 nt, Human
cgccccggccccucggcgccca

SEQ ID NO: 371246 - RNA, 19 nt, Human
cgccugcuccucggagccc

SEQ ID NO: 371247 - RNA, 20 nt, Human
cggagggcagucagcccaca

SEQ ID NO: 371248 - RNA, 24 nt, Human
cuccaccguuccugccccaccaca

SEQ ID NO: 371249 - RNA, 21 nt, Human
cuccagggcccugucccuggg

SEQ ID NO: 371250 - RNA, 19 nt, Human
cuccgcgcgccccggcccc

SEQ ID NO: 371251 - RNA, 21 nt, Human
cuccgcgcgccccggccccuc

SEQ ID NO: 371252 - RNA, 21 nt, Human
cugaagcuacggcagcuuccc

SEQ ID NO: 371253 - RNA, 25 nt, Human
cugagcuccagggcccugucccugg

SEQ ID NO: 371254 - RNA, 18 nt, Human
cuggccaccaaagcccac

SEQ ID NO: 371255 - RNA, 23 nt, Human
cuuuccugucccagguccugcuc

SEQ ID NO: 371256 - RNA, 20 nt, Human
gaaaacggcagccagcccuc

SEQ ID NO: 371257 - RNA, 22 nt, Human
gaaacugaacugaaauggaaca

SEQ ID NO: 371258 - RNA, 20 nt, Human
gaacugucaccucugccucc

SEQ ID NO: 371259 - RNA, 19 nt, Human
gaauccgggcccgggcccc

SEQ ID NO: 371260 - RNA, 21 nt, Human
gaaucuccucacccaccggcu

SEQ ID NO: 371261 - RNA, 23 nt, Human
gacugccaggaaagggcacccau

SEQ ID NO: 371262 - RNA, 18 nt, Human
gcuccagggcccuguccc

SEQ ID NO: 371263 - RNA, 19 nt, Human
ggaaacgcaaagagguugg

SEQ ID NO: 371264 - RNA, 18 nt, Human
ggaacugucaccucugcc

SEQ ID NO: 371265 - RNA, 18 nt, Human
ggagccccccggccacac

SEQ ID NO: 371266 - RNA, 21 nt, Human
ggccacacgcacgaccucggc

SEQ ID NO: 371267 - RNA, 23 nt, Human
ggcccuagagccgaaccagucuc

SEQ ID NO: 371268 - RNA, 23 nt, Human
ggggugaggccuccccauggaga

SEQ ID NO: 371269 - RNA, 19 nt, Human
ggugaggaagaagagccuu

SEQ ID NO: 371270 - RNA, 19 nt, Human
gugcagcagcucugggucc

SEQ ID NO: 371271 - RNA, 25 nt, Human
uaaaugggugugaggaagagaugau

SEQ ID NO: 371272 - RNA, 21 nt, Human
ucagcccagaaaacggcagcc

SEQ ID NO: 371273 - RNA, 27 nt, Human
ucagcccagaaaacggcagccagcccu

SEQ ID NO: 371274 - RNA, 19 nt, Human
ucccuggccaccaaagccc

SEQ ID NO: 371275 - RNA, 21 nt, Human
ucccuggggugaggccucccc

SEQ ID NO: 371276 - RNA, 19 nt, Human
uccucucuuuccuguccca

SEQ ID NO: 371277 - RNA, 18 nt, Human
ucuccuguggagaugggg

SEQ ID NO: 371278 - RNA, 18 nt, Human
ucugcauacccccugccc

SEQ ID NO: 371279 - RNA, 23 nt, Human
ugaagcuacggcagcuucccagg

SEQ ID NO: 371280 - RNA, 21 nt, Human
ugaaggaagcuuucuugccug

SEQ ID NO: 371281 - RNA, 19 nt, Human
ugagccagacauccagaac

SEQ ID NO: 371282 - RNA, 23 nt, Human
ugaggaagaagagccuugaaggg

SEQ ID NO: 371283 - RNA, 22 nt, Human
ugaggaagagaugaugcaucuu

SEQ ID NO: 371284 - RNA, 20 nt, Human
ugaggcccuagagccgaacc

SEQ ID NO: 371285 - RNA, 18 nt, Human
ugagugugugcagcagcu

SEQ ID NO: 371286 - RNA, 24 nt, Human
ugagugugugcagcagcucugggu

SEQ ID NO: 371287 - RNA, 20 nt, Human
ugccuggcugaagcuacggc

SEQ ID NO: 371288 - RNA, 18 nt, Human
uggaacaggagaaggagg

SEQ ID NO: 371289 - RNA, 19 nt, Human
uggaaggugggaaucuccu

SEQ ID NO: 371290 - RNA, 20 nt, Human
uggcagggcagaaacaagga

SEQ ID NO: 371291 - RNA, 23 nt, Human
uggcuuccugcugucugauucuu

SEQ ID NO: 371292 - RNA, 28 nt, Human
uggggccuugggaacauguuuggaggcu

SEQ ID NO: 371293 - RNA, 18 nt, Human
ugggguagugccaccuau

SEQ ID NO: 371294 - RNA, 20 nt, Human
ugguuccucucuuuccuguc

SEQ ID NO: 371295 - RNA, 21 nt, Human
ugguuccucucuuuccugucc

SEQ ID NO: 371296 - RNA, 18 nt, Human
ugugugcagcagcucugg

SEQ ID NO: 371297 - RNA, 22 nt, Human
uucuccccauaaccuggaaccc

SEQ ID NO: 371298 - RNA, 18 nt, Human
uugaaaguggggccuugg

SEQ ID NO: 371299 - RNA, 22 nt, Human
uuuuauugacuguauuucuucu

SEQ ID NO: 371300 - RNA, 22 nt, Human
uuuuuuuuuuuuauacaaaaac

SEQ ID NO: 371301 - RNA, 25 nt, Human
aaaaaaacaaacaaacccaugcagg

SEQ ID NO: 371302 - RNA, 22 nt, Human
aaaacaaaacggccacagccuc

SEQ ID NO: 371303 - RNA, 22 nt, Human
aaaacaggaaaauuacaaauca

SEQ ID NO: 371304 - RNA, 21 nt, Human
aaacaaacaaacccaugcagg

SEQ ID NO: 371305 - RNA, 22 nt, Human
aaaugcaacauggaacccaguu

SEQ ID NO: 371306 - RNA, 18 nt, Human
aacccaguuuauuaucag

SEQ ID NO: 371307 - RNA, 23 nt, Human
aaccucuaagaucuucuccaguu

SEQ ID NO: 371308 - RNA, 21 nt, Human
aagaaaacaaaacggccacag

SEQ ID NO: 371309 - RNA, 22 nt, Human
aagaaaacaaaacggccacagc

SEQ ID NO: 371310 - RNA, 25 nt, Human
aagaaaacaaaacggccacagccuc

SEQ ID NO: 371311 - RNA, 19 nt, Human
aagacauuucaaacugugg

SEQ ID NO: 371312 - RNA, 19 nt, Human
aagagaaggugggcuucaa

SEQ ID NO: 371313 - RNA, 19 nt, Human
aagagaccacauuugaaua

SEQ ID NO: 371314 - RNA, 18 nt, Human
aagaggaagagacaacaa

SEQ ID NO: 371315 - RNA, 26 nt, Human
acaagaguucugaagaggaagagaca

SEQ ID NO: 371316 - RNA, 21 nt, Human
acucuugucuacaucagcaaa

SEQ ID NO: 371317 - RNA, 20 nt, Human
agagguggggagccuggggg

SEQ ID NO: 371318 - RNA, 19 nt, Human
agaguucccaguagcuaau

SEQ ID NO: 371319 - RNA, 19 nt, Human
agcacuuucauugugguuu

SEQ ID NO: 371320 - RNA, 21 nt, Human
agccuggggggacaagaguuc

SEQ ID NO: 371321 - RNA, 23 nt, Human
agguugugcucaguuguagggug

SEQ ID NO: 371322 - RNA, 20 nt, Human
aguacacagaugaaaugcaa

SEQ ID NO: 371323 - RNA, 18 nt, Human
auaauacaaaacaggaaa

SEQ ID NO: 371324 - RNA, 19 nt, Human
aucaugcuuuucucccagc

SEQ ID NO: 371325 - RNA, 21 nt, Human
augaaaugcaacauggaaccc

SEQ ID NO: 371326 - RNA, 23 nt, Human
caaaacggccacagccuccagac

SEQ ID NO: 371327 - RNA, 22 nt, Human
caagaaaacaaaacggccacag

SEQ ID NO: 371328 - RNA, 24 nt, Human
caagaaaacaaaacggccacagcc

SEQ ID NO: 371329 - RNA, 21 nt, Human
cagcaguaccauccacccggc

SEQ ID NO: 371330 - RNA, 21 nt, Human
caguaaaaaaacaaacaaacc

SEQ ID NO: 371331 - RNA, 22 nt, Human
caucagcaaagcagauaauaca

SEQ ID NO: 371332 - RNA, 23 nt, Human
ccacacauuuaaaucacccagca

SEQ ID NO: 371333 - RNA, 24 nt, Human
ccacacauuuaaaucacccagcaa

SEQ ID NO: 371334 - RNA, 19 nt, Human
ccacucaccccuugggaga

SEQ ID NO: 371335 - RNA, 18 nt, Human
cccagcaaauauuccgaa

SEQ ID NO: 371336 - RNA, 22 nt, Human
cccaguuuauuaucagaacaac

SEQ ID NO: 371337 - RNA, 19 nt, Human
ccgccucacucccccgauu

SEQ ID NO: 371338 - RNA, 18 nt, Human
ccugguggcuggaccaug

SEQ ID NO: 371339 - RNA, 19 nt, Human
cggccacagccuccagaca

SEQ ID NO: 371340 - RNA, 25 nt, Human
cuacucaguuaacucuugucuacau

SEQ ID NO: 371341 - RNA, 22 nt, Human
cucacucccccgauuuuagcca

SEQ ID NO: 371342 - RNA, 22 nt, Human
cuggagugucaagucucugccc

SEQ ID NO: 371343 - RNA, 21 nt, Human
cuugggagacccucaaaagcc

SEQ ID NO: 371344 - RNA, 23 nt, Human
gacauuucaaacugugguccuga

SEQ ID NO: 371345 - RNA, 21 nt, Human
gaccgugcuggucuauuaggc

SEQ ID NO: 371346 - RNA, 19 nt, Human
gagcccggugucgcgccgc

SEQ ID NO: 371347 - RNA, 21 nt, Human
gagguggggagccugggggga

SEQ ID NO: 371348 - RNA, 25 nt, Human
gcacugccugaggauuaaaaaacua

SEQ ID NO: 371349 - RNA, 18 nt, Human
gcaguaaaaaaacaaaca

SEQ ID NO: 371350 - RNA, 19 nt, Human
gcaguaccauccacccggc

SEQ ID NO: 371351 - RNA, 18 nt, Human
gcccuuuuuuccuuuccc

SEQ ID NO: 371352 - RNA, 22 nt, Human
gccucacucccccgauuuuagc

SEQ ID NO: 371353 - RNA, 19 nt, Human
gcuuuucucccagcaguuu

SEQ ID NO: 371354 - RNA, 19 nt, Human
ggauuaaaaaacuaguucu

SEQ ID NO: 371355 - RNA, 22 nt, Human
gggaaucaugcuuuucucccag

SEQ ID NO: 371356 - RNA, 23 nt, Human
gggacaagaguucugaagaggaa

SEQ ID NO: 371357 - RNA, 20 nt, Human
guggagugacugugcauccc

SEQ ID NO: 371358 - RNA, 24 nt, Human
uaaaaaaacaaacaaacccaugca

SEQ ID NO: 371359 - RNA, 25 nt, Human
uaaguuaaucaagugcauaccacaa

SEQ ID NO: 371360 - RNA, 21 nt, Human
uacaaaacaggaaaauuacaa

SEQ ID NO: 371361 - RNA, 18 nt, Human
uaccaugauaaaauuuga

SEQ ID NO: 371362 - RNA, 21 nt, Human
uaggguggggggaugcacugc

SEQ ID NO: 371363 - RNA, 21 nt, Human
uaugaaagacauuucaaacug

SEQ ID NO: 371364 - RNA, 18 nt, Human
uaugacaaauacuuacau

SEQ ID NO: 371365 - RNA, 23 nt, Human
uaugacaaauacuuacauugaca

SEQ ID NO: 371366 - RNA, 24 nt, Human
uaugacaaauacuuacauugacaa

SEQ ID NO: 371367 - RNA, 23 nt, Human
uaugugaaaagagaaggugggcu

SEQ ID NO: 371368 - RNA, 22 nt, Human
ucaaacugugguccugaagagu

SEQ ID NO: 371369 - RNA, 24 nt, Human
ucaagucucugcccuuuuuuccuu

SEQ ID NO: 371370 - RNA, 24 nt, Human
ucaaugguggauguggagugacug

SEQ ID NO: 371371 - RNA, 31 nt, Human
ucacccagcaaauauuccgaaggcuaauugu

SEQ ID NO: 371372 - RNA, 20 nt, Human
uccaacacguccacucaccc

SEQ ID NO: 371373 - RNA, 21 nt, Human
ucccauggaagggacacaggg

SEQ ID NO: 371374 - RNA, 25 nt, Human
ugagcaguaaaaaaacaaacaaacc

SEQ ID NO: 371375 - RNA, 20 nt, Human
ugaggaagaauuuugaccac

SEQ ID NO: 371376 - RNA, 23 nt, Human
ugaggaagaauuuugaccacgga

SEQ ID NO: 371377 - RNA, 21 nt, Human
ugcccuuggaaugagaggcac

SEQ ID NO: 371378 - RNA, 24 nt, Human
uggaaaugagacccacacauuuaa

SEQ ID NO: 371379 - RNA, 18 nt, Human
uggcuggaccauggugcu

SEQ ID NO: 371380 - RNA, 20 nt, Human
uggcuggaccauggugcuuc

SEQ ID NO: 371381 - RNA, 21 nt, Human
ugggagacccucaaaagccag

SEQ ID NO: 371382 - RNA, 19 nt, Human
uggggagccuggggggaca

SEQ ID NO: 371383 - RNA, 23 nt, Human
ugguuguuguuuagguguucucg

SEQ ID NO: 371384 - RNA, 18 nt, Human
uguagaaaaaacaucagg

SEQ ID NO: 371385 - RNA, 19 nt, Human
uguaggguggggggaugca

SEQ ID NO: 371386 - RNA, 23 nt, Human
ugucaagucucugcccuuuuuuc

SEQ ID NO: 371387 - RNA, 19 nt, Human
ugugguuuuggaccucaga

SEQ ID NO: 371388 - RNA, 21 nt, Human
uuacaaaucacugauacuuag

SEQ ID NO: 371389 - RNA, 21 nt, Human
uuaguccuugugggaaucaug

SEQ ID NO: 371390 - RNA, 20 nt, Human
uucaaccucuaagaucuucu

SEQ ID NO: 371391 - RNA, 23 nt, Human
uucauugugguuuuggaccucag

SEQ ID NO: 371392 - RNA, 18 nt, Human
uucccaguagcuaauguu

SEQ ID NO: 371393 - RNA, 18 nt, Human
uuccggagcccggugucg

SEQ ID NO: 371394 - RNA, 18 nt, Human
uugcacuguggggaaaga

SEQ ID NO: 371395 - RNA, 22 nt, Human
uuuaaaauaaauguuuaguuuc

SEQ ID NO: 371396 - RNA, 25 nt, Human
aaguaagaaauacagccaacuagaa

SEQ ID NO: 371397 - RNA, 18 nt, Human
aaguagcuugggaaacuu

SEQ ID NO: 371398 - RNA, 24 nt, Human
aaucauaucccuccucaaaaccac

SEQ ID NO: 371399 - RNA, 20 nt, Human
acugccuaagggaaguccca

SEQ ID NO: 371400 - RNA, 23 nt, Human
agcuugggaaacuuuucaucaaa

SEQ ID NO: 371401 - RNA, 21 nt, Human
caaacaggccauuucugcuag

SEQ ID NO: 371402 - RNA, 19 nt, Human
caggagguucacaaucauc

SEQ ID NO: 371403 - RNA, 24 nt, Human
cauaaaaucauaucccuccucaaa

SEQ ID NO: 371404 - RNA, 21 nt, Human
ccagaugcaagaauacaaagc

SEQ ID NO: 371405 - RNA, 25 nt, Human
ccauaucauucuccauaaaaucaua

SEQ ID NO: 371406 - RNA, 19 nt, Human
ccucaaaaccacacccucc

SEQ ID NO: 371407 - RNA, 23 nt, Human
ccucugagcugcgaucucaauuc

SEQ ID NO: 371408 - RNA, 22 nt, Human
cucaggcauucaggagguucac

SEQ ID NO: 371409 - RNA, 20 nt, Human
cugugaggugccaaaaauga

SEQ ID NO: 371410 - RNA, 18 nt, Human
cuuggaagguggaagggg

SEQ ID NO: 371411 - RNA, 18 nt, Human
gaaggggcgcccgguguc

SEQ ID NO: 371412 - RNA, 19 nt, Human
ggugaagaacuaaaacgca

SEQ ID NO: 371413 - RNA, 20 nt, Human
uaaaguaagaaauacagcca

SEQ ID NO: 371414 - RNA, 20 nt, Human
uaaaguaagaaauacagccc

SEQ ID NO: 371415 - RNA, 23 nt, Human
uaagaaauacagccaacuagaag

SEQ ID NO: 371416 - RNA, 22 nt, Human
uauugaauccaucuucugccuc

SEQ ID NO: 371417 - RNA, 19 nt, Human
ucauaucccuccucaaaac

SEQ ID NO: 371418 - RNA, 19 nt, Human
ugcaagaauacaaagcucc

SEQ ID NO: 371419 - RNA, 23 nt, Human
ugcuagagucucaggcauucagg

SEQ ID NO: 371420 - RNA, 24 nt, Human
ugcuuuauguauuuguuuacugcc

SEQ ID NO: 371421 - RNA, 18 nt, Human
uggaaggggcgcccggug

SEQ ID NO: 371422 - RNA, 22 nt, Human
uuagucaaauauuuauuugaac

SEQ ID NO: 371423 - RNA, 23 nt, Human
uuagugacauaauuuaaaaggug

SEQ ID NO: 371424 - RNA, 18 nt, Human
uuugaacucauacaaagu

SEQ ID NO: 371425 - RNA, 19 nt, Human
aaaaaaaaaacacccuaag

SEQ ID NO: 371426 - RNA, 19 nt, Human
aaaaaaacacccuaagcuc

SEQ ID NO: 371427 - RNA, 22 nt, Human
aaaaaaacacccuaagcucauc

SEQ ID NO: 371428 - RNA, 25 nt, Human
aaaaacaaaaacaaaagcccacaga

SEQ ID NO: 371429 - RNA, 22 nt, Human
aaaaacaaaagcccacagagaa

SEQ ID NO: 371430 - RNA, 23 nt, Human
aaaaacaaaagcccacagagaaa

SEQ ID NO: 371431 - RNA, 19 nt, Human
aaaaacacccuaagcucau

SEQ ID NO: 371432 - RNA, 28 nt, Human
aaaacaaaaacaaaaacaaaagcccaca

SEQ ID NO: 371433 - RNA, 25 nt, Human
aaacaaaaacaaaaacaaaagccca

SEQ ID NO: 371434 - RNA, 21 nt, Human
aaacaccaucaagaucuuccc

SEQ ID NO: 371435 - RNA, 22 nt, Human
aacaaaaacaaaagcccacaga

SEQ ID NO: 371436 - RNA, 22 nt, Human
aacacccuaagcucaucaaaaa

SEQ ID NO: 371437 - RNA, 30 nt, Human
aagaucuaccaaaacaaaaacaaaaacaaa

SEQ ID NO: 371438 - RNA, 22 nt, Human
acaaaaacaaaaacaaaagccc

SEQ ID NO: 371439 - RNA, 23 nt, Human
acaaaaacaaaagcccacagaga

SEQ ID NO: 371440 - RNA, 21 nt, Human
accaucaagaucuucccucca

SEQ ID NO: 371441 - RNA, 18 nt, Human
agagaaauaaaaaggaac

SEQ ID NO: 371442 - RNA, 21 nt, Human
aggaacaaaaaucacauucua

SEQ ID NO: 371443 - RNA, 19 nt, Human
auccaaauugaagaucuac

SEQ ID NO: 371444 - RNA, 23 nt, Human
caaaaacaaaaacaaaagcccac

SEQ ID NO: 371445 - RNA, 21 nt, Human
caaaaacaaaagcccacagag

SEQ ID NO: 371446 - RNA, 20 nt, Human
caggaaggcuauuugcagca

SEQ ID NO: 371447 - RNA, 31 nt, Human
ccaaaacaaaaacaaaaacaaaagcccacaa

SEQ ID NO: 371448 - RNA, 28 nt, Human
ccaaaacaaaaacaaaaacaaaagcccc

SEQ ID NO: 371449 - RNA, 19 nt, Human
ccacagagaaauaaaaagg

SEQ ID NO: 371450 - RNA, 24 nt, Human
ccauccuucagcugacuuucaaaa

SEQ ID NO: 371451 - RNA, 22 nt, Human
cccugugccaugccugggggag

SEQ ID NO: 371452 - RNA, 22 nt, Human
cgaggcccugugccaugccugg

SEQ ID NO: 371453 - RNA, 18 nt, Human
cgggagacuggggggccg

SEQ ID NO: 371454 - RNA, 22 nt, Human
cuccaaauauccaaauugaaga

SEQ ID NO: 371455 - RNA, 24 nt, Human
gcaaaacaacgauguucacuccuc

SEQ ID NO: 371456 - RNA, 21 nt, Human
gcccugugccaugccuggggg

SEQ ID NO: 371457 - RNA, 18 nt, Human
uacagcauauggagguca

SEQ ID NO: 371458 - RNA, 22 nt, Human
uaccaaaacaaaaacaaaaaca

SEQ ID NO: 371459 - RNA, 20 nt, Human
uauggaggucaggaaggcua

SEQ ID NO: 371460 - RNA, 24 nt, Human
uauuuuuuuuuaacucucucuuau

SEQ ID NO: 371461 - RNA, 22 nt, Human
ugacuuucaaaaaaaaaacacc

SEQ ID NO: 371462 - RNA, 24 nt, Human
ugacuuucaaaaaaaaaacacccu

SEQ ID NO: 371463 - RNA, 19 nt, Human
ugucuaaccauccuucagc

SEQ ID NO: 371464 - RNA, 23 nt, Human
uuuuaauugaagcaauccuauuu

SEQ ID NO: 371465 - RNA, 18 nt, Human
uuuuuuuuuuuuuuuuug

SEQ ID NO: 371466 - RNA, 24 nt, Human
uuuuuuuuuuuuuuuuugucucuu

SEQ ID NO: 371467 - RNA, 24 nt, Human
aaaaaggcagagaauggccaccaa

SEQ ID NO: 371468 - RNA, 24 nt, Human
aaacaggaaaugagaacauuucag

SEQ ID NO: 371469 - RNA, 18 nt, Human
aaauuggugaauaaacac

SEQ ID NO: 371470 - RNA, 18 nt, Human
aagcagcacggcacaaac

SEQ ID NO: 371471 - RNA, 20 nt, Human
acacaacagagccaacaaac

SEQ ID NO: 371472 - RNA, 21 nt, Human
acacaacagagccaacaaaca

SEQ ID NO: 371473 - RNA, 22 nt, Human
acagagccaacaaacaucccac

SEQ ID NO: 371474 - RNA, 22 nt, Human
accaaccuugcccccaauaccu

SEQ ID NO: 371475 - RNA, 22 nt, Human
agaagaaaucugaggccacaac

SEQ ID NO: 371476 - RNA, 22 nt, Human
agagaggaaaaucaucguggug

SEQ ID NO: 371477 - RNA, 22 nt, Human
agauauaguuuugaguugcacu

SEQ ID NO: 371478 - RNA, 23 nt, Human
agcaauggagccucagggaagga

SEQ ID NO: 371479 - RNA, 23 nt, Human
auauacugacaaagcuuaaauuu

SEQ ID NO: 371480 - RNA, 27 nt, Human
aucagaagcaaauacuagaagaaaucu

SEQ ID NO: 371481 - RNA, 18 nt, Human
auggccaccaagcagcaa

SEQ ID NO: 371482 - RNA, 18 nt, Human
auggucacgugcucacca

SEQ ID NO: 371483 - RNA, 21 nt, Human
caacagcaaugcgaggaugga

SEQ ID NO: 371484 - RNA, 22 nt, Human
caacauaacugcaaauucagca

SEQ ID NO: 371485 - RNA, 24 nt, Human
caacauaacugcaaauucagcaau

SEQ ID NO: 371486 - RNA, 22 nt, Human
cacaacaccauuaccaaaugag

SEQ ID NO: 371487 - RNA, 20 nt, Human
cagaacugaaaucaccagac

SEQ ID NO: 371488 - RNA, 22 nt, Human
cagagccaacaaacaucccacc

SEQ ID NO: 371489 - RNA, 22 nt, Human
cagcaagauuucaagcaagcaa

SEQ ID NO: 371490 - RNA, 19 nt, Human
cagcacggcacaaacccac

SEQ ID NO: 371491 - RNA, 23 nt, Human
cauacagcaaacaggaaaugaga

SEQ ID NO: 371492 - RNA, 22 nt, Human
caugaagucaucauuccauggg

SEQ ID NO: 371493 - RNA, 22 nt, Human
cauggucacgugcucaccauuc

SEQ ID NO: 371494 - RNA, 21 nt, Human
ccacaauaucuugcaacucau

SEQ ID NO: 371495 - RNA, 21 nt, Human
cccaauaccuguccaacagcu

SEQ ID NO: 371496 - RNA, 23 nt, Human
cccacaauaucuugcaacucauu

SEQ ID NO: 371497 - RNA, 21 nt, Human
ccccacugcgggaaacaccaa

SEQ ID NO: 371498 - RNA, 22 nt, Human
cccuggccagacuaaaagcgaa

SEQ ID NO: 371499 - RNA, 20 nt, Human
ccugugccuguaacagcaag

SEQ ID NO: 371500 - RNA, 19 nt, Human
cgagaagaacaugaaguca

SEQ ID NO: 371501 - RNA, 18 nt, Human
cgcgagcggcgcggggag

SEQ ID NO: 371502 - RNA, 18 nt, Human
cggccccgccgcucuccc

SEQ ID NO: 371503 - RNA, 24 nt, Human
cgggggaagcagcgcggagcgggc

SEQ ID NO: 371504 - RNA, 21 nt, Human
cuguccucccuaccaaccuug

SEQ ID NO: 371505 - RNA, 20 nt, Human
cuugaaguacaucaaagaga

SEQ ID NO: 371506 - RNA, 25 nt, Human
cuugcccccaauaccuguccaacag

SEQ ID NO: 371507 - RNA, 22 nt, Human
gaaguagcucuuauacacgaca

SEQ ID NO: 371508 - RNA, 25 nt, Human
gaauaaacacaacagagccaacaaa

SEQ ID NO: 371509 - RNA, 18 nt, Human
gagggguggcaggggggu

SEQ ID NO: 371510 - RNA, 20 nt, Human
gcccgggcuggggacgggcc

SEQ ID NO: 371511 - RNA, 22 nt, Human
gcccgggcuggggacgggcccu

SEQ ID NO: 371512 - RNA, 21 nt, Human
gcgcggggaggcggcgcgggg

SEQ ID NO: 371513 - RNA, 22 nt, Human
ggagggggggaaaacacaaaug

SEQ ID NO: 371514 - RNA, 19 nt, Human
gggaagcagcgcggagcgg

SEQ ID NO: 371515 - RNA, 19 nt, Human
gggaguggggugggagggg

SEQ ID NO: 371516 - RNA, 22 nt, Human
gggugggagggguggcaggggg

SEQ ID NO: 371517 - RNA, 21 nt, Human
ggugggagggguggcaggggg

SEQ ID NO: 371518 - RNA, 20 nt, Human
guacugagcagggagugggg

SEQ ID NO: 371519 - RNA, 19 nt, Human
guucauuuguaaccacacu

SEQ ID NO: 371520 - RNA, 21 nt, Human
uaccaaccuugcccccaauac

SEQ ID NO: 371521 - RNA, 23 nt, Human
uacccacaauaucuugcaacuca

SEQ ID NO: 371522 - RNA, 22 nt, Human
uaccugaacaaagauaacaauu

SEQ ID NO: 371523 - RNA, 27 nt, Human
uaccugaacaaagauaaccggggguuc

SEQ ID NO: 371524 - RNA, 20 nt, Human
uaccuguccaacagcugcau

SEQ ID NO: 371525 - RNA, 27 nt, Human
uaguaaaggacaacaaauaauguacaa

SEQ ID NO: 371526 - RNA, 24 nt, Human
ucaagcaagcaagagaugaugggu

SEQ ID NO: 371527 - RNA, 21 nt, Human
uccaguauuuucccuucaacu

SEQ ID NO: 371528 - RNA, 23 nt, Human
ucccuaccaaccuugcccccaau

SEQ ID NO: 371529 - RNA, 21 nt, Human
uccucccuaccaaccuugccc

SEQ ID NO: 371530 - RNA, 21 nt, Human
ugaaaucaccagacuaaugca

SEQ ID NO: 371531 - RNA, 21 nt, Human
ugaauaaacacaacagagcca

SEQ ID NO: 371532 - RNA, 23 nt, Human
ugaauaaacacaacagagccaac

SEQ ID NO: 371533 - RNA, 26 nt, Human
ugaauaaacacaacagagccaacaaa

SEQ ID NO: 371534 - RNA, 21 nt, Human
ugacuggagugagcaggggag

SEQ ID NO: 371535 - RNA, 21 nt, Human
ugcauaaauucaauaccuauu

SEQ ID NO: 371536 - RNA, 24 nt, Human
ugcccccaauaccuguccaacagc

SEQ ID NO: 371537 - RNA, 18 nt, Human
ugcgcgagcggcgcgggg

SEQ ID NO: 371538 - RNA, 19 nt, Human
uggaaagcagcacggcaca

SEQ ID NO: 371539 - RNA, 18 nt, Human
uggacggcccgggcuggg

SEQ ID NO: 371540 - RNA, 24 nt, Human
ugggaauuucuucaauauuaagag

SEQ ID NO: 371541 - RNA, 18 nt, Human
ugggagggguggcagggg

SEQ ID NO: 371542 - RNA, 20 nt, Human
uggggugggagggguggcaa

SEQ ID NO: 371543 - RNA, 23 nt, Human
uggggugggagggguggcagggg

SEQ ID NO: 371544 - RNA, 24 nt, Human
uggggugggagggguggcaggggg

SEQ ID NO: 371545 - RNA, 22 nt, Human
uggguccugggccucagacccc

SEQ ID NO: 371546 - RNA, 24 nt, Human
uguaggagggggggaaaacacaaa

SEQ ID NO: 371547 - RNA, 19 nt, Human
ugugccaauccuugccugu

SEQ ID NO: 371548 - RNA, 20 nt, Human
uucacagaacugaaaucacc

SEQ ID NO: 371549 - RNA, 22 nt, Human
uuuugggguuaaaaaaauguug

SEQ ID NO: 371550 - RNA, 25 nt, Human
agaauucucucaguccagcccaccc

SEQ ID NO: 371551 - RNA, 24 nt, Human
agagaauucucucaguccagccca

SEQ ID NO: 371552 - RNA, 18 nt, Human
aggugguuguagagcgac

SEQ ID NO: 371553 - RNA, 19 nt, Human
caacagacagggcaguggu

SEQ ID NO: 371554 - RNA, 22 nt, Human
cagacagggcagcggugggcgg

SEQ ID NO: 371555 - RNA, 22 nt, Human
cagacagggcagcggugggcgg

SEQ ID NO: 371556 - RNA, 22 nt, Human
cagacagggcaguggugggcgg

SEQ ID NO: 371557 - RNA, 22 nt, Human
cagugccuguggcaccugucac

SEQ ID NO: 371558 - RNA, 21 nt, Human
caucaugucguccaccuccac

SEQ ID NO: 371559 - RNA, 28 nt, Human
ccaggcccgcucagcaaccguccccugg

SEQ ID NO: 371560 - RNA, 19 nt, Human
ccccagugccuguggcacc

SEQ ID NO: 371561 - RNA, 22 nt, Human
ccccagugccuguggcaccuga

SEQ ID NO: 371562 - RNA, 18 nt, Human
cccggagagugggggcgg

SEQ ID NO: 371563 - RNA, 18 nt, Human
cccggagagugggggcgg

SEQ ID NO: 371564 - RNA, 18 nt, Human
cgcucagcaaccgucccc

SEQ ID NO: 371565 - RNA, 18 nt, Human
gacacacuuggggucagg

SEQ ID NO: 371566 - RNA, 21 nt, Human
gcccggagagugggggcggca

SEQ ID NO: 371567 - RNA, 21 nt, Human
gcccggagagugggggcggca

SEQ ID NO: 371568 - RNA, 19 nt, Human
gcgcaggccggaggugccg

SEQ ID NO: 371569 - RNA, 21 nt, Human
gcuggccaugcgggcgggcag

SEQ ID NO: 371570 - RNA, 20 nt, Human
ggacgcacaggcaggagacg

SEQ ID NO: 371571 - RNA, 20 nt, Human
ggacgcacaggcaggagacg

SEQ ID NO: 371572 - RNA, 24 nt, Human
ggcaguggugggcggacgcacagg

SEQ ID NO: 371573 - RNA, 21 nt, Human
gggcgggcaggcuagacauuc

SEQ ID NO: 371574 - RNA, 23 nt, Human
uccccagugccuguggcaccugu

SEQ ID NO: 371575 - RNA, 22 nt, Human
uggccccuagcuccgucgguuc

SEQ ID NO: 371576 - RNA, 24 nt, Human
uggccccuagcuccgucgguuccu

SEQ ID NO: 371577 - RNA, 24 nt, Human
uggggucaggcuucuugcccauga

SEQ ID NO: 371578 - RNA, 22 nt, Human
uggugggcggacgcacaggcag

SEQ ID NO: 371579 - RNA, 19 nt, Human
ugucccaggcccgcucagc

SEQ ID NO: 371580 - RNA, 22 nt, Human
ugucccaggcccgcucagcaac

SEQ ID NO: 371581 - RNA, 22 nt, Human
uguguaugugggggggagggug

SEQ ID NO: 371582 - RNA, 22 nt, Human
uguguaugugggggggagggug

SEQ ID NO: 371583 - RNA, 23 nt, Human
uguguaugugggggggagggugu

SEQ ID NO: 371584 - RNA, 23 nt, Human
uguguaugugggggggagggugu

SEQ ID NO: 371585 - RNA, 22 nt, Human
uuccuuucuggugagaucccca

SEQ ID NO: 371586 - RNA, 24 nt, Human
uucuugcccaugaucaucaugucg

SEQ ID NO: 371587 - RNA, 23 nt, Human
aaaacaacaacaaagaaaccaca

SEQ ID NO: 371588 - RNA, 18 nt, Human
aaacaaaaacaacaacaa

SEQ ID NO: 371589 - RNA, 22 nt, Human
aaacaaaaacaacaacaaagaa

SEQ ID NO: 371590 - RNA, 23 nt, Human
aaacaaaaacaacaacaaagaaa

SEQ ID NO: 371591 - RNA, 24 nt, Human
aaacaaaaacaacaacaaagaaac

SEQ ID NO: 371592 - RNA, 24 nt, Human
aaacaacaacaaagaaaccacaua

SEQ ID NO: 371593 - RNA, 22 nt, Human
aaacccucaaucagccacgccc

SEQ ID NO: 371594 - RNA, 21 nt, Human
aaacuggaaauggugucagaa

SEQ ID NO: 371595 - RNA, 21 nt, Human
aaagaaauauccugggccucc

SEQ ID NO: 371596 - RNA, 21 nt, Human
aaagagcucagggcugugagc

SEQ ID NO: 371597 - RNA, 18 nt, Human
aaagcagagacggaggcc

SEQ ID NO: 371598 - RNA, 22 nt, Human
aaagcagagacggaggccagga

SEQ ID NO: 371599 - RNA, 19 nt, Human
aaagucccccaucccccuc

SEQ ID NO: 371600 - RNA, 24 nt, Human
aaagucccccaucccccuccccca

SEQ ID NO: 371601 - RNA, 22 nt, Human
aacaaaaauaaacacauuuuua

SEQ ID NO: 371602 - RNA, 20 nt, Human
aacauuggccugcuguuuuc

SEQ ID NO: 371603 - RNA, 23 nt, Human
aaccucauuuggcagcccuucua

SEQ ID NO: 371604 - RNA, 18 nt, Human
aagagugaaccggagcuc

SEQ ID NO: 371605 - RNA, 19 nt, Human
aagcagagacggaggccag

SEQ ID NO: 371606 - RNA, 21 nt, Human
aagcagagacggaggccagga

SEQ ID NO: 371607 - RNA, 26 nt, Human
acaaaaauaaacacauuuuuaaaauc

SEQ ID NO: 371608 - RNA, 22 nt, Human
acaacaaagaaaccacauagga

SEQ ID NO: 371609 - RNA, 24 nt, Human
acaacaacaaagaaaccacauagg

SEQ ID NO: 371610 - RNA, 22 nt, Human
acagauaaaaccauuguccaca

SEQ ID NO: 371611 - RNA, 23 nt, Human
accaaagccaaaggcuaaaccug

SEQ ID NO: 371612 - RNA, 22 nt, Human
accccaaacaaaaacaacaaca

SEQ ID NO: 371613 - RNA, 22 nt, Human
acuccgcggcccaggcguccgg

SEQ ID NO: 371614 - RNA, 22 nt, Human
acugaaaaaaaagucaaacugg

SEQ ID NO: 371615 - RNA, 21 nt, Human
agacaacccuuuccccucagg

SEQ ID NO: 371616 - RNA, 21 nt, Human
agacggaggccaggaugggaa

SEQ ID NO: 371617 - RNA, 19 nt, Human
agccaccaacaaaaguccc

SEQ ID NO: 371618 - RNA, 24 nt, Human
agccaccaguuccaaacccucaau

SEQ ID NO: 371619 - RNA, 24 nt, Human
agccggacgcccgccgcccucgcc

SEQ ID NO: 371620 - RNA, 19 nt, Human
aggcguccgggcggcaggc

SEQ ID NO: 371621 - RNA, 20 nt, Human
aguggaaaagcagagacgga

SEQ ID NO: 371622 - RNA, 24 nt, Human
aucgccugggaccaccgagagggg

SEQ ID NO: 371623 - RNA, 18 nt, Human
aucggcgcuugcugcggc

SEQ ID NO: 371624 - RNA, 22 nt, Human
augagacacaggaugugcccac

SEQ ID NO: 371625 - RNA, 24 nt, Human
auguaacaaaaugaaccugaccuc

SEQ ID NO: 371626 - RNA, 24 nt, Human
caaacaaaaacaacaacaaagaaa

SEQ ID NO: 371627 - RNA, 23 nt, Human
caaacuggacagauaaugcagca

SEQ ID NO: 371628 - RNA, 20 nt, Human
caaagaaaccacauaggaac

SEQ ID NO: 371629 - RNA, 21 nt, Human
caaagccaaaggcuaaaccug

SEQ ID NO: 371630 - RNA, 22 nt, Human
caaaugcaacauuccugcuuca

SEQ ID NO: 371631 - RNA, 22 nt, Human
caacaaaagucccccauccccc

SEQ ID NO: 371632 - RNA, 24 nt, Human
caacaaaagucccccaucccccuc

SEQ ID NO: 371633 - RNA, 24 nt, Human
caacaaagaaaccacauaggaaca

SEQ ID NO: 371634 - RNA, 18 nt, Human
caacaacaaagaaaccac

SEQ ID NO: 371635 - RNA, 23 nt, Human
caacagaaaggagagagacaacc

SEQ ID NO: 371636 - RNA, 26 nt, Human
caagauacccagaaaagaagggaguc

SEQ ID NO: 371637 - RNA, 20 nt, Human
cacacaaccgaugacaaggc

SEQ ID NO: 371638 - RNA, 22 nt, Human
cacaggaugugcccaccugugg

SEQ ID NO: 371639 - RNA, 22 nt, Human
cacauuaaauagaacuaguauu

SEQ ID NO: 371640 - RNA, 19 nt, Human
caccgccccccagcccggc

SEQ ID NO: 371641 - RNA, 19 nt, Human
cagaauauccugugugacu

SEQ ID NO: 371642 - RNA, 27 nt, Human
cagagccggacgcccgccgcccucgcc

SEQ ID NO: 371643 - RNA, 19 nt, Human
cagcauggggauggcggug

SEQ ID NO: 371644 - RNA, 19 nt, Human
cagcccucuggcucugggc

SEQ ID NO: 371645 - RNA, 20 nt, Human
cagcgccaccgccccccagc

SEQ ID NO: 371646 - RNA, 19 nt, Human
cagggccucugccagcuuu

SEQ ID NO: 371647 - RNA, 19 nt, Human
cagguggggccucugaccu

SEQ ID NO: 371648 - RNA, 22 nt, Human
caguggcacagaggucacagcu

SEQ ID NO: 371649 - RNA, 24 nt, Human
caucugggcagaggggcagggggc

SEQ ID NO: 371650 - RNA, 19 nt, Human
cauuguccacaagguccuu

SEQ ID NO: 371651 - RNA, 31 nt, Human
ccaaacaaaaacaacaacaaagaaaccacaa

SEQ ID NO: 371652 - RNA, 22 nt, Human
ccaaacccucaaucagccacgc

SEQ ID NO: 371653 - RNA, 21 nt, Human
ccaacaaaagucccccauccc

SEQ ID NO: 371654 - RNA, 19 nt, Human
ccaacagaaaggagagaga

SEQ ID NO: 371655 - RNA, 18 nt, Human
ccaccccaaacaaaaaca

SEQ ID NO: 371656 - RNA, 22 nt, Human
ccaccccaaacaaaaacaacaa

SEQ ID NO: 371657 - RNA, 19 nt, Human
ccacuggggaacgggcuuc

SEQ ID NO: 371658 - RNA, 22 nt, Human
ccacuggggaacgggcuucuag

SEQ ID NO: 371659 - RNA, 22 nt, Human
ccagcccucuggcucugggcug

SEQ ID NO: 371660 - RNA, 24 nt, Human
ccagcugguuccauaaccacauua

SEQ ID NO: 371661 - RNA, 21 nt, Human
ccaguccccuaacugugaguu

SEQ ID NO: 371662 - RNA, 22 nt, Human
ccagucccgagccgccgccgcc

SEQ ID NO: 371663 - RNA, 23 nt, Human
ccagucccgagccgccgccgccu

SEQ ID NO: 371664 - RNA, 18 nt, Human
ccauaaccacauuaaaua

SEQ ID NO: 371665 - RNA, 19 nt, Human
cccaaacaaaaacaacaac

SEQ ID NO: 371666 - RNA, 24 nt, Human
cccaaacaaaaacaacaacaaaga

SEQ ID NO: 371667 - RNA, 18 nt, Human
cccacacgcagguagaag

SEQ ID NO: 371668 - RNA, 22 nt, Human
ccccaccccaaacaaaaacaac

SEQ ID NO: 371669 - RNA, 20 nt, Human
cccccaccccaaacaaaaac

SEQ ID NO: 371670 - RNA, 20 nt, Human
cccccagcccggcccggccc

SEQ ID NO: 371671 - RNA, 18 nt, Human
cccccaucccccuccccc

SEQ ID NO: 371672 - RNA, 20 nt, Human
cccccaucccccucccccaa

SEQ ID NO: 371673 - RNA, 22 nt, Human
ccccccagcccggcccggcccg

SEQ ID NO: 371674 - RNA, 19 nt, Human
cccccgacuccucccaaca

SEQ ID NO: 371675 - RNA, 19 nt, Human
cccggcccggccccgccgc

SEQ ID NO: 371676 - RNA, 19 nt, Human
cccggcccggcccggcccc

SEQ ID NO: 371677 - RNA, 21 nt, Human
cccucaaucagccacgcccag

SEQ ID NO: 371678 - RNA, 24 nt, Human
cccucaaucagccacgcccagucc

SEQ ID NO: 371679 - RNA, 23 nt, Human
ccgaacaagcucaggggucgaaa

SEQ ID NO: 371680 - RNA, 20 nt, Human
ccgcccucgccgcuuccgcc

SEQ ID NO: 371681 - RNA, 19 nt, Human
ccgcccucgccgcuuccgg

SEQ ID NO: 371682 - RNA, 18 nt, Human
ccgccgcccucgccgcuu

SEQ ID NO: 371683 - RNA, 18 nt, Human
ccgccgccgccgccucaa

SEQ ID NO: 371684 - RNA, 20 nt, Human
ccgccgccgccuccgccgcc

SEQ ID NO: 371685 - RNA, 20 nt, Human
ccgccgccgccuccgccgcc

SEQ ID NO: 371686 - RNA, 21 nt, Human
ccgccgccgccuccgccgccg

SEQ ID NO: 371687 - RNA, 23 nt, Human
ccgccgccgccuccgccgccgcc

SEQ ID NO: 371688 - RNA, 22 nt, Human
ccgccgccgccuccgccgccuc

SEQ ID NO: 371689 - RNA, 24 nt, Human
ccgccgccgccuccgccgccucca

SEQ ID NO: 371690 - RNA, 21 nt, Human
ccgccgccuccaccaccucag

SEQ ID NO: 371691 - RNA, 23 nt, Human
ccgccucaagguuacggcuccgg

SEQ ID NO: 371692 - RNA, 20 nt, Human
ccgccuccgccgccgccucc

SEQ ID NO: 371693 - RNA, 21 nt, Human
ccgccuccgccgccgccuccg

SEQ ID NO: 371694 - RNA, 20 nt, Human
ccgccuccgccgccuccacc

SEQ ID NO: 371695 - RNA, 26 nt, Human
ccgcggauccagcgccaccgcccccc

SEQ ID NO: 371696 - RNA, 22 nt, Human
ccggagcucuggaaaggucugc

SEQ ID NO: 371697 - RNA, 20 nt, Human
ccggccccgccgccgccgcc

SEQ ID NO: 371698 - RNA, 24 nt, Human
ccgggccucccaggcagccucagc

SEQ ID NO: 371699 - RNA, 21 nt, Human
ccuccaccaccucagagccgg

SEQ ID NO: 371700 - RNA, 19 nt, Human
ccucccaggcagccucagc

SEQ ID NO: 371701 - RNA, 18 nt, Human
ccuccgccgccgccuccg

SEQ ID NO: 371702 - RNA, 19 nt, Human
ccuccgccgccgccuccgc

SEQ ID NO: 371703 - RNA, 24 nt, Human
ccuccgccgccgccuccgccgccu

SEQ ID NO: 371704 - RNA, 21 nt, Human
ccucgccgcuuccgccgcugc

SEQ ID NO: 371705 - RNA, 26 nt, Human
ccuggcugcagauggcgggugggggg

SEQ ID NO: 371706 - RNA, 21 nt, Human
ccuguggaggacccgggaccc

SEQ ID NO: 371707 - RNA, 19 nt, Human
ccugugggggcaaggcaga

SEQ ID NO: 371708 - RNA, 24 nt, Human
cgagaggcagggcagcaccaacca

SEQ ID NO: 371709 - RNA, 18 nt, Human
cgccaacgaucgggcagc

SEQ ID NO: 371710 - RNA, 18 nt, Human
cgccccccagcccggccc

SEQ ID NO: 371711 - RNA, 19 nt, Human
cgccgccuccgccgccucc

SEQ ID NO: 371712 - RNA, 23 nt, Human
cggcacgagaggcagggcagcac

SEQ ID NO: 371713 - RNA, 20 nt, Human
cgggccccugaagcaucugg

SEQ ID NO: 371714 - RNA, 18 nt, Human
cgggcuucuagaacaccc

SEQ ID NO: 371715 - RNA, 18 nt, Human
cuagaaccucagcagccc

SEQ ID NO: 371716 - RNA, 24 nt, Human
cuagaaccucagcagcccagaaau

SEQ ID NO: 371717 - RNA, 23 nt, Human
cucgcccccgacuccucccaaca

SEQ ID NO: 371718 - RNA, 21 nt, Human
cucuagggcugauuuuggucu

SEQ ID NO: 371719 - RNA, 23 nt, Human
cuggcucugggcugaagcaacac

SEQ ID NO: 371720 - RNA, 22 nt, Human
cugugugaccaaagccaaaggc

SEQ ID NO: 371721 - RNA, 19 nt, Human
gaaagcacuggcggagugg

SEQ ID NO: 371722 - RNA, 23 nt, Human
gaagguucuaggagugcaguggu

SEQ ID NO: 371723 - RNA, 22 nt, Human
gaccaaacaaaccaucguagaa

SEQ ID NO: 371724 - RNA, 22 nt, Human
gacucuguugccuuugguugcu

SEQ ID NO: 371725 - RNA, 22 nt, Human
gagcccagucccgagccgccgc

SEQ ID NO: 371726 - RNA, 19 nt, Human
gagcucagggcugugagcc

SEQ ID NO: 371727 - RNA, 20 nt, Human
gagguuauccuuucaccauu

SEQ ID NO: 371728 - RNA, 26 nt, Human
gauagcagcaauacuucaaaacaaga

SEQ ID NO: 371729 - RNA, 18 nt, Human
gauaucuagcagcugcuc

SEQ ID NO: 371730 - RNA, 22 nt, Human
gauggcggugcagcugcuaagg

SEQ ID NO: 371731 - RNA, 21 nt, Human
gcaaacccacacgcagguaga

SEQ ID NO: 371732 - RNA, 24 nt, Human
gcagaauauccugugugaccaaag

SEQ ID NO: 371733 - RNA, 18 nt, Human
gccaccgccccccagccc

SEQ ID NO: 371734 - RNA, 26 nt, Human
gccaucucagacccacagcgggaucc

SEQ ID NO: 371735 - RNA, 18 nt, Human
gccccgggccucccaggc

SEQ ID NO: 371736 - RNA, 21 nt, Human
gccccgggccucccaggcagc

SEQ ID NO: 371737 - RNA, 23 nt, Human
gcccgccgcccucgccgcuuccg

SEQ ID NO: 371738 - RNA, 25 nt, Human
gccgccgccgccuccgccgccgccu

SEQ ID NO: 371739 - RNA, 20 nt, Human
gccuccaggaaaagcugcuc

SEQ ID NO: 371740 - RNA, 19 nt, Human
gccucugaccucaucccgg

SEQ ID NO: 371741 - RNA, 20 nt, Human
gcgcuugcugcggcgcucug

SEQ ID NO: 371742 - RNA, 20 nt, Human
gcggcccaggcguccgggcg

SEQ ID NO: 371743 - RNA, 23 nt, Human
ggaaaagcagagacggaggccag

SEQ ID NO: 371744 - RNA, 19 nt, Human
ggacaacaguggcacagag

SEQ ID NO: 371745 - RNA, 18 nt, Human
ggacccaaaguagaacag

SEQ ID NO: 371746 - RNA, 25 nt, Human
ggagagagacaacccuuuccccuca

SEQ ID NO: 371747 - RNA, 24 nt, Human
ggauggcggugcagcugccgcccc

SEQ ID NO: 371748 - RNA, 23 nt, Human
gggccuccaggaaaagcugcucc

SEQ ID NO: 371749 - RNA, 18 nt, Human
gggcuucuagaacacccu

SEQ ID NO: 371750 - RNA, 23 nt, Human
ggggcagggggcauggcuggauc

SEQ ID NO: 371751 - RNA, 19 nt, Human
gucacagcuuugggacuga

SEQ ID NO: 371752 - RNA, 18 nt, Human
gucucuuccgccucccgc

SEQ ID NO: 371753 - RNA, 21 nt, Human
gucugcgacacucacacaacc

SEQ ID NO: 371754 - RNA, 24 nt, Human
guuuuguguuuccagcugguucca

SEQ ID NO: 371755 - RNA, 22 nt, Human
uaaaacaaaauuuucagccaag

SEQ ID NO: 371756 - RNA, 19 nt, Human
uaaaaccauuguccacaag

SEQ ID NO: 371757 - RNA, 21 nt, Human
uaacaaggauagcagcaauac

SEQ ID NO: 371758 - RNA, 28 nt, Human
uacccagaaaagaaauauccugggccuc

SEQ ID NO: 371759 - RNA, 23 nt, Human
uacccagaaccggcugcugggau

SEQ ID NO: 371760 - RNA, 19 nt, Human
uacccuguacuugccccca

SEQ ID NO: 371761 - RNA, 19 nt, Human
uagcagcaauacuucaaaa

SEQ ID NO: 371762 - RNA, 22 nt, Human
uagcaguugcugcaucaugguu

SEQ ID NO: 371763 - RNA, 23 nt, Human
uauaaagugguugagaaacaaaa

SEQ ID NO: 371764 - RNA, 22 nt, Human
ucaaaacaagacauuacaaaau

SEQ ID NO: 371765 - RNA, 18 nt, Human
ucaaaaggaccaaacaaa

SEQ ID NO: 371766 - RNA, 21 nt, Human
ucagagccggacgcccgccgc

SEQ ID NO: 371767 - RNA, 18 nt, Human
ucagugauaaaaacagug

SEQ ID NO: 371768 - RNA, 28 nt, Human
uccaccaccucagagccggacgcccgcc

SEQ ID NO: 371769 - RNA, 23 nt, Human
uccaccggggucaccuguggagg

SEQ ID NO: 371770 - RNA, 21 nt, Human
ucccaggccaucucagacccc

SEQ ID NO: 371771 - RNA, 20 nt, Human
ucccccaucccccuccccca

SEQ ID NO: 371772 - RNA, 21 nt, Human
ucccccaucccccucccccaa

SEQ ID NO: 371773 - RNA, 27 nt, Human
ucccccaucccccucccccaacagaaa

SEQ ID NO: 371774 - RNA, 19 nt, Human
ucccgagccgccgccgccu

SEQ ID NO: 371775 - RNA, 21 nt, Human
ucccggaggccgcuucaguuc

SEQ ID NO: 371776 - RNA, 21 nt, Human
uccugcagcaaaccucauuug

SEQ ID NO: 371777 - RNA, 18 nt, Human
uccugggccuccaggaaa

SEQ ID NO: 371778 - RNA, 26 nt, Human
uccugggccuccaggaaaagcugcuc

SEQ ID NO: 371779 - RNA, 22 nt, Human
ucgaaauucgaucugguggcag

SEQ ID NO: 371780 - RNA, 18 nt, Human
ucgcccccgacuccuccc

SEQ ID NO: 371781 - RNA, 21 nt, Human
ucgcccccgacuccucccaac

SEQ ID NO: 371782 - RNA, 21 nt, Human
ucgccccgggccucccaggca

SEQ ID NO: 371783 - RNA, 24 nt, Human
ucgccugggaccaccgagaggggc

SEQ ID NO: 371784 - RNA, 19 nt, Human
ucgcugcuuccagccgagc

SEQ ID NO: 371785 - RNA, 21 nt, Human
ucuauggacaacaguggcaca

SEQ ID NO: 371786 - RNA, 19 nt, Human
ucugcgacacucacacaac

SEQ ID NO: 371787 - RNA, 18 nt, Human
ucugcuacccagaaccgg

SEQ ID NO: 371788 - RNA, 21 nt, Human
ucuggcucugggcugaagcaa

SEQ ID NO: 371789 - RNA, 23 nt, Human
ucugggcugaagcaacacccggc

SEQ ID NO: 371790 - RNA, 18 nt, Human
ucuguaguuuucacuucc

SEQ ID NO: 371791 - RNA, 20 nt, Human
ucuugcucaugaauuacccu

SEQ ID NO: 371792 - RNA, 23 nt, Human
ugaaaaaaaagucaaacuggaca

SEQ ID NO: 371793 - RNA, 26 nt, Human
ugaaagcacuggcggaguuggagacc

SEQ ID NO: 371794 - RNA, 22 nt, Human
ugaaaugucuugcucaugaauu

SEQ ID NO: 371795 - RNA, 21 nt, Human
ugaagguucuaggagugcagu

SEQ ID NO: 371796 - RNA, 19 nt, Human
ugaagucgucccccucugc

SEQ ID NO: 371797 - RNA, 22 nt, Human
ugaauuacccuguacuugcccc

SEQ ID NO: 371798 - RNA, 20 nt, Human
ugaccuccugggcccagccu

SEQ ID NO: 371799 - RNA, 26 nt, Human
ugcaacacagcagaauauccugugug

SEQ ID NO: 371800 - RNA, 18 nt, Human
ugcacagaagcuggaugc

SEQ ID NO: 371801 - RNA, 22 nt, Human
uggaaaagcagagacggaggcc

SEQ ID NO: 371802 - RNA, 28 nt, Human
uggaaagagugaaccggagcucuggaaa

SEQ ID NO: 371803 - RNA, 19 nt, Human
uggauaccaccaccaggaa

SEQ ID NO: 371804 - RNA, 22 nt, Human
uggauaccaccaccaggaaaau

SEQ ID NO: 371805 - RNA, 18 nt, Human
uggaugcuuuuggucugg

SEQ ID NO: 371806 - RNA, 24 nt, Human
uggaugggugauggaagugggugg

SEQ ID NO: 371807 - RNA, 21 nt, Human
uggcagcccuucuauucuaga

SEQ ID NO: 371808 - RNA, 22 nt, Human
uggcugcagauggcgggugggg

SEQ ID NO: 371809 - RNA, 18 nt, Human
uggcugcauuuuauugga

SEQ ID NO: 371810 - RNA, 21 nt, Human
ugggaacgcguguguccaccg

SEQ ID NO: 371811 - RNA, 23 nt, Human
ugggaguacuaugguaaaggagg

SEQ ID NO: 371812 - RNA, 20 nt, Human
ugggcagaggggcagggggc

SEQ ID NO: 371813 - RNA, 22 nt, Human
ugggggauuaaacuuuccuccu

SEQ ID NO: 371814 - RNA, 24 nt, Human
ugguugagaaacaaaaauaaacac

SEQ ID NO: 371815 - RNA, 19 nt, Human
ugugaccaaagccaaaggc

SEQ ID NO: 371816 - RNA, 25 nt, Human
uguuuggaaagagugaaccggagcu

SEQ ID NO: 371817 - RNA, 21 nt, Human
uuaaaauccauacuauguuuc

SEQ ID NO: 371818 - RNA, 22 nt, Human
uuacuaauauuuuaagugacac

SEQ ID NO: 371819 - RNA, 19 nt, Human
uucacaaaauaaaucagug

SEQ ID NO: 371820 - RNA, 19 nt, Human
uucagaacuugagagagcc

SEQ ID NO: 371821 - RNA, 19 nt, Human
uugcuuugccauguugagu

SEQ ID NO: 371822 - RNA, 21 nt, Human
uuggaaagagugaaccggagc

SEQ ID NO: 371823 - RNA, 22 nt, Human
uuucacuuccucaccuucaaga

SEQ ID NO: 371824 - RNA, 24 nt, Human
uuuuaccauuugcuuugccauguu

SEQ ID NO: 371825 - RNA, 20 nt, Human
uuuucacuuccucaccuuca

SEQ ID NO: 371826 - RNA, 20 nt, Human
aaaaacccacgcagacaggc

SEQ ID NO: 371827 - RNA, 20 nt, Human
aaaauguaaacaucuuccuc

SEQ ID NO: 371828 - RNA, 25 nt, Human
aaacaggaggcugaaauaggggacc

SEQ ID NO: 371829 - RNA, 21 nt, Human
accccaccaaacaggaggcug

SEQ ID NO: 371830 - RNA, 22 nt, Human
accugucgggcccccagaauag

SEQ ID NO: 371831 - RNA, 21 nt, Human
agaggaagagggagccucgag

SEQ ID NO: 371832 - RNA, 22 nt, Human
aggcagaggacacagaaccaga

SEQ ID NO: 371833 - RNA, 25 nt, Human
auggcagugagaaggaugugggguc

SEQ ID NO: 371834 - RNA, 23 nt, Human
caaagcagcuguauccaaacagc

SEQ ID NO: 371835 - RNA, 23 nt, Human
caccaaacaggaggcugaaauag

SEQ ID NO: 371836 - RNA, 28 nt, Human
caccccaccaaacaggaggcugaaauag

SEQ ID NO: 371837 - RNA, 21 nt, Human
caccugucgggcccccagaau

SEQ ID NO: 371838 - RNA, 18 nt, Human
cagaauaguucugggaga

SEQ ID NO: 371839 - RNA, 21 nt, Human
cagagcaccccacuugggccc

SEQ ID NO: 371840 - RNA, 20 nt, Human
caggagggaauuccauggca

SEQ ID NO: 371841 - RNA, 19 nt, Human
caggcagaggacacagaac

SEQ ID NO: 371842 - RNA, 24 nt, Human
ccaccccaccaaacaggaggcuga

SEQ ID NO: 371843 - RNA, 23 nt, Human
ccagaaaauggucuucaucaaag

SEQ ID NO: 371844 - RNA, 22 nt, Human
ccagagcaccccacuugggccc

SEQ ID NO: 371845 - RNA, 24 nt, Human
ccagagcccaggcagaggacacag

SEQ ID NO: 371846 - RNA, 22 nt, Human
cccaccaaacaggaggcugaaa

SEQ ID NO: 371847 - RNA, 24 nt, Human
cccccagaauaguucugggagaca

SEQ ID NO: 371848 - RNA, 24 nt, Human
cccuggggcugcaccugggggugg

SEQ ID NO: 371849 - RNA, 24 nt, Human
cccuggggcugcaccugggggugg

SEQ ID NO: 371850 - RNA, 18 nt, Human
ccugaggguuccuugugg

SEQ ID NO: 371851 - RNA, 21 nt, Human
ccuuccugcuggagcugggga

SEQ ID NO: 371852 - RNA, 27 nt, Human
cgcagaagaaccacucgcuaggccggu

SEQ ID NO: 371853 - RNA, 18 nt, Human
cucccaggcccaccuguc

SEQ ID NO: 371854 - RNA, 20 nt, Human
cucuuccagagcccaggcag

SEQ ID NO: 371855 - RNA, 21 nt, Human
cuggggcugcaccugggggug

SEQ ID NO: 371856 - RNA, 22 nt, Human
cuucccagugagucugucagcc

SEQ ID NO: 371857 - RNA, 25 nt, Human
gaccagagcaccccacuugggcccc

SEQ ID NO: 371858 - RNA, 18 nt, Human
gagaaggauguggggucc

SEQ ID NO: 371859 - RNA, 22 nt, Human
gagaggaagagggagccucgag

SEQ ID NO: 371860 - RNA, 19 nt, Human
gccagcugcccucccucca

SEQ ID NO: 371861 - RNA, 19 nt, Human
gccaugggaaggccucuuc

SEQ ID NO: 371862 - RNA, 19 nt, Human
gcccccagaauaguucugg

SEQ ID NO: 371863 - RNA, 20 nt, Human
ggcagguauggagaggaaga

SEQ ID NO: 371864 - RNA, 20 nt, Human
ggggagugggguccccugag

SEQ ID NO: 371865 - RNA, 19 nt, Human
gguauggagaggaagaggg

SEQ ID NO: 371866 - RNA, 24 nt, Human
gugggguccccugagugggguggg

SEQ ID NO: 371867 - RNA, 24 nt, Human
ucacaccucguggaggguggccug

SEQ ID NO: 371868 - RNA, 22 nt, Human
ucccaggcccaccugucgggcc

SEQ ID NO: 371869 - RNA, 24 nt, Human
ucccaggcccaccugucgggcccc

SEQ ID NO: 371870 - RNA, 21 nt, Human
uccccugaguggggugggagc

SEQ ID NO: 371871 - RNA, 22 nt, Human
ucggucagaccagagcacccca

SEQ ID NO: 371872 - RNA, 19 nt, Human
ucugucagccuuuguccug

SEQ ID NO: 371873 - RNA, 20 nt, Human
ugagaaggaugugggguccu

SEQ ID NO: 371874 - RNA, 18 nt, Human
ugaguggggugggagcuu

SEQ ID NO: 371875 - RNA, 21 nt, Human
ugauguggccagaaguggggc

SEQ ID NO: 371876 - RNA, 22 nt, Human
uggagaggaagagggagccucg

SEQ ID NO: 371877 - RNA, 24 nt, Human
uggauacaaaaacccacgcagaca

SEQ ID NO: 371878 - RNA, 20 nt, Human
uggcagugagaaggaugugg

SEQ ID NO: 371879 - RNA, 18 nt, Human
uggccagaaguggggcac

SEQ ID NO: 371880 - RNA, 21 nt, Human
uggccagaaguggggcacuca

SEQ ID NO: 371881 - RNA, 19 nt, Human
uggggcugauguggccaga

SEQ ID NO: 371882 - RNA, 19 nt, Human
uguccuguagcucaaagca

SEQ ID NO: 371883 - RNA, 21 nt, Human
ugugugugaggggaguggggu

SEQ ID NO: 371884 - RNA, 18 nt, Human
uuccagagcccaggcaga

SEQ ID NO: 371885 - RNA, 24 nt, Human
uuguuaaauugcccgggaaacagg

SEQ ID NO: 371886 - RNA, 24 nt, Human
aaaaacaaaacaaaacaaaaaaga

SEQ ID NO: 371887 - RNA, 23 nt, Human
aaaacaaaacaaaacaaaaauac

SEQ ID NO: 371888 - RNA, 19 nt, Human
aaacaaaacaaaacaaaaa

SEQ ID NO: 371889 - RNA, 23 nt, Human
aaacacaugaauuccaugcucuu

SEQ ID NO: 371890 - RNA, 27 nt, Human
aacaaaacaaaacaaaaauacuuuuaa

SEQ ID NO: 371891 - RNA, 19 nt, Human
acaaaacaaaacaaaaaua

SEQ ID NO: 371892 - RNA, 22 nt, Human
agaaacauugauuucacaaguc

SEQ ID NO: 371893 - RNA, 19 nt, Human
agacaaccgacauguaaug

SEQ ID NO: 371894 - RNA, 18 nt, Human
agguaaucaaaaaaaggc

SEQ ID NO: 371895 - RNA, 18 nt, Human
auaugugugugugucuau

SEQ ID NO: 371896 - RNA, 25 nt, Human
aucucaguuucauacagaacucauu

SEQ ID NO: 371897 - RNA, 18 nt, Human
augccuuuggacuuuauu

SEQ ID NO: 371898 - RNA, 22 nt, Human
auggaaaggauuaucuuuaaac

SEQ ID NO: 371899 - RNA, 25 nt, Human
caaaaacaaaacaaaacaaaaauac

SEQ ID NO: 371900 - RNA, 23 nt, Human
caaaacaaaacaaaaauacuuuu

SEQ ID NO: 371901 - RNA, 19 nt, Human
caaucuagccaucagcaaa

SEQ ID NO: 371902 - RNA, 21 nt, Human
caauuuaaaaaggcacuugga

SEQ ID NO: 371903 - RNA, 21 nt, Human
cagacucuauuacaaagcaau

SEQ ID NO: 371904 - RNA, 21 nt, Human
cagcacaggagaaaaugccuu

SEQ ID NO: 371905 - RNA, 19 nt, Human
ccagacaaccgacauguaa

SEQ ID NO: 371906 - RNA, 18 nt, Human
cucucucucugugggugu

SEQ ID NO: 371907 - RNA, 19 nt, Human
gagugaagaaaugcauucu

SEQ ID NO: 371908 - RNA, 27 nt, Human
ggaaaggauuaucuuuaaacacaugaa

SEQ ID NO: 371909 - RNA, 21 nt, Human
ggaguaaacuuggaauacuuu

SEQ ID NO: 371910 - RNA, 21 nt, Human
ggcgggccaggcucgggcagg

SEQ ID NO: 371911 - RNA, 23 nt, Human
gggcaggggccgugcucaggugc

SEQ ID NO: 371912 - RNA, 21 nt, Human
gugugugcauaugugugugug

SEQ ID NO: 371913 - RNA, 19 nt, Human
gugugugugugugugugug

SEQ ID NO: 371914 - RNA, 23 nt, Human
uaaaaaggcacuuggaaggggua

SEQ ID NO: 371915 - RNA, 23 nt, Human
uaagacaauggagcaugcgccag

SEQ ID NO: 371916 - RNA, 18 nt, Human
uaaggcaccugaguucgc

SEQ ID NO: 371917 - RNA, 20 nt, Human
uacuuuuuaaggcaccugag

SEQ ID NO: 371918 - RNA, 18 nt, Human
ucccuccucccccaaggc

SEQ ID NO: 371919 - RNA, 18 nt, Human
ugcgccaggaauguucaa

SEQ ID NO: 371920 - RNA, 25 nt, Human
ugcggcagacggacgggccggcgcc

SEQ ID NO: 371921 - RNA, 22 nt, Human
uggcaaaaacaaaacaaaacaa

SEQ ID NO: 371922 - RNA, 23 nt, Human
uggcaaaaacaaaacaaaacaaa

SEQ ID NO: 371923 - RNA, 25 nt, Human
uggcagaucucuuccuaugggaaau

SEQ ID NO: 371924 - RNA, 20 nt, Human
ugggugugugugugugugug

SEQ ID NO: 371925 - RNA, 19 nt, Human
ugugugcauaugugugugu

SEQ ID NO: 371926 - RNA, 19 nt, Human
ugugugcauaugugugugu

SEQ ID NO: 371927 - RNA, 20 nt, Human
ugugugugcauaugugugug

SEQ ID NO: 371928 - RNA, 21 nt, Human
ugugugugcauaugugugugu

SEQ ID NO: 371929 - RNA, 21 nt, Human
ugugugugcauaugugugugu

SEQ ID NO: 371930 - RNA, 23 nt, Human
ugugugugcauaugugugugugu

SEQ ID NO: 371931 - RNA, 21 nt, Human
ugugugugugcauaugugugu

SEQ ID NO: 371932 - RNA, 22 nt, Human
ugugugugugugcauaugugug

SEQ ID NO: 371933 - RNA, 23 nt, Human
ugugugugugugcauaugugugu

SEQ ID NO: 371934 - RNA, 19 nt, Human
ugugugugugugugcauau

SEQ ID NO: 371935 - RNA, 19 nt, Human
ugugugugugugugcauau

SEQ ID NO: 371936 - RNA, 21 nt, Human
ugugugugugugugugcauau

SEQ ID NO: 371937 - RNA, 23 nt, Human
ugugugugugugugugcauaugu

SEQ ID NO: 371938 - RNA, 23 nt, Human
ugugugugugugugugugcauau

SEQ ID NO: 371939 - RNA, 23 nt, Human
uuaaaaaggcacuuggaaggggu

SEQ ID NO: 371940 - RNA, 21 nt, Human
uuaggaagaaaagaugcaaug

SEQ ID NO: 371941 - RNA, 20 nt, Human
uucaaaaauuauuaaaaugu

SEQ ID NO: 371942 - RNA, 24 nt, Human
uuggcaaaaacaaaacaaaacaaa

SEQ ID NO: 371943 - RNA, 19 nt, Human
uuuauuugucauuuggcuu

SEQ ID NO: 371944 - RNA, 19 nt, Human
aaaaaagaaagaaaacuca

SEQ ID NO: 371945 - RNA, 19 nt, Human
aaaccaagcauuagccuaa

SEQ ID NO: 371946 - RNA, 22 nt, Human
aaacuauauccaacuagaucuu

SEQ ID NO: 371947 - RNA, 22 nt, Human
aaaucuugaaagcaaaagaacc

SEQ ID NO: 371948 - RNA, 20 nt, Human
aacaacaacaaaaaacaccu

SEQ ID NO: 371949 - RNA, 22 nt, Human
aacagaaaacaaaaaagaagga

SEQ ID NO: 371950 - RNA, 23 nt, Human
aaccacaaaagcaaaaauaaaca

SEQ ID NO: 371951 - RNA, 21 nt, Human
aacuauauccaacuagaucuu

SEQ ID NO: 371952 - RNA, 20 nt, Human
aacucagccaggcacagugg

SEQ ID NO: 371953 - RNA, 20 nt, Human
aagcaaaaauaaacaacaac

SEQ ID NO: 371954 - RNA, 22 nt, Human
aaggaaggcagagcagcagucg

SEQ ID NO: 371955 - RNA, 20 nt, Human
aaggaggagcuacggaagug

SEQ ID NO: 371956 - RNA, 22 nt, Human
aaggagggcuguaacugcucug

SEQ ID NO: 371957 - RNA, 23 nt, Human
aaggcaggagaauugcuugaacc

SEQ ID NO: 371958 - RNA, 23 nt, Human
aaggcggguggaucacgacguca

SEQ ID NO: 371959 - RNA, 19 nt, Human
aauaaaugauaaagaagaa

SEQ ID NO: 371960 - RNA, 18 nt, Human
aauaauuaaaccagaggc

SEQ ID NO: 371961 - RNA, 24 nt, Human
aauugcuugaaccagggaggcgga

SEQ ID NO: 371962 - RNA, 18 nt, Human
acaacaacaaaaaacacc

SEQ ID NO: 371963 - RNA, 18 nt, Human
acauggugaaacccuguc

SEQ ID NO: 371964 - RNA, 19 nt, Human
acauggugaaacccugucu

SEQ ID NO: 371965 - RNA, 20 nt, Human
acauggugaaacccugucuc

SEQ ID NO: 371966 - RNA, 22 nt, Human
acauggugaaacccugucucua

SEQ ID NO: 371967 - RNA, 23 nt, Human
accagcuugacauggugaaaccc

SEQ ID NO: 371968 - RNA, 24 nt, Human
acccugucucuacuaaaaauacaa

SEQ ID NO: 371969 - RNA, 19 nt, Human
agaaaacaaaaaagaagga

SEQ ID NO: 371970 - RNA, 20 nt, Human
agaaaacaaaaaagaaggag

SEQ ID NO: 371971 - RNA, 19 nt, Human
agaaagaaaauacuagaag

SEQ ID NO: 371972 - RNA, 19 nt, Human
agaaagaaaauacuagaag

SEQ ID NO: 371973 - RNA, 25 nt, Human
agagagcgagacucugacuccaaaa

SEQ ID NO: 371974 - RNA, 22 nt, Human
agaucgcgcuauugcacuccag

SEQ ID NO: 371975 - RNA, 19 nt, Human
agcaaaagaaccugcugaa

SEQ ID NO: 371976 - RNA, 23 nt, Human
agcguggugacacacgccuguaa

SEQ ID NO: 371977 - RNA, 21 nt, Human
agcuacggaagugaauaaaug

SEQ ID NO: 371978 - RNA, 18 nt, Human
aggaaggcagagcagcag

SEQ ID NO: 371979 - RNA, 19 nt, Human
aggaggagcuacggaagug

SEQ ID NO: 371980 - RNA, 24 nt, Human
aggcacaguggcucacgccuguaa

SEQ ID NO: 371981 - RNA, 22 nt, Human
aggcaggagaauugcuugaacc

SEQ ID NO: 371982 - RNA, 24 nt, Human
aggcaggagaauugcuugaaccag

SEQ ID NO: 371983 - RNA, 21 nt, Human
aggccaaggcggguggaucac

SEQ ID NO: 371984 - RNA, 19 nt, Human
aggcggagguugcagugag

SEQ ID NO: 371985 - RNA, 24 nt, Human
aggcggagguugcagugagcccag

SEQ ID NO: 371986 - RNA, 24 nt, Human
aggcggguggaucacgacgucagg

SEQ ID NO: 371987 - RNA, 24 nt, Human
agggaggcggagguugcagugagc

SEQ ID NO: 371988 - RNA, 24 nt, Human
agguuuuuacugagguaacaaccu

SEQ ID NO: 371989 - RNA, 24 nt, Human
aguggcucacgccuguaaucccag

SEQ ID NO: 371990 - RNA, 18 nt, Human
aguguuccugaauggugc

SEQ ID NO: 371991 - RNA, 22 nt, Human
auaacugcaacuuaaaucaaaa

SEQ ID NO: 371992 - RNA, 24 nt, Human
aucgcgcuauugcacuccagccug

SEQ ID NO: 371993 - RNA, 21 nt, Human
augaaaacacuaaacaugaca

SEQ ID NO: 371994 - RNA, 18 nt, Human
auugcacuccagccugga

SEQ ID NO: 371995 - RNA, 19 nt, Human
auugcacuccagccuggac

SEQ ID NO: 371996 - RNA, 22 nt, Human
auugcacuccagccuggacaag

SEQ ID NO: 371997 - RNA, 22 nt, Human
auugcacuccagccuggacaag

SEQ ID NO: 371998 - RNA, 26 nt, Human
caaaaaacaccucuacagcuuccuuc

SEQ ID NO: 371999 - RNA, 22 nt, Human
caaaaauaaacaacaacaaaaa

SEQ ID NO: 372000 - RNA, 22 nt, Human
caacaacaaaaaacaccucuac

SEQ ID NO: 372001 - RNA, 23 nt, Human
caacagaaaacaaaaaagaagga

SEQ ID NO: 372002 - RNA, 22 nt, Human
caagcagugguuauuggugaaa

SEQ ID NO: 372003 - RNA, 24 nt, Human
caaggcggguggaucacgacguca

SEQ ID NO: 372004 - RNA, 19 nt, Human
caauaauuaaaccagaggc

SEQ ID NO: 372005 - RNA, 23 nt, Human
caccggaccuggcgcugcacccu

SEQ ID NO: 372006 - RNA, 25 nt, Human
caccggaccuggcgcugcacccuag

SEQ ID NO: 372007 - RNA, 18 nt, Human
cacgccuguaaucccagc

SEQ ID NO: 372008 - RNA, 19 nt, Human
cacgccuguaaucccagcu

SEQ ID NO: 372009 - RNA, 24 nt, Human
cacgccuguaaucccaguacuuug

SEQ ID NO: 372010 - RNA, 23 nt, Human
cacuccagccuggacaagagagc

SEQ ID NO: 372011 - RNA, 24 nt, Human
cacuccagccuggacaagagagcg

SEQ ID NO: 372012 - RNA, 23 nt, Human
cacuuuaagaaaacucagccagg

SEQ ID NO: 372013 - RNA, 21 nt, Human
cagauguucauaacacuuuuc

SEQ ID NO: 372014 - RNA, 24 nt, Human
caguacuuugggaggccaaggcgg

SEQ ID NO: 372015 - RNA, 23 nt, Human
cauuagccuaaauuggcuauaac

SEQ ID NO: 372016 - RNA, 24 nt, Human
ccaaaaccaagcauuagccuaaau

SEQ ID NO: 372017 - RNA, 25 nt, Human
ccaauacacacugacagcuuugaag

SEQ ID NO: 372018 - RNA, 22 nt, Human
ccagcuugacauggugaaaccc

SEQ ID NO: 372019 - RNA, 22 nt, Human
ccuggacaagagagcgagacuc

SEQ ID NO: 372020 - RNA, 19 nt, Human
ccuguaaucccagcuacuc

SEQ ID NO: 372021 - RNA, 21 nt, Human
ccuguaaucccagcuacucag

SEQ ID NO: 372022 - RNA, 22 nt, Human
ccuguaaucccaguacuuuggg

SEQ ID NO: 372023 - RNA, 24 nt, Human
cgccuguaaucccagcuacucagg

SEQ ID NO: 372024 - RNA, 23 nt, Human
cgccuguaaucccaguacuuugg

SEQ ID NO: 372025 - RNA, 24 nt, Human
cgcuauugcacuccagccuggaca

SEQ ID NO: 372026 - RNA, 22 nt, Human
cggguggaucacgacgucagga

SEQ ID NO: 372027 - RNA, 19 nt, Human
cuauugcacuccagccugg

SEQ ID NO: 372028 - RNA, 21 nt, Human
cuauugcacuccagccuggac

SEQ ID NO: 372029 - RNA, 24 nt, Human
cucaaccacaaaagcaaaaauaaa

SEQ ID NO: 372030 - RNA, 22 nt, Human
cucacgccuguaaucccaguac

SEQ ID NO: 372031 - RNA, 24 nt, Human
cucacgccuguaaucccaguacuu

SEQ ID NO: 372032 - RNA, 24 nt, Human
cuccaaaaccaagcauuagccuaa

SEQ ID NO: 372033 - RNA, 24 nt, Human
cucugacuccaaaaaaaaaaaaaa

SEQ ID NO: 372034 - RNA, 23 nt, Human
cuuuuugcuuuguggccugaagg

SEQ ID NO: 372035 - RNA, 28 nt, Human
gaaaauacuagaaggaaggccgguaccc

SEQ ID NO: 372036 - RNA, 20 nt, Human
gacauggugaaacccugucu

SEQ ID NO: 372037 - RNA, 23 nt, Human
gacgucaggaguccaagaccagc

SEQ ID NO: 372038 - RNA, 22 nt, Human
gagaaagaaaauacuagaagga

SEQ ID NO: 372039 - RNA, 22 nt, Human
gagaauugcuugaaccagggag

SEQ ID NO: 372040 - RNA, 24 nt, Human
gagcguggugacacacgccuguaa

SEQ ID NO: 372041 - RNA, 19 nt, Human
gagguugcagugagcccag

SEQ ID NO: 372042 - RNA, 23 nt, Human
gagguugcagugagcccagaucg

SEQ ID NO: 372043 - RNA, 25 nt, Human
gcaaggcaggagaauugcuugaacc

SEQ ID NO: 372044 - RNA, 24 nt, Human
gcauuagccuaaauuggcuauaac

SEQ ID NO: 372045 - RNA, 23 nt, Human
gccuggacaagagagcgagacuc

SEQ ID NO: 372046 - RNA, 20 nt, Human
ggacaccccaacaccggacc

SEQ ID NO: 372047 - RNA, 23 nt, Human
ggagguugcagugagcccagauc

SEQ ID NO: 372048 - RNA, 24 nt, Human
ggagguugcagugagcccagaucg

SEQ ID NO: 372049 - RNA, 22 nt, Human
ggguggaucacgacgucaggag

SEQ ID NO: 372050 - RNA, 21 nt, Human
gguaugcuuugucaaacuuuu

SEQ ID NO: 372051 - RNA, 24 nt, Human
ggugacacacgccuguaaucccag

SEQ ID NO: 372052 - RNA, 23 nt, Human
gucggcccucaacagaaaacaaa

SEQ ID NO: 372053 - RNA, 20 nt, Human
gucuuuggcaaugcuuccaa

SEQ ID NO: 372054 - RNA, 21 nt, Human
gugaaacccugucucuacuaa

SEQ ID NO: 372055 - RNA, 23 nt, Human
gugacacacgccuguaaucccag

SEQ ID NO: 372056 - RNA, 23 nt, Human
guggaucacgacgucaggagucc

SEQ ID NO: 372057 - RNA, 19 nt, Human
uaaaagcuccaaaaccaag

SEQ ID NO: 372058 - RNA, 22 nt, Human
uaaacaacaacaaaaaacaccu

SEQ ID NO: 372059 - RNA, 20 nt, Human
uaacuaaacauaauucuuag

SEQ ID NO: 372060 - RNA, 18 nt, Human
uaccugaggucaaaauga

SEQ ID NO: 372061 - RNA, 23 nt, Human
uaugaauugagaaagaaaauacu

SEQ ID NO: 372062 - RNA, 21 nt, Human
uauugcacuccagccuggaca

SEQ ID NO: 372063 - RNA, 24 nt, Human
uauugcacuccagccuggacaaga

SEQ ID NO: 372064 - RNA, 19 nt, Human
ucaaagacuaaugacaaug

SEQ ID NO: 372065 - RNA, 22 nt, Human
ucaauacacaaggguaagagaa

SEQ ID NO: 372066 - RNA, 24 nt, Human
ucacgacgucaggaguccaagacc

SEQ ID NO: 372067 - RNA, 22 nt, Human
ucacgccuguaaucccaguacu

SEQ ID NO: 372068 - RNA, 23 nt, Human
ucagccaggcacaguggcucacg

SEQ ID NO: 372069 - RNA, 22 nt, Human
uccaaaaaaaaaaaaaagaaag

SEQ ID NO: 372070 - RNA, 22 nt, Human
uccaaaaaauuuuaagcccugc

SEQ ID NO: 372071 - RNA, 23 nt, Human
uccagccuggacaagagagcgag

SEQ ID NO: 372072 - RNA, 24 nt, Human
uccagccuggacaagagagcgaga

SEQ ID NO: 372073 - RNA, 23 nt, Human
ucccaauuagaagagcguggaac

SEQ ID NO: 372074 - RNA, 24 nt, Human
ucccucaaccacaaaagcaaaaau

SEQ ID NO: 372075 - RNA, 22 nt, Human
ucggcccucaacagaaaacaaa

SEQ ID NO: 372076 - RNA, 23 nt, Human
ucggcccucaacagaaaacaaaa

SEQ ID NO: 372077 - RNA, 21 nt, Human
ucucauguuacacauauauau

SEQ ID NO: 372078 - RNA, 21 nt, Human
ucucccaauuagaagagcgug

SEQ ID NO: 372079 - RNA, 24 nt, Human
ucuccggcggcaacucggacaccc

SEQ ID NO: 372080 - RNA, 21 nt, Human
ucucuacuaaaaauacaaaaa

SEQ ID NO: 372081 - RNA, 23 nt, Human
ucucuacuaaaaauacaaaaauu

SEQ ID NO: 372082 - RNA, 23 nt, Human
ucucuuguccuucccucaaccac

SEQ ID NO: 372083 - RNA, 24 nt, Human
ucucuuguccuucccucaaccaca

SEQ ID NO: 372084 - RNA, 18 nt, Human
ucucuuuggagcagaggu

SEQ ID NO: 372085 - RNA, 24 nt, Human
ucugacuccaaaaaaaaaaaaaag

SEQ ID NO: 372086 - RNA, 20 nt, Human
ugaaaacacuaaacaugaca

SEQ ID NO: 372087 - RNA, 18 nt, Human
ugaaagcaaaagaaccug

SEQ ID NO: 372088 - RNA, 23 nt, Human
ugaaagcaaaagaaccugcugaa

SEQ ID NO: 372089 - RNA, 25 nt, Human
ugaaucacuaagaguucagaaauua

SEQ ID NO: 372090 - RNA, 22 nt, Human
ugacacacgccuguaaucccag

SEQ ID NO: 372091 - RNA, 22 nt, Human
ugacauggugaaacccugucuc

SEQ ID NO: 372092 - RNA, 24 nt, Human
ugacauggugaaacccugucucua

SEQ ID NO: 372093 - RNA, 18 nt, Human
ugagaaagaaaauacuag

SEQ ID NO: 372094 - RNA, 23 nt, Human
ugagaaagaaaauacuagaaggg

SEQ ID NO: 372095 - RNA, 22 nt, Human
ugagcccagaucgcgcuauugc

SEQ ID NO: 372096 - RNA, 18 nt, Human
ugcacuccagccuggaca

SEQ ID NO: 372097 - RNA, 19 nt, Human
ugcacuccagccuggacaa

SEQ ID NO: 372098 - RNA, 20 nt, Human
ugcacuccagccuggacaag

SEQ ID NO: 372099 - RNA, 22 nt, Human
ugcacuccagccuggacaagag

SEQ ID NO: 372100 - RNA, 20 nt, Human
uggaaccgaaaacuuaaacu

SEQ ID NO: 372101 - RNA, 22 nt, Human
uggaucacgacgucaggagucc

SEQ ID NO: 372102 - RNA, 22 nt, Human
uggcucacgccuguaaucccag

SEQ ID NO: 372103 - RNA, 24 nt, Human
uggcucacgccuguaaucccagua

SEQ ID NO: 372104 - RNA, 24 nt, Human
ugggaggccaaggcggguggauca

SEQ ID NO: 372105 - RNA, 24 nt, Human
uggugacacacgccuguaauccca

SEQ ID NO: 372106 - RNA, 18 nt, Human
uguacauauaugaaucac

SEQ ID NO: 372107 - RNA, 24 nt, Human
uuaaaauaaaugugacaaauacca

SEQ ID NO: 372108 - RNA, 20 nt, Human
uuagagagaaauucucaugu

SEQ ID NO: 372109 - RNA, 24 nt, Human
uuccaaaucuugaaagcaaaagaa

SEQ ID NO: 372110 - RNA, 24 nt, Human
uugaaccagggaggcggagguugc

SEQ ID NO: 372111 - RNA, 20 nt, Human
uugacauggugaaacccugu

SEQ ID NO: 372112 - RNA, 22 nt, Human
uugcagugagcccagaucgcgc

SEQ ID NO: 372113 - RNA, 24 nt, Human
uugcuugaaccagggaggcggagg

SEQ ID NO: 372114 - RNA, 23 nt, Human
uuggagcagagguugcaaaacug

SEQ ID NO: 372115 - RNA, 18 nt, Human
uuuaagaaaacucagcca

SEQ ID NO: 372116 - RNA, 18 nt, Human
uuucaaggaggagcuacg

SEQ ID NO: 372117 - RNA, 24 nt, Human
uuuuuucuucaaagacuaaugaca

SEQ ID NO: 372118 - RNA, 23 nt, Human
aaacauauauuuugcuggaaaug

SEQ ID NO: 372119 - RNA, 24 nt, Human
aacugacagaggagacaggaggaa

SEQ ID NO: 372120 - RNA, 21 nt, Human
aagaaagagaccaagagagaa

SEQ ID NO: 372121 - RNA, 19 nt, Human
aagagaccaagagagaaca

SEQ ID NO: 372122 - RNA, 19 nt, Human
aagagaccaagagagaaca

SEQ ID NO: 372123 - RNA, 25 nt, Human
aagagagaacaaaagacacaaagua

SEQ ID NO: 372124 - RNA, 18 nt, Human
aagcaacaaagaauugua

SEQ ID NO: 372125 - RNA, 23 nt, Human
aauuguacugauaacaaaccaca

SEQ ID NO: 372126 - RNA, 22 nt, Human
acccuauauuacauccauuuga

SEQ ID NO: 372127 - RNA, 24 nt, Human
acggguuuggcucuggaccugggc

SEQ ID NO: 372128 - RNA, 22 nt, Human
acuagauaauaccaugagaaaa

SEQ ID NO: 372129 - RNA, 25 nt, Human
agaaagagaccaagagagaacaaaa

SEQ ID NO: 372130 - RNA, 22 nt, Human
agccaucaaaagcagcaaacaa

SEQ ID NO: 372131 - RNA, 21 nt, Human
aguaagagucagccuuauaaa

SEQ ID NO: 372132 - RNA, 19 nt, Human
auaaagacagauaacagcc

SEQ ID NO: 372133 - RNA, 24 nt, Human
auaauuuuaaacuagcuacaaaau

SEQ ID NO: 372134 - RNA, 21 nt, Human
auccaucuuuuuuaaaauucu

SEQ ID NO: 372135 - RNA, 26 nt, Human
auuaagcaacaaagaauuguacugau

SEQ ID NO: 372136 - RNA, 22 nt, Human
caaaagcagcaaacaaacccua

SEQ ID NO: 372137 - RNA, 22 nt, Human
caaacugacagaggagacagga

SEQ ID NO: 372138 - RNA, 19 nt, Human
cacuguuucacagcaagau

SEQ ID NO: 372139 - RNA, 20 nt, Human
cacuuuuagugcaaugccug

SEQ ID NO: 372140 - RNA, 20 nt, Human
cagagccugacacucaaagg

SEQ ID NO: 372141 - RNA, 22 nt, Human
cagcaaacaaacccuauauuac

SEQ ID NO: 372142 - RNA, 24 nt, Human
cagcgccugaccuccccgagguuu

SEQ ID NO: 372143 - RNA, 24 nt, Human
caucaaaagcagcaaacaaacccu

SEQ ID NO: 372144 - RNA, 23 nt, Human
caugaaaucauaaagacagauaa

SEQ ID NO: 372145 - RNA, 18 nt, Human
ccacacuguuucacagca

SEQ ID NO: 372146 - RNA, 25 nt, Human
ccaccaaaugaccacuauguacaac

SEQ ID NO: 372147 - RNA, 18 nt, Human
ccgagcagggagggaagg

SEQ ID NO: 372148 - RNA, 22 nt, Human
cgccugggcuggggggucagug

SEQ ID NO: 372149 - RNA, 23 nt, Human
cggguuuggcucuggaccugggc

SEQ ID NO: 372150 - RNA, 18 nt, Human
cucuguggaaugucacag

SEQ ID NO: 372151 - RNA, 23 nt, Human
cugcagguugcaacuguggugga

SEQ ID NO: 372152 - RNA, 20 nt, Human
gacugauguguguuaugugu

SEQ ID NO: 372153 - RNA, 22 nt, Human
gaggagaacacgggugggcaca

SEQ ID NO: 372154 - RNA, 20 nt, Human
gcaugaaggagcuaucuugc

SEQ ID NO: 372155 - RNA, 22 nt, Human
gccaugaggaaccaaagacggc

SEQ ID NO: 372156 - RNA, 21 nt, Human
ggaaaaaagugacacuacugc

SEQ ID NO: 372157 - RNA, 22 nt, Human
gggggucagugacggguuuggc

SEQ ID NO: 372158 - RNA, 18 nt, Human
gucagugacggguuuggc

SEQ ID NO: 372159 - RNA, 18 nt, Human
uaaaaaaggaugauuaug

SEQ ID NO: 372160 - RNA, 20 nt, Human
uaacucuguggaaugucaca

SEQ ID NO: 372161 - RNA, 23 nt, Human
uaagcaacaaagaauuguacuga

SEQ ID NO: 372162 - RNA, 23 nt, Human
uagauaauaccaugagaaaagca

SEQ ID NO: 372163 - RNA, 19 nt, Human
uagccaucaaaagcagcaa

SEQ ID NO: 372164 - RNA, 23 nt, Human
uauugacaggaaaaaagugacac

SEQ ID NO: 372165 - RNA, 19 nt, Human
uccacacuguuucacagca

SEQ ID NO: 372166 - RNA, 19 nt, Human
uccaucuuuuuuaaaauuc

SEQ ID NO: 372167 - RNA, 23 nt, Human
ucugcagguugcaacuguggugg

SEQ ID NO: 372168 - RNA, 19 nt, Human
ucuugcccgacagcauuug

SEQ ID NO: 372169 - RNA, 21 nt, Human
ucuugcccgacagcauuugga

SEQ ID NO: 372170 - RNA, 20 nt, Human
ugacagaggagacaggagga

SEQ ID NO: 372171 - RNA, 21 nt, Human
ugacagaggagacaggaggaa

SEQ ID NO: 372172 - RNA, 23 nt, Human
ugacagaugacacaggacaacau

SEQ ID NO: 372173 - RNA, 19 nt, Human
ugcauaaaugcauaaauca

SEQ ID NO: 372174 - RNA, 24 nt, Human
ugccuguuauguaauuccacauug

SEQ ID NO: 372175 - RNA, 24 nt, Human
uggaaugucacaguuuuacaagaa

SEQ ID NO: 372176 - RNA, 18 nt, Human
uggcugggcgccugggcu

SEQ ID NO: 372177 - RNA, 18 nt, Human
uggcugggcgccugggcu

SEQ ID NO: 372178 - RNA, 23 nt, Human
uggcugggcgccugggcuggggg

SEQ ID NO: 372179 - RNA, 24 nt, Human
ugggcuucucgggaggguuguguu

SEQ ID NO: 372180 - RNA, 25 nt, Human
uguacaaccuuuggaaagaaagaga

SEQ ID NO: 372181 - RNA, 23 nt, Human
ugucucaauacugagcaugcuuu

SEQ ID NO: 372182 - RNA, 18 nt, Human
uguguguguguguguugu

SEQ ID NO: 372183 - RNA, 21 nt, Human
uguguguguguguguugucuc

SEQ ID NO: 372184 - RNA, 21 nt, Human
uguugcuguuguuuugugugu

SEQ ID NO: 372185 - RNA, 19 nt, Human
uguuuugugugugugugug

SEQ ID NO: 372186 - RNA, 25 nt, Human
uuaaguaggaaucuaaaaaucuauu

SEQ ID NO: 372187 - RNA, 19 nt, Human
uuaauauuacaugcuauaa

SEQ ID NO: 372188 - RNA, 18 nt, Human
uuggcucuggaccugggc

SEQ ID NO: 372189 - RNA, 22 nt, Human
uuguguguguguguguugucuc

SEQ ID NO: 372190 - RNA, 20 nt, Human
uuguguucuccgggccucug

SEQ ID NO: 372191 - RNA, 21 nt, Human
uuguuuugugugugugugugu

SEQ ID NO: 372192 - RNA, 20 nt, Human
uuuagaagucucuauauauu

SEQ ID NO: 372193 - RNA, 21 nt, Human
aaaaaaaguagaggccucagc

SEQ ID NO: 372194 - RNA, 22 nt, Human
aaaaguggguggacagagguca

SEQ ID NO: 372195 - RNA, 18 nt, Human
acugcuacuguauucaag

SEQ ID NO: 372196 - RNA, 21 nt, Human
agaggccucagcucauuugug

SEQ ID NO: 372197 - RNA, 20 nt, Human
caagccagugcaauaaaaaa

SEQ ID NO: 372198 - RNA, 21 nt, Human
cagcuuaaaaaaaaaaaagua

SEQ ID NO: 372199 - RNA, 18 nt, Human
ccaggcccauguaaccag

SEQ ID NO: 372200 - RNA, 19 nt, Human
ccccaguguaaacaggaaa

SEQ ID NO: 372201 - RNA, 23 nt, Human
ccuccaaauccccaguguaaaca

SEQ ID NO: 372202 - RNA, 23 nt, Human
ccuccaaauccccaguguaaaca

SEQ ID NO: 372203 - RNA, 25 nt, Human
cuguguguagguuuccuggggcccc

SEQ ID NO: 372204 - RNA, 18 nt, Human
cuuugccugcccccucca

SEQ ID NO: 372205 - RNA, 19 nt, Human
gcagcuuaaaaaaaaaaaa

SEQ ID NO: 372206 - RNA, 20 nt, Human
gggacugucuccuaggaucu

SEQ ID NO: 372207 - RNA, 21 nt, Human
guccugaagcccccucgugcc

SEQ ID NO: 372208 - RNA, 20 nt, Human
guggguggacagaggucauu

SEQ ID NO: 372209 - RNA, 20 nt, Human
uaagacgaagugcuucaaac

SEQ ID NO: 372210 - RNA, 19 nt, Human
uaagccucaaguaugcagc

SEQ ID NO: 372211 - RNA, 22 nt, Human
ucaagccagugcaauaaaaaag

SEQ ID NO: 372212 - RNA, 22 nt, Human
uccuuugggaaccucauucugg

SEQ ID NO: 372213 - RNA, 21 nt, Human
ugacuuugccugcccccucca

SEQ ID NO: 372214 - RNA, 21 nt, Human
ugggaaccucauucuggcugu

SEQ ID NO: 372215 - RNA, 21 nt, Human
uggggaacaguacuugugcua

SEQ ID NO: 372216 - RNA, 26 nt, Human
uguaaacaggaaaaugagaagucaca

SEQ ID NO: 372217 - RNA, 19 nt, Human
ugucugaaggucuaugggg

SEQ ID NO: 372218 - RNA, 19 nt, Human
ugugaaaggaagcaagagc

SEQ ID NO: 372219 - RNA, 21 nt, Human
ugugaaaggaagcaagagcca

SEQ ID NO: 372220 - RNA, 24 nt, Human
uuuuuuuuucauuuuaaguauuua

SEQ ID NO: 372221 - RNA, 23 nt, Human
uuuuuuuuuuuuuuuuucauuuu

SEQ ID NO: 372222 - RNA, 24 nt, Human
aaaaaauagugaggauuuagaaau

SEQ ID NO: 372223 - RNA, 21 nt, Human
aaaaggcucaauuaaaaaugu

SEQ ID NO: 372224 - RNA, 18 nt, Human
aacaaauuucacaauacg

SEQ ID NO: 372225 - RNA, 20 nt, Human
aacaaauuucacaauacguc

SEQ ID NO: 372226 - RNA, 23 nt, Human
aacaacuucugaacaacagcaac

SEQ ID NO: 372227 - RNA, 19 nt, Human
aauuaaucacagccacuua

SEQ ID NO: 372228 - RNA, 20 nt, Human
acaccaauaucagacaaaau

SEQ ID NO: 372229 - RNA, 21 nt, Human
acuucagugaaagggaagcac

SEQ ID NO: 372230 - RNA, 22 nt, Human
acuucgagauacacuguaaaaa

SEQ ID NO: 372231 - RNA, 19 nt, Human
acuuugagaaaugucauga

SEQ ID NO: 372232 - RNA, 24 nt, Human
acuuugagaaaugucaugacuggg

SEQ ID NO: 372233 - RNA, 23 nt, Human
agaaacugggagcaaagauauuu

SEQ ID NO: 372234 - RNA, 20 nt, Human
agcacacaaagacccugcua

SEQ ID NO: 372235 - RNA, 26 nt, Human
agccacaaaauccacagcacacaaag

SEQ ID NO: 372236 - RNA, 20 nt, Human
auaugauagcaaaucacuaa

SEQ ID NO: 372237 - RNA, 19 nt, Human
aucauuaaaagacaccuaa

SEQ ID NO: 372238 - RNA, 20 nt, Human
augacugggcacauuggaac

SEQ ID NO: 372239 - RNA, 21 nt, Human
auuaaaagacaccuaaaaauc

SEQ ID NO: 372240 - RNA, 24 nt, Human
caaacaacaguuccccaaaauaca

SEQ ID NO: 372241 - RNA, 22 nt, Human
caacuucugaacaacagcaaca

SEQ ID NO: 372242 - RNA, 22 nt, Human
cacaaaauccacagcacacaaa

SEQ ID NO: 372243 - RNA, 18 nt, Human
cacaagugaauaaaacac

SEQ ID NO: 372244 - RNA, 22 nt, Human
cacaagugaauaaaacacaucg

SEQ ID NO: 372245 - RNA, 21 nt, Human
cacacaaagacccugcuacca

SEQ ID NO: 372246 - RNA, 22 nt, Human
cacuaacaacuucugaacaaca

SEQ ID NO: 372247 - RNA, 21 nt, Human
cagugaaagggaagcaccgaa

SEQ ID NO: 372248 - RNA, 23 nt, Human
cagugcauaccaaaacacacuuc

SEQ ID NO: 372249 - RNA, 24 nt, Human
caucaaacaacaguuccccaaaau

SEQ ID NO: 372250 - RNA, 20 nt, Human
caucguagauugaagccaca

SEQ ID NO: 372251 - RNA, 23 nt, Human
ccacaaaauccacagcacacaaa

SEQ ID NO: 372252 - RNA, 19 nt, Human
cguagauugaagccacaaa

SEQ ID NO: 372253 - RNA, 20 nt, Human
cuucaacaccccacuuucaa

SEQ ID NO: 372254 - RNA, 24 nt, Human
gauaacguuuuauuuuaauucuca

SEQ ID NO: 372255 - RNA, 25 nt, Human
gccacaaaauccacagcacacaaag

SEQ ID NO: 372256 - RNA, 24 nt, Human
uaacaacuucugaacaacagcaac

SEQ ID NO: 372257 - RNA, 25 nt, Human
uaacuaaaaaauuauuucgagacaa

SEQ ID NO: 372258 - RNA, 23 nt, Human
uacaaacacaagugaauaaaaca

SEQ ID NO: 372259 - RNA, 22 nt, Human
uagacaguaucauuaaaagaca

SEQ ID NO: 372260 - RNA, 22 nt, Human
uaguaguuggggucuucaacac

SEQ ID NO: 372261 - RNA, 23 nt, Human
ucauuaaaagacaccuaaaaauc

SEQ ID NO: 372262 - RNA, 20 nt, Human
uccccaaaauacauaaagca

SEQ ID NO: 372263 - RNA, 19 nt, Human
ugaauuccuuuacaccaca

SEQ ID NO: 372264 - RNA, 19 nt, Human
ugacugggcacauuggaac

SEQ ID NO: 372265 - RNA, 24 nt, Human
ugauagcaaaucacuaacaacuuc

SEQ ID NO: 372266 - RNA, 21 nt, Human
ugguagucacuuagguguuuu

SEQ ID NO: 372267 - RNA, 22 nt, Human
ugugucaguucuuaauucaugu

SEQ ID NO: 372268 - RNA, 25 nt, Human
uuaaaagacaccuaaaaaucuuaua

SEQ ID NO: 372269 - RNA, 23 nt, Human
uucacaccaauaucagacaaaau

SEQ ID NO: 372270 - RNA, 25 nt, Human
uuucauauuuaguauuuauaggugc

SEQ ID NO: 372271 - RNA, 25 nt, Human
aaacaauaccacugaccugaucuca

SEQ ID NO: 372272 - RNA, 20 nt, Human
aaacauacauuuucccaauc

SEQ ID NO: 372273 - RNA, 18 nt, Human
acagaaacaauaccacug

SEQ ID NO: 372274 - RNA, 26 nt, Human
agguggcuguuaacauuguuuuauuu

SEQ ID NO: 372275 - RNA, 24 nt, Human
auacaaaaaguagaaaugacagaa

SEQ ID NO: 372276 - RNA, 19 nt, Human
auuccagcuagagcuagaa

SEQ ID NO: 372277 - RNA, 18 nt, Human
caagcuccugaggcuggg

SEQ ID NO: 372278 - RNA, 23 nt, Human
cacccagcgaugugcugggcuca

SEQ ID NO: 372279 - RNA, 24 nt, Human
cagaaaaaacacucuugacagaaa

SEQ ID NO: 372280 - RNA, 27 nt, Human
cagaaaaaacacucuugacagaaacaa

SEQ ID NO: 372281 - RNA, 19 nt, Human
ccgcccacuccaucuccag

SEQ ID NO: 372282 - RNA, 26 nt, Human
cucacccccuuucugguacucaacca

SEQ ID NO: 372283 - RNA, 22 nt, Human
cuccugaggcugggggcccagg

SEQ ID NO: 372284 - RNA, 21 nt, Human
cuuuuggucaucacuuucauu

SEQ ID NO: 372285 - RNA, 24 nt, Human
gaaaaaacacucuugacagaaaca

SEQ ID NO: 372286 - RNA, 24 nt, Human
ggcaucuuuuaaaaaaacaaguua

SEQ ID NO: 372287 - RNA, 18 nt, Human
ggguagggugaaucaauc

SEQ ID NO: 372288 - RNA, 22 nt, Human
gugccccaagcuuauagguggc

SEQ ID NO: 372289 - RNA, 23 nt, Human
uacagauaucaccccaaaaugaa

SEQ ID NO: 372290 - RNA, 18 nt, Human
uacucaaccacuuucugg

SEQ ID NO: 372291 - RNA, 23 nt, Human
uauauacagauaucaccccaaaa

SEQ ID NO: 372292 - RNA, 21 nt, Human
uauggggaaagggagguucaa

SEQ ID NO: 372293 - RNA, 20 nt, Human
ucacccagcgaugugcuggg

SEQ ID NO: 372294 - RNA, 24 nt, Human
ucacccagcgaugugcugggcuca

SEQ ID NO: 372295 - RNA, 23 nt, Human
ucacugggcggaacuuacuguac

SEQ ID NO: 372296 - RNA, 22 nt, Human
uccagggccaagcuccugaggc

SEQ ID NO: 372297 - RNA, 22 nt, Human
uccuuuauacaaaaaguagaaa

SEQ ID NO: 372298 - RNA, 23 nt, Human
uccuuuauacaaaaaguagaaau

SEQ ID NO: 372299 - RNA, 22 nt, Human
ucucaugaaggagcugagccaa

SEQ ID NO: 372300 - RNA, 23 nt, Human
uucauuguucuccagagucucug

SEQ ID NO: 372301 - RNA, 26 nt, Human
uuuuggucaucacuuucauuguucuu

SEQ ID NO: 372302 - RNA, 22 nt, Human
aaaacacauagaacaugcuaca

SEQ ID NO: 372303 - RNA, 19 nt, Human
aauugugcugcuggugggg

SEQ ID NO: 372304 - RNA, 21 nt, Human
acaugcuacauccgcgcagac

SEQ ID NO: 372305 - RNA, 20 nt, Human
agaaggagucuaaggacagc

SEQ ID NO: 372306 - RNA, 18 nt, Human
agacagauggacagacac

SEQ ID NO: 372307 - RNA, 19 nt, Human
agacagauggacagacacu

SEQ ID NO: 372308 - RNA, 23 nt, Human
agauggacagacacuaacacagg

SEQ ID NO: 372309 - RNA, 23 nt, Human
caacccuggcccuguccaugccc

SEQ ID NO: 372310 - RNA, 23 nt, Human
ccagccgcgaccgcaacccuggc

SEQ ID NO: 372311 - RNA, 24 nt, Human
cccagccgcgaccgcaacccuggc

SEQ ID NO: 372312 - RNA, 19 nt, Human
ccccgggguuggacgcggg

SEQ ID NO: 372313 - RNA, 21 nt, Human
ccgcaacccuggcccugucca

SEQ ID NO: 372314 - RNA, 19 nt, Human
ccuggcucuggggggcggg

SEQ ID NO: 372315 - RNA, 20 nt, Human
cgcagacgcuggaugggagg

SEQ ID NO: 372316 - RNA, 18 nt, Human
cucagagcggaaggaaga

SEQ ID NO: 372317 - RNA, 21 nt, Human
cuggcucuggggggcggggca

SEQ ID NO: 372318 - RNA, 18 nt, Human
gcggcugcgcggcagacg

SEQ ID NO: 372319 - RNA, 20 nt, Human
ggagagccacugucggggau

SEQ ID NO: 372320 - RNA, 21 nt, Human
ggaggaggcaacacuggaggg

SEQ ID NO: 372321 - RNA, 21 nt, Human
ggaugggaggaggcaacacug

SEQ ID NO: 372322 - RNA, 18 nt, Human
gggagaaggagucuaagg

SEQ ID NO: 372323 - RNA, 19 nt, Human
ggguuggacgcgggcgggu

SEQ ID NO: 372324 - RNA, 18 nt, Human
gguuggacgcgggcgggu

SEQ ID NO: 372325 - RNA, 25 nt, Human
ugauuggggagaaggagucuaagga

SEQ ID NO: 372326 - RNA, 18 nt, Human
ugcgcggcagacgcgggg

SEQ ID NO: 372327 - RNA, 18 nt, Human
uggacagacacuaacaca

SEQ ID NO: 372328 - RNA, 21 nt, Human
uggcggccuggaugcggggcc

SEQ ID NO: 372329 - RNA, 18 nt, Human
ugggaggaggcaacacug

SEQ ID NO: 372330 - RNA, 20 nt, Human
ugggaggaggcaacacugga

SEQ ID NO: 372331 - RNA, 22 nt, Human
ugggaggaggcaacacuggagg

SEQ ID NO: 372332 - RNA, 24 nt, Human
agaaggaccagagggugggugggg

SEQ ID NO: 372333 - RNA, 22 nt, Human
agggagggcagugagguuggug

SEQ ID NO: 372334 - RNA, 24 nt, Human
aggguugugcugcugcaggcagga

SEQ ID NO: 372335 - RNA, 22 nt, Human
cuccuugugcuaggaggggaug

SEQ ID NO: 372336 - RNA, 19 nt, Human
guggguggggccgagggag

SEQ ID NO: 372337 - RNA, 21 nt, Human
uggggucagaaggaccagagg

SEQ ID NO: 372338 - RNA, 21 nt, Human
uggguggggccgagggagggc

SEQ ID NO: 372339 - RNA, 25 nt, Human
uggguggggccgagggagggcagug

SEQ ID NO: 372340 - RNA, 26 nt, Human
uguccaaggcagaggagcgcucuuca

SEQ ID NO: 372341 - RNA, 18 nt, Human
uuuuuuuuuuuaggagug

SEQ ID NO: 372342 - RNA, 18 nt, Human
uuuuuuuuuuuuaggagu

SEQ ID NO: 372343 - RNA, 19 nt, Human
aagaacuguaugccuuagc

SEQ ID NO: 372344 - RNA, 26 nt, Human
acaccacgucacgccuaugccccgcc

SEQ ID NO: 372345 - RNA, 20 nt, Human
acggggaggcgggaaggggg

SEQ ID NO: 372346 - RNA, 20 nt, Human
acucuuuauugccaacgguu

SEQ ID NO: 372347 - RNA, 25 nt, Human
augcaccuuucugcaaaauugucug

SEQ ID NO: 372348 - RNA, 26 nt, Human
cagccaaaagcugcuccaauuacagc

SEQ ID NO: 372349 - RNA, 24 nt, Human
ccaaaagcugcuccaauuacagcc

SEQ ID NO: 372350 - RNA, 19 nt, Human
ccacccaguccagcaggcc

SEQ ID NO: 372351 - RNA, 24 nt, Human
ccacccaguccagcaggccacagg

SEQ ID NO: 372352 - RNA, 18 nt, Human
ccacggccggccgagcgc

SEQ ID NO: 372353 - RNA, 18 nt, Human
cccuucucccuccccuuc

SEQ ID NO: 372354 - RNA, 19 nt, Human
ccgccacccgggucaugcu

SEQ ID NO: 372355 - RNA, 19 nt, Human
ccgcugccacccccuaggc

SEQ ID NO: 372356 - RNA, 21 nt, Human
ccgcugccacccccuaggcgc

SEQ ID NO: 372357 - RNA, 19 nt, Human
ccuugccgccccgcacugc

SEQ ID NO: 372358 - RNA, 23 nt, Human
cgacuagcacccaacaccccggu

SEQ ID NO: 372359 - RNA, 23 nt, Human
cgccccgcacugcccgcugccac

SEQ ID NO: 372360 - RNA, 18 nt, Human
cgccuaugccccgccccc

SEQ ID NO: 372361 - RNA, 21 nt, Human
cucccuucucccuccccuuca

SEQ ID NO: 372362 - RNA, 21 nt, Human
cucuuugggcuguaauaaaua

SEQ ID NO: 372363 - RNA, 23 nt, Human
cuuucugcaaaauugucugaaaa

SEQ ID NO: 372364 - RNA, 18 nt, Human
ggaaaagaggagucccau

SEQ ID NO: 372365 - RNA, 24 nt, Human
ggaauuguuuucguaccaccacau

SEQ ID NO: 372366 - RNA, 23 nt, Human
ggagcuuccucccuucucccucc

SEQ ID NO: 372367 - RNA, 21 nt, Human
ggccgugguccucgcacccuu

SEQ ID NO: 372368 - RNA, 22 nt, Human
ggccgugguccucgcacccuug

SEQ ID NO: 372369 - RNA, 19 nt, Human
gguucuggguuccacccag

SEQ ID NO: 372370 - RNA, 18 nt, Human
gucccgccacccggguca

SEQ ID NO: 372371 - RNA, 23 nt, Human
guuccacccaguccagcaggcca

SEQ ID NO: 372372 - RNA, 20 nt, Human
uaaaacagguaucucaagga

SEQ ID NO: 372373 - RNA, 25 nt, Human
uaauaaauacugcucuuugggcugu

SEQ ID NO: 372374 - RNA, 19 nt, Human
uaggcgcggucacacgucc

SEQ ID NO: 372375 - RNA, 21 nt, Human
uaggguccauucgaaaagucu

SEQ ID NO: 372376 - RNA, 22 nt, Human
ucacaguggaaaagaggagucc

SEQ ID NO: 372377 - RNA, 19 nt, Human
uccaaaguccucuggcuga

SEQ ID NO: 372378 - RNA, 18 nt, Human
uccacuugugcgagugag

SEQ ID NO: 372379 - RNA, 21 nt, Human
uccacuugugcgagugagagu

SEQ ID NO: 372380 - RNA, 23 nt, Human
uccagccacaaguaucuucaaaa

SEQ ID NO: 372381 - RNA, 24 nt, Human
uccucuggcugaaaugcucucaac

SEQ ID NO: 372382 - RNA, 18 nt, Human
ucuggguuccacccaguc

SEQ ID NO: 372383 - RNA, 23 nt, Human
ugaaaugcucucaacagagagaa

SEQ ID NO: 372384 - RNA, 20 nt, Human
uggccgggaagcaagucuug

SEQ ID NO: 372385 - RNA, 21 nt, Human
ugguucuggguuccacccagu

SEQ ID NO: 372386 - RNA, 25 nt, Human
uuaaaacagguaucucaaggaaaac

SEQ ID NO: 372387 - RNA, 21 nt, Human
uuacgcagccaaaagcugcuc

SEQ ID NO: 372388 - RNA, 24 nt, Human
aaaaaauaaaagaccaagacaccc

SEQ ID NO: 372389 - RNA, 20 nt, Human
aaaagaccaagacacccaga

SEQ ID NO: 372390 - RNA, 23 nt, Human
aaaagaccaagacacccagagug

SEQ ID NO: 372391 - RNA, 21 nt, Human
aaagauuccaguuacacuaca

SEQ ID NO: 372392 - RNA, 22 nt, Human
aaccgucccuuagccgcuucca

SEQ ID NO: 372393 - RNA, 18 nt, Human
aagaccaagacacccaga

SEQ ID NO: 372394 - RNA, 20 nt, Human
acccgcccgccaccaccacc

SEQ ID NO: 372395 - RNA, 21 nt, Human
acgccccccgccagaucacuc

SEQ ID NO: 372396 - RNA, 25 nt, Human
agacccuguggccgucacgcccugc

SEQ ID NO: 372397 - RNA, 23 nt, Human
agcaggggcucuggcccaggugu

SEQ ID NO: 372398 - RNA, 24 nt, Human
aggcuggcagcaggggggccccgg

SEQ ID NO: 372399 - RNA, 20 nt, Human
agggaggguuggcaggagcc

SEQ ID NO: 372400 - RNA, 21 nt, Human
agggggcgacgccuggcuuca

SEQ ID NO: 372401 - RNA, 22 nt, Human
cacagcaggggcucuggcccag

SEQ ID NO: 372402 - RNA, 26 nt, Human
caccacccaaaaaaacaccacaaggg

SEQ ID NO: 372403 - RNA, 28 nt, Human
cacccagagugagaugcauguuggggac

SEQ ID NO: 372404 - RNA, 18 nt, Human
caccccuacccgcccgcc

SEQ ID NO: 372405 - RNA, 23 nt, Human
cagagaaauaaggcucagagccg

SEQ ID NO: 372406 - RNA, 21 nt, Human
cagagccgucugaggucagaa

SEQ ID NO: 372407 - RNA, 19 nt, Human
cagcccccaaccgucccuu

SEQ ID NO: 372408 - RNA, 23 nt, Human
caggagccgccaugugggcaggg

SEQ ID NO: 372409 - RNA, 19 nt, Human
caggaggaagacggccccc

SEQ ID NO: 372410 - RNA, 19 nt, Human
cagggccaggccgcagccg

SEQ ID NO: 372411 - RNA, 23 nt, Human
ccaaccgucccuuagccgcuucc

SEQ ID NO: 372412 - RNA, 25 nt, Human
ccacaccccuacccgcccgccacca

SEQ ID NO: 372413 - RNA, 23 nt, Human
ccaccacccaaaaaaacaccaca

SEQ ID NO: 372414 - RNA, 18 nt, Human
ccacccaaaaaaacacca

SEQ ID NO: 372415 - RNA, 20 nt, Human
ccacccaaaaaaacaccaca

SEQ ID NO: 372416 - RNA, 19 nt, Human
ccaggcccagggcuggggc

SEQ ID NO: 372417 - RNA, 22 nt, Human
cccaaaaaaacaccacaagggu

SEQ ID NO: 372418 - RNA, 24 nt, Human
cccagcccccaaccgucccuuagc

SEQ ID NO: 372419 - RNA, 21 nt, Human
cccagggccaggccgcagccg

SEQ ID NO: 372420 - RNA, 18 nt, Human
cccagggcuggggcugga

SEQ ID NO: 372421 - RNA, 23 nt, Human
ccccacaccccuacccgcccgcc

SEQ ID NO: 372422 - RNA, 19 nt, Human
cccccacaccccuacccgc

SEQ ID NO: 372423 - RNA, 21 nt, Human
cccccacaccccuacccgccc

SEQ ID NO: 372424 - RNA, 23 nt, Human
cccccacaccccuacccgcccgc

SEQ ID NO: 372425 - RNA, 20 nt, Human
ccccccgccagaucacucgc

SEQ ID NO: 372426 - RNA, 20 nt, Human
ccccggcggcucaccccagg

SEQ ID NO: 372427 - RNA, 21 nt, Human
ccccggcggcucaccccaggg

SEQ ID NO: 372428 - RNA, 19 nt, Human
ccccgggagguggguggcg

SEQ ID NO: 372429 - RNA, 20 nt, Human
ccccugcuccuuuguucggc

SEQ ID NO: 372430 - RNA, 18 nt, Human
cccuggagcccaccuggc

SEQ ID NO: 372431 - RNA, 22 nt, Human
ccgcagccgcugacccgagggg

SEQ ID NO: 372432 - RNA, 23 nt, Human
ccucccagggccaggccgcagcc

SEQ ID NO: 372433 - RNA, 26 nt, Human
ccucccgacagcuucccuucccaagc

SEQ ID NO: 372434 - RNA, 18 nt, Human
ccucccgcccuggagccc

SEQ ID NO: 372435 - RNA, 20 nt, Human
ccucccgcccuggagcccac

SEQ ID NO: 372436 - RNA, 22 nt, Human
ccuggcuucauccacccgggag

SEQ ID NO: 372437 - RNA, 18 nt, Human
cgacagcuucccuuccca

SEQ ID NO: 372438 - RNA, 30 nt, Human
cgcccagggcucccagcccccaaccguccc

SEQ ID NO: 372439 - RNA, 18 nt, Human
cgcccgccaccaccaccu

SEQ ID NO: 372440 - RNA, 27 nt, Human
cgcccgccaccaccaccuuggcagaac

SEQ ID NO: 372441 - RNA, 20 nt, Human
cggcccccacaccccuaccc

SEQ ID NO: 372442 - RNA, 23 nt, Human
cuacagccaggcuugccugggac

SEQ ID NO: 372443 - RNA, 21 nt, Human
cugaaaucccucccagggcca

SEQ ID NO: 372444 - RNA, 19 nt, Human
cugcgcggccccgggaggu

SEQ ID NO: 372445 - RNA, 19 nt, Human
cugcuuccagucaggcuag

SEQ ID NO: 372446 - RNA, 19 nt, Human
cuugccucccgcccuggag

SEQ ID NO: 372447 - RNA, 22 nt, Human
gcacccccuggggagggugcug

SEQ ID NO: 372448 - RNA, 19 nt, Human
gcccccaaccgucccuuag

SEQ ID NO: 372449 - RNA, 26 nt, Human
gcccgccaccaccaccuuggcagaac

SEQ ID NO: 372450 - RNA, 18 nt, Human
gcugggagaggcaaaaga

SEQ ID NO: 372451 - RNA, 25 nt, Human
ggagggccacugacaggcuugggac

SEQ ID NO: 372452 - RNA, 20 nt, Human
ggcagcaggggggccccggc

SEQ ID NO: 372453 - RNA, 25 nt, Human
ggcucaccccagggcucccggaggg

SEQ ID NO: 372454 - RNA, 21 nt, Human
ggcugggagaggcaaaagauu

SEQ ID NO: 372455 - RNA, 20 nt, Human
ggcugggaggagguggcugg

SEQ ID NO: 372456 - RNA, 20 nt, Human
gggaggcuggcagcaggggg

SEQ ID NO: 372457 - RNA, 24 nt, Human
gggggcugggaggagguggcuggg

SEQ ID NO: 372458 - RNA, 25 nt, Human
ggugaaaggaaagagacaggaggaa

SEQ ID NO: 372459 - RNA, 24 nt, Human
gguggcugggagaggcaaaagauu

SEQ ID NO: 372460 - RNA, 20 nt, Human
uaaaagaccaagacacccag

SEQ ID NO: 372461 - RNA, 25 nt, Human
uacagccaggcuugccugggacgcc

SEQ ID NO: 372462 - RNA, 21 nt, Human
uaggggcgacaggugggggca

SEQ ID NO: 372463 - RNA, 20 nt, Human
ucacucgcuacuacagccag

SEQ ID NO: 372464 - RNA, 21 nt, Human
uccagagaaauaaggcucaga

SEQ ID NO: 372465 - RNA, 20 nt, Human
ucccugcggcggcgccccug

SEQ ID NO: 372466 - RNA, 23 nt, Human
ucccugcggcggcgccccugcuc

SEQ ID NO: 372467 - RNA, 20 nt, Human
ucccuucccaagcagggguu

SEQ ID NO: 372468 - RNA, 20 nt, Human
uccuggggggcugggaggag

SEQ ID NO: 372469 - RNA, 21 nt, Human
uccuggggggcugggaggagg

SEQ ID NO: 372470 - RNA, 23 nt, Human
uccuggggggcugggaggaggug

SEQ ID NO: 372471 - RNA, 21 nt, Human
ucggcagcccaggcccagggc

SEQ ID NO: 372472 - RNA, 23 nt, Human
ugaaaggaaagagacaggaggaa

SEQ ID NO: 372473 - RNA, 23 nt, Human
ugaguuauuuuauuucgcuauuu

SEQ ID NO: 372474 - RNA, 29 nt, Human
ugcccagcucuccuggggggcuggggcca

SEQ ID NO: 372475 - RNA, 24 nt, Human
ugccucccgcccuggagcccaccu

SEQ ID NO: 372476 - RNA, 23 nt, Human
uggcaguagacgagaggccgcug

SEQ ID NO: 372477 - RNA, 18 nt, Human
uggcccaggugucggcag

SEQ ID NO: 372478 - RNA, 21 nt, Human
ugggagaggggcuguuuccag

SEQ ID NO: 372479 - RNA, 21 nt, Human
ugggaggagguggcugggaga

SEQ ID NO: 372480 - RNA, 22 nt, Human
ugggaggagguggcugggagag

SEQ ID NO: 372481 - RNA, 25 nt, Human
ugggaggagguggcugggagaggcc

SEQ ID NO: 372482 - RNA, 21 nt, Human
uggggcuggacgggaaggacg

SEQ ID NO: 372483 - RNA, 22 nt, Human
uggggggcugggaggagguggc

SEQ ID NO: 372484 - RNA, 23 nt, Human
uuacaaaaaauaaaagaccaaga

SEQ ID NO: 372485 - RNA, 19 nt, Human
uucauuaaaaaaaauacug

SEQ ID NO: 372486 - RNA, 23 nt, Human
uuuucucugggguuuccaguuug

SEQ ID NO: 372487 - RNA, 23 nt, Human
aaacacagcagauggagaggacg

SEQ ID NO: 372488 - RNA, 20 nt, Human
aacaaaugagacaccuaccc

SEQ ID NO: 372489 - RNA, 21 nt, Human
aacaacaacuccugcuucggc

SEQ ID NO: 372490 - RNA, 19 nt, Human
aagucgcguagcgcccucc

SEQ ID NO: 372491 - RNA, 18 nt, Human
acaaacucaaguggccaa

SEQ ID NO: 372492 - RNA, 20 nt, Human
acagcagauggagaggacga

SEQ ID NO: 372493 - RNA, 22 nt, Human
agccccucagcaacaacaacuc

SEQ ID NO: 372494 - RNA, 21 nt, Human
aucccuccgccguccucacug

SEQ ID NO: 372495 - RNA, 22 nt, Human
caaacacagcagauggagagga

SEQ ID NO: 372496 - RNA, 27 nt, Human
caacaacaacccacacacuaggacccg

SEQ ID NO: 372497 - RNA, 22 nt, Human
caacaacaacuccugcuucggc

SEQ ID NO: 372498 - RNA, 20 nt, Human
cagaacaaaugagacaccua

SEQ ID NO: 372499 - RNA, 18 nt, Human
cagcaaggggcugggcag

SEQ ID NO: 372500 - RNA, 24 nt, Human
cagccccucagcaacaacaacucc

SEQ ID NO: 372501 - RNA, 23 nt, Human
ccccucagcaacaacaacuccug

SEQ ID NO: 372502 - RNA, 19 nt, Human
ccgcgggcacagcgcacgc

SEQ ID NO: 372503 - RNA, 20 nt, Human
ccgcggggggcuggcuucug

SEQ ID NO: 372504 - RNA, 24 nt, Human
ccucagcaacaacaacuccugcuu

SEQ ID NO: 372505 - RNA, 21 nt, Human
cgcacgcgccgugcggugcca

SEQ ID NO: 372506 - RNA, 23 nt, Human
cgcgggcacagcgcacgcgcggu

SEQ ID NO: 372507 - RNA, 22 nt, Human
cggaggcucgcggcggcugcgg

SEQ ID NO: 372508 - RNA, 20 nt, Human
gcguagcgcccuccucgcuc

SEQ ID NO: 372509 - RNA, 24 nt, Human
ggcugcggcagccccucagcaaca

SEQ ID NO: 372510 - RNA, 21 nt, Human
guccaaacacagcagauggag

SEQ ID NO: 372511 - RNA, 18 nt, Human
uaggacccggcgcugccg

SEQ ID NO: 372512 - RNA, 20 nt, Human
uccaaacacagcagauggag

SEQ ID NO: 372513 - RNA, 18 nt, Human
ucccggccgcaaaucccu

SEQ ID NO: 372514 - RNA, 21 nt, Human
ucggcuuccacuccgggggcg

SEQ ID NO: 372515 - RNA, 24 nt, Human
ucuggcgucuguccggaggcucgc

SEQ ID NO: 372516 - RNA, 18 nt, Human
ugagacaccuacccuugg

SEQ ID NO: 372517 - RNA, 18 nt, Human
ugaguaccucagccgcgg

SEQ ID NO: 372518 - RNA, 26 nt, Human
ugaguaccucagccgcggggggcugg

SEQ ID NO: 372519 - RNA, 19 nt, Human
aaaaccaaaccucaaaaag

SEQ ID NO: 372520 - RNA, 21 nt, Human
acacacggcuccaagaaggcc

SEQ ID NO: 372521 - RNA, 27 nt, Human
acacggcuccaagaaggcccccaaggg

SEQ ID NO: 372522 - RNA, 19 nt, Human
accaaaccucaaaaagcca

SEQ ID NO: 372523 - RNA, 23 nt, Human
acggcuccaagaaggcccccaag

SEQ ID NO: 372524 - RNA, 22 nt, Human
agggggcugagccaagggggaa

SEQ ID NO: 372525 - RNA, 22 nt, Human
caagaaggcccccaagggggga

SEQ ID NO: 372526 - RNA, 21 nt, Human
cacacacggcuccaagaaggc

SEQ ID NO: 372527 - RNA, 24 nt, Human
ccacucacucacacacggcuccaa

SEQ ID NO: 372528 - RNA, 20 nt, Human
ccuuuuuuuugugaaaaacc

SEQ ID NO: 372529 - RNA, 21 nt, Human
cugagccaagggggaaagggg

SEQ ID NO: 372530 - RNA, 20 nt, Human
gcccccaaggggggacuuac

SEQ ID NO: 372531 - RNA, 19 nt, Human
gcccuggguuucuccaaau

SEQ ID NO: 372532 - RNA, 20 nt, Human
ggaaggggcaggcauggggg

SEQ ID NO: 372533 - RNA, 21 nt, Human
ggggaaagggguggccccaga

SEQ ID NO: 372534 - RNA, 22 nt, Human
ggggaaggggcaggcauggggg

SEQ ID NO: 372535 - RNA, 25 nt, Human
ggggaaggggcaggcauggggggaa

SEQ ID NO: 372536 - RNA, 20 nt, Human
uaagucuuaaaggaggaaaa

SEQ ID NO: 372537 - RNA, 21 nt, Human
ucuggguacaaugcugugugg

SEQ ID NO: 372538 - RNA, 18 nt, Human
ugaaaaaccaaaccucaa

SEQ ID NO: 372539 - RNA, 20 nt, Human
uggguacaaugcuguguggc

SEQ ID NO: 372540 - RNA, 22 nt, Human
auaccauguucgaaaagcaaga

SEQ ID NO: 372541 - RNA, 20 nt, Human
ccccgcgcuguggaaagccc

SEQ ID NO: 372542 - RNA, 18 nt, Human
cugcagccucccguuccc

SEQ ID NO: 372543 - RNA, 23 nt, Human
gaaaagcaagacuuguuccaaga

SEQ ID NO: 372544 - RNA, 21 nt, Human
gaauuccuuuuuuuuuuuuuu

SEQ ID NO: 372545 - RNA, 27 nt, Human
uaacacaaacaaggcuauuauaccaug

SEQ ID NO: 372546 - RNA, 22 nt, Human
uauaccauguucgaaaagcaag

SEQ ID NO: 372547 - RNA, 18 nt, Human
uauuuuuauaauuuguag

SEQ ID NO: 372548 - RNA, 21 nt, Human
ucaacaaugcugauagauucc

SEQ ID NO: 372549 - RNA, 24 nt, Human
ucccccgcgcuguggaaagcccgu

SEQ ID NO: 372550 - RNA, 27 nt, Human
uccuuuuuuuuuuuuuuagcauagaga

SEQ ID NO: 372551 - RNA, 26 nt, Human
uuccuuuuuuuuuuuuuuagcauaga

SEQ ID NO: 372552 - RNA, 18 nt, Human
uuuguagaaaauugacau

SEQ ID NO: 372553 - RNA, 24 nt, Human
aacagguaauauaaaaccgauaca

SEQ ID NO: 372554 - RNA, 20 nt, Human
aucacagcagcaugaucucc

SEQ ID NO: 372555 - RNA, 22 nt, Human
caauaaggccuccccucuaucc

SEQ ID NO: 372556 - RNA, 19 nt, Human
ccaauacaaaggaaaacug

SEQ ID NO: 372557 - RNA, 24 nt, Human
gagcaagucuuccuuaugcuguuu

SEQ ID NO: 372558 - RNA, 24 nt, Human
uaaaaccgauacaauaaggccucc

SEQ ID NO: 372559 - RNA, 24 nt, Human
uacaaaggaaaacugcaucuuuuu

SEQ ID NO: 372560 - RNA, 23 nt, Human
uacaauaaggccuccccucuauc

SEQ ID NO: 372561 - RNA, 18 nt, Human
ucuccuggugaagcagaa

SEQ ID NO: 372562 - RNA, 23 nt, Human
uggugaagcagaacagguaauau

SEQ ID NO: 372563 - RNA, 22 nt, Human
ugucccacuucuccccuccaaa

SEQ ID NO: 372564 - RNA, 23 nt, Human
uuccuuuuuuuuuuuaacugaaa

SEQ ID NO: 372565 - RNA, 21 nt, Human
uucucuuucauaggacagggg

SEQ ID NO: 372566 - RNA, 23 nt, Human
uugacaauuuuauuuucacauuu

SEQ ID NO: 372567 - RNA, 24 nt, Human
uugacaauuuuauuuucacauuuc

SEQ ID NO: 372568 - RNA, 19 nt, Human
uuugucccacuucuccccu

SEQ ID NO: 372569 - RNA, 23 nt, Human
uuuugucccacuucuccccucca

SEQ ID NO: 372570 - RNA, 23 nt, Human
auaaauguucacauuggacaaag

SEQ ID NO: 372571 - RNA, 28 nt, Human
caaagagcacacccgcacgccggggccc

SEQ ID NO: 372572 - RNA, 22 nt, Human
caaaggacaucuaaaaacaaag

SEQ ID NO: 372573 - RNA, 21 nt, Human
cucaacaauuucucacuucau

SEQ ID NO: 372574 - RNA, 24 nt, Human
gacaucuaaaaacaaacuguaucc

SEQ ID NO: 372575 - RNA, 19 nt, Human
gagcacacccgcacgcugc

SEQ ID NO: 372576 - RNA, 24 nt, Human
uaaaaacaaacuguauccuucuca

SEQ ID NO: 372577 - RNA, 25 nt, Human
uaaaaacaaacuguauccuucucaa

SEQ ID NO: 372578 - RNA, 21 nt, Human
uaacacgaggguaaucaaaac

SEQ ID NO: 372579 - RNA, 22 nt, Human
uggaauuucacaaagagcacac

SEQ ID NO: 372580 - RNA, 20 nt, Human
uucacaaagagcacacccgc

SEQ ID NO: 372581 - RNA, 22 nt, Human
aaaaagcaauaugaaauguuac

SEQ ID NO: 372582 - RNA, 21 nt, Human
aaauagccccagagagagggc

SEQ ID NO: 372583 - RNA, 23 nt, Human
aaauagccccagagagagggcag

SEQ ID NO: 372584 - RNA, 24 nt, Human
aaggggcagcaaaaaucuguagag

SEQ ID NO: 372585 - RNA, 24 nt, Human
aaggggcagcaaaaaucuguagag

SEQ ID NO: 372586 - RNA, 24 nt, Human
aaggggcagcaaaaaucuguagag

SEQ ID NO: 372587 - RNA, 19 nt, Human
aagugccccacguggcugc

SEQ ID NO: 372588 - RNA, 19 nt, Human
aagugccccacguggcugc

SEQ ID NO: 372589 - RNA, 19 nt, Human
aagugccccacguggcugc

SEQ ID NO: 372590 - RNA, 19 nt, Human
aagugccccacguggcugc

SEQ ID NO: 372591 - RNA, 19 nt, Human
aaugccugccucaguucag

SEQ ID NO: 372592 - RNA, 19 nt, Human
aaugccugccucaguucag

SEQ ID NO: 372593 - RNA, 19 nt, Human
aaugccugccucaguucag

SEQ ID NO: 372594 - RNA, 19 nt, Human
aaugccugccucaguucag

SEQ ID NO: 372595 - RNA, 26 nt, Human
acugcagaccccacagaaggcucuga

SEQ ID NO: 372596 - RNA, 22 nt, Human
acuugcugcugcugagaacgcc

SEQ ID NO: 372597 - RNA, 22 nt, Human
acuugcugcugcugagaacgcc

SEQ ID NO: 372598 - RNA, 22 nt, Human
acuugcugcugcugagaacgcc

SEQ ID NO: 372599 - RNA, 22 nt, Human
acuugcugcugcugagaacgcc

SEQ ID NO: 372600 - RNA, 22 nt, Human
agagggcagggggcagcugacc

SEQ ID NO: 372601 - RNA, 21 nt, Human
aggagaaaguagauucagcca

SEQ ID NO: 372602 - RNA, 21 nt, Human
aggagaaaguagauucagcca

SEQ ID NO: 372603 - RNA, 21 nt, Human
aggagaaaguagauucagcca

SEQ ID NO: 372604 - RNA, 21 nt, Human
aggagaaaguagauucagcca

SEQ ID NO: 372605 - RNA, 21 nt, Human
aggccgcauuccucaaauagc

SEQ ID NO: 372606 - RNA, 18 nt, Human
agggaagacagggggcgg

SEQ ID NO: 372607 - RNA, 18 nt, Human
aucccacuuacaucucca

SEQ ID NO: 372608 - RNA, 24 nt, Human
caaauagccccagagagagggcag

SEQ ID NO: 372609 - RNA, 20 nt, Human
cagaaggcucugagcucagc

SEQ ID NO: 372610 - RNA, 20 nt, Human
cagaaggcucugagcucagc

SEQ ID NO: 372611 - RNA, 21 nt, Human
cagauuccucgcuacuccaaa

SEQ ID NO: 372612 - RNA, 21 nt, Human
cagauuccucgcuacuccaaa

SEQ ID NO: 372613 - RNA, 21 nt, Human
cagauuccucgcuacuccaaa

SEQ ID NO: 372614 - RNA, 21 nt, Human
cagauuccucgcuacuccaaa

SEQ ID NO: 372615 - RNA, 19 nt, Human
cagcuacaguggcugcggc

SEQ ID NO: 372616 - RNA, 23 nt, Human
cagcuccagagggaagacagggg

SEQ ID NO: 372617 - RNA, 23 nt, Human
cagcugaccuugcccccgcaaac

SEQ ID NO: 372618 - RNA, 18 nt, Human
cagggggcagcugaccuu

SEQ ID NO: 372619 - RNA, 18 nt, Human
cauuccucaaauagcccc

SEQ ID NO: 372620 - RNA, 24 nt, Human
cauugaucagcgaccacaguuacu

SEQ ID NO: 372621 - RNA, 27 nt, Human
ccaaauccaauguccacaguuaaaacu

SEQ ID NO: 372622 - RNA, 27 nt, Human
ccaaauccaauguccacaguuaaaacu

SEQ ID NO: 372623 - RNA, 27 nt, Human
ccaaauccaauguccacaguuaaaacu

SEQ ID NO: 372624 - RNA, 27 nt, Human
ccaaauccaauguccacaguuaaaacu

SEQ ID NO: 372625 - RNA, 18 nt, Human
ccaccaaauccaaugucc

SEQ ID NO: 372626 - RNA, 18 nt, Human
ccaccaaauccaaugucc

SEQ ID NO: 372627 - RNA, 18 nt, Human
ccaccaaauccaaugucc

SEQ ID NO: 372628 - RNA, 18 nt, Human
ccaccaaauccaaugucc

SEQ ID NO: 372629 - RNA, 21 nt, Human
ccagagagagggcagggggca

SEQ ID NO: 372630 - RNA, 18 nt, Human
ccagagggaagacagggg

SEQ ID NO: 372631 - RNA, 23 nt, Human
ccuugccacugcagaccccacag

SEQ ID NO: 372632 - RNA, 24 nt, Human
cgaccacaguuacuguagagaaaa

SEQ ID NO: 372633 - RNA, 19 nt, Human
cggcuggccuugccacugc

SEQ ID NO: 372634 - RNA, 19 nt, Human
cuacaguggcugcggccag

SEQ ID NO: 372635 - RNA, 20 nt, Human
cucagcuacaguggcugcgg

SEQ ID NO: 372636 - RNA, 23 nt, Human
cugagcucagcuacaguggcugc

SEQ ID NO: 372637 - RNA, 21 nt, Human
cugaguuccacuuacauaugc

SEQ ID NO: 372638 - RNA, 21 nt, Human
cugaguuccacuuacauaugc

SEQ ID NO: 372639 - RNA, 21 nt, Human
cugaguuccacuuacauaugc

SEQ ID NO: 372640 - RNA, 21 nt, Human
cugaguuccacuuacauaugc

SEQ ID NO: 372641 - RNA, 23 nt, Human
cugcguuugacuuggacuuccac

SEQ ID NO: 372642 - RNA, 23 nt, Human
cugcguuugacuuggacuuccac

SEQ ID NO: 372643 - RNA, 23 nt, Human
cugcguuugacuuggacuuccac

SEQ ID NO: 372644 - RNA, 23 nt, Human
cugcguuugacuuggacuuccac

SEQ ID NO: 372645 - RNA, 19 nt, Human
cugugaauuuucagaucca

SEQ ID NO: 372646 - RNA, 23 nt, Human
gacacucuugguugcucagugag

SEQ ID NO: 372647 - RNA, 23 nt, Human
gacacucuugguugcucagugag

SEQ ID NO: 372648 - RNA, 23 nt, Human
gacacucuugguugcucagugag

SEQ ID NO: 372649 - RNA, 23 nt, Human
gacacucuugguugcucagugag

SEQ ID NO: 372650 - RNA, 21 nt, Human
gaccuugcccccgcaaaccac

SEQ ID NO: 372651 - RNA, 25 nt, Human
gacgcggguucuccuagaaacaaug

SEQ ID NO: 372652 - RNA, 25 nt, Human
gacgcggguucuccuagaaacaaug

SEQ ID NO: 372653 - RNA, 25 nt, Human
gacgcggguucuccuagaaacaaug

SEQ ID NO: 372654 - RNA, 25 nt, Human
gacgcggguucuccuagaaacaaug

SEQ ID NO: 372655 - RNA, 18 nt, Human
gagcucagcuacaguggc

SEQ ID NO: 372656 - RNA, 21 nt, Human
gagcucagcuacaguggcugc

SEQ ID NO: 372657 - RNA, 24 nt, Human
ggaacaaaaagcucacaaacacuc

SEQ ID NO: 372658 - RNA, 22 nt, Human
ggggcagcaaaaaucuguagag

SEQ ID NO: 372659 - RNA, 20 nt, Human
gguaaaaggggcagcaaaaa

SEQ ID NO: 372660 - RNA, 20 nt, Human
gguaaaaggggcagcaaaaa

SEQ ID NO: 372661 - RNA, 20 nt, Human
gguaaaaggggcagcaaaaa

SEQ ID NO: 372662 - RNA, 20 nt, Human
gguaaaaggggcagcaaaaa

SEQ ID NO: 372663 - RNA, 20 nt, Human
guagagaaaagccuuucuua

SEQ ID NO: 372664 - RNA, 18 nt, Human
gucucagcuaagaaugcc

SEQ ID NO: 372665 - RNA, 18 nt, Human
gucucagcuaagaaugcc

SEQ ID NO: 372666 - RNA, 18 nt, Human
gucucagcuaagaaugcc

SEQ ID NO: 372667 - RNA, 18 nt, Human
gucucagcuaagaaugcc

SEQ ID NO: 372668 - RNA, 20 nt, Human
guggcugcggccagcccuug

SEQ ID NO: 372669 - RNA, 18 nt, Human
uaaaacuugaugcuucug

SEQ ID NO: 372670 - RNA, 22 nt, Human
uacaacugacacucuugguugc

SEQ ID NO: 372671 - RNA, 22 nt, Human
uacaacugacacucuugguugc

SEQ ID NO: 372672 - RNA, 22 nt, Human
uacaacugacacucuugguugc

SEQ ID NO: 372673 - RNA, 22 nt, Human
uacaacugacacucuugguugc

SEQ ID NO: 372674 - RNA, 22 nt, Human
uacuugcugcugcugagaacgc

SEQ ID NO: 372675 - RNA, 22 nt, Human
uacuugcugcugcugagaacgc

SEQ ID NO: 372676 - RNA, 24 nt, Human
uagauggagccugguuuuugcuug

SEQ ID NO: 372677 - RNA, 24 nt, Human
uagauggagccugguuuuugcuug

SEQ ID NO: 372678 - RNA, 24 nt, Human
uagauggagccugguuuuugcuug

SEQ ID NO: 372679 - RNA, 24 nt, Human
uagauggagccugguuuuugcuug

SEQ ID NO: 372680 - RNA, 18 nt, Human
uaucucauuugcaguuug

SEQ ID NO: 372681 - RNA, 20 nt, Human
ucagcuacaguggcugcggc

SEQ ID NO: 372682 - RNA, 23 nt, Human
ucaucaggugguggugagcuggc

SEQ ID NO: 372683 - RNA, 18 nt, Human
ucucagguguaagcgauc

SEQ ID NO: 372684 - RNA, 18 nt, Human
ucucagguguaagcgauc

SEQ ID NO: 372685 - RNA, 18 nt, Human
ucucagguguaagcgauc

SEQ ID NO: 372686 - RNA, 18 nt, Human
ucucagguguaagcgauc

SEQ ID NO: 372687 - RNA, 20 nt, Human
ucuccuagaaacaaugcaag

SEQ ID NO: 372688 - RNA, 21 nt, Human
ucuccuagaaacaaugcaagc

SEQ ID NO: 372689 - RNA, 21 nt, Human
ucuccuagaaacaaugcaagc

SEQ ID NO: 372690 - RNA, 21 nt, Human
ucuccuagaaacaaugcaagc

SEQ ID NO: 372691 - RNA, 23 nt, Human
ucuccuagaaacaaugcaagcuc

SEQ ID NO: 372692 - RNA, 23 nt, Human
ucuccuagaaacaaugcaagcuc

SEQ ID NO: 372693 - RNA, 23 nt, Human
ucuccuagaaacaaugcaagcuc

SEQ ID NO: 372694 - RNA, 23 nt, Human
ucuccuagaaacaaugcaagcuc

SEQ ID NO: 372695 - RNA, 24 nt, Human
ugacuggagagaaaagccuuucuu

SEQ ID NO: 372696 - RNA, 20 nt, Human
ugcaaaagaacugcauuccu

SEQ ID NO: 372697 - RNA, 21 nt, Human
ugcaagcugggcagaagcuuc

SEQ ID NO: 372698 - RNA, 21 nt, Human
ugcaagcugggcagaagcuuc

SEQ ID NO: 372699 - RNA, 21 nt, Human
ugcaagcugggcagaagcuuc

SEQ ID NO: 372700 - RNA, 21 nt, Human
ugcaagcugggcagaagcuuc

SEQ ID NO: 372701 - RNA, 19 nt, Human
ugcaggggaaaaagugacu

SEQ ID NO: 372702 - RNA, 19 nt, Human
ugccuucugaguuccacuu

SEQ ID NO: 372703 - RNA, 19 nt, Human
ugccuucugaguuccacuu

SEQ ID NO: 372704 - RNA, 19 nt, Human
ugccuucugaguuccacuu

SEQ ID NO: 372705 - RNA, 19 nt, Human
ugccuucugaguuccacuu

SEQ ID NO: 372706 - RNA, 18 nt, Human
ugcugcugcugagaacgc

SEQ ID NO: 372707 - RNA, 18 nt, Human
ugcugcugcugagaacgc

SEQ ID NO: 372708 - RNA, 21 nt, Human
uggaagaguauguucagggaa

SEQ ID NO: 372709 - RNA, 21 nt, Human
uggaagaguauguucagggaa

SEQ ID NO: 372710 - RNA, 24 nt, Human
ugguggaagaguauguucagggaa

SEQ ID NO: 372711 - RNA, 24 nt, Human
ugguggaagaguauguucagggaa

SEQ ID NO: 372712 - RNA, 19 nt, Human
uguagagaaaagccuuucu

SEQ ID NO: 372713 - RNA, 23 nt, Human
uguuaggaugcucucacccugug

SEQ ID NO: 372714 - RNA, 19 nt, Human
uuaaaacuugaugcuucug

SEQ ID NO: 372715 - RNA, 19 nt, Human
uuaaaacuugaugcuucug

SEQ ID NO: 372716 - RNA, 19 nt, Human
uuaaaacuugaugcuucug

SEQ ID NO: 372717 - RNA, 20 nt, Human
uucaaagaguagauggagcc

SEQ ID NO: 372718 - RNA, 20 nt, Human
uucaaagaguagauggagcc

SEQ ID NO: 372719 - RNA, 20 nt, Human
uucaaagaguagauggagcc

SEQ ID NO: 372720 - RNA, 20 nt, Human
uucaaagaguagauggagcc

SEQ ID NO: 372721 - RNA, 20 nt, Human
aaaauacccauaauucacuc

SEQ ID NO: 372722 - RNA, 18 nt, Human
aaucacaauaagaaaagg

SEQ ID NO: 372723 - RNA, 21 nt, Human
agacagcagaccuugguguga

SEQ ID NO: 372724 - RNA, 20 nt, Human
aggaaauaaaucacaauaag

SEQ ID NO: 372725 - RNA, 18 nt, Human
aggcaaaaacaaggguca

SEQ ID NO: 372726 - RNA, 19 nt, Human
aggcaaaaacaagggucag

SEQ ID NO: 372727 - RNA, 20 nt, Human
aggcaaaaacaagggucagg

SEQ ID NO: 372728 - RNA, 18 nt, Human
auacaagcacaggcaaaa

SEQ ID NO: 372729 - RNA, 22 nt, Human
auggggauaauuaguuaacucc

SEQ ID NO: 372730 - RNA, 20 nt, Human
caagcacaggcaaaaacaag

SEQ ID NO: 372731 - RNA, 24 nt, Human
cacgcuacaucuggugcgacaggg

SEQ ID NO: 372732 - RNA, 19 nt, Human
cauucuacaccauugaaag

SEQ ID NO: 372733 - RNA, 20 nt, Human
cgacucuugagagcuaaagc

SEQ ID NO: 372734 - RNA, 23 nt, Human
cuaaagcugacuguagcacgcua

SEQ ID NO: 372735 - RNA, 21 nt, Human
cucugguggcauugcagcccu

SEQ ID NO: 372736 - RNA, 22 nt, Human
cugaaaaaauacccauaauuca

SEQ ID NO: 372737 - RNA, 19 nt, Human
cugguggcauugcagcccu

SEQ ID NO: 372738 - RNA, 19 nt, Human
cugguggcauugcagcccu

SEQ ID NO: 372739 - RNA, 18 nt, Human
gaaaaguggggaagggug

SEQ ID NO: 372740 - RNA, 20 nt, Human
gccucggugcccucacucgg

SEQ ID NO: 372741 - RNA, 21 nt, Human
ggaaaaggggggaaaaguggg

SEQ ID NO: 372742 - RNA, 22 nt, Human
gggaaaaguggggaaggguggc

SEQ ID NO: 372743 - RNA, 25 nt, Human
gggaaaaguggggaaggguggccgg

SEQ ID NO: 372744 - RNA, 18 nt, Human
ggggauagggggcuagga

SEQ ID NO: 372745 - RNA, 19 nt, Human
ggggggaaaaguggggaag

SEQ ID NO: 372746 - RNA, 25 nt, Human
uaaguugccacugaaaaccaugaaa

SEQ ID NO: 372747 - RNA, 20 nt, Human
uaccuggugaacaaguugcc

SEQ ID NO: 372748 - RNA, 19 nt, Human
uagggggcuaggaggagua

SEQ ID NO: 372749 - RNA, 24 nt, Human
uauccagaauuaaaugaggcugcu

SEQ ID NO: 372750 - RNA, 20 nt, Human
ucagaucaguaucugaugcu

SEQ ID NO: 372751 - RNA, 18 nt, Human
uccagaauuaaaugaggc

SEQ ID NO: 372752 - RNA, 20 nt, Human
ucccagaauuaaucauccuu

SEQ ID NO: 372753 - RNA, 24 nt, Human
uccuugguugucauuauuucaaag

SEQ ID NO: 372754 - RNA, 18 nt, Human
ucucaaaggcaagucacc

SEQ ID NO: 372755 - RNA, 22 nt, Human
ucucugguggcauugcagcccu

SEQ ID NO: 372756 - RNA, 26 nt, Human
ugauuggaaaaggggggaaaagucgu

SEQ ID NO: 372757 - RNA, 23 nt, Human
ugcauacaacucuuuagcaaagc

SEQ ID NO: 372758 - RNA, 24 nt, Human
ugcauacaagcacaggcaaaaaca

SEQ ID NO: 372759 - RNA, 19 nt, Human
ugcaugcauacaagcacag

SEQ ID NO: 372760 - RNA, 18 nt, Human
uggaaucauucuacacca

SEQ ID NO: 372761 - RNA, 22 nt, Human
uggcagcugcacucaggcuggu

SEQ ID NO: 372762 - RNA, 21 nt, Human
uggugucugacaucacguucu

SEQ ID NO: 372763 - RNA, 18 nt, Human
uguguauaucagaugaca

SEQ ID NO: 372764 - RNA, 25 nt, Human
uuaagaucugcacaugcuguucuaa

SEQ ID NO: 372765 - RNA, 22 nt, Human
uuaauuccugcucaguauaugc

SEQ ID NO: 372766 - RNA, 21 nt, Human
uucauacuuaaauaaaaggug

SEQ ID NO: 372767 - RNA, 18 nt, Human
uucccgucaccucaccuc

SEQ ID NO: 372768 - RNA, 24 nt, Human
uuuaaaaaguaacagcugcuucau

SEQ ID NO: 372769 - RNA, 22 nt, Human
uuucucaaaggcaagucacccc

SEQ ID NO: 372770 - RNA, 24 nt, Human
agauggugaacccauuuucauagu

SEQ ID NO: 372771 - RNA, 21 nt, Human
auccaagggagggggaucgac

SEQ ID NO: 372772 - RNA, 20 nt, Human
caccaaaauccaaguauaga

SEQ ID NO: 372773 - RNA, 22 nt, Human
cacccugaagagaugcaucuca

SEQ ID NO: 372774 - RNA, 19 nt, Human
cagcagcauggcaacccug

SEQ ID NO: 372775 - RNA, 22 nt, Human
cagcucagcagcagcauggcaa

SEQ ID NO: 372776 - RNA, 22 nt, Human
cauccggagccagaaugaacca

SEQ ID NO: 372777 - RNA, 18 nt, Human
ccaaccugguggcaacaa

SEQ ID NO: 372778 - RNA, 24 nt, Human
ccagaaugaaccaaccugguggca

SEQ ID NO: 372779 - RNA, 23 nt, Human
cccucgggaccaccaaaauccaa

SEQ ID NO: 372780 - RNA, 22 nt, Human
cccugaacaaguauccuggucc

SEQ ID NO: 372781 - RNA, 20 nt, Human
cgcccaggcaucucuugucc

SEQ ID NO: 372782 - RNA, 18 nt, Human
cucauacaagcaguccca

SEQ ID NO: 372783 - RNA, 22 nt, Human
cucgggaccaccaaaauccaag

SEQ ID NO: 372784 - RNA, 26 nt, Human
cugguggcaacaaguggguagcugug

SEQ ID NO: 372785 - RNA, 24 nt, Human
cuugugacagucaaggcucuuuuc

SEQ ID NO: 372786 - RNA, 19 nt, Human
ggacaagagugcaggucca

SEQ ID NO: 372787 - RNA, 18 nt, Human
uacaauaugcugcuggag

SEQ ID NO: 372788 - RNA, 18 nt, Human
uagcaaauguaaggucag

SEQ ID NO: 372789 - RNA, 24 nt, Human
uagcgguacaauaugcugcuggag

SEQ ID NO: 372790 - RNA, 23 nt, Human
uaguaagccucaccucuuggcca

SEQ ID NO: 372791 - RNA, 23 nt, Human
ucccucgggaccaccaaaaucca

SEQ ID NO: 372792 - RNA, 18 nt, Human
uccggagccagaaugaac

SEQ ID NO: 372793 - RNA, 18 nt, Human
uccugguccaggaugaca

SEQ ID NO: 372794 - RNA, 19 nt, Human
ugaacaaguauccuggucc

SEQ ID NO: 372795 - RNA, 22 nt, Human
ugagauggugaacccauuuuca

SEQ ID NO: 372796 - RNA, 18 nt, Human
ugaucagcucagcagcag

SEQ ID NO: 372797 - RNA, 26 nt, Human
uucccuugagauggugaacccauuuu

SEQ ID NO: 372798 - RNA, 21 nt, Human
uuccuugaucagcucagcagc

SEQ ID NO: 372799 - RNA, 22 nt, Human
aaaaggcagcgucacacaggug

SEQ ID NO: 372800 - RNA, 22 nt, Human
agggaggaagggguuaagucca

SEQ ID NO: 372801 - RNA, 24 nt, Human
cagccuaggcaggaugcaucacua

SEQ ID NO: 372802 - RNA, 26 nt, Human
cagccuaggcaggaugcaucacuagg

SEQ ID NO: 372803 - RNA, 20 nt, Human
caguuccuaaaccacauccu

SEQ ID NO: 372804 - RNA, 22 nt, Human
cccauaauuccaccaccuauug

SEQ ID NO: 372805 - RNA, 21 nt, Human
gcuuaaagcaggaaacuauuc

SEQ ID NO: 372806 - RNA, 18 nt, Human
gggacaguuggucguggg

SEQ ID NO: 372807 - RNA, 18 nt, Human
guaggucuuuugcuuaaa

SEQ ID NO: 372808 - RNA, 24 nt, Human
gucguggggacagggaggaagggg

SEQ ID NO: 372809 - RNA, 20 nt, Human
uaaguccagccuaggcagga

SEQ ID NO: 372810 - RNA, 20 nt, Human
uagguaagaaaauauauaug

SEQ ID NO: 372811 - RNA, 26 nt, Human
ucacacaggugggcucugggguccuu

SEQ ID NO: 372812 - RNA, 18 nt, Human
ucacuagggguccaucaa

SEQ ID NO: 372813 - RNA, 24 nt, Human
ucacuagggguccaucaagguggg

SEQ ID NO: 372814 - RNA, 26 nt, Human
uccaccccaucccauaauuccaccac

SEQ ID NO: 372815 - RNA, 19 nt, Human
ugggcucugggguccuugg

SEQ ID NO: 372816 - RNA, 24 nt, Human
aacugcuccuucagucuucucccg

SEQ ID NO: 372817 - RNA, 18 nt, Human
aaucauuuaagacacaga

SEQ ID NO: 372818 - RNA, 30 nt, Human
acacaacaguauuugaguuaagccccagaa

SEQ ID NO: 372819 - RNA, 19 nt, Human
acucggcuucgcuggccuc

SEQ ID NO: 372820 - RNA, 23 nt, Human
acucggcuucgcuggccuccccu

SEQ ID NO: 372821 - RNA, 23 nt, Human
auaccauuaguccuggacaaaau

SEQ ID NO: 372822 - RNA, 19 nt, Human
caccccggggaagugaggu

SEQ ID NO: 372823 - RNA, 21 nt, Human
cagaagaucuguccauaccau

SEQ ID NO: 372824 - RNA, 21 nt, Human
cauucuugcuugagauggggg

SEQ ID NO: 372825 - RNA, 23 nt, Human
ccaacggcggcaacugcuccuuc

SEQ ID NO: 372826 - RNA, 27 nt, Human
ccaacggcggcaacugcuccuucaguc

SEQ ID NO: 372827 - RNA, 22 nt, Human
ccccagaagaucuguccauacc

SEQ ID NO: 372828 - RNA, 20 nt, Human
ccgggcggcgguuuuacucg

SEQ ID NO: 372829 - RNA, 20 nt, Human
ccuagccucgccucauggcc

SEQ ID NO: 372830 - RNA, 19 nt, Human
ccuggacaaaaugaacacc

SEQ ID NO: 372831 - RNA, 21 nt, Human
cgccaacggcggcaacugcuc

SEQ ID NO: 372832 - RNA, 21 nt, Human
cggcccggucgcucgcgacgg

SEQ ID NO: 372833 - RNA, 20 nt, Human
cggcuucgcuggccuccccu

SEQ ID NO: 372834 - RNA, 20 nt, Human
cgggccgccgccaacggcgg

SEQ ID NO: 372835 - RNA, 19 nt, Human
cucccgggcggcgguuuua

SEQ ID NO: 372836 - RNA, 18 nt, Human
cucggcccggucgcucgc

SEQ ID NO: 372837 - RNA, 19 nt, Human
cucggcccggucgcucgcg

SEQ ID NO: 372838 - RNA, 23 nt, Human
cucggcccggucgcucgcgacgg

SEQ ID NO: 372839 - RNA, 28 nt, Human
gaagaaaccaacgccauucuugcuugag

SEQ ID NO: 372840 - RNA, 18 nt, Human
gacacuaaaagacuggug

SEQ ID NO: 372841 - RNA, 24 nt, Human
ggugcagacacaacaguauuugag

SEQ ID NO: 372842 - RNA, 18 nt, Human
uagcagcagcgaaaacug

SEQ ID NO: 372843 - RNA, 26 nt, Human
uccauaccauuaguccuggacaaaau

SEQ ID NO: 372844 - RNA, 26 nt, Human
ucccgggcggcgguuuuacucggcuu

SEQ ID NO: 372845 - RNA, 19 nt, Human
ugaaauggaagaaaccaac

SEQ ID NO: 372846 - RNA, 23 nt, Human
ugagaagaaccacagacuuaugg

SEQ ID NO: 372847 - RNA, 18 nt, Human
ugcuugagaugggggcag

SEQ ID NO: 372848 - RNA, 21 nt, Human
uggaagaaaccaacgccauuc

SEQ ID NO: 372849 - RNA, 24 nt, Human
uggaagaaaccaacgccauucuug

SEQ ID NO: 372850 - RNA, 26 nt, Human
uggcaacagccguagcagcagcgaaa

SEQ ID NO: 372851 - RNA, 23 nt, Human
uguaauucagguauaagguuauu

SEQ ID NO: 372852 - RNA, 19 nt, Human
uucuugcuugagauggggg

SEQ ID NO: 372853 - RNA, 23 nt, Human
uugagaugggggcaguuuucucu

SEQ ID NO: 372854 - RNA, 20 nt, Human
uuuacucggcuucgcuggcc

SEQ ID NO: 372855 - RNA, 18 nt, Human
uuuuuuuuuuuuuuuuug

SEQ ID NO: 372856 - RNA, 23 nt, Human
uuuuuuuuuuuuuuuuugauugg

SEQ ID NO: 372857 - RNA, 23 nt, Human
aaaaaaaccccaaaaagacaggc

SEQ ID NO: 372858 - RNA, 21 nt, Human
aaaaaaccccaaaaagacagg

SEQ ID NO: 372859 - RNA, 19 nt, Human
aaaaaccccaaaaagacag

SEQ ID NO: 372860 - RNA, 21 nt, Human
aaaaagacaggcagggucaga

SEQ ID NO: 372861 - RNA, 25 nt, Human
aaaaagacaggcagggucagaagug

SEQ ID NO: 372862 - RNA, 27 nt, Human
aaaaaguaaaaaccacucucacagccc

SEQ ID NO: 372863 - RNA, 22 nt, Human
aaaaccacucucacagcccuua

SEQ ID NO: 372864 - RNA, 21 nt, Human
aaaagacaggcagggucagaa

SEQ ID NO: 372865 - RNA, 18 nt, Human
aacaugguguaaccccgu

SEQ ID NO: 372866 - RNA, 19 nt, Human
aacaugguguaaccccguc

SEQ ID NO: 372867 - RNA, 20 nt, Human
aacaugguguaaccccgucc

SEQ ID NO: 372868 - RNA, 21 nt, Human
aaccccaaaaagacaggcagg

SEQ ID NO: 372869 - RNA, 19 nt, Human
aacucaaaaaaaccccaaa

SEQ ID NO: 372870 - RNA, 24 nt, Human
aacugcuugaaccugggaggugga

SEQ ID NO: 372871 - RNA, 20 nt, Human
aagacagacagacaugggcc

SEQ ID NO: 372872 - RNA, 20 nt, Human
acacagcgagacuccaacuc

SEQ ID NO: 372873 - RNA, 24 nt, Human
acacagcgagacuccaacucaaaa

SEQ ID NO: 372874 - RNA, 20 nt, Human
acacaucaagacagacagac

SEQ ID NO: 372875 - RNA, 20 nt, Human
acagacagacaugggccggg

SEQ ID NO: 372876 - RNA, 23 nt, Human
accacagcugcugcucacacauc

SEQ ID NO: 372877 - RNA, 22 nt, Human
accacugcacuccagucugggc

SEQ ID NO: 372878 - RNA, 24 nt, Human
accccgucccuacugaaaauacaa

SEQ ID NO: 372879 - RNA, 22 nt, Human
acucaaaaaaaccccaaaaaga

SEQ ID NO: 372880 - RNA, 24 nt, Human
acucaaaaaaaccccaaaaagaca

SEQ ID NO: 372881 - RNA, 18 nt, Human
acugcacuccagucuggg

SEQ ID NO: 372882 - RNA, 23 nt, Human
acugcacuccagucugggcgaca

SEQ ID NO: 372883 - RNA, 24 nt, Human
acuugaggucaggaguucgagacc

SEQ ID NO: 372884 - RNA, 21 nt, Human
agacagacagacaugggccgg

SEQ ID NO: 372885 - RNA, 22 nt, Human
agacaggagaacugcuugaacc

SEQ ID NO: 372886 - RNA, 24 nt, Human
agacaggagaacugcuugaaccug

SEQ ID NO: 372887 - RNA, 21 nt, Human
agacugaggcggguggaucac

SEQ ID NO: 372888 - RNA, 24 nt, Human
agcacuuugggagacugaggcggg

SEQ ID NO: 372889 - RNA, 24 nt, Human
agccuggccaacaugguguaaccc

SEQ ID NO: 372890 - RNA, 23 nt, Human
agcugggcgugguggcaugugcc

SEQ ID NO: 372891 - RNA, 23 nt, Human
aggcggguggaucacuugagguc

SEQ ID NO: 372892 - RNA, 26 nt, Human
aggcggguggaucacuugaggucagg

SEQ ID NO: 372893 - RNA, 24 nt, Human
aggcugagacaggagaacugcuug

SEQ ID NO: 372894 - RNA, 18 nt, Human
agggccaggcccugggga

SEQ ID NO: 372895 - RNA, 21 nt, Human
agguggagguugcagugagcc

SEQ ID NO: 372896 - RNA, 22 nt, Human
agguggagguugcagugagccg

SEQ ID NO: 372897 - RNA, 24 nt, Human
agucugggcgacacagcgagacuc

SEQ ID NO: 372898 - RNA, 24 nt, Human
agugacucaugccuguaaucucag

SEQ ID NO: 372899 - RNA, 21 nt, Human
aucacuugaggucaggaguuc

SEQ ID NO: 372900 - RNA, 24 nt, Human
aucccaccacugcacuccagucug

SEQ ID NO: 372901 - RNA, 19 nt, Human
augccuguaaucucagcac

SEQ ID NO: 372902 - RNA, 20 nt, Human
caaaaaaaccccaaaaagac

SEQ ID NO: 372903 - RNA, 23 nt, Human
caacucaaaaaaaccccaaaaag

SEQ ID NO: 372904 - RNA, 22 nt, Human
caagacagacagacaugggccg

SEQ ID NO: 372905 - RNA, 21 nt, Human
cacaucaagacagacagacau

SEQ ID NO: 372906 - RNA, 24 nt, Human
caccuccucgccguccccaccccu

SEQ ID NO: 372907 - RNA, 19 nt, Human
cacugcacuccagucuggg

SEQ ID NO: 372908 - RNA, 21 nt, Human
cacugcacuccagucugggcg

SEQ ID NO: 372909 - RNA, 22 nt, Human
cacugcacuccagucugggcga

SEQ ID NO: 372910 - RNA, 23 nt, Human
cacugcacuccagucugggcgac

SEQ ID NO: 372911 - RNA, 24 nt, Human
cacugcacuccagucugggcgaca

SEQ ID NO: 372912 - RNA, 23 nt, Human
cacuugaggucaggaguucgaga

SEQ ID NO: 372913 - RNA, 22 nt, Human
cagcacuuugggagacugaggc

SEQ ID NO: 372914 - RNA, 24 nt, Human
cagcacuuugggagacugaggcgg

SEQ ID NO: 372915 - RNA, 24 nt, Human
cagcgagacuccaacucaaaaaaa

SEQ ID NO: 372916 - RNA, 31 nt, Human
cagcgagacuccaacucaaaaaaaccccaaa

SEQ ID NO: 372917 - RNA, 24 nt, Human
caggagcgagagucccagggaaug

SEQ ID NO: 372918 - RNA, 24 nt, Human
caugccuguaaucucagcacuuug

SEQ ID NO: 372919 - RNA, 20 nt, Human
ccacugcacuccagucuggg

SEQ ID NO: 372920 - RNA, 20 nt, Human
ccacugcacuccagucuggg

SEQ ID NO: 372921 - RNA, 21 nt, Human
ccacugcacuccagucugggc

SEQ ID NO: 372922 - RNA, 21 nt, Human
ccacugcacuccagucugggc

SEQ ID NO: 372923 - RNA, 23 nt, Human
ccacugcacuccagucugggcga

SEQ ID NO: 372924 - RNA, 24 nt, Human
ccacugcacuccagucugggcgac

SEQ ID NO: 372925 - RNA, 23 nt, Human
ccagccuccgcccgccgccgccu

SEQ ID NO: 372926 - RNA, 18 nt, Human
ccccaccccuccggccca

SEQ ID NO: 372927 - RNA, 18 nt, Human
ccgccucgccaggccugc

SEQ ID NO: 372928 - RNA, 21 nt, Human
ccucgccguccccaccccucc

SEQ ID NO: 372929 - RNA, 22 nt, Human
ccucgccguccccaccccuccg

SEQ ID NO: 372930 - RNA, 18 nt, Human
ccugcaaucucagcuacu

SEQ ID NO: 372931 - RNA, 21 nt, Human
ccugcaaucucagcuacuggg

SEQ ID NO: 372932 - RNA, 22 nt, Human
ccugcaaucucagcuacugggg

SEQ ID NO: 372933 - RNA, 18 nt, Human
ccuggccaacauggugua

SEQ ID NO: 372934 - RNA, 23 nt, Human
ccuggccaacaugguguaacccc

SEQ ID NO: 372935 - RNA, 24 nt, Human
ccuggccaacaugguguaaccccg

SEQ ID NO: 372936 - RNA, 21 nt, Human
ccugggagguggagguugcag

SEQ ID NO: 372937 - RNA, 20 nt, Human
ccuguaauuacaagaccagg

SEQ ID NO: 372938 - RNA, 24 nt, Human
cgagaccagccuggccaacauggu

SEQ ID NO: 372939 - RNA, 21 nt, Human
cgagacuccaacucaaaaaaa

SEQ ID NO: 372940 - RNA, 24 nt, Human
cggagcggagcgccggccuccacc

SEQ ID NO: 372941 - RNA, 24 nt, Human
cggguggaucacuugaggucagga

SEQ ID NO: 372942 - RNA, 24 nt, Human
cucaugccuguaaucucagcacuu

SEQ ID NO: 372943 - RNA, 20 nt, Human
cuccgcccgccgccgccucg

SEQ ID NO: 372944 - RNA, 22 nt, Human
cuccggcccagccuccgcccgc

SEQ ID NO: 372945 - RNA, 22 nt, Human
cuccucgccguccccaccccuc

SEQ ID NO: 372946 - RNA, 23 nt, Human
cuccucgccguccccaccccucc

SEQ ID NO: 372947 - RNA, 24 nt, Human
cugcuugaaccugggagguggagg

SEQ ID NO: 372948 - RNA, 23 nt, Human
cugggcgacacagcgagacucca

SEQ ID NO: 372949 - RNA, 19 nt, Human
cuugaaccugggaggugga

SEQ ID NO: 372950 - RNA, 24 nt, Human
gacuccaacucaaaaaaaccccaa

SEQ ID NO: 372951 - RNA, 23 nt, Human
gagacuccaacucaaaaaaaccc

SEQ ID NO: 372952 - RNA, 19 nt, Human
gagguagggccaggccccc

SEQ ID NO: 372953 - RNA, 24 nt, Human
gaucacuugaggucaggaguucga

SEQ ID NO: 372954 - RNA, 22 nt, Human
gccaacaugguguaaccccguc

SEQ ID NO: 372955 - RNA, 22 nt, Human
gccgggcguagugacucaugcc

SEQ ID NO: 372956 - RNA, 19 nt, Human
ggagaaggggcuggcagug

SEQ ID NO: 372957 - RNA, 23 nt, Human
ggagguagggccaggcccugggg

SEQ ID NO: 372958 - RNA, 18 nt, Human
ggagguugcagugagccg

SEQ ID NO: 372959 - RNA, 22 nt, Human
ggaucacuugaggucaggaguu

SEQ ID NO: 372960 - RNA, 22 nt, Human
ggccgggcguagugacucaugg

SEQ ID NO: 372961 - RNA, 24 nt, Human
gggcguagugacucaugccuguaa

SEQ ID NO: 372962 - RNA, 24 nt, Human
gggcgugguggcaugugccugcaa

SEQ ID NO: 372963 - RNA, 22 nt, Human
uagcugggcgugguggcaugug

SEQ ID NO: 372964 - RNA, 24 nt, Human
uagugacucaugccuguaaucuca

SEQ ID NO: 372965 - RNA, 20 nt, Human
ucaaaaaaaccccaaaaaga

SEQ ID NO: 372966 - RNA, 22 nt, Human
ucaaaaaaaccccaaaaagaca

SEQ ID NO: 372967 - RNA, 21 nt, Human
ucacacaucaagacagacaga

SEQ ID NO: 372968 - RNA, 20 nt, Human
ucacuugaggucaggaguuc

SEQ ID NO: 372969 - RNA, 20 nt, Human
ucagaagugugaguccugga

SEQ ID NO: 372970 - RNA, 22 nt, Human
uccaacaaauuuuauuuaugga

SEQ ID NO: 372971 - RNA, 21 nt, Human
uccaccuccucgccgucccca

SEQ ID NO: 372972 - RNA, 22 nt, Human
uccaccuccucgccguccccac

SEQ ID NO: 372973 - RNA, 19 nt, Human
uccuggauuccaagguggc

SEQ ID NO: 372974 - RNA, 21 nt, Human
ucgccguccccaccccuccgg

SEQ ID NO: 372975 - RNA, 22 nt, Human
ugaaaauacaaaauauuagcug

SEQ ID NO: 372976 - RNA, 24 nt, Human
ugaaccugggagguggagguugca

SEQ ID NO: 372977 - RNA, 21 nt, Human
ugacucaugccuguaaucuca

SEQ ID NO: 372978 - RNA, 22 nt, Human
ugacucaugccuguaaucucag

SEQ ID NO: 372979 - RNA, 24 nt, Human
ugacucaugccuguaaucucagca

SEQ ID NO: 372980 - RNA, 24 nt, Human
ugagacaggagaacugcuugaacc

SEQ ID NO: 372981 - RNA, 22 nt, Human
ugaggcggguggaucacuugag

SEQ ID NO: 372982 - RNA, 24 nt, Human
ugaggcggguggaucacuugaggu

SEQ ID NO: 372983 - RNA, 26 nt, Human
ugaggcggguggaucacuugagguca

SEQ ID NO: 372984 - RNA, 19 nt, Human
ugaguccuggauuccaagg

SEQ ID NO: 372985 - RNA, 22 nt, Human
ugcagugagccgcgaucccacc

SEQ ID NO: 372986 - RNA, 23 nt, Human
ugccuguaaucucagcacuuugg

SEQ ID NO: 372987 - RNA, 23 nt, Human
ugccuguaaucucagcacuuugg

SEQ ID NO: 372988 - RNA, 24 nt, Human
ugccuguaaucucagcacuuuggg

SEQ ID NO: 372989 - RNA, 26 nt, Human
ugcucacacaucaagacagacagaca

SEQ ID NO: 372990 - RNA, 24 nt, Human
uggaucacuugaggucaggaguuc

SEQ ID NO: 372991 - RNA, 27 nt, Human
uggaucacuugaggucaggaguucgag

SEQ ID NO: 372992 - RNA, 22 nt, Human
uggcaugugccugcaaucucag

SEQ ID NO: 372993 - RNA, 24 nt, Human
uggcaugugccugcaaucucagcu

SEQ ID NO: 372994 - RNA, 21 nt, Human
uggccaacaugguguaacccc

SEQ ID NO: 372995 - RNA, 24 nt, Human
ugggagacugaggcggguggauca

SEQ ID NO: 372996 - RNA, 18 nt, Human
ugggagguggagguugca

SEQ ID NO: 372997 - RNA, 29 nt, Human
ugggagguggagguugcagugacaacggu

SEQ ID NO: 372998 - RNA, 24 nt, Human
ugggagguggagguugcagugagc

SEQ ID NO: 372999 - RNA, 24 nt, Human
ugguggcaugugccugcaaucuca

SEQ ID NO: 373000 - RNA, 20 nt, Human
ugucacauauaaauuucacc

SEQ ID NO: 373001 - RNA, 20 nt, Human
ugugaguccuggauuccaag

SEQ ID NO: 373002 - RNA, 23 nt, Human
ugugccugcaaucucagcuacug

SEQ ID NO: 373003 - RNA, 19 nt, Human
uuagcugggcgugguggca

SEQ ID NO: 373004 - RNA, 20 nt, Human
uuagcugggcgugguggcau

SEQ ID NO: 373005 - RNA, 24 nt, Human
uuagcugggcgugguggcaugugc

SEQ ID NO: 373006 - RNA, 24 nt, Human
uugaaccugggagguggagguugc

SEQ ID NO: 373007 - RNA, 22 nt, Human
uugcagugagccgcgaucccac

SEQ ID NO: 373008 - RNA, 25 nt, Human
uugggagacugaggcggguggauca

SEQ ID NO: 373009 - RNA, 18 nt, Human
uugguccaguuaccuaca

SEQ ID NO: 373010 - RNA, 18 nt, Human
uuucucauucuuggucca

SEQ ID NO: 373011 - RNA, 24 nt, Human
aggucuucuuaacggcaacaaucu

SEQ ID NO: 373012 - RNA, 19 nt, Human
caaagagggucaggacaug

SEQ ID NO: 373013 - RNA, 20 nt, Human
cacccgaacgacugcgcgag

SEQ ID NO: 373014 - RNA, 21 nt, Human
ccacaguccacuuaauucaaa

SEQ ID NO: 373015 - RNA, 20 nt, Human
ccacauguaauucauaaaau

SEQ ID NO: 373016 - RNA, 24 nt, Human
gagugugugugugugugugugugg

SEQ ID NO: 373017 - RNA, 20 nt, Human
gugugugugugugugugugu

SEQ ID NO: 373018 - RNA, 21 nt, Human
gugugugugugugugugugug

SEQ ID NO: 373019 - RNA, 21 nt, Human
gugugugugugugugugugug

SEQ ID NO: 373020 - RNA, 19 nt, Human
uaacuggaacaacauccaa

SEQ ID NO: 373021 - RNA, 19 nt, Human
ugucaugccacaguccacu

SEQ ID NO: 373022 - RNA, 19 nt, Human
uguguauauaaaaccacau

SEQ ID NO: 373023 - RNA, 22 nt, Human
uguguauauaaaaccacaugua

SEQ ID NO: 373024 - RNA, 25 nt, Human
uguguguauauaaaaccacauguaa

SEQ ID NO: 373025 - RNA, 23 nt, Human
uguguguguauauaaaaccacau

SEQ ID NO: 373026 - RNA, 23 nt, Human
uguguguguauauaaaaccacau

SEQ ID NO: 373027 - RNA, 28 nt, Human
uguguguguauauaaaaccacauguaau

SEQ ID NO: 373028 - RNA, 25 nt, Human
uguguguguguauauaaaaccacau

SEQ ID NO: 373029 - RNA, 18 nt, Human
uguguguguguguguaua

SEQ ID NO: 373030 - RNA, 20 nt, Human
uguguguguguguguauaua

SEQ ID NO: 373031 - RNA, 18 nt, Human
ugugugugugugugugug

SEQ ID NO: 373032 - RNA, 18 nt, Human
ugugugugugugugugug

SEQ ID NO: 373033 - RNA, 18 nt, Human
ugugugugugugugugug

SEQ ID NO: 373034 - RNA, 18 nt, Human
ugugugugugugugugug

SEQ ID NO: 373035 - RNA, 18 nt, Human
ugugugugugugugugug

SEQ ID NO: 373036 - RNA, 18 nt, Human
ugugugugugugugugug

SEQ ID NO: 373037 - RNA, 18 nt, Human
ugugugugugugugugug

SEQ ID NO: 373038 - RNA, 18 nt, Human
ugugugugugugugugug

SEQ ID NO: 373039 - RNA, 18 nt, Human
ugugugugugugugugug

SEQ ID NO: 373040 - RNA, 24 nt, Human
uguguguguguguguguguauaua

SEQ ID NO: 373041 - RNA, 21 nt, Human
ugugugugugugugugugugu

SEQ ID NO: 373042 - RNA, 21 nt, Human
ugugugugugugugugugugu

SEQ ID NO: 373043 - RNA, 21 nt, Human
ugugugugugugugugugugu

SEQ ID NO: 373044 - RNA, 21 nt, Human
ugugugugugugugugugugu

SEQ ID NO: 373045 - RNA, 21 nt, Human
ugugugugugugugugugugu

SEQ ID NO: 373046 - RNA, 21 nt, Human
ugugugugugugugugugugu

SEQ ID NO: 373047 - RNA, 21 nt, Human
ugugugugugugugugugugu

SEQ ID NO: 373048 - RNA, 21 nt, Human
ugugugugugugugugugugu

SEQ ID NO: 373049 - RNA, 21 nt, Human
ugugugugugugugugugugu

SEQ ID NO: 373050 - RNA, 21 nt, Human
ugugugugugugugugugugu

SEQ ID NO: 373051 - RNA, 21 nt, Human
ugugugugugugugugugugu

SEQ ID NO: 373052 - RNA, 21 nt, Human
ugugugugugugugugugugu

SEQ ID NO: 373053 - RNA, 21 nt, Human
ugugugugugugugugugugu

SEQ ID NO: 373054 - RNA, 21 nt, Human
ugugugugugugugugugugu

SEQ ID NO: 373055 - RNA, 21 nt, Human
ugugugugugugugugugugu

SEQ ID NO: 373056 - RNA, 22 nt, Human
ugugugugugugugugugugua

SEQ ID NO: 373057 - RNA, 22 nt, Human
ugugugugugugugugugugug

SEQ ID NO: 373058 - RNA, 22 nt, Human
ugugugugugugugugugugug

SEQ ID NO: 373059 - RNA, 22 nt, Human
ugugugugugugugugugugug

SEQ ID NO: 373060 - RNA, 22 nt, Human
ugugugugugugugugugugug

SEQ ID NO: 373061 - RNA, 22 nt, Human
ugugugugugugugugugugug

SEQ ID NO: 373062 - RNA, 21 nt, Human
uucaaagagggucaggacaug

SEQ ID NO: 373063 - RNA, 19 nt, Human
aaacaagacgcaaaaacug

SEQ ID NO: 373064 - RNA, 24 nt, Human
aaacaagacgcaaaaacugugcaa

SEQ ID NO: 373065 - RNA, 19 nt, Human
aaagagcuauuuauauaga

SEQ ID NO: 373066 - RNA, 21 nt, Human
acaagacgcaaaaacugugca

SEQ ID NO: 373067 - RNA, 22 nt, Human
acaagacgcaaaaacugugcaa

SEQ ID NO: 373068 - RNA, 26 nt, Human
agaagcaaacaagacgcaaaaaccag

SEQ ID NO: 373069 - RNA, 25 nt, Human
augcauuuuaauuuuuauuugaaaa

SEQ ID NO: 373070 - RNA, 19 nt, Human
caagaaagagcuauuuaua

SEQ ID NO: 373071 - RNA, 21 nt, Human
caagaagcaaacaagacgcaa

SEQ ID NO: 373072 - RNA, 21 nt, Human
caagacgcaaaaacugugcaa

SEQ ID NO: 373073 - RNA, 22 nt, Human
cagcaugcuaaaaguuagaacu

SEQ ID NO: 373074 - RNA, 22 nt, Human
ccaaaacaaaacaaaacugagc

SEQ ID NO: 373075 - RNA, 25 nt, Human
ccaaaacaaaacaaaacugagcaua

SEQ ID NO: 373076 - RNA, 20 nt, Human
ccgccgcgggcucccuccuc

SEQ ID NO: 373077 - RNA, 18 nt, Human
uaaaacagcaagaaagag

SEQ ID NO: 373078 - RNA, 24 nt, Human
uaagaccaagccaguaacuuuagu

SEQ ID NO: 373079 - RNA, 18 nt, Human
uauuacaagccuggagga

SEQ ID NO: 373080 - RNA, 21 nt, Human
ucaacugccaaaacaaaacaa

SEQ ID NO: 373081 - RNA, 22 nt, Human
ucaacugccaaaacaaaacaaa

SEQ ID NO: 373082 - RNA, 24 nt, Human
uccuacacauaaauggggucaagu

SEQ ID NO: 373083 - RNA, 24 nt, Human
ucgcuguagcugcugccgccgccg

SEQ ID NO: 373084 - RNA, 21 nt, Human
ugaaggguauuacaagccugg

SEQ ID NO: 373085 - RNA, 20 nt, Human
ugagggauuuuuacuaaagc

SEQ ID NO: 373086 - RNA, 22 nt, Human
ugccaaaacaaaacaaaacuga

SEQ ID NO: 373087 - RNA, 22 nt, Human
ugcugccgccgccgcgggcucc

SEQ ID NO: 373088 - RNA, 22 nt, Human
uuaaaacagcaagaaagagcua

SEQ ID NO: 373089 - RNA, 24 nt, Human
uugcuuuuguuuuuauacagaaua

SEQ ID NO: 373090 - RNA, 21 nt, Human
uuugcauaucagaaaugcauu

SEQ ID NO: 373091 - RNA, 19 nt, Human
uuuuuuuuuuuuuuuugca

SEQ ID NO: 373092 - RNA, 18 nt, Human
uuuuuuuuuuuuuuuuug

SEQ ID NO: 373093 - RNA, 19 nt, Human
uuuuuuuuuuuuuuuuugc

SEQ ID NO: 373094 - RNA, 23 nt, Human
accacaauuaaguuaaagaaagg

SEQ ID NO: 373095 - RNA, 20 nt, Human
acuagguagugacuuaaauu

SEQ ID NO: 373096 - RNA, 24 nt, Human
caauuaaguuaaagaaaggcugaa

SEQ ID NO: 373097 - RNA, 25 nt, Human
cuagguagugacuuaaauuucuuuu

SEQ ID NO: 373098 - RNA, 22 nt, Human
guauauguuuauguauacuagg

SEQ ID NO: 373099 - RNA, 19 nt, Human
uaaguuaaagaaaggcuga

SEQ ID NO: 373100 - RNA, 23 nt, Human
ugacuuaaauuucuuuuauuuac

SEQ ID NO: 373101 - RNA, 21 nt, Human
uugaagagaaauucaauucac

SEQ ID NO: 373102 - RNA, 18 nt, Human
aaaaaaacaaacacccaa

SEQ ID NO: 373103 - RNA, 28 nt, Human
aaaaaaacaaacacccaaagacauacaa

SEQ ID NO: 373104 - RNA, 21 nt, Human
aaaaaaaggaggugcaaagag

SEQ ID NO: 373105 - RNA, 22 nt, Human
aaaacaaacacccaaagacaua

SEQ ID NO: 373106 - RNA, 23 nt, Human
aaacaaaaacacaaaccccaccu

SEQ ID NO: 373107 - RNA, 24 nt, Human
aaacaaaaacacaaaccccaccuu

SEQ ID NO: 373108 - RNA, 23 nt, Human
acaaacacccaaagacauacaac

SEQ ID NO: 373109 - RNA, 20 nt, Human
acaaaccccaccuucaguga

SEQ ID NO: 373110 - RNA, 18 nt, Human
acaccgcccucacccccc

SEQ ID NO: 373111 - RNA, 22 nt, Human
acagggcaaaacaaaaacacaa

SEQ ID NO: 373112 - RNA, 21 nt, Human
accgaccucaaguagcugaau

SEQ ID NO: 373113 - RNA, 22 nt, Human
accuguagauauuucucucccc

SEQ ID NO: 373114 - RNA, 20 nt, Human
agggcaaaacaaaaacacaa

SEQ ID NO: 373115 - RNA, 23 nt, Human
auacaacacaccgcccucacccc

SEQ ID NO: 373116 - RNA, 24 nt, Human
auaguacaaacaccagaugacuac

SEQ ID NO: 373117 - RNA, 19 nt, Human
caaaaacacaaaccccacc

SEQ ID NO: 373118 - RNA, 18 nt, Human
caaaacaaaaacacaaac

SEQ ID NO: 373119 - RNA, 24 nt, Human
caaaacaaaaacacaaaccccacc

SEQ ID NO: 373120 - RNA, 22 nt, Human
caacacaccgcccucacccccc

SEQ ID NO: 373121 - RNA, 19 nt, Human
caaguagcaagcaauaaua

SEQ ID NO: 373122 - RNA, 22 nt, Human
cacccaaagacauacaacacac

SEQ ID NO: 373123 - RNA, 20 nt, Human
caucuuauaaagcagaccac

SEQ ID NO: 373124 - RNA, 21 nt, Human
ccagaugacuaccaguggagu

SEQ ID NO: 373125 - RNA, 18 nt, Human
cccaaagacauacaacac

SEQ ID NO: 373126 - RNA, 23 nt, Human
ccccagcggccauuagggagggg

SEQ ID NO: 373127 - RNA, 20 nt, Human
ccgccgccgccgccgccugg

SEQ ID NO: 373128 - RNA, 19 nt, Human
ccgccgccgccgccugggc

SEQ ID NO: 373129 - RNA, 18 nt, Human
ccgccgccgccugggcgc

SEQ ID NO: 373130 - RNA, 20 nt, Human
gaccacauuauuuguuucca

SEQ ID NO: 373131 - RNA, 22 nt, Human
gcaaaacaaaaacacaaacccc

SEQ ID NO: 373132 - RNA, 22 nt, Human
gcccucaccccccagcggccau

SEQ ID NO: 373133 - RNA, 20 nt, Human
gcgggacucgagcaggggcc

SEQ ID NO: 373134 - RNA, 22 nt, Human
ggcaaaacaaaaacacaaaccc

SEQ ID NO: 373135 - RNA, 22 nt, Human
gugcgaggaaagaagaagcugg

SEQ ID NO: 373136 - RNA, 19 nt, Human
uaaaaaaacaaacacccaa

SEQ ID NO: 373137 - RNA, 19 nt, Human
uaaaaaaacaaacacccaa

SEQ ID NO: 373138 - RNA, 20 nt, Human
uaaaaaaacaaacacccaaa

SEQ ID NO: 373139 - RNA, 21 nt, Human
uaaaaaaacaaacacccaaag

SEQ ID NO: 373140 - RNA, 23 nt, Human
uaaaaaaacaaacacccaaagac

SEQ ID NO: 373141 - RNA, 24 nt, Human
uaaaaaaacaaacacccaaagaca

SEQ ID NO: 373142 - RNA, 19 nt, Human
uaacagggcaaaacaaaaa

SEQ ID NO: 373143 - RNA, 24 nt, Human
uagcaagcaauaauauuuuuaaac

SEQ ID NO: 373144 - RNA, 25 nt, Human
uagcugaaucaccugcuguaacugg

SEQ ID NO: 373145 - RNA, 19 nt, Human
uagggacaugggccaggug

SEQ ID NO: 373146 - RNA, 18 nt, Human
uccuacacccuuucuuag

SEQ ID NO: 373147 - RNA, 24 nt, Human
ucucgacuaaaaaaaggaggugca

SEQ ID NO: 373148 - RNA, 19 nt, Human
ugagauuuucuugcuguug

SEQ ID NO: 373149 - RNA, 25 nt, Human
ugcuuggcuuucuuucacauucauu

SEQ ID NO: 373150 - RNA, 20 nt, Human
uguccuacacccuuucuuag

SEQ ID NO: 373151 - RNA, 27 nt, Human
uuuucuugcuguuguuauaguacaaac

SEQ ID NO: 373152 - RNA, 18 nt, Human
aaaaaagaaaaacuaaga

SEQ ID NO: 373153 - RNA, 24 nt, Human
aaaaagaaaaacuaagaccugcac

SEQ ID NO: 373154 - RNA, 23 nt, Human
aaaagauaguggaaaaauccaac

SEQ ID NO: 373155 - RNA, 25 nt, Human
aaacaaaaauaaaauuugaaggaag

SEQ ID NO: 373156 - RNA, 22 nt, Human
aaagagacgaaacgcugaccag

SEQ ID NO: 373157 - RNA, 19 nt, Human
aaagcauaauacaggagua

SEQ ID NO: 373158 - RNA, 19 nt, Human
aaccugccucuguccgauu

SEQ ID NO: 373159 - RNA, 22 nt, Human
aaccugccucuguccgauucca

SEQ ID NO: 373160 - RNA, 19 nt, Human
aagagacgaaacgcugacc

SEQ ID NO: 373161 - RNA, 21 nt, Human
aauguccaccugcagagcagc

SEQ ID NO: 373162 - RNA, 20 nt, Human
acaaaggaaucaugaagcca

SEQ ID NO: 373163 - RNA, 19 nt, Human
acagcacuggggaacaugu

SEQ ID NO: 373164 - RNA, 20 nt, Human
acauaccaaucuauccacuc

SEQ ID NO: 373165 - RNA, 27 nt, Human
accacaacagacuguacucugcuccug

SEQ ID NO: 373166 - RNA, 19 nt, Human
acccuucuccuucaccaag

SEQ ID NO: 373167 - RNA, 19 nt, Human
acccuucuccuucaccaag

SEQ ID NO: 373168 - RNA, 20 nt, Human
acuaaugcauuugcuuuucu

SEQ ID NO: 373169 - RNA, 23 nt, Human
agaccaagaacgggcgcucagga

SEQ ID NO: 373170 - RNA, 18 nt, Human
agagugauacaaugacca

SEQ ID NO: 373171 - RNA, 20 nt, Human
aggaaaauguaaacaaacua

SEQ ID NO: 373172 - RNA, 23 nt, Human
aggcagcccuuuuuaacaggaag

SEQ ID NO: 373173 - RNA, 18 nt, Human
aguggcagccauaaggaa

SEQ ID NO: 373174 - RNA, 19 nt, Human
aucacuuugaagaucuaca

SEQ ID NO: 373175 - RNA, 24 nt, Human
auuucaaaagaaaugagaaaaaag

SEQ ID NO: 373176 - RNA, 25 nt, Human
caaaaucaggucuugguggugcugg

SEQ ID NO: 373177 - RNA, 19 nt, Human
caagcaaaccugcccuggg

SEQ ID NO: 373178 - RNA, 22 nt, Human
cacaacaccccugugagguagg

SEQ ID NO: 373179 - RNA, 18 nt, Human
cacacagacuggcaucgc

SEQ ID NO: 373180 - RNA, 19 nt, Human
cagaaauguccaccugcag

SEQ ID NO: 373181 - RNA, 19 nt, Human
cagacuguacucugcuccu

SEQ ID NO: 373182 - RNA, 24 nt, Human
cauacuuauaaagauuacauaaaa

SEQ ID NO: 373183 - RNA, 19 nt, Human
cauguugccgaacaacuga

SEQ ID NO: 373184 - RNA, 21 nt, Human
ccaaccacgcaaccuuaacuu

SEQ ID NO: 373185 - RNA, 18 nt, Human
ccaccgcgcucccgggac

SEQ ID NO: 373186 - RNA, 20 nt, Human
ccaccgcgcucccgggacuc

SEQ ID NO: 373187 - RNA, 21 nt, Human
ccagagugauacaaugaccau

SEQ ID NO: 373188 - RNA, 22 nt, Human
ccccgcgcccgccccgcgcccg

SEQ ID NO: 373189 - RNA, 24 nt, Human
cccgcugcccccaccgcgcucccg

SEQ ID NO: 373190 - RNA, 20 nt, Human
cccugggccacagagcagca

SEQ ID NO: 373191 - RNA, 18 nt, Human
ccgccccgcgcccgcugc

SEQ ID NO: 373192 - RNA, 19 nt, Human
ccgccccgcgcccgcugcc

SEQ ID NO: 373193 - RNA, 20 nt, Human
ccgccccgcgcccgcugccc

SEQ ID NO: 373194 - RNA, 28 nt, Human
ccgcgcccgcugcccccaccgcgcuccc

SEQ ID NO: 373195 - RNA, 21 nt, Human
ccgcgcucccgggacucggcg

SEQ ID NO: 373196 - RNA, 18 nt, Human
ccgcugcccccaccgcgc

SEQ ID NO: 373197 - RNA, 18 nt, Human
ccgcugcccccaccgcgc

SEQ ID NO: 373198 - RNA, 19 nt, Human
ccgcugcccccaccgcgcu

SEQ ID NO: 373199 - RNA, 21 nt, Human
ccgcugcccccaccgcgcucc

SEQ ID NO: 373200 - RNA, 19 nt, Human
cgcacucagccagcaacgg

SEQ ID NO: 373201 - RNA, 19 nt, Human
cggcugaggaaguguggaa

SEQ ID NO: 373202 - RNA, 22 nt, Human
cucgcauaacuacuaaguggcu

SEQ ID NO: 373203 - RNA, 24 nt, Human
cucucgguccagcauucauccacu

SEQ ID NO: 373204 - RNA, 20 nt, Human
cuggcaucgccugggcgugc

SEQ ID NO: 373205 - RNA, 19 nt, Human
cuuuaaguccgcgguccuc

SEQ ID NO: 373206 - RNA, 21 nt, Human
gaaauguccaccugcagagca

SEQ ID NO: 373207 - RNA, 22 nt, Human
gaacacagugcggcaucacggc

SEQ ID NO: 373208 - RNA, 22 nt, Human
gacaggcuggcgcgguccggac

SEQ ID NO: 373209 - RNA, 23 nt, Human
gacaggcuggcgcgguccggacc

SEQ ID NO: 373210 - RNA, 19 nt, Human
gagaugggggagacacaaa

SEQ ID NO: 373211 - RNA, 24 nt, Human
gcagaugaagggccuagaccugga

SEQ ID NO: 373212 - RNA, 27 nt, Human
gcaucagaaauguccaccugcagagca

SEQ ID NO: 373213 - RNA, 23 nt, Human
gccccgcgcccgcugcccccacc

SEQ ID NO: 373214 - RNA, 24 nt, Human
gcgguccccgcgcccgccccgcgc

SEQ ID NO: 373215 - RNA, 21 nt, Human
ggaaggcagcccuuuuuaaca

SEQ ID NO: 373216 - RNA, 23 nt, Human
ggacaaaacgcacucagccagca

SEQ ID NO: 373217 - RNA, 23 nt, Human
uaaacuaggaaugacaauaaugu

SEQ ID NO: 373218 - RNA, 22 nt, Human
uagaccuggauccagaagcuag

SEQ ID NO: 373219 - RNA, 22 nt, Human
uagagucgagaacugaggcaga

SEQ ID NO: 373220 - RNA, 22 nt, Human
uaggcgcggaauccgggaaacc

SEQ ID NO: 373221 - RNA, 21 nt, Human
uauguccuuuagagucgagaa

SEQ ID NO: 373222 - RNA, 23 nt, Human
uauucugcuuuucuuuccccaca

SEQ ID NO: 373223 - RNA, 21 nt, Human
ucaggaaaauguaaacaaacu

SEQ ID NO: 373224 - RNA, 21 nt, Human
ucaggaauaacugucacuaac

SEQ ID NO: 373225 - RNA, 18 nt, Human
ucaggucuugguggugcu

SEQ ID NO: 373226 - RNA, 19 nt, Human
uccagugagcauaaaugcu

SEQ ID NO: 373227 - RNA, 26 nt, Human
uccauguuucucagaaaaagaggagu

SEQ ID NO: 373228 - RNA, 30 nt, Human
uccccgcgcccgccccgcgcccgcugcccu

SEQ ID NO: 373229 - RNA, 22 nt, Human
uccgggccgucguccaggccuu

SEQ ID NO: 373230 - RNA, 19 nt, Human
ucuacauaccaaucuaucc

SEQ ID NO: 373231 - RNA, 22 nt, Human
ucucaugcuuaauuggcugagc

SEQ ID NO: 373232 - RNA, 23 nt, Human
ugaaaagguuaaauuucagaaau

SEQ ID NO: 373233 - RNA, 19 nt, Human
ugaaggaaggcagcccuuu

SEQ ID NO: 373234 - RNA, 25 nt, Human
ugacaggcuggcgcgguccggaccc

SEQ ID NO: 373235 - RNA, 18 nt, Human
ugaccagcucaugaauga

SEQ ID NO: 373236 - RNA, 20 nt, Human
ugagaaaaaagaaaaacuaa

SEQ ID NO: 373237 - RNA, 21 nt, Human
ugaggcaagacaacaugcggc

SEQ ID NO: 373238 - RNA, 23 nt, Human
ugaggcagaggucaagcaaaccu

SEQ ID NO: 373239 - RNA, 26 nt, Human
ugaggcagaggucaagcaaaccugcc

SEQ ID NO: 373240 - RNA, 21 nt, Human
ugagguaggucaguauguccc

SEQ ID NO: 373241 - RNA, 23 nt, Human
ugcccccaccgcgcucccgggac

SEQ ID NO: 373242 - RNA, 21 nt, Human
ugcccugggccacagagcagc

SEQ ID NO: 373243 - RNA, 18 nt, Human
uggaaaaauccaaccacg

SEQ ID NO: 373244 - RNA, 24 nt, Human
uggcaucgccugggcgugcgcugc

SEQ ID NO: 373245 - RNA, 24 nt, Human
uggggaacacagugcggcaucacg

SEQ ID NO: 373246 - RNA, 22 nt, Human
ugucccaaaacgucuaagaaau

SEQ ID NO: 373247 - RNA, 22 nt, Human
uuaaagagacgaaacgcugacc

SEQ ID NO: 373248 - RNA, 22 nt, Human
uucauccacugguggacaucac

SEQ ID NO: 373249 - RNA, 24 nt, Human
uucgagaugccauuucaaaagaaa

SEQ ID NO: 373250 - RNA, 21 nt, Human
uucuaugaaguacacacagag

SEQ ID NO: 373251 - RNA, 19 nt, Human
uugguggacuuuguucgag

SEQ ID NO: 373252 - RNA, 19 nt, Human
uuucaacaaugcauucuga

SEQ ID NO: 373253 - RNA, 23 nt, Human
uuucaggaauaacugucacuaac

SEQ ID NO: 373254 - RNA, 24 nt, Human
uuuuuuuuuuuuuuuuuuccaaag

SEQ ID NO: 373255 - RNA, 23 nt, Human
aaaaaugaaagcagcgggaggga

SEQ ID NO: 373256 - RNA, 22 nt, Human
aaaaguacuuaacaacaacaac

SEQ ID NO: 373257 - RNA, 18 nt, Human
aaacauuaacaaaaaccc

SEQ ID NO: 373258 - RNA, 22 nt, Human
aaagcagcgggagggaacgcgg

SEQ ID NO: 373259 - RNA, 22 nt, Human
aagaaaaaucaaguggggagaa

SEQ ID NO: 373260 - RNA, 24 nt, Human
aagcagcgggagggaacgcgguaa

SEQ ID NO: 373261 - RNA, 22 nt, Human
aagcgcuggaagugcuggugcu

SEQ ID NO: 373262 - RNA, 27 nt, Human
aauaauaggggaaaaaaagggagggcc

SEQ ID NO: 373263 - RNA, 24 nt, Human
aaucauuaaaaaucaaaacaucaa

SEQ ID NO: 373264 - RNA, 24 nt, Human
aaugaacaaaagaccaucccuaaa

SEQ ID NO: 373265 - RNA, 20 nt, Human
acaacaaaaaucacacacaa

SEQ ID NO: 373266 - RNA, 22 nt, Human
acaacaacaacaaaaaucacac

SEQ ID NO: 373267 - RNA, 28 nt, Human
acaacaacaacaaaaaucacacacaaag

SEQ ID NO: 373268 - RNA, 22 nt, Human
agaaauaggauuuggggaagaa

SEQ ID NO: 373269 - RNA, 22 nt, Human
agaagaaaaaucaaguggggag

SEQ ID NO: 373270 - RNA, 18 nt, Human
agagcgccggggacucug

SEQ ID NO: 373271 - RNA, 22 nt, Human
agccacaaaauucucuacaaag

SEQ ID NO: 373272 - RNA, 25 nt, Human
agccacaaaauucucuacaaagucc

SEQ ID NO: 373273 - RNA, 18 nt, Human
aggaaggaagugcaaaga

SEQ ID NO: 373274 - RNA, 19 nt, Human
aguacuuaacaacaacaac

SEQ ID NO: 373275 - RNA, 18 nt, Human
agucaggaagggcgcugg

SEQ ID NO: 373276 - RNA, 22 nt, Human
augaaacauuaacaaaaacccg

SEQ ID NO: 373277 - RNA, 19 nt, Human
auggcauaaaacaugccuu

SEQ ID NO: 373278 - RNA, 21 nt, Human
auugccccaagucaggagaaa

SEQ ID NO: 373279 - RNA, 24 nt, Human
caaaaaguguuuugaaaaagugau

SEQ ID NO: 373280 - RNA, 24 nt, Human
caaacauagauauuuuuuauucug

SEQ ID NO: 373281 - RNA, 19 nt, Human
caaagucccucaauucuuc

SEQ ID NO: 373282 - RNA, 24 nt, Human
caagccaagcagugugccguggcc

SEQ ID NO: 373283 - RNA, 21 nt, Human
cacacacccacgauggcacua

SEQ ID NO: 373284 - RNA, 19 nt, Human
cacccacgauggcacuagu

SEQ ID NO: 373285 - RNA, 19 nt, Human
cacugcugaggcugcagcc

SEQ ID NO: 373286 - RNA, 25 nt, Human
cagaaacacccugugugaaguuucg

SEQ ID NO: 373287 - RNA, 18 nt, Human
cagaagaaauaggauuug

SEQ ID NO: 373288 - RNA, 23 nt, Human
caggcugugggguccccuggagg

SEQ ID NO: 373289 - RNA, 21 nt, Human
ccaggcaucaaaucccgugga

SEQ ID NO: 373290 - RNA, 24 nt, Human
ccaggcugugggguccccuggagg

SEQ ID NO: 373291 - RNA, 22 nt, Human
ccaggggcccccagcguccucc

SEQ ID NO: 373292 - RNA, 22 nt, Human
ccagucaaauccaaauauccga

SEQ ID NO: 373293 - RNA, 19 nt, Human
cccaccugcccacacaccc

SEQ ID NO: 373294 - RNA, 26 nt, Human
ccccaggggcccccagcguccucccu

SEQ ID NO: 373295 - RNA, 19 nt, Human
cccccaggcccucccgaac

SEQ ID NO: 373296 - RNA, 32 nt, Human
cccccaggcccucccgaacacaggccuccggu

SEQ ID NO: 373297 - RNA, 22 nt, Human
cccgugauauugaagaacaaga

SEQ ID NO: 373298 - RNA, 18 nt, Human
cccgugccaucuccauuu

SEQ ID NO: 373299 - RNA, 18 nt, Human
cccucccgaacacaggcc

SEQ ID NO: 373300 - RNA, 23 nt, Human
ccgcgcaggcaaaggcaagggcu

SEQ ID NO: 373301 - RNA, 19 nt, Human
ccgcuccuccgccucggcc

SEQ ID NO: 373302 - RNA, 22 nt, Human
ccggcgcggcggccgcuccucc

SEQ ID NO: 373303 - RNA, 19 nt, Human
ccggggacucuguacacug

SEQ ID NO: 373304 - RNA, 20 nt, Human
ccuccgcacagccacucacc

SEQ ID NO: 373305 - RNA, 21 nt, Human
ccuccgcacagccacucaccc

SEQ ID NO: 373306 - RNA, 26 nt, Human
ccuccuucccccaggcccucccgaac

SEQ ID NO: 373307 - RNA, 19 nt, Human
cuccgcacagccacucacc

SEQ ID NO: 373308 - RNA, 18 nt, Human
cucugaggagcccgugcc

SEQ ID NO: 373309 - RNA, 20 nt, Human
cugcagcccuucucaguccc

SEQ ID NO: 373310 - RNA, 22 nt, Human
cugccaggcugugggguccccu

SEQ ID NO: 373311 - RNA, 22 nt, Human
cuuucucuccaaccucagagcg

SEQ ID NO: 373312 - RNA, 18 nt, Human
gaacaaaagaccaucccu

SEQ ID NO: 373313 - RNA, 23 nt, Human
gacaccaacuggccaugaacccc

SEQ ID NO: 373314 - RNA, 19 nt, Human
gaccaucccuaaauaacug

SEQ ID NO: 373315 - RNA, 21 nt, Human
gagacgguggcugccaguguu

SEQ ID NO: 373316 - RNA, 18 nt, Human
gagcagcacaucagaaau

SEQ ID NO: 373317 - RNA, 19 nt, Human
gcaaaggcaagggcgaggg

SEQ ID NO: 373318 - RNA, 19 nt, Human
gccagagacgccggggugc

SEQ ID NO: 373319 - RNA, 19 nt, Human
gcccaccugcccacacacc

SEQ ID NO: 373320 - RNA, 20 nt, Human
gccccagaggacugaaagga

SEQ ID NO: 373321 - RNA, 27 nt, Human
gcccuccuucccccaggcccucccgaa

SEQ ID NO: 373322 - RNA, 20 nt, Human
gccguggccacagcagcgcu

SEQ ID NO: 373323 - RNA, 19 nt, Human
ggaaaaaaguuuugaauug

SEQ ID NO: 373324 - RNA, 21 nt, Human
ggagggacaugggauggccca

SEQ ID NO: 373325 - RNA, 22 nt, Human
ggccagagacgccggggugcug

SEQ ID NO: 373326 - RNA, 22 nt, Human
ggccagagacgccggggugcug

SEQ ID NO: 373327 - RNA, 18 nt, Human
ggcgggucccccggcccg

SEQ ID NO: 373328 - RNA, 19 nt, Human
gggcccccagcguccuccc

SEQ ID NO: 373329 - RNA, 18 nt, Human
gguaagaacuggaagauu

SEQ ID NO: 373330 - RNA, 23 nt, Human
guacuuaacaacaacaacaaaaa

SEQ ID NO: 373331 - RNA, 19 nt, Human
gugcaugugacuccccgga

SEQ ID NO: 373332 - RNA, 21 nt, Human
uaaaauaucaguggggagaaa

SEQ ID NO: 373333 - RNA, 22 nt, Human
uaaaugcaguuuuuugcaacuc

SEQ ID NO: 373334 - RNA, 31 nt, Human
uaacaacaacaacaaaaaucacacacaaagg

SEQ ID NO: 373335 - RNA, 21 nt, Human
uaagagcagcacaucagaaau

SEQ ID NO: 373336 - RNA, 21 nt, Human
uaauggggagcuaaccugugc

SEQ ID NO: 373337 - RNA, 22 nt, Human
uaccuggaccauuuucagcagc

SEQ ID NO: 373338 - RNA, 23 nt, Human
ucacacacaaaguccaaaaagug

SEQ ID NO: 373339 - RNA, 21 nt, Human
ucaguggggagaaaccccuca

SEQ ID NO: 373340 - RNA, 23 nt, Human
ucccggaccgcaacacuugaccu

SEQ ID NO: 373341 - RNA, 23 nt, Human
ucccucaaugacaggagccccag

SEQ ID NO: 373342 - RNA, 20 nt, Human
uccgcacagccacucacccg

SEQ ID NO: 373343 - RNA, 20 nt, Human
ucuguucuuucucuccaacc

SEQ ID NO: 373344 - RNA, 18 nt, Human
ugaaaaagugauuugaga

SEQ ID NO: 373345 - RNA, 21 nt, Human
ugaaaugaugaauucauguca

SEQ ID NO: 373346 - RNA, 19 nt, Human
ugacggugugccaaggucc

SEQ ID NO: 373347 - RNA, 24 nt, Human
ugacggugugccaagguccuguuu

SEQ ID NO: 373348 - RNA, 18 nt, Human
ugaggacauggguggcca

SEQ ID NO: 373349 - RNA, 25 nt, Human
ugauuugagaauuuacuguacaguu

SEQ ID NO: 373350 - RNA, 19 nt, Human
ugccauguugccacuugaa

SEQ ID NO: 373351 - RNA, 24 nt, Human
ugccucacaccagucaaauccaaa

SEQ ID NO: 373352 - RNA, 22 nt, Human
ugcggaaaugaacaaaagacca

SEQ ID NO: 373353 - RNA, 20 nt, Human
uggaagauugugggagacuu

SEQ ID NO: 373354 - RNA, 23 nt, Human
uggaagugcuggugcucagaaac

SEQ ID NO: 373355 - RNA, 19 nt, Human
uggaauaaaaaguacuuaa

SEQ ID NO: 373356 - RNA, 21 nt, Human
ugggagacgggagcgcuccuc

SEQ ID NO: 373357 - RNA, 26 nt, Human
ugggugcccuccuucccccaggcccu

SEQ ID NO: 373358 - RNA, 18 nt, Human
ugucagaagaaauaggau

SEQ ID NO: 373359 - RNA, 19 nt, Human
ugucagaagaaauaggauu

SEQ ID NO: 373360 - RNA, 23 nt, Human
uguggcagugaaaggcguaacga

SEQ ID NO: 373361 - RNA, 19 nt, Human
ugugugaaguuucggaugu

SEQ ID NO: 373362 - RNA, 24 nt, Human
uuaacaaaaacccgugauauugaa

SEQ ID NO: 373363 - RNA, 21 nt, Human
uuaugauacgcuucccggacc

SEQ ID NO: 373364 - RNA, 22 nt, Human
uucauggcauaaaacaugccuu

SEQ ID NO: 373365 - RNA, 19 nt, Human
uucauuggcaacuucccag

SEQ ID NO: 373366 - RNA, 25 nt, Human
uucucagucccuacacuuuuccauc

SEQ ID NO: 373367 - RNA, 20 nt, Human
uucucuacaaagucccucaa

SEQ ID NO: 373368 - RNA, 24 nt, Human
uugaagaacaagauguucucauau

SEQ ID NO: 373369 - RNA, 20 nt, Human
uuggcaacuucccagguggu

SEQ ID NO: 373370 - RNA, 20 nt, Human
uugguuuuguuuccuuuuuu

SEQ ID NO: 373371 - RNA, 18 nt, Human
uuucacauucccucugcu

SEQ ID NO: 373372 - RNA, 19 nt, Human
uuuuuuauucuggcauagu

SEQ ID NO: 373373 - RNA, 25 nt, Human
aaaaauccaaaguggcauaguggga

SEQ ID NO: 373374 - RNA, 26 nt, Human
aaaagaaaaauaaaauauuaaaagaa

SEQ ID NO: 373375 - RNA, 25 nt, Human
aaccauuugucaucuaccuugucuu

SEQ ID NO: 373376 - RNA, 22 nt, Human
aaccccacaauuacuuuagcac

SEQ ID NO: 373377 - RNA, 20 nt, Human
aagaaaacaaaaaaaaguca

SEQ ID NO: 373378 - RNA, 20 nt, Human
acaagagggaaaagcacagu

SEQ ID NO: 373379 - RNA, 24 nt, Human
accaaauuucaaaugugccuggau

SEQ ID NO: 373380 - RNA, 24 nt, Human
agcuaauacagaaaaaccccacaa

SEQ ID NO: 373381 - RNA, 20 nt, Human
auuguggaauuuccccaaag

SEQ ID NO: 373382 - RNA, 23 nt, Human
auuuagggcagagauuuuauuuu

SEQ ID NO: 373383 - RNA, 25 nt, Human
cagaaaaaccccacaauuacuuuag

SEQ ID NO: 373384 - RNA, 19 nt, Human
cagcaggaaguuucuucug

SEQ ID NO: 373385 - RNA, 24 nt, Human
cagcaggaaguuucuucugggccg

SEQ ID NO: 373386 - RNA, 24 nt, Human
cagcuuuacugaagaauaucaaac

SEQ ID NO: 373387 - RNA, 21 nt, Human
caggaaguuucuucugggcac

SEQ ID NO: 373388 - RNA, 18 nt, Human
cauauuaagcuucuauua

SEQ ID NO: 373389 - RNA, 20 nt, Human
ccaaacaccugguuaaaaau

SEQ ID NO: 373390 - RNA, 20 nt, Human
ccagcaggaaguuucuucug

SEQ ID NO: 373391 - RNA, 19 nt, Human
ccccaaaguaacagcucag

SEQ ID NO: 373392 - RNA, 18 nt, Human
ccugaauacugagcucca

SEQ ID NO: 373393 - RNA, 18 nt, Human
cuaaagaaaacaaaaaaa

SEQ ID NO: 373394 - RNA, 22 nt, Human
cuaaguuaauucugaagauagg

SEQ ID NO: 373395 - RNA, 21 nt, Human
cuuccaaugagaaaggaacaa

SEQ ID NO: 373396 - RNA, 24 nt, Human
gaaaaauccaaaguggcauaaaaa

SEQ ID NO: 373397 - RNA, 23 nt, Human
gaauuuccccaaaguaacagcuc

SEQ ID NO: 373398 - RNA, 21 nt, Human
guaaaaacaaaaaccaaacac

SEQ ID NO: 373399 - RNA, 18 nt, Human
guauaaauuaaggaaaga

SEQ ID NO: 373400 - RNA, 20 nt, Human
uaaaagggcuaaguagaagc

SEQ ID NO: 373401 - RNA, 21 nt, Human
uaaaagggcuaaguagaagca

SEQ ID NO: 373402 - RNA, 24 nt, Human
uaaaauaaaaauacaccaaguuug

SEQ ID NO: 373403 - RNA, 23 nt, Human
uaaagaaaacaaaaaaaagucaa

SEQ ID NO: 373404 - RNA, 24 nt, Human
uaacaaaauauuuuacauguagga

SEQ ID NO: 373405 - RNA, 18 nt, Human
uaaccauuugucaucuac

SEQ ID NO: 373406 - RNA, 21 nt, Human
uaagcuaauacagaaaaaccc

SEQ ID NO: 373407 - RNA, 21 nt, Human
uaaguagaagcaacaguucaa

SEQ ID NO: 373408 - RNA, 20 nt, Human
uaaguuacaaaagucaauaa

SEQ ID NO: 373409 - RNA, 20 nt, Human
uagaaaaauccaaaguggca

SEQ ID NO: 373410 - RNA, 18 nt, Human
uagacacaagagggaaaa

SEQ ID NO: 373411 - RNA, 23 nt, Human
uaguacaugaaaaagagauguug

SEQ ID NO: 373412 - RNA, 18 nt, Human
uauaauacuacuaauggc

SEQ ID NO: 373413 - RNA, 18 nt, Human
uauuucuggaaucuuuau

SEQ ID NO: 373414 - RNA, 23 nt, Human
ucauguagcugucaaaaggcuuu

SEQ ID NO: 373415 - RNA, 19 nt, Human
ucuucugggcacuuucugg

SEQ ID NO: 373416 - RNA, 19 nt, Human
ugaaaaacuacuuagguac

SEQ ID NO: 373417 - RNA, 23 nt, Human
ugaaaaacuacuuagguacucuu

SEQ ID NO: 373418 - RNA, 19 nt, Human
ugaaaaagagauguuggaa

SEQ ID NO: 373419 - RNA, 21 nt, Human
ugaaaaagagauguuggaagg

SEQ ID NO: 373420 - RNA, 22 nt, Human
ugaagaauaucaaacucaauga

SEQ ID NO: 373421 - RNA, 24 nt, Human
ugaagaauaucaaacucaaugaaa

SEQ ID NO: 373422 - RNA, 19 nt, Human
ugaagaugguuuagcucuu

SEQ ID NO: 373423 - RNA, 21 nt, Human
ugagaaaggaacaagauuuau

SEQ ID NO: 373424 - RNA, 21 nt, Human
uggacaccacugccuuuguag

SEQ ID NO: 373425 - RNA, 26 nt, Human
uggacaccacugccuuuguagaaaaa

SEQ ID NO: 373426 - RNA, 26 nt, Human
uggaucauguauaaauuaguuaaaga

SEQ ID NO: 373427 - RNA, 26 nt, Human
uggaucuuguagaucaaaaacaguau

SEQ ID NO: 373428 - RNA, 21 nt, Human
uguagcugucaaaaggcuuuc

SEQ ID NO: 373429 - RNA, 27 nt, Human
ugucaucuaccuugucuaguuuacaua

SEQ ID NO: 373430 - RNA, 19 nt, Human
uuaguacaugaaaaagaga

SEQ ID NO: 373431 - RNA, 19 nt, Human
uucaggaaugacaaaugau

SEQ ID NO: 373432 - RNA, 23 nt, Human
uuugcaaugccuaccaaauuuca

SEQ ID NO: 373433 - RNA, 21 nt, Human
uuuguggcugcuaauacauug

SEQ ID NO: 373434 - RNA, 21 nt, Human
aaaaaaaaaucacacacaaga

SEQ ID NO: 373435 - RNA, 23 nt, Human
aaaaaaaaaucacacacaagacu

SEQ ID NO: 373436 - RNA, 19 nt, Human
aaaaaaagcagccauaaca

SEQ ID NO: 373437 - RNA, 20 nt, Human
aaaagcagccauaacaaggc

SEQ ID NO: 373438 - RNA, 24 nt, Human
aaaagggacaagucuuugguuaaa

SEQ ID NO: 373439 - RNA, 20 nt, Human
aaacacuagaacuugauaua

SEQ ID NO: 373440 - RNA, 18 nt, Human
aaagggacaagucuuugg

SEQ ID NO: 373441 - RNA, 24 nt, Human
aaauucaguucaguuacuaagaag

SEQ ID NO: 373442 - RNA, 22 nt, Human
aacauacuuuauuagcacaaaa

SEQ ID NO: 373443 - RNA, 19 nt, Human
aagcucaagaaaaaagacc

SEQ ID NO: 373444 - RNA, 20 nt, Human
aagugaacugcacuaugccc

SEQ ID NO: 373445 - RNA, 19 nt, Human
aaguuuccucucuaaaaca

SEQ ID NO: 373446 - RNA, 21 nt, Human
acaaaaucauccugggcauag

SEQ ID NO: 373447 - RNA, 19 nt, Human
acaaggagaacaccaaaca

SEQ ID NO: 373448 - RNA, 18 nt, Human
acagagcacauuaacgaa

SEQ ID NO: 373449 - RNA, 22 nt, Human
acagcaagcagaaacauacauu

SEQ ID NO: 373450 - RNA, 21 nt, Human
acauaaacucaaacacauuua

SEQ ID NO: 373451 - RNA, 25 nt, Human
agaaaaaagacccaacaauuaggca

SEQ ID NO: 373452 - RNA, 24 nt, Human
agaaaaggacacagugaauauaga

SEQ ID NO: 373453 - RNA, 20 nt, Human
agaacuugauauaacuucca

SEQ ID NO: 373454 - RNA, 22 nt, Human
agaauucuucauaacaaaugcc

SEQ ID NO: 373455 - RNA, 23 nt, Human
agaauucuucauaacaaaugccc

SEQ ID NO: 373456 - RNA, 21 nt, Human
agacaaaaauuuaaaccaaaa

SEQ ID NO: 373457 - RNA, 23 nt, Human
agacaaaaauuuaaaccaaaaau

SEQ ID NO: 373458 - RNA, 21 nt, Human
agacugcacaucaacuuaaaa

SEQ ID NO: 373459 - RNA, 21 nt, Human
aggugcaaguucaugcuggug

SEQ ID NO: 373460 - RNA, 23 nt, Human
aguaguaguacauauuauucuaa

SEQ ID NO: 373461 - RNA, 20 nt, Human
aguuacuaagaagcaaacac

SEQ ID NO: 373462 - RNA, 24 nt, Human
aguuaugagaguuuacaaaaaaga

SEQ ID NO: 373463 - RNA, 24 nt, Human
auaaaacagcagauauacaaggag

SEQ ID NO: 373464 - RNA, 22 nt, Human
auaccacagccauuaaaaacca

SEQ ID NO: 373465 - RNA, 23 nt, Human
auaccacagccauuaaaaaccaa

SEQ ID NO: 373466 - RNA, 24 nt, Human
auuacaaauucacaagacuucauu

SEQ ID NO: 373467 - RNA, 22 nt, Human
auugcagcagcuauuccaaacg

SEQ ID NO: 373468 - RNA, 20 nt, Human
caaaaugucuaggacagaac

SEQ ID NO: 373469 - RNA, 25 nt, Human
caacaauaaucucaacaucagcaac

SEQ ID NO: 373470 - RNA, 22 nt, Human
caagucuuugguuaaaguucua

SEQ ID NO: 373471 - RNA, 21 nt, Human
caaguuuccucucuaaaacac

SEQ ID NO: 373472 - RNA, 21 nt, Human
cacaaaaaaagcagccauaac

SEQ ID NO: 373473 - RNA, 21 nt, Human
cacaagacuacauugcagcag

SEQ ID NO: 373474 - RNA, 18 nt, Human
cacagcaagcagaaacau

SEQ ID NO: 373475 - RNA, 19 nt, Human
cagauacuaacacuaagcu

SEQ ID NO: 373476 - RNA, 24 nt, Human
cauuuaaaacaauuuccauuuaac

SEQ ID NO: 373477 - RNA, 22 nt, Human
cgggggcggcccgggagucggg

SEQ ID NO: 373478 - RNA, 19 nt, Human
cuaaaacacaaucuugcuc

SEQ ID NO: 373479 - RNA, 20 nt, Human
cuagaacuugauauaacuuc

SEQ ID NO: 373480 - RNA, 20 nt, Human
cuaggacagaacuguaaauu

SEQ ID NO: 373481 - RNA, 19 nt, Human
cuguucauuaacucugcau

SEQ ID NO: 373482 - RNA, 18 nt, Human
gaaggagggaggcagggc

SEQ ID NO: 373483 - RNA, 19 nt, Human
gaaggagggaggcagggcg

SEQ ID NO: 373484 - RNA, 19 nt, Human
gaguuuacaaaaaagagau

SEQ ID NO: 373485 - RNA, 21 nt, Human
gcagggcgcgagacgggggcg

SEQ ID NO: 373486 - RNA, 22 nt, Human
gcauaggaacagauccaacuuu

SEQ ID NO: 373487 - RNA, 27 nt, Human
gcgcgagacgggggcggcccgggaguc

SEQ ID NO: 373488 - RNA, 20 nt, Human
ggauuccuagcggccaaucc

SEQ ID NO: 373489 - RNA, 18 nt, Human
ggcacagcaagcagaaac

SEQ ID NO: 373490 - RNA, 20 nt, Human
gguaggugaaggccgaagga

SEQ ID NO: 373491 - RNA, 20 nt, Human
gucugauuauaaacuacauc

SEQ ID NO: 373492 - RNA, 24 nt, Human
uaaaaaaaaaucacacacaagacu

SEQ ID NO: 373493 - RNA, 21 nt, Human
uaaaaaccccaaaccauucca

SEQ ID NO: 373494 - RNA, 21 nt, Human
uaaaaaccccaaaccauucca

SEQ ID NO: 373495 - RNA, 25 nt, Human
uaaaacagcagauauacaaggagaa

SEQ ID NO: 373496 - RNA, 23 nt, Human
uaaaauaacauucuguagcagca

SEQ ID NO: 373497 - RNA, 23 nt, Human
uaaaugguacugaucuauuacaa

SEQ ID NO: 373498 - RNA, 18 nt, Human
uaacaaggcacagcaagc

SEQ ID NO: 373499 - RNA, 23 nt, Human
uaacaaggcacagcaagcagaaa

SEQ ID NO: 373500 - RNA, 20 nt, Human
uaacuuccaaaagcgcucac

SEQ ID NO: 373501 - RNA, 23 nt, Human
uaagaugguccccaaaccaauaa

SEQ ID NO: 373502 - RNA, 21 nt, Human
uacacaaacugaaacauguga

SEQ ID NO: 373503 - RNA, 19 nt, Human
uacagauacucauuuacua

SEQ ID NO: 373504 - RNA, 22 nt, Human
uacauuagcagucaaaagguua

SEQ ID NO: 373505 - RNA, 19 nt, Human
uaccacagccauuaaaaac

SEQ ID NO: 373506 - RNA, 24 nt, Human
uaccacagccauuaaaaaccaaac

SEQ ID NO: 373507 - RNA, 21 nt, Human
uagaacaucaauuugcuacaa

SEQ ID NO: 373508 - RNA, 21 nt, Human
uagcacaguguauacaugcuu

SEQ ID NO: 373509 - RNA, 24 nt, Human
uaguucaacaauaaucucaacauc

SEQ ID NO: 373510 - RNA, 26 nt, Human
uauaaaacagcagauauacaaggaga

SEQ ID NO: 373511 - RNA, 22 nt, Human
uauacacaaacugaaacaugug

SEQ ID NO: 373512 - RNA, 25 nt, Human
uaugucauaacaacuuaauugcaca

SEQ ID NO: 373513 - RNA, 24 nt, Human
ucaaauaccacagccauuaaaaac

SEQ ID NO: 373514 - RNA, 22 nt, Human
ucauuggauaguuucaaucuuu

SEQ ID NO: 373515 - RNA, 23 nt, Human
uccaacuuuuaugaaacaacaau

SEQ ID NO: 373516 - RNA, 23 nt, Human
ucuaaaacacaaucuugcucaca

SEQ ID NO: 373517 - RNA, 21 nt, Human
ucugacagauacuaacacuaa

SEQ ID NO: 373518 - RNA, 19 nt, Human
ugaaaaagccuaacacugc

SEQ ID NO: 373519 - RNA, 19 nt, Human
ugauauaacuuccaaaagc

SEQ ID NO: 373520 - RNA, 19 nt, Human
ugccccagaguugccucac

SEQ ID NO: 373521 - RNA, 22 nt, Human
ugccucacucaaauaccacagc

SEQ ID NO: 373522 - RNA, 18 nt, Human
uggaagguuauagaaaaa

SEQ ID NO: 373523 - RNA, 23 nt, Human
uguauacaugcuuacauaaacuc

SEQ ID NO: 373524 - RNA, 23 nt, Human
ugucauaacaacuuaauugcaca

SEQ ID NO: 373525 - RNA, 19 nt, Human
ugugcuugcuauaggugua

SEQ ID NO: 373526 - RNA, 23 nt, Human
uuaaaaaccccaaaccauuccau

SEQ ID NO: 373527 - RNA, 19 nt, Human
uuuguagucuuacugaaca

SEQ ID NO: 373528 - RNA, 20 nt, Human
uuuuucuaaaaggaaggcag

SEQ ID NO: 373529 - RNA, 22 nt, Human
aaacagucauaaagagcuuaac

SEQ ID NO: 373530 - RNA, 26 nt, Human
aaaggcaucccuacaaguccccaaag

SEQ ID NO: 373531 - RNA, 24 nt, Human
acaucaagaaaugcuacaauagag

SEQ ID NO: 373532 - RNA, 25 nt, Human
acuaagcaacaucaagaaaugcuac

SEQ ID NO: 373533 - RNA, 18 nt, Human
aggcaucccuacaagucc

SEQ ID NO: 373534 - RNA, 22 nt, Human
caauagagcagcuuacuguauu

SEQ ID NO: 373535 - RNA, 23 nt, Human
cacaaagcauuuacuauuuucaa

SEQ ID NO: 373536 - RNA, 20 nt, Human
cagcuuacuguauucugcag

SEQ ID NO: 373537 - RNA, 20 nt, Human
caucaagaaaugcuacaaua

SEQ ID NO: 373538 - RNA, 18 nt, Human
ggacuagaaaggcauccc

SEQ ID NO: 373539 - RNA, 19 nt, Human
uaacaaaauguuuaguaag

SEQ ID NO: 373540 - RNA, 18 nt, Human
uaacauacucagcauaac

SEQ ID NO: 373541 - RNA, 19 nt, Human
uaagaaauuauucagaaca

SEQ ID NO: 373542 - RNA, 21 nt, Human
uagaauaggacuagaaaggca

SEQ ID NO: 373543 - RNA, 22 nt, Human
uagcucucugaagaaaaugucc

SEQ ID NO: 373544 - RNA, 22 nt, Human
uaugaaauaagugacuaagcaa

SEQ ID NO: 373545 - RNA, 24 nt, Human
ucuauaacugcaauagaauaggac

SEQ ID NO: 373546 - RNA, 19 nt, Human
ucuauaccacuacaaaaac

SEQ ID NO: 373547 - RNA, 19 nt, Human
ucugcaguacucuauacca

SEQ ID NO: 373548 - RNA, 21 nt, Human
ugacuaagcaacaucaagaaa

SEQ ID NO: 373549 - RNA, 21 nt, Human
aaaaauagaagcucuucuuuc

SEQ ID NO: 373550 - RNA, 24 nt, Human
aaagcccaugugggaaaaaccagg

SEQ ID NO: 373551 - RNA, 24 nt, Human
aacgucaguaaaugcauccaguac

SEQ ID NO: 373552 - RNA, 24 nt, Human
aaggcagaggggggccucgggggu

SEQ ID NO: 373553 - RNA, 26 nt, Human
aagguaccucagggagccuaggaggc

SEQ ID NO: 373554 - RNA, 23 nt, Human
acaacaacgucaguaaaugcauc

SEQ ID NO: 373555 - RNA, 22 nt, Human
acccacagcugcaugagucacc

SEQ ID NO: 373556 - RNA, 20 nt, Human
accugaaggcgggaaggggg

SEQ ID NO: 373557 - RNA, 25 nt, Human
acgcaggcugucccuggagccccgc

SEQ ID NO: 373558 - RNA, 21 nt, Human
agaggggggccucgggggucc

SEQ ID NO: 373559 - RNA, 20 nt, Human
aggcagaggggggccucggg

SEQ ID NO: 373560 - RNA, 21 nt, Human
aggcagaggggggccucgggg

SEQ ID NO: 373561 - RNA, 21 nt, Human
aggcagaggggggccucgggg

SEQ ID NO: 373562 - RNA, 21 nt, Human
aucuguaacacaaagguugcc

SEQ ID NO: 373563 - RNA, 22 nt, Human
augagaucauuacucgcccagu

SEQ ID NO: 373564 - RNA, 26 nt, Human
caaaaauagaagcucuucuuucccag

SEQ ID NO: 373565 - RNA, 19 nt, Human
cacagcugcaugagucacc

SEQ ID NO: 373566 - RNA, 19 nt, Human
caugugggaaaaaccaggc

SEQ ID NO: 373567 - RNA, 23 nt, Human
ccagagcggccucugagcgccua

SEQ ID NO: 373568 - RNA, 24 nt, Human
ccagcccaggaacgcaggcugucc

SEQ ID NO: 373569 - RNA, 19 nt, Human
ccucagggagccuaggagg

SEQ ID NO: 373570 - RNA, 22 nt, Human
ccuccugcauuccugcaacaaa

SEQ ID NO: 373571 - RNA, 19 nt, Human
ccucgggggucccuggccc

SEQ ID NO: 373572 - RNA, 19 nt, Human
ccuggagccccgcacgccc

SEQ ID NO: 373573 - RNA, 20 nt, Human
ccuggccgccgccggguggg

SEQ ID NO: 373574 - RNA, 19 nt, Human
ccuucagaccuacugagug

SEQ ID NO: 373575 - RNA, 19 nt, Human
cgcggggcaguuggccugg

SEQ ID NO: 373576 - RNA, 24 nt, Human
cgcggggcaguuggccuggcuucc

SEQ ID NO: 373577 - RNA, 21 nt, Human
cgggagcgguggugggugggg

SEQ ID NO: 373578 - RNA, 24 nt, Human
cgguauagggagaccucugggugg

SEQ ID NO: 373579 - RNA, 21 nt, Human
cugcaugagucaccuuggggg

SEQ ID NO: 373580 - RNA, 19 nt, Human
gagaucauuacucgcccag

SEQ ID NO: 373581 - RNA, 18 nt, Human
gaguguuucccucccgac

SEQ ID NO: 373582 - RNA, 18 nt, Human
gcagaggagaagcucaaa

SEQ ID NO: 373583 - RNA, 18 nt, Human
gcaguuggccuggcuucc

SEQ ID NO: 373584 - RNA, 19 nt, Human
gccaugaacuuuucucaau

SEQ ID NO: 373585 - RNA, 21 nt, Human
gcccuuuccaaaaauagaagc

SEQ ID NO: 373586 - RNA, 22 nt, Human
gcugcacccagccagcccagga

SEQ ID NO: 373587 - RNA, 22 nt, Human
ggaaagcuuauaaaaaaucuaa

SEQ ID NO: 373588 - RNA, 23 nt, Human
ggagaccucuggguggagagggc

SEQ ID NO: 373589 - RNA, 18 nt, Human
ggagcgcagcgacgaaga

SEQ ID NO: 373590 - RNA, 19 nt, Human
ggaggaaccugaaggcggg

SEQ ID NO: 373591 - RNA, 20 nt, Human
gggagcgguggugggugggg

SEQ ID NO: 373592 - RNA, 18 nt, Human
gggcaccuuuccagcucc

SEQ ID NO: 373593 - RNA, 18 nt, Human
ggggaaggagggucuggg

SEQ ID NO: 373594 - RNA, 21 nt, Human
gggggccucgggggucccugg

SEQ ID NO: 373595 - RNA, 18 nt, Human
ggggucccuggccgccgc

SEQ ID NO: 373596 - RNA, 21 nt, Human
ggguggggaggggugggggga

SEQ ID NO: 373597 - RNA, 21 nt, Human
gguggggaaggagggucuggg

SEQ ID NO: 373598 - RNA, 21 nt, Human
gucucagggcuuauggggugg

SEQ ID NO: 373599 - RNA, 19 nt, Human
guggagagggcugcgggga

SEQ ID NO: 373600 - RNA, 19 nt, Human
guggggaaggagggucugg

SEQ ID NO: 373601 - RNA, 21 nt, Human
uaaaaaaucuaaaucucugga

SEQ ID NO: 373602 - RNA, 20 nt, Human
uaacacaaagguugccaaac

SEQ ID NO: 373603 - RNA, 19 nt, Human
uaggaggaaccugaaggcg

SEQ ID NO: 373604 - RNA, 20 nt, Human
ucaguaaaugcauccaguac

SEQ ID NO: 373605 - RNA, 26 nt, Human
ucccuggccgccgccgggugggggcc

SEQ ID NO: 373606 - RNA, 21 nt, Human
ucuucuuucccagaaaagccc

SEQ ID NO: 373607 - RNA, 22 nt, Human
ugaaaagagagcugcacccagc

SEQ ID NO: 373608 - RNA, 26 nt, Human
ugaacuuuucucaaucauagcagccc

SEQ ID NO: 373609 - RNA, 21 nt, Human
ugagaucauuacucgcccagu

SEQ ID NO: 373610 - RNA, 24 nt, Human
ugaguggggggcuccgaggguugg

SEQ ID NO: 373611 - RNA, 23 nt, Human
ugcuguaugccgggcacccacag

SEQ ID NO: 373612 - RNA, 20 nt, Human
uggagccccgcacgcccacc

SEQ ID NO: 373613 - RNA, 21 nt, Human
uggcaggaaagcuuauaaaaa

SEQ ID NO: 373614 - RNA, 18 nt, Human
ugggagaacuaggagugu

SEQ ID NO: 373615 - RNA, 24 nt, Human
uggggagggguggggggacucgag

SEQ ID NO: 373616 - RNA, 23 nt, Human
uggggggcuccgaggguuggggc

SEQ ID NO: 373617 - RNA, 18 nt, Human
ugguggguggggaggggu

SEQ ID NO: 373618 - RNA, 18 nt, Human
ugguggguggggaggggu

SEQ ID NO: 373619 - RNA, 21 nt, Human
ugguggguggggagggguggg

SEQ ID NO: 373620 - RNA, 24 nt, Human
uguaugccgggcacccacagcugc

SEQ ID NO: 373621 - RNA, 23 nt, Human
uguuucccucccgacgucugucc

SEQ ID NO: 373622 - RNA, 20 nt, Human
uuucgguacaaauggaggcc

SEQ ID NO: 373623 - RNA, 29 nt, Human
uuuuuugcugccaugaacuuuucucaauu

SEQ ID NO: 373624 - RNA, 18 nt, Human
aagcucccaggcccucuc

SEQ ID NO: 373625 - RNA, 21 nt, Human
acaccagggcuccagggaccc

SEQ ID NO: 373626 - RNA, 19 nt, Human
acccagugcaguggccccg

SEQ ID NO: 373627 - RNA, 20 nt, Human
acccugagcccacagggagg

SEQ ID NO: 373628 - RNA, 20 nt, Human
accucagggccugggcacac

SEQ ID NO: 373629 - RNA, 19 nt, Human
agacaggcaccgccccggg

SEQ ID NO: 373630 - RNA, 21 nt, Human
aggaggggggcggggggccca

SEQ ID NO: 373631 - RNA, 25 nt, Human
aggggaaggaggggggcggggggcc

SEQ ID NO: 373632 - RNA, 25 nt, Human
aggggaaggaggggggcggggggcc

SEQ ID NO: 373633 - RNA, 23 nt, Human
aggggggcggggggcccauggga

SEQ ID NO: 373634 - RNA, 19 nt, Human
cacagcccggcggcgccgc

SEQ ID NO: 373635 - RNA, 21 nt, Human
cacagcccggcggcgccgccu

SEQ ID NO: 373636 - RNA, 21 nt, Human
cagcucccugggcgggguccu

SEQ ID NO: 373637 - RNA, 22 nt, Human
caguccgugguucccauccugg

SEQ ID NO: 373638 - RNA, 18 nt, Human
ccauccuggcucccuguc

SEQ ID NO: 373639 - RNA, 21 nt, Human
ccccggcccccgggcccgcuc

SEQ ID NO: 373640 - RNA, 18 nt, Human
ccccgggcccgcucgccc

SEQ ID NO: 373641 - RNA, 23 nt, Human
cccgcaggagacccugagcccac

SEQ ID NO: 373642 - RNA, 20 nt, Human
cccgcucgcccccgccggcc

SEQ ID NO: 373643 - RNA, 18 nt, Human
cccgggcccgcucgcccc

SEQ ID NO: 373644 - RNA, 28 nt, Human
ccggagagcggcggggccccucucgccc

SEQ ID NO: 373645 - RNA, 20 nt, Human
ccggcccaccucagggccug

SEQ ID NO: 373646 - RNA, 18 nt, Human
ccgggcccgcucgccccc

SEQ ID NO: 373647 - RNA, 18 nt, Human
ccgggcccgcucgccccc

SEQ ID NO: 373648 - RNA, 24 nt, Human
ccuccacagcccggcggcgccgcc

SEQ ID NO: 373649 - RNA, 26 nt, Human
ccuggccucggcccccguccgguucc

SEQ ID NO: 373650 - RNA, 18 nt, Human
cgccgccggccgcgcugc

SEQ ID NO: 373651 - RNA, 24 nt, Human
cgccucguccucgcggcccgggca

SEQ ID NO: 373652 - RNA, 19 nt, Human
cgcggccccggcccccggg

SEQ ID NO: 373653 - RNA, 20 nt, Human
cgcggccccggcccccgggc

SEQ ID NO: 373654 - RNA, 23 nt, Human
cggcccccgggcccgcucgcccc

SEQ ID NO: 373655 - RNA, 22 nt, Human
cgggcccgcucgcccccgccgg

SEQ ID NO: 373656 - RNA, 19 nt, Human
cggguguuggggcuggcag

SEQ ID NO: 373657 - RNA, 22 nt, Human
cuccagggaccccgccugcccu

SEQ ID NO: 373658 - RNA, 20 nt, Human
cucccaggcccucucugugc

SEQ ID NO: 373659 - RNA, 21 nt, Human
cucccaggcccucucugugcc

SEQ ID NO: 373660 - RNA, 20 nt, Human
cucgccgccggccgcgcugc

SEQ ID NO: 373661 - RNA, 20 nt, Human
cucugucggggucucccuca

SEQ ID NO: 373662 - RNA, 21 nt, Human
cugaagcugcagcaagcuccc

SEQ ID NO: 373663 - RNA, 21 nt, Human
cugcagcaagcucccaggccc

SEQ ID NO: 373664 - RNA, 23 nt, Human
cugcagcaagcucccaggcccuc

SEQ ID NO: 373665 - RNA, 24 nt, Human
cugcagcaagcucccaggcccucu

SEQ ID NO: 373666 - RNA, 20 nt, Human
cugugccgcgucugggcugc

SEQ ID NO: 373667 - RNA, 19 nt, Human
gacugugggguucagggag

SEQ ID NO: 373668 - RNA, 20 nt, Human
gacugugggguucagggagg

SEQ ID NO: 373669 - RNA, 18 nt, Human
gagggguggucccugauc

SEQ ID NO: 373670 - RNA, 24 nt, Human
gccccgggacucgccgcuccacac

SEQ ID NO: 373671 - RNA, 21 nt, Human
gcccggacggccucccgcucc

SEQ ID NO: 373672 - RNA, 20 nt, Human
gccgcgcugcccggacggcc

SEQ ID NO: 373673 - RNA, 18 nt, Human
gcggggggcccaugggaa

SEQ ID NO: 373674 - RNA, 18 nt, Human
gcugccacucccaggucc

SEQ ID NO: 373675 - RNA, 21 nt, Human
gcugguucacagcccgccugg

SEQ ID NO: 373676 - RNA, 19 nt, Human
ggccaggcggacugugggg

SEQ ID NO: 373677 - RNA, 19 nt, Human
ggccucggcccccgucggg

SEQ ID NO: 373678 - RNA, 21 nt, Human
ggcgccgccucguccucgcgg

SEQ ID NO: 373679 - RNA, 26 nt, Human
gggcagcgcggccccggcccccgggc

SEQ ID NO: 373680 - RNA, 23 nt, Human
gggcgggguccugagauucuggc

SEQ ID NO: 373681 - RNA, 21 nt, Human
ggggggcggggggcccauggg

SEQ ID NO: 373682 - RNA, 22 nt, Human
guccgucugugcacagccccug

SEQ ID NO: 373683 - RNA, 21 nt, Human
gucggguguuggggcuggcag

SEQ ID NO: 373684 - RNA, 22 nt, Human
gucggguguuggggcuggcagg

SEQ ID NO: 373685 - RNA, 20 nt, Human
guucagggaggggaaggagg

SEQ ID NO: 373686 - RNA, 21 nt, Human
uccacaccagggcuccaggga

SEQ ID NO: 373687 - RNA, 22 nt, Human
uccacaccagggcuccagggac

SEQ ID NO: 373688 - RNA, 20 nt, Human
ucccagguccggcccaccuc

SEQ ID NO: 373689 - RNA, 25 nt, Human
ucccucauaaagugcgugugggggu

SEQ ID NO: 373690 - RNA, 20 nt, Human
ucccugggcgggguccugag

SEQ ID NO: 373691 - RNA, 20 nt, Human
uccggcccaccucagggccu

SEQ ID NO: 373692 - RNA, 23 nt, Human
ucucccucauaaagugcgugugg

SEQ ID NO: 373693 - RNA, 21 nt, Human
ucuucugagacaggcaccgcc

SEQ ID NO: 373694 - RNA, 26 nt, Human
ugacacccagauuugguuuugcggac

SEQ ID NO: 373695 - RNA, 23 nt, Human
ugagacaggcaccgccccgggac

SEQ ID NO: 373696 - RNA, 25 nt, Human
ugagacaggcaccgccccgggacuc

SEQ ID NO: 373697 - RNA, 21 nt, Human
ugagcccugggcuggcagcuc

SEQ ID NO: 373698 - RNA, 23 nt, Human
ugagcccugggcuggcagcuccc

SEQ ID NO: 373699 - RNA, 19 nt, Human
uggccaggcggacuguggg

SEQ ID NO: 373700 - RNA, 26 nt, Human
uggcggccaggaggucuggccaggcg

SEQ ID NO: 373701 - RNA, 22 nt, Human
uggcugccacucccagguccgg

SEQ ID NO: 373702 - RNA, 21 nt, Human
ugggaagcugagcccugggcu

SEQ ID NO: 373703 - RNA, 26 nt, Human
ugggaagcugagcccugggcuggcag

SEQ ID NO: 373704 - RNA, 27 nt, Human
ugggguucagggaggggaaggaggggg

SEQ ID NO: 373705 - RNA, 20 nt, Human
ugguucccauccuggcuccc

SEQ ID NO: 373706 - RNA, 21 nt, Human
ugguuuugcggacagagcucc

SEQ ID NO: 373707 - RNA, 19 nt, Human
uguuggggcuggcagguga

SEQ ID NO: 373708 - RNA, 24 nt, Human
uuggccucugacacccagauuugg

SEQ ID NO: 373709 - RNA, 20 nt, Human
aaacaaauacaucacuaagg

SEQ ID NO: 373710 - RNA, 20 nt, Human
aaacaaauacaucacuaagg

SEQ ID NO: 373711 - RNA, 20 nt, Human
aaacaaauacaucacuaagg

SEQ ID NO: 373712 - RNA, 18 nt, Human
aaacaacccagagaaaca

SEQ ID NO: 373713 - RNA, 20 nt, Human
aaacaauauaaacauaccaa

SEQ ID NO: 373714 - RNA, 20 nt, Human
aaacaauauaaacauaccaa

SEQ ID NO: 373715 - RNA, 20 nt, Human
aaacaauauaaacauaccaa

SEQ ID NO: 373716 - RNA, 23 nt, Human
aaacaauauaaacauaccaaaac

SEQ ID NO: 373717 - RNA, 23 nt, Human
aaacaauauaaacauaccaaaac

SEQ ID NO: 373718 - RNA, 23 nt, Human
aaacaauauaaacauaccaaaac

SEQ ID NO: 373719 - RNA, 21 nt, Human
aaagguacagauacagagaua

SEQ ID NO: 373720 - RNA, 22 nt, Human
aacaccuccuccauucaaacga

SEQ ID NO: 373721 - RNA, 21 nt, Human
aacaugcucauggcuucaaga

SEQ ID NO: 373722 - RNA, 23 nt, Human
aacuccuccucgcuaguccucca

SEQ ID NO: 373723 - RNA, 20 nt, Human
aagagaaaauguuugcgaug

SEQ ID NO: 373724 - RNA, 23 nt, Human
aagaugcucacaucaaccuacaa

SEQ ID NO: 373725 - RNA, 25 nt, Human
aagaugcucacaucaaccuacaaug

SEQ ID NO: 373726 - RNA, 22 nt, Human
aaggcuaucugacaaacaaccc

SEQ ID NO: 373727 - RNA, 20 nt, Human
aagggaauggaguaccaagg

SEQ ID NO: 373728 - RNA, 18 nt, Human
aaguggcauuagccauga

SEQ ID NO: 373729 - RNA, 18 nt, Human
aaguggcauuagccauga

SEQ ID NO: 373730 - RNA, 18 nt, Human
aaguggcauuagccauga

SEQ ID NO: 373731 - RNA, 20 nt, Human
aauauaaacauaccaaaacc

SEQ ID NO: 373732 - RNA, 20 nt, Human
aauauaaacauaccaaaacc

SEQ ID NO: 373733 - RNA, 20 nt, Human
aauauaaacauaccaaaacc

SEQ ID NO: 373734 - RNA, 25 nt, Human
acaaagauacagauauauauauaua

SEQ ID NO: 373735 - RNA, 21 nt, Human
acaacauuaaagaggaaauac

SEQ ID NO: 373736 - RNA, 21 nt, Human
acaacauuaaagaggaaauac

SEQ ID NO: 373737 - RNA, 18 nt, Human
acacaggauguuugccug

SEQ ID NO: 373738 - RNA, 18 nt, Human
acacaggauguuugccug

SEQ ID NO: 373739 - RNA, 19 nt, Human
acagagauacauacaaaga

SEQ ID NO: 373740 - RNA, 20 nt, Human
acagcaaagguacagauaca

SEQ ID NO: 373741 - RNA, 18 nt, Human
acaguaagaaaccaucau

SEQ ID NO: 373742 - RNA, 20 nt, Human
acccuaaaaauuaacauaaa

SEQ ID NO: 373743 - RNA, 21 nt, Human
acccuaaaaauuaacauaaac

SEQ ID NO: 373744 - RNA, 21 nt, Human
acccuaaaaauuaacauaaac

SEQ ID NO: 373745 - RNA, 25 nt, Human
accuacaaugaccuuuuccaaucca

SEQ ID NO: 373746 - RNA, 19 nt, Human
accucaauaacacuggccc

SEQ ID NO: 373747 - RNA, 19 nt, Human
accucaauaacacuggccc

SEQ ID NO: 373748 - RNA, 19 nt, Human
accucaauaacacuggccc

SEQ ID NO: 373749 - RNA, 23 nt, Human
accucaauaacacuggcccauua

SEQ ID NO: 373750 - RNA, 23 nt, Human
accucaauaacacuggcccauua

SEQ ID NO: 373751 - RNA, 23 nt, Human
accucaauaacacuggcccauua

SEQ ID NO: 373752 - RNA, 20 nt, Human
acuaagguaaacaauauaaa

SEQ ID NO: 373753 - RNA, 19 nt, Human
acucaacaccuccuccauu

SEQ ID NO: 373754 - RNA, 20 nt, Human
agaaacaguaagaaaccauc

SEQ ID NO: 373755 - RNA, 20 nt, Human
agagaaguucccagaccucu

SEQ ID NO: 373756 - RNA, 20 nt, Human
agagaaguucccagaccucu

SEQ ID NO: 373757 - RNA, 20 nt, Human
agagauguccacaggcucug

SEQ ID NO: 373758 - RNA, 23 nt, Human
agaggggaaggagaagggaaugg

SEQ ID NO: 373759 - RNA, 22 nt, Human
agcucuauuuaacaugcucaug

SEQ ID NO: 373760 - RNA, 19 nt, Human
aggaaugcaggacuuagug

SEQ ID NO: 373761 - RNA, 19 nt, Human
aggaaugcaggacuuagug

SEQ ID NO: 373762 - RNA, 19 nt, Human
agggaauucuuuuguuaau

SEQ ID NO: 373763 - RNA, 21 nt, Human
auacuaaauguacuggccucu

SEQ ID NO: 373764 - RNA, 21 nt, Human
auacuaaauguacuggccucu

SEQ ID NO: 373765 - RNA, 21 nt, Human
auacuaaauguacuggccucu

SEQ ID NO: 373766 - RNA, 21 nt, Human
augaaauauucuaucagaccc

SEQ ID NO: 373767 - RNA, 21 nt, Human
augaaauauucuaucagaccc

SEQ ID NO: 373768 - RNA, 21 nt, Human
augaaauauucuaucagaccc

SEQ ID NO: 373769 - RNA, 18 nt, Human
auuagggcuggcaaagcu

SEQ ID NO: 373770 - RNA, 21 nt, Human
auuagggcuggcaaagcuggg

SEQ ID NO: 373771 - RNA, 21 nt, Human
auuagggcuggcaaagcuggg

SEQ ID NO: 373772 - RNA, 21 nt, Human
auuagggcuggcaaagcuggg

SEQ ID NO: 373773 - RNA, 21 nt, Human
caaauacaucacuaagguaaa

SEQ ID NO: 373774 - RNA, 21 nt, Human
caaauacaucacuaagguaaa

SEQ ID NO: 373775 - RNA, 21 nt, Human
caaauacaucacuaagguaaa

SEQ ID NO: 373776 - RNA, 20 nt, Human
caacauuaaagaggaaauac

SEQ ID NO: 373777 - RNA, 20 nt, Human
caacauuaaagaggaaauac

SEQ ID NO: 373778 - RNA, 20 nt, Human
caacauuaaagaggaaauac

SEQ ID NO: 373779 - RNA, 22 nt, Human
caaccuacaaugaccuuuucca

SEQ ID NO: 373780 - RNA, 22 nt, Human
caacuauagccccguggaaauu

SEQ ID NO: 373781 - RNA, 20 nt, Human
caagugcccguucacucauu

SEQ ID NO: 373782 - RNA, 22 nt, Human
caauauaaacauaccaaaaccc

SEQ ID NO: 373783 - RNA, 22 nt, Human
caauauaaacauaccaaaaccc

SEQ ID NO: 373784 - RNA, 22 nt, Human
caauauaaacauaccaaaaccc

SEQ ID NO: 373785 - RNA, 21 nt, Human
caaugggcuauguacccaaga

SEQ ID NO: 373786 - RNA, 22 nt, Human
caccaguauuggccaacuguuc

SEQ ID NO: 373787 - RNA, 18 nt, Human
caggugguugccaccuuc

SEQ ID NO: 373788 - RNA, 22 nt, Human
caggugguugccaccuucuuuu

SEQ ID NO: 373789 - RNA, 22 nt, Human
caggugguugccaccuucuuuu

SEQ ID NO: 373790 - RNA, 24 nt, Human
caucacuaagguaaacaauauaaa

SEQ ID NO: 373791 - RNA, 24 nt, Human
caucacuaagguaaacaauauaaa

SEQ ID NO: 373792 - RNA, 19 nt, Human
cauuagcccuguggaacag

SEQ ID NO: 373793 - RNA, 19 nt, Human
cauuagcccuguggaacag

SEQ ID NO: 373794 - RNA, 20 nt, Human
cauuaucuguccagcagaac

SEQ ID NO: 373795 - RNA, 20 nt, Human
cauuaucuguccagcagaac

SEQ ID NO: 373796 - RNA, 20 nt, Human
cauuaucuguccagcagaac

SEQ ID NO: 373797 - RNA, 19 nt, Human
cauugcuguagagaugucc

SEQ ID NO: 373798 - RNA, 22 nt, Human
cauuuuaaugggguuguuuuga

SEQ ID NO: 373799 - RNA, 20 nt, Human
ccacaggaacccauucucca

SEQ ID NO: 373800 - RNA, 21 nt, Human
ccacuguaauacacaugaaau

SEQ ID NO: 373801 - RNA, 21 nt, Human
ccacuguaauacacaugaaau

SEQ ID NO: 373802 - RNA, 21 nt, Human
ccacuguaauacacaugaaau

SEQ ID NO: 373803 - RNA, 18 nt, Human
ccauucuccauaaacacu

SEQ ID NO: 373804 - RNA, 18 nt, Human
cccagaaaauaaaacacc

SEQ ID NO: 373805 - RNA, 18 nt, Human
cccagaaaauaaaacacc

SEQ ID NO: 373806 - RNA, 18 nt, Human
cccagaaaauaaaacacc

SEQ ID NO: 373807 - RNA, 20 nt, Human
cccagaaaauaaaacaccac

SEQ ID NO: 373808 - RNA, 20 nt, Human
cccagaaaauaaaacaccac

SEQ ID NO: 373809 - RNA, 20 nt, Human
cccagaaaauaaaacaccac

SEQ ID NO: 373810 - RNA, 24 nt, Human
cccauuccuccaguuaccggggcu

SEQ ID NO: 373811 - RNA, 24 nt, Human
cccauuccuccaguuaccggggcu

SEQ ID NO: 373812 - RNA, 20 nt, Human
ccucaaucuaucuacgugag

SEQ ID NO: 373813 - RNA, 20 nt, Human
ccucaaucuaucuacgugag

SEQ ID NO: 373814 - RNA, 20 nt, Human
ccucaaucuaucuacgugag

SEQ ID NO: 373815 - RNA, 21 nt, Human
ccuucuccuucucuccagccc

SEQ ID NO: 373816 - RNA, 19 nt, Human
cuccgaucaaucccuccac

SEQ ID NO: 373817 - RNA, 18 nt, Human
cuccucagucaguuuggc

SEQ ID NO: 373818 - RNA, 22 nt, Human
cuccucgcuaguccuccaggcu

SEQ ID NO: 373819 - RNA, 20 nt, Human
cuuuuugguggaguugguuu

SEQ ID NO: 373820 - RNA, 19 nt, Human
gaaggagaagggaauggag

SEQ ID NO: 373821 - RNA, 21 nt, Human
gaaggggaguuacaucauagu

SEQ ID NO: 373822 - RNA, 21 nt, Human
gaaggggaguuacaucauagu

SEQ ID NO: 373823 - RNA, 21 nt, Human
gaaggggaguuacaucauagu

SEQ ID NO: 373824 - RNA, 22 nt, Human
gacacuuggcauuauuaagaua

SEQ ID NO: 373825 - RNA, 19 nt, Human
gcaaagaggggaaggagaa

SEQ ID NO: 373826 - RNA, 20 nt, Human
gcaaagaggggaaggagaag

SEQ ID NO: 373827 - RNA, 28 nt, Human
gccaccuucuuuuauuacagaucuccau

SEQ ID NO: 373828 - RNA, 28 nt, Human
gccaccuucuuuuauuacagaucuccau

SEQ ID NO: 373829 - RNA, 22 nt, Human
gcccucuccgaucaaucccucc

SEQ ID NO: 373830 - RNA, 18 nt, Human
gcggcauuuuaauggggu

SEQ ID NO: 373831 - RNA, 18 nt, Human
ggaaugcaggacuuagug

SEQ ID NO: 373832 - RNA, 18 nt, Human
ggaaugcaggacuuagug

SEQ ID NO: 373833 - RNA, 18 nt, Human
ggaaugcaggacuuagug

SEQ ID NO: 373834 - RNA, 18 nt, Human
gggaauggaguaccaagg

SEQ ID NO: 373835 - RNA, 20 nt, Human
gggaauucuuuuguuaaugu

SEQ ID NO: 373836 - RNA, 22 nt, Human
gggccuuaagcuuuugaaaaua

SEQ ID NO: 373837 - RNA, 22 nt, Human
gggccuuaagcuuuugaaaaua

SEQ ID NO: 373838 - RNA, 22 nt, Human
gggccuuaagcuuuugaaaaua

SEQ ID NO: 373839 - RNA, 23 nt, Human
guaaacaauauaaacauaccaaa

SEQ ID NO: 373840 - RNA, 23 nt, Human
guaaacaauauaaacauaccaaa

SEQ ID NO: 373841 - RNA, 23 nt, Human
guaaacaauauaaacauaccaaa

SEQ ID NO: 373842 - RNA, 18 nt, Human
gugcacagcccuucacug

SEQ ID NO: 373843 - RNA, 18 nt, Human
gugcacagcccuucacug

SEQ ID NO: 373844 - RNA, 18 nt, Human
gugcacagcccuucacug

SEQ ID NO: 373845 - RNA, 26 nt, Human
guguugcucacucaacaccuccucca

SEQ ID NO: 373846 - RNA, 25 nt, Human
uaacaggaaugcaggacuuagugcu

SEQ ID NO: 373847 - RNA, 25 nt, Human
uaacaggaaugcaggacuuagugcu

SEQ ID NO: 373848 - RNA, 25 nt, Human
uaacaggaaugcaggacuuagugcu

SEQ ID NO: 373849 - RNA, 24 nt, Human
uaagaaaccaucauuaagggcaau

SEQ ID NO: 373850 - RNA, 25 nt, Human
uaagaaaccaucauuaagggcaaug

SEQ ID NO: 373851 - RNA, 24 nt, Human
uaagcgcuuccauuuaucaauacc

SEQ ID NO: 373852 - RNA, 23 nt, Human
uacacaaugucuuaaauugccaa

SEQ ID NO: 373853 - RNA, 23 nt, Human
uacacaaugucuuaaauugccaa

SEQ ID NO: 373854 - RNA, 23 nt, Human
uacacaaugucuuaaauugccaa

SEQ ID NO: 373855 - RNA, 18 nt, Human
uacagcaaagguacagau

SEQ ID NO: 373856 - RNA, 26 nt, Human
uaccacuuucuuuuuagaaccucuac

SEQ ID NO: 373857 - RNA, 26 nt, Human
uaccacuuucuuuuuagaaccucuac

SEQ ID NO: 373858 - RNA, 26 nt, Human
uaccacuuucuuuuuagaaccucuac

SEQ ID NO: 373859 - RNA, 22 nt, Human
uaccggggcugcucuuaagaac

SEQ ID NO: 373860 - RNA, 19 nt, Human
uagcaaagaggggaaggag

SEQ ID NO: 373861 - RNA, 22 nt, Human
uagccuagccauaaggaagggg

SEQ ID NO: 373862 - RNA, 22 nt, Human
uagccuagccauaaggaagggg

SEQ ID NO: 373863 - RNA, 22 nt, Human
uagccuagccauaaggaagggg

SEQ ID NO: 373864 - RNA, 26 nt, Human
uauauauauauauuuacauauauaua

SEQ ID NO: 373865 - RNA, 23 nt, Human
uauauauauuuacauauauauac

SEQ ID NO: 373866 - RNA, 22 nt, Human
uauauauuuacauauauauaca

SEQ ID NO: 373867 - RNA, 22 nt, Human
uauauauuuacauauauauaca

SEQ ID NO: 373868 - RNA, 24 nt, Human
uauaucacaacucaaugccauacu

SEQ ID NO: 373869 - RNA, 24 nt, Human
uauaucacaacucaaugccauacu

SEQ ID NO: 373870 - RNA, 24 nt, Human
uauaucacaacucaaugccauacu

SEQ ID NO: 373871 - RNA, 23 nt, Human
uaucacaacucaaugccauacua

SEQ ID NO: 373872 - RNA, 23 nt, Human
uaucacaacucaaugccauacua

SEQ ID NO: 373873 - RNA, 23 nt, Human
uaucacaacucaaugccauacua

SEQ ID NO: 373874 - RNA, 19 nt, Human
uauuagggcuggcaaagcu

SEQ ID NO: 373875 - RNA, 19 nt, Human
uauuagggcuggcaaagcu

SEQ ID NO: 373876 - RNA, 19 nt, Human
ucaaacgaaccgucccacu

SEQ ID NO: 373877 - RNA, 25 nt, Human
ucaaagcagacacaggauguuugcc

SEQ ID NO: 373878 - RNA, 25 nt, Human
ucaaagcagacacaggauguuugcc

SEQ ID NO: 373879 - RNA, 20 nt, Human
ucauccgaaacaugagguuu

SEQ ID NO: 373880 - RNA, 19 nt, Human
ucauuaagggcaaugggcu

SEQ ID NO: 373881 - RNA, 22 nt, Human
uccuucuccuucucuccagccc

SEQ ID NO: 373882 - RNA, 20 nt, Human
ucuagucagacuucauuuuu

SEQ ID NO: 373883 - RNA, 20 nt, Human
ucuagucagacuucauuuuu

SEQ ID NO: 373884 - RNA, 20 nt, Human
ucuagucagacuucauuuuu

SEQ ID NO: 373885 - RNA, 21 nt, Human
ugaaauauucuaucagacccu

SEQ ID NO: 373886 - RNA, 21 nt, Human
ugaaauauucuaucagacccu

SEQ ID NO: 373887 - RNA, 21 nt, Human
ugaaauauucuaucagacccu

SEQ ID NO: 373888 - RNA, 21 nt, Human
ugaagcaaguggcauuagcca

SEQ ID NO: 373889 - RNA, 21 nt, Human
ugaagcaaguggcauuagcca

SEQ ID NO: 373890 - RNA, 21 nt, Human
ugaagcaaguggcauuagcca

SEQ ID NO: 373891 - RNA, 21 nt, Human
ugacaaacaacccagagaaac

SEQ ID NO: 373892 - RNA, 22 nt, Human
ugacaaacaacccagagaaaca

SEQ ID NO: 373893 - RNA, 21 nt, Human
ugacccaaguggcuuuaacag

SEQ ID NO: 373894 - RNA, 21 nt, Human
ugacccaaguggcuuuaacag

SEQ ID NO: 373895 - RNA, 21 nt, Human
ugacccaaguggcuuuaacag

SEQ ID NO: 373896 - RNA, 22 nt, Human
ugagauccagaugauacaggga

SEQ ID NO: 373897 - RNA, 24 nt, Human
ugaucaccucaauaacacuggccc

SEQ ID NO: 373898 - RNA, 24 nt, Human
ugaucaccucaauaacacuggccc

SEQ ID NO: 373899 - RNA, 24 nt, Human
ugaucaccucaauaacacuggccc

SEQ ID NO: 373900 - RNA, 23 nt, Human
ugaugcagaguaaaauucugaaa

SEQ ID NO: 373901 - RNA, 23 nt, Human
ugaugcagaguaaaauucugaaa

SEQ ID NO: 373902 - RNA, 23 nt, Human
ugaugcagaguaaaauucugaaa

SEQ ID NO: 373903 - RNA, 20 nt, Human
ugauuacaggcaaguguuaa

SEQ ID NO: 373904 - RNA, 20 nt, Human
ugauuacaggcaaguguuaa

SEQ ID NO: 373905 - RNA, 20 nt, Human
ugauuacaggcaaguguuaa

SEQ ID NO: 373906 - RNA, 19 nt, Human
uggaguugguuuugcugca

SEQ ID NO: 373907 - RNA, 24 nt, Human
ugggcaccaguauuggccaacugu

SEQ ID NO: 373908 - RNA, 19 nt, Human
uggguuccuuauugccuuc

SEQ ID NO: 373909 - RNA, 19 nt, Human
uggguuccuuauugccuuc

SEQ ID NO: 373910 - RNA, 22 nt, Human
uguaugguuaaauacaauuucc

SEQ ID NO: 373911 - RNA, 22 nt, Human
uguaugguuaaauacaauuucc

SEQ ID NO: 373912 - RNA, 22 nt, Human
uguaugguuaaauacaauuucc

SEQ ID NO: 373913 - RNA, 21 nt, Human
uguccagcagaacccauugug

SEQ ID NO: 373914 - RNA, 21 nt, Human
uguccagcagaacccauugug

SEQ ID NO: 373915 - RNA, 21 nt, Human
uguccagcagaacccauugug

SEQ ID NO: 373916 - RNA, 26 nt, Human
uguggaacagaucuugaucaccucaa

SEQ ID NO: 373917 - RNA, 26 nt, Human
uguggaacagaucuugaucaccucaa

SEQ ID NO: 373918 - RNA, 26 nt, Human
uguggaacagaucuugaucaccucaa

SEQ ID NO: 373919 - RNA, 24 nt, Human
uguuacaguagccuagccauaagg

SEQ ID NO: 373920 - RNA, 24 nt, Human
uguuacaguagccuagccauaagg

SEQ ID NO: 373921 - RNA, 24 nt, Human
uguuacaguagccuagccauaagg

SEQ ID NO: 373922 - RNA, 24 nt, Human
uguugcucacucaacaccuccucc

SEQ ID NO: 373923 - RNA, 20 nt, Human
uuaaaagggccaagguagca

SEQ ID NO: 373924 - RNA, 22 nt, Human
uuaauccaggcuugggcaccag

SEQ ID NO: 373925 - RNA, 24 nt, Human
uucaugugcacuauauuuagcagc

SEQ ID NO: 373926 - RNA, 22 nt, Human
uuccaugguacaaaaaucaaag

SEQ ID NO: 373927 - RNA, 22 nt, Human
uuccaugguacaaaaaucaaag

SEQ ID NO: 373928 - RNA, 22 nt, Human
uuccaugguacaaaaaucaaag

SEQ ID NO: 373929 - RNA, 22 nt, Human
uugcucacucaacaccuccucc

SEQ ID NO: 373930 - RNA, 18 nt, Human
uuuaacuuucucauaguc

SEQ ID NO: 373931 - RNA, 20 nt, Human
uuuaacuuucucauagucaa

SEQ ID NO: 373932 - RNA, 20 nt, Human
uuuaacuuucucauagucaa

SEQ ID NO: 373933 - RNA, 19 nt, Human
uuucuucaccauuuuucuc

SEQ ID NO: 373934 - RNA, 20 nt, Human
uuuuacacaaugucuuaaau

SEQ ID NO: 373935 - RNA, 20 nt, Human
uuuuacacaaugucuuaaau

SEQ ID NO: 373936 - RNA, 20 nt, Human
uuuuacacaaugucuuaaau

SEQ ID NO: 373937 - RNA, 21 nt, Human
aaagaccaggaaacacauuag

SEQ ID NO: 373938 - RNA, 22 nt, Human
aaagacgggcaaauuggugagg

SEQ ID NO: 373939 - RNA, 26 nt, Human
aaaucuguaggugaguuauuuggaau

SEQ ID NO: 373940 - RNA, 22 nt, Human
aacacaacacuucucugucccu

SEQ ID NO: 373941 - RNA, 23 nt, Human
aaccuguauaaacauuucagcau

SEQ ID NO: 373942 - RNA, 20 nt, Human
aagcucacccccuccaguuc

SEQ ID NO: 373943 - RNA, 20 nt, Human
aaggaguuuggggcuugccu

SEQ ID NO: 373944 - RNA, 20 nt, Human
acaacaacaacaacaaaaaa

SEQ ID NO: 373945 - RNA, 19 nt, Human
acaauggcuauuuuugugc

SEQ ID NO: 373946 - RNA, 21 nt, Human
acaggggccucucucuucuga

SEQ ID NO: 373947 - RNA, 19 nt, Human
acccaaaauaaugaaauua

SEQ ID NO: 373948 - RNA, 21 nt, Human
acccugguuacuaccguuugu

SEQ ID NO: 373949 - RNA, 23 nt, Human
acugcagauaaauaggacugcaa

SEQ ID NO: 373950 - RNA, 23 nt, Human
agaaaacagacauaaccuaucug

SEQ ID NO: 373951 - RNA, 27 nt, Human
agaaaacagacauaaccuaucugcuug

SEQ ID NO: 373952 - RNA, 21 nt, Human
agacaaaagagcaauuggaaa

SEQ ID NO: 373953 - RNA, 21 nt, Human
agaccguaaaacaacaacaac

SEQ ID NO: 373954 - RNA, 19 nt, Human
aggcacaggcauugaaaac

SEQ ID NO: 373955 - RNA, 19 nt, Human
agugugaaugaauuagugg

SEQ ID NO: 373956 - RNA, 27 nt, Human
auaggacugcaaaaaccaaaaacccaa

SEQ ID NO: 373957 - RNA, 21 nt, Human
aucaggugccucaguuuugcc

SEQ ID NO: 373958 - RNA, 21 nt, Human
augaacuacccucagacaaag

SEQ ID NO: 373959 - RNA, 25 nt, Human
auuucuggcuaacucugcuccugga

SEQ ID NO: 373960 - RNA, 19 nt, Human
caaaaaccaaaaacccaaa

SEQ ID NO: 373961 - RNA, 19 nt, Human
caacaaaaaaaaaaaaaca

SEQ ID NO: 373962 - RNA, 24 nt, Human
caagccagaaaagaaaacuuagca

SEQ ID NO: 373963 - RNA, 20 nt, Human
cagcagcugaggcacaggcc

SEQ ID NO: 373964 - RNA, 22 nt, Human
cagcaggcugaaugcaucaggu

SEQ ID NO: 373965 - RNA, 18 nt, Human
caggaaacacauuagcca

SEQ ID NO: 373966 - RNA, 18 nt, Human
caggggagcugagaaaug

SEQ ID NO: 373967 - RNA, 23 nt, Human
caggucagauuacccaagaagug

SEQ ID NO: 373968 - RNA, 20 nt, Human
cauuucuaaaagccaaggau

SEQ ID NO: 373969 - RNA, 21 nt, Human
ccagaaaaacacaagccagaa

SEQ ID NO: 373970 - RNA, 22 nt, Human
ccagaaaaacacaagccagaaa

SEQ ID NO: 373971 - RNA, 19 nt, Human
cccacaaagaacagacguc

SEQ ID NO: 373972 - RNA, 20 nt, Human
cccacaaagaacagacgucc

SEQ ID NO: 373973 - RNA, 22 nt, Human
ccccacaaagaacagacguccu

SEQ ID NO: 373974 - RNA, 21 nt, Human
cccccacaaagaacagacguc

SEQ ID NO: 373975 - RNA, 24 nt, Human
ccccuuccauucaaauuuuuaaaa

SEQ ID NO: 373976 - RNA, 22 nt, Human
ccgccaguuaguugcacuugcu

SEQ ID NO: 373977 - RNA, 21 nt, Human
ccuaccaccuagaauugcuac

SEQ ID NO: 373978 - RNA, 19 nt, Human
ccuuuacccccuuccauuc

SEQ ID NO: 373979 - RNA, 24 nt, Human
cguaaaacaacaacaacaacaaaa

SEQ ID NO: 373980 - RNA, 20 nt, Human
cguacacaacccuaccaccu

SEQ ID NO: 373981 - RNA, 23 nt, Human
cuaacucugcuccuggacuaugc

SEQ ID NO: 373982 - RNA, 20 nt, Human
cuaagauggguauuugugac

SEQ ID NO: 373983 - RNA, 24 nt, Human
cuccaauaaaaauaaucuccaugg

SEQ ID NO: 373984 - RNA, 21 nt, Human
cucccagaagcggcuaaguaa

SEQ ID NO: 373985 - RNA, 21 nt, Human
cucuguuuccccauccacacc

SEQ ID NO: 373986 - RNA, 21 nt, Human
cugaccuccagcagcguuaca

SEQ ID NO: 373987 - RNA, 19 nt, Human
cugcagauaaauaggacug

SEQ ID NO: 373988 - RNA, 19 nt, Human
cugcugguaguggcagaau

SEQ ID NO: 373989 - RNA, 25 nt, Human
cuggaaaauauuccaaguauuucca

SEQ ID NO: 373990 - RNA, 21 nt, Human
cuggagccacggcaaacccug

SEQ ID NO: 373991 - RNA, 19 nt, Human
cuggggcucugaacugcuc

SEQ ID NO: 373992 - RNA, 20 nt, Human
cuguauuugucucacucagg

SEQ ID NO: 373993 - RNA, 23 nt, Human
cuugaagccuucaggcucaauga

SEQ ID NO: 373994 - RNA, 25 nt, Human
gagaccguaaaacaacaacaacaac

SEQ ID NO: 373995 - RNA, 19 nt, Human
gagcuuggauguguaucug

SEQ ID NO: 373996 - RNA, 21 nt, Human
gaucagcuggcuccaggggag

SEQ ID NO: 373997 - RNA, 23 nt, Human
gaugcaaauuuuaacacaagauu

SEQ ID NO: 373998 - RNA, 19 nt, Human
gcaaaaaccaaaaacccaa

SEQ ID NO: 373999 - RNA, 19 nt, Human
gccacagggcuuccugacu

SEQ ID NO: 374000 - RNA, 19 nt, Human
gccacggcaaacccugggc

SEQ ID NO: 374001 - RNA, 21 nt, Human
gccagaguacauugguguaug

SEQ ID NO: 374002 - RNA, 23 nt, Human
gccucuguuuccccauccacacc

SEQ ID NO: 374003 - RNA, 19 nt, Human
ggacagaguugugaccaag

SEQ ID NO: 374004 - RNA, 18 nt, Human
ggaggggaggggaaaggc

SEQ ID NO: 374005 - RNA, 20 nt, Human
gggagaaagugaggguacug

SEQ ID NO: 374006 - RNA, 18 nt, Human
ggggaugggaagcugaug

SEQ ID NO: 374007 - RNA, 18 nt, Human
gguacuguggcugucugg

SEQ ID NO: 374008 - RNA, 23 nt, Human
guuaccuuuccuccccaauagaa

SEQ ID NO: 374009 - RNA, 22 nt, Human
uaaaacaacaacaacaacaaaa

SEQ ID NO: 374010 - RNA, 24 nt, Human
uaaaacaacaacaacaacaaaaaa

SEQ ID NO: 374011 - RNA, 18 nt, Human
uaaaugaaucacugaaca

SEQ ID NO: 374012 - RNA, 23 nt, Human
uaaauuuuaacacuuuacaaugg

SEQ ID NO: 374013 - RNA, 21 nt, Human
uaaguaaauacaauuugcuuc

SEQ ID NO: 374014 - RNA, 25 nt, Human
uacaauggcuauuuuugugcuaaaa

SEQ ID NO: 374015 - RNA, 19 nt, Human
uacagggaguagaucugga

SEQ ID NO: 374016 - RNA, 19 nt, Human
uacccccuuccauucaaag

SEQ ID NO: 374017 - RNA, 26 nt, Human
uaccuguaaagacucuagacuuuggg

SEQ ID NO: 374018 - RNA, 20 nt, Human
uacuuuaaauuaauugguua

SEQ ID NO: 374019 - RNA, 19 nt, Human
uagcaauaggacuuaauac

SEQ ID NO: 374020 - RNA, 21 nt, Human
uagcucagacugaccuccagc

SEQ ID NO: 374021 - RNA, 18 nt, Human
uaggaucccuccagggaa

SEQ ID NO: 374022 - RNA, 19 nt, Human
uaguggcaguuucuuuccu

SEQ ID NO: 374023 - RNA, 19 nt, Human
ucaaugauugagaugggag

SEQ ID NO: 374024 - RNA, 19 nt, Human
ucaauucuuuuugcucagc

SEQ ID NO: 374025 - RNA, 19 nt, Human
ucacaacccugguuacuac

SEQ ID NO: 374026 - RNA, 25 nt, Human
ucacaggggccucucucuucugauc

SEQ ID NO: 374027 - RNA, 20 nt, Human
ucagcagguugagugaggga

SEQ ID NO: 374028 - RNA, 18 nt, Human
ucccagaaaaacacaagc

SEQ ID NO: 374029 - RNA, 19 nt, Human
uccguacacaacccuacca

SEQ ID NO: 374030 - RNA, 21 nt, Human
ucgguucaugaaugaugcuuc

SEQ ID NO: 374031 - RNA, 24 nt, Human
ucuaaggcuggggcagcaggaggc

SEQ ID NO: 374032 - RNA, 21 nt, Human
ucuacccagaaagcucacccc

SEQ ID NO: 374033 - RNA, 20 nt, Human
ucugcaacuggggcucugaa

SEQ ID NO: 374034 - RNA, 19 nt, Human
ugaaugaugcuuccuccuc

SEQ ID NO: 374035 - RNA, 21 nt, Human
ugaaugcaucaggugccucag

SEQ ID NO: 374036 - RNA, 23 nt, Human
ugaauuggacagaguugugacca

SEQ ID NO: 374037 - RNA, 19 nt, Human
ugaccaagcagcccgggcg

SEQ ID NO: 374038 - RNA, 20 nt, Human
ugaccaagcagcccgggcgu

SEQ ID NO: 374039 - RNA, 24 nt, Human
ugagaacaggauuugaaagaacaa

SEQ ID NO: 374040 - RNA, 19 nt, Human
ugaggcacaggcauugaaa

SEQ ID NO: 374041 - RNA, 22 nt, Human
ugaggcacaggcauugaaaaca

SEQ ID NO: 374042 - RNA, 21 nt, Human
ugaggguacuguggcugucug

SEQ ID NO: 374043 - RNA, 23 nt, Human
ugcaaaaaaacuucaugacuucc

SEQ ID NO: 374044 - RNA, 22 nt, Human
ugccaacuccuugcuggucgcc

SEQ ID NO: 374045 - RNA, 19 nt, Human
ugccaggguguacucagau

SEQ ID NO: 374046 - RNA, 19 nt, Human
ugcuuaugguugucccccc

SEQ ID NO: 374047 - RNA, 22 nt, Human
ugcuuggccaucugcuccccaa

SEQ ID NO: 374048 - RNA, 21 nt, Human
uggaggggaggggaaaggcug

SEQ ID NO: 374049 - RNA, 22 nt, Human
uggccaucugcuccccaauucu

SEQ ID NO: 374050 - RNA, 20 nt, Human
uggugggcagggaauggguc

SEQ ID NO: 374051 - RNA, 27 nt, Human
uggugggggaugggaagcugaugggau

SEQ ID NO: 374052 - RNA, 22 nt, Human
ugucugaagacaaaagagcaaa

SEQ ID NO: 374053 - RNA, 22 nt, Human
ugugugcguuucucucugaaca

SEQ ID NO: 374054 - RNA, 22 nt, Human
uuaugguuguccccccagcagc

SEQ ID NO: 374055 - RNA, 18 nt, Human
uuauuuggaauuccuuca

SEQ ID NO: 374056 - RNA, 22 nt, Human
uucaacacaucuauuuaucaaa

SEQ ID NO: 374057 - RNA, 22 nt, Human
uucaggucagauuacccaagaa

SEQ ID NO: 374058 - RNA, 18 nt, Human
uuccccauccacaccuca

SEQ ID NO: 374059 - RNA, 23 nt, Human
uugcuucuuacuuuauccacugu

SEQ ID NO: 374060 - RNA, 20 nt, Human
uuggucuugggcaguguggg

SEQ ID NO: 374061 - RNA, 18 nt, Human
uugguguauguuaaauga

SEQ ID NO: 374062 - RNA, 18 nt, Human
uuuccccauccacaccuc

SEQ ID NO: 374063 - RNA, 21 nt, Human
uuucuagcuguauuuaaagag

SEQ ID NO: 374064 - RNA, 21 nt, Human
uuucuggagauauacaaaugc

SEQ ID NO: 374065 - RNA, 23 nt, Human
uuucuggugggcagggaaugggu

SEQ ID NO: 374066 - RNA, 20 nt, Human
uuugugacagcagcugaggc

SEQ ID NO: 374067 - RNA, 22 nt, Human
uuuuaacacuuuacaauggcua

SEQ ID NO: 374068 - RNA, 21 nt, Human
uuuuuugccacgcaauucuga

SEQ ID NO: 374069 - RNA, 19 nt, Human
aaacagccaaaaaccucaa

SEQ ID NO: 374070 - RNA, 19 nt, Human
aaagagagagaagaagaaa

SEQ ID NO: 374071 - RNA, 18 nt, Human
aacaacuggccaaggucc

SEQ ID NO: 374072 - RNA, 19 nt, Human
aaccauaaacaucucugcc

SEQ ID NO: 374073 - RNA, 19 nt, Human
aagacaaagauacaugaaa

SEQ ID NO: 374074 - RNA, 24 nt, Human
aagacaaagauacaugaaacugaa

SEQ ID NO: 374075 - RNA, 22 nt, Human
aagaggugaacaggaaaccaag

SEQ ID NO: 374076 - RNA, 20 nt, Human
aaggggaggcaaucauggug

SEQ ID NO: 374077 - RNA, 22 nt, Human
aaguggaacagagaaacagcuc

SEQ ID NO: 374078 - RNA, 22 nt, Human
aaucaaaguaauuuaauaaaca

SEQ ID NO: 374079 - RNA, 18 nt, Human
aaucuuaccuuccacaua

SEQ ID NO: 374080 - RNA, 26 nt, Human
acacuccucugaccuuaagcccacca

SEQ ID NO: 374081 - RNA, 21 nt, Human
acagccaaaaaccucaagccu

SEQ ID NO: 374082 - RNA, 23 nt, Human
acaggcuuuuguuucccucuuuc

SEQ ID NO: 374083 - RNA, 19 nt, Human
acauagcaaagaaggaggc

SEQ ID NO: 374084 - RNA, 21 nt, Human
accccacugcucucaaaguug

SEQ ID NO: 374085 - RNA, 23 nt, Human
acccugggaaaaaugggguuucc

SEQ ID NO: 374086 - RNA, 19 nt, Human
acucgcaucuuuguuccug

SEQ ID NO: 374087 - RNA, 19 nt, Human
acuuuagagacauuaucug

SEQ ID NO: 374088 - RNA, 23 nt, Human
agaaagagggagaggggaguguu

SEQ ID NO: 374089 - RNA, 23 nt, Human
agaaagcagccuuguggccacug

SEQ ID NO: 374090 - RNA, 18 nt, Human
agaagaagaaagagggag

SEQ ID NO: 374091 - RNA, 19 nt, Human
agaagaagaaagagggaga

SEQ ID NO: 374092 - RNA, 18 nt, Human
agacaagacccccauuua

SEQ ID NO: 374093 - RNA, 19 nt, Human
agagagaagaagaaagagg

SEQ ID NO: 374094 - RNA, 19 nt, Human
agagagaagaagaaagagg

SEQ ID NO: 374095 - RNA, 21 nt, Human
agagagaagaagaaagagggg

SEQ ID NO: 374096 - RNA, 19 nt, Human
aggaaacgucaggguuaau

SEQ ID NO: 374097 - RNA, 20 nt, Human
aggacacccucauuaucacc

SEQ ID NO: 374098 - RNA, 21 nt, Human
aggaguagggaaagcugcaag

SEQ ID NO: 374099 - RNA, 20 nt, Human
aggcaaagacuuuagagaca

SEQ ID NO: 374100 - RNA, 18 nt, Human
agguaacagcaaccguca

SEQ ID NO: 374101 - RNA, 19 nt, Human
aguaaaaaacagccaaaaa

SEQ ID NO: 374102 - RNA, 20 nt, Human
aucagccuuuaaugcuaaaa

SEQ ID NO: 374103 - RNA, 24 nt, Human
aucaguuuuauuucacaaacauuu

SEQ ID NO: 374104 - RNA, 21 nt, Human
caaaaugccagguaucucaug

SEQ ID NO: 374105 - RNA, 18 nt, Human
caaacucucacccuaaug

SEQ ID NO: 374106 - RNA, 18 nt, Human
caaaguccauuaaccugu

SEQ ID NO: 374107 - RNA, 20 nt, Human
caacacuuugucuuccacau

SEQ ID NO: 374108 - RNA, 18 nt, Human
caaggcacugugcuagaa

SEQ ID NO: 374109 - RNA, 19 nt, Human
cacacauggaugacaaaca

SEQ ID NO: 374110 - RNA, 23 nt, Human
cacaggccaggccaguauuuagg

SEQ ID NO: 374111 - RNA, 23 nt, Human
cacaggcuuaaagcuaaaaaccc

SEQ ID NO: 374112 - RNA, 24 nt, Human
caccagggccuguguuauacccug

SEQ ID NO: 374113 - RNA, 19 nt, Human
cacugcugaccaacagagc

SEQ ID NO: 374114 - RNA, 22 nt, Human
cagaacagcugccaagcacccc

SEQ ID NO: 374115 - RNA, 20 nt, Human
cagcaagguccaugggcaca

SEQ ID NO: 374116 - RNA, 20 nt, Human
cagcugccaagcaccccacu

SEQ ID NO: 374117 - RNA, 23 nt, Human
cagggauauuugaaaaaggcagg

SEQ ID NO: 374118 - RNA, 19 nt, Human
caucccucccuacacacuc

SEQ ID NO: 374119 - RNA, 21 nt, Human
ccaggugggaaaaggcaggga

SEQ ID NO: 374120 - RNA, 24 nt, Human
ccaguuaaaaucaguuuuauuuca

SEQ ID NO: 374121 - RNA, 22 nt, Human
ccaucuuuggucacuucccaaa

SEQ ID NO: 374122 - RNA, 21 nt, Human
cccugugcugguuugagugag

SEQ ID NO: 374123 - RNA, 22 nt, Human
ccuaguacaaugguucucaaac

SEQ ID NO: 374124 - RNA, 20 nt, Human
ccucccuuccuuccuuauuc

SEQ ID NO: 374125 - RNA, 21 nt, Human
ccucccuuccuuccuuauucu

SEQ ID NO: 374126 - RNA, 23 nt, Human
ccugacaaacuucugacagcagc

SEQ ID NO: 374127 - RNA, 18 nt, Human
ccuguagccuuugggggu

SEQ ID NO: 374128 - RNA, 22 nt, Human
ccuuaagcccaccaaacuccuu

SEQ ID NO: 374129 - RNA, 18 nt, Human
cuaauccacccaucagcc

SEQ ID NO: 374130 - RNA, 28 nt, Human
cucacccuaauguaagacaagaccccca

SEQ ID NO: 374131 - RNA, 19 nt, Human
cuccucugaccuuaagccc

SEQ ID NO: 374132 - RNA, 21 nt, Human
cuccucugaccuuaagcccac

SEQ ID NO: 374133 - RNA, 23 nt, Human
cugcugaacaggcuuuuguuucc

SEQ ID NO: 374134 - RNA, 22 nt, Human
cuuccuuauucuaccggcacaa

SEQ ID NO: 374135 - RNA, 24 nt, Human
gaaaagacaaagauacaugaaagg

SEQ ID NO: 374136 - RNA, 19 nt, Human
gaaagagggagaggggagu

SEQ ID NO: 374137 - RNA, 21 nt, Human
gaagccuggcagguuggggau

SEQ ID NO: 374138 - RNA, 23 nt, Human
gaaugaacaccaaggguuuagga

SEQ ID NO: 374139 - RNA, 18 nt, Human
gagagaagaagaaagagg

SEQ ID NO: 374140 - RNA, 20 nt, Human
gagcaccuguacacugcccc

SEQ ID NO: 374141 - RNA, 22 nt, Human
gauuuacagcccauucuucccu

SEQ ID NO: 374142 - RNA, 24 nt, Human
gcagguucuagaggaaaagacaaa

SEQ ID NO: 374143 - RNA, 25 nt, Human
gccaagcaccccacugcucucaaag

SEQ ID NO: 374144 - RNA, 24 nt, Human
ggaaaaaugggguuucuucaugcu

SEQ ID NO: 374145 - RNA, 23 nt, Human
ggaaaagacaaagauacaugaaa

SEQ ID NO: 374146 - RNA, 21 nt, Human
ggauuucuuuugugcuuugau

SEQ ID NO: 374147 - RNA, 24 nt, Human
gggcaggggcggcacaggccaggc

SEQ ID NO: 374148 - RNA, 20 nt, Human
gguuucuucaugcuuugugc

SEQ ID NO: 374149 - RNA, 28 nt, Human
uaaaaaacagccaaaaaccucaagccug

SEQ ID NO: 374150 - RNA, 21 nt, Human
uaaaaauaagucggcaaauga

SEQ ID NO: 374151 - RNA, 21 nt, Human
uaaaagcaauaaacaagagca

SEQ ID NO: 374152 - RNA, 24 nt, Human
uaaaauagcugauaaaucuagagc

SEQ ID NO: 374153 - RNA, 18 nt, Human
uaaaauagguggcugggc

SEQ ID NO: 374154 - RNA, 23 nt, Human
uaaacacaaaguccauuaaccug

SEQ ID NO: 374155 - RNA, 23 nt, Human
uacaguauauguuuccagguggg

SEQ ID NO: 374156 - RNA, 20 nt, Human
uacccugggaaaaauggggu

SEQ ID NO: 374157 - RNA, 20 nt, Human
uacucagaggucagagagca

SEQ ID NO: 374158 - RNA, 20 nt, Human
uagaacaugcacaguuugcc

SEQ ID NO: 374159 - RNA, 21 nt, Human
uaggauuaaaaaaaaaaauac

SEQ ID NO: 374160 - RNA, 19 nt, Human
uaggcacuuaggucccucc

SEQ ID NO: 374161 - RNA, 18 nt, Human
uaucggauuuuuagcuug

SEQ ID NO: 374162 - RNA, 21 nt, Human
uaugcuuucuuuuccaaagua

SEQ ID NO: 374163 - RNA, 22 nt, Human
uauggaaaguggaacagagaaa

SEQ ID NO: 374164 - RNA, 22 nt, Human
uauucuacugugagaguggaaa

SEQ ID NO: 374165 - RNA, 21 nt, Human
ucaaaaaagucauuuuaaaau

SEQ ID NO: 374166 - RNA, 19 nt, Human
ucacacauggaugacaaac

SEQ ID NO: 374167 - RNA, 20 nt, Human
ucagcaggucgccuguagcc

SEQ ID NO: 374168 - RNA, 26 nt, Human
ucagcaggucgccuguagccuuuggg

SEQ ID NO: 374169 - RNA, 19 nt, Human
ucagccuuuaaugcuaaaa

SEQ ID NO: 374170 - RNA, 22 nt, Human
ucaggguuucaaacuccugugc

SEQ ID NO: 374171 - RNA, 18 nt, Human
uccaaaguacauggccag

SEQ ID NO: 374172 - RNA, 18 nt, Human
uccaauuaaaaauaaggc

SEQ ID NO: 374173 - RNA, 22 nt, Human
uccacauacaucccucccuaca

SEQ ID NO: 374174 - RNA, 22 nt, Human
uccacaugcacaggcuuaaagc

SEQ ID NO: 374175 - RNA, 19 nt, Human
ucccucuuucucugagccu

SEQ ID NO: 374176 - RNA, 19 nt, Human
ucccugccucccuuccuuc

SEQ ID NO: 374177 - RNA, 23 nt, Human
uccuacugcaguuggggcaggag

SEQ ID NO: 374178 - RNA, 18 nt, Human
uccuguggccacagagag

SEQ ID NO: 374179 - RNA, 25 nt, Human
ucuaauucaguagguaugggguaug

SEQ ID NO: 374180 - RNA, 21 nt, Human
ucucugagcagcaccuugccu

SEQ ID NO: 374181 - RNA, 19 nt, Human
ucuuccacauuaaauuugg

SEQ ID NO: 374182 - RNA, 19 nt, Human
ucuuuugauuuuccaacac

SEQ ID NO: 374183 - RNA, 19 nt, Human
ugaaaaaaaagcaaagcaa

SEQ ID NO: 374184 - RNA, 24 nt, Human
ugaaaaaaaagcaaagcaaaccuc

SEQ ID NO: 374185 - RNA, 26 nt, Human
ugaaauccuauacaugcaacacuucu

SEQ ID NO: 374186 - RNA, 18 nt, Human
ugaaaugcagguagaauu

SEQ ID NO: 374187 - RNA, 19 nt, Human
ugaacaggaaaccaagguc

SEQ ID NO: 374188 - RNA, 19 nt, Human
ugaaucuuaccuuccacau

SEQ ID NO: 374189 - RNA, 20 nt, Human
ugaaucuuaccuuccacaua

SEQ ID NO: 374190 - RNA, 24 nt, Human
ugacaaacaaaugugaagacagga

SEQ ID NO: 374191 - RNA, 19 nt, Human
ugacaaagggcucagaaac

SEQ ID NO: 374192 - RNA, 19 nt, Human
ugacaugcuuugccucccu

SEQ ID NO: 374193 - RNA, 19 nt, Human
ugaccaacagagcuaccaa

SEQ ID NO: 374194 - RNA, 21 nt, Human
ugaggcaaagacuuuagagac

SEQ ID NO: 374195 - RNA, 18 nt, Human
ugaguagugggggcaggg

SEQ ID NO: 374196 - RNA, 20 nt, Human
ugcagauuuccuuggccuau

SEQ ID NO: 374197 - RNA, 21 nt, Human
ugcagcaagguccaugggcac

SEQ ID NO: 374198 - RNA, 21 nt, Human
ugccaagcaccccacugcucu

SEQ ID NO: 374199 - RNA, 25 nt, Human
ugccaagcaccccacugcucucaaa

SEQ ID NO: 374200 - RNA, 25 nt, Human
ugccagguaucucaugucgaccucu

SEQ ID NO: 374201 - RNA, 21 nt, Human
ugccuuguuaguaaaaaacag

SEQ ID NO: 374202 - RNA, 19 nt, Human
ugcuuugauucucagcaac

SEQ ID NO: 374203 - RNA, 25 nt, Human
uggaaaacguugcaguaucggauuu

SEQ ID NO: 374204 - RNA, 23 nt, Human
uggaacagagaaacagcucaggg

SEQ ID NO: 374205 - RNA, 24 nt, Human
uggcaaaauaggaaacagaacaac

SEQ ID NO: 374206 - RNA, 20 nt, Human
ugggguuuggagggaagaga

SEQ ID NO: 374207 - RNA, 19 nt, Human
ugguuugagugagccucuu

SEQ ID NO: 374208 - RNA, 23 nt, Human
uguaaaagcaauaaacaagagca

SEQ ID NO: 374209 - RNA, 18 nt, Human
ugugcaggaugcagcaag

SEQ ID NO: 374210 - RNA, 23 nt, Human
uguuuuguuuuguuuuuguuuuu

SEQ ID NO: 374211 - RNA, 25 nt, Human
uucaaaacauuucucacaagaaucu

SEQ ID NO: 374212 - RNA, 20 nt, Human
uucccucuuucucugagccu

SEQ ID NO: 374213 - RNA, 20 nt, Human
uuccuggaaaacacagaaca

SEQ ID NO: 374214 - RNA, 24 nt, Human
uugggagacuccaacugaagagga

SEQ ID NO: 374215 - RNA, 22 nt, Human
uuggggcaggaguagggaaagc

SEQ ID NO: 374216 - RNA, 23 nt, Human
uuuggagggaagagauucaaaga

SEQ ID NO: 374217 - RNA, 19 nt, Human
uuuucuacaaacacgaccg

SEQ ID NO: 374218 - RNA, 22 nt, Human
uuuuguuuuguuuuuguuuuug

SEQ ID NO: 374219 - RNA, 19 nt, Human
aaaaacccaacccaaacag

SEQ ID NO: 374220 - RNA, 21 nt, Human
aaaaaggaaaaauaagaagga

SEQ ID NO: 374221 - RNA, 23 nt, Human
aaaagacagaugcugggguggcc

SEQ ID NO: 374222 - RNA, 20 nt, Human
aaacccaacccaaacagcag

SEQ ID NO: 374223 - RNA, 22 nt, Human
aacccaacccaaacagcagaga

SEQ ID NO: 374224 - RNA, 24 nt, Human
aagaaggaaugcauugucucuuug

SEQ ID NO: 374225 - RNA, 20 nt, Human
aagcaaagucagggaggccc

SEQ ID NO: 374226 - RNA, 21 nt, Human
aagcaggggaaugggggcugu

SEQ ID NO: 374227 - RNA, 18 nt, Human
acacccccaccaccgcca

SEQ ID NO: 374228 - RNA, 22 nt, Human
acagguggaagggguggggaca

SEQ ID NO: 374229 - RNA, 23 nt, Human
acgcugauggcccuuccagcccu

SEQ ID NO: 374230 - RNA, 21 nt, Human
acugcagaaaacugguacauc

SEQ ID NO: 374231 - RNA, 20 nt, Human
acuggcgcgcagagggcugg

SEQ ID NO: 374232 - RNA, 22 nt, Human
agaagcaaagucagggaggccc

SEQ ID NO: 374233 - RNA, 26 nt, Human
agagagcuuugggucugggggacagg

SEQ ID NO: 374234 - RNA, 20 nt, Human
agagaggagggggaggaggg

SEQ ID NO: 374235 - RNA, 21 nt, Human
agagaggcauuuacagagcug

SEQ ID NO: 374236 - RNA, 24 nt, Human
agagcuuugggucugggggacagg

SEQ ID NO: 374237 - RNA, 19 nt, Human
agaggagggggaggaggga

SEQ ID NO: 374238 - RNA, 23 nt, Human
agaucccugccagagaggagggg

SEQ ID NO: 374239 - RNA, 18 nt, Human
agcagcagcaggagcggc

SEQ ID NO: 374240 - RNA, 23 nt, Human
agcaggacaagaaucccugcaaa

SEQ ID NO: 374241 - RNA, 21 nt, Human
agccagggcucuggcguucuc

SEQ ID NO: 374242 - RNA, 21 nt, Human
agccagggcucuggcguucuc

SEQ ID NO: 374243 - RNA, 22 nt, Human
agccaucaggugggagaagccu

SEQ ID NO: 374244 - RNA, 18 nt, Human
agccggagggcagggggg

SEQ ID NO: 374245 - RNA, 18 nt, Human
aggacgaccagccucagc

SEQ ID NO: 374246 - RNA, 20 nt, Human
aggacgaccagccucagccc

SEQ ID NO: 374247 - RNA, 22 nt, Human
aggagggggaggagggaggagg

SEQ ID NO: 374248 - RNA, 18 nt, Human
agggaggaggaggaaggg

SEQ ID NO: 374249 - RNA, 27 nt, Human
agggggaggagggaggaggaggaaggg

SEQ ID NO: 374250 - RNA, 21 nt, Human
agggggaggagggaggaggga

SEQ ID NO: 374251 - RNA, 21 nt, Human
agggggcacaggagccccagg

SEQ ID NO: 374252 - RNA, 19 nt, Human
aggggguggugccugucgc

SEQ ID NO: 374253 - RNA, 22 nt, Human
agugaagaagcaaagucaggga

SEQ ID NO: 374254 - RNA, 19 nt, Human
aguggcuaccgcaggcacu

SEQ ID NO: 374255 - RNA, 19 nt, Human
auaaaauacaggaaaccca

SEQ ID NO: 374256 - RNA, 20 nt, Human
augggggcuguggcaagguu

SEQ ID NO: 374257 - RNA, 22 nt, Human
caaaaggugacccccccacccc

SEQ ID NO: 374258 - RNA, 24 nt, Human
caaaaggugacccccccacccccc

SEQ ID NO: 374259 - RNA, 21 nt, Human
caacccaaacagcagagagaa

SEQ ID NO: 374260 - RNA, 22 nt, Human
caaggcaaaaggugaccccccc

SEQ ID NO: 374261 - RNA, 18 nt, Human
cacccgggucaguugggc

SEQ ID NO: 374262 - RNA, 18 nt, Human
cacuggcgcgcagagggc

SEQ ID NO: 374263 - RNA, 23 nt, Human
cagauaacuaaggggaaaaaccc

SEQ ID NO: 374264 - RNA, 24 nt, Human
cagcagcagcagcagcagcaggag

SEQ ID NO: 374265 - RNA, 23 nt, Human
cagcagcagcagcaggagcggcc

SEQ ID NO: 374266 - RNA, 19 nt, Human
cagcagcagcaggagcggc

SEQ ID NO: 374267 - RNA, 21 nt, Human
cagccggagggcaggggggcc

SEQ ID NO: 374268 - RNA, 18 nt, Human
caggacaagaaucccugc

SEQ ID NO: 374269 - RNA, 19 nt, Human
caggcggccugcuggccag

SEQ ID NO: 374270 - RNA, 19 nt, Human
cagggacaggugugggugg

SEQ ID NO: 374271 - RNA, 20 nt, Human
cauccagggcucuggcguuc

SEQ ID NO: 374272 - RNA, 20 nt, Human
ccaacccaaacagcagagag

SEQ ID NO: 374273 - RNA, 24 nt, Human
ccaacccaaacagcagagagaauu

SEQ ID NO: 374274 - RNA, 22 nt, Human
ccaccgggcacuguuuggggcg

SEQ ID NO: 374275 - RNA, 19 nt, Human
ccagccgccggcuuugcug

SEQ ID NO: 374276 - RNA, 24 nt, Human
ccagcggcgccgcccgcucccagg

SEQ ID NO: 374277 - RNA, 20 nt, Human
ccagggagaugagguuccag

SEQ ID NO: 374278 - RNA, 19 nt, Human
ccagggcucuggcguucuc

SEQ ID NO: 374279 - RNA, 18 nt, Human
cccaccuuucugggggca

SEQ ID NO: 374280 - RNA, 25 nt, Human
ccccaccaccgccagcagcuaccua

SEQ ID NO: 374281 - RNA, 18 nt, Human
ccccagccagcacaucac

SEQ ID NO: 374282 - RNA, 18 nt, Human
ccccagccagcgcaucac

SEQ ID NO: 374283 - RNA, 20 nt, Human
cccccaccaccgccagcagg

SEQ ID NO: 374284 - RNA, 19 nt, Human
cccccaccccccuauauuc

SEQ ID NO: 374285 - RNA, 22 nt, Human
cccccaccccccuauauuccuu

SEQ ID NO: 374286 - RNA, 22 nt, Human
cccccagccagcgcaucaccau

SEQ ID NO: 374287 - RNA, 23 nt, Human
ccccgccgccccgcaggcgccca

SEQ ID NO: 374288 - RNA, 21 nt, Human
ccccuauauuccuauagacuu

SEQ ID NO: 374289 - RNA, 20 nt, Human
ccccuucuugaaaaugaggg

SEQ ID NO: 374290 - RNA, 21 nt, Human
cccgagguacugggagggcuc

SEQ ID NO: 374291 - RNA, 27 nt, Human
cccucgaauuuacaaccagggacagac

SEQ ID NO: 374292 - RNA, 24 nt, Human
cccugccauccucagccucuccca

SEQ ID NO: 374293 - RNA, 21 nt, Human
cccuggggagaaccagggaga

SEQ ID NO: 374294 - RNA, 26 nt, Human
ccgugcugugaccuucaguuacucuc

SEQ ID NO: 374295 - RNA, 20 nt, Human
ccuccuucccaggugcuugg

SEQ ID NO: 374296 - RNA, 20 nt, Human
ccuggcacccgggcucccac

SEQ ID NO: 374297 - RNA, 22 nt, Human
cgccccgcaggcgcccagcagc

SEQ ID NO: 374298 - RNA, 18 nt, Human
cgccccgcgggagggcuc

SEQ ID NO: 374299 - RNA, 18 nt, Human
cgcccgggcucaggggag

SEQ ID NO: 374300 - RNA, 22 nt, Human
cgcucccagcgccgguagcccg

SEQ ID NO: 374301 - RNA, 18 nt, Human
cgggagggcuccgcggca

SEQ ID NO: 374302 - RNA, 20 nt, Human
cgguccucgccgccaccggg

SEQ ID NO: 374303 - RNA, 19 nt, Human
cgugggccugggcgggcuu

SEQ ID NO: 374304 - RNA, 20 nt, Human
cucagaugccaccuccuucc

SEQ ID NO: 374305 - RNA, 20 nt, Human
cucauugggauucaccccca

SEQ ID NO: 374306 - RNA, 20 nt, Human
cucauugggauucaccccca

SEQ ID NO: 374307 - RNA, 23 nt, Human
cuccaugggugguuuuacucaac

SEQ ID NO: 374308 - RNA, 21 nt, Human
cucccagcgccgguagcccgc

SEQ ID NO: 374309 - RNA, 20 nt, Human
cucccgaguacggaacucug

SEQ ID NO: 374310 - RNA, 19 nt, Human
cucugagagggacccucau

SEQ ID NO: 374311 - RNA, 19 nt, Human
cugcgcccgcgaagccacu

SEQ ID NO: 374312 - RNA, 22 nt, Human
cugggcacucagggaaaggggc

SEQ ID NO: 374313 - RNA, 22 nt, Human
cuggugccgucuccaccaccca

SEQ ID NO: 374314 - RNA, 24 nt, Human
cugguugugcgucgcgucccccuu

SEQ ID NO: 374315 - RNA, 22 nt, Human
cugugaccuucaguuacucucc

SEQ ID NO: 374316 - RNA, 22 nt, Human
cuugcagcccgagguacuggga

SEQ ID NO: 374317 - RNA, 18 nt, Human
cuuguaggguggccucug

SEQ ID NO: 374318 - RNA, 22 nt, Human
cuuugcuggugguucugugccc

SEQ ID NO: 374319 - RNA, 20 nt, Human
cuuugggucugggggacagg

SEQ ID NO: 374320 - RNA, 20 nt, Human
gaacaccccccgacccaggg

SEQ ID NO: 374321 - RNA, 22 nt, Human
gagcccgcaacgcagugucuga

SEQ ID NO: 374322 - RNA, 21 nt, Human
gaggaaccaugggcacugggu

SEQ ID NO: 374323 - RNA, 20 nt, Human
gaggacccaggcgcccgggc

SEQ ID NO: 374324 - RNA, 22 nt, Human
gaggacccaggcgcccgggcuc

SEQ ID NO: 374325 - RNA, 20 nt, Human
gaggagacacccugggcacu

SEQ ID NO: 374326 - RNA, 19 nt, Human
gagggcaggggggccugga

SEQ ID NO: 374327 - RNA, 24 nt, Human
gagggcaggggggccuggagggug

SEQ ID NO: 374328 - RNA, 23 nt, Human
gagugaagaagcaaagucaggga

SEQ ID NO: 374329 - RNA, 23 nt, Human
gcaauucccccaagcucagacau

SEQ ID NO: 374330 - RNA, 22 nt, Human
gcauugucucuuuguuaugugc

SEQ ID NO: 374331 - RNA, 23 nt, Human
gccccaggugggcagguagggug

SEQ ID NO: 374332 - RNA, 25 nt, Human
ggaaaaacccaacccaaacagcaga

SEQ ID NO: 374333 - RNA, 21 nt, Human
ggaccaggagcgggaccggga

SEQ ID NO: 374334 - RNA, 22 nt, Human
ggaggaggaggaaggggcuacu

SEQ ID NO: 374335 - RNA, 24 nt, Human
ggaggagggaggaggaggaagggg

SEQ ID NO: 374336 - RNA, 21 nt, Human
ggagggcaggggggccuggag

SEQ ID NO: 374337 - RNA, 19 nt, Human
ggagggggaggagggagga

SEQ ID NO: 374338 - RNA, 24 nt, Human
ggagggggaggagggaggaggagg

SEQ ID NO: 374339 - RNA, 20 nt, Human
ggcaaaaggugaccccccca

SEQ ID NO: 374340 - RNA, 22 nt, Human
ggcacuggguccugagcccgcc

SEQ ID NO: 374341 - RNA, 19 nt, Human
ggcaggggggccuggaggg

SEQ ID NO: 374342 - RNA, 24 nt, Human
ggcaggggggccuggaggguggug

SEQ ID NO: 374343 - RNA, 18 nt, Human
gggcacaggagccccagg

SEQ ID NO: 374344 - RNA, 21 nt, Human
ggggagagagcuuugggucug

SEQ ID NO: 374345 - RNA, 20 nt, Human
gggggcaucuggcuccuucc

SEQ ID NO: 374346 - RNA, 21 nt, Human
ggguccugagcccgcccuacc

SEQ ID NO: 374347 - RNA, 22 nt, Human
gucugcccuggggagaaccagg

SEQ ID NO: 374348 - RNA, 20 nt, Human
gugggccugggcgggcuugg

SEQ ID NO: 374349 - RNA, 20 nt, Human
guggggcggccguguguggg

SEQ ID NO: 374350 - RNA, 22 nt, Human
guggggucuggggggcagaacc

SEQ ID NO: 374351 - RNA, 18 nt, Human
guggugccugucgccugg

SEQ ID NO: 374352 - RNA, 21 nt, Human
gugguguugggagggccuggc

SEQ ID NO: 374353 - RNA, 24 nt, Human
uaacuaaggggaaaaacccaaccc

SEQ ID NO: 374354 - RNA, 18 nt, Human
uacaaccagggacagaca

SEQ ID NO: 374355 - RNA, 18 nt, Human
uacagagcugcaguuucc

SEQ ID NO: 374356 - RNA, 23 nt, Human
uacaggaaacccacagauaacua

SEQ ID NO: 374357 - RNA, 20 nt, Human
uaccgccggcuauaaagaca

SEQ ID NO: 374358 - RNA, 21 nt, Human
uaccgccggcuauaaagacag

SEQ ID NO: 374359 - RNA, 18 nt, Human
uaccuagagaggcauuua

SEQ ID NO: 374360 - RNA, 22 nt, Human
uacggaacucugacagagccac

SEQ ID NO: 374361 - RNA, 18 nt, Human
uagcccgcggcgggggcg

SEQ ID NO: 374362 - RNA, 20 nt, Human
ucaccccugggcuuuccccu

SEQ ID NO: 374363 - RNA, 23 nt, Human
ucagcccagagaagucaggccuc

SEQ ID NO: 374364 - RNA, 22 nt, Human
ucagggagggggcuuuccgcag

SEQ ID NO: 374365 - RNA, 21 nt, Human
uccacccgguucccuucgccu

SEQ ID NO: 374366 - RNA, 18 nt, Human
ucccagagagucauggcc

SEQ ID NO: 374367 - RNA, 21 nt, Human
ucccagagagucauggcccca

SEQ ID NO: 374368 - RNA, 21 nt, Human
ucccaucuccaggaugaccuu

SEQ ID NO: 374369 - RNA, 18 nt, Human
ucccugcaaagguguccu

SEQ ID NO: 374370 - RNA, 22 nt, Human
ucccugggccucaguuuccccu

SEQ ID NO: 374371 - RNA, 22 nt, Human
uccggggagucccggggggucc

SEQ ID NO: 374372 - RNA, 23 nt, Human
uccucagccucucccagcuuggu

SEQ ID NO: 374373 - RNA, 19 nt, Human
uccugagcccgcccuaccc

SEQ ID NO: 374374 - RNA, 21 nt, Human
ucucagaugccaccuccuucc

SEQ ID NO: 374375 - RNA, 23 nt, Human
ucucagaugccaccuccuuccca

SEQ ID NO: 374376 - RNA, 20 nt, Human
ucucugaggggcgccagucc

SEQ ID NO: 374377 - RNA, 18 nt, Human
ugaaaagacagaugcugg

SEQ ID NO: 374378 - RNA, 22 nt, Human
ugaaaagacagaugcuggggug

SEQ ID NO: 374379 - RNA, 25 nt, Human
ugacccccccaccccccuauauucc

SEQ ID NO: 374380 - RNA, 21 nt, Human
ugagcacgaacgacgugcuga

SEQ ID NO: 374381 - RNA, 19 nt, Human
ugaggacaacuuguagggu

SEQ ID NO: 374382 - RNA, 22 nt, Human
ugaggacaacuuguaggguggc

SEQ ID NO: 374383 - RNA, 24 nt, Human
ugaggacaacuuguaggguggccu

SEQ ID NO: 374384 - RNA, 23 nt, Human
ugcauggcagcugauggccucgu

SEQ ID NO: 374385 - RNA, 23 nt, Human
ugccagagaggagggggaggagg

SEQ ID NO: 374386 - RNA, 21 nt, Human
ugcuuggguccacaugcccaa

SEQ ID NO: 374387 - RNA, 19 nt, Human
uggaggguggugugguguu

SEQ ID NO: 374388 - RNA, 21 nt, Human
uggaguggggagggggcacag

SEQ ID NO: 374389 - RNA, 23 nt, Human
uggcgacgacucagggagggggc

SEQ ID NO: 374390 - RNA, 19 nt, Human
ugggccccgggccugcacu

SEQ ID NO: 374391 - RNA, 18 nt, Human
uggggagggggcacagga

SEQ ID NO: 374392 - RNA, 24 nt, Human
uggggagggggcacaggagcccca

SEQ ID NO: 374393 - RNA, 21 nt, Human
ugggggacagguggaaggggu

SEQ ID NO: 374394 - RNA, 23 nt, Human
ugggggacagguggaaggggugg

SEQ ID NO: 374395 - RNA, 19 nt, Human
uggguccugagcccgcccu

SEQ ID NO: 374396 - RNA, 19 nt, Human
ugggugcacagacgggaac

SEQ ID NO: 374397 - RNA, 24 nt, Human
ugguaggagugaggaaccaugggc

SEQ ID NO: 374398 - RNA, 23 nt, Human
uguaggguggccucuggaguggg

SEQ ID NO: 374399 - RNA, 22 nt, Human
ugugcauggcagcugauggccu

SEQ ID NO: 374400 - RNA, 21 nt, Human
uguggcccagggugcuccccu

SEQ ID NO: 374401 - RNA, 19 nt, Human
uuacucuccucccugggcc

SEQ ID NO: 374402 - RNA, 23 nt, Human
uuccccuucuugaaaaugagggu

SEQ ID NO: 374403 - RNA, 23 nt, Human
uucucccccucugagagggaggc

SEQ ID NO: 374404 - RNA, 21 nt, Human
uugcccgugggccccgggccu

SEQ ID NO: 374405 - RNA, 20 nt, Human
uugugcgucgcgucccccuu

SEQ ID NO: 374406 - RNA, 22 nt, Human
uuuccacccgguucccuucgcc

SEQ ID NO: 374407 - RNA, 18 nt, Human
aaacaaaaaagcaggauc

SEQ ID NO: 374408 - RNA, 20 nt, Human
aaagagccaacccaacuuca

SEQ ID NO: 374409 - RNA, 26 nt, Human
aaaugugugaaggggcugaggugcug

SEQ ID NO: 374410 - RNA, 23 nt, Human
aacaauaaaaccaagaacaguau

SEQ ID NO: 374411 - RNA, 22 nt, Human
aacaggagagcauccaaaccca

SEQ ID NO: 374412 - RNA, 20 nt, Human
aagccccuccccccaccccc

SEQ ID NO: 374413 - RNA, 21 nt, Human
aagccccuccccccacccccc

SEQ ID NO: 374414 - RNA, 22 nt, Human
aauaguaauaguaaucaucaaa

SEQ ID NO: 374415 - RNA, 23 nt, Human
acaaagaagaaugggaacaacug

SEQ ID NO: 374416 - RNA, 19 nt, Human
acaacaggagagcauccaa

SEQ ID NO: 374417 - RNA, 22 nt, Human
acaaggcagggccucuuucaca

SEQ ID NO: 374418 - RNA, 19 nt, Human
acucuucccuccuagcucc

SEQ ID NO: 374419 - RNA, 24 nt, Human
agaaaccagcuauggcauggacaa

SEQ ID NO: 374420 - RNA, 19 nt, Human
aggaagcuguuuuccccca

SEQ ID NO: 374421 - RNA, 21 nt, Human
aggaggcugugggaagaugca

SEQ ID NO: 374422 - RNA, 23 nt, Human
aggaggcugugggaagaugcaac

SEQ ID NO: 374423 - RNA, 24 nt, Human
aggcagggccucuuucacaaaguu

SEQ ID NO: 374424 - RNA, 21 nt, Human
aggcuagaccccuacuuggcc

SEQ ID NO: 374425 - RNA, 21 nt, Human
aggcuuugaaagccacucacc

SEQ ID NO: 374426 - RNA, 19 nt, Human
agggagaccacaaggaaaa

SEQ ID NO: 374427 - RNA, 18 nt, Human
aguggggagggggcggcc

SEQ ID NO: 374428 - RNA, 22 nt, Human
auaaaaacaaugcuuacagcau

SEQ ID NO: 374429 - RNA, 18 nt, Human
auccacugacugccuucu

SEQ ID NO: 374430 - RNA, 19 nt, Human
aucuaacugggaaaugauc

SEQ ID NO: 374431 - RNA, 19 nt, Human
augggaacaacaucccaca

SEQ ID NO: 374432 - RNA, 25 nt, Human
caaaaaagcaggaucuuuagaaaua

SEQ ID NO: 374433 - RNA, 23 nt, Human
caaauagcacagcuuugcuaaaa

SEQ ID NO: 374434 - RNA, 23 nt, Human
caaaugccucuucccuuccaacc

SEQ ID NO: 374435 - RNA, 22 nt, Human
caagcaaauagcacagcuuugc

SEQ ID NO: 374436 - RNA, 22 nt, Human
cacagcuuugcuaaaauugccu

SEQ ID NO: 374437 - RNA, 20 nt, Human
cacauucucucugucucaca

SEQ ID NO: 374438 - RNA, 23 nt, Human
cacucaccccagaggcaagaacu

SEQ ID NO: 374439 - RNA, 18 nt, Human
cagagaagccccuccccc

SEQ ID NO: 374440 - RNA, 24 nt, Human
cagagaagccccuccccccacccc

SEQ ID NO: 374441 - RNA, 22 nt, Human
cagcauggcuuaacgugacccu

SEQ ID NO: 374442 - RNA, 21 nt, Human
cagcuacauccacccccacca

SEQ ID NO: 374443 - RNA, 21 nt, Human
caucugacaagcaaauagcac

SEQ ID NO: 374444 - RNA, 19 nt, Human
ccacaaaugccucuucccu

SEQ ID NO: 374445 - RNA, 22 nt, Human
ccacucuucccuccuagcuccc

SEQ ID NO: 374446 - RNA, 19 nt, Human
cccagagaagccccucccc

SEQ ID NO: 374447 - RNA, 20 nt, Human
cccagagaagccccuccccc

SEQ ID NO: 374448 - RNA, 23 nt, Human
cccagagaagccccuccccccac

SEQ ID NO: 374449 - RNA, 18 nt, Human
ccccaccaaccuacuucc

SEQ ID NO: 374450 - RNA, 21 nt, Human
ccccagagaagccccuccccc

SEQ ID NO: 374451 - RNA, 25 nt, Human
ccccagagaagccccuccccccacc

SEQ ID NO: 374452 - RNA, 20 nt, Human
ccccagaggcaagaacuacc

SEQ ID NO: 374453 - RNA, 19 nt, Human
cccgcucgcccguucucuu

SEQ ID NO: 374454 - RNA, 19 nt, Human
cccguucucuuguccagag

SEQ ID NO: 374455 - RNA, 28 nt, Human
ccucgccgguccucuccacucuucccuc

SEQ ID NO: 374456 - RNA, 19 nt, Human
cuccccccaccccccuuua

SEQ ID NO: 374457 - RNA, 20 nt, Human
cucucugucucacaaagaag

SEQ ID NO: 374458 - RNA, 21 nt, Human
cugccauguucuaugauguca

SEQ ID NO: 374459 - RNA, 18 nt, Human
cuuggaacaaaaacgacu

SEQ ID NO: 374460 - RNA, 25 nt, Human
cuuuaacuccucccaugccaagaga

SEQ ID NO: 374461 - RNA, 22 nt, Human
cuuuaccuagugcccaggggac

SEQ ID NO: 374462 - RNA, 18 nt, Human
gaagccccuccccccacc

SEQ ID NO: 374463 - RNA, 18 nt, Human
gaggaggcugugggaaga

SEQ ID NO: 374464 - RNA, 20 nt, Human
gaguggggagggggcggccc

SEQ ID NO: 374465 - RNA, 20 nt, Human
gcaucuuucuuuuuucuguu

SEQ ID NO: 374466 - RNA, 21 nt, Human
gcuaagccugaaaauaaaaac

SEQ ID NO: 374467 - RNA, 21 nt, Human
gcuagaccccuacuuggccug

SEQ ID NO: 374468 - RNA, 21 nt, Human
ggaacaauaaaaccaagaaca

SEQ ID NO: 374469 - RNA, 23 nt, Human
ggaacaauaaaaccaagaacagu

SEQ ID NO: 374470 - RNA, 18 nt, Human
ggcuaccgcggcucgggc

SEQ ID NO: 374471 - RNA, 23 nt, Human
gggaaggagguggcuccggcugg

SEQ ID NO: 374472 - RNA, 19 nt, Human
gggaguggggagggggcgg

SEQ ID NO: 374473 - RNA, 23 nt, Human
gggaguggggagggggcggccgg

SEQ ID NO: 374474 - RNA, 20 nt, Human
guacauauacuguauauaua

SEQ ID NO: 374475 - RNA, 21 nt, Human
guccuuccuuuaucaauugcc

SEQ ID NO: 374476 - RNA, 20 nt, Human
uaaaaccaagaacaguauau

SEQ ID NO: 374477 - RNA, 19 nt, Human
uaacagguacaaaauguga

SEQ ID NO: 374478 - RNA, 19 nt, Human
uaagcuaccaauggcagag

SEQ ID NO: 374479 - RNA, 19 nt, Human
uacauauacuguauauaua

SEQ ID NO: 374480 - RNA, 23 nt, Human
uacugaucuacacuguagccagc

SEQ ID NO: 374481 - RNA, 20 nt, Human
uagggggaguggggaggggg

SEQ ID NO: 374482 - RNA, 27 nt, Human
uaguaauaguaaucaucaaaaauaaaa

SEQ ID NO: 374483 - RNA, 19 nt, Human
uaucauuaaaggcuagacc

SEQ ID NO: 374484 - RNA, 18 nt, Human
uauguacauauacuguau

SEQ ID NO: 374485 - RNA, 21 nt, Human
uauguacauauacuguauaua

SEQ ID NO: 374486 - RNA, 23 nt, Human
uauguacauauacuguauauaua

SEQ ID NO: 374487 - RNA, 24 nt, Human
ucaaguggaacaauaaaaccaaga

SEQ ID NO: 374488 - RNA, 18 nt, Human
ucacugggcuuuaccuag

SEQ ID NO: 374489 - RNA, 21 nt, Human
uccaaacccaaugcauugagc

SEQ ID NO: 374490 - RNA, 20 nt, Human
uccacccccaccaaccuacu

SEQ ID NO: 374491 - RNA, 22 nt, Human
uccacccccaccaaccuacuuc

SEQ ID NO: 374492 - RNA, 19 nt, Human
ucccauauauauacauuau

SEQ ID NO: 374493 - RNA, 21 nt, Human
ucccuccuagcucccgcucgc

SEQ ID NO: 374494 - RNA, 20 nt, Human
uccuuuaucaauugccccag

SEQ ID NO: 374495 - RNA, 20 nt, Human
ucucccaaagcuaggcauuu

SEQ ID NO: 374496 - RNA, 22 nt, Human
ucucuauaucacauucucucug

SEQ ID NO: 374497 - RNA, 22 nt, Human
ucugcagcuacauccaccccca

SEQ ID NO: 374498 - RNA, 19 nt, Human
ucuuggaacaaaaacgacu

SEQ ID NO: 374499 - RNA, 23 nt, Human
ugaaagccacucaccccagaggc

SEQ ID NO: 374500 - RNA, 22 nt, Human
ugaaggggcugaggugcuggaa

SEQ ID NO: 374501 - RNA, 20 nt, Human
ugacuaauaucauuaaaggc

SEQ ID NO: 374502 - RNA, 19 nt, Human
ugagcucagaauagccuga

SEQ ID NO: 374503 - RNA, 22 nt, Human
ugcccaggggacuuuucugagc

SEQ ID NO: 374504 - RNA, 21 nt, Human
ugccucuucccuuccaaccuc

SEQ ID NO: 374505 - RNA, 23 nt, Human
ugcguaagccaacacacgcaucu

SEQ ID NO: 374506 - RNA, 20 nt, Human
uggaacaauaaaaccaagaa

SEQ ID NO: 374507 - RNA, 18 nt, Human
uggcauggacaaggagau

SEQ ID NO: 374508 - RNA, 21 nt, Human
uggcauggacaaggagaugca

SEQ ID NO: 374509 - RNA, 22 nt, Human
ugggaacaacaucccacaaaaa

SEQ ID NO: 374510 - RNA, 26 nt, Human
uggggaugagagguucacaaagagcc

SEQ ID NO: 374511 - RNA, 22 nt, Human
uguagggggaguggggaggggg

SEQ ID NO: 374512 - RNA, 23 nt, Human
uguagggggaguggggagggggc

SEQ ID NO: 374513 - RNA, 23 nt, Human
ugugaaggggcugaggugcuggg

SEQ ID NO: 374514 - RNA, 18 nt, Human
ugugcaugcuuucugcag

SEQ ID NO: 374515 - RNA, 19 nt, Human
ugugcaugcuuucugcagc

SEQ ID NO: 374516 - RNA, 19 nt, Human
uguguuguaugugugugug

SEQ ID NO: 374517 - RNA, 23 nt, Human
uucauagaauccaauuuaaaaac

SEQ ID NO: 374518 - RNA, 19 nt, Human
uuccugcggaucuaacugg

SEQ ID NO: 374519 - RNA, 21 nt, Human
uucugcagcuacauccacccc

SEQ ID NO: 374520 - RNA, 21 nt, Human
uugcuaaaauugccuuugacu

SEQ ID NO: 374521 - RNA, 23 nt, Human
uuggugauucugcuguggggaug

SEQ ID NO: 374522 - RNA, 21 nt, Human
uugugcaugcuuucugcagcu

SEQ ID NO: 374523 - RNA, 21 nt, Human
uuuaagauccacugacugccu

SEQ ID NO: 374524 - RNA, 21 nt, Human
aaaaauuauccuggauccagg

SEQ ID NO: 374525 - RNA, 24 nt, Human
aaaacccaccauuaaaauaagaca

SEQ ID NO: 374526 - RNA, 22 nt, Human
aaaauaagacaaguucauagaa

SEQ ID NO: 374527 - RNA, 22 nt, Human
aaccaaacccuccuggucucug

SEQ ID NO: 374528 - RNA, 23 nt, Human
aacucagcccucauuccccucug

SEQ ID NO: 374529 - RNA, 22 nt, Human
aaugaaggcacuccaggaagaa

SEQ ID NO: 374530 - RNA, 18 nt, Human
acccuccacccauagcca

SEQ ID NO: 374531 - RNA, 25 nt, Human
agaaccucuucaaacucacccucca

SEQ ID NO: 374532 - RNA, 21 nt, Human
agagcccacccauguccagcc

SEQ ID NO: 374533 - RNA, 21 nt, Human
aggaagaaggggaguuccugg

SEQ ID NO: 374534 - RNA, 26 nt, Human
aggaauuaaaggcuauagcucaagcu

SEQ ID NO: 374535 - RNA, 20 nt, Human
agguccacaaguagcaguuu

SEQ ID NO: 374536 - RNA, 24 nt, Human
aucugaaagaaucgggcacaaggg

SEQ ID NO: 374537 - RNA, 26 nt, Human
caaacucacccuccacccauagccaa

SEQ ID NO: 374538 - RNA, 23 nt, Human
cacccauagccaaaguaaggaau

SEQ ID NO: 374539 - RNA, 21 nt, Human
cacccuccacccauagccaaa

SEQ ID NO: 374540 - RNA, 19 nt, Human
cagaaaaaaaacccaccau

SEQ ID NO: 374541 - RNA, 20 nt, Human
cagaagcuguagaagaggca

SEQ ID NO: 374542 - RNA, 18 nt, Human
caguagcaguggaaccag

SEQ ID NO: 374543 - RNA, 23 nt, Human
cauaacucagcccucauuccccu

SEQ ID NO: 374544 - RNA, 21 nt, Human
ccaugcuuaggggugggcugg

SEQ ID NO: 374545 - RNA, 19 nt, Human
cccacccauguccagccau

SEQ ID NO: 374546 - RNA, 23 nt, Human
cccagguuacaagaaaaucagaa

SEQ ID NO: 374547 - RNA, 24 nt, Human
cccucugggucaguagcaguggaa

SEQ ID NO: 374548 - RNA, 18 nt, Human
ccucuuacuuuuuccaca

SEQ ID NO: 374549 - RNA, 25 nt, Human
ccucuuacuuuuuccacauuagggg

SEQ ID NO: 374550 - RNA, 21 nt, Human
ccuggugacaagggaccaugc

SEQ ID NO: 374551 - RNA, 21 nt, Human
ccugugagcuaaccaaacccu

SEQ ID NO: 374552 - RNA, 22 nt, Human
cuaaccaaacccuccuggucuc

SEQ ID NO: 374553 - RNA, 22 nt, Human
cuccaggaagaaggggaguucc

SEQ ID NO: 374554 - RNA, 19 nt, Human
cuggcaccugccugccaaa

SEQ ID NO: 374555 - RNA, 22 nt, Human
cuuuuuuguuuguuuguuuuuu

SEQ ID NO: 374556 - RNA, 21 nt, Human
gagaucccaagacugugggga

SEQ ID NO: 374557 - RNA, 21 nt, Human
gaguaguccucuuacuuuuuc

SEQ ID NO: 374558 - RNA, 21 nt, Human
gcaaacugguuuaaccucaca

SEQ ID NO: 374559 - RNA, 19 nt, Human
ggcacaccaauuccucugc

SEQ ID NO: 374560 - RNA, 19 nt, Human
ggccuggaaggcgcgggac

SEQ ID NO: 374561 - RNA, 21 nt, Human
gggccagauuuccuuccucaa

SEQ ID NO: 374562 - RNA, 22 nt, Human
gggcuggggcauguuggggagg

SEQ ID NO: 374563 - RNA, 24 nt, Human
gggcuggggcauguuggggagggg

SEQ ID NO: 374564 - RNA, 20 nt, Human
gguaaugagaagaggaaaga

SEQ ID NO: 374565 - RNA, 21 nt, Human
ggucaguagcaguggaaccag

SEQ ID NO: 374566 - RNA, 19 nt, Human
guccucuuacuuuuuccac

SEQ ID NO: 374567 - RNA, 22 nt, Human
guccucuuacuuuuuccacauu

SEQ ID NO: 374568 - RNA, 25 nt, Human
guggcagauuuucaugaaaaucagc

SEQ ID NO: 374569 - RNA, 19 nt, Human
uaaccaaacccuccugguc

SEQ ID NO: 374570 - RNA, 24 nt, Human
uaaggcacaccaauuccucugcuu

SEQ ID NO: 374571 - RNA, 21 nt, Human
uaccagaaaaaaaacccacca

SEQ ID NO: 374572 - RNA, 20 nt, Human
uacccagccgaggguccagg

SEQ ID NO: 374573 - RNA, 22 nt, Human
uacccagccgaggguccagggc

SEQ ID NO: 374574 - RNA, 25 nt, Human
ucagagcccacccauguccagccau

SEQ ID NO: 374575 - RNA, 22 nt, Human
ucaguagcaguggaaccaggaa

SEQ ID NO: 374576 - RNA, 20 nt, Human
uccagggcacuggauggaag

SEQ ID NO: 374577 - RNA, 20 nt, Human
uccagggcacuggauggaag

SEQ ID NO: 374578 - RNA, 20 nt, Human
ucccagguuacaagaaaauc

SEQ ID NO: 374579 - RNA, 25 nt, Human
uccucauucuugaugaauagucuca

SEQ ID NO: 374580 - RNA, 23 nt, Human
ucuaaaucuuaccagaaaaaaaa

SEQ ID NO: 374581 - RNA, 23 nt, Human
ugaaagaaucgggcacaagguca

SEQ ID NO: 374582 - RNA, 24 nt, Human
ugacaagccuucaucccagacccu

SEQ ID NO: 374583 - RNA, 23 nt, Human
ugaguaguccucuuacuuuuucc

SEQ ID NO: 374584 - RNA, 24 nt, Human
ugaguaguccucuuacuuuuucca

SEQ ID NO: 374585 - RNA, 19 nt, Human
ugcugaacuuugcucagca

SEQ ID NO: 374586 - RNA, 21 nt, Human
uggaaccaggaaacccaaggg

SEQ ID NO: 374587 - RNA, 18 nt, Human
uggggugggggaaguccu

SEQ ID NO: 374588 - RNA, 24 nt, Human
uggggugggggaaguccugugagc

SEQ ID NO: 374589 - RNA, 18 nt, Human
uguuuguuuguuuuuuuc

SEQ ID NO: 374590 - RNA, 23 nt, Human
uucaaaagagaaaguucugcauc

SEQ ID NO: 374591 - RNA, 22 nt, Human
uucauaacucagcccucauucc

SEQ ID NO: 374592 - RNA, 18 nt, Human
uuguuuguuuguuuuuuu

SEQ ID NO: 374593 - RNA, 21 nt, Human
uuuaaaaauuauccuggaucc

SEQ ID NO: 374594 - RNA, 25 nt, Human
uuuaucaucaaaacaaacagccaau

SEQ ID NO: 374595 - RNA, 22 nt, Human
uuuucaugaaaaucagcuucug

SEQ ID NO: 374596 - RNA, 20 nt, Human
uuuuuguuuguuuguuuuuu

SEQ ID NO: 374597 - RNA, 22 nt, Human
uuuuuuuuuuuuuuuuuuucag

SEQ ID NO: 374598 - RNA, 19 nt, Human
auugcaacucaaagugcau

SEQ ID NO: 374599 - RNA, 18 nt, Human
ccgcgcgcgccgcucccg

SEQ ID NO: 374600 - RNA, 21 nt, Human
cucccggggcuccaggccgcc

SEQ ID NO: 374601 - RNA, 20 nt, Human
gccaggagagaaugugcagc

SEQ ID NO: 374602 - RNA, 19 nt, Human
gcuccaggccgcccgcgcc

SEQ ID NO: 374603 - RNA, 22 nt, Human
ggccaggagagccggcugggcc

SEQ ID NO: 374604 - RNA, 19 nt, Human
ggcgccgccgccaggagag

SEQ ID NO: 374605 - RNA, 20 nt, Human
gugcagcgcgaggccaggag

SEQ ID NO: 374606 - RNA, 21 nt, Human
ugugcagcgcgaggccaggag

SEQ ID NO: 374607 - RNA, 22 nt, Human
uuuguuuuuggcccauauaaaa

SEQ ID NO: 374608 - RNA, 24 nt, Human
uuuuuuuuuuuguuuuuuguuuuu

SEQ ID NO: 374609 - RNA, 19 nt, Human
aaaaagugcucaggguucc

SEQ ID NO: 374610 - RNA, 18 nt, Human
aagcagcagaaacagagc

SEQ ID NO: 374611 - RNA, 19 nt, Human
aagcagcagaaacagagcu

SEQ ID NO: 374612 - RNA, 22 nt, Human
acgccgacaccugccgcccggc

SEQ ID NO: 374613 - RNA, 18 nt, Human
aggguuccccacccccac

SEQ ID NO: 374614 - RNA, 22 nt, Human
augucucccuuuuucucagagc

SEQ ID NO: 374615 - RNA, 22 nt, Human
cagaaacagagcugggucccuc

SEQ ID NO: 374616 - RNA, 18 nt, Human
cagcagaaacagagcugg

SEQ ID NO: 374617 - RNA, 25 nt, Human
cagcagaaacagagcugggucccuc

SEQ ID NO: 374618 - RNA, 24 nt, Human
cauccaugcuggguccagcuccuc

SEQ ID NO: 374619 - RNA, 20 nt, Human
ccugccgcccggcgcgcccg

SEQ ID NO: 374620 - RNA, 22 nt, Human
ccugccgcccggcgcgcccgcc

SEQ ID NO: 374621 - RNA, 23 nt, Human
cgacgccgacaccugccgcccgg

SEQ ID NO: 374622 - RNA, 26 nt, Human
cgccgccgaaugccgccgacgccgac

SEQ ID NO: 374623 - RNA, 22 nt, Human
gaagcagcagaaacagagcugg

SEQ ID NO: 374624 - RNA, 24 nt, Human
gccgacaccugccgcccggcgcgg

SEQ ID NO: 374625 - RNA, 18 nt, Human
ggguuccccacccccacc

SEQ ID NO: 374626 - RNA, 22 nt, Human
uccaugcuggguccagcuccuc

SEQ ID NO: 374627 - RNA, 23 nt, Human
uccccacccccacccugcauuuc

SEQ ID NO: 374628 - RNA, 24 nt, Human
uggaagcagcagaaacagagcugg

SEQ ID NO: 374629 - RNA, 24 nt, Human
uuccccacccccacccugcauuuc

SEQ ID NO: 374630 - RNA, 24 nt, Human
aaaaaaaaacuuuacaaauaccau

SEQ ID NO: 374631 - RNA, 19 nt, Human
aaaaaacuuuacaaauacc

SEQ ID NO: 374632 - RNA, 18 nt, Human
aaaaauuucaguuaacac

SEQ ID NO: 374633 - RNA, 21 nt, Human
aaaaggccacaaaccaguaaa

SEQ ID NO: 374634 - RNA, 27 nt, Human
aaacuagaagauggucaaaggggaccc

SEQ ID NO: 374635 - RNA, 25 nt, Human
aaacuagaaguaaaaacuagaagau

SEQ ID NO: 374636 - RNA, 19 nt, Human
aaaguacuaaaauacuaug

SEQ ID NO: 374637 - RNA, 25 nt, Human
aaccaguaaauaaacaacguggcuu

SEQ ID NO: 374638 - RNA, 20 nt, Human
acaaaauaauaaacacuuac

SEQ ID NO: 374639 - RNA, 24 nt, Human
acaaaccaguaaauaaacaacgug

SEQ ID NO: 374640 - RNA, 24 nt, Human
acaaagcacaguaaaaggccacaa

SEQ ID NO: 374641 - RNA, 28 nt, Human
acaaagcacaguaaaaggccacaaacca

SEQ ID NO: 374642 - RNA, 24 nt, Human
acaguaaaaggccacaaaccagua

SEQ ID NO: 374643 - RNA, 24 nt, Human
acagugcaaauauaaauucuuuau

SEQ ID NO: 374644 - RNA, 21 nt, Human
agacgucauagucugcaaaaa

SEQ ID NO: 374645 - RNA, 23 nt, Human
auacaaagcacaguaaaaggcca

SEQ ID NO: 374646 - RNA, 22 nt, Human
auauacaauauaaacaaaacug

SEQ ID NO: 374647 - RNA, 20 nt, Human
caaaccaguaaauaaacaaa

SEQ ID NO: 374648 - RNA, 22 nt, Human
caaagcacaguaaaaggccaca

SEQ ID NO: 374649 - RNA, 22 nt, Human
cagcacugaggauccaagacaa

SEQ ID NO: 374650 - RNA, 19 nt, Human
cagugcaaucaugucacuu

SEQ ID NO: 374651 - RNA, 22 nt, Human
cauuuuugucuucagcagcaaa

SEQ ID NO: 374652 - RNA, 24 nt, Human
ccaaauggcaaauaaaagcuuuac

SEQ ID NO: 374653 - RNA, 20 nt, Human
ccuaugccauagaauuuuuu

SEQ ID NO: 374654 - RNA, 20 nt, Human
ccuuuuggcagcacugagga

SEQ ID NO: 374655 - RNA, 25 nt, Human
cugcaaaaacaaaaggcacaucuga

SEQ ID NO: 374656 - RNA, 19 nt, Human
gaaaaauuucacaaaagca

SEQ ID NO: 374657 - RNA, 20 nt, Human
gucuugaaggcaaggcaguu

SEQ ID NO: 374658 - RNA, 24 nt, Human
uaaaaggccacaaaccaguaaaua

SEQ ID NO: 374659 - RNA, 21 nt, Human
uaaaccauauuuuugcagagu

SEQ ID NO: 374660 - RNA, 19 nt, Human
uaaagacgucauagucugc

SEQ ID NO: 374661 - RNA, 22 nt, Human
uaaagacgucauagucugcaaa

SEQ ID NO: 374662 - RNA, 27 nt, Human
uacaaagcacaguaaaaggccacaaac

SEQ ID NO: 374663 - RNA, 24 nt, Human
uagcauuuuuguaagagcauuauu

SEQ ID NO: 374664 - RNA, 18 nt, Human
ucacaaaagcacuauccc

SEQ ID NO: 374665 - RNA, 22 nt, Human
ucagcaaaacacucuaucacuu

SEQ ID NO: 374666 - RNA, 23 nt, Human
ucugcaaaaacaaaaggcacauc

SEQ ID NO: 374667 - RNA, 22 nt, Human
ucuugaaggcaaggcaguuggu

SEQ ID NO: 374668 - RNA, 21 nt, Human
ugacaaaauaauaaacacuua

SEQ ID NO: 374669 - RNA, 24 nt, Human
uguuaagaacucugauacaaagca

SEQ ID NO: 374670 - RNA, 23 nt, Human
uuaaauauuaccaaucuaaaaaa

SEQ ID NO: 374671 - RNA, 19 nt, Human
uuauacuggccuuuuggca

SEQ ID NO: 374672 - RNA, 19 nt, Human
uuuacucacuuaucugauu

SEQ ID NO: 374673 - RNA, 23 nt, Human
aaaaaaacgaccaguccugcagg

SEQ ID NO: 374674 - RNA, 21 nt, Human
aaaaugcuuccauuucugccu

SEQ ID NO: 374675 - RNA, 22 nt, Human
aaacaaucaaaccacgcgcaga

SEQ ID NO: 374676 - RNA, 18 nt, Human
aaaguggaaauugagguc

SEQ ID NO: 374677 - RNA, 19 nt, Human
aacaaugucucuggacucu

SEQ ID NO: 374678 - RNA, 20 nt, Human
aagauuuuuggguggcagcu

SEQ ID NO: 374679 - RNA, 22 nt, Human
agcacuuguaguuuuuccccca

SEQ ID NO: 374680 - RNA, 18 nt, Human
aggcauuuacaaugaaau

SEQ ID NO: 374681 - RNA, 22 nt, Human
aguggugggcagaaggcggugu

SEQ ID NO: 374682 - RNA, 22 nt, Human
auaugccaucacauguaagagc

SEQ ID NO: 374683 - RNA, 24 nt, Human
aucccucccaccacccucggaccc

SEQ ID NO: 374684 - RNA, 22 nt, Human
auggagggguggagguagccaa

SEQ ID NO: 374685 - RNA, 21 nt, Human
auuccucagggccuggaaggu

SEQ ID NO: 374686 - RNA, 24 nt, Human
cacccucauuuuacaaaguggaaa

SEQ ID NO: 374687 - RNA, 21 nt, Human
cacugaaucaaugcaacugca

SEQ ID NO: 374688 - RNA, 18 nt, Human
cagcauagcuucuuccag

SEQ ID NO: 374689 - RNA, 24 nt, Human
cagucccuggacuuucccacuccc

SEQ ID NO: 374690 - RNA, 18 nt, Human
ccacaccgcucccuuaaa

SEQ ID NO: 374691 - RNA, 24 nt, Human
ccacucccacaccgcucccuuaaa

SEQ ID NO: 374692 - RNA, 22 nt, Human
cccacaccgcucccuuaaaacc

SEQ ID NO: 374693 - RNA, 20 nt, Human
cccucuccuuuucuacccca

SEQ ID NO: 374694 - RNA, 21 nt, Human
cccugccccgugggaccccuc

SEQ ID NO: 374695 - RNA, 25 nt, Human
ccugcaaggccaguguccuugaacc

SEQ ID NO: 374696 - RNA, 24 nt, Human
cgugggaccccucagcuggcgggc

SEQ ID NO: 374697 - RNA, 22 nt, Human
cuccccugccccgugggacccc

SEQ ID NO: 374698 - RNA, 23 nt, Human
cucucaauucccuccccugcccc

SEQ ID NO: 374699 - RNA, 24 nt, Human
cucucucucucucaccucugccca

SEQ ID NO: 374700 - RNA, 25 nt, Human
cuuuaaaaaccacuacuuucauucu

SEQ ID NO: 374701 - RNA, 19 nt, Human
cuuucggucaugauucauu

SEQ ID NO: 374702 - RNA, 21 nt, Human
gaaggucucagcccccugccc

SEQ ID NO: 374703 - RNA, 23 nt, Human
gacccucuccuuuucuaggaguc

SEQ ID NO: 374704 - RNA, 23 nt, Human
gagccaggacuagaaaccacauc

SEQ ID NO: 374705 - RNA, 23 nt, Human
gauaugccaucacauguaagagc

SEQ ID NO: 374706 - RNA, 19 nt, Human
gauccuauucccaccucca

SEQ ID NO: 374707 - RNA, 23 nt, Human
gcacugaaucaaugcaacugcau

SEQ ID NO: 374708 - RNA, 28 nt, Human
gcacuggaguccuuggaaucauaugcca

SEQ ID NO: 374709 - RNA, 22 nt, Human
gcagaggacagaaauguggggg

SEQ ID NO: 374710 - RNA, 20 nt, Human
gcgaggugcaagggggaauc

SEQ ID NO: 374711 - RNA, 20 nt, Human
gcggguucagggccggggcg

SEQ ID NO: 374712 - RNA, 21 nt, Human
gcucagugucugugacucuca

SEQ ID NO: 374713 - RNA, 21 nt, Human
ggacccucuccuuuucuaccc

SEQ ID NO: 374714 - RNA, 20 nt, Human
ggacuuucccacucccacac

SEQ ID NO: 374715 - RNA, 21 nt, Human
ggagggcacgccaccuuccag

SEQ ID NO: 374716 - RNA, 19 nt, Human
ggcuaugggucgggggagg

SEQ ID NO: 374717 - RNA, 21 nt, Human
gggaugcugcucuuugggaag

SEQ ID NO: 374718 - RNA, 19 nt, Human
gggcgcccgccggugggga

SEQ ID NO: 374719 - RNA, 22 nt, Human
uaccagccagaggagggcacgc

SEQ ID NO: 374720 - RNA, 27 nt, Human
uagaaaccacaucuacaguugccccca

SEQ ID NO: 374721 - RNA, 22 nt, Human
uagccaaacauccggggaagcc

SEQ ID NO: 374722 - RNA, 21 nt, Human
ucaaaccacgcgcagaggaca

SEQ ID NO: 374723 - RNA, 18 nt, Human
ucagaagagagcaucaca

SEQ ID NO: 374724 - RNA, 24 nt, Human
uccaacuuucuuaaccagucccug

SEQ ID NO: 374725 - RNA, 21 nt, Human
ucccuggacuuucccacuccc

SEQ ID NO: 374726 - RNA, 19 nt, Human
uccgugaguggugggcaga

SEQ ID NO: 374727 - RNA, 18 nt, Human
ucuaccccaauggaugau

SEQ ID NO: 374728 - RNA, 23 nt, Human
ucucucaccucugcccauucaaa

SEQ ID NO: 374729 - RNA, 22 nt, Human
ucugaagugggaccagcaaagg

SEQ ID NO: 374730 - RNA, 19 nt, Human
ucuuucucucucucucucc

SEQ ID NO: 374731 - RNA, 21 nt, Human
ucuuucucucucucucucuca

SEQ ID NO: 374732 - RNA, 25 nt, Human
ucuuugggaaguuggggcggaugug

SEQ ID NO: 374733 - RNA, 21 nt, Human
ugaaaaugcuuccauuucugc

SEQ ID NO: 374734 - RNA, 24 nt, Human
ugaagugggaccagcaaagguagg

SEQ ID NO: 374735 - RNA, 21 nt, Human
ugagauggagggguggaggua

SEQ ID NO: 374736 - RNA, 23 nt, Human
ugagauggagggguggagguagc

SEQ ID NO: 374737 - RNA, 24 nt, Human
ugauggcugcucccucgggccugc

SEQ ID NO: 374738 - RNA, 24 nt, Human
ugauuucuaucccucccaccaccc

SEQ ID NO: 374739 - RNA, 18 nt, Human
ugcauaaauaacuuaagu

SEQ ID NO: 374740 - RNA, 18 nt, Human
ugcucuuugggaaguugg

SEQ ID NO: 374741 - RNA, 23 nt, Human
uggcagagccaggacuagaaacc

SEQ ID NO: 374742 - RNA, 21 nt, Human
uggcugucagaagagagcauc

SEQ ID NO: 374743 - RNA, 22 nt, Human
ugggaagcagcauagcuucuuc

SEQ ID NO: 374744 - RNA, 20 nt, Human
ugggaaguuggggcggaugu

SEQ ID NO: 374745 - RNA, 22 nt, Human
uggggaggggcgcgggcgggcu

SEQ ID NO: 374746 - RNA, 22 nt, Human
uggggcgcggguucagggccgg

SEQ ID NO: 374747 - RNA, 20 nt, Human
uucaucuuuggcugucagaa

SEQ ID NO: 374748 - RNA, 18 nt, Human
uuccaguagcacaggcuc

SEQ ID NO: 374749 - RNA, 19 nt, Human
uucccacucccacaccgcu

SEQ ID NO: 374750 - RNA, 24 nt, Human
uucucuucggaaggugacuuuaaa

SEQ ID NO: 374751 - RNA, 24 nt, Human
uucuuugagauggagggguggagg

SEQ ID NO: 374752 - RNA, 23 nt, Human
uugcccccagucuugugcucugg

SEQ ID NO: 374753 - RNA, 20 nt, Human
uuuauuaacaaugucucugg

SEQ ID NO: 374754 - RNA, 23 nt, Human
uuuuuuuuuuuuuuuucuuucgg

SEQ ID NO: 374755 - RNA, 21 nt, Human
aaagggagggggcauugaagg

SEQ ID NO: 374756 - RNA, 24 nt, Human
aagaguccaacgcccaccuccucg

SEQ ID NO: 374757 - RNA, 23 nt, Human
aagggagggggcauugaagggau

SEQ ID NO: 374758 - RNA, 22 nt, Human
aagucccucgaaccccccacuc

SEQ ID NO: 374759 - RNA, 23 nt, Human
acagcaaccugggugcugggccc

SEQ ID NO: 374760 - RNA, 21 nt, Human
accaacccuggugcuuccccu

SEQ ID NO: 374761 - RNA, 21 nt, Human
accuccuucuccucuguccag

SEQ ID NO: 374762 - RNA, 22 nt, Human
accugucagccucuucagccuc

SEQ ID NO: 374763 - RNA, 23 nt, Human
agagagaaaacaggagucauagg

SEQ ID NO: 374764 - RNA, 20 nt, Human
agcaggcccuucucaggucc

SEQ ID NO: 374765 - RNA, 21 nt, Human
agccccugccucgucaccucc

SEQ ID NO: 374766 - RNA, 23 nt, Human
aggaaaauaggggcagauauagc

SEQ ID NO: 374767 - RNA, 22 nt, Human
aggcaagggcagaauguacagg

SEQ ID NO: 374768 - RNA, 22 nt, Human
aggcaagggguaagaggcaagg

SEQ ID NO: 374769 - RNA, 21 nt, Human
agggaguggggcugacugagc

SEQ ID NO: 374770 - RNA, 24 nt, Human
agucccucgaaccccccacucccc

SEQ ID NO: 374771 - RNA, 23 nt, Human
agucucuggguggccuagcccuu

SEQ ID NO: 374772 - RNA, 20 nt, Human
aguggaggaggacugggggc

SEQ ID NO: 374773 - RNA, 18 nt, Human
aguggcuaggagagggga

SEQ ID NO: 374774 - RNA, 21 nt, Human
caaauaccacugggaggcaag

SEQ ID NO: 374775 - RNA, 18 nt, Human
caaggugugcgguccagc

SEQ ID NO: 374776 - RNA, 22 nt, Human
cacacaggcugggggcaggggc

SEQ ID NO: 374777 - RNA, 18 nt, Human
caccaaccacccuggccg

SEQ ID NO: 374778 - RNA, 19 nt, Human
cacuaagucccucgaaccc

SEQ ID NO: 374779 - RNA, 19 nt, Human
cacugccaccaccaggccu

SEQ ID NO: 374780 - RNA, 18 nt, Human
cagacagaaagccccccg

SEQ ID NO: 374781 - RNA, 22 nt, Human
cagggcagugagccagacagaa

SEQ ID NO: 374782 - RNA, 19 nt, Human
ccacugccaccaccaggcc

SEQ ID NO: 374783 - RNA, 22 nt, Human
cccccacuccccaaugaggcuc

SEQ ID NO: 374784 - RNA, 20 nt, Human
ccccccgaccugucagccuc

SEQ ID NO: 374785 - RNA, 20 nt, Human
cccccggccgccgccgccgc

SEQ ID NO: 374786 - RNA, 19 nt, Human
cccccgggccagccgccgg

SEQ ID NO: 374787 - RNA, 21 nt, Human
ccccugagugggagacacggc

SEQ ID NO: 374788 - RNA, 21 nt, Human
cccucgaaccccccacucccc

SEQ ID NO: 374789 - RNA, 20 nt, Human
cccugagccucaggccacgg

SEQ ID NO: 374790 - RNA, 19 nt, Human
ccgccgccgccgccgccuc

SEQ ID NO: 374791 - RNA, 21 nt, Human
ccgccgccgccgccgccucgg

SEQ ID NO: 374792 - RNA, 18 nt, Human
ccgccgccgccgccucgg

SEQ ID NO: 374793 - RNA, 21 nt, Human
ccgccgccgccgccucggccg

SEQ ID NO: 374794 - RNA, 19 nt, Human
ccgccgccgccucggccgc

SEQ ID NO: 374795 - RNA, 20 nt, Human
ccgccgccgccucggccgcc

SEQ ID NO: 374796 - RNA, 22 nt, Human
ccggccgccgccgccgccgccu

SEQ ID NO: 374797 - RNA, 23 nt, Human
ccucaaagcuacucucagccccu

SEQ ID NO: 374798 - RNA, 22 nt, Human
ccucagccuccuccacugccac

SEQ ID NO: 374799 - RNA, 21 nt, Human
ccuccucagccuccuccacug

SEQ ID NO: 374800 - RNA, 20 nt, Human
ccugggugcugggcccugug

SEQ ID NO: 374801 - RNA, 23 nt, Human
cgccgccucggccgccucccccg

SEQ ID NO: 374802 - RNA, 23 nt, Human
cuguccagccuguucuccugggg

SEQ ID NO: 374803 - RNA, 19 nt, Human
cuuccugccuucagaaagg

SEQ ID NO: 374804 - RNA, 18 nt, Human
gaaccccccacuccccaa

SEQ ID NO: 374805 - RNA, 23 nt, Human
gaccugucagccucuucagccuc

SEQ ID NO: 374806 - RNA, 22 nt, Human
gagcagcugucacucucuggga

SEQ ID NO: 374807 - RNA, 22 nt, Human
gagcaggcccuucucagguccu

SEQ ID NO: 374808 - RNA, 24 nt, Human
gagccuaguaagggaagagggagc

SEQ ID NO: 374809 - RNA, 18 nt, Human
gcaggggcugggcggggg

SEQ ID NO: 374810 - RNA, 18 nt, Human
gcaggggcugggcggggg

SEQ ID NO: 374811 - RNA, 19 nt, Human
gccauagagccuaguaagg

SEQ ID NO: 374812 - RNA, 22 nt, Human
gccccugccucgucaccuccug

SEQ ID NO: 374813 - RNA, 18 nt, Human
gcccugugucuccuggag

SEQ ID NO: 374814 - RNA, 20 nt, Human
gccuccucagccuccuccac

SEQ ID NO: 374815 - RNA, 22 nt, Human
gcucugugaauugucucugauu

SEQ ID NO: 374816 - RNA, 20 nt, Human
ggagcccagggagggaggcu

SEQ ID NO: 374817 - RNA, 22 nt, Human
ggaggggcggggggcccugagc

SEQ ID NO: 374818 - RNA, 25 nt, Human
ggaguggggcugacugagcaggggc

SEQ ID NO: 374819 - RNA, 18 nt, Human
ggcaaggaacagggcaca

SEQ ID NO: 374820 - RNA, 21 nt, Human
ggcaaggagcccagggaggga

SEQ ID NO: 374821 - RNA, 25 nt, Human
ggcaggggcugggcgggggguggug

SEQ ID NO: 374822 - RNA, 20 nt, Human
ggccagcuccgggcacaguc

SEQ ID NO: 374823 - RNA, 22 nt, Human
ggcgggugggucaucagggcag

SEQ ID NO: 374824 - RNA, 24 nt, Human
ggcugggagggaggggcggggggc

SEQ ID NO: 374825 - RNA, 25 nt, Human
ggcugggagggaggggcggggggcc

SEQ ID NO: 374826 - RNA, 18 nt, Human
ggcugggaggugacgcug

SEQ ID NO: 374827 - RNA, 18 nt, Human
gggagggaggggcggggg

SEQ ID NO: 374828 - RNA, 20 nt, Human
gggcaggggcugggcggggg

SEQ ID NO: 374829 - RNA, 26 nt, Human
gggcaggggcugggcgggggguggug

SEQ ID NO: 374830 - RNA, 19 nt, Human
gggcgggugggucaucagg

SEQ ID NO: 374831 - RNA, 23 nt, Human
ggggcaggggcugggcggggggu

SEQ ID NO: 374832 - RNA, 22 nt, Human
ggggcgggugggucaucagggc

SEQ ID NO: 374833 - RNA, 22 nt, Human
gggggcaggggcugggcggggg

SEQ ID NO: 374834 - RNA, 25 nt, Human
gggugggucaucagggcagugagcc

SEQ ID NO: 374835 - RNA, 26 nt, Human
gugcugggcccugugucuccuggagc

SEQ ID NO: 374836 - RNA, 24 nt, Human
guggggcugacugagcaggggcca

SEQ ID NO: 374837 - RNA, 21 nt, Human
uaagaggcaagggcagaaugu

SEQ ID NO: 374838 - RNA, 18 nt, Human
uaagggaagagggagcug

SEQ ID NO: 374839 - RNA, 22 nt, Human
ucagccucuucagccuccucag

SEQ ID NO: 374840 - RNA, 19 nt, Human
ucagguccugggauagagg

SEQ ID NO: 374841 - RNA, 23 nt, Human
uccaacgcccaccuccucggacc

SEQ ID NO: 374842 - RNA, 25 nt, Human
uccacuaagucccucgaacccccca

SEQ ID NO: 374843 - RNA, 20 nt, Human
uccacugccaccaccaggcc

SEQ ID NO: 374844 - RNA, 24 nt, Human
uccagcucggggcugggaggugac

SEQ ID NO: 374845 - RNA, 23 nt, Human
uccucaaagcuacucucagcccc

SEQ ID NO: 374846 - RNA, 20 nt, Human
uccucagccuccuccacugc

SEQ ID NO: 374847 - RNA, 18 nt, Human
uccuggagccccugccuc

SEQ ID NO: 374848 - RNA, 20 nt, Human
uccugggauagagggucauu

SEQ ID NO: 374849 - RNA, 25 nt, Human
ucgcccccggccgccgccgccgccg

SEQ ID NO: 374850 - RNA, 24 nt, Human
ucuccuggagccaaggguuagggc

SEQ ID NO: 374851 - RNA, 22 nt, Human
ucuccuggggcuuugcugcugg

SEQ ID NO: 374852 - RNA, 21 nt, Human
ucucugggaagcccagggagu

SEQ ID NO: 374853 - RNA, 19 nt, Human
ucucuggguggccuagccc

SEQ ID NO: 374854 - RNA, 20 nt, Human
ucucuggguggccuagcccu

SEQ ID NO: 374855 - RNA, 20 nt, Human
ucuucagccuccucagccuc

SEQ ID NO: 374856 - RNA, 24 nt, Human
ugaagggaugagaacuccacuaag

SEQ ID NO: 374857 - RNA, 22 nt, Human
ugaauccuuaccaccaaccacc

SEQ ID NO: 374858 - RNA, 23 nt, Human
ugacgcuggugggcugggaggga

SEQ ID NO: 374859 - RNA, 22 nt, Human
ugagccagacagaaagcccccc

SEQ ID NO: 374860 - RNA, 18 nt, Human
ugagugggagacacggcc

SEQ ID NO: 374861 - RNA, 21 nt, Human
ugauuccuuuccuggagcccc

SEQ ID NO: 374862 - RNA, 22 nt, Human
ugccgacagcaaccugggugcu

SEQ ID NO: 374863 - RNA, 26 nt, Human
ugcgguccagcucggggcugggaggu

SEQ ID NO: 374864 - RNA, 22 nt, Human
uggcaugggcaugucagacccu

SEQ ID NO: 374865 - RNA, 18 nt, Human
uggccuagcccuuaggca

SEQ ID NO: 374866 - RNA, 24 nt, Human
ugggaagcccagggaguggggcug

SEQ ID NO: 374867 - RNA, 25 nt, Human
ugggagacacggccagcuccgggca

SEQ ID NO: 374868 - RNA, 26 nt, Human
ugggaugcgucucaaggucauggagg

SEQ ID NO: 374869 - RNA, 20 nt, Human
ugggcugggagggaggggcg

SEQ ID NO: 374870 - RNA, 25 nt, Human
ugggcugggagggaggggcgggggg

SEQ ID NO: 374871 - RNA, 18 nt, Human
ugggggcaggggcugggc

SEQ ID NO: 374872 - RNA, 18 nt, Human
ugggggcaggggcugggc

SEQ ID NO: 374873 - RNA, 19 nt, Human
ugggggcaggggcugggcg

SEQ ID NO: 374874 - RNA, 19 nt, Human
uggggggcugcagaacagg

SEQ ID NO: 374875 - RNA, 20 nt, Human
uuaccaccaaccacccuggc

SEQ ID NO: 374876 - RNA, 19 nt, Human
uuucucagacaaagaauga

SEQ ID NO: 374877 - RNA, 22 nt, Human
uuuuuuuuuuuuuuuaaccgga

SEQ ID NO: 374878 - RNA, 23 nt, Human
uuuuuuuuuuuuuuuuuaaccgg

SEQ ID NO: 374879 - RNA, 18 nt, Human
aaaaaaaaaaaaaaaagc

SEQ ID NO: 374880 - RNA, 21 nt, Human
aaaaaaaaaaaaaacaggcaa

SEQ ID NO: 374881 - RNA, 23 nt, Human
aaaaaaaaaaaaaacaggcaaug

SEQ ID NO: 374882 - RNA, 23 nt, Human
aaaaaaaaaaagccagcaguaag

SEQ ID NO: 374883 - RNA, 24 nt, Human
aaaaaaacaggcaaugaugucgag

SEQ ID NO: 374884 - RNA, 23 nt, Human
aaaaaagaaaucaaaagggaaga

SEQ ID NO: 374885 - RNA, 20 nt, Human
aaaaagaaacaucucugccc

SEQ ID NO: 374886 - RNA, 23 nt, Human
aaaaagaaaucaaaagggaagaa

SEQ ID NO: 374887 - RNA, 24 nt, Human
aaaaagccagcaguaaguaaaaug

SEQ ID NO: 374888 - RNA, 22 nt, Human
aaaaugccaucagagucuguga

SEQ ID NO: 374889 - RNA, 18 nt, Human
aaacagcaggauccccac

SEQ ID NO: 374890 - RNA, 20 nt, Human
aaacggcuguccccacccuu

SEQ ID NO: 374891 - RNA, 18 nt, Human
aaacgggguucagcgagc

SEQ ID NO: 374892 - RNA, 22 nt, Human
aaagcacaguuuaaguacacug

SEQ ID NO: 374893 - RNA, 20 nt, Human
aaaggguauuugaaacugac

SEQ ID NO: 374894 - RNA, 21 nt, Human
aacacugcauaccaagggggg

SEQ ID NO: 374895 - RNA, 22 nt, Human
aacagcaggauccccacuggcu

SEQ ID NO: 374896 - RNA, 19 nt, Human
aacagccucaccaccgaau

SEQ ID NO: 374897 - RNA, 24 nt, Human
aacaguugugcugccaaaaggguc

SEQ ID NO: 374898 - RNA, 20 nt, Human
aacauacuugcaugcuaaaa

SEQ ID NO: 374899 - RNA, 19 nt, Human
aaccaauaauaaaaauaag

SEQ ID NO: 374900 - RNA, 23 nt, Human
aaccaauaauaaaaauaagccaa

SEQ ID NO: 374901 - RNA, 20 nt, Human
aacccagcucugcacccucc

SEQ ID NO: 374902 - RNA, 24 nt, Human
aacuacuuauaauaaacagcagga

SEQ ID NO: 374903 - RNA, 20 nt, Human
aacuuccucccaaggaaccc

SEQ ID NO: 374904 - RNA, 22 nt, Human
aagaaaccuguccaucugcagc

SEQ ID NO: 374905 - RNA, 19 nt, Human
aagaccgacaagcuucaaa

SEQ ID NO: 374906 - RNA, 26 nt, Human
aagagccaggcacggggacccggagc

SEQ ID NO: 374907 - RNA, 19 nt, Human
aagaggcagggaguggagg

SEQ ID NO: 374908 - RNA, 19 nt, Human
aagaguaaaaguagacaaa

SEQ ID NO: 374909 - RNA, 18 nt, Human
aagcaagcgggaggggag

SEQ ID NO: 374910 - RNA, 20 nt, Human
aagcaagcgggaggggaggc

SEQ ID NO: 374911 - RNA, 21 nt, Human
aagcaagcgggaggggaggcg

SEQ ID NO: 374912 - RNA, 22 nt, Human
aagcagggaaccacacaguaaa

SEQ ID NO: 374913 - RNA, 19 nt, Human
aagccacagaaaagaaacc

SEQ ID NO: 374914 - RNA, 21 nt, Human
aagcuucaaacagcgccuucc

SEQ ID NO: 374915 - RNA, 22 nt, Human
aagcuugcuggcuucgcauccc

SEQ ID NO: 374916 - RNA, 21 nt, Human
aaggaaacagacaccgaccac

SEQ ID NO: 374917 - RNA, 24 nt, Human
aaggaaacagacaccgaccacuuc

SEQ ID NO: 374918 - RNA, 20 nt, Human
aaugguggggagcgaggggg

SEQ ID NO: 374919 - RNA, 19 nt, Human
aauuucaggaaaaagaaau

SEQ ID NO: 374920 - RNA, 24 nt, Human
acaaaaaaaggacaggaaaaaugu

SEQ ID NO: 374921 - RNA, 22 nt, Human
acaaaaaaauacauaguuuuca

SEQ ID NO: 374922 - RNA, 18 nt, Human
acaaaucucuacuauagc

SEQ ID NO: 374923 - RNA, 23 nt, Human
acacagcacccacccgccacccc

SEQ ID NO: 374924 - RNA, 20 nt, Human
acacugcauaccaagggggg

SEQ ID NO: 374925 - RNA, 22 nt, Human
acagaaaaaauucaaaucugga

SEQ ID NO: 374926 - RNA, 20 nt, Human
acagaaaauguccaagauuc

SEQ ID NO: 374927 - RNA, 20 nt, Human
acagcacccacccgccaccc

SEQ ID NO: 374928 - RNA, 22 nt, Human
acagccuuaaauauuguuaaaa

SEQ ID NO: 374929 - RNA, 22 nt, Human
acagugcauugagucugcuuug

SEQ ID NO: 374930 - RNA, 21 nt, Human
accaaaacugacaaaaaaauc

SEQ ID NO: 374931 - RNA, 22 nt, Human
accacacaguaaaagaguauaa

SEQ ID NO: 374932 - RNA, 22 nt, Human
accuccccucccccgccccgcc

SEQ ID NO: 374933 - RNA, 21 nt, Human
accuucguugcggcggccccg

SEQ ID NO: 374934 - RNA, 24 nt, Human
acucaucaaaacagccuuaaauau

SEQ ID NO: 374935 - RNA, 18 nt, Human
acugaaaaaacacagcaa

SEQ ID NO: 374936 - RNA, 21 nt, Human
agaaaguaagacaagcaucau

SEQ ID NO: 374937 - RNA, 24 nt, Human
agaacagaaaaaauucaaaucugg

SEQ ID NO: 374938 - RNA, 22 nt, Human
agaaggaaacagacaccgacca

SEQ ID NO: 374939 - RNA, 20 nt, Human
agaauucucuccugccaccu

SEQ ID NO: 374940 - RNA, 18 nt, Human
agacuucaaagaccgaca

SEQ ID NO: 374941 - RNA, 23 nt, Human
agagaccaacaaaaaaaaaucaa

SEQ ID NO: 374942 - RNA, 20 nt, Human
agagagcucaguuucauaaa

SEQ ID NO: 374943 - RNA, 24 nt, Human
agauagucuacgagaagacgaaac

SEQ ID NO: 374944 - RNA, 19 nt, Human
agcaagcgggaggggaggc

SEQ ID NO: 374945 - RNA, 19 nt, Human
agcaucuucuucucucccc

SEQ ID NO: 374946 - RNA, 19 nt, Human
agcauuaacacugcauacc

SEQ ID NO: 374947 - RNA, 24 nt, Human
agccagcgcuggugucuccgcgcg

SEQ ID NO: 374948 - RNA, 18 nt, Human
agccccgaggcuucccuc

SEQ ID NO: 374949 - RNA, 19 nt, Human
agcgcacugccucagguag

SEQ ID NO: 374950 - RNA, 19 nt, Human
agcggguccuaccuccccu

SEQ ID NO: 374951 - RNA, 21 nt, Human
agcugauuccggggcagcccc

SEQ ID NO: 374952 - RNA, 25 nt, Human
aggaaaaagaaauaguaauuacaaa

SEQ ID NO: 374953 - RNA, 22 nt, Human
aggaaaaagccacagaaaagaa

SEQ ID NO: 374954 - RNA, 20 nt, Human
aggaacccagcucugcaccc

SEQ ID NO: 374955 - RNA, 22 nt, Human
aggaggaggugagaaaggaaau

SEQ ID NO: 374956 - RNA, 29 nt, Human
aggcaaaagcaagcgggaggggaggcggg

SEQ ID NO: 374957 - RNA, 20 nt, Human
aggcagcuaauggauauagg

SEQ ID NO: 374958 - RNA, 19 nt, Human
aggcagggaguggaggaag

SEQ ID NO: 374959 - RNA, 26 nt, Human
aggcagggaguggaggaggagggacc

SEQ ID NO: 374960 - RNA, 23 nt, Human
aggcagggaguggaggaggaggu

SEQ ID NO: 374961 - RNA, 27 nt, Human
aggcagggaguggaggaggaggugaga

SEQ ID NO: 374962 - RNA, 25 nt, Human
aggcagggaguggaggagggggacc

SEQ ID NO: 374963 - RNA, 26 nt, Human
aggcagggaguggaggagggggaccc

SEQ ID NO: 374964 - RNA, 24 nt, Human
aggcauacuguuuuugaacaaaag

SEQ ID NO: 374965 - RNA, 21 nt, Human
aggcggcggaugcucggaagg

SEQ ID NO: 374966 - RNA, 22 nt, Human
aggcgggaagggcgccggggcc

SEQ ID NO: 374967 - RNA, 21 nt, Human
aggcuccacaggaaggggcaa

SEQ ID NO: 374968 - RNA, 20 nt, Human
agggaggaggcauacuguuu

SEQ ID NO: 374969 - RNA, 22 nt, Human
agggaggggggacaaaaaaagg

SEQ ID NO: 374970 - RNA, 23 nt, Human
aggggguguggacaggcaaacgg

SEQ ID NO: 374971 - RNA, 25 nt, Human
agguagcuuuaccuucucucuguuu

SEQ ID NO: 374972 - RNA, 19 nt, Human
aggugucacagaacaaaug

SEQ ID NO: 374973 - RNA, 22 nt, Human
agucugcauuuuuucaagcucc

SEQ ID NO: 374974 - RNA, 22 nt, Human
aguuggcaaguagaaaucacau

SEQ ID NO: 374975 - RNA, 23 nt, Human
auaaucacaacuccagacuaggu

SEQ ID NO: 374976 - RNA, 26 nt, Human
auccgcgcacacaacagccucaccac

SEQ ID NO: 374977 - RNA, 26 nt, Human
auggaacagauaaaacuaauuaggca

SEQ ID NO: 374978 - RNA, 21 nt, Human
auggaguauaacguuucuccc

SEQ ID NO: 374979 - RNA, 22 nt, Human
auggucccuuuuuuuguuaaaa

SEQ ID NO: 374980 - RNA, 23 nt, Human
augguuuaucgaaaggaaaaagc

SEQ ID NO: 374981 - RNA, 22 nt, Human
auuucuuaaagauggaaagcuu

SEQ ID NO: 374982 - RNA, 19 nt, Human
caaaaacacauuuuuuggg

SEQ ID NO: 374983 - RNA, 24 nt, Human
caaaauacauagaucagccuauca

SEQ ID NO: 374984 - RNA, 20 nt, Human
caaacagcgccuuccggagc

SEQ ID NO: 374985 - RNA, 22 nt, Human
caaaccuggaguggcuaagaaa

SEQ ID NO: 374986 - RNA, 21 nt, Human
caaagagcagaauuuuccaga

SEQ ID NO: 374987 - RNA, 23 nt, Human
caaaugcaaaagacucuuaaacc

SEQ ID NO: 374988 - RNA, 25 nt, Human
caacacacuacacucugcaugcuag

SEQ ID NO: 374989 - RNA, 25 nt, Human
caacauauguacaagaguaaaagua

SEQ ID NO: 374990 - RNA, 26 nt, Human
caagaauaccauguguauuauacuau

SEQ ID NO: 374991 - RNA, 22 nt, Human
caagauucaucuaugauuaaaa

SEQ ID NO: 374992 - RNA, 19 nt, Human
caauggguuuacguugcca

SEQ ID NO: 374993 - RNA, 21 nt, Human
cacacagcacccacccgccac

SEQ ID NO: 374994 - RNA, 27 nt, Human
cacagaacaaaugcaaaagacucuuaa

SEQ ID NO: 374995 - RNA, 23 nt, Human
cacauaaaaucaccagcacggag

SEQ ID NO: 374996 - RNA, 19 nt, Human
caccaauggcugcauuagu

SEQ ID NO: 374997 - RNA, 19 nt, Human
cacccccugcuccccacgc

SEQ ID NO: 374998 - RNA, 19 nt, Human
cacccuuccccugucuuuc

SEQ ID NO: 374999 - RNA, 19 nt, Human
cacuacaacuuccucccaa

SEQ ID NO: 375000 - RNA, 21 nt, Human
cacucagacuucuacacaaaa

SEQ ID NO: 375001 - RNA, 20 nt, Human
cagaaaagaaaccuguccau

SEQ ID NO: 375002 - RNA, 19 nt, Human
cagcacccacccgccaccc

SEQ ID NO: 375003 - RNA, 22 nt, Human
cagcagaaaaaaucaagucuac

SEQ ID NO: 375004 - RNA, 23 nt, Human
cagcagaaaagaggcggcggaug

SEQ ID NO: 375005 - RNA, 18 nt, Human
cagcaguaaguaaaaugg

SEQ ID NO: 375006 - RNA, 19 nt, Human
cagccgccugcuccccggg

SEQ ID NO: 375007 - RNA, 19 nt, Human
cagccuaacccccuaaaug

SEQ ID NO: 375008 - RNA, 23 nt, Human
cagcguuaaaaauaaagaacaga

SEQ ID NO: 375009 - RNA, 19 nt, Human
cagcucccgagccuccgcg

SEQ ID NO: 375010 - RNA, 25 nt, Human
caggaggcucccggagaacaaucaa

SEQ ID NO: 375011 - RNA, 21 nt, Human
caguaaaaauggaaggccaaa

SEQ ID NO: 375012 - RNA, 19 nt, Human
caucaacaccaccaucauc

SEQ ID NO: 375013 - RNA, 22 nt, Human
caucaucaccacuacaacuucc

SEQ ID NO: 375014 - RNA, 25 nt, Human
caucaucaucaccacuacaacuucc

SEQ ID NO: 375015 - RNA, 19 nt, Human
caucaucaucaucaccacu

SEQ ID NO: 375016 - RNA, 24 nt, Human
caugcaaacucuaaaaaagguccc

SEQ ID NO: 375017 - RNA, 22 nt, Human
caugcuaaaaaacagaggaaaa

SEQ ID NO: 375018 - RNA, 23 nt, Human
cauugagucugcuuugccaccau

SEQ ID NO: 375019 - RNA, 22 nt, Human
ccaaaaaaaaaaaaaaaaaaaa

SEQ ID NO: 375020 - RNA, 23 nt, Human
ccaaaaaaaaaaaaaaaaaaaaa

SEQ ID NO: 375021 - RNA, 23 nt, Human
ccaacauacuugcaugcuaaaaa

SEQ ID NO: 375022 - RNA, 18 nt, Human
ccaaggaacccagcucug

SEQ ID NO: 375023 - RNA, 24 nt, Human
ccacacaguaaaagaguauaaaga

SEQ ID NO: 375024 - RNA, 18 nt, Human
ccacagaaaagaaaccug

SEQ ID NO: 375025 - RNA, 22 nt, Human
ccacagaaaauguccaagauuc

SEQ ID NO: 375026 - RNA, 21 nt, Human
ccaccgaaugcucugcgacaa

SEQ ID NO: 375027 - RNA, 23 nt, Human
ccaccgccaccaucaacaccacc

SEQ ID NO: 375028 - RNA, 21 nt, Human
ccacuacaacuuccucccaag

SEQ ID NO: 375029 - RNA, 22 nt, Human
ccagacccagcagaaaagaggc

SEQ ID NO: 375030 - RNA, 23 nt, Human
ccagacccagcagaaaagaggcg

SEQ ID NO: 375031 - RNA, 23 nt, Human
ccagagcgggaggcuggggggcg

SEQ ID NO: 375032 - RNA, 22 nt, Human
ccaguucuauauugagaaccug

SEQ ID NO: 375033 - RNA, 18 nt, Human
ccccacaaaccacucaga

SEQ ID NO: 375034 - RNA, 18 nt, Human
ccccagcgagcaggaccc

SEQ ID NO: 375035 - RNA, 22 nt, Human
cccccacaaaccacucagacuu

SEQ ID NO: 375036 - RNA, 21 nt, Human
cccccgccccgcccccucugc

SEQ ID NO: 375037 - RNA, 21 nt, Human
ccccgagcggccucccagccu

SEQ ID NO: 375038 - RNA, 22 nt, Human
ccccgagcggccucccagccuc

SEQ ID NO: 375039 - RNA, 21 nt, Human
ccccgccccgcccccucugcc

SEQ ID NO: 375040 - RNA, 22 nt, Human
ccccgccccgcccccucugccu

SEQ ID NO: 375041 - RNA, 20 nt, Human
ccccgcgcccccugcggccc

SEQ ID NO: 375042 - RNA, 19 nt, Human
ccccggccagcucccgagc

SEQ ID NO: 375043 - RNA, 25 nt, Human
ccccggccagcucccgagccuccgc

SEQ ID NO: 375044 - RNA, 19 nt, Human
ccccggggagcugauuccg

SEQ ID NO: 375045 - RNA, 21 nt, Human
ccccucauccgcgcacacaac

SEQ ID NO: 375046 - RNA, 19 nt, Human
ccccugucuuucacaacua

SEQ ID NO: 375047 - RNA, 21 nt, Human
ccccuucccccuucaccgcua

SEQ ID NO: 375048 - RNA, 19 nt, Human
ccccuucuuuucccaaaug

SEQ ID NO: 375049 - RNA, 20 nt, Human
cccgacucccgccucccucc

SEQ ID NO: 375050 - RNA, 20 nt, Human
cccgccgcgccccgcgcccc

SEQ ID NO: 375051 - RNA, 20 nt, Human
cccgcgccgccgccggagcc

SEQ ID NO: 375052 - RNA, 21 nt, Human
cccgcgccgccgccggagccc

SEQ ID NO: 375053 - RNA, 24 nt, Human
cccgcggcggggcgcgcccaggag

SEQ ID NO: 375054 - RNA, 22 nt, Human
cccggagcgucagggcucugcc

SEQ ID NO: 375055 - RNA, 21 nt, Human
cccggcccgcgggcccgggaa

SEQ ID NO: 375056 - RNA, 22 nt, Human
cccuccaaaaaaaaaaaaaaaa

SEQ ID NO: 375057 - RNA, 24 nt, Human
cccuccaaaaaaaaaaaaaaaaaa

SEQ ID NO: 375058 - RNA, 20 nt, Human
cccucugccacccccugcuc

SEQ ID NO: 375059 - RNA, 23 nt, Human
cccucugccacccccugcucccc

SEQ ID NO: 375060 - RNA, 21 nt, Human
ccgacagcuccacggccccgg

SEQ ID NO: 375061 - RNA, 22 nt, Human
ccgcagagaacacacaagcccc

SEQ ID NO: 375062 - RNA, 21 nt, Human
ccgcagccccgaggcuucccu

SEQ ID NO: 375063 - RNA, 18 nt, Human
ccgccccgcccccucugc

SEQ ID NO: 375064 - RNA, 19 nt, Human
ccgccccgcccccucugcc

SEQ ID NO: 375065 - RNA, 19 nt, Human
ccgccccgcccccucugcc

SEQ ID NO: 375066 - RNA, 20 nt, Human
ccgccccgcccccucugccu

SEQ ID NO: 375067 - RNA, 21 nt, Human
ccgccccgcccccucugccuu

SEQ ID NO: 375068 - RNA, 19 nt, Human
ccgccccuccccggccagc

SEQ ID NO: 375069 - RNA, 22 nt, Human
ccgccccuccccggccagcucc

SEQ ID NO: 375070 - RNA, 19 nt, Human
ccgcgcacacaacagccuc

SEQ ID NO: 375071 - RNA, 18 nt, Human
ccgcgcccccugcggccc

SEQ ID NO: 375072 - RNA, 22 nt, Human
ccgcgccgccgccggagccccc

SEQ ID NO: 375073 - RNA, 19 nt, Human
ccgcggcggggcgcgccca

SEQ ID NO: 375074 - RNA, 19 nt, Human
ccgcugcgggcgccgcagc

SEQ ID NO: 375075 - RNA, 23 nt, Human
ccggagcgucagggcucugccuu

SEQ ID NO: 375076 - RNA, 20 nt, Human
ccuaccaccgccaccaucaa

SEQ ID NO: 375077 - RNA, 24 nt, Human
ccuaccuccccucccccgccccgc

SEQ ID NO: 375078 - RNA, 19 nt, Human
ccuaucaauggguuuacgu

SEQ ID NO: 375079 - RNA, 23 nt, Human
ccucaccaccgaaugcucugcga

SEQ ID NO: 375080 - RNA, 20 nt, Human
ccuccaaaaaaaaaaaaaaa

SEQ ID NO: 375081 - RNA, 19 nt, Human
ccuccauccgccccucccc

SEQ ID NO: 375082 - RNA, 20 nt, Human
ccucccaaggaacccagcuc

SEQ ID NO: 375083 - RNA, 24 nt, Human
ccucccagccucccuccucccaga

SEQ ID NO: 375084 - RNA, 25 nt, Human
ccucccagccucccuccucccagac

SEQ ID NO: 375085 - RNA, 22 nt, Human
ccucccaggcaccccggagacc

SEQ ID NO: 375086 - RNA, 20 nt, Human
ccucccgcucguagccuggg

SEQ ID NO: 375087 - RNA, 23 nt, Human
ccugcggccccgcaccguccucc

SEQ ID NO: 375088 - RNA, 19 nt, Human
ccuuuccucuuccccuucc

SEQ ID NO: 375089 - RNA, 21 nt, Human
cgagcggccucccagccuccc

SEQ ID NO: 375090 - RNA, 19 nt, Human
cgagggcucggggacacag

SEQ ID NO: 375091 - RNA, 23 nt, Human
cgccaacaaccaccucugagcac

SEQ ID NO: 375092 - RNA, 20 nt, Human
cgccaccaucaacaccacca

SEQ ID NO: 375093 - RNA, 23 nt, Human
cgcccgggugcccucugccaccc

SEQ ID NO: 375094 - RNA, 19 nt, Human
cgcccucaccagugguucg

SEQ ID NO: 375095 - RNA, 26 nt, Human
cgccggagcccccaggaggcucccgg

SEQ ID NO: 375096 - RNA, 20 nt, Human
cgcgccgccgccggagcccc

SEQ ID NO: 375097 - RNA, 21 nt, Human
cgcugggccccgagcggccuc

SEQ ID NO: 375098 - RNA, 21 nt, Human
cggagcggguccuaccucccc

SEQ ID NO: 375099 - RNA, 23 nt, Human
cggccccgggggacagaaggaaa

SEQ ID NO: 375100 - RNA, 21 nt, Human
cggccucccagccucccuccu

SEQ ID NO: 375101 - RNA, 24 nt, Human
cguuucaacacacuacacucugcu

SEQ ID NO: 375102 - RNA, 22 nt, Human
cuaaaaaaggucccccccacaa

SEQ ID NO: 375103 - RNA, 22 nt, Human
cuacacaaaaggguuuuucagc

SEQ ID NO: 375104 - RNA, 24 nt, Human
cuacauaaaagaaguuugaucaaa

SEQ ID NO: 375105 - RNA, 26 nt, Human
cucacaacgcacucaucaaaacagcc

SEQ ID NO: 375106 - RNA, 24 nt, Human
cuccacaggaaggggcaaaaacca

SEQ ID NO: 375107 - RNA, 18 nt, Human
cuccacauaugcacaucc

SEQ ID NO: 375108 - RNA, 20 nt, Human
cucccagacccagcagaaaa

SEQ ID NO: 375109 - RNA, 25 nt, Human
cucccagccucccuccucccagacc

SEQ ID NO: 375110 - RNA, 19 nt, Human
cuccccggccagcucccga

SEQ ID NO: 375111 - RNA, 19 nt, Human
cuccccggcccgcgggccc

SEQ ID NO: 375112 - RNA, 19 nt, Human
cucccucccgcucguagcc

SEQ ID NO: 375113 - RNA, 18 nt, Human
cucuccccuccacccuac

SEQ ID NO: 375114 - RNA, 24 nt, Human
cugagcacacgcgaagaugcagcg

SEQ ID NO: 375115 - RNA, 19 nt, Human
cugaucuuaagucaguuca

SEQ ID NO: 375116 - RNA, 21 nt, Human
cugcacccuccgagagaaaga

SEQ ID NO: 375117 - RNA, 18 nt, Human
cugcuccccacgcccuca

SEQ ID NO: 375118 - RNA, 19 nt, Human
cugggucccgccgcgcccc

SEQ ID NO: 375119 - RNA, 22 nt, Human
cuuuuagugguuuguuucucug

SEQ ID NO: 375120 - RNA, 21 nt, Human
cuuuucacuguacaaaaauac

SEQ ID NO: 375121 - RNA, 19 nt, Human
gaaaaaaaagaaaucaaaa

SEQ ID NO: 375122 - RNA, 19 nt, Human
gaaaaaaaagaaaucaaaa

SEQ ID NO: 375123 - RNA, 21 nt, Human
gaaauaaccaauaauaaaaau

SEQ ID NO: 375124 - RNA, 21 nt, Human
gaaauuaaugagaauggagua

SEQ ID NO: 375125 - RNA, 19 nt, Human
gaaauucucuuauaaacuc

SEQ ID NO: 375126 - RNA, 20 nt, Human
gaacaaaugcaaaagacucu

SEQ ID NO: 375127 - RNA, 21 nt, Human
gaacaaaugcaaaagacucuu

SEQ ID NO: 375128 - RNA, 23 nt, Human
gaacccagcucugcacccuccga

SEQ ID NO: 375129 - RNA, 21 nt, Human
gaacuggaaauuacuuccaca

SEQ ID NO: 375130 - RNA, 22 nt, Human
gaagcacaagcacaagccacug

SEQ ID NO: 375131 - RNA, 23 nt, Human
gaagcacaagcacaagccacugg

SEQ ID NO: 375132 - RNA, 23 nt, Human
gacccggagcgucagggcucugc

SEQ ID NO: 375133 - RNA, 18 nt, Human
gacucccgccucccuccc

SEQ ID NO: 375134 - RNA, 18 nt, Human
gagaaccugguuaacgcc

SEQ ID NO: 375135 - RNA, 20 nt, Human
gagcuugugucucccuuugu

SEQ ID NO: 375136 - RNA, 21 nt, Human
gaggcgggaagggcgccgggg

SEQ ID NO: 375137 - RNA, 23 nt, Human
gaggcucagcggggacgcggccc

SEQ ID NO: 375138 - RNA, 24 nt, Human
gaggggggacaaaaaaaggacagg

SEQ ID NO: 375139 - RNA, 20 nt, Human
gcaaaagacucuuaaaccca

SEQ ID NO: 375140 - RNA, 21 nt, Human
gcaaaagacucuuaaacccac

SEQ ID NO: 375141 - RNA, 18 nt, Human
gcagagaacacacaagcc

SEQ ID NO: 375142 - RNA, 20 nt, Human
gccugggucccgccgcgccc

SEQ ID NO: 375143 - RNA, 19 nt, Human
gcgaggcaagaagagccag

SEQ ID NO: 375144 - RNA, 18 nt, Human
gcgaucgccugcucgggc

SEQ ID NO: 375145 - RNA, 20 nt, Human
gcgccggggccccucuggcc

SEQ ID NO: 375146 - RNA, 25 nt, Human
gcgcgccucaagggcccgcggcggg

SEQ ID NO: 375147 - RNA, 24 nt, Human
gcggcagccgccugcuccccgggu

SEQ ID NO: 375148 - RNA, 21 nt, Human
gcgggagcccggggcgcgcgu

SEQ ID NO: 375149 - RNA, 19 nt, Human
gcgggcccgggaagccagc

SEQ ID NO: 375150 - RNA, 18 nt, Human
gcguuaaaaauaaagaac

SEQ ID NO: 375151 - RNA, 25 nt, Human
ggaaaaaaaaaaaaaaaaaagccag

SEQ ID NO: 375152 - RNA, 30 nt, Human
ggaaaaagaaauaguaauuacaaaaacacu

SEQ ID NO: 375153 - RNA, 18 nt, Human
ggaaaaagaaaucagccu

SEQ ID NO: 375154 - RNA, 20 nt, Human
ggaaaccacaucucaacucg

SEQ ID NO: 375155 - RNA, 21 nt, Human
ggaacaaguuacaaaaaaaaa

SEQ ID NO: 375156 - RNA, 19 nt, Human
ggaaucaaggaaaaaaaaa

SEQ ID NO: 375157 - RNA, 22 nt, Human
ggagcgaggggguguggacagg

SEQ ID NO: 375158 - RNA, 20 nt, Human
ggaggaggcucgcccagagc

SEQ ID NO: 375159 - RNA, 19 nt, Human
ggcccgcggcggggcgcgc

SEQ ID NO: 375160 - RNA, 22 nt, Human
ggcgggagcccggggcgcgcgu

SEQ ID NO: 375161 - RNA, 19 nt, Human
ggcguggugagggcccggg

SEQ ID NO: 375162 - RNA, 18 nt, Human
ggcucauucuuguuaucc

SEQ ID NO: 375163 - RNA, 21 nt, Human
ggcucgcccagagcgggaggc

SEQ ID NO: 375164 - RNA, 20 nt, Human
gggagggcguggugagggcc

SEQ ID NO: 375165 - RNA, 21 nt, Human
gggcgggugagaggcccgagu

SEQ ID NO: 375166 - RNA, 18 nt, Human
gggcguggugagggcccg

SEQ ID NO: 375167 - RNA, 21 nt, Human
gggcguggugagggcccgggg

SEQ ID NO: 375168 - RNA, 18 nt, Human
gggcuggggaggaggcuc

SEQ ID NO: 375169 - RNA, 22 nt, Human
ggggggugggucaagaagcugg

SEQ ID NO: 375170 - RNA, 18 nt, Human
ggggugggggcuggggag

SEQ ID NO: 375171 - RNA, 23 nt, Human
gggguguggacaggcaaacgggg

SEQ ID NO: 375172 - RNA, 18 nt, Human
ggugcccucggccggccu

SEQ ID NO: 375173 - RNA, 24 nt, Human
ggugcccucugccacccccugcuc

SEQ ID NO: 375174 - RNA, 20 nt, Human
guaaaaauggaaggccaaac

SEQ ID NO: 375175 - RNA, 24 nt, Human
guggggagcgaggggguguggaca

SEQ ID NO: 375176 - RNA, 24 nt, Human
uaaaaaaaaaucaccaguucuuua

SEQ ID NO: 375177 - RNA, 19 nt, Human
uaaaaacuacucauuucac

SEQ ID NO: 375178 - RNA, 25 nt, Human
uaaaaagaaacaucucugcccaaaa

SEQ ID NO: 375179 - RNA, 20 nt, Human
uaaaaauaagacuuacuuaa

SEQ ID NO: 375180 - RNA, 20 nt, Human
uaaaacagaaaagacaugcc

SEQ ID NO: 375181 - RNA, 23 nt, Human
uaaaacagaaaagacaugccaag

SEQ ID NO: 375182 - RNA, 19 nt, Human
uaaaauaaauguaccacca

SEQ ID NO: 375183 - RNA, 24 nt, Human
uaaaauaaauguaccaccaauggc

SEQ ID NO: 375184 - RNA, 25 nt, Human
uaaaauagagcaacuuauuugccuu

SEQ ID NO: 375185 - RNA, 20 nt, Human
uaaaaucaccagcacggagc

SEQ ID NO: 375186 - RNA, 21 nt, Human
uaaaaucaccagcacggagca

SEQ ID NO: 375187 - RNA, 26 nt, Human
uaaauuaacaaaaguugcaauggucc

SEQ ID NO: 375188 - RNA, 23 nt, Human
uaaauucaccaauugcucauugg

SEQ ID NO: 375189 - RNA, 19 nt, Human
uaacagugucaugcugaaa

SEQ ID NO: 375190 - RNA, 19 nt, Human
uaagaaaaaagcacaaaua

SEQ ID NO: 375191 - RNA, 24 nt, Human
uaagagaccaacaaaaaaaaauca

SEQ ID NO: 375192 - RNA, 19 nt, Human
uaagauaacagcucugagg

SEQ ID NO: 375193 - RNA, 24 nt, Human
uaagguaaacaacuccagaaaucc

SEQ ID NO: 375194 - RNA, 19 nt, Human
uacaaaaaaaaaguuggca

SEQ ID NO: 375195 - RNA, 26 nt, Human
uacaaaggguauuugaaacugacauu

SEQ ID NO: 375196 - RNA, 18 nt, Human
uacauaagaaaaaagcac

SEQ ID NO: 375197 - RNA, 18 nt, Human
uaccaagggggggugggu

SEQ ID NO: 375198 - RNA, 21 nt, Human
uaccaagggggggugggucaa

SEQ ID NO: 375199 - RNA, 22 nt, Human
uaccaccgccaccaucaacacc

SEQ ID NO: 375200 - RNA, 21 nt, Human
uacguugccaccaaguuucgg

SEQ ID NO: 375201 - RNA, 24 nt, Human
uagaauucucuccugccaccuccc

SEQ ID NO: 375202 - RNA, 21 nt, Human
uagacacucaauaaagaauuc

SEQ ID NO: 375203 - RNA, 18 nt, Human
uagaggucaaacacugcg

SEQ ID NO: 375204 - RNA, 20 nt, Human
uagaucgaagcacaagcaca

SEQ ID NO: 375205 - RNA, 20 nt, Human
uagauugccaaacaauuacu

SEQ ID NO: 375206 - RNA, 19 nt, Human
uaggauagguaaggcucau

SEQ ID NO: 375207 - RNA, 19 nt, Human
uaggucuccuuuaaaauuc

SEQ ID NO: 375208 - RNA, 19 nt, Human
uauaauaaacagcaggauc

SEQ ID NO: 375209 - RNA, 22 nt, Human
uauccaguggcaagaauaccau

SEQ ID NO: 375210 - RNA, 25 nt, Human
uaucuauuugaucaaaauucuuuau

SEQ ID NO: 375211 - RNA, 23 nt, Human
uaugcagauggucuguacuuuau

SEQ ID NO: 375212 - RNA, 21 nt, Human
uaugguaggaaucaaggaaaa

SEQ ID NO: 375213 - RNA, 20 nt, Human
ucaaacagugagacgggagc

SEQ ID NO: 375214 - RNA, 24 nt, Human
ucaaggaaaaaaaaaaaaaaaaaa

SEQ ID NO: 375215 - RNA, 20 nt, Human
ucaccaguucuuuaaguucu

SEQ ID NO: 375216 - RNA, 20 nt, Human
ucaccauuuucaauaaaucu

SEQ ID NO: 375217 - RNA, 18 nt, Human
ucagucggggggccgggg

SEQ ID NO: 375218 - RNA, 18 nt, Human
ucagucggggggccgggg

SEQ ID NO: 375219 - RNA, 21 nt, Human
ucagucggggggccgggggag

SEQ ID NO: 375220 - RNA, 23 nt, Human
uccaccucaccacagaaaauguc

SEQ ID NO: 375221 - RNA, 25 nt, Human
uccaccucaccacagaaaaugucca

SEQ ID NO: 375222 - RNA, 23 nt, Human
uccagcacaaaaaaaaaaaaaaa

SEQ ID NO: 375223 - RNA, 21 nt, Human
uccagcgcacugccucaggua

SEQ ID NO: 375224 - RNA, 20 nt, Human
uccagguugcuuaaauucac

SEQ ID NO: 375225 - RNA, 23 nt, Human
uccaguucuauauugagaaccug

SEQ ID NO: 375226 - RNA, 25 nt, Human
ucccaaaccggaaaaaauaggccuc

SEQ ID NO: 375227 - RNA, 19 nt, Human
ucccaaauguacuacugaa

SEQ ID NO: 375228 - RNA, 21 nt, Human
ucccccgacucccgccucccu

SEQ ID NO: 375229 - RNA, 18 nt, Human
ucccccgccccgcccccu

SEQ ID NO: 375230 - RNA, 23 nt, Human
uccccggccagcucccgagccuc

SEQ ID NO: 375231 - RNA, 21 nt, Human
ucccgagccuccgcgcagccc

SEQ ID NO: 375232 - RNA, 24 nt, Human
ucccuuuuuuuguuaaaaaaaaau

SEQ ID NO: 375233 - RNA, 18 nt, Human
uccgccaacaaccaccuc

SEQ ID NO: 375234 - RNA, 20 nt, Human
uccgccaacaaccaccucuu

SEQ ID NO: 375235 - RNA, 18 nt, Human
uccgcgcacacaacagcc

SEQ ID NO: 375236 - RNA, 19 nt, Human
uccgcgcacacaacagccu

SEQ ID NO: 375237 - RNA, 23 nt, Human
uccuaccuccccucccccgcccc

SEQ ID NO: 375238 - RNA, 18 nt, Human
uccucggggugcccucgg

SEQ ID NO: 375239 - RNA, 22 nt, Human
uccucuuccccuucccccuuca

SEQ ID NO: 375240 - RNA, 22 nt, Human
uccuuuccucuuccccuucccc

SEQ ID NO: 375241 - RNA, 19 nt, Human
ucgcacagaggccaugcca

SEQ ID NO: 375242 - RNA, 20 nt, Human
ucgcgcccgcgccgccgccg

SEQ ID NO: 375243 - RNA, 20 nt, Human
ucggaugcauagaagacauc

SEQ ID NO: 375244 - RNA, 23 nt, Human
ucuaugauuaaaacagaaaagac

SEQ ID NO: 375245 - RNA, 18 nt, Human
ucucaguaaaaauggaag

SEQ ID NO: 375246 - RNA, 24 nt, Human
ucucccuccaaaaaaaaaaaaaaa

SEQ ID NO: 375247 - RNA, 18 nt, Human
ucucuacuauagcuguac

SEQ ID NO: 375248 - RNA, 18 nt, Human
ucucuacuauagcuguac

SEQ ID NO: 375249 - RNA, 21 nt, Human
ucugaagccaaauuauuacuu

SEQ ID NO: 375250 - RNA, 20 nt, Human
ucugcauuuuuucaagcucc

SEQ ID NO: 375251 - RNA, 18 nt, Human
ucuguagucauucauaac

SEQ ID NO: 375252 - RNA, 21 nt, Human
ugaaaaaagcaacuaaaucac

SEQ ID NO: 375253 - RNA, 23 nt, Human
ugaaaaaagcaacuaaaucaccc

SEQ ID NO: 375254 - RNA, 30 nt, Human
ugaacaaaucucuacuauagcuguacaaaa

SEQ ID NO: 375255 - RNA, 21 nt, Human
ugacaaaaaaauccugaguug

SEQ ID NO: 375256 - RNA, 19 nt, Human
ugagaaccugguuaacgcc

SEQ ID NO: 375257 - RNA, 21 nt, Human
ugagaaccugguuaacgccau

SEQ ID NO: 375258 - RNA, 19 nt, Human
ugagccggcgcgcggggag

SEQ ID NO: 375259 - RNA, 19 nt, Human
ugagcuugugucucccuuu

SEQ ID NO: 375260 - RNA, 21 nt, Human
ugcauaccaaggggggguggg

SEQ ID NO: 375261 - RNA, 20 nt, Human
ugccaaaggcggcugucacc

SEQ ID NO: 375262 - RNA, 21 nt, Human
ugccaaaggcggcugucaccg

SEQ ID NO: 375263 - RNA, 22 nt, Human
ugccaaaggcggcugucaccgc

SEQ ID NO: 375264 - RNA, 22 nt, Human
ugcucggaaggggggcgggagc

SEQ ID NO: 375265 - RNA, 23 nt, Human
ugcucgggccugccgcgagggcu

SEQ ID NO: 375266 - RNA, 23 nt, Human
uggaaagggagggcagagagaaa

SEQ ID NO: 375267 - RNA, 21 nt, Human
uggaagagagcucaguuucau

SEQ ID NO: 375268 - RNA, 25 nt, Human
uggaaggccaaaccucggucaauca

SEQ ID NO: 375269 - RNA, 23 nt, Human
uggagacgguuacuuugggaacu

SEQ ID NO: 375270 - RNA, 22 nt, Human
uggaggaggaggugagaaagga

SEQ ID NO: 375271 - RNA, 20 nt, Human
ugggaugccauaaccacuag

SEQ ID NO: 375272 - RNA, 21 nt, Human
ugggaugccauaaccacuagg

SEQ ID NO: 375273 - RNA, 20 nt, Human
ugggccccgagcggccuccc

SEQ ID NO: 375274 - RNA, 19 nt, Human
uggguggggagaagaggca

SEQ ID NO: 375275 - RNA, 18 nt, Human
uggguuuacguugccacc

SEQ ID NO: 375276 - RNA, 22 nt, Human
uguaggcuccacaggaaggggc

SEQ ID NO: 375277 - RNA, 19 nt, Human
ugucauacaccguuucaac

SEQ ID NO: 375278 - RNA, 18 nt, Human
uuaaaaauaaagaacaga

SEQ ID NO: 375279 - RNA, 23 nt, Human
uuaaaacagucaauucaaaaaaa

SEQ ID NO: 375280 - RNA, 18 nt, Human
uuaacagugucaugcuga

SEQ ID NO: 375281 - RNA, 22 nt, Human
uuagacacucaauaaagaauuc

SEQ ID NO: 375282 - RNA, 19 nt, Human
uucaaaauacauagaucag

SEQ ID NO: 375283 - RNA, 23 nt, Human
uucaaagaccgacaagcuucaaa

SEQ ID NO: 375284 - RNA, 19 nt, Human
uucaacccugagcauuaac

SEQ ID NO: 375285 - RNA, 21 nt, Human
uucacuguacaaaaauacgcc

SEQ ID NO: 375286 - RNA, 23 nt, Human
uuccagaucauuaaauaaaaggg

SEQ ID NO: 375287 - RNA, 27 nt, Human
uuccagcacaaaaaaaaaaaaaaaaaa

SEQ ID NO: 375288 - RNA, 20 nt, Human
uucccccgacucccgccucc

SEQ ID NO: 375289 - RNA, 23 nt, Human
uuccggagcggguccuaccuccc

SEQ ID NO: 375290 - RNA, 19 nt, Human
uuccuugggcaaaagucac

SEQ ID NO: 375291 - RNA, 23 nt, Human
uucgcaucccaggggugggggcu

SEQ ID NO: 375292 - RNA, 18 nt, Human
uucucuccugccaccucc

SEQ ID NO: 375293 - RNA, 24 nt, Human
uugaacaaaagcuggaugaagaaa

SEQ ID NO: 375294 - RNA, 18 nt, Human
uugaacaaaucucuacua

SEQ ID NO: 375295 - RNA, 22 nt, Human
uugcaaucacgaauuucaggaa

SEQ ID NO: 375296 - RNA, 19 nt, Human
uuuaaacuaagauaacagc

SEQ ID NO: 375297 - RNA, 24 nt, Human
uuuaccuacaaauauugaacaaau

SEQ ID NO: 375298 - RNA, 20 nt, Human
uuucgcuggucuuccuacau

SEQ ID NO: 375299 - RNA, 26 nt, Human
uuuguaagcguuuguacagucugcau

SEQ ID NO: 375300 - RNA, 22 nt, Human
uuuguacagucugcauuuuuuc

SEQ ID NO: 375301 - RNA, 23 nt, Human
uuuguacugaggucuaggcugac

SEQ ID NO: 375302 - RNA, 22 nt, Human
uuuuuuguaagcguuuguacag

SEQ ID NO: 375303 - RNA, 27 nt, Human
aaaaaaaaaaaaaauagagcgcaagaa

SEQ ID NO: 375304 - RNA, 24 nt, Human
aaaccagauguuuaaaagcgagag

SEQ ID NO: 375305 - RNA, 18 nt, Human
aaaggagggggcgggucc

SEQ ID NO: 375306 - RNA, 26 nt, Human
aaaucacacggacuugaaucuggcaa

SEQ ID NO: 375307 - RNA, 19 nt, Human
aacccagagaaggcgggcc

SEQ ID NO: 375308 - RNA, 20 nt, Human
aacccuuccgagugcuccuc

SEQ ID NO: 375309 - RNA, 18 nt, Human
aagaagaggaagaagagg

SEQ ID NO: 375310 - RNA, 18 nt, Human
aagaccacagacagugac

SEQ ID NO: 375311 - RNA, 22 nt, Human
aagagcacagacaugcagaacc

SEQ ID NO: 375312 - RNA, 20 nt, Human
aagaggaagaagaggaagca

SEQ ID NO: 375313 - RNA, 18 nt, Human
aaggugccuugguuuuua

SEQ ID NO: 375314 - RNA, 23 nt, Human
aauagagcgcaagaaaggcccag

SEQ ID NO: 375315 - RNA, 25 nt, Human
aaugaccagguguuuauaccaugcc

SEQ ID NO: 375316 - RNA, 22 nt, Human
accaaucccaccacuccaggcc

SEQ ID NO: 375317 - RNA, 23 nt, Human
accaugccucacucagacaccag

SEQ ID NO: 375318 - RNA, 22 nt, Human
acccuuccgagugcuccuccca

SEQ ID NO: 375319 - RNA, 20 nt, Human
acugcagcuugaguacugag

SEQ ID NO: 375320 - RNA, 20 nt, Human
acuggcaggagguaggcccc

SEQ ID NO: 375321 - RNA, 20 nt, Human
agaagaggaagaagaggaag

SEQ ID NO: 375322 - RNA, 23 nt, Human
agaggaagaagaggaagcaggcc

SEQ ID NO: 375323 - RNA, 18 nt, Human
agagugugugagccaccc

SEQ ID NO: 375324 - RNA, 22 nt, Human
agauuccggagcaaaggagggg

SEQ ID NO: 375325 - RNA, 18 nt, Human
aggaagcagaaccaagcc

SEQ ID NO: 375326 - RNA, 18 nt, Human
aggaagcaggccugggca

SEQ ID NO: 375327 - RNA, 26 nt, Human
aggaggcagcggcgacggaggggcgg

SEQ ID NO: 375328 - RNA, 20 nt, Human
aggaggggguggggaaggug

SEQ ID NO: 375329 - RNA, 19 nt, Human
aggcagccacgcgaccgga

SEQ ID NO: 375330 - RNA, 18 nt, Human
aggcauggccaagccagc

SEQ ID NO: 375331 - RNA, 20 nt, Human
agggggaggggugucagagg

SEQ ID NO: 375332 - RNA, 24 nt, Human
agggggcuggcugcugguggcugu

SEQ ID NO: 375333 - RNA, 19 nt, Human
aggggggaggggugcaggu

SEQ ID NO: 375334 - RNA, 24 nt, Human
aggggguggggaaggugcagcagg

SEQ ID NO: 375335 - RNA, 19 nt, Human
agggguccggaggacucug

SEQ ID NO: 375336 - RNA, 21 nt, Human
auacugcagcuugaguacuga

SEQ ID NO: 375337 - RNA, 21 nt, Human
aucaaaggauuucccaggauc

SEQ ID NO: 375338 - RNA, 23 nt, Human
aucgcacccuccgggcccccgcc

SEQ ID NO: 375339 - RNA, 23 nt, Human
auggggugccagccucggccucc

SEQ ID NO: 375340 - RNA, 23 nt, Human
auuuccacacucagcccuggcuc

SEQ ID NO: 375341 - RNA, 21 nt, Human
caaauacacuuuauucagucc

SEQ ID NO: 375342 - RNA, 18 nt, Human
caacagggacagggcucc

SEQ ID NO: 375343 - RNA, 21 nt, Human
caagaccacagacagugacau

SEQ ID NO: 375344 - RNA, 19 nt, Human
cacacucagcccuggcucc

SEQ ID NO: 375345 - RNA, 26 nt, Human
cacagcaacagggacagggcucccga

SEQ ID NO: 375346 - RNA, 20 nt, Human
caccacuccaggcccucagc

SEQ ID NO: 375347 - RNA, 22 nt, Human
caccagauacaggcugccccag

SEQ ID NO: 375348 - RNA, 18 nt, Human
caccuucucaacucuacc

SEQ ID NO: 375349 - RNA, 24 nt, Human
cacuccaggcccucagcugggggc

SEQ ID NO: 375350 - RNA, 18 nt, Human
cagacagagggaccccac

SEQ ID NO: 375351 - RNA, 23 nt, Human
cagacagagggaccccaccccuc

SEQ ID NO: 375352 - RNA, 19 nt, Human
cagagaccugcagagaccc

SEQ ID NO: 375353 - RNA, 22 nt, Human
caucacaucugcucuccacgcc

SEQ ID NO: 375354 - RNA, 21 nt, Human
cauggccaagccagcccccuc

SEQ ID NO: 375355 - RNA, 18 nt, Human
ccaagccagcccccucgg

SEQ ID NO: 375356 - RNA, 24 nt, Human
ccaagcccugucucugacccuggc

SEQ ID NO: 375357 - RNA, 24 nt, Human
ccauguuggauugaaaugaccagg

SEQ ID NO: 375358 - RNA, 22 nt, Human
cccagagaaggcgggccgggcg

SEQ ID NO: 375359 - RNA, 21 nt, Human
ccccaggaagggcguggucuc

SEQ ID NO: 375360 - RNA, 20 nt, Human
ccccccagggaagggagggg

SEQ ID NO: 375361 - RNA, 18 nt, Human
cccccgcgaacuggggag

SEQ ID NO: 375362 - RNA, 22 nt, Human
cccccgcgaacuggggagcgag

SEQ ID NO: 375363 - RNA, 20 nt, Human
cccccgcgggcucuuccugc

SEQ ID NO: 375364 - RNA, 24 nt, Human
cccccuaacccagagaaggcgggc

SEQ ID NO: 375365 - RNA, 20 nt, Human
ccccgccgccuccggcaagu

SEQ ID NO: 375366 - RNA, 18 nt, Human
ccccgcgaacuggggagc

SEQ ID NO: 375367 - RNA, 22 nt, Human
cccgagggcacccugaacugga

SEQ ID NO: 375368 - RNA, 18 nt, Human
cccuccuccccagaagca

SEQ ID NO: 375369 - RNA, 21 nt, Human
cccuggcugcuugcaggcccu

SEQ ID NO: 375370 - RNA, 20 nt, Human
cccuggcuggccugggccug

SEQ ID NO: 375371 - RNA, 18 nt, Human
cccugggacacccagcuc

SEQ ID NO: 375372 - RNA, 22 nt, Human
ccgaagccaugcuucaccagga

SEQ ID NO: 375373 - RNA, 19 nt, Human
ccgagggcacccugaacug

SEQ ID NO: 375374 - RNA, 20 nt, Human
ccgagggcacccugaacugg

SEQ ID NO: 375375 - RNA, 27 nt, Human
ccuccgaggggccccaauaccugauuc

SEQ ID NO: 375376 - RNA, 18 nt, Human
ccugaacuggacacaacu

SEQ ID NO: 375377 - RNA, 20 nt, Human
ccugcagagacccugggcag

SEQ ID NO: 375378 - RNA, 20 nt, Human
ccugcagccucuggcuccgc

SEQ ID NO: 375379 - RNA, 19 nt, Human
ccugggacacccagcucgg

SEQ ID NO: 375380 - RNA, 19 nt, Human
ccuugaagggaguucuggg

SEQ ID NO: 375381 - RNA, 23 nt, Human
cgacgggaacgcguggggcagag

SEQ ID NO: 375382 - RNA, 22 nt, Human
cgagacuaguucuccaagacca

SEQ ID NO: 375383 - RNA, 23 nt, Human
cgccccgcggcucggcccggccc

SEQ ID NO: 375384 - RNA, 19 nt, Human
cgcggcuggggguggggga

SEQ ID NO: 375385 - RNA, 18 nt, Human
cggcgcgcccccgccgcc

SEQ ID NO: 375386 - RNA, 18 nt, Human
cggcgcgcccccgccgcc

SEQ ID NO: 375387 - RNA, 21 nt, Human
cggggccgcuagacgccgccg

SEQ ID NO: 375388 - RNA, 22 nt, Human
cggugagauacagguagugagg

SEQ ID NO: 375389 - RNA, 19 nt, Human
cucagaaacauccauccag

SEQ ID NO: 375390 - RNA, 24 nt, Human
cuccacgccucagucccaaaccuu

SEQ ID NO: 375391 - RNA, 24 nt, Human
cucccaaaccagauguuuaaaagc

SEQ ID NO: 375392 - RNA, 20 nt, Human
cuccgggcccccgcgggcuc

SEQ ID NO: 375393 - RNA, 21 nt, Human
cugacccuggcugcuugcagg

SEQ ID NO: 375394 - RNA, 23 nt, Human
cuggccacuguggacugcauucc

SEQ ID NO: 375395 - RNA, 19 nt, Human
cuggccugggccugcuggg

SEQ ID NO: 375396 - RNA, 24 nt, Human
cugggaccagcccccuccucccca

SEQ ID NO: 375397 - RNA, 25 nt, Human
cugggccugcugggaguacugucug

SEQ ID NO: 375398 - RNA, 19 nt, Human
cuguaauuuccacacucag

SEQ ID NO: 375399 - RNA, 24 nt, Human
cugugaaaagaagaggaagaagag

SEQ ID NO: 375400 - RNA, 19 nt, Human
cuuccacaccuucucaacu

SEQ ID NO: 375401 - RNA, 21 nt, Human
cuuccugcagccucuggcucc

SEQ ID NO: 375402 - RNA, 21 nt, Human
gaccagcccccuccuccccag

SEQ ID NO: 375403 - RNA, 21 nt, Human
gaccugggugacaggaagggc

SEQ ID NO: 375404 - RNA, 20 nt, Human
gacucugggaccguuuguuc

SEQ ID NO: 375405 - RNA, 20 nt, Human
gagcacagacaugcagaacc

SEQ ID NO: 375406 - RNA, 20 nt, Human
gagggcaagggggguguggg

SEQ ID NO: 375407 - RNA, 26 nt, Human
gaggggguggggaaggugcagcaggg

SEQ ID NO: 375408 - RNA, 26 nt, Human
gaucaaaggauuucccaggaucgcuc

SEQ ID NO: 375409 - RNA, 25 nt, Human
gcaccugugaaaagaagaggaagaa

SEQ ID NO: 375410 - RNA, 18 nt, Human
gcagagaccugcagagac

SEQ ID NO: 375411 - RNA, 21 nt, Human
gcagagaccugcagagacccu

SEQ ID NO: 375412 - RNA, 18 nt, Human
gccaagucgauggucucu

SEQ ID NO: 375413 - RNA, 20 nt, Human
gccccagcggaggggcgggc

SEQ ID NO: 375414 - RNA, 25 nt, Human
gcccuggcuggccugggccugcugg

SEQ ID NO: 375415 - RNA, 20 nt, Human
gccgcuagacgccgccgggg

SEQ ID NO: 375416 - RNA, 23 nt, Human
gccuccggcaaguugcguccugg

SEQ ID NO: 375417 - RNA, 29 nt, Human
gcgccccuccccccagggaagggaggggc

SEQ ID NO: 375418 - RNA, 20 nt, Human
gcgggcucuuccugcagccu

SEQ ID NO: 375419 - RNA, 23 nt, Human
gcugggaguacugucugucagug

SEQ ID NO: 375420 - RNA, 23 nt, Human
gcugucccuaucuuccacaccuu

SEQ ID NO: 375421 - RNA, 21 nt, Human
ggacacaacuuccuccuaaca

SEQ ID NO: 375422 - RNA, 22 nt, Human
ggagauggggugccagccucgg

SEQ ID NO: 375423 - RNA, 18 nt, Human
ggagcaccaagcuuaaag

SEQ ID NO: 375424 - RNA, 19 nt, Human
ggaggaggcagcggcgacg

SEQ ID NO: 375425 - RNA, 22 nt, Human
ggagggggcaggcugcgcggga

SEQ ID NO: 375426 - RNA, 18 nt, Human
ggagggggcuggcugcug

SEQ ID NO: 375427 - RNA, 19 nt, Human
ggaguaacacgaugggcac

SEQ ID NO: 375428 - RNA, 21 nt, Human
ggaucugacagaugagaauua

SEQ ID NO: 375429 - RNA, 20 nt, Human
ggccugggccugcugggagu

SEQ ID NO: 375430 - RNA, 22 nt, Human
ggcggggcagagagauggcggc

SEQ ID NO: 375431 - RNA, 18 nt, Human
ggcggggggagaagguca

SEQ ID NO: 375432 - RNA, 21 nt, Human
ggcugccccaggaagggcgug

SEQ ID NO: 375433 - RNA, 21 nt, Human
gggaggccggaggggcggggc

SEQ ID NO: 375434 - RNA, 20 nt, Human
gggaggggcgcaggaggcgc

SEQ ID NO: 375435 - RNA, 22 nt, Human
gggaggggcuugggugucgggg

SEQ ID NO: 375436 - RNA, 19 nt, Human
gggcaggcugcgcgggaga

SEQ ID NO: 375437 - RNA, 19 nt, Human
gggcagggguccggaggac

SEQ ID NO: 375438 - RNA, 19 nt, Human
gggcucccgagggcacccu

SEQ ID NO: 375439 - RNA, 20 nt, Human
ggggcagagaccugcagaga

SEQ ID NO: 375440 - RNA, 23 nt, Human
gggggaggaggcagcggcgacgg

SEQ ID NO: 375441 - RNA, 18 nt, Human
gggguggggaaggugcag

SEQ ID NO: 375442 - RNA, 20 nt, Human
ggggugugucugcgggggag

SEQ ID NO: 375443 - RNA, 25 nt, Human
ggguguggggaggccggaggggcgg

SEQ ID NO: 375444 - RNA, 20 nt, Human
gguguaucggagggggcugg

SEQ ID NO: 375445 - RNA, 21 nt, Human
guaaaacaccagucagaaccu

SEQ ID NO: 375446 - RNA, 19 nt, Human
gugaaaagaagaggaagaa

SEQ ID NO: 375447 - RNA, 21 nt, Human
gugaaaagaagaggaagaaga

SEQ ID NO: 375448 - RNA, 19 nt, Human
gugcgccccuccccccagg

SEQ ID NO: 375449 - RNA, 21 nt, Human
guggcugugcaggagggggcg

SEQ ID NO: 375450 - RNA, 21 nt, Human
guggggcagagaccugcagag

SEQ ID NO: 375451 - RNA, 18 nt, Human
guggucucaggugaagug

SEQ ID NO: 375452 - RNA, 20 nt, Human
gugugcaaaaggggggaggg

SEQ ID NO: 375453 - RNA, 27 nt, Human
guuuuucuuaaaaaaaaaaaaaaaaaa

SEQ ID NO: 375454 - RNA, 24 nt, Human
uaaaggcacagaaaggcauggcca

SEQ ID NO: 375455 - RNA, 24 nt, Human
uaaaggcacagaaaggcuggagac

SEQ ID NO: 375456 - RNA, 21 nt, Human
uacacuggaucugacagauga

SEQ ID NO: 375457 - RNA, 22 nt, Human
uacagggaugaguuugcuauuc

SEQ ID NO: 375458 - RNA, 19 nt, Human
uacagguagugagggcaag

SEQ ID NO: 375459 - RNA, 18 nt, Human
uagaggcagccacgcgac

SEQ ID NO: 375460 - RNA, 22 nt, Human
uauuauccccacguuauacaua

SEQ ID NO: 375461 - RNA, 20 nt, Human
ucaauucccaguugggggga

SEQ ID NO: 375462 - RNA, 23 nt, Human
ucacaacacacauuguuuugcgg

SEQ ID NO: 375463 - RNA, 21 nt, Human
ucacguggaaaaaccgaggug

SEQ ID NO: 375464 - RNA, 18 nt, Human
ucagaaacauccauccag

SEQ ID NO: 375465 - RNA, 20 nt, Human
uccacaccuucucaacucua

SEQ ID NO: 375466 - RNA, 22 nt, Human
uccacaccuucucaacucuacc

SEQ ID NO: 375467 - RNA, 21 nt, Human
uccuccgcggcuggggguggg

SEQ ID NO: 375468 - RNA, 21 nt, Human
ucggagggggcuggcugcugg

SEQ ID NO: 375469 - RNA, 21 nt, Human
ucggcgcgcccccgccgccuc

SEQ ID NO: 375470 - RNA, 23 nt, Human
ucucaggugaaguggcucucugc

SEQ ID NO: 375471 - RNA, 22 nt, Human
ucugacaauggaguaacacgau

SEQ ID NO: 375472 - RNA, 21 nt, Human
ucugcgggggaggggcauguc

SEQ ID NO: 375473 - RNA, 19 nt, Human
ucuggaucugaggggggau

SEQ ID NO: 375474 - RNA, 22 nt, Human
ugaaaagaagaggaagaagagg

SEQ ID NO: 375475 - RNA, 18 nt, Human
ugacaggaagggccggug

SEQ ID NO: 375476 - RNA, 21 nt, Human
ugacucagaaacauccaucca

SEQ ID NO: 375477 - RNA, 22 nt, Human
ugacucagaaacauccauccag

SEQ ID NO: 375478 - RNA, 23 nt, Human
ugacucagaaacauccauccagc

SEQ ID NO: 375479 - RNA, 19 nt, Human
ugagaagaagcagucacug

SEQ ID NO: 375480 - RNA, 24 nt, Human
ugagaagaagcagucacuguaauu

SEQ ID NO: 375481 - RNA, 19 nt, Human
ugagggcaaggggggugug

SEQ ID NO: 375482 - RNA, 21 nt, Human
ugagggcaagggggguguggg

SEQ ID NO: 375483 - RNA, 18 nt, Human
ugaguccagacagugugg

SEQ ID NO: 375484 - RNA, 21 nt, Human
ugaguccagacaguguggccc

SEQ ID NO: 375485 - RNA, 18 nt, Human
ugcccugggacacccagc

SEQ ID NO: 375486 - RNA, 22 nt, Human
ugcccugggacacccagcucgg

SEQ ID NO: 375487 - RNA, 24 nt, Human
ugccugaccccguuuccuccucug

SEQ ID NO: 375488 - RNA, 21 nt, Human
ugccuugguuuuuaguuuucu

SEQ ID NO: 375489 - RNA, 18 nt, Human
ugcgccccuccccccagg

SEQ ID NO: 375490 - RNA, 21 nt, Human
ugcguccuggcucacaacaca

SEQ ID NO: 375491 - RNA, 19 nt, Human
ugcucagugguggagcugg

SEQ ID NO: 375492 - RNA, 24 nt, Human
ugcugcaggccugacgaagcccug

SEQ ID NO: 375493 - RNA, 18 nt, Human
ugcuugcaggcccuccuu

SEQ ID NO: 375494 - RNA, 20 nt, Human
uggagaggaaaccuagggcu

SEQ ID NO: 375495 - RNA, 22 nt, Human
uggcaggagguaggccccuuga

SEQ ID NO: 375496 - RNA, 23 nt, Human
uggcaggagguaggccccuugaa

SEQ ID NO: 375497 - RNA, 18 nt, Human
uggccaagccagcccccu

SEQ ID NO: 375498 - RNA, 19 nt, Human
uggccaagccagcccccuc

SEQ ID NO: 375499 - RNA, 27 nt, Human
ugggaccaaucccaccacuccaggccc

SEQ ID NO: 375500 - RNA, 19 nt, Human
ugggaccagcccccuccuc

SEQ ID NO: 375501 - RNA, 22 nt, Human
ugggcagggguccggaggacuc

SEQ ID NO: 375502 - RNA, 18 nt, Human
ugggccugcugggaguac

SEQ ID NO: 375503 - RNA, 26 nt, Human
ugggcugccuuggggugugucugcgg

SEQ ID NO: 375504 - RNA, 18 nt, Human
uggggagcgaggagcugg

SEQ ID NO: 375505 - RNA, 19 nt, Human
uggggagcgaggagcuggg

SEQ ID NO: 375506 - RNA, 21 nt, Human
uggggaggccggaggggcggg

SEQ ID NO: 375507 - RNA, 22 nt, Human
ugggggugggggaggaggcagc

SEQ ID NO: 375508 - RNA, 22 nt, Human
uggggguugggcugccuugggg

SEQ ID NO: 375509 - RNA, 19 nt, Human
ugugcaaaaggggggaggg

SEQ ID NO: 375510 - RNA, 19 nt, Human
ugugcaaaaggggggaggg

SEQ ID NO: 375511 - RNA, 22 nt, Human
ugugcaggagggggcgacgugg

SEQ ID NO: 375512 - RNA, 19 nt, Human
ugugggugccagugcccca

SEQ ID NO: 375513 - RNA, 20 nt, Human
uuaaaaaaaaaaaaaaaaaa

SEQ ID NO: 375514 - RNA, 18 nt, Human
uuccugccaucacaucug

SEQ ID NO: 375515 - RNA, 23 nt, Human
uugcgggggccgaggaaucgcac

SEQ ID NO: 375516 - RNA, 25 nt, Human
uuugugugugugaaugagagugugu

SEQ ID NO: 375517 - RNA, 22 nt, Human
uuuuuaguuuucuugggugguc

SEQ ID NO: 375518 - RNA, 24 nt, Human
aaaaaagaaacagccuggagagaa

SEQ ID NO: 375519 - RNA, 23 nt, Human
aaaaagaaacagccuggagagaa

SEQ ID NO: 375520 - RNA, 23 nt, Human
aaacaaaaaaaucccccgagugu

SEQ ID NO: 375521 - RNA, 18 nt, Human
aaacagccuggagagaag

SEQ ID NO: 375522 - RNA, 21 nt, Human
aaacagccuggagagaagugg

SEQ ID NO: 375523 - RNA, 26 nt, Human
aaagaaacagccuggagagaaguggg

SEQ ID NO: 375524 - RNA, 22 nt, Human
aaagagaagcacagaaagaggc

SEQ ID NO: 375525 - RNA, 19 nt, Human
aacaaguccaaguaccaac

SEQ ID NO: 375526 - RNA, 30 nt, Human
aacagaugaaacacacacacgugcacgcgg

SEQ ID NO: 375527 - RNA, 19 nt, Human
aaccugagacacccagacu

SEQ ID NO: 375528 - RNA, 22 nt, Human
aagcacagaaagaggcccccag

SEQ ID NO: 375529 - RNA, 22 nt, Human
aagcccuaaaggcugaggugcu

SEQ ID NO: 375530 - RNA, 25 nt, Human
acaaacuuugugaaacugaucagag

SEQ ID NO: 375531 - RNA, 24 nt, Human
acaaagagaagcacagaaagaggc

SEQ ID NO: 375532 - RNA, 18 nt, Human
acaaaguacaaagcgauc

SEQ ID NO: 375533 - RNA, 26 nt, Human
acaagaauggaaacaaagcaugugac

SEQ ID NO: 375534 - RNA, 24 nt, Human
acaaggucuuccccagaggagaag

SEQ ID NO: 375535 - RNA, 20 nt, Human
acacaaggacacacagaacc

SEQ ID NO: 375536 - RNA, 20 nt, Human
acacacacacgugcacgcgc

SEQ ID NO: 375537 - RNA, 19 nt, Human
acacagaaccugagacacc

SEQ ID NO: 375538 - RNA, 22 nt, Human
acacagaaccugagacacccag

SEQ ID NO: 375539 - RNA, 21 nt, Human
acacccacaggaacucagcaa

SEQ ID NO: 375540 - RNA, 21 nt, Human
acacgugcacgcgcacacaua

SEQ ID NO: 375541 - RNA, 19 nt, Human
acagaaagaggcccccaga

SEQ ID NO: 375542 - RNA, 21 nt, Human
acagaaaugcacacaaggaca

SEQ ID NO: 375543 - RNA, 21 nt, Human
acagaaccugagacacccaga

SEQ ID NO: 375544 - RNA, 21 nt, Human
acauacagcagccagaggcac

SEQ ID NO: 375545 - RNA, 20 nt, Human
acauagacccagagaaucca

SEQ ID NO: 375546 - RNA, 20 nt, Human
acccacaggaacucagcaac

SEQ ID NO: 375547 - RNA, 20 nt, Human
agaaaacaaaaaaauccccc

SEQ ID NO: 375548 - RNA, 22 nt, Human
agaaagagagaaauagagggcc

SEQ ID NO: 375549 - RNA, 20 nt, Human
agaaagaggcccccagagaa

SEQ ID NO: 375550 - RNA, 21 nt, Human
agacacacccacaggaacuca

SEQ ID NO: 375551 - RNA, 21 nt, Human
agagaagcaggaguggcaucg

SEQ ID NO: 375552 - RNA, 18 nt, Human
agagacacacccacagga

SEQ ID NO: 375553 - RNA, 25 nt, Human
agagggcacagggggcaaaggacag

SEQ ID NO: 375554 - RNA, 23 nt, Human
agagugggggaggggagggcagg

SEQ ID NO: 375555 - RNA, 20 nt, Human
agaugccauaccccaggugg

SEQ ID NO: 375556 - RNA, 23 nt, Human
agcacagaaagaggcccccagag

SEQ ID NO: 375557 - RNA, 23 nt, Human
agccaggacaagaauggaaacaa

SEQ ID NO: 375558 - RNA, 23 nt, Human
aggaaggcugaugagcccagggc

SEQ ID NO: 375559 - RNA, 20 nt, Human
aggcaggugaggggcagggc

SEQ ID NO: 375560 - RNA, 21 nt, Human
aggcaggugaggggcagggcu

SEQ ID NO: 375561 - RNA, 23 nt, Human
aggcaggugaggggcagggcugg

SEQ ID NO: 375562 - RNA, 18 nt, Human
agguggauagacaccugc

SEQ ID NO: 375563 - RNA, 23 nt, Human
auaagcccuaaaggcugaggugc

SEQ ID NO: 375564 - RNA, 19 nt, Human
aucagaaaacaaaaaaauc

SEQ ID NO: 375565 - RNA, 19 nt, Human
aucgagagacacacccaca

SEQ ID NO: 375566 - RNA, 21 nt, Human
caacagcuccucaggaaggga

SEQ ID NO: 375567 - RNA, 21 nt, Human
caagaauggggacccccccga

SEQ ID NO: 375568 - RNA, 19 nt, Human
cacacaaggacacacagaa

SEQ ID NO: 375569 - RNA, 22 nt, Human
cacagaaccugagacacccaga

SEQ ID NO: 375570 - RNA, 19 nt, Human
cacagcuuugcccaucucu

SEQ ID NO: 375571 - RNA, 22 nt, Human
cacaucuggcccugugggauuu

SEQ ID NO: 375572 - RNA, 19 nt, Human
caccaagaaagagagaaau

SEQ ID NO: 375573 - RNA, 20 nt, Human
caccaagaaagagagaaaua

SEQ ID NO: 375574 - RNA, 18 nt, Human
caccaggacaaagccccu

SEQ ID NO: 375575 - RNA, 18 nt, Human
cacccacaggaacucagc

SEQ ID NO: 375576 - RNA, 22 nt, Human
cacgcgcacacauacagcagcc

SEQ ID NO: 375577 - RNA, 20 nt, Human
cagaaaugcacacaaggaca

SEQ ID NO: 375578 - RNA, 23 nt, Human
cagaggcacaauaggcuuggcag

SEQ ID NO: 375579 - RNA, 19 nt, Human
cagcuccucaggaagggag

SEQ ID NO: 375580 - RNA, 25 nt, Human
caggacaaagccccuuggaggccga

SEQ ID NO: 375581 - RNA, 18 nt, Human
caggcaggugaggggcag

SEQ ID NO: 375582 - RNA, 18 nt, Human
caggggcgggggcaccag

SEQ ID NO: 375583 - RNA, 20 nt, Human
caucagaaaacaaaaaaauc

SEQ ID NO: 375584 - RNA, 22 nt, Human
caucagaaaacaaaaaaauccc

SEQ ID NO: 375585 - RNA, 18 nt, Human
ccaagaaagagagaaaua

SEQ ID NO: 375586 - RNA, 19 nt, Human
ccacaggaacucagcaaca

SEQ ID NO: 375587 - RNA, 25 nt, Human
ccaggacaagaauggaaacaaagca

SEQ ID NO: 375588 - RNA, 24 nt, Human
ccaggagucuucucaaccucuucc

SEQ ID NO: 375589 - RNA, 18 nt, Human
ccaggcccacccagccgg

SEQ ID NO: 375590 - RNA, 21 nt, Human
cccacaggaacucagcaacag

SEQ ID NO: 375591 - RNA, 19 nt, Human
cccagagaauccagagggc

SEQ ID NO: 375592 - RNA, 26 nt, Human
cccauggccauacugcaguuccugcc

SEQ ID NO: 375593 - RNA, 21 nt, Human
ccccgaguguaaacaggagaa

SEQ ID NO: 375594 - RNA, 23 nt, Human
cccuggccauaagcccuaaaggc

SEQ ID NO: 375595 - RNA, 18 nt, Human
cccugugggauuuggggu

SEQ ID NO: 375596 - RNA, 19 nt, Human
ccgacuggcagagccaggg

SEQ ID NO: 375597 - RNA, 22 nt, Human
ccgaggcacauucccaugcuga

SEQ ID NO: 375598 - RNA, 25 nt, Human
ccucaggaagggagggcgccucucc

SEQ ID NO: 375599 - RNA, 20 nt, Human
ccuccugucccaacucccuc

SEQ ID NO: 375600 - RNA, 23 nt, Human
ccugagacacccagacugacaaa

SEQ ID NO: 375601 - RNA, 21 nt, Human
cgcgcacacauacagcagcca

SEQ ID NO: 375602 - RNA, 18 nt, Human
cgguagaugccauacccc

SEQ ID NO: 375603 - RNA, 24 nt, Human
cucaaccucuuccaagaaugggga

SEQ ID NO: 375604 - RNA, 19 nt, Human
cuggagagaagugggggcu

SEQ ID NO: 375605 - RNA, 20 nt, Human
cuuggcagagaugaaaacag

SEQ ID NO: 375606 - RNA, 27 nt, Human
gaaaacagcaagggacagccgguaccc

SEQ ID NO: 375607 - RNA, 19 nt, Human
gaaccgacuggcagagcca

SEQ ID NO: 375608 - RNA, 25 nt, Human
gaaccugagacacccagacugacag

SEQ ID NO: 375609 - RNA, 24 nt, Human
gaacucagcaacagugccuggcag

SEQ ID NO: 375610 - RNA, 24 nt, Human
gaagggagggcgccucuccccuca

SEQ ID NO: 375611 - RNA, 22 nt, Human
gacaaagagaagcacagaaaga

SEQ ID NO: 375612 - RNA, 23 nt, Human
gacaagaauggaaacaaagcaug

SEQ ID NO: 375613 - RNA, 21 nt, Human
gacuccacaucuggcccugug

SEQ ID NO: 375614 - RNA, 22 nt, Human
gagaagcaggaguggcaucgag

SEQ ID NO: 375615 - RNA, 21 nt, Human
gagcagucugggggagugugg

SEQ ID NO: 375616 - RNA, 18 nt, Human
gagcccagggcagaccag

SEQ ID NO: 375617 - RNA, 20 nt, Human
gagggguguuggucccacag

SEQ ID NO: 375618 - RNA, 19 nt, Human
gagugggggaggggagggc

SEQ ID NO: 375619 - RNA, 22 nt, Human
gcacaaaguacaaagcgauccu

SEQ ID NO: 375620 - RNA, 18 nt, Human
gcagaccaggggccuaca

SEQ ID NO: 375621 - RNA, 26 nt, Human
gcagaccaggggccuacauagaccca

SEQ ID NO: 375622 - RNA, 20 nt, Human
gcccccagagaagcaggagu

SEQ ID NO: 375623 - RNA, 24 nt, Human
ggagagaagugggggcuuugagga

SEQ ID NO: 375624 - RNA, 25 nt, Human
ggcaaaggacagacaccaagaaaga

SEQ ID NO: 375625 - RNA, 20 nt, Human
ggcccugugggauuuggggu

SEQ ID NO: 375626 - RNA, 19 nt, Human
gggagaggcugaagcccag

SEQ ID NO: 375627 - RNA, 19 nt, Human
gggagaggcugaagcccag

SEQ ID NO: 375628 - RNA, 26 nt, Human
gggagggcaggcaggugaggggcagg

SEQ ID NO: 375629 - RNA, 18 nt, Human
gggcacagggggcaaagg

SEQ ID NO: 375630 - RNA, 25 nt, Human
gggcaccaggacaaagccccuugga

SEQ ID NO: 375631 - RNA, 19 nt, Human
gggcagaccaggggccuac

SEQ ID NO: 375632 - RNA, 24 nt, Human
gggcagggcugggugggagaggcu

SEQ ID NO: 375633 - RNA, 20 nt, Human
ggggaggggagggcaggcag

SEQ ID NO: 375634 - RNA, 20 nt, Human
ggggcacgaacaaguccaag

SEQ ID NO: 375635 - RNA, 24 nt, Human
gggguucccauacugauccaaggg

SEQ ID NO: 375636 - RNA, 19 nt, Human
gggugggagaggcugaagc

SEQ ID NO: 375637 - RNA, 19 nt, Human
ggugaggggcagggcuggg

SEQ ID NO: 375638 - RNA, 18 nt, Human
gucugggggaguguggga

SEQ ID NO: 375639 - RNA, 24 nt, Human
gugcucagccugcucagcccaugg

SEQ ID NO: 375640 - RNA, 23 nt, Human
uagagugggggaggggagggcag

SEQ ID NO: 375641 - RNA, 19 nt, Human
ucagccugcucagcccaug

SEQ ID NO: 375642 - RNA, 18 nt, Human
uccacaucuggcccugug

SEQ ID NO: 375643 - RNA, 19 nt, Human
uccacaucuggcccugugg

SEQ ID NO: 375644 - RNA, 18 nt, Human
uccccuggccauaagccc

SEQ ID NO: 375645 - RNA, 21 nt, Human
uccccuggccauaagcccuaa

SEQ ID NO: 375646 - RNA, 23 nt, Human
uccucaggaagggagggcgccuc

SEQ ID NO: 375647 - RNA, 22 nt, Human
uccugcccacccaggccaacag

SEQ ID NO: 375648 - RNA, 19 nt, Human
ucgguagaugccauacccc

SEQ ID NO: 375649 - RNA, 23 nt, Human
ugaaaacagcaagggacagcccu

SEQ ID NO: 375650 - RNA, 20 nt, Human
ugaaacacacacacgugcac

SEQ ID NO: 375651 - RNA, 19 nt, Human
ugaaacugaucagaggcug

SEQ ID NO: 375652 - RNA, 32 nt, Human
ugaacagaugaaacacacacacgugcacggug

SEQ ID NO: 375653 - RNA, 22 nt, Human
ugacaaagagguagcaauuugg

SEQ ID NO: 375654 - RNA, 19 nt, Human
ugaccccagggagacaggu

SEQ ID NO: 375655 - RNA, 20 nt, Human
ugagacacccagacugacaa

SEQ ID NO: 375656 - RNA, 18 nt, Human
ugagcccagggcagacca

SEQ ID NO: 375657 - RNA, 21 nt, Human
ugcacaaaguacaaagcgauc

SEQ ID NO: 375658 - RNA, 23 nt, Human
ugccauaccccagguggauagac

SEQ ID NO: 375659 - RNA, 18 nt, Human
ugccauggacagccccuc

SEQ ID NO: 375660 - RNA, 23 nt, Human
uggaaacaaagcaugugacccca

SEQ ID NO: 375661 - RNA, 18 nt, Human
uggagagaagugggggcu

SEQ ID NO: 375662 - RNA, 24 nt, Human
uggcaggaaggggagcaccaucaa

SEQ ID NO: 375663 - RNA, 19 nt, Human
uggcuggcugugcccaucg

SEQ ID NO: 375664 - RNA, 24 nt, Human
ugggacaaggucuuccccagagga

SEQ ID NO: 375665 - RNA, 19 nt, Human
ugggagaggcugaagccca

SEQ ID NO: 375666 - RNA, 20 nt, Human
uggggacaaagagaagcaca

SEQ ID NO: 375667 - RNA, 24 nt, Human
ugggggagugugggagggguguug

SEQ ID NO: 375668 - RNA, 24 nt, Human
ugucaucagaaaacaaaaaaaucc

SEQ ID NO: 375669 - RNA, 27 nt, Human
ugucaucagaaaacaaaaaaauccccc

SEQ ID NO: 375670 - RNA, 21 nt, Human
uuccuuagggaacaaacuuug

SEQ ID NO: 375671 - RNA, 23 nt, Human
uuugcacaaaguacaaagcgauc

SEQ ID NO: 375672 - RNA, 22 nt, Human
uuugggguucccauacugaucc

SEQ ID NO: 375673 - RNA, 18 nt, Human
uuuuuuuuuuuuuuucug

SEQ ID NO: 375674 - RNA, 19 nt, Human
aaagacugacuccgccccu

SEQ ID NO: 375675 - RNA, 21 nt, Human
acugacuccgccccugucccu

SEQ ID NO: 375676 - RNA, 22 nt, Human
acuuuggggagagucgaaugca

SEQ ID NO: 375677 - RNA, 22 nt, Human
agcccagagcuuaaaccggagc

SEQ ID NO: 375678 - RNA, 18 nt, Human
agccugggguaggggaug

SEQ ID NO: 375679 - RNA, 19 nt, Human
aggcccgucccgugagguc

SEQ ID NO: 375680 - RNA, 20 nt, Human
aggcgcggauaggccagacc

SEQ ID NO: 375681 - RNA, 20 nt, Human
aucaugggaggacugcaggc

SEQ ID NO: 375682 - RNA, 20 nt, Human
cagcugccaggcgcggauag

SEQ ID NO: 375683 - RNA, 20 nt, Human
ccaccugggcucagcguuug

SEQ ID NO: 375684 - RNA, 22 nt, Human
cguugccgaggaacuugggucc

SEQ ID NO: 375685 - RNA, 21 nt, Human
cucccuggcuaucaugggagg

SEQ ID NO: 375686 - RNA, 20 nt, Human
gccccugucccucccauaag

SEQ ID NO: 375687 - RNA, 19 nt, Human
ggggaugcugcuggauuaa

SEQ ID NO: 375688 - RNA, 18 nt, Human
ggucuccggaguuccgac

SEQ ID NO: 375689 - RNA, 24 nt, Human
gugcggcucucccuggcuaucaug

SEQ ID NO: 375690 - RNA, 21 nt, Human
guggcaggcgggccagaccug

SEQ ID NO: 375691 - RNA, 23 nt, Human
uaaaccccuuuguggucuccgga

SEQ ID NO: 375692 - RNA, 23 nt, Human
uacaaaacuguuuaauacuacca

SEQ ID NO: 375693 - RNA, 23 nt, Human
uauguugugcggcucucccuggc

SEQ ID NO: 375694 - RNA, 22 nt, Human
ucccauaagacugcaccuccuu

SEQ ID NO: 375695 - RNA, 23 nt, Human
uccccaagcccagagcuuaaacc

SEQ ID NO: 375696 - RNA, 19 nt, Human
ucccgugaggucugcgucc

SEQ ID NO: 375697 - RNA, 26 nt, Human
ucccucccauaagacugcaccuccuu

SEQ ID NO: 375698 - RNA, 25 nt, Human
ucccuggcuaucaugggaggacugc

SEQ ID NO: 375699 - RNA, 23 nt, Human
ugaaaauggaaaggucuucccag

SEQ ID NO: 375700 - RNA, 19 nt, Human
ugaagcgucgauccugaaa

SEQ ID NO: 375701 - RNA, 19 nt, Human
ugaaugcccuccccucaac

SEQ ID NO: 375702 - RNA, 20 nt, Human
ugacuccgccccugucccuc

SEQ ID NO: 375703 - RNA, 23 nt, Human
ugacuccgccccugucccuccca

SEQ ID NO: 375704 - RNA, 21 nt, Human
ugcugcuggauuaaaaaagga

SEQ ID NO: 375705 - RNA, 24 nt, Human
ugggaacagcuuuuaaagacugac

SEQ ID NO: 375706 - RNA, 22 nt, Human
ugggcucagcguuuguggcagg

SEQ ID NO: 375707 - RNA, 19 nt, Human
uguuuaauacuaccaaaaa

SEQ ID NO: 375708 - RNA, 22 nt, Human
uuggguccuuaaaaaguguauu

SEQ ID NO: 375709 - RNA, 23 nt, Human
uuguauguugugcggcucucccu

SEQ ID NO: 375710 - RNA, 21 nt, Human
uuuguggcaggcgggccagac

SEQ ID NO: 375711 - RNA, 22 nt, Human
aagggcaggccaggccgggagg

SEQ ID NO: 375712 - RNA, 19 nt, Human
auggcgguggggacggcgg

SEQ ID NO: 375713 - RNA, 23 nt, Human
auggcgguggggacggcgguggu

SEQ ID NO: 375714 - RNA, 20 nt, Human
cuggggagccgggcgcaagg

SEQ ID NO: 375715 - RNA, 18 nt, Human
gagcgcggcgggcgggcg

SEQ ID NO: 375716 - RNA, 21 nt, Human
gccgggcgcaagggcaggcca

SEQ ID NO: 375717 - RNA, 22 nt, Human
gcgcggccugggcggaacggag

SEQ ID NO: 375718 - RNA, 22 nt, Human
gcggcgggcgggcggcgggcac

SEQ ID NO: 375719 - RNA, 22 nt, Human
gcgggcgggcggcgggcacugg

SEQ ID NO: 375720 - RNA, 19 nt, Human
gcugcagggacccgggcgg

SEQ ID NO: 375721 - RNA, 20 nt, Human
ggacccgggcggcgccggcg

SEQ ID NO: 375722 - RNA, 21 nt, Human
ggacccgggcggcgccggcgg

SEQ ID NO: 375723 - RNA, 21 nt, Human
ggagcgcggcgggcgggcggc

SEQ ID NO: 375724 - RNA, 18 nt, Human
ggcggauggcggugggga

SEQ ID NO: 375725 - RNA, 20 nt, Human
gggagggcggauggcggugg

SEQ ID NO: 375726 - RNA, 18 nt, Human
gggcaggccaggccggga

SEQ ID NO: 375727 - RNA, 24 nt, Human
uccagcugggcgcggccugggcgg

SEQ ID NO: 375728 - RNA, 19 nt, Human
caccccucccauuucccuc

SEQ ID NO: 375729 - RNA, 23 nt, Human
caugcuguuucuuacucuccucu

SEQ ID NO: 375730 - RNA, 23 nt, Human
cuccaugcuguuucuuacucucc

SEQ ID NO: 375731 - RNA, 19 nt, Human
cuguuucuuacucuccucu

SEQ ID NO: 375732 - RNA, 24 nt, Human
cuuugaaaauuucuccccccucca

SEQ ID NO: 375733 - RNA, 20 nt, Human
ggccgggacuuuggggggcc

SEQ ID NO: 375734 - RNA, 21 nt, Human
ggcgcugugcgcgggcccggc

SEQ ID NO: 375735 - RNA, 24 nt, Human
uaccggguuuucuccaugcuguuu

SEQ ID NO: 375736 - RNA, 21 nt, Human
uacucuccucuuuugcacccc

SEQ ID NO: 375737 - RNA, 19 nt, Human
ugaaaauuucuccccccuc

SEQ ID NO: 375738 - RNA, 27 nt, Human
uuugaaaauuucuccccccuccaguuc

SEQ ID NO: 375739 - RNA, 19 nt, Human
aaaaaaagggggggagggg

SEQ ID NO: 375740 - RNA, 22 nt, Human
aaaauaaaacaaaaccaaggug

SEQ ID NO: 375741 - RNA, 21 nt, Human
aacaacaaucacaggucgccc

SEQ ID NO: 375742 - RNA, 21 nt, Human
aacaacaucaauaacaacaau

SEQ ID NO: 375743 - RNA, 23 nt, Human
aagcaaaauaaaacaaaaccaag

SEQ ID NO: 375744 - RNA, 26 nt, Human
aagggggggaggggugcgcuggguuc

SEQ ID NO: 375745 - RNA, 24 nt, Human
aaguccccaaaagauuuggggaag

SEQ ID NO: 375746 - RNA, 25 nt, Human
accccccccggcccuucucccugcc

SEQ ID NO: 375747 - RNA, 24 nt, Human
acccucuuccuccuccgcgucccu

SEQ ID NO: 375748 - RNA, 19 nt, Human
acgccuccggggucuggga

SEQ ID NO: 375749 - RNA, 20 nt, Human
acgggaagacgcgcgcggcg

SEQ ID NO: 375750 - RNA, 19 nt, Human
agagagaaaaguccccaaa

SEQ ID NO: 375751 - RNA, 20 nt, Human
agcaaaauaaaacaaaacca

SEQ ID NO: 375752 - RNA, 19 nt, Human
aggaaaaaaaggccccaaa

SEQ ID NO: 375753 - RNA, 21 nt, Human
agggggggaggggugcgcugg

SEQ ID NO: 375754 - RNA, 23 nt, Human
agggggggaggggugcgcugggu

SEQ ID NO: 375755 - RNA, 25 nt, Human
agggggggaggggugcgcuggguuc

SEQ ID NO: 375756 - RNA, 22 nt, Human
agucuccucuccuccacgccuc

SEQ ID NO: 375757 - RNA, 22 nt, Human
aguggguccccggcccgggaag

SEQ ID NO: 375758 - RNA, 25 nt, Human
aucacgcguuuaaaaaaaggggggg

SEQ ID NO: 375759 - RNA, 21 nt, Human
caaaacgccgccgcgcuccuu

SEQ ID NO: 375760 - RNA, 20 nt, Human
caagaagcaaaauaaaacaa

SEQ ID NO: 375761 - RNA, 25 nt, Human
caauaacaacaaucacaggucgccc

SEQ ID NO: 375762 - RNA, 25 nt, Human
cagucuccucuccuccacgccuccu

SEQ ID NO: 375763 - RNA, 20 nt, Human
caucuccuccuccggcugca

SEQ ID NO: 375764 - RNA, 22 nt, Human
ccaaaacaucugccaucggcca

SEQ ID NO: 375765 - RNA, 23 nt, Human
ccaaaacaucugccaucggccaa

SEQ ID NO: 375766 - RNA, 19 nt, Human
ccacaucaaacagucuccu

SEQ ID NO: 375767 - RNA, 25 nt, Human
cccaaaacaucugccaucggccaaa

SEQ ID NO: 375768 - RNA, 19 nt, Human
cccacgcgcgcucacaccc

SEQ ID NO: 375769 - RNA, 21 nt, Human
cccacgcgcgcucacacccuc

SEQ ID NO: 375770 - RNA, 22 nt, Human
cccacgcgcgcucacacccucg

SEQ ID NO: 375771 - RNA, 22 nt, Human
ccccaaaagauuuggggaagga

SEQ ID NO: 375772 - RNA, 19 nt, Human
cccccaaaacaucugccau

SEQ ID NO: 375773 - RNA, 18 nt, Human
cccccgccccuagcuccc

SEQ ID NO: 375774 - RNA, 20 nt, Human
cccccgccccuagcucccgc

SEQ ID NO: 375775 - RNA, 20 nt, Human
cccccggcccuucucccugc

SEQ ID NO: 375776 - RNA, 20 nt, Human
ccccuccuuucuugaccaag

SEQ ID NO: 375777 - RNA, 18 nt, Human
cccggcccuucucccugc

SEQ ID NO: 375778 - RNA, 19 nt, Human
cccucaacaucuccuccuc

SEQ ID NO: 375779 - RNA, 19 nt, Human
cccucucucucgcucucuc

SEQ ID NO: 375780 - RNA, 22 nt, Human
cccucuuccuccuccgcguccc

SEQ ID NO: 375781 - RNA, 22 nt, Human
ccgaaaccacucgcccuccacu

SEQ ID NO: 375782 - RNA, 18 nt, Human
ccgccgccgccagcuccc

SEQ ID NO: 375783 - RNA, 22 nt, Human
ccgccgccgccagcuccccaac

SEQ ID NO: 375784 - RNA, 22 nt, Human
ccuccgcccccgccccuagcuc

SEQ ID NO: 375785 - RNA, 21 nt, Human
ccucgcaggggcggagguggg

SEQ ID NO: 375786 - RNA, 23 nt, Human
cgaaaccacucgcccuccacuga

SEQ ID NO: 375787 - RNA, 18 nt, Human
cggagccuucugucuuca

SEQ ID NO: 375788 - RNA, 18 nt, Human
cucaacaucuccuccucc

SEQ ID NO: 375789 - RNA, 22 nt, Human
cucaacaucuccuccuccggcu

SEQ ID NO: 375790 - RNA, 23 nt, Human
cucacacccucgcggcggccgcc

SEQ ID NO: 375791 - RNA, 23 nt, Human
cugcgcuuccaacgggguucucg

SEQ ID NO: 375792 - RNA, 22 nt, Human
cugcugcgcuuccaacgggguu

SEQ ID NO: 375793 - RNA, 26 nt, Human
cuggccuccuccccucaacaucuccu

SEQ ID NO: 375794 - RNA, 18 nt, Human
cuggcuggccuccucccc

SEQ ID NO: 375795 - RNA, 22 nt, Human
cuuucuugaccaagaagcaaaa

SEQ ID NO: 375796 - RNA, 19 nt, Human
gaaggaguucuccgccucu

SEQ ID NO: 375797 - RNA, 18 nt, Human
gaagggggagggggucuc

SEQ ID NO: 375798 - RNA, 21 nt, Human
gaccgugaacccccuuccagu

SEQ ID NO: 375799 - RNA, 18 nt, Human
gagaccgugcuaaaguag

SEQ ID NO: 375800 - RNA, 21 nt, Human
gagggggcaaggggaaaagag

SEQ ID NO: 375801 - RNA, 19 nt, Human
gaggggugcgcuggguucu

SEQ ID NO: 375802 - RNA, 22 nt, Human
gcaaaauaaaacaaaaccaagg

SEQ ID NO: 375803 - RNA, 24 nt, Human
gccagcuccccaacgugcaaaucc

SEQ ID NO: 375804 - RNA, 26 nt, Human
gcccgggaaggugggggaugggagcg

SEQ ID NO: 375805 - RNA, 20 nt, Human
gcggagguggguaaagagag

SEQ ID NO: 375806 - RNA, 23 nt, Human
gcucccgcugcugcgcuuccaac

SEQ ID NO: 375807 - RNA, 20 nt, Human
gcugcaguuugcugucucuc

SEQ ID NO: 375808 - RNA, 21 nt, Human
gcugcaguuugcugucucucg

SEQ ID NO: 375809 - RNA, 18 nt, Human
ggcaaggggaaaagaggg

SEQ ID NO: 375810 - RNA, 21 nt, Human
ggcggaggcccagcagccgcc

SEQ ID NO: 375811 - RNA, 21 nt, Human
gggcagaguggguccccggcc

SEQ ID NO: 375812 - RNA, 20 nt, Human
gggggggaggggugcgcugg

SEQ ID NO: 375813 - RNA, 23 nt, Human
guuuaaaaaaagggggggagggg

SEQ ID NO: 375814 - RNA, 21 nt, Human
uaaacucuucgucuguccuuu

SEQ ID NO: 375815 - RNA, 21 nt, Human
uaaaguagagaggaguuucuc

SEQ ID NO: 375816 - RNA, 24 nt, Human
uccccaaaagauuuggggaaggag

SEQ ID NO: 375817 - RNA, 20 nt, Human
uccccaacgugcaaauccau

SEQ ID NO: 375818 - RNA, 21 nt, Human
uccccgggccaagcacacgcc

SEQ ID NO: 375819 - RNA, 19 nt, Human
uccccucaacaucuccucc

SEQ ID NO: 375820 - RNA, 18 nt, Human
ucccuccggcugggcaga

SEQ ID NO: 375821 - RNA, 27 nt, Human
uccggaagcucguuggaagggggaggg

SEQ ID NO: 375822 - RNA, 21 nt, Human
uccuucaagucucuagaaaac

SEQ ID NO: 375823 - RNA, 20 nt, Human
ucucgggucauuuccuagcg

SEQ ID NO: 375824 - RNA, 20 nt, Human
ucucucagucccggcguucc

SEQ ID NO: 375825 - RNA, 20 nt, Human
ucucuucaagcaaaggggag

SEQ ID NO: 375826 - RNA, 18 nt, Human
ucuguccuuuucguuucu

SEQ ID NO: 375827 - RNA, 23 nt, Human
ugaacccccuuccaguucguguc

SEQ ID NO: 375828 - RNA, 20 nt, Human
ugaccaagaagcaaaauaaa

SEQ ID NO: 375829 - RNA, 24 nt, Human
ugaccaagaagcaaaauaaaacaa

SEQ ID NO: 375830 - RNA, 21 nt, Human
ugcagagggggcaaggggaaa

SEQ ID NO: 375831 - RNA, 19 nt, Human
ugcaggaagggggagacuc

SEQ ID NO: 375832 - RNA, 20 nt, Human
ugcaggaagggggagacucc

SEQ ID NO: 375833 - RNA, 26 nt, Human
ugccccuguaccacaucaaacagucu

SEQ ID NO: 375834 - RNA, 21 nt, Human
ugggagcgcggguccaaaacg

SEQ ID NO: 375835 - RNA, 22 nt, Human
uguaccacaucaaacagucucc

SEQ ID NO: 375836 - RNA, 21 nt, Human
uuaaaaaaagggggggagggg

SEQ ID NO: 375837 - RNA, 22 nt, Human
uucaagucucuagaaaacuaac

SEQ ID NO: 375838 - RNA, 21 nt, Human
uugcugggggugcagacaagu

SEQ ID NO: 375839 - RNA, 21 nt, Human
uuuuuucacuuuuuuuuucuc

SEQ ID NO: 375840 - RNA, 24 nt, Human
uuuuuuucuuuuuuuuuuuccggg

SEQ ID NO: 375841 - RNA, 18 nt, Human
acuucagugcuuggaugu

SEQ ID NO: 375842 - RNA, 24 nt, Human
agcagcugaauuacuggcauuauu

SEQ ID NO: 375843 - RNA, 22 nt, Human
aguuuauuuaaaaaaaaaaaaa

SEQ ID NO: 375844 - RNA, 19 nt, Human
augagaaaguuaaugugcu

SEQ ID NO: 375845 - RNA, 19 nt, Human
gcacaauuucccuuuguca

SEQ ID NO: 375846 - RNA, 23 nt, Human
guuuuuucuuuccaagccuuuug

SEQ ID NO: 375847 - RNA, 24 nt, Human
uaaaguaacagucaguguaugaga

SEQ ID NO: 375848 - RNA, 24 nt, Human
uaaguccuaaggucacaacaaucu

SEQ ID NO: 375849 - RNA, 19 nt, Human
uagcagcugaauuacuggc

SEQ ID NO: 375850 - RNA, 20 nt, Human
ucucuuguuguugauauugu

SEQ ID NO: 375851 - RNA, 19 nt, Human
uguuguauuuguuuuuucu

SEQ ID NO: 375852 - RNA, 19 nt, Human
uuaaaguaacagucagugu

SEQ ID NO: 375853 - RNA, 19 nt, Human
uuaaaguaacagucagugu

SEQ ID NO: 375854 - RNA, 20 nt, Human
uuuaaaaaaaaaaaaaaagu

SEQ ID NO: 375855 - RNA, 22 nt, Human
uuuguuuuuucuuuccaagccu

SEQ ID NO: 375856 - RNA, 19 nt, Human
uuuuuuuuuuuuuuuuugu

SEQ ID NO: 375857 - RNA, 27 nt, Human
uuuuuuuuuuuuuuuuuuuuuuugggg

SEQ ID NO: 375858 - RNA, 19 nt, Human
aaaaaaaaaaaaaaaaaga

SEQ ID NO: 375859 - RNA, 21 nt, Human
aaaaaaacaaaaaaacacaaa

SEQ ID NO: 375860 - RNA, 21 nt, Human
aaaaaaacacaaauguccaaa

SEQ ID NO: 375861 - RNA, 20 nt, Human
aaaaaacaaaaaaacacaaa

SEQ ID NO: 375862 - RNA, 31 nt, Human
aaaaacaaaaaaacacaaauguccaaagggg

SEQ ID NO: 375863 - RNA, 22 nt, Human
aaaaauauguauaaauccccuc

SEQ ID NO: 375864 - RNA, 19 nt, Human
aaaacaacaaagaaaaaag

SEQ ID NO: 375865 - RNA, 22 nt, Human
aaaacacgaacacaaaccaaag

SEQ ID NO: 375866 - RNA, 21 nt, Human
aaaauaugauuuaaaugccag

SEQ ID NO: 375867 - RNA, 21 nt, Human
aaacaaaaaaacacaaauguu

SEQ ID NO: 375868 - RNA, 24 nt, Human
aaacaaaacacgaacacaaaccaa

SEQ ID NO: 375869 - RNA, 26 nt, Human
aaacaaaacacgaacacaaaccaaag

SEQ ID NO: 375870 - RNA, 19 nt, Human
aaacaaacaaaacacgaac

SEQ ID NO: 375871 - RNA, 20 nt, Human
aaacaaacaaaacacgaaca

SEQ ID NO: 375872 - RNA, 27 nt, Human
aaacaaacaaaacacgaacacaaacca

SEQ ID NO: 375873 - RNA, 20 nt, Human
aaacaagugaaacaaacaaa

SEQ ID NO: 375874 - RNA, 21 nt, Human
aaaccaaagcuuuuaccuaaa

SEQ ID NO: 375875 - RNA, 19 nt, Human
aaagcaauccucaaacucu

SEQ ID NO: 375876 - RNA, 21 nt, Human
aaagcaauccucaaacucucu

SEQ ID NO: 375877 - RNA, 21 nt, Human
aacaagcaaaggcaggaggaa

SEQ ID NO: 375878 - RNA, 19 nt, Human
aacagaugaccauacccuu

SEQ ID NO: 375879 - RNA, 18 nt, Human
aagaaaaaagggauggac

SEQ ID NO: 375880 - RNA, 19 nt, Human
aagaaaaaagggauggaca

SEQ ID NO: 375881 - RNA, 22 nt, Human
aagaaaaaagggauggacaaaa

SEQ ID NO: 375882 - RNA, 19 nt, Human
aagaagaaaaaacaaaaca

SEQ ID NO: 375883 - RNA, 20 nt, Human
aagaagaagaagaaaaaaca

SEQ ID NO: 375884 - RNA, 23 nt, Human
aagaagaagaagaaaaaacaaaa

SEQ ID NO: 375885 - RNA, 22 nt, Human
aagaagaagaagaagaaaaaac

SEQ ID NO: 375886 - RNA, 24 nt, Human
aagagaaagcaaaucuguacaaaa

SEQ ID NO: 375887 - RNA, 19 nt, Human
aaggaagaagaagaagaag

SEQ ID NO: 375888 - RNA, 23 nt, Human
aauguccaaagggaauucugguu

SEQ ID NO: 375889 - RNA, 26 nt, Human
acaaaacaaaauaaaaaaacaaaaaa

SEQ ID NO: 375890 - RNA, 27 nt, Human
acaaaauaaaaaaacaaaaaaacacaa

SEQ ID NO: 375891 - RNA, 18 nt, Human
acaaacaaaacacgaaca

SEQ ID NO: 375892 - RNA, 27 nt, Human
acaaagaaaaaagggauggacaaaaag

SEQ ID NO: 375893 - RNA, 21 nt, Human
acaacagaugaccauacccuu

SEQ ID NO: 375894 - RNA, 25 nt, Human
acaagcaaaggcaggaggaaaugca

SEQ ID NO: 375895 - RNA, 25 nt, Human
acacacacacacccacacacacaca

SEQ ID NO: 375896 - RNA, 23 nt, Human
acacacacccacacacacacaca

SEQ ID NO: 375897 - RNA, 19 nt, Human
acacacccacacacacaca

SEQ ID NO: 375898 - RNA, 31 nt, Human
acaggauuuuuuuuuucuuuuuguaagagaa

SEQ ID NO: 375899 - RNA, 27 nt, Human
acccccaaaacugaucacauaacacaa

SEQ ID NO: 375900 - RNA, 22 nt, Human
accucuuucuuaagacugcagu

SEQ ID NO: 375901 - RNA, 25 nt, Human
agaaaaaacaaaacaaaauaaaaaa

SEQ ID NO: 375902 - RNA, 25 nt, Human
agaaagcaaaucuguacaaaaauac

SEQ ID NO: 375903 - RNA, 23 nt, Human
agaagaagaaaaaacaaaacaaa

SEQ ID NO: 375904 - RNA, 24 nt, Human
agaagaagaaaaaacaaaacaaaa

SEQ ID NO: 375905 - RNA, 26 nt, Human
agaagaagaagaaaaaacaaaacaaa

SEQ ID NO: 375906 - RNA, 22 nt, Human
agcaaaguuaacccccaaaacu

SEQ ID NO: 375907 - RNA, 18 nt, Human
aggaagaagaagaagaag

SEQ ID NO: 375908 - RNA, 27 nt, Human
auuggaaaaaaaaaaaaaaaaaagaau

SEQ ID NO: 375909 - RNA, 21 nt, Human
caaaaaaacacaaauguccaa

SEQ ID NO: 375910 - RNA, 24 nt, Human
caaaaaaacacaaauguccaaagg

SEQ ID NO: 375911 - RNA, 24 nt, Human
caaacaaaacacgaacacaaacca

SEQ ID NO: 375912 - RNA, 23 nt, Human
caaacaggcagagagauuuagca

SEQ ID NO: 375913 - RNA, 25 nt, Human
caaacaggcagagagauuuagcacu

SEQ ID NO: 375914 - RNA, 21 nt, Human
caaaguuaacccccaaaacug

SEQ ID NO: 375915 - RNA, 18 nt, Human
caaaugacucagugauac

SEQ ID NO: 375916 - RNA, 18 nt, Human
caacaaaaacaacaaaga

SEQ ID NO: 375917 - RNA, 28 nt, Human
caacaaaaacaacaaagaaaaaagggau

SEQ ID NO: 375918 - RNA, 22 nt, Human
caacaaccuauuuuaaagaagg

SEQ ID NO: 375919 - RNA, 25 nt, Human
caacaggauuuuuuuuuucuuuuug

SEQ ID NO: 375920 - RNA, 20 nt, Human
caagguguuuuucucuucuu

SEQ ID NO: 375921 - RNA, 21 nt, Human
caaguuuccaguuuguuuuca

SEQ ID NO: 375922 - RNA, 21 nt, Human
cacacacacacacaauauaag

SEQ ID NO: 375923 - RNA, 22 nt, Human
cacacacacacccacacacaca

SEQ ID NO: 375924 - RNA, 24 nt, Human
cacacacacacccacacacacaca

SEQ ID NO: 375925 - RNA, 26 nt, Human
cacacacacccacacacacacacaau

SEQ ID NO: 375926 - RNA, 25 nt, Human
cacacacccacacacacacacaaua

SEQ ID NO: 375927 - RNA, 27 nt, Human
cacacacccacacacacacacaauaua

SEQ ID NO: 375928 - RNA, 25 nt, Human
cacacugaucacacgauucuccauc

SEQ ID NO: 375929 - RNA, 29 nt, Human
caccccuucucuucuccuccugcaaagaa

SEQ ID NO: 375930 - RNA, 26 nt, Human
cagaaaacacugcaaaugacucagug

SEQ ID NO: 375931 - RNA, 19 nt, Human
cagaacagauuucaucucc

SEQ ID NO: 375932 - RNA, 21 nt, Human
cagagcgagcaggcaucugcc

SEQ ID NO: 375933 - RNA, 19 nt, Human
cagcugcccgcuccaagug

SEQ ID NO: 375934 - RNA, 20 nt, Human
caguaauuaagauuaagguc

SEQ ID NO: 375935 - RNA, 23 nt, Human
ccacaaguggguaaugcgcuugg

SEQ ID NO: 375936 - RNA, 24 nt, Human
ccacacacacacacaauauaaggc

SEQ ID NO: 375937 - RNA, 22 nt, Human
ccacagcaguaauuaagauuaa

SEQ ID NO: 375938 - RNA, 19 nt, Human
ccagucaguuucgagcucc

SEQ ID NO: 375939 - RNA, 30 nt, Human
cccacacacacacacaauauaaggcagccc

SEQ ID NO: 375940 - RNA, 21 nt, Human
cccauaauugcaaaauaaggc

SEQ ID NO: 375941 - RNA, 22 nt, Human
ccccuccagguagccucccuca

SEQ ID NO: 375942 - RNA, 23 nt, Human
ccuccagguagccucccucacuc

SEQ ID NO: 375943 - RNA, 27 nt, Human
ccuccugcaaagaaaaguuuccggggu

SEQ ID NO: 375944 - RNA, 24 nt, Human
cgaacacaaaccaaagcuuuuacc

SEQ ID NO: 375945 - RNA, 26 nt, Human
cgaauuggagaggaggaggaggggag

SEQ ID NO: 375946 - RNA, 22 nt, Human
cgccacugaaguuuccagucag

SEQ ID NO: 375947 - RNA, 21 nt, Human
cgcgggcccggggcagggggc

SEQ ID NO: 375948 - RNA, 19 nt, Human
cgcgggcuccucuccccuc

SEQ ID NO: 375949 - RNA, 19 nt, Human
cgcgucggccggcuaccgc

SEQ ID NO: 375950 - RNA, 19 nt, Human
cggcugcccggaugcggag

SEQ ID NO: 375951 - RNA, 23 nt, Human
cgggaaaggcgagaagccgcggc

SEQ ID NO: 375952 - RNA, 24 nt, Human
cgggaaaggcgagaagccgcggcg

SEQ ID NO: 375953 - RNA, 22 nt, Human
cgggcccggggcagggggcugg

SEQ ID NO: 375954 - RNA, 23 nt, Human
cuccuuaaaucgcaaagccugag

SEQ ID NO: 375955 - RNA, 22 nt, Human
gaaaaagagcaaaagugggggc

SEQ ID NO: 375956 - RNA, 18 nt, Human
gaacauaauuuaacaaca

SEQ ID NO: 375957 - RNA, 19 nt, Human
gaagaagaagaagaagaaa

SEQ ID NO: 375958 - RNA, 22 nt, Human
gaagaagaagaagaagaaaaaa

SEQ ID NO: 375959 - RNA, 18 nt, Human
gaaggcgcgggguggcca

SEQ ID NO: 375960 - RNA, 18 nt, Human
gagaagauguagagaaau

SEQ ID NO: 375961 - RNA, 18 nt, Human
gagaagccgcggcggcuc

SEQ ID NO: 375962 - RNA, 20 nt, Human
gagaggcacaggugacagag

SEQ ID NO: 375963 - RNA, 20 nt, Human
gagcaggcaucugccuucca

SEQ ID NO: 375964 - RNA, 19 nt, Human
gaggcgaauuggagaggag

SEQ ID NO: 375965 - RNA, 23 nt, Human
gcaaaguuaacccccaaaacuga

SEQ ID NO: 375966 - RNA, 21 nt, Human
gcaaguggaaugucuugaagg

SEQ ID NO: 375967 - RNA, 27 nt, Human
gcaccccuucucuucuccuccugcaaa

SEQ ID NO: 375968 - RNA, 20 nt, Human
gccgggaaaggcgagaagcc

SEQ ID NO: 375969 - RNA, 21 nt, Human
gcgggcuccucuccccucggc

SEQ ID NO: 375970 - RNA, 19 nt, Human
ggaagcuggcgcgucggcc

SEQ ID NO: 375971 - RNA, 21 nt, Human
ggaggaaaaagagcaaaagug

SEQ ID NO: 375972 - RNA, 22 nt, Human
ggaggaggggaggaaaaagagc

SEQ ID NO: 375973 - RNA, 24 nt, Human
ggaggcgaauuggagaggaggagg

SEQ ID NO: 375974 - RNA, 18 nt, Human
ggcagaaaacacugcaaa

SEQ ID NO: 375975 - RNA, 20 nt, Human
ggcccggggcagggggcugg

SEQ ID NO: 375976 - RNA, 20 nt, Human
ggcugggagggaaacaagug

SEQ ID NO: 375977 - RNA, 20 nt, Human
ggcugguggccgggaaaggc

SEQ ID NO: 375978 - RNA, 21 nt, Human
gggaggaaaaagagcaaaagu

SEQ ID NO: 375979 - RNA, 21 nt, Human
gggcugguggccgggaaaggc

SEQ ID NO: 375980 - RNA, 22 nt, Human
ggggcugggagggaaacaagug

SEQ ID NO: 375981 - RNA, 24 nt, Human
gggggaggcgaauuggagaggagg

SEQ ID NO: 375982 - RNA, 19 nt, Human
gggggcugguggccgggaa

SEQ ID NO: 375983 - RNA, 18 nt, Human
gugggcugauccccucca

SEQ ID NO: 375984 - RNA, 25 nt, Human
guuaacccccaaaacugaucacaua

SEQ ID NO: 375985 - RNA, 27 nt, Human
uaaaaaaacaaaaaaacacaaaugucc

SEQ ID NO: 375986 - RNA, 18 nt, Human
uaaaaagcaauccucaaa

SEQ ID NO: 375987 - RNA, 21 nt, Human
uaaaaagcaauccucaaacuc

SEQ ID NO: 375988 - RNA, 22 nt, Human
uaaagcuuaccaaaugcuucuc

SEQ ID NO: 375989 - RNA, 26 nt, Human
uaaagcuuaccaaaugcuucucuaga

SEQ ID NO: 375990 - RNA, 19 nt, Human
uaaaucgcaaagccugagg

SEQ ID NO: 375991 - RNA, 18 nt, Human
uaagcaaaguuaaccccc

SEQ ID NO: 375992 - RNA, 21 nt, Human
uaagcaaaguuaacccccaaa

SEQ ID NO: 375993 - RNA, 26 nt, Human
uacaaaaaaagaaacaaguuuccagu

SEQ ID NO: 375994 - RNA, 24 nt, Human
uacaaaguccaaacaggcagagag

SEQ ID NO: 375995 - RNA, 23 nt, Human
uacccuuugaggaaagcuccaac

SEQ ID NO: 375996 - RNA, 23 nt, Human
uaguuuagcuguuggaaaaauaa

SEQ ID NO: 375997 - RNA, 24 nt, Human
uauacaaaaaaagaaacaaguuuc

SEQ ID NO: 375998 - RNA, 18 nt, Human
uaucauaaagcuuaccaa

SEQ ID NO: 375999 - RNA, 18 nt, Human
ucaaaacacacacacacc

SEQ ID NO: 376000 - RNA, 21 nt, Human
ucaaaacacacacacacccac

SEQ ID NO: 376001 - RNA, 22 nt, Human
ucacagcugcccgcuccaagug

SEQ ID NO: 376002 - RNA, 24 nt, Human
uccaagagaagauguagagaaaua

SEQ ID NO: 376003 - RNA, 19 nt, Human
ucgaggcgcgggcuccucu

SEQ ID NO: 376004 - RNA, 24 nt, Human
ucgcaaagccugaggaauuaagca

SEQ ID NO: 376005 - RNA, 23 nt, Human
ucuagccacagcaguaauuaaga

SEQ ID NO: 376006 - RNA, 21 nt, Human
ucuguacaaaaauacucuggu

SEQ ID NO: 376007 - RNA, 22 nt, Human
ucuuaaguuacagaaguaucuu

SEQ ID NO: 376008 - RNA, 23 nt, Human
ucuuaaguuacagaaguaucuuu

SEQ ID NO: 376009 - RNA, 24 nt, Human
ugaaacaaacaaaacacgaacaca

SEQ ID NO: 376010 - RNA, 19 nt, Human
ugaagguuaacugcuggug

SEQ ID NO: 376011 - RNA, 20 nt, Human
ugaagguuaacugcuggugu

SEQ ID NO: 376012 - RNA, 19 nt, Human
ugacagagcgagcaggcau

SEQ ID NO: 376013 - RNA, 21 nt, Human
ugagaggcacaggugacagag

SEQ ID NO: 376014 - RNA, 24 nt, Human
ugauacacuacauuugcaaucucu

SEQ ID NO: 376015 - RNA, 21 nt, Human
ugcaaagaaaaguuuccgggg

SEQ ID NO: 376016 - RNA, 21 nt, Human
ugcuccauuuagccaagguug

SEQ ID NO: 376017 - RNA, 19 nt, Human
uggaaaaaaaaaaaaaaaa

SEQ ID NO: 376018 - RNA, 24 nt, Human
uggagaggaggaggaggggaggaa

SEQ ID NO: 376019 - RNA, 18 nt, Human
uggccaguucacagcugc

SEQ ID NO: 376020 - RNA, 27 nt, Human
uggcgagucuccgcgccacugaaguuu

SEQ ID NO: 376021 - RNA, 20 nt, Human
uggggcugggagggaaacaa

SEQ ID NO: 376022 - RNA, 23 nt, Human
uggggcugggagggaaacaagug

SEQ ID NO: 376023 - RNA, 21 nt, Human
ugguugcaagaaaagcuaggg

SEQ ID NO: 376024 - RNA, 21 nt, Human
ugucaaaacacacacacaccc

SEQ ID NO: 376025 - RNA, 23 nt, Human
ugugucaaaacacacacacagug

SEQ ID NO: 376026 - RNA, 31 nt, Human
uuaaaugucuuuaaggaagaagaagaagaaa

SEQ ID NO: 376027 - RNA, 19 nt, Human
uuaaauguuaauacaacag

SEQ ID NO: 376028 - RNA, 21 nt, Human
uuaacccccaaaacugaucac

SEQ ID NO: 376029 - RNA, 24 nt, Human
uuaacccccaaaacugaucacaua

SEQ ID NO: 376030 - RNA, 19 nt, Human
uuaaggaagaagaagaaga

SEQ ID NO: 376031 - RNA, 21 nt, Human
uuaaggaagaagaagaagaaa

SEQ ID NO: 376032 - RNA, 23 nt, Human
uuauacaaaaaaagaaacaaguu

SEQ ID NO: 376033 - RNA, 22 nt, Human
uucaacaaaaacaacaaagaaa

SEQ ID NO: 376034 - RNA, 20 nt, Human
uucgcugcuccauuuagcca

SEQ ID NO: 376035 - RNA, 23 nt, Human
uucgcugcuccauuuagccaagg

SEQ ID NO: 376036 - RNA, 20 nt, Human
uucuccaucauccuccacgc

SEQ ID NO: 376037 - RNA, 22 nt, Human
uucuccaucauccuccacgcuu

SEQ ID NO: 376038 - RNA, 20 nt, Human
uuguaaacaauaauauacaa

SEQ ID NO: 376039 - RNA, 18 nt, Human
uuuauacagaaauugaag

SEQ ID NO: 376040 - RNA, 18 nt, Human
auuucauccauggaguga

SEQ ID NO: 376041 - RNA, 21 nt, Human
cacuugggccccaguggcagc

SEQ ID NO: 376042 - RNA, 21 nt, Human
caguggcagcaaacugcagcu

SEQ ID NO: 376043 - RNA, 24 nt, Human
ccaacuccuuuuucaauuuucacc

SEQ ID NO: 376044 - RNA, 18 nt, Human
ccagaaccauccugcugc

SEQ ID NO: 376045 - RNA, 24 nt, Human
cugcugcacuugggccccaguggc

SEQ ID NO: 376046 - RNA, 19 nt, Human
ggccccaguggcagcaaac

SEQ ID NO: 376047 - RNA, 23 nt, Human
uaggcaucacuccagguaguccu

SEQ ID NO: 376048 - RNA, 22 nt, Human
ucaauuuucaccacagcuguca

SEQ ID NO: 376049 - RNA, 23 nt, Human
uccugcugcacuugggccccagu

SEQ ID NO: 376050 - RNA, 24 nt, Human
ugccaccaacuccuuuuucaauuu

SEQ ID NO: 376051 - RNA, 19 nt, Human
uggcagcaaacugcagcug

SEQ ID NO: 376052 - RNA, 24 nt, Human
ugucauuucauccauggagugauc

SEQ ID NO: 376053 - RNA, 22 nt, Human
aacauucuuaugacaaugguua

SEQ ID NO: 376054 - RNA, 27 nt, Human
aagaaccugcuuuaaauuuccaugcca

SEQ ID NO: 376055 - RNA, 18 nt, Human
aagcuacaucagagacaa

SEQ ID NO: 376056 - RNA, 22 nt, Human
acaagaaaaaaacugcacuaga

SEQ ID NO: 376057 - RNA, 19 nt, Human
acaguguacgguuuaaaaa

SEQ ID NO: 376058 - RNA, 20 nt, Human
acuguuuuuuuuuuuugcaa

SEQ ID NO: 376059 - RNA, 22 nt, Human
agacaagaaaaaaacugcacua

SEQ ID NO: 376060 - RNA, 23 nt, Human
agacaagaaaaaaacugcacuag

SEQ ID NO: 376061 - RNA, 21 nt, Human
aggacagggcuaucugaagac

SEQ ID NO: 376062 - RNA, 26 nt, Human
aucagagacaacugaaggugaaaaaa

SEQ ID NO: 376063 - RNA, 20 nt, Human
caaaaccaaaacaguuacuu

SEQ ID NO: 376064 - RNA, 21 nt, Human
caaaaccaaaacaguuacuuu

SEQ ID NO: 376065 - RNA, 19 nt, Human
caacaaaacagcugcaacu

SEQ ID NO: 376066 - RNA, 23 nt, Human
caagaaaaaaacugcacuagaag

SEQ ID NO: 376067 - RNA, 20 nt, Human
cacccuaggcccugcguggg

SEQ ID NO: 376068 - RNA, 22 nt, Human
ccaggacagggcuaucugaaga

SEQ ID NO: 376069 - RNA, 22 nt, Human
cccuaggcccugcgugggccuc

SEQ ID NO: 376070 - RNA, 21 nt, Human
ccuugucuacacaguucccuc

SEQ ID NO: 376071 - RNA, 21 nt, Human
gaaaaaaacugcacuagaagc

SEQ ID NO: 376072 - RNA, 26 nt, Human
gaaccugcuuuaaauuuccaugccaa

SEQ ID NO: 376073 - RNA, 18 nt, Human
gcacuaacaagaaccugc

SEQ ID NO: 376074 - RNA, 24 nt, Human
gcauaaguucaauaauaaucuguu

SEQ ID NO: 376075 - RNA, 23 nt, Human
gcauucagaaugucaacaaaaca

SEQ ID NO: 376076 - RNA, 18 nt, Human
gccaauuuacaaccccca

SEQ ID NO: 376077 - RNA, 22 nt, Human
gcugugcacuaacaagaaccug

SEQ ID NO: 376078 - RNA, 18 nt, Human
uaaaaggagugaguugug

SEQ ID NO: 376079 - RNA, 18 nt, Human
uaaauaccaccaggacag

SEQ ID NO: 376080 - RNA, 20 nt, Human
uaacaagaaccugcuuuaaa

SEQ ID NO: 376081 - RNA, 20 nt, Human
uaacagaacaacaaauguuu

SEQ ID NO: 376082 - RNA, 21 nt, Human
uaacaggacagauuggaaaca

SEQ ID NO: 376083 - RNA, 20 nt, Human
uaauagaacauggaagaaga

SEQ ID NO: 376084 - RNA, 24 nt, Human
uaauagaacauggaagaagacuga

SEQ ID NO: 376085 - RNA, 23 nt, Human
uacaaaaaaacacaguguacggu

SEQ ID NO: 376086 - RNA, 24 nt, Human
uaccuugucuacacaguucccuca

SEQ ID NO: 376087 - RNA, 22 nt, Human
uagaacauggaagaagacugac

SEQ ID NO: 376088 - RNA, 18 nt, Human
ugaaggugaaaaaacuac

SEQ ID NO: 376089 - RNA, 19 nt, Human
ugacaagauuguuuugagg

SEQ ID NO: 376090 - RNA, 21 nt, Human
ugaccugguaccuugucuaca

SEQ ID NO: 376091 - RNA, 20 nt, Human
uggaagaagacugaccuggu

SEQ ID NO: 376092 - RNA, 21 nt, Human
uggaagaagacugaccuggua

SEQ ID NO: 376093 - RNA, 21 nt, Human
uggaagaagacugaccuggua

SEQ ID NO: 376094 - RNA, 21 nt, Human
ugguuauuugcauaaguucaa

SEQ ID NO: 376095 - RNA, 21 nt, Human
uucauaaacauucuuaugaca

SEQ ID NO: 376096 - RNA, 22 nt, Human
uucauaaacauucuuaugacaa

SEQ ID NO: 376097 - RNA, 22 nt, Human
uucccacccuaggcccugcgug

SEQ ID NO: 376098 - RNA, 22 nt, Human
uuuuguuuucaaaagucaagaa

SEQ ID NO: 376099 - RNA, 20 nt, Human
uuuuuuuuuuuuuugaugga

SEQ ID NO: 376100 - RNA, 18 nt, Human
uuuuuuuuuuuuuuuuug

SEQ ID NO: 376101 - RNA, 22 nt, Human
uuuuuuuuuuuuuuuuugaugg

SEQ ID NO: 376102 - RNA, 23 nt, Human
acuuuuaaagguaaaaagaaaga

SEQ ID NO: 376103 - RNA, 18 nt, Human
agggucccaucagcugaa

SEQ ID NO: 376104 - RNA, 19 nt, Human
auggugacugagaggguag

SEQ ID NO: 376105 - RNA, 21 nt, Human
caucccagacucacuggcaau

SEQ ID NO: 376106 - RNA, 22 nt, Human
caucccagacucacuggcaauc

SEQ ID NO: 376107 - RNA, 24 nt, Human
cccuuuccaggggcugggacaggg

SEQ ID NO: 376108 - RNA, 19 nt, Human
ccugccccuuuccaggggc

SEQ ID NO: 376109 - RNA, 22 nt, Human
cguuccugccccuuuccagggg

SEQ ID NO: 376110 - RNA, 21 nt, Human
cuccagacagggaaagucugc

SEQ ID NO: 376111 - RNA, 19 nt, Human
cuuggaaacucagaagcuc

SEQ ID NO: 376112 - RNA, 25 nt, Human
gagccuccagacagggaaagucucc

SEQ ID NO: 376113 - RNA, 21 nt, Human
gccagggucccaucagcugaa

SEQ ID NO: 376114 - RNA, 19 nt, Human
gccaugcccaaauguggag

SEQ ID NO: 376115 - RNA, 20 nt, Human
gggaaagucugcaacauggu

SEQ ID NO: 376116 - RNA, 21 nt, Human
gggaaagucugcaacauggug

SEQ ID NO: 376117 - RNA, 23 nt, Human
ggguuuggguccugagggcagcc

SEQ ID NO: 376118 - RNA, 18 nt, Human
gugucuggguuugggucc

SEQ ID NO: 376119 - RNA, 19 nt, Human
gugucuggguuuggguccu

SEQ ID NO: 376120 - RNA, 24 nt, Human
ucauuugcuuccccaucccaaauu

SEQ ID NO: 376121 - RNA, 24 nt, Human
ucccagacucacuggcaaucaaca

SEQ ID NO: 376122 - RNA, 22 nt, Human
ucuggguuuggguccugagggc

SEQ ID NO: 376123 - RNA, 19 nt, Human
ugaagugucuggguuuggg

SEQ ID NO: 376124 - RNA, 24 nt, Human
ugagccuccagacagggaaagucu

SEQ ID NO: 376125 - RNA, 23 nt, Human
ugcccaaauguggaggugacuca

SEQ ID NO: 376126 - RNA, 21 nt, Human
uggagggugugauaauccuau

SEQ ID NO: 376127 - RNA, 24 nt, Human
ugucuggguuuggguccugagggc

SEQ ID NO: 376128 - RNA, 25 nt, Human
uuaauuuuuauuuuagagucauuug

SEQ ID NO: 376129 - RNA, 24 nt, Human
uuccugccccuuuccaggggcugg

SEQ ID NO: 376130 - RNA, 21 nt, Human
uuuaaagguaaaaagaaagaa

SEQ ID NO: 376131 - RNA, 26 nt, Human
uuuagagucauuugcuuccccauccc

SEQ ID NO: 376132 - RNA, 24 nt, Human
uuuuuuuuuuuuuuuugagcuuuu

SEQ ID NO: 376133 - RNA, 18 nt, Human
uuuuuuuuuuuuuuuuug

SEQ ID NO: 376134 - RNA, 24 nt, Human
aaaaaagacuuaaaaaaauaucau

SEQ ID NO: 376135 - RNA, 27 nt, Human
aaaaagaaaauacagcauaauaaaaaa

SEQ ID NO: 376136 - RNA, 19 nt, Human
aaaaauaaccacaaugaau

SEQ ID NO: 376137 - RNA, 26 nt, Human
aaacauacgcuucucaauuaaaugua

SEQ ID NO: 376138 - RNA, 21 nt, Human
aacauucucuuaccacccaaa

SEQ ID NO: 376139 - RNA, 22 nt, Human
aacuguauagcucuuacaagac

SEQ ID NO: 376140 - RNA, 22 nt, Human
aagaaaaaaaaauaguguuuua

SEQ ID NO: 376141 - RNA, 27 nt, Human
aagaaaagggauaauucacuauaacau

SEQ ID NO: 376142 - RNA, 22 nt, Human
aagaggcacauuagcaacuacu

SEQ ID NO: 376143 - RNA, 26 nt, Human
aagcaaaaaaggaaaaugagggaccc

SEQ ID NO: 376144 - RNA, 23 nt, Human
aagcaaaaaaggaaaaugauuga

SEQ ID NO: 376145 - RNA, 21 nt, Human
aaguaaagccuacacuaugua

SEQ ID NO: 376146 - RNA, 25 nt, Human
aauauaaacaauaauuaaaaaauaa

SEQ ID NO: 376147 - RNA, 22 nt, Human
acaaaacccaugcaauuuuacc

SEQ ID NO: 376148 - RNA, 25 nt, Human
acacucacacgcgcacaaaaaggcg

SEQ ID NO: 376149 - RNA, 21 nt, Human
acauugguuauauugcccaac

SEQ ID NO: 376150 - RNA, 24 nt, Human
acccaaaugccucaacuuauacau

SEQ ID NO: 376151 - RNA, 23 nt, Human
accuuauuuuuuugguccuccaa

SEQ ID NO: 376152 - RNA, 22 nt, Human
acgcuggggcccacacucacac

SEQ ID NO: 376153 - RNA, 18 nt, Human
agacaaaaaaaaaaaaga

SEQ ID NO: 376154 - RNA, 22 nt, Human
agacugacuaccuagacaaaaa

SEQ ID NO: 376155 - RNA, 21 nt, Human
agagagggagacagggggagg

SEQ ID NO: 376156 - RNA, 21 nt, Human
agagagggagacagggggagg

SEQ ID NO: 376157 - RNA, 22 nt, Human
agauaaauaccaacauguucuc

SEQ ID NO: 376158 - RNA, 18 nt, Human
agcagaagguguuccaga

SEQ ID NO: 376159 - RNA, 21 nt, Human
agcggccagcagagcgagcgg

SEQ ID NO: 376160 - RNA, 19 nt, Human
agggaagaagcaaaaaagg

SEQ ID NO: 376161 - RNA, 18 nt, Human
agggggaggggguggcgg

SEQ ID NO: 376162 - RNA, 20 nt, Human
agggggaggggguggcgguu

SEQ ID NO: 376163 - RNA, 21 nt, Human
aguaccuacaaaacccaugca

SEQ ID NO: 376164 - RNA, 18 nt, Human
auaaaaauaaccacaaug

SEQ ID NO: 376165 - RNA, 24 nt, Human
auaaacaauaauuaaaaaauaaaa

SEQ ID NO: 376166 - RNA, 22 nt, Human
auauacuauggaauaucauaca

SEQ ID NO: 376167 - RNA, 20 nt, Human
caaaagaaaaaaaaauagug

SEQ ID NO: 376168 - RNA, 18 nt, Human
caccccggcuccccgguc

SEQ ID NO: 376169 - RNA, 21 nt, Human
caccccggcuccccgguccgc

SEQ ID NO: 376170 - RNA, 23 nt, Human
caccccggcuccccgguccgcgg

SEQ ID NO: 376171 - RNA, 19 nt, Human
cagacugacuaccuagaca

SEQ ID NO: 376172 - RNA, 22 nt, Human
ccaaguuacugucaauccaaaa

SEQ ID NO: 376173 - RNA, 19 nt, Human
ccagcccgcgcucuccucc

SEQ ID NO: 376174 - RNA, 21 nt, Human
cccaaagaaucuagaucgaca

SEQ ID NO: 376175 - RNA, 22 nt, Human
cccacacucacacgcgcacaaa

SEQ ID NO: 376176 - RNA, 23 nt, Human
cccccauuaucugaagagccugu

SEQ ID NO: 376177 - RNA, 18 nt, Human
ccccgccgacugcgcccg

SEQ ID NO: 376178 - RNA, 26 nt, Human
ccccgcuccaagcaccccggcucccc

SEQ ID NO: 376179 - RNA, 19 nt, Human
cccgggcaagcgccagccc

SEQ ID NO: 376180 - RNA, 22 nt, Human
ccgccuuccgcccggaacccac

SEQ ID NO: 376181 - RNA, 21 nt, Human
ccuccuccuccuccugguccc

SEQ ID NO: 376182 - RNA, 21 nt, Human
cgccuuccgcccggaacccac

SEQ ID NO: 376183 - RNA, 18 nt, Human
cggcggcgggggccccgg

SEQ ID NO: 376184 - RNA, 22 nt, Human
cgggcaagcgccagcccgcgcu

SEQ ID NO: 376185 - RNA, 23 nt, Human
cuauaacauucucuuaccaccca

SEQ ID NO: 376186 - RNA, 23 nt, Human
cuccuccuccuccuccugguccc

SEQ ID NO: 376187 - RNA, 23 nt, Human
cugcgcgccgggccuccgccuuc

SEQ ID NO: 376188 - RNA, 20 nt, Human
cugcggcggccgccuccucc

SEQ ID NO: 376189 - RNA, 19 nt, Human
cugcugacuggaucugugg

SEQ ID NO: 376190 - RNA, 24 nt, Human
cuggggcccacacucacacgcgca

SEQ ID NO: 376191 - RNA, 19 nt, Human
cuuaggaacaauauucuuc

SEQ ID NO: 376192 - RNA, 19 nt, Human
cuucaaaaugacaaauuga

SEQ ID NO: 376193 - RNA, 23 nt, Human
gaaccaccaauugcaacucccug

SEQ ID NO: 376194 - RNA, 22 nt, Human
gaacccacccccgggagggcac

SEQ ID NO: 376195 - RNA, 18 nt, Human
gaauaucauacaaaguaa

SEQ ID NO: 376196 - RNA, 24 nt, Human
gacuggaucugugguaucacuuga

SEQ ID NO: 376197 - RNA, 23 nt, Human
gagagggagacagggggaggggg

SEQ ID NO: 376198 - RNA, 18 nt, Human
gcacaggaaguacgacuc

SEQ ID NO: 376199 - RNA, 26 nt, Human
gccagcccacgccuggcgucccccgc

SEQ ID NO: 376200 - RNA, 21 nt, Human
gcccacacucacacgcgcaca

SEQ ID NO: 376201 - RNA, 19 nt, Human
ggucccgccgccagcccac

SEQ ID NO: 376202 - RNA, 21 nt, Human
guaugagauucuggauguuag

SEQ ID NO: 376203 - RNA, 23 nt, Human
uaaaaaacauacgcuucucaaag

SEQ ID NO: 376204 - RNA, 23 nt, Human
uaaaaaauaaaaagaaaauacag

SEQ ID NO: 376205 - RNA, 27 nt, Human
uaaaaagaaaauacagcauaauaaaaa

SEQ ID NO: 376206 - RNA, 24 nt, Human
uacaugauggcuuuuaaggcccug

SEQ ID NO: 376207 - RNA, 20 nt, Human
uaccaacauguucucauuuu

SEQ ID NO: 376208 - RNA, 24 nt, Human
uaccuagacaaaaaaaaaaaagac

SEQ ID NO: 376209 - RNA, 22 nt, Human
uacuauggaauaucauacaaag

SEQ ID NO: 376210 - RNA, 22 nt, Human
uagcagaagguguuccagaggc

SEQ ID NO: 376211 - RNA, 24 nt, Human
uauaacauucucuuaccacccaaa

SEQ ID NO: 376212 - RNA, 20 nt, Human
uaucugaagagccugugaaa

SEQ ID NO: 376213 - RNA, 26 nt, Human
uaucugaagagccugugaaaccaauu

SEQ ID NO: 376214 - RNA, 21 nt, Human
ucacacgcgcacaaaaaggcg

SEQ ID NO: 376215 - RNA, 25 nt, Human
ucacuauaacauucucuuaccaccc

SEQ ID NO: 376216 - RNA, 22 nt, Human
ucauuucuucuagauuccaaaa

SEQ ID NO: 376217 - RNA, 20 nt, Human
uccaaaaguaccuacaaaac

SEQ ID NO: 376218 - RNA, 23 nt, Human
uccaaaaguaccuacaaaaccca

SEQ ID NO: 376219 - RNA, 18 nt, Human
uccagaggcaaguaaggu

SEQ ID NO: 376220 - RNA, 20 nt, Human
ucccccgcuccaagcacccc

SEQ ID NO: 376221 - RNA, 18 nt, Human
uccccgccgacugcgccc

SEQ ID NO: 376222 - RNA, 22 nt, Human
ucccgccgccagcccacgccug

SEQ ID NO: 376223 - RNA, 21 nt, Human
ucccugaaccuggacuugacc

SEQ ID NO: 376224 - RNA, 20 nt, Human
uccuccaauagucaagaaaa

SEQ ID NO: 376225 - RNA, 21 nt, Human
ucuuaagaauaacaaaugaac

SEQ ID NO: 376226 - RNA, 18 nt, Human
ugaagagccugugaaacc

SEQ ID NO: 376227 - RNA, 22 nt, Human
ugaauaaguauuuguguaauau

SEQ ID NO: 376228 - RNA, 22 nt, Human
ugaccaggaaaagaugaaccac

SEQ ID NO: 376229 - RNA, 22 nt, Human
ugggagacaugguuuuuggaaa

SEQ ID NO: 376230 - RNA, 26 nt, Human
ugguccuccaauagucaagacccguc

SEQ ID NO: 376231 - RNA, 23 nt, Human
uggugcaacggaaaauauuuguu

SEQ ID NO: 376232 - RNA, 21 nt, Human
uggugcuccuccuaacugugc

SEQ ID NO: 376233 - RNA, 21 nt, Human
uguauagcucuuacaagacca

SEQ ID NO: 376234 - RNA, 24 nt, Human
uguauagcucuuacaagaccagca

SEQ ID NO: 376235 - RNA, 19 nt, Human
ugugcagaagccaaaucac

SEQ ID NO: 376236 - RNA, 20 nt, Human
ugugcagaagccaaaucacc

SEQ ID NO: 376237 - RNA, 19 nt, Human
uguuacacuuuacugguaa

SEQ ID NO: 376238 - RNA, 22 nt, Human
uucacuauaacauucucuuacc

SEQ ID NO: 376239 - RNA, 19 nt, Human
uucaucuuuuauaguugua

SEQ ID NO: 376240 - RNA, 20 nt, Human
uucuugauuuauacccccau

SEQ ID NO: 376241 - RNA, 21 nt, Human
uugaacacuggacacuguacc

SEQ ID NO: 376242 - RNA, 21 nt, Human
uugaugcauuugguuagacua

SEQ ID NO: 376243 - RNA, 24 nt, Human
uuucgcacaggaaguacgacucgg

SEQ ID NO: 376244 - RNA, 25 nt, Human
uuugaccaggaaaagaugaaccacc

SEQ ID NO: 376245 - RNA, 26 nt, Human
aacuaucuguuuucugugcuauagag

SEQ ID NO: 376246 - RNA, 21 nt, Human
aagaagccaagaaugaaaaca

SEQ ID NO: 376247 - RNA, 22 nt, Human
acccuggaauacuuaaagaagc

SEQ ID NO: 376248 - RNA, 18 nt, Human
agaagccaagaaugaaaa

SEQ ID NO: 376249 - RNA, 22 nt, Human
agaagccaagaaugaaaacaua

SEQ ID NO: 376250 - RNA, 19 nt, Human
agccaagaaugaaaacaua

SEQ ID NO: 376251 - RNA, 21 nt, Human
cacaggcucugccucuuuuuc

SEQ ID NO: 376252 - RNA, 24 nt, Human
ccagccugcaaacuacuaagggga

SEQ ID NO: 376253 - RNA, 19 nt, Human
ccuggaauacuuaaagaag

SEQ ID NO: 376254 - RNA, 21 nt, Human
cgaggcgggaggagaggccgg

SEQ ID NO: 376255 - RNA, 23 nt, Human
cuggcacaggcucugccucuuuu

SEQ ID NO: 376256 - RNA, 24 nt, Human
cugggauagaggugggugggggug

SEQ ID NO: 376257 - RNA, 18 nt, Human
cugugcuauagagaaaaa

SEQ ID NO: 376258 - RNA, 18 nt, Human
gaauacuuaaagaagcca

SEQ ID NO: 376259 - RNA, 21 nt, Human
gaggugggugggggugggggc

SEQ ID NO: 376260 - RNA, 20 nt, Human
gauauuaagagaugggaaga

SEQ ID NO: 376261 - RNA, 23 nt, Human
gcuguagcuggcacaggcucugc

SEQ ID NO: 376262 - RNA, 24 nt, Human
ggaagauucuguauaaagguuaug

SEQ ID NO: 376263 - RNA, 18 nt, Human
ggggugggggcgaggcgg

SEQ ID NO: 376264 - RNA, 21 nt, Human
uaacaggacaaacccucagac

SEQ ID NO: 376265 - RNA, 23 nt, Human
uaagagaugggaagauucuguau

SEQ ID NO: 376266 - RNA, 19 nt, Human
uacaacuuauaguauggag

SEQ ID NO: 376267 - RNA, 21 nt, Human
uagcuggcacaggcucugccu

SEQ ID NO: 376268 - RNA, 24 nt, Human
uauaacaaaguacuuucaaagaaa

SEQ ID NO: 376269 - RNA, 23 nt, Human
uauauuuccaaacaacuacaacu

SEQ ID NO: 376270 - RNA, 19 nt, Human
uaucuguuuucugugcuau

SEQ ID NO: 376271 - RNA, 24 nt, Human
ucaguuaacuaucuguuuucugug

SEQ ID NO: 376272 - RNA, 23 nt, Human
ugcuuuuuguauuuuuuaaaauu

SEQ ID NO: 376273 - RNA, 22 nt, Human
uggaauacuuaaagaagccaag

SEQ ID NO: 376274 - RNA, 21 nt, Human
uggaggaaauacuuuucuguu

SEQ ID NO: 376275 - RNA, 19 nt, Human
uggcacaggcucugccucu

SEQ ID NO: 376276 - RNA, 18 nt, Human
ugggauagaggugggugg

SEQ ID NO: 376277 - RNA, 18 nt, Human
ugugcuauagagaaaaag

SEQ ID NO: 376278 - RNA, 22 nt, Human
uuaacuaucuguuuucugugcu

SEQ ID NO: 376279 - RNA, 22 nt, Human
uuuccagauuuucaaaggugug

SEQ ID NO: 376280 - RNA, 24 nt, Human
aaauauuuauugaacaccuacuau

SEQ ID NO: 376281 - RNA, 22 nt, Human
aagcacccagggugggugggca

SEQ ID NO: 376282 - RNA, 23 nt, Human
aauauuuauugaacaccuacuau

SEQ ID NO: 376283 - RNA, 23 nt, Human
aauauuuauugaacaccuacuau

SEQ ID NO: 376284 - RNA, 24 nt, Human
aauggcagaaaaaaagucugcaga
